United States Patent Application Publication US 2005/0228172 A9 - sequence listing, part 70

SEQ ID NO: 305142 - DNA, 611 bp, Homo sapiens
agcctatgttcctataactactacttaaactatttaacatagagttatgagatgtcagggatagagactagaattgtttagcccagtgctttgactcctttaaaattccatcacatctatgaggtaccagacacccctgtcagaagtaacactgtttacctctcagtaacactagtttaccatggttgtgagtggagaaaaggcgattacagcatttggggaatggatggttttggagtaacttgttccattgatcaatcgatttgygtcaatatatcatacattgacgaattccctctcctatcccaatttctaaagcacagatctggtctaaccctcacattccacaggaagcagagacccagaaaagataaatgacttgcccaagagcatgtagcgagcctgtggcaaatcctggtctagagcccatatccctggacttaagccttagttttgtttgttcaagatcgtaataagtgatgatttatggaggttttttcctccattaaaaaaattttaccttgattatttattttttttttttttgagacagagtcttgctctgttgcccaggctggcgtgtagtggcgcgatctcggctcactgcaacc

SEQ ID NO: 305143 - DNA, 526 bp, Homo sapiens
agggcacagctctttgggggagggacaccaaggcaacaattaaatgcggcagcagcacttgccccctcccccatcataggaagcccctggggggtgggggaataaagaaagctggacttttatagtccttttgctgtgacccactccctcttaaagggattggaacacccctccttaaagggatctccagaaattatttgccccccaggcaaatcctagtgcagaagtctggtctttacctgcgggggccctcttccctagggatgaggaggtagaagtgctcctcctgactcttgagctggaggggcaaggtaccctcctaccaccaaggagccagctgttgagygcccagtgaggaacaggacctctccctcccctgaaggcaactacggccccggccttgggggtggggaggtcccggtgaggtagggactgtgtgggactcagtctccgcacaagaaggaacaagggggctgcatgcgctcagactttggggaacacatgtccatggcgctgtgtccaaaac

SEQ ID NO: 305144 - DNA, 551 bp, Homo sapiens
gcttggtaatgcactcttccccctccttgcaaaggcccgatttggttatgtctgagcagctggggagctttgcctcagatgcctcctgtggccccagtgccctggcagtcccagtatcggctgcctgctgtctgattgtccatggaaagcccagccagatggccgctgggccctggcagtgtaggatgtgagaccacmaagtcctgggcctggcttgcccctgcctcgtgcatgccagcttttgattgggagatcccaggagcttggatctataatcagaggtttctgggccctggataaggaaaggagagtccctctgattactggggggttctttaatttggttcttccttgtcgtcagctctcttgccagtggggcacaggcaggtgcaggggtgaggcaggatagctcccttgggtgaccaagggtagtaaataacctctgggggctgcccttctgctgggtggtggcctggtggtggggaatgaagggctactgggaacaagaaggcctgtttgcctcaaatctgcagagaaagcacctgggctca

SEQ ID NO: 305145 - DNA, 389 bp, Homo sapiens
gcagacttaaataagatccagggccttataacataataccaaaaaygttcaggataccacaaaaaaaaaaatcactcataccaaaaccagaaaaatttcaacttgagtaagaaaagagaatcaacagatgccaaacccaggatgacacagatgttagaattatctgaaaagaattttaagtagctatcataaaattacctcagtgagtaattatgaacatgcttgtaataaatgaaaaatatattttggaactgatgaatacaataaccaaaataaaaacttaatggatgtactcggcagcagaatggtaagaacagagggaagaatcattgaacttagaacaacagaaattactcactctgaacagagagtaatagacttaaaaactt

SEQ ID NO: 305146 - DNA, 626 bp, Homo sapiens
gtaattttgttacttactgccaaatttcacttcacaaggacacaccaaccagaaatatgtaattgttttaccatagcctcaccagcagtgtgcacagacattttggatttttgccaatctgaaggaaaaaaaaagatatcttagcatagtttccattttcatttgtcttgctgtaagtgaggctgagcatctttttatttatttaagggcaatttatatttatttttttgtgagtttagtttcctttttgtttttgctggtttacatattagattaatagttttttctcaattacttcaagaattttatgcattaaaaagagaataattttgtttatgattttaattgcatttttacactttgtcatcagtcttttgactttcatatactaatttttattaattaatgcatttatttgcaataagagttttctttaataacaaatytatcaactttttttatagcttctagattttgggtcatatcagaaaagtcacctcttcttggtcataatggaattgtctcatgttttcttatgaaaattcaatggtttatttattatttttttcattttatagttgttccatttatttagagggagctaaagatgttgaataaccttagac

SEQ ID NO: 305147 - DNA, 612 bp, Homo sapiens
atcttagactcagttaaatatagtactaagtccaaaaaaagacaataaagagaaatatagaataccaaagaaacattgaaaaagtcagaaaaatataataaagcagtatccaaaaatattagtaacctaaaataattgtaaatgaaaaaatattataaatgtatcaagtgatccatttaaaaactgaagagtgccagactggcaatgtattatttacaagagacagaaatgagatgcagtgatgtaagaagattaaaaataaatatgaaaaatattcaggaaaataatatccaaataggagaacagagcatccccagtcacatccaatatcagcacatgctggtgctcgagcatgccatctgggagtcttgggatcaggctgccctgcctgcccccaccagtgcccatgtttgccatctggggacttgaggataggtctgccccacycaatgtcaccactgccagtgctccaccatgccatccaggagtatgggggtcaatcctcctctctcactacagccagcacctgcatacaccattggagagcttaatgacagccctgccttgtctgccactgtcaatactcatgcatgttaccaggggcgtggggat

SEQ ID NO: 305148 - DNA, 569 bp, Homo sapiens
ctgatagcacaaaatacaaaaggatcattagagaatattatgaataagttatacactaattaactggaaaacctacaggaaaatggataaatttctagacacatacaacctctcaagagtgaaccagaaagaaatagaaagcctgaacagaycaacaataagtaacaaaattgaatctgtaataaaaagtctcccatcaaagataatcccaggactggatggatttactgcattatgcagacttctcaacagctacacacaacatatcaagagagactggatattcacacatgggcttttcattgcctctgcctggaggtgccatgtctacacttctgattacattttattgaccagagccagttgtagggcctcatatggaagggaagagggatgtattggaggtcaatggaaaattgagtgagcactgcagtcctctttaaaatccaatggaaatatcacagaggcaatgaaatcaaaactttatccaagtatcgtgtaaccaattttgttcgtcatctcaattcagtgggtgtgtaaatgccagaaagctatattttcttcctatt

SEQ ID NO: 305149 - DNA, 538 bp, Homo sapiens
cccctgcatctgggacccctggctctatacaggtctagcatgcatgaaatctgaccacgctgggagtgtgggctggtgctcaacgttgctaatcgctccccagtgcagtctcagttattaatatcttggaagagggggccctacaggccacagctgatctaatcttcacaatcagcagggactttacagtgatcaaaaagccatttcctgctgaacatattgataccagaaggttctaagtcatataagagaaaagttgataggtagggccctgggagattggtaggttctggccagggcagtgtccagggtggtctgcatccagtgttgtgcaactctcttgtgagaccatcctggcacttccctctgcagcgtgtgcacaccttggagattgttcactcttatggtcaactgggagtgkgagtgaagggagacggggacaggcttgagtctgagtgaaggcagttgttctgtgtgaggtgttgttactttctaattgtctccagtgtttggaaagactggaggaccgaggaagaaa

SEQ ID NO: 305150 - DNA, 538 bp, Homo sapiens
cccctgcatctgggacccctggctctatacaggtctagcatgcatgaaatctgaccacgctgggagtgtgggctggtgctcaacgttgctaatcgctccccagtgcagtctcagttattaatatcttggaagagggggccctacaggccacagctgatctaatcttcacaatcagcagggactttacagtgatcaaaaagccatttcctgctgaacatattgataccagaaggttctaagtcatataagagaaaagttgataggtagggccctgggagattggtaggttctggccagggcagtgtccagggtggtctgcatccagtgttgtgcaactctcttgtgagaccatcctggcacttccctctgcagcgtgtgcacaccttggagattgttcactcttatggtcaactgggagtgtgagtgaagggagacggggacaggcttgagtctgagtgaaggcagttgttctgtgtgagstgttgttactttctaattgtctccagtgtttggaaagactggaggaccgaggaagaaa

SEQ ID NO: 305151 - DNA, 587 bp, Homo sapiens
acacaatgtgaccacttggaaccgcctccttcttggcttgggagcccaagcataagtcatgccaggagagtgtgtctgggacaggctctcctagcttcttggcttgtcatcaaagcctgttgaagggcagctccccatcaccagcctcgcaaaggcaaagctgagaaaacatcctcccagcagytgagtggtggccaacatgcatatccccagatcacaccagaacagtctctgaggagtgacaggcttgtgctggacagcacaaccagctccagcatcctcatatcccactgaggatgccccaaatcaaagtctgaggccaggcctgcctggcaagatcctcctgttttctcccctcgtcacttgaaagccacaatctcatcacatgaaaagcctcttgggagaaatacattttccccgttcaatgcacagatgtcacacagatttggtgcatcattcgtaaatgatttccaagtttacttgtctgctccaaggagattactggcatctccaactgcattttagtgtaatcatttccatgttgcataggacattttggcagaaacagcagtcgcctctgctgtaca

SEQ ID NO: 305152 - DNA, 558 bp, Homo sapiens
tctgactattcttccatcctctggtcagtccttctccaaatccattcccagctctctcctcttcttctacaagtgaatatcaaactcattccatgtgttaggccctgacaatgacactaaattgcagactcgtgctttgctgcagctgactcggcatgaacaagcaaaacatatatgtgggacatacatgttcacatggagcagaatggtgggggaaagagtgctcaaatgtccttacagtgagaaaarggggtggtggggtagctttctcctaccctcaagtcccctgcctcctctatgcagcagttttcacctccccatgttctgactggcaggaccaaaagaagcacggaccctattgccatgtgacatctcagtacccatcctacatagtcagtggagtaggccagtggagtaagccagtggaatggacaagggcttatttccatgataagctctaggagacttttctctttctttatagaccaactacataaataataataataaaaatctatagtgcagagaagtcaaaggatgcttccttaacacctttca

SEQ ID NO: 305153 - DNA, 544 bp, Homo sapiens
cttggtgcctttttttttcagtcttgtcttcctcagctggaacctcctataggtaggaatcaggctttctctttacaccgcatggagagaagcatatgtgagggctccatacagctaggtgactgactaatacgttttggagagagcagtcagagacataatcacccgtgaattcgtctgtttagcataatgaatgagagtatgggttctgaagtcagcacaagacctggtttgagccacagctccttggtgtgccactttcccaggagggggactcagacctccaggcaagacagatgttgtcaaggagcttggagtggggcagttggctgatggcctccagctactgcatctttgggatcctctgcagtgtttgagccaagcttgctctcaccctgggcttctcccagccaacagctgagcacagcagcactccaggrgcctgggtatttcagctctgtgtgggaccctctgcaggcaatctttgcactggagctatctgttgggccatgagattttttcagatatgcattaaagtcaggcc

SEQ ID NO: 305154 - DNA, 544 bp, Homo sapiens
cttggtgcctttttttttcagtcttgtcttcctcagctggaacctcctataggtaggaatcaggctttctctttacaccgcatggagagaagcatatgtgagggctccatacagctaggtgactgactaatacgttttggagagagcagtcagagacataatcacccgtgaattcgtctgtttagcataatgaatgagagtatgggttctgaagtcagcacaagacctggtttgagccacagctccttggtgtgccactttcccaggagggggactcagacctccaggcaagacagatgttgtcaaggagcttggagtggggcagttggctgatggcctccagctactgcatctttgggatcctctgcagtgtttgagccaagcttgctctcaccctgggcttctcccagccaacagctgagcacagcagcactccaggggcctggstatttcagctctgtgtgggaccctctgcaggcaatctttgcactggagctatctgttgggccatgagattttttcagatatgcattaaagtcaggcc

SEQ ID NO: 305155 - DNA, 416 bp, Homo sapiens
catggagaggtgagagagttcaggaattccaggaagctgttttgggcatgstgtagagccaagggcagtttctgactgtctagacagtcttatgaggaaactgagcaacaacaaggcacagtatggccctgatatctggccagcaactccatcctggggcattgaatatagggctgggagtggaagggagggtcccctttctccttttgatgaatccctcagaggtaatacatggccacggaattagcagacccagaacggtgctttttgtcttgttctactgcaccagggcctcttgtttgtgaattagttaaccttctgtgatcctcctaagaatgtcaccatctgagtgtaggtacgggcctttttattcagaacctcatggtaaggagaggtagctttggaatggggtttct

SEQ ID NO: 305156 - DNA, 416 bp, Homo sapiens
catggagaggtgagagagttcaggaattccaggaagctgttttgggcatggtgtagagccaagggcagtttctgactgtctagacagtcttatgaggaaactgagcaacaacaaggcacagtatggccctgatatctggccagcaactccatcctggggcattgaatatagggctgggagtggaagggagggtcccctttctccttttgatgaatccctcagaggtaatacatggccacggaattagcagacccagaacggtgctttttgtcttgttctactgcaccagggcctcttgtttgtgaattakttaaccttctgtgatcctcctaagaatgtcaccatctgagtgtaggtacgggcctttttattcagaacctcatggtaaggagaggtagctttggaatggggtttct

SEQ ID NO: 305157 - DNA, 470 bp, Homo sapiens
gtgagagaagccagggtttcattccctgcgtccagatgtcagtgtctagtgtcccatctgagtgcattgtctctcaatgtactcagagggtcagggagctgggaggctagagggtatcttgcagatcaccaaaataaagggctccttggaaaatctgtgagttcttcctttaatccttcctaaaatactttacccaaataaaattccagggaccccagccacctacgttcctggctccagccatgagaaaactctatgtccaagcatgttaaggctgatatcttttccagtttrcaaaaatttctttaagtttcattgaaagatgttctctcttgtgggtatttataaatatatatgtccaaataaaatgaattttagaggctagggttactgcctggtaacactgctgtggaagaagaccaggatgtggcccatagtaggctggattgactgagctttgggaaggcaat

SEQ ID NO: 305158 - DNA, 624 bp, Homo sapiens
ggtttcactatgctggccaggcttgtcttgaactcctggcctcaagtgatccaccctcgtcgtcctcccaaaggattacaggcatgaaaccactgtgcctggcccaagcttcccttttgaagtcaagctcatgggccatgactagctcttttcagcagtggcttggggktctgaaaacaatcactggactatttgaaactcttcaccaccttccaggattcctgaacgtttaggggcagcatttattaaggaataagggaagaaacacctccaggctcaccttcagagtgaagaccaggcactgaaagtggactcctcctgaagacacatccacagcactgcagtaacactagtaagctgcctgaacctggccttcttgattgtgttttctgtgagttcctgtcaacaggggctgaccatatgagggtcaggtccacagcttagctctccctctgctagttcctgagcaaaacttgtgtttcaaccagggttttacagcctgtctagctctgaacaccttcattatccatctgtccaagtttaggtggtatgaactggtacctgaatgacaaagatcttttttggaggttggagaggctgaatgttgaccataaactagaattg

SEQ ID NO: 305159 - DNA, 454 bp, Homo sapiens
acagcctgtctagctctgaacaccttcattatccatctgtccaagtttaggtggtatgaactggtacctgaatgacaaagatcttttttggaggttggagaggctgaatgttgaccataaactagaattgtttgtcttccaaactctatgggttcatcctgataatccgaaacacttgtctcctttgtgcrtaaactggattgaaatatttttagagttctcaatcaagatgtatttttttaggggtgggcaacagttgattttataaatatattttcattctcccttgttgtgaagtaaacagtattcccattactatgtttattatgtggctaaatgaaaagtaataggattgagtctaggctgggacaatgccacccccaggtatgagggcctgtttttgcctatggagagaggggcaccctcacactggacaccaggaaggaaggaaaga

SEQ ID NO: 305160 - DNA, 560 bp, Homo sapiens
ataatcttcatgaaaaaacacaccagttctattaaaaagattatttaaaatttattgtgagacatacaagcagacttgaagaaatatcatgttccctgtagaaacattaagttttttttttttcaaattctttctcaaataytttttgaaaagaagaattgtatacgacaggaggggaagagcaaggcctgcaggactgctctaacaggtactgtacaccctcatgctggaagcattcaagaacacagaggagcacagccccacccagccatgtccacgtgtaaagatctaatgtcccagagagaggaaaatatgcaagctttagaaacatgacagaatatgaagcatgagagtacttgatgtcagctttggaaattgtgaaacttaagttttctttgttctgggactgttcaaaaatcactaattattcataaaggtaggaaataagactgtgagtgccatctcatggagaaagacaccaatacggtgttcaagtcacttttgtcacggttattcccaatcatgtaaacttatggcatctgacatggtacaaagccaca

SEQ ID NO: 305161 - DNA, 572 bp, Homo sapiens
aggccatccccagaatgtcacaaataccccttaactttgccatggtagcagcttagggaggggaacatctagtgctacctctgtgaaaacagcccagaacaggtccagctgtgctctcaagcaagtgcagtctttctgtttgggagttgagtctcctccagaatcatcttccaggccctctcccacccactttgcatcaggatcctagactcaggtcagtgctcaccacaactgtggacatcaaaacaggcccaccccctacaaccccttcctctcccccaatcctccaagaataaaggaatctgattttggagggagcatgtcttttcccaagtctgagctggaaattttcctgtaaaagtgaccagtaaaaatagagctgccctcaagagtaaccactagaccccaatgatggataccgacatggaagatactgctcrtgtggggaacaccaaacctattcctcactctggctcaacctgccaagtatcagggcagggaaagagtggacattttcactcactaaaggcatctcctggaacttccccaaatcactggaggggcacctaaca

SEQ ID NO: 305162 - DNA, 566 bp, Homo sapiens
agaaaatatttacaatacatatatccagttaagaattagaatccaaattatattttttaattcccataaatcaatttttaaaagagcctaaaaatgaaaaaaggcttagatgaacactttacaaaaaagaaatcccaatggccaataaacatataaaaagatatttgacatcattagtaatcaggtaaatacaaattagaaccataacgagttacaactacacacccactataatggttcacattgagaggactatcaatatcaaatgttggaaaggaacttccatacttggctggtagaagtataagatggtacaactactttggaaagttgtatggcaacttcttataaagtaaaacatacacttacttcaygatccagaaatttcactcctacgtaattacccaaaagaaataaaaacatgtgtccacaaaagacttatatattaatcctcccagcatcattattcataaaagctccaaatttgaaatacccccaaagttcttcaaagggaaaatggataaagaaagcaagggtaagacccatataatgatatagcaggtaac

SEQ ID NO: 305163 - DNA, 650 bp, Homo sapiens
ggttaggagcagtacttcagaaagatttccagggaacagagaagaggatctgattaaagtccatcaactatgaggttttcttccaggcaattaaattaagcaagaacattccagttcgttcaggttgttccactgacagacacctttttttatagggaaaaaataatcttggtagtatggtaaaagatgattaattaagaccaccacaaggcatttatttgatttggggtttagaaaagcccatcaatttcacacagcaaaaaccaatttatctgtacctttaatatctaagktatcactaaatccattatgtgggagaggatcctatttttttgataatggcataaaatatggacaaaacatgaataattatgaaaaataaaacaagaacagcacacacaaaaacaaaactgttaataacaactcatcaggggaagcagatggctcaaaggcttgtgatggcaagccctgggcttcaccttctggctccagcaggtgccacagccaagcagacctgatgatgttcacagggatcagagagatcatcccatacccaggctccagaagtccaactcatacgacatcttatcctgtgcaccttctcctttcctacacccatgtcctgctttccagaggggcagtaaatactt

SEQ ID NO: 305164 - DNA, 650 bp, Homo sapiens
ggttaggagcagtacttcagaaagatttccagggaacagagaagaggatctgattaaagtccatcaactatgaggttttcttccaggcaattaaattaagcaagaacattccagttcgttcaggttgttccactgacagacacctttttttatagggaaaaaataatcttggtagtatggtaaaagatgattaattaagaccaccacaaggcatttatttgatttggggtttagaaaagcccatcaatttcacacagcaaaaaccaatttatctgtacctttaatatctaagttatcactaaatccattatgtgggagaggatcctatttttttgataatggcataaaatatggacaaaacatgaataattatgaaaaataaaacaagaacagcacacacaaaaacaaaactgttaataacaactcatcaggggaagcagatggctcaaaggcttgtgatggcaagccctgggcttcaccttctggctccagcaggtgccacagccaagcagacctgatgaygttcacagggatcagagagatcatcccatacccaggctccagaagtccaactcatacgacatcttatcctgtgcaccttctcctttcctacacccatgtcctgctttccagaggggcagtaaatactt

SEQ ID NO: 305165 - DNA, 302 bp, Homo sapiens
tattgttaagggagctactaggtagtatgaataggagatttgggatggtttcactgaaagtgatgattggaaaaaaattaaaaatcattatgatggtaaacctcatcaagcagagattctttaataaaccagttgcttgtacataaatgaatgaataacactttcaggtggccttgtgaggaagtgatrgagcaggcaatgtaaccaggggtcagaagagggctgaaagtcaccatggactggaacagtcaggaaaataatgcttaggtgcagccagactgagcctcagacacaaggactag

SEQ ID NO: 305166 - DNA, 592 bp, Homo sapiens
tgcctgattcaccatctgtgacatgtggtttctctgtctatttggaggattggctgagctgtcccagagagccatgggccatacttaactctggggtgaaaggggcaacagacatgtcttgaattagcccccgcaagtcagggatcatgttaaacacctcayatatattgtctcatttgatcttcacaaattcctacaaagtaatagatcttacccccattttaagggtgaaaaaactgaggcttagaaaacacaccatttccatcttaccatactgcctccctgtgtgaaaagagagctacataaattattaaagaaaattaagattcttggatttcagagctgaaagaaacttcaaataacatcttttccaatttctttactatacagttggtgaacttgaggtcaaaagaaaaatactggcttgcccaaagttgcacagaactaggaagagaatgctattgtgtgcattccaggccccagcccatcataatttggaggcattttaaacaaaggcatgattaacaataaagaaggggctgctcctaacagggggaggtacatgcctaactggggaaaaagcccccagctc

SEQ ID NO: 305167 - DNA, 628 bp, Homo sapiens
gcctggcacatagtaggtagttatgactatttacagtctatgcaaggcatggcagagactgattcattaaatacattttcttttcctgttgggcacacagaccatacaccagcttcctctgcagtgaggcgtggccaygtctttgagtgctggcccatggattgtgggcagaagtgctgcgctccattcctaggtctggtccattaaaaccttccatgtgtcattctccttttcccccatctgtcagccagacacagaaacctggcacagcaatccacagccccagggtaaggcaaaaccacagacggaaggagccaatgtccctaaatgaacatatctaatgccacctggaaagacatcaggaacatcatattggactacgcgtgagtgggaaataagctttctgctacattaagccactgagatttggggatttgttcattataaccatgcaaacactaacattacttaccctaacatagatcttaagcttggtttgctgagaagactccacaaggactgaagccctactctttctgagtgacaattttgatgaggctctggccttctctcaggcccctggaagtttctctgtgagacctgattactgccaggagtcctttttcca

SEQ ID NO: 305168 - DNA, 450 bp, Homo sapiens
agggtgagctcttactctaaggtaggaaagaccagcttagagtttccattttggcattagaagtcaatcctattgattaatgaagatgctgggtagatataacattaatacagaacactccacccaaaattagcagaatgaatgcacattcttctcaaatgcacatggaacattctcaaggatagaacycatgttaggccacaaaatgagcctcaataaatttaaaaatattgaaatcatacaaatgatgattcttcttaccacaaaggaataaatctagaaatcaataagagaataaaatctagaaagtccacaaatatgtggaaattaaagaatatactccttttaaaatgaattgtattatgcatatataatacaacatgatgttataagatgcatatatatatagtaaaatggatgctatagtgaaacatactaatatgtccatca

SEQ ID NO: 305169 - DNA, 612 bp, Homo sapiens
tgtatgatcattgcttttcaggtctatcattttataagaaggggaactgaggtccagagaaaatgagtgattttgccgtcatccctatgattcatctaagcaccatccaccaggcctcttgcctctgtgagttgttcagggctctggtctgcccacagctctgcagacatttgtgtgtgagaaaggggaaagtggggatgctgaaagatggcrgcaaagttggtgtctgccgactgagtatggccacttgtcactgctggctgaggtcagccacgctgggccccaccaagcaaaaccttggatggcaataaatagagccatttagctctaacatgctgagcccaggagagggtgaggcatgggaggcggagtggatccaaggagctcttggcacgtcaggcttggtaatgcactcttccccctccttgcaaaggcccgatttggttatgtctgagcagctggggagctttgcctcagatgcctcctgtggccccagtgccctggcagtcccagtatcggctgcctgctgtctgattgtccatggaaagcccagccagatggccgctgggccctggcagtgtaggatgtgagaccacaaagtcctgggcctgg

SEQ ID NO: 305170 - DNA, 511 bp, Homo sapiens
agcattcaattttaaaagggaaacagagcataaaagtttggaaaatttgcatcctgacaatgcgatagaaaagaaaaatccattttctgaggagagattcaagcctgctgcagaaatttgcttaacgasgagcccaatattaatccccaaaacaatggggaaactgtctccagggcatgtcagaggtcttcaaggcagcccctcccatcacaggcacagaggcctagaagaaaatagtttcctgggccgggcccagggtccctttgctgtgtgcagcttaaggacttggttccctgtgtcacagctgctccagccatggctgaaaggggccaacatagagctcgggccatgacttcagagggtacaagccccaagccttggcagcttccaagtgatgtcgagcctgccagtgcacagaagtaaagaattggtgttagggaacctctgccaagatttcacaggatgtatgaaaatacctggatgtccaggaagaagtttgctgcaggggtag

SEQ ID NO: 305171 - DNA, 612 bp, Homo sapiens
tgtatgatcattgcttttcaggtctatcattttataagaaggggaactgaggtccagagaaaatgagtgattttgccgtcatccctatgattcatctaagcaccatccaccaggcctcttgcctctgtgagttgttcagggctctggtctgcccacagctctgcagacatttgtgtgtgagaaaggggaaagtggggatgctgaaagatggcggcaaagttggtgtctgccgactgagtatggccacttgtcactgctggctgaggtcagccacgctgggccccaccaagcaaaaccttggatggcaataaatagagccatttagctctaacatgctgagcccaggagagggtgaggcatgggaggcggagtggatccaaggagctcttggcacgtcaggcttggtaatgcactcttccccctccttgcraaggcccgatttggttatgtctgagcagctggggagctttgcctcagatgcctcctgtggccccagtgccctggcagtcccagtatcggctgcctgctgtctgattgtccatggaaagcccagccagatggccgctgggccctggcagtgtaggatgtgagaccacaaagtcctgggcctgg

SEQ ID NO: 305172 - DNA, 557 bp, Homo sapiens
tgtaggaaatgttttattaaccacaattagagcaaacacaaagggagaaaggaatttgagtttgtatattatgtgtgagaagaaaaagaaagaattagattcatataagagtttggggaaaaaagaaaactgcaggtgagtatttgttcaaactgcgtaaatrtcttcaaggttacaaaattaatgagggaagggaattgctcagtcttggatgatgagagcaagaagccacggctcaaagctatgggaggaaagctcagactagctgttaggaaacacagtgagttagaaagaacatttagtggtgaaacatatacacagaaaagtgactgtgaagcaacaccagcagaatcattacataatcagtgaggaaagattatgtaaaacagacttggcattagctggtcatcttgcataacaaggggcttctgatcagcttttgctggagtgagttttcaattccttttttgccttttgattcttaaggacatatgacttcctactaagctcatctttctgtgcatgatctcatttaattagaacaatttgtgaattag

SEQ ID NO: 305173 - DNA, 579 bp, Homo sapiens
gatttttaaaatctaatactggaatacaaattatataagaataaaattgcagctggacatggtggctcacacccgtaatctcagcacttttggagaccgaggcaggtggatcgcttgagctcaggagctcaagaccaacctgggcaacatggcaaaacctggtctctagaaatcatataaaaatttagccaggtgtggtggcacacacctgtagtcccacctatgggggaggcttaggtgtgaggattgcttgagccagggaagttgaggctgcagtaagctgagattgcaccactgcattccagcctggatgacagaacaaaaccctgtytggaaaaaaaaaaaaaaagaagaaaattgcatgaaaagtttactttgagttttgatttttaaagtacaagactttaggcttatttttttccacagtatgaatatatttattttattttattttattttattattactgtactttaagttttagggtacatgtgcacaatgtgcaggttagttacatatgtatacatgtgccatgctggtgtgctgcacccattaactcatcatttagcatttatgcct

SEQ ID NO: 305174 - DNA, 622 bp, Homo sapiens
aatagttattcacttttatttatttaccacttactatgtgtctgacacactactaaatgttttaaaacatgaattatcatacttttataaactgttacttgtgggtattatttgttaaatatttaacatattttaaaggatatcctaatttaaaaagcacatagtccactgtcctgaaacaacatagtgatatagagaatatctttttactgatgtagaaaatgagggtyagagaaattaagtgacctttccaacatcacatagtacatggtaagcctggatttaaatcaggatatatctggctgtgcacctgatatggtttggctctgtgtccccacccaaatctcatcttgaattgtaattcccacaattcccactgtgtcatggaaagaacttggtgggaggtgattgaattatgggggatggtttttcctgcactgttctcgtgatagtgaatgagtctcacgagatctgatggttttcacaaaacaggagtttgcctgcacgagctctctctttttgcctgccaccatccatgtaagctgtgacttgctcctccttgccttccaccatgattgtgaggcttccccagccatgtggaactctgagttctccattaaac

SEQ ID NO: 305175 - DNA, 622 bp, Homo sapiens
aatagttattcacttttatttatttaccacttactatgtgtctgacacactactaaatgttttaaaacatgaattatcatacttttataaactgttacttgtgggtattatttgttaaatatttaacatattttaaaggatatcctaatttaaaaagcacatagtccactgtcctgaaacaacatagtgatatagagaatatctttttactgatgtagaaaatgagggttagagaaattaagtgacctttccaacatcacatagtacatggtaagcctggatttaaatcaggatatatctggctgtgcacctgatatggtttggctctgtgtccccacccaaatctcatcttgaattgtaattcccacaattcccactgtgtcatggaaagaacttggtgggaggtgattgaattatgggggatggtttttcctgcactgttctcgtgatagtgaatgagtctcacgagatctgatggttttcacaaaacaggagtttgcctgcacgagctctctctttttgcctgccaccatccatgtaagctgtgacttgctcctccttgccttccaccatgattgtgaggcttccccagccaygtggaactctgagttctccattaaac

SEQ ID NO: 305176 - DNA, 611 bp, Homo sapiens
ataaagaagtttatgaaactgcaaaacaacaaaatgtgatgaatggttagaattatgaatgagcaataaacaagtccaaccttaaattggtacattttggaaaatgagttaagcctagatttggaacaacaaaacttaatgggaggggaaaaaaaatagtagaaaagagatgatacaagaaatygaacatgttttcataaacaaatgttattttgagctttatttagagaggcgttgtgctaaaaaatcaaatcaatgctgaagataatttcatttttacttgtatccaaaaattaaaattaaaaagtaataatttcatttgaatacagcactaataaaatgaatctcagttaaaaatattaaaattcaagaatttgaggcctaaaggggtctttgggatcacaggatattaaatcacataatttgccagatgtgagatttagaatcccaggagaatacctacatggccactatggactgaatatttgtgacccaggtccaggaccacacatttggctaggagtaaccatttctcactatttatgcctaattcagccaggacaaataacttaatcctgtcatcagtttccacagaaaatccaatcacagcc

SEQ ID NO: 305177 - DNA, 628 bp, Homo sapiens
gagttattgaattcaagaagtatcttgccagaaagggactgctttttaaaagttcttttggtatcggaaaatgctcctggccacccagacctccatgagttcaactgaagatgctctacttgctcccaaacacaacatctctaattcagcctctagatcagaaggtcataaggacctttaaatttcattacacacagtactctatggaargagttgtcagtgttatgcaagagaaaactgataaagagaatgtcaagaaaatccggaaggactgcaccattgaagctaccatcattgttatagaaaaagctgtgaaagccataaagcccaaagcaagaaattcatcctggattaaactgtgttcagagggtgtgcacaactctatagaatttatgacagagccaatcaaagaactcatgaaagagattgtggatatggcaaaaaaagaaaggtgagaaataaagggtttcatgggatgaatcttgaagaaatgaaagagctaatcaataccacaagacaggaattaacagaagacaacttgatggagatgagtgctttcgaaccagtgccagacaatgaggaagaaggcataagaaaagcaatgccagaaaacaaactgacattagaa

SEQ ID NO: 305178 - DNA, 251 bp, Homo sapiens
gtattttgcatatatttacatgtattcaatatccattatgaggatattgtctgtatacagaaaaatgacatctgttgaggctcttccatgacgcaacactgtggtatgtgttttccagtataactaaattacatgatgcaaactgtagattttcttagtggcaggccttgagcctttcatcattattctatttctacatttatayttattataaaaatgtatttcttctggggggggaagtcaataaatgt

SEQ ID NO: 305179 - DNA, 564 bp, Homo sapiens
gtgaggagttgacagtcaacagtcaactctatagccagaggaagagaaacgtatggatgctccatcttcccttgattgtarcatgtgctggcttgtggcacctgatgaaaaatgagagttaaccatgtatcatctttctgacagcctttagtataaggagtgtcttttacgaaattagtgaataagtacacagtgtggcagctgatgcaataggaaacacaagaaatttataaatgaggctatatcatgacagacatattaagcaaaaggaacaacagatatgctatgtcctgggcttttcaagatttaggactgccttccttctaatgaagagctcctgcatagaacagataatggttagcttattgtagatggggacaggaataaagaagatttttcctaacctgtgctagaagctagatagttagaaggaagtaattattttttttttcagataagagtaggctggctttatgtataggtcatgcgcttgtctttgtctgccttgtattgctataatggaaaaatacagactggatatttaataaaaaaataaatttattc

SEQ ID NO: 305180 - DNA, 564 bp, Homo sapiens
gtgaggagttgacagtcaacagtcaactctatagccagaggaagagaaacgtatggatgctccatcttcccttgattgtaacatgtgctggcttgtggcacctgatgaaaaatgagagttaaccatgtatcatctttctgacagcctttagtataaggagtgtcttttacraaattagtgaataagtacacagtgtggcagctgatgcaataggaaacacaagaaatttataaatgaggctatatcatgacagacatattaagcaaaaggaacaacagatatgctatgtcctgggcttttcaagatttaggactgccttccttctaatgaagagctcctgcatagaacagataatggttagcttattgtagatggggacaggaataaagaagatttttcctaacctgtgctagaagctagatagttagaaggaagtaattattttttttttcagataagagtaggctggctttatgtataggtcatgcgcttgtctttgtctgccttgtattgctataatggaaaaatacagactggatatttaataaaaaaataaatttattc

SEQ ID NO: 305181 - DNA, 542 bp, Homo sapiens
ctgtgtgggagctgttttcctaaggtaaatagattattatttatatctctaggtgcaaatgcttttaaataaccagaacatacagcatctgaatatgcccttacataattttcacagctgctgcattcttgtcagtgcactgtcatggtgaagctttgatgctttgatctgagtttgacccctggccatgattcttgcttgtgtttttatcatccactcttaatgtgaacaataaatctgataatatccagtagtgcttccttatgttctctgactttgacattcagaaaaatcattaatkctgcttccactgtgtctacatctccatacttgtgattttcttcccctttgaagatattttagaatacatagtcctggaagtccaggaccaatgactttgtattttctgtattgcatagtgctccgctttgtacttgccgtattgcatagagctcaatttgatatgatcaaatgatgattaccaagagctttagatatgatttcactttttatgaagtaaccaacatgaacgattaggaagg

SEQ ID NO: 305182 - DNA, 472 bp, Homo sapiens
aaaccctacccagcttacagggcagaaatctgtaaccagtggatatcttgaacttgccttagcaagctgcagtacctctctttattatccaggttagtgcccttttacaactgcatttcctcagtacagtgaatagtttgtagccaatggttttccaactttagtaccactaggaatcatttatttaaaatataggctcctgggctgtaccccagagatttcttcatattactatatttcctctagctttctccrtattatctctagtttcatgtttctcggttttaacccatgatgtcttttgaaatggggtgtgtctcttttgctacttcaagaactgcatgtctgtgcaaatctccactagcttattttctgttatctgaaaaaatggaggtttttgtcccacttgacaaatataattgctatatcattgaaatgctgaatatgttttttcaagctacccatctctctg

SEQ ID NO: 305183 - DNA, 472 bp, Homo sapiens
aaaccctacccagcttacagggcagaaatctgtaaccagtggatatcttgaacttgccttagcaagctgcagtacctctctttattatccaggttagtgcccttttacaactgcatttcctcagtacagtgaatagtttgtagccaatggttttccaactttagtaccactaggaatcatttatttaaaatataggctcctgggctgtaccccagagatttcttcatattactatatttcctctagctttctccatattatctctagtttcatgtttctcggttttaacccatratgtcttttgaaatggggtgtgtctcttttgctacttcaagaactgcatgtctgtgcaaatctccactagcttattttctgttatctgaaaaaatggaggtttttgtcccacttgacaaatataattgctatatcattgaaatgctgaatatgttttttcaagctacccatctctctg

SEQ ID NO: 305184 - DNA, 472 bp, Homo sapiens
aaaccctacccagcttacagggcagaaatctgtaaccagtggatatcttgaacttgccttagcaagctgcagtacctctctttattatccaggttagtgcccttttacaactgcatttcctcagtacagtgaatagtttgtagccaatggttttccaactttagtaccactaggaatcatttatttaaaatataggctcctgggctgtaccccagagatttcttcatattactatatttcctctagctttctccatattatctctagtttcatgtttctcggttttaacccatgakgtcttttgaaatggggtgtgtctcttttgctacttcaagaactgcatgtctgtgcaaatctccactagcttattttctgttatctgaaaaaatggaggtttttgtcccacttgacaaatataattgctatatcattgaaatgctgaatatgttttttcaagctacccatctctctg

SEQ ID NO: 305185 - DNA, 642 bp, Homo sapiens
accatttctctggtttgtggtgggcttcccaatctctttctttatttagatgactctggatttgaatataattggttgacaatctagtccttgtgtccctaccttgatctcctacatttacctctatgctgatacccatggacacaacragatccacacatattacaatgtacgtgtgaacagtccctaaagatctgcactggtcattagaagctgaatttctaaagtgggtgtttgtcctgttcacatggcacatcacacatcaaatatgctgccttgttgtgtttatctttctttttgcttacatctctccagctagtgtataagcccccagtagttttctttacatctctacagtcccagcttctagcacagtgtcatacacatattagacaatgcattttaggggatgacaacaaattcctaggaggaggcatcttgcagcttcactgtatctaccacagtaccttgtcatagattctcaattcattttgtctgagtgaatgagttttgctttattggctaatatgaaaaactctattgcattcagcatgaaaacagccattaaagagattatataagagggttgttggagatcatctcagaaagttagaacccatttgccatcccttattcacaggg

SEQ ID NO: 305186 - DNA, 642 bp, Homo sapiens
accatttctctggtttgtggtgggcttcccaatctctttctttatttagatgactctggatttgaatataattggttgacaatctagtccttgtgtccctaccttgatctcctacatttacctctatgctgatacccatggacacaacgagatccacacatattacaatgtacgtgtgaacagtccctaaagatctgcactggtcattagaagctgaatttctaaagtggktgtttgtcctgttcacatggcacatcacacatcaaatatgctgccttgttgtgtttatctttctttttgcttacatctctccagctagtgtataagcccccagtagttttctttacatctctacagtcccagcttctagcacagtgtcatacacatattagacaatgcattttaggggatgacaacaaattcctaggaggaggcatcttgcagcttcactgtatctaccacagtaccttgtcatagattctcaattcattttgtctgagtgaatgagttttgctttattggctaatatgaaaaactctattgcattcagcatgaaaacagccattaaagagattatataagagggttgttggagatcatctcagaaagttagaacccatttgccatcccttattcacaggg

SEQ ID NO: 305187 - DNA, 642 bp, Homo sapiens
accatttctctggtttgtggtgggcttcccaatctctttctttatttagatgactctggatttgaatataattggttgacaatctagtccttgtgtccctaccttgatctcctacatttacctctatgctgatacccatggacacaacgagatccacacatattacaatgtacgtgtgaacagtccctaaagatctgcactggtcattagaagctgaatttctaaagtgggtgtttgtcctgttcacatggcacatcacacatcaaatatgctgccttgttgtgtttatctttctttttgcttacatctctccagctagtgtataagcccccagtagttttctttacatctctacagtcccagcttctagcacagtstcatacacatattagacaatgcattttaggggatgacaacaaattcctaggaggaggcatcttgcagcttcactgtatctaccacagtaccttgtcatagattctcaattcattttgtctgagtgaatgagttttgctttattggctaatatgaaaaactctattgcattcagcatgaaaacagccattaaagagattatataagagggttgttggagatcatctcagaaagttagaacccatttgccatcccttattcacaggg

SEQ ID NO: 305188 - DNA, 557 bp, Homo sapiens
acaatgtcccaaatctttcgcaagaaattactgtcatatttctctggttagaaaaccacagcattcctaatagttatgtaaaaatacagctatctcctgatctataacctggaccaatttttaaatctgaaaattatgactgaatacamagtttaagaaatagggttaggtagaagattcttttaaacatgtgttgatttattggtattgtgctaatgagcatttcacacctgcattttccaggcctcatacttctgcaggtggtaaattacattaggagaaaaatcaaatggagagtgaatgcagaaaagcaatatattatacattaacaaagccaggaaaaaaggggcaatagaaaaaatatgtatccatatatgtacttctaattgcatgactgatagaaattatgacataactatttaaagcagtatatttttcaatcctcattagtatatttagtcaatcatcatcaaagaataataaaatctgatgataacaaaaagtacaatctttatttatctctagattagaaggcttttacatctgttgggaagcct

SEQ ID NO: 305189 - DNA, 599 bp, Homo sapiens
ctcagttgtacaaaactgagtttagktatttgtgaatggtgaggcattggtattgagaataattacaataagagaaaagtgagcctgggattagaaaaaacaggtaaaggtacaggagtgggataaaggacttcttcttttctgccaagaagcattgagctgaaatgagatggtcaagttttcttttacagaaggtactttaaatacaaagaaaaagcttctacctattgccaacatgttattatataaaacgaaaatatttttacagcaaaaattataggtgaatctaatctcagaataaagagcagacatttgagttgaatacatttagctaaaaaataagaacccaatggcatcatcattcttgtgattttgctatggagaggtaaaaatctggtgggcatggactgtaaacaggcacctgagaaccactagactaaaaagtctcaaattttataattgatgaatttgcttttctgagaattcctttattcaagtctgctcctttcctgtctctatctttctatatcttatagcagacgaacagattttcatagagtgttttgagccctgaattctggactggctacataatttgt

SEQ ID NO: 305190 - DNA, 528 bp, Homo sapiens
gtagtctacacttgatgatgatttgtagcacaaaaatccatacagcatacagccagcagctagacagtagtcacttgtgattcctgggtcactggcttttggcacagtaagcaaatgaaagctcagtgactacatatttagcattcacttctcagcgtcacaggccacagaaatgctgcttaattattcaggcaatgattwgcaattgcaagtcactgctgagacagtgacaagcaagtcagagttttagggggagaacacgtcttttttctaccacacatgctcctatttgacttcaagggtattgctggagtcagaacccaaatattgctttatctcatattagttatatttttgtggttcctttctcccgtgacatgaaacatagaataaaactctaccagttattcaaaagtcaaagaagaaaagagaaaattgtgaaacttgttcataatttctgtcatgcactgagttgattaatggcagcagcaattttggaggtggtggtgggtctgttgtgtgttttca

SEQ ID NO: 305191 - DNA, 600 bp, Homo sapiens
atttatttgcaaagcaaaatggttttgggatttatgtttaaaggaatactccatgtatagatttattatctaggcaataaacctcaaaaatacatttgagaaaaatgtttggtgttaataagtgtagatacttgatgttcatgcaattgtaccactttcctaaaattatattttactacaatattgtgaaatgtaatttatagcaaacaacagaagcatatttccaggagtctccataagaacttttggtggctattgcttaaggacgactataagcaaatttctagcatggaattataatcagaagacaaaagtcaaacatacaaaagtcagagatgagacagtacatttgaacccagttaaaagtacattaattaatcccataaatcagttttcctgagcaatacacatacatggtaagaatggggaaaaaaacagggccacaagtgggcagaaattaaaatgtccatatttcatagtgagaaggtgaaacatatgtttggcctcactctctgacatgcaatgaagacacacacacacacaygcgtgtgcacacacacacacacacacacatatggtgaccatataaatttttctacc

SEQ ID NO: 305192 - DNA, 549 bp, Homo sapiens
agaatgtgggaaaatccacaatgcattttagaaaaaaaatattttttaacatcagttcatatataaaggcttgtgtccctgtctatcccccagatcttcataaacacagaycctcctatttaggattctggactggtgaaagttcgttgaagtcttaacacaatttggtaagcattaatatggaacatatactatttgagaggttaattggcctgagagtttaaggtgtatgaggcatagcttcttatcccaaagacctaatcagcttcttataccccaaatacctgtagacagtaacttaaaagcttgtaaaggatctgaaagacagtaagcagacaatgttaatgttatattgctgtctgtttccagagcctggaggggggcatggtaaacataagacattccttttacacacatcattgtgcaggtgaccttcaagtagctcctacttggtacgcctgccaaagaacctcagagaaccataaaagcaggtattcccaggttttaagggcaactgtaactgatatagtgaacacactgagaatttag

SEQ ID NO: 305193 - DNA, 496 bp, Homo sapiens
tgttaagcattgatctaaacactcacrtaaaccacctcaattgatacctatgaatttctcattcctagcttcattttacaggaaagaaatgaagcacatgaggttgacacacttgccagaagtcgcacacattaggagcagaccatgtgcccctggaggtggttcttctaaccaccatattgctggtcctcacccggcagaagtgtatcaaagtgtgtgacacataattcaactagccaccgcttgctttcacaggcttgaaaactagaaatttcacactaccaatatttgcacacttctaaaatgccacagatcatataggaagtttttatggggattaggaagatgagatatatcaccacattaatggtatgtattggttaaaagagttctatttcagattagttaaaatgtgaaaataaaggttacttaaaaacaaggaaaaacaacatgctcacactggtgtatgggtatatgtatgtgtttgtctgtaggc

SEQ ID NO: 305194 - DNA, 496 bp, Homo sapiens
tgttaagcattgatctaaacactcacataaaccacctcaattgatacctatgaatttctcattcctagcttcattttacaggaaagaaatgaagcacatgaggttgacacamttgccagaagtcgcacacattaggagcagaccatgtgcccctggaggtggttcttctaaccaccatattgctggtcctcacccggcagaagtgtatcaaagtgtgtgacacataattcaactagccaccgcttgctttcacaggcttgaaaactagaaatttcacactaccaatatttgcacacttctaaaatgccacagatcatataggaagtttttatggggattaggaagatgagatatatcaccacattaatggtatgtattggttaaaagagttctatttcagattagttaaaatgtgaaaataaaggttacttaaaaacaaggaaaaacaacatgctcacactggtgtatgggtatatgtatgtgtttgtctgtaggc

SEQ ID NO: 305195 - DNA, 496 bp, Homo sapiens
tgttaagcattgatctaaacactcacataaaccacctcaattgatacctatgaatttctcattcctagcttcattttacaggaaagaaatgaagcacatgaggttgacacacttgccagaagtcrcacacattaggagcagaccatgtgcccctggaggtggttcttctaaccaccatattgctggtcctcacccggcagaagtgtatcaaagtgtgtgacacataattcaactagccaccgcttgctttcacaggcttgaaaactagaaatttcacactaccaatatttgcacacttctaaaatgccacagatcatataggaagtttttatggggattaggaagatgagatatatcaccacattaatggtatgtattggttaaaagagttctatttcagattagttaaaatgtgaaaataaaggttacttaaaaacaaggaaaaacaacatgctcacactggtgtatgggtatatgtatgtgtttgtctgtaggc

SEQ ID NO: 305196 - DNA, 496 bp, Homo sapiens
tgttaagcattgatctaaacactcacataaaccacctcaattgatacctatgaatttctcattcctagcttcattttacaggaaagaaatgaagcacatgaggttgacacacttgccagaagtcgcacacattaggagcagaccatgtgcccctggaggtggttcttctaaccaccatattgctggtcctcacccggcagaagtgtatcaaagtgtgtgacacataattcaactagccacygcttgctttcacaggcttgaaaactagaaatttcacactaccaatatttgcacacttctaaaatgccacagatcatataggaagtttttatggggattaggaagatgagatatatcaccacattaatggtatgtattggttaaaagagttctatttcagattagttaaaatgtgaaaataaaggttacttaaaaacaaggaaaaacaacatgctcacactggtgtatgggtatatgtatgtgtttgtctgtaggc

SEQ ID NO: 305197 - DNA, 581 bp, Homo sapiens
tgatatgaaaaacactcgtgtaaataaacgtatagtgagtgggatggaatggggatagccaaaaagatgcacttaaggaaaaggggaatataaataataactctgtctctccatgctttcttctttctttttcacctccacccctatataagcctgggtaaacctcaattcagtggacaattttaagaatgcttactcattcatttaaaaatatgattgaatgcctacattatcaactaccaatagttggaaacaaggcttgagagagaggagagggagtcttgtgtgctacaccatggaatttgggcttactcttggcrtcttaggaacttgtgaagggctttgcctaaggcagtgtcttgatgagattgctttatagagagatatttctagcatcacatggagaatggttgggaatttatgtgcctacaaagagaagaatcttttagccatatagtgtaagagctaaaaagatagcatattatgttatttaagagccttggctctggaattacatacaattggatttggatcctacctctgctattctgggcagctctgtaaccttggacaagtcactt

SEQ ID NO: 305198 - DNA, 682 bp, Homo sapiens
atgaattcatgaccagctagaaataagtaagaggaagattttccagtcaatgctgtgatttcaggctttaaatacttgaagccatagaagctaaccttttcatttaaaaagatatatcctctttcatgaacaaaataaatatctctatgggccagaaaaaggataaaatgcataacaataaatgagtgttgaagctatatgccttttgaattaatatacattgaatttaaaataaccttatcataaatatcagaaacatcatgcattgagcatatggaggacagcctgttaggcacagtgttgatacattgctattaattaaatccattcttcattyatatttccttactttttacctgacatcgtttttcttttccaggatcctatccagggtactacattatatttagttgtcacatctggggtttttctcagctgtgacagtttatggtgtccttttcctagttacaatgctagagttgagctcttggctgcccctgactatttctggaccagagccctaaagggataggaagagccaaataggaaaggacgttgagaaccaatgatcagagacatagaaggcaatctttgttgtttcttcctgctctataatccaataaatttgttaattcttagcctctgctagtaattaggaaaacaaatgaaactatgtcattca

SEQ ID NO: 305199 - DNA, 573 bp, Homo sapiens
agtgtgtttcttggtattcacagtatctgagggaaggagattgattttaccttaaactaaagtcttctctaatgagaccctggattagactaatgttctgggcctgataattggaaatgkttattttaggggtcacagtaaataattttaaagcacaaaataaataagtgattttaaaatagctcattagaaaaaaaatgtgctacaaagttaaataattgaatttttataatcagtctataatggaaaaacaatgtttcctagaggcagatagatgtgggtcagaaactcagggtccgccacatgttagttatgtgacttaggttaaggcacttacatttcctgggcctcagctgctgcttctccaaaagtggcgcacatgtagtctgtgccattgctgtggggattaagtgatgaatgaagacaacagaagtggggacaatgttttagaaaatagtacttcacattttttctcctctttcaaacaagagtattgtctgttttagaatattcttttcatccacctgttctgttctttcctctctttcttgtcattttatttccacattagtt

SEQ ID NO: 305200 - DNA, 577 bp, Homo sapiens
ataaacttgactgatttatartaaggatttataataataaatccttctttatatgactttttaaaaggtttttaagttaattttgctgttttattgaaaaaatgagaattatcagaagctgaggttatttatatttttacctaatcttaccaactcattaccaattccacaaatgtttaagaatgaaaacatgaagttcacatccctggagtaaacatactattagttccacttcctttgagcacagaggaaatgctttcattaattaagcttccaaacatcctcctcattttaagcaaggatagatttggtacactaatggttgatttggcagactgaaattaggtgttttcatgaactgatccaagtgccagggagaaacacagtagctccaagtatgagcatgcaaccaggaccccagattcacaaaagcctctgtggacgataggacaatggcaacctgaacaacagcagtcacaacactaggaacaatctgctactctagataacaacaactacagaaaccacaacactaccatgtaggcagttagctaagtgctttccatgcatcttctca

SEQ ID NO: 305201 - DNA, 604 bp, Homo sapiens
tttgctgctgagtcagggaagatcacttgtcttgtaatcatagttttgtctgggatgatgygccttctcagaattcagtgtggaaagcagtgtgtataccacctttaccctcagaatctgaattgatgtgagcgttgatgtttgactctgttgtaacttcaacctgaggaagacggcaagattcaaccagctctatctcagtccagcaaactctagcttcctctgttaatatctcttccttctcgattcaaacaaagaggatggcaaaaacactatcctttctgatgcattttttccaaacattcttgtcttattgcttccagatacctaagaatcaatcttagcatgataaaaaaggattcattacttatacatgattcctggtatgatgtaagaagtacaactgtgcttgcaaagaaaaactcaacttattcgagcctctaaatctaactaccagtttacagaagtcactggggaaagaggaacaagttaaagatacctaagagaaggaatcagccacatccaaaatgccactaatgctccaaggcaaatggcccagtttattaaaaacaaaaaaatatatatatatgacttaaaagaggaa

SEQ ID NO: 305202 - DNA, 582 bp, Homo sapiens
aagaactgcagaatatacattcttgacattagcatgttaaagtctccaagagggacatatgataggcaaaaaataggtctcaataaatttttaaatatcaaaattgtatcaagtatcatatcaaaccacaatggattaaaactaggaatctacttcaaaaggatccctcaaaactacacaaatacatgcaaattaaataatctgctcctgaattatttttgtgttaacaatgatatcaagatggaaattctctgaaatgaataataataatgacagaagttatcaaaacctctgggagacagcaaaatcagtgcsaagaggaaagtttatagtgctaaatgtctgcatcaaaaagtctgaaaaagcaaaaattggtaacctaatatctcactttgaggaactagagaaataagaacaaactaaacccaaagcttgcagaagaaaagaaataacaaagatcagaaagctaaatgaaattcaaacaaaaaagatacaaaagatcaatgaaacaagaagcttctctttgaaaaaataaacaaaatagatagaccattagatagattaaccaagaaaagaagagag

SEQ ID NO: 305203 - DNA, 549 bp, Homo sapiens
ttgacagtgagaaacccataaccaagtatcccagtaaaaaatgcattttgaggctttttccccgtttcttgctttcagccttgaaacatactttgaaactcttcgtttctcctttcccaccaggtacttatgtgaacagttctcgctaatctaattatgtgcttgcttagaagttgcagggaccagttttgaaacaaaaccaaattgagagacccagctgcagaattctcccaattgggggaaattactagcaagccaccaccaccgggtraaaatcaggataacacaaacctgacccctggatgggcggttacttacgataatcatcagaatgagacaggcatacctgcaccctcctgcacttgccaagtgtgtgtttcccacacgttttccttctgaaaccccttcactcagcccgagagacagagatggcttctttgaggcagaagcttggttatctcccatctgctagcatttgatcaataaagttgttttcctttcaccacaccttgcttcttgtgttttcattctgagaggtgagcagtcaga

SEQ ID NO: 305204 - DNA, 610 bp, Homo sapiens
tataataggcttatattatatattatgtgtatgtatatctatatatgcatatgtacatgtgtacacatattattaaatatataatatrcttaatatataacacatatgttttatatattatatacatgcatatgtatatctatatatgtatgtataggtatacatataatatataatatatataatgtataatatatgtgtgtatgtatatctatataatatatattatatataattatagaatatagattatagtatagaatataaaatataacatatgtgtatatatatacctatatagatggattacatgtgtgtatatagatatgtacacaaacatacttagctttatttgatattgccaaactgtttttgaaaatgcaaaattttaggcatacacatttctgggataattttgacccatttcacaaattttaagattttttaaaatttgtttcttttaaaatcaatactcaaaacaaactgggaggttacggacataacattgttttatatcttgattgtggtggtgattagatgtgactacacgcttgttaaaacttgtagaaatgtattacaaaatggtgagttttattttatgaattagttt

SEQ ID NO: 305205 - DNA, 569 bp, Homo sapiens
ctaatgagattgacatcttttaatgtgcttattttctgtccatataccttctttggtaaagtgtttgctcagatcttctgcccattttctattgggttgtttgtttccgtatcattatgttttgagagttctttgtcagatgtatgatatgcagatattttctgccagtctgtgacttgtcttctcattctcttaacaaatgatttttgcaaagcaaaaatattttattttgaagaagtcaaatttatcagttttctttctttttcttttttttttttttttttttgagatggagtctggctctgttgcccaggctggagtgcaatggcacgatctctgctcactgcaacctctgcctcctggattcaagcgattgtccttcctcggcctctcgagtagctgggattacaggagcccaccaccacgcctggcaaatttttgcatttttcatagagacggggtttcgccatgttggccgggtgatctcaaactcctgacctcaggcaatccgcccacctcggcatcccaamgtacggggatgataggcatgagccactgtgcctggccca

SEQ ID NO: 305206 - DNA, 416 bp, Homo sapiens
tttataggatgcaattgaatcaattatcagataaaatttcatatctttttatacttatattaataataaatttcactcatataatgaataaaaaactatattcaattcaaaagcttgtaaaagaaaataagctaatgcacaataagaaataataaaaataacagaagaactaatcaaaatattggttctttggaaaaaaaatttwaaaaaaatagataacccaaaaactaatgtcatgctgaataaaaggaaaatgcacatataaaccgaatacaaagtaagaaggaaaagaggaaattaaaattatgtgtaatataaataaatttgtaaacctagatgaaaataagattttgctacatatatacaattttcaaaaattgaccccagtatagattaaagccttaaatatacaaatt

SEQ ID NO: 305207 - DNA, 555 bp, Homo sapiens
gaactttctttataatggcgaacttttctcttcaaaaaagactgccaaaaatgtgaaatttctacaagtttggagaatatatttacataacgtatgtctgataaaaatttgtatccggcatatgcaaagatatcttaaaacttaagaagaaatataatttgatttaaaaatagtgagcaaaatatttaatagatacttcawcaaaaatgtcaaaggaacggcaagtgaacacattaaaaagtaacttgtgtgggccaggtgcagtgctcacacctgtaatccctacactttggtaggccaagctgggataatcacttgagcccctagttcaagaccatcctggcaacatagtgggaccctgtccctacagaaaattttaaaaattagttgggcatgatggcacacacctgttattccagctattctagaggctgaggtgggaggatggcttgagctcaggaggtggaggttgcagtgagtcatgatcatatcattgcattccagcttgcatgacagagtgagactctgccaaaacaataataataatctgcatgc

SEQ ID NO: 305208 - DNA, 613 bp, Homo sapiens
ctaatgggttacatacaatttgacctttattgtccgggaggcttttaaacctagcgtagttgtcgtagaaatgtagcaagaacctcaagcaattaaataaaaggcaaagcattcctatcactcccccataaaatgatgyatttgttttagattagcaactggaaaagaaatgtagaggagacgtgtagcaaaagcactggaagagggattcctaacttagtcccaagagacttcctttgaagagtgattccaggagctactgtgcaaagtgacagcatggcaacaagggaaatcaattctgcaaatctagatggcttggagaagatagtagaatggatcaattatatgagaaataaagacactcgattgggtagcatgatgtgagtagaaaaacacatatggtgtcatataaatatgactttgaagataaaggtgtggacattgatcctgttctgaatccataaggggatatttttgtcaacttacagactccttcttttaagagatctcaaaactgtcacttggctagcctaatagtagggagccactcggtgggtttttcttaattgggaaagtgaaataaattgtttgagatgtgtaagtatttacttaa

SEQ ID NO: 305209 - DNA, 532 bp, Homo sapiens
acttgtgagtttgaagataaggtggtaatagtatatgaggtaatctttaaaagttctggataagccctatttatttggaactctgtgaatcgaaataaaaagcaactttagagrtagatataaaccagatagtattattctattcaaaagttaatagaatagagtagaagcgaagattcccatttatattttgccattctcagaagttaacataagccggtagtgggcatggtgtgcatttgcttccggaatacctggtcccacagatgcttggcagggtgaaggatgggcataggttaacattaggttaacatgcgcctttagggctcacaagcatttatgacgacattttattataaaccatcactgatcgaaaacctttgttctcctctgtggatacatctttgatttttataaatctgagtttgttcggaagcaactctcatgacaaggccatttaaatcatgatgaggaatggcggtcagaaaatgagatgccatcataaaataacagaactgctttctttgtgtgg

SEQ ID NO: 305210 - DNA, 367 bp, Homo sapiens
ggcagagagtccattgagctgattaaccctcaggctgtctgcagacagcaaagctgaaagagctttgtaactctggggttgcaggcaaccactcctagacactactggggcctggaagcctcatagtaatgaggccgagagccaaaagcactcaccaaggtcattgcacctgccagtctgcacactctccctagggatttgagctgcagggcaaccaaacaggtgagccacactcctgttgcacatcctgcaaggagaatcagggagctcttccatttcattacttcatgtatagtataagaaacttactttttttcccaaagawgatggattggaggcattgttagcatgcctcttccacttggaa

SEQ ID NO: 305211 - DNA, 518 bp, Homo sapiens
atgcctattgaactaacagcaaacttctcagcagaatccttcaaagccagaaaggaatgggattctatctttagactccttaaagagaattractgtcagtcaagaattttttaaattaaaaaaaattctatttaattttgtgagtgcatagaagatgtatatatttatggaggacatgaaatgttttgatatgggtatgcaatacataataatcacattatgggatatgggatatccatccctcaagcatttatcctttgtgttacaaacaatacaattgtattattttaaaacatacaattaaatttgtattgactgtagtcaccctgttatgttatcaaatactaagccttattattcattcattcaattttttgtaccccttaaccattccgacctccccaccactacctcccctacccttcccagcatctggtaaccatccttctactctctctccatgggttcaattatttttatttttagatcccacaaatacatgagaacatgtgatgtt

SEQ ID NO: 305212 - DNA, 518 bp, Homo sapiens
atgcctattgaactaacagcaaacttctcagcagaatccttcaaagccagaaaggaatgggattctatctttagactccttaaagagaattgactgtcagtcaagaattttttaaattaaaaaaaattctatttaattttgtgagtgcatagaagatgtatatatttatggaggacatgaaatgttttgatatgggtatgcaatacataataatcacattatgggatatgggatatccatccctcaagcatttatcctttgtgttacaaacaatacaattgtattattttaaaacatacaattaaatttgtattgactgtagtcaccctgttatgttatcaaatactaagccttattattcattcattcaattttttgtaccccttaaccattccgacctccccaccactacctcccctacccttcccagcatctggtaaccatccttctactctctctccatgggttcaattattttkatttttagatcccacaaatacatgagaacatgtgatgtt

SEQ ID NO: 305213 - DNA, 634 bp, Homo sapiens
cacagcagaattctatcagaccttcaaagaagaattggtaccaatcctactgaaactattccaaaaaactgagaaagagggcatcttccctaacttgttctagggagccagtattgccctgataccaaagccaggaaaggatataacaacaaaagaaaactacagaccaatctccctgaacattgatgcaaaaatcctcgacaaaatcctagcaagcttaaggtaacagcacatcataagcaggtgctaagctatgaggacccaaagaygtaacaatgatacaatggactttggggactcggggaaagggtgggaggtgggtgagggataaaagagcacaccttgggtacagtgtacacattgggtacagtgaacactgcttaggtgattggtgatgggagcaccaaaatcttagaaatccccactaaagagcttattcatgtaaccagacatcacctgttcccccaaaacatattgaaataaaaaaagtaagtaaatttaaaacaaacaaacaaaaagaactgggattttgagtacacataaaagtgattccaaaagtgtgttccacttgggtctagaatactagacccaagagatacatcctgtgaaatttaagtgtctcatggacatgata

SEQ ID NO: 305214 - DNA, 610 bp, Homo sapiens
gtcttgtggcttatatttgaagtccacagtacatattaaaagggcttcttaaaagccctacagtaaagaaacccatttaactttgttaacccaagttccccacgtttacttagtaatcgaacatttttagccatgaaacacttatcttctctaagaaaatttttggaagtaccagattagaatcataattctggcttaattagtgtagagagaatgcattcttgtgacagaactggcacacctagaggctcacatgcagtatgaatctgaagaggatgtttttattggcaggcagagaatgcatgtgggtccaatgttctctggatttggtttggcaatgcaatcttgcttagtgtctcagaataattatattacctctttcttccagataacacacttgcatatacattctaaatgaacctggcattctggctattggttgagctaaggtatcccctttacartatacatggtcatgctagtaatccacaaacatggcagcaaatctgtatcacctgagacatcttgttcaaaatacagattctccagttccactaccgagattctctattaggaggtctgaggcaggcgctaggcatatttgtgtaca

SEQ ID NO: 305215 - DNA, 614 bp, Homo sapiens
tttttatctaatgatttatctatcttttcaaagcttgttgatttatacatttttttcattacaatgcaatggaacaattcaggctaattttagatttattagatggtgatttttttggatattattttatttcagacaaggctttatttccgttgttctattttgctgtttttaaacaatccaaaacattttagcatgaatatgagcgaattctcacaatattgcttcactcttttatatctcatgattacatgtttaattsttccctgtttgcagctatatcaacagttctattgattagaatcaaattaattcaaaacattatttagctaaatttaaagaatgagttaatatctcagacattttcaaagatatgccttgggtaataaaatcattctataatgtaaggtattatgaacttttcaatgtactttctcataagaacttttcagattctacaacaataacatgatgatatagagaagataatatctccatggaaaaaatatgactactatgggtcagaaagactaacttaattggagaccacacataaccagaataagaacattgggatccttacgtccagctcagagttctctctgaaaatactg

SEQ ID NO: 305216 - DNA, 532 bp, Homo sapiens
ccttgaagtctgctatctgagagcttcctctgcacaataaaacttggtctccacaaccttttatcttaacctgaacatttcctttctattgatcccaggtctttagataaactcaaccaattttcaaccagaaacattaaaaatctacctataagctggaagcccctgcttcaagttctcctgaccttctggaccaaaccaatgtatttcttaaatgtatttgattgaagtctcatgtctccctaaaatgtataaaaccaagctgcacyctgaccaccttgggtgcatattctcaggacctcctgagggctgtgtcacgagccatagtcactcatatttgggtcagaataaatctcttcaaatattgaactgagttggatacttttcatcaacagaagatagcttgaggacaaagatatttatgatgactattaaagaaaacaataaaataatatttaaagagttataaataataagcaaaaaggaaataaattttaaattatctttaaaatattcaagccaaaagagggca

SEQ ID NO: 305217 - DNA, 612 bp, Homo sapiens
gatctgtgttgggctggtgggcgagcaacagctgcttttgttatctgagaatgaggcatcctggggctgtgggactgctctaggcttaatgatttgggtgttttattaaataaaggcactcagatgacattctagtggaggatgaagcatcaaaaggctcaagaaataaaaacaacctttaccttgaatattttcagttcagttccaatggggttgcagttgtatcaagttaaaagacttacaaaatacttcacaataactttttgaggaaaagccttttgtccttaacctgatttgaattggttccagcaccatctggagaaagtgttaaatttggtctctkgaatcatatatggcaaaaaaacaaaaacaaacaaacaaaaaacttgctttagtgcttgtagcccttttaaacctcatctttcatgaaatggtcgtaactattccacgtcaccatgaccatctggaactctagcagggataccctgggtgtttcattagtttgcagttggctttatccaaatatagctttggttgtactatagagtcctcccgtagccttgtcacagtcttcaaacccatcgacacattgaatccaccagcaagcatttg

SEQ ID NO: 305218 - DNA, 535 bp, Homo sapiens
ccttgtcacagtcttcaaacccatcgacacattgaatccaccagcaagcatttgttggtgaatgttattgccaggctctgtgggaattgcttgggttgcaaagataaataagacagtcactaaactcaaagagctcataggaagtacaagagagatgttaaataaatcagtacacaacaatgtgcaagggcaagttgtataaccattaggagaggcatgaaggtgcaatctacctggggttagtggtgaaagctgcacaagaggttctggagagagtcatcatctggtctttaaaagaaataaagtcaataaacagctactatttatggagctcacaaaatgtgccagcyattaaaccaggcagtttaatttactttatttaagttaacacaactctgccatgtattcactattataaatctcaatgtacagacaggaaaactaacagagaggtaaaaaaactgaaggtcacacagccagaaaggctcagatcacagacatgattttaagtttgtctgacttcaaaacccattct

SEQ ID NO: 305219 - DNA, 624 bp, Homo sapiens
tagcaccgttgccacaaattatttgaccatacatgttagggttaatttctaggctctctatttggtttctttggtttacttgtctatctttatgccagtaccatgcttttctgattactgtagctttgtagtaagtcttaaagtcaggaagtatgagtctttcagctttgttctttatcaaagttgtttcggctattcagagtctgatatatcaagtttggatatttgttccccacaatgccatgttgaaatgtaatccccagtgttggagatgaggcctggtgggaggtgtctgggtcatgggggcagatccctcatggcttggtgctgtcctcaccatagtgagtgaggtctcacgagatctgattatttaaatgtgtgtggcacttcctgcctctctttctccygctctgccatatgagatacttgctcctgcttcaccttcccataaaagttcctcaagccttccccaaaagaaaagcagatgctggtgctatgctttctatatggtctgcagatggtgagccaattcaccttcttttctttataaattacccagtctcagatatttctttatagcaatgcaagaactatctaatacagggttccttgagatttcatatt

SEQ ID NO: 305220 - DNA, 594 bp, Homo sapiens
cttgtaagtagacacatatctccagaaataggttcatgagagacttgatacacatctatcatgctccagagtcttgcttccttagaccagcatgagatttatgaataactatcccgctctcatgcctgggtgtgtggagtgtggcacttggactcacatttactttaaatagagtgcagttggttttgaacctctgcagctataagttcttaagttactcttcctagttgcttcctagttattcttagctagtatgagaggtaactaaaaagaggaagaaataaaagagaaggaaagctttgtgttagatgcttttcattctcctttctccgtagctttcataagaattacaygaaaagatggctgagcctgaaatttgtcatttttgacatgccaaccagttagcaatgctgcaaaattctattgggttgttgtaattactgaaatgctgtatgctcaggtaagtcattaatgtcatttctacaaagaatgaaaaggtcatgtgtcttttctgggaatttctgttgttccagctggggatatacttaaaacacatggtcaagcagcttgcaggtgttgcgggactgagagaag

SEQ ID NO: 305221 - DNA, 594 bp, Homo sapiens
cttgtaagtagacacatatctccagaaataggttcatgagagacttgatacacatctatcatgctccagagtcttgcttccttagaccagcatgagatttatgaataactatcccgctctcatgcctgggtgtgtggagtgtggcacttggactcacatttactttaaatagagtgcagttggttttgaacctctgcagctataagttcttaagttactcttcctagttgcttcctagttattcttagctagtatgagaggtaactaaaaagaggaagaaataaaagagaaggaaagctttgtgttagatgcttttcattctcctttctccgtagctttcataagaattacacgaaaagatkgctgagcctgaaatttgtcatttttgacatgccaaccagttagcaatgctgcaaaattctattgggttgttgtaattactgaaatgctgtatgctcaggtaagtcattaatgtcatttctacaaagaatgaaaaggtcatgtgtcttttctgggaatttctgttgttccagctggggatatacttaaaacacatggtcaagcagcttgcaggtgttgcgggactgagagaag

SEQ ID NO: 305222 - DNA, 594 bp, Homo sapiens
cttgtaagtagacacatatctccagaaataggttcatgagagacttgatacacatctatcatgctccagagtcttgcttccttagaccagcatgagatttatgaataactatcccgctctcatgcctgggtgtgtggagtgtggcacttggactcacatttactttaaatagagtgcagttggttttgaacctctgcagctataagttcttaagttactcttcctagttgcttcctagttattcttagctagtatgagaggtaactaaaaagaggaagaaataaaagagaaggaaagctttgtgttagatgcttttcattctcctttctccgtagctttcataagaattacacgaaaagatggctgagcctgaaatttgtcatttttgacatgccaaccagttagcaatgctgcaaaattctattgggttgttgtaattactgaaatgctgtatgctcaggtaagtcattaatgtcatttctacaaagaatgaaaaggtcatgtgtctttyctgggaatttctgttgttccagctggggatatacttaaaacacatggtcaagcagcttgcaggtgttgcgggactgagagaag

SEQ ID NO: 305223 - DNA, 603 bp, Homo sapiens
ttgctagctgggtaaccttgggcaaaccaacttctttatgcctctttctgcatctttgagattaggactctaacastaattcttcatcagattgagagcacagtgaaataataaagataaaatgattagaaaaaaatctgactcatattaagggctcagtaattgttagattaatgatggtagtattttgtttattattatttttctttgtgtatcctgtaagactcaattttgcccatcaaacaaaaaattagaaatttccttcttagtaggggctggggctttagaccaagaaagaattagtttaaatagttaatagtagctttgacattgggagaaggagtgagtgatgattactatgatgttccatcctaatattctctgaggaccctctttgtgttggatggtgtttgctgtttctcagcttcgtacttgtgaatgtcttacagacatttctttatcaatggggctagaaatttgcttattacatttcatactcttttcctgggcagatttctgttaggttcttccagtggggaattactggaggtcagaaggtaggagaaggaaaatagaaggtgttgccagtcagcgatagtaaga

SEQ ID NO: 305224 - DNA, 388 bp, Homo sapiens
cagagagatcaaggtaatcgatttctcaactccatattccttcagtcctcaacagtaggcagatggcrtctaacactctagaccaatgtttcttaaagtgtggcccctgaccagcagtatcagcaccacttgcagatactcaagatcaagcctcagcgagatctacctagtcagaagctctggtgttggggcccagcaatctgtgtttttataaaccctctagggcatactaactcaagttcgtgtttgagaactgtagtcaaatatgcggtgtagtcaaatatacagcacctgtaatattacaccttcctcatctgctggtgctagaagttatcatttcttgactataatatttcccacaagagccgtgtctagtcccagaatattt

SEQ ID NO: 305225 - DNA, 528 bp, Homo sapiens
cacagccgtaaaatagtagaagggaatgaaaatccatgtgtatgaattttcaacacatgttcatcatgaaactamtcctcatctgtgggccactgtgtttgactaattaataaatcacgcaacaatatacaaatgaaataatggaaatgtattagtaccaggtttggctgtgagtaaccaaaactaaaaataagagtgtctcaaacaagatgcttctctcttgcataaacccaggctttgtgggaagcctctatgaccaccatcctgacttctcataactccttgctttaccagcctaaaaatatagcttctgcttcaaggtctaaaataggcaatttagctctggccatcatatcctcatttgagtcaggaggaagaaggaaaagaagcaagaaaagtgtttgtgacatcccacctctaaggacgtatcacatttaccatatcatttccacctcctccatgaatcagaatctagctccagggaatgacagggacagtagtttttatttggagcagctatctttccag

SEQ ID NO: 305226 - DNA, 715 bp, Homo sapiens
attttaaaaccaaaaagagcccgaatagccaatgtaatcctaagagaaagaacaaagctggaggcatcacactacctgacttcaaactatactataggtctacagtaccaaaacagcatggtactggtacaaaaacagatacatacaccaatggaacagaatagagaacccagaaataagaccacacacctacaaccatctgatcttcgacaaactgacaaaaacaagcaatggggaaagagaagatgacactttaaaacaatgattttttaatttcttccagctcactaattccagaggagagaagcagaggtgaaaatgaagaaataaggaaagcaggaaaggacgccctacattccaaagggtaaactgagaaaactagtgtataagcaaatcatacctcattcccactgaggcctctcagtctacaaggcattctgcagtgaattccactgcagacaggaagaaagggagattgcaattttagatatcgggactggattttaattttataatactaagccatttaaaaatatattttttactttaaatcaatagtccattcatatgttggaaaaatccraacaatgacaagatattatcctatttcatttctttgatttccctataggtaacagcttttgttaaattcttgtggagttatttgttacataaaagtaacagattattgtgtctcttatatttctttgtctat

SEQ ID NO: 305227 - DNA, 528 bp, Homo sapiens
tatgtcctttcctagttttggtattaaggtgaactgtcttcatgcaatgatttggacaggattcccactttctcaatgttttggaataatttcagtaggattggtacgaattcttctttgaatgtctgatagaattcagcagtgaatctggtccttggtttttatttttttrttggcaatttttaaattactgatgcaatcttgctgcatgttattgatttgttcaggatttctacttcttcctgattccagctaggaggttttgtgtttccaggaatttatccatttcttctagattttttattttgtgcacataaaagtgttcatagtagttttgaatgattgtatttctgtggtgtcagttgtaatgtctctagctttatttctaattgattttatttggatcatctctcttctttttttggttaatctcactaatggtctaacaatgttttaatatcttcaaagaaccagctttttgtttcatttatattttctatgtttttgtttcaattttattatttctgc

SEQ ID NO: 305228 - DNA, 611 bp, Homo sapiens
cagaacactaatagaagttttggacttaaacttgacacttgatcagttacgcctaatgggcatctacagacccctccacccatcaaccacagattatgcattcttctcatctgaacacagaacagatcatgagattgaccacatgctctactataaatcaagtctcaataaattcaaaaaaatttaaatcataccaaccatactcttggaccacagtgaataaagatagaaagcaatactaagatgatctctccaaactatacgattatatggaaattaaacaacttgttcttaatgccttttgaktaaacaaaattatggtgtaataaaatttaaaaactttttgaaatgaataaagacagagacacaacatatcaaaatctctagaatgaagccaaagcagtgttaaaggaagagtttacagtgctaaaagcctacatcaaggagttagaaagatctagaattaatctaacattatgcctggaggagctagagaaaacaagaacaaactaaccccaaatccagcaagaaaaaaaaagaaatggctaaaattagagcctatctgaataaaattgtgaatcaaaaattcatagaaaaaatcaaggaaacca

SEQ ID NO: 305229 - DNA, 611 bp, Homo sapiens
cagaacactaatagaagttttggacttaaacttgacacttgatcagttacgcctaatgggcatctacagacccctccacccatcaaccacagattatgcattcttctcatctgaacacagaacagatcatgagattgaccacatgctctactataaatcaagtctcaataaattcaaaaaaatttaaatcataccaaccatactcttggaccacagtgaataaagatagaaagcaatactaagatgatctctccaaactatacgattatatggaaattaaacaacttgttcttaatgccttttgagtaaacaaaattatggtgtaataaaatttaaaaactytttgaaatgaataaagacagagacacaacatatcaaaatctctagaatgaagccaaagcagtgttaaaggaagagtttacagtgctaaaagcctacatcaaggagttagaaagatctagaattaatctaacattatgcctggaggagctagagaaaacaagaacaaactaaccccaaatccagcaagaaaaaaaaagaaatggctaaaattagagcctatctgaataaaattgtgaatcaaaaattcatagaaaaaatcaaggaaacca

SEQ ID NO: 305230 - DNA, 531 bp, Homo sapiens
aaattgctgacttgacacctttctcttttttgttggaatatttcaatgactattacttttcagaccatgcacagttccctgggaactttgtaccctattggttttatcagccttctagctggtactgtagggcatttatcaaatgcctgctgttgtagaaattactttagaatcgtaggaggtcaacaccaaggggttctaggaaaagaagtagtcckgcctgctcattttcagttaacaaaatggatgcctagaaaaggatactagcagaagaaagctctagttttccactatgctatattggaaatatgacatagaatgagacaggcatcagctatttaaatgaaagacattactttctccactttctctttccttatttcctttttctttaccctttttcctattttctttctttttttccttctttcaaacatttatttaatgtccgttttacttgctagttttcaaggcatttatgaggatgtgtgtgtgtgtgtgtgtgtgtgtgtgtgtgaaactcattactgg

SEQ ID NO: 305231 - DNA, 599 bp, Homo sapiens
aggacctaccagatcatacggctgttctttctagtatggaattcaccaagatgagattatttaagcctcaggaattgatatcctatgcaataaataggaaatagctgtctgaggtttgggggtatagtccattccttcctttaatttacatactaycatacatcaaatatcttgaacattttttttacatcccttgtggacctcactgtttctctgtcaatgacaaagttgtctatctcttgatgatttggattttccataatggtgcttctttggagacaaaacatttaaagacaccctggggaaaggttatgctctatggcttcttggaaagaatctaagcactagactctgattaatggagcagtcttctaaaatgaaatttcatatttactatactgagttggactggactacacttgccctatttcaatgtcttgagagaatgatgacagtgtcttaactaaaattattttcaagtgtttggtattcaatcaacaaataagcaatgcaagagaatacacatgcaatctattaattcctggtagtcttccgatatctctctgatattttaacagagatgctgataaagcgcagga

SEQ ID NO: 305232 - DNA, 609 bp, Homo sapiens
attctcagagatgcattcttatagattcccaaccactgtgtccataagatttctttgagtactagcccatagagctaggagctatacttttgaggtccaaagtcacttttaagtggcatcaagtgtgattagataactttgcttccttcgtttcttgttttccttatctcctcttccctcaatgttatggcctatttctgtattgtcttgctttttatgaagtagtaaaaaatattcttgttcaatgtcactctctagctagataactattaatgtatctttgtactattgcatctgtcttgtttctttcacagcagtaattacaatattgattttattatttatgtgtttacttgatcttcattaggtctatctcacaaagatgaaatcagtggccatgtctgtcatcttttttgatgtatccctagcacctttatcataggcctggcatagagtagtgctaaataaacattggttgaatgggtgaatcccaraatgtagtcaattcctgatcttgtctacttttccttatggtggccactccgttctaaaccttcccctcaccaaactaattttcttatggtggccatgctgtaaaatgagctgcct

SEQ ID NO: 305233 - DNA, 555 bp, Homo sapiens
gcaatatgtcagggaggtgccgctgcagctggtccccaaccccttgcatgcccaggcagcagtccctcagcccaaccaagagcaagggcagtcaggtatttgcrgactgcagcctcagccaggcagggccaagccctccagtcccatccagtcatggttcaacttgccacccagggccccaaccctgcaagctaggaaggtacagaagaactcctaggagaaaaggaaggaggggctctcaggtatatgtaagtgcatgggacttggagttagacaggattggggttcaagcccctgcaaggctgtgtgaccttgggacatctcttttccctgggtttcctcgtatgtaaaatgggagtaataatcgtacctactggacagagccggtgcctgaaggagggctgggcccatggctgttagaaacacatttccctcctgtgagatctccaggccaggagaggcattttctcccattttcatgttgtcacttacccagggggtggtctctccattgcagagctgagatttaaatgcggaaatgtctggtgcagatgc

SEQ ID NO: 305234 - DNA, 589 bp, Homo sapiens
ggtcatgtttcagagagaacatcgaaaaattacatcctaaagacaggggcctgagcttacattttatcagggaacctgccctgatattcacgtaggttcttttctattttccttaagtgtcggccagcttgagaaataaagggacagagtacaaaatagagaaattttaaagctgggtgtccrggggatacatcacatgtcagtaggttccgtgatgccctacaagccgcaaaaaccagcaagtttttattagggattttcaaaaggggagggagtgtgtgaataggtgtgggtcacagacatcaagtactttacaaggtaatagaataccacaaggcaagtggaggcagggcgagatcacaggactacaggaccagggcaaaattaaaattgctaatgaagttttgggcaccaatgtcattgataacatcttatcaggagacagggttttgagagcaaccggtctgaccaaaattattaggcgggaattttcttttcctaataagcctgggagcgctatgggagactggggtctatttcaaccctgcagtctcgaccacaagagacgcgcacacctcggggggccatt

SEQ ID NO: 305235 - DNA, 630 bp, Homo sapiens
attaaaataaaagcacaacatttcaaaagtatggaatgaagctaacaccatgcttagaaggaaatttatagtagtaaaaacctatctttaggaagaagaaatatttcaaatttataacctaagcttccaatacaaatcactggaaaaaagaataaactaaactcaaactggtaaaattaaggaaayagtaaagactataatgaaaattaatgaagtagaatacagaaacaatatagaaaactaatgaagctgaacattgttctttaaagagattaacaaactttaagctagactgaccaagaaaaaaagaggcacgacagattcctaaaataagaaatagaagacagagcataatactgaacttgcagaaataaaaagggtcataaggtatatgatgagcagtaactgtatgttaacaaattagataacttaaatgaaatgggcaaattcctagaagacacaaactgcaaactgactcaagaggaagtaaaaatcctgaaaagatttaacaatagattgaattagacatttaaaacttcccacaaataaaaacaggcccatatggcttcatttgaattataccaaatgtctaaagataaattaacatcaattttccacaaattcttccaa

SEQ ID NO: 305236 - DNA, 634 bp, Homo sapiens
tcaggaaatttttttttttttttaagcattcagttggaaaagaaaaaggaaaaccatatatatttgcagatgatattatgtatagaaaatcctaaggaatccactaaaaaaaatcatcagataataaattagttcagcaacattacaggataaaagatagattcattatttcaactgatcaacataaaaaatcaggccaggtgtggtgactcatgcctgtaatcccagcactttggaaggctgaggtgggaggaccgcttgagctcaggggttcgagaccagcctgggcaatatggygagaccccatatctcccaaaaatacacatacacaaatagctaggcatggtggtatgcacctgtagtatcagctacttgggaggctgaagggggaagacggtttgagcccaggagacagagattgcaacgagccgagattgcaccattgtactccaggctgggtgacaaagccagacactgtctcaagaaaacaaaaaagatcaattgtatgtctgaatattatcaatacataatacgaagaggtcccatgttcatcaattggatgatctaattttattaaaatggaaatactccccaaattaacctatagtttcagcacaatcctcatcaaaattct

SEQ ID NO: 305237 - DNA, 634 bp, Homo sapiens
tcaggaaatttttttttttttttaagcattcagttggaaaagaaaaaggaaaaccatatatatttgcagatgatattatgtatagaaaatcctaaggaatccactaaaaaaaatcatcagataataaattagttcagcaacattacaggataaaagatagattcattatttcaactgatcaacataaaaaatcaggccaggtgtggtgactcatgcctgtaatcccagcactttggaaggctgaggtgggaggaccgcttgagctcaggggttcgagaccagcctgggcaatatggtgagaccccatatctcccaaaaatacacatacacaaatagctaggcatggtggtatgcacctgtagtatcagctacttgggaggctgaagggggaagacggtttgagcccaggagacagagattgcaacgagccgagattgcaccattgtactccaggctgggtgacaaagccagacactgtctcaagaaaacaaaaaagatcaattgkatgtctgaatattatcaatacataatacgaagaggtcccatgttcatcaattggatgatctaattttattaaaatggaaatactccccaaattaacctatagtttcagcacaatcctcatcaaaattct

SEQ ID NO: 305238 - DNA, 533 bp, Homo sapiens
gttggtttcttctgagacctctctcttgggcttgcagatggctgtcttctccctatgtctacacatagccttctctctgtatctatctgtgttctaatcttctttcttataagggcaccagtcatattggattagaacctatcctaagggcttcatttattttaattacctctttaaagatcctgtctccaaatacagtcacattctaaggtgcaagggagtaggactccaacatataaatttgaagaggacacaacttagtacatgacagagtttctgtatgacccagcaatttcattcctaagtgtctcaatttgtttgatctgctatttaaaaaataccataaacttggtggcttataaacaacagaaatttattwtccacagttttgaaggctgggaagtccaagatcaatgtgtcagcagatttgatgtctggtgaggaaccattttctgattcataggcggagccttcttactacattctcaaatggtggaggaggcaaggcagctgtctggtgcctcttgtattag

SEQ ID NO: 305239 - DNA, 575 bp, Homo sapiens
tccaatctcagaactttaaatagtatctatagtctaatgactttaaaatacatatttccagccccagcctttttctaagttccagactcacatatccagctgcttactcaacatccccagccgcatgtccaattgctgtctcaagctcaacatttccaaagctgatctcttggtcttyaacaactcgtcaaacctgctccactcacgactgtcccacatttcagttgacagcatcttcatcctttaagctgattgtgctaaaagcctttctggcatcgttgactcttgtttttctttcatatcccacattcaatctgtcaatattggctctaagttcaaaatatatctaaaatatcaccatttcttacccatgatatccaagccatcattatcccttgcatcttaattcatctccccactgccacctttgcaggcctatattctattgacaacactacagcagagtaatacttttaaaacatgaatcaaatgatctcactcctctatcaaaaccctgcaatggactttactcaaaataaaatctggagaactttttaaaatgtagttttaaaaca

SEQ ID NO: 305240 - DNA, 644 bp, Homo sapiens
acaactccaactcggactttgtctgggccaatgctaaacatttctgtcacttccaacataaatctcttgatttgctcaaactgtttctyctggatgctgcttgagccatcaatgaggaagtggatatcagcctcttttgtatccacacagcctgaaaaagaagtgcattctctgtaaattagagaacctagagagaactttgcaagagggtttgtgaaggaacatgaggctgaggcatttctaaagaatgaagacttcgtttttgcgtagagcctgcacacttcattaagcacagtcatgcccattttctcctttgaaatttacaacaccttgtgagaaaattgaaacagggcaaaatgtagtggtttgtctaaggtcatataaccagtaaattaaagagtaaagaccaaattccagagactccaggctccaagttaaatagtttttctagcattgacacctgccttcttagacagtttatgtcctatcatttcttgaaaaaaggcatgggattgacgatcttctattcttacttcaccaataatctcttcttcccagagcaactagaataagatatttaaatataaacttagatcatattatcctacctcttaaatgatctatcgttgcatttggaacttaaa

SEQ ID NO: 305241 - DNA, 644 bp, Homo sapiens
acaactccaactcggactttgtctgggccaatgctaaacatttctgtcacttccaacataaatctcttgatttgctcaaactgtttctcctggatgctgcttgagccatcaatgaggaagtggatatcagcctcttttgtatccacacagcctgaaaaagaagtgcattctctgtaaattagagaacctagagagaactttgcaagagggtttgtgaaggaacatgaggctgaggcatttctaaagaatgaagacttcrtttttgcgtagagcctgcacacttcattaagcacagtcatgcccattttctcctttgaaatttacaacaccttgtgagaaaattgaaacagggcaaaatgtagtggtttgtctaaggtcatataaccagtaaattaaagagtaaagaccaaattccagagactccaggctccaagttaaatagtttttctagcattgacacctgccttcttagacagtttatgtcctatcatttcttgaaaaaaggcatgggattgacgatcttctattcttacttcaccaataatctcttcttcccagagcaactagaataagatatttaaatataaacttagatcatattatcctacctcttaaatgatctatcgttgcatttggaacttaaa

SEQ ID NO: 305242 - DNA, 522 bp, Homo sapiens
acctaatgacatcatagctgtcataatgtggtagtgcaaggtattgccttttctgtgtttagatgtgtttagatatataactccttaccaytgtattatacttgcctacaatattcagcatagtaacatgcagtacaggtttttagcctatgagcaataggttgtatcatatgccctaggtgtgtagtaggctacaccatctaggtataagtatactctatgatgtttacacaatgacaaaatcacctaatgatgcatttctcaggaagtacacccattgttaagtgacgtatgactgtgtgtgtgtgtttgtgtgtaaatatatatttcatgcttgtaaaaggaaaggaaggcaatggttttagtcacgaaaatacttagaatttgttttctgtgtcgggttccttttctttcatttatgagatcaagattcaaatggatctataaacaaatggactgactcaatccatggagacatgtaatattgagattgaagcaaattaatggataattaaagttttt

SEQ ID NO: 305243 - DNA, 579 bp, Homo sapiens
cctgctgggatatccaatattagggcctctattgatggttctttcctgctgcaactttgcagaacaagactcactggagagatctcgaattcctagtccctttgcacctgaccaggcatcatagtatccacatcgtttttccctctgcttcaaggctgaaggactttgcgcttttcttaagtgcaaactcaaatcctaattatacttcagaactagacccgcctgctctctgactactgcagcctctgtctaatcctccatatttccatctgccccaaacactcagtctacatcaccatcaccattttttaatagctaagatgtatactctatttagctgtactgtttatttgtgtgtatatgtttggtagtgctatctccactgaaacttttgagagaaggtaccatgttttcttctactttggggttgtcctaatacaatgcaaagcaagtaaatgcctgctaaccttaaaggatatagtaggttagggggaaatgcagaaatggwtatgcagagtatgatcccaattttttaaaatgtcatatgcatttatttctaagatgtggggtcgaggatat

SEQ ID NO: 305244 - DNA, 607 bp, Homo sapiens
cctgcttaggctatctatcatccctttttacttgcccttctgtctctacccacattgttgctacagaatctgccatatttatctaagatctgccccctggccactattcattggcttagaggtggaaatctgacccaagctatagtcccaatgatggttcatccctgaggaatggcaacttagatcactccctttctgggagcctagacttaaatttgggagccatcagtgaccaggttttctaccatatgggtgggataagttgaaaaagcctgactgaagagagagaaaaagtaraaattagccaacagagagagagagaggagcagaaattttaaatggagaaaacatctgatggagttctaaacttggtcccagttgtttctgcaatctagctttagccctcaccttgaagtctacaagatatccccaagtccttacaacgaaatccctcagttcaaacctggtttttgttatctgcactaaaaaagacatattttgtgtaagatcttactgatattttctttgaaatattattttctttccattctctaaacacctgctttaagttctcatccccaactggctctcaactacattccctacc

SEQ ID NO: 305245 - DNA, 558 bp, Homo sapiens
cacttttcagttttccctgaggaaaatgattaagaaggcaagaccaggaaccagtctggaattttcttttcctgacagaaggaattctgacaaaattgctacattctgaataatgaaaaaatatgcttttaaaatgtgtccactcatagatgcataatgaagagccccctgccccttccaaaaaaaggagattcactcaggctgacacatatcttaaaagaatatgttttattttcctgaatcaggggtaatacgagggtgacatcagctcacttgtcctggatttgtgtttctgaggaatttctggattactatgatgcatgaaacataaatcaacagcataaaatataaatatacacgttrattaatacatacaaagtgaactcctgtgaaaatacaacttcgacagaagaatagaacattcttatcattcgtgttttccttcctggtcctagccacctccctccacaagaggattacagactggagtccccagaaaacagtctctgaaacagagacgagcatgtaggacatttatatgggagtgtctttaaaatc

SEQ ID NO: 305246 - DNA, 445 bp, Homo sapiens
  misc_feature (1)...(445): n = A,T,C or G
ccccacctgctaggagtgctgtgagcagaaaggcttcagctggtcgactttagagcctgccacagtttcagagctgccacgtccacaggtatgcccttctgggtgatggaggcaggggatacagacccagccaagttagcccacactggggtaactcacacaagcccacttaggtccagagatccctgtggggttggcygaggctgccatcacaactgannctgcactgcagttcaacttctctttcagtccactcctacttccacccaggccagaaccacaggggtggggtggggtagggtggggtggggtgggggtgggggtgggggcagcagatggaagagcagggaatctgaggcagaaatcaagcccatcctcccacccctgtggctctgactttcagaattctttggtggcagctaacggtttggaacaaatgcagtat

SEQ ID NO: 305247 - DNA, 575 bp, Homo sapiens
cccaaaataaatcataatgtgaaatttattcactattkagaattgcatttattctattaaggatatattaacttaatttacttcagaaagtagaagtttggagtttaatatctgaaggaattcaggcactaaaagtgccaacttttcaattttctaacagaatagaacacaattgaacttactttatctgacttgggtttcactttccattttctctagaaaataaaaagatattgaataaaagaaaagtaatccagaatttcaaaagtgtggaaaagacattaaattttttttcaggcttcatcattagttatatttgccttttattaacccaaccttcataatctgtatttctgcagctgttttaaataagaagataacatcagagtaaaagatagcaaattctgctctaccctgcactcgttgattcccactgggaaatattgatggtatgtctgcaaatgtgaaaaccgtactatcagaaataggcaagatgattttggatgtgagatgatttaaatggaatatgattaactttctcattgatgcaatcagaactattaaaagataaaata

SEQ ID NO: 305248 - DNA, 576 bp, Homo sapiens
ctgtgtactaaataatattggaatatagtatactttactttctctatgtttaagccatgccgaaaataagcaaaaatgacttagctacttgctttaagaaatacttgctcctaatggacaaggctgtgactaatcaaagtggcttacttatctatatcaaccagcttgctctagaagacttgtttcaactccttcatctccccgtgtccaacaatttaaagctatcatgtcaygaactctgccaaacccaaagagttttccgtcttgcaaaacccacctgaaattcacccagtctaggacctaaaccctataaatatcctccctgggttcctttctgagacactactaagactgtcaatgttgtgtttacctttactgcagtaagttggatcaacaggtttttctgatagtcttctggaaaacacaacagttggcagcacactgtaatcatggcttattacttcatgttacagtatcacagtggaaggtgaagccaacagtgtgtggatggttgggggtcgtagagtcaataaagccttaatgagagggtgacatgagaggtgggtctgaaaaagt

SEQ ID NO: 305249 - DNA, 576 bp, Homo sapiens
ctgtgtactaaataatattggaatatagtatactttactttctctatgtttaagccatgccgaaaataagcaaaaatgacttagctacttgctttaagaaatacttgctcctaatggacaaggctgtgactaatcaaagtggcttacttatctatatcaaccagcttgctctagaagacttgtttcaactccttcatctccccgtgtccaacaatttaaagctatcatgtcacgaactctgccaaacccaaagagttttccgtcttgcaaaacccacctgaaattcacccagtctaggacctaaaccctataaatatcctccctgggttcctttctgagacactactaagactgtcaatgttgtgtttacctttactgcagtaagttggatcaacaggtttttctgatagycttctggaaaacacaacagttggcagcacactgtaatcatggcttattacttcatgttacagtatcacagtggaaggtgaagccaacagtgtgtggatggttgggggtcgtagagtcaataaagccttaatgagagggtgacatgagaggtgggtctgaaaaagt

SEQ ID NO: 305250 - DNA, 468 bp, Homo sapiens
acatccttgtcatgttccagatcttaaaggaaatgctttcagtttttttctcattcagtatgatactagctgtgggactgtcatatatagcttttattatgttgagatatgttcctttttatacattcctgtgataaatcctacttgttcatgatgaatgatctttttaacgtgttgttgaatcagtttggtagtattttttgaggatttttgcatcaatatttatcaaggatattgccctatagtttcccttttttttggtgtgtctttttctggttttggtatcaggataatactggccttgttgaatgattttggaagtacttccttttcctctattttttctgaatagtttgagtaggactggtattagttcttctttaaatgtctggtagaattcagcagtgaaaccatcaggtcctgggcttttcttcactgasatattttttattacagctttgatctcat

SEQ ID NO: 305251 - DNA, 548 bp, Homo sapiens
ttaggttttggtatgttgtgtttccattatcatttgtttcaagaaatttttctatttccttcttaattgaaacactcttttactcctgactgaagagcagaatcctctgctgggcgggtactcttgaccaccacccacttcaccaaatcaatggggtttgtgtaaagacagtgacaactgattttgcttatacagagaccacacagtgaggaacccaagggttgtactgacaacatctcttcagaggaaaaccacacattagaaaacatttattcgtcatgtccacatgtggttccataataagacaatttatttgactttttaaaatttaagatggtagagctcatgtcaagcattcttaccatagtatgtataaataaatamatacatacatacatacataaaaaatattcttgctacattgtggttggggttttcagaaattttctaatccagaagataataagttattttcatgaatcaagacaaatgagagttttatctaagccctcctaactgaacaaacaagatatagttttatggacact

SEQ ID NO: 305252 - DNA, 614 bp, Homo sapiens
gaaattgaccatattgccaactcagtttaaaccaagtagtttatgttagtcctattcttgcagtgggcatgtgaaattcttctagccaattatacacaaaggaagatccaaacattttttctttttatttatacaccctgtggtaagaacacttgatatgagctccaccttcttaaatttttaagtgcacaatacagtatcagtaactataggcataatgttgtacagcagatctccagaacttactcatcttgcataactgaaactttataccccattttctcctcctcacaacsccctggcaaccaccattctattctccatttctatgtgttttactattttagatacttcataaaatagaattatacagtatttgtccctctgtgattgatgtatttcatttagcataatgtcctttaggttcatctatgttgtcacatattgcaggatttccctttcttttagagctgaataatatttcattgtatgtatatacctcattttctttatccattcattattgatagacatttaggatgtttccagatcttgactattgcgaataatgcctcaacaaacataggagtgcatatatatctttgagatcctaa

SEQ ID NO: 305253 - DNA, 647 bp, Homo sapiens
gtcatatgcagataattttacttcttttttatttacttacttattattgatacaaaatattttacatacttatgaggtacacgtgagtatttgttacatgcatagactgcaatgatcaggtcagggtatttggggtatccatcaccttgagtatttatcatttccatgtgttggtaacatgtaaagtcctctcttttagctactttgaaatatataaaaacttgttgctaactataatcgccctactcagctctcaaatattggggcttattttttctatctaactgtacatttatctcactaarcaacctcttttttattccctcctcctatccacacactctttccagcctctgatatctgtcattctgttctctatctttatgagatcagttgttttttagttcccacatatgagcaagaacatgtgacatctgtctttctgtgcctggcttatttcacttaacataatgacctgcagttccattcatgtttctgcaaatgacatgattgtgttcttttatatggctgaataacaatgtgtatatataccacattctctttatccattcatctattgatggtcatttagattgattccatatctttatctctttgtagaattctttaggttcatattatttggg

SEQ ID NO: 305254 - DNA, 647 bp, Homo sapiens
gtcatatgcagataattttacttcttttttatttacttacttattattgatacaaaatattttacatacttatgaggtacacgtgagtatttgttacatgcatagactgcaatgatcaggtcagggtatttggggtatccatcaccttgagtatttatcatttccatgtgttggtaacatgtaaagtcctctcttttagctactttgaaatatataaaaacttgttgctaactataatcgccctactcagctctcaaatattggggcttattttttctatctaactgtacatttatctcactaagcaacctcttttttattccctcctcctatccacacactctttccagcctctgatrtctgtcattctgttctctatctttatgagatcagttgttttttagttcccacatatgagcaagaacatgtgacatctgtctttctgtgcctggcttatttcacttaacataatgacctgcagttccattcatgtttctgcaaatgacatgattgtgttcttttatatggctgaataacaatgtgtatatataccacattctctttatccattcatctattgatggtcatttagattgattccatatctttatctctttgtagaattctttaggttcatattatttggg

SEQ ID NO: 305255 - DNA, 578 bp, Homo sapiens
gcataggactatttccatgatcaatttcttaccgtactaagagcatatctcatccctgtgggtacagtacatctggtcacctctcctagaaaactagtctgtgccgattatactattgggaggttagcagatagtttcacagaaacaaagcatgaattttaaggcttgtgtttttgaagatagtatcctctttatttaaggrtacatggaaggcctaggaggaactgtggggaggatggcagcattctgtgcttcagggccaacctggatcagaaatacttctgtgtgatacaaaggatacccaaggaaatctgttctccctagaagttgaggtggggagggttatatacctgggaaaatcattgcctcatgtaaaattcagggagtctcagatcttgctttgttgtaatgtgttgatttccaatgctgtttttaattgttcaggaacatcatgtttttcctttaatagatgtcttaatttctcaggcaagagccagggtactataaataataaataagctagatttccttaggtcattagaagactggagacaagggattgggatggtttgcaaaag

SEQ ID NO: 305256 - DNA, 495 bp, Homo sapiens
tttttaattgttcaggaacatcatgtttttcctttaatagatgtcttaatttctcaggcaagagccagggtactataaataataaataagctagatttccttaggtcattagaagactggagacaagggattgggatggtttgcaaaaggagggaaagcagtataatacacaagtgaggagtgctcagtatcagaaagatttattaatattcattcayttattccctcatgtgtacattatctgtggcatgtcttccaggtactgtgcaaagtcatagctataactatgttgcacatttcacatatgttatatgacactttataacatacttgtgatatagaagttttttaaaaatattgcttttatagctgaggaaattgaggctctgaggggttaaattacttgcttaaggtcacagaactagttggtggtgaggctgagattcattcccaggtctgtgactccaaaccattgctctttttctgtcatgctca

SEQ ID NO: 305257 - DNA, 621 bp, Homo sapiens
gattctatgaccttgacttttttagattccatgtataagtgaggtcatacagtacttgcctttatgtgtctggtttattgcccttagcataatgtcccccaggttcatcaacattgtcacaaatggcaggatttcctttttatggtcaatgatatttcagaatgtgtgtgtgtgtatgtgtgtgacacatttcctttatgtatttatccatcaatggacacatgttttttctatatcttggctattgtgcataatgctgcaataaacatggcggaacagatacctatttgaaatattgatttcatttcctttgggtattcactcagaagtgtgattgctggatcatatggtagttctatttttaattttttcattaaactccatayagttttccataatgactgtaccaattttacatgtccaccaacagtgtacagggttcccttttttccacaccctcaccaacacctgttatctctgtctttttgagaatagccctcctaacaggtgtgaggtgatatctcagtgtggttttgatttgcatttacctaacgattagtgacgttgagcaccttttcatatacctgttggcctggtatatgtcttcttttgagaaaggtc

SEQ ID NO: 305258 - DNA, 621 bp, Homo sapiens
gattctatgaccttgacttttttagattccatgtataagtgaggtcatacagtacttgcctttatgtgtctggtttattgcccttagcataatgtcccccaggttcatcaacattgtcacaaatggcaggatttcctttttatggtcaatgatatttcagaatgtgtgtgtgtgtatgtgtgtgacacatttcctttatgtatttatccatcaatggacacatgttttttctatatcttggctattgtgcataatgctgcaataaacatggcggaacagatacctatttgaaatattgatttcatttcctttgggtattcactcagaagtgtgattgctggatcatatggtagttctatttttaattttttcattaaactccatatagttttccataatgactgtaccaattttacatgtccaccaacagtgtacagggttcccttttttccacaccctcaccaacacctgttatctctgtctttttgagaatagccctcctaacaggtgtgaggtgatatctcagtgtggttttgatttgcatttacctaacgattagygacgttgagcaccttttcatatacctgttggcctggtatatgtcttcttttgagaaaggtc

SEQ ID NO: 305259 - DNA, 608 bp, Homo sapiens
ttttcttaacttagaaatgcaaatcaatcaagactgattaaacagatactacatgaaagcattaacaagccatttggagatataaagatgacatggccacatcttcaaagagattaaaatccaagtagaaagatagataaatgattttcaaacaagaaagagctccaataatatatttaaggagcacaggaagaggagattttcatttcaagggaaaggaacagagggaacctaatgaaaattatggcatctggcacttttgagagaataagtcgatatttaactggcaaagaagcagggaaatgcattctagcgtgaagggacagcatgtacaaaggcccagaggcggactgtgcttatctctggagttctgctctatgctcttgctcccacagattagcgtacacccacctccaacctgcagctgcayggcgcacatctgtggaactccttgccacgtgaagaaagctggcatgaaaagtgagtgcagcgctgccaacattcaacactcagatctactgcacatgatcatcagatctgggtactgaccaagccaaatggacctaattaatcaccagggattgagaaaacagcgtaggcaggaatat

SEQ ID NO: 305260 - DNA, 608 bp, Homo sapiens
ttttcttaacttagaaatgcaaatcaatcaagactgattaaacagatactacatgaaagcattaacaagccatttggagatataaagatgacatggccacatcttcaaagagattaaaatccaagtagaaagatagataaatgattttcaaacaagaaagagctccaataatatatttaaggagcacaggaagaggagattttcatttcaagggaaaggaacagagggaacctaatgaaaattatggcatctggcacttttgagagaataagtcgatatttaactggcaaagaagcagggaaatgcattctagcgtgaagggacagcatgtacaaaggcccagaggcggactgtgcttatctctggagttctgctctatgctcttgctcccacagattagcgtacacccacctccaacctgcagctgcatggcgcacatctgtggaactccttgccaygtgaagaaagctggcatgaaaagtgagtgcagcgctgccaacattcaacactcagatctactgcacatgatcatcagatctgggtactgaccaagccaaatggacctaattaatcaccagggattgagaaaacagcgtaggcaggaatat

SEQ ID NO: 305261 - DNA, 608 bp, Homo sapiens
ttttcttaacttagaaatgcaaatcaatcaagactgattaaacagatactacatgaaagcattaacaagccatttggagatataaagatgacatggccacatcttcaaagagattaaaatccaagtagaaagatagataaatgattttcaaacaagaaagagctccaataatatatttaaggagcacaggaagaggagattttcatttcaagggaaaggaacagagggaacctaatgaaaattatggcatctggcacttttgagagaataagtcgatatttaactggcaaagaagcagggaaatgcattctagcgtgaagggacagcatgtacaaaggcccagaggcggactgtgcttatctctggagttctgctctatgctcttgctcccacagattagcgtacacccacctccaacctgcagctgcatggcgcacatctgtggaactccttgccacgtgaagaaagctggcatgaaaagtgagtgcagcgctgccaacattcaacactcagawctactgcacatgatcatcagatctgggtactgaccaagccaaatggacctaattaatcaccagggattgagaaaacagcgtaggcaggaatat

SEQ ID NO: 305262 - DNA, 602 bp, Homo sapiens
gtaatatagtgacccaattgagtaaacacatagaaagtgtcagrtatccctgtgggtaccatctcttataattctcacaacaatcctgtgagtttatccccattttacagagaataaattaagggggccccactgccaaataacatgcccagatgacataagggacaaaaccacggtttgaagcctcattgcctaattcttcctttggtgctggtcctggccttagggcattaacagtctggcggagaacagagcagccataggccttctctgaaagggcctaactgcataacccaagaccacctttcttcaaaagaaatgttcccaactttagatatgttgattcctctgagttgattgttacatgatgtatatatgtatcaaaacatcactttataccccataaatatatgcaattattatttgtcgattacaaataaaataaaaataaatacatatattttattgtctccccaaaatagaaaagaatgtcctactgaaattatctgaattttgaaattatacaaaaatatacccccaaaatttagcctttctcttaatgttttcagcttctaaaggtgatttttttgtttgcctcccat

SEQ ID NO: 305263 - DNA, 563 bp, Homo sapiens
cagtgagaacaagcaattgaagagaacactcacagaggaggctgagggcacagaggacttagctggtgactgacagagcttcaggagatgcagtgagaggtttgggggctttgggagcaggtggaaggaggagtagaagaattagggaatgttcagagcctcccgaggatgggagtccaggtgatgttggaagacgtggaggtgttggctttctgtggtggctgatatgaaaagggatagagggtatgataggatagactgcaagactccaaagcagataaggtgatgagtctctgagtgctggggatgatggtctaggagctctgtggccatctcctcatgcctcccagtgtcagtactagagccagggaagggctccagaattcttgggcacttctaatatttcctaccctataagagtttgacagttttattgagtataaagtgagatgggtggcatgaagtcattttacaaatgtagaacattatrtgtaaaataactaagcttatttactcttccctggtgttaatgaatgaatagatttttcttcttaacaagatgc

SEQ ID NO: 305264 - DNA, 476 bp, Homo sapiens
gaaggcctttcacctccatgcccttgtggttgcccctcacatcctcatgtccaaaacccagtggttgtctatggtctggaaactccctgtttcagaaatatgatgtrcacttgtaaatctttgtctagatgagaacaaggtcccttctttctgagaattaagcaaaatcaaaagtaaaaatcccattcttctaagaaaaaactggcagttctatagccacagtaacaaataaataccagaactgctactccattcagcaggaacgtactttcctctgaaagccagccaataaatgacagcctcccactttggaaaccaaccagtaagtggtgagctcactccagtgaaacagcttctaaggctgaggtcaatccactcctgcctctagaaacaacacaacccaaagacgcttaccaacaacccattgtcagatcagcaggttgcatttttcactgaggccctgcctgtggagcaga

SEQ ID NO: 305265 - DNA, 611 bp, Homo sapiens
gcaaactatcacaaggacagaaaaccaaacaccgcacgttctcactcataggtgggaattgaacaatgagaacacttggatacagggcggggaacatcacacactggggcctgtcagcaggtgtggggctgggggagggatagcattaggagaaatacctaatgtaaatgatgagttgatggatacagcaaaccaccatggcacatgtatacctgtgtaacaaacctgcacattgtgcacatgtaccctagaacttaaggtgtaaaaaaaaaaagattcgttggaaaatggcaagtggcaatgtttgtgggtagtaggtagtagagtgtgtgtgttagagactaacagatggtagagagaaagtgataataacaagcttattggcaactggattctttgagaagtactctcrgtgtgaaattagagtaataatgatctctctatctagattttaaagcagtttacataaataattatatttcaaccccacagtaaccttgagagtttgtaaaatgggtagatgtatttattatcacttcattcatgatcaagttgaggctcagaatgataaacagttgctcaaggccacatacccagttagtacagagcta

SEQ ID NO: 305266 - DNA, 611 bp, Homo sapiens
gcaaactatcacaaggacagaaaaccaaacaccgcacgttctcactcataggtgggaattgaacaatgagaacacttggatacagggcggggaacatcacacactggggcctgtcagcaggtgtggggctgggggagggatagcattaggagaaatacctaatgtaaatgatgagttgatggatacagcaaaccaccatggcacatgtatacctgtgtaacaaacctgcacattgtgcacatgtaccctagaacttaaggtgtaaaaaaaaaaagattcgttggaaaatggcaagtggcaatgtttgtgggtagtaggtagtagagtgtgtgtgttagagactaacagatggtagagagaaagtgataataacaagcttattggcaactggattctttgagaagtactctcggtgtgaaaktagagtaataatgatctctctatctagattttaaagcagtttacataaataattatatttcaaccccacagtaaccttgagagtttgtaaaatgggtagatgtatttattatcacttcattcatgatcaagttgaggctcagaatgataaacagttgctcaaggccacatacccagttagtacagagcta

SEQ ID NO: 305267 - DNA, 591 bp, Homo sapiens
aatacatccaaaccagtaggagttttattacgtctctagggaatgggaatatgtatcatttgtggtgaaagcagtccatgcagccacgaaggtgaagattgytactgacattgattaacattgcttgctcattggggataataaagcaggccaagtttgttctgttattatttttaaaggctctgtgcacacctttattgctagtccagactactaccatagccctttgtttgttataccattcttatgataaaatcattcatcatccaaactgtgcacttaacaaagtcaacccttttgagatataatttatatataatataatgcatcaattttaagtgtactattggaactgtttggcaaatgcatatttccatgtaaccataatcagtatagagagcatttccataatcccaaaaagtctctcgtgcccaaactgatgttctatttaagttcacagcaaaattgagcaacaagtacaaagttcctatatgcccccctaccctaaacacatgaggcctcccctgctatcaatatcctgcaccaacatggtacatttattacaatcgatgaacctacactgacacatca

SEQ ID NO: 305268 - DNA, 312 bp, Homo sapiens
ttattcctttggatccatgtaaatttacctatttaaaaatcaagttagaaatttactaaatatatttaaatagattctaatttttaaagagctcacttgtacattaaagtaggctcagtgctgtaacaactggacccaaactcaatagaaatgtgtaactagctcaggtgtttccaggtactagagcattccctcttgcttttcctcgaccctacttaaacttttaaaaatctttccttttattttatttcaatagtttttggagaacaggtggtttttggttamatggatacgttttttagtagtgatttc

SEQ ID NO: 305269 - DNA, 571 bp, Homo sapiens
aactaaggattcagagtaattacagcagtgctattttctttatttgtccccgtgaaaacagcaactctccatttttttatatagaaatataattttagtagtcttcatttagaattgtggaatatgaacattttcttggtctaatgaataggtgaaatgatagcattttccctatttctgtctattattctatataagccttatatagtcaaatataaatttcatgttgtacattctgaaaagcatagttacttaaatgatatctatcatcctaaattgtatgtrtccatttcattttatattcccattttaagtgacacttactgacttgaaaatattttttatcaactctcactttttaagtgtctctgtttgcccacactcacccacatcttaatctccccatccctactccccagaaaaaaaaaaagtaaaaagaaaaatagaattgtgcagggagctctactctgatagcactgatagaattcgttgtaggatattatagataccaaaaaaattgaccttagatctccgaggagagacactgctttgtttcgtggcttgtgtaacc

SEQ ID NO: 305270 - DNA, 630 bp, Homo sapiens
acacacacacacaccccctgcattctcccaaagtaaggctgtgatcatgctgctacctcyataaggaacgctatttggcaatctctgtcttatgaaatcctaatcatgcctcaaagtcttatcaagtctctttttctgagagatccttctgggtctttggctgagtactagtatgcatatgacaaagaggaaactaaggccagtaaaagaaccaatataagagagtagattgatgtatttcctgagctaacacatgaaaaagggaataatttgtgctcttataaactagagagttaagtcttcatagtataaggcatattaggtaaagtcatcagaaattcatcaccttagtgagagaaattaaggctacactaaatgctgctctgatcttgccattacaaatattagaaggaagacttgaaatgatcacacttacctgaaaataacaaaactgcatgccagaactaaatcccaaaaaaagttatttaaaggaatgcaacaaaatccagaaaccaattacaaaaaatcataagatcttgcatccaataaaaatccccagacatgcacagaaggtggaatatttgacacatagctagtagaaaaataaatagttacaaagatatccagaat

SEQ ID NO: 305271 - DNA, 630 bp, Homo sapiens
acacacacacacaccccctgcattctcccaaagtaaggctgtgatcatgctgctacctctataaggaacgctatttggcaatctctgtcttatgaaatcctaatcatgcctcaaagtcttatcaagtctctttttctgagagatccttctgggtctttggctgagtactagtatgcatatgacaaagaggaaactaaggccagtaaaagaaccaatataagagagtagattgatgtatttcctgagctaacacatgaaaaagggaataatttgtgctcttataaactagagagttaagtcttcatagtataaggcatattaggtaaagtcatcagaaattcatcaccttagtgrgagaaattaaggctacactaaatgctgctctgatcttgccattacaaatattagaaggaagacttgaaatgatcacacttacctgaaaataacaaaactgcatgccagaactaaatcccaaaaaaagttatttaaaggaatgcaacaaaatccagaaaccaattacaaaaaatcataagatcttgcatccaataaaaatccccagacatgcacagaaggtggaatatttgacacatagctagtagaaaaataaatagttacaaagatatccagaat

SEQ ID NO: 305272 - DNA, 544 bp, Homo sapiens
caaagcaaacattgttctgattgacaaaacactgagtacatttcagttaaaattagaaacaagtcagaaatgctttcttttattcctgttcttatgctaaggtatttttgtcaggctaaacattaaaaaattgatatcttttttctaattgtttcctaggtcctgtggagaaaaaagtctggtctttattgctagtgcttcaaaccctttatgttctagaaccacaacagatgctattattaataattttccatgattgtccagcyaaattctgtttttgaaagcctggtcagcctctttactcatgatttggtgttactgccatacatattttattctctgaaccaggttttctttgcccttttatgattaccagccttcatttataagctaatgtctcttttatgtttttatttttcccaaggcctctattaagttctacccctttcattaagacttcttgtttgtgtagcttctgattggatcattatttgaatactaattattgtaaaatttgataattgtgcattactatttttacttt

SEQ ID NO: 305273 - DNA, 548 bp, Homo sapiens
aaacaattcaataggatattaaatctgtacaatctttttaattttatttttatggaaagaaaagaaaaattgttaattttctacagtgtccaaggcctagtattaagtgatttttctctacattatctccactaatcttcaaaatgactcttctaggagacattaacacctatattttgcagatatggctctgacatgtatatatttctggtatattttatatggttgtgtttttattcacaacccagggtgttagtgtactggcattaacatttccaccaattagactactgatttttatagtccacatatctcagtatataaataggtcatatagaaatgttgtcatagccctgaatttgcttactgtagattattttaatatatgtatgtgtttagtatatacacatacatattttatacacacatatacatatatatcacatatattatamaatgatgtctcaacttttgattttaaccatgaggtgactctgttcatagcagatagttcttaatgtagtaggtctgtttcagttacttcagaa

SEQ ID NO: 305274 - DNA, 548 bp, Homo sapiens
aaacaattcaataggatattaaatctgtacaatctttttaattttatttttatggaaagaaaagaaaaattgttaattttctacagtgtccaaggcctagtattaagtgatttttctctacattatctccactaatcttcaaaatgactcttctaggagacattaacacctatattttgcagatatggctctgacatgtatatatttctggtatattttatatggttgtgtttttattcacaacccagggtgttagtgtactggcattaacatttccaccaattagactactgatttttatagtccacatatctcagtatataaataggtcatatagaaatgttgtcatagccctgaatttgcttactgtagattattttaatatatgtatgtgtttagtatatacacatacatattttatacacacatatacatatatatcacatatattataaawtgatgtctcaacttttgattttaaccatgaggtgactctgttcatagcagatagttcttaatgtagtaggtctgtttcagttacttcagaa

SEQ ID NO: 305275 - DNA, 603 bp, Homo sapiens
tgacgttgtgaattcctggtgcttgaaggttatatatcttaaatatattatgagagattttagatttatcttataaatgtgtgcatcaccaatatcgttaagatttttgctagtggttttcgcatcataagatagagaaaaagaaaaaaactgcctaaaaatgataccaatgagacwtctaaaatttgtgttattttttgaagtctagaaaaaaaccggatatttatctctaggttattgttagggaaactgaaattttaacttaaaaaatacattctggttaatttatgttgctgttgtgctaccagaaatgtctttattactaagtagactcaaagtatatataaatggatgaaaataaaacagacaccaaaggttggaagcatgatttgatgtacaatagtcttcctttattcacaggatctatgttcagggccctgaagtggacacttgaaatcacagatagtactgaaatctatatgcactatagggtaagagattgacaacaatagctaataattttaagtgaacaagcataacaatatactgtaataaaagttatgtaaatgtggcctctatcaacatatcttgtactatacttat

SEQ ID NO: 305276 - DNA, 603 bp, Homo sapiens
tgacgttgtgaattcctggtgcttgaaggttatatatcttaaatatattatgagagattttagatttatcttataaatgtgtgcatcaccaatatcgttaagatttttgctagtggttttcgcatcataagatagagaaaaagaaaaaaactgcctaaaaatgataccaatgagacttctaaaatttgtgttattttttgaagtctagaaaaaaaccggatatttatctctaggttattgttagggaaactgaaattttaacttaaaaaatacattctggttaatttatgttgctgttgtgctaccagaaatgtctttattactaagtagactcaaagtatatataaatggatgaaaataaaacagacaccaaaggttggaagcatgatttgawgtacaatagtcttcctttattcacaggatctatgttcagggccctgaagtggacacttgaaatcacagatagtactgaaatctatatgcactatagggtaagagattgacaacaatagctaataattttaagtgaacaagcataacaatatactgtaataaaagttatgtaaatgtggcctctatcaacatatcttgtactatacttat

SEQ ID NO: 305277 - DNA, 636 bp, Homo sapiens
aacatgccatccatggccaccaggatgtttgtgctgaggggtgccagcaggcctacaccaagctgcccttagcccttagccacttagtccccctggtccccctccctgagctcattggtgccaaaagtttcagagggggccaaggcaggagggatgggactaacatgttagtgcacacctggctgggtcatarcagcacctggcctcagcttcaactttgctctgaaattggagtgggcaccaggagcagtgagagtccagggagtgggaacagacatttccaagcctgcagggcttgggggcttcctgggccccaaagagtgcagggatggccaggtacactgcagatagatgactgaagctacacctgggagcactgggctcctgcccctccaagttggtaggggtcagggctcctgcctgttcccagctcctgctggccctgtggagcatgcaactcaagccatgccttccccactgaagttggtgtcttcccagcagctgaacgagttgggctgctgctaccatcagtaaccaaagtgatttaatgcttaatgatctataccgttggtattctaggaagaatagttggacaatatattagtccattttcatactgctataaagacatacctg

SEQ ID NO: 305278 - DNA, 654 bp, Homo sapiens
aaatactctccttactgctggaccagtttacctgaaggtggcactcctaggcaacgtagacttaccaccagcacttggctataaactcacaaaagcagtagctgtgcacaggcaacatcctcctagaaacttctaaaccgatctccacctcactcactrccacatgtcttttgtagttgtactataatagtagctcatagttagcttctagacattcttgtaaactcagatttttccacctactccaatagtacaggaaatcttgcaagtcacatttctttgatttttaagtctcttatactttgctctcattattttgtttgaactcctttgcttttttaaagatacatttagatatcttactgtattttagttttatttttgaaaatcacagtttattaaatctaaagttttaactttcttttcattaaataacttcaataatacaatgatttacaatttaccaatgactttggacaaaacttaaaggactcataaaatccatgcaacacattataggaatttagattgattaataaaatagtccttgagtcaaataatttctgaaatcaagttgataataggcagcaaaaagaaaaaagtgtgtattttcactctgaagtacttctactttactttttttgtctgtttgca

SEQ ID NO: 305279 - DNA, 591 bp, Homo sapiens
gtcactaaatatctgtaggtaagatgtattttcatggtaaacctaattatggatgcttaggttgtttgcaacaaaaaagctcacatcatgctaatgaagtaacagtytattttggtaggggaaaaatgacttttactctttgtaaattttgctgggtactgtgagacttacataatatatattcaatacatatacatgtaatatgtactcagtaaataattgttagttagaaagcaggaatatgtggagaatgatatctgctacgttcattttaaaactaagtaatgtcatatgtagcattttactgtcttagttttgaaactttttatataggcagatgttcttagtttcattgtttatgtagaacacatttttcctacaattgacttgactcagaagttgatctaattaatagtgaagtgattttaatagaatatctatattgaatgcctactatgtgctgtgcactatagtaatcactaggactacagacactaaagcaaaacacattatcatttatcaaagaccctatgccacaaaactactagttcaataaatgacaataattattctcattactctggcaagact

SEQ ID NO: 305280 - DNA, 591 bp, Homo sapiens
gtcactaaatatctgtaggtaagatgtattttcatggtaaacctaattatggatgcttaggttgtttgcaacaaaaaagctcacatcatgctaatgaagtaacagtctattttggtaggggaaaaatgacttttactctttgtaaattttgctgggtactgtgagacttacataatatatattcaatacatatacatgtaatatgtactcagtaaataattgttagttagaaagcaggaatatgtggagaatgatatctgctacgttcattttaaaactaagtaatgtcatatgtagcattttactstcttagttttgaaactttttatataggcagatgttcttagtttcattgtttatgtagaacacatttttcctacaattgacttgactcagaagttgatctaattaatagtgaagtgattttaatagaatatctatattgaatgcctactatgtgctgtgcactatagtaatcactaggactacagacactaaagcaaaacacattatcatttatcaaagaccctatgccacaaaactactagttcaataaatgacaataattattctcattactctggcaagact

SEQ ID NO: 305281 - DNA, 612 bp, Homo sapiens
ataaaaggtatgaaaagatatttgatgtaaggaggaaaacattgaagagaagcttcagcttgaaatgtgttataggctgagaggaatcagtctaataaaaattgaggaagagagaacttcaacagggtgctcttgaaatgaagagaatatttgayaggatatgtaagacaattatagtttcaaatttgtctctgcaaataaagtttaagactaagaaaatttgcaagtgaatgcaagtgaaaataaaatatatcaagaaacttgagaagaaaccccatggttcatgacatttaaaaacatatcactgaatttaactggctaaatttgtactttttgctaagtttttaaacttggaataatgtaaattcacaggaagttgcaaagacagtatattcctttaaccatgtttcccccaataattacatttttgctaactatagtagaatataaaaaactgacagattaacactcatacaatgtgtatgtacaaatcattgtcagtgtgtcacatgggtagatttatgtaagcaccacagcgatcaaaatacagaattattttatctccctaatgttactcctgcctacgcacctttccaatacccaggcaacaaa

SEQ ID NO: 305282 - DNA, 538 bp, Homo sapiens
gtttttcaccaccttggttaggtatatttctaactactttattttttgcagctattatgaaaggggttgagttctttrtttgattcttatattggttgctgttgatgtataacagagctactgattgtgtacattaattttgtatcctgaaacgatgctgaattcctttatcagttctaggagttttttggaggagtctttaaggttttctagttacaccatcacatcatcagcaaacagcaacagtttgacttcctctttactgatttggatgctctttatttctttcttttgtctgattgctctggctaggacttccagtactatgttgaatagaagtgacagtgggcttccttgtcttgttccagttctcaagtggagtgcttttaacttttccctatttagtattatgctggctgtgggtttgtaacagatggtttttattacattaaggtatgtcccttctatgccaattttgccaaggattttaatcataaagggatgctggattctgtcaaatgggttttctgcatctatt

SEQ ID NO: 305283 - DNA, 554 bp, Homo sapiens
cctactctagagtcccttcccccttagctaggatttctgctgctctaggaatcttaacatgaaataacccagacacttatgagtgaggattctgaatctgtggtcagcatgctcttcccagaccatcactactgtatctattcatttattgtcatggttaggaaagggccaagggactctctagtgtatcaaccagccaaataactattggccgaacatactttttcytgccacaaggaggtaagagtcctaaaccctcctgatagtgagggtcaatgaccatgcttgctgaacttttgaaataggaagactggagtgacagccacactttaaattgtagcagccacaatttaaagaagactctgtttctcctggcagaaaaattccctttctggaaaacagaaactttaggccagcagagcctagagtggcagggagagaattcaaacattctccaaatgtgtcactaggaatgattgtaaatcagtctattccttttgctcccaaacccatctgttttatatattgctgaaagaaccatatagaggttatat

SEQ ID NO: 305284 - DNA, 543 bp, Homo sapiens
gtctgaaccgctatcttccagtgaaatttcagacctagactgattttgaaaatttcattttccacatacttgcccaatttttatattaaattatattctgtaattttttttaaattttatttcattttattaagtttcaggatacatgtgcaggacatacaggtttgttacacaggtaaatgtgtacatggtggtttgatacacctatcaacccatcacctaggtattaagccccacatgcattagctgtttatcctgatgctctcaytccctcaacccttcccacctgataggccccagtgtgtgttgttcccctccttgtgtccatgtgttgtcattgttcagctctcactagattttcttctagggtttttataattttaggtttcacatttaagccttaatccatcttgagttaatttttatataagggtgcagattcaattttctgcatttgactagccacttttcctagcaccatttattaaacatggaatcctttccccattgcttgtttttgtcttgctggtcaaagatcagatg

SEQ ID NO: 305285 - DNA, 573 bp, Homo sapiens
tatatatataaaacagactttggacatccattgttttaacctgtaactactttcttttaatactgtcaaggacaatagagattggtacgacattcttggagagcaatttggtaatagctatcaaaatttgaaatgcacatttcctttgatccagcaactacactcctggaattcacctatcactagctaggtggcaatatattattagatcaatgtcccagaatgttcactgctacatttctataatagtaaaataaagtgacaaatgcccatcaataaatgattaattaccatgwacccccacttatgggacttgtcacagtaggattttgcctctgtatgtttggttatggggtgatttctctttattccctgtgaaaagagaacacttgttccctcttctgaattttccttttgtatggagagaatctggcagtgatacactgctgacctctctctgccccttgaggcgctcaacccaggggaggtagagggacttttgtgactggcgaatttcggaagaataactagacatgctctgctcagcaactcccttttacttctttagagaga

SEQ ID NO: 305286 - DNA, 585 bp, Homo sapiens
tatgcggtgaatttgagggcctgaagtagggtctcccgctaaaaaatggccagcctagattcaaatgccactgccatcactaaataaatgtgtacgtgaccttgaataagttaatccttaaccattccattctttagtttccacctstaaaaaatgaagatgatagtacatctgacttcacaaagttgttgtgaagactgaataaaacaatacacgttaagtgcttagaacagtacctagcacatagtaagtgctcaacaaatgtgagatattatctattatctttcatggtgtctgaaattctacctgttaaagacttaacccttgtgattgaggcagcgactctatccttggtgttagtcaaggatattctattaaatatactctattatagtctattcatatgctcaagttaagacatcagttgtgttcctgcctgactctgtgataaatgagattccaaccttgggcccctgtaactgttcctgcttttataatctgcccaatgtccaattcctctaccacaggctctatgcctttagtctccatctagttactaaaatccagcttctgaaattcacaccc

SEQ ID NO: 305287 - DNA, 502 bp, Homo sapiens
tggcatgtgcctgtaatcccagctactcagaaggctgaggtgggaagatcatttaagcccaggagtttgaggccaccctgggcaacacagaccccatctctaaaaaaaattttttwaattagccaggcatggtggcatgggcctgtagccagctacttgggaggctgaggcagaaagatcacttgagcccaggagttcaagattacagtaaactaagattgcacaactgcactccagcataggcgacaggggaggcctcatatctttaggaaaaaaaaaaaaaaaagaccactcctcaccaactgtactgcttacctccagcccttctattttgcactattgcaacagcctgctaactggtctctcagcttctgcctttaattcacatctcaagggtaaagcctattttcaagacagccaccacttgctccttttgaaatgttaagtcggatcacttcactcttccactaaaactctccaatgaatttagtctgaaatcccc

SEQ ID NO: 305288 - DNA, 547 bp, Homo sapiens
aagttttgcttaaatgctgagtcgcgttttaatgctctactagatgtacatataagaatactaaatggaggaaagtaattcttttttttttttgagacggggtcactcargctggagtgccagtgcgcgatacagctcaccggagcctctcgacctccccaggctcaagtgatcctgccacctcagcctccccaatagctggactacagacacgcgccaccacgcccggctaatttttttgtatttttcttagagactgggttttgccatgttgcccaaactggtcttgaactcctgggctcaagcgacctgcctgcctcagccccgcaaagtgctgggattacaggcgtgagccaccgcgcccggccataattttatcttaatcacttttttccaggaactattacgtttcaaagaatgaggaattaactgacaacacttcaggttcaacatgtaaatagggacgctcatttgagaataaatcacattttgtcacagttgtattgaaaaatcggtatttctgaacgtcattttaccattacggaag

SEQ ID NO: 305289 - DNA, 586 bp, Homo sapiens
ctgcctttaatgttcactggcattatcaacaactagaatgaagacacagaaagtagttttatcaaattcagggacaacccaaagctgaaatgaagacctattacctcaaatccattcattcattcagcaaacagttattgcatacttacctactatgtaccaaaatagtgttctaagcattgggatacagcagaaaacaaaaaacaccaggtcttttctttcattgagatttcattctaaaggcagaggatagacattaaacaaaaatctaataaacataatgaataagcaaaactaacactktgcccttccaccatagtgaccaaacacaccacataccacagtcagggctggtgggggagcacgttttttaaggagtacttctacatcatgaaataaacttcaaaaacaggaatttcccatctagagttagtcctcaaaataaatgagaccttgagccctttctcagaaattgctaagtcattagtgaacatattttgcccctgacttttgcaatgccagcatcggcagatatgtgatgaccctacagatgtaataattatgtgagaaaaccactatcatttcc

SEQ ID NO: 305290 - DNA, 586 bp, Homo sapiens
ctgcctttaatgttcactggcattatcaacaactagaatgaagacacagaaagtagttttatcaaattcagggacaacccaaagctgaaatgaagacctattacctcaaatccattcattcattcagcaaacagttattgcatacttacctactatgtaccaaaatagtgttctaagcattgggatacagcagaaaacaaaaaacaccaggtcttttctttcattgagatttcattctaaaggcagaggatagacattaaacaaaaatctaataaacataatgaataagcaaaactaacactttgcccttccaccatagtgaccaaacacaccacataccacagtcagggctggtgggggagcacgttttttaaggagtacttytacatcatgaaataaacttcaaaaacaggaatttcccatctagagttagtcctcaaaataaatgagaccttgagccctttctcagaaattgctaagtcattagtgaacatattttgcccctgacttttgcaatgccagcatcggcagatatgtgatgaccctacagatgtaataattatgtgagaaaaccactatcatttcc

SEQ ID NO: 305291 - DNA, 606 bp, Homo sapiens
ttagcaacagctttttcccatattctctttttttaaattaacagactcatttttcttttttagcctattgctgtgattgattacactaatttatttttgaatgttgaaccagacatgcatacctgaaataactgccttttggtcatagcatgtaattctttttatatgttgttggatttgatttgttaatattttgatgaggatttttgcatcaatgtttacrggagatattggtgtatagttttcctttcttgtaatgcctttgtctggttttagtatgaaggtaatgctggcctcatggaacgtgttaggaagcattacctctgcttctatttcctggaacacattataaagaattggcataatttttttcttaagtgtttagtgaaatttaccaatcaaccatctgggctcagcgatttctcttttggaggttattaattatgcattcaatttatttaatataggtctatttggattatctatttttaatgagtttgatagattgtatctttcaagaaattggtctatctaagttatcaagtttgtgggcatagagtagttcgtaatattcttttactatccttttaatgctcatgggctata

SEQ ID NO: 305292 - DNA, 606 bp, Homo sapiens
ttagcaacagctttttcccatattctctttttttaaattaacagactcatttttcttttttagcctattgctgtgattgattacactaatttatttttgaatgttgaaccagacatgcatacctgaaataactgccttttggtcatagcatgtaattctttttatatgttgttggatttgatttgttaatattttgatgaggatttttgcatcaatgtttacgggagatattggtgtatagttttcctttcttgtaatgcctttgtctggttttagtatgaaggtaatgctggcctcatggaacgtgttaggaagcattacctctgcttctatttcctggaacacattataaagaattggcataatttttttcttaagtgtttagtgaaatttaccaatcaaccatctgggctcagcgatttctcttttggaggttattaattatgcattcaatttatttaatataggtctatttggattatctatttttaatgagtttgatagattgtatctttcaagaaattggtcyatctaagttatcaagtttgtgggcatagagtagttcgtaatattcttttactatccttttaatgctcatgggctata

SEQ ID NO: 305293 - DNA, 606 bp, Homo sapiens
ttagcaacagctttttcccatattctctttttttaaattaacagactcatttttcttttttagcctattgctgtgattgattacactaatttatttttgaatgttgaaccagacatgcatacctgaaataactgccttttggtcatagcatgtaattctttttatatgttgttggatttgatttgttaatattttgatgaggatttttgcatcaatgtttacgggagatattggtgtatagttttcctttcttgtaatgcctttgtctggttttagtatgaaggtaatgctggcctcatggaacgtgttaggaagcattacctctgcttctatttcctggaacacattataaagaattggcataatttttttcttaagtgtttagtgaaatttaccaatcaaccatctgggctcagcgatttctcttttggaggttattaattatgcattcaatttatttaatataggtctatttggattatctatttttaatgagtttgatagattgtatctttcaagaaattggtctatctaagttatcaagtttgtgggcatagagtmgttcgtaatattcttttactatccttttaatgctcatgggctata

SEQ ID NO: 305294 - DNA, 434 bp, Homo sapiens
aagaaaatgggaatttcagacgtgtgcctaatgctataacaaactgtctagagagaaaatcatcacgattcttcctgagaatggaggtgaatgggacttctttgaaagtaaaacctacagtgggtgtccccattagacaaaagagaagcccaaatatatatatatataaaatgtattttttttttgagacagagtctcgctgtgtcacccaggmtggagtgcaatggtgaaatcttggctccgcattcaagcaattttcctgcctcagtcccccaggtagctgagattacaggcctgagtcaccatgcccggctaatttttttgtatttttagtagagactggctttgccatgttggccaggctggtctcgaactcctgacctcaaatgatccactctcctcggcctcccaaagtgctgagattactggtgtga

SEQ ID NO: 305295 - DNA, 434 bp, Homo sapiens
aagaaaatgggaatttcagacgtgtgcctaatgctataacaaactgtctagagagaaaatcatcacgattcttcctgagaatggaggtgaatgggacttctttgaaagtaaaacctacagtgggtgtccccattagacaaaagagaagcccaaatatatatatatataaaatgtattttttttttgagacagagtctcgctgtgtcacccaggctggagtgcaatggtgaaatcttggctccgcattcaagcaattttcctgcctcagtcccccaggtagctgagattacaggcctgagtcaccatgccyggctaatttttttgtatttttagtagagactggctttgccatgttggccaggctggtctcgaactcctgacctcaaatgatccactctcctcggcctcccaaagtgctgagattactggtgtga

SEQ ID NO: 305296 - DNA, 543 bp, Homo sapiens
cactgacaaaggggacaatatccattagccattatcttgctgcgtatgaataaccctctctcacaaaaataaagataaatatgttctgaaataattgataarattaaattgactttccagccactcacttctgccaaaaaatccaaccaaaaagtatttacgtcaaattgaattacttagtcaaaggcaacaaacacactgatagagttgctgcataaatgtgtctttaaatattcaccagagtaaataaggtaactcctggaacacactgaattattgtatttaccagcattgaaatcatagcaaagaaccaatattatttcatatcatgcactttataattcaaagccacactgccttgaaaggactatcagactgactgtttgtggcaggtgaaaataaagcctaaccatggattcaagaacaactctcaaaaaaaagaagactacattaaatgcacctgttgatgacaatatgcatcccaattttagaagcactgagacatggaaaagaaatatgacacaacaaaatgctatcatgctt

SEQ ID NO: 305297 - DNA, 606 bp, Homo sapiens
ttagcttttaaaataaaaaatacttcaaaatactttagaaattattaattttaataagaatgatgcaaatgaagcataatattcactccaatcctgccatcctgactagtaaaactggtttatttttgtatgctagcttctaatatcaggcatataattttatgtaagtgtaatagcagcaccacgatactttggtttgctgcttttctcacttaagtccattgcttgctgtcatttgctctgagatggtctttgttccccaagattggtggagttgtgggcctcaacctctatacctgctccagcagaagacccatcaacaggcaatggctaaggaaacccgtgatggtcgagtttggggaggaggatggcctggtaaggagagcctttctcagtatctctacttcatttargctgtgctggctgatttttaatgtgtttattttaccaaaggcaaattttgcttaacttgttttctttgtgatgacaggataataggagaaataaaacgacatttgtattacttcgggataaagtgaatctccatcagttcactgagctttccgaaaacccccaggaatctctacagatagaaattgaattttc

SEQ ID NO: 305298 - DNA, 494 bp, Homo sapiens
attcaaacgattcaagacacaggatgttctctgaccacagcagaataaaattagaaatcagctacataaggacatcaggaaaatctcaaaatacatacaaactaaataatatacttccaaatcacccatgaatcaaagaataaatcaaaagggaaattagaaagtatttttatctcaataaaaatgaaaacatatcattttcattcagggatgaatgctaacgcaatactccgagagaaatctgtagcactaaatgcctatattaaaagaagaaaggtcttaaatgaccttagctcttatgtgaaagactataaaaagaaaaacaacttaaactcaawgtaaacagaaaaaagtaaataataaataaatactaaagatcaaagcagaaaccagtgctgtagataacagaaaaaaaaaaaaaatagagaaaacgaatgaaaccaaaagctagttccttgagaagatcaattaaattgacaagcctctagccagga

SEQ ID NO: 305299 - DNA, 555 bp, Homo sapiens
aaatgccaaaaacataccactgtgccctgcccagtgccacagacatttccacttattttttaggctaagcagcaaatgtggatccaaaagtggaagaaatcagacactgctgatggcagatgtcttgccaataggtcagatggctgcatgtttttaatcaagcaggccccatcacctgagagcagagatcaaattatcaaggtggtgtgtgtggacagctttttgcagccactggcagactcagtttcctttgtcaatttctgtctgggatacgatgctgttcaaaatgctcrtgagacttttgtggttaaattatgctgaaacatggtgtgttttgaggagcaagttgtcagccaactcaatgataccaccagtgggagtaggccataactcaggctcagctcctgtatctctgtgtcttggtcagattctctaattactcttccacccacacttcttgctgatattctctacggagatatttggttactgatacaaacatattactcttgtcccaaataactcagatttttttagcgtctgagaatggctcca

SEQ ID NO: 305300 - DNA, 489 bp, Homo sapiens
taactttatgtacagagcacaggatagtgatgagttgaaatttcatactcaatggggttttaggccaatgagaataggataatattgacattaaaaagttcacatcaataattgacataaaaatgcacacacagcacacatacacagtgagagaggacttaaatatgcaagaataagtatttctagaaacataatatatatatatatatatattagaatcatttgtttaaagtttgaagttgatgccattttcttcttgaaagcacagagggcatgtaraggcctaagacctagaggcaaactggtgtgatgaaaaggatgctccttcactttgaaatgtgagggacatgactcaaatcatagttgttccacttgctacttgagtgagcttggttgaaccacttaacctctcaatattcttatctatgaagtggataataattccaattttttgatacttttttaccagtgcttatagttgctcaggaa

SEQ ID NO: 305301 - DNA, 422 bp, Homo sapiens
gactctgctcactgcactccaaaataaccatcataaccattatgtttcctgtctcttatctccttccctcctcccctcctcttcaatctattcttcgtacagaaaccttaattttctacctcataagtctgataagcctcaaacattttcaaagcttcttgttgcctttgagataacatacaaactacatggtatagttttaaaaacgttttatgacccctccccaataacacttttctgagccagagacatgctcaaataaccatgctcaggtaaactgctgaggagtcagaaggaaggagccacttttgtgtytctatctcctcatcagccctcatccaggctgtctcataaagagtatgaaagtttcatgtcctcaggttgatcatataaatcaactgattggtatcaaatatggtgtc

SEQ ID NO: 305302 - DNA, 633 bp, Homo sapiens
gttggctctgtggctcagcaatgtcataaagacagagcttcttttcatctctgtctgttttgtcatcttcagtgttggcttcatcctctggttgttagcaaaatggcccagcagtttgcagagtagcctcctgaagcagcagtgaccaaaagaataagagagtgttgctgttctgggaatcttaagtacaataaaattctcccaatgcctycccagctcccccagaagcctttccctcatgcctcactgactgaagctgcatgtatgtccattcgtgaactactcattggaagaagtcctgggaagagcttgatttgctcagacaagtggtttccaaccttttatttcttaaacttcttggcacatatagaaatctataatatttgtctgacgaactgggatacatgttcagaactgcttaaggcagcagtgaacgatctgagaccctaggctctgtggggtggtgacagcaatgtctcagtcacacctggaatacatttgttatatactggtgtgggagagcaggactgcacagactttcttatgtacgtgaatcgtctcacagatgttgtgttcagtgtcgcaatacgatatagtaggtctggggagaggagatagcctgcaattctaaca

SEQ ID NO: 305303 - DNA, 554 bp, Homo sapiens
gtaagcacacatgaaattgtagaaggccttgtgggctatattaagagatttgacatctacagataaagcgtatctgtggaatatattttattttcagttgaggaatatgtgtttttgatctctgatgaatgyccataagtaaaagccttcttttaacaaagctgcaggcactcagggagcctacaaacacaaacattcacaagcaaaggtgctcatatacactatttgtgaacatccaaacccaggttgtgataattggaaaagtagagctactaaagccatggtgaaatagccattgaataagaattcactaagcgccttctaaatgtgagatactgtgtttggcactgaaggggatctgaagtataagatatggcatctgacctcaagagactgcaagtggctcctcatcaatctgcaactggcttctctggaacctctaaaaatagactgcaggaaatcatggaaattgccagtaggattgcttatctgagaatttatccagaataagttcccttcactttctttgatgctatccttcataaaacaataag

SEQ ID NO: 305304 - DNA, 554 bp, Homo sapiens
gtaagcacacatgaaattgtagaaggccttgtgggctatattaagagatttgacatctacagataaagcgtatctgtggaatatattttattttcagttgaggaatatgtgtttttgatctctgatgaatgcccataagtaaaagccttcttttaacaaagctgcaggcactcagggagcctacaaacacaaacattcacaagcaaaggtgctcatatacactatttgtgaacatccaaacccaggttgtgataattggaaaagtagagctactaaagccatggtgaaatagccattgaataagaattcactaagcgccttctaaatgtgagatrctgtgtttggcactgaaggggatctgaagtataagatatggcatctgacctcaagagactgcaagtggctcctcatcaatctgcaactggcttctctggaacctctaaaaatagactgcaggaaatcatggaaattgccagtaggattgcttatctgagaatttatccagaataagttcccttcactttctttgatgctatccttcataaaacaataag

SEQ ID NO: 305305 - DNA, 554 bp, Homo sapiens
gtaagcacacatgaaattgtagaaggccttgtgggctatattaagagatttgacatctacagataaagcgtatctgtggaatatattttattttcagttgaggaatatgtgtttttgatctctgatgaatgcccataagtaaaagccttcttttaacaaagctgcaggcactcagggagcctacaaacacaaacattcacaagcaaaggtgctcatatacactatttgtgaacatccaaacccaggttgtgataattggaaaagtagagctactaaagccatggtgaaatagccattgaataagaattcactaagcgccttctaaatgtgagatactgtgtttggcactgaaggggatctgaagtataagatayggcatctgacctcaagagactgcaagtggctcctcatcaatctgcaactggcttctctggaacctctaaaaatagactgcaggaaatcatggaaattgccagtaggattgcttatctgagaatttatccagaataagttcccttcactttctttgatgctatccttcataaaacaataag

SEQ ID NO: 305306 - DNA, 528 bp, Homo sapiens
atagttatcatttcaagcagaggggagggaaataccagctctgtctgcagagccagccatgtagttacaaacaggattagtctgggacagagaaggatcagacatcagactcagctgggagactagaaaagtgggccagatggttttaagattggcttttctaatgaaaactggcacaaagattgacttaaatgtgttcttttctttctgtaactacagcttcccaattcttccaaagcctactctacctcattttcaatcacatgtggaatctcctgaagtatgtaaaatagggatggcatgacattctgaaaggtaagaaagaaagcttttgtgtggttgaagcttctattatacttggcagaataggtrtaagattctttgatttgtatgtatttatccataagatcttgtctagaaaattgaaaagaataaattgaagtgaattctcactgcaaaacacttaaaagaatgccaagcatgaacacaaacaacctaattctacagtgagctttagaagatctggaa

SEQ ID NO: 305307 - DNA, 446 bp, Homo sapiens
tatttagaaagtttagatttgctgtgtatgtattgaattttaaataattgaaatatttctcttacaactctatatgaacaagtttattttggttgagctgggagaacatgcttgggactgaaaattacatctttattaatcaaggtgattaaaagagctttttttttctaattccaggtctaggttcaaaattaaccattttrttttattttattttactttatttttgagacaaagtttcctctgtagcctaggctagattacagtagcatgattatagctcactgcaacttcagagtcctgggctcaagtgatcctcccgcctcagcctcctgagtatctaggactactggctaattttttatttttattttttattttttgtagagttgaggtctccctatgttgctcacgctggtctcaaactcttgggctcaagcgatcct

SEQ ID NO: 305308 - DNA, 536 bp, Homo sapiens
gtggctgctgtagcattaggatgatgtaactagaggagaccaggactaaaaataacagaaggtttctaagcagttatataaagtacaaaactaagggcagggagtgaagagaaagtgcctggggcatcagaagattaatccactaatcacacaaattcgtaagtgaaacttgtaaccagtgcaaagaagacacaggatgtcatagggagaccttagcagtctggaggacagaaagtttcccttactgagcagagaaggatgaagtgcaggatgtgccaagggccagaggttaaagagagcaatgagtgttctagaaactgaaaacagatcagtgcagctagagctggattgagrgaggaaaggactttccagacctggaaaaaggtacagacacacaggactttgccatcgtgtagaggattgtgcctttttcctaagagtaaaggaaaaattattgaaagattttaggcaagcaaatggtatcatttgatttccatacataagagatcattttggctgcagagtagagaatagat

SEQ ID NO: 305309 - DNA, 542 bp, Homo sapiens
aatataaatagttggaaaaataaatacataggaaagaagagacaattcttactttcagtaatattcaaattaataaatagtaagactgatgaaaactagataatcactatttggaaatcaccacatttataaattttgtgggtaagaatcactgatagttgctaaaattaaggagtaaaagaatgataagaaacaggatgcttttatagtctcaaagyaacctcacacataatatgtattaattacaagagaaaatttgtcacttaacggtggagaaatcctccagacacaacataaacaaagtgatcaaaattaatctgtaatgagacatgttgatatcatgtaacttctgattcgatgctattattgccaagaaagtgtaacctcaatctaatcatgagaaagacatcagacaaactccaactgagaaacgtgctgtgaaataaatgagaggtgatcttcacaactgtcagggtcataagagataaagagtgaagaactgtcccagactggggaaaactaagaatgcatgacaactaaat

SEQ ID NO: 305310 - DNA, 542 bp, Homo sapiens
aatataaatagttggaaaaataaatacataggaaagaagagacaattcttactttcagtaatattcaaattaataaatagtaagactgatgaaaactagataatcactatttggaaatcaccacatttataaattttgtgggtaagaatcactgatagttgctaaaattaaggagtaaaagaatgataagaaacaggatgcttttatagtctcaaagtaacctcacacataatatgtattaattacaagagaaaatttgtcacttaacggtggagaaatcctccagacacaacataaacaaagtgatcaaaattaatctgtaatragacatgttgatatcatgtaacttctgattcgatgctattattgccaagaaagtgtaacctcaatctaatcatgagaaagacatcagacaaactccaactgagaaacgtgctgtgaaataaatgagaggtgatcttcacaactgtcagggtcataagagataaagagtgaagaactgtcccagactggggaaaactaagaatgcatgacaactaaat

SEQ ID NO: 305311 - DNA, 388 bp, Homo sapiens
ctttctttaactcccaactgcaattttagcmtgccagctatctttagtcactctagagcacttcttcctcataaccctgctctgcgttggccattccatgtatatcataacttcctcattagttatttcatcttatgggttaaatttgtactttaatactccctatctttagcagttacccagtctgaacagtgcattttcttctttagtttgtggaactatgaatcaaattgcgtgccctctccttgccatgggataggtggcatgatttcccagccattgcttaaggcactagtttcctggattttgaatattaaattgagtgggcccaggtggtacttttcatcaaaacttcttgctattaagaactgccttagttttgtttttt

SEQ ID NO: 305312 - DNA, 627 bp, Homo sapiens
ttctccatataaatttttcttatcccaaagtcatcttcatcctaaaatatatttgtatatctttggaaacaagaaattattaaaaacatcattaccctgctasgaaaaataaaatttattacattattcatttccaaatttagaatacctctctttggggagaagacacacctttaaaatagcagctgcttctagagaacacatatatttaatttatatactctcattcagttgcaaacataataaaaatgatttcaaaatgcatttaaatagtatgtacttataaaaagcacaggtaattaatcttgatacaaaatttttattcaaacatactgaacatgtgctttgtaattaataaacaaaatatatagttgtctggaactctgttggtttccaccatgtgaagaactcataaagggaaatgtaagtccaacagggctttaatgtcctcatatttaatcttctattaggcaacatttaaaaaaatatgtagcaaaaaatgtacagtgcaagtgcacttaaatctactcaacacattagagactgtgaaaaattaaaatatattaggtatttcaatatacaaagcagagtcaagggcattagccaactaacctgataatataataa

SEQ ID NO: 305313 - DNA, 627 bp, Homo sapiens
ttctccatataaatttttcttatcccaaagtcatcttcatcctaaaatatatttgtatatctttggaaacaagaaattattaaaaacatcattaccctgctaggaaaaataaaatttattacattattcatttccaaatttagaatacctctctttggggagaagacacacctttaaaatagcagctgcttctagagaacacatatatttaatttatatactctcattcagttgcaaacataataaaaatgatttcaaaatgcatttaaatagtatgtacttataaaaagcacaggtaattaatcttgatacaaaatttttattcaaacatactgaacatgtgctttgyaattaataaacaaaatatatagttgtctggaactctgttggtttccaccatgtgaagaactcataaagggaaatgtaagtccaacagggctttaatgtcctcatatttaatcttctattaggcaacatttaaaaaaatatgtagcaaaaaatgtacagtgcaagtgcacttaaatctactcaacacattagagactgtgaaaaattaaaatatattaggtatttcaatatacaaagcagagtcaagggcattagccaactaacctgataatataataa

SEQ ID NO: 305314 - DNA, 620 bp, Homo sapiens
tttaaggaatagcaaaagacagtgaagtttgagcagaaaaartcaggagaagaacagtgagacaagaggccaaaaaggtgggggagaggtataaagccttgtgacaacttttgatttttactcagtgaaatggatggcttttgaaagctttatacagaagactgataggatccggtttacatggtggttaagtggataagagactatacttgaaaagacccaagcaaggacaccagttaggaggctgctagaaccatccaggggaatgatgatgtgacttggaccagagtgctgtcattagacgtaagaaagggccagattttgaatatggtttgagggtagggttgataggccctataaatgttatgagggaaaggttattctggtacgatgagagatataatttgggtggtcatcatcacatagttgatatttaaacaatgggactgaatgagatcatggagggattgtatgtaactagggaagactccaaggactgaaacaaggctaagagactggggaatgagaaaaaaacagcagagactgaggagaagatgccagtggtgcatggagaagacccagagaggatggagtcttggacatcaagagaaggaaatgtt

SEQ ID NO: 305315 - DNA, 613 bp, Homo sapiens
gtgacaaatgctatggagaaaactgaatcaggagaggaggacagagaatgcaggaatgaggtgaagagaatggctcaatataaatatatttcaatgttaatatattttatttaaaatattaatttaatatattatgttgatcaaggaagctcttgcttagaaagtaacatttgagcaaacactagaagcagggaagggagcaaatgatgcttatgtctagaaaatgcaaaagtcccaggttagtaaagaccttgatgcatttaaggaatagcaaaagacagtgaagtttgagcagaaaaaatcaggagaagaacagtgagasaagaggccaaaaaggtgggggagaggtataaagccttgtgacaacttttgatttttactcagtgaaatggatggcttttgaaagctttatacagaagactgataggatccggtttacatggtggttaagtggataagagactatacttgaaaagacccaagcaaggacaccagttaggaggctgctagaaccatccaggggaatgatgatgtgacttggaccagagtgctgtcattagacgtaagaaagggccagattttgaatatggtttgagggtagggttgataggcc

SEQ ID NO: 305316 - DNA, 605 bp, Homo sapiens
actccccactccctcaatagctaataagtgtcaaagaagagattcaagcctagagctgtgtgcagccacaattctcaccttcatgccacacagtacctctcagcatagttagtgaagagtagacacataatttattcttttgactggaaataaaagagcatcttatgacatctcaatgaatagtagaaggatgtggtaaggttatgatgttggtcaataagggagaatgacttcataggaatacaagaggagattatgaatatcaagcttctcatgggggacaggaactgggagccagggcagccacaagtcaggctaccagtctccttgctcatggatggcatggtgtctctgtcatgctacctccacctctgacttcacattcattccagtctactctgtctgttaactgtactgtctttatactcttccattttgtagaatctttttaactccgtcatttctgatcagtttttctttcagaattgtgattgaacctgatccatcayagcctccttgacttctctattatcacattccttgagtttctactacactgtatgttgactggtggtgaccagtgagcttgcctgagagtcaggaat

SEQ ID NO: 305317 - DNA, 560 bp, Homo sapiens
aagaccactaatcatattgccatgacataagtgatactctcccaacattattacttatatttaaatatatgtatatatttagacatatatatatacacacatatatatatccaacttttaaaatatcaaaattatagcttaagattattttaaaatcaatttgatttgattttgtaaatattattactactaaggataccaagtttgtctcagcattatccaggtgtgagcaaagcttcaattactaattctattattttaattttggccctcttaatccttcttctgacattgtgataacttttaatgagctccttgtaataagagaatgacttcaatttcaatgggaaataataatgaggatagmttttttagctttttatttgttgcttcatgcactttacctgattcttgagatccagtttgggacatggtcgtcctccattgtaaggtttttcttttagccatttggatcgaattctcactccaattccacaagatgaactgcaagacccccaactagaccaatcgcttaacttgcaatcaaatgggcagggaat

SEQ ID NO: 305318 - DNA, 587 bp, Homo sapiens
tacttcattttatagagaaactgagtcacaaaatgctttcatttgctaccaaatagaaagaggaaaactagaaattaggtgggattaactctcatggcatgcatacttcacatatgcaaatctgaaattccaggaggtttcagataaactttaaatgtttgaatgtctatgtagaccctatgttaaagcagaatttgaagtagatgcccttttaattgagattttaaatcattctcatctacacttgcatactgaaggattttaattagcaagcctgtagcaatactttttttttctttccctatgataagaagtaaacccagaggatctctatgaaagtcaaggttatmaattcaatgagcataaaataattttgaaattcaacaggactaagcaacagtgacatttatttttcaggaaaattattttcatgccagagtataccccaaaggaaaattcatagtgaggaatattaatacttgcatattcttatacctatctcatattcgaatggataagttttaccacacacttaacacttatagtttttggcaacagaatatgatcaaatgtgactatgtacaagg

SEQ ID NO: 305319 - DNA, 587 bp, Homo sapiens
tacttcattttatagagaaactgagtcacaaaatgctttcatttgctaccaaatagaaagaggaaaactagaaattaggtgggattaactctcatggcatgcatacttcacatatgcaaatctgaaattccaggaggtttcagataaactttaaatgtttgaatgtctatgtagaccctatgttaaagcagaatttgaagtagatgcccttttaattgagattttaaatcattctcatctacacttgcatactgaaggattttaattagcaagcctgtagcaatactttttttttctttccctatgataagaagtaaacccagaggatctctatgaaagtcaaggttataaattcaatgagcataarataattttgaaattcaacaggactaagcaacagtgacatttatttttcaggaaaattattttcatgccagagtataccccaaaggaaaattcatagtgaggaatattaatacttgcatattcttatacctatctcatattcgaatggataagttttaccacacacttaacacttatagtttttggcaacagaatatgatcaaatgtgactatgtacaagg

SEQ ID NO: 305320 - DNA, 581 bp, Homo sapiens
ccaatgtcctggagcattttcccaaagttttcttttagtagttttatagtttcaggtcctatatttaagtctttaattgatttgatttttgtaaatggtgagggatagaggtctagtttcattcttctgcacatggatayccagttttctagcttatatattttagtactatgagaatataattgtttttctatttatctagtaaaaatgcactatactaaaaagtatccaatgacttcaatcagattagtttaaagggcatatttgtttgggaaaggtgaagaaaaaattgcaaaattattttaaccttagtccaagaaagacaatttgagaagttagatcaatactttgccattgttatgaagaaaggaactgacagtgttaaacgcttacttaaaatctcaatccatcagcatgtgaaaatgtaaatcaaatgcaatagagttaccagcttgccttggtgaatgtatacattttcttggaaataccattcatgaaaagaagttgcatactctcataaagatgcttccaaccttgtttaggtctctgtgaggcctgagacatgatagttaaaaagtgcc

SEQ ID NO: 305321 - DNA, 564 bp, Homo sapiens
aaaaaaagtcaagtttgtgttattagggaataagaagaaaattagaattgtgaaggcaactagaaacctccacccacagtgtctgatatgaaaaatctgaactgataagttgartagagcttatgagaaaatggcagcaacagccatgataacatcttttcagtgctttgcacttcataaaatggttttgtagtccacacaatattgaacatgaagtgattaaacagcaagggtctggattaaagggacttgggaacataaatagtgtgacacagaaaatatcacaacaatattcattgaaacattgctaataagagaaaaaagcaagactaacattgctctgtagatagtaataagagtcttgaacctggaggtggacatcatggtacagatcacatggaataagacacaggagacatataagcacctcaaaacatggaagaagagtaggaaacagaacagaacatttctaaagccacatggatggtgaaggagataaccctaggtcccattacatgtccttcaaaaaaaaaaaaaaagaaatatatacttacagtatagtca

SEQ ID NO: 305322 - DNA, 608 bp, Homo sapiens
caatattatattgtaagagtcatccagtaacttgttacttgttaccagtaactatagtatattcatcttcattactgtatgttttccatggtaggaatatacccacaattaatttatccattctgctgttgatggacattgggattgtttcyagtttggggctattaggaacaatgctactatgaatattctagtaggtgtcctagacatgggtacacatttctgttgggcatttctgtacacaattcacctgcgagtgaaaattttgggtaacttcaacttgagtagataatctcagttttctaaagtagttgtaccaatttacaccctagcagtgtatggaagtccatattgctccaaatcctcaaaaacactggtctttgcaaattgtacccattctcgtggctgtgtagtggtatttcagtgtagctttaatttgtgtttctctgctgactaataagattaagcccctttcatctatttattgttacttggatattctcttctggagtatccattccagtctcttttttctactgagttgcctctctttttcttattgatttttagaagttcagttccttatatgatccaaatatgtgcactgt

SEQ ID NO: 305323 - DNA, 608 bp, Homo sapiens
caatattatattgtaagagtcatccagtaacttgttacttgttaccagtaactatagtatattcatcttcattactgtatgttttccatggtaggaatatacccacaattaatttatccattctgctgttgatggacattgggattgtttccagtttggggctattaggaacaatgctactatgaatattctagtaggtgtcctagacatgggtacacatttctgttgggcatttctgtacacaattcacctgcgagtgaaaattttgggtaacttcaacttgagtagataatctcagttttctaaagtagttgtaccaatttacaccctagcagtgtatggaagtccatattgctccaaatcctcaaaaacactggtctttgcaaattgtacccattctcgtggctgtgtagtggtatttcagtgtagctttaatttgtgtttctctgctgactaataagattaagcccctttcatctatttattgttacttggatattctcttctggagtatccattccagtytcttttttctactgagttgcctctctttttcttattgatttttagaagttcagttccttatatgatccaaatatgtgcactgt

SEQ ID NO: 305324 - DNA, 587 bp, Homo sapiens
aaaactagtaagctagaattaaaggatactttcttacatggtagagattatctgtccaaaggtaacaaccaacatcatatttaatgctgatttttactatggtcaagagcaaaacaagcaagctcactatcaccacttcttccctgtctcagtgtgaaatcaattgagaggagtcatcagacacatgggtcaaaatgtcagcttcattactgataaagccaactgcagcatgtkgctttagatctgaagccagaggagcttgccagcagtccctgaattagacaatataccacagtcactggcagctctgactctctccacccacacccagctaggactggctctttcaggaagcagagaaaaccagacaacgctgccttctcagatggcagattcaaagagaatctagaaaaggctaagccatgcaggcaaattctttctcccaaacaaatgctcccaagaagaaaaatatgagaattagaggaaggtcaggagcatcacagaaatgcaacctttaccatgtggaagcatgtagtcaaggggacccctaacagtattctacactctttgagaagttttagccattg

SEQ ID NO: 305325 - DNA, 570 bp, Homo sapiens
tccactgtcacaaggagacagggtttgaagggaaaaggatggacctgtcattgtgtgggactgcagagctttgagaatgcttgtatcccaaaaagtaaaagtgtacagagagaaacttcattatatggaaggtactgcagccagaggaagaaaatgatagagccgaaaggctgatgatcacagagagttaggggccccacctccagctgaagcaggaacacacccactggttcaggagggaagaaggatggacagacagatgtcagtttgtcttgggagtccagattagtgagagaggaagtttagtggtatcttttcttttaataaaataagagtcagaatcatttgctgagagagaggcagagatggttggacacagagcttgcgcasgagtaaatgttagaaatggctgttgtggttagtgggagagtatattagtctgttctcacactgctaataaagacatacccaagcctgggtaatttataaaggaaagaggtgtaattgattcacaactctgcagggctggggaggcctcaggaaacttacaatcatagtggaaagggaagc

SEQ ID NO: 305326 - DNA, 596 bp, Homo sapiens
tgggagtccagattagtgagagaggaagtttagtggtatcttttcttttaataaaataagagtcagaatcatttgctgagagagaggcagagatggttggacacagagcttgcgcacsagtaaatgttagaaatggctgttgtggttagtgggagagtatattagtctgttctcacactgctaataaagacatacccaagcctgggtaatttataaaggaaagaggtgtaattgattcacaactctgcagggctggggaggcctcaggaaacttacaatcatagtggaaagggaagcaagcacatccctgttcacatgatggcagaaaggggaagtgctgagcaaagagggaaaagccccttataaaaccatcagatctcgtgagaactcactcactatcatgaggacagcatgagggtaacagcccctccctgattaaattacctcccactgggtccctcccacaacacatgggggttatgggaactacaattcaaaatgagatttgggtggggacacagccaaaccatatcagagaggtagctgattaggagcaaagggaaaatgggtgggtagcatggagagaccatgagtgt

SEQ ID NO: 305327 - DNA, 537 bp, Homo sapiens
  misc_feature (1)...(537): n = A,T,C or G
ttgtcgcttaacgatggggatacattctcagaaatgtgtgtctcatcattgtgtanacatcatagagtatattaacacaaaccaggatggcatagcctactgcccacctaggctatatgattaacgctctggctcccaggctacaaacctggacagcatgctactgtactgaatactgyagggaattgtaacacaatgggaagtatttgtgtatctaaacatagaaaacgtacagtataatcttatgggaccactattgtatatgtggtctgttgttgaccaaaaccattgttataagggacatgactgtatcttctttggtaaagtgtcagttcaaatcttttgcccatttttaaaattgggttggttttcttatttaagtttgaggtttcttgggatattctagatatgaatctcttgtgagatatgtgattgataagtattacctgccagtctctggcttagattttattctcttagcaatgtcttttgaagaacagaagttcttaatttttatggagtccagtttatccattt

SEQ ID NO: 305328 - DNA, 559 bp, Homo sapiens
aatttattcaccaaaacaacctcctgtcacctttgcaatagtccattggttagcggcaaatcaaaggttctgcccacgctcaaggagaggagagaagagcatggacaccagaagatagacttcagtgggggaccatgctagakactgcctaccataccatcctttcattttttaacttacctgagtctttattttttaagtgggcttcttgtaggcagattataattgagtcttgctttttttaatccaatctgacagtctctgttttttaactgggtgtagatcattcacatttaatgtaattttgatatggttaggttcaaaacaaatgtctatttcttttctatttggttcatctattatttgttctctttatcttcttttctaccttttattctgaacatttttaatgatttcattttatctccttttttggcttactagatataactttttgttgtgttaagtgatttctttctggtttatagtatacatctttattttatcacactctaccctcaggtaatactattctacttcatgtgtagtataaaaactg

SEQ ID NO: 305329 - DNA, 498 bp, Homo sapiens
cagtccaggccaaatcaaaactttacactcagggcaaaagcctcgatcagacactttatgaacaacatacaaatggccaataagcaaatgaaaaggtgttcaacatcattaatcatcaaggacatgcaaatgagaccacaaataaatattcaccatttcacatgcattagaatggctaaaaaaaaaaaaaaaaaaaaaaaaaaaaacctgacaacaccaaatgttgacaagatcagggagcaactaraactttcatacatagttttgggtgggtaaaatgatatctctttggaaaactggcagtttcttacaaagttaaatacatacctaccagtaattccatttttaggtgtttacctaagaaaaatgggaacatatgtccccaggaagacttatacaaaaacgttcatagaagctttatttataatagtcaaaaaatagaaacatgcaaatgtccatcaatatcaatgggaaaatggcttaaaattgtggtatatc

SEQ ID NO: 305330 - DNA, 498 bp, Homo sapiens
cagtccaggccaaatcaaaactttacactcagggcaaaagcctcgatcagacactttatgaacaacatacaaatggccaataagcaaatgaaaaggtgttcaacatcattaatcatcaaggacatgcaaatgagaccacaaataaatattcaccatttcacatgcattagaatggctaaaaaaaaaaaaaaaaaaaaaaaaaaaaacctgacaacaccaaatgttgacaagatcagggagcaactagaactttcatacatagttttgggtgggtaaaatgatatctctttggaaaactggcagtttcttacaaagttaaatacatacctaccagtaattccatttttaggtgtttacctaaraaaaatgggaacatatgtccccaggaagacttatacaaaaacgttcatagaagctttatttataatagtcaaaaaatagaaacatgcaaatgtccatcaatatcaatgggaaaatggcttaaaattgtggtatatc

SEQ ID NO: 305331 - DNA, 591 bp, Homo sapiens
gaaaatggatccccttgaagaaatatgagagaaggaagctaatccttggtgacagaataagagacactcaaactgacattaagaacacacaagtagtccagagagtggaaaaatagctaaacttatatgaaggtgcttgatacaagggtatgtcatgttctgaggcctgacctttcctgagaagctgacaggcatggcatttatgatggaaaaacaaccctggaggcacagaaaagctgatggccacagactgcaaagggatcaattagagagaaaactgctctctggtacagaaagagtgtttagaagagaaatgggcatcttggtgttgctgtamttatcccctctcttttctgagtcaccaatttctcattctgtgcagcaattctgctgttttacaaacatgtcataatgtctcatcttaaaaacaaacaacaaaatcctttttagtcactctttatcccattggtatgtccatttcttcaaaacactattacctcttatgtatgtatttgtttgtttattgtttgccttcctgttgtaggaactctgatccatgaaggcaggatcttttttttcttcttcactgct

SEQ ID NO: 305332 - DNA, 591 bp, Homo sapiens
gaaaatggatccccttgaagaaatatgagagaaggaagctaatccttggtgacagaataagagacactcaaactgacattaagaacacacaagtagtccagagagtggaaaaatagctaaacttatatgaaggtgcttgatacaagggtatgtcatgttctgaggcctgacctttcctgagaagctgacaggcatggcatttatgatggaaaaacaaccctggaggcacagaaaagctgatggccacagactgcaaagggatcaattagagagaaaactgctctctggtacagaaagagtgtttagaagagaaatgggcatcttggtgttgctgtaattatcccctctcttttctgagtcaccaatttctcattctrtgcagcaattctgctgttttacaaacatgtcataatgtctcatcttaaaaacaaacaacaaaatcctttttagtcactctttatcccattggtatgtccatttcttcaaaacactattacctcttatgtatgtatttgtttgtttattgtttgccttcctgttgtaggaactctgatccatgaaggcaggatcttttttttcttcttcactgct

SEQ ID NO: 305333 - DNA, 585 bp, Homo sapiens
gttcaagtgcacaagagtctacaaaatattctcttatttggctgggtgcggtggctcatgcctgtaatcccagcactttgggacgccgaggcgggtggatcacctgaggtcaggagttcaagaccagcctggccaacctggtgaaaccccatctctactaaaaataaaaattagctgggcgtggtggcacatgcctgtaatcctagctacttgggaggctgaggcagragaattgcttgaacctggaaggcgaaggttacagtgagctgagatcgccccactacactccagcctgggcaataagagcaaaactctgtctaaaaaaaaaaaagaaaaagaaaaaagaaaaatcggattgctgggttaaaggacaggtgtacttataattgatagtgtcaaactgacctcatggaggctgtgttctcccacctacaatgtattcttcccttataatagtgaacaagacacaatgcttgggaacttaaactgtacaaggaactcagaaggctagaataagtagagaaggttaacagtacttcacgaatttcatttcctcttagggaaatctgtttactttaaagagtg

SEQ ID NO: 305334 - DNA, 548 bp, Homo sapiens
aatttagaaagaataaaatataaaaaactctaaaatgtaacatcataaacacagttttgcatgtacttttgatgcggcaacttaaatttacttttcaatatccacctaaatactagtttggcctcaaagtcaaatactgtttaagtatcatctgacttttatagttactgttgttaagtcctcctattccctgctccctgccccatacataatttaaagtaaaataaaagcagatcatttactaaaagtgagaatgttttaatgtctttattatgcatattagcttatatttaaaataaatttaatgatataattcttgacaatatagtttctcaaatttttgtagctaaaaaataataacatccttttttgaaaatcttaaggtttacctcctaagaaacattgaggaacactatactaaagaatagggaaaaaattaagtgataatattattcataccacttgttyatcattattttttcagctaagagatgagtacaactctttgccagccactatggaagaaagccaagagaaaaacggcagtt

SEQ ID NO: 305335 - DNA, 481 bp, Homo sapiens
ttttatagttactgttgttaagtcctcctattccctgctccctgccccatacataatttaaagtaaaataaaagcagatcatttactaaaagtgagaatgttttaatgtctttattatgcatattagcttatatttaaaataaatttaatgatataattcttgacaatatagtttctcaaatttttgtagctaaaaaataataacatccttttttgaaaatcttaaggtttacctcctaagaaacattgaggaacactatactaaagaatagggaaaaaattaagtgataatattattcataccacttgttcatcattattttttcagctaagagatgagtacaactctttgccagccactatggaagaaagccaagagaaaaacggcagttcctgctttcaaagagcttactggctggtggctggaaggagacragtacaaagattgataagttctctgacacaggtaaagtaagccact

SEQ ID NO: 305336 - DNA, 562 bp, Homo sapiens
aatgtctttattatgcatattagcttatatttaaaataaatttaatgatataattcttgacaatatagtttctcaaatttttgtagctaaaaaataataacatccttttttgaaaatcttaaggtttacctcctaagaaacattgaggaacactatactaaagaatagggaaaaaattaagtgataatattattcataccacttgttcatcattattttttcagctaagagatgagtacaactctttgccagccactatggaagaaagccaagagaaaaacggcagttcctgctttcaaagagcttactggctggtggctggaaggagacgagtacaaagattgataagttctctgacacaggtaaagtaagccactgttatcatgtagaataaagatgaactcagtttctggtggtgagaacagaaaagaacgaacaaatwggaactattaataaggtaaaacacactgggcatcctgaccaattagatgagggaagaaagatagagaattaaaattgttgtcaatgagatgccttatatttagagatataaagagaagaa

SEQ ID NO: 305337 - DNA, 646 bp, Homo sapiens
ggcaaacaatgttttacagatttaagatcaataactacaaaacttaaacttacatagccagctcttaggggtgttagaaggattcaatgacataggtgtgagaaaatagaatggtggattttctgattgcaatttctgatagtracctttctttgacttttctccaagttttgggacctttattgcagtcccatatgtggaaaccacacatgccatcttatcttacacagactcagttccaaagagcattaactttgaaataaatgaatcttgaatttgaattcgacttttgtcatgcactagctgtatgaatttggggaaataacttatttgaatctttgagtcttcatccataaaatatagaagtcaaaaatcatttcatacatgtattatgtaagacaataaaatatacaaagcaaattgtctggctcatggtgggtggacctatcttctttctctaaagtttatttatttattattattttattattattattattctttaagacagggtctcactctgtcacctagcctggagagcagtggtgcgatcatggctcactgcaactttgacctctgggctcaagtgatcctcccacttcaggctcctgagtagccatgaccacaggtgagagccaccacactc

SEQ ID NO: 305338 - DNA, 559 bp, Homo sapiens
agtctgggaggttcaacatccaaataacagaaggagagaaccaagaaaataaaaagaaaaaaaattcaaaaaatcatttataaaattttcctgcactaaagaagatgaattttcagattaaaagggctcactgagtacctggctgaatgaatgaaaataggcctccaaaagggcatatcctaataaaatttcagatctctgatagaaatagaaaatcttaatagcttctagaaacgaaaaatagataaaacagaaatcagactatctttcaacttttcaacactggaggctaaaagacaatggagggaagacataaaaattcagaaagaaaatgaattacaaaccagaatcctatactcagccacaatatcaatcaaatktcagtaaacaataaagacatcttcagacaggcaagaccaactcaagaaggaaaagacatgaaaactgggagatccaactcaaaacaggggcagaaagaagcctcaagttgatagtgaaaagggatctgtactatgtgggacacagttttcagccaaatcagaaataagtacatagagaa

SEQ ID NO: 305339 - DNA, 629 bp, Homo sapiens
cagctaatttttgtattttttgtagagacagggtctcaccatgttagccaggctagtctcagactcctgagctcaagcaatttgcctgcctcagcctcccaaagtgctgagattgcaacaatgagccactgcacccagcctggaaaatattttaaatttaacaaatatctagccatgagcatgtttattggaagaatctcatttacccacatcatcatggcattgtggtgtctgaagaatgtgtcttgaactattgttatggacgtttttctctagtgttcactttttaaaagaaggcccagaaatggaaatcgggacttaatctcctattatgaggagattattggggtttgggttctgaaactcagcagtaaaaattggcttagatctaagtaaaaaagattcacctaatggcctggtacttcatgcaaaaggtcaaaataaaaagcagagggaactctactaggagattgtaacaccatcatcttcactacagactgagaaaattgataaagaattgaratatattgaccccctactctttcctaggcattgaaaaaagacctttatatgtagttattcatttatttgtacagtaaaatttcactgtaatgtacaataggaaaact

SEQ ID NO: 305340 - DNA, 592 bp, Homo sapiens
agccacccttctgagatgccccccatcttaaccccttcctcccccaaatgacagctaggcccagagacagcccaacccaccctacccccatagccccaagcccaacatttacaaaggccagccttggagagggaaagtgcagctttgtccagcctgrgccctatcccgcctcccttcctgacctcttactcaccacctccatagaataccaccatgccagcaaccataagcactgggtgccagttgaacatgtagatgctgccattccaggcaaagccaccacgccagtactgcatccagtagatagtgaagaggatgcacatagagcccagggaccccagcagcaggcaggacaagtagaaccgtccagacaccattctgatcacgcactcctagaagaaggagaagtcacaaatctccactggctcagatgcacccagttctctggctaaaggaggtaacactgatttagctcttggcctgtgggatggaatctttttgcttcagttcccctgcatcagcctgggcaccaccccccgcccgaggcctcaatgcctgggtgggcctgatcttcagtcacaatgactgaggc

SEQ ID NO: 305341 - DNA, 581 bp, Homo sapiens
ctctgcttttggtcttttgttgcttcattctttgctttgctgggcgttttgtctaattctttgttcgaaatgccaagaacctggacaacttgcactcatgaccctctaccgatgacaccakcattttgggaggctgaggtgtgagcatcatctgaggccaggagttcaagaccaacctgggcaatacagcgagaccctgtctctaaaaaaatgaaaaaattagccaggtgtggcagcatgtacttgtaggcctagctactaagggaagagaatcacttgagcccaggaattagaggctgcagtgaacaatcatgccactgcactccagcctggacgagagagtgaggctgcatctctaaaaataaataaatgaataaataaacaaaaagtcttattgagaaacaggaaaataaaggagaagatatgaaaagatataaataaaggataaataatagaaataaaagatataaataagcagaaaataaaggagaagatataaaagaatcaggaaaataaaggagaagatataaaaataagaccagggccacttaaaattcaaaggcaacatatggctgaatgac

SEQ ID NO: 305342 - DNA, 507 bp, Homo sapiens
tgttttctatttctcctctattctttattttctttttcctttcctgccttcttttggattaataaatttttagtgtcccatttttagctcttttgttggctttttaatctatttaatttcatctagcgattacactatatataaattaacatgataaattacaaattaatagtataccactttatgtatactgtaagatgcttacaatagtataatttcattttcccattcccatttttcctactattgccttcttatattttaccattacatgtaatgtaaattacactatatgttactactwctgcttaaacactttagtgacttttaaagaaattaaggaaagaatagtgtttcgtatttatcttttctggagtttactgctcgttatttatccaggtttgcatttaatatcatttcccttcaacctagagagtttcctttagcatttcttgaagttcagaattgcaggtgaaaaatgctttcagattttgtctgaaaatattt

SEQ ID NO: 305343 - DNA, 507 bp, Homo sapiens
tgttttctatttctcctctattctttattttctttttcctttcctgccttcttttggattaataaatttttagtgtcccatttttagctcttttgttggctttttaatctatttaatttcatctagcgattacactatatataaattaacatgataaattacaaattaatagtataccactttatgtatactgtaagatgcttacaatagtataatttcattttcccattcccatttttcctactattgccttcttatattttaccattacatgtaatgtaaattacactatatgttactacttctgcttaaacactttagtgacttttaaagaaattaaggaaagaatagtgtttcgtatttatcttttctggagtttactgctcrttatttatccaggtttgcatttaatatcatttcccttcaacctagagagtttcctttagcatttcttgaagttcagaattgcaggtgaaaaatgctttcagattttgtctgaaaatattt

SEQ ID NO: 305344 - DNA, 524 bp, Homo sapiens
ctgattcattctgtgagaccaacattaccacaataccaaaacaagataaagatgtgacaatatagaaaaactacagaccctcatgaccttagatacaaaaatgtaaaacaatattttagcaaatcaaattcaataatgatatggtttggctgtgtccccacccaaagctcatcttgaattggaactcccacaattcccacgtggcgtgggaggaacctggagggaagtagttgaatcatggggaygggtctttcccatgctgttctcatgacggtgagtaagtctcacgagatctggtggttttaaaaataaaagttttcctgcacaagctctctttctttgcctgctgccatccattaagatgtgacttgctcctccttgccttctgccatgattgtgaggcctccccagccatgtggaactctaagtcaattaaactcctttcttttgtaaattctccagtctcaggcatgtctttatcagcagcatgaaaacagactaatacagtcaatttgtaccagtag

SEQ ID NO: 305345 - DNA, 524 bp, Homo sapiens
ctgattcattctgtgagaccaacattaccacaataccaaaacaagataaagatgtgacaatatagaaaaactacagaccctcatgaccttagatacaaaaatgtaaaacaatattttagcaaatcaaattcaataatgatatggtttggctgtgtccccacccaaagctcatcttgaattggaactcccacaattcccacgtggcgtgggaggaacctggagggaagtagttgaatcatggggacgggtctttcccatgctgttctcatgayggtgagtaagtctcacgagatctggtggttttaaaaataaaagttttcctgcacaagctctctttctttgcctgctgccatccattaagatgtgacttgctcctccttgccttctgccatgattgtgaggcctccccagccatgtggaactctaagtcaattaaactcctttcttttgtaaattctccagtctcaggcatgtctttatcagcagcatgaaaacagactaatacagtcaatttgtaccagtag

SEQ ID NO: 305346 - DNA, 487 bp, Homo sapiens
gcaacaatagacactatggactactaaaggggagaggaagggatgcaggagttgaaaaactattgggtaatatgctcagtacttgggtgatgggagcaatcatgccccaaacatcagcatcacacaatatactcaggtaacctgcacatgtactcctgaatctaaaataaaagttgagtatgtataagaggaagtcattcatcataaaggtctccatcctcatcatcttccattgagtgrgctgtggaggaggaggagtagatgttggtcttactgtcttagggtggcagaagcagaagaggtagaggaggtggaagtggaggcaggagaggcaggtgcacttggtgtaaatttatggaaatacatcataattactgtctgtttttttctctttgatgtatttaaaaatgcttttatacagtactaatccttcttccccatttgctttagtttcagtgcccataagggttcatgttgtaatagaagt

SEQ ID NO: 305347 - DNA, 589 bp, Homo sapiens
ttcttgttgtacaaccaaaaaactgtcagtgggtgttgatcttgtcccctcaaggcttaaggtttggcagttctacacatgaggtcagtcctgagtgtaaacttgactgcatttacacaaaacagtagagttagcctatcccttcctgccttgcattctggtgcttggtttacttccttgctaataaatgtcttttgtgtcatcttgtttttgtttttgtttttttccagaatagggcaytgtcatctgtattaaaaccctgttcaggcagatatgctttcccctcaataattatcttcatggcatctgggaactcatttgtctccttttgcttggcagaggctgcttctcctgttatcttgacaattttaaagctgaacccctttctaaaactagcaaaccatcctttgctgccattaaattttccagttttagattcttcacctctcttttgctttaagttgtcatataatgactttgcattttctcaaatcacattggcatctataaatacgcctttcttatagcaatgctacacccacgttaaagctgcattttcaatatgagacaaaaacgtatttcagaaaaa

SEQ ID NO: 305348 - DNA, 347 bp, Homo sapiens
aacacctcctaccaggccgcacctccaacactgggaactacatttcaacatgagatttggacgggacaaatatccaaactgtatcatttctcccctgcctactcccccaaatcttatgttcctctcatattgcaaactacaataatgcctttccaatagtcccccaaaatctarctcattacatcacttgctcaaaattccaaagtccaaagtctcatcagagacaaggcaagtctcttccacctatcagcctgtaataaaaaacagttatttacttccaagttacaatggaggtacaggcattgggtgctcccattccaaaagggagaaatcagccaaaagaaagg

SEQ ID NO: 305349 - DNA, 551 bp, Homo sapiens
gaaccatgcccatgatccaaacatctcccaccatgcttcaccttcaactctggggattatatttgaccatgatatatggaggggacaaacatacaaattatatcaaaggcatagcatggctactgtgaaaggagggtaaaaacacaaagatgacatcaccactgacctcagggagtgcccagtagactgagggagacaagtacatattttcctgaaggagggcactggattgatggcatgtttagaatgtggaagtagagcggccacagaaaggcagcccggcagagtgctcgcacaaagactgggctagagactccccactgcatgtgatgtatctgaggaaagtcattaaaataggtgatggtcactttccatcaagtccctggtatggtccatggaggcagggttgtcaatgtcatttcggcatttcagaggcctctcagggtttggatatggcagaagacaaccagcaatgattatgcattrcagagatgcaggtgagccccaatcttcttgccagctgggaagtcggtgctaaggggccttgctgt

SEQ ID NO: 305350 - DNA, 599 bp, Homo sapiens
ttaaatcgagtgcgcctgcctctcctgcctccctttccacctcctccacctcttcctcatctgccatccctgaaaaagcaagaccaacccctcctcttcctcctcagcctactcagtggaggacaatcaaaaggaagatctttatgatgatccactcccacttaatgaatacttaatacattttttctcaaccctaaaattttttctcaaaccttaaaattttcttaataacattttcttttatctagctgactttattacaataatacagtatataacacataaagcatatcaaatatgtgttcattggctatttacgttattggtaaggcttctgctatacagtaggctattaatagttaagttatgggggtcaaaatgatatgtggattttagamtacctgcgaggttggtatccctaatctccacattgttcaagggtcaactgtactagcaatgaacaattgcaaattgaatgaaaataccacttaacatcaaaaacatgaaatacttagggataaatctgatcaaagatgtgaaagactacactgaaaactaaaacactgaggagagatctgaatatagagatatgttcaaga

SEQ ID NO: 305351 - DNA, 609 bp, Homo sapiens
ttacccagccccaggtattcctttagagcaacacaaaaaaactaaaccgccaggtgcttctgagcatgaagagtggcataaaataaagcccatgagccaggaaaggtgagatgatgggggaccttgatagctagtgggggccagcaggccacagggcatcaccagaatgtcttgagtgggccaaagagacggtgtattgtgttgggtatcacattcttagggtagaccaaaggaaagaagctggtgaggggaagcagcagtaactgacaccagggatttcataaagacgtagaaaggttaggtcctaacgcaggcggaggctccacctgggctcacctgtttcaggaagactcacaggaaaggaaaaaaaaaaaagatgtttaactaagggagatgccacatgaagcatgtgcgtgtttatctgcacatcttaatagggatgcccaggaacgtgtaaactgaaaagaaaatactaagtgccgcccgtctcccacaacaagtgaatcraaccctcctggccagcgggaccccaaagaaaccttcaaaactgagtcacagccacgacgggacagaaggctggacacgcctcgtcacactccctcccttttg

SEQ ID NO: 305352 - DNA, 577 bp, Homo sapiens
aatgtcaaatcccagttccgtaaggaatctttttaaatattcaaatccagaatacttttaatgtgctaaaggagcaatgacttaccataggcactggctttccctgattgcagttgataccaccaatgaagatcatattgggcatcacaggtttgggatactccaaaacaaagtccattcgcagcaaccaaattgatgtgtggctgtagagatcatatgccatgacaggtgtttggagaatttcagaggctatgtttaaggcatttttgaaaaaatatgggcaaaataaatgctcctctaagtagaagatgtggttccttactctctccttaaaagtcatggcrtccaggctgggtgtggtggctcacccctgtaattccagcactttgggaggccaaggcgggcggatcacgaggttaggagatcgagaccatcctggctaacacggtgaaaccccgtctccactaaaaatacaaaaaaaaaattagccaggcgtggtggcaggcacctgtagtcccagctacttgggaggctgaggcagaggaatggcgtgaacccgggaggtgcagtttgcagt

SEQ ID NO: 305353 - DNA, 609 bp, Homo sapiens
ggctactcttgctcacttttggtttctatttgcatggactatctttttccatcccttcactttcagtctatgtttgtctttaacagtgaggtgagtcttttttaggcaacatatagttgggtcttcttttttttaacccattcagtcacttttatatcttttaattgaagaatttaatcaaggttattattgataagtaagaacttactcctgccattttgttaatcgttttctggttgttttgtagatctttttcttcctttctggttgtttacttctgtggtttgatggttgtctatggtgctaagctttgtttctttttcttatttgtgtatwttctgtcatgtctttctttgtggttactgttgcactaagatagagagtcttgtacttataatagactattttaagctgtatccaactcacctttggtcatataaaaatagtctagaattttttcccttccctctacaatttatatttttgttgccttaatttacatctttattgtgtccttagccactaatagtaactgttgttgtttttggctattttgactttaaaccttcatggaagaggattgataaatttatatagcaccattgcgac

SEQ ID NO: 305354 - DNA, 586 bp, Homo sapiens
ctaatacaatggggaaaatgtctctagggcacatcagaggtcttcatgtcagcygctcccaccataagcctagatgctcaggaggaaaaaatggtttcctgggctgggccgaaacacccctggtgtgtgtagcctagggacttagtgccctgtgtcccagccactggtgcatctcagtccctggcttcagagggtgcaagtccctggcagcttccacgtggtgttgagcctgcgggtgcacagaggtttggtaaactctgcctagatttcagaggatgtatggaaacacctgaaagtccaggcagaagtttgctgcaggggcggcccctcatggagaacctctgctagggcagtgcagaagcaaaatgtggagttgaagtccccacacagagtccccactgggcagtgcttagtggagctgtgagaagagggccaccatcttgcagactccaaaattggagatccaatgactgcttccacctggaaaagctgtagacacttaacaccagcttgtgaaagcagccgggagggaggctgtactctgcaaagccacaggggcggagctgcccaagaccatggaaaccca

SEQ ID NO: 305355 - DNA, 586 bp, Homo sapiens
ctaatacaatggggaaaatgtctctagggcacatcagaggtcttcatgtcagccgctcccaccataagcctagatgctcaggaggaaaaaatggtttcctgggctgggccgaaacacccctggtgtgtgtagcctagggacttagtgccctgtgtcccagccactggtgcatctcagtccctggcttcagagggtgcaagtccctggcagcttccacgtggtgttgagcctgcgggtgcacagaggtttggtaaactctgcctagatttcagaggatgtatggaaacacctgaawgtccaggcagaagtttgctgcaggggcggcccctcatggagaacctctgctagggcagtgcagaagcaaaatgtggagttgaagtccccacacagagtccccactgggcagtgcttagtggagctgtgagaagagggccaccatcttgcagactccaaaattggagatccaatgactgcttccacctggaaaagctgtagacacttaacaccagcttgtgaaagcagccgggagggaggctgtactctgcaaagccacaggggcggagctgcccaagaccatggaaaccca

SEQ ID NO: 305356 - DNA, 586 bp, Homo sapiens
ctaatacaatggggaaaatgtctctagggcacatcagaggtcttcatgtcagccgctcccaccataagcctagatgctcaggaggaaaaaatggtttcctgggctgggccgaaacacccctggtgtgtgtagcctagggacttagtgccctgtgtcccagccactggtgcatctcagtccctggcttcagagggtgcaagtccctggcagcttccacgtggtgttgagcctgcgggtgcacagaggtttggtaaactctgcctagatttcagaggatgtatggaaacacctgaaagtccaggcagaagtttgctgcaggggcggcccctcatggagaacctctgctagggcagtgcagaagcaaaatgtggagttgaagtccccacacagagtccccactgggcagtgcttagtggagctgtgagaagagggccaccatcttgcagactccaaaattggagatccaatgactgcttscacctggaaaagctgtagacacttaacaccagcttgtgaaagcagccgggagggaggctgtactctgcaaagccacaggggcggagctgcccaagaccatggaaaccca

SEQ ID NO: 305357 - DNA, 483 bp, Homo sapiens
actccatctcaaaaaaaaaaaaaaaaaaaaagatcaaaaggggcttttgaagctggtctcccagcggtcttcccaccacacaccccagcagagtgtgcactcttcaaagcgaacaccgttctcctcccctgggctcgagcgagccggggttgagcttcccgagcgtctccactgacagcccckttatgggttgtaggtggggcctcggaccagcccctaccagacacactgcctctgcaaccacctcactttcttcggaagcacgttcctggtgatgtccaatgccatcaacatccaccagactgctgagctctttgccacctttgaggacaaccctgtggtcgtgaccaccgtgggctgcctgtgtgtggtctacgtgctggtggtgatctgggcgaggaggaaggacgctcaggatcaggccaaggtgaggctgagaaccattggcgctgcgtacaccgtcctggagaaaactccattgtt

SEQ ID NO: 305358 - DNA, 483 bp, Homo sapiens
actccatctcaaaaaaaaaaaaaaaaaaaaagatcaaaaggggcttttgaagctggtctcccagcggtcttcccaccacacaccccagcagagtgtgcactcttcaaagcgaacaccgttctcctcccctgggctcgagcgagccggggttgagcttcccgagcgtctccactgacagcccctttatgggttgtaggtggggcctcggaccagcccctaccagacacactgcctctgcaaccacctcactttcttcggaagcacgttcctggtgatgyccaatgccatcaacatccaccagactgctgagctctttgccacctttgaggacaaccctgtggtcgtgaccaccgtgggctgcctgtgtgtggtctacgtgctggtggtgatctgggcgaggaggaaggacgctcaggatcaggccaaggtgaggctgagaaccattggcgctgcgtacaccgtcctggagaaaactccattgtt

SEQ ID NO: 305359 - DNA, 483 bp, Homo sapiens
actccatctcaaaaaaaaaaaaaaaaaaaaagatcaaaaggggcttttgaagctggtctcccagcggtcttcccaccacacaccccagcagagtgtgcactcttcaaagcgaacaccgttctcctcccctgggctcgagcgagccggggttgagcttcccgagcgtctccactgacagcccctttatgggttgtaggtggggcctcggaccagcccctaccagacacactgcctctgcaaccacctcactttcttcggaagcacgttcctggtgatgtccaatgccatcracatccaccagactgctgagctctttgccacctttgaggacaaccctgtggtcgtgaccaccgtgggctgcctgtgtgtggtctacgtgctggtggtgatctgggcgaggaggaaggacgctcaggatcaggccaaggtgaggctgagaaccattggcgctgcgtacaccgtcctggagaaaactccattgtt

SEQ ID NO: 305360 - DNA, 483 bp, Homo sapiens
actccatctcaaaaaaaaaaaaaaaaaaaaagatcaaaaggggcttttgaagctggtctcccagcggtcttcccaccacacaccccagcagagtgtgcactcttcaaagcgaacaccgttctcctcccctgggctcgagcgagccggggttgagcttcccgagcgtctccactgacagcccctttatgggttgtaggtggggcctcggaccagcccctaccagacacactgcctctgcaaccacctcactttcttcggaagcacgttcctggtgatgtccaatgccatcaacatccaccagactgmtgagctctttgccacctttgaggacaaccctgtggtcgtgaccaccgtgggctgcctgtgtgtggtctacgtgctggtggtgatctgggcgaggaggaaggacgctcaggatcaggccaaggtgaggctgagaaccattggcgctgcgtacaccgtcctggagaaaactccattgtt

SEQ ID NO: 305361 - DNA, 505 bp, Homo sapiens
tttcagtatattgttaaaatacagtcaactatttcttttcagaagtggacaaggataatttttcagtgttcaacaaataagtcacagccaggactcttgtaggaagatacttctttgtccctggaattcccacagttgtgaaggaaacagatgactgacaggcttgtcttaaacacagatgccaaggtctgtgtgtgccttcctagaagacacactgttaagggacattaaagtatgcrggtggtaccctgcattgtataaaaatcatgtttgcagaccacgcgcggtggctcacacctgtaatcccagcacttcaggaggccgaggagggcagatcacttgaggtcaggagttcgagaccagcctgggcaacatggtgaaaccatgtctctactaaagatacaaaaattagccaggcgtggtggtgcacgcctgcagtcctagctacctgggaggctgaggcaggagaatcacttgaaccaggcaggggaggttgcagtgagcc

SEQ ID NO: 305362 - DNA, 522 bp, Homo sapiens
gctgggattataggtgtgaaccgctgtacttgtcccagaagcaattttgtatataacgcctcagagtctagagttcaggagaccttgtttcaaatcccagtatgtcactcagccgtatgttctttgacaagttgcatcacctttctgagcctcagacttcaagcagagataatagtacattatctacttcacggtattcttgttaggattaaatgaggtagtgcccgagaagctgttagcatggtaactggcacatcagaaacacaaagtaaatgtttggctttgtattactcaggttgccaacttacaacagctcaacttaaaaattttcaactagtatgaaagcagcagacattcaacagaaaccatactttgagttcctatacaaccattcttttctcactttcagtacagcatttagtaagttacatgaggtatgcaacagtttatgatagaagactctgttggatgmttttgctcaactgtaggctaatgtaagtgctctgagcacacataaggtag

SEQ ID NO: 305363 - DNA, 606 bp, Homo sapiens
atgtgactgggtccaagctctatgatgctcactcaggaaagtcagacagctgtgtgccgccataccctggactggggagactttcttgtctcctgcactgagggaatttggaaaagctgctaaagaatgagcagaatttgctagtgccactgtaacaacccacttttcctagaacaagatctcagagggaggaaacagagacgtgggcaagctgagtgcatctcactcaagtccctcctttctaggctcagagctttaaagggaagctgaatcagaggggagctgataatccaggagcagcctattaaattccagaccaattggcaaccatatttaaaagtttggaaaggcctgtattttatccatgaagtggattcaaggtagtacctctggtcttgccatgtaacattcttttagaggagtttttagcttctgagctaaatgcataagagcattaggaatagtatattttcaagcccattattacatagaaatcttctttaagcccattatgacatagaaatcttctttttcttcttctttttgttttgtttttgtttttttttggaaacrtggtctcactctgttgcccaggctggaatgcac

SEQ ID NO: 305364 - DNA, 551 bp, Homo sapiens
gcaccctgtcaattcaatatagagtagctttggtcatccataccctgcttatgataacagtcaaaggaaaagtggatgtagaagaaacactaaaagactgaaatgcctttctgataagttgtcaaatagtgaaagagctctttgcttgatacccaactatttttaaaattgccacccaacttaattcttaatattaagtcttacgtgattatactgtaaaactccgaggaattaggatctygaaggcagaatgatgttgacatatatacctaaaaccattgcccctgggaattttcattccatggcaaatttatatacatgcctatattttctatagcagagaaatattggaagaagaggcgtaatcctgggaaaaggtattgtcatagccagcaataagaccacagcaatgttagaagacagtgttcacacccgccttaagtcttctgataacttccaacgcaaaaagaatgaaggtagggaaggagactgcatctatgaaagggaatgagggaggaggcggcccaaatagctgcctatgaaaggaaagt

SEQ ID NO: 305365 - DNA, 521 bp, Homo sapiens
gtgactcattagtccagaggtagcagattcacaataataccagcacaaacaacttcctgaagrgaagttgtccttagtttttgctgaaaactaagtgtgagaaatggattagcagggtgagaccccatttctttcaaataataagatatagagctagatgaagaatcacatgcacaagccacatttgcaggaagtcatctgcctctgtggcagtaaagtagaagtaattctttgggtataaagcttagagggctacagttgctccctttccaaccaacctataaatagctggtctagaaaaatccaattaattcagtaatgaataatatagggaaaaactggcatgatattgacacaaaaaatgtcataagaaaaatacagaaaagggctgcaaaatttagaaacaaaagaacattcaccagaatgtgtttcaatacacgatttaaagacaatggatcaatcacatttaaaaacaaaaatcacagatcagaaatgtacagtcaggaaagaaatgatgtgac

SEQ ID NO: 305366 - DNA, 528 bp, Homo sapiens
agaaatgatgtgacaacagaagcaatgaagtatgagctggaatcactaaggaaataagagcattaattttaacaaaaacctgaaacaaaaacaaaagtggtgggatgacagaagaaaacagtatggaaaattgggtgtgatactgtgaaataatgtataatcatatatatatagaagattatatatataagtaaagactgtatgtgtgtgtgtgtgtgtatatatakagagagagagaaagagagagaggagagagagagagcggtcctaagacctttataatttactgagtgataggaggatagggcaaaggcctccaaaatcaggtgacagactcatcgtttgttctaatgaggtaacttttggtgggctcctggatagcatcaggatgggggctagttgccaggaaaatgacccatgtcattagatgggtggaactgtcagtccaatcctgacctccaggaaggagagaggggctaaaattgattttatgaccaatggccaatgatgtaatcaactatacctgtg

SEQ ID NO: 305367 - DNA, 450 bp, Homo sapiens
tctctgtgttgctcaggctggtctcgaactcctagcatcaagtgatcctcctgtgtcagcttcccaaagcactgagattatgagcatgaaccactgggcccagctaaggagcaaagttattatttttttgaaattaagttggtaatgatcccaaaamatcattagaagttgagatgccaattgcaaattccacagaaacctctgagataatctaaaaacatacagcaaaagaagcaacaagataattaaaatagtatagaacactaaatatccatttaatacagaagactagaatagtggaggcatacagaaaaaaagacataagacatacaaaaaacaaatagcagacataaatcctacctgttagtaattacatgaaacaaaatggattacgttctgattaacagacagaaattggcagcacagaatttcaaaaattatcgaattata

SEQ ID NO: 305368 - DNA, 514 bp, Homo sapiens
atacaaaatcaacactcacaaatcagtagcatttctatataccatctatgaacaatctgaaaaaagaaattaaacgtaatcctatttacaacagccacacataaaattatatacctaggaattataaattatttttgactatagttaccctgctgtgctagcaaattctaggtcctattctttctgtgtaactattttttcacacctgttaaccatctccacatcaaaaaatggaaaaatctttcaygttcacaaattggaagaatcaacattgttaaaatgtccatactacccaaagcaatctacatatccaatgcaatccctatcaaaataccaatgacattcttcacagaaatagaaaacacaatcctaaaaaaagacccaggataggcaaagctatcctaagcaaaaagaacgaaactagaggaatcacattatctgacttcaaattatactacagaaccctatctcttgctatatacaaaaatcaaatcaaaatggtttaaagacttaa

SEQ ID NO: 305369 - DNA, 553 bp, Homo sapiens
aacattatattttctcacttatttgttggatctaaaagtccaaataattgaacctatggagagtaggatggtcaccagaggctgggagtgttgcgggggtgggagtgggatggaggtgaggatagttagcatgaatgaataaggcctagtattttatagctcaacagagtaactatagtcaataataatttaactgtacatttaaaagtaactaaaaatgtgtgattggtttgtttgtaacacaaaggctaaatgtttgaggtgatggatatcccattttccatgatgtgattattatgcctgtatcaaaacatctcatrtgccccacgaatatatacacatagtatgtacccacaaaataaatagaaaaagaatatcacaatggtaattcatgcaggcaatatcaatggatgaatggtaaaattagtggtaaaactttaaggagaaagaggatatgtatttaatctcagtttcttccccaaaatatgaattactgtgattgttttctaatgcacattcaaaaatgctttgatactcttctccatagcaggta

SEQ ID NO: 305370 - DNA, 553 bp, Homo sapiens
aacattatattttctcacttatttgttggatctaaaagtccaaataattgaacctatggagagtaggatggtcaccagaggctgggagtgttgcgggggtgggagtgggatggaggtgaggatagttagcatgaatgaataaggcctagtattttatagctcaacagagtaactatagtcaataataatttaactgtacatttaaaagtaactaaaaatgtgtgattggtttgtttgtaacacaaaggctaaatgtttgaggtgatggatatcccattttccatgatgtgattattatgcctgtatcaaaacatctcatgtgccccacgaatatatacacatagtatgtacccacaaaataaatagaaaaagaatatcacaatggtaattcatgcaggcaatatcaatggatgaatggtaaaattagtggtaaaactttaaggagaaagaggatatgtatttaatctcagtttcttccccaaaatatgaattactgtgattgtttyctaatgcacattcaaaaatgctttgatactcttctccatagcaggta

SEQ ID NO: 305371 - DNA, 582 bp, Homo sapiens
gctgcccctctgttgaagatgaagcaggaaaattaggggcagctcagagcatggctgtagcttggttggtgaggagagaaagaagacaaggaggcagtgagtgaatagcagtcagaaaggagggagagatttgctaatcttttgattacagaaactaaaagctaaatcatgaataccaggggtcattaaaatgacatacaaatcgcgatagagtgtgcatgaataccaacgctcagttcattgtcttggccaagtgcccaagtaggtgatgatatcttacaaccccaaggatttccttaaaaaaagttacattataaaataacagcctgctgttcacccaaagtttctttatgccaacctatgtgagagaatcaaactttcattattaagtgctttgagattcagacaagtgacaggcactttaaaatctgtttatttggtactaaagacygtagattagacttttcagccagaattgcacaagtgtgcaacacaaccattagcagtgtcatctgcaatatatggaagtaaaatgattgactggttttaagctaagtcttagactcatctagcatagaccaa

SEQ ID NO: 305372 - DNA, 549 bp, Homo sapiens
aaacacctccactggtaagtggaattgaaaaagtctgtttacctttcagcgagtgatgagtttcaggctgtaacattttttccagtcgtcatcatgtgttgtcagtctattaacctgcatattttcctagcccttgattcacactggggctggaattgtccctgaacatcatctcagaggtctattctccttcatgagaagcagattcatagttatcctccacaaacctacatctactgcattccaagwattgattcaaaaatgtaacacaaacaatgaaatataaaaagatcacctattttttaaaaagtaaagtagaagatataaaataaatttaaaataaaggaattaaaaataaaaatgaaaagaaataataaaatatgggaataaaaatataaagataataaaactggcaacatgcttgcaatagaacaattttctaattgagatcattaaatgaaacaaaaaggaatttaacatataaagaataatgtagtaaaatagtgaaaacaataagaacaaaggaacagataacaaaacaattaaaat

SEQ ID NO: 305373 - DNA, 494 bp, Homo sapiens
tgcattttcctgatcattggagtgacattattaaatgatataaacaagatatttgctcttctggaaataagaacctactaggggagataaagagtaaacacacaataataatcaacaaacttgatacattgtatagataatataaagttagtgcattagtgtgttctcatgctgctataaaraactgcccaagatggggtaatttataaaggaaagaggtttaattgactcacagttccacatgactggggagacctcaagaaacttacaatcatggtggaaggggaagcaaacatgtccttcttcacatggtggcaggaaggagaagaatgagaactgagtgaaggggaaaacctcttataaaaccaccactcccatgattcagttacctcccactgggtccctctcatgacatgtgggattatgggaactacaattcaagatgagatttgggtggagacacagacaaaccatatcattcagtccctggcccc

SEQ ID NO: 305374 - DNA, 587 bp, Homo sapiens
ctcagagtggttaaaaacttttccaagatcaaatatttagtaaacgttaggagcaaaatgttaagctgagtcttctctctccaaagtttcttcttctctagtccctatcctcagttacttgacctgctagaatcaagcagagcaggaaagttccattcttacccacaaactgaataaaggagcccagtaggggattaacacccaagttaataagttgcaaactttttcaggaagaaagcacaaargtgattataacaaagctaacaacttatattctttggttcttccatttgattaatagatatgtagtaaatggaccgcagcaataaaacagaaagtgctacctcctttctggagttgctgtaaatattcctcagatgtcaaaaaaagtagaaaaattcttgttacaattaattttggtaatggaatgtatataaagatacatacctcaacttggctttttggtcagcaccaagatgcactatttcttgcggtaaatatcgatctaagataagatcaatatttacctcacagttcaatatgttgtgtgactgtcttcaacacaagtcaatatctgcgtaatgtct

SEQ ID NO: 305375 - DNA, 584 bp, Homo sapiens
gaattaaagtcagtaggttcaaaaatggaggaaggaaacaggacaatggaatatcatyaaaggaggaagtttttattgagcacttagtgtgtgccaggcacttttcaaagtacttaccatatattatctcatttaatcctaacaaccgtatgattttggttctgtggtaatagaatcccctctgttttacagacaatcaagctgaggcttggagaagttcactgactttctcctgtcacagccctctgaaatggaagtcaggatttgatccaggcagaccgggtccagtgcctacattttagcatctttgcactgcctctaaatataaagtttccagtggtagaagagtaggcaaatgtcacatactggaaagagggccaagaggatgaggactgataaaaatatttggtgattgagagatgaaagataacattagaaagagcaagtctcagtagaacagaaaagaaagaagctaagcattcagggaatgtgttatcagggagtggagcaacaaacacagattgccattgaatggaaaagggaagatacaatagtaacgtgagaaagtggcaggaaaaagtata

SEQ ID NO: 305376 - DNA, 597 bp, Homo sapiens
tttattgggcaccatatagccactgtgctgttttgataggaggcatattgagtatactggtttgacccagaatattattgccacagctctctgacagggattcgtattgcactatctctccttgtcatttccaaagcaacttttgccacatgggggtgaagactgcaaggttaggatgctttttttcctgaaaacttgactgcacgcttttcagtctatggcctcactgcgaagcagcgkggattagtatcttgacataacccattcagcattcgcttctagttcttccagtgaaattcgtagccattcttcatttgttatttaattttccatggttttaaattaagttattgaagaaagacactactcaaacacagttttatgtattagaagcttcatttctgtttttaaaatgtttgaatacatttgcttaaatgtcaaaaacagaaatagagaattgcatagtattctgatcaacatatcaactgatgaaatcagtctctttgttattttgagggaatgctgtatgtaaggtattgtatctttgagccaaaggattatttttattcttaatcttgatagtacgatgttatgagc

SEQ ID NO: 305377 - DNA, 604 bp, Homo sapiens
aacttgtagttaaaaatggtgcttgaatgccttgttaccctcgtaagactccactaaaatgatagcaaaaagattaaagcaagaaagaggcatactattaataggaccaaaagaatagaaaagaagataacaggaaacaaaatattgcaatatggaaagcagatggatgagtggaaactgacttggcacacccagaaaggctgaatcccaagcttacagtagaggaagccaagaaacagccggatttttaccactgtacctccaaaattctcaggaarggatagtaccaggaacacctggaagatgaatgaagggctaaaagcaggaacaactagctttaaaagtttgcttgaatttacgtgagaagttagaactcaagccccttccctacttcatgtaatggacatgctgccttttctctacctagggaaaaataatgaaaattaattatctagagaaggtaacataaacagtctctggaatgagagatactaggtttaactaaagtttgggctattatatttaaaaagggatcatgtgaaagttcacatgttgactattaagaaccccataattatttccccactaagattccaaaattctg

SEQ ID NO: 305378 - DNA, 540 bp, Homo sapiens
gaaggcaattaaatgccactttgcaccatttttaatactgccatgcacaaaatgaaaaggttagctagagaaattgttttacttgacctcattaatacctattcttcgtttaaagtgctctgaggtattggtcacatgaagtatgacttgaattaccatgatttttacctatcacttacagaacatttcaacaacataacttgcctttcagctctacttgagcaataatgctaaagcattggaaggtatacattgaaccaaataccgttgtgggagtagattctcatgctatcaataaaatggataaaggattcagaatttcatgtcagaattcaaagctatgtgattatgtgcatttgattctggtaagtgtaaatgacaaagtccagacatttattttacaactgcaaaataaaactagtggaytttgaaagattttgtgatcctctaactggtgaattaccctatcaaatatttttcttatttataaagtgtggcaaaatagcctctgtctaacatttcccagaactaaaaacagct

SEQ ID NO: 305379 - DNA, 373 bp, Homo sapiens
tagggggtatatgtgcaggtttgttactgtggtatattgcatgatgctgaggtttggggtatgaatgatcccatcacccaggtactgagaatagtacccccaaagttagtttttcaaactttgccccctccctccttcctttctctaggagtccccagtttctattgttgccatctttatttccatatgtacccaatgcttaactcccacttgtaagtgagaacatgtggtacttggttttctgtttctgtgttaattcacttaggataatggcctccagttgcatccatgttgctgcaaaygacatgatttcattctttttatatactgcatagtattccatgctgtatatgtattacattttctttatcca

SEQ ID NO: 305380 - DNA, 599 bp, Homo sapiens
cttatagtttcaggtcttacatttaaatatttaatccacctcgaaattaatttttgtatacggtgaaaagtaggggtccagtttyattctgctgcatatggttagccagctatcaaagcaccacttattgaacaagcagtcctttccccattcctattgactttgttgaagatcgaatgattgtaggtttgtggctttatttctgcattctgacactggtctatgtgtctatttttgtaccagtaccatgctgttttggttactgtagacttataggatagtttgaagtcaagtaaggtgatgcctccagctttgttgtttttgcttaggatcactttgtctattcaagctcttttttgatttcacatgaattttagaatattttgttctagttctgtgaaaaatgacgttggtagtttaataggaatatccttgaaactgactgctctgggcagtgtggccactttaatgatattgattcttccagtccatgagcatgaaatgttcaaacaaacatttatttctcccagttctggaggctgagaagtccaggatcaaggtgctggcagatttgatgtctagtgagggcctacttcctc

SEQ ID NO: 305381 - DNA, 554 bp, Homo sapiens
atttcgcacaaatggaataatatagaacattattttttgtgaaaggcttatttcactgataaacatatgttaaagatttatccatgctgcatgtatcaatagtttcttatcattgctgaattgtattcctttgtatttgcacaccaaagtttgttcattaagtttcctattaatggctttgctctttccaggttttgctattataaataaagcttttataagttttgtatcaacagactctagggtggttcccctgtggatctcaactcctggtattcatgttctagtattaccaactcactttgaatgtagggaattcctgtgacttgattctaaccaacagaatatagaaaaggtgatggaatatgactytcataattttgttatatagatccctatcttgctagtagactctttctagagactctctccctagctagcttggaataagtaagcagccatgttgagaaaaccacatggcaaggagataaaagcaacctctggccaacactaagccagaagctgggaccctgagctccaccactacaagtgta

SEQ ID NO: 305382 - DNA, 390 bp, Homo sapiens
gggctcaggggatgctgcaatatggggaagcaatgtgtgggttggtgcacagtcataggtgccaccttgctggagctctccatcagtcaggtakggtccactggctcagaagctatggtatgggtatggtatggtcccccaggggacccaagactgtcctgtaagtaggtgtggccaggctggggtcccgggagaggccaacagaccaagaagtgcttaggttggaccagccctgtctgatgtgcaagacctccctgtgaagatcaggttcaacaattcccctagggctaaaaagtctcttaagagagcaagtcgagcacagggggatggctgtctctcaccacgctctgctacagatgattctgcaccaaaccctctgggctccacatc

SEQ ID NO: 305383 - DNA, 390 bp, Homo sapiens
gggctcaggggatgctgcaatatggggaagcaatgtgtgggttggtgcacagtcataggtgccaccttgctggagctctccatcagtcaggtatggtccactggctcagaagctatggtatgggtatggtatggtcccccaggggacccaagactgtcctgtaagtaggtgtggcsaggctggggtcccgggagaggccaacagaccaagaagtgcttaggttggaccagccctgtctgatgtgcaagacctccctgtgaagatcaggttcaacaattcccctagggctaaaaagtctcttaagagagcaagtcgagcacagggggatggctgtctctcaccacgctctgctacagatgattctgcaccaaaccctctgggctccacatc

SEQ ID NO: 305384 - DNA, 390 bp, Homo sapiens
gggctcaggggatgctgcaatatggggaagcaatgtgtgggttggtgcacagtcataggtgccaccttgctggagctctccatcagtcaggtatggtccactggctcagaagctatggtatgggtatggtatggtcccccaggggacccaagactgtcctgtaagtaggtgtggccaggctggggtcccgggagaggccaacagaccaagaagtgcttaggttggaccagmcctgtctgatgtgcaagacctccctgtgaagatcaggttcaacaattcccctagggctaaaaagtctcttaagagagcaagtcgagcacagggggatggctgtctctcaccacgctctgctacagatgattctgcaccaaaccctctgggctccacatc

SEQ ID NO: 305385 - DNA, 633 bp, Homo sapiens
ggaacatcacacatcggggcctgtygggggtgggggtctggggaagggatagcattaggagaaatacccaatgcaaatgacgagttaatgggtgcagcaaaccaacatggcacatgtatacctatgtaacaaacctgcacgttgtgcacatgtaccccagaacttaaagtataataataataataataaagaaagttaccaaactaaagcataaacaatccttcagatgatcttttagtaagagaaataaataggtgtaatggtctgacctgtagtttgtttttgagtttgtaagtatctgaagcttgaggttattttggaatcaatagaagagctaatttattaaaataatttgatttatattaatcagcaagcacagtgtcacatacttaggtttcaaagtgttctcctgctcctagaccaagtaggcacttgaaaagaaatggaaaagagacacgttaacttctctgggaagaaggcaattatttcatcttttaagtttatattcagaacacatccacagcaaatataatttaagcccacatcataaatattccgcaagatatgttcaccagttcgcagaacttgaagtcacctctttggacaccagaccattctgtgacatgccatcac

SEQ ID NO: 305386 - DNA, 633 bp, Homo sapiens
ggaacatcacacatcggggcctgtcgggggtgggggtctggggaagggatagcattaggagaaatacccaatgcaaatgacgagttaatgggtgcagcaaaccaacatggcacatgtatacctatgtaacaaacctgcacgttgtgcacatgtaccccagaacttaaagtataataataataataataaagaaagttaccaaactaaagcataaacaatccttcagatgatcttttagtaagagaaataaataggtgtaatggtctgacctgtagtttgtttttgagtttgtaagtatctgaagcttgaggttattttggaatcaatagaagagctaatttattaaaataatttgatttatattaatcagcaagcacagtgtcacatacttaggtttcaaagtgttctcctgctcctagaccaagtaggcacttgaaaagaaatggaaaagagacacgttaacttctctgggaagaaggcaattatttcatcttttaagtttatattcagaacacatccacagcaaatataatttaagcccacatcataaatattccrcaagatatgttcaccagttcgcagaacttgaagtcacctctttggacaccagaccattctgtgacatgccatcac

SEQ ID NO: 305387 - DNA, 547 bp, Homo sapiens
gagagccttattcagtaggtctagtgtagagccagaagcttgaattttaaataaggaccccaggttgttctggccacagtttttgagaaatttactgaattaaggaatgtgttggccagctttttcattaacataaaatggatttagcaaggaagacacatgctttcttcctctctatggactcttgaatatggtttttytcattgcttgtaatgaagcctgtctgcctagttgctttaaagcgaaactttaaagatatcattatgttagttaaatgatttatgaaagcagtgaaagcaaagatggagaagggtaggtctccttattcaacttataggcagataatctatattgttcttggttgagtatagccgttataatggaatgatcaaagcattgtctttttttggaaagatcaaaccattttcttttctgtgacaaaacttatatctctcaattcagtctttgagatgtatctcatccaactctcctacatgaacagaattttccaattagattcaacaccaggtctcagcatggggtttta

SEQ ID NO: 305388 - DNA, 446 bp, Homo sapiens
ggttgttctggccacagtttttgagaaatttactgaattaaggaatgtgttggccagctttttcattaacataaaatggatttagcaaggaagacacatgctttcttcctctctatggactcttgaatatggtttttctcattgcttgtaatgaarcctgtctgcctagttgctttaaagcgaaactttaaagatatcattatgttagttaaatgatttatgaaagcagtgaaagcaaagatggagaagggtaggtctccttattcaacttataggcagataatctatattgttcttggttgagtatagccgttataatggaatgatcaaagcattgtctttttttggaaagatcaaaccattttcttttctgtgacaaaacttatatctctcaattcagtctttgagatgtatctcatccaactctcctacatgaacagaatttt

SEQ ID NO: 305389 - DNA, 640 bp, Homo sapiens
ttattattatcatcattttatacaagaaaaagataagactgagtagctgaagaacttgcctaatgtcataaaactagtaaagggagaagtctgaatttgaaagcagcattgactccaaggcccacatgctgaactgctacctagtactgcttctctgcccctttttatcatcaccaataatctcttttttaagtaagacaaaacatatccagatttgtatccacctctctgctccacggtgggcctataattattttgtacagagtggaacagtcaagctttkgttggatatctgaggcaaaatggaaaaatagattaggataaaggcatagaagtgatgtcctaatcaggttcatggtctgtttggaataaggagtttgaaataagtccagacagaggattaattccagaagagaagatctagagtgaacaggggcaacggggtggtcaggtatttttcatatcacacagatattaaagatcagagtgaacaacaagtttgggacctagagaaaggacttaggcatcaattatgaagtcagaaacccagacgaacaccctgcaccacaaaagatcaggattaaagcaaaggatctgaacgctatatatgaggtaataacagcattaaggatcttgatat

SEQ ID NO: 305390 - DNA, 640 bp, Homo sapiens
ttattattatcatcattttatacaagaaaaagataagactgagtagctgaagaacttgcctaatgtcataaaactagtaaagggagaagtctgaatttgaaagcagcattgactccaaggcccacatgctgaactgctacctagtactgcttctctgcccctttttatcatcaccaataatctcttttttaagtaagacaaaacatatccagatttgtatccacctctctgctccacggtgggcctataattattttgtacagagtggaacagtcaagctttggttggatatctgaggcaaaatggaaaaatagattaggataaaggcatagaagtgatgtcctaatcasgttcatggtctgtttggaataaggagtttgaaataagtccagacagaggattaattccagaagagaagatctagagtgaacaggggcaacggggtggtcaggtatttttcatatcacacagatattaaagatcagagtgaacaacaagtttgggacctagagaaaggacttaggcatcaattatgaagtcagaaacccagacgaacaccctgcaccacaaaagatcaggattaaagcaaaggatctgaacgctatatatgaggtaataacagcattaaggatcttgatat

SEQ ID NO: 305391 - DNA, 620 bp, Homo sapiens
acccagacgaacaccctgcaccacaaaagatcaggattaaagcaaaggatctgaacgctatatatgaggtaataacagcattaaggatcttgatatggaaccaaccttctgtctcatgtttggagcttgcagaggcttcctgttaaaatagccaagcactaagtttggttagtcagggaatgcaaatgaagagatccatcattttttgtcaagactggaaaataagaagtctgaaactttccgtctccttaaaaaaatctgctttcagtgaaagagccgatatcagtctttttagtgtgaataaggtaagctatgtgttgtctctcctgggagattttacattttcagccttrtcttccaatgtagaacgaaaatcttaatcctggtttataggggtttccagctcaagcctcaatatggaagtagatttacagaaaggagcagaagttcttccccatactcttgataccaaactactttgcttatgctttggaattgccctgccaatcttgatcatttagtcagtgagaatgcatgaaagacttacatattttggtgacttatttcatttctatttgtaagtctttgtgcttctatctataataatcagtgtagctatt

SEQ ID NO: 305392 - DNA, 604 bp, Homo sapiens
tttagtgtgaataaggtaagctatgtgttgtctctcctgggagattttacattttcagccttatcttccaatgtagaacgaaaatcttaatcctggtttataggggtttccagctcaagcctcaatatggaagtagatttacagaaaggagcagaagttcttccccatactcttgataccaaactactttgcttatgctttggaattgccctgccaatcttgatcatttagtcagtgagaatgcatgaaagacttacatattttggtgacttatttcatttctatttgtaagtctttgtgcttctatctataataatcagtgtagctattttaaaaattagaagacagtaaaacraagttgacctttttagttaatgcagcttaatagagcccagcagtttcattggtaagtttcctgtcttagctggtgttcataattaaggtgattcagaattgttagataactgcaattttcttatctgttgtaattcttagaagtcagtggaagagaaacaaggagaaattgaagtttatacttgggtggtgaaattgcaagagcactactctcagttggtaattcatcccctgaacctgaaagaggctg

SEQ ID NO: 305393 - DNA, 604 bp, Homo sapiens
tttagtgtgaataaggtaagctatgtgttgtctctcctgggagattttacattttcagccttatcttccaatgtagaacgaaaatcttaatcctggtttataggggtttccagctcaagcctcaatatggaagtagatttacagaaaggagcagaagttcttccccatactcttgataccaaactactttgcttatgctttggaattgccctgccaatcttgatcatttagtcagtgagaatgcatgaaagacttacatattttggtgacttatttcatttctatttgtaagtctttgtgcttctatctataataatcagtgtagctattttaaaaattagaagacagtaaaacaaagttgacctttttagttaatgcagcttaatagagcccagcagtttcattggtaagtttcctgtcttagctggtgttcataattaaggtgattcagaattgttagataactgcaattttcttatctgttgtaattcttagaagtcagtggaagagaaacaaggagaaattgaagtttatacttgkgtggtgaaattgcaagagcactactctcagttggtaattcatcccctgaacctgaaagaggctg

SEQ ID NO: 305394 - DNA, 560 bp, Homo sapiens
atacaactctaccaactttctccttgtacctatacagtttgaatgtggtcagaggaaaacacaagactgtggtaacaggtttcacttaaattcatgaccactaacctcaagtgggtccctactgcttcccaataattcgactacatttccctatcaaattagtttatgtttctcccagatgattatttcatttttccacttttctcaaaattccatctcctccttttcttcactctcagctgatcacctacatcctaataaattagcaaaattgaagtaatcagaagataattttcaccggctcccactatccttatgtaagaaattaccgtgatgcagtgctgtctaccaagcacaacaccaggcaaactctccaagagatcacagaacagaaaagcttacaggaaaattacaattttttacatcamatgatctagtaaatcaatttaaaacacacaaaagaagcaacagggaaagaaatctgacatgtcaacacactttgggtaggatgcaagtgggtggacagaacacactacccaaatcctgggttacacaatgtt

SEQ ID NO: 305395 - DNA, 370 bp, Homo sapiens
cactgtatataggtacctgtgctttctggggtttttggaatgtattcaccaccatggataaaggtaaactactaaattatgttgaatttaactgtgtgaaacattcacagaaccttgtcttccccaaatagacacttttttcacttgcccattgaacatttttaaaaatcatgtattcatccaaaaatcaaaacttaacacattcaaaaggttctacattcaagctacattttctgtcataatccaacaaactagaaagaaattataaaaagttgaccaaaaaaaaarccccaaaaaaccaaaaaacatcttcactacatggaaactagaaaatacaaccttaaatgacacttacatcatagaggcaatc

SEQ ID NO: 305396 - DNA, 593 bp, Homo sapiens
gagcatttaaaccaaccttagccagaagggaatcgccaatctcagtggttggaatttgagatcccatcacaggctaatgtgctttggagtctcaaataaacttgaaaggcagtctaggccacaaggacagcaactcctaggcgaatcctagtgatgaactgggcccagagacagtggactgggagggtctatgaccttctgagacattagcaagggcagccaagagactgctggcatcccccctcccctaacgccagggtgcatagctcatggctccaaaagggaccacttttttttgcttgaagagagcagagggaagagtggggaggattttgtcttgcatcttggataccagctcagccacagtaggatcgggcactggtcagagtcacgaggctttcttcccagttcctagcttataggtgacatttctgcacacaccctgggacagaaggtaatgtgctgccttgaagggaaagatctagtcttggcaggcttcatcacctgttaactgaagagcccttggsgcctgaataaccagcagcaatacccaggtgctacattgagggcctcaaatgagactctgagacatg

SEQ ID NO: 305397 - DNA, 593 bp, Homo sapiens
gagcatttaaaccaaccttagccagaagggaatcgccaatctcagtggttggaatttgagatcccatcacaggctaatgtgctttggagtctcaaataaacttgaaaggcagtctaggccacaaggacagcaactcctaggcgaatcctagtgatgaactgggcccagagacagtggactgggagggtctatgaccttctgagacattagcaagggcagccaagagactgctggcatcccccctcccctaacgccagggtgcatagctcatggctccaaaagggaccacttttttttgcttgaagagagcagagggaagagtggggaggattttgtcttgcatcttggataccagctcagccacagtaggatcgggcactggtcagagtcacgaggctttcttcccagttcctagcttataggtgacatttctgcacacaccctgggacagaaggtaatgtgctgccttgaagggaaagatctagtcttggcaggcttcatcacctgttaactgaagagcccttggcscctgaataaccagcagcaatacccaggtgctacattgagggcctcaaatgagactctgagacatg

SEQ ID NO: 305398 - DNA, 613 bp, Homo sapiens
ggtaaaggggtcaattcatcaagaggttataacaattaaaattatatatgcacccaacatgagagcactcggatataaaagacaaatatggatagaccttaagagagagataggccctaatataataatagcmggagacttcaacaccacactttcagcactggacagaacttccagacagaaaatcaataaagaaacatttgacttaatctccactatagacgaaatgaatctagtagatatttacagaacatttatccaactgttgcaaaatacactttcttttcctcagcacatggatcattctcaaggatagaccatatgttaggtcacaaaacaagtctgaaaacataaaaaaaaatgaaataatatcaaggatcttctctgcccacaatgaaataaaactacaaaccaataataagaggaatttttgaagctatataaatacatgaaaattaaacaatatgctcctgaatgaccagtgggtcaatgaagaaattaaggtggaaagtgaagaattttttaaaacaaatgataaaggaaacacaacatgccaaaacctatgggatacagcaaaagcagttctaaaaatggaagtttacagctatagatg

SEQ ID NO: 305399 - DNA, 613 bp, Homo sapiens
ggtaaaggggtcaattcatcaagaggttataacaattaaaattatatatgcacccaacatgagagcactcggatataaaagacaaatatggatagaccttaagagagagataggccctaatataataatagccggagacttcaacaccacactttcagcaytggacagaacttccagacagaaaatcaataaagaaacatttgacttaatctccactatagacgaaatgaatctagtagatatttacagaacatttatccaactgttgcaaaatacactttcttttcctcagcacatggatcattctcaaggatagaccatatgttaggtcacaaaacaagtctgaaaacataaaaaaaaatgaaataatatcaaggatcttctctgcccacaatgaaataaaactacaaaccaataataagaggaatttttgaagctatataaatacatgaaaattaaacaatatgctcctgaatgaccagtgggtcaatgaagaaattaaggtggaaagtgaagaattttttaaaacaaatgataaaggaaacacaacatgccaaaacctatgggatacagcaaaagcagttctaaaaatggaagtttacagctatagatg

SEQ ID NO: 305400 - DNA, 618 bp, Homo sapiens
tacacacgtctatgtacccaaaaaaaataaaattaaaaatttttttaaatgctaaagagttattcaataaagttcagcagccatctctagtaaagtatctaaataagatggcaaggaataaaactacttaaatataataaatactataaaaaccccaaacaaatattatctcaaacaatcataccctaaaaccaatataattaaaatcaataactaaggcatcaagtgtttcttgtttattttgactattgtcttggatactctagcaactgcaataaggtgagacaactaataattggcataaacattaaaaagaagaaaaaaatgagtataggatcgtttactggaaaamctaaatgtactctacagaaagaagtagaatttaatgagttgccagaataatacataaatatgcaaatattaagtgctgttctttatccttaaaataagaacctagaaaaaacagtgggaaaaatttttttcattcacaataacgaaaaataaaaattgaaataaaaagtgaaagaacttatatgaagaaaatgataagcatttacagaagaatttgaaacaagtcctgagtaaatattatagaactatcagtaaaacaaaagataa

SEQ ID NO: 305401 - DNA, 585 bp, Homo sapiens
ggaacatcccatactgtggcctgtcaggaggtgggggcaaggggagggatagcattaggagaaatacctaatatagatgacgggttgatgggtgcagcaaaccaccatgtcacatgtattcctatgtaacctgcatgttctgcatatgtattccagaacttaaggtataatttwaaaaaagtaaaaaataaaaaaaatagatatggacaccttatctactatgttcacttattactattagatacacttattttacatatatgtgtatatatggatgtacatatatataccttcatatacatatatcatcgttgatcgtggcaaaaaaaaatgtaaaaagtgcatgtgtttcaaaaaggacattgttaaataaattctcctacattttcaaaatagtatcttctgaagccattaaaaaagaatggatcacttctatgcaagctttctttgaagaattttcatgaaatatatttgaataagaaaacaaaattcagaaaatacctgggagtggggtccacagatctccattttataattattcaatgaagtttgagaattatccagaagttttatagccgaaaaaca

SEQ ID NO: 305402 - DNA, 671 bp, Homo sapiens
ctattacagtgtgtgccacatagaagatactgaataaatgattgatgaattaatgaatgaatgaacaagtaaktaaattgctaatcagccctaagagggttctatgtgtccaaatgggaattggatggggatttttttaaagcacttactggcagaatagtccgaaagatggttagaatagcaccagatccaattttctctctgagtggatcaatcctttgcctcttctaggctctcagagagcacaattacatcctaatacaaattgcaaggagccaaaaggaaactttcatgctagtgcccactgaccatagtctacacaggtgctgggacgtttcaatatgatgttgttctacagatcttcttgtcagatatcaccaatttattcaaagaagcacaaattcagagaaaagcagttaaatcaatgcttgtctgagtgaagcaaaatcaaatggtaatgtaatgcactggattgggtgatctaggaccgtattatccagaggctaaaatcaaacaacctaactaattaagatgtctcttctctctcttctggccacccaatggctaatcaatttggcagatattcagtggctctgactctttagtttatattatatagacatagccatagactaaactggcccagacatatttgaaatgttcactcaaca

SEQ ID NO: 305403 - DNA, 580 bp, Homo sapiens
atggaaaaattctgatttactgttcaattctttgcataattggaaatgatgcagaattagttacttttagcaagagattatctctcttaaccttgttgaattgtatccactctctgcaactaagtaatgcagaaaaatgagaataaaaaaaggtgacttgtcaaaatataaccaagagtgtctttcctgtaggacaaagaaatactaacaattaaaatagaaagaaacaagagtcggaagagtkataaatacctaataggatttgtcagttataataaaacccagtatgtttatagctccttttgtttaaaacccagatatttcttgatcctcaaatatattttacaaagacattaaaagggagtataaagagatacttttcaagtctgctttggattccttcaaaatagactctctaagaccctgataacaaccacattatcataattggctcatacatgtccatgttgtgaggacatgaaaagcagccatacatgggcaaatacttcatgacaaaaacaccaaaagcaattgcaacaaaagccaaaattgacaaatggggtctaattaaactaaagag

SEQ ID NO: 305404 - DNA, 611 bp, Homo sapiens
gcaatgtttgaatttctgtgcctggcttatttcacttaacataatgatctccagttccattcatgttgttgcaaatgacaggatctccttygtttttatggctgaatagtaccccattgtgtataagttccacattttctttacctattaatctgttgatggatacttaggttggtcctaaatcttggatattgtgaacagtgctgcaacaaacataggagtacagatatctcttccatatatttatttttcttctttggggtatatatccagcagtgaaatagctggatcatatggtggctctacctttagttttgtgaagcacctccaagctattctccatagtgattgaactaatttacattaccaccaacagtgtacaagggttcccttttctccacatccttgccagcatttgttattgcttgtcttttggatgtaagccattttaactgtggtgagatgatatctcattgtagttttgattttcatttctctgatgatctatgatgttgagaaccatttcacatgcctatttgccatttgtatgttttcttttgagaaatgtctattcaaatcttttgtccattttttatcagattattatattt

SEQ ID NO: 305405 - DNA, 468 bp, Homo sapiens
ttattatacatatttttgacattttaagtatatttcgtatacttttttctgtatttttcatttttccccctctgtgtgtttcagtctggatatgtcctttgcatctaactcctagttcaacaattttctctttagttgtgtataatctgtcattygactcatctactagttgttacttttcttacttataatcattaaactttttatttctagaatttacattttcttataatattgtctattttgatattttcctttgtcttataattacttgaattatattaataatagtcactttaaagttcatatttgacttttctgtgcttatttcaagtgccattttccccccttggtttttggtgaagtcttttaaaatatcttgttatttctgcttgatttatgtgaacatcattggtgaaaatttgtagagccaatttgaacctccggatgaagttattttcctccaga

SEQ ID NO: 305406 - DNA, 468 bp, Homo sapiens
ttattatacatatttttgacattttaagtatatttcgtatacttttttctgtatttttcatttttccccctctgtgtgtttcagtctggatatgtcctttgcatctaactcctagttcaacaattttctctttagttgtgtataatctgtcattcgactcatctactagttgttacttttcttacktataatcattaaactttttatttctagaatttacattttcttataatattgtctattttgatattttcctttgtcttataattacttgaattatattaataatagtcactttaaagttcatatttgacttttctgtgcttatttcaagtgccattttccccccttggtttttggtgaagtcttttaaaatatcttgttatttctgcttgatttatgtgaacatcattggtgaaaatttgtagagccaatttgaacctccggatgaagttattttcctccaga

SEQ ID NO: 305407 - DNA, 468 bp, Homo sapiens
ttattatacatatttttgacattttaagtatatttcgtatacttttttctgtatttttcatttttccccctctgtgtgtttcagtctggatatgtcctttgcatctaactcctagttcaacaattttctctttagttgtgtataatctgtcattcgactcatctactagttgttacttttcttacttatmatcattaaactttttatttctagaatttacattttcttataatattgtctattttgatattttcctttgtcttataattacttgaattatattaataatagtcactttaaagttcatatttgacttttctgtgcttatttcaagtgccattttccccccttggtttttggtgaagtcttttaaaatatcttgttatttctgcttgatttatgtgaacatcattggtgaaaatttgtagagccaatttgaacctccggatgaagttattttcctccaga

SEQ ID NO: 305408 - DNA, 468 bp, Homo sapiens
ttattatacatatttttgacattttaagtatatttcgtatacttttttctgtatttttcatttttccccctctgtgtgtttcagtctggatatgtcctttgcatctaactcctagttcaacaattttctctttagttgtgtataatctgtcattcgactcatctactagttgttacttttcttacttataatcattaaactttttatttctagaatttacattttcttataatattgtctattttgatattttcctttgtcttataattacttgaattatattaataatagtcactttaaagttcatatttgamttttctgtgcttatttcaagtgccattttccccccttggtttttggtgaagtcttttaaaatatcttgttatttctgcttgatttatgtgaacatcattggtgaaaatttgtagagccaatttgaacctccggatgaagttattttcctccaga

SEQ ID NO: 305409 - DNA, 547 bp, Homo sapiens
gtgtttatcagggcctcttctccttttgcccccttctgycctgagaatctgccaaaagctctgctaaattccccagtagcaatttgtttacataattgtcaaatgtcttaagaataaaagcaatatccaatgttttgcccattttctaaagacctatggctttgtcttgtgtcccattgtgactttaacactgcaaatgcctttagggtggctaaagtattgttataaactgacattcctggtttttagtatcctcattgtttctaacctctatatattgattttgtcttaattttttataaatttactttcactttgaaagtgtattatttttatgcagtatttctaggtgttttgtattgggagggtttttgttttgctttgttttgtttatttatttgtttattttatatctggtcttccatagtctagattttcttttttcacttagttgcatttatttagatccaacatatatttctattgcttttaatactttctgtatgctttctgaaagtattgccaaactacacacaagtttcctgtg

SEQ ID NO: 305410 - DNA, 636 bp, Homo sapiens
tcctgggctcaactgatcttcttgcctcagccttccaagtagctaggaccacaggtgcatactaccacacccagttaatttttaaattttcttgtagagatggagtctcactgtgttgtccagactgattttaatctcccagcctcaagtgatcctcccactttggcttcccaaaatgctgggattataggcatgagccactgtgcccaggcaataatgatrttttgatatatttgggagaataatggtttctaaatggcaatagggaaccagacaccaattctgaacttgcatggtgtgctagaatatcatttgagaaacttacaggggaagcagtgtccgtgggaaagaaaatggtttttattaaaacaagaagatggagggaactcttaaaagaagaagtcaagcatctgtgaaagtttgcttattacaaagcagggattccaggggacaagtggaaagatttaggataggacaatagcagtgtcaaggaagacggaatgtcatgtggaatatggtctagtaaaagcagctggttggaggaggcctgacatttgacattaactaatgtaacgaggagagaggcaatctctctgaggaaggtgggcgctagacttaaaggccaacatacttata

SEQ ID NO: 305411 - DNA, 574 bp, Homo sapiens
ttgaagtatagagtgcatgcggtgaagggacataaaacataaaaagccagaytgagaccaaataattagaaaaaggtattgggtagattattaaggaattcgcattgattaaatggcaataaggggattctttggggtttgttggagcagcaggtggcagaaatatctactatatggatttttaaaatattagtctgacagaaatgagagtatataaggagtcagacatccagaggttgaaggcagagataatatagttggaaggtctttgcagttgttcaggcaaatgataaagatctgaggtaaacagtggaagtggaagtggaagggaaaatacagatgtacaaagcaatgaagggagaaaatcagacttctggaatggtagagcaagaacattctaagtagtctctccataaaagtaaaactgggaaaaccagtcaaaaagaatttcagaactctgtaaattaacggaaggcatttaacaaataaaaaattgcttatccaagaaaactaccaaacctcagtaagaatagtgtaatctgtggcatagtaacttctaactactcacatcacc

SEQ ID NO: 305412 - DNA, 574 bp, Homo sapiens
ttgaagtatagagtgcatgcggtgaagggacataaaacataaaaagccagactgagaccaaataattagaaaaaggtattgggtagattattaaggaattcgcattgattaaatggcaataaggggattctttggggtttgttggagcagcaggtggcagaaatatctactatatggatttttaaaatattagtctgacagaaatgagagtatataaggagtcagacatccagaggttgaaggcagagataatatagttggaaggtctttgcagttgttcaggcaaatgataaagatctgaggtaaacagtgsaagtggaagtggaagggaaaatacagatgtacaaagcaatgaagggagaaaatcagacttctggaatggtagagcaagaacattctaagtagtctctccataaaagtaaaactgggaaaaccagtcaaaaagaatttcagaactctgtaaattaacggaaggcatttaacaaataaaaaattgcttatccaagaaaactaccaaacctcagtaagaatagtgtaatctgtggcatagtaacttctaactactcacatcacc

SEQ ID NO: 305413 - DNA, 574 bp, Homo sapiens
ttgaagtatagagtgcatgcggtgaagggacataaaacataaaaagccagactgagaccaaataattagaaaaaggtattgggtagattattaaggaattcgcattgattaaatggcaataaggggattctttggggtttgttggagcagcaggtggcagaaatatctactatatggatttttaaaatattagtctgacagaaatgagagtatataaggagtcagacatccagaggttgaaggcagagataatatagttggaaggtctttgcagttgttcaggcaaatgataaagatctgaggtaaacagtggaagtggaagtggaagggaaaatacagatgtacaaagcaatgaagggagaaaatcagacttctggaatggtagagcaagaacattctaagtagtctctccataaaagtaaaactgggaaaaccagtcaaaaagaatttcagaactctgtaaattaacggaaggcatttaacaaataaaaaattgcttatccaagaaaactaccaaacctcagtaagaatagtgtaatctgtggcatwgtaacttctaactactcacatcacc

SEQ ID NO: 305414 - DNA, 618 bp, Homo sapiens
tgctgcaggagaaaaagaacatatattcaagggaactacagcaagattaaagtttatttcacatcagaaacaatgataccaaaggtagtgagattacatatttaaagtaaaatcaaagaaaataaataataactattagtgtgtagatacataaaataaagagaaaaacaaagaaaatccaggtaaataagttagttttttgtagagattaataaaattgttaaactgtaagatatattgaccacggggaaaaaagatgacacagataattaaaatctggatttaaagagggcatataatcactgccctgcaaaaattaataagactgtaaggaaatgcaagaaacaaagtaggcaacttagatgcaatacataaatttctagaaatacccaaattattgaagtaagctagctatgtttcaaggaaaagtagaaaatgtgaatamatctataataagaaaaaaattgaattagtaattaaaattttctcacatagaaacaactcaggcacaggcagcttcactggagaattctatgaaatatttacaggataaataatgtcaatattccatgaactctttgaggaaacagtgaaagaagttacacttgccaacttatt

SEQ ID NO: 305415 - DNA, 519 bp, Homo sapiens
tttcaaggaaaagtagaaaatgtgaataaatctataataagaaaaaaattgaattagtaattaaaattttctcacatagaaacaactcaggcacaggcagcttcactggagaattctatgaaatatttacaggataaataatgtcaatattccatgaactctttgaggaaacagwgaaagaagttacacttgccaacttattctatgaggccagtattttcctgatcccaaagccagactgaagacatcataagaaaagaaaaccatagaccaatactccctctagtttctagatatgaaaaccttcaatacaatattagcaaatcaaatccagcaatatataaaaaagatcagtggccaggcatggtgctcatgcctacaatctcggcactatgggaagctgaggtaggcagattgcttgagctcaggagtttaacacaagcctgggcaacatggtgaaactccgtctctaaaaaaaaaaacacaaacattattagcagggcatggtggtgcacacct

SEQ ID NO: 305416 - DNA, 599 bp, Homo sapiens
tttcaaggaaaagtagaaaatgtgaataaatctataataagaaaaaaattgaattagtaattaaaattttctcacatagaaacaactcaggcacaggcagcttcactggagaattctatgaaatatttacaggataaataatgtcaatattccatgaactctttgaggaaacagtgaaagaagttacacttgccaacttattctatgaggccagtattttcctgatcccaaagccagactgaagacatcataagaaaagaaaaccatagaccaatactccctctagtttctagatatgaaaaccttyaatacaatattagcaaatcaaatccagcaatatataaaaaagatcagtggccaggcatggtgctcatgcctacaatctcggcactatgggaagctgaggtaggcagattgcttgagctcaggagtttaacacaagcctgggcaacatggtgaaactccgtctctaaaaaaaaaaacacaaacattattagcagggcatggtggtgcacacctgtagttacagctacttgggggctaagcagggagatcacttgagcctgggaggtcaaggcttcagtgagctgtgttcgtgt

SEQ ID NO: 305417 - DNA, 599 bp, Homo sapiens
tttcaaggaaaagtagaaaatgtgaataaatctataataagaaaaaaattgaattagtaattaaaattttctcacatagaaacaactcaggcacaggcagcttcactggagaattctatgaaatatttacaggataaataatgtcaatattccatgaactctttgaggaaacagtgaaagaagttacacttgccaacttattctatgaggccagtattttcctgatcccaaagccagactgaagacatcataagaaaagaaaaccatagaccaatactccctctagtttctagatatgaaaaccttcaatacaatattagcaaatcaaatccagcaatatataaaaaagatcagtggccaggcatggtgctcatgcctacaatctcggcactatgggaagctgaggtaggcagattgcttgagctcaggagtttaacacaagcctgggcaacatggtgaaactccrtctctaaaaaaaaaaacacaaacattattagcagggcatggtggtgcacacctgtagttacagctacttgggggctaagcagggagatcacttgagcctgggaggtcaaggcttcagtgagctgtgttcgtgt

SEQ ID NO: 305418 - DNA, 599 bp, Homo sapiens
tttcaaggaaaagtagaaaatgtgaataaatctataataagaaaaaaattgaattagtaattaaaattttctcacatagaaacaactcaggcacaggcagcttcactggagaattctatgaaatatttacaggataaataatgtcaatattccatgaactctttgaggaaacagtgaaagaagttacacttgccaacttattctatgaggccagtattttcctgatcccaaagccagactgaagacatcataagaaaagaaaaccatagaccaatactccctctagtttctagatatgaaaaccttcaatacaatattagcaaatcaaatccagcaatatataaaaaagatcagtggccaggcatggtgctcatgcctacaatctcggcactatgggaagctgaggtaggcagattgcttgagctcaggagtttaacacaagcctgggcaacatggtgaaactccgtctctaaaaaaaaaaacacaaacattattagcagggcatggtggtgcacacctgtagttacagctacttgggggctaagcrgggagatcacttgagcctgggaggtcaaggcttcagtgagctgtgttcgtgt

SEQ ID NO: 305419 - DNA, 522 bp, Homo sapiens
gtaattccttcttctttctctctcagatttcaccacagcacacaacacatcgggacgttcagctccaccctccacaaatgtccggagtgcagaccaagagaatggagaaataacccttgtaaagcgtcgtatatttggccacaggattatcactgtcaactttgcgatcaatgatctatatttcttttctgaaatggagaagtaagttttccacttctccttcttctgccctgaaaatgacttttcatccttaggactgccmagcagaaactggcttgatctgttagagatacagtgatttcagacctgtccagtaagagtctctccttctgaaaatcttactgaatgctgccactcaattgatttccacctttcttttctttgggtgctaaaagctcttcagtattccagaaattccactgttaaaatgcagttacttagtcccagaaaagggagcatgtttttctccattatttacaaatttgaaaaagtcctattatataacaccatgagaccaatatt

SEQ ID NO: 305420 - DNA, 480 bp, Homo sapiens
ggcatgtgcctgtggtcccagctacttgggaggctgagatgagaggatagcttgagcctgggaggcagaggttgcagtgcgcagagatcaggccactgcactccagccggggcaacagagccagactctgtctcaaaaacaaacaaacaaaagagcctgccaagaccagctcggtcggggagaccctaaccccatggcgctagaggaattaaagacacacacacasaaatatagaggtgtggagtgggaaatcaggggtctcacagcctgcagagctgagagccctgaacagagatttacccatgtatttatgaacacaagccagtgataagcattgtttctatagattatggattaactaaaagtattccttatgggaaataaagggatgggctgaaataaaggaatgggctctggctagttatctgcagcaggagcatgtccttaaggcacagatcgctcatgatattgtttgtgatt

SEQ ID NO: 305421 - DNA, 521 bp, Homo sapiens
gaaaaccacaactatcgtaaaaatacagaaaatgtgaatgtgcttagccaaatacacmtaactaacatatacagaatactgcactcaacattacatgtcttatagacatttaaatataatgagagtatcacaaacaacttcatgtcaacatatttgaaatgtcaaatgaaattgccaaattcctaaaatatacaacatactaaaatggcataaaaagaaatagaaaatctaagcagtcctatatattttgaagagattaaatctgtgattaaattgagattgagactgaggcaagggtgtctcaatgtaatgccacatctatctaggtaatggaagacctagtaagagcaataaggtaataaaggaaaatcaaatatataaatatcttaaaaaatgaaactctttattcacagaggacataattgtgtgtatcaaaggaatttgcagatgaacttgtagaattagctaattcagtaaagttttgaaatactggtttattacataaaaatcgattatatttc

SEQ ID NO: 305422 - DNA, 534 bp, Homo sapiens
cccaataaaggccaagacaacaaagttttttaaaaatgggcaagagatacggacagacacttcactaaaaaaygcactgtatgtatggcaaattatatggtttggctgtgtcttcacccaaatctcatcttgaattcccatgtgttgtgggaggaacctggtgggagataattgaatcatgggggcaggtctttcccgtgctgttctcatgatagtgaataagtctcacgagatctgatggttttaaaaaggggagtttccctacacaagctcctctctgcctgccgccatccacgtaagatgtggcttgctcctcctagccttctgccatgattgtgaggcctccccagccacatggaactgtgagtccgttaaaacctccttttcttccctgtcttgggtatgtctttattagcagtgtgaaaatggactaatatgtcaagcaagcacatgaacacatactcaacatcattagtcatcagacaaaataaaaattaaactaaaacaagatactattacataccctctagaatg

SEQ ID NO: 305423 - DNA, 487 bp, Homo sapiens
gggcaagcagccacagcttcccttcatccctgagggtaaactgctgccaaaccacccccacctgatggcctgacatccccaagccaagttgcaggcagctgtcacactcttccccttgrggccaaccacaagtggaactgctctgcccacttctacctaaccccttcaggctgaacattaagctctacactccctcctggggaaatggcactttggtagaattgcttcatctaccacactcagctgcagctgcacctgcaccctgcccctaggggcctgaactgaaatggcacactgcctcctgaggaaacagtgccttgttggagctgccccatatttctctcctagtcactgctgagccccgaacctgtgaactgaagccaaagcttcacacgccttcctgggaaattgatgcattggtggaactgctccatctatccctccagttgctgctgtaccctggcccctgggaaaacagaaccttggc

SEQ ID NO: 305424 - DNA, 487 bp, Homo sapiens
gggcaagcagccacagcttcccttcatccctgagggtaaactgctgccaaaccacccccacctgatggcctgacatccccaagccaagttgcaggcagctgtcacactcttccccttgaggccaaccacaagtggaactgctctgcccacttctrcctaaccccttcaggctgaacattaagctctacactccctcctggggaaatggcactttggtagaattgcttcatctaccacactcagctgcagctgcacctgcaccctgcccctaggggcctgaactgaaatggcacactgcctcctgaggaaacagtgccttgttggagctgccccatatttctctcctagtcactgctgagccccgaacctgtgaactgaagccaaagcttcacacgccttcctgggaaattgatgcattggtggaactgctccatctatccctccagttgctgctgtaccctggcccctgggaaaacagaaccttggc

SEQ ID NO: 305425 - DNA, 584 bp, Homo sapiens
catctgcctggtgctaattgaaactgaagaggaaggaaagcttttattctataattgtttggagagcagcatgraaaactccttagaatgtgatgaacttgatatttactaggtttataagttttggcaagtgttaagctctctgtgccccgattttcttacctgtaaaatgagggtaataaagccaatttttaaagggctgttattaggttaaatgatatgattcttgtagggttgactctggttttgactttgtcaccaacagtgggaggtgggagtcatcaacctaagcattgtccctggcttagtatatgccataatttcacactaaagctacgtttacttccattatcttatataaccttcatattgtgatcagagaaaaaaagatggtggtggtggttcccatttgtcaaataaggaaattgatactcagagaagttgagtggcttgtctgaaaacagagacctctgactcctagtctgagactccttttgttcttaacaagtcttaggagagggccgtgtggtgtaaaaaaaaaaaaaaaaaaaaaagaggccttcaattgaaaagtcaagaatggg

SEQ ID NO: 305426 - DNA, 560 bp, Homo sapiens
caaagcatggagtgttggtactatgttttaattgtctcctactttattacctgtattccactgatgattactattgtcctaaggggtgtgtgtgtgtgtgtgtgtgtgtgtgtgtgtgtgtgtgtatttgaaagcaacttgaaagccatttttgaagtagacaggttatattcttattctgttttttttttttttaaagaacttggaaagagtgattgcctgccttattgggaatatatcaaattgtgaagaatattctcagtcttcctttcatatctrtctagtattgtcttaatttgctcagatctttttcattcttctgctaataagaggaatttatttatggttagagaccagtggctaataaggaatcaatgtttcagactagtaagaagcatctttttcttgattctctagtatgcttcttgtttgtatcaattagaaatattttcagctgtaagtagtagaaaacagtgatttaaaatataggaattaattttctggagggagggcattggttgcttgtatagggtgggatacaatgccatttagaacccagg

SEQ ID NO: 305427 - DNA, 637 bp, Homo sapiens
ttattatagagtcattcagttgattcataattaatgcttcaatataattagttgctcataaattgttaggttccctgagcctctggggcattggtaaaatgtgatcgctctgtctttctctctgtctgttgtattcatttgttgtccaggatggatagaatggtgctatctgagctgttataatgttggcctcatgcctagctttatattgcagcaygtctgaggcattggtttttcatccttccaaacttttggtctacagagactattagaagattaaggtgtgtatactcactttattcaaaagttgagcatgtttgttgttttggacctgttttcctgtaaacaaagtttaaaatggtacaggttttaaaatgtgctaattattttgatgagtgtagatatacaaaatgaccattggaggatcaatgagggtaaaaagaggaaagacttgtggagaacctataagaaagggcttgttggagggctgcagggaagctggaaagtagtatagaaaccttaagtaagttcagaaggaagtgattaagaaagcacaaaattgtgttctgtgagtatagttgaaggtcctggaaatgtttggcattgagaaaatagatttgggaggtctcaaaagagt

SEQ ID NO: 305428 - DNA, 536 bp, Homo sapiens
gaaatgggagagaacattccagtagtgggaacagcaataagccaagacgctgagatcagaggcaatggcttccttcctgattactactctagcataatgatttctcaattttctattcttgtacctgtagacaaactatatcccaggcacctaaacctgtacttccatgccttgtcctcttttgcctgtcctgatatatctctttgaagacagaaaccttgccttttccttctttaatagtctccttctctggctcctagcacaggtttgtacacacaaaaataccactgtgctatggtggaaaacaacctggagttggggttaattacctgctttcaaatcctggctcttttgtttactaagagactgggcagatcaattcacctctccaaatctcagctgcttcttctataaattaggaattamcaatacctttttagaaagaaatgctatgaagatcaattaattaattaattcaatatttactgtcctctgatatttacccacctctgcaggtgccaagaactatgttaagc

SEQ ID NO: 305429 - DNA, 610 bp, Homo sapiens
aaggtgtatattcttagcatataaccagttgacaataaggaataaatacactggaaacttctttgtaactactttgtaagttcgttcttcttgcaacttcctcaattgttcttctagtgacagatctcaaacgtcctctgttggaatatactttatgtacttttccactgataccaatttttagtttgattttcttttttctttttcttcttcattagaattactaacacaatatcactggctactttataattctctccaattaaggttttatgttgaactgtctgttttatcaggcaggatagaataatacttaaaaaccaacattttggaatcaactagcttaggatcaaatcackcctttatcacttacaaactatgagttctgcgtaagatattaattctctcactttcctcagttatgaaatacagcctgtattagtacttactttagtgttagtgtgaggttaaatgagataaagctatgtaaaattcatttttaaaatactcaaatattagctatgataatgatgttggccagatgattagaaagtgctcagtataggattgctaaatgaatatgtcttatccaatagtagtataaactgga

SEQ ID NO: 305430 - DNA, 316 bp, Homo sapiens
tatgccttttatttctttttctagccttattgcactggctaggactgccagtacaatgttgaacaaggttggtgataacagacatccttgctttgtttctgatcttagaaaaaaatcatttagtctttagaaagcaatcaatctttcactattaagtttgaagttagctattggcttttaatatattctccatataaaggcataatattygccattctattcctagtgtgctgagggtttttgtcaggaatggagtttgaatttgctcagaagtattttatgtatctatttagatggccatatagttttagtttga

SEQ ID NO: 305431 - DNA, 539 bp, Homo sapiens
ttgagtgaggaggacaatcaataagcaaataaacaaacaaactacaaataaagatatgataaatactgtgaggaaagcagataaggagccgtgattgacaaaaatggcagtggagaaacacctttatgtaacattttgtgtgtgaaggccaccctttgagcatgataattaatgtaagacccaaagataagaaagagccaatcatgaaaaagccagaggagaaacattttaggtagagggagctgcaagcgcaaagcacaacaagaaaattgtggctatgttttaggaaattaaagmaggccggagtaattgaagcctagtaaacaggggagaatggcaaaaaatgaagttgcggtggcagagaaaagtcaaattatgtgaaagttggcactttagtgggtgccagtaaataaaagtcctctgtgttactccagaatttggaaccaagatgggagatgagactcaagagttactagatgaagatcaaaatggcagctttattactgagtctgctgattggagaattgcagccaaatggg

SEQ ID NO: 305432 - DNA, 576 bp, Homo sapiens
tgtctctaaaaataataataataataattgattactactaataaatatgtaactgacagttttttgcttctttaataactatatcatattatcagctctcacaaagaacaattactttcattacattgttttcttttcaaatgtctttataaaacgggttctctaaagctataaatgaataaataattttaagccaggtcttctttcttaactcaggtatgttctttttagaacttcctttgaagggatgacaggccaaaagatggaaatgggaagcaatagagggaaatcaaaatttcactgctgctatttaacattattgtgaagtcaattcaccaacttcaaaagaacagtgataggaactggcaaaaaaaaaagagatcagacagaataagtaaacagaggtttgaatgaaagactgagaaacttggatttaattctacaagtaaaaggaagtcagtgagagtttctgaccagagaactgacamaataaaaaaattatttttgcaaagattaatctgcaactctgtcatgaataaacaggagtcaagagatggaaaacaaaattaatatagg

SEQ ID NO: 305433 - DNA, 589 bp, Homo sapiens
tacttggcaacccattgagtatggaattgagagtcacaggttttagcctgggtgataatgaggatacgagaatctcctgatacatattcagttaacaggaagaggaaacttagatactcaattttggacctattgcattagactttttggtctgtcctttagtctctgctccttgataacaaggacgttgtcatattaggatttgaatacatttctaacactagtgtctggcacatagtagctacatagaaaaattgtgttgactgactgaaactagataaaaaatagttgacaaacatttattttaactttygagagtacaatttgaattagagatctggaagttatccacaaatatcctgaggtgatatttgaagttagatcagaggacaagagtcaacaaagaaaaagaggaaaattgttcatggtaagaatcttgaggaatggggttccttaagttttccgtagttagggaaaaaggaatggtatgatttcacactgaaaaacacagaagtcagagtgaaagactagaattggtatatggttggttttaagaaagagtgaatagttaataaggtctgttttttca

SEQ ID NO: 305434 - DNA, 547 bp, Homo sapiens
atctgaataatttcaaaatctgaaacacttctggtgtgaagcattttgcataagggatactcaatctgtatttacctagatgtaaataatcactgaaactattaaaataggttattgtctcagtcmattttgtgctgctatgacagaatactgcagactgggtaatatataaagaacagaaatttattctatcagagttctggagtctggtaactacaagatcaaagtgcctgcaggtttggtctttggtttcaagatgaggcctagttgctgtgtcctccaaagaggagaaaccttgtgccctcacacaacagaaaagcaaaagagaaaatccactctggtaagctctttttataatgccattaatctatttatgagggcagagccatcataacctaaacacctcccattaccttccagtactgttgtgtttaagtttcaacatgagttttggaggggacaaaaacattcaaaccatatagttataaagactatttcagttataaaagcctgtgattccttgaaactgaagtttgaaatatactcc

SEQ ID NO: 305435 - DNA, 566 bp, Homo sapiens
gttcacacaatgacaaaatcacctaacaatgcatttcttaggacgtatccctatcattgattgacacatgactgtgtaagcattggttctgtttctctgcagaatcctaatacaaagactaacacaacctctgacagaactttaatgtttgcatgaagtaaaatgagacctttgttgattcttttttcatagatgcaaacgtgtacagaaaattatagtttttctaaagagttatcctgctttgattttagtaaatccccttgattgtttctttctttgrtggtagagaatattggagctgagaagagagaaacaagaagtcgtctgctatgtccaagtagaattcagacatgttttggaatacctggtgaacaaagcaaaacaaccaaaaggcaaatgtaaaaactaatcctatgagaagaaggagataatcatgatgccccacacctagtaagaaaatcttagtgtcaaaagagtggcaatgctaaatactggggattttctgtcaactgggtttgcgttctaacacagacaatcctcaatgactttatgcctcatatcctttt

SEQ ID NO: 305436 - DNA, 451 bp, Homo sapiens
agatttttattccaataaataaataataagttgtattgattcaatacttattaaattaggccatcaaataaattaggtcatcaaataaatgtcttcttcttcttccttatttctataaataataatttagccaggaagtaatcaagttttatatgtctaagtaatgcttattcatgtggggaaaggattttatacatgcagggaagcttggaggcatcattgtggccttctaatagatgacacattattctgaaacaaaaaaaaaatagcttaaagcaagaattacattttgaratgtaagttatgagtgattagggaattattaagctaaagccaagaatctatgactaattgtgaagaatacttattccaatatgttagaccatagttatttttctcaggatattttaggtaaggaaactgagcacaaagattaagtaacttggccaag

SEQ ID NO: 305437 - DNA, 639 bp, Homo sapiens
tttgctgaatcttcttgaatattatgaactatgtctttaactgatacagaaaactacgtttttatatgtttttaaattacatctagatttttattccaataaataaataataagttgtattgattcaatacttattaaattaggccatcaaataaattaggtcatcaaataaatgtcttcttcttcttccttatttctataaataataatttagccaggaagtaatcaagttttatatgtctaagtaatgcttattcatgtggggaaaggattttatacatgcagggaagcttggaggcatcattgtggccttctaatagatgacacattattctgaaacaaaaaaaaaatagcttaaagcaagaattacattttgagatgtaagttatgagtgattagggaattattaagctaaagccaagaatctatgactaattgtgaagaatacttattccaatatgttagaccatagttatttttctcaggatattttaggtaaggaaactgagcacaaagattaagtaacttggccaaggacwaataactattaagtggtagagtcaggacacataaccaggaagtctggctccattacacttctttgcataacttgtccgtcaccttggggagaatatccta

SEQ ID NO: 305438 - DNA, 580 bp, Homo sapiens
ttaatttattcaaatgaatatcattcatatattctaagtccaagattttcaactactctgtaaatgtaattagcttttcttataagctatattccaaccagtagaatattattgaatattattgtttctcctttaaatgcattctcaaatttcagtcctatttttagtacagtcacacattaaacctttacctrtgtgttataaataaagtttcggtgccgcaaaagaaatagcacttgaatataaaattttcttttaattctcagcaaggcaaggtacttctatagaagggtgcacccttacagatggagcaatggtgagcgcacacttggacaagggagggaaggggttcttatgcctgacgcatgtggcccctgctgctgtgtcattcccctattggctcgggttaggccgcacaggctaaactaattccaactggctaatttaaagacagtgatggggtgcatggtttggcgggaaaaacggttatgcagagtagagaatgagttagggcagagcaggtagcaggtaatcggaatgagtcaaggtggggcaggtgattgaaatgagtcagggtgga

SEQ ID NO: 305439 - DNA, 580 bp, Homo sapiens
ttaatttattcaaatgaatatcattcatatattctaagtccaagattttcaactactctgtaaatgtaattagcttttcttataagctatattccaaccagtagaatattattgaatattattgtttctcctttaaatgcattctcaaatttcagtcctatttttagtacagtcacacattaaacctttacctgtgtgttataaataaagtttcggtgccgcaaaagaaatagcacttgaatataaaattttcttttaattctcagcaaggcaaggtacttctatagaagggtgcacccttacagatggagcaatggtgagcrcacacttggacaagggagggaaggggttcttatgcctgacgcatgtggcccctgctgctgtgtcattcccctattggctcgggttaggccgcacaggctaaactaattccaactggctaatttaaagacagtgatggggtgcatggtttggcgggaaaaacggttatgcagagtagagaatgagttagggcagagcaggtagcaggtaatcggaatgagtcaaggtggggcaggtgattgaaatgagtcagggtgga

SEQ ID NO: 305440 - DNA, 482 bp, Homo sapiens
tttactgtgtttatagagaaaaataaatatctctgtaaacatgtgttgtatttacagtgaaaataaatatctaaataaatattaagcttttaaaattggagcactcgcagaaggaaatgcaaatggatgtgagcgagggctgcctcacttggggcgtgcatgcctggattcgcactgaattggggtgcgtttgtctttctttccagctcggagtgcagagccatgcttcagggaggggaaatgaacatttatggagcacccactatgggctcgacactttacaaagagagcttcattttatcaccacccggctctgggtggcaaggagtatctgtgttactttgtaaagagggcaaagattgtgggcacagcgttttcggaggattctgttggtttytagtctcctctggatgacatcaccaatctgaagtcccttgcttgtatcataacaaagtgtcctttgttattttctcagatagaga

SEQ ID NO: 305441 - DNA, 555 bp, Homo sapiens
ttcctcttaggtggaacagaatgcctagaagggagccaaagttgggcatttcttttccctgaggtcagctaggctctgataaactccagcaggttagatctggttagttagtttcttctgagggaagtcctcgttaagaaaaacagaatactctgcyatatttcaaaatggtccattttcctctctccctgccagaagtataaggcgattcttctccaatatttattgtaagatccttttttatgtaaagctcaaaaaagtgtagggactcccatataacagagtcccccctagattttttagctctcaaacttgttcacattttagttttgtaatttctaaaagatagacacacttgtcagaaaatacatgaagataaaatgtcagcaatttttcttgcagtttatgtaatgaaagtttctgcattacttaaaaatcatttttataaacaatatggtaagtagtaacatacgggtgaaacatgacttttatcggtgaaacatgaagatttaaatatgaattttacctttccgaagctgcactgacacttgcata

SEQ ID NO: 305442 - DNA, 588 bp, Homo sapiens
cttgtttgaagtgattcttattggagactttcgaccttcctgtacccagatattaatagatttttttcagattttgagagtatttctgctgttatattaaaaataacatttctgtctctttgtctctctcttgtctttttgaacccctataattcaaatattttctgtttatgctstcacataaattctgcaagctttctccattctcttttcttctctaactgtatattttcaaataactggtctttgagttcactgattgtttcttctgcttgactaattttgctgttgataatctctattgcattttttatttaacaatatgattttttcagtcccataatttgtttgattttcaaaaaataatttaatgtctctgttaaatttcttgttttagttgtttattgtttccctgattttgttccgtagtttatattttcttgaagttcactgagctttcttaaaataattatcttgaattctttgtcaaggagtttacaaattttcctgtctttaggctcatttactggctctttttgttgttgttgttcctttggtagtgtcatgtttccctgattattccccgcc

SEQ ID NO: 305443 - DNA, 566 bp, Homo sapiens
agacatggcctggtacttgatacctgggtcaagaagtaggtggtcttggtgcctgggtttgtggggttgtgcctggagcctgaatgcactggcaggggtggagggcaaggagaagggagggattttgattgtgtatgtgggaacttgcctgaagcctggggtagagtgacctaatactgagatggaccttgagcttgagtcttcaggagccagccaggcacttggataggcctggcagctgtatccgctgagacacaactggaacctgagcctacagaggctggcctacacactggggtatggagaccagcctggagcctgagttcacggggtctattctaaaggctgggtgtgtaggtgctggcctggaggctagkttcatgagggcttgcttgggtactggctggcctggaacctgggtccacaaggttggtcctggagcctgagttcatgggcatcagcccagaactgaggtctagtgggatgggcctggaccctcagtctgctggagtatgggtctactaggacccacttgacattaagcaggcctagtgctgtttcagcgg

SEQ ID NO: 305444 - DNA, 622 bp, Homo sapiens
ggaaagtctgattttcccatcttgctgatgtccaacctgccttcttcttataaggaaggacctgtataattacactgggcttacctgataattcaggataatccacattaagatccttatctttatcacatctgcagtctcttttgtcatgtatgattacatattgacaggtttcagggaacaggatgtaggtattttcgggggctattattctatctaccacatttacaaaatccttagaacaatatctgatatgttctatgtactcaagtgtcatatggtattactgcctcctttttattaaaatacaaagggtactgttctgtgctcttgaacagagtcagcaagatttctgcaagacctctggggaaggaatttcatgtttactgtttcacagctatgtagctattaacatatctttatctgctcttcctgaaactagtatcatacactttaaattaacatttacatatgcarttttcaaagttacacatctgactgtattgcattcagaatttattttaagctataaatgtcacctctataaaaccacagtattaaaaaaatctgttaaaacatttatgtcatagtttctaattgtgcttttaaatttttcgttatg

SEQ ID NO: 305445 - DNA, 622 bp, Homo sapiens
ggaaagtctgattttcccatcttgctgatgtccaacctgccttcttcttataaggaaggacctgtataattacactgggcttacctgataattcaggataatccacattaagatccttatctttatcacatctgcagtctcttttgtcatgtatgattacatattgacaggtttcagggaacaggatgtaggtattttcgggggctattattctatctaccacatttacaaaatccttagaacaatatctgatatgttctatgtactcaagtgtcatatggtattactgcctcctttttattaaaatacaaagggtactgttctgtgctcttgaacagagtcagcaagatttctgcaagacctctggggaaggaatttcatgtttactgtttcacagctatgtagctattaacatatctttatctgctcttcctgaaactagtatcatacactttaaattaacatttacatatgcaattttcaaagttacacatctgactgtattgcattcagaatttattttaagctataaatgtcacctctwtaaaaccacagtattaaaaaaatctgttaaaacatttatgtcatagtttctaattgtgcttttaaatttttcgttatg

SEQ ID NO: 305446 - DNA, 612 bp, Homo sapiens
gctgtggccactgtgtgagagggtgcgaaatggtgcctccctccctcctgcaagaagcctagtgtccagccagtgagaaaacagacaactgaaagtgagttgctgtccctcactgtgggacagcaggtgagggcaagacggtctttgaggagaagcagtacagacggagtgtgctcggcagtgaaggcagacctcatggaggctgcggcagggagaggactttgtgaagatgcaggctgcaaattgggttgccraggtccgtgggtgctgagggtagggcaaagccttccagggagggagagaagcaaggacagaggcaaggatggcaggcataatgcacagagattggaagatgcacagaaatggctccagagagacaggcgaactcattacgagggaatttcaaagtgaagtggatggctaaactggagccaagcggttatggctgaacatttgtgtctcctccaaattcatatgttaaattctaaccctcatggtgacaattttaggagatggaacctttgcgaggtgatgaagccatgaaagttgtattagtcaattcttgcatcataataaagaaatacctgaggctgggtcatttataaagaaaag

SEQ ID NO: 305447 - DNA, 612 bp, Homo sapiens
gctgtggccactgtgtgagagggtgcgaaatggtgcctccctccctcctgcaagaagcctagtgtccagccagtgagaaaacagacaactgaaagtgagttgctgtccctcactgtgggacagcaggtgagggcaagacggtctttgaggagaagcagtacagacggagtgtgctcggcagtgaaggcagacctcatggaggctgcggcagggagaggactttgtgaagatgcaggctgcaaattgggttgccgaggtccgtgggtgctgagggtagggcaaagccttccagggagggagagaagcaaggacagaggcaaggatggcaggyataatgcacagagattggaagatgcacagaaatggctccagagagacaggcgaactcattacgagggaatttcaaagtgaagtggatggctaaactggagccaagcggttatggctgaacatttgtgtctcctccaaattcatatgttaaattctaaccctcatggtgacaattttaggagatggaacctttgcgaggtgatgaagccatgaaagttgtattagtcaattcttgcatcataataaagaaatacctgaggctgggtcatttataaagaaaag

SEQ ID NO: 305448 - DNA, 612 bp, Homo sapiens
gctgtggccactgtgtgagagggtgcgaaatggtgcctccctccctcctgcaagaagcctagtgtccagccagtgagaaaacagacaactgaaagtgagttgctgtccctcactgtgggacagcaggtgagggcaagacggtctttgaggagaagcagtacagacggagtgtgctcggcagtgaaggcagacctcatggaggctgcggcagggagaggactttgtgaagatgcaggctgcaaattgggttgccgaggtccgtgggtgctgagggtagggcaaagccttccagggagggagagaagcaaggacagaggcaaggatggcaggcataatgcacagagattggaagatgcacagaaatggctccagagagacaggcgaacycattacgagggaatttcaaagtgaagtggatggctaaactggagccaagcggttatggctgaacatttgtgtctcctccaaattcatatgttaaattctaaccctcatggtgacaattttaggagatggaacctttgcgaggtgatgaagccatgaaagttgtattagtcaattcttgcatcataataaagaaatacctgaggctgggtcatttataaagaaaag

SEQ ID NO: 305449 - DNA, 359 bp, Homo sapiens
caaaacaattgtcttacccagatggatgttccaggatcacctttacttgccataatgctccttggacacaccagtaaaacttctcttcctccctctttgctccctttacagtacagaaaaaagtactagatgccagcaagatgataattattttctgagaatgtgaggaaagggagaaggctgaatgtcagtggaaatcacgttctggttactaacagaggaatttgattctggccgtcttaatacaaaatgggattyactagaatcctctcatgtgcttggaggaaaaactgaaagtccgtgcttgagaactgaacaggcatcaaggggggctggacagtggtgagcagaccaaagtg

SEQ ID NO: 305450 - DNA, 516 bp, Homo sapiens
caaaaatttgggaacaaggttgtttgaaaatttgtaacaccaattatagtaaattactgataaaaattatttatgatagtttgaagatataaataaaatgtttttatcaagaaatgatgttgaactttgtcaaatgtttttctgcatcaattgagatgatcgtgtagtttttattattcgttttgttaatgtgatgtatcgtatttattgatttccatatgttaaatccrccttgcatcccagagacaaatcctacttggtcatgatgtataatcttttgatgtgttgttgagtttggtttgctaatattttattgagaaattttgcatcaatgttcatcagatatattggactataattttctttgcttgggatgtttttggcttaggtatctaagtgatgttggcagtataaagtgcttttgaaagtatttcctgtagctctattttttggaagtaggagtattgttattaattattctttgaatatttggtagaatttagcatgaagccatct

SEQ ID NO: 305451 - DNA, 647 bp, Homo sapiens
ctttgtttttgaaggattgctcagggtacaaaattgtagcttgatgagtttttttcaacattttaaatattttactacactatcttattgtttgcatggtttctgagaaattaaatgtaatttttacttttgcttctctatatgtaaggtgatttttttcttctagggtctttcaatttttttttctctatctaattgatatgatttggctgtgtccccacccaaatctcatgttgaattgtggttcccataattcccatgtgtcatgggagggaccagtggaaggtaattgaatcatggggacagttaccctcatgctgttctcgtgataatgagttctcacaagatctgatttttttttaaggggccttcctccttttgctsagcacttctcctttctgctgccatgtgaaaacggatgagtttgcttccccttttgctgtgattataagtttcctgaggcctcccaagtcatgttgaactgtgagtcagttaaacctctttcctttataaattatccagtctcaggtacgtctttattaacaatgtgagaacgacggactaagacactaatttttttcagtttgaatatgatgtacttaggtgtagagttttttaatttatttatcctgcttggtgttttttga

SEQ ID NO: 305452 - DNA, 647 bp, Homo sapiens
ctttgtttttgaaggattgctcagggtacaaaattgtagcttgatgagtttttttcaacattttaaatattttactacactatcttattgtttgcatggtttctgagaaattaaatgtaatttttacttttgcttctctatatgtaaggtgatttttttcttctagggtctttcaatttttttttctctatctaattgatatgatttggctgtgtccccacccaaatctcatgttgaattgtggttcccataattcccatgtgtcatgggagggaccagtggaaggtaattgaatcatggggacagttaccctcatgctgttctcgtgataatgagttctcacaagatctgatttttttttaaggggccttcctccttttgctcagcacttctcctttctgctgccatgtgaaaacggatgwgtttgcttccccttttgctgtgattataagtttcctgaggcctcccaagtcatgttgaactgtgagtcagttaaacctctttcctttataaattatccagtctcaggtacgtctttattaacaatgtgagaacgacggactaagacactaatttttttcagtttgaatatgatgtacttaggtgtagagttttttaatttatttatcctgcttggtgttttttga

SEQ ID NO: 305453 - DNA, 538 bp, Homo sapiens
tacagaaattaaaatatttcaaattgtgttctcctataaaatttgtattattgacctgacctcagtctttaagattttcattttcagacacctacagctgtcaacacctgacttctagaatttttcttgaaatttacaattctaactyatgttaacagtatgtgcatttttgagaaaaagctacaatgaagtaattggataacttttaacatttttttccctttatttatactgctaacagtgacatcaataagacttactttacaattttgtagtatgcaatgtcacagagaaatgatgtattttatgtagtgtctgaacacaggtgttttcttagaaattctaaaggaaactaatctttctcccttgatgctaatgactttagacatactttatcaacaaattcaaaccctagactttacaaagccaattgttataagagaagtaggatctatctaatatcattgaatactaaacaaaactatgagaatgtctagtaaagtgtgtccattgaagtaaatatatgtttaacagagtg

SEQ ID NO: 305454 - DNA, 626 bp, Homo sapiens
cctacagctgtcaacacctgacttctagaatttttcttgaaatttacaattctaacttatgttaacagtatgtgcatttttgagaaaaagctacaatgaagtaattggataacttttaacatttttttccctttatttatactgctaacagtgacatcaataagacttactttacaattttgtagtatgcaatgtcacagagaaatgatgtattttatgtagtgtctgaacacaggtgttttcttagaaattctaaaggaaactaatctttctcccttgatgctaatgactttagacatactttatcaacaaattcaaaccctagactttacaaagccaattgttataagagaagtaggatctatctaatatcattgaatactaaacaaaactatgagaatgwctagtaaagtgtgtccattgaagtaaatatatgtttaacagagtgattgcaatattcaggagctcaaggctgcccccctttaaaggaagcaatactttaaaggagaggtggaaaaccattatgaagtgaaaaaatattccaacagatttcagatgtatttcagctgttctggattccctattgataactgtcctattgacatgagtattcccaggagggctgt

SEQ ID NO: 305455 - DNA, 335 bp, Homo sapiens
gttcctccttcacatgctcacactctctctcctactgccacgtaagaagtgcctgcttccctttccaccataattgtaagtttcctgaggcctccccagccatgtggaactgtgagtcaattaaacctctttcctttatatattgctcagtcttgggtatttctttatagcagtgtgagaaggaactaatacagatggttaccaaacccagacaattmcttcaaatgtaactgactgaaaactgctcagaggatgcttaagcccaaaccatgagtaattttttaaggactggtgtgggaggtgggtaaccaagggggagtttaaaaggataagct

SEQ ID NO: 305456 - DNA, 596 bp, Homo sapiens
cactgtcttctgttttcatccaaatcttcttcctgactgttgactctattgaacccagtggccccaagtctgtcaccacatgctgggctgtgagatgtcggtgccctgcagccaaaggcctccaagagctcacctgcacttaagtaagttgggtttctcatttgtcaccgtgagggagtacacacacaccatggagaattgccaggtgtcccagtaaagggtgtcagaaagaacctattataggatgtgagctttgcttggtggttttgaaaggatttagtgaaatagggaattggtctctgttggctgcagtcaagaagggaaggtcattctatgattggtacctcaataaatcttacctatgggagggcattctagatgctaaagcagtaattaataataataaaaaamgcagccactcatattacctgaggaagagagatttttgtattttgcagctcggatgatatgcatgttttgtctctatttaggcatgattctggaatggtctgtttgctatcttcgttgttgttgtgtcttgatctatcatagtcacagagtgatcttgtctcatattaatgttctgtgaaatcatt

SEQ ID NO: 305457 - DNA, 520 bp, Homo sapiens
tgtgtttgcttattttagtatctgctttaggatatatagtagtatacatcacagacacacttcaagttatatattgccccttcrtatagtacaaaaacctcacaacagtgttatttattttctcctggcctttattccattcttgttatacactttaattttacctaccttataaactctgtgctataatttattgctttatttctaaacaatccattattcgaaggagagatataaataacattttaaaataattttacatatttgtacatgtggttaccatttctagtgctttcaattgatttggttgatacatcctcctgatatcattttatttttgccagaagaagttttattaacatttcttgaacccaactgagtcggagaccagagtggctctgtctgtcacacttggagaaactattaagggctattcatacctgctcacttcctcaactgctctgtaaattgaataaccaagccagagagtcagagtccagttgtcatgtcaggactactt

SEQ ID NO: 305458 - DNA, 572 bp, Homo sapiens
ttcctctccaaaagcctctgcttccccatcttttttttttttttttttctgagacagagtctcgctgtgtcacccaggctggagtgcagtggcgcaatctcgtcttgctgcaacctccatctcctaggttcaagtgattctcctgcctcagcctcctgagtagatggggttacaggtgcgtgccaccatgcccagctaatttttgtatttttagtagacacggggtttcaccatgttagtcaggctggtctcgaactcctgaccttgtgatccacctgcctcggcctcccaaagtgctaggattacaggcgtgaaccactgtgcccagacttctctatctttaaatgrgccaattgaggatgatccctgggatttatccaaacctacacgttttgggggttgatgagagtgagggtggaatgtctgtccctcctggacagaatcctaacaactcttcagcaaatcagtgaacttgaatccatgcagaggcctgtttctagggagaatgcctcggccagctgaccacagggatcatagcccttagacttcctcagatttgagggaggggttca

SEQ ID NO: 305459 - DNA, 512 bp, Homo sapiens
attggaggactcagaatgactgctgggcacaaagggcagaagacagcacctccagattttaccaagtatggaaatatgagggaaaggttcacgcaggtcttggtatccactgctgcttttccctccagagtgaacaggcaggcacagtgaaagccaacggagccattcctattattgagaagcctcgtggtgatggtgtctggttgaagctgattgatgagataataaagaaactgatctggagcacacagatggtcayacatgcacggttcctctctttgaactgacatcttggcaaaagccctctgagccccagggattgcaatgcagaatagacacaaatccacttgagtcagcagaagtctgctgtatgtgcatacgtgcttgcacatgtagagaagacacctggaaggatgtaccacagcttgtccagcccgtcatctgactcaggaggtgggcctgaggaatgggtggtggaaaaagttaattttcactattgcccttctgttcgt

SEQ ID NO: 305460 - DNA, 559 bp, Homo sapiens
tagacacaaatccacttgagtcagcagaagtctgctgtatgtgcatacgtgcttgcacatgtagagaagacacctggaaggatgtaccacagcttgtccagcccgtcatctgactcaggaggtgggcctgaggaatgggtggtggaaaaagttaattttcactattgcccttctgttcgttgaagtcttataccttatgtgtattacctatttaaaactaaataaaatccaaaatgagagaaagagagaaataatacaaaaatgtgagaaaaatcacatggcttgctgctttcattaaaaataaacaaacacacactagagaatgatacttgcatatgaaaagactcgcagtgtggttccacatatacagagaagccataagcacaggaaagtttcagttactcctgttctattctgcttacctgaaaccatgccaagttaagggggtatttagcaaaaaccctttcaggttatccataaataaaaatatatgtgaaygctattctttttctttcaatgcataaaaaatctttgatttaggcataaatagctaacagga

SEQ ID NO: 305461 - DNA, 574 bp, Homo sapiens
aatagttcctcatatgagcaggcaaaattatactctttttcccttctctgctatgcttttgacgkgttattaaaccctgagataattataggatccaattcggaaattaagacttctaaatagtaccctccaaacctgaaacgagactttaataaacgtctgacaaatgctctgaatgacacgtaacatttttcccaccatcgatatgcgcggtatcacatttcatcatctcatcgaggcgtgaggtgcacaagggagagcggttgaggttccagaagtttagttaatcttctcaagttcttccctctgatacacggtgtctacaaatttcacacttgggttttttagttggaaatgcagttctgtttgttgaaacaaaggacgccagctgccacacggttcgtgcacaggcggccttatgtcccggtgagcatgggacctcccaccaatggtcggccccagcagcacagcctcttgagataaacccagccagttccctcacggcagctgctccagcagctgatgctcagtttcctcaccgcccagctctgccccgtgctgcctctgctgcccc

SEQ ID NO: 305462 - DNA, 574 bp, Homo sapiens
aatagttcctcatatgagcaggcaaaattatactctttttcccttctctgctatgcttttgacgtgttattaaaccctgagataattataggatccaattcggaaattaagacttctaaatagtaccctccaaacctgaaacgagactttaataaacgtctgacaaakgctctgaatgacacgtaacatttttcccaccatcgatatgcgcggtatcacatttcatcatctcatcgaggcgtgaggtgcacaagggagagcggttgaggttccagaagtttagttaatcttctcaagttcttccctctgatacacggtgtctacaaatttcacacttgggttttttagttggaaatgcagttctgtttgttgaaacaaaggacgccagctgccacacggttcgtgcacaggcggccttatgtcccggtgagcatgggacctcccaccaatggtcggccccagcagcacagcctcttgagataaacccagccagttccctcacggcagctgctccagcagctgatgctcagtttcctcaccgcccagctctgccccgtgctgcctctgctgcccc

SEQ ID NO: 305463 - DNA, 574 bp, Homo sapiens
aatagttcctcatatgagcaggcaaaattatactctttttcccttctctgctatgcttttgacgtgttattaaaccctgagataattataggatccaattcggaaattaagacttctaaatagtaccctccaaacctgaaacgagactttaataaacgtctgacaaatgctctgaatgacacgtaacatttttcccaccatcgatatgcgcggtatcacatttcatcatctcatcgaggcgtgaggtgcacaagggagagcggttgaggttccagaagtttagttaatcttctcaagttcttccctctgatacacggtgtctacraatttcacacttgggttttttagttggaaatgcagttctgtttgttgaaacaaaggacgccagctgccacacggttcgtgcacaggcggccttatgtcccggtgagcatgggacctcccaccaatggtcggccccagcagcacagcctcttgagataaacccagccagttccctcacggcagctgctccagcagctgatgctcagtttcctcaccgcccagctctgccccgtgctgcctctgctgcccc

SEQ ID NO: 305464 - DNA, 541 bp, Homo sapiens
tcaacaggtaagagacattctttagtgaataaaatatgagtatttattgttaattcacaggtataataatcttatataattttctttaaaatcatatttgtcttggttttcatatcacacagcttagtcttctaagagctttactatcttggaactaagagggcaaaacttagatattattgctcatcttcagtaattatatatttgtccatagttcagcaagaaaatgcagaggtacattaaatattcatggaatttcacccactcaatatccacgaaggcttaatggaccaattaaaatatgccgagcaatgaccgaatggcttgtccgatagattttagattgcaacacacaaaacctaatgctactcaagtacctttttgttgaattattaagtcatgctcatttaaaagtgttttatttaaamgtgaatagctccagctgcagtcatgctattgtattagttttctagcctgctataacaaaataccacaagctgagtgacttaaacaacagaaaattattatctcacagcgctgg

SEQ ID NO: 305465 - DNA, 585 bp, Homo sapiens
aatgtaacttaaaaagttaatttagtggtgaatagatttttaaattcctaatattgttaaagcctttacaaatatcgaagatataagttctcaaaaaatacaaaatcaaaggttaacattaaacaatatttgcttgctcaaacgatattttctgggctttggaatacacccatgctttattttactttcaaaggattttttgaagtcttgctctttgtaaaacaatagaaccatccagaactgaagtaaaaacagaaattgctccttcactctctycacctcacacagctagtgttttgccttctcttcccccagagcaaccactcttaacagcaggcatatattcatacgaatagatagtctatatatatatatacaaaaaaataaatgtcatatatcttattttataacaataaaatcactttacagtcatagtaatgcataagactgcattcagctatatctcattccctttaatgtctgtgtggtacaacataatgtggatatacttaaattcttaaccatcctcttattgaccaatatgcaggttgttttcaatttatcattaatacaaagaaggttgca

SEQ ID NO: 305466 - DNA, 592 bp, Homo sapiens
taacagcataagtattttaaaaacgttctcactgggtayggtggctcacgcctgtaatcccagcacgttgggaggccaaggtgggtagatcacaaagtcagaaaatcgagaccatcctggccaacgtggcgaaaccccgtctctactaaaaaacacaaaagttagctgggcatggtggtgcatgcctgttgttcccagctactggggaggctgaggcaggagaagcacttgaacccaggaggtggaggttgcagtgagccgagatcgcgctactgcactccatcctggcgacagagcaagactcgtctcaaaaaaaaaaaaccaaaacaacaacagtaacaaaaactaactttctacaggaaaccgtatattattacacaaaatgatctgtttaggctcatgatacgaatgtcttcagaaattatcgtttgaaacagagcaagtaatctacaacattctgcaccaagtaagatacatgcacaccccaaaaataaatcacatggggcttactggaaagataatttatggctttaaacaatttcctttctatttagcaacatttaaaattaaacccaatgtaactacagttaga

SEQ ID NO: 305467 - DNA, 497 bp, Homo sapiens
gctactaatttttgtaatccccatgtgttgagggtaggacctggtgggaggttattggatcatgggagcagtttcccccagctgttctcatgatagtgagtgagttttcacaagatctgatggctttatgaggggctcttccctctttgctygtatgcgctctctcacctgccgccatataagaaatgcctttgcttctctctcaccttcccccatgattgtacgtttcctggggccttcccagccatgtgcaatggtgagtcaattaaatgtctttcctttataaactacccagtcttgggaagttctttatagcagagtaaaaaatggactaatacaaacagaaaacaaaataaaattttttgaaagataaaaacatgtgttgtcaattcagtttcttacacagaactgataggatggctgaagcctggaaacctttcttagacttctgaaacttccgcaggtaatagcccttcttgtcattgttcacctggtcc

SEQ ID NO: 305468 - DNA, 548 bp, Homo sapiens
gggcgggagacatttggacttctgaaaatatgcctgtgatggatcaaaggccaaggacctttggaaaaactgaccttgcttcaattcttggagaacaactaattgttcacattyttgtcttgcctggattctctttctagtgtccttaagggagtgttcatttcatgtccgttggaaaaaaaaacaaaaaacaaaacactctcagtcgcataagatagttcattctgtttttacaaaagctctaaaaattagaaagtttttttttaattagaaagttttgcatatttattactccattccaggtgtaaaatcctgttaattctctcaaaatcatatttaacttcaattgtttcatgatactatatagcattaagttttccactcgattttaggttctgcttacatcaaccaatcaacagattaattgagcatttactgtagagatttcagaataaatatagaagcctaaacaatgggattaaatacaaattctgtgtacagataaaaaacatcttaactagaaaaaaatgaatttatactattcattc

SEQ ID NO: 305469 - DNA, 548 bp, Homo sapiens
gggcgggagacatttggacttctgaaaatatgcctgtgatggatcaaaggccaaggacctttggaaaaactgaccttgcttcaattcttggagaacaactaattgttcacattcttgtcttgcctggattctctttctagtgtccttaagggagtgttcatttcatgtccgttggaaaaaaaaacaaaaaacaaaacactctcagtcgcataagatagttcattctgtttttacaaaagctcyaaaaattagaaagtttttttttaattagaaagttttgcatatttattactccattccaggtgtaaaatcctgttaattctctcaaaatcatatttaacttcaattgtttcatgatactatatagcattaagttttccactcgattttaggttctgcttacatcaaccaatcaacagattaattgagcatttactgtagagatttcagaataaatatagaagcctaaacaatgggattaaatacaaattctgtgtacagataaaaaacatcttaactagaaaaaaatgaatttatactattcattc

SEQ ID NO: 305470 - DNA, 564 bp, Homo sapiens
cctgttctttatcaaatctgctctttccaagatcaccaatgggctcccagttgctaaattcagtagtctaatatgaaatttgctcttacttaattatactttatttaactatcattcattctttcccaaaatgcatttcccttgtcttgcaggatacacatcaacctgcatttcttttgttatatcttaatggaaaaactcctcatttccggttccttctcatctcagcctctaagtcktcaaatccttgagggcttccctggagcctcttacttttctttctacactcacccatcggagacctcattcccacccaaggctttaactactatctataatctgatgaccaataaatgtatctcaagcctggttctctccatggaacacccaattgtaaatctcactatcttctgagtatctgtactgataggtataacgggcatctgaaaagcataacatgttcgaagcagaaaccctgatccccccaatacacacacacacacacacacacacacacacaaaataattactccagaattctctcctatctcagtaaaagacaag

SEQ ID NO: 305471 - DNA, 436 bp, Homo sapiens
tctactaagcaaatacaaaatagccaggagtggtggcgcatgcctgtaatctcagctactcaggaggctgaggcacaagaatcatttgaacccaggaggctgaggttgcagtgagcygagattgtgccactacacttcagcctgggcgacaagagcaaaattctgtctcaaaaaaaaaaaaaaaaaaaaaaagagagagagattctgtcatttgcaaccacatggatggaactagagatcattatgttaaattaaataaggcaggcacagaaagatgaacatcacatgttctcacttacttgtgggatctaaaaatcaaaataattaaattcatggacataaagtgtagaaggatggttactagaggctgagaaggtaatgaggtggtgaggggaaggtggggatggtcaatgggtacaaaaaatagctagaaaga

SEQ ID NO: 305472 - DNA, 436 bp, Homo sapiens
tctactaagcaaatacaaaatagccaggagtggtggcgcatgcctgtaatctcagctactcaggaggctgaggcacaagaatcatttgaacccaggaggctgaggttgcagtgagccgagattgtgccactacacttcagcctgggcgacaagagcaaaattctgtctcaaaaaaaaaaaaaaaaaaaaaaagagagagagattctgtcatttgyaaccacatggatggaactagagatcattatgttaaattaaataaggcaggcacagaaagatgaacatcacatgttctcacttacttgtgggatctaaaaatcaaaataattaaattcatggacataaagtgtagaaggatggttactagaggctgagaaggtaatgaggtggtgaggggaaggtggggatggtcaatgggtacaaaaaatagctagaaaga

SEQ ID NO: 305473 - DNA, 582 bp, Homo sapiens
accacatcacagaacaagaaagttggttgtaaacgaggtttaactttattattcaactgagaaatattttaactcactagggagacgtagtattcaaaggaaattaaagtaaaatcattatataaggataaaagttattttgtaatatgcagaatcactccattttataaaaagtgagatacgtatctacagatttaaaaggtcaattctgtatttcaaggaaatctcagtgactcagactaggtctttttctggtatgtaaaacttcaatatttgacattttccaaataattcaatgctgaagatccacacatgaacatctagtcatccttattcaaaaagatatattgagcatctaatatgggttttagcaggctataccaagrcctggtgggacagaggtatatgagatgtgggtcatattaccaaaagagatctggtggcaaaatagacatgacatgttttcatttcgtttagatctaattcatgttcttcaagagattttagaatttgaagtttactgttgcctaccatcttacatttttatgtattacattaattttgtatatcagtctattatat

SEQ ID NO: 305474 - DNA, 592 bp, Homo sapiens
cacttaaattcagcttcagtcattaggagaatataattaatacatccttgattgtcttgtgcaaatgaagttgtgcccatgtttaaactcattcatgtgcctcttggtaataatttataaaagaaggaaagagaattatctgatttcttgatcaagaagtcctgaaaacctgtccattaagaagctattaattctggacttcattgcactcatgtcatttcacaccttaaacatcaaaattctcattaagcaattggccccctccctcyacctggaggatgctttctgcatctatcctttcctctccattgtccctacctacaacctaatctcagtcttcaaatcacaccccccatcagtaaatggttataagaaacccctcacaatacatctacatgaattcacccatatatgatacacaagtgttaccatattaggtatattatgaaacaggtgcaaaggatacgttttgaaaggatgatttgaagataaatgtacatacaggttgcaaaacgtccccaaccttgactggcccatacagctcaatttggagactacagcctggactgaccatggcaatacctccccatgc

SEQ ID NO: 305475 - DNA, 592 bp, Homo sapiens
cacttaaattcagcttcagtcattaggagaatataattaatacatccttgattgtcttgtgcaaatgaagttgtgcccatgtttaaactcattcatgtgcctcttggtaataatttataaaagaaggaaagagaattatctgatttcttgatcaagaagtcctgaaaacctgtccattaagaagctattaattctggacttcattgcactcatgtcatttcacaccttaaacatcaaaattctcattaagcaattggccccctccctctacctggaggatgctttctgcatctatcctttcctctccattgtccctacctacaacctaatctcagtcttcaaatcacaccccccatcagtaaatggttataagaaacccctcacaatacatctacatgaattcacccayatatgatacacaagtgttaccatattaggtatattatgaaacaggtgcaaaggatacgttttgaaaggatgatttgaagataaatgtacatacaggttgcaaaacgtccccaaccttgactggcccatacagctcaatttggagactacagcctggactgaccatggcaatacctccccatgc

SEQ ID NO: 305476 - DNA, 592 bp, Homo sapiens
cacttaaattcagcttcagtcattaggagaatataattaatacatccttgattgtcttgtgcaaatgaagttgtgcccatgtttaaactcattcatgtgcctcttggtaataatttataaaagaaggaaagagaattatctgatttcttgatcaagaagtcctgaaaacctgtccattaagaagctattaattctggacttcattgcactcatgtcatttcacaccttaaacatcaaaattctcattaagcaattggccccctccctctacctggaggatgctttctgcatctatcctttcctctccattgtccctacctacaacctaatctcagtcttcaaatcacaccccccatcagtaaatggttataagaaacccctcacaatacatctacatgaattcacccatatatgatacacaagtgttaccatattaggtatattatgaaacaggtgcaaaggatacgttttgaaaggatgatttgaagataaatgtacatacaggttrcaaaacgtccccaaccttgactggcccatacagctcaatttggagactacagcctggactgaccatggcaatacctccccatgc

SEQ ID NO: 305477 - DNA, 592 bp, Homo sapiens
cacttaaattcagcttcagtcattaggagaatataattaatacatccttgattgtcttgtgcaaatgaagttgtgcccatgtttaaactcattcatgtgcctcttggtaataatttataaaagaaggaaagagaattatctgatttcttgatcaagaagtcctgaaaacctgtccattaagaagctattaattctggacttcattgcactcatgtcatttcacaccttaaacatcaaaattctcattaagcaattggccccctccctctacctggaggatgctttctgcatctatcctttcctctccattgtccctacctacaacctaatctcagtcttcaaatcacaccccccatcagtaaatggttataagaaacccctcacaatacatctacatgaattcacccatatatgatacacaagtgttaccatattaggtatattatgaaacaggtgcaaaggatacgttttgaaaggatgatttgaagataaatgtacatacaggttgcaaaacgtccccaaccttgactggcccatrcagctcaatttggagactacagcctggactgaccatggcaatacctccccatgc

SEQ ID NO: 305478 - DNA, 620 bp, Homo sapiens
aaacttgtgttcactgaaattagaaatccattcttgtttttatagtaaggaaaggcattgcttgaataaaaactgagctgagtaaactttggggtatctaaaatggcaaggtttgtgtgcttttacatctcttcatatgcccagtgatatggtttgcctctgtgtccccacttaaatctcatgtggaattgtaatcctcagtgttgcaggagggacctggtgggaggtggctggaacatgggggcagatttctcccttgctgttctcatgacagtgagcgagttctcaggagatctggctgtttaaaagtgtgtagcacttccccttccactgtctctccttccaatatatgaaaatgtgccattttccccatcacccttccgccatgattgtaagtttctgcggcctccctagccatgcctcctgtacagcctgtggcactgtgagtcaattaaacctcttttctttacaaattacccagtctcgtgtagttctttatggcagtatgaggatgaactaacacacccaaattttgataatctgtcacacacacagaawgtctatttgcaataacccaaattttctgaaacaaagaacaaaaacagctaccccaaaatgtt

SEQ ID NO: 305479 - DNA, 572 bp, Homo sapiens
gtcagctttggcaattaattaaacaaactaaaaccccttaggcttttaaggattttgtttttttwaaaaatattttctccgtgtgctgggaaaagccaaagccatcctatggagttggatgtgtgtgtcggggttgtgtgtcgggagctttttcgctcttcagtcattgatttgaatgaagatttttgaattattgagcttcacatctggccctgatattgaaccatctatcttgtgtggatcagaatatgcttcttacacatcaatccagtttgcaagaatcatctacagcgaatgatttggttctaggcaaatatggtttatgctcttaaaaaatacagtggctcactataaagtaataaaattgaaacaataataattttagttttcccctattagtttaaaatgtaggtggtgtctaggggtgagaaaggtatttcatttcttaaaagccctaagaaagtttattatattatagagaaggatatacaggagaaagagccagatctgtttctcacatattaagcagttacattttttaccctaataaaaatgtctaacattttttgctt

SEQ ID NO: 305480 - DNA, 535 bp, Homo sapiens
caaaaacaaaacaaaacaaaaaaacaaaaacaaaaaaacaataaaaaaacaacccagggaactcatcactgtgtcttcccttggtgccaatgctcactagctgtgctgtcctcaaagtctttccatgtttgttgatgcacattgtctggagttttcagttgtactcagctagagaaatagaaaaaaagtatgtctactccatcttccccaaatcagaatttccctgccttattttmaaaattagtttggggactgatttaaaagaaaagcctttggaacaattgcttgacattaagtacctatctcccattaagtcagaaagttataaccctggatggactttattgtcacctgggaagctttagaaaatatttcagtttttcagggcccagaaactaagtaaaccaaaatctctgagggtaatgcccagcaagggaatgctttatcctcatatggattttctgtgtaaattcaagagcactggctctctgtgacggtgtctacccaaggaccaaagtacaaaagcaacagttca

SEQ ID NO: 305481 - DNA, 567 bp, Homo sapiens
cgggtgcggtggctcatgcctgtaatctcagcactttgagaggccaaggcaggtaaatcacttgaggtcaggagttcgacctcatttatgcctaaagtcactagggcaactacttttcacccagtgtcctccagaaaagaaagatctggagggtctttatcttcaaaataataatgagggggtgcagaagggtagggatgagcctctccctcctttgccactttagttttagctggcaaataaacctgctctgtaacctcttctgttacttcgttatactctccctcctcctcctcatcagtgtgaaaaagttccaaggtggaatgaaccagagcccacrattgtcccattgctaccctgatgcttccaagatccccttcttactcaccacggggattgctttaagagtacttgggtgtccagctagttgcacattctccaaccgtcactctagccacccttcgacctggatttgagcccccataatggacgccacttgccgagaccagctcagttggggagaccctaactcagcgacactagaggaattaaacacacacacacaga

SEQ ID NO: 305482 - DNA, 532 bp, Homo sapiens
gtattatagttataaagaagaacactattcttctgtctttaggagatggtgctgatgtatttaagttaagtgtcgtaaagtctgcaacctaggctggctgtggtggctcatgcctataatcccagcattttgggaggctgaggcagtggaacatcagaggtcaggagttttagaccagcctgaccaacatggtaaaaccccatctctactaaaaatatagtattagctgggcgtggtggggcatgcctgtaatcccagctactctggaggctgaggcaggagaatcgcttgaacctgggagacggaggttgtggtgagccgatatcaggccactgcactccagcctgggtaacaagagtgaaactctctgtctcaaagaaaaaaaaaaaaagtagccagagggggaaaaagcatattccatacacagaaacaaggacaaagataatatcagatttctcatgaaaagcaatraagtaggtaacagtggagcaacatctttgtactgctgaaagaatatcaatctacaattata

SEQ ID NO: 305483 - DNA, 634 bp, Homo sapiens
taataacattggacatgtatagtagaaagttaatcaaaacacaactgtggtcattatttaaggatgccccttttcaggtgactacattttaagctttgtagatgtttcacagtatccagctcataaaatacggtcagctctctatatccactggtttcgtatccacaaattcaaccaaatgcagctcaaaaatatttggaaaaaaaaataacaataccacaaggaaaataatacaaaaaatatagtagaacaacaatttacatagtatttacattgtattattcataaatattctaaaatgatttaaagcatgtgagaggatgtgcataggttttatataaatactgtgctgttttatgtaagggacttgagtactatggattttggtatcctcgaaggtcctagaaccagttctatggggatactgatggatgtctgtatacaaatattattttacaagcctcgtggaaatgaagtcttcaactctaccgtgattttagtccatttacttagatgatttcgtttttgctaytctgtttccttaggagattttgcatttttctgaaaataatttttcctgtatagaattaaataggctgattgaaattgttctaccaagtagtggtaagacctg

SEQ ID NO: 305484 - DNA, 644 bp, Homo sapiens
tgttttttagggtattactagaagagaaagtatgataaagcgtgtctgtaatacttttatttttactctggtggtagtggcgagctgagaagtttctacatacatggagtccartaaacatctattgaacaaacaccatcaatatgtacaattttgggctatataattttaaaattgatggtgccacctattggtgatgacataaagtgtaaaatgatcacttacatagtaagttatttcatgttttccaatcatgttacttattcccacagagattctgtgaggagctggaaggcaagcttggttcatgcagacatgaggcactaatgttttcaactgggttgctctccactggatgcctattaaatgctcagcactttggagtataccagagaagtaaagacatggcccctgccttcaaggagcattttatccagttggtaagagacctacctaccaatataacaaaataataaatagccttgggaggatgaggccgggaggatccattgaggccaggagttgaaggctgcagtgcactatgatcgcgccctatgcatagacactccaacctgggcaacataataagaccttgtctctataaaataaagaaataaaacaaaataataaatagcttgacatta

SEQ ID NO: 305485 - DNA, 648 bp, Homo sapiens
cactgttgcagttgatcttgcactgtctcttcactgtctatgtaacataacccttcactatgtaaagggttatgttatgttttccttggtaactcctgtgtcaaggtgcaatgggaaaaagtggagtmctcctcttgaattagtgcacagtattccactcaacacataggttgtcccatttaatccttacagtaatactttagggtaggcactaatatcatcccaattctacagatgaagaaagagcagtaggtctaatggagtcaagatacaagtcaggtaaagaaagatttcttgcctagtgagtactttcttagaaagaagctcttccttggtgttatcaatttttctgattgaagtaattgaaggaggaagcaagactatttgctgagagtgaggcagggaggtggcaagggaaggatgtctgaggaacggaacagtcacgattggaatagttgcagaagagaatgagagagtgtgctaagtaaagacatacttgagaacctagccaacattgaagcacatacttcagttgaggcttcaatttctatagtttgtgacaccccgcccctgccacccccatctgctatgccaggatctagttaggaaggctgggaaaagatagactgagacttgcagggttttaca

SEQ ID NO: 305486 - DNA, 648 bp, Homo sapiens
cactgttgcagttgatcttgcactgtctcttcactgtctatgtaacataacccttcactatgtaaagggttatgttatgttttccttggtaactcctgtgtcaaggtgcaatgggaaaaagtggagtactcctcttgaattagtgcacagtattccactcaacacataggttgtcccatttaatccttacagtaatactttagggtaggcactaatatcatcccaattctacagatgaagaaagagcagtaggtctaatggagtcaagatacaagtcaggtaaagaaagatttcttgcctagtgagtactttcttagaaagaagctcttccttggtgttatcaatttttctgattgaagtaattgaaggaggaagcaagactatttgctgagagtgaggcagggaggtggcaagggaaggatgtctgaggaacggaacagtcacgattggaatagttgcagargagaatgagagagtgtgctaagtaaagacatacttgagaacctagccaacattgaagcacatacttcagttgaggcttcaatttctatagtttgtgacaccccgcccctgccacccccatctgctatgccaggatctagttaggaaggctgggaaaagatagactgagacttgcagggttttaca

SEQ ID NO: 305487 - DNA, 621 bp, Homo sapiens
ctacatttgaacatagtttttaacaagttacaaaaacactacccccagttactacaagccctgaatgaaatgtaatagccaagaatccttttaaggattgggtgctgggattgtttgctttctcttctctcttttcttttcttttcttttttttccttygacagggtcttgcactgatgcccaggctggagcccagagcacagtggcctgttaccagctctctgcaacctctgcctcctgagctcaagcaatcctgcctgagtagttaggaccacagacatatgccaccatgcccagctaatttttatattttttgtagtgatggtgtttcaccatgttgcccaggctggtctcaaactcctgagctcaagtgatccgcctgccttggcctcccaaagtgctgcgattacaggtattaaccatgtccggccttgctttgtttctggtttatagtgagactgaaaaaatttaaggaaggtatctcaatttaaatgaattactaattgaatgagtgatacatttacagataaatgattcttctacatcaatgctgtccagcagaacttctatgatgatagaaatgtcctataactgtgctgtctagtgggtaaccactagccc

SEQ ID NO: 305488 - DNA, 593 bp, Homo sapiens
gctacaaacctgtacagtatgttgctgtactgaacactgtaagtaattgtaatacaatggtaagtatgtgtgtatctaaatatatcttaacatagaaaaggtgcagtaaaaatacagtattcaaatctcatgaaaccaccatcatataagaggtccgtagttgaactgaaatgttgttgtgttgcccatgattgtacttggatttcaggactctgcagatgcttggaggtcttatgggtttggccatggggtattgcctctragaaactgccatctgcttgccagagattctgaaaagaccagagttgcctatttgcagtctgttcttcaagactatctactatgttggcaaaaaggcctaggtttcttctctgtccattctcaatccctcaatctgtccttgtgacttacttgctccttcaagctgcccagtagtggcgctggtgaaaataaaatagactttggtcctacagacctgtcatggactctcagctcagcctcttctatgtgtgccatttgcctcatctgtaaatgtagttaatattgtcctctcaaagatgttaggaaaaccagaagaatgtatttatgtaaca

SEQ ID NO: 305489 - DNA, 593 bp, Homo sapiens
gctacaaacctgtacagtatgttgctgtactgaacactgtaagtaattgtaatacaatggtaagtatgtgtgtatctaaatatatcttaacatagaaaaggtgcagtaaaaatacagtattcaaatctcatgaaaccaccatcatataagaggtccgtagttgaactgaaatgttgttgtgttgcccatgattgtacttggatttcaggactctgcagatgcttggaggtcttatgggtttggccatggggtattgcctctgagaaactgccatctgcttgccagagattctgaaaagaccagagttgcctatttgcagtctgttcttcaagactatctactatgttggcaaaaaggcctaggtttcttctctgtccattctcaatccctcartctgtccttgtgacttacttgctccttcaagctgcccagtagtggcgctggtgaaaataaaatagactttggtcctacagacctgtcatggactctcagctcagcctcttctatgtgtgccatttgcctcatctgtaaatgtagttaatattgtcctctcaaagatgttaggaaaaccagaagaatgtatttatgtaaca

SEQ ID NO: 305490 - DNA, 576 bp, Homo sapiens
gcattatttagctagtgaaaagagaacaaagaatgccttaagaataatttttgaatggcagcagaaaccagcatatcctgtgaagtaaatgcattttcaggacctcaaaatagatttaggttgcctctaaagcagaactttcccatgataatgatgatcctaggtggtaggattgccaatggtaattttctttcccaaagattcttacaaccaaccataaacctactagataacctatcagttgtgttattaactgatatatcagttggggttcagtgcagacacttctctaggtactgaatgctaagaattatatgcttaaaaattatatgctcttaccattagaagagctggaagaaggctgagggagatgccttcttccagcccttctaatggtaggagcattaagagggatgctgttgggctcgcagttcagtccacacagctacaatctagaggtcaggaagctataragtccactgctggcatcacagtcatttctcacagatgaagttagtggcaatgcagaggcacagaaagtctggtcattaaaaaccacatttaatgttgcacgta

SEQ ID NO: 305491 - DNA, 634 bp, Homo sapiens
caatgctgaaagtgtggtgttggagtccccagttattattgtattggggtctatctctctcctgagctctaataacatttgctttttttatctgggtactccagtgttgagtgcatatacaattgttataccctcttgctgagttgacctctttatcattatataataatcttgtctctttttatatttttctcttgaaatctattttatctgatagaaatatagcaactcctactcttttttggttttcatttgtgtggaatatctttttccatccctttattttaggcctatgtgtgtatttataggtgaagagtgtttcttgtaggcaacagattgttgggtcttgttttcttttctttttttttttttaagttttttttctttatagagagagagtcttactgtgttgcccaggctggtctcaaattcctgggctcaagygatcctccttgataacccattatttaaaactgatgacaacttaacactaatcgcaaaaaacaaaggagagaaagttaataaaaactccacaccacattgcccccactttttaacattttatggtttctatttatgtcttattctactatctatgtcttgaaaagttgtagttactatttttgatagattc

SEQ ID NO: 305492 - DNA, 634 bp, Homo sapiens
caatgctgaaagtgtggtgttggagtccccagttattattgtattggggtctatctctctcctgagctctaataacatttgctttttttatctgggtactccagtgttgagtgcatatacaattgttataccctcttgctgagttgacctctttatcattatataataatcttgtctctttttatatttttctcttgaaatctattttatctgatagaaatatagcaactcctactcttttttggttttcatttgtgtggaatatctttttccatccctttattttaggcctatgtgtgtatttataggtgaagagtgtttcttgtaggcaacagattgttgggtcttgttttcttttctttttttttttttaagttttttttctttatagagagagagtcttactgtgttgcccaggctggtctcaaattcctgggctcaagcgatcctccttgataacccattatttaaaactgatgrcaacttaacactaatcgcaaaaaacaaaggagagaaagttaataaaaactccacaccacattgcccccactttttaacattttatggtttctatttatgtcttattctactatctatgtcttgaaaagttgtagttactatttttgatagattc

SEQ ID NO: 305493 - DNA, 634 bp, Homo sapiens
caatgctgaaagtgtggtgttggagtccccagttattattgtattggggtctatctctctcctgagctctaataacatttgctttttttatctgggtactccagtgttgagtgcatatacaattgttataccctcttgctgagttgacctctttatcattatataataatcttgtctctttttatatttttctcttgaaatctattttatctgatagaaatatagcaactcctactcttttttggttttcatttgtgtggaatatctttttccatccctttattttaggcctatgtgtgtatttataggtgaagagtgtttcttgtaggcaacagattgttgggtcttgttttcttttctttttttttttttaagttttttttctttatagagagagagtcttactgtgttgcccaggctggtctcaaattcctgggctcaagcgatcctccttgataacccattatttaaaactgatgacaacttaacactaatygcaaaaaacaaaggagagaaagttaataaaaactccacaccacattgcccccactttttaacattttatggtttctatttatgtcttattctactatctatgtcttgaaaagttgtagttactatttttgatagattc

SEQ ID NO: 305494 - DNA, 577 bp, Homo sapiens
gcctcagtttcctcacctgtaaaagagggacaataataccagctcggagagacaataaaggcagaaaggtgcctggcacatgtaggtctttggtaagtgtgtgttcttaccagcacatagacccttcttgtcctagttcattttgtgttgctataacagaatacctgagaatgggtaactcataaagaacagagatttatttcttacagttgtggagtctgccaaatccaaggtcgacagacccacagaaaggcaagaaaacgtgcacacacatgagaggaagggggtcaaactcatcctttttatcaggcatccactcctgtgataactaacccactcctgggataacagcattaatccatttatgaggcagagccctcatgacctaatcacctcttaaaggtccacctgtcaacactgttgcattggggatttagtttttaacacatgaactttggggaacacgttcaaactatagtgcttctcatttgaagtattttgtctctaatcaccatgtggaaataggatgttatttatttatctrtttcccttttttgaaccccaaatagattaaaag

SEQ ID NO: 305495 - DNA, 487 bp, Homo sapiens
caataacttcacttacacataccctgagaatgaccttgtagtctaagaagatgtgtgtttggagttacgagctgaggaaygtggaagcggccaacccagaaattcactcattattcatgaaggacatctgaacccccgggccacctcttggaatgagggttgtacaggggaaagaggctctttgtttggggttaaatgaaggttgctgctaggtggaggttgctaagtgaaaatgccatacaaactgcatgctttttacaaatggtggtggtgctcctgtccagctcaccgccattggaccatccctgtttgtaaatccatccaacaaaccctatgtctcgtttgttgtctccaggtctcttcttcggcctttctgacatggtgccagccctactggagtcagcaggagtccagcacaacagatggtggtcagtggtgacttcggcacaggcagttcgtgaggagtggttggtggccatggagtcct

SEQ ID NO: 305496 - DNA, 487 bp, Homo sapiens
caataacttcacttacacataccctgagaatgaccttgtagtctaagaagatgtgtgtttggagttacgagctgaggaacgtggaagcggccaacccagaaattcactcattattcatgaaggacatctgaacccccgggccacctcttggaatgagggttgtacaggggaaagaggctctttgtttggggttaaatgaaggttgctgctaggtggaggttgctaagtgaaaatgccatacaaactgcatgctttttacaaatggtggtggtgctcctgtccagctcaccgccattggaccatccctgtttgtaaakccatccaacaaaccctatgtctcgtttgttgtctccaggtctcttcttcggcctttctgacatggtgccagccctactggagtcagcaggagtccagcacaacagatggtggtcagtggtgacttcggcacaggcagttcgtgaggagtggttggtggccatggagtcct

SEQ ID NO: 305497 - DNA, 487 bp, Homo sapiens
caataacttcacttacacataccctgagaatgaccttgtagtctaagaagatgtgtgtttggagttacgagctgaggaacgtggaagcggccaacccagaaattcactcattattcatgaaggacatctgaacccccgggccacctcttggaatgagggttgtacaggggaaagaggctctttgtttggggttaaatgaaggttgctgctaggtggaggttgctaagtgaaaatgccatacaaactgcatgctttttacaaatggtggtggtgctcctgtccagctcaccgccattggaccatccctgtttgtaaatccatccaacaaaccctatgtctcgtttgttgtctccaggtctcttcttcggcctytctgacatggtgccagccctactggagtcagcaggagtccagcacaacagatggtggtcagtggtgacttcggcacaggcagttcgtgaggagtggttggtggccatggagtcct

SEQ ID NO: 305498 - DNA, 590 bp, Homo sapiens
catactgattatcaatacttaaaatatattagctattttaatattaaagtttatagtaatatgcaaagtgcttagggtataatgataatgaaaagacaggatacaaaattatgctgtaatttaatctcaactacgttttaaaaaagtaatgcatagaacaagggctggaaagaaatatacaaaattgttagcacatatgttaagacataaaatatatacttgagaggtaaaactatcgatatttttctattttatatttatttttttctcgtttcctaacttctctataatattaattttaatgagaaatatgtatttttatgacttactcctagatccttcttttatacccaaataccactattgaatgagtaaactaatgcascccactgtaaggtaaataaatgtgcctgtaaaacatccatcctaccacttctcattccagcccaaggacagatctctctcacagagtcctacctgagagtccctctcaacacattagtttagctctttccttcttttgaaatagtatgatgggtgaagcctatccctgatcacatcagttattttttcccaggatatttacatgt

SEQ ID NO: 305499 - DNA, 561 bp, Homo sapiens
ccttgccttgattcaacatttactgtatgcccagaagcgtgtggtactgggatggaataagcaatatgacctactacctgccttgggggctagtgtacctaacagtcacaaacacacacacgcgtgcacacacacacacagagggaaaaatttcraactcttctcagtgtggtaaattaggacaccgcagcagcttggtgtcctcaatcttgggagtccctgtgctggttcctgttagagccagaaaaatactacaagtttctcatatggggcaagctttgtctaaggtctcaacagctcaggacttagactctgttttttctggatctggtttgaccctgagattcatttatcagcctctgccttgattttcccactcctggtataacaggatgacttgaaaagcctttcttttctaccatgagtgcattttccacccctaaccttgtctctggaaagaaatacgaggatcagaatgcaatagcttttaaaagggcacttccctccaggtctcagatataagctttcttagctaatatattgaaatttatagataaaaca

SEQ ID NO: 305500 - DNA, 615 bp, Homo sapiens
atacagtccccaatccccttgccctgaaacaacaaaacacaccattaacccttctaacttagacattttagaattctaagactttatttagctaagtgaaactatctttcacccaacaagatcagaaaggcaaatatttttgataaaatctagtaatagtatgattatttcttccatttattgagtgctcgctatgtgccaggtagtgkgcagactttacatggattatcactgggctctcagctacttggcagcagtgaggttttcttgctggttcactgtcagagtcccagtgcctagaatagtactggcacacagaagttctcaataaatatttattgactaaatgatacaattaaaccttcaaaataaccttgcgaagtgttatctctcttttacaaataaatcagaagattgtagtggcttgcccaaagtcataaagcaaatacgtggtagagtcaggcttgggatgcaggtctatgtagttccaaagcctgtattcttatccatcacactccaccgtctcctttgtttctactgtatatcctgaccaatgaaaatataaaaacaaaagggcctgaggttatatcagaagtatataacttcatagatgct

SEQ ID NO: 305501 - DNA, 611 bp, Homo sapiens
ttgctctgccatattgtattagcacaaaccaaacctggcacactgagggagcagactatataaggatgtgaacaccaggaagcaggcatcactgggaggcaatctcagaggctagtgacaccagagtgatacagtccccaatccccttgccctgaaacaacaaaacacaccattaacccttctaacttagacattttagaattctaagactttatttagctaagtgaaactatctttcacccaacaagatcagaaaggcaaatatttttgataaaatctagtaatagtatgattatttcttccatttattgagtgctcgctatgtgccaggtagtgggcagactttacatggattatcactgggctctcagctacttggsagcagtgaggttttcttgctggttcactgtcagagtcccagtgcctagaatagtactggcacacagaagttctcaataaatatttattgactaaatgatacaattaaaccttcaaaataaccttgcgaagtgttatctctcttttacaaataaatcagaagattgtagtggcttgcccaaagtcataaagcaaatacgtggtagagtcaggcttgggatgcaggtctatgt

SEQ ID NO: 305502 - DNA, 595 bp, Homo sapiens
aggaaagtctttgatggctgggccagtgtagtcaagaaagagctgaggaaatgtatacccagagatggaggaaagaagtgaataatctttatggttctttccaaaaaagaataaatattcttcttcctaaagaactccttttagtatttattttactttagttgtgctactgacacattctgtttgtttttgtttgtcttaatcgtctatttggctttaatgtttgctaaatattttttctggatatagaattttaagttggactttttttcagcagttcaaagaagttattcgattatttcctggattctgttgtttcataagaaaatttatattattttatctttttttcctctgcctattttaaagatgttctctttgtctttgcttttcagcagttttacaaggaaagcctgaatgtggttttattctgatgttttcttctcagagtttgcaagaatsattaaacctgcggggtttattcattttgcaacattatatcccattagctcttcaaattttgcttcatcacattctctcttctcatactggaactcaaattataccatttttagaaatatttactgtgcctcat

SEQ ID NO: 305503 - DNA, 644 bp, Homo sapiens
tcaacattccttgacccacagccttctgcctagtggaattaagatgactaaaaggtgagctagctgcactctaattttctaagtgggcatgatcaagacagaggctgaatttagagtcaaatctagagtacactgcaaagacaaagcaagtcttatcattagtcagcctcatgactagatgaaatgaggctgactagatgaaatcatgacaagattgaaaattgctctcatctttcagactctgctcaccttattgtccagaatatawcatcagccctactgaggagattttttttaaggttcctaagaagaagcctggaataacctccacaagatgaccatattctccaatctccattgctctattcaaaaagtagaagaccctcttcttattccaggaaaagctcaacagacttttgggggatgttgtatcaggctaagaaagggctggacaggcaactgaaatgttttgaagccacagttgggccaacaagagcccagcccccaagattatttattgtgcttctgtgatagaaagtggggtggaaaagcagctatgaaatttgatgttcataattgcaacaacatcaaagaaaaaggacattgagacaaggtcatacaaagataaaaataagttgttatgg

SEQ ID NO: 305504 - DNA, 641 bp, Homo sapiens
ccccacgtggctgtccatctggtctcccagtgacagacactggagccctctctcttcctttggtcacaccacgccaggacctttgtagaatgtttattaggcacacgtttgactctgagcagcttgaatataaaggactcttaagatctaaagcgcaagcaaagagacttattttggctcttggtctttatagttatattggctcttatttatttcttaaacatttattgggcacaggtagtaaactcatcatagaccatggctcctgaagccctgataatttaatacctgatttctggagtctggggaaacatggaaggtgtcctgtaggatgaggcaaattagctgtcaataggcagaaatggccagccatagagaaaagtgggctttaaatgggtttagatattcaaaagtgcctcatgatggtcagaaagaagtctctggagtaaggatgggcattagtagcccctatactcatctccaccattagtctttattgaatacttactatgtgccagaractgctggccaggtactttacatacatcatctcatttaatactcacagcaatcttggaacatatatgatattatccccttttggaagatgaggaaattgagactcagaaaaggttaggtaa

SEQ ID NO: 305505 - DNA, 536 bp, Homo sapiens
acccagaagcatacactctccatcttaaaaacacacactcccaccatcctgggagcayggtaaatcagcaaagatggacggtgaaaatgtcgctttctcacctcagcctgatatttaccaacaagaagttaatttcccactgttcccagatcagtccacattggggctaacacttctccacaatgtccaagcaaaatcaaaagaatccctgtctcagaaggcatttgttgctgctgagtcacaactgcctgtctgatcatagtctcccaaaatggagtaaacaaagggttagtttgtccccttgttacacagtgaagccctttgccaaaactgattgttgtattttctggacaaaatggagtaaacaaagggttagtttgtaaacaaagggttagcttgtccccttgttatacagtgaagccctttgccaaaattgatttttgttttttctgaatttttgtttttgtagatattcagctctccccaatacctctgcctgccttggctgcctggccactttttccagtgtgattgtg

SEQ ID NO: 305506 - DNA, 536 bp, Homo sapiens
acccagaagcatacactctccatcttaaaaacacacactcccaccatcctgggagcatggtaaatcagcaaagatggacggtgaaaatgtcgctttctcacctcagcctgatatttrccaacaagaagttaatttcccactgttcccagatcagtccacattggggctaacacttctccacaatgtccaagcaaaatcaaaagaatccctgtctcagaaggcatttgttgctgctgagtcacaactgcctgtctgatcatagtctcccaaaatggagtaaacaaagggttagtttgtccccttgttacacagtgaagccctttgccaaaactgattgttgtattttctggacaaaatggagtaaacaaagggttagtttgtaaacaaagggttagcttgtccccttgttatacagtgaagccctttgccaaaattgatttttgttttttctgaatttttgtttttgtagatattcagctctccccaatacctctgcctgccttggctgcctggccactttttccagtgtgattgtg

SEQ ID NO: 305507 - DNA, 536 bp, Homo sapiens
acccagaagcatacactctccatcttaaaaacacacactcccaccatcctgggagcatggtaaatcagcaaagatggacggtgaaaatgtcgctttctcacctcagcctgatatttaccaacaagaagttaatttcccactgttcccagatcagtccacattggggctaacacttctccacaatgtccaagcaaaatcaaaagaatccctgtctcagaaggcatttgttgctgctgagtcacaactgcctgtctgatcatagtctcccaaaatggagtaaacaaagggttagtttgtccccttgttacacagtgaagccctttgccaaaactgattgttgtattttctggacaaaatggagtaaacaaagggttagtttgtaaacaaagggttagyttgtccccttgttatacagtgaagccctttgccaaaattgatttttgttttttctgaatttttgtttttgtagatattcagctctccccaatacctctgcctgccttggctgcctggccactttttccagtgtgattgtg

SEQ ID NO: 305508 - DNA, 536 bp, Homo sapiens
tgctcccttccacatagaaggaaactggcattttactaggcactgggcaatctgatcagtcttggaagaaaggggaattagcgggcgagcccttgcttgctgggagatggtttaccctgaaacccttctgggtttcccagaaccctgagtaaatattaacataatctcattacattgctcattatattgcttcagattgaggataaaacatagaagcaacctgggccaatgtacccttgtggtttgaacggattgtttttcagtccaacagtctaatttatgcagacggcattatggaggaaagggttcctgacttggaaacagactggggttttcatcccaagtctaccacttactagctatgccactttrgacaacttgaggctcagttctcccatctgtaaagtgggtgtaagtttgtcccagcatcagcattagcatccgcatcaccactcctcatggagtgcttcagtttgctaggcactgtacttgcatctttgcatcaattcctctcaaaagctcttggatgcagttac

SEQ ID NO: 305509 - DNA, 536 bp, Homo sapiens
tgctcccttccacatagaaggaaactggcattttactaggcactgggcaatctgatcagtcttggaagaaaggggaattagcgggcgagcccttgcttgctgggagatggtttaccctgaaacccttctgggtttcccagaaccctgagtaaatattaacataatctcattacattgctcattatattgcttcagattgaggataaaacatagaagcaacctgggccaatgtacccttgtggtttgaacggattgtttttcagtccaacagtctaatttatgcagacggcattatggaggaaagggttcctgacttggaaacagactggggttttcatcccaagtctaccacttactagctatgccactttgracaacttgaggctcagttctcccatctgtaaagtgggtgtaagtttgtcccagcatcagcattagcatccgcatcaccactcctcatggagtgcttcagtttgctaggcactgtacttgcatctttgcatcaattcctctcaaaagctcttggatgcagttac

SEQ ID NO: 305510 - DNA, 584 bp, Homo sapiens
tgctcaaactcattaatatctgcagaatgcaaattataacactaatgagaaaacatttcacatccatcaaatttatgaaaattcaaaagtttggcaatgccaagtgttggtaaggatatgctggtaggagggtaaattaatactattactttgaaaaacaatttggcattatctaggaactctgaagatgctcatactctctccaaaatagtgttttagagaaactctaactcttgtgcatgaggaaacatgtgtaataatgtccattgsagctgttttcctgggagcaaacatttggaaatgatttaaatatctatcaatagaaatgaataaatttcaatatattttctggaatggaatatgtttaatggaacacttaaaataaatgtggaaaacttcaaattgagagaacaacaaatactaatattgataaaacacacactgcagaatgatacagacataggaccattcagataaaatcttaaaatgtgcaaaattttgctatttacagtttagggatgcatacatagatagtaaaagtataaaataagcatgagtactcagaagagaagcagaagaatagg

SEQ ID NO: 305511 - DNA, 558 bp, Homo sapiens
gattttcattggtggtatattttcatttcttgcttcttattttttgaatatccattgcatgatttttacttgaggttactgtgaggcttgcaaatactatgatatattttaagcagatgacaaattaacactgattgcataaacaaacaaacaaaaggaaactaataaaaactctaccctgtaactttgtcycccacttcttaactttttgttgtttctctttgtcttattgtaccatgtcttgaaaagttgatatagttattatttctgatgggtttgttgtgtagtctttctacttagggtttagtttacacaccacaattacattgtcataatattctgtgtttttccgtgtgcttactcttactagtgaggtttgtactttcagattatttattattgttcattaatgttcttttctttcagattgaagaactccctttagtatttctctctcagcttttgtttttctgggaaagtctttatttctctttcatgcttgaaggatatttttgctggatatactattctagggtaaaacgttttttgcttcagcgc

SEQ ID NO: 305512 - DNA, 558 bp, Homo sapiens
gattttcattggtggtatattttcatttcttgcttcttattttttgaatatccattgcatgatttttacttgaggttactgtgaggcttgcaaatactatgatatattttaagcagatgacaaattaacactgattgcataaacaaacaaacaaaaggaaactaataaaaactctaccctgtaactttgtctcccacttcttaactttttgttgtttctctttgtcttattgtaccatgtcttgaaaagttgatatagttattatttctgatgggtttgttgtgtagtctttctacttagggtttagtttacacaccacaattacattgtcataatwttctgtgtttttccgtgtgcttactcttactagtgaggtttgtactttcagattatttattattgttcattaatgttcttttctttcagattgaagaactccctttagtatttctctctcagcttttgtttttctgggaaagtctttatttctctttcatgcttgaaggatatttttgctggatatactattctagggtaaaacgttttttgcttcagcgc

SEQ ID NO: 305513 - DNA, 558 bp, Homo sapiens
gattttcattggtggtatattttcatttcttgcttcttattttttgaatatccattgcatgatttttacttgaggttactgtgaggcttgcaaatactatgatatattttaagcagatgacaaattaacactgattgcataaacaaacaaacaaaaggaaactaataaaaactctaccctgtaactttgtctcccacttcttaactttttgttgtttctctttgtcttattgtaccatgtcttgaaaagttgatatagttattatttctgatgggtttgttgtgtagtctttctacttagggtttagtttacacaccacaattacattgtcataatattctgtgtttttccgtgtgcttactcttactagtgaggtttgtactttcagattattyattattgttcattaatgttcttttctttcagattgaagaactccctttagtatttctctctcagcttttgtttttctgggaaagtctttatttctctttcatgcttgaaggatatttttgctggatatactattctagggtaaaacgttttttgcttcagcgc

SEQ ID NO: 305514 - DNA, 527 bp, Homo sapiens
tactgatatatctatttttgttatcaattattgtgagagtaatgctagtgtttccagctatatttgttgatttgtcaatttcttttatttttagtttcaaatataggttttgcatcctgtatttgaaacttttattagatgtattcactaaaattaagatttttattcttgataaattgacccttttatcactatgaaatgtctcttcttgtttctggtaatattccttattttaaagtctgctttgtttgattataatatagtcattctggacatctttgactaatgtttcatgatgtatttttttatccttttattttaatttacctgccttttttttttttggwcagattctcactcttgttgcccaggctggagtataatggcacgatcttggctcactgcaacctctgactcctgggttcaagtgattctcctgactgagcctcccgagtagctgggattacaagcatacaccaccatgcctggctaatttttgtatttttagtagagatgtggtttcacca

SEQ ID NO: 305515 - DNA, 592 bp, Homo sapiens
tccagctatatttgttgatttgtcaatttcttttatttttagtttcaaatataggttttgcatcctgtatttgaaacttttattagatgtattcactaaaattaagatttttattcttgataaattgacccttttatcactatgaaatgtctcttcttgtttctggtaatattccttattttaaagtctgctttgtttgattataatatagtcattctggacatctttgactaatgtttcatgatgtatttttttatccttttattttaatttacctgccttttttttttttggacagattctcactcttgttgcccaggctggagtataatggcacgatcttggctcactgcaacctctgactcctgggttcaagtgattctcctgactsagcctcccgagtagctgggattacaagcatacaccaccatgcctggctaatttttgtatttttagtagagatgtggtttcaccatgttggccagattggtctcaaactcctgacctcaggtgatatgcctgccttggcctcccaaagtgctgggattacggacgtgagccaccgtgactagccctgtgtttttttatttga

SEQ ID NO: 305516 - DNA, 592 bp, Homo sapiens
tccagctatatttgttgatttgtcaatttcttttatttttagtttcaaatataggttttgcatcctgtatttgaaacttttattagatgtattcactaaaattaagatttttattcttgataaattgacccttttatcactatgaaatgtctcttcttgtttctggtaatattccttattttaaagtctgctttgtttgattataatatagtcattctggacatctttgactaatgtttcatgatgtatttttttatccttttattttaatttacctgccttttttttttttggacagattctcactcttgttgcccaggctggagtataatggcacgatcttggctcactgcaacctctgactcctgggttcaagtgattctcctgactgagcctcccgagtagctgggattacaagcatacaccaccatgcctggctaatttttgtatttttagtagagatgtggtttcaccatgttkgccagattggtctcaaactcctgacctcaggtgatatgcctgccttggcctcccaaagtgctgggattacggacgtgagccaccgtgactagccctgtgtttttttatttga

SEQ ID NO: 305517 - DNA, 589 bp, Homo sapiens
cattgcactatcccaaagacattccactgtagctgtgatctaaatgttatggaactgctgcccctgatgttttcactatgagtgcctctggcactcatggcacaggtgactggacattggaatgagaactctctaagcactcatgtctctattatattgatgcttcacacaagggcattattgggggaatctaatttgcctctagaaccatgcctttaggggtatattgattttttttctagctcctgagttacagagaatgggaaattactgccaacagtcctatttagcacaaacactgcaaatgtcaccttccctggtatattagtcaggataagttctgctatgctgtagtcataaacaaccttaaaatttcagtgacttaataggacaaatgttgatttctcactcaccaaatatctggtgcaggctgggtgaccttcctycttgttataggcatatcatcttctagaacaaatgaccttcaagacatcaaggcaggagaagaaagagagagatggagcaggcacaggtatcattaagcacttcagctcaggagtggcacgtgtcacttatgcctgtaatttgt

SEQ ID NO: 305518 - DNA, 552 bp, Homo sapiens
gctgggtgaccttccttcttgttataggcatatcatcttctagaacaaatgaccttcaagacatcaaggcaggagaagaaagagagagatggagcaggcacaggtatcattaagcacttcagctcaggagtggcacgtgtcacttatgcctgtaatttgtgtccaaaactagtcatgtggctcacctagctgtgagrcaggctgggaatactgggaagcacatggaatatttggttagcactagctgtttctattactcatggtaaaaagaggaggtgtttcggtttcaagctggggtgagcctggttctcaatctttctttccttctctgaaagtgccagaagacacagattttagagcttctccaatgccaatctgaacacatggcttattaggtgttttggaaccataacctgtagatctgtgtggcatctttggagaatcagcaaaaatgttccttctctataaataactctctgactgatctaatttggcacctaaaatttccaccattaatatgctgtttttgagctaccttaaggatatgcatat

SEQ ID NO: 305519 - DNA, 500 bp, Homo sapiens
ctcctgctggtaccttgcattggctgagtctaactggaagccagagggcaaaggaggtaccctttccagctctgcaattctcttcagacagggctgggatttctggagagaatttgcagaatcagaaagcagagctttccaatcaatgccaagcaagagactctgcagactctcatagccttgggacctgagaaaccaggtmtccagtgagcagtcacttaagcctgttcacctggccctctcttactttctctcctatagcagcagcaaaggagcgatgggccgaagggacttgctgggtagaagtggacccacattctaaaaaggaatggaagagaaacctgatttctttgactcgccctgtccctgaagatgaggggcaggcacagaccagccctctccagaaagacaaatatattcttccattcatgggaggggtagtagagactaacatttgttaagtatctattacatggggggtatggaggtaggccctttgt

SEQ ID NO: 305520 - DNA, 500 bp, Homo sapiens
ctcctgctggtaccttgcattggctgagtctaactggaagccagagggcaaaggaggtaccctttccagctctgcaattctcttcagacagggctgggatttctggagagaatttgcagaatcagaaagcagagctttccaatcaatgccaagcaagagactctgcagactctcatagccttgggacctgagaaaccaggtatccagtgagcagtcacttaagcctgttcacctggccctctcttactttctctcctatagcagcagcaaaggagcgatgggccgaagggacttgctgggtagaagtggacccacattctaaaraggaatggaagagaaacctgatttctttgactcgccctgtccctgaagatgaggggcaggcacagaccagccctctccagaaagacaaatatattcttccattcatgggaggggtagtagagactaacatttgttaagtatctattacatggggggtatggaggtaggccctttgt

SEQ ID NO: 305521 - DNA, 500 bp, Homo sapiens
ctcctgctggtaccttgcattggctgagtctaactggaagccagagggcaaaggaggtaccctttccagctctgcaattctcttcagacagggctgggatttctggagagaatttgcagaatcagaaagcagagctttccaatcaatgccaagcaagagactctgcagactctcatagccttgggacctgagaaaccaggtatccagtgagcagtcacttaagcctgttcacctggccctctcttactttctctcctatagcagcagcaaaggagcgatgggccgaagggacttgctgggtagaagtggacccacattctaaaaaggaatggaagagaaacctgatttctttgactcgccctgtccctgaagatgaggggcaggcacagaccagccctctccagaaagacaaatatattcttccattcatgggaggggtagtagagactaacatttgttaagyatctattacatggggggtatggaggtaggccctttgt

SEQ ID NO: 305522 - DNA, 572 bp, Homo sapiens
agacaggtgagaagggcaaagtctcctgyaacctggtgagaaaatgtgggctaagccattctcatctggagctgaaggcttggtggagaatggccctcaacattcaagttcacacccatggatttataaaaggcagggctggggggaaaggtttttcccattatacttaataacattatcaacaacaataatcactactatcatttattgagcattgactcaaaagacagtccttttatgaaaattatttacttaaatccttacaaagcttctattcattcacccaacacatatttattgagttcctactatgagccaggcattattctaggtgcttaatttagatcaagggacaagacagacaaaatccctgttctggtggcagggctactacatgcaattaacagcacacaactctagggggagccacatacatgggccaccttatgaatggtgtgccctgaggttaagcatcctggcagcccctttctgtgacatttgcattctagtgaagggagtctaataccaatgaagtagatgtcattatcccctgactacagtttaggaaacag

SEQ ID NO: 305523 - DNA, 586 bp, Homo sapiens
agacagccagccctgtggcagccagatggcagtcctgttgctctgtagtggccttggggtcagactaggggcagagctgggctgaaggcaggaaggccaggacaagacaggtgagaagggcaaagtctcctgtaacctggtgagaaaatgtgggctaagccattctcatctggagctgaaggcttggtggagaatggccctcaacattcaagttcacacccatggatttataaaaggcagggctggggggaaaggtttttcccattatacttaataacattatcaacaacaataatcactactaycatttattgagcattgactcaaaagacagtccttttatgaaaattatttacttaaatccttacaaagcttctattcattcacccaacacatatttattgagttcctactatgagccaggcattattctaggtgcttaatttagatcaagggacaagacagacaaaatccctgttctggtggcagggctactacatgcaattaacagcacacaactctagggggagccacatacatgggccaccttatgaatggtgtgccctgaggttaagcatcctggcag

SEQ ID NO: 305524 - DNA, 586 bp, Homo sapiens
agacagccagccctgtggcagccagatggcagtcctgttgctctgtagtggccttggggtcagactaggggcagagctgggctgaaggcaggaaggccaggacaagacaggtgagaagggcaaagtctcctgtaacctggtgagaaaatgtgggctaagccattctcatctggagctgaaggcttggtggagaatggccctcaacattcaagttcacacccatggatttataaaaggcagggctggggggaaaggtttttcccattatacttaataacattatcaacaacaataatcactactatcatttattgagcattgactcaaaagacagtccytttatgaaaattatttacttaaatccttacaaagcttctattcattcacccaacacatatttattgagttcctactatgagccaggcattattctaggtgcttaatttagatcaagggacaagacagacaaaatccctgttctggtggcagggctactacatgcaattaacagcacacaactctagggggagccacatacatgggccaccttatgaatggtgtgccctgaggttaagcatcctggcag

SEQ ID NO: 305525 - DNA, 584 bp, Homo sapiens
ctagggggagccacatacatgggccaccttatgaatggtgtgccctgaggttaagcatcctggcagcccctttctgtgacatttgcattytagtgaagggagtctaataccaatgaagtagatgtcattatcccctgactacagtttaggaaacagagacacataggaattaagtaacttgctgagtttttcagccaaaaatgactgacccatgatttatactgaagtcagtccttgcaattcacctgtgccacgtacttgcctttctctccctggtgggcacagggaagagggagtagccaggctggccagatgagtgctgggctggctggcccagtagaggcaccatgtcctgactgggtggacaaagactgggtaggaggtaacagagaatcccttggtgagtctaacttagctataagaaggcttgctgagagcagctgcctccatgcagagggtggggtgaccggcctttaatccttcccagctgaggatttagtcaaagaagcttgtctctggggatagcctatggtcttgaagggcctgagttagctattagttcacccatttatttaacattcatt

SEQ ID NO: 305526 - DNA, 584 bp, Homo sapiens
ctagggggagccacatacatgggccaccttatgaatggtgtgccctgaggttaagcatcctggcagcccctttctgtgacatttgcattctagtgaagggagtctaataccaatgaagtagatgtcattatcccctgactacagtttaggaaacagagacacataggaattaagtaacttgctgagtttttcagccaaaaatgactgacccatgatttatactgaagtcagtccttgcaattcacctgtgccacgtacttgcctttctctccctggtgggcacagggaagagggagtagccaggctggccagatgagtgctgggctggctggcccagtagaggcaccatgtcctgactgggtggacaaagactgggtaggaggtaacagagaatcccttggtgagtctaacttagctataagaaggcttgctgagagcagctgcctycatgcagagggtggggtgaccggcctttaatccttcccagctgaggatttagtcaaagaagcttgtctctggggatagcctatggtcttgaagggcctgagttagctattagttcacccatttatttaacattcatt

SEQ ID NO: 305527 - DNA, 568 bp, Homo sapiens
agaatgaagagacagaaggacaaaaaaagagatgggaagccacaggggatagtggctaggagctttggtgtcagacagacctgagctcaaatcctagcttggctacttcttactatgtgccttggagcaagttaatctctccacattaagtttgttcaaatgtaaaaatacggtggccaaggtcagagacacacaagggatctccagccatccaagacaggatgcggatctgactcccggatccaaggttggggaaacaaagatggcctgaagcagagtgtgyggcatgagaacaaggcaagaaagcacaagagacccacctccgggatgggagcccccctccttaaattctgtcttgggttctcagagggcagggttatgtggtaggcctgagagcccagctgagggagcaggttggagcagagttaaatggagaccaagtccatggacatctacgggcaggaaacggtcagagaccttgctctcaggctcactgtgaaactctcacaccaggaaccactgttccctcaaaatcaagtggaaggagagtcattccccagtgagcact

SEQ ID NO: 305528 - DNA, 568 bp, Homo sapiens
agaatgaagagacagaaggacaaaaaaagagatgggaagccacaggggatagtggctaggagctttggtgtcagacagacctgagctcaaatcctagcttggctacttcttactatgtgccttggagcaagttaatctctccacattaagtttgttcaaatgtaaaaatacggtggccaaggtcagagacacacaagggatctccagccatccaagacaggatgcggatctgactcccggatccaaggttggggaaacaaagatggcctgaagcagagtgtgtggcatgagaacaaggcaagaaagcacaagagacccacctccgggatgggagcccccctccttaaattctgtcttgggttctcagagggcagggttatgtggtaggmctgagagcccagctgagggagcaggttggagcagagttaaatggagaccaagtccatggacatctacgggcaggaaacggtcagagaccttgctctcaggctcactgtgaaactctcacaccaggaaccactgttccctcaaaatcaagtggaaggagagtcattccccagtgagcact

SEQ ID NO: 305529 - DNA, 568 bp, Homo sapiens
agaatgaagagacagaaggacaaaaaaagagatgggaagccacaggggatagtggctaggagctttggtgtcagacagacctgagctcaaatcctagcttggctacttcttactatgtgccttggagcaagttaatctctccacattaagtttgttcaaatgtaaaaatacggtggccaaggtcagagacacacaagggatctccagccatccaagacaggatgcggatctgactcccggatccaaggttggggaaacaaagatggcctgaagcagagtgtgtggcatgagaacaaggcaagaaagcacaagagacccacctccgggatgggagcccccctccttaaattctgtcttgggttctcagagggcagggttatgtggtaggcctgagagcccagctgagggagcaggttggagcagagttaaatggagaccaagtccatggacatctacrggcaggaaacggtcagagaccttgctctcaggctcactgtgaaactctcacaccaggaaccactgttccctcaaaatcaagtggaaggagagtcattccccagtgagcact

SEQ ID NO: 305530 - DNA, 568 bp, Homo sapiens
agaatgaagagacagaaggacaaaaaaagagatgggaagccacaggggatagtggctaggagctttggtgtcagacagacctgagctcaaatcctagcttggctacttcttactatgtgccttggagcaagttaatctctccacattaagtttgttcaaatgtaaaaatacggtggccaaggtcagagacacacaagggatctccagccatccaagacaggatgcggatctgactcccggatccaaggttggggaaacaaagatggcctgaagcagagtgtgtggcatgagaacaaggcaagaaagcacaagagacccacctccgggatgggagcccccctccttaaattctgtcttgggttctcagagggcagggttatgtggtaggcctgagagcccagctgagggagcaggttggagcagagttaaatggagaccaagtccatggacatctacgggcaggaaacggtcagagaccttgctctcaggctcactgtgaaactcwcacaccaggaaccactgttccctcaaaatcaagtggaaggagagtcattccccagtgagcact

SEQ ID NO: 305531 - DNA, 597 bp, Homo sapiens
atatctcagggagcacttatttctcaagtaaagattgttttggagtcaggagtcctcagaaaaacaatgaagtcaggacttgccttctaaggcaaggacttgaacgacttctaagaagttggagaagaggccctataagccagagaccatcttaaaacatcaaactacaggtcaggcatgttggttcacaactgtaatctcagcactttgggtgtccaagtcgaggacatcacttgagcccaagagtttgagaccagcctggacatcatggcaagactctgtctctacaaaaaataaaactaaattagctagtcatggtggtgcctgcctgtggtcccagctacttgggaggctggggtgggaggattgcttgagctctggagtttgaggctgtagtgagcggtaatcacgcaactgcactccagcctgggcaatagagtgagactccacctcccaaaaaaccattaaactataatacaagagaattccagcaaataatctccttgctcctggtatggcagagagscagactgaaaagagtatgcttgagacactaccttggagcttggtctaagccagcaaaccatagaaaaacct

SEQ ID NO: 305532 - DNA, 496 bp, Homo sapiens
tttttttccatttttaaaaattttctattctcattacatcttcctttctccctacttttccttcccttcccttccagtttgkccttccctctctctctttcttccttttttctttctttttcattctcatttttctgagtagttgctgaagacacagcctgaccctaggggtccaaatatagatgaaacaatcatagctctctagcagttcacctggagggagagagaaaaagagagtaagagaaccaaaatgaaggggaaatattcttaatttttttttttttaaggacagaaactaacttgttgaggaaaaagagaaatatactgggagttctgactgataggaacaaagagaggacagcttcgaaggatgatttgaaaagtaatctatggaatttagctttaaagcaggatcttgggctgtagactactttattattattattttttaagagacagagtgcagtggtgcagtcatggctcactgtagcctcaa

SEQ ID NO: 305533 - DNA, 532 bp, Homo sapiens
tcctggagcctgacagtccccaggagcagcgacaagaagcaggggagggagaggactgctgctggcygctccaccccccacacacataatgtggggtctcgcgtctgcctctctcccgcccctaattagcagctgcctccctccatattgtcccaggccagcgcctcttttgtgctcccagattcctgggtgcaaggtggcctcattagtgcccggagaccgccccatctccagggagcagatagacagacaagggggtgatcaggggcacagtgatccaaccctggcctctgaacgccgcagcggccattccttgggcccagcctggagacggcccccctgcagcaggctaatcttagacttgcctttgtctggcctgggtgtggacgcaagtgcctgtcaattccccgccacctcagagcactataaaccccagacccctgggacgtgggtcacaattgacagcctcaaggttcctggctttttgaaccaccacagacatctcctttcccggctaccccaccctgagcgc

SEQ ID NO: 305534 - DNA, 532 bp, Homo sapiens
tcctggagcctgacagtccccaggagcagcgacaagaagcaggggagggagaggactgctgctggctgctccaccccccacacacataatgtggggtctcgcgtctgcctctctcccgcccctaattarcagctgcctccctccatattgtcccaggccagcgcctcttttgtgctcccagattcctgggtgcaaggtggcctcattagtgcccggagaccgccccatctccagggagcagatagacagacaagggggtgatcaggggcacagtgatccaaccctggcctctgaacgccgcagcggccattccttgggcccagcctggagacggcccccctgcagcaggctaatcttagacttgcctttgtctggcctgggtgtggacgcaagtgcctgtcaattccccgccacctcagagcactataaaccccagacccctgggacgtgggtcacaattgacagcctcaaggttcctggctttttgaaccaccacagacatctcctttcccggctaccccaccctgagcgc

SEQ ID NO: 305535 - DNA, 595 bp, Homo sapiens
ttccacatactgtacacaattattgcttagtttcctagtttatatgtcttaccttttttttttttttcttgagacagagtctcattttgtcgccgaggctgaagtgcagtggtgcaatctcagctcactgcaacatctgccacctgtgttcaaatgattctcctgcctcakcctcctgagactacagacatgtgccaccacgcccggctaatttttgtatttttagtagagacagggtctcaccaagcgggccaggctggtctcgacctcctgactcaagtggtccgcccacctcagcctcccaaagtgttaggattacaggcataatccaccatgtatggccagaaaacataattttgaattaaacgagattatcatgtttttaggaagtagaggaggtaagaggtgataagcaaaaaataaccaaaaagaagagaatgatttatttatgtaggcatattgaacaatatatgtttatagttttatctttaatacagaaaaacacttatttacttcatgcattttaattaactactttatggatttaggttttaaaagcactaaaaagtactacgtgatttttaaaaatgttttg

SEQ ID NO: 305536 - DNA, 492 bp, Homo sapiens
agtgctttttcttctctgtttcctttggccagaggtagttgctaagtgtcagctcctggctgtgaaaaaccgtctttgcctttctggaaggagtagtttgagaaaaaaaatgcttcagtgaaggcatgtggtatacaggcaaagttggtgtgattaatatgtaatacaattaacatattaatatataatatgattaatatataatatagtaagtttttaaagaagttgagggcttttcattttaatgtatgattttcttaaattgcattttaacaagtagaacatcataatgatatagtagtataacattattattcttgccaaaatttattgcgctcctgctctgggcaagtactgctctaggtgctttattatttcattatattttacagacagtgtttcactcttgttgtccaggctggaatgcagtggygcagttatagctcactgcagcctcgaccttctgggctcagtgatcctccggcctcagct

SEQ ID NO: 305537 - DNA, 619 bp, Homo sapiens
aaggatgctcttccagtctggctgccatgaagggagatggactcctgaaaacataccctccacgtggctttatgtgtccctcctccactcttgccagcctggctcacctgttcctgcacctattgttgcaaacagtgggtggttcttttgtctcctcaactcttgagaagtgcttttgtgctggctttcctgacacccacccccacacggccctccagacacacttcatgcttttcacttcctcatacttggtttctgcccaatctaggtagcctttatatgttttgaaatctagagatatgcatctcctaatttgccaaataagacatttgtgagattttctttcattttttctttctctgtgtttgtgtgtgtagtgtgtgtgtgtgtgtgtgtgtgtgtgtgtgtgtgtgtgtgtatactctgtatgtagggtgggggtttcttattgttctttccttattattctccgtaagtttttttgaaagatttccaggcaaagaaatgaataatggagactcacataaacatttatatattacaaacacctaggttaatattaataacattaatcttaaccagtactgggaggcraagaaggaaagtataaaataaaaat

SEQ ID NO: 305538 - DNA, 557 bp, Homo sapiens
caatgcaaagtctttgaggttggaggtaagtcaaacccattcacctattcacttttcattctccagtcaaaggtgaacttaatttgggtagaagagtcttcattaaatcattgattcaaaaaatatattaggcagttatggaaagtctgatgatttgcaaaggaatgctatatgtctctgatatatatgcatatatatgagcgcacatatatgtggtgttttagacacaacaagagaatataaacattaaattcaggatagacattacttttgaagagtaaagaacagagaaggtatacagcaagctggtccaaaccacagcctgcaggcacatgcaggccaggacggctttgaatgcggcccarcataaatttgtaaacgttcttaaaacattattagatttttttgtgattttttgttagctcaatgactatccttagtgttagtgtattttatgtgtggcccaagacaattcttcttctttcagtgtggcccagggaagccaaaagattggacatttctagggtatatggggagctttagctgattctgtaata

SEQ ID NO: 305539 - DNA, 527 bp, Homo sapiens
cactattgtcattcagtttgaagaatttttaaatttccgtcttgatttcatttctgacccaatgatcattcaggagcaggttatttaatatccatgtatttgcatggttttgaaggttccttttggagttgatttccacttttattctgctgtggtctcagagaatgtttgatataatttcaatttccttaaatttattgagacttttgtggcctatcatatggtctgtcttggagaaggttccatgtgctgatgaatcamatgcatattctgtggttgttgggtagcatgttgtgtaaatatctattaagtccatttgttccagggtatagtaaaaatacattgtttctttgttgactttctgtcttgatgacctgtctaatgctgtcagtgaagtactgaagtccccactattactgtgttgccatctatctcgtttcttaggtctagtagtaactgtttataaatttgggagctccagtgtaaggtgcataaatatttagaattgtgacattttcctgttggac

SEQ ID NO: 305540 - DNA, 399 bp, Homo sapiens
gtttatgtgagtccttatgtattaggtaagtctcttgaaggcagcaatagttggttggtgaattcttctccattctgccattccgtatcttttaagtggagcacttaggccatttacattcaatgttagtattgagatgtgargtactattgcattcattatgctatttattgcctgtataccttggatttttatttttttttcctaaattgtatttttgttttatagatcctgtgagatttatgctttaaagaggttctgttttgatgtgtttccagaatttgtttcaaaatttagagctccttttagcagttcctgaagtgctggcttggtaatggcaaattctctcaggatttgtttgaccgaaaaagactgtatctttccttcatttgtgaagct

SEQ ID NO: 305541 - DNA, 627 bp, Homo sapiens
tgtgagttgctcacacatcagctatattcatactgcagcacctcatgttctaaataacaagggcccttttttcactaagagcatgggaagacagtgagactgagctgcccacttgaaccgagcatcatgatttctggtcctagccactattacatggtattacatattgactgtaaagctatacttagaaaatgagcagcatgaaacaatgggtgaacatgagatcatgaggttgccaagcaggaaacactgtagcaacagtgtttacacctatgatactcacagggtgatcctgggcaagtttaagtgtctcttctggagaaacaatcagaccgttaagttctcttgaactcttatattttgagtccaagtcctatattaattaagtcttgtatcttgatcctgcaatatttgacacaactggccattccaccttgtttgratcactgctgctgtgctcattccctttctgtcccaaccctctgcttctcttgccttgtgcacagaccacccttggtctgtcaatgccagtgacacctggggttccatcctcagccttcttttcacaccacgtgctcctgctaggtgaactcacccactccctgtatgctgggcaatcactgcctc

SEQ ID NO: 305542 - DNA, 533 bp, Homo sapiens
aaaaaccacatgaaagggaagtgtgggctaaaagctcagactaaacaataaataatactttcttcagactgaaaatattctcccaaacatctcaccatctgaaagtcaggagctgggagtggrattattctgtagcactgcataggatacatgtgctccttgtcctcttatgtaatgcttcccccagtaaaagccacagaaattgggccctgcaaacttttttaaaagcaaccatgaactgctttgagtgttagggtgcttctgtctcttcaagacagagggctaaactccaatagaggacaatggtcactttccttcatgatgccttcctgtacctaagagtcagctgcaagccagtgcacctgcatcctcacagccctgaaacagcactaggcaattctcttaatctcaaagaaaggaagtgtattcttcagattcactttgaatcaatcagcaaaccaccatacattcactgaacacagcccgaatacacaggcagtctagctgggggaaaaacaaacattaagatacat

SEQ ID NO: 305543 - DNA, 555 bp, Homo sapiens
acttccacctgaatcaactaccctaagatgatagcaaaatgatgctttctactattttcatcattcttttcacatttattacttgacattcttttctgagaaagatctttctttcctcttctcttcctcccttcctcattctctttcttctctgggaaagttttttttcagatttataaccattagatatttcaagttgctaactgtgccttaagcataggtaatagtatatttaacacatacattaaaaatgagctgatatgggagtcatgccatctatycttagacagttacctatttaaagttgtatcactgagcatgaagggagttcttgattttttatttgcttttgtctgtccatattctgtgattgattctgattcactgcgttctaattatacagtggaaaaggatgatgctgtaagctggtaaatcctttctcagtaactgatggccagagtttggaaaacattgatttacaatagggttgtctaactcagtgtttgaataaatgtataactttagggcacctagtgttgcttccctgaaagaatc

SEQ ID NO: 305544 - DNA, 567 bp, Homo sapiens
ccggtgttgtgagtcgggtcaagactgtctttctctggatgcttagattcaaggattccaactcagaagctgttggcccccttgcttcattacacagctagaaaaagcagaagctagtctacaacaagagaaaaaaaataaagcagacctgtagagttaagacctgcagagttaaaggtaagagacacacagggagtcctgttggcattggagctccaggttccatttaatacctaggggccaactaccttctcatccttaggttctgtgraacagcctcatagcttgataaattctgcttttgggttgagttgctgctatttcagtttgcaaaaaaatcccactatccaagacattactctaagagcacatgtctttttttttaagagatggggtctcactatgttgcctaggctggagtgcagtcccactactgatgagcatgggagctttgacctgatcagtttccagtctgggtcagttcacccctccttaggcaacctggtaatcccctgctcctgggaggtcaccatattgattctgaacttagtgcagacacccatttgg

SEQ ID NO: 305545 - DNA, 464 bp, Homo sapiens
agggtctgtatcagtaataataagaaaggaggaagtgacaaaggaagaagagagggaaggaaggtgggggaggaatcgaggaaargaaagaaagaaaatacaatcttaatcacagcttcaggagagcaacagtagctttgtaacctgaaaacctcaaagataagatgtgacatttatgtagacaatggcgagttacaaacaaatgttattcttaggtcactgtgtgcaaaaggttacctagtgaaggaatgcatctctcctgcaattaaaaaccatttgtgtatctctaacctcagccttgtcaaaaacaagccccacaaccgaattctaagttataatagtaaaagcaaaagtaggaatagaaggcaggagtggtccaagagaagcccactttgaagaccagtagagagaaaaaggaagttcttctttaaaagaagaaagaagaaaaacagcactgcccaaaa

SEQ ID NO: 305546 - DNA, 523 bp, Homo sapiens
aaggagtgaaaacaaagtctacacatgactgttgattcaagcacaaaccccacaggcaactatctactaacttggtttctcttccatttcaacttctcttttccccagttatctgttaagagagccagaaaagggtatatattgacagcccccattcacctccaagttttacctttagtagctgcctttataataataataatatctaacattactgagcacttacatatactatttgttmaatcctcataataccaccatgcattagatatggtttaatttattaaattatttactaaatataaatttatttattactttattagctcttacggcttctgtgagtcaggaattcagatgaaacataagaagtataatttatctctgccccatgaggtctggctcagctggagaacttgaagactgcaaagttctgaaggctcattcactcacgtctggtggttgacgctggctatcagctatgggtctaggtggggatatcagttggaacacccacatgtgg

SEQ ID NO: 305547 - DNA, 550 bp, Homo sapiens
gatgccaaaagcaattgcaacagaaacacaaattgacaattggaacctaaataaactaaagagcttctgcacagcaaaagaaactatcaacagagtaaacagacaatctattaaatgggagataatattagcaaattatgcacccaacaaaggtctaatatccagaatctataaggcmcttaaagtaacatgcataaaaaaaacaaccctatcaaaaagcaggcaagggatgcagacatttttcaaaataaggtatagacccagccaacacgcatatgacaaaattttcagtatcactaattattagagaagtgcgaatcaaattcaaaatgagattccatctcacaccagtcagaattgctattgttattattattttttttatttttttttaggttctgggatacatgtgcagaatgtgcaggtttgttacataggtaaatgtgtgtcacagtggtttgctgcacctatcaatccatcacctacgtattaagctccacatgcattagctgtttgtcctgctgctcacctccctctgccccctgacagg

SEQ ID NO: 305548 - DNA, 676 bp, Homo sapiens
attaaaataagtctaaatgcgttcctatgttctcccaccctgtttctttcttccacctaaaggtagtaaacttttagtgtgtggttcatattttcatttttttctttctgaaaagataatcaaaacgatttttttttagcagggatataattggccaacaaaatgtgtttgtatacatagtttygaaagtatcaaccaagacattaaagatactatgtgcttataaaataaaaatgatatattttaaatgtagctattttttctgttacattttaataaattctttaaactgtagaatattaaatactcttggcttgagaaatacgcattattctttacccaagtagagacatataaaagataacatatctatacatttttgaacatttgaagtattcttaatacctttcatctgttaacagtttatatcaattttacttatgtttaggtggattttagataataattatttcaatgaattgccaatcagaaaatctttgaatacgcctgtgtcctgaaagccccttcttccagttgtctcacctttccagaccaaaacaatgatgtatagcttacatgtattgattgatgttttatgtctccctaaaatatataaaaccaagttgtagtctgaccaccttggacacatgttttcagcatattttgaagactctat

SEQ ID NO: 305549 - DNA, 642 bp, Homo sapiens
aatgccctttggctttcaggatgtgatataattctgattaggattccttttaacatgaacaattaaaatagaatagtaaatattaaagagaataatccctattgtttagatatttccatttttaagattgtcagtacctaaagaacagatgcaagacatgcattgttcatgtcaaattaatggttttaaaaataaaatcatataaaaatggtagtatttatcattaatagatgtaatctcttcagaattgacatatacaatttatatttgcaaaatygatgtcaacagacaactggcaatatattacaatttttgtgttttattatcttcaaatcaagaagtttctttggaaataaatgctgaaaaccttaatcacatttttagaatttaacacaaaaatacagatgtaagggaaattttatctgtaccttaaatgaatgagatttacagatatacaaattcatctttaagaagtctgaaagtaatcgttgcataatagttttttattccatgacataacgccttatcagatctctttagaagatacgtctaatagtatgtacattacaattactcttctggggaatataatacctgcttacctggaaatgtaaaaagaacagtttttaatacacttaaaaa

SEQ ID NO: 305550 - DNA, 617 bp, Homo sapiens
actcaatttctttagtcattaggaaaatgcaaattcaatcaacagtgagatatcaytcaacatctattaaaagagttagaattttgaagaactgaccataccaagcactggcaaggatacagaatatctggaagcttaatacacagttggtgggaatgttatatggtacaaccactttgagaaacagttcagcagtttcttaataacttaaacgtatacctaccatataattccactctgagatatttatcaaagagaaataaatgcttgtatccgtacaaatacttgtactctaatgttataccagttttatttgtaatagctaacaactggagacaactcaaatgtccacgaatagatgaacgaataagtgaattgtggtatatacatataataaaatattgtaaccataaaaatgaactatccacatattctacaatgtgaatgaatctcaaaacaattatcctgagtcgaagaagccaggcaataaaaggatatatacaatgtgacttcctttacatagaattatatgacaagtagaattgcacagtaatagaagtcaaatcattttgttgccattggatagggtgggtggagaggagcaaaaggaaaggatt

SEQ ID NO: 305551 - DNA, 617 bp, Homo sapiens
actcaatttctttagtcattaggaaaatgcaaattcaatcaacagtgagatatcactcaacatctattaaaagagttagaattttgaagaactgaccataccaagcactggcaaggatacagaatatctggaagcttaatacacagttggtgggaatgttatatggtacaaccactttgagaaacagttcagcagtttcttaataacttaaacgtatacctaccatataattccactctgagatatttatcaaagagaaataaatgcttgtatccgtacaaatacttgtactctaatgttataccagttttatttgtaatagctaacaactggagacaactcaaatgtccacgaatagatgaacgaataagtgaattgtggtatatacatataataaaatattgtaaccataaaaatgaactatccacatattctacaatgtgaatgaatctcaaaacaattatyctgagtcgaagaagccaggcaataaaaggatatatacaatgtgacttcctttacatagaattatatgacaagtagaattgcacagtaatagaagtcaaatcattttgttgccattggatagggtgggtggagaggagcaaaaggaaaggatt

SEQ ID NO: 305552 - DNA, 666 bp, Homo sapiens
cagctaaatttagagactgggaaattctacaggacaaattatccacattctttaacaaatatgtggcttcttaaaggggtaaagtgaacgtatcagagattagaaatgatatctcaacctaacacaaatatgtgactttattgagttctgcttcaaacaaagcaaatgtaaaactatactttttgagacacaatgaagaaactgaacatgtactgcttactggatgatgttaatgaattatagttaatttggrgatgtaataataaaattatgcttatcttttttctgttaacacactgaagtatttttgggtgaaataatacgtttggaacttgctttctaattactctagaagaaaaagtaagtgtggatggggaatagatgaagctaaaattgcaaagtgttgataatttttaacctaggtgatagataagtaaagattcattataatatattctgttcttttatgtttgaaaattaaaataataaattttaataaatcattgggttaataagcctatttagaatatagaaagccatattgcctagtacctataatatgcctatggaaatattttaactgtagaaaaataacttggttgagaattaatttgcaagccataatataacgtctgtggattcaggttacctaggtataaattctgg

SEQ ID NO: 305553 - DNA, 577 bp, Homo sapiens
gttttccctttttatgttttctcttttcaagatctctctactctcttttaacaattgtttacagacttacagccagcaaacccccaacttatatttattttctctatcgagtctctccagcaaaaaccaactaaataccttttaacactaaattcagttcttgataaacaataaatagccaatgataaattattgcacttaacatgagtctttaaagaaaataaaaatgcaaacatgtacttcytgagagataacattttaaaaacttttagaagctaatagtttcatagacaaaatttatttcattaagctctgttcactattccatattaaacaatgcagcctgtggcactcacacaaataacttcagttttattttagttcttttatgtttttctaagaggtaatgcaagggaaagaaaactaccctttaaagggaatggactttattcttcaatgtttctgtgatacttctttagacagattgaaacaacacatacatgcacacacacacacacacacacacacacacacttacaggaaagatgtactagacggtgtgtgtattaactggcct

SEQ ID NO: 305554 - DNA, 524 bp, Homo sapiens
aaaaagatagacactgtagaaaatataggcaagatatttgaacagacactttacaaaagacaataataatatagccattaagcctataaataagtagtcaaccttattaggaagcttacagtcatggtggaaggcaaaggagagtaggcaccttcttcacaaggaggcaggagagagagcacgcacagaggaaaaaytgccacttttaaaaccatgagatctcatgaaaactccctcactatcatgagaacatgaaagcatgggggaaactgcccccatgatacaatcacctcccaccagatcccttcctctacatgtggagattacaatgcaaaatgagatttgggtggggacaaagagcggaatcatattaacatacaaatagtaaaacatccaatgctcatgaataaaagaatcaatattgttagaatgactatattgtccaaagcactctacagattcaatgcaattcctatcaaattaccaacatcaatttccacagaattagaaaacacagttctaaa

SEQ ID NO: 305555 - DNA, 524 bp, Homo sapiens
aaaaagatagacactgtagaaaatataggcaagatatttgaacagacactttacaaaagacaataataatatagccattaagcctataaataagtagtcaaccttattaggaagcttacagtcatggtggaaggcaaaggagagtaggcaccttcttcacaaggaggcaggagagagagcacgcacagaggaaaaactgccacttttaaaaccatgagatctcatgaaaactccctcactatcatgagaacatgaaagcatgggggaaactgcccccatgatacaatcacctcccaccagatcccttcctctacatgtggagattacaatkcaaaatgagatttgggtggggacaaagagcggaatcatattaacatacaaatagtaaaacatccaatgctcatgaataaaagaatcaatattgttagaatgactatattgtccaaagcactctacagattcaatgcaattcctatcaaattaccaacatcaatttccacagaattagaaaacacagttctaaa

SEQ ID NO: 305556 - DNA, 524 bp, Homo sapiens
aaaaagatagacactgtagaaaatataggcaagatatttgaacagacactttacaaaagacaataataatatagccattaagcctataaataagtagtcaaccttattaggaagcttacagtcatggtggaaggcaaaggagagtaggcaccttcttcacaaggaggcaggagagagagcacgcacagaggaaaaactgccacttttaaaaccatgagatctcatgaaaactccctcactatcatgagaacatgaaagcatgggggaaactgcccccatgatacaatcacctcccaccagatcccttcctctacatgtggagattacaatgcaaaatgagatttgggtggggacaaagagcrgaatcatattaacatacaaatagtaaaacatccaatgctcatgaataaaagaatcaatattgttagaatgactatattgtccaaagcactctacagattcaatgcaattcctatcaaattaccaacatcaatttccacagaattagaaaacacagttctaaa

SEQ ID NO: 305557 - DNA, 481 bp, Homo sapiens
cataagatcgtgtcatcagcaaatagagaaattttcacttcttccttttctattagaaagtcttttatcgctttttcttgcctaattactctgggtagtactttcaatactacattgaaaagacgtggtcacagtgggctttattgtcctgtccatgatctcagacaaaaagctctctacttttcaacatcaagagtgatrttagctatgtgtttgttatctatggtctttactctgttgaggtatatgtcttctatacctaatatgttgagagtttttatcataaaagttggctgaattttgttatattctttttttgcatctattgatatgataatacaatttttagttttcattttgttaatgtgatgtatcatatatattgatttgtgatggttgaatcatccttgcatgccagggataaattccacttgaacacggtgaatgattcttttaatgtgttgctaaattcaatttccaa

SEQ ID NO: 305558 - DNA, 481 bp, Homo sapiens
cataagatcgtgtcatcagcaaatagagaaattttcacttcttccttttctattagaaagtcttttatcgctttttcttgcctaattactctgggtagtactttcaatactacattgaaaagacgtggtcacagtgggctttattgtcctgtccatgatctcagacaaaaagctctctacttttcaacatcaagagtgatgttagctatgtgtttgttatctatggtctttactctgttgaggtatatgtcttctatacctaatatgttgagagtttttatcataaaagttggctgaattttgttatattctttttttgcatctattgatatgataatacaatttttagttttcattttgttaatgtgatgtatcayatatattgatttgtgatggttgaatcatccttgcatgccagggataaattccacttgaacacggtgaatgattcttttaatgtgttgctaaattcaatttccaa

SEQ ID NO: 305559 - DNA, 530 bp, Homo sapiens
cgattccagtgaaggataggcaagaggtcccctaacacaaggggttgagccacaaggaatccctcgccaaataggcgagaaatccctaatatgatggggttgagccacagcaatgccccgttaggcaagaaattcctaatatgagagattgcgcctagccaagacccaatatgggaaatattacaagcaaaaatggtaagaatagtaacaaagatatataccacctgatagtcccctaagtctcatgaaaaaggatatgaatagtaacaaagatataccacctgatagtcccctaagtctcatgctaaaatgttgggaagatartgaaagaactaaacataagaaaaagcaacaaatgataaaatattgcttttctatttggactcaaagacctaacctcaatccgtcaatcttctggccaaagtttgggtcaactgaggatatactatgtcaactttcagtttaacatgtaaataataaaagcccagtttctcaagaagaactggactatgctcttttttggaggcaaa

SEQ ID NO: 305560 - DNA, 530 bp, Homo sapiens
cgattccagtgaaggataggcaagaggtcccctaacacaaggggttgagccacaaggaatccctcgccaaataggcgagaaatccctaatatgatggggttgagccacagcaatgccccgttaggcaagaaattcctaatatgagagattgcgcctagccaagacccaatatgggaaatattacaagcaaaaatggtaagaatagtaacaaagatatataccacctgatagtcccctaagtctcatgaaaaaggatatgaatagtaacaaagatataccacctgatagtcccctaagtctcatgctaaaatgttgggaagataatgaaagaactaaacataagaaaaagcaacaaatgataaaatattgcttttctatttggactcaaagacctaacctcaatccstcaatcttctggccaaagtttgggtcaactgaggatatactatgtcaactttcagtttaacatgtaaataataaaagcccagtttctcaagaagaactggactatgctcttttttggaggcaaa

SEQ ID NO: 305561 - DNA, 607 bp, Homo sapiens
cccagcctaagtcctcctctgtgaaaggaatccaagctcctmattcgccaggtggcttttgacaggctagcgacatcaaggatctgcctcaacatgttgtcgttgtcgtgcagcctctagtgcgcccccacagcagaaaaagcccatgctctgccgcagcctatgcctaagcagactacattatgggacatatgccttacttttgccagggtcaagtaatacaggcttcagatgcggctccaagcagctaggcatccccgcggctaagtttcctgaacaagtagtagataatctttcagctgatatatccgctagcatttattatgggtcaggccagtattaaaagtgaaaatatccaccagaaaagactttgattatttaaagtcacttatattaaaatgtaccaccagaaaagtattacatgtgtataagtacgagtttaaaagtatagtttaacattaatgactgataattcgcttaatctagcaagtttcttaatgagatatccaaagctaaaaagaaagcacacgtgtttagatttaactgattacaaacgttcggccaaacttagaagaaaccctcttcaggaatgattaagggaaaaaga

SEQ ID NO: 305562 - DNA, 607 bp, Homo sapiens
cccagcctaagtcctcctctgtgaaaggaatccaagctcctcattcgccaggtggcttttgacaggctagcgacatcaaggatctgcctcaacatgttgtcgttgtygtgcagcctctagtgcgcccccacagcagaaaaagcccatgctctgccgcagcctatgcctaagcagactacattatgggacatatgccttacttttgccagggtcaagtaatacaggcttcagatgcggctccaagcagctaggcatccccgcggctaagtttcctgaacaagtagtagataatctttcagctgatatatccgctagcatttattatgggtcaggccagtattaaaagtgaaaatatccaccagaaaagactttgattatttaaagtcacttatattaaaatgtaccaccagaaaagtattacatgtgtataagtacgagtttaaaagtatagtttaacattaatgactgataattcgcttaatctagcaagtttcttaatgagatatccaaagctaaaaagaaagcacacgtgtttagatttaactgattacaaacgttcggccaaacttagaagaaaccctcttcaggaatgattaagggaaaaaga

SEQ ID NO: 305563 - DNA, 565 bp, Homo sapiens
atatttgctgtattttgtgtcctcccacctgtattgttattttgytccattttctttatctctgcacatgtggcccatctgaaatgattgaccaagtggttctggagattctgtaaaaacaagataatcttccttatactttgtatcactttgtcattttctttttcttcctttcctttgggaatattaatatatctcttagagtttgaaaaggaaacatggtttaacaaattgaaatctcaatgtgagttctttgataccttggttctagatctaatgtaactgtgtgaagttgatgtagaaatattggggtctgtttcagaaagcctgctgatctctgccacccaacacttggtctctagggcacaagatgcaacttaaaataaaatgttttccactatctttcccagtcctcttggtttccccctgcttcccttttatttccttccctcttccctatctgtctgtctgtctctctctcccatctctctctatctctatcatctctgtctctatctctatctttatctctatctccatctctatctctatgtctacctctatc

SEQ ID NO: 305564 - DNA, 565 bp, Homo sapiens
atatttgctgtattttgtgtcctcccacctgtattgttattttgctccattttctttatctctgcacatgtggcccatctgaaatgattgaccaagtggttctggagattctgtaaaaacaagataatcttccttatactttgtatyactttgtcattttctttttcttcctttcctttgggaatattaatatatctcttagagtttgaaaaggaaacatggtttaacaaattgaaatctcaatgtgagttctttgataccttggttctagatctaatgtaactgtgtgaagttgatgtagaaatattggggtctgtttcagaaagcctgctgatctctgccacccaacacttggtctctagggcacaagatgcaacttaaaataaaatgttttccactatctttcccagtcctcttggtttccccctgcttcccttttatttccttccctcttccctatctgtctgtctgtctctctctcccatctctctctatctctatcatctctgtctctatctctatctttatctctatctccatctctatctctatgtctacctctatc

SEQ ID NO: 305565 - DNA, 565 bp, Homo sapiens
atatttgctgtattttgtgtcctcccacctgtattgttattttgctccattttctttatctctgcacatgtggcccatctgaaatgattgaccaagtggttctggagattctgtaaaaacaagataatcttccttatactttgtatcactttgtcattttctttttcttcctttcctktgggaatattaatatatctcttagagtttgaaaaggaaacatggtttaacaaattgaaatctcaatgtgagttctttgataccttggttctagatctaatgtaactgtgtgaagttgatgtagaaatattggggtctgtttcagaaagcctgctgatctctgccacccaacacttggtctctagggcacaagatgcaacttaaaataaaatgttttccactatctttcccagtcctcttggtttccccctgcttcccttttatttccttccctcttccctatctgtctgtctgtctctctctcccatctctctctatctctatcatctctgtctctatctctatctttatctctatctccatctctatctctatgtctacctctatc

SEQ ID NO: 305566 - DNA, 565 bp, Homo sapiens
atatttgctgtattttgtgtcctcccacctgtattgttattttgctccattttctttatctctgcacatgtggcccatctgaaatgattgaccaagtggttctggagattctgtaaaaacaagataatcttccttatactttgtatcactttgtcattttctttttcttcctttcctttgggaatattaatatatctcttagagtttgaaaaggaaacatggtttaacaaattgaaatctcaatstgagttctttgataccttggttctagatctaatgtaactgtgtgaagttgatgtagaaatattggggtctgtttcagaaagcctgctgatctctgccacccaacacttggtctctagggcacaagatgcaacttaaaataaaatgttttccactatctttcccagtcctcttggtttccccctgcttcccttttatttccttccctcttccctatctgtctgtctgtctctctctcccatctctctctatctctatcatctctgtctctatctctatctttatctctatctccatctctatctctatgtctacctctatc

SEQ ID NO: 305567 - DNA, 585 bp, Homo sapiens
cttctccatctacatgaaactcagatcagtcagtcaagcccagacatctttgattggcaaagtatatagatttcttcaagtcttctttcctctacatctctcctgtcctcaaacaactctcaagtagtatccattgaatctttcaaaattgttcttgacattaactgcaaagagtatttccccaatcgttatcactctagtaaccacatttattgcagcttcatttttgtgtgcactggarcattcatataaatccaaatacttacccaggcagcaggatgtcagagataaatgagcaggcaaagatgtttttctctaaagttatacaagtttcacataaatatagactagaaaggataacaggacatttgagattcagtccattcgacaggtctaactaaagttaagttttgtaaaatgtataattatgtcttgtctattttatgtcttttatcacattgaagtcttgaattaaacattttgtgattatttaataaaatttatggcagaatattcacattttttcctgagttcatagtttttgaatcttacatttattctcttcctctataactttatctttat

SEQ ID NO: 305568 - DNA, 585 bp, Homo sapiens
cttctccatctacatgaaactcagatcagtcagtcaagcccagacatctttgattggcaaagtatatagatttcttcaagtcttctttcctctacatctctcctgtcctcaaacaactctcaagtagtatccattgaatctttcaaaattgttcttgacattaactgcaaagagtatttccccaatcgttatcactctagtaaccacatttattgcagcttcatttttgtgtgcactggagcattcatataaatccaaatacttacccaggcagcaggatgtcagagataaatgagcaggcaaagatgtttttctctraagttatacaagtttcacataaatatagactagaaaggataacaggacatttgagattcagtccattcgacaggtctaactaaagttaagttttgtaaaatgtataattatgtcttgtctattttatgtcttttatcacattgaagtcttgaattaaacattttgtgattatttaataaaatttatggcagaatattcacattttttcctgagttcatagtttttgaatcttacatttattctcttcctctataactttatctttat

SEQ ID NO: 305569 - DNA, 601 bp, Homo sapiens
atcaagtttaaggaaacatcaaaggctgggattgaaattatcctcaaagtagacagatgtctggaaaggaatcaaagaacatcgtgaccacaatttaataccttgggtttgtagaatgaatgcagtctatggagaggagaaaacggtaaacagtaatatgatgtaatggyacatctttcttctagcacaagcagctacgatggacagaatccccacaaatgtaggtccttttttctttttcagtgagccagctcgcttaccgaaacacataaaataagctctatgccatagagcttcagcccagagtgagtcttcaattattaacaatatggtggtgtgtagctttattccagagcagatagctaataaatgaaaaacatagatgtcagctttcctttttaaacttgctgagttacgatattaatagcatttttaaaataatacttaaataaatagtaagctatcagatgctaggtaatgcttcaagtcctagactctgctacaaagttcctcaagtcagaaaatctttgaaaaatatccttacttcggtttttttttttgctttttgtttgttttctgaattaaaactgtattaagcagg

SEQ ID NO: 305570 - DNA, 601 bp, Homo sapiens
atcaagtttaaggaaacatcaaaggctgggattgaaattatcctcaaagtagacagatgtctggaaaggaatcaaagaacatcgtgaccacaatttaataccttgggtttgtagaatgaatgcagtctatggagaggagaaaacggtaaacagtaatatgatgtaatggcacatctttcttctagcacaagcagctacgatggacagaatccccacaaatgtagrtccttttttctttttcagtgagccagctcgcttaccgaaacacataaaataagctctatgccatagagcttcagcccagagtgagtcttcaattattaacaatatggtggtgtgtagctttattccagagcagatagctaataaatgaaaaacatagatgtcagctttcctttttaaacttgctgagttacgatattaatagcatttttaaaataatacttaaataaatagtaagctatcagatgctaggtaatgcttcaagtcctagactctgctacaaagttcctcaagtcagaaaatctttgaaaaatatccttacttcggtttttttttttgctttttgtttgttttctgaattaaaactgtattaagcagg

SEQ ID NO: 305571 - DNA, 601 bp, Homo sapiens
atcaagtttaaggaaacatcaaaggctgggattgaaattatcctcaaagtagacagatgtctggaaaggaatcaaagaacatcgtgaccacaatttaataccttgggtttgtagaatgaatgcagtctatggagaggagaaaacggtaaacagtaatatgatgtaatggcacatctttcttctagcacaagcagctacgatggacagaatccccacaaatgtaggtccttttttctttttcagtgagccagctcgcttaccgaaacacataaaataagctctatgccatagagcttcagcccagagtgagtcttcaattattaacaatatggtggtgtgtagctttattccagagcagatagctaataaatgaaaaacatagatgtcagctttcctttttaaacttgctgagttacgatattaatagcatttttaaaataatacttaaataaatagtaagctatcagatgctaggtaatgcttcaagtcctagactctgctacaaagttcctcaagtcagaaaatctttgaaraatatccttacttcggtttttttttttgctttttgtttgttttctgaattaaaactgtattaagcagg

SEQ ID NO: 305572 - DNA, 473 bp, Homo sapiens
aattaaaatgaagtctatttatctggttataatacaggcataccttagacatagcacagatttggtttcagaccactgcaataacgtgagtcacatgaattttgggtttctcagtgcacataaaatgtatgtttacactataccatggtctattaagtatacaatagcattatgcctaaaaaatatatagacctttttaaaaatatgctattgctaaaaaacgctagygattatctgagccttccgtgagccataatctttttgctggtggagagtctttgactgctgttgactacttagggtggtggttgctgaagtttggagtgattgtggcaatttcttaaaataggacaataaatgttgccccattgattgacttttactttcatgaaagatttgcctgtggtatgtaatgctatttgatagcattttacccacagtgaagcagctttcagagttaatcctctcaaacc

SEQ ID NO: 305573 - DNA, 473 bp, Homo sapiens
aattaaaatgaagtctatttatctggttataatacaggcataccttagacatagcacagatttggtttcagaccactgcaataacgtgagtcacatgaattttgggtttctcagtgcacataaaatgtatgtttacactataccatggtctattaagtatacaatagcattatgcctaaaaaatatatagacctttttaaaaatatgctattgctaaaaaacgctagcgattatctgagccttccgtgagccataatctttttgctggtggagagtcttygactgctgttgactacttagggtggtggttgctgaagtttggagtgattgtggcaatttcttaaaataggacaataaatgttgccccattgattgacttttactttcatgaaagatttgcctgtggtatgtaatgctatttgatagcattttacccacagtgaagcagctttcagagttaatcctctcaaacc

SEQ ID NO: 305574 - DNA, 473 bp, Homo sapiens
aattaaaatgaagtctatttatctggttataatacaggcataccttagacatagcacagatttggtttcagaccactgcaataacgtgagtcacatgaattttgggtttctcagtgcacataaaatgtatgtttacactataccatggtctattaagtatacaatagcattatgcctaaaaaatatatagacctttttaaaaatatgctattgctaaaaaacgctagcgattatctgagccttccgtgagccataatctttttgctggtggagagtctttgactgctgttgactacttagggtggtggttgctgaagtttggagtgattgtggcaatttcttaaaataggacaataaatgttgccccattgattgacttttactttcatgaaagatttgcctgtggtatgtratgctatttgatagcattttacccacagtgaagcagctttcagagttaatcctctcaaacc

SEQ ID NO: 305575 - DNA, 577 bp, Homo sapiens
tctgactagcctcctatttgccatcttaatctcagtcttgattctgtgtttgtatttttatctttcttgactgaatagtgtataaagaaatgtatcacactatgattttttttcaaagtagcacatttttggttttgttttttttcctttttctgttcattttctatcttattgagttcggctcatttctattattttcttccttctattttttgaatatgcttttcccatctttttctagatttgtaaggcagaagcttatagaattgatttcagactctcatttttttcctaataaaaataattaatatgcttaatgctccattcacagcaatctgggctttttctaccttgcttctccaaattcttcaagcttctatctattacccagttcaaaaaccacttccatattttcaggtatttgttgtagcaacaactctactcccartatcaatcttcctggtactgttttgtgctactataacaggatatcagagactgggtaatttataaactatagaactttatttggctcacagctctggaggctagaaagtccaaggtcaagtgacctgct

SEQ ID NO: 305576 - DNA, 494 bp, Homo sapiens
gcaacaactctactcccagtatcaatcttcctggtactgttttgtgctactataacaggatatcagagactgggtaatttataaactatagaactttatttggctcacagctctggaggctagaaagtccaaggtcaagtgacctgcttctggtgaaggccttgtcactgggtcatctcatggcagaaggcagaagggcaagagtgtatgtgcatgagaaagagagaagagagagaattagaaatggagagttgaatctgcttttataacaaacccactcccacgatagcagcactaattcattcatgagggcagggcccatgtgacataatcgcctcttaaaggtcctacctcccaatactgttgcattggggtttaagtttccaacacatgaatcttgaggkacattcaaaccatagcagccatattatactgccatcattctactttaagttattgtgcccttctttatacaattaattccccaaaagcag

SEQ ID NO: 305577 - DNA, 594 bp, Homo sapiens
tgacttgtttatgaaatttttcctctttggtcagttgcttgacgatctgatcagtgccgtgttattgcttagcaacgactgttgtattgaggtttccaagtttctccagaactgttttgycaggtcccaagctggcagaactgaatgcctttagcgtcctatttctcctgactatgcggccaatgtcatcctccattattttgtttccaaataagcagccagatccttagtagctcattgactttcagaattcattgagaacagaaagacaaggtatcttctggtattttgagaaaatatatgtcctttgaaaagttagctttaggagatacacctaatgctaaatgacgagttaatgggtgcagcacaccagcatggcacatgtatacatatgtaactaacctgcacattgtgcacatgtaccctaaaacttaaagtataataataataaaataaaataaaaaataaaaaaagagaaaagttaatgctaaacagagaatagaagtaagaaaatgcagtgtctttgaattggaaaaagaaagattgtacttcctctccaccaacaaaaagacagaagaaagaggagaacaaatg

SEQ ID NO: 305578 - DNA, 557 bp, Homo sapiens
catgaggcctccattacaagccctaactcccagacaacatttctagacacaccctgggccaagatggaaacccccaaccttgaagggaaagacctgatcctggcatgactcatcatctgctgactaacgagcccttgtgttctgaataaccaccagaaatacccagggagtatgccatgggccttgggccttcagacatacatgctggcttcaagggtgacctagcacatkcctagctttagtggttatggtaaaaataaaaataaaaataataaaacacctcctgtttgaggaaatcagaggtaaaagtaaagggtaactttctcttgcactccaggtaccagcttggtcatagtggggtagagtaacaagcagcctcttggagtccctaagtccaggcctaggctcttagacaacatttctggacctgcctgggctagaggggagccccctgccctgaagggtgagtcccaggcctggcagcattcacgataagctgactaaagagctcttgggctttaagtgaacattggtggtggctgagcagttatcttgta

SEQ ID NO: 305579 - DNA, 557 bp, Homo sapiens
catgaggcctccattacaagccctaactcccagacaacatttctagacacaccctgggccaagatggaaacccccaaccttgaagggaaagacctgatcctggcatgactcatcatctgctgactaacgagcccttgtgttctgaataaccaccagaaatacccagggagtatgccatgggccttgggccttcagacatacatgctggcttcaagggtgacctagcacatgcctagctttagtggttatggtaaaaataaaaataaaaataataaaacacctcctgtttgaggaaatcagaggtaaaagtaaagggtaactttctcttgcactccaggtaccagcttggtcatagtggggtagagtaacaagcagcctcttggagtccctaagtccaggcctaggctcttagacaacatttctggacctgcctgggctagaggggagccccctgccctgaagggtgagtcccaggcctggcagcattcacsataagctgactaaagagctcttgggctttaagtgaacattggtggtggctgagcagttatcttgta

SEQ ID NO: 305580 - DNA, 626 bp, Homo sapiens
ggtggcagatggctacataacgatcataggccatgaccatgaatgtgcaagactccatggctaggaaacaattcatgatgtacatctggaggaagcaggcagggaagctgatgggcctgaggtcaaaccagaagatggtcaggaccttggggatgacagtgaggcagagcacgatgtccagcagggagaggaggctgagcaggtagtacaggggctggtgcagagaggcctccagccagatggtcrtcaggagggtggtgttggcccctacggccaagaggaaaaggaggctgaggggcagggacagccagtgctgccagctgggggatctgacaaaacaattcaagaggaagtctgaagcttcagtggagagggtgtcatttcggtgtgttgtcatattttcccatatattttactgctttctttcagtgatctggaaaattatgattacaaactagctgtggattcttgatacacaaagatagcacaatttgtttgtcataggtacaacttgtggtttctagcaggttatgtagagccaagcgaattcatctgtttttcctcagtgtcatgtcactggggtattcctatcactttaaacagtacagctgtctgaggtgacatga

SEQ ID NO: 305581 - DNA, 615 bp, Homo sapiens
attttcaatagaattgttttttttagagaaactaaaaaggagaaaacacttaggaaacaactttagtgtgacaggtgagactctaaatttctacccataggtttcttcttcacaattttctttttaatgtacacatagcctaccatatctacaagttgactattgcaataagctcaaataaatagcagagcctggcacaaggaagggactcagataaatgtccctagtccccatgtccccatgacatccttattctaacctttctgctgcacttattttgcttagagattttttaaatcatacatctaaaataaatttagttaacttgtattttgtctaaaagttcatttttatttagtaggcatagrttccaccaaataattgccttaatatctctctattttttagatgttcatatttttaggcttcctaacttttgggagaaacagctttaaaaggagagtgggcacttccacatagctaacagggagaaatgcttgtcattagacatgatgaaaaattggttcttcttattgtaattgtgtgagggtgacgaagttcacctttgaagtccttccgtctccttccagtttccttttccatcttgactgtaat

SEQ ID NO: 305582 - DNA, 553 bp, Homo sapiens
ttccaccaaataattgccttaatatctctctattttttagatgttcatatttttaggcttcctaacttttgggagaaacagctttaaaaggagagtgggcacttccacatagctaacagggagaaatgcttgtcattagacatgatgaaaaattggttcttcttattgtaattgtgtgagggtgacgaagttcacctttraagtccttccgtctccttccagtttccttttccatcttgactgtaatgatatagccacacatttccctctctcctgacagtagttcagtgttgccattattcccttatcatttaaccctcttccctggcattctgttaggtaccagcatcacaaaatttaataagaaactgtccttattttcactaaaacaaacctataactactctgggagatgatgggtgtaacgagaatgaatgatatgagcaatgtcagagatatgcacaaattattaggagactgcagaggagagttgagtgtgacataggggataggctggaaaaatatcattataaatagggtgatgtggtaccca

SEQ ID NO: 305583 - DNA, 520 bp, Homo sapiens
aacgcctccaatccctgctgcagcggcagaagcagagggagagctggaggagtcttgaacccctaaatccatagtccgtgttgctttgaaggaacctccgggcccatcttggaagaatgtgtgcagagcagcaggctggtttcaaagcaggactccaccctgttgagcacacagcctctcactgaacctgtttcacctgactctcccttccactccaggtgctctttcaggatgcaaacctttcccattccaaatttggaataaagtagcaacacactgctgtttycagttttctgtacaaacatgaaaattctgaatgcagaaaaacttaagaaatgaattaaggaatgaaaatatttacaatttaattggtagggctttatttgataaaattaagatattctgcgacagatacatcgttgtatgcaacaccattgcaagatttagatatgatatgtaaagttcatttattttcaaattacagtaattggtttaagattttagtgacaattctagttac

SEQ ID NO: 305584 - DNA, 586 bp, Homo sapiens
ttccatttatttgtgtcatctctgatttctttcagcagtgtttcgtagttctcttgtagagatcttttgcctccttggttagctgtattcctaggtatttcattttatttgcagctactgtaagtgggattgtgctcttgatttcattctcagcttagatgttrttggtgtatagaaatgctactgatttttctacactgacccaaccatctggtgtctttaaatgatccatctcacatgtaatgatatccacaggctcaaagtaaagaaatggagaaagatgtaccatgaaatggaaaatgaaaaaaagcatcgatcactattcttgtatcagataaaacagactttaaaccaataaaaattaagaaggacagcacagggcatgacataatgataaagggtacaatctaacaggaagccttaactatcctagatgtgtacattttcaacattggggcatctatattcataaaacagctttttcttggcccacagaaagagtaaaacaaccacacaataatgggatatttcaacaccccacggacagtcttagccagatcattaaggcaaaaatctaacaacaaag

SEQ ID NO: 305585 - DNA, 586 bp, Homo sapiens
ttccatttatttgtgtcatctctgatttctttcagcagtgtttcgtagttctcttgtagagatcttttgcctccttggttagctgtattcctaggtatttcattttatttgcagctactgtaagtgggattgtgctcttgatttcattctcagcttagatgttattggtgtatagaaatgctactgatttttctacacygacccaaccatctggtgtctttaaatgatccatctcacatgtaatgatatccacaggctcaaagtaaagaaatggagaaagatgtaccatgaaatggaaaatgaaaaaaagcatcgatcactattcttgtatcagataaaacagactttaaaccaataaaaattaagaaggacagcacagggcatgacataatgataaagggtacaatctaacaggaagccttaactatcctagatgtgtacattttcaacattggggcatctatattcataaaacagctttttcttggcccacagaaagagtaaaacaaccacacaataatgggatatttcaacaccccacggacagtcttagccagatcattaaggcaaaaatctaacaacaaag

SEQ ID NO: 305586 - DNA, 586 bp, Homo sapiens
ttccatttatttgtgtcatctctgatttctttcagcagtgtttcgtagttctcttgtagagatcttttgcctccttggttagctgtattcctaggtatttcattttatttgcagctactgtaagtgggattgtgctcttgatttcattctcagcttagatgttattggtgtatagaaatgctactgatttttctacactgacccaaccatctggtgtctttaaatgatccatctcacatgtaatgatatccacaggctcaaagtaaagaaatggagaaagatgtaccatgaaatggaaaatgaaaaaaagcatcgatcactattcttgtatcagataaaacagactttaaaccaataaaaattaagaaggacagcacagggcatgacataatgataaagggtacaatctaacaggaagccttaactatcctagatgtgtacattttcaacattggggcatctatattcataaaacagctttttcttggcccacagaaaragtaaaacaaccacacaataatgggatatttcaacaccccacggacagtcttagccagatcattaaggcaaaaatctaacaacaaag

SEQ ID NO: 305587 - DNA, 571 bp, Homo sapiens
agcaaacacatggaattaatccaggtgtccatcaatggtagattggattaaaaaaagtggtgcatatatmcaccatggaatactatgcagccataaaaagaatgaaatcatattctttgcagcaacagagatggagccaaaggtcataattctaagcaagttaacacaggaaacgaaaatcaaatgttgcatggtctcacttataaatggaagctaaacaacacatggacataaatatgggaacaaaagacagtgtggactattagagggtggagggaggaagtaggctgaaaaactgcctatcaggtactatgttcactacctgagtgatggaattcacaccccaaaccttagcatcatgcaacagccccatgtaacaaacctgcacaagtaccccctgtatctgaaataagagttgaaatttactgtatatttcaaaatagctaaaagagaggattttcttttttaaattttattattattatactttaagttttagggtacatgtgcacaatgtgcaggtttgttacacatgtatacatgtgccacgattgtgtgctgcacccaataa

SEQ ID NO: 305588 - DNA, 277 bp, Homo sapiens
tttttctgtatttaggttttctgcaaaccaaaagggtggagtttgggctaaaactagattgaaaatattgtcagtatgtccattaggacagatttaatttgaaaggtaagcccacaggaactaatgaagtctgttaacatttcagaatacaacggagatctctaagatggtgagcacctagaatagagcaaatatttaatcaattcttgaccacagagttgttcagttcatggccaacrttggcctggagaatggactacatgataacaaagacccc

SEQ ID NO: 305589 - DNA, 545 bp, Homo sapiens
ctcataaatcaagtttgtatggggaaatctttaattctgctacatttctttgctttctgcctacataagtaaaaccttaacttttcaactttggagcattgacctcatttctttggattctgtgtttcccagatggccatccttagctttgcatttgaataaacacttacactggattctcatactattatttcaggttggcattccttttgtcaccattttctcaattatatttatcttttgtgtcttttttcttcagcttgtcagcacccttctggtcccatcttgtttgatttcgtgaaagaaaactactgtccagagaagggatcccartacaatgactctgctcagccatgtttaagtgtggtgttccagtttgattatgaaccatttcagggccagcattatggtgcactcccatctacactgtggacactattacgcttatattaaaattttccgactcccatcaatatatttaaccagaaagttgcattatacatgtcacagatgctttcatatcactgagaaaagaaaaaaacttt

SEQ ID NO: 305590 - DNA, 545 bp, Homo sapiens
ctcataaatcaagtttgtatggggaaatctttaattctgctacatttctttgctttctgcctacataagtaaaaccttaacttttcaactttggagcattgacctcatttctttggattctgtgtttcccagatggccatccttagctttgcatttgaataaacacttacactggattctcatactattatttcaggttggcattccttttgtcaccattttctcaattatatttatcttttgtgtcttttttcttcagcttgtcagcacccttctggtcccatcttgtttgatttcgtgaaagaaaactactgtccagagaagggatcccagtacaatgactctgctcagccatgtttaagtgtggtgktccagtttgattatgaaccatttcagggccagcattatggtgcactcccatctacactgtggacactattacgcttatattaaaattttccgactcccatcaatatatttaaccagaaagttgcattatacatgtcacagatgctttcatatcactgagaaaagaaaaaaacttt

SEQ ID NO: 305591 - DNA, 613 bp, Homo sapiens
gggcaggtgggacaaccacatacaggttagccaaaagaatatggatatagtggggaatgttttggccaaaacgatgtgtcataaaagaaaaaaatgctggtgtgtaaaagcacagcataacacagacatgagaaccacaggtattgaaggcctttagtcggacatcttgagagggaaggcgaaaaacagctckaaggataagcacataggaagaggcaattaagatcacatccacaataatataagaaatcaccatgagcccatagattatgttgatcttaatgggtgcacaggccaacccggccagacccctgtgctcacagtatgtgtgaggtacgatgttatgcccacagaatggcagacgcagaatgagaaacacaaatggggttacaagaactaaatttcttccaacaaccacagaagctaggatactgatggttttattggtgaggatcatggtgtactggagagggttgcagatggcaacaaagcggtcataagccatgaccaccaacagaacagtctccatgcctgtaaacatgtgaataaagaacatctgaagaaggcatcccccaaagctgatctcttggaggttgaaccagaagattcctag

SEQ ID NO: 305592 - DNA, 553 bp, Homo sapiens
aactcagccaatatcatattgaatgggtaaaagttgaaaacattctccctacaaaccagaacaagacaagatgcccacttttagtcttcctttcaacacactactgaaagcactattcagagcaaacaggcaagagaaagaaataaaaggcatcaaaattggaaaagaggaagtcaaattctctgtttgctaataatataatgttatgtttagaaaattttaatgactcctccaaaatactcttagatttgataaataaattcagtaaggtttcaggatagaaaatgaatgttcaaaaaccaggagctccttgggaaatctttccacagtgcctgaaataatttacattctcaccaacagtgtataagcattycgttttctctgaagcctctccaggtttttgattttttaataatagccattttgactggtatgagatggtatctcattgtggttttgatttgttttctctgatgattggtgatgctgagcatttttcatatgtttgtttgtctcttttatgccttcttttgcgaagtgtctgtttatgtcc

SEQ ID NO: 305593 - DNA, 610 bp, Homo sapiens
attattacatgtgataaaagtaagtttaaatagaagaatctacaggaaaatctaaggctgcttattggcaatattagtgaaggttctagaaagcatagttagcaaactcaagctgaccccttaaactaagacaaatatataggcacagtttagaaattccacaagagactataaggatagtaagtgtgggaatgtttactctggggtccaaagaggagaaggagttcctggcatctggaggcccagagagcattgcagatagaagttgcaatttatttggaggtactcacagagcccgtggtgacctgcaggtcacctgcaatgaaggagcaggtgggaaccagaataaatatctcgacctcactcacttccccctcacctgctggtgcttccyattttctgaacccaagcagattctatgggacaaaagaggctattgatacagtacatagtcatgaatctcttaggacacagagtatagaatggacctagagaggccgaaaggagatctccagcacattggcccacataaacaaagggctggaggaaaattctgaacaaacatgaggcggccaatatttttatatattctcctttcaattactattgt

SEQ ID NO: 305594 - DNA, 577 bp, Homo sapiens
taagcatcagaatcacctggagggctttttaacagattactggacccctcttcaagagcttctgattaaggtggtcttagttagtgtccaagaaatgtcatttataacaagttaccaggtgatgctgatgctattggtccagggaactcattttgaaaaccgctgataactcacgtaacagaaagatagattggcctttggaaaaatagraaaaaaaagaatggataatcttgaaataagcagattgaggcaggctatgtagattgtatgttaataaatctaggctatgtactatagtggtgactaaagctagacaggaaagtctcctcataagaggaaatatgaagaaagacatagagaagaaagcatgcagaaagtttgaagtgcagtttgactgcagtgtggagatgataatactgtaaagataggttaaaattaatgtttaagattcttcactgcattttatggaataaagacttttttcataaggatatggagcactactgaaattttattcttatggctcaggggtcggtgccctttttctataaagagagagagagttaatatttttaat

SEQ ID NO: 305595 - DNA, 577 bp, Homo sapiens
taagcatcagaatcacctggagggctttttaacagattactggacccctcttcaagagcttctgattaaggtggtcttagttagtgtccaagaaatgtcatttataacaagttaccaggtgatgctgatgctattggtccagggaactcattttgaaaaccgctgataactcacgtaacagaaagatagattggcctttggaaaaataggaaaaaaaagaatggataatcttgaaataagcagattgaggcaggctatgtagattgtatgttaataaatctaggctatgtactatagtggtgactaaagctagacaggaaagtctcctcataagaggaaatatgaagaaagayatagagaagaaagcatgcagaaagtttgaagtgcagtttgactgcagtgtggagatgataatactgtaaagataggttaaaattaatgtttaagattcttcactgcattttatggaataaagacttttttcataaggatatggagcactactgaaattttattcttatggctcaggggtcggtgccctttttctataaagagagagagagttaatatttttaat

SEQ ID NO: 305596 - DNA, 605 bp, Homo sapiens
ggcaatttcaaggtcaatgctatttatggtctgatggttgctctcctgattggtgtgtttgatatctgctgtatctctgtatcttacactatgattttgcaggctgttatgagcctgtcatcagcagatgctcgtcacaaagccttcagcacctgcacatctcacatgtgttccattgtgatcacctatgttgctgcttttttcacttttttcactcatcgttttgtaggacacaatatcccaaaccacatacacatcatcgtggccaacctttatctgctactgcctcctaccatgaacccaattgtttatggagtcaagaccaagcagattcaggaaggtgtaattaaatttttacttggagacaaggttagttttacctatgacaaatgaaacatagaatagacatattgtttcaggtggtgagaaaataatggagacaaaatttcataaaagatgtgaataaaatggtattaaaatcatgacatgyaatttacccatgtaacaaacttgcacgtgtacctaaaataaaaatagaaataaaaaatcaaaataaagacataaatttgtaagtcaccataatatgtcaattttctgaagtctct

SEQ ID NO: 305597 - DNA, 546 bp, Homo sapiens
tcacaaaaaaaaaaaaaaaggagaaaaataataaaaaaaaaagattattagcacctagcaccacaaagacagggatctttacctgatttgcttactgaagtgtctcaaataccaggatrattgtctgctatgtggtagatgtaatgaaagcctatcacaagggctctaacttagacaaggtgggtagaaaactcattattgagaaaagaacattcaaattgccacttgaaagtagagaaggagccaactaggcaaagggaataaagatcttaatgtgacattttttaaaaagtgtgattatattgtaaatttttatagcactcattttataatatattatgaacttttttagatttcacgtataaatgagattatacagtagttgtctttctgtgccttttttcacttaagcataatgtcctccaagttcactcacattgtcaaaaatgacagggtttccttcatttttaaggatgaatagtatttgtgtgtatgtatcacattttctttatctgttaacctgtcaatggacacctgcattgtttc

SEQ ID NO: 305598 - DNA, 416 bp, Homo sapiens
gttcagcattacatccacagacataattgggaaggccacttaccttaaaaggtaagggaggataagtagcatgccttgttaaaagaagtaattcaacatgttttagattctacccaccatgccccatccccaacacaattaccaacctaaccagcaaaaagmaagcaggatgaacttgaaaagtagttatttatcgcagcgatctccaacctttttggcaccagggacttgttttgtggaagacaatctttccagggataggggagcagaggctgcggttggtttcaggatgaaactgtcccacctcagatcataaggcactagttagattctgctgagcggcttggtattcacctttctctggtgcctccttaagtagtttaataattgaccttctgaattctttttctggcaat

SEQ ID NO: 305599 - DNA, 587 bp, Homo sapiens
aattgggaaggccacttaccttaaaaggtaagggaggataagtagcatgccttgttaaaagaagtaattcaacatgttttagattctacccaccatgccccatccccaacacaattaccaacctaaccagcaaaaagaaagcaggatgaacttgaaaagtagttatttatcgcagcgatctccaacctttttggcaccagggacttgttttgtggaagacaatctttccagggataggggagcagaggctgcggttggtttcaggatgaaactgtcccacctcagatcataaggcactagttagattctgctgagcggcttggtattcacctttctctggtgcctccttaagtagtttaataattgaccttctgaattctttttctggcaatttagatttcttggtttgcatttattgctggtgagctattgtgatcttttggggtgttatgaaacagtgttttgtcatattactggaattgtttttctggttccttctcatttgggtaaattatgtcagagggaagatstggggctcaaggctgctccttagattcttttgtctcatggggtgctcctttcatgtg

SEQ ID NO: 305600 - DNA, 449 bp, Homo sapiens
ccgggcttgggggtagtggggagatgacggtcaaagcatacagaatctcaattagaaaggaggaaatttttttagttctcttacaccgtatgatgaatatagttaagaatagagcattgcgcatttcaaaattgctaagaacataaatttcaaatctgctcaccacaaaaatgttaagtatttgaagtggtagatatgtcaactatcttgatttaattattccaccatggatttgtaaatcaaaatgtcactttgtaccccataaatttatacaattataaactgtcaatttataatagaaaatttaagaagaaaaatgagtgcaaatatattggttatcttagtgtattttcaagaaagatatttttagaatatatttaattatgtaatcatyattgcctaaaaatttcagaagattaggggaaaatcaaagaatagtttgtatgttg

SEQ ID NO: 305601 - DNA, 429 bp, Homo sapiens
agctcttgtatggcaaatctgggggttttaaattctctcaggatttgcttatctaaaaataatcttatttcttcttcacttataaagtttactttggctgggtatgaaattcttggttggagatttttgtctttaagaatgtcgacgtagactttcaatcttttctggcttctaaggtttctgctgaaaggtattttgttagcttgatggggtttcctttgtaggtgacctgccctttctctctagctgcctttaacattctttcttttactaaaaccttgggaaacccgatgattatgtgwcttggggacgatcttcttatgtagtaccttgcaggggttctctgcatttcctaactttgaatgttgtcttctctagcaaggttgctgaaattttcatggatgataccataaaatatgttttcaaagt

SEQ ID NO: 305602 - DNA, 429 bp, Homo sapiens
agctcttgtatggcaaatctgggggttttaaattctctcaggatttgcttatctaaaaataatcttatttcttcttcacttataaagtttactttggctgggtatgaaattcttggttggagatttttgtctttaagaatgtcgacgtagactttcaatcttttctggcttctaaggtttctgctgaaaggtattttgttagcttgatggggtttcctttgtaggtgacctgccctttctctctagctgcctttaacattctttcttttactaaaaccttgggaaacccgatgattatgtgacttggggacgatcttcttatgtagtaccttgcaggggttctctgcayttcctaactttgaatgttgtcttctctagcaaggttgctgaaattttcatggatgataccataaaatatgttttcaaagt

SEQ ID NO: 305603 - DNA, 429 bp, Homo sapiens
agctcttgtatggcaaatctgggggttttaaattctctcaggatttgcttatctaaaaataatcttatttcttcttcacttataaagtttactttggctgggtatgaaattcttggttggagatttttgtctttaagaatgtcgacgtagactttcaatcttttctggcttctaaggtttctgctgaaaggtattttgttagcttgatggggtttcctttgtaggtgacctgccctttctctctagctgcctttaacattctttcttttactaaaaccttgggaaacccgatgattatgtgacttggggacgatcttcttatgtagtaccttgcaggggttctctgcatttcctaactttgaatgttgtcttctctagcaaggttgctgaaattttcatggatgataycataaaatatgttttcaaagt

SEQ ID NO: 305604 - DNA, 569 bp, Homo sapiens
atgtgtccacaaactattaaataaatatgctgaacaaattttatgcataaaaagttgacacacattagacatgttatgaaatgatagaattcaaagtaccaattataacagagaaaaaatacataagagtcaagaatatttctccatctcaaaatataacttcaaaataattgcaacaatggtcactgaaattaaaaatataattggtatatcaaaatttgtagagactttaatgcaactcttataaaaacaagctgtttgagaacgcaaaagtaagtaaaagtaaagagaatgtgcatttaaaaaataattggagaatgtatattgcttttaaatacatctgaattattgttaaatgtccattttttaaagtcacatacacacacatgcrcacacacacacacgtgccccaaattataagcctatatatcacttgaaattcaaaataaaatctaaccccactaacttatttatctgcggattaaatacataatagaaaataatcaatggcttaaaatgaatgcccaaacagaaattaggttacattttaatttgaacaaaaacaaagc

SEQ ID NO: 305605 - DNA, 542 bp, Homo sapiens
tgaactatactatagaccaaatggacccaacaagcatatacagtacrttccactaaacagcagcagaacactcacttttcttaaacgcacattctccaggctcagttacatgctaggtcacaaacaaatctcaacaactttaagaagatcaaaattattccaagtatatttgcaataacaatggagtgaaaccaaaatcaataatttaaaaatgggaaaattcacaaatatatggaaattaataaatacactcttaaacaactcttgggtcaaaaaagaactcaaaaagaaaattataaaataactcaagacaaacaaaaatgacacaacataccaaaatttacagaatacagccaaagtagtactatgaaggaaatttataatgataaatacctacattgaaaaagaaaatagatgttgaataaatgacctaactttgacctcagggaactagaaaaagaacaagaagctaaacctaaaattaacaaaaggaaagaaataagatcagatcagaaataaatgaaatagaaaatagagaaaaa

SEQ ID NO: 305606 - DNA, 569 bp, Homo sapiens
ttgtttatattttttaactttgaattcgaacattgtaacaactttctgccatctcttgaaatagttggaataaccctgaatcacgtcaggggtgggaaatcacagcyacatgcagttatgccagagagatttaaatactctcttaaaacacttctgttttagccttcaaaatgaaggttttttgtaaccttgtgaaagctgtgcatgtgaacagatgtactctggaaaaacaaaatttaatcaatattgaccagagaacaaagggatttagacctgaatgatttctacatttggctactgcatatcaatcactggagacagcagccactgctctgctgtggcagagaagagctatactgatttccgttagacatgcttctgctaaaatagattaattcttagtcatcagaatctgattaaggctgaagcttagcaggctaattttcagcctatgggaataaagtcacagtaattttccaatcatttaatgggaaagaaaccaacaaagataaaagaaaaacatgacaccaggaggctacaaatgtcaaatatttcctgcctgtctggcc

SEQ ID NO: 305607 - DNA, 603 bp, Homo sapiens
ataatttggtcttaatgaattttagtgttaggactttaaacaccatctagtgtaacatcactgctgacatgtgakcttcatgctgcttgaatgcttcctagaacaggaacctagcatcctgcaggcattcttgatagaaacacaaatctacctttccgtagcctctgtccacagggtctgcacttgccatctggagctacacagaacaagttaatttctctttcctgtgatagacttcacatagttgaagacaaattctccctgcaatgtctttaggcctgccatcatttttcttgtgatgtgttttctgtattcccaaatcctccggctgaccttttctagattagctccagattttcagttttaatttagaagatagtaaccagattgagatgtagtattttccatgtggtttgatcatttgcttctggtatacacacattgggtttcttgttctactgtgttcttttgagacagaatggaagaaaaggtcttttagtgattgccaaagtctcctcagcatctttgctgaaccacttcactaggcttactctccttcctgtagacttccattgtcaagctccaagcccgacccagataaat

SEQ ID NO: 305608 - DNA, 617 bp, Homo sapiens
agtaacagctgttaatagtagagaattaggaactatgactttctaatttgatatctttattgatatattgacctacatagcaggatgtttttggagtttttgaaagagatcaagtttgatgaaatgaaagggaaaacaaatgatgaaagaaaatcacatactcttcttttctaaatgcgcttaaaactgtgagaagggcccaaagagagcagttcttatctccttaaagtcrgactgagaagtcttatttacagaccccattgtgtatctagtagactatgtactcattgctagacatttttagggcactttctacttctactatgtcagttttgcctagctcaaattaaagtttcattttagtatagagtaagacatgaatagcctgctaaaatagcacccctacctgtcttctctaattaggggatttagagttgaatataacagtggtctggggaaaatcaatttccttgactgtgaagtttaaactggattcaagatctcagaaatgaatatcttaataataaacactctccaggagtgatttctgctgtaattaaactaatattatacaatttaaggggaaggaagtggaaatagaagtttgtatgttatgc

SEQ ID NO: 305609 - DNA, 617 bp, Homo sapiens
agtaacagctgttaatagtagagaattaggaactatgactttctaatttgatatctttattgatatattgacctacatagcaggatgtttttggagtttttgaaagagatcaagtttgatgaaatgaaagggaaaacaaatgatgaaagaaaatcacatactcttcttttctaaatgcgcttaaaactgtgagaagggcccaaagagagcagttcttatctccttaaagtcggactgagaagtcttatttacagaccccattgtgtatctagtagactatgtactcattgctagacatttttagggcactttctacttctactatgtcagttttgcctagctcaaattaaagtttcattttagtatagagtaagacatgaatagcctgctaaaatagcacccctacctgtcttctctaattaggggatttagagttgaatataacagtggtctggggaaaatcaatttccttgactgtgaagtttaaactggattcaagatctcagaaatgaatatcttaataataaacactctccaggagtgatttctgctgtaattaaactaatattrtacaatttaaggggaaggaagtggaaatagaagtttgtatgttatgc

SEQ ID NO: 305610 - DNA, 484 bp, Homo sapiens
agaacatggtaactggtatattacagacagttgcttttgaaaaattatattggatrattggactatttccatacacatatcctgctatcagagttccttccggatccactgatagttctgcatttactctctgtccatgtaatatgaggtttttgaagtttaatgagatactcttgagaatatatgttaatgccatctttagagggtgatatatctgtgtaggctctgtattaaatatgagagttcagaatggagtaagaaattcagttgcttcattaagctacagaaattataattttaggagatttgacaattttatattcttttgaatatcctcattggtgacaaatttcttttgctttgaatggatttaactttacagagtatctgcagtaatttgtgtgttgttgaatagagcgaaaattggaaaatcaatataacattctagaaggtaattggcatcatataccaaaacacttaaatt

SEQ ID NO: 305611 - DNA, 457 bp, Homo sapiens
cgaaaattggaaaatcaatataacattctagaaggtaattggcatyatataccaaaacacttaaatttttatatagacattgatatagtaactcttctgacaggaatttattctaaggaaacagtcttatatatatgtgcaaagattttttttatgatattgttcattatagtgaaaagttaaaaacaatctaaacagtagagtattagaaaaatagattttaggataaccattcagcataatactatgagtcaacaacgtataatattatggaaaatatcaaatgaaatagaataaaagtggaaaaatcaaaatatcaaacagtatgtgaaaaattctgtatgtacacatatatatggacataaatatgtagaaaaggatatatttgcaagtgttaaaattcatctctacatagtagaattgaaaaacattttcttttttcattattttttctaaa

SEQ ID NO: 305612 - DNA, 559 bp, Homo sapiens
aataatcctccttccctccactactgagatcatatatttgctaagaattattaagctagttgcagttttagtttaataactgcttaatgaggaagggatatatatgttataacacacattattttttgaattgtctctgctatcacatattcattagtaaagataagttctcayccattcaaccattaattcatttgagttaatatttattgaatattgagtcaggctctaagctgggaaatttgaaatgcattgatgagtaagacaaatttttttccctgacaagctcacatctgctaattgtagtaaaatgaggttagattcagtgacagaattatgagacagatgatgggaatgtcctcagaagagaagtgagactttcttgatagcaaatatggagaaaataattcacagtgttctattttagttttttatttgcattgttgaatgtaaggaaaagcgtaggaaacccttttttttctgtagtagacatatatgatctactgatggaaaacagactaagaactgcaaaaatgacagttttttccagttttttttt

SEQ ID NO: 305613 - DNA, 490 bp, Homo sapiens
agtataaacaatttcattataattgctaaaacccatgaacaaaattcatggtgatttggtaatttcttgctacctttttactgaatttcttgctatctttttactttttaccttttactttttacttgctacctttttacctttttacatttggagttttcttctggctactctttaaacttaaatcagtttcttccattttgagtccttatcttaaaccatcccaaatatgcaaaatgccattcacttmttttccaacagcccatactctttctctactttctttaaagaattgcctcaaaaataacatcctttgggagagttttggtgaataatcttcattctctagctcataactgtttatatttctcaatatgttggttatccaaatataaaagcatgtcttcccgttggttttttcaccaaatagtatatattaacctgataattttctgaaaaatgtcatctgtctttttcaagccaacaagtc

SEQ ID NO: 305614 - DNA, 550 bp, Homo sapiens
atgtaggatatgtcctggaggtcaagaggaaataaaaaggagaaaatgatcaccctagagggacacacaacttgccaagataatatttgtgattagcttattgtttgttttgtttgtgtatttttggttggtttgttgtttcctgagtctagccttataattaaatatgaatttggscatgaatttgtgactatctgagcatattttctgcaaatattaagaaaatgttatccaatagaatgtcctgttttgtgttgtttcttaatcaactcagggtaaaagtggcatcaaagagatgaaacttaaatagttgatctagatgaaatgttttgaacatatcaaagtttgtgggaagaagagaatactatttttgaagttgcaactgcccttgaaaattaaatccactacattaagtaggatattgtcttggctactttaccaaagaccaaaacaacactggcctaaatgtgatgaaaaattgatttttattttgtataaacattcaaattgataaagggcaggaaactctactcaaccaagttgcctagga

SEQ ID NO: 305615 - DNA, 627 bp, Homo sapiens
tctataagtgagaagggactctgtctggaggtcaaggtttgttctaccagacaaagacaagccagtaagcacagctccaaagctaaagttttaagttccttcaacattttcataaaaggtgttacaaaatccttaatacttccatcctctgcttaatagaggcaaaggacagggtctgtgsgtgtctgtgtcttgagtgacagaatttggttatcaaaggacacatctgaaagtttaagaacaaaagggggattcctcagatgctgtttttaaggaacggtgcactattgtcttgattgtgtctatgcaagagagaagcagagagagcgctgtattatttggcctgtgaccaaaaactgagacgaaataaaagttaaaaaataaacaaacagccaaacaaaaacaaatgacattaacaacaaatgtcagttttaagaaagacaaacaggttacaatgtagtttctgttcccttgctcctccagaaataatcattgtcttcaggttcaagttctattctaatttgaggcacaacttttactggagttctaggaggactagagaaaaaggaaaaaaaaaagtagtaagtaaatcagatttccttcatcatctgtcaaatgtttatgcat

SEQ ID NO: 305616 - DNA, 627 bp, Homo sapiens
tctataagtgagaagggactctgtctggaggtcaaggtttgttctaccagacaaagacaagccagtaagcacagctccaaagctaaagttttaagttccttcaacattttcataaaaggtgttacaaaatccttaatacttccatcctctgcttaatagaggcaaaggacagggtctgtgcgtgtctgtgtcttgagtgacagaatttggttatcaaaggacacatctgaaagtttaagaacaaaagggggattcctcagatgctgtttttaaggaacggtgcactattgtcttgattgtrtctatgcaagagagaagcagagagagcgctgtattatttggcctgtgaccaaaaactgagacgaaataaaagttaaaaaataaacaaacagccaaacaaaaacaaatgacattaacaacaaatgtcagttttaagaaagacaaacaggttacaatgtagtttctgttcccttgctcctccagaaataatcattgtcttcaggttcaagttctattctaatttgaggcacaacttttactggagttctaggaggactagagaaaaaggaaaaaaaaaagtagtaagtaaatcagatttccttcatcatctgtcaaatgtttatgcat

SEQ ID NO: 305617 - DNA, 627 bp, Homo sapiens
tctataagtgagaagggactctgtctggaggtcaaggtttgttctaccagacaaagacaagccagtaagcacagctccaaagctaaagttttaagttccttcaacattttcataaaaggtgttacaaaatccttaatacttccatcctctgcttaatagaggcaaaggacagggtctgtgcgtgtctgtgtcttgagtgacagaatttggttatcaaaggacacatctgaaagtttaagaacaaaagggggattcctcagatgctgtttttaaggaacggtgcactattgtcttgattgtgtctatgcaagagagaagcagagagagcgctgtattatttggcctgtgaccaaaaactgagacgaaataaaagttaaaaaataaacaaacagccaaacaaaaacaaatgacattaacaacaaatgtcagttttaagaaagacaaacaggttacaatgtagtttctgttcccttgctcctccagaaataatcattgtcttcaggttcaagttctaktctaatttgaggcacaacttttactggagttctaggaggactagagaaaaaggaaaaaaaaaagtagtaagtaaatcagatttccttcatcatctgtcaaatgtttatgcat

SEQ ID NO: 305618 - DNA, 462 bp, Homo sapiens
tggggcgtgggccaaataaatgagtttgtaactttacttcatcctctccatttacatagggcgtaccccaagtagagggtatttaaactcccaaaaattttgtaatggggcccttgagtccctattcttgggcccactcccacactgtggagtatactataattttcaaatcatcctttcatttcttcctggaaaaaaaaaaaatagtcttcagagactcagccccagctgacagcttgacagctctgacggcaatctcatgagagactctgagccagaaccaaaatcagctgcccctgcattcctgaatgtgaggaattgtgtaagaaaacatgtttgttsttttaagctgctgagttttattgtaatttgttactcaatgattgataactaatatacccattattttttatcaatagatattcattccaaacttttcttgatagcagtaacctcttattg

SEQ ID NO: 305619 - DNA, 462 bp, Homo sapiens
tggggcgtgggccaaataaatgagtttgtaactttacttcatcctctccatttacatagggcgtaccccaagtagagggtatttaaactcccaaaaattttgtaatggggcccttgagtccctattcttgggcccactcccacactgtggagtatactataattttcaaatcatcctttcatttcttcctggaaaaaaaaaaaatagtcttcagagactcagccccagctgacagcttgacagctctgacggcaatctcatgagagactctgagccagaaccaaaatcagctgcccctgcattcctgaatgtgaggaattgtgtaagaaaacatgtttgttcttttaagctgctgagttttatygtaatttgttactcaatgattgataactaatatacccattattttttatcaatagatattcattccaaacttttcttgatagcagtaacctcttattg

SEQ ID NO: 305620 - DNA, 534 bp, Homo sapiens
atttgtgatactgcactgtgtaaaatccagagcaaattttcaaatggaaaacattattttggcaatcttttcaaaaggctactggaataaggtgtccgcatgtgttaaagtaaacaaatcccagttttcctcctagtactgattacagatccctgctggagaatctgtatttctgtgagctggtctcctaaagaaaaaactgggcaacaattttacttctcaacttaatcacctaattggaggaggaccctctggactatgacactaaccactataattatgtaaaaagaccccaaactcccattcccttttctttytattgaagaactacagaaaaataatgctgaatcatatcagtataaatataatgctaatattaatataacagcatagaactttggtggagagcctactcaaatagattcacagatcacgtgaagtgagatcattgacatctatccacattaggcttaaaattacataaaattgagttattatctcaaatataagccctgggttattaatagaaaccaa

SEQ ID NO: 305621 - DNA, 621 bp, Homo sapiens
gtgaaatgagtaatacaccacatgtccagataaacattcttagaactcagccctccatttcacatcaggtataaaaagggacaattttcacatttgtttctttaactagctttcctttggaatttggaaagttccttacatcatcattgtcactgtccagacttcccttcttctttttctttttcttctcatcctccttctttttcttgtccttttctggaatgacatcatccaggaagctgaggtcrtgctgggagaagaggtagtccatgccttttctgacagctacaagtgccaagatctgaaagagcaaatattaaaagtatgaaagaaaccatgtcagatgaagtcacagcaagcatagatactctcctatcaaagaccacagaaacctactttgtgtaaggctagatagagtatgacagacctgatcttgacggtatggacttataccgagtgaactctcataattttctacatggggaaagttgttttataaaagtcttagttgaaactcactttgttttgttcaccaaaatgcatgatcacattcaattagaattttaatgtgaaaagattgtttttcaaaaccattgccttccatgtgagattttaaataaa

SEQ ID NO: 305622 - DNA, 562 bp, Homo sapiens
aagtctctgtgttttataaattacccagtctcaggtattctgttatagtagcccaaaatagatttacygccagaatcagttagatttgctacacaattagttagatttatcattctaaaaattttcatgaatgcctcatgtacatttttgtttatgaaagaagctgccacaaggatctagttattgagctgctgtcacctcatggttcagagcattggctgggtttacatctgcattttggctcagcttttcctgactgtgtgatcttgggaaagtatttaactttataaaaattaattgttgcatgtcaaatgacaatatttgcattttagagtgttcctatttttttgcgtctgccctacaagccatgacagcaatttttcctggaatcttccttcctctaacctgtcatccacatggctaccctggaaattgccaaggtggtaaaaaaaaaaaaaaaaaaaaaagagtgagttttccactctccagtctacccatttacctgtactggggctttccctttcctaccactgctgtctgtggagggtcaaatgtcctatgc

SEQ ID NO: 305623 - DNA, 540 bp, Homo sapiens
ttggctgggtttacatctgcattttggctcagcttttcctgactgtgtgatcttgggaaagtatttaactttataaaaattaattgttgcatgtcaaatgacaatatttgcattttagagtgttcctatttttttgcgtctgccctacaagccatgacagcaatttttcctggaatcttccttcctctaacctgtcatccacatggctaccctggaaattgccaaggtggtaaaaaaaaaaaaaaaaaaaaaagagtgagttttccactctccagtctacccatttacctgtactggggctttccctttcctaccackgctgtctgtggagggtcaaatgtcctatgctctatttgggggcacttatgagtgtcctgcctaatgataatgacagttcccatggaggttctgcaaagtcttgaggcatagacagatactaatatgctggacagttcactatcatcagtggaggccactgatggtggcagctgttatccgcccaacgatgacgacagccactgaatggtttattctgccaaa

SEQ ID NO: 305624 - DNA, 540 bp, Homo sapiens
ttggctgggtttacatctgcattttggctcagcttttcctgactgtgtgatcttgggaaagtatttaactttataaaaattaattgttgcatgtcaaatgacaatatttgcattttagagtgttcctatttttttgcgtctgccctacaagccatgacagcaatttttcctggaatcttccttcctctaacctgtcatccacatggctaccctggaaattgccaaggtggtaaaaaaaaaaaaaaaaaaaaaagagtgagttttccactctccagtctacccatttacctgtactggggctttccctttcctaccactgctgtctgtggwgggtcaaatgtcctatgctctatttgggggcacttatgagtgtcctgcctaatgataatgacagttcccatggaggttctgcaaagtcttgaggcatagacagatactaatatgctggacagttcactatcatcagtggaggccactgatggtggcagctgttatccgcccaacgatgacgacagccactgaatggtttattctgccaaa

SEQ ID NO: 305625 - DNA, 581 bp, Homo sapiens
ggtttattctgccaaagtaaggacggtttattatcctagcttccactctgctccctagtgctggccacttagtgatgattggccatattttcatggtaactcttcccttttgtccctaactcccctgtgatgctttaggtctgaggattccgccctcttctgaggttttggccccttcatttcctttcttctctctcagtgcagataaccttcaacaattttccttccaggtatagragttgaggttattgccttccctttttcaattttaaatttttgttatgtgatctctttgtcccactcccttcagggattttcttttgagtctcaagagactggttagaaaacattagaaacaacaacaacaacaacaacaaacccaaccaaccaaccaaccaaataaccaacaactaaaccaaaccaataatgtaaatgtattttttcttttcacttctcttgtagaaaaatggtaatgcttctgtgttcctctgacttactggagaaaaggtaagagcgtatgaaagaaagtaaaatcagaaagactggcacttcaagatcttatttccttgatgtaacagaat

SEQ ID NO: 305626 - DNA, 585 bp, Homo sapiens
ttttggccccttcatttcctttcttctctctcagtgcagataaccttcaacaattttccttccaggtataggagttgaggttattgccttccctttttcaattttaaatttttgttatgtgatctctttgtcccactcccttcagggattttcttttgagtctcaagagactggttagaaaacattagaaacaacaacaacaacaacaacaaacccaaccaaccaaccaaccaaataaccaacaactaaaccaaaccaayaatgtaaatgtattttttcttttcacttctcttgtagaaaaatggtaatgcttctgtgttcctctgacttactggagaaaaggtaagagcgtatgaaagaaagtaaaatcagaaagactggcacttcaagatcttatttccttgatgtaacagaatccacccatgaacactgttggtctgatgctggatgtctgagttaactttggccaattgtggttcttttccaggaatattagaattgcaactcagaaagcatagccttttgataggtgttaaaaatttaagatgtaaaacttgagagttattaatggtcttgtttcctgtc

SEQ ID NO: 305627 - DNA, 585 bp, Homo sapiens
ttttggccccttcatttcctttcttctctctcagtgcagataaccttcaacaattttccttccaggtataggagttgaggttattgccttccctttttcaattttaaatttttgttatgtgatctctttgtcccactcccttcagggattttcttttgagtctcaagagactggttagaaaacattagaaacaacaacaacaacaacaacaaacccaaccaaccaaccaaccaaataaccaacaactaaaccaaaccaataatgtaaatgtattttttcttttcacttctcttrtagaaaaatggtaatgcttctgtgttcctctgacttactggagaaaaggtaagagcgtatgaaagaaagtaaaatcagaaagactggcacttcaagatcttatttccttgatgtaacagaatccacccatgaacactgttggtctgatgctggatgtctgagttaactttggccaattgtggttcttttccaggaatattagaattgcaactcagaaagcatagccttttgataggtgttaaaaatttaagatgtaaaacttgagagttattaatggtcttgtttcctgtc

SEQ ID NO: 305628 - DNA, 585 bp, Homo sapiens
ttttggccccttcatttcctttcttctctctcagtgcagataaccttcaacaattttccttccaggtataggagttgaggttattgccttccctttttcaattttaaatttttgttatgtgatctctttgtcccactcccttcagggattttcttttgagtctcaagagactggttagaaaacattagaaacaacaacaacaacaacaacaaacccaaccaaccaaccaaccaaataaccaacaactaaaccaaaccaataatgtaaatgtattttttcttttcacttctcttgtagaaaaatggtaatgcttctgtgttcctctgacttactggagaaaaggtaagagcgtatgaaagaaagtaaaatcagaaagactggcacttcaagatcttatttccttgatgtaacagaatccacccatgaacactgttggtctgatgctggatgtctgagttaactttggccaattgtggttyttttccaggaatattagaattgcaactcagaaagcatagccttttgataggtgttaaaaatttaagatgtaaaacttgagagttattaatggtcttgtttcctgtc

SEQ ID NO: 305629 - DNA, 564 bp, Homo sapiens
attatattaataataaaggtaataaatactcaaagcttttcacttcccaagttatgttaggattacttatgttcttgaggttatttgcattttcatggctgaatagtggaaatgcgacacatcgatgtgttactgcrcatctcttccctgctctgtgttagtgttcagtgatatcatgttggcactttgaaatcagccaaggtgcatgctttatactatagaaattcacaagcactacaaagtacaacttggtttattgctttgttgatggtctagacttaagaaaatgatggagaaatgtaaatcatgcaagttaaacttgaaagtgtattatatttgtagtcattacattgtgactagtacaaaaagtgaggaaatattcttccagtgttaaaatactattatcagattcagcaaggaatctgtttgtgtgatgaacaaaaaagttctgatacaggtcttagttgtttcactttgccttactcactaacataaatgaaaatatcaaccagcctttcagtcagaactacaccccttcatcacctacaactctagtttgcagaa

SEQ ID NO: 305630 - DNA, 564 bp, Homo sapiens
attatattaataataaaggtaataaatactcaaagcttttcacttcccaagttatgttaggattacttatgttcttgaggttatttgcattttcatggctgaatagtggaaatgcgacacatcgatgtgttactgcacatctcttccctgctctgtgttagtgytcagtgatatcatgttggcactttgaaatcagccaaggtgcatgctttatactatagaaattcacaagcactacaaagtacaacttggtttattgctttgttgatggtctagacttaagaaaatgatggagaaatgtaaatcatgcaagttaaacttgaaagtgtattatatttgtagtcattacattgtgactagtacaaaaagtgaggaaatattcttccagtgttaaaatactattatcagattcagcaaggaatctgtttgtgtgatgaacaaaaaagttctgatacaggtcttagttgtttcactttgccttactcactaacataaatgaaaatatcaaccagcctttcagtcagaactacaccccttcatcacctacaactctagtttgcagaa

SEQ ID NO: 305631 - DNA, 564 bp, Homo sapiens
attatattaataataaaggtaataaatactcaaagcttttcacttcccaagttatgttaggattacttatgttcttgaggttatttgcattttcatggctgaatagtggaaatgcgacacatcgatgtgttactgcacatctcttccctgctctgtgttagtgttcagtgatatcatgttggcactttgaaatcagccaaggtgcatgctttatactatagaaattcacaagcactacaaagtacaacttggtttattgctttgttgatgrtctagacttaagaaaatgatggagaaatgtaaatcatgcaagttaaacttgaaagtgtattatatttgtagtcattacattgtgactagtacaaaaagtgaggaaatattcttccagtgttaaaatactattatcagattcagcaaggaatctgtttgtgtgatgaacaaaaaagttctgatacaggtcttagttgtttcactttgccttactcactaacataaatgaaaatatcaaccagcctttcagtcagaactacaccccttcatcacctacaactctagtttgcagaa

SEQ ID NO: 305632 - DNA, 605 bp, Homo sapiens
gtacaacttggtttattgctttgttgatggtctagacttaagaaaatgatggagaaatgtaaatcatgcaagttaaacttgaaagtgtattatatttgtagtcattacattgtgactagtacaaaaagtgaggaaatattcttccagtgttaaaatactattatcagattcagcaaggaatctgtttgtgtgatgaacaaaaaagttctgatacaggtcttwgttgtttcactttgccttactcactaacataaatgaaaatatcaaccagcctttcagtcagaactacaccccttcatcacctacaactctagtttgcagaaatttagcaaaatcaacaaaaacactctgtgagaattaattggttgtgtagaatttaaaatgaaattagatattttattattatttataaattatctgttatatgttcttgatatgagtacatgtataatataataaaataatacacacacacacacacacacacacacacacacggagaaccagttgttgaacatatatcagcatgaatatgagtaattcccaccctaaaaacttaggatgctgagcagccaaaaacaaaaataaattatgtcttctaagat

SEQ ID NO: 305633 - DNA, 567 bp, Homo sapiens
atcacaacgttgtgttcttaacattcgcataaacaatgctaagaacaaggcatagacaagactgctacgtgaccagagaaatgactaaatacccacctcttttgactaacatgaatgattgctgcttttttaccagtggcaactctagattcgctttattcttcttatctcttagacaaaaaatgttaagattcccaatcactgactttttccttcttcttgaaagctcccaattcagaactggttcttgtttccttatttaactccttagaatcatccaacataagctcaactcccataagaagccttttcttaaccccctccccattactgacatgctcctatgttcctatggagtgctgtctcccttcctgcagcaagctaaataaccttcaccttttacatttatttacttatttattttacaagygcgcccgttagtctttggtctgcttcaatagtggtcatgtaatcagtcattggccagaaagattgaaaaccaagaatgatgtgttaagaattgtgtgttaaagtaagaacgaatatgatttttagtaagttgctaag

SEQ ID NO: 305634 - DNA, 567 bp, Homo sapiens
atcacaacgttgtgttcttaacattcgcataaacaatgctaagaacaaggcatagacaagactgctacgtgaccagagaaatgactaaatacccacctcttttgactaacatgaatgattgctgcttttttaccagtggcaactctagattcgctttattcttcttatctcttagacaaaaaatgttaagattcccaatcactgactttttccttcttcttgaaagctcccaattcagaactggttcttgtttccttatttaactccttagaatcatccaacataagctcaactcccataagaagccttttcttaaccccctccccattactgacatgctcctatgttcctatggagtgctgtctcccttcctgcagcaagctaaataaccttcaccttttacatttatttacttatttattttacaagcgcgcccgttagtctttggtctgcttcaayagtggtcatgtaatcagtcattggccagaaagattgaaaaccaagaatgatgtgttaagaattgtgtgttaaagtaagaacgaatatgatttttagtaagttgctaag

SEQ ID NO: 305635 - DNA, 567 bp, Homo sapiens
atcacaacgttgtgttcttaacattcgcataaacaatgctaagaacaaggcatagacaagactgctacgtgaccagagaaatgactaaatacccacctcttttgactaacatgaatgattgctgcttttttaccagtggcaactctagattcgctttattcttcttatctcttagacaaaaaatgttaagattcccaatcactgactttttccttcttcttgaaagctcccaattcagaactggttcttgtttccttatttaactccttagaatcatccaacataagctcaactcccataagaagccttttcttaaccccctccccattactgacatgctcctatgttcctatggagtgctgtctcccttcctgcagcaagctaaataaccttcaccttttacatttatttacttatttattttacaagcgcgcccgttagtctttggtctgcttcaatagtggtcatgtaatcagtcattggccagaaagattgaaaaccaagaatgatgtgttaagaattgtgtgttaaagtaagaacraatatgatttttagtaagttgctaag

SEQ ID NO: 305636 - DNA, 568 bp, Homo sapiens
gatgttttccttatcctactgaagcactgtcaggccaccttgggctgcctcctttggtggacgctctcattacccttagcttgctctcaattctcactcttgaccactgtggctctcccaggctgagatggacacatgctcaactacacctggttggctaggactgaagtgtccaggaaaggaagtgaagaaaagaggaagagagctgttggtttattttaaatgaggaactcctaacttttgtcttttatcatctgtgtgtttcartaagtctgacacttttgtttctctttggcagaattgtatatacctagcattttaagtcatagaaagctacctggatttttttttttagaccaaatccaccattggttttcccttgtccagattagatttaatgcaagcctttcccaatttggtccaaacctaattttgttgcctcttttctgtgtactttctgccaagtaacttaggaattcagctcctgtgaactctttgccttaaacaaatatgtcatgccctttcccacatttatgcatacctttttcttcctggaatgccctcatac

SEQ ID NO: 305637 - DNA, 568 bp, Homo sapiens
gatgttttccttatcctactgaagcactgtcaggccaccttgggctgcctcctttggtggacgctctcattacccttagcttgctctcaattctcactcttgaccactgtggctctcccaggctgagatggacacatgctcaactacacctggttggctaggactgaagtgtccaggaaaggaagtgaagaaaagaggaagagagctgttggtttattttaaatgaggaactcctaacttttgtcttttatcatctgtgtgtttcaataagwctgacacttttgtttctctttggcagaattgtatatacctagcattttaagtcatagaaagctacctggatttttttttttagaccaaatccaccattggttttcccttgtccagattagatttaatgcaagcctttcccaatttggtccaaacctaattttgttgcctcttttctgtgtactttctgccaagtaacttaggaattcagctcctgtgaactctttgccttaaacaaatatgtcatgccctttcccacatttatgcatacctttttcttcctggaatgccctcatac

SEQ ID NO: 305638 - DNA, 498 bp, Homo sapiens
ttatgcatacctttttcttcctggaatgccctcataccatttttctgtttggaaacctctgactcattatttaaaattcagatcaagtgtcacttctcagtgaaacctttttcaactccctcagggtgagtaagttctttctgtctcttaagagagtgttyagagcacttgctatttaacttctatcatcgaccgtgtaaaattaggcaaattgcttacctttcctgagtttcagtttcctcaactgttaagtggagataataatagataataatcaataaagttgtccttaaggtgaattgcaaataatcaacatgctaataattgctatttttatgtttatctgattatgttaaaattgtgtgttctaggctgatgtggtggcttatgcttgtaaccctagcacttggaaggctgaggctggcagattgcttgagaccaggtgttggagaccagcctgggtaacatactgagacctcatttctaaaaaaaaaaaaa

SEQ ID NO: 305639 - DNA, 498 bp, Homo sapiens
ttatgcatacctttttcttcctggaatgccctcataccatttttctgtttggaaacctctgactcattatttaaaattcagatcaagtgtcacttctcagtgaaacctttttcaactccctcagggtgagtaagttctttctgtctcttaagagagtgttcagagcacttgctatttaacttctatcatcgaccgtgtaaaattaggcaaattgcttacctttcctgagtttcagtttcctcaactgttaagtggagataataatagataataatcaataaagttgtccttaaggtgaattgcaaataatcaacatgctaataattgctatttttatgtttatctgattatgttaaaattgtgtgttctaggctgatgtggtggcttatgcttgtaaccctagcacttrgaaggctgaggctggcagattgcttgagaccaggtgttggagaccagcctgggtaacatactgagacctcatttctaaaaaaaaaaaaa

SEQ ID NO: 305640 - DNA, 323 bp, Homo sapiens
gtaataaaacctccttaaataaaacataaacaatggggtttggagagcttccaggctggtgaacatgcagaggttcctggagggtggtgtgcccagatggggcatggaagctctattttctctcccataccttgccctgtgtatctctcccattggtctgttcctgagttttacccttcataataaaccagaaatagtaagttaagtgctttcctgagttctatgagttgtagtcaatgatcagttctaaaaagagggttgtrggaatccctaactttgtagctatgttggacagaagggcgggtggcctggggatttcatac

SEQ ID NO: 305641 - DNA, 529 bp, Homo sapiens
gtgaggcctgtgactgctggctttcccccactttccttgtgacctgtatgactcagcagaagcagccataatcccgataggaatataactccattggactgggaaccacaccccatgtcccacagcagctgcagtaagccccacccaaggaaaggctgagctcagacacacctatccctgcccctacctggtggtatttctctaactgccctggtagccgaaggcaaaggtcataatctcatgggagctctatggccctgcccaccacctgagaatactgaatacttagctaggtgtcctagggcaagttttcatcctccctacaggactgcagytgatgcagtcttgaaagtgccacctcctggctggaggtcaaccaatcaaaaccagtacactaaacaacagcacaaacaaggaacctcactaagtccacttcacttccttgctaactccattggagcaggtgctggtgtccacagctgcagacgtgtagatggatcacattgcaggactctttgcagacacttac

SEQ ID NO: 305642 - DNA, 583 bp, Homo sapiens
acagatcacttgaggtcaggagctcaagaccagcctagccaacatggtgaaacccagtctctactaaaaaaacaacaacaaaaaaatacaaaatatgctgggcatggtggtgtacacctgtaaacccagctactcaggagactgatgcaggagaattgcttgaacccaggaggcggaggttacagtgacccaaggtcatgccactgcactccagcctaggcaacagagcgagactctgtcaaaaaaaatgatgttcttaatattcatttatgtatgcatatgtatttatgtatatattattacttagctgtaaatgtgaaatgagttggggtataagggaggatgacagactgaaaacctacacagttacacactgatctttagaaatcacacatactttctcctctctgtgtattttataatttggyatatacaattctaaactatgctgagaactttctttaaaagaattgtaactagaatgctatcattattctatttttacattgtcatgacattcttagcaatatttatcaatgactgagaaattacctgcttaggctcttataaggggagaatttct

SEQ ID NO: 305643 - DNA, 564 bp, Homo sapiens
aatgcaactcccattttactgatgaggtaatagtagttcaaagaagtttactgctgagcatgaacsagggccagtatctgaacttaggtgagcctgattctaaggtccatcctagacaaccataaacatgggaaatgtaaattacaactgatcaaagtgatgaggtcaaagctggaaaaatttggaacaacacataaaagacatgtgtgtcttccatataacaataaccacatgatactcatataatctcacaggtacgttcaattaaaggaatccctaccattactggaaaaatgatagcagccaccgttgacttgaggatccaaagcagggccagacacaacacctgcaggaaagtgaacaggtggactctgcgcagaggaacatgacgcaggtagatgaagtcaggctgatgcttcagaggcatcagaagcagcttcagacgatccatgaactggggaggaaagaggaaaggagtccaactgcattactgcattacatttccactatgcctaactaatcactactgatttatattctataatttaggcaagcagtgtcctt

SEQ ID NO: 305644 - DNA, 564 bp, Homo sapiens
aatgcaactcccattttactgatgaggtaatagtagttcaaagaagtttactgctgagcatgaacgagggccagtatctgaacttaggtgagcctgattctaaggtccatcctagacaaccataaacatgggaaatgtaaattacaactgatcaaagtgatgaggtcaaagctggaaaaatttggaacaacacataaaagacatgtgtgtcttccatataacaataaccacatgatactcatataatctcacaggtacrttcaattaaaggaatccctaccattactggaaaaatgatagcagccaccgttgacttgaggatccaaagcagggccagacacaacacctgcaggaaagtgaacaggtggactctgcgcagaggaacatgacgcaggtagatgaagtcaggctgatgcttcagaggcatcagaagcagcttcagacgatccatgaactggggaggaaagaggaaaggagtccaactgcattactgcattacatttccactatgcctaactaatcactactgatttatattctataatttaggcaagcagtgtcctt

SEQ ID NO: 305645 - DNA, 572 bp, Homo sapiens
tactttgactaatacactcagcaatctatcaccatttcttttcagagaaaagccatatgaatactacagtgagtttcagggtcaacatctgaatctaagggatgctatcgtatggtgatgtataaacagctattgaaataactactgagcatctgtgtgtcaggtgctgtgcttcaaagaataactgccgaattgaccttrccagtgacgaatgggaagatattcaagaacctatcacaggatctttcaatgaaagatgctcagtaaatagctattgaattgaataatcatgcaatatgaactctgaaataatatctctattttctttctggagggaaagaagtgcaaaagtaaattagaccatcacaatcttctctagtgatttcctacttaaagggttttctttttccctctagaactatttttgactggtgaggaccttctcatttataaagtttgggttacaaaatttctttacaaattacaaaattttctaaatgaaatcttaccaaaaaggtctaaacaagggagaatcgagaaagaaagaaagagaaaagccattaggggcaata

SEQ ID NO: 305646 - DNA, 570 bp, Homo sapiens
tatgaatagctgaagttttcaacaaaagcaatacatcaaccacattgactttattcttttattggtaaaaaaacttttgattattgatcatagccrtgtgaaaagcaaatcaatagcctgtttttagtatagagttaaggcaaatggataaacactatctttaagaacacacagaaagagttaggtatccttcctgagacagtaaaaaggagataaagatgggtaaggggaaggaaaagaaagattatagcctcttgctttcttggttaaatgacttttaacagcctatttaaacaatgggtatgtatggcaacttttcttaatactggctaacttgttgattaaaccagaaatgaaaagcaggtgaatggtgaagtagaaaataaatgcattttaaaaactcagcagttaataatgattagcacttttcttcaaagatctgttactggactattcttactactagaaaaacactactgtacttacattgctattcaaaaacttacctgcacaccattaagggatgctactcccatatacaggaacacaccatagagtacaggcatgggt

SEQ ID NO: 305647 - DNA, 546 bp, Homo sapiens
cgtaaaacctagaaaggtcactgtctgaccttctcccttctccttactaacccttatgtgacaagtgccctgtctaaacacagaggaaaggaatgccacacacagaggccaagaagaatctgaacagacagtccctcctgkgtttccccactcagtctcttaccattagacgatacccttttgtccaatcacatttctacatggctgttcattcttcattgaacctaagcataaaaacacacagttttccttgcgtctttgagtcttcatttatgaaggcttccatgtcatgtgaaacttggattaaataaattggctgtgcttttctcttgttgtttttttacaaaagtgttccttgtgatgcatgaaaaaaacatatcccacttttctgcccctacagtaggcaaaaaatggtctttaggataaattatttgcttcaggaaattatcaaaaaacttgtatttgtgtcattttagtgcttaatagtgaacacattagagggatcaaatatgttgttttattgaaaagagaaaacacaaaggaaat

SEQ ID NO: 305648 - DNA, 572 bp, Homo sapiens
agaacaaaagaactttcagctttaactcctctgcagccatatttgggtgcagggtgagaaaatagttaggaagaggcgttgttgaaaatgtaagtcttgcatctctcctaaaaatagtaattatacagtatctrttctctgtgtccccttggaatcatccatgattactcaactgtcagattctctaggaataaagccaatttgctgtaacatatacacacaaaaggaacttttaaacacatctgacttttttgaattaggattttatactgtattaatgaaaagaaataatataaaaataaaagaaaaatgggggaggcgatgagtaaattagaactgatgaaaagattctgcccatttatccctcactagtgactgagcacaaagagagctcataaaagaaactctgcacctacttgaagtgagcccaccttcaaggaacccacagggaaaattcatttccaggagagcttctcacaacatgggctcataattgtctgcagtgaactctctaaaaatgatctcactggatgaggttccattgcctaaaaggtaacactgtcattaggctt

SEQ ID NO: 305649 - DNA, 567 bp, Homo sapiens
agtgttctgagaaggaagaggtgaatgtttcacatatttaccttcaagatgggagccataaagactgacagaccagtcagaataaacacaagggttccagtgactctttgttccctgaaaccaaatcaaaagattaccaatctacctcttgtcttcataaacatgctcttgtcttttcaccttcaaaaaaactacacattgacaaaatcaatgtttggctaaaacaacaaaggtgttgatatcatgtaaataatacctcaaggatagcgtataaacccaacgtaactataaaaaaatctcttaaagtgactgcaatatgtgatttgaattcacgaagaaagaagtaatcctgctaaattttttgctccytttggaatcaagaaagaaaaatcacttgctcttggtccatcaattactggactctttgaagaccttattttttaaagcaatttatcctcttgtgtaattacccttacaccttctttcataggagacagatattacattgtcccatattccaattaacaaacagctcaaggaaatttcattagcacaataaatcacatc

SEQ ID NO: 305650 - DNA, 438 bp, Homo sapiens
ttgctaacattttaggtctcaatataagtgccatcacattagggaactccctctcaacataccatctccttctccttcacaacatcagccacatttgcggtgtcacattstgcataattatgtgaattgtgcctctctctctcacagttccatgaggacaggaaccatgtatgtttttgttcaccaccaaactagcacttggcacagtgcgtaccacagaatggatactatagataaatgtttgatggataaatgaataaatgctaattcgctcattcaatggcactctgctagaccctggaggtaaagttataaataatacacagtccttccctccagtggtttactggaatggtagagctggtcaaaacaacaggtgtttataaaaccacagtgttaaaggcctacagtaggggtgaattcagggtgctaagaaag

SEQ ID NO: 305651 - DNA, 522 bp, Homo sapiens
caatataagtgccatcacattagggaactccctctcaacataccatctccttctccttcacaacatcagccacatttgcggtgtcacattgtgcataattatgtgaattgtgcctctctctctcacagttccatgaggacaggaaccatgtatgtttttgttcaccaccaaactagcacttggcacagtgcgtaccacagaatggatactatagataaatgtttgatggataaatgaataaatgctaattcgctcattcaatggcactctgctagaccctggaggtaaagttataaataatacacagtccttccctccagtggtttactggaatggtagagctggtcaaaacaacaggtgtttataaaaccacagtgttaaaggcctacagtaggggtgaattcagggtgctaagaaagcatccaggaggggtacccaacttagygcaaagtcagggatggtttgcatgggggtagtatttaggttgagttctaaaatatgagccataaccagctcagagat

SEQ ID NO: 305652 - DNA, 541 bp, Homo sapiens
cttccccttctgcctgccaatgttaacaagaatagcaggagagccgtgtttgagctcatggtgaccctgcacatgacaaccaacgttgcatttaaccttcacagtcccatgaggtagatcagaaaagtctgaatttatgggtaaagaagtcgagctctgcgcaggctcacagcattttttaaggttataccgtgagtctgtttcagacgaagtgaagttggtcctactccagatctgtttgttgtcttctaagagatcatgcctctcttaagctatccattgcccacrgtctcaagtgtcacagtacaacttcacaagctgatgagtaagaaaaaaataagacaattatgtagatgatgataatgcatggtggagtgtgacgatatccttaaagaaaatgtttatggaatttaagtccaagccaggatgggggcacatgtggttgaatggaacagggggcttcatggagcaggtcaaacgcaggtgagattcgactgtagagtagagggagtgtgtgggttgctggggagagaggcaggca

SEQ ID NO: 305653 - DNA, 608 bp, Homo sapiens
attaaaagacaaaggaagaatgaaagcaaagcattaaggcatccatgagccaccttgtgcattcaaattatataagaatgcaagctccatgaggcagkcatttggtttattttattcactgctgtatcattagaacttataagaagtatttcctgtatgaatgattgaaagaatcaagtgactgagtcaaataagacgtgtctgtggcttgattcagcccctggggaaagccaatgtatgacttgttttagaaagcatcctctaattcatccttttccctaatttggactggctttattcttcttcaatctctatctccattaaaatcacagaattttagcaccaagtaggcctctgaaattatttcaattagtatcacttgtttctgttggtcttggcttggctctataacttctgataatatttgtttcttaaaaagaaaccaacaaaccaaacaaaaagtagccatggaacccttttaatgggttattccgggagtcatagagcttctttgaaactctggggcctttgcttttttagcagtgggacgttgaaagactacagactctaaaacattgatatttacactattaagtggatgaattaac

SEQ ID NO: 305654 - DNA, 590 bp, Homo sapiens
ggataatacatttatgctgttataagcctctaggaatatgctaatttgttacagcaacaatagagaactacaatagaaaaagagtgaaaatacaatacagaatcctggaaaactaggcttggagagtgggatcctattagcagcagaagtggacactcctcaggaggctgaagtaggggaatcgcttgaacctgggaggtggaggttgcagtgagccgagatcgcgccactgccctccagcctggtgacagagcaagactctrtctcaaaaaaacaacacaaaacaaaaaaacaaagaagtggacactcctttagagggatctgaataacttatgaagaagacaccagagacacaaaaatggtccagcagttttggaaatacttttggaaaatatgaagcttgttgctggtggtgagtgtgaatgtgtgtgtgtgtgtgtaaagaaaggcttcaaaactggaattaaaacatagaatatttgaaataacaatttctggttttgaataccttttctaaaggtaaagtcacatttttaaataagtctttataataagcatgtatttgaatgtgcaatttaatttaagtaaac

SEQ ID NO: 305655 - DNA, 590 bp, Homo sapiens
ggataatacatttatgctgttataagcctctaggaatatgctaatttgttacagcaacaatagagaactacaatagaaaaagagtgaaaatacaatacagaatcctggaaaactaggcttggagagtgggatcctattagcagcagaagtggacactcctcaggaggctgaagtaggggaatcgcttgaacctgggaggtggaggttgcagtgagccgagatcgcgccactgccctccagcctggtgacagagcaagactctgtctcaaaaaaacaacacaaaacaaaaaaacaaagaagtggacactcctttagagggatctraataacttatgaagaagacaccagagacacaaaaatggtccagcagttttggaaatacttttggaaaatatgaagcttgttgctggtggtgagtgtgaatgtgtgtgtgtgtgtgtaaagaaaggcttcaaaactggaattaaaacatagaatatttgaaataacaatttctggttttgaataccttttctaaaggtaaagtcacatttttaaataagtctttataataagcatgtatttgaatgtgcaatttaatttaagtaaac

SEQ ID NO: 305656 - DNA, 593 bp, Homo sapiens
acagataaaatgcaactgggaaaatttttaaagtcacttcgtcttggttgatctttcatatactgactagacctggagaagaaaacaaacaaattgctaagtcccaagataccatggaagtcataaatgagtatatttggaacaacataagattaactgaagccatctggcatgttgactgctgactgttgaaagcacaacaggtcaaaatgaacccagatttgaaattggcagggttaaaacattttgcttcactcagaaactatttctagattccaagaaawtaagaaaaactaatttctcacctctagagttataaagataatataatgttctagaatgggcatcctgaaaaggcaaactttatggccacaaatgcatttttccctgaaaattggtcaattaaaaatgcaaatagcagccaaactcttggatatagctttgcagctttccccaccatcaactttcttaaatgcgtcacattttctgagaatttactttcaacaatggctgaggcatcattttaagtctcagtcttatgaaaacaaagattttcctgaaacagggttatctttttaactgtgtagtgtatt

SEQ ID NO: 305657 - DNA, 593 bp, Homo sapiens
acagataaaatgcaactgggaaaatttttaaagtcacttcgtcttggttgatctttcatatactgactagacctggagaagaaaacaaacaaattgctaagtcccaagataccatggaagtcataaatgagtatatttggaacaacataagattaactgaagccatctggcatgttgactgctgactgttgaaagcacaacaggtcaaaatgaacccagatttgaaattggcagggttaaaacattttgcttcactcagaaactatttctagattccaagaaattaagaaaaactaatttctcayctctagagttataaagataatataatgttctagaatgggcatcctgaaaaggcaaactttatggccacaaatgcatttttccctgaaaattggtcaattaaaaatgcaaatagcagccaaactcttggatatagctttgcagctttccccaccatcaactttcttaaatgcgtcacattttctgagaatttactttcaacaatggctgaggcatcattttaagtctcagtcttatgaaaacaaagattttcctgaaacagggttatctttttaactgtgtagtgtatt

SEQ ID NO: 305658 - DNA, 593 bp, Homo sapiens
acagataaaatgcaactgggaaaatttttaaagtcacttcgtcttggttgatctttcatatactgactagacctggagaagaaaacaaacaaattgctaagtcccaagataccatggaagtcataaatgagtatatttggaacaacataagattaactgaagccatctggcatgttgactgctgactgttgaaagcacaacaggtcaaaatgaacccagatttgaaattggcagggttaaaacattttgcttcactcagaaactatttctagattccaagaaattaagaaaaactaatttctcacctctagagttataaagataatataatgttctagaatgggcatcctgaaaaggcaaactttatggccacaaatgcatttttccctgaaaattggtcaattaaaaatgcaaatagcagccaaactcttggatatagctttgcagctttccccaccatcaactttcttaaaygcgtcacattttctgagaatttactttcaacaatggctgaggcatcattttaagtctcagtcttatgaaaacaaagattttcctgaaacagggttatctttttaactgtgtagtgtatt

SEQ ID NO: 305659 - DNA, 569 bp, Homo sapiens
ttatgttggagctttaagatttaatgagtgccctcctggatttagggtttgcatggggcctgtagctcctttgttttgtccaatttcttccatttggaatgggaacatttatccaatactggcacccccagtgtatctaggaagtaactaacttgcttttgattttaaaggcccctagtcagaagggacttaccttgtctcagatgagacttcgracatggacttttgagttaatgctagaatgagttaagactgacgaactattgcggaagcatgatcttgtttgcaaatgtgagaaagatgagacctaggaggcgccatggtacgactgatatggtctggatctgttcaccacccagaccttatcttgaattataatctaaattgtaatccctacatgttgagggagcgacctcattggaggtgatagcatcatgcgccgttcccccatgctgtcatcataatagtgagtgagttctcatgagttctgatggttttataaggggctcttccctctttgctctgaacttttctctcatgctgctttgtgaagaaggacatgtttgctt

SEQ ID NO: 305660 - DNA, 586 bp, Homo sapiens
gtgggtcaattaaacctctttttgttataaattaccgagtctcaggcagttctttatagcactatgaaaatagactaatacagccacctactgtgcatgacattttgccccagatgattagcatttctgaatctcaattatctcattaacaaagaagtaaagaatcatatacatgaaaactcaytggcataataccttataattcatgtaatatcagttatttttgtataccaggtgtgaccaatgtcattcacatgggatttaaatgagatcttttaaatttttttgaattaaaacctgttcatgatctcatgtgccaaattagtagagagtaaaatacttgtctcttgtgaattctttcttccctaaattttccatgaaacgtatgggcttagtccaaagatgttactcttccctctaactgccatgtagtgagacaactgatgaaatagagcaggtctcaagttttcagctgccatggcttctgttttgtcctagtgtcactgtataaaactgcctctgtattgtccagtgcagctttccctgttattggaatgtccagatccctgctgtatccactgctggt

SEQ ID NO: 305661 - DNA, 607 bp, Homo sapiens
tttttgttataaattaccgagtctcaggcagttctttatagcactatgaaaatagactaatacagccacctactgtgcatgacattttgccccagatgattagcatttctgaatctcaattatctcattaacaaagaagtaaagaatcatatacatgaaaactcactggcataataccttataattcatgtaatatcagttatttttgtataccaggtgtgaccaatgtcattcacatgggatttaaatgagatcttttaaatttttttgaattaaaacctgttcatgatctcatgtgccaaattagtagagagtaaaatacttgtctcttgtgaattctttcttccctaaattttccatgaaacgtatggrcttagtccaaagatgttactcttccctctaactgccatgtagtgagacaactgatgaaatagagcaggtctcaagttttcagctgccatggcttctgttttgtcctagtgtcactgtataaaactgcctctgtattgtccagtgcagctttccctgttattggaatgtccagatccctgctgtatccactgctggtctttgagagaggacaaaaacactttcataacatcagcct

SEQ ID NO: 305662 - DNA, 607 bp, Homo sapiens
tttttgttataaattaccgagtctcaggcagttctttatagcactatgaaaatagactaatacagccacctactgtgcatgacattttgccccagatgattagcatttctgaatctcaattatctcattaacaaagaagtaaagaatcatatacatgaaaactcactggcataataccttataattcatgtaatatcagttatttttgtataccaggtgtgaccaatgtcattcacatgggatttaaatgagatcttttaaatttttttgaattaaaacctgttcatgatctcatgtgccaaattagtagagagtaaaatacttgtctcttgtgaattctttcttccctaaattttccatgaaacgtatgggcttagtccaaagatgttactcttccctctaactgccatgtagtgagacaactgatgaaatagagcaggtctcaagttttcagctgccatggcttctgttttgtcctagtgtcactgtataaaactgyctctgtattgtccagtgcagctttccctgttattggaatgtccagatccctgctgtatccactgctggtctttgagagaggacaaaaacactttcataacatcagcct

SEQ ID NO: 305663 - DNA, 549 bp, Homo sapiens
catctcacaccagtcagaatagttaatattagaaagtcaaaaaacaacagatgctggcaaggctgcagagaaaagggaacactaatacattgttggtgggaatataatttagtccagccaatgtggaaagcagtttggatatttctccaagtacttcaaacagaactaccatttgacccagcaatcccattactaggtatatacccaaaaggaaaatcaatcattttaccaaaaagaaacacacacgtatgttcatcgcagcacaattcacaatagcaaagacatggaatccacccaggtacccatcaatggtagattggataaagaaaatgtggtacataatatgacacagctataaaaaagaatgaaatcatgccctttgcagcaacaytggtgtagctggaagtcataatcctaaacaaattaacacagaaacagaaaaccaaatactgcatgttctcacttctaagtgagagcgaaacattgaacacacatggacattaacatgggaaccacagacactgtggactactggagggggacaggaga

SEQ ID NO: 305664 - DNA, 528 bp, Homo sapiens
attcattattttttcagttttataggtgaactattttttgtagacacatgttggtatctttcttcttcacaaggttcagcaatttttgttaaaatatggcataatgtkagtcattctttgtgatttcctcctagaacacactgagcccttaggattgcagatcaagatttttagttccagatattttttcacttacatatttgaatgttttctgtttagtatattctattcactaaatttatattactaattattcaaaagtgatggctgcattgtctgttactcagatgtgctcttttaaaaattctttatcctttctctcctcattctttggaatttttctcattccatcctctatgtcaccgccttaaatttccatagtgtcatatcagttctgtttattgatgattctacagccttcaaaaaaaatctacactagtattatgcattcattctcttaattattttcatcatcactgctaacaccacttatcattcattttgtcattttctctctgatcttatatt

SEQ ID NO: 305665 - DNA, 528 bp, Homo sapiens
attcattattttttcagttttataggtgaactattttttgtagacacatgttggtatctttcttcttcacaaggttcagcaatttttgttaaaatatggcataatgtgagtcattctttgtgawttcctcctagaacacactgagcccttaggattgcagatcaagatttttagttccagatattttttcacttacatatttgaatgttttctgtttagtatattctattcactaaatttatattactaattattcaaaagtgatggctgcattgtctgttactcagatgtgctcttttaaaaattctttatcctttctctcctcattctttggaatttttctcattccatcctctatgtcaccgccttaaatttccatagtgtcatatcagttctgtttattgatgattctacagccttcaaaaaaaatctacactagtattatgcattcattctcttaattattttcatcatcactgctaacaccacttatcattcattttgtcattttctctctgatcttatatt

SEQ ID NO: 305666 - DNA, 579 bp, Homo sapiens
tatatgtataatgtttccctctatttcagagcaatggaatattytcagaaaatagacttgagagcaggttctataacttcatttctctttagttgcttcttcctctacccttctaccccccagtttagtctactcagataaagaataagcactatgttgttcatgtttgtggtaagtgaaaacagtcaactaatcactaatttaatcactaattttttctttgtgtgtatttgacactcaagttctttgcctttaataatgtttaatcagcattttatgtttcttttgtacctttttttttctttttttttgagatagggtctcactctgtcacccaggctggagtgcagtggcacaatcttgactcactgcaacctccacctcctgggctcaagccctcctcccacctcagcctcttgagtagctgagactacaggcatgcacaaccatacctggctaatttttgtatttttgtagtgatggagtttctccatgctgcccaggctggtctcgaactcctgagcttgggtgatccacccccgtcggcctcccagagtactgggattataagcgtgagcc

SEQ ID NO: 305667 - DNA, 579 bp, Homo sapiens
tatatgtataatgtttccctctatttcagagcaatggaatattctcagaaaatagacttgagagcaggttctataacttcatttctstttagttgcttcttcctctacccttctaccccccagtttagtctactcagataaagaataagcactatgttgttcatgtttgtggtaagtgaaaacagtcaactaatcactaatttaatcactaattttttctttgtgtgtatttgacactcaagttctttgcctttaataatgtttaatcagcattttatgtttcttttgtacctttttttttctttttttttgagatagggtctcactctgtcacccaggctggagtgcagtggcacaatcttgactcactgcaacctccacctcctgggctcaagccctcctcccacctcagcctcttgagtagctgagactacaggcatgcacaaccatacctggctaatttttgtatttttgtagtgatggagtttctccatgctgcccaggctggtctcgaactcctgagcttgggtgatccacccccgtcggcctcccagagtactgggattataagcgtgagcc

SEQ ID NO: 305668 - DNA, 522 bp, Homo sapiens
tcaaagtttcactgaaaaatcaactcataaaaggcagaatagtcagagaaatgacatacaatttattaacgtgtacacagggagagtcacgagtgattacctgacccccctctcaatggatgtagaagcttatatgtcatcttgaggttacagacagaataagggccgagagtagccaaagcaaagttatggtggtaaatcaggtgattgtcaagagaagctgtgggaggagagaagaggaggcttggctaacaaaggtggtcttcttatataaatgaaacctcacaggtagcagttgtcagagagtatagatgggaaatatttctttyagtcccttagaggtatcagattctcagttaatctttcctagatctggacaagggaaggcctgacagcgtcaatgcagattctctatagatgcaaatctctcccacaaaagacagctttgcaagcctacttctgtttgctggctctctgaacagccaactcaaaatgtgtcaaaaacatatattttgccgtaaa

SEQ ID NO: 305669 - DNA, 579 bp, Homo sapiens
taagcagcccatgcagccacctatcctgtgctgttcttgtgtccccatgctgggctttcagcccctaatgttcctcacacttctcattttcaagccattccactgcatcccattgagtctctgctgtctgctacacagggacccttccccttccacctctccaacrtgccctccatttcatgtcttcacacacaaccttctcaaatgggagcatcttataaatacaactgcatccaaaggtagttcagggtcaggatctgggatccatctggcctctgttctccaacggcccttttggccctctgctctcccccgactgtggaaacatctcttctcttttaatcatcccacacttggttaataataataatgattaatagttactgggagattaaggtgcttcaaatgttttaaatgtgtcatcattataagtgtttccttttcttcctgaagtgctagacaaggtcttccactaagaccaaggtggaggtggaaggtcagaagcttgaggagagaagaggtatgaaaaagtattggacagtgggaaagcagcttgttaaaaatataacaagatttcca

SEQ ID NO: 305670 - DNA, 593 bp, Homo sapiens
attaatctttgaattggggtaaaaaggagaaagaatagactgtggggaaaagtgatcatttcagaccagttcatgttgagctggtgaagtctgtggaacaaataagctatytgagttgtggtccagggttcagaaaaaatgggaagtacttatttggttgtcatctgcaaaaacatggtagtttcagcaatgggagtagatgagtttctttaagaagagcacatgtagagagaaaactactgtagtttgcaaaggggcttgccaagaaaaggaagtttctcaagaaggggatggtcaactctgccaaatgctgctgaaagatcacataagaaaaatactgcaacagcactcagcaatatgaatatgtcagcctattttagaacataaagatacaagaaccctaagttaccttccatgataacttaattatcagaataaaggaaaatgagaagctgtattggaagcagtcacctcaacagccacgcggttgccccaaactcagagacctcatagaaaaatgtaattcagctgtactcagactgttaactgactcatgaaacccaccttctcttttttcccaacatctttgcctc

SEQ ID NO: 305671 - DNA, 541 bp, Homo sapiens
tgaatatgtcagcctattttagaacataaagatacaagaaccctaagttaccttccatgataacttaattatcagaataaaggaaaatgagaagctgtattggaagcagtcacctcaacagccacgcggttgccccaaactcagagacctcatagaaaaatgtaattcagctgtactcagactgttaactgactcatgaaacccaccttctcttttttcccaacatctttgcctccaagaagacaggatttatcattgacatgggtttggttgctactatccgacatggatggttactgccacatcatttttgatgttttgacttccctcatgctttttctggtagctcttcactaacttctaggccagttaaccaacaccaggaaagcayggtaggtttcatttgattcaagggtcataaactacagaaatatatgcagcagagaagtattgcttgaattgccaaaggtagtaagaggtatgtgacaacagcctgtactgtttccttactttgtcatcactacactttttggaacgacag

SEQ ID NO: 305672 - DNA, 551 bp, Homo sapiens
ggacacccctggtgtagaacagatcaaatccaacacactcggacaaatatgtaccaacttacacagtcagagaaagggtttgcatttgattggttagctttactgaacctattgtgtatgggaagtatactgtcagatgagagcaatttttttccatagctaatattgacagcagggaagaggcagccctgttcacttacccacaacctcttttctattaaaaaatttcaagaaaagttctaagaaaaaacaggactctgccccctggcctctgaaaattttggactgatattctgtgctctctaacacatgtgaccacttaaatttaaattaattaaaaamataaaatttaacatttcaattccttagactaggcacatttcaagtgcttattaattacatatggctagcagctaccatatttcacaatacagatctagaaaattcccaccattgtggaaagttctattggcaatgttggttacagattaagcattttgtgagcaccaactaggtctgctggcctgccaaattttgggctctcttaactc

SEQ ID NO: 305673 - DNA, 484 bp, Homo sapiens
tccctgctgttaccacactgagacaaaaatgagaagatccaaatgcttaaaatcaatttaagattttattcttcaactattccctactaatcaaaatttctattaattaaataatcacttaaagtagtctatcaactagaataaccatattggactatggcacaagaaaagacataaacttttcttgtgtaaagccatagatattggacttctttgttacaaaagtgagcctgtactaagtaatagagaaatcggtcttgcaacaaaaactaaagtatgtggcattgacttagcaattaagtagtaggcagcaagaaaaccaatatcagaaaatagaaggctaaagaagccctttgatttggggaaaaaaatttaaaactctttcactgataactkggaaggaagaacaaatgcctcccagactagattggaaaacaggtcaatgttgtctattgcattttattggctgcacttagcaaggtat

SEQ ID NO: 305674 - DNA, 546 bp, Homo sapiens
ttatatgatcttgcacctgagcacagggtggtagaagcagccatgctgcactttgaaggtttttctttttagaaatttcttccaccagataccctaaatcatcactctaaaattcaaagttctgcagatctctagggcaggggcacaatgcagccaagttctttgctaaggcatgacaaaagtgacctttgctccagttcccaataagttcctcacttccatctgagatcttgtcagcttggccttcaatattcatatcgcatatcactatcagcattttgrtcacaaccatttaaccagtttctaagacactctgaacttttcttcatcttcctgttttcttctgagccctccaaactcttctaacctctgcctgttacccagctccaaagtcactgccacattttcagatatctttataacaatgccccattccacagtaataattttctgtatcagtctgttctctcattgctataaagaaatacctagaccggatcatttataaacaaaagaggtttaattggctcatagtccttcaggttg

SEQ ID NO: 305675 - DNA, 546 bp, Homo sapiens
ttatatgatcttgcacctgagcacagggtggtagaagcagccatgctgcactttgaaggtttttctttttagaaatttcttccaccagataccctaaatcatcactctaaaattcaaagttctgcagatctctagggcaggggcacaatgcagccaagttctttgctaaggcatgacaaaagtgacctttgctccagttcccaataagttcctcacttccatctgagatcttgtcagcttggccttcaatattcatatcgcatatcactatcagcattttggtcacaaccatttaaccagtttctaagacactctgaacttttcttcatcttcctgttttcttctgagccctccaaactcttctaacctctgcctgttacccagctccaaagtcactgccacattttcagrtatctttataacaatgccccattccacagtaataattttctgtatcagtctgttctctcattgctataaagaaatacctagaccggatcatttataaacaaaagaggtttaattggctcatagtccttcaggttg

SEQ ID NO: 305676 - DNA, 619 bp, Homo sapiens
gaattagctgcttaataccaacaggaacttgaaagcttaatgcttcttttttccttgtggtttctattataatttttagtggtttgttgatcaatctgaaaaaragtacatatagttttgagacctcttgccttttagcatatttgcttttgagtcagccatgaactgtcacagttgagaaataccctcctctgtgtccctctgaataaccctcaggaatcttcattcaagagaatgggaatgtagaaaggcttctggaacaatcgggcttttgtagctatcaaaattgagattctgtagttctaagatgggcccaaaattgcttctcaccaactagagttcttggtacacaatttaaccaatttttaaaattaattaattaataatttttgagacagagtctctctctctgttgcccagactggagtgcagtggtaccacctcaggtcactgcaacctatgactcctgggttcaagtgaatcccctgcctcagcctcctgagtagctgggactagaggcgcatgccaccacacctggcttattttttgtatttttagtagcgatggagttttgccatgttggccatggctggtctccaactcctggcttcaagtgatc

SEQ ID NO: 305677 - DNA, 619 bp, Homo sapiens
gaattagctgcttaataccaacaggaacttgaaagcttaatgcttcttttttccttgtggtttctattataatttttagtggtttgttgatcaatctgaaaaagagtacatatagttttgagacctcttgccttttagcatatttgcttttgagtcagccatgaactgtcacagttgagaaataccctcctctgtgtccctctgaataaccctcaggaatcttcattcaagagaatgggaatgtagaaaggcttctggaacaatcgggcttttgtagctatcaaaattgagattctgtagttctaagatgggcccaaaattgcttctcaycaactagagttcttggtacacaatttaaccaatttttaaaattaattaattaataatttttgagacagagtctctctctctgttgcccagactggagtgcagtggtaccacctcaggtcactgcaacctatgactcctgggttcaagtgaatcccctgcctcagcctcctgagtagctgggactagaggcgcatgccaccacacctggcttattttttgtatttttagtagcgatggagttttgccatgttggccatggctggtctccaactcctggcttcaagtgatc

SEQ ID NO: 305678 - DNA, 570 bp, Homo sapiens
tcgggcttttgtagctatcaaaattgagattctgtagttctaagatgggcccaaaattgcttctcaccaactagagttcttggtacacaatttaaccaatttttaaaattaattaattaataatttttgagacagagtctctctctctgttgcccagactggagtgcagtggtaccacctcaggtcactgcaacctatgactcctgggttcaagtgaatcccctgcctcagcctcctgagtagctgggactagaggcgcatgccaccacacctggcttattttttgtatttttagtagmgatggagttttgccatgttggccatggctggtctccaactcctggcttcaagtgatctgcctgtcttggcctcccaaagtggtgggattacaggcatgaaccaccatgcctggccaatttttttaccaaatgtttatgacattgagcaagtcatttgacttcaaagcctcagtttcctcaactgcaaacaatcggagtgacactgcctcatcagattgtcagttgattttattccttctgtctttcccttttgagaatttcattttaaata

SEQ ID NO: 305679 - DNA, 589 bp, Homo sapiens
ttacctggtaaactgctatggtcttacttcatgcatgtgaagctagcccttagccatagatgtgttggtatccctacacatgcttctagggccttttttctgtcgttttctcctctctgatactttttgctgctgattacagctgcttcaactgtctgaagtgtggtctatgcatactcaactcggaaggactgcttgtgctctgctctcacctcagctttctaaacttcagtcaagaagttgtcagcatgcacmgaagtgggtaattgtggggctcaccatctgaatcacgattctgagatgattgctgcctttagctgcctgttgtcctcaaagagttaatgtataaaactttacagtcttttatgatgggaagactattctggtttcagctacttcattgtggcctgaaaatatggtagtttcaacccaaatatatcagtaattatatcacatgtaatttaaaacttgaaataacaatgaagaatttccagctggataagaaaagtaaaaaacacttaaaatatgaattacactgtaaaagcaaggattcagaaatattgaaagtgaaaggacaaaaaagacatac

SEQ ID NO: 305680 - DNA, 586 bp, Homo sapiens
tcccttgtttgaaattttttcccgaatattggtggaaactttataattaggcataacatacagaatctgctcaaattttttaggtgaggaaacaattggggtgacttcagaagaataactcattatttcttcagcaactgttatgtgttagacacttgagaatacgtgaaactatcttaagtatttgtaaatatagtacctcacttattcctcaaaaaaaaaccccaatactaatatttgcctccactttacgtatgaagaaatttaggcctgtaggaggtatctggcttcctrgggctatgtactcagtgtcaaagctgggattagaaatcaggtgtcaaacatcagatatattattctttcctgtagagcaagcacaatatgtgtttgaacaaaggaatgacataatgaaaagatttccttgggaaaagcataaaacatataactgtaagactataacttcttttgatgtatcaagcacaatatagtgtttttcctacaatgtgtgtaaattgagtagtagctgaatccaacgaatgcaatgcacacgtttcccccagttctatcaaatactatgtacataact

SEQ ID NO: 305681 - DNA, 586 bp, Homo sapiens
tcccttgtttgaaattttttcccgaatattggtggaaactttataattaggcataacatacagaatctgctcaaattttttaggtgaggaaacaattggggtgacttcagaagaataactcattatttcttcagcaactgttatgtgttagacacttgagaatacgtgaaactatcttaagtatttgtaaatatagtacctcacttattcctcaaaaaaaaaccccaatactaatatttgcctccactttacgtatgaagaaatttaggcctgtaggaggtatctggcttcctagggctatgtactcagtgtcaaagctgggattagaaatcaggtgtcaaacatcagatatattattctttcctgtagagcaagcacaatatgtgtttgaacaaaggratgacataatgaaaagatttccttgggaaaagcataaaacatataactgtaagactataacttcttttgatgtatcaagcacaatatagtgtttttcctacaatgtgtgtaaattgagtagtagctgaatccaacgaatgcaatgcacacgtttcccccagttctatcaaatactatgtacataact

SEQ ID NO: 305682 - DNA, 597 bp, Homo sapiens
gagagtacattttgttatgtgtattttactacmattttataaaaacattaaagagaaataaatttgaagtaagcattatgattttcattttacagatgtctaaactaagatctagagctgttcagtgatgtgtggtagtctcccagcaagccagggccagagcttggacacctcattgagacctccataaaaagaaccctaaccaaacaaaaagtggagctacacagaaataccatctgcataataaaggcaattattttttgtcacagtattttgtaagtgagcctcttttttaaggaaataagagttttaggacttgggaggtatataaacatctcaatttgagagacgaaaggaaaattcttgattgcttttatggcctggtaacagcttccttttgagtaatgaatgatgagattagtaaacatcatgctttttatatctggtcaatgaagttttgtcttgaggtatatccaaaagagaggttgcatctcaataagatctctctctggcaagatcctagccaggacagcaggtaagaatgaatgtatgatgccatagaatcaaagatcagaatggccttggtgaggtggctca

SEQ ID NO: 305683 - DNA, 597 bp, Homo sapiens
gagagtacattttgttatgtgtattttactaccattttataaaaacattaaagagaaataaatttgaagtaagcattatgrttttcattttacagatgtctaaactaagatctagagctgttcagtgatgtgtggtagtctcccagcaagccagggccagagcttggacacctcattgagacctccataaaaagaaccctaaccaaacaaaaagtggagctacacagaaataccatctgcataataaaggcaattattttttgtcacagtattttgtaagtgagcctcttttttaaggaaataagagttttaggacttgggaggtatataaacatctcaatttgagagacgaaaggaaaattcttgattgcttttatggcctggtaacagcttccttttgagtaatgaatgatgagattagtaaacatcatgctttttatatctggtcaatgaagttttgtcttgaggtatatccaaaagagaggttgcatctcaataagatctctctctggcaagatcctagccaggacagcaggtaagaatgaatgtatgatgccatagaatcaaagatcagaatggccttggtgaggtggctca

SEQ ID NO: 305684 - DNA, 587 bp, Homo sapiens
cagactggagtgcagtgggatgatcttggctcactgcaacttccacctccctcctcccaggttcaagggattctactgcctcagcctcctgagtagctgggattacaggtgyctgccagcacacccagctagtttttgtatttttaatagagatgggttttcaccatgtaggccaggctgtctcaaacacctgacctcaagtgatctgcccaccttggcttcccaaagtgctgggattacaggcctgagccattgtgctgggcccattgtgtggaatgtttattcttcttcttcttcttctttttttttttttttgagatagtttcgctttgttgtcaggctggtgtgcagtggcgtgatctcagcttactgcaacttctgcctcccgggttcaagcaattctcctgcctcagcctcccaagtagctgggactataggtgcactcgaccacacccagctaatttttgtatttttagtagagacagggtttcaccatgttggccaggatggtcttgatctcttgacctcgtgatctgcctgccttggcttcccaaagagcttggattacaggcgtgagccactgcgcc

SEQ ID NO: 305685 - DNA, 587 bp, Homo sapiens
cagactggagtgcagtgggatgatcttggctcactgcaacttccacctccctcctcccaggttcaagggattctactgcctcagcctcctgagtagctgggattacaggtgtctgccagcacacccagctagtttttgtatttttaatagagatgggttttcaccatgtaggccaggctgtctcaaacacctgacctcaagtgatctgcccaccttggcttcccaaagtgctgggattacaggcctgagccattgtgctgggcccwttgtgtggaatgtttattcttcttcttcttcttctttttttttttttttgagatagtttcgctttgttgtcaggctggtgtgcagtggcgtgatctcagcttactgcaacttctgcctcccgggttcaagcaattctcctgcctcagcctcccaagtagctgggactataggtgcactcgaccacacccagctaatttttgtatttttagtagagacagggtttcaccatgttggccaggatggtcttgatctcttgacctcgtgatctgcctgccttggcttcccaaagagcttggattacaggcgtgagccactgcgcc

SEQ ID NO: 305686 - DNA, 587 bp, Homo sapiens
cagactggagtgcagtgggatgatcttggctcactgcaacttccacctccctcctcccaggttcaagggattctactgcctcagcctcctgagtagctgggattacaggtgtctgccagcacacccagctagtttttgtatttttaatagagatgggttttcaccatgtaggccaggctgtctcaaacacctgacctcaagtgatctgcccaccttggcttcccaaagtgctgggattacaggcctgagccattgtgctgggcccattgtgtggaatgtttattcttcttcttyttcttctttttttttttttttgagatagtttcgctttgttgtcaggctggtgtgcagtggcgtgatctcagcttactgcaacttctgcctcccgggttcaagcaattctcctgcctcagcctcccaagtagctgggactataggtgcactcgaccacacccagctaatttttgtatttttagtagagacagggtttcaccatgttggccaggatggtcttgatctcttgacctcgtgatctgcctgccttggcttcccaaagagcttggattacaggcgtgagccactgcgcc

SEQ ID NO: 305687 - DNA, 587 bp, Homo sapiens
cagactggagtgcagtgggatgatcttggctcactgcaacttccacctccctcctcccaggttcaagggattctactgcctcagcctcctgagtagctgggattacaggtgtctgccagcacacccagctagtttttgtatttttaatagagatgggttttcaccatgtaggccaggctgtctcaaacacctgacctcaagtgatctgcccaccttggcttcccaaagtgctgggattacaggcctgagccattgtgctgggcccattgtgtggaatgtttattcttcttcttcttcttctttttttttttttttgagatagtttcgctttgttgycaggctggtgtgcagtggcgtgatctcagcttactgcaacttctgcctcccgggttcaagcaattctcctgcctcagcctcccaagtagctgggactataggtgcactcgaccacacccagctaatttttgtatttttagtagagacagggtttcaccatgttggccaggatggtcttgatctcttgacctcgtgatctgcctgccttggcttcccaaagagcttggattacaggcgtgagccactgcgcc

SEQ ID NO: 305688 - DNA, 597 bp, Homo sapiens
tcttttcagtccagtcctgtgtcatcattgtcttcatcatcatcatcatcattgtcatctttgttttttagagatcggatctctttctctgtctcccaggctgaagtgcagtgctgtgatcataactcattgcagcctcgaactcctgggctcaagcgaatcctcctgcatcagcccttgagggttcaggactctcagcccttgaggtgctgggactgcagatgtgcaccttcatgcctagctaagtttttattttktagagatgaggtcttagttgtgcaggctggtcttgaaagtctgacctcaggcaatcctccagtctcctgaagagctgggattacgaagatgagccactgtacccagctttgtatcttctaatagaagctcgcaatccttgattggaaacccttggggacacatgttttaaaattcagaatgttatggaaattagaaaggtaatgtggagcataaactatacattccacaacatcccactttcagtggggtctgcagtagcacttcctggtcagctcattactgccgttaaatatgtggatgttcatgctaggtgggatgtgagataaataaaggacataa

SEQ ID NO: 305689 - DNA, 494 bp, Homo sapiens
ctgtgttacctttcgggtatccgtgaataattgaacctatgtttgttatattagttagacttgctgtgcagcagtaaaccaaattgccacatttctaatttaatgtaacaaagacatatgtctctttcacctcaaagtcagaggtggtttargagtctccttggcttttctccttgaacagtgactcgactcagggatctgggatgtttccattgtgtaactccgtcttttttttttttttttttgagatagagtctcgctccattgcccaggctggagtgcagtggcgtgatctcggctcactgcaagctctgcctcttgggttcaagaaattctcctgcctcagcctcccaagtagctgggattacaggcgcccaccaccacgcccagctaggtgtttttttatttttttttatttttagtagagacagggttttgccatgttggccagcctggtcttgaacttctgacctcaggtgatccactcaccttgg

SEQ ID NO: 305690 - DNA, 503 bp, Homo sapiens
caatatttactcatctaagagcagccagtttgaatattaaccaggtcagtatggaagcaggacttgggacatgctccagtctctgctgggatttgctaagtaggtgagaactaaataagaattgattataagtctcagaaggatgggaggaggaaagccaagcttctataatcaattctttgtttatagaggaggtgatccttcattttctctgagggctcagcagaataatggacttcttttttcccaacactagggtccagaaaatattactcgtcacctcctacaatgtaagccccattgagtatcccagrattctgtgatgatttaactatgaatcacccactcccaggtattggagagttgactcttgctttgatttcactgagatttgggatcatcctggccgtctttcctccatcctctattaatgagtcactggactatgctggaattagctggatattccacattgtttatcagtggctgtgtgcttttgtggc

SEQ ID NO: 305691 - DNA, 627 bp, Homo sapiens
taggttgagtgtgtaaagggtcattccctcagaggtgcatggggcatcttayttgaaggaaagagaatggatgatgaataaaaacatcatccattttccatcatctgtgcttatagtagtagccttactaagaaagactccaagcatggaatctagctagattcagctctactcaaggaatgtttccatcgatcaatcagagacaaagcctatgacttcacttggcattattctcaccagcaaaatccccttcttattccagctgtcaatcctccacctccactgcaacacacaccttgctgctgttgacaccctgtgacttgcttcccacagatgggtgtctgcgtttaagagcatgcattattgtcattgaaataacaggatgctaaaacctttataaattgatatgccagaaaagagggaggcaaaaatgaatgctaagtttcttcgcataatactctgtgggatgtgtttttccccctaagaatatcttagcattaattaagataaacaatgatatatgctgaaagacaattgaatctgttctcggttaaaaatggcttcgttgtgtaaaaatagtacccaaattatagcatataaagatgcagggggaaaaatactgtaaac

SEQ ID NO: 305692 - DNA, 627 bp, Homo sapiens
taggttgagtgtgtaaagggtcattccctcagaggtgcatggggcatcttacttgaaggaaagagaatggatgatgaataaaaacatcatccattttccatcatctgtgcttatagtagtagccttactaagaaagactccaagcatggaatctagctagattcagctctactcaaggaatgtttccatsgatcaatcagagacaaagcctatgacttcacttggcattattctcaccagcaaaatccccttcttattccagctgtcaatcctccacctccactgcaacacacaccttgctgctgttgacaccctgtgacttgcttcccacagatgggtgtctgcgtttaagagcatgcattattgtcattgaaataacaggatgctaaaacctttataaattgatatgccagaaaagagggaggcaaaaatgaatgctaagtttcttcgcataatactctgtgggatgtgtttttccccctaagaatatcttagcattaattaagataaacaatgatatatgctgaaagacaattgaatctgttctcggttaaaaatggcttcgttgtgtaaaaatagtacccaaattatagcatataaagatgcagggggaaaaatactgtaaac

SEQ ID NO: 305693 - DNA, 627 bp, Homo sapiens
taggttgagtgtgtaaagggtcattccctcagaggtgcatggggcatcttacttgaaggaaagagaatggatgatgaataaaaacatcatccattttccatcatctgtgcttatagtagtagccttactaagaaagactccaagcatggaatctagctagattcagctctactcaaggaatgtttccatcgatcaatcagagacaaagcctatgacttcacttggcattattctcaccagcaaaatccccttcttmttccagctgtcaatcctccacctccactgcaacacacaccttgctgctgttgacaccctgtgacttgcttcccacagatgggtgtctgcgtttaagagcatgcattattgtcattgaaataacaggatgctaaaacctttataaattgatatgccagaaaagagggaggcaaaaatgaatgctaagtttcttcgcataatactctgtgggatgtgtttttccccctaagaatatcttagcattaattaagataaacaatgatatatgctgaaagacaattgaatctgttctcggttaaaaatggcttcgttgtgtaaaaatagtacccaaattatagcatataaagatgcagggggaaaaatactgtaaac

SEQ ID NO: 305694 - DNA, 627 bp, Homo sapiens
taggttgagtgtgtaaagggtcattccctcagaggtgcatggggcatcttacttgaaggaaagagaatggatgatgaataaaaacatcatccattttccatcatctgtgcttatagtagtagccttactaagaaagactccaagcatggaatctagctagattcagctctactcaaggaatgtttccatcgatcaatcagagacaaagcctatgacttcacttggcattattctcaccagcaaaatccccttcttattccagctgtcaatcctccacctccactgcaacacacaccttgctgctgttgacaccctgtgacttgcttcccacagatgggtgtctgcgtttaagagcatgcattattgtcattgaaataacaggatgctaaaacctttataaattgatatgccagaaaagagggaggcaaaaatgaatgctaagtttcttcgcataatactctgtgggatgtgtttttccccctaagaatatyttagcattaattaagataaacaatgatatatgctgaaagacaattgaatctgttctcggttaaaaatggcttcgttgtgtaaaaatagtacccaaattatagcatataaagatgcagggggaaaaatactgtaaac

SEQ ID NO: 305695 - DNA, 509 bp, Homo sapiens
agattgtagaggaatttgaaaggtatttgttcaacagtaatttttaaatgacatgttgttattacaaaaataatgcattttcctcatctacaaaaatttaaagaatgctaaatggcatgctccactcacatcccctaaaatccctttaccatttcttcacatctcttcctcaacattggtaagcttttgctcccaatggcctgcacctgtggctttgcctcgaaggcctgccttcaggctactggagcagctgcattcatcatgtctgggatttttacatccccgtccagggtggcctttaaccaatgactgctgagtgaaggagtttgaaagcccagcttccttgccttgggttagaataaaccyaaggtgtaatttacacttagaatttctctgtgagatcaggctgaagttatcctctatggcaggggtccccacctttttggcatcagggaccacgtttgtggaagacaatttttccatgcatggtgggggcatggttttgggat

SEQ ID NO: 305696 - DNA, 583 bp, Homo sapiens
tgggatagtccatcacgcttactacgcagttcatctctagtgttgcttttttgcttttttttttttttttaatctcctggttttttacgttttcacccaatttgggttattcttctcttcctccctctctgtcactactcaaatcatttcccagacccttcccctttgcatattaatagggagagctcagggtgactgcattttttgtcatttcccctgccccttctgaaccctaaacttagcagtctccatcttgctgcatcttagaatcatctggaagagcttctcaaacataatgccagggtcttaggcccagagattctattctatttgatctacagtggagagtgttttaagctctttctccaagtgattcaatgcacaatcaggkttgagaaaccctaccttagcccctgtgatctgcacagcatctgcagctttgaaatcagtaacctgggataaaactgcctctacagaggggccccactaggctactatgcttcatgctcaggtggtcctcattaccaagcccaccgccccaaatcaacccttacaactaaaagtgctgctcttacaaaggcca

SEQ ID NO: 305697 - DNA, 583 bp, Homo sapiens
tgggatagtccatcacgcttactacgcagttcatctctagtgttgcttttttgcttttttttttttttttaatctcctggttttttacgttttcacccaatttgggttattcttctcttcctccctctctgtcactactcaaatcatttcccagacccttcccctttgcatattaatagggagagctcagggtgactgcattttttgtcatttcccctgccccttctgaaccctaaacttagcagtctccatcttgctgcatcttagaatcatctggaagagcttctcaaacataatgccagggtcttaggcccagagattctattctatttgatctacagtggagagtgttttaagctctttctccaagtgattcaatgcacaatcaggtytgagaaaccctaccttagcccctgtgatctgcacagcatctgcagctttgaaatcagtaacctgggataaaactgcctctacagaggggccccactaggctactatgcttcatgctcaggtggtcctcattaccaagcccaccgccccaaatcaacccttacaactaaaagtgctgctcttacaaaggcca

SEQ ID NO: 305698 - DNA, 577 bp, Homo sapiens
ttatttcctatagatgtgtttttaaattggggcacacttttaaaaaaaatcctaatatgcttactttattttatttctgactaattcttttcttactgaaactaacatattatttcagataactctacgttctatcttctgtatacataatccataccctgtgtacaacatggttgccagggagacctgtctttaaattgatcagcaaacaagttttagagggttggctttaaaacacaaacttacaaagtgactccaaagcctcagtttaagagaaaatgttccaagaagtctcacttcgagaaacacttattctgcaacacccagataaatgttagataacggacgacatttcaggacttctcgaacgttgccacagaatccccctccctggccgccatcttgtaggactgtgggagtcctcagcaktcactcagaaactacattctttcttcatattcagcaccacagcaatgaaattaacgggttgagcattttctccttaataagtgctgcagatataaatgtctcagccatttgtctttcagtgggggttaaaaaaacaacaaaacaaaca

SEQ ID NO: 305699 - DNA, 515 bp, Homo sapiens
attactggacactggctctgaattgacaccaattcctgggaaccccaaacatcactgtggtccactagtcagaggaagagcttatggaggtcagtcaagcaatggcgttttagctcagatccatctcacagtgagtacagtgggtccccaaatccatcctgtggttagttccctggttccaggaggcatcttagarcagacacatttaacaagtggcagaatctcttaaaaattatttgttatttatatgaaattcaaattgaactgggcactctgtgttttgtgctgttgttgtttttgctaaatctggcaatcctacttcaaggaaacaccaagtggaaaaaccaccatgtgagcaacagcttagaggacatgagagtgagggtctattaagaagactgtgagtatcctgagttggacggtaaaatccaagggccagaggacatgaaattcagtgagctgagggactttgcaagactctggaaattttccttttttaaaagagccagtttgtc

SEQ ID NO: 305700 - DNA, 515 bp, Homo sapiens
attactggacactggctctgaattgacaccaattcctgggaaccccaaacatcactgtggtccactagtcagaggaagagcttatggaggtcagtcaagcaatggcgttttagctcagatccatctcacagtgagtacagtgggtccccaaatccatcctgtggttagttccctggttccaggaggcatcttagagcagacacatttaacaagtggcagaatctcttaaaaattatttgttatttatatgaaattcaaattgaactgggcactctgtgttttgtgctgttgttgtttttgctaaatctggcaatcctacttcaaggaaacaccaagtggaaaaaccaccatgtgagcaacagcttagaggacakgagagtgagggtctattaagaagactgtgagtatcctgagttggacggtaaaatccaagggccagaggacatgaaattcagtgagctgagggactttgcaagactctggaaattttccttttttaaaagagccagtttgtc

SEQ ID NO: 305701 - DNA, 515 bp, Homo sapiens
attactggacactggctctgaattgacaccaattcctgggaaccccaaacatcactgtggtccactagtcagaggaagagcttatggaggtcagtcaagcaatggcgttttagctcagatccatctcacagtgagtacagtgggtccccaaatccatcctgtggttagttccctggttccaggaggcatcttagagcagacacatttaacaagtggcagaatctcttaaaaattatttgttatttatatgaaattcaaattgaactgggcactctgtgttttgtgctgttgttgtttttgctaaatctggcaatcctacttcaaggaaacaccaagtggaaaaaccaccatgtgagcaacagcttagaggacatgagagtgagggtytattaagaagactgtgagtatcctgagttggacggtaaaatccaagggccagaggacatgaaattcagtgagctgagggactttgcaagactctggaaattttccttttttaaaagagccagtttgtc

SEQ ID NO: 305702 - DNA, 515 bp, Homo sapiens
attactggacactggctctgaattgacaccaattcctgggaaccccaaacatcactgtggtccactagtcagaggaagagcttatggaggtcagtcaagcaatggcgttttagctcagatccatctcacagtgagtacagtgggtccccaaatccatcctgtggttagttccctggttccaggaggcatcttagagcagacacatttaacaagtggcagaatctcttaaaaattatttgttatttatatgaaattcaaattgaactgggcactctgtgttttgtgctgttgttgtttttgctaaatctggcaatcctacttcaaggaaacaccaagtggaaaaaccaccatgtgagcaacagcttagaggacatgagagtgagggtctattaagaagactgtgagtatcctgagttggayggtaaaatccaagggccagaggacatgaaattcagtgagctgagggactttgcaagactctggaaattttccttttttaaaagagccagtttgtc

SEQ ID NO: 305703 - DNA, 609 bp, Homo sapiens
agtaattgacagaaggaatagaaaatcagcaaggatatacaacactatgaaccaactttatctaattgacatttacagaatgtccactcaacaacaacagaatacacattctattcaagttcacatgaaccattcagcaagatattctgggccataaaacaactttaacaaatttaaaatactgaaataatacaaagtatattctgcaaccatgtgagattaaattacaaaccaataatataaacatatctagaaaatatcaaaatacttgcaaattaagtaacatagttctaaacaacccgtggattaaatagggaggtacaatgaaaattaggaaatattttgaatttaataaaaaagaaattttgacatatcaaggtttgtggaacacagataaacaatgtttacagggaaytctgtatcattaaatacttatgtctgaaaataagaaaggtctcaaatcgtagcctaagcctccaccttaaaaaactagaaaaaaaaagtaaaagaaataaaatccaagtcaggcgaaagaaagtaaataataaagataagagtagaacaataaagttgaaaagagaaaaacacttgagaaaaaaaatggtgcat

SEQ ID NO: 305704 - DNA, 568 bp, Homo sapiens
gtcactgttcttttgatagggattatattaaatctgtagatcactttaggtagtatggtgattttaacaatattaattcttccaatacttggacattgtactttttgtgcaggaatttaagaaaaattgttttaaaaattaaaaaacccaatacttggacatgggatgtctttccatttatttgtgccttaattgattttttcatcaatattttatagtttcagtgtggagatctttcatctccttggttaagtttattcctaggtatcttacatttttgtagctatgatatgtgagtttttttatttctttttcagatagtttgctgttagcatatagaaatgctactaatttttatgtattgattttgtatcttgcaaatttgctgaattcattgatcagctataataattttttggtggagtctttagggttttctgtrtatgagatcatgttgtctgcaaacaggaacaatttgacttcatgtttttcaatttgcatgatttctatttttttttcttgcctaattgctctggctaggacttctagtactatattgaataggatt

SEQ ID NO: 305705 - DNA, 568 bp, Homo sapiens
gtcactgttcttttgatagggattatattaaatctgtagatcactttaggtagtatggtgattttaacaatattaattcttccaatacttggacattgtactttttgtgcaggaatttaagaaaaattgttttaaaaattaaaaaacccaatacttggacatgggatgtctttccatttatttgtgccttaattgattttttcatcaatattttatagtttcagtgtggagatctttcatctccttggttaagtttattcctaggtatcttacatttttgtagctatgatatgtgagtttttttatttctttttcagatagtttgctgttagcatatagaaatgctactaatttttatgtattgattttgtatcttgcaaatttgctgaattcattgatcagctataataattttttggtggagtctttagggttttctgtgtatragatcatgttgtctgcaaacaggaacaatttgacttcatgtttttcaatttgcatgatttctatttttttttcttgcctaattgctctggctaggacttctagtactatattgaataggatt

SEQ ID NO: 305706 - DNA, 498 bp, Homo sapiens
atttctgtaatattagttgtaatgtctccatttccatctctgattttatttatttggatattttctcttttttttttaagttagtctcactaaggatttgttgattttgattatcttttcaaaaagccaactcttcttttgttaatttttttgagttttcttttgttctccacttcatttatttttgctctgagacttattatttccttccttctaccattttgggtttagttcttagttttttagatcctggaagtgcatggttacattctttattagaaatctaataaggatttattagatagatagatagatatattaggtgtttattgctatgaaattccatctcaggactgcttttgctgtattccaaaagttttggtatgatgtgtttccatttttatttatctcaaataatttttaaattttccttttagtttcttcattgaygtattggttatttaggagcacgttgtttaatttttcacgtatttgtaa

SEQ ID NO: 305707 - DNA, 636 bp, Homo sapiens
gctgtacttctgctgcagtcttccacaacatccctgattccctgccactctgatgggcgcatgggctcttttacaaatgtgccgtggtccgtgcattgtgctgctgttgtgcccctctgctgcaayggcaaggaagtccctttgccttgcgtacatggaacttgggtgccaggctcccaaagcagttcttcttgtgcccagaacctctcagccaagtgccagtttctcttctcccgtgaagactcaagccaacatagaccagtatagcttctcatgtctcaaagctcatgagaaatttacaaaaaggatcagtggacctctggatttttctgccttgtgctcaaagctcagaaggccctgcgttacatttaggaaggggaggcacaaggagaggatgtgccatgaagccactgctgaaaagcagacttagtggttcacactcaggcatgtccatcagtcaagctctccaagctgtgttttttagtgtgttgcataagccacacgtggtgtggagggaatggtgttagtttatgccaaatcaacagcagcaaaaataatgacatcatggacaataataaaatagtcaaccagcaacagatggaagggaagaattccagttatgctaagaaactgtta

SEQ ID NO: 305708 - DNA, 636 bp, Homo sapiens
gctgtacttctgctgcagtcttccacaacatccctgattccctgccactctgatgggcgcatgggctcttttacaaatgtgccgtggtccgtgcattgtgctgctgttgtgcccctctgctgcaacggcaaggaagtccctttgccttgcgtacatggaacttgggtgccaggctcccaaagcagttcttcttgtgcccagaacctctcagccaagtgccagtttctcttctcccgtgaagactcaagccaacatagaccagtatagcttctcatgtctcaaagctcatgagaaatttacaaaaaggatcagtggacctctggatttttctgccttgtgctcaaagctcagaaggccctgcgttacatttaggaaggggaggcacaaggagaggatgtgccatgaagccactgctgaaaagcagacttrgtggttcacactcaggcatgtccatcagtcaagctctccaagctgtgttttttagtgtgttgcataagccacacgtggtgtggagggaatggtgttagtttatgccaaatcaacagcagcaaaaataatgacatcatggacaataataaaatagtcaaccagcaacagatggaagggaagaattccagttatgctaagaaactgtta

SEQ ID NO: 305709 - DNA, 521 bp, Homo sapiens
caggaactagtgtaggaaaatatgaattagggaggaattgatagcagttggttggttaggcaatcatgacagatgagtggtctggtgtctcattgcagtgacctggtaagtttcagtttcttgatactacctcatggtcagtttcctgagaaaggaactcagataaggtaaatggaagtttctcaagttttaagactgggwatgtcaatttctacatttatttaaagaaccataaatatcagttctatgggataattgggctggttttataaagaaagtgatatttctttcaccttgagtttggactttagaattatacacaaaataaatatttccaagttcatccttgctcactgtaatttgagagactctagttactggtaaggttaccatttagacacgttccagtcgttcttgtccctgtgtctttcccccctcaccctgccctttctaacctttcaggtattggaagtgagttcccttctgagaccacacttttgaattgctcatatacctgcttg

SEQ ID NO: 305710 - DNA, 598 bp, Homo sapiens
agactagcctgatcaacaaagcaagacctggtctctactaaaaataaaaaattagctgggcatggtggtgcgaacctatagtcctagctacttgggaggctaaagtgagaggactgctcgagcccaagagtttggggttgtagtgagctaggatcacaccactgcactccagcctgggtgtccctaaaatgtatgtatgtaaaaatacgtaaataaataaatcaataaaakgagtgaagtattttgggcctttcttgcatcaggacgctgtgaagaaattcacagccactcatttccattgtgattgcagtcagggcagtcctgtgaggctgctgttatcttccgcacattacagatgaggaagctgagattccaagaagttaaattacttgtaccaggcttggctggccagagagagtcatatctctactccaaagccaatcccatcactctggtacacattgaaagaaaaggaagagtaaactcgcacagaggaaacttaccaactccacaatactgcccacagccagccagatcctgtctagaaggaggcatgcatggagtggagacaccatcttagacatacttgcatgttctc

SEQ ID NO: 305711 - DNA, 598 bp, Homo sapiens
agactagcctgatcaacaaagcaagacctggtctctactaaaaataaaaaattagctgggcatggtggtgcgaacctatagtcctagctacttgggaggctaaagtgagaggactgctcgagcccaagagtttggggttgtagtgagctaggatcacaccactgcactccagcctgggtgtccctaaaatgtatgtatgtaaaaatacgtaaataaataaatcaataaaatgagtgaagtattttgggcctttcttgcatcaggacgctgtgaagaaattcacagccactcatttccattgtgattgcagtyagggcagtcctgtgaggctgctgttatcttccgcacattacagatgaggaagctgagattccaagaagttaaattacttgtaccaggcttggctggccagagagagtcatatctctactccaaagccaatcccatcactctggtacacattgaaagaaaaggaagagtaaactcgcacagaggaaacttaccaactccacaatactgcccacagccagccagatcctgtctagaaggaggcatgcatggagtggagacaccatcttagacatacttgcatgttctc

SEQ ID NO: 305712 - DNA, 569 bp, Homo sapiens
cccacagccagccagatcctgtctagaaggaggcatgcatggagtggagacaccatcttagacatacttgcatgttctcattcacaagtgggagctgaacgctggatactcgtggacataaaggtggaaataatagacactgggggactactagaggggaaggggaggagggtaagggttgaaaaactaaccactgggtatgatgctgagtacctgggtgactggatcatgtgtatcgcacccagcatcaggcaatatatccatgtagcaaacctgcgtgtgtgccacctaaatctaaaataaaagttgaaattataaaagcaaaaaagatcagcaagtcaggccccaaccagtcctggacccatcaaggtgtagtattattagcgccaagagctgttgtatagagctcacctctctctatatagtccttctaaagrtcctttctccatagagaaaggtgccccataggcaggaacataaacctgttgaacctcactcaacacttggcaagagggaaacactctgggaaagacagcttgggaacaaccattcccttttccaacctaagg

SEQ ID NO: 305713 - DNA, 626 bp, Homo sapiens
tgttattttctttgccatagcaactttgagaagtaaatgggtgcttttgctacacctcagggggaatsaggtaagtgaggtaaacctaccagagagtccacctcttccaaggtgcattcattcatctcccttagaatggagatggagttatgaagtaaccaggggtggcattatcagtcctacatggggaaaccaagactcagcatgaccactggagtgttcagggtcacctgagggtattggtgatggagggtggggtgagacaatatcccaggaattccgatgctgggtccagagttagtgaagtgggaggagtggcacatttttaagacttggaactgaagaaaatgttgagaaacttggatgcttttcttatttttattattctatgtaaggaactttctacagcactaaagtgaatagttccattgagttgtccagccctgacccttgatctcaatgcccatcagtggcctcagacttgggctttctttcaggctttctttcatcctccaggctgtggggccctgtgagccttcttcttccccagcggtagatttttctttttaatgtttgaactccagaggcccccaagggcttctgccttaattaaaatttaaattcac

SEQ ID NO: 305714 - DNA, 517 bp, Homo sapiens
gtagacagaagcgacggatgtgcatgaggagctgagacagacagctgcctggaattgagccttacttagcctggaaggtatgactatgtctgtgaatcctcattggaagaagttttattggtcagacatcctgttccatgtcagcctctccctctaggatcttttgcttcctgcaaggagtggggcctggtatgtttatcttttgcatttgtcatttatagtgagtcagcatcaattcatcctttcccacagtattgtgaatttcctttggggaagcacacttttggtactctccagtggattaggtggcattagccccaccttcactccagtgctgggccctgattcccttaagtcaattagcgtactccattccccaggccataatgactgattcagggatggrccaaagagagccaggctttggattttttattcaactgtcagagtaaagagaaagaacttctctttcctctgcacatgaattgggcagccatcttgaaatagtaagaagaga

SEQ ID NO: 305715 - DNA, 582 bp, Homo sapiens
agacttgcttctcatcctattacctttggtgcgattgggatttgttaaccaggagcatgtattacttgctttattaaacatttccagtatttaaaaaaagagtatacagaataatacaacaaaacacccatgtcctcacaacccaacttaagaaataaaacatcacaatataaataataagtccctccttcactctttgccttcctccttccccagaagtaactgtcactctgaatttggcattcacttttacacttctcttacatataaacttggcttacatttgctttmaattaattcagctactatttatttatttactttgtatcctaccatagatattcttttgcaatctgggtttttttttaactctacactgtgtttttgagatttcacagtgttgatacaagactttttcaatttcagaagttgatttttttaagattagatagatatatggatgttctcactgatatgtgggagctaaactatgaggacccaaaggcataagaatgatacaatggactttggggacttggatggaagagtgggaggggccaagggataaaagactacaaatat

SEQ ID NO: 305716 - DNA, 582 bp, Homo sapiens
agacttgcttctcatcctattacctttggtgcgattgggatttgttaaccaggagcatgtattacttgctttattaaacatttccagtatttaaaaaaagagtatacagaataatacaacaaaacacccatgtcctcacaacccaacttaagaaataaaacatcacaatataaataataagtccctccttcactctttgccttcctccttccccagaagtaactgtcactctgaatttggcattcacttttacacttctcttacatataaacttggcttacatttgctttcaattaattcagctactatttatttatttactttgtatcctacyatagatattcttttgcaatctgggtttttttttaactctacactgtgtttttgagatttcacagtgttgatacaagactttttcaatttcagaagttgatttttttaagattagatagatatatggatgttctcactgatatgtgggagctaaactatgaggacccaaaggcataagaatgatacaatggactttggggacttggatggaagagtgggaggggccaagggataaaagactacaaatat

SEQ ID NO: 305717 - DNA, 582 bp, Homo sapiens
agacttgcttctcatcctattacctttggtgcgattgggatttgttaaccaggagcatgtattacttgctttattaaacatttccagtatttaaaaaaagagtatacagaataatacaacaaaacacccatgtcctcacaacccaacttaagaaataaaacatcacaatataaataataagtccctccttcactctttgccttcctccttccccagaagtaactgtcactctgaatttggcattcacttttacacttctcttacatataaacttggcttacatttgctttcaattaattcagctactatttatttatttactttgtatcctaccatagatattcttttgcaatctgggtttttttttaactctacactgtgtttttgagatttcacagtgttgatrcaagactttttcaatttcagaagttgatttttttaagattagatagatatatggatgttctcactgatatgtgggagctaaactatgaggacccaaaggcataagaatgatacaatggactttggggacttggatggaagagtgggaggggccaagggataaaagactacaaatat

SEQ ID NO: 305718 - DNA, 582 bp, Homo sapiens
agacttgcttctcatcctattacctttggtgcgattgggatttgttaaccaggagcatgtattacttgctttattaaacatttccagtatttaaaaaaagagtatacagaataatacaacaaaacacccatgtcctcacaacccaacttaagaaataaaacatcacaatataaataataagtccctccttcactctttgccttcctccttccccagaagtaactgtcactctgaatttggcattcacttttacacttctcttacatataaacttggcttacatttgctttcaattaattcagctactatttatttatttactttgtatcctaccatagatattcttttgcaatctgggtttttttttaactctacactgtgtttttgagatttcacagtgttgatacaagactttttcaatttcagaagttgatttttttaagattagatagatatatggatgttctcactgatatgtgggagctaaactatgaggacccaaaggcataagaatgatacaatggrctttggggacttggatggaagagtgggaggggccaagggataaaagactacaaatat

SEQ ID NO: 305719 - DNA, 558 bp, Homo sapiens
ttgtatcctaccatagatattcttttgcaatctgggtttttttttaactctacactgtgtttttgagatttcacagtgttgatacaagactttttcaatttcagaagttgatttttttaagattagatagatatatggatgttctcactgatatgtgggagctaaactatgaggacccaaaggcataagaatgatacaatggactttggggacttggatggaagagtgggaggggccaagggataaaagactacaaatatgttgcagtgtatactgctcaggtgatgggtgcaccaaaatctcacaaatcaccactaaagaacttactcttgtaaccaaacaccacctgtaccccaataccttatggaaaaataaaaataataataaacatctaaacataagaaaaacaaggaaggaaaaaaaatagatggatatataacatttgtgcatcagggccgggcatggtggctcacgcstgtaatcccagcacttgggaggccgaggcgggcagatcacttgaggtcaggagttcaagaccaggctggccaacgtggtgaa

SEQ ID NO: 305720 - DNA, 600 bp, Homo sapiens
ctttaccataacagtcttctcttagaataagaaaaaacctttctcttgaacttggcaggataaaataaaggcactgacccagaatccactgttattcttgtatagatcataaatgcctacagtgaagagcattacactatctttggcgacatctctaaaggaggtctgcccaattagcagtgacagctggtgggaatgcaaaatcatacagccactttggaagacattttgttggtttcttacaaaagcaaacatgtttttgccatataacccagcaaacacactctttggtatttacacaaaggagttgaaaacttacgtctacatgaaaacctgtatatggatgttgatagcagctttatccataattgccaaaacttggaagcaaccaaatgtccttctgtaggtgaatggctaaataaactgtggttcattaagayaatgaaatatgattcagcactaaaaagaaatgagctatcaagccaaaaaaagacctggagaaaacttaagtgcatattactaagtgaaagaagtctatctgaaaaggctatctactgtatgattctaaatatatgatattctagaaaaggcaaaagtatc

SEQ ID NO: 305721 - DNA, 629 bp, Homo sapiens
gcaatatgcatgccattgagtggtccttgcatggaagtatatgctgaagtcatactcctaaaaacaggtgactcactaggaccctacagaatggttttgctcgtgacgctgctgcttatgtgtttctcacaacaaagttctcaatcctgagagttatacggaaaaaaatacrcttagcaccctggtgacatagccaaagggttaattcaaacacaacttaaaccctgggtccttaaacccaataaagcaaccatttctaaaaggcaggcccctaattcggactgtattaatttcaggctctttgaggtgaaatttctaaatataagcaaggtagagaacacccactccctgaagtatatccagtaaccatcaaaaaacaataacaataataacacccggatgccagagccagaggaaacaacaacaacaacaactacaaaacagaaacagaagtcctcaatttgacccaactggaaatccaagatgcaccaaaagaatgtatacaacaaaaagataaaagattggcctttacagctctgcagcatagattgtgaattaacttcaaaatctactgagatgtacccgttggcaaattttaatggccttcatcaacacgggggctgaaatta

SEQ ID NO: 305722 - DNA, 615 bp, Homo sapiens
aaaaaaaaaaaaattataatgatggttgtactacattgtgaatatataaaaatccattgaattgtaaactttaaatgggtgaattttatgtcaattaaagctattttttaaaaaagacctatatgaaaaacttgaattttggggagttagttgtattaaccaggccctatccagtctttttttcaaaattasagatgggggtctcactctgtcacccaggctggggtgcagtggcgtgatcatagctcacttcagcttcccaaagagctgggattacaggcggatgccacaatgtctggctaactaaaaaaaaatttttaagagatgaggggtctcacgatgttgcccaggctggtcttcaactcctggcctcaagtgatcctctcgcctcagctcacaggcgtgagccaccatacctggcttatctaagaaagccaccatacctggcttatctttctctcatcttgagaaagaatgaattcagtttggttactgcacattgaagagtaagctatcctcaacatccagtaacacaccatagcctttccaaaggtagaaatggtgatagggtcaaataagtatttgtttcacagcatttgaagaaaaaaaggcaga

SEQ ID NO: 305723 - DNA, 615 bp, Homo sapiens
aaaaaaaaaaaaattataatgatggttgtactacattgtgaatatataaaaatccattgaattgtaaactttaaatgggtgaattttatgtcaattaaagctattttttaaaaaagacctatatgaaaaacttgaattttggggagttagttgtattaaccaggccctatccagtctttttttcaaaattacagatgggggtctcactctgtcacccaggctggggtgcagtggcgtgatcatagctcacttcagcttcccaaagagctgggattacaggcggatgccacaatgtctggctaactaaaaaaaaatttttaagagatgaggggtctcackatgttgcccaggctggtcttcaactcctggcctcaagtgatcctctcgcctcagctcacaggcgtgagccaccatacctggcttatctaagaaagccaccatacctggcttatctttctctcatcttgagaaagaatgaattcagtttggttactgcacattgaagagtaagctatcctcaacatccagtaacacaccatagcctttccaaaggtagaaatggtgatagggtcaaataagtatttgtttcacagcatttgaagaaaaaaaggcaga

SEQ ID NO: 305724 - DNA, 538 bp, Homo sapiens
tcacagttctagaggctgagaagtccaatatcactgccagattcagtgcctagtgaggtcccattcctcactgagagcaacttttagctgaggttttggccttcatgacctaatcacctactgaaggccccactattaataccatcacactgggtttaggttccaacttaggaatttggggagacaccaataatcagaccatagcagattctatattgggttgacatgtggctaatatgcagtatgtttcaccagctgtgtgggtatttaaaataataaaatgcttctgtactagctggagaaagccactgtcccaagccccacaagaactctccccaatccactcacgatccagcaggtgaagggttaacaccaagtacatccgggagcttccagattccctaatataattctaagggcagggtccattcagcttgatctgtttacaggctgggaaaattgttaatttttaaaatatcgyctttttcccctccccaaaaaagtggtgatttttttttttttttttaaacctcatgtt

SEQ ID NO: 305725 - DNA, 582 bp, Homo sapiens
aagaaggaaagagggtacccacttcttaaaaaaaaaaaatcctgacctaacacatggacgtaaagatgggaacaacagacattggggaatacaaaatggaggaggggcgaagtggggcaagatttgaaaaactacctattgggtactatcctcactacctgggtgacagactcatttgtactccaaacttcagcatcacacaatacacttttacaataaacctgcacatgtacctctaaaataaaagttggggggaaaaaaaagaagagaaactctcacaaaacataaataaataagtaaagctaacccagaggtaacacacatcacttctgctcstgttcctgtgatgagaactaatcacatgactccctgctgatgtgagggaaactgggaaatggcattgctggcctagaagttgcctcacagcaaccacttcatgctgtagaaaggggatcaggaatttttcgtggatagctagtcatctgccacagccaatgaattgcaaaggactcagatgatcttctacttagaattagaaaatcatctaatgagactcttaagaaatctccaggccaggcgcca

SEQ ID NO: 305726 - DNA, 589 bp, Homo sapiens
cctcaaccatgccttctctttccccatcccagaggagactgagccatagtaaagcaaatcacaccacactgtgaactggtgcagctctacatacaaactcttcaacctctgcagagctctcatgctgctatgccatcctttcaagtgcccctggtcagctcccccttccatatcttcaaggtgagttcttaagaccccacatcttctttctcctataaagctgtggccaacagtaggaagagcttaaagcttccaccgctccaccagcaaacttctctgcctctacgtcttccattctttgtgtcttatcttcatccttcctcactgtggggaaaacytcagagatgatccagttggtctgagctccatgaagggcccaaggccatggagctaccaatgaatagaaaccaagatggcatggagagctgagagtggaataggaaaggagaggatgtggagctaaggaggaggtttgaataacaaaggaacatcaactaggaggtccaaatggttgccccagtgatgaggcagcccagtttatggaatcaggaatggaaaagacaggtgagcagtacagtgggtcaggtag

SEQ ID NO: 305727 - DNA, 661 bp, Homo sapiens
ggacatttgtcaatcattccatatctctgagcctaactttccttatatgtaaaataggatagtcccagtactatcttcgtaggagttattgtgacaatggagataatccattaaaggggcttagattggcatctaacatagttaagaggtcagtaaacttgggggtatttgcggggcacagtggctcatgcctgtaatcccagcactttgggaggccaaggctggtggatcacttaaggtcgggagttcaagaccagcctgggcaacatggtgaaaccccatctctactaaaaatacaaaaattagccaggcatggtggcgcaaatctgtaatcccasctactcaggaggctgagccaggagaatcgtttgaacccaggaggcagaggttgcagtgagccaagatcgtgccactgcacttcagcctgggagacagagtaagagtccgtctcataaaaacaaaatgaaacaaaacaaaacttgggggtattattgttatttcaataaaatagatgatgatcccatctgctgagaaagggatgaaagcaggtggaaagggaggaacagctgcttacgtgtgtttaaatagactacttcccaaagctttttttttttttaaataaaaaatgaccagacagctgagatgaacttgaaatagacct

SEQ ID NO: 305728 - DNA, 661 bp, Homo sapiens
ggacatttgtcaatcattccatatctctgagcctaactttccttatatgtaaaataggatagtcccagtactatcttcgtaggagttattgtgacaatggagataatccattaaaggggcttagattggcatctaacatagttaagaggtcagtaaacttgggggtatttgcggggcacagtggctcatgcctgtaatcccagcactttgggaggccaaggctggtggatcacttaaggtcgggagttcaagaccagcctgggcaacatggtgaaaccccatctctactaaaaatacaaaaattagccaggcatggtggcgcaaatctgtaatcccagctactcaggaggctgagccaggagaatcgtttgaacccaggaggcagaggttgcagtgagccaagatcgtgccactgcacttcagcctgggagacagagtaagagtccgtctcataaaaacaaaatgaaacaaaacaaaacttgggggtattattgttatttcaataaaatrgatgatgatcccatctgctgagaaagggatgaaagcaggtggaaagggaggaacagctgcttacgtgtgtttaaatagactacttcccaaagctttttttttttttaaataaaaaatgaccagacagctgagatgaacttgaaatagacct

SEQ ID NO: 305729 - DNA, 661 bp, Homo sapiens
ggacatttgtcaatcattccatatctctgagcctaactttccttatatgtaaaataggatagtcccagtactatcttcgtaggagttattgtgacaatggagataatccattaaaggggcttagattggcatctaacatagttaagaggtcagtaaacttgggggtatttgcggggcacagtggctcatgcctgtaatcccagcactttgggaggccaaggctggtggatcacttaaggtcgggagttcaagaccagcctgggcaacatggtgaaaccccatctctactaaaaatacaaaaattagccaggcatggtggcgcaaatctgtaatcccagctactcaggaggctgagccaggagaatcgtttgaacccaggaggcagaggttgcagtgagccaagatcgtgccactgcacttcagcctgggagacagagtaagagtccgtctcataaaaacaaaatgaaacaaaacaaaacttgggggtattattgttatttcaataaaatagatgatgatcccatctgctgagaaagggatgaaagcaggtggaaagggaggaacagctgcttaygtgtgtttaaatagactacttcccaaagctttttttttttttaaataaaaaatgaccagacagctgagatgaacttgaaatagacct

SEQ ID NO: 305730 - DNA, 542 bp, Homo sapiens
gccagctgccatgttgtgagctgtccaaggatcccagtgacaaagaactgaggaagtcctctggccagcagtcagcaagaaaccgagaccctagacccttagctccaacagcctacaaataactgaaaccttccaaaaaccatgggagggagcctagaagcagattctccccagctgagacttcacatgagaccacagctccagcatgtactctgactgcaacctggtaagagactttgaggtctgactgcaacctggtaagcaacctcaagccagagatacacaggaaagccatgcccaaattcctaacccacagaaactgagacaataaatgtttgctgtttcaagctgctaagttgtggagtgattggttatgctgcaatagttagtgagtgcatctactctgtgcctaacacttcctagatgttaggartaagacttggtccctgacgtctgagcatttataggggaaacaatgatataaacaaatgattccagcacaacatggcccagggtggagaattgcactagtgggcaactgt

SEQ ID NO: 305731 - DNA, 458 bp, Homo sapiens
tttggaattgcagatgagggattgtggacctctgtaacatttccttttaagatataattaaataaaaatattttagttgatttaggtcaggcatggtggctcacacctgtaatcccaacattttgggaggctgagacaggccaatcacctgaggtcaggagtctgagaccagcctggccaacgtggtgaaaccccatctctatgaaaaatacaaaattagctgggcgtggtggtggatgcctgtaatcccagttacttgggaggctgaggcaggagaatcacttgaacccgggagacagaggttgcaatgagccaagaccacaccattgcactccagcctgggcaacaagagcgaaaccatctctctctctctctmtatatatatttttttctatatatatatatttttagttgatttaaagaaaagtattaggaaaatcacaagaggacaggtgaaa

SEQ ID NO: 305732 - DNA, 577 bp, Homo sapiens
catcccacacaagagttagcaagaatgtggaatacagaactctcacactctgttgataggacagtaaactgccacaaccttattcacacatggcagtgtaaaaaatgtgcaccrtgtttgttatagcattgtttataatagctaccgaaaaaaataaaacaacccaaatttgtcttagttcaggctgctataacaaaatatcataaactgggtagcttataaacaacagaaatgtattgctcacggttctgggggctggaagtctgagatcagggtgccagcatggtcgggttctggtaagggctctcttccggattgcgggtggctaccttcttgctgtatccttacatgggggaatgagggaaagaaagctcccaggggctgtttgtgtaatggcactaactccattcatgaggcttcaccctcgtgacctaatcacttcccaaaggatctaccttctaatactatcaaatcgggagttaggatttcaacatttcaatttgggggacaagggacacaaacattcagtctacatgtaaaaaattataaataatggcacttttttttttttgagatg

SEQ ID NO: 305733 - DNA, 552 bp, Homo sapiens
tcggggttggcaaacccttctcacccacctctgaactgttatgtgggaagaaataaacttccattctgtttaaacctctgtattttctggtccttctgttgcagcagcttctcctataccttccataatacacctttcagcacttttgtttcaactgtttcctaagctccctggagacttccaatacctcccactyccaaacctttatcttggcttgatctctaaaagcaataattattagtagtaatatcatcagtactagtatttcccagcttacacttccattagagcattacttcaatcactccacaatatttcagccactatctcaaaaattgctcagcctcagactccaatgggtagagattgcctgggtttgaattgaggctccaccaccgtgatggttaatttcatgcatctacttgactggtctatgggatgctcagacatttgtcaagcattattctacaagtgtctacgagggtgtttctgatgagactgacatttgaataggtaaactgagtaaagcagattttcctccctaatgtgggc

SEQ ID NO: 305734 - DNA, 596 bp, Homo sapiens
ggatctcaatcggtattctcactttctgccagtcttggattatcctggacaagaaaaagcaaacagtaacaaaatccactctcctgcgagtcaggcttcacactgccgacttcatgtagcttttgtatttcatctctctttctggtcatttgtttctgatctaattcctgtttctttcctcccatcttgaataatgactcccattacagaggkctgactctgggtcaggctgtctaagggctttcactgtgtcattagctcatttcattgtggccatgctcctgccaggtaggcactgttaggattcccattttccagatgaggggactgagtgtgagagaggttaaggagctcttgtctaagcttcccagataggacaaatttgaatcctgacttctttatctctgtactgtgctgcctcctggacgggtgtcctttaacttctctaataagtcagatcagagagagattctgtaaatcccttcacctcctcctctggcgggaggacagtttgcctcacagcacatataattggtgatcatcccaggcaggaagacaaatctagctgatgccctgcaggaaccccagggtctcag

SEQ ID NO: 305735 - DNA, 596 bp, Homo sapiens
ggatctcaatcggtattctcactttctgccagtcttggattatcctggacaagaaaaagcaaacagtaacaaaatccactctcctgcgagtcaggcttcacactgccgacttcatgtagcttttgtatttcatctctctttctggtcatttgtttctgatctaattcctgtttctttcctcccatcttgaataatgactcccattacagaggtctgactctgggtcaggctgtctaagggctttcactgtgtcattagctcatttcattgtggccatgctcctgccaggtaggcactgttaggattcccattttccagatgaggggactgagtgtgagagaggttaaggagctcttgtctaagcttcccagataggacaaatttgaatcctgacttctttatctctgyactgtgctgcctcctggacgggtgtcctttaacttctctaataagtcagatcagagagagattctgtaaatcccttcacctcctcctctggcgggaggacagtttgcctcacagcacatataattggtgatcatcccaggcaggaagacaaatctagctgatgccctgcaggaaccccagggtctcag

SEQ ID NO: 305736 - DNA, 596 bp, Homo sapiens
ggatctcaatcggtattctcactttctgccagtcttggattatcctggacaagaaaaagcaaacagtaacaaaatccactctcctgcgagtcaggcttcacactgccgacttcatgtagcttttgtatttcatctctctttctggtcatttgtttctgatctaattcctgtttctttcctcccatcttgaataatgactcccattacagaggtctgactctgggtcaggctgtctaagggctttcactgtgtcattagctcatttcattgtggccatgctcctgccaggtaggcactgttaggattcccattttccagatgaggggactgagtgtgagagaggttaaggagctcttgtctaagcttcccagataggacaaatttgaatcctgacttctttatctctgtactgtgctgcctcctggacrggtgtcctttaacttctctaataagtcagatcagagagagattctgtaaatcccttcacctcctcctctggcgggaggacagtttgcctcacagcacatataattggtgatcatcccaggcaggaagacaaatctagctgatgccctgcaggaaccccagggtctcag

SEQ ID NO: 305737 - DNA, 586 bp, Homo sapiens
cattagcattcaatacatttctaagtaatctacaataatacttcaaaattgtctgtgcatgggtgcacctgcatagataaacatttagacatacaagcacacaccacaaagctctaacttaacacaatgttctcatttgaagtccccacctctaatacctacccaagaagcagaactggccatttgttctgaccttaggagtcattacttgtcaagggctattctcctttaaggcagatctgcatctgagggttggttggttcagtgtcttctcccctgcaggctccaagaatcgcctctgcatggctccaacacactgccccacagtgggcctgccatgaataccagtccatttgtatcagagccagggaaatgatcaccaaagggaatatatttttggatgtggtttttgaagttgagcagccagaatttcctattgagaagaagttccaytgggagttagtaagaagtcagacatcactggtaggtgtgtgcaacacacatattttgcttttgcaattctcccaatgtaggggatgagatgaatccttacagactttgtgcttagagccccaagctttcccta

SEQ ID NO: 305738 - DNA, 505 bp, Homo sapiens
ggctgaaggcaagaaaacaataaacaaatgcagctggtgactcctccttggtaccagagtaactcctggctatgtctttattgaactgcctcccatggctaccctggcttttagaattgaaaattgcaactgcttctgctttaggattccactcctgaagatcgactgcatggctcttgttctcttctctctcttagaattaggttctttgggaattaccttctctcaaatccaactacctggttagggatatayattatatacatatttccaagttggatttatcctcaaaaatatgtaagtctggttcgacattttaaaatcagtcaatgaatctctctttatcaataaagtgaaaatcaaggagaaaatatataaaatcaatcaattcagtatatgtcttttaaaaaatccagcatccatttatgataaagactcttggcaaactaggattagaaagaacacctgcaatctgatatagttcataggttaataacaaaaatac

SEQ ID NO: 305739 - DNA, 504 bp, Homo sapiens
ggctgaaggcaagaaaacaataaacaaatgcagctggtgactcctccttggtaccagagtaactcctggctatgtctttattgaactgcctcccatggctaccctggcttttagaattgaaaattgcaactgcttctgctttaggattccactcctgaagatcgactgcatggctcttgttctcttctctctcttagaattaggttctttgggaattaccttctctcaaatccaactacctggttagggatatacattatatacatatttccaagttggatttatcctcaaaaatatgtaagtctggttcgacattttaaaatcagtcaatgaatctctctttatcaataaagtgaaaatcaaggagaaaatatataaaatcaatcaattcagtatatgtcttttamaaaatccagcatccatttatgataaagactcttggcaaactaggattagaaagaacacctgcaatctgatatagttcataggttaataacaaaaata

SEQ ID NO: 305740 - DNA, 398 bp, Homo sapiens
gggcacttttgtcttcatcaaaaatctcttcaggcagatatcttttctgtttaatgatttttttcttaatggtgtctgggaattcatctgcttctcttggtcagaagaagttgcttttcctgttatcttgacattttaaaagccaaacctcttttgaaaattatccagtcattctttactagcattaaattctccagctttagattctttacctttctttggttttaagctgtcatataatgacttcagtttttctggaataatattagagtctacaggtatgccttttgtatagcaatcctgcacccacwtaaaagttgcattttcagtatgagataaaaagctatttcccagaaagtataagggttttgtacctgctggagtagctgcagtgacag

SEQ ID NO: 305741 - DNA, 597 bp, Homo sapiens
aagtaggacaaggtgctctcagtgttctatgttatacttatccccatgttaaacactctgatctatagtttgaggaacaaggaaatcaaagaggccctcaagagggtgacaaatggagcaacatatttacattagtaagaacaacatttgggtagatattgttatttctataacgaagatagaaacaagaatatgtaagtgactctttgtatgtcacaagaatagctaggtagagagaagaagtacaaactttacttcctggatttctggtgccattgtagtcagccaccaccaagtgatctgtttgagacagtgtcactgagattgaatacagtttaaaaagtcagtttccwtgatgagaacccgggtagattaaaccttaaaaggtgattatgtttttgaggacaaacggctggtaaatattatgtgtagagaaatgacaagaacttaggatgccatactgtgttttcttcatttattttcttttcttttttaacttttattttaggttcagagaacatgtgcaggtttgttacataggtaaactcatgtcatgggggtgtgttgtatagattattttgtcacccagatactaaa

SEQ ID NO: 305742 - DNA, 441 bp, Homo sapiens
tgcacaccctgttagggaacctcagagcaagattgcctggtctgggtccacccagttttaataccccctgagattgtaggatctaggcttctggatgtttcacagctcagtccaccacttgagacacctgagtacttttcccagggcacaattttggaayactgctaccagcttggctggctccaacttgcaactgtcatctattggcctggaggctggcttgagcagtccatttcaaccacttccaataaaaaagtacagtgtgtggaaactagaaggacatcttactaccactgactgccaccaccatcacccactatacccaagcaacccaggagcaaaataacccactcccttacccagtacactgctattacaaccagcatccagaaacatcattcagaggccacagaattgatcttcctggatccaccaacacag

SEQ ID NO: 305743 - DNA, 641 bp, Homo sapiens
aataaccaagagaggactcaaataaagacaatcacaaatgaaaaaggagatattataagtaataccacagaaatacaaatatgtacatgaatttaacttattgttatcaagctgtattaccagcaagctgtgctatcttgggacaatcccttagcttctctggcctcaggttctccacctgaaatggatagtttggactataagatccctaggttcctatatcctttccagctcaaatgactccaaagttagtaaagaaaatytacagtcacgagaccatcatatagaccattgggaagtagggaatgaatccagtggggacatggcaaagtggggcatgaaatctgtagggacaaaagctccatgacaatgatgacaccagagagcaagtacctggaatgttttctcccttgaattggcttttcccctttattctctgctctcaacggcacgtttaagaagatctgaagttgtggtcatcgcttttgctgtgagtgaacagcaagttttgtggccaaaatcatccatcttagagtgcaatggggcccacatggaaaattcctttgtacgagaaataattaattttaacctttggcaagaattgtgtctttttgagggatctgggtcaagttcacagggca

SEQ ID NO: 305744 - DNA, 588 bp, Homo sapiens
ctttgtaaaacaagtttttcttatttatttattttatttcaataggatttgaggggaacaggtggcgtttggttacatggatacatttttttttttttaatttttttgagacagggtcttcctctgtcgcacaggctgtagtacagtggcacgatcttggctcactgcaaactcctcctcctggattcaagtgattctcgtgcttcagcctcccagtagctggaattacaggcgggtgccaccacacccggctcatttctgtatgtttggtagagatggggtttcacaaggttggccagggtagtctggaactcctgacctcaggtgatccacctgcctcggcctcccaaagtgctgggattacaagtgtgaacaacagtgcctgggccacatgagactttggtgcagtcatcacttgagcagtgtacactgtacccartgtgtagccttttactcctcactccccttccaccctccccagtaacatgttgtccaggctggtcttgaactcctgggcccaagcagtctttctatcttggcctcccaaagtgctgggattacaggtgtgagccaccacacttggccact

SEQ ID NO: 305745 - DNA, 587 bp, Homo sapiens
tgtatttcaaggtattttttctgcagtgagaggtaagtgtgaaggtttattttttctcatatggatatcagttgtttccacataatttgttgaaaagatgattattcctccccttccgcattgatttacctagatagttgtacttaaattcaattaaccatatatgtacgtgtgtgtttctggactctcttcctttccaatgacctaggtttattcaagttcattyatatgttattgatgattgtagttttccaataggtgtccaataagtcttgagttcaggtagtttatgtcctccaactttgttttctttcacaaaattgttttgggtatttaaaatccttcccatgtccatagaaacttacaatcagcgtaatgaatgagaagtcttggtggagttttgacttggattgtgtttatctataggttaatatgggagagaattgaaatcttaaaaatatggagtctttcaatctgtgaatatgatatatttctctatttaggacttctttaattttttgtagtaatgtcttttgttgttgttacatttcagagtacctctacattcatgagggattttggtcagt

SEQ ID NO: 305746 - DNA, 587 bp, Homo sapiens
tgtatttcaaggtattttttctgcagtgagaggtaagtgtgaaggtttattttttctcatatggatatcagttgtttccacataatttgttgaaaagatgattattcctccccttccgcattgatttacctagatagttgtacttaaattcaattaaccatatatgtacgtgtgtgtttctggactctcttcctttccaatgacctaggtttattcaagttcattcatatgttattgatgattgtagttttccaataggtgtccaataagtcttgagttcaggtagtttatgtcctccaactttgttttctttcacaaaattgttttgggtatttaaaatccttcccatgtccatagaaacttwcaatcagcgtaatgaatgagaagtcttggtggagttttgacttggattgtgtttatctataggttaatatgggagagaattgaaatcttaaaaatatggagtctttcaatctgtgaatatgatatatttctctatttaggacttctttaattttttgtagtaatgtcttttgttgttgttacatttcagagtacctctacattcatgagggattttggtcagt

SEQ ID NO: 305747 - DNA, 450 bp, Homo sapiens
gttaatgttactgagggcatactctatcccaggtgctattataawtccttttatgatttgtctcattttaatttgtccaacagccccatgagatctgtgctcttgtaattctcattttgtagagaaggagactgtgacaggtccaaaatggtaaatatagccccaaatcagacaaatcagaactgggattcaaatccaggcaatccagctccagagcatcttaacagactgcaatccaccgcctcactaaaacatcagtgcattgattgattaaatgcattaattgatccattaatcttatttctaaccaccacggagtgtaaagcactatactttggatgaggcaaaagatttcataagcggcctacagcccagtgagttgagaattgtgtccatggaggcatactgccagcaagagatgatttgtggcacgaaaaagacagagataag

SEQ ID NO: 305748 - DNA, 453 bp, Homo sapiens
gtgtgaatgagtaacaggaaaatcttgggttttagatggtgaccactgcaaagcttctgtctacagatacctaagagataaaattaccacctctatgaagatttgccacattgcttttctcatccaccttagattttaccacttctaattaaaccttgcttctagtcgcctcttatttatcaaggacccctaagctttctttttttgttttggaaaaagtctattttgggataaaatttatctctgctctctttctttagctttttctcataccattcctcacataakgtattcctcctccccatgcttacctccatttagccttgcttagcaaattaaaagaaaaaattacaagaaacattaaagagtggcttctttgacatgcttcttttctttgagccatctcatcagcagctctttctaatattcacttagttgactttgaaaaagttc

SEQ ID NO: 305749 - DNA, 539 bp, Homo sapiens
ctgttcaaatcagcccagcaaactgatcaataacaaactttgcagcaggtccctgaaacaaacaaaaagtggatgaggtctctatcttgttttatgtccttgagagcttgaccttataaccacatggtggtactttctcttgatctctgccatctagggaacaggaattttggggctgatgtcataattagctctagaaattatcttgagcagttaaaagcctttgygagctcaaaattggctagcctccttctgggaagagcaatggaaagtgcccagtgctgtagcttagcagctaaggctttgccattttacaatgcagccctggtttaatcctgtcttaggaaatgagtcctttctgatttgatatctgtgtgacttttaccatttgttgattctctttgtctcaatgaaaaatttctggcattccctcttaaattttcctttctctgagcacctttggagattctagatcttgtagaaactgctaaccactcctttgaaaatacctcacacattcatggttaagtcataacctt

SEQ ID NO: 305750 - DNA, 539 bp, Homo sapiens
ctgttcaaatcagcccagcaaactgatcaataacaaactttgcagcaggtccctgaaacaaacaaaaagtggatgaggtctctatcttgttttatgtccttgagagcttgaccttataaccacatggtggtactttctcttgatctctgccatctagggaacaggaattttggggctgatgtcataattagctctagaaattatcttgagcagttaaaagcctttgcgagctcaaaattggctagcctccttctgggaagagcaatggaaagtgcccagtgctgtagcttagcagctaaggctttgccattttacaatgcagccctggtttaatcctgtcttaggaaatgagtcctttctgatttgatatctgtgtgacttttaccatttgttgattctctttgtctcaatgaaaaatttctggcattccctcttaaattttcctttctctgagcacctttggagattctagatcttgtaraaactgctaaccactcctttgaaaatacctcacacattcatggttaagtcataacctt

SEQ ID NO: 305751 - DNA, 568 bp, Homo sapiens
ttgaaaatacctcacacattcatggttaagtcataacctttgttgagacttgtgggtttcacctgtgaagtcacttttggtagggtttaaaagccagaaatattggccatttggcctggctaaagtagggtattaagaaatgtaaaaggacttttatttttaagaaaactatggttaaaatcagcttaattaaaggcagatatccaagctatatatacatatacttaaaaggtctttatgttttttctctttttgaatcttattttcctggaaaaatagcttttttcttctcagttgacttaattatttctacattttgccttcttgctgttcttgatgctcacatgagagagcttgagataattgctaacagtttccattctgrgaaaaaaaacctctgttttcctcatggaaccctgggaattgaaagcagatagaggtctctcaaaatctaaggctcagtttgattttacattctgttacctgacttttttttacttttgggagtatcaggtattactttgcattatgagagaacattgatgtgtaataactaagtaggaaatgt

SEQ ID NO: 305752 - DNA, 533 bp, Homo sapiens
gactgctcacccccattttctgctctcggaaggcccaagtctcctctgcagcctctgcatggctgacttcatctcttgatttctcagggaatagatgatggggttcagcatgggggtaatgaccgtgttattaatggatatggttgtgtccatgggcagcgtcrtgaagggccggcagtagatgtaaacacaaggcacgaagtgaagagtcaccaccagcatgtgggacgtgcacgtggagagggccttgttccgcccctccccagagtgggatctcagcatcaccagaatgacagtgtaggagcccaggagcaggaggaaccagagcagggtcaccagtccgttgttagagatcatgaaaagctccaaagcaaaggtgtcagtgcaggccagttttaccacctggagcacataacagtagaaggcatccagtgtgttggggccacagaaggggaatggaagcatcagaattacctggatgattgaatgcaaaccaccactcacccaagaagccaccaccaaggccacccaca

SEQ ID NO: 305753 - DNA, 533 bp, Homo sapiens
gactgctcacccccattttctgctctcggaaggcccaagtctcctctgcagcctctgcatggctgacttcatctcttgatttctcagggaatagatgatggggttcagcatgggggtaatgaccgtgttattaatggatatggttgtgtccatgggcagcgtcatgaagggccggcagtagatgtaaacacaaggcacgaagtgaagagtcaccaccagcatgtgggacgtgcacgtggagagggccttgttccgcccctccccagagtgggatctcagcatcaccagaatgacagtgtaggagcccaggagcaggaggaaccagagcagggtcaccagtccgttgttagagatcatgaaaagctccaaagcaaaggtgtcagtgcaggccagttttaccacctggagcacataacagtagaaggcatccagtgtgttggggccacagaaggggaatggaagcatcagaattacctggatgattgaatgcaaaccaccastcacccaagaagccaccaccaaggccacccaca

SEQ ID NO: 305754 - DNA, 657 bp, Homo sapiens
agtagaaggcatccagtgtgttggggccacagaaggggaatggaagcatcagaattacctggatgattgaatgcaaaccaccactcacccaagaagccaccaccaaggccacccacacctctttcctcatcatggtcacatagtgcaggggcttggcgattgcaaggtatctgtcataggccatcacagagaggaaaaaaatatctgccccaccagcaaagtggaagaaaaagatctgtgccatgcagycattgtaggagatggttttcctgtctgataaaagatccaccaggaacttggggacggtgatagatgaaaaaacgatgtccaggactgatttgttccgcaggagaaagtacataggagtgtgtaggcgggactcacaggtaatagtgaccacaatgagtgcatttcccaggactgttgctacatacacagcaaagaagaccacaaacaagaaaaactccagctctcgggaacgtgtaagttccaggaagaaaaactccttcacattagtgtggttgatctggtccatgatggggatgactctcttccaggtcctacctttgatgaagatatgttagaacttggattatggtgacatgaggtggcaaaatcattgatcacatactgctctcaagcatccaggtcatcatg

SEQ ID NO: 305755 - DNA, 657 bp, Homo sapiens
agtagaaggcatccagtgtgttggggccacagaaggggaatggaagcatcagaattacctggatgattgaatgcaaaccaccactcacccaagaagccaccaccaaggccacccacacctctttcctcatcatggtcacatagtgcaggggcttggcgattgcaaggtatctgtcataggccatcacagagaggaaaaaaatatctgccccaccagcaaagtggaagaaaaagatctgtgccatgcagtcattgtaggagatggttttcctgtctgataaaagatccaccaggaacttggggacggtgatagatgaaaaaacgatgtccaggactgatttgttccgcaggagaaagtacayaggagtgtgtaggcgggactcacaggtaatagtgaccacaatgagtgcatttcccaggactgttgctacatacacagcaaagaagaccacaaacaagaaaaactccagctctcgggaacgtgtaagttccaggaagaaaaactccttcacattagtgtggttgatctggtccatgatggggatgactctcttccaggtcctacctttgatgaagatatgttagaacttggattatggtgacatgaggtggcaaaatcattgatcacatactgctctcaagcatccaggtcatcatg

SEQ ID NO: 305756 - DNA, 603 bp, Homo sapiens
tatttattatttttaacctcatccctcaccctcaatatctaagtccttggccagtctttagcaagaattcttttatgccagtttagcaagaaccaccctacctttgatatcacttcttagtaattttcaatccactgacctccctcactctgctcattgcttataaatcttcacttgttttcactatatttcgagttgagctcaatctttttcttctattgcaagagttttaaatgaaatctatcttcctgtctttaataattgtctggtgaataatttttctttaacataacagtctccagaggtttttccactgtacaactctgagaaatcagagagtctggggcttactttggcttaccrgaattctagtgtgtatataaggcttaaacagtttattaagtagtttgactacctaatccttatctcatcccttataaaaagagaagggtcaggccctcataagtactcctctttggcactctgggaagcctggaccttgctattgacacacagggctctttgtatagagccacagtcattgttcagggcatgttttagtatcacagaaaaactgatcattagagcgtcacaggacttcag

SEQ ID NO: 305757 - DNA, 603 bp, Homo sapiens
tatttattatttttaacctcatccctcaccctcaatatctaagtccttggccagtctttagcaagaattcttttatgccagtttagcaagaaccaccctacctttgatatcacttcttagtaattttcaatccactgacctccctcactctgctcattgcttataaatcttcacttgttttcactatatttcgagttgagctcaatctttttcttctattgcaagagttttaaatgaaatctatcttcctgtctttaataattgtctggtgaataatttttctttaacataacagtctccagaggtttttccactgtacaactctgagaaatcagagagtctggggcttactttggcttaccggaattctagtgtgtatataaggcttaaacagtttattaagtagtttgactacctaatccttrtctcatcccttataaaaagagaagggtcaggccctcataagtactcctctttggcactctgggaagcctggaccttgctattgacacacagggctctttgtatagagccacagtcattgttcagggcatgttttagtatcacagaaaaactgatcattagagcgtcacaggacttcag

SEQ ID NO: 305758 - DNA, 495 bp, Homo sapiens
tactcaggccaagatctatttggttcttcccaggagactccaaagaagacagttatcctagacccaagtgcaaggcagagctcccgtgggacatcaatgtgcgttcttttttgaggcaataagaattgtgtaactgactgcgtatctttgtgtgtgtgtgtgtgtgtgtgtgtgtgtttaaracagagtcttgctctgttgcccaggctggagtgcagtggtgcgatcttggctgactgcaacctccgcctcccagttcaagcaattctcctgcttcatcctcccaagtagctgggattgcaggcacgcgccaccatgcctggctaatttctgtatttttaatagagacagggttttgcaatgttggccaggctggtccggaactcctgacctcaggtgatctacccacttcagcctcccaaagtgctgggattacaggcgtgagccaccgcgccaggccctgactatgtatctttgctttggctttcatacatt

SEQ ID NO: 305759 - DNA, 512 bp, Homo sapiens
attcctaaaactgtagatgatgggattcaccacggggatcaccaaggcatagaatatggacaccaccttgtccctgtttagggagtagctggaactgggtcgcatgtacatgaagaatccagaaccatagaagagggtcacagcagtcaggtgagaggcacaagtgctgaaggcctttgtcctacctgtagctgagctgatcttcacaacagcagcaacaatgtaaccataagagatgaggaccactagcacagacactattccaacgacaacactgactatgaaggtcaccacctcgctggtgaaggtatcagagcaggacagagccaggactggagggaggtcacagaaaaagtggttgatcatatagrgcccacagaaatcatgctgatagacagagtatgtttcaatgaaagaactaaggaatccacccacataggcgccaaccaccatctttaaacaaagtgtatgggatatgaggactgtgtaaagcaaggggttgcagattgcag

SEQ ID NO: 305760 - DNA, 616 bp, Homo sapiens
caaaacttagcagggtgtggtggcacatgcctgtagttccagctacttggaaggctgaggtgagggggatcacttgagcccaggaggtctaggctgcagtgagccatgaccatgactgtgccactgcactcaagcctggatgacagagtgagaccctgtctcaaaaaaaaaaggaaatttttttwaaaaattaggaaatacaaatgcgtataaagaggcagaaatgccctgagaaagactcagtggtgaaattaaggttgctgtattttattatttgtatggaatttgtttgcccatgcatgtttgcacccaatggtaactgtggttctgtgtcacttatcatattaaaaactgctcctagctttgtgttttttacaaatttctaatctcccctcaaatcactggtcaagcagtcaaaaccaagacgagcctagattgatcttcactaaaacatcaatctatttaatcctatcaaaaaggaagtaagaggaatttggtatctcttatcttggtgaaatcttccctaccagaatgtaagttactcaaagacaggcagggagttttgcccattctgtttcctgatctatccttgtaaccacccaatgggttcaccttg

SEQ ID NO: 305761 - DNA, 555 bp, Homo sapiens
tttttccaccacttatcctcagagtttaccagaagggtttggcctatgacttactatatttggtgtgttaytattataagaacaaaacacataatatataattaatcacaaacaataatcatataacgatcataatataataatataatcaaacacttatttagtacttattgtgtgcgaggtactgtttgaaagacttgatttttataaacccatttaattctcctaatagactcaagaagtggcagcgtttctcgccccattttacaaataaaaggtagaataggctgtaaatgcatagttgtgatttgctgctgaatggatgaggtaggagggaatgagctggacttactggattgcattgggcagaagggtcctgcaatcttgtgctacaagagaagaaatattgattgctttgttgccataacatcttttgcaaaccagatcatctgcatttcccactgctccatggctggtttctcgttccatcaatttcttatgctttggcctcatgtaaatagtaaaccatgcttctggaatctccgctcctttgtt

SEQ ID NO: 305762 - DNA, 555 bp, Homo sapiens
tttttccaccacttatcctcagagtttaccagaagggtttggcctatgacttactatatttggtgtgttactattataagaacaaaacacataatatataattaatcacaaacaataatcatataacgatcataatataataatataatcaaacacttatttagtacttattgtgtgcgaggtactgtttgaaagacttgatttttataaacccatttaattctcctaatagactyaagaagtggcagcgtttctcgccccattttacaaataaaaggtagaataggctgtaaatgcatagttgtgatttgctgctgaatggatgaggtaggagggaatgagctggacttactggattgcattgggcagaagggtcctgcaatcttgtgctacaagagaagaaatattgattgctttgttgccataacatcttttgcaaaccagatcatctgcatttcccactgctccatggctggtttctcgttccatcaatttcttatgctttggcctcatgtaaatagtaaaccatgcttctggaatctccgctcctttgtt

SEQ ID NO: 305763 - DNA, 555 bp, Homo sapiens
tttttccaccacttatcctcagagtttaccagaagggtttggcctatgacttactatatttggtgtgttactattataagaacaaaacacataatatataattaatcacaaacaataatcatataacgatcataatataataatataatcaaacacttatttagtacttattgtgtgcgaggtactgtttgaaagacttgatttttataaacccatttaattctcctaatagactcaagaagtggcagcgtttctygccccattttacaaataaaaggtagaataggctgtaaatgcatagttgtgatttgctgctgaatggatgaggtaggagggaatgagctggacttactggattgcattgggcagaagggtcctgcaatcttgtgctacaagagaagaaatattgattgctttgttgccataacatcttttgcaaaccagatcatctgcatttcccactgctccatggctggtttctcgttccatcaatttcttatgctttggcctcatgtaaatagtaaaccatgcttctggaatctccgctcctttgtt

SEQ ID NO: 305764 - DNA, 506 bp, Homo sapiens
tcatcactaatagaattcatccatgtaatcaaaaaccacttgtacccctaaagctattgaaataaaaaaagaacaaattataaattaacaatgtctgcattggacagaaaaatgcagaatgaggactcagaatgtatttattaacctagtctataagaaatctgagaatgaggaagaaagtcatcctattaaatccatctggataaaaccataaactcttcatgcccttactttaaaaaatcaaatttgatcaaaatagcagaagtttcagtgaacatcagaaagtarcaaaggaaatatgttacgggacaatatgaatatatttaatattactcgtttacacttaaaaataattaagatgatgtgatggtgaattttaggtgtcaaccggactggattaagagatatccagatagctggtaaagcactatttctgggtatgtctgtaagacagaggatgttttgaaccagtggactgagtaaggaagatccaccctcactcaatg

SEQ ID NO: 305765 - DNA, 563 bp, Homo sapiens
ctggaaagaacaaaaaagcagtggaaaagtaaattccccctctctcctctgaagttgagatatctttctctcttcctttgacatcrcatctccagggtctcctttggagtctgggatttgcattagtagccccttaatttatcaggtgcttggcctcatgttgagagttacaccgttggctttcttggtttggaggcctttggacttagactgaaccatgctcaggaagtcaggattctgtgattgttgagcttgcagatgtcacattatgggacttctcagcctccataatctcatgagccagttctcctgataaacccactctcacctacccatctgttaatatctgtccatctattcatctatctgtctatctattcatacatcctcctggttctgtctctctagagaaccccaactaataaagatggtaaacttaatgtcatatgctttttaccacaataaaaaagtatgaaagcaaatagcacataaaggcaaataaactccatatcgaattataagtgtttagaattggaagtgctttgatgttcaactcaaaattt

SEQ ID NO: 305766 - DNA, 511 bp, Homo sapiens
aatactaaaatgaaaattgtgtaacatctgtctttctcaataaaagtgatatttccattcaattagtaaagaatgatgcttgaaaaggtaactgaaaatgtattttgaaaagcgattatgaatgcatttttatatacaggaatgaaaagcattaatacgcaatacagaaatatgaatggttttagatgatgtttatgtgaggtaaaaaatgcatagaagtgttaactatatttgccaaaaaaaggcaagaacaaatattaccaggaaagtctgaagctgttaaacgtccttgattagcaagatgaatgacgtagagaaacatctttattatacaaacaaactgcattcttcaaactatcccaggggacagctggccttgcccctgcagaccccacagaaggctctgagctcagctgcagtggctgtgrctctgcccttggtgggcgtggtctgcagcaggagaactgccttcaaggggcaactgcacttgcacaggaggcacatagggatg

SEQ ID NO: 305767 - DNA, 511 bp, Homo sapiens
aatactaaaatgaaaattgtgtaacatctgtctttctcaataaaagtgatatttccattcaattagtaaagaatgatgcttgaaaaggtaactgaaaatgtattttgaaaagcgattatgaatgcatttttatatacaggaatgaaaagcattaatacgcaatacagaaatatgaatggttttagatgatgtttatgtgaggtaaaaaatgcatagaagtgttaactatatttgccaaaaaaaggcaagaacaaatattaccaggaaagtctgaagctgttaaacgtccttgattagcaagatgaatgacgtagagaaacatctttattatacaaacaaactgcattcttcaaactatcccaggggacagctggccttgcccctgcagaccccacagaaggctctgagctcagctgcagtggctgtgactcygcccttggtgggcgtggtctgcagcaggagaactgccttcaaggggcaactgcacttgcacaggaggcacatagggatg

SEQ ID NO: 305768 - DNA, 607 bp, Homo sapiens
ctgtaggggtttctgcctcatctggctgttgggggagtagaaaatccccaggctacaaaaagtagagacctgtaacaaagcacattgagctctaataaaattcaccaaaaaagtagtaagcaactaacgtggagactaatattaggaggattacctaagattcacaaggacattggaggcataagtatcatcagtaatattccaatgttctaaaccctcctctttattcagagtacagctgggaatacaggtatttgtgcaaggtatgcaggtttttactcttccctttcttccttacagaatagaccagtgagtaagataacaggctatgggtaatttttatgttaaatgcattctcttagtaattaagaaaatgtgatatttgcatagagataaagcaatgaaataagtagagctcaawaacagacaaaatcatacaaaagaaaataatttataagcgaaattaatggggtaaagatgacttttacaatcaatgatccaggaaatcaaatattcattggggaacatcaaatccatctttaattttgtactacacacaaaatcagttgcaggtagataataaactcaaatataaaaataatttaat

SEQ ID NO: 305769 - DNA, 485 bp, Homo sapiens
ggctgggcatggtggcacatgcctatagtcccagctactcaggaggctaaagcaaaaggatcccttgagaccaggcattggaagctgctgtgagatatgatcacaccactacattccagccaaggtaatacagcaagaccctatctcttaaataataataataatagaccagaattcagcagacaagtcactatgatatcacactgtgaagtgagcagtcacagaaaaaatatagtgtgttccattattgctagagtacatattttcacatctttcaaacacatatgtactatggtttagatctttggccccccagacctcctgttataaattgatccccartgttggaagtaggatctgataggaggtgcttgagttttgggggaaatccctcaagaatggcttggtattgttctcatggcaatgagtgagtacttactctgctaatttcgaggagagctggttgctgaaaagagcccaacatt

SEQ ID NO: 305770 - DNA, 634 bp, Homo sapiens
gcctgtaatcccagctactcaggaggctgaggcaggagaatcacttgaacccaggaggcagaggttacagtgagccaagactgcrccactgcactccagactgggtgacaaagcgagactccatctcaaaaaaaaaaaaaaaatcctgaaatactaatgacattatgattgctacaatgtcacaagataagataaattttcaactccattgcaatcttatgggaccagcaacgtgcatattgtctgttgttgaccaaaacggcccttatgtggtacatgaccctatacacataacagcatattttatatttatggaaaaagcccttctagaattataaaatcacaagttttactcacataaaatttaacacaatattgagattaactcataaatgaaattataaaagtcttaaaattttgactatgatagttctaaacaagattttaatccagagaaatgaatgtgttcacgtaatcctctgtggcataaagagtaatggcaatgaaacatttcttaataaaacaggctgcatcattgtcagtgcgatttgcaccttcccgttgacatccattctgtaggtattgaatgcaggtgatcttacctgaaggtgacaacagaagattttattacaag

SEQ ID NO: 305771 - DNA, 620 bp, Homo sapiens
catatattatttatatatgtaaaagttgaccagacacagwggctcacgcctctaatcccagcattttgggaggccaaagcaggtggatcacttgaggtcaggagtttcagatcagcctggcaaacatggtgaaaccctatctctactaaaaatacaaaaattagctgggcgtggcggtgtgcacctctaatcacagctactcgggaagcttaggtaggagaattgcatgaacctgggaggcagaggttacagtgagccaagatggtgccactgtactccagcctgggtgacagagcaagactctgtcttaataataataataataaaattaacaaaactatgagtctaggttcaggaacaactgaaaagatgacttaagaacagagtgcagaaattattgtggcagggcctggagctcatttcttgactttgcagcttgtttcttgacagagcagctataggagagaagataaaattttccctttgctctctgaacgttcactgaaaaatcagctggcaaaaggcagattaataggagaaagggcatacaaaattctattttaacatgagtagcacagtgaacctcagactgattacccagtaacccagtgtgttaggca

SEQ ID NO: 305772 - DNA, 559 bp, Homo sapiens
attttattttataatgtttattaatttattcttaaatttaatcttatatgtataattctctatacaagattgatcacagttatacactgaaaataatatttcatgctgagcctctggcatctcttgccattttcttaagtgacattcaaaaacaacaattataataatttttaattgaatacattactttttctgctttataatatttatttcctgtatacaaattatttcttaacctaaratcacaaagattaacctctatgttttcgtgtgtgtgtgtgtgtgtgtgtgtgtgtgtggttgagacaaggtctcactctgtcatccaggctgtagtctagtggcactatcttggcttactgcaacttccaccttccaggctcaagtgatcctcctacctcagactctcaagtagctgagactacagccaccaccatgcctggctaatttttttgtgttttcatacagccaagatttcatcatgttgtccaggctgctcccaaactcctgggctcaagttatccaccccattgggcctcccaagtgctaggattacagg

SEQ ID NO: 305773 - DNA, 609 bp, Homo sapiens
gtggcaggcgcctataatcccagctcttcgggaggctgaggcagtagaatcagttgaacctgggagacggaggttgcagtgagccgagattacaccattgcactccagtctgggtgacaagagtgagacttcatctcaaaaaaaaaaataatgaaagtcagaaaactrttcctatgtaaaaagcttcaaagtggagatatacttaggaataatttaatgaaatctgtgtaaaatatgtacattgaaaactataaaatgtattgaaagatactgaagatgtcctaaaaaatgtaaaaataaaaatcccatgatcaatgattagaaaacttaatactgtgatgatgacaatacttcccaaatggatttatggatttaatacaatccatagtaaaatactgcttctttaaaaaatgcagttattggcaagctacttctaaatttcatatgaaaatgcaattgctccggaatagccaaaactaacccaaaagaatacagttggagtacttgactcatagttcttgacttcaaaacttattacaaactgatagtaatcaagacattgtggtactggtataagtttagccatatgtgttattggatagaactgag

SEQ ID NO: 305774 - DNA, 582 bp, Homo sapiens
taatttttgtatttttagtagagacagtattttgccatgttggccaggctggtctcgaactcctgacctcgtgatccacctgccttggcctcccaaagtgctgggattacaggcgtgagccactgcgcctggcctacaactttttcataaccaaataacttttcatcctcataccatccctgtgaaattttacagttcctcttctgctacttttgatgtgctatttttgcttttagaaactaacaaacaacaaatttcccctttcagtactaaaattagacctagtgtttagagtatttctccaaaattgacatcctgcagaactcccaactcatacagttatagagatgctactgtggtgcttaaagccagtgtagtttttcacccacttgaatatatatacacacatcacatagactgcctataccaaygacatactattgtttaaagctacaattcataaaattacagcatgtatactttaacttgtaagtgtgggtttcttctgatatggacagctgatgcacaaaccctcagccttaagtctcaaatatatttgtatgcactaatataattttctaa

SEQ ID NO: 305775 - DNA, 486 bp, Homo sapiens
ttttctcatccattatccttctaaaatagacattttgagacaatttagtgatgcgacatttccatcctgtcggggttccttgggtttgacattcgaaagggggctggaggcgcggaacccgcggcactccgcggccagcgtcctttaaagccgccgccagccagcgccgctgtaaccccgcgcaccggcaggtcgccggctcctgcccttttcagtctgcgccgacgcggctgccggatcccggggactccccgcgccgggaatctcccgccagctgcgcgctgagtccaggcgacggcaggagcacgtggagaggccgrgtagccacagcggcagctccagcccggcccggcagcgacatggaaggtgagcctccagcccgcttcttttctccggggtctttgagaaacttaacctgtgcaagcagtagaaagagtttcttctgaatctcagttttgcttctatttacttcttttgtcaaaagta

SEQ ID NO: 305776 - DNA, 540 bp, Homo sapiens
tatgaggcgatgtgagagacctcccccagtgcaaacgtatctaggttgatgaagtgaccttgctttaaaaatgggcccaattgtaaggcccattggccttttctgtagggatggagcccgattggccttttctgtagggatggatgactagtcaagatcggggagctccaaaggggatcatgcccgcgtctttgatggttccttcttggctactagtttggtggcccgaaaggccctgtgtgttgtctgtttcttagcagcgggacaccactctcagtagtggttttgagtaggctggttagtagagagagcccaaggttcagacagggtgcagaatggttattttgggtgagatcaagagttttcggttttatttcctttgagccgagtcagtacttggactctctcatatggtccaggagcaamctttgtcagtaatttcatttttagtcactgttaattttacctatatagcataagccatgaaatgtgactcagtgagtcagatccacccattttcagttaccatgtctggataca

SEQ ID NO: 305777 - DNA, 380 bp, Homo sapiens
attgggggaggaaggaaacatcacttatcttattactccagattacagacagctgccacagayaataaaataaaatcgcaattaagttgattgcagtacttgaaagaaaacttattaaaaataaagatttttaataaaatcttacattcttgacagatataccatcacctacctttctaaaagcagtagtagtaaacacaattgtagaatatgtatgttacttagtctttgagtggtacaatactataggttttaaaaccctgacaacactcctactttctgctgcttcaatatcagattatggcatggaattcatgtaaggttggttccaaaatggaatatcagatcccagaccagtatcagtaagttgtacccatttt

SEQ ID NO: 305778 - DNA, 531 bp, Homo sapiens
ggagccactgtgtatggccaagactataatcattaaaaaaaagtacctgtggtacatctatactatggaatactactcagcagttaaaaggaatatgtgacaactactaatacatgcaacaacctggataaatctgaaatatattatgctgggtgaaagtcaaccactagaggctgcatactgtatgattccatttacatgacaacctggraaaggcaaaactagagaggcaggaaacagagcagtggttagaggaaagtaaattcaatgtgatgtctgttgtctagataataggtgtcagtcaaaggacaccatttgaaactgagagtaacagattaagtgagaaaaaaggtgattaagggcattgttaatcatattaatagaaagggtacaactaagataaataacgttcataaaagccaaaagaaatttgttaaaaagcaaagaagactgatcaaatgaagaaatacaacaaatatcacatagtacagaaagtaattataactattgatgtgacataacagtcatatc

SEQ ID NO: 305779 - DNA, 589 bp, Homo sapiens
aaggtgtttttagtgatggcagtaaccttgtcattctacttgtatagcttgatgatgaacgtatggagcaaatgtcaaatatgactttgatgaaggaaaccataagcactgtggaaaaagaaatgaaatcactagcaagaaaggcaatggataccgaaagtgaacttggcagacaaaaagcagagaataattctttgaggtaaactaaatcacctttaaacaaccaacagtttactataactatagctctgctttttatagtgtattttataatgaaaattatttgttgagttcagtttctgagaggattattgaaaagcagttgtaggaacccttggcacacagtgaacaattttcctgasctcaatcacaggctggtaatgccacacttaactaggaatcacacttctagtaatcttactttacatttgtaaaaaacttcaacttttaactgaaatagcttttacaaagctcttctgggtacagaatatatttgactttgattgtttacctttataactttaaattctgtttggggatatgaacagtataagaaaacacaaagcacaggtttggcagttgcttagaa

SEQ ID NO: 305780 - DNA, 513 bp, Homo sapiens
caagcctcacctatatcacaatttcatatagggtcaccactccctggatggttttgtatagaattaacaatgatctggcaataggcaactagatacaaaaacacagtcaaagaaaactttcatatatacatagaygaagtaaaccacagagtcctagacattcagaatgggagggggtaatggagacggtggtaacacgattaacagttgtttagaaagtgatgtcagcgcatgccatcccacttcttttcagcaagtctcccaatctgcctaaggcctcacagacacagccagacagtggctacatctattcccacttccctatttttccatggaaacagtgaagaaattattccacgtcttactttcactccaaacactatttttagtgttaccatttgctatagaaacattcgcttagttctttcgctttaatgtcagagcatttccctgacagagataaggaagagctgccgaagcagttttcacgagaggatgtgttttgggtaccaa

SEQ ID NO: 305781 - DNA, 644 bp, Homo sapiens
atacaactagggaaattgaaaatagattcagcattagtttcttactgctttgataacgaattaccacaaatgtagtggcttatgacaacacaaattaattacctcacagttgtagaggccagaagcctgataggggtctcactggggtaaaataaaggtgtctgcagggtcacattttccttctagaggtgcaagggaagaatccattctcttgccttgttgagcttttagaagctgtccgcattcctcggcctgtggctcctgcaccctcagagccggcagtgctgagctgagccctttgcacacaatcgtctctctggtcctcatctgcctccctcttccactctgaaacaccctaatgattaccttgggcccacttagatgatccaggaaactctccccattttgaggtcagcttattagtgaacttgtacctggtaacttgaatgtttcctgtagaaggaatcmcaaccatccagaggaggacacggtggggaccaggaacacacaatgactgagggcagttagggctagttttgctgtggggaatggcaaagtgagctgtgcagggacacaggaaagaatgtggtgtcattcgggccttagaagcctcccacctgggactcagtcagatgcttcagccc

SEQ ID NO: 305782 - DNA, 640 bp, Homo sapiens
tttattaaaatgtgacatatcttatttttggatcacttattttgctaggtgtcatttccccagttgttccatggtggctatttattttctaaaagaaggtcaaatggcaattgatgaagtaatcagttacagttatcttctagtcatttctatggacaacagtttctataattttgctattttaacataaaaaaacttctttaatgaataaaaagctttacatctttacctatrtatcttaaaatttaagtgtcatctttaaatttcattcagtccttatgtaaataaagaagatagaaaggcaaagtactatctgctcctcatgtataggatgtagattcttataagacataataagacagcagataaaaatcatgaggataatagttacatagtgatcctgtgtattaccttagtatctcctgaaatcataacttaatagcaccagctgtcaatatgtacaacatgtaatcatttcccaaatgagagaaagaatttatgtcacatgctaatgcctgccatatttaatgattatatttctgagggtttacagcccaggatatatagtcacttgtcaatgatgtttacagtataggtattgagatcagaggcagaagtggaattttgattatatttgatt

SEQ ID NO: 305783 - DNA, 450 bp, Homo sapiens
ttcaaaatgtaaaatgtatctaggaggtatttgggcagatatctgaggaagcctcctaaacctaaagatgttagttaagcgcataagattgaataatagttaaaagtctggtttgtcaccatttgctgttctgtgtcaaataggtctgaaaatgtcccaagtaagaagctcaatactgacaaatgcaaaaataatatattctggcttgaagacaagggttttagtgtatcctgtagttaaataattcttcagtgccagaatttatactaaggccacaaacaaagggaggtcatattgtaaaacaaattagaaaactagacttataggaaaaaamcaatataaatatttccccaggcaagcttatttaataagttagatgtggttgcctttggaagccttgaaatatgtttagtaaattgaggcttacagtctctttcattctaggtaaga

SEQ ID NO: 305784 - DNA, 455 bp, Homo sapiens
acacagagtagatttaacataattcttaagggccctatgattttcaaattggtaaatgagcattggcttcagwttcaacgtcaccagctgcattagcccctaacaagaaagttagcctgtcctttgaagttttgaaaccagacactgacttgtttttagctatgaaagtcctaggttgcatcttctttcaaaataaggctgttttgtctacattgaaaatctgttgtttagtgtagccatttccatcaattatcttagatagattttctgaataactagctgaagttttcacatcagcacttgctacttcaccttccactttaatgttataaagatagcttctttccttaaaccttataaaccagcctctgctaggttcaaacttttctcttgcagcttcctcacctctgtcagccttcatagaattgaagacatttagggcctttctgtgagtt

SEQ ID NO: 305785 - DNA, 455 bp, Homo sapiens
acacagagtagatttaacataattcttaagggccctatgattttcaaattggtaaatgagcattggcttcagattcaacgtcaccagctgcattagcccctaacaagaaagttagcctgtcctttgaagttttgaaaccagacactgacttgtttttagctatgaaagtcctaggttgcatcttctttcaaaataaggctgttttgtctacattgaaaatctgttgtttagtgtagccatttccatcaattatcttagmtagattttctgaataactagctgaagttttcacatcagcacttgctacttcaccttccactttaatgttataaagatagcttctttccttaaaccttataaaccagcctctgctaggttcaaacttttctcttgcagcttcctcacctctgtcagccttcatagaattgaagacatttagggcctttctgtgagtt

SEQ ID NO: 305786 - DNA, 455 bp, Homo sapiens
acacagagtagatttaacataattcttaagggccctatgattttcaaattggtaaatgagcattggcttcagattcaacgtcaccagctgcattagcccctaacaagaaagttagcctgtcctttgaagttttgaaaccagacactgacttgtttttagctatgaaagtcctaggttgcatcttctttcaaaataaggctgttttgtctacattgaaaatctgttgtttagtgtagccatttccatcaattatcttagatagattttctgaataactagctgaagttttcacrtcagcacttgctacttcaccttccactttaatgttataaagatagcttctttccttaaaccttataaaccagcctctgctaggttcaaacttttctcttgcagcttcctcacctctgtcagccttcatagaattgaagacatttagggcctttctgtgagtt

SEQ ID NO: 305787 - DNA, 576 bp, Homo sapiens
caagaatttccaaaatgggacacagtgataataagtgaaagcaggctattagaaaaattgtgccagtagatttgcttgacatagcattgccacagaccttcaatttgtgaaaaacacagtgtctgcaaaacacaataaagtgaagtgcaataaaataatgtgtgccagtaccttctgtcttaagaaaaaataattcacttattaattcagaggtgtcaaaatataagagttgggctttgtgtagctcatttcataaatatagtagactaaagtacctcaaagaacctagaaccaaatgcaggtctgcaagctctgaaagccaactatgttctagggactgtcatatcttccaggatttccatagtctctgttctcaaagaaattgcattatatcttcaaatattttgctgaatgtaatattacaccttgagtccattcttaatcattatgtaaacatacrctatggaccttgaccaagctgtcctctaatagccaacctttatctccacagaaattcactattcgcctttttggttccaagtttaaactaagacttaacaacctaacagcaaattt

SEQ ID NO: 305788 - DNA, 629 bp, Homo sapiens
gtcttctaatggtttagatgtaatgttccctgaaaggagagaaatgatctgggtcaggattggaaacgaaaatttaaatattttcttttgctggctgccmatccacacattctcaggctgaatattaagagtagaaggatagaatcaggcagacttaattaactgccttttggcagtgacattattacataacatttcaaaccggttggtggcatatccaggaagtagaaatgatgagtgttgacttttcttgctcagcattcaatctagggaccttaatggaaatggggttattgtggatatttccaaggtcggcttttaaacatcaggtacaatactcttgaaagggattgagagataaaggggtcaagggacaatgcaagcaaggaatcccttaggaccctaataaatatttcatttcagtggttctttctaaatgcagtatataattaaacattggtgatgttttcaactgggtgtgctcagtgtttaagtccagcccatacaagttgttaactaagtaacacagggtaaaaatgagaactttatggaaagtcagtaactacagaaagcagctaccatctctagaggtaaggggggaaaaaaagaattagaattaataaaaatta

SEQ ID NO: 305789 - DNA, 582 bp, Homo sapiens
tgtcttgtctcagatgagactttggacttggacttttgggttaatggtagaattaattaagaatttgggggactgttgtgaaggcatgactgcttttgaaatgtgaaagggatatgagatttgtttggggctaggggaagaatgatatgtttagggtttgtgtccccacccaaatctcctctttaattgtaatccccttaatccccatgtgtcaagggagagacctggtgaaggtaactgaatcattgaggaccatttccttcatgccgttctcatgatagtgagtaagttcttatgagatctgagggttttataaggggctcttcccactttgctccacacttcttcttcctgacgcctggtgaagaagatgcyttgcttcttcttcactttccaccaagatagtaagtttcctgaaacctccccagctttgagtcaattaaaccactttcctttataaattgcctagtctcaggaagttctttatagcactgtgagaatggactaatacagacagcaattactagattgtatggttatagtatgtttacttttgtaagaaactggcaaactgatttccaa

SEQ ID NO: 305790 - DNA, 593 bp, Homo sapiens
tgctaatagaatgcagatattaatataattcaagataaattatactgaaaggtaaatttgagtctsctattccttcataattgagactgactgtagagtattctaccccttacatgaaatgattaatggactattcgtacccctagcttttgtaatgattttttaagttaaaaaatcttttaataattaagtttaattttaaacagttaaagattgggaatgaatctttacagccctctcattctatctttacaccaaaataatgaccaatactgtctgttaaattttttaacctatgcttctgtcatctatttaaaaatgtagagtattaaggctagttcttgtgctttacttgaatggaaattcattaaaaacactgtgctccacaaatataaactgaataaatgtcagcattcataaactgttctgtgctctactttgaactgtagtgtggtttctttttaaccatttaccaaatagtaaagaacatggctgtaggtcaggcatggcttacacctgtaatcccagcactttgggtgactgcagtaggagaatcacttgaggcctggcgttcaagaccatcctggacaata

SEQ ID NO: 305791 - DNA, 593 bp, Homo sapiens
tgctaatagaatgcagatattaatataattcaagataaattatactgaaaggtaaatttgagtctcctattccttcataattgagactgactgtrgagtattctaccccttacatgaaatgattaatggactattcgtacccctagcttttgtaatgattttttaagttaaaaaatcttttaataattaagtttaattttaaacagttaaagattgggaatgaatctttacagccctctcattctatctttacaccaaaataatgaccaatactgtctgttaaattttttaacctatgcttctgtcatctatttaaaaatgtagagtattaaggctagttcttgtgctttacttgaatggaaattcattaaaaacactgtgctccacaaatataaactgaataaatgtcagcattcataaactgttctgtgctctactttgaactgtagtgtggtttctttttaaccatttaccaaatagtaaagaacatggctgtaggtcaggcatggcttacacctgtaatcccagcactttgggtgactgcagtaggagaatcacttgaggcctggcgttcaagaccatcctggacaata

SEQ ID NO: 305792 - DNA, 562 bp, Homo sapiens
tttcagtctgcacccatgtctatgtattcttaatccatgatgtctaatttctcccttttcactaggasccctgtcttcacctcttacccttcatgaactacagtacatggtccatcgcttattctctccaacatctttaactctcttgctacaatgctcttttattacattcactctttaaatcctcactaaatatttcattgtctatatgcctctactcaaggtgcttagcactactgaagaaagcacacaatgctacagaatggtctcactataattgtattttccctagccttacttaggccctcagtgctgcacaccagtcttctctgtcttcattgtggctaattgcgacactcaccttcacctcctgctcccacaggcaaggtcagatgctactttccagagataattgaaagtctcggacaaaagattgtttcacttgctaacttcagatctataaacttcccaccctccatacacatccttctttcctcaactcatttttagaagaaaaaaaaagacatttctatctctaatgcaaatccaccttcattctgta

SEQ ID NO: 305793 - DNA, 515 bp, Homo sapiens
tctcactataattgtattttccctagccttacttargccctcagtgctgcacaccagtcttctctgtcttcattgtggctaattgcgacactcaccttcacctcctgctcccacaggcaaggtcagatgctactttccagagataattgaaagtctcggacaaaagattgtttcacttgctaacttcagatctataaacttcccaccctccatacacatccttctttcctcaactcatttttagaagaaaaaaaaagacatttctatctctaatgcaaatccaccttcattctgtatcttacttcctgctttttagagactgtactctcttactgttaaccattcaagtaattccagccactcctctctactggctctttctcatttgcatctgtacatcacatttctcaaatctcagcagagctcactctcaagtttttaacttctgtatacctcatgtgtaagctggatgaaatggtaattcctgcttcatagacttgttataaaaattaatt

SEQ ID NO: 305794 - DNA, 515 bp, Homo sapiens
tctcactataattgtattttccctagccttacttaggccctcagtgctgcacaccagtcttctctgtcttcattgtggctaattgcracactcaccttcacctcctgctcccacaggcaaggtcagatgctactttccagagataattgaaagtctcggacaaaagattgtttcacttgctaacttcagatctataaacttcccaccctccatacacatccttctttcctcaactcatttttagaagaaaaaaaaagacatttctatctctaatgcaaatccaccttcattctgtatcttacttcctgctttttagagactgtactctcttactgttaaccattcaagtaattccagccactcctctctactggctctttctcatttgcatctgtacatcacatttctcaaatctcagcagagctcactctcaagtttttaacttctgtatacctcatgtgtaagctggatgaaatggtaattcctgcttcatagacttgttataaaaattaatt

SEQ ID NO: 305795 - DNA, 562 bp, Homo sapiens
tttcagtctgcacccatgtctatgtattcttaatccatgatgtctaatttctcccttttcactaggacccctgtcttcacctcttacccttcatgaactacagtacatggtccatcgcttattctctccaacatctttaactctcttgctacaatgctcttttattacattcactctttaaatcctcactaaatatttcattgtctatatgcctctactcaaggtgcttagcactactgaagaaagcacacaatgctacagaatggtctcactataattgtattttccctagccttacttaggccctcagtgctgcacaccagtcttctctgtcttcattgtggctaattgcgacactcaccttcacctcctgctcccacaggcaaggtcagatgctactttccagagataattgaaagtctcggacaaaagattgtttcacttgctaacttcagatctataaacttyccaccctccatacacatccttctttcctcaactcatttttagaagaaaaaaaaagacatttctatctctaatgcaaatccaccttcattctgta

SEQ ID NO: 305796 - DNA, 563 bp, Homo sapiens
ggtctcgagctacagatctaactcacggtgattgttttatctactgtatcatcctgcctcccttaggatatcagtgctacattgggatattggattaatttcatcaatattaccagaaatcaaatttaaagggtgtggttagagatgatccttacagaagtaatcagtattagttcctgcccagtttcattggaataaatgtcatgaaggatattcttctcacttctgcaagaaggaaagaatccatcaaatttatgaaactaggaagastatatggagcaacccacataagtaaaattggggttatggtgatctgtcggaatgacagaattcatctatagggaatgtaaggttgcctgctacatagtgtgttaattatctgtcaaattatctatcaagagaatgcagagactaattttcttaataattagtagagtctacttaatattatagcatgcttttttctttaaatgtaggttttccttcacagtgtcagagtgttaaaaatattggttataaaggaaaaaaaatatgctgaatccagaattttaaagaatatttac

SEQ ID NO: 305797 - DNA, 560 bp, Homo sapiens
aactggtgcacgagttaatgatgtatctacaaaatttcagaaaagaagggtgaattgtaaattaatgtgactttttaaatctttaagttctgggatacatgtgcagaatgtgcaggtttgttacataggtaatgtgccatggtggtttgctgcacctataacccataatctaggttttaagccccacatgcattagatatttgtcctaatgctctcccttcccttctcctccacaaccccgacaggccccggtgtatgrtgtccccctccctatgtccatgtgttctcattgttcaagtcccacttaggagtgagaacatgtggtttttggttttctgttcctgtgttagaatgctgagaatgatgaattccagcttcatccatgtccctacaaaggacatgaactcattcttttttatggctgcatagtattccatatgtaccacatatggaatatgtggtgtatatgtaccacattttctttatccagtctatcattgataagtatttgggttggttccaagtctttgctattgtaaacagtgctccaataaacatac

SEQ ID NO: 305798 - DNA, 518 bp, Homo sapiens
acaactctagagggttttgtcctctgtgactcacctacctataagggggayaatttataaaacacttatttgtttctgttagtattcagactgcaataaatcttcaaattttcaccataaaatctgcataacatgaaattaaaagaagttaagcatttttaaaaattcatagtgaaaaaatgttgagtgttttaaatacctgccttatgaattttcttttgcttttaattcatagagctaagttaaaatttaattattcgtgttatgtataaatgacaattatcctttggataaaaggtaatattttactaagtaaaacacaggaatataagaaaactttattttgctaaccgaggtcttaattttccttcatttggaatactgtccaagattaaacctttctacgcatcaaacactgtcatcttgtggactgccattgatttcagaaaatacaggctaatttaaaaattattatctgtgcgacttttcatggtaaaatatttggacaactctgtaaa

SEQ ID NO: 305799 - DNA, 518 bp, Homo sapiens
acaactctagagggttttgtcctctgtgactcacctacctataagggggacaatttataaaacacttatttgtttctgttagtattcagactgcaataaatcttcaaattttcaccataaaatctgcataacatgaaattaaaagaagttaagcatttttaaaaattcatagtgaaaaaaygttgagtgttttaaatacctgccttatgaattttcttttgcttttaattcatagagctaagttaaaatttaattattcgtgttatgtataaatgacaattatcctttggataaaaggtaatattttactaagtaaaacacaggaatataagaaaactttattttgctaaccgaggtcttaattttccttcatttggaatactgtccaagattaaacctttctacgcatcaaacactgtcatcttgtggactgccattgatttcagaaaatacaggctaatttaaaaattattatctgtgcgacttttcatggtaaaatatttggacaactctgtaaa

SEQ ID NO: 305800 - DNA, 447 bp, Homo sapiens
taaaatctgcataacatgaaattaaaagaagttaagcatttttaaaaattcatagtgaaaaaatgttgagtgttttaaatacctgccttatgaattttcttttgcttttaattcatagagctaagttaaaatttaattattcgtgttatgtataaatgacaattatcctttggataaaaggtaatattttactaagtaaaacacaggaatataagaaaactttattttgctaaccgaggtcttaattttccttcatttggaatactgtccaagattmaacctttctacgcatcaaacactgtcatcttgtggactgccattgatttcagaaaatacaggctaatttaaaaattattatctgtgcgacttttcatggtaaaatatttggacaactctgtaaatcttaatgtaagtggagatgaggaatagtatccttgtttgtaactg

SEQ ID NO: 305801 - DNA, 511 bp, Homo sapiens
ccattctcacactttttttttgttaatggcactgcagttaagagaaatgagcatcattgtccacatgtgtactcctgtttttgtatactctgtagatgtggaaatgcrtcacttaaataatcatctttttaggggagcaaagagaagatcttctgtttattgacactgaatcagttgcagcaattgcatagaaagtctgcaatatttgaatccctaaaatctggacattcaattagggcaggagacagctaacctggaaatgttctcactaccaaaatttagaaatgatgactgaaataaagcagcgaaaattccaatatgtagctgatctcacaagaaagaaaaggaaatcccgaagtatcagaaacaaataagaactaaaatccaaagtatactctctggtgttaaccctgaggagatcttggaagcaaggtacattttttatatgttacagaagtagaccctaaagtctaaaacctagaggatgaatgatcatgccaagggcaaagga

SEQ ID NO: 305802 - DNA, 595 bp, Homo sapiens
actttgttgtttgcgtgtgtgtgtgtgtgtgtatatatgtttatatgtatatatrtaaacatttaaatatgtgtatttatgtaaacaagtctatgaaacttcataaactgtgaagtatgtattatatatacatatatagatagagatacacagtattatataaaatatatataatagtaacaacaccatcaggtaaagggtaaaaatgtaatattcattttaaagagaagaaagccagtattaaagaaatgatgaaaattgctaaaggcctcacagttaggtaacggcatggagaaaccagtagaaaaaagaatgctgacttggaaaccaattcaggggctacaaaaactaatccgccaagaggcgataaatgactgaacaaaagcagtgatggtagcactggaggacaggaaacattaactgggatattaagaaggtaggattaccagcatttgataattaatgaattacaggctttggagtaggtggaggctagcatacacaaatatttcaaggctttagcagagttcattgaatgggcgatgattctcctcatcagaaaagaacacagctgaagaagtagagaagtagttaa

SEQ ID NO: 305803 - DNA, 623 bp, Homo sapiens
ttgttttttaagtatgcttaggaagaaattggattgtatggaatgactgattgccaaggacatgtgagcaaatgaagtattcatcttattcaaaaatcgtccaaaatttttttgatgttttaatttaaatttttatatcaagattataagctttccagagagacacatagaaaaataaataaaagattaacaaaagccaaattttctatattcctgcagagtttgatacaaactttttatattattcagcttccttagcagagataaatgtatcccaataggagtgttcctgtcaaaactttcccagtccccttagaactatccataattgaaaattctgaaccaagattagagaaagaaaaagtctcctggatttaggatagaatattcagtacccgaggagcagcacttagaagggaaatacaaaaaaaaaaaaaaaaaaaaaaaaaaaaaagtacccaaagctattccaattaccatatycctttatgataaacagactaatcaggaaataacagtggctttgctacattccattgttgagtaccaaaccaaatctcagggatcacagaggacaacatgagatccattctctctgtgctttgtctcagacaaattaccta

SEQ ID NO: 305804 - DNA, 504 bp, Homo sapiens
ctaataaacagtaatctttcaacacgcattctcaatctatttccactcactttcttaagttactaattgaaatctctctactacactatctaactccagagacggatgggaaaatgttgccttaggaagtagtgagatcttgtagggaaagatcccacatggactgaaagaaaggtgagaagcctggttgtgtacatggtgaattttgcgaagatgtgtacagctttgctatatctttgcttaatacaggatattaatatagcaacctcaacttctttttagttaatatttgttggcatttattttccatcatttttactttaatacttgtaccatttttaaaacagtgcttcccatgcagaaaacataagtgtagattaaataaaaataagtttttagaaagtaattaacaactgtgctgggaactcaaatgagwggaaaaatgaaggtacaaaattgccaagtaagacagaggtagtaagaccctgaagggagactggaagc

SEQ ID NO: 305805 - DNA, 634 bp, Homo sapiens
gccctcccatatctgtttacaagttgatcacagacccacaagtttacatttgccaataaaataccaaaaaccttcatttttctatggcttttctgtcaaggtaccattcaacactcacatttttattttaagaactattattaagaatcttatttgctctagagtgtgttatggtagccattctgtgcagacaaatgactatgtattagaraatgctaatttaatttttttctcaaaacatgtgtaagaactgctttttctattcttcctcagaaactggtctttaataagatgtccttattgaagattattttaaaattcctaaaattagtgtggtttaacttccaaacattgaattgcttttgtcctggtatagtttttaaaactttagaatcaatcacattgactttgatttgccaactctattaaatatatgactgcagtgaattttttacttgcttttcacatagaaaaacaggaattagtatctacttccaggaagcctggcatagagtaggtatgttagtagctagtgtaactattttcattcatttccttttctctcttttctcttttctaaacatttagaaggtcaaaaatagtttgtgaatgaagtttgactaatttttattat

SEQ ID NO: 305806 - DNA, 509 bp, Homo sapiens
gatcaaccatcatcttgcttggtacagggaccacttttacattgtagataataatgtttcacttttctttatggtaggaaagagttaagtgagaaatgtacataccccatgaaagtacagacttctttttagtatttatatgtcttcaagaaagaaaaaaaaaatctactcacaatataaaaaaatctatttatctttgggcttctggtgctaaagttcccaggaaataatgacacagagacaattctatgaggaaatgttgaattttgcttgtattaaaagctggtacaaaataaagcaattggagtgaagtatcatcttttgggtcattgggatctcaaaacacaatttagktcatagttattctataattttcttttctttgtgtgtttaatttctagggcatgcctgtacttcaattcctcagaaataggcattaatttaggactgttttctattaatcttgtaaatacaataggttgatttgaaatgtcacaaaaataagcata

SEQ ID NO: 305807 - DNA, 548 bp, Homo sapiens
gatggtttgccatgggacttctcagcttccatcatcacatgaatcaatttccctaatcaattctctttcatatatgtgtgtgtgtgtgtatatatatatatatatatatatatacacacacacacactttctctctataaaaccctaactaatacaggtagattgaattatcaatttttgattatatatggttgtattcatgtgtatatgaaaaaaagttacttttaaaatagattaaccctttaatatattgcttttctgtttatacttcaatcattaaaggtattttagctctttgacattgataaaatgaaattctatcttaagcctgttaatgakgatgaagaaatcacaaagtacttgttttcactttcataaaagaatcaattttgtcttggcaatatataataagaggactaaattaatcagtttccttattatccttttaggctgaacatattatcaggtattaagctgaaataaaaaacaaaaagaatcttaccatcaaataaattattgactatattcatattaaaaggcagcagcaa

SEQ ID NO: 305808 - DNA, 493 bp, Homo sapiens
cagttatcaggttgaaaagcataatgttatactcacagtcaaactgtcttaaaaatctactcaccagttaattatgtttttctcattggatatgtggaaaagaaataactgtgtcatctagaggggctgttctaagtagagtctagtggaggcaaaaattgcctgaggagttgaaagaaacatagcagagggaaatttctagtagataataactgccatcacccttggtcagaggaacaccgttagctttaaaactatggtaktttccaagaaactctaaatataatttttttagagagaatattttcaaactattcatctgacaaaggattaatatccagaatatccaaggaactgaaataactcaatagcagaaaaacaaataatctgatttacaaatgggcaaatgagctgaatagatacctatcaaaacaagacatgcaaatgggcaccagataaaagtattcaacatcataatcatcagggaaattca

SEQ ID NO: 305809 - DNA, 568 bp, Homo sapiens
gacaacaatgacagtagtgcttcagatttcactttcatcattttcttagtcacatctggctgcttgatctgcaggactattaytccccatatgccctgatcctctctgggatgtcaaccttgcagcaagctagagagaaataagcctatactatttgatattgtttggactttttaataaggtttacatacaactcttccactgttataggatagtctggatttcttctcatcttgttcaaaaaaaagactacttgttgctaagcacgtagcaggcagtgtccttttgaaaataaggataagaaaaaagataaggccctttgtgtaacagaattaattggataatattcacccagttcctattatagtctgaaggaaagaaagagaaaattgtatagttttagaactttactaaacgcaaacaacagaaagaaaacttactggacatttgcttaggcaacatgcttgttatattttaagtgaataagccagtgaacaggtggatgcttatgtctgcaacccctgctatttagtatctttaggtaaaaaatttttttaataacccctgc

SEQ ID NO: 305810 - DNA, 565 bp, Homo sapiens
gcttacttgaaattgagattgtgatgaaggtagaataattgataatcacaagattcaggctattaccacaggaaagggtggctaagatgggatggagtacaagttcatgggaagcttggaggtaaagaaactgagaagtcataatattggatggatcattgatgtatatatggttatcaccaagacattgactgaataaaataaatgaggaagaccgtgccaggaagatgaggggttattaaaagacggatgattacaatggctaaaaaaggatgtcatgaatgctttactcactaatgtctaaatgttttagtcttccacttgaaggctttgatagaggcaggaggcagacagggatasgtccctggtgaaactccaccttcaagctgaaaagcctgaaacccatggcccaaagtgaaaacttctattcctgtctgccctctctttcccaattggttctttctgaaaaacgccttcttaccaactgaatgttgccttttccaaaactacctatagcccaccctacccatcatcctgtgcctataaagaccccagacacagtcag

SEQ ID NO: 305811 - DNA, 619 bp, Homo sapiens
ttttgctctgccaaatttgttttcaacttcattcgtgtattgcagagcactcacaatagtcctggcctcctgatcaagtacctgaagaagtaaattgcttgctttcttgattcccttagctcatttgctgttgtatagtttaatcaagtaacatagatttgcattttttctcttataagctataaactcaacagttctatctgaataatttataccatgtttaatttaaaaaatcgttggaagctgtttcatttcataactcagttgactagtgatcaattttcaacttatcttacatcttggctaaaaacttcatgccttgccttaaagcaaatctgctccccgtccttggcccaattctttctttcctatcttttaattatttcagaaagttttaatttgtgatcttcatttaggctcaactagtatgtaaaataatctttgggtaatactcaagtttaaggaaggattcagtttattgtctgcacatttaaaagggtatttaaaatcatttatttttaacaggttacttttgtgtggaatttttcattaattatataaatwaattcttgagagaatgaatctcatttttacatgaagcatcagcccaatgtactag

SEQ ID NO: 305812 - DNA, 584 bp, Homo sapiens
ggctactttaactaattctattcaatataatactggaagtcccaaacagagctatcacgtamgagaaagaaataaaaggcatccaaattgggaaaaaggatgtcaaattatctctgttcactgaagatatgattgtttacctagaaaaccctaaagactcttctagaagattcctagacctgattagtgacttcagtaaagtctcaggatacaaaaatcaacatacaaaagtcagtagcacttccatacgctaataatgttcaagctgagaaccaaattaagatctcaacagcttagtttcattaattctatctaacttgaaacaaatattatacttaatagagaaacattagaggcatttccactaaagaagcaactttacgttgatcttgaaattctaagtaattcagtagaataggtgaaatgagaaaaatacaggatataaaattgtttaaaagagatataaatttaacattacttgggaatgttatgtttctatatctgctaaactcagagaatcattagaataaagataaaaagtagtaagatttcataaagcagaaattgtaaaatgaaaaaaaaat

SEQ ID NO: 305813 - DNA, 476 bp, Homo sapiens
ttttttcttctgctacatttaggtttgatttgttcttgtttttcttattctttgagatgcagcattacatttccagctgaagatttttctattttttatgtaggcatttaatgctataaaatttcctcttagcaatgccttcactgtattcaggaggttttgtatgttatgttkctattttcattaaactttttattttgatttctgacttgatgctgttgttcaacctgctttttcttgttttcaatttgtgtgacagatatttctccaaccatttactttgagcctatggatgtcattacatgtgagataggtctcctgaagacagcagatcattagatcttatttatttatccaatttgccactacatgttttaagtggggtatgtaggtcatttagattcaagattaatattgatatgtaagtttttattcctgacatagtgttgttagctagttgttttggagttttaatt

SEQ ID NO: 305814 - DNA, 609 bp, Homo sapiens
caaatgttttccaggttgtttactttttctttttctctcttaggaattccaataacttgtaggtttagttacattacataatctcttatttctcaaaggttttgttttttaaatttttttctttatttgcaactgactgggctagttcaaaagaacagtttttacgcattgaagttctttcttccacttggtctagtctagttcagatgctcgctatgatggggagggatgggctggtacccgggtcactggcagaactttcaggtcagggcaggcagaatgcttargtggtgggatcccaagggaatatcagaggcctgtggggtttatgtttttaacagggctctgggtcaaagcttaaatattcaggctggggcagggcagctgtgacgtgggcccttcattggaagagcaggaaccctcagctgggacagtggcagctgacagctatggggcatgttgtgtgcttgaacctccctcccacacaaggagttctaaatttcattgtttgaagcatgcaaaggtgagaagccttcttgctcctgaactggcctgggggtggtaggggcagaatcaatggaagcaacaattgtgaatatttgttgctgg

SEQ ID NO: 305815 - DNA, 343 bp, Homo sapiens
gagctgcagaggcaaggacttacgcagtatggagtctagctgcttcttagtactatggatgcgccatctattctagggacacggaaaaatgctgtgtctcctttctcagtggggcagtggctgctggaaccgggctgctagaaaaycaaaagcttgtggggttggttccatgtgggcttgagcagtgcctctgcacagactccacatagctctctgctgttctggaagcccgagggagtcaagagctgaactacaaaagtccatggcagaagtgtgatccccaggggagactcttactcactcactcttcccccactcactttcccaacttagggagctttcc

SEQ ID NO: 305816 - DNA, 579 bp, Homo sapiens
ccttgttccctccctggcttggggacaggaggagtgaaggcagcagtgatagtgaagggcctgttagctacctctgggagttatgcactcagagaaacagagccatgactgcagtgttcaggaaattcagggaggctgtgctggggacccaagccagtgagtcccacctactaaggagctgcagaggcaaggacttacgcagtatggagtctagctgcttcttagtactatggatgcgccatctattctagggacacggaaaaatgctgtgtctcctttctcagtggggcagtggctgctggaaccgggctgctagaaaaccaaaagcttgtggggttggttccatgtgggcttgagcagtgcctctgcacagactccacatagctctctgctgttctggaagcccgagggagtcaagagctgaactacaaaagtccatggcagaagtgtgatccccaggggagactcttactcactcactcttcccccactcactttcccaacttagggagctttcctcggctccataccagttmtgggtgggttaatgttcagcttcatggcttcattcctctctgc

SEQ ID NO: 305817 - DNA, 535 bp, Homo sapiens
tttgtctctgattacttatttggtgagaacataaataaattgtatatatggtcttctgtgttctgcctgttaaaagcatcagagacataagagaaagttttctcatattacaactctctggcaagggatactaaaaacaaataaatatgatgtatcaygtacatgtcagaataaattctgaattgggaagaacaagaatgaactagaatgaatggaattaagtatttgtagaaatatttctgacatcatataattataattctagattagaaactataagtatgtgcctaacaaggataggattcctattgaataatctaaaggaaatcatcaacaccttatgtaattaattttaaaaaaagcctatgcttttggaaattttaatatagggtcatgaaactaatactaaaaaattttatcatgtaaaatatttgtattgttttttaaaattaagtgtcttgaaaaagtacagaataataacaatcacaacaataaaattagtttttccgtaccaccacccagagaagagatgctt

SEQ ID NO: 305818 - DNA, 592 bp, Homo sapiens
gagggaattgtgtcacttaactatgcatcacaggtagatatttaatatgccctgaaaggataagtacaatgacatatctcacacatagcacaatatcttttgccctgtctagtgttatgaatgtgacagaatccagataggttatgagctagaacctgatattgtgtcaccattggttatgcttggcacaatgacgtaacagtcaaaactcttctggttacaggccaggcgyggtggctcacgcctgtaatcccagcactttgggaggccaaggcaggtggatcacaaggccaggagatcgagaccatcctgactaacacggtgaaaccccgtctctactaaaagtacaaaaaattagccaggcgtggtggtgggtccctgtagttccagctactcgggaggctgaggcaggagaatggcctgaacccgggaggcagagcttgcagtgagccgagattgcaccactgcactccagcctgggcaacagagtgagactctgtctcaaaacaaacaaacaaacaaacaaacaaaagacaaaaaaataactcttctggttgcaactgagaaacccaacttgaaataaccaaaatag

SEQ ID NO: 305819 - DNA, 491 bp, Homo sapiens
aaaggtccattcttgaatttttttaatgttcataaaatctgctaaggaaactatcaaaatatgaagttcatagccctaccttcaaaaaatattcatcatcaggcttagagttgaactctgttgcctgaaattttaataagttgtccaggtttttctggtgttttgrctctctgttctgtaaggtgcttggagaaacactgctctaaattacgtgccacttagggaaaagtatcctagctcttcaaaagtaattggaataaataagaaaatcaacaaccataaagacaaagaaggagagtaatgtgctttcagctggaaggcttctgtttatgagaaattagggtaatttaaggtcatcttctaatggcacgtaattctaaactagggcagccacataagccaggatagacaggtctggggaaagaaacggagacacacattgagtgtttcttgagctatatattcagctccatactaggggcaatcaaaag

SEQ ID NO: 305820 - DNA, 491 bp, Homo sapiens
aaaggtccattcttgaatttttttaatgttcataaaatctgctaaggaaactatcaaaatatgaagttcatagccctaccttcaaaaaatattcatcatcaggcttagagttgaactctgttgcctgaaattttaataagttgtccaggtttttctggtgttttggctctctgttctgtaaggtgcttggagaaacactgctctaaattrcgtgccacttagggaaaagtatcctagctcttcaaaagtaattggaataaataagaaaatcaacaaccataaagacaaagaaggagagtaatgtgctttcagctggaaggcttctgtttatgagaaattagggtaatttaaggtcatcttctaatggcacgtaattctaaactagggcagccacataagccaggatagacaggtctggggaaagaaacggagacacacattgagtgtttcttgagctatatattcagctccatactaggggcaatcaaaag

SEQ ID NO: 305821 - DNA, 565 bp, Homo sapiens
tattaagtacacacaaacacagaatactctgacacttgaattacagtrtgtaaaccactcaaatcttgagtaggagaattaaaagacaagtctatcaaaaataataactacaacaactttttaagaaacaaatagtataaaaagacagagacaacaaaaagtcacaaagcacggaggatggatttaaagtatagagttttgtagttttagctttgtttttgttttaattttctgatcagagttaaattgtcagaataaaataattggttataatatgttatttgaaagccttatagtaactacaaaacaaaaatttataacagatacataaaaaataaaaagtaagacattaaaacatacttccagaaaaaaaaaaaacactgatatataaagacagaaaagaagaacgaaagaaagaaagaatgaaagaaagaccaacaatacagccagataacaacagaatgtcaggagtaagtccttactgatcaataagattgaatgtgaatggactaaattttccaatcaaaacacatagagtggctgaatagattaaaaaacaagagcc

SEQ ID NO: 305822 - DNA, 560 bp, Homo sapiens
gggggctgatcccctatgaatggcttggtgttgtcctaagaatagtgagttctcatgagaacttgttattgaaaagtgtgtggtgcctccctccttgctctctttkgctcccacgctagccaagtgagacacctgctcccccttaaatttccaccatgattgtcaacttcctcaagccttcatcaaaagcaaatgctggagctatgcttctatagcttgaagaaccatgagccaattaaatctcttatctttatcaatcatccagatttaggtattttttacagcaatgcaaaatggcctaacacagtaaattaattccaaggaggaagttgttactaaaaatatacttaaaaatctggaagtgactttggaactgtgtaacaggcagaggttggaagagtttggagggctcagaagaagataagaagatgaggaaaagtttgaaacttcttagagactggttaaatggttgttacaaaatgctgacggaaaatatggataataaaggtcaggctgaggaggtatctgatggagctattggaaactagagtaaaggtcac

SEQ ID NO: 305823 - DNA, 560 bp, Homo sapiens
gggggctgatcccctatgaatggcttggtgttgtcctaagaatagtgagttctcatgagaacttgttattgaaaagtgtgtggtgcctccctccttgctctcttttgctcccacgctagccaagtgagacacctgctcccccttaaatttccaccatgattgtcaacttcctsaagccttcatcaaaagcaaatgctggagctatgcttctatagcttgaagaaccatgagccaattaaatctcttatctttatcaatcatccagatttaggtattttttacagcaatgcaaaatggcctaacacagtaaattaattccaaggaggaagttgttactaaaaatatacttaaaaatctggaagtgactttggaactgtgtaacaggcagaggttggaagagtttggagggctcagaagaagataagaagatgaggaaaagtttgaaacttcttagagactggttaaatggttgttacaaaatgctgacggaaaatatggataataaaggtcaggctgaggaggtatctgatggagctattggaaactagagtaaaggtcac

SEQ ID NO: 305824 - DNA, 628 bp, Homo sapiens
ggctttcacatgatgcgaagcctgtggttgcacagtatgcaagartaaggaaacttggcagcttccagctagatttcagagaatgtatgagaaaacctgggttcccaggaataagcccactgcagaatcagagctttcacagagaacctctactatagcaatgctaagggcaaatgtaggggttggaggctccatagagagtccccaccaggacaatttcttatgggaaagagctgctgccctccagaacccaaaatgttaggtctaccagcaacttgcatgctgtacttggaagaactgcagacttccaactctaacttatgagagtagacttgggggctccaccttgcagagccacaggggcagagctggaccaatgtgactttgatacagtacataacgtctaaagagattttctggagctttaagatttagtgactaccctgctggctgtcagactagcgtgaggcctattgccccttgctattggcccatttctgtcttttggaatgataatgtttacccaatacctgtactatcattgtatcttgggagtacatgacttaatttgattttacacgcttctaggtggaaggacatgaatctcagatgagacttagaagtttgg

SEQ ID NO: 305825 - DNA, 628 bp, Homo sapiens
ggctttcacatgatgcgaagcctgtggttgcacagtatgcaagaataaggaaacttggcagcttccagctagatttcagagaatgtatgagaaaacctgggttcccaggaataagcccactgcagaatcagagctttcacagagaacctctactatagcaatgctaagggcaaatgtaggggttggaggctccatagagagtccccaccaggacaatttcttatgggaaagagctgctgccctccagaacccaaaatgttaggtctaccagcaacttgcatgctgtacttggaagaactgcagacttccaactctaacttatgagagtagacttgggggctccaccttgcagagccacaggggcagagctggaccaatgtgactttgatacagtacataacgtctaaagagattttctggagctttaagatttagtgactaccctgctggctgtcagactagcgtgaggcctattgccccytgctattggcccatttctgtcttttggaatgataatgtttacccaatacctgtactatcattgtatcttgggagtacatgacttaatttgattttacacgcttctaggtggaaggacatgaatctcagatgagacttagaagtttgg

SEQ ID NO: 305826 - DNA, 557 bp, Homo sapiens
cagagatgaaagaggagacattataactgataccacagaaattcaaagaatcatgagactattacaagcaactatatcccagtaaactagaagaccgagaagaaacggatgaattcctaggcacatatagcctaaccaagattgaaccttgaataaatccaaaacctgaatagactaataacaagtaatgacatagaagcaataataaatagtctcccatccaagaaaagctyagaacctcattgtttcacagctgaattctaccaaccatttaaagaactaatactaatcctactcaaacttgtccaaaaaattgagaaagatagaatacttccaaactcattctatgaggcgagtattatgctgatactaaaaccagacaaaggaaccaaataaaataaaattacaagccaatgtctctgatggaaatagatgcaaatactatcaacaaaatacaagcaagctaaattcaataacacattaaaaacatcatccatcatgaccaagtggcattcatcctcaggaggcaaagatgattcaatatatgcaaattgata

SEQ ID NO: 305827 - DNA, 525 bp, Homo sapiens
gggcaagggttgggaagctatttattgggtactaggctcactacctaggtgactgatttattcatactcctaacttcagcatcacataacatacatttgtaacaaacttgcacatataccaactgaatctaaaacaaaatttgaaaaatagcaataaaataaaaaataaaataagctttaggaggaaaaaaggtatctttatacttgggaagtgatacacaaagctgaaaatcttccctggtctctgccagtatttgctaaaagaaaagtatctgcacataattcaaaactctactaataaacaatggaattatagtaccaaatcattctttttttttttttttcctgacagagcctcactctgtcacccagggtggagtgcagtggcaccatcgtggcttactgcaacctccactttctggattcaagtgattctcatacctcagcctcccaattagctgggattacacrcctggctaatttctgtatttttagtagaggcaggttttcaccatgttggccagg

SEQ ID NO: 305828 - DNA, 596 bp, Homo sapiens
aaacagactaatacagtagtcattgctttaattgcacttcatcttcagaatcatactggtagagacatgtttcatctcctgttacaattttataaatttattyatatatttatctatatctgtatctatatgtttgattttaaggaattgataaatcacatgattgtgtgggctggcaggtccaaaaaatctgcagagcaagctagcaggctgcaaactcaggtaagattgacgtttccatcttgggtataaaatctgtagagaacattggcaggctggaagctctggtttattgtttcttattctccaggaaatgtgtttctattcttaaggccttcattgactgtctgaggctcactcacattgtcaaaaagaagctcctttacttaaagtcaactgattgtaaatgttaattacatatacaaaatatcttcacggtaacctctagattagtgtttgatcgaacaactggaccccttgcctcagccaacttgacacataaaactaaccattacacttattcattttgtttcttatcctgtaaatattttctctgctcttcacttgcttcagatcacggagacaggaatcactta

SEQ ID NO: 305829 - DNA, 465 bp, Homo sapiens
  misc_feature (1)...(465): n = A,T,C or G
tataaaccttctcctacattttgggtttctattactctagcagccacttccagggactattggctatggtactggctatctacaactgtataacaaattatcccaaaagttggtgacttaagacaagaataaacatttattattttacaagatttctatatttcagcaattcagcaatggctaggcatggtggttctggcttgtattctttcaagaaattgtaataaagatgttggctcaaactayagtcattagaagtcttagctggaagacccactttcaagacaaatcactcgggtggctgacagggtgtgctggaccacttcataggcaccttgagaaccttcatgagatggcagctggcctacatcggagtgactcaagaggaagcaaggcgnaagatgcatcagatgcctttggtgacctcttcctagcgagcacatgccaccatttccacagtatgtt

SEQ ID NO: 305830 - DNA, 559 bp, Homo sapiens
tgtttatatgtaaaagacttgggagtctgcacagataattctgattccagtccaactctataggattcattctggtttccaccccacccccagtctttccatgtttgcaattcccttttcaacagtgagaaatccaacttccattctgctagaaacatatagttattttacaatgttatttgctcaatcctcttgtgtggaactgacctccagtcacttccrccaatccttccatgcatgaatccagtccaccactcttgggcgggcatccaccttcctccttgacatcctctttacccacctcagtctctgagacctgccctgactggtgccttcctccccatcttcagacgctgagagtggctctgagctacacagctgccattctttccacctacctggatgacctcccatggcattgcctacaagctttaagattgaatcgttgaggaaggaagggacagggatgatggaggaggaaagaaaaagcctccaaaactctgcaatggcatttcccaaaatagtgatttaggttttcttaagattattgggagtcaca

SEQ ID NO: 305831 - DNA, 559 bp, Homo sapiens
tgtttatatgtaaaagacttgggagtctgcacagataattctgattccagtccaactctataggattcattctggtttccaccccacccccagtctttccatgtttgcaattcccttttcaacagtgagaaatccaacttccattctgctagaaacatatagttattttacaatgttatttgctcaatcctcttgtgtggaactgacctccagtcacttccgccaatccttccatgcatgaatccagtccaccackcttgggcgggcatccaccttcctccttgacatcctctttacccacctcagtctctgagacctgccctgactggtgccttcctccccatcttcagacgctgagagtggctctgagctacacagctgccattctttccacctacctggatgacctcccatggcattgcctacaagctttaagattgaatcgttgaggaaggaagggacagggatgatggaggaggaaagaaaaagcctccaaaactctgcaatggcatttcccaaaatagtgatttaggttttcttaagattattgggagtcaca

SEQ ID NO: 305832 - DNA, 509 bp, Homo sapiens
caaataaactattcgaaccttttttacctccctgagatgcaacattaaatgcagggtctctacttagtgggcccaaatccataaattcagactaattcaattctatcttacttctaccattatcccacatccttaatatccatttccatgcctattcttcaggtttctgcttatataaatcagaaaactcaagcagttctttctgagtgtaaggcacctcttcatggatcacactctcaatcttatgtttaggagcccaccaatactttagtctagttataggtctaggagcaaacaggggtgttgggggttgctcctgaggagaatcaacattaccttgcctggcaacggcctcaggggtgaccatcactgttccctcaggcagtgcagggtgtatctcctcaaacaaagccgaaaggctgacggaagcgtgggccaggaaggggatgttgccactactggggatggggaagctgtttcttctgtcaaaaraggttcatcagagttta

SEQ ID NO: 305833 - DNA, 630 bp, Homo sapiens
tccttgcctatcaatttgttgacatctagaaaatagcttgctgaattttgattgggatttcatagacactatagttcaatttgggaaatagtgacatcttaaccatattgaaaattccaatccatgaacayaggatatcttctatttagatattctttgatttatttcattaatgagttgtagttttatgagtactgttcttgcatatattttgttatatttatactcaagtatttcattttccggtgctactgcaaatggcaccaaatttttaagtttcaaattcaaattggtcatttccaatatataggaaagcaatagacttttgtatatttgcaggcactagtgctgagacaagatattttgtccttatttctgattttagtgagaaactatctagtccctcatcattaagtatgacgttgaatataggttttgtagttcttcaagttcccttttattattcattttctgagaatttttaatgataaataggtgtttgattttctcaaattatttttactatcaattgaaatgattacatgatttttcttcttcatcctattaatatggtgaattccattgattttttttttactgttgagccatctttgtatacctttgtatacc

SEQ ID NO: 305834 - DNA, 630 bp, Homo sapiens
tccttgcctatcaatttgttgacatctagaaaatagcttgctgaattttgattgggatttcatagacactatagttcaatttgggaaatagtgacatcttaaccatattgaaaattccaatccatgaacacaggatatcttctatttagatattctttgatttatttcattaatgagttgtagttttatgagtactgttcttgcatatattttgttatatttatactcaagtatttcattttccggtgctactgcaaatggcaccaaatttttaagtttcaaattcaaattggtcatttccaatatataggaaagcaatagacttttgtatatttgcaggcactagtgctgagacaagatattttgtccttatttctgattttagtgagaaactatcyagtccctcatcattaagtatgacgttgaatataggttttgtagttcttcaagttcccttttattattcattttctgagaatttttaatgataaataggtgtttgattttctcaaattatttttactatcaattgaaatgattacatgatttttcttcttcatcctattaatatggtgaattccattgattttttttttactgttgagccatctttgtatacctttgtatacc

SEQ ID NO: 305835 - DNA, 623 bp, Homo sapiens
cctgtagaaggtaggtattattataagcaatttttttctgatgcataattcattttttagttattcttattttctagtttacctctatcttttcttccttccacctatatacctatacagctttaaaatcagtaacacctgcttctagcagcaaatcttctactcataatctttgttactagtatgcttaactgccaaccagctcatgctatctacaaaataaaaaagacacaatgagagcctgacraattatctcctaagtatactgtacatgtttcaattcacatatgggctatgctaacaacgcgcacacacacacacacacatacacacacacacacacctcttaaggtccttgttgcaaatgatcagccatgttcttgctagatgtgctactttattaatagtatctagccttgcagtcaataaatcatgttagttattaagtaaaaaagtatatatagtaaatttataaagcaacaattttacctcacataattttagacttaaaatttgtatcatatttgtaaatatcatgatgattatttgaagaaagatagagtccaggctgtgcatccttcttcagtgccagctcttctctctgtcctctgacagattacttc

SEQ ID NO: 305836 - DNA, 550 bp, Homo sapiens
tgtgtcaagggagggagctggtaggagtgaaaggaagtgaatggatcatgggggtggtttaccccatgctgttcttgtgatagtgagtgagttctcatgagatctgatggtttaaaagtgtttcacatttcccgccagcgcattctctctctcctgccaccatgagaatacaatccttgcttcccctttaccttccattttaattgtatgtttcctgaggccttcctagtcatccagaactgtagtcaaataaacctttgtgctttataaatcaccctgtctcaggtagttctttataatagtgtgaaaactgactaatacactaactgataaaaaaaagacacatttcataataaagaaagggaaagaaatgataagtattcattcattcatgagagagcttcaaaataaaaaggcaaaacttaatcaaactgaaaagagaaatatagaaaacatacattgacatttggagattttaatttctctgtaattgaaaaaaagaagtrcacaaaaaataaaaatatttaaaaaattaaaaattttgccaacc

SEQ ID NO: 305837 - DNA, 589 bp, Homo sapiens
attgtgtattccagatttatgatatttcctgagatcacatatgtttaaatgtgtagcaatgaaagatagtatttttactcagaaaagatgtaactgaccaaaagacatctagattttcaaatctgtgataaaagtgggacttccgtaaaatattctctctttcactacaattaatatgtaacaatcaacaagaaaatacaatggcaggagaagaaaatgaaataagtatatgagcatgcaattcacaggraaaaataagacaaaacagaattgaaagataaacgtacgaaatatatcttcagtaatagtaaggaggaaaacaaaagaagttttttttttgagggctattgttttcaccatcagaggggactaccgtcctttttctaaaattgtctaattgtctgtaataaattgtttgtcttttgcaactcagaatttctgaattttagaaagaaaatagagtactcgtacaatattatataacatattcagcagtgtctagggtacatcctttcatcaaacacattaatatttctcatattcgtaagtgagacaagtcaaagatataacttatctcacaaaaattcag

SEQ ID NO: 305838 - DNA, 589 bp, Homo sapiens
attgtgtattccagatttatgatatttcctgagatcacatatgtttaaatgtgtagcaatgaaagatagtatttttactcagaaaagatgtaactgaccaaaagacatctagattttcaaatctgtgataaaagtgggacttccgtaaaatattctctctttcactacaattaatatgtaacaatcaacaagaaaatacaatggcaggagaagaaaatgaaataagtatatgagcatgcaattcacaggaaaaaataagacaaaacagaattgaaagataaacgtacgaaatatatcttcagtaatagtaaggaggaaaacaaaagaagttttttttttgagggctattgytttcaccatcagaggggactaccgtcctttttctaaaattgtctaattgtctgtaataaattgtttgtcttttgcaactcagaatttctgaattttagaaagaaaatagagtactcgtacaatattatataacatattcagcagtgtctagggtacatcctttcatcaaacacattaatatttctcatattcgtaagtgagacaagtcaaagatataacttatctcacaaaaattcag

SEQ ID NO: 305839 - DNA, 549 bp, Homo sapiens
gggtcatatcttctaataattttgtaagcagcagggccttatctgaaaatggtcattctgttcctatgtctagtgagggaagagctctcaggaaaaagtcagcaagacaaacaggacggggcaggtgctgcggccaagcagaacatcagaaaatgtgggcacagggggtgtctaactttggcataatggggggtactctgcaggacagctggccccagggccggactcacccatgaggtgaggggcagcctctgagcctcgtgccaggcattggcccctggtgtgaggagctcaagatgctcccactggactgtaaccccttctccagaatggggggtgctgagttcctgaargcaggagggatgaagggcagctccaggacacagggctgggcaggggccaaaggatcccatcacagcctgtgctcttcctgccctccacatagaatttatttcttaaaaatcttcaccacgtatcttcatggtaaatctggggcaaagctttaaaagcatacagtaagcatttataatttatggctttccatttcaa

SEQ ID NO: 305840 - DNA, 541 bp, Homo sapiens
atataaatattggatgaagtagattttaaaataagtgatattaccaggaataatgagaaacattgcatgataattaagggtcacttcatcaagaattaaaaaaaacttttaaatatataacagagcttccaatgatatcaagcaaaacccaagaaaacagaactttttttcaaatatcataaatattgtttgaaattaaaacacttctttctctctccatcattgatgggatgaatacagaaaattagtaaatatatagaaaatttgaacaatactattaaactttttttatttttggacgcagggtcttgctctgttgccggaactggcactggaatgtagtgatccaacaactgctcactacagcctggaactcctgggcgaaagctttcctcccacttcrgcctcccaaagttctggaattataggaatgagctactctggccagcatccaaaatattttaaaattaaaaatgacatttataaataattcactggtcagataaaaagttacaagggaaataaggaaatattttgaatg

SEQ ID NO: 305841 - DNA, 560 bp, Homo sapiens
tggaaagagttacactctgcaaggtggcatcccacaggctgggaagcacagcctcccgcagagatyagaaacaggcaccttggaggagaaggggttggggcaggagctttatgctgaatgggctggaggatcaacaggttacaggaggagctgtgaatattcatgaagtggtcctgatgcatgcgtattgaacaaagatgcctgtaacatacaactcaagttcatttttgagtggagatttaagatctaaatgtattacagtctagaccctatgcatcaaaagaaattttcaggacatgaaggcagcctctgcagaccggccagaaccagtcgatggtgggtggtcttcgtgtgagaagaaagttactgaaatcagtcccttgtccagtgaaagctgtagttacagcttgtggaacgggggttaattagtcagtgtctgtgagctggatggcttgtaacggttttagtcttgctaattttgggggcaatgtttgtttagctgctagagaaaatgaaaagcctgtggcagtgagaacgtcatttattctttaagtttagag

SEQ ID NO: 305842 - DNA, 572 bp, Homo sapiens
ctggctgcgatatggtattataatttggcctaatgttactattggggtaaactaggtaaagggtacaccagatcaatctgaaattatttcttataactacctgtgaatctaccactatctaaaaatcaagcatataatttttaaaaaagaaaaaaaaagaaacccttgtgaagactatcactaatctatcttagctgccatccaaccgatgtcaacatatggtacttgcaaagtcattgtttctaggccacttaagtgtaacatgcatctgtagcaaagattagtgatgtggtttctgcttaccaaatatctgggcattgcatagcctagtcaagttgacacataaaartaacctttcctgaaatctatgttaaacaaagaaaaagatgagaaaatgagaaagcttctagcatcagaacatacggatgctttttgtcattttgtgaaaattcccacatcttaggtgattacaaagttgataacagagaagccatcgattacttcaggttgtagtctacaaaagccttgagttcaggtgaaggaattaagggggaggcagcacataccaattc

SEQ ID NO: 305843 - DNA, 610 bp, Homo sapiens
cattaaatacacacatgcacacacatatgcacaaagacataccacacacacataccaaaattttgatgtatgttgtgattataaaaatacattaaaaaactcagtgagcttgaaaataaaaattacttacacagatatattacatagaaattaaactagtatggctattctagtatgtggaaattcgacttcaataagaagagcattactagatgatatggtttggctctgtgtctccacccaaatcgcatcttgcattttaattcccacatgtcgagggaggaaggtgatgggagctgattggatcacaggagcagtttcccccatgctgttgttgtgatagtgagggagttctcaagagatctgatagcttgaaagtgtttggcatttcctcccttgctctctcaatcacctaccagtatgagaagacatgccttgcttcccctttaccttctgctgtgattgtaagtctcctgaggcctcctcagccatgtggaactgtgagttaattaagtcttttttctttataaattacccagtctcatgtagttcttttagcagtgkgaaaatggactaatacaggaaattcgtacctggatagtggagaatt

SEQ ID NO: 305844 - DNA, 602 bp, Homo sapiens
gttggtttccaagtccttgtagtgagaagatgtcactacaactttatgcaaggggtttagatataacttagttcttttacaatctgtactaatactatttttagtgaagaaactctttgatcaggaatatttatttatagggctttttagtttacaaagaaagggctgtggagaagtgtctggaggaagcctatgaagacaaatggtgctctgtgtgaagaaaaacatatcagagattgtggttgtcttgacartgctttcaggaaatcttagttcagacaaataaaaggatatattttatttaaagaggaaggagcaaagagaagtgaatggagtgctagagaagaaatgatcagaggaggcatcttaagacctcagaaagtaaaatgcctccaagcccacaggggtgaagactgccccagctcatgtgattcacaggactaagggcaggggcgggggcacactccatacccagggtgggtgaggcgggtggaggtgtggtgtttgagcagccaccacttaaagtctgtatctgtagttagtatttgggcttttgagacagatgtgtaggaagctttttgatctggcaaccagtaagtttc

SEQ ID NO: 305845 - DNA, 602 bp, Homo sapiens
gttggtttccaagtccttgtagtgagaagatgtcactacaactttatgcaaggggtttagatataacttagttcttttacaatctgtactaatactatttttagtgaagaaactctttgatcaggaatatttatttatagggctttttagtttacaaagaaagggctgtggagaagtgtctggaggaagcctatgaagacaaatggtgctctgtgtgaagaaaaacatatcagagattgtggttgtcttgacaatgctttcaggaaatcttagttcagacaaataaaaggatatattttatttaaagaggaaggarcaaagagaagtgaatggagtgctagagaagaaatgatcagaggaggcatcttaagacctcagaaagtaaaatgcctccaagcccacaggggtgaagactgccccagctcatgtgattcacaggactaagggcaggggcgggggcacactccatacccagggtgggtgaggcgggtggaggtgtggtgtttgagcagccaccacttaaagtctgtatctgtagttagtatttgggcttttgagacagatgtgtaggaagctttttgatctggcaaccagtaagtttc

SEQ ID NO: 305846 - DNA, 656 bp, Homo sapiens
ttgctttacctctgaagttatttttatgttggtattttcatgtttcttattagaaacactgttagtcatcaggagactaagcagtgttttaaatctgtaccaactgttatgtaatcaagaaatttactttttctatcaacccttatacaaatttagattccacagactactaaaatatcatggttttgcactttccatttatatttaatatgtgaattttattgctattagggtgactatatgttgcatgaaatctgaatttcagtcatttactgttttaataaaaatataattgcaaatgaaattgcagatcactactttttactgcatttttccaacaataattctgcttacacaaagctcaaatagccacttaatgaggtcaattcagagggaaacatttttgcctcttagcgcctgagctaagagcttaagcaaasgcttggggtggaggtggcttggagagactgagcagggcagcttctcctgagtgcagctggtgacaccccagaacacatgctcagtggccggagtactcagtataattgtctatgtactggctttgttaaaagattccaaatgtttgaacatactttcgattaacttggtcatcctataatatccgtgatctctgagtacttaaggaatttcttgct

SEQ ID NO: 305847 - DNA, 519 bp, Homo sapiens
tgtttgtgtgaacacatggttttaccactgaattaggttcgaagcattaactgcaaagcctgagttgcttcctgaggtttgcaaccaagaaccccaactgctatgcatacgagatttaactcactcccaagagcaagcgagactgcagtgttcaccggtctgacacaccctgagcccactacactggagaggggcgcatgaataaggcagtcaagagcagtcggcacagcaaatattcatggtcatgttaacgccttgctctgggagcttatggttaaatgagggagggatggctgaaatagttaacttggctcactgtggtgaatgagagacatacacaaatcactaaggaagccccagaagacaagagtaggtagaattagggaattagggaaggtttcctagagaakacagtaggtaacttgaaacaagaattagcaatattctggaagataggaagcagttactctctctctgtgtgtgtgtgtgtgtgtgtgtgtgtgagagatgggatgaatt

SEQ ID NO: 305848 - DNA, 491 bp, Homo sapiens
gataggaagcagttactctctctstgtgtgtgtgtgtgtgtgtgtgtgtgtgagagatgggatgaattgctggggagaatgagaactgaattctatgtgaagggagtatcctctggatagtatacatgatactgagcataaagccattaaactataatacaggctcttatcattagcacatttaaaggtgttcacaggaaatatcacagtgctatgcaatagggagtcgacttttatagttgagattctctgctggaacaccacttccctccagcgtgactttaactcccaccccatccagtcactgaaaccgctgagggcgtatagcctccagtgatcccatagagaaaatagaaacacaaatagaagctgtgcttagattagagacagaaggctactatggttttatcagccattatagaaagtgtacattaatgactaagtatttatatgtcgtaagctaagtatgtgtttaaactaagaaatgattg

SEQ ID NO: 305849 - DNA, 491 bp, Homo sapiens
gataggaagcagttactctctctctgtgtgtgtgtgtgtgtgtgtgtgtgtgagagatgggatgaattgctggggagaatgagaactgaattctawgtgaagggagtatcctctggatagtatacatgatactgagcataaagccattaaactataatacaggctcttatcattagcacatttaaaggtgttcacaggaaatatcacagtgctatgcaatagggagtcgacttttatagttgagattctctgctggaacaccacttccctccagcgtgactttaactcccaccccatccagtcactgaaaccgctgagggcgtatagcctccagtgatcccatagagaaaatagaaacacaaatagaagctgtgcttagattagagacagaaggctactatggttttatcagccattatagaaagtgtacattaatgactaagtatttatatgtcgtaagctaagtatgtgtttaaactaagaaatgattg

SEQ ID NO: 305850 - DNA, 568 bp, Homo sapiens
cgtattttattgctttaaatatctccattttacaaagagaagcgctatggcttggtgaagtcatgcagataaggaaagatccgagaccctcactcaggccctgtgtttacaggaggatttttattcatatagtgaccgcatctgcctctggcaaraatttgtgaagtattcagtcaatttttacatgtaaacaattatagcaatcctatagaattcaggtgctgttgtaagttgaattgtgtcccaaccaaattcttatgttgaagtcttaacctctggcgccccagaatgtgactttatttggaaatagggccattacagatgcaattgttagttaaaatgaatcattctggattagggtgattcttaatccaatatgactggtgtccttatagaaagcagaaattgacacacaggcacacataggaagaacacatgcaaagatgaaggcagagaccaggcttccgcttctaacaagccaaggatcaccaaagatggccagcaaacacccagaggctggaggagagcctggaacagattcttcctctccgctccgggaagaaaccag

SEQ ID NO: 305851 - DNA, 570 bp, Homo sapiens
aatgtctcaagcaataaaaacaattttaaaagaaggttaacagtctttacatctcaggtmgataatttattgttgtgcgtaataccagattttaccaaggaaatcttatatctttctgaaaactgttatagagatgctatcgaaaaagaaatactttgtagttttagaaaggtgttagcatagtatcagattagatgttttttaagtcaaataatttaagaagctttgtgtgtttatattaatccccagaaactgaaaagaattttaattattaattattttcatgtttcaattttttagtagaagggccacacatccaaattattatgacaaaccagatgagaaataataaaattgaaaatgagcagacttttattataaatttccttaaaaataataaagttcatccatttttaaacaagttattctctggaatgggcaaaactcctagtagactatggaagctgaaagtggctttgaaagattacacttgattttcaaaattgtgctaacttgtcacattacctgaatggctatttgtgccaacaagttaacttcttgttattaaat

SEQ ID NO: 305852 - DNA, 552 bp, Homo sapiens
atgttctgcactgcttgtgctctgtgacccaagtgtcactcaatgtatgaaacccagggaagaatctctcagccgccatgtggggcacrtgcagacatgactctgccttcatgggcaactgccctgagacttggaagacctgccttccagtgatcctaggcttcggtctctccttgctttgtatgagtcatgaatttgctttgcctgacttgtgcaagcattctgtctcaccttattagacctaggaaaattcagattatccttaatttatatatatatatatatatatatatatatatatatatattataataattcagtgagtttgcttatttaaaaaagtgttttataaacttgtttgctatacatagtaattgcttctttaaaactctgaataaagttctcgagccattgataaagaaaaatatttttaagttgaaaaagtccagcaataggaggagaatcagcatcattacttttgcttcagaaaaataatagacaataagcaggtaagtaaataaataaataaaatagaggaaaataaaccatgaa

SEQ ID NO: 305853 - DNA, 552 bp, Homo sapiens
atgttctgcactgcttgtgctctgtgacccaagtgtcactcaatgtatgaaacccagggaagaatctctcagccgccatgtggggcacatgcagacatgactctgccttcatgggcaactgccctgagacttggaagacctgccttccagtgatcctaggcttcggtctctccttgctttgtatgagtcatgaatttgctttgcctgacttgtgcaagcattctgtctcaccttattagacctaggaaaattcagattatccttaatttatatatatatatatatatatatatatatatatatataytataataattcagtgagtttgcttatttaaaaaagtgttttataaacttgtttgctatacatagtaattgcttctttaaaactctgaataaagttctcgagccattgataaagaaaaatatttttaagttgaaaaagtccagcaataggaggagaatcagcatcattacttttgcttcagaaaaataatagacaataagcaggtaagtaaataaataaataaaatagaggaaaataaaccatgaa

SEQ ID NO: 305854 - DNA, 585 bp, Homo sapiens
tatactaattatatacctacaaaacataaaattctaatatccaggaaaaacgagctatgtgcacaagctccacatgacaaacaccaaaatatacattaaaatctgaaaaaacactgtgaagaaaaattcaaggaatatcttttaaaaatgaagagctatattgatttcatagattgcatggattgaaaagctcactattgtcaacgttaccattctctccaacttaacatatagtttcaacaaaatttcagtcaaaatttcagaaagcttttcccacaaatatggacagaaacatatgaaaatacaaaagattgtaaatactcaaatttatgcatgtgttttaaaacaaaattcaataactcatataacttaatttctagattcaccagctacacaaagctaacattggcgtaaaaatagacatagattaaaggtagaattatttattaakaaatatacccatatacatgtggtcagttgatttccaacaaaggcaccaaggcaattcaatcagaaaggaaaagttattcaacaaatggtactggcaaaccaaatattcatattaaaaaaagaaaaaaaaaagag

SEQ ID NO: 305855 - DNA, 585 bp, Homo sapiens
tatactaattatatacctacaaaacataaaattctaatatccaggaaaaacgagctatgtgcacaagctccacatgacaaacaccaaaatatacattaaaatctgaaaaaacactgtgaagaaaaattcaaggaatatcttttaaaaatgaagagctatattgatttcatagattgcatggattgaaaagctcactattgtcaacgttaccattctctccaacttaacatatagtttcaacaaaatttcagtcaaaatttcagaaagcttttcccacaaatatggacagaaacatatgaaaatacaaaagattgtaaatactcaaatttatgcatgtgttttaaaacaaaattcaataactcatataacttaatttctagattcaccagctacacaaagctaacattggcgtaaaaatagacatagattaaaggtagaattatttattaagaaatatacccatatacatrtggtcagttgatttccaacaaaggcaccaaggcaattcaatcagaaaggaaaagttattcaacaaatggtactggcaaaccaaatattcatattaaaaaaagaaaaaaaaaagag

SEQ ID NO: 305856 - DNA, 549 bp, Homo sapiens
tctgtcacccaagcaggagtgcagtagtacagtagtacaatcacagctcactgtagcctccaactcctgggctcaaccaatcctcccgcccctgcctcccaaagtgttgggatgatggacatgagrcaccatggctggcctcttagtggcctttcaaagctggtgcgttagtggctcctgttgtcaggtcttaatttcacacctttaacacccgcagtggccatgtgctgagtgacagttgcagttgtaagagccagtgatgtaaatggcagtggggtgttgagttcacttggcttcagcgctagggaggagcagggccgtgcgactcacaggacgctatgggaactgctgaattcatgtgaaatgccgtttgcaaacccagtaagaacatttcactgattcagagccttcttacactttcagttgggatgacctggggggaagtcagtttttatgatttaattcaataccttttctccatctatttagtatgagatcatcacaacaaacagctttcagcacaataaaaagttcagtttcaagtaagta

SEQ ID NO: 305857 - DNA, 566 bp, Homo sapiens
atggtgaaacccaatctctacaaaaagtacaaaaattacctgggcgttgtggcactttggttggacaagttgggaggactgcttaagcccaggagttcaagaccagcctgggcaacttagggagatgcccatctctacaaaaaataaaattagccgagcatagtatcgcacacttggggtcctagctacttttgggaggctggttcgcgaggakcacttgagcctaggagttgaagattgcactgagctatgatcatgccactgcactccagactgggcagcagaatgataccctgtctcaaaaacaacagcaacaaaagtctgcatgacagtaaagcttgggaaaaacttgacagactcctttcacagaaaatggtaatgttctaatctataaagcactacaagtcaggatggcccaatagaaaagtaggcaatgggtatgtatagttcattagtttgaatttaagatttaaagatagtcactccaatcaactgaaatttaaaaggtcacacacacattaaaggtgaaagaggtttgaggacatactcttatctagggaatacaa

SEQ ID NO: 305858 - DNA, 549 bp, Homo sapiens
gtctactgatcatttcctttgctgcacagaagctttttagtttgctgtaatcccatttgtccatttttgcttctgttgcttttgaggtctccccaaaaaatctttgcccagaccaatgtcctaaagcattctccaatttttttcttctagcagcttcaggatttttaggtcttacatttaagtctttaatctattttcatttgatttttgtatatgttgagagataggggtctggttttactcttctgcatgagtatatccagttttcctggcacmatttattgaagaaactgtcctttacccaatgtatattcttggcacctttgtcaaaaaatagttggctataaatgtgtgaatttatttctgggttctattctgttttattggtctatatgtctgtttttatgccagtaccatgctgtttaggttactatagcagctctttagtataatttgaaatcaggtagtgtgatgtctccagcattgttccttttgttcaagatcgccttggctaatcatggtcttctgtggttctatgcaaactttagg

SEQ ID NO: 305859 - DNA, 569 bp, Homo sapiens
gatgttagctgtggatttgttatatatgtcttttattgttttgaggtatgtcagttctatatctagttttttgagagattttatcataaaggcatgttgaatattgttgaatgattttttagcatttattgcaactatcgcatggtttttgttcttaattctgctaatgtgatgtatctgtttattgatttgcatatgttgaaccatccttgcattcctgggatgaatcccacttgatcacaatgaatgaggtttttaatgtgttgctgaattcagtttactagtattttgctgagaaattttgcatctatgttcatcagggatatttgcctgtagttttcttttgtgtgtgtgtcctygtctgattttggtatcagggtaatgttgacctcatagaatgagtttaaaagtattccctcctcttcaactttttgggatagtttgagtagaattggtgttatttcttctttaaatgcttggtagaatttagcagtgaagccatcaggttctgggctttgatgggagactttttttactgcttcaatcttgttacttgttattgatcagtt

SEQ ID NO: 305860 - DNA, 635 bp, Homo sapiens
ctttgtgcactccttttttctttctataaacaatgaagcatcataagggcaaataataattattctgattctcacagtacagctgtaagcaaccagcattgctgaaaaaaccagcagttgctcaattattggaaaatttctgaagagtcgtttaaactgggaaagtacaaagtgagaagacccagaggctgtgagaacrtagagccacagaatgccagctctacagagacccactccccaagcaaccctgcctcccacacatacatcacaggtggcaggacagaatctcaaaaagaatatgattaagaactcaattaatgcaatgtatattcatgcctatttatactagaagacttttgaaatgcaccaggaagagctaccccctttccccaatatggccccactgtcatcctataacatcttatggattctatagggcatttcccctctcactgtatatgtaacttctcctcctactagattcaaaatacattaattaaatccaagaataatcagaggtgaactatgtgctaagttactctgcctcacactgacgttacaaagatgaattgtatattaatcttaaccccaagaatctttctgaagccaactacaccatacttatttttctacca

SEQ ID NO: 305861 - DNA, 555 bp, Homo sapiens
tcagcaatacagctggactctattattctttcagtttcttgtactttataatctaagagtttaagcttttgatcagatgggttgagttatctgagcatctaaaaccactggccaaaaaggataaagatatttaacttgcaagtgatttctagtgaccatgatgattctccaaggccaccgagccactatcaacaacaccccttgagcatccacttggtggaagaacctatgctaactagattctgagatggtaagacacatattttaaaaaaaacaaacacctgggccaggcacagtggctcacacctgtaatcccaacacattgggaggccgaggtaggtggatcacccgaggtcaggagttcgggccagcctgaccaacatggcaaaaccccatttctactaaaaatacaaaaattagctgggtgtgttggcaggtgcttgtaataccagctactggggaggccaagacaggagaatcacttgaacccaggaggcgtgagttgcagtgagctgagattgcrccattgcactccagcctgggtgacagagtgag

SEQ ID NO: 305862 - DNA, 588 bp, Homo sapiens
agaggaagggaattagaaagggaagagattgtagtcagaaaacaaaattcctacagttgcaattacggagggtttgcaattattagtactaacaaatactgaagtctgatattgagtccatgatgcactaatcaattatgactgacagcttgaaaaacagttagatggaggtgctgaagtgggtgtgcatggatatggagacattattgtgtggctctcwtgggacctaagatgtgaataaggaggggcttcctggcacagatctgtatcaggagcattctaggtgcagagaaaagcaggaataaagtctccaaagaaggagtgagctagcacattaggggaacataaagtaggtcagtagtagttggagcttagtgggtgagggcaagtgtggaatgaaatgagaccaaagaggtacaagggaatatgatatagtttcttgcagaccatgtcaaagaatttggattttattctaagtgcactggagaatcattaaacattttaagtagtggcatctggtttatagtgtaaatgcttattttgactgctgtgtagggaatggatgggtgtgggagaatgaggaggtga

SEQ ID NO: 305863 - DNA, 501 bp, Homo sapiens
ctttagtttaattgggttacatttgtcaatttttgtttttgtcacaattgcatttgaggatgtggtcataaattatttgtcaagtctaatgtctgaaatggtgttcctagcttttcttctaggattcttatagtttgaggtctagcttttttttttttttttttttttttttttgaragaaagaatctcgctttgtcacccaggcacccaggctggagtgcagtggcaaaatctcagcttactgcaacctctgcctcccaggtttcaagtgattctgctgtttcagcctcccaagtagctgggactacaggcatgcaccatcatgcctggctaatttttgtatttgtagtagagacggggtttcaccatgttggtctccaactcctgacctcaagttatccgcccgccttggcctcccaaagtgctggaattacaggcttgagctaccacacccagccttacatttaatctttaatccaccttgagttaatttttgtatat

SEQ ID NO: 305864 - DNA, 501 bp, Homo sapiens
ctttagtttaattgggttacatttgtcaatttttgtttttgtcacaattgcatttgaggatgtggtcataaattatttgtcaagtctaatgtctgaaatggtgttcctagcttttcttctaggattcttatagtttgaggtctagcttttttttttttttttttttttttttttgagagaaaraatctcgctttgtcacccaggcacccaggctggagtgcagtggcaaaatctcagcttactgcaacctctgcctcccaggtttcaagtgattctgctgtttcagcctcccaagtagctgggactacaggcatgcaccatcatgcctggctaatttttgtatttgtagtagagacggggtttcaccatgttggtctccaactcctgacctcaagttatccgcccgccttggcctcccaaagtgctggaattacaggcttgagctaccacacccagccttacatttaatctttaatccaccttgagttaatttttgtatat

SEQ ID NO: 305865 - DNA, 588 bp, Homo sapiens
agaggaagggaattagaaagggaagagattgtagtcagaaaacaaaattcctacagttgcaattacggagggtttgcaattattagtactaacaaatactgaagtctgatattgagtccatgatgcactaatcaattatgactgacagcttgaaaaacagttagatggaggtgctgaagtgggtgtgcatggatatggagacattattgtgtggctctcatgggacctaagatgtgaataaggaggggcttcctggcacagatctgtatcaggagcattctaggtgcagagaamagcaggaataaagtctccaaagaaggagtgagctagcacattaggggaacataaagtaggtcagtagtagttggagcttagtgggtgagggcaagtgtggaatgaaatgagaccaaagaggtacaagggaatatgatatagtttcttgcagaccatgtcaaagaatttggattttattctaagtgcactggagaatcattaaacattttaagtagtggcatctggtttatagtgtaaatgcttattttgactgctgtgtagggaatggatgggtgtgggagaatgaggaggtga

SEQ ID NO: 305866 - DNA, 587 bp, Homo sapiens
gggtggggagtctccttctaccgacagacatgttagatcttagaatatagtgtataaacaagtgctgtgtatttaccatgtgccaggcaatgagctaaaaagagctttaccttcattattacatttaatgttcacaaaaaaagtatgtggtagaatctattgtggtgtattaaaccacctcataatttagtagcttaaaccagtatccattttataatatctcaccattttgtgggttagaaagttaggyggatcctactagagttcttcagctacttgtgacattgactaagtctcagttgctaggtgatatatggctagtggctgggatagtctggaggatctaaatgaatttgctcacatgctgggtgccttgatggggatatctgggggctgagctcagttggcctttcttgctccatttagtctgaggacctctccacagtctctctagtaggcagaaagtaccagccctcttgaaagctagtctcagaactggcagggaataattttcaatgtgttctagtggagaaagcagtcacaaatcagctcagattcaagaggaagggaaatagaccccatcgctc

SEQ ID NO: 305867 - DNA, 621 bp, Homo sapiens
ttacagtagggattgagaaatcttttctgtaaatgaacagatagtaaatattttaggtttcaagggccagtctctgttgcaactacttcactctgccattgtagtgtgacagaagttgtgggcactccataaatgaatgaacttggttgtgttccatagaactttgtgcagaaaagctgaaatgtaaatttcatataatattggtgtgtttttaatttttttcagccacttaaaatgcaaaacaaaaaccttagctcataggctttacaaaaacaggcacttggcctgcttttactcgcaggttgtgttttttctgactccagaataagacaaatattaattgaattcaaagtctagcctattttagtatgagaagcagagataagaaataaatgctctttacctcttggaaactgatactattaaagtgcgcacttgcacttagaaaatgaggctgaaaataccgagggctagctttcggaaaggtgtggaattcaaaagtccaagactactcktgagctgaatagggaaggatttaaagcaaaggggccttttggatttttgggtcacagcattgacagtgatgaacaagataatcccagtttcttgcttttaattaaa

SEQ ID NO: 305868 - DNA, 578 bp, Homo sapiens
attacataacttcagatccgcatttttgagttaggataaataatacaaacaaggcagttaagcaaaaagcataaagaagtaaaaaggctgtttaaggacaaaacaaggaagcctacagctggaaggcacttgtaagcaaaaaagagaaaatwaatgatataagttcacattcaataattggccaaaaagtttttgcttgctagaaagaagagccctttatagaaagccataaaaatactaaaagtttgtatggcttcctcattgctcacttttaaaaaagctggatgtgaattttcgagttgaataactgtcagctttgtggcaaggtcaaacctacatgctgaaagataaagaaaaacccaggagcggtgtcacacccagatcagaagagttgaatgccatgcctttctgggctttcagtgcacttggccataatccctagcattgactctagatacttgtccttaggaggggaaaggagacattctgaaaagtttcaggccagtcagaaaacaagaaaggtacggtgaaccatcatataacccatctggggtaatcatgctttaaaacagcatgag

SEQ ID NO: 305869 - DNA, 578 bp, Homo sapiens
attacataacttcagatccgcatttttgagttaggataaataatacaaacaaggcagttaagcaaaaagcataaagaagtaaaaaggctgtttaaggacaaaacaaggaagcctacagctggaaggcacttgtaagcaaaaaagagaaaattaatgatataagttcacattcaataattggccaaaaagtttttgcttgctagaaagaagagccctttatagaaagccataaaaatactaaaagtttgtatggcttcctcattgctcacttttaaaaaagctggatgtgaattttcgagttgaataactgtcagctttgtggcaaggtcaaacctacatgctgaaagataaagaaaaacccaggagcggtgtcacacccagatcagaagagttgaatgccatgcctttcygggctttcagtgcacttggccataatccctagcattgactctagatacttgtccttaggaggggaaaggagacattctgaaaagtttcaggccagtcagaaaacaagaaaggtacggtgaaccatcatataacccatctggggtaatcatgctttaaaacagcatgag

SEQ ID NO: 305870 - DNA, 559 bp, Homo sapiens
aagcttacataaattgttgtcttaaagtaaaatgagcggttatttaaaaaagagaaggtattggacaaaccagaaagtgcaagcatgtcataaatggtctgggtatgtcatgatatagttgtgaaaagagaatgtatgaaagatatgttttatatgatcaagttggctataatagaaataacattattcataattgtctktctaaagattgagctttgatagtaaaatatattaaaacaaaacagaattttgtcagttatgttagaaaaataaggttatctaaaaatactgatttgctcttactgcaattgcaagaggttttgattcctaattctgaaatcagtttctttttgaagcttttcagatttatgtctcaaaagtttaacttttgcctatttcactgcacctgatttgtgaattatacataattgccttcagttccttttctccttgagaagatataactttttgcttagctgagatgataactctctctttcaactttttcatcagttcttgtaactttttttctccagttctaactctgctgttgtgacct

SEQ ID NO: 305871 - DNA, 620 bp, Homo sapiens
aacagaggcatcttgtcactgaatgagccttagtttaacagagttcagagcagtgtaaaaatgttctaaatttatagcgatcatttcattattaatgaaaatgttttagcaaaacaaacgtaacataaaacaaatttacatcaggagagcatgtgttaagatgtgagatatttaagtaccattttctaagatgctaaagtaactctgaaatacttagttgtgaggtgacaaaaaaatgggctaattacaaatgattctgacacattatttatagcagacttgaaaaatttacaaagaaaccccttgctagtccaattccatatgtataagatggtattctcagttctttaaacaaaaccttctatggttgaaagtgtctctcgcccccagttagtctgaaagaaggaggttttatagtaattgaagacagggcctttcagcaggtctttatttctgggcaggtggcagagttgcrtttgtgtgatttgttttgttttgctttctctcctacgcattcccctcatctggagggaatccactctcctgagcagatgactcatgacgatttccttctctctttccttcccctttctctccaggggtgatagcagtggtgatat

SEQ ID NO: 305872 - DNA, 577 bp, Homo sapiens
tgtttcttaggaagggaaatttttgtccaggttccgtggttcatgcctgcaatctcaacactttgggaggccaaggaaggcagatctcttgagctcaggagtttgagaccagcctgggcaacatggcaaaacctcatctttacaaatacttcaaaaattagctgggagtggtggtgtccatctgtaatcccagctatttgagagactgatgtgggaggatggtgtgatcctgagaggtggatgttgcagtgaactgagattgtgccactctccagcctgggggacagaggcagaccctgtctcaaaaaaaaaaaggaaaagaaaaaaaaagaaaaagaaagttcagagcttaaatgatcattactcaaaaaattcgcaactatagagttaacmtgcagagtcttttaagttctctattattttttctgcctacttgaatctgttgtctattctactggtgttgagataaaactcattgtttacggcattattacttcaaggctgtattagtaactggagattttgtttatcttacacaacttggcaagttctccctaaaatgtaatcattgaagtat

SEQ ID NO: 305873 - DNA, 486 bp, Homo sapiens
ttcattcttttacatggggcttgacaattatcccaatacaatttgttgaatagggtgtcctttccccactttatgtttttgtttgctttgttgaagatcagttggccgtaaatatttggctttatttccaggttctctattctgttccattagtctatgtgcctatttctgtactagtacaaagctgttttggtgactatggcctaatagtataattttaagtcaggtaatgcgatgcctccatatttgttctttttgcttagtcttgctttgcctatgtgggctattttttggttccatctgaattttargattgttttttataatgatggtggtgttttgatgggaattgtattgaatttgtacattgtttttggcactatggtcattttcacaatattgattctacccatccatgagcatgggatgtgtttccatttgtttctgttgtctatgacttctttcagcagtgttttgtagttttcc

SEQ ID NO: 305874 - DNA, 611 bp, Homo sapiens
aaagaggattgtcaaatttagttacacacacatacacacacacacacacacacacacacacacacacacacacacttggcatttgcttactgcttttatgtttatcttagtatgctcatttgtatgtcctatgtaaatatttttccttataaagtgagaaagtgagacaattatacacaacttccagtttggaaagacaaaacacataaggtcaagtaattgtttaaagtaaattaatcagtccaaggccaattcaggcctgaaacctaggtttcatggccataggccccctcyacccttttttttctattatgctatgcgtgacacttttctgtaggtatggattgttcataagctaaacacaattttatttctctagcctgacttaacagccattcactcactaacacccagtctcccagctacacatccaacctgtctgctgtgtatgatctgagctaacttgctcagacatgattctctctgcctggaagactgttctgtccctttatgacctggataacttctgtacctgctctgcaaaacatacatctaattattggccacctagacacagctccatgtttgatagtggacttacaatgactagc

SEQ ID NO: 305875 - DNA, 611 bp, Homo sapiens
aaagaggattgtcaaatttagttacacacacatacacacacacacacacacacacacacacacacacacacacacttggcatttgcttactgcttttatgtttatcttagtatgctcatttgtatgtcctatgtaaatatttttccttataaagtgagaaagtgagacaattatacacaacttccagtttggaaagacaaaacacataaggtcaagtaattgtttaaagtaaattaatcagtccaaggccaattcaggcctgaaacctaggtttcatggccataggccccctccacccttttttttctattatgctatgcktgacacttttctgtaggtatggattgttcataagctaaacacaattttatttctctagcctgacttaacagccattcactcactaacacccagtctcccagctacacatccaacctgtctgctgtgtatgatctgagctaacttgctcagacatgattctctctgcctggaagactgttctgtccctttatgacctggataacttctgtacctgctctgcaaaacatacatctaattattggccacctagacacagctccatgtttgatagtggacttacaatgactagc

SEQ ID NO: 305876 - DNA, 594 bp, Homo sapiens
ttccatctgttcaacggcagttcaaatgggaaggcagcccagtgagcagatgtctcccattcttagaacaatgaagacattttattgggtatttgatatggtttgtatctstgtcctcactcaaatctcatgttgaattgtaatccctaatgttggaggtaggacctggtgggtggtgattggctcatgagggaggatttctcctgaatggtttactaccatcctcttgttgatgtccttgcaatggtgagtaagttggtgagatataattgtttaaaattgtgtggcaccttcctcctcgctcttcttcctgctctgaccatgtgacatgcctgctcctcctttgtctcctgccattactttaagattcttgaggctttccagaagctgagcagatgacagcatcatccttcttatacagcttgtagaaccataagtcaattaaacattttttctttataaattacccagtctcaagtatttatggcaatgcaaaatggactaatacagtattcctcctcaatcttaacagttcttttctacctgataattacaaagcaccagaaataaaataacaagttgtctgtagtacct

SEQ ID NO: 305877 - DNA, 569 bp, Homo sapiens
tattccaatgcctaacggatattcatatagatatgcccagtaggtagttggkataaggtctggaatccagggacaggattagtgttagatacacattcaggattgattcatcagcatgtacatgaaatttaaagatgtgagatcgaatgagatgagtatggagtgagtgtagatcaaaagcagaagctggagtccttgggcgttctgagagttccttggggtagagttttgagagatgatgggaaaccaacaaaagagacaagagtgagcaactaacacaggcagaaggatcaacaggcgagagttgtattgggcaagcaataaagacttaggtcaagttgcaagaacaggaaggaatccctatgtcagttgtcaatgagaggacaaggaaagataacactgagacatgaccactggattttgccaggtaagcacaatgatgccttgagaagtacaattttgctgcagtgcagaggcaataccttttcggtatgggtataagaaaaaggtagggaaaatatgaagaacaagcatataaacaacatttccaaaaattcgggcaagaaaag

SEQ ID NO: 305878 - DNA, 569 bp, Homo sapiens
tattccaatgcctaacggatattcatatagatatgcccagtaggtagttggtataaggtctggaatccagggacaggattagtgttagatacacattcaggattgattcatcagcatgtacatgaaatttaaagatgtgagatcgaatgagatgagtatggagtgagtgtagatcaaaagcagaagctggagtccttgggcgttctgagagttccttggggtagagttttgagagatgatgggaaaccaacaaaagagacaagagtgagcaactaacacaggcagaaggatcaacaggcgagagttgtatygggcaagcaataaagacttaggtcaagttgcaagaacaggaaggaatccctatgtcagttgtcaatgagaggacaaggaaagataacactgagacatgaccactggattttgccaggtaagcacaatgatgccttgagaagtacaattttgctgcagtgcagaggcaataccttttcggtatgggtataagaaaaaggtagggaaaatatgaagaacaagcatataaacaacatttccaaaaattcgggcaagaaaag

SEQ ID NO: 305879 - DNA, 598 bp, Homo sapiens
aggcctggctcatcgaccttctcattatttctaggatgtgcccagcaggccactgttttgggttttacactaactttctctatgtgcaaacccatttagctcagtttcatgtagrtcccttgtctgggccctacatgtcaccttgtctggcagtctttccctgaccacaggctgccatttgaggaacccaaggagtggggcttatagagaccatgccatctccaaatcagccccaaccttcactctctgccttctacttggcttggtgtttcttcatcagcttgttatctggaattatattcttaatttatttgtttgttgcctgtcatccaaaccttaatgtaagctttggagggcacagatgttgtcctttgtagctaggatggagtttagcacagagtagatattcactacagtattcagttgactgaatgattgaaagtctggtttagcttttacattagtcatattgaattttcactaccacttaggactcctatttctgtttggtaaaatttttccagcaaataacatggcagtatgggtcggtttgaccccatgacctgagctttgttgggaattttaatcatctgtcatc

SEQ ID NO: 305880 - DNA, 526 bp, Homo sapiens
caccttgtctggcagtctttccctgaccacaggctgccatttgaggaacccaaggagtggggcttatagagaccatgccrtctccaaatcagccccaaccttcactctctgccttctacttggcttggtgtttcttcatcagcttgttatctggaattatattcttaatttatttgtttgttgcctgtcatccaaaccttaatgtaagctttggagggcacagatgttgtcctttgtagctaggatggagtttagcacagagtagatattcactacagtattcagttgactgaatgattgaaagtctggtttagcttttacattagtcatattgaattttcactaccacttaggactcctatttctgtttggtaaaatttttccagcaaataacatggcagtatgggtcggtttgaccccatgacctgagctttgttgggaattttaatcatctgtcatcataatttcatcaaaattttcttataaaaaatgagtaaacaactggtgatgctgttaatggagcacc

SEQ ID NO: 305881 - DNA, 580 bp, Homo sapiens
acctatttttcttgggcctagactatcatgctatttaaatcttaaacttttcactaamacaagaatatggaagatatgaggtatgtaattcaatgtgaaaaataacttttcttacagatttgtcaaccccccttatattgctgggtgctacatgagaagtacatgaaatataatatattaaatcaacttgcttccaaatattttatggaatttttctccctagttaataagtagctatcaaattcatggtcttataagacaatggtcccattcagaacaactgaaacccttacacttcttccaagagttagtaacaataaatataacttattatgaaacatgtgtaatgttctgctagtcacaaagatctaacatttacgagtccttgtaaagcaaatgagaaaatatcctctgcttttacttacaaagggagacaccagcttaatgtttggtggaaaatgaattaattggtagaattatattcaataaattaaaccataatccacctcccttttatttgtacccatttatcacaatcacaggtgcttttttaaacccatgcttgactttcttgtatttg

SEQ ID NO: 305882 - DNA, 610 bp, Homo sapiens
cttttcaatgtggtataatcagtgataattacctttcataataaaattcctgctattgtgactattattttgtttgccctgttaaaaatttgcagacgaataaagttattccatttagcttgatagcaggggcctagttactatgggaaacatctaattatactccaaacataatgggccacaggaaaaaaatgtattttgtaaaatcatatgattttgtaataataaatataccttattcaataacagtaataaactttttctgtctaaattttgctcaatattatgatagtaaaagaaatgagaaatccacatagaaacatggaatagacttaaacactcagggggtggatatatgttatrtcttaagctagtgataagcttgaaaagaaaaaataatgaatcagtggcatattgctataagaacaatttcttaacgcagtagctgctgctatcaggccaaggagatgcattccaaaattgttaaacataacatacttatttcaaaattacattaaattcagcaacacatgaatttaaaaagttatataatgttgtcagctagctgtgactccagatggcagaccagtgagactcaccgtaactttta

SEQ ID NO: 305883 - DNA, 584 bp, Homo sapiens
aaaaagaaaacaaatatgtaattacagaagaccacacagtggttgtggtggcatgggttcagtgggtgtgagtgtgattgacagccatgggagaagcacacatgctgatgaacatgttctatatcttgaatgaggcaatggtcatatgagtgtatacatgtgtcatatctcatgaaattgtatatttcaaataggtgctatattagtcattctcacactgctgtaaagatactaactgagactgggtaatttataaaggaaagaggtttaattgactcacagttccacatggctggagagacctcaggaaacttaccatcatggtggaaggcaaaggggaagcaaggcatgtcttacatggtggcaggagagagagagagagcaaagtggaaactgccaaatgcttttaaaaccatcagctcatgtgagaactctctcagtatcatgaggacagttattggggaaagtgcccctatgatccaatcaccttccaccaggtccctccctcartacatgaggattacaatttgagatgagatttgggtagggacacagtcaaatcatatcaggtgcattttattatg

SEQ ID NO: 305884 - DNA, 498 bp, Homo sapiens
gtaccacattttctttattcagtctgccattaatgggcatgtttgttggttccatgtcttttctattgtgaatagtgctacaatgaacatatgtgggcatgggcctttttggtacaacawtattattccttgggtagataacccagtattgggattgctaggttgaatggtacttctgttttaagttcgttgagaaatctccaaactgctttccacagtggctgaactaatttacattcccaccagtaatgtataagcgttcccttttctccacaatctcaccagtatctgttgttttttgactttttaataatagcctttctgactattgtgagatgatgtctcattgtgatttcaatttgtatttctccactgattacagatgctgagcattttctcacatgattgttggatgcatgtgtgtcttcttttgaaaagtgtctgtcttttgcctactttttaatggaattgtctgtgtgtgtgtgtgtgtgtgtgtgt

SEQ ID NO: 305885 - DNA, 650 bp, Homo sapiens
tatgtgacctctttggtcaaatttcattgaactctttttatactatattcctatacccatgaatttgcccatactgttaactctggaatactctttcatgcaattttcyatgataccttctcagtatatacatctttgagattttgttttaattcctatttaaacatgcttgcatgttgaagatcgatgctctatttccacttactaaataatgattagcaaaacatgtaattttctgtaggttatttttgtgatagtcctaggaagaatagtagtaaaagcctttcaaaattgtatttaaaaatatatttaagtgtttttttaatcctttagggtatgggatcttgggcaaatttcttaacttttctgaatatctgtgtcctcatttgtaagtgctaaaatatagaagagcaaattagcaagaaataaaaaaaatacttgaaatcaatacaaatgcattcataatttgcaaacacattaattaaaatattatagcattatttatttcttacactactctaaattttcacctaatataaggaatatattttctgaacaagtcaagaaaatagtttagtaattgaagtgctctaattggaatttcaaaattattttaataataaacaatttcagaatggatgtggtggccc

SEQ ID NO: 305886 - DNA, 587 bp, Homo sapiens
tatacaccagtccatcgctgactaaatgttgttatctgacacatgactttacatgtttgtgtgtgtgtacaagtgtgcatgtacatgattataaacacattctattggttttcattctctgtaggacactgaataataaatgacaaccttgtacatgtttctatgctcctgaatcatgagaacatgtccaagattttcagaccccactatagccgtctctttctcagattaaaaaaaaaaaaaattgcggggagagggaccatctcttatctaatacaactagcagcaccgtctctggmagctgcaatgttaaacaactacttttttcaatttttgataagtgatttgggtatggagattttctaattgagaaagctctgaatcacttcaaataatgactagctctctgaatgaggcctttcttgtgggctgccagaaaggcacagtagtgacaatttcatttctgggggtttgcgagcagctgaaaaaccattctacccccctctccccgcccctgcccagtgtctgctgggctgctggttttcacagctactatctttgtagagttactatttttcaagattact

SEQ ID NO: 305887 - DNA, 596 bp, Homo sapiens
acccatgactcttaagtgccttattcttccaggttttgaacaatagggtctatattgattatcctttgactgatccatcgttctatgtaggctatgtgaggatatataacatttttcttagtttacactttttcacattgaaaaggactctgcatagggaattgwacttaaggaggctcatctgcacctggaggtcccaaatgataccataaccagatgaaacttagaaattttagtggagggaatgagggcattttcaatgtgagatggttttgaattattatggccagagggagagtcctttcagaccgtattttccaaaaatagcgaaaccacctacatatttcattatgcataaacttcgatcaagagatgagatgcaggtgtcttctgtttgaaattctgtggcctttttaataatcttgacaaataaaatgtggcagaaatatcactgagtgatttctaagtataaatatattataatatataatttattatataaatatattataatatataatttattataaaaatatattataacatatatattgattatccttttatcctatttattataatataatatgttatca

SEQ ID NO: 305888 - DNA, 596 bp, Homo sapiens
acccatgactcttaagtgccttattcttccaggttttgaacaatagggtctatattgattatcctttgactgatccatcgttctatgtaggctatgtgaggatatataacatttttcttagtttacactttttcacattgaaaaggactctgcatagggaattgaacttaaggaggctcatctgcacctggaggtcccaaatgataccataaccagatgaaacttagaaattttagtggagggaatgagggcattttcaatgtgagatggttttgaattattatggccagagggagagtcctttcagaccgtattttccaaaaatagcgaaaccacytacatatttcattatgcataaacttcgatcaagagatgagatgcaggtgtcttctgtttgaaattctgtggcctttttaataatcttgacaaataaaatgtggcagaaatatcactgagtgatttctaagtataaatatattataatatataatttattatataaatatattataatatataatttattataaaaatatattataacatatatattgattatccttttatcctatttattataatataatatgttatca

SEQ ID NO: 305889 - DNA, 596 bp, Homo sapiens
acccatgactcttaagtgccttattcttccaggttttgaacaatagggtctatattgattatcctttgactgatccatcgttctatgtaggctatgtgaggatatataacatttttcttagtttacactttttcacattgaaaaggactctgcatagggaattgaacttaaggaggctcatctgcacctggaggtcccaaatgataccataaccagatgaaacttagaaattttagtggagggaatgagggcattttcaatgtgagatggttttgaattattatggccagagggagagtcctttcagaccgtattttccaaaaatagcgaaaccacctacatatttcattatgcataamcttcgatcaagagatgagatgcaggtgtcttctgtttgaaattctgtggcctttttaataatcttgacaaataaaatgtggcagaaatatcactgagtgatttctaagtataaatatattataatatataatttattatataaatatattataatatataatttattataaaaatatattataacatatatattgattatccttttatcctatttattataatataatatgttatca

SEQ ID NO: 305890 - DNA, 318 bp, Homo sapiens
aacaatttctccaatgagacaatcactrtgtcaccatttatatgttaatataaaatcaactttcactgcatttgtcatttggttgatttagccttctgactcttacctaaatttcctggctgtttgtccactgctccctcagtcctgtgtgctattttaaaatacagtcttgttttattgacacatcttaactaagaatagtatgccatcttttgaagattaatttataaaaatggtattatgaaaaaaggttattcaaatctgacattatatataatatatatacattagacacgatttaaaagtaaaaattttata

SEQ ID NO: 305891 - DNA, 318 bp, Homo sapiens
aacaatttctccaatgagacaatcactgtgtcaccatttatatgttaatataaaatcaactttcactgcatttgtcatttggttgatttagccttctgactcttacctaaatttcctggctgtttgtccactgctccctcagtcctgtgtrctattttaaaatacagtcttgttttattgacacatcttaactaagaatagtatgccatcttttgaagattaatttataaaaatggtattatgaaaaaaggttattcaaatctgacattatatataatatatatacattagacacgatttaaaagtaaaaattttata

SEQ ID NO: 305892 - DNA, 516 bp, Homo sapiens
tcatttctgtatcttttcagaggactaaggctttatgcgtgggtctttatttgtggatgaattcttgtccttgatttcacaaaggagtatattgtaaaatattttggttttgaagtttacgctgtgatccatgggctgcttggtacttaagcacaatggctgtaggtaggcttttacttagcacatggcttctctgtatttcctcatgttttcagccatgcttcctctcagtgatatgagaacttgggccactcaagtgctggccacagatctcagcttggcactcccagactttatcacagccctgggtgagcctatcctttttgttcttttcccagcttggggtcagtatgygcagagcctttggcaatgacaatggtagagggcctttcacttgtctcttggggattcaccccagaggaacagagagacactgccaattgcaacattcagcctggaatggagcaactacatattgggcccaaggccaggggccctgcttggtgaagagcaaag

SEQ ID NO: 305893 - DNA, 539 bp, Homo sapiens
ggtattgacaataactgcttgatgagacttttgatattaagaactgcaaagtaatcgggtctatttaaaaaaaawtttttttttaattagaaaactgagattcagaggagttatttgtagtcatggtcacacaatactttttaatgaatctaaaacctggatgttgttctccacatttatctgatttctttttaagaaaatatctaaatgccttggttattcccctcatagaaagacaaacttaatcatgtagaaatcatgaatacaatctaattttattgtagtgattctataattttatccttcacaatattcttacttccaggccaagaaaactcaacttgactgattgatatgagggtatattttgttgtaactacctttctgctgatctgagaacccagggagtagggtgccctagcaatctatccagggaaaaacattttatgtgtttaatatggtttggctctatgtctccacctaaatctcatcttgaattgtaatccccataatctccatgtatcaagggcaaaacctgg

SEQ ID NO: 305894 - DNA, 539 bp, Homo sapiens
ggtattgacaataactgcttgatgagacttttgatattaagaactgcaaagtaatcgggtctatttaaaaaaaaatttttttttaattagaaaactgagattcagaggagttatttgtagtcatggtcacacaatactttttaatgaatctaaaacctggatgttgttcyccacatttatctgatttctttttaagaaaatatctaaatgccttggttattcccctcatagaaagacaaacttaatcatgtagaaatcatgaatacaatctaattttattgtagtgattctataattttatccttcacaatattcttacttccaggccaagaaaactcaacttgactgattgatatgagggtatattttgttgtaactacctttctgctgatctgagaacccagggagtagggtgccctagcaatctatccagggaaaaacattttatgtgtttaatatggtttggctctatgtctccacctaaatctcatcttgaattgtaatccccataatctccatgtatcaagggcaaaacctgg

SEQ ID NO: 305895 - DNA, 539 bp, Homo sapiens
ggtattgacaataactgcttgatgagacttttgatattaagaactgcaaagtaatcgggtctatttaaaaaaaaatttttttttaattagaaaactgagattcagaggagttatttgtagtcatggtcacacaatactttttaatgaatctaaaacctggatgttgttctccacatttatctgatttctttttaagaaaatatctaaatgccttggttattcccytcatagaaagacaaacttaatcatgtagaaatcatgaatacaatctaattttattgtagtgattctataattttatccttcacaatattcttacttccaggccaagaaaactcaacttgactgattgatatgagggtatattttgttgtaactacctttctgctgatctgagaacccagggagtagggtgccctagcaatctatccagggaaaaacattttatgtgtttaatatggtttggctctatgtctccacctaaatctcatcttgaattgtaatccccataatctccatgtatcaagggcaaaacctgg

SEQ ID NO: 305896 - DNA, 362 bp, Homo sapiens
tatttgtagtcatggtcacacaatactttttaatgaatctaaaacctggatgttgttctccacatttatctgatttctttttaagaaaatatctaaatgccttggttattcccctcatagaaagacaaacttaatcatgtagaaatcatgaatacaatctaattttattgtagtgattctataattttatccttcacaatattcttacttscaggccaagaaaactcaacttgactgattgatatgagggtatattttgttgtaactacctttctgctgatctgagaacccagggagtagggtgccctagcaatctatccagggaaaaacattttatgtgtttaatatggtttggctctatg

SEQ ID NO: 305897 - DNA, 634 bp, Homo sapiens
cctacccttcattttttgagagcagacctgagggcattaactgctggagaaagctttcagcagagaaacagaggtgcagtcactggagatgggaagcaatccctgcctagaaactgtcagtagacaatgcaggtgaactgagatgtgggctgagagtgtaagaartggagtgtcaacaatgttggatacattccctgtgggtatgttaggctatgtgaggatagatcactagacaagtatctgaatatatttaagggacaaccatctttaaacgtatttctatgcacaccaataataagcagtatggttgggatattttctaaagctagcatatttctaaaatacagcaaaacacattttttaaaggtagtaatatcaaatgttaaatacaggtgtttaagcttagtgaggaggagccagtgaacaaaacaaagttaaattctcatgctacttactcttaccatttttcctactttcttataaatcaggaaggaaaaaactagaaatatttctgaggttttctaaaatgaaatttttttgtctgaagatatatagagaagtttatactgttttatttctacattaatagagaatctacctcatattttgtagcaaaatgtccaaaagttttcac

SEQ ID NO: 305898 - DNA, 634 bp, Homo sapiens
cctacccttcattttttgagagcagacctgagggcattaactgctggagaaagctttcagcagagaaacagaggtgcagtcactggagatgggaagcaatccctgcctagaaactgtcagtagacaatgcaggtgaactgagatgtgggctgagagtgtaagaagtggagtgtcaacaatgttggatacattccctgtgggtatgttaggctatgtgaggatagatcactagacaagtatctgaatatatttaagggacaaccatctttaaacgtatttctatgcacaccaataataagcagtatggttgggatattttctaaagctagcatatttctaaaatacagcaaaacacattttttaaaggtagtaatatcaaatgttaaatacaggtgtttaagcttagtgaggaggagccagtgaacaaaacaaagttaaattctcatgctacttactcttaccatttttcctactttcttataaatcaggaagraaaaaactagaaatatttctgaggttttctaaaatgaaatttttttgtctgaagatatatagagaagtttatactgttttatttctacattaatagagaatctacctcatattttgtagcaaaatgtccaaaagttttcac

SEQ ID NO: 305899 - DNA, 471 bp, Homo sapiens
  misc_feature (1)...(471): n = A,T,C or G
aaagtatcatttgtgtttcttctaactagaattcacatcctagaataatgctatgcatgaactaaataaaaatgaatacactgtgtaccttaaggtgtttagaatggttcactgtatgtatgctggttatttaagaagtgatcggtagtccaaaaatttcaacttgggttatacttaatttgatgcatatataaaaactgtaggtttcttaaatgaagggacaacagtgagtgcttatgaaccataatgttccacgtagtgatagctgattattttncagggtgtagagtaagttgttataaataatacacagaasaaatctgattatttagtaacatagaatgttaattcattttgaagtaattaagaaataaataaatccatttgtttaaaaagataaaacaaaataggcatttttattggtgggattaattttnaccaatagtgtaataggatttactttaaaatatc

SEQ ID NO: 305900 - DNA, 535 bp, Homo sapiens
atttaatgttgcacatgccttataatggaacagaacactacaactcttgaaaaagattttgtaaaaatatgtgattgccagaaggagaagtaattgatttttaattctggcaagtgcaaatctacatagaaccccctaggtaggtttattataaatgaggtcatagttatataaccaaagaaactatttccagttatagataacccaaatactgtgcctatgtccatatactagtgagaatgggaaggcagactcrtgattattccaaagattcagattaatgctaaattacatccatcacaaaattaacaccaggaagtaacactggggttggcctgaagagagctttgtgccacaatgatagaaagacattctagaacataattcattccacagaaagagtcaaggtggttaaatcagaatgtcttagtgttgaaagaaaaaaaggattttcaatccaattgaagatattttacttaaaaatgtaagaatttagctgccatataatagtagtaattctcatttttgggggaac

SEQ ID NO: 305901 - DNA, 582 bp, Homo sapiens
gctgtaagtccgattaaacctcttttttgttcctagtttcaggtatatctttatcagcagtgtgaaaacggattaacacaggaataaaatggatgaaagtatatataatttctagaatactttctgtaacaaatgcttgtcatatgaaacctttacaactttttctagatttaatgttgcacatgccttataatggaacagaacactacaactcttgaaaaagattttgtaaaaatatgtgattgccagaaggagaagtaattgatttttaattctggcaagtgcaaatctacatagaaccccctaggtaggtttattataaatgaggtcatagttatataaccaaagaaactatttccagttatagataacccaaatactgtgcctatgtccatatactagtgagaatgggaaggcagactcatgattattccaaagattcagattaatgmtaaattacatccatcacaaaattaacaccaggaagtaacactggggttggcctgaagagagctttgtgccacaatgatagaaagacattctagaacataattcattccacagaaagagtcaaggtggtta

SEQ ID NO: 305902 - DNA, 596 bp, Homo sapiens
ttacttaaaaatgtaagaatttagctgccatataatagtagtaattctcatttttgggggaacaaacttttagaaggaatgcaattgatcagacactggccatgattcctttgtaggytcttttgaagaaaatacaagtatcaacacaaagataaggacgaaaagctggagagaatatagccatgagaaataccttttttaaatcataatattttgtttccaatccagtgttttccagggatatgttatgtgtattagtcttgattaaacatagttattagaaatatttctcaactgttgccaaataatttatcatgtagcttaactgatgattattaaatttatattggcactctcttgccttcaagtcaaagtttatgatttaacaaatatgtaagtatgtatatatatagacaattgaataaaatatttgaaactagtgctttactgtcagtttgaaagtatttatttttattttccttgagataccaggcatttctatccctgaggtgtctataattactataaattgtataaaaatgtttgaagtacttgacataattattttgtttaaaatacttgtatctttctagaac

SEQ ID NO: 305903 - DNA, 596 bp, Homo sapiens
ttacttaaaaatgtaagaatttagctgccatataatagtagtaattctcatttttgggggaacaaacttttagaaggaatgcaattgatcagacactggccatgattcctttgtaggttcttttgaagaaaatacaagtatcaacacaaagataaggacgaaaagctggagagaatatagccatgagaaataccttttttaaatcataatattttgtttccaatccagtgtkttccagggatatgttatgtgtattagtcttgattaaacatagttattagaaatatttctcaactgttgccaaataatttatcatgtagcttaactgatgattattaaatttatattggcactctcttgccttcaagtcaaagtttatgatttaacaaatatgtaagtatgtatatatatagacaattgaataaaatatttgaaactagtgctttactgtcagtttgaaagtatttatttttattttccttgagataccaggcatttctatccctgaggtgtctataattactataaattgtataaaaatgtttgaagtacttgacataattattttgtttaaaatacttgtatctttctagaac

SEQ ID NO: 305904 - DNA, 551 bp, Homo sapiens
ggaaaactgttttgattgtcacccatagtaacacttgaggtagaaaattgtggttaataaagtaacatgtgtagaagaggttagaagaaagaatgtttcaacatgtttctggtttgtgttggctcaatttggcaagatattggataaatattaccaaagtagtatggaacttccagaagttagagtgaggatatctgtaaattttttccctcataaaagaaatgaaaacactgccaaactatgaaaatcaaataattcagcacgcttaaaattaaccaaaggcacacacacacacacacacatacacacacacatacctggaaagcatatttcaggaaaaagtactgaaccttaatatgaacagtgaggtctttgtcattttacrtagggttattcctacctccatgctccaactccatgatgagatagtcataaaaagctggccagcccacagccaacaaaagggacttactccttttcaggcttggttaagagccccattgttagaaaataggcaaatgtttgattaaattttcacctccgttgaaaaa

SEQ ID NO: 305905 - DNA, 590 bp, Homo sapiens
tctcaacaacatgctagcaaacaaaattcaacaacacatgaaaatgatcacacaccatgatcaagggcactgtataatttggatgcaaggatagtttaatatatacaaaccaataaatgcaatataccacataaatagaatgaaggataaaaattacataatcatctcagtagatgcagaaaagtaatggacakaattcggcatcctttcaagataaaatctctgaagaaattaggtacagacaaaataaacctcaacatgatgaaatatgtatgcatcaagcccacagctaacatcacactcagtggtgaaaaggtgaaaacttttcctctaagattagaaacaagacaaagatgcccactctcactacttctatttgacatagtattggatctcctagctggaaaaattatacaaaaaaataaaaattaaaaacatctaagccagaaaagaagaaaaattatttctgtttgcaaagcagaatatgtaatcttgtaatagaaggctgggtgcagtggctcacacctgtgatcccagcgctttggggggctgaggcaggtgggtcatttgaggtcaggagtttgagacca

SEQ ID NO: 305906 - DNA, 546 bp, Homo sapiens
tatatagaaaactcaaacaactcaatagcaagaaaacaaatatttctactgaaaatgggcaaaagacgtgaatggacacttcgcaaaggaagacatacccggtgcccaacaggtggacgaaaaattactcaacatcagtaatcatcacggaaatgcaaatgaaaaccacratgagctatgacctcacacctgctatgatgggtattagtgataaagacaaaatataacaagtgttggcaaggatgtgaagaaaaggaaacattggtatattttaggtgataatataaattagtacagtcactaaagagaacagtgtagaggttcctcaaaatataaaaaatagaactatcatatgattcagcaacctcattaccctcattcatatatcctcattactggctctatatccaaaggacttgaaatcaatatgtcaaaaatacttctgcactttcatgtttatggcagcaccattcacaataaccaatacatgcagtcaacctaggtgtccattaacagatgaatggataaagaaaatgtgatatacat

SEQ ID NO: 305907 - DNA, 601 bp, Homo sapiens
catcaaaagtctttttttcctaatgctgatatttggtcattcatctctggtttcttaggtattttcttttgttcacatttgtaatttataatacagartcaatcctgcagtgttaatttcattgaagcctttttccttgagtttgcaatatcaacatctattttccttgacttttattataagttctgtcagttgactactgtaaacctaatttttttgtttgaccatatccagtatcacaaaatcaattctcccctttttcattttattgagtgcttgagatattttggcctaatatatttttcttctatttcctggaataaatattgtaaataatttttttcacaaatatgttgaataatgcaatattttaacttggattttcatagaaccaatgatgttttgtgggctgatgttttgtggatctctttttcctttcttaatgtaatatacagtaatgttatatattaaaaataaattataaatgcaggtgccaaatatttattctttgattatatttatttctagtgttgcataattatgcctgaaattgttgtttgatatggaaagaaacacactactattaactgtaagaacaggc

SEQ ID NO: 305908 - DNA, 625 bp, Homo sapiens
ttgactgtggaaagcaaaatgttgggtaaggttggaccactgtacagatgtttaaatgtatatcttatatataggtatatgcatataatgctttatagataaagaaaaacaaagaagaaaattaatttctgtaaaattatatatatctcgccatgtaactgctgaagcacattagaagtgaaaacataatgacagactcataatctacgtgtggaatcaccttaaaagtacaaaatcaaaatgcagatttatacagttatatgatattggtgaatcataagtacatctactattatygtattattttgaaaatgtgaaaaactctcaagaaaaatctaaacacgaaaattgcacactttccctgggttttacctaaatattgttgctttctatttttagtaaatcatataaaatttacaaaatgaaattagttctatttccaaattcctatgacatgatggaccatgggtagacaatgagactgtctcataaattgtagagaatctagcattgataaaaggtcaagaaaatcacaccagttcctgtggcaaacaatcttcattcctcacccaaaataggaaggagctgaatccagggggctgagcagcaattgtctattggcccc

SEQ ID NO: 305909 - DNA, 625 bp, Homo sapiens
ttgactgtggaaagcaaaatgttgggtaaggttggaccactgtacagatgtttaaatgtatatcttatatataggtatatgcatataatgctttatagataaagaaaaacaaagaagaaaattaatttctgtaaaattatatatatctcgccatgtaactgctgaagcacattagaagtgaaaacataatgacagactcataatctacgtgtggaatcaccttaaaagtacaaaatcaaaatgcagatttatacagttatatgatattggtgaatcataagtacatctactattattgtattattttgaaaatgtgaaaaactctcragaaaaatctaaacacgaaaattgcacactttccctgggttttacctaaatattgttgctttctatttttagtaaatcatataaaatttacaaaatgaaattagttctatttccaaattcctatgacatgatggaccatgggtagacaatgagactgtctcataaattgtagagaatctagcattgataaaaggtcaagaaaatcacaccagttcctgtggcaaacaatcttcattcctcacccaaaataggaaggagctgaatccagggggctgagcagcaattgtctattggcccc

SEQ ID NO: 305910 - DNA, 622 bp, Homo sapiens
tcagatcatagtacaataaaaataggatataagactcagaagatttctaaaaaccatacaattacatggaaattaaataacctactcctaaatgtcttctggataaacaatgaaattacggcagaaataaataaataatttgaaactaagaaaaacaaacatgcaacataccaatatctctgtgacacagctaaagcagcactgaggcaagttgagtgtgcttaacactcacatcaggaagttaggtctcaaattaacaamctgatatcacatcaagaggaactaggaaaacaagagcaaaaacaatcctgaagctagaagaagaaaagaaataatcaaaattagaactgaactgaatgatattgagatgtgaaagaaacataaaaatcaatgaatcaaaaagttggtttttgaaagaatccataagattgacaggttgctagctagcccaataatgaaaaaaaaagagacaatacccaagtaaacacagacaggaatttaagagggcatattactactgaccccatggaaatattttttaaaaaccttcagagtattacaaatatctatatgcacagaaactagaatacctaaaagaaaaggataaatttctagaaacata

SEQ ID NO: 305911 - DNA, 476 bp, Homo sapiens
gataagctgattctaaagttcatatggaattccaaaaatctgtcaaaacaatcctgaaagaagtagaaagtaggagtaattacactttccaatttcaaaacttactaaaaaccatggtaatcaagactgtgacagcagcataagtatagaaatatatgtcartggaaaagaactgagagtatagaacaaaatcaagacatgtatctatggtaaattgattttcaacaacggagccaagaccattcaataggaaagaagtctttcagcaaatggtcctggtacaactagatattcgcaggtaagagaatgaatttgaacccttaactcataccatttataaaaactactcaaaaagaatcataaaactaaatgtaagaactaaactataaaactcttaaaagaaaacatgggcatcatgaccttagacttggcaatgatttcttagatatgacaccaaaagcacaaataacaaaaga

SEQ ID NO: 305912 - DNA, 476 bp, Homo sapiens
gataagctgattctaaagttcatatggaattccaaaaatctgtcaaaacaatcctgaaagaagtagaaagtaggagtaattacactttccaatttcaaaacttactaaaaaccatggtaatcaagactgtgacagcagcataagtatagaaatatatgtcagtggaaaagaactgagagtatagaacaaaatcaagacatgtatctatggtaaattgattttcaacaacggagccaagaccattcaataggaaagaagtctttcagcaaatggtcctggtacaactagatattcgcaggtaagagaatgaatttgaacccttaactcayaccatttataaaaactactcaaaaagaatcataaaactaaatgtaagaactaaactataaaactcttaaaagaaaacatgggcatcatgaccttagacttggcaatgatttcttagatatgacaccaaaagcacaaataacaaaaga

SEQ ID NO: 305913 - DNA, 601 bp, Homo sapiens
ttaccttccacaattatgtactccttgaatgagcacctttctcagtgccagctttacacctttgtttctcaaagtatatatcaaaggattcagggaagggataacaatattattcaacacctgaaccacagagtccagccaagggctggaggcaggtcggagataaatgaggactattggtccatagaagagcaggatggacgtcagatgggcactgcaggttgagaaggctctgcgcctaccttctgaggaactgattttcagtatagagataacaatgcaagcataagaggtgaggataagaagaaaacacatgagcgcaacaacacctacrttgatgaaactcactgtccgtgctagagaggtgtctgcgcaggccaggggcagcaccaccggaatatcacagaaaaaaattgtccacttcattggggccacagtaggataacttaaagatgaggagtgtgaggacagatgcatgcagacagctccccgtccaggtgcctagcgtcaggagggcacacaccctgcgtttcatgatgaccgtgtatggcaaagggtggcagatggctgcaaatcggtcataggccatcacagtgtacag

SEQ ID NO: 305914 - DNA, 601 bp, Homo sapiens
ttaccttccacaattatgtactccttgaatgagcacctttctcagtgccagctttacacctttgtttctcaaagtatatatcaaaggattcagggaagggataacaatattattcaacacctgaaccacagagtccagccaagggctggaggcaggtcggagataaatgaggactattggtccatagaagagcaggatggacgtcagatgggcactgcaggttgagaaggctctgcgcctaccttctgaggaactgattttcagtatagagataacaatgcaagcataagaggtgaggataagaagaaaacacatgagcgcaacaacacctacgttgatgaaactcactgtccgtgctagagaggtgtctgcgcaggccaggggcagcaccaccggaatatcacagaaaaaaattgtccacttcattggggccacagtaggataacttaaagatgaggagtgtgargacagatgcatgcagacagctccccgtccaggtgcctagcgtcaggagggcacacaccctgcgtttcatgatgaccgtgtatggcaaagggtggcagatggctgcaaatcggtcataggccatcacagtgtacag

SEQ ID NO: 305915 - DNA, 572 bp, Homo sapiens
cattactttgttgggtatatgggtagtacattcctttttattactgaatggaatttcattggatgattataccacaatttgtttatcattctcctgcaaatggaaatgttggcttttccagtttttggctatcttgaatcaaggtgctataaatgttagcatgtgggtcttggtatgggcttttgttttcattttacctgggtgaatactaaaaatgagattgtgtggtatgtgtatttttagctttrcaagaaagtgttaaactgttttccaaagtggctgtaccatttgtattccctacagcagtgtttgagatttccccttgcttcatatcctcatcagcactcaatattgttagccatttcaatttcagctattctcatagatttgagatttgatttgtggtatctcacattttggttttgatttgtattttccctatgactaatgtcataaagaatgttttcaggtgcaaattcatcatcttacatacattttctggtaaagtatgtgttaaaatattttgctcaatttttgaaatatttgttattttattactgtaacctggacat

SEQ ID NO: 305916 - DNA, 558 bp, Homo sapiens
ccttgcttcatatcctcatcagcactcaatattgttagccatttcaatttcagctattctcatagatttgagatttgatttgtggtatctcacattttggttttgatttgtattttccctatgactaatgtcataaagaatgtttycaggtgcaaattcatcatcttacatacattttctggtaaagtatgtgttaaaatattttgctcaatttttgaaatatttgttattttattactgtaacctggacattttttttgttcaaagtgttcttttatatctgaaattatttgttcaatttaaaaaatttatgtcagttatgcgttatagtttttctctgctttattggctattgctaatgtgtatgcatgtatgtttatgcatgtatgtgtatgtgtatgcatgtatgtgtatgttctatcatttgctcagaatttttaattttcatcttctgttttgaaaattatagtatctttttatgcatgctatattttgactttttatggatttttttttttgcaacaatggaggcaagccaatgaaggaggtggaagagga

SEQ ID NO: 305917 - DNA, 673 bp, Homo sapiens
ttattactgaatggaatttcattggatgattataccacaatttgtttatcattctcctgcaaatggaaatgttggcttttccagtttttggctatcttgaatcaaggtgctataaatgttagcatgtgggtcttggtatgggcttttgttttcattttacctgggtgaatactaaaaatgagattgtgtggtatgtgtatttttagctttgcaagaaagtgttaaactgttttccaaagtggctgtaccatttgtattccctacagcagtgtttgagatttccccttgcttcatatcctcatcagcactcaatattgttagccatttcaatttcagctattctcatagatttgagatttgatttgtggtatctcacattttggttttgatttgtattttccctatgactaatgtcataaagaatgttttsaggtgcaaattcatcatcttacatacattttctggtaaagtatgtgttaaaatattttgctcaatttttgaaatatttgttattttattactgtaacctggacattttttttgttcaaagtgttcttttatatctgaaattatttgttcaatttaaaaaatttatgtcagttatgcgttatagtttttctctgctttattggctattgctaatgtgtatgcatgtatgtttatgcatgtatgt

SEQ ID NO: 305918 - DNA, 521 bp, Homo sapiens
tttgattcccttctacctctctaagtgaaggagctgaaggcagagttcctaagaaggcatttttttwaaatttatgatgagttagcaacggacaaagataagaaaatatctttattgaaaaagaagaggaaaggtcaaaatagtgagaaattgaaaggacttagaattattattgaaaacaaaagaaaaaaggaagaatagacaacagcaatgtgcaaaaatatttagaaaaaatccataaattatactattctaccacagcaactaatttcctttggcgtattattttccagattctgtttacatggacacatgttctacatggttgcaatcaaaacattcttatatgtaactagtagtgtgaacagttagaaacagactttaaaattataattttaataaatgcatacacagtctattgtgtcaatatacaaaaagtgtgtgataacaaagctgggtgcagttgtgtgcacctgtagtcctagtagcttgggagaaggaggtgagagggtgagacgaga

SEQ ID NO: 305919 - DNA, 535 bp, Homo sapiens
ggcaacctagtgagaccttgtttcttaaaaaaaagaaaaatgtgtgtcataacattctccaggagtatttaggtgttttttcacagattgtactgacacccaccttgaaaaatgggatggagttagaggaagtaggtggttcacatatctgattccctcaccactccctccttcagaagccatccaacaagcactattaatagcagcaaacagatatgaagccctttatgttttagaaaatacttctgtatctatttcttacttgatctttaaaagaacttttaacattcatatagaagatctgttggtagtattatatatctagcttatcaatattgaaaccttggtgaaaacaggcacaaaatcaatggaatagaatagagaactcagaaattaatccatgtatgtatagctaactgatttttaacaaaggyaccaaagacatacactggaaaaaggatactttcttcaataaacaatgctgaggaaactgaatattcatatgcagaagaatgaaatgagatatattcttacc

SEQ ID NO: 305920 - DNA, 460 bp, Homo sapiens
cccagggctggacgcccccctctttggaatcttcctggtggtttacgtgctcactgtgctggggaacctcctcatcctgctggtgatcagggtggattctcacctccacacccccatgtactacttcctcaccaacctgtccttcattgacatgtggttctccactgtcacggtgcccaaaatgctgatgaccttggtgtccccaagcggcaggrctatctccttccacagctgcgtggctcagctctattttttccacttcctggggagcaccgagtgtttcctctacacagtcatgtcctatgatcgctacctggccatcagttacccgctcaggtacaccaacatgatgactgggcgctcgtgtgccctcctggccaccggcacttggctcagtggctctctgcactctgctgtccagaccatattgactttccatttgccctactgtggacccaac

SEQ ID NO: 305921 - DNA, 460 bp, Homo sapiens
cccagggctggacgcccccctctttggaatcttcctggtggtttacgtgctcactgtgctggggaacctcctcatcctgctggtgatcagggtggattctcacctccacacccccatgtactacttcctcaccaacctgtccttcattgacatgtggttctccactgtcacggtgcccaaaatgctgatgaccttggtgtccccaagcggcaggactatctccttccacagctgcgtggctcagctctattttttccacttcctggggagcaccgagtgtttcctctacacagtcatgtcctatgatcgctacytggccatcagttacccgctcaggtacaccaacatgatgactgggcgctcgtgtgccctcctggccaccggcacttggctcagtggctctctgcactctgctgtccagaccatattgactttccatttgccctactgtggacccaac

SEQ ID NO: 305922 - DNA, 460 bp, Homo sapiens
cccagggctggacgcccccctctttggaatcttcctggtggtttacgtgctcactgtgctggggaacctcctcatcctgctggtgatcagggtggattctcacctccacacccccatgtactacttcctcaccaacctgtccttcattgacatgtggttctccactgtcacggtgcccaaaatgctgatgaccttggtgtccccaagcggcaggactatctccttccacagctgcgtggctcagctctattttttccacttcctggggagcaccgagtgtttcctctacacagtcatgtcctatgatcgctacctggccatcagttacccgctcaggtacaccarcatgatgactgggcgctcgtgtgccctcctggccaccggcacttggctcagtggctctctgcactctgctgtccagaccatattgactttccatttgccctactgtggacccaac

SEQ ID NO: 305923 - DNA, 460 bp, Homo sapiens
cccagggctggacgcccccctctttggaatcttcctggtggtttacgtgctcactgtgctggggaacctcctcatcctgctggtgatcagggtggattctcacctccacacccccatgtactacttcctcaccaacctgtccttcattgacatgtggttctccactgtcacggtgcccaaaatgctgatgaccttggtgtccccaagcggcaggactatctccttccacagctgcgtggctcagctctattttttccacttcctggggagcaccgagtgtttcctctacacagtcatgtcctatgatcgctacctggccatcagttacccgctcaggtacaccaacatgatgastgggcgctcgtgtgccctcctggccaccggcacttggctcagtggctctctgcactctgctgtccagaccatattgactttccatttgccctactgtggacccaac

SEQ ID NO: 305924 - DNA, 538 bp, Homo sapiens
ggaattagattgggaatgttgaatgtagctggagaagagaatgggagaaacagggaattgagatgggaggtatttatgaaaacacttgtgaaggtcacagttctaaagacaggcccactaaaaacacaagtgttgaatcagaattttacaggacaatactccctcaactcttacaaccacaccaacagggctccagtaaataacagtaaataaaagagttgaagagctgaaagagttactagtcacagactctctttgaggactagtatttaaggatacttaaaataaatgggcaaggcaaaacaagacactagaggaatttgaagcctttggtccctacaaacatgacacacagttcagcttctagccagactagattaccataaatctcccttctaactgcctatttgtctcagttcctattacctgaaacaasatgtctagctttcaacaaaaaattataagacatgttaaaaggtaagaaaaaaaagcacagcctactgaaactataaaaatgctagaagaaaacctcaggaaa

SEQ ID NO: 305925 - DNA, 622 bp, Homo sapiens
gctctcccaaacacaatccactgggtagaggccagctgtctttcatactccttctaccctaggtttctaaatatattctaatattggctttgttagatatcatgtgttgcctccaccatcttcctttactcctcattctcataaatccaggtaatgaatgatctcacaaagaagacaattccatcaagtctctctcttaattaagacctagaatctgagacaggaaaaacrggaccaatgtaagaagagggatctatgccaccttgatgtcaagagaagctgggattctgtataatggaaatcagggccaaaataaggttctttgcttaatattaatattaatacaaaatattgtcttagttcaggagtcttactaattgttcagtgggcaaatactatgaaacttgttcaccagtgtgagagaagccatgatctctgcccttcagaaatcccagagaagatacctccagggaatgtggcttaagctagtttaaagaaaggtttttgaaatatgtaaataaatagcagaaaggagattactgcaatcaccaacatggatatcagaacttttaaaatagaaccaagatactctgaaatttctactgcaccaggaggaacaatt

SEQ ID NO: 305926 - DNA, 622 bp, Homo sapiens
gctctcccaaacacaatccactgggtagaggccagctgtctttcatactccttctaccctaggtttctaaatatattctaatattggctttgttagatatcatgtgttgcctccaccatcttcctttactcctcattctcataaatccaggtaatgaatgatctcacaaagaagacaattccatcaagtctctctcttaattaagacctagaatctgagacaggaaaaacgggaccaatgtaagaagagggatctatgccaccttgatgtcaagasaagctgggattctgtataatggaaatcagggccaaaataaggttctttgcttaatattaatattaatacaaaatattgtcttagttcaggagtcttactaattgttcagtgggcaaatactatgaaacttgttcaccagtgtgagagaagccatgatctctgcccttcagaaatcccagagaagatacctccagggaatgtggcttaagctagtttaaagaaaggtttttgaaatatgtaaataaatagcagaaaggagattactgcaatcaccaacatggatatcagaacttttaaaatagaaccaagatactctgaaatttctactgcaccaggaggaacaatt

SEQ ID NO: 305927 - DNA, 622 bp, Homo sapiens
gctctcccaaacacaatccactgggtagaggccagctgtctttcatactccttctaccctaggtttctaaatatattctaatattggctttgttagatatcatgtgttgcctccaccatcttcctttactcctcattctcataaatccaggtaatgaatgatctcacaaagaagacaattccatcaagtctctctcttaattaagacctagaatctgagacaggaaaaacgggaccaatgtaagaagagggatctatgccaccttgatgtcaagagaagctgggattctgtataatggaaatcagggccaaaataaggttctttgcttaatattaatattaatacaaamtattgtcttagttcaggagtcttactaattgttcagtgggcaaatactatgaaacttgttcaccagtgtgagagaagccatgatctctgcccttcagaaatcccagagaagatacctccagggaatgtggcttaagctagtttaaagaaaggtttttgaaatatgtaaataaatagcagaaaggagattactgcaatcaccaacatggatatcagaacttttaaaatagaaccaagatactctgaaatttctactgcaccaggaggaacaatt

SEQ ID NO: 305928 - DNA, 579 bp, Homo sapiens
acaaagtcttaacaattatcgaatatcttatatctgaatggaagtttgacataaaggaaagaaggaaagcaggagaaaatargttaaatctacatttctaagaactcatcttacagtaggtgattcatttcaatagtaaaactcatctgagtttttgccccaatttgtcactttccacatgctgtgtacaggtgctaagtttgcaagataccactcaaagaacagatacagtgttaagaaagagtggtccttttctacttaaggaccaaaccagttgaagtgcagggaatggaaatgaatatgggtaggaacttaagttgatttgtgtctcagaggatgggattccttttcagcttttaggttcccttgatgcatacaaaaccaacaggaagagaccaatgaaaggatcttcataagcatgcacacatttccttagagttttttatttagcctcctgagatgagcccatgccttcctggaatcagtatttgtaccttagaggaaagaataactgacttacccttttctctcaccagtggctgagagacactcacaactgcttgctctcaacttaaaatt

SEQ ID NO: 305929 - DNA, 579 bp, Homo sapiens
acaaagtcttaacaattatcgaatatcttatatctgaatggaagtttgacataaaggaaagaaggaaagcaggagaaaataagttaaatctacattyctaagaactcatcttacagtaggtgattcatttcaatagtaaaactcatctgagtttttgccccaatttgtcactttccacatgctgtgtacaggtgctaagtttgcaagataccactcaaagaacagatacagtgttaagaaagagtggtccttttctacttaaggaccaaaccagttgaagtgcagggaatggaaatgaatatgggtaggaacttaagttgatttgtgtctcagaggatgggattccttttcagcttttaggttcccttgatgcatacaaaaccaacaggaagagaccaatgaaaggatcttcataagcatgcacacatttccttagagttttttatttagcctcctgagatgagcccatgccttcctggaatcagtatttgtaccttagaggaaagaataactgacttacccttttctctcaccagtggctgagagacactcacaactgcttgctctcaacttaaaatt

SEQ ID NO: 305930 - DNA, 579 bp, Homo sapiens
acaaagtcttaacaattatcgaatatcttatatctgaatggaagtttgacataaaggaaagaaggaaagcaggagaaaataagttaaatctacatttctaagaactcatcttacagtaggtgattcatttcaatagtaaaactcatctgagtttttgccccaatttgtcactttccacatgctgtgtacaggtgctaagtttgcaagataccactcaaagaacagatacagtgttaagaaagagtggtccttttctacttaaggaccaaaccagttgaagtgcagggaatggaaatgaatatgggtaggaacttaagttgatttgtgtctcagaggatgggattccttttcagcttttaggttcccttgatgcatacaaaaccaacaggaagagaccaatgaaaggwtcttcataagcatgcacacatttccttagagttttttatttagcctcctgagatgagcccatgccttcctggaatcagtatttgtaccttagaggaaagaataactgacttacccttttctctcaccagtggctgagagacactcacaactgcttgctctcaacttaaaatt

SEQ ID NO: 305931 - DNA, 579 bp, Homo sapiens
acaaagtcttaacaattatcgaatatcttatatctgaatggaagtttgacataaaggaaagaaggaaagcaggagaaaataagttaaatctacatttctaagaactcatcttacagtaggtgattcatttcaatagtaaaactcatctgagtttttgccccaatttgtcactttccacatgctgtgtacaggtgctaagtttgcaagataccactcaaagaacagatacagtgttaagaaagagtggtccttttctacttaaggaccaaaccagttgaagtgcagggaatggaaatgaatatgggtaggaacttaagttgatttgtgtctcagaggatgggattccttttcagcttttaggttcccttgatgcatacaaaaccaacaggaagagaccaatgaaaggatcttcataagcatgcacacatttccttagagttttttatttagcctcctgagatgagcccatgccttcctggaatcagkatttgtaccttagaggaaagaataactgacttacccttttctctcaccagtggctgagagacactcacaactgcttgctctcaacttaaaatt

SEQ ID NO: 305932 - DNA, 435 bp, Homo sapiens
ttgccaagtaaaatgcttccatttctatgtgatataaatgcagcacatcctgaaatagaacttgaaggacaagaagaaacaagtttcaamaacttattcaagggggtggggtgtgtccatcttctgggaatagggagtggtgattgggacgataacctctactgtccactgctctggaggaggagctgaaagacttttggatgaaactcaacctaacacatatcctgggggatgttttcattttttcaggatcaaatctttaaactataacaatttatttctatatgtagaattcctatcattagttgacagatgaagtaagatgacaagtggaaattgatatcaaatcaaatttataatgacaaactctcatatataagatattgtggtttagcagctaataattcaggctctgaattcagactgccaaaattt

SEQ ID NO: 305933 - DNA, 435 bp, Homo sapiens
ttgccaagtaaaatgcttccatttctatgtgatataaatgcagcacatcctgaaatagaacttgaaggacaagaagaaacaagtttcaacaacttattcaagggggtggggtgtgtccatcttctgggaatagggagtggtgattgggacgataacctctacygtccactgctctggaggaggagctgaaagacttttggatgaaactcaacctaacacatatcctgggggatgttttcattttttcaggatcaaatctttaaactataacaatttatttctatatgtagaattcctatcattagttgacagatgaagtaagatgacaagtggaaattgatatcaaatcaaatttataatgacaaactctcatatataagatattgtggtttagcagctaataattcaggctctgaattcagactgccaaaattt

SEQ ID NO: 305934 - DNA, 575 bp, Homo sapiens
ttgaaggacaagaagaaacaagtttcaacaacttattcaagggggtggggtgtgtccatcttctgggaatagggagtggtgattgggacgataacctctactgtccactgctctggaggaggagctgaaagacttttggatgaaactcaacctaacacatatcctgggggatgttttcattttttcaggatcaaatctttaaactataacaatttatttctatatgtagaattcctatcattagttgacagatgaagtaagatgacaagtggaaattgatatcaaatcaaatttataatgacaaactctcatayataagatattgtggtttagcagctaataattcaggctctgaattcagactgccaaaattttattcactaactctactactcactaatgtgggtccttaatccctcgaaccctaaaccttgcctgtatgatggagagaataataacgtatagttgctgagatatttcacaatgaaataaatacaaagtctctggcatatagtaactattcagtaagttctagctgttatcattagaagcatcattatattatggcattctaa

SEQ ID NO: 305935 - DNA, 575 bp, Homo sapiens
ttgaaggacaagaagaaacaagtttcaacaacttattcaagggggtggggtgtgtccatcttctgggaatagggagtggtgattgggacgataacctctactgtccactgctctggaggaggagctgaaagacttttggatgaaactcaacctaacacatatcctgggggatgttttcattttttcaggatcaaatctttaaactataacaatttatttctatatgtagaattcctatcattagttgacagatgaagtaagatgacaagtggaaattgatatcaaatcaaatttataatgacaaactctcatatataagatattgtggtttagcagctaataattcaggctctgaattcagactgccaaaattttattcactaactctactactcactaatgtgggtccttaatccctcgaaccctaaaccttgcctgtatgatggagagaataataacgtatagttgctgagatatttcacaatgaaataaatacaaagtctctggcatatagtaactaytcagtaagttctagctgttatcattagaagcatcattatattatggcattctaa

SEQ ID NO: 305936 - DNA, 599 bp, Homo sapiens
ttcagtaagcatttattcagcaccttctacttactaggcactgtgctaaatactaaggggttaaagagtaagctacaatgatttaatacatctctaagtgtgtaacactctgcataggagtgttccaacacctgcccatctattaggtttcatcaaaacatattgatatggtttggctctgtgtccccacccaaatctcttctcgtattgtaatctccacatgtaaaatgagggacctggtgggaggtgattggatcatgggggtggtttcccccatgctgttctcatgatagtgaaggmgttctcacaagatctgatggtttaaaagtggcagtccccctgttctctcttacctgctaccatgtaagatatgccttgcttcccctttgccttccaccatgattgtaagtttcctgagacctctccagccttgtggaactgtgagtcaattaaaactccttttttttaaataaattacccagtctcaggtagtatctttagaacagtgtgagaatggactaatacacatgtgtagcctctttcacacataaactgtgatctagagcacatcaaactacttgaagttgccagaagttatg

SEQ ID NO: 305937 - DNA, 637 bp, Homo sapiens
taggcaaccgatatttaacaaaggagcaaagggaattcaatggagagatgatttgttgtcttttcaacaaatggtggtaaagcaattggatgtccatacgtaaaaaaaagtacacatttacacatttgacacttttcatgaaaattaactcaaaatgaaacttacacctaaatgtaaaattcaaactataaagtttctaggaagaaaacacccaaaaaattttatatgtccttgggttttgatgatgaggtttttctgatacaacwacaaaaatacaatccatgaaaaaaatgataaattggactttctcaaaattaaaaatgtctgctctcgaaatgacactgtgaagaaaatcaaaagacaaatgatagcagtgaaaaaaatactagaaaatcacatgtctgataaaagatttgtatctaaaatatacaaaggccccttataactcaacaataagaaagtaagcaatgcaattaaatgggtaaaagatctgaacagacacctcaccaaagatatacagatggcaaataagcacatcaaaaagatgctaaacatcatttgtaattagggaattacaaattcagacaataataagacaccactacactactattagaatggctaaaatttaaaaaaa

SEQ ID NO: 305938 - DNA, 551 bp, Homo sapiens
taagtaaataaatggcacattgtggaacccaggattctcactgttgaagtgtgaatttacagacaagcaatgggaagaggctaagatgatccacatagtaatggattaaagatgggggcaccaatataaattcatgtttagcttgatataaacacagatggtcacatataaaaatatttatagatacatgtatacacatggacaagtatacatgcatatacttccttgctgtgtcagctcaaagtgcctagaaatagttaaattctaggtgtgcaaaggacacacctagcactcagatttttgtttctaatacattctctaataaaagaaatcaagtctccttaggaaaatagctgattctaaaactgaggcaggaaatatacaggatgagcctggaagaactcrtagtgacagaaaatgagaaagtgttcaaaaaattgatgggatatatcaaaaagacacaggaatcaactgaaagagattccatggccaaagctgaagcaatttgtacaataaaacaaaccagcattgaattttaaaccaaagcatta

SEQ ID NO: 305939 - DNA, 562 bp, Homo sapiens
ctaaaatttatagtcctatgacagtctgctacaaccagttcacaagaattacatgtgagacacttgtgcttgtccatcattgttctaccatgactgtccagtagtctggaaggtaaacrtggcaggtctgagggctttatagtccttgggctggagacaggctttaaattactgagtatacctccccttcaattttcacagaagaaaatgaagagctcaaagaaaatatttccatttactgatatttggggggtcacctaaggctggatcatcattctgtgattcaaaagcgaagcttatcatggagaactccatccatattcacagagctccaatgagcttttcagtgtctcagttagaatacaaactgagagccaaggatcaccagttgggaaaacctccaataagagagaaaaaaataaacaagctgaaaaagaaaatttggagcaaacagagataatgtagagagcaaatggaaataatatcctgagagagagacaaaaggaagtaatatctaaaaatcaagaaaaaaatgttatgaaaaatatcaatcagctaacaa

SEQ ID NO: 305940 - DNA, 562 bp, Homo sapiens
ctaaaatttatagtcctatgacagtctgctacaaccagttcacaagaattacatgtgagacacttgtgcttgtccatcattgttctaccatgactgtccagtagtctggaaggtaaacgtggcaggtctgagggctttatagtccttgggctggagacaggctttaaattactgagtatacctccccttcaattttcacagaagaaaatgaagagctcaaagaaaatatttccatttactgatatttggggggtcacctaaggctggatcatcattctgtgattcaaaagcgaagcttatcatggagaactccatccatattcacagagctccaatgagcttttcagtgtctcagttagaatacaaactgagagccaaggatcaccagttgggaaaacctccaataagagagaaaaaaataaacaagctgaaaaagaaaatttggagcaaacagagataatgtagagagcamatggaaataatatcctgagagagagacaaaaggaagtaatatctaaaaatcaagaaaaaaatgttatgaaaaatatcaatcagctaacaa

SEQ ID NO: 305941 - DNA, 603 bp, Homo sapiens
tcactcctgctgttaagatctgtgtgctgactgtaggagcttgtgcaggccatcacaggtgtacacagtgcactgtccacctggggggtggtgcatgaggcactgagggtttacattgactggtttggggagtccacaggcaaggtttgtaggtgggccttttggtggagtctgcaagttagtcagcaggatctgtggcaggctgttgaattccacaccctggtttctgttactccctgcctcttctycctgtgcctagctgctctcacagcattcagttatgttgaacttctcagtgttctgggtaagaaaagacctacaaggggctcctggaagactggggaagccaggagctcacttcacttataccttgtttcatgggaaaaaaaatcacaactgagaggactcagcagagagagtattgaggagggaaaatatggataaaatttaacttcccttctttctctctttaatgtgtccactcttggattttttactttactggggtgctggaacttctcagctagcttttgaactcccacaaagatattctcatccatgaatgctgccaaaatcagtgtttccataggaggatgagggctg

SEQ ID NO: 305942 - DNA, 512 bp, Homo sapiens
ttctcagtgttctgggtaagaaaagacctacaaggggctcctggaagactggggaagccaggagctcacttcacttataccttgtttcatgggaaaaaaaatcacaactgagaggactcagcagagagagtattgaggagggaaaatatggataaaatttaacttcccttctttctctctttaatgtgtccactcttggattttttactttactggggtgctggaacttctcagctagcttttgaactcccacaaagatattctcatccatgaatgctgccaaaatcagtgtttccataggaggatgagggctggaatctctattctgtcatctcgctgacatcactcacctctgttgctcatttttaaagatgcttgaaattttrtaacaatctggtattcactgaggctaactactaacatttttttttcttttttgtaattttaatttttatttttagttctggggtacatgtgtgggatgtgcaggtttgttacataggtaaacgtgt

SEQ ID NO: 305943 - DNA, 614 bp, Homo sapiens
tagtaattatgagatgtataagccacttgaagaagtaattctggaattacttacatgcaatatgaaatactcaacttataataaaggcagttgaaaaaaggaagattggggcacatcagtaactaaaacttatctcagtgctgggctgattttcaccaattctatgatgttttttatagtaatacagaagaaagaaattgaaatgacaagctgaaactgataatcaargtcatatatattttttccacaattcacatgctgaactgtttaatatgtgatacaatccaaaataattcacttttgactagatgatgatcatgatcttgatatcttcaaagcatttctatgtttaaaccaataatcttttaagggcttatatgcactaggaataaacttagaatcttagcctatggtccaagagatgtaaatatccatacaatggaaaactatttgtcgttataaaggaacaaaatattggtacatgcaaaaacagagataccttttaaaaacattatgtttcctgagagatgtcaggtcaaaatgaacacatattttataattccacttaaaagaaatgtccccaaatggcaaatatataaagaaagaaagtagat

SEQ ID NO: 305944 - DNA, 594 bp, Homo sapiens
aggtctccagcaggggagattctgtccctatggagttaggtacaccaccctaccagcatgcgggtatgttcttgtttaccaacccagaagctctctgtattccatctggtggattttttatggaggattcaacacataggcatacttgatgaaatcattggccattggtgatcaactcaaccttcagcccctccctcctccaccctggagattccatgttgaggttggggataggctgaaaattccaaccatttaatcacttagttggttccyctggcaattaatccttattttgaggctatccaggagcccccagtcatcagtaatctcattagcatagaaaaaaatcactttggagattccaagagttttaagccctccatgccaacaattgaaatgaaaaacaaatatatatatttattataaatcacaatggcatgtgatattgtgcacattttcatatgccatctgtatgtcttctctgggggaatgttcattcagtttctttaaacgttttgaaataaagttattttattgattttttgaagggctttttgtgtctgtatctccttcagttctgctctgatcttagta

SEQ ID NO: 305945 - DNA, 473 bp, Homo sapiens
ctcagttcaaataccagaaaccctgtctgttattaccaaattgtaattgattttctcaagtaaatgtttctttttttcctatatatccttagagctatttttagagactttaaatggttctcttcaccagttttgctagaaagtagttccacagagctcaagctgttacgctagaaatccattgtcactataaaatattaataaggaaattttaaaaagctgcataatattctattttatcaattaatatgataatcataattattcctatattactaagcttataatttgattttagtttttcaccattaaccataactccacagtgaacatatttgtgcttaaagattttaccacatctctattatatttttagctgtggtattgctgkgtcaaagaatattggttttttgttcgttttatacacactgccacaagactttagagaaatgctatagcagctcctaaaaata

SEQ ID NO: 305946 - DNA, 473 bp, Homo sapiens
ctcagttcaaataccagaaaccctgtctgttattaccaaattgtaattgattttctcaagtaaatgtttctttttttcctatatatccttagagctatttttagagactttaaatggttctcttcaccagttttgctagaaagtagttccacagagctcaagctgttacgctagaaatccattgtcactataaaatattaataaggaaattttaaaaagctgcataatattctattttatcaattaatatgataatcataattattcctatattactaagcttataatttgattttagtttttcaccattaaccataactccacagtgaacatatttgtgcttaaagattttaccacatctctattatatttttagctgtggtattgctgggtcaaagaatattggttttttgttcgttttatacacactgccacargactttagagaaatgctatagcagctcctaaaaata

SEQ ID NO: 305947 - DNA, 615 bp, Homo sapiens
cagaatgaagaataataagattagagcagaaatggatgaaatagggactaaaatatattaaaaagatcagtgaagctagagtggtttttttgaaaagatatacaaattgtataaaactttagcaaggttttcttaaaaaagactcaagtaaaattataaatgaaagagaagatacaactgatactggagaagtacaaaggatcataagagactactatgtacaagcattcatcatcaaattagatattataacctagaaaaaatggatttctagaaacatacaacctatcaagattgaatcataggctgggcacagtggctcatgactacaatcccagcacttggggaagccaagatgggcagattgcttaagcccaggagttcaagaccagcatggacaacatggcaaaaccacgtctctactaaaaatacaaaaattagccaggcatagtggtgcatgtctgttatcccagcgatttgggaggctgagggcagaggatcttccgagcctgggaagtccagtctgctgtgagccaagatcacaccactgaactccagcctgtgtgacaggagtgagacacwgatgaaaaaaaaaaagattaatcatgaagaaat

SEQ ID NO: 305948 - DNA, 588 bp, Homo sapiens
tctcagatatggaagcatcagggagacccagtttatgtggcgcagccggaaagcttatccttgatatacccaygtcaatcttacaaaagtggagctctgtgcaagctcagacgactcggcctccgcaggtcctagtgcagggcatgcgtaaccggctccctcacgttgagatgaaattgccccctcaagtttaagtccaaggtcatgacctaccattttcatcaaggtaaaaggcagagagaaggaagtttggataagccttttacttgaacttcagtttccccgcagttacatgggaaaataataatacctacctcacataattattgtcgaggtcaaatcaggtggtttgcaggaaagttatttatagcctggaaagagataacaggtatcaatgcaggaactagaagcaataatagacatgtagatgaatgcctcagagaagcagaggtttcatgcagacattttcttatcttgagtctttttaacaaggtgccacccttgctgagttgccttaactgcttttcattggcactgaagaaagacatatggaaaatcacgtttgagaacaggttacaatgtggaact

SEQ ID NO: 305949 - DNA, 459 bp, Homo sapiens
tcctgttacatgctacatggcattttgtgggggaagacacatgagtatttgaaaacaatgtcactttctgttttggggagctcactgttttatggatttattagttcaggctggtcawcagtgttatttaaattctgtatacacttactgattttttgtttatataatatagtagattttgacagctggacttatcatttattttttccttataattcaaatgcacttttctttacatagcgtgaagctacactgttagattcataactctccaagactgttacatctttttgtaagatgacatcttttctcaatccctgttaataaaatatatataatgagtcttatttcatgttattattccagttgcttcttctctaaacattttcctggttaatattttcctagccctgcatttacttaatttgtattcaattttggttcaccatttttatttaa

SEQ ID NO: 305950 - DNA, 423 bp, Homo sapiens
gggtgcagtggctcttgcctgtaatcccagcattttgggaggctgagactagagaattgcttgaggtcagcagtttgagaycagccttggcaacatagtgacaccttgtctctattaaaaaaaaaattttaattaaatcaaaaagaagatttgaatacaaacatttatagtagcattattagtaatagccaaaaggtagaaacaacccaaatgtatatcaactggtgaatggataaacaaaatgtagtatgtgcatattatggagtactatgaagctgtaaaaaagaatgaagtatatgctacaatgtgggtgaacctcaaaaacatgccaagtgaaagaagtcagacacaaaaatctcacgtggtttatgattacatgtatatgaaatggataaatccagaaaatacatgagtggatgcctg

SEQ ID NO: 305951 - DNA, 521 bp, Homo sapiens
gaaatcaacttcatttttatctgataacatctctaaagcttctcggactttagtgtgcacatgagtcacctgggactcttgttaagctgcaaatcctaattcaacaggtctggagtagggactgagatttctgtctttctaataagtgcccagagatttccattatgtggttccatgaattgcactttgagtagcaagaatctaagctactattcgaggttaagatcaagcctatcctctccatgttrtctttctaccctaagaatgctttggttcccctgtaaactcagtggcatttaacagtgtgttttgatatgtagcctgttcagaaactctcttagcatacttctacacttttctatgtgtatgtgatatagttccctaagaagaagaatgttttccataaatatctttgaaagagagccagaaaatggcatgaactatgaagttagatggacgtgggtttattgtcctgtcactgtcaactactggttgaaggatatttggaagattgctcactt

SEQ ID NO: 305952 - DNA, 515 bp, Homo sapiens
tcttgctttccaatttggaaatcagaaaatctagaataaatagatacattcctagacaaatcctttatttctttctcttttctgattcctctagctgagactcccagtactatgttgaataacaggggtgaaagtgggcatccttgtcatgttccagatcttagaggaaaggctttcagcttttccccatttactgtgggtttgtcatatatggtttttattatattgatgtttgttccctctatattcaatttttgaggttttttttttcatgaaaggatggttgaattttatcaaatacttttcagcatcaattgatatgatcatatggtttttatccttcattctgatgatataatgtatacattgattgattcatrtatgttgaaccatccttgcatccctgggagaaatcccacttggtcatgatggataatctttttaatgtattcttgaatttggtttgcaagtattttattaagtgtttttgcatcaatattcatcaaggatattgg

SEQ ID NO: 305953 - DNA, 554 bp, Homo sapiens
tttactcctaaagattttgtcagtgaataaagaatttgagatcagtcattccttccttttggcacttaaaaaatgttgaaccactttcttctgccatgattatttcaaattatttaaattgtatctcaatatttgtcatttctctttacctatattgaatatattagtttgggggttttgttgttgttctttatagtttttaaaacattcactatgayagatcatagcatgaatttttggagaatattctgtttgggtttgcacaactcctaaatctgtatgtttatgttttcattgaatttgagaaattttcatccaccatttctttgaatattgtcttcagccttacactcctcctctttgctttctgtgactaaagacaaaaatattaaatgttaagtgttgttcacaggtctcttaagctttgattatttttgtttagtctattttttctcttttcagattatataaatttttgtgcttgagtttactgtttctttactttgttgtttccaatctacccttaggctcaatctgtgggattttaaatttta

SEQ ID NO: 305954 - DNA, 263 bp, Homo sapiens
aactggccctgggtggcaggattatgggtagtttgtgttttctttttctcttttttacacacatttttaaaattctacataaacatgtaatatttaagtaattttataattttattcttgaagcaatcttactgttcttttttctttttctttttttccattcttattctcttctatagaaaagaacaagaaaatatatatatatatctgtatatctatytatctatctacctatctatctatctaaagctatataaatggca

SEQ ID NO: 305955 - DNA, 622 bp, Homo sapiens
aagctcaattagaaatgaaaatggagacaytacaaccaacaccatggaagtagaaaagatcattcaagactagtatgaacacctctttgcacacaatctagaaaatctagatgaaatggataaattcctggaaacacacaatcctcttagcttgaatcaggaagaaatagaaatgttgagcagaccaataacaagcaatgaaattgaatcaataatttaaaaattgccaacaacaacaacaacaacaacaaaaatcccaggtcagatggattcacaaccaaattcattcagacattcaaagaggaatttgtgccaatcctactgaaactttccaaaagattgagaaagagggaattctccttaactcattctatgaagccagtatcaccctgatatcaaatccaggaaagaatataacaaaaaaaagaaaactacagaccaatatctctgatgaacataagggcagaaaatccccagcaaaatctagcaaactgaatccaacagtacatcaaaaaggcaatgtatgatcaaatggattttattccggggatgcagggatggttcaacacacacaagtcaataaatgtgactcattacataaatagaattaaaaacaaaaacc

SEQ ID NO: 305956 - DNA, 481 bp, Homo sapiens
gaacaccactggcttccaccttgcaatgcctctctgttgataggagcccagagaaatggctccctattatgtttgtctcratggaattatgttgtactattagtgaaaaaatattcaccttgcctagaaaagcatggtgaatgtaaaaaagtattacatctttttctctgttcacctgacaacattcttcaagatacacagatcttgttaattaggtacatttctcttgatttaataatttatcaaaaattgcttactgaatgccttttgtatgccaggccttgttctctagttgctggggaaatgggaaaacaaaacagagcttcaaataaggaaagggcagacaacaaaaatcaaatgtgaaacgtgtcaagaggcaataagagctgtgcagaaaaataaagcagagaaagggaggtggaaagtgacaggacaggcacagggtatgcactggtttccatctgttggtgaggaaatgcat

SEQ ID NO: 305957 - DNA, 590 bp, Homo sapiens
tgtgtaataaggctgagagtgttttagtggaagtggtgctcttgttttctaacctttggtgcatgccagaggtagagagggtgtgttatcagccacaaacaaacctccagggtagtagacatatgtgtgacrttggtttcccttatgaaccccaacatctattcaatatatgcaaagcaccagatacaatacctggacatagcagtttcgcaataaatgacaactgctattgtttcttatcaagtttggggttgattgggaagcctaggttcaagtcccaaatccagcacttacatcttatctgtgtgacctccagcaaatcacctaacttctctggtcctctctgactatggtgtcaataaatggattgattgacaaaatacatggcatagcacagtgcttggtacatattcagggctcaataactttcttattgttatcatcagggagcttctaatctcctccctttgttgcaacagcatggagatgagagatatcctatagacatagtggatatttttatgggcatttctagaccctcttccccacagctgttttccttgttttattcatgtctctgttcactgggc

SEQ ID NO: 305958 - DNA, 544 bp, Homo sapiens
ctccgggagggcagggacggggtctacactatttcacaatcaaatcctagtgcctggaacctagtaatcagtcagtcattatgtttctgttgattgagaaaattaacagattttacttaaaaaggatcataaggtgaaggcaatgcttcattttaaagtcatggcgcagagctcagtcttactctgccattaaccagccctgtgatgggacaagactttcaatctctctcagtcttgcctgtaaaatgggaattgagaagagttcattctaattccacggttatgcagstggaactgtctgtgtacattctggagttgtgtgaatgcattagtctatgttgtagcctcacaccaggagtttctctttctaactggtttatgtacctcatttttcacagagcagcttgttttgacccgaggcatatctatggccaaaacggaacaagcccttattggaaaaatatgtctgtataattaaattccagtattcacaatttccaaaaccactttacagagagaatatgatcagtcagtgtagcaatcc

SEQ ID NO: 305959 - DNA, 618 bp, Homo sapiens
ggtaatttgtttcttagagatgttaaattaggataaatgcccattattggtaatggtaaaacattaaggcctttgtagagacagaaagaatcacggtgcatgcattctgatttgaggacattactaaaccttcctctaagaatttcagaaaaaggaaaaaatccatttgtgagttctctaagagcaattatgtttcttttttggcctcagaaaaactcccataatgcttgttactgtgccatacctagagtaagcactcaataacacacagatgaaatgtgttttccctggaagaacaaaatactagccagcattgattgagcccttactatctatgagcaaggcacagagctgagtgctttacatgcaattccattacttcttgtggcaactcccatttcatagataaggagaccgagcctgagagagggtggtaccccattcccatggtgatggggacagtgctgcaagtgatagagccaggatctaaagcccgtatgyttttcaacatactctgtaactacatacagatgtatggaaatggagatatctgaagaataagtgggtttttaggaggggatgactgatatttataggaattactggattgtgtttggg

SEQ ID NO: 305960 - DNA, 549 bp, Homo sapiens
cacttcacaccccttgcatgcctatttcagcattggcctcgagtgtggaagtgcattccccagaagagaaccaagtgtggccagtgctccaggctctcctaacagcagaggaatgagagagttctatcataattctgcactggagagataagttggaatggcttctaaaaaaataaagatgttttgaaaatgaaagttttactttttaaagaaatatcaatggcattttataatcttagccaagtatgagaatratgaaattaatttatattttaccacccatcattcccagaaacatttttatagttacccttcctagaagttccaatgacatgttcaacagcttattttcctgtactgctgctaatatgcataccaagaaatgtctttctttgtttggttcaactgattgtataaagccttcttgattatattactcagaattgtaactgctgcttcctgggtgccaaggacctttatgaagaagttaattagctatttccttttaaaggatgttcagacatctgcagagaataattaatccagtgt

SEQ ID NO: 305961 - DNA, 597 bp, Homo sapiens
gcagaggaatgagagagttctatcataattctgcactggagagataagttggaatggcttctaaaaaaataaagatgttttgaaaatgaaagttttactttttaaagaaatatcaatggcattttataatcttagccaagtatgagaataatgaaattaatttatattttaccacccatcattcccagaaacatttttatagttacccttcctagaagttccaatgacatgttcaacagcttattttcctgtactgctgctaatatgcataccaagaaatgtctttctttgtttggttcaactgattgtataaagccttcttgattatattactcagaattgtaactgctgcttcctgggtgccarggacctttatgaagaagttaattagctatttccttttaaaggatgttcagacatctgcagagaataattaatccagtgttgtgtttccagtgtatatatatcacataaaagtagacaagaatgatttttatgttagcgatgtctaagggtccaaggttgaattacgtggttatgtgaaacttgcttgtggatggttctttctaagaacggcttcagtgaccatcacctgtc

SEQ ID NO: 305962 - DNA, 613 bp, Homo sapiens
aggcgagcagccctccagatgcaggggctctcaggccagggcccacaggaagccgagggcgtggctggctgaggctgaaggaaaattccagggctgagaggcagtgccttggggacgccacagtgtcttcagcctgggcttcattatacaaacaataacaaaaagcctcagacaacaacaacaaaatactctcaaagtgggaatattctgaaatggaataaamcaaataatatctaagtagtttattttgttagaaagaaaaaggatgatttcagccttcaggtcttattaataaaagagccttcagagaagagaaaagatatctcagaggaagcaagaaagatgcgatgaaccccagggaaggctgtttgggggaaatccaagtttggatgaagctgtggctgtggaggatggtctgggagttactggcctgaaatagtcacgaggaacctgagcagagaaagaagactctgagatcaatcaggaaagcttgagcccagtgtgtggtttggatcagagcacagctcaagtccaaaaagccagtgaggttcaggagctcgcggtcttcctgacagccacatcatccatctcctctccacacccttcacagcca

SEQ ID NO: 305963 - DNA, 592 bp, Homo sapiens
acttgcgaggctagaactgaccaggtaatcaaccctgagaggaatcacaaagtcaagctaatcttaaaggcagggtaaattagaaattaggcatcgggatctggagtcaagcctctttggctctcctcgtatctctagcacttcctacttgcgtgacccccggtaaatcactgaatttctcttgattcagtttcccttttgtagtttgtggagtttatggagttgtcggagggataaatgagtttgtacacggagagagcttagaatgctgtctgcccatattatggcactcartaaatgatggctgtaattccctgctttgaaccagttgtcaaaatggtcagagcagtttgtcaacaatttaaatgctttcacatatgaagcaggtaacacctatgcataaaaccaggcagaggtttgtgtgagttgatgcatccttgtctagctgaaatgaacaacggctgcccaaatctaacccttcttgtcagtattgccacatcttgtgatttgtcaagacaagttgggtatcaggatttttgcatgaaacctctcagtttttaaatactggaaactatcttaaatgttttttaaa

SEQ ID NO: 305964 - DNA, 592 bp, Homo sapiens
acttgcgaggctagaactgaccaggtaatcaaccctgagaggaatcacaaagtcaagctaatcttaaaggcagggtaaattagaaattaggcatcgggatctggagtcaagcctctttggctctcctcgtatctctagcacttcctacttgcgtgacccccggtaaatcactgaatttctcttgattcagtttcccttttgtagtttgtggagtttatggagttgtcggagggataaatgagtttgtacacggagagagcttagaatgctgtctgcccatattatggcactcaataaatgatggctgtaattccctgctttgaaccagttgtcaaaatggtcagagcagtttgtcaacaatttaaatgctttcacatatgaagcaggtaacacctatgcataaaaccaggcagaggtttgtgtgagttgatgcawccttgtctagctgaaatgaacaacggctgcccaaatctaacccttcttgtcagtattgccacatcttgtgatttgtcaagacaagttgggtatcaggatttttgcatgaaacctctcagtttttaaatactggaaactatcttaaatgttttttaaa

SEQ ID NO: 305965 - DNA, 592 bp, Homo sapiens
acttgcgaggctagaactgaccaggtaatcaaccctgagaggaatcacaaagtcaagctaatcttaaaggcagggtaaattagaaattaggcatcgggatctggagtcaagcctctttggctctcctcgtatctctagcacttcctacttgcgtgacccccggtaaatcactgaatttctcttgattcagtttcccttttgtagtttgtggagtttatggagttgtcggagggataaatgagtttgtacacggagagagcttagaatgctgtctgcccatattatggcactcaataaatgatggctgtaattccctgctttgaaccagttgtcaaaatggtcagagcagtttgtcaacaatttaaatgctttcacatatgaagcaggtaacacctatgcataaaaccaggcagaggtttgtgtgagttgatgcatccttgtctagctgaaatgaacaayggctgcccaaatctaacccttcttgtcagtattgccacatcttgtgatttgtcaagacaagttgggtatcaggatttttgcatgaaacctctcagtttttaaatactggaaactatcttaaatgttttttaaa

SEQ ID NO: 305966 - DNA, 552 bp, Homo sapiens
caggtccagcctcatgagacagtgaacacttttgtaaaactcacttaccggagttttggtttttggtttggacatgtcttcttaagtatggcctttgttccatacttatgatactgactcttaacttttgagattttgcagatgtgtggaatggcgtaggaaagtgaaaagtctaatataagagaagcactgttgtaagttaaatggatgtaataaaaagcattctgcatttgagaatctagtaacttggttgttgcctggctaggggcgcaggtgcgcatatcttgttagatatgtgarcctattcatagttattacttcagcttgcagttgaaattgaatcaatattaaaaccacagagattcccacagcaactcagcagcttatctaataacttaacctcactctcctcattgtcgtcttgaaactaatatctgctggttcataaaaccgttatatgcctgcctatcttgcagcctccttctgaggaacgtgtcttgggagtttgaactgtggtgccttcccacctactgccagggaccctgtcatcct

SEQ ID NO: 305967 - DNA, 573 bp, Homo sapiens
tatttatgttctttatttggagaataagtatgatttaaagagatgcatatgagtgccaagttggcaatgggttgatttgtgatagtttattttatgtgtcaaattgactgggtcacarggtgcgtggatatttggttaaacattattctgtgtgtgtctgtgaggttggttttggatgagattaacgtgtaaattaatagactaagtaaagtagatggccttcctcaacatgggtgggcctcatcctcagctgatggcctggataaaacacacaaggcagggcaagggggagctgctgcccaactgcctttatgctgaggcatcagtttttcctgcctccgaactcaaaccaaaacttcaattcttcctgggtctcaagcctgccggtgtttgggctgaaactccaacactggctctcaatttgccgtctgtggatcttgggacttgtcagcctccataatcacatggacaattacttttactctctctttctttggacaaccacaatatacacatttacctttataattttaaaaataaactgcagaagagtttggtcaacttccaaaacaa

SEQ ID NO: 305968 - DNA, 518 bp, Homo sapiens
aacatcttattgaagtatagcatacatgcagagaartacacaaatcacaagtgtacacttgaattctcacaaaattaatacctccccaactagttccctaatcaagaaccccttctgccctttccagtgtttacctcccaagggtacccaccatcctaactaaaacctagattggttttgcctgattttgaactttatgtaaatggaggtatacagtatgtactcttttgtgtctggctcattttacagcacattatgtctatgaaattcatctatgttgtaatgtgcagttgctgtacagtattccactgtatgaatccacgatttgtttacatatcctgctggattattttcagttttcagctgtaatgaactgtgtggcatgattattcttgaacagtggccttggggaatatattagatatagatatatggcttgtgaagatgccattggaacttctaggaagggtgattataaaaatgtttctgggaataatgggtggtaaaatataaattaa

SEQ ID NO: 305969 - DNA, 627 bp, Homo sapiens
gatatgggaggcaactacacaagggtgtgaagattagaagcaaggctcactgggggtcttcttagagactacctaccacacctttcctcacccgtaatctacactgcttagatttcctttctatctgcagcactgacttgctgtgacagattaggtaggagcagkccaggggaagtgaatgggacctcaaccattgactgctgggttgagaggtgggataagcctccatacaggatgcagagaaattacagtttgataaaccaaacaaagcatttggagaaagtgacagtcgatgacagagatagttgtagaaaatagtcgacaagacatggaggaggccacacaacacacagaagggtgctgacaagtaggtggagaccagtgaccaggatccacaagcaaaccatatttgaagattaaggttgcaataagctgaaatcctgttaagtccataatggagtatccagtcccatactttagatccccgaacaggactctgatcccagagagaatttggtcaaacccattacttgtcttggtcatcgcatacaagactgtgagttggtatgtgccttccttcctgatactctaatttcatcctcttgcatttccagtcatgctcaatag

SEQ ID NO: 305970 - DNA, 572 bp, Homo sapiens
catgagctaaccatgaatgcaggcctcttggggaacagcaatgagacagaatcatgggaatgataccatggcacccctactggccttgggccacctatttcagacttttatacgagagggaaatatagttatatatttaagctatttggtaggggggacggtcatgtgtagacaaacctaatcctagagaaatatgggcagtttgtatgacattcccaggaattttgagcttcttaatatcttataacccaaccatattcttggacttgaaggtgtaacatttgtatccattcaagattttactcattcaagacttgtggtagaagggattccatacaggcagactgagcttgggaatagatagcrgttgcagatggatacccctgggaaactctggcattctgaagcaagataatgctggtgactgtgcttgtggcttctgatggagccacatagtcttaatgctagccaacaccctccttcaggagtgcccatgtacctgacttcatctggtgtggtgtagaactacaggcaaaactgacccaggaaaaaaatagggtggtgatgatggg

SEQ ID NO: 305971 - DNA, 572 bp, Homo sapiens
catgagctaaccatgaatgcaggcctcttggggaacagcaatgagacagaatcatgggaatgataccatggcacccctactggccttgggccacctatttcagacttttatacgagagggaaatatagttatatatttaagctatttggtaggggggacggtcatgtgtagacaaacctaatcctagagaaatatgggcagtttgtatgacattcccaggaattttgagcttcttaatatcttataacccaaccatattcttggacttgaaggtgtaacatttgtatccattcaagattttactcattcaagacttgtggtagaagggattccatacaggcagactgagcttgggaatagatagcagttgcagatggatacccctgggaaactctggcattctgaagmaagataatgctggtgactgtgcttgtggcttctgatggagccacatagtcttaatgctagccaacaccctccttcaggagtgcccatgtacctgacttcatctggtgtggtgtagaactacaggcaaaactgacccaggaaaaaaatagggtggtgatgatggg

SEQ ID NO: 305972 - DNA, 465 bp, Homo sapiens
ggtgagtcatgggactaaatatggaacaagggcataattgaagtccatagactaacagaccaagctaaacttcacccggaagcagatgcccaacagacaggtttttgctcttccaacaaggagagttgttttcttaaaaactgaaagaaacattcaaaagaattaaggcctgattgtaggaggtcgtatcccctaaaaatgatcttcacattctcataytagggtttccaaaacataaagacggatcaccactcttttattagacaatacaagcttcatccttcttcatagagctgcttttcctaaaaaccctccagggaaatttgacgtcttaactacacacatttatttctttaaaattttaagttgtttttatacacttggaaattaaaaactaaagtaaccttcttattacattttctaccatcttggaggccattttctattcatgtttataatgttata

SEQ ID NO: 305973 - DNA, 576 bp, Homo sapiens
atgcgtaacaatggactcaatatcttccactaggggtgcttccaccagccacatgccacatgaaatargagtttgggtacaatgaccctccaaaataattttggagtattattgccagaaagaggaagaaaaacatacaaatagaataaaaatcacaaatatctactacctgttggtgagcctttctcaacagaattttaggaagccatggaacataccagttcagaggagagaaacctagaatataaactaaatctttcttgagggaaagaagaggtacatggaagtgtgatactctctttttcccttcacattcgatctctagccttctttccaccctcctctgtttgccaagaaactggcttccatgggatgccctaagcaagattctttgctctgtgacttcctcactcagaagatgagaaggtggaagcagaaagagggagagtgtgtattcacctggctccctccctgctgagctgagatgggcataaccttctatcctgtcccatgatcccaagtgggagacaacatctacagctgctactaaaattatggcaatcaccctcaccaagg

SEQ ID NO: 305974 - DNA, 576 bp, Homo sapiens
atgcgtaacaatggactcaatatcttccactaggggtgcttccaccagccacatgccacatgaaataggagtttgggtacaatgaccctccaaaataattttggagtattattgccagaaagaggaagaaaaacatacaaatagaataaaaatcacaaatatctactacctgttggtgagcctttctcaacagaattttaggaagccatggaacataccagttcagaggagagaaacctagaatataaactaaatctttcttgagggaaagaagaggtacatggaagtgtgatactctctttttcccttcacattcgatctctagccttctttccaccctcctctgtttgccaagaaactggcttccatgggatgccctaagcaagattctttgctctgtgacttcctcactcagaagatgagaaggtggaagcagaaagagggagagtgtgtattcacctggctccctccctgctgagctgagatgggcataaccttctatcctgtcccatgatcccaagtrggagacaacatctacagctgctactaaaattatggcaatcaccctcaccaagg

SEQ ID NO: 305975 - DNA, 576 bp, Homo sapiens
atgcgtaacaatggactcaatatcttccactaggggtgcttccaccagccacatgccacatgaaataggagtttgggtacaatgaccctccaaaataattttggagtattattgccagaaagaggaagaaaaacatacaaatagaataaaaatcacaaatatctactacctgttggtgagcctttctcaacagaattttaggaagccatggaacataccagttcagaggagagaaacctagaatataaactaaatctttcttgagggaaagaagaggtacatggaagtgtgatactctctttttcccttcacattcgatctctagccttctttccaccctcctctgtttgccaagaaactggcttccatgggatgccctaagcaagattctttgctctgtgacttcctcactcagaagatgagaaggtggaagcagaaagagggagagtgtgtattcacctggctccctccctgctgagctgagatgggcataaccttctatcctgtcccatgatcccaagtgggagacaacatctacagctgctactaaaattayggcaatcaccctcaccaagg

SEQ ID NO: 305976 - DNA, 548 bp, Homo sapiens
cccatgatcccaagtgggagacaacatctacagctgctactaaaattatggcaatcaccctcaccaaggtctacaatgttttctctcttcttgccctttcaaggctaagggatggagctgctgcctgctgttgctggccctggggtgcttcactgttccttgctggctcctcttaaccttattcacatcgtttaagcacgtgaaatattactctgcttgagtggggtgtgtttcttgctgggtctgctaatgcagggtgggacctaggtgctggtgttgggtgaratgcaactgaggacgtagacctccacatttagagactacagaaatggatggcaggtcaccactggcccaggcaggtggagttgcagcaggcttgcagagcatgttgaatggtagcccaggagcaggcaacacacacacccaagctaggcagggagggggctgatggcaagtaatagcagggccactgcactggattgctccagtgatcactattcacgttgctttctaaataatacaaatattttcattggcattcagaagcc

SEQ ID NO: 305977 - DNA, 603 bp, Homo sapiens
tcagtcaaatattgcaattactaggtcattatgacagttgcattcctttctctagaccaggaaatagtcgctgaagagcaaagttgcatggacagtatttgtgagactgtaattaattatgagaccttcttaactcatccaataatggaactagatcaaactagagaaaaaatgaatktgattacctgtattaagaaattccttccaagcaatattttaaaatggtaatcagaattcagctactccctggtgactgataaatttaaactaaagttaaataattattttcaaaaagttaattattataatgtaatgcttggcttcatttccttaataaatgaatcaccttatttcagccttgcaaattagcatgtaatatggaatccagccaagggaggcattaggacttgaggaaacagaggacgttctacatgccctttctgccatctaactgcctttagggataacattttactggttcgagtttcttgttttagctggatatagagtattacgattatttagcaatggatgtcaatgccaagaatcaatctgtactgtacatgactagaattagcagataatgtgatttgaactatgtag

SEQ ID NO: 305978 - DNA, 630 bp, Homo sapiens
ctagctcatatgcctcctactgatttctaatatgttacttaaatttctctaagttcatagtaacacatagtatgggtacaaagaacaaatttccggggaaacttacaagtaaagggtcaacaagaaatggcacttgcttacccagatctattggctttctgcagagatgcatgcagttgaggcttgctggagccactatgacttattccagggaagggaccctgccctctgttgctctctctttaactgggtgagcatgagaatgaccttaacagtggagacacaaagctggcagtgattcatgatgccctgtgacttcacctggtgttgtatgtaactataatgtaatagcagattagatgccagctgtttagggccrtgataagaaatgctacctgctcagtacttggagacctagggagcacttggaggaaaatacaacctgtcttcgggtgagggcagcacttcccttttcatctagcacattgccggacaattcagagacagctcccaggaaactttgcagatacactccatgctgtctcatagagcttctgtgagcattaaataggataatatacgaaataatttaattctgtttaattctgttctgatccacagtaggtgccc

SEQ ID NO: 305979 - DNA, 563 bp, Homo sapiens
  misc_feature (1)...(563): n = A,T,C or G
nnnatgttctgtagtaccaattacattcccaccaacaaggtacaagaattctctttcctccacctccttaccaagacttgctatctttcatctttttgacaaaagtcattctagcaggtataatgtgataacttattgtggttttaatttctatttctgtaatgactagtgatgctgaacagtttttcatgtacccattggctatytgtatgtattgcttttgagaaatgtctatttaggctctttacctttttttaattgaattgtcttatatgttatggagttaactgagttccttatatatttctaatattaaccccttatcagatgtatcacttacaaatattttctcccattctgtgggttgtctcttcagtttgttaattgtttcctttgctgtgcgaaggtttttagtttgatgccatcctatttggctatttttgcatttgttgcctgtgctttctgggtcatattaaaaaaaattttttgcccagacaaatttcatggagcttttcttctgtgttttctttgaatagttttccacattgagatcttatatttaa

SEQ ID NO: 305980 - DNA, 563 bp, Homo sapiens
  misc_feature (1)...(563): n = A,T,C or G
nnnatgttctgtagtaccaattacattcccaccaacaaggtacaagaattctctttcctccacctccttaccaagacttgctatctttcatctttttgacaaaagtcattctagcaggtataatgtgataacttattgtggttttaatttctatttctgtaatgactagtgatgctgaacagtttttcatgtacccattggctatttgtatgtattgcttttgagaaatgtctatttaggctctttacctttytttaattgaattgtcttatatgttatggagttaactgagttccttatatatttctaatattaaccccttatcagatgtatcacttacaaatattttctcccattctgtgggttgtctcttcagtttgttaattgtttcctttgctgtgcgaaggtttttagtttgatgccatcctatttggctatttttgcatttgttgcctgtgctttctgggtcatattaaaaaaaattttttgcccagacaaatttcatggagcttttcttctgtgttttctttgaatagttttccacattgagatcttatatttaa

SEQ ID NO: 305981 - DNA, 563 bp, Homo sapiens
  misc_feature (1)...(563): n = A,T,C or G
nnnatgttctgtagtaccaattacattcccaccaacaaggtacaagaattctctttcctccacctccttaccaagacttgctatctttcatctttttgacaaaagtcattctagcaggtataatgtgataacttattgtggttttaatttctatttctgtaatgactagtgatgctgaacagtttttcatgtacccattggctatttgtatgtattgcttttgagaaatgtctatttaggctctttacctttttttaattgaattgtcttatatgttatggagttaactgagttccttatatatttctaatattaaccccttatcagatgtatcacttacaaatattttctcccattctgtgggttgtctcttcagtttgttaattgtttcctttgctgtgcgaaggtttttagtttgatgccatcctatttggctatttttgcatttgttgcctgtgctttctgggtcatattaaaaaaaawtttttgcccagacaaatttcatggagcttttcttctgtgttttctttgaatagttttccacattgagatcttatatttaa

SEQ ID NO: 305982 - DNA, 590 bp, Homo sapiens
ttaataggtaaggacttgcttctgctgctttgtaatttttttttctgattgttttgtaggccatttgttaatttcttcttctctttctgtcttcctgtgaggtttaatggttttctgttgtgatatgttttgatctttctttttatgcttcgtgctactactgtaggtttttctttgtgtgtgtggctaccatgagacttacataaaacatctgcttcttatgacaggttactttaaggtgataacaactttaactgcacacgaaaactacactttcacttcctctcctttacgttttctttattttgatgccaaaacttgctttttttttttttttagtattttgtattccttaacaatctattgtagctagagttatttttgatagttttgccttctaactttcatagtagaaataaaattgctttacataccrttcttatagtaatagagaattctgagtatgactatacattacttattctactaagtttttaactttcaatttgtttttactttattaattaacagcctttaatttcagcttcaagaactccctttgtagtttctataaaggaggcctagtagtg

SEQ ID NO: 305983 - DNA, 567 bp, Homo sapiens
cataatcaactatatgctgttgtgaagaaactcattttagtttcaaagacacaagtaagttgaacttgaaggatgaaaaaaatatatactatgcaaacagtaaccagggaaagctagagtggctacaataatatgaagcaaacaagactttaaagcaaaaattgttactagtgacaaagaaggacattatgtattgataaaaaggtcaatccatcaagatagaaacattataaatacatatacatctaataagagagcttcacaatagaggtggaaaagctgacagaattaaggggaaaatagatgattaaataacagttaaagactgaaatactgcartttcactactgcatagaacaattagaaagatcagtaagaaaatagaaaatttgaacaacactataaaccaagtagacctaacagatagctatggaatacttcatccaacaacagcctaatacacgtttcacaagcacacatggaatattctgcagaacagatcatattttaggccacaacacacatcctaatatattcaaaatgattagaattatacaaaatatgttt

SEQ ID NO: 305984 - DNA, 527 bp, Homo sapiens
tgtgtgttattggtaaggcttctggtcaacagtaggatattagcagttaactttagggttaacttttaaccaattaaaatacaaaaattaagaataaaaaagccataatcaactatatgctgttgtgaagaaactcattttagtttcaaagacacaagtaagttgaacttgaaggatgaaaaaaatatatactatgcaaacagtaaccagggaaagctagagtggctacaataatatgaagcaaacaagactttaaagcaaaaattgttactagtgacaaagaaggacattatgtattgataaaaaggtcaatccatcaagatagaaacattataaatacatatacatctaataagagagcttcacaatagaggtggaaaagctgacagaattaaggggaaaatagatgattaaataacagttaaagactgaaatactgcagtttcactactgcatagaacaattagaaagatcagtaagaaaatagaaaayttgaacaacactataaaccaagtagacctaacaga

SEQ ID NO: 305985 - DNA, 555 bp, Homo sapiens
aatattctgcagaacagatcatattttaggccacaacacacatcctaatatattcaaaatgattagaattatacaaaatatgttttctgattgtaatggaaatagaagggaactttctcaacctggcaagggtatctgtggaaaatccagttaacgtcatacataatggtgaaagtctgaatattttccccataagaacaggaataatacaaggatatcattctgtttattgttgtgctgcaagttctaaccctagtgtattaatctgttctcacagtgctatacttgagtctggctaacatatttttaaaaagaggcttgattggctcatagttctgcaggctgtacaggaaaaatagcagtttctgctactgggaaggtctcaggaagcttccaatcatggaggaaggcaaatgggggagtgagaggtcttacatggtggaagmaggagcaagagagagcgatgggggaggtactgcatacttttaaacaaccatatctcttgagaacccactcactatcacaagaacagcaccaagcacatggtgctaaacc

SEQ ID NO: 305986 - DNA, 602 bp, Homo sapiens
aggggaaggaagtgatcgttacgtgtattactaatacagtgtagtgggcaggaagacaaactgtgttcatctgggttcaaattcctactactccacttcattgtgtgactttgggctgattatctcaactctctgtgcatgtttccttatttataaagtgagggtatattagtactgaactgatggggttgctataagttaaataagttattccatggaaagggcgtaggaagttgtcaggtgcctagtgagcactctggaaatgtttcttattattcgtcatattctgagcctgacttatttgaactcaatagccctcaagatataaggtacwatctcataacatggccttcagaatcagaggtttaaatcctgactctatcaagtgtcagactttgggggaagccgtgtaacctctgagccttggtttcctcatctggaaaatggagatattagtatctattcatagggcgattgcaaatattaaaagaaataatgtatgtgaatcctttattagatttattaaaaaatgtttaacccttcaccacagtgaggaatttatttcctcctctcattacacactgtccaactttaagatcaca

SEQ ID NO: 305987 - DNA, 533 bp, Homo sapiens
ttgaggatctaatttagaaaaatttgcccaattttgttagacaggtcaacatgcagataaaagaaattcagagaactcctgtgatatactatataagaagaccatccccaagacacatagtcattatactatccagggtcaatgccaaaaaaaaaaattgaagtcaaactattgctctttgctgatggtataattctatccatagaaaaccctaacaactccacccaaagactgctggaactgaaaaacaaattcagtaaagtttcagaatataaaattgatatataacaattggtaacatttctatacatcagtagtgttctagctgagaacaaaatcaagaatacaatctcaagaaaataaaatayctaggaattcatacaacaaagagatgaaagatttctacatgaagaaccacaaaactgctgaaagaaatcatatacaatacaagcaaatgaaaaaatattccatgctcatcgattagaagaatcaatacagttattataaaataatcatactttccaaagcaatct

SEQ ID NO: 305988 - DNA, 538 bp, Homo sapiens
cataatgggtaattttttagtataactcatggcaatgtacactgggtgcttgataaatgtgttttcctttcaccttctcccatattcctgtgaccttgtaaaggatgcccttgttttccatgcctatatcacttctttctcagccccttttactatctggatttctaatatctctatcaatgggcttccaagatcttcccatgcatactgtatttccaggaaaggattaagtatggacttgagatatagcctctttcctctcagttattttaagcctcctgttaggacaagatttccagatcctttaccacccaagcatggtctaaaatgtaggtttattattcttcaagtatggtgaggccaacagatcagaagactactgccactgaaaatacagtttgttcccaagaggaggaagtagagcatgccagtcagggcccttgggggagcacactstgtggaagcagatgcgtcaagggaaaaattcaggcaagagcatttattctggtttcctttagaaggaaaaagtgaggcaagg

SEQ ID NO: 305989 - DNA, 602 bp, Homo sapiens
ttaattggatactttttggttaaaactctggaagaacaacttttggacacagaatgaagccatgcataagttggactgaactgatgaggtgtagagtcctttgaactttttgtgatcaraactaaaattaatttttccctatggttttaggatgggaagctctgtttcctaagccatcaatttctttttacatttttccaaagtaagttgagtaaggaaaggtttccgtgacagccacttacagatagtagatacaatggagataaatatatatgtatatatttacaggttaaaactggtctctcctcacattaagtctttaatgaaatgtttcttctataatttataattatttgaaaacaaaaagattattatttgaacaaacagccaaatgaaaatgatccagtaattcaaatacaatctatttctccacatcagcacaacagttctaacgcaggacaggatgaattaaggaacagtttattaccaaaaggataaataaatggggatggatagaataagctaaattatttctcttaaagcatatgcgttatgcatagataacattggcagcagcctcattcacagtgagatgtaaaggc

SEQ ID NO: 305990 - DNA, 602 bp, Homo sapiens
ttaattggatactttttggttaaaactctggaagaacaacttttggacacagaatgaagccatgcataagttggactgaactgatgaggtgtagagtcctttgaactttttgtgatcagaactaaaattaatttttcmctatggttttaggatgggaagctctgtttcctaagccatcaatttctttttacatttttccaaagtaagttgagtaaggaaaggtttccgtgacagccacttacagatagtagatacaatggagataaatatatatgtatatatttacaggttaaaactggtctctcctcacattaagtctttaatgaaatgtttcttctataatttataattatttgaaaacaaaaagattattatttgaacaaacagccaaatgaaaatgatccagtaattcaaatacaatctatttctccacatcagcacaacagttctaacgcaggacaggatgaattaaggaacagtttattaccaaaaggataaataaatggggatggatagaataagctaaattatttctcttaaagcatatgcgttatgcatagataacattggcagcagcctcattcacagtgagatgtaaaggc

SEQ ID NO: 305991 - DNA, 623 bp, Homo sapiens
tgccttcaactaaacagagctgactctcacaatttttgcctcttccctggatttagaggcacatttgatgaccggtcaacataggggtataaatgcctggtccccctgttcaactttagacaactctgaagggccaactcagcttcataactttacatagaattgaccaatgtcaatattgctatagcatcactctgcccaatcttgctacctttattcctccacargtgtggattctgaaagcattcctacaataaatattctgctcgtaaattcccatctcactgtctgcttcccagggaacccaacctatgacaggcagtgccaggagtctaagagacaaaattctaaaatgagattactggaactcagttagataacttgcagactggcaggcaataaggaccccaaaaatggtgattggtggagcatggacattccttggcatataacagtggagtaattattaaaattctccccagtattaaccaagattgcataccaagaaaggagaaagcattgatatgtgcaatgtaaaagatgaccaagaaatatttgagaattaataattatgaggactacggaactggatgaatgttgctgtgcacaatgaacactgtgaa

SEQ ID NO: 305992 - DNA, 623 bp, Homo sapiens
gggccaactcagcttcataactttacatagaattgaccaatgtcaatattgctatagcatcactctgcccaatcttgctacctttattcctccacaggtgtggattctgaaagcattcctacaataaatattctgctcgtaaattcccatctcactgtctgcttcccagggaacccaacctatgacaggcagtgccaggagtctaagagacaaaattctaaaatgagattactggaactcagttagataacttgcagactggcaggcaatarggaccccaaaaatggtgattggtggagcatggacattccttggcatataacagtggagtaattattaaaattctccccagtattaaccaagattgcataccaagaaaggagaaagcattgatatgtgcaatgtaaaagatgaccaagaaatatttgagaattaataattatgaggactacggaactggatgaatgttgctgtgcacaatgaacactgtgaagatggacaatgaagggctgaaggtgattcatgtccaaccaaagactaaggccagagggtcttcttagaagcatagagagagactaaccccctgcttctacttgaaaggggtggactttggaacaaccaaa

SEQ ID NO: 305993 - DNA, 537 bp, Homo sapiens
taaattttccaaacttgaaaatggtttttrttatctatttgacactgattttcaggttaattggattgttgtcagaaaaaaaagtttgtgcattaaaatgtattgagatttcctgtatgaattatttcactattttacatgcttttgagagaaatacagagtcttaatgaatagcacaagaactgtaaaatgtatccactagattatacttgataagcatgctgctcaaatctataaactagcataattttgagaatagcgtgttttgggatgtgtgtatgtgaatatgtttacgtgtgtgtaaaaattccaactacatttgtagcttatgtgttttccttattttgttgtttgatatattacatagtttaaggctacataattatgtaatataaggttatgaatattgtatctgcttggtatcattttttccttaagtcactatgcactattttttgtcatattttaatatttatttgaatactattttgtcataataaactgactagcttgtattattttaacatttgttaatta

SEQ ID NO: 305994 - DNA, 520 bp, Homo sapiens
ctgtacttatttgtataactcactattctgagtgtttacctggccagcaacaacaaccagtgtgctcacataccatgtgagaacatccatgggggtgtgagcgtgtggggcatcaatcagctcatgcccrgggtgctctgtcagaaggcaaagggtgtagctccaaactgctacagttttcccaccccagctgggctcaggccctattcgggtctcttaggccctagctctgttcttctcccagccaccatttttctgtatagtgagacccacgtatcttcagttttccaagtatttctgttttcttctagtttacatccattctgacaccttatatttttattttctaatgtctccaggcttgctgtgagggacagcgtaggcagatgtagcaaaatttgccgttttgatccaaattgtaagctgccctttatcctttcctgataaacttggatctcttctatcatttataccttctcttcccactgacatgatggatgagtttgacttcttatcactc

SEQ ID NO: 305995 - DNA, 616 bp, Homo sapiens
ctgattatagaaaaacagagcactctattaattgtagtgtgaccttgcatagaaacagagaagcaatgtaggtgtctaccagcaacatcaactagttggatgacagcagacttggcaaagtggactccaccaatcttttccaaatgtttgtccacatactggcaccaaaagagataacgttttcactgacctmtattaaacaggaaatggaataaattaagtgatgttttcatcacttaatttaaatttatacaaagtaccattcttcattctaagattatttctttgtgacattttgatgttgaaatgcccttttgcttagaaacaatggcgaggttaggtgatagcaggcttatttgtttcatttgtggcttgctttgttttgtttgattgaattttaacgtcttacttgataacataaaacgttagcaatcttttttttggtctccacctcctcccttttattttctgaaattattctgttttatgaaatcccatgggagtcgggcagagtaggacactcctggaataatttttctggaattccaggtcttctctcccatcttacaggctcaggaatctgatttattatttctgagagatgacataatcataa

SEQ ID NO: 305996 - DNA, 616 bp, Homo sapiens
ctgattatagaaaaacagagcactctattaattgtagtgtgaccttgcatagaaacagagaagcaatgtaggtgtctaccagcaacatcaactagttggatgacagcagacttggcaaagtggactccaccaatcttttccaaatgtttgtccacatactggcaccaaaagagataacgttttcactgacctctattaaacaggaaatggaataaattaagtgatgttttcatcacttaatttaaatttatacaaagtaccattcttcattctaagattatttctttgtgacattttgatgttgaaatgcccttttgcttagaaacaatggcgaggttaggtgatagcaggcttatttgtttcatttgtggcttgctttgttttgtttgattgaattttaacgtcttacttgataacataaaacgttagcaatcttttttttggtctccacctcctcccttttattttctgaaattmttctgttttatgaaatcccatgggagtcgggcagagtaggacactcctggaataatttttctggaattccaggtcttctctcccatcttacaggctcaggaatctgatttattatttctgagagatgacataatcataa

SEQ ID NO: 305997 - DNA, 616 bp, Homo sapiens
ctgattatagaaaaacagagcactctattaattgtagtgtgaccttgcatagaaacagagaagcaatgtaggtgtctaccagcaacatcaactagttggatgacagcagacttggcaaagtggactccaccaatcttttccaaatgtttgtccacatactggcaccaaaagagataacgttttcactgacctctattaaacaggaaatggaataaattaagtgatgttttcatcacttaatttaaatttatacaaagtaccattcttcattctaagattatttctttgtgacattttgatgttgaaatgcccttttgcttagaaacaatggcgaggttaggtgatagcaggcttatttgtttcatttgtggcttgctttgttttgtttgattgaattttaacgtcttacttgataacataaaacgttagcaatcttttttttggtctccacctcctcccttttattttctgaaattattctgttttatgaaatcccatgggagtcrggcagagtaggacactcctggaataatttttctggaattccaggtcttctctcccatcttacaggctcaggaatctgatttattatttctgagagatgacataatcataa

SEQ ID NO: 305998 - DNA, 597 bp, Homo sapiens
ggctaatgcctgtaatcccagcactttggaaggccaaggtgggtggatcagttgagggcaaaagttcaagaaaagcttggccaatatggcaaaagtccatctctactaaaaatacaaaaaaaaattagctgggcatggtggtgcatgcctgtagtcccagctactctggaggctgaggcacaagaatcacttgaacccagaaaccagagtttgcagcgagctgagactgtgccactgtactccagcctgggcaacagagtgagactctaaacaaaaaaataagaaaaacaaatactgctgawttttgtatgttgattccacaacctaaaactttattggatttgtcatttgtaacagtttggttggttttttgaagaggttttggggttttctatatataaaattgtgtcatcagcaaacagagatgatttctattctctctttcccaattagatgtcttttgtttctctttcttgcctaattgctcaggttaggaattccagtactatattgaatagaagtggcaaaagtaggcatccttgacttgttgctgatcttagaggatctttgccactgagcatgatgttacctgtgggc

SEQ ID NO: 305999 - DNA, 579 bp, Homo sapiens
cgaggttaaaactccagtttgttatttgtgcttgaaagaaatcctccaatgccctcttcctgctgcccctcgaacaaggtgatttaaaagccatgctctcaggaggtactgtaaaagttgggtgctttatgtgtgataaatactacttacctctcaggaagaatttgggagttgggatttccttcccagtgtaaggttctgtgctcagggtaaggttagtacacaatgtatctctgtttttcctactyatttttatgtgcacattttctcagtcatccaatggtaggaatctttcaactggattccggttttctcttggaaagattgatgtgtatgtagatatacattcagtgttgtctgtggaaaaaggaataatcaagaccctcctatccactatgttgctgatgtcaccccacagctagtattatcttaatagcacactgtattatttaggcctggaaatggacaaagtgttgtatttctgctcagtgtctttttgagttgtgttctgtgcttctccactcatctgctaggaattttattcatttatgtcatgggttgaagttcaaagacttaatt

SEQ ID NO: 306000 - DNA, 579 bp, Homo sapiens
cgaggttaaaactccagtttgttatttgtgcttgaaagaaatcctccaatgccctcttcctgctgcccctcgaacaaggtgatttaaaagccatgctctcaggaggtactgtaaaagttgggtgctttatgtgtgataaatactacttacctctcaggaagaatttgggagttgggatttccttcccagtgtaaggttctgtgctcagggtaaggttagtacacaatgtatctctgtttttcctacttatttttatgtgsacattttctcagtcatccaatggtaggaatctttcaactggattccggttttctcttggaaagattgatgtgtatgtagatatacattcagtgttgtctgtggaaaaaggaataatcaagaccctcctatccactatgttgctgatgtcaccccacagctagtattatcttaatagcacactgtattatttaggcctggaaatggacaaagtgttgtatttctgctcagtgtctttttgagttgtgttctgtgcttctccactcatctgctaggaattttattcatttatgtcatgggttgaagttcaaagacttaatt

SEQ ID NO: 306001 - DNA, 579 bp, Homo sapiens
cgaggttaaaactccagtttgttatttgtgcttgaaagaaatcctccaatgccctcttcctgctgcccctcgaacaaggtgatttaaaagccatgctctcaggaggtactgtaaaagttgggtgctttatgtgtgataaatactacttacctctcaggaagaatttgggagttgggatttccttcccagtgtaaggttctgtgctcagggtaaggttagtacacaatgtatctctgtttttcctacttatttttatgtgcacattttctcagtcatccaatggtaggaatcttycaactggattccggttttctcttggaaagattgatgtgtatgtagatatacattcagtgttgtctgtggaaaaaggaataatcaagaccctcctatccactatgttgctgatgtcaccccacagctagtattatcttaatagcacactgtattatttaggcctggaaatggacaaagtgttgtatttctgctcagtgtctttttgagttgtgttctgtgcttctccactcatctgctaggaattttattcatttatgtcatgggttgaagttcaaagacttaatt

SEQ ID NO: 306002 - DNA, 619 bp, Homo sapiens
aatagtctatgcaaaaacgataatttcttgcccttttattgagaatatagcatagtgatgaggctttaaataaatatttatgcctaaagacttaaagtcatttttctgagcatcttagttatatcttgctctctatatatttccttcacattttattggtttatttaaaatgatccttcttgtaacagaatttgtatttataacatttcctcaaatggttctatatctcttagatactttaaaagattggtctagctgctgaataaaaaatgaattgggatatgaggctgagagcagtaaaagcagtccaaagaccataacatttcaaggtttgggcagaaatagagcaagtggagtagattttaaatttatttgaattgaatagatcatgaacgcttaatcatctggaggtgtaggttgatagaaacttgtcaagagtaagtctaatattccaaaagtcaaaaattgggtcattagtgatagaattctgttaaacagaaggataaaaataacratcttggagatggaaagcaaaggatgtcattagttttttggttcatattaagttggagatgcctataggaaatgctggcaaaaatggcaaatatctggctatagg

SEQ ID NO: 306003 - DNA, 551 bp, Homo sapiens
tagcactttacttctcctccagaccactcatccaatactccagccatcccaatgatcattaagtcaaagcattatggataattcacggatgcaattagctctgttataatgtttgctctgaaaatgttgactttgtttcaatacaattgatatgttagggaacaatttgagcataacagaattttgaatttgcttatgtatgcttttgtcagtgagctctaaatctttggagacttttttaaaaaattggaactacatctaatgaaagattacagttttgatcattatgtctcttaaatcatcttttaatctaaaasacttcatacttgttttttaatgatgctaattttattttgaagggggaataaggtcaagttgtcttctagaatttcttagattgttttctaggcttgtccgattatatgctcatggtctaataacacttgttcctctctccattatattttctgtaaattgtcagttatgtctaaagtctccattagaatcaggttagatattttgggaagaacacttgataggtgataaatgtg

SEQ ID NO: 306004 - DNA, 617 bp, Homo sapiens
gcctgccaccgtagaactcatacatcttgaaaataacattgtcaattcttaattatctaaaaattaatctttcttctcctccttccctcctgtttcagagaagaaattatccctagtactttccacatctactgtttctctattattttatctcttgctgcctctcagagaagcacttctctagtgaaagatgttataagagtagaaagagattaactttcaggattagacagacctagttccaactttgatagctcattgctccctaattcctagaactgtgacctyagccaagttactcaaccattacaagtaggaaagggtctacaaaactgttttccccatagcatggaaatttagccaatggttaaccctagccaaatgacttttgcatggtaaattgcatctggacagggaggaattataaatgtacaataaatattttatgataccataggtaaagactttcataaatgcaaaggctcttataactagcatcagccttccaaaaactatacttgtggagttgctacaagagctgttgacgtctgtagaacatgaggcttcaaagtcaggcctatttgcatcttcttgatgtgagtctcattttctaatcc

SEQ ID NO: 306005 - DNA, 617 bp, Homo sapiens
gcctgccaccgtagaactcatacatcttgaaaataacattgtcaattcttaattatctaaaaattaatctttcttctcctccttccctcctgtttcagagaagaaattatccctagtactttccacatctactgtttctctattattttatctcttgctgcctctcagagaagcacttctctagtgaaagatgttataagagtagaaagagattaactttcaggattagacagacctagttccaactttgatagctcattgctccctaattcctagaactgtgaccttagccaagttactcaaccattacaagtaggaaagggtctacaaaactgttttccccatagcatggaaatttagccaatggttaaccctagccaaatgacttttgcatggtaaattgcatctgracagggaggaattataaatgtacaataaatattttatgataccataggtaaagactttcataaatgcaaaggctcttataactagcatcagccttccaaaaactatacttgtggagttgctacaagagctgttgacgtctgtagaacatgaggcttcaaagtcaggcctatttgcatcttcttgatgtgagtctcattttctaatcc

SEQ ID NO: 306006 - DNA, 622 bp, Homo sapiens
catatagttatggaaagcaacttgattataatgtattattagttatctagggttttaagctatttcagggaggtactgccagaatgtcaaagttaataagtagtactattgaacggtttgagcttcaagaaaaattaacggaaattttttctattaggagttttaaataaatgcaagtacaaaatgttttacaactagttttatttttctcttttgacattttaaaaataagtcatacagtttttttccttttgcattagttcctagtgatatataaaatttgtatctctctgaaactcatacttgacaaaaggcgtttaaattatatgatacttagagacaatgagacgtcacagaaactgcattgactatcaaaattttagttagaaaacaatagtttggctgttttcttttcttgttcagcttcttaaagatattcagcaaatgtacatgtttaattaagggagaaactatgtacaatatttattttttttwaaaaaaatctggcctctatttaagcactgtatcaagaaaatcataggttttattcagttttctaatctgatcacaagctgagtgactcgtgtaaaatgtttataataagacttggtacatttgaaga

SEQ ID NO: 306007 - DNA, 622 bp, Homo sapiens
catatagttatggaaagcaacttgattataatgtattattagttatctagggttttaagctatttcagggaggtactgccagaatgtcaaagttaataagtagtactattgaacggtttgagcttcaagaaaaattaacggaaattttttctattaggagttttaaataaatgcaagtacaaaatgttttacaactagttttatttttctcttttgacattttaaaaataagtcatacagtttttttccttttgcattagttcctagtgatatataaaatttgtatctctctgaaactcatacttgacaaaaggcgtttaaattatatgatacttagagacaatgagacgtcacagaaactgcattgactatcaaaattttagttagaaaacaatagtttggctgttttcttttcttgttcagcttcttaaagatattcagcaaatgtacatgtttaattaagggagaaactatgtacaatatttattttttttawaaaaaatctggcctctatttaagcactgtatcaagaaaatcataggttttattcagttttctaatctgatcacaagctgagtgactcgtgtaaaatgtttataataagacttggtacatttgaaga

SEQ ID NO: 306008 - DNA, 549 bp, Homo sapiens
aataagtgttccatttatgttttttctttccttgttggagagcctccaaactgagatctgtggaaagccaattgcttataattttgataagtattattcaaaatgagaaataaaaagactcattggtgagataaatttgggaaacactaggtgatgctaaacagatttttttttcttttacagtacgtcttgcaattctccaacatgaaatgcagtgggagaacgagacaaatacttcacgtgcaatttcacaactctcttttttkaagggccaacttttgagatgggttttgtgcagatgacactataggaaacactgccaacacctaaatataggtcctcttggagctgtaatgtccctggataaaaacagatgcatctaattatctcataagagaggagaattggaaaagaaagatttagtaagtttcctaagatcctgcaagtaatatttccctatacagcttaccctactgtcagttgaaaattggtcatacaacttgtcacagcttgtctgtattaaatccccacactaatcactcctgataa

SEQ ID NO: 306009 - DNA, 549 bp, Homo sapiens
aataagtgttccatttatgttttttctttccttgttggagagcctccaaactgagatctgtggaaagccaattgcttataattttgataagtattattcaaaatgagaaataaaaagactcattggtgagataaatttgggaaacactaggtgatgctaaacagatttttttttcttttacagtacgtcttgcaattctccaacatgaaatgcagtgggagaacgagacaaatacttcacgtgcaatttcacaactctctttttttaagggccaacttttgagatgggttttgtgcagatgacactataggaaacactgccaacacctaaatataggtcctcttggagctgtaatgtccctggataaaaacagatgcatctaattatctcataagagaggagaattggaaaagaaagatttagtaagtttcctaagatcctgcaagtaatatttccctatacagcttaccctactgtcagttgaaaattggtcatacaacttgtyacagcttgtctgtattaaatccccacactaatcactcctgataa

SEQ ID NO: 306010 - DNA, 386 bp, Homo sapiens
cattattctaccatggtgctaataaaatgtctgacctctctgatcagacaagaaaaagtcagcttttggggatctgcagagactgaaaacaasaattaacgccctctctgccttcagaaaatgttgcaccctgaataatatggtgaagactgtaaacctttcctttcccttgggcttggaattgtacccttcccgggaggtacatctgttgaatctgtgttgtgtgtgataaggcctgctgggttaaaagcaaaagaacttacttcctactttcagtgctatctttggaacttaatttagcaattttattgatggagtattggttaagattttactggctggtcatcagattaaagctgatcctgactagatatggttattcagaa

SEQ ID NO: 306011 - DNA, 545 bp, Homo sapiens
aatgaaaaatcaactatttaaaatcagggtgaattatgcaatgatcaatcaaatctccaaaggtatataaccaaaatactattgaagtttagaatgagtgcagacatgttccaaatacccccatgaatagattatctgtgcattagccctaatatgtgaatagaccttgtttattttgactctatgcctctctaatagtgtcattctacaaagttaatattaaagataggccttagctaaaagaaaaaatggaagacaatgtagttayaatattttttttactaaaaactggtaatacctattaatacaaaggaaatatcagctttacggcaatatccatatagacatcaattaatgactttttatagtcattttctcatgtattattcatacatatgtaaacaaagtaagaaaagggaataggaattggaagaacagagaatatagaagagaggtgaagaaaacaagaaagaaagaataaaagagccttcacaaataagctgggtcatttaattttcataagttatttcaattttaaatttaaa

SEQ ID NO: 306012 - DNA, 544 bp, Homo sapiens
aacttaacatatcaccctccccacttttartttacaactttgtgtaacgtgacttctaaccccagccctctgaaactgatccctaagaggccatcaaaggacttcttggtggagaaatcatgtctctacttctcattttttttacatatgcatacacagacacttcatttatcaattttttcttgaaaatctctcctctacatttttgagttactggtctctcttaattctcctactttaaatttattttgttgtttcttcttctattggtcctttaaatacaaacttcttttcctccattgtatcatctgttcctcctccatatacataggcacccacatttcaatcttgtctctaataatcagtaattgtatgacactggtcagatattttagcatgacggcattccccaaataaccataacacctgcattatatggttgctgaagaatcagacaaggtagagaaaatatctacacataggacactttcaatacgtagtcactttattattccactttgttttttttatccctttatagcta

SEQ ID NO: 306013 - DNA, 610 bp, Homo sapiens
tcccacaactaatataagtcacgtcttcacatagtaaatatcaggaatggagtatgcaaaaacrtgtaaatattcataataatttcagtttgcaatatctgttacagtttagaaagtaattttgcatttattttttacattttattaagacaaactctatgaggttcccatttaaaagagtcaaaggtgctaaagcaagacctaaatgatgaggtcttgtcaattcagccacgtctgtctggtccttagaagagagattgtgactgaaatattggaaaaaacagtcaaacaaccaacttttcggaaaaaaatttccccaagctgctgtttaatgatatcttcccctttggtattactggaaatttagagtgcaatacattaaaggtattcaaaagttagaccaaagaaagtgaaatgaatgttgaggaaatagacaattccgaacataatttagtgggggtatttctcgacatatctatactttgcctggttgctaggaagacagaaagatcaagccaacagaaataaatgtactcttcaaaaggagagagtagtggctttaaaacatggctatgaattctttttaacactctgtccatcaagagatgag

SEQ ID NO: 306014 - DNA, 610 bp, Homo sapiens
tcccacaactaatataagtcacgtcttcacatagtaaatatcaggaatggagtatgcaaaaacatgtaaatattcataataatttcagtttgcaatatctgttacagtttagaaagtaattttgcatttattttttacattttattaagacaaactctatgaggttcccatttaaaagagtcaaaggtgctaaagcaagacctaaatgatgaggtcttgtcaattcagccacgtctgtctggtccttagaagagagattgtgactgaaatattggaaaaaacagtcaaacaaccaacttttcggaaaaaaatttccccaagctgctgtttaatgatatcttcccctttggtattactggaaatttagagtgcaatacattaaaggtaytcaaaagttagaccaaagaaagtgaaatgaatgttgaggaaatagacaattccgaacataatttagtgggggtatttctcgacatatctatactttgcctggttgctaggaagacagaaagatcaagccaacagaaataaatgtactcttcaaaaggagagagtagtggctttaaaacatggctatgaattctttttaacactctgtccatcaagagatgag

SEQ ID NO: 306015 - DNA, 582 bp, Homo sapiens
tgacactggtcagatattttagcatgacggcattccccaaataaccataacacctgcattatatggttgctgaagaatcagacaaggtagagaaaatatctacacataggacactttcaatacgtagtcactttattattccactttgttttttttatccctttatagctatctttctctaattctgctctttccaatataattccaaactgactacatctccacctagatatcttcattgctgtctgtctaaaatccatcttacttctctccctcttagtcccatactcctcctctgcacagctttatagcaccctaacagaatcataaatggttattcaccctgactagaaagttaataattsccttccaactagctgtttctcaaaaccagttgatcatgaaatatctcaattgacttctacatagcatccacagtgctatttccaaacattttctattttccttaagttctgaatcccagccctacgattttgactttctgtaatgatactactttataatttgattagagttcttctgatatgagctacctcatcttgctgcaaattcatctcaagt

SEQ ID NO: 306016 - DNA, 582 bp, Homo sapiens
tgacactggtcagatattttagcatgacggcattccccaaataaccataacacctgcattatatggttgctgaagaatcagacaaggtagagaaaatatctacacataggacactttcaatacgtagtcactttattattccactttgttttttttatccctttatagctatctttctctaattctgctctttccaatataattccaaactgactacatctccacctagatatcttcattgctgtctgtctaaaatccatcttacttctctccctcttagtcccatactcctcctctgcacagctttatagcaccctaacagaatcataaatggttattcaccctgactagaaagttaataattcccttccaactagctgtttctcaaaaccagttgatcatgaaatatctcaattgacttctacatagcatccacagtgctatttccaaacattttctattttccttaagttctgaatcccagccctacgattttsactttctgtaatgatactactttataatttgattagagttcttctgatatgagctacctcatcttgctgcaaattcatctcaagt

SEQ ID NO: 306017 - DNA, 574 bp, Homo sapiens
aaatacgaaaagtagccgggcatggtggtgggtgcctgtaatcccagatactcgggatgctgaggcactagtatcggttgawcccgggaggcagaggttacagtgagccaagatcgcaccattgcactccagcctgggtgacagagtgagattctgtcccaaaaaaacaaacaaacaaacaaacaaaaaacctcaggtttaagagtcaaagagacctggattcaattccaaggtttttttggtttttgattttctacttattagtcacatgaacaacttatttttctcattttcctcaactgcaaaacaggaggaaaaaaagataaatgtttgaggggatggataccacattctccatgatgtgcttatttcacattacatgcctgtatcaaaaccatcttgtgtaccctataaacatatatacatctactatgtaacaacaaaaattttaaaaataaaaaataagggaaaaaattatcacctcaaaatactgaagtgctgatttagaatttaagagctttagaatgtgcctttgccctttgccctatcccattccctcttggcaatgtcctca

SEQ ID NO: 306018 - DNA, 602 bp, Homo sapiens
gtttcagtagaaatagtaccagctcttcttctacatctgatagaattcaactgtgaacccatctggtcctgggctwtttttgtttgtttgtttttcgttggtaggctatttattactacctcaatttcagaactcgttattggtctgttcggggattcaatttctccctggttcagtcttgggaggatgtgtgcatctaggaatttatccatttattctagattttctaggttatgtgcatagaggtgtttataataattctctgatggttgtttgcatttgtgtggggtcagtggtgttatcccccttatcatttctgatactgtttatttgaatcttctctcttgtcttctgctagctttgggatttgcttgcccttggttctctagttcttttagttgtgatgctagattgttaacttgagatctttctaactttttgatgtggacatttaatgctatacatttcccacttatcaatgccttagctgtgtcccagagattctgatatgttatatatttgttctcataagtttcaaagaatgtcttgatttctgcctaaacttcattatttacccaaaagtcattcaggggcaggttatt

SEQ ID NO: 306019 - DNA, 602 bp, Homo sapiens
gtttcagtagaaatagtaccagctcttcttctacatctgatagaattcaactgtgaacccatctggtcctgggctatttttgtttgtttgtttttcgttggtaggctatttattactacctcaatttcagaactcgttattggtctgttcggggattcaatttctccctggttcagtcttgggaggrtgtgtgcatctaggaatttatccatttattctagattttctaggttatgtgcatagaggtgtttataataattctctgatggttgtttgcatttgtgtggggtcagtggtgttatcccccttatcatttctgatactgtttatttgaatcttctctcttgtcttctgctagctttgggatttgcttgcccttggttctctagttcttttagttgtgatgctagattgttaacttgagatctttctaactttttgatgtggacatttaatgctatacatttcccacttatcaatgccttagctgtgtcccagagattctgatatgttatatatttgttctcataagtttcaaagaatgtcttgatttctgcctaaacttcattatttacccaaaagtcattcaggggcaggttatt

SEQ ID NO: 306020 - DNA, 470 bp, Homo sapiens
acagtctctctctgttacacaagctgaagtccagtggtgggaacatggatcactgyaggctcaaccttctgggctcaagcaatcctcccacctcagcctcctgagtagctgtgaccacaggcactcacgcaaccaggcctggataatttttttttttttttttttttggtagagacagtgttttgccatgttgctcaggctggtctcaaactcctgagctcaagtagtcctcccaccttggcctcccaaagtgctgggagtacaggtgtgagctcagccaccttgatttcttgatttcaaatttctagcctccacaactgtgagacaatgaatttctgttgtttaagccactcaatttgtgttactttgttatggcagccctagcaaattaatgttccacttctgaatgccctccaggaaactctgttcctggcttctctcttttagaagcagggtggagaatacctgct

SEQ ID NO: 306021 - DNA, 622 bp, Homo sapiens
gctaatccatatgtgtggtcagttcctctcccaactcactgatccagcaattaaatacctccctggggaggatttaaaaatggaacaaaaacctaggattatttagcaaaaaatcctttatggaaccagagaagtcagacagaaatgttctcctcccctcaaacaattagtgtggattttattgtgagggcaatggaaagtaatcacaaaaatgtagccaagagagtaacataatttgcattttgaaggatcatttgggctgccatcgaagaaggatgaaaagtggtagcaggaagactaggtaggatgctgttagaatgagccagatgaaagatgtggtggtcaggccagggtggtcatgatggggatagtgagaagtggctgaatgctattatgatcccaaaagtgtctgagtcaggtctcagtcaattcggaaactttattttgtcaaagttraggatgagcttgtggcacagccttaggaagttctaatgagatgtacccaaggaggttggggtacagcttgctttcatatattttagggacacagaatacatctatcaatacatgtaagatttacagtggtttgatctggaaaggcaggacaactcaaaggtggggg

SEQ ID NO: 306022 - DNA, 584 bp, Homo sapiens
acacttcttttataaggtcattaatcccattcatgagggaagattcctcatgacctaaccatctccccaaaacatccacatcttaataccgttgcattggggattaagtttcaacatgaattttggagggagcacaaacattcaaactatagccgtagctatctttaaaatttgttgtacctattcttgtgggaatgaggaataaatttgaggtgatgaagtttgaactttagctttcttctcctaagacataacaggttttgggyaaaaccattttatttcagcagtctagataaagaataaataaggagaaacggagccagaaactacccacatacttcaggtgcaggataccatgggacacatttatatcaagatttcaggcccagagatttagcacagatagcaagaatattgctagatgccatttcttcaccaaggcagttaacaataactatatacagacatgactacaaactgcattcataaatgccactaaatccaagcaaaatctaagtgtatcaccatctcatttttctttgtgcccaatccaaatatacccatggctacttcaatgatacctg

SEQ ID NO: 306023 - DNA, 605 bp, Homo sapiens
gcacttcaaaaaaataatgtatgaggtcctattctgagcagcttcagcttccaatctcagtgaataaagtagaggaggatttttctgtatattttgtaaatacgatgaagatagagatgttctgacactgctaaaattcaaaggtcccctacctcctctgtccctatttatatttgaaaagaaattatttgcaaggggattatttgcaaatacaaatagatctcaatactcctatattagtctaattaatattaaacacattatttactatccttccaaacaggccagttattacacacrgagaatgagaaagagcatgttattgctgttaaagaccccacagtagaaaaaattataatggcactaaagaaagtatttaagaattcattaagatgtaatcaaatttttgcaaactcatctgttatttgcaatttaatgtatttactgtaacttgcctattactgtgaaacaaatcacctttatgttagctttttttgctgaattttgcttgttgataacatattgaaatcacccagctgttgcatgtatctactccttttagcagaaacttaaatcctcttattttgttatatgtatgaataact

SEQ ID NO: 306024 - DNA, 628 bp, Homo sapiens
caaaattctggtgaaagaaactgaagataacaaacaaatggaaaaacatctcaggctcatggattggaaagaattaatatcactaaaatggtcatatttgccaaagcaatataagaataccaacatcattccttagagaaatagaaaacacaatcttaaatttcatatggaaccaaaaaggagcytgttggtcagagtggtggggaaaactattagggaaaggacacaaaccttctgaaaggtcagaaggttctgcagaaccctaggggagaataactgaaggcagctgttctataaacctgatgcagagggcaagaagtaggtacaagggagtgtagggaaatttatcttaaacaggcctgtttacttatattgaccaggaactgacctttgatcatccacgcgtgtgacattccctgaaagaggaacaacaaatgttaattacctgcaggttgtgttggctccaggttttccgcattgtgcctgcactgaataaaagcaagcagctccagcttctcagggctgctctctgatcactacagccaggcagtcacctagctgctcttacactgcatacctgtgtctgagtactcatttcatctgtcagcgagggtctgcgggacagacc

SEQ ID NO: 306025 - DNA, 521 bp, Homo sapiens
ctctcctttccagaccttcataaattttggggtactcttaccatagtctttgaactggttttactttgggattgccaacttcaatttatcayacatctttgtccaatgaaaactttaccttcttctgcttaaaacccttaataatttccactgcctatgtaccaccttcctttccttttaccaccattgtctttaactactgttacagtctcctaactggtgagtatcaactctgtctcatcccagagcttttgtcataccgaagctagtgtgatattttgaaatcggatcacgtcaatgtctgcttaacacttagaagtactcatacaatcaacccaatccttcttagtttagcctccagtccagcatggtctggcaactgcccattatctacatttatctcatgctgtgtcactttgtgcttttcagcaacactagccttctttcaatgtctcttccccaccatgctctgtcacatcacatggcctttgcacaggctatctcctttgtctgaaaagatt

SEQ ID NO: 306026 - DNA, 484 bp, Homo sapiens
cacagtattccactattccagtaaggctaaggaattttccctctgtgccagttaaacagacatcttaaaagaaaatacagtaattctttactgatacccattcttctcctgctgctgctgctgcttcgaagtaccccatatgtgccaagcactgtgttaaataattcacatacattgtcttgataayaacactctgattacccctgctttacagatgacactgagcatagaaagggttaaataactcacataaggtcacatgtctgttaacttgcaggctcagatacaagtccaggttatttaactcaagaggcatttctttctttcgggaacttagagggacctaattaaagtgaagaccttctgtgaagcaaaagaaattatcagcagagtaaacagacaacatacagaataggaaaaaaaaattgcaaactatgcatccaacaaaggtctaatatctagaatctatacggaacttaaaaaa

SEQ ID NO: 306027 - DNA, 562 bp, Homo sapiens
gttggtaggaatgtaaattagttcagccactgtagaaagcagtttgaagatgtcttgaagaccttaaaacagaacatcctttgactcagcaatgccattactgggtatatattccaagaaaataaataattctaccaaaaatatatcatgtttattgaagcgctattcacaatagcaaagacatggaatyaacagaggtacctatcaatggtggactgaataaagaaaacgtggggcacatacaccatggaatactatgcagccatcaaacataataaaatcatgtcctttgaagcaacatggatggaactgaaggccattatcctaagacaattaattcaggaacagaaaaccaaatatgttctcacttgtaagtgggagctaaacattgggtactaacgtacataaagaatagttacaataggcactgaggattactagaaggggaggatcagagatggagaaggattgaaaaactattgggtactacactcactacctgggggatggaatcaatcataccccaaacctcagcatcatacaatatactcatgtaataaac

SEQ ID NO: 306028 - DNA, 562 bp, Homo sapiens
gttggtaggaatgtaaattagttcagccactgtagaaagcagtttgaagatgtcttgaagaccttaaaacagaacatcctttgactcagcaatgccattactgggtatatattccaagaaaataaataattctaccaaaaatatatcatgtttattgaagcgctattcacaatagcaaagacatggaatcaacagaggtacctatcaatggtggactgaataaagaaaacgtggggcacatacaccatggaatactatgcagccatcaaacataatraaatcatgtcctttgaagcaacatggatggaactgaaggccattatcctaagacaattaattcaggaacagaaaaccaaatatgttctcacttgtaagtgggagctaaacattgggtactaacgtacataaagaatagttacaataggcactgaggattactagaaggggaggatcagagatggagaaggattgaaaaactattgggtactacactcactacctgggggatggaatcaatcataccccaaacctcagcatcatacaatatactcatgtaataaac

SEQ ID NO: 306029 - DNA, 562 bp, Homo sapiens
gttggtaggaatgtaaattagttcagccactgtagaaagcagtttgaagatgtcttgaagaccttaaaacagaacatcctttgactcagcaatgccattactgggtatatattccaagaaaataaataattctaccaaaaatatatcatgtttattgaagcgctattcacaatagcaaagacatggaatcaacagaggtacctatcaatggtggactgaataaagaaaacgtggggcacatacaccatggaatactatgcagccatcaaacataataaaatcatgtcctttgaagcaacatggatggaactgaaggccattatcctaagmcaattaattcaggaacagaaaaccaaatatgttctcacttgtaagtgggagctaaacattgggtactaacgtacataaagaatagttacaataggcactgaggattactagaaggggaggatcagagatggagaaggattgaaaaactattgggtactacactcactacctgggggatggaatcaatcataccccaaacctcagcatcatacaatatactcatgtaataaac

SEQ ID NO: 306030 - DNA, 612 bp, Homo sapiens
ttcactacacacatatatacatatacatacataccatacagtatatatacatacatatatatgtgtgtgtgtctatatacatactgaaaacctactacaggtgtggtttattgcactagagacctctcactgtggtacagctctctttgtaagagaactgtgttctctacagactctttgttctggagaggagacagaatgagtccatacaaaagcatggattttcaggtggatggarcagctccttaatttggaaactcataaagttatggacagtgtaattcttggcaagtgaaaggaaagtattctttcactgttttatctaggagatagaggtgttctttgaaaatgttgctaggtggcataaaagtctgaattaaaaacatattagaaaattcacacccctctgatagtagcagcgtcagtatcagaaaataagggtgagaaaagtaggcagagagcacaagagagtaatttctagaaatgggggtctaagtgaatgtgaactcagtgtttgttgagccatcaacccacataggcagggctgtagtttacatcatagtggctagcgacttggagggcagtttccttgtacacaaatgacaggattaa

SEQ ID NO: 306031 - DNA, 600 bp, Homo sapiens
taaggtaagggtggtagaggattgtggaagccaaggttcttgtcatgtagatgaagtcttccgggtagcaggcctcagaaataatagatgtgaatgtcttatagcagcaatttccaatttgytgtcatcagggaccagtttcatagacaatttttccatggacaatgcggggatggttttgggatgaaactgttctacctcagatcatcaagaattagattctcataaggagtgtgcaacctagatccctggcatgtggagttcacaatagggttcatgctcctatgagaatctaatgccgtcgctgatcagacaggaggtggaactcaggtggtaatgcctgcttgcctgctgctcacctcctgctgtgtggcccagttcctaactggccacagaccagaccctgggggttgggcacccctatcttataggaccttaaaaggtgtcatactttctggaaaagaccaaataagggaaggagattttctacagaatgtaaatgtcccccacaagagacagctttggaaggcaatttcaaaatatgtcaaatatattttggagggtaaaatactttgatgttccccagggcccgctatctgt

SEQ ID NO: 306032 - DNA, 638 bp, Homo sapiens
aattttacaacccaagaatgtttctctcaaaaacctgggcaccatctttttgaaatgtattcatcaaagaagatagcgctcccatctcccattctgtctaggagagtatgttgctaactcttgtagatgtcttgctccaagatgcaaaactacctcctgtgggtaaggccaactagaaaatacaggtagcctaagatcaccgccaccaccatcatggttcttaaaatctctctggcccttcatttcagcatagctgcatactcagtyttggtgtgctctctcccctgttgctggcaatagttgacataataaactcaacttctttttgccctttctgtctaatgtgatttatttctttaacacattgctgctcctacgcaaagaaaagaaaaagggatttacacttagaatgctgctgtgtctgatccttccttgacaggtgcctttgtaggttctgccacttgcttcagctctgtcagggaatggggcacaacaccccttcatttgggcagtcatcaaactctaccctctcccagtctgagatgccatgttgctcttccttttcttcttccttcttctcctcctttcttccttttcctcctccttctttttcttcccctatctctctcttaccagcc

SEQ ID NO: 306033 - DNA, 583 bp, Homo sapiens
gtttgttccaggaaaggggtcccaatccagaccccaagagagggttcttggatcttgcacaagaaagaattcagggtgagtccgcagtgcaaagtgaaagcaagtttattaagaaagtaaaggaataaaagaattgctacgccatagacagagcagccccaagggctgctggttgcccatttttgtagggacaagccccacagggtcggtgggtctctccccgtgttcagagatgagagagtgtagaaataaagacacaacacaaagagataaaagaaaagacagctgggcccgggggaccactaccacaaatgcacggagaccggtagtggccccgaatgtctggctgtgctgttatttatgggatacaaaggaaaaggggcagggtaaagagtgtgagtcatctccaatgataggtaaggtcacgtgggtcacrtgtccactggacagggggccctttcctgcctggcagctgaggcagagagagagaggagacagaaagacagcttatgccattatttctgcatatcagagacttttagtactttcactaatttactactgctatctagaaggcagagtc

SEQ ID NO: 306034 - DNA, 552 bp, Homo sapiens
tgattttaaaaactgttagcaaagatattgaagtaggatggaagaacaatgtgaggatgctgacatgagtgaggggctcacaaggaatcaatcagaggagtcacaactgacagcagggggtagtattcctgcagcaacttagcactcaacccagagcagagggcatgatagagaaaagtagagtgaaacctagactcagaaattacatatctgcaagtgcagttttctaacacctagttcagtgcttccagccatctggaaacaagaataaaatgcctgcaattaactaaactgggctatatagatacaaacaggatatcttgagttaaaaaaaaatagtgtaggaatggaaattaaatttagttgcttayatctttgctgttatacaatcagcaaagaggggtttcaacttcgttacttaattttggtgagttgagaaacagtaaaatatacaaagaaatcacctaaacttccaatccagtagagtgagtgctgtcaattctcagagaaagtcactgttttagattgtgtaggctttgcttatgtcccctt

SEQ ID NO: 306035 - DNA, 537 bp, Homo sapiens
tgcttacatctttgctgttatacaatcagcaaagaggggtttcaacttcgttacttaattttggtgagttgagaaacagtaaaatatacaaagaaatcacctaaacttccaatccagtagagtgagtgctgtcaattctcagagaaagtcactgttttagattktgtaggctttgcttatgtccccttcatcagtagtttatatttcttccagggatttcctctatttatttgtaattttaaaaattcagttttgaactttatctgaccagtctcctgctacaaataaaagataatattttcaaaatttattaatttcagcatacacacacatacacacacaaaacatgtctcaacaataagacctaaaataatttgaaagttataactaagctagaatgtatggggaaaagacagaaataaaggaggaaaaaaagacattgtttatttgcattttaatagagtaagaatcccattttgaaaactgctgcagtttcattttaaaccaagccacttttgaatatacacgtttcagcat

SEQ ID NO: 306036 - DNA, 538 bp, Homo sapiens
ggactacacaatattgtccgggattaaaagcacaggtgtgcactccctgccccacctccagggagccaatcttctttagcatggccccatcttaaatccagagccatctctggagtgcatgctgctctgggggccagtagccaatgcacctttacagcactagggcttcatttttattatgccagaccaacatgggtttctgaatgccacaactccagccatgtggagcttgagcccaggattggctgtaattctggtcctgcacagcaaagaaaccaatccctgctataattaccaatcactgctataattttggcaaataatattccatgcaaatgaagatgtatatatataaaccaatcactgctataattttggcaaataatattccatgcaaatgaagatgtagataaacaaattcagtaggtttgcaggacacaaaattaatacatagraattagtaatacttctatacatgaaaaacaagctaaaaaggaaatcattaaggcaaccccatttattgtagccacaaaaaata

SEQ ID NO: 306037 - DNA, 599 bp, Homo sapiens
taaaatgcactgaacagcaaaggaaacagcagactgaagagacaacctatggaattaaagaaaatatttgccaactctacatctgacaaggagttaatatccagaatatataaactcaaactactcaatagctatatatatatatatatatatatatatatatatatatatrtgtgtgtgtgtgtgtgtgtgtgtgtatgtatataaacataattttaaaacaaaaaattgacctgagtagagattttataaaagaagatatacaaatgaccaaaaagtataagaaaaattgctcaacatcataatcatcaagcaaatacaaatcaaaatgagatatcatctcactccagttcaaatggctattattattatcaaaaggacaaaaaataacgcatgctggcaaggacatagagaaagggaaacactggtacacggttggtaggaatgtaaattagtacagccattgcaacacagtgtattgaaattgctccaaaaactaaacatatatacccctgtgatccagcaatcctactactgggtatatattctaaaaaaaaagagatatctgtatattgaagagacagtttcaccttcatatt

SEQ ID NO: 306038 - DNA, 570 bp, Homo sapiens
atagaggaaattctagtggacgttggtctgggtaattattttggggataagatctcaaagcataggcaacaaaagcaaaagtaggcaaatggaattacatcagctaaaatgcactgaacagcaaaggaaacagcagactgaagagacaacctatggaattaaagaaaatatttgccaactctacatctgacaaggagttaatatccagaatatataaactcaaactactcaatagctatatatatatatatatatatatatatatatatatatatatrtgtgtgtgtgtgtgtgtgtgtgtatgtatataaacataattttaaaacaaaaaattgacctgagtagagattttataaaagaagatatacaaatgaccaaaaagtataagaaaaattgctcaacatcataatcatcaagcaaatacaaatcaaaatgagatatcatctcactccagttcaaatggctattattattatcaaaaggacaaaaaataacgcatgctggcaaggacatagagaaagggaaacactggtacacggttggtaggaatgtaaattagtacagccattg

SEQ ID NO: 306039 - DNA, 570 bp, Homo sapiens
atagaggaaattctagtggacgttggtctgggtaattattttggggataagatctcaaagcataggcaacaaaagcaaaagtaggcaaatggaattacatcagctaaaatgcactgaacagcaaaggaaacagcagactgaagagacaacctatggaattaaagaaaatatttgccaactctacatctgacaaggagttaatatccagaatatataaactcaaactactcaatagctatatatatatatatatatatatatatatatatatatatatgtgtgtgtgtgtgtgtgtgtgtgtatgtatataaacataattttaaaacaaaaaattgacytgagtagagattttataaaagaagatatacaaatgaccaaaaagtataagaaaaattgctcaacatcataatcatcaagcaaatacaaatcaaaatgagatatcatctcactccagttcaaatggctattattattatcaaaaggacaaaaaataacgcatgctggcaaggacatagagaaagggaaacactggtacacggttggtaggaatgtaaattagtacagccattg

SEQ ID NO: 306040 - DNA, 485 bp, Homo sapiens
gaaaaaaattacaggaaaagagggtaaacaggcaagcggaaaccaagcataccttattttggaagtcatgtaaataaagtttgaattttattatcagatcactagtttacagtccttttcttatttaggaaaaagcaatgaatgatgctaattggtaatggagattaggttttgaatatcctaagtcagtcaaggaagaaattacacacatacctgatgtgttgttttcagataaacatagataactggtatttattaataaactattaggttaaatttataatttatattgctagggaatttggtaaataatgcctagaatttagargaagaatgaaatgaacagtttctagcataaaaaaagaaaagccatacagaagttccttgagaccggaatatatctctggaactagtgtcaagaaaaaagtagagcctggcaaagccatagtcactggggaatatctaccctgacatctatggttgct

SEQ ID NO: 306041 - DNA, 412 bp, Homo sapiens
aatgaaatgaacagtttctagcataaaaaaagaaaagccatacagaagttccttgagaccggaatatatctctggaactagtgtcaagaaaaaagtagagcctggcaaagccatagtcactggggaatatctaccctgacatctatggttgctgctttcaggtagaggacattaagtggtcagttatttacaaarggagtagaataaagtagaatattgtctgcagggacttactagcaaactgcctgggatctaaccctggttttgcaaatgactatgtatataacctaagatattttgattctcagtgtccgtttctatagaataaaaataacaatagcatctactttatcaaaggattattgtgagaattaagttagcatctgtaaagacaaacaatatatggagtaca

SEQ ID NO: 306042 - DNA, 554 bp, Homo sapiens
ctgaacaaatagcgttcatatggattaagattttgattagacattggtggaggggcagagagaagaagtggatrtggcctctcaaatcccttgggaaactatgtgcataattacactctttattcattttcagtcagtaggcattttctctctcacaaaatatgtgaactttgatttagtaaggtataagctagataagtggatgtcctgattatcatccttagtgtagaaagagacattttagagcaatcaattttgaagttttagattaaaataatatgctaaaatattataaaaaactgaaattttagtaatcatgtaacaatcgctttgcatttgcttgattatatcttcttttacaaacatagacaaaaatatattttaaggataaattaagagacatgtttttacaagatcttataataatcattttctttgtatatttttaaacaggaatgaaaggtatttacatgaaaaatattttcatgattccaatttactttagcagtcgctgataacaatttcaaaattttaagggcaataactggtcctct

SEQ ID NO: 306043 - DNA, 644 bp, Homo sapiens
acgactaaactcttgaaatgctcaataacaatggtgactacttcaaacataatgttcagtgaagcaagccagatttcgcttatgaatattgaatagattgtttatgaatattaaataaatgtaactataaaatatagataatatattttataaaagagacaattctctactttatagttgcatttatttaatattcataagcaattcaaactaacctgggttttataagttggggtagttctcatctttgggagtttagtggatggaagcgggtawaggtgctattcaactttgtacaattctattgagtggcattcttatgtcttatgtattttaagaatacaacatttaaatcaaaagtgtattaaaaaagaaaagattgatgtattacaaaatgttagtatttggtcagtttgagtattatattttctacaaccccttatatacttaatattacacacttcaatatcaaatggaatcatataacatttgcttcattttgtcttatgcttcatttgccaatataatattaaggtagatggagataatatctaatataggattgaataatcagctggtcattgtgttaatttgcatgggaaatattcctaatctcctggctgagcatcactggacaaagtcca

SEQ ID NO: 306044 - DNA, 631 bp, Homo sapiens
tgttctgatttccataatctgtgaatatatcaccttacatgataaaatgaagaattttgtgatagggagattatcctgggttagccaaattgacctcatttaatcacaatgttataagaaaaatgttacataaattcaatttagtagagtttatttgggcaaacaagctgctatggtttggatattcgytccctctaaatctcatgttgaaaggtgattcccaatgttgcaggtgaagccttgtggtaggtgattggatcatggggatgcatcgcatgaatggcttagtgccagacctttggtgacaagtgagttctcctgagatctggttctttaaaagtgtgtggctttaagccctgcatgcaccctgcaaacacatacctatgtatcaaggctacacgttaggcacttgtaccctggaacttaaagttaaaaaaattataagaataaaataaagtaaaaaaaagtccacaaaggaaaaaaaaatgtgtggctctcccccacctccttgctccttctctcatcatgtaagactctttatccccctttgtcttttgccataattgtgagcttcctggagtcctcaccagaagcagatgctagcaccatgctttctgtaaagcctacagaa

SEQ ID NO: 306045 - DNA, 631 bp, Homo sapiens
tgttctgatttccataatctgtgaatatatcaccttacatgataaaatgaagaattttgtgatagggagattatcctgggttagccaaattgacctcatttaatcacaatgttataagaaaaatgttacataaattcaatttagtagagtttatttgggcaaacaagctgctatggtttggatattcgttccctctaaatctcatgttgaaaggtgattcccaatgttgcaggtgaagccttgtggtaggtgattggatcatggggatgcatcgcatgaatggcttagtgccagacctttggtgacaagtgagytctcctgagatctggttctttaaaagtgtgtggctttaagccctgcatgcaccctgcaaacacatacctatgtatcaaggctacacgttaggcacttgtaccctggaacttaaagttaaaaaaattataagaataaaataaagtaaaaaaaagtccacaaaggaaaaaaaaatgtgtggctctcccccacctccttgctccttctctcatcatgtaagactctttatccccctttgtcttttgccataattgtgagcttcctggagtcctcaccagaagcagatgctagcaccatgctttctgtaaagcctacagaa

SEQ ID NO: 306046 - DNA, 559 bp, Homo sapiens
ttctggagtggatctctgctatagttcttctttacagaagaaataaaaacacagctattcaacaaaattagcaatgatatattttataatacctgctcttatttaaataagccacttagttaaattattcaaaagtacaaacatgatttttaaattattaaaaacattgtgattctgaggtagggggatcactcaaacttctgaagccagaagtttgagactagcctgggcaacatggtgagaccatactcargaattaagaaagaaaaaaaatagccaggtgtggtggctggagcttgtagtcccacctacttgggaggctaaggcagaaggctgccttaagtgcaagagtttgaggctgcagtgagctaggattgtgccactgcactccagcatggttaacagactgagatcttgtctctaaaataaataaataaataaacaaataaaattatttaaaatgttatgtttaaaatatttgccaaagaaccaaagcgccacaagcaaaaagagattcaagtgctgttataaattacttacatgttttaataaagacaca

SEQ ID NO: 306047 - DNA, 589 bp, Homo sapiens
tgtgcctccagatttagacttgaaacttgctttggatattgaccgttgttcgtctcaacacccgaaaaagtttgggaggtcacttgtatcttcctgcttgctttcttgtgcctctgccatcctgaagtcatgcccaggctaacctgctgaagggtaagaaatgcatggatcagagtcaaattgtcccatttgtcccagctaatgtcaactgacagatccactgacagccagacgtgtgagcaatctcaggcaagattacttcctagctaaccaccctagataagtaaatgatttattattatataccactttggycttccaagaattgtttttgttgttgttgttcttattatttggttttatagtgtcaatagataatgaatatcaaaatattcacacacagaaaatgatggtgttaattttatttgcaagtgtcttccttctttcagggaccctccaaccttataccattaaatcacgagaatagcatttttttctaaagaacttggcaataattaattcaagcatgattcaactacattaaattaacttgaaaagatcacaatagcagttagagaattggcagcgt

SEQ ID NO: 306048 - DNA, 571 bp, Homo sapiens
tatctcatgctgttctaaggtagtgtttaatctttttttaattttttttcaggacttagttgtctctgagtctaacattccagtactgagctttcaaatgtttaggcatgaaactcatttccttttagtctttataccgtaaactgatcaatacaactcagcatattctgacctgacctgatcatagattcataaatttgagtcaaatcccaacatagtttttgaagctgcaaatattgttgttagaattttccctgaagtagggtcagagagagaagctagcctccctagctctctggtagtaaccttagaatgtaggttgtcacaggttatcttagttgagagatcactgacctatttattcatgattttcatcaaattgttttttctatacgcaaatgttcgatctattccatgtttgtcatgaatttatcattaattcttctagctttcctacrcactgtatgcagcatcattttttaatgactttaatctttctccaaattgctccctttgattttactatgctgttatctagcaaagaagcctgtgttcttcaacataaaatctt

SEQ ID NO: 306049 - DNA, 617 bp, Homo sapiens
aataaattctagagattactcttcttatccctcttctgttctcttttgaccaaaattcctagaggatatgatcttgctggttaccaagctgttctagctaaatgtgtggttaggtgaaaatagagatgaataaatgtaagaccaatgataagagtgagttaaagaagtgtactattatggatagagattattgagaaggacactatatttttctggttataggataatggttttgaatttagcaatatgctagtcttctgccatattaaatgattctaaaacagatacacattcaaaaacacatcaaaatgtatacttagacttttgacacaataatgatttaataatatgaataaatattgcaaactttatggctccatgtccttaaatctttagaagtaagcaactatctccctttccaggtatacatgtaatcaagcagctttacaaaataaattacatttttacctatgaaacrttcgtgctgacaattatccttcactactcacgccaatttgaacacctagtgcactcagaatttgagttgtacacatagaatacactaaatagattactgcttcaaagaatacattaaaattatagatcacacacaatat

SEQ ID NO: 306050 - DNA, 541 bp, Homo sapiens
cagcaaacttctgcctggccatccaagaatttccatacctcctctaaaatctaggagaaagttccaaatctcaattcttgacttccatgtacccgcaggcccaacaacacatgcaarttgccaaggcttggggcttgcaccctctgaagccacgactcgagctgtaccttggctgctttcagtcatggctggagtgactggatcgcagggcaccaaatctctaggctgcacacagcacaggaccctgggcccagtctataaaaccattttttctgcctaggcctctaggcgtgtgatggtaggggctgctgtaaaggtctctaatatgccctagagacattgtgcccattcagcttctcattacttatgcatatttatgcagccagcttgaatttctactcagaaaatgggattttcttttttatcacatgggtaggctgcaaattgtctgaacttttatgttctgtttctcttttaaaactgaatgcctttaacagcactcaaatcacctcctgaatacacgctgcttagaagtttcttc

SEQ ID NO: 306051 - DNA, 635 bp, Homo sapiens
atgtattcttggtttaacattattatttggttataatatttattattgatttaacattattgtcaactttgtaaatttctattttatatggagttttatttcataagcatgacacttatgaagaagttaatatattggtattcagtaaatattttatattttatcatatctcaagattcctgtgcatttccaactaacttcacagttattctaaaatctttatatcagaatatcgctaaaagcctctagataggtacaatagatatacaaatgtatattttamcagcatatttgtaaaacaggtacagcttgccttagatttataatatcatgagaataagcacatagtagagaataagcaaagaaagtgcaattcattttaaaagagattatataagataaaacctaattcatgctgtattctgataaaatataaataatttcctagtaaatcatgcaaatgacaaactgcttaaacataaatacaatcaagagtaaaagagaagtgcttaaagccaaattgaaacaaaccaacagaaatgaatccaaatcagctatgtatgtttgaagtcttgagttggaaatagtaagcaggctgtggttcagaatatttataaataaatgtcatcttacgt

SEQ ID NO: 306052 - DNA, 635 bp, Homo sapiens
atgtattcttggtttaacattattatttggttataatatttattattgatttaacattattgtcaactttgtaaatttctattttatatggagttttatttcataagcatgacacttatgaagaagttaatatattggtattcagtaaatattttatattttatcatatctcaagattcctgtgcatttccaactaacttcacagttattctaaaatctttatatcagaatatcgctaaaagcctctagataggtacaatagatatacaaatgtatattttaacagcatatttgtaaaacaggtacagcttgccttagatttataatatcatgagaataagcacatagtagagaataagcaaagaaagtgcaattcattttaaaagagattatataagataaaacctaattcatgctgtattctgataaaatataaataatttcctagtaaatcatgcaaatgacaarctgcttaaacataaatacaatcaagagtaaaagagaagtgcttaaagccaaattgaaacaaaccaacagaaatgaatccaaatcagctatgtatgtttgaagtcttgagttggaaatagtaagcaggctgtggttcagaatatttataaataaatgtcatcttacgt

SEQ ID NO: 306053 - DNA, 570 bp, Homo sapiens
tgaccttttcttctactctgctatttcgcatgtaaaaacaaatgtagatttactgaggtttatccgggtctcacaagaatgtaaccatttgtttcactgtctgccttccctctctatttcttccttcttgcttgctcttcgtcctttaaatactgaagttcccacaacctgctttggaaaaagcacaggtcatagacacccgttatatggtttggctgtgtccccacccaaatctcatcttgaattcccacatgttatgggagggagttggtggaggtaattgaatgataggggcwggtctttctcatgctgttctcatgatagtgaataattctcatgagatctcatggatttataaggcagagttttcctgcacaaactctctttttgcctgctgccatccacttaagatgtgacttgctcctccttgccttccaccatgattgtgaggcttccccagccacgaggagctgtaagtccattatacctatttcctttttaaattgcccagtcttaggtatgtctttattagcagcgtgaaaatggactaatacaccttgtgatttatgt

SEQ ID NO: 306054 - DNA, 570 bp, Homo sapiens
tgaccttttcttctactctgctatttcgcatgtaaaaacaaatgtagatttactgaggtttatccgggtctcacaagaatgtaaccatttgtttcactgtctgccttccctctctatttcttccttcttgcttgctcttcgtcctttaaatactgaagttcccacaacctgctttggaaaaagcacaggtcatagacacccgttatatggtttggctgtgtccccacccaaatctcatcttgaattcccacatgttatgggagggagttggtggaggtaattgaatgataggggctggtctttctcatgctgttctcatgatagtgaataattctcatgagatctcatggatttataaggcagagttttcctgcacaaactctctttttgcctgctgccatccacttaagatgtgacttgctcctccttgccttccaccatgattgtgaggcttccccagccacgaggagctgtaagtccattawacctatttcctttttaaattgcccagtcttaggtatgtctttattagcagcgtgaaaatggactaatacaccttgtgatttatgt

SEQ ID NO: 306055 - DNA, 614 bp, Homo sapiens
tggtcttgctgtcacccaggctaaagtgcagtggtataattacagctcactgtaaccttgaactcctgggctcaagcaatcttccagcctcagcctctctagcagctaagactactagccagagacaccttatttgactagttcatttttattctttgtggagacagggtctctctatgtggcctaggctcgtttcaaactcctggccacaagcaatcttgctgcctgaggctcccaaagtgctgggattacaggcgtgagctgctacacccagcttttctctttttttttttttttttttttttgagacagagcccgccctgttgctcaggctggagtgcaatggtgcaatcttggctccctgcaacctccgcctcccaggttcaaacaattctcctgcctcagtctccagagtagttgggattacaggcgctcaccaccatgaccggctaattttttgtrtctttagtagagacagggtttcaccatgttggccaggcttgtctcgaactccttacctcatgatcagcccgcctcagtgtcccaaagtgctgggattacaggagtgagccaacttacctggcctcacctgttttaaaataatatagaaacaa

SEQ ID NO: 306056 - DNA, 539 bp, Homo sapiens
agacgaagatgcttgcttttaccactcccatgcaacatagaactataagtcctagccagggccagcaggcaagagaaagaaataaaagacatccaaattggaaagataaagctaacttacctctgtttactgatggcataatctcatacttataaaatcctaaacacttcttcaaaaaactagattcgataaatgaattaggaagtgtcaagatayaaaatcaacatacaaaattcagtgtttttttaatataccaataacattcaaggtgagaaagaaatcaagaaagcaatcttgtttacaatagctacaagaaggaaacacctggaaatatatttaaccaagaaggtgaaagagctctagaagtaaaattacaaaaacaactggtaaaagaaattgcagatgacacagacaaatggaaaaatatcccatgatcatagattggaataattaatattgttaaaatgaccacactgcttttttttcttttccctagcaacaatgttgatacctagtaatatgttatcttattactatct

SEQ ID NO: 306057 - DNA, 508 bp, Homo sapiens
atgtaacgttactaaaaagccacttgtgtctgagaggctctgtgcacctttaagtagagttcacaggagtcacaaactctatataaatgacgttaaagtcrtttgtggtccctttcactttctgtgacgattttgctaagatttataatcccactgtttggaagccaaccttcttgactattcaatgcatagtaagataaattgctatttttctttaccaatgaaaggagctgccttttaattttctacatccaggctgtgacactagctttcaaatctttttcattttgttttgttctcacttttttttttccctagaaactattcttggcacagatacttgtttcacagaagtcccataagatgttgcattttactgaataaggttaaacaatacatcacactcaggaaatttgtattgtaacagaaacatcctattttttaatgtctttgtaactagacctactcaattcctcaaaaagaaataaggagtgtagaggaaaggcaa

SEQ ID NO: 306058 - DNA, 508 bp, Homo sapiens
atgtaacgttactaaaaagccacttgtgtctgagaggctctgtgcacctttaagtagagttcacaggagtcacaaactctatataaatgacgttaaagtcgtttgtggtccctttcactttctgtgacgattttgctaagatttataatcccactgtttggaagccaaccttcttgactattcaatgcatagtaagataaattgctatttttctttaccaatgaaaggagctgccttttaattttctacatccaggctgtgacactagctttcaaatctttttcattttgttttgttctcacttttttttttccctagaaactattcttggcacagatacttgtttcacagaagtcccataagatgttgcattttactgaatamggttaaacaatacatcacactcaggaaatttgtattgtaacagaaacatcctattttttaatgtctttgtaactagacctactcaattcctcaaaaagaaataaggagtgtagaggaaaggcaa

SEQ ID NO: 306059 - DNA, 629 bp, Homo sapiens
gcatttaaacagcttatcttactctaatttaaacatgctgctttaaaaacttttttattaaggaatctagcatacttagagctgaaaataatatttctgccagggtatgcaaaggaatactgtcctgaacagtgcattacagtgtttcatgcgaagtgaaagtcacaaaatgcccagcatagcatcttctagaaatacagcatttgttagacatagattgatagcaaaaaagaaatgaatacatattctcccagggaattagagcatctgcaatacagcctgagagaaagataaacagttgcasagcctgacaaattttttctgacaagcatatgatgaaatataagaaagtttgtctaggtcaaaaagccaatacttccttcaacaaaaccaaacatcacagaaggatggatagaccacaagatcagatatatatgactaattttctaattttcaaaatcaattaaaaaatctctttgtcctggaggtaagtactcatgcacacttgatgtcagatcctaagaacttctgtgagaattcctaagtattatcctaatcaattttgaactgcatagcctgtcaaggttttccttcctgtagttgaatctgagaatctatgaatctgtaaa

SEQ ID NO: 306060 - DNA, 422 bp, Homo sapiens
aaatgttactaagggtaacatacagaaataaatgggcaaagtagctggcatatttgagttgcactgtgattgtgcaagagtaggctccaagagatgcagaatgaaagtgaaaatggttgataagatgaggatgaagacgtttcagtattaattgtatagtaaggtaaggagagatgagaattacatacagtttaattattttttwaatttatttatttcaggtgatgtaactttggaaagatgttgcccaaagaccagacacatgtatctgaatgtctaatgccaacccagggaaaaggacagaggggaaaagaaatttggaatttctcactttagattaaatgtttcaaattgagaggaagcactgtttttttttaagggatactacctagataaagtacatttaattttaaaacacagat

SEQ ID NO: 306061 - DNA, 623 bp, Homo sapiens
ctcctcttttttgctcattatctacattcacacagttttcaaattgttaagtttttcataggcaatatttttcaaactgatcaataaattctatccattgtctttgtcacctctaatttagattcccgtatatctcaccagaatagggataatatagcttcatgcttttttttcaataccctttctctcattactccaattcttctttctcagtgctgctattctttgcttttcacatagatttatgtcatatttttctttattgaaatatatttactgttactgtgttgctcactgaattcatttccggttacaaaatggacagtgcccacctcaatccccattcctatatgcacacacactattaagccattttaacttccrctgtgccctcaataaaactgtttttttctgtttgttcttcattgctttcaaacttttatgccttcccatttttctcttctacgaaaatgccttcaaaacacttcttatctcgcttaaaccaataaatcacctccttaaagtatatcccagcccagttatattaatctcttctaggacaattgagagcctattgtttttatttcattataacactattacttcgactttttaaaatgggt

SEQ ID NO: 306062 - DNA, 621 bp, Homo sapiens
ggcctgctgccacaggaattgtgacagacatgggtacagatacggagaactagaaccttgcttttaagaagcttttttttcaagtaaaaaaaatctcaggaatattcgttcattttatcaaacacgggtgtggtggctcatgcctgtaactccagcacttttggtggccaaggtggaaggatcacctgagctcaggagttcaagaccagcctagacaacacagtgagagcccatctctaaaaaaaaaaaaaaaaaaaaaaaaaaaatcagccaggaagtgtgggggtgtgcatacctgtagtcccagctactggagaggctgaggtgggaraatgcttgagcctgggaagtagaggctgtagtgagctgtgatcatgccactgctctccaacctgggtgacagagtgagaccccatcttaagagcaaacaaaaccaaaccaagcctgacaaatcagactgcatagtattctgcaattcagttaatctgttgtttaattagattgttggttgttctcttttcagctgtggatgtagctgttgtgaacattgttggagtcgtcattcttctatgttacttacatgtttgcatactgttctgtttttgaaaaatatttccaggg

SEQ ID NO: 306063 - DNA, 621 bp, Homo sapiens
ggcctgctgccacaggaattgtgacagacatgggtacagatacggagaactagaaccttgcttttaagaagcttttttttcaagtaaaaaaaatctcaggaatattcgttcattttatcaaacacgggtgtggtggctcatgcctgtaactccagcacttttggtggccaaggtggaaggatcacctgagctcaggagttcaagaccagcctagacaacacagtgagagcccatctctaaaaaaaaaaaaaaaaaaaaaaaaaaaatcagccaggaagtgtgggggtgtgcatacctgtagtcccagctactggagaggctgaggtgggagaatgcttgagcctgggaagtaraggctgtagtgagctgtgatcatgccactgctctccaacctgggtgacagagtgagaccccatcttaagagcaaacaaaaccaaaccaagcctgacaaatcagactgcatagtattctgcaattcagttaatctgttgtttaattagattgttggttgttctcttttcagctgtggatgtagctgttgtgaacattgttggagtcgtcattcttctatgttacttacatgtttgcatactgttctgtttttgaaaaatatttccaggg

SEQ ID NO: 306064 - DNA, 411 bp, Homo sapiens
tctcaataggtggagtggcaaagtcacagtgtaaaaaaaatcatgtggtatggaagattgtaggggttatttctggaaagtacaatctgtgcgaatttcacctgtgactgatatagcaacttcgttgtgggagttatttgttcagtcatggttggaacagatattttttgagtgttattatatgctaggcaccattctaggctctagggatacagtagtggggaaaacaaagtccctgccctcatcatagttgtattctagtaggggagacagataatraatagatgttacatacaccactggatagcgatgagtgctgtgaagaaattcaggcagagtaagggtgcagaaaatgacacagtgtagatgttatttagatagcatggtaaaacaaacaaacaaacaaaaaag

SEQ ID NO: 306065 - DNA, 577 bp, Homo sapiens
gatcacttgagcccaggagttcaaaatcagcctgggcaacatagggagaccccatctctataaaaattttaaaaatcagtggcgggtggtggtgcatgcctgttgtcccagctactccggaggctgaggtagaaggactgcttgagatcaggaggtcaaggctgcagtaagctatgatcacaccactgcactccagcatgggcaacagagtgaaaccctgtctcaaaaaaaagaacaagttytttaaagtgtcatgtttctgatggaaaattgttataataatatcatttattgaatactcttgtatgtgggacaatgattatattacattcatatataacataaattatattatgtttgtatattacataatctataatcatattaaattgtaaaatctcatttcaaccttatcacaacttttgcagttgatattattatcacaattttatggagtagaaaagtaagtcacagagaagatgagtaactcattaataagtggcaaagttagaactcaaaaccacgtcttagaagactattttctgctctttctgtgaccacaaaagattcattttta

SEQ ID NO: 306066 - DNA, 559 bp, Homo sapiens
aggataggaacatagaggcaataaagagaattgtcttgttttgctttgctttttaatcaacatggtaggaagtacattaatagaaggaccttagagagaagcttccagctgagaaccagaaaataaaagcaatattaagtaattttcatggttatcttaacttccacatactaagtcaagaagaattactttatttcaacagatgcgaatgcaacagcctattttaattcactagcttgaaatataaaactcatcattcattgggatgccattaaaataaagcctacatgtgtctactctgagattcagtcttcagtaatagtccaccactataattgtgaagaatcaggtgccttaccttcatatgtagactatcattaactacattatatctgaaagactgtctctcagaggagataaataaaattgaggacaagtatwtgagcccttatcagtttattaatgaactagcaaactcctgtgtataatggataacaccatagggctaaccgagctaaagacagcaatgatactattgtatgtggagcaaaaccactcc

SEQ ID NO: 306067 - DNA, 559 bp, Homo sapiens
aggataggaacatagaggcaataaagagaattgtcttgttttgctttgctttttaatcaacatggtaggaagtacattaatagaaggaccttagagagaagcttccagctgagaaccagaaaataaaagcaatattaagtaattttcatggttatcttaacttccacatactaagtcaagaagaattactttatttcaacagatgcgaatgcaacagcctattttaattcactagcttgaaatataaaactcatcattcattgggatgccattaaaataaagcctacatgtgtctactctgagattcagtcttcagtaatagtccaccactataattgtgaagaatcaggtgccttaccttcatatgtagactatcattaactacattatatctgaaagactgtctctcagaggagataaataaaattgaggacaagtatatgagcccttatcagtttattaatgaactagcaaactcctgtgtataatggataacaccatagggctaacygagctaaagacagcaatgatactattgtatgtggagcaaaaccactcc

SEQ ID NO: 306068 - DNA, 503 bp, Homo sapiens
acacccggggccaatggtgttgaaagcctctgtgtgttttcttttaaccaatctgaatttcatttttaagctccttgagacagagatcacagggtttggcaatacactgctcacgaggaatcaaggatagtgataagctgcaaattgactttataacatgatactagtgaggttcgttgagatgctcagtagctctatcccattacctgggaaaggctattcaatattaacagactagagtccctaacagactagagagtgaatgcattaaggagctgagcgggaacaccaggatgagtttgaggaggcaaacctgacctgccttccctgtaacggtggtgctaaagctaatgaccttggcatggcaggatttcttaaagwaatcacaactggagaaaggcgtcaagatgagaggggaggccagctagtccacaaaaaatgaggtggtttcccaaagaaagagaagcagcagaagtcaagttcatttggagtgtttcagcata

SEQ ID NO: 306069 - DNA, 633 bp, Homo sapiens
taattaataatatcactgggtaatatagttatttagatacatgtattgtcctttgagggagcagggactgctttggattcatctttgtgtctgctggggctgaacatagagtaggtattyggtgaatattttttgtataaaggcataaatgatgactaatagcaaatacagggacttaggatgttaatttcttcattggacacacagcccctttatgaatcttgctgactgcaaaggaaatgtcaccaactgtcagagatatagcaacacattgctcaaacatatgtgccaggaaagccagaaacttgttattgtatgtgtgagaaatccgtaactaacacagtcaaagaaactctcttgggttcttcgctggactccagcaacgtatttatacccatttcattctcttttgggtttacaaggaaactttatcgctgtgctctttgtgggaaggtcatagggcacaatgagaactccagctgaatggtgtccctccccctgtgctttggtacttgttctcttgaggcctttttcttcccccaggattgagtcattcactttggaagtgacaacagagactttaaactcagggaaagaggcttctggcccaaagattttagacgtatgcttgca

SEQ ID NO: 306070 - DNA, 633 bp, Homo sapiens
taattaataatatcactgggtaatatagttatttagatacatgtattgtcctttgagggagcagggactgctttggattcatctttgtgtctgctggggctgaacatagagtaggtattcggtgaatattttttgtataaaggcataaatgatgactaatagcaaawacagggacttaggatgttaatttcttcattggacacacagcccctttatgaatcttgctgactgcaaaggaaatgtcaccaactgtcagagatatagcaacacattgctcaaacatatgtgccaggaaagccagaaacttgttattgtatgtgtgagaaatccgtaactaacacagtcaaagaaactctcttgggttcttcgctggactccagcaacgtatttatacccatttcattctcttttgggtttacaaggaaactttatcgctgtgctctttgtgggaaggtcatagggcacaatgagaactccagctgaatggtgtccctccccctgtgctttggtacttgttctcttgaggcctttttcttcccccaggattgagtcattcactttggaagtgacaacagagactttaaactcagggaaagaggcttctggcccaaagattttagacgtatgcttgca

SEQ ID NO: 306071 - DNA, 633 bp, Homo sapiens
taattaataatatcactgggtaatatagttatttagatacatgtattgtcctttgagggagcagggactgctttggattcatctttgtgtctgctggggctgaacatagagtaggtattcggtgaatattttttgtataaaggcataaatgatgactaatagcaaatacagggacttaggatgttaatttcttcattggacacacagcccctttatgaatcttgctgactgcaaaggaaatgtcaccaactgtcagagatatagcaacacattgctcaaacatatgtgccaggaaagccagaaacttgttattgtatgtgtgagaaatccgtaactaacacagtcaaagaaactctcttgggttcttcgctggactccagcaacgtatttatacccatttcattctcttttgggtttacaaggaaactttatcgctgtgctctttgtgggaaggtcatagggcacaatgasaactccagctgaatggtgtccctccccctgtgctttggtacttgttctcttgaggcctttttcttcccccaggattgagtcattcactttggaagtgacaacagagactttaaactcagggaaagaggcttctggcccaaagattttagacgtatgcttgca

SEQ ID NO: 306072 - DNA, 526 bp, Homo sapiens
ggcatggtcaataatgaagaagagagttggtgaacaccgatatttaagtcttaccatgaaaacagccaaaccagaaatttcagaatacttctctccaagactatcggaatttcacagtgcatcaatgacgttttcactaggaaaacacccagctcacacttttaccatttgtgaggacccaaaacgaaagagctgggtatgttataaggtgctttggtgccaacctgtataatttacctgctttgtatcctaaagctttgtgtctaacaggtcatcagttaagctatcaattagtcagtaaaacccatattgagaaccttctgyaagtgcatgtggagaggaagcaaggctgtaccagcgagctttccaatctggcacctttcattaaattctaaagtcacttgtctttgtctctgtattaaaagaaataatttcatgtccagtcccacctttaaaaagtgacagaaatcaaccattcaatattcattagttcttcttggcaaccccatttagctaatggaaaatc

SEQ ID NO: 306073 - DNA, 516 bp, Homo sapiens
ttttttttccctttagccaaaaaccactttttactttcttgttaagagaggaaaacaaatccaaataygtgaagcaaagaaagggtctatacgcgtgttttaattaatttgtttctcccatcaacctcgtttttagaagaaagccaagtagagtctgtgaagagcatgtatggtatgtatgtctagttcagtgtctgttggaagagctctctttcctgtttatactcaataccctacaatgtagtaaacctaaacataagatttttctctccataatctcacagcggcacaagattttaaaatctcttgtctttgccagttttacctcactgcttcactgagccaagtgctcaagaaaatgaatatttgctgccaagggggattggagaggctgtctggaacagaggtgcatgggaactgtagtttgttttgtatttagctccaaggcttccataagaagcacgttaccctaaaacaaataatcctggaaggttgggaacatgaaacacatgtctt

SEQ ID NO: 306074 - DNA, 520 bp, Homo sapiens
aaagcaagagaagggaagggcagaaaggttgattttattcctattagtcaaggtatttttttcttttaatcactagctggtttaaatatctacttatgttctcaaagtgtcaggrtccacattaattgttctaatgttccatagctttgctccaggaaacttgtgaagtgtctgaggtagtagaaagacaccataatggataacaatagggaataacaattgagtactagatattttctatgcattcgtttattttatcctcataacaaccctctgaagtaggtaccaatatgttatcatttcatacatgaggaaactgatgactagaaagctaaagtgaccagctaagatcacccagcaatgaaaagtcagaatagtgactcaaatgtccatagaatcccaaagcccatgttcttacacaacatattaaactgcatccttgttttcttttattaacgctccagtacatatcaactgtgtgctacaaataaattgtgtgctgtttgggctacaaataaat

SEQ ID NO: 306075 - DNA, 592 bp, Homo sapiens
actcttctgacctctgtcactataatttcgttttgcctattcttgaactttgaataaatgcaatgatactgtacacactcttttctttctttctctctctctcagtgtgtgtgtgtgtgtgtgtgtttgtgtatagtatacagtatgttttcttttgaaaacacattagaatttccagtgtgagctgggcacggtggctcaagcctgtaatcccagtgtattgggaggcagaagtgggaggattgcttgaggccaggagttcaagaccagcctaggcaacagagtgaaacctccatctctacaaaaaacaaacaaacaaacaagcagaaaaaatcccagtgtgtttctgatgaggcagattcctggactcttccaggaatctttttattactaatattttgttgttattggaagtcctttgtcttgcttttacattcatttgttgtktgtttcagatcaatgttctggtgatgttctgcatccagaccatctttcaagaactgaatggttactaccctgggtcttctaccgaaagaaagaacatgggtgtgggcattcaagtatagcctctaaaaaaagaacacataagtgg

SEQ ID NO: 306076 - DNA, 592 bp, Homo sapiens
actcttctgacctctgtcactataatttcgttttgcctattcttgaactttgaataaatgcaatgatactgtacacactcttttctttctttctctctctctcagtgtgtgtgtgtgtgtgtgtgtttgtgtatagtatacagtatgttttcttttgaaaacacattagaatttccagtgtgagctgggcacggtggctcaagcctgtaatcccagtgtattgggaggcagaagtgggaggattgcttgaggccaggagttcaagaccagcctaggcaacagagtgaaacctccatctctacaaaaaacaaacaaacaaacaagcagaaaaaatcccagtgtgtttctgatgaggcagattcctggactcttccaggaatctttttattactaatattttgttgttattggaagtcctttgtcttgcttttacattcatttgttgtgtgtttcagatcaatgttctggtgatgttctgcatccagaccatctttcaagaactgaatggttactaccctgggtcttctrccgaaagaaagaacatgggtgtgggcattcaagtatagcctctaaaaaaagaacacataagtgg

SEQ ID NO: 306077 - DNA, 535 bp, Homo sapiens
ctgatgaggcagattcctggactcttccaggaatctttttattactaatattttgttgttattggaagtcctttgtcttgcttttacattcatttgttgtgtgtttcagatcaatgttctggtgatgttctgcatccagaccatctttcaagaactgaatggttactaccctgggtcttctaccgaaagaaagaacatgrgtgtgggcattcaagtatagcctctaaaaaaagaacacataagtggttgctgggtgctgttatataatcacacacatacaaggcttaaatcatgaatatttcctttttgaaggggaaaaaaagcaaaaatccaattgtgtagagttttaggacaagaatattatatgaagaaaatatagctccaagagatagtggctgaaagggcagaattagagaagcagaagaagcaagaagttaccgcaaaggcttccaaaaataaaataggatgatacgcccaagaaaacaaaggctacttttgctaagtcaggggtgagagaaaataatgaaagatgcaa

SEQ ID NO: 306078 - DNA, 571 bp, Homo sapiens
agagcaaccttcaatcagaaggggacgtgagtaggtagataaatattccatccttccatcattcagaagaaccattcaagaggcattctacatggttcctgagaggatcccctcacgattgagccccagtgtccacaaaaagaaccagctcactaatgtaactttagaggctttttctccttcccagtctctctcttctccacttcctcactcctgcttcctaaaaycacctctgcccaaagaaacttcctactcctaaaccctgtgtcaggttctgcttgtagaggaagtcacaccaatacacaatatcagtaaatgaattaatgcagagaaggcactggagccacagttgcaaactggagtctcttttgttggctatctacagggtcattgtgtatagtgcaatggttgtttttgttttacctacttgaagatcacgttgttaaatgttgggtgtgggaatgcaggagtggagtttccaggttagagctgaattgcttctctaaagaaatataaatatatgtgtgggaagaaggaaaacattcaggagcagaaaaagccaagctggcac

SEQ ID NO: 306079 - DNA, 580 bp, Homo sapiens
taattaaaaaaaaatttagaaacaggggctcactcaggctggagtgcagtggtgtgatcatagctcactctaacctcgagctcctgggctaagcggtcctctcacctcatcctcccaagtagctaggactacaggtgtgtaacaccccatacctgggaaatttattattttaaatattayataaaattctttttcaaatgaaattttaactggaaccccatgtggaactcttctggtgagagtgagcgggacggtcttcatgggtacgggaactacacagtttggcacagactcccacgttcagaagggccccatgctgggtttaaggtctgctgtcaccatcctaaacttcttaataattttgtttttgaacttatgttttataaatgaggtctgagggggacaatggagcatgcacatgagcagagaaactaggcacagtatctgagttgtctgttccctgctgtcttatttgcatataggatgagatgatgccccataagcatggcattctagttgtcccaccttgtgtgggagcccagagagactcaaagccattacaagatatcttacctctaca

SEQ ID NO: 306080 - DNA, 580 bp, Homo sapiens
taattaaaaaaaaatttagaaacaggggctcactcaggctggagtgcagtggtgtgatcatagctcactctaacctcgagctcctgggctaagcggtcctctcacctcatcctcccaagtagctaggactacaggtgtgtaacaccccatacctgggaaatttattattttaaatattacataaaattctttttcaaatgaaattttaactggaaccccatgtggaactcttctggtgagagtgagcgggacggtcttcatgggtacgggaactacacagtttggcacagactcccacgttcagaagggccccatgctgggtttaaggtctgctgtcaccatcctaaacttcttaataattttgtttttgaacttatgttttataaatgaggtctgagggggacaatggagcatgcacatgagcagagaaactaggcacagtatctgagttgtctgttccctgctgtctyatttgcatataggatgagatgatgccccataagcatggcattctagttgtcccaccttgtgtgggagcccagagagactcaaagccattacaagatatcttacctctaca

SEQ ID NO: 306081 - DNA, 570 bp, Homo sapiens
tgaagatcccaggaaacataaaaacctaatataacttgaataggttaatgtttcaaaaaatggagaacaatattatcccctgtgatttagcttttcctttttcttgtatttcttatgttcattttttgcagtctgaattgttttggacagagagattgagatttgactaggcaactagaccttgtggtttgycctgtgttataaattacttgacccaaagattcctgtgctatggggacatctaatgagcacttcataaatgttttcatttcaattatcaccatagccagaagcttcaataacaggaaccatttttgaaatcctgttcacaatttatgaatgtgtagaattactgcatccattccctgtgccacaccagtcccagagtataagtgaaatacaaaataaatacagaacaattatggtgatgaggattattaaacacacaaaaaataaaatcatagctattttacttgaaacttggagaaatgtagtcctgttataaagtggggaaagtgtgtacttttgactataaattatgttggaattaaaacatagaagttgctataa

SEQ ID NO: 306082 - DNA, 570 bp, Homo sapiens
tgaagatcccaggaaacataaaaacctaatataacttgaataggttaatgtttcaaaaaatggagaacaatattatcccctgtgatttagcttttcctttttcttgtatttcttatgttcattttttgcagtctgaattgttttggacagagagattgagatttgactaggcaactagaccttgtggtttgccctgtgttataaattacttgacccaaagattcctgtgctatggggacatctaatgagcacttcataaatgttttcatttcaattatcaccatagccagaagcttcaataacaggaaccatttttgaaatcctgttcacaatttatgaatgtgtagaattactgmatccattccctgtgccacaccagtcccagagtataagtgaaatacaaaataaatacagaacaattatggtgatgaggattattaaacacacaaaaaataaaatcatagctattttacttgaaacttggagaaatgtagtcctgttataaagtggggaaagtgtgtacttttgactataaattatgttggaattaaaacatagaagttgctataa

SEQ ID NO: 306083 - DNA, 586 bp, Homo sapiens
aaatcatagctattttacttgaamcttggagaaatgtagtcctgttataaagtggggaaagtgtgtacttttgactataaattatgttggaattaaaacatagaagttgctataatatcaatttctctaatattaatgtgctagggtgattggaaattataatgctgaagtggaatgtgattagaaaagggtaaagtttgtagaattggggaggctgagtgggtggtaccaagaccagctacctaaatgcagagtccagtgcagaatgaaaattcaggcccccttgtgcaaaacttattaagaatctcaagattgtgataaccgagcagtaaaccaagtgcagagcccttctaagcatggggccttgtgtggctgctcagattgcacagccatgaagccaggctgtctggtgatgccagggttctggtcccatggtgtcatcaactatgtgagcaagccagttgtgtatttcccctttatgttccacatccttaaagccaagaggatatttttcaggaaacactgttgtgacagagacccaactcccactagtgcaagccatcaaagggagatttctgggctcatg

SEQ ID NO: 306084 - DNA, 586 bp, Homo sapiens
aaatcatagctattttacttgaaacttggagaaatgtagtcctgttataaagtggggaaagtgtgtacttttgactataaattatgttggaattaaaacatagaagttgctataatatcaatttctctaatattaatgtgctagggtgrttggaaattataatgctgaagtggaatgtgattagaaaagggtaaagtttgtagaattggggaggctgagtgggtggtaccaagaccagctacctaaatgcagagtccagtgcagaatgaaaattcaggcccccttgtgcaaaacttattaagaatctcaagattgtgataaccgagcagtaaaccaagtgcagagcccttctaagcatggggccttgtgtggctgctcagattgcacagccatgaagccaggctgtctggtgatgccagggttctggtcccatggtgtcatcaactatgtgagcaagccagttgtgtatttcccctttatgttccacatccttaaagccaagaggatatttttcaggaaacactgttgtgacagagacccaactcccactagtgcaagccatcaaagggagatttctgggctcatg

SEQ ID NO: 306085 - DNA, 585 bp, Homo sapiens
tgtagacttctcgactccttcctctcacagtcactcttcaaccgatggcaatctggtccccattcttcccccgccactaaagaggtttgctggggtaccaaggaccttcagatcatcacagatctgtcttaacttacatactgtgccaaattttaaaaagctgaacatgctcttccaattgatgtctcttttattggctttcrtaattctgtaaggatggtgccttgcagtttatgacaattacacgatctcacctaatttttacagcaaatgtgaatgtagaaaggacaggtcctgctgcctctactttagagatgagaagactgacattcagaaacattaaatgacttgttccagaccccactcttggcacctagcagagctgggacttgaatgctagtcttttgacaccaagtcaagactttattttttcctaatgtacttgctgacatcttacagcaatcaatggattttccttccttccctctaaccctgctgcatcctgttatttctctcatagggaatttacaagtggtcatcaagggtctctaccttctccagactctcttatttggcaataattcc

SEQ ID NO: 306086 - DNA, 585 bp, Homo sapiens
tgtagacttctcgactccttcctctcacagtcactcttcaaccgatggcaatctggtccccattcttcccccgccactaaagaggtttgctggggtaccaaggaccttcagatcatcacagatctgtcttaacttacatactgtgccaaattttaaaaagctgaacatgctcttccaattgatgtctcttttattggctttcgtaattctgtaaggatggtgccttgcagtttatgacaattacacgatctcacctaatttttacagcaaatgtgaatgtagaaaggacaggtcctgctgcctctactttagagatgagaagactgacattcagaaacattaaatgacttgttccagaccccactcttggcacctagcagagctgggacttgaatgctagtcttttgacaccaagtcaagactttattttttcctaatgtacttgctgacatcttacagcaatcaatggattttcyttccttccctctaaccctgctgcatcctgttatttctctcatagggaatttacaagtggtcatcaagggtctctaccttctccagactctcttatttggcaataattcc

SEQ ID NO: 306087 - DNA, 517 bp, Homo sapiens
cccaggtatgatgctgggggtaagagacacagaaataattaaagcagtccttaacctcaacaactaaaagtctgtgagcaaagactgagacctgtacagactagcgatatagaacatagagtattctggctgggcgtcgtggctcatgcctgtaatctcaatgctttgggagaccaaggtgggaggattgcttgakcccaggcaacatagcaagacttcatctgtaagaaaaatgtgcaaaaatcagccagacatggtggcatacacctgtagtcccaactgcttgggaggctgaggcaagaggatcacttgagcccaggagatcaaggctgcagtgaaccatgatcgcaccactccactccagcctgagcaacggagtgagactctgtctttaaaaaatataataataataataaagagtattctaagagtgattgtgtaagaatgctatatatgcatgaatataaggtaagtttatattttctcaaaaattaatacagaaataagggatttgcct

SEQ ID NO: 306088 - DNA, 533 bp, Homo sapiens
tccaagctggagacaagcaaatacatcccagtggagagtttgtacatataccagtggttatcatcaaatacatcctgcttcccttcttcctggatttcatcagtagaagaatcattaggcttgtaggaaaaaaatacaggaatgcacttggggtttgaggagtttgaacattcatattttaagggttttgggtttttcccaaatcttcatgagaaggtcttgttttcacactggtgctctgatcacatgccttcctgagctctcagtgagagttgctacctcatgatataacttcatagtgcrgtgatagcaaaatatgctccatataaatgaataatgtttactgcaaagggaacacaggaagcatgagttcacaaattaggcccctctaactgcaattcaacaaagcaagtgttgtgaaaaagatatagaaaagcacatgggaatttagaaaagacaacgattaccttaagcggagggtgatgaggtggcatttgagctgctccttaaaaagtggccagagtttggatgaa

SEQ ID NO: 306089 - DNA, 538 bp, Homo sapiens
acacacacaaacacgcgcacaaatacacacaaatgccatmggcaaagatcctttttttccattttaaaaaccataaaacaagttgagtctggatctcctttcccccagaccttggaacaaaaaaaaagctattcactgagtcaagcctgtcacccccacacttcagaatccaacacagagttggctcagatacactttcgtgacagcagtgtgacttttttgaaaacttcaacccctagttgaggtaagggatatactaacaagtgtttactcaataatcatttgttcaataacatctgctgcacatctctacctcccaggcacagtactagaaactggagatagaggtggacatgaccaaagttcctgtccacaaaaagttacggtctagtgctttttgagtagtaagtgcattataaaaatttgatgactaagtgaattagtaaaaaattatgtctaaaatataatataatcacacctgagtggtagacctgtctttaaaaatatttttcatgtcaataaaaagaaactaaattgg

SEQ ID NO: 306090 - DNA, 527 bp, Homo sapiens
ggcgcgatctcggctcaccgcaacctctgcctcccgggttcaagcaattctgcctcagcctcccgagtagctgggattacaggcatgcgccaccacgcctggctaattttgtatttttagtagagatggggtttctccatgttggctggtctccaacttccgacctcagatgatctgcctgcctcagcctcccaaagtgctgggattacaggcatgagccaccgtgcccggccatgcctggctaatttttgtatttttagtagaggcagggtttcacygtgttggtcaggctggtcttgaactcctgacctcaggtgatcttcccgcttcggcctcccaaagtgctgggattacaggcgtgggccaccttgcccggcctctcctcttgttctaaagacaccagtcctgttggattggggcccaccctactgcagtgtgatctcatcttaatatgatttcatctgcaaaggttctatctacaaagaccctgtttccaaaaacaatcctattcgtgggtactggggatc

SEQ ID NO: 306091 - DNA, 520 bp, Homo sapiens
agagttttggaggcaggaaatgaactctccagcactaccccttcctctggccttccattacatcttgtatattcactcacattatatttataacaggatattatattagcaatttttaccgaggcaccaaataaaaaaaattgaggcactaataacagttagttaaaaccaccaaaatgaattttgaagtagaccattgatagtactttcagacatgtgaaataggatgccccctaaaacacccaaagggcataggaaaagttgaggagaggagttgttgaaaattcctcaataagagctgctgggatcctgtgaatctcacctccaagggaaacggtaggaggttcttaattctcaccttgcacctaactgagatgggctttcacaggaccacctgcagagattgaagtgtgccctctagaccttgtgggacacagtgagctgtccctgaatcrtgccagctaattcttcagatggggagagaaactggcaggctagattagcccttgtgtcaagagtt

SEQ ID NO: 306092 - DNA, 590 bp, Homo sapiens
acttttgtgtgtgtgttaactttagcctgctgygggtttttgttgttgttattgttgcaatttgtaacttgcctggactcaaccttcaaaagctatctcccacacgttgtaggcagctttgcgtttgtcatttttttctttttaagtttggtttaatgttggggctacacctatgtctgcatagcttagtgttcagctaaagattggccagaagttgtattcaaaaacctcaactcaagtcagtgtggtttacactgtcggctgatatataggtgtgtgaaccagggagtacattgaaactagacttagtttccagatctgcctcagttttattttctgctggtctctgccatgtgccctctgtgcatgggcacaggctctgttagccagaaggtgtggtggcctgggcctctgtggtcatgctggaatggagagcttattaatccatgtatggccatctcatttcccaaagctccctgctaacttaccagctagtggggcagtctgttgcttgacacaagacctgaacgtcaagctaccagagctgctgcctcccttaccccacccccagccggcttgcacctagctca

SEQ ID NO: 306093 - DNA, 558 bp, Homo sapiens
catatggacaaataattgctgcttccagtctgtagtaaaagcctgaaaaaaaaaaaaactgaaataaaaccagacccataactctttgagtctattactattcgttggctaaatgtgcacatttctgttaattgtgattctgacgatagagagggcttctttgaggtgacagacaaacagcagggtatcatgaatatgtatggtgcatctgagaaaataaatgaayaggggccagctactctggtgacccacttagattgtcagcgatgagtgtgacagtgagggtctgtattgcatgaatttgcatgacagaatttcctacctatcaactcatttacttcatgcatttggattattttaagcactaaattgtagtgagataattaatcactaattcaccaatactgacattaaagaacaagagacacgttattgctgattaccacttaaaactaaagctcacagggttacacctcagaaggtgcgaaaggagtgtgtttaacatgtgaattctcttggttcccattgatctgggtgtttttctgaaaacgatgagat

SEQ ID NO: 306094 - DNA, 587 bp, Homo sapiens
cccttgacttgacttcaatctgggttccaaggctttctgattattaagctgcagagagttcaaatttgctatcagacaattggaactaattgtctgagacaatttacatccatcagtgcagggttttatggcttttcagactctkcgtaagatgaataaataacggagcttgagtcattactctgctttattacctgcaatgttccggggaacccgaagataatttaggcactatgactccgtcggatagtggacagttgtcaacttgtgggttctggtggtattttgcaatctgtccactttcaccctttacaattcccaccttaaaaccaatgaattgagttgttttgttctgttgtttttgtcattattgttttcagtagggaattctattaaagaaatgagagtaacttttgcttttcttttggtaattcgggcttctatttccatcctcttcaatcctcatcttgtctcatgcacacagacacttcattcttttgcacacttaatggacccagaggaagcaagtatcatccttttcatctcgcagctttgactttagtgcggcagaggctgcccagccaagg

SEQ ID NO: 306095 - DNA, 559 bp, Homo sapiens
aaacagtatatgcttatattaagaaagataagggaaagcaagatggcccactagtcagagacaggtggagcagctgccatcgaggggacaagacaactggtgcacggctaacatcttcagagcaaaggcactgagagtgaatggagggaagacacagaagctgggctataggaggaggaagcttggaaccatgcaagggcctatcacagactgggacttgttcctggtccccaacaactctggaagaatggataaattgaactagcaagaagcaacctgttctcaccataggcctgtgtcatcccagcagaaggagacctctcaaacactmtggacactcaagttagcaaggattgctgcttagtgaagtggtaggggcagaaagccagatgatgtgcaacccaaagggtttggtgtaggagcatctttagtggagcatgggaagggttattcttccccctaggctcaaatttttcccatagaagactttacccttaggggagctgttggacctgacttctacagactggccttccttatcagatagggctgaaaacag

SEQ ID NO: 306096 - DNA, 559 bp, Homo sapiens
aaacagtatatgcttatattaagaaagataagggaaagcaagatggcccactagtcagagacaggtggagcagctgccatcgaggggacaagacaactggtgcacggctaacatcttcagagcaaaggcactgagagtgaatggagggaagacacagaagctgggctataggaggaggaagcttggaaccatgcaagggcctatcacagactgggacttgttcctggtccccaacaactctggaagaatggataaattgaactagcaagaagcaacctgttctcaccataggcctgtgtcatcccagcagaaggagacctctcaaacactctggacactcaagttagcaaggattgctgcttagtgaagtggtaggggcagaaagccagatgatgtgcaacccaaagggtttggtgtaggagcatctttagtggagcatgggaagggwtattcttccccctaggctcaaatttttcccatagaagactttacccttaggggagctgttggacctgacttctacagactggccttccttatcagatagggctgaaaacag

SEQ ID NO: 306097 - DNA, 577 bp, Homo sapiens
caccatggaatactatgcagccataaaaaagaatgagatcatgtgttttgcaggaacatggataaagctggaagctaattatccttagcaaacaactgcgggaacggaaaaaccaaatactgtatgttctcacttataagtgggagctaaattatgaaaacatatgaacacaaagaaggaaatagacagtggggtctacttgagggcggagggtggaaggagagaggtgagcaagaaagataactactgggtactgggcttaattcctgggtgatgaaataatttatatgacaattccccatgacacaagtttacctacataacwaatctccacatgtacccccaaacctaaaataaaagttaaaaaatgcctcaaaattctaagattctaagaataagtggcatggccaaaaagtaaccctttttggcagaaagcaagcatagtggaagaatagagaagaaatggaagagactgaaaacaagcaaaaaagaaagccactaggagaacacacggatcacatttacccagcagattgtggaaaagctgcgtgacatcgagctttgcctgattggtctt

SEQ ID NO: 306098 - DNA, 577 bp, Homo sapiens
aaccctttttggcagaaagcaagcatagtggaagaatagagaagaaatggaagagactgaaaacaagcaaaaaagaaagccactaggagaacacacggatcacatttacccagcagattgtggaaaagctgcgtgacatcgagctttgcctgattggtcttattggagtcagtgagaaataactatgtgtctcagatttgatgaaggaggaaaccaaaagcgaactctgaagagactgacatgtagacgaaccatcatgagaactgaagtcaaccgatcttggttttaaatccagttgtaatcacktctggccacaccatttggtgacccaatcagaggctcagaaccctcaattattaagcaaggataataatgtctatcttcatttcacaagaattaaacaagttaatataaataaaagcaactgacacagtgtatgctcagaaatacttgctcaatgaaggaagttagagttgaagaggagtagtgtggactggccgggaaccatcactgcatttaggagttgcaccatctgtgagtgatttgacaatggaggtggcaacctgactagcaagta

SEQ ID NO: 306099 - DNA, 508 bp, Homo sapiens
ttttcaatttcataaaaattattaatgatggaatattcaagtgtatatatataaataataataatattatcatgcccacactcaccgaacactgactttctgcgggttcccctgttaacagaacttgatgtataatagtacgtgcaggcaggtggtttgctkagagagtggtcccaggagataagagatggaccgaaagtgaaagatggaagaagaaaaacaacacaaggatgtgttatcaagtcagtccataatacaggcaatgaccctcaattctgtgggacattcttagcagatttaggaaataaacctcagaatggttcaaaagaaaagaagtgaaaacatctattccttatcttccattccccttggtcaagggtggtacaaggcattaactcccctgcacttccaggtcctgcatcttttattatccagcagccttggtgggttttcccgaatgagtcatcttcctcagggcattggaagccctgaggcaggaagagagagg

SEQ ID NO: 306100 - DNA, 508 bp, Homo sapiens
ttttcaatttcataaaaattattaatgatggaatattcaagtgtatatatataaataataataatattatcatgcccacactcaccgaacactgactttctgcgggttcccctgttaacagaacttgatgtataatagtacgtgcaggcaggtggtttgcttagagagtggtcccaggagataagagatggaccgaaagtgaaagatggaagaagaaaaacaacacaaggatgtgttatcaagtcagtccataatacaggcaatgaccctcaattctgtgggacattcttagcagatttaggaaataaacctcagaatggttcaaaagaaaagaagtgaaaacatctattccttatcttccattccccttggtcaagggtggtacaaggcattaactcccctgcacttccaggtcytgcatcttttattatccagcagccttggtgggttttcccgaatgagtcatcttcctcagggcattggaagccctgaggcaggaagagagagg

SEQ ID NO: 306101 - DNA, 508 bp, Homo sapiens
ttttcaatttcataaaaattattaatgatggaatattcaagtgtatatatataaataataataatattatcatgcccacactcaccgaacactgactttctgcgggttcccctgttaacagaacttgatgtataatagtacgtgcaggcaggtggtttgcttagagagtggtcccaggagataagagatggaccgaaagtgaaagatggaagaagaaaaacaacacaaggatgtgttatcaagtcagtccataatacaggcaatgaccctcaattctgtgggacattcttagcagatttaggaaataaacctcagaatggttcaaaagaaaagaagtgaaaacatctattccttatcttccattccccttggtcaagggtggtacaaggcattaactcccctgcacttccaggtcctgcatcttttattatccagcagccttggtgggttttcccgaatgagtcatcttcctcagggcatyggaagccctgaggcaggaagagagagg

SEQ ID NO: 306102 - DNA, 447 bp, Homo sapiens
atagtttttatctttttttctgataagacaagggctttggaactcgttaaaatccctccacactcacggacacccacaatcttctttaggtttcttaattttcactttagaatttttattataaattatacctacacagaaatagtgcataaaataaagacggaaagttggtataagtattatcgtaaggtgaatattggtataaccacatgcagtttaaaatgagatgatactgccagaagcccagaagctctcatttgcttctcttagtcattatcacttccctgtctcctcagtgtaaggagccacaccgttatggaratttttttcctttcctttatcacgtaagcatgcagccatagacactacagtttacttcttccattttgtaaaccctatttttctctgtatttgaaatcatgttatatgaaaccatgatatacatac

SEQ ID NO: 306103 - DNA, 447 bp, Homo sapiens
atagtttttatctttttttctgataagacaagggctttggaactcgttaaaatccctccacactcacggacacccacaatcttctttaggtttcttaattttcactttagaatttttattataaattatacctacacagaaatagtgcataaaataaagacggaaagttggtataagtattatcgtaaggtgaatattggtataaccacatgcagtttaaaatgagatgatactgccagaagcccagaagctctcatttgcttctcttagtcattatcacttccctgtctcctcagtgtaaggagccacaccgttatggaaatttttttcctttcctttatcacgtaagcatgcagccatagacactacagtttacttcttccattttgtaaaccctatttttctctgtatttgaaatcatgwtatatgaaaccatgatatacatac

SEQ ID NO: 306104 - DNA, 660 bp, Homo sapiens
gtatcctgcaatattggtatgatcacttgtttgttcctcaagtttatattgattctttgggatttgatacttgtgaacaaagatcattttgctgtggttatattgatataaccacatacaatttaaaattaggtggtattgccagcagcccagacgccctcacatactcctctcagtcactgttacttccctctctcctcaatgaacggagccacactgttayggagaatatttcctttcctttaaggccttatcacataagcgtgcaaccatagtcactatagtgaatttttatctctttcttcccagtctttgtacctgtcatttccttttcatgtcttcatgctttaactaggattttcagcatgatgctaaatagaagtggtgagatggggcatccttgccttgtttgcaatctaaagaggaaaacatggaattttttttttatcttaagtgtgttattagctgcaggttttttagatgttctttatcaatgtggtgccattttctaagttggctgagagatttttattgtgaatgagtgtgggacttaccaaatgctttatttgcatttgttgatatgatcatatgatttttctcctttagcttgtttatctgatgtactacattaattaattttgaatgttgaaccagcttaga

SEQ ID NO: 306105 - DNA, 562 bp, Homo sapiens
tgctttatgcaattactgatatagttgagtagatttttgtcacaaatattttgtgtttctccttttctcttctactttttttgattgctgtagtgtttcttaatatgtttactttgcctctcttagcataccatttatgcactttattttttcagtgaccactctaaagatttcattttcagtttatcatatctaatattaatgttgttaaatgttattgaaagcagatattttacctctgccagataatttcttgatattaaaacrctttaatcccacttagtctaatttcttcctgacttatatgctcatatgcatttaatgtgggtgagtgtttagcctagtcagacattatgattttacattataatgtaaagctaaagatttaaaaaagctatttagcttctacccacagacttacttttttcatctatctttcttgtggtagctctgtgcttccacctgggagctgaaattcagtccatcacttacccagaagtccactatgactatcccaattttatacgtgggatggtggaggccagaaatgatttagcaactt

SEQ ID NO: 306106 - DNA, 620 bp, Homo sapiens
gtatatactcctttcagcatatacctrggaatgggattactgggtcaaaaacaaaaacaaaaacaaaatcaacaaactaggaaagaaagtatattagggttctccagacagacagaaccaattgaatgtattgccttagatatagttatatgagaatatgtttattagggagattatttctcatgattatagagacagagaagtcccatgacaggtcatctgcaagctagaggaccagggaaaccagtattgtggctcaatccaagtccaaaggactcagaaccagggaaactgatggtgtaattctcaatccaaagacatgagaacccaagggctgctgatgcaagctgtggagtccaaaggccagaggacctgaagtttaaatgaccaatggcaggagaaaagcctagttctaagagagagagagagagagagagaatttgctttcctctgaccttttgttttatctgggcctcagctgattggatggtgagcactcacattaagtgagcgcggatttttctcactcagtccactgattccaatgttaatcttttccacaaatgccatttcagaaataatgctctaccagctatctagggatcccttactccattcaa

SEQ ID NO: 306107 - DNA, 620 bp, Homo sapiens
gtatatactcctttcagcatatacctaggaatgggattactgggtcaaaaacaaaaacaaaaacaaaatcaacaaactaggaaagaaagtatattagggttctccagacagacagaaccaattgaatgtattgccttagatatagttatatgagaatatgtttattagggagattatttctcatgattatagagacagagaagtcccatgacaggtcatctgcaagctagaggaccagggaaaccagtattgtggctcaatccaagtccaaaggactcagaaccagggaaactgatggtgtaattctcaatccaaagacatgagaacccaagggctgctgatgcaagctgtggagtccaaaggccagaggacctgaagtttaaatgaccaatggcaggagaaaagcctagttctaagagagagagagagagagagagaatttgctttcctctgaccttttgttttatctgggcctcagctgattggatggtgagcactcacattaagtgagcgyggatttttctcactcagtccactgattccaatgttaatcttttccacaaatgccatttcagaaataatgctctaccagctatctagggatcccttactccattcaa

SEQ ID NO: 306108 - DNA, 620 bp, Homo sapiens
gtatatactcctttcagcatatacctaggaatgggattactgggtcaaaaacaaaaacaaaaacaaaatcaacaaactaggaaagaaagtatattagggttctccagacagacagaaccaattgaatgtattgccttagatatagttatatgagaatatgtttattagggagattatttctcatgattatagagacagagaagtcccatgacaggtcatctgcaagctagaggaccagggaaaccagtattgtggctcaatccaagtccaaaggactcagaaccagggaaactgatggtgtaattctcaatccaaagacatgagaacccaagggctgctgatgcaagctgtggagtccaaaggccagaggacctgaagtttaaatgaccaatggcaggagaaaagcctagttctaagagagagagagagagagagagaatttgctttcctctgaccttttgttttatctgggcctcagctgattggatggtgagcactcacattaagtgagcgcggattttyctcactcagtccactgattccaatgttaatcttttccacaaatgccatttcagaaataatgctctaccagctatctagggatcccttactccattcaa

SEQ ID NO: 306109 - DNA, 631 bp, Homo sapiens
gaaaactaattccagaaagttctggaagagaagcaaacaactgtgtccaaaggaagtcaggaatcccatgggctcacatcagaaaacaccctatgatggtgattaagggcaagatctttggaattcctcagacgcacttggatctaggtctctcattaacaagaaaggagtttctgagcaagtaacaatttctgagggtgtgttgcttcatctgtaaagtagggataatatctatttagataggttattggaaaaattaaattagatcttgtgcataaagcactctattaggttcaattaggaaactgaagatataactgatataactgaaaatatagcaaatattttagtcgaaagtatrtaacatatgagagacaacatagttttaagagagaacctaagcaggattttatataaaatttagtagggagctgaaaaaaacaaaaacaaaacaaaacaacaacactgagacatgaaggtagcaactacaggaagtagcttgccctactctttaggactggcagaactagaaagacagatgtgtactattggaacttagaagcctcaaggggggtgcatggagctgaaacataagacgcccaaggaaaggctgttgctgggctctatgaga

SEQ ID NO: 306110 - DNA, 608 bp, Homo sapiens
cattgtaagaatacaatgtgtaatacctataagctacaaaatctatgttagtcaactgtttatgttatcagtaagacttcctgtcaacagtaagctattaatagttagttttgggggcagccaaacattatacacaggtttttaactgcatagggggtcagggcttctaacttccatgttgttcaagggtcaagtgtacatctgtcttctgaaagctagctggattatggtctaacctgtaccattatgtgactcataaattcctttcagatttttcaccacaactccactcttcttgagaaagcccttggtcttgactttctccatattttattgccaatgaagtcaatgcctttgggaagggatcaggagctgttttaaatctgtttctcccccaggcatatctcttaaccaggactctggagcctgggtggggacaatgacaagtctctctttgagtgayaccacactctagtaggtggtgctgggtgggctagtgaagcagccagctgaggtcctctcagtttatgactgcaggcctaggatcaccacctcattagttgggtcagggttatgaggaagctggtgtcatcagcctgccatgcttt

SEQ ID NO: 306111 - DNA, 681 bp, Homo sapiens
gagctgttttaaatctgtttctcccccaggcatatctcttaaccaggactctggagcctgggtggggacaatgacaagtctctctttgagtgacaccacactctagtaggtggtgctgggtgggctagtgaagcagccagctgaggtcctctcagtttatgactgcaggcctaggatcaccacctcattagttgggtcagggttatgaggaagctggtgtcatcagcctgccatgctttgagtgggcattgcagtcacccaagtctcatccccaacacaaactagctggaggtgagatgagaaatactgatgttctgggaagacagcctccagccgagagccagggaaagggaccccagtgcttggcagcactggaagtctggagtagagagtccacctcactgagctgtagccatcttcattcaaaataagacagactytgttcttccttgctgatatttgtaaatgttcttgaatagatgtttctttatgtgctaattgtacttagtaccatttccagggacctttaatttttttttatagttttcagaaatttatctggtcagtggagctctacaccatcaaggtatcataactctctttttattgaaaaaataacatatgcaaacaggactaatttggaaaccaacccacaaataaacattggatgacataatatct

SEQ ID NO: 306112 - DNA, 495 bp, Homo sapiens
cagtggagctctacaccatcaaggtatcataactctctttttattgaaaaaataacatatgcaaacaggactaatttggaaaccaacccacaaayaaacattggatgacataatatctaccactcagaattataattatatttgaacatgtgtcatggatgtaaagtgattattgtagtgcctaacaaatgatgcctataacacatagttccaaagataatgtgggagctaagaatggtgagtaatttttttagtaacagccaaataaatggcgagaatgagcttcctctagaaacttgtgatggagcgggcacaggaaaaataagatctgtagtttaactgaagcactccactgcttgtgaggaacaaaagcagcatgggatgtggtccctgccctccagggaactgcaaattagtttagaagacaagatgctgactttcaaaatatgtacttaatctgtgaggccacttagaaatcatctaatacagtgctct

SEQ ID NO: 306113 - DNA, 657 bp, Homo sapiens
gtgactggcatgaatggttatattattacagattggctattccaagcactatttttatatgaactttcaaacctccaagcctccaatcactcccctactgcctgttgactaaggtctggtgacttcccctgaagaccctgccaaaaggccaccccaytgtcctcctcatgaaggggccagacagggcctcctcagttgggctgtttgtctttcttgtctcccctggcttcttgctaactctcccccagaatcctgaatatgacatagtaagtgtcttaccactgccttaactcaggtgcatggggtcagaaatggaccctggatctgcgtggagatactctcagattctgttccttccctgtgctccatgcttcgacatagcttatggttcagttccacgcctgggttctccattctttacagtgtgtgttactctagggtctacacagtgctttcatcatgactttattcttcaaaacaaggctataaagatgagtagagggtactgtcgcctattgttggtggacaggaagataaagggatgctgtgtaaggtgcccaattcaagcatagaaaatgctcaagttgaattcacgtctatttcttttcctgtcccaccatgctgcctccagttctggagactgcttgttttgcagag

SEQ ID NO: 306114 - DNA, 586 bp, Homo sapiens
cagcaatattcatgcagctccatgaaatgctcattgttcaatgtgctcaaacaagcgagacgcctcccagggtgccaactgggaaatgtttataaccaaacacgtttttaaaacctgcacacaatggaaaaggcacagagaaatcaacatgcttttgtacatttttccaaaataacaagaaaatactgaaaccttgagaaaattatttttttaatgacttccctattggaactttttgatatttactaaatgttatcatttcccagaataaactattrtttctacaaagtgctttttaattcttcctccagaaaaatcctatggacaattgtttaaggagaaataaaattcagaatggaagaaaggagggacaacactaatttaccaagttcccagcaatttttggtattcatagttattcaataataaaaagttcttatcccagtctttagagaaatttatttgactaaatacatattttaaggggtataattaatatttgaattttagtagatttttataactctaaatcccatgttttttcattgattaaaagaataattaagtatttttaaattattaatta

SEQ ID NO: 306115 - DNA, 503 bp, Homo sapiens
atgcccatgtagctgctggaccaagaaaaacacaggcatatgtagcagattgaacctaacacatagcctgggaccaagaccagcccacctcaggcaagaccagaaaagcaacagtagagccacagaggcagagcaagacaatgaacatttgttatggtaaatcacaacgattttgaggtttgatactatgctgcaaaaagtattaatacagtgttaattacatcaagataaaatgggcagtgtaatgattgactaaatgctatggagaggagatacctaaattgcacttccataagcaacttggcaaatcaggttgsgacaacaaaattactgatgggaaatacagattgtgctgctccattgttaatgcaagacataatttatatgttatcttaaagaaagtaagagacaataacttatatgcacaaatattcttccttttcttggctgtttatgtcttttttacataaaaatcaaataccctgaaacgtttcaagggaaga

SEQ ID NO: 306116 - DNA, 537 bp, Homo sapiens
tataaattacccagccttgggtattcctttacagaaatgcaaatcgatgctacccttctcttaaatcttggttttctcattgtaaaattatcagaatagcaattgcacttgtcttaaaggcattttcttagataaaggtcagtgattaaacaaaataaccacttcctgttgtgtagtaagttttcagcatccactgtcttttttagcagcaggagcagcagcagggtattagtagcagccacagttgagcatctccatctctctaagccacaatgtctcccagtcccacagcactgcacgctcctccatgccaatgtgcctttgcacacattaacttctcttctttcctccttcctccatctggacaaattcttattaattcctcatgaatctataccaacatcaccttccaaaaagytttcatatgacctcctctcttccaacatagttagaaaactttcccatggctcgcagagtccactgtgaatacctttctcatgcagtgtttcacatggttctgggaaatttgcaagggtc

SEQ ID NO: 306117 - DNA, 426 bp, Homo sapiens
atgggcttccttcccccgctgggtggtgatgaaaaatacccctcgtgtcaaaggcacttataaagcaagtaattaaggtcatctgctcaaatctcacccacaatttgtgttcatagagaaataaaaaatttctacctaatatcagctgattcacttatatgtttcatgactaacagcatcatgaaacattagaattggtaaggttctaagaagccattcagtttagsctcctctcatgtaataccgaaatcctttctacaatatcaccaagtgttttccagtctctgccagaatgcttgccctcttccaagacagtttcagaaaagcccatcctcatgtttaaacacaaacgtttcccagtgttcgcgaccatttccacagtccttaggctcattcacaacaattacttaaagaagataatgatgc

SEQ ID NO: 306118 - DNA, 593 bp, Homo sapiens
aacagagacaagaagccagtagtgctcaacattggtgcacattaaaccatctggggaactaaaacaaacaaataaacaaacaaaaaacagacacctataaaccaataaaattatttctgggggtggctgtggacatccaaattccctggtaatttggaggacgtctgccaaaagcactttggaagtgacggcaaacctcgatatttccccaaaagataaagtgggtgggatggatgttgattcaacacatgttgagcaagcatttgccrtgtagtcagcattactgaccaatttctgccacagttctttgcaggagatatgtcactattcctattttatagatgagaagcatgagatttgtgatagttaaatgatttctaaaaggaaacatagtaaataatagatcctagatgtgagatcaagctgggacttaaaaaactctaaggtcactctggcgtttattatttgtggtctctcaataggattgaaacttctcccaagattttggaaatttcatataggtttgatctttccaagtgaaaagcccagactccgttaagtatagggtgtaatcgaatgacacagaagctatc

SEQ ID NO: 306119 - DNA, 555 bp, Homo sapiens
gggagggtacattggacattgctctgggccagtgtctgtgctaagaactttatagataatctcatgcaagtctccaaacaaaccttcaaaataagaagtcatttttcttttaggaagaagaggtaacagaggctcagactaagtaatttttccagggtcttgaagcttgagcatatagatctgaaatayccctttctctgtcccctcatgtttcatcacaaccccatggtcactggtattattaagtccagttgtgaccttgaaatcccgcagagtatctaccatcccttccagcttctgcatataggacagctaataggttgaagtcaaggctgaacattccttttgtctctattaagtttcagggtcagacagttgttcttttatccagcctcatttcctcctcatgaagctttcttctggccatgcccctcctataatgggaaaccacatgggtaccatgccccatctgaggccagagtgtggggtccctcagagtccaccaggaatattatgtcccttgatgagcagactatgtgcttttattaccaaaga

SEQ ID NO: 306120 - DNA, 496 bp, Homo sapiens
cccctcatgtttcatcacaaccccatggtcactggtattattaagtccagttgtgaccttgaaatcccgcagartatctaccatcccttccagcttctgcatataggacagctaataggttgaagtcaaggctgaacattccttttgtctctattaagtttcagggtcagacagttgttcttttatccagcctcatttcctcctcatgaagctttcttctggccatgcccctcctataatgggaaaccacatgggtaccatgccccatctgaggccagagtgtggggtccctcagagtccaccaggaatattatgtcccttgatgagcagactatgtgcttttattaccaaagactgatacgggaagccaagttattaatgatgctcctggtctttgatgacctcaaaatatctaaagtgctgctaagtaaagctgtcacacacagacacacacacacacacacacacacacacagacacacacaatgtaacataa

SEQ ID NO: 306121 - DNA, 636 bp, Homo sapiens
catacgtgatgatgaaaggctgaatcctttactcttaaggtcaggaacaaagctagcctggtctttctcaccactcctggttgacatgtcactggaggtcctcaccagagaaattggtcaagtgaaagaaataaagggcacattgattggagagaaaaagtaaaactttctatttcacagtcagtacgatgattacttttttttttcaactcttagctaatccytacaaaaaactcctggaactaataaatgattttaacaaggtttcagaatattaatatcaatataaaagatcaagtgtatttttacgtactaacagtaaacagaacttgaaataaaatataatacttggcatagtgtcagaaaaaatatacattcagaggatatttacaaaaattcatacaaaagctttaaaggaaaattggaaattattgctacaattttaagatgaccaaaaaattaactttggccctttcctcacacataaaagtaaagcatagtgggtcttaaacctaaatgtgaaagcgaaaatctttataacttctagaagcaaacagaagaagagctttttatttttacttagagggaacaaatatttcacaggtaaaatatgaaaaacattaatcaagaaagaaa

SEQ ID NO: 306122 - DNA, 570 bp, Homo sapiens
gttcttttatccagcctcatttcctcctcatgaagctttcttctggccatgcccctcctataatgggaaaccacatgggtaccatgccccatctgaggccagagtgtggggtccctcagagtccaccaggaatattatgtcccttgatgagcagactatgtgcttttattaccaaagactgatacgggaagccaagttattaatgatgctcctggtctttgatgacctcaaaatatctaaagtgctgctaagtaaagctgtcacacacagacacacacacacacacacacacacacacasacacacacaatgtaacataataattagatttttgtacacttacaagtatataaaatattttatttgttttatttctaaaataatctttgcctttctaggtcattctttattgtatgtgtttaaggtgtatagtatgatattttggtacatatgcagagagtgaaatgatcactactgtcaggcaaattaatgcatccattatctcactcccttagcaagttttcagcacacaatataataatattgttaattataattcacataccccac

SEQ ID NO: 306123 - DNA, 570 bp, Homo sapiens
gttcttttatccagcctcatttcctcctcatgaagctttcttctggccatgcccctcctataatgggaaaccacatgggtaccatgccccatctgaggccagagtgtggggtccctcagagtccaccaggaatattatgtcccttgatgagcagactatgtgcttttattaccaaagactgatacgggaagccaagttattaatgatgctcctggtctttgatgacctcaaaatatctaaagtgctgctaagtaaagctgtcacacacagacacacacacacacacacacacacacacagacacacacaatgtaacataataattagatttttgtacayttacaagtatataaaatattttatttgttttatttctaaaataatctttgcctttctaggtcattctttattgtatgtgtttaaggtgtatagtatgatattttggtacatatgcagagagtgaaatgatcactactgtcaggcaaattaatgcatccattatctcactcccttagcaagttttcagcacacaatataataatattgttaattataattcacataccccac

SEQ ID NO: 306124 - DNA, 536 bp, Homo sapiens
tgctgttgaaatcactaacttcaagtaccaaattgtctgtaatgttagatctggccaatgtaaacaacccaaaaccccaggcttactaattcagttcttagaaaccactccaattcatcttcttctggaccaaagtgcttcctcaaaccatttaaatctatttttagttccacagtaagctttcacatttagtttacgttaytaaatcatatttgatattttaagaatgtattaatgttttatgtcacacagttcaaatttctactaaataatcagtcactcaatatcaagaaatatagcctcaataaatgatctgatcctctggtttttgagtctaagttttactggctattaaagagattggcttgcttttaagtaagtcaggcagtcacccgaatgggcttcgtgtttagacatgtaaaagtgatgactcagtggatgccccattgcttctggtaatttaggaaattgctaaaatataagtcaccctctggtaaagtcacacagtactcatttgtactccattatcagtcatc

SEQ ID NO: 306125 - DNA, 468 bp, Homo sapiens
tataggacacagactaaatcaaattcacttggtgacttccgtacttatatgatgaatcactcaacaccagagcttctgtggttcttggtcttctcatagtcaacctctattcaacctcagccacccactttcagtagagcttagaatgaccagtagctggggcatttctaaatgttcacttgaagaatcctgcattgtcgatgagaacacatagacacatggtgcgggataatacatactggggcatgttggagagttggggggaggaggtggaacamcaggaagaacagctaatggacactgggcttaatacctaggtgatgatatgacctgtgccgcaaaccatcatggcacacgtttacctatggaacaaacctgcacatgtactcctgaacttaacaaaaattaaaaaagagaagaatcctacattctcggtctcatttcctactcttccagctgggtttctcc

SEQ ID NO: 306126 - DNA, 468 bp, Homo sapiens
tataggacacagactaaatcaaattcacttggtgacttccgtacttatatgatgaatcactcaacaccagagcttctgtggttcttggtcttctcatagtcaacctctattcaacctcagccacccactttcagtagagcttagaatgaccagtagctggggcatttctaaatgttcacttgaagaatcctgcattgtcgatgagaacacatagacacatggtgcgggataatacatactggggcatgttggagagttggggggaggaggtggaacaccaggaagaacagctaatggacactgggcttaatacctaggtgatgatatgacctgtgccrcaaaccatcatggcacacgtttacctatggaacaaacctgcacatgtactcctgaacttaacaaaaattaaaaaagagaagaatcctacattctcggtctcatttcctactcttccagctgggtttctcc

SEQ ID NO: 306127 - DNA, 609 bp, Homo sapiens
tcttgttgctatctagtcactgttagcacaaattgagcatcccaaaactgaaaagccaaaatctgaaatgctctaaaacccaacactttttgagcctaaatatgacacttaaaggagatgctgctcattgaagcatttcagattttagatgttcagatttaggatgtttaactggtatgatgcaaatattcatgaatctgaaaaaatctgaactgcatacctgctcccaagcattttggataagagatactcaatctatacattaagyagtttcttctagaaattatatatatgtatataagtgtgtatatacgtatatatgtatacatgtgtatatatgtatatatgtatacatatatacattaaattatacacacatatatgtgtgtgtgtgtgtgtgtgtgtgtgtgtatgtatatggttgttttgcttttgagatgaggtcttgctctggtgctcaggctggaatgcagtgacatgatcttggatcactgcagccttgaagtctcagactcaagctatctttccacctcagcctcatgagtagctgaaactacaggtgcatgccaccatgcccagctaagttttgtattttctgtagagacaggt

SEQ ID NO: 306128 - DNA, 609 bp, Homo sapiens
tcttgttgctatctagtcactgttagcacaaattgagcatcccaaaactgaaaagccaaaatctgaaatgctctaaaacccaacactttttgagcctaaatatgacacttaaaggagatgctgctcattgaagcatttcagattttagatgttcagatttaggatgtttaactggtatgatgcaaatattcatgaatctgaaaaaatctgaactgcatacctgctcccaagcattttggataagagatactcaatctatacattaagtagtttcttctagaaattatatatatgtatataagtgtgtatatacgtatatatgtatacatgtgtatatatgtatatatgtatacatatatacattaaattatacacacatatatgtgtgtgtgtgtgtgtgtgtgtgtgtgtatgtatatggttgttttgcttttgagatgaggtcttgctctggtgcycaggctggaatgcagtgacatgatcttggatcactgcagccttgaagtctcagactcaagctatctttccacctcagcctcatgagtagctgaaactacaggtgcatgccaccatgcccagctaagttttgtattttctgtagagacaggt

SEQ ID NO: 306129 - DNA, 450 bp, Homo sapiens
gattcatcatggctttaatgtgtttagaaaatatcttactgacctcatagctcacgggtgtgagctattattattacagctattttacttcttcatttccagtgtggagactgtatttataacattaggatatgcattattgtgcatacatctccctatttatttctgtattatttctttaaaatatataccagtgtctaaccagggtcagttccaaatcccacatgctgtggtttttaccacctctctgacatctgcctcatttcaccattactagctctattgccattcctcaaaattagcaatgcacttcccygtagaaatttgttatttgtgatcatctctcctgtccagaagcaaggtattatacaagtgcatttactttagtcacattataatggctgttttcttttaagaccattctagatactggatgaaacagaagactca

SEQ ID NO: 306130 - DNA, 331 bp, Homo sapiens
atatgcaggcatactttgctctattgcaacttgctttattgctcctcacagattgtgtactttttacaaattgaaattctgcaacaatcctgcatctagcaagyttattgacaccatttttccaacagcatgtgctcactttgtgtctctgtgtcttgtaatatttcgaacttttttattattgttaaatctgctatagtgacctatgatcagtggtctttgatattactattataactgttttgggtcatcatgaaacaggcccacataaaacagaaaacttaattcataaacgttgtgtgtgttctgactgttgtattcactgactgtt

SEQ ID NO: 306131 - DNA, 623 bp, Homo sapiens
tccttttcttttctctttcaccttctgcagcattctcaagctccattaattactgcagaagcaagagagattttaagaccagcctgttggtgatttctcttcacctctgagatctctaggtaggcttccttagaagatgttttaagaagctcagatacctgcttccactaatgcaggtaccttgatctttgatttgaatcttctgaaacctgttttacttttacactagttctgaaaagtaagacacaattttctctgccttgagagacatcacaagttggaccctctagaaaccgactttgagggggatattagtgttttggatttttattggaggtgatcactggagagaggagacaaattgagcagagagataagttagatgtccctttgaacaagacgaaacattagctaaccttacatggagtttctggcgtggaaattacttgtcacagttgtcccaaatagtttggaccattatgaaactctgtgaccagtcattggatgcgagtggcccctgagaactgcatgttattgggtgaggatgctctctgaggccaagcctgatggagaagasagctgggaaggtacgtctttgatgggagatctgagaggcatggtgg

SEQ ID NO: 306132 - DNA, 458 bp, Homo sapiens
aaagatatacctgagactgggttatttgtaaaggaaaaaatgtttaattgactcacagtttcacatggctggggaggctcacaatcatggcagaagagcaagggacgtcttacttagcatcaacaagacagagtgtgtgcagggaaactcycctttgtaaaaccatcagatctcatgagacatattcactatcatgagaagagcacaggaaagatccacccccatgattcaatcagctcccaaacaggtccctcccatgggatgtgggaattgtgggagctacagttcaagatgagatttgggtagggacacagccaaactatatcagagcatatggaaactctctgcactacctgatcaactttgctatgagcctgaaactgctctaaaaataaaatctttcaaaaaatgattcaaaaatggcagggtgtatctaaatacaacagactaaaaacagc

SEQ ID NO: 306133 - DNA, 483 bp, Homo sapiens
tgcagtgttagaagagggttaatgtttgctaaatcagtactattttttttggagataatatagtgctgtctatatttggctaaaaattaaaatatcaaaactataaaataggacatcaccatcaccttaaacaactgttagtaaatttcargtgaaaatagtaaatatttatgataaaaattacaaagaaagttagaggtaagaaggtctagtagtaaatgtttaaccaggtgcacttcaggaagctgtatggaattaattggatgggtctattgtatttataacataaaaaatagacacttttgagaacagaaggccagcatgctaacaaaatacagcataatgcttcctaaagtgttctcacttccttctgtgaaggaatctgcatgtatggtatagttgcatgtgggatacagctgcacgtctggtatacctccatgtgtacagtgaagctgcatgtgtggcatagcagcatgtgggata

SEQ ID NO: 306134 - DNA, 483 bp, Homo sapiens
tgcagtgttagaagagggttaatgtttgctaaatcagtactattttttttggagataatatagtgctgtctatatttggctaaaaattaaaatatcaaaactataaaataggacatcaccatcaccttaaacaactgttagtaaatttcaagtgaaaatagtaaatatttatgataaaaattacaaagaaagttagaggtaagaaggtctagtagtaaatgtttaaccaggtgcacttcaggaagctgtatggaattaattggatgggtctattgtatttataacataaaaaatagacacttttgagaacagaaggccagcatgctaacaaaatacagcataatgcttcctaaagtgttctcacttccttctgtgaaggratctgcatgtatggtatagttgcatgtgggatacagctgcacgtctggtatacctccatgtgtacagtgaagctgcatgtgtggcatagcagcatgtgggata

SEQ ID NO: 306135 - DNA, 625 bp, Homo sapiens
agtcctgttggtcttaaaagaccctgtacttttgggcattgatccagaaggaaagcattctgtttaatgctcagttacgtctatcctcaagaccctgtgagtgtgagtgtgtcttcataggcactaagcaaactgacatcattttgagtacaactcaggcctcaaagccagtttccactaggttgagcaggaagcctgactctctcaccatgtctgggtgctgttgaggccatggcgtcaagggcactctggagttaattgcttccattcttgctttgtgtttcagataggaccaaatgagagatcaggacttcaaggcaaaggrcgaacctgggagataatttaaatgtcattaattcgttgagattcttaatcttatttttctgaatagttcattaaataggtagtaacacttttggttatatgcctgggaacatctcaaaaaattgatagactttctgagctcctcatgggcaaggcctcttttagaataattcatatctgttagtcaacttgtaaattattcattttttgattaatatgctaattaaacatttgctgttaaaaaggtataaatatctttcattgcctaaagtaattagaatatgtaatttaagcattataa

SEQ ID NO: 306136 - DNA, 505 bp, Homo sapiens
cggctaacaagccaccacatatgagtggttatattgcagataaaatgctgttgagataatgtttttaggctaaaatcttctcattgatttattttcctcgtttcctttgtattaataaattgytcaataaacttgcaatagattctgaagcatgtgcttctaaaattgttaaagagttttgaagaaatttgaaattgctcaggtagaaagaatccattaagttgtcttttaacttcattaaggcaaggaaattccactatcttataacaaatgaacacttttaaaaacttttgttttatgtaacatttatagacactcttgtgtcacctcaaacccataccctcaataacaccatttttatttgtttctaaaaataacttttttgatgcaactttactggacagaattttgtgggcagaacttacggggctctatgatgaggatgaaacaattccacttgaattcaaatggtttgaataggccctgcacaaattgtcactgggca

SEQ ID NO: 306137 - DNA, 575 bp, Homo sapiens
taataaattgttcaataaacttgcaatagattctgaagcatgtgcttctaaaattgttaaagagttttgaagaaatttgaaattgctcaggtagaaagaatccattaagttgtcttttaacttcattaaggcaaggaaattccactatcttataacaaatgaacacttttaaaaacttttgttttatgtaacatttatagacactcttgtgtcacctcaaacccataccctcaataacaccatttttatttgtttctaaaaataacttttttgatgcaactttactggacagaattttgtgggcagaacttacggggctcyatgatgaggatgaaacaattccacttgaattcaaatggtttgaataggccctgcacaaattgtcactgggcatattctcatgacttaatctttttttctttttctggataaatatcatcaggtcctgaagggaagggaaagaacagaaaattgacttatactggtaagaatcatcatttacttagttcaggactccactctttaatcttcggtggattgttcctgtaggtggctgagcagcagtccacatgcca

SEQ ID NO: 306138 - DNA, 575 bp, Homo sapiens
taataaattgttcaataaacttgcaatagattctgaagcatgtgcttctaaaattgttaaagagttttgaagaaatttgaaattgctcaggtagaaagaatccattaagttgtcttttaacttcattaaggcaaggaaattccactatcttataacaaatgaacacttttaaaaacttttgttttatgtaacatttatagacactcttgtgtcacctcaaacccataccctcaataacaccatttttatttgtttctaaaaataacttttttgatgcaactttactggacagaattttgtgggcagaacttacggggctctatgatgargatgaaacaattccacttgaattcaaatggtttgaataggccctgcacaaattgtcactgggcatattctcatgacttaatctttttttctttttctggataaatatcatcaggtcctgaagggaagggaaagaacagaaaattgacttatactggtaagaatcatcatttacttagttcaggactccactctttaatcttcggtggattgttcctgtaggtggctgagcagcagtccacatgcca

SEQ ID NO: 306139 - DNA, 550 bp, Homo sapiens
ggaactgtaagtccaataaacctctttattttgtaaattgcccagtctcagttatgtctttatcagcagcatggaaaaggactaatacacctactaatcaacttcaagtgaatagatagatactaatagtattcccattttacagattagaaaaatggagatcagagagaaaggtaaatttcaataagacaaataaaataaggaatagaacatttgaatccagcataaaagtttttcttttactcactaatgtgctacaacctcccaytggcttgaagtcactcctccctcctctgaactctgtctgaatttctcttaggtccttagcttttgttaatgcattacaataatctatgtgcacattttatccctctgacagcaggaataacagctcaatcatgtttttaagccctctactgtcattcacatgccattcattcaacactttttggtgaatgaacaatgaagaatttcattttgtgaaaaagtttctgaagaaaagaaaatgtaagaagaaaattacagctgaagtaaaaaataattttacaaa

SEQ ID NO: 306140 - DNA, 550 bp, Homo sapiens
ggaactgtaagtccaataaacctctttattttgtaaattgcccagtctcagttatgtctttatcagcagcatggaaaaggactaatacacctactaatcaacttcaagtgaatagatagatactaatagtattcccattttacagattagaaaaatggagatcagagagaaaggtaaatttcaataagacaaataaaataaggaatagaacatttgaatccagcataaaagtttttcttttactcactaatgtgctacaacctcccattggcttgaagtcactcctccctcctctgaactcygtctgaatttctcttaggtccttagcttttgttaatgcattacaataatctatgtgcacattttatccctctgacagcaggaataacagctcaatcatgtttttaagccctctactgtcattcacatgccattcattcaacactttttggtgaatgaacaatgaagaatttcattttgtgaaaaagtttctgaagaaaagaaaatgtaagaagaaaattacagctgaagtaaaaaataattttacaaa

SEQ ID NO: 306141 - DNA, 524 bp, Homo sapiens
gagttactaattctggggttttgttagagagaccatatgtcttgacatttggtatgagtcttacctttctactgctcctcctctctctttccatgtatgtgacatgcagaggtgtagaagaaggttcttttgggccttcctccatgagttttagttttttgcccaagatcgcaatcaataccataaaggaaactcttttaaggacccaagcttgggggactttttccttctcagccacaaatctaacccagtgcctaatctgtggggttcttcccttgccagtgcttttaactctgagaggggcatktgtcttcttccttcaacatagatcaaataccccattttcattatcctttcattgttacactataatatgcatatttgaaatacactgaatgtgttaattaagaatgtttctggttttctgatgactcctaatttcacacaataaaataataaggtacaatgaggaagggcaaaactaagacacaactaaggcacaaattgcaggattggattttgca

SEQ ID NO: 306142 - DNA, 555 bp, Homo sapiens
tctaacttgtttattttcttgctccagttattccagttttggcaaatgagagctctttcagttaattcctccttccctttggcatacagacattatattgtgtgttttctttttctttttgaagcactttcttattttttggtaatacaagatgtcccaggctcatcttgtatatttcctgctgcagtcctagaatcatctatttctccaaggagtccttgtgccttttgttggagaatgtattagaagctaaaatctgggtgctaggtttgctttttgctactaggatatgtttgttcccaggccctcttgactgacagcaagaaaatatrtatgtacctatctatctatctatacacaggcatgcatatgtaagtataaatatgccatttataaatatttctatatataatcattctatatataaccataaatctatattgagctaaacatgatactcttcaactctaatctcttactgcataaattgttttagccttctccctaccttatttgcaaactccaactccaacagtgagaaacctcactcccacc

SEQ ID NO: 306143 - DNA, 629 bp, Homo sapiens
aattttcacaaagtgaactcacccatataaccaggatgagaaacaaaatattaccaacccctgcaaacacttccaagtccaggactcctggaccccctttccagtcccttttctgctgccagggataaccattagcctatttaaaatgctgaaatgagatctgcctggtccttgaactttatatccaggaatcttactgtgctggttcctttcgcttcccatgatgtttgtgagatttacccatgtttatgagtacagaatttgttcatttgaatgcaccacaatttccaacaggtatgtaaatgttgaatgaaaatgggcaagccagaaacagaaaaagagatagaaattgagagcagacatattaaacgattcacaccatcactcaaaattgcagaaatctaagtcccaaygaaatgtagtttttcctctatcagaatgacaaaaatgaaaaggtttgacaaagctcagtgttgagaaggatgcagggaaacaggtacaatcatacattaataaagaaaataaaaattagtaagactcttttataggccagatatttcaagacacattgttcttagatactcactacaacactgtttttaaaaacagaagtctggaaaactccaagt

SEQ ID NO: 306144 - DNA, 524 bp, Homo sapiens
cttaatctttcttaatgctattacctacaaaatcatgcagttaggaggaatctccaatatccacctcttcaattcattataattcacattctttcagttcagtatggtttggtttaaagaagttcagtttcccagtaacatattagaagccrtgtggaaatgaacaatgagtaaattgaatacaatgtagaaaaatattcctgatattgtatttcaactacatggagtggacattgatttttgcagtccagcttctatgacccttgtcctagtaactgtacacatttttcccttcagaagatcatacattcctcccacttgtctcaagtgttgccagtggcagttactgcacatagaccaaatccacacagtatattacattgtttaggtgactatgttgggattagggatggccacctaagtcatagggagcaatgaaacaaaatgagtttggttccaaatgaggggaaataatctcactatttctggttgactctgaacctaggcacttttgacagccctct

SEQ ID NO: 306145 - DNA, 610 bp, Homo sapiens
agtccacattgtcacaaatgacaggatttccttctttttcaaggcttaatggtattccattgtgcacatataccacagtttctttattaggttgattccatatttggctattgtgaatttaattctgcaataaacacaggagtgcagatgtctcttcaatatatggtaagccctcactkaatgttgttgagatatttttggaaattgcaactttaaagaaaacaacatataacaaaaccaattttaccctgagctaattgatataaatgagttaagtttctatggcatatttctggccatataaaaaaccccaaacttctaaataaaaaccccaaacacttttaatattaaacattgaaataaatgtaagctatatatacatttaaaaatattaatgaaaacatgttaggtgattatttacccaattactccagttcagggtagctggtggccagagcctatcccaacagctcggggcagaaggtgggagtcaactccagagaggacattgtcccatcacagggcacacacacacagccacactcactcacactaggaccatttagacacactaatgaacataatattcacatcttgggatgtgggagtg

SEQ ID NO: 306146 - DNA, 610 bp, Homo sapiens
agtccacattgtcacaaatgacaggatttccttctttttcaaggcttaatggtattccattgtgcacatataccacagtttctttattaggttgattccatatttggctattgtgaatttaattctgcaataaacacaggagtgcagatgtctcttcaatatatggtaagccctcactgaatgttgttgagatatttttggaaattgcaactttaaagaaaacaacatataacaaaaccaattttaccctgagctaattgatataaatgagttaagtttctatggcatatttctggccatataaaaaaccccaaacttctaaataaaaaccccaaacacttttaatattaaacattgaaataaatgtaagctatatatacatttaaawatattaatgaaaacatgttaggtgattatttacccaattactccagttcagggtagctggtggccagagcctatcccaacagctcggggcagaaggtgggagtcaactccagagaggacattgtcccatcacagggcacacacacacagccacactcactcacactaggaccatttagacacactaatgaacataatattcacatcttgggatgtgggagtg

SEQ ID NO: 306147 - DNA, 610 bp, Homo sapiens
agtccacattgtcacaaatgacaggatttccttctttttcaaggcttaatggtattccattgtgcacatataccacagtttctttattaggttgattccatatttggctattgtgaatttaattctgcaataaacacaggagtgcagatgtctcttcaatatatggtaagccctcactgaatgttgttgagatatttttggaaattgcaactttaaagaaaacaacatataacaaaaccaattttaccctgagctaattgatataaatgagttaagtttctatggcatatttctggccatataaaaaaccccaaacttctaaataaaaaccccaaacacttttaatattaaacattgaaataaatgtaagctatatatacatttaaaaatattaatkaaaacatgttaggtgattatttacccaattactccagttcagggtagctggtggccagagcctatcccaacagctcggggcagaaggtgggagtcaactccagagaggacattgtcccatcacagggcacacacacacagccacactcactcacactaggaccatttagacacactaatgaacataatattcacatcttgggatgtgggagtg

SEQ ID NO: 306148 - DNA, 622 bp, Homo sapiens
ttaactcaaaaatacatatatgtgtttatgtccacatatacayataaaattttataacagaaggtgagaatgggatctaagtcaacttctacatggtaaataggtgcagtaatttttactggtgggtgaccatagcaatacaaagatgggaaggaagggtggatgaacaatactataggtactgttggttggaggaaagaaatggtagccctggacatagctgagtgattttaggatccttaaatagattcatgcccaagtgtcttagtctgtttgggctgctataacacaaatatcacagatcgggtggcttaacaacaaacatttatttctcacagttctggagggtagaaagtctatgatgaaggcattggcagattcagtgtctgatgagggcccacttcctggttcacagatgaccatcttctcactgtgtcctcacttagcagaaggggtgaggaagctctgtggggtttctgttatagggcactaatcccatttatgagggctccaccttcatgacccaatcacctcctagaggccacctccaaacaccatcacttgggattaggcttcaatgtataaattttagggggacataaaaattcagtttttgcgccaa

SEQ ID NO: 306149 - DNA, 622 bp, Homo sapiens
ttaactcaaaaatacatatatgtgtttatgtccacatatacatataaaattttataacagaaggtgagaatgggatctaagtcaacttctacatggtaaataggtgcagtaatttttactggtgggtgaccatagcaatacaaagatgggaaggaagggtggatgaacaatactataggtactgttggttggaggaaagaaatggtagccctggacatagctgagtgattttaggatccttaaatagattcatgcccaagtgtcttagtctgtttgggctgctataacacaaatatcacagatcgggtggcttaacaacaaacatttatttctcacagttctggagggtagaaagtctatgatgaaggcattggcagattcagtgtctgatgagggcccacttcctggttcacagatgaccatcttctcactgtgtcctcacttagcagaaggggtgaggaagctctgtggggtttctgttatagggcactaatcccatttatgagggctccaccttyatgacccaatcacctcctagaggccacctccaaacaccatcacttgggattaggcttcaatgtataaattttagggggacataaaaattcagtttttgcgccaa

SEQ ID NO: 306150 - DNA, 547 bp, Homo sapiens
ttatttacaataaactagggtgtcaatctatataaaaactagcttttatgtttttactatamttctctctcaattttatccatccttctatgctatcttacaatttattggttttgtctgaataatgctagaaaattgacttgacattatttaaaactatgatctgtggaaaattgttaccctgagtacctaagaagtatatcactaaaactctatgctgaagtgtagacatgtttgtgctattgttaaaagcactttcctatccgctgctgctgtttggttagccgcagcttagctgagaacagtcaggattgtaaattgctgactccttggagacatactacacaatgacactgaaaccagtaacataaaatcaattatttatcttgtatgcaatatataagaaaaataataacacttttaaaaacattggaagttaaagaaggccagtgtagcttgttttgcttttgaaagctaatctatgttatttgatgacagaaatgttgaaaactgtattgtttctgtattatgtcacagaatagcagcc

SEQ ID NO: 306151 - DNA, 604 bp, Homo sapiens
tatcttcccacattggatgtctattggttgaacagtgtgcaagagagaaaatctgtcccacttataatggctccagctgacagacaggttttgtgctttgatgcaatgtatctttaaaggttccagaaataaagaggaatacttgaactgggctaaagtctttctcagacttggattcattcacatatgattataattgtaaacctgattatatttttagtcagaatcagaggacagtagataattttcacattacatttatagactggttattactaagccattgagtagaattaaacagccacggctgttttcaatactgtatggtcgacaatagaaataactaagaatttatttacaataaactagggtgtcaatctatataaaaactagcttttatgtttttactatacttctctctcaattttatccatccttctatgctatcttacaatttattggttttgtctgaataatgctagaaaattgacttsacattatttaaaactatgatctgtggaaaattgttaccctgagtacctaagaagtatatcactaaaactctatgctgaagtgtagacatgtttgtgctattgttaaaagc

SEQ ID NO: 306152 - DNA, 547 bp, Homo sapiens
ttatttacaataaactagggtgtcaatctatataaaaactagcttttatgtttttactatacttctctctcaattttatccatccttctatgctatcttacaatttattggttttgtctgaataatgctagaaaattgacttgacattatttaaaactatgatctgtggaaaattgttaccctgagtacctaagaagtatatcactaaaactctatgctgaagtgtagacatgtttgtgctattgttaaaagcactttcctatcckctgctgctgtttggttagccgcagcttagctgagaacagtcaggattgtaaattgctgactccttggagacatactacacaatgacactgaaaccagtaacataaaatcaattatttatcttgtatgcaatatataagaaaaataataacacttttaaaaacattggaagttaaagaaggccagtgtagcttgttttgcttttgaaagctaatctatgttatttgatgacagaaatgttgaaaactgtattgtttctgtattatgtcacagaatagcagcc

SEQ ID NO: 306153 - DNA, 547 bp, Homo sapiens
ttatttacaataaactagggtgtcaatctatataaaaactagcttttatgtttttactatacttctctctcaattttatccatccttctatgctatcttacaatttattggttttgtctgaataatgctagaaaattgacttgacattatttaaaactatgatctgtggaaaattgttaccctgagtacctaagaagtatatcactaaaactctatgctgaagtgtagacatgtttgtgctattgttaaaagcactttcctatccgctgctgctgtttggttagccgcagcttagctgagaacagtcaggattgtaaattgctsactccttggagacatactacacaatgacactgaaaccagtaacataaaatcaattatttatcttgtatgcaatatataagaaaaataataacacttttaaaaacattggaagttaaagaaggccagtgtagcttgttttgcttttgaaagctaatctatgttatttgatgacagaaatgttgaaaactgtattgtttctgtattatgtcacagaatagcagcc

SEQ ID NO: 306154 - DNA, 468 bp, Homo sapiens
tgctgttccaagttctggtacatagtgatgaataaaacaatcatggttgctggctccatgggttttactgtccaccgyaggcttttgccaagttgttaatctatgacaagatagtaaaagtatatgagttacactgcatacagaggaaatgctatctactatttatatgcctttatattacctgcaatctattttcactgctagttttttttttattacatttattctatgtcaagtttgcccctgggctacaccgtaagacagatggagtctcctgcatcccttggcattgttttccatggccttcattcattcatggcacaattgtttcccaagtccctggactgttattagcttccatggctgcacagaatccttcattttatcctttctcctgagcttacatttccagaaatgactcatgttgcagacttatacttcccaattttattcatctactaaaatatc

SEQ ID NO: 306155 - DNA, 552 bp, Homo sapiens
taaatttaacaaataaattgaaataattaaaaagagttaagcagcaatacggaactgaaaaattcaattcgtatcctaaggaatgcatcagagtctcttaatagcaaattgatcaaacagaataaagaattagtgagcttgaagacaggctatctgagaatacacagaggagaaaaaggaaaaaagaaaaaaaaataatgaagcattcctatgagatatagaaagtggcttttttaaaaggccaatctaagagtaattggccttaaagaggaggtagagagaartagaggtagaaagtttattcaaagggataataacagagaaattcacaaacctagagagagatatcaatatttaagtacaggaaggttatagaacaccaagcagatttaacccaaagaagagtacctcaaggtatttaataatcaaacttcaaagcttaaaaataaacaaaggatcctaaaagcagcaagggaaaataaacaaataatatgtaatggagctccaatacatctggcagcagacttctcagtggaaacattcaggccagga

SEQ ID NO: 306156 - DNA, 574 bp, Homo sapiens
atctcagcaccatttgctaaaatacgtgggtgataaacaacactttgttttatccaaggttagaaaaaaatatgaaaatcctttttcctcacttgactcaaggttatatgacctgcattgggttttaacaacaacaaaaaattaattgaaggactaaaagaaatgtgtacctctacataaacacagtgaaactggtcactatatttacttaatttattttgtataggaattaatatttactaattgtccttcatgttttacatattaggttgattcactaattaatgaactactcttattcagaaagatatagaacatagaaaccttcagatttaaggttttttccccctattactttgttctaagatgcacaacttgtatttttaaacatatctttagaaagaaacacttggagtaacaatatattctaagtgtcccctagggaattttttgtagcattggaacytgagcaatatttagcagcatttggccccttcctgaaaatgactccttggaccagcacccatacctcccaacccccagcaaatcgctactaatggaatttcagttttgt

SEQ ID NO: 306157 - DNA, 491 bp, Homo sapiens
tgtttgactattagttcacatactgggctaggtgatgtgtacgtgatcctttcagtatacttgagataaagaataatttttctctgcttagatttgttgcttttaaggtagaacccctggtgtgggggacagtcagggcatccacagattttgaaagagttgctagaggcaaattaaacagaaatattagtgcccatggccatttttgtctaaccatttgagggaaagctcatgtgtatcttagttaaggtctgtctaaataactactatttctgattcttattttttgtaggccatctttttaaaagaatctatgctattgctatgtgatatttcagagaaatctttttgtgttttagaacmggtggcaataaggaatattgttatagtttgaatttaaatgaaatattaatctaaataatccttcttgaaacatatttttttttctgagagacagtgtttgatattaaaactcagatgaatagaaccaa

SEQ ID NO: 306158 - DNA, 363 bp, Homo sapiens
tgtgctacttattctgctgcgtgtgtctgtgtgagctgtgtgcttatatagtcagggtttcttctgctcagtcattaaggaggatatattatattcccatttcattcatatgttgtcaggatgaattgacaaacctytttttccttcttccataatacctacccaatgcagttccaagcatgggaacttacaatttattatagacatttctgattataataaagtactgagtctcctgttttgggtatacattgtctttgattcatctttttggaagagatgatataaactttaaaaaagctagtgattggattgcctttcctttgagatgtgctgtgctttattaatcttgagttgtgggtt

SEQ ID NO: 306159 - DNA, 363 bp, Homo sapiens
tgtgctacttattctgctgcgtgtgtctgtgtgagctgtgtgcttatatagtcagggtttcttctgctcagtcattaaggaggatatattatattcccatttcattcatatgttgtcaggatgaattgacaaacctctttttccttcttccataatacctacccaatgcagttccaagcatgggaacttacaatttattatagacatttctgattataataaagtactgagtctcctgttttgkgtatacattgtctttgattcatctttttggaagagatgatataaactttaaaaaagctagtgattggattgcctttcctttgagatgtgctgtgctttattaatcttgagttgtgggtt

SEQ ID NO: 306160 - DNA, 598 bp, Homo sapiens
atttaaaaatgaagatcaattggaaactttgcaggtaaataacatttatattttgtctttgctttctaaagatgttacattgaaacaagtgtgctcaaatgtgtagtgaaattagtcatagcattaatacctatctcaaattgcaagccacaaatgtcaawaacttctaattattatgattatattggattaaatctaaaagaactgtaattatatcattcataggtgcaatgaaagcttttatattaccacagcatttcaacatttttattaagatttattcagtaatcccccggctgtaatatgcaaccacctatgaaatgcagtgattcttctctaaagcagactaattagaatgggagttaaaataattttaaaattagaataatatattatgtctgagttatccacaataattacaggctaagaaaccttgccaaattaaaattattggtctgtttttgaggatttgtagggctgggtgcttgttattattgtaagaaggcatgaaaaggaagacagagtgtgaaaaagggaacagaaaaataaaaatacagactttatatgaagaatactgaagtagacagaaaggcaggtt

SEQ ID NO: 306161 - DNA, 584 bp, Homo sapiens
tgtataaaatggtaaccatagttaataataatatatcatatttttgaaaaatgccaagattttgagtgttcttactacaaaactaacagtgatgtgaggtartgcatatgctaattagcttgatttgtccgttccacaatgtacaggcaaacctctataatatgtggatttggttgcagatcaccataatgaagtgaatattggaataaagtatcacatgctttattgagtctctcattaatataaaagttatgtttacattatactatagtctattaagtatgtaataacattatgtttaaaggatgtacataccttaatttaaaataatttatcattaacaaatgctaacgatgacctaagccttcaattaattgtaatatttttgctgatggagggtcttgtacccatgttgatggcttctgattgatcagggtggtggttgctaaaggctggagtggctgtggcaatttcttaaaataagaaaacaatgaagtttgctgcatcaattaattcttcctttcgtaaaaaatttctcttcagtatgtgatgctgtttaacagaaattctttgaaaattggagt

SEQ ID NO: 306162 - DNA, 584 bp, Homo sapiens
tgtataaaatggtaaccatagttaataataatatatcatatttttgaaaaatgccaagattttgagtgttcttactacaaaactaacagtgatgtgaggtaatgcatatgctaattagcttgatttgtccgttccacaatgtacaggcaaacctctataatatgtggatttggttgcagatcaccataatgaagtgaatattggaataaagtatcacatgctttattgagtctctcattaatataaaagttatgtttacattatactatagtctattaagtatgtaatarcattatgtttaaaggatgtacataccttaatttaaaataatttatcattaacaaatgctaacgatgacctaagccttcaattaattgtaatatttttgctgatggagggtcttgtacccatgttgatggcttctgattgatcagggtggtggttgctaaaggctggagtggctgtggcaatttcttaaaataagaaaacaatgaagtttgctgcatcaattaattcttcctttcgtaaaaaatttctcttcagtatgtgatgctgtttaacagaaattctttgaaaattggagt

SEQ ID NO: 306163 - DNA, 600 bp, Homo sapiens
gttgtacttttaattgtcttcaataaccttttctttgcattcacaacttgggcgtttggtgcaagaggactrtcttggcttttgacatgacttccttgctaagcttaatcatttctagcttttgatttaaagtgggaaatgtgcaactctttctgtcacttgatctcttggaggacaatgtagggtcattaattggcctaatttcaatattcttgtgtctgaggaaataaggaagccagggaagaagagagatttgtgggagtacgtggtcagtggagcagtcagagcacacacaacatttactgattaagtttgcggtcttacatgagtgcggtatgtggaacctcaaaacaactacaactgtaacatcaaggataactgatcacagagtgccataacagataaaataataaagcgtttggaatattgtgagaattaccaaattgtgacagatacacaaagtgaaaacatgccattgggaaaatggtgcctatagactgcttgacatggggaagccataaactttcaatttgtgaaaaaaaaataacatctgagaagtgtaataaagtgaagtgccataaaatgaggtatgccttatat

SEQ ID NO: 306164 - DNA, 519 bp, Homo sapiens
caactacaactgtaacatcaaggataactgatcacagagtgccataacagataaaataataaagcgtttggaatattgtgagaattaccaaattgtgacagatacacaaagtgaaaacatgccattgggaaaatggtgcctatagactgcttgacatggggaagccataaactttcaatttgtgaaaaaaaaataacatctgagaagtgtaataaagtgaagtgccataaaatgaggtatgccttatatatatttaaaaacatkatatcatataattttatctgtcaaaacaaaacaaaagctgcattagatgagtggtggatacataatgtatactggaaaagaatgatgccaaacataaccctttgccccagcataggttgccagccatcaactgacttgctagggcacagaaagaaaaatgtctttccatcgaatgaagattgtttttttttttggactggacccttttaaatgctgatttattgtttactgtctatcttaacatggccatgcaac

SEQ ID NO: 306165 - DNA, 566 bp, Homo sapiens
ttatgatgctttagaattatgcaatctaataaaactagtataatccttctactaatggcatcgctttctcttataaaacagattaaattctatgttattaggaaatgctataactttgggagaattaggtcatgtaagagagttgcatcttaatatactataatttgcaaccaatttagaatgtgtcaggagtcatacacttctctgaaaccattctgttacatagtgtcctttttttctttttaaatagtcacacagtatatggtcccatgaagctaataaaaatgcatatcaagagtagtcwtgaagaaagctaattctttcaactttacaagatgaaataataaagacagtgatttataatgtaaaaataatttgcagcttcaatagattaattttcttttgattttatatttaaaaatatgtgtgcttattaaaatcagagcatattttaataggatctgtactaaatagtctagtttaacattaaatataatgcatgaatctttactctttaatcagtcctttaaaatttaacctttacagatactttatagcaaaaataa

SEQ ID NO: 306166 - DNA, 576 bp, Homo sapiens
  misc_feature (1)...(576): n = A,T,C or G
gcagtcaaaattatagagacagaaagtagaagggtggttgccagaatccaggggaggaagaaatggaaagttgctgttcaatggtaatagagtttcagtttttcaagatgaaaagagtgatggagatatggtggcaatggtattaaaaaatattatgaatgtatttaatgccactgaactgtactcttaaggttacatggtaaagtttatgttttgtgttttaccacaataaaaagtttgaagaaaattcttatagagacttcagttgagtaacactttattcacacccttcctacaaccccaaatagaggaacacaatctttgcttgaatcttcatctaaggagatggcagaaagtttaaygcatatattagactctagcggtggttctgaaataattggagcccaattgttagactactgagaggcaaaaatataggcctcaaggttttcatgtatcatctccaaattaactgggtgtatgctgagtcatttctccttttgctgccttagaggacaaagttcttgtgagatgacagcaaaccctagtaacacaaactacacaanctgaccccat

SEQ ID NO: 306167 - DNA, 582 bp, Homo sapiens
aatgtggattatttgtaaagattaatamagttgataaagttctagcaagactaataaaaaagaaatcaaaattaccaatatgagaaataaaagagggtacattatttcatatcctgtagctatcaaaaggataagtcttgtgaacaaatttatgctaataaggtcaataactgagatgcaatgggaaaatctttgaaaaacacaacttacagaatttacacaagaaaaacagggtgcattgtcccatgtatatttaaaaaatttattttgttatttaaaacatccttcccacaaaagaaagtctaggccagatgggtttgctggtgaattctataaaatgcttataaaatatttaagaaataagtaataccaaatttacacaaacttttctagaaaatagagaagggtaacgttcttctaaatttctcttctgagactaacataaccatgaaattaaaagcctgacaaataagtatctctaatgaacataaataaaaaattcctgaacaaaattttaacaaaacaaattcagaaaatatacaatatggaaaatatattgtgaccaattagagtttaccgcag

SEQ ID NO: 306168 - DNA, 582 bp, Homo sapiens
aatgtggattatttgtaaagattaataaagttgataaagttctagcaagactaataaaaaagaaatcaaaattaccaatrtgagaaataaaagagggtacattatttcatatcctgtagctatcaaaaggataagtcttgtgaacaaatttatgctaataaggtcaataactgagatgcaatgggaaaatctttgaaaaacacaacttacagaatttacacaagaaaaacagggtgcattgtcccatgtatatttaaaaaatttattttgttatttaaaacatccttcccacaaaagaaagtctaggccagatgggtttgctggtgaattctataaaatgcttataaaatatttaagaaataagtaataccaaatttacacaaacttttctagaaaatagagaagggtaacgttcttctaaatttctcttctgagactaacataaccatgaaattaaaagcctgacaaataagtatctctaatgaacataaataaaaaattcctgaacaaaattttaacaaaacaaattcagaaaatatacaatatggaaaatatattgtgaccaattagagtttaccgcag

SEQ ID NO: 306169 - DNA, 582 bp, Homo sapiens
aatgtggattatttgtaaagattaataaagttgataaagttctagcaagactaataaaaaagaaatcaaaattaccaatatgagaaataaaagagggtacattatttcatatcctgtagctatcaaaaggataagtcttgtgaacaaatttatgctaataaggtcaataactgagatgcaatgggaaaatctttgaaaaacacaacttacagaatttacacaagaaaaacagggtgcattgtcccatgtatatttaaaaaatttattttgttatttaaaacatccttcccacaaaagaaagtctaggccagatgggtttgctggtgaattctataaaatgcttataaaatatttaagaaataagtaataccaaatttacacaaacttttcyagaaaatagagaagggtaacgttcttctaaatttctcttctgagactaacataaccatgaaattaaaagcctgacaaataagtatctctaatgaacataaataaaaaattcctgaacaaaattttaacaaaacaaattcagaaaatatacaatatggaaaatatattgtgaccaattagagtttaccgcag

SEQ ID NO: 306170 - DNA, 538 bp, Homo sapiens
taacaaacaactgactcatcttataaagtcattcccttgatgtatcactatttgtaccttatgagaaacttctgcagaactatttagcatagaaattagctgatacttagataaatccatgccttttttatgccagtcattttctatcagtattacatctgaaayaggttgtattagtccattctcaagctgctatgaagaaattcccaagactgcgtaatttataaagaaaaaagtttcagttgactcctagttccacatggcttgggaggtctcagaaaacttacaatcatggcagaaggcacctcttcacagggtggcaggagagaaaatgagtgtcgagtgaagggggaagccctttataaaaccatcagatcttgtgagagaactcactcactatcaggagaacaacataggggagaccacctccatgattcaattatctccacctggccctgtccttgacatgggaattattacaattcaaggtgatatttcagtggggacacagagccaaatcatatcattctgcccctgg

SEQ ID NO: 306171 - DNA, 538 bp, Homo sapiens
taacaaacaactgactcatcttataaagtcattcccttgatgtatcactatttgtaccttatgagaaacttctgcagaactatttagcatagaaattagctgatacttagataaatccatgccttttttatgccagtcattttctatcagtattacatctgaaataggttgtattagtccattctcaagctgctatgaagaaattcccaagactgcgtaatttataaagaaaaaagtttcagttgactcctrgttccacatggcttgggaggtctcagaaaacttacaatcatggcagaaggcacctcttcacagggtggcaggagagaaaatgagtgtcgagtgaagggggaagccctttataaaaccatcagatcttgtgagagaactcactcactatcaggagaacaacataggggagaccacctccatgattcaattatctccacctggccctgtccttgacatgggaattattacaattcaaggtgatatttcagtggggacacagagccaaatcatatcattctgcccctgg

SEQ ID NO: 306172 - DNA, 610 bp, Homo sapiens
aattctggggtttcacaccctgccactgacctttacaatcttaataacgggagaaccccctcatcacccccaggcctccagattaagacggagctgcttagagactgtgcagagactgctcraacccacgtgcagttccacaggcatttgattccagagcagcccagtgacagatgccacatccccactaggtagggagtgaagagaccaggcactttcacacacccaatcacagatattccagctgtggtatggaggagtggactgattagtcaacctctactgcccctcactaaacaggacctgcccaccttggtatcaggtccccagcacagctgcccagcccctgcatgagcactacagccacaccccagtgttctcctgagagtccaaacctctgaggccaccaataagtccttccacccctgcagcagccactgccaccactaccactgtttccttccctgctgtcctgggccagggaggaagccaggaggccaggcactttcatgcaccccaaagacagataccacagccatggtatggaggagtaggcagactgtgcacagcttgactcctcgcctctactgccccccattaaaggaggctt

SEQ ID NO: 306173 - DNA, 656 bp, Homo sapiens
agtgggaagcagtaggtaatggacaaaaagtgcagaggaaggaggaaggataagattggcaatgatagtcaatacgtattttaagtggctgtacatatgaagctcttgatatttcacagatctgtcatatctattgctttaacatctttgtttcactgggtttttctgtttgtttgttttttagactcgagtgcataggttgagttaatcatattcatctwtgtatggccctttaaatctgtgcacattttttctacatacatccacagccctcccgtttactctactctgtaacaggcaaccgttttatccaaagtagtgtatattattttattatatataaaaacaccttaaaataaagtagagcaagttctattattctcatttttacagatgaagaagctgtgaattatctatcttttgatgtgtatatttttaaaaatagaaatgttagttcagatggtagagatattataaggttttaggaacacaattctctgaagaatttgtaccaattgacattctcactacagataaatggtttcttcttttcacacaaacttgctaaaaatagaaattaatcattcatcctttattgttaataatctgatagaaaaaatctcttattttaattatatttatattataaattaaca

SEQ ID NO: 306174 - DNA, 656 bp, Homo sapiens
agtgggaagcagtaggtaatggacaaaaagtgcagaggaaggaggaaggataagattggcaatgatagtcaatacgtattttaagtggctgtacatatgaagctcttgatatttcacagatctgtcatatctattgctttaacatctttgtttcactgggtttttctgtttgtttgttttttagactcgagtgcataggttgagttaatcatattcatctttgtatggccctttaaatctgtgcacattttttctacatacatccacagccctcccgtttactctactctgtaacaggcaaccgttttatccaaagtagtgtatattattttattatatataaaaacaccttaaaataaagtagagcaagttctattattctcatttttacagatgaagaagctgtgaattatctatcttttgatgtgtatatttttaaaaatagaaatgttagttcagatggtagagatattataaggttttaggaacacaattctctgaagaatttgtaccaattgacattctcactacagataaatggtttcttcttttcacacaaacttgctaaaaatagaaattaatcattcatyctttattgttaataatctgatagaaaaaatctcttattttaattatatttatattataaattaaca

SEQ ID NO: 306175 - DNA, 539 bp, Homo sapiens
tcttgaatagcaaccaaggcagggctataatgttggagagaaggtaattacataggcaagtttcatatttgccttagatcttcatgatagcaytttccaaaatggtgatggcaattagagcctaaatggagagcagcagccccactgggcaaataaaacatagattgcatttttgaagcataaggattcttatttgtgcttagcattcgatccatgtgatatgttgtttaggttgaagaaccaaaggctggagaaaaccagccttaaacagatatctagttggaaaagagagtagtagttaaatagcacttttagatatttgtacatattcttcaattactcataaacactgaacaaatagtagttatataaaggcttgttgcaaagtaaaatctgaacctcccattatctgttgttacactgaaatccatgggactatcttatactttgactgaaacgtttacccatgcatggtcttgtaatcatgccttcttcattcggggaaaaaaaagtttattgctatgcagatattccaaata

SEQ ID NO: 306176 - DNA, 612 bp, Homo sapiens
actttattgcacactttccccctcaagaaaacaataaaaagagaggaagcataaatgcctaagtaactcaacatcagaacataccataaaaaaagaggaaaatgattgcaacatgtatgaaaagaaaatggttcagaatcttaattcacaaagagcatgtaaaactataagaaaaagcaagtaatgtaaaataaaccgttgtcactgaatatgaataaattaacgttaagaaacccaaatgagcaaacaaaatctaaaatatgcagatttattcctaatagactcatctttttttaaaaattgagttatttattttttattatattattattgttatttttgaggcagggtcttgctgtgccacttaggttggagtgcagtggcatgatctcggstcactacaatccccaccttctgggttcaaagcattctcatgcctcggcctctcgagtagctggggtcacaggtgtgggccatccagctaatttttgtatttttagtagacacgcggtttcaccatgttggtcaggctggtctcaaacttctggcctcaagagatccactggccttggcctcccaaagtgctgcgataacaggcatgagccaccacac

SEQ ID NO: 306177 - DNA, 612 bp, Homo sapiens
actttattgcacactttccccctcaagaaaacaataaaaagagaggaagcataaatgcctaagtaactcaacatcagaacataccataaaaaaagaggaaaatgattgcaacatgtatgaaaagaaaatggttcagaatcttaattcacaaagagcatgtaaaactataagaaaaagcaagtaatgtaaaataaaccgttgtcactgaatatgaataaattaacgttaagaaacccaaatgagcaaacaaaatctaaaatatgcagatttattcctaatagactcatctttttttaaaaattgagttatttattttttattatattattattgttatttttgaggcagggtcttgctgtgccacttaggttggagtgcagtggcatgatctcggctcactacaatccccaccttctgggttcaaagcattctcatgcctcggcctctcgagtagctggggtcacaggtgtgggccatccagctaatttttgtatttttagtagacacgcggtttcaccatgttggtcaggctggtctcaaacttctggcctcaagagatccactggccttggcctcccaaagtgctgygataacaggcatgagccaccacac

SEQ ID NO: 306178 - DNA, 567 bp, Homo sapiens
ctagcttccttattcaatggatattatttaactatttcagagagggacagtagatcacatgcctctttttattacttggatgtttctatccatgttcagtgtttatttatttagcataagaggtattcatagttcctaaaaggatttacacaaaatatgttaattttactaattttataatgaaaggtggatattccatgttcattgtcatctatggtgacctttttcttcctgtttgtgccatcccattatgacctggctatatatgttttgctgtccagacaacacacatatkttatggtccaacttaacatagttcaagaaagctatgtagattgatgagactttatgaagaaatatgagccttaaagtattcttaggtaaactgatcttatcatggtgtgtttattctccaaagaagctgattgcagagaaagtgtgagaccatatcagactcatctggggagctattttattatttacgaaacccatgcatgaatattccatatctttccacttgaaaaactttggcctaaataatacttgtgcaaatgtgttagagaagct

SEQ ID NO: 306179 - DNA, 601 bp, Homo sapiens
caggcccacagcctcctcattgccttctctcacctggcagacagacctcttgctccgggtatgctaaaggtgtctcggaggctgccgtgcccaacggtgactttctcctgcctcaccttgccaggtgatggttgccatgtttccttgcccagcattcttggatgctccagccagactcctgcctcagaattttcaggagaggagcaaacacaagtctgtatgttcacacatgtccccacactgcagggacacaagcccgtcttacctagggtctctcccactattmttttctctggtggccaggctgtggtggccctagaggctgctgttgttcagcaaatgtttagcaggaagtgtgaagctggtgctcccgatgtgcccgggagtcctcctcacttgacttataggaaatggggagtgcttcccaatcggtcctccacagaaaggatggggcttaagccccagtgttcctccttaaggaccccgcattcagatggacttctggtggccaccaacacgcctggtcctaggtgctccttttgaatttctgttttctctttgtatggcctggttgggatagtggcagtgagagtggctgagc

SEQ ID NO: 306180 - DNA, 601 bp, Homo sapiens
caggcccacagcctcctcattgccttctctcacctggcagacagacctcttgctccgggtatgctaaaggtgtctcggaggctgccgtgcccaacggtgactttctcctgcctcaccttgccaggtgatggttgccatgtttccttgcccagcattcttggatgctccagccagactcctgcctcagaattttcaggagaggagcaaacacaagtctgtatgttcacacatgtccccacactgcagggacacaagcccgtcttacctagggtctctcccactattattttctctggtggccaggctgtggtggccctagaggctgctgttgttcagcaaatgtttagcaggaagtgtgaagctggtgctcccgatgtgccygggagtcctcctcacttgacttataggaaatggggagtgcttcccaatcggtcctccacagaaaggatggggcttaagccccagtgttcctccttaaggaccccgcattcagatggacttctggtggccaccaacacgcctggtcctaggtgctccttttgaatttctgttttctctttgtatggcctggttgggatagtggcagtgagagtggctgagc

SEQ ID NO: 306181 - DNA, 570 bp, Homo sapiens
tgcctacagacggccgcacgggctgctgcgccggctcctggcagggtgtgtgctttgatgggctctgggggcagagcagctggcgccgacaactccgttgccagggaacagccattgaagtgtgcgctcccgagtctgcaccaggccggcgcctgtcgcggtgctggctgaacctcggcgctgcaggggctgtgcggtgcgggttgcccattagtgctctcygtgctccaggaacaaggagcaggtccagaggccccgctcttcccactgacaaacgggcttggtttgctgccttattaatgactacgccactctcaccacccaaacaaaatgcacagagtaggaggaaagaattagcttcgaggaggtgctcttactatttttagacaatgcctgtcagctacagagcagcggaatagccctgaatacctaggggtgatctgtccttttacttaatgcaaactctgctttattttgcttatttattccattttcagtgccccccaacccaatttagtcttccctgtctttgcagtcctcatttggagaatatatgaaacataccagtcc

SEQ ID NO: 306182 - DNA, 570 bp, Homo sapiens
tgaagaggaattagccaggtgaagaaggggaggtcttccaagtagacagaacagcttgtgagccttgaaaaagtataatgacttggaggaaaaacaaaaggcccaatacagttaaagcgtggtatccgggagagtggagaagaggctggagaggaaggtggggacagacggcattaagcttccttttataccatgttaatggagtgggtcagagcatgacatatgcagaaaattatctgagagagaagattytaagacatttttttaaaacagccaaaaaagtccccctcaaacaaaactaattttatttcccactattttatgtgggacttttagaagggggatatctcactgatgttgtacactgttttacttaatattttgggaagtaactgcctctgacttcaactgaagaaaacacttttttgttgcaaatgtaatgtttttgtaatggtgtcagcaaataaaaggatgcttagtatttaaaaaaaaaaaaaaagaagggggatgtctcaaaataaaacaacttcaataatttactctaaggtgtcacaactccaaaaaagtaaa

SEQ ID NO: 306183 - DNA, 571 bp, Homo sapiens
acctcccaggttcaagtgattctcttccctcagcctcctgagtagttgggactatagatgtgtgccaccatgccagctaatttctgtatttttagtagagacagcgtttcaccatgttggccagggtagtctcaaattcctgacctcaaggaatccacccgcttcagcttcccaaagtgctgggattacaggtgtgagccaccacgcccagtcactatctttttaatatttttttaattgaaaaaattatttttgagacaragtctcgctttgtcacccagggtgaaatgcagtggcacaatcatggctcactgcagcctcacctcctagattcaagtgatcctcccacctcagcctcctgagtagctgggaccacagaaatgaaccaccatgcctggctaatttttattttttgtagagacagggtctcctatgttgcccaggctgacctcaaactcctgggctcaagtgatcctcccgcctcagcctcccaaaatgctgggattataggcatgagccactgtgcccagcctacttgttttttaaattaaaaaaatatataaaaaatatt

SEQ ID NO: 306184 - DNA, 563 bp, Homo sapiens
ctcatatgaaaatttgcaaacttttggtgaaagatttcccatcattaaaccagcaagagtagccaggcatggtggctagcacctgtaatcccaatgacttgggcagctgaggtgggaggatcacttgagtccagaaattcaagaccagcctaggcaacaaagcgagcccctgtctctataaaaaawtttaaaattagctgggcctggtgcaggtgcctgtagtcccagctacttgagaggctgaggcaggaaaattgcttgggcccaggagtctggaggctgcagtgaaccgtgatcacgccactgcactccagcctgggtaacagtgataccctgtcttaaaaaaaaaaaatctgtttacagactgaagcaaccctcccgccttagcctcctaaagtgctgggattacatgcatgagccaccactcccagcctaaagtaaacttttattgaagtaaaacacatataaaacagtgcacaaatcctaagtatacagcatgaataacttttataaagcaaacatccctgtataatgagcacacatgaggaaacattactaacacc

SEQ ID NO: 306185 - DNA, 551 bp, Homo sapiens
tcaagttgttgctgaaggattagtcatcacatctataattcagagcagcatggatattccacattttgcggaatacttgggaaggatgaaaatgtacaagtggaaccaagacttcttaacatcaacctcagaatagctgtgcactcccctcccctcagtccttttgcaagatagagggttgrcttgtttagctcatctatccagctaactgttcccctgcctctctgtcactggatttccatcactaggcgactgtagcgtcatatgtgtatgttgaagcactgaactgtgaatcttatcacaagaaaaaaatttcttaaaactaaaaaacaaaaaataatttattacttataagacaataataaaagcaaaggtaatttccaagagcaacatataacaatatattcttctgtttgttttcccccagagctaattttaagcaagaaactattgtaagatcctctaaagaactccacctacaattccctcttgccaccctctccccacctcctgcataggtggttctgattcttttcctgagttttttctac

SEQ ID NO: 306186 - DNA, 551 bp, Homo sapiens
tcaagttgttgctgaaggattagtcatcacatctataattcagagcagcatggatattccacattttgcggaatacttgggaaggatgaaaatgtacaagtggaaccaagacttcttaacatcaacctcagaatagctgtgcactcccctcccctcagtccttttgcaagatagagggttgacttgtttagctcatctatccagctaactgttcccctgcctctctgtcactggatttccatcactaggcgactgtagcgtcatatgtgtatgttgaagcaytgaactgtgaatcttatcacaagaaaaaaatttcttaaaactaaaaaacaaaaaataatttattacttataagacaataataaaagcaaaggtaatttccaagagcaacatataacaatatattcttctgtttgttttcccccagagctaattttaagcaagaaactattgtaagatcctctaaagaactccacctacaattccctcttgccaccctctccccacctcctgcataggtggttctgattcttttcctgagttttttctac

SEQ ID NO: 306187 - DNA, 373 bp, Homo sapiens
taattaagaaattacttaattatggagaagaaaataaaacgaaggtattttgccctagagggaaaaaaattttcgatttgccaaatcaaggaaatgatgagattccaattattcattaaataattgraaatggctccaacaaaagcattagaatgtacgtgctgctcaggcctcccagggagctctgccttcctctcaaagcctctgtgttgtgtgcttcccttctgcaaataagtctcctctagaatggactgaatgaatactcccacacttggggcaaaaaaaaaaaaaaaaaaaaaaacagaggggcaaaaaaacagacttccctgccatctgtctcatgttaaggatatgtatccataatgttgtattt

SEQ ID NO: 306188 - DNA, 373 bp, Homo sapiens
taattaagaaattacttaattatggagaagaaaataaaacgaaggtattttgccctagagggaaaaaaattttcgatttgccaaatcaaggaaatgatgagattccaattattcattaaataattgaaaatggctccaacaaaagcattagaatgtacgtgctgctcaggcctcccagggagctctgccttyctctcaaagcctctgtgttgtgtgcttcccttctgcaaataagtctcctctagaatggactgaatgaatactcccacacttggggcaaaaaaaaaaaaaaaaaaaaaaacagaggggcaaaaaaacagacttccctgccatctgtctcatgttaaggatatgtatccataatgttgtattt

SEQ ID NO: 306189 - DNA, 373 bp, Homo sapiens
taattaagaaattacttaattatggagaagaaaataaaacgaaggtattttgccctagagggaaaaaaattttcgatttgccaaatcaaggaaatgatgagattccaattattcattaaataattgaaaatggctccaacaaaagcattagaatgtacgtgctgctcaggcctcccagggagctctgccttcctctcaaagcctctgtgttgtgtgcttcccttctgcaaataagtctcctctagaatggactgaatgaataytcccacacttggggcaaaaaaaaaaaaaaaaaaaaaaacagaggggcaaaaaaacagacttccctgccatctgtctcatgttaaggatatgtatccataatgttgtattt

SEQ ID NO: 306190 - DNA, 609 bp, Homo sapiens
agatgcattgattgggacaaaatgaaattcatttttaacacaacaacacatgaaatcttgcaaagaaacactgtgtgatacaatagaagcttaaaaatgtctactgcaaaattatgttccattgtatgaacaaaaggcttttcaccttgtaattttttcctgtcacattttgttttattctaatccacacctccatgcctggccctcgttgtttgatccccagcctcactaactctgctrcaactcaggaagttgaatgcaaagcattgttcaggctattgatctttaggtttcctggtatagagggggcacttttttagatggggacatattttagattttatttttgatttaatctcaaaatacaacatggattttggtgactcagtttttcttcctataaaaagaagactctataagtttcccaagtattctgtgtggaaactagtagatgtgtaaaggttgatcaaatagaataagtactaaaactatggtttacaatgatttaatacaagcctaagcaaatgcgtaagttaaaaatgtctgtctcaaagtaggaatccccagatcactattagaaaaaaagtaatgttgtggttttggtattaa

SEQ ID NO: 306191 - DNA, 609 bp, Homo sapiens
agatgcattgattgggacaaaatgaaattcatttttaacacaacaacacatgaaatcttgcaaagaaacactgtgtgatacaatagaagcttaaaaatgtctactgcaaaattatgttccattgtatgaacaaaaggcttttcaccttgtaattttttcctgtcacattttgttttattctaatccacacctccatgcctggccctcgttgtttgatccccagcctcactaactctgctacaactcaggaagttgaatgcaaagcattgttcaggctattgatctttaggtttcctggtatagagggggcacttttttagatggggacatattttagattttatttttgatttaatctcaaaatacaacatggattttggtgactcagtttttcttcctataaaaagaagactctataagtttcccaagtattctgtgtggaaactagtagaygtgtaaaggttgatcaaatagaataagtactaaaactatggtttacaatgatttaatacaagcctaagcaaatgcgtaagttaaaaatgtctgtctcaaagtaggaatccccagatcactattagaaaaaaagtaatgttgtggttttggtattaa

SEQ ID NO: 306192 - DNA, 557 bp, Homo sapiens
tgagcatgaatctgagtacgcaaacgagcagccagacatggagaggccagggtgccagagaaggaccaagtgagaagggcattcagccgaggtaggtgcttccatagaygctttaattcatagtttgggggagtttaataaacataattgagttgattgctcaaattccaaaatgagaagactattttaagcatgcagggcttacagaaacacacatacagtatgcagatgtttcaaagaaaaattcttctattttggatttatgattgttttcactcgctgcctctaaaggggaaagactctgaactctgatttaatttcttttaagtaggcaaaagctcttttctccatgactggctattccccctcccccattttcctctaggcacccatttcatttactgtcctgctggctgtcaggctagagacccctctggccctcaccaaaacagaagaaaactggaggcaatgtctaatttttgtctatgtggcactggcttggtaaagtactttggaaatacataggcacctgaaagatacaaatgtgaggttaagag

SEQ ID NO: 306193 - DNA, 565 bp, Homo sapiens
cacctgactcttatatctaggagggaagtttgggggtaggaaaaagaatcccatagattatcagagctggagctactgcgtttgaggctagggcycctgcagcactgaacgaatgaaacacactgaacccagaatgagaagatgcacttgctcccagtcacgtaaaacatccccacctgagctggagttcagagaccaaccccttgactttaagatcaaggcccttctcaaaacactatccttctttcactaacatggcaagctagtttatgggtcagaataaatgtaggatcacgcacgggggcctgtgacctctgctatgggctcagagcctaagtcacacaacaacaagcaagttcccaagttcatgctgtgggaacaccaggctgaacaaaactggaggacacatattttctgtactcgaatgtaaggtgctcctggtaccacatttgttcatcaatatttaaacatagtgccatagtcaccactattaagagcacttattattctaaggtggttactctgtggacaatatgtactccagatctcaaaatactaaatttac

SEQ ID NO: 306194 - DNA, 575 bp, Homo sapiens
gtatgtctctgttgttcaggctggagtgcagtggcaggatcatagctcaytgcagcctccacttcctgggctaaaaccatcctccccgctcagcctcccaggtagctgggaccacaggcatgcaccaccacaccaagctaacctttcaaaattttctgtaaagatgaattctccctatgctgcccaggctgccctgggctcaagtaatcctccagacttggcatcccatagtgctgggattacaggtgctagccactgcacctggcctcagcaaaacttctttggcaggaacctggtattgaatgaaatctgcccagcaatgaaaaactcttaaacctctgccagaaatcccagcagatcggtgcagtttgtcccccatcttgctcatctcccctgaattgggctgaagagggcttcaccaagcaaggaaatgcacaggcagtggcccaggcagccgagtacccacctccatgggctctcgtgtggggcagagggaagtgacccaaaggagattcattcctctggtcaccttcatgggtgctgcaatcctatgggaaatgtcctcctgagcacac

SEQ ID NO: 306195 - DNA, 575 bp, Homo sapiens
gtatgtctctgttgttcaggctggagtgcagtggcaggatcatagctcattgcagcctccacttcctgggctaaaaccatcctccccgctcagcctcccaggtagctgggaccacaggcatgcaccaccacaccaagctaacctttcaaaattttctgtaaagatgaattctccctatgctgcccaggctgccctgggctcaagtaatcctccagacttggcatcccatagtgctgggattacaggtgctagccactgcacctggcctcagcaaaacttctttggcaggaacctggtattgaatgaaatctgcccagcaatgaaaaactcttaaacctctgccagaaatcccagcagatcggtgcagtttgtcccccatcttgctcatctcccctgaattgggctgaagagggcttcaccaagcaaggaaatgcacaggcagtggcccaggcagccgagtacccayctccatgggctctcgtgtggggcagagggaagtgacccaaaggagattcattcctctggtcaccttcatgggtgctgcaatcctatgggaaatgtcctcctgagcacac

SEQ ID NO: 306196 - DNA, 575 bp, Homo sapiens
gtatgtctctgttgttcaggctggagtgcagtggcaggatcatagctcattgcagcctccacttcctgggctaaaaccatcctccccgctcagcctcccaggtagctgggaccacaggcatgcaccaccacaccaagctaacctttcaaaattttctgtaaagatgaattctccctatgctgcccaggctgccctgggctcaagtaatcctccagacttggcatcccatagtgctgggattacaggtgctagccactgcacctggcctcagcaaaacttctttggcaggaacctggtattgaatgaaatctgcccagcaatgaaaaactcttaaacctctgccagaaatcccagcagatcggtgcagtttgtcccccatcttgctcatctcccctgaattgggctgaagagggcttcaccaagcaaggaaatgcacaggcagtggcccaggcagccgagtacccacctccatgggctctcgtgtggggcagagggaagtgacccaaaggagattcattcctctggtcaccttcmtgggtgctgcaatcctatgggaaatgtcctcctgagcacac

SEQ ID NO: 306197 - DNA, 595 bp, Homo sapiens
tcattatttacagagagatggatgattttcttggaaaatggaagagagtcaaccagaagcaattgcaaatgctaataccagaattcagtcaagtgagtgggtctagatcaatacagagaaaccatacacacagcaatccactagatgagaagcatgaaagaccccatttataagagcaacataaagagcagaaacatggttggccactgtgggtgatcaagttagggctcacagtgatttcctttagtctgttttcatgtgcaatcgccatgggtgctgtagacaagatttattatggacacgagaccctgacagtgtygaggctggtggagaagcccacacaaagctggtgtttggcctgggggcccaggtgacctgcaggggaagctggtggctttgccatgttgctgagactaggaggcctagataagctagaggaacagcctcgttggaggggctgtggccggggaccactgtgggctggggactccacttggactgtcagagcacagaagctgactctccttccccacggctgccaagtcctgtgctcctggacctgtcactaccgtggagccaagaagacacagaaaaa

SEQ ID NO: 306198 - DNA, 595 bp, Homo sapiens
tcattatttacagagagatggatgattttcttggaaaatggaagagagtcaaccagaagcaattgcaaatgctaataccagaattcagtcaagtgagtgggtctagatcaatacagagaaaccatacacacagcaatccactagatgagaagcatgaaagaccccatttataagagcaacataaagagcagaaacatggttggccactgtgggtgatcaagttagggctcacagtgatttcctttagtctgttttcatgtgcaatcgccatgggtgctgtagacaagatttattatggacacgagaccctgacagtgtcgaggctggtggagaagcccacacaaagctggtgtttggcctgggggcccaggtgacctgcaggggaagctggtggctttgccatgttgctgagactaggaggcctagataagctagaggaacagcctcgttggaggggctgtggccrgggaccactgtgggctggggactccacttggactgtcagagcacagaagctgactctccttccccacggctgccaagtcctgtgctcctggacctgtcactaccgtggagccaagaagacacagaaaaa

SEQ ID NO: 306199 - DNA, 569 bp, Homo sapiens
acagacaggaagagaaatcttcaggtgccacaaatgaatcagcaaccagagctgacgccgggggcccagggtgcaccagatgagacacaggctccagkggctaggggtgggagggctagaggttaggaggtggtcttggagtgcatcaagttggggagggagtttgaacaggggaacttgcatgaggccagggcccagggagctgcccagaggaagcagtgttctgcccagggtgctgttaggagctccaccccacctgtaactgggtgtgtggatgtgtgggcgtgcaggtagagttgggcaccaatttgagtagctagagccccaaatttgcaccattcacaggtgtaggatctgaatttactaccacttgcatgatgccaaatctcctagccaagaaatccatcaaaaacctggtcctggacctgtgaaatcctttgaatatccacagaggccaatgccaaatgcctgggtagcaaaacctttatgacaacgtggggctctcacaagaaaaagtaatgatatccctgtagaaggaaaccggtaattgcaaacttaaaaataaaaaa

SEQ ID NO: 306200 - DNA, 577 bp, Homo sapiens
acctgcagaaaaattcattaaatttaatttttaaaaactgaagccatgtgggccaggcrcagtggcccacgcctgtgatcccaacactttgggaggccaaggcaggcagatcactaggtcaggagttcgagaccagcctgaccaacatagtgaaaccctgtctctactaaaaacacaaaaattagctgggcgtggtggtgtgcacctgtaatcccagctactcaggaggctgaggcaggagaatcgcttgaacccgggaggtggaggttgtagtgagccaagattgtgccactgcactccagcctaagcgacagagtgatactccttctcaaaaaaaaaaaattaaaaatactgaagccatgtgaaatagcctcttgttcaacacaactttattgtctaggtaggacattcaacatgtagtgtctgaagtaagaggtgctctcaatgtaagtaccaggtttttaagactagtacatacaaaagaatgcaaaatatcccaataattttgattatgtgctgtttcaatattttggatggattgggttaaataaaatgtgattaaaattcatttcaccag

SEQ ID NO: 306201 - DNA, 537 bp, Homo sapiens
tcatagaggaagtgtgatttatcaccacaggcaaaggtcaatgacttcataasccaagaaagtgaataggaaatgcatggcagaaaaaggtagaaagcagctactatgtctgtataaagcattatgtgaatcagaagtgcagaaggcatttaaatcctcttacttgcttattaccagtgtgtatttgaatacctttaccctcttcagatgatttatttaagacttgttcagtgactaccatggccatttatgttgcaaaacacttcggtggagtgacgtaagaaaatattttctgagtgaactaggaggaagtttacccaaattagagcagaaatgttttggatgttttggatgtactaagttataagcgcaaacgatgccctaaagtaggaaggagcttagggtgtaatttgagaaaatctatataaatacctatttttaatagtttgaaatgaggacataacgagtagtactgttcaaaaaaggggtatgtgagaacacaggtaggtggactttaatttttttaagagagagaga

SEQ ID NO: 306202 - DNA, 537 bp, Homo sapiens
tcatagaggaagtgtgatttatcaccacaggcaaaggtcaatgacttcataacccaagaaagtgaataggaaatgcatggcagaaaaaggtagaaagcagctactatgtctgtataaagcattatgtgaatcagaagtgcagaaggcatttaaatcctcttacttgcttattaccagtgtgtatttgaatacctttaccctcttcagatgatttatttaagacttgttcagtgactaccatggccatttatgttgcaaaayacttcggtggagtgacgtaagaaaatattttctgagtgaactaggaggaagtttacccaaattagagcagaaatgttttggatgttttggatgtactaagttataagcgcaaacgatgccctaaagtaggaaggagcttagggtgtaatttgagaaaatctatataaatacctatttttaatagtttgaaatgaggacataacgagtagtactgttcaaaaaaggggtatgtgagaacacaggtaggtggactttaatttttttaagagagagaga

SEQ ID NO: 306203 - DNA, 534 bp, Homo sapiens
atcttgaaactcaaacgcaatagagcttgctattgtccttggggctgagcaaggaacatatgttgattcatttaatacacaggctcagagagtagacattttttataatttacagattttttaagaaaggttatattttgtttaaaaaatgtttattttagaagtggtttcatttttctattttctagagaacagcaatgacaattaaattggttgtggatgaattcatgagggtttgggaaagggaaaatttaaggtcctgtgtccatatttcagagtcaatataggagcctaaatgtgattgtgattcatactacaggagttataaaagcaagttaactgccttttttttcctgagaagctcaaatttatttatttttattctttatttttgtgggtacatagtaggcaatatggtttggctgtgtcctcacccraatctcatctcgaatttagctcccataatttccacatgtcctgggagagacctggtgagaggtaatggaatcgtggaggcacatctttcctgtgctg

SEQ ID NO: 306204 - DNA, 555 bp, Homo sapiens
tgatccacttccacttaatgaatagtaagtatattttctcttctttatgattttcttagtaacattttcttttctctagttcattgtaagaatacagtgtatgatgcatatcacatacaaaatatgtgttagttgatgtttaagttatgagtaaggcttccagtcaacaataggttattaataaagttttggaggtgcaaaaattttacatggattttctagaactgccagttgacccagcaatcacactactgggtaactacccaaaagaaaagtaattgttttatcaaaaaracacctgcactagtatgttcatttcagtcctacttacaatagcaaagatatggaatcaacctcagggtccattaacagtgggttgcataaagaaaatatggcacatatacactatggaatattacacggccattaaaaggatgaaatcatgccctttacagcatcatggatgcagctgttgatcgttattctaagtgagttaatgcagaaacagaaagttaaatactgcatattctcactgtacattctcacttacaaata

SEQ ID NO: 306205 - DNA, 514 bp, Homo sapiens
gccgggcacttggtttcgtggtgggcaactgtgctgctgtttcttttggccgcggacaaggtcggcagaggtggacccctgcttgggagagctcttctcgctgtgctgacacccgcccctaacagtcacccaccccggggaaataatggggctcggaggcctcctcccagccagtgtccagcctaagcacatcggctcccgcagttcagaaaggtcccgaggcccgagtcaccatttccggctcagacctcgacccggaacgtggctgcccactgccacgcccactacgccccagtggctcgccccaggggacgaggggcaagaagcggcctccgagggcagcggccgaaggccattcggtccctggctcttcccagctcgcagagacccggargcgctgcccggccgcctgcccctcttcagatcccccagcaccggaggagcagcgaggggggtgcgtccaggccggctttcgggtcggcttaggcgaatccagctctcttttgcccctccc

SEQ ID NO: 306206 - DNA, 514 bp, Homo sapiens
gccgggcacttggtttcgtggtgggcaactgtgctgctgtttcttttggccgcggacaaggtcggcagaggtggacccctgcttgggagagctcttctcgctgtgctgacacccgcccctaacagtcacccaccccggggaaataatggggctcggaggcctcctcccagccagtgtccagcctaagcacatcggctcccgcagttcagaaaggtcccgaggcccgagtcaccatttccggctcagacctcgacccggaacgtggctgcccactgccacgcccactacgccccagtggctcgccccaggggacgaggggcaagaagcggcctccgagggcagcggccgaaggccattcggtccctggctcttcccagctcgcagagacccggaggcgctgcccggccgcctgcccctcttcagatcccccagcaccggaggagcagcgagggggstgcgtccaggccggctttcgggtcggcttaggcgaatccagctctcttttgcccctccc

SEQ ID NO: 306207 - DNA, 579 bp, Homo sapiens
gtggtttgatatcacctctcaaatatgtgactactccaaacatagagagttttattgactatcaatcattattaaattgacttcgttctctgtcacatwtattcctattttccagaataagttaatatgtctgaaaaatgtaaatccaaataaatgagaagcatttctgaagtaggtcttagtactgtttaaagaatagtgtctgtgaatctgttttatcacccaccacctcctgttagaagctgtatatgatggcatgtatatactcacctcgttttgaattatcccttttcgctctttcactagaggcagttttgtgatctttcactctgcctgaagttagtagcctacttttctctaatcccttgatcatgtcagcattctgtggagaggtgtagatttcagagtttgtttaaattctgaaaatgtaattgatggcaatgctaataaccatggacatgtttgaataacagtgtgtgataggcataaactttaaaccttacctaatgttctgaaaatacttctatattcagtaaggcattttcagttggaagcgtgtttaagattttctttcccata

SEQ ID NO: 306208 - DNA, 538 bp, Homo sapiens
acaattatttgtgttaatcagtgacttttttgatgaaaaaactttgtgcacattattccctatgcaaagttgcaaagcaggtagtttttaaagggccacactgaggcataggataaaataagaagaggggtctcaggtagctattagggcttaataagatggatataggtcctgagcttgatccccaagccagtggaacttcatgycaccttcttcctcagatagaggtaattcttgggcagcaggttggaaataaagagtggatctgaggaccaaaaggaggtcaaacttcaaaaaggatggccaatctaagatattaccaataggtagagaacaaacatagacaatgtcagagattttatcaaagaagtaaagaatttcacagagtaaaatcatattgagaaatacataagtagaaaatgattcattgaccttccttgaaatatctaaaaactagtgacagtaacaagaataggagaattgttaagaaagtatgagtaattcctgttgggtttcttatttttattcagcgatggac

SEQ ID NO: 306209 - DNA, 508 bp, Homo sapiens
tgtcataatagatttatttgccatctgtttgatagtatatgggaatgaaaccgatttttttcaagtttttaagactctattttaaattacagatattaatgaatgtgaacatccagggctctgtggtccrcaaggggagtgcctaaacacagagggttctttccattgtgtctgccagcagggtttctcaatctctgcagatggccgtacgtgtgaaggtaagataaaccatacgaaatcatattgttgtgtgataaaagagagaggagattgctttcacttatacaaagacttgaagacactaagaggtactgcataattcagagcctcaaagcatgtatgcatcaaagtaaaccatatctgaaagcatagctcaggggttgctgggatttacgaagaggataacctaaggttatgatgataaaaacactcacagatggctccacgactggtactgaattaatgagtggaaatgtgcaaggactgataggagacatgtaggagacct

SEQ ID NO: 306210 - DNA, 570 bp, Homo sapiens
caaattccaacctcctagcttctatctaagatattggattggtgggaaaggccattattactcattttattcctaagactaaagagttatacttcttcactatttctcctacctcagagctgacttttgagaagaaacactttagctatgttggcaatttgtggcataggaatatatcacattttaattaagcatcacatatatttgaagacttgttcacacatataaagaagttccattctaaggctgtccctgccaaatgacaaatacttggtaatcaccaaattggtattgtgggagtgggttagtgactactyatcaagcttttcatgaaaaccccagatttatagcctcttaatttgttctgaacccttgccctgaatatattaattcaccttctaatttttttttttgcaaatatggtcaacatgtctttctgctttatgaaaatgtcagagatgagtataaagataggtcaataaccacccgggaaaaaacccaagaaatctaaacaccagtaacttgcaaaggaagcttctatgtataatatagagtcgtgtgcatctcatg

SEQ ID NO: 306211 - DNA, 611 bp, Homo sapiens
gttgtatttggttgatttccccccagttgatgatattaaaaccccacgtggcctgagtagagttgctgaaagagcggtgagagaaaacagcaaatgcttgtctgagttcacgtagccctgggagttggcaattccaatcacaattacagtcttttctgtcagggttgacctttaaggagattgcctcaattataaaaggtcaacatctcctggttctggcacaagcaagtcctgagctcggtaataaaatatagccaaataaccccatggagtctcttacctctgccacccagcaatggcctgtggctgttagacttctttggaacatagtggtcatgtagctgtcagatgcaaggtgtgtactgggaaatttgtatttacatcttaatgtcagtcagcctgtggacttttaaattagcaattcaaactttgsttttatagctagttagtcattacgcccaaacaagtcaatttcaaggattatgcacttctccatacaaaagttaaggtatgtgagttaaggctatagtatgtaacttttagaggactcattcctccaggtatgagggcaagtgggcaagaacatgctgtataaattcctgcttttcatc

SEQ ID NO: 306212 - DNA, 611 bp, Homo sapiens
gttgtatttggttgatttccccccagttgatgatattaaaaccccacgtggcctgagtagagttgctgaaagagcggtgagagaaaacagcaaatgcttgtctgagttcacgtagccctgggagttggcaattccaatcacaattacagtcttttctgtcagggttgacctttaaggagattgcctcaattataaaaggtcaacatctcctggttctggcacaagcaagtcctgagctcggtaataaaatatagccaaataaccccatggagtctcttacctctgccacccagcaatggcctgtggctgttagacttctttggaacatagtggtcatgtagctgtcagatgcaaggtgtgtactgggaaatttgtatttacatcttaatgtcagtcagcctgtggacttttaaattagcaattcaaactttggttttatagctagttagtcattacgcccaaacragtcaatttcaaggattatgcacttctccatacaaaagttaaggtatgtgagttaaggctatagtatgtaacttttagaggactcattcctccaggtatgagggcaagtgggcaagaacatgctgtataaattcctgcttttcatc

SEQ ID NO: 306213 - DNA, 605 bp, Homo sapiens
cagcagttgctcaataagttttttcactatctgaagggtgaaagttttccccaaaggataaaggcaaacaatgaaaaaagggaagagtctctattattaggtgagatctctgggagagtaccaggaataaataattatggagtaaaaagttacattaaggctaccttttaggatttcattttaaaacattttgaaacaaacttgcaaagattttagtcagcaatttaccaccataaattgtttctgtaaaactcctagcagatgccaatgaatgtacctagaacaactcctacacattcttctgtgaaattcatttccctggtctctttccccctcccggtcctagcttaggttggaagtcatattaccaggatatccagatgtagcagcactagtggtmgcccacccgcaactgctcagtctacccccaaagactcctgcagacagttgtccttcacgctgactgcccactgtagcccctgcctaagcaagagtctggctggagaacaagtccagccagagtgctcaggcagcagaatgcttgagaggtagtgtccctggaaggaacttccaaccagcaagaaccgaagatgatggcttaatag

SEQ ID NO: 306214 - DNA, 605 bp, Homo sapiens
cagcagttgctcaataagttttttcactatctgaagggtgaaagttttccccaaaggataaaggcaaacaatgaaaaaagggaagagtctctattattaggtgagatctctgggagagtaccaggaataaataattatggagtaaaaagttacattaaggctaccttttaggatttcattttaaaacattttgaaacaaacttgcaaagattttagtcagcaatttaccaccataaattgtttctgtaaaactcctagcagatgccaatgaatgtacctagaacaactcctacacattcttctgtgaaattcatttccctggtctctttccccctcccggtcctagcttaggttggaagtcatattaccaggatatccagatgtagcagcactagtggtcgcccacccgcaactgctcagtctacccccaaagactcctgcagacagttgyccttcacgctgactgcccactgtagcccctgcctaagcaagagtctggctggagaacaagtccagccagagtgctcaggcagcagaatgcttgagaggtagtgtccctggaaggaacttccaaccagcaagaaccgaagatgatggcttaatag

SEQ ID NO: 306215 - DNA, 603 bp, Homo sapiens
gctgtgtactggaggctccttgctgtgccagttaaatccctttaatttctggatgtggggaagttctgggatcctcagggaagagctgaggcagccamtttcgggctgaggggagaggctttttttcagtgttaagaaggaagtacagatggcccctgagttacgatgattgacaggaatttttttttcaatttttaaaataaactttactttggaacaattttagatttacagaaaaatcacaaagataccccagaaaatttctgcataccctttacccactttccccaaatgctatcatctcatataccacagtacatttgtcagaaccaagaaattaacatcaatacatttctattatctaaactacagattttaccactctttctctactagtatcctttatctgttccaagatctgatccaagacacttcattgcatttagcatgaccattttatttttattattatactttaagttctgggatacatgtgcagaacgtgtaggtttgttacataggtatacacgtgccatggtggtttgccgcacccatcaacccatcatctacattaggcatttcttctaatgctatccctcccta

SEQ ID NO: 306216 - DNA, 597 bp, Homo sapiens
gggcaacaagtcatatatattaaatcagaaaaactaagtaccattatatatctaatctatggaaaattggaaagattggtgttggcaggagcatgaaaaagggtttcatgaccatgaaagatgggacagaatttcacttgaaatactgggctctcaagattcaacttgagattccctccactgttrgtaaggagacaaaagcaggcttgggcataccacagaatcttgctggagaaaaagtgatttgtcttttgtgagattctggggtcaagatgttgaaattgcttctgaaacaatatatgaggatatttaaccaagaaacaataataagttgatgtttggagctcaatatcatgtttgcacatacatattgaagttctgatagctcctgcattcttgtgaacacatatgtgcacatacctttttacacatgatttctccaaacaggatactttctacagttttctgtagacaaatcacatgctttgtatttataaaattattaaaggcagcatttagccttcattatgcatgagttagtttcccaagacagtcagaagcaattcctttctgtatgctgatgagcttgctctggaa

SEQ ID NO: 306217 - DNA, 508 bp, Homo sapiens
tctaatctatggaaaattggaaagattggtgttggcaggagcatgaaaaagggtttcatgaccatgaaagatgggacagaatttcacttgaaatactgggctctcaagattcaacttgagattccctccactgttggtaaggagacaaaagcaggcttgggcataccacagaatcttgctggagaaaaagtgatttgtcttttgtgagattctggggtcaagatgttgaaattgcttctgaaacaatatatgaggatatttaaccaagaaacaataataagttgatgtttggagctcaatatcatgtttgcacatacatattgaagttctgatagctcctgcattcttgtgaacacatatgtgcacatacctttttacacatgatttctccaaacaggatactttctacagttttctgtagacaaatcacatgctttgtrtttataaaattattaaaggcagcatttagccttcattatgcatgagttagtttcccaagacagtcaga

SEQ ID NO: 306218 - DNA, 548 bp, Homo sapiens
agtgcaagtgtttctgattcacctctaaacatatcccaaagctgacccttccctggagcctaccctttctatggggccagccctgtcaccatggttactgtgccctcagctgcagtgcagccttcaagctgccaaatacaaaagaatggaggggagatcactgcttaggactccttgcctggccttgttctactcctattattctctcaagtaggagtggggtacttcatagagatatcaagctcaagctgagaaataaagggcacaggcacaagcccaaaccctgagtggatgctggaaaaggtgcccctcctttgggaatttgatgcctgatgaattcactatgcacacctgcccccatccacagagccctttggcctgctgaggaacatggtgtctggccctgcctctcaaacttctttagggayccaggagtgcaggtctcgagggcaactctgggcagccctacctggtttcctgttctgtctgaaaaagtaagtccctatcactctgtgtggttgaagtagggcagggcatgcccccagcca

SEQ ID NO: 306219 - DNA, 622 bp, Homo sapiens
tgtggacattttaaggaaactattactctgcttaccatactatgtaaaaatatgttgcaaatatgtatgttgggatctagcaggaggactgaaataagtatgtcaccaaaatgttgctgtagttatttcagaattataaaaatgagagtgatttttatttttatttaaacatttttcctcaatatattttgcattttcctaaaatgaggaaaaagkttaatccagcgactcaggtgggttaatagcctaatatatggtgaaccattaacacattggtatgaattagtccatgaacttccttttcaaatgggactcctaatggagaagaaaaccctgggaaaatgataataatcccttgaatctgaatgggtttttgtacttttcgatggattctcacatgcattattcctttatctttctggttgccttagatcttttctgggaggtactggttcaggtgttgtctggaggacacaatagtcagtcaacaaatatttagtggggatttattgagttttggagatgtgtgatgagtgaggtcagaggctagggatctttgtatgcccagacaagagacagaggaggaagaagggtaaattttgctgagggaaatgcattaaac

SEQ ID NO: 306220 - DNA, 510 bp, Homo sapiens
gctgatttcttagtggatttcacaagcagagctgcttgtgagcagaatggtgaagtaggggcatgtgtttctggggtcttattccatggcttccttccacctacaagagtcatcctcacggagtacttgcatttcagtagaagaaaaaaatcttatagatggaagggaaggatggggttcctgctttaggaagattggcgtggtcataagtctgagcaaggaagggcccagggcagctcagagctctgagcaggaagctctaattagttactgaatatggtgcaagcacaaagagagcgtagtgttttccctttccatctgtggaggtcttggccatgcttacttgggcgttccttccaggaaacatttatttttyctctttaatgccctcctcatatctatgctctcagtagaggatgccactgcttctggcacctggataatagaatgaagctgattgggatggaaacagaaaagtcatctctcagaacaatgagcagagactgaaac

SEQ ID NO: 306221 - DNA, 611 bp, Homo sapiens
ggcaaggacctgcagtgttttaaggacggtacctggagggaaagtagagcttccagggaaggtgtgtaatatataatctgtaattctatgtggccttgagtccaactaaaaatcagaggagaatgaatttagggatctgctttctctgctatgtaaccgtaatggacatctattgttttatcgtgcatttccccttttccagttacagtaatttgcttttcctctgggcaccatccttccccatcttgcaatccatgagcttcaggtgaatcttattccagactccaggggaggacagatgttccaggtccagccagtcagagagggatatatcattctagccaggccaaacgcaccaaagtggaccaagtcctgagacttcactggagaaactggccaagagaagtgccctccctgacacagactggaagctctgaatagataaacaggtctgcagagactaaagcgatcccaggcggaagcacagctgtgaggcacagaggtgggtcctgatgacaccacttgaggccccagatcaagccctgctggaggctaggatctaccccctgmatgttttatttatgagctttagtaaatttcttattttgctt

SEQ ID NO: 306222 - DNA, 475 bp, Homo sapiens
ttctgccgtggttacctttttcatcatgtttaaggaatcatacctgacatcaagatcataacagtatttttctgcttcatctactaaaagttttcaagttttgttttcatacttaagcatttaatacatctgtaattggtttctatgcgtggcatgggaagaaaaattttttgtttcaaatggatgaccacgtatatataagtctgctttggctgccataacaaaatattacaacatggtattttggatggagtaatcaacaaaaatttattttctcaccattctggaggctagaagtctaagagcaaggtgccatcaagttggtttctggtgagaactctcttcctggcttgtagactsttgctttctccctgtgtctccacatggcctcttctctttgtgctcacagagagagagagatctctgttgtctcttcttacaagggcaccagtcttgtcagatcaaagttccatcc

SEQ ID NO: 306223 - DNA, 623 bp, Homo sapiens
gacatttgatttctagtgagcctgggcattctttcattatttctgtcagttctacttctagaaacatttgctgttcatatctgcttcttactttaggcttagtgattttcttatcagtttgaatgatatatttacataatcatgccacatttactgataatgttttccagccttatatatttatgtgaaacatctgtctatatgaatgtacacaagttattatgtaatcagtttatcaatcttttcctttctgatctgtgttctcacttccaaacttagaaagtctcacccagcacctcttcatcctctccttccactaacctgggtccaacaaaggaacaggaagagaaaagatacaattttttaaaaccctatctttatgtaaactaacttacatgtatgtgcaatttaccatayattgtttcataggtaaacattggatcataattttcttgctatcttataacctgggacttttatctttcttaaaataacaacattttcccatgttaatagatacatatctagttctgtttgctaatttttgtaccctccaattaacaaatatttatatttgtttttgaggttttttcaccattatgactattgttgagatggacata

SEQ ID NO: 306224 - DNA, 662 bp, Homo sapiens
ttgtttaattttgttggaacaaagattcgagcatggtagttccagaagcacccgagaatcagcatttccagcaagtgtctaggtgatgccatgtgtgccatactctgaggagcaatggaggagatgatctcagcctcactgcttctctwatttctcctcttcctccttcacataagtaataactgcagagtaaatagaataaagcaggctttctcattctcaggtttagcatctgtaatagtgataacaatgaaggctacttttctgaagttggattgaaattaaatttagtaagaatatatggaaggcctggcacagtagatgctaaataaatattatcttattccaccttcctgagttccttctggagctctaggcaggtgttttatgagtgcaatgggtacacaagcattaataattgatcttagcagatatccacaagctagatttttccctattaaaaaatcactacttattaacacggaagtatgaactatataacaaatcactgaaaagtgtaatcatactgacttagaaactgcatgaattgggggtgactttccttttgtgcctaggttatctaaaatgaggtagaaatttcagagaaattaattaactagactatcaaagattaagtttaaaatgtcagatactacccacat

SEQ ID NO: 306225 - DNA, 574 bp, Homo sapiens
taatgccaggtgtctggcaacccatccaccagagagtggaagtagcaagcaactttatggctctcatgaaattccttgggaccagaatttctcatatcgctaaatacaccagatgccaatgaattgtttattgccttatatggatgtcatggtggttctgggcaccagctctgaggacaggctaagcaggatctttcttgaaatttccattcagttttaccattttatgtaggttagccttcctaagtctcattgtaaaatgatcatattaacatttcattgaaagtggaaatgaaaatagtgcccacagcattttagtccttgttgaaaggactaaaatgatgagggatgtatgatgatgtaaggagcacctgatatagtaagagttaaaaaaataataattgctaatgcagtggtgaaggacggagataaggatagccgtgacgagtcactgaaagagacaaggtcatcagttttcttgtccatctctcaggttgccatgaagattaaatgattycatttttgtagagtttagcagagtacctggcacatagtaagcactattaaaaagtgt

SEQ ID NO: 306226 - DNA, 575 bp, Homo sapiens
actcattagttgtagttacttattgtttacatccaacctaaattgcctgagaaatatgcaataatgtaggagaaactaactgaactgatgcctccctaagacagggtcctggtgagaagtcccaaagggagttaggaagggcctgcaggatgagtgctttggcctttaactttattcttgttcagacaattgtgtttcttgtccaggtacaggtgtgtcactgagaaattcagcaaccactgcaagagcaataggtgatttctgcttacccaggcctgacccccaatctgggctgagactttctattgagcacctactcagtgcaagcwcatgacatacattatctctaacctttgtacaaacgccataaagttttattatcctagttcttcaggcaaagaaactgaggcttagaagcctcagtaatttaaccaagtatggcagatggtagcttcaaaatatgaccacagcaatgttcccagcagcataggcacatcctgaacttggatactctcctgcccagaggtgaagtacatttttttctctccttgaaagttggttggtctttatgattg

SEQ ID NO: 306227 - DNA, 582 bp, Homo sapiens
caggtgaatctaagatgccaggaagcatagaaactctctgacatctctgtatttcaggacctatctttgctaggcaggaagaaatgtgatatcaacacaaaaaatataaattgaaaagcttcctttggccctttgtgtactgcctggctttttcatatcagttacttgatttttatcccttgtctgccatgctcttggagtctttgctgtctcagtgtgtgttttagatgcttaatgcctcctcccttgaagcccattccctctgaacatatgttaataaggtcccaagaagtggtgctacattttgcagcacaatttcagttgcccagagagatrgatggcttgaaacaggcaaagggaccccctcaagtaggcttggagaacaggaccaccaggagctctgaatggaattcaatcagatggtactaccggaaagggggataggaagagtgatccctttgacaggaaaacaaattgaaagggaaagaaaatcggaaagcaaatgccagttttcaagatggggactgggagcagaggggcgctgcatttgatcaaatcgaggcttcacactgcaatagtttt

SEQ ID NO: 306228 - DNA, 582 bp, Homo sapiens
caggtgaatctaagatgccaggaagcatagaaactctctgacatctctgtatttcaggacctatctttgctaggcaggaagaaatgtgatatcaacacaaaaaatataaattgaaaagcttcctttggccctttgtgtactgcctggctttttcatatcagttacttgatttttatcccttgtctgccatgctcttggagtctttgctgtctcagtgtgtgttttagatgcttaatgcctcctcccttgaagcccattccctctgaacatatgttaataaggtcccaagaagtggtgctacattttgcagcacaatttcagttgcccagagagatagatggcttgaaacaggcaaagggaccccctcaagtaggcttggagaacaggaccaccaggagctctgaatggaattcaatcagatggtactaccggaaagggggataggargagtgatccctttgacaggaaaacaaattgaaagggaaagaaaatcggaaagcaaatgccagttttcaagatggggactgggagcagaggggcgctgcatttgatcaaatcgaggcttcacactgcaatagtttt

SEQ ID NO: 306229 - DNA, 646 bp, Homo sapiens
ttgatttcagatgttattaaagttgctgctaagaatcaccattctgcttccattctgtgtgaaaagaccacctttcaatgtctatatttttattgtttgtttttagaaagagggttttacttcttcacccaggctggagtccagtatcaggatcatagttcattgcagccttgaactcctaggctcaattgatcctccccacttagtctcctcagtagctgagactacagatgtgcaccactgtgcacagctaatttttgtatttttgtagggataaggtcttgctatgttgcctaggctggtatcagacttttgacctcaagcaggtctcctgccttgacctcccaaactgctgtgattatagtcatgagccactggtactggtcccaattttgtttttttaaaccaaactgtttctgccrtcatgatgaaacacaagaagcaggtactttgaacccaaggtgctcctgctgtttccttcctggtaggttcttgtagccactagaatgaagaaataagcatttttcctctggaaaagccttcttgcaatattcttcaaaaaaccctgagaagggcctgcacatagctatgcctgtcaggaattgaccctgtggacagaagctaccacagaggtgaagaaggcagg

SEQ ID NO: 306230 - DNA, 669 bp, Homo sapiens
gcgaatggcagttttcatcatgactatgcccgttcacagggactctttgaaacagaagtttggttggaagcatttcccattctgcttgtggcagggcatgaaaggggcacagaggctatggatgcattgttccccaggcccaggctccttcctggctgtgtgatgatgggcaagttgctggcctctccagttgtgtctttggaaaatagatgtaattgcacctacctcattgggttatgcagaagatgaatgagatcatgcatgagagtccctagcacagtgcctggcacacagtccctcccatcaacagtagttgaagctcattccctcacagccgttagaatcaattgtgggcctagagggctttcattttgtctctgcttacagttctttgccccgctggaaaaggagttagaaagaaagaaaaataaaacaataaatcacayaggctgtaaccttcagagtctgaagaatgctgccccaggcaactcccgcaccacccgggaaagtgtgctagacctccctgttcaaccccattgcccacagaaggctgtgcgagagtgaagggtgggaactgagaaacgatgttttctaagctttcaagcatgatcctaccccttaggatatgggtcaaatgacctcttgggacgggagaaagggaagggaaag

SEQ ID NO: 306231 - DNA, 669 bp, Homo sapiens
gcgaatggcagttttcatcatgactatgcccgttcacagggactctttgaaacagaagtttggttggaagcatttcccattctgcttgtggcagggcatgaaaggggcacagaggctatggatgcattgttccccaggcccaggctccttcctggctgtgtgatgatgggcaagttgctggcctctccagttgtgtctttggaaaatagatgtaattgcacctacctcattgggttatgcagaagatgaatgagatcatgcatgagagtccctagcacagtgcctggcacacagtccctcccatcaacagtagttgaagctcattccctcacagccgttagaatcaattgtgggcctagagggctttcattttgtctctgcttacagttctttgccccgctggaaaaggagttagaaagaaagaaaaataaaacaataaatcacataggctgtaaccttcagagtctgaagaatgctgccccaggcaactcccgcaccacccgggaaagtgtgctagrcctccctgttcaaccccattgcccacagaaggctgtgcgagagtgaagggtgggaactgagaaacgatgttttctaagctttcaagcatgatcctaccccttaggatatgggtcaaatgacctcttgggacgggagaaagggaagggaaag

SEQ ID NO: 306232 - DNA, 626 bp, Homo sapiens
aacaacttatgagcatcactgttcatttgggggaaaaaaagcattcctttatgtcaaatttcaccawagtgtcaagatctcttcatccctcaaattccaacctccatttaatataaagaaagttacatgtactgtcatcgcagggcaattggcaccaacatcttgaaactttaatgggctgggctgggctaagtcactgtttagccctagttgaaaacctgcacagatttgtgtgaaacaaaatctaaaagaaggaaaactgtaggttgaatagtaattgaaatgtatcctagtatgatagaggaggggaagttttggtgccataatatctcccctcactggtcttgaaatgtgtttctgttgaagcttcagtaaaagtttaattgtctagtgtcatttaaaaaaaaaaaagtgaaaactgcctgcagaccctccccaccctcaaaattcctgaaggcacctctgtgggcaggtgagactattctgtcaggaataagcctaaccaactgcctgagggcagaatggtcagtgaatggaaaacaactaacagaaaggttctacgtaacctcgggctaactacacttgctcggtcattggtgaaagttagtgaggagaaagagataaag

SEQ ID NO: 306233 - DNA, 600 bp, Homo sapiens
aagtggagagccctcaacatgartgaatcaatacaaaacccaatcttcccttcctctttcagagcagaattcgctccttagactggactggctttgttgtcctaaaatatagctccggccaaaaggctggatggaagctgctgagcagatggggcctcagcctgttctgaagttctgaggtggactgactccttggggagccatggatggaaaggagatgagaaaagatgtcagagaagccaaaatcctctgcaggatcccatggtggccctccaggaaaatcctttattagacaggatcacgagacactaaggtagaaggaattccctcctgtatctctgttctcaacaagcagttactgagcaaagcactattcttggtgctcaggcactgttccaatctttgaacgctgagcagatgtcattgtcaccgaagaaatgtgtagctgaatcacagtgagaagaggaaggcagacagtgaaggctaagatgaagggaggaaactggcttttctctgtctgctaagaaatttaaaaattaaagttcgagtgttagggtgcatgaatagtgtttgctttgcaatcagcattgattagagaag

SEQ ID NO: 306234 - DNA, 556 bp, Homo sapiens
atagtgttgacttcctcatattgattgtttgcttttactttatgttcccccctcccatttcctgttattgccagcatgctaggtgacckttctgtgtttaattactcaaaagaaacacacaagaaatgaatgccaggggaaaagagcttctctatccctgaatgtcttgtcagaataaccacccccaagctctttcttctctgtgtaggataggcaatacttgtttgaaatgaacagaaaataaaatggagaaagcatatggctgtaaggcagagaaagcagagtacaggggggacaactaagcacaaacatgtttctccaagtaagaggctcagtgtcattttttggaatacagtggttcctaaatggcatattcctgggaattcctaaaacagaattctcttaaaatagaaatcagacacttctatcaggggactctgaataattagatccagttatcttgcccaactgcaatagccattattcccaacctagctattgcatagacagagcctctgatataaacaatgctgaagagaataagaaagatgtgaca

SEQ ID NO: 306235 - DNA, 634 bp, Homo sapiens
ttgtttgagtggcaggggtggagtggggatcaataatgagaaatctgatgatagatgaagaattgtcatagatgaacgaagaaagctgagacagagtttagagaaaatagttaaagtataagaagcttaggtttgccaaaattcaactcattgatcctttatgtccttttatgaaatgcatgaaggtgtttctgggatgggcttatgtgagctcagaaaaatgtttatgactgcgagcttgcaaggctggatgcctgctgcactggtcctttagaggttagagtagtaggctgcttaggtcaacaatggaagttcagaagtaaccctatgtacaaggagtgcttattgaaaatcaggccaagaaactatttattgtgggkatccaggctgtgtctgtatgcacaaaatatcctggccaactctgattagcctaacctgcctggcaaactaacatggtcttggctcataggatcgaagtactggctctccaggatcaacaaggttaattagtcattttccactgtggtaactttttggatattacaacctatgcaaggcatatattttcacattagattttcctacttgctcataggatctgcaggctcagtccaggagaaaacaagcctatggc

SEQ ID NO: 306236 - DNA, 497 bp, Homo sapiens
gggcttcaacataggaatttggacatttggtccataacttctgaaaggtttattggcactgaccatgagcttgccctgattttctcctagtgggatattatcattcaggtaggatacgattccttgagtggcaaattccaagcaactttaattatcctccaggctgagggtggtgtgtaaagctgacatgtaaaagaggaagcttttgtacggctccagatcaaagaactacaatggaatgttcaggaggcagattgtacttagaagtttaaacaatcagaamtttcaggaaacaaatgagatactctctcttgcacttcttgtcattagaagatccaagtagcagctgatgtccacttgggccaggatttgataattcaatgaagacttctatcagacgatccctgaagttcctttgaatcatgatgttctataatttaattaaacttgaaactttcctccaacaaaacatactatttttctttcttttcttgacc

SEQ ID NO: 306237 - DNA, 497 bp, Homo sapiens
gggcttcaacataggaatttggacatttggtccataacttctgaaaggtttattggcactgaccatgagcttgccctgattttctcctagtgggatattatcattcaggtaggatacgattccttgagtggcaaattccaagcaactttaattatcctccaggctgagggtggtgtgtaaagctgacatgtaaaagaggaagcttttgtacggctccagatcaaagaactacaatggaatgttcaggaggcagattgtacttagaagtttaaacaatcagaactttcaggaaacaaatgagatactctctcttgcacttcttgtcattagaagatccaagtagcagctgatgtccacttgggccaggatttgataattcaatgaagacttctatcagacratccctgaagttcctttgaatcatgatgttctataatttaattaaacttgaaactttcctccaacaaaacatactatttttctttcttttcttgacc

SEQ ID NO: 306238 - DNA, 558 bp, Homo sapiens
ctcattgttcaactcccatttaggagtgagaaagtgcagtgtttggttttctgttcctgtgctagtttgctgagaatggtggtttccagcttcacccatgtctctgcaaaagacatgaactcattcttttttatggctgcatagtattccatgrtgcatatgtgccacattttctttatccagtctaacactgatgggcatctgggttggttccaagtctttgctattatgaatttgtcaacttttaatttttttacaactttttgactcttacaataacacttacatgaaaagaattctcatttacaattttcaccttgatgtttatttatcctttatatgaaaatacattcagattttgtctatttggaatgcaattagattattaatcctttagatgatcactataaataggacccaaattatgtgaaaatcacataattgatgatttttgctaaagttaagagaataaattttatggaataaatatatggtaatttatgtattatgtatgtcttcattttattctcatgcaaatgtcaccaattcaccaaaata

SEQ ID NO: 306239 - DNA, 576 bp, Homo sapiens
ccaagcccctgcaattccgggtgggaccaggcgtccacacctatagctggactgctcrttggtcccttatggcgcttcttttacgcgaggcttagaggtcaaatacaagggggcacggtcctcacagaacggaaaggatccgtacagactctccgggtttgaccgttttctaggacgaaccaatcgctttccagatacttccccgccttttgcgcgttcatttgaaaaaagccggtgtgacggacttggaaattggctcagtgactgacccgcaagaaagccagtgactgggggttcggatcacgagttggaccaataagaaaagacaatcgctggggccggggctttgctaggaggagcgcaggtgggcgttatttgattgacggagggctctacttatggctggtagcgggggctggtcctgacgttcgggaggtaggacctagcggaggcggggccgaataaagtaaatggtaataaagggttgggtctcacttagtgggcggtgtttgatggacagctgaccttgcctattgaaagtagccactgatgcccaatgggaaattagaaacccag

SEQ ID NO: 306240 - DNA, 596 bp, Homo sapiens
tttttttttttaagaaaccactatattcttttccatatggctatactaatttacattcccaccaacagtatataagagttcccttttctcaatatccttgccagtaaaggttgctgtttgtttgataacagccatactattagaagaaaacataggggatatgcttcaggagattggtctaggcaaagctttgagctaagacttcaaaaacacaagcaacaaaaacaaaagcagccaaatgggactgtattaaatggcaaagcttctgcatagcaaaggaagcaatcaacaaagtacagagacaacctggagagtgggggaaaaygattcatctgacaagtggctaatatctagaatacacaaggaactcaaacaactcagcagcagaaatccccaaataatctgatttaaaaataggcaaagaaactgaaatgaacatttcttacaagacacataaatgggcaacaaatatatgaaaaaatgctcaatattactaatcattaaggaaatgcaaattgaagcctcttataagaagtacaactggttcttctcataacacaggcaatatactctttttttgagacaaagtctcactc

SEQ ID NO: 306241 - DNA, 495 bp, Homo sapiens
ctctgagagtcatttgatggtaagatgagatgaccaacagacacagagttgcccagcagtttccagcttgttctcactctccctctctgtgaccagyctggccccactgaccaacagtggcccctccccaacaccaaattattggttgtgaattgacacagagggtagctacctagaggcaacagcttcccatggatgcctctgcctcagtgactagatagagttggctctttggatggacaggtgggtgactctttctctgattctctaacttcctgttctggatcttcagttccccagctcttttgtaaattctaactctttaatctatggaattaaatctcttatcccatcgcagttacagtgactctgttgctcccctgcctaagtgtgccaaggttaggacaaggtacgtaagaacagcagagtcattcaggagacaaacaacaaagctataaaaaggaggtgaggatttgaaggatgcgtaggattcat

SEQ ID NO: 306242 - DNA, 495 bp, Homo sapiens
ctctgagagtcatttgatggtaagatgagatgaccaacagacacagagttgcccagcagtttccagcttgttctcactctccctctctgtgaccagtctggccccactgaccaacagtggcccctccccaacaccaaattattggttgtgaattgacacagagggtagctacctagaggcaacagcttcccatggatgcctctgcctcagtgactagatagagttggctctttggatggacaggtgggtgactctttctctgattctctaacttcctsttctggatcttcagttccccagctcttttgtaaattctaactctttaatctatggaattaaatctcttatcccatcgcagttacagtgactctgttgctcccctgcctaagtgtgccaaggttaggacaaggtacgtaagaacagcagagtcattcaggagacaaacaacaaagctataaaaaggaggtgaggatttgaaggatgcgtaggattcat

SEQ ID NO: 306243 - DNA, 501 bp, Homo sapiens
aaattgtgttagtgtccaagaactttatggaaygcagatcttaagagcaatgaactaggatatctggcaggaaaaaatatctgaacagcaaagcatctgggctgctatgtgtctacttttagtcacatacagtgagatgcaagaggaaagacattaacttaaatttataatttttttttggagatggagtctctctgtcatgcaggctggagtgcagctgcacaatctcagcttactgcaacctctgcctcccaggttcaggtgattctcctgcctcagcctcccaagcagctgggattaaaggcgcatgccaccaagtccagctaatttttgtatttttagtagagatggggtttcgtcaggttggccaggctggtctcaaactcctgacctcaagtgatccgttcgcctcggcctcccaaagtgctggaattacaggcgtgagccactgcatgcagccaggaatttatatttaaaagcgaagcagaatagaaaaatttg

SEQ ID NO: 306244 - DNA, 501 bp, Homo sapiens
aaattgtgttagtgtccaagaactttatggaacgcagatcttaagagcaatgaactaggatatctggcaggaaaaaatatctgaacagcaaagcatctgggctgctatgtgtctacttttagtcacatacagtgagatgcaagaggaaagacattaacttaaatttataatttttttttggagatggagtctctctgtcatgcaggctggagtgcagctgcacaatctcagcttactgcaacctctgcctcccaggttcaggtgattctcctgcctcagcctcccaagcagctgggattaaaggcgcatgccaccaagtccagctaatttttgtatttttagtagagatggggtttcgtcakgttggccaggctggtctcaaactcctgacctcaagtgatccgttcgcctcggcctcccaaagtgctggaattacaggcgtgagccactgcatgcagccaggaatttatatttaaaagcgaagcagaatagaaaaatttg

SEQ ID NO: 306245 - DNA, 553 bp, Homo sapiens
aacagaagtaccttgaaaatgaagtttagatgttgtataaacaaaaactcaarttcaagaatttactcattttctttggatttaggaactgactttttatctgttaccagacattgtctcctcatgaattaaatcaatatgctctggtctatttagaaataagcacatgaagaatgaaaaagaaatactatagtccagtccatctcacaaagaaatctatgtctgcaacatgcagtgttatcaaagccctagaagagtgcctaacgcagaacaggtactcaacaacaaacggcacttgccatttttaacatcatcacatagtgggagtcattcatagtaggtcatgcaaataccacccagaagaaaacatcaaatgccactggaatgtgaacagagacaatataaagggccctataatatgtgaaaaacatctaaagatttttcaattcaataaaacagcagcattgaataacaattgtaaagatatgaaggaaaggcttcccagaggcaacaacctgtgaaaccagtctagaaagatgagtaggggaaagag

SEQ ID NO: 306246 - DNA, 582 bp, Homo sapiens
agcttttctgaactcaaaacccaaagtcttattttttggatgagtggcagctgaattacaacacagatcgaattcacaacctcatatatcaaagtgagggaattgtttgcaaaaatagtacaaaaccccgtaagtcaacatggacagattctgaagatactttaacgttaaattttcctaagcctctttaccaatagaaataagtactttttcttgttttatgagtttgatctcttcttgcttaaaaaacctgtaatagcttcttccaagatggaagtctggcagggaattgctaattctccacagcacctgctcctgtcacccctcacttctcatttctcaattctagatctaccccasagggtgaggtacaaaagctgagagacactcacaccaaaagcagtacatgatcttgtcagtatatattgaaagacaagaaagatcatataggagaatgaattctaaatgtgttgtgtcaggagcaaagagtagactattgatcgggctaatttattgatacaggtgcactgagcaggattactggattccatgtgttcatttgagtactgggagtgactctta

SEQ ID NO: 306247 - DNA, 592 bp, Homo sapiens
tgtgaatggatactataaaattcctaatttatatgctatgtggtgtgtgttcctttgagatacttaaagatatgcaaatagagtaaccagaaaggactgatgtaaaagtactattttgctaagaaaagaagcaacagaaatctgtaaactcccttcatatgagtgtaccactaagcaatgtggaatggcagctggagaggggcttgtaagaagctgataaaygtatatcaaacagaggcgtttctttcatttccaaactggtttggtgtgatgtagttgtctttcctgctcctacttggaagacatgacaaagtattctgtgtaatttgagcccaaactggaaggtatgaaagaactgtacttccccttccttttttcctctttctggtcctctttctgctaaaagggttgttctgaactcaagcagaatataaaaggttatttcctaacataaaaatgtcatgttcctggataatcaagtctttagatcctactagcctgtatgatgtattactttcacagttcaaatgagaaataaagttttgcaatgaggctttggtgttaatgtacatatccaatattccacaattca

SEQ ID NO: 306248 - DNA, 585 bp, Homo sapiens
ctatacttattcttttgttttgkgttgtgtgtttcatttattttattatattattattattgttttagaactgggatttcactgtgttgcccaggctgcactccagctcctgagatcaagtgatattcccgcttcagcttcccgagtacctggaattacatgtgcatgttccactgtgcctggctctggtgtgtttatttttagaaaattttttaattcttgccttttcagttaacaatatataatagcatttatctatgaatgctaatacatacctttacaaagaaatttacagtatagtacaattttccattacatgcagtttccataatttatttatttagtctcagatctttttaggtggacctaagttttccctttcataaagtatgctattatatctttatgtatggaaaatactcttaattttgaattttagattttatgtttaggcttttttctcagaaagggaataaaatttaaagactcattcaaaaaatgtattatcatcagaaatctatgacaatgctttgcttggtggcagtcttgccagcattgaatagcatcatgtatgtgtgtgtatat

SEQ ID NO: 306249 - DNA, 623 bp, Homo sapiens
ggtaatgccaccccccttgcaggggatttagaaagggggaaagtggccaaggcattaaggatttaagattagacagagactaataacaagacacccatgttattccaaacaaattggcaagctaacaacaataaaatgatgtctcaaagtaaatatataccaacatgttcctagtcattatctctgggaggcagaattaaggggattttgttatgcgtttcctatttttccaaattttaaagattaaagatgtattccttttataaaaagaaaatcatcagtaaagagaatttaaatatttaagggtgacaaacagatttcaacttgaatgaattcttacattaagactccaagtcctatctgccaagaatagaggaaggcaaaagagtggcagaaaagccatatctaaattaagggagaaatatatcataataaaataattttagaaaagtataatacagtcagtcctccatatctcctggttctgcatctgttgacgcacaatctgtgatacggaaggttgactttaagggacttgagcgtcagtggattttsgtaactatatggggagtgaggatgtcctggaaccaatcatccatggatatcgagggacgactgtacac

SEQ ID NO: 306250 - DNA, 551 bp, Homo sapiens
ataaatatgttaggttatatgacaaaggcggggggggggtgacctcttgtcccttccctgagttttcattaactgaactcataccgcaggaagaaagactaaagtctgtcaacacacctggaaggacttttcacaaaccatgtctgttctgcaggcctaaaagactgtcccaggccacttgtccttgaagcccactgagttcccctaaaaatcatttacaatccccataaaaacatccacatttccccatctccttttcccctaagaagtagggtaataagcatctgtaccccagtgggttattagacaatcattctgtgattcttccycatgcacactaataaatttgtataccatttctcctattaatctggtttttgtaagttgatttttcagtgaaccttcaaagggcaaaggggaaattttcccttgggtctacacagccatcattaactaatattttgaaattcagtatattcattgaaaagtagctactcaaatagccttgtattctcctcagaggatttcagagtgctttatacttggttcat

SEQ ID NO: 306251 - DNA, 549 bp, Homo sapiens
agaaaattcaagttctggtatgtgaaagaaaaaaaaaattaaggcaagaagctgctgtcttactctactttctgctggtataacagaatacctgagataacagcattaattcattcatgagagcagagccctcatcctctaatcaccttttatttttatttttttgagacagcatctcrctctgtcacacagtctggagtgctgtggtgattgtagctcactgcagcctagaactcctgggctcaagtgatcctcctgccttagacttctgagtagctgggactacaggcgtgtgccaccctgccctgcttctaataacctcttaaagattcctcctcttaacactatcacaatggcaattaaatttccccatagttttggagggaacattcaaatagtaacatctagctagaacagcctgtctgttggcagaatgaagtagaacagtttagtgggaacaaggatacaagtgtatttttcatggaccaaatacagactctggaaaggatacggttgtggatcatcgggaaaagaacttcacgaaagaga

SEQ ID NO: 306252 - DNA, 549 bp, Homo sapiens
agaaaattcaagttctggtatgtgaaagaaaaaaaaaattaaggcaagaagctgctgtcttactctactttctgctggtataacagaatacctgagataacagcattaattcattcatgagagcagagccctcatcctctaatcaccttttatttttatttttttgagacagcatctcgctctgtcacacagtctggagtgctgtggtgattgtagctcactgcagcctagaactcctgggctcaagtgatcctcctgccttagactyctgagtagctgggactacaggcgtgtgccaccctgccctgcttctaataacctcttaaagattcctcctcttaacactatcacaatggcaattaaatttccccatagttttggagggaacattcaaatagtaacatctagctagaacagcctgtctgttggcagaatgaagtagaacagtttagtgggaacaaggatacaagtgtatttttcatggaccaaatacagactctggaaaggatacggttgtggatcatcgggaaaagaacttcacgaaagaga

SEQ ID NO: 306253 - DNA, 549 bp, Homo sapiens
agaaaattcaagttctggtatgtgaaagaaaaaaaaaattaaggcaagaagctgctgtcttactctactttctgctggtataacagaatacctgagataacagcattaattcattcatgagagcagagccctcatcctctaatcaccttttatttttatttttttgagacagcatctcgctctgtcacacagtctggagtgctgtggtgattgtagctcactgcagcctagaactcctgggctcaagtgatcctcctgccttagacttctgagtagctgggactacaggcgtgtgccaccctgccctgcttctaataacctcttaaagattcctcctcttaacactatcacaatggcaattaaatttccccatagttttggagggaacattcaaatagtaacatctagctagaacagcctrtctgttggcagaatgaagtagaacagtttagtgggaacaaggatacaagtgtatttttcatggaccaaatacagactctggaaaggatacggttgtggatcatcgggaaaagaacttcacgaaagaga

SEQ ID NO: 306254 - DNA, 619 bp, Homo sapiens
gttttgcctgaaaataatagaaatttgagtaaaagaggcttaaaaaatgaagatttattattattattattattttgcagttgcaagatttaatagagtgaaaacagagctcccatacaatgggaggggacccaaaggggttgcccctgaaaggaggttgcccactcccggctcgaatgcctggagtttatatcccaatcattgtccctccccctgtgccctcaggcgatatatgatttgactgtgtctttaccttctgctctagcctaatttgtattttagygagccctctttactacctgattggttgggtgtgagctgagttacaagccctgtgtttaaaggtaggtgcggtcacctttcccagctaggcttaggaattcttaatcggcctaggaaatccagctagtcctgtctctcagtccccccgtcaacaggaaagcccaagtgctgttggcaaggttggccgacaaccactcttaactgcttcctgctgaattggggcatagtaggggttgtgcagttgagatttccttggaaagggtggcttcgatgtcattaacatcagagcatgggctagcaagccggtccaggggtccgtggtaggtcttagtcatgg

SEQ ID NO: 306255 - DNA, 619 bp, Homo sapiens
gttttgcctgaaaataatagaaatttgagtaaaagaggcttaaaaaatgaagatttattattattattattattttgcagttgcaagatttaatagagtgaaaacagagctcccatacaatgggaggggacccaaaggggttgcccctgaaaggaggttgcccactcccggctcgaatgcctggagtttatatcccaatcattgtccctccccctgtgccctcaggcgatatatgatttgactgtgtctttaccttctgctctagcctaatttgtattttagcgagccctcttyactacctgattggttgggtgtgagctgagttacaagccctgtgtttaaaggtaggtgcggtcacctttcccagctaggcttaggaattcttaatcggcctaggaaatccagctagtcctgtctctcagtccccccgtcaacaggaaagcccaagtgctgttggcaaggttggccgacaaccactcttaactgcttcctgctgaattggggcatagtaggggttgtgcagttgagatttccttggaaagggtggcttcgatgtcattaacatcagagcatgggctagcaagccggtccaggggtccgtggtaggtcttagtcatgg

SEQ ID NO: 306256 - DNA, 619 bp, Homo sapiens
gttttgcctgaaaataatagaaatttgagtaaaagaggcttaaaaaatgaagatttattattattattattattttgcagttgcaagatttaatagagtgaaaacagagctcccatacaatgggaggggacccaaaggggttgcccctgaaaggaggttgcccactcccggctcgaatgcctggagtttatatcccaatcattgtccctccccctgtgccctcaggcgatatatgatttgactgtgtctttaccttctgctctagcctaatttgtattttagcgagccctctttactacctgattggttgggtgtgagctgagttacaagccctgtgtttaaaggtaggtgcggtcacctttcccagctaggcttaggaattcttaatcggcctaggaaatccagctagtcctgtctctcagtccccccgtcaacaggaaagcccaagtgctgttggcaaggttggccgacaaccactcttaactgcttcctgctgaattggggcatagtaggggtygtgcagttgagatttccttggaaagggtggcttcgatgtcattaacatcagagcatgggctagcaagccggtccaggggtccgtggtaggtcttagtcatgg

SEQ ID NO: 306257 - DNA, 550 bp, Homo sapiens
ttctgtactgccaataataatctcctaatggcttcctgatgtttgataggtgttcccttggaagttaggaattccctttctctccttattgctgcgtgggcatggaggactaggtaagcatacttagagtctgtatatatatttaccctttttccttctcctaattctagggtataatgrcccctgcttttgctaggatgtctctccctaacaaagaagtggagctttcaggcataattagaaaggcatgtgaaaagagtaaagttccccagtcacaacttagtggctgggagaagtatctagtgactggctgtcctaggacccctcagatagtgacagatctggaggacagttgtccaggacaggagagtaagactgagaagttcacgccagtgtccaggagacagttaacgccctggccctcaatggtcaagcatacccgggcctctgtgagggtgatggcatgggctggcacttgccctggaaaccctcagtcctgctgctggatcatctggttagtggcttctgactcagaggaccttcatcccct

SEQ ID NO: 306258 - DNA, 624 bp, Homo sapiens
actgggttaaagatttttgataggaaggctacgagttgttagtggtctcagtgttttcaggctacgcccttgtttacactgacaacaaggtagtatcgagtgttatagggtcacagagaagaccttcaattatcaattataggttttaaatttactctggcttttaaaggaatagggcacactgttttttctttactacttctgtctttctctttctttctctctctgcctctcttacccrccacccccacctctctgtctctctctgtctctctcctctctgtctctgtaggtggattttggaaacacagtggagggtcgttcacttgttgcccccatttgccgctataggaatatgtgcctccctttaatttactcaattcattttcatcttgatatattatgttgtagacccagttccagttgttaaagtactgggttatcagttctaaggccctggcaagggtggtggggaacgggtcccacataactgcccatgtcgagagctgcatgcctaaattgggaggaacaccagggataaaactccctggattcatagcctaggtgcccaaggacacagcgtagagcttccttagatccctttagagatacaacttgctctaa

SEQ ID NO: 306259 - DNA, 585 bp, Homo sapiens
ggatgttgctattatcagaccatgaatttaaaacaactatgattaatattgtttgaaatgcttgttccccggtgctgtaaagaaatagtacttgaacataaatttaatttagtaaggccatttttacttttgcagaaagggtacactggccagcagttttgccaygagagtacaccaaacaaaggagacagggtcatttataacctaatgtatccaccctactgctgtgtccggtttccattgtctggaacgggacctcacattctgtatttgtcctgacttgctagcaacttagaactttttaaaagaggcagaggtagaggagaacaaaggaaggaggaggtaacttgtggaatgctgagaaaggtaaaaacacttttaaataaggaagaggaacaggctatgacctagtgcttgcttggactagtataagcatgccagggcaaatatttaggagcacaggtctttgaataaattttgcttataagagaagttaccatttattcctaattagatgggcaggaaagtctttgaagaagaacctctactttattttttacagtatgctaagggctttaatgggaa

SEQ ID NO: 306260 - DNA, 585 bp, Homo sapiens
ggatgttgctattatcagaccatgaatttaaaacaactatgattaatattgtttgaaatgcttgttccccggtgctgtaaagaaatagtacttgaacataaatttaatttagtaaggccatttttacttttgcagaaagggtacactggccagcagttttgccatgagagtacaccaaacaaaggagacagggtcatttataacctaatgtatccaccctactgctgtgtccggtttccattgtctggaacgggacytcacattctgtatttgtcctgacttgctagcaacttagaactttttaaaagaggcagaggtagaggagaacaaaggaaggaggaggtaacttgtggaatgctgagaaaggtaaaaacacttttaaataaggaagaggaacaggctatgacctagtgcttgcttggactagtataagcatgccagggcaaatatttaggagcacaggtctttgaataaattttgcttataagagaagttaccatttattcctaattagatgggcaggaaagtctttgaagaagaacctctactttattttttacagtatgctaagggctttaatgggaa

SEQ ID NO: 306261 - DNA, 525 bp, Homo sapiens
ttttctgtttgatttattttctctagtgccattatgttcttgcaatttggcctttttaatgatattttaaactggatttcattttacagcattgcattctkcaaatgtatcggagacagaaaccatgttgaatttggaaaggatgcagacagtagtgaactgtattggatatcagtggtgatagcaataactcaaaaattcacagctcaatttatcctccatgccctctaccatctaacttcctggatattcatagactcagtaggaacttaggactcattctctacttttccttcatgaatgctttattgcaaataagtgatagaaattttatttctgtaaatcctactgtacatctcattgacttgttcactcatttgctattgcagaatccttatacttcttcaaagctccttcattatttattgcagtgacatgtaggttttccatgtgtgctgataaacaagagtttacagctctgcatggcacttcccatgatttgccccttgtattctgattctaacc

SEQ ID NO: 306262 - DNA, 525 bp, Homo sapiens
ttttctgtttgatttattttctctagtgccattatgttcttgcaatttggcctttttaatgatattttaaactggatttcattttacagcattgcattcttcaaatgtatyggagacagaaaccatgttgaatttggaaaggatgcagacagtagtgaactgtattggatatcagtggtgatagcaataactcaaaaattcacagctcaatttatcctccatgccctctaccatctaacttcctggatattcatagactcagtaggaacttaggactcattctctacttttccttcatgaatgctttattgcaaataagtgatagaaattttatttctgtaaatcctactgtacatctcattgacttgttcactcatttgctattgcagaatccttatacttcttcaaagctccttcattatttattgcagtgacatgtaggttttccatgtgtgctgataaacaagagtttacagctctgcatggcacttcccatgatttgccccttgtattctgattctaacc

SEQ ID NO: 306263 - DNA, 683 bp, Homo sapiens
aattttaaaaattgatataaaaagccaaaaaatattatagataataaggaaaagatgtgaacaagcaatccaccaaaagagatataaaaaggtccataaacatatgaagtaatgttcaacatcactcctaatgaaagaaaggcaacgtaaagtactctgaaattccatttatcactgctggcattggcaaaatatcagaagcttgagaattggsaaggctgtgagaaatcagacagtcatagactttgactgctaaaatgaaaatagatacaatctctttggtgagaaatttggcaatatctaataaaattcttcatgtgctctaacgtttccaatcaccaatctcattcttagtcgtatccttgcagatataactccgaaaacataaagattcacaaacacaattcagtagagcagtatttttcagtgcaaaatgttagaaaccaatcattggagattgagtactaaactatgttacatgcacacaacttagaatgtacaatcataatatccagctgtaaaaattgaaggcctgtgaactgaggtaaaattatttccaggagacactgtgaagtaaaaagaataccaaatgtgtttgtgtgtgtgtgtgtgtgtatgtgtgtacacatttgtaaaaggaaagaaaagtaagatagcatgcacatgtatgtgtgtatacacat

SEQ ID NO: 306264 - DNA, 567 bp, Homo sapiens
ttactaaatagtgtgagggtgagatagaataagggtgggatgtatttcctttttcacattttttttctttttttcttcttatcttcacaaaacccacataaccacctctctgacactatgcccactacccttgaggctttagtcacacaaagaaaacagctactgtgctatgctttcataatgtttaactatcccttgtactaaggaataccagaaattggccttataagatttaaatatctaattaagattgtggagtgtcgcgtcgttgaaagcattgctgaagttgatttatagccttgctaccttgtcctgaccaccaggtggcccattaacaagataaacattgcartcagatttgctcacctcgatagcctaccagtcacgtgctttggcctgcccagcctgcataccctaccccgatgtaaagttctgagctttgcctgatgaaatatccctattagctttttccaggagcccctgacggatccttgtgcgttgtctccactgccttccttgagctgcagtacaagccctaaaagaaaagccttgtttgggaaatctgct

SEQ ID NO: 306265 - DNA, 565 bp, Homo sapiens
cttagaggggaattacattccaaatagcaataggtgaatgatctggtttccatacattctcaccaatatttcacgttattactatgttttattttagccattctgataagtrtgaagtaatagctcgatgtggttttaatttgcatttctctaatagccagtgatgttgaatattttttcatggattttttttttttttttaccattggtatagcctcttaatttaaatcattttcttaacatcttttgctcacttcttaatgactttttttttttactttgagttttgaggcttctttgtgtattccagaaactagccatttgtcaatatcatttgtatatacagtctcctagtgagtagcttgcatctatatctttttagtaaggtctttaactgaacaacatttttaattttgcttgatttatcaattttttaaatttaatttcctttttatttattttaatattattcattttcatttatcacattttccttttattaattgcattttgttacaatatctaagacatttttgtctagccttatatccctaatatttttttc

SEQ ID NO: 306266 - DNA, 565 bp, Homo sapiens
cttagaggggaattacattccaaatagcaataggtgaatgatctggtttccatacattctcaccaatatttcacgttattactatgttttattttagccattctgataagtatgaagtaatagctcgatgtggttttaatttgcatttctctaatagccagtgatgttgaatattttttcatggattttttttttttttttaccattggtatagcctcttaatttaaatcattttcttaacatcttttgctcacttcttaatgactttttttttttactttgagttttgaggcttctttgtgtattccagaaactagccatttgtcaatatcatttgtatatacagtctcctagtgagtagcttgcatctatatctttttagtaaggtctttaactgaacaacatttttaattttgcttgatttatcaattttttaaatttaatttcctttttatttattttaatattattcattttcatttatcacattttccttttattaattgcattttgttacaatatctragacatttttgtctagccttatatccctaatatttttttc

SEQ ID NO: 306267 - DNA, 565 bp, Homo sapiens
cttagaggggaattacattccaaatagcaataggtgaatgatctggtttccatacattctcaccaatatttcacgttattactatgttttattttagccattctgataagtatgaagtaatagctcgatgtggttttaatttgcatttctctaatagccagtgatgttgaatattttttcatggattttttttttttttttaccattggtatagcctcttaatttaaatcattttcttaacatcttttgctcacttcttaatgactttttttttttactttgagttttgaggcttctttgtgtattccagaaactagccatttgtcaatatcatttgtatatacagtctcctagtgagtagcttgcatctatatctttttagtaaggtctttaactgaacaacatttttaattttgcttgatttatcaattttttaaatttaatttcctttttatttattttaatattattcattttcatttatcacattttccttttattaattgcattttgttacaatatctaagacatttttgtctarccttatatccctaatatttttttc

SEQ ID NO: 306268 - DNA, 546 bp, Homo sapiens
acagtaatcgaactgaagatttttgctcagagataagattaattaacataaagctccattttgctgaagtttgaagacttttttcactgtactaatccaatttcacagataaaaatgtcttaatattctatttgcagtatactacattaccgtcatttggtaaaccagtaacgtggagaccctctaatcttggtatacattataaaatatggatatctgtgtttatttttttaagaaattaatctcctccttaacatccatatccagttatacctgggattcctataacaagaaactctgattttccttcagagagtaaaattcaattctattctttaccctcacaattatttatgtataattgacaaataatattgtatatatttattgtgtaccccattgtgttttgatatatatatatttcattgtgaaataattgccaaaatcaaacttatattccttagttcaaataattaccccctttcrtgtgtgtgatgagaaaaataattaagatttactttcttaacacattttaagttacaatac

SEQ ID NO: 306269 - DNA, 559 bp, Homo sapiens
gatcatctgtctttatgtgggacaataatagtgcagatattattttaagaattaactaagtattagctatctctaaaatcaccatttgcataattgatactttatggtcacatttacatatgtttatttaatcttttgggaacccaaaatattttgaagaccataagatgcattatgaaaaatctagaaagatattcatttttgtcatcttaaatttaatcacaatttctctgtttctaacccttaaatatgttctgtttaacctggagaacttccctctcagcaaatcatcaccttaattatgccctcagttcttcttcctcctttttcattttgtttctctgtctgatcagttcaatccatcaagcaaggttggaatctgtgctttgcagaagcaagaggtgtagtcacagtgtgctagagcagagtgttggagaccaggaacaatcagaagagcatcaagaaggaaatggaatgatgtggtatgttggcacctgagcrgagagaggagggcatcaatgaaagatgaggtggggtggagctcatagttgtgatgaaa

SEQ ID NO: 306270 - DNA, 400 bp, Homo sapiens
ttagacaagaaataaaattcaatgacatttatatgaatgatataaaactatctgcattcacaagtcaacaatattatatatttagaatatcctaaacatttctcctcccctccaaaaaaagaaccagaaaaactattagatttaataagctwgtttgtcattgttgcaggatatatctatacagacgatctataacttggaatggctcaacttattatttttcaactttctgatgggtttatcaaggtattaatttattttctacttacaatattttcaatataccatggcaattgtagccccatgatattaggttggtgcaaaagtagttgaggtttttgccattactttcagtgcaaaaactgcaattacttttgcaccaacctaatagattaaggaa

SEQ ID NO: 306271 - DNA, 400 bp, Homo sapiens
ttagacaagaaataaaattcaatgacatttatatgaatgatataaaactatctgcattcacaagtcaacaatattatatatttagaatatcctaaacatttctcctcccctccaaaaaaagaaccagaaaaactattagatttaataagcttgtttgtcattgttgcaggatatatctatacagaygatctataacttggaatggctcaacttattatttttcaactttctgatgggtttatcaaggtattaatttattttctacttacaatattttcaatataccatggcaattgtagccccatgatattaggttggtgcaaaagtagttgaggtttttgccattactttcagtgcaaaaactgcaattacttttgcaccaacctaatagattaaggaa

SEQ ID NO: 306272 - DNA, 400 bp, Homo sapiens
ttagacaagaaataaaattcaatgacatttatatgaatgatataaaactatctgcattcacaagtcaacaatattatatatttagaatatcctaaacatttctcctcccctccaaaaaaagaaccagaaaaactattagatttaataagcttgtttgtcattgttgcaggatatatctatacagacgatctataacttggaatggctcaacttattatttttcaactttmtgatgggtttatcaaggtattaatttattttctacttacaatattttcaatataccatggcaattgtagccccatgatattaggttggtgcaaaagtagttgaggtttttgccattactttcagtgcaaaaactgcaattacttttgcaccaacctaatagattaaggaa

SEQ ID NO: 306273 - DNA, 400 bp, Homo sapiens
ttagacaagaaataaaattcaatgacatttatatgaatgatataaaactatctgcattcacaagtcaacaatattatatatttagaatatcctaaacatttctcctcccctccaaaaaaagaaccagaaaaactattagatttaataagcttgtttgtcattgttgcaggatatatctatacagacgatctataacttggaatggctcaacttattatttttcaactttctgatgggtttatcaaggtattaatttattttctacttacaatattttcaatataccatggcaattgtagccccatgatattaggttggtgcaaaagtagttgaggtttttgccattactttcagtgcaaaaactgcaattacktttgcaccaacctaatagattaaggaa

SEQ ID NO: 306274 - DNA, 513 bp, Homo sapiens
atatgaactaaccaaccaaattaacaaatgatcagaccagttgacaacagactgtctgttgtgctggcataatggacatgtgaagaaaatggccacagtagcagagacaggacttactggtgcaaattcataccccttgttaccaaggtaaggctttctgctgctacttctagatctctactatcctagcaacagacactaacactatgcctatgatgtgcttcaatgtcttgaagagatccactgtcctcatgatttcagtttgactacattggaactcttcaaccctagaaacagcttttttttttttttttttttaraaaattactctgtggttgagtttgtatgggcctcagttggcactacaacctaatgttttacagagaatttgaaccgtaagaattgtatcctacttaatgttccatcaggctagcaaatgtactttatagcaaatcggatgcagaactaagcttgtaaaataggagtcacttcatgatataacttttgggctac

SEQ ID NO: 306275 - DNA, 512 bp, Homo sapiens
tggtttagaaaggacacttttttggtgtggtgctaagcactgaaataaagtctttctacaaggtcgccatggtaacatgcatgcatcacctgtcctgttcacatttaaaatttgtattctgatatcatgcatataaatatttgttctaaaaatttccgataactggtactacattttggtatttttaatgagttcatagtacarttaaattaaattactaaattaactatttataaacatgtatgcgtaactaagaatctactgagctcatagaaacaggtgtaaaacatgttggtgatttgtagcactgtataattgtgcactaggcaaaattctaaaactatatatggttgatcagtttaattcagtccttttgtggtaaacttattcgcataaagttaatagaaacagtgagttctgctggaagagcttgctcaagagtgaatcagggcaatgttgttactgctacagctgtttctacttaaatcacgaataatactataaatatacag

SEQ ID NO: 306276 - DNA, 512 bp, Homo sapiens
tggtttagaaaggacacttttttggtgtggtgctaagcactgaaataaagtctttctacaaggtcgccatggtaacatgcatgcatcacctgtcctgttcacatttaaaatttgtattctgatatcatgcatataaatatttgttctaaaaatttccgataactggtactacattttggtatttttaatgagttcatagtacaattaaattwaattactaaattaactatttataaacatgtatgcgtaactaagaatctactgagctcatagaaacaggtgtaaaacatgttggtgatttgtagcactgtataattgtgcactaggcaaaattctaaaactatatatggttgatcagtttaattcagtccttttgtggtaaacttattcgcataaagttaatagaaacagtgagttctgctggaagagcttgctcaagagtgaatcagggcaatgttgttactgctacagctgtttctacttaaatcacgaataatactataaatatacag

SEQ ID NO: 306277 - DNA, 604 bp, Homo sapiens
ataagtcttagctctgtcacctttctgctttgtaaactgttgattgtaactctgacaaaggctcatattgatcttcagaacctctgccatctttgtatctgaactgtctttgccctaatctttaggaacaccatttcaaagacagtattttcttattaatcaaatatccaatctaatctgatttttttgtttcaatttctgctggaaaaaggcgaggatttctcaaaactgtggcaccacctatttctacaccaaatacagatgttctaggaactgtcatggtgctggaaaatgtgggatttagtatgctgatragtgcataatgaggttgtaggtgaaacccagctcaaatccagtgccacgttgggtccagcttattttcagggacttatcagtccctagcttatgcagctatttcaagagtttccttttgctagccatgtgaaactgctgcctgaaattttctattctcctgcaaccaccctgcattattcccatttcatacagagtgtattagtttgatgtagtccctcttgtttacttttgttttgttgccagtgatttaatgccataacaaaacaaataataagcattgtaaagacca

SEQ ID NO: 306278 - DNA, 595 bp, Homo sapiens
tttaattttgaattaaaaaaggatttagatatcaaatatttttcatctgaatctacctttaaaaatgttacttcctgcctttctgggtcctactgctttctaacatgactaggattgtttcaataaattaatattcattaaagaagctgaggttgaaagaagagtatatatattgaatgaaagttattttttattttgacttattaactaattaattacttattaagcctgtggtttaataagtaaagataagaggagacactttgaggtcagagtatctgggtttaaatctcaactttttcaggcgctagytgttgatagcaggttgcctaacttttctaaatgttaagttacttcttgtgaattaagagaataaatattaactcccttgggtggtgtagaaattaaatgagataacatatgcagtatgcactcccacataatgagaaatgagtaaatgtgagccatgactagtagtaaatgggtacagtaatcttaagggtgtagtgatgtggaggcagcatcactgtctacttttttccaaagcagggcaaaacagtattcaaataaggttgctgattgagcagagttgcaa

SEQ ID NO: 306279 - DNA, 620 bp, Homo sapiens
cataaaaagaagatagatatcagctgaatttgaaaaaagtaataacacacataaagagggtattctgagcattacagacatggccaacattctaatcaaatactgttgttgaggaattgacaaatttctaaaatattttaatggtttctattaactatcaaattacctttaaggcatttgagatttactgatactcaagattctctgtaagctagtctgaaaaaatgaaaaccatccttgccaccctacaattcctgttttttaccttctacaccttatttctgatgttgtttcctcatattatcatttcaacataatcgtatctgaattttgtcaagttataaaccagtgtctgaatatgtaaaacactactactgctttttcattttgcttgttctggagcctcctagttttaagtagccagcaactagmcactgtcatttatctggatttaggacctatttatcactcctagaatatgcaaatatttacatctttgactgaatcactatttaatttacctaactcagaaagtgcacccacttatccaaagatcctggcttacacacatctgctgagcacttgcttatagataaccctgaggttgtcaaaggcaagag

SEQ ID NO: 306280 - DNA, 590 bp, Homo sapiens
tgaatgtcagtgaaaatgatggagtaggccgctccaattacctgttcttctacagaaacataaaaaaaaggaaaagaaattggcctggtgttgtggctcacgcttgtaatcccagcactttggtaggctgaggcgggtggatcacgaggtcaggagttcaagacaagcctggccaacatggtgaaaccctgtctctactaaaaatacaaaaattatctgggcatggtggcacgtgcctatagtcccagctactcaggaggctggggcaggagaatagcttgaacccaggaggcggagtctgaagtgagccaatactgtgccactgtactctagcctgsgcgacagagcaagattcagtctcaaaaagttaaaaaacaaaatagaaaaaaaaagaaaaaaattgagcattaactagtagaactaactttgtcaaaattctggaaaacagtcgaaggtttgtagcactcaattaaatactgaatcaaagcaatggtcattttaaaatggtaggaaagctccatgggatttttacttgcgcttgttgggctccctccccagatgacagatgaaacattaccctttgacaagca

SEQ ID NO: 306281 - DNA, 590 bp, Homo sapiens
tgaatgtcagtgaaaatgatggagtaggccgctccaattacctgttcttctacagaaacataaaaaaaaggaaaagaaattggcctggtgttgtggctcacgcttgtaatcccagcactttggtaggctgaggcgggtggatcacgaggtcaggagttcaagacaagcctggccaacatggtgaaaccctgtctctactaaaaatacaaaaattatctgggcatggtggcacgtgcctatagtcccagctactcaggaggctggggcaggagaatagcttgaacccaggaggcggagtctgaagtgagccaatactgtgccactgtactctagcctgcgcgacagagcaagattcagtctcaaaaagttaaaaaacaaaatagaaaaaaaaagaaaaaaattgagcattaactagtagaactaactttgtcaaaattctggaaaacagtcgaaggtttgtagcactcaaktaaatactgaatcaaagcaatggtcattttaaaatggtaggaaagctccatgggatttttacttgcgcttgttgggctccctccccagatgacagatgaaacattaccctttgacaagca

SEQ ID NO: 306282 - DNA, 653 bp, Homo sapiens
gatctcatgaggctaacatctcattacaggaagccaggcttatgtccctcactttctaaggcaaagtctggtacacaatttctgaagcagaagtaagcctggctcatttccaggattgagaaaaaggtcgattttatttgaacgtagtggtcaaggaaatacaactatctgttttggtgaaatattttatcaagcttgtttttcttaacactggaaaatcaatggaagatgaaatgccagtatcagaaaagttactagtgggcaaaagaagaacactacaaatttgcattttctctatatacaattcatatttcttttgatatggaagagaaaaaaataaagtttcatgctgtagttatgcctatccagatgcaacctaacagttaagctyagagaaatctttttgtgtctataatatgatagcctttataggaaaaagtgcataagaaaatacagcaaataatgaaaagagataacaacatggccattactagagtagtcaatatatatatatttctgaagaagaaaaaggatgagaaaaagttgatttctttggcctaggtttggacatggacaatattagaaacatcaagaaactatcccttttttaaatcaatttgaatttgctacagacttttatttagtacataaag

SEQ ID NO: 306283 - DNA, 653 bp, Homo sapiens
gatctcatgaggctaacatctcattacaggaagccaggcttatgtccctcactttctaaggcaaagtctggtacacaatttctgaagcagaagtaagcctggctcatttccaggattgagaaaaaggtcgattttatttgaacgtagtggtcaaggaaatacaactatctgttttggtgaaatattttatcaagcttgtttttcttaacactggaaaatcaatggaagatgaaatgccagtatcagaaaagttactagtgggcaaaagaagaacactacaaatttgcattttctctatatacaattcatatttcttttgatatggaagagaaaaaaataaagtttcatgctgtagttatgcctatccagatgcaacctaacagttaagcttagagaaatctttttgtgtctataatatgatagcctttayaggaaaaagtgcataagaaaatacagcaaataatgaaaagagataacaacatggccattactagagtagtcaatatatatatatttctgaagaagaaaaaggatgagaaaaagttgatttctttggcctaggtttggacatggacaatattagaaacatcaagaaactatcccttttttaaatcaatttgaatttgctacagacttttatttagtacataaag

SEQ ID NO: 306284 - DNA, 576 bp, Homo sapiens
tcaatgaaaatataaatttgagaaatttataaatatgttaaaattaaacaatgcagtttcagttttcaatatggaacgagtcaaacagaatcacaaycaaaattgaaaaataattggagaggaagacgaaaatacaacataccaaagaaattaagttaaagtggtactagagggacatttatagctttagacactataaatcaaatcaatgacaaaacttccagtgtaaaagtaattgaaaagaagaaaaaatctgaatcaatgttataacaaagattacagttaaaaaaaggaaaatagagaacaattataaaatttaaaaaaggtttattattttaaaagatcaatacaatttacaaaatttaactagaattacaagaataaaaagagtaggctcacattactaaaactcagaaagaaagaggatgcattgttattgaccttacaaaaaatatatataatgacatacacacacacacacacacacacacacacacacacacacaaatatatatatatcgatttttatgatgatgataaagacatacccaagactggaaagaaaaagaggtttaa

SEQ ID NO: 306285 - DNA, 558 bp, Homo sapiens
gctcacattactaaaactcagaaagaaagaggatgcattgttattgaccttacaaaaaatatatataatgacatacacacacacacacacacacacacacacacacacacacaaatatatatatatcgatttttatgatgatgataaagacatacccaagactggaaagaaaaagaggtttaatggaattacagttccacctggctggggaggcctcacaataatggcagaaggcaaggaggagcaagtcatgtcttgcatagatgaccgcaggcagagagagagtttgtacaagggaactgctctttttaaaaccaccagatcctgtgagacttactaacttttgtgtgaacagcatgagaaagacccacccccatgattcaattaccctgtsattcaactcccactggtccttcttacaacacatgagaattgaattgtgtgtaaaatgaaatttgggtggagacacagccaaagcgtatcattctgtccctcgcctctcccaaatctcatgtcctcacatttcaaaactaatcatgccttcccaacagtctccca

SEQ ID NO: 306286 - DNA, 413 bp, Homo sapiens
gatttggctggtcacggtggctcacgcctgtaatgccagcactttgggaggccgaggcaggcggatcacaaggtcaggagttcragatgaacctgaccaacataacaaaatcctgtctctactaaaaatacaaaaataagctgtgtgtggtggcacacacctgtaatcccagctacttgggaggccgaagcaggaaaatggcttgaacttgggaggtggaagttgcagtgagccaagatcgcgccactgcactccagcctgggtgacagagcaagactccatctcaaaaaaaaaaaaaaaagaaaagaaaaaaaaaagaattattagtattcaaaatgtagctgaggaagagcaaggaataaaaattgtattcaaagagtaataacagaaaatgttacaaaatttgaaaaaga

SEQ ID NO: 306287 - DNA, 568 bp, Homo sapiens
ctatctttcaaacatgaaggagagataaagtcttttccaaacgaaagctgaaggaattctttaccaccagacccatcttttaaaaaatgctgcagagttattcaatckgaaaaaaagcaaaaaaaaaaaaaaaaaattaaaaaaaaacctaatatgcaaatataaaccatttgaaggtctaaaacctagtggtaaaagtaaatactgaaaaaaacctcaaaatattctaacactataattatgtgtgtaacccactcataattttattacgaagactaaaaggcaaatctatcaaaatcaataatatcgacatcaatctgttaagagataggcaatataagattacatgaattgatgccaaaaaataggccaaaaggagcaggggttgggggtggagctgaaatgcaaaattaaattttttttttgtcgttgtttatttctagtttttctttatagtcaaagaaaagttgtcatttgtttaaataacttgttataccattaacatgtttttctaagtctcgcaataaccacaaagcaaaaacatatcataaatataccaaaaaaaagc

SEQ ID NO: 306288 - DNA, 568 bp, Homo sapiens
ctatctttcaaacatgaaggagagataaagtcttttccaaacgaaagctgaaggaattctttaccaccagacccatcttttaaaaaatgctgcagagttattcaatctgaaaaaaagcaaaaaaaaaaaaaaaaaattaaaaaaaaacctaatatgcaaatataaaccatttgaaggtctaaaacctagtggtaaaagtaaatactgaaaaaaacctcaaaatattctaacactataattatgtgtgtaacccactcataattttattaygaagactaaaaggcaaatctatcaaaatcaataatatcgacatcaatctgttaagagataggcaatataagattacatgaattgatgccaaaaaataggccaaaaggagcaggggttgggggtggagctgaaatgcaaaattaaattttttttttgtcgttgtttatttctagtttttctttatagtcaaagaaaagttgtcatttgtttaaataacttgttataccattaacatgtttttctaagtctcgcaataaccacaaagcaaaaacatatcataaatataccaaaaaaaagc

SEQ ID NO: 306289 - DNA, 430 bp, Homo sapiens
agtgcccatgtagcctgcagtaaaataaatgtactctgttaacttgtttatttttcttttcgtttgcttttttgtttttctgaaaggaaagtatgagacaagagtttgattgcaggtagtttatttgcgtgttgattcctgagaggaagaaggagggatcaaggaaactgaaaacagtaagaaaggaaggacaacataagaatatgtaatcagtgatatggacaaytatagctcagttctattgcagtgttctgaggaacacatggaatgctttctagaatttttcactcgaaaacaaaacaaaacaaaacagtgagaagcatttctccattagtttccataattttgaaatgggagattccctgaacccccccttgtaggacacgcaaggaggatgtggctctccattcagtcaccaggagctcaaacc

SEQ ID NO: 306290 - DNA, 430 bp, Homo sapiens
agtgcccatgtagcctgcagtaaaataaatgtactctgttaacttgtttatttttcttttcgtttgcttttttgtttttctgaaaggaaagtatgagacaagagtttgattgcaggtagtttatttgcgtgttgattcctgagaggaagaaggagggatcaaggaaactgaaaacagtaagaaaggaaggacaacataagaatatgtaatcagtgatatggacaattatagctcagttcyattgcagtgttctgaggaacacatggaatgctttctagaatttttcactcgaaaacaaaacaaaacaaaacagtgagaagcatttctccattagtttccataattttgaaatgggagattccctgaacccccccttgtaggacacgcaaggaggatgtggctctccattcagtcaccaggagctcaaacc

SEQ ID NO: 306291 - DNA, 430 bp, Homo sapiens
agtgcccatgtagcctgcagtaaaataaatgtactctgttaacttgtttatttttcttttcgtttgcttttttgtttttctgaaaggaaagtatgagacaagagtttgattgcaggtagtttatttgcgtgttgattcctgagaggaagaaggagggatcaaggaaactgaaaacagtaagaaaggaaggacaacataagaatatgtaatcagtgatatggacaattatagctcagttctattgcagtgttctgaggaacacatggaatgctttctagaatttttcactcgaaaacaaaacaaaacaaaacagtgagaagcatttctccattagtttccataattttgaaatgggagattccctgaacccccccttgtaggacaygcaaggaggatgtggctctccattcagtcaccaggagctcaaacc

SEQ ID NO: 306292 - DNA, 509 bp, Homo sapiens
tctacctctatggcaaagttctttgkaacatttttttatatatatagtgctctaaaatttctcaaggatgtactttaatttatagccacacatcaggtgtttcttttgctctgcattgcatcgtcttagctacacatggctgcagaagagaataccctgcaacttcttgcctatgttatcttctccagaagtggacatagaatgtttctgttttgttttgatttcttccttgggaaagtttacatacatgtaagttcaagagtcacaatacttttcttcagcaatattggaagctgaaaggccatgggacagtgtctttacaatttgaacaacaaaaacattccaaaatagaaatctacacacagccttgaattatatactcagcaaattaataattaagtgtttaatttaagtgattttctggtgcttggttctcaagaaatttactgccacataccacttgtcaagaagatacacaaggaagaacttcacataaaattaggaagcaa

SEQ ID NO: 306293 - DNA, 509 bp, Homo sapiens
tctacctctatggcaaagttctttggaacatttttttatatatatagtgctctaaaatttctcaaggatgtaytttaatttatagccacacatcaggtgtttcttttgctctgcattgcatcgtcttagctacacatggctgcagaagagaataccctgcaacttcttgcctatgttatcttctccagaagtggacatagaatgtttctgttttgttttgatttcttccttgggaaagtttacatacatgtaagttcaagagtcacaatacttttcttcagcaatattggaagctgaaaggccatgggacagtgtctttacaatttgaacaacaaaaacattccaaaatagaaatctacacacagccttgaattatatactcagcaaattaataattaagtgtttaatttaagtgattttctggtgcttggttctcaagaaatttactgccacataccacttgtcaagaagatacacaaggaagaacttcacataaaattaggaagcaa

SEQ ID NO: 306294 - DNA, 596 bp, Homo sapiens
atttcccacacccactttgtatagagcttaatacaccaatatgaaatatttaaaggaacctaaaattatttaaaaatatgtactataaatatataggccataaattttactgttgaaataataatatgtggagtttcccctttgtagataggtgattattactgataaaatatgggatttttatttcaattatatattctaaatgaatattttatgaaastttgcctaaagttactttaaactatttttgtctcaagtttaaatcatatccctttctcttagaaatcgtttctattctgatccttcaaaatattttcattcaaagagggaactcaagagtgtattcttctaaagtcctgcaagaaatttacaaagacatagagaaagtgctatccatcagcacaactggtctttatacaattctaatgcctttgcataggcatttgtagcccccaccaaaattgggtcattttgggacttcactaaagactctattccagggacacgacaatgattcagagaggttttgtctgtacttacttcacttataaaaacatatcggtaaaataattcatttataccacctagttgcaaag

SEQ ID NO: 306295 - DNA, 596 bp, Homo sapiens
atttcccacacccactttgtatagagcttaatacaccaatatgaaatatttaaaggaacctaaaattatttaaaaatatgtactataaatatataggccataaattttactgttgaaataataatatgtggagtttcccctttgtagataggtgattattactgataaaatatgggatttttatttcaattatatattctaaatgaatattttatgaaactttgcctaaagttactttaaactatttttgtctcaagtttaaatcatatccctttctcttagaaatcgtttctattctgatccttcaaaatattttcattcaaagagggaactcaagagtgtattcttctaaagtcctgcaagaaatttacaaagacatagagaaagtgctatccatcagcacaactggtctttatacaattctartgcctttgcataggcatttgtagcccccaccaaaattgggtcattttgggacttcactaaagactctattccagggacacgacaatgattcagagaggttttgtctgtacttacttcacttataaaaacatatcggtaaaataattcatttataccacctagttgcaaag

SEQ ID NO: 306296 - DNA, 596 bp, Homo sapiens
atttcccacacccactttgtatagagcttaatacaccaatatgaaatatttaaaggaacctaaaattatttaaaaatatgtactataaatatataggccataaattttactgttgaaataataatatgtggagtttcccctttgtagataggtgattattactgataaaatatgggatttttatttcaattatatattctaaatgaatattttatgaaactttgcctaaagttactttaaactatttttgtctcaagtttaaatcatatccctttctcttagaaatcgtttctattctgatccttcaaaatattttcattcaaagagggaactcaagagtgtattcttctaaagtcctgcaagaaatttacaaagacatagagaaagtgctatccatcagcacaactggtctttatacaattctaatgcctttgcataggcatttgtagcccccaccaaaattgggtcattttgggacttcactaaagactctattccagggacaygacaatgattcagagaggttttgtctgtacttacttcacttataaaaacatatcggtaaaataattcatttataccacctagttgcaaag

SEQ ID NO: 306297 - DNA, 303 bp, Homo sapiens
caaccaaaaatgtttgactattaaatcatctagaattaatcttcaatttagaagtaactaaagttagtttttttttaccagattctgaatatttttcctaaatattctaaagtgtttgtgggagtttggttaagtgagtcgaaatggtgatttacataaaaaattcttttttaatraacaattatattacagtttaaatactgtatgtgttactaaaaattttcacatgacactaaatttgcatactgaaaaaatggttggtgcaaaatttcaggtgatgcagagcaatctgattaaagctgc

SEQ ID NO: 306298 - DNA, 452 bp, Homo sapiens
ggatacaaatgcgatggtatttccattatatcagacatattcctgctgttgtgtrtaacagaagtttattcatttttgtctgcagtatcctccattatataaatgcacaacagtttgttaatccgataacatattgatagacattaaattgttttcatttttacagtaattaatcaatctactaataatattattgtaaaagtttttgtggtaatttatatatatatattcccttaggattaatattttacatatatatttatatatatatatcccctataaatacatagatgtgaaatttctgtgtcattattgacactttatatacttcataattcatagatttgtgttgtttatggtatctttgcaccaaatataagctacataaaaataggaaactttttgtgttttggctcagtgtatctaatgtgattttaaaaaagtatctagca

SEQ ID NO: 306299 - DNA, 452 bp, Homo sapiens
ggatacaaatgcgatggtatttccattatatcagacatattcctgctgttgtgtgtaacagaagtttattcatttttgtctgcagtatcctccattatataaatgcacaacagtttgttaatcygataacatattgatagacattaaattgttttcatttttacagtaattaatcaatctactaataatattattgtaaaagtttttgtggtaatttatatatatatattcccttaggattaatattttacatatatatttatatatatatatcccctataaatacatagatgtgaaatttctgtgtcattattgacactttatatacttcataattcatagatttgtgttgtttatggtatctttgcaccaaatataagctacataaaaataggaaactttttgtgttttggctcagtgtatctaatgtgattttaaaaaagtatctagca

SEQ ID NO: 306300 - DNA, 452 bp, Homo sapiens
ggatacaaatgcgatggtatttccattatatcagacatattcctgctgttgtgtgtaacagaagtttattcatttttgtctgcagtatcctccattatataaatgcacaacagtttgttaatccgataacatattgatagacattaaattgttttcatttttrcagtaattaatcaatctactaataatattattgtaaaagtttttgtggtaatttatatatatatattcccttaggattaatattttacatatatatttatatatatatatcccctataaatacatagatgtgaaatttctgtgtcattattgacactttatatacttcataattcatagatttgtgttgtttatggtatctttgcaccaaatataagctacataaaaataggaaactttttgtgttttggctcagtgtatctaatgtgattttaaaaaagtatctagca

SEQ ID NO: 306301 - DNA, 668 bp, Homo sapiens
catgctaaacatttttttctcgtttttggccatgtgtatgcattcttttaagaagtgtttgtacatgttctctgctgtctttttaatggcattgtttattttgtttctcgtttattgatttgagttccttatgaattccraatattaaacatttgtcagatacatagctttcaaatattttctaccattctgtaatggtaagtgatgcaatatgtaagttatctgttttctgtttactctgtgggtagtttcttttgctgtgcagaagttctttagtttaattaggtttctcttctcaatgtttgtttctgttgcagttgtgtttggagtctacatcatgaaatctttgccagggcctatgtacacaacggtttttcctacattttcttctagagttgttatagttttagattttacatttatatctttcatccatcttgagttgattttgtatacggtgaaaggaaggttttcagtttcaaccttctgcacatggcttgccagttgtctcagcactacttattcaatagggatttttttttctcattgcttgttattgttgactttgtgaaagatcagtttgctatagatatgcatctttatttctgggttctctaagctgttccatctgtctatgtgtctggttttatgtcagtattatgctgttt

SEQ ID NO: 306302 - DNA, 668 bp, Homo sapiens
catgctaaacatttttttctcgtttttggccatgtgtatgcattcttttaagaagtgtttgtacatgttctctgctgtctttttaatggcattgtttattttgtttctcgtttattgatttgagttccttatgaattccgaatattaaacatttgtcagatacatagctttcaaatattttctaccattctgtaatggtaagtgatgcaatatgtaagttatctgttttctgtttactctgtgggtagtttcttttgctgtgcagaagttctttagtttaattaggtttctcttctcaatgtttgtttctgttgcagttgtgtttggagtctacatcatgaaatctttgccagggcctatgtacacaayggtttttcctacattttcttctagagttgttatagttttagattttacatttatatctttcatccatcttgagttgattttgtatacggtgaaaggaaggttttcagtttcaaccttctgcacatggcttgccagttgtctcagcactacttattcaatagggatttttttttctcattgcttgttattgttgactttgtgaaagatcagtttgctatagatatgcatctttatttctgggttctctaagctgttccatctgtctatgtgtctggttttatgtcagtattatgctgttt

SEQ ID NO: 306303 - DNA, 668 bp, Homo sapiens
catgctaaacatttttttctcgtttttggccatgtgtatgcattcttttaagaagtgtttgtacatgttctctgctgtctttttaatggcattgtttattttgtttctcgtttattgatttgagttccttatgaattccgaatattaaacatttgtcagatacatagctttcaaatattttctaccattctgtaatggtaagtgatgcaatatgtaagttatctgttttctgtttactctgtgggtagtttcttttgctgtgcagaagttctttagtttaattaggtttctcttctcaatgtttgtttctgttgcagttgtgtttggagtctacatcatgaaatctttgccagggcctatgtacacaacggtttttcctacattttcttctagagttgttatagttttagattttacatttatatctttcatccatcttgagttgattttgtatacggtgaaaggaaggttttcagtttcaaccttctgcacatggcttgccagttgtctcagcactacttattsaatagggatttttttttctcattgcttgttattgttgactttgtgaaagatcagtttgctatagatatgcatctttatttctgggttctctaagctgttccatctgtctatgtgtctggttttatgtcagtattatgctgttt

SEQ ID NO: 306304 - DNA, 535 bp, Homo sapiens
cactgacacatcattatctctcaaaatccttagtttacattaaggttcactcatggtgttgtacattctgcaggtttcaacaaatgtgtaatgacatatatctacaattatagtatcatgcagaatagtttcactgccctaaaattattctgtgctcctcttattcactccttctttcctccaacccctgtcaacaacttatctttttactgtctccatagttttgtctttcccagcatttcatatrtttggaatcatatagtattaagccttttaatattggcttctttcactcggtaacatgcatttaagtttcctgcatatctttttatgatccagtagctaatttatttttagtgctgaataatattctattgtccaaatataccatagtttcttaacctgtccatcttctgaatggcatattgattgcttccaagttttggaaatcatgaacagagttgctggaaacatctattttatataaacttgtcaactcatttgagtaaatacaaagtagcatgactgctggttc

SEQ ID NO: 306305 - DNA, 535 bp, Homo sapiens
cactgacacatcattatctctcaaaatccttagtttacattaaggttcactcatggtgttgtacattctgcaggtttcaacaaatgtgtaatgacatatatctacaattatagtatcatgcagaatagtttcactgccctaaaattattctgtgctcctcttattcactccttctttcctccaacccctgtcaacaacttatctttttactgtctccatagttttgtctttcccagcatttcatatgtttggaatcatatagtattaagccttttaatattggcttctttcactcgrtaacatgcatttaagtttcctgcatatctttttatgatccagtagctaatttatttttagtgctgaataatattctattgtccaaatataccatagtttcttaacctgtccatcttctgaatggcatattgattgcttccaagttttggaaatcatgaacagagttgctggaaacatctattttatataaacttgtcaactcatttgagtaaatacaaagtagcatgactgctggttc

SEQ ID NO: 306306 - DNA, 609 bp, Homo sapiens
tgctctttaaaaagacaaaaaattctcttttcatgagtgactcaatttcaaaaatktgatattcgttgtaaaattccccattaaaaaaggaaaaagaagcccttatatcattgtaattattgtctgtttgggacaatcactagaacaaataacaccatagaactctagtggcatttaactggataaagatttattgactccctaccaagtgccaggcattgtgccaattgctggaaaaaatgtgacttttcattaaaaaatattacgtggtaatataaacacataaacagatgaattaaagcagagcacttcctctgataatcataaatgctgaaaattagaaaaaaaggagtggccatttatattggaaagttgaagagcaactttttagagaagataatcactaagttctgtctttaatgacaaatgggaatcagctaggccaagaaagagagatgactatattcaaatatacttgccaagggaaagataaataaaaaaaaatcctatgttaggaaaagcaaaaattccccatgaactcagggttaagtttaagtgggaataatgataaatcacggacctccataaatataaccatataaaaggtag

SEQ ID NO: 306307 - DNA, 609 bp, Homo sapiens
tgctctttaaaaagacaaaaaattctcttttcatgagtgactcaatttcaaaaatttgatattcgttgtaaaattccccattaaaaaaggaaaaagaagcccttatatcattgtaattattgtctgtttgggacaatcactagaacaaataacaccatagaactctagtggcatttaactggataaagatttattgactccctaccaagtgccaggcattgygccaattgctggaaaaaatgtgacttttcattaaaaaatattacgtggtaatataaacacataaacagatgaattaaagcagagcacttcctctgataatcataaatgctgaaaattagaaaaaaaggagtggccatttatattggaaagttgaagagcaactttttagagaagataatcactaagttctgtctttaatgacaaatgggaatcagctaggccaagaaagagagatgactatattcaaatatacttgccaagggaaagataaataaaaaaaaatcctatgttaggaaaagcaaaaattccccatgaactcagggttaagtttaagtgggaataatgataaatcacggacctccataaatataaccatataaaaggtag

SEQ ID NO: 306308 - DNA, 609 bp, Homo sapiens
tgctctttaaaaagacaaaaaattctcttttcatgagtgactcaatttcaaaaatttgatattcgttgtaaaattccccattaaaaaaggaaaaagaagcccttatatcattgtaattattgtctgtttgggacaatcactagaacaaataacaccatagaactctagtggcatttaactggataaagatttattgactccctaccaagtgccaggcattgtgccaattgctggaaaaaatgtgacttttcattaaaaaatattacgtggtaatrtaaacacataaacagatgaattaaagcagagcacttcctctgataatcataaatgctgaaaattagaaaaaaaggagtggccatttatattggaaagttgaagagcaactttttagagaagataatcactaagttctgtctttaatgacaaatgggaatcagctaggccaagaaagagagatgactatattcaaatatacttgccaagggaaagataaataaaaaaaaatcctatgttaggaaaagcaaaaattccccatgaactcagggttaagtttaagtgggaataatgataaatcacggacctccataaatataaccatataaaaggtag

SEQ ID NO: 306309 - DNA, 609 bp, Homo sapiens
tgctctttaaaaagacaaaaaattctcttttcatgagtgactcaatttcaaaaatttgatattcgttgtaaaattccccattaaaaaaggaaaaagaagcccttatatcattgtaattattgtctgtttgggacaatcactagaacaaataacaccatagaactctagtggcatttaactggataaagatttattgactccctaccaagtgccaggcattgtgccaattgctggaaaaaatgtgacttttcattaaaaaatattacgtggtaatataaacacataaacagatgaattaaagcagagcacttcctctgataatcataaatgctgaaaattagaaaaaaaggagtggccatttatattggaaagttgaagagcaactttttagagaagataatcactaagttctgtctttaatgacaaatgggaatcagctaggccaagaaagagagatgactatattcaaatatrcttgccaagggaaagataaataaaaaaaaatcctatgttaggaaaagcaaaaattccccatgaactcagggttaagtttaagtgggaataatgataaatcacggacctccataaatataaccatataaaaggtag

SEQ ID NO: 306310 - DNA, 195 bp, Homo sapiens
ttagctatgataatctacttatgccaataattttgttgtggaatagttttagtgatatagtacttacaakgatgcttttaaaatgtctttccacaaatgaagccagagggcagtctgtaacaaatagatgttaagaagaaaataaggcaaatgagggattatgataagaactcattattttattaggaaaaacag

SEQ ID NO: 306311 - DNA, 195 bp, Homo sapiens
ttagctatgataatctacttatgccaataattttgttgtggaatagttttagtgatatagtacttacaaggatgcttttaaaatgtctttccacaaawgaagccagagggcagtctgtaacaaatagatgttaagaagaaaataaggcaaatgagggattatgataagaactcattattttattaggaaaaacag

SEQ ID NO: 306312 - DNA, 195 bp, Homo sapiens
ttagctatgataatctacttatgccaataattttgttgtggaatagttttagtgatatagtacttacaaggatgcttttaaaatgtctttccacaaatgaarccagagggcagtctgtaacaaatagatgttaagaagaaaataaggcaaatgagggattatgataagaactcattattttattaggaaaaacag

SEQ ID NO: 306313 - DNA, 520 bp, Homo sapiens
tcctcaaaatcagtcctcatactttagggtctgctttccactttagtgttgtggaatttcaatgttcaatttctattcagccatattcacttgttcatgatttataaggttcagacattagccatcatcaccttctgccagaagttcaataatatgttttcattggcctctctatctctgtttttaytcccttgaaatcccaatcctatcctcactatgttggtttcagttctttggaaaaacagcaacaacaaaacatcaaaaaatgtaaatcaattctcacatttttctgctgaactccagtggtttaccacatatggctgaaaaacttcaaactccgtattttcattcctggctctacttgtccaacttttactgattttcatttcggctctagccttcctgacccacttgcctttctcctctccacaacttctgcagagatgaattcccattaccaccaaataacaactttctttccagctacaacctataccagatggcagaaaatgtgaaagac

SEQ ID NO: 306314 - DNA, 520 bp, Homo sapiens
tcctcaaaatcagtcctcatactttagggtctgctttccactttagtgttgtggaatttcaatgttcaatttctattcagccatattcacttgttcatgatttataaggttcagacattagccatcatcaccttctgccagaagttcaataatatgttttcattggcctctctatctctgtttttactcccttgaaatcccaatcctatcctcactatgttggtttcagttctttggaaaaacagcaacaacaaaacatcaaaaaatgtaaatcaattctcacatttttctgctgaactccagtggtttaccacatatggctgaaaaacttcaaactccrtattttcattcctggctctacttgtccaacttttactgattttcatttcggctctagccttcctgacccacttgcctttctcctctccacaacttctgcagagatgaattcccattaccaccaaataacaactttctttccagctacaacctataccagatggcagaaaatgtgaaagac

SEQ ID NO: 306315 - DNA, 520 bp, Homo sapiens
tcctcaaaatcagtcctcatactttagggtctgctttccactttagtgttgtggaatttcaatgttcaatttctattcagccatattcacttgttcatgatttataaggttcagacattagccatcatcaccttctgccagaagttcaataatatgttttcattggcctctctatctctgtttttactcccttgaaatcccaatcctatcctcactatgttggtttcagttctttggaaaaacagcaacaacaaaacatcaaaaaatgtaaatcaattctcacatttttctgctgaactccagtggtttaccacatatggctgaaaaacttcaaactccgtattttcattcctggctctacttgtccaacttttactgattttcatttcggctctagccttcctgacccacttgcctttctcctctccacaacttytgcagagatgaattcccattaccaccaaataacaactttctttccagctacaacctataccagatggcagaaaatgtgaaagac

SEQ ID NO: 306316 - DNA, 584 bp, Homo sapiens
cactattacaattttatttttgcttatctggtttttgttttgttttgtttcttttctttttgcgaaaagtctaagtaactggagttacctaacttttattttcccttttcatttcagaaagtagcaaatatctggcatatgattgttattgttcatgttgtagaaagagtgtattgtccttgatcatataatcctgtattttttttccaaaagggctstaattttaaatgttgaaagcaataagcctctttatttacttatttatttacaaagtaaacccaaggaatttgtcttatttttaagaataaaaaataatttcatttgtaaaattttccccaaagtgtttcttacatagaattctatcatgttccagtgtaaaccacacttgaatcaatttccataagaaagcattatatgagtttacaagtatcagggacatctcaaccaaagggtaatgatagacggaagtgcacaaaatgacactaatgtgtgcagccaaatggtacaggattaggtgttacacctagttttttaacattctcactaacaaacacttagctgtggtaaacaacaaattaatttac

SEQ ID NO: 306317 - DNA, 608 bp, Homo sapiens
acttttgtgggggaataggatgactttctaagaaaaaagtgaacttacaacttttattactttatccaaggcagaaaaatttgagtctatgaaaagactcaaatgtattctttcaatatttgagacactgttgttaagaattattttataaaaacacaaagatgaacgaggccaggcatggtggctcacgcctctgatcccagcactttgggaggccgaggtgggtagatcacctaagttcagacgtttgagaccaacctagccaacatggtgaaacctcatctctactaaaaataccaaattagccaggcatggtggcgggcccctgtaatcccagctacttgggaggctgaagcaggggaatcgcttgaacccaggaggcggaggttgcagtgagccragatggcaccattgcactctagcctgccgacaagcgtgagactccatctcaaaaaaaaaaaaaaaaggaatgaacttaatttctcacctaaagtgctgttaaccaaggatttgtacatattatacaaaataaatggccataagggacacaaagaccttcgcctattgtggaatgaatactattgtttactagatatttacatttttct

SEQ ID NO: 306318 - DNA, 620 bp, Homo sapiens
tcattacagttcatggctgttcttaaaaatctcatrgtacgctttggaggggaaacctgcatgtggcgcgcacccctaaggccagagacatctggagctctaagattggaccccaaaggaagacactctgtgggttctgcaaacctcaaactctccaaagagtatgctcttggcagaggttctgaggtctagtattaaaacctccttagaattttttctcgcagttgcaatgctgcttggccccaaaattgtttggaatctgaagttgactgtctaattggaaagtggggtgatgttgcatgtatacaggcttttgtgctgctcttccaagcagtgggcctggttaacgtttggcacccttctttggtactgtttggccctagtgctccttggagtctggggaggtttagcctttaaaaatcaaactgctttacctggaattttgtttcacagccttccttggattatctattggggcaaagtaaaactggcaagcttgtattgctgtctcaggctaaggttccaagctactggatcttcatttatgtgtgtgtgtgtgtacgtgtctagatgtgtttacttgtatgtacactaaattgttatatgccatgtctaccaaa

SEQ ID NO: 306319 - DNA, 620 bp, Homo sapiens
tcattacagttcatggctgttcttaaaaatctcatggtacgctttggaggggaaacctgcatgtggcgygcacccctaaggccagagacatctggagctctaagattggaccccaaaggaagacactctgtgggttctgcaaacctcaaactctccaaagagtatgctcttggcagaggttctgaggtctagtattaaaacctccttagaattttttctcgcagttgcaatgctgcttggccccaaaattgtttggaatctgaagttgactgtctaattggaaagtggggtgatgttgcatgtatacaggcttttgtgctgctcttccaagcagtgggcctggttaacgtttggcacccttctttggtactgtttggccctagtgctccttggagtctggggaggtttagcctttaaaaatcaaactgctttacctggaattttgtttcacagccttccttggattatctattggggcaaagtaaaactggcaagcttgtattgctgtctcaggctaaggttccaagctactggatcttcatttatgtgtgtgtgtgtgtacgtgtctagatgtgtttacttgtatgtacactaaattgttatatgccatgtctaccaaa

SEQ ID NO: 306320 - DNA, 491 bp, Homo sapiens
gaggtgttcaccaaaagcagatgctaatgccgtgcttcttgtacagtctacaaaactgtaagcaaacaaacctcttttctctataaattacccagcatcaggtattcctgtacagcaacacaaaacagacaaakacattatctttctactcatttatctttgcagctggatacctaatatgtgctatgtatgtatgcatgtgtaaatgtatcctctctctctccttctgtcccccatatgtgtgtgcgtgttatgtgtttgtgtgtgtgtatatatataatatattgtgtaccaggcaccattttaagcaccctccaaataataattttccaaatatgtaggttaaaatctatattaactttattgtaataatttctgaaattgtaattaagaaaataacaatagaaaaatgaaatataaaataattgtaatgtcatgctggtgctttcacttataatttacacatcacttttaatgattactgtgagtca

SEQ ID NO: 306321 - DNA, 491 bp, Homo sapiens
gaggtgttcaccaaaagcagatgctaatgccgtgcttcttgtacagtctacaaaactgtaagcaaacaaacctcttttctctataaattacccagcatcaggtattcctgtacagcaacacaaaacagacaaagacattatctttctactcatttatctttgcagctggatacctaatatgtgctatgtatgtatgcatgtgtaaatgtatcctctctctctccttctgtcccccatatgtgtgtgcrtgttatgtgtttgtgtgtgtgtatatatataatatattgtgtaccaggcaccattttaagcaccctccaaataataattttccaaatatgtaggttaaaatctatattaactttattgtaataatttctgaaattgtaattaagaaaataacaatagaaaaatgaaatataaaataattgtaatgtcatgctggtgctttcacttataatttacacatcacttttaatgattactgtgagtca

SEQ ID NO: 306322 - DNA, 584 bp, Homo sapiens
aatcattatataatatatacactaaaaagtattatttgagccattctctctacaatgttgcatagtattaccatctacgttgtcctcaaatataaaattctggaaaagattatacaatcttcttcccatgagcttctttactaatgatagtgattatttatgtactttcttcatgtttcattaaaaaatatattggaaagtatgcataccaattcacaataaggcagttgacttctagtctttatatggagtgtaattttggcccacattacatgtggaacataaatttagaaataaatgcaaatatagatatgtatagatatgtactatgcaggtagatacatagttagaaacatcatcattttgttgttgttgttgtttagagactgggtctctctctgtcatccagggtggagtgcagtggtacaatcataactcactgcagcctcaaattactggcctcaagcgatccttacacctcagcctcataaatagctgggattacaggcatgagccaccatgcctggctatcatcagaatttttattttartgcaggatttttatactgaaaagcaaacagatg

SEQ ID NO: 306323 - DNA, 434 bp, Homo sapiens
  misc_feature (1)...(434): n = A,T,C or G
tcccttgtcagaagggtagtttgcaaatattttctccattctgtgggttgtctcttcacttgttgattgtttcctttgctgtgcagaagctttttaacttcatgtgataccatttgtccattttagtattgctcaagaaatttttgcccagaccaatgtcttaagagatttcccccaatgtttcttgtagtagctcatagcctgaggtcttagatttaagtctttaattgattgtggtttattttttgtatatggcaagatataggagtctagtttcattcttttgcgtatgaatatccagtttcccagcaccatttattgaagagactgtcttttccccaatgtatgtccttgtcraaaatgagttcactgtaggtgtgtagatatgtttctgggttctctattctgttccatttannnnnnnnnnnnnnnnn

SEQ ID NO: 306324 - DNA, 432 bp, Homo sapiens
aacctctaagagctatgctgtcagtcaacagtcaactgacagcaaggaaacagggaattgaactttacaatggcaaggagctgaatttggcccacaactgattgaacttgaagtatattcatcctcagagactccaaaaagaaaacyttaattttggccttgtgggatattaagcaaatggacccaactgaaccatgctgaaccagaacttgggacatactgaactgtgagattaaaatgtattgcttggtgccactaaatttatggcacttggttaaaacagtaatataaaacaaacagccacaaatgtcaaaagtgactcaagaatagataatttgagaagaactaccttgactaaataaatttaattcacagtataaaaccttttcacaatcaaaatgccatcttgagatagcaatactggtagatttt

SEQ ID NO: 306325 - DNA, 638 bp, Homo sapiens
ataatgtcaatgtgaagctttttaagaaaggaagagggataccataatcattttatgagaccattattaccctgtactaaactaaaccagaatgaaattgattatagttttaaaattcattatataatatcttgcctgatcattgatgtgaacatctttaacaaaacattaacatattgattcaaatgatacctaaaagtgtaatcattatcaaaattttttacttagaaatacaagactaatattaacatctaacaataaaccaatgcattttatgatattaaaagaataaagaacaaaacctttattatcttttcaatagactctaaagtcatttaataaaattcagcacctaataaaattcatatattcatgagtttaaaaatcagtgtactagaaaaagaaaagaactttcacaacttgatataaactgtaaactaaaaacctatagctaatattgtacctaagatcagaaaaaggacaamagttgtccactcttgctatttctattcaacattgtaccagatattttttattttaacttttattttagctttcagggtacatgtggatgtttgttacataggtaagctagtgtcaagggggtttgctgtgcagattatttcaggtattaagcc

SEQ ID NO: 306326 - DNA, 638 bp, Homo sapiens
ataatgtcaatgtgaagctttttaagaaaggaagagggataccataatcattttatgagaccattattaccctgtactaaactaaaccagaatgaaattgattatagttttaaaattcattatataatatcttgcctgatcattgatgtgaacatctttaacaaaacattaacatattgattcaaatgatacctaaaagtgtaatcattatcaaaattttttacttagaaatacaagactaatattaacatctaacaataaaccaatgcattttatgatattaaaagaataaagaacaaaacctttattatcttttcaatagactctaaagtcatttaataaaattcagcacctaataaaattcatatattcatgagtttaaaaatcagtgtactagaaaaagaaaagaactttcacaacttgatataaactgtaaactaaaaacctatagctaatattgtacctaagatcagaaaaaggacaaaagttgtccactcttgctatttctattcracattgtaccagatattttttattttaacttttattttagctttcagggtacatgtggatgtttgttacataggtaagctagtgtcaagggggtttgctgtgcagattatttcaggtattaagcc

SEQ ID NO: 306327 - DNA, 607 bp, Homo sapiens
atttgagatctttctaactttttgatgtgggcatttagtgccattaattttccttttaacactgccttatctatgtcccagagattctggtatgctatctctttgttctcattagtttcaaagaactttttgatttctgccttaatttcattatttaccccaaagtcatttaggagcatgttgtttaatttccatgtaattgcacagttttgagtgattttcttagtcttgatttctatttttggtttgtgagtgtgtttggtatatttcagttcttttgcctttgctgaggattgttttatgtctaattatgtggtcagttttagaatatatgtcatgtggcaataagaagaatgtatatcctgttgttttgagctggagagttctgtagaggtctatcagatccacttggtccaatatggagttcaggtcctgaatatctttgttaatattttgcctcgataatctgtctaaaactgtcaatggagtgttgaagyctcccattattactgtgtaagagcctatgtctgttcgtagatctctaagaacctgctttaaaaatttataaatttgggtgctcctgtgttgaatgcatacatatttagaa

SEQ ID NO: 306328 - DNA, 611 bp, Homo sapiens
tttattggaagctagcttcttgtctctggttttagagtggggtatggtagtgaggtatatttggtgttgagactttgggctataatccagtaggtggcacttaggctcattggtgagttggtagactttctctgttttgtagctcccctatgtttccttacagttacagccatgatgcttctcaatgatctgaaattgtgagttcctctcccttttaagtgctgtctgtagatggcagcttggggctcctaggctacctactgcagttatgckgtgatctcattgtttatgtcccttccccagcttggaggcagtagaggaagggattgtatcagaggttgtggccaagggtgtttgcttgtctcctggggaatccaacccagagagatgcaggttagcaaactctcagtgcaatcagcccaggagagagggtctgtcctgtgggcccaagacagggtttcccctagggtaggtaagacatgtaagagacagactgacctcctttccttggatcaactgcagtttgttggaggtatggataaggcacttaagttcttttccccttcattagtcttaaggtagcaagggcagttccactgcagaggcagtga

SEQ ID NO: 306329 - DNA, 611 bp, Homo sapiens
tttattggaagctagcttcttgtctctggttttagagtggggtatggtagtgaggtatatttggtgttgagactttgggctataatccagtaggtggcacttaggctcattggtgagttggtagactttctctgttttgtagctcccctatgtttccttacagttacagccatgatgcttctcaatgatctgaaattgtgagttcctctcccttttaagtgctgtctgtagatggcagcttggggctcctaggctacctactgcagttatgctgtgatctcattgtttatgtcccttccccagcttggaggcagtagaggaagggattgtatcagaggttgtggccaagggtgtttgcttgtctcctggggaatccaacccagagagatgcaggttagcaaactctcagtgcaatcagcccaggagagagggtctgtcctgtgggcccaagacagggtttcccctagggtaggtaagacatgtaagagacagactgacctcctttccttggatcaactgcagtttgttggaggtrtggataaggcacttaagttcttttccccttcattagtcttaaggtagcaagggcagttccactgcagaggcagtga

SEQ ID NO: 306330 - DNA, 529 bp, Homo sapiens
ctcagtgcaatcagcccaggagagagggtctgtcctgtgggcccaagacagggtttcccctagggtaggtaagacatgtaagagacagactgacctcctttccttggatcaactgcagtttgttggaggtatggataaggcacttaagttcttttccccttcattagtcttmaggtagcaagggcagttccactgcagaggcagtgacagagaggctctcagttgcacctagatgctctgtctagagtattgctactggcttgatagctatggttggctggaggcacaggcctggaggacctgtttgttgaggagatatgagaatgagcacctgcataactgtctgaccagttttttggtaggcctgctgctacatgctggggacccgttccagtctctagtcactttggattttccagcacctggaggtatcatcagtaaaggctgtggaacagcaaaaatggcaacccgctctgggagctccatcccaggcagtacagatctgttgctggccctaacacacctgtaa

SEQ ID NO: 306331 - DNA, 485 bp, Homo sapiens
ggacagtcttccaggacaggagattaacactgagaaggccatgccagggtccagaaggaagtcaatttcatggccctcaatggttaaaagtacccagggctcagtgagggtgttgacttgagctggcgcttgccctgggcaccctcaatcctgttgttggatcatctggtggggggcttctgacccagagaacctttgtcctctggggcagtgcaccttccagtgattgcgtcggcatagtggacatggatgagggggcagcttgtttcttatcgaacaatcttttttgaagtgtcctggtraaccacactgataacaagccctactgggtgattggcctgctccattttctgtcctctctgaaccaccaaggtttgtttgtctgagggccataactaaggctgtggtctttctctggtctcgcttttccttttgagcctattcctcttggtctctattatagaacaccaagattgccaggttta

SEQ ID NO: 306332 - DNA, 626 bp, Homo sapiens
gcccaattgtaaatccaactaaagatttctgaacactgctgctgggacctctggtcaattatattttctgtagttggagtctcctggctctcctactgatggtgttaccatttcatttacctaaagaaatttctctagaagactgtaaacccaaccaatttgaattgcctgttctctaatattgatgcatactttttgacctggaatcttttttatcataaccctggggattcactatacctaatatctgagttgtagtctcagttttctgtattctgtgtcttagtatgtattgaaatattcacttaatttgatagagcacaacttcaagaagctttataacaaaggtttatggaaatacatttttgacatcttgtagatgttaaaatgtctttttctcgcactttrtaaatatctggttgtttataacattttctgtgattttaattgcatttactttttggttaaatttttaattgagtaaaacagttaaatatacaaattctaaatttaaaatttaataaatttcaccaatgtaaatgttttcataaactcaaccaagattcagaatattttagtcagtctaggacatcctctatatcccacttctagtcaatgtccactcc

SEQ ID NO: 306333 - DNA, 582 bp, Homo sapiens
tgcaacacctccttctgtagattttatcaattccattctgcgatcaaaatgaataatgaaaattgtatatacttggcccatattagtttacttggaggtatcttcattattatctatgactgtgaatatcatttatatttggtttttgacatttctctaaggttttaagaattaatagaactgtaaaattcattgtcwcattgttgaggacactttattttatcatctttcttataaatatttacaactgataaacttgtgcaatttagtactgaaaagtttttgtttctctgaagactttctgaagaacactagataattgatcatgtttacctcacttgttattttcttgccttctggaagtttagagacaaatgcaaacttcagtctcattaggttgacaattatactttgaatgcttatgtgactttcttcatttcttcattttcgggtcatctaaatatctatattgtttttacagtgtattttcaacaaggttttgaaatttagttaaacatacttacgctttcaaatgttctgtatgaaattcattacaaataatctgtttgttatgggaaatta

SEQ ID NO: 306334 - DNA, 582 bp, Homo sapiens
tgcaacacctccttctgtagattttatcaattccattctgcgatcaaaatgaataatgaaaattgtatatacttggcccatattagtttacttggaggtatcttcattattatctatgactgtgaatatcatttatatttggtttttgacatttctctaaggttttaagaattaatagaactgtaaaattcattgtctcattgttgaggacactttattttatcatctttcttataaatatttacaactgataaacttgtgcaatttagtactgaaaagtttttgtttctctgaagactttctgaagaacactagataattgatcatgtttacctcacttgttattttcttgccttctggaagtttagagacaaatgcaaacttcagtctcattaggttgacaattatactttgaatgcttatgtgastttcttcatttcttcattttcgggtcatctaaatatctatattgtttttacagtgtattttcaacaaggttttgaaatttagttaaacatacttacgctttcaaatgttctgtatgaaattcattacaaataatctgtttgttatgggaaatta

SEQ ID NO: 306335 - DNA, 454 bp, Homo sapiens
atctatgtatttaaagtcttagcacaagctattctattttggtttggtttgatttgttgggtcctagtgcatgagcctagtccaaaacaatggcctcacagaattttatttaaaaaattccccctttttggtcaggtcctcacttaggtgagagtgtgaccaaaacttaaggccttagcrcagctatcagttaccaccattttggggttccagtctcagcacctcatttatactttacggtgtcctcatggttgcatatttctttcagctcctgaaagagctgaaatatacagagcaccagggagactattaatataactattgggatgataataccaagagttcagagtatgctccttaccgaaggtctccataaaccaaacttcctaaaatcaaatagattaaagaatgagctagataaagagtttattcatttgactaagcaatttcttca

SEQ ID NO: 306336 - DNA, 454 bp, Homo sapiens
atctatgtatttaaagtcttagcacaagctattctattttggtttggtttgatttgttgggtcctagtgcatgagcctagtccaaaacaatggcctcacagaattttatttaaaaaattccccctttttggtcaggtcctcacttaggtgagagtgtgaccaaaacttaaggccttagcacmgctatcagttaccaccattttggggttccagtctcagcacctcatttatactttacggtgtcctcatggttgcatatttctttcagctcctgaaagagctgaaatatacagagcaccagggagactattaatataactattgggatgataataccaagagttcagagtatgctccttaccgaaggtctccataaaccaaacttcctaaaatcaaatagattaaagaatgagctagataaagagtttattcatttgactaagcaatttcttca

SEQ ID NO: 306337 - DNA, 425 bp, Homo sapiens
tattctattttggtttggtttgatttgttgggtcctagtgcatgagcctagtccaaaacaatggcctcacagaattttatttaaaaaattccccctttttggtcaggtcctcacttaggtgagagtgtgaccaaaacttaaggccttagcacagctatcagtwaccaccattttggggttccagtctcagcacctcatttatactttacggtgtcctcatggttgcatatttctttcagctcctgaaagagctgaaatatacagagcaccagggagactattaatataactattgggatgataataccaagagttcagagtatgctccttaccgaaggtctccataaaccaaacttcctaaaatcaaatagattaaagaatgagctagataaagagtttattcatttgactaagcaatttcttca

SEQ ID NO: 306338 - DNA, 608 bp, Homo sapiens
tttaagaaaaggaaaattaagatacagatgtacagggcaggaaaccatgtaaagtttaagttagagattatagttatgcagatacaagtcaaggaacatcaagaattgccagcaaccaccagaagctaaaagacaaaaggaagtgtccttatctagagagttctgagagtgaccctgccaacaccttgacttctagcctccagaaatgtgagataagaaatttttgttattataagccatgcagtctgtggtaattggttatggtagtcatagaaaaaatatataaacaaaaacttttaaaaagttataaattataaatgataaaaaaacagagggcagaaaaagagaagaaaacagagyaaatgtaaaaaagagcaaacagcaagatggtagattttaattcaacaatattagtaatcgctttaaatgggattgctctaaacagaccagttaaaaaatatcatcagattttatacaaaaagcaagcccaaatctatgctgtcaaaaaaataaattgactttaactataaagacttagataagctcaaagaaaaggaataaaggatgataaactatgcaaatactaatttaaaaagctggagtaacta

SEQ ID NO: 306339 - DNA, 578 bp, Homo sapiens
tataaacaaaaacttttaaaaagttataaattataaatgataaaaaaacagagggcagaaaaagagaagaaaacagagcaaatgtaaaaaagagcaaacagcaagatggtagattttaattcaacaatattagtaatcgctttaaatgggattgctctaaacagaccagttaaaaaatatcatcagattttatacaaaaagcaagcccaaatctatgctgtcaaaaaaataaattgactttaactataaagacttagataagctcaaagaaaaggaataaaggatgataaactatgyaaatactaatttaaaaagctggagtaactatattaattttggacaaaatagacttcaaaacaaggaagataattagagataaagtgggtcattaatgataagtaggtcaattcttctctaagaaaatatagtaaccctaaacatgtatcggggaacctgccctgatagtcacgtaggttcttttctattttccttaagcatcagctgacttgagaaataaagggacagagtacaaaagagagaaattttaaagctgggtgtccaagggagacattaattgt

SEQ ID NO: 306340 - DNA, 578 bp, Homo sapiens
tataaacaaaaacttttaaaaagttataaattataaatgataaaaaaacagagggcagaaaaagagaagaaaacagagcaaatgtaaaaaagagcaaacagcaagatggtagattttaattcaacaatattagtaatcgctttaaatgggattgctctaaacagaccagttaaaaaatatcatcagattttatacaaaaagcaagcccaaatctatgctgtcaaaaaaataaattgactttaactataaagacttagataagctcaaagaaaaggaataaaggatgataaactatgcaaatactaatttaaaaagctggagtaactatattaattttggacaaaatagacttcaaaacaaggaagataattagagataaagtgggtcattaatgataagtaggtcaattcttctctaagaaaatatagtaaccctaaacatgtatcggggaacctgccctgatagtcacgtaggttcttttctattttccttaagcrtcagctgacttgagaaataaagggacagagtacaaaagagagaaattttaaagctgggtgtccaagggagacattaattgt

SEQ ID NO: 306341 - DNA, 575 bp, Homo sapiens
aggttacattgtatcacacagccttgcccaccttacccaggtgccagccctgaatagcaggtagaattgtaactgggacaaaaatgacttgcttttggaaggtggttcagatctcgtttagaatgtataggattggaacatgaagcaaatattctgtcttctcagtctatagaatacgggctccctgtgagaagagaaaatttagaacacttacaggtcacatctcattctagtgacaactagttggggttgtgtcctccttgtatttgtgctagacactcagtcaaagtttggctgtctttttatttttaactttagcaagatatgaagaaggctggraaaggaaaccatttactgtactgaataacttgtgacaacgattttcattctaaatagattttttaaagatagtgttattctatctttggccattacctaggattctaaaatgctttcagtgtaatgtaccgttcattataatgatgttccttttttaatggatttggagcttatttgatcagaaataggataaaactgaacctgataaataaacattttgctgagattataaaaaa

SEQ ID NO: 306342 - DNA, 553 bp, Homo sapiens
ccccaaactcatttagccaaagagaaaagtcaagctggaaaaggaaatgggtcacacaaayctgcctccttcttttggttcctaaataatatgggtacaaaatgaaaagctacatgcctcccccatattttgcccacaaggaaattcctggtgcgttgttaaaacttcaccatggcaatgcagattgatagcttatctttacatgttcagccacgcctgccagacacaactatatatctgattgtttccctatcctcttttgtctgcattatcttaggtaaaatgcagattccacatttttcctctgccccttttgtttatgtgaaaactgtgtgcttctcaataccccgccatttcctctttaaatttggagccctcaaaatcatctttggagaaaggcatagacctgtcttctgagcatgtccttaactttggcaaataaatctcccaaaatgattgagatgtgttcatcattttcctctattgataatacatgtgtatgccttacaccccaaacttttgcatgaaatattttaaaaattgattcacgtgc

SEQ ID NO: 306343 - DNA, 553 bp, Homo sapiens
ccccaaactcatttagccaaagagaaaagtcaagctggaaaaggaaatgggtcacacaaacctgcctccttcttttggttcctaaataatatgggtacaaaatgaaaagctacatgcctcccccatattttgcccacaaggaaattcctggtgcgttgttaaaacttcaccatggcaatgcagattgatagcttatctttacatgttcagccacgcctgccagacacaactatatatctgattgtttccctatcctcttttgtctgcattatcttaggtaaaatgcagattccacatttttcctctgccccttttgtttatgtgaaaactgtgtgcttctcaataccccgccatttcctctttaaatttggagccctcaaaatcatctttggagaaaggcatagacctgtcttctgagcatgtccttaactttggcaaataaatctcccaaaatgattgagatgtgttcatcattttcctctattgataatacatgtgtatgccttacaccccaamcttttgcatgaaatattttaaaaattgattcacgtgc

SEQ ID NO: 306344 - DNA, 548 bp, Homo sapiens
gtttaatttttaaatctttctattctcatataggtacctgatcacaaaagacacctttaatccctctcagtgacacaataaatgacataaaaagaacatatattagcacaaattcaaaagtaaaatagggaaatcattcaaattatggactatactgatgatttgtctctgcatgtaaaggacaacatgttatttatttactcgtcacttaaacataataaagttatggaattgactatgataaatctgtggttttgtgtccagaattggtgggttcttggtctcactgacttcaagaatgaagccatggacccacgcagtgagtgttayagttcttaaagatggtgtgtccggagtttgttccttgtgatgtacggacatgtttggagtttattccttctggtgggttagtggtctcgctggcttcaggagtgaagctgcagaccttcgcagtgagtgttatagctcttaaggcagcacgtctggagatgttcattcctcctgtctggagttgttcattcctcccagtgggttcgtggtcttgctgg

SEQ ID NO: 306345 - DNA, 605 bp, Homo sapiens
aagctgtcaattcagcgacttatttttttaaggactttgtgcacatcaaagatgtgaaggtcatcctaaaatgaggaaaacggcttcaatttcttacctgcatggtcagtatgtcagctctgcygtccagataggtgtttgggcatgtcagtgtatatgtgctttatggtataatatcagggattatagaattgctgaccatatcttaatgttctactcagaaatttcactcaagagagtaaagaatatgtgagatataaatatttcatgtgtatatgatagtatactatactacaagatttaatgtataatattattatataataagataaatattactagcaaatgatgaaagttcactaataatgatgaaggtgaagttattttacagttggatttattatgtaaaaatattttaattgaatctcataaattaatatgatccaatttttttaaaaaaagtgaaataattcagaaatactcttgcagtgctgatttacaaagagaaactgagtagcaagtaagggagtatgaataatgaaaacaaacaaggaatgaaattgtgaaagcagagaggaatattctctcacatctattttttagtg

SEQ ID NO: 306346 - DNA, 605 bp, Homo sapiens
aagctgtcaattcagcgacttatttttttaaggactttgtgcacatcaaagatgtgaaggtcatcctaaaatgaggaaaacggcttcaatttcttacctgcatggtcagtatgtcagctctgccgtccagataggtgtttgggcatgtcrgtgtatatgtgctttatggtataatatcagggattatagaattgctgaccatatcttaatgttctactcagaaatttcactcaagagagtaaagaatatgtgagatataaatatttcatgtgtatatgatagtatactatactacaagatttaatgtataatattattatataataagataaatattactagcaaatgatgaaagttcactaataatgatgaaggtgaagttattttacagttggatttattatgtaaaaatattttaattgaatctcataaattaatatgatccaatttttttaaaaaaagtgaaataattcagaaatactcttgcagtgctgatttacaaagagaaactgagtagcaagtaagggagtatgaataatgaaaacaaacaaggaatgaaattgtgaaagcagagaggaatattctctcacatctattttttagtg

SEQ ID NO: 306347 - DNA, 605 bp, Homo sapiens
aagctgtcaattcagcgacttatttttttaaggactttgtgcacatcaaagatgtgaaggtcatcctaaaatgaggaaaacggcttcaatttcttacctgcatggtcagtatgtcagctctgccgtccagataggtgtttgggcatgtcagtgtatatgtgctttatggtataatatcagggattatagaattgctgaccatatcttaatgttctactcagaaatttcactcaagagagtaaagaatatgtgagatataaatatttcatgtgtatatgatagtatactatactacaagatttaatgtataatattattatataataagataaatattactagcaaatgatgaaagttcactaataatgatgaaggtgaagttattttacagttggatttattatgtaaaaatattttaatwgaatctcataaattaatatgatccaatttttttaaaaaaagtgaaataattcagaaatactcttgcagtgctgatttacaaagagaaactgagtagcaagtaagggagtatgaataatgaaaacaaacaaggaatgaaattgtgaaagcagagaggaatattctctcacatctattttttagtg

SEQ ID NO: 306348 - DNA, 605 bp, Homo sapiens
aagctgtcaattcagcgacttatttttttaaggactttgtgcacatcaaagatgtgaaggtcatcctaaaatgaggaaaacggcttcaatttcttacctgcatggtcagtatgtcagctctgccgtccagataggtgtttgggcatgtcagtgtatatgtgctttatggtataatatcagggattatagaattgctgaccatatcttaatgttctactcagaaatttcactcaagagagtaaagaatatgtgagatataaatatttcatgtgtatatgatagtatactatactacaagatttaatgtataatattattatataataagataaatattactagcaaatgatgaaagttcactaataatgatgaaggtgaagttattttacagttggatttattatgtaaaaatattttaattgaatctcataaattaatatgatccaatttttttwaaaaaagtgaaataattcagaaatactcttgcagtgctgatttacaaagagaaactgagtagcaagtaagggagtatgaataatgaaaacaaacaaggaatgaaattgtgaaagcagagaggaatattctctcacatctattttttagtg

SEQ ID NO: 306349 - DNA, 502 bp, Homo sapiens
tagggcctgtcgaggagtagagggcaaggagagcaagagcattaggacaaatacctaatgcatgtggggctaaaaacctagatgatgggttgatggatgcagcaaaccaccctggcacatgtataccaatataacaaacctgcacgttctgyacatgtatcccagaacttaaattatactagtaaaaaactgtttcaacttttggactctagtaataacatttagcttaaaacacaaatacattttcctttttttctttttgagacagagtctcactccttcacccaggctagagcacagtagcacaatcacggctcactgcagcctcaacttgctggaggctcaggtgattctcccagcttagcctcctgagtagctgggactaaaggtgtgcaccaccccaccaggctgattttttttgtatttttgtatagatgggattttgtcacgttgcccaggctggtcttgaacttctgggctcaggctatctacccacctcatc

SEQ ID NO: 306350 - DNA, 502 bp, Homo sapiens
tagggcctgtcgaggagtagagggcaaggagagcaagagcattaggacaaatacctaatgcatgtggggctaaaaacctagatgatgggttgatggatgcagcaaaccaccctggcacatgtataccaatataacaaacctgcacgttctgtacatgtatcccagaacttaaattatactagtaaaaaactgtttcaacttttggactctagtaataacatttagcttaaaacacaaatacattttccttttttyctttttgagacagagtctcactccttcacccaggctagagcacagtagcacaatcacggctcactgcagcctcaacttgctggaggctcaggtgattctcccagcttagcctcctgagtagctgggactaaaggtgtgcaccaccccaccaggctgattttttttgtatttttgtatagatgggattttgtcacgttgcccaggctggtcttgaacttctgggctcaggctatctacccacctcatc

SEQ ID NO: 306351 - DNA, 502 bp, Homo sapiens
tagggcctgtcgaggagtagagggcaaggagagcaagagcattaggacaaatacctaatgcatgtggggctaaaaacctagatgatgggttgatggatgcagcaaaccaccctggcacatgtataccaatataacaaacctgcacgttctgtacatgtatcccagaacttaaattatactagtaaaaaactgtttcaacttttggactctagtaataacatttagcttaaaacacaaatacattttcctttttttctttttgagacagagtctcactccttcacccaggctagagcrcagtagcacaatcacggctcactgcagcctcaacttgctggaggctcaggtgattctcccagcttagcctcctgagtagctgggactaaaggtgtgcaccaccccaccaggctgattttttttgtatttttgtatagatgggattttgtcacgttgcccaggctggtcttgaacttctgggctcaggctatctacccacctcatc

SEQ ID NO: 306352 - DNA, 502 bp, Homo sapiens
tagggcctgtcgaggagtagagggcaaggagagcaagagcattaggacaaatacctaatgcatgtggggctaaaaacctagatgatgggttgatggatgcagcaaaccaccctggcacatgtataccaatataacaaacctgcacgttctgtacatgtatcccagaacttaaattatactagtaaaaaactgtttcaacttttggactctagtaataacatttagcttaaaacacaaatacattttcctttttttctttttgagacagagtctcactccttcacccaggctagagcacagtagcacaatcacggctcactgcagcctcracttgctggaggctcaggtgattctcccagcttagcctcctgagtagctgggactaaaggtgtgcaccaccccaccaggctgattttttttgtatttttgtatagatgggattttgtcacgttgcccaggctggtcttgaacttctgggctcaggctatctacccacctcatc

SEQ ID NO: 306353 - DNA, 508 bp, Homo sapiens
acagttaacttttatttttttgaggaggagtgtactttaaaataacaatgaaaatgtagtatagtaaatacatttaccagtagcatagtcatttattatcaagttttatccactatatataatttatgtgttatatttttacacaattggaagtgcagtttgtttacatcagcatcattacaaacatgtgtaatgcattgtgctataacgttaagacggctacgacatcactaagcgataggagttttttagctccttcataatcatatgagaccaccgtcttaagtacagtttgtccttgactgaaatgttatgtggcatacgtttgtgtatatcaatatatttatgtatgtatatttgtctgtatatatatgtatataaaataaaatctgtttgtacgatcctctacagtaatataggacttccattcaaagtcwctgagtctttttgaaatctaaggtttttttctattcctgccttttttattttttgtttattttgagactgg

SEQ ID NO: 306354 - DNA, 495 bp, Homo sapiens
tcatgagttcaagaccagcctgggcagcaaaatgataccctatctctacaaaaagtgaaacaaaatcatctgggcatggtggcatacacctgtagtcccagctacataggaagctgaggttggagtatccyctgagcccagaaatttgaggcttcagtgagctatgatcctgccactgaactatagcctgtgcaatggagtaaagttcccatcttaaaattaaacaaaaattaaaaataaaaataaataatgaaaaaaacaaaaatataattaatcaacaaattatttctgttattcaaaggatttttaatattactgtaatatgcaacaataatatgaatggtctttaatttgaatacatttggatttatctatgtacatatatagatatatatacacatctcttctctcatattcctttgtcacagagacacatacacacacacaagcacaaacatatgatttcagagtcctacttttaatagggattgaaag

SEQ ID NO: 306355 - DNA, 495 bp, Homo sapiens
tcatgagttcaagaccagcctgggcagcaaaatgataccctatctctacaaaaagtgaaacaaaatcatctgggcatggtggcatacacctgtagtcccagctacataggaagctgaggttggagtatcctctgagcccagaaatttgaggcttcagtgagctatgatcctgycactgaactatagcctgtgcaatggagtaaagttcccatcttaaaattaaacaaaaattaaaaataaaaataaataatgaaaaaaacaaaaatataattaatcaacaaattatttctgttattcaaaggatttttaatattactgtaatatgcaacaataatatgaatggtctttaatttgaatacatttggatttatctatgtacatatatagatatatatacacatctcttctctcatattcctttgtcacagagacacatacacacacacaagcacaaacatatgatttcagagtcctacttttaatagggattgaaag

SEQ ID NO: 306356 - DNA, 495 bp, Homo sapiens
tcatgagttcaagaccagcctgggcagcaaaatgataccctatctctacaaaaagtgaaacaaaatcatctgggcatggtggcatacacctgtagtcccagctacataggaagctgaggttggagtatcctctgagcccagaaatttgaggcttcagtgagctatgatcctgccactgaactatagcctgtgcaatggagtaaagttcccatcttaaaattaaacaaaaattaaaaataaaaataaataatgaaaaaaacaaaaatawaattaatcaacaaattatttctgttattcaaaggatttttaatattactgtaatatgcaacaataatatgaatggtctttaatttgaatacatttggatttatctatgtacatatatagatatatatacacatctcttctctcatattcctttgtcacagagacacatacacacacacaagcacaaacatatgatttcagagtcctacttttaatagggattgaaag

SEQ ID NO: 306357 - DNA, 569 bp, Homo sapiens
tgtgtttcagtcttaccaaagttcttaaatgtttattattagcactttcgataccatctggcttattaactccctgctatataccttgcttaatttgttttttgggttatagatataatattaagtagataagatgagaataattgagaactggttcttaattatkttcatgaatgacagaatttacctttggtatgcctatttcatacagcgaaaactgatgggaaggactggaaaaaaaaatctcaggggaggttggcttttgtgtcaacttccccaaggggtgactacatctcgattaattttgttgctgctacacttctgtggagttcaggaaattactgcccctagaaacgaatatctgagatcaggtaagatattggctagcggattttctaaagaataaaggccaaactttctaatttactcagtgcacaggattcgcacttttctaggtattttgtaagaaacaagtaaaatacataagctactatttaaagacatcttcactgtataaaattaaaagcatctgctatttatattagcagacttttcattgttaagggggc

SEQ ID NO: 306358 - DNA, 585 bp, Homo sapiens
atattaagtagataagatgagaataattgagaactggttcttaattatgttcatgaatgacagaatttacctttggtatgcctatttcatacagcgaaaactgatgggaaggactggaaaaaaaaatmtcaggggaggttggcttttgtgtcaacttccccaaggggtgactacatctcgattaattttgttgctgctacacttctgtggagttcaggaaattactgcccctagaaacgaatatctgagatcaggtaagatattggctagcggattttctaaagaataaaggccaaactttctaatttactcagtgcacaggattcgcacttttctaggtattttgtaagaaacaagtaaaatacataagctactatttaaagacatcttcactgtataaaattaaaagcatctgctatttatattagcagacttttcattgttaagggggcttcattttcttcaagattctctaactacctctcaaatatatattaaacagatttgcaatgttttagtactgcatacttgcatgccaaatacagaaatatattaaatgtaacccatgtactagatagtagttta

SEQ ID NO: 306359 - DNA, 559 bp, Homo sapiens
attcagtacagtaacatgctgtacagattcgtagcttggaagcaatagagtttaccgtatagcctaggtgtgtattaggctataccatccaggtttgcataagtgcactctatagtgtttgcatgatgacaaagtcgcataatgaagatgcatccctcagaaggtatccctatcaggtgatgcatgactataattctactgctcgtttctgccaagcccagatatagccttttaatccattgcaacaaagggctcaaggattgactggtcaataggtgttccatatatgataaaatggatttactataaattagtgactgtaaatgatatgaatggtacatccctcttcaaaacagtcagaagtcagaatgtgattccacaagtcaatcacattcagaatttcacatccatgagacaaagctttgagctatgaagatctataattaarttctggctctactactgaatgttttctgtacttatgtaagtcatctaactcttttggattttgcctttttgataaaataattaaaataaatggtcattctaccaagtcttc

SEQ ID NO: 306360 - DNA, 603 bp, Homo sapiens
agatgacagacaatgtgatgagtgctggagatagaaaggagaatagatataattttgaccttcaaagatgctcaatatctggcatctatctataatctgggacagaaaatsatatgcttttaatgcacagattgggaaaatatggagtgagaaaggagcattcaggaagactcatgaactggataatgcttgaactgagctagaagaatgcaaaggaaatggtgaggataatgacctaggtgttggcatggttgtgggttgagatttccgggtacagttaacaccgtatgcaaaggcacggggctgtgaaagaactgggccaattgagaaaactaaatgctattgtggcattcaagagcttctgagaagtggcaggtgaggctgggaagttaagagatgactcctgaggagctcttggtctcattctaatgagataggcctttatgtcaataaaaagtaactaaaagattttaagtaggaaagttttatgacaggagtttattgttactattgctgtttttagaaaagtcactctgctgggtagatgtgaatgggaaactcaagatgagttaggaatatactacagagttcagaaaagagata

SEQ ID NO: 306361 - DNA, 581 bp, Homo sapiens
ccatgcaaataagatgtgtaaaatgttaaatgtgttgaaatgaaataaacaaaaaccaacctataatggtacattcaacaaaattcttcttcaaaaatgaaagagaaataaaaactccktgggaaagctaaagttgaaagaattcatttccagaagactaatgctgcaaaaacagtgttaaaagaagtgcttcaggaacaagaaaaataatataggtcaaaaaaatcggatcttcataaaaaaaggagtagctgaaggtaaaataaatgtgcttacttttcttctcagttgatctaagaaaataggtgtttaacaataacagtaaaaagatactggctgatgatataacgtagataagtgaaatgaatggtaaaatgttacaagggattggaggaaggaattagcaatactctattccaaggaaacttcactatttgtaatttacacaggagtattagaggatcaattctataaactgcaagttttggttcccccaaaatttgtatgttgaagccataaccccaatgatatagtttaggaattgagaccattggaagctaatcaggtcatgagattgggtc

SEQ ID NO: 306362 - DNA, 410 bp, Homo sapiens
ggcaccaggggccaattttggagaaacagagatatgtaatcttcagacagagaatcgaaaatagctgtgttgaggcacctccaagaaatttgagataacacagagaaagaattcagaattctatcagacaaatgtaacaaagacattgaaataattaaaaagagtcaagtagaaatactggaatttaaaaatgcaattatyttactgaaaaatccaccagcgtcctttaatagcagaattgatcaagcagaggaaagaattagtgaccgtgaagaaagattatttgaaaatgcacactcagtagagacaaaagaaaaaatagtaaaaaacaataaagcacatctacaggatctaggaaagagcttcaaaaaggcaaatctaagagttattggccttaaaaagcagataga

SEQ ID NO: 306363 - DNA, 629 bp, Homo sapiens
aaactgtaaattctaatctatctgaatccctcagtggaagctagataaaactaaagtggaagtttggaatttcaaatgcctcatttattcacacaaataagtaaattaggggttttctttttaaatttgttattgtcttgtttttctgctatttggagtagaatgtacttcaagtaagaagtgagaagagtcttggattagacagaattgagtttgaatattgcctctgacacacagttatgtgatccaggtcatgttccttatcccttctcagcagtggttacttcaaataaaaattgtttggatgataccaccaaatccacagtattattgtgaaaacaaatgaaatagcatgtgttaaagcatctgtacacagtgtatgatacataccacgttcccatcatgttttcttttttctcattttagtaaagctgtgattattagcttttaaattgaagatrgcagtgtaggactcattaattttaaacactgggacgtgataaagcttttaaatttttatttgtaaataaattattatttgtacaattatttgtatcatatctcttctagtagattttaagtttcatgggaggaaaaccataacttatttactcaaatattcaaaaatg

SEQ ID NO: 306364 - DNA, 698 bp, Homo sapiens
aatagaccatatgctaggccacaaaacaagactgaaaacattcaaaaaaatagaaataatatcaagcaacttatctgatcacaatggaataaaactagaaattaataacgagaaattttggaaactatacagataatggaaattaaacaatgtgctcctgaatgaccagtgggtcaatgaagaaattaagaagaaaactgaaaaatttcttgaaacaatgggcaataaaaacacaacataccaggacataygggatacagcaaaagtagtactaagagggaagtttatagctgtacatgcctacatcagaaaggggaaaaacttcaaataaacaatataatgatgcagcttaaggaactagaaaagcaagagcaaaccaaaccctaaattagtagaaaaaagaaataataaagatcagagtagaaataaatgaaattggtatttaaaacaatacaaaaatcaatgaaacaaaaagttgttttctgaaagttaaacaaaattgacaaacctttagccagactaagaaaaaaaaagatatgaatatctcaaataataataagtaaatgttaaaaggtagacatctacaacctgtttatgataaaaaattcagattactagtggctactatgaacaactatatgccaataaatttgaaaatctagaagaaattgaccgattcctaaatacaaacaaactac

SEQ ID NO: 306365 - DNA, 543 bp, Homo sapiens
aataagtaaattaggggttttctttttaaatttgttattgtcttgtttttctgctatttggagtagaatgtacttcaagtaagaagtgagaagagtcttggattagacagaattgagtttgaatattgcctctgacacacagttatgtgatccaggtcatgttccttatcccttctcagcagtggttacttcaaataaaaattgtttggatgataccaccaaatccacagtattattgtgaaaacaaatgaaatagcatgtgttaaagcatctgtacacagtgtatgatacataccacgttcccatcatgttttcttttttctcattttagtaaagctgtgattattagcttttaaattgaagatggcagtgtaggactcattaattttaaacactgggacrtgataaagcttttaaatttttatttgtaaataaattattatttgtacaattatttgtatcatatctcttctagtagattttaagtttcatgggaggaaaaccataacttatttactcaaatattcaaaaatgtctgaatga

SEQ ID NO: 306366 - DNA, 470 bp, Homo sapiens
agtggaaaaaagggaacccttgtacactgttggtgggaatgtaaattagtacarttgctatggagaactgcttggaggttctgcaaaaaagtaaaaattaagctctcatatgatcaagcaacctcactgctgggtgtatacccaaaagaaagaaaatcagtatattaaagaaatacctgcactcctgtttgttgcagcattgtttaaaactgataacatttggaagcaacctaagtatccatgaacagatgaatagataaagaaaatgtggtacatagacacaatggagccatgaaaaagaatgatatccattaattcgcaacaacacgggtggaattggagatcattatgctaaatgaaataagccagggacagaaagacaaacattgcctgttctcacttatctgtgggacctaaaaaatcaaaacaactgaacttatggacatagaaattagaaggatcattaccag

SEQ ID NO: 306367 - DNA, 470 bp, Homo sapiens
agtggaaaaaagggaacccttgtacactgttggtgggaatgtaaattagtacaattgctatggagaactgcttggaggttctgcaaaaaagtaaaaattaagctctcatatgatcaagcaacctcactgctgggtgtatacccaaaagaaagaaaatcagtatattaaagaaatacctgcactcctgtttgttgcagcattgtttaaaactgataacatttggaagcaacctaagtatccatgaacagatgaatagataaagaaaatgtggtacatagacacaatggagccatgaaaaagaatgatatccattaattcgcaacaacacgggtggaattggagatcattatgctaaatgaaataagccagggacagaaagacaaacattgcctgttctcacttatctgtgggacctaaaaaatcaaaacaaytgaacttatggacatagaaattagaaggatcattaccag

SEQ ID NO: 306368 - DNA, 505 bp, Homo sapiens
ttggccctataacaagatcactgataagggtgtgtctccactaaataatcgattttcaatgtacatgaaacagctttctcttggaagaagatgacacctaggactttyatagatagagaagacaagttcatgcctgactttaaaccttcaaaagacaggctgactctcctgtagcagttagtgctgattgtgactttaagtggaagccaatgctcatctaccaatttgaaaatcctagggcccttcagaattatgctaaatttactactgtgtgtgttctacaaatgaaacaacaaagtctgaatgatagcacatctgcttacagtatgatttactcagtattttaatcccactgttgagacctactgctcaaaagaaaagattcctttcaaaatattaccccattgagaatcactcaagagctctggtggagatgtacaagttattaatgttgttttcatgcctgctaacacaagatctgttctgcagcccatggaccaagaag

SEQ ID NO: 306369 - DNA, 620 bp, Homo sapiens
gagctcaatgttaagtagatcttcttaataaagaccactttttaaaacttaggaacaatttacagataaattgtttagctcaacatattgtacataaggggcatcctcatgacaggaaaggcataatgaagccaaaggcaaattgaaccaggtaaatgaatagtgaattaagtcagttaattatatatgacattgtggctcagtgtggatattccccaaacaatcgattgaaaaagagaattagatggcttttatagctcactgttagtctcggtgaaaccaaacatgtgagctagttattatyataccactttataaacgaagaaactcaaagagcaaagatgctcagctaaatttatgcagctagtaagtcctgagacaaaaactcagagtcttctgaaaccacctccagcacatttttccaatatactatgctgtaccaccatctactgtttctattatcgtttaaatatttaaggagctttctggcacatactcaccacattcagacttaatgactcattgggaaccactcagttcactgaagtataaataaaaaccattccttacagttactttataatataaggagaatctttagaatgatatttcctacatct

SEQ ID NO: 306370 - DNA, 567 bp, Homo sapiens
acatttgtggagtcagatggacatcagtttaaattctgattttgatattgtggatgtaattaaatgtcaaaaactctgagtactggatccaatatctgttggctttatgacgttggacatttcacttcatctrttatttgcaaaggggaagggataatatctactttgaatgggtattgagtgcattgcacaaggaaaagtctttgtatatactatcagaaatatttcacctcactgaggggtggcttttttatctgtaaaataacagtgattactatgtaatgggcagtcataaatttgataaaagataatcaacatagaacacctgacacagacctccaattagaaccactattagcattgtcttaattggtagttcctaaccaagggtgtgtatcaaaaactcagctgtattgatggaccacctgcctgaatgagagcctgatcacagactcgggatctttgtgagagtgtgttcagggtatacatatatgtttttttttcaaagataaacacataattatcacctaggtctggttaaaatcaagtggtctaattttctggatc

SEQ ID NO: 306371 - DNA, 602 bp, Homo sapiens
actttgtttttatcttggacccctttatatggtcattagcatattaatcacacacctaccggtaccatgacggttccaagaacagccatatttggtgtaaaaatgggcggcatcacagttctgagaaatctccaccttttcccaggagtctccatgaatattccacccctcagttaaagaaacccataaaggtagcagccccaaatccccttgcatgtgactttattttgagtacacccacactcccctttcttgagtgagtacttttcactttgcaataaatctccttactttcactattttctgtctcatttttgaactccttctcgctacaatgtcaatgtcctactggcatttggagacctcccccagcccaccagtatcagagtaaagtgatttgcttaaaatcagaaattgyggattatagtagatactgaattcctctttattgcatattaagtaaaaccctctctgctacctcttgggtttaataaaaataagtataatgtgacctgaggacctgagaagtagttttgaagacaaacacattttccaaagctgcataaaatagctggaaaaagtcaagcactatatcttcttga

SEQ ID NO: 306372 - DNA, 610 bp, Homo sapiens
ctggtgtcctttgctgggagttgggggataatgactcatggagccttcaattctgccatctttttccaccctcaatcttagaacatttaaattgttatctatagagcagttgagcagtgagagtctacgtgattgtaggtccatagggtccaaacaactaggagaaagcaagtcagagagcaagctgacctaataacctaattgaatgtggacaagcttggtttattttcgtttctcccctcccttcattcttgatttattttataaaatttgtagggtcagtttcaatcttagctagatcttctggataacttgctgcagcatctacatgagcacttatttcttcaccttgcaattttatgttttggagatggcgtcttcacttaaaccccatgagcgaacctctgayagtttcaaacttttcttttgcaatgtcctcacctttctcagccttcatagaattgaagagagtcagaattttggtctccattggctttggcataaggaaatgttgtggaagatttgttctttaatccagaccactaaaactttatccatatcaataataaagctgttttactttcttatcatttatgtgctcacgtggaat

SEQ ID NO: 306373 - DNA, 617 bp, Homo sapiens
ttccttgctcattcagatgttggtagaattcagttccatgcagttgtagggccgaggtctccattccattggtatcagctggggactgcccttgcctcctagaggcgtctctccagttcttttaggggtatatctcagaaccaatcatgcaggggtatatctcagaaccaatcatgcagggtcagatccctctcacagtgacatttctttgactaacttttctgccttcsagttctacttttaatatctcatgtgataaatcaaactgagttacttaggataatttccccttctcaaggtttttaactttaaccatatctataaagccccccttttctatataaggtatcatattcacatacgtacaggttccaaggataagggtatggacattttgagggcacattgttctgcctatttacggcaatcaaccaaattagaaaataagcaagtgacataacagggtgatcacaaattaggataccccactggcaagttaacatctgaaaaatgaattattttcattagttagttagaaatgcaaattaaaactataagtcagtgctactctatacccaccaaaatggctaattaggaagactgaaaatactgagtgt

SEQ ID NO: 306374 - DNA, 617 bp, Homo sapiens
ttccttgctcattcagatgttggtagaattcagttccatgcagttgtagggccgaggtctccattccattggtatcagctggggactgcccttgcctcctagaggcgtctctccagttcttttaggggtatatctcagaaccaatcatgcaggggtatatctcagaaccaatcatgcagggtcagatccctctcacagtgacatttctttgactaacttttctgccttccagttctacttttaatatctcatgtgataaatcaaactsagttacttaggataatttccccttctcaaggtttttaactttaaccatatctataaagccccccttttctatataaggtatcatattcacatacgtacaggttccaaggataagggtatggacattttgagggcacattgttctgcctatttacggcaatcaaccaaattagaaaataagcaagtgacataacagggtgatcacaaattaggataccccactggcaagttaacatctgaaaaatgaattattttcattagttagttagaaatgcaaattaaaactataagtcagtgctactctatacccaccaaaatggctaattaggaagactgaaaatactgagtgt

SEQ ID NO: 306375 - DNA, 612 bp, Homo sapiens
cactggcaagttaacatctgaaaaatgaattattttcattagttagttagaaatgcaaattaaaactataagtcagtgctactctatacccaccaaaatggctaattaggaagactgaaaatactgagtgttgatgaggataagaaaaaactgaaactctcatccactcttaatggtaatgccaaacccttttggaacaacatttrgcagtacctactaaagttggatatatgtacagctggtccctaacttaatgactgttcaacttatggttttttgactttatgatggttttattgagatgttacctatcataagtcaaggaaaatctggactgatgatatttcaacttgcaactgtttgactttatgatgggtttgtcagtatattaaatgcaattctgacttatgactttttcaatttatgtgggtttattgtatgtaacatcatcataaatcaaggagcatctgtataacaaaaagagcccattcattcaaattctaggtacattcccaatagtgcataaatattcaccaaaacatatgcacaaaatattcatgatggcattatgtgtaatagacaaaatctggaaataacaaatatccagtaaca

SEQ ID NO: 306376 - DNA, 511 bp, Homo sapiens
agtctcatattccatttccagtgagaagacagttactgctctgaccaaaacacggcttcttttgtttgtttcacatgcctaaaaaaaatggccatacgtaaattccacatggttcattaattattctccaattcatgtttctcacatgttttgctacattaagtttcctaaggaagttccagtcatcatttttctgctccagatcttcccgagtattcactgccttctacaatatgactgcagttttagtctaatttctattgttttcccacagacaggtatcatatatagtattttatcatcaaagtagatcattttcaccaccacctcatgtttatctcaggctttgctcttgttgtgactttgcttatattttccctagatctctagawgtgctaattctactcattaattcttcaaggagctcttttcatgaagcatctccttatctgtatctaactgattatctcttcttttgaaatttattttatttacacttactacttctaca

SEQ ID NO: 306377 - DNA, 619 bp, Homo sapiens
attaacctaaggtgcagagcagtgataacaagtcatggttgcacagctagtaagtaatgagaactacgtctgtttgcttccaaagctccagcccacaaccattatatatattgtatctgagacagtcttccaggaggagatgctttggcttggtactgaagactgcaggtgtttattcactagacatgttgggaatgatacttcaggagaagagagcagcatgcacaaactctagaggttggagacaagcccctgggtctgtggagccccgtggagttcagtattgttgatttattaccacccttgaagggtgttgagctgtgaggctgaagagatagcccttgaccatatcacaggccgtcctaaaaagcctacaagatgagtgggtgtggttcagaatcactaaaagatctaggcctccaaagtacatagtaggattactactttggagtaattaaactgtaacattgtgattcagtctagcttctgtagctaaccagtaattcacccaattaagmcatattcttacatttcttaaaacatgtccttaaggaatacggaaatgaacagaataggaagtttggtggaaataatacaacacagatgctgttcagttagg

SEQ ID NO: 306378 - DNA, 539 bp, Homo sapiens
tctttgtcaagcaatcttattttcaggaacataattgctttgttcaatcaaagtgtctccaagtgctgtgggctggaggcctcatgatttagtttctatcaaagaaattctgccccaagtggagaaacttgtctgatttaaatgaatatcaacaaaaatgatgattttacacttttcagggaagaaatagccccaacagctcttstgtgtttccagggacgttaagggaggctaacagatttatggtctcattattgcctgaagcaataactcttccaataggtaatttttatgatgtgggaccacaaaacatatgggaataaatgttcttgaatgaaggaactggctgtcagggttttcaaatacagcagttactgaaacaatagatgattttcacaaaaaaatgaatttctttctccttagcttttctcttatcatctaccattaaccccatcagaaacacttgtctctttaaatagtagaaagtgtcatacaatcaattggtaaacatgaatacaagcataaaataccacattcaa

SEQ ID NO: 306379 - DNA, 547 bp, Homo sapiens
gaatcccaaaaacattacgctacgttaaagctagtcgtattgtataatatccattatacaaaatgtccagataggcaaatcggtagaaacatctagtagattagtgatcgcctaggactgaactgagccagtgtgagaatggggagccatgcctgatgggtactgggtttctttttggggtcgtaaaatattctgtaattagataatggtgatggatgcccaagtttgtgaatatactaaaagtcactgaattgtacacttaaaaagggtgaatgttrcagtatgtgaattgcatatccataacaggttataattgaaaaaagaatacttatataacgtacaatacacttaattttaaactggaatgaaggaaagacagaagaaggaataaaaggaagttaagagggaggaagggagggagggaaagagacacacacacagatctcaaagaagtcagtcatgatcgcgggcacacttctagtggaacaagactccagatggaatgcatattagatcatatgaagtaagctattatattttacatatt

SEQ ID NO: 306380 - DNA, 547 bp, Homo sapiens
gaatcccaaaaacattacgctacgttaaagctagtcgtattgtataatatccattatacaaaatgtccagataggcaaatcggtagaaacatctagtagattagtgatcgcctaggactgaactgagccagtgtgagaatggggagccatgcctgatgggtactgggtttctttttggggtcgtaaaatattctgtaattagataatggtgatggatgcccaagtttgtgaatatactaaaagtcactgaattgtacacttaaaaagggtgaatgttgcagtatgtgaattgcatatccataacaggttataattgaaaaaagaatacttatataacgtacaatacacttaattttaaactggaatgaaggaaagacagaagaaggaataaaaggaagttaagagggaggaagggagggagggaaagagacacacacacagatctcaaagaagtcagtcatgatcgcgggcacacttytagtggaacaagactccagatggaatgcatattagatcatatgaagtaagctattatattttacatatt

SEQ ID NO: 306381 - DNA, 650 bp, Homo sapiens
atgtaactgaaccataagagaaagaaagataacataactaagtctaggtggggtggacaaagaaagcttcatgcaggaggtggggatcagaatgatgaagaaaaaaactgatgacagatgcatagggagaaaaaataaaaaagaaacagatagcaaagtttgaagaaagtaagccactgtcatttaaacaacatctagaaaggattgtggggaaagattttttttttgtatttttaatcagtctcaattggaagggacagagcctcctcaaggctatagcaaaactgggaagagctttctggcctccaagctttggcgataacatgccatattartgacaatcactaatgggagaaagcgttggctccaccagtggtgctgtaaagaaacctaagacgtggtgtttttaatttcatatttcaattcataattctttcataattctataaaggcaaagatggaccctttttcacttccattcaaaaccccaggtttctctggaggcttccttttcccaacagtgttactcttgtacattgcaattgcattttgcaggtactatgtagaaatagggaaatgagaaaggagattcatcctgggtatcgtatctaccccttacctaatgagagaaaatgtcaattcagattgcc

SEQ ID NO: 306382 - DNA, 617 bp, Homo sapiens
ctaagacgtggtgtttttaatttcatatttcaattcataattctttcataattctataaaggcaaagatggaccctttttcacttccattcaaaaccccaggtttctctggaggcttccttttcccaacagtgttactcttgtacattgcaattgcattttgcaggtactatgtagaaatagggaaatgagaaaggagattcatcctgggtatcrtatctaccccttacctaatgagagaaaatgtcaattcagattgccttatctagtaatatgagcatgaattggagtgtcagggggaggaaaggagggagagagtaaaattcatttccggcttgaaactgggtttggaaatacagaggcactctggaactgtagagccatgtgcatgcttagtgaatgatttagaaagtgaagcagtaaaggtttgtgtgcccgcttatctcaatcctatgcctctctcctacctacctctgacccatcacctctctctcagctgctcaagactgttatcaagtctcactcatgtatgtcctttccaaaagagaactctaattcaacattttccctttccacctaccccacccacaactcctacagtctcaataacagctgtaa

SEQ ID NO: 306383 - DNA, 495 bp, Homo sapiens
accatagtttttcctgaatattgacatcagaatgttttcttcccatatgctttgcatctagctctgattgtgtgacattagtacataactatttatttatggcagcgtggcctggagttgccacctggctagtttgttgctgaccctgccatgacttttacatgaaagctagctgacgataagcagacaccacttgatcctcattcctttcyccttcccaactttactctttccttcacagccatcagatttttatagaaaacagcagttcaaggatgtttgcaccagttttttttttttcttctaaaacaaaaacaaaaacaaaacgggatacatatacagaacgtgcaggtttgttacataggtatgcatgtgccatggtggtatgctgcacctattgactcgtcctctaagttccctcccctcacccccaaccccccagtaggccctggtgtgttacaccagttatttttatagcagctcttctctctggct

SEQ ID NO: 306384 - DNA, 495 bp, Homo sapiens
accatagtttttcctgaatattgacatcagaatgttttcttcccatatgctttgcatctagctctgattgtgtgacattagtacataactatttatttatggcagcgtggcctggagttgccacctggctagtttgttgctgaccctgccatgacttttacatgaaagctagctgacgataagcagacaccacttgatcctcattcctttccccttcccaactttactctttccttcacagccatcagatttttatagaaaacagcagttcaaggatgtttgcaccagttttttttttttcttctaaaacaaaaacaaaaacaaaacgggatacatrtacagaacgtgcaggtttgttacataggtatgcatgtgccatggtggtatgctgcacctattgactcgtcctctaagttccctcccctcacccccaaccccccagtaggccctggtgtgttacaccagttatttttatagcagctcttctctctggct

SEQ ID NO: 306385 - DNA, 495 bp, Homo sapiens
accatagtttttcctgaatattgacatcagaatgttttcttcccatatgctttgcatctagctctgattgtgtgacattagtacataactatttatttatggcagcgtggcctggagttgccacctggctagtttgttgctgaccctgccatgacttttacatgaaagctagctgacgataagcagacaccacttgatcctcattcctttccccttcccaactttactctttccttcacagccatcagatttttatagaaaacagcagttcaaggatgtttgcaccagttttttttttttcttctaaaacaaaaacaaaaacaaaacgggatacatatacagaacgtgcaggtttgttacataggtatrcatgtgccatggtggtatgctgcacctattgactcgtcctctaagttccctcccctcacccccaaccccccagtaggccctggtgtgttacaccagttatttttatagcagctcttctctctggct

SEQ ID NO: 306386 - DNA, 550 bp, Homo sapiens
ctcactgggactgctgccacaggacattaaagcaggggacagcaaactgaagctcacaatccccctttgctgcctctttttgtatgtcctgaaagctaagaatagtttttacattttttaattattataaaaaacaaaggaataataatattgtatggcatgtgaaattatatgaaattcaaattccagtgtccctcaataaagttttactggaacacagccatggtaagtctttcatgtattgcctatgactgcttttgctttacaagagcagaactgagtcactgagacagagactgcatggcccacagagcctaaygtacttactctctggctctttacagaaaatgtttactgacttttgtcttatcagtcccctatatcacactttctgtgccatagtcatttaaagaaatgacacagcatagcaaccagtgatccttttcaaacaaatcaactcccgtcattttgtgtttaaaactcttatatgctctgctgtccaatatggcagccactagccacatgtgcctgttgaacgcttgaaaagtgt

SEQ ID NO: 306387 - DNA, 589 bp, Homo sapiens
tatcagtcccctatatcacactttctgtgccatagtcatttaaagaaatgacacagcatagcaaccagtgatccttttcaaacaaatcaactcccgtcattttgtgtttaaaactcttatatgctctgctgtccaatatggcagccactagccacatgtgcctgttgaacrcttgaaaagtgtctagcgcaactgaccagctggatttttatttttgtttaatttcaattaattaagttttaaaaatggataattcaattattggaaagcatttgactatgtttggaataacctggctatgtgaatgtactatatcaattgaagattttaggaagtctcagtgcaggtcaagtattcccaatgaaaattttggatccaaattggaatgcgctaaaaatgtaaaatacacacaggggtttcaagacttaatctaaaaaacagagaatgtaaaatagcccactaataattttaatggtgattacaagttgaaataaataagttaaatgacatatcttattaaatctaatttatctgttgtttgggttttttttttttacttttaattgaggctactagacaatttaaaatt

SEQ ID NO: 306388 - DNA, 588 bp, Homo sapiens
agctgtaatctcagtcacattactaataattttaattggggtgggggaagggatccagaagagttccatggagtaaatgaccttaaatcatgctaggatttgcctactaagatacacaacttcatttaggtacatataaactgtattaagaaatccatgtgcttttccaaaacaggacaccacacactttggaggcccagattcgcattgcttttctatccttgctagatttgcatacgtattcctacccttgagctcagggcctcttgtcccagtcctagtgaagagtgcatgaaattgcctgcctccaaagaccaaggttcaagatcaagtcaatcatgatgtccattgttagttgttcccacccatctcctcttgaccagacattctctgactccattgcccaaaacttgagtgcccaggttcttagaaccatctcckgcacctctgcaacctccagccagacctcgtttacatgtaaccccacctgccttgatgacacattgctaaagaccactgcatacctccttattctttcctacctaattcaaatttcactcataaatctgatcaggaaaatcagaatct

SEQ ID NO: 306389 - DNA, 633 bp, Homo sapiens
ttaactctctagaaagctatgtaggcttttcatctacatgtatttccattaatgtaattgtttgaacttacatatgcatgatttttttagcaaaaaatgaagttttaattattttattggaactatcaatccccagaaaacttcaagaaccaccattacagctgcatttcagattattcttaatgtgcatactgattcaataatagaagctcacctgaaagtctgatgggttgtgctcttgttgattttgccattcccacaatctattggcttctttatttgactaagagattagtttaatgaatgtattctcattagggattttttttttttttttaccatatccacagggtatgagttaagtttggagagtgctgattgttcacttgtggtggaagtttgactagaaggagcctgggcatacaccaaccacaacacaaagaaaagrtatttcccaaagagttcaagtaaccccaaattctattcaatgttcttccttacagtaaatagttcatgatgaggttgatcagaattcattaggtagtaacactgttctcttttcatgttcccctcctaatgtggaagcatcatttgcagccacagaacgtaaagtaatgagttgttttaccaata

SEQ ID NO: 306390 - DNA, 407 bp, Homo sapiens
tctgttaggtccatttcttctagaatgtagtttaagtcctttgtttctttattgactttctgcctcagtgatctctctagtgctgtcagtgkagtattgaagttccccactattattatactcctatttctttcctttggtctagtggtaattgttttaagaatctggaagctccagagttaggtgctacatatatttaggattgtaatattttcctgttggattcttttatcattatataacgatcttctttgtctttttttttttactgttgttgctttaaagtctgttttatcttacataagaatagctattcctgctagcttttggtttccatttgcatgaaatatctttttccacccctttaccttgagtttataagaatccttatgtattaagtgaatatc

SEQ ID NO: 306391 - DNA, 407 bp, Homo sapiens
tctgttaggtccatttcttctagaatgtagtttaagtcctttgtttctttattgactttctgcctcagtgatctctctagtgctgtcagtggagtattgaagttccccactattattatactcctatttctttcctttggtctagtrgtaattgttttaagaatctggaagctccagagttaggtgctacatatatttaggattgtaatattttcctgttggattcttttatcattatataacgatcttctttgtctttttttttttactgttgttgctttaaagtctgttttatcttacataagaatagctattcctgctagcttttggtttccatttgcatgaaatatctttttccacccctttaccttgagtttataagaatccttatgtattaagtgaatatc

SEQ ID NO: 306392 - DNA, 488 bp, Homo sapiens
ttaattgaaaaaaatgacaatttacatttacatagcataagaaaatctgaaagtgctatttcaaagaccgctattcactcaccatcaccttgcaggtttcttctggttaccaaacaccagttgtaagaattcagatgaataataaaactcacaaaatgatagcattggaattggggtgggtctcaggaatcatttgttcgagagatttccaaaccatgttcaataaaaaccagcctagcagttgttcttaggatccacctcagagaagcaagaaggtcactgagcatatgggactgcttcgaccrtttttaacctgttttatatagtgaatcttgtcttagcgtagattcctccaaaagaagacaagatttgggtgcaatattttatttgagaggcaaatccaggaagcactgtgagggaaatggagaggaaggggtcgaagaaggaaacctaataaaggtattactaagaggattaccactgtggac

SEQ ID NO: 306393 - DNA, 568 bp, Homo sapiens
aatttgtcacacatttctaattgtccaggaattgtacaaaatttctgaatagataacatttgactgtagcgttgtatctacatctagattgttaattaaatctaagrcagtctatctatagagttttaaagatcatataaaagtagatctaactatgtatcgatggtaagggaagaggtccctgaagaaatgacttttcaactgtcacctgaagggcagtgcagccagtgatgactgcatggaggttaggatgcaggaaggaagagctgaatttagaaaacaagggagaaaagaagaatcctattcagaaccctgtgtttcttggctactactttttcttcctcgtgttcatcttttgtgccaagatctattaacttattgtactaatttaagggacagatttattcactttgatatagttgaagaacctaaagtttaatgagtttggagccccagtgatttgaaaaagaatgtaaggaagaaggagaatgagggagagggagagagaagggggcaggggaggaagacgagggagaggaaaaattgtgaggcagagaaccaagataag

SEQ ID NO: 306394 - DNA, 626 bp, Homo sapiens
cagaatgagtacccctgaagaaagttaaaaacaaaacaaaacaaacatgaagaccagccaccatccagagtggagggagaaggagggaaggtatctgaggtgacaaaggtagaggaaaggttacatagggtgaataaggagaacccagtgattccagctccttgaagatgcagagaatgtctgagtgccttatacatatttttctgtaccagctttttacatttcagatgttgttggcagagaatgtctgagtgcgttatacatatttttctgtaccagctttttacatttcagatgttgttggtatttctgtctccatttgaatgtagttcacaggtgaaatccttccagtgcaggtcacctacttacagagttctgaaatacaaaaccattttggccctcgtctcactctacagacctgacaatcagcactggtgtgccagctgtagccctgggtttcccctggttattctgtttctagstggttcaactgctcacacttcctaataactcccgtctcccactggcttgcccgtggaccaactaatggagacagaaaatatctactgccatgttacctagagtgtgtcccatggagcagaaatccatgttttactgagcaaaaa

SEQ ID NO: 306395 - DNA, 608 bp, Homo sapiens
ttgattctccaatcacagactgaaccaaccactctctgatttgcccttgggggctccagattgttctctgagcagatcccaattcaccatayggcacagcaagtgggcaatagagggaagccgagacccagcactcctgtttccagatggccatctagaccacagtacagaactgtacttcagagcctctaccccgctgtgcgttgtgctgatacaatacttacattaggttattctgtctctctttactgagtgaattccagaaatgggatgagagaaagcaaaagccctttatttacacggttgtgagtgcaggcgaggctggagaaaacagtgatataagagatctttttatcagactgatttaaagacaaccacgtaaattacctaaactgttgtcatagggatattaaatgtgaacccaagttcacggagcacggtaaagaattagtcctgtgtgactctgcctacctttcaagagaaacaatagcttatcctcagaacttggagagacacatcaacaaatgtctcacaattaatacatttggcctaatgttttaggacaagacaaatatttaatttgaacaagagatgtaaaagttaggaat

SEQ ID NO: 306396 - DNA, 482 bp, Homo sapiens
taaactgtggctcctcaactgggcattgtaactgatcatcatatgatttagtcattgtgttgtgtgagtgatcactaccatttctatgttctttgttgtccaagtcaaaaatacacgtgtggcagaagtaatttgtccagagtactcagagaaaagaatttctactcagttgcacagagtaaatgaaagtaatttactgaaagtctttgcctggtattattttggtatgtagtccaagacatgattagaagaacctgtacatgccagatatgtcattaattgctgtgtcaagtcttcaacrgaattgtgattgatgctgccagcttgcaggatctgacttcccttagagcattcggtatctttttgtatttattgcaacattctgctttaaaatttgtacagcaatgtttctattattgacttaaatcttacaaattcttgtctttacaacctatgagatgcttctgaaattaaacccccaa

SEQ ID NO: 306397 - DNA, 572 bp, Homo sapiens
tatatgatttagtcaggtgaacagatctgaaggatatacagagattttctgcatcaggaaggaggatatgttcaacctacaaacatttggcctcagatcttttatgggagaaaaacaaagccaaaaagcccccaaaatgatcatgaatattctcaaataaaattccaaaatggcagagccaattttcacaagttcctttgcttgctaaaaaagcacaaagtacaagcagacaagcaaatgtttcagaatttgtgttttccataaatacagaaatcttgtaattatctcaagaaccatacattatttatttagttccatgccttaatgaaggaagactcaatgtttatcatattaaaatgggaagttgaggggtaaggtggggaggagaaaaagcatggttcttttcctaatgaatctggccttatgtttcttcaattttttatcagcaattttatgctctgcaggtagtaaacataaatggtgacagccaaacatgcattttgcatcataacaaacccrttggatctgcaaacagttgtttaaggtgcttctttccatcaggaaaaacaata

SEQ ID NO: 306398 - DNA, 532 bp, Homo sapiens
gcataacatgttatatttacatttatgtcgtgtcttattactaagtctgtataaaccatctcccttcattatttctgaatgggagactgatgataagtgctgttttcaagatttttttaatcctttttatttgtctagctaatttgtgtgctgaagcattgcaaagctaactctatgttttrctcgttaagttattagggatttgtaactcccgaaaatcaagaatgagttcctaagtgtaacatttgcatgggtcgacagcttcaggggagagaggtcagctgccccagtgaaggaagaagaaatctgtctgtacgatcctaatttgctttgaataatagacattgggcttggaattggaatgatttgttgttaggttaagcaacagggaagcttatggcttatttttactcctgatacaagtgaagcaatggttgagtaatgagacagccatagataatcataatgatactaggcaatgaattgtgtgtgcctgggcgatagcgcaggtttatcagactatgatggccaa

SEQ ID NO: 306399 - DNA, 581 bp, Homo sapiens
acataatgtaagctaagcagtcagttattagagtcatttacaatattaatagccctgagcagaagtacaaaccatagstctgtatactctgctgctgaatttgccagttacaaactggggttctattgcttgactccatctttgccatatgttctgttattggaaattccataaaattttattttgctatcttttatgaagcatagaccaaagagcttaaagatatttcatcaacctagaaaaaaatgcaatactgtgagaatatgtagacacatgtatgtgtgtgcaggtgaacaggctaatttcaatgggatacaaccaagaatttgtttcctttttctctaccactattttaagaaattctctgttagacctgctttctgctctcttggaaaatacctcaggaagtttccctatagcttttatattgtcacttttgggtattagaacagtattattttcagatgtgaaaatatccaatccaatttaaatcaaaacaaaccatttcaaagcacctttccctaccccagcataagcaactggcttgcaactagagaaccacaaatgggtaaatgattgca

SEQ ID NO: 306400 - DNA, 581 bp, Homo sapiens
acataatgtaagctaagcagtcagttattagagtcatttacaatattaatagccctgagcagaagtacaaaccataggtctgtatactctgctgcygaatttgccagttacaaactggggttctattgcttgactccatctttgccatatgttctgttattggaaattccataaaattttattttgctatcttttatgaagcatagaccaaagagcttaaagatatttcatcaacctagaaaaaaatgcaatactgtgagaatatgtagacacatgtatgtgtgtgcaggtgaacaggctaatttcaatgggatacaaccaagaatttgtttcctttttctctaccactattttaagaaattctctgttagacctgctttctgctctcttggaaaatacctcaggaagtttccctatagcttttatattgtcacttttgggtattagaacagtattattttcagatgtgaaaatatccaatccaatttaaatcaaaacaaaccatttcaaagcacctttccctaccccagcataagcaactggcttgcaactagagaaccacaaatgggtaaatgattgca

SEQ ID NO: 306401 - DNA, 581 bp, Homo sapiens
acataatgtaagctaagcagtcagttattagagtcatttacaatattaatagccctgagcagaagtacaaaccataggtctgtatactctgctgctgaatttgccagttacaaactggggttctattgcttgactccatctttgccatatgttctgttattggaaattccataaaattttattttgctatcttttatgaagcatagaccaaagagcttaaagatatttcatcaacctagaaaaaaatgcaatactgtgagaataygtagacacatgtatgtgtgtgcaggtgaacaggctaatttcaatgggatacaaccaagaatttgtttcctttttctctaccactattttaagaaattctctgttagacctgctttctgctctcttggaaaatacctcaggaagtttccctatagcttttatattgtcacttttgggtattagaacagtattattttcagatgtgaaaatatccaatccaatttaaatcaaaacaaaccatttcaaagcacctttccctaccccagcataagcaactggcttgcaactagagaaccacaaatgggtaaatgattgca

SEQ ID NO: 306402 - DNA, 596 bp, Homo sapiens
agtcttcttttctcatgtccatgcattacagctattttacatggctgtgggaagccaggaacaccaccagctttcttttacgacaaagtgacaaataacccaatttaaaaactgggcaagagatctgaacagacagttctccaaagaagacatacaaatgaatartaagtacatgaaaagatttatgacatcagcagccatcttgaaaatgcaaatcaaaaccacaatgagataccactttgcattcaacagaaggggtatcatcaataggacaaataatagcaaatgttgaccagggtgtagaacatgggaatcttcatacattgatggtgggagtgtaaagtaatgcagccactttggaaaacagtctgggagtttctcaaaaggttaaagatagagttaccatgtgatcaaaaaattccatgcctagacagggaccccagagaaatgaaaatatatgtacacacaaaaacatgtacacaaatgttcatagcagcaaggtgatggctaaggggtgaggagcttcttttcaggggtaatgaaattgttctgaaattgattgttgtgatggttgcacaactgtgaatatattaaaa

SEQ ID NO: 306403 - DNA, 436 bp, Homo sapiens
caaaattctgacctttgaagaaatggaaaactcacttttcttttttctttttgagacagggtcttgctctgtcacccaggctagagtacagcggtatgatcaggrctcactgcaatcttaacctctagggctcaaacaatcctcccacctcagcttccttagtagctgggactacaggtgctcaccaccacgcctggctgtttttttaaaaaattttgtacatacagagtcttactgtgttgcctagcctggtcttgatcccctgggctcaggtgatcctcccacctaggcctcccaaagtactgggattacaggcatgagccaccatgcccagcccaaaaaatactttttaaaatttctaattaattttctcagagagactaaagaagctaagatatgcataaaattcaaatgggccacaataagaaaagagcaa

SEQ ID NO: 306404 - DNA, 535 bp, Homo sapiens
acctgtggaattagatgcacaggtaattctgcccatttttctttctttcctcatgctttagcttttcattatgcttgactaccaaatggagaaaaaaaggaacttaaatttggaggcaatttagaataatggaaagttcacagagtcaaaaagaaccagcttgaagggatcatgactcccaagctgggttgtcttgggcaaattacttatctgtctgaatttcagtccctttacctgtaaaattttgaaaataaaactctccctacctactttacaatatttttttgagaaattagttaaatcatatattaaagacatttggtaaaatgctctgcagattatcccaggtatgctaagcaaataggtaattctgagaaacttacttcaacatttttatcctgggccttygtttcctaatgcctaaagagaaaattaaaactccctaatttgaaaccaatttatttttatggtgatctacttacctatttctgacctcttctttaactttcaattcatggataatttcttacaagtt

SEQ ID NO: 306405 - DNA, 617 bp, Homo sapiens
ctgtggcctttgtgtctcatggcatctggtagagatttctgtacttggacatcccccgaaacacattttaagctcagtcttgagccacagggcttacatcctaaatacccatcacttccaaagaaatgttttkgtcagtagcttgactgactctgaggcggattgtttccatcatcagtagccaagtgaagatctgttttgcctttgcctgttgtgctctgtgagcaagaattcccagtctttgacacagggaggcatatttatgacatttggcttctttgttcaacagatttttcctttctgtgtttatgagagttagcatgaaacagtgctctgatctactgggttccttttctttgaagcactttgtgttctttgcatttactctggcccttgttatgaggagctagaggcatagaagccctgttctagagttgcttgactgcttttatgtccatttataaaagctttccaaatcaagagaatcatgtatttgttatttatgggtccatgaaatacccaagtaattaaaactagccattttaccattaatcaagcatggaaaccacagtgttttgtgatgtacagtcatttcaacatcagcctacagttgcaca

SEQ ID NO: 306406 - DNA, 567 bp, Homo sapiens
tagtttatgatccactgtggaaccttgttatcttttttcttacttataattcaataaatctttcattttttatatttaaagtttatttttttctctccaccagttaattgcttatgcttttttccaataaccctctctatratttttttcacttgttccctctaacttttcctttttacgctggttgttctctcttgcttaaattcccatcacaatgtcttggacagtatcagaacctcaacaatttcttcagaatacaaagataattgaaataattatatgtccatttaatttccttaagcaaactcttaataaataagattagtgagtttttacaaagaaaaaatgtctttaaaatattaacattaccctaaaaggtagatatttttttcttccaaacaagaagacttggctaatgtggcaggtatgtgtgaaagagagagaagagaggtgttggtgtatggaagtaagcataagttaacttctagaaaactggaagcatttggccttcacccttttcttacctcggaaaggacctgagatttacgattttcctcacaactgcac

SEQ ID NO: 306407 - DNA, 555 bp, Homo sapiens
tatgtaattctactattgccttaatactgtcctgtgaaagcaaagaaaaaattggaagagaaaattatgatttaataaactgattttcaataccaatcatcaaattttaaaaaatagccttactttgtgcaaaatgatcattatttgtgctatcttgcttacttaaaaaaagagatcacaagaaatatatatacattttttttttaagacggagtcttgctcttgtcacccaagctggagtgcaatggcgcgatttcggctcactgcaacctccacttcctgggttcaagygattctcctgcctcagcctcctgagtagctgggattaccgatgtatgccaccatacccagctaatttttgtatttttagtaaagacggggtttcaccatgttgtccagtctggtcttgaacttctgacctcgcgtgatcccacccgcctcggcctcccaaagtgctgggattacaggcgtgagccactgtgcccggccagagatcacaagaaatattatgaaactgcttgaactcttagtatctattcatctccaaactaacct

SEQ ID NO: 306408 - DNA, 669 bp, Homo sapiens
ggtaattacacactgctgacactatgacatcatgggcaaaatgagattctttttttcctccaaggccaaaatggaattgactggctcaattaaagccacccctccatgagatcactaagaacaagtggcccaaagatatttattaaacaggagaatctttaggaccatccccattcttttggggatgagggtgaaatttaagtcaatactgagattatttgaaggtcataatttcctcatatgtgctatacaaatggaataatccctccgagattaagttttccatggatttaaatatgaaagtattcccatttcatctcttggttctcaagaaacagtgtattttctcatttagagttttattctcttggaagagcaaaaatatctcaatcacaacaaatacattctaaaaccttgaagtttgaaatgaaaattgtgatggtatttcaatagactctatcattgaaacactgattaatgtggtaaccacattaatggttaatagctaggtataatgattaatagctaggtaaccaccaggtaagcagtgcatatataacactgcaacactacttcccaaataatgtctcaagacgtgtttttmtttttaaatacagataagcatataagtactcaataagtatgatcattattatctgttattgaaaa

SEQ ID NO: 306409 - DNA, 457 bp, Homo sapiens
aatagagggaagaatcatgtcaagacacatgtcataattgtattaaaggtcaatgaggtttaaagaaattgggctctactcatcaataattggcccacaatttgtgccaaggtatagggtgaaatgctattcacctgaaacatctctaagtttattctacctattgttggcacctgagggaactataactaaacatatgcttagggtctgaaagtcagcgatcaacaaagactttctcttaagaaagtaagaggtaataattcagcaagaaacttgcacagtccaccttcttcatcacaaaagatgttaaagtagactcttggtgttcgcagacctaacagtgagggacttactgttagcaagctcaaagatcttcgctrtcatgcaatttgcaactttgctgaggcatgagtttaaatttcaggtgatataaagttggtgtagaaaaattggcaca

SEQ ID NO: 306410 - DNA, 457 bp, Homo sapiens
aatagagggaagaatcatgtcaagacacatgtcataattgtattaaaggtcaatgaggtttaaagaaattgggctctactcatcaataattggcccacaatttgtgccaaggtatagggtgaaatgctattcacctgaaacatctctaagtttattctacctattgttggcacctgagggaactataactaaacatatgcttagggtctgaaagtcagcgatcaacaaagactttctcttaagaaagtaagaggtaataattcagcaagaaacttgcacagtccaccttcttcatcacaaaagatgttaaagtagactcttggtgttcgcagacctaacagtgagggacttactgttagcaagctcaaagatcttcgctatcatgcaatttgyaactttgctgaggcatgagtttaaatttcaggtgatataaagttggtgtagaaaaattggcaca

SEQ ID NO: 306411 - DNA, 560 bp, Homo sapiens
ttgcttcttcattttctctccktttctagagccttctaaccatgtctcaggtgtctcttttgctcctttccatattttttctacctttttcttcttttgcttcattctggattattttcttctgacctgtcctttttgttctcttttcatttgtctctgttaaacacattcaatcaccttaacacaataagagtttgagagtatcctaaatgaaatttagttatctaagggtggttcacacatactctgatggtataccattttggagtccaacaaaagcctgggggtggggtttggtgtggttactttctagagcctcttcccctgggtgggccccatatatcactttttgtcccctaaccctgtgatctgttgaaagctctgtccagaaattacctccatgttaaatgatagcaaagtccagttgtctgtcttttttcctttttttagaaagtttttgtttcaactgtgattttctcttttctttagtactttactttctgttttctgacagtttagcttatctgaattatggagtctagaccttctaacacttcttc

SEQ ID NO: 306412 - DNA, 595 bp, Homo sapiens
tcccatgcaactgaaaatccatgtataactttgagtccccccaaacagaactactactaatagcctactgtcaaccagagccttatcaataacataaacagctgattaacacatattttgtatgttatatgtattayatactgattcttaccataaagtaagatagagaaaagaaaatattattaagaaagtcacaaggaaaagaaaatatatttattgttcgttaagtggaaatgcatcatcataaagttcttcattcttgttatcttcacactgagtagactgaggaggaggaggaagaagaggggttggtgcttctgtctcagagtggcagaggtggaccaaagtggaccatgcccttcaaacccctgtcgtgaaggatccactgtaattcccatcccatcagacactcctagccacaggaaaaataagtaggaatagtaaaagttaatttagagagaactgctgaataattatttgttaactgacttcacatttcataggaaccaacactaacatttaaagtataataatacatttatccctaaactctcaacgtacagccattggttaattatcaccaactccacttagc

SEQ ID NO: 306413 - DNA, 582 bp, Homo sapiens
agctgagaaaagtgaacacagcttaacagtcagaagaagtgttgccaagcctgtcaccaactataaaagcccttcagaagctatttgataagctcttgtgttgattttttctctcttcttctgtcttcttccgatttggcttccactgtctattgatttttttcccttctctctctttgagcatggtctcagtagacaccaaggacattgggtaggactgccaatttcatattttgttcatgcctatgttattcacaaaccttctcaatttttattatattcaaataaaccttatgctggtgaaatgttgcaaggaactcaatgataaatattacattaagcaaaatgtagtttggtatggtgakccaagggctgactttgaagtcacaaagacaagggtttgaattctggcaagtctcttaatctctctaagatgaaatgtcctcatctgtaaaatgggaatgaaggtaagtgacttgcaagattaattaaggattatagataatatatataaacctctcatatcacatgagtgttgaaataaattatatctgtggttattagtgtaatctataatagcat

SEQ ID NO: 306414 - DNA, 610 bp, Homo sapiens
gtcttgctctgcctccccagctggagtgcaatggcacgatctcggctcactgcaacctccacctcccgggttcaagcgattgttctgcctcagcctcccgagtagctgggattacaagctcctgccaccatgcctggctaatttttgtatttttagcagaggcagggtttcaccatgttggccaggctggtctcgactcctgacctcaagtgatccacccgcctcggccttccaaaatgctgggattacaggcatgagcaatcgcagctggcctcaatcatatgttaattcacatattcactcactacctcagcaaatattactgtattactattaatatatgtaagcaattggggattatagtaatagataacatggaatcctcttcaaggaatttacggttagagcattgggaggacaaattattgaataaaaggttacactaaatggcatctaagactctcatctttgaagtctatgcctcaaatgtaaaatwtttttttttaaatgagagtgcccatgctggcaaggatgttatgaagtgggaacttcctacacaactggtgggagtataaacggttacaagcttattctggaaagtaattttgca

SEQ ID NO: 306415 - DNA, 642 bp, Homo sapiens
gagagagcctgtaggctttgaggttgcgtgtgagtttgtgagacagagtttgtctgttagttgcttcctttcagctttgagatttgagcttttcagtgacttacggggaaaagtgttagggcagccaagctcactgctggagttctccacrgagctggaggtgaagtgtgaaaacaaaagctgtgtacccgtggcttgggacaggagtgagcaggtgaggaccagcagggtgggatcagaaccctctagaagacacctgtctagtctctactcccaggctcacagcaggcagctcctgccactttggacttattctgcaaggacagaacaggagctgcggggaaaagttcctccctacaacactggatgctgctttgggaaggaaagcaacatggagaaattatatgactttctcaaagcagatataactgctatctcacattaatagcaaatgccatattgcaaatgccatttattggcagcggcattaaagtgcgttttgtggaagggcatgactacactcttaactctaaaacttgtttgttttcctttaataatttatgacaaatttatccttaatgcttttgtcaaaacactttttgaaactactcaaatgtttcctacctttagaaagcaatggtt

SEQ ID NO: 306416 - DNA, 642 bp, Homo sapiens
gagagagcctgtaggctttgaggttgcgtgtgagtttgtgagacagagtttgtctgttagttgcttcctttcagctttgagatttgagcttttcagtgacttacggggaaaagtgttagggcagccaagctcactgctggagttctccacggagctggaggtgaagtgtgaaaacaaaagctgtgtacccgtggcttgggacaggagtgagcaggtgaggaccagcagggtgggatcagaaccctctagaagacaccygtctagtctctactcccaggctcacagcaggcagctcctgccactttggacttattctgcaaggacagaacaggagctgcggggaaaagttcctccctacaacactggatgctgctttgggaaggaaagcaacatggagaaattatatgactttctcaaagcagatataactgctatctcacattaatagcaaatgccatattgcaaatgccatttattggcagcggcattaaagtgcgttttgtggaagggcatgactacactcttaactctaaaacttgtttgttttcctttaataatttatgacaaatttatccttaatgcttttgtcaaaacactttttgaaactactcaaatgtttcctacctttagaaagcaatggtt

SEQ ID NO: 306417 - DNA, 642 bp, Homo sapiens
gagagagcctgtaggctttgaggttgcgtgtgagtttgtgagacagagtttgtctgttagttgcttcctttcagctttgagatttgagcttttcagtgacttacggggaaaagtgttagggcagccaagctcactgctggagttctccacggagctggaggtgaagtgtgaaaacaaaagctgtgtacccgtggcttgggacaggagtgagcaggtgaggaccagcagggtgggatcagaaccctctagaagacacctgtctagtctctactcccaggctcacagcaggcagctcctgccactttggacttattctgcaaggacagaacaggagctgcggggaaaagttcctccctacaacactggatgctgctttgggaaggaaagcaacatggagaaattatatgactttctcaaagcagatataactgctatctcacattaatagcaaatgccatattgcaaatgccatttattggcagcggcattaaagtgcgttttgtggaagggcatgactacactcttaactctaaaacttgtttgttttcctttaataatttatgacaaatttatccttaatgyttttgtcaaaacactttttgaaactactcaaatgtttcctacctttagaaagcaatggtt

SEQ ID NO: 306418 - DNA, 533 bp, Homo sapiens
tataccttttttttagacagagtcttgcttgtcaacacccaggctggagtgcaatggcgtgatctcagctcactgcaatctctgcttctcggattcaagcaattctcctgtctcagcttcctgagtagctggtattacaggcatgcaccaccatacctggctaatttttgtatttttagtagagatggggtttcaycatattgaccaggctggtcccaaactcctgacctcaggtgacccacctgcctcagcctcccaaagtggtgagattacaggcatgagccaccgcacctggcttggttatacctttttaatcctttactttcaatctgcattttaattgtttaaaaagtgtctcttgtaaaaatgaagtatgcttatttctacccacataatgaaaatcccattttaatctttccgttatggtagaaatccttccaatatggtttggctgagtccccacccaaatctcatcttgaattgtagttcccaaaatctccacgtgtcaaggtagggaccagatgcaaggtaat

SEQ ID NO: 306419 - DNA, 533 bp, Homo sapiens
tataccttttttttagacagagtcttgcttgtcaacacccaggctggagtgcaatggcgtgatctcagctcactgcaatctctgcttctcggattcaagcaattctcctgtctcagcttcctgagtagctggtattacaggcatgcaccaccatacctggctaatttttgtatttttagtagagatggggtttcatcatattgaccaggctggtcccaaactcctgacctcaggtgacccacctgcctcagcctcccaaagtggtgagattacaggcatgagccaccgcacctggcttggttatacctttttaatcctttactttcaatctgcrttttaattgtttaaaaagtgtctcttgtaaaaatgaagtatgcttatttctacccacataatgaaaatcccattttaatctttccgttatggtagaaatccttccaatatggtttggctgagtccccacccaaatctcatcttgaattgtagttcccaaaatctccacgtgtcaaggtagggaccagatgcaaggtaat

SEQ ID NO: 306420 - DNA, 533 bp, Homo sapiens
tataccttttttttagacagagtcttgcttgtcaacacccaggctggagtgcaatggcgtgatctcagctcactgcaatctctgcttctcggattcaagcaattctcctgtctcagcttcctgagtagctggtattacaggcatgcaccaccatacctggctaatttttgtatttttagtagagatggggtttcatcatattgaccaggctggtcccaaactcctgacctcaggtgacccacctgcctcagcctcccaaagtggtgagattacaggcatgagccaccgcacctggcttggttatacctttttaatcctttactttcaatctgcattttaattgtttaaaaagtgtctcttgtaaaaatgaagtatgcttatttctacccacataatgaaaatcccattttaatctttccgttatggtagaaatccttccaatayggtttggctgagtccccacccaaatctcatcttgaattgtagttcccaaaatctccacgtgtcaaggtagggaccagatgcaaggtaat

SEQ ID NO: 306421 - DNA, 569 bp, Homo sapiens
tgtgagaaagtgagagttaaaaaggcacataatgtcatagtgttagtaggaaaatagttttgacctatgaccttctggaaggggtcttgacgatcctcagaggtttaagagcacaatttcagaacaactgccctgggacattgtagacatctgcatgttgaaagctaggtcactgccatggccacgttccagctgattggaaggggaagagagtgcagaggatctatgctcaaawtcttttttaaactttttttattttaacttttgtgggtacatagtaggtatatatatttaaggggcacatgagatatttggatacaggtgtgcagtgtgaaataagcacatcatgaagaatgggatatccatcccctcaagcatttatccattgagttgcaaacaatccaattacactctttaagttattttaaaatgtacagttattattgactatagtctccctgttttgctatcaaatagtaggtcttattcattctttctaacattttttgtacccattaaccatctctgcctccaccccccgacacatccgcaaccccttattaccgacc

SEQ ID NO: 306422 - DNA, 587 bp, Homo sapiens
atccgcaaccccttattaccgacccttcctgacctctgataaccatccttttactgtctatctccatgacttcaattgttttgatttttagatcccacaaataagtgagaacatgtgatgtttgtctttctatgcctgtcttattttacttaacataatcacctccatccatgttgttgcgtatgacaggatctcattcttttttatggccaaacagtactccgttgtatatatgtaccatattttcttttcttttcttttttttttttttgacatggagtttcattcttgttgcccaggctggaatgcaatggcacaatctcggctcaccgcagcctctgtctcctgggttcaagcgattcycctgcctcagcctcctgaatagctcagtttacaggcatgcaccaccacgcccaactaattttgtatttttagtagacacggggtttctccatgttggtcaggctggtctcgaactccagacctcgggtgatccacccgcctctgcctcccaaagtgctgggattacaggcataagccaccatgcccggccttatgtaccacatttgctttatccattcatctgt

SEQ ID NO: 306423 - DNA, 570 bp, Homo sapiens
tctcatgaatggtttagcagcatcctcccttgctcctgtataatgagtaagttctcacaagatctagttgtttacaagtgtgtagcatctccccgcctctctttcttcctcctgctccagccatgtgaagtgccatctwcccctttaagattccgccatgattgacaccaagcagatgctgccatgcttcctgtacagcctgtggaactgtgagccacttaaacttcttttctatataaattacccagtctcaggtatttctttatagcagtgtgagaatgaactaatacaattgggataatgatggatgtgctccaatttcagtgcttcactattattcgcaacagaccacttgtttcataactatgacaacatgctatggctgagaatctttgctgtgtgccattatagactaaagtttgcatgctaatgtgtttaagaataaacgttactaaaagttgctgatttgtaaacttgcagattcttgggttccgctcaccagaaattctaattcagtaattctctcagggagactggacaatacacattttttaacaagacatgtacttg

SEQ ID NO: 306424 - DNA, 474 bp, Homo sapiens
aagcctagctctgttcttgcctgctggtggctttaagcaagttatcatctgagccttggtttccttacctgtaaagtggaataatgacagctaatcttggggagtaaagtgataacatgataaaaatcaggaataaaatgtatacattcaaatataaatactattgtagaaacaatatactttgcttgtaccaaaaacagaaaaaaaatacagaaatggtggaaaaaccagatcagtttaacatcaatcagtgtctataaatacaatagaaagaagaagtctggatctttgcaacatttggggtcacagaaataatttttttggtacacatttggaagagaactagccagcatcattatgaaggaaggtctgcataggttcttaaaaggcagctgggracacgaaaccactcctcacatgaaaatcacatggaagtgaatatacaagcctaattaggacagggaagaaggcagc

SEQ ID NO: 306425 - DNA, 609 bp, Homo sapiens
aggtaaatggaaactctgatgctaaaaccaagtttctctaatttgcacatctgttctttatccactgtgcctcactgtatattttgcattgcttctatttttggttctttttaaataaattttttttatttaattagaaaaatgtcagtacaacaattccttcacttctaaataacagccttgtkgacttaagggttgtaaatttcaagactgtgagaatgagtaaagaaaagtgagaaaaaaagccatagggccctgaaagtctttacatgtccaagctggaaggaatcatttcactgatattgccaacacataaacctgctatgggagccaaacacatttgcagagttgtggataaagggctggggtgcagttattcttaatggagatgatggccatctgtctcacccctcaaatgtcagcctaaattccaaccagaatcatgagaactgtcccagccccaggcacagtgactgaggagaaaaagctagttcacctgcttccccaagatgatactgactgtaggaaaagaacagaagcaaaaaatgtattcatttaccattagatttcttcagtgatttttacctttccccttcatcttccccaaag

SEQ ID NO: 306426 - DNA, 612 bp, Homo sapiens
aggaatggtgctactgcctctatatcgcattgcccttcactacacctagaaaacatactatgggccaacatgtaagaaaacaggcaaatttattctttccacctatgagcccccaaaaatgatcatagtaacggaaacgcagatttttttccttttgtttcagactagtgaagctatttccctttaccctccctcaatctcacttgttcagagatgtgactcattttctaaccctgttcaactcaacactacattccaatcacctgattccaatcacattattaaaataaagtaatatctgttgggtcggcatggttcccactagttatattcattatcctttgacaggtaacaygggggatcaaaatgctgccatccaactgggaaacatccttgaaatacgagtgaaaatctcaacctgcgttttataggccagagctctgctgatggaatgctatcaaacagatcgatgcctgcatttccttaattaatgataatctcaccaggggagggggagtagatattgttttaatctttgtaaaacttttctgcaaacactggagctctcttgagcattcacagggatagagcaagcccttctcctgaataata

SEQ ID NO: 306427 - DNA, 604 bp, Homo sapiens
ctactactactactaattctactaatattgctgcgacaattacttgtgggcagacttaatcataggatggtggttacaactgaattgagacagatgttatcaagatgattaaatagaggtgtccagcactcacctccctgacaaaggaccacaacaaccagtagataaccacaaatcaaacagagtatttaaggaagaatactgggattcagtagagaagttatgaagaccttttagggtacagaaacttaaaaaggcattacagagagaaaagcaaagcacccggtatcaatttgtttyaagccaagaggaactcccattgtgggaaaaaagaaagtgggagattgccagcagccatattctcaccatggacaccaacaattctaggtacagaagagcctcacagcccttacaggccctgatcccagcatagggagcatttggagtccaagcaacttcatatttcctgagagggaaaacacactgagtcctttgcactcccctggatccaggatgctgaagcacaataccattttaagagcagagctgccaccagaatgtatccattcataggatccagtagtccctgcatgtccatattcct

SEQ ID NO: 306428 - DNA, 635 bp, Homo sapiens
acaacaaccagtagataaccacaaatcaaacagagtatttaaggaagaatactgggattcagtagagaagttatgaagaccttttagggtacagaaacttaaaaaggcattacagagagaaaagcaaagcacccggtatcaatttgtttcaagccaagaggaactcccattgtgggaaaaaagaaagtgggagattgccagcagccatattctcaccatggacaccaacaattctaggtacagaagagcctcacagcccttacaggccctgatcccagcatagggagcatttggagtccaagcaacttcatatttcctgagagggaaaacacactgagtcctttgcactcccctggatccaggatgctgaagcacaataccattttaagagcagagctgccaccagaatgtatccaytcataggatccagtagtccctgcatgtccatattcctggggtcctgctgccatcccaccacatacacccagaaggttgcagcatcgtgacatgagatggacacagaaatgataccattaccatagcatctgagcctgtgtagcaccctatatcccatgggacaggcaattcagcacagcaaagaggcttaccccaggacagagggagccaacacacaa

SEQ ID NO: 306429 - DNA, 489 bp, Homo sapiens
tctgaatgagaaattcaacaaagagatagatattgcaaaataaaaccttgcttcaaaagaaatcttgaaagagaacaattcaatgaatgaaataaaactttaattgagaatgtcaataataggctagttcaagcagaataatttctaaacttgaagacagctcttttgaagaaactcagtcagacaaaaataagaagacattttaaaagaataaattaagcctaaaaggacatatgggccaccattaagtaaacaaataygtgaattttggaagttctaagaagaaaagatgggaaatggcatagaaaacctatttttaaaaaatagccataggctgggcatggtggcacatacctataatcccagcactttgggaggctgagacaggaggatagcttggagtttgagaccagagtgaggaagatggtgatgtgccatatctaccaaaaaaaaaaaaaaatctgggtatggtggcatacaactgtggtc

SEQ ID NO: 306430 - DNA, 547 bp, Homo sapiens
gaatttcttataaaattaaggaaacataaatcaagtcaaacctgacattggtgtgcagagataggacagtatgtaattcatgttcttaatccagtagacaccatctgccctttgaggtcagggaarcagtgatttaggatggggccatggccagtaatttccagaagttgtgtgtttgaaggacacagaatagtttacctcttcccagaaaatcatttctaggggcttctccatctttccaaagttgctacctttgtaacttctttgaaacaaagttattattgctctatcagaccatatatgtcttatccatacttccggccccactcgagaactccttctttcaggaaggacctcaccctcataatacctctattttttaatataaccagtttatcaattaaacatttatttatcttcttcactagtgtgcaaactccatagcagaatgcttgtaatatatcttagccttcccaactttcaacacatagtaggtattcaataaatgtttattaaatagatacagaaataagtgatgggttaattt

SEQ ID NO: 306431 - DNA, 416 bp, Homo sapiens
atggatgggctgaatggattttttgtaagacccaactacctgaagttcataagaagctaatattgcctgtaaaaacacacaccatctaaaagtaaagggataaaaaatatattccacacaaatagatatcaaaagtgagcagaagtagctatgtttatatcagaagaaatagatattaagtaaaaaaaagaaaaaagaaagacaaagaatctcattatataatgataagggaatcaattcagcaagtatatataacaattgtaaatacacatgcatccagcactggaggacccaaattcataaagcaaatgttactacatctgaagagagaaagagaaagagagagagagagagaagagattccaatacartaatgatagggggcttgaacaacccactctcagcattagatagat

SEQ ID NO: 306432 - DNA, 547 bp, Homo sapiens
gaatttcttataaaattaaggaaacataaatcaagtcaaacctgacattggtgtgcagagataggacagtatgtaattcatgttcttaatccagtagacaccatctgccctttgaggtcagggaagcagtgatttaggatggggccatggccagtaatttccagaagttgtgtgtttgaaggacacagaatagtttacctcttcccagaaaatcatttctaggggcttctccatctttccaaagttgctacctttgtaacttctttgaaacaaagttattattgctctatcagaccatatatgtcttatccatacttccggccccactcgagaactccttctttcaggaaggacctcaccctcataatacctctattttttaatataaccagtttatcaattaaacatttatttatcttcttcactagtgtgcaaactccakagcagaatgcttgtaatatatcttagccttcccaactttcaacacatagtaggtattcaataaatgtttattaaatagatacagaaataagtgatgggttaattt

SEQ ID NO: 306433 - DNA, 519 bp, Homo sapiens
ggtatgaaatatgtaagtgttgagggaaaaaaagcaacttagaatgctgcacccagtgaaattatccttcaaaagtagaggagacataaagccattttcagacaacaaaaattgagggttttgtgccaagcagacctaccttacaagaaatgttgaaggtcttcatagaagaggaaaatcatatagttcaaatcatggatctacataaagaaagaaagagcatcagcgaaagaattagcaaaattaaaattaaaacttttcccttatcattaattgatctaacagataacagtttgttcaaaatcatagcaacaatgtattcgattatatactcttatayaaaagtgaaatgaatgacagcaatgatacagtgatgggagagagaattaggcttcttttgttatcataaggttcttgtactctctatgaagtagtatagtattatctaagggtatgctgggattaattataaatgtatattgaaaactctgtggcaatcgctttttgtttaaaaaaaag

SEQ ID NO: 306434 - DNA, 588 bp, Homo sapiens
tgacaattagacactcctctttctgaaataaacagagtctgctggcagaaaattcttaaggacatagcaataataccacattaatcaactggatataattgacatctatgaactacatcattcagtgacagcacaacacacattcttctcaagctcacatggaacattcatcaaaataaaccatgttctgggtcataaagcagaccttagcacatttaaaagaacagaaattatcatacaatatctgcattcatgccacaatagaattaaaatggaaatcaataacagctggagaactccaaaattattggggattaaacarcacacttttaagtaacctatgggtcaaaacagaaatctcaaaagaaattaaaaatattttaaactaaataaaaataagataaaatttttcaaaatttgcagggaaggctgtgcttagcattgaatgcacatattagaacaaaagaaagattggagagtaatgatccaagcttccaccttaggaaactagaaaaaaattagatccaaaataagcaggagaaaacatataataaaaattagtgccaaaatcaatgaaactgaaaacag

SEQ ID NO: 306435 - DNA, 529 bp, Homo sapiens
ttggtttataaacctagacaggccacatctagagccccagttcttagcaatgtaaactgattaggtacctgacatttgctaatggcttggcaaataatagctactattataatcatttaaaatggaattggtatgtggtagaaggaaagagctgattcaaataattgagatagaaagatgtgggttggtatttttaaattaaccagatatcagatgtagaaaggaaataycacaattaacctttggatttaggatacatagactgatggtgctgctgctgctatctcttgattatccaattgtatgatttacaatgaaagagtcaaataagcttgatctctgccacatgtcttagacatttttagtaagacacgcccaagaaaaagatgactgggttctgggggcccgtccttacctttatagtgaaacctgccctctgttaacttagtcctcagaagcaaagtcagtatcagggtcgtgggccagaagtaccaggagtagcacatgtgttaatttttgtattccaaca

SEQ ID NO: 306436 - DNA, 529 bp, Homo sapiens
ttggtttataaacctagacaggccacatctagagccccagttcttagcaatgtaaactgattaggtacctgacatttgctaatggcttggcaaataatagctactattataatcatttaaaatggaattggtatgtggtagaaggaaagagctgattcaaataattgagatagaaagatgtgggttggtatttttaaattaaccagatatcagatgtagaaaggaaataccacaattaacctttggatttaggatacatagactgatggtgctgctgctgctatctcttgattatccaattgtatgatttacaatgaaagagtcaaataagcttgatctctgccacatgtcttagacatttttagtaagacaygcccaagaaaaagatgactgggttctgggggcccgtccttacctttatagtgaaacctgccctctgttaacttagtcctcagaagcaaagtcagtatcagggtcgtgggccagaagtaccaggagtagcacatgtgttaatttttgtattccaaca

SEQ ID NO: 306437 - DNA, 529 bp, Homo sapiens
ttggtttataaacctagacaggccacatctagagccccagttcttagcaatgtaaactgattaggtacctgacatttgctaatggcttggcaaataatagctactattataatcatttaaaatggaattggtatgtggtagaaggaaagagctgattcaaataattgagatagaaagatgtgggttggtatttttaaattaaccagatatcagatgtagaaaggaaataccacaattaacctttggatttaggatacatagactgatggtgctgctgctgctatctcttgattatccaattgtatgatttacaatgaaagagtcaaataagcttgatctctgccacatgtcttagacatttttagtaagacacgcccaagaaaaagatgactgggttctgggggcccgtccttacctttatagtgaaacctgccctctgttaacttagtcctcagaagcaaagtcagtatcagggtcgtgggccagaagtaccaggagtagcacrtgtgttaatttttgtattccaaca

SEQ ID NO: 306438 - DNA, 536 bp, Homo sapiens
tagttgctttggattagtttggcattagcagaggtaccctaatggaaagttaagctacgcaggcaatagtcttcaagttaaggcctctactgacaaggatttatccctcttgggcctccctggggcaggccagctatgttagcattcctagtaccgtttgacgagtatcttaagtgtgtgtgccacagaggaatacagaaagagcttgacagcatctctgttgtcaaagaacctgaaatactgttgtaaagggataaagatatgaacacataaaccattcagaaaaaataattccagatagctcttgatcaaatgccaaaacccattatagaaccaaggcatattcaatatttggttgtggttgtgcatatgaatgaagaaggcttctcagaaattgcacwacctcacctggccctgcagtgattttaatagatcatgagaggtcgccggggggagggtggatactgggagagactggtatttcagtcagaagaatgggaatagcagggttttatcaggaaaagcatgtgttcctt

SEQ ID NO: 306439 - DNA, 618 bp, Homo sapiens
aaattgcacaacctcacctggccctgcagtgattttaatagatcatgagaggtcgccggggggagggtggatactgggagagactggtatttcagtcagaagaatgggaatagcagggttttatcaggaaaagcatgtgttccttcaggtgatagattcatggaaggaaaggacgagactgatggttttatttttgaagtcaagctgcctctgcttttggtggatatcacttaacagggtttatgagccttacttcaatcagttccttgagttgctgatgaacagcgtgggctcaacttctccctgtgggctattagtgtacttttcacccactgaaagttaattagaggaaacaacccccctgcacacctttcacactgattcatctgtaaggagccagtaaattggattggggaccagggagaattttacttgagatattttctttctgccgagaaattgccaaaatagaagaccttgagtttctgagttgtagcagaaaggttttctttytaaaatttgtatgcatgataggcccagtgataacataattagttatattacattaccttaggggccacattgtggtcctggaacataaattctgcatatggaaaa

SEQ ID NO: 306440 - DNA, 569 bp, Homo sapiens
caggctttgactcagggggctgggtggatgatggtattactaaccaagaggtttctaagcaaaggagaatctggtcatgggagtggtacaagtcatttgttcagtttggacagattgggtccaaactttagaaaccctaatggaaatgtctaaggattgggtaaatggatgtgtctgaaactctgaggcactgagtgtagagatgtatatttggatgttgtgaagataagagtgtcaattataaatttggaaatatatgaawttacctttgaagagaagagagaatagaactctaggtaaatcagtgtttaaggaaaagtatgtagccaaggaaactgagaagtagttaagaggtaggaaaaacaacagaaacattattttcttgaaatgaaggagacaagttttcagagacagggagagaacagaactgagagatcaagtaacagtgttgtaaaaccccccttggtttggtatttaggagtgcattgtgacccttgccaagaaaatgctggggagaggggacagaagtcagagggctttatattaaatggtgaatgagtgattaggaa

SEQ ID NO: 306441 - DNA, 569 bp, Homo sapiens
caggctttgactcagggggctgggtggatgatggtattactaaccaagaggtttctaagcaaaggagaatctggtcatgggagtggtacaagtcatttgttcagtttggacagattgggtccaaactttagaaaccctaatggaaatgtctaaggattgggtaaatggatgtgtctgaaactctgaggcactgagtgtagagatgtatatttggatgttgtgaagataagagtgtcaattataaatttggaaatatatgaatttacctttgaagagaagagagaatagaactctaggtaaatcagtgtttaaggaaaagtatgtagccaaggaaactgagaagtagttaagaggtaggaaaaacaacagaaacattattttcttgaaatgaaggagacaagttttcagagacagggagagaacagaactgagagatcaagtaacagtgttgtaaaaycccccttggtttggtatttaggagtgcattgtgacccttgccaagaaaatgctggggagaggggacagaagtcagagggctttatattaaatggtgaatgagtgattaggaa

SEQ ID NO: 306442 - DNA, 462 bp, Homo sapiens
tgacatttaactcagcatttttctttgttttgttgttgtttgactttactgtaatgtaagttgggtggagagaggatgcagctaagtggagcaaggattgggattgagtgcctctcagtataagtgggagaaacaagaggtcaggaaatctactgtattagttaactagattaacgtayttgaagatacatccctgcaaaatggattttactggtcagtttgtttgtcttagagtggtatagtgtatgtgttcatttatcttgttccagatatgaccaggttttaagattctgaatagttcctatgtcatagaagaaaaggatgaagctatgcccccaagaatgcatagggcttggaattagtttctaaatgaaattggtagagtgtgaccttcaagatcttcaacctgttagatattactcacagaattattggcggtgatggggctgggtggtgtctcat

SEQ ID NO: 306443 - DNA, 625 bp, Homo sapiens
tgtttatgtatttgccaccttttgcatactatggacaacaatcactagtttatgaatttgttcrgtatacactctttgtgtaattatatgttttaaataattcaatacaacaatttaattgaaacatgaaatgcagaaagacttaaatcacagctggtatatacccaagatgtttatagttaggaagggagacatgtaatactgtgaaagtataataataaaaattggtataattttaaatgattgcactgagaaaggagggattaaacctgtctatgagactgtgagactttactaagttaatgacaccgatgcctgagttttgaacaaagagcaggtgcttgagaaatttggaaacactggtcattcaaacacaagttcacatggggaatgttagggtaatttcaagtaaattggtgtcagaggagtatgagctgtcaaaagggagtggcaggaaatgaagatgggaagacaggcagactcaggtcataatggggtttaccactgtgctaggatctcatccttcagaatttagtttaaaacacaatgcttttacagtcttgttgagaatgggtggagcatggcgggaagatgatctagagacagattgttttaaaaagctttt

SEQ ID NO: 306444 - DNA, 625 bp, Homo sapiens
tgtttatgtatttgccaccttttgcatactatggacaacaatcactagtttatgaatttgttcggtatacactctttgtgtaattatatgttttaaataattcaatacaacaatttaattgaaacatgaaatgcagaaagacttaaatcacagctggtatatacccaagatgtttatagttaggaagggagacatgtaatactgtgaaagtataataataaaaattggtataattttaaatgattgcactgagaaaggagggattaaacctgtctatgagactgtgagactttactaagttaatgacaccgmtgcctgagttttgaacaaagagcaggtgcttgagaaatttggaaacactggtcattcaaacacaagttcacatggggaatgttagggtaatttcaagtaaattggtgtcagaggagtatgagctgtcaaaagggagtggcaggaaatgaagatgggaagacaggcagactcaggtcataatggggtttaccactgtgctaggatctcatccttcagaatttagtttaaaacacaatgcttttacagtcttgttgagaatgggtggagcatggcgggaagatgatctagagacagattgttttaaaaagctttt

SEQ ID NO: 306445 - DNA, 609 bp, Homo sapiens
gtaactacatccctagaggcttaagggaaacatgttaaatcagatcagcttgtatctcagagggagtggaaatctgacacttagacaagtgctgattcttttgagtgcatttccaggttgcactttgctgagttacatagatgtttgttaaccataattgtcacatctgaaatgacccayaagattagcaaagccgtatacatatatcagtcagttttattttaaaacaggctaccaaacattgactttctctcaagcaatcagaataagattgttttcctttccttagtaacaattctcaatggaccaggagactttaggaaacattactgaaatatttcattgtcaatatgtaggctatctactggattatgatctgttttgggtagcagttatttgcaaaatattcacagtattcaacagctggtactattatagaatggcagccagctctagttgatatgtccacatcagctcaggttatgggcagagtatttgccttaaatagagccaaagaactgtctcacctggttgggtgccatattgtaaggcaaggttagcttaaatagatctgttaccttttaatggctgttatgttatgtaaactag

SEQ ID NO: 306446 - DNA, 491 bp, Homo sapiens
tacatatatcagtcagttttattttaaaacaggctaccaaacattgactttctctcaagcaatcagaataagattgttttcctttccttagtaacaattctcaatggaccaggagactttaggaaacattrctgaaatatttcattgtcaatatgtaggctatctactggattatgatctgttttgggtagcagttatttgcaaaatattcacagtattcaacagctggtactattatagaatggcagccagctctagttgatatgtccacatcagctcaggttatgggcagagtatttgccttaaatagagccaaagaactgtctcacctggttgggtgccatattgtaaggcaaggttagcttaaatagatctgttaccttttaatggctgttatgttatgtaaactagcttaggcttacgccaagtactgttactgggtctgcttggtccagatgcttcaagaggcttctcttgactcaggtcttttt

SEQ ID NO: 306447 - DNA, 541 bp, Homo sapiens
ttttctacttcctctgttgttaataggctgttagacagcctcagccagaggaactggatgtagaatttggtgacagcttttgacagtgctatcaacagatgcattgaagttcccagggcaattactgagttgatgttgatgaaaatatattttgaayactgcaaaattgccccttcttgggatttattttagggtctatattaagtgataactgaagactactgagtaaaggcagtgtgaggcaactgataaatagtgaggcatcctttaatacacctcactttaacgatgggagactgtctcagaggaacaaacagagagtctttctaggtgctttaactttcatttcaacccagtttcacaagatctcactgaacttctgtttcatatcataccctgagcttggagctagggatatcatcctgattgtatcagttgcatctattgctatgtaatgactacctcaaacttattggtatcaaacaaccgccattttactgtgctcataaattctgtgggtcaataattcagatagagcccc

SEQ ID NO: 306448 - DNA, 620 bp, Homo sapiens
ctctgcttttccatcactaaaagaacaacacaattactttcctgggaaacagaaatttaaagaacacaggttatcaacaatcttaagaaagctgagatgtcagattcagaagttcagcttctgtggacagacaagataaatgtcaacctcagcttaacctccgkgggggaagatgttgtcacccgaatagttcttttaagaccactccacccagggttaaggatattctcacttggctccattaaaggcctcaggacagggcatgggacacctagtctctttgttgttaatttggagagtgcattctaccctgtaaattagctcatcctagcccagcatgtctgtcatttcagatcattaccattccctctgctccctctcatgtcacacaaaggtgaaagaatatgcttctggaaggcaattcaatgagtgtttgaaggctgtggggcttgctcagctgctctcaaatgtctctgaactccatgcaaccacactgtatcccctcagtggccatctcggcacagctgggctttttcagaaatggctgtgaaatgtactgtgaaaagaagagagagcaaaactctacttaatagcaaatagaaagctcaccaactagatca

SEQ ID NO: 306449 - DNA, 607 bp, Homo sapiens
ttcagaagttcagcttctgtggacagacaagataaatgtcaacctcagcttaacctccgtgggggaagatgttgtcacccgaatagttcttttaagaccactccacccagggttaaggatattctcacttggctccattaaaggcctcaggacagggcatgggacacctagtctctttgttgttaatttggagagtgcattctaccctgtaaattagctcatcctagcccagcatgtctgtcatttcagatcattaccattccctctgctccctctcatgtcacacaaaggtgaaagaatatgcttctggaaggcaattcaatgagtgtttgaaggctgtggggcttgctcagctgctctcaaatgtctctgaactccatgcaaccacactgtatcccctcagtggccatmtcggcacagctgggctttttcagaaatggctgtgaaatgtactgtgaaaagaagagagagcaaaactctacttaatagcaaatagaaagctcaccaactagatcagttcagcttggtcttttcatcaatgttcaccagtgtatctgccacctgaaccgccaaggacttactaacaaacacaagcctggccagagat

SEQ ID NO: 306450 - DNA, 524 bp, Homo sapiens
ttactaacaaacacaagcctggccagagatttttgaaaatggctggtagacaaacacgaatttccaggcagttccacagatctcagctccctcgggcatgtgtatgttaactctcctgctgtccaatttcaaatctcctttctgacccatccccttttctccatgaagtctttttttcrtataaattgagcaaatgttaccttaacattaacctttctcatgatacttaatttatgcctttgtttgctgggcattgaattttttaagccacctattaattcattctgatggtgcaatttccataatgtaatttctttggtagagaggaaatggcttttttctatcatcatattttcttcaggtaccattatgaatgttctatttagtcttgcaattagtcttatacttaacatatgctgacttcacagagacacatttattattttcattgcctaatgctatgaaaagaaattcttggtgtagatcagtagcctatatttttcaggcaattttgataattgaat

SEQ ID NO: 306451 - DNA, 548 bp, Homo sapiens
gcattgaattttttaagccacctattaattcattctgatggtgcaatttccataatgtaatttctttggtagagaggaaatggcttttttctatcatcatattttcttcaggtaccattatgaatgttctatttagtcttgcaattagtcttatacttaacatatgctgacttcacagagacacatttattattttcattgcctaatgctatgaaaagaaattcttggtgtagatcagtagcctatatttttcaggcaattttgataattgaatgaccaggcatatggagaaggagtaagctccatatacatgctatgctcttccctgcaactgatccacagtgttcctttacatggattttctttctctttttcaccacatgtccctctgcaaacctctgactttgtttatctgtctcatatctgcatcccctcagtagtcaacttaaaaataacttcytcaaaccttcctagtccttcaaatttaaactaagaggttgaggttcctcctttctccattggagtatatccacactacattgtttaat

SEQ ID NO: 306452 - DNA, 616 bp, Homo sapiens
tgagttcgaatcttgtttctgccatttactaactgtgtgactattggtagctactaagtctctgttgtctcatctataaatagaataatgaatgtcctttggagatttagcaagaattaaatggagcagtgtgtgtaaacatgtgacacagtcttgcgtgtaaacactccatatgtgtccattaatttctgtgtgtscctgtgtgcattcaatgaacacaaccctgttctttcatgaacattaatcttgttcttgcccttgattttccggtagtctgaagctctatcattgaagttgttccagaacttcatcttagtgtatgtaacataactactcacttacagaccatcttaaagccaaaatctgcttggttcattgaatatttccaactccaaagtcttcttcatggtgatccattccatcgccttgaacctcctcatgtcattgccaaagtttacctggactatgatcattaattattgattcccttggaccctggatttgcccaccagaatgagcactgcctggtggtaacttcagcttccttacatcctgatcatttgtccctaaatattcctacctggtggatctagtgctgccctgtcccatgaaagtg

SEQ ID NO: 306453 - DNA, 456 bp, Homo sapiens
ttgggattcacttatttctctttattcccaacatttataatctgcaatgtcaaggaatagagtgttttgctcaagataatacaatttatggaatgatctgaattagagtcactggtttaatcttacccaaaggttgactcttttgagtttgtttgtgttctaaattcctatcagccaaagacaaaatatgacaactttccttatctatctaggtgattaggctataggccttcaaatccagctggcagctgataagaaatcaaaacaccattytgaagaagaggaaaaagatatttcaattccaacagccaggagcaaggaagagccctgcaggttttcaggatggtgtaaatgatgcaaagtggtggctgtgtcatagccctaaactgaaaggcccccgagtggagtggagaggagaaaagtacctaaaaagcccacatatgcattcatacaata

SEQ ID NO: 306454 - DNA, 584 bp, Homo sapiens
catttgtatgcatttcctttattcaatttgtgaccttaccagttttgaattggaattgcaccatttcgtagataaaggaaactaagtatattgctgcacttttaagttttcaaaatagtgtttaaaaattgcattgtttttattttttttaaactcagtttaaaaagacaaaatgttctttcaaaagaggcatctaaatgtgttcctaattttgtatatgggcttaggttttgtaaccaataaaaaaagctgctatcaaatatgaaaaaaaaaataagtaactgttttagtgaawaagaaaaaaaaaccttctttcaagaatatatctgttgaaattgataataatgtggtcatgcctgagggaaaaatgcataggttttgtagtcaaacctactaattattcttccatctaaaacactgtcttccctttggcttaataataagaaccttgatcaccagatttgcataatctctacaccaaatatatctcaccctcataaaaatacaatgattttcccattaggatatgaaggattcttactgcttttcttcacatagaagctgagttaccctacaagcagtta

SEQ ID NO: 306455 - DNA, 522 bp, Homo sapiens
taaggcatcatttcaggcaggcagcatacaggtggaggagctggctttgtggaagaagaggaaacattttcttcttaggctagaaggaagggttaaaaggtccaagccggaagagggggtctattgttaaagttaaatatacttggagagatccatgcctgtgaatgcactggctcgatcttttcattcagtacattttctgtaacataatgtctttctccatctttcagaaaccacgaaaaccagcgctaccctatgtaaatagaaacgtaaggtttctccctggagggacctttgaaatgtagtgtacacttyattgctctctcacattctcagcactttgtttggcaaaggtgttttctgagggtggagagaacctgatggcattatttgtgcagctaaatctgggtttgagagctctgcaaaatggcatttaattcttattccctcggtgctcttggggaaatctcataattgctctctcagtctctccatctgcaaaactggtataaaatccctctt

SEQ ID NO: 306456 - DNA, 581 bp, Homo sapiens
gatgacactcataatgatatatttattacctcatgttcatttccacagcaatagcctgtgcatttgtagagatatgctttctgtgccagggcacaaactgagacaaaccatctatcactcagagacacgtcaacaagaaaataaaaagtgaacacatggtttgttttgacctaaatattgttttgggtgcagagcctgttgtgaatttttctcctgaaaacaaactctgccccctaccttgctggaaaaatatttaaaaggagacctgaaggcttcttgggtcatgctgggtttgagatgtcaataaacaaagtatgaaatccaactgtgaataggtgtgatttatcagtgacagcaatttaaaaacattttyaatttttaaaattaaagttattttaatcaaataacttgattgttcaaataacaatcaagtcaggaatctctgaattttaattaggaagaatgatagtttctgtttgaaaccgtgactcatggaggggtccttcctctttgtgaagtgttagtgtaaggaatttctgtttgtctgctcttgtgccaaagctctggattacaatggatct

SEQ ID NO: 306457 - DNA, 693 bp, Homo sapiens
tgaactaaacaccgtgactggcagatacactgattcgctgaagcttaatcacatgctccatcccaagagcctgggttggacttgaaatatctcaaagcacctgggctatgtgtgtgggcaccctaatgaaaatcaggatatttataaaatgaaaaccaaatggataacagggagagaacaacaaaactcttttaaaccagtaagatcacatgttgtacaaagcctaatacctaccgagggaaattaattatgtatattacaatcatgtgctgtgtgctataggatgggaatacaaatgtgagagtttaatgagatcacatatgtaattgtattggaactgttagatgcactggagtttaataactgcttttaaaattgctcttattattacttcagtacacagaagctttggaagagtattctgaaggtcatctctcttgaccatcactagctttggatgaggctttggtcacagttctgaaagtctgcaatgaattaactctaaggcaatttgttttatcttctaaggtctgacatkgtaaaatttatccaattatatattttttgtttaggtcatatcataaaaaagagaaatgggaattaaaattgtttagattctgatttttaatatattgctagctctttatagaaaacctttcttcaattggaggttttaaagttaggaaattaatc

SEQ ID NO: 306458 - DNA, 541 bp, Homo sapiens
ttatttctgtatctctctcctatcaatcttgagtaaagtcatgactcaaaagtcatatgctctgaaaccaaatttcagacctgtctcttccatccctataaaattctaccagctgggggcgtctgctgatcaacagaaatttcctgttaggatgagcctttctgctcctctcaagaaacatgccttggtggtaatgaactatccacagcattatcctgggatggcaggcactgtggactggtccattcaatactgattccagtgcctgcaggcatgccttcctgttgttctacagagtctgggatgactagatccacatttctcaaattcccttgctatctgggtcccaagtatgacttagggtcttctaaatagataaattsttggtagctttgacaaggaactgagttatatataaaaataggatgggacagaggtttccattttgcgggcttaaatcacggcagaggcatggtgtcagcttcctgctttatttgcaggccttgtgacttgacaccttccagatcatggccgaggtagt

SEQ ID NO: 306459 - DNA, 545 bp, Homo sapiens
cacaattgaatagatctcaacttcatgattttggtattgaagatgctgacagtagccagtggctctgtgaaggcaattttccaacctaccattcttggctactcctgggatattttacttggctgtgagatccccctgagaagcttctctttttctcacacaattcctccatcagcgaagtgtggtgggcagcacacagtgactatgattcctggagatggcactgggactgaacttatgctgcctgtcaagattatgttcagacatctgtgtgtgcctgtggactttgagggaatgtcagtgacctccacctytgcctcacatgaagaggaaattcataatgccatcatggcagttcattgaaaccgtgtggctttgaagagtagcgttaaaactgacgacaccctgccaccatcatacaaatccttcaacaacatgttgcataccaccctagatctctatgccagtgtcattcatttaaaaaatttgccaaacgtggagacctggcacaaagatgtagacatcctagttgtttgggaaaacac

SEQ ID NO: 306460 - DNA, 565 bp, Homo sapiens
gttgctcatctcccatacaaacagggcaggccaggacaaacatgacctaaaacaatgttgaaaactggctccagtagaaataattctactccaggctaaaatatgagacttaaatttactgaattgctgtctaaaattagtagcagcgtaattctgaccttctttcatttccaaaagaaatatcctattttcttagctgtttcccatcaattctgcattctgagtgggtttgtgagccagtaaccgcattaacaccaatagatgggatcttcttgtttgtttggtgtctgggcctttctgcatggctgaattttcaattctaaccattcttcaatttcatgtttgctctctctctttttttctaactcragagtcaatgttagagcttgattttattgtgaatgcacatatgttatatcttgatactaagtaatatgagaagggatttctggcaaagcatacttaatcactgtaaatatttcctgttgttattcaaattcatgatgaattttaatcaggtagaaaatatccttaattggtccaatttagaacttaatagtaatcc

SEQ ID NO: 306461 - DNA, 622 bp, Homo sapiens
gggcaactacctgtaccttgagactgtaggatctgcaataatgttatcaaggtagaaagaaacaacatacattttctgtaattcttcttgttacttagttctgtatagtaccccgggcatttaattttctgattaartctctttgggatgatcaacattccaagatattcaaggctctttacaaaaggactctaaaacatggttctagatttattttcaagtatcccttttccacaaaactgaatgagtctttctttcttacatgtgcctcttctctttagttttataattcgatctttttttctcttgttagaatgcccacgtgtaatatcattaaatattttttacttgccggaatgaatttataaatcaaggcagtcatcatagaagttattgaacaaatattgattgtgtacttatgatgggccaggcactatgctaggctctggttatctaactggaaaaagacaaaggtagtccaatgatcagactatagtctgaatggaactaaacctctctgaagcatttaaaatcatcaatctttcctttgttctgtaaacattttatttcagagatgcttatattctcctgggtttccttctgtctcaggtacctcctctga

SEQ ID NO: 306462 - DNA, 622 bp, Homo sapiens
gggcaactacctgtaccttgagactgtaggatctgcaataatgttatcaaggtagaaagaaacaacatacattttctgtaattcttcttgttacttagttctgtatagtaccccgggcatttaattttctgattaaatctctttgggatgatcaacattccaagatattcaaggctctttacaaaaggactctaaaacatggttctagatttattttcaagtatcccttttccacaaaactgaatgagtctttctttcttacatgtgcctcttctctttagttttataattcgatctttttttctcttgttagaatgcccacgtgtaatatcattaaatattttttacttgccggaatgaatttataaatcaaggcagtcatcatagaagttattgaacaaatattgattgtgtacttatgatgggccaggcactatgctaggctctggttatctaaytggaaaaagacaaaggtagtccaatgatcagactatagtctgaatggaactaaacctctctgaagcatttaaaatcatcaatctttcctttgttctgtaaacattttatttcagagatgcttatattctcctgggtttccttctgtctcaggtacctcctctga

SEQ ID NO: 306463 - DNA, 555 bp, Homo sapiens
  misc_feature (1)...(555): n = A,T,C or G
gaaatgcaaaggaatttaagacaagataggctacattcagggtgatatggtcatagacaaggaatttcaaatgaagttatgtttaactacttaaggctggtactagagcacacctatggtacttcatctagttttgatattttaaatttataaaayatgtaatttctgttgaaggtgtacagtgtcactttatgataagcttcagaaaaagatgttgaaaaacctcatgattaaatgaactgttttctccaaggtaagaaaagcctctggattcatccttttccagtgtgcaggttgtgatagaattaagttattttgatctgttttatttttacagcagcaagatctgtgtatactcagtaacctcatccattcattctttgactcctttacttgtctctcaatgttctttgtcttccattgaatacntgctttgagccataaactgtgcaagcactgagattgcagctctgaaaattgttgtgctttctctcaaggacgcacagggctgagagaatcaacaataatcaggcaattataatggagcataataag

SEQ ID NO: 306464 - DNA, 555 bp, Homo sapiens
gtaaagcttatatgttatatatgaaatatgcttatatataattatatgtaagtatatatatgcacacatatatatatatatataagctttactgcttagcatatagtaaatcttcagcaatattaactacaattatttaaaaggttttttccaggtctgctattggcttatttaatttctacctcttcacctttcttaaaagagaccagtgtggcatgtatgtacatgtctgctagggggagggggatggtaagtgaaccatcaggtaaccatcaggaaactgatrgttattgcttgcaggaaattttttaaaacatcactatatatacgattgttataagaatccaatgcaataatgtatgtgaaaatagtatgaaaattaataatactgttgttaccataatctaaaaatgttagatataaacaactttaaaccttacaatttctatgttatcacctgggccagacattcggtaggggacaaaacctattaataagcagtccttgtcatggtcctaaagtactttgaaaaaggtgaaataaaataaagcagca

SEQ ID NO: 306465 - DNA, 553 bp, Homo sapiens
atctgatctggaaatactggtatgacctttattgtaacaagcagcccgaagcatttttcsaaaatcacagaacttcagatgaaggagcagggtgatgtggctctatagctcttttcccaaggttgtgaagatagtgatgtgctttttaaatgggatgaaaagagattatatgagatagcgaagaaggtgggggtagtcactcaataaatatttgttgattgatgaattgatcttgaaaactgctgaaagggtgacctatatttagatgaaaagggatgcagctcattgttagcaagatttgaagtaaaatgattagagagaaattaaggcagttcacgcctttggaaactgacagtggtaagatttttgaataaaagggattttaaagatatacagcaaataaaaagcctttagcataagagtcaatccatttatttctttaataacaatttataatgcggctactaggggcaaacataagttcagttataataggtgccataaaagaaacacaaatttaaaagatagttccccatccgagcaagaggacagt

SEQ ID NO: 306466 - DNA, 570 bp, Homo sapiens
ataggagcatgtgtctttttggtaggatgatttattattctttgggtagatacctagtaatgggattgctgggtgaaaaggtagttcaactcttagctctttgagaaatctccaaactgctcttcacggtggctgaagtaatttacattcccatccacaatgtaaaagcattcccttttctccacgtccctaccaacatctattattttttgacctattatcaaaagccattctaactggtatgaggtggtatctcactgtggttttgatttgcatttctctgatgattagtgatgatgagaaatctttcatatgtttttcggctacttgtatgacttctcttgagaagtatctgttcatatactttgcccacattttagtggagttatttgtcttttggcctgtttatttgtttaaattccttgtagattctgaatattagacctttgtagatgtatagtttgcagatttttctmccattctgtaagttggttgtttattcccttgatagtttctctggtgtgcagaagctccttactttaattaggtcccgtttgtcaatttttgttt

SEQ ID NO: 306467 - DNA, 610 bp, Homo sapiens
ctgtcatcctgttgttagctgttttgtagacttgattatatagttgccctatagggtctgtgctatgcacttaagtgtgttgctgtggtaacaggtatcattctttgatttctgtttagaactccctcaaggacctcttgtatggctgatctggtggtaacaaattcccttacgcttgtctggaaaggattttatttctcctttgtgtatgaaacttagtttggctggatatgaaattcttggttggaatgtcttttctttgaggatactgaaaacagaccctcaatctcttctggcttgtaaggtttctgctgagaagtctgctgttagcttgatgaaatttcctttgtaagtgacctgaccctttttcctaggtgcctgtaagattttttctttcatgttaatcttggagaatctgatgactttgtttcttggggttggtcatcttgtatagtatcttgcagcgkttttctgtatttcttgaatttgcctgtcaacctctctagtgaaactggggacatgttcatgaattatatcctcaaatacattttccaagttgtttactctttctccttctctcttgggaataccagcatgggttgtagtttag

SEQ ID NO: 306468 - DNA, 612 bp, Homo sapiens
gctttcctgactccctggattcttatgacattagcaaatgcagctaagtcaagtccatgtctttgcgtactctgagtaatttatacattttccatgtatgaaattaatagcttatatamccccaacatgatttgtatcaagagtagttagttgaccgagcatggataatagatttatgatgcttttataaccctgaccagcacgcatgattacagttttgcaaagatgctaaaatgactatcagctaccttatttgactctcatattcctcccatcctcactgaagaaaaaaacatttggagtgctctcccaacagctgcagaatgtatggccatgtgatactatttgaacgttttgtctgacaagttagggattctttttgcaactaataaaataatttaaaaatctgaaccatttcctgaaatgtaaattactgacttttgttagtcattatttcacctctgccaaaacaaaatgacttatagagaaaagaaaaatgactgatttattgcatcatgcaaattcctacagaagaaacaagtttaggatataaggtatgtaacatgggaattttaaaaacagtattagtgaattgccaggtaagaagagacc

SEQ ID NO: 306469 - DNA, 451 bp, Homo sapiens
atataaatcactttatatttatatactgcatatatttacaggaaggaatagatgttaacaaaataaactataaataaataatatacatttcagatactggtgagtgcaattaagtaataataaaatgggaaaaaagaatgatggaaatgstactaatttaattacagtgaacagggaagatttttctaaggtgatgatatttgagcagatatttaaataataaaaagaataaaccatgtaaagatataacggacaatttttccaggcagctagaataacatacatatagggcttgagttaggaaaagcttggcttgtttgagaaacgtcaaggtcaccgtggctagagtgaaatttatgaagagttggtggtgagcacataatgttggagagaggagcaggtgtcacattacagaaggccttgtatgtaatgataatgaagttaattatca

SEQ ID NO: 306470 - DNA, 623 bp, Homo sapiens
aattctaacagcttgtaagtacagaactgttatggaatccaggtcttttagattccacaatctaaacttttaatttctgtgtgataatgcgctgtaacttgaaaaaagggcctgtttttggtcactatctttagtgaagatagtctaggagaagggacattagttaaaggtggtgatggacaatctagttgtattaatgcaagcctcaggcttttgtaatgtgttttgtcctatttagagcttacattctggtggaatgactcactttttcagcactcaactgattttcatatattcagcagagaaaatttgacccagcaatcccaatactggacatctacccaaaggaaaataaatcatcgtatcaaaaagatacctgcactcatatatttattgcagctctattcacaatagcaaagatgtggaattaacctcagtgtccatcagtgggtgattggataaagaaaatttggtatatgtatacaatggaatactattcasccataaaaaagaatgaagtcttttgcagcagtaaggataaaactggaggccattatcttaagtaaaataactcagaaacagagtcaaaataccacatattctcacttataagtaggagctat

SEQ ID NO: 306471 - DNA, 470 bp, Homo sapiens
tgtgtgaaaggaatggaggaagataaggcaccagtaaaaactctgaaatatcatactagtgagtttatattttatgagtcaatgcaagaccactgaaaactttcaggtagttaaaagatgggaccataggtagttttctggaataagaactcagagagctatgtggacaggaggaaggaaaatcaaaatcagagagacaagttcagaggcaartgagggagtccaggagagtagtagaccaagggtcttgacaatgaagaagaagatagcacagagacaggacacatttagcaaacatactatgtaaggattactgatcacatacacaccaggacagaaagactcccagaaatgtaatgtgagttgagttgatagtgaggtaatttaccaccaagatggggaaggaagagaaacaaacaacatagaaactaaagccagactatgtgaaataaggaaaaaaatatatataa

SEQ ID NO: 306472 - DNA, 511 bp, Homo sapiens
gggggtgggtgagtatatgacagtttccttctagataacttttgacagttggcctccacataatggtaagataatttggggtttgctaagtaacagcgacatctaaaacatgttctgagtaaagttaacagcatctaatatctgttcttttagaaaactacatgcaygtaaagaatatatgggcctttttataatgagatattttattttatgatcagaagagattggcaaagaaaggctgggcacggtggctcacgcctctaatcccaacattttgggaggctgaggcaggtggatcatgaggtcaagagatcgagataatcctggctaacatggtgaaatcctgtctctaataaaaatacaaaaaattagctgggcgtggtggcaggcgcctgtagtcccagctactcgggaggctgaggcagaagaatctcttgaacccaggaggtggaggttgcagtgagccaagatcgcaccactgcactccagcctgggcgacagggcgagactc

SEQ ID NO: 306473 - DNA, 585 bp, Homo sapiens
atagcgcattataatcagtatctctttaaagacaatctcaggaaattttcgtggttttcttgtttttaaagcaaattgctaatacttttgctgatgtctcaaagcagtggctctcaaccttgcccccacattgtaattgcttcccgcttcaaaaatactgatgctgggctgggcacagtggctcacacctgtaatcccaggactttgggaggccgaggcaggcgaatcacgaggtcaggagatggagaccatcgtggacaacacagtgaaaccccgtctctactaaaaatacaaaaaattagccgggggtggtggcacgcgcctgtagtctcagctactcaggaggctgaggcaggggaatcgctggaacccgggaggcggaggttgcagtgagccgagatgatgccrctgcacactagcctgagtgacagagtgagactccatctcaaaaaaaaaaacaaaaaaaaaaacatactgatgcttcaaccccaggaataaagattcctgtttaatgggtctgagtctgggtataagaattgggatgttaaaaaatctctccaagtgataaataactaaataactaag

SEQ ID NO: 306474 - DNA, 585 bp, Homo sapiens
gaataaagattcctgtttaatgggtctgagtctgggtataagaattgggatgttaaaaaatctctccaagtgataaataactaaataactaagttaaagcatctagttyttctaacctgctaacctactatgattctgggaaggccttccaacagaaatgggtggttgggttagtgtgcttattatataggcaataaactgagctgccacctgttaacttggtaacagacacagctactgctaagaaagctagctagctatgcaaggcacatgccctcaggctcagacttgatcaagttaatgaaacacccctccaagggttgttctgctgacacatgtcaccatttatgagttgtaattgggtttattaaaaaaggagtcatggcctgtgctttagcagtttggcctaagggccccaaaaatactgagagaagaaatttgcaagccaaactacagctgaaaactagactggggttgaccttgaggtaggttattgtagaacctgaggctcaatgtaagaaaaaaatcaaatatcaaaaccctgcccaagtccaccagaagctttctctgacaaccaacctcact

SEQ ID NO: 306475 - DNA, 585 bp, Homo sapiens
gaataaagattcctgtttaatgggtctgagtctgggtataagaattgggatgttaaaaaatctctccaagtgataaataactaaataactaagttaaagcatctagttcttctaacctgctaacctactatgattctgggaaggccttccaacagaaatgggtggttgggttagtgtgcttattatataggcaataaactgagctgccacctgttaacttggtaacagacacagctactgctaagaaagctagctagctatgcaaggcacatgccctcaggctcagacttgatcaagttaatgaaacacccctccaagggttgttctgctgacacatgtcaccatttatgagttgtaattgggtttattaaaaarggagtcatggcctgtgctttagcagtttggcctaagggccccaaaaatactgagagaagaaatttgcaagccaaactacagctgaaaactagactggggttgaccttgaggtaggttattgtagaacctgaggctcaatgtaagaaaaaaatcaaatatcaaaaccctgcccaagtccaccagaagctttctctgacaaccaacctcact

SEQ ID NO: 306476 - DNA, 538 bp, Homo sapiens
ttcccccataaccctctattatgttggcttactctggaaaaaaaaaatgtggcatggttgggggagtgacttccgccttcatttcctgaattacattttagttctccattggaacgaaactctgtctttcctctccttcttttccacaatcttttaggctggagttccacatctctaggtgctagtaggaccctactcctatttggaggatttacttggaacctacaattatcactacctgaaggtttgtagtattatgaccctgccacacctaaatcccctgatatattaatactgggacagataataataagwgtatgtacttatatagcaaatactttatgtgaattaacttatttaatcctcacacaattctatgagacaaacactgttattctcaaagtagagctgaggaaacagaggttaaataactttctcaaagtcacacagctggtaaatagctggtaaatcttcaaacccaagcaatctggctccagagccatgttctactgccccttagaatgaaaacagatttcac

SEQ ID NO: 306477 - DNA, 605 bp, Homo sapiens
gctttttctataataccataatactttcaccacaaaatataggagtaacaaagttagagcttatacttattggaattttgtttcttatagtaattctcaaaagaagcaayagctttagggaaatatattttataaaaggaaaatcaatttttcttaattttattttaaaaaattgaagcatactaaatggcctctagctaaaagtttatttttgttgtggggaagcacaaggaaataaatactattacaatgttatatttaccaggtaatgtaatgtcaaaataccaaaataaaatttatactttgtaagtaaattgcatgtattcttaagaaaaaatataaaaccatgacaattatctacaattagtcaaataaatggtatacctgaatatgagtaaaataaaaattataaagtggagtgctaaccctttatcactattggggagacaaggacttagagagggaagtcaaatagaaaaattctgcctgtgatttagaatgtaaagaaacatagatagttgactttgcactcatggtaacaccaagaaaatctagagagtataaaagacatacattttgtaggactactgatatgtggtgagtta

SEQ ID NO: 306478 - DNA, 605 bp, Homo sapiens
gctttttctataataccataatactttcaccacaaaatataggagtaacaaagttagagcttatacttattggaattttgtttcttatagtaattctcaaaagaagcaatagctttagggaaatatattttataaaaggaaaatcaatttttcttaattttatttwaaaaaattgaagcatactaaatggcctctagctaaaagtttatttttgttgtggggaagcacaaggaaataaatactattacaatgttatatttaccaggtaatgtaatgtcaaaataccaaaataaaatttatactttgtaagtaaattgcatgtattcttaagaaaaaatataaaaccatgacaattatctacaattagtcaaataaatggtatacctgaatatgagtaaaataaaaattataaagtggagtgctaaccctttatcactattggggagacaaggacttagagagggaagtcaaatagaaaaattctgcctgtgatttagaatgtaaagaaacatagatagttgactttgcactcatggtaacaccaagaaaatctagagagtataaaagacatacattttgtaggactactgatatgtggtgagtta

SEQ ID NO: 306479 - DNA, 561 bp, Homo sapiens
tgctctctctcttttcttttcttttctttcctttcctttccattcccttcctttccttttcttttcttttcttttattttctttcttttcatatcttcttggaataggaagactcaaaagggtaccagaaaaattttcacttgcattctattaattaaactacagatactcctttaatatagtaaacaaatgttaatcagacaacaaacttacagcaaaaagcaccaaggattgaaagcagttggtagggcagggagaagagatggaagaaaattcaaatcatgttttcattatactctttgttttcttaatcatcctctgcttaggatggtyttgcttgccaagttttccctgtataactcctacttagcctttaaaaacatcttccatgattctcctctccttccatctaatatcatcacaaaccctgcctttctttctctagccctcctacgcactctaatacacacatatgcatgcacatatatacacaggccaggctctgctaatgctgtttctctgtgtttacagactacttctgtagattctttttgctctgat

SEQ ID NO: 306480 - DNA, 585 bp, Homo sapiens
cctctttcgctgtctcctcacctcccttttgctttaaatccttcctgacatgcctgttctcacatttttggyttgaaggtttttctttttgaaaaagactatggaatctgaataggaagtaaataattctgctttgtgactttgtacctagccttccttttcatgtctattctctcttccaccccaccacttcaataacttgcacatatattttgtgctcttacaacattatatcatatttattacacggtcatctcccccagcagactggaacctccttatatggcagaactgttgtacatctataaaactccatacctagtacagtgcttggcaatatgccatagtgattaagaatattcacttattcattttaaaaatgtattaatcaattactatgggactggtaattatcaaggtgcaaaggatacactggtaaacaagacagatgccatctctgctctcaacatgctcacagtatgataggggagataaacattaaatcaatcaccaaagctaatatagtcttacaacactagaccacaggctatacagatttctcaggccaggataaataagttaaaa

SEQ ID NO: 306481 - DNA, 585 bp, Homo sapiens
cctctttcgctgtctcctcacctcccttttgctttaaatccttcctgacatgcctgttctcacatttttggtttgaaggtttttctttttgaaaaagactatggaatctgaataggaagtaaataattctgctttgtgactttgtacctagccttccttttcatgtctattctctcttccaccccaccacttcaataacttgcacatatattttgtgctcttacaacattatatcatatttattacacggtcatctcccccagcagactggaacctccttatatggcagaactgttgtacatctataaaactccatacctagtacagtgcttggcaatatgccatagtgattaagaatattcacttattcattttaaaaatgtattaatcaattactatgggactggtaattatcaaggtgcaaaggatacactggtaaacaagacagatgycatctctgctctcaacatgctcacagtatgataggggagataaacattaaatcaatcaccaaagctaatatagtcttacaacactagaccacaggctatacagatttctcaggccaggataaataagttaaaa

SEQ ID NO: 306482 - DNA, 514 bp, Homo sapiens
cagcctggatctttattttaaatgtagaatttcagacatatggatccagtaaaacagcatarattaaattcctcctttgttttttaatgacttagatttttattcaggataagtatagtaaaggcttttttagatttaatggcatttctgtttttttaagcatgcatcaagatttcatccttcccagcaaagttaaaagttcaagtatgtggttttgggcccagtcttgctctccagaataatttctaagagattttagaatttttttgttgctcttgttgctgttgaggatttgttttgttttgtttctttgttgttgtttttaagtgatgttctgacctggattatcatgatatattaggcttgacagggttgaattgttggaccagatgaaatactgcttgggaagtcactgagcaggtggaaaatgctgtttaatccttgtaacaggagaggctcatggtggtattgagaaaatgtaaaacgcagcaaaacaggttagtagagctgaaga

SEQ ID NO: 306483 - DNA, 627 bp, Homo sapiens
aatgctttttgctatatacaaagatgttctttgaaacgttatttttgttgcattcttggaagycaattaattctctaattttcaaaattgtattatgtctatagtaacaaaattgattaccttataatttctgaataataaactatgcatgtgtaaagcagtgtgcaaaagagtactatatgacctgcattaattttactaacatttggggaaaagtatcagttataaccacctaaatcaacatacaaatatcagtagtgtgtctatacttcagtaatggactagaaatgatcatttctctgtgttgtgaacattcaaaatcctctcttgtagctttctgaaaatatacactaaattattgttagccattttcaccctacaggggccacagaacactagaatttatttctcccatctagctataactttttatctattcatcaacgtcttcctgtcctccctcttcccctacaattcccagcctctaataatcacagttctactctctacttttattagcccaaattttttttagctctcacatataaatgagaacatgagtggtatttgtcttcctgtgtctgacttattttatttaacataatgtcctccaggttcattcatgtg

SEQ ID NO: 306484 - DNA, 637 bp, Homo sapiens
ttcccttctttcataaatgtattgttcatcatgctattaggcagccaattctctgtaattttcgtttggctttatacatcttttgattggttagttcttgatatatacatttttgtaggcatcaaaatatttgtgtttctaaaaataatatactaaagaagcctacatttaaataccttttttgatatctatatattagtttaactgctgcaacaaaataataatagctttagttacattgtatagtttatgtttaagcatattatgtagcttaaacaaaatagaagtttgtttctctccacttaaaactctaatcataagtagtctactgctgctgtgaaggctcaatgggtttgagaactcatgattcttctatctcgttgatccaccatatttaacactgtttctatcttgtgtttgaagttggctacrtcagatcctgacaccatgttcccatttctccagtgggaaggagataagaaagaaatggtagaaaagatactcttttaaaaacaaaaccaaagttgccatatactgttcttactcatacccattagtcagaagtaagtcacaggatcccacttaactgcaaggaaggctggatcactagcttaaaattcactagcttaaaattata

SEQ ID NO: 306485 - DNA, 548 bp, Homo sapiens
cttacctgacatcatttattcattcattccaccaatatttactattgaatattgtgagatcatatgccctgtgcttgggctagggctagtaggagaccaaaaatagatgtggtcctctctctataggaacttatagaatagtagaaaagaaaaatattaataaaagtgctaaacaaaataaaagcacaacttcattgagtgcaatgtagaagagttgcaaggtattatgaaagtttataatagggaattgatgtggtcaaggaggtcaaggaaagctttctcaaggaagtgaaatgaaaatctgaagaggtgactaggcaaagaggattggcaagagcatttcagatatcaagaaaagccagagctactgtattagtctgttttcatgctgctgataaagacacacccgggactaggtaatttataaagaaaaggaggtttaatgaactcagttccatatggctggrgaggcctcacaatcatggcggagggcaaaaggcacttattacatggcggcagcaagagggaaagtgagagccaagtgaaaa

SEQ ID NO: 306486 - DNA, 635 bp, Homo sapiens
actgctacatgaatgaaagtaattatactatgaaaattagacaattctcaattgaactctcaaagtaaatcagtggaaaccttaaacaaacctttataaacacttgcttataaaaagtcaaaggacacacaaattcagattccccaataagtagactttcctgaagcaaaagttagaaaaatggtctgtgaaggaaataaaataccaactaagaagctcttcatttccaattttctatttttagatcattcaatttgagcctattatctctgccatactgtttgttctcattaattttcatttgtgtttttaatattgtttatacatttgttatgccttctccagcatcttagattgcccatttattatttctatttcccactaattctcaaattacttcccaattaattacatacacaaataattgtttttmaacttaataaatgctctattaatgaagctttgggaaaataacgttatgaatttttatgttaacttttgaggaagaacattgttgcttaatgagatcacagtaatagctatgaactaaacccaactattactcaatagtgctgttttaaatcacaccaaatttcaaaggcatacaacaataatgaaaattaatttcacaaata

SEQ ID NO: 306487 - DNA, 553 bp, Homo sapiens
atggtattaaatagttttggctctggggtcacaccccctgagtttttatccttgcttaactatctcttagatgtataacttcagacaacttaacctttctgtgccttaactttcttatctctaaaagtggggataatactacaagctacctcatagtgttgttatgagaattagctgaaataacccaggttaagcccttagaagactactagtgaatgggaagtactcaataaaagttagctagctaatggaaggagaaaggagtcatcagtagagttggaccaaggttaaatgttttcatctcccttcattttatccctgaagccttttggtaaagaggaagtcaaactttcatcctttttyttcctacatggctattctgacaattaccctgtgctggtcaaagaaagccccaccccaggaaagaaaacttggtgtaggcttcttaagtagctgtttttcttaaaaaaaaaaaaaaaaaaaaaaaatacaaaagaaattcctttgtttcatgatcctttctctagctgaggatgcatgaaaaatatttgct

SEQ ID NO: 306488 - DNA, 553 bp, Homo sapiens
atggtattaaatagttttggctctggggtcacaccccctgagtttttatccttgcttaactatctcttagatgtataacttcagacaacttaacctttctgtgccttaactttcttatctctaaaagtggggataatactacaagctacctcatagtgttgttatgagaattagctgaaataacccaggttaagcccttagaagactactagtgaatgggaagtactcaataaaagttagctagctaatggaaggagaaaggagtcatcagtagagttggaccaaggttaaatgttttcatctcccttcattttatccctgaagccttttggtaaagaggaagtcaaactttcatcctttttcttcctacatggctattctgacaattaccctgtgctggtcaaagaaagccccaccccaggaaagaaaacttggtgtaggcttcttaagtagctgtttttyttaaaaaaaaaaaaaaaaaaaaaaaatacaaaagaaattcctttgtttcatgatcctttctctagctgaggatgcatgaaaaatatttgct

SEQ ID NO: 306489 - DNA, 576 bp, Homo sapiens
tcaaaagaagacataaaagactatatatgataattcaatttatatgaaggttatgaacttgcaaaattaatatgtggtgatagaaatcagaatattggttgtctccagggagcaggacattgactgggaaagagcacaagagaactttgtagggtgaggccaacattctatacgctgctaggtgtgtgattgcatacgtgtagacatttggcaaaactcatttaagaagatactgaaaatttgtacaatttactgaagataattatacctcaatttattaagactacatggaaatacagttttttacctgtatttttcatacagtttttcatgagttttacaaaaatccacatttgacaacacattctgcttatatggctgtagaaaaacasgcacattcacatgttttaatgagaaggtaaaatcatacaactcctggagatctggtaaatttggaactatctggaagaattacaatgtatttgctctttgaccaaataatttctcttctggaactttataccaaagatgcacaggcaaagatatgaaaatatttgtattcaacactacttattg

SEQ ID NO: 306490 - DNA, 574 bp, Homo sapiens
cgaagtattgtaattcagacacagatatgcacacaaacacacaggcaaaacaacattgagaccatagtgtctaatgctgaggatccaatattggtagggtagtaagattgtctttgatggataaaaatggaaaaatataaacttaaacacaatttctccaaatgactcaaatttaatgacagaaatcataattatagccttcaaccatgtggcttagttaataagattgacctacataatgcaattttgaaattaaaatcccgagggtgtcaaacacttcaacattcacaacactgtccactttctttctatgggggtttgggggcaggaggggtgtggagttgccagaaatggagctctgaacagggaaggaaagagaaagcacaacagaagaatcaggcagctggtcaaactttcaaaaagtaatgttaagagcaaatagattatgcagaagaataaacyaaaggaatgatattctacatcaaatttttttcttcacatagtaaggctgagcagaccaaaataaacagccagagaagttggtcatttttacttcaccattcacctatcctag

SEQ ID NO: 306491 - DNA, 539 bp, Homo sapiens
ttgttaaggagagacttctgtggcttttgcctggtccatcaatgtatataagattgggaccaacacataaactcttggagcttatagatccacatttcctcttcattttttaaagttttaaaatgtatgcatttttgcgaatatcttactgaattcctgaagagttggtgataaaaactttttgctttctgcaagatgctatttctatctctaattactcatccaagaaagaaacatctgttgttgttcattaccattttcttctcatttccttatagcctttatgtattttgaaagtatcttggattatgttattgtatttttctaatatttctcattgacataaataagactcrtagacattaaaaagccaatctgaactgaaccacagaaaattcagacagggagcagtgagttcaccctcctcaatttcttctcttttcctttttttttttttttacttcatgtcaatatttataattctgttgcattttaaaaaatttctttgcagaaattaagccttaatatcgcagaccaaa

SEQ ID NO: 306492 - DNA, 510 bp, Homo sapiens
cttcatatgtattatcgcagaacacccttaaaaagtaagtactgttatgatatctattttagagtataagtatcttgcccattgttgcacagcaagtagaattgggaactggtattctactacaggtctgactcaaaagtccatggtcttaatcagtgtaggataactgggacattattgctataagatatatacttcgtccttgcttcaagtggctataacttcacctcagtggctttcatctgaaagtacaccttcagagctcccatattgactcataaatatgacagcacttktctcattcacctattattggctaaatttcagatacaagttgagagtgggaaaggaagaattggtgaagaaaagcacttgtgagtactctagtttaggtgtagcaatcctacccatgaatctgtgctttacaagcacactgctctttattttcaacacttcacttcaaactggtggtggaggatgccaaaggcctttcagctggaaacctcctaa

SEQ ID NO: 306493 - DNA, 555 bp, Homo sapiens
gacctgtcaatgtttttcgaatgcagggaagacattttataaatgctacatagaaggatccagttgtttaatttamcaagcatattttctctttgtgccatttttaatcctgcacagttggggatacttggctctctaaaaaaattccttatctttgagataaaaggtgttcctattgttcacacagaccttaggcagtatgaaaagtaaaacataatggcaggatacacagtgatacattgttgtaccttatcaaaataaagagagaatgtaatatcattttctttgtctcatctctaaactcaggaatatttgctggtggtatgaaagaagttatacccagcagttttactcaaagaaacccactatgtgaatgcaagttcaaaatagaaatcaggtagaaatgctgttacagagttgatctctgacctttccagatctgggccactttcttaattcctttccttctttatggccatttaaatgagacctgagtgattctgatatatctatcttggttatagctaaagaaagcagtaaaagagacaaagtttt

SEQ ID NO: 306494 - DNA, 555 bp, Homo sapiens
gacctgtcaatgtttttcgaatgcagggaagacattttataaatgctacatagaaggatccagttgtttaatttaccaagcatattttctctttgtgccatttttaatcctgcacagttggggatacttggctctctaaaaaaattccttatctttgagataaaaggtgttcctattgttcacacagaccttaggcagtatgaaaagtaaaacataatggcaggatacacagtgatacattgttgtaccttatcaaaataaagagagaatgtaatatcattttctttgtctcatctctaaactcaggaatatttgctggtggtakgaaagaagttatacccagcagttttactcaaagaaacccactatgtgaatgcaagttcaaaatagaaatcaggtagaaatgctgttacagagttgatctctgacctttccagatctgggccactttcttaattcctttccttctttatggccatttaaatgagacctgagtgattctgatatatctatcttggttatagctaaagaaagcagtaaaagagacaaagtttt

SEQ ID NO: 306495 - DNA, 575 bp, Homo sapiens
tctaaactcaggaatatttgctggtggtatgaaagaagttatacccagcagttttactcaaagaaacccactatgtgaatgcaagttcaaaatagaaatcaggtagaaatgctgttacagagttgatctctgacctttccagatctgggccactttcttaattcctttccttctttatggccatttaaatgagacctgagtgattctgatatatctatcttggttatagctaaagaaagcagtaaaagagacaaagttttattaacagctcatcagctcacctacactaaatctaggcagaaataagttcaagmagctagatttctgtagaattcctgctatgtcttttatgcatattatgttcacctgaaagatgtcaacattattcaggtagcccattcagcaccgaaagggttaagaacagaaaaacagactccatttctgctggatatgtaccttgaaattaacaggaaaagaggacctggaatttacatctttgtgactggtgtaaattgaataaatagattttcagtaaacgtgatgtaagcactttgctcttttcttatgaataatac

SEQ ID NO: 306496 - DNA, 583 bp, Homo sapiens
atatatctatcttggttatagctaaagaaagcagtaaaagagacaaagttttattaacagctcatcagctcacctacactaaatctaggcagaaataagttcaagcagctagatttctgtagaattcctgctatgtcttttatgcatattatgttcacctgaaagatgtcaacattattcaggtagcccattcagcaccgaaagggttaagaacagaaaaacagactccatttctgctggatatgtaccttgaaattaacaggaaaagaggacctggaatttacatctttgtgactggtgtaaattgaataaatagattttcagtaaaygtgatgtaagcactttgctcttttcttatgaataatacagcaaccctaagttttcccaagcctctctgggtctttagatattaatgagaacaattacctggctggttgactgttcctgaccaaggcatcgagaaaaccaccaattctcttctgtaatattctgaggacatccagaggaggtttcacagatgtacaccatcaatccgaatttcaattccaaccttcccaggaaagcaagaataccaagcccattg

SEQ ID NO: 306497 - DNA, 583 bp, Homo sapiens
atatatctatcttggttatagctaaagaaagcagtaaaagagacaaagttttattaacagctcatcagctcacctacactaaatctaggcagaaataagttcaagcagctagatttctgtagaattcctgctatgtcttttatgcatattatgttcacctgaaagatgtcaacattattcaggtagcccattcagcaccgaaagggttaagaacagaaaaacagactccatttctgctggatatgtaccttgaaattaacaggaaaagaggacctggaatttacatctttgtgactggtgtaaattgaataaatagattttcagtaaacgtgatgtaagcactttgytcttttcttatgaataatacagcaaccctaagttttcccaagcctctctgggtctttagatattaatgagaacaattacctggctggttgactgttcctgaccaaggcatcgagaaaaccaccaattctcttctgtaatattctgaggacatccagaggaggtttcacagatgtacaccatcaatccgaatttcaattccaaccttcccaggaaagcaagaataccaagcccattg

SEQ ID NO: 306498 - DNA, 566 bp, Homo sapiens
ctgtgagttattttacctgtttattagttatatattctgaacttttttttttaaaaaaaaacatactttaataaaggaagagctgaaactggataaactcttgctatctcctccaggttggtttaatcctaaaatagcaaygatcagagacttgcactcatacaacagtatacggtaatcttgcttactgggaaattttaaatagtgtatgtgtgaatgtagaaaatgttaacaatggtccccatgatcccctttccctaggcagtgtgatcatagatgcctttcatttcttccttgcacatttctacattgccttctcttttgttaaaatcaggagaaaaatgattttttttttcaaaagagggaaaaatatgagaaagctcagtagtagaattgtctgggacattagtgggatggaataaaagcttagacaagtgatttttatttttaacgagatataggctctgaagcactggtgttcattcttggctgtgctctataatcacttgaaggagattaaaagaaatatcctttctttggtcccactccctgggattgcaatttaa

SEQ ID NO: 306499 - DNA, 607 bp, Homo sapiens
ctgaaaactatataatcaatgctagaatcagatgaagcccacagtgccagagggcctataggaggaacacacggcccagttatgaggaactcataaatttttctgaaggtaacttgaaagagaactcagagttaatcaagtgagttagggagaaaaggaaaaagtaggggagggggtacagaagaggatatctaaaartgtgactaccataggcagatgctacatcatgatacactcacacttgtagaaagaaagaaagcataagcttacatctcaaagcaaattgtttaatacaatgagagtatgaattattagtggagacagaaacagagggagtcagatttgaagaatcctatctagctccaagaaattcaggctttagccttagtgaaataaggaaacactggaagattttaagtaacagaggtacatgatcagatattcattttagagagattacactggccgcagggtagagaatgaattagaggagagcatgattaatttatgtagaccaggtacgaagctgtagtttccatccaggtgaaatatggtaataatggccagtactaaagtagtagcagctttatttctcactcatactttc

SEQ ID NO: 306500 - DNA, 548 bp, Homo sapiens
gactaacatccaataataacagcatatcaaagtataaagttattaaatcctttattgatacataaatacaatgtagtgagaagatcaatcaactacctaaagttttcaatacatgtgttttcccttggaaaatayactttttcctcgtggtttttataatttccctctacattcatttccagtatacagcctcatttttcatctttgagtaagcagaccttctgctttcaacattacccaaccttctatttactctgtcaatttgtcattttcctgactgtaagcctacatgtggaagactaacttaaaggaatttatataatagtcatttattctcttagaagtaattgttataagttgaattttgtccccgaaaaaattcacgtattgaggtcctgatctctggtacctcagaatgtgacttacttggaaataaggtcactgcagatataattagttaaactaagatgtggtcatgagggatgaatcctaatccagtataactggtgtccttataaaaaagaacaatttggaaacaaacacgtgaa

SEQ ID NO: 306501 - DNA, 548 bp, Homo sapiens
gactaacatccaataataacagcatatcaaagtataaagttattaaatcctttattgatacataaatacaatgtagtgagaagatcaatcaactacctaaagttttcaatacatgtgttttcccttggaaaatacactttttcctcrtggtttttataatttccctctacattcatttccagtatacagcctcatttttcatctttgagtaagcagaccttctgctttcaacattacccaaccttctatttactctgtcaatttgtcattttcctgactgtaagcctacatgtggaagactaacttaaaggaatttatataatagtcatttattctcttagaagtaattgttataagttgaattttgtccccgaaaaaattcacgtattgaggtcctgatctctggtacctcagaatgtgacttacttggaaataaggtcactgcagatataattagttaaactaagatgtggtcatgagggatgaatcctaatccagtataactggtgtccttataaaaaagaacaatttggaaacaaacacgtgaa

SEQ ID NO: 306502 - DNA, 548 bp, Homo sapiens
gactaacatccaataataacagcatatcaaagtataaagttattaaatcctttattgatacataaatacaatgtagtgagaagatcaatcaactacctaaagttttcaatacatgtgttttcccttggaaaatacactttttcctcgtggtttttataatttccctctacattcatttccagtatacagcctcatttttcatctttgagtaagcagaccttctgctttcaacattacccaaccttctatttactctgtcaatttgtcattttcctgactgtaagcctacatgtggaagactaacttaaaggaatttatataatagtcatttattctcttagaagtaattgttataagttgaattttgtccccgaaaaaattcacgtattgaggtcctgatctctggtacctcagaatgtgacttacttggaaataaggtcactgcagatataattagttaaactaagatgtggtcatgagggatgaatmctaatccagtataactggtgtccttataaaaaagaacaatttggaaacaaacacgtgaa

SEQ ID NO: 306503 - DNA, 548 bp, Homo sapiens
gactaacatccaataataacagcatatcaaagtataaagttattaaatcctttattgatacataaatacaatgtagtgagaagatcaatcaactacctaaagttttcaatacatgtgttttcccttggaaaatacactttttcctcgtggtttttataatttccctctacattcatttccagtatacagcctcatttttcatctttgagtaagcagaccttctgctttcaacattacccaaccttctatttactctgtcaatttgtcattttcctgactgtaagcctacatgtggaagactaacttaaaggaatttatataatagtcatttattctcttagaagtaattgttataagttgaattttgtccccgaaaaaattcacgtattgaggtcctgatctctggtacctcagaatgtgacttacttggaaataaggtcactgcagatataattagttaaactaagatgtggtcatgagggatgaatcytaatccagtataactggtgtccttataaaaaagaacaatttggaaacaaacacgtgaa

SEQ ID NO: 306504 - DNA, 611 bp, Homo sapiens
taatccttgtgttagataatggtagttagagatcatgatctggatgctacttgggtttattgctactattatttcacttcttctaagtctcctcggcaaagagaggcaggatatgtatatatgtatgtgtgttaacccaagtatatacacaaagtatttatatgtatttctttatctgtgtttgtgcatgtgtatgtatataatgtcagataaaatattcatatttatgtatcatagtttagggatctgaaccaaaggcttattaggtaacttctctaacatcatgaatttactttatttactcatcttagttcatcttaagtacatgtcttctggttcctcgtctcaagtttcttaatagtagaaatgatattttattcatttctatactcctaatagtcctagtgtggtaccytgtagaggtcagaggcaataagtatctgataatttgaaatatccagagaggtagattaataagtgagaataacctttctctcttgaggtttcaatgttttcctatatcagcaaatttcaccttcaactaagataaactattaaatgtcaccatgactcaattaacatataaatcctaaaatgttagtatgaaggac

SEQ ID NO: 306505 - DNA, 604 bp, Homo sapiens
acagtcagcatttccccccatctctcagctctttcgttttatgtctgttgacctcattctcttgtagatgggctttctctatttggtggtagtaagttagaaggagagggtcaggaaatgtgagatgtggaagtgtggctacaaagaacttcaaaattatactggtctcatctagtaactggtgtcatatagtaactccaaaatagagtctctcatcctgcatctatatagaaaacaccaagaaaagattctgaytggcccagtttaggttaaatacatccaaccttgagtcaattgctgtggccagggcaatgagataccaggatgggccaagtctaaaaaatattttcattcctggccagggaaatagaatactgaattggcacccttgcctaagccagtgggggagagaaagaaataatatgtattaccaaaaaagagtgaggagattctagtccaataaaaactaatattcaccaagggtgccctcaccatctattggcagtggtgaaaaccagctaatccattcaactatcatgggataagcttcaaattgcttggtgggatagaatcataaccttttataaaattctcagtctcacga

SEQ ID NO: 306506 - DNA, 539 bp, Homo sapiens
cctttaagttaatgatttcagaatctaaattctatagctactatttatggaatgcctactatgtgcccataatgctagggactttgcataaattatctcatttaattctcaacaccccagcttattttacaatccatatgtccaggaaataagttcatgccaaaccattttagcacccagcaaaacctttttcacttaaactaagattttaagaaaatcttaaacttcacacttcaaaagccattttgacaattattattttttaaaaaagaattcaggcaaactgaaatcacaaaggggactcaagtaatttacccctaacataaatgcatgtaaactccttttccttaaagagaatctaaatacccaaatccctctttaattatacttttacttgacggaagggatawaaaactataataggaagagctaatggacccaaaggactactataatttccaaaagaggtataaagtatccaacattttcaaatttattttctctagaaaattatatttttatggaacattttgtaagaa

SEQ ID NO: 306507 - DNA, 559 bp, Homo sapiens
gtgagtcacttctatggaaagggagaaaatagtaacctcacagtagagaaagattaaccaagtgttagtttgctaggactgccataaccaagttctacaaatggagtggctcaaacaacagaaatgtatttggtcttatagttctggaagcttgaaattgaaaatcaggttattgacagagttggttccctctgagggctgtgaagaaagatcccttctgtggctctctctgagcttctagttgtttgttggcaacttttggcattctttggcttacagaagcatcaccccaatctctgcctwcatcttcacatggcattctcatgttagtgtctatgtccaaattacctctttttatgaagacagcagtcatagtgggtgatatggtttggttccgtgtcccctcctgatatggtttcgttgtgtcctcacccgaatctcatcttgaactctagttctcataatccccgcctgtcatgggagggacccagagggaggtaattgaatcatgggggtggttacctccatgctgttctgattatagagtgagttctcacga

SEQ ID NO: 306508 - DNA, 630 bp, Homo sapiens
atacattgctcaaatctcatgttgaattgtaatccccagtgatagaggaggggactggtgggaggtgattggatcacaggggtagacttcccccttgctgttcttgtgacagtgagtgacttctcatgatatctggttgtttaaaagtgtgtagctcctagccatgtaagacatgcctgcttccccttcatcttctgccatgattgtaagtttcctgaggccttcccagaagttgagcagatgctgtcatgcctcctgtacagcttgtggaatcatgagccaattacacctcttttctttataaattatccagtctcaggtatttctttatagcaatgtgagaatggactagtacagtggcttagggacccaccctattccaatagggttaagacctcatcttacaactaattacatctgcaaagaactcttttctagtaagattacattctgaggtactgttgaggttatgacctcaacataggaatttcagtggggacataataacccatagcgctaagtgataaatgttaacatcaccaataataaatcatatcaataccacatagcccaatactatgtaattagaatacatcayctctgtggtattcttccccaaaattcataacc

SEQ ID NO: 306509 - DNA, 449 bp, Homo sapiens
catttttaaatgaagaaaacatgaattcagggtattagagtcttttattgacattgtgcatcaattctagattgaagtaggaggtaagttctactaaatgatactttcaatgggttaattgtccaaacgatggacataagagcactagaatctatgatagtgtaattagttgacttcatctgaatcactaaawtatggcacaaaaatgtatgttactctaggaggatccacaagtttcaaaacaagtaatattcctacaagcatctttatagagaccaaatacagcttgttagaatcaggatgttataaattattttaaaaatatatgtatgaaataatgcattattgttgatataggaaacactcctggaaatcacaagacatgattgtttcaatagacatgtggcagagtacataaattggcaagtacacaagaagaaatatataac

SEQ ID NO: 306510 - DNA, 622 bp, Homo sapiens
aatatatactgatttttaacataatttcttatcagaatcagtatactcttttgccccaagaatcagcagctcatcagcttatacaattgagccactttgctatagacaataaggatacttaacaggtatttgtgctctacctaaacgttcaaaccttcctggttttataaaagagattacaattctcctctgcagattcttgttccatcaatatagtatgtatccaatcccagtccctactttcagatgaaatatcaatgtggttctaagacaacagtttaatttccctcatattctttttttctttctcaaggctttttgacaaatcttgtgtctgatatctacaaagtgctagtttcgcttactcatctccagttatttctttttcttattgtgcmcttatcctcttactatccccagctaacttaaaatttattcaacacctatatattggaaccaaattcttgttgttgaaaagtttatttttaaacattcatcatgcttgcaagttatgtgtacttctgttatttccaagtgtaagctcaaagttttatactcatccaatggtacaatatagaatggaaagtgttctagagcatggtggattatactatccttaggt

SEQ ID NO: 306511 - DNA, 447 bp, Homo sapiens
atacttaacaggtatttgtgctctacctaaacgttcaaaccttcctggttttataaaagagattacaattctcctctgcagattcttgttccatcaatatagtatgtatccaatcccagtccctactttcagatgaaatatcaatgtggttctaagacaacagtttaatttccctcatattctttttttctttctcaaggctttttgacaaatcttgtgtctgatatctacaaagtgctagtttcgcttactcatctccagttatttctttttcttattgtgcacttatcctcttactatccccagctaacttaaaatttattcaacacctatatattggaaccaaattcttgttgttgaaaagtttatttttaaacattcatcatgcttgcaagttatgtrtacttctgttatttccaagtgtaagctcaaagttttatactcatc

SEQ ID NO: 306512 - DNA, 638 bp, Homo sapiens
attactgccacatttacaatgataacatcaccaactaatacaaaaaatctgtcaggcaatctaaaattcacaatattcttgctcctattagagagctagcaactaacaaatttctggttaggcaactaacgagccaaaaatctaaggaaagacaggtgcccccaagaagaaatgatatggaagcaatattttacttgaacagatgcctctagatgtcagtaagaaaattcaactaaaaatcttaatgaattgcttaaagttgagtataatagaatacagaaatcatgagggcttcaggcaccagaatacacacccactcrtaggttcttcttcctgtaactaaccaggggctcacaaaaaaagattagtaagagttctaaaagagctcatgtgtgtggtgtagaagccttgggggaataaacagcaaccaatgtgggagagggacaaaactccacttatattcttccactaaacagcttgggggaatggggaaaatatcttagcaactatagttgggggacatgaacaggaaaaacaaaaagacagtgccctgagggaggggcaggatcattaaaggaacttgaagacgctagtgatctgaagataaccatagcagcaattaaactgaaaccctgttc

SEQ ID NO: 306513 - DNA, 629 bp, Homo sapiens
ttcctcccaagatcaggaaagacaaggcacactcagtttcatgaattcttaacgtttccaaaaaccatgaaaaaactcagtgttgtctgtggagaggaaaatcttctttgttttaaagtccataatctaagtcttataaactcacttggattaaattccatgggaagaagatagttttggcagtatgcatttacaatttctgcctaacctcttagtgtatatttctttgagccctgtgtttcctacctttgactatggaagtaaatgtatctctacacagtgacgtagcattcatactctctcatcaactgatttttcagtcctgagccacggtagctatttttaccaccacttgctacagaatggcttaggtgtaygaattatacctcttggggaaaacttttcccacgcatataattaatcgaatgctaacttgaggccatatggccaggaaatagccctcaggtaaaagccacatggatgcaagtttagcttcaatttagcaagtggacagatacccgtttggctctgaatgcagaacagaatttagtacagtgaaacaagtgctacttgtaggcctgatactaataatttaaccaataatctttctaatatctcctaccagactc

SEQ ID NO: 306514 - DNA, 344 bp, Homo sapiens
ttaggacagcaattcatttggggagtcattgagttaaacaaaaataaatttatctgctgcaagacttttcagagtgcttcacatgcaaaaatatgttgtgaatcaactagaaaagaatacctcataagaataaaaaggatattctaatgcaaatacattgacatagctgttttgatacaatcattttaaarctatgtttaaatgacacaataaaaatgaaaagtcattatgtgtccagtagatatctcacacatttccttcataactaagtgtacccaaattatgggaaactttcactttttgcttcatttctgtatcatttggagttagtatgaatttgcatt

SEQ ID NO: 306515 - DNA, 551 bp, Homo sapiens
accaaaaagcttaaaagaaaaagctgaggaaagagatgtctgcatgggggcttctagagtcccagacatatacctggaactccagaaggacatacacatgtgtagggctgtgtacatattcaggactatttgcatgctcagaaaacatctcagcaagccctatgctcccaccactcatggcagatctggaggctctgtggaatcacaaagcaaaggctaaggcagagtcgaacactacctgactgttaaaaatgtgctcatacacatacagagcgcctctcagtaaagacagaagtwttggatttacccttgtatttaaggaatcatctgttcaatcattagttgaccaccaagctaaccaagcagagacctcaacggccacgttagaaatgcagactttattacgaaaacattatgctaagtgaaataaatcagacacaaaatgccacataatatatgattccatttatgtgaaatgtccagagttgataaattcaagtgacagaggattagtggttaccagggcagaaggttgggggaatgggcagtta

SEQ ID NO: 306516 - DNA, 496 bp, Homo sapiens
tttgtgcatttggagcagaagttgcccagttttttttaaaaaactgaatttgtaaaagaatagatcaatgtagactagaaccactagagaaagtttgtaaagaaggggccatgcaccaaactttgaagttytaggagaagatataacaggtcaagaaaaaaaaaaaaaaaaaaaaaaagaagcaaaagtacaaagatggaaataaaggaaacaataaagagagcagttttttgaatagaaggtttatatgatgagtaatgcttgataattatggctaagcactataggaccagagcacggggaactttgaaaatctacacagactcagtgcagtccacagaggctgataatcttagaaatgggtgcatcagtgaattttgtagtcatgcagcatatgtctaggaaaagggtagcttgattattaaaaagaggaaggccttattcataaatattttttgaagcctgccttctgaaatttgccaattttttaaagaat

SEQ ID NO: 306517 - DNA, 322 bp, Homo sapiens
gccatttcatgggcactaagatgagccccgtgtttggttggatgttctgctgttttgaaattcttaatttttgaacaagaagacccataaattatgtggtcagtcctgaggatatgaagtataaacagaccaaagaaaattttaggcataatagagtcagtttaaataagaggtasaggcagccaagacaaggccactcctagatactaccacacggttgcccctctactcagatgctgttaaaaagaggtttagaccaagccctactttttcacagtatatcctctaccccttttctttttctaactactctcagcctttg

SEQ ID NO: 306518 - DNA, 619 bp, Homo sapiens
tagtataagatcactaagatacatttatatttgatacattattaagttttgaaactttgaagggtaatctattaaagaagtaaaatcttaagttgaacttggtggagaagggaacacggtcaggaggaaggcaaagagaagcagagagtctggagaagtaataaaaaagaagtaggatgggcaacaatttccaggaagaattaaagaggaaatgtggctcaagtatcacaattccctgagaagaagtcttcatcatagaaggaggggaagaaaaggttaaatatacacaggagtgggttgggccaacccatctgctgagtctgacagtgtataaaagtggcttgctccagcattgcatcaacattatcgtgtgggaaagtgagagttggagtgtggtagaggcattatgaatcacctgcttagacctacttctcaaaattgttgcttggaaattatctcttacccaaatagaggtacaatggcggcaacrgtagcagtgactcaggaatgtcactgaacagaatgtgtgtaagttcctcaagatagtagttaggcagagagccaggcacagccacccagctagccaaaaaggaatagagggaagagagtggctgtgaaa

SEQ ID NO: 306519 - DNA, 579 bp, Homo sapiens
ttgaacagcctctgtggagtggtgttataaagatccatcaatatagcaatagagaagtgataatctgtaacaaaggatcagtttgtaggaactcactctgcacaattaggacttctccaagcaatagtcaactgatatacagcaggtaagtagggcaattgagcattgaacaatcaagatagaaacaacataaaatcaagagtatgaagagcctgtaaatagttgcaagggaaatgttgaaactaccttaatrttatactataattattaatgttcatgaataaaaaaattgaatatcttttctcttaaaataactttggtgtaggaagaacatacaaatgatatgtagttttaagtgaagtggttctttatttaaataacaagaagtatgatgtctatgctaagaatattatgattctttatttaaataaagcatgatgggtagagaaacaaaagaacacccacaaaaaatcctgaagctttattgaatttttctcctaaagcttacagaggacatagtaattatcctgtgaaattccctgctttggtgtagagatagtaagactaatgtggctcaag

SEQ ID NO: 306520 - DNA, 579 bp, Homo sapiens
ttgaacagcctctgtggagtggtgttataaagatccatcaatatagcaatagagaagtgataatctgtaacaaaggatcagtttgtaggaactcactctgcacaattaggacttctccaagcaatagtcaactgatatacagcaggtaagtagggcaattgagcattgaacaatcaagatagaaacaacataaaatcaagagtatgaagagcctgtaaatagttgcaagggaaatgttgaaactaccttaatgttatactataattattaatgttcatgaataaaaaaattgaatatcttttctcttaaaataactttggtgtaggaagaacatacaaatgatatgtagttttaagtgaagkggttctttatttaaataacaagaagtatgatgtctatgctaagaatattatgattctttatttaaataaagcatgatgggtagagaaacaaaagaacacccacaaaaaatcctgaagctttattgaatttttctcctaaagcttacagaggacatagtaattatcctgtgaaattccctgctttggtgtagagatagtaagactaatgtggctcaag

SEQ ID NO: 306521 - DNA, 461 bp, Homo sapiens
tatgccaaagttatttttacagaattactgaatttatataaaatgatgtcaatataaataagtttgaccagtggaattaaaaaattcctcatgtagagaaatggctggactatttatatacaatatacaactactccttcataattttttaaattcttataaaaactaatttatgtcatttagttttctacattttacttttttcattagacagggaagtttcaacccaacatgttatttgcaaagaaaataattagrcttgtgtagaacactattatgtttcttaaaaggttttttgtccttttagagaagaaaataacattttcttgtaacgttcttttaaattcactgaaaaagaagatctatcctgaaatttaaacactaagtcatccttaagaaaacgcttgtctgatttaataacaatgattaggaaattattcagtctccagtatttttgaaat

SEQ ID NO: 306522 - DNA, 446 bp, Homo sapiens
tggtacaaaaatagctgttgacaaatattgagracctgccacttttcagatacttggttagatattttgctaatatccaaatcattgggaaaacttcctgaaagacaataggtaacatttactatttgttttacaggtgaagaaatggggacaagagacattgattttttcagcgcaactccactgttggtgaaaaaacctttcagagaatttaatagattgctggttttcctaataaatatgcccttatggaaatatttaagttataggcaggcatgcttatgaagacttccccatgaccttaatacaaatttttcagaatataaatataactggaattaaaatacatctattatagtatgatatgtaaaacactgcctgtttttttcatgcatgtatcttaatacctttaaggtatccattcagcattgcctcaagaaagggag

SEQ ID NO: 306523 - DNA, 446 bp, Homo sapiens
tggtacaaaaatagctgttgacaaatattgagaacctgccacttttcagatacttggttagatattttgctaatatccaaatcattgggaaaacttcctgaaagacaataggtaacatttactatttgttttacaggtgaagaaatggggacaagagacattgattttttcagcgcaactccactgttggtgaaaaaacctttcagagaatttaatagattgctggttttcctaataaatatgcccttmtggaaatatttaagttataggcaggcatgcttatgaagacttccccatgaccttaatacaaatttttcagaatataaatataactggaattaaaatacatctattatagtatgatatgtaaaacactgcctgtttttttcatgcatgtatcttaatacctttaaggtatccattcagcattgcctcaagaaagggag

SEQ ID NO: 306524 - DNA, 536 bp, Homo sapiens
aataaaactgtctctattagcaaattatatgattgtctatatggaaaataccaaggagtctcaaaaaaaaaaaaaagctaatgtcttagaattaataaatgaattaagaaagctttgggccaacacacaaaaatcactcatatatactagcaacaaacatgtgaaaaccaaaatttaaaacacaatagcattttcgatcactgaaaaaaagaaatatatagatgtaagtctaacaaaatatgtacaggatatgtatacaaaaattacaaagccttttttttttttttaactttcatggctttgacacttttaaagattacagggcaggtattttgtaraatcccaattcatctgggtttctctggtgattcctcatagattcaggttatgcatttttgtcaggaatatcacaaaagtgggtgctggtttttcttgctacatcctcttagttttcaggtttcaatttgtctcatcgctgacaatgttcactttgattgtttgattaaagtgttgtctcccaggcttttccactataa

SEQ ID NO: 306525 - DNA, 531 bp, Homo sapiens
cggttattagcagagccaagactggtttgtgggggtccagactcttcactcccctctcctcccatgtgtccacacggatcatgtttttttggaagcctacattcataactggcactttttctcttctgtctcattgtaatggccaaagcaggtcacatggccagcccagattcgaggctggggaagtggactccacctcccaataggaggacctgcaaagccacattgcaacagatatggctataggacagggtgaagactctagaatatttttgcaattaatctaccacaaatggccaatgtcttccacaacctgatcttttctccaggcaaagtagcagtgggccccatacacactttttcaagtgcaagtattatgtttgtcttttggcattctagaggtctcctccctaaactctggggaagccttggaaaggtccataagtatctgctgagtgcctrttgtgagctcagcaccagtgtgaggctgaggagagtacagaggcatgaatctgtaggaatcagtaagct

SEQ ID NO: 306526 - DNA, 591 bp, Homo sapiens
gccattttaaaaatagtctatagaacaataaaagataagttttttaaagaatgtctttatctggcaaaattaaaagttgggaattctatgttggtcctaaaccctttttttaaatgttattggtgagaaaacccaaagcctgggaactcttagcacacggtsgcaatttagacatgagaaagggtggggcgagcttgcttggatagagtggtgaaaaagtggggctgataggaggaaaggtagttggaaatttagaggacgagttaaccatttggttatgggagtcaacagaggacaattccaagggtaccattaatcaaaacaggagagccagaaggataaaggtagtttggtggaggcagagtaggcagaggctggcaaggaagagattcgttttggaaatgtcatgtggtttgttcctgtaagatacctgtttggaaatgtccaatgagcaattaaaatgtcagtctgcagcttgagaggggaggactacttattgatgaaacaacaggcatttattttatacttactatgagccaagcactaagtttgggggaaagagacatatttgcatgttattccatagactcc

SEQ ID NO: 306527 - DNA, 591 bp, Homo sapiens
gccattttaaaaatagtctatagaacaataaaagataagttttttaaagaatgtctttatctggcaaaattaaaagttgggaattctatgttggtcctaaaccctttttttaaatgttattggtgagaaaacccaaagcctgggaactcttagcacacggtcscaatttagacatgagaaagggtggggcgagcttgcttggatagagtggtgaaaaagtggggctgataggaggaaaggtagttggaaatttagaggacgagttaaccatttggttatgggagtcaacagaggacaattccaagggtaccattaatcaaaacaggagagccagaaggataaaggtagtttggtggaggcagagtaggcagaggctggcaaggaagagattcgttttggaaatgtcatgtggtttgttcctgtaagatacctgtttggaaatgtccaatgagcaattaaaatgtcagtctgcagcttgagaggggaggactacttattgatgaaacaacaggcatttattttatacttactatgagccaagcactaagtttgggggaaagagacatatttgcatgttattccatagactcc

SEQ ID NO: 306528 - DNA, 591 bp, Homo sapiens
gccattttaaaaatagtctatagaacaataaaagataagttttttaaagaatgtctttatctggcaaaattaaaagttgggaattctatgttggtcctaaaccctttttttaaatgttattggtgagaaaacccaaagcctgggaactcttagcacacggtcgcaatttagacatgagaaagggtggggcgagcttgcttggatagagtggtgaaaaagtggggctgataggagkaaaggtagttggaaatttagaggacgagttaaccatttggttatgggagtcaacagaggacaattccaagggtaccattaatcaaaacaggagagccagaaggataaaggtagtttggtggaggcagagtaggcagaggctggcaaggaagagattcgttttggaaatgtcatgtggtttgttcctgtaagatacctgtttggaaatgtccaatgagcaattaaaatgtcagtctgcagcttgagaggggaggactacttattgatgaaacaacaggcatttattttatacttactatgagccaagcactaagtttgggggaaagagacatatttgcatgttattccatagactcc

SEQ ID NO: 306529 - DNA, 524 bp, Homo sapiens
caatgacttctaacttttatggtgcatttcccacctaatcagagtaaacatcagacttcaaattccatttatcattttatctgaaagaatttactgagtaaaatccttagttgcagggctttacacttgcaatccatcaggttgcaatattaaagttactacagcttcttccccagtgtaagcattctgtatgtgttttatttacattgtcactttttatttcctcctcaacttcrtatgtctaagaatgaaactggattgctattatgcaacagtattttaactttgcaacatacatactggcttatctctcctttgaactcctgttcctgaaaaataaacatatgtatccagaaaaactaccttgaggcgtgtggggaagagtgcagacatgtagaaacaaacactaaaatacagtcgtgtggaaaggtaaggatgtatctgtcctcgttgacaacaatccccgtggtttattaacagccacaggcagccaacttagtgccgtaagtcggtaacccagtggg

SEQ ID NO: 306530 - DNA, 574 bp, Homo sapiens
tgaggcgtgtggggaagagtgcagacatgtagaaacaaacactaaaatacagtcgtgtggaaaggtaaggatgtatctgtcctcgttgacaacaatccccgtggtttattaacagccacaggcagccaacttagtgccgtaagtcggtaacccagtgggcakcggggctttaaggtctcttaaaacttaatgtgattcaaaaatacccaaggcaaccacgccgaaaaaccaggagaaagggctccagttagagcctccttggcaacccaaaccgaaccgaatgactcaggtggacgattagaataaaccgtgcgccgttctctttcactaggtctataaagcccagaaattatgtttggtccagaaaaccaggagttatgagcaccttccttttccaccttttaatattctacatatctagcaacggttcttaatccatggtcttcattcatttattgcctaaacaagatcttgggtgtctcttggtgatcacttcttccaagctgacctaatatgacagcaaagtgaaaagcctcttcgtgggaagggtcgcgaccgcgcggtaagtcatcca

SEQ ID NO: 306531 - DNA, 574 bp, Homo sapiens
tgaggcgtgtggggaagagtgcagacatgtagaaacaaacactaaaatacagtcgtgtggaaaggtaaggatgtatctgtcctcgttgacaacaatccccgtggtttattaacagccacaggcagccaacttagtgccgtaagtcggtaacccagtgggcatcggggctttaaggtctcttaaaacttaatgtgattcaaaaatacccaaggcaaccacgccgaaaaaccaggagaaagggctccagttagagcctccttggcaacccmaaccgaaccgaatgactcaggtggacgattagaataaaccgtgcgccgttctctttcactaggtctataaagcccagaaattatgtttggtccagaaaaccaggagttatgagcaccttccttttccaccttttaatattctacatatctagcaacggttcttaatccatggtcttcattcatttattgcctaaacaagatcttgggtgtctcttggtgatcacttcttccaagctgacctaatatgacagcaaagtgaaaagcctcttcgtgggaagggtcgcgaccgcgcggtaagtcatcca

SEQ ID NO: 306532 - DNA, 584 bp, Homo sapiens
ggctccatgtggcgcggggcgctggcaggcgggcggcgggggtgcagtacgcgcggggccggccttgtggctttctaggctggttttgagttccaggtgttttatttatttatttttatttatttattttttttaacggctaggcccactcggggctgagcccgaagggcgccgaggcgttactggggggcaggagccgcctccagggccctgcgcgcctgtggcacgactgccgggcgccgggctgccattttgtcaccgtggctgttgtcgctgtggggggcggggggagcggagtcttgcgccrtcaccccgacggcctcccgcgcggaggaggcagggggagccggctttggggacccccagttgtgctatgagccccgatgggggtttccgccccgcgccaacggcctgaggctgtgctggagagtcacggcggccgcggcgccgggaggacgacgatcctctgtgcaaatgcccccccccacgcgctccctgcctcccccgccctcctctccggggtttcgccgttcctcctgcaggcgctcagacgtagttaaatgtggccttaaggactaaccgat

SEQ ID NO: 306533 - DNA, 531 bp, Homo sapiens
  misc_feature (1)...(531): n = A,T,C or G
cgtcaaaggcagccacgtaccccaggcctgtcctctgtggcttgcccngagcccttgggggccacctaaccacactaagtatgataggaccaccgagttgggaggaagcttagaaaccctctagttagtccagtcccttcacaacagagaagaccctggcccagagtggagacatgactgccctgacctgtacttgccctgagactaggctgagagaggagcctgggacgtgccacccagggtgtgagggcctgggcttcgttggcaccaggggcggccggtgctgcatggagctcccctctccaatgcctcatgggcattcactcagcagctcagttctccmgaagagaaccttggggcccagtcccttccaagacaggtgctaggcccaaccttctgcactgcagagcagggggccctgccgtgtcagctcctaggatgactgagcaagtcgaggcagctcccaaggccatctggactaaagctcatgaaggcaggtggagagaagcatctacctgccacgtggttcat

SEQ ID NO: 306534 - DNA, 542 bp, Homo sapiens
ctgaccttcttccactcctgttccaaagacggtgctagctctgctggcctctcccccgcctggtcatctgtcttccccagataacccacatctcctcctccctcacactcagctccagcgagcccgcgccccacattccactcccccacatggctcctccctccactctagacccctttgccaggcgctggccacctccttccctcttcggggtccctccccgcccatccctggatcctctgttccagagcctgtaggracatcttccacttccacagtcccaccatggggacctggaacccacagagacacaaggagaaccccaacagtcacagtgacaaaaagaaaaagagaagccatctctctccgtgcctccagtggcttctcccctccccccagcttcccccacagaaaaccctgggaggctgaggaaggagcggaaagacggagctaagcctgcaggaaattaaacatgaaatgaaaacaagctcctctgattcattctctcatcctggccccagtctcccatcccaggccactga

SEQ ID NO: 306535 - DNA, 549 bp, Homo sapiens
acgtatgtcttaggcttccagtgggtgtctttcccactgtggagaaagaaagactgcctgaaagaaagccacagagaaaagcagagtcagaggtagagagagacaaagacacagaaccgctggatctagccatgcctgaagccattgacacttggaattctcaattacaggagccaatatattttcctttttgcttaagccagttttcattaggtttctgccacttgcaaccaagagggaatacctccctgctctcagccaaacaaggggtctggactctggtatggcccaagttctctccttcctagcagctgccacctccycatcccctgcagaagaatctccaacgattgactgtctgagccttctgagcctccaatcctccaggctcccttccagctcagacctcagactgcatagctcttgtacagagtcccagcctcccagatttctagactccttcccatgcacctcctggtcatggcgatgatggggcaaggtaagcagggcaatggctgtgtgggtttctgtcaagcccaggccttagaa

SEQ ID NO: 306536 - DNA, 549 bp, Homo sapiens
acgtatgtcttaggcttccagtgggtgtctttcccactgtggagaaagaaagactgcctgaaagaaagccacagagaaaagcagagtcagaggtagagagagacaaagacacagaaccgctggatctagccatgcctgaagccattgacacttggaattctcaattacaggagccaatatattttcctttttgcttaagccagttttcattaggtttctgccacttgcaaccaagagggaatacctccctgctctcagccaaacaaggggtctggactctggtatggcccaagttctctccttcctagcagctgccacctcctcatcccctgcagaagaatctccaacgattgacwgtctgagccttctgagcctccaatcctccaggctcccttccagctcagacctcagactgcatagctcttgtacagagtcccagcctcccagatttctagactccttcccatgcacctcctggtcatggcgatgatggggcaaggtaagcagggcaatggctgtgtgggtttctgtcaagcccaggccttagaa

SEQ ID NO: 306537 - DNA, 662 bp, Homo sapiens
aggacagctggtcacccacccaccccctcttcaaaaatcaagtagcggaattaacagcgtgctggaccttcctgagcctgtgccttgagagcagtgagttttctcacagcaggggccaggtctgtcttgttcgctgtagggcttggcactcataaaaygcttgttgagtgaatgaatgaaagtgtcctatggttcccaggggcttagagatgcatttttttgtcaaggagttccaagccagccgcctactccagtctcctgtgcccagcagctgcctgtaggcacccagaaggtggtggcaatacccccgcttctttctccacctccattcctgtctaaaaaatgagggaaggactatgagaggcaaattgtggtggagagggttggggtggggatgacaaccccgagacaggaacaattgcaattgtacactcttcctagaacctctgaaccaggcgcacccaatgcaaaaatttgctgtgtttcatgaagcattttttgagcatcacctcgcctcttaccacctaaacactctgagcttgtattacctgtttaattactgcctcgctattcaacctttccctgaccacctggatattcaaacccaaggatttcatgccctaagccagaatctttcctgtcttgcctgagaccctgtgtcc

SEQ ID NO: 306538 - DNA, 489 bp, Homo sapiens
tggtggaactattattctcattctataatggttacgaaatcgaaacacagacaagtgaagtaatagctcsgggccacacagcaaagcagaggacttgggattcgaactcaggcgatccaacgtcagaaactatggtcttaaccgctgcgcgagttatcagaaatccctggagccaaacactacgggggaccggcggaccaaaaggttcctaactcctttggacctccagggctcgcagaaaagctgccacttctccagagccgccagggcgggcgcgagagcagcgagtccgcgcgggtcctcggcgcgctcgccagacccagccgaccgcgtgactcaccacgtcctccgccgggaggaggtcagcatcggccctgggcaccggtccccagccgccgcagcccctgccccaatctccccggaatgcggacgccgccgcgccaacccgagcctccagtcggatagaggcagggagggaggcactgccca

SEQ ID NO: 306539 - DNA, 489 bp, Homo sapiens
tggtggaactattattctcattctataatggttacgaaatcgaaacacagacaagtgaagtaatagctcggggccacacagcaaagcagaggacttgggattcgaactcaggcgatccaacgtcagaaactatggtcttaaccgctgcgcgagttatcagaaatccctggagccaaacactacgggggaccggcggaccaaaaggttcctaactcctttggacctccagggctcgcagaaaagctgccacttctccagagccgccagggcgggcgcgagagcagcgagtccgcgcgggtcctcggcgcgctcgccagacccagccgaccgcgtgactcaccacgtcctccgccgggaggaggtcagcatcggccctgggcaccrgtccccagccgccgcagcccctgccccaatctccccggaatgcggacgccgccgcgccaacccgagcctccagtcggatagaggcagggagggaggcactgccca

SEQ ID NO: 306540 - DNA, 448 bp, Homo sapiens
ttttacaaactgaccaaccccgccgcccgcgcccgctggagggagacgcacacctttgccctgcatattcgcttccaggctctgcatctctgctcttggggagccggccacccgcttttccgcgcgggggctggggttctcgcctgaaggcgaagtccgcgtgcgcgatggaacctggtgccccgccctctctggcaagggcaaggccaagagcgcagggcggggagaggagctccggggacccgcggaaaacctggctcgaaagccctggaggcgagctctccacsgtgttcggtgccaccttaattcttgttgaaccgagaggaagttgttgaaaccggaagtcggcctctggggtctgagcccgtccaccctttgcagatcggtaacagccgaggaaagcacagatattttaagtcctcacataattcccacgtcattagccaaa

SEQ ID NO: 306541 - DNA, 448 bp, Homo sapiens
ttttacaaactgaccaaccccgccgcccgcgcccgctggagggagacgcacacctttgccctgcatattcgcttccaggctctgcatctctgctcttggggagccggccacccgcttttccgcgcgggggctggggttctcgcctgaaggcgaagtccgcgtgcgcgatggaacctggtgccccgccctctctggcaagggcaaggccaagagcgcagggcggggagaggagctccggggacccgcggaaaacctggctcgaaagccctggaggcgagctctccaccgtgttcggtgccaccttaattcttgttgaaccgagaggaagttgttgaaaccggaagtcggcctctggggtctgagcccgtccaccctttgcagatcggtwacagccgaggaaagcacagatattttaagtcctcacataattcccacgtcattagccaaa

SEQ ID NO: 306542 - DNA, 561 bp, Homo sapiens
gcactttaagtagcaccttcttcaccttccttgattcgcttcgtgagcttactactgccctgtggagtagggtctatgtcccygttttactgttagggaaaggggagcccagacacgcattgccgttttcccgaagtcactgggccagcaagaggtcaggttgacctccagcccagggctgccggctcccaggcctgctgtctttatcccggcagcctcctgcaacctcctccaccctgccctcctgccgcctgcctccggaggaggtggtccctgccctagcacctgtcataggaggcagccggagcgcacattctgatcgcataatcccgaggcttgtgactggcagggaggggggctgagaggagcgaggcggacatcggggagggcagagccgaggggaatgcacaggagaagtactaggtaaccttagccacagaaagagacagaaggagggggacaaacatggggctgcttggcatagtgcgcggcacagagtaggtgcttagtaagtggtggtggtgattatatttcgattgcctcctgctactcattagctgc

SEQ ID NO: 306543 - DNA, 657 bp, Homo sapiens
cagcctccctcacctctgagatgtactcgactctctcattcctgcagagatgaacaggaagagagtccccagagttaaggggctttggtgcttggaagaaagatgatctagctgtctgaaccacaggccctgcctcctgggatgggcmctggccagcccaaagctcttctctctgtagacctgaagctttgaaggatgtgtagaaggcaggccagtagcctccctcagctcagatcagtgcttccttccagcccagctcagcttgggttgtggtgagaacataggcctgaagtgagagccccagctctgccccttcctagccgcagctccacctctctgagcctcagtttcccatctggaaaaatggggctaatccaacttgaccttcccacctcataggcagatatggtagatgaaagtgccttacccatgataagaacaaaacaatgagaggagttaagatgctccttggaggagtgcacactgttccctcccagaacatcctctcccttttttccccccaggaatacacacttgtggtatatattattgatggtgtagattttgtcactagtaactccagcagaagagttgtgatgtaagaaactaggactgcagtgagagatctgtggggcaccagtccccttccatcttgtt

SEQ ID NO: 306544 - DNA, 657 bp, Homo sapiens
cagcctccctcacctctgagatgtactcgactctctcattcctgcagagatgaacaggaagagagtccccagagttaaggggctttggtgcttggaagaaagatgatctagctgtctgaaccacaggccctgcctcctgggatgggccctggccagcccaaagctcttctctctgtagacctgaagctttgaaggatgtgtagaaggcaggccagtagcctccctcagctcagatcagtgcttccttccagcccagctcrgcttgggttgtggtgagaacataggcctgaagtgagagccccagctctgccccttcctagccgcagctccacctctctgagcctcagtttcccatctggaaaaatggggctaatccaacttgaccttcccacctcataggcagatatggtagatgaaagtgccttacccatgataagaacaaaacaatgagaggagttaagatgctccttggaggagtgcacactgttccctcccagaacatcctctcccttttttccccccaggaatacacacttgtggtatatattattgatggtgtagattttgtcactagtaactccagcagaagagttgtgatgtaagaaactaggactgcagtgagagatctgtggggcaccagtccccttccatcttgtt

SEQ ID NO: 306545 - DNA, 657 bp, Homo sapiens
cagcctccctcacctctgagatgtactcgactctctcattcctgcagagatgaacaggaagagagtccccagagttaaggggctttggtgcttggaagaaagatgatctagctgtctgaaccacaggccctgcctcctgggatgggccctggccagcccaaagctcttctctctgtagacctgaagctttgaaggatgtgtagaaggcaggccagtagcctccctcagctcagatcagtgcttccttccagcccagctcagcttgggttgtggtgagaacataggcctgaagtgagagccccagctctgccccttcctagccgcagctccacctctctgagcctcagtttcccatctggaaaaatggggctaatccaacttgaccttcccacctcataggcagatatggtagatgaaagtgccttacccatgataagaacaaaacaatgagargagttaagatgctccttggaggagtgcacactgttccctcccagaacatcctctcccttttttccccccaggaatacacacttgtggtatatattattgatggtgtagattttgtcactagtaactccagcagaagagttgtgatgtaagaaactaggactgcagtgagagatctgtggggcaccagtccccttccatcttgtt

SEQ ID NO: 306546 - DNA, 533 bp, Homo sapiens
gccacagatgtcagcagttttctcactcggcactttagtttgctgaattgatgtttactgagcatggattaaatgccaaaccttttgcaagaatctgcggaggcaaagaggaaacagtccttgatctaacctggtgtaatggaaagggtagattgggagctgagagactggcagtcagtctcttgaacgctgagatccttgttttgtggtctcttgtagctgcctgtgtccttgttctgtggtctcttacttataccttgagatcttgttctgtggtctcttacttataccttgttctgtggtctctgagtagctgcctgtgtcctaaatcactgcttcctggatagaaagctkcgggctgggccatttcaggcgagcttgtttggaagggagtaaaagggtcgtggggagggagatatcgctggagcacttcatggcctggctgaccacagacaagatgggcaacctgagtgacccactgaatgcatgtattactcaagactcttcagttgcaagtgacataaacttaacaa

SEQ ID NO: 306547 - DNA, 528 bp, Homo sapiens
accaaacaacaaaaaccaagactgaacaataccccaagccacatcagaggagcctgctgggcacccacctgggcagagtgggatgcctgggtaccactcccagctctgccccctggtcaatgccagtgtagtctctgggggcctcagttcccccaactcttccttccttctgggccaccctccttgggtggtgtgagtgagtgggaggccagggcaggcttcatggcaaaatctcagccgtaaggtggctgsagactcttgatttaaagatttaaaatgatctacagccagaatcccagattaatcacaattagcaagttaacatctgttcagcatttgacagtttacaaagcagttaggtagtcattcctaagatgagcccatgaagttaacagtgcttctcccctccatcagtgaggaaactgaggcacagagaggataagcagcttgcttgaggtcacacggctagcaagtggcaaagctgtgctttgagcctaagtttgttgattttaactagacattattatg

SEQ ID NO: 306548 - DNA, 607 bp, Homo sapiens
gttttggcaattacaaataaagctgctacaaacattcacatataggttttcatgtgagcataaattatcattcctctgggataaatgcccaaatgtgtaattgctgagtcctatggtagttgcatgtttaattttataagaaactaccaaaactatttttcagagtggctataccattttatatttccaaaaacaatatatgagtggtccagtttttctgtattctcattggcatttgcygtttgtatttttttggttaactttagccattcttataggtgtgtaatgatatctcattgcagttttattttgcatttccataatagttaatgatactgaacatcttatttgccacctgtatatcctcttcagtgcaaggtctgttcatggcctttgcccattttctaactggattatttgttttttcattgttgagttttgagagttttaaaaaacatattctagatgtttagccctttgttggatatgtggtttgcaaatattatctccaagtatatagcttgtctttttgtcctcttcacaaggtctttgacagagcaaaagttttacattttgatgaggtctcattggtcaattttttttttta

SEQ ID NO: 306549 - DNA, 565 bp, Homo sapiens
tgctgtgatttcgagggatctcaaacccctggagtctttctacagatctctgattgtttaatgctcttattttatagatgaagaaatggacaccgagagaggtscagggacctgcccacattcccaggaagaggtagccaggcccttctcatcctcctccctccagagctccgggccctgcacagctgtatcccaggtctgccattcaccagctgtgagatcttgtcaagatatctgagctctctgaatgcccattttctcatctataatcaggcacaaacaatcctcatgccctgggtcttcttttgtactgagcaagtgtgactgtcgggtcccccacctgatggcacctgccacttcctcacacctatgccttccccacagcataggtagacgctggagggaggcatgcattccacgtgacactgtgtctgtgcccttggtgctgagcacctccatgacaccagaaaagtttccccagttgggctctgtgtaattttgggcttctatcttctgatttgttacgttgaatgagtactagttcaaaactcctttctgggtttag

SEQ ID NO: 306550 - DNA, 565 bp, Homo sapiens
tgctgtgatttcgagggatctcaaacccctggagtctttctacagatctctgattgtttaatgctcttattttatagatgaagaaatggacaccgagagaggtccagggacctgcccacattcccaggaagaggtagccaggcccttctcatcctcctccctccagagctccrggccctgcacagctgtatcccaggtctgccattcaccagctgtgagatcttgtcaagatatctgagctctctgaatgcccattttctcatctataatcaggcacaaacaatcctcatgccctgggtcttcttttgtactgagcaagtgtgactgtcgggtcccccacctgatggcacctgccacttcctcacacctatgccttccccacagcataggtagacgctggagggaggcatgcattccacgtgacactgtgtctgtgcccttggtgctgagcacctccatgacaccagaaaagtttccccagttgggctctgtgtaattttgggcttctatcttctgatttgttacgttgaatgagtactagttcaaaactcctttctgggtttag

SEQ ID NO: 306551 - DNA, 565 bp, Homo sapiens
tgctgtgatttcgagggatctcaaacccctggagtctttctacagatctctgattgtttaatgctcttattttatagatgaagaaatggacaccgagagaggtccagggacctgcccacattcccaggaagaggtagccaggcccttctcatcctcctccctccagagctccgggccctgcacagctgtatcccaggtctgccattcaccagctgtgagatcttgtcaagatatctgagctctctgaatgcccattttctcatctataatcaggcacaaacaatcctcatgccctgggtcttcttttgtactgagcaagtgtgactgtcgggtcccccacctgatggcacctgccacttcctcacacctatsccttccccacagcataggtagacgctggagggaggcatgcattccacgtgacactgtgtctgtgcccttggtgctgagcacctccatgacaccagaaaagtttccccagttgggctctgtgtaattttgggcttctatcttctgatttgttacgttgaatgagtactagttcaaaactcctttctgggtttag

SEQ ID NO: 306552 - DNA, 530 bp, Homo sapiens
catcttgaggcaggtatggctcagaggggtgagcagctggggcatcgctgctgtccccgsccccccgaccacccccatgacctttagggcccggaacaaggcagtaacatccaggctctgagcccaggcttctcaatggcttggaagaggcctgggagacaaggctttgggaatgctcttgtctgaggccttcagctactttagagggtctgtggcttaccctccgaaccacctgggacttcaccaaagcactggagtccactctgcggccacagctttctgaacctgcttcttagggctgtttaatcccacagcagccctgggaagtgggactctgggactcagagcagtttatactctgttcaaggtcactaagaacccaagctttttggattctgaaccttgaacctcacctccgtgaatgatgccccagaaagcccttgcgctgaataaaatgcagggcctcgagatactggaataggtcgtctcagacaaaaatttgaggggtggtctaattgaactgcttacaa

SEQ ID NO: 306553 - DNA, 530 bp, Homo sapiens
catcttgaggcaggtatggctcagaggggtgagcagctggggcatcgctgctgtccccgcccccccgaccaccmccatgacctttagggcccggaacaaggcagtaacatccaggctctgagcccaggcttctcaatggcttggaagaggcctgggagacaaggctttgggaatgctcttgtctgaggccttcagctactttagagggtctgtggcttaccctccgaaccacctgggacttcaccaaagcactggagtccactctgcggccacagctttctgaacctgcttcttagggctgtttaatcccacagcagccctgggaagtgggactctgggactcagagcagtttatactctgttcaaggtcactaagaacccaagctttttggattctgaaccttgaacctcacctccgtgaatgatgccccagaaagcccttgcgctgaataaaatgcagggcctcgagatactggaataggtcgtctcagacaaaaatttgaggggtggtctaattgaactgcttacaa

SEQ ID NO: 306554 - DNA, 499 bp, Homo sapiens
atgtaagtggacattatttgacatggagagactttccctccatgtgttaattaattaattaattaattwatttatttatttgagatggagtcttgctctgtcacccaggctggagtgcagtgatgcaatctcggctcactgcaacctccacctcccgggttcaagcaattctcctgccttagcctccggagtagctgagattacagacatgtgccaccacgtttggctaatttttgtgtttttagtagagaaggggtttcgccatgttggccaggctggtcttgagctcctgaccttaactgatccgtcctcctcagcctcccaaagtgctgggattacaggcataagccaccgcgcctggctcctccatgtgtgaatttaaactcattttaaattataaaagcaacacatacacctggtaagaaagtaaaactctacagaagtacttttaaagtaaatgaaatgagttaacatttgtacaatgcttagaagaataggg

SEQ ID NO: 306555 - DNA, 488 bp, Homo sapiens
ataaatcattggtatttagaatcctgataaaagttacctccgaatctaggacatagtctctaatggccacaacaatgaaccatctctgtaaatgaatgctacctggagacagaaactctcttaagacaaatctgaaaaatctaagaaaygttttaaacagaaagtacaaatatttgttcagtcattcaaatgctatcttgatactaaaaccaaaaaccccatgtcaaataaaaaaggtagagaggagaaaatcataggaaaaattctaagaaagtaaaaagcaggaagatcaaagcagaaaaaaaaaagtagaaatgctaaaacattccataaatgagaaaacttaatataacaggagcattaatagaggtaacaacagagagtccagtcagtagaaggaggttggagcaaacaagaagaaccaaaacaatggaataattaggtatgagaaagtgaataaacaatcaaagatcatttgctgttacaat

SEQ ID NO: 306556 - DNA, 538 bp, Homo sapiens
agtgtcctgcaattctcttttacatagacagctgtctgctagccatgcatttgggaatcttgagcagattttttgggtgtctgtttattactattggtgtgaaagggggaaagaatttattatgccctaatgctttcatttgctcgacttctttttttgtattccccataataatgctttacaaaggaggtaaccattttaaatacatttaatctcttattaatattttgtagccagctattttgccctcaatcctagatacctatgttacttctgaaattatcttccctactcacttgaatcagacctttttcttcttttaratgatgcagcagatttcaccatactttaaaacaaatgtaaaacccaccctatagactacctcattcttttctctatcaaaccacttcagtctcccatctctctccatcaagttgttgttcttttgcttcttctaagcccctgctttcacctcttttcccacctacttatcctggaatgtccttcatagattggccaaagttacacaatttctcac

SEQ ID NO: 306557 - DNA, 588 bp, Homo sapiens
ttttctctgcctaactgcttgagctgggatcaatatcctgtcctaagtgctcctgattctaggtttcagaatcagactgaaatctacaccatcagcttgctggctctcaagtcttttaaatataccataggcttttctggtatagatggcagattatgggacttctcagcctttgtaactgtgtgagccaacaccttacaataaatatctttctctctctatttattattgtacacagaaaccactgtactcatcaattgctacctttgaccaactcaaattcagcattttaaaaaatkgataaatttccatttctttggagtttttgtttactcttttgtgggtattatatttgtacaacttcttgagagcatgtttaaagtcttttaaattaatataatgagataagaaacttttaataaacaacattatagcacacattatagcatacattacttgaaaatttctcctgtatatcactggccacttttagttgcctatagctaactgaacagttattaaaaattcccaaaagaaatgagctgtagtaaggaatgtttcctttatttccagttatttttttctatt

SEQ ID NO: 306558 - DNA, 588 bp, Homo sapiens
ttttctctgcctaactgcttgagctgggatcaatatcctgtcctaagtgctcctgattctaggtttcagaatcagactgaaatctacaccatcagcttgctggctctcaagtcttttaaatataccataggcttttctggtatagatggcagattatgggacttctcagcctttgtaactgtgtgagccaacaccttacaataaatatctttctctctctatttattattgtacacagaaaccactgtactcatcaattgctacctttgaccaactcaaattcagcattttaaaaaatggataaatttccatttctttggagtttttgtttrctcttttgtgggtattatatttgtacaacttcttgagagcatgtttaaagtcttttaaattaatataatgagataagaaacttttaataaacaacattatagcacacattatagcatacattacttgaaaatttctcctgtatatcactggccacttttagttgcctatagctaactgaacagttattaaaaattcccaaaagaaatgagctgtagtaaggaatgtttcctttatttccagttatttttttctatt

SEQ ID NO: 306559 - DNA, 588 bp, Homo sapiens
ttttctctgcctaactgcttgagctgggatcaatatcctgtcctaagtgctcctgattctaggtttcagaatcagactgaaatctacaccatcagcttgctggctctcaagtcttttaaatataccataggcttttctggtatagatggcagattatgggacttctcagcctttgtaactgtgtgagccaacaccttacaataaatatctttctctctctatttattattgtacacagaaaccactgtactcatcaattgctacctttgaccaactcaaattcagcattttaaaaaatggataaatttccatttctttggagtttttgtttactcttttgtgggtattatatttgtacaacttcttgagagcatgtttaaagtcttttaaattaatataatgagataagaaacttttaataaacarcattatagcacacattatagcatacattacttgaaaatttctcctgtatatcactggccacttttagttgcctatagctaactgaacagttattaaaaattcccaaaagaaatgagctgtagtaaggaatgtttcctttatttccagttatttttttctatt

SEQ ID NO: 306560 - DNA, 588 bp, Homo sapiens
ttttctctgcctaactgcttgagctgggatcaatatcctgtcctaagtgctcctgattctaggtttcagaatcagactgaaatctacaccatcagcttgctggctctcaagtcttttaaatataccataggcttttctggtatagatggcagattatgggacttctcagcctttgtaactgtgtgagccaacaccttacaataaatatctttctctctctatttattattgtacacagaaaccactgtactcatcaattgctacctttgaccaactcaaattcagcattttaaaaaatggataaatttccatttctttggagtttttgtttactcttttgtgggtattatatttgtacaacttcttgagagcatgtttaaagtcttttaaattaatataatgagataagaaacttttaataaacaacattatagcacacattatagcatacattacttgaaaatttctcctgtatatcactggccacttttagttgcctatagctaactgaacagttattaaaaattcccaaaagaaatgagcygtagtaaggaatgtttcctttatttccagttatttttttctatt

SEQ ID NO: 306561 - DNA, 520 bp, Homo sapiens
tttctggggtgctgctgctattgctgtgtcaaccatactttaaggaacaaagtcataaagaagtgcttcaaattatccttccttgcccctatatacaacccttgtggatctcactgtttctctggtaaattttargttttaaaaagcttactcaagttcaaagcaatttcttacttgattaagaagttttcctcccaaagcccagttctgattcagtctcagaaacttgaagtggaagggttgaggatgacttccatgtcagcttcttcagtcaggttcagcagtcacagacaacagtgtggggaagcaacagaagaatcccttcaagaaaacagacggggagaaaaggaaatagaaaaaaatgcttacttgacataacgtatgatatcagtgcccatttgtgtgtcagctgtctaaatattaattctactgaaggcttttcagaaaacctaattattgaggattttcatttctagtttcttgatgaggcaacttgcatcccttggttatttactaactg

SEQ ID NO: 306562 - DNA, 507 bp, Homo sapiens
gcagctggaggccaagcaaaccacacatatgatttttctgctacttttggtctttacagttacaatccctcaccccactccaaaatacaaattattggggtagttggagttggaagttttgttacttagagaagaaagatgtcttactgccacatcctcaatgaatacattgctctaggtaatcatgaggaataattcatctacagttttatcacagagtctcatggacagccagaaacttattctataatatgaatggagatcttattctttcattccaacttagccttatgaggaattttaaatagtatatattttcctaatttgttttttctagtacattaactagtaccaatagctgtggtttttatccactactttttatgttgcaagtataggaamcccagttaaaatggtttcaggaaattgtaattatattttatgaaagttcaaaatagagctttcattatgcataattttgttcatatcttaaacataaataggtcc

SEQ ID NO: 306563 - DNA, 650 bp, Homo sapiens
aggaaaagtgacaccaaaaccacatgtactgaaattcgggaagtaatagtttacctgaaggaaatcagagtgctgataccttaaacagtgttatgttattcaaattctgatcgttttgttgtgttccaaatgttctgtgtatgcatttcttaaattacaattaaaatgaaaaagactaaatagctatgtggctttttcctacttttttttttgtttattttgagtcacagtctcactctgttgctcaagcaggagtgaagtggcctgattatgcctcacagcagccttgacctcccaggcttggatttctcctactctttgcatctgtttcttaaaagatgtttccctggataataactctgcaagaaacactctacacagaggtgaggcttacaaattgacagactgtgttttaagatgcagcctactggcagtcaactatcagtctggaccttcctcatcctcacatcctttgaaaggaatttgagaaattgattaatttgggaattgagttgggggctaatcaaggacaaagacatgaccgcaaggtracagcatcacacaaaagacttactggggtcaccttttgacagttttgcatgcagggttagtccctcacagcatgagcttgtccagaggctatggtgaaa

SEQ ID NO: 306564 - DNA, 576 bp, Homo sapiens
tttgctttcaggaatttatctatttcctttatattttctaatttgtgtggataaagttgtttatagcattctctgaggatcttttgtattactgtaggaacaattgtaacgtagcctttgtcatttctgattgttcttatttggatattctctttctttttctttgttagtstaggcagtgatctatcatcttatttactttttctaagaacaaaaccttgaaacgaaagttgatcttatttttgcatctcaatttcattaagcttttctctaattttaattatttgtttgcttctgctccctttggagttggtatattatttcttttctagttcctttgttgcaaagttagattgttaatttgagatctttgtaacttcttgatgaagacatttagggctaataaattttcctcttaagattgctttggctgaatcccagagattttgttaagaagttttatccttattttaattaatttcaaagaatttttttttatttttgccttaattttgatgtttccagaggagctattcaggagtaagctgtttaatttccaaaactacagttttggaa

SEQ ID NO: 306565 - DNA, 620 bp, Homo sapiens
gcttgtgatgtgttaaatttgaggttaatggggcatttaaattgtgccatccagtaatcagtgaatatgtggatttgaggttgaagaaagagctctgagttttaggtttcagaaygaatgatattttgtgatgaaataatttaaatatattttattaaatatgactagaataaagtataagagagaaatttggtagacactaatgtttaagagaaatgcagaagatgaaaagcctgcaaaagactttgaggaagggtagccagataggtcaaaggaaaaccagaaaaaaagcaacactgaagttagggaaaaaatggcattcccaggagtcaatagtcaataactttggctgcttaaaagagggctacagtgaatgaagaactgctatggattaagagggggaagtccttggtgcctttagtgcactttgcattgagtaagaattgaggaataagagagggattgcatgcttctatttgaagacatttggttttaaaagaagagctgcaccactgaagaacaataaagggtctggagagagtattttattttttaaatgagagaagcttgtgatacttaaatgttaataggatacttccatggaaaaggagagttgttga

SEQ ID NO: 306566 - DNA, 597 bp, Homo sapiens
atgttgttacaaatgacagcatctaattttttaaatggctgaataggtctccattgtttataagtaccacattttctttatccatatatctgttggtagayacttagtttgcttccaaatcttagctgttgtgaattgtgctgcaataaacatgggagtgcagttagctctttaatatactaattttctttcttttgggtatacacccagcggtgggattgctggatcacatggtagttctatttttagtttttgaaggaacttccaaactgttctctatagcagttgtaccaatttactttctcaccaacagtgtatgagggttccattttctctacatcctctccagcatttgttattgcctgtcttttggataaaaaccattttaaatgcaaatttaaatttgcatttctctagtgatcagtgatgttgagaaccttttcatatactcgtttgccatttttacatcttcttttgagaaatgtctattcaaatattttgcccatttttaattggattattagattttttatatagagttgtttgaacaccttgtatattctggttattaatcccttgtcagatggatagtttcca

SEQ ID NO: 306567 - DNA, 597 bp, Homo sapiens
atgttgttacaaatgacagcatctaattttttaaatggctgaataggtctccattgtttataagtaccacattttctttatccatatatctgttggtagatacttagtttgcttccaaatcttagctgttgtgaattgtgctgcaataaacatgggagtgcagttagctctttaatatactaattttctttcttttgggtatacacccagcggtgggattgctggatcacatggtagttctatttttagtttttgaaggaacttccaaactgttctctatagcagttgtaccaatttactttctcaccaacagtgtatgagggttccattttctctacatcctctccagcatttgttattgcctgtcttttggataaaaaccattttaaatgcaaatttaaatttgcatttctctagtgatcagtgatgttgagaaccttttcatatactygtttgccatttttacatcttcttttgagaaatgtctattcaaatattttgcccatttttaattggattattagattttttatatagagttgtttgaacaccttgtatattctggttattaatcccttgtcagatggatagtttcca

SEQ ID NO: 306568 - DNA, 612 bp, Homo sapiens
tgtttctaatgcttccaaaatccctcttgttattgatttatagttttattccattgcgttaagagaagatagatagaatttcatttgttttgaattttttaagactcgttttgycttaaaaaatggtctgtccttaagaatgatccacgtgctgaagagaagaatgtgtattttgcagccattggatgaaatgttctataaatactggttagatccatttggtctacaacgcagagtaagtatgatgtttctttattttctctctggatgatctctcctatcgggggaacctgcccctgatatttcaacatagattcttttctattttccctaagtgtcggctggtctaagaaataaagggaaaaagtataaaagagagaaattttaaagctgggtgtccaggggagacatcacatgtcagcaggttctgtgatgcctcctgagcctcaaagccagcaagtttttattagcaattttcaaaagggagggagtatatgaatagcgtgtgggtcagagagatcacatactttaagggcaacaaaatatcacaaggcaaatggtcagggcaagttcacaaggccagggagaaactagaattaataatgaggttcc

SEQ ID NO: 306569 - DNA, 612 bp, Homo sapiens
tgtttctaatgcttccaaaatccctcttgttattgatttatagttttattccattgcgttaagagaagatagatagaatttcatttgttttgaattttttaagactcgttttgtcttaaaaaatggtctgtccttaagaatgatccacgtgctgaagagaagaatgtgtattttgcmgccattggatgaaatgttctataaatactggttagatccatttggtctacaacgcagagtaagtatgatgtttctttattttctctctggatgatctctcctatcgggggaacctgcccctgatatttcaacatagattcttttctattttccctaagtgtcggctggtctaagaaataaagggaaaaagtataaaagagagaaattttaaagctgggtgtccaggggagacatcacatgtcagcaggttctgtgatgcctcctgagcctcaaagccagcaagtttttattagcaattttcaaaagggagggagtatatgaatagcgtgtgggtcagagagatcacatactttaagggcaacaaaatatcacaaggcaaatggtcagggcaagttcacaaggccagggagaaactagaattaataatgaggttcc

SEQ ID NO: 306570 - DNA, 612 bp, Homo sapiens
tgtttctaatgcttccaaaatccctcttgttattgatttatagttttattccattgcgttaagagaagatagatagaatttcatttgttttgaattttttaagactcgttttgtcttaaaaaatggtctgtccttaagaatgatccacgtgctgaagagaagaatgtgtattttgcagccattggatgaaatgttctataaatactggttagatccatttggtctacaacgcagagtaagtatgatgtttctttattttctctctggatgatctctcctatcgggggaacctgcccctgatatttcaacatagrttcttttctattttccctaagtgtcggctggtctaagaaataaagggaaaaagtataaaagagagaaattttaaagctgggtgtccaggggagacatcacatgtcagcaggttctgtgatgcctcctgagcctcaaagccagcaagtttttattagcaattttcaaaagggagggagtatatgaatagcgtgtgggtcagagagatcacatactttaagggcaacaaaatatcacaaggcaaatggtcagggcaagttcacaaggccagggagaaactagaattaataatgaggttcc

SEQ ID NO: 306571 - DNA, 608 bp, Homo sapiens
tgttgctgctgtagcaagtgacaacacaattagaggcctaaagcaatgcaaatttgttatcttacagttttggaggtcagaagtacgtaatatgtttcactgggataaaattaaactgacatgaggtctgcttctttctggaggttctaggaaagaaatctgtttccttgtcttttacagattctagtggccagtgtggcttgtggttcctccctctatcttcagagtgaatcactgcagatgttgcttccatcatcacattgttttctcctctgattgacttctcctgagctcacatwtcaaccctttttatagtaattatgccaaattagcatctcataattaaatgcctgggatacatcctgtaatccccatctcatgtctcagaattccacttcatttctatcagagttcttattttggcatagaagatttgatcgccatatgaattctgcattctctaaagttttggcacacttagaattaagttttgtgattgatatttaggtgcatctggccttcaaaggcaggagataagactctctttaagtattgcaaagaagacaataactcatacatgttgctttaaatagttgaacagatttaaa

SEQ ID NO: 306572 - DNA, 580 bp, Homo sapiens
tgctatagatgggtagaaaatatccaatttggactaaaattaatgattgacttgtacttggtgacatcatgcagacactaagagtgatggctaatctattgattttgatatgcaaaatgtgcttctaaagttattgataaaatactttataggtagaactaactgcaagcactgatttttcttgttggctttcgctctctaaatatgagatayttgatgcttaacatacacaaataatgtttattgaatatgttctatatatcatgaatattctatacatggtagaattatttacccaacaggattggccaatgttgcaaatgaggtctttttcttcactgcatggagaaccagttattaaacatgtagcactccatctctccttaatacatattgtattctaatcgaacctggaagcaatgggggagtgcaaaaagcttgtgacatggctttcacttttgaaattttgttcagaaaaagaaaataaaattcatatgcttgactagcccactgtacatttattatattatgtgtttattgattcatgcagccgctcattcatttttatgaaattttattg

SEQ ID NO: 306573 - DNA, 580 bp, Homo sapiens
tgctatagatgggtagaaaatatccaatttggactaaaattaatgattgacttgtacttggtgacatcatgcagacactaagagtgatggctaatctattgattttgatatgcaaaatgtgcttctaaagttattgataaaatactttataggtagaactaactgcaagcactgatttttcttgttggctttcgctctctaaatatgagatatttgatgcttaacatacacaaataatgtttattgaatatgttctatatatcatgaatattctatacatggtagaattatttacccaacaggattggccaatgttgcaaatgaggtctttttcttcactgcatggagaaccagttattaaacatgtagcamtccatctctccttaatacatattgtattctaatcgaacctggaagcaatgggggagtgcaaaaagcttgtgacatggctttcacttttgaaattttgttcagaaaaagaaaataaaattcatatgcttgactagcccactgtacatttattatattatgtgtttattgattcatgcagccgctcattcatttttatgaaattttattg

SEQ ID NO: 306574 - DNA, 584 bp, Homo sapiens
ttattttttctatatttgtaattttacaatattggtgaattcactcattagttctacctgttggttgtagattattttgaattttctaaaaaaattactcttgtcatctcataataaaggtattttagttttcttttacaatatttatggttcttatttatttttcttacagtgatgctctggctagaatgtccaatacaatgttaaataatttgataggacatctttgccgtatttcctatcttagtgggaagygttcaatattttacctttaattttggtgttagctatagacttttttttttttaataaatgtcttttgtcagaaacagaaagttcctttctgagtcatagttttctatgaattcctattataaaatgtattaaatgttgcccaaaactctttcagtacctattaagaagagacataatttttcttctttataacgtgatatatcattgtaggttttaaaatgtgtttctgtgatacatctcaatgggtattgatgatttttcttattatacattgctggattcaatttactgatacttttaaataatgtttgtattcttgtgaatgaata

SEQ ID NO: 306575 - DNA, 559 bp, Homo sapiens
ttatttttcttacagtgatgctctggctagaatgtccaatacaatgttaaataatttgataggacatctttgccgtatttcctatcttagtgggaagtgttcaatattttacctttaattttggtgttagctatagacttttttttttttaataaatgtcttttgtcagaaacagaaagttcctttytgagtcatagttttctatgaattcctattataaaatgtattaaatgttgcccaaaactctttcagtacctattaagaagagacataatttttcttctttataacgtgatatatcattgtaggttttaaaatgtgtttctgtgatacatctcaatgggtattgatgatttttcttattatacattgctggattcaatttactgatacttttaaataatgtttgtattcttgtgaatgaataatattgatttgtagtatttttcttttcctgtaagggagttgtcacattttagtatcaggagtatataagcttcataaaacaaattgagagttactttcttcctgcattttctgagagatttgatgtcagatt

SEQ ID NO: 306576 - DNA, 611 bp, Homo sapiens
ccagtaggggaagccccagctgtgtctcagtggagtatcaatggagaataaagaccccttctccaaggcccctcatgatcacagagtatagcatgcctgcctgttggggtggaggtacagtctttccctcctgcacccagcactggattgkttttctgttggaaatatcccaccggtggaaagacctgggattcaaggcctgctgttaaggtacttttatctcactgggtgatcccttgatgtggttttatccccttgccctagaaatggggcttcctgagaaccagattacggtgattattattgctcttttcaatctagccacccattggtgctaccaggctccagggcaatgctgaggaatgtctgcaaggactctagtgatgtgatctgtcttcaagtctcccagcagtgggtaccagcacctgctctgatggatgtggcaggggagtgatgtagactctatgagattccttggttgcagataggcttagattgctagctttcttgaatgcctagctttcttgaatgccaattatgctatcagtgaagttgtcatgtggacagactcaggacttctggttagtcagggtgttgcaagcagtagtgtt

SEQ ID NO: 306577 - DNA, 611 bp, Homo sapiens
ccagtaggggaagccccagctgtgtctcagtggagtatcaatggagaataaagaccccttctccaaggcccctcatgatcacagagtatagcatgcctgcctgttggggtggaggtacagtctttccctcctgcacccagcactggattgtttttctgttggaaatatcccaccggtggaaagacctgggattcaaggcctgctgttaaggtacttttatctcactgggtgatcccttgatgtggttttatccccttgccctagaaatggggcttcctgagaaccagattacggtgattattattgctcttttcaatctagccacccattggtgctaccaggctccagggcaatgctgaggaatgtctrcaaggactctagtgatgtgatctgtcttcaagtctcccagcagtgggtaccagcacctgctctgatggatgtggcaggggagtgatgtagactctatgagattccttggttgcagataggcttagattgctagctttcttgaatgcctagctttcttgaatgccaattatgctatcagtgaagttgtcatgtggacagactcaggacttctggttagtcagggtgttgcaagcagtagtgtt

SEQ ID NO: 306578 - DNA, 611 bp, Homo sapiens
ccagtaggggaagccccagctgtgtctcagtggagtatcaatggagaataaagaccccttctccaaggcccctcatgatcacagagtatagcatgcctgcctgttggggtggaggtacagtctttccctcctgcacccagcactggattgtttttctgttggaaatatcccaccggtggaaagacctgggattcaaggcctgctgttaaggtacttttatctcactgggtgatcccttgatgtggttttatccccttgccctagaaatggggcttcctgagaaccagattacggtgattattattgctcttttcaatctagccacccattggtgctaccaggctccagggcaatgctgaggaatgtctgcaaggactctagtgatgtgatctgtcttcaagtctcccagcagtgggtaccagcacctgctctgatggatgtrgcaggggagtgatgtagactctatgagattccttggttgcagataggcttagattgctagctttcttgaatgcctagctttcttgaatgccaattatgctatcagtgaagttgtcatgtggacagactcaggacttctggttagtcagggtgttgcaagcagtagtgtt

SEQ ID NO: 306579 - DNA, 610 bp, Homo sapiens
cctggactcaagagatcctctggcctcagcctcccaaaattttaggatgacagacatgaaccactgtgttcagtcaaattattttctattttgcgtgttttatgtaatttttgttttcaggttccatgcacactattttcctagttcagtaatttttcatatttttccctggtaattaattcctggttcaggtccatctttttcagctgaaagattatggatctttaagtgatctctctttctccattcttggccaacctgttaatatgccacaaaacatcaaaagtaatctaaaataaaacatgactataccacacctgtatttacattttctgtgctcaaatatatacaagggtcccatgacctggccttgcccaaattgccaacctcaaaatctrtgtcatctctgtcccattaaggaaatatgaatgtgccaattgctctcaatacagcatcattttcttcttgctacgtctattctaacagtgatcttttcaacctctcttttcctggttaaatccaaatcatactctaagaaatattatcaacttctttcataattaactttattcataggactttcttactacttcactccaggattgcctga

SEQ ID NO: 306580 - DNA, 655 bp, Homo sapiens
gctactgttgggacttcagactgagaaggagttgggatgaggtttatctgaaaagaggaagaagagtattaatcctaggaaatgacatctgtaagaaaccaaagtcaaaacgaggtcaatttgttaagcataaaaatattatatagataatgagcaacaagctgggtaagataagattgaatagcaggtatcaacagcaggttcatagagtcaggtaatgataacagtaggtgatagttattaagaacttattctatattgatatcatataggcaatttgtatattcagggttataacctcttctctgaaactctgtgtgccagatgttttgcatttttgagtatcacaaattttagaaagcctgcacactgcatatatggcataattggcactacccccaaatcaaacatataaatattacacaatttatgataaataatgactaccacgaactacagtagcctgccttcaggtcaggtaggattttgccaacagatgattttgcaataaacttaccaggaaagaaaggaaaaaaagcaaactttcagttttcagaacttgatatatctcaygattgtagaaaaggtatgctgtgtctaaattatctcattcagtcattgtgaaatattaaattattattatccccattattca

SEQ ID NO: 306581 - DNA, 541 bp, Homo sapiens
ataaacttaccaggaaagaaaggaaaaaaagcaaactttcagttttcagaacttgatatatctcacgattgtagaaaaggtatgctgtgtctaaattatctcattcagtcattgtgaaatattaaattattattatccccattattcacagacaggaaaactaagttttagagataataattcaacaatagatgattggtagatgacaaggctagtatttgaacttaagtctgtgtgacagtctgttccattttctcttcactacaatgccgcagtgatgacagtctgagagacacaaatacttttgaagcaaatcttgctgaactatattgaaaaagcactcaaatctcatgctttcaaacagtatgtatatgtctgtgacttccaaatccgtctctataacttgtgttcctctagaagtctccagactcatattgctaactatgtgtaaatatccagctgcaggaccctcagctcctccaaccccatataawcaaaacttcactgagattttgactggcaaatgaggattactttcatt

SEQ ID NO: 306582 - DNA, 321 bp, Homo sapiens
tgactcactgcaacctctgcctcctggcagaaccctcctgggttcaagcaattctcctgtttcagcctcttgagtagctgggaccacaggcatgcaccaccacacctggctaatttttgtatttttagtagagacagggtttaaccatgttggccaggctcgtctcgmactcctgacctcatgtgatccacctgtcttggcctccgaaagtgctgggattacaggtgtgaaatcataggcctggcctatgatttcttttaatcaaaaaagaaaaaataaaaggcattagcaatggaaacagacgtacgtcacttcatggtc

SEQ ID NO: 306583 - DNA, 538 bp, Homo sapiens
ggtgaaaaacaagggtaaataagcaccttataattgacttactgtgaatgacaatccatcttggtatcaacgatagaagccctatcattttggagttggggttaagagtcagaaacaatgtgctcagggatctcctaaaactcttaaaacagggtggccagtactactgggacaaattgtgttttttattattaataataatgataataatactatccctccaaggcacaagtgaactatatagaactgcgtgtgtgtaaactctttactctcgtctcattttgttgagtttagaacttgatgtgctcgtcagtcttgtgtttcaaaacactgaataacttccaaagcaaagttaygccagtgtgttcaaaagataaattaataatgtaccagcaaagagcatcattcaaagtatagtccttgcatattccagttaccatttctctaataattaaaatattcatgataaatatatatatagcatcatatgttaaaaactatttcaaattctacatattaaggatgaaaattttaaaat

SEQ ID NO: 306584 - DNA, 558 bp, Homo sapiens
tacacataaaacttcaactatcagaaaaacgaccatcaaatatggaaataaataaccaaataaacatattacctgttggataaaacacgtagttcttttaaacttggagccatggaatgatctttataattttctcgagagaaaaatgtcttaaggccatttttgggggaaatatccctgtgaaacaaagtaatttacttacatttgacaattcaaaatctcatgctagactatgacacataatggcacaattgtaacttacaatttcataccttcttacccccccatccccagacaatctcttcttactatgtttaatttcatataccagatctgtgggcttagaagtgttacttcttggatagctttaaayccaggcccattatggaattctccagctccaataatcagctctacattttctgtagtacacaattaaataaatgtcacagagactggaaagttaaagatagaaaagactgaagtataatcaagggtctgtcaaaggctggcctcacttctggctctaggacataacattaagatacttggttgctg

SEQ ID NO: 306585 - DNA, 333 bp, Homo sapiens
ttgaggagaatgtttacatcagccctcagattgtctgctgttgtccatattgytctctaagtgcttgactttgttttgttcacacttcatctgctgcactcaacacctactagcgcctagctagcaatgataggcactcactaaatgtgatagaatgataaaatacaattattcactgaataatagaatgttaaagcagggagggaccctagagattaaattgccctatccttgatttttactattattattcttatatcttttagttgagatctcacactgtcacccaggctggaacgcatggcatgattagggctcaccgcagccttgact

SEQ ID NO: 306586 - DNA, 581 bp, Homo sapiens
tcatttcatcagaaaacctttaagcagagtactaatgtgaagtgaatcatttaagggaacaaaagacactggagcctccttgagggaggagggtgagagaagggagagattcagaaaaaaaattgaggtactatgcttagtacmtcggtgatgaaataatctgtcaccaaacttttgagtttacctatataacaaacctgcatgtgcgctcctgaatctaaaatcaaagtttaagtatttaaatatatatgtgtgttgcatgtttatagcagcacaattcacaattgcaaaaatatggaaccgttttcacactgctgatgaaaacatacccgagactgggcaatttacaaaagaaagagttttaactggacttacagttccacatggctggggaagcctcacaatcatgacagaaggcaaggaagagtaagtcccatttaatgtggatagtagcaggcaaagagaggagagcttgtgcagggaaactcccctttataaactcatcagatctcatgagacttattcactaccacaagaatagcacaggaaagaactgcccccatgattcaatcacctcccac

SEQ ID NO: 306587 - DNA, 573 bp, Homo sapiens
agtttacctatataacaaacctgcatgtgcgctcctgaatctaaaatcaaagtttaagtatttaaatatatatgtgtgttgcatgtttatagcagcacaattcacaattgcaaaaatatggaaccgttttcacactgctgatgaaaacatacccgagactggkcaatttacaaaagaaagagttttaactggacttacagttccacatggctggggaagcctcacaatcatgacagaaggcaaggaagagtaagtcccatttaatgtggatagtagcaggcaaagagaggagagcttgtgcagggaaactcccctttataaactcatcagatctcatgagacttattcactaccacaagaatagcacaggaaagaactgcccccatgattcaatcacctcccactgggttcctcccacaacacatgggaattcaagatgagatttgggtgggacacagccaaaccatatcattccaccctggcacctcccaaatctcatgtcctcacatttcagaatgaatcattccttcccaacagtcccccaaggtcttaattcatttcagcattaactca

SEQ ID NO: 306588 - DNA, 568 bp, Homo sapiens
aagttttataaaaaccaatatagctagttatcaagtaatctagtaaaaaatattcaacccatcctgaagatcaaagacatgcatgttaaagcagtagagtcatataattttctttatttatcagaatggcaaatattaagtatttttatacacttctagtgagaatctgtatttaaaattagatggcttttttttttttttttttttttttttgkctaaggaaagatctggaccagagtcaggtgtcacaaactcaaatgcctacaggagccagaaaagggaaaccagattgacatttctctttcccatggaagtgttcaattttgaaagctttctatgaagttctaggagtgtgtctaaaaataatgaatagagccagtatgtatttcaagtataagacaacaattagatatactcaaacatgaagcatttcagcaccaaatgacccttcttatcccaaatgcatacatgcacttgctgacaagttctgctttaaaagcataaagcaaaaaaaaaaaaattaaatgagaactgaaggagccatagtaaaaaagttttagtggtgtgt

SEQ ID NO: 306589 - DNA, 557 bp, Homo sapiens
tttcttctttctactgttctccatgtctagaagtatttaaaagagatcaggcaataatgttacaagaactttaactcatcatttttcttcttsaaataaaaataaagcaaatatcaaacaaacacatgaaaaaaattgtgtgcttcattctatatactaattgtgacccaaatgatcactgagatttctgtaattctaaaccatatcagtctggttctaactaatgagcaataagaaaactcatgagacagctgtccttgcccctcagaggacatcccatctcctgtctactcttgccttggaactggatctatcctccctcccacctctacccagtagctgcctcttctgctgtctctgcgtaaaggttcttccatggtcttacgtaaattggaatttaaatcctgcaaactacattgtgagactaatggatcggaagagatctttcctctctgcctacttctcccttgaagggaaccgtatttattgctttaattagagcaccaagctgtaggagtaaatgcaagtcttcagcacttctcctgacagctttaaat

SEQ ID NO: 306590 - DNA, 589 bp, Homo sapiens
catcacttgtaagtctttggctatattttttgccaatttttggtcacataatttgtttttccttattggaaggttgaaaaggcatggttctaggtttcctattctttctgattccttcaagtattcaatactagctcatttgtttacagaatggagaaaattaaaaagaagcttaaggaaaagaaaattaggttgtttccttttaaagtggtgattcaaaacatgtttgcataaaaataacaatatgagccaaygtgccctattaaaattaatctgcttatataataaggtttttggaccatgaggcacagcggttttgccttgagaaaaagtgctaatcccaaatgagccttgtcttctttgcaaagtgaatattaccaaagctagcaagtctcctaacctttcctctaatttctaatctttattaaaatataaggcaatttgttaaagtcattttagtaacagaggttgtatttaaatgggccaaagtactggggcaaaaatgcatgctgaattgtgtgtgtagggggggtggtgtatgcatgtctgtctgtgtgtaactgcatttataacactatattttaattgc

SEQ ID NO: 306591 - DNA, 589 bp, Homo sapiens
catcacttgtaagtctttggctatattttttgccaatttttggtcacataatttgtttttccttattggaaggttgaaaaggcatggttctaggtttcctattctttctgattccttcaagtattcaatactagctcatttgtttacagaatggagaaaattaaaaagaagcttaaggaaaagaaaattaggttgtttccttttaaagtggtgattcaaaacatgtttgcataaaaataacaatatgagccaatgtgccctattaaaattaatctgcttatataataaggtttttggaccatgaggcacagcggttttgccttgagaaaaagtgctaatcccaaatgagccttgtcttctttgcaaagtgaatattaccaaagctagcaagtctcctaacctttcctctaatttctaatctttattaaaatataaggcaatttgttaaagtcattttagtaacagaggttgtatttaaatgggmcaaagtactggggcaaaaatgcatgctgaattgtgtgtgtagggggggtggtgtatgcatgtctgtctgtgtgtaactgcatttataacactatattttaattgc

SEQ ID NO: 306592 - DNA, 633 bp, Homo sapiens
tgtgtgtgtagggggggtggtgtatgcatgtctstctgtgtgtaactgcatttataacactatattttaattgctggacattgtgttgtataataaatattacagacttcgaagttaaactgattatatcaaatagctccatcacataacatttggataactttgggcaagctacttctcaacttatctttaagtcttagtttcttcatttgtaaaatgagagtaataatatacattttatagcatcaaatgaaaaatgttagcaagctgtttaagagaaagttctggtatttgaatatcattatcttcttcttcctttcagcctctaccaaattgcttgtaaggctaataattgacaaagtgggagtaagagagaaaagaaaatgagattctggaaacccagtaggaaaaaatttcaagctagagctacaaatacattatccaagagattcactctctggtttctttatcctttccctagagtaattaaaatatgactgtaatatgattaaatgtttagtttaaaaagaaaatctctttctcatctgaaagttattataaggaagcagactggtgtggttctcatttaaaaatgtaaatgttggtttaagtgtgtgagattgtctcaaagtc

SEQ ID NO: 306593 - DNA, 531 bp, Homo sapiens
aattttactgatagattaagagctcagtttattagctcaaagactcacaacatataggcactcaataaatatttggtgagtcagtgaatagatgaatatgtataataagtaatagaataccaatccaaatatgccttccctgcttaaaagctcctccaaccttattacatacaggttatagctcaaatcttttaatttgatctgactcctgcaaaacttcctaagctcatttcttgacacatattttgatgcacagtgggtctctagtattgaactagaatagtgattctcaaaccttatcatacatcagaataagctggcaggcttgcaaaaacacagattgatagattctacttccagtatttatgactcattaggtctagggttgggccagagaatttgcattcctatwcatttcccacatgttgatgatgctgctggtctagggaccatactttgagaatctctaggctagattatctaaaaaattctttcagctatgatagtcaatgatatttggtattaaaaaga

SEQ ID NO: 306594 - DNA, 637 bp, Homo sapiens
taaaggtgcctgcctgctctaacattcaatggtgttggaattctacaacatagattctcttacctttcagtcctgaggtgcagtggacaatgagatagctgatgaccactcattttccagacaagccaagttcatcctctgagagcaaatggcttgcatggctttcttaggcaaagaatagctcatcaacacattatggcaagcytagtatttgcgcttgctttctggagaatttcaaaacacaaataaagaccttttctttcaattattaagatcagaataactttacttagagtgaaaaaaaaaattggaattgccctaaaaactctatgtatggatcctgatttttcaaaagatctcaaattatctttctttttttataaattcctgacaaaaattatctcattcagaactatatagctctaatcaaatatccactgcatgccataatcgggggtaggccatttcagtacctactagacaataaacaactccagaatgtgtcttgtttttatgcatttgtatattttcagagcttggtacagagcatgacatgtagaagacacccacaaatgtttaatgtatttgtagcaataatttcatcctataaaactttaaataataatatgaggtaggt

SEQ ID NO: 306595 - DNA, 615 bp, Homo sapiens
ctcctaattctgattgattcttcaagcacaaaaactcacaaggacagcatagagaatctttgagcagctgaaggggaagagcggagtgtgtgtgtggacagtggtcctcatgggggaactggcatacttgcaaactcttaagccaccaacaaagtagaagacaraatatatgaccagagctggatgaaaatttgattgagtacttaaaaatcactaaagcataactgaaatacatattattttaagtttttttaaaagatgagctaaaaacaattgaggacaggggaatataatagaagaaacattgactttaaaatcagtaaaactgattaaaatgctggatccacccattgactataaacagtgtctataattgaagaaagtagttgttaaaatttattcaggataaaggagattttttaaattatctatttaatttaaaattgtcttggtaacctcaaaattttattcacttttaaaagcactgaattatggcattagaaacaattcagtgaatcctatctggtgaacctaaggtaactaggtttaagtaaatggactgttctctgcaacagataaaagtgaagctcagaagaacttattttttgtcccagg

SEQ ID NO: 306596 - DNA, 612 bp, Homo sapiens
ccaagtgccagcaggattacaccatcatatcatgttatattgatgacttaagtcagcttcccggagcagactgagaatagattgtgtaccagtaactaaattataaagtcgtcctcagaggagcctgtgaggtattggggaagtagggyctggaaggagtagaagccaaaccagcacaggattttaggcaaagtctcaggtttggtcttcacagggacactggaatgtcaattacatctagaggatgtcccagctctggaaaaaggggctgcactttcatatattctcatccttagtcattggctaaggttaccctaaagggatacacacttcaagggactctgattcttgaagcctcaggtaaaacagccccagtaacacaagagtggtctttgcaagaaagcaagagctactgaccttcaggagcaaagcacacacatgccaacacatgggcacctggaaatggtaagaggggtctgaggacaaatggatgcatcactgtctgtgtccaggatgctttgaatgaggcacttttaaaaaaacagttttattgaggtataattgatgtataaaaactgcacatatttaatatatacaattttatgagtttgg

SEQ ID NO: 306597 - DNA, 552 bp, Homo sapiens
actgaactcctggctataccattgcctggtcattgttgttacagtgtacacatatgttttccacggtacattgaagtgcaaatggatgtcccagtgaacctcttgacttccacttacccaccctggttgcgttaagtaacagcaactcaatatcttcatgataatcagggttaatcatctctgmcagtatagtaactcattatttgtctattgttggtatatgggcacaagaagcctaaaataaacaagtaggagttgtgcttttaggattagtgaagctctctgtccccttttagaagcatccttctctggaaccaagaagatttagtccaataaattctacaattgtagagacagagagcacatatcatacaagtgagtgactatgaatgatggtgagagggatccctcctacttttaccttttggtttccagacccatacatctatctatagggtgctcagcactatgaaattgttattagttcaacatacataacatatcttgaaggataatacccagtctgatgcctttgggagacaattccattat

SEQ ID NO: 306598 - DNA, 526 bp, Homo sapiens
cagtaaaaccatctggagctagacatttccttttcagccatctaatatgtatttattttagctactgtattttttagctgcagaatttctattttggctcttttttttaatactttccaaacctctcttgagatctttgcctattcatttactttttcatcttttcctatrcatcctaaaacgttattataataatatgtaactccttgtctgcttgttgcaatatctagttcatctgtgtttctgttgaattattttttgatgatagatattattttctagcttcttcacatctcataatattttactgtattaaattgtgcatagaattacaatggagactgagttataccactattcttgtttatttattccagtaagcatgaactgtttgctatgtgtgatagctaaattgagagagtgatcatttacatttcattatgagataagttaatttgggattggaccccagcattagaaagtcaaatacatttctggttagcacaattcccaacttccagctctg

SEQ ID NO: 306599 - DNA, 602 bp, Homo sapiens
tgtttcaacaaagactcagcttcttttctcatgtctttatctttatgtccttcctcttccttccactcaatctattgcagaatgtttgggtttgccraaaacttgatgaggtctctctgattctgagcttcccgcttggttctgctctgattctaaagaatcaaatggaaagagcaaaggatgagagtaagtacagccacaaaaattcctggggatacttcaggatgcacagaataaggggtttggatagtcatggaaggatgcaattctacttctagcctctggatcacgaggaatagaatgaaagagtatattcttaaattgtgttatgtgagctgatttttatcctctttctcaaaaaccctgcaagaatagccatatgcatatttaatccccccactgaaatattccaactgacaaagggtaccattgtgccatttcccacaaaagggtaaccatgcctgtggcttctttcaggtttggattattgtaggctcttcggtcatcttttgtccaagaagagaaggccacagtcaaggtactgattctgccaaactcagtcaaacatcctgaaatgtgttccaacatttggaatttgacaa

SEQ ID NO: 306600 - DNA, 602 bp, Homo sapiens
tgtttcaacaaagactcagcttcttttctcatgtctttatctttatgtccttcctcttccttccactcaatctattgcagaatgtttgggtttgccaaaaacttgatgaggtctctctgattctgagcttcccgcttggttctgctctgattctaaagaatcaaatggaaagagcaaaggatgagagtaagtacagccacaaaaattcctggggatacttcaggatgcacagaataaggggtttggatagtcatggaaggatgcaattctacttctagcctctggatcacgaggaatagaatgaaagartatattcttaaattgtgttatgtgagctgatttttatcctctttctcaaaaaccctgcaagaatagccatatgcatatttaatccccccactgaaatattccaactgacaaagggtaccattgtgccatttcccacaaaagggtaaccatgcctgtggcttctttcaggtttggattattgtaggctcttcggtcatcttttgtccaagaagagaaggccacagtcaaggtactgattctgccaaactcagtcaaacatcctgaaatgtgttccaacatttggaatttgacaa

SEQ ID NO: 306601 - DNA, 602 bp, Homo sapiens
tgtttcaacaaagactcagcttcttttctcatgtctttatctttatgtccttcctcttccttccactcaatctattgcagaatgtttgggtttgccaaaaacttgatgaggtctctctgattctgagcttcccgcttggttctgctctgattctaaagaatcaaatggaaagagcaaaggatgagagtaagtacagccacaaaaattcctggggatacttcaggatgcacagaataaggggtttggatagtcatggaaggatgcaattctacttctagcctctggatcacgaggaatagaatgaaagagtatrttcttaaattgtgttatgtgagctgatttttatcctctttctcaaaaaccctgcaagaatagccatatgcatatttaatccccccactgaaatattccaactgacaaagggtaccattgtgccatttcccacaaaagggtaaccatgcctgtggcttctttcaggtttggattattgtaggctcttcggtcatcttttgtccaagaagagaaggccacagtcaaggtactgattctgccaaactcagtcaaacatcctgaaatgtgttccaacatttggaatttgacaa

SEQ ID NO: 306602 - DNA, 602 bp, Homo sapiens
tgtttcaacaaagactcagcttcttttctcatgtctttatctttatgtccttcctcttccttccactcaatctattgcagaatgtttgggtttgccaaaaacttgatgaggtctctctgattctgagcttcccgcttggttctgctctgattctaaagaatcaaatggaaagagcaaaggatgagagtaagtacagccacaaaaattcctggggatacttcaggatgcacagaataaggggtttggatagtcatggaaggatgcaattctacttctagcctctggatcacgaggaatagaatgaaagagtatattcttaaattgtgttatgtgagctgatttttatcctctttctcaaaaaccctgcaagaatarccatatgcatatttaatccccccactgaaatattccaactgacaaagggtaccattgtgccatttcccacaaaagggtaaccatgcctgtggcttctttcaggtttggattattgtaggctcttcggtcatcttttgtccaagaagagaaggccacagtcaaggtactgattctgccaaactcagtcaaacatcctgaaatgtgttccaacatttggaatttgacaa

SEQ ID NO: 306603 - DNA, 606 bp, Homo sapiens
cactccacaccctatatttctgtatgtgtgtctttaattcctctagtgctgctgggttagggtctccacgaccgagctggtcttggcaagtggtgcccatacatggggctcaaacccaggttgaagggtcaccagagtgacattggagaacatggaactaagctggaggacacctgagtactcttaagcaatccccgtggtgaataagaaggggagctaggaagcatcagggtaacaatgggacaaatgtaggttctggttaattccaccttggaaccttttcacactaacgatgaggaggaaggagagtataatgaagtaacagagcaggtttgtttgccagctaaagctaaagcagcaaaggagggagaggtttgtccctacccttctgtaccccctcattatttcaaagaaaaagagtggcctgaccctccagatctttcttttctggaggayactgggcaaaaagtagttgccccagtgactgtttgagcagtgcctcgagtgaccactctcagttctattcaggcaggaattcagcaagctagaagagagggtgatttagaggcctggcagttctctgttaggatacacccccacgatcaa

SEQ ID NO: 306604 - DNA, 604 bp, Homo sapiens
tctatatggaatattaaacacattactggcatcccatctaattctcaaggacaagccattgtagaaagaatgaatccctccctgaaacagcagttgcaaaagcaaaaagggggaaatagggattacaggacaccccatatacaattgaatctagcattattgactttaaattttttgagcctgcctaaaggccagatgctatcagcagctgaacagcatctacagaaaccagctgcaaagacagaagcagaacttctggtttggtggagagatccaataacaaaacgggtaaaataataacttggtgtagaggttatgcttgtgtttctccaggcaagaatcaacaatcaatttggataccatcaagacacctgaaaccttatcatgagccaaatgctgaggaagagattccgggggggatcccccagttgcagtcatgtcaagactgatgctgaggaggaccccaactgtcacgagcaacacctgtcaaacacagccacctacctggggacaratcaagaagctgtcacagacggtggaagaaaacctgaggaaagcaggacaaccagtcacaataagtaatttaatgatagctatgatagca

SEQ ID NO: 306605 - DNA, 591 bp, Homo sapiens
cttgctataagtgcaaataaaaatctaactggacattattgcattggctgttgttgttctggtagatgttccacttgcctgtgaaaccgggaaccctcattgggtgagaaacctcacagtaatatgacttatagtcatggaaatatatagggaaaatgtatacataataaagttatattgatatatgtgtatgtgtatatatagacagagatatagtcaattctcgttattcacagattccatattttcaaatttgcctacctgctagaatttatttacaaccctcgaatcgatgcttgcggcactttcacagtcattcgtggacatgtgaagagaggcaaaatatttgagtcacgcrccatagacattaccagctgagtttgaacaaggtgacaccatcttctcatctcagctttcatactgcaagcaagtgaccttttcacagtcaatttagtgacacgatttctgcatttttgtgccttttgctggtgacccccaagcctggtgctgaagtgctgtctagcattcctgagcacaggaagacactgacgttccttacaaagaaaaatgcatgagtgagatctgctccat

SEQ ID NO: 306606 - DNA, 591 bp, Homo sapiens
cttgctataagtgcaaataaaaatctaactggacattattgcattggctgttgttgttctggtagatgttccacttgcctgtgaaaccgggaaccctcattgggtgagaaacctcacagtaatatgacttatagtcatggaaatatatagggaaaatgtatacataataaagttatattgatatatgtgtatgtgtatatatagacagagatatagtcaattctcgttattcacagattccatattttcaaatttgcctacctgctagaatttatttacaaccctcgaatcgatgcttgcggcactttcacagtcattcgtggacatgtgaagagaggcaaaatatttgagtcacgcaccayagacattaccagctgagtttgaacaaggtgacaccatcttctcatctcagctttcatactgcaagcaagtgaccttttcacagtcaatttagtgacacgatttctgcatttttgtgccttttgctggtgacccccaagcctggtgctgaagtgctgtctagcattcctgagcacaggaagacactgacgttccttacaaagaaaaatgcatgagtgagatctgctccat

SEQ ID NO: 306607 - DNA, 539 bp, Homo sapiens
tttttcttttcaggcattataataggcaaaagggacacaatgattaacaaaaacaaatagtaagcctcatggtcttggaaataggattcacttagataacctgaaaactctcccactaataggcacctagaaattatggataaaatacaatagctggcctctgaaaagcagagctaagagctcaagtgagtaaggaaattcccagggaccaaaaattgagagaggagtaaatatcaaaggaataagcttttgagttaatgctgtagttgtatggggtgggggtaggaggtagaggggagtgaagaggttataaggaagcttttctgctctatcctagtctctgagtgggaaaaaatcccccccaagggctggaastgtggggcttcacctcatgtcaggtgagaaagtttgattgtactcctgcagtccaggaactcccaaactggtcatgtaacctaatgactatcttcaagacagtgacacccctaggattcctgacagtaacaaacacaaaactactctggagggcatgctctcaa

SEQ ID NO: 306608 - DNA, 628 bp, Homo sapiens
gtttcttagactgtctcataatcagtggcttctcccagccccacccccaggctggaggtatggatgtatggatattacctggattcctagacagaggctaatggtttagctggaaggacagggactttgaaagaataagattaccaggcatggtcgttacgcctgcaatgccagcactttaggaggccgaggcrggcacatcacatgaggccaggagtttgagaccagcctggccaagatggcaaaaccccatctctattaaaaatacaaaaatgggccaggtgtggtggtgcatgtctgtaattccagctactcctggggctgaggcacaagaattgcttgaacctgggaggtggggttgtagtgagctgagatcgcaccactgcactccagcctgggcaacagagaatccatctcaaaaaataaataaataaaatatgtaggaaagatgacagggccataaaaacctaagccattcttgaagaagaacaagaggggaagatttgccctagtagatatgaaaataaaggctgccctaccagctatcaagacaaagctacagtaataaaaaaaatagtatggtattggtgcaagagtagactgatgaaatagaagaaaaagcccagaa

SEQ ID NO: 306609 - DNA, 619 bp, Homo sapiens
agaggctaatggtttagctggaaggacagggactttgaaagaataagattaccaggcatggtcgttacgcctgcaatgccagcactttaggaggccgaggcaggcacatcacatgaggccaggagtttgagaccagcctggccaagatggcaaaaccccatctctattaaaaatacaaaaatgggccaggtgtggtggtgcatgtctgtaattccagctactcctggggctgaggcacaagaattgcttgaacctgggaggtggggttgtagtgagctgagatcgcaccactgcactccagcctgggcaacagagaatccatctcaawaaataaataaataaaatatgtaggaaagatgacagggccataaaaacctaagccattcttgaagaagaacaagaggggaagatttgccctagtagatatgaaaataaaggctgccctaccagctatcaagacaaagctacagtaataaaaaaaatagtatggtattggtgcaagagtagactgatgaaatagaagaaaaagcccagaaacaaatgtagagagatatggtgctatggtctaaatgtttatatccccccgaaatgcatacgttgacatcttcctccccacggt

SEQ ID NO: 306610 - DNA, 627 bp, Homo sapiens
atcttatcattatgtaatgttcctctttgaccaattgaatgtctttgatcctaaatttcattttatctgatactaacatcaccactactactttatttttcttccatccctttattttctacgctttttactgtttaactataagtatatgcttgtatataagatattttgttttataaatttactttgaccatcttttctcttggtattataactgatattctcaattttattcctaccaattttattttatgctttttctttattagagtttttattactttcccttctttttcttttttctcatttttttgttagttgaacaagtggctgctattgaactaatggaagaattacacaagaaaattaactgaaaaaggaaaaaaaaactcttgaggagatacagttasagcatttaaaaagtttctgggagtaaaagaaactgtgcaaatttaaatatttaaaatacattgactactgaaaggtggattggttatgtggaaaatcgaattagtggtttggaagatgaaggaaccagaacagctcacaacacaggagaaaaatgtaaagacccacaatatcccataattctttcctgcataccacttaggaatatgcctttcctcc

SEQ ID NO: 306611 - DNA, 612 bp, Homo sapiens
tcaaatactacattgtagtctgtgaacttagtttctcagttatgaactatgagagtcacataacatgtaagcaactcatacagagtatgagttagcgattttgaaacaacattctatgtgctagagttgaacaaataaatagatgtaactggaaataataaaccctaggtttctcatactctgagaaagcaattacaaataagcaaatgcagaaggctagaatgaacactgtggtagtaaaattagagtcatcgatattaactaacaatttttaaaatatattctcaggtaaaaacaaacagaaatgaacatatgcaagcgttaatatacacacatatttccaagttctgtgcactgataaaacctagaagcaatgacatcccagtagcaacgggacatctactgcccagatcttagtttctaaataccattctctaatttaaaacaataacaacaacaaaatcagggctycttgattcagtgttttattccagggctggaacagagaaaatacagaaggaacctggagcatctcatggtgccagaaagtaaagaagtgctcaaaacagaatgaggacatgcatgcagggcatgggaaccagcactgaagaa

SEQ ID NO: 306612 - DNA, 630 bp, Homo sapiens
aaaactcaaaatttcaaatgtaactcagatctttgtgggctcagctcaactttgtggttgcaaagttttcaaaaaatgtggttctaaataaargctaaggtaaaagccttgctttaaaaaaagctaataaagactattgacttaaataatgctttatgaagcaatattatgatgtattaaaagcaaaaagaaagaaagaaacatatggattagattcccctggaaatatatcaacttttaaagtgtagggaaatggcactcaggaaaatatggaggctttgttcaactgaaaacacaaaccattttctgagtttattaagacgtttgcatccatgtgataagctcagagtgggctccctattttttggtcaagtggtatcagaccactcatcttcaaaagccagtcaatgcatcatgcagcaaaatcaaacatatttgaataagatagagacattttgtgaaaacaccagagttgagggagaaatggacttggaatcaaagctaacttgtccgacgggcttctatttgctttcaacagaagatgacatatagcttccagtcaaagatggggaattaaacatacatttacctgtactccctcgagaaacaccacttaattaacagtcaaaa

SEQ ID NO: 306613 - DNA, 526 bp, Homo sapiens
taaccaaaattgaaggatgtgagtttccagattgaaaagacctactaaatgcctcacacaatgagcaaaaatagatccaaatcaaggaaccttctgaaatttcaaaataacgaggacaaagaaaaactccwatagtaagagagaaacaaacagttttcacacaatagccttcttagcaatcctggaagcttgaagacaatggcacaagtccaccaatgttctgagagaaaagtatctccaacctagaattctatacccagccaaaccatcaattaacaatgagaacttaaataataaaaaaaaaaaagaatgaggatacaggccaggcgcggtggctcatgcctgtaatcccagcactttgggaggctgaggtgggcggatcatgaggtccggagatcaagaccaacctggctaacatggtgaaaccccgtctctactaaagacacaaaaaattagccaggcatggtagcatgcacccacctgtagtcccagctactcaggagactgaggcaggagaattgtttga

SEQ ID NO: 306614 - DNA, 517 bp, Homo sapiens
agacctaggaagcacccagtctagctccaaaggttccaggagagatgtcctcaaaaagatgaaattggtagaaccagaattgtggatataattttgagacaaattgtattcaacttggggagaatttggtgttggattggtgacatatacataaaaaactaagcagagggggaaaaagattaactccagggaataaatgtggatcaggaaagtacaagtcatcacagctcagctgtgaacagcgttttcagggtcaaagtagtataatcactgaatattgatctaataaaattacactataactgtttggaaagatggcaratgggaagcaggggtgtcgacaggcagtggggaaaacagctaactcttcttcttctccagtgaggagtcaatacacaatgctgaaaatggaaaattcaagtagcagaaatataaatatgacatttagagatacatattttaaaaattagctaaattactaaaagtagatgcctctagatagtagaaaattgttgtg

SEQ ID NO: 306615 - DNA, 547 bp, Homo sapiens
ctggctataggtaagtgtatttttaacttttaaaggaagtattagttttccaaactggttataccatttgacactctcaccaacaatgcataagagttccagttcctccacatcctctcccacttttagtgtcatcagtttttttcactttaaccaacttctagttgatatctagtggtcactaactataattttaatttgcatttccctgatatctagtagttggtgtttaaaactttttcytgtgtgtattggccacttgtatatcttctttaatgatatttctatccaagttgttttgcaatttttaattacattgtttgtctttttattgttgagttgcaagaatttctctatgtattccgaatggaagtcttttgtcagagatgtgttggcaaatctgtggcttgcctattcatttgttataacagtgtctttgataagcagaaagattttattttattgaaacccaattaatcaagttttgcttttatggcctgtactttccatgatttctttaagaagtctttgctacctcaaggttaca

SEQ ID NO: 306616 - DNA, 547 bp, Homo sapiens
ctggctataggtaagtgtatttttaacttttaaaggaagtattagttttccaaactggttataccatttgacactctcaccaacaatgcataagagttccagttcctccacatcctctcccacttttagtgtcatcagtttttttcactttaaccaacttctagttgatatctagtggtcactaactataattttaatttgcatttccctgatatctagtagttggtgtttaaaactttttcttgtgtgtattggccacttgtatatcttctttaatgatatttctatccaagttgttttgcaatttttaattacattgtttgtctttttattgttgagttgcaagaatttctctatgtattccgaatggaagtcttttgtcagagatgtgttggcaaatctgtggcttgcctattcatttgttwtaacagtgtctttgataagcagaaagattttattttattgaaacccaattaatcaagttttgcttttatggcctgtactttccatgatttctttaagaagtctttgctacctcaaggttaca

SEQ ID NO: 306617 - DNA, 561 bp, Homo sapiens
aaactggttataccatttgacactctcaccaacaatgcataagagttccagttcctccacatcctctcccacttttagtgtcatcagtttttttcactttaaccaacttctagttgatatctagtggtcactaactataattttaatttgcatttccctgatatctagtagttggtgtttaaaactttttcttgtgtgtattggccacttgtatatcttctttaatgatatttctatccaagttgttttgcaatttttaattacattgtttgtctttttattgttgagttgcaagaatttctctatgtattccgaatggaagtcttttgtcagagatgtgttggcaaatctgtggcttgcctattcatttgttataacagtgtctttgataagcagaaagattttattttattgaaacccarttaatcaagttttgcttttatggcctgtactttccatgatttctttaagaagtctttgctacctcaaggttacaaaaatactctgtttttttctagtaattttatcactttagtgtttgcatttagatcaatgacccat

SEQ ID NO: 306618 - DNA, 575 bp, Homo sapiens
ataaatataacacaacccaagaaaacagttcagcttggccagtcgagccctgcacatcccactgttcactctgtcctgggctgtgtgcattgacccatgagaccctgccacccaacaccatgggtggcccatccatgaggcagcctccaccaagggagctcctagcccagggaaccacagatgtcttcttgggttccaggcacaggaaaaccagtttcccaagaccaagggaactcagaaatggcccctgtaatgaaccactagcatccaagggctccaactacttcaaccaaaatacacccattgtcctggcaccattttctatagacaagtgccaattcaygcacaatgtgagccctacaagccactcagccttttagtttcttcactggccaaatgaagctatccactccatctcctgacaatgatgggagaagtccagatatgctgcaaggaaagcttgagggtcctaaaaggaactctaggctcagatggctgcttcacccatcaagaaggcaacagaatgcggtacttgggcttggaagtgagtcacactgctgagttacagtacactg

SEQ ID NO: 306619 - DNA, 575 bp, Homo sapiens
ataaatataacacaacccaagaaaacagttcagcttggccagtcgagccctgcacatcccactgttcactctgtcctgggctgtgtgcattgacccatgagaccctgccacccaacaccatgggtggcccatccatgaggcagcctccaccaagggagctcctagcccagggaaccacagatgtcttcttgggttccaggcacaggaaaaccagtttcccaagaccaagggaactcagaaatggcccctgtaatgaaccactagcatccaagggctccaactacttcaaccaaaatacacccattgtcctggcaccattttctatagacaagtgccaattcacgcacaatgtgagccctacaagccactcagccttttagtttcttcactggccaaatgaagctatccwctccatctcctgacaatgatgggagaagtccagatatgctgcaaggaaagcttgagggtcctaaaaggaactctaggctcagatggctgcttcacccatcaagaaggcaacagaatgcggtacttgggcttggaagtgagtcacactgctgagttacagtacactg

SEQ ID NO: 306620 - DNA, 565 bp, Homo sapiens
cttgtcatcaggtttaggaacaacctggttgagtcagcctggtcttcatcctgagatctttaacttaattatatctgcaaagacttatttttccaaataagttcatgctcatgggtcctgggtggacgtatccttggtggtggtggggcagtggggcaccattttcgctacacccctggagcagtgtgacagygtggccttgggagatgagtcacaagggaacttttgttgagataagaggataagtctgggtgagacattgcactggggatcctgggcaaattcccagaagtgtttgggccttggctgtagaggtttttctgagactgaagactcaggacccagctctgaagtgatgatcagggcttcttgataggcaccgccatgttggggatggacctctgtgcccatggtccactcgggggctcatccagggcagtgctatccatcagaaccttccgtggtgatggaaatgttcttcagatctgagctgtgcaacacagtggctcctagtcctgtgtgtctattgagcttttgaaatacccgctctggctcgtgcagctga

SEQ ID NO: 306621 - DNA, 592 bp, Homo sapiens
aatgataaaactcacaagttctcaaaacatttattctcaaaattcctttacactcttaaaaatcaaggacctcaaagagcttttgtttatgtgggttatatctattgatatttacagattagaaactaaagctgagaaaatgttaaatattaattttaaagtaasaatataaatgcatatttttgaaaaataaccataaacaaaaactttcagtgagaagaatgacaacattttacatttttaaatatttctttattgttgagcttaatagaaaacggctggattttcatgtttctgtagtcaatctattatgatagcacacattacatagcctccagaaaactccactgtacacttgagaatgaaagttaaaagggaaaattatgtcttagtatcataaatatgagagtcttagtaacatgaaaatggttttgaccttgtgaattcactagtaaaatctcaggaacccccaagggtacccaaaccatatactgagagccactgaactaactcaaacagtaaaatattcagcaagtcagtaggacataaaataaacactaaaagtcagtggcctttataggcacaaataata

SEQ ID NO: 306622 - DNA, 546 bp, Homo sapiens
attttgccaggtaaaaaattctaagctgagttttatcttagcaaatactttaaagatgtacttaaatactttaaaggctgggtgtggtggctcacacctgtaatcccagcactttgggaggctgaggcaggccgataacctgaggtcaggagtttgagaccagcctggccagcatggtaaaaccccgtctctactaaaaatacaaaaatatctgggcgtgtggtggacacctgtaatcccagctagttgggaggccaaggcaggagaatcacttgaacctgggaggtggaggttgcagtcagccaagatcacgtcattgtactccagcctgggtgacaagagcaaaaactccgtctcaaaaaaaaaaaaaagraaaaaaaaagatgtttgtctattgtcttctggcttgtgtagattctgggatgaagtctgctgtcattcttcttttgctacatttttgtaatgtctctttttcctctggctatatttttagcaattcaattatgcatgtgccttgacatgattttctttatgtttcttctgctt

SEQ ID NO: 306623 - DNA, 546 bp, Homo sapiens
gaactgctccagagtgacagactcttcgccgcggcccagcgtcttccagccagcgaaacaacgcgccgcgatgcctcgacaccagcgactcgcaggggggtgtgggcagcaacgctgcagcagcctctcgcagcctggccggctccagcagcgccgcggcgggtggtagcgctggagccgcgacgcccgggccggggtcgtgcccgagrccgcggcccagtcctggtgtgggccccagccctcgccaccggagctgccgcttcgtcttcactgctgtgactcggagcgttccccatggggtctccgtcttgggcgcctggctctgcagccgccgccgccgcctccccgcctcgacctgtcaacctccgacagcagctggcgggcggggacgcggaggagacgacggcggcccctgcggcttccggcttcctggccgtcaagcgacgaccgctgtcgcaaaggcgccgtcacgtagataggcggcctctaccaactcacgacagctaggcggggagcgccgcctcaaagggtgcaaccttgatttcc

SEQ ID NO: 306624 - DNA, 546 bp, Homo sapiens
gaactgctccagagtgacagactcttcgccgcggcccagcgtcttccagccagcgaaacaacgcgccgcgatgcctcgacaccagcgactcgcaggggggtgtgggcagcaacgctgcagcagcctctcgcagcctggccggctccagcagcgccgcggcgggtggtagcgctggagccgcgacgcccgggccggggtcgtgcccgagaccgcggcccagtcctggtgtgggccccagccctcgccaccggagctgccgcttcgtcttcactgctgtgactcggagcgttccccatggggtctccgtcttgggcgcctggctctgcagccgccgccgccgcctccccgcctcgacctgtcaacctccgacagcagcyggcgggcggggacgcggaggagacgacggcggcccctgcggcttccggcttcctggccgtcaagcgacgaccgctgtcgcaaaggcgccgtcacgtagataggcggcctctaccaactcacgacagctaggcggggagcgccgcctcaaagggtgcaaccttgatttcc

SEQ ID NO: 306625 - DNA, 600 bp, Homo sapiens
ggtgtttccagctttacaccaggcgtttgcttcgtttctctttaacctatgttagaggtctggaaagtctgcatcaggccgtccttgctgtgaagagctagacaagcccatatgtctctctctgtatgttgtaatgcagacctttgtgcagttgattgacgctactctggagatcttctatcagattctcgaacagtttggagagaaaagagatgtaaggataggaggagtggcgctgaraaccattttttgtattgtcctgtccaggtttttacacagcaccttcccaattcagtgtgggcgccgaataagtgtggaaagacagtagtaacatgctggaaaggctcacattctaaaacctatcctcctcatgcaaaaactagcttttctaaaatacatactggtttgtagatccttaaagaaccatatattagactcatttaaaccttcataggatccgaaactgataggcaaataccaggtttcctgtgaatacttgtaattatgcagttcttcatataatcaccaagatcatgtctgctaagtcattaagagagcaaattgatttggcaacaaaatattttccttggaaggcatttt

SEQ ID NO: 306626 - DNA, 606 bp, Homo sapiens
gaaggctgagaattttccaaatctttaagttctgctttcctttcgcttataagttatgtccttaaattacctctctcttctagcattttactataagcagttaagagaagccaagctgctccctcaacattttgcttagatctttcttctgccaaatatcctatttcatcactcaagtttctccttccacaaaacaccaggacacaaacacaatcagccaaattatttgcaactytaaaacaataattgcctttccttcagtttccaataatttgttccacatttccatctgaaaccttatcagaatagcctttactgttcatatttttaccagtattctgttcactacctcttaggtaatgtctagaatactgagggtttctctacaactttcttttggttctgagcccccaccagatttgccctttacagcctgttcacatcaatataggctttctctagcatgcactccaaaactcttccaacctttatcaattacccagttccaaagccacctccacatttttaggtatatatatgcatatatttatcaacaccctcacttctcagtaccagtttcttagtccatttgggctgctataacaa

SEQ ID NO: 306627 - DNA, 569 bp, Homo sapiens
ataccatttatttttaacatttttctaatggaattgttcagtgcatgcagagaatctattatatagagaaaaataaagtatactagtatactactcctcaaagttacaggagactaaaattgctgttttcacttttgactcttagtagtgaacagaatattacaatgaattgtctctctctttcaccctctaattctctktttttggctagatggttttgtcaggtgaagtcaaaatattgggaaataatttcagctctttactctgcatctcagagcagcacatgtacatttttctaggatttaatttttatcttttcactctgttcctgagctgcccctttccatgataacttgtgttaaagaaaatttgcattatttagtgatattgctcatgtctgtgatttgttgagacttgctatgtgaccagagatgatactgttctagatttttgtttgcttgttttgtcaacatactaaaatccattccataacaaagtatctttgtttcagcaaaaaatggatttggaattgggccaaagcccaaattttgtttttgtttttgtttttt

SEQ ID NO: 306628 - DNA, 520 bp, Homo sapiens
tggtggctgcacacatacttggtcaaggtggaattatcatcttcaaatgtatttaaataaatgtattgaatgagtgtatctaaatgaaaacattactaaagagagctgacctagcaaaaagtttatatgtaaagtatctcaacagtggcaactacttgaagactgctccaaggatatctagaaatagagcatctttaagtatttgaaggcctacagtctgccttgcccaaacccaagtagtctcagcagattctctttccaaactttttcaacaacccactgctttctgctttttygcttttttttttttttactctaagttctgggatacatatgtagaatgtgctggtttgttacatatgtatacacgtgccctggtggtttgctgcacccatcaacccatcatctaggttttaagccccgcatgcattaggtgtttgtcctaatgctcttcctcatcttgatccccaccccatgacaggccccagtctgtgaggttcccctccctgagtccatgtgt

SEQ ID NO: 306629 - DNA, 579 bp, Homo sapiens
gagaaacattttgacaatcactgtattttacaagaatggctttctaaatattttgagtagattttccattaatttacaaatatgtatgtgtgtatgtatataattatataacctgggaaaattactaggataaatccatacatctatactactttaaagttggaagttggaaataccactraattatttttgtggataagtcaaggtaaagagccaacgtgaattatgtcagggcctcaggatattctagaagtaagcaaggccattatgtacagttgtgcagagtgtatcctacacaatgctagtgatcatccttcatctcgcttatgctagaagtatgtctcttgtggttaaaaaaatgcatagacaccttgattagacatatcatttttatcacaggatagactgttttcattttaaatttttcataaataatgtaatgttttttttacagtgttatactggaggactttctctttggaattgctgtgcaaataaggtgaacttttagctccaaaaatcaaacccattcagattagttttaatttatagtcactttatacctatactggtgtgagt

SEQ ID NO: 306630 - DNA, 520 bp, Homo sapiens
aagaccattcagcaaggaatgaatagtcttttcaacaaattgtgagacaatagatattcacatgcaaaaaatgtacctggactcctacctcacgccatataaaaatattaactcaaaatggattatagggaggaagtggaggaagatgaccagaaaaaaccttccagtgattatccctaacttgccctgcaggaagaccaaattgaacaactatccacaaaggaaagcaccatcatatgaggcaaaaatcaggtaagtaatcacagtactgrgttttaatattatagcaagaaaagaggcactgaagaagggaggaaagacagtcttgatttgctgacaccaccactcccccatctaccggcagaggccatgtggcacagagagagaatctctgtgcttgggggagagagagcacagtgattgtgggagattgtgtcagaactcagtgctgactgtcacagtggaaagcaacacggggcacccacaaagggagcatttagaccagctttagccagaggga

SEQ ID NO: 306631 - DNA, 462 bp, Homo sapiens
atatttgcagaacattttagccaatggttgcagaatacatgttcttcttctcagcatatgcattattattaaggatagatcatatattaagtcacaaaacaaatctgaaaaactttaaaaaaaatcaaattatatcaaatattttctccaaccacagtggaaaaaaactaggattcaataacaagaggaactttggaaactatacaaacacacggaaattaaacaatgtacacctgagtagccagtgggttaataaaaaaattamgaaggaaatttaaaaatttattgaaacaaaaggaaatggaaacataatatacaaaatctgtggaacagagtaaaagcaatagtaaaagtgtatagctacaaaagcctacatcaaaacattaaaaaacttaaacaatctaacaatgcatcttaaagaattagaaaagcaagaggaaagcaaacccacaattagaagaa

SEQ ID NO: 306632 - DNA, 471 bp, Homo sapiens
atgtaaagtgatcacaaggaatttttttcttaaatacttattggctattggacaacaaatctatcaattacgttgagtattttcacttgacatttcacttctagttaggaattaagctattttaagactgaggtcttctaattcagcctgtccaatcgtgggtttattcctgtcatctttcctggcatgtagctttgactttggtatttatgcatggattaagtttgtattttctaaggaattgagcagtaatttcccagggaatcagagggagactccactggtgttttacatctgatakttcctatttcagttaattaatattttctaattttgatttgaagctacatcactgaagattatttgtaatggttcaaagtgacacatatgatttacaggcacagtctttagggtttgacatggtgaaattttattcttatttaatttctataaactcttaccttctctaat

SEQ ID NO: 306633 - DNA, 618 bp, Homo sapiens
tttgttaacttaaaagaatacttgggtcacattttgaagcattagcagtgaaaatccataactgaactayataaattacaaattgatttagatgaaccaggtctggctctaatgtctagcatacatgatgtgctaaaggtgtttaatgatccatgcacagatgcagcagtgagagaatttaacaaaattggcattggcttttattagatctcacatggtcaaatagcatttatctgatgtgaagaatggagtcagtgaattatcaagtcaacggatgctttttttttttgatgtggtaaacctctttgaatttataatagaatagctcattggagaacattgcaacctctaaaattttgctgcaaggtgagaaaataccaggcagagacaagttattaaaaagagaaaatacatcactttaaactctaaacacttgttcttaacacatgatgcctcttacagatgacagatgtgcatgatttataaaacattttcttgtttaggaaaacaaagtgataaaattgagttgatggatgtggtagctgggagacaaaatcattctgtgtctatgttagccatatgcaataaaaactctaaaataatgtcctctatttttta

SEQ ID NO: 306634 - DNA, 592 bp, Homo sapiens
tagggcaggggcaaaatacctccagctaaagcatagcaagagtgacctttgctttagttctcaataagtttctcatctccatctgagaccacctcagccttgtctatatcatcatcagcattttggtcaaaaccactcaacaagcctccaggaagttccaaactttcccacatattgctgtcttctgagccttccaaactgttccaacctctgcctgttacccatttccaaagttgcttatacattttcaggctatctttatagcagtgcccctctccttgtaccaatttcttrtattagtccattttcatgaagaatgatgtgatagatgtgaaatgtcttggctccattggtgcaagagaaacttcaaaaataaattattctagtttttttttaatagtgttttcaaatgcttctttttcctatatattcattgactgaaaatatggatgtagaagttcaatttgttaaaagtgaaacagttaccatgctattggaatatcagtaaaaactgactgggaatgatacaaatattttagccaattggcaaggcaaagctttgtagtaaaaggaatattttaaattcctttgt

SEQ ID NO: 306635 - DNA, 514 bp, Homo sapiens
tagcatttaataatgtaagttgtctgataagtattgctttaactatatcccacacttctatttggttttcattaagtttaaagtgctttctaattttcatagtaacatgttactctgacacatgaattatttagaaatgtttgtttaattttttaatatttaggggtttgacagataacctattgtggttaatttctattttaaatattttatggccctaaaatatattctgcataatcacaacctttccaatcttaattttgtttatgtctaacatatatattttggtgcatctgccatgtgcagaagaaaataatatttattctgcaaatttagggtacagtgttatataaatattaattagatcrtggtgggtagtactattcagattacttatttctgtattaattttttgtttccttattctactgtatttcagagaagggtattaaaatctttcttaatggtagaattctctatgcctttaattcaaattatgctacatgcacgttga

SEQ ID NO: 306636 - DNA, 623 bp, Homo sapiens
gactctatacagtaaggaggtagtctctgctttaaatagacagatagatagatgatagatagatagatagatagatagatagacagataaacagatatagacataatttgcctgaatcatcctaaatgcatcaatatttatctcttgagttaaaggctattccataagagtagcaatagattaatgaaatatcccatttttaaagctgaaagagaattcttcagaggtcataaactccaacccttttattttgcagattaaaaactgaggcacagaaagttgatttggttagactaaagatgcacagccagtttgtgccagagttaaatatttttattcctgagccagtgctctgataatttcacctagttatgatggyataactgattgaaaaaaatatcaactacacttttggatatcaacaagctgacacttgctactgtgcttaaaatatggtgccatgatgctgtcctcttaatgataaattcataggcaacctgctagccaagtttttccaaataattcactgtttcttacaattagaacttaactctagaactcagatatattttttaaaatcctccaattataaaattgcattgcttctactattcttcccactg

SEQ ID NO: 306637 - DNA, 441 bp, Homo sapiens
taacaaaatattaaaagatggataaattataatatatagacacacaggaggcatgtaagtgactacacctggggaacaggctcatgtcgctgaagcgataaactgaaagaacttaccagttgaaaagatggtggatggtagagtattaggtcatttttagagttgctataaatatctgagactggataatttataaataaaagaggtttaactggctcacattctgcaggctatacaggaagcatggcaccagcttctgcttggcttctggtgagcccttggggaacttttactcttggtggaaggtgaaagaaagtaggtgccatcacatgaccaaagagaggacaagaaacacaggggaggtcccagactcttttaaacagatctcatatsaactaagtgtgcaagaattcacttatcaccaaagagatggtgcattca

SEQ ID NO: 306638 - DNA, 465 bp, Homo sapiens
tgcatctcttcatctgtatccttcctaataaatgctgtataataaagcagtaaaggtaaataagtgtttccttgagttctgtaagctgctctagctagttaaacccaagaagggggatgtgggaatcccgatttatagcttgtcagccagaaggacaggtcacaagttgagggyagtcttggggactgagccaacaacctgtgtgatctgatgctgtctccaggtagggagtgtcagaactgagttgaattggaggacagttcacccagggggtgtccatgcagaactacttgcttggttggtgtgtggggaagccccctccccacatttgctctcagaagacttctgtgttgattgttgtgttgtgagagcagaggaaaagtttgagtatttttccacaccatgatgttaaaagaaaaagaaagaaaaagaaaaaagagaaaataagccctccagtttctttct

SEQ ID NO: 306639 - DNA, 605 bp, Homo sapiens
ttttcttttgggagtgataatttgaatggtattatattttaaatttcatatttcatttgttcttcgctggtctataggaaagcaattaccttttttatttcttttttttttgagatgaaatttcacacttgttgcccaggctggagtgcaatggtgcaatcttggctcaccacaacctccacctcctgggttcaagagattytcctgccttagcctcccgagtagctgggactacaggcatgtgccagcacgcctggctaattttttgtatttttagtagagacagggtttcactgtgttagccaggatgagcttgatctgacctcatgatctgcctgccttggcctcccaaaatgctaggattacaggcatgagccactgcacccggcctcaattaacctttatatattaactttgtatcctagaatcttgctatagttgcttattagtttcagaattttattgattcttctggattttcttggtatctgtacacaaagacagttttatttcttctttcccaatcagtgtgccttttatttcctttccttttcttgtcttattgcacttgctagggcttatagtacaatcttgaaaactagtgg

SEQ ID NO: 306640 - DNA, 605 bp, Homo sapiens
ttttcttttgggagtgataatttgaatggtattatattttaaatttcatatttcatttgttcttcgctggtctataggaaagcaattaccttttttatttcttttttttttgagatgaaatttcacacttgttgcccaggctggagtgcaatggtgcaatcttggctcaccacaacctccacctcctgggttcaagagattttcctgccttagcctcccgagtagctgggactacaggcatgtgccagcacrcctggctaattttttgtatttttagtagagacagggtttcactgtgttagccaggatgagcttgatctgacctcatgatctgcctgccttggcctcccaaaatgctaggattacaggcatgagccactgcacccggcctcaattaacctttatatattaactttgtatcctagaatcttgctatagttgcttattagtttcagaattttattgattcttctggattttcttggtatctgtacacaaagacagttttatttcttctttcccaatcagtgtgccttttatttcctttccttttcttgtcttattgcacttgctagggcttatagtacaatcttgaaaactagtgg

SEQ ID NO: 306641 - DNA, 561 bp, Homo sapiens
cctagttattatgacttactaagacctatgctgtctgtcaataattcttttctgttatgctgaaatcgctttggtcactacaaaagtgacttttcatttccaagagtctggtttttttttgaaaggcagtctcactctgttgcccaggctgaagtgcagtggtgcaattacagctcactgcagcctcaagctcctgggctcaagggatcctcccaccttagcctccagagtagctgggaccacatgcatgtgccaccatgcctggctaattaaaaaaaaattatagagacagagtcttgctttgttgtccaggctggtcttgaactcctggcctcaagtgatcctmccaccctggcctcccaaagttctaggattaaggcatgagcctctatgcttggcctccaagagtcttaagttggattttctagaagcagagcctgagatcgcaatccagttgcagtgagttattgaggccatataggagcaggggattgaggagtgtgggattgggcagtggagggaggagcgtaagcaagtgagcgggctcagccagggtcgtgc

SEQ ID NO: 306642 - DNA, 607 bp, Homo sapiens
catcaattattcaattcaaaaggaataagtaaggttttaaatttttactttctgtatggcaacgtccctcttaccctattctataacttctgttcttgttttcatttcctttcattcaagcagtagaaaaaatttggcactgtcacattccatcgaaaactcactctctgatgacccaactcttttttaaaactatccaaatctaagtgctctgagcatgttcaccagacaggcagcttcacaactgtaggatatttaggcaatctgttttattctattatatcttctccaaacttaattcttcttagttctgcccttctctttataaattttgcataccactaaaaaggatgatatacaagtttgcgggtattttcttgagttctctagtgctcagtctagamcaagtttcttagccttggcactactgatattttgggccagaaaattcttcattatgaggggatgtcttgtgtattgaggatgtttagcagcatccctaaccaccacccacaagatgccaatagaatcccccttccctccaagacaatcaaaagcatgtccagacattgttgtagactgttgagaactgtttgcctacagtaag

SEQ ID NO: 306643 - DNA, 557 bp, Homo sapiens
  misc_feature (1)...(557): n = A,T,C or G
ctacatttctcttcaactcttttccttcatttgtttagatcctcaagataaagaccaatggtacatatacaaaaatccncagaagattcatctatagtttacaacatgacaaagattactagccagctcagaaaaaaaaagttagaaaacatcaagggaaaaacaagcaagaaaaagaaaagaactgtatttactggaggtacagaatactataaaatataggtaactaaagggatgtatactttgagcagcagtgctctatgagagcaagggttgagagagaaagagagatgagaggggtatctgtcaatcaatatcaactctggacataataagctgtataaaagatgaccaatcttggtctaccattcccccaagtgktctagaatgacaaatggtggcaaaaatcctggactgaaaaacagtttaaactccatattaggttaaatttgaaactatgggtcacagaggacccattatcaagtaacagaatggggagcaataagcacacagcaatgtttctttaagtcacaggttaatgaaagcttccttgaatt

SEQ ID NO: 306644 - DNA, 626 bp, Homo sapiens
ctagtgtgggaggagtggaaatgtaatcttagatagggggtggttgaaagtgagtgctcatgaaggaggtacatttgagtaaacaaggtggtgaagaaacaagccacttttgcgtagaatacattaataattattcttgtaaatttccttctgaacagccctcattttctatatggatgatgtcattctcctgccaaaaactcttcaatgacctcctacagcatttggcataatatgtaagctccttaagttgttctatgactacctccgtgatctcacctcagcctcagtctctagccccttgcctttttctcttgattactttgcttcagccatactggatttatttcagttaccwcatgagtaccaatggctttcctaccttttggccttctcacaagcatttctttcctctgcttgtaatcattccgcagacttttacctgaccaacttcccaactagctgactactctactttgccctgttcttacattctcattgcacaatatgtttgccttcccatcctttattacaatcataagtaaataacatgtaatcattttcttagtttcaatttttctgattttaagctccttgatgatagggatgttgtgagatgtctgcct

SEQ ID NO: 306645 - DNA, 593 bp, Homo sapiens
ataaagtgtgtcttgacagaagaaaggaatgaatcagtaaggaaagtataaagatagagaaaaaattatcaggaagtgagaacgaggcgggaggaaaacgaaaatgaatgtgaaatgacttaatggacccccaaaaagacaagactgggcagtattggagtgacacacagatatgaagctctttccacacctgaaggatcctgacgtttgaagaagtggaattccacacttcacaggatgggcagcagttacagtccctaactgtgaggcaagccagcttgttactgaccccaggaggaggtacctgcttggtccacatgtttgtgcagcagccacctttgtgttctgtgagaaatgtgccagcttcctgcagggtgagcctgaggagccttagaaagctgccactggtgcatgcctgtagtcccagctacttgggaggctgaggcaggagaattgctcgaacccgtgagctggaggtcgcagtgagccgagatcgcgtcactgcactccagcctgggcgacagagtgagactmccaaaaaaagaaagagagagagagaaagggaaagctggaaagctgccactggctcacag

SEQ ID NO: 306646 - DNA, 578 bp, Homo sapiens
ttcccaagaaaacttaatattacttacctctgcaaccttgagaaattcagacactcgtgtcattctagttagaaatcgtttgtaaatttctagagcatctttacattgtcctttcttcatttcaaaaaacttttctagagaagataaagagataagcaatttgaaaagagtattatgttctatttttttctaagmttatgttaagattactactcaaaacttaattaatgtttgaatcaaaacacttggcagtaaaacttatatgaggtattaaggcacctaaacaaagggaacctgaatagattaagaaaagtgttatgttccaagataatcatctgtctcaacataaaacgatttaaaatatgaaaacagaactaaagtagaagaatatatgaattgccacaactggctaaattcatgtcccatatccaatatcctgtcttggaaaatagcagcaaatgcttcctaaggataatctcaaaatttatgactgcattctacagaatccttattttcttattagctcgcaataaactaataatctataaattataagacaataatcaataaaccttcct

SEQ ID NO: 306647 - DNA, 576 bp, Homo sapiens
aactgtacaaatatatgaaaattaaacaacatgctcctgaatgaccaatgggtcaaagaagaaatttaaaatgatttgaaataaatgaaaatggaaacacaacataacagaacccatggggtacaacaacagaagtactaagggggcagcttatagcaataaacatctacatcagaaaagtagaaagacttcagataaacaacctaaccatgcaacccacgraactagaaaagcaataacaaataaaacctaaaattagtagaaagaaacaagtaataaaggtcagagcagaaataaataaaattgagattaaaaacaaatacaaaagatcaaagaaataaaaagtttgttatttgaatagataaacagaaatacaatagatcattagagactgtacaactgatacaacagaaatataatagatcattagagactactgtaaatgactatatgccaacacatctgacaacttgtgagatatggataaatttctggaaacatacaacctatcaagattgaacatgaagaaatagaaaaattgaacaaagtaataatgagtaaaaagaataaagcagt

SEQ ID NO: 306648 - DNA, 575 bp, Homo sapiens
tctggcctcaatcccaaagtgcttgagcccaaaaggattataggcatgaaccactgcaccctgaccttaatagtttttttattgattgcattgaaataatattttggatatattgggtgacatttattaaaaataatttccaccttgttatttttactattgataatgcagctactagaagatttaaatatatgtgtggctggcattgtatttctrttggacagcactgatctagagacttaactctggttttatttattattggtttttgcaagactacttcgtaagtggttgtgtgttctcattagaaggcatgtagtttggttatcctccttatataatttagtaaaggtctagagggagcaaattctccttttctgagtttttctgactttcttcttttagttttacccccacttttgtacactggtttagccacctattattttaatttggcagataagttcctttggcatcttaaagatattgccccattatgttctgacgttcttgtgttgctgaggaaaagtttgttgccagtttcaaagtgtttcctccctatttaatttgtgttt

SEQ ID NO: 306649 - DNA, 656 bp, Homo sapiens
tcaccattccttcatcatatataagattttcttgaactatatccttttcttgaactatattttgaggacagtgtatctgtatataagattctagaatgacagttattttcactttgataacatttcagtcatctgccttctattattgcttttaggagaatttatctgtctacctgtctttaggtaattcctttgtttgacgggggctgcattcaaatcttctgtttgtcttgtccttctttagtggatgtgtgtctagatgtggcattgttttttgtttattctatttggaatttgttgggttttttaaatctgagaatgtatgtctcgcatcaagtctggaaaattctcagcttttcagttatcattgattattgcttattctcattctctttctttttatgtccttcaaacatgattagaaatatgttagactttattacatccgtayaaatctaaatataccttttgtattttctaatgctttcttttctgttcagcatgatttgtttttcagataccttctagttcattaattctctgtttagctgtgtcttgtctgcttttatgcattcttggttttttactttatttatttatattttttgtttttgaattttttcaaatttgcccattttctggataatgtatgtttc

SEQ ID NO: 306650 - DNA, 596 bp, Homo sapiens
ttctaaaactctagttttaggctttcttttcagtgcctacatggccccctgtgcatttgtttctttcatatccctcccagagctatagtgggattctcttcagtggttgttttcttcctctagtctgtagtttctttgagactgtcttattcctcacgccaaacatagcatgatagcaggttttggtaaatatttattgaatgatttttattatgcttcatatttccctaattttatacctttgttttctcataaactttctacttaaaaattttacttttacccaataaacttcrgaagagcaaggagttaaactcaattctttctctcaaaagactataaaagcaatagaagtgtaatattggaggaatacaaacaaataaacattaaattacttaatgtatataattaatgtgtatttcctgacatcctctcaacacttgcatgaccatgatctgacaacgatttaatctggggaaaatcagaaaattgatattaaaagttaaaacaatgagaaaattggtaaatttgaaaaaaatgttagattttaacaattatatccataatttttgggttgtgaatttaaagcatatgtg

SEQ ID NO: 306651 - DNA, 510 bp, Homo sapiens
aaaactccctctgtgccacccataaatatagcaacacctgacagttcaggggtccaggcctccttccataatggaaaaaatcctgcttctggcaaaaagctagaagtagcaggaacaatgcctgctgtgttgtttggcacagactaagagagaaaaataaggaaataataaatacttcggctttccttgtcagaaaacatccatcccattgtcattaaaaataattaaagttaggaaaacataagaataatcactaatttcagcaggttgtaagactataacacactgtttaatttcttctttaataattctatggggcaaaactagggtatgaacctctgttatctttgacccttgccttttcctawgttgacaccatactaagtggtatgaacttcttcatgtcttcaactctaaccttttccctataaccacctcctaccaaccttgcagaacctgcttcgggacttctaagacagtctatcaagtagatctcccatctctccaatc

SEQ ID NO: 306652 - DNA, 600 bp, Homo sapiens
ctgtgcccataaatgatggcaaacttaatcagtaaatgtggcatatgttctgactgcaccaccgctggttgttcccctgactttctccctttcctcaggcctccttattccctgagacacaaaaatattgcarttaagccaactaataaccctacaatgacctctagatattcaaatgaaaggaagagtcacacatctctcactttaagtcaagagctagaagtgattaagcttaatgagagtggcatgtcgaaaactgagaaaggccaaaagctagctctcttgtgccagttagccaagttgtaaatataaaggaaaagtcttgaagaaaattgaaagtgctactttaatgaacacacaaatgataagaaagtgaaatagctttcttgctgatatggagaatgtttgagtggtctggataaaagatcaaaccagctacaacattccctcaagccaaagcctaattcagagcaaggcctcaactttttttcaattctaggagggctgagagaggtgaggaaactgcagaataaaagtttgatgctagcagaggttagttcatgaggtttaaggaaagaagccatctccacaatataaaag

SEQ ID NO: 306653 - DNA, 597 bp, Homo sapiens
cagatgaggaaattaagcctcataaaagttaggcaacttgaccaggattccattgtcaagttgctacaggatagttgtacgaataaataaaatggcctagctaaaattgctgtaagagatggatggctttattttcttgttacagtgtgaggtcctttgtgtgtggaccagcagcttacattacgcaagcagtgcmtcaataaatctttgttgactggactgtctcccaatcccctgatgccaaaaatgagactcaccagttatctgcagtaaaagatgaaaagacccatccggaaggagtcaggataagccctgtgttcagtgcttagaagagcagcgattctaggccctggcctgagcccctcggaagtggggagatacataaggatggggacttattaagcactgagcactgtgctaatcaccttatatagatatatcccaaagtccagtatcttcaggtgcttgctaaacatgctatttctgatcactactatactatgtatactatactatgtatactgtagtaagtatactatgctatacctactgaataaacattgctgggaataggcctagaaaatagcgtcttaaatg

SEQ ID NO: 306654 - DNA, 539 bp, Homo sapiens
tctccacctgctgtatgaggacagcctgggcaatggggacatyggtatgagctgtctatcagtcctagctccctccatctggacccaatgtagattgctgctgcttcagctgaccagattcctttcgattaacacagactttcttgagatatgttaacataccctttgcatcccacttaagtttggaagacatttcctctattataaatgatatgaaaatgtctgagagtttaggtgcatattttgaagtctaactcaaaacagtgattgtattttccctgtacacaaattcttcatgtacacccattggtgttctgcagacagcttatactagttcaggggagctgcttgctaaatattcagaaattttgtgaattggctgtgaaacatagttgttattaaaagataaattacacaaacttacaactgatgaatcatattaaaaacaaagacaatactcaactcatgattttctgtcctttgactgcatttcacaaatgtctgtgatcttgagattgtttatatctattgtaactgca

SEQ ID NO: 306655 - DNA, 570 bp, Homo sapiens
gcgtggtggcatgcaaagtagaaacagtagtgacattaaaagcaataacatgacagttctctgaagcaggagaatggcaggggttgttgtgttcatttaagaagaccaatctgactagtaattcttcatatcctatgtgtgaacattatcctygtataattatctgcctgctattatcaaaatacattaccactgaattcaatgttttcctcaccttttatttttatcgtgttttacagctaacttttacctgtgaattattcataatacattttaataggtataagataattgaccttgtccgcatgaggcacccatagtctcaccctgtaataattaactctcagatgtgggctattattcaaaggtaatgacttttcatcagtttggcaatacattattgcttaaaaggtccatctgattagatatttcacagctctgctttgtaattcctccccttccccagacacttgctagctaactgcatgtccccgagtgaactcagcctcatagtatttccaatcgtacaatggattcttcctttttgtattaattgaattatcatgtgct

SEQ ID NO: 306656 - DNA, 570 bp, Homo sapiens
gcgtggtggcatgcaaagtagaaacagtagtgacattaaaagcaataacatgacagttctctgaagcaggagaatggcaggggttgttgtgttcatttaagaagaccaatctgactagtaattcttcatatcctatgtgtgaacattatccttgtataattatctgcctgctattatcaaaatacattaccactgaattcaatgttttcctcaccttttatttttatcgtgttttacagctaacttttacctgtgaattattcataatacattttaataggtataagataattgaccttgtccgcatgaggcacccatagtctcaccctgtaataattaactctcagatgtgggctattattcaaaggtaatgacttttcatcagtttggcaatacattattgyttaaaaggtccatctgattagatatttcacagctctgctttgtaattcctccccttccccagacacttgctagctaactgcatgtccccgagtgaactcagcctcatagtatttccaatcgtacaatggattcttcctttttgtattaattgaattatcatgtgct

SEQ ID NO: 306657 - DNA, 440 bp, Homo sapiens
tgtgggtactaagaaataaagtgtaagcagaaatgagccattttacagtatttattctgcacagcctccaaaatagtggagaaggcaagatctgagacaggaaaatggaaataatgtgtcttctttaatttatatgagaaggaaaagggaaatgaaccccctgcacttttgcagtcagaattacaagaagtatccgaggggattttcatccaggggtgtctcggctcacaagcaatttacattttgaagatcaacaacctttattaaccaatgtgaagattgtgtacctcagaggctatctagaaaagtactttgaagagttttawttcctatggcaggcatgaggggtggaagtgggtaataaggacaaagaaggaacccagcatctgttgagggctaccatctgtaagcataggaaggcctggtgattaaaagtcaag

SEQ ID NO: 306658 - DNA, 606 bp, Homo sapiens
ctcataaataaccaccaaaaaacttatccatgaaaccaaataccaccttttctccccaaaaaaaactgaaataaaaactgttttaataaaaaaaagttttacagttcagctttgcttacctaaccacttaaatattcttaccactggcttgtttcctgtaatgccaaataagtcatgaaattacttcagaataaaacattaaaaaataaaatccagcaatgggccaacaaagcagtctgaaaagaatctacatagtatatgggagagtggggcacacggctcccccaacagctgagattcatacatcagccacactctgtgtactcctcaataattgagattaacaggagtaaacaccaaaattattgctttcagtttctaaaaatagttgactttaccccaaaaaagtgttcacaagacatacacaactcattaccatggccaccaactgcaacaacacaaacctaaaaattcactttagatagataagaaaaatgtgtgatgatcactgcagwtgtttacgtgtaagtaaatatttgcagagtaattaaaacaatttttttggttaagttcctagattgcttgtatcctatttttgtgccacta

SEQ ID NO: 306659 - DNA, 606 bp, Homo sapiens
ctcataaataaccaccaaaaaacttatccatgaaaccaaataccaccttttctccccaaaaaaaactgaaataaaaactgttttaataaaaaaaagttttacagttcagctttgcttacctaaccacttaaatattcttaccactggcttgtttcctgtaatgccaaataagtcatgaaattacttcagaataaaacattaaaaaataaaatccagcaatgggccaacaaagcagtctgaaaagaatctacatagtatatgggagagtggggcacacggctcccccaacagctgagattcatacatcagccacactctgtgtactcctcaataattgagattaacaggagtaaacaccaaaattattgctttcagtttctaaaaatagttgactttaccccaaaaaagtgttcacaagacatacacaactcattaccatggccaccaactgcaacaacacaaacctaaaaattcactttagatagataagaaaaatgtgtgatgatcactgcagttgtttacgtgtaagtaaatatttgcagagtaatyaaaacaatttttttggttaagttcctagattgcttgtatcctatttttgtgccacta

SEQ ID NO: 306660 - DNA, 554 bp, Homo sapiens
cacaagacatacacaactcattaccatggccaccaactgcaacaacacaaacctaaaaattcactttagatagataagaaaaatgtgtgatgatcactgcagttgtttacgtgtaagtaaatatttgcagagtaattaaaacaatttttttggttaagttcctagattgcttgtatcctatttttgtgccactaattagccaacatccttttccatagctggtaaggtggcacgattcattcaaaatcccaccaacactcacaagttcaaaactacacattcactacctcttccagaattgcagattgaggaacctggtagattctctctstctctaaaacaacataaatacaggcaaaataaataaaatcaaccatttcagagttctagcaattaacctaagccattgaagaactgaaaattgtctacccgagagaaactactgagcctcgggaagatgtggggtatttgatgtttccatttttccccttcttcccagtccagtggtccagtggtccagtggccagaagcctgcagtcttgcagacaattgaa

SEQ ID NO: 306661 - DNA, 607 bp, Homo sapiens
aatcaaattattgtcaacttgctataggaactctgttcaagcaaatatgtcatgccgccagtggcagacatttaaaaagccatgcctctgagtaaatatattgcttggctactcccctaaagtattttcacttttaatctcaactccaaggttttctacccctgtttctgctcctgttctttgttaccacagatcccccttctaccactgctagaatagattccatgttcaaggttcataggacagcagagctgaaagcaatctgaacatttctattccaacagcctcattttacaaaaggaaacggactctcaatgacattaattaatttgttcacattctccccscaaagcagcagcattgccggtggtagaacccagcattcccaatcagccactgacaataaaagaaggtcacagaattaccttatagcaactgttttctatttttcccttctatcattttaacatttgaaaagctatctagtttgaaagaaaccgtaatcctttatagcagcttctaggattgatatttctggagatgctttgagctgtccttataggaactacttgttatcataccattgtggttgtcgttaatcactatg

SEQ ID NO: 306662 - DNA, 633 bp, Homo sapiens
tttaattcaaggcttcatatattcagtatttatttgccaaagtgtaaatatctttctgtcacaagattctaattgcatcttactacaactatagcattgatagatggcctcaacttgtcactgtccagacatgatgtgatctcataagtaccacaatgatggcatgagggaagagaaacactaaatggaaactggaactgactctttcaggccagttccgttccctagtctgatatatcaaaatagtggctttcagagggagaaaaaagaagaaatgcacacacatacacataaaataaaatcaattatggcctcattcctctgcctrttaattaagactgaggtaatggtggcagattttaatgtgactcaggattccaagaactcaactcaggaagtcccagagttggtggattaactgaaggctcctcagggaacgggagtttccctcacttgcaagtctgctggctgctagagagcactgactgtggagagcacatagacagccaagacccccagaacagaggagtcctggagacaggcctgcctcctcaagtctttgagtgaggtgaaggacattctaatgccacttagtccacagagaatttcagcctccatgtgcacctgaatggt

SEQ ID NO: 306663 - DNA, 546 bp, Homo sapiens
atgatttggatattattttttcaaagaactcctagagcataaatcttcatcctgcaaaattgattacttaataaggttctgaattttktttttacctaattgttttaattgaacttgttttatgacttcagccagacaataaacatctggaaagctgggactacgtcttattagaagctatagagactacctttaaaaatgcatgtcataaaatagtgataaaatatatttaggaacaaagaatcaagtgcaggaaaattataaattggggtgggtggtaaaaaaaacaagcacgcttcaagatgataatatgatttgttataaatgctaaattgaaagggagcaagggggggtatcacgattttttaccatctgctgtattttggctctgtgtccccacccaaatcacatctcaaattgcagtcctcacatgtagagggagggacctggtgggaggtgattggatcatgggggtggtttccccatgctgttcttgtgatagtgagagaattcttacaaggtctgatgggttaaaagtggcagttt

SEQ ID NO: 306664 - DNA, 589 bp, Homo sapiens
caactaagccctttttgtttataaattacccagtctcaggtagtatctttttagcagtgtgaaaactaatacaccatcaaagaggaataaatctttaaaaataggaagaaacatattatatcatcaaacagcactttttttagcaactgcttttaaaggattaattttgacctatatcaatgtacattatttaacacattcaaaaagtactgttccagttatcaatctgttgtctctcagctccaaattcacccttcattgtctgcaatgcaaagccagaaatggactgtgtaagcacttctcctttgccagcaagtgtggtggtaaatgttaaatgttgtctggagagtgctctggagagccactggagaaggcagaggtttctcttcctggctcttccctgctcctctcagtaasctcctgcagaacgtgtcatgttgctttctaaaagcagcttctcataacatttcagagagcagcttcccagaaagtcccattggtgtggcttctccctgtggatggcttcctctggcacctctttgggcaacttgacagtgaattccaaggagcatagacagcttccctggta

SEQ ID NO: 306665 - DNA, 575 bp, Homo sapiens
tacaatctgttttatattgaaatttccctgttcaactcactgcgtattttctttctcctaattggactttgactgcaacaagtgctgaaascttcagaaaaacaatagcaggccgtactccaaccatcttttaccactcatccctactccccagagataatactttaaaacatttatatacttagctccacatttctacataagatacttatactgttatttcttgatttatcaactttagacattatccatttttatatttatccaatcatcccaatgattatagtaatatcttttttgttaaattaataatcattactttattataactatataattattatttaccattcagccaacttaagttccatgattatattttctttctagtctgattctttaaaaaatatttagttttggagataccaattgccttggctattatctttttagaatttgtaacacttattttcatttttaaaatgctttgagagatctgccaaatatttattaggggttgttttccacagtcacatatggatgagttcatcttttaaattcatttttctacagag

SEQ ID NO: 306666 - DNA, 633 bp, Homo sapiens
tttaattcaaggcttcatatattcagtatttatttgccaaagtgtaaatatctttctgtcacaagattctaattgcatcttactacaactatagcattgatagatggcctcaacttgtcactgtccagacatgatgtgatctcataagtaccacaatgatggcatgagggaagagaaacactaaatggaaactggaactgactctttcaggccagttccgttccctagtctgatatatcaaaatagtggctttcagagggagaaaaaagaagaaatgcacacacatacacataaaataaaatcaattatggcctcattcctctgcctgttaattaagactgaggtaatggtggcagattttaatgtgactcaggattccaagaactcaactcaggaagtcccagagttggtggattaactgaaggctcctcagggaacgggagtttccctcacttgcaagtctgctggctgctagagagcactgactgtggagagcacatagacagccaagacccccagaacagaggagtcctggagacaggcctgcctcctcaagtctttsagtgaggtgaaggacattctaatgccacttagtccacagagaatttcagcctccatgtgcacctgaatggt

SEQ ID NO: 306667 - DNA, 569 bp, Homo sapiens
tttaaatgtaagatattttgcctcaattttaattgatgcctgctgtgtctttaaaaatkattatttcccacacggaacttttgttgccctctggccttgacatctcccaaatatttgtccttctttattggttgggtctattgccagcttctgaactgtcttgctgtaaacaatggacgcatcctatgcaggatagtaattgcaatgtaaaacccaaatccttccctttagtcacaaactggacatgaattcctaacagccaggcaactgcagaaagtgtactgaggcacagttgaaccaggattttatatctccttgatgaacaaattggcttaccacactgtcagtctgattgttttcctctcagccaattactaagacaacagaaaattgcaaatccacttagccagtgaatttggccatgtcatagagacttggtaataaactctatttccaactgtcttcataaaagataaacatataacatttgaaaatcactctgaaggatgtagcaaacatttttcaaatttgttctgatgacactgatattgctatcataaaaactttaa

SEQ ID NO: 306668 - DNA, 428 bp, Homo sapiens
atgtcagagaccgtctgggcagcccctcccatcaaaggtccagaggcccaggaggagaaagtggtttcacgggtcaggcccagggttcttgcgctgtatgtagcctagggacttgatgtcctgtgtcccagctgctccagccgtggctgaaaggggccaacatagagctcgggctgtggcttcagaggatgcaagcctcaagccttggcagcttccatgtgatgttctgcaggtgaacagaagtcaagaattgaggtttgggagcctctgcctggatttcagaagatgtatggaaacacctggatacccaggcaaaagtttgctgcaggggcagggccctcayggagaacctttgctaggccaatgtggaaggaaaatgtggggttggagccctcacacagagtccctactggggcactgcctaatga

SEQ ID NO: 306669 - DNA, 571 bp, Homo sapiens
tttaataatcaaactcccaaaagtccaggataaagacaggattctaaaagtgcaagagagaagaaacaaataacataaaatggagcttcaatacatctggcagcagatccttcaatggaaacctttcaggccaagagagagtggtatgacatatttaaagtgctgaaggaaaaaagaacttttattctagaatagtatatccagtgaaaataaccttcaaacrtgaagaaaaaataaagattttctgagacaaacaaaagctgagggatttcagcaataccagatccattctacaagaaatgctaaagagagtactctaatcagaaagaaaaaacattaatgagcaataaataattacctgaagttacacaacttactggtaatagtaaatacacagaaaaactcagaatattataacaccgtaactgtggcatgcaaactactctatcctaagtaaaaagactaaacaataaaccaatcaaaaataataactacaacaatttttcaagacctagtgagtgcaataagatataaaaagaaacaacgaaaagttaaaaagtggggggattaa

SEQ ID NO: 306670 - DNA, 661 bp, Homo sapiens
actgtagtatgaagtcactgattttcacatgtgcctaagattatttgacactgaggattttggggatatgtgaaaagcaaatcctaggtccaaataaactcccttgtgctgagctgggaggtgccttttcctgggaactgtggagaaagatgatgtaatgagttagagtttacttttttctctttttggcactgtctatcccaaatgcctgtctcttcttttcatgggagtatggtaggaaaagtaactcattcatttcttatcaattataactataaactttgtttttatatatgtgagttaatttttctatttttgtctgtgattctgaagaaaaactgtgatcttggaatccttttctttatgcaaacataaaagaggctaatttarctacagttgtgtttatagagatcaagggtaaaaatggttttgtgagaaagatgactcataacttaattgataacataaagcacctaagtttaaaacataaagttatcttataaagattctaattgaaagacaaatgggtgctagctagtccaggaaaagatgaagaagctcatgtgaaatattaggtgattgtaatcgttattatttccaagatgcatttccactagtgggctaaaatatcctattatgagttccatcctctgtatcagaa

SEQ ID NO: 306671 - DNA, 553 bp, Homo sapiens
  misc_feature (1)...(553): n = A,T,C or G
gccatcctcccacctcagcctcctgagtggctgagaccacagacatgtgccaccatacttggctaatttttgtattttttgtagagatggggttttgccatattgcccaggttggtcttgaactcctgagcttaagtaattcacctgcctaggcctcccaaattgctgggattacaggtgcgaactgctatgcctggcctacagtaattttaaaatcagaaagctctttttgtttaattaaygaaacttcttttaagacaacgataagctttaaacattttcttttttatattatctctctcctccagtttttgttttgttttgttttgttttcccagtacttttctttcacaaaagaagccttcttcaactgttaattcttgcttatcttctcacgtttaaagacggagattttaaaaactgtttgaagctctgaacgcataggtaagactggtatactttgagcttcattgcaggatgatgtttcaactatagtcactgtttgagcataagnnnnnnnnnnnnnnnnnnnnnnnnnnnnnnnnnnnnnnnn

SEQ ID NO: 306672 - DNA, 601 bp, Homo sapiens
ttcctaacatacctacttatctcattaccactgaatgtcttgcctgctgaaagaattcagctcaacgcttctctatacacaaatgcaggtctcttgaattttactcctactaaactgaacaggtctatttatctaactgcaatcccttgaacaccaacaattaaaggtgcaatgaaagacaaaagagcattcagtctcaagccctacctggaagatcttaaaatctaatgagagagaaaaagctgatacataactaactaacaaacaaactattaacaaatgctatggaaaaagtgcaggtaaaatgttagaagaaattaaatctgccataattttccttacawatgtttgcctaaagactcaaagaaatgcctaaaaaaaaaaaaaaggcaatttcaatagttctatttcatctgttctttgtgagcaaaaaatccccttaacattaatgttagttgattcacattttattcataaatctttactatttaattataatacataagtacataattaaatgttcatgcccaaatcctagaatccaaacacgtttctttttttgaaattgtaagaccttaattttatactcacctgtccacct

SEQ ID NO: 306673 - DNA, 532 bp, Homo sapiens
tttagtgatataaagttacatctgaggcgatacaagcaagaatcagtagtctgtgtgtcagtattgtagcttcttgaaaatagatgacagagcttctaagactgacatcttctccaaatttgggcatctcatcttattatggccttatagcacaaagatacccaggggatgtagttgcaaaaatggagggtattccttataaaagggtgaggatggcaactctggatgaaaagagatgcagtaaaagtagataatagatcaaacgaatagaggggaatcaagttaagaaaaatattaaaagatttagaaaacaaggagatggatatcgtatatacagatcttgtaaaatctatgtattttttgaaggaggcaagcccacattttctgtatgtatatatgtttgctattttcatatgcatgtaatcattaaaaaataacagagcctgaaggtttcttgataatcaatarttgatgaatggtaagatttttataaacccacataatacatcaaaatcaattcattactggaaaa

SEQ ID NO: 306674 - DNA, 619 bp, Homo sapiens
catctcttgtgacgttgctgtcattcttctagttatccagaagatagaaattgttattatttagtaacaataaatacgcaatagttatcttttaatcaattaagaatatgaaaaatacaatatttattttttctttatttattattctcccttgctcttcctttttaatgtagactaaagtatccggcttacatagcgtggcattctatctaaagacaatctttacacattttttacatgatagatatgctggcaatgaagtccctcagtttytgttttataaaatatttttctttcatttatgaaggataatgtattttgatatagaattccaggttttttttcttttaacactttaaatattttgctttttgttactttaaatattttaaatattgcttgcatagtttctggtgagaagtccgctgtaattattatccttgttcctatataggtaaagcattttatttctttctggttactttcaagattttctctttgcatttggctttctgcagcttgaatatgatatgcctatagatagtttttgtttttggagggaggagagggaggttatttattctgcgggttatctctgagcttccttgatctgtggttt

SEQ ID NO: 306675 - DNA, 585 bp, Homo sapiens
acattgacaattataaaattatggagatgtgttctctctttagctgttaatgctttatgctttgtctccctgtattaccatgctgatcttttcataatgcctgttcttaagtaagtcttcttgataaaatgtttttctcttactgtgctcttctcttatttttyccccattctttccgtttcttactgtgaacagtgagaaggcatttcttctcagttagcccagtactactactttgagttagtagagggtagtggttaaaaaatcaggctcagggtagggattacctgcatttgaatctaggtccagccactggatagctttttaacataggcaagttatgcaaactcacagtgcccaaatttcctcatctgcagaatgatgaggaatagcacctattccatagagttcttgttaggatgaaatgagatactgtgtgtaaagttcttggcatataataagcactgtgcaaatagtggtattattatttgacagcagaacagaggccagccatttcttcagtttataatttagggccaaatagaatgctattaataagaaatttattgtttttatttttgattg

SEQ ID NO: 306676 - DNA, 581 bp, Homo sapiens
agaaagggttctaaagaagaaattgttcctgggactgtggattaaatagayatgtagcagattgtttaatttctccatatctatatgcccagtttgcatgtatgtattcttatatatgcatgtatgttagaaataagcatactgcctataatctaaagttaaagacaaaatcaataatcatcatgaatctgctatggaactggacatgacactgtggtcctcagtgcctcagtgttccataaagtgttttgctcaagaatagtggcaatttctgagattttccatgtgggagcattttagagctttgtcttctggactgtaatattcattgcctcccgtgcctttggtctctcactgttatgggtttttctctgcccctgcctctgctgtccactgctggaaaatccttagagcccagtcctcatctcatcagcaattatttttcctgtagcaatgcctagagaaattttaggcactccaaggccagggaatttttctggaatctcagattcaaaagagatcacctgggatctttgtagccccttatacaggggctttaggaatctctcttgacctgacca

SEQ ID NO: 306677 - DNA, 596 bp, Homo sapiens
aaaaattaaaaactccacatacttaaattgctgatagttatcttcatttttggacattaactcttgaatagtccttaccgaatcaatacacaagtaggcttatacatagaaagaaacttatacacacattttaaaggacaaagttaaatacataaaggcctatactttcatttttctccacaagacagttttttattggaatttttcattgacctacttttaaggaatrtggagaagaaaatggaggttgattctgtcttgtggatgaaatggtgaagatataggtgatgaaattttttacaatgccaaaaaattcattctaattaagatagagcagatggcaaatatggggcttgagagttatagcacaactagtttaactttgaattctaatatctactctatgctaatagatataacacagcgggtagtatgctacaagttattaaccaggctcttgggattctgatctcttcaaggttacagaaaaatattatgttgctctaggtcaaatgtgagggtgctctgtcattgactttctaaatatagctcctgtcactgccttttcctctaggtaataatcttctcagatagta

SEQ ID NO: 306678 - DNA, 596 bp, Homo sapiens
aaaaattaaaaactccacatacttaaattgctgatagttatcttcatttttggacattaactcttgaatagtccttaccgaatcaatacacaagtaggcttatacatagaaagaaacttatacacacattttaaaggacaaagttaaatacataaaggcctatactttcatttttctccacaagacagttttttattggaatttttcattgacctacttttaaggaatatggagaagaaaatggaggttgattctgtcttgtggatgaaatggtgaagatataggtgatgaaattttttacaatgccaaaaaattcattctaattaagatagagcagatggcaaatatggggcttgagagttatagcacaactagtttaactttgaattctaatatctactctatgctaatagatataacacagcgggtagtatgctacaagttattaaccaggctcttgggattctgatctcttcaaggttacagaaaaawattatgttgctctaggtcaaatgtgagggtgctctgtcattgactttctaaatatagctcctgtcactgccttttcctctaggtaataatcttctcagatagta

SEQ ID NO: 306679 - DNA, 572 bp, Homo sapiens
gttcagttttatggtgatgagtcagaactctagctacttgagctatgtcttgctttttttcttttgtaaaagttaagagcatactcacagtggcttaccagcctctcaaccaggcttaggaaaattgaaaattgactaattgcctttctactgtctctagatgattcaggaccctttaatcagtatagaattttttaraatttaacttcattcttcatttttgaatacctcttcatgaggtattcatgactcaacactaaagatatagtttcaatcctagtaagaagaggccaatacctagatccaggattgaaagtgaaaaaaatgaacaaacaaagcatgaaagagccaagcattccagtttaccactgaacaattgataatccccaacttgaccttcagtgctttccagtctggccctattgtgctttccaggcccatttctgtaggtatgctgtaatcattcaaaccagacgattttctcacattctatgttgtctcaccatggtccctttgcataggctgatccctttcccaggaaggactttcttccttcccattccatctttgtg

SEQ ID NO: 306680 - DNA, 589 bp, Homo sapiens
tgggacagttgaataccttgactgtggtggtggttatacaagtttctacatgtactaaaattgcatagagctacacacacacacacaagtatatgtataactggtgaaatttaaataagctctatagggctgggtgcagtggttcacgcctataatcccagcactttgggaggctggggcaggatgatcacttgagcccaggagttcaagaccagcctgagcaacacagggagatcccatctttacaaaaggttttttwaaaaaaattagccaggtgcacatgcctgtaatcccagctacttgggaggctgaggtgggaggatcactggagcctaggaggtcaaggctgtagtgagctgtgatcacactactgcacttcagcttgagttacagattgagaccctgtctcataaataaataaataaataaataaataaataaataagctctatagattgcaccaatatctatttcttgattttgagactgtactgtagttgtggaagatattgacattgggggatgctggaggaagactgaacagaatttctctgttatttctttgctgccactggtgatataattacct

SEQ ID NO: 306681 - DNA, 597 bp, Homo sapiens
ggctcaaacattgtggacaaagataaatgacaaactgggaaaatctttgctgcttgtatcaaatataaggtaactgatcatctgaatttataaaggagcgaatataaattgataagaaaaagaccaacaaccctatgaaaaaaatgagtaacagacaactgacacagaaaaggaaatacacatggcttttaaataaataaaaagatacttaataaccctygtaatataagaaatgtgaattaaaactacaaactgatgctacttttgatctaattagttggcaaaaatcaaaatgcttgacaaaatcctatgttggtaagggtaaggggaaacactctcatatcttgctagtgggaaaatgaactggtacaatctcttcaagatcattttggcaattttgttatctgtcaaaactacaaatttactcagccaatccatttctaggattatgtctcataaatatatatagtcacacgtgtaaaatgacatgtataaagttattctccttggcattatttatcatagcaaaacactgggaaaaacttaaatacattgaagaggaaacattaaataaatcatgtcacacacataaaatga

SEQ ID NO: 306682 - DNA, 559 bp, Homo sapiens
ctgaggttagagcagtgcctgaatcagacaaaaagccctatcgtcatgggtcctacattctagtgggaggaaaacaggtattaaataaacagaacaaggaagtataaggtagtgattaagtgctatagagacaaacaaagtggggcagggagcatctttggtgggacgagatggttggagttttagatactgatatcaaaatgtcagtcaggaaatgctttctgagcatttggagacctaaaggggtaaaggagtgatctaagggaaggatattatatgtagagggagcagtgaggacaaaggccctcaggtaagtacatggctgaaaaacagcaagaagtccagtgtgactagagtagagtgaacaagaggacgaggagtgggagatgagatcagagaagttaataggggactaggtcatatagggacttgtgggtaactatgagggcttcagattattaaactgagatwtgaagtcatttgtgagttttgagcaaaggaatgacatcagatttaacttctttaaaatgtttaattttgtgggtatattgtaggtata

SEQ ID NO: 306683 - DNA, 624 bp, Homo sapiens
  misc_feature (1)...(624): n = A,T,C or G
acaattcagctcataatagtgtattacacttatggatttgtatatgccgaaccaaccttgcattcctgagataaatcccagttgataatgggacttattmtcctttttatgttgctggatttggtttgctagtattttgtcaaggattttagcagatggccagcattattatcttctttattcttaccattcaacacgcttttacatgtgctatgtcatttacccttaaacagaattccatgaggtaggtagtatgtttaccacagcaaactgaggctcaggaaagtttattttcccctaactataaactcgcagtagtatatagtataaattggaattaaaattacagatggtgagaacatttagggagatgaaagaaagcaggatttggtgagaacaaagagaaactttgtatggatggaagtttacagaatcaatttgaatagcatcagtgatctcaatgatgtaagaactgaggtcatctgctgatgtgcaaaataagagtaaataggttcatggtttcaattcatgaatgtaattaaaccaaataggagtgacaattctcattaattttgagaacatgacttaaccagatntaactcatgttctcattaattttgagaa

SEQ ID NO: 306684 - DNA, 624 bp, Homo sapiens
  misc_feature (1)...(624): n = A,T,C or G
acaattcagctcataatagtgtattacacttatggatttgtatatgccgaaccaaccttgcattcctgagataaatcccagttgataatgggacttattctcctttttatgttgctggatttggtttgctagtattttgtcaaggattttagcagatggccagcattattatcttctttattcttaccattcaacacgcttttacatgtgctatgtcatttacccttwaacagaattccatgaggtaggtagtatgtttaccacagcaaactgaggctcaggaaagtttattttcccctaactataaactcgcagtagtatatagtataaattggaattaaaattacagatggtgagaacatttagggagatgaaagaaagcaggatttggtgagaacaaagagaaactttgtatggatggaagtttacagaatcaatttgaatagcatcagtgatctcaatgatgtaagaactgaggtcatctgctgatgtgcaaaataagagtaaataggttcatggtttcaattcatgaatgtaattaaaccaaataggagtgacaattctcattaattttgagaacatgacttaaccagatntaactcatgttctcattaattttgagaa

SEQ ID NO: 306685 - DNA, 608 bp, Homo sapiens
agatataacatagatttgttgtttgattcatgatacttttatttttgacaacttgtaagactgcgaagggcactagatgtttggaagaagacatgagttaattagcaatgagatcctgggggaaaacattttaaaacttcttttagcttgttccagtgttctgcttcctatgtgttaaatgcttatacaaaaaaagaaaagtttctgtttttaatttcccaatgaagctcaatttcgagaaaacaaatccaaagaattactacttttataaagtcagttcagcrtactggttaggagacagactatcaggctttttacaacttattagttaagtggacagattttgggtttaaaatgcaggctctactgggtaattttgggcaagttatcaaatctttctagagcttttacctacaaaatggtgctaatcatagtatcttcctcctagggttattttagagtattaaataagttaagaaatggaaagtgcttgtcaggtacatagtaagctctcactaagtgttcactatcatttttactatttcttgaagaagcaactaaaaagctagatcattagtgcttaaacttccaatatactccataataaa

SEQ ID NO: 306686 - DNA, 603 bp, Homo sapiens
ccatctcaaaacaaaacaaaacaaaaaaaagaagtaagtttacagtataaggatataaagaaaatattttatatagttacacaatgtgtttgtattttaaactgttattattgaagagtccaaatttataaagtaaaaacgggccagtcacagtggctcacgcctgtaatcccaacactggtaggtcaaagcargaagacagcttgagcccaggagctggagactagctgggacctcatccctacaaaaaaaatttgaaattagccaggcatggtggcacatgcctgtagtctcagctgctctggagactaagacaggaggactgcttgagcctgggagataaaggctgcagtgagccacaactgcaccaccgcactccagactggatgacagtgagaaaataatcaatcaagtgaaaacattacagtaagctcatgtattattgaagaaaaaagtttaaataaatttagtgtagcctgagtgtactgtacagtgtttatgaagtctacagcagcatgtcccagatcttcacattcacccaccactcacttgctgactctcccagagcaacttccaatcatgcaggttcctttcatgagtgcc

SEQ ID NO: 306687 - DNA, 639 bp, Homo sapiens
caagctcctaggcctcaccttttggagagtctgattcagtaggtttggaatggggccagcaccccaggtgattttgatgcacaatgagaattgggacccaatgacgtagacttactcttttcttcctacgtaggaatttatttaggcaatatctcaaatgagaayctagtttgggcttgcatatctccaatatggagaattaacttatgtcactaagtaaaacatcctattcaaggttggggtagttttagttttaagaaagctgtacttcgttacgcttccctgaactttttactgattactattcctaccttagttttcttttctcatgagtaagcatccatagctcatttaaacattttttgtgttttcatgtgatgaagtttttagatctcctaccatctgtgttgcccttcaggaaaacacactcatgttatattttgtttggcaataattttttttttcttttgagacagagttacactctgctgcccaggctggagtacagtggcataaacacaactcactgcagcctccacctcctggcctcaaacagtcctctgcctcagcctccccagtagatgggaccacagatgcatgccaccatgctgagttaattttttattttctgtagagata

SEQ ID NO: 306688 - DNA, 523 bp, Homo sapiens
aaatttagggaaggacagttttacaatgtaattgtaagaatttcttaattgtaaaagtcagttgtgcacatggttttaagagaagatttttgaaataagtgtaagtcttctgtgttagttttctggtaccatraactgggtggattaaaacaacagaaatttattcccacagatctgaaggctagaagtctgaaatcaaggtgttggccatgttttttccaaagcctttaggggagcatctttccttgcctcttccagccccagatgttccttggcttttggcaacatatctctaatatcttcctccattgtcacatggccttatctttctccctggtctctgtgtcttcttctcttagaaggacaccagtcatattggattgtggtccaccctaatgacttcattgtaattacacctgcaaagaccctgtttccaaataatgtcacatccacaggtactgagaattagggcttcgtatcttttgcctgcatttatagtcccagttacttgggaggctgaggc

SEQ ID NO: 306689 - DNA, 523 bp, Homo sapiens
aaatttagggaaggacagttttacaatgtaattgtaagaatttcttaattgtaaaagtcagttgtgcacatggttttaagagaagatttttgaaataagtgtaagtcttctgtgttagttttctggtaccatgaactgggtggattaaaacaacagaaatttattcccacagatctgaaggctagaagtctgaaatcaaggtgttggccatgttttttccaaagcctttaggggagcatctttccttgcctcttccagccccagatgttccttggcttttggcaacatatctctaatatcttcctccattgtcacatggccttatctttctccctggtctctgtgtcttcttctcttagaaggacaccagtcatattggattgtggtccaccctaatgacttcattgtaattacacctgcaaagaccctgtttccaaataatgtcacatccacaggtrctgagaattagggcttcgtatcttttgcctgcatttatagtcccagttacttgggaggctgaggc

SEQ ID NO: 306690 - DNA, 599 bp, Homo sapiens
ttttgctgaaataatcacacattgtgctacaaagcttttcctttgatgtcttactatacctgtttttaggtatttgaagacatgttgctcttgccaaagtgaattattactgaccaactttttatttatttattatgtcatttatgtaataatcttatagatccccaaagaaattatcttgccctcactgaactttttcattccccacagtaaatttgtaaactctaatcttcaaagcagtcacaattaatccacttgtgtaagtaaaagaattcatgttttagtgatttctcagtttaatttctatagctttatcttgtgttatttttagtttcctctctagagattcttgaacagattcttaattaccctctaaagagtattcatgttaggtagatatgaatggatctaataggaaaataaaggtacagaaaatttgggtgatttgctgcaataagttgcagttgaaacargatcatgaatttgacatgtatatacttattccagtctctatttcagttaaaaaaatgccagtatcttatgatgataaaaaccattgcacagatttgacatctgtttctatttcacaggtaaccctg

SEQ ID NO: 306691 - DNA, 570 bp, Homo sapiens
tctctggggtctcttttataagggcactaatcccattcataaaggctttgccatcatgatctatctaatcacctcccaaaggtcccacctcctaataccatcaccttgggagtaaggatttcagcatatgaatttgcaggggacacagtcagaccataccgcctggcaactcctgtcatatctctgggatatatgtcatagataagtcatatcttaaacatatggaaaaaatggatttaccaaacaatccagcagtacattcttggttgtatatcccagagatatgtaatttccgcacaagaacttttacacacatgctcataacagctttatttctaatggccccaarctgtaaactatccaaatgtcctttaatgaataaatgattaaacaaactttggtatgtccatgcgatggaatactactcagcaagataaaatgaacgaaccattgatttcattgaattgtctacttgtatctttttgcatctcattgagttcccttataatcattactttgaattcctttcctggaaatttattgatttcctattcattggggtctgttagt

SEQ ID NO: 306692 - DNA, 619 bp, Homo sapiens
tgagttggaaggcatccagaagtctgagcaaaggcaggggctttccagcagtgacagaaagacgaagggaaaaggagcaggggtgggccagcaatgatgcaggggtagaggtgagaatatttatagcttcagctgcaatcaggaggaaagtccctggacacagaggtaattttgctcatgggacatcagcaacttgtacagtcataattgagggactgtcccagtgaatacacaagttgatgctttaacattcactcaagcctactgaaacttaacctttctttccacttaaaaaaaaatcatgaaaataaatcattctataaaaaaaagatacatggacctgtatgttcatcgcagcactattcacaatagcaaaggtatagaatcaacctagatgcccatcaatggtggaytggataaagaaaatgtagtacatatacacaatggaatactacacagccataaaaaataatgaaataatgtcctttgcagcaacatggatggagctagaggccattatcctaagcaaatgaacacaggaacagaaaaccagataccacatgttcttgcttataagtgatagctaaacattgggtacataaggacataaagatgggaa

SEQ ID NO: 306693 - DNA, 529 bp, Homo sapiens
agctagatccataagctgggaggaacactgaaatggcatttctaatgaattgctggaggccaagagtagactaacttgagagtgagaaactcctgggggctacaatctgaggaaactcccaaactgtcctaggtttacttctagaaattttgtcagcttctcatgatgataatccaaaaaaattcctgttacagttttggcaggggaaggggaagagaaaacattgtgaaatactcccagamtgttctgtataaagcagacctagtctccaggagaaaaaaactttacctaagtcttatcccacagagaaggactttcctcctactcttactctttctagccttcggtctcatgtcagttgggaaaacaagatatatcactggaaaaacacttgtgaaggtcacagcccagagatgcagacagattgagatttaatcataagattatagaatgcttcccccacaacacacctgaccaccgcaccaacataatatatgaatgaataataagaatgaattacagctgaaag

SEQ ID NO: 306694 - DNA, 600 bp, Homo sapiens
acacacaaacaacaacaaaaagcaatgacaccaggtatatcatattcaaactgcaaaaaacaaagagaaaatcttaagagaagccagagggagaaaaatcaccttatttatatagaaacaagaacaagatttctagtggagttactgtcagaaactatgcaagcaagaagagagtggtgagaaatatttaaagtattgaaagaaaagaactcactaactagatttcaatatacagtgaaattatcctttaaaacggaaggagaacaaaaaccttctcaaatatacaaaaaactgagaaactttgccagaggccttccctaaaagaaatgttagaaaaagttcttcgggaagaatgaaaattatataagtgagaaactcagatccacataaagaaacaaatagaattagagaagaaataaatgaasacaaaataatgtcactttttaaactcttaattgacttaaaagaaaatgtttatataaagtaatggcattaacaatgggtttgtgattgtgaattatggataaatcaaataaatgacagtaacataatagaagacaggaggaaggaaatagaaatactccaagggaatggcactac

SEQ ID NO: 306695 - DNA, 545 bp, Homo sapiens
caatgtctgccttcaaattttcaaaggctaggctgactcttgttaggggcctagttaggggcttttgttaacttgaagttaaagccactgctcctttaccattccaaaaatcctagagaccttgagaatcatgctaaagaatcacgctaaataaactgccagtgctctaggaatggaacagcaaagcctgggtgacaacacatttactacagcatgattgactgaatattttgagcccactrctgagacctactgctcagaataaaagactcctttcaaaatatattcattgacaatgcacctgatcacccaagagctctgaaggagatatacgagattaatgttgttttcatgtctgctaacaacattcattctgcagccctatggatcaaggagtaattttgactttcaggtcttcttatttaagagatatatttcacaaaactatagcagccatagataattattcctctgatggatcttagtaaagtaaatcgaaaatcttctgtaaaggattcaccattctacatgtcattaagaacatt

SEQ ID NO: 306696 - DNA, 473 bp, Homo sapiens
ccaacatctctcaacctaatggttttagcgtgtatgcttgaataaattaatttttttgttattttcagtctgaatatcattatcaaagtgagagaacaggcgaataaaataaaaatctagtgtagtgtttttaatttcttcccaccgtctgttaacattcaaatatccatctcaaatggggcctttccctttcttgtttctttgtttggtttttccttagtgtttattagtaagccctcggctgacttatggatttcaccttcatgattcatccaagscagcatcttacatctgtccttggctgtgtgctcattcttcctgctgttgtacacatctattaccatctaaattcactgagaacactctgtggaactcatttatttcttaatttgcccttcatttttctacctcgttggaataattagttattgcctagataattacatttttagagctttcaaactctcttaatc

SEQ ID NO: 306697 - DNA, 538 bp, Homo sapiens
atgatctcccttcccctttgctacgtaagtgtgttctttgatatgactcaattaaccaaaaattagccatcatgtatctttaaatggctattgacaacgatttctgctagataagtgttctctcgggtcgtgtccctgactaacctgagcttacgacctacccagaaaggttagagagatataccagaaccagagtgatagattgcccatagaaagcaagcaagagttggacacaaagtgctgaatgagtgatagagaatatatgatctttgttgtcccagtatcctgtacttccttttttggtagctttyattgcaattgtaatgaaattaattatctggatgttatttaacatcttgccttcaccttttctttcaccttccctttcacatcccctgggtgcagggtcctggcttgattttacttaccattgtattcccagaggaacacaataggttcagaagttcagaaaagtgagcagtcgctgtccattgtgaggcttaacaaccatgaccattagggaaggcttcccagaggt

SEQ ID NO: 306698 - DNA, 565 bp, Homo sapiens
attatgtacctaaatagtgcagctggagctggatctcacaagcatcctggaattctggtccacttcaaacaagtatttgattacatcaaatgtagttaattaagataattacattgtgcttttcctcagaagaatactagaagaaaataaaaaacagaaaaaacctcctgtattaataaattaaatatttgaaatgcttctggaartgttaaattatcttcaggtgggcaaacttgttctaaattcaagcccaggtggtaccttacattttttggggggcggaggggcgcttctcctagagcatggattcaattaaagttgcctgacagtgaaaaatcaacctattctaagatgcaggcgaagctttcttccatagcaaaagcactgttctgcttcttggcttcagtcattgctttgtttgcactttttttccctaagttcacacttaaggcacattttaatgcctgtgaccaccacctatttcctgttattgtgtttcttatgataggctgccctccttggaactcttatcttctcatcatctctgagtccttttagttgaggt

SEQ ID NO: 306699 - DNA, 592 bp, Homo sapiens
ttttgtatttctgcaggatcagttgtattgtgacctttgtcatttttgattgtgcttatttggatcgtctctcttttttcctttgttactctagctagtgttctatcrattttgtttaccctttcagagaactaaattttgggcttgttgattctttgtatggatttttgagtctccatttcattcagttctgctttgattttagttatttattttcttctgctggctttgggattagtatgttcttgtttttccagctcctctagatgtgaggttagatcatgaatataagatctttctaatttttttatgtaggcatatagcactataaactttcctcttaacactgtttttgctgtatcccagagattttggcatgctgtgtctctgatttcatttatttagagaactttttgatttctgccttaattttattgtttgcacaaaagttattcaggagcaagtcatttaatttttcatgtaactgtgtggtttagagagatcctcttggtattgatttctgttttcattccactgcagtccaataatatgtttggcatgattttgatttttttaaaaaatttattgagac

SEQ ID NO: 306700 - DNA, 558 bp, Homo sapiens
tgggaaactctgcagtaagttaccactcagatttggggcctgtagagttgggtgatggtgagacaaagatgaaagaagaggaccaccaaggatcttaggagraagtaactgaaaaggttgaaattaaatggtttgtatcctccgagcagtttagcagaatcaaatcaggatttaaccccagcaccctatttctttagccatgaattccttagatggctttgtcttcttgggaacccacttcatgtgccttctatcatagagaaacagctctatcatggccatgcattaatagtgaggaaatttacctaccattttgtctatagaattataaattttatggttgaaagggaccctgatagtcattatggctacttttaggcaggcaagaagtattaacatcattttacaggtgaagcagttgtgaacagagagggtaaatatcctgaccctgggatctttgttcaattgatgtcagcaagtcagaggtcacataaaacatatacactatcctcagagaatgtaggaatcgaaaatgcagagggactggggaataacctc

SEQ ID NO: 306701 - DNA, 438 bp, Homo sapiens
tctttttctcctgctaactttgggtttatttgttcttakttttttagttccttgaggtgtgatgttagggtgttaatctgtgatctttctacctttttgaagtagatatttaatgctataaactttccttttagcactgcttttatgatatcccacaggttctggtatgagatgctttcattttcattcatttcaaaaaatgtttaatttctgtcttaattgcttcattgatccagtggttgttcaagagcatgctgttcaatttccatgtatttatatagtttccaaggtttctcttggtattgacttctagctttttctcaacatagtctgagaagatccttgacgtgattttgattttaaaaaatttgttaacactagttttgtggactaatatgtggtgtattgaagaatgtttcatgtgctgatgaaaagagt

SEQ ID NO: 306702 - DNA, 565 bp, Homo sapiens
gcatttttggttgatttccactagatggtagtattgaattcaagattcaacctgctatatattttaatgcagaaatttgataaattacagaagacatttgtattgtgttacttttaccgtctatgttaacatttgaaaccatattcagactatgtttatgcatgttggaatttttttwaaaaatacaacttctggaaatttgaaaacttcttaagaagctggtgcaatattagatatattgtattgtaattcatagaaataatcttttattatgaaactttttaaaataatttttgcatgtgttttaaattctgatcatagtcattttctttttcaggcaaaatgtagatttcgtttttagtctgtggaaagagtaagagaaaaataacatgaaaatatattttttttcaaatgtttctgtcaggaaagataggctcttggcaggtgtgtttgtgtgtaaaaatagactatcttcgagtacatattttcacttcaatttccatgaggcattataaacaaagacaaaaattaaaaaaaaaaacacttttgcaattaatgaatgatg

SEQ ID NO: 306703 - DNA, 510 bp, Homo sapiens
gtcctgataaacaatgcatgtataaaagagtaagcagaaataagcctggaaaggtaagttatggtagaaaaccaggtcaagaagttgactttatatcagggaaattacatgtaaaacaagcatcgctacacaggcarccatttaccagttatatgtggagagtgagtgatggacccaaaaggaagactgataggaggggcatttcggaaacaaactctatgttacttagcaactgcctaaataagagtgggggtctgcaaagcatagagtgaatgcagattgtgaacactcaaatgaaactagtattattattatgacaccacagtttttaacttgacttactggtagtgctaaaaacacataaaagtccacaaaaagagcaggagagggatgggatagggaattttcttattctgttttatttttccaagtgtttctttagattttctagacatttatatcacctacattagatatcattttgccttttccgttccaattattatattt

SEQ ID NO: 306704 - DNA, 510 bp, Homo sapiens
gtcctgataaacaatgcatgtataaaagagtaagcagaaataagcctggaaaggtaagttatggtagaaaaccaggtcaagaagttgactttatatcagggaaattacatgtaaaacaagcatcgctacacaggcaaccatttaccagttatatgtggagagtgagtgawggacccaaaaggaagactgataggaggggcatttcggaaacaaactctatgttacttagcaactgcctaaataagagtgggggtctgcaaagcatagagtgaatgcagattgtgaacactcaaatgaaactagtattattattatgacaccacagtttttaacttgacttactggtagtgctaaaaacacataaaagtccacaaaaagagcaggagagggatgggatagggaattttcttattctgttttatttttccaagtgtttctttagattttctagacatttatatcacctacattagatatcattttgccttttccgttccaattattatattt

SEQ ID NO: 306705 - DNA, 510 bp, Homo sapiens
gtcctgataaacaatgcatgtataaaagagtaagcagaaataagcctggaaaggtaagttatggtagaaaaccaggtcaagaagttgactttatatcagggaaattacatgtaaaacaagcatcgctacacaggcaaccatttaccagttatatgtggagagtgagtgatggacccaaaaggaagactgataggaggggcatttcrgaaacaaactctatgttacttagcaactgcctaaataagagtgggggtctgcaaagcatagagtgaatgcagattgtgaacactcaaatgaaactagtattattattatgacaccacagtttttaacttgacttactggtagtgctaaaaacacataaaagtccacaaaaagagcaggagagggatgggatagggaattttcttattctgttttatttttccaagtgtttctttagattttctagacatttatatcacctacattagatatcattttgccttttccgttccaattattatattt

SEQ ID NO: 306706 - DNA, 634 bp, Homo sapiens
gcgcggtggcttatgcctgtaatcctagcactttgggaggacgaggcatgcggatgacctgaggttaggagttcgagaccagcctagccaacatggtgaaaccgtctctactaaaaatacaaaaattagctgggaatggtggcaggcgcctgtaatcccagctactcaggaggctgaggcaggagaactgcttgaatctaggaggcaaagsttgcagtgagctgagattgacggcgctactgtactccagcccgggctacaagcacgagactctgtcttaaaaaaaaaaaaaaaagtaaaaaaaaaaaggaaacagctgagtggtggcaatactaccggctacccactccatttcctagttgatagttcagcaatatctttctgatcttactattgttaattaatatcattgacagtgtctcagccaagttatcagatctatctaggttgtctttgtgtttttttaatccttcagtgtgacacagcagctcagaagaggaatacaagtatgagctccaccattttcctactgtttacatatgcatggattattagcattatcttcaatctgtgatttctttgcagaaatctttttaagccacttttccattttgaaaggattggctaaaatttt

SEQ ID NO: 306707 - DNA, 634 bp, Homo sapiens
gcgcggtggcttatgcctgtaatcctagcactttgggaggacgaggcatgcggatgacctgaggttaggagttcgagaccagcctagccaacatggtgaaaccgtctctactaaaaatacaaaaattagctgggaatggtggcaggcgcctgtaatcccagctactcaggaggctgaggcaggagaactgcttgaatctaggaggcaaagcttgcagtgagctgagattgacggcgctactgtactccagcccgggctacaagcacgagactctgtcttaaaaaaaaaaaaaaaagwaaaaaaaaaaaggaaacagctgagtggtggcaatactaccggctacccactccatttcctagttgatagttcagcaatatctttctgatcttactattgttaattaatatcattgacagtgtctcagccaagttatcagatctatctaggttgtctttgtgtttttttaatccttcagtgtgacacagcagctcagaagaggaatacaagtatgagctccaccattttcctactgtttacatatgcatggattattagcattatcttcaatctgtgatttctttgcagaaatctttttaagccacttttccattttgaaaggattggctaaaatttt

SEQ ID NO: 306708 - DNA, 634 bp, Homo sapiens
gcgcggtggcttatgcctgtaatcctagcactttgggaggacgaggcatgcggatgacctgaggttaggagttcgagaccagcctagccaacatggtgaaaccgtctctactaaaaatacaaaaattagctgggaatggtggcaggcgcctgtaatcccagctactcaggaggctgaggcaggagaactgcttgaatctaggaggcaaagcttgcagtgagctgagattgacggcgctactgtactccagcccgggctacaagcacgagactctgtcttaaaaaaaaaaaaaaaagtaaaaaaaaaaaggaaacagctgagtggtggcaatactaccggctacccactccatttcctagttgatagttcagcaatatctttctgatcttactattgttaattaatatcattgacagtgtctcagccaagttatcagatctatctaggttgtctttgtgtttttttaatccttcagtgtgacacagcagctcagaagaggaatacaagtatgagctccaccattttcctactgtttacatatgyatggattattagcattatcttcaatctgtgatttctttgcagaaatctttttaagccacttttccattttgaaaggattggctaaaatttt

SEQ ID NO: 306709 - DNA, 531 bp, Homo sapiens
atttatctcagtaagtcacttcaatgactaatcaatattttattttcctgacgaaatgaaaatgccaggaaaatagatgcacaatacttttaatgtggttatgtgtcttttaagtattaacagagttgttcatagtgttatttggaagcgtttataatatgaaaaatacagcatctaatttccacttgaagaattcrtatgctatgagtcattttatttgggcttaatttttatttagtaattagcagactcagagagggtgaaatttgctgagggagagtataccaacagaacatacaaatgggaatcaagtaattcataaaaacaaaacctgatatcttgacataaaatcctaaatattatactgtagttttttgtattagtaaaactagaaggatttaaacttaatgcaccgatgattccagccttagtgaaatgaaaatgtttcttaaccccaaagaatccaggctcctgattagctcatgcgaagacaattatttatgatagcacttactggtaaagagaaaggac

SEQ ID NO: 306710 - DNA, 544 bp, Homo sapiens
tgctatttcattaaactttacaaatctatcttttcatctcttaagacttttatcaccctcatcatcatactgcaggggcctattctttgctttgcttttttgtataactacctcctgtatcatccttcctgctaagtgtcctgattacaatctttatgtatcagaggcctagtctattcttgaagctagctctttactttgaaaccaacagggaractaccaggctttcaaggctacactgaaatattacacagtatacagagagaatgaggatgtggagaaatgtgttaatttggtgaaatcataccaaaggcctagaagaagccataaacttcttgactcccaaagatacttcaagaggcagctcttctcttctgttaagggcaatactttttaagttctgtcttagactctgaagaagtttagcagtttttgctacaaatggacaagacaagttctaagcattgattttttgagcacccatgatatcaagacactgaggatacggtatacataaaaggcaaaatgtattgttctcatcctt

SEQ ID NO: 306711 - DNA, 544 bp, Homo sapiens
tgctatttcattaaactttacaaatctatcttttcatctcttaagacttttatcaccctcatcatcatactgcaggggcctattctttgctttgcttttttgtataactacctcctgtatcatccttcctgctaagtgtcctgattacaatctttatgtatcagaggcctagtctattcttgaagctagctctttactttgaaaccaacagggagactaccaggctttcaaggctacactgaaatattacacagtatacrgagagaatgaggatgtggagaaatgtgttaatttggtgaaatcataccaaaggcctagaagaagccataaacttcttgactcccaaagatacttcaagaggcagctcttctcttctgttaagggcaatactttttaagttctgtcttagactctgaagaagtttagcagtttttgctacaaatggacaagacaagttctaagcattgattttttgagcacccatgatatcaagacactgaggatacggtatacataaaaggcaaaatgtattgttctcatcctt

SEQ ID NO: 306712 - DNA, 603 bp, Homo sapiens
tccctccaaaattcatgttgaaatctaatctccaatgttggtattaagaggtgggggggtctttgggagggtactaggtcatgagggcagaaccttcatgaatgggattagtgttcttacaaaagaggactgagggagcttgtttttctcttctgatatgtgagaaaacatggtgtaacttttcctctaggactttatgtttttaattattcttttccttgaagtacttttgacaccttagacagaaaaatgaactaagactgctggccatgatggctcacaacatacctgaatcccggcactttcggaggccgaggtgggtggatcacttgagcccargagtttgagaccagcctgggtaacacaggaaaaccctgtcactacaaaaaagacgtattgtcatcagacaatacatctgctgacaccttgatcttggacttcccagccaccagaactgcgagcaatagattgctgttgtttatatattactcagtctaaggcatgttgttatacaagctcgattgaactaaggcactacttttatcaggactatttgccattaaatttttagaacaatttttaaataaattagcataaaaaatt

SEQ ID NO: 306713 - DNA, 603 bp, Homo sapiens
tccctccaaaattcatgttgaaatctaatctccaatgttggtattaagaggtgggggggtctttgggagggtactaggtcatgagggcagaaccttcatgaatgggattagtgttcttacaaaagaggactgagggagcttgtttttctcttctgatatgtgagaaaacatggtgtaacttttcctctaggactttatgtttttaattattcttttccttgaagtacttttgacaccttagacagaaaaatgaactaagactgctggccatgatggctcacaacatacctgaatcccggcactttcggaggccgaggtgggtggatcacttgagcccaggagtttgagaccagcctgggtaacacaggaaaaccctgtcactacaaaaaagacgtattgtcatcagacaatacatctgctgacaccttgatcttggacttcccagccaccagaactgcgagcaatagattgctgttgtttatrtattactcagtctaaggcatgttgttatacaagctcgattgaactaaggcactacttttatcaggactatttgccattaaatttttagaacaatttttaaataaattagcataaaaaatt

SEQ ID NO: 306714 - DNA, 519 bp, Homo sapiens
atttatgtgacctttatttttcctgattctgcattggccagcatattgtgagtaatttaaggtaagagtgagtatagtgatggtccttgtctttttcatacttcaatggcatcattccttggattctatttttaagaaaaatagttctgctgctttgagayagattttaaaaatcatgttcagaaatttttaaaatttgtttactaatagtttttatgagaaaatattacattttctcagtggcttattctgtgaaatctgtgaagatgatcttctagagttttttcttttgattttgttactattttcaaaattaggttagtgtattgaattatctttttattcctcgaatacattctcctcttttgctattatgattaaaaatattttattactttctattggctgacattatgtttgtgttttttgtatctattttcttagggcaaactgtcatagagttccctcagtgagggttgttataagcattttgctggattcgagtaacatgaggcagta

SEQ ID NO: 306715 - DNA, 511 bp, Homo sapiens
tgacagaaactggacagggtctaggaatggatttgttttgggaattaactggcttggatccagttagaggcctcttacatctgactgggtcagaaaggaactggtagtaagcagtaatatggcaggggttataaaatttggcttttgaaaattcacagggatttttgtgttctacccctttgtttcattttattgtgcagctaggtargaaaaaaaaatcactggctaagttaattaagagaatctaagagtaaagccaatattttaggtaaaaataggatccttaatttctggaaaactgagctctttccagcttatacattagacctgggaggcagtgatgtctaaagaaatggcgacatcttactaaaaataactcacagtggagtgttccaaatgaacaatgcaccactgaagtacatttttaaatgaagactctcagtaaagacctttttggctaaaaagggatttggtactatgggatgttaactgctattctctttgaaataat

SEQ ID NO: 306716 - DNA, 565 bp, Homo sapiens
tataccatgttcttgtcggttgacagctcttcccatttctagcctgaactccatggaacattctctcacctacttggtttctgttcctctcttcgatagcacctttcccattgtctctctcttctctagctctggatagactctctgctcttaaattcaggaaactggatacactgtaaagatatccaataaagcatttgaaatttggctatgaacaaaagtctctagggaagtttttctaaagaagaaatgagctaatgccatctgcttatgccctcacggcgactactctgacatcccaagatgcttccctgtggcaccttttctcttcctgaagttagaattttgtctgagtctttatcttattgacctgggaactgaaatctragtttccaagctcttcttacctttcctatcactaaagtcataagccagaaagaggcctgatggtccaccagatggtcctcaatatttggggtgagactctacattaaagcattcccatgacattgctataacttccccttgttcaattgtataacttccacttgtaaagataatctca

SEQ ID NO: 306717 - DNA, 565 bp, Homo sapiens
tataccatgttcttgtcggttgacagctcttcccatttctagcctgaactccatggaacattctctcacctacttggtttctgttcctctcttcgatagcacctttcccattgtctctctcttctctagctctggatagactctctgctcttaaattcaggaaactggatacactgtaaagatatccaataaagcatttgaaatttggctatgaacaaaagtctctagggaagtttttctaaagaagaaatgagctaatgccatctgcttatgccctcacggcgactactctgacatcccaagatgcttccctgtggcaccttttctcttcctgaagttagaattttgtctgagtctttatcttattgacctgggaactgaaatctaagtttccaagctcttcttacctttcctatcactraagtcataagccagaaagaggcctgatggtccaccagatggtcctcaatatttggggtgagactctacattaaagcattcccatgacattgctataacttccccttgttcaattgtataacttccacttgtaaagataatctca

SEQ ID NO: 306718 - DNA, 368 bp, Homo sapiens
tgtgactgagaacattctaastcatccaagcccaaactaactaacccagactagagaaaccacacggtttacccacagagaaaaagtgtattaaataatcgttgttttaagccattaacttatagaatgattttctttgcagcaatattaactgataaattaattgtaatcctagttgtacactatgaattatcctaattcaccagataaagcagctggattccatgttattgcagtgacttgctcaatgtttctcagctagaaagaagaaaccactgaatttcaaaatcacagttgtttccagagaaaagtttttctcagttgtttacacatcgttgactacactctggtccttctagtgatccaaa

SEQ ID NO: 306719 - DNA, 643 bp, Homo sapiens
tattctattgactttaattaatattttatgctggtgactttcaaatttatatctcagttaagacagctcatgtacacaataaatttatgaacctagcttttcacctgatatcttacttggattttcagtagcaaaataaacaaattagatactaatatagcaaattaaaatttgtggcatgaagctaagaaagtgtttagcaggaaatctgtagccttgaataatacagactaaaaatcaattacttaactatatgtcgaaaatctaaaaaaaaccaacaataaatcaaatgttaagactagaaagaaacaataaatcagatgatagtagaaatcaataaaatagaaaaccaaaatttaactgaggaagcaacacagtcaaaagttaattatttgaaaaattaataaaagtataaccctcaagcaacactaatggataaaaaggaaaaaaagaaaaaagagagaaaaaagaaaaagaaaaaagtttctrtaagaaaagaaaaagtgacattattacaaatcatacagacgtgagaaagaggatactgtaaaacaaacaaggtagctaaaagtatctaaacaatttaggtgtgtttagcaaggtcacagaaaataaagtcaatatacaaaatccagctatatcc

SEQ ID NO: 306720 - DNA, 573 bp, Homo sapiens
gatatttgcagtccttaccccaagaaaatcccaccatcctcacaagttatgagctgagtttgggagccgcctggaatttacgttgctgtgccactacagagtagtagcacataatggacactctccaatgtccacggctcaagctgctgcagcatggtgctatcttaaagctgcagccactgctggcgtgtacccttctctgaaagccaggagccgctgtgcctcttcagccttgaggatttgctgctataccaccactctcacaggggcagctataataccacaaccctggcttctcagagcytaggcccaagaacagccatgaccctggtataggtactcctatacactcctacacagtggagtgtataggagtatacctataggtactcctatacatttctacacagtggagaagccaactctgggtgaggtgaactactgcatgcccatgtatccggctagagaaccaacttggaaattatatcctcagtgtatccaccctccaaccaccatatacatatacaattagctgaggaaacagcttggtggaccagttcccagaaatgtcac

SEQ ID NO: 306721 - DNA, 567 bp, Homo sapiens
gataagtgaaaaattcaacagagataagtgatataaaaaatamccaaagagagatcttagaatggagaatgaagtgaaataaaaactacagttgagagcctcagtagcagactagagaaagcagaataatttctgaacttgaaggtaggttcttgaaatgatcgaggtagccaaaaaaaaaaaaaaaaaagaataaagaataaaaaaggaaaaataaattcttctggacttatgggaaacaaacaaacaaatttttgcattatagatgtttctgaaggagaagagatgaaaaatgcagatttctaaccacagatttctcatcagaaatcttacagtccaggagggaatggaaaggtatatttaaaatgctaaaagaaaaatctgctagccatgaacactatactcaggaaagctattcttcaaaactgaaagagaaataaagccttcccaagataagtaaaaactgagcaaattcatcaccactacactggccttacaataaatgcttaaggcagtcctatatctggaagtagaaagataataactaccatcataaaattacacaaa

SEQ ID NO: 306722 - DNA, 600 bp, Homo sapiens
ttcttcaaaactgaaagagaaataaagccttcccaagataagtaaaaactgagcaaattcatcaccactacactggccttacaataaatgcttaaggcagtcctatatctggaagtagaaagataataactaccatcataaaatyacacaaaaatataaaactcactggtagagcagatacacaaatgagaaaagaatcaatctttatcactaaagaaatgcaactaaccgcaaagataaaaaaaaagaaagaaaaagcaagataagaagaaaacagcaaaatgacaggagtgatttttcatctatcaataataaccttgaatgtgaaatccccaaaaaaagaaaaaaaagaaaacactaaatgctgctacaagtaatttacttcacctgtaaagaaacaaataggactaaaagtgaattgataaaaaaatatattctatgcaaacagaaaccaaaagtgagcataaatcagctagctatacttatataaaacagagtttgagtcaataactataggaaaagacacagaaggtcactatataataatgaaaccattagttcagtaagaaaatttaaaattgtaaataaacatgcacccaa

SEQ ID NO: 306723 - DNA, 600 bp, Homo sapiens
ttcttcaaaactgaaagagaaataaagccttcccaagataagtaaaaactgagcaaattcatcaccactacactggccttacaataaatgcttaaggcagtcctatatctggaagtagaaagataataactaccatcataaaattacacaaaaatataaaactcactggtagagcagatacacaaatgagaaaagaatcaatctttatcactaaagaaatgcaactaaccgcaaagataaaaaaaaagaaagaaaaagcaagataagaagaaaacagcaaaatgacaggagtgatttttcatctatcaataataaccttgaatgtgaaatccccaaaaaaagaaaaaaaagaaaacactaaatgctgctacaagtaatttacttcacctgtaaagaaacaaatargactaaaagtgaattgataaaaaaatatattctatgcaaacagaaaccaaaagtgagcataaatcagctagctatacttatataaaacagagtttgagtcaataactataggaaaagacacagaaggtcactatataataatgaaaccattagttcagtaagaaaatttaaaattgtaaataaacatgcacccaa

SEQ ID NO: 306724 - DNA, 625 bp, Homo sapiens
cttctccatgttacgaacatttcaattttactggctcattgacttgaaattgtacaacaaattgttgctgaccacagtcacgttgatgtgctataaaatactggatcttagtcattgtatctaactatacatttgtacccactaaaaccatgtccctcccctccaccatccaactacccttcccagcctctggcaacgatcattatactctctgtgtccatgagttcagttattttaatttttagctcaaacaagtgagagcatgtgaagtctgtctttctgtgccaggcttatttcacttaaggtatataatatcctccaattttatcaaygttgttgcaaagaacaggatctccttctttttatgactgaataaactctattgtgtatatattccacatttattttatctatttgtctgataatggaaacctaggttgatttcagatattgggtaataaacatggaagtgagggtatttcttcaatatactgatttcctttcttttggttatttatctagcagtgagattggtggtttatatggaaattctacttttagtttttgaggaaattccacaccattctccctaggggttgtactaatttatattcccatcaagaat

SEQ ID NO: 306725 - DNA, 625 bp, Homo sapiens
cttctccatgttacgaacatttcaattttactggctcattgacttgaaattgtacaacaaattgttgctgaccacagtcacgttgatgtgctataaaatactggatcttagtcattgtatctaactatacatttgtacccactaaaaccatgtccctcccctccaccatccaactacccttcccagcctctggcaacgatcattatactctctgtgtccatgagttcagttattttaatttttagctcaaacaagtgagagcatgtgaagtctgtctttctgtgccaggcttatttcacttaaggtatataatatcctccaattttatcaacgttgttgcaaagaacaggatctccttctttttatgactgaataaactctattgtgtatatattccacatttattttatctatttgtctgataatggaaacctaggttgatttcagatattgggtaataaacatggaagtgagggtatttcttcaatatactgatttcctttcttttggttatttatctagcagtgagattgstggtttatatggaaattctacttttagtttttgaggaaattccacaccattctccctaggggttgtactaatttatattcccatcaagaat

SEQ ID NO: 306726 - DNA, 559 bp, Homo sapiens
tattgtattgaggtatgttgcttctatacccattttttaaatcatgaaatgatgttgaattttatcaaatgttttttcagcatcaattgaaatgactgtatggtttttgaccttcattctgttgatgtgatgtatcacattgattaatttgcctatgttgaaacatacttgcatcccagggatgaattccacttttttatgataaatgaactttttaatgtattgttgaatttggtttgctagtactgtgttaagcattttcacatcagagttcattggaaatattggcctgtagttttctttttttgaygtgtcttcatctggttttggtatcacagtaatactaccttcttaaatgagtttggaattattccttcctctatttttttcaaatagtttgagacagattggtattcgttctttttaaataaaactaattggtaattggttggtaaaattcagcagtgaagcttttgggtcccaggcttttctttgctgggagactttttattacagctttgctctcattagttgttattagtctattcaagttttggat

SEQ ID NO: 306727 - DNA, 569 bp, Homo sapiens
ttttctagctctttaagatatatcattaggtggtttatttgaactttttgtacttttttgctatgggcactactgctgtagacatttctcttattacyatttttgctgtattctgtaagttttggtatgctgtgcatcccttttcatttgtttccctaaatttttaaattttcctcttaattttttcattgaccaactggtcattttggagcatatttttaaatttccatgtatttgtatggtgtccaaaattcatcttgtgatagatttctagttttctttcattgtggtcagagaagatacatgatataatttccacttttttgaaatttttaggacttattctgtggcctgacatatgacctatctttgagaataattcctgttctaaggggaaagctgttggatgacatgttctataacattgttacattctcttgctgaattgatagctttatcatcatataatgactttatttgtctctttttctagtttttatgttgaaatctattttttcctggaacaagtatagctcctccatctcctttttggcttccatttgtgtgga

SEQ ID NO: 306728 - DNA, 434 bp, Homo sapiens
tattcatcagtctgggcattgaagagttagtatttactttaatcttcttagtctgggcttgtttgtatccacccctcttgagaaggctttccaagtatttgaaggaaattgaattttgtgatctaagtctttggtcaatgcagctatatgtgcattaggggtcaccccaatctcagtaatgttgtgacttttgtagattcatagaggtaccaccttggtagtcttgggaaaaatctgggaaatttcgctggattaccagtagtgtctcttgttcctttcccatacttttccccagacaagcggagtctctctctatccttgctgagctccctggagttgggggatagrtgatacaagcactgctgtggccaccactgccgtgactatgctgggtcacaccctaagtgaacaaagtatttggtcttgcccaaggc

SEQ ID NO: 306729 - DNA, 611 bp, Homo sapiens
ccttctgccatggtgtaagtttcctgaggcatccccagctatgcttcctgtacagcctgcagagctatgagccagttatacctttttttaataaattatccagtctcaggtaattctttatagcaaagcaagaatggattratacactggcaaagtaagaatggactaatactctggcaaagtaaaaataattgatcccactacatatttgttctcacattacttttcttaacatatcttatagtagctcatctatttgcaattgttcatataatttcttcaaccccaaatatgcacattgcatctcacacccttcagttactttcacatccaagtaatctttatgcctcctctacatttcaagctgatattttttttctgcttccaaacacctaaacattctagtaatactacttaatgctataattatgctctccatatactttaacatttaaaaataaagttaattaaggttgtgatgcatgcttatcttaaaagtaatggattagaagcacttccagaataatatagtaagggcaattgacttacaagcaatgagaacactagcaaaaattgtcaaaattaaccttcagaactctgtaaattaacaa

SEQ ID NO: 306730 - DNA, 514 bp, Homo sapiens
actcacaagtgcacaggtgtatgcgtgtcctggaaagaccttaggaggctgtaatctctcaccatgggctgacttgaggagtttcacacaagaaattaaggttaaagaattgcaaactgctggagcactgaaggcatgccccagcatccacacagagccccttaacaagggctagtgacttactcggtcaagaaatttaaaaacgttattgtctaaccattatatgacaactaatataacaattagaaaaaaaaggaaataaaatacgtctatattggaatggaagaagtaaaactgtttgcagatgacatgattttatacatagaaaatcctaaaaaacccacaaaaagagttttagaagtaatactattagacatattagaataaattatgtccacaarattgtaatatacaagatacatatacaaacatcaattgtgtttctatatattaatcaattaacaacttaagataaaattaagaaaacaatttccttttaatgccttcaagagat

SEQ ID NO: 306731 - DNA, 222 bp, Homo sapiens
cctgggatgtgtcacatattgtcatagttcatatagggaaaaaatgaatatgccacagtgtctcctcaaaagcctcatggtctcttaggaacaaaagcgaacagagcagaaaaatgtaaagccacataaaaatgagagtaatataagtgtagaggtataygtaggctgaagataaaccatttatagagattagttcaacctcttatgggtcagagaacagaa

SEQ ID NO: 306732 - DNA, 575 bp, Homo sapiens
ggaatattcttaacacgaagaaatgayaaatgtttaaggtgatgcctgccccaattaccctgatttgatcattatacattgcatgcttgcatcaaaatatcatatgtatcccattaatatgtatcactattatgcagccataataattaaaattaaaaattaaaaaatgctcataatttgggaaaatctttctctaaaccaggttcctttctcaataatcatactgtaatgaaacaaaaaggctattctatgcaaagagttagaaaatcccttagagttaagaataattttatcacattcccacaagataagttccagcccttaaactgagagcaaaaccaactcccctggtgctggaatggtttgtattgtaccatagcatattatgtggcttatttctaaaatagttagaatttaaatgaatcatgaaaatgcaattaaaacacactatggttacaaagatttttttaaatctaaaacttggatcttatatttaattgatgatttgtcattctgtaatttttatattccttggcaaattattatagattttcaaaaatttaagttatccacaa

SEQ ID NO: 306733 - DNA, 614 bp, Homo sapiens
tgatcattatacattgcatgcttgcatcaaaatatcatatgtatcccattaatatgtatcactattatgcagccataataattaaaattaaaaattaaaaaatgctcataatttgggaaaatctttctctaaaccaggttcctttctcaataatcatactgtaatgaaacaaaaaggctattctatgcaaagagttagaaaatcccttagagttaagaataattttatcacattcccacaagataagttccagcccttaaactgagagcaaaaccaactcccctggtgctggaatggtttgtattgtaccatagcatattatgtggcttatttctaaaatagttagaatttaaatgaatcatgaaaatgcrattaaaacacactatggttacaaagatttttttaaatctaaaacttggatcttatatttaattgatgatttgtcattctgtaatttttatattccttggcaaattattatagattttcaaaaatttaagttatccacaatttgaaatttaggaaatacattttattataaagatatattttcttaggttgccagtgttttaaaaaactgtcacatgtttaccataattgtagctcaattatac

SEQ ID NO: 306734 - DNA, 614 bp, Homo sapiens
tgatcattatacattgcatgcttgcatcaaaatatcatatgtatcccattaatatgtatcactattatgcagccataataattaaaattaaaaattaaaaaatgctcataatttgggaaaatctttctctaaaccaggttcctttctcaataatcatactgtaatgaaacaaaaaggctattctatgcaaagagttagaaaatcccttagagttaagaataattttatcacattcccacaagataagttccagcccttaaactgagagcaaaaccaactcccctggtgctggaatggtttgtattgtaccatagcatattatgtggcttatttctaaaatagttagaatttaaatgaatcatgaaaatgcaattaaaacacactatggttacaaagatttttttaaatctaaaacttrgatcttatatttaattgatgatttgtcattctgtaatttttatattccttggcaaattattatagattttcaaaaatttaagttatccacaatttgaaatttaggaaatacattttattataaagatatattttcttaggttgccagtgttttaaaaaactgtcacatgtttaccataattgtagctcaattatac

SEQ ID NO: 306735 - DNA, 614 bp, Homo sapiens
tgatcattatacattgcatgcttgcatcaaaatatcatatgtatcccattaatatgtatcactattatgcagccataataattaaaattaaaaattaaaaaatgctcataatttgggaaaatctttctctaaaccaggttcctttctcaataatcatactgtaatgaaacaaaaaggctattctatgcaaagagttagaaaatcccttagagttaagaataattttatcacattcccacaagataagttccagcccttaaactgagagcaaaaccaactcccctggtgctggaatggtttgtattgtaccatagcatattatgtggcttatttctaaaatagttagaatttaaatgaatcatgaaaatgcaattaaaacacactatggttacaaagatttttttaaatctaaaacttggatcttatatttaatwgatgatttgtcattctgtaatttttatattccttggcaaattattatagattttcaaaaatttaagttatccacaatttgaaatttaggaaatacattttattataaagatatattttcttaggttgccagtgttttaaaaaactgtcacatgtttaccataattgtagctcaattatac

SEQ ID NO: 306736 - DNA, 614 bp, Homo sapiens
tgatcattatacattgcatgcttgcatcaaaatatcatatgtatcccattaatatgtatcactattatgcagccataataattaaaattaaaaattaaaaaatgctcataatttgggaaaatctttctctaaaccaggttcctttctcaataatcatactgtaatgaaacaaaaaggctattctatgcaaagagttagaaaatcccttagagttaagaataattttatcacattcccacaagataagttccagcccttaaactgagagcaaaaccaactcccctggtgctggaatggtttgtattgtaccatagcatattatgtggcttatttctaaaatagttagaatttaaatgaatcatgaaaatgcaattaaaacacactatggttacaaagatttttttaaatctaaaacttggatcttatatttaattgatgatttgtcattctgtaatttttatattccttggcaaattattatagattttcaaaaatttaagytatccacaatttgaaatttaggaaatacattttattataaagatatattttcttaggttgccagtgttttaaaaaactgtcacatgtttaccataattgtagctcaattatac

SEQ ID NO: 306737 - DNA, 578 bp, Homo sapiens
catgactttctcaataggcactaccatttaactttagtttgaaagccaagaatgttgtctgcatgctattagtttcaaattttacaggacaaaatgcaatatcggctgtctcactgagattagtttgcacatctcattagcattgtatctccayagtatacactcttagtaaggtgtaaaacaatgtattctattattttcattaagttattagtattatgtcaattttattcaactttatttggcaaagtttgctctgacctggcaaaagcaaattttgtcagtatcttcaaatacttcataaacttcatgatttccaaatagctgtaatttgaattattagagtcagtttattttcagcagggagataatagtatcactaaatccattaatcaatacaaatcaaaatctgtttcacttcattgttttcagagcctttatttgcactttccatatttgtttctctgtcctttctctctacccatatacatattaagtgtgtatataactacatctgtgcaggtatgccatacctatttatatactaaaacacacacacacacaactatgtgtaggtg

SEQ ID NO: 306738 - DNA, 586 bp, Homo sapiens
gatctgaaataattaggaaaggttagatcataaatgtcttacacatcctgtgctatggagtagaattcacaatgaacacaatgggaaactactgaaacgttttaatcaagacagggatctaacacattttaactttggggggaaaaatgcaacacaagctgtcatgttccaaatggacttgagacagaataatataaagagttattttaatattcaattatagaaaacatgggagtctatagataatttgaggagatggggtattgagataattgggagagatatttgagaacaccaaattaactggatttggtcactgactcattattaggcaaagggatgaataaaggttgacctgagcaaatgtgtgaatacttctaacattcaccaatataaaaaatacataatgaaacacagatttgagaggaaaaacatcattgatttatcatgtctgagctaaccaataaaatatcttcatggtggtgtattcagcaggtagctgatagcataggtatgaatcatacagtaatacacttatgtgtacatataaatttrggaagtatcaaacgtatcaatggtgtttgat

SEQ ID NO: 306739 - DNA, 614 bp, Homo sapiens
ttacattaatacggtgataagtacatgtctgttcagagctattttaactgcatcaggccaatctgctacaacttttacattacaaagttatgagttgttttatagttgccatggactctcaggttgaaagtcatgcaacctgagcacgcccagatgtagcaagtgtacagccacagggggaccctaagtgctcagtctgaggagcgcggactgaatttagaaatggacaccccatgggagcatccaggattcagtcagatcaagctctggtgtaatctcatggcaggaccagtcagatcatgcccctcagcaccacctcattataagatccaatcagattacatttcactatcctatgtttataaaagctgacccaaactcgagcttagggagacagatttgagcatatcctcttgtctgcttgccagttgactagarataaagcttttccttggttgaaagcccataccatggtattcgcctctatgcacatcaggcaaagagcgtgttgattgcttggtaatattacggctctttcaacatcacaaaatgtaacagatatttgtttgtgtttgctgcacaaataaattagtgagtgaatgaatacataaata

SEQ ID NO: 306740 - DNA, 607 bp, Homo sapiens
gttgattgcttggtaatattacggctctttcaacatcacaaaatgtaacagatatttgtttgtgtttgctgcacaaataaattagtgagtgaatgaatacataaataaatgagacataaagagtcaaaatgcccgttttatgatatagcctcaaagtctcacagcatgactttaactgcaatctataagttcctaacagcccaaattcaaggggagaattagactccacatttttattcgaagagccacgtatatgtacatggaaggacagctgatatcaaccaactatgatataatatattatactagtttactgtgggtccacaaaatataggtcttaaataaatagaaaaaaggaaaagacacttgttgatatgcatttcagtaatcactgaaagttggttcctggtctccttggcagctgattcaggaagataagtatgctyggccattattcaacaatgcacactttcaaagtgattacttcaactgaagagaaatactacaatgcatttttaaaattcactgtatctttgatcattgattttatgttacatgataaatatacaatgtggagaggtctgaggtcaattgctttagaattaaa

SEQ ID NO: 306741 - DNA, 606 bp, Homo sapiens
tacatattaatcatgttcatcttacagagaaaatgaaaggtaagtgcgtatggtggtggtttgtggatcaaaggagttgaatttcggtatagatggacttaagagtatataattttctgaggatgtacatttagagttccaaaatattcccattcgagttttaggattcaacagttgtaatttaaaattggttgattttggaaaataattgcttttttaaaaaataaacattgtttttattgtagccaaaataaaaatgaattattataaaagccaaaggtgatcaaaatctcataaaaacctaatagaattatatgcattataggagtaagggatgccccattatgtgattttaaacaaggaatttgcraaccagagaaatgaagtgaagtttccaagatcttacaatttgttggctctctcatgatgcatgatttcagttccttcatataagccctcagctgggtgttctagttatatagcaatatgtcctggcatacagcattattttttattagtacagctaatgttggcatatcgaatcctttggcctctagcttactttaccgatttgtgatcagtcgtctgacttctgcactcagaatc

SEQ ID NO: 306742 - DNA, 574 bp, Homo sapiens
tgtgttctttctctagtctgcacctgtaattttatgtttcaggtttatttggactctcagaattttcacaatatagcagaattgttccttgcactcagttaaggagtaatgcaatcagaacaggggttggaatggtaataaccaaattcctgccacagctctaccaccctctaataatataaacttaagtaagtcacttaaactctcaaagcattattgctttcaaccaaaggcatgtgtataataacaacttccttataagaaacagctccatatgataacttttataaaatagacttaggaacttcaaaggatgagataaattygaattattctaatgaccagtcatgccataatgatagtgatatgctgatttaaatgattcagattatggttgtcaacatgtgatagtgaaaataactaaactaccaaagttgaatttccatgtacacactgaaaggacaatatctataaatatctatagcacacctcaatggtcacaatttccagtgagtaacattgattaagtaaaattaaattcttctgaagtttaagtctgtagtctcctaaaatg

SEQ ID NO: 306743 - DNA, 602 bp, Homo sapiens
aatattatgtgaccatttggtgtagataatgcctgactracaatagcagcaatgtatggttgttttttggtgtttctaccttttagacttacacattttaaatgcttaagatgagtaatctcattcatctttcctgttgcttgcactgaatatttgttgctgctaatccttcttatttccatagtattgttcaaaggtacattccagggcatctttgaagcatattttttaacccctgctgtgtctctaacttgtcatgtaatggttgcttgagcatgtcagccattctgtgtgtgtttgccaagccccagtgtgctggtataagtaggcattgcaattaggctgagagacaagctgcattacaagaactatttgctgcttatattgtcccaatattttaacccaagccaatacagatagcattgagcataatactttacatatagtattaaatatagcatacattacataaagcataatacaatatatataacattgcgcataatatattgagcatgtaccatatgtccagcttttgctaactacagtggagaaatatgggggtgggatgaggaaggcagtattggatgggaggctggtaa

SEQ ID NO: 306744 - DNA, 602 bp, Homo sapiens
aatattatgtgaccatttggtgtagataatgcctgactaacaatagcagcaatgtatggttgttttttggtgtttctaccttttagacttacacattttaaatgcttaagatgagtaatctcattcatctttcctgttgcttgcactgaatatttgttgctgctaatccttcttatttccatagtattgttcaaaggtacattccagggcatctttgaagcatattttttaaccccygctgtgtctctaacttgtcatgtaatggttgcttgagcatgtcagccattctgtgtgtgtttgccaagccccagtgtgctggtataagtaggcattgcaattaggctgagagacaagctgcattacaagaactatttgctgcttatattgtcccaatattttaacccaagccaatacagatagcattgagcataatactttacatatagtattaaatatagcatacattacataaagcataatacaatatatataacattgcgcataatatattgagcatgtaccatatgtccagcttttgctaactacagtggagaaatatgggggtgggatgaggaaggcagtattggatgggaggctggtaa

SEQ ID NO: 306745 - DNA, 602 bp, Homo sapiens
aatattatgtgaccatttggtgtagataatgcctgactaacaatagcagcaatgtatggttgttttttggtgtttctaccttttagacttacacattttaaatgcttaagatgagtaatctcattcatctttcctgttgcttgcactgaatatttgttgctgctaatccttcttatttccatagtattgttcaaaggtacattccagggcatctttgaagcatattttttaacccctgctgtgtctctaacttgtcatgtaatggttgcttgagcatgtcagccattctgtgtgtgtttgccaagccccagtgtgctggtataagtaggcattgcaattaggctgagagacaagctgcattacaagaactatttgctgcttatattgtcccaatattttaacccaagccaatacagatagcattgagcataatactttacatatagtattaaatatagcatacattacataaagcataatacaatatatataacattgcgcataatatattgagcatgtaccatatgtccagcttttgctaactacwgtggagaaatatgggggtgggatgaggaaggcagtattggatgggaggctggtaa

SEQ ID NO: 306746 - DNA, 617 bp, Homo sapiens
aacttaagtgtttgacacgtatttgataatcaggaaaattgccctcatctgatatgttgaacttataaaaattgccctcatctgatatgttgaacaaagatggactttgttcaacatactttatccgtgttttrgataaatatagatattcaaagtgctgagtcattcattcaacaaactgtctcttaggtgctactttatttcaggctctttgctaagatgaactggaccagaaatttatcagaaaaagtaacagggcatatgacatattagagttaaggatggctagaagagaaatggggatggttcaggtagaacaacacaattaaaaatgtagccccaaggccgggcgcagtggctcacacctgtaatctcagcactttgggaagctgaggcgggtggatcacttgatgtcaggagttcaagaccagactggccaacatggtgaaaccgtgtttctactaaaaataaaaaaactagcccgttgtggtggcgcatgcctgtaatcccggctactcaggaagctgaggcaggagaatcgcttgaaccaggaggcagaggttgcagtgaacggagattgcactactgcactccagcctgggtgacagagtgagagg

SEQ ID NO: 306747 - DNA, 611 bp, Homo sapiens
ataatgccgttcttttcaggagtctgatttggaagccaactactgtttgtgttctccaaagtggtttttgatggagtgctaattatgtttcacctcaagagcaatgctgacgggggaccacaatcgccttattgtagtagatccagctgatgaatctccaaggatagcctcatgctatattctggggggcaagtaaatataaaaatacatttttgatcaagaaaatgataccatttacacaacagtagcaggattcagcctttgtaaaacagctgcatagctgcataactgtgacgtgattttttttttttttagtagagaaaaaaacatggaggaaaatatatatcaactcaggaccctagctgaatctggggtttagtagttyatggtgggggcaggggactatattttcaaataaatctagcctaagtgaatttttgttccagatagaagaccaacttaataaatgagtcctgcgtagagaagtatgtcacatttagcaaaagaagacacgcgcaggtagagccaatcttttcacttgtgcgaacctcattaatcctgtcacataaagttttgcacttgtattttagctcaactcaaggaagcttgat

SEQ ID NO: 306748 - DNA, 611 bp, Homo sapiens
ataatgccgttcttttcaggagtctgatttggaagccaactactgtttgtgttctccaaagtggtttttgatggagtgctaattatgtttcacctcaagagcaatgctgacgggggaccacaatcgccttattgtagtagatccagctgatgaatctccaaggatagcctcatgctatattctggggggcaagtaaatataaaaatacatttttgatcaagaaaatgataccatttacacaacagtagcaggattcagcctttgtaaaacagctgcatagctgcataactgtgacgtgattttttttttttttagtagagaaaaaaacatggaggaaaatatatatcaactcaggaccctagctgaatctggggtttagtagtttatggtgggggcaggggactatattttcaaataaatctagcctaagtgaatttttgttccagatagaagaccaacttaataaatgagtcctgcgtagagaagtatgtcacatttagcaaaagaagacaygcgcaggtagagccaatcttttcacttgtgcgaacctcattaatcctgtcacataaagttttgcacttgtattttagctcaactcaaggaagcttgat

SEQ ID NO: 306749 - DNA, 557 bp, Homo sapiens
tgctctttctttttttctaaattgttctagcagtctatgatttggtgtacttctttggttaaaaaaaaaaacacacacgaacaaacaaacaaaaccttaagggtctttaaaaaataataagttatctgttattgaggacttaattttgtgcactacactgtaccaaatgctttatatttattaacctatttctttttaagcaataaatctaaaagcttggtattcttatccccattgaaaaattactttaaataaaaaaaacctctccaatgacttttattatattcacataaagctaatggggccgattaaatgtttattgttaacatatccatgaatcatttcaaatatatatgtatttttataattgtaactcatagataataatacagttgggctacaaaagctatttggaggaagacaacaattctaaatggaatgtgatttgtgtttgtcaagattatgtcagcaatctatgattttagcaatttatttggtccataygtggatagaaaatatcaagcacagggaaggaaagtataaacatttgttcagca

SEQ ID NO: 306750 - DNA, 488 bp, Homo sapiens
gagtttacaattgactccattaaaggttcaaattttgaggataaaggtgtgtcttatttgactttatatttcccaaagtgtaaaattaataactgcctattaactaaaatgttgctaaaccacagcataagaagagtgtattttaaggctaaatcatgccacaaattatgacatggttagtatagttacaagtgacaattgcatgccatttccattctgtaaatcagagcttcctaatactgctttaaacacaaaatgtgccgttgggcaaatgctgtattagcaccactartactctgtttttcaaactgcaaagggcatcccagagttttaattttgtttcttggtgtaaatttatatgttctttggataaccacccaatttgtccatgtagccaagcttctcataggagagatgacagaggggaacagataactgtagaacacaagataaaatatgatgagggccaggacactgaaacacagata

SEQ ID NO: 306751 - DNA, 542 bp, Homo sapiens
aattccctgatggaaaacaaatgtacaagtgatattagttgccatagtttaatagactggagaaggcttagagctatctcaaggtataaataaataagggttaaaacatgcaagaatctatatgtatggaatatttgatactaggatacttttcatctgagtgttgcctattatttcatgcaaagaattgatcataataattggttttggatatccaattatatactccatttccccacttttgctattaggtaargcttcacagcctctaccactcatagcctaaggtctttgaagcatgtggaaactcaaatgaacagaaaagagagcaagctaggtaggaaatgtgggaggcaggataggaggtcctggaaaaataaaaattagagaaagactagtggtaatgacatgtattcatgtagtagacaaaagatagtattccagaagcacccagtcttttcttttgaaaagatcagcaaagtgctttgctttagagtagacatgtaaggcgattttgatgtttgctctcactaatgggagaa

SEQ ID NO: 306752 - DNA, 571 bp, Homo sapiens
tatacctattttgaaatatattataaattattaactataatttccatactctatcaaatgctaaaatttattccttctaactgtatttttataccmattaacaacttatctatgactcattattgagtgttattaataaaagcaagatgcagaaacaccaatattgataattaaatttttctaagacataataaaaccctgtatttgtgtgtgtggctgtaattcctaaatagaaatataagaacatagggaggaaaaatgaaagtacacacactttgatattgttgggggtgactgcaagggatggctggtttgcatcaagagggaaagggatggagagggagaagcccaataggaagcaagaaaagtaaaactagaatattatgattcaagttatatatttatgtataattacatagcgataaataagctgaataaaatatttaaactgaaatttaaattaccttccaagaaatatcatagtattatcttgttataccctgtttgcaagcatctgattgatgcaagcatctgattgaatattaaatcaaattacctacattttattttt

SEQ ID NO: 306753 - DNA, 584 bp, Homo sapiens
atgctcctcctcttatacctattttgaaatatattataaattattaactataatttccatactctatcaaatgctaaaatttattccttctaactgtatttttataccaattaacaacttatctatgactcattattgagtgttattaataaaagcaagatgcagaaacaccaatattgataattaaatttttctaagacataataaaaccctgtatttgtgtgtgtggctgtaattcctaaatagaaatataagaacatagggaggaaaaatgaaagtacacacactttgatattgttgggggtgactgcaagggatggctggtttgcatcaagarggaaagggatggagagggagaagcccaataggaagcaagaaaagtaaaactagaatattatgattcaagttatatatttatgtataattacatagcgataaataagctgaataaaatatttaaactgaaatttaaattaccttccaagaaatatcatagtattatcttgttataccctgtttgcaagcatctgattgatgcaagcatctgattgaatattaaatcaaattacctacattttattttt

SEQ ID NO: 306754 - DNA, 584 bp, Homo sapiens
aaatagaaacagacgcagtgtgtgtatatatagtcgtgcacctacacacattgttttcacatagtatttactaaatgaactgcattttaatcctccaaaattgtacgttatatttcttatccattatttatgtttcattgtctgattcaaacattacatatgaacactcagtaaaggttttcctatacactatgctacctaatagtycttattaaaatctataattacttaataattttttgacaacggccaaaatgactactatttattgagtggcttctacatgtgagtttgtttcattagatatataattactacaatgtaatgcccacaagctggcactgattatcctcttatgttaccaagaaggaaactgagttcagatagatcattgcaatagcccagagtgcaaaacaagcaagtggcaaagctaggactcgaaacctattccttctgatgtgaaaatctgcaccctctctctgctaatgataggctgcccatgaccacaaatattttgtctgctatagtttggaagtttgtccccctaaatctcatatttaaatttgatctccagtgtggtgttg

SEQ ID NO: 306755 - DNA, 632 bp, Homo sapiens
tttgtcctaccctcttgaaactgcaagctgtatagaacagagaagactcctccctcagagttttcattcttactggttccagtaactgcagctgccatctccaccaacaccacaagattgcctggaaactgaggcacaacagaatggagaaataaagagaaaggtgggagagagttctccactctctcttagcattaggagtttcctttcccagtccttgagccaggggaagatggtctctcctggagctttctctttctgtgccacagagctcatttccaacttaccrcttgttttgactttagattgggagatgtcaaagggaaaataaaaaggtcaacttagtacaaattcacaaaattcacttcaaattctggtgttctgtcctgatctacctactactatttacttttcagagttttcaaatagttgcttcatacattctgtgcaggttttaaagttgtgttcaacaggaaaagaaagaataaagtgtacttactgcattttatccagaattggagccgatactattttatgaagttaaaaaaattgaaatgtaaaatatttatattctttagggatatcatagatgcaacaaagttatatgaaaaagaagtcaaacaaaaaatgca

SEQ ID NO: 306756 - DNA, 531 bp, Homo sapiens
actttgaaataaactgccaacagaattaaatcaaaacctctgtaaattatgtatttatctacatagaatcatctgcacacaaaaatgaactgaattataacttcttaatttatacatttccataattaaatttaaactgaataaaataacccaattcagacatatttcctaaccttaaggatattctagccttaaggattttattaaaaagagaagctackctgaatattcagagtaattttatataaaaagtatctaaaaaggtagattaaataaaactcttgttcacttcactgagtggctggcagctgagtaggctctctttctctctttaaagaagcctccatccacaaaaagctgcgctaaagcaaactattattatagccttcaatgacgtgaaatgtgaagaattaaatttcaactaccaatagttaaagacagaatcaataagaacttgagttcatttcaggtgttgatcattctctttcgtaaataccaaatttgatattttctcacgttttactactaaaa

SEQ ID NO: 306757 - DNA, 604 bp, Homo sapiens
ccaaggtcatagttctttaccctaggattgaaatatatgaccccaactgaatggaaagttaaattcattgaaatgatgactgtgaacggaatgaatatttagggtcctttcttgcatttttcctggtagagcttgatgcagatttcagcctggtggttccctcataaaaatgatgattgcttccacagcgtgtcagaaatgactgttttgtccctttatcttaaccatgacaatctctttctgggccattttaaccttctgggaaaagagaagtaaaagcattcaaaggtaacagtaccctgttaaattacaaattaaatggcactggattcattattaacacaaatcccagaaaaaaagagcaatccatgttcaagtttcacttattgaatggcttaaaagacaggttgcagctgccaaagacttttaccatcakatgagataaatgtactgtgctcactgtgcagagaagggaatactgcagaataaaatgtcattttccctcatgttttatctggagttgtgattttttttaaagaagatacacatcaggtccttttggccttctactgttttaggatctgttttctcctcaatagatcac

SEQ ID NO: 306758 - DNA, 586 bp, Homo sapiens
tccctgcggttcccgggctcgctgttttaaaggaaggctaggatgcaagctgtctgtaaggctgttttgttttcacttggcttacgtcgtagacaggtctctgctgggggacggagatgaccaccggccttcccaaggctgcataagatttcctttgactatgctgtgatccatttacgcggcccccattgsacaattagggcctcctccccgccccccaccccaccattgcaggtataaataaaagctgcgttggccgtcgatgtacctcctggagctcctgattatcctgtaggatagatccctggaggggaagcaaccaggcacgtgcgacattttggtgacacaggccaagctaccatgccgaaaagtttaccaacttccactgccacccgcgcgtgcaagcggggccctgtctccgattatggattattttaatctttgccaatcctaaaaggaggggtgggggagggaagatctctcatctctccttttaatttgcatttctttgaggttagaagttgggggtttgtccccctgcttgcgcttgtctggaccaccagtgagcccaggcactcgacccccg

SEQ ID NO: 306759 - DNA, 576 bp, Homo sapiens
cgtaagccaccgtccaaaccaggacgtccttgagaatgacagggagggagaacaggcaccgtggggaacatccaggccaggcccaggcccaggctgtgctgtccatggcctccatttccccaggtgcctgtggatggggaactacccagagacacttggtgagctagagcccaagaccatcatggcaggcctgtatgacgggcgggcctcggggctgcttgggaagctggctggaaagggccagagctgacctgcaattttatttatttwtttttttttagagggagtctcgctctgttgcccaggctggagtgcagtggcgcgatctcggctcactgcaacctccacctcccgagttcacgccattctcctgcctcagcctcccgagtagctgggactataggtgcctgccaccacgcccggctaattttttatatttttagtagagacggagtttcaccgtgttagccaggatggtctcatctcctgacctcgtgatcgtcccacctcggccttccaaagtgctggaattacagatgtgagccaccatgcctggcctgacctgcagttttgagt

SEQ ID NO: 306760 - DNA, 576 bp, Homo sapiens
cgtaagccaccgtccaaaccaggacgtccttgagaatgacagggagggagaacaggcaccgtggggaacatccaggccaggcccaggcccaggctgtgctgtccatggcctccatttccccaggtgcctgtggatggggaactacccagagacacttggtgagctagagcccaagaccatcatggcaggcctgtatgacgggcgggcctcggggctgcttgggaagctggctggaaagggccagagctgacctgcaattttatttatttttttttttttagagggagtctcgctctgttgcccaggctggagtgcagtggcgcgatctcggctcactgcaacctccacctcccgagttcacgccattctcctgcctcagcctcccgagtagctgggactataggtgyctgccaccacgcccggctaattttttatatttttagtagagacggagtttcaccgtgttagccaggatggtctcatctcctgacctcgtgatcgtcccacctcggccttccaaagtgctggaattacagatgtgagccaccatgcctggcctgacctgcagttttgagt

SEQ ID NO: 306761 - DNA, 616 bp, Homo sapiens
ctctgttttagtagtttttacggaatggcttggtttcgtaattttccactttctttctcagaacatttctcgggttctcagaaacaattatcggaatgtttctcagcatattttctaagttgccctattgtcattaattaataaaaagttactatacggatcgaatgcctatttacatgggctttacggatatcgtctcttaattcttgcacagtgcatatggggaacatatgacctccattttactgaggagaggcttagggagggttgggtaatttgcttttttttttttttaaagataataatccattttgccaagcacgccttttttttttttttttcctgagatggagtatcactctgttacccaggctggagtgcagtggkgtgatctcggctcactgcaacctccacctcctggtttcaagcgattctcctgcctcagcctcccgagtagctgggactagaggtgcatgtcaccacacctggctaatttttgtatttttagtagaggcaagatttcaccatgttgaccaggctggtctcgaactcctgacctcaaacgatcctctcacctcacccaatgtgctgggattacaggcgtgagccaccactc

SEQ ID NO: 306762 - DNA, 621 bp, Homo sapiens
gactgaccccgggagcagcgctggcccccggccacctcccatcaggggcttggaagaccagtcgcattggatttgaggaactagagggggtgaacaaaatctccactggcctcaagacttcctcctggggtagccacccgcctgtgtttaaagagcacttcctcttcgccttttatcttttcattatctttctttttaaatggaagttcagtgttagcgggtgggtgcccttgcagcctgcagggctttcctggggctgtgtacacacacactggggttgggaaaaacctgtgtgtcctttgaaacgtgtgtcctgtgtcaggagtggaacgaaggaggaatcgaggtcttaccatgctggagctacttggrgtgtgcctttgctacccaccctgctgcaagaggtggaggggtgcggagggatagagctggggctgcgggggagtgtcacatgcactttgcagctatgtttaattcctggccctgccgcttactagctgtgtgaccttgggcaagtcgcttaccctctctgagtcttagggtcccgtctgtgaaatgggctgctgcgagtggggccttgagaaaacgagcgtagatttcctggcctgcagggggcgcagt

SEQ ID NO: 306763 - DNA, 601 bp, Homo sapiens
ctgctatgtactatcacttgttttctggttaccgtggaggaagaatactgtgaaagtttgagactgatggtggcgaatggcaattttattgtctgctgcattggcctgtaagccagttacctgtaaaaattttctaattacctcaattagattagtattgattgcactaaagagaatcatgtaatrggccttcaatagaaaaaacaaaatcgtgcatattggcttccaatgccaaatcgatagagaggaaggtggttttaagagtggaacagagtcaaccaggcctgcccagctctcctgaaggcttgcccacccaccgcgtgtggtcttagttggcatcatgcatgtgtgaggtctttgtgaatttcacatcacagttagcatgtgtgtgtggcaccatctttacatctggcgaggcacgtaatggtggcacacacaatgtcccctaggaatgatgctagggacaccaatgacagcttcccattccccgcaggtatctctgctgtagtcatcagttgcttagcaaagaacatgatcactgcttgattataataatattaacagattacaaagtgagttcctcaacatccttgtgagaaac

SEQ ID NO: 306764 - DNA, 560 bp, Homo sapiens
cctcactgccagcgggctcctgctattaggtgagggtttcttgctgtctggaattcagtttttccatctgccacatggaagttcatagccaggatagggcgggagaggcaccagaacatttctctccactgactttctcacccggttcccaccctcctccacctcctctcctccgggcccctcagtttcctctcctcatctctggcctcagttccagagggttagccccagcaccccactctcctgccactgtcagatagccttggtcatgcttcctagaatctacttgtccaagttctcctctccctgggataagttactgcagaaactggggatttagaagcttattcagggctgagtgccaaaagcttgggggaggagggacaggtcctcggcaataaacagtgtcacacacrcatcacagccatttgagaaatggcttctttgcagagctggggaagccgggcagaagatgccgcagcctcctactctgggtcctgagggggggtggcaggtaccacagtgtaggcagcagggtcagggccaaagtctatgcgttc

SEQ ID NO: 306765 - DNA, 536 bp, Homo sapiens
ctcttagaaatggcaatgagaagaaagtttaaagttgttgtcttaagcagttataatagtctcactgcacagttattttatatactttcacaggaattgaacataagtgctcatgrcactaatgtagagaatgttcacaatagtgctgcttcctcagccttttcctttcttgtgttgtatttgtatatttcttcatttgtttctgttggcattggaggaagagtgatatttgttttagggtttttgtttttggttagggttgatgtagggtattaaggggatagggagacagctggaagaaaaggattgtgataattagaagggctgtgcagaaaatagctaactcacaaatttcaatgataatagtagctgaatatgatctctagctgttatcaaaaggcaaagtacaacaaatttagttcaaagttctaactggcttttatttatgattctagaatttggcagcctcattctataaaatagaatgaatcattcccctgggctaagcagagaaggttgactttatagaccagaaa

SEQ ID NO: 306766 - DNA, 636 bp, Homo sapiens
attgtggtaatgctataattagaggaggaaaaactctggaatttaaagatgcaagttgtacatttctaacctaaagcccctgtccttttctcctaccttctccccatcagcaaagattattccaagaactagaataaaattaatatagagatgctattcgcaactgcacccccataatacataatccactgttgtctcctacaaggttgtcttttccctttttggtggccttgaaggacagatagagtaatttagatacagcaatagactkctttgatcatcacaatgccacttctgctcacaagtactacctagagctaccaagggagaaactcttccatttcctagtctaagactcatctttgaagtaatgtctaagtaaagaaggctaagcaatgggtacctgttaaggctgatttcacattgatttgtttcactgactggcaatctggtcagtgggagaaatagcaggtctgccatatcccccaagttctcaggattacaagatgcaaatcccccattttctttgtttcctcattggaatccaactagaatctccttctgaatggtgtaactcaccctgtaagaaccctaatccccagaatcctaaataagtattatttttccgtctctttg

SEQ ID NO: 306767 - DNA, 374 bp, Homo sapiens
tttccactctaatggacatggacaacagagatataatcagtgactataattcagtatgataaatgctaggtgctaggatagagcaatgtacagggccatacaggtcaaggaggcataacgctctcayctacatttgtatttttaagaataacagtttacaacttaaaggaaggaatctcaaacatccctgaaatgatacctttggaaacagtgccaatatactatttaataaaagcaaatctgagttctgagtgtgtatcacacaccaggaactaggttaagtgttttatacataataactcttttaactttacagtagctctatgaaggatatatgtaataacctttattatatgaaaacactgagtctcaga

SEQ ID NO: 306768 - DNA, 599 bp, Homo sapiens
gcaaaatacatgattggctcacattcaccaaccaataacaatggagcaggctgaaagtatggatagttttgagcagagttgagagaaaaatactgatgatagctctatgaagagaaactgaaggaaactaagatcgagggctatacttttgtgcttcagaattcaaggcaaatataccctcctataaaatactagttaataccacagtcaacggaataaagattagctgaaatggaacattgtcatgataatattccttaggtcagtgacccacgatctgcrtaatagagtaacacttactttagaattgcaggtgctgttattcagcacaaaatacatgcattaaatatatttagtgattctaaaagatgatatataaattcaaggtattaatagcattattttcatcgatttattggtttcatattttctgaatgttcttaactcaggataattatgagttttaactaagtacaattgtagtcaacatctttgcataatagatattcagatacacttatctaaaataaaactagaatattatgtattccagttcaattaaatataacaattttttgaacattcaataagtgccaaga

SEQ ID NO: 306769 - DNA, 599 bp, Homo sapiens
gcaaaatacatgattggctcacattcaccaaccaataacaatggagcaggctgaaagtatggatagttttgagcagagttgagagaaaaatactgatgatagctctatgaagagaaactgaaggaaactaagatcgagggctatacttttgtgcttcagaattcaaggcaaatataccctcctataaaatactagttaataccacagtcaacggaataaagattagctgaaatggaacattgtcatgataatattccttaggtcagtgacccacgatctgcataatagagtaacacttactttagaattgcaggtgctgttattcagcacaaaakacatgcattaaatatatttagtgattctaaaagatgatatataaattcaaggtattaatagcattattttcatcgatttattggtttcatattttctgaatgttcttaactcaggataattatgagttttaactaagtacaattgtagtcaacatctttgcataatagatattcagatacacttatctaaaataaaactagaatattatgtattccagttcaattaaatataacaattttttgaacattcaataagtgccaaga

SEQ ID NO: 306770 - DNA, 592 bp, Homo sapiens
accggctacatttatgtcatataatgatcactcagaaattacatyatagcctatttttatactatcatgtagtaattggtgtgctgctgattaagaccatcaagaataaaattctaggctgctactgtcaggctattcagcattctgttagacaaattaaaacatatgttgggagtccactcaccatgatctttttggtaagatgaggtaaatacaattaaaatgatcatatgaagtagaaatgacctaaattgaggatccgatgagagaatgatagccaggaaggcaacattatgttgacagcatgggaaatctgtgaataaagaggtggaaacatacaagatatatttagtcattgtgcttgggacagggaaataatttcaaaattcagactgagagcacattgtggaaggctttggctatctcgctaaggagtttagattttattctatatttcaaaacattcttttaaggcaaaacacattttttcaaacaatctccaacataggtctcttgactgagacattttcttccaacaaggtggggaaacagggaaaagatttagccccctacctaaaacaacttaagaaaa

SEQ ID NO: 306771 - DNA, 592 bp, Homo sapiens
accggctacatttatgtcatataatgatcactcagaaattacatcatagcctatttttatactatyatgtagtaattggtgtgctgctgattaagaccatcaagaataaaattctaggctgctactgtcaggctattcagcattctgttagacaaattaaaacatatgttgggagtccactcaccatgatctttttggtaagatgaggtaaatacaattaaaatgatcatatgaagtagaaatgacctaaattgaggatccgatgagagaatgatagccaggaaggcaacattatgttgacagcatgggaaatctgtgaataaagaggtggaaacatacaagatatatttagtcattgtgcttgggacagggaaataatttcaaaattcagactgagagcacattgtggaaggctttggctatctcgctaaggagtttagattttattctatatttcaaaacattcttttaaggcaaaacacattttttcaaacaatctccaacataggtctcttgactgagacattttcttccaacaaggtggggaaacagggaaaagatttagccccctacctaaaacaacttaagaaaa

SEQ ID NO: 306772 - DNA, 592 bp, Homo sapiens
aagaaaaaagcaaactaagttcttttcaaacagaaagcaccagtaagtttaatatttgaaatacttctcacttccatcagatctaatggcaaaaatacttacttcacactgatagtgcaatttataaagctgcctttgacgagcaagcctttccttttcagtttctccatagtctgtagttactttgccagctgagccctattgagcacaggaaatatgcatgtattattttcctcaaaaaaaaattttagttatttgaaagggatttaaagttgccatctaactcctttcacgttttttgtctcaagtcaaacactcaatttagataaacccacctcccctcaattacagcatttaataaacagtaccagttacttgcctgttgctgctgctgctggataccactaccggcatgcttaccatttctttttttttaattattayactttaagttttagggtacatgtgcacaatgtgcaggtttgttacatatgtatacatgtgccatgttggtgtgctgcacccattaactcgtcatttaacattaggtatatctcataatgctatctcttccccctccctccacctcaca

SEQ ID NO: 306773 - DNA, 626 bp, Homo sapiens
gtggtggttgctggcttcactttattttgctccttcaagatggtgactaagatatttgattgacagagaagagccatcagttctagagcctaacttatttgcttagggtgtgatcagcctctaggaaactgagcaattgagggcctctgagtatccagsgtaggaatggaagtacccacagaagaggagggtggctgggaggcagtctaggcccgggccctacacacttgatcctaagacagattttctcttcaaggagcccctgttgtaacacagacacctgcaggaatggccagacaaagcctttcctagaaacctcttagttatcagtgaatgccacagtagagagaggggcctgtgacttagactggtgggtggggtttgtacattgtggggaagaagaaagggaaagactctggtaaggctgcagactttgaagttgtctctggctctccagaattttctgatgttggagccttgcctctagcggtcttctaggtcagcagggtcactcagccaacactaagcaaaaggtaattaggagacttgctcaccctgattcataattccttggtagttacaggcaaggacaaaggttaatgaggatttagccttaaaaaaaaaag

SEQ ID NO: 306774 - DNA, 589 bp, Homo sapiens
gaaataattcaagaaggagaaaaaataatgaacaaatagagctcaccaacaatgaaaaccctacactgtcactttcattggaattatcaagtaagcagtattgccagatttcatactaaaactatcacattacaaacttccttgcaaaaaggctgtgtggtagcagaaaaaaaaggaaagaaagctttgcattgtaagacaaaaaaagcaagcaagcaaacaaaaaaatagcaaayctggaagtcctccctggccctctcttcaccatataatatttttggcaataactattccaagaaaccccaactcatttaacacctactgattaaaaacaataaagatgctagtagaacatcaatacaaataattagaaaaataaaaaataaagtagcaaaatgtattaactagactaagcactaggtaaatgctgccgttaaacagatggcttggctttgaaatgaaccacggaaaacaaaacaaaaaaatattggacaacaacgctacaatgtaagcttaatgaggaaagggattttggtggtggttgttattgttaactgattctatctccagtaccactataacactgtta

SEQ ID NO: 306775 - DNA, 655 bp, Homo sapiens
atatatgctcttgcactggactgaaatacccagtgattaccaatgtacaacagatggaaatgctgaatgctaagtaacatatcctcttgattactgtactttaaagtatgtgagatttattataagcctaattctaattcaatgaatgccatcaacagattgcatgatgggtcattttcaccatggggtgtaaaagaattactaagaaagttgacaggcaaagcttattagaaaacaatcatcttgtaaatttgattaatggcacttgcgaattcacatttattcaaaataatgttttctgtacatacggtgacatggggaatcttaggccaccccctgggaaaacataatgaagataagcagcttttcaaacccaattttgatgctttgcaattaaaaaaaaacagtctaagtasttgaattaaaacaaatctgtcactgaaaaaggcattttttttaatccaatggcaagccagtgcacttagccagcttatggatccaatactcaactgatcttaggagtgaaggcagagttcatgactgccctgccatggaggcctcacggttcctgggcagcccctacatagtcccactgcccattgaaataagcgtatcctctcctgcctatgggtcaagatggagggggaggctcaaa

SEQ ID NO: 306776 - DNA, 655 bp, Homo sapiens
atatatgctcttgcactggactgaaatacccagtgattaccaatgtacaacagatggaaatgctgaatgctaagtaacatatcctcttgattactgtactttaaagtatgtgagatttattataagcctaattctaattcaatgaatgccatcaacagattgcatgatgggtcattttcaccatggggtgtaaaagaattactaagaaagttgacaggcaaagcttattagaaaacaatcatcttgtaaatttgattaatggcacttgcgaattcacatttattcaaaataatgttttctgtacatacggtgacatggggaatcttaggccaccccctgggaaaacataatgaagataagcagcttttcaaacccaattttgatgctttgcaattaaaaaaaaacagtctaagtacttgaattaaaacaaatctgtcactgaaaaaggcatttkttttaatccaatggcaagccagtgcacttagccagcttatggatccaatactcaactgatcttaggagtgaaggcagagttcatgactgccctgccatggaggcctcacggttcctgggcagcccctacatagtcccactgcccattgaaataagcgtatcctctcctgcctatgggtcaagatggagggggaggctcaaa

SEQ ID NO: 306777 - DNA, 572 bp, Homo sapiens
ttattataacaaaggggaaaaaaattctcataaaagcagacagctaatgcttactttagtcttcatagcacaaagaaagctggcattatttttctttctagwattagttttatgtatgtagttaactataaatattatttctaattatattttcagaaatgaaaagttcacaaataacgtccagcatgtaatttcactatatgtcactgttttttgatttatgacctttctgaagccagttttaaagaattctatataataactatttgcctttttatttaaatacatttatttatgtaactaatgatgattgaacactcacttgtagaagctgtaacagtaagtatttctgggaccagaaacctgaggtataacatagtatgccttgaagagtttcacttttcaacggaaatgataaatcatatccacaaatgactaataccagatagtatctaaaaatttgtatgagacagttaaggaaactctataaagagttcatagaacagatttctgtgcaccctgcttagagaagctttcccaggtgaagtaacagatgagctggatttaaaggt

SEQ ID NO: 306778 - DNA, 511 bp, Homo sapiens
atatacatgcccataaaaaatacatctgaattatttgcatgcagaaaatgtaaaggtatagaaaaagacatactatataaacacccatcgaagaacattaaggtagctatgttaaaataagaagtagacttkaaagcaaaatgaagtaccagaaataaagtagatcacttcacaacaattataaggcttagttgaacagacatcatctatcaagaccatcaaagaattacccaacttagcctagcctaaacttcttacccagagacctagcatctaaatacatgataatgattgaagctactaactcatgatttggtttgatacaaagacaaataacagatacatttgataatgaaaatctgaagaaaaaatgttagcatctatcttaatagtgaacattgctctttttcccccttgagttcagaaatgaagtaaagttgcctcacattgttacttctattcatcattctgctaggggcctcagctagttcagcaaatttttaaaaatagt

SEQ ID NO: 306779 - DNA, 528 bp, Homo sapiens
tggtttctatttatgtcatggtggcatggtctgaaaagcactagrtatcaaagtgccttaacattatttgagtacctactatacaccagccattatgtagacattatacatatatatattttttttcattttttcatgacaatcttatctggtaattattgttatcctctatttcattgataagaaaactaaagttaaaaaatgtgaagcagtttctccatgttcacacagatacagttaatgatggagatggaatttgaattacaacttgcctgactttgaaggccatgtttgagctacacgttatggttccagggccattgttaatgatttcaattgctttagacacatctttaagctacttgaacaacaatttcatcagctacaaattcaatacattttcaatatctgatttctaagtgtcctttcggttttaacattttgtaatgtattttgtgctcaatgggttgcagttttcctttgtaaaagttttaaattagtcccatgtacaatttggatttaaaatta

SEQ ID NO: 306780 - DNA, 635 bp, Homo sapiens
agatggaatttgaattacaacttgcctgactttgaaggccatgtttgagctacacgttatggttccagggccattgttaatgatttcaattgctttagacacatctttaagctacttgaacaacaatttcatcagctacaaattcaatacattttcaatatctgatttctaagtgtcctttcggttttaacattttgtaatgtattttgtgctcaatgggttgcagttttcctttgtaaaagttttaaattagtcccatgtacaatttggatttaaaattatgatctaattactcgattggatgaactaagttaacaaaatgaacatttttaractttttagtttaactaagtgaacttatttagatgaatttaaacaactaatttaaggatcatgcaaataggtggcaaaaagtcctcttggtaactcatatcaccatttaagatgggaggagtgatggagcttgtttgatttgtaagttttctcacaaaacatgagtgatatcagagaacgttaattaagtagaatggaaataagaaacctggcctctattactacagcttaatatactgagtgtttatttgacatttcttatatgccagccattgcattaggagcttcatatatgcagcccc

SEQ ID NO: 306781 - DNA, 635 bp, Homo sapiens
agatggaatttgaattacaacttgcctgactttgaaggccatgtttgagctacacgttatggttccagggccattgttaatgatttcaattgctttagacacatctttaagctacttgaacaacaatttcatcagctacaaattcaatacattttcaatatctgatttctaagtgtcctttcggttttaacattttgtaatgtattttgtgctcaatgggttgcagttttcctttgtaaaagttttaaattagtcccatgtacaatttggatttaaaattatgatctaattactcgattggatgaactaagttaacaaaatgaacatttttaaactttttagtttaactaagtgaacttatttagatgaatttaaacaactaatttaaggatcatgcaaataggtggcaaaaagtmctcttggtaactcatatcaccatttaagatgggaggagtgatggagcttgtttgatttgtaagttttctcacaaaacatgagtgatatcagagaacgttaattaagtagaatggaaataagaaacctggcctctattactacagcttaatatactgagtgtttatttgacatttcttatatgccagccattgcattaggagcttcatatatgcagcccc

SEQ ID NO: 306782 - DNA, 414 bp, Homo sapiens
aaaccctgtctctacttaaaatacaaaaattagctgggtgtggtagcatgtgcctgtaatcccagatactcgggaaactgaggcaggagactcacttgaacccrggagatagtggttgcagtgagccgagatcgtgccactgcactccagcctgggcaacacagcaagactccatcttgaaaaaaaaagtctcagtaaaaaaaaaagaatatatgtgtatatatatatatttgtttcttccagaagatgtgaggataaccaccattcagataaacatcttattgattgttaggaatattctctaacagaaggctttcctgaaaactgtgtcatcttgcctcgaatcatgtatagttatagtttttgttatatctaagtccatcctcccccattaaactgaattttgccacctca

SEQ ID NO: 306783 - DNA, 594 bp, Homo sapiens
ttatttgggtagctaccttgcctcaaatattttgccccaaatttcagtttgcctcaatttccctgaactcygagactcatctctgcaattcattgagacccctgtgtctgcctgtgtttacccctctactccatgacctgggaaatggctgcagtctgtaatgtggggtgattgtatggcttagattatttgtttcccttttttcaggggtcatagtcctacactgcctatctttcaatttctgaaaaataattgtttcatatagcttgttcatattgctagaattttttggtttttagttttatttaacgtcaagaagtatgtccagtgacattcactgtggcataaacagaagtgaaagccccaaggtctgttttgttaatcaagtccaagaaaactgacaataagcaccaaagtacatatatttttaaaagctatatatctgttttactcatgctaagtaatgtaaaaatcctgaaaccaataaacaaatatgatcaacagtaagaaacaccacagagtatatcccatacatgcaagaacatatcaaaatcaggaaacatattaatataattcaccataggataaaaacaa

SEQ ID NO: 306784 - DNA, 475 bp, Homo sapiens
aattcctgtctatctctattatcaccgattatttgtgttattgcagtaacctctaacatattgcctttcttcttcctttcatccctaaagttatcactgcagctaaagtgattgtttttgttgttgttgttgttttgagacagtctcactgtcgtcagcccaggctggagtgcaatggcatcrtcttggctcactgcaacctcagcctcccgggttccagcaattctcttgccttagcctcctgagtagctgagattacaggtgtctgccaacacacctggctgagttttgtatttttttagtagagatggggtttcaccatgttggcaaggctggtcttcaactcctgacctccggtgatccacccactttggcctcccaaaatattgggattacagtaatgagccaccacacccggccaagtgattgtttgactataagtgagacaatgtgctcttctgctcagttccctata

SEQ ID NO: 306785 - DNA, 475 bp, Homo sapiens
aattcctgtctatctctattatcaccgattatttgtgttattgcagtaacctctaacatattgcctttcttcttcctttcatccctaaagttatcactgcagctaaagtgattgtttttgttgttgttgttgttttgagacagtctcactgtcgtcagcccaggctggagtgcaatggcatcgtcttggctcactgcaacctcagcctcccgggttccagcaattctcttgccttagcctcctgagtagctgagattacaggtgtctgccamcacacctggctgagttttgtatttttttagtagagatggggtttcaccatgttggcaaggctggtcttcaactcctgacctccggtgatccacccactttggcctcccaaaatattgggattacagtaatgagccaccacacccggccaagtgattgtttgactataagtgagacaatgtgctcttctgctcagttccctata

SEQ ID NO: 306786 - DNA, 475 bp, Homo sapiens
aattcctgtctatctctattatcaccgattatttgtgttattgcagtaacctctaacatattgcctttcttcttcctttcatccctaaagttatcactgcagctaaagtgattgtttttgttgttgttgttgttttgagacagtctcactgtcgtcagcccaggctggagtgcaatggcatcgtcttggctcactgcaacctcagcctcccgggttccagcaattctcttgccttagcctcctgagtagctgagattacaggtgtctgccaacacacctggctragttttgtatttttttagtagagatggggtttcaccatgttggcaaggctggtcttcaactcctgacctccggtgatccacccactttggcctcccaaaatattgggattacagtaatgagccaccacacccggccaagtgattgtttgactataagtgagacaatgtgctcttctgctcagttccctata

SEQ ID NO: 306787 - DNA, 475 bp, Homo sapiens
aattcctgtctatctctattatcaccgattatttgtgttattgcagtaacctctaacatattgcctttcttcttcctttcatccctaaagttatcactgcagctaaagtgattgtttttgttgttgttgttgttttgagacagtctcactgtcgtcagcccaggctggagtgcaatggcatcgtcttggctcactgcaacctcagcctcccgggttccagcaattctcttgccttagcctcctgagtagctgagattacaggtgtctgccaacacacctggctgagttttgtatttttttagtagagayggggtttcaccatgttggcaaggctggtcttcaactcctgacctccggtgatccacccactttggcctcccaaaatattgggattacagtaatgagccaccacacccggccaagtgattgtttgactataagtgagacaatgtgctcttctgctcagttccctata

SEQ ID NO: 306788 - DNA, 626 bp, Homo sapiens
aatagaaaactacaaagattattcgctagccatggatattcccacacaaatgaaaagcacaataaaaataaatgcttataataatcaaacaaatcaaactatcatgtctttggatcaagtttgaataagatgccaatctgcaatgtttggttcttgttcaatttaatttaatttcacatcttaagctactaaattgtagagaacctgataccaggctgaaaatactgttggtcaaaagtgtcatttatctagagagaggtgatctacaaagcagcaatccctcctcactcctctacacctcttcatcatccttgacatgcccttgcaacccttgtgggaaacctgatctaacagacccaccaaaaaaagaaaaaayccatgagctaaccaatgagaagtttcaaaagtacatggtctttgagacttcttttgtgttgttcatttctcatgattagtttatttgaataatgttaatagagtaagcaactgtacctctccagcccccatggatttggagtatatgcaccatctatttatcacaaccaagtttcttaccattaagctactgagaattaattttactggaactttgcccaagtgttattttcataactttcttatgtttt

SEQ ID NO: 306789 - DNA, 569 bp, Homo sapiens
ttggagtatatgcaccatctatttatcacaaccaagtttcttaccattaagctactgagaattaattttactggaactttgcccaagtgttattttcataactttcttatgttttatcaccattcatactcaaaaatcaactctctggattttagtgttcaaagcactagacttttgtcaacatattaataaaatgtaaatatatacccagtgaactgaactattcttttctytaaaaagcacttttagggatattttaaagccattatgatgtagttcattcccaagtttatctcttatgcgaatttagattttcaagcatattctattaaatgtgcaactgaaatggcatattatgaaatttaaattggctgatgtatttagaggcaataattcaaatatttgacttttcccacatttaatttatgagtaatattgacagataaaagaatcaagtttgtttagctcagatctgtttgataagagtatcataaaatgaaaaaatgaaaattattggaagttttaaaacatcagaataaaagtgatctattcttcacttgcaatctcag

SEQ ID NO: 306790 - DNA, 598 bp, Homo sapiens
ttagcagttgacacctacagcactataacttggaggggaaattcattcccagaccacagtccttttgggtggctgcttcttggtgtttgcaggagagctgccactgctgttgttcatttctgcttttctgccttcactttctctcgccctttttgttttgttttgttttgtttgaratggagtctcactctgtcacccaggctggagtgcagtgggacgatctcggctcactgcaacctccgcctcctgggttcacaccattctcctgcctcagcctcccgagtagctgggactacaggcgcctgccaccatgcccggctaattttttgtattttttttagtgcagacggcggtttcaccatgttagccaggatggtctcgatctcctgacttcatgatccgcctgcctcagcctcccaaagtgcagggattacaggcgtgagccaccactcccggcctctctcactcttttaggaggggtggcagggggagaagattattccaagaatgcgaagtccaagggaaacaatcctttttaaaatcagttattaaagctggatcttctatttatatatttttgtgatatttgattttcccc

SEQ ID NO: 306791 - DNA, 598 bp, Homo sapiens
ttagcagttgacacctacagcactataacttggaggggaaattcattcccagaccacagtccttttgggtggctgcttcttggtgtttgcaggagagctgccactgctgttgttcatttctgcttttctgccttcactttctctcgccctttttgttttgttttgttttgtttgagatggagtctcactctgtcacccaggctggagtgcagtgggacgatctcggctcactgcaacctccgcctcctgggttcacaccattctcctgcctcagcctcccgagtagctgggactacaggygcctgccaccatgcccggctaattttttgtattttttttagtgcagacggcggtttcaccatgttagccaggatggtctcgatctcctgacttcatgatccgcctgcctcagcctcccaaagtgcagggattacaggcgtgagccaccactcccggcctctctcactcttttaggaggggtggcagggggagaagattattccaagaatgcgaagtccaagggaaacaatcctttttaaaatcagttattaaagctggatcttctatttatatatttttgtgatatttgattttcccc

SEQ ID NO: 306792 - DNA, 573 bp, Homo sapiens
tcctcgatgtttttgtttttctggttaattacaattaacttcacagaaatattgtagaagaaacacccaaacacaggatctaccacacaaagttcctaaatcactgtacttaataatatttaagtctatcactaagcattagtgataaagtcaaaagagaattcttgtaacaatgtcattctatttaggataaactcagtacatttaatcttatcagtatatatttgatatttaaatgtaatatatttactagttttacatgtaatagatattgttttctaaatcacaaaaccaaggaaaagaatgacaaggattttctcaatctgatgtaaaatgtataaattacatatttggcataatagttgaaccacactatttttgccagtgattctcaaccttcttttagtcccataaacatgtggaaagtgagttaattttttctctagttatttgaaggaataatacagaattatcaaatttaattaacttcatctcatgacacaaaattacaccataaagcactttaagtagggtaaacacactaaaaygaatactgcattgctcttaagttgt

SEQ ID NO: 306793 - DNA, 617 bp, Homo sapiens
gtttcaggtgtggcctgcgtatgttttaaagcttcttgcacccagataatggtaacattcagcctggcctggcctgcccacctgcttgcttttggatccatcctcactctatggctacggatctcgtaactgaagactagacttttggctgtctaagctttagcaggtctgattgtcaacatgggattacttccgctatgcaagacaagcaatgacccagctaaagcccaacacactgggaatagctgtcacagtgatctcaaattaaatattatcaaaacatccaggacccctgcgaccaatttgtctctcctcatarcaagatattttaataactctgatccatatgtgggtgggtgggtagcagtagctacttggatagcatcttggcattacaaaggcagtcatttatcctaagaaatcttaattcagctattgtctcttatttaccttggtcttgaacttgtactaaaatctagagacatgctgttgaaagaagtaacctaactcaatcagctgacaaggaaaggaatatattctgcagacctatggacattaaaagttactctgctttaatggaaagtgtttttttctctgattttatttattttttattt

SEQ ID NO: 306794 - DNA, 533 bp, Homo sapiens
actatgtaaatatataacgttagaacacaaacatacacacaagctgtggtcaaagagaaagatttctcaaaggagctgcatctgtgaggaattctcgagagagtgtaagtaggtgagggtttactgaagaataacatggcagcatgagatcctgcaggagagaaaatcacagaagatggtggtcatattaaaggagatatatgcctggaagtggtggatcctagaagcaggggaggcctcggagcacctgccagggagattagtttaggcattgcagtggacccagtcaaactgctggctccctgcacactccctgcgtcactgtgagccacggcactggagacatgacatccaataaaagtgggagcagtcctgagcacagggaggctgataagcttcataacctyatagcagatagtcttaagctatctcaatgagactagtttttaggagcaaataatcaaagtggatatagcagacaatttgtgtagaagcatgtaattgctgaaaatcaagaactagaagcaataaga

SEQ ID NO: 306795 - DNA, 561 bp, Homo sapiens
ccggtgttgcagctggtgtgacacagaactgggttctgaccagagatgtaaatgaagtagtgtgggactccctaaaggcagcattgtgggaagattccacaaggcagctggctcagttcgatgataggacctgtttgccgtttcctcttgctccttccagctatctagaacacagatatatagctggaaattcagtagtggtttcagaccaggaggtcatgttgataagaaagccatggactagaatagcagagawaatgaagaaatttgggttgctgataacaatggagttatcatttttgatcttgattaactacctttagatttgttttatgagagagaagaaaatcctcatcttgtttaactgttattttgagttttctgtctattgcagttaaatatcatttctaaccaagactgagataaagggttttagtcttaatgttgaatccatttatatactatccaaaaacaatgaaatatttcaagtatccatatcatatttttttaaaaatgaatctaacctagatgtgagagagattagtacgtattaaatttcta

SEQ ID NO: 306796 - DNA, 626 bp, Homo sapiens
cttgtaactcataactgaaagacataattcaccaataatcctgataaacagagcttttgacagtttgtgtttctgattattctccaatacattttccagattgagtttccttaaacaatgatgtgtagacataaggaaggactcatgaaaacattgaaatagattctagtaagtcttagaccattaaaagtaaaattttacaataaacgtgagcaaagctttaatagtacaaaattgtaaaagatctagagcagaagtatatataaaataggcttaaaaataatgcaatagttttataaatatagcatactagtgttataaattccccattaaacatcaaattaatagaaattcaaaatcctttcgtctggtgtgattctatacaagcaaaaggattttctttcatatctaatcattcaagttgtgcttatttggcctcctaaatatttttccataattgccttttcttcatcacttctacarctataaatacagacatcatgctaaatagtggagacctaccatgtatgtggctcctctgtgaaggaaatgactgtacagtgtgacaaaggttttgctggagaaatacaaagtactacagtggaggtgatatcgtttggatattt

SEQ ID NO: 306797 - DNA, 469 bp, Homo sapiens
gaaaacatctcttcctataaaacattatttggtctctctccctcctctaagttgggcttcataaaaatacatgaaagatcttcatgtcctttagataacatcaatatagatgattaaccacttacggacccataagcgctgtcaactcactcaagttttcaatgattccatactgcctgtaattattaaatgcaaattcttctttcctatttcaacttacatagactataaactcaaatttgcatttcaayacagtatctctttagtattaagtaacgttattactactacttattgtgggtagtgtctacttattctgtgtccactttatccaagcctctgacacaggatgacaagcatacaggcagtcttcacttagtcacagcttttagttaagacagtgccatactatcagaaccatgtctaagctttgtactttgcattttattttgaaatgatttcagaccta

SEQ ID NO: 306798 - DNA, 639 bp, Homo sapiens
atactatcatgaaactaatacaatttaattaactactctattattttgggcatttaagtaaattccctgcattttacactatcagcgatggtatctgcatctttacctgaattattgactgtgaattatcaactcttttaagctgctaatacatattgataaattggcttccaagatagattgcaccaggggaaattcccaccatcaataattgtktttgtctcatatacccttgaaatgttaactataatcattttgtttaaatccttgctaattttacatatgatcaaggtatttaactgcttttctttgattacttagtgagagagattgaacatacaacattaaaaatggacctgttctttgaaaatgttatattacatgaatatggatataaatttatctttcacgtaatttagcccatatttctaatagtcaattagtcatcactagatacttctattaattcaacataacttcaaaatggactcttattcataaaaatttttaatataaatatatattttttgatggcaggcagtcagaacctagcaaataaaactactttgaaaaggactgtgaaaattaacctgaaaaaatagcctatatgatatttttaaaaaatatgtttttatattt

SEQ ID NO: 306799 - DNA, 589 bp, Homo sapiens
taggccctacttctctagtgatcctatgctagaaccagatgatcccacatctgtccatttgaaaacccgcacatgtacactgtcttcagtcctgatgagaggagaagccagctggacttcatgggtcctgggtcgagtggggacttggagaacttttctgtctagctaaaggattgtaaacacaccaatctgcactctgtaaaaacgcaccaatcagcactctgtgtctagctaaaggattgtaaacgcaccaatcagcactctgtaaaaaygcagtaatcagcactctgtgtctagctaaagaattgtaaatgcagcaatcagcactctgtaaaaacgcaccaatcagcactctgtgtctatctaaaggattgtaaatggaccaatcagcactccatacaatggaccaatcagcaggatgtgggcagggccaaataagggaataaaagctggccatctgagccagcagcagcaaccagctggggtccccttccatgctgtggaagcttagttctttagctcttcacaataaatcttgctgctgctcactctttgggtctgcactacctttacgagctgtaacactcac

SEQ ID NO: 306800 - DNA, 539 bp, Homo sapiens
ccctccacaaactggaaagacagattacagagaatcacaactttcctgagcaggtccacaagcagaatcctccatgggagccagtgcctttgtgaaaaacataaaactaagtgacaaattggtggaagctcagtatggataaggccgagttaaaaacttcaggaaatctagccatatggggccacacacacttctgtaagtgtactgctgacttacagtagaaaggagttcagccagattttcacatatcggagaaaaatccccttgtacttcaagggtggagggaaaggtcataattttgaaatacatgggagaattctgttcttaccgggacctgacctcaagagaaactattttattagagtttacactgttgagtktttttcccaagcttaatcaacctaccagaagggaaataccaaacttcagcccactctagccatcctgtcccatctaagtggaaaggagagaggaactgagacacactagtgaagttcacagcctgggggcaaaagctcactacaacactgagaaataat

SEQ ID NO: 306801 - DNA, 549 bp, Homo sapiens
atggcagagatgtttgaattatcagactgggaatttaaacaagtagaattaatatgctaaaggctctaatgggtaaagtagcatgcaagaacagatgggcaatgtaagtagagaaataaaaattctaaaaaaaaataataaaggctagagatcaaaaaaactgtaacagaaatgaggaatgcttttgatggacttagcagtagactagacacagctgaagaaagaatctttgaaaactaaaaagaatcttcraaaactcaaaagccaagaggaaaaaagactcaaaaagtagaacagaatatccaagaactttggacaactacaaggaataacacatatgtaatggaaacagcagcaggagaagaaagagataaataaaaggaagaaatataggaagtaatgaccaagaattctctcaaactgatgtcagacaccaaactgaaactgggaaagttcccttctcccccttgaagagtatgcaatgggggtgtggctcgtttcttcggtgccccactgctcaaacctctagggggagctttcagatgggca

SEQ ID NO: 306802 - DNA, 549 bp, Homo sapiens
atggcagagatgtttgaattatcagactgggaatttaaacaagtagaattaatatgctaaaggctctaatgggtaaagtagcatgcaagaacagatgggcaatgtaagtagagaaataaaaattctaaaaaaaaataataaaggctagagatcaaaaaaactgtaacagaaatgaggaatgcttttgatggacttagcagtagactagacacagctgaagaaagaatctttgaaaactaaaaagaatcttcaaaaactcaaaagccaagaggaaaaaagactcaaaaartagaacagaatatccaagaactttggacaactacaaggaataacacatatgtaatggaaacagcagcaggagaagaaagagataaataaaaggaagaaatataggaagtaatgaccaagaattctctcaaactgatgtcagacaccaaactgaaactgggaaagttcccttctcccccttgaagagtatgcaatgggggtgtggctcgtttcttcggtgccccactgctcaaacctctagggggagctttcagatgggca

SEQ ID NO: 306803 - DNA, 641 bp, Homo sapiens
cctgatgttattgattaaaatacttcagcattcaatatttttgttcttaacgtcatttaacttataataatctagttcctgaagtcggtcatgtcccaacaatctaaattacatcttaagttcagttccccaaatattagtatttttgataacagttctgtagcacaatacgttcaagattggtatcatctcttagtgtgaccagaagtttcagctacggggtgctggattctaccaagtaagaaccaactttctgctgtttatctactttccagaagctccacaaatttaaatgttcctggataayaccatttcctgctactatctagtgaactctattaactgctgtgagtaaaagtaaagaataccctaccgaggcaaactatagaaaattcagcctcaaatcataggctacatgttgaccaagaaggctacactgtccaggtagtgtacctgcatcatggtgaggccaccatctacctagttcccagtccctggagcaaaagttcttgtgtgtgtatgtgtcagtccgttttgttttgctatgaaggaatacctgaggctgggtaatttatgaagaaaagaggtttatttgacttatggttctgtaggctgtacaagaagcatggcaccagcatcag

SEQ ID NO: 306804 - DNA, 641 bp, Homo sapiens
cctgatgttattgattaaaatacttcagcattcaatatttttgttcttaacgtcatttaacttataataatctagttcctgaagtcggtcatgtcccaacaatctaaattacatcttaagttcagttccccaaatattagtatttttgataacagttctgtagcacaatacgttcaagattggtatcatctcttagtgtgaccagaagtttcagctacggggtgctggattctaccaagtaagaaccaactttctgctgtttatctactttccagaagctccacaaatttaaatgttcctggataacaccatttcctgctactatctagtgaactmtattaactgctgtgagtaaaagtaaagaataccctaccgaggcaaactatagaaaattcagcctcaaatcataggctacatgttgaccaagaaggctacactgtccaggtagtgtacctgcatcatggtgaggccaccatctacctagttcccagtccctggagcaaaagttcttgtgtgtgtatgtgtcagtccgttttgttttgctatgaaggaatacctgaggctgggtaatttatgaagaaaagaggtttatttgacttatggttctgtaggctgtacaagaagcatggcaccagcatcag

SEQ ID NO: 306805 - DNA, 565 bp, Homo sapiens
ttgaaactgatagttataactactttgaaccatttacttatacatctatacatagtgatctttaaagacaaaatattgagtaatattataacatctggagrcctattaagccgttataaacaataggtcatagaacactttcacagagagaactgattctaacaaattattgtactgacccatataattatctttaatacaagaagatatgatacttttaaaataatggtcagaacagaactataaaaggatttacccaagtatatgctgatgcatatttgcctgtgatgccctagtatgacagactgaggacaaatatgatgaacattactccagataaagtttcattttcagttctcactaatctagaacatgctactttagccaggacaagataggtagtttataggtctcatggtgaccacatcatattccaacaataactagcctttaaaactcagcagtttttaacagtagtttctcatgcttttcggtgattatatgctgaataatgtcctaatgttctgttggaatgcatagtttgaaaatatgagattcactgatg

SEQ ID NO: 306806 - DNA, 565 bp, Homo sapiens
ttgaaactgatagttataactactttgaaccatttacttatacatctatacatagtgatctttaaagacaaaatattgagtaatattataacatctggagacctattaagccgttataaacaataggtcatagaacactttcacagagagaactgattctaacaaattattgtactgacccatrtaattatctttaatacaagaagatatgatacttttaaaataatggtcagaacagaactataaaaggatttacccaagtatatgctgatgcatatttgcctgtgatgccctagtatgacagactgaggacaaatatgatgaacattactccagataaagtttcattttcagttctcactaatctagaacatgctactttagccaggacaagataggtagtttataggtctcatggtgaccacatcatattccaacaataactagcctttaaaactcagcagtttttaacagtagtttctcatgcttttcggtgattatatgctgaataatgtcctaatgttctgttggaatgcatagtttgaaaatatgagattcactgatg

SEQ ID NO: 306807 - DNA, 565 bp, Homo sapiens
ttgaaactgatagttataactactttgaaccatttacttatacatctatacatagtgatctttaaagacaaaatattgagtaatattataacatctggagacctattaagccgttataaacaataggtcatagaacactttcacagagagaactgattctaacaaattattgtactgacccatataattatctttaatacaagaagatatgatacttttaaaataatggtcagaacagaactataaaaggatttacccaagtatatrctgatgcatatttgcctgtgatgccctagtatgacagactgaggacaaatatgatgaacattactccagataaagtttcattttcagttctcactaatctagaacatgctactttagccaggacaagataggtagtttataggtctcatggtgaccacatcatattccaacaataactagcctttaaaactcagcagtttttaacagtagtttctcatgcttttcggtgattatatgctgaataatgtcctaatgttctgttggaatgcatagtttgaaaatatgagattcactgatg

SEQ ID NO: 306808 - DNA, 582 bp, Homo sapiens
aaaccagaacctgctcttaaaatgactttgcgggttcaggcttcatattgacttaatattgtgggaaactttgttaagttattattgtaaggcaacgtttttgtctccccayatcaagtccacaactttttagaaaactttactgtagataccaggttggcagattttcccagcatcctgttataaggagggacttgagcaagaaatcttgctctggctttcatggaacacatttgaaacaattcattgtccttaacagcctgaacacccagataccagagttcactaccttgaatgtctattccattcctgatcttgttttcaagtctagttatatatatattccacatttttctttttatactttattacttatgtgtgtttggagcaggaatggaagggctgtggtgatgcttgaacttaccattctattttgcctgaaagtcttaattaaaaaaatattttacaagctcaatgctgtatcataatgagtggattttagagtgagaacacagcaaatgctagaaacctcagaatgactcttaatgctaacttattaggactgactcatgttattttagc

SEQ ID NO: 306809 - DNA, 582 bp, Homo sapiens
aaaccagaacctgctcttaaaatgactttgcgggttcaggcttcatattgacttaatattgtgggaaactttgttaagttattattgtaaggcaacgtttttgtctccccacatcaagtccacaactttttagaaaactttactgtagataccaggttggcagattttcccagcatcctgttataaggagggacttgagcaagaaatcttgctctggctttcatggaacacatttgaaacaattcattgtccttaacagcctraacacccagataccagagttcactaccttgaatgtctattccattcctgatcttgttttcaagtctagttatatatatattccacatttttctttttatactttattacttatgtgtgtttggagcaggaatggaagggctgtggtgatgcttgaacttaccattctattttgcctgaaagtcttaattaaaaaaatattttacaagctcaatgctgtatcataatgagtggattttagagtgagaacacagcaaatgctagaaacctcagaatgactcttaatgctaacttattaggactgactcatgttattttagc

SEQ ID NO: 306810 - DNA, 574 bp, Homo sapiens
acactaaaatctagtgaatctgatttaagaataagttggtggactggcacaaaaaaagtaagtaaagctactaattagaacctctcttacagacatttatggtaacaagaacataaggtaggcatataaatacactttggaaaacaacacttaagttagttgtttatacctactataaaaaaagatgtgaaaaaaatacttaaaccatcattcaaaattatagttggcagttttttttccctttaagcattaagctttttattttgtcayatgttataaaatatagaacttaaaaagagtactttgtgtactgatattatttaaatgatcaacattttgatcacctaccttttttcttaagaatatagttaattcagcttgtaactagtattttccattgtacatattttgaaattgtatgaaaggacagcaaaaaaatattagcttaaataattaaaataatggaatttagtgacttgttagtttaccttacaattaaaatggaactttattttgtttatcagtatttaggctatactttgaataattacaattataagaaagttcttctaaa

SEQ ID NO: 306811 - DNA, 574 bp, Homo sapiens
acactaaaatctagtgaatctgatttaagaataagttggtggactggcacaaaaaaagtaagtaaagctactaattagaacctctcttacagacatttatggtaacaagaacataaggtaggcatataaatacactttggaaaacaacacttaagttagttgtttatacctactataaaaaaagatgtgaaaaaaatacttaaaccatcattcaaaattatagttggcagttttttttccctttaagcattaagctttttattttgtcacatgttataaaatatagaacttaaaaagagtactttgtgtactgatattatttaaatgatcaacattttgatcacctaccttttttcttaagaatatagttaattcagcttgtaactagtattttccattgtacatattttgaaattgtatgaaaggacagcaaaaaaatattagcttaaataattaaaataatggaatttagtgacttgttagtttaccttamaattaaaatggaactttattttgtttatcagtatttaggctatactttgaataattacaattataagaaagttcttctaaa

SEQ ID NO: 306812 - DNA, 614 bp, Homo sapiens
aggtttattttactttttctcccctataaaataaacctgccttttattaagtagtttakaaacttaatcagaagtatgaatctttaaataattcaacttactttgatatctgattctactcgtaaacagtaaggctgattttggtactgctggatctctcctgttatttctgctactttcctccttttgctaaagtttataagctcttttccatgtctttttaggacctcagggttgccttcttctgttttcaagatattagtgagataaattcctagaagatataatggaatgatttcaaggataaagaaggaaaatgcaagtttttttctgtttcattaattgtgggtatattacactgtaccatctcagttgccaaaacaaaagaaccaaggctcagatttccatgatatgaaaacagcagcttaagagaaagtatctgtgaaagacttaaatttttttttttttttcctcatcagaatccatggaggccagaaggcagtgggatacatattttttatttttttattttttttagaaagacttaaattttataaacatccaagaaaaagggagggagaccaagtttaataaaattaatagatttgttagga

SEQ ID NO: 306813 - DNA, 509 bp, Homo sapiens
tctagggaaagagaaaacagagcattatgacaaagaagagggctgaggtttcaccttttttgctgatgtctttcccatccttcccaggataaagtagctgcttaggattctaggcttctctggcatttgtccacacttcagtctacacttttctacaatacagtgttatgcttactacacagtgctgtgacttatttctctgctctttcaagggaacagaaactacggaactgtatcttatctgtctattcttagcatgtagccctgggcataacacatagaggcattcagcaaaggttttcgattgaatgaaagaagtatattgtttcaaaatagaagagagacatttaaaagacaggccaggatatgagaatcaattctaaaatagctggaaagcaagaatggagacaaggcaaatttacacataacagaaggaggacacaagatcagagctgtgtaaaagyaaagggcaaagccaatgctaaaggcttggatgtttgatgacaaac

SEQ ID NO: 306814 - DNA, 526 bp, Homo sapiens
agaaaaactgtgttatagacctgaaacatctggcagagctttggaaggagtgactgccctactttkattctttaaatggtggttgtgccagcaaaagatgggactaacgctggtaaaataatagaggaagtatcagctactatccctgaccctcccccaaagaaggggtttgaaaaccagtatccagaatttaggaaaagaatctggaaggagtttctataaactaccatatagacaggatggaattcagaagcagcaataacatctggctttacccaccggatcagaactgtatgaaaggctgtctaactccagagactggtaacttttagcttaagaatagcacagatagggcaccaaaactgaccagggtcagttgtagataaactaccttaaaggagcagaggctcagtaactaggaagatgggcaagaagaaaggggtacgaaggttggcagatgggctgcacctattaaactttgtgtgcctatcaaactacctacatgtttgtattcactcaataaatc

SEQ ID NO: 306815 - DNA, 498 bp, Homo sapiens
aagcaagttaaccactttctaattcacctaaatttaaatttttctttccacaaagctttccctttagtgagcaaactacatcaatagactaatrattgggttttgtaaaaaaataaaaataataataatgaccagtatctatacataaaaaatctatgcattccaatggaagtgtatctatagtcagagcttacctatatcctatttcaagaaaaaaaaattactgacaatatcttcatagtacgcacgtttgcccagaaatgaacaagccatttatattattggcagttcaaaccaaggaagtaatttatttattttttttgagctcacatctgtaccagatccttttacttaattattaacacatataattaaaaaattacaacatattctattcatgaaaacaatcaccttatatgagtcaatgtaacatggtagaaaatatactctatttagagtcaagaaacctaattcttgacttgttctggaattaactcg

SEQ ID NO: 306816 - DNA, 388 bp, Homo sapiens
actatagacatttctaggtgaaaaattataataaaactggaatccttggcttccaggattgcaacatttattattaaataatcaggtttaggagtggaaactgagagaaagcaatgccgtgtatatttgtactaccagcacaattttgttayattaaaatttttatttataatctcagaaatggaaaaagaagaaagaaaaaaaagataaaggagtaaaaaactttttagatcccaataatgatgatttactactaactttagtcttgtttctgtcactttctaactggataaatttagccaagtgacctcattttctcatctataactgatggtaaggttaaaaaaaagtatttaagtgtagtagaaaaagtaaaacattccaaaga

SEQ ID NO: 306817 - DNA, 579 bp, Homo sapiens
taccgtctattaaaataaaataaaataacattttatcaatagagttttcatccaacaatttaggaatacctactctctaccatgaatgaaaagacttgagatacacaatcatgaaatattcaaagtgatttataaagaagtttatttttcttttttttttttagatggagtcttgctctgtaccccaggctagggtgcagcggtgcratctcagctcactgcaacctctgcctcccagcttcaagtagttctcctgcctcagcctcccgagtagctgcgattacgggtgtctgtcaccacacctgactgatttttttttttttttttacttctagtagagacaagttttcaccatgttagccaggctggtctcaaactcctgacctcaagtgatctgcctgcttcggcctcccaaagtgctgggattacaggcgtaagccaccatgcctggctagaagtttacttttcaattagcttaagtattcattagtacattagtactttaaggattttgtgtttttcacaggtattccttaaaggtcaacaacacattcctttctgcttcaattgataaaaatc

SEQ ID NO: 306818 - DNA, 579 bp, Homo sapiens
taccgtctattaaaataaaataaaataacattttatcaatagagttttcatccaacaatttaggaatacctactctctaccatgaatgaaaagacttgagatacacaatcatgaaatattcaaagtgatttataaagaagtttatttttcttttttttttttagatggagtcttgctctgtaccccaggctagggtgcagcggtgcaatctcagctcactgcaacctctgcctcccagcttcaagtagttctcctgcctcagcctcccgagtagctgcgattacgggtgtctgtcaccacacctgactgatttttttttttttttttacttytagtagagacaagttttcaccatgttagccaggctggtctcaaactcctgacctcaagtgatctgcctgcttcggcctcccaaagtgctgggattacaggcgtaagccaccatgcctggctagaagtttacttttcaattagcttaagtattcattagtacattagtactttaaggattttgtgtttttcacaggtattccttaaaggtcaacaacacattcctttctgcttcaattgataaaaatc

SEQ ID NO: 306819 - DNA, 598 bp, Homo sapiens
tggatttactctctttgcttaaataactagaaaaccagacaaaaatataagattttcagacagttggctttgcaggaccacactccctaagcgaaggaaacaaaaagagaaccgaggattgcccatcggccacctggaggaggttccaggccaaagggcagggagggaacacccaaacagaccccagacatcttggtgagcagcaaaggcagaagacagagggtcagggaggtgatgggagcagaaattttcagggcagaatagcarggaggaggcagctgtctcaggagcaggctctgcagagctgtttgtggatctgcacatccacgagaaataaccacgcccaggaaaggccagccaccatgaagaagcgggcaggtgggttctcaaagcacacatggggcttggaatagctcgtgttcctaccaaagtgggaagtctgcatgacacacacacagggcatcgttactgcccccatagtctggaaggcccagccaagtgcctgcctgtggtgctggcttcgttggccagatgctgtgcttagaagcctctgctccagacccagcccacggagcaaaggtgagatagtagcccaaag

SEQ ID NO: 306820 - DNA, 598 bp, Homo sapiens
tggatttactctctttgcttaaataactagaaaaccagacaaaaatataagattttcagacagttggctttgcaggaccacactccctaagcgaaggaaacaaaaagagaaccgaggattgcccatcggccacctggaggaggttccaggccaaagggcagggagggaacacccaaacagaccccagacatcttggtgagcagcaaaggcagaagacagagggtcagggaggtgatgggagcagaaattttcagggcagaatagcagggaggaggcagctgtctcaggagcaggctctgcagagctgtttgtggatctgcacatccacgagaaataaccacgcccaggaaaggccagccaccatgaagaagcgggcaggtggsttctcaaagcacacatggggcttggaatagctcgtgttcctaccaaagtgggaagtctgcatgacacacacacagggcatcgttactgcccccatagtctggaaggcccagccaagtgcctgcctgtggtgctggcttcgttggccagatgctgtgcttagaagcctctgctccagacccagcccacggagcaaaggtgagatagtagcccaaag

SEQ ID NO: 306821 - DNA, 560 bp, Homo sapiens
ctcttttctctcttggcttcctgttgtctgtcccattgtaaaaatgtttgcgctttgaagaaacactgtaaatcaaaataaggattttacaacggattaaatttttttaaagttttccaaattttggttgcattttgttcaaaatcagttaggttttgatcaaattattaaacaattaaacaaaacctccaactgttgaagttttggtaatttgtaattataggaaagaaagtttgaaaataggagttcattgaaatttgttctttcaaaagcaagtgaggcattcaacatatccatagaatgaggagagcgcaagtggattttgaacttccatgatcttgcctggaaatatttcaacttgtagaattttctgatagagcacctatttttaattgaatargttcacgttttgtaccacaatcggataaaactaagaggctctatgattttgcagcatataaatttaatagaaaattaaaagaatatcaatagaaacaacttctttaattttgtcttgtaaaaacatttgtcaataaatgacatcttaaatggatatgcaa

SEQ ID NO: 306822 - DNA, 575 bp, Homo sapiens
ctatgagtagccattcttttattcctttactttcttagtaaacttactttcactttgcactgtggactggtcctgaattctttcttgtgcaagatccaaaaactctctgttggggtctggatcaggatcactttccaataacaaaatctcaagctataacttttaaattggcactcatcattgtccatttttcttataagtttacttaaccttttattgcatgccatttgctctctcttaaaatttgttacatcctctcttcactctcaattgctgacatgactgtatgcttcatttgaaaatgtgaaagcaaccagagagattaccaccatctaacttatgattgtgcctgcatcagtatcaagatcycattctgtcctgttcaaacagcagtagtaccaagtgtccatacagccctccctccacattttcttatatcctgtccctgtggctttcttaagaatagaaaatctcactctttctgtggcatatcattctaataattgcctacaacatgttctagtatcaatcattgagagaagacagaaagaagatgaaagaggaagcaaagggaa

SEQ ID NO: 306823 - DNA, 595 bp, Homo sapiens
ctgatatcgtgtcataaacagactggaattatgactggagggggacagttccacagagataaagtgcctgcatcataccaagagttatattacatctacattacttcatcactggtgaaattatccttgaccacaggtgggtggcgctggtcagatttccctaccataatgttttctgatggtttctttcaaatactaaaaatcaatgattttggctggccacagtggcttattcctgtaaacccagcactttgggaggtcaaggtaaaaggatcatgtgaggccaggagttcgagatcagcctgggcaacatagcaagaccctgtctctacaaaaataacaaaaattagccagccatggtggtgtacacctgtagtcccagctgcttaggaggctaaggtaggaggatcacttgagcccaggagtttgatgctgcaatgggcaatgatggtgccactgcactccagcctgggtgacagagtcagatgctgtctcgaaaaaaaaaaggatcttgtccttaccttttattttaatataaaaaatgagactcaagscctcaaatcaatgacctgcacagtttcactgtgtattaatc

SEQ ID NO: 306824 - DNA, 599 bp, Homo sapiens
agagaagagccagagggcaacgtgatggcaaaagaatgctcagagggatgcagggttactgcctttgaagacagaggaagggcccacaagccaaaggatgtggatggcctacagaggctggaaaaggcaaagaaacagattctccccagagcctccagaraggaatgcagccaagccagcaacttggctttagtccaatgagacccgtgttgaatttctgacctacagaactgtaaatcataaccttgtgctgttttaagccactaaattcatggtaatttgccacagtagccattggaaattaataaaagcactcctgccatctccaacgtcctctggggaagtgcagtatagggaggtatacactagacattgggggagagaaactgcatggctcactctcaccttgagccctgcgctcagtgctggggccacaccatcagaggcatttaaataaatgtgaagaaaatgactacaaatcaggccatatgcctaatattggagggactcgggtgtttgacttggtttggagaagagaagactcaagcggaacataaaagctctcttcaaatacaagatggatctgccctaatggaaac

SEQ ID NO: 306825 - DNA, 599 bp, Homo sapiens
agagaagagccagagggcaacgtgatggcaaaagaatgctcagagggatgcagggttactgcctttgaagacagaggaagggcccacaagccaaaggatgtggatggcctacagaggctggaaaaggcaaagaaacagattctccccagagcctccagaaaggaatgcagccaagccagcaacttggctttagtccaatgagacccgtgttgaatttctgacctacagaactgtaaatcataaccttgtgctgttttaagccactaaattcatggtaatttgccacagtarccattggaaattaataaaagcactcctgccatctccaacgtcctctggggaagtgcagtatagggaggtatacactagacattgggggagagaaactgcatggctcactctcaccttgagccctgcgctcagtgctggggccacaccatcagaggcatttaaataaatgtgaagaaaatgactacaaatcaggccatatgcctaatattggagggactcgggtgtttgacttggtttggagaagagaagactcaagcggaacataaaagctctcttcaaatacaagatggatctgccctaatggaaac

SEQ ID NO: 306826 - DNA, 599 bp, Homo sapiens
agagaagagccagagggcaacgtgatggcaaaagaatgctcagagggatgcagggttactgcctttgaagacagaggaagggcccacaagccaaaggatgtggatggcctacagaggctggaaaaggcaaagaaacagattctccccagagcctccagaaaggaatgcagccaagccagcaacttggctttagtccaatgagacccgtgttgaatttctgacctacagaactgtaaatcataaccttgtgctgttttaagccactaaattcatggtaatttgccacagtagccattggaaattaataaaagcactcctgcyatctccaacgtcctctggggaagtgcagtatagggaggtatacactagacattgggggagagaaactgcatggctcactctcaccttgagccctgcgctcagtgctggggccacaccatcagaggcatttaaataaatgtgaagaaaatgactacaaatcaggccatatgcctaatattggagggactcgggtgtttgacttggtttggagaagagaagactcaagcggaacataaaagctctcttcaaatacaagatggatctgccctaatggaaac

SEQ ID NO: 306827 - DNA, 562 bp, Homo sapiens
actagacattgggggagagaaactgcatggctcactctcaccttgagccctgygctcagtgctggggccacaccatcagaggcatttaaataaatgtgaagaaaatgactacaaatcaggccatatgcctaatattggagggactcgggtgtttgacttggtttggagaagagaagactcaagcggaacataaaagctctcttcaaatacaagatggatctgccctaatggaaacgaagctttgataggaagagtggcagagcagccagcttcactgtgtatggcctcgagcggctttagttctatgttatcaacaatctcagagcacccaacactctcctacaaacacaaaggttgcttcaaggaagaatgaagcagtgggaccacctatctgaagagaaagtgcaaaggagacgggtagattggctacaggatcttgatggttctttcttagtctgaatttcaatcaggtgataagctatttattattcctttattcacactgacaaaaacatattggagtctacttttgaatggaatgaaaacttgtgctataggtgat

SEQ ID NO: 306828 - DNA, 463 bp, Homo sapiens
ggtcccatggctcccctttaacctgcccagccacatggagtggggtcgcgactacggggtgcagcttcctgctcatgcccatcaggctcaagaagacaagaggaagggctgaacctgtgtggagttcacaaatttcccaagagctggaaccaagaaggagcatctaattccttggcctcatcttaccaatgaggacatggggcccctgcaatgggcctgagtggatacagcccctcgacagcaggtccagggctactggcaggtcttgtggatgcaggcccagtgcttgctctcctctgcaccacactgcagtactaggcatcattttacacctaagcaaaagatcacagaacatcactaatggatgaacaaaaaaaaaaacctccaataaaagcactcrttatttccaggatcacaagaaataccaagtggctaggttgtcacctaccaaatatttgggaaa

SEQ ID NO: 306829 - DNA, 656 bp, Homo sapiens
tttttggtttcttgtgtcccctctttttgaatacccctccgcttcctaattctcaaaaacaaacaaaaataacttcaayaaaatagccaaaaatgatttccagtgagtaaaagaaaaacttactactgccttgaattaaacttcaaggacttaacattgccttattctcccagaaaaatgaaacttgcaaactcacaaaatatcagaaggcactgcaatgtttcggaaacaaggtgttgcaagtggcaagaattccaggactttgaagcacctgattctacagaatttggtaggattgatggccactaacagccataagcattcagcaggaaaggcaacatgttttaagtgaagtgtgaaatgggctcattccctcctcccaaataaatctgcctgctgggcctcaatttctggtggcctcaaactggctgatgaacttcaacagccctgtgtaatgcagcatagtgagaaacggctcagagactttgaaggctgtaattggactatgatgctgttgggtagagcccaaagggttgctgggcacttggaaacaaactagtgagcttataaaataactcactgtcacctccccaggctgcccagagctgacatgatgaggcaagcccacagagagagggcagccccgggtgagcggc

SEQ ID NO: 306830 - DNA, 656 bp, Homo sapiens
tttttggtttcttgtgtcccctctttttgaatacccctccgcttcctaattctcaaaaacaaacaaaaataacttcaacaaaatagccaaaaatgatttccagtgagtaaaagaaaaacttactactgccttgaattaaacttcaaggacttaacattgccttattctcccagaaaaatgaaacttgcaaactcacaaaatatcagaaggcactgcaatgtttcggaaacaaggtgttgcaagtggcaagaattccaggactttgaagcacctgattctacagaatttggtaggattgatggccactaacagccataagcattcagcaggaaaggcaacatgttttaagtgaagtgtgaaatgggctcattccctcctcccaaataaatctgcctgctgggcctcaatttctggtggcctcaaactggctgatgaacttcaacagccctgtgtaatgcagcrtagtgagaaacggctcagagactttgaaggctgtaattggactatgatgctgttgggtagagcccaaagggttgctgggcacttggaaacaaactagtgagcttataaaataactcactgtcacctccccaggctgcccagagctgacatgatgaggcaagcccacagagagagggcagccccgggtgagcggc

SEQ ID NO: 306831 - DNA, 541 bp, Homo sapiens
tataacaactaatcactcttccttatgcatcatgcatgcattcaacagagaaatcatttccttttctataggataaaggaaatgagatctttttaaatcaaaatgcttacttttgattatcaaaatcatttatcagtaagataagacttcagtaaatattgatgataatgtaataattagaaaaatcaagtgtaagcatgacaataaaatgtttctaaaaaacatttgaggaggaggactactaggtccttcctttatgaattgactgtcatctttaaagtggagctctkcagaatcagaaactaggaaattaaaagcaggaaatgaaataatgggcaaggcatgaggcagaatagaaaatagttcttcaatacattaggcacaaaggaagaacaaaggaaaatagagctcttttctaaaaatagaggaaaatttccattgcagaggctgaaaactaaagagatccagatcctggttttaaacttcctgcaaatgtcaaatatcagccaatcaccaattaccttttgagtacctactctat

SEQ ID NO: 306832 - DNA, 619 bp, Homo sapiens
aatcatttccttttctataggataaaggaaatgagatctttttaaatcaaaatgcttacttttgattatcaaaatcatttatcagtaagataagacttcagtaaatattgatgataatgtaataattagaaaaatcaagtgtaagcatgacaataaaatgtttctaaaaaacatttgaggaggaggactactaggtccttcctttatgaattgactgtcatctttaaagtggagctcttcagaatcagaaactaggaaattaaaagcaggaaatgaaataatgggcaaggcatgaggcagaatagaaaatagttcttcaatacattaggcacaaaggaagaacaaaggaaaatagagctcttttctaaaaatagaggaaaatttccattgcagaggctgaaaactaaagagatccagatcctggttttaaacttcctgcaaatgtcaaatatcagccaatcaccaattaccttttgagtacctactctatgaccagggctctgcaggtcagcgtcactggctaccagggaaatataaggtgtggtctctgcattcagagaacttgcagccatactgagggrataatgaataaattgtaaacacatacctccaattatgt

SEQ ID NO: 306833 - DNA, 614 bp, Homo sapiens
aggaactcctccttcagtgagtcctgctgggatgcgatactgttgttgaaagtgactgttttcattctgtgaatgtaaatgctatcaccaccatcctcatctcatgcacaacttcccaaaaggtggttgtggattcctgggggatctatagaacctcccagggatcagtgaagttgaaactatgctcattgtagaactaagagtcatttgcctctccttccaggggtcagtgaggtcaaaactatgctcatcatagtaytaagagtcattggcctccttccctgtgtggcatttgcattgacgctacaaaaacaatggcaggtaaagctatgggtgcctgaggactaatcaaagccactgctcccagccgtactcactgccaccaaatcactcacttcaacacacttgcagtgtttgagaaaatgccaatgtcacttaaaatgtccttcatgaaggaatgaaaactatgaatgttattaaacactgaccttgagcacatgacctttgtaatatcctgtgtaaggaaatgagaagaactcatgaagcacttctggtgcgcattgaagccacacgattatctcaagaaaaagcacttatgtgattgtgcacattgc

SEQ ID NO: 306834 - DNA, 589 bp, Homo sapiens
aggacacatgtagagaaccgcaaaatgcactggaaagtctcagcaatagaatcraacaagcggaagaaagagcttcagagtttgaatataaggctttcaaggtaacacaatctgacaaagacaagtaaaaaaatcaaaaataatgaacaaagcctcgaagaagtttgggattaaacaaccaaacctgagaataactggtgtgcctgaggaagaagagaaatctaaaagcttgaaaaacatatttaagggaataattgaggaaaacttacctggcattgctagagatctagacatccaaatacaagaagctcaaagaacacttgggaaattcatcacaaaaagatcattgcgtaggcacaaagtcatcaggttatctaaagtcaagatgaaggaaagaatcttaagagccataactcaaaagcatcagataagctataaaggaaaacctatccaatttacagcagatttctcagccgaaatcctacaagctagaagggattggagttctatctttagcctccttaaacaaaacaagtatcagccaagaattttgtatccagtgaaactaagcttcataaatgaaggaaag

SEQ ID NO: 306835 - DNA, 465 bp, Homo sapiens
taataataatattttaaaaaatcaagttggaaatttaaaaatgttttgaactgaatgatgatagtaacacaacctatcaaaacctctgggatacagcaaaagtggtgctaggaggagtgtttacagcattgaccgcatcaaaaagtctgaaaaaccacaaatggaaaatctaaggccacacctcaaggatttagagaaacaaascaaactcaaactcagcagaagaaaagaaacaatcaagatgagaacagaactaaatgaaattgaaacaaaaaatacaaatgataaataaaatgaaaagctggttctttgaaaagataaataaaatggatagaccagtagtaggattaaccaaaaaaagaagagcgagatccaaataagctcaattagaagggaaatgggagatattacaaccgataccacagaaatgcaaaagaccgttcaaggctactggtataaaaatag

SEQ ID NO: 306836 - DNA, 610 bp, Homo sapiens
ttggattaggcaaagacttcatgaccaagaacgcaaaaggaaatgcaacaaaaacaaagacaaatagatgtaacttaattagactaaaaatcttctgcatagcaaaaaaatactcagcagaataaacaggcaacctacagtgtgggagaaaatctttgcaatctgtatacctgacaaaggactgatatccagaatctacaaaaaactcaaacaaatcagcaagaaaaaaaaaaaacaatcccatcaagaagtgggctaaggacatgaatagacgattctcaaaagaagacatacaaatggtcaacaaacatatgaaaaaatgctcaagatcactaattatcagggaaatgcaaatcaaaatcacaatacgataccaccttactcctgcargaatggccataatcaaaaacatcaatacataatagatgttggcatggatgtggtgaaaaggggacacttctacactgctggtgggaatgtaaattagtgcaaccactgtgaaaaacagtgtggagattccttaaagaactaaaaggagaactaccatttgatccagcaatcccactactgggcatctacccacaggaaaagaagtcattatatgaaaaag

SEQ ID NO: 306837 - DNA, 564 bp, Homo sapiens
taagcagcatcattgtctggggtaaatactcaaaactcatcatctcactccagggaaactgaaaacatggacacacgagaagtgagtttaagaatggaggtttaataggggaaagaaagagaaaggagaatagctctcatttctgcagaaaggtgctcccgaatggatcttctagtcccatggtgaaatgcacagggatttatagatgagcttgaggaaacagtgtctgatttatatagggcacaaaggattggtggaaccaggtgtgccatttacatagtgtaagaagaagctgtctgccccaccttaattttcaataagcaaatggtttctctacatggccagtgccatgttgctgcttctktactgcacatatggttgacaaagaaaaggaaagaggggacctccacgttgaatatccatgttgaatatacctggcttcaaggtatcccatcccttttctttcttttttttttttaattatactttaagttctggggtacatgtgcagaatctgcagttttgttacatgggtatacatgtgaaacagtggtttgctgcacc

SEQ ID NO: 306838 - DNA, 553 bp, Homo sapiens
aagacttttagcagttttagagagtttgtaaaaagaaaaaaagcaggctcagtttgaataaatatcaaatcaaaatatactatgtaagtcagatgttcttggcagtgtttaaagaaaatcgacttctgtagcagcagcagctgaccacattgagaatttcwtcgcaaagcaacagtgatgcacaggagacgacactgtccgcctctactacactttatgccaaattcagggcctgaagagcaaaataatgggactcagagacttggagttggagaacaacaaattagagatagaatgactcctacctgacaaatactacaaaatttaactatttgggaaaacctttgttcacaagctaattctcttttccccatgaacttttctaaagtgtgaactggttgctttcacggtcatttttaaactttaatattggataaaatgtctgaattgtaggttgtgataatataaaaccagcactttaaggggacttactgattttgattatcacaaatgtacatgtatatatgtgttcacttcttccaaaacaaggcac

SEQ ID NO: 306839 - DNA, 553 bp, Homo sapiens
aagacttttagcagttttagagagtttgtaaaaagaaaaaaagcaggctcagtttgaataaatatcaaatcaaaatatactatgtaagtcagatgttcttggcagtgtttaaagaaaatcgacttctgtagcagcagcagctgaccacattgagaatttcttcgcaaarcaacagtgatgcacaggagacgacactgtccgcctctactacactttatgccaaattcagggcctgaagagcaaaataatgggactcagagacttggagttggagaacaacaaattagagatagaatgactcctacctgacaaatactacaaaatttaactatttgggaaaacctttgttcacaagctaattctcttttccccatgaacttttctaaagtgtgaactggttgctttcacggtcatttttaaactttaatattggataaaatgtctgaattgtaggttgtgataatataaaaccagcactttaaggggacttactgattttgattatcacaaatgtacatgtatatatgtgttcacttcttccaaaacaaggcac

SEQ ID NO: 306840 - DNA, 553 bp, Homo sapiens
aagacttttagcagttttagagagtttgtaaaaagaaaaaaagcaggctcagtttgaataaatatcaaatcaaaatatactatgtaagtcagatgttcttggcagtgtttaaagaaaatcgacttctgtagcagcagcagctgaccacattgagaatttcttcgcaaagcaacagtgatgcacaggagacsacactgtccgcctctactacactttatgccaaattcagggcctgaagagcaaaataatgggactcagagacttggagttggagaacaacaaattagagatagaatgactcctacctgacaaatactacaaaatttaactatttgggaaaacctttgttcacaagctaattctcttttccccatgaacttttctaaagtgtgaactggttgctttcacggtcatttttaaactttaatattggataaaatgtctgaattgtaggttgtgataatataaaaccagcactttaaggggacttactgattttgattatcacaaatgtacatgtatatatgtgttcacttcttccaaaacaaggcac

SEQ ID NO: 306841 - DNA, 575 bp, Homo sapiens
tgtgtgaccaatttggaatataaccaaagtgaatattcctggagccttgtaaaggcccatttacagggagctttcacatccaatgttacttttgatattaatgatttacaaagtaaaatccttaacttcgataagcaaactcaagtgtttcagccctgtttaaaagcttgggcagaattccaacaaggtttagagagccttaacccttggacctaccgcaaacagcaactcaatgtctttgttgttactattggattaatgttattatgtttctgttttttttcatagtcttcaaaatcaggtggaccaccaaatggcaattgagagctgcagaacctgcaattacctttattcaattaatgaaaaaacaaaaagagggagatgttacaggccaaaagaatgagggtygtgaccaactcagcataccactggaggctatatgagcaaacagaaaactgttctcatgaaagcaggatgttggaaaactgatgactatgtctgcccccagaaggagtgctgagggcaatcacaccccaagcacagtgttccttgtgattatctgtaggaatatctga

SEQ ID NO: 306842 - DNA, 318 bp, Homo sapiens
gtggtgaaaggaagaggtcaaatttcagtcttctgcatatgactatacaattaycacagcatcatttattgaatagagggttatttcttcattgcttgttattcctgacttcattaaaaatcaggtggcagtaggtgtgtggctttattatttggttctctattctgttccattgctctatgtttctgtttttgtattactaccatgctgttttagttactacaggcttttaatatcctttgaaattaggtaatttgatgcctctggctttcttcttttagtttatgatttatttggctattttggggtttgtatgaa

SEQ ID NO: 306843 - DNA, 569 bp, Homo sapiens
ctcctgttcattttgtaaaatctaaatcagttgttacctctctaggatgctttctctaactcccctgtctccaatctggattagttattactttcttggtgcttccaaaataataatagtaacaaatacactctgtgtgtgtgcttatgtgtataacaaacacactctgtatgtgtgcttatgtgtatgtatacatactgacattgtttatgacagggttcctcaaccttrgcaccactaacatattgaaccatttaattctttgttgtagggggctgccctgtgcatcataagatcttggcctatatactgtagatccactgtagatgccagtagccctccccctatattcatgacaaaaatgccacagtggggcatgatagcttggccaacaatatttcccttggttgagaagtgttgtttaagaatgatgtgttcatgaattagtctcatgcacctagtcccattaaagtataaggtgcttcaggtagagatattatatcttatccatttggaatgcctgttgtctaacacagtgctagcacatggtaggttcccaataaatattg

SEQ ID NO: 306844 - DNA, 592 bp, Homo sapiens
gaataaaattaaatttgagagaaacacattgaatcagttcaaaatatttcagtgaagcatagaatgagtgrttaaaaccaggaaaccataatgacagagcttcagaagtaaagcaggcaatcaggagggctctaacatgtggtaatagcaaataacactttcatattttaatcagcttaatggcaattcctacagtattaggtgatttctgttggaagctctatcagtcaaggttcagtcagaaaaagagaaagtttactaattcaccttattgcaggttttgttcattcttttattcgttcattcggttccattttattttgtgaactctattacattttatacaatcagtgactgtatttctaatttccacaatttctaaatgttcctctttctattcatgcttctcacccaattccatttttatgttaagtattttctcatctctgagaaaaaaaattattttgattttttcctatatttataaactttgggtgaaaatcttactattgtgtagaattggttatttcctcatgtggttttcatgagttaatcttcaacagctgttaatttctgcaaactttcatttcct

SEQ ID NO: 306845 - DNA, 636 bp, Homo sapiens
ggcgctacatttctctttctctttattttgtcttgataggcgtatgcactgagcaatgtggaattacactatgcatttacatttacaaatgagaacataagggaaaccacaattcagagtaattctcaataaatttcaagcaaacacatattcaacaagggctttatattgtgtgaatgagctactcaagatagtgaagagatctccactggaaaaatgactggtagattcttccactgaggattaagtgcccctgtgagacacagaaaagtgatgatgagggtccctcacaggcagttataggtagcacatcagttgtttgtttggttkgtttgttttgttttgttttgagatggagtctcgctgggtcgcccaggctggagtgcagcggcacaatctcggctcactgcaacctccacctcccgggttcaagcaattctcctgccgcagcctcccgagtatctgggattacaggtgtgtgccaccacgcccagctaatttttgtatttttagtagagacagagtttcaccatgttggccaggatggtcccaatctcttgacctggtgatctgcccatctcgacctcccaaagtgctaggattacaggtgtgagccaccatgcctggccagtagca

SEQ ID NO: 306846 - DNA, 600 bp, Homo sapiens
taaatatgtgatatatcctaataactaatgttttcccctcaaaagatttccatcataatttaccattactgaatgtatgaaaaatttaaattgtcacattccaggggctatttgtgttctctgtaccaatagtgatagggttctcattacacttggtagtgaataatccaactctacaatctcattttcttgtctgttctttttttctgacctctcttggtacatattatcaaatgctcagtgccttgaagaagtagattctaagctgaatattttttgagggagataattagrgagttttcctggaaataacatctgtgaaaaagtaggaagcaggattggacagtggaacaaattaggacataattcagtgcaatggtctgaatgtctgaatgcccccaaaattcataagttataattctaataaccaaaattactgtattagctgatagaaccatttaggaggtgtttaggtcatgaaggcagagtcctcattaatggaattaattcttttgaaaaatatgctcacaataactcattcatctctttcccccattaagacatggtgacgagttgccatcttggaggaatgcccaatac

SEQ ID NO: 306847 - DNA, 536 bp, Homo sapiens
aatatttactttgaagcattgatgtgacacttttcaaagaccatccatagacttaggaaataaatttactttcaatgttggtatttttatgtttatccttcagctacaaagagaatgctatgaagttatcaataattcgccatgatttgccaattaagcccctggatcaagcagccttctggattgagtttgtcatgcagcrcaaaggagccaagcaccttcgggttgcagcccacgacctcacctggttccaataccacaacttgcatgtgattaggttcctgctggcctatgtgtcaactgtgatcttcatcatcacaagatgttgcctgttttctttctgaaagtttgctaaaacaggaaagaaggagaaaagggattagttacataaaaggcttgaagctggaatgaccaaaagatagaattccttcagttaattccagcatgaagaggttgatacagaggatttccttcctcctgtgacaaaacatatttttataacttacactgttaggtcaaaatttattttccagaga

SEQ ID NO: 306848 - DNA, 536 bp, Homo sapiens
aatatttactttgaagcattgatgtgacacttttcaaagaccatccatagacttaggaaataaatttactttcaatgttggtatttttatgtttatccttcagctacaaagagaatgctatgaagttatcaataattcgccatgatttgccaattaagcccctggatcaagcagccttctggattgagtttgtcatgcagcacaaaggagccaagcaccttcgggttgcagcccacgacctcacctggttccaataccacaacttgcatgtgattaggttcctgctggcctatgtgtcaactgtgatcttcatcatcacaagatgttgcctgtttyctttctgaaagtttgctaaaacaggaaagaaggagaaaagggattagttacataaaaggcttgaagctggaatgaccaaaagatagaattccttcagttaattccagcatgaagaggttgatacagaggatttccttcctcctgtgacaaaacatatttttataacttacactgttaggtcaaaatttattttccagaga

SEQ ID NO: 306849 - DNA, 596 bp, Homo sapiens
ctcactcttccttttgatattacaagaccagtagtgttgcttggcttttactatgttcaagactcagcattgcttctttcctaaaagaaatgacaaatttatccctagatttaaggataatagaacacacaaaaatgagcaaatgtgacatatcaccttaacccaatgatgcataaaaatcacttgatatatcagtaaatgcaaaacaaagcatttgaaaaaaatcaattgtttatgagtttttaaaagagagctctaaacaaactagaaatagaaatgatatcgggggaacaagcccccaatatttcaatgtaggtcttttctattttccctaattggtgactggtctgagaaataaagagtaagagtaaaaagagagaaattttacagctgggcctccagggttgacatcgcatattggtaggactgtgcagacgaccctgagctgcaaaaccagcaastttttattagggattttaaaagaggagggggtgtataaacagggagtaggtcacaaggatcacatgcttcaaagggccatatagatcacaaggcaaaggcagaattagaattactgatgaggctctatgtcctgc

SEQ ID NO: 306850 - DNA, 620 bp, Homo sapiens
ttaccagtggctggagaatggaggaaattgagagttgcttttcaatgagtataaagttccagtaaaaataagatgagcaggtttcagagcactgctgcacaacattgtggccatagttaacaataatgtatcatacacttaaaatacttttaaaagagtagatctcattttattttcacttatacaagacatacttccaagatattgcagatttggtcccagaacactgaagtaaagtaagtcaaacaaaattttctggttttccatggcatatagatgttatgtktacactatactgtagtctcttaagtctgcaatataaatatgttacaaataatgtacacactgtaatgaaaatacttcattgctttaaaaatcctaacaatcatctgagcctgcagtgagttgtaatcattttgtaggtggagggtcttgcattgatgatgacagctgctaactaatcagggtggtggctgctgaaagtttggggagctgtggcaatgtcttttaaaaagacaaaaataatgtttgctgcacccattgaccttccttctttaaaaatttccaacttttatttaaagttcaaggtacatgtgcaggatgtccaggtttgttacaag

SEQ ID NO: 306851 - DNA, 550 bp, Homo sapiens
aatcctaacaatcatctgagcctgcagtgagttgtaatcattttgtaggtggagggtcttgcattgatgatgacagctgctaactaatcagggtggtggctgctgaaagtttggggagctgtggcaatgtcttttaaaaagacaaaaataatgtttgctgcacccattgaccttccttctttaaaaatttccaacttttatttaaagttcaaggtacatgtgcaggatgtccaggtttgttacaaggtaaacgtgtgccatcgtggtttgctgcacagatcatcccattacccaggtattaagcctagaatccattagctattctttctgatcctctccctcctcgcatcccctgacctccaaaagtccccactgtgtgttkttaccccccatgtatccatatcttctcattatttagctatcacatataagttaggacatgtggtatttggttatctgtttctgcattattttgctatgaataacagcctccaactccaaccatgtccctgcaaaggatatgatctcattcttttttagggatgcatag

SEQ ID NO: 306852 - DNA, 550 bp, Homo sapiens
aatcctaacaatcatctgagcctgcagtgagttgtaatcattttgtaggtggagggtcttgcattgatgatgacagctgctaactaatcagggtggtggctgctgaaagtttggggagctgtggcaatgtcttttaaaaagacaaaaataatgtttgctgcacccattgaccttccttctttaaaaatttccaacttttatttaaagttcaaggtacatgtgcaggatgtccaggtttgttacaaggtaaacgtgtgccatcgtggtttgctgcacagatcatcccattacccaggtattaagcctagaatccattagctattctttctgatcctctccctcctcgcatcccctgacctccaaaagtccccactgtgtgtttttaccccccatgtatccatatcttctcatyatttagctatcacatataagttaggacatgtggtatttggttatctgtttctgcattattttgctatgaataacagcctccaactccaaccatgtccctgcaaaggatatgatctcattcttttttagggatgcatag

SEQ ID NO: 306853 - DNA, 612 bp, Homo sapiens
aaaacacagtattgttgtagtgtccatactccactccccaaatagatatacagatttaatgcaatccctatcaaaatcccaactggcttcttccagtaaattgacaaactaattctgaaattcacaaagatattcaagaaacctaaagatagccaaaaamgtcttaaaataaagaacaaagttgtactttgtgatgccaaggcaggtagatcacttgagcaaaggagtttaagaccagcctgggcaacataaggagactcttgtctttataatactaataataatatattagccaggagaggtgacacatgcctgtggtcctagcaactcagtaggctaaggtgataggattgcttgagcctgggagttcaaggctgcagtgagccatgatcacaccactctacttcagcctgggaaacagagtaagatcctgtctgaaaataataataataataataacaaagttggaagatttacactttcttctttcaaagccaactacaaatctataataatcaaatgagcctggtataggcatacaaatagacatatatacaaacaaaatagattttagaacccagaaacatacccacatatttatggttttttaca

SEQ ID NO: 306854 - DNA, 522 bp, Homo sapiens
ccagcctgggcaacataaggagactcttgtctttataatactaataataatatattagccaggagaggtgacacatgcctgtggtcctagcaactcagtaggctaaggtgataggattgcttgagcctgggagttcaaggctgcagtgagccatgatcacaccactctacttcagcctgggaaacagagtaagatcctgtctgaaaataataataataataataacaaagttggaagatttacactttcttctttcaaagccaactacaaatctataataatcaaatgagcctggtataggcatacaaatagacatatatacaaacaaaatagattttagaacccagaaacatacccacatatttatggttttttacaaagatgccaaaacarttcaatgaaaaaattgaacagtcttgaacaaatgcttattgaataacggattgcccacaaacaaaagaataaagtttgacttctggtctcaagccatttacaaaactactaaaagtaggtcaaaggctt

SEQ ID NO: 306855 - DNA, 600 bp, Homo sapiens
taaatatgtgatatatcctaataactaatgttttcccctcaaaagatttccatcataatttaccattactgaatgtatgaaaaatttaaattgtcacattccaggggctatttgtgttctctgtaccaatagtgatagggttctcattacacttggtagtgaataatccaactctacaatctcattttcttgtctgttctttttttctgacctctcttggtacatattatcaaatgctcagtgccttgaagaagtagattctaagctgaatattttttgagggagataattagggagttttcctggaaataacatctgtgaaaaagtaggaagcaggattggacagtggaacaaattaggacataattcagtgcaatggtctgaatgtctgaatgcccccaaaattcataagttataattmtaataaccaaaattactgtattagctgatagaaccatttaggaggtgtttaggtcatgaaggcagagtcctcattaatggaattaattcttttgaaaaatatgctcacaataactcattcatctctttcccccattaagacatggtgacgagttgccatcttggaggaatgcccaatac

SEQ ID NO: 306856 - DNA, 584 bp, Homo sapiens
ttacttgctttcactccagcatttaaaccattcatccctgagattccagaggtctacatgttacagcaaaaaaaggtcattttaccctataagaacaggtgtttttccaccttatgccaagcctgcaggacaactcaggaaagctccctggggcaacttatgtctcaacgtcatacctgcatctcagagaatccaagaaaaaaatgaaaagtgcttgcctaataaaaaccaaataatttctaccacttgtatctgaaaagtgcccttagttcataataacaattatttattctatagaatattccttatgagagaacacaagaatctcatgtgttttaaattaatatcacacttttaagatatatatagatagcaattattctttgcaacattattatacagtctcttaggggatcatttctgtttaccttcttattagcatcaacatacaactaaaatcttattcaatggctaaaacataatatccatgttgaatgcaaattatataaggtctacatgktaactttctcgtgagataaaagttgatgaaatactaataaaaattcaaagcaatctaactttat

SEQ ID NO: 306857 - DNA, 370 bp, Homo sapiens
gttggtagagaagtaggacaagtgaaagaatgactaatagtacaatcatgataattgctartacttactgttgttactaaatccaagtcaatagttttgaaacctgtcccctaattgtttattacataaaataattgtattacaaattgcttgtttttccattaagtatatctttcaaatttttaaattttcaatttttaaaaatttttgtggttacctagtaaatgtatatatttgtggggtacatgagatactttgatacagggatgcaattggaaataagcatattatggagaatggagtatctatcccctcaagcatttttactttgtcttatgcacaatataattacactattttagttatttaa

SEQ ID NO: 306858 - DNA, 577 bp, Homo sapiens
agttttgaaacctgtcccctaattgtttattacataaaataattgtattacaaattgcttgtttttccattaagtatatctttcaaatttttaaattttcaatttttaaaaatttttgtggttacctagtaaatgtatatatttgtggggtacatgagatactttgatacagggatgcaattggaaataagcatattatggagaatggagtatctatcccctcaagcatttttactttgtcttatgcacaatataattacactattttagttatttaaaaatgtacagtgaagttattattgactatagtcaccctgttgtgtgatcaaatagtatgtcttattcctttttacrtacctgttaaaatccctgcttacccccatgcccccagtacccttcccaggctcaagtaatcagccttctactttctatgttcattagtttaattaagttttagatcccacaaataagtgataacataccatgtttgtctttctgtgcctggcttatttcacttagcacaatgagctccagttccatccatgttgttgaaaatgaatggatctcattctttttc

SEQ ID NO: 306859 - DNA, 586 bp, Homo sapiens
tggtttcttttgcttaggatacctttgactattctgggtcttttcyggtttcatatacattttgagatttttttctatttctgtgaagaatgtaattggtattttcatgattttattgcatcagtagattgttttgcttaatatagaaatgttaacaatatttattcatctaatcaatgaacatggaatattttttcatttcttggtaccctctaatttcttacatcagtgttttcttacatcagtgttaatttcttacatcagtagttttcattatagagatctttcagtcctttaattcctagatgttcaattttatttgtgactattgtaaatgggaatacttttttgatttctttttcagctgctcattgtaggcaaatagaaatgttattgattttgtcttgttaatttcatgttctgcaactttattgaattgttcattgtaaaaatttttcactagaacatgcttggatcaaaatatctcatgtaccccgtaagcatatccaccaactatgtacccacaaaaatataaaatactttaaagcaatgaacaaatttttttaaaaatatactattgagagct

SEQ ID NO: 306860 - DNA, 517 bp, Homo sapiens
aggggatattaattggctgcacctgatgataggtattgctacttatcgactcaaacacctttatcagaccctccaaggagattcttcattagactctccttggcaacttactaaggaggcagaagctgaattacagcttgtagaacaaatgcttcagtgaagacatgcctcctggctacagccacaaaagcctttgtttctgtttattcttccaaccccctactctccaataggacttttgggcccatttatagacaagtttgtaayggtaatagaatggctttttctatccaatcaaacagtaaaatctttacaagtttatctttctttaattactcaacttataactatggataggcatcgatcaaaaatgtttacaggatatgacccagacaaaattattgttcccttggatttccaacaacaggctgcagcatgggaaatgttgactgcttggcaaattgctcttgtggattttgtagtaataatagacaaccactatccatcaggcaagttt

SEQ ID NO: 306861 - DNA, 517 bp, Homo sapiens
aggggatattaattggctgcacctgatgataggtattgctacttatcgactcaaacacctttatcagaccctccaaggagattcttcattagactctccttggcaacttactaaggaggcagaagctgaattacagcttgtagaacaaatgcttcagtgaagacatgcctcctggctacagccacaaaagcctttgtttctgtttattcttccaaccccctactctccaataggacttttgggcccatttatagacaagtttgtaacggtaatagaatggctttttctatccaatcaaacagtaaaatctttacaagtttatctttctttaattactcaacttataactatggataggcatmgatcaaaaatgtttacaggatatgacccagacaaaattattgttcccttggatttccaacaacaggctgcagcatgggaaatgttgactgcttggcaaattgctcttgtggattttgtagtaataatagacaaccactatccatcaggcaagttt

SEQ ID NO: 306862 - DNA, 577 bp, Homo sapiens
caggagcttcatatagtgtgagggagctactctagggggtgagcagatctccactggagaaagtcctggtgacctctcccactgtggttcaagtgccccctgtgagacacagcaaagtgatgatgagggtcccccacattcagttatacatagcacatcaaattcacagtgtgatttcaggacaaaaggtgtcatagtcatacctaagcaatgacctgagaaataagatcacttaattatgtaactatatagtatataatactgtattataaatggaattctcagaactatttcccagaaattccaaaccacaataccagactgctgaatgtcagtgattcttatacttcagcttttaaggtgtttttggggggtgggggtgtcgggggcagtgaggggtagtggggtaagactaggaaaccctaactttaagtgaaatataaagggttagagagctagaagctaaataaatgtagatataatatcattccaattgtaactaacttttcctcawtgctcatagtcatgtaatggctccaatgactcctaactaaaagaactgaacagaaaaaaataa

SEQ ID NO: 306863 - DNA, 429 bp, Homo sapiens
ttttctctggggtcgatgatcagtaacatgtcagaagaaagtgccaacatgattgcatcagcccttgcccagatcccacaaaaggttagataaagtgccttaactgtggatggctactaaatgaatctgttaaactcttcaagagtccattacagaaatgttctgcctgaaaatttaactgctatgatagttctaattatctcagacatctgttcaaarcaaaaacatatatggaagatcttaaaatcataaagagaggagttttggttgataataacgttggcattaatattgtgatcagaaggaaatatatttaagaggtgctagtgaagtttggtattatcatggtatcgtagcatgtacatagaaatcactaaattctgccctgtcatttgctccttttggtttacaggattttagaaggtactg

SEQ ID NO: 306864 - DNA, 682 bp, Homo sapiens
atcaaacatacattacatttattaatgtaattgatgtaactaacatacagtgtatgttgaaaaaaacaaaaagggggagtaggagaccagctaccacctcaaataaaattacatttagccttatttactttaaattttttagctcctgttacagataataagactccggcggaatgacagtggcaaatgttaaagggaaaaaagaaagtttacctaaaggtattatagaagtccccagaagaagggcaatggaaaggcccagtagatttactaacgtggggatgagggtatgcttatgtttttacaggacatggacaaactgtgtgggttcccccaccatgtatgtgaccatggaatgggagactggagggacccatggatcccaaccatgggcccagctcctccaatatgagccatgagccagttgaatctgaatgcaaagacatggggacagatcaagaaaaccacacaaaaagctgagaaactgctagagcrtcagggtgaggcaaaaaccccttactccaagtttatggccatgtcagctgtaatatcctgtgcagtatgttttccctgtgcagaggcaaaaacatattgggcatatgttcttaacctcccagtagtatgaccggtactctggactggcaatcctcctgagttatatcatgatcaaggagtatgggca

SEQ ID NO: 306865 - DNA, 559 bp, Homo sapiens
atggtcatttcaattgatgatgaaaaagcaattgataaaattcaacatcttttgataataaaaaccctgttaaaaatggggatagaaaaaacataattaaacataataaaagccatatacaacagacctatagctagtattatactgaatgcagaaaagcttttcctctgaaatctggaatatgacaaggatgcctgccgtcatgatgttattcaatatattactgaaatcctagtaagagcaatcagacaaaagaaagatataaacggcatccaaacaagataagaagaagtcaaattattcttgtttacagattataygattttaaatttggaaaaacattacgacttcacagaaaactattaaaactgataaattcagtaaagttgcagcatacaaaaaaatataaaattagtaggagttctatatgtcaatagagaacaatgtgaaaaaaaagctattccatttacaaatagccacacaaaaattaactacctaggaattaaccaaataagtaaaatatttttgtaatgaaaactataaaatgctgatgaaagaa

SEQ ID NO: 306866 - DNA, 419 bp, Homo sapiens
gggtggtttttttacagagacactttgaaatgagtgataatattacagacaacatagtggatgcattaaccaacaagaagatgctggtgatattcacacggttcagggtctcagcatgagagtgttaatctcttagggcacaattgcaactacaatttttaattaaaaattaaaagagcctatatccatgtatccctgtgatgtgttacggatccagacacagagctagggaaatgtacatgtataaggtggcaactaggtttttgagagaaaaagactaaaaaagaaatgaaattcttaaagaaaatgaatgttctgtaaaaacaacaaaacatytttttcttaaattggaaaaaaattaatttcataccatggaagtgtttccattcttattttctccccatttttgtgttgctttt

SEQ ID NO: 306867 - DNA, 550 bp, Homo sapiens
ttttgaaaaatttctattctgttttccatagcagttgcttgtaccagtttgcattcccaccaatagggcacaaaggttccaatttatccacrttctcataaaacttgctgccttttttttttttttttttttttgtggtaacagccatcctaacgtgtaaagtgatatctctttgtggctttgatttgccttttcctgactgtaagtgattttgagtatcttgtttatatatctgttggccatttgtatgccttctttggagaaatgtcttcaagtatttagttcatttttaatgaaattattaatagtctgctactcagttgtagggattacttttatatttttggatttaatctctcaccaaatatatagtttccaaatattttctctcatttggtaggttgttttttcactctgattgtttcctttgctttgcagatagatatatagaccaatgaatagaattcaaagcctagaaataaatcagcacatacatagccaactgatcttcaataaaagtgacaggaatatacaaaggggaaaagatcat

SEQ ID NO: 306868 - DNA, 581 bp, Homo sapiens
tgatggcagcaaccgctccagatagccttccactgcyatcacactggctgcagcagggaggtgtggcccggcctcctactccacagagcaggcagaagcaacaccctcctgggtggggctgtagcagcccaagttgtggctgtagatctcagtctccctgagctctcgaggggctgggagtgggcagaagccatgccctcccaggcacagctgtagccacccaaattgcagctgcagactgagacatccctacactcttaggggcctgggaaggacttcctgccctttcaggctcagaagttcctgctcatattgcctggcttctccctgctcttggcacctgctccaatcttggagcaaagttggggctgagcctgggcatcaggctcaaggagggcatgaagcctgggggccaggctgccagtcctatagactggagtgggaatatgtggtgccttttccgggcccattcttagtcactcatgaatgaatagtcacacacttcctctcctctgaggctcataaaagccccaggatcagccacagctaagcaaaagatggtcagtagcagagacaagcta

SEQ ID NO: 306869 - DNA, 581 bp, Homo sapiens
tgatggcagcaaccgctccagatagccttccactgctatcacactggctgcagcagggaggtgtggcccggcctcctactccacagagcaggcagaagcaacaccctcctgggtggggctgtagcagcccaagttgtggctgtagatctcagtctccctgagctctcgaggggctgggagtgggcagaagccatgccctcccaggcacagctgtagccacccaaattgcagctgcagactgagacatccctacactcttaggggcctgggaaggacttcctgccctttcaggctcagaagttcctgctcatattgcctggcttctccctgctcttggcacctgctccaatcttggagcaaagttggggctgagcctgggcatcaggctcaaggagggcatgaagcctgggggccaggctgccagtcctatagactggagtgggaatatgtggtgccttttccgggcccattcttagtcactcatgaaygaatagtcacacacttcctctcctctgaggctcataaaagccccaggatcagccacagctaagcaaaagatggtcagtagcagagacaagcta

SEQ ID NO: 306870 - DNA, 581 bp, Homo sapiens
tgatggcagcaaccgctccagatagccttccactgctatcacactggctgcagcagggaggtgtggcccggcctcctactccacagagcaggcagaagcaacaccctcctgggtggggctgtagcagcccaagttgtggctgtagatctcagtctccctgagctctcgaggggctgggagtgggcagaagccatgccctcccaggcacagctgtagccacccaaattgcagctgcagactgagacatccctacactcttaggggcctgggaaggacttcctgccctttcaggctcagaagttcctgctcatattgcctggcttctccctgctcttggcacctgctccaatcttggagcaaagttggggctgagcctgggcatcaggctcaaggagggcatgaagcctgggggccaggctgccagtcctatagactggagtgggaatatgtggtgccttttccgggcccattcttagtcactcatgaatgaatagkcacacacttcctctcctctgaggctcataaaagccccaggatcagccacagctaagcaaaagatggtcagtagcagagacaagcta

SEQ ID NO: 306871 - DNA, 628 bp, Homo sapiens
gagcatttggtttagtcatcaggagtgtaaatgagaacaatgtggtatctgtctattcttagaagtaagtaggatataacaattgagagtgtttttttccctgttgaaggaacccgcacgaatagggcaagaggcttttttccccaggctctttcccctaccatggacttaagttgtactattgggaggcaccttgttaggccaggtccccaattcccatgactccctttctcttccttggttgaggaggacctggtcccacagtttaatagggaagcagcagagaggctgccctgctggttgctggctgtaatttgtcaagggccacctgggactaatttaatgggtcccatgtggccttgaggcaccttttctcccaagctttggtttgaggccctagaaaggccccatgacttcctttctcttccttggttgagggggaactggtcccacagtttaatagggaagcagcagagaggctgccctgctggttgctggctgcratttggcaagggtcacctgggattaatttaatgggccccaggtaggcttgagccaccttttctctcacgctttggtttgaggccctagaaaggcaaactagatctgagcaagccagaggcagaaa

SEQ ID NO: 306872 - DNA, 513 bp, Homo sapiens
agacactttgtcttcccctagtggaggtcgatgttaacccagaagttagggcagctcaagggaaaattggcctaggcacaaaagtcacactggtctggatccatcttaagcatcctaatttctttcctaaccagatacgatattccctaaaaccagaagtcaggaaaagattagaagtcatcaatgctaacttaaggatgcagggcctcctcaaaccctataatagcccttgtaataccccaatattgtccagaacttctgcctcattarggaggctatggtttcaattcatccagtggttcccaatgcttataacctgctaattcaaatacctgagggaattaaaagtttcaaagtccaggacctaaaggatgcctttttctgcatatcattacatcccaactcccagtatttgtttgcattcaagaatccctccaataagccacccagttaacctggacagtgttaactcagggattctgagacagcccccacttgtttggacaagcattg

SEQ ID NO: 306873 - DNA, 622 bp, Homo sapiens
gtatttgtttgcattcaagaatccctccaataagccacccagttaacctggacagtgttaactcagggattctgagacagcccccacttgtttggacaagcattgtcaaaagatctcagtttctttttcctcaggttaaagttttacaatatgtagatgatattctcctttgtgcctcaaatgaggaaatttctctggagggcaataaggcccttcttaattttctggctaacagagtatataaggtctcaaaatctaagcctcatctctgtcagacttcagtgaagtacttaggtctagtcttatcagaggggaagtaactaggtctagtttcgtgaaggcactaagcaaagaaaggatcaagcccatctccttcgttcccctccctaaaactctcaagcaactgaggggattcttaggcattacaaaattctataggttatgaatacctggtgatatggtttggctgtgtttccatccaaatctcatcttgaattcccacatgtgagagggaccaggtgggaggtaattgaatcactgggatgggacaggtctttcctgtgctgttctcrtgatagtgagtagtcttatgatatctgatggttattataagggggagttt

SEQ ID NO: 306874 - DNA, 526 bp, Homo sapiens
acactaataatagccagcaataaaactttcagtgttggaagaaacctgttacctggagcatggaatgagaatgaggctgaaatgagaacatatttcatggaaaaattggagaaattcaaatcagaacattctcatgtcatgtgccctgagggtaattaagaaaatgtcagatgtcattgatgaaccatttgccattatcttaaggaaatcatgcaggacaaggattctctgaggactggagaaaggaaaatgttgtgtccatccttatttttctttaatgaccttgctatatacaggtcaactgaaaaatccattctagaataaataattaatcccaaagaatcaaagttagtaattttcttgggcaactatatgtaatatgtttaacttaagaaaartgctgaacaaaaaagctaaaacagcttgttttatttaatattctgtgcaatatcttggttggcaaaacaaacaattttagaagtaatttttgaaaacaacttatttaggcacttatatatgcagtaag

SEQ ID NO: 306875 - DNA, 557 bp, Homo sapiens
tgatataatcacaattgtctattcttaggttccctatgcttttgtggtcttacacaaaagatctttgcccaggccaatgtcctggagtgtttctccaacggtttcttttagtagattcatagtttcaggtcttaggtttacgtctttattcattttgatttgatttttgtgtatgtcgagagacaggggtctagctttgttctgcactttatttatycagtttccccaggactactcactgaagactgtcattttcccattgtatgtctagtatcctagtcaaatattagttggttccaaattcatggatctatatctgggttctctattctgctccatcagtccatgtgtttgctgttaagaaaatatcatgctgttttagatacagctttctagtaaattttcaagtctggtatgtaataactccggctttgttctttttttctcaagattgctttggctgtttgaggtcttccatggtttcatgtaaattttagaacattaattctatttttgtggattatcatgtattcctgctattagtctaatatcctgac

SEQ ID NO: 306876 - DNA, 470 bp, Homo sapiens
agtgtaattttgaaaaacaacaaacaaacaaaaaacctaagaaacaaaaatctcaacaacttaaattaaatcaggccctccaatggcttccatcagtctggagtaagttcaaacacactgagaaccctgttaagcttttccagagtgaycagggctgggttatgttttagcattatccccttccattatttttctattatatttctcctctagccacattggctctcctctgtccctggaacatattccacagattcatttctctaaattttacctttgctgtttcttcttttcagaatattcttcacttatcatttttcatagtagacttttttcgcttcaggtgatgctacaggctgagttgtgttcttcaaaaacttacattaggatccttaatctactatgtgactatatttggtgatacattgattaggtagtaaagttaaatgcatttgtaagggaggggggaa

SEQ ID NO: 306877 - DNA, 657 bp, Homo sapiens
ccagggctgggttatgttttagcattatccccttccattatttttctattatatttctcctctagccacattggctctcctctgtccctggaacatattccacagattcatttctctaaattttacctttgctgtttcttcttttcagaatattcttcacttatcatttttcatagtagacttttttcgcttcaggtgatgctacaggctgagttgtgttcttcaaaaacttacattaggatccttaatctactatgtgactatatttggtgatacattgattaggyagtaaagttaaatgcatttgtaagggaggggggaacgttctacaagactttgggtcttataagaagaggaagagagagagcaagtgtgtgctgaggacaaagtacaaaataccttgcacaaagcaagatggtagctgcttacaagccagaagaagaggcctcagaatgaatcctacatgctggcaccttgatcttacacttcctaacctccaaaatgatcagaaataaatttctgtgtttaagacacttgctttataatattttgttatagcaacctgagcagactaagacaggtggcgactaaaatggcacccccttagatagaactttcttggctgctcataacctctaactagtctgaagattaaca

SEQ ID NO: 306878 - DNA, 657 bp, Homo sapiens
ccagggctgggttatgttttagcattatccccttccattatttttctattatatttctcctctagccacattggctctcctctgtccctggaacatattccacagattcatttctctaaattttacctttgctgtttcttcttttcagaatattcttcacttatcatttttcatagtagacttttttcgcttcaggtgatgctacaggctgagttgtgttcttcaaaaacttacattaggatccttaatctactatgtgactatatttggtgatacattgattaggtagtaaagttaaatgcatttgtaagggaggggggaacgttctacaagactttgggtcttataagaagaggaagagagagagcaagtgtgtgctgaggacaaagyacaaaataccttgcacaaagcaagatggtagctgcttacaagccagaagaagaggcctcagaatgaatcctacatgctggcaccttgatcttacacttcctaacctccaaaatgatcagaaataaatttctgtgtttaagacacttgctttataatattttgttatagcaacctgagcagactaagacaggtggcgactaaaatggcacccccttagatagaactttcttggctgctcataacctctaactagtctgaagattaaca

SEQ ID NO: 306879 - DNA, 657 bp, Homo sapiens
ccagggctgggttatgttttagcattatccccttccattatttttctattatatttctcctctagccacattggctctcctctgtccctggaacatattccacagattcatttctctaaattttacctttgctgtttcttcttttcagaatattcttcacttatcatttttcatagtagacttttttcgcttcaggtgatgctacaggctgagttgtgttcttcaaaaacttacattaggatccttaatctactatgtgactatatttggtgatacattgattaggtagtaaagttaaatgcatttgtaagggaggggggaacgttctacaagactttgggtcttataagaagaggaagagagagagcaagtgtgtgctgaggacaaagtacaaaataccttgcacaaagcaagatggtagctgcttacaagccagaagaagaggcctcagaatgaatcctacatgctggcaccttgatcttacacttcctaacctccaaaatgatcagaaataaatttctgtgtttaagacactkgctttataatattttgttatagcaacctgagcagactaagacaggtggcgactaaaatggcacccccttagatagaactttcttggctgctcataacctctaactagtctgaagattaaca

SEQ ID NO: 306880 - DNA, 610 bp, Homo sapiens
atgaaaggtctggccttatacagagttgtataaaaaattagaagttacttttccttggaagagtttgtaaaaaagctaagtgtatgcctgttaaaataagtctattatgtccctgtaggacacttaagttaattgcaataacaagctatatatgattttatattagaaaaaaatccttggcttcttgtgagacaaaaagacaaaaggtaaaggaaagctttttgtcatacagattttctattaaatctctctctctctccctttttctcatactttttctattataaattagaaataaagtttaaatcacttagaagattattttttatacctaagaagccagacaggagtataatctattctgaaattcatgagaaaatcctttaaaatgtcagacaacagttaaaacaytctatgattagggcatattttaattttcttaatgtcaaaactctgctgtgggaaaagcttatgcacactcatttgatattcacatgagctgatattaaaatggagccatactctcagaagtatcgatatcagggattgagaatatctttaaaaaaaagaccagtctgaccttcagggaagtcagtacagaatgagttga

SEQ ID NO: 306881 - DNA, 568 bp, Homo sapiens
ttcaggtattcttgtttcctctaacaactgaatatacatcttaataaaaatatgtaactagagcttatggcaattctcaaaaattttaaaatatcactttggtcagtcaataatatgtgctaggtgcattccagttccaaaatattattgaaggtgatacaaacaaaataaattgtataaatgctgaggttaaaatgcttacagactagttgggaatacatagcatatgtctttgaaaaaaaggaattaaatgtatatagggaatgatatattcaggagtataaatgatttcatattataatgttcaatatatactgaatattgtcggcaaagttaattgagaaggatataaagagtgaaatgataaaatataaaccttaagtccatatgaatagtcatggctttcttctctgaacactactatcaggtatagttttctccactggaagacttaatttagatacaattttaatttgaaaagatattgtawcaaatgacagctagcgcatagatttttacaagccattggatcaacatgactgtgactcattacaaaagcaaatgctta

SEQ ID NO: 306882 - DNA, 562 bp, Homo sapiens
tggcctgcttaatctttgaaactggaactattatttaggcagggaaaatattaggacctctagaatcgtagcttatagtagtagcatctgatctgtcttgctatgaatttctgttttatttttcacctgatccttatttacagactcttgccacgttccctagtcccaaacccattctcccagtttgatttctatttacagccatgttttaaaaatgtgtttgtttgtttacttgtttttaaacctgtgtctgagttctcatcattgaaatctgcttagttccccamcttttctaagatcccatcatccctgttttctaatccactactcctaagtacttagttgctgcatttttagactgataatgatgcctatgtcccacttgtttgttattggtctttcctggaaccagtttcctcttttttatattagtgttggtttctgagcaggtctccccagcattattgaacctttttttaattatactttaagttctagggtacatgtgcacaatatgcaggtttgttacatatgtatacatgtggcatgttggtgtgctgcg

SEQ ID NO: 306883 - DNA, 562 bp, Homo sapiens
tggcctgcttaatctttgaaactggaactattatttaggcagggaaaatattaggacctctagaatcgtagcttatagtagtagcatctgatctgtcttgctatgaatttctgttttatttttcacctgatccttatttacagactcttgccacgttccctagtcccaaacccattctcccagtttgatttctatttacagccatgttttaaaaatgtgtttgtttgtttacttgtttttaaacctgtgtctgagttctcatcattgaaatctgcttagttccccaacttttctaagatcccatcatccctgttttctaatccactactcctaagtacttagttgctgcatttttagactgataatgatgcctatgtcccacttgtttgttattggtctttcctggaaccagtttcctcttttttatattagtgttggtttctgagcaggtctccccarcattattgaacctttttttaattatactttaagttctagggtacatgtgcacaatatgcaggtttgttacatatgtatacatgtggcatgttggtgtgctgcg

SEQ ID NO: 306884 - DNA, 562 bp, Homo sapiens
tggcctgcttaatctttgaaactggaactattatttaggcagggaaaatattaggacctctagaatcgtagcttatagtagtagcatctgatctgtcttgctatgaatttctgttttatttttcacctgatccttatttacagactcttgccacgttccctagtcccaaacccattctcccagtttgatttctatttacagccatgttttaaaaatgtgtttgtttgtttacttgtttttaaacctgtgtctgagttctcatcattgaaatctgcttagttccccaacttttctaagatcccatcatccctgttttctaatccactactcctaagtacttagttgctgcatttttagactgataatgatgcctatgtcccacttgtttgttattggtctttcctggaaccagtttcctcttttttatattagtgttggtttctgagcaggtctccccagcattattgaacctttttttaattatactttaagttctagggtrcatgtgcacaatatgcaggtttgttacatatgtatacatgtggcatgttggtgtgctgcg

SEQ ID NO: 306885 - DNA, 562 bp, Homo sapiens
tggcctgcttaatctttgaaactggaactattatttaggcagggaaaatattaggacctctagaatcgtagcttatagtagtagcatctgatctgtcttgctatgaatttctgttttatttttcacctgatccttatttacagactcttgccacgttccctagtcccaaacccattctcccagtttgatttctatttacagccatgttttaaaaatgtgtttgtttgtttacttgtttttaaacctgtgtctgagttctcatcattgaaatctgcttagttccccaacttttctaagatcccatcatccctgttttctaatccactactcctaagtacttagttgctgcatttttagactgataatgatgcctatgtcccacttgtttgttattggtctttcctggaaccagtttcctcttttttatattagtgttggtttctgagcaggtctccccagcattattgaacctttttttaattatactttaagttctagggtacatgtrcacaatatgcaggtttgttacatatgtatacatgtggcatgttggtgtgctgcg

SEQ ID NO: 306886 - DNA, 397 bp, Homo sapiens
cacatggtaggtgtagtagattgcaaaaattattgaaatttttcatccttctatgtaatcaggacttttgctatgtgtcacagtttcttttactaaagagacacagtatatttttcttcatcttggatttctgtttgactatatgacttgctttggtcatttttttaaaacaaagaattgtcactgtgtcagttccaagtctagatgttagagagactttcatatatctgcttatctcactgcacttctacctttgttatgagcagaacackcctgggcagacccatgtctcaagaagaaagatattggaagcagacctgaattcctgaggtctgaccaggaccaataacaatatccagtaccttccaaccaagcccattctagatcagtcattatc

SEQ ID NO: 306887 - DNA, 204 bp, Homo sapiens
tgtagttcttaatatttttgtggcccaaaacacaatttttaaaattgattgtacacatagaaacgcctttctctttctgaaagcagagtgaaaattcayctacatcttcttgtagtcatttttaggcatttcctttgtaagttcatctatgatttgtcctattgaattgtagccagttgctttgacctgaatttcttccctctt

SEQ ID NO: 306888 - DNA, 593 bp, Homo sapiens
taatctgcatgattaatgattttttaaagcaatgagactcttatatgtgccaataaagaaatcatagaacacaatggagagtagttttgtgaaatgaatagtcgtttaaataaaaaattkttcttttcttttttaaaacagtgctttaattttaaaatttaaataacaaaacttcactatagagggtccttataactcctccatttcaattttttatcacttatcacagaaatctagacagcagtggtacttttttgttataatctcactgatatatagggtcaagtagtagtcattagcaacatccttcatttatttctcaggtaatcacatctctggaaatgtcctttcaaaaatatgtttgattatctttttaaaatagacttttaattatctttttaaaatagactattctcctctttcttctgcttttgttttttaacattatgactgcaagtatttgaaggtcaagattattttcttattttgtaaagatatgttgtggttaaaaaatagacacaaaagttagtggttttgtaggaagttaatttgttaccatcattacataaacaaatctgccctcaggattacag

SEQ ID NO: 306889 - DNA, 596 bp, Homo sapiens
aagcttataatctactcataagagcaaacatgaatgtatatgattttagggcgtattagttcattttcacgctgctcatgaagatatacctgggactggccaatttacaaaagaaagaggtttaattggacttacagttccacatggctgatgagggtaagcctcatcatggcgaaaggcaaggaggtgaagtcatgtcttacatggatggcatcaggcaaagagtgggagcttgtgcaggagaactytttttaaaaacatcagatctcttcagacttattcactatcatgagaacagcataggaaagaatgcccccatgattcaattacctcccacctggtccttcctacaacatgtggaaattcaagatgtgatttgggtggtgacacaaacaaaccatagcatttcgcccctggcccccattaatctcatgtcctcacatttcaaaaccagtcatgctttcccaacagtcctccaaagtcttaactaatttcaacattaacccaaaagtccacagtccaaagtctcatctaagacaaggcgagttccttctgcctgtgagcctgtaaaatcaaaagcaagttagttacttcct

SEQ ID NO: 306890 - DNA, 615 bp, Homo sapiens
atgacttttgcacttttgccaaagataagttgactatatttctgtggatctatttctgggttctctattctattccattgatctatgtatctgtccctccaccaataccacattgtcttgattactgcagtctggaagtgatttcttcccacttaattcttcattttcaaaattgttttgsctctcctagggcctgtatatttccatttaaattttagagcaagcttgtttataattataaaaaaaatcttgcttatattttgacaggaattgcattaaaactatagatcaatttggagaaaactgacatcattactatgttgagtcttccaatccatgaacatgatttgtttctccatgtatttatgtcttctttgatttctttcatcagcatttaataatttttatcatacagatcctatacatattttgttagattatacctaaatatttaaatttatttgaagctatttttgaaatggtcatttttcatttcagtttctgcatgtttaagtatatagaaatatgattgatttttgtgtgttgatcttgtgtcctctgaccttactgaactcatttattagttttcacggttttattatagattacttgagg

SEQ ID NO: 306891 - DNA, 589 bp, Homo sapiens
ccctccttccctctccccttctgagtctccartgtccattataccactctgtatgcctttgcataacatagcttagctcccacttgtaagtaagaacatacagtatttggtttttcattcctgagttacttcacttagaataatggccttcagctccatccaagttgctgcaaaatacattatttcattcttttttatggctgagtagtattccatggtgtatatatacattttctttatccacttattggttgatgggtactgagattggttccatatctttgccattgtaaattgtgctgtgatgaacatacacaaacaggtgtctttttgatataatgacttcttttcctttggacaaatagtagtgcacctctcagtatttatcgtatagaaagtgtcacacatgtggagctgcatataaggttattcataatagtgatggttataatagtaaaaataattagaaaaaagactaaatgtctatcagtggggaagtggaagaatcgctgaataaactgtggtttatccacattttaagatattaagcaatagtttttaaaaactgctatacctgtacctctcacat

SEQ ID NO: 306892 - DNA, 589 bp, Homo sapiens
ccctccttccctctccccttctgagtctccagtgtccattataccactctgtatgcctttgcataacatagcttagctcccacttgtaagtaagaacatacagtatttggtttttcattcctgagttacttcacttagaataatggccttcagctccatccaagttgctgcaaaatacattatttcattcttttttatggctgagtagtattccatggtgtatatatacattttctttatccacttattggttgatgggtactgagattggttccatatctttgccattgtaaattgtgctgtgatgaacatacacaaacaggtgtctttttgatayaatgacttcttttcctttggacaaatagtagtgcacctctcagtatttatcgtatagaaagtgtcacacatgtggagctgcatataaggttattcataatagtgatggttataatagtaaaaataattagaaaaaagactaaatgtctatcagtggggaagtggaagaatcgctgaataaactgtggtttatccacattttaagatattaagcaatagtttttaaaaactgctatacctgtacctctcacat

SEQ ID NO: 306893 - DNA, 568 bp, Homo sapiens
ttttagaatcctgttttatctttgactttagagagactgactataatgtggtggggagaaaacctttatgcattgtatttctggggatgtttgagccccatatagacatatggatgtcgaartctcttgctagacttgggaatttttcacctattatttcattaaataggattccatcattttgttctctcttcagccttgagaacactgataattcaaagatttgatcactttatggtatcccaaatgtcatgaaggttttgctcattctatttaattcttttttatttatttttttttctgactggattatttcaaaagacctgtcttcaagttctgaaattctttcttctgcttgacctaatctattgttgtaactttcaaatgtattttatattttattcaatgaattcttcagtttcagaatttttgttgggttcttttttaaaaaaatatctatttgaaaaatttctaattcatatcttgaattgtttttctgatttatttttgtttttcagatttctcatttatcttgctgagcttctttaaaatttgtattttcaatttg

SEQ ID NO: 306894 - DNA, 530 bp, Homo sapiens
gtccagtttcattcctctgcatgtggcaatccaattttcccaagaccatttattgaaaatgatgtcctataaagatgggaacaatagacagacactggggactgctagaggtgggagagaaagagggggctaaaggctgagaaactacctattgggtactatgttcactaccagagtgacagatttagtcataccccaaacttcagcattatgtaatatacctttgtaacaaacctgcacgtgtaacctctrattctaaaacaaaagttgaaaaagaaaaataaagggtgtcttttccccattgtgtgtttttgtcacctttgtcaaagaccagttggttgtagatatgtggttttatttctgtgttctctattctgttccattgatttgtgtgcctgtttttataccagtaccatgctgtttggttcctatagctttgtagtataatttgaagtcaggtaatgagatacctccgtctttgttctttttgcttaggattcctttggctattcaggctcttttttgtttac

SEQ ID NO: 306895 - DNA, 396 bp, Homo sapiens
ataccatatttaaaagtgatttacacacttatattacaatwctacacaataaacctttatcagaaggtttatattttcatatggttttgtgttgctatttatcatcctttttcttcaacttgaaggatccctttagcatttcttgtggggcagattgagtggtgatcaacttcctctccttttgtttatctgggaagtcttaatctctccttcattttagaaggacagttttacaaaatataatgttcttggtgggcaggttttgttcttcagtaattgaattattatttcactcctttctagcctgcaaggttttgctgagaaaccagctgatagtttaatagaagcttccttatatgtgatgagtcattttttttttgccactttcaagatcct

SEQ ID NO: 306896 - DNA, 595 bp, Homo sapiens
tatcatacagcaaaatgactatagttaatgatgatattgtattcttgaaaaacagagttgacgttacatactagcaccacaaaaataataactatgtgaagtaatccatttattaattggttaggtttagccattccaaaatgtatatatacttcaaaacatcatgtttacaagataacaaaacacagtatttgtcaattaaaaaaataaaacataaaagaaaaatttttckccagcaattttcagctgcttggctgcacaggaggtaggaacttgagtttaccatggttggggctttgtcagagaagtatggcacagagagaggggacaaggaagttaagaatgtttgcagggaattgattaaaatgatggaccatggaatatgggctctgtaaggagggaagtgaggacattaaggaggtaagtgaggacattaaaggaaacaagatgacagagagtgaaaaggagcttagggtcaatgaattggagctctttatggggttgaaggattatcggggtgaggagtgccagaataattgaactggaatggtaataagaggtggctagagtatggaatgttttaaatgaaaatttt

SEQ ID NO: 306897 - DNA, 544 bp, Homo sapiens
cgtgggatcaccgtagattctgtctgacataaattctgagaatagacctgaaaacttatacgctgaaaactacaaagcgttgctgatggaaactaacgaagacttaaataaatggagaaatgtctcatttttatacactggcaactcaatattgttacaatgtcaattctttccaaattgatctatacattcaatgcaatcataataaaaatttttgtagaaatagaacatttctctaagaattgacgaaattatttaaaaattcttatggaaatccaaagtacctaaaatgcccaaagtatccttgaaaaagaacaaatgtggaggaatgcttctatctgatttccagactaattttaaatcctcagtagtcatgacagtatggtatttgcataacaataaacaacagataaattgtccatttatctatggaacmgaatagggaatttgtaaattgattcaaacatatgtgaacatttttttaaataaaggtgagaaagcaatttagcagagtaagggtgatcttttcaacaaatagtgtggg

SEQ ID NO: 306898 - DNA, 566 bp, Homo sapiens
attttccaattatttttcctcttacaactttataccttcattctcattccattgtgatcagaacagacactgtgatttcaataattttagatttatcaagccttgttgtgtggcctaacatgtggtctatcctggagaatgttccatgtgcacttgagaaaatgtatattctgctgtcgttgggtgaagtgctcatatatgtcagttaggtccaattcatctatagagttatttaagtcctctagggcaaacaggaaggctagaggaggctggacttgggtatttctcttctcccatgtcagttaggctctgataaactccagcacaccaggcaatagtgaaatagcttcttttgatggcaggctttgttaagaaaaacagagtgctctggcgtgtttcaaaatgattactttttctctttccatgccagaaacagaaaggtgyttctcccatcttcaccatgaagatttagtccagctcttggaggtaaaactcatacaagtgtgggagtttccccatgactgggtctccctagaattttatctctcaggcttctcctcatggaa

SEQ ID NO: 306899 - DNA, 587 bp, Homo sapiens
ttgtgaaggattctactaacaagctgaatttttacatcatcatttggttttacatttcaatcaaatgaatcaacttgccagtttgaatgtcttattaaaatagtatcaccctatttaattatctagtttagacaaattaaggaaataccactttataacttaggaagccttatcaaggacacaataatttctgtatgcgtataatcaaaagactttcatccttacttaaattgattcctcagtattaaagacatatgtttgagaattgtgaccataccctaatataaatataaaataagtagcaggaaggagtgcaatggtggaaagaaaccacaaaccatctgctgtcttcagtagtgtacttgaatcaagttttgccaatcccgacccacctacctatcaatgtatgaccctaaaatggtagatttatagtcgtaagaggctttttttttwtaaaaaaaaacatctttcgtttctttatatcttcttaaaccgtgttccgaatgccagcgctggttttagttcagctgaagctgccttgaagataagagaagaagccagttccctgagcctgtaaaagctgtccc

SEQ ID NO: 306900 - DNA, 587 bp, Homo sapiens
ttgtgaaggattctactaacaagctgaatttttacatcatcatttggttttacatttcaatcaaatgaatcaacttgccagtttgaatgtcttattaaaatagtatcaccctatttaattatctagtttagacaaattaaggaaataccactttataacttaggaagccttatcaaggacacaataatttctgtatgcgtataatcaaaagactttcatccttacttaaattgattcctcagtattaaagacatatgtttgagaattgtgaccataccctaatataaatataaaataagtagcaggaaggagtgcaatggtggaaagaaaccacaaaccatctgctgtcttcagtagtgtacttgaatcaagttttgccaatcccgacccacctacctatcaatgtatgaccctaaaatggtagatttatagtcgtaagaggcttttttttttwaaaaaaaaacatctttcgtttctttatatcttcttaaaccgtgttccgaatgccagcgctggttttagttcagctgaagctgccttgaagataagagaagaagccagttccctgagcctgtaaaagctgtccc

SEQ ID NO: 306901 - DNA, 540 bp, Homo sapiens
attcaacttatgtaaatcagtgttttttaaatcagagagcattactgaaaatgaaatcaaattgaatttaatayataaagtttctgctttatttcagtttaaaatttctttcaaaaagaaatgttcagtcagaaactttgtatgaaaacatcatgcactataatttacttattgtttggaaaaccttcagcataaataatttcagtttcagcagatgagattatgataacttgaaagatagtactaactgactaataaaagagatgaaatcctttccatcagcatagctgaaaagaagtttcttcttttcagaagtacaattcaaagaggagtccctacagccctgcatttcttgggtttataaaataattataagatgtttgaaaaccaatgactataaactttcttatacctttctacctacaaaaaaaagtttctgattttatggctgaaaagtaatgtcttaatacagaaaatttgaagaacacagaaattacacaaacacacacacacgcacgtgcgtgtacacaggaagcaagt

SEQ ID NO: 306902 - DNA, 540 bp, Homo sapiens
attcaacttatgtaaatcagtgttttttaaatcagagagcattactgaaaatgaaatcaaattgaatttaatatataaagtttctgctttatttcagtttaaaatttctttcaaaaagaaatgttcagtcagaaactttgtatgaaaacatcatgcactataatttacttattgtttggaaaaccttcagcataaataatttcagtttcagcagatgagattatgataacttgaaagatagtactaactgactaataaaagagatgaaatcctttccatcagcatagctgaaaagaagtttcttcttttcagaagtacaattcaaagaggagtccctacagccctgcatttcttgggtttataaaataattataagatgtttgaaaaccaatgactataaactttcttatacctttctacctacaaaaaaaagtttctgattttatggctgaaaagtaatgtcttaatacagaaaatktgaagaacacagaaattacacaaacacacacacacgcacgtgcgtgtacacaggaagcaagt

SEQ ID NO: 306903 - DNA, 563 bp, Homo sapiens
ctgagtcggggtgagggcacatgccttctcactctcatatcagtctcctttctacccaccaggctgcttccaagaaatccatctattgtaatatggttttgtataggaatcttacatgcaagggctgggcaattttgatatccttttagragaaaggtaagagaagaaagtctaagccaccaaggagagcaattagaatgcaaacaggtttgatctgtccaaagaaggcactttaaaggaagcgtgcgctcattaaccacatcatttgctaaccgggccgccagagccccagtccccactgtgccagccccaagctcactgccaaccacagcccgtctgatgatgaaagcagctgagccctggcaaccccgcggcggtctcattggggaagatctggagagggaagaaagacgcagacaccccatcatcgtaaaatacagtttgaataattttgagaaacaattgttcaggaggcgaacttctaaatctccagggctgtgccacagaggggaacttctttatcaaagaaaagtgcacgcggagggggtgggaaatggcaaact

SEQ ID NO: 306904 - DNA, 563 bp, Homo sapiens
ctgagtcggggtgagggcacatgccttctcactctcatatcagtctcctttctacccaccaggctgcttccaagaaatccatctattgtaatatggttttgtataggaatcttacatgcaagggctgggcaattttgatatccttttaggagaaaggtaagagaagaaagtctaagccaccaaggagagcaattagaatgcaaacaggtttgatctgtccaaagaaggcactttaaaggaagcgtgcgctcattaaccacatcatttgctaaccgggccgccagagccccagtccccactgtgccagccccaagctcactgccaaccacagcccgtstgatgatgaaagcagctgagccctggcaaccccgcggcggtctcattggggaagatctggagagggaagaaagacgcagacaccccatcatcgtaaaatacagtttgaataattttgagaaacaattgttcaggaggcgaacttctaaatctccagggctgtgccacagaggggaacttctttatcaaagaaaagtgcacgcggagggggtgggaaatggcaaact

SEQ ID NO: 306905 - DNA, 563 bp, Homo sapiens
ctgagtcggggtgagggcacatgccttctcactctcatatcagtctcctttctacccaccaggctgcttccaagaaatccatctattgtaatatggttttgtataggaatcttacatgcaagggctgggcaattttgatatccttttaggagaaaggtaagagaagaaagtctaagccaccaaggagagcaattagaatgcaaacaggtttgatctgtccaaagaaggcactttaaaggaagcgtgcgctcattaaccacatcatttgctaaccgggccgccagagccccagtccccactgtgccagccccaagctcactgccaaccacagcccgtctgatgatgaaagcagctgagccctggcaaccccgcggcggtctcattggggaagatctggagagggaagaaagacgcagacaccccatcatcgtaaaatacagtttgaataattttgagaaacaattgttcaggaggcgaacttctaaatctccagggctgtrccacagaggggaacttctttatcaaagaaaagtgcacgcggagggggtgggaaatggcaaact

SEQ ID NO: 306906 - DNA, 510 bp, Homo sapiens
gactttaaaaatgactgtgactgccgctgatagcagcccggctaaatgtcatgtgaatctgtcctcctcctgcagcctatgcttacacccatgaagaatttctcctggtgagagtggtgtacacaccagcaagctgaacgagcttacctcatttgctcactattccccttgcacaggatttgtttttttttgaagcggtgtrctcttatcactccttaatcttgtgagtctcttcatttattgtactggggtgggaggaagcctgcatacaagcacagacatatggtttttatttaatgagctaatgaaaagaatgcatttcaagacatagcacatattacggtgactcaaattgcttatgctatttcatgtttttataagttaccatctaatttgtcattacaattcaaagtaacttcattttcccctgtggagtactgaaaattactgtaacttataattttatggtaattatagtgagaactcccataattagtgtagcaagttcac

SEQ ID NO: 306907 - DNA, 510 bp, Homo sapiens
gactttaaaaatgactgtgactgccgctgatagcagcccggctaaatgtcatgtgaatctgtcctcctcctgcagcctatgcttacacccatgaagaatttctcctggtgagagtggtgtacacaccagcaagctgaacgagcttacctcatttgctcactattccccttgcacaggatttgtttttttttgaagcggtgtactcttatcactccttaatcttgtgagtctcttcattkattgtactggggtgggaggaagcctgcatacaagcacagacatatggtttttatttaatgagctaatgaaaagaatgcatttcaagacatagcacatattacggtgactcaaattgcttatgctatttcatgtttttataagttaccatctaatttgtcattacaattcaaagtaacttcattttcccctgtggagtactgaaaattactgtaacttataattttatggtaattatagtgagaactcccataattagtgtagcaagttcac

SEQ ID NO: 306908 - DNA, 510 bp, Homo sapiens
gactttaaaaatgactgtgactgccgctgatagcagcccggctaaatgtcatgtgaatctgtcctcctcctgcagcctatgcttacacccatgaagaatttctcctggtgagagtggtgtacacaccagcaagctgaacgagcttacctcatttgctcactattccccttgcacaggatttgtttttttttgaagcggtgtactcttatcactccttaatcttgtgagtctcttcatttattgtactggggtgggaggaagcctgcatacaagcacagacatatggtttttatttaatsagctaatgaaaagaatgcatttcaagacatagcacatattacggtgactcaaattgcttatgctatttcatgtttttataagttaccatctaatttgtcattacaattcaaagtaacttcattttcccctgtggagtactgaaaattactgtaacttataattttatggtaattatagtgagaactcccataattagtgtagcaagttcac

SEQ ID NO: 306909 - DNA, 453 bp, Homo sapiens
tcttggctcactgcaacctctacctccagggttcaaacgattctcctacctcagcctcctgagtagctgggtctacaggtgcccgccaccacacccggctaattttttgtatttttagtagagacagggtttcaccatgttagccaggmtggtctcaatctcctgaccttgtgatccgcccgccttggcctcccaatatcctcacattctttacaagccaacaccagctcttaggcttcaaatgccatctttaaatcaatgattcacaaaccttacatttcagtttcccaaccctttcctaatttccaggttactaataactgcagttgcccatcaggcagctccctgtggatgtctaataaacaacttaatgttgccttatcaaaaggcaaggcatgtgaaaaatacagtgaattagtatctccaccaatgatattgttggggttcaggtct

SEQ ID NO: 306910 - DNA, 453 bp, Homo sapiens
tcttggctcactgcaacctctacctccagggttcaaacgattctcctacctcagcctcctgagtagctgggtctacaggtgcccgccaccacacccggctaattttttgtatttttagtagagacagggtttcaccatgttagccaggatggtctcaatctcctgaccttgtgatccgcccgccttggcctcccaatatcctcacattctttacaagccaacaccagctcttaggcttcaaatgccatctttaaatcaatgattcacaaaccttacatttcagtttcccaaccctttcctaatttccaggttactaataactgcagttgcccatcaggcagctccctgtggatgtctaataaacaacttaatgttgccttatcaaaaggcaaggcatgtgaaaaatacagtgaattartatctccaccaatgatattgttggggttcaggtct

SEQ ID NO: 306911 - DNA, 614 bp, Homo sapiens
aaagtaaactttcctgaaataatttgtatctacaagttaaaagaatgcaaagcattctatttctctttaaatattttgtctgtaatctcagcattttatggggcttgggmgggtgaattgcttaagcctaggagtttgagatcatcctgggcaacatgatgaaacctcgtctctaaaaaaaaatacaaaagttagccaggcatggtagtgcacacctgcagtcacagttattggggaggctgggactggagggtcaccggagcccagggagattgaggctgcagtgaaccatgatcccaccactgcattccagcctgggagacagagggaaaccctatgtcaaaaaataaaataaaataataaaataaagtaaatattttaccattgggtcatatttatgttcatcttgctatgaatgatcggggaattagcactttttacttagactctcctcctctctcctcatttccgttagaataattctgtactagatcttcctgggaaaggtatcattgctttgttttgtttttatcatgaatgagtgttggattttgtcaaatattttatctccatcaatttaaatgatcgtatgattattcttctttagtctgtgg

SEQ ID NO: 306912 - DNA, 614 bp, Homo sapiens
aaagtaaactttcctgaaataatttgtatctacaagttaaaagaatgcaaagcattctatttctctttaaatattttgtctgtaatctcagcattttatggggcttgggagggtgaattgcttaagcctaggagtttgagatcatcctgggcaacatgatgaaacctcgtctctaaaaaaaaatacaaaagttagccaggcatggtagtgcacacctgcagtcacagttattggggaggctgggactggagggtcaccggagcccagggagattgaggctgcagtgaaccatgatcccaccactgcattccagcctggragacagagggaaaccctatgtcaaaaaataaaataaaataataaaataaagtaaatattttaccattgggtcatatttatgttcatcttgctatgaatgatcggggaattagcactttttacttagactctcctcctctctcctcatttccgttagaataattctgtactagatcttcctgggaaaggtatcattgctttgttttgtttttatcatgaatgagtgttggattttgtcaaatattttatctccatcaatttaaatgatcgtatgattattcttctttagtctgtgg

SEQ ID NO: 306913 - DNA, 618 bp, Homo sapiens
aaccttgatttaacatctgtcgcccaggctggagtgcggtggcacaatctcagcacaatgtcagggtttctcccgcctcagcctcccgagtagttgggattacaggcacgcaccaccacacccggctaatttttgtattttattagtgatggggtttcaccatattggccaggctggtgttgaactcatgacctcagaggatccacctgcttcggcctccgaaagtgttgggattacaggtgtgagccaccatgcgttgctggttcattgttttgctttaggtgtgatgcttttttcttttttgttttgttttgtttgtttstttgtttttaactgtggcttccttcaatattttcttgttgtttttctgcagtttgaattgatatgcctaaatgtagatttttggtatttactctgcttagtcttctctgagtttcctggatctgtgatttggtgtttatcactatttttgagaattctgaaacatcattacttcaaatagttcttatgttcctttttctgtttattctccttcttgaatacccattatctatatattacatttttggtaattgtcctacatctcctattcggtttgtttgtttgtttgtttgtttg

SEQ ID NO: 306914 - DNA, 182 bp, Homo sapiens
cagattcttgttttgataattccaaagtctccatcatatctgggtctggtactaatgtttgctttacctcttcagcgtatgtttggaatgctttgtaattatttgatgaaaactaaagatgatgcatgsagtaaaaggaactcaggtaaacagggctgtaatgtgaggttttatgtttatct

SEQ ID NO: 306915 - DNA, 608 bp, Homo sapiens
ttgcaacccacccaaggagtcatagtatgaactcttcctcagggttatttcaccctggaattgatgactgttacattcgacaaatatgtgagcacattttaaaaatttatcctttccactttacttggtagcacgaacgtgttctttacggcatattcacagctgaacaagctatcatgcatctgtatkaggagcatggttacactcacaggacgaccggcttttgtctttgaagactcagggctcatttagttgccatgggttgtcaccatcaccattcacatgccaaacccctgtttctgccagtctctctagaaagagacactatcttgccagggcttttaaagtttcactgttcttaattcttagtgggagccactaaaaaaccttagggcagtggctgatgaggtctgcaggaccatgcaagttcaactaaaagaaacacagagtgagagagagtgacgtggttctgagtactgggactaattagagaacactactgtgggggaaagtgttttgggaaatgtgacaaaagcataagtctctatatctttcatccttttcccaaccacagttatacagtagattgaaaccgacagcagacaatc

SEQ ID NO: 306916 - DNA, 501 bp, Homo sapiens
tttattaattttaaattgcaatctataggtgtgacgctgaagctgttgaaaatgtttgtctttctgtaacttttctcatatgcagagtttatattttgcttgtgccccatacagtataatttaaaggtaatatgatgggtacaaaagaatatattttgacaaataactaagctgtgacataataatctgatatcagagcttccatctgtcagatgcaattgtacacaaaagacagaaagaatcaagggacttctctttaaggaaattaaattattatgtggagaatatttcaaaaacatgacgtgaaagggcaggcacaggcgaaagtgttcttcagatgtcagtggcttcctgaatgatcctgggtgagataaattgtggtgatgcgcttgtcttgtktctaaactctcatcctgctggtgtcgggaaataaactccttttgagcaaaggaccttgctccaagccccagagcagctgaggcaggttgtgactcaaggctt

SEQ ID NO: 306917 - DNA, 537 bp, Homo sapiens
aatcatctaggggaaagtaaaggagggaacgtttttgtgtgttctatgtgatggcatttatgggtccagggcctgacttagcaacaggctggaaacagaaaccttcaaccttcacccccatttatctcctgggttcttacccactttgctgggggaaagatcatgcctggccttgttttattaggtaaagaggtgacaaaaggggaacccacaaaacaacctcacaacctcccagaagggcctaccattttcacacagagtctgatcagattgctaaaagyattcaaaggtgtctttgtaaactgagacccctgcaaggtagaatagtgttgtctgcagctgtgtaaaacaatgtaagatatttctgctataaacatgacacatacctccgaaagatgttatattctgccaaatgatggactaaaaaaccacaaggcttataggaaagaggagttcagggccaaactctccttgaggctataaatggctaaccccataaccagagccctaattaaaaacagctgcctcccgatgtgt

SEQ ID NO: 306918 - DNA, 537 bp, Homo sapiens
aatcatctaggggaaagtaaaggagggaacgtttttgtgtgttctatgtgatggcatttatgggtccagggcctgacttagcaacaggctggaaacagaaaccttcaaccttcacccccatttatctcctgggttcttacccactttgctgggggaaagatcatgcctggccttgttttattaggtaaagaggtgacaaaaggggaacccacaaaacaacctcacaacctcccagaagggcctaccattttcacacagagtctgatcagattgctaaaagtattcaaaggtgtctttgtaaactgagacccctgcaaggtagaatagtgttgtctgcagctgtgtaaaacaatgtaagatatttctgctataaacatsacacatacctccgaaagatgttatattctgccaaatgatggactaaaaaaccacaaggcttataggaaagaggagttcagggccaaactctccttgaggctataaatggctaaccccataaccagagccctaattaaaaacagctgcctcccgatgtgt

SEQ ID NO: 306919 - DNA, 512 bp, Homo sapiens
atcctggtctgtcacaagtttagactccctgatgtgagagaaagtactgaacctgaggattaagaaataaacatcacrcagcaactcttatggtcttatggacaccaatattcagataagactcatgacttctcttaaatattgaaaagtttactacattggttaggttatggtagatttatattgaattaatagagtcgatgtgtgtttgtgtgtgtgtttgtgtgcatatgtataaaacagtgccatattatgagttgtgtctaaactgattgtgttatctgaaaaagtaataagtgaatctgcttatttttgttctacgggctataacagagctagtttgtgcttcattatacccatgtgatgctagtcactgtagaagcagataattataaacttggcagtgttgttaatatgcttaaatatctaaatttgggtcccactaggtaggagagataggtttcacattgaagcatacctcacatagcatattcagagagtaagagaacact

SEQ ID NO: 306920 - DNA, 512 bp, Homo sapiens
atcctggtctgtcacaagtttagactccctgatgtgagagaaagtactgaacctgaggattaagaaataaacatcacgcagcaactcttatggtcttatggacaccaatattcagataagactcatgacttctcttaaatattgaaaagtttactacattggttaggttatggtagatttatattgaattaatagagtcgatgtgtgtttgtgtgtgtgtttgtgtgcatatgtataaaacagtgccatattatgagttgtgtctaaactgattgtgttatctgaaaaagtaataagtgaatctgcttatttttgttctacgggctataacagagctagtttgtgcttcattatacccatgtgatgctagtcactgtagaagcagataattataaacttggcagtgttgttaatatgcttaaatatctaaatttgggtcccactargtaggagagataggtttcacattgaagcatacctcacatagcatattcagagagtaagagaacact

SEQ ID NO: 306921 - DNA, 626 bp, Homo sapiens
aataatgcacaccttgttttttccctccagcagatcaacctctttggatgcagagtgtgaaacasttctcttttctgagctcagttgcaattttctttaaaccatttgtatcaacctgtactttatgggagaggaaaatgccatcagtgctttagggaagttgcagaatgtttatttatcttcaaatatctttgttctatgaagatgagagattttgtcatccattaggcaccctgtctcatccaccaactctaaatgtgttgtaaacattccaccaaggaataacatttcaacaaattaacttcagttagagtcagtgtcactttgacctacggtggcaacatttatccccatctaaaatttctttggggaatgaaaagaaaaaagatcatgcaggcatatttttttgttaaaaataacttacgtattttattttactgatacattttgcaatttactggttgaaatcctgaactagttttagcttggtaaaagttataaaagggaaaggaatatttcagtgttgtcattccacccaaatatccttggatactttgatacttccatcttaatgctcataatttgatacttgatgcttataattttaatgtaagtttgcctcatcc

SEQ ID NO: 306922 - DNA, 626 bp, Homo sapiens
aataatgcacaccttgttttttccctccagcagatcaacctctttggatgcagagtgtgaaacacttctcttttctgagctcagttgcaattttctttaaaccatttgtatcaacctgtactttatgggagaggaaaatgccatcagtgctttagggaagttgcagaatgtttatttatcttcaaatatctttgttctatgaagatgagagattttgtcatccattaggcaccctgtctcatccaccaactctaaatgtgttgtaaacattccaccaaggaataacatttcaacaaattaacttcagttagagtcagtgtcactttgacctacggtggcaacatttatccccatctaaaatttctttggggaatgaaaagaaaaaagatcatgcaggcatatttttttgttaaaaataacttacgtattttattttactgatacattttgcaatttactggttgaaatcctgaactagttttagcttggtaaaagttataaaagggaaaggaatatttcagtgttgtcattccacccaaatatccttggatactttgatacttscatcttaatgctcataatttgatacttgatgcttataattttaatgtaagtttgcctcatcc

SEQ ID NO: 306923 - DNA, 646 bp, Homo sapiens
catgggcccttcctattcacctacaccacatttttttttwaaaaaaacttttattttaagttccagggcagatgtgcaggatatgaagttttgttacataggtaaatgtgtgtcatggggggttgttgtaccgattatatcattaccaaggtagtaagcctagtatccattagttacttttcctaatcctctccctcctcccacccaccaccctctgacaggccccggtgtgtgttgttcccttctatgtgtccatgtgttctcatcattttgctcccacttataagtgagaacagtggtatttgattttctgttcctagattagtttgataaggataatggcctccagctccacccacgtccctgcaaaggacatgatcttgttcttttttatggctgcatggtattccatggctacatcacatttttaacaaagaggatgaatctctgagtgctttctaggagtttccattttgactttgccagtggtcttccggatgcatatgtgccactgctctgcatgctagcacatatatcacatggctcactagcatcttagatctccacccaggggtgtgttttttactattccagttagaacaggtcagcccaaggacactaagtatgggtttctgttctggcaaga

SEQ ID NO: 306924 - DNA, 581 bp, Homo sapiens
aagaaagaagtacctaagttaaagatgtggtgtcatttactgtagcttcaaaatcagaagaagagatttgcgccactttttaatgcctttaatgacaatactcgttctttgtctccaaatgagggagagagacagaaagccaacagtatttgtagcaagataattttatagcattctctgttacccagrtttatcctctccgcaggaccagatgccaccaggaacaactcaagagctagaaaacagagctacatagaaggacagattgggggagcaatctcccatttgaatactttttgcattagctaactactgtgttgtaacattattattgcaaacgcaacagcttcaaacagcacacatgcattatctgatagtttccgtgggtcaggggtctgtgcatggcttggcagcttagctgggtctctgcttaaggtctcacaaagcagccatcaagtgttggctgggacttcattgccacctgaggctcagctggggtagaatccacttctaagatagttgggcagctggcagaattcagttccttgcagttgtaggaatgaggcattaagttttttgct

SEQ ID NO: 306925 - DNA, 541 bp, Homo sapiens
tgtagctctcaggtagtgtcacacacacaggaaatacttcttggactgcatgctctgccagcactgaccaccaagtacttccaggtcaagctagtcccctgcyctcgcatcgccaaaactcctcccttcagggtaggtgtctcagcttgaaatcaccattactgtgactcgttgtccctcactcctactgaattaccaaagccctacaggatggatataatgttgaattttcatttatattgcatctcaaaatatagtgcagtaccagaattagaaacaaaaatgcaatttaaaatgataaatacatttggtaaattaggtaataattcattaccctcctgcttctaccccccagaaaaaataaagaaaaaacacaggaaacatagatgtgtgtgtgtgtgtgtgtgtgtgtgtgtgtgtgtatgtatgtatatatatatgtgtatatatatataatattataagatataatatacttacaaattatatttataatatatattatagataatcctatatgttataatatcatatattatat

SEQ ID NO: 306926 - DNA, 541 bp, Homo sapiens
tgtagctctcaggtagtgtcacacacacaggaaatacttcttggactgcatgctctgccagcactgaccaccaagtacttccaggtcaagctagtcccctgccctcgcatcgccaaaactcctcccttcagggtaggtgtctcagcttgaaatcaccattactgtgactcgttgtccctcactcctactgaattaccaaagccctacaggatggatataatgttgaattttcatttatattgcatctcaaaatatagtgcagtaccagaattagaaacaaaaatgcaatttaaaatgataaatacatttggtaaattaggtaataattcattaccctcctgcttcwaccccccagaaaaaataaagaaaaaacacaggaaacatagatgtgtgtgtgtgtgtgtgtgtgtgtgtgtgtgtgtatgtatgtatatatatatgtgtatatatatataatattataagatataatatacttacaaattatatttataatatatattatagataatcctatatgttataatatcatatattatat

SEQ ID NO: 306927 - DNA, 543 bp, Homo sapiens
tattatatatcatactgtgataagaattctttctttaatatgtgaaaaactacctactctgacattttatatgtatgatatataatatatattttagtatattacatattatatatatttacatataatatatcatatatatataaaatgtcagggtaagtagtttctctcatattgaaaaataaataatgaggaatccttatcacagcatcaaaacacagagcaaccaaatcagtgtttttcaccgacttgtaaccaagaacacctttgtgattaatatgaaaatcaaatgctgtcttcttcagttgatagtstttgatctgcagaaattacagtttctccttcaagtatctctattagccaagaaaattttaagatggtcattttgtatataatcagtttcattttcaatttttcaaataggtcttataaaattgactaaaaaattgtattctaccccttctccttacgaattccaaagtggccaagcggtactgctctgaatagcaccatgaaaacacagaaagatgacatgtttgtaag

SEQ ID NO: 306928 - DNA, 543 bp, Homo sapiens
tattatatatcatactgtgataagaattctttctttaatatgtgaaaaactacctactctgacattttatatgtatgatatataatatatattttagtatattacatattatatatatttacatataatatatcatatatatataaaatgtcagggtaagtagtttctctcatattgaaaaataaataatgaggaatccttatcacagcatcaaaacacagagcaaccaaatcagtgtttttcaccgacttgtaaccaagaacacctttgtgattaatatgaaaatcaaatgctgtcttcttcagttgatagtcwttgatctgcagaaattacagtttctccttcaagtatctctattagccaagaaaattttaagatggtcattttgtatataatcagtttcattttcaatttttcaaataggtcttataaaattgactaaaaaattgtattctaccccttctccttacgaattccaaagtggccaagcggtactgctctgaatagcaccatgaaaacacagaaagatgacatgtttgtaag

SEQ ID NO: 306929 - DNA, 514 bp, Homo sapiens
tggtttgagatctgccacggatttgaatatattccccttgtagagagcaagttttatcacactgaaaaggatgacttagtttttggttatcttttaacatttctgcccttctgtaacagcaagcgtagcgttaaaggctttcttctatattaatgaataatacaaaatcaatgcagcttgtattattaaatgtgcattttgtgaacattttgttaaagtagacttattccattttctgctgatgggaatttttggccctcggtgctaaaaccttcagctccgctctttaactccmcagcaataacaacctcacctccctcatgagattatttcctaacacctttattattcttcctgaagtctgctttgctattaacataaaaccactgagcaagtggttgagtgtcacttctgtcgcttagtaaacgtatgacgcttggaaacttaactaacttcttgggacttaatttcttcctctgtagaagagatgaaaataatagagcccaactccaaa

SEQ ID NO: 306930 - DNA, 514 bp, Homo sapiens
tggtttgagatctgccacggatttgaatatattccccttgtagagagcaagttttatcacactgaaaaggatgacttagtttttggttatcttttaacatttctgcccttctgtaacagcaagcgtagcgttaaaggctttcttctatattaatgaataatacaaaatcaatgcagcttgtattattaaatgtgcattttgtgaacattttgttaaagtagacttattccattttctgctgatgggaatttttggccctcggtgctaaaaccttcagctccgctctttaactccacagcaataacaacctcacctccctcatgagattatttcctaacacctttattattcttcctgaagtctgctttgctattaacataaaaccactgagcaagtggttgagtgtcacttctgtcgcttagtaaacgtatgacscttggaaacttaactaacttcttgggacttaatttcttcctctgtagaagagatgaaaataatagagcccaactccaaa

SEQ ID NO: 306931 - DNA, 514 bp, Homo sapiens
tggtttgagatctgccacggatttgaatatattccccttgtagagagcaagttttatcacactgaaaaggatgacttagtttttggttatcttttaacatttctgcccttctgtaacagcaagcgtagcgttaaaggctttcttctatattaatgaataatacaaaatcaatgcagcttgtattattaaatgtgcattttgtgaacattttgttaaagtagacttattccattttctgctgatgggaatttttggccctcggtgctaaaaccttcagctccgctctttaactccacagcaataacaacctcacctccctcatgagattatttcctaacacctttattattcttcctgaagtctgctttgctattaacataaaaccactgagcaagtggttgagtgtcacttctgtcgcttagtaaacgtatgacgcttggaaacttaactaacttcttgggacttaatttcttcctctgyagaagagatgaaaataatagagcccaactccaaa

SEQ ID NO: 306932 - DNA, 494 bp, Homo sapiens
ggggcagatcacctgaggtcagggagtttgagaccagcctggccaacatggtgaaaccccatctctactaaacatagraaaattagccaggcatggtggcacacacctgtaatcccaactatttgggaggctgaggcaggagaatcacttgaacccaggaagcggaggttgcagtaaactgagaatgagccactgcattccagcctggcaatagagcaagattctgtctccagcaaaaaaattaaaacaataaaatgaaaggattatctggtggataggatatgggagaaagagaacgacagagaagccagggatgacttcaaacttttgggtctgagaaaatgaagaagggcgctgccatgaactgaggttgaaaaggctgagtgcggaacaagttcagaggtcacatgaatggccctttgcagggcatcttaaatggagatgcttattagatatataagcaggaatgtcaagtaggcagttggatacatgat

SEQ ID NO: 306933 - DNA, 594 bp, Homo sapiens
aagggagggtacctcctctatacatttgctttgtttgcttggatcctacaatggagctatagtaatttgttagattttaatttggaagtagaaggtatattttgaggtcagtaggagaaagactgcatccaaacagtagtagggtcatggatgactggagaaaagcagtgaaataagaaagacctcctagaggtaatctactcacttgtttcagatcatggtgatagattttatactttgttcatctgagtactaaatataacaatttaaaacaacagacccaatgttaatatcttctttaatagaaaaatagagaaaccatcccattattgtgtcaggaaaatgtaatttagttgatcccacaatgatcttgttattttttttccagtagaatttttcttttacagtatatgcttagaaataagatcaaacatcagaaatttcacacttacgtaatcttgtgcagataaactacttgattatctgcgtcacckatgattaaggtaacatagtgagaatccgatgctgttcttttagtttgtagctgttcaaaatttcttaatataacagtcactaatatttctgccgtcgtat

SEQ ID NO: 306934 - DNA, 311 bp, Homo sapiens
aggtggggagtttgactggggctgtacacctgtcaaacggtaacgcaggtgtcctaaggcgagctcagggaggacagaaacctcccgtggagcagaagggcaaaagctcgcttgatcttgattttcagtacgaatacagaccgtgaaagcggggcctcacgatccttctgaccttttgggttttaagcaggaggtgtcagaaaagttaccacagggataactggcttgtggcggccaagcgttcatagcgacgtcgctttttgatccttcgatgtcrgctcttcctatcattgtgaagcagaattcaccaa

SEQ ID NO: 306935 - DNA, 532 bp, Homo sapiens
tggttgattggcatgtattaaaccagccttgcttgccaggaataaatccacttggccatggtgtataatcctttttgatgtgttgttgaattcagtttgcatatattttattgaggatttttgcatcaatattcatcagagatactagcctatagttttcttgtagtgtctttatgtggcctaggtatcaacgtgatagtagcctcacaaaatatgtttggaagtattccctgtagctgtattttttggaatagtttatgaagtattggtggtaattcttctttgaatgtttggtagaattcagttgtgatgctgtctggttctgggcttttccttgttggaagattcttcattactacttcaatctcattatgtgttattggtctgtttaagctttctatttcttcctgattcaaacttagcaggttgtatttttctaggagtttgtccatttcctgtaggttatccaatttgttagtattaatayataattgttcataatagccccttatgatctctttgatttctgagg

SEQ ID NO: 306936 - DNA, 552 bp, Homo sapiens
aaattaccattgatacttacttgagagagtaaatggcttattattactttgaattgacaagtagtgttattgaaacaccggcatctgaaattgttatgattattaacttggcaacatttttctcttagattactgaatcattttcaaattcttgggtctgttattgagatggtcttactctgtttgttgtactttttaaaaaaaaatctctttcctacataatgctattttaatttaaatatactatgaggaaaacctgagcaaataagggatccttgggtatatagagtattaacatactgaatgattacattcatatatcattagaattatttaaaataattttatgtttataaaactagtccagttttacaaaatatcaatgtgaccttgggcaagttatttaatctctttgggctttagtcttatctttaagatgaaggtattgaactgggtgacctttaatatctctccaattcttaaacctatgattcttacaattctrtgttagtatgagaaaataacttaggttgtgggatatagctagtttgt

SEQ ID NO: 306937 - DNA, 622 bp, Homo sapiens
actctaattgcttttctgcacacagaaaagtactgtcacaagaatcaaaaatcaggtaccagcttggycatggctgggtagagcaacaaggaggctcttggggtctctgagtccaggcctaggctcttaagacagcatttctggacctgccctgccctgggccagagggggagcctactgccctgaaggatgcatagtcccaggcctggcagcattcactataagctgacagaagagcccttgggctttaagtgaacatcagtgatgacttggcacaaccccctgaggaccagtgaaggtcgtggccacaggcagagactcttccaatccctggctctcagacagtctctcagacagtatctctggacacacccaggacctcggggaactcaccatcccgaagtgaaaggccttgggaaggcccagtgctgtgctggcttcaggtctgacccagcacagtcccagcccacaggagtgcttacatcagcatagccccaattccaagtggctcagcacagagagagagaatctgtatttttgagagaaagtaagggaaaagaacaagagtctttgcctgatagtccagagaattcttctccatcttatccatgaacaccaaggt

SEQ ID NO: 306938 - DNA, 582 bp, Homo sapiens
atgttctaccgcactattcgcgtgatggagaacggcatcaagcccatgtatgtctttgagggcacgccaccacagcacaagtcaggcgagctggccaaatgcagtgaactgcrgggctgaggcagagaagcagctacagcaggctcaggctgctggggccgagcaggtggtggaaaaattcactaagtggctggtgaaggtcactaagcagcacaacgataagtgcaaacatctgctgagcctcatgggcatcccttaccttgatgcacccatcgaggcagaggccagctgtgctgccctggtgaaggctggcaaagtctatcctgtggctaccgaggacatggactgcttcaccttcggcagccctgtgctaatgcaacacctgactgccagtgaagccaaaaagctgccaatccaggaattccacctgagctggattctgcaggagctagaaccaggaacagtttgtggatctgtgcatcctgctaggcagtgactactgtaagagtatctggagtattgggcccaagcgggctgtggatctaatccagaagcacaagagcatcgaggagatcgtgcagc

SEQ ID NO: 306939 - DNA, 556 bp, Homo sapiens
atctacaaaaattaaattgctttcttttttggacttagctcacagagcctttaatatgttaactacataccatgaatctcttagagatgggagaatacccaacatttttgaaatttattaatgataataacctatttttctcagtttctaagagactataggaaatgcttatctgattttttaaaaacctgcttaactctctttaggcttatttctttgttaatatttgatattattttgtcacttttggactacttgatatgccccaaatgaattttctttctcactaacctggacagccttttctcagctaaatatggcatgtcctaagaagtccattgattgcccaaaaagctgatcccatggattagaaatagccttaagaagattactcatctaaacatttgccacacatttatcagagaaatttaatgcaatttttctaagtcatctaaaytctttgtaagccattctgtacaccttggtaggagatgtttcatatttgtagaaatttcaaatattcaaagaatgttgagtcagtctctcaattggcaaa

SEQ ID NO: 306940 - DNA, 549 bp, Homo sapiens
agaattcttctgtcatggtaagaggactatgagaacatgtggtaccaaaatggacagttaaactgacttcaaatctagacttgtgccccctacaccttctcatacgtatgccttagtgtgccaaaaaaaaagaaattaactagtcagaagcagaataaaataaaataaaaacatttcaagataaacagatactaagataattcattgctacttacaaaaaaagtctaaagaaagyccttcaggctgaaaaggaagtcacatcagactataatacaaatctacaaaaagaaataaagaacactataagtgacaaatgtgtgtactaatataaaaagattccaaatatatcttttttttcacagaaagttatattctatgacacaaaagaattctatttaaaatcagcaaggaaagaaatctttgaagtcctgaaatatttggaaagtaaacaacccacttcaaaataacccagaagttaaagttaaaaatcacaaggtaaattagcaaatatcttgaaataaatgaaaacgaaacacaccaaaatgtata

SEQ ID NO: 306941 - DNA, 535 bp, Homo sapiens
tcaggcaacaactagcatgatgaatagaacagtacctcacatcttattactaatgttaagtgtaaatggcctaaaagttccacttaaaatatacagaatggcagaatagataagaactcaccaatcaagtatcttctatcttcaggagactcatctaacacataaggactcatgtaaacttaaggtaaaagggtggaaaaagatattctatgcaaatggaaaccaaaagtgagcaggagtagctattcttaaatcagacaaaacagactttaaagccacaacagttaaaaaagacaaagaggaacattatataatgatgaaaggaycagtctaacgggaaaatatcataatcataaatacatatgcacctaatactggagctcccacatttataaaacagacttaagaaatgtgatagatagcaacacattaatagtgggggatttcaatactccactgacagcactagacaggtcatcaagacagaagtcaacaaagacacaatggacttaaactataccctagaacaaatgga

SEQ ID NO: 306942 - DNA, 638 bp, Homo sapiens
gcttacagtcggtagatcagaaatttggtacagcacagaggggtatgctcagaatattacaaatctgaactcaagctgtcagctggactgagttcttatcagggaagttctggggaagaatctgcttccaagctcattctttttgttggcagaattgtgttccttgggatatatgactaaggttcccctttccctgttagctatcatccagaggccattctcagctcttagaggccactctcaggttctttccacatggccttcacaggcagttcaaagcaacggacatatgcattcccgactatccagagagtgtctctctgactcttcttctgcarccagctgaagaaagatatgtagatgcttgccaacttatgaggaggttatgtgccaataaacccatcataagttgaaaatatcgtaagttgaaaatgcaagaagatggaaaatgatggctactaaggaaatcaaatgccagttctcctcagaaaaaaaagctcaaacatacaagtgaatggacaagctctgtatggaaaactgagggaacagaaccaggatctgttggagtgcccacagtaagaagttgggatgcagaaaagaaaagcagtgagtctggaagagattgaccccaaagaact

SEQ ID NO: 306943 - DNA, 571 bp, Homo sapiens
tgttccttgggatatatgactaaggttcccctttccctgttagctatcatccagaggccattctcagctcttagaggccactctcaggttctttccacatggccttcacaggcagttcaaagcaacggacatatgcattcccgactatccagagagtgtctctctgactcttcttctgcaaccagctgaagaaagatatgtagatgcttgccaacttatgaggaggttatgtgccaataaacccatcataagttgaaaatatcgtaagttgaaaatgcaagaagayggaaaatgatggctactaaggaaatcaaatgccagttctcctcagaaaaaaaagctcaaacatacaagtgaatggacaagctctgtatggaaaactgagggaacagaaccaggatctgttggagtgcccacagtaagaagttgggatgcagaaaagaaaagcagtgagtctggaagagattgaccccaaagaacttggagccctacagaaagggtggattggactgctgctctgctccttttactttgttgacaatctgccaaactgccaaactgttggggaggt

SEQ ID NO: 306944 - DNA, 560 bp, Homo sapiens
tacaaccattttgcacaactgtcctggtgcacatatgcaagaggttctaatggatgtgtgtgtgtgtctgtgtatatacacacacacatttagatgtggaatgttgggatcttcaatgttatatatatatatatatatatgttatgtgtgtatatatatttaattaaatattacttaattaaatattactatattatttatgtcaaattattttctaatgtgctttttaccaatttatacgctcatcagcagtatatgtgttccaattgctccatattcctgtcaatgtttgatattctcagaattttaaatttaagccaagcagctaagtttacttgtagttttaatrtgcacttctctgattacagtgaggttgagtattttttagactgtttatgggccattatcagtaaccacttgcgaagtgcttttcaaatctcttgcccagttccttatggtgttgctcatcttcttactaacttataggtaagaattttttatatgttcaagacactaatcctttgtcaattatacgtagcaaatatctttgtcaattacat

SEQ ID NO: 306945 - DNA, 579 bp, Homo sapiens
ttaaagcaaatagtttgaagagttttttagtctttggctttataatcagtttttgtgaataggaattcaggaatgacttagttgggtgactctggcttcaagtttcttatgaagttgtaattaagctgtcagccagggtctaaagtcatctgaaggcttgaatgaggcagtggggtttgcatctaagatggctcactcacctggctcttggcagaaggcaccaattctctgctggctatkggcctttagtttctagccacatagacctctccataaggctgcttctgaactgttttgttttgttttggtctcagttacatttatttctgctctgatctctattatttctttctttctactagttctgagtttagtttgttcttgcttttctagttccatgaggtgcattgttggtttgttgatttgaagtctttctacatttttgatataggatcttattgttataaacttccctcttagtactacttttgccgtatcccatagattttggtatgttatgtttccattttcatttatttcaagaaattttttaatttccttaatttcttcattgaccat

SEQ ID NO: 306946 - DNA, 603 bp, Homo sapiens
aaggaaaaggagagaaaccagcaaaccagaatgaagaggaggcattagagaggaagcagaaagaccaaaggagaaggatgaaacaaattsattcagtgagacacttcccagatgagagaattgtgagggtgtcgggctgcagggagtcaaataagagaagggctgcgtagtgtccctttagtgtcccttggagttggttattgaagtagaagcctgcttatacgggattagagatgaagggaagagaggggcggaccatagttgagaagcaattagggaggagaggtatttgtattttgccttcaatttttgttatgctttttaggaaattgaggaatacatttgggtacagaattttgtaaagtcttatctaattttcaattttgttgcactgatttggtgtctcaagttatttttccatgaactggcctgattttcactttttacagcattttatgagtctactgttttattttactttgccatgtaacttaaacatagtttgttcttaagattatcctaaaccatttttaaagctcagtatctagaatagtaattattaagtggccaaccaaggtggtgtgaaaggaaatcactagcaat

SEQ ID NO: 306947 - DNA, 593 bp, Homo sapiens
actgagcacaaactacatgccatgctgtgatctcctgtcttttaaatctcacttttaacagcactgttctctcaataatatttttatttcttcacattccatatttttccttgagattattatatgcagataatgaaattcagttagtgtttgaagagtatgagactagaaataaccttaattctctagtcccaagtttaaaactttcttaaaaagtaatcttttagcaaagttacttaatttccaaccattactcgcccctttgttgtgagatttgtgtttcttggtagaaaataatgagagcaaaacatttatcaccacttactctgtgctaagtaatattctaagtacttggcacactttaactcattttatttctcacaacaaaactgaagtagatgtgtattatccataagttacagttgagcatgagacacagaaagattaaataattttcataggtttacagaactactaaatggcagaaccaagccaggctgtcttcagagtctgtgttaytaatcaccacactttgctgaacaaattacagtagtttccaattctgggtatgtactggaatcacctatggagct

SEQ ID NO: 306948 - DNA, 434 bp, Homo sapiens
gtaatttttcatggactacgttccggaattaaatgggtatatagtagagaatatcatccctacatcctttaaagtttttgaggattatagtgatatcaattgttccgctgtaatgaaagtttgcttctttactgttgtgtctgagtgtracagctttagagacttgttattggccttttctaccacaatagttcttactcataggtccattgatgtaagaactctgttgactgctatgtccattctctttgtacatttgagtaccaaggaaattactacagcgggtgccatgaacctagtgaacccactgagaatggatccaggccaggtattcattgagttcctaacctcaatatgcctttaatcactgctctgaagctgtgtgtattattgccagttgcaacctgggatccatttcccctcaaaagaactcc

SEQ ID NO: 306949 - DNA, 574 bp, Homo sapiens
gaagaaagtatgtttaaaagcaagtttaaaattaagatgtcatgtagttaaattataaaaattcatatagtatatatgaattagaaaaaaatattaaaataaacccattaagaatttgtttgtatgcattaaaatataaagatatctatgcatgaaaaagcatagaagtgagtgcaatggtcagctcctcrtaggcagatgaatttattcaggaaagagacatataggacttcaaatatatttgtaatatgtgaattctcatgttgactggtagttacatcaggcttttttcaaagtattttgattgtctaagtgatttcataaagacaccttcccttatacaagttttatcggctagttcatgctttctgctgtgtcacttatttttctgttttgtaataataaaactttagaagacagagttaacagagatattcctttccaaagcattttgcctcaagcagaatgcccaaagtgccagtcctgataaagcttgtagagtgatttcctttagaaatcaggccaacttccatctccatcttccttagttattgatgaggagaatgtggccaac

SEQ ID NO: 306950 - DNA, 574 bp, Homo sapiens
gaagaaagtatgtttaaaagcaagtttaaaattaagatgtcatgtagttaaattataaaaattcatatagtatatatgaattagaaaaaaatattaaaataaacccattaagaatttgtttgtatgcattaaaatataaagatatctatgcatgaaaaagcatagaagtgagtgcaatggtcagctcctcataggcagatgaatttattcaggaaagagacatataggacttcaaatatatttgtaatatgtgaattctcatgttgactggtagttacatcaggcttttttcaaagtattttgattgtctaagtgatttcataaagacaccttcccttatacaagttttatcggctagttcatgctttctgctgtgtcacttatttttctgttttgtaataataaaactttrgaagacagagttaacagagatattcctttccaaagcattttgcctcaagcagaatgcccaaagtgccagtcctgataaagcttgtagagtgatttcctttagaaatcaggccaacttccatctccatcttccttagttattgatgaggagaatgtggccaac

SEQ ID NO: 306951 - DNA, 574 bp, Homo sapiens
gaagaaagtatgtttaaaagcaagtttaaaattaagatgtcatgtagttaaattataaaaattcatatagtatatatgaattagaaaaaaatattaaaataaacccattaagaatttgtttgtatgcattaaaatataaagatatctatgcatgaaaaagcatagaagtgagtgcaatggtcagctcctcataggcagatgaatttattcaggaaagagacatataggacttcaaatatatttgtaatatgtgaattctcatgttgactggtagttacatcaggcttttttcaaagtattttgattgtctaagtgatttcataaagacaccttcccttatacaagttttatcggctagttcatgctttctgctgtgtcacttatttttctgttttgtaataataaaactttagaagacagagttaacagagatattcctttccaaagcattttgcctcaagcagaatkcccaaagtgccagtcctgataaagcttgtagagtgatttcctttagaaatcaggccaacttccatctccatcttccttagttattgatgaggagaatgtggccaac

SEQ ID NO: 306952 - DNA, 606 bp, Homo sapiens
ttctcttttcctattgcatttatactgaagtctcaactactaaaagatgtcacatctgaaaagcatgattttaaaatttgtatgttttctaggacaaaactatatccagtttcagtaaaatcgtcctaaagtcaaacaccagagtgaatttaaatcatagytattactcctggaaaatcaagtattaaaatgtgcaaacaacagaatcgctttcaaattgtaaatgaaaccagccaaccaaaactgttcttaaaattttctaacctaaagaatttgatatcactgcctcagggtaatatattcagtgcctgtagtatacattgttggttaaagtaagctgggctctaagtcactttttgcctaaggctgacctagtagtgcttctggcattttatatttgtttgttttttgaaaatacttcactggttcttatttagaaaatgttaatacactttcttatagcaatgtaaacaaagagacagagcttagaaatctacataaattaagtatgcttttttgtatgtctgtcttttactatatcaagtcaacatagttggacacaacttcaataaattaaagcttatgttagaaattgagtaaagttgt

SEQ ID NO: 306953 - DNA, 606 bp, Homo sapiens
ttctcttttcctattgcatttatactgaagtctcaactactaaaagatgtcacatctgaaaagcatgattttaaaatttgtatgttttctaggacaaaactatatccagtttcagtaaaatcgtcctaaagtcaaacaccagagtgaatttaaatcatagttattactcctggaaaatcaagtattaaaatgtgcaaacaacagaatcgctttcaaattgtaaatgaaaccagccaaccaaaactgttcttaaaattttctaacctaaagaatttgatatcactgcctcagggtaatakattcagtgcctgtagtatacattgttggttaaagtaagctgggctctaagtcactttttgcctaaggctgacctagtagtgcttctggcattttatatttgtttgttttttgaaaatacttcactggttcttatttagaaaatgttaatacactttcttatagcaatgtaaacaaagagacagagcttagaaatctacataaattaagtatgcttttttgtatgtctgtcttttactatatcaagtcaacatagttggacacaacttcaataaattaaagcttatgttagaaattgagtaaagttgt

SEQ ID NO: 306954 - DNA, 627 bp, Homo sapiens
attttgttaccttgtagttccaagctctttgatgagttgtgaaagctgtttcttgtactaatatcaaatatttagttatytttaaatgatgatttttccagacctataaaatgtttttatcatcttaaatatcgtaggcttcaatatccttgtgaaaagtagtgcaaacctaaattataaatctttacaagaaattaccttatttggcttctatttcattcttttttgatatgtctgcacttcaataatcctcatttgattgttttgtaaaaatttatttattttatagtatatactaaagtatacaacatgatgttttaatatacatagtgaattagttcctatagtcaagcaaattgacgtatctatcatcttacataattacccatttttttaaatcataagagcacctaaatctactttcttaacaaatttccaattacagtataatattactaactatagttcttgtgctgtacattagagctctaagaattattctccctacataacttgcaactttttactctttgacttgcatctcaccatttcttttctctccccaccccatctatagtaaccactattctatcctcttgtttctatgtatttgacttactatttaaa

SEQ ID NO: 306955 - DNA, 627 bp, Homo sapiens
attttgttaccttgtagttccaagctctttgatgagttgtgaaagctgtttcttgtactaatatcaaatatttagttatttttaaatgatgatttttccagacctataaaatgtttttatcatcttaaatatcgtaggcttcaatatccttgtgaaaagtagtgcaaacctaaattataaatctttacaagaaattaccttatttggcttctatttcattcttttttgatatgtctgcacttcaataatcctcatttgattgttttgtaaaaatttatttattttatagtatatactaaagtatacaacatgatgttttaatatacatagtgaattagttcctatagtcaagcaaattgacgtatctatcatcttacataattacccatttttttaaatcataagagcacctaaatctactttcttaacaaatttccaattacagtataatattactaactatagttcttgtgctgtacattagagctctaagaattattctccctacataacttgcaactttttactctttgacttgcatctcaccatttcttktctctccccaccccatctatagtaaccactattctatcctcttgtttctatgtatttgacttactatttaaa

SEQ ID NO: 306956 - DNA, 567 bp, Homo sapiens
attacagctttataataccatttaaaattaggaagtctgacgcctccaactatttctctttttcaagtttgctctctggctatttgaaatctcttgaggttttatacaaattttagaattttgtctatttcactgaacaaggtcattagaattttgattgggattccattgaatctgtatattgctttgggtaatatagatattttaacaattatttcaatccacaaacataggaatcttctcatttatttgtgtccatttcaattactttcactggtattttatatttttcaatgtacagacattttaccttttggataaattcttttttaagaattttagtcttttgatgacattataagtrgcattgttggttgatttcttttcagtatattacggtgatgtattttttccgttattggtataacaataaatgcaactgatttttgtatgttgattttgcatactgcaactttactgaaatcatttactaattataaatgtttttgtggattctttagggttttctacgtgtaaaatcatgccatttgcaaatagaaataattc

SEQ ID NO: 306957 - DNA, 567 bp, Homo sapiens
attacagctttataataccatttaaaattaggaagtctgacgcctccaactatttctctttttcaagtttgctctctggctatttgaaatctcttgaggttttatacaaattttagaattttgtctatttcactgaacaaggtcattagaattttgattgggattccattgaatctgtatattgctttgggtaatatagatattttaacaattatttcaatccacaaacataggaatcttctcatttatttgtgtccatttcaattactttcactggtattttatatttttcaatgtacagacattttaccttttggataaattcttttttaagaattttagtcttttgatgacattataagtagcattgttggttgatttcttttcagtatattayggtgatgtattttttccgttattggtataacaataaatgcaactgatttttgtatgttgattttgcatactgcaactttactgaaatcatttactaattataaatgtttttgtggattctttagggttttctacgtgtaaaatcatgccatttgcaaatagaaataattc

SEQ ID NO: 306958 - DNA, 382 bp, Homo sapiens
ctgtggagctctcttttgtgtcagctaaggcaggcatcaggacagcatcatagatcaacttctctctctccctggttatgcttccatcccctcccttccaaaggcattgacttcaattaataccrtcaatatcacttagcccactagactccaccacagtgtgtttctgtcctcgaaagcaacctgtgacaagggtcaacaacatttttctcacatcttcatttcattaattatattttactaattgatctcaattaatcattagaatttagcattttccaatactaatgggaaaagacataaataattttaaacaaaatttaagtataacatatagtcaagtgtctacctagacatataaaaagggattcagtgttatgaa

SEQ ID NO: 306959 - DNA, 636 bp, Homo sapiens
acagcatgattaagcccccagtaatagcagggcacagttgtgactctgcctctgaggggtgtggctccaagattaatgtgactttgtagcagctcagtttcaggagtaagggtgaaactgcaatgcaggccctggagggtggggcacagctcagcagcaattctggtccttgggtaagtggggcactacagacctgagtagcagggtgcagtgcagcaattatatcggttcctgggaatgctgatgctgcagcagctcaggcctccctggatggggcagcgtaacacagtgaggactccygtcctgggactacaggctccatcacaactcaggctccagaaagggaagggcatgcattgacccaagaccataggggtggggtacagcagctactcatgccagggatggagggatatcatgcaccccagacaggtagggaggagtgcagtggcaacgaggccccagggatggaagggtgcaaaatctaccctggtccggggagtccagcacagcacagtacatcagcagtgctagtttttccagcagtgctactttttccagcaggttctggaaagctccctcagttgggctcagtgctcttgaagactgcacttgaagagctcttgaagagttccc

SEQ ID NO: 306960 - DNA, 511 bp, Homo sapiens
tttcctcactaaaatctcatcttaaattgtaatccccatgtgtcagggtagagatctggtggaaggtgaatggatcatggcggygatttcttccatgctgtactcgtgatagtgagtgagatctcatgagatctgatggtttaaaagtgtgacacttaccccattgctctctctttcctgccaccaggtaagacgtgcgttacttcccctttgccttccgccatgattgtaagtttcctgaggccttcgcagccttgcagaactgtgagtcaattaaacctcttttctttttaaattactcagtctcggattgttctttgtagcagtgtgaaaatggactaacagaattgtgtaaagtggcctatgttctcctatgttttaagtttcttgttgtaaaaataaaaatatctttaaatttttttcttaattgcactttccagaattatgttttcaataatttgatcatttgaaattgtgattttcagggttttagacttcagggagttgaatc

SEQ ID NO: 306961 - DNA, 581 bp, Homo sapiens
ttaagatgccagttctccgcacactgatgtataaatccaagtcaatctcaatcaaattcctaacaagcatttttgcagaaattgaaactgattttaaaattctgaatcaggcaaaatacacaaattaaaaatcactagactagcccagattacactgtaaagggatgaagtggttgggttaacacaacctaagttttagamctattataaaacaataggtatcaagacagtgtgatattgacatcaagataaacaaatagatcaacagaaaaggaagttcagaaatagactgccatgagggtctatttctgattttttaaaaaaatctttgacaactgattgaagtaaaaaggtaattcagcaaataattctagacttttcaacaaacaatcctcatatctttaaataatcatttgcaaaaataagaaattcgcaccatatacaaaattaactcaagataggtcatagacccaaatgtaaaatctaaagctataaaacttttgtacaaaaaacaagaagaaaatctttgtgatcttagataatgaaaagatttttaagatatgacaccaaaagcacaatcc

SEQ ID NO: 306962 - DNA, 629 bp, Homo sapiens
tttttttggtgtgactggagaacagttttggagctacagttcttgatgtgctagttgaactctgaaagctggaggactatagagatatctcatagagtcctgtacttcataaatgaagagactgagacttagaggaatttggtaacatttgagttagggctctcagagattcagcggcacgggcagatggatgatttgagtttcccagatcctgtgtagtactgtttattcttcccctgtgttgagcaccatgtgccacgtggatgcctgtcctggagaagtaggtgcttgggtcctcctacccattggatttatccttgactctgtgggtgcctctcatagtgctttagtgtcaggaaggtgctggctagtaagagggaaaattgtgaacgaacagcttctctgacatcttcccactaccttttccattcttctaggcttaaaggycacaagggggaatagataaaattagcatccgaaaccaaaatccatgactgtctcttgcttccattagggtgcgaggtggagagttcaataaaacaatcatgtaaatcaaccactacagcaatgcagtgggagaataatctggggagtgagcaaaattaggcaggagagttctcccaggaaag

SEQ ID NO: 306963 - DNA, 636 bp, Homo sapiens
tcttacaaactcattaggtattaaggagtgtgaacagctgaccctaggattgctgaatggggctttgcaaattctgagctcattgtttacaaataacttcaaaaaaaattttaagtgaagcttatatttaatgaaactttagaaagtaagctttgcttttttcttaastgtacacttaggcagtctttgaatagaaatctaatattatcagagggatgaaattctgtttttgttttgtcgttattggaagaggagtgaaagaattgaatatcaggtattgtgctagatattttcacccatcataaaaagaaatcactcatccttatcgtttctgcattaactttgtgaggcgatgttattacccttatatcactatgaaggagttgaggtaattcttcccttccttcccatgataagtggtagagctcaggtttggttcttagaattcagttaaaaagtctcgtgattggcatttccccaataggctaggagccttaattactcaactgtttacattttgaatttttttttggattgtattagttaggttttctctggcccttgttagtttagataaataggagatggctacaatttctttttaatttggttttagataagctctcctcagtaacc

SEQ ID NO: 306964 - DNA, 636 bp, Homo sapiens
tcttacaaactcattaggtattaaggagtgtgaacagctgaccctaggattgctgaatggggctttgcaaattctgagctcattgtttacaaataacttcaaaaaaaattttaagtgaagcttatatttaatgaaactttagaaagtaagctttgcttttttcttaactrtacacttaggcagtctttgaatagaaatctaatattatcagagggatgaaattctgtttttgttttgtcgttattggaagaggagtgaaagaattgaatatcaggtattgtgctagatattttcacccatcataaaaagaaatcactcatccttatcgtttctgcattaactttgtgaggcgatgttattacccttatatcactatgaaggagttgaggtaattcttcccttccttcccatgataagtggtagagctcaggtttggttcttagaattcagttaaaaagtctcgtgattggcatttccccaataggctaggagccttaattactcaactgtttacattttgaatttttttttggattgtattagttaggttttctctggcccttgttagtttagataaataggagatggctacaatttctttttaatttggttttagataagctctcctcagtaacc

SEQ ID NO: 306965 - DNA, 595 bp, Homo sapiens
gcttccaaaatgaaagtcagtcctctcaaatcctgctrctgctttatcaactaagtttatgtaatattagaaatccctggttgtcatttcaacaatgttcacagcatcttcagtaggagcagattccatctcaagaaaccatgtttctttgctcatctgtaagaagcagttcttcatcccttcaagtctgatcatgagattatagcagtccagtcacctcttcaggctccacttgtaactttcattctcttgctgctatttccaccacatctgcagtgacttccactgaagtcttgaacttttgacctttgggtcatccatgagagttggaatcatcttcttacaaattcttattaatgttgatatttggacctcctcccatgaatcacaaatgttctaatggcatatagaatggcaaatcctttccagatgttttccaatttactttgcccagatccatcagaggaatcactatctatggcagctggagccttaagcaatgcatttcttagataggaagacttgaaagtcaaaatcactgctttagttatgggctacagaatggatgttgtgttagcaggcaccaaaaaagtta

SEQ ID NO: 306966 - DNA, 595 bp, Homo sapiens
gcttccaaaatgaaagtcagtcctctcaaatcctgctactgctttatcaactaagtttatgtaatattagaaatccctggttgtcatttcaacaatgttcacagcatcttcagtaggagcagattccatctcaagaaaccatgtttctttgctcatctgtaagaagcagttcttcatcccttcaagtctgatcatgagattatagcagtccagtcacytcttcaggctccacttgtaactttcattctcttgctgctatttccaccacatctgcagtgacttccactgaagtcttgaacttttgacctttgggtcatccatgagagttggaatcatcttcttacaaattcttattaatgttgatatttggacctcctcccatgaatcacaaatgttctaatggcatatagaatggcaaatcctttccagatgttttccaatttactttgcccagatccatcagaggaatcactatctatggcagctggagccttaagcaatgcatttcttagataggaagacttgaaagtcaaaatcactgctttagttatgggctacagaatggatgttgtgttagcaggcaccaaaaaagtta

SEQ ID NO: 306967 - DNA, 595 bp, Homo sapiens
gcttccaaaatgaaagtcagtcctctcaaatcctgctactgctttatcaactaagtttatgtaatattagaaatccctggttgtcatttcaacaatgttcacagcatcttcagtaggagcagattccatctcaagaaaccatgtttctttgctcatctgtaagaagcagttcttcatcccttcaagtctgatcatgagattatagcagtccagtcacctcttcaggctccacttgtaactttcattctcttgctgctatttccaccacatctgcagtgacttccactgaagtcttgaacttttgacctttgggtcatccatgagagttggaatcatcttcttacaaattcttattaatgttgatatttggacctcctcccatgaatcacaaatgttctaatggcatatagaatggcaaatcctttccagatgttttccaatttactttgcccagatccatcagaggaatcactatctatggcagctggagccttaagcaatgcatttcttagataggaagacttgaaagtcaaaatcactgctttakttatgggctacagaatggatgttgtgttagcaggcaccaaaaaagtta

SEQ ID NO: 306968 - DNA, 594 bp, Homo sapiens
agccttgcttggaattgatgctcctttctacatttaactcgttgcttaccctttccttattagctgacttttaaaagcccattatttaattccttctctttattttgtttcttcccagagtgactcctctttcttcccagagtgtggtgattcaccatggccagacccaggaatacgtgctcaagcccaagtactttccagcccagaaggggatttcaggagagcagtccactgaaggttctttccctttaagatatgtgcaggatcaagttgcggcaccttttcagcgtgagtatagtcttatcaaccattttccyaagttatggtatcagagattggaaacactttgttcagtgtagacggctttaatgtgtcacagtaaataaaattcaagagtcattaaaaaatccacattggttcctgaagcaaccagacagcagaaatttagcatggtttccttattctgaggaaaagcagtttttcctgggttttggaaatgaatccgaagtgacctgcctgtcattctgtttctgcaatatggcttcatgtctaagacatatttgctctaactttgggtccagtcatatgtctgac

SEQ ID NO: 306969 - DNA, 617 bp, Homo sapiens
gtttttgtatttttagtagagatagggtttcaccatgttggccaggctagtctcgaactcctgacctcaagtgatccgcccactttggccttgccaagtgctgggattacaggtgtgagccaccatgcccagccggtaaaggatatctctagtgataaattaataacttgtggtgttctgctttatttgttggccttaaaagaatttaatttgcatccgtatcatctagagtagggattggcaaacttttagggagtactttagactttgttagccaataggcaaatcaaggatcttaggtagatatttatatagctatttaacatgtatctattaaacgtgtaaatatccttcttacctctcaggttgtagatcaggtggctggatttggctcatgggctatagtttgccaattcttgatctagagactcacagtctctcaatccactgaaaacatctagatatcggacctgattgtttggtgcctggaacgtgacaaaagcagcccaagaggccctgcttctagcagctgtccttcattctcagtgtccycaccaacccaccctccagagcatgacaattctcggatacatttccacttagtttgaaggcaccca

SEQ ID NO: 306970 - DNA, 580 bp, Homo sapiens
cgcctgtaatccaggcactttaggaggccaaggcgggcagatcacttcaggtcaggagttcaagaccagcctggctgacatggtgaaacccccgtctctactaaaaatacaaaaattagccgggcatggtgctacatgtctgtaatcccagctacttgggaggctgaggcaggagaatcacttgaacccagaaggcggaggttgcagtgagccaagattgtgccactgcactccagcttgggtgatagaacaagactccgtctcaaaaaaaaaaaattattcaaatgcagagtaaacctttctaatcagtgggttcctacagctggttgatgttsattatgatacctgtcaaacaaagtcaaacaatcaggttgtatgtggaaattatggtggaaccaaagtccacagtagaatcttgctttattctagagtctttaataatagttatgatctgaaagcaaacatcttaagatgagaattttcctagatttagaagtggttatagattttgctctgtagtatatcatggtttaaatgtcactactggtttgagcttttctaatagttgctccagttaaaa

SEQ ID NO: 306971 - DNA, 488 bp, Homo sapiens
aaagaaaattatacgcacatgtaacagaaaagggtgtgaagatgttagttatccacataaaaaatatgaaggacttrtaaaaatgtggaaaatgttcaacctcactaaaaaaaactaagaaacacaaaattgcttcataaggtgataagatcacacttcataagaccattcaaagccactaagacttcacagacagcaatttatttattaaagactcatttgacagaagccgcatttagtctgcttaaaatattaaaggaaaataatctaataaacataatgccactgacttacatatttactttcacataaaagtcactaaattaaattaatacaaagcagcacggcaacaaagaaattaatcaaggagactgtgaagtgtttcaactttatgtaaagcatttcaaatatgcacactaaattttccaactgtttagactcacaggtcacctttcacctttcaagacgttaaagcaattaaggtgtga

SEQ ID NO: 306972 - DNA, 544 bp, Homo sapiens
atctaatgtgtattttaattatgtcatttatcaactgtctctccctctctaaactgtaagttccaagaaagcagacattttatgtagttgcctagtgttatctatccttagctccctgaactgtgccctcatacataaaatatgctccataaaaacttgttgaataagtgatcaagatgatagcacttcatgtgacacacaatgaaygtaacactaaacattttggcatgttagacatatttatgtatatagttgaatactttaaggaggcttaatcaatctcctcctttactggttaaacacaaaacctgaaatatcctaaaataggcaatctgaaagataacttaaggattgtaacatttctcaaaagtagccaaagtgggcctatcacatgtgattccttggccatttgattaaacatgactcactgtgattatgtcataacctaaattaatcaaagggctaattctatagctttgtatagtttcctttgtatagctcatttgtcatttcaaaatctccttaagagcaggactggatcttg

SEQ ID NO: 306973 - DNA, 536 bp, Homo sapiens
agaagtggccacagcaaggactgagctgggctttcaaagctgtgccttggcctgagctcaccacccaggccctttcatgtgtgccttctcatcatgctttcaattagaaacatgtttctttttaacatctgagaatgatttccgcttctcctcccgcccaaggtacactgcaaatgtsttttctaccaggaaggctgtttggtgcaaaagctggcacctagggggaggccaaggactgacatcctccaatgtaccaccaagaatgagccgcaagaacctgttttaaggaagacatggatggttagcatttttttttaactcttcaaatttttcatgtggtagggtaaggggggtggggagacagtcataaaagttaaaaaaaaaaaactttgaacttacaaatattttctactggaagaaaagtaaagaacgtgttatataatattacagctatgtatataatacctccctttgtagtacattttaaaaggacaattaggagaatgaaaagacaattttctcttctacctacccta

SEQ ID NO: 306974 - DNA, 514 bp, Homo sapiens
tcaagtcattagaatcatgacagtttatttacaagtaagaacaatagtgtgtaatgasccaaaaagtatgattaatccaattctggccacctaagatccatttttaaaatgtactggcttgaatcctctgtagttgcaggtattaatgcgggcaaatatttattaaaagagaaacatataagatcatatcttctgtttcgtaactttttgcaaaaagttatatgagataaaaagcaaaatgagtaacaaactcaaacaaaggaaaatcggcactttcttctcctcaagccataatgttgtcattacactttccaaactttgctacagctctctctattaactgtgtaatcctactttgagccagggggagtagctattataatcttggaaggtaaactgtttatctgtgagagatgaactgtccactgagagccaatgccacatgcttgtccagagaaaagacagcatccaacagcctacacagtcaaaggaactgagtaatttcttcatggaa

SEQ ID NO: 306975 - DNA, 514 bp, Homo sapiens
tcaagtcattagaatcatgacagtttatttacaagtaagaacaatagtgtgtaatgacccaaaaagtatgattaatccaattctggccacctaagatccatttttaaaatgtactggcttgaatcctctgtagttgcaggtattaatgcgggcaaatatttattaaaakagaaacatataagatcatatcttctgtttcgtaactttttgcaaaaagttatatgagataaaaagcaaaatgagtaacaaactcaaacaaaggaaaatcggcactttcttctcctcaagccataatgttgtcattacactttccaaactttgctacagctctctctattaactgtgtaatcctactttgagccagggggagtagctattataatcttggaaggtaaactgtttatctgtgagagatgaactgtccactgagagccaatgccacatgcttgtccagagaaaagacagcatccaacagcctacacagtcaaaggaactgagtaatttcttcatggaa

SEQ ID NO: 306976 - DNA, 479 bp, Homo sapiens
atataaaattatattcactacttttgaacacattctgctatgaattatttatataagccaaagctatatgttgtaacttttttttagagaatagctttatcttggtttaactctttagttttattttaagaggggaaaacaaaaatatcttgcaagcagaaccttggaaaaaaaaagccatgaacacttattytaaatgtaaattaaaagttgagccaaactctttgtgtatatagcatcttaaatatattatcacctttgatgtaagtacctatgtattgtatggtcaccagattaaaaagtatatttttgtggattgccgccaatctggggggaaaaggcgaggtcctttattaagtattcactgtttaatatttactattttgttaaatatactgtactttggattttaattattagcccagttttttcagaggattgtataaaggggtttctcccctcactggtggtgaatgtgt

SEQ ID NO: 306977 - DNA, 528 bp, Homo sapiens
gggagtgttctttttcccatccacttgatgacttycctcatctccttcaagtctttgttggaatgttcttacacagtgaggacttccctggccaccatatttaaaacagaatcttcagtcccatgtccagcactctttatgcaccttccctgttttataatagtttgagaaaatgagtaagtgttttggggacacagtacttactatcacctgatataattaggcataaaactgtatttctgaattattttctttcttatgtatttgtttgcctcctgtcataactaagcatttagtgaagattgtctattttatccacaatggtattcctaattccttaaaaagtgtttggtataaaacaaacatacattgaacatttgctgaataaaagaattatatgtaaaattatggtcaggcattatttgaggggaaaactcttagtctctaaacaaatttatttggatacctggtaaattatactataattaatttgggaaataaacttgttcctcttatgtcaattgagga

SEQ ID NO: 306978 - DNA, 528 bp, Homo sapiens
gggagtgttctttttcccatccacttgatgacttccctcatctccttcaagtctttgttggaatgttcttacacagtgaggacttccctggccaccatatttaaaacagaatcttcagtcccatgtccagcactctttatgcaccttccctgttttataatagtttgagaaaatgagtaagtgttttggggacacagtacttactatcacctgatataattaggcataaaactgtatttctkaattattttctttcttatgtatttgtttgcctcctgtcataactaagcatttagtgaagattgtctattttatccacaatggtattcctaattccttaaaaagtgtttggtataaaacaaacatacattgaacatttgctgaataaaagaattatatgtaaaattatggtcaggcattatttgaggggaaaactcttagtctctaaacaaatttatttggatacctggtaaattatactataattaatttgggaaataaacttgttcctcttatgtcaattgagga

SEQ ID NO: 306979 - DNA, 528 bp, Homo sapiens
gggagtgttctttttcccatccacttgatgacttccctcatctccttcaagtctttgttggaatgttcttacacagtgaggacttccctggccaccatatttaaaacagaatcttcagtcccatgtccagcactctttatgcaccttccctgttttataatagtttgagaaaatgagtaagtgttttggggacacagtacttactatcacctgatataattaggcataaaactgtatttctgaattattttctttcttatgtatttgtttgcctcctgtcataactaagcatttagtgaagattgtctattttatccacaatggtattcctaattccttaaaaagtgtttggtataaaacaaacatacattgarcatttgctgaataaaagaattatatgtaaaattatggtcaggcattatttgaggggaaaactcttagtctctaaacaaatttatttggatacctggtaaattatactataattaatttgggaaataaacttgttcctcttatgtcaattgagga

SEQ ID NO: 306980 - DNA, 522 bp, Homo sapiens
caaattttagaggaatggatggatagtttcattgtaattgaaagtgcggaggatttctawgaattagtagactttaaagcattatttcagtgaatccgtggctgagcacctactctaatctgccatcagccataacgagaaaaggagaataaaccacggattacaaggccttcccttcaaggctggtcttgtttatttctgaatgtcttcacagagaactcagttctaattttgcagagttttatgttacatgcataggacagaaaatagtgactagggaagctctgagatttctagcatgcctgttgaataaataatactattttttcaactttcttactgctttcatcttaggatctacagcactctaaaatactagtcaaacttcagaatactcctgtactaagcttatgggtgatctttttctgagatttactaaggggaaaatttgatggatcgcaggctgccaagcaagttccctggaagatgcagatcagaccaaggagcagcctttttgccaca

SEQ ID NO: 306981 - DNA, 453 bp, Homo sapiens
agatggaaagaatgagaaatcatctaaatagagatgcagaaaagatttagcaggatgaaaagaactgaacagcaccgagagatgggtgatatatagttctggaatcatacattcaaaacacaagctggtgagacatttagagaaaacactttgcatgcacttgtcttcagccctctagcccacgaatcaaagcagtgtttcaggacaaccaagggttctttgaatcatctctcgtattcctgtgggacttccctagtctttggatccctcacattgctcactgctctgtgtctcaagcctcgtctccttgacatccatatggattagctttctggctgccagtttagcrccatttccttgattctgagaactttacacataggtatcctgccatttacattccacatggctcctcacacatgcgtacaacatccatcaattcatttctttata

SEQ ID NO: 306982 - DNA, 572 bp, Homo sapiens
tttctaataaatagtaataataaataaataaaggtgctatgatggatctctctcaatagacacatacttgaactcccaagggctccacagggtaaaaatataaaggaaacaagcatcaaactcttgtacaaaatgcttatatcctaactacactccatgatccctgatgtctttatttcagactatctccataatgaatgacctaacctttccagtcttactctaccacaacattccaatttacaaacctactccctaccccacacaggtcccccmacttccctgctccagatttctcttctggtaagaagacttcaccctgccccgatgcccggcaggtgtctgaattgcttgctatgtcaggatccagctctgatgcctgcttggtctttgcctttcttgctcttctggggctgcctatagcccttcatatactatccctctctctctctctctctctctctctctctctctttgcctgcttaatttttttaaattacaggtataatacatgctcctcaaaataaaatcaaataatatggaggtataaaaattcttaaaaagaaaaggtc

SEQ ID NO: 306983 - DNA, 609 bp, Homo sapiens
tgtccaatctacactatttatttttctgatcataaagaataaacatacacaaaatatttcttgtgaaacagcgatgtgtagttatctgtcaacattcccaatattaattgaggtaaaataatcagctaataaaatttttgcagatgtacgaaatcagttttctaatttactctggagcctttaaaactacatttgcctttaattttgtcacatttttaacaaaagaataataactaacatactgtagctatgaataataaatgaggatacccttccacttccaatttaaaaacccctaaatgtccaaggtctttgactagcagattatttcggccaaaggttgacatttaacttctaagtccactgttacactaaaaatgcaacaaatgatcccaacaaaaaacactgccagcrgctctaaacgtttttacctacaagtaaatcagtgtatcagagtccccagatgcctacatattagacttaaatacccagtagaactaagcatttctattaccatggattaccattattcatttaaacttcatttcccaagcccaaaactggaacaccacatttgtgactacacatttatctatgatgaagagagag

SEQ ID NO: 306984 - DNA, 610 bp, Homo sapiens
gggagttgttttgagcgagggtttctgtatgtctctttgaataggaatacaaagtgacagaaaaataactcaaaattgctataaaatgaatggtatttccaaatgcacaggcaaacaacatgcactttaatgtaacacatttcttcttatttggcagtaagttaaaacatatgttgtttgaagtttatataaaatggatgaaaaggtgttatttgtgttaaaaatgaaaccaaattactaagtggtttaaaatccatggcttttattatccaaatgtagccagttaaaagtaatgtcacttgaagagtaaaaataaattagggttaacagttactggtttgcttatttttttgatgaaggaaataaacaaagtaaaacccttcaaaaatatgcacttartcattacaatttcgtaattttctttaacacaattccaaaaaacaaacaacaaagaaattttgttaccccttaaaatcaagtacaaatattttttccaaggctttttcttctataaattaccaaagaaggagctctcaaagtttagtcacacttcaaaaaggaaaagtcaatggcaacaggcaaaaatcaggtggtcaaaaatgtctttatc

SEQ ID NO: 306985 - DNA, 281 bp, Homo sapiens
tctataaattaccaaagaaggagctctcaaagtttagtcacacttcaaaaaggaaaagtcaatggcaacaggcaaaaatcaggkggtcaaaaatgtctttatcaacttgccctgggaaaaacacatctcatgaagaagaataaaaacaaaaagcaaaatcattattatcaaataattttttaaaccatcaatagtttgattagcactttataaaacaaataaaaacaacagtacatcctctggggttgtttagacttgagagagacagagaaagacagaat

SEQ ID NO: 306986 - DNA, 281 bp, Homo sapiens
tctataaattaccaaagaaggagctctcaaagtttagtcacacttcaaaaaggaaaagtcaatggcaacaggcaaaaatcaggtggycaaaaatgtctttatcaacttgccctgggaaaaacacatctcatgaagaagaataaaaacaaaaagcaaaatcattattatcaaataattttttaaaccatcaatagtttgattagcactttataaaacaaataaaaacaacagtacatcctctggggttgtttagacttgagagagacagagaaagacagaat

SEQ ID NO: 306987 - DNA, 593 bp, Homo sapiens
agcacatttttgtataattttaaactgtcagattacacatgacccaaaaaataaaacctttgacccagcaacaattcatatagatatatgaatacatattcactacagttttgtttggaacatcaaaaataaaagcaaaaaaaggaatttakatctattattataaggccaattaaataatcataaatccaaacaacagagtaggtcattaaaaactataataatgttcattgacatgaaaaaaaatttccaagtttcattattgagtgaaaaaatgcaggttatccaatcatatgcacattataaactcatttatttaaaatcatgtgtaagtgtctatgtatacatagagttatctgaaaggatgattaccaaaatgttaactgagaattaatacatgtaagtgataacataaattattttgagtaatgagaatatgttttatttttactttattacccttttctttattatttgaattttctacatgagttgtcctgtgtattatatttagaaaaattatttttcatttttatattctaaaaacaaaccatgtacaggagaaagccccattcattcaatcatttaatatc

SEQ ID NO: 306988 - DNA, 593 bp, Homo sapiens
agcacatttttgtataattttaaactgtcagattacacatgacccaaaaaataaaacctttgacccagcaacaattcatatagatatatgaatacatattcactacagttttgtttggaacatcaaaaataaaagcaaaaaaaggaatttagatctattattataaggccaattaaataatcataaatccaaacaacagagtaggtcattaaaaactataataatgttcattgacatgaaaaaaaatttccaagtttcattattgagtgaaaaaatgcaggttatccaatcatatgcacattataaactcatttatttaaaatcatgtgtaagtgtctatgtatacatagagttatctgaaaggatgattaccaaaatgttaactgagaattaatacatgtaagtgataacataaattattttgagtaatgagaatatgttttatttttactttattacccttttctttattatttgaattttctacatgagttktcctgtgtattatatttagaaaaattatttttcatttttatattctaaaaacaaaccatgtacaggagaaagccccattcattcaatcatttaatatc

SEQ ID NO: 306989 - DNA, 466 bp, Homo sapiens
gctgcagcagctggtgagcttgggcagcaagcgtgatggcaatccatggtttttgctatttgatgagagttagtcccacatattccattcatttaaatccatttctttggagatgctgtaaagtctcaaaatattttcctttataatgagttgattcatcttagctgaattaaaatgtgaawatgcaacaaggagaacttttttttaaagaaccaagaaaaggtaaatattgtcataaaatgtaaatgtataactaatttaatgacatatcttttatatttgaataatagaaatttcttccagggtcacctttcttatagtacatacatctaagctatgcttacagaataggagtaataaaagagaaaatcctaaactcagtgtttaaagcaacccttaactggcattaaaaaaacaaacacaccataaaacctattagggaattagggtctggcactcattgaga

SEQ ID NO: 306990 - DNA, 466 bp, Homo sapiens
gctgcagcagctggtgagcttgggcagcaagcgtgatggcaatccatggtttttgctatttgatgagagttagtcccacatattccattcatttaaatccatttctttggagatgctgtaaagtctcaaaatattttcctttataatgagttgattcatcttagctgaattaaaatgtgaaartgcaacaaggagaacttttttttaaagaaccaagaaaaggtaaatattgtcataaaatgtaaatgtataactaatttaatgacatatcttttatatttgaataatagaaatttcttccagggtcacctttcttatagtacatacatctaagctatgcttacagaataggagtaataaaagagaaaatcctaaactcagtgtttaaagcaacccttaactggcattaaaaaaacaaacacaccataaaacctattagggaattagggtctggcactcattgaga

SEQ ID NO: 306991 - DNA, 626 bp, Homo sapiens
gactgcaggacttgatggctttctcttctgcccctgctctggcagggacaagtgcctactgttggcaatctacatttccattattcctaagcactagcactttctggaaagcagacatctccctgaatggagggacccagagtttcaggcctccatccccttatgaccccagacctggagacatgttcttcatcttcatctggaatgtcttcactgatccttgaggtcctcagacagaaaggggcttattccttcaacactcccctccctccccttttaaaagccagaacttgattatctctaatggtattcacacttataacattcaaaaaatcaatctcattgactacactgggagccttttcttatrtaacatcttacttccctttaaaaaaaaacacacacttcatatcaccttcacccaatacttttcatacatcatagacagagtgaatccccaaaatagctctattattcctctctctaaagtagagaagtagctgagaattcattttaaagaggacagttgattacatttatataataactattaccctttgtcctgccactttgccaaagggcttcatctaaacttcagtttagaaagctcctgtggatcccagcag

SEQ ID NO: 306992 - DNA, 567 bp, Homo sapiens
tatcaagtaccctctcagaatacagtggaataaaactggaaattaactccaaaaggaaccctcaaaactttacaaatacatggaaattaagtaatctgatcctgagtgatcactggatcaacaatgaaatcaagatggaaatttaaaaatttcttgaattgaacaataatagtgacacaacttatcaaaacctctgggatacaacaaaagcagtgctaagaaaaaagttcatagcattaaatgcctacatcaaaagtctgaaagagcacaaacaatctaaggtcacaactcaaggaactagagaaacaagaacaaacaaaaccmaacccagcagaagagaaataacaaagatcagaggagaactaaatgaaattgaaacaaacaaacaaaaaatatgaatgataaatgtaacaaaagctagttatttgaaaagataaaattgatagacaattagtgatattaaacaagaaaagaagagagaagatccaaataagctcaattagaaatgaaactggagatattacaaccaataccactgaaatacaaaagatcattcaaggctactat

SEQ ID NO: 306993 - DNA, 527 bp, Homo sapiens
ttccatgtgtttgtagattttgcccgttattgatttctagttttattccagatgctttatattatttcaattttttgaatgttttaagacttcttttgtgatctaacacatggtctatccttgagaatcatccatgtgctaagggaaagaatacgtattctgcagctgttggatgaagtgttctgtaaatatctattgggtccatttgrtctatagtgcagattaagtctgttgtttctctgttggttttccatctgaatgctctgtctaatgatggaaacggggtattgaagtctccagctcttattgtttgggctctatctatccctttaactctaatatgttttatacatctgggtgctccagtgttaagcacatatatatttacaattgttatatcctcttgcagaattgacccctttatcactatataatgaccttgtttgtctcttttcatagtttttgtcctgaaatctattttgtctgataaaaatatagctactcctgtttttttttcattcccattt

SEQ ID NO: 306994 - DNA, 558 bp, Homo sapiens
agatccgtttctcccaacgtttgtcttccttgctttgcctgaaacctgccatgtccttaataataatatataccctgcagctctcacaaaggaagcctgctttcctctcacacctcagctcctgtgagctggaatgggaaatctttctgaaggctcagtgatgcttctggatcatttttctttccttcttcctcaaacatccagctcaattcaagcacatgcaccagactatgctattccctacccctctttttgtcaactactgattttgtctattttggtttttgcccttgtctcaatggcttcttttttaccatcctcctgttgttattcttatgccttgagcatccccatggaggttgtacagaatctcaagcctctacctattgtttttaagctyaatcatccatttgcggtcatacctagacctcatcttcacaaataactacacttcctctcaaatcttgatgtgggcatcccgtgaatgagacatcagcccctctgtcttgacagcactactcttacaaagttattgaaggaaagttagaggctcaacaa

SEQ ID NO: 306995 - DNA, 632 bp, Homo sapiens
tgaatgggattaataatcagaatatatgaggagctcaaacaactctatagaaaaaaatataataatctgatcaaaaaatgggcaaaagatttgagtagacattcctcaaaagaagacatgcaaatggtaaacaaacatattgcgaagtactcaacatcactgatcatcagagaaatgcagatcaaaaactacaatgagatatcatctcatctcaattaaaatgkcttctttttccaaaagagaggcaataactaatgctggtgagaatgggaagaaaaaaagaatcctcatgcactgttggtgggaatataaactagtaaaaccactatggagaacagtttggagtttcctcaaaaaactaaaaatggagctactatataatccagcaatttcacgcctgggtatatacccaaaagaaaataaatccatgtatcaaagaaatatttgcactttcatatttgttgtagcaatgttcacaatagtcaagatttggaagcaacctgagtccacaaacagataaatgaataaagaaaatgtactatacacaatggagttactattcagccatgaaaaagaatgagatgctatcatttgcaacaacatagatggaactggaagtcattgtgttaagt

SEQ ID NO: 306996 - DNA, 632 bp, Homo sapiens
tgaatgggattaataatcagaatatatgaggagctcaaacaactctatagaaaaaaatataataatctgatcaaaaaatgggcaaaagatttgagtagacattcctcaaaagaagacatgcaaatggtaaacaaacatattgcgaagtactcaacatcactgatcatcagagaaatgcagatcaaaaactacaatgagatatcatctcatctcaattaaaatggyttctttttccaaaagagaggcaataactaatgctggtgagaatgggaagaaaaaaagaatcctcatgcactgttggtgggaatataaactagtaaaaccactatggagaacagtttggagtttcctcaaaaaactaaaaatggagctactatataatccagcaatttcacgcctgggtatatacccaaaagaaaataaatccatgtatcaaagaaatatttgcactttcatatttgttgtagcaatgttcacaatagtcaagatttggaagcaacctgagtccacaaacagataaatgaataaagaaaatgtactatacacaatggagttactattcagccatgaaaaagaatgagatgctatcatttgcaacaacatagatggaactggaagtcattgtgttaagt

SEQ ID NO: 306997 - DNA, 632 bp, Homo sapiens
tgaatgggattaataatcagaatatatgaggagctcaaacaactctatagaaaaaaatataataatctgatcaaaaaatgggcaaaagatttgagtagacattcctcaaaagaagacatgcaaatggtaaacaaacatattgcgaagtactcaacatcactgatcatcagagaaatgcagatcaaaaactacaatgagatatcatctcatctcaattaaaatggcttctttttccaaaagagaggcaataactaatgctggtgagaatgggaagaaaaaaagaatcctcatgcactgttggtgggaatataaactagtaaaaccactrtggagaacagtttggagtttcctcaaaaaactaaaaatggagctactatataatccagcaatttcacgcctgggtatatacccaaaagaaaataaatccatgtatcaaagaaatatttgcactttcatatttgttgtagcaatgttcacaatagtcaagatttggaagcaacctgagtccacaaacagataaatgaataaagaaaatgtactatacacaatggagttactattcagccatgaaaaagaatgagatgctatcatttgcaacaacatagatggaactggaagtcattgtgttaagt

SEQ ID NO: 306998 - DNA, 592 bp, Homo sapiens
catggacatagagagtagaaggatgattaccagaggctgggaagggtagtgggaggaaggtgggtgttggggtgaaggatgtggggatggttaatgggtacaaaaaattgaatgaataaggcctactatttgatagcacaacaggctgactacagccaataatagtttaactacattttaaaataactaagagtataattggattgtttgtaacacaaagataaaygcttgaggggatggatgtctcattttccattatgtgattattacacattgcatgcctatataaaacatctcatatctcatgcaccccatcaatataaacacctactgtgtatccacaaaaattaaaaataaaaattattttaaaaaataaagagaatatcggccgggcgtggtggctcacgcctgtaatcccagcacttcgggaggccgaggcgggtggatcacgaggtcaggagatcgagaccatggtgaaaccccatctctactaaaaaatacaaaaaattagctgtggcgtggcgggcacctgtaatcccagctactcaggaggctgaggcaggagaatggcatgaactcaggagggggagct

SEQ ID NO: 306999 - DNA, 584 bp, Homo sapiens
tagtataattatcaaatgagaaaactaatattaatgcaataataatagctaatctaacacaaagacttcattcaaagtttttcatttgtcccactaatgccctcttctgttccaggatctaatccagatccacctttacactatgtgtcatgtctcctgtccctcctccaatatgaaacaagtcctcagtttttctttgtctttcatgactttcacacttacgaatgatactggccagttattttatagaatatccctcaatatgaacttgcctgccatttcattattattacatttaggttattcattttgggtaaagtctcgcaaatgtgatgttacatctttcttggtgcaytgtcagtagataatgttctattattggtgatggtgactttgatcactcatttaaggttttgtattagttttcaaaggctgatataacaaagtaccccagagtgagtggcctaaacaatagaaatgtattatcttagagctctggaagctagatgtccaagatcaaggtgttggcagggttggctccttctgagggctatcaaaaagaacctgtcccatgcctctcccct

SEQ ID NO: 307000 - DNA, 491 bp, Homo sapiens
catggaagcagaggttgaagtgaagcaagaacacaagccaagggacgtgggtggcctctagaagcttgaaaagaaaaaaaatatatataaaaacaattttcccctagaacctccagatggaacatgatcctgccaacaccttgattttagcccagcgaaatccattgcagacttccgacctccagaattgtaagaaaacaatgtgtattgttttaagccactaaattcatgagaatgtgttacagcatcaatgggacactaatagaaatgcctttctccccgattagactgtgagcatttcaaagggatgactatatcttgcatattttggttgactccagtgtttagccagtaggttcttaataatgatttgaagaagaaataaatgaatgatgyagcaatccattcttctacactgcagttaaaactgatctcattgtcttactgcctaaaacccttcagtgggtgtccattactgttagaaaaaacaa

SEQ ID NO: 307001 - DNA, 443 bp, Homo sapiens
atttagacattcaaacaccagaggcttaatgatgctcaaagagatacaatgtaaatagtcatcctcatggcacattataatcagactgtccaaaatcaaagttaaaaagcaaatcctaaaaacagcaagataaaagcatctagtcacctataaagaaaaccccattagactgacagcagatttytaagcacaaaccttacagaccagaagagaatgggatgatatattcaaagggctaaaagaaaaaaaaaaaaaaaactgctacccaagaatactatatctagcaaaattatcctctataaatgaagaaaaaataaagtcattctcaaacaaataaatgctgaggatacttgttatcattagactggccttacaagaaatgctcaaggaagtcctaaacttggaaatcaaaagatatttaccattgtgaaaacacacaaaag

SEQ ID NO: 307002 - DNA, 563 bp, Homo sapiens
tgttaaataggtaaataaaagatacatttcttatttgaaaatttttaaaaagatagttgactgtttaaaacaataatgaaaacaatgtatttgaaggtttataattgtatagaagtaattgtatagaagccacaagagatgagcaagagaaaataaattgtattgttacaaatgccttacattatatataaagtttttcaatatttgaagatagactgctaagtttaaaatgcatattgaacatcytagagcaaacactttaaaaaaaatgaatcagaagtatagttaataagccactagtagaaataaggtgaaaagtataaaggatctatctaaaaagaggaaaaggagaaataaacaaggaacaagtaggacaaatagaaaatagaaaacaattgcaaattattagatttaaactcaaacataaatatactaaatgtaaatagtctaaactcttcaattaaaaggcacattattgaactgggtaaaatgcaagtttcaactataggctgtcttaaataaactcactttaaatatgaagacacaaatatactaagagtaat

SEQ ID NO: 307003 - DNA, 563 bp, Homo sapiens
tgttaaataggtaaataaaagatacatttcttatttgaaaatttttaaaaagatagttgactgtttaaaacaataatgaaaacaatgtatttgaaggtttataattgtatagaagtaattgtatagaagccacaagagatgagcaagagaaaataaattgtattgttacaaatgccttacattatatataaagtttttcaatatttgaagatagactgctaagtttaaaatgcatattgaacatcttagagcaaacactttaaaaaaaatgaatcagaagtatagttaataagccactagtagaaataaggtgaaaagtataaakgatctatctaaaaagaggaaaaggagaaataaacaaggaacaagtaggacaaatagaaaatagaaaacaattgcaaattattagatttaaactcaaacataaatatactaaatgtaaatagtctaaactcttcaattaaaaggcacattattgaactgggtaaaatgcaagtttcaactataggctgtcttaaataaactcactttaaatatgaagacacaaatatactaagagtaat

SEQ ID NO: 307004 - DNA, 551 bp, Homo sapiens
tttttctgggctttgcttccgtaatgcaggggcacattttctgctttcaccacataagaagcctcttaaagtgaacagtgtccttaacattcctatgttgagataaatgagggaacagacaagccacaaagggatcagcccattttcaggaggtggcatgatttgtgggaagagccggggttgggagagaactctagtgtagctctcccataactcatcctaccttcctctctgttaaacaggcttcacagtaacgtgtcctcccaggaaaaagatcaasgaatgagaaaaaagacataaagaactcagaaagtaaattttgcctataaaatgaagtgagttcaagaacaaataaaagagtttacttcactgagcatgtaagatgcattttgagtcccctagattttatttccaaaattataagacaggtattgaatatggctacctttacttcaaaagaaaattagaagaataaaagggaaagttaaaataggtcttgtatagacaagcttccctcattttactgttaaggaaattgacagccagagaga

SEQ ID NO: 307005 - DNA, 430 bp, Homo sapiens
tggaatcaaccttctcaaaccctgcaacttctttatcagttaagtttattgaatattctaaatcatgtgttgtcatttacacaatgttcacagtaccttcatcaggagtgggttctatctgaagaaaccactttttaaactcatccgaaagtgcaactcctctcatctgttcaagttttatcacaagattgcagcaattggccaggcgcagtggctcatgcctgtaatcctaktaatttgggaggccgaggcaggaggatcacctgaggccaggagtttgagaccagcctggccaacatagcaaaaccccatctctactaaaaatacgaaaattagccaggcatgggggtgcatgcctgtaatcccacataatcaggaggctgaagcaggagaattgcttgaacccgggaggcggaggttgcaatgagcc

SEQ ID NO: 307006 - DNA, 460 bp, Homo sapiens
aggggatggataccccattttccatgatgtgcttatttcacactgcatgcctgtatcaaaacatctcatgtaccccatacatatatatatatctactatgcacccacaaaaatttttttgaataatttaaatttttttaatgataaggcataatacatagcacactctttatgcttagaatttttcctttgttttgttctgtttactaattatacttgaaaattaattctcttgttctattatttattaaaataaactctttatatatatgtcaacataatctgagctttttaatgatccatgcctgcagttgtccacttataggacactacagatctcaaattgaagataacattaatcatttggtaggtcaagactaagctagagcaggaactaaacagcttcaggatgatatttatgtatccaagcyccttccccaaaatcttgtcattgctctctt

SEQ ID NO: 307007 - DNA, 414 bp, Homo sapiens
tacatctataaatatttgctatattagaaactaaaattgagaaatttttaaaacacaggaatatatgcaaagacatatttcattgaccttcagatcaatgacatgattatacatcatgtagcctctgaaaaatttcaatgtatactggtgtgagaccaagagaggaaaaggcaaataacatcttggtattacttacagaagtagttttcactttgtggaccccgaaaaggtcttgagcaccctcaggggtatctgggccacatcttgtgaaccactgccctagctcatttccatacattcttcctagatgatctcctccactcccacaactacagctttgatttttgtaatgtgcttaagacgcccaaatytctgtctctagcctcgatcttgcttctaaactgcaaatctgta

SEQ ID NO: 307008 - DNA, 617 bp, Homo sapiens
atgggaaaggaacaaagcaagtttatattctgtgagttcatactccaacaactcgccttttgttaatacagacaaaatcacacaatcttttttttcatcagccaggagaaaaggtatacctgaaaggcaaaggtcctgggtacaagtaacacaggatggcccaccccctttgtctcactgttaaacaccctgtacctatccactccactattgaggtcttacatgtgttgataatctactaggcattctcatatgtccaaatttattcatttactcataaatatttcctaagcatctatttgataactgagagagcagtaattcctgaggaaaacatggaaaagacatccctgatctttgccctgagagtttatggtatagtgatggcctcagacaaatatatgcacagttaagctttcatgtggaaagaaccatgagggtagaaatactggtgtctgagtgatggtagaacagacatataacagaactgtgccatgacctgaataatgacytgccattcgctagggttaaaagaagataaaaaatgacccaggaggagagaagaatatgggcaatagactggaagccaaaaaaggagtatgtgtcaggcatttatg

SEQ ID NO: 307009 - DNA, 402 bp, Homo sapiens
ctttaaatccatttgggatgaaataacagaatctacatgatttcatttattttgaattcatttgtgtttgttttatagtctggcacatgtctgacctcgtgaatactccatatgtacttgaaaatactacatattccactttggatgagtggagtgttctgtaagtgtcatttaggtcaagttgctagacagtattaytgaagtcttttctatctttactgattctctgtcttcttgtttcaccagctattgagaaaggattgttgacatctctaatttacttgtggatttatgtattccctttttttgtttttttctaattgttgcttcctatatttgaatattttgttcttgggtacatacacaattaggattattatgtcctctttatccatacttatg

SEQ ID NO: 307010 - DNA, 362 bp, Homo sapiens
tacaaaggtgattaccatctacaagccaatgacaatccaatcatttctccagcctgaccttttctcatgtgcttcagatccatatatgtagctaattgcctatgagtatttccacctggatattccataacctctcaaacttagtatgtataaaactatattcrtaattgttccgttttatctacaacaaccaccgtgcttcctaatgttgttggaacagcaccagtatgaatccatttgctcaaggtggagacctagaatttatccttactcctcctttcctctttccccttgctacctcacccagacagccagccagcctaatgttactgagttttgcagatctaagcctgaagcagctc

SEQ ID NO: 307011 - DNA, 362 bp, Homo sapiens
tacaaaggtgattaccatctacaagccaatgacaatccaatcatttctccagcctgaccttttctcatgtgcttcagatccatatatgtagctaattgcctatgagtatttccacctggatattccataacctctcaaacttagtatgtataaaactatattcgtaattrttccgttttatctacaacaaccaccgtgcttcctaatgttgttggaacagcaccagtatgaatccatttgctcaaggtggagacctagaatttatccttactcctcctttcctctttccccttgctacctcacccagacagccagccagcctaatgttactgagttttgcagatctaagcctgaagcagctc

SEQ ID NO: 307012 - DNA, 503 bp, Homo sapiens
agctacaaacaaggttttcgtttgtttctttgctatagttttttgttttgttttgttttatatcactatcaaagaagcagcaagactcagatgacctaccttagactttcctttcgttctggctaatatgaattctttgagactttttggaggtcctataacttctttcttatgtttcctcacttttatacttttatgtcttgaaatatatttgggcagctgcaaaaaagaaacaggcagttattttacttaacagtatcttgatagataaaaggaaccaggagaagccaggtaacctaccttcttttttattttttttatttttatttttattttttgagactgtctttttttatcacccaggctggagagcagtggtgcaatctcagctcactgcaacctccgcctcccrggttcaagtgattctcatgcctcagcctcctgagtagctgtgattacaggagcctgccaccaagcctggctaattttgtatttttagtaga

SEQ ID NO: 307013 - DNA, 531 bp, Homo sapiens
gcattctacctgcaatgtatgaatacctaattccccatgctcttggctattataaatatttaaagtatttgcctatctatctgaaggccaaaaacatatctctgttttaatttgcatttaaacattttcacattatttattagccatttgtaattctttgaatttctattaggttgtctttttcttcttaatttgcatgaaatccttagatattaaagttgttatctttttatgtatatatgttgcaaaattttttaccaggttgacaattctcttttaactttgttctttgacatcaattgcayggaaatattctgaatttttaaatattaaaatctgttgaagctttcttttataacttcagaatttttgaattcccaggaaggttttacctacctcatggttataaatatattctcctttattttctataccgttacccaccaggcctgctggcctggatttggatctcacaattagatggatgtgagtctgcagccttcttgaaaagcttcgtggacactgggcata

SEQ ID NO: 307014 - DNA, 611 bp, Homo sapiens
tgggtaagattttctggatacatgtttttagactagacattcaatgaaactgtcttgaagtgctccctgatttttcgtagtcttctagcaaagctcacaattggttcaacctgacttaaaacattaccaagactcttgctatggcaccatggtttagactcttaaccaattacttatggtaactgcgtaacacaatttaaaattctttcctaagaaaaatgttgactctatgtgtagataccactgtattggccaacacctgtgccagtgtgttgattttttcactgagatagacttcaatttcatgtactcaagggtacacaactgaaagrgaagtccgtccctttaatgctggagtttaaagcatatgactttcattctattcacaacacaaaatagctacaatacagctatttcctagaaaatccaatcatgaaagaaataaatctatttttccttgagaaaagtatttgtccgggaggagggaagcaagatacgttcctctattagttaaataatcagcaagaaaagtagcggtgattgaagatattattttagtctgttatattgtcctaactggggattgtttccttgcgtcattgaaggttaag

SEQ ID NO: 307015 - DNA, 512 bp, Homo sapiens
agaaagtgatgtcgcacacaaagatacacagggccagagtaggaggcaccctagcaagagagcacgagaatggagatcttgacatcttgtaactgaggagggtgacaaaactactcagatctgagacctgtcttggatcttgaaggggagggggcaggctgcccttggtttctatgagattcttcacctgtctcttacccccatagttatgttaataacaaactccattacttaagtggtttgaaggaatttctatcccttgcaaccaaaagaacataacaaatgtcaatcttggtcttagtgcatatgaactggraccatgtgggaaaatgtaatttaccaaaccacacagaggagaaagtctcttccaggggacacagctgatgcaggaataaagacacagaaggccaaggtgagtccagagagtggtgggaaaatcagtgtgaccagagggaaggatgaaggaggatgacagactgtgagggtggaatagcaggatccagattgtcggg

SEQ ID NO: 307016 - DNA, 512 bp, Homo sapiens
agaaagtgatgtcgcacacaaagatacacagggccagagtaggaggcaccctagcaagagagcacgagaatggagatcttgacatcttgtaactgaggagggtgacaaaactactcagatctgagacctgtcttggatcttgaaggggagggggcaggctgcccttggtttctatgagattcttcacctgtctcttacccccatagttatgttaataacaaactccattacttaagtggtttgaaggaatttctatcccttgcaaccaaaagaacataacaaatgtcaatcttggtcttagtgcatatgaactggaaccatgtgggaaaatgtaatttaccaaaccacacagaggagaaagtctcttccaggggacacagctgatgcrggaataaagacacagaaggccaaggtgagtccagagagtggtgggaaaatcagtgtgaccagagggaaggatgaaggaggatgacagactgtgagggtggaatagcaggatccagattgtcggg

SEQ ID NO: 307017 - DNA, 584 bp, Homo sapiens
tgttatcaccttctaggccctagcgtctaccttctttcatgtaattagagtcagtatgttgcctgttgtgtctggtttctttcacttaacataatgctttcagattcatttctctttttgcatttatcagtttgttcctttctaatttttrgtggtactaccttatatgaatatgccaacattcgtttattcattcacaagttcatgtacatttgcattttttctagttttttgctattgcaaataaagcttctatgaacatctgtgtacaagtttttgggtgaaaaaatgatttcatttcttttcttttttctttttttttgagacagagtctcactctgttgcccaggctggagtgcagtggcatgatctcagctcactgcaacctctgcctcctgggttcaagtgattctcctgccttagccaccaagtagctgggacaacaggcatacaccaccatgcccagctaatttttgcattcttagtagacacagggtttcaccatgttggccagactggtcttgaactgctgaccttaagtgatccttctgccttggcttcccaaagtgctgagattacaggtg

SEQ ID NO: 307018 - DNA, 449 bp, Homo sapiens
atttctattgtttataagttacccagtcgatgatattttgttatagcagcacaaatggactaagatactcacaaacaaccaagaagtgtttatcaactattgactagatgggcagcatcaagattggggctaagaactcttcccacattcagatgagacagaaactaattctcgtgagttgtagttgggtaacaactgggagggtggcatgtatttttactatgtcaagcattgcttcccaggtagcaaagggtgaaactgctgatgtctgaaggaggcagcaarggactaggcatattctacacagtcttctgttgtgcctcaactctgacgtaggtcatagtattacctgggactgcatctcaggcttggctcagagggcaagcccagcctatattccagctggaacacacacacactcctccccacaatttacctgcccccagctg

SEQ ID NO: 307019 - DNA, 449 bp, Homo sapiens
atttctattgtttataagttacccagtcgatgatattttgttatagcagcacaaatggactaagatactcacaaacaaccaagaagtgtttatcaactattgactagatgggcagcatcaagattggggctaagaactcttcccacattcagatgagacagaaactaattctcgtgagttgtagttgggtaacaactgggagggtggcatgtatttttactatgtcaagcattgcttcccaggtagcaaagggtgaaactgctgatgtctgaaggaggcagcaaaggactaggcatattctacacagtcttctgttgtgcctcaactctgacgyaggtcatagtattacctgggactgcatctcaggcttggctcagagggcaagcccagcctatattccagctggaacacacacacactcctccccacaatttacctgcccccagctg

SEQ ID NO: 307020 - DNA, 449 bp, Homo sapiens
atttctattgtttataagttacccagtcgatgatattttgttatagcagcacaaatggactaagatactcacaaacaaccaagaagtgtttatcaactattgactagatgggcagcatcaagattggggctaagaactcttcccacattcagatgagacagaaactaattctcgtgagttgtagttgggtaacaactgggagggtggcatgtatttttactatgtcaagcattgcttcccaggtagcaaagggtgaaactgctgatgtctgaaggaggcagcaaaggactaggcatattctacacagtcttctgttgtgcctcaactctgacgtaggtcatagtattacctgggactgcatctcaggcttggctcagagggcaagcccagcctatattccagctggaacacacacrcactcctccccacaatttacctgcccccagctg

SEQ ID NO: 307021 - DNA, 624 bp, Homo sapiens
gatcataatggcaaaccttatttaaacagaaagaagagcagaatatcagtcataatgttttctctgtaagaactgaaaaattgaagtaaatatatgaatcttaaaatatcaattgtaatattggcttttgcaactcaggcaattataagatataggacattttaaagactaatgaagaaaattgtatttaatttattctaagttttaaaaactttatttttctcaactagagaattagttgaaagctcccaacccatgrtttcctaaaaaagtcacatctaacttagatattggtagcagttcatgctctttttaccgctggcttgtgtcccttccaaacactttaatggtattttactgttaaacaatatatatttctcaccacttgaaaaactaattcaaaataatatttctttattctatgaggtctctcactattgtcattctccttttgtggcctatgctcatttcttttccccaatgaaaagtagagaaaaaaaatcatgacaaccttgtgtgtctgcaagtctctgtaaaatgcctccatccaagtttccttccaatcaggaacataattcttagcaaataggtcgctaactcacttaattaactctctgctatgtc

SEQ ID NO: 307022 - DNA, 639 bp, Homo sapiens
aatcacagtgtttgccaacaaagccttccggcttgattccatagaaggacatttaaaaaaagatatggcataacagattcattgtcctgcttgtatgtgtttctaagtttgttcttttttttaggtaaaataaagaatttagcagtagtgcaaccattcacagttctaaaagaagcaagtgcaaatgtagagcaattttttttttcatgaaaggcagcataatgtgactgcacttacactttggatttgcaatttcactgatgatctaaataatgccattggtttaaacagttagttgctctactttgaaaattacctttgacctttttctcactagatatcaattgaattccaggttgcacatactgaactaaacgaggtaattgctctggccttgtgaacttaaaaggcaacttctttgtgaatgtatttgttggtatcattaactrgatctaagaaaatataatttttataaagttagatcattcatatctaagttgccttttattcatgtggcttagtaaaagttaattgtactttcaaagtaccaaggcaaataaacagggtaatttttttttaaagggtctcgttctcgctctgtcacccaggctggagtgcagtggtgctatctcagtttgc

SEQ ID NO: 307023 - DNA, 547 bp, Homo sapiens
gccctaaaaacaaatgactaaaacacttgcatttaaatgactaaaaaacttgttatggcccagagtggtggctcacatctgtaatcccagcactttgggaaaccgaggtgggcagataatttgaggtaaggagttcaagaccagctagccaacatggcgaaacctcgtctctactaaaaatacaaaaattagccgggcactgtggcgtgtgcctgtggtcccagcttcttgggaggctgaggcaagagaatygcttgaacccaggaggtggaggttgcacagtgagctgagatcatgccactgcactccagcctggtgacagagcaagattctatcttaaaaaaaaaaaaaaagaaaaaaaagaaaagaaaaacatttctttttttctagacccattctgtccctaactttttacaactcttcccactattgatgaggctaactcaaaaatataaataatcaaaaaatttaaaactttcttaattactaattgggaataaagcctttcttggtacaattacatctaatttcattctacagcatacat

SEQ ID NO: 307024 - DNA, 612 bp, Homo sapiens
aatctaatatccctgtagcagtggttctcacctggaggcaattttgcccccatgggacatttggcaatgtgtagaggtgctactggcatctagaggagagaggctagggatgctgctaaacgtcctacaattcatagcacagacacaacaaagtgccaccagcactattgttcagaaaccatgccctaaaaacaaatgactaaaacacttgcatttaaatgactaaaaaacttgttatggcccagagtggtggctcacatctgtaatcccagcactttgggaaaccgaggtgggcagataatttgaggtaaggagttcaagaccagctagccaacatggcgaaacctcgtctctactaaaaatacaaaaattagccgggcactgtggcgtgtgcctgtggtcccagcttcttgggaggctgaggcaagagaatcgcttgaacccaggaggtggaggttgcayagtgagctgagatcatgccactgcactccagcctggtgacagagcaagattctatcttaaaaaaaaaaaaaaagaaaaaaaagaaaagaaaaacatttctttttttctagacccattctgtccctaactttttacaactcttcccactat

SEQ ID NO: 307025 - DNA, 487 bp, Homo sapiens
tatgctacacataatcatgtagacacacacacacacacacacatccacacacacatatgtttttgcttagttttttgttttgtttttggtattcctctatcgatttatttgcctatgacagaaaccaggaaaccttcctaaattattccctctcatgtttgtgcatacatagtaagtagaacagaaataactctacatttaaaaagatactgatatggcttggctcagtgtccccayccaaatctcatcacgaattgtaatccccacgtgtggagggagggacctggtgggaggtgattggatcatgggggtggtttctcccatgatattctcatgatagtgagaaagttctcatgagatctgatggtttaaaagtggcagttttccctgagactctctgactcctgccactttgggaggacatcccttacttcccattagccttccaccatgattgtaagtttcctgaggcttccccagtcatgag

SEQ ID NO: 307026 - DNA, 604 bp, Homo sapiens
gggaaaggcagactcacccttaatctgggggggcacaatctaatcagctgccagaatggctagaatataagcaggcagaaaaatgtgaaaagagagagtggcctagcctcccagcctacatatttctcctgtgctggatgcttcctgcccttgaacattggactccaagttcttcagttttggaatttggactggctctccttgcttctcagcctgcagatggcctattgtggaccttgtaatcatgtgagttaatacttaataaactcatatatatatatgtgtttatatatatatatatatatatgtgtatatatatgtgagtttattaagtgtatatatgtgtgtgtgtgtgtgtgtgtgtgtrtatatatattccatcagttctgtcactctaaagaaccctgactaatacagctagtaactacaagatacaactagctaatccagaattatctgtattccaagctccagctcttaagtacaactactcactaaacatatactcaatattgttccacagacactccaattcaacatcctcttccgccaccttaagacttcacttctgctgatttccccattatcttcctatttcctaaat

SEQ ID NO: 307027 - DNA, 548 bp, Homo sapiens
ctgacaataagaaatgcatcactaatctgtgacatgtaaaatattgagtaaaatcaattttttcatcatttcatattttaagtatgtaatatagaaaaattttcagttcaattacttcacaatttttgcatttgcaaaaatcatataaaatattgatgaattaagattcaactaacrtatttctgctttattctcattgtatttttaaaacaaaaatagattttgtttaaaaaattctttctatatgtaaatattctaaaatgtaatattccacttggcactaagtatttttgttcactcttctcatccatgtcattggtctcccttgttatagtcttaatttaatttcatcacatattctttgtagattagatcagtttgaaaacaatgcctttagtgtcttccatcttagtaggacatttcctactgaagaacaaaattatctacagtcttttttccctcgcatcaagaccaaaatatgaaagcagtatgtctttaattagaataaataatgaagagtcttactctaactacagaaaatataacac

SEQ ID NO: 307028 - DNA, 571 bp, Homo sapiens
ctcaggatgaaagcccttgaaatagaaatgtgagctgtggcataatggaagcatttggcagctattttcccctgctctatacatgagtgcatagactctaattcatacaaaaaagtttatataattaccgatttgcaacaaaatttacttttcatgtacttatgattctaatctatctcaaaagtagataatcaaacttttgtaaataacctttcaatgatggacaatgttattgctcctttacctattactacctctccctgttcttttcttcatcccaatcaatatgtctagataaatacatttttttctcatttgaaatttartttggaaaatgcagccacatttttacttatctttttcaaataattaaaaacttctacctcactcatgtaacatcttcctgcatgatctaatctgcatctaatttttctctgactagcagcactagatgttttgtgattagggaagtcagaagtgatgagactttaatagaacataaaatatttcttttctatatttcagtaagttaaactaaattatatttacctaaattatgtacgtactttga

SEQ ID NO: 307029 - DNA, 459 bp, Homo sapiens
taatgtgacttgaagttgtaggatatttatactcattggtccaatttccttcagttgatttgccttatttttgtgagctaatgcttgcctgctgcagcctcttaggactarttttccagctcttacagaaggattaaaaccaacacaagtgtagcactcccgaaaagtgacatgggccttgtgcattacaagcatctgatatccttcattcatagggtgtttactgagtgtctttttgggaccagctgggtcttccaagtgcaggggtatagcaatgaaaaacataggataaaatctgccttccttgagtttatattcaaatggggaaacagaataaatacatagaacacgaacacgttcgatggtaacaagtgctaatgagaaatattaaccaaggaagggaaatagataatgtagataaatatttacaatcttattttggccatgaaagacttgagg

SEQ ID NO: 307030 - DNA, 539 bp, Homo sapiens
agaattaacatgtgttacccaaatattatttttttacctttcctctcatatagtttgacttgatattttctttttatatatttgctttgctcccttctaataaatattttcctaatatatcaacagaaaaagtatttaattgtctctgttgatgtatgcatgtatgcctccattaaaggtgactttactggtgaatttttctcataatgtgatttaagttttagtttttcttaatattccaccccaaattgacagttagtgttttatccctattcatgatagtaaaagggagaaaagcaaggtgtgtctgtrtgtgtgtgcgtgtaaaattaacattcagaaaatccctagagaattagcctactatatctgttaacctaaaatatgagtgttcatgtgtgacaattacctaatcacctcagtatcctctccttagaaaatacaactttctacttgcaattatgaaagccagacttaaagaatttagaagcattcagaataaatcacaattacctatgctcactgaaagtctttaaaat

SEQ ID NO: 307031 - DNA, 539 bp, Homo sapiens
agaattaacatgtgttacccaaatattatttttttacctttcctctcatatagtttgacttgatattttctttttatatatttgctttgctcccttctaataaatattttcctaatatatcaacagaaaaagtatttaattgtctctgttgatgtatgcatgtatgcctccattaaaggtgactttactggtgaatttttctcataatgtgatttaagttttagtttttcttaatattccaccccaaattgacagttagtgttttatccctattcatgatagtaaaagggagaaaagcaaggtgtgtctgtatgtgtgtgygtgtaaaattaacattcagaaaatccctagagaattagcctactatatctgttaacctaaaatatgagtgttcatgtgtgacaattacctaatcacctcagtatcctctccttagaaaatacaactttctacttgcaattatgaaagccagacttaaagaatttagaagcattcagaataaatcacaattacctatgctcactgaaagtctttaaaat

SEQ ID NO: 307032 - DNA, 496 bp, Homo sapiens
catatatcaaatgccataataaaatacttctaaattatattatggtatcagattaggctttgttgcgtctgtgaccatagacgtggtaaaggtaagaaatgcagattttattcattattttcctttacagacaccactttgaagtggaaaagtcacttcagcacatgaataacratatttattctccatattaataattgaaataccacaggcaatactatctccaaatcaaatgtatttagattccttaacgtaaagaatttgaactttgaagaaaacaaatagaaaaggtttaattaacttttatatattaccactgaggttgaaggttctatgtgtgcaattgtcttatttgatctaaaaagcaattagagtctgtatgtttgggaaactgagaaaacctggtacgctctgtcatgtgggacatccatttttacttaagcgatttgtgatgaaattttactgaggtgaatatttctttcatctttgttcaaat

SEQ ID NO: 307033 - DNA, 460 bp, Homo sapiens
ataaagaaaacatggtattataagtcaggcacggtggctgatgtccgtaatcccaacattttgggatgctggggtaggaggatcacttgagcccaggaatttaagaacagtctgagcaacaaagtgagaccccatttccacacacacacacacacarttagctaggcatggtagcatatgcctgtagtcctagctactcaagaggctgaggcaggaggatcctttaagcataggaggttgaggttacagtaagctgatcatactactgtactccagccttggtgaagagcaagatcatacacacacacacacacacacacacacacacgcacacacacagcacacactgtggaatactatttagccataaaaataacaaactagtgaaagtattttgcagcaacttggaagtaattcaggaatggaaaactaaataccccatgttcttatttataagtgg

SEQ ID NO: 307034 - DNA, 555 bp, Homo sapiens
tggtgcatgcctgcagtcctagctacttgggaggccgaggcaggaagattacttgagcccaggactttgaggttacagtgagccttgattgagccattgcactccagactactagacagagtgataccctgtctctaaataaatraataagaactatacattctttgtagttcagtatggaagaagtagaaattctaccatgagaaccagaataaacaggtattatgttttctctaatcctttagatgtttttggttgttgttgttccttgtcagctcagataagggtgccagatttcagagaaaatgggtatactgctgtttatactgcttatttggtaattgttttggaaaaaaacatgaatttgagcatcttctttttttcaaatagagatggtgtttcactgtgttacccaagctagtcttgaagtcctgggctcaagctatcctccttccttggcctcccaaagtgctgggattacaagcgagagccaccatggccagccaaatttgatcaccttatatgtggcagttattatggtttggtgctagtaat

SEQ ID NO: 307035 - DNA, 589 bp, Homo sapiens
aaactgtatacacagaccaaacttcactgacaaactcaagaaattctgagtgccatgaaattcattatccttcaagtttccttcagcatagtcatgagcaaaaattaaaaataaagtcaaatccgtatatgtattatctgaatagcaaaatataagaagacagaaaacctaaagagattacacgtgactagaggaattactcarttgctttagatgtctgtttattcatctttcaaatagaaatggtagcaaagacatttaaagctggacttaattgattccaacaaatatttaatgagtatctgtaatttattaattcagccatcagtaatagcacatttaattatgcaaattaaactgtgctcactttttctctctgtgtaattagaactaaaataaaattgtatatttaaatatacattgtattattttgcatatttatatttataaacaaaactagttatgcgacattttggctaaatgttcacagtgagcccttttagagtccaactcctgagtaggacacaactccactatacagctagcagaagaggcgcaggccccgagcaaaggagtgggatgtatagag

SEQ ID NO: 307036 - DNA, 603 bp, Homo sapiens
tattgtcacagttctagaggctagaattctgagatgaaggtgttggtaggaccaagcatcctttaaaggtgctagggaaggatctattctggacctcaagcctggtatctggtagtttcttggtttgtgatggcataactccaatcttcacatggtggttccctgtaggtgtcctttgtgtccaaatttcccctttttaataaggaaactagtcattgtaaaaaggctcacttccctccagtattttctctttttaactaatgatgtctgcaaagaccttatttccaaataatatatcctgacttaccaggagttgggacttcaacataggaattggacagggggccggggagaaacaattcaatcattaacaatcaattacatagttaargttcattagaaaggcgatcctttatcattgactgactcactgtcaataaaagattagtttatttccttggtttacagatagttctctgcctagttatgtactgaatctcattctttcttaacacctgaaagattttcctcccccaggcattcctctttccctggtatttttaaatcactggatcattttcatcagtgtttaaacttgattaa

SEQ ID NO: 307037 - DNA, 639 bp, Homo sapiens
gtctttggaagaactcggtgggaggtaattgaatcatgggggcacatcttttcctgtgctgttcttgtaatagtgaataagtctcatgaaatctgacagwtttaaaaaggggagttcacctgcactagctctttcttcttgcctgctgccattcatgtaagatgtgacttgctcctccttgccttctaccatgattatgaggcctccccagccatgtggaactgtaagcccattaaacttcttttacttcctagtcttgagtatgtctttatcagcagcgtgaaaatggactaatacacctactatatttcttcggctggattttataaggaacatttcaattgaactcattatatattttaccttaaaattccacctgaaattttatttgctctcaacaggagtgagcaatacttccattccactagtatacatgccaaaacataaagttattcttgactctcccttctcatttgcctctctctactccacccatatctgtagagtccatcttctaagtagctttcaaattcacctccataacccatcttagtttaaatcttaattatttctgtgtgaattattaaaataacctttttaacagtctttagccttggtcctatgcagccttttctttat

SEQ ID NO: 307038 - DNA, 639 bp, Homo sapiens
gtctttggaagaactcggtgggaggtaattgaatcatgggggcacatcttttcctgtgctgttcttgtaatagtgaataagtctcatgaaatctgacagttttaaaaaggggagttcacctgcactagctctttcttcttgcctgctgccattcatgtaagatgtgacttgctcctccttgccttctaccatgattatgaggcctccccagccatgtggaactgtaagcccattaaacttcttttacttcctagtcttgagtatgtctttatcagcagcgtgaaaatggactaatacacctactatatttcttcggctggattttataaggaacatttcaattgaactcattatatattttaccttaaaattccacctgaaattttatttgctctcaacaggagtgagcartacttccattccactagtatacatgccaaaacataaagttattcttgactctcccttctcatttgcctctctctactccacccatatctgtagagtccatcttctaagtagctttcaaattcacctccataacccatcttagtttaaatcttaattatttctgtgtgaattattaaaataacctttttaacagtctttagccttggtcctatgcagccttttctttat

SEQ ID NO: 307039 - DNA, 658 bp, Homo sapiens
gttctgacctctgcctgttacccagttccaaagtcacttccacattttcaggtatcttaatagcagcaccccactctctgcagtatgaatgtactgtattagtctgctctcatgctgctatgaagaagtactcaagattgagtgatttataaagaaaagagatttaattgatccacagttctgcattgctgtggggggcttagggaacttayaggcatggcagaaagcacctcttcacagggcagcaggaaagagaatgagtgttgagcgaaggaggatgccccttataaaaccatgaaatctcatgaggacttactatcatgaggctaccatggggggaaactgtcccaatgattcaattacctcccactgggtctttcccatgacatgtggggattaagggaactacaattcaagatgagatttgggtagggacacagctaaaccacagcagtgggtaaaatgccatcaaaccacattgcatgctgcagagtaatcttttgtggaaagaagagtcaacaaatgtggtaaacttcattctcttactttaagaaattgccacagccaccccagccttcaataaccatcaccctgatcagtcaacagccatcaacattgaggcaagaccctccaccaacagaaagagtacaactctttg

SEQ ID NO: 307040 - DNA, 658 bp, Homo sapiens
gttctgacctctgcctgttacccagttccaaagtcacttccacattttcaggtatcttaatagcagcaccccactctctgcagtatgaatgtactgtattagtctgctctcatgctgctatgaagaagtactcaagattgagtgatttataaagaaaagagatttaattgatccacagttctgcattgctgtggggggcttagggaacttacaggcatggcagaaagcacctcttcacagggcagcaggaaagagaatgagtgttgagcgaaggaggatgccccttataaaaccatgaaatctcatgaggacttactatcatgaggctaccatggggggaaactgtcccaatgattcaattacctcccactgggtctttcccatgacatgtggggattaagggaactacaattcaagatgagatttgggtagggacacagctaaaccacagyagtgggtaaaatgccatcaaaccacattgcatgctgcagagtaatcttttgtggaaagaagagtcaacaaatgtggtaaacttcattctcttactttaagaaattgccacagccaccccagccttcaataaccatcaccctgatcagtcaacagccatcaacattgaggcaagaccctccaccaacagaaagagtacaactctttg

SEQ ID NO: 307041 - DNA, 559 bp, Homo sapiens
gtgcagtggctcatacctgtaatcccagcactttgggaggccaaggcgggcggatcacgaggtcaggagatcaagaccatcctggctaacacagtgaaaccccatctctactaaaaatacaaaaaattagccagctacttgggaggctgaggcaggagaatggcttgaacctgggagttggagcttgtagtgagccgagatcgcgccactgcactgcagcctgggctacacagcgagactgtctcaaaaaaaaaaaamacacacacacacacacgtttataagatgtaatgctattgaacacttaataggctaaagtataggctaaatgtaagttttatatgcactgggaaacccaaaaattcatcaaaataaaacagtttattgtgatatttactttattgcagttgccttgaaccagtcccacagtatctcagaggtatgcccatatatagtattggtttatgttgtgtaactataatctgtagcttcagctaatgttcattgccttcttgcagttcagttttttgactttgcagaatccctgataccagtgtttaa

SEQ ID NO: 307042 - DNA, 531 bp, Homo sapiens
catgatgactcaatgtcaaacttgatgtgtttgagaagccaaaaattatgttcataaatttactggaggaattattgggaggtttgtgagaattagaaattattatttgttttttatttgcattttttaatgtttttgtctttttttaaattatactttaagttctggggtacatgtgcagaacatgcagttttcttacacaggtatacatgtgccacrgtggtttgctgcacccatcaacctgtcacgtactttaggtatttctctaatgttatccctcccttagtcccccaccccctgacaggccttgctgtgtgatgttcccctctctatgtccatgtgttctcattgttaaactcccactgattagtgagaacatgtggtgtttggttttctgtccttgtgatagtttgctgagaatgatggtttccagcttgttctatgtccctgcaaaggacatgaactcatccttttttatggctgcatagtattccatggtgtatatctgccacattttctttatccagtctg

SEQ ID NO: 307043 - DNA, 531 bp, Homo sapiens
catgatgactcaatgtcaaacttgatgtgtttgagaagccaaaaattatgttcataaatttactggaggaattattgggaggtttgtgagaattagaaattattatttgttttttatttgcattttttaatgtttttgtctttttttaaattatactttaagttctggggtacatgtgcagaacatgcagttttcttacacaggtatacatgtgccacagtggtttgctgcacccatcaacctgtcacgtactttaggtatttctctaatgttatccctcccttagtcccccaccccctgacaggccttgctgtgtgatrttcccctctctatgtccatgtgttctcattgttaaactcccactgattagtgagaacatgtggtgtttggttttctgtccttgtgatagtttgctgagaatgatggtttccagcttgttctatgtccctgcaaaggacatgaactcatccttttttatggctgcatagtattccatggtgtatatctgccacattttctttatccagtctg

SEQ ID NO: 307044 - DNA, 531 bp, Homo sapiens
catgatgactcaatgtcaaacttgatgtgtttgagaagccaaaaattatgttcataaatttactggaggaattattgggaggtttgtgagaattagaaattattatttgttttttatttgcattttttaatgtttttgtctttttttaaattatactttaagttctggggtacatgtgcagaacatgcagttttcttacacaggtatacatgtgccacagtggtttgctgcacccatcaacctgtcacgtactttaggtatttctctaatgttatccctcccttagtcccccaccccctgacaggccttgctgtgtgatgttcccctctctatgtccatgtgttctcattgttaaactcccactkattagtgagaacatgtggtgtttggttttctgtccttgtgatagtttgctgagaatgatggtttccagcttgttctatgtccctgcaaaggacatgaactcatccttttttatggctgcatagtattccatggtgtatatctgccacattttctttatccagtctg

SEQ ID NO: 307045 - DNA, 531 bp, Homo sapiens
catgatgactcaatgtcaaacttgatgtgtttgagaagccaaaaattatgttcataaatttactggaggaattattgggaggtttgtgagaattagaaattattatttgttttttatttgcattttttaatgtttttgtctttttttaaattatactttaagttctggggtacatgtgcagaacatgcagttttcttacacaggtatacatgtgccacagtggtttgctgcacccatcaacctgtcacgtactttaggtatttctctaatgttatccctcccttagtcccccaccccctgacaggccttgctgtgtgatgttcccctctctatgtccatgtgttctcattgttaaactcccactgattagtgagaacatgyggtgtttggttttctgtccttgtgatagtttgctgagaatgatggtttccagcttgttctatgtccctgcaaaggacatgaactcatccttttttatggctgcatagtattccatggtgtatatctgccacattttctttatccagtctg

SEQ ID NO: 307046 - DNA, 629 bp, Homo sapiens
agtattaaaaatgagtataatccttgtccataatacccaagatttggggaagaaattggactactgtaaaagaggtggaacagaaagagttaataagcatcttccttgtagtcaagctggttgtcagcaaatgaaaagatatattaataaattacaactaagctaggtgtggtggctcacacttgtagtcctacctcttcaaggggccaaggtaggaagtttgaggccagcatggacaacataaagcaactccatctcaacaaaatattttaaaagtttctgggtaaaataatgaccatggtgaaaatcgaatcaagaactcagtctcatttacatttgcaaaaaaaaaaaaacttaygaatatacttaaccaaggagatgaaagagctctgtaaggactataaaacactgatgaaaaaaatcatatatgacataaaaaatggaaatacatcctatgcttaagctcatggactgttagaatcaaaattgtgaaaatgaccatattgtccaaagcaatccaaagattcaatgcaattcctataaaaataccccaacgtcattttttgcagaattaggaaaaaaaaattttaaaacttatgtggaaccaaaaaagagtgctaatagccaaa

SEQ ID NO: 307047 - DNA, 544 bp, Homo sapiens
tgtccatggtacagatatactgtagacagaaatggagacaagacaaaagggcttctatgatgtcaggctcctaataagaggctttcccataacttctaaaccaaaacttcacatgcatttcattgacctcctttagttttacaggaggctggaaacgttattatttasataggcctattttcatgcaaaataaaaatcagttacatgtctttttctccacgcatctgatactgtcttgaaagaaacacctcccatggcatctgtccagaaaatgttctcctgataccacacactgcctgtggtgaatatgattttaattttctatgagtaatcatatatatttttaccatctttcctttaatttttttcagttattgatgtacatgtgttagtttgtgtattattgtgcatgataaataaaatgcctaagagcttaactatgttaggtaatataataagtcaactttttcccacaaaattagtaaatattaaggcaattagacattcagtatatatttattgaatttgaattaatcaactaatg

SEQ ID NO: 307048 - DNA, 582 bp, Homo sapiens
ctgtcataagttagctaaattattatattccatcttagagaaatgtcatgctgaggtaactttttttaaatgaagtcatttcttagatatccgtgctgaacttattttcaatgactaaaattttaaaaagtattcattccagaaatgacccaaactcctttgaataaaattactaaaatctcactagctgggaacatgcattcattttwaaaatgatcataaatgtgtgaggcagttttctacctgacaggagataaaaacggattagtgagcagagatcagatcatgcagagcattgcaagaaatattagaaattttttaaaactttaacaaagaagaagcttctgaagaacttgataaagggaaattatataagactatatccattttaaaaaaggataagtcaaggtacaatttgaagactagactaggagtaaagaagaatggatttcatttatccagatggaagtgtgttactataatccagaaaatagacaactgtattaggatagtgaagtgagggtgaaaaggtgtttaaataaaggttgaaataaatgtacttacagattcaatagaagtagg

SEQ ID NO: 307049 - DNA, 582 bp, Homo sapiens
ctgtcataagttagctaaattattatattccatcttagagaaatgtcatgctgaggtaactttttttaaatgaagtcatttcttagatatccgtgctgaacttattttcaatgactaaaattttaaaaagtattcattccagaaatgacccaaactcctttgaataaaattactaaaatctcactagctgggaacatgcattcatttttaaaatgatcataaatgtgtgaggcagttttctacctgacaggagataaaaacggattagtgagcagagatcagatcatgcagagcattgcaagaaatattagaaattttttaaaactttaacaaagaagaagcttctgaagaacttgataaagggaaattatataagactatatccattttaaaaaaggataagtcaaggtacaatttgaagactagactaggagtaaagaagaatggatttcatttatccagatggaagtgtgttactataatccagaaaatagacractgtattaggatagtgaagtgagggtgaaaaggtgtttaaataaaggttgaaataaatgtacttacagattcaatagaagtagg

SEQ ID NO: 307050 - DNA, 551 bp, Homo sapiens
tgagggtgaaaaggtgtttaaataaaggttgaaataaatgtacttacagattcaatagaagtaggaggcaacacaaatgactctcagatttcaagtttgagcaaatgcgtaatgagtattgccattttatgagtatacagaactaaaagagaagatgctgggaaatatataatgtatatattttagacattccaaatttgagattcttgcagatattcaggtgaaaatatacattattatgtagctaaaaatatcataactcaaaaaaagaagactggaaaaatagatcaaatgttgcatacctatagattaattaaaactgttgaacatatgagatcactttgtatggatgaagaagagacctgagacaaaattctgtaaattgcctacattctgaagaagtcagcagaaaagactgagaagaaccagccaaagatagaaagggmaaacttagaaagggtggtgtcttggaagatatgaaaagggagtcattctaaaaaggaagtcatttaaagatttcatagtatttgcttgaaacttagaagtttcaa

SEQ ID NO: 307051 - DNA, 551 bp, Homo sapiens
tgagggtgaaaaggtgtttaaataaaggttgaaataaatgtacttacagattcaatagaagtaggaggcaacacaaatgactctcagatttcaagtttgagcaaatgcgtaatgagtattgccattttatgagtatacagaactaaaagagaagatgctgggaaatatataatgtatatattttagacattccaaatttgagattcttgcagatattcaggtgaaaatatacattattatgtagctaaaaatatcataactcaaaaaaagaagactggaaaaatagatcaaatgttgcatacctatagattaattaaaactgttgaacatatgagatcactttgtatggatgaagaagagacctgagacaaaattctgtaaattgcctacattctgaagaagtcagcagaaaagactgagaagaaccagccaaagatagaaagggcaaacttagaaagggtggtgtcttggaagatatgaaragggagtcattctaaaaaggaagtcatttaaagatttcatagtatttgcttgaaacttagaagtttcaa

SEQ ID NO: 307052 - DNA, 600 bp, Homo sapiens
ttgcattgaaactcaatgatgcatggtcaaagtagaacacaatactgaatagaattmtgcagtgtccaagaagggagcatttagacctgcctgggccagagaggaatcctttgtctcagcaggaggcactcaagttgaagatgcctcacaaccaactaactaaagtggctggtttttaatttactgtggcggacgtgggactcacattgcaagactgagtcctctgttctttttcttctccttcacccagataaaaaatatctcttactgtgctgtaccacctgtagctggaaatgaggtaatgcagacacacacatagccacagaaactggtgtcacagtggattgcataccataaccacttcctctgagagcagcacagcactagagcttgcccacagaatgcatttttgggcttagggtaccgcctaatgctaaaatggatggagtgaccacaggcttatgtcacaaaaacaatgtctcttgaattattgaatagccctctcaagaggaatgagtacacacaagcccagatggcaataatggaataaatacccaatgtttcagtgcccagatcttgatgcatatccacaagtgtcaa

SEQ ID NO: 307053 - DNA, 600 bp, Homo sapiens
ttgcattgaaactcaatgatgcatggtcaaagtagaacacaatactgaatagaattatgcagtgtccaagaagggagcatttagacctgcctgggccagagaggaatcctttgtctcagcaggaggcactcaagttgaagatgcctcacaaccaactaactaaagtggctggtttttaatttactgtggcggasgtgggactcacattgcaagactgagtcctctgttctttttcttctccttcacccagataaaaaatatctcttactgtgctgtaccacctgtagctggaaatgaggtaatgcagacacacacatagccacagaaactggtgtcacagtggattgcataccataaccacttcctctgagagcagcacagcactagagcttgcccacagaatgcatttttgggcttagggtaccgcctaatgctaaaatggatggagtgaccacaggcttatgtcacaaaaacaatgtctcttgaattattgaatagccctctcaagaggaatgagtacacacaagcccagatggcaataatggaataaatacccaatgtttcagtgcccagatcttgatgcatatccacaagtgtcaa

SEQ ID NO: 307054 - DNA, 600 bp, Homo sapiens
ttgcattgaaactcaatgatgcatggtcaaagtagaacacaatactgaatagaattatgcagtgtccaagaagggagcatttagacctgcctgggccagagaggaatcctttgtctcagcaggaggcactcaagttgaagatgcctcacaaccaactaactaaagtggctggtttttaatttactgtggcggacstgggactcacattgcaagactgagtcctctgttctttttcttctccttcacccagataaaaaatatctcttactgtgctgtaccacctgtagctggaaatgaggtaatgcagacacacacatagccacagaaactggtgtcacagtggattgcataccataaccacttcctctgagagcagcacagcactagagcttgcccacagaatgcatttttgggcttagggtaccgcctaatgctaaaatggatggagtgaccacaggcttatgtcacaaaaacaatgtctcttgaattattgaatagccctctcaagaggaatgagtacacacaagcccagatggcaataatggaataaatacccaatgtttcagtgcccagatcttgatgcatatccacaagtgtcaa

SEQ ID NO: 307055 - DNA, 511 bp, Homo sapiens
gactgttttgtaaatgtctgattggtctatgtggtctagaatgtagtttaactctgatgtttctttacagattttctgtctggatgatctgtctgttgcaaaagtggaatgctgaaatctcctactattgttgtattgaagagaatctctccctttagctctattaatatktgttttatatatttaggtattctggtgttgggtgcacatatatttacagttgctgtattgacccatttatcattatataatggccttctgtcttgtttgttttttaccgtttttgacttatagcctattctatttaaatataactactcttgctctttacgtttctatttgcatgcaatactatttttgcttcctttcattttcattctatacatatcttttaagtatagtaagtttcttgtatgcagcacgtagttgggtcctgatattttttatccatccaaccactctgcatttttattggagcatttaggccatttacattcgaggttattattga

SEQ ID NO: 307056 - DNA, 625 bp, Homo sapiens
tatgtatatttttgggtggtttgttgctgtgatcttcaacattaacacttccttgacatagttattttcctagtcacttctaactcactttctgcttggaaactctgtcaaaacatctttctaaaatgcttcacatccccctttaccttttgctgatgggtgacctwatctcctaagttacagaaaaagtaaatgcctcttagcacctataacttcagtccactaacctatagctgcagagatcttcctgaatggaaaaattcttcatgttaggacctttcagttatgtcgcattgtgtttatagaaagcttttttgcatgtgctatagatcgtgctatggatgggattatgaaatacttcttcaaactaccttcttcctttctcaattgtattacaaagactgcatcattaaacattaagaatcctacctcccttgcagctatatatcaacataatattggccatgcaaattattggggaagaataagacttttttcttcccaaataatgatatagatacttaggtagaggaggttgctcttggcataactcctaatgatacaaggcaaagtataatatttataacattaatacatattagacacaaaggattaaaatttccct

SEQ ID NO: 307057 - DNA, 625 bp, Homo sapiens
tatgtatatttttgggtggtttgttgctgtgatcttcaacattaacacttccttgacatagttattttcctagtcacttctaactcactttctgcttggaaactctgtcaaaacatctttctaaaatgcttcacatccccctttaccttttgctgatgggtgacctamtctcctaagttacagaaaaagtaaatgcctcttagcacctataacttcagtccactaacctatagctgcagagatcttcctgaatggaaaaattcttcatgttaggacctttcagttatgtcgcattgtgtttatagaaagcttttttgcatgtgctatagatcgtgctatggatgggattatgaaatacttcttcaaactaccttcttcctttctcaattgtattacaaagactgcatcattaaacattaagaatcctacctcccttgcagctatatatcaacataatattggccatgcaaattattggggaagaataagacttttttcttcccaaataatgatatagatacttaggtagaggaggttgctcttggcataactcctaatgatacaaggcaaagtataatatttataacattaatacatattagacacaaaggattaaaatttccct

SEQ ID NO: 307058 - DNA, 625 bp, Homo sapiens
tatgtatatttttgggtggtttgttgctgtgatcttcaacattaacacttccttgacatagttattttcctagtcacttctaactcactttctgcttggaaactctgtcaaaacatctttctaaaatgcttcacatccccctttaccttttgctgatgggtgacctaatctcctaagttacagaaaaagtaaatgcctcttagcacctataacttcagtccactaacctatagctgcagagatcttcctgaatggaaaaattcttcatgttaggacctttcagttatgtcgcattgtgtttatagaaagcttttttgcatgtgctatagatcgtgctatggatgggattatgaaatacttcttcaaactaccttcttcctttctcaattgtattacaaagactgcatcattaaacattaagaatcctacctcccttgcagctatatatcaacataatattggccatgcaaattattggggaagaataagacttttttcttcccaaataatgatatagatacttaggtagaggaggttgctctyggcataactcctaatgatacaaggcaaagtataatatttataacattaatacatattagacacaaaggattaaaatttccct

SEQ ID NO: 307059 - DNA, 583 bp, Homo sapiens
agtgtggtaagggagacctaactgctatgaaattattatagtgccatgtgatttattttgaaccccaaccatcatttcaccatcctgctgtcttctttattgttagagtgaatgctttcagtgacatcttataaatctttgctttggccaatatttttgcagygtcttaacatagaagaggtatgcacagctttcactacctccaagatttagaggtataatttcaatttaatgtgaaaagttttagctgggtaagttccattagcctcttttgtcaagaagggaatatacctattcattttcatgtacagtttatatattgagctccatcaacacatgaaaggtgttatgtagtgtctgcaaagatgggagtttattgtctttaactgagcttcccacatgcacaaaagtcttctaataatattgatctatatttctcttagtaagcaaatgtcaggtatataaaaatttatgaaataaggtggctttttctccctattaaaacacctgttgtccaggtagcagtgattctaccacttgccacacgcagatatgaccttctcaccttgtcctcaatgccttc

SEQ ID NO: 307060 - DNA, 471 bp, Homo sapiens
tccatatgtcttgtccaacctgttatttttcattttgtctttttgtggatatatatataaaaatatttatatatatataaacttataaatacatatttaatataaatgttaactatatatttcatataagtattaaatatatatacttaatttaaatattaaatatatatatttaatttctaactctgtaattaataacttttcccttcagcctttctctcagttttttcctaatttgtttgtaagacaatcactaagaaagaaattgcagttaaacacatagccccatatgactgctcctactttaaatgttgattactaactttaggtagtgttttaatgatgcaaccatagtatatttagacyattaaattttcttttcctttctcagatgactattatattgttcattatctttccttaaatttctaacatgtgcttttttttccatattcttacagtgtccttgag

SEQ ID NO: 307061 - DNA, 565 bp, Homo sapiens
tacttatgggccagacctatgtcctatgattgccacttactacaayggtgtttgtaaccaattcatatccaccattagcaaagaaattcatcagatcagttattactaaactactagctcaagatggcagaacaagctcacattttatcttcttccacttaattgcatctcacaataacaaattaaagataaatagaaatataaatatgaagtatatgaaatatggttgtaatgaaaaaatgcaaaagcatgaataaatttgactcttataaatgacattctatttcttcaattcattatgttttttataaattatgcacttacttctgaattaaatatgagagctctgaataagccagaaaagctttgaaagtgctggaatgttactattggagtaaggactgatcagttgtggtattcacaacaatgacaacataacactttccacggtgtgctccaaaacaatatattaataataattgatttattaacatatccaaaagagtagagctaactatgtagctaaataaactcaatccatcatctatttagagaggaaatcttt

SEQ ID NO: 307062 - DNA, 565 bp, Homo sapiens
tacttatgggccagacctatgtcctatgattgccacttactacaacggtgtttgtaaccaattcatatccaccattagcaaagaaattcatcagatcagttattactaaactactagctcaagatggcagaacaagctcacattttatcttcttccacttaattgcatctcacaataacaaattaaagataaatagaaatataaatatgaagtatatgaaatatggttgtaatgaaaaaatgcaaaagcatgaataaatttgactcttataaatgacattctatttcttcaattcattatgttttttataaattatgcacttacttctgaattaaatatgagagctctgaataagccagaaaagctttgaaagtgctggaatgttactattggagtaaggactgatcagttgtggtattcacaacaatgacaacataamactttccacggtgtgctccaaaacaatatattaataataattgatttattaacatatccaaaagagtagagctaactatgtagctaaataaactcaatccatcatctatttagagaggaaatcttt

SEQ ID NO: 307063 - DNA, 552 bp, Homo sapiens
aaggtgattaatcagcatgccagttgactggttgtaatgtaattcatgatttgataggacagagactttaataagagaatattttagtaataatyttttttcaaaactcttggaaagtaaaataagtattttaaacttttccattttacctaataaacagtcatcctaacaattacctttcttgttctgcatagattacagtcctatataatttcatgaatttaaatccacaggcctagggtcatttatgcaatcattcagtctttgtttcctaggaaacagagtagtcaagagatggaaaatggccacccactttctttgcctctattatttgatcctgcactaatccatgaaattcataagattctttatttttttactgctcatatttggctgtggttttaagactggtttagattctcatttttatttgatattttattcaattttaaaatagttgctcatgatattaaaatgataattcttcattaatttatattgaaattctaaatatgattgtagaagaaatgaacagtactatcacatattttg

SEQ ID NO: 307064 - DNA, 505 bp, Homo sapiens
gtgagagtggtcatccttgtcttgctcctgttctcaaagggaattcttccagattttccttattgagtatgatgttggctgtgggtttgtcattgatggctcttaagtttatgtgatgaattacatttactgatcagcctatgttgaaccaaccttgcattctggggataaggcccacttaattgtggtggattagctttttgttttgctgctgaatctgctttgtaatttggtgaggatttttgcatcaaagttcatcaaggattttatcctgaagttttcttctttgttgtgtctctgccagcatttgatatcagggtgattctagcctcatagaataagttaggaaggaagccctcttctcaatttttttggaatmgttttcgtaggagtggtaccagctgttctttatacaatttagtagaatttggctgtgaatccctctggtcttgggctttttctggttggtaggctttttattattgattcaattttggaacttatt

SEQ ID NO: 307065 - DNA, 571 bp, Homo sapiens
aacaatatagtagatatcaccttgatagaaatagattaaacatgcaattgcaaaaatcaattgaaatttgaaaggaaagtccgactactgttgggatgtttataacttaatagaatttttgtagcactatagttaatgaactaatataagagattcttgaaaattgtgtttatgtcgaaatccttattgttctacctatataagacagtggaaggaattcaaaataatggcaactttttaaaagtcaataatcctgctgggtttttctgtaatgttttggaaagagaaggggagaaagagagtgagagagacaggagaatattatgaattgatgtttttgttattgttgactgcatccatccagcacaacattgctaatgctttaatttagactcyttatattcttgttcctgccaccacaatgattttattcccaactggccattcattcctcccacaggacctaacaaagccctcattctcaccatccataaaaccaccaagaacaatatttccagaacccatgtctcataaaataataatttgattaaaattacccaatgggttcata

SEQ ID NO: 307066 - DNA, 532 bp, Homo sapiens
gcttcagaagatgggtaataacaaactccactgagttaaaggaacatgttctaacaatgcaaagaagctaaaaacctagataaaaggtgataggagctactaactagartaaccagtttagacaggaacataaatgacctgacggagctgaaaaaacacaggatgagaacttcgtgaagcatacacaaatatcaatagtcaaatcgaccaagcagaggaaaggatatcagatttggaagaccatcttgctgaaataaagcatgcagacaagattagaataaaaagaaataaacaaagcctctgagaaatatgggactatgtaaggagaccgaacctacaattgactggagtacctgaaggagatggggagaatggaaacaagctagaaaacaccttcaggatattatgcaggggaacttccccaacctagcaagacagaccaacattcaaattcaggaaatacagagaacacgagtaagatactccacgagaagatcaacaccaagacacataatcaataatcatcagattc

SEQ ID NO: 307067 - DNA, 532 bp, Homo sapiens
gcttcagaagatgggtaataacaaactccactgagttaaaggaacatgttctaacaatgcaaagaagctaaaaacctagataaaaggtgataggagctactaactagagtaaccagtttagacaggaacataaatgacctgacggagctgaaaaaacacagsatgagaacttcgtgaagcatacacaaatatcaatagtcaaatcgaccaagcagaggaaaggatatcagatttggaagaccatcttgctgaaataaagcatgcagacaagattagaataaaaagaaataaacaaagcctctgagaaatatgggactatgtaaggagaccgaacctacaattgactggagtacctgaaggagatggggagaatggaaacaagctagaaaacaccttcaggatattatgcaggggaacttccccaacctagcaagacagaccaacattcaaattcaggaaatacagagaacacgagtaagatactccacgagaagatcaacaccaagacacataatcaataatcatcagattc

SEQ ID NO: 307068 - DNA, 485 bp, Homo sapiens
atcaaaatgtctcttctgggctccagactcaaataaccagttttatattcaatataaatattaagtaatttaattataattgattaatattaattaaacatgaaggatatctcaaatttaatccatcccaaacagaacatttgtttttcatctcaaaatytcatatgtgactagtcttacacagttccaacttggaaccatcaatcatatagtaactgaggttaaaaataaataaataaatacataaaaatctagaaatgaattaactgctctttttcatagtcttcttaccatgtggttccaagcaatcataaattatgtgtaagggtacctaaatgatctctaagaaattttgtttctggttgggcgcagtgcctcacgcctgtaatcccagcactttgggaggccgaggcggacggaacacctgaggttgggagttcgaagccagcctgaccaacatggggaaaccccatctctactaaaaa

SEQ ID NO: 307069 - DNA, 485 bp, Homo sapiens
atcaaaatgtctcttctgggctccagactcaaataaccagttttatattcaatataaatattaagtaatttaattataattgattaatattaattaaacatgaaggatatctcaaatttaatccatcccaaacagaacatttgtttttcatctcaaaatctcatatgtgactagtcttacayagttccaacttggaaccatcaatcatatagtaactgaggttaaaaataaataaataaatacataaaaatctagaaatgaattaactgctctttttcatagtcttcttaccatgtggttccaagcaatcataaattatgtgtaagggtacctaaatgatctctaagaaattttgtttctggttgggcgcagtgcctcacgcctgtaatcccagcactttgggaggccgaggcggacggaacacctgaggttgggagttcgaagccagcctgaccaacatggggaaaccccatctctactaaaaa

SEQ ID NO: 307070 - DNA, 485 bp, Homo sapiens
atcaaaatgtctcttctgggctccagactcaaataaccagttttatattcaatataaatattaagtaatttaattataattgattaatattaattaaacatgaaggatatctcaaatttaatccatcccaaacagaacatttgtttttcatctcaaaatctcatatgtgactagtcttacacagttccaacttggaaccatcaatcatatagtaactgaggttaaaaataaataaataaatacataaaaatctagaaatgaattaactgctctttttcatagtcttcttaccatgtkgttccaagcaatcataaattatgtgtaagggtacctaaatgatctctaagaaattttgtttctggttgggcgcagtgcctcacgcctgtaatcccagcactttgggaggccgaggcggacggaacacctgaggttgggagttcgaagccagcctgaccaacatggggaaaccccatctctactaaaaa

SEQ ID NO: 307071 - DNA, 575 bp, Homo sapiens
atacttgatgatctacacaggcaagaaaaaagtaatgtttttgtaaaaaaaatagaaaatktttttaggaaaatatagaaataatactatttctatatacaaatcaaatgtctacaaaagcaatctcaaaacatctaaacaacaaaagttaatatgaatttagccatctctcaaatataaggtcaatatataagaaatgattataatttgatatagtattgataaacaatagtaattaaaatttaataaaatttcagttataaaacttgaaatgcttaggtttaaacacagcaaaacatgtaaaatattcacatatttaaaattgctaaacgttaatgggagacatcaaagaaataagtggaggacacattgtgtttgtggattagtagactcaatatcctcatgatgtcagttctccttaaagtgatctgtcaattcaatatagttctaatcaaaatcccagaaggatttttttactttttaagaaattgacaaagtcgttaaaaaaattttatggccagacaaaataattgcaagagccacaagaaatttgaaacataaaaaacaagtttgga

SEQ ID NO: 307072 - DNA, 575 bp, Homo sapiens
atacttgatgatctacacaggcaagaaaaaagtaatgtttttgtaaaaaaaatagaaaatttttttaggaaaatatagaaataatactatttctatatacaaatcaaatgtctacaaaagcaatctcaaaacatctaaacaacaaaagttaatatgaatttagccatctctcaaatataaggtcaatatataagaaatgattataatttgatatagtattgataaacaatagtaattaaaatttaataaaatttcagttataaaacttgaaatgcttaggtttaaacacagcaaaacatgtaaaatattcacatatttaaaattgctaaacgttaatgggagacatcaaagaaataagtggaggacacattgtgtttgtggattagtagactcaatatcctcatgatgtcagttctccttaaagtgatctgtcaattcaatatagttctaatcaaaatcccagaaggatttttttactttttaagaaattgacaaagtcrttaaaaaaattttatggccagacaaaataattgcaagagccacaagaaatttgaaacataaaaaacaagtttgga

SEQ ID NO: 307073 - DNA, 257 bp, Homo sapiens
ggcccatatacaatactttaaataatctctagattatttctaatacctgattcaatacccaaacattagttcattcctgtggattcaatatagtactcagcaaattcaagttttgcttttttggaactctgtagactyttttcccaactatattccatccaaggttggttgaatcccacagatgaggaacccacagatacggagagctgactgtatatctacacacgaagtttccaattattacatctcataatatg

SEQ ID NO: 307074 - DNA, 559 bp, Homo sapiens
ggaagctaattacatcagcattttttcctacatacccaagaatataaaactatagagcaatcaacctgagacagattcccttaagaaacagtttcccttaagaacagtaattctgcacatattaktcaaaaatttcctattaattaaaaacacgagtagagctaaagaaaggggacatttagaagctgtacctcacagattcaagtttttccacaagtaatactctatctgtgcctaacttttgcctttatcttttaatcattaataaacttggtatttggtgagataaatagatagacatagtggcctctaacagttaggagttaatcattttattttgttcccatatcagagatgtacatgtttttattaatggtgatgtgaagagaaatttatgagaaagaaaactaacattagttaagacatatagaagacttttcatataatttagctcttttactttttgttataacttatctatccccttctaataggtggagagagactccaagatatttactaacattatcaagactgttttaaagtcacaaatctatga

SEQ ID NO: 307075 - DNA, 559 bp, Homo sapiens
ggaagctaattacatcagcattttttcctacatacccaagaatataaaactatagagcaatcaacctgagacagattcccttaagaaacagtttcccttaagaacagtaattctgcacatattattcaaaaatttcctattaattaaaaacacgagtagagctaaagaaaggggacatttagaagctgtacctcacagattcaagtttttccacaagtaatactctatctgtgcctaacttttgcctttatcttttaatcattaataaacttggtatttggtgagataaatagatagacayagtggcctctaacagttaggagttaatcattttattttgttcccatatcagagatgtacatgtttttattaatggtgatgtgaagagaaatttatgagaaagaaaactaacattagttaagacatatagaagacttttcatataatttagctcttttactttttgttataacttatctatccccttctaataggtggagagagactccaagatatttactaacattatcaagactgttttaaagtcacaaatctatga

SEQ ID NO: 307076 - DNA, 587 bp, Homo sapiens
atctaggtactgaagaatgcaatttaaaaaaatttagcagtgtctggaatttttaaatcataccaagttagaattcgcaatagtctcgccctggctatgctggcgatttttcactcatgtagaagttggggtacgtcggctacagataattgttggtgtcgcaaataccggtttaaccatggctgtttcttcttaatccgaggaaacttcggataggcgcaagaggcacgggtttagtgctgacaaatataatggtaggatctcaccattcgaccctgtttgcaatttctttctgtttgtaggatgctttgtatgttttgtatamtcaaaaaaaaaatttttttttggtgtatcttgttctggcagcgaggttatcagtgtattttgttttaatttctatttgcttttaaatttttaattattttttaatttaaatgttacggtatttttttcttacccactgtcttccccggtagaataaatgtggcgtatttcttctactgattttcagtgtcacgtctcaggttctttctaacttgccttctcccgtgagcactgaaggcgagctagttccccgccgctagggt

SEQ ID NO: 307077 - DNA, 589 bp, Homo sapiens
accttttgggttgtccttttatttagcagtttcaactgagttggatatgcttctcactacttaattggaaacaacagagtgtcaagaggctccttacctagtgttgtaaattagsctttataaaactaaaggggtttgaagtgaagatttagctttatatctaattgagattaacatttgccaagatagctgccaagaatattctgcatttagttcaataatttctgtagttacgtaatgaaggaagatctattttgctttatatgatttttaagtctattttgtagttatacatttgattttcgtgcttgtgtatgattttctttttttttcttattttacctaggacaccattttaaggctcacaaggctgttttggctgcttgtagtaagttcttctacaaattctttcaggagtttacccaagaaccattggtggagatagaaggtaaatgattcttgttgtttttttatttaataaatcaaagaagccattttatttaaatgcttgttttaaatacaatacttagcaaacaattggtgaagcagttttagacagtttatcaagacaccataggaaataggcatc

SEQ ID NO: 307078 - DNA, 589 bp, Homo sapiens
accttttgggttgtccttttatttagcagtttcaactgagttggatatgcttctcactacttaattggaaacaacagagtgtcaagaggctccttacctagtgttgtaaattaggctttataaaactaaaggggtttgaagtgaagatttagctttatatctaattgagattaacatttgccaagatagctgccaagaatattctgcatttagttcaataatttctgtagttacgtaatgaaggaagayctattttgctttatatgatttttaagtctattttgtagttatacatttgattttcgtgcttgtgtatgattttctttttttttcttattttacctaggacaccattttaaggctcacaaggctgttttggctgcttgtagtaagttcttctacaaattctttcaggagtttacccaagaaccattggtggagatagaaggtaaatgattcttgttgtttttttatttaataaatcaaagaagccattttatttaaatgcttgttttaaatacaatacttagcaaacaattggtgaagcagttttagacagtttatcaagacaccataggaaataggcatc

SEQ ID NO: 307079 - DNA, 529 bp, Homo sapiens
acaaaagaaaacaaggaaccagcaaggaaaaacaaaacaaaacaaaacaaatagcagcagatgtcagataggaattatcagaaagattataaaacaattatgtttactataataaaataatgaaaatgcaagctgacatgcttagaagtaygaagtaaaaaaagtctattttgacttcaggctagactctagtgacatagcctccagtgttggggtgatcagtgttcactctgagtcattctgcaggaggaagagcttctctagccacgttgggatcttatgatttgctgtttccactggaacacatcaaaaaccaccatctccagcaagttatatcatagagtctacgacccctactggggaggagggaaatacaccctgagctgcatgttgtttctaaatggatactgaaaagtgtcttactgatgatggacagctgcccaactttaggataactcaggcctcacccaaaggcagacatagacagaagaatacatatcctccaaatttctttcaggttgacagggct

SEQ ID NO: 307080 - DNA, 536 bp, Homo sapiens
tagaagtatgaagtaaaaaaagtctattttgacttcaggctagactctagtgacatagcctccagtgttggggtgatcagtgttcactctgagtcattctgcaggaggaagagcttctctagccacgttgggatcttatgatttgctgtttccactggaacacatcaaaaaccaccatctccagcaagttatatcatagagtctacgacccctactggggaggagggaaatacaccctgagctgcwtgttgtttctaaatggatactgaaaagtgtcttactgatgatggacagctgcccaactttaggataactcaggcctcacccaaaggcagacatagacagaagaatacatatcctccaaatttctttcaggttgacagggctgccttgattcaggtagcagacacagatcactaagtgtttttctgcgtgcaacttcattgtccttccaaataatagaaattctttcattttcatcagtagaatgactttcagtgtctgtctgactatactgaaggctataatataaattc

SEQ ID NO: 307081 - DNA, 579 bp, Homo sapiens
acttcagattatctagtcaaaaagtttacatgtgagaaaacagtggattttctctttggctagttaatggcacagccagaatgagactttggagtctccttcatatttcagtgcaccacactgactctctgctgtgaactgaactgtatcactccaaaatccatatgttgaagacataacccccaacgtgactgcatttggagatatggcatttataaaagtaattaaggctaaatgaggacataaggatggggccctgatatgayagaattagtgtccttataagatgagatacaagagagctctttctctctctaccatatgaggagaaactgagaaagtgaccatttgcaagctaggaaggaaaacaactctcaccaaaaagcataccctgccagaaccttgatgctggactttccaacatccagaactatgaaaggataaatttctgatgtcggagtcaccacgtctatgagattttgttatggcagccctagcagactaatataccctcctccttagttcttcaagacttcaggccaacctgtacctccagagaacagaattgccagcaataag

SEQ ID NO: 307082 - DNA, 592 bp, Homo sapiens
tggacagtggggctaatgaaaaatggaaaggcactgaaaatcttcaggagtgagcactgaggagcttcagcctgtacccacttgcaccaaagacagctgcatccattcctcagtctctgtcgcttttcatgccaattaggcaaatacagtggggattaatctactgtgtcgtaacagcagatcattgctcctccaaattagtaaaaatgagagctgacagtataatttcagagatagaagggactttcaaaatcatatggtccaacttcatttcatagatgagaaaattgaagattaacatataattatgtgacttacccaaggtcatcgagcttattacaaatggaactggacctagaaattagatctcctaacatcaaagggaatgatatcgctcctccattaggtcttcataatgaacaagtgacagatatcagtatagatattctcawaaaattaatagtcatcaatattttaattacctttggatatgtggatgtgaataacacaaagttagtagaaaaatagggtaaacaaaaaataatttagtagaaagcagaaatttaagtctacaaaacttcaaatgggatga

SEQ ID NO: 307083 - DNA, 601 bp, Homo sapiens
gatattctaggctttttaaaagaagaataaggataaattatattatgtatttcttccagacaacttttcaaagccaaatgaattttgatttatgatatccttctgaacatcaactttcagagcctcctactcattcacatgtgagacttattgaagtaacaccaagttctctgtttaaagttctatttattcctctgctgtcctctgtggttgtccttcaggctggttgtgtgagtggtacctaaagtgatgcacgtcaccatacatctatcaagtgtaataaggtaagtaattctgcccaaagtgctttcctcaaactagcccagtaaccaagttctccttctttaaacaacatgctcaagaaaaatatttgcagatgcttatactcaatagccatttgctttagttgtggaaataagtaacaaagactaaaatmtttaccttttggagatcttcctccaaatatcctgttatttctggagtaatatttgtgaagaattgtaaaccatatatggccctttatggccttagttgttattattattattttggtagcttaatagtcacttaaaaatggatatgcatgacagcttatagttgt

SEQ ID NO: 307084 - DNA, 552 bp, Homo sapiens
tatggataaaatttgtgtacctattcctaatcatttaatgtaaatggttctggaatcaagtacagtacctggaattaaacagacctggttcaaattctagctataccacctaccaactgtgtgacttgsgcaattcaatcaatcaatgagactcagtttcctcatctataaaatgaagatagtaataatatctatattattaggttgttgagagttttagataagatcctagaaataaaccacatagtatgatatctgcaacatattaaacacttgataaataatatgtcttatttttattagaaaattctacatttaagacttttgagatatattgccaaactttccccaaaaaatattgtatgaatttgtttttttatcagccatgtgtgagacagcccaaggacatatattaggtagtagagttttactacaccaccactgcttcagagaattctgttaataggaaagatctagtttaaagcagccacggaagcagtcagtgctctgctatatctctttggatttctttaccacgttcatgcacgccaa

SEQ ID NO: 307085 - DNA, 572 bp, Homo sapiens
agctggtattgatgactactttcttctactacccattctgtattccctttgttttcagcaaacactccagcaggttgtggtttctttcctggtggagtgacccaaaccttcattccttaggggtctggaccatttgtagttctgcctggattgggctgttgtagttttccattgacctcaatcacagggcgtggtaatagtaagagacaccctaatggatcccctgtattccatggatactcttccttagctctgttttggagcagtagattgatttcatcttgatagtctgggtcaatcaccccagcaaacactgtatttcccttcttagcctgttgacttaaaggtagggggaacccaaagtgtccaggtggcaatcataactttcagtttaattgaatagttgtgtctgctggtggcagcattcctccctctggaagtaagacctctaggtcagcagaacgtaatgtcacaggaacaggaagcaaaaatwttgctagtggatcactatgggtgatagtgagtggtgccacttccacttctaccccttgattcctgacttgtgaatcctg

SEQ ID NO: 307086 - DNA, 588 bp, Homo sapiens
aagtgtctattccagtgagtacaaacctctttcctttctatgatggaagaggtccaatataatcaacctgccaccaggtagctggcggatcaccctgaagaatggtaccatatcaaaggctcagtgttggtctctgctgctggcaaattgggcactcaacagtgggcgtagccaggtcacccttggtaagtggaagtccatgttgctgagccatgtgtaactttcatccctgccaccatggccactttgttcatgggcycattgggcgatgacaggggtgactggggaaagaggctgagtgttgtccacagaacaagtcatcctatccacttgattattaaacactgcctctgctggggtcacccattggtgagcattcacatgggatacaaatatcttcacaggttttgactattcagagaggtccatccacatacctattccccaaatttcttagtcaccaattttccaatcatggttcttccaaatccctgaccattcagccaaaccactggctacagcccatgaatcagtatataattccacatgtggccattttttcttccacgcaaagtgcacaaccaggtg

SEQ ID NO: 307087 - DNA, 542 bp, Homo sapiens
tttatgccagttccaagttgtcttggtcactataactctgtactatatcttaaagtcaggtagtgtgattctttcagttttgttctttttgcttaagctagctttgactattctgcatcttttgtggtttcacatacattttagggttgtgttttctatttctgtgaagattgtcattggtactttgatagaggttgcattaaatctgtagactgttttgggtagtaggaacattttaataatattaattcttccagtccataaatatggaatatcttttggtgtgtcttcttcaaggtctttcttcagtgttttatagttttcattgtagagatctttcaattatttggttaatttctaacatgtttttcttcatttgttgctattgtgaatatgattactttcttaatttttttcttaagatggttggccgttggcmtatagaaatgctcctgatttttgtatgatgattttgtattctgcaacttcactgaatttgtttattagttctaatagctttttggtggagtccctaggttttt

SEQ ID NO: 307088 - DNA, 610 bp, Homo sapiens
gaggatttttacagctgggcygccgggggtgacatcacatatcggtaggtctgtgatgcccacctgagctgcaaaaccagcaggttttcattaaggacttcaaaaggggagggggtgtacgaacagggagtaggtcataaagatcacaaagcaaagggcaaagcaaagatcacaaggcaaagggcaagatcaaaaactcctgataaaggtctatgttcagctgtgcatgtattgtcttgataaacatcttaaacaacagaaaacaaggtttgagagcagagaaccgggctgacctcaaatttaccagggctggggtttcccaatcctagtaagcctgaggttactgcaggataccagggtgtatctcagtccttatcccaactgcataaaacagacactcccagagtggccatttatagacctccccacaggaatgcaattcttttcctagggtcttaatattccttgctaggaaaagaatttagcaatatctctcctacttgcatgtccgtttataggctctctgcaggaagaaaaatatggctctttttgcccgaccccactggcagtcagaccttatggttgtcttcccttgttccctaaaatcgct

SEQ ID NO: 307089 - DNA, 636 bp, Homo sapiens
aaatttagttaattttctcatgaatagtaaaatttccagcaccgtaagccagccccttttttcctgctctccttcaggttatggctgcttagtgaagcagaacccattttttttttttttgtagagacctgtggatttatcaactgtctgcaggaaatgttcttattcacattgctctttttgcctgagctataagttgttgtaaatgtctaaagtctcttgcctgggtgggaaaataaagtgatcttttctcacttgcttagtctgactccagcagtttgcacatttgaagtgaaacattgcttaaattgttcccagttttctttgacatttcctgaaaggcagagtttaggcaggctttttcyattatcattctttctttgcttgtaccatttctggctgtgttgaaggagattgatagacaccagcataatatctcacaaatggaactgttgttgagagactgtttctatgtgtggcactgggctcattctacctgagtaaacgtttctaaaccatttgcttcaggcttgattctcatgtttgtcaagtagaaagtattgttccactagctctggatctgaactcaacttttatgaacttcttgaaaaaaggaaataaagactttagacatga

SEQ ID NO: 307090 - DNA, 600 bp, Homo sapiens
atgattcagtatgggggaaagaaactaatcctcaggaagattaaggagcctggcttaacaattagtcaaattaaatgtgtcaaagtagaatkagagatggcattgcacctcccatgttgctctttattttccagtttctcctcttagagctttaaaaaaacgacgatgtaatcacctgaccaacttacttttcctaacaaaggaaaaataatatgatttctaagcattttatttctgttatagaaaaaaaaactttaaaatataaagactaaaggcaaactaccgtactataaaagctgtcaagtgactagatgcatccctggaaagatggagaaagggcattatttaggaacgaagtaaggaccaagccctcactttgtgtcaacacaatttagtccttataatatctgagtctattgccatatggcagcgcgtacttctccctttcgctcattatcaatcttcagcgccacagttatagagcaacacagctgaaggtcacattgaaggatgattcttgagaataaggtggagttctaggcagcgcctctagatggcactctttcttatcagtagtcaacgcgaagtttcatttcctat

SEQ ID NO: 307091 - DNA, 620 bp, Homo sapiens
cattgaaattccatttctatttgcaaaataaagtggaaaattgaaagaggtttcccattaattcaggcattaagtccacttatgctagaactttctagctaattgaagcacacatagcttttaaagacaagtcaatagaggcctgacccaatatattaccataaagtgcattgggtagatgtcacagcagcagatgttaggtctatttaatcctgagtctagttcagcagtgggtaatactatcattaatccactgagagcacatacccctcagatgataattagaaaggaactttttttaagtatctacaattacagtgacactctcaatagccttaattatggaaataactttcacattaaattcacctgcttgataatatacagtaaaagtctatttctgctgaactgtgttgtttgttaaagcatcagtgcctgaggttcagctattctacatgtgaatattagagccaacatctctagagtttcaaytcagattaaaagctggtattaatttgactagagttagtgttgtatgctcagcatgaaaaaatacatctctaggaaaaaagctagaagatcccaagtaacattctaatctcggttttatctcctattgt

SEQ ID NO: 307092 - DNA, 562 bp, Homo sapiens
aagctcacaatgtcagaccatccacataaagtttccaggaaaaaattaatcttgtttgtgccctaattgaagaggattgatgattaacagcagaaaaaatagccaacacaatagacatctcaactggtgtggcttacacagttctgactgaaaaagttgagcaaactttccacatgatgggtagagaactgttccacccagaccagctgcagacaagagcagagctttcaatggaacttttaaataagtgggatcaatttcctamagcactggttccaagaattgtaacaagagatgaaacatggctttaccagcacaatcctgaagctaaagcacaaccagagcaatgactatcaaacgttagaggtggtccagtcaaagccagagcagatcaatcaagagcaaaggtcatgacaacagttttttgagatgctcaaggcattttgcttgttgaccttctggaggaccaacgaatgataacttctgcatattatgagagtgttttgggaaagtgatcccaagcttcagcagaaaaacccccaggaaagcttcactggagtct

SEQ ID NO: 307093 - DNA, 599 bp, Homo sapiens
ggaataacgcacattggggcctattggaggagggagggtgggagaagggagaggatcaggaaaaataactagtgggtgctaggcttaatacctgggtgatgaagtaatctgtacaacaaactctcatgacacaagtttacctatgtaacaaacccacacatgtacccttaaacttaaactaaaagttaaaaaaaattaatttaattctgagtcagtactgtttactgaaaagtacttcctttccccctgccctatggtggaaactgccaccactttcgttgtatattagccaactgtatatttgtgagtctgtttctgyactctattttgtgtcatttttctatttgtctatccttgcatccattccattttaactgttatttgttgacccttgcaatctgaaaatcctctaactttatttttcttttaagtttgttttgggtattcttaagagtttttatgtccatacaagttttagttcaacatcagcttgttaatatcaacaattgaaaacaatagcaacaacaataacaacaacaacaaccaaagccaaaaaccaaccaaccagacaaataaacctcttgggattttatttgaaa

SEQ ID NO: 307094 - DNA, 570 bp, Homo sapiens
ttgcattactgtactagctaggatatacagatcaaaatcgaatagatgaggtaaaagcaaacatctctgtatcgttcttgatttccgggagaatgattttaatgctttaccattaagtatggtatttgctataagggtttttgtagataaggattgatttttattatatctattttagttgttaataattgttaatcgttgtttcatttctttttctttagcctactttctttcagcctgagactgagtcctcctacaccctccaacagctttgtaaacagttttgtaaaatgcctcttgattttccacactgtcaaatctgccagttaatcagatccattccttyttttccttttctggagacatgtagattgtttgcactccacctgggtgcttctaggactccctttgccatcattctgggaattccagttgcctttttctgatttccaggggctgttcttggttccttaattttctttcttcttggcttcttcccatgtttccgtggtaaacaactttagccatttcctttgggcacccgagctcacagtgcagcatggagcatca

SEQ ID NO: 307095 - DNA, 601 bp, Homo sapiens
cacctcctttccctaccaaaggcagtacccccttagacttgaggccaaacagggactcaaaaaaattgttaaggacctaaaagcccaaggcctagtaacaccatgcagtagcccctgcaatactccaactttagcagtacagaaacccaacggacagtggaggttagtgcaagatctcaggattatcaatgaggctgttgtccctctatacccagctgtacctaacccttacattctgctttcccaaataccagaggaagcagagtggtttacagtcctggaccttaaggatgcctttttctgcatccctgtacatcctgactctcaattcttgtttgcctttgaagatccttcaaacccaatgtctcaactcacctggactgttttaccccaagggttcagggatagcctccatctatttggccaggcattagcccaagacttgagccagttctcatacctggacactcttgtccttcagtayatggatgatttacttttagtgacccattcagaaaccttgtgatgtcaagccacacaagcgctcttaactttcctctttacctctggctacaaggttttcaaaccaaaggctcagctc

SEQ ID NO: 307096 - DNA, 564 bp, Homo sapiens
agaataagcacatgctagcgtacctgcaaagcaggagcaataaaaacaatgagaggaaggagggacattttgggcacaagttagataattgacattcaaacatgaaggaagaaattagaaaagttagaacttgggctgtcatactgcttatttatttgcagcaagttctaatgacttcatcttctgaggagagagagagagagagagagagagagagagagagagtgagttagttgacgtggtgaggacaggcttcctgcagtcagctggctccacatttggctttgaggatcggcaggcaaagtgctaggggtcagcggagacatagtggccagttttggcagaagggagatgagagaagtagtttggaaaagaagctgaagactaaatgataggaggccttggatattgagagtaagaaacttgaayctgattctttatgttataaatatcttttgaagggttttgctaaaggagtgtgacgtggaaggggtattttagaatgaagaatctggaagagtgttgctggagaggttgaaaggtagagtgactggagggaggaga

SEQ ID NO: 307097 - DNA, 558 bp, Homo sapiens
agggcttacatttaggtttttatccattttgggttaatttttgcatatggtgctaggtaaggctccagcttcattctttgcatatgactgtccagttttcccagcaccatttgttgaaaagactatcttttccccattgagggatcttggcacctttgtaaaataattatttgaacataaatgtgcaggtttgtttctgggcttcctattcaattccattggtccatatttctgtctttataccaatactacactgctttgattattgtagctttgtattaagttttcaaatcaggaaatgtgagtcctccagctttgttcttctttttcaagattgttttgtcagtttgggatcccttgaaatttcrtatgaattttaggatgtgtttttctatttctacaaaaaaatgggattttgatagagattgcattgagtctatagattgctttggatagtgttgctatcttaacaatattaaatctttcaattcatgaaaaagggatatgtttccatttacttatgcctttaaaaatttctttcatcaatattttgtagtt

SEQ ID NO: 307098 - DNA, 593 bp, Homo sapiens
ttgttcttattattggagtatgtgaagattggccaaatttttagaggctgttgggaaaacctgctcatgagagttttttatttgcaagaaaggaaaaaaccaccagtgttaaagtgcactttctaattagccaaagtcttggccaggcgtttactggcaaaagctgatccggtgaaatcttgaatgtgccattcaggtgtttcaattccatgatgggtttatttattcaaaatggcagactcatattcaagttttgtttcyggtgttgcttaaatttatatgatgagtagtatattagtccattctcacactgctaataaggatatacccaagactgggtaaaggaaagaggtttaattgactcacagttcagcatggctggggaggcctcaggaaacttacaatcatggcggaaggggaagcaaacatacccatcttcacgtggcagcagcaaggagaagtgccgagcaaaaggaggaaaagctccttataaaaccatcagatcttgtgagaactcactcagtatcatgagaacagcatgagggtaatctcccatgtgattaaattacctcctactgagttcctcccacaac

SEQ ID NO: 307099 - DNA, 580 bp, Homo sapiens
tgttttgtatctctaaaggtatgaggattttctaccttttttgctattgatttccaatgtaattgtctagcggttaaataatacgttctgaacaatrccaacctgctggaatttattgaggttttcttaaagcctagcatgtggtcacttctctaaatgggtaaatgtatacttgaaaagaatatatattctgagagagagagagagagcgaatcatagatcctgattgtctattgtgctattctaatttttaacattattactgacttaaaaaaatctgtctctaccaattactaaaacaaatgttagaaaaacttcaactatgattgtggatttgttaatatctcttgtagctgtcaattttttacttcatgttatttgaaactatattattagttgtataaatgttgtatcttcctaatgagtagaatcttaatcattaggtataatatatgtctaatattacccagaattgttttggttaacatttacctggcatatctttattcacttttttgattaaaatacattttttttatagacagagtcttgctttgttgcccagactggaatgcagtgg

SEQ ID NO: 307100 - DNA, 575 bp, Homo sapiens
ttctgctctgatcttggttattttctttcttctgctaagtttgggtttggtttgtttttgtttctctagttccttgaggtgtgaccttagagtatcagtttctgctctttcagtcttttcgatgtaggcatttaggactatgaacgctcctcttagcactgcctttgctgtatcccagagattttgatagctagtatcattattgttgttcagtttgaagaattttttaaatttccatattgattttgtttttgacccaatgttcattcaggagcaggtttttaaatttccatgtatttgcatggttttgtaggttccttttggagttgatttccagttttattccactgtggtctgagagagtgtttgatataatttcaattttcttaaatttatttaggctcattttgtggcctatcatatggtctgtcttggagaaagttccatgtgctgttgaatagaatgcatatcytgcggttattggatgaaatgttctgtatgtatctgttaagtccatttgttccaaggtataatttaaatccattgtttctttgttgactttctgtcttgatgac

SEQ ID NO: 307101 - DNA, 575 bp, Homo sapiens
ttctgctctgatcttggttattttctttcttctgctaagtttgggtttggtttgtttttgtttctctagttccttgaggtgtgaccttagagtatcagtttctgctctttcagtcttttcgatgtaggcatttaggactatgaacgctcctcttagcactgcctttgctgtatcccagagattttgatagctagtatcattattgttgttcagtttgaagaattttttaaatttccatattgattttgtttttgacccaatgttcattcaggagcaggtttttaaatttccatgtatttgcatggttttgtaggttccttttggagttgatttccagttttattccactgtggtctgagagagtgtttgatataatttcaattttcttaaatttatttaggctcattttgtggcctatcatatggtctgtcttggagaaagttccatgtgctgttgaatagaatgcatatcttgcggttattggatgaaatgttctgtatrtatctgttaagtccatttgttccaaggtataatttaaatccattgtttctttgttgactttctgtcttgatgac

SEQ ID NO: 307102 - DNA, 609 bp, Homo sapiens
tgcatcttttctaatgtgaatttatttttgccttataagtaacaagtaattttttttcataatttgacccacaaacatttgcagtatctactgaacgcctaccactgcatgcaggatactgtacagagtagcttttaatctatccttttaaagcatcattgtctgtattgaaaacattgctcgtgtctaatgtgtttctgaaagtttccatgtcactaagatgccagcctggggctatttaatattgtatcagatgtcttttgttatgtatttattaaaacaggttctatataaaaatacattcttgtgaaagttctctttcagactcttctgaaggaaaacatggttcttgacagctccttggcagcttagttttttcaaacgtgctttatatctgtatttacwtttttttttgacattttacacttacagattgctgatttgtttccacatgtctcttatggtatagttcttgagcaatttcctgaaaaatacgccgagcactcttcttctataaagacaaatgagaaaaaaaaattctcttttgggaatataagcgatgataacgacgcatcatcagaacttttcttgctctattgccaccggtcc

SEQ ID NO: 307103 - DNA, 603 bp, Homo sapiens
cacaaggttccctttggacatggtactttacactaaatcactgtaatatacaaaagaggtgaacatggttggttaaacatcaccatgtagggagaatagagcacccagcaaatcactgactttgtgttagtggatgttcgagatggattggagtagttcttttgtttttctgagatggagtcttgctttgttgcccagactggagtgcagtagtgcgatctcggttcactgcaaccttcgcctcctgggttacaagcgattctcctgcctcaacctcccaagcagctgggactacaggtgcatgccaccatgcgcggctaatttttgtattttgagtagagatggggtttcaccatgttggccaggctagtcttgaactcctgacctcaagtgattcgtccacctcagcctcaaagtgctgggattacaggtgtgagccaccacgcccagccagttggagtagttctttagtccaaacctcatggtgacttgtgttcagatcacacccatcactggctagggtattaacttagcaaatttatctcctgatttctacatgtgagtgargtaatgattttacaggcctgaacaagatgcaatgat

SEQ ID NO: 307104 - DNA, 520 bp, Homo sapiens
tgaacaagatgcaatgatgcactgaaataaagcctcgctgactgacctcttaccaccagtgtggtccctcctcctgtctgtttagctctcgcttccggcacactggggaatgctattccacagatgtaaattgcactgtcatttgaagtcactctgtttacagtgagggaaacttggttttctttgagggcctccctcactgtgaacttgtctgcctcacttttgcacccrtccaagcacaggttctcaggctggtgagcaccgtagcgaaaccacaggcatgttggttgctcagaagggcatccggttgcggagaaggtacactttatggtgacggcctcatgagtgtagtccacttctaggtaccacggttgtgtgacagagagagtacaggcgcccacagcacctgtgggaggaagcagatgagtgggttaatgggcctgccacctcactttgtgcttttattatatttttgaggtaggaaacccagccattctgttatttttcttaccttaatccc

SEQ ID NO: 307105 - DNA, 522 bp, Homo sapiens
atgaagattacatgagttaatacttgaaaacattttgaacaatgtctggtacatagtagtcaataaaaattagctgtttttatgttgatattgacatcattgcattgtcatcatcaacattatcatcattacagcccctttctctgggttagtctcctcctttgcaagatgagagggttagccccaacaatctgaggttccttccagtctgatattctataatcccatggttctttgactctaaaactggttttgactagtttgagaagtgccacatcacactgtgctattaaaatcattctatttgcaggctcggagaaacagaaaaatacatscagaaactagggtatctccttcccttcgcaccgattttaattctcatggatggcagtgagatttatcaatatgtttgaagaggatatgaaaacctaacatttgcatgtatcatttgtagtcagttcttcaactttagctcccaatcaaccttaaatgcaggtttctagattaatagtcagacctgac

SEQ ID NO: 307106 - DNA, 600 bp, Homo sapiens
atagagcttaattcatctcctgagaaaagtactagaaagggtcccaagtccttcgtggtctcggctgtccagtgctgagggagtctaaaaagagataataaccagtaaagtgaaaaaacatgctgtggtggacatctgttgccttttcccccagcacccttttctttcaggaayagattgtcttatactcatgtcaatcacatggtcccacttccttgaccaagaaaattggcatgtgatgcaggctgaccaatcagagtcatccctgggagttttgatggaactatcagagaagctctcctttctctggtatctctggcagtaggggaggatattggaggacattcatattaccaagtggaaaaagtaaagaccacaccaaggaacacagagctgagggatgggaggaacatattcctgaagatatcatttgagacacgggattcagccatgcctgaagaccaccagtggagtttcccgttacattccattcctgaattcaatacattcccgttctctttagtttgaattaaattattgaatttctgccatttacatcacagtgtgtccttcttctccctcctcaatagaagagtaatt

SEQ ID NO: 307107 - DNA, 600 bp, Homo sapiens
atagagcttaattcatctcctgagaaaagtactagaaagggtcccaagtccttcgtggtctcggctgtccagtgctgagggagtctaaaaagagataataaccagtaaagtgaaaaaacatgctgtggtggacatctgttgccttttcccccagcacccttttctttcaggaatagattgtcttatactcatgtcaatcacatggtcccacttccttgaccragaaaattggcatgtgatgcaggctgaccaatcagagtcatccctgggagttttgatggaactatcagagaagctctcctttctctggtatctctggcagtaggggaggatattggaggacattcatattaccaagtggaaaaagtaaagaccacaccaaggaacacagagctgagggatgggaggaacatattcctgaagatatcatttgagacacgggattcagccatgcctgaagaccaccagtggagtttcccgttacattccattcctgaattcaatacattcccgttctctttagtttgaattaaattattgaatttctgccatttacatcacagtgtgtccttcttctccctcctcaatagaagagtaatt

SEQ ID NO: 307108 - DNA, 568 bp, Homo sapiens
tttttatacagcccatgagccaaaagtggtttttacatttattattttggacttttttttagagacaaggtctcgctctgtcacccaggctggagtccagtggctccatcacggctcactgcagtctcaaactcctaggttcaagggatcctccccccctcagcctccagggtagctgggactacaggcatgtaccaggacaccggctattttttaaaaaattttttaagaaatggggtcttgctatgttgcccaggctggtcttgaacttttggcttcaagtaatcctcctgcctgggcctcccaaagtgctgggattacaagcatgagccactgcaccctgcctgctttttaccttttttaatagctgaaaggaaaatcaaaagaagaatcctatttggtgacacatgaaaattatgcaaatttcagcatccattagtaaagctttactgggacacaggcatgctcattcatctattgtctacagctgtcttcaagctgcagygtcagagctgaatagttgaggcagagatggtaggcttacaaagcctaaaatatttacctggtc

SEQ ID NO: 307109 - DNA, 619 bp, Homo sapiens
ctcgacaccgagtttcctgaagtgtcccctgttattaggtatgtcttgttttgtaggacagttaatcatttagtggcctgtttacaaacattttaaggcgtgtttatagggcagccataatatttctcttcagtctgtacttctgcgtgctaaacacactcatgtttctaggtccttcacaaacttggttgactttattaaccaaaagacaataatgaacactgaacacccaaacccmaaatcagtctgaggggcacagtgtacaaggttgttacttccactgccctgttcattccatttctactaatgcatcctacagatgtgctaaggctatagacttttatccaaatctataaaacaataacttggtttatattgtaaaacatgcatcttaaaatctattcattatttaatttaacctactcattcatccatctaattaattcaatgataccttaaattctgactctaaaataatgtagattaatccactattcccatgttactaagtttagcagatgtttctcaaaatgtgtcatgggtgtcctctccttaagtggttaattctaattttctcaacattctgtgacacatgagggcttacaatatttttaagaca

SEQ ID NO: 307110 - DNA, 619 bp, Homo sapiens
ctcgacaccgagtttcctgaagtgtcccctgttattaggtatgtcttgttttgtaggacagttaatcatttagtggcctgtttacaaacattttaaggcgtgtttatagggcagccataatatttctcttcagtctgtacttctgcgtgctaaacacactcatgtttctaggtccttcacaaacttggttgactttattaaccaaaagacaataatgaacactgaacacccaaaccccaaatcagtctgaggggcacagtgtacaaggttgttacttccactgccctgttcattccatttctactaatgcatcctacagatgtgctaaggctatagacttttatccaaatctataaaacaataacttggtttatattgtaaaayatgcatcttaaaatctattcattatttaatttaacctactcattcatccatctaattaattcaatgataccttaaattctgactctaaaataatgtagattaatccactattcccatgttactaagtttagcagatgtttctcaaaatgtgtcatgggtgtcctctccttaagtggttaattctaattttctcaacattctgtgacacatgagggcttacaatatttttaagaca

SEQ ID NO: 307111 - DNA, 514 bp, Homo sapiens
tgctgtgtgctctccaacagcagtatatgatagtgattaaaaatgtgactcaggagttagagaggcctgagaakgaattctgactgtaggacttcttacacgcattatcttagacattttcctacccataacgtagagtgcataatagtatctttctcctagggtcatgaaacatgaaagaaaaaaggcatgtgcaatgctgaacattatagctgagcacttacatgtgtcagctatcattaccattatcattattattattattatagataaaagctccctactccagatgtcccatttgaggccccaaatgtttgtcggattccccagggagtagaaggcgtgtgagtggagtagattgtaaacggtcctgtcaatcaaacaggttagtctaattgccctctcgaaagtaccagactccataagaaacgaccctacgagacaaaatgaacttccctaatataaaagcaggtgttaaagacattctgagttaagcaaaactaggcataccaaa

SEQ ID NO: 307112 - DNA, 514 bp, Homo sapiens
tgctgtgtgctctccaacagcagtatatgatagtgattaaaaatgtgactcaggagttagagaggcctgagaatgaattctgactgtaggacttcttacacgcattatcttagacattttcctacccataacgtagagtgcataatagtatctttctcctagggtcatgaaacatgaaagaaaaaaggcatgtgcaatgctgaacattatagctgagcacttacatgtgtcagctatcattaccattatcatyattattattattatagataaaagctccctactccagatgtcccatttgaggccccaaatgtttgtcggattccccagggagtagaaggcgtgtgagtggagtagattgtaaacggtcctgtcaatcaaacaggttagtctaattgccctctcgaaagtaccagactccataagaaacgaccctacgagacaaaatgaacttccctaatataaaagcaggtgttaaagacattctgagttaagcaaaactaggcataccaaa

SEQ ID NO: 307113 - DNA, 514 bp, Homo sapiens
tgctgtgtgctctccaacagcagtatatgatagtgattaaaaatgtgactcaggagttagagaggcctgagaatgaattctgactgtaggacttcttacacgcattatcttagacattttcctacccataacgtagagtgcataatagtatctttctcctagggtcatgaaacatgaaagaaaaaaggcatgtgcaatgctgaacattatagctgagcacttacatgtgtcagctatcattaccattatcattattattattattatagataaaagctccctactccagatgtcccatttgaggccccaaatgtttgtcggattccccagggagtagaaggcgtgtgagtggagtagattgtaaacggtcctgtcaatcaaacaggttagtctaattgccctctcgaaagtaccagactccataagaaaygaccctacgagacaaaatgaacttccctaatataaaagcaggtgttaaagacattctgagttaagcaaaactaggcataccaaa

SEQ ID NO: 307114 - DNA, 561 bp, Homo sapiens
gctggcactggaggtgccaagatggagtggacaagtctttgttcccaatcagtttagagtgtagtggaagaaacaggcaagtcaacaaataagggaaatgaggctctgtagcatgatcgtcacttggctgagtcttgaaaaagaagtgggtgattgcccaagcagaatgggtagggaaatgtaccctccaggcagagagagcagtgtgcacagagacacaggagcacaagacaccccggagcacttggggacctttggtatccctggaggctcagtttggcagaagtagaggattggggtggaagaaggggcagggccaaagtgaatgccgtggagccaggcagcagggccctgcatgctatgmtaagcagtttagacttttccaaagatcactccgtatgctcaagccgacagcctaggaaagaatacacactttgtgacattgtgttacagaccccaaggaattttgaaaggttatttattccaggctggcctagcacaaccctttcaaggagccccatccactcccaagatacaggccaggaatggcttaaaaggagc

SEQ ID NO: 307115 - DNA, 555 bp, Homo sapiens
agaacaaatttcactgcccacaaggctgccactgttgactgctgtgggctaaggtgcaagcaaaggccacaccctctcagctgtctgcctatggcttttcccagggaaagccaccccactttttccagtagcaggaccacactggtgctgctgctctcacctgagcattatgtcagtggcctggaaaccactcatccttgcctatcatagccagccttagcatgcaccccttgcaggcctaaggggaccacccagcttggctccacaccccttagtaccaaagcacagtatccaagggtctgaggattgcccagcccagtccaccatggtggcacctgaacactccttctgaggtcagaggtcagacacagtcaacctgtcactactcccacagctggaacccactgtaagtgccacctgtgggtctcgggactgactcatccacatcacagccaccaccaacaccagtgcaaactacttgtatyccaaagcattgttccatcactgctattgccatcactgatgccacgcctgctgcccagggacttgagaacc

SEQ ID NO: 307116 - DNA, 624 bp, Homo sapiens
gatcttatgtttagacaaaccagaacactcgaccaaaacctcttagatccagaaaacagatcccataaagtcacaagacacaaaattaacatgtgaaagtcagtatcatttgtatacaccaataataaaatggtcaaaaaaattataaaggcaatctcatttataatagctacaaaaaaacccacctaggaataaatttaaccaagatggtaaaaaatttctacaagaaaaagcacaaaatactaatgaaagaaagtaaagaggacagaaacaaatggaaaacaatcttatgctcatggatcagaagaattaatatcactaaaatagccacactacccaaagaatctacagattcaatgcactccctataaaaatactaatatgatttttttttcacmgaaatagaaaaaaagaattctaaaagtctgatggaatcaaaaaagtgtctaaatagccaaagcaatcctgagcagaaaggacaaagttgagagcatcacatttcaaaatatattatatggctacagtaaccaaaacagtacggtattagtacaaaagcaggcacatagactaatgaaatagaatagaaaatccagaagtaaatccacatatttacagccaactaat

SEQ ID NO: 307117 - DNA, 624 bp, Homo sapiens
gatcttatgtttagacaaaccagaacactcgaccaaaacctcttagatccagaaaacagatcccataaagtcacaagacacaaaattaacatgtgaaagtcagtatcatttgtatacaccaataataaaatggtcaaaaaaattataaaggcaatctcatttataatagctacaaaaaaacccacctaggaataaatttaaccaagatggtaaaaaatttctacaagaaaaagcacaaaatactaatgaaagaaagtaaagaggacagaaacaaatggaaaacaatcttatgctcatggatcagaagaattaatatcactaaaatagccacactacccaaagaatctacagattcaatgcactccctataaaaatactaatatgatttttttttcacagaaatagaaaaaaagaattctaaaagtctgatggaatcaaaaaagtgtctaaatagccaaagcaatcctgagcagaaaggacaaagttgagagcatcacatttcaaaatatattatatggctacagtaaccaaaacagtayggtattagtacaaaagcaggcacatagactaatgaaatagaatagaaaatccagaagtaaatccacatatttacagccaactaat

SEQ ID NO: 307118 - DNA, 583 bp, Homo sapiens
ggaaacaaatagtcttcaacaaatcatacaaagcgtaagttaggtaaaggacaccatattcagtaaatagtgcyaggaaaatttgatagctacatgtagaagaatgaaattggatccctatttctcaccaatacaaaaattaactcaggatggattaaagacttaaatctaagacctgaaaccacaaaaattctagaagaaaacctaggaagaacttttctggacatggcctaagcaaaggatttatgaccaagaccccaaaagcaaatgcaacaataacaaaaataaataaataggacctaattaaactaaaaagcttctgtacagcaaaataaaaaaacatcaaagtaaatagaaaacctacagattgggagaaaatatttgcaaattatgcatctaacaaaagactgatatctaaattctacaaggaactcaaatcagcaaggaaaaaacaaataatgccattaaaaagtgggcaaatgatatgaatagacatatctcaaaagaagatattcaaatggccaacaaatcatcagtaatcatcagggaaatgcaaattgaaaccacaatgagataccacctt

SEQ ID NO: 307119 - DNA, 548 bp, Homo sapiens
aagggagtgtgctgccaatggtggatctctctagccattttggtggagagcaccacgtgaagtttagcagcttctggtaggtgatttactgtccagtcattgcayggcatagactcagcccgcacccttgaaatccaattgattaaaagtttgccttcagttacacagagtactttcaattcatttcatgaaggaatcagagctggagaaaggaaaagtcaaatcataaattggtctaaaaagttaaatcaccagcagaagattaaaagaagtagaagagaaggtcctctgaggacatgtggtgtgaaatgatctggaacagatcttcttactcacaataaccaattactgtctacactacactcttccagcagatagtatcagcaattgcagttactacaggattcaatcatttcagcagagacaccaggatgtgcaatgggtactgattatggtcggcatgtgaatggaatactcttctcacacatgactaaagatcaattccaaattcaaggtgcgtaggtccttggaaatgaatcaaaagcaaa

SEQ ID NO: 307120 - DNA, 548 bp, Homo sapiens
aagggagtgtgctgccaatggtggatctctctagccattttggtggagagcaccacgtgaagtttagcagcttctggtaggtgatttactgtccagtcattgcacggcatagactcagcccgcacccttgaaatccaattgattaaaagtttgccttcagttacacagagtactttcaattcatttcatgaaggaatcagagctggagaaaggaaaagtcaaatcataaattggtctaaaaagttaaatcaccagcagaagattaaaagaagtagaagagaaggtcctctgaggacatgtggtgtgaaatgatctggaacagatcttcttactcacaataaccaattactgtctacactrcactcttccagcagatagtatcagcaattgcagttactacaggattcaatcatttcagcagagacaccaggatgtgcaatgggtactgattatggtcggcatgtgaatggaatactcttctcacacatgactaaagatcaattccaaattcaaggtgcgtaggtccttggaaatgaatcaaaagcaaa

SEQ ID NO: 307121 - DNA, 536 bp, Homo sapiens
atttcttgtggcagctctgacagcagccaattagaagaaaactctcgctttcctatttagtgcatctgaggagtaatctgaagggtaattacacaagccctatggtgaaagtttagctaatgagcttcttctgcagagtaaaaaatttattattttgcttgtggcaaggtctcaatatgaaatcaaaaaattaatcccatgtattctgtggttgaattaatataatcatttgaaactgtaattctgcctgtgaaagaaatagccccttttcattcatgtcttgtgatattttgccatttttaaaatttagcttcacactacaactttatgtaaagcagagactttggagtaatatattgactgtcactgcacttcaaaaagggaatgattaaaatagaccccaaagaattaatcatctctgcctgcaataaaatcttacatatgatttttggtgtatactgacmtactttgaaccacatcagaaagttcacctgacagaaaataagcaatatttctcattagataagttttaaaaa

SEQ ID NO: 307122 - DNA, 536 bp, Homo sapiens
atttcttgtggcagctctgacagcagccaattagaagaaaactctcgctttcctatttagtgcatctgaggagtaatctgaagggtaattacacaagccctatggtgaaagtttagctaatgagcttcttctgcagagtaaaaaatttattattttgcttgtggcaaggtctcaatatgaaatcaaaaaattaatcccatgtattctgtggttgaattaatataatcatttgaaactgtaattctgcctgtgaaagaaatagccccttttcattcatgtcttgtgatattttgccatttttaaaatttagcttcacactacaactttatgtaaagcagagactttggagtaatatattgactgtcactgcacttcaaaaagggaatgattaaaatagaccccaaagaattaatcatctctgcctgcaataaaatcttacatatgatttttggtgtatactgacctactttgaacsacatcagaaagttcacctgacagaaaataagcaatatttctcattagataagttttaaaaa

SEQ ID NO: 307123 - DNA, 541 bp, Homo sapiens
agatttctagcagatgaattctactgtgataatttcattgtctttcaaatatatgaatggagaaaatggttaatttattttatgggagaatgatcaactttcgtgagattgctctatgaacacttcaattttaaagatgccaggtgtttctgaaatattccaccaagtcaatctgtgatgcaatgaaccttctttgaaccatactagtcttcaaatgctttgagcagtatgagttgattgctctctagytgtgacacaaaaccgttaacttagaccttctttcatcagcaacttggaactcactttcatctctctggtatttggaagctgttttttttttttctttcttggatactttcctactttagctcaatagcttcctgaaaaacattcatggaaggtaatttgtaaagatcttttatcactaaaatatcttagttctaccttgtactaagaattgctatcagttaccataggctaggcatgttaaagcgttacatgacaccacagtttacgtagatgtgagtaattctggtctgag

SEQ ID NO: 307124 - DNA, 466 bp, Homo sapiens
aaagcgttacatgacaccacagtttacgtagatgtgagtaattctggtctgagtatctaattctctttctcttctttgcttttaaccagtattttctgggagacccaaaacttactttttatactttctattgagttttttatattttaaaatcatatttctattccctacagctcttgttaatactctttaatagcagtatagcaacctgttctggcttcatgaatgtattttatctctctaagaatattaataattttccaagttttataaatgcaatatctgcatttctttcaaattgaatattattgttttgtttgctttgatgyctgacctcaatattaaagaactttctcaatgtttagtgtttcttggctaattactgatatttatagatgggaattgaaagttaactgaaaaccaggagtagcccatgaagtttgttaattgtaggtctttcgagagg

SEQ ID NO: 307125 - DNA, 600 bp, Homo sapiens
tatactgtgaattaagacaggtgttgtggctatgtatttctgtgtagcgtactgatccaaaatttagtggcctgaagtaaatgacaacatttattttgttcacagtctgaaatttgaacagggctaagtgtgcagagtttgtctcagccccacaagacataatttggggcagctcagatgctaaaaaatggaataatctaaaggcatactcattcatttgtctgayggtttatgctagaaggtagctggcattgccttagttgaggctatagccagaccatgtacaaattgtttttccatgtggctacttgacttctccacaacatggcacctgggttccttggatgagcgcctcaggagaaccaggaggaagctcaataactttttatcagttagccttggatgtcacatagattcagttgtgtcatagtcatagacctttccatattcaaggaagtgaaatacagaccatacttctcaatagaagaaggccaaaattgtatttttaacaagcacttgtgcaacatttggcaacctttgagaaatgcagtatcacaacaggtaatatgatcctactttactgatgaaaataactgaggg

SEQ ID NO: 307126 - DNA, 560 bp, Homo sapiens
ctactttactgatgaaaataactgagggtatataaaggtggtctctcattataggattcagtggacaaaagacagtttaggagtctgtttaaatatgttatatagattttgtgaagtctatagtggcatgcatacgtaagacagaatagtgtagtgtttaaggatatgggtttgaactctagtttccttatttcccaactatataactttggwcaagttgtttaatatttattatctttgctatctgtgttagtaaaatcaggattttatctgctttaaacagttcttggcagacttaagtgaattagaatttgtaaagctctaagtctcctgcctgacagataataaacgcttacgaaatgataacatttttatcaccactgtcattcctgctgatattacctttaaggaaataacagggcttttttcttctttttcacttaaataagtacatttttgtttgttttgcccatgcccttttgtccactataattgaatagtatcactgccttacaaaattgtgacattggttatgaggtagctattgcaggaaggaagac

SEQ ID NO: 307127 - DNA, 552 bp, Homo sapiens
atgactgggttttctataggctctttccacttgtttataaggaccactgcttttgaatgatagaaaatgtgctaagatctgtacatgcccagggtatatacccattgtcttacttcttttattattaaattccctggtcagaggcagtgttaactgaaataccttaacactgcaggaactttgctagcagaagtcatagtaaacagggaaaacatattcatatccttaataagtagctactccaggaaggacaagccttagtagttggagtcaaaaagtaacaaactatgatcagattcatttgaattgtgatgcaacatcagattcaagactgatctctgctttggaagactgggtacccagcagtaacagcagcagttagatcagccatrttgtaggaaagtccaatttatagagtccttgtataacctctgtttccaccattctgacccctttgtttatgagcctttgagcaaggacacaagtgtccaggtaaagagatttacatacataatttgcatatacagactatgacacagaattggtcaccta

SEQ ID NO: 307128 - DNA, 438 bp, Homo sapiens
aataataataataatacactgaccagactattaaactgagtaaaagtccatgggggcttattttctttgrtaatatggttggagtagcactgcaggctcagggataactatgtagttgttatgtagacagctttaatcaaagctcttgtctacatcgagtctcagtctcatctctactgaaataaggctgatttgcaaaggccttctaattctaaaattctgcaacctgcatacatcctggggtaaattgaattcagtaccagaaacattgcagaatttagggaagctccattaaaccaacaaatattgagtttgtttatactatgtgccaagctttattctaggcactgcagacacagtggtaaataaaaggatgagatctttgatctcggggaggcaatatcctaatgagaaacaaagataatggaatgtgaaaat

SEQ ID NO: 307129 - DNA, 540 bp, Homo sapiens
aaattagttcagctattgtgaaagacagtgtagtgattcctcaaagacctgaagacagaaatactattcaacccagcagtcccattactgggcatatactcaaaggaatataaactattgtattataaagacacatgaacacatgtttattgcagcmctattcacaatagcaaagacatggaatcaacctaaatgcccatcaatgatagactggatagggaaaatgttatatatatatatatatatatatatatacacacacacacacacagcattttatatagtattccacattatatatatttatatatatatcttatattgcttatttacaaaggctatatatacacatatatatatacatataaaacatggaatactatgcagccataaaaagaaatgagatcatgtcctttgcagggacatggatggagctggatgccattatccttagcaaattaacacagaaacaaaaccaaatgccacatgttctcacttgtaagtgggagctaaattatgagaacaggtggatacatacag

SEQ ID NO: 307130 - DNA, 540 bp, Homo sapiens
aaattagttcagctattgtgaaagacagtgtagtgattcctcaaagacctgaagacagaaatactattcaacccagcagtcccattactgggcatatactcaaaggaatataaactattgtattataaagacacatgaacacatgtttattgcagccctattcacaatagcaaagacatggaatcaacctaaatgcccatcaatgatagactggatagggaaaatgttatatatatatatatatatatatatatacacacacacacacacarcattttatatagtattccacattatatatatttatatatatatcttatattgcttatttacaaaggctatatatacacatatatatatacatataaaacatggaatactatgcagccataaaaagaaatgagatcatgtcctttgcagggacatggatggagctggatgccattatccttagcaaattaacacagaaacaaaaccaaatgccacatgttctcacttgtaagtgggagctaaattatgagaacaggtggatacatacag

SEQ ID NO: 307131 - DNA, 501 bp, Homo sapiens
ttgaccacttccagtggctagttgggaaatgaatgctaaccatcattatcaaagtaacaggagttagtcgtgttacatttcttcccaggggaattaacacataaaaccaacaaaaaacataatcattttaaatggctctagacagcaagaatggatgaatggggtctctaagttaaacagtgagagtatattcaagggcttttgagttcaactgagacagaatcttggcaatatttgttcattaagtatacttgtccctcagtggtcataggggattggttgcaggcccccggagaatacacaaatctggagatgctccagtccctcatataaaattgtatagtatttgygtatgacctatgcatatcctcctgtattctttaaatcatctctaggttatgtataataactaagacaatgtaaatgctatgtaaatagttattttgtattggtttttatttgtatatttttaaattgttgtattgttacttcttacttttt

SEQ ID NO: 307132 - DNA, 509 bp, Homo sapiens
tatttcatagatatgatcttttttacttgttctttttaggcatcttgccaacttctrccattgctcatgaaggtgactaggttactaaacacaggtggttccttgtcctctacaaattcttggtttttagccctctgaacttctgccttttgaggctactcttttaaatccagttttcctctttgtgagcctctttagcctcttatctcagattttcctggacacaatttggacacaattccctagaacatgttctcaaaaaggccataatcttttacaatactaacttttaaaaaacataaaaataccttcacaagcctttactgagatgtaagtttgaatgatgtttccccaaccttgaaaattatccttccccatggtaacccagtgccagaaaaacctttcttcaggaatataaatggtgtccctcagtacgctactagggagagatgaaaagagctgacgttccaatcaatctcactatcatgcgccaaccattgcctgctggt

SEQ ID NO: 307133 - DNA, 509 bp, Homo sapiens
tatttcatagatatgatcttttttacttgttctttttaggcatcttgccaacttctaccattgctcatgaaggtgactaggttactaaacacaggtggttccttgtcctctacaaattcttggtttttagccctctgaacttctgccttttgaggctactcttttaaatccagttttcctctttgtgagcctctttagcctcttatctcagattttcctggacacaatttggacacaattccctagaacatgttctcaaaaaggccataatcttttacaatactaacttttaaaaaacataaaaataccttcacaagcctttactgagatgtaagtttgaawgatgtttccccaaccttgaaaattatccttccccatggtaacccagtgccagaaaaacctttcttcaggaatataaatggtgtccctcagtacgctactagggagagatgaaaagagctgacgttccaatcaatctcactatcatgcgccaaccattgcctgctggt

SEQ ID NO: 307134 - DNA, 466 bp, Homo sapiens
agcgtattaataaaaacaataaaattgaaatgaaggatattgatgtggttaacatcttaaatcccttgagtcaaaactgggttggaaatatttaattactcaccacgttgcctgaacaatgagttagaagggtccagtcgtggactttctactcttgtcagtttcccatggctcaggggttcccccagtcaaataggagatagagraaaggagaatggacagactataaatccccattgtttgggagcatgggtacaacaccaggcaagggttctaggttcccagaaaataattctaaacaggtgacacaaaaagccagaatgtcttggcccaaagtgttccgggtattcccccactaacagtgatgcttttctcatacttgcctatgaaagaagaggttgccaaggggaaggatttttctcccctggattacggtgcatcttgcatgtccagcagaatagtctgt

SEQ ID NO: 307135 - DNA, 621 bp, Homo sapiens
gagcccagcctggtctacctctccaactttatctctaagcatctctctccccagtggtccataaaatgtaactacttctaattcatcatattcaacacaccatttatcatcttttcttcttgctcccattttctactctaatttgtgtactctttcttcccacactctctccttcttctgatggagaccsactcaggcattcttcgataagatctttcccaaagctctctgccgagacttcacaactatccctccttcttcgtaggtgctctttctctgtatttctatttgtataactctataactatggttatatttttgtaattgtttctttatatccattcttcagtgtattataaggtcttcaaaagttgagactgtatcttagccatctttttatatttggcatctacggcagtaaagaaaatttcattcactccttgatttattaattcatgtattcattaagtattttgtattgaggatagtaaaacgatacaatagagtctttctttcaaagagctcacagtccactggaaaatcaggaaagtatgttggtgactccagtacaatgtgataaggtctgtggaatggcacatagaaagctttgtagtacaaaag

SEQ ID NO: 307136 - DNA, 621 bp, Homo sapiens
gagcccagcctggtctacctctccaactttatctctaagcatctctctccccagtggtccataaaatgtaactacttctaattcatcatattcaacacaccatttatcatcttttcttcttgctcccattttctactctaatttgtgtactctttcttcccacactctctccttcttctgatggagaccgactcaggcattcttcgataagatctttcccaaagctctctgccgagacttcacaactatccctccttcttcgtaggtgctctttctctgtatttctatttgtataactctataactatggttatatttttgtaattgtttctttatatccattcttcagtgtattataaggtcttcaaaagttgagactgtatcttagccatctttttatatttggcatctackgcagtaaagaaaatttcattcactccttgatttattaattcatgtattcattaagtattttgtattgaggatagtaaaacgatacaatagagtctttctttcaaagagctcacagtccactggaaaatcaggaaagtatgttggtgactccagtacaatgtgataaggtctgtggaatggcacatagaaagctttgtagtacaaaag

SEQ ID NO: 307137 - DNA, 515 bp, Homo sapiens
atccctccttcttcgtaggtgctctttctctgtatttctatttgtataactctataactatggttatatttttgtaattgtttctttatatccattcttcagtgtattataaggtcttcaaaagttgagactgtatcttagccatctttttatatttggcatctacggcagtaaagaaaatttcattcactccttgatttattaattcatgtattcattaagtattttgtattgaggatagtaaaacgatacaatagagtctttctttcaaagagctcacagtccactggaaaatcaggaaagtatgttggtgactccagtacaatgtgataaggtctgtggaatggcayatagaaagctttgtagtacaaaagaaaaagaattaatttttactgcctttaatgaacctatgaagatacagaaataatacaaaataaaatggtagtacagaaacaatataaaataagctaattaaattaatcaaaaatctttaataggttactgtataatttacc

SEQ ID NO: 307138 - DNA, 554 bp, Homo sapiens
ctaactgcagttttctgactgacctttggctcaggcaaaatattttgttatatagaggattcaagatgcaaaaataatgtgttccatgaattttctcacaartgtatatgtgcaggttttatgtgttgtctaaagtggctagagagaactgatagggccagtgtcctgaaagccagccatttatggctgaatgtgtgttgtttcctgtgcacacaggcagtctaaagagagatggaaggaaggtagaggtgagcacattctctaatggactgtaagatcaaaatataggtggccattagaagtgaggactcaacttcttacaggagaactagtaagaggaagaaatggtaaatctatgtgaacaggcaactgccaggagatgtggaatatccctttatgttcctttctatcagtagagacacttttgtgcatagacatgcagtggtaacactgaacatgtggatgcaagacatatgcatgtttatgtgtcacatttgtatgaacatatatagttcattgaaattaagaaatgtttaagtgagaatagtatgtca

SEQ ID NO: 307139 - DNA, 611 bp, Homo sapiens
tctcattctcactatatctttaaggactaatggtatgaaagcatttatttttatattattctactgaaggtgaacttcattgttaaaaacagttattcagtcaatcaccattttttatgtactactatatgcttgtttcaaagttatctttgatatgwtatttccctctcttgcttttcatgtccagaatctaaatactcatgaggctgtttttgggaaactctttttgataaatttcttgtctgcttctactatcactattctgcaccagtcatttattttttcttacaattactttattccagatttctttatctgattcccaggtattcacagacttactaaatctgaatattcaggaattgggcctggtgatccttttctgaaaacatcttcatgttatttttacatggcctatttaagtaaaggcatttaatttttaaaattggcttttaaaagaatgcgatttgtttttgtttttgttttttacttcaagatttgcccaacactaattcattctttactttctgtcagtaatactgggaaaatctccgatggctgtaaactcttatttactgtgctttttcttatccaggaaatttagaatgccc

SEQ ID NO: 307140 - DNA, 611 bp, Homo sapiens
tctcattctcactatatctttaaggactaatggtatgaaagcatttatttttatattattctactgaaggtgaacttcattgttaaaaacagttattcagtcaatcaccattttttatgtactactatatgcttgtttcaaagttatctttgatatgatatttccctctcttgcttttcatgtccagaatctaaatactcatgaggctgtttttgggaaactctttttgataaatttcttstctgcttctactatcactattctgcaccagtcatttattttttcttacaattactttattccagatttctttatctgattcccaggtattcacagacttactaaatctgaatattcaggaattgggcctggtgatccttttctgaaaacatcttcatgttatttttacatggcctatttaagtaaaggcatttaatttttaaaattggcttttaaaagaatgcgatttgtttttgtttttgttttttacttcaagatttgcccaacactaattcattctttactttctgtcagtaatactgggaaaatctccgatggctgtaaactcttatttactgtgctttttcttatccaggaaatttagaatgccc

SEQ ID NO: 307141 - DNA, 584 bp, Homo sapiens
tttgttagttttggacttagtttgctcttgtttctctaattcttccacatgtgatgttaggttgtaaatttgagatctgtctaacttttcgatgtgaatgtttagtgctataartgtccctcttcacactgctttagctgtgtcctagatatcctgatatgttatatctttgttttcaatagttttaaagaatttcttgatttctgccttaatttcattattaaccccaaaattattcaggagcaagttttttgatttacatgtaattgtatggttttgagcaattttcctagtatgtatttctattttaattgttctgtggtctgagaatgtactaggtatgatttcatgcttcaggttttcttttttaatttgctaaggattgttttataactacttgtgtggttaattttagagtatgtgtcatgcacagatgagaagaatgtatatttggttgtttttggatgaagagttctgtagacgtctattaagtcctgtttattaaaatctggatgctcctgtgttgggtgcatatatatttagaatagtcaggtcttcttgttgaactgagccattaccattat

SEQ ID NO: 307142 - DNA, 571 bp, Homo sapiens
accggttcacatcagttgtggtatccaattggatagtttctatcaattcctcctgctctgggggaaggaaatgttccatattaacgctgttttgttcactaatagcttttctctcttgctcacggctctaatcttctgagtcatgtttgtaaccaggtttctcagccttcttccttttgttttgaaattttttctgtcactgttcatccaagctggtacaatccctttaaaaactttgtgggttttctaygcacaaacttacaaaccactccattaggcaaagccacacctacaaaaatccccttcaaatcatgctcaagtctagttttggatgtgagtcagaatactacgggaagatgttgccaagagtcttagaggcctttttgtttagctgaaagggactaagaggctttgctgtaaatattgctaaaaacttaaaggcaccctggatttgatcctgatcttgggccacattttactgacactgccctgaaatggacccttgtcctggggcatttttttacattgagtaacttggtggctagagatatagtcctgagccctctatagt

SEQ ID NO: 307143 - DNA, 522 bp, Homo sapiens
agctctgtcttctagggcatcttctttacttcgtttaatttttaaatatctgtgttctgtaaaatatttctttgtttgaagggttgcatcactgaaaatactatagaagaayattcctctaaagcaatggctctcaataggagatatcttaccctcaggagacattgacaatatctagagactttttatttttttggttgtcccaacacgggagtgctactggaatctagttggtagaggtcaggaatctttgaaacattctacagtacacaggacaagggcagcctccacacaacatagaattatttgactcaaaatgtcaatagtgccatggttgagaaacccgcctgtaaaacagaattataatttctataacagctctaaattatcttcagaagacctgggaaatattgattttataatatcatgattgttatttttctttatgttctagaagaatcccaggataatttttttctttgagaaatagcttggtgcagtgatgagagaagacatagaatt

SEQ ID NO: 307144 - DNA, 522 bp, Homo sapiens
agctctgtcttctagggcatcttctttacttcgtttaatttttaaatatctgtgttctgtaaaatatttctttgtttgaagggttgcatcactgaaaatactatagaagaacattcctctaaagcaatggctctcaataggagatatcttaccctcaggagacattgacaatatctagagactttttatttttttggttgtcccaacacgggagtgctactggaatctagttggtagaggtcaggaatctttgaaacrttctacagtacacaggacaagggcagcctccacacaacatagaattatttgactcaaaatgtcaatagtgccatggttgagaaacccgcctgtaaaacagaattataatttctataacagctctaaattatcttcagaagacctgggaaatattgattttataatatcatgattgttatttttctttatgttctagaagaatcccaggataatttttttctttgagaaatagcttggtgcagtgatgagagaagacatagaatt

SEQ ID NO: 307145 - DNA, 603 bp, Homo sapiens
aattatatgtgggataaaattttgattttttatacttattagtgctatagtcttgatatgtaccttactctttctcatttctttctttaaaaaatggagatgatagtaccaaccaatgaactgttgtgaaaaataaacagaaatttatttgcttcactatttatttgtttacataaacaagaaacaaatataaaaatctcacacatgggctgttacatatatagtaaagcttttaaataactctcccaaggttatggaagtttaaatttagttgattgactctggtcaagrcaatcttaatgttctcctcacttgactgaactttaaataggctcctttctaactctagctctaactctagtacctccgttttcttagaacatttacttcagaaaacttctaattgcaaattctttttaagcttctttgaaatgcatataaatattctccctgcatcttgttagttttacaaccaggaatgtctttctcaaagaccagggaatcatccctttggaggaagataacacttctatctctcagtttctatggggaagataggagcctaacttcaatgggtacccattaacaaacacagatgacctc

SEQ ID NO: 307146 - DNA, 572 bp, Homo sapiens
gtgtgagatgtggaagggccaggggtggaattatatggtttgactctgtgtccaacccaaattgcatctcgaatggtaatccctataatcccctgtgtcaagggatggaggtgattggatcatgaggatgatttccaccatgctgttcttgtgacaatgagttaattctcacgagatctgatgattttataaatgtttggcaagttcctcyttcacacactgtctctcttgcctgccaccatgtaagatgttcctgctttcccttccaccatgattgtaagtttcctgaggcctccccaggcatgcagagctgtgagtcaattaaacctcttttgtttataaattacccagtcttaggaagttctttatagcagtctgaaaatgcgctgatacagagaacctgttgggaaacttattaacaagctgagagaaatttgagtgagttttagattggggggaatttatctttccttgttcctaccttttaagcactagtcatcaattctgggacaaaagcattctttctcaaaatatttcctgttagaccttgtcttttccatatgttattttat

SEQ ID NO: 307147 - DNA, 572 bp, Homo sapiens
gtgtgagatgtggaagggccaggggtggaattatatggtttgactctgtgtccaacccaaattgcatctcgaatggtaatccctataatcccctgtgtcaagggatggaggtgattggatcatgaggatgatttccaccatgctgttcttgtgacaatgagttaattctcacgagatctgatgattttataaatgtttggcaagttcctctttcacacactgtctctcttgcctgccaccatgtaagatgttcctgctttcccttccaccatgattgtaagtttcctgaggcctccccaggcatgcagagctgtgagtcaattaaacctctttygtttataaattacccagtcttaggaagttctttatagcagtctgaaaatgcgctgatacagagaacctgttgggaaacttattaacaagctgagagaaatttgagtgagttttagattggggggaatttatctttccttgttcctaccttttaagcactagtcatcaattctgggacaaaagcattctttctcaaaatatttcctgttagaccttgtcttttccatatgttattttat

SEQ ID NO: 307148 - DNA, 572 bp, Homo sapiens
gtgtgagatgtggaagggccaggggtggaattatatggtttgactctgtgtccaacccaaattgcatctcgaatggtaatccctataatcccctgtgtcaagggatggaggtgattggatcatgaggatgatttccaccatgctgttcttgtgacaatgagttaattctcacgagatctgatgattttataaatgtttggcaagttcctctttcacacactgtctctcttgcctgccaccatgtaagatgttcctgctttcccttccaccatgattgtaagtttcctgaggcctccccaggcatgcagagctgtgagtcaattaaacctcttttgtttataaattacccagtcttaggaagttctttatagcagtctgaaaatgygctgatacagagaacctgttgggaaacttattaacaagctgagagaaatttgagtgagttttagattggggggaatttatctttccttgttcctaccttttaagcactagtcatcaattctgggacaaaagcattctttctcaaaatatttcctgttagaccttgtcttttccatatgttattttat

SEQ ID NO: 307149 - DNA, 292 bp, Homo sapiens
gtgttccttttatatatatatagtttctataaattatgatatagaagctcagattacagttcaatttatcttgataatgcttctttttaagtgctttacttttttgtattatgaagcacatgatggctccatccaatatagtagctactatcatatgcggctattgaacccttgaaatgggagctcatatgtaaatggaagcatatgattaatgtaggatatasactggattttgaggactagtacatttttaaaatgaggttactagaaaatttaaaattacatatgtgca

SEQ ID NO: 307150 - DNA, 292 bp, Homo sapiens
gtgttccttttatatatatatagtttctataaattatgatatagaagctcagattacagttcaatttatcttgataatgcttctttttaagtgctttacttttttgtattatgaagcacatgatggctccatccaatatagtagctactatcatatgcggctattgaacccttgaaatgggagctcatatgtaaatggaagcatatgattaatgtaggatatacactggattttgaggactastacatttttaaaatgaggttactagaaaatttaaaattacatatgtgca

SEQ ID NO: 307151 - DNA, 581 bp, Homo sapiens
tctttactcatagaatttgtatatcatataattacttgttttttttatcttgccttacaaaaaataacttcagagtaacaacaccattactagcactaaaatcatcaytgaaaataggtaaaagatttttggcatatcgtcccatttttatactcttaatggaatgtgtgtttttatatctttataacaatgtgtctctggtcatttctggctttctgaatctaattctctaagacgtccaaggatgcgctcctgtgaaaatgttaagcatcccatactgatctatattgttggattaactatacttgactgctattgggaaattgaaattccttccaatatcatctgctgtccttaagttggctttcaaatgagtacccattagtagttttatagttttcagggttgtcacatattcccttgcttccctttgttttctcctgcacagagacagattcatggtgatatcttgttacttagacattttggtagtatttgctttggaattttagtttttctatctgtgtagtaaaatattgacctcaacaaaagatagctctatcctttactcttggctcctg

SEQ ID NO: 307152 - DNA, 581 bp, Homo sapiens
tctttactcatagaatttgtatatcatataattacttgttttttttatcttgccttacaaaaaataacttcagagtaacaacaccattactagcactaaaatcatcactgaaaataggtaaaagatttttggcatatcgtcycatttttatactcttaatggaatgtgtgtttttatatctttataacaatgtgtctctggtcatttctggctttctgaatctaattctctaagacgtccaaggatgcgctcctgtgaaaatgttaagcatcccatactgatctatattgttggattaactatacttgactgctattgggaaattgaaattccttccaatatcatctgctgtccttaagttggctttcaaatgagtacccattagtagttttatagttttcagggttgtcacatattcccttgcttccctttgttttctcctgcacagagacagattcatggtgatatcttgttacttagacattttggtagtatttgctttggaattttagtttttctatctgtgtagtaaaatattgacctcaacaaaagatagctctatcctttactcttggctcctg

SEQ ID NO: 307153 - DNA, 556 bp, Homo sapiens
tgtgctttcatatgacttcttcaacatttggattatggtgtttgttttctgtatcattcaccacatatccgtatctgttttcccatgtcttcccatattataacttcctctaggatatatactctgttttacatattgttccccaaattcccagaatctgacttaacttcatttaatagtaactacatagctgaatactgtatgtatagtcccatgtacaatttagactctaaaaagtactatttaaatggaataaattcagttgtaagattctatgtccaaggccagttctctgagttgttctaaggctatctttcctatgttgactgagttccctttaagcagtcattgtccatatattgctgggaaatgtttcaaasagtgatatggtttggctgtgtcctcacccaaatctcatcttgaattgtgtgatgggtaatactgtcaacttgattggattgaaggatgcaaagtattgatcctgggtgtgtctgtgaggatgttgccaaaggagattaacatttgagtcagtgggctgggaaaggcagacccacag

SEQ ID NO: 307154 - DNA, 633 bp, Homo sapiens
gcctactgggagtttcggtttttataacttgctgtaaggcctcccaacagtctctcagagaagcgttcataggaatgtgcctcgtctccaagggtgtctgggaaagagctactgactrctgagctctgaaacagccacctgaactgcaggaacttagcaagaggaacagctcagatccaagaagagaaaccctttctttttgtactgtttatctactgccctctaatgacagcacttaacaacgtgacagttgaccaaggatatttacagggtccatctctgttattgcagatctggcaatgaagaatggacttggaagtggtagacaatacaattgataactggaagaacagataacagaacagcatacaggttgactttccttggaatatgtgaatccttgagcaagaacttccttaaaagggggtttgggcagacagacattgatgtgacttactttatacagatttcatgcagtcaaaaatgagaactctttttaaggctttgaggaagcacattcagtttgcttgtactttattgtgccattgtataaagtgtcccgtattctcaggagtttgtgggctaaatatgctttatattcagtagctaggtaatttggaacattggcttcat

SEQ ID NO: 307155 - DNA, 636 bp, Homo sapiens
gtcctatagctgagaaagccaaaacttagaatagaaaatcaacttgctcacggttgcacagcaaataaagctaaaaaatagaaaaggattctcagtcactcctttgarttctgtaacttatctgattcagtatttttaatatcaaatatcaaaatatttatttggtgttccctacttcacagatttcctcactcctctccttttccccaatcttccatgacaaagacacagttagtgagaatgcatattaaacaagttaaaccctttatatttaacaaactaatctcttccataaagacatactatagaaaataaatgccttacctgatagtaaattgaaacgaaattttcaagtattgataaagagtcattagactgtcataaagatatagtgcaccctgatgggatgttggtataaattggtaagattatattgaaaaaaaaaaactactgaatgataatttccttggtaaagattgtttttagctctaaataatggaaaacactatggcttaaacatataggaattttttctcatataaaaagttgagttgtgagttgttattggagttgattcacacctctctgcaatggtcttggccttttcttcgtggttacaagtgaatagggatgctc

SEQ ID NO: 307156 - DNA, 636 bp, Homo sapiens
gtcctatagctgagaaagccaaaacttagaatagaaaatcaacttgctcacggttgcacagcaaataaagctaaaaaatagaaaaggattctcagtcactcctttgaattctrtaacttatctgattcagtatttttaatatcaaatatcaaaatatttatttggtgttccctacttcacagatttcctcactcctctccttttccccaatcttccatgacaaagacacagttagtgagaatgcatattaaacaagttaaaccctttatatttaacaaactaatctcttccataaagacatactatagaaaataaatgccttacctgatagtaaattgaaacgaaattttcaagtattgataaagagtcattagactgtcataaagatatagtgcaccctgatgggatgttggtataaattggtaagattatattgaaaaaaaaaaactactgaatgataatttccttggtaaagattgtttttagctctaaataatggaaaacactatggcttaaacatataggaattttttctcatataaaaagttgagttgtgagttgttattggagttgattcacacctctctgcaatggtcttggccttttcttcgtggttacaagtgaatagggatgctc

SEQ ID NO: 307157 - DNA, 523 bp, Homo sapiens
ccacctccaacatgttctctcttattcttttttaatactccaaccattataaagtttacaattacatgcctacccagagtagagtgttataaatattggatcaatggccattttaatctttcctctctggctctttgaaataatcttaaaactactttgaaaacagtattttaagattgttttacatagaaattctatcatccctcaagaagcagtatggctccaatattcagatttcactgtgaggctcttacctatctaattcatatctattttcagattttgttaaaagaaattttacagaggctactcactcatatttggaagaaaaacataatctaagaaacaaaagaaatgtgtgtggaggggagaaataggtatataacaacttaaagggtttgaattgctaatttttagtactattttatgtaatactttttgcaagatytaaatagatgcattgcaaccatttataaacttctatatgagcagcatacaaggacattcctggaatacagaaagc

SEQ ID NO: 307158 - DNA, 465 bp, Homo sapiens
taaaagtgatgcattcaggactaaacatgagtgggacaaaggaacaaataagctacataagtatgcatgtagcccagattcccatgtattaacttctgttgtagcagaatctctccctcaggttacaaaggatgtgtagcaatatagatttaggtaatctagttcccaaaagaggagcactcccrtcacaggacataacaagagtctcacagacaggtagaaaaccaattcataaaatcagtattcatatgtcaaacaaaaacttatattcaaaatatattaaaaactctcataattcaataattaaaatgaaaacaacccagtttaataaaaatgttcaaaagccctgaataggcacctccaaaagaaaatatgtaagtagccaaaaagcacatgaaaccatgttcaatttcactaatctttaggaaaattcaaaacaaaaccatgataatacaacacactaat

SEQ ID NO: 307159 - DNA, 502 bp, Homo sapiens
ttctcctgggtctccagcttgctgactgaagattgtggaacttctcagcttccataactgcatgagataattgcttataataaatctatttgtattctgttggttctgtttctctggagaacctaaactaatacacagagaatatccaaaaacatacccatacaagaatggacaactaaataatgacatatttatacaatgaactattactcagtaataaaatggaataaagtgctgatattggcaacaatatggattcattgcacattattgtagtgaaagaaatggaacataaatgattacatattgtatgattccatttatatgaggttctagaagagattaaactattgtaaagaaaacgagtcagataaaaattgttgyttctctggggttggtggaattgactgggaagtagtatgagtgaataagatgctctatattctggtaggcatgtgagttacactcacagatgtatgtgtttgtcagatctcatttaata

SEQ ID NO: 307160 - DNA, 502 bp, Homo sapiens
ttctcctgggtctccagcttgctgactgaagattgtggaacttctcagcttccataactgcatgagataattgcttataataaatctatttgtattctgttggttctgtttctctggagaacctaaactaatacacagagaatatccaaaaacatacccatacaagaatggacaactaaataatgacatatttatacaatgaactattactcagtaataaaatggaataaagtgctgatattggcaacaatatggattcattgcacattattgtagtgaaagaaatggaacataaatgattacatattgtatgattccatttatatgaggttctagaagagattaaactattgtaaagaaaacgagtcagataaaaattgttgcttctctggggttggtggaattgactgggaagtagtatgagtgaatmagatgctctatattctggtaggcatgtgagttacactcacagatgtatgtgtttgtcagatctcatttaata

SEQ ID NO: 307161 - DNA, 580 bp, Homo sapiens
caccaccacaatctgtactagggttggggagtaagggtgaatattttccaagtgcaaaaaccataagagggaaagcataccatttaaagcatattgcaaagttagagaatcctcaagtttctacaactgttagtgctgcctgactgaaatcattttctaaggatcatgtacaaaatatgtattttttccacattaacattggaatttaacaggtatgctgcttttaatgtcgactgcttttagagtagtggaggcagcaggtggcagtagttcccactcccaaaactgggaattggagcaagtcttayaacaatctgtggcctctcttgcaggcctgcctttctgtgaagtttctttgtgtctgtaactgctcgtttcatatatgggaaaaaggatgatataatgcataaatcccacaaagtgtggacaacaaacaagatttttttgtatgtaccttctttacatagaggatgaataaacaaacttatgaaatagatgggtcttcatctttagaatttctgttttttattgaaaatacccagcgccttttcatgcttcctaggaatatccctgttccatt

SEQ ID NO: 307162 - DNA, 580 bp, Homo sapiens
caccaccacaatctgtactagggttggggagtaagggtgaatattttccaagtgcaaaaaccataagagggaaagcataccatttaaagcatattgcaaagttagagaatcctcaagtttctacaactgttagtgctgcctgactgaaatcattttctaaggatcatgtacaaaatatgtattttttccacattaacattggaatttaacaggtatgctgcttttaatgtcgactgcttttagagtagtggaggcagcaggtggcagtagttcccactcccaaaactgggaattggagcaagtcttataacaatctgtggcctctcttgcaggcctgcctttctgtgaagtttctttgtgtctgtaactgctcgtttcatatatgggaaaaaggatgatataatgcataaatcccacaaagtgtggacaacaaacaagatttttttgtatgtaccttctttacatagaggatgaataaacaaacttatgaaatagatgggtcttcatctttagaatttctgttttttattgaaaatacccagygccttttcatgcttcctaggaatatccctgttccatt

SEQ ID NO: 307163 - DNA, 536 bp, Homo sapiens
agaatcttcaatgaccacctattcagtcctcttacattacagatgaagcaacaagcccagagagtattcaatatcagagacagaatgcatgagacaacagtttcaggggcaataagagcggtgatatrccatcatacttaacaaattctgccttcccttgatatccataggggattggttctggaacccctgcagatactgaaatccaggaatgctcaggtccttgatagtaaacagcatggtatttacatgtaacctaggcacatcctccagcatactttaaatcatctctagattatttataatacctaatacaatgtaaatgctatttacttgttgttatactgtattgtttaggaaataagaaaaaagtccatatgtgttcagtatagacacatccatcctagccctaactacatttttgatctgggattggtttaatgcatggatgcagaagtggggatatagaggccaactgtacctaattaaagaggttctgtttcatacatgtttacttataattaagaaaaaaaatt

SEQ ID NO: 307164 - DNA, 647 bp, Homo sapiens
acatgtaacctaggcacatcctccagcatactttaaatcatctctagattatttataatacctaatacaatgtaaatgctatttacttgttgttatactgtattgtttaggaaataagaaaaaagtccatatgtgttcagtatagacacatccatcctagccctaactacatttttgatctgggattggtttaatgcatggatgcagaagtggggatatagaggccaactgtacctaattaaagaggttctgtttcatacatgtttacttataaytaagaaaaaaaattaaaaaccgtgggaaaacaaaagacttataaactttatatacactctgccatcaaatgttaacatgctgtcatattttcttcaaattgtaaaagtaaacacaatgtcacaataggaacccccttgaccttctccattcctttccccaggccttcagccctggagtcatcggttcatcaagttagtgttatctttgctattcatactttgtattttaatccgttcatttatagccataaacaatatataacattggcttttgtattttcaacatttacaaagatggtgccatattgtacatgttatttttccactggcatttttgttttcagcatgtatgatgtagatatatgcagattt

SEQ ID NO: 307165 - DNA, 626 bp, Homo sapiens
taaatatttataaattgctttgcaaattgataacatgaatttcacttctaccaacagaggtgagattcttgtttttctacattgtctgtaacaccaggacttacttaatctatttataaagtataattgttctgctggatttttaagtggtgtataattattgtatagatttgtattttatcctaatttacattgaggtggaagatcttttatatagtaattaaatatttccattgttctgtttgtgaatttcatttttttttgctcttttgattttggttgtgaattttttctattgatttgtaagcataatttatatatttggggtggcaaccmtgtgtcagttatatgttttgtacatatcttctcccatcttctctctttcaaatttttttttaattctgtgaagttacagttttaatattagtaatcttaatcctgatacaagtgcattgagaaggaaaaattataaccctattttactcaaaaatatatatatgcaaaaattccaaggaaaatattagcaaattgaatctgtctgttcacgaaaagttaacaatatcataaaaaagttgaatatagtccaactatgaaaggatggcttagttaacaaaaagtttataaat

SEQ ID NO: 307166 - DNA, 551 bp, Homo sapiens
cctgatacaagtgcattgagaaggaaaaattataaccctattttactcaaaaatatatatatgcaaaaattccaaggaaaatattagcaaattgaatctgtctgttcacgaaaagttaacaatatcataaaaaagttgaatatagtccaactatgaaaggatggcttagttaacaaaaagtttataaatataatttccaacattagcaggtaagaaaaagccatgttattatttcactatattcaggaaaaacacttgataatgttgaattcttgattttaaaaaaactttgtaaatcaaaaatataatacaacttcctgatagtgataaactatagcaaagtattttcgttatggggaarttttggaagcattcccatttaatcagaagtgaaaaaaatcaatgattgtgacttttatttaacttgatattggagttcctaaagtaataagaaataaaagagaaatcagaggtatgagaattggaaagctaaaaataaaactgtcatcatttttagatgataaaattgtttatatagaaaaatccaaaat

SEQ ID NO: 307167 - DNA, 560 bp, Homo sapiens
aagaaacatggtctttagtagttaaagggttaataatacatatgcatgataccaagttctggtccttcacgaaacaggaagtccgggttccaggatcagtattgtgaagagctcagatcttctgggttggtcaattgggctacacagtatctctggagagtggcatttggggtccagaaaatggtgcaaacatttaaaaactttttcatcatgtcaccagctagcccaaatagaacctgtctcagatggaaatctaggaatttctttttctttctttgctagcttcctttttcaccccttccatccatcaatttcctcaatctatcctttcttcctctttcttcccagagactggattccattttggatggagtggtattgagtctttactatttcatgtcaggagatttaggtccttatcactgtgctcagtggaacaaggaaaggctgatgcttcttaacactattaactgctacttatgtatttacatgtgcacagtttctatttgctcttcttaaaacwccttcctcaccattttaatttgtaacatctccccctc

SEQ ID NO: 307168 - DNA, 617 bp, Homo sapiens
atatactctgttcttggaataaaataaggtagagaaaagaaaatgtttttgagaaaataaggaaaacaaaatatatttactgttcattaagatgaagtagatcatcaagaagttcttcatcctcattgtcttcacactgaggagccacaggaggaggaagaagaggagggcttggtcttgctatctaagaattatggaggcagaaaaaatccatgtataagtgaacccatgcggttcaaacttgtgttgttcaaggtttaactataattgatttttgacaaaatttaattaaagtcatgagagtaacatyttagtatcctcatacacagtatgcaatatcttcatacacagtgtgcaaactgctctgtgctcatgggtaagagagctcaagagatatgtcttgtttaggaattaggatggaaaccagtcaaataattttttttcagacacgttaataatataatgaaactaggttattttacacatttctaacactctataccatacacctgtatatattttctcaactttgtatttgtcaatttgtttataattttgtaacactttttgatgttttattattttttttgaaatggagtcttgctctgtcacccagg

SEQ ID NO: 307169 - DNA, 516 bp, Homo sapiens
cctacttctcagtgtgttttaagcatactgtagaatttattcactcatgaatttgatacaaactaaagtgaaaatctcttctctagaacttcataatgcttagaaagcatagtaacacgttcagagaaagaggaagatcraatttagaggaagctcttgtttgagtttctgctccaatgagtttcccattctagatattaaaataatagtatgtaccccagataaaatactcaagtttctgtaaattaaggattatgacttgattatatgtattttagatttagagcatgcataaaaaatgatatctttttcaccaactagtagaaaaaaattcaagataatgttatgattttaatcttccatgatatgtatgtaatctaaaatatcaaaacatcactgactctgcattatagttaaatataaaaggtgactgacttaagccaaattaaaaaaaaattgagacaaggtctcattctgtcacccaaggtggtaagcagtagtgcaaacacagctcac

SEQ ID NO: 307170 - DNA, 516 bp, Homo sapiens
cctacttctcagtgtgttttaagcatactgtagaatttattcactcatgaatttgatacaaactaaagtgaaaatctcttctctagaacttcataatgcttagaaagcatagtaacacgttcagagaaagaggaagatcaaatttagaggaagctcttgtttgagtttctgctccaatgagtttcccattctagatattaaaataatagtatgtaccccagataaaatactcaagtttctgtaaattaaggattatgacttgattatatgtattttagatttagagcatgcataaaaaatgatatctttttcaccaactagtagaaaaaaattcaagataatgttatgattttaatcttccatgatatgtatgtaatctaaaatatmaaaacatcactgactctgcattatagttaaatataaaaggtgactgacttaagccaaattaaaaaaaaattgagacaaggtctcattctgtcacccaaggtggtaagcagtagtgcaaacacagctcac

SEQ ID NO: 307171 - DNA, 660 bp, Homo sapiens
ttgacttagtctatgtcacatgttcaatatatcccatgataaagatggtatttttttagagctcttactctctcaagccactgttttgccatgttactttcattcatagrtgttcttcataaaagaataagagaagggcagaggagggcaaaataggaagaaggatattccaaattcactttcctatcactcacttacatcttaattttctctaacctggcttccacccataccatttgattgaaattcccatcactgaagtggacatatgtagtttgcaccctgcaatggctactccgccttctgttggcatcactgtcctttgggatacccttttccccatttttatttcaagtgctttagttgggttcatcctatccctagatccaggtgtgggcatgtaacctaaaggcaaacaactcaatataggccatgatgatagggtctgtaatcatcatacatctttgttatagccaatcagaactaattctgtgagtgaagttggaggtaccttaaaagagaaaattctttctctttctatggacttgaacttgaattgatgtaggttgagattgctgctaccatctttcagggagaaaagctttcagaaactacagccaaacaggaagcacagacagatggtaaaagagagacgatgtc

SEQ ID NO: 307172 - DNA, 574 bp, Homo sapiens
cataaatctgaacataatttccaaaaaacctgaaagtcattggactgtgagatatctgaaatygtatcaaaaagtagaatttatggccctataagttatggaaaaggaaattgaattgtattttatttttaaaacataaccactaaaatgatgtttccatagtaacaaggtcaataccagtagccattatagaccttccccttttctgatagtgggtttaaagatctttttcaaacaccactttaaaagacctatgaaaaaaccacaggttttctgatcattcatctgaaccgaaaatgaagaaaaccacacatggagtattgaatttctcatgttttatggattacaagcattcatcgctgtcatattttcagaaagaagcctgcctgactagctaccatgccaactcctgaacttgggatttgattagcctgattgtaaatcaggatgaacagaagttgtttgcagtagtattcaaacagacataaaaggtggcacagtattaaaaaacatacttctttaacatctaaatattgaaagagttaagtaaataatccttgctattacatttcaa

SEQ ID NO: 307173 - DNA, 643 bp, Homo sapiens
tctgaaaagcaattaaatttccttgccacctcagtttttagaaagcaaaaggttagaaaataccataaatctgaacataatttccaaaaaacctgaaagtcattggactgtgagatatctgaaatcgtatcaaaaagtagaatttatggccctataagttatggaaaaggaaattgaattgtattttatttttaaaacataaccactaaaatgatgtttccatagtaacaaggtcaataccagtagccattatagaccttccccttttctgatagtgggtttaaagatctttttcaaacaccactttaaaagacctatgaaaaaaccacaggttttctgatcattcatctgaaccgaaaatgaagaaaaccacacatggagtattgaatttctcatgttttatggattacaagcattcatcgctgtcatattttcagaaagaagcctgcctgactagctaccatgccaactcctgaacttgggatttgattagcctgattgtaaatcaggatgaacagaagttgtttgcagtagtattcaaacagacataaaaggtggcayagtattaaaaaacatacttctttaacatctaaatattgaaagagttaagtaaataatccttgctattacatttcaaaggctc

SEQ ID NO: 307174 - DNA, 602 bp, Homo sapiens
ttttagcttataaaagtaaaagtgaaattatgtttccttttttcttcaagtcttattttagtgttgacatgtgcttttttactatctataattgctgcttctacttgtcttactctcttccttccaacaccacacacattcctccccgtccttttttttttgaggaggggtatctcagctttttcctctctgctctccagctctacttttcctacctggttttgccctttggtctgygttcctaggcctgttttgcttcttcctctctgttctgtcattatatcaactggttaaaatataaactggtctgtgtgtgtctgtgcccggtgcacccattatgctaggtttgtgtgcctagtcttaatttttttaaatgaaaaagcacattatggatcctttctctgataagaaaaaataaatataaaactgcttgtattttatgtgagtctcattaaccttgttttctaagttgttaatttttaactagaaagaagtttctattatgaattggcttatcttctgaggaagagagagattaaacaacctctctaaggcacacagctggaatgtggcagagagggaactcaagtacaagcagcctg

SEQ ID NO: 307175 - DNA, 602 bp, Homo sapiens
ttttagcttataaaagtaaaagtgaaattatgtttccttttttcttcaagtcttattttagtgttgacatgtgcttttttactatctataattgctgcttctacttgtcttactctcttccttccaacaccacacacattcctccccgtccttttttttttgaggaggggtatctcagctttttcctctctgctctccagctctacttttcctacctggttttgccctttggtctgcgttcctaggcctgttttgcttcttcctctctgttctgtcattatatcaactggttaaaatataaactggtctgtgtgtgtctgtgcccggtgcacccattatgctaggtttgtgtgyctagtcttaatttttttaaatgaaaaagcacattatggatcctttctctgataagaaaaaataaatataaaactgcttgtattttatgtgagtctcattaaccttgttttctaagttgttaatttttaactagaaagaagtttctattatgaattggcttatcttctgaggaagagagagattaaacaacctctctaaggcacacagctggaatgtggcagagagggaactcaagtacaagcagcctg

SEQ ID NO: 307176 - DNA, 543 bp, Homo sapiens
taagtgtgaggaaactacccaaagatagtgaaagaaccaccaaaaagactgagagcgaacaccaccaagtaggtcctgtttccaccagctggagtattcagaggggttttgcctcaacagtgtgacaaagtagtactgcctaacaaatcttaaaagcatgtccccaaaagatcaaactgttttcaggtaacttaatgcatcccagaacraagctcaagatttttgtatttaatggaatacaaaaatatccagcgccaaacaagctaaaatttcaaatgactggcatcaaattaaaaaaaaaatcaccaggcatgcaaaagcaacagaatccataatgggaagaaatatcaatcaaccgaaaccaaccccaaaatgacacagacagaattagcagacatagacattaagccaattataactgtattccatatgttcaagaagctagagaaaagacagagcatgaaaaacatagacatggaagatataagacaatttctaaagatgaagttataatatctggaatgaaaaatatggtgggtggga

SEQ ID NO: 307177 - DNA, 543 bp, Homo sapiens
taagtgtgaggaaactacccaaagatagtgaaagaaccaccaaaaagactgagagcgaacaccaccaagtaggtcctgtttccaccagctggagtattcagaggggttttgcctcaacagtgtgacaaagtagtactgcctaacaaatcttaaaagcatgtccccaaaagatcaaactgttttcaggtaacttaatgcatcccagaacgaagctcaagatttttgtatttaatggaatacaaaaatatccagcgccaaacaagctaaaatttcaaatgactggcatcaaatwaaaaaaaaaatcaccaggcatgcaaaagcaacagaatccataatgggaagaaatatcaatcaaccgaaaccaaccccaaaatgacacagacagaattagcagacatagacattaagccaattataactgtattccatatgttcaagaagctagagaaaagacagagcatgaaaaacatagacatggaagatataagacaatttctaaagatgaagttataatatctggaatgaaaaatatggtgggtggga

SEQ ID NO: 307178 - DNA, 385 bp, Homo sapiens
aaagatgaagttataatatctggaatgaaaaatatggtgggtgggattaagagcagactaaacattatagaagaaaaaattaataaatttggagacatcacaacagactatccaaaatgaaacaaagaagactgaaagaaaattgaattaaacatcagtaagttttaagacaacatcaaagctactaatatatatgtaactggacttccaaaagggtgaagaggtcaaatawataaataaataaatatatatatatatatatatatatatatatatatatatatatatgtatatattttcttctaggaataatgactgaaacttttctaaatttgataaaaactataaacccacagatccaagacactcattgaattccaagcac

SEQ ID NO: 307179 - DNA, 527 bp, Homo sapiens
taaacatcagtaagttttaagacaacatcaaagctactaatatatatgtaactggacttccaaaagggtgaagaggtcaaataaataaataaatawatatatatatatatatatatatatatatatatatatatatatatgtatatattttcttctaggaataatgactgaaacttttctaaatttgataaaaactataaacccacagatccaagacactcattgaattccaagcacaagaaacatggaaaatatataaatagtttcatttacaaagggttcttgctcacaaattctgtaactaaatgtactgtagaaattagactaggcctaacttttacatttactaggtatagagttacaactgacactttataatagagtacattaaagcatacattaatctaagtaaagtgcttaacagaaatcctaatgacttcaaaattagcaaaatacagcttataaaacaatgtatattttgttgccctatcagttaaataatttattaagataaatttgatcttatt

SEQ ID NO: 307180 - DNA, 527 bp, Homo sapiens
taaacatcagtaagttttaagacaacatcaaagctactaatatatatgtaactggacttccaaaagggtgaagaggtcaaataaataaataaataaatatatatatatatatatatatatatatatatatatatatatatgtatmtattttcttctaggaataatgactgaaacttttctaaatttgataaaaactataaacccacagatccaagacactcattgaattccaagcacaagaaacatggaaaatatataaatagtttcatttacaaagggttcttgctcacaaattctgtaactaaatgtactgtagaaattagactaggcctaacttttacatttactaggtatagagttacaactgacactttataatagagtacattaaagcatacattaatctaagtaaagtgcttaacagaaatcctaatgacttcaaaattagcaaaatacagcttataaaacaatgtatattttgttgccctatcagttaaataatttattaagataaatttgatcttatt

SEQ ID NO: 307181 - DNA, 527 bp, Homo sapiens
taaacatcagtaagttttaagacaacatcaaagctactaatatatatgtaactggacttccaaaagggtgaagaggtcaaataaataaataaataaatatatatatatatatatatatatatatatatatatatatatatgtatatattttcttctaggaataatgactgaaacttttctaamtttgataaaaactataaacccacagatccaagacactcattgaattccaagcacaagaaacatggaaaatatataaatagtttcatttacaaagggttcttgctcacaaattctgtaactaaatgtactgtagaaattagactaggcctaacttttacatttactaggtatagagttacaactgacactttataatagagtacattaaagcatacattaatctaagtaaagtgcttaacagaaatcctaatgacttcaaaattagcaaaatacagcttataaaacaatgtatattttgttgccctatcagttaaataatttattaagataaatttgatcttatt

SEQ ID NO: 307182 - DNA, 505 bp, Homo sapiens
accccccagcttcctaagccctgccagcctttcagcgcgtctctgggaatccctggcacaaaatcaccgccgcgctccagccttctccgccctctatggagaagccggagtaacggcctcagaaccgcagtgccgcatcacaccccacccctcgccgcccgccagcgccgcccgccaatgccgggggccgccgtcaaagggagcgcgctgctccctccgcgccgatatccttccgccgactccccgcccctcccgtgcagctgcctctggattgtgggagaagaaaaccgctgcatgagcgcgctcccgagcgagcgcgcccccgggctagcctcgccgccgcccagatcctggcggcgggcgcgggctcgggcgtgggcgcgcgctcgctgcagctgctgcggagacaacccgctcctcgsttgcgcccaggacggttgcctggtgggcggggacagggaaggcagagcaaggggtctgtctgctcgctcgctcatgcctaatt

SEQ ID NO: 307183 - DNA, 505 bp, Homo sapiens
accccccagcttcctaagccctgccagcctttcagcgcgtctctgggaatccctggcacaaaatcaccgccgcgctccagccttctccgccctctatggagaagccggagtaacggcctcagaaccgcagtgccgcatcacaccccacccctcgccgcccgccagcgccgcccgccaatgccgggggccgccgtcaaagggagcgcgctgctccctccgcgccgatatccttccgccgactccccgcccctcccgtgcagctgcctctggattgtgggagaagaaaaccgctgcatgagcgcgctcccgagcgagcgcgcccccgggctagcctcgccgccgcccagatcctggcggcgggcgcgggctcgggcgtgggcgcgcgctcgctgcagctgctgcggagacaacccgctcctcggttgcgcccaggacggttgcctsgtgggcggggacagggaaggcagagcaaggggtctgtctgctcgctcgctcatgcctaatt

SEQ ID NO: 307184 - DNA, 564 bp, Homo sapiens
ggtttatttcctccccgagtgacttctttgatacgtgaaggaaggggaaagaaatccttctcttataaacatgagggatgcagacagcctttttcggacagtttgatgtgttctgtaaagcatgccttctccccagcaaaatggaataggaaaactcactgcagcaaatggcagagggacttgagccacaacttggtgggggtttttttctcctttttkttttcttccaaatgcagtccactaacgcatgaatgttcttcaaagttgcaagtgacatacagtaagattttttaaaaaccagagctgtctgtcagcacgttggtattccctgactggagcaaacatgactcagacattgttttttggttttgttttgttttttactatttgggcatgggtcgggggaaacccaagcaaaatcaagagctacaaagaagaaacatttagaagtcatccaagttgggtgacaaataaacagattacatatttgtcataaatctccatgccacgtacgactgggaccttgaaataattttaagttccctggcaaaatcaaatgctact

SEQ ID NO: 307185 - DNA, 564 bp, Homo sapiens
ggtttatttcctccccgagtgacttctttgatacgtgaaggaaggggaaagaaatccttctcttataaacatgagggatgcagacagcctttttcggacagtttgatgtgttctgtaaagcatgccttctccccagcaaaatggaataggaaaactcactgcagcaaatggcagagggacttgagccacaacttggtgggggtttttttctcctttttgttttcttccaaatgcagtccactaacgcatgaatgttcttcaaagttgcaagtgacatacagtaagattttttaaaaaccagagctgtctgtcagcacgttggtattccctgactggagcaaacrtgactcagacattgttttttggttttgttttgttttttactatttgggcatgggtcgggggaaacccaagcaaaatcaagagctacaaagaagaaacatttagaagtcatccaagttgggtgacaaataaacagattacatatttgtcataaatctccatgccacgtacgactgggaccttgaaataattttaagttccctggcaaaatcaaatgctact

SEQ ID NO: 307186 - DNA, 564 bp, Homo sapiens
ggtttatttcctccccgagtgacttctttgatacgtgaaggaaggggaaagaaatccttctcttataaacatgagggatgcagacagcctttttcggacagtttgatgtgttctgtaaagcatgccttctccccagcaaaatggaataggaaaactcactgcagcaaatggcagagggacttgagccacaacttggtgggggtttttttctcctttttgttttcttccaaatgcagtccactaacgcatgaatgttcttcaaagttgcaagtgacatacagtaagattttttaaaaaccagagctgtctgtcagcacgttggtattccctgactggagcaaacatgactcagacattgttttttggttttgttttgttttttactatttgggcatgggtcgggggraacccaagcaaaatcaagagctacaaagaagaaacatttagaagtcatccaagttgggtgacaaataaacagattacatatttgtcataaatctccatgccacgtacgactgggaccttgaaataattttaagttccctggcaaaatcaaatgctact

SEQ ID NO: 307187 - DNA, 586 bp, Homo sapiens
gagccaacttgaaggggatcccaagacaaatctgggacaatttaagcaacaaaataaataatgatagtaatargttgtaactcgtggaataaaacaaatatccctatgtccagagtgataacaagttgaataaataaatcactgggagagtggtggaagttcttctttacagtagaattccaagtaataaatgatgaagaagtgatggaaacaaaattaccatttgccagatactatagtaaaaattgtttcaggcaagagtcattcacaaatgctaaaattggtgggctaaaaggagaaacaggattttttatatagtgtcacagtatctccccagaagatatttattaaatggcaaagggaaaaataatgttacagtagagaagtctggcagacaccaccttaatcaagtgatccaagttaatattgcagtcatgaggccaacatatataacctgatttaatcaaaaagaaacatcagacaaatccaaagtgagggacactctacaaaactatgggtatacactcttcagaattgtgaaggtcacacaagataaagaaagattaagaaactatcatagattaaa

SEQ ID NO: 307188 - DNA, 570 bp, Homo sapiens
ggtgaacccctgtctctactaaaaatacaaaaaattagctgggcatgatagggcatgcctgtaatcccagttagttgggaggctgaggcaggagaatcgcttgaacccggaaggcagaagttgcagtgagctgagatcacgccattgcactccagcctgtgcaacaagagcaaaactctgtctcaaaaaaaaaaggtctctacttcaagaacacatacctatggctgaaacttaagaaattacacggtgaaatgttattttgaattaaagactttttaaaaattcacttaygtacatggaatgtgctttcactctttttaaaaaattctgtcattctgtctatgtaaaagtacaagatactctaattttggacagattgttgcaagtgatatgtacaataataaagactttccacatgcaaatgagaaataaacactttctttaagcaaaatgaaataggcctaggagtataggtgagggatagagctatgcggcattcaaatgtgggtgtgagttggcctaagtctaaaaccagaggtgggctgcaagcaaatatggcctctaataccc

SEQ ID NO: 307189 - DNA, 570 bp, Homo sapiens
ggtgaacccctgtctctactaaaaatacaaaaaattagctgggcatgatagggcatgcctgtaatcccagttagttgggaggctgaggcaggagaatcgcttgaacccggaaggcagaagttgcagtgagctgagatcacgccattgcactccagcctgtgcaacaagagcaaaactctgtctcaaaaaaaaaaggtctctacttcaagaacacatacctatggctgaaacttaagaaattacacggtgaaatgttattttgaattaaagactttttaaaaattcacttatgtacatggaatgtgctttcactctttttaaaaaattctgtcattctgtctatgtaaaagtacaagatactctaattttggacagattgttgcaagtgwtatgtacaataataaagactttccacatgcaaatgagaaataaacactttctttaagcaaaatgaaataggcctaggagtataggtgagggatagagctatgcggcattcaaatgtgggtgtgagttggcctaagtctaaaaccagaggtgggctgcaagcaaatatggcctctaataccc

SEQ ID NO: 307190 - DNA, 389 bp, Homo sapiens
tgacttctctctagctttgaaagtcctagatggcatcttcctctgatagarggctattttgtatacattaaaaatctgttatttagtgtagccaccttgatcaataatcttagctaggtcttctggataatttgctgcagcttctgtattaacacttgctgttcaccttgcactttcatgttatggagacagcttcttcatgaaatttcatgaaccaacctccactaccttccaacttttcttttgcagcatgcttacctgtctcagcttcacagaactgaagagagttagggccttgctaactttcttgccttaagttaagggaatgttgtggctggtttgatctatccagaccgctaaaactttctccatattggcaacagcctttc

SEQ ID NO: 307191 - DNA, 623 bp, Homo sapiens
ttgtaaaattaatcattcctggcttttgatttaaagtgagagacatccaactctttctttcatttgaatactcagaggctgttgtagggttattaagtagattaattttaatattgttgtctcacatgaaggccagaggagagagacagagacgggataatagctagttggtgggacagtcagaacacacacaacctttattgagtaagtttaccatgttatatggatgtggtttatggtgccccaaaacaattaaaatagtaacatcaraaatcagtgatcaaagccagccattgtgacatatgcctatagtcccacctactcatgaggctgaggcagaaggatcacttgaggccaagagtttgaagccttggcctcccaaagtgctgcaattacagacacaagtcaccataccaagcctgaagagtctattacgtattaaataacttaaatgtattattataaaccttcccacaaataaaacctcagtcccacatggtttcactggtacgttcttccaaacatttaaggaagaaataacactaagcttacatatattttggagaaagaataatagtaccccaaagatgtacacctcctaatccctgaaaactgaatatgtt

SEQ ID NO: 307192 - DNA, 623 bp, Homo sapiens
ttgtaaaattaatcattcctggcttttgatttaaagtgagagacatccaactctttctttcatttgaatactcagaggctgttgtagggttattaagtagattaattttaatattgttgtctcacatgaaggccagaggagagagacagagacgggataatagctagttggtgggacagtcagaacacacacaacctttattgagtaagtttaccatgttatatggatgtggtttatggtgccccaaaacaattaaaatagtaacatcagaaatcagtgatcaaagccagccattgtgacatatgcctatagtcccacctactcatgaggctgaggcagaaggatcacttgaggccaagagtttgaagccttggcctcccaaagtgctgcaattacagacacaagtcaccataccaagcctgaagagtctattacgtattaaataacttaaatgtattattataaaccttcccacaaataaaacctcagtcccacatggtttcactggtaygttcttccaaacatttaaggaagaaataacactaagcttacatatattttggagaaagaataatagtaccccaaagatgtacacctcctaatccctgaaaactgaatatgtt

SEQ ID NO: 307193 - DNA, 555 bp, Homo sapiens
gcagctgatgaagccagaagggacagcagacatcaggcaatgcaaggtagttctgtggtggtgtgggtttcacctgacgtgcagtggagtccacagagtgttaattagcagtgcggtgatgtgaacccatgtggagaaggrccaatcgggatgcttgtggagggtggaccaggcagcaagatagacatgaaagccagtcaggaggctacaccatcactgggtggaggtggctgtaagtgaagtggtgggattggagggacctgggcagggctggatacacagggagggagagggaaagggagggccgaggacagtgcccaggtgtctgctacctgaaactgagtgtaggaggtcccatttcctgagggggacactagagtccaggctgggagctgtgtgagtcccctgggctgtcataacaaaggatcacaaagcaggtggctcaaaaacaacagaaatgtaatctctcacaattctggcatccaaaaatctgaaatcacagcgtcagcaggcccacactgcctttgaaacctggaggggaggctccttccttac

SEQ ID NO: 307194 - DNA, 512 bp, Homo sapiens
tcaacacccttggaaagagctggagaggataaaagggaaaaaacaaaccttagtggaatgatattttatttatctcctttatgtcctgctttataaaaataggcatcttacaccctagaatgtgggcaaaatctgcatccaaacagttcaggaaatttgttacctgcttagcaatttttttatgaaatccagaaaaagttaagccatgctacagactaaagcctttgctataaactccctatcggccaaatccccttggggacccattttaaaaaccaaacattgaggaattttcttaaatacccaggtcctaattgattttaatgagtattttcccctctttgaaaaaggtagagcttaattttcaagagttataaaaatagctgcttctccacctttcatgtcagaatcctaccttgraaaaatttggcaacaatctatgtcaaatatattcaaagtaatgctttgcattctatagatggtttaaagatacttttacacttgtcatttca

SEQ ID NO: 307195 - DNA, 580 bp, Homo sapiens
ttgaaaaaatttggcaacaatctatgtcaaatatattcaaagtaatgctttgcattctatagatggtttaaagatacttttacacttgtcatttcatatctttaaaataatcctgtatggtagaacacagtggaggaaagataagttgagaaggtgagctacttcaatgtacaggggaaaaaaacaaagttcataatggataaagtaagcagtatcatcttcatttttccaataagaatggcrtaaccctgaaaatgtgaagtaacttccccaaattcacagtgagcccagaaaaatgataaaagtccaggccttctagtgtaagaggactacatcaagtagaagaggttaacaacaaggccaggcctcccctccaagattttttcttagataatatttcatcagtgtccaacaatgcaaactgctcttaattatactttgtaagcattaaataaattttaattaaaatagaaacagtcataatagagcatcttaaggttataacaaaagctataaaatgaaatgactgagtggtgtttacatgggaagtactatgccttttcaacagattttccccaaa

SEQ ID NO: 307196 - DNA, 580 bp, Homo sapiens
ttgaaaaaatttggcaacaatctatgtcaaatatattcaaagtaatgctttgcattctatagatggtttaaagatacttttacacttgtcatttcatatctttaaaataatcctgtatggtagaacacagtggaggaaagataagttgagaaggtgagctacttcaatgtacaggggaaaaaaacaaagttcataatggataaagtaagcagtatcatcttcatttttccaataagaatggcgtaaccctgaaaatgtgaagtaacttccccaaattcacartgagcccagaaaaatgataaaagtccaggccttctagtgtaagaggactacatcaagtagaagaggttaacaacaaggccaggcctcccctccaagattttttcttagataatatttcatcagtgtccaacaatgcaaactgctcttaattatactttgtaagcattaaataaattttaattaaaatagaaacagtcataatagagcatcttaaggttataacaaaagctataaaatgaaatgactgagtggtgtttacatgggaagtactatgccttttcaacagattttccccaaa

SEQ ID NO: 307197 - DNA, 580 bp, Homo sapiens
ttgaaaaaatttggcaacaatctatgtcaaatatattcaaagtaatgctttgcattctatagatggtttaaagatacttttacacttgtcatttcatatctttaaaataatcctgtatggtagaacacagtggaggaaagataagttgagaaggtgagctacttcaatgtacaggggaaaaaaacaaagttcataatggataaagtaagcagtatcatcttcatttttccaataagaatggcgtaaccctgaaaatgtgaagtaacttccccaaattcacagkgagcccagaaaaatgataaaagtccaggccttctagtgtaagaggactacatcaagtagaagaggttaacaacaaggccaggcctcccctccaagattttttcttagataatatttcatcagtgtccaacaatgcaaactgctcttaattatactttgtaagcattaaataaattttaattaaaatagaaacagtcataatagagcatcttaaggttataacaaaagctataaaatgaaatgactgagtggtgtttacatgggaagtactatgccttttcaacagattttccccaaa

SEQ ID NO: 307198 - DNA, 635 bp, Homo sapiens
atctactaccatgaagtaactcctacttttaaataatccggttagacacttatagttaattgtaatgaatagtcaaaaatctcctctcaatgacaagacataattattacaaatctcaacactgcaaaataaaatgcattagactaataaggcatagagacacatcataaagtacttacagttacactattcatacacattttcattctgaaaaaccagtgattttttaatatattaaatagattcattgatggaatatcaaacatgttaaaatttagaaaagttataataaatattgatatgatacttaatcatattgactttttctagttttccacctttaagaaaaattaccatcagtttaacatgtcttttaatcattttaccttaactggaatataatgaatacaaaatcatgcaacatctttttaatatttacataatattgtttagaagaatattatattttattacatattacttggatgttgatatattttaagttatatttagtcttggcaattacaaagtaataagtgctcattgaagaaatattagaaaaacagaaaggaacaaagaaggaaataagaacctctcataatcatyacccagatgtaaccactattaacatttta

SEQ ID NO: 307199 - DNA, 533 bp, Homo sapiens
tctgctggaaatagctgtatattctctcttctctctcccatgtacctaaaggagtggtaagtcaaaatgttcctcaggatttacttgataatgtaagatgtttatgcatcttaatgtactaactctgtatggatacataggactcacatattgtgaccactgtatctttattttccaggaattctcagaatatttcaatcacaaatacagccaagccaggatagcaggaacaaccatggtactcttgacccgagcaatattgcaaggtcccctgatctccactcctacctgcctatgcctmcacagcctggagtaaaacacctgccactcacctacttccagggcttttaggaggggtctaataatcagacagaaaactaggatccttgatttgtcttttcagactactttaaaaagcacaatgcattgcagtaaaaacctttaacgactttcatcttcaaagaaacaccaaattatgttataatttatctgaaacgtttttagattatttctgaattgtttcgtgttttcag

SEQ ID NO: 307200 - DNA, 642 bp, Homo sapiens
ctcttcttcgtaatactcccttagaaggttgaaaataaaatttctttcgttattgattttgtccttctacatttggcaaacattgatttttccctttcctaatggggcagaagccaacatagctgtatttcatttactttgctctctgaacccagagtcacagctgatgttagcaggaccacaagcatctcacagggatgccaatatcagttgtttaactggagggcacagggtcttacaagaattggccccaaaatgtcaagcacatagtaggttcctggtcaatctgtgagttgagagcaagtccaaatattcagatgggkcgataactgggagaaggaaaatgtggggctccaaaggggtaaggtgggtggggcaactcagagggtgtttcccatagtctcctctggctgccataacagaatcccatagattaggtggcttaaacaacagaaatttgtttctttcagtgtggaggctggaaactccaatatcggggtgccagctctgacaaagcatgacccgggagccagctgcaggtaagagaaatactctgatgtctgcatttattttcatctaactgtgctgagctaagtagactgagtaggggatgccaactttgcaggcacaggctcagcagtg

SEQ ID NO: 307201 - DNA, 653 bp, Homo sapiens
cacctaatggctgggctgatctctatgccttgcctgggcattttataccctaaccaacagtgatttatagcttatttttctttcctacctggattctatattggtcgtgtaacctaacttcagtgttccttttctcccattctgtgctccaccccctatttttttaaacagacgatgtgactcggatctgtgtccccacccaaatctcatgtcgaattataatccccaatattggcagtggggcctggtgggaagtgattggatcacgcgggcagatatccccctttggtgctattctcctgatagagttctcgtgagatttggttgtctaaaagtgtatggcaactccctacctccttctgctctggccaygtgaagtgttggctccttctttgctttccaccatgattgtaagttccctgaggcctccccagaagctgatgccactatgcttcctgtacagcctgcagaaccgtgagccaattaaacctcttttccttgtaaattacctagtctcaggggtttttttatagcaatgtgagaatggaatattacaaaaaaaattgagctgagagtagacttcccatatataccactcctcaaaactttccttattataaacatcttgcattagtgtgcttcatttgttacaa

SEQ ID NO: 307202 - DNA, 653 bp, Homo sapiens
cacctaatggctgggctgatctctatgccttgcctgggcattttataccctaaccaacagtgatttatagcttatttttctttcctacctggattctatattggtcgtgtaacctaacttcagtgttccttttctcccattctgtgctccaccccctatttttttaaacagacgatgtgactcggatctgtgtccccacccaaatctcatgtcgaattataatccccaatattggcagtggggcctggtgggaagtgattggatcacgcgggcagatatccccctttggtgctattctcctgatagagttctcgtgagatttggttgtctaaaagtgtatggcaactccctacctccttctgctctggccatgtgaagtgttggctccttctttgctttccaccatgattgtaagttccctgaggcctccccagaagctgatgccrctatgcttcctgtacagcctgcagaaccgtgagccaattaaacctcttttccttgtaaattacctagtctcaggggtttttttatagcaatgtgagaatggaatattacaaaaaaaattgagctgagagtagacttcccatatataccactcctcaaaactttccttattataaacatcttgcattagtgtgcttcatttgttacaa

SEQ ID NO: 307203 - DNA, 534 bp, Homo sapiens
atcaactacttactctttagtttcaatacacagaggagaaagggttagacttaytgctcagggtaataaggtcaaagctgtaaggggtaaaaagactggcaggtttacacatgtagttttatttttcacgatgctttaaccttcaagccaaatcttcaaagactagaaccagcactctaagaatagaacacatgttcaaattcagtgtctccaccaaaactatgtacatttaacttaaaagaagagatgatggctggaaaacaaatagaggaaacaagaatgaaaaattctagataaatgttgaatctgagtaaagtgtctataaggcttcattattactattttcactattaatacttttgtgtgtgtttgagaattttcgcagtgaagtatttcatggagtccctcttactcaaagaagattgggaatcactagaccagagggtagaacggtgactcagccatttatctcgtggaggaaggcaagaatagttccactgaatagtgcttacatttctctgaggctcttgggca

SEQ ID NO: 307204 - DNA, 634 bp, Homo sapiens
aattcagcatcttgctggcttgtttttaaggatctatacaaacagcctctgtggtgttaatcacaggccctgactaaatgacgaaggctggggccactgggaatgtcttatggtctcacacaggatgggcctggtcctcaggacggtttgctcagattttgggcagaagctgaccgttccaatggaagccagcctcaaaatctcctttcctatgacataactggaaagtgctgctaacggcagcaggggaaacagggcagcagagcttgttcaggcaggagagcaagattcaggcatgaccaatgaccagagggtccctgagagtgaaggagaccaacaggccaggctgtgagarggcaggagggcacaggagccattccagaaggctgactgtgagcagggactagagaggcttcattgcacttacttatgcgaacactcttaggtcttgggagggcaacaatgggtctcctgagaggcctatgacaggttcctgctctccagtgacaaggcggggggcagagagcacacaccccttcagggccagctggagctgagtctgcatggcctctccacagcggtgccctcctggatttgtctctctgccaggattctttgtggggtacaacatgcc

SEQ ID NO: 307205 - DNA, 525 bp, Homo sapiens
tggtcagaacttttgttctgttgtaggtgaaatgagagccctgcatagagctcgtggtgtggtgtgccacctggagggtggggcttrtggggaagaagctcaaggcgagaataaagaactgtttcaggaaggagtaagcacctcagattcggagccactggtccccctcaatgtcttgctgtctcctctggggacctggaaagtcacctgacactagagacactagacaccgggaaggggggagggaagagaagctctatttggaggaggcacctgagaagatgataggtatgtacctgagtcttcctgagttgttggtgggaaatggggagatatcaaatggatgaaaaccaaactgaactgcagttcatacccgtaattcctagtctttttccatgtgacttagtggctttcttaagatgtaagtgaggatccagggttaggtgaggaggtaggtctatgccttgaaaggagcagacctcctctcaacccctttcttcctttcctttctataatcctcagcct

SEQ ID NO: 307206 - DNA, 576 bp, Homo sapiens
tgtggctgtggggaagggtagagaattggggccatttttgtaatcagtccaccaagcatcttccatgtataatctcatttaatacccataagaaccttaggaagaagctactattaccctcattttacagatgagaaaattattgtacaaagagattgagtaattggttccagctcccacagctcaagaatgccagggctgggctgtgaacccaagcaggctgactgcagagtcagtgcgctcactctctctgctctgtctgctcccttttccagctgtcagacgtggggatggagagaaagacactcagagttcaaggaagggtgacgaacctgtgagaagatgacttggggwgggaggaaggttgctgtgggcagtttgagtggggctgccatgggagcccagctccattcctcccagggccagcctcggtggggagggaccataatcaggtcagtccccgttgcctctttcaggttttcctctctgtcctgcaaagccactagacggcttgaaaggatgtgatgttctgtgttccctgagctgacttagacctgagcatatatgcagatgcag

SEQ ID NO: 307207 - DNA, 576 bp, Homo sapiens
tgtggctgtggggaagggtagagaattggggccatttttgtaatcagtccaccaagcatcttccatgtataatctcatttaatacccataagaaccttaggaagaagctactattaccctcattttacagatgagaaaattattgtacaaagagattgagtaattggttccagctcccacagctcaagaatgccagggctgggctgtgaacccaagcaggctgactgcagagtcagtgcgctcactctctctgctctgtctgctcccttttccagctgtcagacgtggggatggagagaaagacactcagagttcaaggaagggtgacgaacctgtgagaagatgacttggggagggaggaaggttgctgtgggcagtttgagkggggctgccatgggagcccagctccattcctcccagggccagcctcggtggggagggaccataatcaggtcagtccccgttgcctctttcaggttttcctctctgtcctgcaaagccactagacggcttgaaaggatgtgatgttctgtgttccctgagctgacttagacctgagcatatatgcagatgcag

SEQ ID NO: 307208 - DNA, 579 bp, Homo sapiens
gtcctatcaggactggaggtcacagctaccacctggggcttgtactagattgagccttctaaagcctgggggaccacacctggggacaggatgctaattcaaaccctcagagcctgcaggtagaagtggagctgcagacttgctggtgacactaggcytagatcgtgattctgactccacttcttgcagatctcacactgtgtaacttccccttcctgagtgtggcagactactggtggcatatccaacatgtcttcccttcctcctgggcacatggcactggagactgtatttccagcttccattgcaatggctatagataagttactagttctcatttgtaggcagaagagagatataagctattttcacctcttgcttacaaggggagagacccaagttagaccaatgggtttccccagtaggagttttgacatcggaacccagagagctgggttggtttcttctctttggtggctgaagctataagatgtaaaagtcaagactcatgttgtctgccatgtagataaatttgttctggggaaagacaaagactataccggcatgaagaaacaagtt

SEQ ID NO: 307209 - DNA, 617 bp, Homo sapiens
cttcaaaacaattttaaggcagagtgcattaagatttctgaagaatgagaaagaagcatatccccacaccgggatgctggttatgaagttcaaatggatggggcaaggcaatcctcttacagatgggggagaggctcaggcccacccatcagagtctagaggaagtgcctaactgaaaagcaaagcagctctcctaaaggccaccgcctgggctggccttgccagggcagctaggcactcacttccttcccctgcacatatgcacccacattcatgaatgcatgcacacgcacaaatgcactgccccttcctgtcracagctacttccttgaatcatcatattggccagggaggcagcctgggtggctatttgatcccaattgttcaaaggagaaaatcaaagctcagacagggaaagcaactcttccaaggtcgaccaggaccagaactgacatcttcgccttccaagatcaggactttctctctagaactccccggaccaataagcagtcctgaggctcctccttggttcctgactccatgaacaaggccaacctgggcccaggtgggcctgagactgtgaggcctccgaccccaccccgctcaaagagacaaag

SEQ ID NO: 307210 - DNA, 582 bp, Homo sapiens
agactgtgaatgatcagtcactcaatgcaaacctgtccccaccttatttacccaattacgcttttcagttgctatataacatatctataagcttacattcagttagagaggttattcaaagcactttgtataacccagatgctgttatcttcattcatgcacccaataaatatttgctgaagtctaccatataataggctctgctctgggcactgcagatgcagaagtgggcaagtagacaaaactgcctgccctaatgcagcctctactccagaggggagggacaggcaagcaaggaargggataagctttagaaggtggtaagtgcaaggaagaatataaagcagggcaggaagatcaggagtgttgtattttaaatacattggtcatggaaagcctcattgagaaaggcgatatttgagcaaagacttgaaggaagtgagagattgagccatgtacatacttggtgtaagagcatcccagatggagggcacaagtgcaaaggctcagggtgggtgcttcccaggcatgtttgagtgagaatggggagcccaatgtggctggagctgggagcaaagagac

SEQ ID NO: 307211 - DNA, 594 bp, Homo sapiens
cctgtgtctggtagcttttgctgcataacaaaccaaccctcccttaaattagtggcttaaagtaataaccatctattattgcttatragtccaggggctggctgggtggttctgctaatttgagtctggtttcgttgctccaggctaagcttctttacgtgtgtgccttcagctggaggctcagctaggggctggatgatctagggtggcatcgctcacacagctgacagctctgcttctggaagttgactggacgtcacttgggggtacaggggtaacagggctacatgtctgtcatcaattagcaagctagcctggacttggtcacaggacagctcaaggttcaaggaaagcaaatggaagcaggtaaagcctcttttggtgtaggtttagaatttgaagtgtctcttctgccatattctttcagccattcacaaaaaccaccccagattcaagggataggaaaaaagactcttgatgggatatgtttcaagtcacattacagaacggaaagtagaagaataacttacagccatttttgcagtctatcacacaccaccaactctgccatgatgctccatctgccggggaaga

SEQ ID NO: 307212 - DNA, 594 bp, Homo sapiens
cctgtgtctggtagcttttgctgcataacaaaccaaccctcccttaaattagtggcttaaagtaataaccatctattattgcttatgagtccaggggctggctgggtggttctgctaatttgagtctggtttcgttgctccaggctaagcttctttacgtgtgtgccttcagctggaggctcagctaggggctggatgatctagggtggcatcgctcacacagctgacagctctgcttctggaagttgactggacgtcacttgggggtacaggggtaacagggctacatgtctgtcatcaattagcaagctagcctggacttggtcacaggacagctcaaggttcaaggaaagcaaatggaagcaggtaaagcctcttttggtgtaggtttagaatttgaagtgtctcttctgccatattctttcagccattcacaaaaaccaccccagattcaagggataggaaaaaagactcttgatgggatatgtttcaagtcacattacagaacrgaaagtagaagaataacttacagccatttttgcagtctatcacacaccaccaactctgccatgatgctccatctgccggggaaga

SEQ ID NO: 307213 - DNA, 521 bp, Homo sapiens
agcttctggctcgggggagagcagctgcctggaagagacagcctctgactgacaggcaaagagctggggtgcagcccgaggccccatgccagtcggatgcagcctctgctgggcacagacatttctactcagaaagtatttcagaaacactcagctgagaaaggaagcagacgcttctcrgtgccttagtttccccagccataaaaggatgtaattggggtactctcagccctaggctatgacttccactcactggcctccaggctttgaacctgctccaggggtcccctctacctcctaattgagactctacctggaaacagcaggggacagggccttccacctggattcgagtgtgacaagaccaagtgtggagggctaagggcaacagatgctctcacctgggaaactgtgtgtcccaaccccagaagtccagtgaaagagaaagagacctcactgggagttcctttctgctggcctggccctgccacacccattccccaacagtcatgtctccatat

SEQ ID NO: 307214 - DNA, 604 bp, Homo sapiens
ggagggctaagggcaacagatgctctcacctgggaaactgtgtgtcccraccccagaagtccagtgaaagagaaagagacctcactgggagttcctttctgctggcctggccctgccacacccattccccaacagtcatgtctccatatatggcaccacaaggtatgaagccagcagccaccctgggaatgcaaatggggaaaccaagacccagaaaggggaagggaccagcctaaggacacactgtgaggtggtggcagagctgggatgtggatgcagcagttctggctcccagccccgtgctcaccagcctgtttatgggagtgctccagcccacaggagagcctcctccaccctgctcccacgtgaggaactgccgacactacctttacccagcctgcctcaaaaatgccgcctccaccgccccgtaacagccaggaaagaagcggggccctcaatccaacagcagcggggaggctggctcaggaaggaaccaccctcacctcctctgcgggtatcatccctgcggactgagaagagaggccctggggtgagagaccccactggggtggctttgtagggccctcccagccttggaaaactg

SEQ ID NO: 307215 - DNA, 532 bp, Homo sapiens
  misc_feature (1)...(532): n = A,T,C or G
ccacgttggagaggcccatacggcatggccaccatggccagcaaggcgtggaggccctcagtccagcagcccrtgaggaaccgcattctgccagccaccaaatgactgagcttgaaacaaccccacatgaatcttgagatgaacccacagccccaggtgacacaccttgatcacagtctgagagaaatccggagcagagaaccaagtaaagattactggtcacagcaacgagagaataagtaggtattgttctagctgctaattttggaaagagagttggaaagtggnacgcagctgtagataattaatacactgccacagtggcaaaaaacncngcagagaagggtcctctcccagggccactgagagggggccctgcagacagctctctgcctgacaacccgtgttgttgtgaactgcctcctagagcacaggccttgatgtggagtgtttcgaggagaggagcccagaggacagagccctgtctccaactgccctacccaggccccctgccctcagctgggcagacgag

SEQ ID NO: 307216 - DNA, 627 bp, Homo sapiens
gactgcacctgactctcctctgtgtcctccttgacccctgcgaaggggctggctcaagaaattgccgatataataagagcctcctccaggtcagagggacctcacagctccccaggaaaacatctcaccttattttaccaaaatcctagtaataacatctctcttggtgcctcctcacatccctccaactactcttccataaggggcttggggttacctctttcttccttggagaagtgrgggaaaaactaggggactgaggctgcggcagggcctggagcccttgggggtgttgggccagcagggcttggtttggagaggggccagagaggggtttgctttccttggcaggggacggatggggtagaagagtgtacctaggacaagggcccagcagtgagacctttgctgggactgattctctgggacaaaagaggacttgggtttaggtcatggctgaggaggatgtttccagcactgtgcacacccgggacatggcccctgcccgccagcacaccccgtgtctcccaggccccatcaggctggacggcccaggctcctcttgggggaagggcccctgccctccatccctctatctgattgtctgcgaggctagttcttggcaat

SEQ ID NO: 307217 - DNA, 627 bp, Homo sapiens
gactgcacctgactctcctctgtgtcctccttgacccctgcgaaggggctggctcaagaaattgccgatataataagagcctcctccaggtcagagggacctcacagctccccaggaaaacatctcaccttattttaccaaaatcctagtaataacatctctcttggtgcctcctcacatccctccaactactcttccataaggggcttggggttacctctttcttccttggagaagtgggggaaaaactaggggactgaggctgcggcagggcctggagcccttgsgggtgttgggccagcagggcttggtttggagaggggccagagaggggtttgctttccttggcaggggacggatggggtagaagagtgtacctaggacaagggcccagcagtgagacctttgctgggactgattctctgggacaaaagaggacttgggtttaggtcatggctgaggaggatgtttccagcactgtgcacacccgggacatggcccctgcccgccagcacaccccgtgtctcccaggccccatcaggctggacggcccaggctcctcttgggggaagggcccctgccctccatccctctatctgattgtctgcgaggctagttcttggcaat

SEQ ID NO: 307218 - DNA, 614 bp, Homo sapiens
ttctttaatcccggattctcttcaagcgcagaaggaagaggaaaaagccaaaggccgaggtggagaatagggagggggatgtgggggatatgggggaggtatgaaaagagatgaaggaggtcactccagcctgaggcacccaggtttcatcctaatggggacagcaagtgcccttgagggtccagaagggagctggagccccaggctggggctgcgtcagtcctgctcttcagcctctctagtgctgggaggtcggtgtaaatggtttgtgtgctgacactgcagggctacagtcatttctataggccaagaacagagccctggggtgaaggtactgkcacctcaccttagttcagcaacctcctaggccctgtgctgagactcaggcaagactcgggccagggctcagacacaggctaggccagtgctgaggcgtgcaggctccggaatagcatcttccccactggctgctgagagctgggggcccaggaggggcagggagggccctgagaggtcagctgagccagcacacctgcgctcctcccgtgccttgccctgcctccccgctcaggcctcagaagcctttctgcttccagagaagcaggggcggtgag

SEQ ID NO: 307219 - DNA, 614 bp, Homo sapiens
ttctttaatcccggattctcttcaagcgcagaaggaagaggaaaaagccaaaggccgaggtggagaatagggagggggatgtgggggatatgggggaggtatgaaaagagatgaaggaggtcactccagcctgaggcacccaggtttcatcctaatggggacagcaagtgcccttgagggtccagaagggagctggagccccaggctggggctgcgtcagtcctgctcttcagcctctctagtgctgggaggtcggtgtaaatggtttgtgtgctgacactgcagggctacagtcatttctataggccaagaacagagccctggggtgaaggtactggcacctcaccttagttcagcaacctcctaggccctgtgctgagactcaggcaagactcgggccagggctcagacacaggctaggccagtgctgaggcgtgcaggctccggaatagcatcttccccactggctgctgagagctgggggcccagsaggggcagggagggccctgagaggtcagctgagccagcacacctgcgctcctcccgtgccttgccctgcctccccgctcaggcctcagaagcctttctgcttccagagaagcaggggcggtgag

SEQ ID NO: 307220 - DNA, 589 bp, Homo sapiens
ttcacctccacaaatacaaagccttgacaaacataatgtgattatttcaaattctcttcacaaagagtttagacctttgcattgcctggcagcctggtaaactgctcctagattagccaacaaagaagataaaaagaaagaaagaaagtgaaaaaaaaaagagaggaaaggcctgaagtgtagtggctcagagcttyaattctctgccgttttgctttcagtgttcataaagattggctcactcgactcatctttcactaagagaattaacttattgaaccaaaagattaggttcggatttttcttccactgaggagctcattagagcttctaagtatgcctctcttgagaagactcagtttaaatttttctattaacagagacacttcatcagtcttggccaccttttgaactcattcagttcaaaacttccgcagttcaaaagtacacagaagctgataattagaaatgcacactttttgttcttttcaggcatatttcaggcctttatcttctatttttttcatcatctttgccttcacattttcttttttacttttattttgttttctctgcattttttacatct

SEQ ID NO: 307221 - DNA, 546 bp, Homo sapiens
tcttttcactctgttaattgtttgctgtgcagaatctttttagtttaatataaccccattagtttatttttgcttttgttgcctgttttttgaaggtcttattcataaaattttttcccaatccaatatgctaaagcmtttcccctatgttttattccagtagttttattgtctcaggttttacatgaaggttttgatccatttacttattttcagttgatttctgtatagagtgagaggtatggtctagtttctttcttctgcatatggatatacagttgtctgttttctttcatttttaaatcttgctacatatttaagatttttaaattttactttatgtattttagtgattatccttgagtttttcctatgatattgaatttaataaaggacaatgttgaagactatctttacatatttctcctgaacgtgaatatttaatgtggctcttcaaccatctcagttgcttccattttcgtttagtagtttatttatttttatctatttctccatttttaagtttccattctattccaggccctg

SEQ ID NO: 307222 - DNA, 588 bp, Homo sapiens
aactttttcaccttttcttagaaaaaagaaatattgaaaacaagaatgaaaaatagggctatattctatggaataaagtactaacttgcacaaatcattatttgatgcctttaagcaatttctattctttgcatgtttttgccttaagttttaatgtacatacttaccaatgtatgaatttttcagtatctccatcctcttccagaacatcatgagcaccatacaatgtttaaaatgcccattgaagaccctatattccttattatacttactttagaggatttgtatcaatttttttaaagtacaaaatacagatttttgttctatagctggtagtgaagaaatacaccaacttgttcgttttgatatgtttgctgttgtttgttgcattgtactccttacctctaggtttacttwctttcttgctatagtccttccttctgtggggataagtagatttttgtgtaaaaatgtttttatttcactgctactattggaagagagttttgataggtaattgaattattctaagtaggtgtttagctcccttagcactttgaatatattactcctttaatatttttgtct

SEQ ID NO: 307223 - DNA, 548 bp, Homo sapiens
ttaaatttgatttaataaatatataaaaattgttttgtcactgacaggcaactatgctcatgaacattctcatttgaggacgttcaataatccatacttgactcccgttaagtatgttccctgttctggcacytcacaaggagattttgctcttataaacctgacattttcaaattcttttttgtttccaaaataagcccaaagggaacacatatttctattgctttctaaaatgactgccagatttttgtctgtttcattcttagtgacgcatatacaacattttttgtttttttgtttctagggcaaaaatgtcaaacatcttttggaccattttgactgtaatattcttcatcctaaaatagtaacaatcaaaaacctctaattacacaaagataaagcaaattgattattataatctctacaattataaaatcagcatagataatgcaaacacaatcacatattaaatccaaaaattttgccaagatcaatgataataaacataaacatcatctcattgcactggtctagcaatgtaccactcc

SEQ ID NO: 307224 - DNA, 499 bp, Homo sapiens
acataaacaacatatcatcataaagagtttcttttcttccttcctaatttgtgtatcttttattgcttttccttgccttattgcactagcgaagatttttcatacaatgtagaaaggagaagtgagagaaaatgtatttgctttgtaactgatcttaaggaaagtgtccagtttgccaccattataatattagctgtaggctttttgtwgatgttctttatcaagctgaggaagttatcttttatttctaagatatacattttttattctttcaaacttctttttttccctcaagttctgataattttgtgatatcgtctaacttttgctcatggctgatcatttccttttgtgctttgtagttttgataagtgttttgtttacttttctgtgtaaaagttcctactatcatctgcttatgaagatgcgcctgcctagaagtggcaaacttcagtatgccaatcactattcacttaaatgcattcagattcaagtaaaa

SEQ ID NO: 307225 - DNA, 635 bp, Homo sapiens
ttccattgtttataaagactaccatggccagccagcacttcattccaatacaagcagtttmaatattatgcaatcctttcttatgtaattcttgattctcaggccacaccagcatggggataaaaatagaacattatgattgctgcaaactggtatttctctggccatgctcctattcaccatgtgagaactctggattacccttacatttttattaaataattatagcattcttaagatgtatgtcatctacaatcagaaaatttagccttttaactacccagtggcatcctatgctcgattttctctatcttttatcatatgccagtgtaatatgtctcctgccttctggtataaaaaacagcagctttgctgccaatgccaccctatggagatgattctagaaggaacagtgtctgttcccaggctgctagtgctgactgccaaatgtgtcaacgaagtcttagcattagtcaccagtatctcctgctgtgggggatgagattaaccccagcgctgtagttgtcttgtgttctgtatatctgtgctggtcgcccttggttttacttgttcttcagtcaatgctattctggtatttggtcaataccattctggtatttggtcatgaatctgca

SEQ ID NO: 307226 - DNA, 339 bp, Homo sapiens
ctattctattacaattaagctggtactcaaccacaatacaaagtactgcctgctcttcccatccctttccacaggcagagaagactctccctgtggcctccaccaccacttgcccatggagggttctgccaggccaccactgatgtttactttaaagcccaagggctcttcagtcagctgtggtgaatgttatgaggcctgggactcactctttagggtagtggactcccctctgccccagggcaggtccaagagcctaggcttggacttggggaccccaagagcctgattkttgctctaccccactgtggccaagctggtacctaaggtgcaagacaa

SEQ ID NO: 307227 - DNA, 530 bp, Homo sapiens
ctgttttcccctgctcatatctcctgggagtgaaacccatgaagtttactcacaggaaatttctgtttattttcctcaaaaaatatttgccagagctgacgatgtgttttcttccacagagtttaagagtaattcacattaaggtgacaaaatctggataccacagagtcataaggtcaccataggctgacacctttctagaaatagcagctgttagcaggacccagcacaggttccaagcaggagtccctttgggaagccacttcagccagcatagatgtggacttggactgtggcagctggtcctggkgataaaagctcttttgggtagcagctttcagcatgtcagctaatagccaagtcctctcagtggccatggatcaaagtgcctaccaattctttcacaaaagttccttcaagagctctgataattatattggcaaaacaagtctttgctaaatactacactcctagtctccaactcaattccttttcattcataaaacgatagaacttttgagttagaaaaa

SEQ ID NO: 307228 - DNA, 649 bp, Homo sapiens
tttttcctttctgaacttactctcttaaaaatatcctattgctactagctacatgcaagtgtggatgtaattcagtgtgttacaattgcaacaagaacaagaaagtcaaggttaacgaaatagtttagtttgctgcttgagctgagtggactccatctctcatacttgtattctttgtgttattttttatggcttttctctcattcctttattcctgactggtcatcgtctgtcacctgacttttttttttctgttctgagtgtaactccaatttcacatgtggactctgaagccatattctaaaaatctgttgaaagggtgtttaaataatagtaggcagatgctgagttgtttcctctataagataacttcagggcrttaggagatagattatgtgatggctgttttgtctgtttagttatttttccctttctgttacttgattacttttgcattatgtgatatctggtatttgatggcaaatattcaatgacctcagttttttgaaacatccaaattgtgtgaacttttgacgcttaacacttttatgaagcagtcaatttagatgctaaaacagcagagtttaactatgcaaactttcagacaagcctaagttggtctaatgtcccagcaaagcatttattgtgc

SEQ ID NO: 307229 - DNA, 615 bp, Homo sapiens
cgaaatgaagaatagaaagaaagacaaaagcattggattgaagaaatattgttaccaagaagagagaatgaaaaaactaggggaattgagatgcaaatatattattatacatgtatggatataggtgaaagatgagagaaaaagtggtttttcttacctgagctgcctgtccgtggcctaaactggtccttggtcttwtttaatagtgaaggtttacttcctaagggatttttttttcggtgtgtgatgtttagactctacaatctatttttttctggtctttttatttatcttctaagttcacgtaaaattcatgactaggatgtgttttcttcataaaggctctaaatcattggaaataacatttccttttataagttagatattaatacaaaaataagtaatgagacaaactgttttaagtcttaggaagatagtttttataaaatatgaaagtgtaatattatagaggtaatataaatagatgtttaatataacccagatatcatttgtgatctttgattttactgaaatggtatcattcgtaatattgccttctaaatttacatcacggattataagtgctagaactaagaatatctataagggtttatt

SEQ ID NO: 307230 - DNA, 575 bp, Homo sapiens
tttcctctctttccctctctgctagggtaaataatttggagttagattctaaattagaatctcatacccatcactaagtagctgagatttgaggcaagatatttaatctgtcaatgtcttagatttctcatccataaatgagaataataagagttcttccaacatatattttttgtgaaaattaacaatgtatagtctttggcaatgtggctgacacatatttccacaaagggaggaatgtgagggagttaggaatatatatccaacayaggaccaagagtcttgtccactcctccctttaccttctatattgtccctctgttttaccagtttcttctgcttctcatagaaattcccaaactgacttcctctttttttttcactatgtttattcttagccaatccagaacatgctgacttttacattcagaaaatataaacgctataatttttaaggaacacaaatatctttctcagaataaatctctaaaattctctccaaaatcataaattggatccaagaaaaaatttaaaaagtaatagcaaaatttttggatatcatatcctaatttcat

SEQ ID NO: 307231 - DNA, 573 bp, Homo sapiens
ggtgaggttgaggatactggaaactacagcagtgctcatggaggaagagtaatttgggacttcgtgggaataaagaaatgaatgggtcaacagagtcttgtggctagaggaagaacagggtggagctttgtgaaaaactgaagcactgtgtgaggaataaaaggaagcccagtacaaactgtacctaaaactgactgaagtggcctctggtctgcactcatctctcataaaatgtacagtgaactggaggaaatcttctagcttctatatacttcagtctcaaaatcagctgcagagggcatgttgtattctttataaagagacacatcttgtcattgtaacccaggtggtttcttcataattttgaaaacctcggtgctgtagacaatgagtcctcctcctatggttctcaattcttgaaccatatgttttaaaataacacattcatacacaaaagtttgcaagggtaattgcttttatttggatccacattttcccacccctgtgcctttattttctttccttgtcttttctcwctgcaaggaagctctagctgcctcaaactcacagtgg

SEQ ID NO: 307232 - DNA, 503 bp, Homo sapiens
gcctgactctcagctttcattcctgcctctccctactctgtatgcastacacccataatctactaaaatttctgtcatacatcaaatgtgcactgtttgctcatactttgctgttctctgtaatgcccttctctccattgttcatctttgccttccaactcttgcttattttccaaaactctactcagatagctcttctctataaaacctttcatgtcctcttatttttctgaattcattttatttcctctgttctcccaaaccccttaacatctttaactatagcatttaaaacactcttcacgaagaactaagagaaggcaggatcttattcaattggctgcattcccatagcccataacatatgacaaagtagatatttaacaaatatttgcaacactaaactgaataaaccaaattgaatattttatcaagactgttcttaagtaacacctactaagggaaacaaacaaaaagcgatagaaactgagaaaaataataat

SEQ ID NO: 307233 - DNA, 503 bp, Homo sapiens
gcctgactctcagctttcattcctgcctctccctactctgtatgcagtacacccataatctactaaaatttctgtcatacatcaaatgtgcmctgtttgctcatactttgctgttctctgtaatgcccttctctccattgttcatctttgccttccaactcttgcttattttccaaaactctactcagatagctcttctctataaaacctttcatgtcctcttatttttctgaattcattttatttcctctgttctcccaaaccccttaacatctttaactatagcatttaaaacactcttcacgaagaactaagagaaggcaggatcttattcaattggctgcattcccatagcccataacatatgacaaagtagatatttaacaaatatttgcaacactaaactgaataaaccaaattgaatattttatcaagactgttcttaagtaacacctactaagggaaacaaacaaaaagcgatagaaactgagaaaaataataat

SEQ ID NO: 307234 - DNA, 524 bp, Homo sapiens
tattaatactactttatcatataagcaccaatatacccccagaagtgattcatacttagggtatagtcattctaatagactccatattcacactagtttccactagagttctgtcattagtctttgctcaaataattttctaaattgtagcttttcaaatactatttccatgrtgattactataaaggtttaattagttattttagtagtaagtgctgtttgaggcactagaaacactagcagatgagcaggacatagtttctaatccagacttgcttacaatgtagcccaggcagttcttaaatgtctttccacacacacttgttcttggaaatgtcaatgaattttatgtgaacaaaatcctactgatcaaataaacgtaggatgctattaagtaacagcataagttctgaagttagactaaaaaccctttcctatctaacttcatgactttggaaaagcaatttaactattcttccatttccttatttgtaaaatggaaacaaaattttacccattaattt

SEQ ID NO: 307235 - DNA, 557 bp, Homo sapiens
ttacttcgctattttttagtcaaaaaacaacattttcaatggcatgaacattcttgtgctgcctctatatctacctcaatttgctgaggagttgggttgatggcagggaatgaaattaagaaaacggtatacaggccattgccactagcacattcctttgtctgaaccctggcatcctagggatgaggaagatgtctgggccatggcttgagtctgtacttgatttactacccataacctttcatcttccttgtgcatgctaccctgactgcctgttttgtccctcctttcttcatttccactatatgctaaatttattaaggctgtaatggtgtctcctttttcttctgagtctyccccaagttgtccagcaccatgctttgcacataaatgctgaccttattatatagagtttgcactaatgaaagggaaaccagacagtatcaaaagaataaaacaagagggaaagaaaaaattactttcagaaggatacatggtcttaatagtatagtgtccctattagaaacctctgtgtttgtactgaatttcctataatg

SEQ ID NO: 307236 - DNA, 480 bp, Homo sapiens
aaaacaagagggaaagaaaaaattactttcagaaggatacatggtcttaatagtatagtgtccctattagaaacctctgtgtttgtactgaatttcctataatgttgtgtgcacagtaagcccaccgggtattgyattttccactggctaaatgatgcatgtgtagaggcattgaaacaaatgaggaaaagagagagaggcactttaaacactttaattaaatattccccctcaggaaatctaaaaggaaaaaaaatctatttgtctttcagcatatgtggcaaatactgtgtgttgctaagcaaatgccatttccttcccccgttctactagtcaccttccccatgacaatctgataatgctagctgtccaatttaccagcttcatttgccagtagaggagccaaaaagggattccatagagatgttctgggtaacaattttcactccctgatttaaaaagcaagatccacaaggatgt

SEQ ID NO: 307237 - DNA, 547 bp, Homo sapiens
tgacaacttcacatactataacctgtacagtaacataaaccctcaagagacttgagctcacctcagccctgagactgcatttctagccttcaacaagggcagctgcctaggaggcactcagtcaatatccatgaattaatgaataagtgaatgaatgctgactattgggataagtgaggaagtacacatatgaggatcaggttaaattaattctctgaatatccacaggagtctcaagtaacaagtagtatgtcaagtatttgttgaagaaaggaaggaaggcagagaggaatggaggaagaaaagaaggcacctaatagaagccactgtaataatttaattccagccacatctggatattgtagcattggtctgcrcccctcacatctcattgatttttagggttccagctgttacacagacaaagacacctcttggacttcaatcctgcactgtctatcagtgggtttcctgatcatggcttttgttttcttatggcttgaggtgtgaccctgcatctagttaccgattggctccatgtgagttt

SEQ ID NO: 307238 - DNA, 326 bp, Homo sapiens
aggcttacattgatgttctggatcttgggtctctatttcttactttaatagacratactcatgctccttttattttctccttaggttactcccttctgagggttgcttataaacctgtgtcccaccatgtccctaggtattctatcccattcccatcaaggtgttgcttgaatcttaaagcacactattacagtggttcttagagtgtggtccctgaaccaacagaataaacatcacctagaaattggttagaaatgcagatgagatcaggcacatttagggtggtataaaacccaaaggaagggattgaactgccatggcaaaat

SEQ ID NO: 307239 - DNA, 495 bp, Homo sapiens
gcccatggaacaattcaaccaactgacggtttttatatagctgacaggaagaaaatgagttttacattttctagatgcgaaaaaaaaatcaaaaaaggaatattttatgacacatcaaaataatacaaaattcaaatcatcaatgtccataaaaaatttattagaacacagccacattcattcatcttactgtttatggctgttttcatactatagtggcagagttcaatagttccaacagaaaccatatggctcacaaaatgtaaaatacttgctatttggccatttatagaaatatttcattaactcctaatcttagcaatggaggccaggctaggcatarcaatgatatataaaataggaatctcaactcttcaaagcttcatggagaagagctgtcatacaatcctggatccagtacccccagatcttcatatgaaagaaaaataaattcctacattttaaagccactattccataatgtaatagactgaa

SEQ ID NO: 307240 - DNA, 551 bp, Homo sapiens
gcaagctaaatgtaccaaatgaatgtttactatgaaagcaaagagttaattactatccttttaagataagactttgtagcactcaggtatattctccaaccactggtatcttggtaaatatttaacaactaactcacctcccttccccaagaccatttgtagcagttgcagatttctattgtgtaaatatcgccagggctgatttcaagctaccaactgaagggtccctgatcatggattagaaagaaattggaaagtacagtggattgctaggagttgctccaacacaccattgccttaaacccactgagtaatgagactactcacgtctagaaagagtcaaaagaatgagagtaacattatcataaaaaccaccacaaaatttaaaatgtttaaaagtaacaaaattggcaaatgtgagtcattaaaastagttgttaggaagattttaagtcctgtggttttaaaactttcttacaatgtttgcattttaaagatctcttctagaaacccttttaaataaaagtttaattggagaaaaatagaaccac

SEQ ID NO: 307241 - DNA, 543 bp, Homo sapiens
gaaacccttttaaataaaagtttaattggagaaaaatagaaccaccatgtacataggatggtaaacaaggtgaataaaattcctaggagtcctcaatctggataattattcttaaacaacattttagaaaaatcaagtacaagtataaacattgcttcattcaaatcctcaacatcaaatcatttgataaagtcaacatgaaatgagtctagatttgggttgaggggagaagaaaaaattaactgctcttattttagttatggcacttgatctgccttttttgctaaaagtttgagttctgagccaaagaccctcacagtaagatgctcctcaaagttttttgaacccagttcctgagtctgcytggatggtctgaacatgatgtctagccatactcttgaaactttcaatgtgtacacaaacatacagttcaggaaatcagttattctattcaggcatctgtatctaaatatttgagaagtttgtttgctttttaatcttagtatccgtaaatcttctaaagttagctggtttttgtttgtt

SEQ ID NO: 307242 - DNA, 549 bp, Homo sapiens
ttcttaagttaattcagaaggataggattataccaatctattctggtcaataaattatcactttaaattaaatcactaagcaacaagagtcatatttytatacaaatcagcaaaatacaccagaaattatctaaagattccataatttttttgaaacgtgctgttgtgagccttcataatctatataaatatgtggggttttgcaaaaaaaaaaaaaaaatatatatatatatatatacatatatatatatacagccttgagtgatcaagctgtctgaatcttatcaaagttccactgacaaaaagtgatatttatgacatacggtttgaagaatatgcaagacactcattcctcaaattagggacttctaccttgagttcttgggttctacagttcacatttttaggttcacacatcttccagatctactgatccttaagaacaagggcaggccaagttgaaagatgtcagagcctatcactcccacctaaatcaagagagttgttttacatatcagggtcggccacacatttcagttgaaaagaaaa

SEQ ID NO: 307243 - DNA, 465 bp, Homo sapiens
tcacctcttgatccctaaatgcagccccaacagaactccagcawtattcttgaccatatgtagtgccataaggaggagccagattaacagataattacacggcgacatgacagttgccatgttggaggcatgtgcaaattgttcaagatgacaaataaaatggtagcatcacgaaagtctcagaatgatcctcaatattaaatctaattggggcaaatggaagaaagaacaaagaagcctagattataggaacagcagagtcacagaaggccaaagatgtgcaaaggcttcttgtggccacaggtcacatcaaaactctgatcagaaacctgtgggcccatactatatacccttgtcctaattccttctaatccctatcttcctatatttttcaagatggctcatagaccggcatcttcccaaaatcctcttcattggcttctcctgatgctgatctgctaatca

SEQ ID NO: 307244 - DNA, 478 bp, Homo sapiens
ttaacctaaaagatgttcagagaatcccccaaatttggaaattcatgaaaccaaaaaaaatgactttaaaagagatttgaaagaaaataacataactaaaaagttcccatttaaaataacctggttatagtttttaaaatactagtgtattagttcatttttatactactatgaaaaaatacccaagactgggtaattaataaagaaaaagaagtttaatgaactcacagttctacatggctgaggaggcctcacaatcatggcagaaggcaaaggaggagcaaaggcacgtcttacatggtgtcaggcaagagagcatttgcaggggaactgccatttataaaaactatcagatatcatgagacttattcaccatcacaagaacagcaatggaaaaacccaaccctatkattcagttacctcccacctggtcccttccatgacatatggggattaggggagctacaattcaagatga

SEQ ID NO: 307245 - DNA, 467 bp, Homo sapiens
caaattttttatattattaaaattaattggtatgcatttgaactaaattgctataaattaagatgaatattttaatctccagaggaaccactaagaaaataactcaaaaaattcagtgaaagaagtgacaaagaaattaaagaaaatatatatttaatataaaataaggcactaatagagaaactgaaaaacaaaaaagacataagacattgaaagcaaaatctagcatatgaccatcagggtaggtggtaaagagtatggggaaaatgattactaaaaatgaaaactttaagaaatgaacaaattgsgatgttagatattttctcccctaacatggcagtgaaggatgaaaagcatctgagaggagatgaaggtccggaatctaaagtctccactgggtgtagaagaatgatagcagaagagaaggtgacatcaacaagaagagaaagagaatgttctagccccaa

SEQ ID NO: 307246 - DNA, 459 bp, Homo sapiens
tcttaccagatgtgctcaaaattatacaaaatgttatggaacaagactctttatgctttagagatatagtcagtactaaaatatttactggtgaaagaatacactgcccagaattatcgtcaaagaaatccagaaacaagggttaaatttggagggagtaatggaggaaacaaggtttgttatgtaagtggaataataggtatatgtgggtatattatactatcactctctatttgaaatgttacataattgtgtaaatcttatgcagatattaaatatagcattgttgaagaaaagaatgaaaataagtgaagtattcatcgttgcaattaagaacttataaaaaggtatcaaaaactaatatcaaaatcatgcaaaggtggtctggggtagaaaaaaagatatcytatttactgtctatcattttgcactttgtttcccgtgcataagcattatttt

SEQ ID NO: 307247 - DNA, 550 bp, Homo sapiens
ttttcccttttctataaaaacgttaaaatatattgctctcatttcttaaaatcaccaaggaatttttactagacatcaatatatttctacttctctctctttataagttaaaacaccatgagactggctttctaatcagcataccagctaccaattctaaaactgtccttcaaagcagtcaccttgaaaatctttagtaccattacaagcataactgactgatcaaaacatgtttaaaatgttttaggagttactttgaaaatcaggttacaagccacaaaataatatcactttctttacttaatagttacacctcatttttwaaaaaaattaataacggtttaatcactcactttctttaccagatgagcctctgatttctttggacctttcccaaatacaatatttttgctcaaagcatgaaaaatttttactgtgaaatacaattttcaaagtttgcatggtcttgtgggacaattccacaagagaaattccaagaatgagttgtccaaaggcggcatccctgaaatgagtatgaagcctgccaagc

SEQ ID NO: 307248 - DNA, 562 bp, Homo sapiens
aatatttttgctcaaagcatgaaaaatttttactgtgaaatacaattttcaaagtttgcatggtcttgtgggacaattccacaagagaaattccaagaatgagttgtccaaaggcggcatccctgaaatgagtatgaagcctgccaagctgatgactttgatggaactaacttttccttagtgtgtaagtttttaagttttatttcaaaataagttttattaaaaaataattttgtcacacctcatgtaytatatgactttttatgcacacagtgcctaaggggggattttacatagattttgtctaaaaagaggaagctatccacatggctgccaaaattaagtcctctggagggtgattttctgaactagcaatgattcaattgccaaataacttctgtttcttacaatttagcaagtttcaattcaatctaccaatattctcattatgccacttttaagagaggagattgttttaaccccagtggagcatttcagtaaattgcccactatagaaatgctaaggatatgttacaacacctcttttcttccgcagaaataa

SEQ ID NO: 307249 - DNA, 533 bp, Homo sapiens
taatgtagcagtgctgtatatagatttgtgaaattacagcgtatacattactgcaaattttgcatggtttcttatcagcctttagactatactagtatgtgtggctcctatagaagggagtctctacctaaactaactgcaattatgtttagtagttctctagaacaaaagcagttaaccaacaaatggcattcccttcttttccaatctctttgatgattcagagaatgacygtcatttacattcacacccaaattccagttcaagtttttttattttatttcaagtaattatgtgtttttgagagaaagaatgtgatatggtaggaagatcacagactcaacaataaacaacaaacagatctgagttcaaatctcagctctgccctttcctgtgtgaccttgagcaggtacacaatctcattaaggcccagtttccttatgtgcaatatagtaaacattttaattaatacgcttaaggtgcccatgttggagttagaattttgtcttcacaaaaacagtgtttatattaat

SEQ ID NO: 307250 - DNA, 514 bp, Homo sapiens
tcagtctttgatcacattatcatcaacaagttatattttatttgtttttgtttaaagacactttaatacatattgttgattcagtaacattgaactcacagccaatagcactataactcccatctaaatgaagtatttaacacacatattttctccataaggtrcatcacagccttcttgcccttagaaacattagacagcacttcagcagtatacttggggaccattattaggagcaaaatctcccaacaaaaagcacaaacatggaaaaaaaaattggtactaaagagaccacaaaaaagatacttttttaaaacctaatgagaactgaaacaagaaggcagagggtcaccctgttagagcttagctagtaacatgcatgccagatgaccctatttttactactctgtacatatctgagaatgaccacaaaatgccaggagtattaagtgacataacaaattttagcaagcaggcaaatttgcaaatacagaatccataaataattaggatt

SEQ ID NO: 307251 - DNA, 363 bp, Homo sapiens
tatcatcaacaagttatattttatttgtttttgtttaaagacactttaatacatattgttgattcagtaacattgaactcacagccaatagcactataactcccatctaaatgaagtatttaacacacatattttctccataaggtgcatcacagccttcttgcccttagaaacattagacagcacttcagcagtatacttggggaccattattaggagcaaaatctcccaacaaaaagcacaaacatggaaaaaaaawttggtactaaagagaccacaaaaaagatacttttttaaaacctaatgagaactgaaacaagaaggcagagggtcaccctgttagagcttagctagtaacatgca

SEQ ID NO: 307252 - DNA, 608 bp, Homo sapiens
tttactgatcacaattcatagcacttttcgctgtattaatcattgccataacttggtgtacacattagaaatgcccatggggacttacatttgagatgaaattttgaacttcaggctctcattatacttggactgataagtactattttattgcgatgcatactgctgacagtctttatactcaagcaataaatgtttgcttttagagtcattcaataaatttactatttcttggtgagactgcatttactccatatcaagccagtttatagaaatagccccatattttatctcctgaaaccatgtgtttcatttaaatggtgatggacattgggatgttttcagtttttggtgtattatttataaaaatgccttgaacatttgagtacaastctctgtgtgtatatatgtcttcatttctcttgactaattcctaaaaaagattaatattctcacctggagataaatcacaaattaatatttaatattatttttagaatattttgcattattttccaaaatggtagtatcatccaatgtatgagagttcttattgctcatagttgtcaacatttttaagtttttaaaattatttttctattttttta

SEQ ID NO: 307253 - DNA, 374 bp, Homo sapiens
attttagcctttttggtagagtatagttgtatgtcattatagttttaatttgcatttccttgatgactaatgatgrtaatttttcatgtgaatatttaacatttattatattatatttgttattatattctattaaaatttgctgcccatttttttcttactaatgagtttaaagagtacttcttatgctttagatgacaatgctttaacagatatacatatagctaattttttctccaaatatagagtttgttcttttattttagaaacaaagttttaaattctgaataagtgcaatttatgaattttgttcttttattattaaaacttttggagtcctagctaagaatccctgcttcccctaatgtcacaaa

SEQ ID NO: 307254 - DNA, 374 bp, Homo sapiens
attttagcctttttggtagagtatagttgtatgtcattatagttttaatttgcatttccttgatgactaatgatgataatttttcatgtgaatatttaacatttattatattatatttgttattatattctattaaaatttgctgcccatttttttcttactaatgagtttaaagagtacttcttatgctttagatgacaatgctttaacagatatayatatagctaattttttctccaaatatagagtttgttcttttattttagaaacaaagttttaaattctgaataagtgcaatttatgaattttgttcttttattattaaaacttttggagtcctagctaagaatccctgcttcccctaatgtcacaaa

SEQ ID NO: 307255 - DNA, 589 bp, Homo sapiens
tttttttgtggaagtttgcaccaatttctgttgtttacctaagtatttaaggtgtttttcatgcaatgataaaatattttattttcraattgtttatttctagtgtatgaaaaataatttttgttttgtatattgaacttgtattctgttttcttgataaattcacttcttagtactagtaggttttggttgtatatgccttagtttttttcaggcataacattttttcctatgcaaatcaatagttttacttctttctttacaatatgtatgtcattatttgttattcttgcctacagcatggcctaggatctccagtactatgttgaatagaatagagaagagcagacatgtttgccttgttcctatttttagggcaacaatgttcagtctatcatcattaagtaagattttaggtagttgttccatagatgctctatataatatcacagaaagtcttttctgtttctagtgtgtcaagtttttattttttgtatgaatggatattgattgaattttgtgatgtgatttttctgtatttattaagatgttcatgtcattttcttcttcattctttcaaactgaatta

SEQ ID NO: 307256 - DNA, 583 bp, Homo sapiens
gaaacacaaaactataaactaactcaacccctggatagagtgagtgaacctcccaaagaagatgcatacatatacataaatatgatttaactcagtttctactgtcctatacacaatgaactacattcattaaaaaattgacagacacaaaaaggatgaaaaattaacacattttcaagagataaataataaacagaactagacacagagatggcattaaaatagctataagtaatgtattaartaatctaagagacaagatgaacagaatccacaaacagaaaggatgtttgagcagagacatggtgatatggtttggctatgtgtccaccatcagtcatagcaagaagtcctaaggtaatatcaaaatctgatcaattgagaaatagcattcaaaataattcttatgtatattgaataaccactggaggaaatagttaaataattaaaatttagttgtgttaaagtataattttcaaaaaggtaaaattatgactctcaaacaaacataaaataaggatgtgtcaaatatcttattcaattcattaattaaaaagggaacctgtaaggtacagtacaaagg

SEQ ID NO: 307257 - DNA, 583 bp, Homo sapiens
gaaacacaaaactataaactaactcaacccctggatagagtgagtgaacctcccaaagaagatgcatacatatacataaatatgatttaactcagtttctactgtcctatacacaatgaactacattcattaaaaaattgacagacacaaaaaggatgaaaaattaacacattttcaagagataaataataaacagaactagacacagagatggcattaaaatagctataagtaatgtattaaataatctaagagacaagatgaacagaatycacaaacagaaaggatgtttgagcagagacatggtgatatggtttggctatgtgtccaccatcagtcatagcaagaagtcctaaggtaatatcaaaatctgatcaattgagaaatagcattcaaaataattcttatgtatattgaataaccactggaggaaatagttaaataattaaaatttagttgtgttaaagtataattttcaaaaaggtaaaattatgactctcaaacaaacataaaataaggatgtgtcaaatatcttattcaattcattaattaaaaagggaacctgtaaggtacagtacaaagg

SEQ ID NO: 307258 - DNA, 583 bp, Homo sapiens
gaaacacaaaactataaactaactcaacccctggatagagtgagtgaacctcccaaagaagatgcatacatatacataaatatgatttaactcagtttctactgtcctatacacaatgaactacattcattaaaaaattgacagacacaaaaaggatgaaaaattaacacattttcaagagataaataataaacagaactagacacagagatggcattaaaatagctataagtaatgtattaaataatctaagagacaagatgaacagaatccacaaacagaaaggatgtttgagcagagacatggtgatatggtttggctaygtgtccaccatcagtcatagcaagaagtcctaaggtaatatcaaaatctgatcaattgagaaatagcattcaaaataattcttatgtatattgaataaccactggaggaaatagttaaataattaaaatttagttgtgttaaagtataattttcaaaaaggtaaaattatgactctcaaacaaacataaaataaggatgtgtcaaatatcttattcaattcattaattaaaaagggaacctgtaaggtacagtacaaagg

SEQ ID NO: 307259 - DNA, 558 bp, Homo sapiens
aatgaagaaaacaatacaaacataaaagaaacaaaaaaaatgttttttgcaaaattaaagtcaacaaaactttggttagaccaatgaagaaaaaagggagaatatctaaataaaatcagagatgaataaggagacattacaaatgacaccacagaaattcaaargatcgttagtggcaattatgaacaactatatcccaatgaactggaaagcttagcagaaatagacaaattcctagacacatacaacctgccaagactgaaccatgaagaaatcccaaacctgaagagatcaataacaactaatgagattgaagtcatagtaagaagtatcccagcagagaaaagcccgggacccaagggtttcactgctgaattttaccgaacatttaaaaaagaattaataccagtactactcaaattatttcaaaaaatagaagaggagggaatattttcaaactcattctatgaggccagtattaccctgatagcaaaaccgacaaagacaaattttaaaaagacaactacaggcaagcattcttgataaacattgatgaaa

SEQ ID NO: 307260 - DNA, 558 bp, Homo sapiens
aatgaagaaaacaatacaaacataaaagaaacaaaaaaaatgttttttgcaaaattaaagtcaacaaaactttggttagaccaatgaagaaaaaagggagaatatctaaataaaatcagagatgaataaggagacattacaaatgacaccacagaaattcaaaggatcgttagtggcaattatgaacaactatatcccaatgaactggaaagcttagcagaaatagacaaattcctagacacatacaacctgccaagactgaaccatgaagaaatcccaaacctgaagagatcaataacaactaatgagattgaagtcatagtaagaagtatcccagcagagaaaagcccgggacccaagggtttcactgctgaattttaccgaacatttaaaaaagaattaataccagtactactcaaattatttcaaaaaatagaagaggagggaatattttcaaactcattctatgaggccagtattaccctgatagcaaaaccracaaagacaaattttaaaaagacaactacaggcaagcattcttgataaacattgatgaaa

SEQ ID NO: 307261 - DNA, 608 bp, Homo sapiens
actgcaaaccactgctcaaggaaataagagaggacactaacaaatggaaaaacatcctatcctcatggatagaaagaatcaatattgtgaaaatggccatactarccaaagtaatttatagattcaatgctattcccgttcaaactactattgacattattcacagaattagaaaaaactactttaaaattcatatggaaccataaagagccaatcaatagccacgtcaatcctaagcaaaataataaaataataaatagccaagtcaattctaagcaaaaagaacaaaactggaggcatcacgctacctgaaggaagtgttttcagtatcctcttgaggaataaacttggaggatacccagtctccctaaattctttagatttatctttctacaagatacaaatttatttctgtcatttcaacttcatttgatacattccactgatgagtccaggcttcagacaaacaaccaaatgatcaattagaaccactttcaggtgcacaagctgatgcagtgcattgaatctacttatctatttctgcagatattgatgcatttatgcattcattcaacaaggatttattcagcatttgcaggctatcagat

SEQ ID NO: 307262 - DNA, 608 bp, Homo sapiens
actgcaaaccactgctcaaggaaataagagaggacactaacaaatggaaaaacatcctatcctcatggatagaaagaatcaatattgtgaaaatggccatactagccaaagtaatttatagattcaatgctattcccgttcaaactactattgacattattcacagaattagaaaaaactactttaaaattcatatggaaccataaagagccaatcartagccacgtcaatcctaagcaaaataataaaataataaatagccaagtcaattctaagcaaaaagaacaaaactggaggcatcacgctacctgaaggaagtgttttcagtatcctcttgaggaataaacttggaggatacccagtctccctaaattctttagatttatctttctacaagatacaaatttatttctgtcatttcaacttcatttgatacattccactgatgagtccaggcttcagacaaacaaccaaatgatcaattagaaccactttcaggtgcacaagctgatgcagtgcattgaatctacttatctatttctgcagatattgatgcatttatgcattcattcaacaaggatttattcagcatttgcaggctatcagat

SEQ ID NO: 307263 - DNA, 559 bp, Homo sapiens
gatgtcaagttccatccatgttgttgcaaatgacaggaccttattttttgctggaagaatagttttccattgtgtgtaagtaacacattatctttatccattcttatgtcgatggacacacaggttgcctccaaatcttggctactgtgaacagtgctgcaataaacatgggagtgcagatatctctttcatacactgacttcttttcctttgggtatataaccagtagtgagactctggatcatatggtggctccaggttttagtttcttgaggaacctccaaattgttctccatagtgattgtaytaaattatattcccaccaaccatgtacaactgttccctttttccacatcctcaccagcatttgttattatctatcttttgataaaaggccattttagctggggtgagatgatacctcattgtagttttgatttgcatttctctgatgatcaatgatgtttggtaccttttcatattgctatttgccatttgtatgtactcttttgagaaacgtctattcagatcttttgcccatttttaaatcagattatta

SEQ ID NO: 307264 - DNA, 624 bp, Homo sapiens
gctaagactattttaaacacatagaatataataaaatttgaaattgtatgttcaaaaaagccatatattcaattgtttagtgatgtagccacttcccatccaaacgaacactgtagtgttgatgttattggcttggtatcccttcttttctttcgtacctagtctgtttcctccttcatacctccaaccgtcatctttatgaaggacactcttttctgcatttgagtaaaggaagggcaatgaaaatactcatatatatttggccacctaaagaacaaagtctaatttgaaaaatcaaggataaaagccattacttgttaaacaggctaggttccatattatatacattgtgatgataatccccctaattaggaaagaaaaacctgtaacccgaggagatgaagcagcttgcccaagtacagtgactgctgaaattgcagcacaaaactgcctatctatggctgtctttaaagcccatgmtctttccctccctctcaaatgactgaaataaatagctaatgagaagatgcaaccaaggtacaaacattccatgaatttatttatctagagcagattacaaccatttgggggagagagcaaatatacatcctcagtaagggcact

SEQ ID NO: 307265 - DNA, 591 bp, Homo sapiens
tggttgatgaggttctgcaataaaattgtaccaattaagcagttccagaaaactgtaaccttaatgcactagctttgtcctattttattttattcatttatttatttttgagacagggtctcactctatcattcagctcactgcaacctccacttcccaggctcaagtgatccttccacctcaggctcctgagtakctggcatacagacgccaccacaccaggctaattttttgtagagatggtggaggggggtcttactttgttgcccaggctgtttaacttctgagctcaagtgatacacctgcctcggccttccaaaatgttgggattgcaggcacgagccaccacacctggctgctttgttctattttaatattcacttggttattgttatcacaaggtctagagcacaaatgataccctaaatgtgaaaatctagtgctgcatcttttaataattaattcctaaagcaatctgaacattgcctgttgaccaatactatcataatactctaattacaagataaaggggagagctttttggtagcttggcttgcttattctgaaactgaaacattttgtgacaagttt

SEQ ID NO: 307266 - DNA, 282 bp, Homo sapiens
catctgcccagctctggctgatcccagggcttttatgggcctcagagtggaggtagtgcatgctgattggtccattagtggccacgggcaggccagagaaggcacaacaagcccccactctggtctgcagaactggagcccagcccccagccttcargcactccctggcctgaaggtggggcattactggggacccacccccttccacccaggaaacctgtctaccttctgctgcctccatggtgcctatgctgtagatgccaaggggcacctgcaggccag

SEQ ID NO: 307267 - DNA, 545 bp, Homo sapiens
ggcaggccagagaaggcacaacaagcccccactctggtctgcagaactggagcccagcccccagccttcaggcactccctggcctgaaggtggggcattactggggacccacccccttccacccaggaaacctgtctaccttctgctgcctccatggtgcctatgctgtagatgccaaggggcacctgcaggccagttccaagctatgytaaaaccccatccacgtttctcttaggcttgtcactggccaaagtttggaaggggctgaggctgcagggggctggcatgtcagcactgacccagtgtgtacacacacacccgggctcgggcctgactttactccaagaacaaagcaagtaccaacagcagggagaagccaggcagtggtagcaggcattttcaagcttgcaagggcaggggaggccttcccaggcctctaaaggtgcagggatgcctggttctgcaggtgcaggagcaggagacccaggtctgcagctatgatgtgggtatctgcagctgcatccaggaggatgggactcctgctt

SEQ ID NO: 307268 - DNA, 546 bp, Homo sapiens
ctttttaatcatatgagttaagtattcttaataaactccctcactatcagcagaacagcatggggaaaaccacccccgggatccaatcacctgccaccagatcacttcctcaacaggtggggattacaattcmagatgaaatctggatgcggtgcagagccaaaccatatcacaatgtgatcatttagactaagacaataatcagagctagacagaggaaaataacatgttaatgtggatagcatatgagagaacaatagatgttagagtagaaaaaaaaacagaacacaaagtaaagtcaatctaatgatgtaatgtttggagaacttagcttaaggggagaagaaaattcagagttattctgaaataatcaattaggaataatctcatgtatacttcagtgatcaaggataaagaatttgggcagaacaataatatatatctctaatgaaacaaggtttgaaattggaagacagtgaattagaaactagagtagtacaaagtgaatatgatcaagatttttgtgaggactttgatagatgagaa

SEQ ID NO: 307269 - DNA, 546 bp, Homo sapiens
ctttttaatcatatgagttaagtattcttaataaactccctcactatcagcagaacagcatggggaaaaccacccccgggatccaatcacctgccaccagatcacttcctcaacaggtggggattacaattcaagatgaaatctggatgcggtgcagagccaaaccatatcacaatgtgatcatttagactaagacaataatcagagctagacagaggaaaataacatgttaatgtggatagcatatgagagaacaatagatgttagagtagaaaaaaaaacagaacacaaagtaaagtcaatctaatgatgtaatgtttggagaacttagcttaaggggagaagaaaattcagagttattctgaaataatcaattaggaataatctcatgtatacttcagtgatcaaggataaagaatttgggcasaacaataatatatatctctaatgaaacaaggtttgaaattggaagacagtgaattagaaactagagtagtacaaagtgaatatgatcaagatttttgtgaggactttgatagatgagaa

SEQ ID NO: 307270 - DNA, 568 bp, Homo sapiens
actttgggggattattgggaagacatgattgtgttttataatgtgagaaggacataagatttggaaggggccaggggtggaatgatatgttcgactctgtgtccctacccaaatctcatgttgaattataatacccacaatcttctttgacaccacaatcttctttctcacatccaggccacamtgatgtaagggtgagctcccaaggccttgggaagctccacctctgtgactctgcagggcacagccctcatggttgctttcatgggattaagtgtctatgcctttttcaggtgcatagtgcaaactgttgatggatcaaacattttggggtttttaggacagtgggacacttctcacagcttcactagggagtgccctgtggggactctgtgtgggcgctccaaccccatatttcctctctgcactgccctagtagaggttccatgaggactccacccctgccacagacttctgcctagacactcaagtatttccatacatcctctgaaatctaggaagaggctctcaggctttaaatcctgctctccacatgcctgcaggccca

SEQ ID NO: 307271 - DNA, 578 bp, Homo sapiens
gatgagtgaatgtgaaggcctaggacatcactattactcagctttagactttataaatgctgtatatttagtctacactaaatgtataaaaaaactacaatgttacagtggctacaaagtcrctaggctataggaatttttgagctccactataatcttatgggatcaacttcatatatgtggtgagtcattgactgaaacattacattatgcataactgtgtattaaattgcacatattttaagagtaccactggataggtgttgagatacacacatgcacacacacatgaaaccatcaccaccatcaaggtaattgaagtaatcatcagctccaaagtttccttgtactcctttgtaattcctctttccctttcttttgccaatgtaacagtattgatttttttataattacatataaataaaagtataaattatgtatattttggcttctttcacttaacataattattgggaggctaatttacacttgtgtagaaatatccagctcatatattttacttctgagtagtattccattgtatttctttacctgatgatagatatttgggttgtttc

SEQ ID NO: 307272 - DNA, 614 bp, Homo sapiens
tttgtaacagtttaggtagaaattgtaccagagcttttatgtacatttggtagaaatcagctttgaatctggctggtgctgggctttttttttagatttgtaggctatttataactgattcaatttagagccattagtggtctgttcagggattaaatttcttcctggttcagtcttgcgagggtatatgtgttcaaaaatctatccattccttctagattttctagtttatgtgcacagatgtgttaataatattctccratggttatctgtaattctttgaggtctctggtaatatcccattgttgtttctaattgcatttatttggatctgtttacttttttattattctagatagtagtatatctactttattaaatttacaagaaaataacaactcctggatttgttgagattttttaaattttttttttaatctatctcagagtccttcagttcagttccaattttggtaatttcttgtccttagctttgcagtttgattttggttcttttcgtcatgatgttaggtagttaaaatgagatctttccaactttttgatgtgagcatttagtactataaatttccctcttaacactgccttagctgtgt

SEQ ID NO: 307273 - DNA, 614 bp, Homo sapiens
tttgtaacagtttaggtagaaattgtaccagagcttttatgtacatttggtagaaatcagctttgaatctggctggtgctgggctttttttttagatttgtaggctatttataactgattcaatttagagccattagtggtctgttcagggattaaatttcttcctggttcagtcttgcgagggtatatgtgttcaaaaatctatccattccttctagattttctagtttatgtgcacagatgtgttaataatattctccaatggttatctgtaattctttgaggtctctggtaatatcccattgttgtttctaattgcatttatttggatctgtttacttttttattattctagatagtagtatatctactttattaaatttacaagaaaataacaactcctggatttgttgagattttttaaawtttttttttaatctatctcagagtccttcagttcagttccaattttggtaatttcttgtccttagctttgcagtttgattttggttcttttcgtcatgatgttaggtagttaaaatgagatctttccaactttttgatgtgagcatttagtactataaatttccctcttaacactgccttagctgtgt

SEQ ID NO: 307274 - DNA, 614 bp, Homo sapiens
tttgtaacagtttaggtagaaattgtaccagagcttttatgtacatttggtagaaatcagctttgaatctggctggtgctgggctttttttttagatttgtaggctatttataactgattcaatttagagccattagtggtctgttcagggattaaatttcttcctggttcagtcttgcgagggtatatgtgttcaaaaatctatccattccttctagattttctagtttatgtgcacagatgtgttaataatattctccaatggttatctgtaattctttgaggtctctggtaatatcccattgttgtttctaattgcatttatttggatctgtttacttttttattattctagatagtagtatatctactttattaaatttacaagaaaataacaactcctggatttgttgagattttttaaattttttttttaatctatctcagagtccttcagttcagttccaattttggtaatttcttgtccttagctttgcagtttgattttrgttcttttcgtcatgatgttaggtagttaaaatgagatctttccaactttttgatgtgagcatttagtactataaatttccctcttaacactgccttagctgtgt

SEQ ID NO: 307275 - DNA, 574 bp, Homo sapiens
tgtgtgaggaattcacagttctcaacagttttactttctaacatgtggcttgctcagctcatttgtttctaatatctggtctgctgtaccattttaacatatgagttaaaaataaattatttaagcagatagataggataaggaagtcttccgtgaagtttactttttaatgagaagtagtccccaaatcatttgttttctaactaagagcagcctgtaaaattgagctgcagacatrgataagcaagctggagcacaggtgaatgctggcagctgtgccaatagtaaaagtctacctgggggctaggcatgttcaacatgacatctccatctttccttttccttgccaaccacgtgtacagtaaggagcacacaacgtggagccaaccaagtaaaaaatccatttgcataataaaagattagggtggggttgcaaggttcttcacgcactgtgtaaatgtcctgcctggtacaaccaatctttgagacctatgtaaatcagacaccacctcctcaagccagtctataaaaccccaagtgcttcactgtaggaccggaagtcccactcaagtgc

SEQ ID NO: 307276 - DNA, 620 bp, Homo sapiens
ttaaaaataaattatttaagcagatagataggataaggaagtcttccgtgaagtttactttttaatgagaagtagtccccaaatcatttgttttctaactaagagcagcctgtaaaattgagctgcagacatggataagcaagctggagcacaggtgaatgctggcagctgtgccaatagtaaaagtctacctgggggctaggcatgttcaacatgacatctccatctttccttttccttgccaaccacgtgtacagtaaggagcacacaacgtggagccaaccaagtaaaaaatccatttgcataataaaagattagggtggggttgcaaggttcttcackcactgtgtaaatgtcctgcctggtacaaccaatctttgagacctatgtaaatcagacaccacctcctcaagccagtctataaaaccccaagtgcttcactgtaggaccggaagtcccactcaagtgcccctctctttcgcaggagacagagctattctcttccctctttcttttacctgttaaacctccactcctaaacccacttattgtgtgtttgcatccttgacttccttggtgcaagacaatgaacctcaggtatttaccccagacaacgatgc

SEQ ID NO: 307277 - DNA, 598 bp, Homo sapiens
tatttaccccagacaacgatgctgcttcaatttgtttactctgttttcctttacttgaatttttgatttcaacacttgtgtgactagcttggtcaaggtaaccttggctctctcatttggtttaaatgtccttttaatgactctgtaccttatttattcttatagaaataataaaccttgaaattattatattatataatgtttacatattaacatgatactaactttcctatcaatactctaagatttctgaggtcctagctcatgttcctctttgcattccaaataactgtaaagtgtaggaattcagttaatagttcytgtttgattgaacaaagagatctaataacatgaaaaatttaataagacatacgtaatcaattacatacgtacttactaatagagtaacaaaacatttgggcaacttttgtctcttatgaataatttacaatgtatttccatcagaattatgaattagtcacactactggcatgattgatggattatatatttacttaatctcctttggagctacattccatttttcctggagtattttactttcaaactatactttaggaccattttatcaaataac

SEQ ID NO: 307278 - DNA, 598 bp, Homo sapiens
tatttaccccagacaacgatgctgcttcaatttgtttactctgttttcctttacttgaatttttgatttcaacacttgtgtgactagcttggtcaaggtaaccttggctctctcatttggtttaaatgtccttttaatgactctgtaccttatttattcttatagaaataataaaccttgaaattattatattatataatgtttacatattaacatgatactaactttcctatcaatactctaagatttctgaggtcctagctcatgttcctctttgcattccaaataactgtaaagtgtaggaattcagttaatagttcctgtttgattgaacaaagagatctaataacatgaaaaatttaataagacatacgtaatcaattacatacgtacttactaatagagtaacaaaacatttgggcaayttttgtctcttatgaataatttacaatgtatttccatcagaattatgaattagtcacactactggcatgattgatggattatatatttacttaatctcctttggagctacattccatttttcctggagtattttactttcaaactatactttaggaccattttatcaaataac

SEQ ID NO: 307279 - DNA, 556 bp, Homo sapiens
acacaaagtaaaacataaaatctctcaccatggtagctttaccctctaaattgtactcacatactcagttcctgaacttatattttgcaattttccttcgtatccccttcatacaatattacatactatctaccacataattcctttctattattgcctctgaatttttttatactatttcatttcactggaatttaattcattattacattgttattcttaaattccataactgtgagacatgtcccccaaaaggaatttttttatgttctgaaagcattttatcatttattgatatataactcactatacaactaccaatttgcagtacaaaattcagtgattttagtgaattcacagaggtttgcaaccaccactgcaataaattctcataacattttattcacttcataaagaaataccatacccatcaattgtcactcatcattcccctcaataccytcagttctaggcaaccacagattgactttgggtctctatagatttgaagattcaagatatggcatataagtggactcatgtaacatggggtctt

SEQ ID NO: 307280 - DNA, 533 bp, Homo sapiens
aagcattttatcatttattgatatataactcactatacaactaccaatttgcagtacaaaattcagtgattttagtgaattcacagaggtttgcaaccaccactgcaataaattctcataacattttattcacttcataaagaaataccatacccatcaattgtcactcatcattcccctcaataccttcagttctaggcaaccacagattgactttgggtctctatagatttgaagattcaagatatggcatayaagtggactcatgtaacatggggtctttatatgactggtttctttcacttagcgtaatattttcaatatttatccatgttgttgcaagcatatttattttattgccatattaaatttcattgtgtggatatactacattatatatgtccattcattagttgatgaacatttggcttctttctacttttgactattatgaatgacaatgcttgaacattgtgtacaggtttgtgtatagtcgcatgttttcccttctcttgggtatatatctaggagtg

SEQ ID NO: 307281 - DNA, 642 bp, Homo sapiens
agcacacaactatggagtatgttaaagagmattgtaatggatataatgcatttgatatataaagccaatatatattttatttcttagaaatcttgtttctctgcgactcaacatcctttgtaccaatgtcatccatcatttcatgtgcagagcaagtatatcttagaataaagtggtgattcctctggttaagattcaaatcagactttttgatcttaaaaaaagcacgatcttaagaaccaggcttttctgagagtaaaataatttttctaaattccaaagttttccttggctagaaaaaaaaaaagcatgacattctgagtaaagatctcgtaaagagaagataaaagacatggtttaaagggagtttctatcccacagcaagaaataaagcctttctcaacagtaggtagtttagccaagaataaagattcagaggagataaggcctgggttaaatttctgtctaaatttctaagaacatatgtctcagccaattaggccaagacccaaagcatggaccaaaaggagtaaaatcccacataagcaaagtgggtggctgacaacaaaacatttgaaactcattttttagaattccccatgaccaaattgggtgattagggaaaagtaaaactgtggtatg

SEQ ID NO: 307282 - DNA, 642 bp, Homo sapiens
agcacacaactatggagtatgttaaagagcattgtaatggatataatgcatttgatatataaagccaatatatattttatttcttagaaatcttgtttctctgcgactcaacatcctttgtaccaatgtcatccatcatttcatgtgcagagcaagtatatcttagaataaagtggtgattcctctggttaagattcaaatcagactttttgatcttaaaaaaagcacgatcttaagaaccaggcttttctgagagtaaaataatttttctaaattccaaagttttccttggctagaaaaaaaaaaagcatgacattctgagtaaagatctcktaaagagaagataaaagacatggtttaaagggagtttctatcccacagcaagaaataaagcctttctcaacagtaggtagtttagccaagaataaagattcagaggagataaggcctgggttaaatttctgtctaaatttctaagaacatatgtctcagccaattaggccaagacccaaagcatggaccaaaaggagtaaaatcccacataagcaaagtgggtggctgacaacaaaacatttgaaactcattttttagaattccccatgaccaaattgggtgattagggaaaagtaaaactgtggtatg

SEQ ID NO: 307283 - DNA, 596 bp, Homo sapiens
gtgggtggctgacaacaaaacatttgaaactcattttttagaattccccatgaccaaattgggtgattagggaaaagtaaaactgtggtatggtagcatgtgtttaggttgagaaagggtttgacaaaatgtagctctatttccccacagcctgcatctgacattgacaaaaatgtatgtgttcctatgtgtcttgtgggatgcaaaaggtttctgtgaattacaagtcagcagactgtctaatgattttctatgctgaggtgtaagatgatagcaagcctattgtgaatctaaattaaaaggaagggatgtggcatggttgagaagcgcaagattaacasaatcaactaaagggcagtcagaggagctgtctggcttttggggactaatgctcaagaattatctaggcagtgaatacacagtttatgctagttattttttaagcagccaatccattatacagaggctgttgactaaagaaagtccacatatcaacatatcagtcagaggtcagcagaagacagaagaagcatttaaaaaattattgtttacccctctcagggttgttatatgagctattgggtggttttatacat

SEQ ID NO: 307284 - DNA, 596 bp, Homo sapiens
gtgggtggctgacaacaaaacatttgaaactcattttttagaattccccatgaccaaattgggtgattagggaaaagtaaaactgtggtatggtagcatgtgtttaggttgagaaagggtttgacaaaatgtagctctatttccccacagcctgcatctgacattgacaaaaatgtatgtgttcctatgtgtcttgtgggatgcaaaaggtttctgtgaattacaagtcagcagactgtctaatgattttctatgctgaggtgtaagatgatagcaagcctattgtgaatctaaattaaaaggaagggatgtggcatggttgagaagcgcaagattaacacaatcaactaaagggcagtcagaggagctgtctggmttttggggactaatgctcaagaattatctaggcagtgaatacacagtttatgctagttattttttaagcagccaatccattatacagaggctgttgactaaagaaagtccacatatcaacatatcagtcagaggtcagcagaagacagaagaagcatttaaaaaattattgtttacccctctcagggttgttatatgagctattgggtggttttatacat

SEQ ID NO: 307285 - DNA, 596 bp, Homo sapiens
gtgggtggctgacaacaaaacatttgaaactcattttttagaattccccatgaccaaattgggtgattagggaaaagtaaaactgtggtatggtagcatgtgtttaggttgagaaagggtttgacaaaatgtagctctatttccccacagcctgcatctgacattgacaaaaatgtatgtgttcctatgtgtcttgtgggatgcaaaaggtttctgtgaattacaagtcagcagactgtctaatgattttctatgctgaggtgtaagatgatagcaagcctattgtgaatctaaattaaaaggaagggatgtggcatggttgagaagcgcaagattaacacaatcaactaaagggcagtcagaggagctgtctggcttttggggactaatgctcaagaattatctaggcagtgaatacacagtttatgctagttattttttaagcagccaatccattatacagasgctgttgactaaagaaagtccacatatcaacatatcagtcagaggtcagcagaagacagaagaagcatttaaaaaattattgtttacccctctcagggttgttatatgagctattgggtggttttatacat

SEQ ID NO: 307286 - DNA, 536 bp, Homo sapiens
gttcacatagaagaaacaaaaaatgtcagcaagtattgggatctgcagatttattttaaagactgggtgagtctatattctcaaaagtgttgtacttttgttgtaacaaaatttgttgyaatgtgtggcacctgccttttaaataaatattatgtgtgtttcaatgtactcaatttgtgtgttagtcatacatactgaattgacagtagaatgtcagttaatttaccctgagaaatatattaaccatatttcctttgcttgctcattatctcttagtaaaaaatatgtaggaaaccaatgtcataattgggactattttggtcagattagaattacactaagatgaatctgttgtataattttaatgaccaaagacttcatagataatgaaagatgaatttcaaaaactgtgatatgagtggtatatagatgagagatatcacagcccagggtataggctcccttcctcttgatgacaccggttgttcactttcaagttttacttttcttgctgttgtattaacattttattatct

SEQ ID NO: 307287 - DNA, 587 bp, Homo sapiens
gcttcaagttgggacagaaaaattattttattcatcattcattcattcggcaatgatttaacaaaccccgagggacctgccattgaagtggccacacacatgggtgtttaatagttgacctaaaaaatttttttctagaagattatccattcttttaaactttagaataatgagcaaaaatatacaaaaacatgttgataacacttgtgatactgtgtgttttattacattgaarcattattttccaatatgtccaggtgaagtgcaggtggtattagtgatgcagttacatagcagcaatatcaacaagcaaattggggaaaataacattttcagacattactagattttctttggtgtcatatttaatatgcagtaaaggtaagtaattagtataagaatataaaaccatattaaatggtttttagaaaataaattatgcgctttttaagtggaaatattacacagtcattagattaaaaaatacatttctggtcagggaaaactgtatttcaaattatttacctggttcataggcattggatgtggtgacaatctagtatttaggaagttaattatttcagtca

SEQ ID NO: 307288 - DNA, 582 bp, Homo sapiens
aatccatgaagaaaaatatatctacattttgattctcctcaatggggaacacaaaggaatgctgcaacaaacaaaaactcaaaacgaatcttctttagatacatttcaccatcccaatacatttcatagcagtaggtgaaatctccagcttcctcccctgctctcgtcaatgtaaaccccatggatgtgttgttcaccaattaaaatccttttgtccttgccataccaaattccatcactatcatgagtctaaatccctaccttcacatatcttgctcactaccctactccctggaaaattctgatgaayacaattttttatcttgtatacttctataaggaggtattattggctatttttgtatcctgaaatcaactatgatataactactggttagttaacacagaagtcagcacctgccaaaacacgactgatgaaaatttctaaatggtagggcttactccatatcaaaccagattgccaagagataataatgaagagatttaaaattaaactaaacaaaagggtttttttctttgaaaacttggcctaatcgtaaggaatatttcttgtgtcaatat

SEQ ID NO: 307289 - DNA, 520 bp, Homo sapiens
caccaattaaaatccttttgtccttgccataccaaattccatcactatcatgagtctaaatccctaccttcacatatcttgctcactaccctactccctggaaaattctgatgaacacaattttttatcttgtatacttctataaggaggtattattggctatttttgtatcctgaaatcaactatgatataactactggttagttaacacagaagtcagcacctgccaaaacacgactgatgaaaatttctaaatggtagggcttactccatatcaaaccagattgccaagagataataaygaagagatttaaaattaaactaaacaaaagggtttttttctttgaaaacttggcctaatcgtaaggaatatttcttgtgtcaatatattctccattctttctgcagaatcacaacaagtaatattgatgaaatttgctgccaagcttcagagtttgtttgtttacatgtttacttatttttcctggaaccccccacctcctttaattaattaattttg

SEQ ID NO: 307290 - DNA, 585 bp, Homo sapiens
cagtgtccttttgtatttggtattcacaacattgtatttatcataaagatatttgacaaattcttacagaaacattgtaagcatatagcacatgttaactaacataaggacattcagatagaataattatcagaaggacaatattgaaaactatctaaattatgtacaattttattctttgggaaagcctctcatagcatttagtcaatttatagtcttagcctagttcttaatatttcttacctataacctgaattaaattcgagaaagcacatcaatcatacatatgaatgtatattgatgacaaaatatttttataaaaacctaaatgcatgaaataataatgttatgacagccaaactggctaaggtgaaacaataaattgaaactagtaaaggtaatatagagaaggtaaagtttagcactaacctcaattatataagtacacagggagtctgggtttagcaattatacctgtgaagtagtggggattcagtttggaattttagtgatagtcaaaacaatrtgagtagactatgtattataactggtaaaaatcgtgcatgttatacgactactttgaat

SEQ ID NO: 307291 - DNA, 494 bp, Homo sapiens
ccctccagttgtccacataacctcattcttcctggatgtgggacaagaatttgggatccactgaatggtgggagtgaaaggagctgtaacacttgcctggtgcagctcgttgagctgcaggcagtgacatgctcctggactgtaggagtgaagagtggtgacgtttctgggagcccagaccttggtattccctaagacagagctgctgtaacactacagtcctgctgctctctgctggcactgggcagccaccccacgtgatgggaagcagtggtgggactggaccagcccaggaactgtgggccagagcagggtggtgggactgaaagagctgtaacataaatgggctgaaacatatctccccccatttgccacacaacaggcgatgagaaggagagaagagctggtgcccttctgggagcccagaccttggggctccctgaacsagggctgtgatatattgtgacacttttgggggctctgtggttcctggc

SEQ ID NO: 307292 - DNA, 556 bp, Homo sapiens
gtcatgaaaaaaaattttaaatgtatgctgacagtaaatgtatgctgacatcatgcatggtgagtgactcacaattttgtactacataagaccagaggaaatagagcttagcaagttatttgtcctggagacaactaagtgttcttggaataaccaggcctgagaagaaatagtaacccagggtcactattgattaatttaatttctatcccaaagtttctcagtaagagtctgaacctattgttcatctcactaaatgttattataaccttagcagttcatgttagtatgattcttaatcctaaagtaattgggaaaagtactattaatgatggctggtgttgatcatctgagctgatcccagatagaaagaagctatttcttttggtgggatcaaattccttggggctctgtttggctacaaatgattaaaaagtgagtttattccctgtctcccaaaatgtctcttccactctgtacctyctccccattccctgtaaaaacagagataacacaattgatagaaagtgattcaagtactccacattagaaagtt

SEQ ID NO: 307293 - DNA, 437 bp, Homo sapiens
aaagctttggtaaataggcacagaaatacagttaaaaggaataggacagtgacacagaagggcaattgtggttgataataatttattgcatatttcaaaataactagcagagaagatttgagatgttaccaacacaaataaataataaatgttttagatgatgaatatcccaattacccttattgattgttgcacattgtatgcttgcattaaaatatcacatggacctcataaatctaaacaactattatgyatccttataaattaaaacataaaaaggttattaaaatgagtgtctcacttgcttaagttaacagtgcccctgatctcctgtgcccttctaaacccctgggagggactgtagcaaagtaattgatgaatactaaaaattcaaagcgtgtttaagattaatcaccataccaaaagaaacaaacagg

SEQ ID NO: 307294 - DNA, 549 bp, Homo sapiens
ccaatgtgaactctgtgtgtggctccaaccacatatttcccctttgcactaccctagtagaggttctccatgagggctctgccccttccacattcttctgcctggacatccaggtgttttcatacatcctgtgaaatttgggcagaggctcccaagactcaagtcttgccctctgcacacatatggaagctgccaatgcttggggcttgcaccttctgatggctggacctggagtggctgcgatgcagggtgctatgtcgtgaggctgcccagaggagaagggtcatgggcctggcccacaaaaccatggttttctcttaaacctcagggcctgtgatgggaggggctgccacaagttctctgaaaagcttttgaggcattttccccattgtcttggctactaccattaggctcctctttacttatgtaaatttctgcagctagcttaaagggttcatccccagaaaatgggtttttcttttctatcacatggctaggcggyaaatttttcaacttttatgctctgctttctttttacatataagttcc

SEQ ID NO: 307295 - DNA, 569 bp, Homo sapiens
ttccatatcagcaatatgactgtttcactttcttataatttatgtgtttactagagtaacactttgaatttcctttaagaacttctttagtatttacaggttagctaactatttgacacaagagacctagattttgtcctattttgtctttaaatatgtattcttcactaagcttagttatttctaggtttgaaattaaagtgagatacttgaatgcttgggggtcactgtaaggtaattaactggcccagtctcaatattattatgtctcagtaaatggggaagaagagagaaggaggaacagccagtccctggagcagtsagaacatacacaatatttatcaattaagtttactgtcttatatggatatggtttgcgatgcccccaaaacaattacaatagtaacatcaaagatcagtgatcacagataaccataacacatgtaatcacaatgatcaaagtttgaaatattgtgagaactaccacagtgtgacacaatgacatgaaatgagcacgtgctgttcgaaaaatagcactgatagagttgctcacacggggttgccacaaa

SEQ ID NO: 307296 - DNA, 483 bp, Homo sapiens
tctactatggaatggtactcactgtattatgacacacaaaacagaatcaacaagtctagaataaaaatgtaagaaagttaatgttattcaaacctactattcataaatcatgtcatttctccatatctacaccaatagaaataataataatgatgaatgtggtttgctacagttaaagaccaatggatgtttgtattagttcttttctacactgctataaagatactacttgagactgggttatttatgaagaaaagaggtttaattgactcacagttctgcatggctgggaggcctcagaaacttataatcatgacagaaggtgaagggaaacaaggcacatcgtaacaaggtggcaagagagacagagtgcaagggaaactgccagacacttatcaaccaaccagatctcatgagagctctytcactatcaggagaacagcatggaagaaaccgaccccaagatccagtcactttccacct

SEQ ID NO: 307297 - DNA, 569 bp, Homo sapiens
ttccatatcagcaatatgactgtttcactttcttataatttatgtgtttactagagtaacactttgaatttcctttaagaacttctttagtatttacaggttagctaactatttgacacaagagacctagattttgtcctattttgtctttaaatatgtattcttcactaagcttagttatttctaggtttgaaattaaagtgagatacttgaatgcttgggggtcactgtaaggtaattaactggcccagtctcaatattattatgtctcagtaaatggggaagaagagagaaggaggaacagccagtccctggagcagtgagaacatacacaatatttatcaattaagtttactgtcttatatggatatggtttgcgatgcccccaaaacaattacaatagtaacatcaaagatcagtgatcacagataaccataacacatgtaatmacaatgatcaaagtttgaaatattgtgagaactaccacagtgtgacacaatgacatgaaatgagcacgtgctgttcgaaaaatagcactgatagagttgctcacacggggttgccacaaa

SEQ ID NO: 307298 - DNA, 608 bp, Homo sapiens
atctgctgcattaaaagtggcttatcctattgaaaaggaaatgttaagagggagaaatttttgtattcatgacacatctgcaactgttctgttttgacagaagagttctgcatgactcagagatctcaacccctgttcttgtccatatggaactattgagcctcatattaatattggaaaagacaactctatccagctttctaaggattatagcaatattctctttcacgacctagtttccttgaaaagccttrccttctcaggcttcctataactgtcccaggaactggcatttcttatcttgtttgcaaataatctcacatcatctgaactattacaaagcttttaaagtgataaagagatcaaataattaactagttgcattagaaatgaagaaaaatatggaaaaattcataaatgcatgattctatttctttgacagcatgcttggaaactccattagctgaatttatctcataatttatcaaacaaattcattggctatgccaggattttatacatttcagcgaaataaatacagtgttgcttgtatgtgcttatgatgataaaataatgattaaaagaattttaaggattaaagcctgtgc

SEQ ID NO: 307299 - DNA, 608 bp, Homo sapiens
atctgctgcattaaaagtggcttatcctattgaaaaggaaatgttaagagggagaaatttttgtattcatgacacatctgcaactgttctgttttgacagaagagttctgcatgactcagagatctcaacccctgttcttgtccatatggaactattgagcctcatattaatattggaaaagacaactctatccagctttctaaggattatagcaatattctctttcacgacctagtttccttgaaaagccttaccttctcaggcttcctataactgtcccaggaactggcatttcttatcttgtttgcaaataatctcacatcatctgaactattacaaagcttttaaagtgataaagagatcaaataattaactagttgcattagaaatgaagaaaaatatggaaaaattcataaatgcatgattctatttctttgacagcatgcttggaaactccattagctgaatttatctcataatttatcaaacaaattcattggctatgccaggattttatacatttcagcgaaataaatacartgttgcttgtatgtgcttatgatgataaaataatgattaaaagaattttaaggattaaagcctgtgc

SEQ ID NO: 307300 - DNA, 605 bp, Homo sapiens
ggattacattcatataagaatccagcaacggaacggcagaaagacactgactactgttcagggcattgcagatgattatgacaaaaagaaacttgtgaaagctttcaaaaaggtaaagggattaggaagaaaggattagagttactgatgcacacctctgaactggattatgattcacacctttatatcggcgtggatgaaaatractagaccaagaaagttgttctcatttttgtaattaacatgtaaatatttagttattctcccagtgtggtctctcattttaaaagaagattcgcgttgcttttaaataaatttaaatgtgaaatatttagttcttgatgttacacataaaatcatttcctggtttacaaattaatttggaaggattgtggattataggagacaaaatctgtttctctaaatatgatctagcttactgaaatggctaattctgttcatacggtgaaataaaacctcatagtagttgactaaattttgttgtatatttatgcacttttccagaaatttgcctgtaatggtactgtgattgaacatcctgaatacggagaggttattcagcttcaaggtgaccaaagaaaaaa

SEQ ID NO: 307301 - DNA, 605 bp, Homo sapiens
ggattacattcatataagaatccagcaacggaacggcagaaagacactgactactgttcagggcattgcagatgattatgacaaaaagaaacttgtgaaagctttcaaaaaggtaaagggattaggaagaaaggattagagttactgatgcacacctctgaactggattatgattcacacctttatatcggcgtggatgaaaataactagascaagaaagttgttctcatttttgtaattaacatgtaaatatttagttattctcccagtgtggtctctcattttaaaagaagattcgcgttgcttttaaataaatttaaatgtgaaatatttagttcttgatgttacacataaaatcatttcctggtttacaaattaatttggaaggattgtggattataggagacaaaatctgtttctctaaatatgatctagcttactgaaatggctaattctgttcatacggtgaaataaaacctcatagtagttgactaaattttgttgtatatttatgcacttttccagaaatttgcctgtaatggtactgtgattgaacatcctgaatacggagaggttattcagcttcaaggtgaccaaagaaaaaa

SEQ ID NO: 307302 - DNA, 605 bp, Homo sapiens
ggattacattcatataagaatccagcaacggaacggcagaaagacactgactactgttcagggcattgcagatgattatgacaaaaagaaacttgtgaaagctttcaaaaaggtaaagggattaggaagaaaggattagagttactgatgcacacctctgaactggattatgattcacacctttatatcggcgtggatgaaaataactagaccaagaaagttgttctcatttttgtaattaacatgtaaatatttagttattctcccagtgtggtctctcattttaaaagaagattcgcgttgcttttaaataaatttaaatgtgaaatatttagttcttgatgttacacataaaatcatttcctggtttacaaattaatttggaaggattgtggattataggagacaaaatctgtttctctaaatatgatctagcttactgaaatggytaattctgttcatacggtgaaataaaacctcatagtagttgactaaattttgttgtatatttatgcacttttccagaaatttgcctgtaatggtactgtgattgaacatcctgaatacggagaggttattcagcttcaaggtgaccaaagaaaaaa

SEQ ID NO: 307303 - DNA, 605 bp, Homo sapiens
ggattacattcatataagaatccagcaacggaacggcagaaagacactgactactgttcagggcattgcagatgattatgacaaaaagaaacttgtgaaagctttcaaaaaggtaaagggattaggaagaaaggattagagttactgatgcacacctctgaactggattatgattcacacctttatatcggcgtggatgaaaataactagaccaagaaagttgttctcatttttgtaattaacatgtaaatatttagttattctcccagtgtggtctctcattttaaaagaagattcgcgttgcttttaaataaatttaaatgtgaaatatttagttcttgatgttacacataaaatcatttcctggtttacaaattaatttggaaggattgtggattataggagacaaaatctgtttctctaaatatgatctagcttactgaaatggctaattctgttcatacrgtgaaataaaacctcatagtagttgactaaattttgttgtatatttatgcacttttccagaaatttgcctgtaatggtactgtgattgaacatcctgaatacggagaggttattcagcttcaaggtgaccaaagaaaaaa

SEQ ID NO: 307304 - DNA, 600 bp, Homo sapiens
cagcagtacctaaattagtttacttgaatagctgagaagtgtatatactggaaaatggctagtatctctcttccatcctccagctcttggaggagaataytccttgtagcccaccataactggaaacattctgtaaaggagattctggggattgtagttcagtctagccaagttgcctcccattggcaatccaaccacgaggcagttggcaagagagcttaggtgatgcaacttgtgggccagagcagggagagaagggtggagaatgtgcacaaaggacatagcagtatttatgtctgacagaaaggactttaagatcaaagcattattaggagtgaagaggagcattgctaatgataaaaggagtagttcaccaagaagatataacaatactggacctatacaaatctaacaaaataagctttgatatttaaaggaaacatcacaggagttataaggaaacacccacaaatatactaccatagtagaaggttataacaaaaatctcccagaaagtgatggattcaaatgacaagaattttctgtctatagaaagtacaaacaacccagtaagtttcatatagtgaacatatttagaat

SEQ ID NO: 307305 - DNA, 600 bp, Homo sapiens
cagcagtacctaaattagtttacttgaatagctgagaagtgtatatactggaaaatggctagtatctctcttccatcctccagctcttggaggagaatattccttgtagcccaccataactggaaacattctgtaaaggagattctggggattgtagttcagtctagccaagttgcctcccattggcaatccaaccacgaggcagttggcaagagagcttaggtgatgcaacttgtgggccagagcagggagagaagggtggagaatgtgcacaaaggacatagcagtatttatgtctgacagaaaggactttaagatcaaagcattattaggagtgaagaggagcattgctaatgataaaaggagtagttcaccaagaagatataacaatactggacctatacaaatctaacaaaataagctttgatatttaaaggaaacatcacaggagttataaggaaacacccacaaatatactaccatagtagaaggttataacaaaaatctcccagaaagtgatggattcaaatgacaagaattttctgtctatagaaagtacaaacaacccagtaagtttcrtatagtgaacatatttagaat

SEQ ID NO: 307306 - DNA, 618 bp, Homo sapiens
gtgattcttctttttgaaacttgtgttattcagatgggggttttggtgggctagtcttagaattttgtcttcttactctttttcccatttctttgtgttttttctttcctttctgagggtttgcctcaatgctatctttcaacccttctagcgagttcttaatgtctgctatcatgttttaaatttccaagaactgtttctttgttctgaatatctcatctttcctttwaaaaaaattgtttctgagctagatgtggtggggtgtgcctgtagttccagctacttgggaggctgaagtgggaggcttgggcccaggttttcaaggccagcatgagcaacatagcaagatcctgtcttaaaaaaaaaaaaaaagaaaaagaaaaaaattgtttctatttcattgatgcagtgtcccttatttttcttataatattaatgagtttcttttttttgtttaaaatatttttttccttgcatagtttctgtttctgccaattcattttttcttttagtttgttaggctctttatccatataatctagctaatgggttttggcaggctaatgaatatataaatttggagtcaagggaagaggttggagaataaaaattttatcc

SEQ ID NO: 307307 - DNA, 601 bp, Homo sapiens
gtgtcagcttatttgttagtgttatttatgaaattcatccgcattgttccatgtagttgctgtagactccgttgctatagattgttatcacaatttatccagtctcttgtttatgggcctttgggtaatttccagtttggagatagtagcaaaaaaaatgctaaaatgaacattcttcttcattcatatcttttgctttgtaaattataaagcaagacaacaagacctaaagactgattcattcactacctatttattgagccccttaccagactaaggtgagaaaataaaacagaaaagacagcaaaggtcctgccctcatggaacttattctaactggaacgaaacaacacctacgtgggcagcaaaacaagtcaaacaattgcaattgtgataactctgagggaaacaaggtgagctagaaaaagaagggtggggacttaacytttttttatgtggtagcctggttaactctcagaaaaatatctaggaaaaaatacaagagataagttggcactgctacacgatgagtattaacaatgggtagaccattcctggcaagagagacaccatgtataaaggtcatggaggaggagagagc

SEQ ID NO: 307308 - DNA, 624 bp, Homo sapiens
gcggggagctttgttgcattctctgttcatgcagttcaaacttggttgctctttttgactcttcccactagtagcacctgatttcagaattcacccagcgccctctaagcagcatcgctcataaattacttaggtagatgtagagcttgccagttaaaagaccacacccctaaccctcacccgcaccagcccactcctgaagaaggcctttgaatgactattccacagaccaaagcattttagtcagaggcaacatttccacaaatagtgtttttaaaaaaattacatgctactgaatatmattggcagtgttatctaaaatacatatacacagatatatatacacataatatacatgtaagtatatattaacacatgtgtattaacgtgtatgtatgtgtatttgcagtttacttgtgaatgaagagtctcaaaattcaggcaaatgtatgcatggcagaaattggagatggtgcctaactagaggaggactgccaccctcactgggctccatcttgccgcagcctgagtggaatctctctcacctggattgcctcttgctgcttacttaaatctttattttccaaatcaagttgcccctccttcagtgaggcagccgagtgg

SEQ ID NO: 307309 - DNA, 470 bp, Homo sapiens
ctaatcctttcctcacctggtgctctggtcccttctgataagaccagaactaggtactttactgaagtctgacagagctgagctttggattttgagactctatactccctttcagctaagaaattaaggagagtcttagcatcttcctgagccttccttgattggggcatagaggaaagtgttatctacatactgcaagaccctgacctgaggacgggaaaacttagaggggtcctttgacagtgcttgtccaaatgagtgagggctgttttgaaatccctgaggcagcaccatccatgttaactgtgtggtctggccggagggatccttacaggcaaacaggtaytgagagtcaggatgtaacggtatgcagaaaaaggcatcctttaaatctaggactataaaccatttagttccttcaggtatttgagtcagcaaggactcaaacggatgaattgggactatggccc

SEQ ID NO: 307310 - DNA, 512 bp, Homo sapiens
gctggttcctcacatgggaaaagaaacagcctaagtggacagaggggcatttactggggggaaaataacctcccacccaaccccaggaagtattatcattaggagttaaatagtctttgagatctggatcatggaattcccctgtctgtaaaaagtcagaaaaacagcaatcccttaacctgcattcctggttactacggtggttgctaaacctgcctaattgaattatttcctgggctrtaaaaattcctgcagcattgcatacagagaggagatgggagacatggtgactgcagaaaggaaaggaggaaaataagatttgcaataggaaaacttggagatcctatggctgacacccagtcaggcaatcagaggctggggtcagtccaggagccttttgaataacaccagggtgtggccctggccagaaattctcagttgctccaggacctattccagccccatacaacaaccaggctttctgtgaaaagaaactagtttggacacagcca

SEQ ID NO: 307311 - DNA, 512 bp, Homo sapiens
gctggttcctcacatgggaaaagaaacagcctaagtggacagaggggcatttactggggggaaaataacctcccacccaaccccaggaagtattatcattaggagttaaatagtctttgagatctggatcatggaattcccctgtctgtaaaaagtcagaaaaacagcaatcccttaacctgcattcctggttactacggtggttgctaaacctgcctaattgaattatttcctgggctataaaaattcctgcagcattgcatacagagaggagatgggagacatggtgactgcagaaaggaaaggaggaaaataagatttgcaataggaaaacttggagatcctatggctgacacccagtcaggcaatcakaggctggggtcagtccaggagccttttgaataacaccagggtgtggccctggccagaaattctcagttgctccaggacctattccagccccatacaacaaccaggctttctgtgaaaagaaactagtttggacacagcca

SEQ ID NO: 307312 - DNA, 610 bp, Homo sapiens
tgttatatggattgtcctctcctttttaaaaataggaacacggctgggcatgatggctcatgcctgtaatctcagcactttgggaggctgaggcaggtggatcgcctgaggtcaggagttcaagaccagcctggtcaacatggtgaaacccatctctagtaaaaaatacaaaaaaaaattagccaggcatggtggcrggcacctgtaatcccagctactagggaggctgaggcaggagaattgcttgaacctgggagggagagggagtgagctggactgcactccagcccgggtgacagagcgaaactccatctcaaaaaaagaaaaaaaaaaaaggaacagaaagtaggtccccaaggtatgtaaacttaaagttctatagcttcctctccacacctcacatctttttgcatctctaaccttgccaaggataactaaagtttggctgtattttttcatttctccctgaaatattttcaatagaatcatttctgaaacccattccaaccccccatacagcacaaacaacgaggaaacagaagattcaccaaacatttatgaacagccagctgttataaagacaagggaccaatctgaaaaatcagaataa

SEQ ID NO: 307313 - DNA, 610 bp, Homo sapiens
tgttatatggattgtcctctcctttttaaaaataggaacacggctgggcatgatggctcatgcctgtaatctcagcactttgggaggctgaggcaggtggatcgcctgaggtcaggagttcaagaccagcctggtcaacatggtgaaacccatctctagtaaaaaatacaaaaaaaaattagccaggcatggtggcaggcacctgtaatcccagctactagggaggctgaggcaggagaattgcttgaacctgggagggagagrgagtgagctggactgcactccagcccgggtgacagagcgaaactccatctcaaaaaaagaaaaaaaaaaaaggaacagaaagtaggtccccaaggtatgtaaacttaaagttctatagcttcctctccacacctcacatctttttgcatctctaaccttgccaaggataactaaagtttggctgtattttttcatttctccctgaaatattttcaatagaatcatttctgaaacccattccaaccccccatacagcacaaacaacgaggaaacagaagattcaccaaacatttatgaacagccagctgttataaagacaagggaccaatctgaaaaatcagaataa

SEQ ID NO: 307314 - DNA, 597 bp, Homo sapiens
gcatggtatctgaaagatgttactgtgtttccttcgaatttaaaatactccacatgcctctctgagttggctgyggtgctctaagttcagatggtatcctgaactggtgaatttcacacacggtttgggaaccatgacttagggtgaatggattgggagtgaacaggccacagattctttaaatttcagaatgaggattgctttgtctgggcaccagcagctacactacagccttagatcttccattagctttgtgctatttctagaaaaaccttggaatctttttgcctcagtatctgtactctccttatctatactctgtgttcatagagtggagaaggcactagtttccccattttctgcccctcttcttacttctgcctttgtttccctgagacctcatccttcttttctcccaagggttctgatgggcagataagcttagcctccatcctagtcctccataatgtattttttggctgtggctgtcactgttctttttcatttgaatttgttttctaactttcagatctgtataaatctctcatcaagtgatgagcctaccctcaccttttcctggtgtggacttattccttt

SEQ ID NO: 307315 - DNA, 604 bp, Homo sapiens
ataatttctatatttatttatttatttcagtkgatgttagaaaggtacgaatcatttccatggttgtaatccctgctactttggaggctgatgtggcaggatcatttaagcccaggagtttgaggctgcagtgagccacgattgcaccactgcactctagcctgggtgacagagcaaactcctgtctcagaaataatcatttccatggccactatgtaatctctctaaattttaagatataaatagaataattgaatataattgaataatattaagaatacaaacaactcaaagtaatttaatattatttgtaaagaacagaattgcctatgttaaaaaccctagagtttaataaaacacatatcagcacatagatgacatatgatgttataataaaattatattacatataatttatattatagttatattacttatatacatcattatattattatgttcatatataatataaacatatcattaatatacaattattagattttaatatattatatggttctatcttatatatatcacaattatgctatgcatattatatattatgtacatgtatacatcagtaccatagaggttttattaa

SEQ ID NO: 307316 - DNA, 604 bp, Homo sapiens
ataatttctatatttatttatttatttcagtggatgttagaaaggtacgaatcatttccatggttgtaatccctgctactttggaggctgatgtggcaggatcatttaagcccaggagtttgaggctgcagtgagccacgattgcaccactgcactctagcctgggtgacagagcaaamtcctgtctcagaaataatcatttccatggccactatgtaatctctctaaattttaagatataaatagaataattgaatataattgaataatattaagaatacaaacaactcaaagtaatttaatattatttgtaaagaacagaattgcctatgttaaaaaccctagagtttaataaaacacatatcagcacatagatgacatatgatgttataataaaattatattacatataatttatattatagttatattacttatatacatcattatattattatgttcatatataatataaacatatcattaatatacaattattagattttaatatattatatggttctatcttatatatatcacaattatgctatgcatattatatattatgtacatgtatacatcagtaccatagaggttttattaa

SEQ ID NO: 307317 - DNA, 561 bp, Homo sapiens
gtgtgaagacacgaagcggctttratgagtctgcactgtaaagggagcaggaccatgaggtctgaacccaaggttgtcaaccccaaatgcaaggtccttctccctccctggctccggtccttccattttctttaaccacatggcaaggagaaggtagtagataaaagcaagctatgtacaaccaagggaacacgttcttttccacacagtggtgttcagaggtggaaagaatgttctctagggtttgacacaattggggtgaatgggaattgttcttcttgccagctaaatatctttggacatattccctaatgtatctgtacttcaattgttccctctgtgaaatgcaactaaaaagtgtattaccagacttacaaagattcacggagataatatctgtaaaagactttgcacatagcgcataggcccataggtagctcttaataagtattatatttccttttctagtggttattttgaaaataccttaagattaaaattgaaagaatgtcatctatcaaaatgatacaaacctttgccattggtctaaacactccaaac

SEQ ID NO: 307318 - DNA, 561 bp, Homo sapiens
gtgtgaagacacgaagcggctttgatgagtctgcactgtaaagggagcaggaccatgaggtctgaacccaaggttgtcaaccccaaatgcaaggtccttctccctccctggctccggtccttccattttctttaaccacatggcaaggagaaggtagtagataaaagcaagctatgtacaaccaagggaacacgttcttttccacacagtggtgttcagaggtggaaagaatgttctctagggtttgacacaattggggtgaatgggaattgttcttcttgccagctaaatatctttggacatattccctaatstatctgtacttcaattgttccctctgtgaaatgcaactaaaaagtgtattaccagacttacaaagattcacggagataatatctgtaaaagactttgcacatagcgcataggcccataggtagctcttaataagtattatatttccttttctagtggttattttgaaaataccttaagattaaaattgaaagaatgtcatctatcaaaatgatacaaacctttgccattggtctaaacactccaaac

SEQ ID NO: 307319 - DNA, 561 bp, Homo sapiens
gtgtgaagacacgaagcggctttgatgagtctgcactgtaaagggagcaggaccatgaggtctgaacccaaggttgtcaaccccaaatgcaaggtccttctccctccctggctccggtccttccattttctttaaccacatggcaaggagaaggtagtagataaaagcaagctatgtacaaccaagggaacacgttcttttccacacagtggtgttcagaggtggaaagaatgttctctagggtttgacacaattggggtgaatgggaattgttcttcttgccagctaaatatctttggacatattccctaatgtatctgtacttcaattgttccctctgtgaaatgcaactaaaaagtgtattaccagacttacaaagattmacggagataatatctgtaaaagactttgcacatagcgcataggcccataggtagctcttaataagtattatatttccttttctagtggttattttgaaaataccttaagattaaaattgaaagaatgtcatctatcaaaatgatacaaacctttgccattggtctaaacactccaaac

SEQ ID NO: 307320 - DNA, 561 bp, Homo sapiens
gtgtgaagacacgaagcggctttgatgagtctgcactgtaaagggagcaggaccatgaggtctgaacccaaggttgtcaaccccaaatgcaaggtccttctccctccctggctccggtccttccattttctttaaccacatggcaaggagaaggtagtagataaaagcaagctatgtacaaccaagggaacacgttcttttccacacagtggtgttcagaggtggaaagaatgttctctagggtttgacacaattggggtgaatgggaattgttcttcttgccagctaaatatctttggacatattccctaatgtatctgtacttcaattgttccctctgtgaaatgcaactaaaaagtgtattaccagacttacaaagattcayggagataatatctgtaaaagactttgcacatagcgcataggcccataggtagctcttaataagtattatatttccttttctagtggttattttgaaaataccttaagattaaaattgaaagaatgtcatctatcaaaatgatacaaacctttgccattggtctaaacactccaaac

SEQ ID NO: 307321 - DNA, 621 bp, Homo sapiens
tgaatcccgtgctctaatgatgtaagaacgctgctcaaagctaatctagagaattcccactcacaggacgctgctgggagttgcatgggaatacatgccctactgatagaaaatttcttaaccttttttttaactggggatatctcggagctgtggcttacaattcacattaggaatcctcaaaaatagtggaccgtacaatgcttttgagtagcatttcccaaaaggatttgatcacacaagttattcttagaggactatcttctaggactggaattctacaaacttatttttcggtgaaaggctccctcacaagctcatgtcccccsgccccaaacccccacccccgccaaaagggcatagaatattaagtgatctaagtcgaccagcaattgcctccatttgacaactcttaatgctgtaagtttcccatttcaacagtacttctctacaaatttactggtttttctgctaataatggtgtcacaaacatcgtatccctccaacacaacattccattttagtggcaactttggatacacttgtttgctttctgttctcattgtttttccaatactatgccctcgattctacacatgctcaatcaatgtgtgatcattt

SEQ ID NO: 307322 - DNA, 621 bp, Homo sapiens
tgaatcccgtgctctaatgatgtaagaacgctgctcaaagctaatctagagaattcccactcacaggacgctgctgggagttgcatgggaatacatgccctactgatagaaaatttcttaaccttttttttaactggggatatctcggagctgtggcttacaattcacattaggaatcctcaaaaatagtggaccgtacaatgcttttgagtagcatttcccaaaaggatttgatcacacaagttattcttagaggactatcttctaggactggaattctacaaacttatttttcggtgaaaggctccctcacaagctcatgtccccccgccccaaacccccacccccgccaaaagggcatagaatattaagtgatctaagtcgaccagcaattgcctccatttgacaactcttaatgctgtaagtttyccatttcaacagtacttctctacaaatttactggtttttctgctaataatggtgtcacaaacatcgtatccctccaacacaacattccattttagtggcaactttggatacacttgtttgctttctgttctcattgtttttccaatactatgccctcgattctacacatgctcaatcaatgtgtgatcattt

SEQ ID NO: 307323 - DNA, 625 bp, Homo sapiens
gttaatatatgataatatacccaggcatatccatttcaaagagaattggcatttattagagctatcgaggactcaaacaaaggaatggataagaataatgaagaccagtgagaagagcaatatttaggagatggtttcctaatcaaattgcactgcaggaatcatccttagttttctctttaaaatgtacaaaggataaygggttaatctcttaaaaggtataaatctcagttatgggagaccaaataagagacatttgatgcctgtgcattgacgccaagacacaccatgcacattgtcacccctaaagtcccggtgtccctggggctctgtgtctggggccctttgccccttattgtctctaatcgaggctcagcccttcaagacacacaaccaagagtcatccctctccaggcagtcactgccagcagctcctctgctgtcctctaaatttctgaatttcttatctgtgtcactcaacactttaatgacactttgcagtgggatatttcttatgttcatgttttttcttatcagttaaattggaagtttctgtgacttttgtgtatctaccacagaaactataatagatacacactcaattgattcagctatataaatgctt

SEQ ID NO: 307324 - DNA, 627 bp, Homo sapiens
atgtgcagtcaaagatcagtgcttcacaattactccctgcctggtactgatagtaatatgcaactcaatatcactaatattaaattaaacaaaacaaaacygtaccttagactaaggtatttctgctttctgaaattcccttaatgtctcccatatttgtttttcagattctgaaattttcaaggcctttgtgttctttggcaaaggaatccttctctcctacaacctcctctaatgcatgttatttcatggttatttatgcatctgtcttatttattctagtagattgtaactgttgaagcatgcatggaggactgtgtttctctagctgcttttagcctggctttctgtgccaacatattcctgcatagctctgagagtttcaccaaaattcattcagtgcaaaggtatagggactaccattagctatactttgttaaactggccatattacagagttatcgaacacacagattagtgagagttctaatcgtgggtcccttctgctgtatatctgaggaaatccatttttctttcttccaaaataattatagtgagaatgttctgcatgccaaaaatgttcattcttagatataaagataggttatgaagaagaggcaggattca

SEQ ID NO: 307325 - DNA, 635 bp, Homo sapiens
tttgtggaaaatatataaagaggtgggaatggacattccaaacatctctagtcagtttatatattatgttctttttaaaaggacagaaaaatcttctttggaagagagtggatcattcaaatatggtcaatagccctatgattttattatcaaatttgagtgtctcagaaagtgtgaaaacccatgggctagaagagggagaggtcagaagcttcttgttatctgtaccaatctttcgtccttgtcttcactacatgtcaccactgaaagcagcaagggaccctcattgtctcaaggcaaaaatctatgaaaatcaattgttatatttaatgctcatttaagatgtaaataatgtcattgattttttcttaatattctttattttaaaattgtgtttataaaagttctctctcgtatctatgtgtttctctatytgtaggtttcaaagttttcagtttaatcaagttctcccaaccctgagtccataaagtctgacattactcaaccttacatcttcaatcataattgttatgaggtgtctaaactaccctatattgctttgtaaacactctcaagggtttaatggatagttcaattaaccagattataccttaagcatgtttgaactgaaggga

SEQ ID NO: 307326 - DNA, 530 bp, Homo sapiens
agagctacaattcaagatgggatttgggtggggacacagtcaaaccatatcagagtcaaattagctgccaatatcaagttttcttccttatttttttccctgctayctgcaatggaacacaaatacagaggtgtgaaagatgtctaatacattttgcaaatatccaccattcttgagaaccagcctcctcttgtagtggtgggcagaatgtgaagcatgtctccttgaacaagtcgcttgcaggtggcaactgactttgtttgcaatctggtgacttcactaaagtagatgttctttttcaaatgaagactatctatttgttagaaaaatctgattttccttagaataatactttgggacaaatagaattatcatgagttgattatttgaataactagagcagagcaataaagttgcctttaaaagtttgtgtatagcacacaaattcccccgcagtatgtattctatactgagtggttatgagccactgactgaccagaaacatatcttccttagtgtcttatgacaca

SEQ ID NO: 307327 - DNA, 646 bp, Homo sapiens
attgtaaagcctaagatcagggcttgagatattttacagaccctgcacttgatggatcagctggcaccacccagatggataaactggctcatctgatcttgtggaccccacctaggaactaactcagtgtaagatagcttcacctccctatgatttcatctccgacacaaccatcagcactcctgactcactggctgcctcgcatccaccaagttatccctaaaactcctatccgtgaatgctcagagagactgatttgaggaataaaaaaactccattctcccacacagccagctctgcatgaattactctttctccattacaattccgctgtcttgataaatcggccctgtctaggcagagagcaaggtgaacccattgggtggttacaacacttgagtcttccttcattcttcctcttccctcatacccctttccccaaaccttgaggaaactaaagtggttcacacattcccaaagagtggtcattttacaatttgcttgccatgcaagaaccaygtattttgtatgtatatgtatgtatgtacttttttttagtaatccaaactgattgctagaaaatcaagccattcattttgtgtaacaatctggttggggtttcaacatagccccagagtgcaaaaat

SEQ ID NO: 307328 - DNA, 565 bp, Homo sapiens
agctaaactacttgcttagtagtctcctacaattttatagtgaagatgaatcatttccacttccataatatggaattgaccagaaaccagtcaaaattaaaacaaaattgatcattttcattcataacattaaaattgttatttttggtctattttggttatgtctagtgtccctgaagactaactaaatgaaaagtgcaaaggacaacttggaaaggacaacttactggaggttgttagtattagacaaatactaacaagagggcttggcatcacctgactaatatcagtcattaagggtgatagacaacccagttgagctctttggcctttcaaatcttccaaggggcatatttactcccaatgactagaggtgggtgtaactctttaacctacctgggttatatgaatcrcttctctttacaattgaaatcagcttttacatttataaaagcttgtttcttggaagggcaaagatgatcggattcattcatgtatttactcattctcccaggaaacccttcttgagcagcatcctgttcaactaagaccaccattcctcagg

SEQ ID NO: 307329 - DNA, 595 bp, Homo sapiens
acactttgtcaaagcctaattctctacttgagtctgttatgtcagagagggacataatgtgtgattttctgctttcaccttaactgtaaaggtgaacttcaaattttcaattagaagtaatagtctataaacttccacataaaaatgtacaattttctttcccaatacatagtcttattctttctcattagagagctatattraacaatggggctttgcttgtacatggtaacgaaagtgccatgcctgaaaaaaaaaaaaagccataaaatgggagcccaaaacaaaggcttgagaaatttatataaagatttggggttttggctgggtgcagtggctcacgcttgtaatcccagcactttgggaggcagagacaggcggatcatgaggtcaggagttcaagaccagcctggccaagatggtgaaaacctctctctactaaaaatatgaaaaattagccggacgtggtgggtggcgggtgcctgtaatcccagctgttcaggaggcggaggcagagaattgcttgaacggaggagatggagattgcagttagccgagttcatgccattgcactccagcctgggtgacagagcga

SEQ ID NO: 307330 - DNA, 595 bp, Homo sapiens
acactttgtcaaagcctaattctctacttgagtctgttatgtcagagagggacataatgtgtgattttctgctttcaccttaactgtaaaggtgaacttcaaattttcaattagaagtaatagtctataaacttccacataaaaatgtacaattttctttcccaatacatagtcttattctttctcattagagagctatattaaacaatggggctttgcttgtacatggtaacgaaagtgccatgcctgaaaaaaaaaaaaagccataaaatgggagcccaaaacaaaggcttgagaaatttatataaagatttggggttttggctgggtgcagtggctcacgcttgtaatcccagcactttgggaggcagagacaggcggatcatgaggtcaggagttcaagaccagcctggccaagatggtgaaaacctctctctactaaaaatatgaaaaattagccggacgtggtgggtggcgggtgcctgtaatcccagctgttcaggaggcggaggcagagaattgcttgaacsgaggagatggagattgcagttagccgagttcatgccattgcactccagcctgggtgacagagcga

SEQ ID NO: 307331 - DNA, 481 bp, Homo sapiens
ccctaaagaagagaggttggtttcagagaaaattaaggataacagacatggagtcagtatatttcatctacttcctaactttgctgagggatgagtctgtcacaaccaatttcttccttgacttagtattatatagatacagccatggctgataataagggtgaacccatgtggggcattaagacactgccacccacacccatatgtgttaatttacttcctgccaaaacatgtcttttgaatcatgtaggcttgtgctaacagaaaaaggcagcatattcaatggaatgtagaaaaatattcatgaaatcgtgggtctgtgacttyccacaggaagttttggtttctgctttcaaattaacctgtccaagtgctgctcagaggcttatagattatggagatcaattcaaaaaacctatagcaattgcttgtgtagttaagattcttattttctattagaagattcctaagttgttagtag

SEQ ID NO: 307332 - DNA, 520 bp, Homo sapiens
tgatcattctccttcttttgcagataaggaaactgaagcctgaattggtgtcataatttgctcaagttcacacagtgtctcctcttacttacaacatcagggactctaaaattttagagagcaaaagaagcatctggggctggtttaaaatggttaaatgggagcttcctgggcctgtgttcygagatttctagtggggaagccttgcgtggggtctacatcttgggaaacactgctctgggctatgaagtattgagtagtgtctttttccattcggttttattactgtctattgtgatggaaaattaatagacatacaattgatgcctgtgtatttattttatattttgccaccatgtaaatcatcacattagatacaaacattttcatgccatccttctggagtagtgagataaatgatcatagtctctggcttatttatcaaaatctacaaaatttatgaatgaatcacctgaattattgtaaaattactctctttgatggcatttatgttttcatg

SEQ ID NO: 307333 - DNA, 304 bp, Homo sapiens
aaaaatgtttttaatggcgtgtagaataagaaattctttccagaatgttttcaacttactttgcccagattcattagaggaatcacttctatgacagctatasctttacaaaatgtacttattaagtaagacttgaaagtaaaaattagtccttgatccatggactgcaaagtagatgctatattagcaggcatgaaaacaacatcagtctccatgcacatctccatcagaactcttgggtgaccaggtggattgtcaatgagcagtaatattttgaaagattttttttttctaagccgtagat

SEQ ID NO: 307334 - DNA, 539 bp, Homo sapiens
gggaagaaaagtatgcattccctgtcactgtggaggactattagacagttctttttttaagttcatatttcttcaattgaatttgacctctaagcaggaagactctcataaaactggttttcctcaccgctgcttgaagtagtagctgtcygagttaggatttgttcaagtaatggaatcttgactgtcttttatgttatctttagtacacaggctgaaggctttatctttatcagtgtcatgattctaacaacaaaatagctctcgctaacatatagtgacaggtaaatcatttaaaaacaattgtacaaaaagtttcttccagttgtgattatctttcttaatagtaattcctaaacctgtctattttaatgattcatgaaatcactctgtaatactaataaaccatgtaccgtcaatactttccaattttacagtggttataaacctaaaaaaaatgttctttttcctcttctcaccaggtgaagaaataacaggtcaggtttatgctatccataaaataagtaaaaacagaaaac

SEQ ID NO: 307335 - DNA, 539 bp, Homo sapiens
gggaagaaaagtatgcattccctgtcactgtggaggactattagacagttctttttttaagttcatatttcttcaattgaatttgacctctaagcaggaagactctcataaaactggttttcctcaccgctgcttgaagtagtagctgtctgagttaggatttgttcaagtaatggaatcttgactgtcttttawgttatctttagtacacaggctgaaggctttatctttatcagtgtcatgattctaacaacaaaatagctctcgctaacatatagtgacaggtaaatcatttaaaaacaattgtacaaaaagtttcttccagttgtgattatctttcttaatagtaattcctaaacctgtctattttaatgattcatgaaatcactctgtaatactaataaaccatgtaccgtcaatactttccaattttacagtggttataaacctaaaaaaaatgttctttttcctcttctcaccaggtgaagaaataacaggtcaggtttatgctatccataaaataagtaaaaacagaaaac

SEQ ID NO: 307336 - DNA, 551 bp, Homo sapiens
tgacttaactaatccctgttctgagtttgttgtttatcaattgctttttgagaatctatagatttaaagaccaataattttctcaccttccatgcaaagatattaaagaagagcccaagtgacacaggtgtggataaataattataacagaatacagtaaatgaaataatagaagtatgcaaattctacacagtactatgcataaatgaataattagctttctgctgggaaagtccctgtaagtgataaggaggctaaggagaaggtgtagcagttggcaygattagttgacatgataatgtgcagatgacttcaacaactagagggctcttagcatatataactttgagggaagtggtcagggatggcaggcaatatttaaagagaagtagtcaaggctgtgtcataaaagtcactgcagaaggtggaacttacatgatggaagccagcagttggctttaagcagagcactgatttagtcatatatgcattttattgtagtatggatattgaataaaaggccacagaggtgaaacaaagggcacgagaat

SEQ ID NO: 307337 - DNA, 564 bp, Homo sapiens
ttcaagacatatttgggagacctgacagtggaagttatctttacccaattttcccagggaacggtactaggaaggcataaaacctcaggaaatttagagctgcacagtgtgtcagaaactatggaaccggagacagctttgcaagggtttttccggaatggcaactgactgaggttataaaattattcccacatacttatgctgcaaggagtggaatatccagcaaactgggagacacaggaggacaagaacagatgatgcttcggtaatgacttaaagggaccagttcccaagggccatatgggatgttcaccccrcaagacgattgaaggagggagagaggcatctccccagtgcctcacacagtgaaaggtccctaggagattctagaggggatgtcttgtcttgaatcactttcaagacaaataaggaattgaaccacttgtttttacaaagtctgttactgggagacaccatctctggatccaggccgggaggctgcggtgagggagccagctcaggaggttgtcagggcagccacagtagagccacagctctggggct

SEQ ID NO: 307338 - DNA, 540 bp, Homo sapiens
atttctaaatcatcttttccatattttcctcttcagttttttaagtgggacggcaagcttgttttcagctagttgtaattaaaatattatctatgagcactttcaagccagattgtcatcatcaaagcaaaggaaagatggggcaattttggagaaaactcagtgacacatcaaattatttagatggatgttttaatttcacaatttttcttcaactaaytttaaaatatgtgggtgattattttatatagggattcgcatggtacaaaaatcagtagaactccaaataaggcactgagaggagacagagaggagagcactgaggtgggctcttctgccctgagtggaccctgatctccacagaggccaggcagacagcatcctgccttccaccgtcgcgttccagagaagactgttgataaacagccagtgcctaacttcagggaggggttagttatggacgaaatcaaaggacaccgagggaaatgtaagagaaggtggctggagtaggcttgggaggcagggggcccacctgggaga

SEQ ID NO: 307339 - DNA, 540 bp, Homo sapiens
atttctaaatcatcttttccatattttcctcttcagttttttaagtgggacggcaagcttgttttcagctagttgtaattaaaatattatctatgagcactttcaagccagattgtcatcatcaaagcaaaggaaagatggggcaattttggagaaaactcagtgacacatcaaattatttagatggatgttttaatttcacaatttttcttcaactaattttaaaatatgtgggtgattattttatatagggattcgcatggtacaaaaatcagtagaactccaaataaggcactgagaggagacagagaggagagcactgaggtgggctcttctgccctgagtggaccctgatctccacagaggccaggcagacagcatcctgccttccaccgtcgcgttccagagaagactgttgataaacagccagtgcctaacttcagggaggggttagttatggaygaaatcaaaggacaccgagggaaatgtaagagaaggtggctggagtaggcttgggaggcagggggcccacctgggaga

SEQ ID NO: 307340 - DNA, 482 bp, Homo sapiens
atcttgtgtcaatctgtcagatgtccccagacaggttagaaacataacataatgatttgcartgaagtctgctctgttccctcttatgcaatgggaggtgggatctggaaccaagctgccctctgctgaagacccagattactgctgtactggggagtggagagagtaagagtgaaagtgccacacacctttcctactattgtgacaatagctttttcttgatagggcatttgctggcttgctgtaaacctgtgactgttttccagagatgctttaaagttggttcagataacttctgggctttttttttttttatgtttttgttggggagtgagagcttggagtttccaagtctgccatcttgctgctctaattttttaaaataaataatagtcaaacatatgacataacatatatcaaaataactttatcttatatttaaattatatgtgtacataaacaaatcagaaaaaaataaaaac

SEQ ID NO: 307341 - DNA, 482 bp, Homo sapiens
atcttgtgtcaatctgtcagatgtccccagacaggttagaaacataacataatgatttgcagtgaagtctgctctgttccctcttatgcaatgggaggtgggatctggaaccaagctgccctctgctgaagacccagattactgctgtactggggagtggagagagtaagagtgaaagtgccacacacctttcctactattgtgacaatagctttttcttgatagggcatttgctggcttgctgtaaacctgtgactgttttccagagatgctttaaagttggttcagataacttctgggctttttttttttttatgtttttgttggggagtgagagcttggagtttccaagtctgccatcttgctgctctaattttttaaaataaataatagtyaaacatatgacataacatatatcaaaataactttatcttatatttaaattatatgtgtacataaacaaatcagaaaaaaataaaaac

SEQ ID NO: 307342 - DNA, 439 bp, Homo sapiens
aaaacttatttattctgcctttttctccaaatgctaaaaatggagagaaaataataggccaataattctcaaactttctgttgtgaaggawcaattctctctctcctctaaatatgtcatgggtaacacttttaaaaatagactaaaatggaattattgggaaagtacaataaaaggcataaactatcaaccccattttcaaattatcagatttaataggcatataatttatctgtcatattgcaaatgaagttcctaaatggttcttctcaatttcttttgccaacagcaaccttcagttctcagtttgacacttgatagcaaccacactttcagtagcctggagtgatcattgtctttctgtcctctgaattagagagactcataagaatagagaaaaaattactaaaggaaatattttttgactaaaatggtaaaa

SEQ ID NO: 307343 - DNA, 439 bp, Homo sapiens
aaaacttatttattctgcctttttctccaaatgctaaaaatggagagaaaataataggccaataattctcaaactttctgttgtgaaggaacaattctctctctcctctaaatatgtcatgggtaacacttttaaaaatagactaaaatggaattattgggaaagtacaataaaagrcataaactatcaaccccattttcaaattatcagatttaataggcatataatttatctgtcatattgcaaatgaagttcctaaatggttcttctcaatttcttttgccaacagcaaccttcagttctcagtttgacacttgatagcaaccacactttcagtagcctggagtgatcattgtctttctgtcctctgaattagagagactcataagaatagagaaaaaattactaaaggaaatattttttgactaaaatggtaaaa

SEQ ID NO: 307344 - DNA, 439 bp, Homo sapiens
aaaacttatttattctgcctttttctccaaatgctaaaaatggagagaaaataataggccaataattctcaaactttctgttgtgaaggaacaattctctctctcctctaaatatgtcatgggtaacacttttaaaaatagactaaaatggaattattgggaaagtacaataaaaggcataaactatcaaccccattttcaaattatcagatttaataggcatawaatttatctgtcatattgcaaatgaagttcctaaatggttcttctcaatttcttttgccaacagcaaccttcagttctcagtttgacacttgatagcaaccacactttcagtagcctggagtgatcattgtctttctgtcctctgaattagagagactcataagaatagagaaaaaattactaaaggaaatattttttgactaaaatggtaaaa

SEQ ID NO: 307345 - DNA, 598 bp, Homo sapiens
tacatttaaaaaaactatctaaagcaaaatagtagcaatgtattgtgtatttataccatatatacaartaaaacataaaatgacaatatcacaaaaataccagggaaaaatgtggaatatactgttctactggtttatattacctgtgagatgcatattatttgaatatagaccattattaattagagatgtgcactataaatcctaaggtaaccattaaaagaattaaagcaattcagtgttttcttaatattctttgattatgtttcaataataaaactactctctaaatgtttggaaataaattgatgatcaaatgcctactttttctcagatactttctgcctttgtgttttgcttattttaataaacctctgagctgtctcttcctcatataacgacttccaattcatatgcatataaaatatgggacgcttcatgaatttgtgtgtcatccttgtgcaggggccatgcttatcttctctatatcattccaattttagtatacatgttgctgaagcaaacacatctatttgttaatcctaaaaattcaacaacatatgcacaacactgtaaatttctaaagtatgatggtacc

SEQ ID NO: 307346 - DNA, 444 bp, Homo sapiens
cactataaatcctaaggtaaccattaaaagaattaaagcaattcagtgttttcttaatattctttgattatgtttcaataataaaastactctctaaatgtttggaaataaattgatgatcaaatgcctactttttctcagatactttctgcctttgtgttttgcttattttaataaacctctgagctgtctcttcctcatataacgacttccaattcatatgcatataaaatatgggacgcttcatgaatttgtgtgtcatccttgtgcaggggccatgcttatcttctctatatcattccaattttagtatacatgttgctgaagcaaacacatctatttgttaatcctaaaaattcaacaacatatgcacaacactgtaaatttctaaagtatgatggtacccaaaacactatgactaaaagtgagttgtataccataagg

SEQ ID NO: 307347 - DNA, 444 bp, Homo sapiens
cactataaatcctaaggtaaccattaaaagaattaaagcaattcagtgttttcttaatattctttgattatgtttcaataataaaactactctctaaatgtttggaaataaattgatgatcaaatgcctactttttctcagatactttctgcctttgtgttttgcttattttaataaacctctgagctgtctcttcctcatataacgwcttccaattcatatgcatataaaatatgggacgcttcatgaatttgtgtgtcatccttgtgcaggggccatgcttatcttctctatatcattccaattttagtatacatgttgctgaagcaaacacatctatttgttaatcctaaaaattcaacaacatatgcacaacactgtaaatttctaaagtatgatggtacccaaaacactatgactaaaagtgagttgtataccataagg

SEQ ID NO: 307348 - DNA, 444 bp, Homo sapiens
cactataaatcctaaggtaaccattaaaagaattaaagcaattcagtgttttcttaatattctttgattatgtttcaataataaaactactctctaaatgtttggaaataaattgatgatcaaatgcctactttttctcagatactttctgcctttgtgttttgcttattttaataaacctctgagctgtctcttcctcatataacgacttccaattcatatgcatataaaatatgggacgcttcatgaatttgtgtgtcatccttgtgcaggggccatgcttatcttctctatatcattccaattttagtatacatgttgctgaagcaaacacatctatttgttaatcctaaaaattcaacaacatatgcacaacactstaaatttctaaagtatgatggtacccaaaacactatgactaaaagtgagttgtataccataagg

SEQ ID NO: 307349 - DNA, 472 bp, Homo sapiens
cccacacaaaacactccataactaattactaattattatgaactattcccacttacaggtatgacaggtgtgcagaatttgtcaaagcagagacctatggtttagaactgtcctttgctcattttggctggagtttaacagcaccatctcagctagagggaggaagaacgaaacaggtggaaacaactttcctggttatgttgttctatctatattcctggttcctctagtgctagttcacaccagtacaaccctgccaaagatcactcttcccagaatgcactgcttatcaatgccattcaataggggtcacagctctctctctggctcttctcaaaataggagtagtaggactaggagtggtgcctgatagccggatcctggggctgaagttggggacaccmacgtgtggggtgatcatgggctctgcctataaaactgggtgccagagttttgtgtcatgagagcgact

SEQ ID NO: 307350 - DNA, 578 bp, Homo sapiens
ctacaaaattaactttttatttttcttgctttacctcaggtttttaaatgctaaatcattctaagccatgacctcttaatagttagagctgtggttggtaggttgataaccatgctgattacttaaaggacattactactcagaatcagataaaaagaatattttatacaaaaccatatgtaacacagtaaaagctgtagttaaagaaaagtttgtgttgctaactgcctttatgattaaagaagaaagaaaaataaaactggtaagtaatgaaaagaaatttttgaaagaacagcataatttatcaaaagaaatyagaaagtgggaattattatagaaaacaatctgatgaaatagcaaacaacaaaaataagaaggatgaatcatcacagaacttttctttactgataatatagataaacaacttgcaagtgttactgaagaaagaaaaaggagaaaaaatagacatacagaattgatgagggatgagaaagagaatgtcacataaagaaagaatttttaaaatctggaaacgcttccacataaagggaaaggcagcaactttgaaaatcaagata

SEQ ID NO: 307351 - DNA, 586 bp, Homo sapiens
actttggctggtatgttctgttctgcatctgttgcaacagcctctcggtggccttcaacttcaaggggacacaatgcaccgttacccagctgcccatgaggtacctcaacagcccaaccatcacacagtctgtctttgtcctgaccatcatgcagtctttgtcgcaaccatcatacagcctgtctttgcaggaaagatcttagctatagccacctttctcyaggagcataggtgtgatgttgcattggtgactttcttctccaaagagattcatctgacacacttattcaggacatacaaatattcataaaagagctcacagaaaagaatgcactaccgtcccacacatggtacaagacccttccgccttagcaaaatgtctgggctttatttgatcatttgagggctacttcatccttgaaactgtcaagaaacaacaattgacactgtcagcccccacaatgttagaacagtttggcatcttttaggaatttctgggtttgggtttcatttacattttacctaaaaccatttattctgttactggctaattggcccactttgaacgagacctcctacaacaaaa

SEQ ID NO: 307352 - DNA, 615 bp, Homo sapiens
cctctacctggtgagtcattaaaggattaaattaagtctcctctatcaaagaataaaggatttgccttttttttttttttaaatccttgagttatcactttggttaaatgaatgacttattttacaatgacctgtgatcctattttgtgatatcaagcattttaaacctttgatatttacaaactctccaaaatcaaatgataaattgtgtctttttctgacctaattaatcctttaagatattaggtttyctaaattccaaaaatgacatacttggcttatttggcataaaaatcatgcagaaagcattgtcaaatatgaaatgtttggctttctttgggctgtatttgtataaatatgttattggtatgtgtttcaaaattatgggaaactcgtataattctgatttgacttagtgtatgctatcagtaataattataactattatgttaaattattgtgtgccacagagataacaaatttccttgtcaattgtgtctttgactatggctgccctaaaactttttgtcatccatggacaattgttgtcttgttttggtcctctctagaaggtggttttataatcagctataaaactctggtaggtgttgttga

SEQ ID NO: 307353 - DNA, 475 bp, Homo sapiens
agggaggacttttttagttttttttttttaagcttacatgtatgatgatgaaaatggtccaacagagaaaaaaaaaaaacctaataatataaaacacagatgattcaagcacgtgcctgagtcagaaatagggaataaatgtgagtacaggaatagaggaatcagctttagaggcagaaagatgtaaatttaatggaagacaaaggagggaaaaaagcatacacatacacacacagaaagagtgagtgtgtgagagagatgcaggtatattggtgcrggagctatgaacgttttcacatttacattttctcagagaaatagggagggactaaaggagacctctggaaaagtggaaattaaaaagactagggaaatatggaattactgtcaccaaaaactctctcaagtacactgattgtgaatttaatgtgagacccaccagtatcattgcatgttttccgctagtctcatttaa

SEQ ID NO: 307354 - DNA, 603 bp, Homo sapiens
aatagtcacatgtctcattattgggtcttataaattgttaatacattattgggttttaaagccaaatttattgtggtcacaacttggattggtaagtcttttgttttcccttccagataatgttttattgctttaacatctaactgataatttgtgagagtggtcatcctatcaaatccctaccagcatgggacatctgccatgaccgtttaataggcaaaagacaacacattgttgtaatttgttgttgtttatgttaacagtgttgatcaatagtaaacaacaatgtattaytcatttaagcatttattaagagggtggatgttacattaagtgtttttaccacaataaaaattttttaagtgttaaatattctttatgcacataaaaattatatttcctagcactaaatctgcccaaatgctttggttaagctttcatggaatattgatagtggaggtgacttctgaaagtaggctactaatgtttccctgagaagcatggcgagtggtgtggagggcttcattctcagtagagtaaggagcacacaggaggaggtgtggaatgaggaggacttgagaggccgtgatctgtttaatgtac

SEQ ID NO: 307355 - DNA, 583 bp, Homo sapiens
aacatgtgtagaaatcaagagtctctgcaacaaatttgaaagatctccttatctcctggagtcagggggcaggtgggatgaaagaccaagccaggcatctgatcacagractgcagaggaatacttagccctcacaggcctcacacaccaatatcagtgtcctgctacagaggcatgggcccatagacaatagacccagaagacaggctcaggatgtagaactcccacatctttctgagagccccttaacttccccatgagaaggagccagtcttcctttgcataaaaccttagaaatgtctttacctaaaccattacgccacaagctgatgccagttttcctcagaacacaccctctcctccatcctacaggcccatagttaaagttagattccagtacagccaggacaaagaagtaccagggcttctctggaaaaggatatctatcagaaaatgtctactatcacgtcaaactctaatcgcagggcctggggagaatgtgagagagtagattgcagggtgcatcagaccaaggagacttaggcatgaagtctgagcaggacattgtcaataaaatctctgc

SEQ ID NO: 307356 - DNA, 583 bp, Homo sapiens
aacatgtgtagaaatcaagagtctctgcaacaaatttgaaagatctccttatctcctggagtcagggggcaggtgggatgaaagaccaagccaggcatctgatcacaggactgcagaggaatacttagccctcacaggcctcrcacaccaatatcagtgtcctgctacagaggcatgggcccatagacaatagacccagaagacaggctcaggatgtagaactcccacatctttctgagagccccttaacttccccatgagaaggagccagtcttcctttgcataaaaccttagaaatgtctttacctaaaccattacgccacaagctgatgccagttttcctcagaacacaccctctcctccatcctacaggcccatagttaaagttagattccagtacagccaggacaaagaagtaccagggcttctctggaaaaggatatctatcagaaaatgtctactatcacgtcaaactctaatcgcagggcctggggagaatgtgagagagtagattgcagggtgcatcagaccaaggagacttaggcatgaagtctgagcaggacattgtcaataaaatctctgc

SEQ ID NO: 307357 - DNA, 583 bp, Homo sapiens
aacatgtgtagaaatcaagagtctctgcaacaaatttgaaagatctccttatctcctggagtcagggggcaggtgggatgaaagaccaagccaggcatctgatcacaggactgcagaggaatacttagccctcacaggcctcacacaccaatatcagtgtcctgctacagaggcatgggcccatagacaatagacccagaagacaggctcaggatgtagaactcccacatctttctgagagccccttaacttccccatgagaaggagccagtcttcctttgcataaaaccttagaaatgtctttacctaaaccattacgccacaagctgatgccagttttcctcakaacacaccctctcctccatcctacaggcccatagttaaagttagattccagtacagccaggacaaagaagtaccagggcttctctggaaaaggatatctatcagaaaatgtctactatcacgtcaaactctaatcgcagggcctggggagaatgtgagagagtagattgcagggtgcatcagaccaaggagacttaggcatgaagtctgagcaggacattgtcaataaaatctctgc

SEQ ID NO: 307358 - DNA, 583 bp, Homo sapiens
aacatgtgtagaaatcaagagtctctgcaacaaatttgaaagatctccttatctcctggagtcagggggcaggtgggatgaaagaccaagccaggcatctgatcacaggactgcagaggaatacttagccctcacaggcctcacacaccaatatcagtgtcctgctacagaggcatgggcccatagacaatagacccagaagacaggctcaggatgtagaactcccacatctttctgagagccccttaacttccccatgagaaggagccagtcttcctttgcataaaaccttagaaatgtctttacctaaaccattacgccacaagctgatgccagttttcctcagaacacaccctctcctccatcctacaggcccatagttaaagttagattccagtacagccaggacaaagaagtaccagggcttctctggaaaaggatatctatcagaaaatgtctactatcacgycaaactctaatcgcagggcctggggagaatgtgagagagtagattgcagggtgcatcagaccaaggagacttaggcatgaagtctgagcaggacattgtcaataaaatctctgc

SEQ ID NO: 307359 - DNA, 476 bp, Homo sapiens
aaacttgcaaaagattaagagtgcttaagaattcttagaaacgttcttctttaaagtacaatgcctttgggttttcagtaagattactgattgtgcttcgattaaactaaagtctcattagaaagttccaaaataaggcctaggaagactaatgaaaattcattccatttttaaaagctaagattgacagtaagtgtattgccagaatttgcaagggttttatattaattacaacatcaaggaagctggatttagaattgtccctgggagtctaccacattcaaaatccatcacacagggctgctgctcacagattrcaattgttcttccccgggaggaaggagcggccatcctcggctgagctgtagctgctgtgagacagcagagaaatgtatgctcccaatcagaggatgaggtcagggaagacaggaagaggtccgatgtccaagcaatctgggaattggggtttttcatcg

SEQ ID NO: 307360 - DNA, 557 bp, Homo sapiens
ctcactgttcctcctattagaaaaaaaattattaagatatccaatgatagaattgccctgctttcttttttctttttctttctttcttttcttttttctttttttttttttttttgagacagagtcttgctctgtcgccaggctgtagtgcagtggcgcattctcggctcactgcaacctccgactccctggttcaagtgattctcctccctcagcctcctgagtagctggcattacaggcacgtgccatcacacccagctaatttttgtatttttagtagagacagggtttcaccatgttggccaggctcttctcaatctcctgacctcatgatctgcctgcctcggcctcccaaagtgctgggattacaggcatgaamcgctgtgcccggccagaattgccctgatttctgatggtaccctatgtgaaacaaaactgctttcttgagccttcctttaagttacctaacaagccaaatcctaacacaagtccattctaaaaccctctaacgaagatgcccatttcatggttctccataatgtggtgggtccttcaa

SEQ ID NO: 307361 - DNA, 610 bp, Homo sapiens
ctttctgtttcttctcaggctttctcaatagagctgtgtaacatgatagcatcagaaccaagagcagggtattacaatactagtcagtaagtgctattataatgatgcatgtcacaaatagattgtgactgacttctgaatcagtggccttggttacacggtcttgggtacttatataccatttgttttcctattttactcctatttctagcctctcgttagagactgtgctcactctggcaatgtgatcacagttaaacaattactccatgaaagaattatacatagcagcctttccagattcactgtgaactctgaaattagaaaytgggtttcaccaaagatgctatatgccagagtggctgcaataaactgaaacgattagtgctatttgcaaactaagtggatgtgtctttgttaaaatttgatgtttatttttaatatggttgcctgcccttctctatttgaacagttcattacaccttaaatgtaaaccacatgcacactagagcatttgtgtaattttctggggcaaagaatttgggctgtgatccaatgctaaaatatattactttaatatttatttgcatctgtttggtattgtcatgat

SEQ ID NO: 307362 - DNA, 610 bp, Homo sapiens
ctttctgtttcttctcaggctttctcaatagagctgtgtaacatgatagcatcagaaccaagagcagggtattacaatactagtcagtaagtgctattataatgatgcatgtcacaaatagattgtgactgacttctgaatcagtggccttggttacacggtcttgggtacttatataccatttgttttcctattttactcctatttctagcctctcgttagagactgtgctcactctggcaatgtgatcacagttaaacaattactccatgaaagaattatacatagcagcctttccagattcactgtgaactctgaaattagaaactgggtttcaccaaagatgctatatgccagagtggctgcaataaactgaaacsattagtgctatttgcaaactaagtggatgtgtctttgttaaaatttgatgtttatttttaatatggttgcctgcccttctctatttgaacagttcattacaccttaaatgtaaaccacatgcacactagagcatttgtgtaattttctggggcaaagaatttgggctgtgatccaatgctaaaatatattactttaatatttatttgcatctgtttggtattgtcatgat

SEQ ID NO: 307363 - DNA, 448 bp, Homo sapiens
gaacacacccttcttcacatggcagcagggagaagaagaatgagaccyaagctaagggggaagccccttataaaactatcagatctcatgagaactcactatcagaagaacagtgtgggggaaattgcccccgtgattcaattatatccacccggtcctgcccttgacatgtggggattattacaattcaagatgagattttggatgggaacacagtcaaaccagatcagttaacaaacctgaacactggactcacattgattcttttccttttgcttgctcctaggtatggtttttagtgtacagtcttactttgtgatactaaaaatctaattcccctcttttttttctcccttccattatgaaaccctacttatggattagaactagcagctagaggtcgatccccacaaggcagatttttattttggtggcaggtcagaagtag

SEQ ID NO: 307364 - DNA, 488 bp, Homo sapiens
ttttagttttcccttattaatttcattatccttatatgctatgtaaatgagaacagcttgtttagcaatgacattttgtataagtttggatgtcatagttctttcccttttccatgaaaagggacataaacctttgttctatggtaaatacctatatttacctgtaggcagtatattaagagaagccaggaaacaaaccttatttccctaaaaatggtatttgttttaggcaaggtaattctggtatcacatatagacccaaatctcactgactccacactgtagaggttaacgtgggtgtttacaggatgtatccaacacagatcagcaggctttgctctatattcagttagggcccagactgagactactccatcctcttgtaacatcaccatgtcttccacacatgaygttcaagattgccacatcaggggaaaggagcatggagaactcacaatcacccctattcccttaattctgcagtgaaa

SEQ ID NO: 307365 - DNA, 597 bp, Homo sapiens
ataacatctaatgaagtgtatgttattcttaccaaaaggtatgaaagtcacaaagccttagggaaaattgtcacaaaagggtctccaaagaaaacagactaccaaagcaaaaacaaaaacaaaaaatacaaaaaacaaaactaaacmaaaaaaaccatgttgttaaaggtcaggaatctaaatttcaatgatctaaaggtaaccaaagttaagaaaagacaaaagtcagttatatcacatgctcatgcttaggagatttaaatgaaaacagggagaccagtaatgagacgttccagtgatccagatctcagatgatggtagcttggaacacagtgatcacagtgcaggtggtgagaagtgggtgagcttgagatatatttgaaggctgctgtggtttgaatgtttgtcccctccaaaacccatgttgaaatgtaaattggtattgggaggtggcacctttaagaggtggttaggctgccctcattggatggtttaatgcctttgaaaaagggttttcatgagtgggttctctctcttggcccttccaccttgtaccatgtgatgaaacagcaagaaagcccttaacaaataccagca

SEQ ID NO: 307366 - DNA, 597 bp, Homo sapiens
ataacatctaatgaagtgtatgttattcttaccaaaaggtatgaaagtcacaaagccttagggaaaattgtcacaaaagggtctccaaagaaaacagactaccaaagcaaaaacaaaaacaaaaaatacaaaaaacaaaactaaacaaaaaaaaccatgttgttaaaggtcaggaatctaaatttcaatgatctaaaggtaaccaaarttaagaaaagacaaaagtcagttatatcacatgctcatgcttaggagatttaaatgaaaacagggagaccagtaatgagacgttccagtgatccagatctcagatgatggtagcttggaacacagtgatcacagtgcaggtggtgagaagtgggtgagcttgagatatatttgaaggctgctgtggtttgaatgtttgtcccctccaaaacccatgttgaaatgtaaattggtattgggaggtggcacctttaagaggtggttaggctgccctcattggatggtttaatgcctttgaaaaagggttttcatgagtgggttctctctcttggcccttccaccttgtaccatgtgatgaaacagcaagaaagcccttaacaaataccagca

SEQ ID NO: 307367 - DNA, 609 bp, Homo sapiens
gatgtctctgttcattataactttcccactctcaggtattttgttagagcagcacaaaacaaaggcaggtagaaccaacatgatttgctaatgtctagaacatgggatatgagaaaaagtaaggagtcttttaacttaataaagtttcattccttcaaatggaaagactataagggaaatagatttgcaaagtaacttagaaattcaactggagtatgttaaatttaagagttcagatgcctgttcgacatccaagtagaaacattcactagagaagtggatgcactttacatactatcattttaatcaaagtgaccttgaaagagaacttaatttttcaggtgaataagggctcagaggaagaaaacaaycggtcccaaactatacagccataacgtagcagatattacatacacatacataatgtgctaatatattttatatgcacatttgagatgtattggtccaatggtttcatgcatgtgtgtctcacagatctaaatatgtagcaaagcttcaaaggcaggaacaaggccttattcaattccatatccccaaattagctaatacaaaaccttatcaattgtagatactcaataacaattgatt

SEQ ID NO: 307368 - DNA, 415 bp, Homo sapiens
caatggtttcatgcatgtgtgtctcacagatctaaatatgtagcaaagcttcaaaggcaggaacaaggccttattcaattccatatccccaaattagctaatacaaaaccttatcaattgtagatactcaataacaattgatttaactgaataactacacactgtacaaagaagaatttggaggctagaggaaaatacaagctctctcctgygcccctgtccccgtgtaaaattctctcatcaccaacaaacatgcacataccttagaagcagacagggggactatgtgactctatctctgtgtggagaaactgctctcttacctctctcttccaatcccagggtttatattggctccccactgttacttataagtagctattcattaaattcttctcaaatcatcctacttgga

SEQ ID NO: 307369 - DNA, 415 bp, Homo sapiens
caatggtttcatgcatgtgtgtctcacagatctaaatatgtagcaaagcttcaaaggcaggaacaaggccttattcaattccatatccccaaattagctaatacaaaaccttatcaattgtagatactcaataacaattgatttaactgaataactacacactgtacaaagaagaatttggaggctagaggaaaatacaagctctctcctgtgcccctgtccccrtgtaaaattctctcatcaccaacaaacatgcacataccttagaagcagacagggggactatgtgactctatctctgtgtggagaaactgctctcttacctctctcttccaatcccagggtttatattggctccccactgttacttataagtagctattcattaaattcttctcaaatcatcctacttgga

SEQ ID NO: 307370 - DNA, 614 bp, Homo sapiens
taaccttggtgcaatcttcacttagcactttggggccatctccagtgacagaactgtaaaccaacagccttatttccttgcctccatgaacatgcacatgacaagaaggcagctcagcccaggttcattcaatattctttgcatgttgccctaaacacggctttctcctggcaccaggaagcccagtgacctagtaaaatccaaatgtggtctttataaagaacaagcccccatgtaatatccaatatgttagggaagagatctaagataataaaactgaatgagtacaatgaggtattcatctacttaccatccatggggatgkgtgggctgacagctttgggctgttgcaaaatccattgagttaagtgggagtgccataacaggttaagttccaatcaaacctctctgggaattgtctgtgcaaattcacaagctggattaccaatgaacgtgcattttcaagatacataagtgaattggcatgctgtaactgggtgccatcttatggaaactggtatgcatccaccccacaagagttattttgtcacagacccaagaaatacttcatggtaacttggagagaaaatgtttgccaggacttgaagcagaga

SEQ ID NO: 307371 - DNA, 559 bp, Homo sapiens
aggttcattcaatattctttgcatgttgccctaaacacggctttctcctggcaccaggaagcccagtgacctagtaaaatccaaatgtggtctttataaagaacaagcccccatgtaatatccaatatgttagggaagagatctaagataataaaactgaatgagtacaatgaggtattcatctacttaccatccatggggatgtgtgggctgacagctttgggctgttgcaaaatccattgagttaagtgggagtgccataacaggttaagttccaatcaaacctctctgggaattgtctgtgcaaattcacaagctggattaccaatgaacgtgcattttcaagatacataagtgaattggcatgctgtaactgggtgccatcttatggaaactggtatgcatccaccccacaagagttattttgtcacagacccaagaaatacttcatggtaacttggagagaaaatgyttgccaggacttgaagcagagacacctcttagtcataactctgtctgtagtctatcccaaatgctctcagcatagttaaaacatcat

SEQ ID NO: 307372 - DNA, 528 bp, Homo sapiens
agtggaacatggtggtgtatgtctgtggtcccagctacccaggaggctgaagcaggagaattgcttcagctcacgagttgaaggctgctgtgagctatgattatgccattgccctccagctttagtgacatagygagaccctgtctcaaaaaataaataaatgaaagaaagaaagaaagaaagaaagaaagaaagaaagaaagaaagaaagaaggaaagaaagaaagaaaaagaaaaagttcccaccctctatattctgttcagaaagaaatcctgctggatgagaatggttctaggtaaccttcttgcttaaagtcatttgggacattttcaagagagaacaagacttccaaaatctagagattcttcaatgcagtcagctaaattctgagcagaaggggtacatcattttcctggtttgccttggctttgacatacaaaaagcttttaggtggctcttgcctcaaggcaatatttggatgttcaaatcattcagcataaagagaaatttaggtatgtcaagcaaat

SEQ ID NO: 307373 - DNA, 612 bp, Homo sapiens
gtcaagcaaatatcatggtctcttaatcatctataataataaattttaaaaacataattagaaayacttttcagttaataaattcagccctcggaaggcactccttcaaaacagtaagggaactgatgtgaatgcctactatgatctaggcagtaggagagagaaaggaagagaataataaaaggacagtaaaacacaaacagaaacaactgcattgctgggtgatcggtgcattgtgacaagggagttgcaatgtactttgagaatttagacaaaggagaaagcacttctctttgttgaacattttttctttcccagaacttggtaataaatagcaaactgagtgctattgggatatcgcttctgcttcttctccacaaatggaaggtatataaaattgaagcaaagtaaatgaatactccacaaattgaaaagtgtgaaactgactgtgtgtctgtttcccagtgtatttggacaaataaatgcattaccgccactcttgcatcacaatagttttggatctatgaacaattcatattttcctggaccttgttggtccttgtcccatcagctaaagtatggcccaggctaaagcaaataattatgacaata

SEQ ID NO: 307374 - DNA, 516 bp, Homo sapiens
gcttcacacttttcaatttttgcacttttacaaagcgagaagcccaacagaattttagcactggaagaaagaaatgacccatgttccccagagactgaagttygagccgaactcatgggaaattcataaattcttttatactcagttccctaacatatctgctcagggtaacatgtattggtgccaccactgaaacagacatcatgtttccagattttaaattgtagtgctgtttttcttgaggtgtgttgctttccttgctagatagtaacaggaagaaaataaatcacaactgttattttaaagtaatgttgttcactctattcattgtgaaaatcacaaaatgactaatataaattaaaattgtttacagtctcactcctccttgaagcaggtaccattagcatttggttatagtcacttactggtctttattttctattttatttatttagctatttttttgcacaagactgtggtattagttatacatttgacatctttgatgtatatttt

SEQ ID NO: 307375 - DNA, 516 bp, Homo sapiens
gcttcacacttttcaatttttgcacttttacaaagcgagaagcccaacagaattttagcactggaagaaagaaatgacccatgttccccagagactgaagtttgagccgaactcatgggaaattcataaattcttttatactcagttccctaacatatctgctcagggtaacatgtattggtgccaccactgaaacagacatcatgtttccagattttaaattgtagtgctgtttttcttgaggtgtgttgctttccttgctagatagtaacaggaagaaaataaatcacaactgttattttaaagtaatgttgttcactctattcattgtgaaaatcacaaaatgactaatrtaaattaaaattgtttacagtctcactcctccttgaagcaggtaccattagcatttggttatagtcacttactggtctttattttctattttatttatttagctatttttttgcacaagactgtggtattagttatacatttgacatctttgatgtatatttt

SEQ ID NO: 307376 - DNA, 533 bp, Homo sapiens
cagccaacttctgtttcctggtagcagtacacacaattagaactaatctcatcagcaacttctctagttgttctatatttaaacaacatctcaacacaagaaaggtaagcaaaccagaaagcgccagttttagtaatggatgatttgggcagataagccattttttttcaaggcattcgaggctgtgaggtctaagagagagcccaggacaccagcaaggaagcactgaggttgagtcattaatcctcagataagtcacatacagttccaagagctrttagcccttacagattttataaagcttatgggaagaaaatgaatacaggcgatctccttggagaaaatctgctgtaaaatagccaatttcaaagaaatacattaggggatagttattaacttttctcacaaatttttcatttgacaataggttttattataggtcttccctaaacagtacctaagagcattttaaaaaaattcaattttcaaaaatgtgatttaccacccacttgttgtataaaatgtcttgttct

SEQ ID NO: 307377 - DNA, 589 bp, Homo sapiens
aatgcccttttgtatttgaagagtatccagaaataaagacaattgaacatgaaaaggatatgtggaggagagtttcactgcagagaaacaatgtgagcaaccaactgaagaaagggccacaaagaagagaggccctaccagtctttaaaaagcatagcaaccaaaagacataaacagtcagaattgaagatatgatgacattggaccaataattgtgcttcaattttaaaagatgccatttgcgtattaattttataatatttatcaagcacccactcagggccagctgacatgatgctgagatatgcaaatatagccaccattactctatctatccaacagatcatttttgataaaggaacatgttttaccaggggytacaatccaggaagtttttctcggcgttggaggaagcatgaagactggaagcctattgagggaaaggcacagaacaaataggtttaaaatgcaagacttccatttaaaagataaagtaacttgggcttttcagcttcaagggtgatctaatagaggtctcatggaggtaaccagatattttccatttacttagagtggtacttcttttaaa

SEQ ID NO: 307378 - DNA, 589 bp, Homo sapiens
aatgcccttttgtatttgaagagtatccagaaataaagacaattgaacatgaaaaggatatgtggaggagagtttcactgcagagaaacaatgtgagcaaccaactgaagaaagggccacaaagaagagaggccctaccagtctttaaaaagcatagcaaccaaaagacataaacagtcagaattgaagatatgatgacattggaccaataattgtgcttcaattttaaaagatgccatttgcgtattaattttataatatttatcaagcacccactcagggccagctgacatgatgctgagatatgcaaatatagccaccattactctatctatccaacagatcatttttgataaaggaacatgttttaccaggggctacaatccaggaagtttttctcrgcgttggaggaagcatgaagactggaagcctattgagggaaaggcacagaacaaataggtttaaaatgcaagacttccatttaaaagataaagtaacttgggcttttcagcttcaagggtgatctaatagaggtctcatggaggtaaccagatattttccatttacttagagtggtacttcttttaaa

SEQ ID NO: 307379 - DNA, 367 bp, Homo sapiens
ctgccagtctggatgcaaagagaaaaatatgttccataaaatttcccagaggagaaataaaagtaaatatgctctgtcgtgtggtacaattaaattttaacttttcatgaatgttctccatcartcaatgattcaaattgtaaatagcttactaggatcaaaacaaaatcaaaaataggccacaaattcatacaaataattttctctctgaggtgttgattgaataaaatggaacctcattgagatccaattaagaaaaactcgccaggaagccataaatgacccaatgtatcttgtgggcttacaaaaatagctcaaaaagtggaagaaactctctgctgttatttttgcttttgtgtttgcacag

SEQ ID NO: 307380 - DNA, 567 bp, Homo sapiens
taaatgacccaatgtatcttgtgggcttacaaaaatagctcaaaaagtggaagaaactctctgctgttatttttgcttttgtgtttgcacagagcattgttctaaaaaaatcatcttagaaatcatcagcatattgatgtaaagttttcatcaatcattgttaggggcaaagaagaaagaaatacaaaaataaggaagcagactagtattttatttgctttattgtatctctagactgtctaagtgcttttccatgtatctcatttaattaaggaaatttgaagtttcaatgtattaatatgaactccaaagtaatctaccaggttgtgggtaaagaatcargaaagcgtgctgacaaaaagctgatctcattgctggaacagagacctaactcaagcctggagttaagggaattcagttattgctgaattcatgaaatatttttatcccagcaggatttgtttttttttaatttttattctggaaagaatcaaacccaatttcctaaggtgtaaccttccagtttaattttcaaggaaacaagttaaaaaaaaacaaaaaacagaa

SEQ ID NO: 307381 - DNA, 567 bp, Homo sapiens
taaatgacccaatgtatcttgtgggcttacaaaaatagctcaaaaagtggaagaaactctctgctgttatttttgcttttgtgtttgcacagagcattgttctaaaaaaatcatcttagaaatcatcagcatattgatgtaaagttttcatcaatcattgttaggggcaaagaagaaagaaatacaaaaataaggaagcagactagtattttatttgctttattgtatctctagactgtctaagtgcttttccatgtatctcatttaattaaggaaatttgaagtttcaatgtattaatatgaactccaaagtaatctaccaggttgtgggtaaagaatcaggaaagcgtgctgacaaaaagctgatctcattgctggaacagagacctaactcaagcctggagttaagggaattcagttattgctgaattcatgaaatatttttatcccagcaggatttgtttttttttaatttttattctggaaagaatcaaacccartttcctaaggtgtaaccttccagtttaattttcaaggaaacaagttaaaaaaaaacaaaaaacagaa

SEQ ID NO: 307382 - DNA, 631 bp, Homo sapiens
gaatggtggttgctttttgaaacacatcagtccttcactagactgaaaaattctgcagagcagggataatgcctttctttcagtgtgcgtgtgtgtgtgtctgtgtaattactacctatagacccaaactgactccaaatatgcaaagtaatcttcagatttacacaagaaattctttaggtagcattatgcatcaagaagatggttctccaacctctccccagtatataaatagggccttgcttttcaaactttgrcatgcaaacaaatcctctgaaggtcttgtcaaaatgtagattctttttcagaaggtgtggggtagggccagactttctcattcctaagaagctgcttactactttgagtagcaaaatattgggtatgtgtcaccagtcctcttcaggaagatgtcaggtcagaacatataagaacattctcataaatctttgacttgttaggtggtgaagatgtatttttaagggctgatctcgattagattaacttaatataacttgaggtgcacagagctgttattttcttaatcaattaatgagcgttgaaccaatgaatgttgacacacttcccaagtgatcaatgcatgatgttacaaagtcatgcataagtgaaagat

SEQ ID NO: 307383 - DNA, 595 bp, Homo sapiens
taatgcacataggcagagggcatgctaaccatgtacactggactcagatggctttactacagccttaaaaaagaaacacacctagaatcaaaagatctcagtccaaaaagccttttccacatttcctttgggactccagaggaagtttctttacaaaactcatagtattttctctaaatccagggaaattcggcacatctcatgacagggattgaaggtaagctacctagcaccacatatgttaaacgttttaattccctagcaaaatgagttttgtgttaatgcctccgtaggagctccacttgatagagtttccctgcttcttctaaggcggccaatcaccaggctaccaacaagcaaacatytgatgatgccacagatcaatataattgccatgttttgtgggatgctctactgggaagtacattttggagtaagaatgcctaccaatggaccaggaaaagaaggcagtgagtgtacttttatttataacacattatatcagcaaaactggtattttgttaaccaaaattccctgcactattccttttaatattctttagggtcagacagtctgctttttcattcttgggcc

SEQ ID NO: 307384 - DNA, 617 bp, Homo sapiens
taggcagagggcatgctaaccatgtacactggactcagatggctttactacagccttaaaaaagaaacacacctagaatcaaaagatctcagtccaaaaagccttttccacatttcctttgggactccagaggaagtttctttacaaaactcatagtattttctctaaatccagggaaattcggcacatctcatgacagggattgaaggtaagctacctagcaccacatatgttaaacgttttaattccctagcaaaatgagttttgtgttaatgcctccgtaggagctccacttgatagagtttccctgcttcttctaaggcggccaatcaccaggctaccaacaagcaaacatttgatgatrccacagatcaatataattgccatgttttgtgggatgctctactgggaagtacattttggagtaagaatgcctaccaatggaccaggaaaagaaggcagtgagtgtacttttatttataacacattatatcagcaaaactggtattttgttaaccaaaattccctgcactattccttttaatattctttagggtcagacagtctgctttttcattcttgggcctccactgaataacttcatccaaagtgttgta

SEQ ID NO: 307385 - DNA, 617 bp, Homo sapiens
taggcagagggcatgctaaccatgtacactggactcagatggctttactacagccttaaaaaagaaacacacctagaatcaaaagatctcagtccaaaaagccttttccacatttcctttgggactccagaggaagtttctttacaaaactcatagtattttctctaaatccagggaaattcggcacatctcatgacagggattgaaggtaagctacctagcaccacatatgttaaacgttttaattccctagcaaaatgagttttgtgttaatgcctccgtaggagctccacttgatagagtttccctgcttcttctaaggcggccaatcaccaggctaccaacaagcaaacatttgatgatgccacagatcaatataattgccatgttttgtgggatgctctactgggaagtacattttggagtaagaatgcctaccaatggaccaggaaaagaaggcagtgagtgtacttttatttataacacattatatcagcaaaactggtattttgttaaccaaaattccctgcactattccttttaatattctttagrgtcagacagtctgctttttcattcttgggcctccactgaataacttcatccaaagtgttgta

SEQ ID NO: 307386 - DNA, 605 bp, Homo sapiens
attttggagtaagaatgcctaccaatggaccaggaaaagaaggcagtgagtgtacttttatttataacacattatatcagcaaaactggtattttgttaaccaaaattccctgcactattccttttaatattctttagggtcagacagtctgctttttcatycttgggcctccactgaataacttcatccaaagtgttgtagatggtaaagagtgcattttcgcatgaccagtttgggagtgaataatattactgagtttttactgattcatactagataaaacctttcatttggcccagaaaaaaactatgattttcaaaaatttataaacagcataactcaatcataaagtttccacaatattttcatatatgtattgccccaaaacacatgatttctacctcataagcctaatgcaaaaagaaagtgagaaagaagaagggaagaggaagaaacagaggcagggagggaagaaggaaggatgggagaaaggtaagaagaaagtttaaatagtaagcaaaaatgtgtttaaatctcagctcaagcaaacaaccacatacactgtggtcacttgatacacatttggtgaatgaatgagcaaatg

SEQ ID NO: 307387 - DNA, 605 bp, Homo sapiens
attttggagtaagaatgcctaccaatggaccaggaaaagaaggcagtgagtgtacttttatttataacacattatatcagcaaaactggtattttgttaaccaaaattccctgcactattccttttaatattctttagggtcagacagtctgctttttcattcttgggcctccactgaataacttcatccaaagtgttgtagatggtaaagagtgcattttcgcatgaccagtttgggagtgaataatattactgagtttttactgattcatactagataaaacctttcatttggcccagaaaaaaactatgattttcraaaatttataaacagcataactcaatcataaagtttccacaatattttcatatatgtattgccccaaaacacatgatttctacctcataagcctaatgcaaaaagaaagtgagaaagaagaagggaagaggaagaaacagaggcagggagggaagaaggaaggatgggagaaaggtaagaagaaagtttaaatagtaagcaaaaatgtgtttaaatctcagctcaagcaaacaaccacatacactgtggtcacttgatacacatttggtgaatgaatgagcaaatg

SEQ ID NO: 307388 - DNA, 609 bp, Homo sapiens
ccatggtattgaatatgccacccgggaaatcattacccaaactgcattgagaataaaatccattcctgtgattatggcctatacagtatcaggcctctgcatctctgaccatccccctcctcattcactgcatttgcctcaccttaccttagctccctactctttctccaacacatggaccaagctcgtttcacccaagtgttctgcacctgctgctacctcaayctgaatgatcgtctcatgccgttctcctaactcatatcttcacgccagtcaggtccctgctcaaatgtctcatcacttaatccatgaggctgttgctgactgctcaatctatctagagtgatttcagaataatctcctccttcctctctctctctctctctctctctctcaaccagttatgttaaggtaatacacaatgtccaattctcagttctcagaaaaactaagagttgcctagcatgatatctggaattctggttgctgcagattggctgtggctgtgactcacaggcttcttcaaatgacagaggggtagagcaagagtctaagctgaaccatgtgatcactatagagtttctgcccaaaactaagaaaattgtattg

SEQ ID NO: 307389 - DNA, 609 bp, Homo sapiens
ccatggtattgaatatgccacccgggaaatcattacccaaactgcattgagaataaaatccattcctgtgattatggcctatacagtatcaggcctctgcatctctgaccatccccctcctcattcactgcatttgcctcaccttaccttagctccctactctttctccaacacatggaccaagctcgtttcacccaagtgttctgcacctgctgctacctcaacctgaatgatcgtctcatgccrttctcctaactcatatcttcacgccagtcaggtccctgctcaaatgtctcatcacttaatccatgaggctgttgctgactgctcaatctatctagagtgatttcagaataatctcctccttcctctctctctctctctctctctctctcaaccagttatgttaaggtaatacacaatgtccaattctcagttctcagaaaaactaagagttgcctagcatgatatctggaattctggttgctgcagattggctgtggctgtgactcacaggcttcttcaaatgacagaggggtagagcaagagtctaagctgaaccatgtgatcactatagagtttctgcccaaaactaagaaaattgtattg

SEQ ID NO: 307390 - DNA, 609 bp, Homo sapiens
ccatggtattgaatatgccacccgggaaatcattacccaaactgcattgagaataaaatccattcctgtgattatggcctatacagtatcaggcctctgcatctctgaccatccccctcctcattcactgcatttgcctcaccttaccttagctccctactctttctccaacacatggaccaagctcgtttcacccaagtgttctgcacctgctgctacctcaacctgaatgatcgtctcatgccgttctcctaactcatatcttcacgccagtcaggtccctgctcaaatgtctcatcacttaatccatgaggctgttgctgactgctcaatctatctagartgatttcagaataatctcctccttcctctctctctctctctctctctctctcaaccagttatgttaaggtaatacacaatgtccaattctcagttctcagaaaaactaagagttgcctagcatgatatctggaattctggttgctgcagattggctgtggctgtgactcacaggcttcttcaaatgacagaggggtagagcaagagtctaagctgaaccatgtgatcactatagagtttctgcccaaaactaagaaaattgtattg

SEQ ID NO: 307391 - DNA, 570 bp, Homo sapiens
tcctttcttatttaaaaccgggatgtatgtcatcttccttttgtgttttcttaccataactcatgagaacaggcctgtgggaaaacactgcatttggttttcgagtagcatcccggttcaggagagtgagtgaaacagttgtggagcaggacaagggagaacagcttggttgtggtcatgccattatcaccagcaatccctgccttttagtgactgcaaggtgcccattgtctattggcacaatgaaattcaacagatgattaacaaagaatytacgataaggggccatttcaaaaaccagaatacattctacaaagagacacatatatgttgtaatagaaaataagtgtggtgacactttctatcaggactcaagggctacagggtatagcatgtccaagaaaaagggaaaccactgatatgtttaacagcattatctaaagcagggctccatatatttttcatgagacaacataacttttaattcctaagtgtgctttttttcctctcatacaagtataataagaggtttagtgagtttgcaaaaaaaaaaaaaaaaaaaaaaaaaat

SEQ ID NO: 307392 - DNA, 570 bp, Homo sapiens
tcctttcttatttaaaaccgggatgtatgtcatcttccttttgtgttttcttaccataactcatgagaacaggcctgtgggaaaacactgcatttggttttcgagtagcatcccggttcaggagagtgagtgaaacagttgtggagcaggacaagggagaacagcttggttgtggtcatgccattatcaccagcaatccctgccttttagtgactgcaaggtgcccattgtctattggcacaatgaaattcaacagatgattaacaaagaatctacgataaggggccatttcaaaaaccagaatacattytacaaagagacacatatatgttgtaatagaaaataagtgtggtgacactttctatcaggactcaagggctacagggtatagcatgtccaagaaaaagggaaaccactgatatgtttaacagcattatctaaagcagggctccatatatttttcatgagacaacataacttttaattcctaagtgtgctttttttcctctcatacaagtataataagaggtttagtgagtttgcaaaaaaaaaaaaaaaaaaaaaaaaaat

SEQ ID NO: 307393 - DNA, 516 bp, Homo sapiens
atacaaatatttgttgtatgtgtgtctgtgtgtatgtatggtgaatatctttttttttttacacaagtggaaaaatcgtctatatactatttgacaytttgttttgtttttttcctttaccaagtaccttggaagttgttttcaaaaaagctctatctcattttttacataattctatagtattccattgtgtgaatattgcaaaagttatctaatcagttcccttttggtggccttatttactttacttttgctattacaagctacatttctggtatttttatttgggatgtttcttttgtttatattttttacctcttactatttagcttatgttgtttttaatttcatttttatgtttttattgtttaaaaatattttataacttgttttttatcatctttaaatattcctttttatctctaatataagaggaaattaatatttatgattcttcctatctttcttgtgctgtttatattatttcaatttctctaggagttattttgtacttaa

SEQ ID NO: 307394 - DNA, 516 bp, Homo sapiens
atacaaatatttgttgtatgtgtgtctgtgtgtatgtatggtgaatatctttttttttttacacaagtggaaaaatcgtctatatactatttgacactttgttttgtttttttcctttaccaagtaccttggaagttgttttcaaaaaagctctatctcattttttacataattctatagtattccattgtgtgaatattgcaaaagttatctaatcagttcccttttggtggccttatttactttacttttgctattacaagctacatttctggtatttttatttgggatgtttcttttgtttatattttttacctcttactatttagcttatgttgtttttaatttcatttttatgtttttattgtttaaaaatattttataacttgttttttatcatctttaaatattcctttytatctctaatataagaggaaattaatatttatgattcttcctatctttcttgtgctgtttatattatttcaatttctctaggagttattttgtacttaa

SEQ ID NO: 307395 - DNA, 516 bp, Homo sapiens
atacaaatatttgttgtatgtgtgtctgtgtgtatgtatggtgaatatctttttttttttacacaagtggaaaaatcgtctatatactatttgacactttgttttgtttttttcctttaccaagtaccttggaagttgttttcaaaaaagctctatctcattttttacataattctatagtattccattgtgtgaatattgcaaaagttatctaatcagttcccttttggtggccttatttactttacttttgctattacaagctacatttctggtatttttatttgggatgtttcttttgtttatattttttacctcttactatttagcttatgttgtttttaatttcatttttatgtttttattgtttaaaaatattttataacttgttttttatcatctttaaatattcctttttatctctaatataagaggaaattaatatttatgattcttcmtatctttcttgtgctgtttatattatttcaatttctctaggagttattttgtacttaa

SEQ ID NO: 307396 - DNA, 642 bp, Homo sapiens
tgatgattttttactctcatagttgacttggtgttcttgacatcatgcccacgagagtctggtaacttaaacagggamagtctgcatttttcagtcagtgttatccctctttggaatatgatatggtcttttaatctatacattttggtcctgttttatttaaggaatatttttttttatctttttgggaaaaaaagttttatttccagattttgtagtgtctttaaacaccaattatgtatatgttggatctttgtttgtcttccaaatgtgccattttctgtctgatgctattttaataatctccatgtttttcatttcttcttgcttgactttcatcattgattattcttgacattcttactcattttaggagcattccttgaaagtttgaagaaatttgcctcaagctttatttgacttcagcagtcactgcattttggtgtctatctttgagcactaggtaaatctacaaaggaggaaaaaaaaaacacctgaaatgtttggctccattatttcctccatccagtttattcttttacaaatgcctctgctttctctgtagaagtagcaagtaattctatgtgctaaatttcagtgaaagtgttaaatatctatttcatgcaaactggctaagtaatg

SEQ ID NO: 307397 - DNA, 603 bp, Homo sapiens
tggcttgtaggaaggctgaggctaagctgatgattttttactctcatagttgacttggtgttcttgacatcatgcccacgagagtctggtaacttaaacagggaaagtctgcatttttcagtcagtgttatccctctttggaatatgatatggtcttttaatctatacattttggtcctgttttatttaaggaatatttttttttatctttttgggaaaaaaagttttatttccagattttgtagtgtctttaaacaccaattatgtatatgttggatctttgtttgtcttccaaatgtgccattttctgtctgatgctattttaataatctccatgtttttcatttcttcttgcttgactttcatcattgattattcttgacattcttactcattttaggagcattccttgaaagtttgaagaaatttgcctcaagctttatttgacttyagcagtcactgcattttggtgtctatctttgagcactaggtaaatctacaaaggaggaaaaaaaaaacacctgaaatgtttggctccattatttcctccatccagtttattcttttacaaatgcctctgctttctctgtagaagtagcaagt

SEQ ID NO: 307398 - DNA, 588 bp, Homo sapiens
cctcttctctgagatctctagtattgcaaagatgtgggcttccttttttttctttcctccccaaagactcttatgatgggcacttttaattaggacacttctgttgcacaaacgggatctacatctgacagcttccttctcaacacatgttttccctctcattcatccatcttacttgtcagcctcctttttcctctgtgactrtgtttgaaatgctgtcccacacatccttccattatagaaaggaaatctgacacctggggaggcagtatttccttttactctctaacggcagagggcatgctggctatttctcaaaatagcacagtcagcagtattgaggaacattagtgctttgtagaggaaaccaatgaatattttttttctgatgagatgcaaattgtacattctatatctcccatcagtgagaacatcattttgccttgtatagttatgcaagcaccttcacatcaattaaggggctgtgatgacactgctttgacatcccattagcccttgcctttagttatgtgtctattagaagcagaaataaaaagtgatattgccagtcagaggtggaacttgaaa

SEQ ID NO: 307399 - DNA, 521 bp, Homo sapiens
acattctatatctcccatcagtgagaacatcattttgccttgtatagttatgcaagcaccttcacatcaattaaggggctgtgatgacactgctttgacatcccattagcccttgcctttagttatgtgtctattagaagcagaaataaaaagtgatattgccagtcagaggtggaacttgaaatatcctggtgttccaaggcagataaaacatcatgaatctaaggtgttttgcttgctccctgrttgtttgtctttgcagctaatattgggctaaattttgagttctgtgagggcagggacaatatcttagctcttactgagacaccgcggtgcctagggcaacatcttgcttataacagaatcagaaattatagactgttcaattgtgtcttcatgtgtaccttgaatatttaatgagtggtcatgacatgcgggccctgtgctaggtgctcttctaactgagaaggactttggggtttaattaacataattcttcatcgtggagtccttcgttcatc

SEQ ID NO: 307400 - DNA, 601 bp, Homo sapiens
atgacatggtttctgggttcaagaggattctagtctagtggaagaccctgagctccagaaacgtcaagtgccatgcctaaagctacacacaccattactacagaggtaccagacttggatctctttactcaaatacttgatactcatttgaatcttagcattctagaaatgtagggctacagggtcatgccactcatttggaattcaaattcttcagcaacagctgtcaaattgaatgtccgtggtatattggacaagggctagagtggctcaaaaatgcctgcttataaacatttatcagatgaattgctctgaattttctacttaccaaagataattgaatttattttagtgtggcttaaatatagtagacatcttcaataatgacagaaacagatggtttatatggtgtaatttcagagctatggaaaggtcctctgagtcttttaaaaaaacarctcctttcccagtatcccagtgtgcctaaaatttgaccactactatgttgttttgattgtctctttgaggaggctgagctgaagataaattttaatgtagggggagtaggtagagaaagtgtaggacacttagaacatagtag

SEQ ID NO: 307401 - DNA, 633 bp, Homo sapiens
tccccaggcggcaaaaaactgcactaatcggaagggcccgctgacattacagagcaayagtcttgagaaacccttggaggacagaagcacagccactctggaggatgcctgaccgttggtgtggaacctgcagaggagttagagtgacagctctggatgcccatggcaagagtcctacaaagtagacaactgctaccatcactaattgccctcaggggctgtagatcagaggcagccccgcggttggagcaaggactggcgagagcccgtgcataggcccacacccagagcttaggccccagggttaacagtagatggtcggtagttcagagccctgaactcatcctgtgtcacccaaaatcagtccaacaacacaggttatcatgaaaacaaaaaaaatgccatactggtcagtgggtacagtgtacccatcaggcctctcaaaccctgagtcctacagatctttgaggtatatggccaacctgaaacatgcagtagagggtcagagaacataccaggctgaaatgaggaccagggcacatgcaggtccagatccagggctggatgtgcaccacccaggtggcaatggtagccccagccaatctcaggaaccatagagaaacctcaacagtt

SEQ ID NO: 307402 - DNA, 599 bp, Homo sapiens
taaactaatttgaactgaggagttaggctggttaataatgatttcgaatagtatcatctccctgttgtggtttgcattttaaccagcatttttcaatgctttaatgcagcattttctcaatttggtttcaatgaagatcaaccaaaaatataggaaaaagtattatagagatatcctagtatattaatagagctataatgtttctgamttttgtgctgtttacagcagtaacttttatattttgtagcctgctgtaatttcttttcttactctaaacaaatattaactttaattcccaattttgaatatacttttttaaagaagaccctcaaaattgtatacatttctaggttcacaatgcctggatccaaccctgttactagggccacatcttacgcagcttcaaaatagctgagttgtcaattgaaatttgttgttagctataaaaaaaggaagacatgtagatttatgagttcctctgagtagcaagtacagcatttactccccaaaaggagtcattcacatataaaatcaaatcaatacatatattcttatcaaatgagactttcagcagatgtaaacatgcacaccaataatcc

SEQ ID NO: 307403 - DNA, 599 bp, Homo sapiens
taaactaatttgaactgaggagttaggctggttaataatgatttcgaatagtatcatctccctgttgtggtttgcattttaaccagcatttttcaatgctttaatgcagcattttctcaatttggtttcaatgaagatcaaccaaaaatataggaaaaagtattatagagatatcctagtatattaatagagctataatgtttctgacttttgtgctgtttacagcagtaacttttatattttgtagcctgctgtaatttcttttcttactctaaacaaatattaactttaattcccaattttgaatatacttttttaaagaagaccctcaaaattgtayacatttctaggttcacaatgcctggatccaaccctgttactagggccacatcttacgcagcttcaaaatagctgagttgtcaattgaaatttgttgttagctataaaaaaaggaagacatgtagatttatgagttcctctgagtagcaagtacagcatttactccccaaaaggagtcattcacatataaaatcaaatcaatacatatattcttatcaaatgagactttcagcagatgtaaacatgcacaccaataatcc

SEQ ID NO: 307404 - DNA, 603 bp, Homo sapiens
ggtgtcaaaaacagttgaatactggactcttcggtcttccctcttaggtctgggccaaggaacatcagacatggtttgaaaatcaagacttgtgacttatgcatccttgaagactcactgttgagactgaacaaagaattttcaaccctggtgttctatgtctcctttggggagctcctctaaaaagatacattgttactgctccagtttgcatcaccatttggtttaattattatttgtaattgggaaataattagataaaacgatgatgtaaaccccagtggaaaatagacatctcttaagaactctaatgttttccgtcwcttaaaaggaaggggatatgacttactagaggaaaaaactaattagaaaagcagacacatcttctccctctcctcatatttcaggcatgctggcaagtgctcaaaaatgatcacagagtggcctatttctcaaggaccccaggagagcatgataaatttaaatcatcatctcaggaaaagtgccttgagcacttatctttgccattttataatctccagtcagaagagagagcttggctctccaaactggcaaagccatacaaaattttggctgaaggaa

SEQ ID NO: 307405 - DNA, 549 bp, Homo sapiens
ataatgctacaaagtaaacttatctagccacaaatattaatcctgaattaaagagttctgagaattcgactacaatctgatcctgaatagatgccctctcttcttcactttcccctcatcctgcagacacaccagaccaatctggttcaacttttatataacagtgtttttcttttgccatgggccytcaggtcatgtaagccgaagatgtccagatgaaccaagcatgcaaccactgggggaacctaagtgctgggaccaaggagtggggactgacttaagtggacaccataaggtaagatctattgtccaatcagatggagctctggcatcacccccgtggcaggatccaatcagatcctgcctccctgcatcacttcatcagttcattgcaagatctagtcagaccatacctcattaccctatgcttataaaacctgacccagcccctagcttgggtagacactactttgggagctgtccctggtattctcttacttgttacaagtaataaaatctccttgctaaatcctccttggttgtgatcat

SEQ ID NO: 307406 - DNA, 530 bp, Homo sapiens
gactttaaaatccatgatccaattctctttccactagtagtgtgctgaaaaactggctctccaaaaaaaaaaaaaaaaaagagccctttttggttacatttttcaatttccattgtgtaactatcccgaccatgaccaatttcaagcttccaacaagagggaggtcactaaaaatagagttgaaaagagatgcacaaaactgactcttgcaagctggaataaccagctctatgacaccattacaccaactcctaattttttcatcttcgaaatgtacttatcttatacctttcttctaaggttttctttcactgggcatcccaaggtgaatattgcttgagatgaacttgcctgcattcctatraaatttactgagtttctgtacttcctcccacaaaacatccataaatctggaaacaagaagggcacattcactctcttttcatatctttactagtctcaagaagaatgggaaatcaaagagtgagttaatttaaatgcatctcctccttctaaagtaaaaactgaaa

SEQ ID NO: 307407 - DNA, 562 bp, Homo sapiens
tatatgccgggtgtctcctttcatcctatcccattgactacaatattcatcttttgccccttgctgayggagaatgtttgtgggtttttttttccaatggaatgggaagcctgaaagcgtaatgattgcagaataatttttcctgtgtttgtttttcacttgtctcgataaatttttagtttgacaggtagaaagggctttctgtttttctatgtgctaaagagggtctcatcactcaacaaatcccacgagcttttacattctcagcactgtgtccttctgaccttaaactttctcattgcctggaaataaagcttttcatgagaactcacaaagccctaccagctgagtttgacaatgagacaggcaatacacagggcagattatcattggaggaaactgcaacttcctcatcaaaatcatttgtttaacagaaaacccaggagtctactgtaagttaacagacttgctcccttacctccagcagcttataatttcttgggaacatagaacacagtggcacttagagaatgaaatgactttatttctctttgcattagat

SEQ ID NO: 307408 - DNA, 562 bp, Homo sapiens
tatatgccgggtgtctcctttcatcctatcccattgactacaatattcatcttttgccccttgctgatggagaatgtttgtgggtttttttttccaatggaatgggaagcctgaaagcgtaatgmttgcagaataatttttcctgtgtttgtttttcacttgtctcgataaatttttagtttgacaggtagaaagggctttctgtttttctatgtgctaaagagggtctcatcactcaacaaatcccacgagcttttacattctcagcactgtgtccttctgaccttaaactttctcattgcctggaaataaagcttttcatgagaactcacaaagccctaccagctgagtttgacaatgagacaggcaatacacagggcagattatcattggaggaaactgcaacttcctcatcaaaatcatttgtttaacagaaaacccaggagtctactgtaagttaacagacttgctcccttacctccagcagcttataatttcttgggaacatagaacacagtggcacttagagaatgaaatgactttatttctctttgcattagat

SEQ ID NO: 307409 - DNA, 467 bp, Homo sapiens
gattctcctgtctcagcctcctgagtagctgggattacaggtgtgcacgaccacacatggctaatttttgtgtttttagtagagatgggattttgctatgttggccaggctggtctcaacctcctgacctcaggtgatcctcctgcctcggcctcccaaagttctgggattacaggcgtgatctactgtgcccagccttagactacctttatttacctccgaatacattctgaggtactrgtggttaggggtaaacatgtacattttggggagatgcgattccttctgtaacagattttaagaggaaatctgtttttggggaatcaagtctgataatagaagtcagaatacagttaacctatttctggcatttgctgaaatagttacatttctcctaagtcttcaagaaaaagatgtcgttttctttcataattagtaccaactgtgatgacttacatgcctcctca

SEQ ID NO: 307410 - DNA, 607 bp, Homo sapiens
gagcagggccttggtattccaccagagaactttcactgggttatttaggaagttgctggggcctttggcttctaccacactagatgaagcagaaggataactggctttggactcaggtgctggctggaccactactaattgtgtgacctccctgagcctcagttttcatacttgaaaatagggataactcataaatggcttgggtcatagaagaagcttagtaaatayttggagactgaatgaccatttccttccttacctcagttcatcctccctccatcctgctttcttcgagttctttgtctctgtctttatcagaagcacttcttagagatgatttctttagattttaatatatcttcacatggatttagcatactgccgtccatcttagggctatctttaatctgtgtccttcactatgaagagaaaattatatgtcctcttaaagggttttgaagcattattatttaggaaataggtggaaaggcattggtaataccgcccaaagtatggaacaagagaatgattacaggggtaactgctttgatagcctcaaaactgttgagcttccatatcatacctattagtcttcatgtccctattg

SEQ ID NO: 307411 - DNA, 607 bp, Homo sapiens
gagcagggccttggtattccaccagagaactttcactgggttatttaggaagttgctggggcctttggcttctaccacactagatgaagcagaaggataactggctttggactcaggtgctggctggaccactactaattgtgtgacctccctgagcctcagttttcatacttgaaaatagggataactcataaatggcttgggtcatagaagaagcttagtaaatacttggagactgaatgaccatttccttccttacctcagttcatcctccctccatcctgctttcttcgagttctttgtctctgtctttatcagaagcacttcttagagrtgatttctttagattttaatatatcttcacatggatttagcatactgccgtccatcttagggctatctttaatctgtgtccttcactatgaagagaaaattatatgtcctcttaaagggttttgaagcattattatttaggaaataggtggaaaggcattggtaataccgcccaaagtatggaacaagagaatgattacaggggtaactgctttgatagcctcaaaactgttgagcttccatatcatacctattagtcttcatgtccctattg

SEQ ID NO: 307412 - DNA, 507 bp, Homo sapiens
aatatgctgcaatacttctccagttattggrcactttatgttaataactcatgatggcttgagtgtttaggtgtatatttcaaactcagtataaaataccatgccattaagaatttaaacccattttaatttaattatggtcaagagctggttcaagcaatctcgtgtttttgttggctagttttaatattgcaaatttcaaatataaagatttattttcttttactctttgctctttttagtctggattgttaaaaaccttaatcatttaaaagaacacagatttggaaaatgaagtgcaattgaagttatggaaaattgtatttttcttcaatactattttgttttccattttgaaatgtgccaaatttttcctgcccataatagattgattactcacatgttctttttaccttctttttgtccttaaatgacttttccattctttgagcagctacactgttgtcacataatttttctgccatggcctaaagtgaaaaaaaaccc

SEQ ID NO: 307413 - DNA, 517 bp, Homo sapiens
acaagtatgtcagtctggttttcttatataaactacaaaatgagaaagataattggttggttgggatatgaagacaaaaaaattataaggatttagatacaggtttagggagagagcagaattaccttcttaattagcttatgaattagcttcataattatataatatgtgtccattgtatatatatgtrtgggtgtgtatatatatatgtatataaataaaatgtatagaggtcattttaccttccagtttttttagttagccaattataaatatttttccatgtggtttcaaaagccttcatgctttatatgtctaatagatgagagctatcccattgtgttgctataggataattctcttaaaccttatgccctgttgaatttttggtgtgagatttttgagtaaagggtaatagacagtgtgaccactcttgctttaattgccttattgtgaccaaaaagctggcccaaatttacatgacaatcagcatagggaagtgaaccaattttcaatt

SEQ ID NO: 307414 - DNA, 516 bp, Homo sapiens
ggtggtttctacaccaaatcatatcttgaggaagatggattttctgaactttgttgtgttatttattttaggaggtttgatcatccctagagatgatgtgaaaaatatgagacatgtgcagagcttaattccgggttgcattatttacattgtagtaactgtgaatagaatcctcttcattttaaaatctaacaagagagtcagataggagatttataatttaaaaaattctgcatggctgaggtataacaatttttttcccattaagaaaactgatattgtggctaagtgtggtggctcacacctataattccaccactttgggaggctgagatgaaggatcccttgagcccaggagtttgagaacagcctgggcaacatggtragaccttgtctttatttctctctctctctctttaaagaaactggtatcaggggcacttgtttcttctagatacatttctttgctaccatgtgcacattgtctcatgcaaagaactttctctagttttagga

SEQ ID NO: 307415 - DNA, 516 bp, Homo sapiens
ggtggtttctacaccaaatcatatcttgaggaagatggattttctgaactttgttgtgttatttattttaggaggtttgatcatccctagagatgatgtgaaaaatatgagacatgtgcagagcttaattccgggttgcattatttacattgtagtaactgtgaatagaatcctcttcattttaaaatctaacaagagagtcagataggagatttataatttaaaaaattctgcatggctgaggtataacaatttttttcccattaagaaaactgatattgtggctaagtgtggtggctcacacctataattccaccactttgggaggctgagatgaaggatcccttgagcccaggagtttgagaacagcctgggcaacatggtgaraccttgtctttatttctctctctctctctttaaagaaactggtatcaggggcacttgtttcttctagatacatttctttgctaccatgtgcacattgtctcatgcaaagaactttctctagttttagga

SEQ ID NO: 307416 - DNA, 568 bp, Homo sapiens
acaacccccagtaccagcccgaagctaggtagacttgctgggtggctagacccagaggagagacatcaatcactgcagtttgggtcacaggaagccacatccttaggaaaagggagagagtactgtatcaagggaataccccatgggacaaaataatctgaacaacagcctcagccctagaccttccctctgatagagcctacccaaatgagaaggatccagaaaaccaactctggtgatatgaaaaaacaaggctctttaatgccycccaaaaatcacactagttcaccagcaatggatctaaaccaagaagaagtccctgatttacctgaaaaagaattcaggagattagttattaagcttatcagggaggcaccagagaaaggtgaagcccaatggaaggaaatccaaaaaatgatacaagtgaagggagaaatattcaaggaaatagacagcataaagaaaaaacaataaaaattcaggaaacattggacacacttatagaaatataaaatgctctggaaagtctcagcaatagaattgaacaaggagaggaaagaaatttgga

SEQ ID NO: 307417 - DNA, 568 bp, Homo sapiens
acaacccccagtaccagcccgaagctaggtagacttgctgggtggctagacccagaggagagacatcaatcactgcagtttgggtcacaggaagccacatccttaggaaaagggagagagtactgtatcaagggaataccccatgggacaaaataatctgaacaacagcctcagccctagaccttccctctgatagagcctacccaaatgagaaggatccagaaaaccaactctggtgatatgaaaaaacaaggctctttaatgcctcccaaaaatcacactagttcaccagcaatggatctaaaccaagaagaagtccctgatttacctgaaaaagaattcaggagattagttattaagctwatcagggaggcaccagagaaaggtgaagcccaatggaaggaaatccaaaaaatgatacaagtgaagggagaaatattcaaggaaatagacagcataaagaaaaaacaataaaaattcaggaaacattggacacacttatagaaatataaaatgctctggaaagtctcagcaatagaattgaacaaggagaggaaagaaatttgga

SEQ ID NO: 307418 - DNA, 603 bp, Homo sapiens
catagccctaaatgcctacatcaaaaagactgaacgaacacaaactgacattctaaggtcacacctcaaggaattagagaaacaagaacaaaccaaacccaaatccagcagaagaaaggaaataaccaagatcagagcagaacctaatgaaattgaaacaaaaaaatacaaaagataaatgaaactaaaaactagttctttgaaaagataaataaaattgacagaccattagcaagactaaccaagaaaaggagtaagaaaatccaaataacctcattaagaaatgaaacaggagatattacaactgacaccactgaaatacaaaagatcatcctactgctaaaggctactaagaacacctttatrcacataaactagaaaacctagaagagatggataaattcctggaaaaataaaaccctcctagcttaaatcaggaataattagataccgtaaatgaaccaataacaagcatatagatttaaatggtagttaaaaaattaccaacaaagatgtccaggaccagattcacagcagaattctaccagacattcaaagaagaattggtaccaatctttttgacactattccacaagatagata

SEQ ID NO: 307419 - DNA, 612 bp, Homo sapiens
aaccccaaaaaagaagactaaagatgattattaaaagaaattatagaagacctaaataatggaggaatataccatgttcacgtattgaaaggcttaaaattataacaatttcaattgatttatagatcaatgcaatctcaatgaaaaacctcagcaggtttttcttttcatggaaattgacaagctgtgtctaaaatttatatagaaattcagacacaagaataagatcaatcttgaagaataacaaagctaatagatttacaataacagatatcagattttaatataaagcaaaatgaattaaaatgtgataatagtggcacaagcataaagcagtagaacagaataaggtgtacaaatgtagactctcacatttgtggtcacctgatttataatacaggtgtcagtgcattgcagtggtgaaaggaatgccyttttaataaacgtgttcacttctaaccaacaagggaaaaaaataaatcttttcccgtatttcacaccccatacaaaatgtcagattcagagggaacagtaacctaaacataaaagctaagacaatgaagctgctagaagataacatttgagaatgtctttgtaatcttagggtaggca

SEQ ID NO: 307420 - DNA, 645 bp, Homo sapiens
tggtccttttgtgactgagctatatgataaactaaggaaaactacagaagttatgtctattaactctttaaggtacatgatatagcaaataatcatttgtacaacctcatagaaagttgagaggattaatcaaattgtttcaaaatttttaaggagccaaatttaaattctcaataccctatgagattttttaaactattttagattcttaccagaagaatgcatagatgtagtaaaaccattaaatacagtagtatctggtggcctttctgtgtggaggagctcgtttgtccaaggtatgatctaccagtgagaagatcagtgccaggtcacagaaaaagctaatcatttttagtttaatcctgaccagctagtcttcctccaggcatcagctacctgattttaaagagaccatattagaaatgaaaagcagcagtctctatcatatgttaaattcaaaggcatagctgctcgtgaagaccctattatgttttatttgcctatcggagaaagagatctgyctacctgcctttaggaaaaagcaatgctttatgtagcttcaattagtcctgcatcaggttattctaatgcttcctactgcaaaaaccaagcccacaagtctccaatcctaaaagtcactagaat

SEQ ID NO: 307421 - DNA, 596 bp, Homo sapiens
ggaattctctgctcgaatagggaattatctgctctcacctatatctctttcctaccgtcagtagcctctgcgttcctagacctcgtttatgccatggacagtaatttggtctttacccatgaaacaggaagcctggggttggcttaatcgtcaggaatcagccacgctcacctgcgctgtgccttttaagctctgttgtcatctgcctctgaatcccttagacccagttttccttcctagggctctgacctgaagcttggaattgaggcttggacaaaaatgtatcttgggaggtgggggtgtcgcatggattccttaacataagccraatgctaaggtgaaattgtgaaattgagtcctcctccaacaagagagaggaaaggatgtcttgtgacatacccagatagctggtggctatagttatgctgcaaagatttgggtgttattgtgcttggctttggttagctcccttggtcttactttcccaaaaagaaaccgccaagtgatgggcaccctatttattcccatgacctggcaggatttgcaggatcattggtcagaactagaatattgatcaggatttgtacattacccat

SEQ ID NO: 307422 - DNA, 572 bp, Homo sapiens
ttggccacagcccaagactagcctcacaaaccctttttcacaattaaagctttaaagaaattatcaacagtgatagttggggagcctggcctagtaaaatgtcttcttaaaaaaaaaaaaaaacttgcttaaaacttaactgctgatggggtrgagaagaggaaaaaaaaaaaaagtttaaaaatgcctggggaagaacctcttattcttaggcaagtggttcttccaccacggagattaattcaattactgtcctagggagtaaaacccctgggcttggggaagggctccagcagcagcacgtggcggggactgcagttggctcccaaacccgtggaccatgcgtcccagtcctgtcatggagtgcggagtggctgggagctgttctgtcatggagtggggagcggctgggagctgctgctcaccggtgggtcctgtaaaaggaagaaaaaggcatggtatcccccaccctcaggattctgaggttgaaaaggcgtagaagcaacagtgagaggttttgagtccccatttcactcaccacttctcaagcccccacattgggcaccaaaaat

SEQ ID NO: 307423 - DNA, 572 bp, Homo sapiens
ttggccacagcccaagactagcctcacaaaccctttttcacaattaaagctttaaagaaattatcaacagtgatagttggggagcctggcctagtaaaatgtcttcttaaaaaaaaaaaaaaacttgcttaaaacttaactgctgatggggtggagaagaggaaaaaaaaaaaaagtttaaaaatgcctggggaagaacctcttattcttaggcaagtggttcttccaccacggagattaattcaattactgtcctagggagtaaaacccctgggcttggggaagggctccagcagcagcacgtggcggggactgcagttggctcccaaacccgtggaccatgcgtcccagtcctgtcatggagtgcggagtggctgggagctgttctgtcatggagtggggagcggctgggagctgctgctcaccggtgggtccygtaaaaggaagaaaaaggcatggtatcccccaccctcaggattctgaggttgaaaaggcgtagaagcaacagtgagaggttttgagtccccatttcactcaccacttctcaagcccccacattgggcaccaaaaat

SEQ ID NO: 307424 - DNA, 466 bp, Homo sapiens
cctgtagtccaagctacttgggaggctgaggcaggaggattactcaaatccaggagttccaggctgcagtgagctatgatggcaccactgcacttcagcgtaggtgacaaggtgagaaactgtgtaaaaaaagaagacagaagttccgagatactaagtggcttaattcacatagtagatgtggatctgggatttcaaagcagtcagtagcttacaaagcccactccttcctcactctaccaaaatggaatgtctctttcatttgagggtattgacaactcttgagctccttgaaaagttattaccaaataatattttagttttggtgacgctttagattagtttcattactggtycacctaatttaacagttgatcagctataggtacaaaagagaatgtataatgaacatggctgaatttcagaatcgtaaagaattagttataaccttcacagagaagccaga

SEQ ID NO: 307425 - DNA, 466 bp, Homo sapiens
cctgtagtccaagctacttgggaggctgaggcaggaggattactcaaatccaggagttccaggctgcagtgagctatgatggcaccactgcacttcagcgtaggtgacaaggtgagaaactgtgtaaaaaaagaagacagaagttccgagatactaagtggcttaattcacatagtagatgtggatctgggatttcaaagcagtcagtagcttacaaagcccactccttcctcactctaccaaaatggaatgtctctttcatttgagggtattgacaactcttgagctccttgaaaagttattaccaaataatattttagttttggtgacgctttagattagtttcattactggttcacctaatttaacagttgatcagctataggtacaaaagrgaatgtataatgaacatggctgaatttcagaatcgtaaagaattagttataaccttcacagagaagccaga

SEQ ID NO: 307426 - DNA, 640 bp, Homo sapiens
tttgctttcacaatgccctgctgatagattatcaatgtgtggtcactaaattaattaatgaatccgaagcttattttaaaaaatctttttctatggaataacgggtagagtttagtataaatccatgcatttggacactattcctaaatataatcatatctctgtagatataaatagtataaattttctacttgtagttattaaaaatgtaaatttaaaaaatacagcattaatcattgtgatactactagcatgattttaattcatctacttcagtcaatcattttttgtttgtttgtttgttttgcttttttgagatggcgtctccctctgttgcccaggctggaatgcgatgacacgatcttggctcactgcagcctccgcctccagggttcaagcaattttcctgcctyggcctcccgagtagctgggagtacaggtgcgcactagcacgcccggctaatttttgtatttttagtggagacggggtttcaccatattggtcaggctggtctcaaactcctgacctcaggtgatccacttgccttggcttcccaaactgctgggattacaggcgtgagccactgcacccgaccctgaaattttctttaccatgtgctgaagcttaatcaaatgaaac

SEQ ID NO: 307427 - DNA, 608 bp, Homo sapiens
tgctatatctgtctggaactgcagcgtccaggtcagagaggacatagtcccacatacataagggtagatgagtgtagaaaggcagagagaaatcaatgctttgagaatcttgtaacaaaaaatatagcaattattttgagtttttccttgttcagtctaaagtaaaatgttatttttattttgtaattcgatcatctcctttgttttactgataggagtttttaaagaagtaattaggggattacaaaaaaagtgcttgccaaagaagatggtaaaacaagggtcagtatccataaaatgaatataaatctgtgcagcttcatcttagtgtagcattgtaattatttttcataatgtgcataaaaggttactatatataacctttaagcatttcctctacttttatacccatattgttttttttcayaattcatagccataatgtattatcatatgaaataaaattttgtacagatttcttttagaagcaagatttttggatctttcatgtaaatacatatccttcctccctgattttttaaagatcttaattgtattattttgcctaggtattggatgaatttgcacaaaaatgcaatcacgttgtt

SEQ ID NO: 307428 - DNA, 591 bp, Homo sapiens
tgtcctctaactttaaaacactctgacccgattttatgattcatagacatgttataatagaaaattaggagggtttttttttttcttttctttttgagacagggtctttctctgttgcctaggctgagtgcagtggcatgaccatggctcattgcaacttgtgtgcctccgggtctcaagtgatcctcccacttcagcttcctgagtagctgggaccacaggcctggaccaccatgctcagctaatttttgtattttctgtagagacaggtttcaccatattgtctaggatggcctcaaattsctgagctcaagtgatccacccacctcggcctcccaaggtgctgggattacaggagtgagccactgcaccccgctaagaggattttcagaggatttatttggtattttaagctgtttgatatcataaaaatatttttgatgttcattgctatttctgtcaattgtgttatattttctttagagtctaacaaatggctcattacacccttaaaaggataagaagtaaagcataaatcagaaaatctacctctgaaaaaagtatcaaattgtaatttattgcatagtgtaa

SEQ ID NO: 307429 - DNA, 591 bp, Homo sapiens
tgtcctctaactttaaaacactctgacccgattttatgattcatagacatgttataatagaaaattaggagggtttttttttttcttttctttttgagacagggtctttctctgttgcctaggctgagtgcagtggcatgaccatggctcattgcaacttgtgtgcctccgggtctcaagtgatcctcccacttcagcttcctgagtagctgggaccacaggcctggaccaccatgctcagctaatttttgtattttctgtagagacaggtttcaccatattgtctaggatggcctcaaattgctgagctcaagtgatccacccacctcggcctcccaaggtgctgggattacaggagtgagccactgcaccccgctaagaggattttcagaggatttatttggtattttaagctgtttgatatcataaaaatatttttgatgttcattgctatttctgtcaattgtgttatattttctttagagtctaacaaatggctcattacacccttaaaaggataagaagtaaagcataaatcagaaaatctacctctgaaaaaastatcaaattgtaatttattgcatagtgtaa

SEQ ID NO: 307430 - DNA, 530 bp, Homo sapiens
atattgagtttttgcatttgtttgaatacgtggagatttttggccctagatctacttagcctgccagttacaagttaacaattatgaatgtgatgaaatagttatttattttctgagtggttaaattatcaacttagtaaatggcttttatttatccataggggaatatggaaaataataataatttaaattttgtgtagcatttggtagcatataagttgcttacaaatatcttccaagatcytcacaaccaccatgagaggaggtagagcaaattctttcctatattttacaggtaaaataggagctcagaagttatgacctgctcaatatcacacagctaataaggatcagacataaggcttgaaatctcttctccctctgtattctcaacttccccatcatgccacaatggatttgtaaattaatagcattttgttggagataatatttgctttaagaagtaatcaatgcccagcacattagagcaaataatacatttatactttttttttttttgagatggagtc

SEQ ID NO: 307431 - DNA, 530 bp, Homo sapiens
atattgagtttttgcatttgtttgaatacgtggagatttttggccctagatctacttagcctgccagttacaagttaacaattatgaatgtgatgaaatagttatttattttctgagtggttaaattatcaacttagtaaatggcttttatttatccataggggaatatggaaaataataataatttaaattttgtgtagcatttggtagcatataagttgcttacaaatatcttccaagatcctcacaaccaccatgagaggaggtagagcaaattctttcctatattttacaggtaaaataggagctcagaagttatgacctgctcaatatcacacagctaataaggatcagacataaggcttgaaatctcttctccctctgtmttctcaacttccccatcatgccacaatggatttgtaaattaatagcattttgttggagataatatttgctttaagaagtaatcaatgcccagcacattagagcaaataatacatttatactttttttttttttgagatggagtc

SEQ ID NO: 307432 - DNA, 605 bp, Homo sapiens
tggtactgttttctgcactcattttattactttattattttcaatatttttcccctttggaatatgactgctttacagcagaaaaagttgtttattgttgaataaaccttcttacacattgtacatgtgttttaaaatagcttacatttcttccaaaaaagtattcaatagcaatgacctaaagagacatttgcacaatggaacatctgaatccagaacatattaagaattattttctctgcawactaacattccttgtcacctagtgataaccgttgcatgtatctctctaagaaccccgatgatacagcccatatttgtcttgaggaaagcctttacatatgttttcaattcaagttatttgtagctaatatgtaatctgtaacatattaacaatttataaagatatcctaaatcaatttgtttgtcttgagtttctggactctcaggaggcaaaccgtgtttccatttccagtagagattactattgcttatgtacatccagttttccaacagtcatgtcctcataggaagattccacttcctttgtagttaggtggggtttcattactacttctagcaaattacatgtgccagaagtcatt

SEQ ID NO: 307433 - DNA, 431 bp, Homo sapiens
attagtgtttcactgtttggtccctgataactctctctttttatttccatttgttttacaagagattttacttctataaaactggttttgctatggctcttcatttacttttatttatttatttatttatttatttatttagagacagggtctcacttggttgcctaggctggaatgcagtggcgccatctctgctcactgcagcctctgcctcccrggttcaactgattgtcgtgcctcagcctccccagtagctgggtatacaggcatgcgccatcatgccttgctaatttttgtatttttagtagagatggggttccaccgtgttggccaggttggttgcaaactcctgacctcagctgatgcatctgccttggcctcccaaagtgctgggattacagccttgagccactgcactgagctgtgactgt

SEQ ID NO: 307434 - DNA, 431 bp, Homo sapiens
attagtgtttcactgtttggtccctgataactctctctttttatttccatttgttttacaagagattttacttctataaaactggttttgctatggctcttcatttacttttatttatttatttatttatttatttatttagagacagggtctcacttggttgcctaggctggaatgcagtggcgccatctctgctcactgcagcctctgcctcccaggttcaactgattgtcgtgcctcagcctccccagtagctgggtatacaggcatgcgccatcatgccttgctaatttttgtatttttagtagagatggggttccaccgtgttggccaggttggtygcaaactcctgacctcagctgatgcatctgccttggcctcccaaagtgctgggattacagccttgagccactgcactgagctgtgactgt

SEQ ID NO: 307435 - DNA, 431 bp, Homo sapiens
attagtgtttcactgtttggtccctgataactctctctttttatttccatttgttttacaagagattttacttctataaaactggttttgctatggctcttcatttacttttatttatttatttatttatttatttatttagagacagggtctcacttggttgcctaggctggaatgcagtggcgccatctctgctcactgcagcctctgcctcccaggttcaactgattgtcgtgcctcagcctccccagtagctgggtatacaggcatgcgccatcatgccttgctaatttttgtatttttagtagagatggggttccaccgtgttggccaggttggttgcaaactcctgacctcagctgatgcatctgccttggcctcccaaagtgctgggattacagccktgagccactgcactgagctgtgactgt

SEQ ID NO: 307436 - DNA, 626 bp, Homo sapiens
taatgttcactttaatgaaagttttaataatctccatacacaaattggtgccttttaccaatataaacattttataatttttttacaatagaatattttggaacattattagatttatagaaaaagtgtgcagtagttgagtgaggtctcctataccctgctgtccctccatgttcccagtttctcctagtattaatatcatgcattagcgtggtaygcttgttatatttcataaaccaatatggatacatcattacaaacaaaagtctatagtttacactatagttccttttttgtgttctacattcaatgggttttgacaaatgcataatgtcatttattcattattacagtatcatacaggttagtttcactgccctaaaaactcatattttctatctatttatatctccttccacccctcaacccctagcaacccacttacctttttattctccacatagttttaccttttccagaatgccatatagttggaaacacttagcaaatctgcattgaaggttcctccatgaccttccatggcttggaagctaatttgttattactgaaaaatatttaattgtatggatataccacagtttgtatgcacctactgaaggacacct

SEQ ID NO: 307437 - DNA, 499 bp, Homo sapiens
tgtttcatacatattgcattagatttatagctaaattttctttgatgtgtgtgtaataatataaatagtgttatgtttttaatttcaaattacatttttttggtgctgaaatataaaaaataaatggacttttatatattaactttgtatcctgcaaccttgctataattacttaacagttccaggaaattttgttttcaggttttgcaattttctgcatagacaatcaagtcatcygaaaattcaagggtcttatttctttcttttctgtctgtatatctttaatttccttttcctgtcttgttggattagctatgacttttggtacaatgttgactagaagtggtaagaaaagacatctttgttttgttactgttttgggaaaaattatctctttttttgaacattaaagtaggatattggctctaggtatttttgtagacttttttttttgtcagggaagttcccttttattcctaattttgctgagagtttttat

SEQ ID NO: 307438 - DNA, 499 bp, Homo sapiens
tgtttcatacatattgcattagatttatagctaaattttctttgatgtgtgtgtaataatataaatagtgttatgtttttaatttcaaattacatttttttggtgctgaaatataaaaaataaatggacttttatatattaactttgtatcctgcaaccttgctataattacttaacagttccaggaaattttgttttcaggttttgcaattttctgcatagacaatcaagtcatccgaaaatwcaagggtcttatttctttcttttctgtctgtatatctttaatttccttttcctgtcttgttggattagctatgacttttggtacaatgttgactagaagtggtaagaaaagacatctttgttttgttactgttttgggaaaaattatctctttttttgaacattaaagtaggatattggctctaggtatttttgtagacttttttttttgtcagggaagttcccttttattcctaattttgctgagagtttttat

SEQ ID NO: 307439 - DNA, 499 bp, Homo sapiens
tgtttcatacatattgcattagatttatagctaaattttctttgatgtgtgtgtaataatataaatagtgttatgtttttaatttcaaattacatttttttggtgctgaaatataaaaaataaatggacttttatatattaactttgtatcctgcaaccttgctataattacttaacagttccaggaaattttgttttcaggttttgcaattttctgcatagacaatcaagtcatccgaaaattcaagggtcttatttctttcttttctgtctgtatatctttaatttccttttcytgtcttgttggattagctatgacttttggtacaatgttgactagaagtggtaagaaaagacatctttgttttgttactgttttgggaaaaattatctctttttttgaacattaaagtaggatattggctctaggtatttttgtagacttttttttttgtcagggaagttcccttttattcctaattttgctgagagtttttat

SEQ ID NO: 307440 - DNA, 526 bp, Homo sapiens
tagatctcctggggttattttgaggataaaattagataatgtgtatctatcaaattacatggtcacttggcaaatagtaggtggagcacataatcataattattgccactgaattatactgactattgctaatggagctaagagaaagaggggaggcatttggtgtggtttcataagataaagtcagtcttcaacttatcaatgtyagatattggggttctgctaagtgaaactcacatatatgagagtccagtagccaaaaatatgttcttacactagacataggatcctgatttcttttctttctttctttcttttgtttgtttgagatggagtctcactccattgcccaggctggagggcagtggcatgatcttggctcactgcaacctctgcctcccagaatcaagtgattctcctgcctcaaccttccgagtagctgggactacagacatgcattaccacgcccagctaatttttgtatttttagtggagacagggtttcaccatggttcaccaggctggt

SEQ ID NO: 307441 - DNA, 526 bp, Homo sapiens
tagatctcctggggttattttgaggataaaattagataatgtgtatctatcaaattacatggtcacttggcaaatagtaggtggagcacataatcataattattgccactgaattatactgactattgctaatggagctaagagaaagaggggaggcatttggtgtggtttcataagataaagtcagtcttcaacttatcaatgttagatattggggttctgctaagtgaaactcacatatatgagagtccagtagccaaaaatatgttcttacactagacataggatcctgatttcttttctttctttctttcttttgtttgtttgagatggagtctcactccattgccsaggctggagggcagtggcatgatcttggctcactgcaacctctgcctcccagaatcaagtgattctcctgcctcaaccttccgagtagctgggactacagacatgcattaccacgcccagctaatttttgtatttttagtggagacagggtttcaccatggttcaccaggctggt

SEQ ID NO: 307442 - DNA, 527 bp, Homo sapiens
tacttgtttggagatttaccacgtaaaattttaaaccaggcagataatcagtttctacaatttttcaaaagacatggtatacattttcaactgtgttctaatggtcatgagaataatttgtgatgagtacattaattttttgcaaaatgataactgaatgtaaaggactagaacgcagcaatcttaaaagtcaaggaccatgaaacatggggaagaatttaactttttaaaacaatcaagttcttggccaggtgcagtggcttatacctgtaaccccagcaatgaggtgggaagactgtttgagcccaagagctagagaccagcctggggaacgtagggagaccccatctcaaaacaaaacaaracaaaacaacaacaacaaaaaacccaaaaaacagcagacgccaaaacaattagctggacatgaaagcacatgcctgtggcctcagctactctggaggctgaggtgggaggattgcttgagcctgggaggtcaaggctgcagtgagctgtgatagaaccactgg

SEQ ID NO: 307443 - DNA, 527 bp, Homo sapiens
tacttgtttggagatttaccacgtaaaattttaaaccaggcagataatcagtttctacaatttttcaaaagacatggtatacattttcaactgtgttctaatggtcatgagaataatttgtgatgagtacattaattttttgcaaaatgataactgaatgtaaaggactagaacgcagcaatcttaaaagtcaaggaccatgaaacatggggaagaatttaactttttaaaacaatcaagttcttggccaggtgcagtggcttatacctgtaaccccagcaatgaggtgggaagactgtttgagcccaagagctagagaccagcctggggaacgtagggagaccccatctcaaaacaaaacaagacaaaacaacaacaacaaaaaacccaaaaaacagcasacgccaaaacaattagctggacatgaaagcacatgcctgtggcctcagctactctggaggctgaggtgggaggattgcttgagcctgggaggtcaaggctgcagtgagctgtgatagaaccactgg

SEQ ID NO: 307444 - DNA, 585 bp, Homo sapiens
catctccaaaccagtcacatttggggtactggaggttaagacatatacattttaggctggcgttgggggtgcacaattcagtccctaacgcacactaccaaccagctctttggagaggggcaggatgctcaggctggtggtaggaacttccgtggacttcctttgacgctgagtgcatgtaggttaggtcagattgacccacagagtccttcggtgaggcaggatggatgcaaagtggccaggcattgtgagcagtattggagcttctaaggagctggctagggagacactaaaaaaaaaattctattggaaatcttgtgtcataaaaaatttcactgaatatctgcctggaacaaggccagaagtcactccctctctgcctccactgcaaatatctygtccaggaatcaaataaataattgaaaatgggtctttacagagatgctgaaagaaaatacaaacaagaaaaacagaagataaaaaaaatggcgaaggaaaaatagaggaccggctggagaagaaatggaacagaaatgaagggttggagaggattaaagagaaaagagcaggcaatcaaaagtgtat

SEQ ID NO: 307445 - DNA, 561 bp, Homo sapiens
cctaggcatttgtctgcctcctgcatctctcaaaaggtttttaaagagaaatatggtacattttatcttgtacctctattgagatgcatgggtctatggagctatctstgtagatttgctggatgtttagtgtctacctttatctaaattttggtgtgcaggtataggaggaagatactaatttgaaagttttcccagcagagggagtaagataaggttcatgttttatctctgaaatacatgttaaacatgaaaatgaaatttggggctattcctagagttcaacatacaaggaggttaaagttataatggaaatgataaatgggaaggaaaaaaaccccttcttctccttcagttagaaaaattcaatttctttgattgactgccatatggtggaacacacactaaattttacatatgctaaaaagttaaggattgtctagtgcttttgctaatctaattcttgcaacaagttcttacttttcttagtttataagagaaaatctgccaggcagagcactccaaattactgcaataacagctgtaaatacatgaaatgca

SEQ ID NO: 307446 - DNA, 561 bp, Homo sapiens
cctaggcatttgtctgcctcctgcatctctcaaaaggtttttaaagagaaatatggtacattttatcttgtacctctattgagatgcatgggtctatggagctatctctgtagatttgctggatgtttagtgtctacctttatctaaattttggtgtgcaggtataggagraagatactaatttgaaagttttcccagcagagggagtaagataaggttcatgttttatctctgaaatacatgttaaacatgaaaatgaaatttggggctattcctagagttcaacatacaaggaggttaaagttataatggaaatgataaatgggaaggaaaaaaaccccttcttctccttcagttagaaaaattcaatttctttgattgactgccatatggtggaacacacactaaattttacatatgctaaaaagttaaggattgtctagtgcttttgctaatctaattcttgcaacaagttcttacttttcttagtttataagagaaaatctgccaggcagagcactccaaattactgcaataacagctgtaaatacatgaaatgca

SEQ ID NO: 307447 - DNA, 574 bp, Homo sapiens
tttaaatggttttataattgtacttaacactgaagccattgtaatgcttatttctgataaagtcgagtttggtcaagtatatcttcaaaatatcgagtgaacttctgactttttctgttattcatgaaaaaaagaatccacttcattacagcagtgagtctccaacaagaatattccaaacaagtcatctaacatttcaagttgttcaaatcattttccttttggcgtcgtaacttaaaaccctatttgagacacgctgcaattatgtagaaaagcgcaacttgtcaaatctcatagcttttaaagtcccaatcaattgacatgaagcatattctatgaaggtttttgccaaaatggtatttgttattgagyggtggcactccaaagaaatctcttttttttccctctctttgagacagaagagaatagtaacgaaaaagggaatgctggagggaggcggtgtgcagagaaaggagggaagcaaaaaaaaaaaaaaaatgagagagacttatttaagttccttgagtgtactcaagtactttcaggatacagaaaagttcaaaggtataacctt

SEQ ID NO: 307448 - DNA, 607 bp, Homo sapiens
gtattttaaagaattggctcaaacagttgtgggggccagctagtccacattttaggacagcagggtcaagggtaagctagcaaggctggaagctcaggcagagtttctatgttgcagtcttgaggtcatattctttgatcttcagtccttaccttagccttcaactgattgaataaggcccacccacattayggagagcagttgctttcctggatatttacagattaaaatgttaatcacatctaaaaataccttctcagtaacatctatgctggtgtttggccaagcatctgggcaccgtagcctagccaggctgacacataaatgtaagcatcatgacttgcattttcattaatcttatgtattaatttattgtgaattgttactcaggatttgtgagtgatgtgattcattctctctctcccccatcctctctctttcctcttcactcagcaactcggaaaataaaattaggatagcactaggaaatgaaattttagccaagcaatatttttagtttgttatcagcagttgtgaagatatgattattaacacagtataaaagatcacttctctgagtgaaaaataacagcaccaaaagggatcc

SEQ ID NO: 307449 - DNA, 577 bp, Homo sapiens
gtaaattatcacttctgataaggagttaatatccgaaatacataagaaactcaagcaatgcttaagcaagaaaataacctgattagagaatgggcaaaggacctgaactgacatttctcaaaaaaaaaaaaaaaaaaaaaaaaagaaagaaagaaagaaaacaggccaaaagatatgcgaaaaactgcttaacatcactaatcatcagagaaatgcaaattaaaactatagtaaactactacctcatacctgctaggatggctattactaaaagggcaaaagataaacgttggtgagaatgtggagaaaaagaaatatttgtacactgttgstgggaatgtaaattagtatggccactatggaaaacagtatggaggtccctcagacaagtaaaaatagaactgccatatgatccagcaactcactaccggtatatggccaaaggaaattaaatcagtaagttaaagagttatctgaactcctatgttcactccagcatcattcacaatagccaagatatggaatcagcccaaagtgtcaattgatggatggatgaataaagaaaatgtagtataca

SEQ ID NO: 307450 - DNA, 577 bp, Homo sapiens
gtaaattatcacttctgataaggagttaatatccgaaatacataagaaactcaagcaatgcttaagcaagaaaataacctgattagagaatgggcaaaggacctgaactgacatttctcaaaaaaaaaaaaaaaaaaaaaaaaagaaagaaagaaagaaaacaggccaaaagatatgcgaaaaactgcttaacatcactaatcatcagagaaatgcaaattaaaactatagtaaactactacctcatacctgctaggatggctattactaaaagggcaaaagataaacgttggtgagaatgtggagaaaaagaaatatttgtacactgttggtgggaatgtaaattagtatggccactatggaaaacagtatggaggtccctcagacaagtaaaaatagaactgccatatgatccagcaactcactaccggtatatrgccaaaggaaattaaatcagtaagttaaagagttatctgaactcctatgttcactccagcatcattcacaatagccaagatatggaatcagcccaaagtgtcaattgatggatggatgaataaagaaaatgtagtataca

SEQ ID NO: 307451 - DNA, 577 bp, Homo sapiens
gtaaattatcacttctgataaggagttaatatccgaaatacataagaaactcaagcaatgcttaagcaagaaaataacctgattagagaatgggcaaaggacctgaactgacatttctcaaaaaaaaaaaaaaaaaaaaaaaaagaaagaaagaaagaaaacaggccaaaagatatgcgaaaaactgcttaacatcactaatcatcagagaaatgcaaattaaaactatagtaaactactacctcatacctgctaggatggctattactaaaagggcaaaagataaacgttggtgagaatgtggagaaaaagaaatatttgtacactgttggtgggaatgtaaattagtatggccactatggaaaacagtatggaggtccctcagacaagtaaaaatagaactgccatatgatccagcaactcactaccggtatatggccaaaggaaattaaatcagtamgttaaagagttatctgaactcctatgttcactccagcatcattcacaatagccaagatatggaatcagcccaaagtgtcaattgatggatggatgaataaagaaaatgtagtataca

SEQ ID NO: 307452 - DNA, 567 bp, Homo sapiens
gtttagatactataaaaataaatctgaaattctgagaacattctattattattgtcactgcgcataatctgaatgtttctatagctgcattaacaagcttttataaatttacttatacaattatataacttttatcatcgtaccgcagttaaagtggctattatcaaaaagacaacaaacaacagatactggtgaagatgtggagaaaatgtacactagtacactgttggtgaaaatgtaaactagcacagcctctatggaaaaccgtatggaggtttctcagacaattaaaaatagaactaccatatgatccagcaaccccactactggatatatatscaatgaaagtgcaatcagtatgccaaagagatttctgtatttccatattcattgcaccattcttcacaatagccaagatatggagtcaatctaccattcattggcagaatgaatgaagaaaatgtggcatataaaaataatgaaacaacttcagccataaaagaatgaaaacctgtcatttgcagcaacattgatagaactgtaagtcattatgttaagtgaaacaag

SEQ ID NO: 307453 - DNA, 493 bp, Homo sapiens
gatgaaaagaggagataagggcatttgctgaaagcaggttagaaatcccaaaaagcagtgggaagaaagtgagtgagggtggtgggtggactgagtcatgcaaaggttaggacagataacatgcttccggatgtcctggctatgggggagtagagggggatctgtgcatctgacagtgtcgcagtcagtggaaggcattgcactgtgggcttcgttstaacgctccttccttgagggtggctttctagtctcagtagtgtattttctgaggctttcctcgtcatgtggagatgttccctaaagctcgtttgggacatatgacagagattgggaaatgatttccttggaagaaaaaaaaattaagactttatggacacgtgcattttagaaatgctaaacacctaataaatttcatccttaaacattctttggaatgtcaagtggttaaaaagcatatccaattttaattttgcttgaccccaaattttccaag

SEQ ID NO: 307454 - DNA, 493 bp, Homo sapiens
gatgaaaagaggagataagggcatttgctgaaagcaggttagaaatcccaaaaagcagtgggaagaaagtgagtgagggtggtgggtggactgagtcatgcaaaggttaggacagataacatgcttccggatgtcctggctatgggggagtagagggggatctgtgcatctgacagtgtcgcagtcagtggaaggcattgcactgtgggcttcgttctaacgctccttccttgagggtggctttctagtctcagtagtgtattttctgaggctttcctcgtcatgtggagatgttccctaaagctcgttygggacatatgacagagattgggaaatgatttccttggaagaaaaaaaaattaagactttatggacacgtgcattttagaaatgctaaacacctaataaatttcatccttaaacattctttggaatgtcaagtggttaaaaagcatatccaattttaattttgcttgaccccaaattttccaag

SEQ ID NO: 307455 - DNA, 379 bp, Homo sapiens
tagctcccctttacctaaagaataagtgccatccttgtggtagggtacacagggctcttcataatatggttcctgcctttccaatccacactcagactccagctaggcccaatctctaaccatgacttgctgtgcaaacttgaatacatttctggcctctctgaactccagtttccatatccataaaacagatattttaatactgtatacytaccatagatattatgctcaaaataaagcctggttcacataaattctcagaaaatattagttatgattatcattagtactcaattatttttattctttttgttatcctttcatagttatggcagaccttgtccaaacatgactgtggacaaacacagatggaaaatat

SEQ ID NO: 307456 - DNA, 610 bp, Homo sapiens
ttagaaaatatgataaacaattttagatattgtcttggcatttggacacattatgagactttcctcaagctgttactctcatgtagtagactaaaaaactacgtattatatccatggacataaaagtataaagagttgttttgctgggaacaaaccttcaggaaaaaagaaataagactaaaatagtaaattttaatagtctagagatatcaattaaataataattaacctgtttaagtaaagattcttattaattgatgaagatcaaataataaaataatgaaagttaatctcagtagatttttcttcagatagagggaatgaggatggtgtatatgaatagtgaattatctcttcrttagacttcttttccttagcttgttctctttagctgaaaataacaaagttaaagaaaaaactgagaatacagattttgtattttctggaattatttcacagaactttacagttttgacataaaactacgtaagatgtatcatcaacaaccactgaaagtaggcattaaagggttttcatgatctcaagatgttctgataattacaaaccaggaaaccaaaaataacaagtaattttcgttgtttcagtaatg

SEQ ID NO: 307457 - DNA, 668 bp, Homo sapiens
acctgtataggacccttaccatgaatggagcttgcaagattagaagttgccctgggtgagtctcagtgagtggtgagtgaatgttgaatcctaggacattactatataccaccgtagactttataaactaactgtacacttaaagtacacaaaatttattttaaaaattgttttatcttcaaaataaatctcaggttactgaaacttttttactttatcaaggttataattttttaaacttttcggctgttgtaataacagcttaaaacacaaacacattgtacggctatacaaaaatattttctttctttatatctttaagcttttaaaattttcaatattaattttacctttttaaacttttttgtgaaaaacaaagacacacacacacttgcttaggcctacwcaggatcagggttatcaacatcactgtcattcatcccccgcatcttgtcccactggaaaccttcaggggcagtaacaggcatggagctgtcatctcctaggataacaatgccttcttctgaaatacctcctgaaggactctccttaggctgttttacagttaactttttttataagtagaaagattacactctaaagtatgcatcaatagtatagtaaatacataaaccagtaacatagtcatttattatcaagtattatat

SEQ ID NO: 307458 - DNA, 668 bp, Homo sapiens
acctgtataggacccttaccatgaatggagcttgcaagattagaagttgccctgggtgagtctcagtgagtggtgagtgaatgttgaatcctaggacattactatataccaccgtagactttataaactaactgtacacttaaagtacacaaaatttattttaaaaattgttttatcttcaaaataaatctcaggttactgaaacttttttactttatcaaggttataattttttaaacttttcggctgttgtaataacagcttaaaacacaaacacattgtacggctatacaaaaatattttctttctttatatctttaagcttttaaaattttcaatattaattttacctttttaaacttttttgtgaaaaacaaagacacacacacacttgcttaggcctacacaggatcagggttatcaacatcactgtcattcatcccccrcatcttgtcccactggaaaccttcaggggcagtaacaggcatggagctgtcatctcctaggataacaatgccttcttctgaaatacctcctgaaggactctccttaggctgttttacagttaactttttttataagtagaaagattacactctaaagtatgcatcaatagtatagtaaatacataaaccagtaacatagtcatttattatcaagtattatat

SEQ ID NO: 307459 - DNA, 668 bp, Homo sapiens
acctgtataggacccttaccatgaatggagcttgcaagattagaagttgccctgggtgagtctcagtgagtggtgagtgaatgttgaatcctaggacattactatataccaccgtagactttataaactaactgtacacttaaagtacacaaaatttattttaaaaattgttttatcttcaaaataaatctcaggttactgaaacttttttactttatcaaggttataattttttaaacttttcggctgttgtaataacagcttaaaacacaaacacattgtacggctatacaaaaatattttctttctttatatctttaagcttttaaaattttcaatattaattttacctttttaaacttttttgtgaaaaacaaagacacacacacacttgcttaggcctacacaggatcagggttatcaacatcactgtcattcatcccccgcatcttgtcccactggaaaccttcaggggcagtaacaggcatggagstgtcatctcctaggataacaatgccttcttctgaaatacctcctgaaggactctccttaggctgttttacagttaactttttttataagtagaaagattacactctaaagtatgcatcaatagtatagtaaatacataaaccagtaacatagtcatttattatcaagtattatat

SEQ ID NO: 307460 - DNA, 668 bp, Homo sapiens
acctgtataggacccttaccatgaatggagcttgcaagattagaagttgccctgggtgagtctcagtgagtggtgagtgaatgttgaatcctaggacattactatataccaccgtagactttataaactaactgtacacttaaagtacacaaaatttattttaaaaattgttttatcttcaaaataaatctcaggttactgaaacttttttactttatcaaggttataattttttaaacttttcggctgttgtaataacagcttaaaacacaaacacattgtacggctatacaaaaatattttctttctttatatctttaagcttttaaaattttcaatattaattttacctttttaaacttttttgtgaaaaacaaagacacacacacacttgcttaggcctacacaggatcagggttatcaacatcactgtcattcatcccccgcatcttgtcccactggaaaccttcaggggcagtaacaggcatggagctgtcatctcctaggataacaatgccttcttctgaaatacctcctgaaggactctccttaggctgttttacagttaactttttttataagtagaaagattacactmtaaagtatgcatcaatagtatagtaaatacataaaccagtaacatagtcatttattatcaagtattatat

SEQ ID NO: 307461 - DNA, 588 bp, Homo sapiens
gagttaatttattgtaaatagtatttatgacagtgcttcatagtgaggaaatagactcaaaatcacataaagaactttttattataataataacttttaggcacatttctccttctcactagctttgtccccacaaaatcaaaacccataacttattaacttaaaaaattatttctatttctaaatatcaagataactatagccataaggttttttaaaaaataagctcttcgtgagtttgattatggactattataaaggattttttttccaattcaagtgctttctccaaatgtagcatttaaattccaagtaaactatgtgaatttattttataaaacaaaaataaactcaccaaatactatttatgaaaatgattaaggaataggagaaaacttatctgttgctgtgggtgagtaggggggtgtatgatatccgtatttgtgtatgatacaataattacattttattgaaacatatatgtaacaacttacacattattctttttatggayacatatattaatgtatgctcgtttaattttaaccatgtctacataataatctccattttgcaatggattcaaat

SEQ ID NO: 307462 - DNA, 583 bp, Homo sapiens
attgcattgcttgattatttttatctttcattagactgtgagctctgtgatgatggctcacmtttaatttctgtatcttgcacagtgcatggcatagaataggcagctaatagatatttatagatgaaagaaaaaatgaatgagttttgaggtagatagaggttaatataagggtaatcaaagaaaataatgtggaattattttatcaaattgacaacactaagaagtggtacaaatataaaaagttttaaaagatgatttggcaacatcaatgcatagcaataatggatacttatataagcattgccaagggcgctagggaataggattaagagccctaactcctgggacacccagtcctaatacacattgaataacctctgtaaagtcacttaacttatctatggtaggtttatcagtacagtagggataataagatttacgtacctgaaaacagaaggttgaataaaataatttcttctagttctaaaacacatggctttttagaccaattgtgaaattgaagacagttagattaaaaaattctgtatgcatatttaaaaagtaaccactgtgagtacag

SEQ ID NO: 307463 - DNA, 583 bp, Homo sapiens
attgcattgcttgattatttttatctttcattagactgtgagctctgtgatgatggctcacctttaatttctgtatcttgcacagtgcatggcatagaataggcagctaatagatatttatagatgaaagaaaaaatgaatgagttttgaggtagatagaggttaatataagggtaatcaaagaaaataatgtggaattattttatcaaattgacaacactaagaagtggtacaaatataaaaagttttaaaagatgatttggcaacatcaatgcatagcaataatggatacttatataagcattgccaagggcgctagggaataggattaagagccctaactcctgggacacccrgtcctaatacacattgaataacctctgtaaagtcacttaacttatctatggtaggtttatcagtacagtagggataataagatttacgtacctgaaaacagaaggttgaataaaataatttcttctagttctaaaacacatggctttttagaccaattgtgaaattgaagacagttagattaaaaaattctgtatgcatatttaaaaagtaaccactgtgagtacag

SEQ ID NO: 307464 - DNA, 579 bp, Homo sapiens
cagaagagagagtacagtgtcctggtcatgaacaagtactttggtgctaaatggtttggcttcatattccaggtacactctttctcactgtgtgtctattaatatggtcattttctcagtgtcctcatcttaaaaagatgatrtataatagtactgtatcatgactttatgggttggaagagtaaaatactacatgtatgtgctcaacacagtatacacatatgacagttcataacaatgattattataatttcaaccagatcacaatgaaaagcaaatacctttctcaaagaagtaatattattttgtctattttttaaaatatagagatggagtcttgctatatcatccaggctggtatcaaactcctggcatcaagccatccagccacgttggcctcccaatgtgctcagatcacaggcatgagccaccacacccagcctattattttttctaaatgcactaaaatggctttaatcagttgaatgtaggagaattggaaaattatacaagtacatatgtatacatgcatttattatttggaataaaggaaagatcatttcccttgtttttcaggat

SEQ ID NO: 307465 - DNA, 583 bp, Homo sapiens
gataaagaaaatgtggcacatatacaccatggaatactatgcagccataaaaaaggatgagttcatgttctttgcagaaacatgggtgaagctggaaaccatcaatctcagcaaactaacatgggaacagaaaaccaaacagcacgtgttctctctcataagtgggagttgaacaatgaaaacacatggacacagggaggggaacatcatacacaggggcctcccagagtgtagggggctggggagggatagcattaggagaaatacctaatgtagaagatgggttgatggttgcagcaaaccaacatggcacgtgtatacctatgtaacaaacctgcatgttctgtacatgtatcccagaacttaaagtataataaaaaaagaaaacattacatatactagtgatggagtgtcttagaaagaatgtttgttggtggttatagataatgagagataatagaattacarcagtaattttctttatgctgtcttcaagaatacctaaggaatgatgcctccaagtatccatgagtgataggttatttttcagtatttagttctggatttttaatagaagaaagtt

SEQ ID NO: 307466 - DNA, 596 bp, Homo sapiens
tttttaagtgcatctatacagatgcctgacaactatctagttactccttaggagactcactacttagtaaaacttggggagctgtaggctagggaacatgatgatgcaagtgtgtgtgtgtgtgtgtgtgtgtgtgtgtgagatagcattatgatatttacaaatttaaaaatactatatataatatatatcaaatattaatatcaaatagtaatatcaaagagatattgatcacaaacactgaaattgaacttagactttttgtcacagtctgccaaaatctttcagtttggagatttaacctgcttaccggctatttagcaggcctgttacagttccatgggtgttggtagaagtcttgagattccagggtcagagacaaaggtcagtttattactcacaacagtagcagtagtatatattctactatatatatatatatakagagagagagagagagagagagaggagaataatacaacccaggcatctttttaatgaaacaaatggatacaattcaaactgaagaggcagtcaaagatagccagacagttaaaatgacaattgctgctgcaaacacagttgcttttgatctg

SEQ ID NO: 307467 - DNA, 560 bp, Homo sapiens
aaaatcccattatgatgggtactaagtaaattatatttcaactatgtgatggggaggtatagtctaccaaaataatatttataactggtttagtggcttaagtgataattttaaggaaaattatctgaataaaaattagatgcatttacctgtgatctcatactacatacaaataaacaggtataygactgaaataaaatgaccatatggattttaccagtgcttatatctactcaggagagccttggtatcaacagtttttttgttaaaataaaaaataataataatcatacaatacatttatgtggagaaataaaataacaatatctgatgtggtacagatataactggctagttaattttattcttgcagataaacaacttgaataatgttccaatagagcaaaatggtcaggaatgtgttttctacagcgagaatgtgtgggcttaaacttttggtgttgacaatgggcaccatgaaagttacatttcagatggtcagaatataaaatttttgacaatcttggcaaaagtgagagtaagagatttaaaaaaggcag

SEQ ID NO: 307468 - DNA, 514 bp, Homo sapiens
aatggggtatgactccattgtccctaaaaatatccagttaaaatatagaagctatatataaatttattttttgattattttatcaatctaacattaataaagtactaaagaattaagacatcagagcaagcgaaatttgatcagtaaaaataaatttggagaatcccaaggacagtttatattaactgcatacctgcgtagggaggcatatttaagtgtagaagattgagcacacttaaacaaaatgctatagggccggtcatgacttgaagcccagtcatcaaaaacttgagcatttctgcaaatcagtattagtatatttcaattacctttaatgttttgcttagttgtcccccttagatagttatatttgtacattttagaatttaggttaaaataaaaaataatacattcattttrttaaaaaggtaaactaaagtcaaataacattttaaagagtttatttgagtaaacagcaatttatgagttgggcaactccaaagcagtaatgatt

SEQ ID NO: 307469 - DNA, 609 bp, Homo sapiens
gagctaagcaaaaggggaaccccttataaaaacattagcttttgtgagatttattcactaccacgagaacagtatgggggaaacaccccatgattcaattatctcccaccaggtccctcccacaactatgtaggaactatgggagctacaattcaagatgagatttgggtggggacacagctaaatcatatcacttatctctctaaataattggctaattacaagatattaagtctaatgaatttacaaaactcaccttaagaaagctatgcaatccaatacaaataacattagcatagctccatatgctgaacttgaatgactctgccactctgaaagtcatttaagttttttcagtaaacattcaaggaaaggaaagagaaaggaagggatgagaaggraagaaaagagagagagaaagagaaggagaaaagtcagaattgtcttaggtaacacaaaggcaacaaagtcttgagtgtttaggaaagggtgaaggaataatcaagtcattgctgtttctcatacagaaaatctagaaagaaaaactttatatataaagcttatatgtgtgggtataggctgaactacaaattaaaaagaatctaatgt

SEQ ID NO: 307470 - DNA, 558 bp, Homo sapiens
tggtgggaggtgactggatcatgggagcagtttcctccatgctgctgtcatgatagtaagggagctctcacgagatctgatgtttttataaatggcagtttcccctgacctctctctctcctgctaccatgtaatatgtgcttgcttcctcttcaccttcccccatgactgtaagtatcctgaggcctcctcaactgtgtgaaacagtgagtcaattaaacctcttccaatcataatttacacagcctcaagtagtatctttatagcagtgggaaaatggactaatacaggcatcaaattggaaactcactttctctctgctatttgcaagttgggcactcaaaatgtgtggtagtcaaatcagtcttggttggatgaaacacagcttgttgaaattatgcttacacrattttgcctctatcctttgctataaccactttataaatgtgttcattgaagaagcagcaaagcagatggagcaagaaaattagcattccaaggattgttcattttatctaactgattattaagagtggaagacatcagcagctatttcaa

SEQ ID NO: 307471 - DNA, 558 bp, Homo sapiens
tggtgggaggtgactggatcatgggagcagtttcctccatgctgctgtcatgatagtaagggagctctcacgagatctgatgtttttataaatggcagtttcccctgacctctctctctcctgctaccatgtaatatgtgcttgcttcctcttcaccttcccccatgactgtaagtatcctgaggcctcctcaactgtgtgaaacagtgagtcaattaaacctcttccaatcataatttacacagcctcaagtagtatctttatagcagtgggaaaatggactaatacaggcatcaaattggaaactcactttctctctgctatttgcaagttgggcactcaaaatgtgtggtagtcaaatcagtcttggttggatgaaacacagcttgttgaaattatgcttacacaattttgcctctatcctttgctataaccactttataaatgtgttcattgaagaagcagcaaagcagatggagcaagaaaattrgcattccaaggattgttcattttatctaactgattattaagagtggaagacatcagcagctatttcaa

SEQ ID NO: 307472 - DNA, 453 bp, Homo sapiens
aaaacaaacaaacaaacaaacaaaaaaaacagggagcatagctttgctccaacactctaagaatctggactatgattttcccagtagattttttgagagactccatatagtcttcttatctgctgtagattcatcatcaaataccattgtgtccactaatcgtaaggacagaacatctggacctgctcgaggcattccttcctcatccttatttaatrttggagaccacatcgattaataggtagctgatgagaatcccatccatatgccaaatttgttacatcctaaattcaaagattcccctcaattctcattatgtgcagtggatggaacaaaagagagcaatttgtcttttactttagaagagatacctgagagactactggactcctagaaaatttaacaataatgttttcacctaaaattttatggagttcatttctcattctaaag

SEQ ID NO: 307473 - DNA, 630 bp, Homo sapiens
catggtatagttttcttttgactgcattttcctattaaatatggtattgttttattttaattgtgttttcttattaaatatggtattgtttaattttgacaaataacattctaatggctttcatttggtctctgataccttaggaagagtcagggaacaatcacacaatcttgctacttgtttagtgtcccgcttttaacaacayattcaggaacccaagctctaaccatgggatgggccactggaccatctattgcatgtcctctgtcagattcactgcaatgggtcacagcatttactcagatccactacctactaatcttaggagatatttgcccttccagtttctcagtgcctagttactctgcaaatggccacaagtacattttgtttcagaatcttactttcacaggctgtaggtaattgtttatttcaagctttaatatgctaaaaaatcaacttcttaaacccactctccagtgcacaggtcaacatattaaatgccaaattctgaattagacctactgctttgataaatttggcccagttcaacttaatacactgtgttatttgatttgacatccttaagggtgacaagatcttgtaattttctttgatgtacaggctatc

SEQ ID NO: 307474 - DNA, 538 bp, Homo sapiens
aaaataaacacctgctggaaataaagtttaagaatatttggagaaaagattcacaattttggctctagctaccaaaatgcccctaaaccaagtcttcaaatctgatttgcttttaaacagtgacctattctaggcataagtgacttgaaagttgcacatttactggtgttgcaatctttaacctgcagtttgatttggattctggtctttggcatgcctttcttatagctatgagacaagagmttgttttaagattatcatgaaagctttctgcttttcctcatatgtctataattggaaattaagggcccacagattatcacttgtttttttttcttttgtaagttctcaagaatagttaaagacagacatcccaccccacagtctgtaatcagtatgactgtcatattgatcaaatgctatcaactgtggattacataaacctttgctctccattggtacttcaacccaagccactacctgggatcaacctcaaaggcatgcagtctataacagtcccacagtgttctgtacttat

SEQ ID NO: 307475 - DNA, 538 bp, Homo sapiens
aaaataaacacctgctggaaataaagtttaagaatatttggagaaaagattcacaattttggctctagctaccaaaatgcccctaaaccaagtcttcaaatctgatttgcttttaaacagtgacctattctaggcataagtgacttgaaagttgcacatttactggtgttgcaatctttaacctgcagtttgatttggattctggtctttggcatgcctttcttatagctatgagacaagagattgttttaagattatcatgaaagctttctgcttttcctcatatgtctataattggaaattaagggcccacagattatcacttgtttttttttcttttgtaagttctcaagaatagttaaagacagacatcccaccccacagtctgtaatcagtatgactgtcatattgatcaaatgctatcaactgtggattacataaacctttgctctccattggtacttcaacccaagccactacctgggatcaacctcaaaggcatgcagtctrtaacagtcccacagtgttctgtacttat

SEQ ID NO: 307476 - DNA, 630 bp, Homo sapiens
gaaataagaaaatattacaataactatcttgaatacatagatattgattattttagaacatcaaattgttatgaaattttcaaaatattgtgtgctaaaaccatagcaaatgctacaatttatatctgggaggagtaacgtagtctataatatatgtcatgaacactgttgatttctaagtaaacaccattaaaacaaatttatgaatattttaagatttgtatttataaatattttgatctgtaagcacaaactgagcacccaaaaacactgcagcacttgataaggcaaatatttatcaggagacttttttttctgtgtgcattatttattttcagataagtaagatcagcatgctttgaaggagctcatcctaaagtgtcaaggcactaggtaacaaatccatggctgtttaaatgattgtttttccctgagagaaaatataktttggtttggagacctaacttcattatgcttcagtacatactgagtgaaaaacacaatttccgtcattaatgtgtttataaaagctttttgttgtctgcactgaaaagtcagtcggttgacttattttcttgtgatgtattgtctggcagtaaaagctaatgcactctatagcatcggtaggct

SEQ ID NO: 307477 - DNA, 564 bp, Homo sapiens
aatacaaaacaagaattaactacgttataagaaaaagtgaaaaaagattagttcagacttctattagtgtagttcatgcagttaactcctgtttttatattcatggacatttaagctcttcatgagtcttgtatatttttgtctctattcaaatgttacaatcttcaaagctattaaaattctgcatttgaggacacctgttaaartcctatagccttattataaatgatctttagaaaagaaacaagtcaagacaacaattgtctgcaaatgataaaattttcagggtagttacagttaaaaacacaactgacaaatatatttggttacttctgtggtttacaataaccttaaccttaattatgattgataacatatacttagatattagaattcagaaatcccatacaatcttggaacatatattagtattattcaccaaaatataaccaaaacaagattggccatcattttggcaatcccatgtaactaaacatgttaaataatactgtttacctcttctctggatgttccaggggccctctgaaacatccagacaaccag

SEQ ID NO: 307478 - DNA, 374 bp, Homo sapiens
ttgtgagttccctattaactgtgttaatagtgtctcttgctgcatatttttttaaatttccattaagtcaaatttttctgtttttttacttggttgcrtatgctttgtatcatatgtaagaaattaatgccaaatccagtgttctgaagctcttgttctatgtcttcttctaagagttttatagctttaagtcttacatttaggcctttgatccattaagttaatttttatatatggtcttaataatctaacttcattatttttcatacagatatctagttttcccagtaccatttgctgataagactgttctttaccaatgagtggtcttggtacccctgtcaaaaatcattttcatgtatgtgaaggtttat

SEQ ID NO: 307479 - DNA, 488 bp, Homo sapiens
aaatatatttgttatttatctaaaattcaaatttaagcccagcatgatggtatatccctatagtaccagctactgtggaggctggggcaggagaatcacctgagcccccaaattcaaggttacagtgagctatgaacatgccactgcactccagcctgagcaacagagcaagatactatctctaaaattaaaaaaagagagagaacacagagttaattgtgttgcatattgtatatggaactctgtgagatacatcattgaaaaaaatttcaaaatactcaagataaagagatcttaaaatcttacagaaaaaaattaaaagaatcagatataggaatgacatctggctttccaaaagcaactacaaaaaagatacacaaaaattgagcaatgcctttaaaattctgggggtaaaaatttcatcttagaattctrtacccaggcacactgagttagtttggatattctcagacatgtgatgtctcaaa

SEQ ID NO: 307480 - DNA, 602 bp, Homo sapiens
gggaagagaccatgcttgtttgcctcctctgcttccaaaggcacgattaaaataaacagttaggatcaagaatggcattctgtgatctcttggatctttctcccttggctttgcagagcatgagaaatctaaacattctgctgcttagtatattgcagatgatgagtgccaccaccaagattcagacttacccccaaactcctaaatggatcctctttttcttctctttatccaagagtcacccaagcaagaaggcgggagtaaagagtgttcttacccacaaactcttcaattctcttccttcctttactctccagacttctttaaatagataagaagtagggtgttggaagagaatacaggaactttctattggaacgtatccactttcatatctacgggctgtaagtttatatcttttccctgagggaaaaaaaatacctacagaaatcttaagtttatgctttcttgagtttagaagctaccaagtggattggcattgaacaaattgcttacattktctataattcagcttccacatctgtaagggtcatagacttaatgatctcaaacaactctattaatttcccaaatattttgtt

SEQ ID NO: 307481 - DNA, 624 bp, Homo sapiens
ataacaaactagctcacactctgtggctttcagcaatagtcatttaattttactcaatagcctacagattggcttcacaatttttctggtctggttcaggctgactcatgagtcagctgaaagctggtaggtggctttattatgtttgtttgggctctaatacattttggggccagtttggacttgctttcatggttgtagcaaggatttaaaaagaaagtagaataatgaataatgtcagtcatcttatggcctgtaacagaactgacataacatcacttctccacttttattgtacaaagcaagtctcaaggcctgcccagattcaaggcatagatagacagactccaccttctcatgggaggaacttcaaagtcacattgcaaggggcatgaatacaaagagagaacaaattgaagccattttgacagtcaatttatyagagttacttaatcatttttaaaaagaaaataaatacatgagaatccaccacctaaaggaacaactagacctttggcaacacttaaatgtaataatatactttcctcatcatatcactgcccttcttcccaactcaaaccatcatctgaatcacatgatcatcattcacttgcgtttattttt

SEQ ID NO: 307482 - DNA, 567 bp, Homo sapiens
ctgaaagctggtaggtggctttattatgtttgtttgggctctaatacattttggggccagtttggacttgctttcatggttgtagcaaggatttaaaaagaaagtagaataatgaataatgtcagtcatcttatggcctgtaacagaactgacataacatcacttctccacttttattgtacaaagcaagtctcaaggcctgcccagattcaaggcatagatagacagactccaccttctcatgggaggaacttcaaagtcacattgcaaggggcatgaatacaaagagagaacaaattgaagccattttgacagtcaatttatcagagttacttaatcatttttaaaaagaaaataaatacatgagaatccaccacctaaaggaamaactagacctttggcaacacttaaatgtaataatatactttcctcatcatatcactgcccttcttcccaactcaaaccatcatctgaatcacatgatcatcattcacttgcgtttatttttacatatttgtattgcatatataaaagttactttttggttgtttttaatttttgcaggtt

SEQ ID NO: 307483 - DNA, 611 bp, Homo sapiens
gaatattgactcatcagcttcatattgcgaccttcatttttctttgcaaccccaattcattatcaatttttttatctcctaataaatgtatccctggaaaatgcctaaaattatttggagaacaactgtaaattttttaaattaatacatctattaattaattaatcaattataaatgcaaaataattttcaataattaaatgctctcattctgtagtgaaaagaaccaaaccacatggacaaactcatctatttcccaaatcctatttcctctggtttccagttttaatcagaaaatattctgagcttttaaaaaggtcccaggacatgaaatagtcatatgcaaataaccattgtagctgttaatttcaatatgtcaaaatattagacttacatctctctatggatatcagcgttttaaaaagaggaatgacatccctgatttcattctattaaggcatttaaagtaagcaatcccacaccgctctctaatcactcaacagagaagagggtttagctgtgcaggcacagactgaaatccttgttcctcctagtgtaattcactgsaaatagaaatactgggcagagcaagcattgccaaccaaggcaag

SEQ ID NO: 307484 - DNA, 494 bp, Homo sapiens
gatttcattacaccatctaatttaaagatgacatgtaaataaataggagaacttcttccaatattactrttgggggaaataattcactttaaaattattgtattctttgtgacttttaattgtcctcagtgtcaaacaatttctccctctttctaaaactcctttgcccttgataaagaacaaaactgatatgtattgaatatcacgtgccatgtgtgtacctttagtatatatcgacagatgatgaaattggtagcagagcaatcctacgacaaatctggattcaaacccaagtcttctaatagtgatatctctcaggacttctgcctaaaagaataaactaggggactccaacaacattgctgtcatccacacctcagttgtatcattgctatgttttgaagacctagaacagccatctcactcagaaacaaaggtttttaaaacacatgtagaagaaaacacaaggaagcagaaatgttctggtggcctac

SEQ ID NO: 307485 - DNA, 516 bp, Homo sapiens
aggctttgcttctgcagcatacctctgcctggacatccaggcatttccatacatcctctgaaatctaagtgaaggttcccaaacctcaattcttgtcttctgcacaccagcaggatcaacatcacatggaagctgccaaggcttggggcttgcaccctctgaagccatggcctgagttgtaccttggcccmttttagccatggctggagtggctgggatacagtgcaccaagtcccaagtccgtacacagcagggaaccctggacctgacccaggaaactatgttttcttcctatgtttcatcctgtgatgggaggggctgcagcaaaggtctttgacatgccatgtagacattttccccattgtcttggtgattagcattcagctcattacttatgcaattttctgcagcaggcttgaatttctccccagaaaatgggtttttcttttctattgcattgctaggctgcaaatttttcaaacatttatgctctgcttcctcttgaatatttcgctg

SEQ ID NO: 307486 - DNA, 638 bp, Homo sapiens
ctctaagtaccactttaggtgaattctgcaagctcgatgcagtgtttttgctgtcatttagttctaaacgttttctgatttacattttgatttattctttgatctttgaaatctttagaagtgtaactaaacatttctgaatatgattttcttttgctattgtttttaagttagctgcatcgtgcttgagagtgcttggtcagtaggattgtctctctttttgagatgttaggaaacattgatgaccaccatccagatcagaggtcagcaaactgtggtggcccattagccaaatcctgaccactgcccgtttttgtaagtaaagctttattggaatgcagccatacmtattcatttgtgtattgtttatggcttcttttgagcagaggtgagtagttgccacaaagaccatttaggcctgtgaagcctaaaatactatctggcctttaacaaaaaccttgtcaaatcttggactggatctgtcattgtagtagggttgcaaaatggtgattctatattccttctatattccagttctataacctttcttcatttaatagatgggatcatttaataataagatattttccctattaattatttggttacccttaggtattgtttgcacgagaaaggca

SEQ ID NO: 307487 - DNA, 587 bp, Homo sapiens
gatgtgatcccttggtctggctgctgcctctgatcacctcctccctgctgctctgtcccgtgccctcagcaccccctgtgtgacccttgctccagccatgccaggccatagcagttctctgaagggccctgcagtgtcacactctggtgccttttcatagactggatcaycctttctttacccttccccagctcatctcaagttcagctggagctgttccttgtctagggtcccattcctcttttccaccatcctggccgtgtctacgcagccacctctttctcctttttgactttgtgcttctttttaaggcagagactacacacaccctattcagttttagattctggacacagcgctgagctggggcacagttgaaactcagtgtttgttgcatggcagaaggggtaggggcagggccaggctgagcaaggcccagagaggggcacatgcatggtggcctgatgtgttcctggattgacaagtggaccacatgtccgagatccctcactccagcatccagtttctcccagatttgatctctctcatcttttcagcttcagctcctaaacctctcctctggttca

SEQ ID NO: 307488 - DNA, 587 bp, Homo sapiens
gatgtgatcccttggtctggctgctgcctctgatcacctcctccctgctgctctgtcccgtgccctcagcaccccctgtgtgacccttgctccagccatgccaggccatagcagttctctgaagggccctgcagtgtcacactctggtgccttttcatagactggatcatcctttctttacccttccccagctcatctcaagttcagctggagctgttccttgtctagggtcccattcctcttttccaccatcctggcmgtgtctacgcagccacctctttctcctttttgactttgtgcttctttttaaggcagagactacacacaccctattcagttttagattctggacacagcgctgagctggggcacagttgaaactcagtgtttgttgcatggcagaaggggtaggggcagggccaggctgagcaaggcccagagaggggcacatgcatggtggcctgatgtgttcctggattgacaagtggaccacatgtccgagatccctcactccagcatccagtttctcccagatttgatctctctcatcttttcagcttcagctcctaaacctctcctctggttca

SEQ ID NO: 307489 - DNA, 587 bp, Homo sapiens
gatgtgatcccttggtctggctgctgcctctgatcacctcctccctgctgctctgtcccgtgccctcagcaccccctgtgtgacccttgctccagccatgccaggccatagcagttctctgaagggccctgcagtgtcacactctggtgccttttcatagactggatcatcctttctttacccttccccagctcatctcaagttcagctggagctgttccttgtctagggtcccattcctcttttccaccatcctggccgtgtctacgcagccacctctttctcctttttgactttgtgcttctttttarggcagagactacacacaccctattcagttttagattctggacacagcgctgagctggggcacagttgaaactcagtgtttgttgcatggcagaaggggtaggggcagggccaggctgagcaaggcccagagaggggcacatgcatggtggcctgatgtgttcctggattgacaagtggaccacatgtccgagatccctcactccagcatccagtttctcccagatttgatctctctcatcttttcagcttcagctcctaaacctctcctctggttca

SEQ ID NO: 307490 - DNA, 587 bp, Homo sapiens
gatgtgatcccttggtctggctgctgcctctgatcacctcctccctgctgctctgtcccgtgccctcagcaccccctgtgtgacccttgctccagccatgccaggccatagcagttctctgaagggccctgcagtgtcacactctggtgccttttcatagactggatcatcctttctttacccttccccagctcatctcaagttcagctggagctgttccttgtctagggtcccattcctcttttccaccatcctggccgtgtctacgcagccacctctttctcctttttgactttgtgcttctttttaaggcagagactacacacaccctattcagttttagattctggacacagcgctgagctggggcacagttgaaactcagtgtttgttgcatggcagaaggggtaggggcagggccaggctgagcaaggcccagagaggggcacatgcatggtggcctgatgtgttcctggattgacaagtggaccrcatgtccgagatccctcactccagcatccagtttctcccagatttgatctctctcatcttttcagcttcagctcctaaacctctcctctggttca

SEQ ID NO: 307491 - DNA, 569 bp, Homo sapiens
tgactgtacttgggaaggatctttaagaggtaatgaaggtttaatgaatctttggggtgggccctaatccaatatgactggtgtccttgtaagaagaggatattaggtcacagacacccacagaggaaggacacatgaagacacatggaagagacgggcattttcaagcccaggagaatggccttagaaaacaccaaacctgctgacactttaaacttggacttctggcctctaaaattatgagaaaataaatgtgttcttttaagatgctcagtctgtggtacttggttctgacagccctagcaaatcaatgcaaggtaacaccataagctgatccaactgcagtgtcctccagccacagtaccttggttcttgtggggtcagactagccaaagagtatgggaggcaaggggagaggctcagcgtagatcatcttgaacaacatgcattgagcctrctttgcagtcagggctgaattggtgcaccctacccctgccctcaaggagcccttgatcccatgagggagacggacttacagtgaggaatacttgttgtgtgaatcgtggtga

SEQ ID NO: 307492 - DNA, 598 bp, Homo sapiens
ttaccctcatttttttttttttgagatggagtcttgctctgttgcccaggctggagtgcagtgtggcgtgatcttgtcttactgcaatctccgcctcccgggtttaaatgattctcctctctcagcctcctaagtagctgggactacaggcatatgtaccctctttttataattaaagatttcttaccaaaaatccagatgtccagcttctggtggacacagaatatctgagaacagtagctggcattcccatgcggcaaccatcagcagtaattcaatggcaggtgcccccacagtaggtcattttctttctctgccccatyccagcaggcatttgcatgtaagattgccaagtctagcccaacactctccttttacagatgaggaaacagtggggatgtgactcatccaattttacacatgtgagtgacccagcatcggatgagatctcaggcctcctaacactcagtcacacatgcattccacacctctgcttgccttcttttgccttagtaccctggtggaaagggtagaggagcaaggggatatggtcttcttttagttttaattgatagtaactattaagaaaaagagcagc

SEQ ID NO: 307493 - DNA, 555 bp, Homo sapiens
ccacatgcgcagtaactgtgcgtgcttgttcatacattgcatgtctcattagcatcttatatctccacccaggggtatgctttttactattaaaatgaacaaaggatcagtttgaggacaggtaaagtcaaaatgcacatgctctctagaagggaaagtccctattgaagatggcttagcttgaatgaactcaatgacaatgagaatactgaagtttattgtgttgattgtatggtcaccacagtcactgtgtcccgagaacatggacacttccttgactacctatcctgtctcagaagcctggtacttaacaatggatgatcacataagcatccttgctgtcggtagcaccattctgagctagcctgactgtcagctaacacttgggtgggaagtcaygtgcagcgtgcagggcgccttctatttggccgtcctggtggtctgcttctctccacgcagctcttcacaaacacaagctttcattctgccctttggttctccaaggaacacttggacagttatttaatttaatctttcttgttggtctgcattcga

SEQ ID NO: 307494 - DNA, 469 bp, Homo sapiens
tctgggaactgtgagtaacaagctatcttttcaatggaaataatctcctgagacttgttagcctcaccatacctgaataatgatcaaacctgtattttaaaacaccccatcccacaaatcttgacattggacatgcatagcaggctttccctatgaaatgggaatagtgaaataggaaggtgaagagaaacttccaagtgagcaggacttgaagcaatacattcagttatccctttttctttgaaggaaagatggcctgaggcatggaccagaagtggcccatgggaagtgcctgctggtttgactagctgctcactgtcttcaaaagaacaagattggaagattgtgataaggatgtctggggaagaagatgacttcactcccaaygagccaactgtgagacttagtcacccgtcttcagcccatacctatggcctccggaaaggcaagagtatataaatatttacct

SEQ ID NO: 307495 - DNA, 469 bp, Homo sapiens
tctgggaactgtgagtaacaagctatcttttcaatggaaataatctcctgagacttgttagcctcaccatacctgaataatgatcaaacctgtattttaaaacaccccatcccacaaatcttgacattggacatgcatagcaggctttccctatgaaatgggaatagtgaaataggaaggtgaagagaaacttccaagtgagcaggacttgaagcaatacattcagttatccctttttctttgaaggaaagatggcctgaggcatggaccagaagtggcccatgggaagtgcctgctggtttgactagctgctcactgtcttcaaaagaacaagattggaagattgtgataaggatgtctggggaagaagatgacttcactcccaacgagccaactgtgagacttagtcacccgtcttcagcccatacctatggcctcmggaaaggcaagagtatataaatatttacct

SEQ ID NO: 307496 - DNA, 479 bp, Homo sapiens
atggggtaggaaataggtggcaattctctgtgttatcttcacatctgccttgtaaatctaaaactctcctaatataaaatacttatttaaaataagtgttatgtgtgtatgaatttaagaaaaacatcataggttatayatcaaactgggaatgtttgcctttggaaagggaaacaggacttgggccaggaaggatggcgggtgagaggaaattcatccatttcactctgtatgtttctgcagtatttggatattttagacggacaaagtgatcatatatgaattctgtacctgacaaaacagcacgagtacatgtagtttggtcctatccaaaatttgtaatcaacctgtttataggcatgaagtgaaaagtctgaattttggaatgtctcatacaaatctaaggagatctgaaaagatggaggaaagcatgatagtggtaaactttgaagtccttactttatttatgcattttgcct

SEQ ID NO: 307497 - DNA, 404 bp, Homo sapiens
accaaccctttctaggagtcttgtctttgcttcctttattctttcctcgattcttgtaattgaatgttacaaagtatatcaagaggaataaacgtatggggcccctctcttccaaacaagaaaaggttaagcttttaattacaggccctcaaactatcattttgtgcaattagcaattaactataatcgttgatgagcaaatgcaaagctgcgctagcaatttcccttctcctcatcccaggctgggttatttcagtcttgttctattacagaggaccagmcacaaccgcgcgcactctctttcaaacatacacactctctcacttaaagacacatttagttttcggcaaaacggcatctcagcgtgcgattgagaccggcatcccaaaccccacttttgagca

SEQ ID NO: 307498 - DNA, 609 bp, Homo sapiens
cacagcaggacaaatatcttatgttctcaatcgtatgtggaagcttaaatatttcattccatggaggtagatggtagaaagatgacagagactcagaagtagggggaaagggagagcagatgaaaggaagtgggttaaagaatacaaacctacagtaaggtagaagaaataacgtcartgactgtagttaacaaaaacgtgctcgcgtgatggacaccctaaatcctcggatttcatcagtatagattcattacatacatgtaacaaaattttacatgtacctcataaatttatacaaacaccaccaagaagaaccctgtttttcttggagccagtgaactgccaatgtgtctgtgtagcaaagttaactacttagagaagcaaggctcccaggaaaataggtccttgaagttagtgtgcatattctatagtctgattccatctatataagtgacagtaaaagtgagaattttttgacgctccaggaattcattcattacaaatttaaataggcacataagtgagtaggtacaagcgacttccaaccccctcacccaaaggagcagagatattctaaggattagagctggaagaaaacctagacaattt

SEQ ID NO: 307499 - DNA, 609 bp, Homo sapiens
cacagcaggacaaatatcttatgttctcaatcgtatgtggaagcttaaatatttcattccatggaggtagatggtagaaagatgacagagactcagaagtagggggaaagggagagcagatgaaaggaagtgggttaaagaatacaaacctacagtaaggtagaagaaataacgtcaatgactgtagttaacaaaaacgtgctcgcgtgatggacaccctaaatcctcggatttcatcagtatagattcattacatacatgtaacaaaattttacatgtacctcataaatttatacaaacaccaccaagaagaaccctgtttttcttggagccagtgaactgccaatgtgtctgtgtagcaaagttaactayttagagaagcaaggctcccaggaaaataggtccttgaagttagtgtgcatattctatagtctgattccatctatataagtgacagtaaaagtgagaattttttgacgctccaggaattcattcattacaaatttaaataggcacataagtgagtaggtacaagcgacttccaaccccctcacccaaaggagcagagatattctaaggattagagctggaagaaaacctagacaattt

SEQ ID NO: 307500 - DNA, 627 bp, Homo sapiens
ttgctcatgctctggtaaaccctagtagcttttgtggatgttttttcttcagccttaactgcacttcccctcacttctccttgtcctactcgtcctttgaaacacatctcagatgccatcagtagaaaaccttctccatcactatgccatcatcatcatcactatctctcgcctcctcctctgggtttcttttctggaatcattgatgtacacatctgctttccccaatggactgtaaactcttcagagtcaggcactgtgctgtatttttttttttcttttttttagacagagtcccattctgtcacccaggctggagtacagtggagcaatctcagctcactgcaaactccacctcctgggttcaagcagttctcatatctcagcctcctgagtagatgggattacaagcatgagccaaaacacatggctaatttttgtattttttaatagagacgaggttttaccatgctgcccakgctggtctcaaattcctggcctcaagtgatcctcctgcctcagcctcccaaagtgctgggattacaggcttgagccactgtgtccagcccatatttgattttaacgtcctgtcctgaaatatgcctggaacagagcagtactcaataa

SEQ ID NO: 307501 - DNA, 557 bp, Homo sapiens
aaacagtgtattccaaagccttcactaacaacttgccttacatttcatgacctccaaagatcttgaagataaaacayggcaaaggttattctctttctttcttggcattgttcaggcacagcctaacccagcagtacttgccacccatagcacaaaaaaagcaaatgaacagagaactgagcactgagattttatcacggaaacagtgttctcaaatatcaatcacagagctgtaccttgggggcgtgaatttgaaaggataaggcaaaaaacctcctaaaatcgttcacctccgctctcatgaaatggttgataaagaatggcattgattaaagtgatttaaaactggcatgctgcgattgtcctataaactattctgaaaactggttttcatgaaaatagagagaaggtaatggaaaatggaggtgaacaggacctgggacagaagcattccaaaaacctggttagtccccaaaactcattagtctgattaccatatgcttcagttcatccccatcttcaagccatgagtcccatatttcgtggtgaattagcat

SEQ ID NO: 307502 - DNA, 573 bp, Homo sapiens
ttgaagataaaacacggcaaaggttattctctttctttcttggcattgttcaggcacagcctaacccagcagtacttgccacccatagcacaaaaaaagcaaatgaacagagaactgagcactgagattttatcayggaaacagtgttctcaaatatcaatcacagagctgtaccttgggggcgtgaatttgaaaggataaggcaaaaaacctcctaaaatcgttcacctccgctctcatgaaatggttgataaagaatggcattgattaaagtgatttaaaactggcatgctgcgattgtcctataaactattctgaaaactggttttcatgaaaatagagagaaggtaatggaaaatggaggtgaacaggacctgggacagaagcattccaaaaacctggttagtccccaaaactcattagtctgattaccatatgcttcagttcatccccatcttcaagccatgagtcccatatttcgtggtgaattagcatcctcccaggagcttttaaaaatgcagatgatcagatccaaagaataagtctccttgaggagtgggcccaggaattggt

SEQ ID NO: 307503 - DNA, 563 bp, Homo sapiens
tgttttgttttttgtggttttagagacagggtctcactgtgtcacctaggccagagtgcagtggtacagtcmtaactcaccgcagcctcaaactactgagcaaaagtgatcctttcctctcagcctcccaaagcactgggactataggcctgggctaccatgtctgccctcttttatattttatttttttttttagcagcctgaaatatagactcaattcctagaggtcccaaagtcatcttgcaatcatgaggatcaaagctatgtattaaagattgcaaagcagaaatatggaaggatcctggatccttgatgacatccttagcacctcccaccagcccccaactgccaatctttgggcatcttgtcataggagagaaataatgcctacatgttgaagccatatttagtattctttcagttacaggcagcctaacataatcctaaaaggtggatgcaatgaaacgtccttaaattgactttatctagtcatagtttgcgatgttcttatataagcaggagctaaaatcgacttttgccaaattaattttagaagaaatcaa

SEQ ID NO: 307504 - DNA, 563 bp, Homo sapiens
tgttttgttttttgtggttttagagacagggtctcactgtgtcacctaggccagagtgcagtggtacagtcataactcaccgcagcctcaaactactgagcaaaagtgatcctttcctctcagcctcccaaagcactgggaytataggcctgggctaccatgtctgccctcttttatattttatttttttttttagcagcctgaaatatagactcaattcctagaggtcccaaagtcatcttgcaatcatgaggatcaaagctatgtattaaagattgcaaagcagaaatatggaaggatcctggatccttgatgacatccttagcacctcccaccagcccccaactgccaatctttgggcatcttgtcataggagagaaataatgcctacatgttgaagccatatttagtattctttcagttacaggcagcctaacataatcctaaaaggtggatgcaatgaaacgtccttaaattgactttatctagtcatagtttgcgatgttcttatataagcaggagctaaaatcgacttttgccaaattaattttagaagaaatcaa

SEQ ID NO: 307505 - DNA, 640 bp, Homo sapiens
ctcatcccaatatgcaaatggatttttgtgaatatatgatggaatcgcgtgcataaaatctgttcaaatatatgcacctagaaacagaagttttggtgccctctgaggacatcaagaaatcatctcaaccaggctcttaccttgattcaggtaaggtttatttacctcgtttggcaggtggtataactgagaccgagagaagttaagagaaatgcccagagatggatctgtttcccatgctgccacccactccctatgtccacagcagatattgttaatcaatcacattactcrttcccgttggaaggccttcttgttgcagttctctagcaaccaacgcaaatctctcagagttgacactcaagacctgtttgtcatcctagcatgtgcttgagtgttaaaaaccagaaaaaagaactagaaatcagtctctatagtctcctagtgcactgttctttttgaaggatttccctgtaaattcagaaaacctgtgcagactacgctcagttatccttaatacctagtatgttttgttaagtaagcctctctgcctccttcttttttttttctttttttttttttttgagacagggtctcactctggcacccaggctggagtgcagtggcgcaatcatggctc

SEQ ID NO: 307506 - DNA, 640 bp, Homo sapiens
ctcatcccaatatgcaaatggatttttgtgaatatatgatggaatcgcgtgcataaaatctgttcaaatatatgcacctagaaacagaagttttggtgccctctgaggacatcaagaaatcatctcaaccaggctcttaccttgattcaggtaaggtttatttacctcgtttggcaggtggtataactgagaccgagagaagttaagagaaatgcccagagatggatctgtttcccatgctgccacccactccctatgtccacagcagatattgttaatcaatcacattactcgttcccgttggaaggccttcttgttgcagttctctagcaaccaacgcaaatctctcagagttgacactcaagacctgtttgtcatcctagcakgtgcttgagtgttaaaaaccagaaaaaagaactagaaatcagtctctatagtctcctagtgcactgttctttttgaaggatttccctgtaaattcagaaaacctgtgcagactacgctcagttatccttaatacctagtatgttttgttaagtaagcctctctgcctccttcttttttttttctttttttttttttttgagacagggtctcactctggcacccaggctggagtgcagtggcgcaatcatggctc

SEQ ID NO: 307507 - DNA, 640 bp, Homo sapiens
ctcatcccaatatgcaaatggatttttgtgaatatatgatggaatcgcgtgcataaaatctgttcaaatatatgcacctagaaacagaagttttggtgccctctgaggacatcaagaaatcatctcaaccaggctcttaccttgattcaggtaaggtttatttacctcgtttggcaggtggtataactgagaccgagagaagttaagagaaatgcccagagatggatctgtttcccatgctgccacccactccctatgtccacagcagatattgttaatcaatcacattactcgttcccgttggaaggccttcttgttgcagttctctagcaaccaacgcaaatctctcagagttgacactcaagacctgtttgtcatcctagcatgtgcttgagtgttaaaaaccagaaaaaagaactagaaatcagtctctatagtctcctagtgcactgttctttttgaaggatttccctgtaaattcagaaaacctgtgcagactacrctcagttatccttaatacctagtatgttttgttaagtaagcctctctgcctccttcttttttttttctttttttttttttttgagacagggtctcactctggcacccaggctggagtgcagtggcgcaatcatggctc

SEQ ID NO: 307508 - DNA, 518 bp, Homo sapiens
ctggctttcaaaatatggtccttgaaccaggatgatccatatcacctgggaaattgttagaaatgtaaactcttgggctccaaaccagacctactaaaatagaaactgtggggtgtggcacagaaatctgtttaataagccctccaggtgatttaagaaccactgccatagaagaatttgagagggaggtagtgcaagattagtatagcaattccatgaagttgggacctggactctctgctcaccattccttcacccctaaggcacaaaccttgtccacatgatatgatatggctgctggagtttcagccatcacattcaagctcaaaggagaaggatggagaaaaacctagagaagagcactcactcttctttcacatgacttcctgaaaggacttcttgtcctcttagatctcattggcacaaaaacttytctgtgaagaacaccagaaaatgttatcttttagctgggcacatgaccacacccctaaaaattaaggttctattcatgaggtgct

SEQ ID NO: 307509 - DNA, 605 bp, Homo sapiens
aaaatacaatcatccttcccaatagtcctccaaagtcttaattcattccatcattacctcaaagtccaaagtctcaactgagacttaagaccaagttccttccacctatgagcctataaaataactcttgggagttatttactcccaagatacaatggtggtacagacattgggtagacattcccattccaaaaggaaaaaatcagccaaaaaaaagggacaaaaaaccccatgcaggtctgaagcccagcaaggtattcattaaatcttacagctccaacataatctcctttgactcaatgttctgcatacaggacacactagtgcmacaggtgggctcccaaggtcttgggcagctctgcctctgtggctgctctcacagtttggaatctggtacctgaagcctttccatgctgagggtgcaagctgccagtggctctaccatcctggtgtctggagagtgagagacttgtttccacagctccactaggcaataccctggtggggactctgtgtgagggctccaaccccacctttccccttggcactgccccagtagaggctctttgcagggttccaccactgtagcaggcttctgcctaggc

SEQ ID NO: 307510 - DNA, 605 bp, Homo sapiens
aaaatacaatcatccttcccaatagtcctccaaagtcttaattcattccatcattacctcaaagtccaaagtctcaactgagacttaagaccaagttccttccacctatgagcctataaaataactcttgggagttatttactcccaagatacaatggtggtacagacattgggtagacattcccattccaaaaggaaaaaatcagccaaaaaaaagggacaaaaaaccccatgcaggtctgaagcccagcaaggtattcattaaatcttacagctccaacataatctcctttgactcaatgttctgcatacaggacacactagtgccacaggtgggctcccaaggtcttgggcagctctgcctctgtggctgctctcacagtttggaatctggtacctgaagcctttycatgctgagggtgcaagctgccagtggctctaccatcctggtgtctggagagtgagagacttgtttccacagctccactaggcaataccctggtggggactctgtgtgagggctccaaccccacctttccccttggcactgccccagtagaggctctttgcagggttccaccactgtagcaggcttctgcctaggc

SEQ ID NO: 307511 - DNA, 624 bp, Homo sapiens
aaagcatttcagaaaacatacacagacrctgttgggtatggacaagggtccagtctgagtctccatgctacacaaaagatggaagagaaaagcctccacttccatgccaggctgagaatttaggaggagaacctgaccacgctactacctctgtagtgtaagagcctcttgctattaacttgtcagccatgagtaagaaaaggggctcttgctcaatgatttgggggagctagacttgagcttctactattcaagtcatgaggcttgaatacactaaagggaaggggtgggtagttaccatgagacacacagaggaatattacagcttatatggattaaggtcagcctaattagtgcatggaaacagccaaactcaaagctgtgtgattagagagtctacgtgtgttaagggcaaagataatgggctatagattgtattttagggaggcctagcaaaggagcgacatgtaaatgagctcaccataacctacacaacaggcggtttgtctctgggcacttctcacctgctctacaagctgtcttttctccagcaccaatcctgagatcttgtttttgctttcaaacaatcgtctgcctaattcccactaactctaaaacagcaaa

SEQ ID NO: 307512 - DNA, 624 bp, Homo sapiens
aaagcatttcagaaaacatacacagacgctgttgggtatggacaagggtccagtctgagtctccatgctacacaaaagatggaagagaaaagcctccacttccatgccaggctgagaatttaggaggagaacctgaccacgctactacctctgtagtgtaagagcctcttgctattaacttgtcagccatgagtaagaaaaggggctcttgctcaatgatttgggggagctagacttgagcttctactattcaagtcatgaggcttgaatacactaaagggaaggggtgggtagttaccatgagacacacagaggaatattacagyttatatggattaaggtcagcctaattagtgcatggaaacagccaaactcaaagctgtgtgattagagagtctacgtgtgttaagggcaaagataatgggctatagattgtattttagggaggcctagcaaaggagcgacatgtaaatgagctcaccataacctacacaacaggcggtttgtctctgggcacttctcacctgctctacaagctgtcttttctccagcaccaatcctgagatcttgtttttgctttcaaacaatcgtctgcctaattcccactaactctaaaacagcaaa

SEQ ID NO: 307513 - DNA, 624 bp, Homo sapiens
aaagcatttcagaaaacatacacagacgctgttgggtatggacaagggtccagtctgagtctccatgctacacaaaagatggaagagaaaagcctccacttccatgccaggctgagaatttaggaggagaacctgaccacgctactacctctgtagtgtaagagcctcttgctattaacttgtcagccatgagtaagaaaaggggctcttgctcaatgatttgggggagctagacttgagcttctactattcaagtcatgaggcttgaatacactaaagggaaggggtgggtagttaccatgagacacacagaggaatattacagcttatatggattaaggtcagcctaattagtgcatggaaacagccaaactcaaagctgtgtgattagagagtctacgtgtgttaagggcaaagataatgggctatagattgtattttagggaggcctagcaaaggagcgacatgtaaatgagctcaycataacctacacaacaggcggtttgtctctgggcacttctcacctgctctacaagctgtcttttctccagcaccaatcctgagatcttgtttttgctttcaaacaatcgtctgcctaattcccactaactctaaaacagcaaa

SEQ ID NO: 307514 - DNA, 585 bp, Homo sapiens
atagtgtgttccctggctctgggctttctctgttgtgctgtggatttaggagaacgagaaggaatcagcagtgaaattccttctgactaaagatggacatcgcttatgaacagatgaactatattagtagtgggagaaggggagataatcacaaatgctgcagagactaaaaatacaatgaagatgtcatgaataatttcatggtaatgaatttgaaaacatgaaatgtgcaaagtttcataaaatgtaaattaatgaaaccaactcaaaaatagaaaacctcaatggtgttatgacaaacaaatggaatctgtagttaaacatctttccataaaaagcaagcaaacaagcaaacagattacagtaggaggttttacacataagtcataccaataatttcaagaataaataattccaaacatatacaactctttttgacaatataagagggaatactatctacttattttrtaaaaatagcataactttgacactaaaatcttttttttgaatttttttttcactggtatgtaatagtcatacattttttgaagtacgtgtaatgttttgatacatgcatgcaat

SEQ ID NO: 307515 - DNA, 585 bp, Homo sapiens
atagtgtgttccctggctctgggctttctctgttgtgctgtggatttaggagaacgagaaggaatcagcagtgaaattccttctgactaaagatggacatcgcttatgaacagatgaactatattagtagtgggagaaggggagataatcacaaatgctgcagagactaaaaatacaatgaagatgtcatgaataatttcatggtaatgaatttgaaaacatgaaatgtgcaaagtttcataaaatgtaaattaatgaaaccaactcaaaaatagaaaacctcaatggtgttatgacaaacaaatggaatctgtagttaaacatctttccataaaaagcaagcaaacaagcaaacagattacagtaggaggttttacacataagtcataccaataatttcaagaataaataattccaaacatatacaactctttttgacaatataagagggaatactatctacttattttgtaaaaatagcataactttgacactaaaatcttttttttgaatttttttttyactggtatgtaatagtcatacattttttgaagtacgtgtaatgttttgatacatgcatgcaat

SEQ ID NO: 307516 - DNA, 455 bp, Homo sapiens
ctcaataaagttatgtcatgcaaagatcacaacagctactaggaatcaaagcttggttttaatccaactacttatcctgttatattatttttactttagatttaaatatatttgggaaatctyttgattatttatgaaaattgaaagattcagagagaaagacacaagttgtcatggagacaaaaatcaaattcagataccttgtactctttttggtcctataccattgcattcagctgtcttcaaagttccataaaagttaagaaatggcaatatgagttctcaaggtgtatgtgtgcataatgctcaagctctccttggtcttaggaaactttgtgctcatgtagttgtgagggcatgaaacactttacacggtccctaaaattccacattcttgacttacttatagagaacaaatattttctgatgcatctgtaaactttgttttgtcttta

SEQ ID NO: 307517 - DNA, 615 bp, Homo sapiens
aagaataaactaaacccaaggttagcagaggaaagaaaaaacaaagattagagaagaaataaatgaaaaatttattataatgacattagaaaaccctcagtaagactaagagttggttttctgaaaaggtaaaaaaaaatcgacaaactcttagctagacttagaaaaaaagacaaaaggctcaaataaataataccaaaaatgaaagaaaatatgttactactaatgccacagaaatgaaaatgatcataagacacaactatgaaaaattatacaccagtaaactataacctaaaataaatggataaattcctacacatatacaatctatcaacattaaataatacagaaatagaatgtttacaacaggcttataatttgcataaagattgattcagtaatttaaaaattcccaacaaagaaaagcttaggaccagacgstttcatgggtgaattctaccaaatatttaaagaattaaccctaatatttctcaagctcttcctaaaatattgaagagaagaaggctgttaaattgttcctgtttacagacaatataacctgatttgtagaaaaccctaaagactccaccaaaaagctgttagaactaacaaaca

SEQ ID NO: 307518 - DNA, 587 bp, Homo sapiens
acaaagtatacccaatgaaagtatctaagaagatgaaccatctccattgtgttaactaccttgaggccatcatactgaggtagttcaagctgcaargaaaggccatgtgtgggcattctggccgacagtcccagctgagctcaaccttaatgtcatctgagaccaagtgcaagaaatatgtctgaaggatcctccaaatgatttctacctccagccatttaattagtccccaagtgtgcctcatacatagtcaagaagagataagacattccttcagtgccttacccagcttcttcacccacagtgtctgtgagtctattaaaatagtttttgtgtagtgtcatgatattttgcagtggtttttttctgcagaaataagtgatcaaaataaaatttggcatcaaaattgggatgctgtaataacaaaaacataaaacatgtagctttggctttggacaaattgcaagaaagaagatgtaaaagatatgtggagaaaatagtccaacacctgacaagactaaagcttgttgttgagggcttaaaggaaattgagtaagatgttattaacggctgggagaaattggcaa

SEQ ID NO: 307519 - DNA, 615 bp, Homo sapiens
aagaataaactaaacccaaggttagcagaggaaagaaaaaacaaagattagagaagaaataaatgaaaaatttattataatgacattagaaaaccctcagtaagactaagagttggttttctgaaaaggtaaaaaaaaatcgacaaactcttagctagacttagaaaaaaagacaaaaggctcaaataaataataccaaaaatgaaagaaaatatgttactactaatgccacagaaatgaaaatgatcataagacacaactatgaaaaattatacaccagtaaactataacctaaaataaatggataaattcctacacatatacaatctatcaacattaaataatacagaaatagaatgtttacaacaggcttataatttgcataaagattgattcagtaatttaaaaattcccaacaaagaaaagcttaggaccagacgctttcatgggtgaattctaccaaatatttaaagaattaaccctaatatttctcaagctcttcctaaaatattgaagagaagaaggctgttaaaytgttcctgtttacagacaatataacctgatttgtagaaaaccctaaagactccaccaaaaagctgttagaactaacaaaca

SEQ ID NO: 307520 - DNA, 587 bp, Homo sapiens
acaaagtatacccaatgaaagtatctaagaagatgaaccatctccattgtgttaactaccttgaggccatcatactgaggtagttcaagctgcaaagaaaggccatgtgtgggcattctggccgacagtcccagctgagctcaaccttaatgtcatctgagaccaagtgcaagaaatatgtctgaaggatcctccaaatgatttctacctccagccatttaattagtccccaagtgtgcctcatacatagtcaagaagagataagacattccttcagtgccttacccagcttcttcacccacagtgtctgtgagtctattaaaatagtttttgtgtagtgtcatgatattttgcagtggtttttttctgcagaaataagtgatcaaaataaaatttggcaycaaaattgggatgctgtaataacaaaaacataaaacatgtagctttggctttggacaaattgcaagaaagaagatgtaaaagatatgtggagaaaatagtccaacacctgacaagactaaagcttgttgttgagggcttaaaggaaattgagtaagatgttattaacggctgggagaaattggcaa

SEQ ID NO: 307521 - DNA, 604 bp, Homo sapiens
tgagaattataacaagtggactggtgagtagaggacagacccacatggtgtttagaatgagaaattgatagggtaaagactgagaaataatgacttggatttttaaatgggagagtagatggaaggtgatgctgttttcagaaatagagtgaaggagtaaaacaagacagatgaagaacacaattagaaaataaatttaagactgtaaatttacaataatcttgaaaagccaaatgggtgtgagatcagtagtttaattttacaaaggtatctggactagagatattggtggtatctacatgccaatatgtttaaatattcttccatctaaatcttgttgttggatcatgctggaaaactgcatattcgtgctataacaaatrtatttattaagtttttactctgaggcaggtactattctgggcattgaggagaaagcagtgaacaaaacaaatatcccactcttttagaggttactttcagttgtgaggaacagaataataaatgaataaataaaatatatcacatggtgatagctgttttgcagaaaaataaaacaggaattagaattagcatgaggcacaggagagtaaataagggaggt

SEQ ID NO: 307522 - DNA, 380 bp, Homo sapiens
tgtgcctacctgaataatccaggataacttgctcattatatgttcagctaattaacaactttaacttcatctgcgaccttaatcacacctttccataccayctaacataaatgcaggtttcaggcattaaaatgtggaccatctttggggccccaatattctgtctttcaaagttagtcatctaattaacagaatttttaaaaatcataggattatcttaactgatgcagaaaaacatttgataaaattcaatacccattcattattttaaagctcttacaaaaatataaatagaaaagtattgtcttaattaacagcaaacatcataccaaagactgaagcatcaaaagcattctcctgggacaacaatagataccatt

SEQ ID NO: 307523 - DNA, 621 bp, Homo sapiens
gatgcagaaaaacatttgataaaattcaatacccattcattattttaaagctcttacaaaaatataaatagaaaagtattgtcttaattaacagcaaacatcataccaaagactgaagcatcaaaagcattctcctgggacaacaatagataccatttacagtcctgcatcatttaatgatgggaatacatcctgagaaatacrtcattaggtgattaggtgatttcatcattgcacaaacatcccagggtgtacttacacaaacgtagatgttataacctagtacatacctaagctatatagtatagcctattgctcctaggctgcaaacctgtacagcatgtttctacactgaatactgtaagttattgtaacacagcgggaatatttatgtgtctaaacgtatctaaacatagaaaagatacagtaaaaacatggtattataatcttatggggccaccatcctgtatgtaatctgttgctgaccaaagcactgttgcatggtgcatgactgtatattgataatgtgctagagattcaaacagggcaatcaggcaggaagtagaaaaaaagaaaagatgaatagaaagaaattatgaaaagataattacttatagttga

SEQ ID NO: 307524 - DNA, 561 bp, Homo sapiens
aaagaaggcctcagaaacagcctcagaaagtttctctctgaccttcttcttccctcctgtctgtcattcctcattcttccccaaggctaaccatggaaactagaatccctcttcctcaagatgggtcatagaaaccagaacacctttgccctaaagccagccatagcacctaaacatattatctaactttcccccacctttctatataagaactagccataaagaaattctctgatctaccttggtcgattgtaggtcataagaccctcattccagaaaaggtcctrccccatacctcggggaaggagtgctgcacggagagaccaagaagaatctaaacaacaggccttgctgggtttccttactcagtcttttcctgttagatcataccctttttgctgtcctttcttcattgaacctagcacaaaattcgatagttttctctgtacctttgggtcttcattctgaaggctcctgtctcatgtggagctatgatcaaatacatttttttttctcttgttaacctgtcttttgttgtaggggtatcagctgtaacactta

SEQ ID NO: 307525 - DNA, 561 bp, Homo sapiens
aaagaaggcctcagaaacagcctcagaaagtttctctctgaccttcttcttccctcctgtctgtcattcctcattcttccccaaggctaaccatggaaactagaatccctcttcctcaagatgggtcatagaaaccagaacacctttgccctaaagccagccatagcacctaaacatattatctaactttcccccacctttctatataagaactagccataaagaaattctctgatctaccttggtcgattgtaggtcataagaccctcattccagaaaaggtcctgccccatacctcggggaaggagtgctgcacggagagaccaagaagaatctaaacaacaggccttgctgggtttccttactcagtcttttcctgttagatcataccctttttgctgtccwttcttcattgaacctagcacaaaattcgatagttttctctgtacctttgggtcttcattctgaaggctcctgtctcatgtggagctatgatcaaatacatttttttttctcttgttaacctgtcttttgttgtaggggtatcagctgtaacactta

SEQ ID NO: 307526 - DNA, 572 bp, Homo sapiens
gcttagcacagaaagtctgcagctccgccacaacagtcaggcagccctggtgctcaaggagtgtttgcccaccacaggtgacacagttggaacttctcctatgggagatgagcatgggtgcacctgtacacagcctttctggaacacttcagggtgactacatccccacacaaggagkgccctccaggttcaggcttccacaaggagtagtcacaatccctttctacatggaacatcagcattcctgaagaagaaaagaggtacctgtctgatctaaatagctgaaacactggtcagcagtgtgactgggaggcaaatcattttcctgcgacttgacaggaggatgaggttgctccctccctaccccaatgaaaagacctcagtgcatttcactgagacctcccccagctgcctctgtcaaggctgggatctctgtccacaattggatgtcgcatttacccacctgctttagtcactgccagttgatacccatggtcacctcccatactggccagaagcctgaactgttcaatccagtaaataaaatactgagggagaaaattaataaataa

SEQ ID NO: 307527 - DNA, 544 bp, Homo sapiens
gaattagtaatttaaaagttgccagcaacaactacaaaaaagcccacagccaggtagattcacagccaaagtctaccagaccttcaaagaaaaattgacagcaatcttactgaaactattccaaaaggttgagaaagaggcaatcctccctaactcattctgtgaaaccagtatgccctgataccaaagcatgaagaggacataacaacaaaaaaagaaaactacagaccaatattcctgatgaacacagatgcaaaagtcctcaacaaaataatagcaacccaaatccaacagctygtcaaaaagataattcatcatgatcaagcgggtttcatcccagggatgcagggatggttccacatatgcaaattaataaatgtggcagaatttataaataggcagaatttaaaacaaaaatcacatgatcatctcaacggacacagaaaaagcattcaatcaaatccattgcccctttatggtagaaaccctcaacaaactagacatagaaagaacatacttcaaaataataaaagccatatatgac

SEQ ID NO: 307528 - DNA, 480 bp, Homo sapiens
atgctaatgcattataattagtgtgtaatgagcaatgaggaccagcagaggtcactgtcattgccatcttggttttgggaggttttggctggcttctttactgcaacctgttgtatcagcaaggtctttatgacctgtatcatgtgccgacctcccatctcatcctgtgactaagaatgccttaacctcctggcaatgcagcccagtatgtctcagccttattttaycccgtccctattcaagatggaggcactgtggttcaaatgcctttgacagtttgcactctttttctctcagaaatagccttttgttgttgttgttccattttcctttgtctttctgtgttattcttttataaagaggggtaccacagggtagaacatgagcctagatcccctataagcccactgttcaggctggccctgcagactggttagttttttgctgagctgactagatgagcatctgtaaagataaact

SEQ ID NO: 307529 - DNA, 553 bp, Homo sapiens
tttcaccctcttcagaccctcttctcagaataggaccatagaactagctatgagtctgaccaatgcctcccctttgtccattctcagttaaatggaatagggctgaattagcgcaacgtcaaaggttatcttgggacccccaaatagccaaaacaatctcaaaaaagaacaaagtttaaggacttacgctacctgatgtcaaaacttattatgaagttccagtaatcaaaacagtgtagtactggcatgaagtcagacatataaaccaatggaatasaatagacagctcagaaatcaactctcctgtataaggtcaaatgattttcaataagggtgccaagactactcaatggggaaaggacagtttgttaacaaatggtgctggggaaatagtatccacatacaaaagaataaagttggactcctatcctacaccatatacaaagtttaactcaaaatggatcaaagacttaagtgtaagaggtaaaactataaaactcttaaaagaaaacatatgtaaaaacttcatggcatgagatttggcaatgatttc

SEQ ID NO: 307530 - DNA, 607 bp, Homo sapiens
aaaacaaaacaaaacaaaaactgtcagccaagaataatgtacccagcaaagctacccttcaaaaatagaggaaaaataaaggctttcctacacaatcaaaaacaaagggaattcattgccactagattagttctacaaaaaaaatgcttaaaagagtcctatatctggaagcaaaaggacaaggacaatatctaccatcatggaaatataagaaaatataaaactcactgatmgaacagatacccaaatgagaaagagaaaggagtcaaatgttatcgctacaaaaaaccaccagttagtaaagataagcaaaaaagaggaagagagaatatacaaaacagtcagaaaacaattaacaaaatgacagagtaagtcctcaccaatgaaaaacaaccttgaaattccccaattaaataatatagactggctgaagaagttttttaaaaagactcaattatttgctgcctacaagaaactcactttactgtaaagacacacatagacagaaagtaaagagatgggggaaactattctagacaaagagaagccaaaagtgtgcaggggtagctatacttatatcagaccaaatggactttaagtgaaaaaa

SEQ ID NO: 307531 - DNA, 584 bp, Homo sapiens
tttgtgagttgtggttccaattacattgaatttccaaagcctttgaagagctgttttggttttcttggtgtatttgttactgctgtggctccctctggttcctgctggcactttcttaggccagtctgcctggtacctgtaagttggagaagggggtctctggtctgtggggacaaagaagcttccaggccacttgtggacagattccccttgctgttgtctcccaaacacatggtcttttgatagcagaggggagtctcaggcccaacagaaacaaaagtacaggtgggccagkttccctcttccctcttcactgtgaggtacaaagagttttttttttgtttttgtttttttttaggttgggctgctgattgtggtggagtgtttcttgctgctgttccctggaagtcaagggtctcttggttgagctgtggattcttaggcccgaatgaaaaggagagcacttttcctggctactgattgtcagtggggattccaacaaatttttattgccagactcaactggtattttgggggcttggacactatctgttgctaggtttgagactgggaatctttagacc

SEQ ID NO: 307532 - DNA, 458 bp, Homo sapiens
ggtgtatttgttactgctgtggctccctctggttcctgctggcactttcttaggccagtctgcctggtacctgtaagttggagaagggggtctctggtctgtggggacaaagaagcttccaggccacttgtggacagattccccttgctgttgtctcccaaacacatggtcttttgatagcagaggggagtctcaggcccaacagaaacaaaagtacaggtgggccagtttccctcttccctcttcactgtgaggtacaaagagttttttttttktttttgtttttttttaggttgggctgctgattgtggtggagtgtttcttgctgctgttccctggaagtcaagggtctcttggttgagctgtggattcttaggcccgaatgaaaaggagagcacttttcctggctactgattgtcagtggggattccaacaaatttttattgccagactcaact

SEQ ID NO: 307533 - DNA, 584 bp, Homo sapiens
tttgtgagttgtggttccaattacattgaatttccaaagcctttgaagagctgttttggttttcttggtgtatttgttactgctgtggctccctctggttcctgctggcactttcttaggccagtctgcctggtacctgtaagttggagaagggggtctctggtctgtggggacaaagaagcttccaggccacttgtggacagattccccttgctgttgtctcccaaacacatggtcttttgatagcagaggggagtctcaggcccaacagaaacaaaagtacaggtgggccagtttccctcttccctcttcactgtgaggtacaaagagttttttttttgtttttktttttttttaggttgggctgctgattgtggtggagtgtttcttgctgctgttccctggaagtcaagggtctcttggttgagctgtggattcttaggcccgaatgaaaaggagagcacttttcctggctactgattgtcagtggggattccaacaaatttttattgccagactcaactggtattttgggggcttggacactatctgttgctaggtttgagactgggaatctttagacc

SEQ ID NO: 307534 - DNA, 592 bp, Homo sapiens
aacctgtgttttcctgttgaccttcatatgaagagcaggaggcagatcactccttaaaactggccttatgtacttttcctaggatatacattcaaaatatggagttgtcacatgtttcttcctaaaagagttttcgtaagaactcttgctattcttagcacctcaaaatcaggagaaaagaaatgatccttcttaaacacatccatccactaattagctaaactacacaacatccaagagtctggccaacgctcactcctctctatacactgttgaccccatctctggcagaaagaggtcctgtagttctagaggcagcattccccattaccttatyaaataaatagcaatcaaaaagaagatagcaccatgctattaagtatagaaacacaacattcttaattttattcaccaataatcaggacctacagaaccacacagcacagatggatcgatttctgcctccatgaattataaattgcctttgcaacattcctctggctcagatgagctagtgttccacaatatgctggctcgtgaaatccaagcaactgtgccttcctctacacttcttcactcagcctcagcctta

SEQ ID NO: 307535 - DNA, 404 bp, Homo sapiens
tgcagtaaggcaagaaaaagaaataaaaggtttattgattagaaaggcagaaatgaaactgtctctatttgcagatgatatgattgtctatacagaaaatcccaaagaaactagaaaaaaagttattagaactaattgagtttagcaaagtcacagaatacaaattcaacatacaaaggtcaattgtatccacatacttataacaaaaaattaaaaatctaatgttttttaaaaattaccatatattatataatagcaccaaaacakgaaacacttaagtataaatctcatgaaactatgtgcaagatttctatgctgaaaacaacaaaacacagatataaggatccacagacatatagatggagagaatatgccatatttatggactagaagactcaatattg

SEQ ID NO: 307536 - DNA, 558 bp, Homo sapiens
tttaagtaactacatgaaatatctcaagccccaagtaactatacccagaaccagcaccaaccgaggcttctgaacaaaaacaacctcacaaagcaatttacccagaaagcaacatttctaagacaggagactgcctcctccaaatggctcactccattgaaaaaacgccatctgccagaggcagacaccaaataaaaggcacttggacatcaggatttgtaaaaaaacaagtactttagaaaaactcatyctgtataaacgtatccttaactcctcatgagaatattgccaaaggtgccagtaaatataaaatacaatctgtgaagctaaacagggaaagaaaacctaaaacctaagaccaggtaggaaagatgggaggaggggcaaaaagaagtgtgaaggctgggagtcctattcatgccctggtgcagcaagccagtgccagtctaagaagaagatggaggctaggaagagtttcctactctcccaccagcagtgtctgaggtgacctgtagctgggcaagtctccaccatggcactcttcacaagggaaacaca

SEQ ID NO: 307537 - DNA, 539 bp, Homo sapiens
gaggccagcctaggcaaggtctgtagagactcggtctctttaaaaaaataattaaaaaataaagatgctctaagaagtcaaaggcaacactcagaacgaacagtgtgagtggcagaatcctacactgcccctctccccaagatttcctgccctaatctctgggactataaattatcacacgctgattatgtcattgcctggaaaagaggattctgtagatgtaattaaggttactaaccagctgactcaagagttaatcaaaaggagtttatccaggtatgcctcatctaaacacacaaatctataagaagcagagtttttgccttcttgaagtaaaytttttaacaaaagaataaaagcagagagagtttcatcttgctggtagcagaagaggaagtctcagagactggaaacgtgggaaggattcaatgagcgactgtggcttgaagatggggtccctgtgagaagcaatgcaagctgcctcagcagctgacccacagctgaccagccagctgggaaacagggaactcgctcctaga

SEQ ID NO: 307538 - DNA, 525 bp, Homo sapiens
tctatgtgctaattaaaaaatggaaaccaaaattaaaaacacaataccatttacggttactccaaataaaattaaatacttaggtaaaaatctaatacaaatgtgtatgctgaaaataattaggtaaaaatctaacacaaatctagatgctgaaaataattgtaaactgctgatgaaagaaattaaagacaacttaaagaaatggagagacatgctatgtttatgaattgaaagattcaacatagtaaagatatcaattctctacaaactgatctacaaacgtaccacaatttctattaaaattccagcaaggtttttgtagacataaacaagcttactctaaaatttatgcggaaaagcaaagaagctagaatagttagggcaactctgaaaaagaggaatgaaatgggaagaatcattttatccrgtgttaaggcttactatgtcgctacagtaatcagaataatgtattattggtgcaggaacagatcaaagtacctgagtagagaacccacaacagaccca

SEQ ID NO: 307539 - DNA, 601 bp, Homo sapiens
cacatacatgctgtgtgggctgtgtcacaggagaggaaccccaagctctggctgaactttgccctagagggaaacattatctttactacataagggtaaacaaacctaccctttttgctctggaaggagacagtatctctgtcctctaaggatgtctgctatacacacatccttgaaaagctagccagaaacaaaggaggtcagttcctctgctcttaacacatgaagaaacaggagwgacccttgtgtctcgacaatatctaaataaatgaagacatatacttgtgttcatggattgtaagtctcaatattgctaaagtgtcaattatcccccaaaatgaactgttgattcaacacaatcccaataaaaattccaacaggattctttttggtagcaagtgacgagctgatttttaaattcatatggaaaggcaaagggcttaaaaatagccaaaacaaccttgaaagagaacaaagttggacgacttatactacctgactttaagatttattataaagctatcaagatttattataaagcatggtattggcataatgatccaaaaatagatgaatggaacagaacagaatccaaaatgac

SEQ ID NO: 307540 - DNA, 558 bp, Homo sapiens
agcggtgctggcttattattataattgttctattttattattagttgttgataacctctatgcctaattataaattaaactttacatacagatgtatgaatgtttaaaaatatagtatatagagaggatttggtgctatctctggtttcagacatctactaggaaacttggaacgtatgccccgtggataagggaggactactgcataacccgtacaagcagctggacagataaccaccccccttaccactcaaaagccaccacagcaaagggatgaatcctggactctcgctgatgtatttcaagcctttcaaattgatgcttacattgtatagggacatcagcattagcctgaaatgtaaaagaaaaaggtgttggaatgctccatccacactacatttcaccctaaacatacctactagttaagaggaacttaacgtatttagagcttccctcacattttagatgtccaattctataatgtgaattaataayatctgtctacgtgaggctacaggaaaatgggaaacttcagcaatgatatcacataataccgcc

SEQ ID NO: 307541 - DNA, 605 bp, Homo sapiens
aggaacttaacgtatttagagcttccctcacattttagatgtccaattctataatgtgaattaataacatctgtctacgtgaggctacaggaaaatgggaaacttcagcaatgatatcacataataccgcctttcatagcctcacataatcaagagtctcgattgcagagagggtcccacgggaagcctcrcaaaccatatttattgattcatttcttttattaccaatcctgcattaacatacaggttaccctcaatttgtaagagtactatactctcaaagttcaattcagccatctaaaacctaatgacatattttcattcaatgaacattacgcatgacatccaggtagccaggtcaggccacaggactacataatcacagtacaaggaatgaagaatactacaacccaaccatccctcacaaccaacagagcagtttactgaataggacaggactttataagctgttttgggattgaaccgtggctggcaatgcagagtctgatgaaagtcagaaactacaggactttggtttctgcaaatactgcaaaatacagagaacccaaacactttacactgcagagcaataaaaaggctagaca

SEQ ID NO: 307542 - DNA, 421 bp, Homo sapiens
gagaatgaataaatacatttcagtttagtcctacagcgaaatactatgcatccatgaaaactgatgcactagagctatacaccaaaattggtaaatcttagaaaatcatgttaagcaaaaataaaagcaagttgcagaatacatataatatgatgtcatttatgtaaaggttaaaggtatgcagaaatgctaaacattgtttatggatacacatataygtataacaaatttcaaagaatgtatgatcaagacaaatcccaaattcaggaaagtggttgctataatctggatgttagtatcccttcaaaattcccatgacagaacctaatactcagtgtgatagattaagaggtgggggtctttgggaggtgattaggtcatgacggtggagccctgacgggattagtgcccctataaaaag

SEQ ID NO: 307543 - DNA, 567 bp, Homo sapiens
gtgtagccctgctccccagcacacagagaagatggaattcagctgctgtcagctccttctcattcagggacctaggaaaccaggtgagcagtaaaggattatctgaccacaccaggaaggtgaggagcccaacgtggacacaacccaaattaactccccatcacactgtgaggcaggtcaagggcctcatatatgcagcttgccctagctcccatcaggggctgcccggtgaggagctcaaggcctacagactcagtttctccagaggcttgacccgagcattatttgaaaagtaaacctaaaggggcaaaataggcaaagccatactccgaacccaagtagagcgttatccgtgaagacatttccctcttccatactgcagagcttagagtgctcaagcccctttggaggcccakacagccttccccttccaggtgttctgcttagccaaaaccacatggcggaagccacggaagccagcgccttccttccttagggccttttcattcaaaatgcagggattgcaccaggaactggttagaaaggggcatcttaggctcgcaccag

SEQ ID NO: 307544 - DNA, 515 bp, Homo sapiens
agtacatttaaaaaagtcttgcatgttcagacattttcatcctctagaggaaatcatagctaaatatacgtatctgtacttcttgttttagcctttgtatacyagtgtttattcacctagagaattcagtattctaatttgaagataggttctaccctgctcatactattcaatataataatagcacttatcgtcatagatatactggcttgagacttgaaattcaagtgaaaaatacctttgggtaattagactacacaaacttatgtagttacctgaaatctgcatagtaaaaatgaatcatcatttagtttaaaataaatttactaaattataacatctgacacaatgccatccagtaggataacatatttaaaatgtatgggccgaaatgtagactttagtatttataggtaagacttctattatagaaatcatcatcatggtttgctttgtatctaaaaacaaattctctatgtatataagttatatagtgtaaacaaaagtagtagatc

SEQ ID NO: 307545 - DNA, 603 bp, Homo sapiens
ccatattcacagagctctaaaatagctttctaatgaatctaacataaatttgaacatgcaatcaatgattgctacatagctgaggaaagcctcgattaaaaagatgaaaacatattaacagaaagaataatttggaaaaagtagagaaagcaggaagcaataaatttcaaaaccaaacaataattttaattcataaaaagaaaacataacaggatataataagaaaattatacagagatcaaaaaaggccttggaaattaaaagtatgatagcagaaatcaaagtctcaaaagtttgaaaaaggtaaattttccagaaagtatgaagaaaaaaaaaacataaaaaatgacagaaaaaaaataggtccaggaggtagaatgtttaattagagttccagaaccaaaaacaaaggcaagaaaattaaagaaaaaacatgaggaattttcccagagttgatggacacaaattgtcagactgaaaggacccataaaatgcatggcaaaatgaaagactatagactcataataagtaacatggctgtgacatttcagaactctagatacaacaragagaaacatttgataagtttcaaaatgagatcgt

SEQ ID NO: 307546 - DNA, 613 bp, Homo sapiens
cagtaaagcttcaggatacataaaataatcagtagcatttctatatgacaatagtataaaagaaatcaagaatttaatcacatttacaatagttacaaataatataaagtacctaggaataaacttaaccaaagaagggaaaaatatacataaaataatyagtagcatttctatatgacaatagtataaaataaatcaagaatttaatcacatttgcaatagttacaaataatataaagtacctaggaataaacaaccaaagaagagaaaaatctgcacaatgaaaactataaatattgttgcaagaaattgaagagaacccaaagagtggaaaggtattctgtgttcatgtattggaagaatcaatattgttacaatttccatactacctaaagaaatctatagattcaatgcaatttatataaaaataccaatgacattcttcacagaaatagaaaaagcaatcctaaaatttatgtggaaccaaaaaagacctaaagtagtcaaacctgtcctgagcaaaaagaacaaaactggaggaatcacattaccagacttcaaattatactacaacagctatagaaaccaaaacagcatggtactgcaataaaaa

SEQ ID NO: 307547 - DNA, 613 bp, Homo sapiens
cagtaaagcttcaggatacataaaataatcagtagcatttctatatgacaatagtataaaagaaatcaagaatttaatcacatttacaatagttacaaataatataaagtacctaggaataaacttaaccaaagaagggaaaaatatacataaaataatcagtagcatttctatatgacaatagtataaaataaatcaagaatttaatcacatttgcaatagttacaaataatataaagtacctaggaataaacaaccaaagaagagaaaaatctgcacaatgaaaactrtaaatattgttgcaagaaattgaagagaacccaaagagtggaaaggtattctgtgttcatgtattggaagaatcaatattgttacaatttccatactacctaaagaaatctatagattcaatgcaatttatataaaaataccaatgacattcttcacagaaatagaaaaagcaatcctaaaatttatgtggaaccaaaaaagacctaaagtagtcaaacctgtcctgagcaaaaagaacaaaactggaggaatcacattaccagacttcaaattatactacaacagctatagaaaccaaaacagcatggtactgcaataaaaa

SEQ ID NO: 307548 - DNA, 582 bp, Homo sapiens
gcaaagggattctacagcagacaccaactaggtttcctctaattcaatttaattgggacacaggctacctggagatagcatcagtcagattccacaggttgagagctcagtcccataagacttcygcccactttagatgccaggtgcaagtagtaggttgtcacctatacgtctgactgaccaagactgctgagagctcctcctcaagtttgattaatctgcaagagcagctcacagaattcagagaaacacattatttacatctaccagtttattgtaaaggatattagaaaggatacagataaacagccaggtggtagagatgcacagggcaaggcatgtgagaagtgaagaacttccatgctttctctgcaccctccaggaacatccacatgttcagcaatcaggaagctccctagaccctgtccttttgggtttttatagaagctttattatgcaggtatgattaattataccactggctattggtgatcattttaacttttagcctctcttcccttcctaaagattgggaagtggggctagaaattaatcctctaagactgtcttggtctttctggt

SEQ ID NO: 307549 - DNA, 621 bp, Homo sapiens
cttcgtgaggcccattattttgtgaagatattttttaaggttggatgttcctgaggaaattgaagtgggtaattcactttgttagtaaaatccatgctttttaaaattgataagcatgactggctgtaataaaggaaaaggggaataaattgaaacaaacacatcagtagagtaggtgatagaaatgtaaacaggagtccaatgactgcatttgttatttttttatttttaaaatttattttgaatttttatggrtatataataagtgtatttatttatgggttgcatgagatgttttgatacaggcatacaatgcataataatcacatcagagtaaatgggtatccatcacctcaagcatttgtcttttgtgttataaacaatccaattatactcttttagttatttttaaatgtacaataaaattattgactatagtcacattgttgtgctatcaactataagttcttattcattctttctatttttttgcacccgttaacaatccctacctcctccacaacacctactacccttcctagcctctggtagccctccttctactctctatcttcatgagttcaattgttttagtctttagctcgcacagatgagaatatg

SEQ ID NO: 307550 - DNA, 589 bp, Homo sapiens
aaatgggatgaaattcttgatgtctttttccaatttttcactgttggcatacaaaaatgctactgacttttctatgttgattttctatcctgtgagcttatggaatatayttatcagttttaatagatttttggtgcagtctttagattttgtgaaatataagatcatatcatttgcaaacaaggataatttgaatttcttcccttccattttgaacactctttatttctttctcttgtctgatttcactagcttggacttccagcactatgttgaataagagtgctgagtgggcatccttgtcttgttccagatcttagaggaaaggccttcagtctttctatattcagtatgttactagttgttggtctgtcattttatggcttttattatgttgtgatatgttccttctatacccagtttttttttttttttcgtgagtttttgtcatgaagggatgttgaatttttttaaatgcttttgcagcatctattgaaattgttatatggtctttcacctccattcttttgacttgatgtatcacattgattgatttgtgtatggtgaaacataactgcattcctgcaat

SEQ ID NO: 307551 - DNA, 395 bp, Homo sapiens
tatatgccattcagagatcatactatgaatgataatttaatataacattttacattgacacttgtctgtatgtaacataatccttcttcaattctgctcaatgccattaaaaaaataatagctaacacttgttgagtacttcctatgtgaaggcactgtaccaagtagaaagttttatatgcattatctcatgagctcacaaccaaataaggcaattactattattatcttaattttacagatgatgaaactgagacagagtggtttaattacttttaaagattcccatatcaagtagctagcagagytgacattcagatttgaactgatgcatggcaggttcctgggcccctgctctgaaaccactggagagtatatatgtagaatgtatttgt

SEQ ID NO: 307552 - DNA, 597 bp, Homo sapiens
ccttgcagtttcacatcgtggctccaaagccatcttttgggtctcaaggccaagtcaataaagtacatctgttctttgtgtaaagaccacctctagtgtcaagaattctggaatggccgtgaggatgaagctgacctaggcaatgtatgcttctgatggggtataaagtgtgaaaaatcaggctaactgttcataggtgaatctgtttgcctgttcagagagcaaaagsggcatgcatcattctgaaggatgtatgataaagtggcaagtggaaacaattttctaagttgctgtcacagtctccacacactcaaaatgagtactttaaatacagcaacaatatggcactattgtacggtaaaaatcatcttagtaggatatgcaagccctattttaaaatttaccctaaatagtccatttactccaacaaatggcagctgattgggctgtgctgtaattgggtacagcattgaagagctgctttgcctattatttaaatttccagtgaagaaatagctagttccacttatttttctttcagggccacagatgtgtcttggccatagtacagctccagagaaggaaacaagtgagtga

SEQ ID NO: 307553 - DNA, 564 bp, Homo sapiens
cacatggtaatttacttttaatccagcatcatcaaggaaagaggtattctaaaaatgttagctttccagaaaactaaaacttgcctttttaagagctgaaatgtttagaaaatcagcaagatacccattataktttatacaaatttatgtacaagatgataaacaaaatctaacagaatataaaaatatcttgcttcatgactcaaaaagagatcaatatgaccatcaaatatcaggccatgtagcatattgtgctctttgtatttattaaaatatgtcatccatactccaaatagcccaaaatacaatgcttttagttgcttgggtatagtcatagagatttcatcctccagtctgctacaagaatgtctgtcatttttcattgcagtctgtcacctgatttgacaactttctttacttgtgtttactttttaatttgcagcttttaatcttctgtagattggagaatgagtgtattagtctgttttcatactgctgataaagacacacccaagactgggcaatttacaaaagaaagaagtttaattagacttagagttccac

SEQ ID NO: 307554 - DNA, 596 bp, Homo sapiens
acagccaatgggagtcaattaaatcattttttaaaaatactattcagacactcattccaaaataagtgtagactctggtccatcacacttcttcaggctccccctcacactcacttcacttcaacctttttacttttatttaaacttcttccagcatctacctttatcttgatctttatgtcttgtcgatagtttctcatctgtttaaatatcaaatmttattttattgattgttatagttccttctttgaagtcttatttgtttttcaactcataccatcttgcatgctagtttgtatagtaagagtttttgacatgctgactccagcaagatacagaccatgtcctctaaatccagaatgtctatacatcttagttttctcataatggccaggttataccacttgctattccattataatttaatagtgaattttttaaatcaaaagtgttctcatttcaataataaattatatgatcaatttatcaagatctcttctattgctgtaccccacaatattatgctaggcaacaagttaagtgctcaatatgttttgattaaagggaagcagcctgcttcttgtcttgcaattaca

SEQ ID NO: 307555 - DNA, 596 bp, Homo sapiens
acagccaatgggagtcaattaaatcattttttaaaaatactattcagacactcattccaaaataagtgtagactctggtccatcacacttcttcaggctccccctcacactcacttcacttcaacctttttacttttatttaaacttcttccagcatctacctttatcttgatctttatgtcttgtcgatagtttctcatctgtttaaatatcaaatattattttattgattgttatagttccttctttgaagtcttatttgtttttcaactcataccatcttgcatgctagtttgtatagtaagagtttttgacatgctgactccagcaagatacagaccatgtcctctaaatccagaatgtctatacatcttagttttctcataatggccaggttataccacttgctattccattataatttaatagtgaattttttaaatcaaaagtgttctcatttcaataataaattatatgatcamtttatcaagatctcttctattgctgtaccccacaatattatgctaggcaacaagttaagtgctcaatatgttttgattaaagggaagcagcctgcttcttgtcttgcaattaca

SEQ ID NO: 307556 - DNA, 512 bp, Homo sapiens
ttgaatgttcggtagaattcagcagtgaagccatcaggtcccaagtttttctttacttggatttgttttattaaggcttcaatctcattagttgttattggtctgctcagattttgaattttttcctggttcattcttggtagcttttatgtatcctggaatttgtccatttcttctaggttttcaaattttttggcatataattgcttatagtatccactaaagattctttaggtttctgtagtatcagttataatgtctcctttttcctttttaattttatttatttggatcctctctctctttttttttttttagtctggctaaaggtttgccaattttctttaactttttagaaaaccaaytttttgttttattgatcttttgtgctgtttccttcatttcaattttatttatttatgctctaatctttattatttccattcttttactaattttgggtttcatttgttctcacttttcaaattattcaagatgcaccattagattat

SEQ ID NO: 307557 - DNA, 581 bp, Homo sapiens
ggtcttgtactttcattcattaagccagtctgtcaccttttgattggagaatttagtccatttacatttaacgttttgattgataagtgaggacttacttctgccactttgctatttgttttctggtatttttatggttttctctttcttctttctattcttcctgtcttattctagtgaaagggattttctctggtgacatgatttagtttcttgctttttattatttgtgtatccattgtatgttttttggtttggggttaccatgagacttgcaaatactgtcatataaccccttacgttaacctgataacaacactatttttataaacaagcaaacaamaaagaatgagaaaactaataaaaactctatactataacttcttcccccccaatttttaaccttttgctgtttctacttttatcttattgtactatgtcttgatgagtttttgttgttattatttttaattggttcatcatttactctttctacttaacataaaagtagttcacacaccacagttacagtgttgtagtattctaagtttttctgtgcacatactattaccaatgagttc

SEQ ID NO: 307558 - DNA, 588 bp, Homo sapiens
taaacgtttctcaattttgtttatctttttgataaatcaaccttttaaattcattgatctgtattgtttctttgtttcaattttatttatttcagctctgatctttagtatttattttctttaaatttttcacttgatttgttctwaattttctagtttcttgatgtgcatcattaggctatttagttgaagtttttctacattaataatataggcattgattgctataaactttcctcttagtactgcttttgccatattccatagattttggtatcttgtatttccattttcattttaacacattgttaactaaagttggcactttattcagaatttttgatatttatttaacttttttccattgcgtacttttatccaggatactacattacatttagtcattgcatgtccttgactgtgacagtttctcagacgttcctaatttttgatgatcttgacagttttgaggaggattgatcatgtattttgtagaactctttcaactgggatttgtcttatgtttttcttttagttaaattggggttatatgtttttaagataaaaacaagaaaggtaaagtgccat

SEQ ID NO: 307559 - DNA, 379 bp, Homo sapiens
acatactactcttaaacacattaaaaacttggatttaaatgagacaccaaggtaatgagacagcagaatttttttttcacttgtctcccttcccaaatgcatttatatatcagatcgtgctcacattttatgatattgcccaatacaaatcttctgttactcaaracttttcaacctgagaccccttgaaatgaaagggattgagtgatgataacaacttctgatgagtcatgaatcaaatgcagacagagttattttttccatctatggagcctcaccccaatattcatttactcccatcaaatattagatcagcagttaacacgacattgtgacttttaatagtttcagcactaagaaagaagtgtaatttagcatc

SEQ ID NO: 307560 - DNA, 630 bp, Homo sapiens
taggctgttgtaagaactttggcttttgatattggtggaatgagagaatatggaggtttctaagcaaaagagtaatatataatttacatattgagagtatcaccctcttgtctgataaatatactgtagagatgtaggagaggaagtcatgagaccagttagaagactaccacagtaatccaggtgaaaagtgatgattttgggactaaggtagtagtgatggagatggtgagaggttgaattctgtatatattttgaaggtaaagccatcaggatttgctgacaaatttgacgtgaggatgttaaggaagataaatcaagattaaggccaaaggttttggccttgtgactgaagaatacagtggccaatagctgagatgggaaaaatagtgtgaggaacaggatttaggagggtgactaggaactcaattttggaaaaattaacttttaattcaaatagagatgtcaggtaaatctagggracaaatctaggctagagatagaaatgtgtgggtcctcaatgtatagtctggatgaggtcataaaaggagaaatacatattataggaatatatatattagtccatgtacctcttatcatatatattatataatatagaataattatata

SEQ ID NO: 307561 - DNA, 547 bp, Homo sapiens
ttttgagaattaaatgtgtcattacatataaaattcttaagatagtattggtacagagtgaacggtcaataaacattggtggttacgagtgtttcagctgtttgtcatggtatgggcttaaacagagctttaggattgtgagagtgactgaaaaatccttttrtctactcattttaaacaactactcctttagggggttttatactactccttgtggtatcttctgaacttactggtagaaagaaaaaaaaagtctttattttcttcctttattgcttcttccagaaaaagtgaaatgataaattcttaaggaacagaacacctgcctgtatgtgccaagaaattcaagactaagcttaagaaaagttatttctttgcagtagaactagtctaggaaatatgtttctattcaaggatgagaaggtttaggtttgagctatattaataggagaaaaatagctttttggacgtgagaggctatagggcaagaagcaggaccttgagcatgagatatgtgcagaagtcaaggccagctttgagcataggt

SEQ ID NO: 307562 - DNA, 557 bp, Homo sapiens
gttttacatcaattgacaatggactcaagttgaattgggcctgtgaatggcttgagacttaacaggaagtgttttatttacgcataactagggtacatttgtacagtgccctataattatctttctgggaaaaaaawgatgatttcacatactttatttcactttgatcttgatcctttgaactctaagatgtaagaaaagcatcttttataatattaattacaaagagataaggaaactcagaaggcaagagatttaataattagtttaaagtaacacaaacagaagaacactgtttttgactgggttgactttctgcccagtgttctttttactctgccatactgcctctcatacgtgtcctaggacctgaccctgactggcttcgcacatgtcccaagctgtcctaaagtttcagagaaaatagttcgggtgagcacacaattcagtcagtagtgatcctttatataattggaactgaaatagcagggaaatcatctaggctataggcataaaatgacacctgattgtttccttctcacagcactacctgttat

SEQ ID NO: 307563 - DNA, 624 bp, Homo sapiens
gaactttaccaagcatagtttctgctcctttcctaatatagcctgaaatcaaagaggaggccactcataatgtcagcatgactcaaccttagagccaccctgyccccattagctgcattatcagttacacattggattaattacttagaaagccagcaacttttaacaaaaatgtggtctctcccacgcagagcataaattcatcccatgagacaaaatggagccccatatgggcacagatatttaaactgtgtgtttactctccgactattatatctaattagcaatcagcagggcataaccagctctagagcttctactagccccctttcagtcattaacactgcctttgggcagtagtggggctgaaaataatatcatctaaatgattacttaattcagacttccatctggaagatctataaaaactgcaaagggttagcaattgtaagaaggaagaaaagagctaagctttctaatgtgctacaggtaccccatatttgaaagaaatggtgtgccagagatcagggaaactgccaatgaatgatttgaatgagggcattttccaccttaattaactaaggaagactatggcataagcacaatgttttatgatattgcttg

SEQ ID NO: 307564 - DNA, 570 bp, Homo sapiens
aatgtgttgatgagagtctggatataagtgaatcattgaatgaatcatagaacttgagagctggagggatcttaatgttcatcaattcaacccactccttttactccgtataggggtaagaaatttgactccatagagggaaagtgacttgctcaatgtcaatttttcactgagaaccacctctcactcacctttaactcccactcctactgaccacattgtttcctgtcagtgagattaaaaaagggataggtaagacaaatttagtaagagaaaaatgaggcagagaaggcagattttctgaacttggacaacagagagcagtggtagcaattagaaataatgttggtattaattgccacttaataacagtgaagaaacctaaraatatcagaactttgacgcagactacctccaactcttccctaaaagattcagatgcaggcaacagtgacaatggaagacaaataatgtttgctggggttctgaccacaaattccacttgagaaagttctagtgaattgtattagatcacatggaatacttcctttttccatgatagttaagttt

SEQ ID NO: 307565 - DNA, 569 bp, Homo sapiens
tgcaaatttaggcattatatagttatttctgattagtgagcaataccagattattttattttttgtacataaaactagagcctagttgaaaaaaaattgatttggaaagagaagtatagtttatagttaagtctagtggggagaagaaaggaagaaaaattaatctgagagtttgaggcagtgccctcaaatacctgccatgtgcagtgtgaaggcattgtttgctactaggacagacaaaagaaaggtacaggatgccagaaagagaaggtggtggtggggggacttcttcagaggaactcacctgctctaattgtttgctcagagtaagacttgcctgtagatgttcttcaacttttccacaacttccattaaccctctttgcaaggtactcaccttttctcttgcctccttgcatgacatcaggaactaggtacagctacttctctgtagaactgatggatctcatttttaagaaatcataagtacaacattcaaactggcaaaggaaagaacttgagggcaagatttattttggtacawcccattgcattaaagcccaaagtttc

SEQ ID NO: 307566 - DNA, 347 bp, Homo sapiens
tcatccccggtgctttccgtgtgtgccagcacctaagaagtaaaacatttttcaaaggaaaagatcatgttttcaccaagctgctaaatttaaatctggattttagtttccctaagtgcagaaccgttttcttagaaggcctgaaatgctgagtagtgttagccagccttaccagctgcataggaagtggttctttgagaacctaaataatgtctaatgctacctgaccctcacagctacccaggaagcaggtcctcacctgggcctgccctttctcccacctgcactggcartgctggctgatggggtagcctccagttgtctgtgttaaagcccagggtgatgtc

SEQ ID NO: 307567 - DNA, 507 bp, Homo sapiens
gaggagctgcctgactcgtacctgcctataaaaggttccctgttatcttaatgctctgggcctttgcctgggcagccaccctgcttgccgtcctcaagatgcagttatcaataccccaggaagccttttytgagccctggccccacactcccacggttagtctttgagtactcctccatagcatctattgagagctctctttgcatctctctcctagtccatggactctacagattcgtccctaccactgtctccaatgaaatacacatggcctagcacgtggtgggtgccaaatgaaggctcctggacaaacaaaggagcctttctctgtaagaatagagcttgaggaaactcgtgatagaattgtgaccaagagaagcagttgatgaaaaagtctccaaataaatgctggcaagattctctttccaaatgtgaaaatacacctgtgaaaaaaatcacatgatgtgatttttcttttaagaattagatcagtgtccatttcatatt

SEQ ID NO: 307568 - DNA, 532 bp, Homo sapiens
ttgagaccagcctggctaacacgttgaaaccctgtctctactaaaataaatacaaaaagttagccaggtttgatggccggtgcctgtagtcccaactactcaggaggctgaggcaggagaatggcttgaacctgggatgcggagcttgcagtgagctgagattgtgccactgcactccagcctgcgtgacacggtgagactctgtctcaaaaacaacaacaacaacaacaaaaactagtaaagatagctaaaaaggtaaatacaattcctccctcaatatttttatttgttttattttttctcctatcaaaattaaaaagcagctgcacaaagcaacaattatattctctgttgatggacatcrtaatataaaatggttgagttggtatgataatagcacaaaagtgaagagggatggaactatataagtgcaaaatttttgaatattgttaaaattaagttggttatgcgagctagcttattgtaaattaagatgttatttgtaattcctagggtagcaactaagaaaata

SEQ ID NO: 307569 - DNA, 619 bp, Homo sapiens
tagacagaagattaacaaggacatagaatatttgaacaacactctaagacaactagacctaacagacatctgtacaacccaatgacagtggaatacatattcttttcaagtgtattgtaattctcctttattctctgggtgagtgggggacacaattgtgtattatgccattaaataagttttaagaaatttgaaataattgaaatcataccaastgtatttcccattcaaaatggaatgaaatgggaaatcaacaacagaaagaaatttggagaattcacaaatatatgaaaattaaccaatatacaccaaaataaaaagtgggtcaaataagaaaccataaggaaattagaaaacactttgaaatttaaaaatgcagaaacacagtattctagaacttatgagatgctgcaacagcagtgcttcataaatagatagctgcagttgactatttttaaaaagtgagatttcaaataaataactttacctttcccctaagcaactagaaaaagaagaggacaataatccaaagcaagcagaaaaaagaaataataaaaattacatgagaaacaaatgaaaaaagaatagaaagcaataaaaatttaacaaaaccaaaagt

SEQ ID NO: 307570 - DNA, 548 bp, Homo sapiens
aaatttaacaaaaccaaaagttgtttttttgaaaagatcaacaaaattgacaaactcttagctacactgatcwagagaaaaagagtagacgcacattacttaattagggaatgaaagaggagacactactactgacttcatggggtgggggaagaattacaaaagaatactttgattattagattgcaatctataatatttagattattacctaaattagttgcagtgaatttattaaacttaattagatgcaataaattcctagaaagacacaaactaccaaaactgaatcaagaaaaagtaaaatctaaaaagcctcataacataaaaaaagaggtttattttagtaaccagaagccttaccatcgagtaaagtgtagacctaaatggctttgctggagaattttaccaaaccttttaacaaggcttaacactattctttgacaagcttttcctaaaaattgaagagaaaggaatgcttccaagctcattctatgaggccaatattatcctgatctccaagccaaagacatcacaggaaatgaaaa

SEQ ID NO: 307571 - DNA, 548 bp, Homo sapiens
aaatttaacaaaaccaaaagttgtttttttgaaaagatcaacaaaattgacaaactcttagctacactgatctagagaaaaagagtagacgcacattacttaattagggaatgaaagaggagacactactactgacttcatggggtgggggaagaattacaaaagaatactttgattattagattrcaatctataatatttagattattacctaaattagttgcagtgaatttattaaacttaattagatgcaataaattcctagaaagacacaaactaccaaaactgaatcaagaaaaagtaaaatctaaaaagcctcataacataaaaaaagaggtttattttagtaaccagaagccttaccatcgagtaaagtgtagacctaaatggctttgctggagaattttaccaaaccttttaacaaggcttaacactattctttgacaagcttttcctaaaaattgaagagaaaggaatgcttccaagctcattctatgaggccaatattatcctgatctccaagccaaagacatcacaggaaatgaaaa

SEQ ID NO: 307572 - DNA, 548 bp, Homo sapiens
aaatttaacaaaaccaaaagttgtttttttgaaaagatcaacaaaattgacaaactcttagctacactgatctagagaaaaagagtagacgcacattacttaattagggaatgaaagaggagacactactactgacttcatggggtgggggaagaattacaaaagaatactttgattattagattgyaatctataatatttagattattacctaaattagttgcagtgaatttattaaacttaattagatgcaataaattcctagaaagacacaaactaccaaaactgaatcaagaaaaagtaaaatctaaaaagcctcataacataaaaaaagaggtttattttagtaaccagaagccttaccatcgagtaaagtgtagacctaaatggctttgctggagaattttaccaaaccttttaacaaggcttaacactattctttgacaagcttttcctaaaaattgaagagaaaggaatgcttccaagctcattctatgaggccaatattatcctgatctccaagccaaagacatcacaggaaatgaaaa

SEQ ID NO: 307573 - DNA, 548 bp, Homo sapiens
aaatttaacaaaaccaaaagttgtttttttgaaaagatcaacaaaattgacaaactcttagctacactgatctagagaaaaagagtagacgcacattacttaattagggaatgaaagaggagacactactactgacttcatggggtgggggaagaattacaaaagaatactttgattattagattgcaatctataatatttagattattacctaaattagttgcagtgaatttattaaacttaattagatgcaataaattcctagaaagacacaaactaccaaaactgaatcaagaaaaagtaaaatctaaaaagcctcataacataaaaaaagaggtttattttagtaaccagaagccttaccatcgagtaaagtgtagacctaaatggctttgctggagaattttaccaaaccttttaacaaggcttaacactattctttgacaagcttttcytaaaaattgaagagaaaggaatgcttccaagctcattctatgaggccaatattatcctgatctccaagccaaagacatcacaggaaatgaaaa

SEQ ID NO: 307574 - DNA, 600 bp, Homo sapiens
tgatgtattaactacagtatcaccttcctggtctttaagattctgcacatgctttaaactaatttttctaatacgtgttcctgtagcaactagatatcagtatgaagagaaaaacatgaaccttgaactcctacctcataccacaagtaaaaattaatttgaggtgaattacagaccaaaatgtgaatgctaatatattcaaaatgctaaagtattcaaattttaagaaaaaagcaaatacaaatgtatatgacttttaaataagcaaataacttgtaaataggacatcaaaaacactaaacataaaagaaaaaacattggcaagcaaatttaacttctttaagagcttttctycatcaaaaagcatcattaaaaaggtatgcagacattgtaaaagatggaggtttcctaagttcagggttcctctgctgtggcacaaactggttggctgtttcacactgcccccatggaacttggggggcaaggagaacagaggcaaacatgaagctcacaatgcctgctgtgacatcaatgcctacagtgtaacaatgtcctttgtctctgacccaggcatctcttgtcttcttccagaaaccgtga

SEQ ID NO: 307575 - DNA, 511 bp, Homo sapiens
tcctcacacaataatttaagtctgccatgcacatgtcatgcctgtgaaaaccaatataaactgctggtccttagggagctcaccagtcagtgagaggaggatcaggccagcagaggatgctattgacagtgagatggtacctgtctggggcacctgtcatacctgtcgcaaaggaggaggtggttgctagccctagaggaagaaaaggcaacctcagtattggaggagtggctgttttctaggtaggggtgggcatggcataagtccaagaagtgagagatgtaagaagacatgcaaagctacaaagcaggggagagcaagacaccagacagtgggatggggtgggatgcagcgaaccagcacagtgagccttctgagcctttctcagtggctctgattacgtctttaggcaatgsgaagcttgcagaatgagattcacattagagtgtagtaacagggacagacacaccttttattttagaaggaagttggatggaaaatgcatccatat

SEQ ID NO: 307576 - DNA, 599 bp, Homo sapiens
cagctgattgcaaatagagtatcaccattaattccattttagtattgatttgctcytttaaaaaatcaatttaagaaatgccctaatgtggacaacatcttcttctttgggttttagagtggtttgttattttgtaggaagagtgaaaggtgtttctgtcttcttcttccaagcttgagactcttcaggggagcctctagggtaataaaggtcttgcagggaggccactgcctgcgcccctggcttggcccatgcatgaaggccgtgtgtggaatgatgcctttcagctcccatgactcgcagcccaccccctacaccagcaggcaccagccacacctatgatgttccagcttcccgcaaggaactgggattggggtggcaaagcaaacagctcctgctgtttcctaggaaatgaagacactccacttattattacaaatagattatgcaaataaaatcacaattttacccagtgcagcaaagaaatccattatactgcagggtgcatgtctcaatgcaaagacaaagcactgagttccttagcacgtattttaaagatgataggatgtctcttctggcctgaaacccactcccttgtc

SEQ ID NO: 307577 - DNA, 625 bp, Homo sapiens
gtgttctatatgcaaaatgaagcataggyttttataatttgtatatgtttgtaaagtttgcatatgctttattttaaaccatttgcttatggtttgggtgaataggtttcctctgtttcatttcaccctttaagaatgaagaaaataattaccccaccctctttggaatagctgccatttgaaaatgggaaatgcttctattgtgatctacttatttatttatttttacttttggtattaagccaccaaacgacttagctcagaaaaaaaattaagtgtctaaaaataaattttacaaattacagccctgagtttaccattctgttgtagtgtgtcattaagaactggctgcaaagtaccatgcagcagggtgaggagcagctaaaatctgggctattgtttggtcctttgaatagtgaatgtaattgttaaactatattttaagtggttgagccaagtttaaaacagtaaaatgtgtgtgtgtgtgtgtgtgtgtgtgtgtgtgtgtgatttcttcctaatattaaaggaaattcaagaaaatagaaaaatttttaaaacacttattctataggaaatatcaaatatccatatctcaaacctacgtttttaggtacatacatac

SEQ ID NO: 307578 - DNA, 625 bp, Homo sapiens
gtgttctatatgcaaaatgaagcataggtttttataatttgtatatgtttgtaaagtttgcatatgctttattttaaaccatttgcttatggtttgggtgaataggtttcctctgtttcatttcaccctttaagaatgaagaaaataattaccccaccctctttggaatagctgccatttgaaaatgggaaatgcttctattgtgatctacttatttatttatttttacttttggtattaagccaccaaacgacttagctcagaaaaaaaattaagtgtctaaaaataaattttacaaattacagccctgagtttaccattctgttgtagtgtgtcattaagaactggctgcaaagtaccatgcagcagggtgaggagcagctaaaatctgggctattgtttggtcctttgaatagtgaatgtaattgttaaactatattttaagtggttgagccaagtttaaaacagtaaaatgtgtgtgtgtgtgtgtgtgtgtgtgtgtgtgtgtgatttcttcctaatattaaaggaaattcaagaaaatagaaaaattttwaaaacacttattctataggaaatatcaaatatccatatctcaaacctacgtttttaggtacatacatac

SEQ ID NO: 307579 - DNA, 643 bp, Homo sapiens
aagcaacatgaaaaagaagagcaaaataaacctaaagtcagcaaaaggaaggaaataatgaaaataagaacaaaaattaatgaaactgaaaatagaaaacaatagaggaaaaatcaaggaaacaaaatgctggttcttcaaatcaatgcaaacaataaacatctaacaagaatgacaaaggaaaaaaaaataagacgcaaattgccaaatatcaggagtgaamcagaggatcttgctacacctctcgcagccattaaaaggataatggtggtgaccatatagaatattacactcagaaatttgccagttaaaaagaagtggaccagttcttcaaaatccacaaactgccaaaattcaaactacattaaacacaacctgtatggtcccataaccattaaataaattggatccataatttaaaagcttccttaaaataagtgtttgaactcagatggtttcactggagaactctaccaaacatttcaagatttattaacaacaacaattttatacaatttcttccattatttgtgtttggtgcttcctttaaagtaaaaattctgcctcctccaccagagcataagcttcatgagaccaataactatatctatattttcagttgccagtgtagaagatgagaata

SEQ ID NO: 307580 - DNA, 643 bp, Homo sapiens
aagcaacatgaaaaagaagagcaaaataaacctaaagtcagcaaaaggaaggaaataatgaaaataagaacaaaaattaatgaaactgaaaatagaaaacaatagaggaaaaatcaaggaaacaaaatgctggttcttcaaatcaatgcaaacaataaacatctaacaagaatgacaaaggaaaaaaaaataagacgcaaattgccaaatatcaggagtgaaacasaggatcttgctacacctctcgcagccattaaaaggataatggtggtgaccatatagaatattacactcagaaatttgccagttaaaaagaagtggaccagttcttcaaaatccacaaactgccaaaattcaaactacattaaacacaacctgtatggtcccataaccattaaataaattggatccataatttaaaagcttccttaaaataagtgtttgaactcagatggtttcactggagaactctaccaaacatttcaagatttattaacaacaacaattttatacaatttcttccattatttgtgtttggtgcttcctttaaagtaaaaattctgcctcctccaccagagcataagcttcatgagaccaataactatatctatattttcagttgccagtgtagaagatgagaata

SEQ ID NO: 307581 - DNA, 572 bp, Homo sapiens
gctctttcacctatgaaaaccccaaatataaaaacctcaatttataaacaatgtacttgcctcaaaaataataagcttattgtataattcaaactataaaccaaacgaagttagttgtttcttaaatgtttaattgtatcctctaacagataatatttctttccctctaaggaaataccamtaatcagtacgttgtgaaattttagatgacaagattaccagattggcctctattctagaaagcatactaaaccatatctagaaagcacaaactagtaattatgtcacttattattgccattttcactctaaaattaagctgtcttgttttttcagctcttgttacactaaagaccattcattcttgaaacagatgggcccttgctaattaagaaaactgctccagttcattaaagaaatagcaaacaaccagatgaagtgtcagttcttagggacactcaatgtgcaaagcttgatcacattactcacttgttccatcttcctctgaaacactgactcaacctaagcatttaacatagattacttttaattatagtaattgcaaaaaccac

SEQ ID NO: 307582 - DNA, 572 bp, Homo sapiens
gctctttcacctatgaaaaccccaaatataaaaacctcaatttataaacaatgtacttgcctcaaaaataataagcttattgtataattcaaactataaaccaaacgaagttagttgtttcttaaatgtttaattgtatcctctaacagataatatttctttccctctaaggaaataccactaatcagtacgttgtgaaattttagatgacaagattaccagattggcctctattctagaaagcatactaaaccatatctagaaagcacaaactagtaattatgtcacttattattgccattttcactctaaaattaagctgtcttgttttttcagctcttgttacactaaagaccattcrttcttgaaacagatgggcccttgctaattaagaaaactgctccagttcattaaagaaatagcaaacaaccagatgaagtgtcagttcttagggacactcaatgtgcaaagcttgatcacattactcacttgttccatcttcctctgaaacactgactcaacctaagcatttaacatagattacttttaattatagtaattgcaaaaaccac

SEQ ID NO: 307583 - DNA, 586 bp, Homo sapiens
tgaatctgaatttgcagtgatatagaaataacttttcattatttcttattagcttatttttttgttttcattcatataaaaattaggagagatagatcttcaatgactccccattgtttatggaaaaaagcatgggcttcttatcctggtatcaagaaatgccgaaatttgtttgatagttttaataattaccttgatgaatcacactggcacacaagctttggccccggggtgataatcagatatggttcctaattactgagagctaagatcaggaattttaaactatttagaatttttgcagtgtgcctgaggtaaatagtatttatactctttttacagattagaaaacagactcatagaataagaacaatataaacaagktcataggaagtgcctgagctagaattcagactttgctgtgtctgacttcaaaacctatattcctttcactcaggcaaaggcatttgactccaaaattacatcatttaaatacaaatcagagtccgtacctcattagcatgggggcatatttcagtctctcgaatccagaatatgttggcagacactcacatcttagttcaca

SEQ ID NO: 307584 - DNA, 583 bp, Homo sapiens
ctgtttggccattgtttgtaactttagaattgatcctaaaataggtctcagatagggaggttacatggtcaaatatatattgtagaaatgccaccctggtagcagtgtagagaaaatatttagcaggtataaaactataggtagagaaacagtgaaaaattttaaaaatattctaaatgataaagaagatctgaagtaaagttactgtaatgccggggagaaaacatcacagtgggactgttcttggagtatttgaagaatagcaatgaagccaacatatttgaagtcctggaagagtagttccaggagattaagagaccamggtgtataatgccttgtatagccatggtcagatttgaactttattgtatatgtgatggaaggacattggagggttttgagcacaggagtatctcatctcactactataaaaaaaaacttctctgggcgctatattgacaacagtatacaagaggacaagagggaaagcagagggatcagatcgaaggctattgaaataatccagggaagagatgatggtgactcaattgagggtagtagcagtgcaagtgtcaataagtag

SEQ ID NO: 307585 - DNA, 352 bp, Homo sapiens
aataatcacaagcatagtgttcttctagagttggtactacattaaataaatgcatttggtcagtcatttttccttgttagcatcatactcctgaatgtagacaattgayaatgaacgtaattacaaactattcaaatagactagctctatggaactatttttaagcattcatatttcaacaatagtgcagaagggaactatgatacaaatattttgtattctgactatatctgcatatttgtgtcagttgcttgattcaaaccaattagactacagttatctaaaaaaccatatggtgaacaaataaaacgtacaggaccagttaaacatcaaaagcatatcatttgcatag

SEQ ID NO: 307586 - DNA, 571 bp, Homo sapiens
gggtcattttttcctaattatgtttcttgtagctttgtgttggtatcttcatatttgatgaaagagtcacatctctccattcttacggactggctttgacagagaaaggcctttaccagttagcttggctagagattctggtagcttctcaaaccttttctacagatgtcttctttggatttttgtctgtagatttctactaaaagggatttattggttgattttctttcagaagcctgaaatcttttgggctctttgctgtcttactgctataccataggttgagataccggaagcatactccatttctccttctttctgggagagttgccacagattctgcaccttgtctcaatcttgcagagctgtaccagcttcagcaagctgtctgacactcttctttgttcttaagtgccccaagacatakgaactatgccagctctgccagtgctccggatgaggaaagacaggaaaagacagaaactggttcttcaggcagttcacccaaaaatccggaaacattagacataatctcattccacctaagaagaaagttgtaagccaaggtgct

SEQ ID NO: 307587 - DNA, 562 bp, Homo sapiens
aaatatacatatacgaggaaaaaagtcagaaaattcaaaaattggtgaaaaacataaatttacagatttaagaatttcaactaattccaaggtagacaaattcaaagcatatcacattgtgacacatcatagtcaaactgctaaaatgcaatgataatgagaacatcttgacaaccagagaaaaataatccatttcacacacaggaacaatgatatgaataacagctgccttccctctcacctcatcccccccgaaaaaagagtcaaaagtctatgtgataacatttttaaagtgaacaaagaaagaatttcaaaaatgatgacaaacaagtccaagatggcagattagaggcttttagcatgccyctgtgacttgggaaatcgcaagatagtgcataaaggtgaactctgtgtgctttaattcaagaagaaaaataggaatccactggaatcatgaagaacatcccagatcctggggaggagaatgtcagcaaacagccccccttatgacatttggctgataaaagtgagtgaacccctaatatatgagagaagcagagaa

SEQ ID NO: 307588 - DNA, 498 bp, Homo sapiens
gtacattccacaaatcagcccattgcctgaggcaacagagagcttcaggcagtaaattaggaccaagtttatatccagctatattggctgcagccagctctcacttataagcgccatctactggcttacgggtcaaactgcacatcccratacaaaacctgctgaaagaagtgcatagggctctagaagcaaagtcaaaagaccctacccagcactctctacagctacaccccaaagagggggtggagaggaaaagggaaataaaaaatcttaacggtaactagagaaaaagttcatattacttacaaagggaaagtcatcaggttaacagcatacttctcatcagaaatcttgcaagtctggagagattggtggcctactgttagcatatctagagaaaagagattccaatcaataattttatatcccaccaaagaaggcttcataagtgaatgagaaatgaaaatattttccagagaagcaagtgcaaagggaatc

SEQ ID NO: 307589 - DNA, 569 bp, Homo sapiens
tgaaaacttcatgatgggattaaaacctcatatatcactattaactttgaatgtaaatggtctaaacaccctcacttcaaagacacagagtggcaagatggataaaagaactagactcatccatctgctgtcttcaagagacccaactaagacataactataatcataggcttacaataaagggtgacagaaagatctaccatgcaaacagaaaaaataaaaaacataggtcactattcttatttcaaataaaacatactttaaaccaacaacagtaaagaaggacaaagaatggcatcacataatgataacaygttcaattcaacaagaagacttaggcatcctaaatatatatatgcacccaacattggagcactcatattcataaaacaagtacttctacacctatgaaaagacttagacacaaaataataattcaacaccagactgacagtgttggagagatcatcaagacagaaaaccaacaaaacaaattctggacttaaacacaatgcttgaccaatgggacctaatagaagtctacaaaatactccacctgttaaccatag

SEQ ID NO: 307590 - DNA, 552 bp, Homo sapiens
ggtattctagactacagtaagtgaattatagataggggaaagtatatgaaaactgtgatgtatttgtactggctttttcaatataagctcatagtatgaacttggtcagctgagataggctcaatgtgatcagcacacctaccaccgagatcttggcttctaaaatgaatcaagacattttggagaaatggttaattccaaggatggaccagggggagtagaagataagcttttttagtgcctaaaggtaattaagtatccaataatgatgggggttatatcataggagccacttctgagattggtcagttctaggataattwaagcatcaaaataaataatgattttaagagattgtaatctgtgaataaaataagatttaatagtcccatactcatatcaataaatgataactaagtgagggagaagggaaagcttttccccacagtagaatgtcaacaaataaatgtataagaaatgatggagtcaatgaatgttaaaatagttggtgaaagttagatgagaataggatatttatatcatctcaacata

SEQ ID NO: 307591 - DNA, 575 bp, Homo sapiens
tatttcactatctcatttgttctccaactcaccctctgtatctgataagggctattctcatcacagcatggttcatggctaaaacccactcattgatttagagatgaacagacccaagtttttgtaagtggcagaacctagagagttgtcctgtgtaatgactggtttctcaccctgctattcactaactctgtccttcacctttattgatatagttcaaacactgctccagaagctgtgagagatgaaaggaaatataaaaagatgattgagtccccccaagatgggcagtctaatcagaggaacagaaacacacacacacacacacacacacacaccgttaaagaactgaaacacaagacatcctcagttaggaaaaatttggatccctgttatgaggtacacctggtacgggagttttccttgcccatttatttctgagaaaacaatactaagctggctgtgaccctgacaacagatacktttctaagggaatgcaagaaccactcagacacatgccacaaaatcattctattctgcttgcctaaaatatttgccatcccaaggaaggacac

SEQ ID NO: 307592 - DNA, 592 bp, Homo sapiens
gtaatgactggtttctcaccctgctattcactaactctgtccttcacctttattgatatagttcaaacactgctccagaagctgtgagagatgaaaggaaatataaaaagatgattgagtccccccaagatgggcagtctaatcagaggaacagaaacacacacacacacacacacacacacaccgttaaagaactgaaacacaagacatcctcagttaggaaaaatttggatccctgttatgaggtacacctggtacgggagttttccttgcccatttatttctgagaaaacaatactaagctggctgtgaccctgacaacagatacgtttctaagggaatgcaagaaccactcaracacatgccacaaaatcattctattctgcttgcctaaaatatttgccatcccaaggaaggacacgcttttgcactctgagataatccagaaaggaaagcagctttgggtcgtgtgagaaatatggtcagcacctgacaagaaactaagaattatgtccttgctttctcaaacagtattttaatgttgtaatagtttaaaaaatttatatttcaatttttaaagttatatatttct

SEQ ID NO: 307593 - DNA, 388 bp, Homo sapiens
tgctcaacatttttgtgaatgtgtatgtgtttacatgagcaatgcatgcaaatataggttcatatcttttaacaaagaacgggaaagcttgaccaaccagccaaatgaaatcccaacagaagaatctgttggtgttttcaaggaatatgttcaaaaactcctgacaatattcccatccaagaataaccctaaaacgtatagttttcctgaaaacattcctggtattaacagtaattataactaacatttactgaacagtaactacatacctagcacaatgtgaaatgctttatctagctttaacttcacaaacctcccatatgctaagaactgtgatsatcacaacatttaaaaaaacaaaaaaaatttccattgccagtaaatgaca

SEQ ID NO: 307594 - DNA, 657 bp, Homo sapiens
tgttggtcaggctggtctcgagctcccgacctcaggtgatccgcccaccttggcctcccaaagtgctgggattacaggcatgagccaccgcgcctggccaaaactaaaatattaagagtaggaataggcagtaggtaatagattaaaatatatttaggaaaaaaattgttagaaaatggcgattgatagaacacatgaggtaaagtaactttcatgttgctaatccttcagagaattaacgtttatrttgtcatattttagccgtttctattctacatcatgtactcaccaatattatcccgccttacatctcatccttacaatcattcttctaatttatatgtggtcaactcagtactttccaaataaaatctctctttctcctcaatatgttcatacacatgttcatatattaaatttgctatttaaatccctatttaaataagaatgtagcagttaacgtgtattgggtgctgtggaagataaaagatgcattagatatcacctttcggctcctagaagttataaaccagtgcattgatcactgcatatcacagacttctctcaggccattttctttctttactgggctgagctctccacacctttgtttgctatttatctaaccttctcatgaagaaactgtcaaaatgaatg

SEQ ID NO: 307595 - DNA, 564 bp, Homo sapiens
attgtatttcagttttatcatgctagcatgtaggttcatactggctgcaccttaaaaaattgtggtgaaaattaaattaaatatgagaattaaattaaatcaattacatggaaagtacttacaatttttctagtgtttatgactctctttctggcacaacggatacttttccttctttttcttgaaataaactatatattaaataagtctttattaaattatattcagcatttctgtgtatttgaagcaagatgaagcttakcagcactagcccactcctccagatttcaggaagtaatcagtgtttctaaaattgttatctaattatgacctgttccaagtcacctgagatccatcttaaaatggcaaatttccagacactctagaccagtcatactgaaacataattttgtagcatgactcctggaatctgcattttaaacacattgtacctgtgcacattcaagtataatagccacctttttgggattttcaacttagtgcctcaggacagaaaagataaccaaatccctattaaagggaagaatgccattatataaatta

SEQ ID NO: 307596 - DNA, 564 bp, Homo sapiens
attgtatttcagttttatcatgctagcatgtaggttcatactggctgcaccttaaaaaattgtggtgaaaattaaattaaatatgagaattaaattaaatcaattacatggaaagtacttacaatttttctagtgtttatgactctctttctggcacaacggatacttttccttctttttcttgaaataaactatatattaaataagtctttattaaattatattcagcatttctgtgtatttgaagcaagatgaagcttagcagcactagcccactcctccagatttcaggaagtaatcagtgtttctaaaattgttatctaattatgacctgttccaagtcacctgagatccatcttaaaatggcaaatttycagacactctagaccagtcatactgaaacataattttgtagcatgactcctggaatctgcattttaaacacattgtacctgtgcacattcaagtataatagccacctttttgggattttcaacttagtgcctcaggacagaaaagataaccaaatccctattaaagggaagaatgccattatataaatta

SEQ ID NO: 307597 - DNA, 576 bp, Homo sapiens
gctgtgttgaggaaactcaaagaaattcaagataacacagaggaggtattcagaattctatcacataaatttaacaaagagattgaaataatttaaaataatcaagaagaaattacaagaactgaaaaatgcaactggcrtactgacgattgcctgagtcctttagtagcaaaactgatcaagcagaagaatgaataagtgagcttgaagacagcctatttgaaaataaacattcagaggagacaaaagaaagaagagtgaaaaacaatgaaacatgcctataggatccagaaaatggcctcaaatgggcaaatctaaaagttattggccttaaagaggaattaaaaaaagatataggggtagaaatttttgcttttgttgccattgcttttggtatttgagtcatgaaatctttgcccgtgcctatgacctgaatggtattgcctagattttcttatagggtttttatagcttggggctttgcatataactctctaatccatgttgagttaatttatgtatatggtgtaaggaaggggtacagttttaatttactgcatatagttagccagcact

SEQ ID NO: 307598 - DNA, 576 bp, Homo sapiens
gctgtgttgaggaaactcaaagaaattcaagataacacagaggaggtattcagaattctatcacataaatttaacaaagagattgaaataatttaaaataatcaagaagaaattacaagaactgaaaaatgcaactggcgtactgacgattgcctgagtcctttagtagcaaaactgatcaagcagaagaatgaataagtgagcttgaagacagcctatttgaaaataaacattcagaggagacaaaagaaagaagagtgaaaaacaatgaaacatgcctataggatccagaaaatggcctcaaatgggcaaatctaaaagttattggccttaaagaggaattaaaaaaagatataggggtagaaatttttgcttttgttgccattgcttttggtatttgagtcatgaaatctttgcccgtgcctatgacctgaatggtattgcctagattttcttatagggtttttatagcttggggctttgcatataactctytaatccatgttgagttaatttatgtatatggtgtaaggaaggggtacagttttaatttactgcatatagttagccagcact

SEQ ID NO: 307599 - DNA, 478 bp, Homo sapiens
acaaacatatacaaaaatgtttaagatcgctaatcatcagagaaatgcaagtcaaaaccatgatgagttaccatctcacatcaattggaatggtgactattaaaaaatcacaaaactacagatgttgtcaagggagcagagaaaagagaatgcttatacatggttggtgggaataaaaactagttcagccactgtggaaatcagtttggagatttctcaaagaacttataataggagtcccacactgagctatatatatcccactactgggtgtatatcccacaggaaaacaattcattctatcagacacatgcacgatatgttcattggagcactgttcacaatagcaaggaagtggaatcaacctawgtgcccataaacagtggatttgattttttaaaaaatgtggtacaaatacaccatggaatactaggaagccataaaaaagaacaaaattatgtcctttgcagcaatatgg

SEQ ID NO: 307600 - DNA, 565 bp, Homo sapiens
gaatgtgtgccagcaggggaaaatgccaggcaattataaaactatcagatctcgtgagacccactcactaacacgagaacagcatggggaaaaccaaccccatgattcaattatctccacctggtctcacccttgacacatggggattattacaattcaaggtgagatttgggtggggacacggagccaaaccatatcagcatctctcctgattttccaaatgcaaatgtcttatagtctcttgctgaggaatatacagttgccgacttgccctttctctgaccaccccacacaaayaccatattggaatcagacagaatctgaatgccggaactagaatgcctcctcctttagggaagtaagctccataactcctgtccacattcctaacctggaagagtgaccccttccctccagaggtgctgatcccaccatttttgctaaaataggaagctagggtggaaacggagagaggaatggtgggtgagatattttgttttttcaaaggctctgcacagtatcttcaattagataaagtggctgtaacttttcttctattgacact

SEQ ID NO: 307601 - DNA, 436 bp, Homo sapiens
taagcatttattccattacatttacctaaytaatttattttttaaaatagtttacctagattacttataaaatctgtgatattagacatagctagctatcatttaaagtcatgaaaccagccttgcaaaattttaacagtgagaaaatattgactgtgacagagacctgacctaacgaactccatcttgcctttaacctccaaactgcccttgatctgggcatgggccaacctcactcagggagaaatctagtttatagttgatatgataatagcccttcccaacactaaaccatctttgtaaagctgatgaaagcccaccaggttaggaggatgagaagggcctgatttctgctaagatgtgggcatagttaaaggattaccagcccttattccagaggtcacaagatttgcaacttccctaattactagaacct

SEQ ID NO: 307602 - DNA, 601 bp, Homo sapiens
tggtgtgatcttttgggggtgttaaagaaccttgttttttcatattrccagagctgtttttctggttccttctcatctgggaagactatgtcagagggaagatccaggactcaagggctgctgttcagattcttttgtcccacagggtgctcccttgatgtggtgttctccctcttcccctaggaatgggggttcctgagagccaagctgtagtaatcatttttcctcttctgggtctagccacccagtggagctaccaagctcccggctggtactggggagtgtctgcaaagagtcctgtgatgtgatctgtcttcaggtctttcagccgtggataccagcacctgttctggtgcaggtagcaggggaatgaagtggactctgtgagggtcctgggttgtatttttgtttagtgcactggttttgtgttggttggcctccagccaggaggtggtgctttcaagagcacatcagctatggtaatatagggaggatgtagattgccctagggccacctgtttgtattcaggtttctcaggtggtgggcaggaccatagaactcccaagagattatgacctttgtcttccgctgccagggtgg

SEQ ID NO: 307603 - DNA, 601 bp, Homo sapiens
tggtgtgatcttttgggggtgttaaagaaccttgttttttcatattgccagagctgtttttctggttccttctcatctgggaagactatgtcagagggaagatccaggactcaagggctgctgttcagattcttttgtcccacagggtgctcccttgatgtggtgttctccctcttcccctaggaatgggggttcctgagagccaagctgtagtaatcrtttttcctcttctgggtctagccacccagtggagctaccaagctcccggctggtactggggagtgtctgcaaagagtcctgtgatgtgatctgtcttcaggtctttcagccgtggataccagcacctgttctggtgcaggtagcaggggaatgaagtggactctgtgagggtcctgggttgtatttttgtttagtgcactggttttgtgttggttggcctccagccaggaggtggtgctttcaagagcacatcagctatggtaatatagggaggatgtagattgccctagggccacctgtttgtattcaggtttctcaggtggtgggcaggaccatagaactcccaagagattatgacctttgtcttccgctgccagggtgg

SEQ ID NO: 307604 - DNA, 601 bp, Homo sapiens
tggtgtgatcttttgggggtgttaaagaaccttgttttttcatattgccagagctgtttttctggttccttctcatctgggaagactatgtcagagggaagatccaggactcaagggctgctgttcagattcttttgtcccacagggtgctcccttgatgtggtgttctccctcttcccctaggaatgggggttcctgagagccaagctgtagtaatcatttttcctcttctgggtctagccacccagtggagctaccaagctcccggctggtactggggagtgtctgcaaagagtcctgtgatgtgatctgtcttcaggtctttcagccgtggataccagcacctgttctggtgcaggtagcaggggaatgaagtggactctgtgagggtcctgggttgtatttttgtttagtgcactggttttgtgttggttggcctccagccaggaggtggtgctttcaagagcacatcagctatggtaatatagggaggatgtagattgccctagggccacctrtttgtattcaggtttctcaggtggtgggcaggaccatagaactcccaagagattatgacctttgtcttccgctgccagggtgg

SEQ ID NO: 307605 - DNA, 581 bp, Homo sapiens
cctttgagtccctcttggctgttttatcaagttctctttaaagcaagtgaccttctaaccattgaggactcaaagccagtaggaagagcacagaaagtgaaaggcatcagagttgtccttgggatgaaagcagaatctctgtgatggtagtgttcttgctggggcagtcatatcagtaatatccctgaaaatcctcgtactatgactctaaacttaaaaaaataaaatagagacaaaaaaaggaagggacgagcaagaaagctaaccctgaaaatttttcagtatcaaattatagcaacagaycttttgtccaccgtagagttaagaaaactaaacaaacactacggttacacagaaaccagatgtctctgctacactgacaggttgcatgctggaattccagatgctattctgttgaccaagatacatattcacacattttttgaattattgtaatcctaaagtgaattgcccaaaatgcaaaaagaactcctttggggtgtttttttaaaaaggtgagttaggagaaaaaagttaccaattttattttaagaactaaagccagctacttaagagtctga

SEQ ID NO: 307606 - DNA, 560 bp, Homo sapiens
ccaacatctagaactaagccaagcacttagtatgagctcaataaatatttgctwagtgaatgagtgtattgagcatgggtgactgaaagatggctaacagttaaaggcagggtcttggaaagtatatcccagagagaagtgaactcccagatagcaagtctgcttaaagaaactgaccttctctctgattttcagactatatgaagccattactgaaatgtcacctggggattgctagtgactgttcttcaaacctgtctgaatagttactgaaagccaagcttttaactaccattttcagataataacaggaagtagaagagacagtcagatgaccagcatcagaacagctctgtagcaaaaggcacgtgagaaaggaaccatgcatatcccagtctgagtttatcctaggatttaacaaagtgaagaacagaacacaggaaaattagcaacatatcagagagagggaaaaaaaaaaagatcaacagagaaataaataaaaacaaattaaatctgtgtttaaaattttaaatttgcataaatattttaagtagtgatgc

SEQ ID NO: 307607 - DNA, 560 bp, Homo sapiens
ccaacatctagaactaagccaagcacttagtatgagctcaataaatatttgcttagtgaatgagtgtattgagcatgggtgactgaaagatggctaacagttaaaggcagggtcttggaaagtatatcccagagagaagtgaactcccagatagcaagtctgcttaaagaaactgaccttctctctgattttcagactatatgaagccattactgaaatgtcacctggggattgctagtgactgttcttcaaacctgtctgaatagttactgaaagccaagcttttaactaccattttcagataataacaggaagtagaagagacagtcagatgaccagcatcagaacagctctgtagcaaaaggcacgtgagaaaggaaccatgcatatcccagtctgagtttatcctaggatttaacaaagtgaagaacagaacacaggaaaattagcaacatatcagagagagggaaaaaaaaaaagatcaacagagaaataaataaaaacaaattaaatctgtgtttaaaattttaaatttgyataaatattttaagtagtgatgc

SEQ ID NO: 307608 - DNA, 634 bp, Homo sapiens
cttttactttataaatgacccagtatttctcctagcagtatgaaaatggcctaacacagtgatgaaatactgcatacagcaaacccccatgacacatgttcacctaaacaacgatcccacacatgtaccctgacttaatgccaacatctagtttctttcaaagtaattgaaaattctttcaaagaatttctttcaaagaaattgttaaattttcacataaatactagaatgttcaaaattagtcatttcaaacaacactaatttcagatgatcccttttatttagatgtcttgcaactatttctctttatctaaaattgcatagtcttatatctgcctgttttttaataattgtacttaaaatatagttacatttttaaaataaatataacttggagagacccgaggtacttgatattgtctacacacattcattatcaattctttacaaattctgcagccaccatcagaattcttaggcttcctcttttggaagctgtcaattcttcaatattaacatgtaatttatgtatgacccattccagtgcttctcagcctttaktagcatttgaagatactgttcttgccaccggttttttcaaggtatctgctgaggctccttcctttcactactt

SEQ ID NO: 307609 - DNA, 365 bp, Homo sapiens
acactgttttcatcataccaaaaccccaaatcatcttgtgcttttccttaatttggcatgaggctctgcttgttctgatttgatctcttgatacttgctaatcttctgatggaggaaaaaattaattccataaatgtccctctggtgatcaggggatcttagatgctaagctttatttgtagcaacttcattcttagcatgagtccttttctccctttgcacataccacagattccatctctgcgtctgtgccagctcctggcaagcactcacaccgccctcgctcactatgatcaagttagagtgtgtatcaaaataarccctaaacattgtaaagcctaatagaaaatttaatccatctctat

SEQ ID NO: 307610 - DNA, 601 bp, Homo sapiens
cattacatgcatgggagcaactcaggagagtaaggacccaataacacaatgagacttcgaagcttatatgccttcttcataggggaaagagaagtgggaaatataggcgattgtagaggaagaataaatgatttttaggggagatgaatgggcccaaagaaccaaccacagcatgggacaaagtctatgtgggctctggtgtggcgtcaactctgctytttcttcctgtgatatatgtcatcttccctcctggtcgatgagctctctgggaaagggattcacaattgaacttctggaggacccagcctttgacgtagatagagcaacttcacagagagagccctttcctacatgtgatgctgcccagacgctctcagtttgaagtacaaagcagcacatttggggttatttttctgggccccaacagtaacttattatacatgagaggtactcccttgtactaaagtaatttgaatgtttttccaatttccactactagattgtgagctcctgcaaagcaggaaaaatcttacacagtgttgaatctttaaaacataataataataaaaaataactgaacagcgccttgtaaacattaatt

SEQ ID NO: 307611 - DNA, 516 bp, Homo sapiens
tccactactagattgtgagctcctgcaaagcaggaaaaatcttacacagtgttgaatctttaaaacataataataataaaaaataactgaacagcgccttgtaaacattaattacagtacttagaaactttaaaagtagtgggggagcagctaaataaaacctgctcccacttacttaggtaatagtccttttaaattacctaactgmaccacagaaaaattattatgccaattttcaatcttatctgtttctcccaataacacagaaaaatgaaaaccttagctagaataattgtaaacacccagcttacccagcacacatgagagagaaaatagaagactgagacagagtgtaacacatgattgcagctagaccaccagtgttttactaccttatttaagcttggtattattaacatgtagggctagaaaattcattgttatgggttatcctgtgtattgtattatgttggtgcaacagtaattgtggtttttgccattgaatgtaacggtaaa

SEQ ID NO: 307612 - DNA, 516 bp, Homo sapiens
tccactactagattgtgagctcctgcaaagcaggaaaaatcttacacagtgttgaatctttaaaacataataataataaaaaataactgaacagcgccttgtaaacattaattacagtacttagaaactttaaaagtagtgggggagcagctaaataaaacctgctcccacttacttaggtaatagtccttttaaattacctaactgcaccacagaaaaattattatgccaattttcaawcttatctgtttctcccaataacacagaaaaatgaaaaccttagctagaataattgtaaacacccagcttacccagcacacatgagagagaaaatagaagactgagacagagtgtaacacatgattgcagctagaccaccagtgttttactaccttatttaagcttggtattattaacatgtagggctagaaaattcattgttatgggttatcctgtgtattgtattatgttggtgcaacagtaattgtggtttttgccattgaatgtaacggtaaa

SEQ ID NO: 307613 - DNA, 516 bp, Homo sapiens
tccactactagattgtgagctcctgcaaagcaggaaaaatcttacacagtgttgaatctttaaaacataataataataaaaaataactgaacagcgccttgtaaacattaattacagtacttagaaactttaaaagtagtgggggagcagctaaataaaacctgctcccacttacttaggtaatagtccttttaaattacctaactgcaccacagaaaaattattatgccaattttcaatcttatctgtttctcccaataacamagaaaaatgaaaaccttagctagaataattgtaaacacccagcttacccagcacacatgagagagaaaatagaagactgagacagagtgtaacacatgattgcagctagaccaccagtgttttactaccttatttaagcttggtattattaacatgtagggctagaaaattcattgttatgggttatcctgtgtattgtattatgttggtgcaacagtaattgtggtttttgccattgaatgtaacggtaaa

SEQ ID NO: 307614 - DNA, 619 bp, Homo sapiens
cagctttttaaatgtcaccccaccaatattgttttttaaaagaaattaatttgttaattgcccagtgagtcaaattatgttctttggttaacaatgaatattttactaaatttgggaaaactaatttgctatcaagttcaaaccatagttcttttttgttatcaaaccagcaactatgatctttccttttcagcttctggtgcccattttgtgagtctttggtaattatttttcagtcatcttttgagggctcttttagtggggccacagtagagatttgattaagcgaacctttaatagcatcattctttgcagcattattagcaaggttgtttcttctagcttccatagagtytaccctggaatgtctggagttctggtaacaacccaggcagctggtagctagatggtattcaggaagtcctgtacatagaatcctccatttttaatttgatctcttgtggaagtgaggaaacccctttgtttccagagcattccacaatcctgagcaacaccaaaggcctatctgctgtctgtatatatatatatatacacacacacacacacacacacacacacatatatatacgtatatatacacatatatacgtatatatgg

SEQ ID NO: 307615 - DNA, 619 bp, Homo sapiens
cagctttttaaatgtcaccccaccaatattgttttttaaaagaaattaatttgttaattgcccagtgagtcaaattatgttctttggttaacaatgaatattttactaaatttgggaaaactaatttgctatcaagttcaaaccatagttcttttttgttatcaaaccagcaactatgatctttccttttcagcttctggtgcccattttgtgagtctttggtaattatttttcagtcatcttttgagggctcttttagtggggccacagtagagatttgattaagcgaacctttaatagcatcattctttgcagcattattagcaaggttgtttcttctagcttccatagagtctaccctggaatgtctggagttctggtaacaacccaggcagctggtagctagatggtattcaggaagtcctgtacatagaatcctccatttttaatttgatctcttgtggaagtgaggaaacccctttgtttccagagcattccacaatcctgagcaacaccaaaggcctatctgctgtctgtrtatatatatatatacacacacacacacacacacacacacacatatatatacgtatatatacacatatatacgtatatatgg

SEQ ID NO: 307616 - DNA, 538 bp, Homo sapiens
ctaagtaccaagacattcagaaacaatatctcactgtgcttccaatcagaagtgaaaggaagtagatgactcaattaaatgtgtatgtgtaaaatatatatgtgtgtgtgtgtgtgtrtatatatatacacacatttatatacacatacacacacatgcatatgcacattttcttttagcaaggaggcaaagctgagcaagagcaaaaagtttggtctgttgggcagaagtagccataggtaagggggcatcgtcaatgacttcaaaggaagtagtaactacataacctgagcagtatttaccactgttcttttttaaatatcgttcatctgtaaaccataatagttcagaattatctagtggagtttcttctaaatctttctgaggagtcagagagtttccaatagtcgtgtggtaggggttgggggttctcaccaaaagaagggggcaaaagggtagccgggttgagattattacattgaaaaagagtggtgtgaggagaagcttgtaaaaggagttcataagagggaaggtgact

SEQ ID NO: 307617 - DNA, 589 bp, Homo sapiens
ggagatataatgatgaaccttcattattttatttaacattcccagaaaaaaagcatcaggcactattctgctttctctgtgggttagctaagtaccaagacattcagaaacaatatctcactgtgcttccaatcagaagtgaaaggaagtagatgactcaattaaatgtgtatgtgtaaaatatatatgtgtgtgtgtgtgtgtatatatatatacacacatttatatacacatacacacacatgcatatgcacattttcttttagcaaggaggcaaagctgagcaagagcaaaaagtttggtctgttgggcagaagtagccataggtaagggggcatcgtcaatgacttcaaaggaagtagtaactacataacctgagcagtatttaccactgttctyttttaaatatcgttcatctgtaaaccataatagttcagaattatctagtggagtttcttctaaatctttctgaggagtcagagagtttccaatagtcgtgtggtaggggttgggggttctcaccaaaagaagggggcaaaagggtagccgggttgagattattacattgaaaaagagtggtgtgaggaga

SEQ ID NO: 307618 - DNA, 595 bp, Homo sapiens
tgagtacaagcttgaattttattgcagtctgtggctttgggaaatgctttgacaatggccccatgtaaatttcttgcaagttgctgagtctgttcccagtattgcagaccatatgctgaggaagtaggaacaggtctcactaaatccttttggagatgtwtacaatctgcttttgcatttggtgatggacctggctttctacaagcatacaaagaagtcagtaaaggccagagaagccaagctcttttaagcctgaactgtaatgtaaaattcatggaaaaataatgggagtcttcagtaactaggaaattccttggctatagcatgaggttcaaatttagtccaagggtcataagaaatctagggaacctcaggattgttagagagcctgatcttaaaggagcaagttttctaggttgagactgaaaagcaggagatggggtgttagcacaggaagatgtattaaaaaggaagaaagtttggaaagtgaaagattgagaggagaggcagtagatggcacctgagagacagaaggattttgaacttttaaagtctttttttcttcttttaatttattatttgtctttgttaatta

SEQ ID NO: 307619 - DNA, 595 bp, Homo sapiens
tgagtacaagcttgaattttattgcagtctgtggctttgggaaatgctttgacaatggccccatgtaaatttcttgcaagttgctgagtctgttcccagtattgcagaccatatgctgaggaagtaggaacaggtctcactaaatccttttggagatgtttacaatctgcttttgcatttggtgatggacctggctttctacaagcatacaaagaagtcagtaaaggccagagaagccaagctcttttaagcctgaactgtaatgtaaaattcatggaaaaataatgggagtcttcagtaactaggaaattccttggctatagcatgaggttcaaatttagtccaagggtcatmagaaatctagggaacctcaggattgttagagagcctgatcttaaaggagcaagttttctaggttgagactgaaaagcaggagatggggtgttagcacaggaagatgtattaaaaaggaagaaagtttggaaagtgaaagattgagaggagaggcagtagatggcacctgagagacagaaggattttgaacttttaaagtctttttttcttcttttaatttattatttgtctttgttaatta

SEQ ID NO: 307620 - DNA, 529 bp, Homo sapiens
attttaggcaaaagttgagagtcttttgacttttttaacctttttaaaaattttgacccatgtgtagatcaataaaactaccrtaaatttaaacataccaactttttacaacatttaaggtaataattgactgtaagaagcatcttatagccttatagacaagagatgactaatgagtcttccaaaggtgttcagcccttgagaagtagtttaaatcataggagaatatagattaagaatatattacctattcttgttactgggttttaagtagttaaaattcttttggtgttacataattcagagctgaaataaaatttcaaaattgggtattttgaaagaaaatacattgttctaccaaaaagacacctgtacttgtatgtttattatagcactattcacaatagcaaagacatggattctacctaggtgcccatcagcagtggattggataaagaaaatatgagatatatatctcctatagaatactatgcagccataacaaaagaacaaaatcatgtcctctgca

SEQ ID NO: 307621 - DNA, 529 bp, Homo sapiens
attttaggcaaaagttgagagtcttttgacttttttaacctttttaaaaattttgacccatgtgtagatcaataaaactaccataaatttaaacataccaactttttacaacatttaaggtaataattgactgtaagaagcatcttatagccttatagacaagagatgactaatgagtcttccaaaggtgttcagcccttgagaagtagtttaaatcataggagaatatagattaagaatayattacctattcttgttactgggttttaagtagttaaaattcttttggtgttacataattcagagctgaaataaaatttcaaaattgggtattttgaaagaaaatacattgttctaccaaaaagacacctgtacttgtatgtttattatagcactattcacaatagcaaagacatggattctacctaggtgcccatcagcagtggattggataaagaaaatatgagatatatatctcctatagaatactatgcagccataacaaaagaacaaaatcatgtcctctgca

SEQ ID NO: 307622 - DNA, 529 bp, Homo sapiens
attttaggcaaaagttgagagtcttttgacttttttaacctttttaaaaattttgacccatgtgtagatcaataaaactaccataaatttaaacataccaactttttacaacatttaaggtaataattgactgtaagaagcatcttatagccttatagacaagagatgactaatgagtcttccaaaggtgttcagcccttgagaagtagtttaaatcataggagaatatagattaagaatatattacctattcttgttactgggttttaagtagttaaaattctttyggtgttacataattcagagctgaaataaaatttcaaaattgggtattttgaaagaaaatacattgttctaccaaaaagacacctgtacttgtatgtttattatagcactattcacaatagcaaagacatggattctacctaggtgcccatcagcagtggattggataaagaaaatatgagatatatatctcctatagaatactatgcagccataacaaaagaacaaaatcatgtcctctgca

SEQ ID NO: 307623 - DNA, 529 bp, Homo sapiens
attttaggcaaaagttgagagtcttttgacttttttaacctttttaaaaattttgacccatgtgtagatcaataaaactaccataaatttaaacataccaactttttacaacatttaaggtaataattgactgtaagaagcatcttatagccttatagacaagagatgactaatgagtcttccaaaggtgttcagcccttgagaagtagtttaaatcataggagaatatagattaagaatatattacctattcttgttactgggttttaagtagttaaaattcttttggtgttacataattcagagctgaaataaaatttcaaaattgggtattttgaaagaaaatacattgttctaccaaaaagacacctgtacttgtatgtttattatagcactattcacaatagcaaagacatggattcwacctaggtgcccatcagcagtggattggataaagaaaatatgagatatatatctcctatagaatactatgcagccataacaaaagaacaaaatcatgtcctctgca

SEQ ID NO: 307624 - DNA, 502 bp, Homo sapiens
gttaaccatactataaacagaagtgctgtcatccaagctttgtttttccatttgtacagcacaagccaagtagatttagcataattcttgaggaccctaggattttcagaatggtaaataagcattggcttcaacttaaagccaccagatgcattagccccctgacaagagaatcagcctgccctttgaagctttaaagctaggcattgacttttttttctagttatgatggtctaagatgggatcttcttcyaatgtaaggctattttgtctacattaaaaatctgttgtgtagtgtagacatctttatcaattatctaagctagatttccggaataacttgctgcagcttctacatcaggatttgctgcatcatcttgtacttttatattatggagaaggcttctttccttcaacctcatgcaccaacctctgccagcttcagacttttcttctgcagcttcctcgcttctcttagtcttcacagaacctcatagaacat

SEQ ID NO: 307625 - DNA, 502 bp, Homo sapiens
gttaaccatactataaacagaagtgctgtcatccaagctttgtttttccatttgtacagcacaagccaagtagatttagcataattcttgaggaccctaggattttcagaatggtaaataagcattggcttcaacttaaagccaccagatgcattagccccctgacaagagaatcagcctgccctttgaagctttaaagctaggcattgacttttttttctagttatgatggtctaagatgggatcttcttctaatgtaaggctattttgtctacattaaaaatctgttgtgtagtgtagacatcttyatcaattatctaagctagatttccggaataacttgctgcagcttctacatcaggatttgctgcatcatcttgtacttttatattatggagaaggcttctttccttcaacctcatgcaccaacctctgccagcttcagacttttcttctgcagcttcctcgcttctcttagtcttcacagaacctcatagaacat

SEQ ID NO: 307626 - DNA, 495 bp, Homo sapiens
tgtgtaccttacagacaatatttcattgatcctgaaaaacatctcagtgaaataaacaagtggagatattgcaattatctgttacagagaaatttttaccacacaataatttcataagaactcaagtattgactaaacataaattcagaaatatatctctaatatttaactatctagattatggcttgttaattatttgggatgtagggcctctatgtggaattaaaaatctatgcagcactatgatgtgtagagaattacagtgattcaacatagtacctaaaggcctaactaattagctttgtgaccttgggaaggtcatataatgtctgaacctaaactacttcatcataaaattagtggagttgaactatatctmcatcatatctgcagtgtagtgaagtgtttgcatgtgtagagtttacagtcagaaagattccagtttgaattcctgctctgtcacttagctgtatgaacttgaataacttatttaac

SEQ ID NO: 307627 - DNA, 534 bp, Homo sapiens
tcctaaattataaacatttcattgacaaagagctcaccaagactgcactttcaaatttctctctyccccattgtttgagaataagtaactcgggtgaggaagaagctaaaacaactaagagattcattggcttgttatgagttagaaggggaggaatttggttctgcggaagaggttaaaagcagaataaagagctcagagggacataaaaagataacttgatcccttcttgtgaatttcctgaaggacttagtatgaatggaatggatttcccatggaaacttattttaaaaactaattgatttgtgcaaacagaggcatgatgtacaatttcaggagccatgggcagaagaaaccatgaacattaaactcagagaaatgaacagcacttgcagggaagagtcatggaagcaatgtcatctaaatctcaatgtgtagaaaaacccacaaacgttatctgagacacattaaaattaaatgaaattatagacaaaatacttgtcccctagaaagcatctaagaaacaacagttgc

SEQ ID NO: 307628 - DNA, 615 bp, Homo sapiens
acctgtaatggtattttattagttttatgactaattttataaattttcattttacatgaagcacacagaaatatagcaatatgagagggtatgttttgttgtctttaatggttcctatagggctgtctatgcaagagaaataactctggcttaagcaagatggaagtgttattttcctctcacataagagctgataaagcagctatacttcttccaggacctatgcctcttccaggtctctgctgtaccatcttgatagtctggctatgaacttcagcttacatcatggtttctgaagctccagtcatcatactttgttacaggaaacagataacagccaatggcacagatgtgcatatcagccaagtcagtccccttttgaaggccccttcccaggatccgtatgtgataatctttagctacattttagcagccagatagtttctactagctatgcaaagaaatcggtgaaatgtagttttggctgaatgcatggcagtctccaacaaagttggggttccattgaccygagagaaaaagaaagtagatattaaatatgacttagaagttcagattctgtcttatacttaatatttggctgtggaaaatttattc

SEQ ID NO: 307629 - DNA, 591 bp, Homo sapiens
gctctgcatggtgtgctgtacctcctgtttctagggatctgtgagtataacaatttcttctttcatgacagttatgtcatacatgtcttacaacacctgattaacacacagcccaggtacatttttaaacactaacacatcttttttttttcttaatttttctaacatatcttttatagccagtaactctaactataccttacccacacaaatgtattcttatagtcatcaaaaggtctctctgtggccaggcacagtggctcacgcctgtaatcctagcactttgggagggtgagacgggtaggtcacctgaggttaggagtttcagaccagcctggcaacatggtgaaatcctgtctctactaaaatacaaaaattagccaggcatgatagtgggtgcatgtaatctcagctactcaggaggttgagatgggagaactgcttgaacccrgaagacggtggctgcaatgagccaagatggcacccctgcactctggcctgagcagctaagagagactccatctcaaaaaataaaaaataaaaaagtctctctgttcctgcttatttgtcctgttgtttagaaatgatgaa

SEQ ID NO: 307630 - DNA, 358 bp, Homo sapiens
tttcctatgacttcacttttcaaagagaattcagaagtgtcgtcctaggaccatatttagaatttcttactccaaaactatagtaattcctaagcaccccagccacacaataacagaccatccacatatttagaaaatattttctgatcaaggttatagcatgttttctggaataagaaaccaacaggaaatttggaaaycttttggttttctttcagacttttatgatgttaggtcattagtagtccatatgcagtcatgttggggtaaggcagcagatgggcaaaattgaccagggtcaataattttgcatgcaggaagagtctcctagattgctttaacctagtggtaaaaccag

SEQ ID NO: 307631 - DNA, 556 bp, Homo sapiens
tctgttgccatccttagcacaaggtgagaggtatcgaatgaggaagataagatagtgatgacatttttccaggcagatcagttctgggcccgcatgacacaaaggcacatgttgaggcattgcaaaaggcctcagccacctgggaattttggggtaggggtgaagctggatgtgatctctcttttttaaaaaaattttactcttgattctcccaaacatttaatggaatactagtacatagtagctcttacataaaattttcattacttaaaattctcttgcactcagaaactcacaggagcctctcaatttctttgccatcacttcatacataccctcctgggcccacctttgtgatacctttggttttgtgtcctctgctctccwcagtgccatactatacattctgaagggcccgccatgtggcctccaggagagtgaaattcttttttcaccttttaatgtttttcttaggctctagtgggtttacatatgttccattttcttctcaaagagttggggtggttgtgggtagagtattctctgtaatggtgag

SEQ ID NO: 307632 - DNA, 426 bp, Homo sapiens
atttaattatcactttgccacaggcctaatgcctcacaatatagccaataaaacatgggccagaacattctgtgaattcacctagtaagttagctgtttttaaaaagcagtcccttccattcatgtctatactcatatctgtatttttatctgctttaactttcttttactccttctatgaatatgcttaaatcttactcatccccaaaatgatttttcctttccccatgacttagtccactttctgttgctcataacaaaatacctgaaacagagtaatttataaagraaaggaatttatttcttgcagttatggaggctgagaagtccaaggttgaggggttgcatttggtgagggccttcttgctgttggtgactttgcagtcctgaggcagcacaggacacctcatggcaagggggctgagt

SEQ ID NO: 307633 - DNA, 590 bp, Homo sapiens
ctggtggtacgtatcagagagatggtggcaaattgtggtgagattggtgagaagtagttggattgcagagagattttggaggtagaaatggaagtattttcctattgagttgactgtgagagcaagagaatagaatggatcatcgcaaggttttggccaawgccacaggaaagacaaagttgccattttctataatggtgatgactgagagaggtaatgaatatcatatcataaaatctgtatagtaaaatattctgctgttttgtgaatttgcctctttcattctaagatttgaggtaatctttccctttcttatcatatagtattgcagcattcttgaggtaatttcatataattccatttgtttttatttttatagccattttgtttagataggccaacaagattttattattccccatgtaacagatgagctgactaaggcttagaaaagctatgagattaacctaagcctccagtgtgaatacaatggattgtacactggaacacagtattttgcctctttgcttgacatattttaaaccatataatgctttccaagaatcaggacagtgcaggataatttcaag

SEQ ID NO: 307634 - DNA, 602 bp, Homo sapiens
tctttcattctaagatttgaggtaatctttccctttcttatcatatagtattgcagcattcttgaggtaatttcatataattccatttgtttttatttttatagccattttgtttagataggccaacaagattttattattccccatgtaacagatgagctgactaaggcttagaaaagctatgagattaacctaagcctccagtgtgaatacaatggattgtacactggaacacagtattttgcctctttgcttgacatattttaaaccatataatgctttccaagaatcaggacagtgcaggataatttcaagacaatgtagtccaaaaccttatcattatgcctgaagcaactaacagagaatctaaataaccttctctggatcagtctgttttgtttttcaaatctagaaaaagacttcatattgaccytctattttggcacagtaaatgacttctgtactgtattttttaatcagaaaattgcccactgaggtagaaagaaaaccaggagaaagcaatgttccagaagctagatgatgaaagtctatgagaaaggaacaacctactgcaccaagaaggaggaggctgagaagtggcc

SEQ ID NO: 307635 - DNA, 595 bp, Homo sapiens
accctttgcagacattccctagtaccagcccagaggctggtagctcagctgggtggctagacaaagaaaagaaataacaatcactgcagtttttctctcagaaagccccatccttaagggaagcggggagaacagcatatcaagggagcaccgcatgagacaaaagaatytgaacaacagcccttgagccctaaatcttccctctgacatagtctactcaaatgagaagaaactaaaaaaaaaaaaaaaaaaaaaaaaatcccaaatctgataatataacaaaacaagtttctttaatatcccccaaagatcacactagctaaccagcaatggatccaaaccaagaagaaatatcttaattgccagaaaaagaattcagaaagtcaattattaagctaatcaaggaggcaccacagaaaggtgaatgtcaacttaaagaaatcaaaaatatgttataggatatggatggaaaaaactccagagaaataatagcataaataaaaaacaatcacaacttctggaaatgaaggacacacttagagaaatgcaaaatacactgcaaagtctcaacaatagagtttaacaagcagaagaa

SEQ ID NO: 307636 - DNA, 612 bp, Homo sapiens
taagaagactatctatgtgctcctcaaatgtgtggagctattcaattcaagaaacaatttcttaggtcactcctaccaccagatactttattagtcaatttccttgcagaaaagagattgcacatgcaatctggctaatttgtgaaaagtttaataaaagactacttaagragaagtggacatgaagtgcaaagaaaaaataaatgaagatttggtaactccagagctagcaacagctggaaactattattgttcctgggcctaaaggagagtgagcagtttgagaatgtgaagttactagttgtccacccaaaagaagctagggcaaccaactgtagaaagagaattgagtgggtaatgccctgaaatcgctctactcctagatttctggatcagcagacacaaatcaaaattgttcatcatacatagtcttagtagggaaaacatttccactgaggccttgtagccaaaaattacaagtttagacgttattctaaatgtcatgcaaaaccacttaaagtttttaagctgggaaataacattggattcaattgatgatttaaacataattctctggctgttctgcagaaaatagattggaaagagtcaaga

SEQ ID NO: 307637 - DNA, 612 bp, Homo sapiens
taagaagactatctatgtgctcctcaaatgtgtggagctattcaattcaagaaacaatttcttaggtcactcctaccaccagatactttattagtcaatttccttgcagaaaagagattgcacatgcaatctggctaatttgtgaaaagtttaataaaagactacttaaggagaagtggacatgaagtgcaaagaaaaaataaatgaagatttggtaactccagagctagcaacagctggaaactattattgttcctgggcctaaaggagagtgagcagtttgagaatgtgaagttactagttgtccacccaaaagaagctagggcaaccaactgtagaaagagaattsagtgggtaatgccctgaaatcgctctactcctagatttctggatcagcagacacaaatcaaaattgttcatcatacatagtcttagtagggaaaacatttccactgaggccttgtagccaaaaattacaagtttagacgttattctaaatgtcatgcaaaaccacttaaagtttttaagctgggaaataacattggattcaattgatgatttaaacataattctctggctgttctgcagaaaatagattggaaagagtcaaga

SEQ ID NO: 307638 - DNA, 612 bp, Homo sapiens
taagaagactatctatgtgctcctcaaatgtgtggagctattcaattcaagaaacaatttcttaggtcactcctaccaccagatactttattagtcaatttccttgcagaaaagagattgcacatgcaatctggctaatttgtgaaaagtttaataaaagactacttaaggagaagtggacatgaagtgcaaagaaaaaataaatgaagatttggtaactccagagctagcaacagctggaaactattattgttcctgggcctaaaggagagtgagcagtttgagaatgtgaagttactagttgtccacccaaaagaagctagggcaaccaactgtagaaagagaattgagtgggtaatgccctgaaatcgctctactcctagatttctggatcagcagacacaaatcaaaattgttcatcatacatagtcttagtagggaaaacatttccactgaggccttgtagccaaaaattacaagtttagacgtyattctaaatgtcatgcaaaaccacttaaagtttttaagctgggaaataacattggattcaattgatgatttaaacataattctctggctgttctgcagaaaatagattggaaagagtcaaga

SEQ ID NO: 307639 - DNA, 604 bp, Homo sapiens
aagtcatctatactgtgccctttccaaattcctgatccagagaatccataaacataataaatggttgttttataccattaaatactggagttatatattgcacagcattgtaaccagaatttttgataaatgataggtcttgtaatgtcagaactcctcagatataatggaataatattataattaccaacaacttcattattaacattatcatcatactcatcaccattattaaaatgacagtatttcataagtgtcctaaatattttctcttggaaaatacaaagtcaagggaaaagcattactcaatttattcaaagattctctaaacttaactttcctgtagtacatatttcttgaaatgaagartgcctataatgtttataatgtgttcttgccactgaaggcctgagtcaggggaaacttccagaagtgtttgacaagctgtatgtgtttgtttattttaattatgctgaacaatcaagagaattgaaatagagtactgtgaagacaagcatttttttgcaagttcccaaacaatgcatgtttaatgtgcccaacttcttatactagctatagggaaaaaaattacctaaacaagccc

SEQ ID NO: 307640 - DNA, 449 bp, Homo sapiens
ttccctcctactttcatttttacctctgtgtgagcttactcccctcctaatgagacactactgctcttaactgtcagaatttagaaaaatggaaagtttttaggggacaagtgatatctaagtttgacaaatgagtaatgtccttcactttcttaattctaagtcaataggctcattggggctgtgttttatttttctgaacatgaytgaaacttgaatatgaaaagagaagcctaatttcataattattaccgatcagactcttggaaaaatggaatacagggaagtgaaagtactcaacagaaaatacacagcattgcctttcctcattccccaataatggacagattataactaaattttacagaagcaaatctgtcttttgttattattctttgactacaaacatgtgcatggtaaatccatacagaaggcatttcactgtattg

SEQ ID NO: 307641 - DNA, 596 bp, Homo sapiens
tggcttgaacaacaaacatttgcatttcacagttctacaagctgggaagtccaagatcaaggaactattggctttagtttctggttaggccactcttcctggtttgtagatgkcaatatttttattgtattctcatgtggctgaaagcagagaaaaaggtaactttgtctgatcttttaataagggcattaatcctatcatgacagccttattctcatgacctaatccaaccctacttacctacaaaaggcccaatctccaaacaccaggaaattggggattagaatttcaacatataaattttgaagggacatcaacattcagttcataaaagacatagtaagtttgtgatgcctatttataactaagtggagattttgaataggcagctggattatatgagtgatatgtgaggctagagctcaagaaaaatggccgggctaaaaataaaaattggaaaatcatcaggagatacatgctatttaatgccttgtcattggatgatatgaacaatggggaaagtctatgtagagaacagaaggcggcctaaaattgagccctgtgtcactgcaaaatttagagttcagaaagaaaga

SEQ ID NO: 307642 - DNA, 621 bp, Homo sapiens
caccctgcgtataactaaagtcagaaacccagctgtaagaccaatgttagcgtcattgccatttgttttagtttcccaggccaagattctaccaccgtctgatcagtctcttctctataatagtgataaattccttttagggttgttatttgtaaaggattctaaaataaggggaaataattatttttttctcttgaaaaatttaagtgcctcacaggacatggcatgaaataagaaaatgtaagtggcacccaaatatgactaaatgagtcagccttcttactcatatcctggaagtcatgttgcgatgtattcaggatatcattcggctcaaacacttataaatagctcctaagtgactgtttgatttcccgacttcccctaaggatgactggcttcartatgtaatccttatacaaattagcagatttaagttaactccaaggttagcaatagtcaagggtataaggatttaaggtaacaataccaccaacattgagaagtcacgtatgaggccttcaagatcaaagattactacttcaccaaattcatttctcatctctcttctttccattctctaaatttataattttcttagataccattaccattagttatatt

SEQ ID NO: 307643 - DNA, 501 bp, Homo sapiens
gatgaatctttttttctcttgctgttttaaatattctttgtctttgatttttgacacttttcttatgatatttcttggtaaactcatctttggattgatcttgtgtggaaacttttgagcttcatgtgcttgaatgtctacattttttctcttatttggaaagttttcagccatttttyaaaaataagatttctttcccattctgtctcttttctccagattctttcttcttcttagtaacatctgctcttgatcatctctattgcatttttattctattcattgtgttcttcaggtccaaaatttctgggttctttaaatgataaacttctcatttgttcatgtattgttttcctgatgttattgaacctgtgttctcttgtagctcactgaacttccttaaagcaattattttgaattgtcaggtacttcatagatctccatttcttcaagctcagttactgaaaaattattgcatttgtctagtagtgtcatgtttcc

SEQ ID NO: 307644 - DNA, 578 bp, Homo sapiens
ctttgtccatggagactcaaagggcgccagagagtcattgctctagtgaacatcttacttgtaatctgcaaagggaagacctgtgggttgctcttaatttaattcacggctggcagccaaaggtccagttctgcagaaggctatgagatgtaaaaattctgcatgaagaaaaaggcgacttggtgccactactaaatatatatgcacctttagggcacaaaatcataaaatgtgcacaaaaccaaaaaaagttagtgtgtrtatatgcgtgtaagagaaagggaaacaaagagatttggataagaaaatattctcaaggaaattacattaataattatatgaaaatctaaaaataaatataagaacatttagatataaatatggacttaaaaaggaaacttatcttcactaattcttgactattttttatgaataaaacctactgctagtccagctaagattgtcacttgtccttccttgactaattcttgactatttttatgaataaaacctactgctattctacctaagattgatacttgtcccagctttacccaatgcactttatcagtaaaggg

SEQ ID NO: 307645 - DNA, 578 bp, Homo sapiens
ctttgtccatggagactcaaagggcgccagagagtcattgctctagtgaacatcttacttgtaatctgcaaagggaagacctgtgggttgctcttaatttaattcacggctggcagccaaaggtccagttctgcagaaggctatgagatgtaaaaattctgcatgaagaaaaaggcgacttggtgccactactaaatatatatgcacctttagggcacaaaatcataaaatgtgcacaaaaccaaaaaaagttagtgtgtatatatgcgtgtaagagaaagggaaacaaagagatttggataagaaaatattctcaaggaaattacattaataattatatgaaaatctaaaaataaatataagaacatttagatataaatatggacttaaaaaggaaacttatcttcactaattcttgactattttttatgaataaaacctactgctagtccagctaagattgtcacttgtccttccttgactaattcttgactatttttatgaataaaacctactgctattctasctaagattgatacttgtcccagctttacccaatgcactttatcagtaaaggg

SEQ ID NO: 307646 - DNA, 580 bp, Homo sapiens
ggttcttctacacgatgttcacatcwcattctcttcaaattactcaatttgaatgtgccatctcttttctgccagattctgacagatacagataataaggttcaaccctttgtcttgtcacttctaagctaagaagatttgggccacccattttacagatttgagctttagttttctattcattatatttgaaaaagtatacttccttggcaaggttgttatgggaattaaatcatgacacgctagctgaaaaagttttcattaatattttctccctttctcatcttagactctccccatccaacactgaatatttattctctttatctttttatttctttgcatgttcccatttttcctctctcttttgaaggtaatggaatttttctatcatgtgtaaatgcataagtaaatcatatagaggtgtataatatacagaaggctgtaaaaatggcttaaatgtaccatggatgttcctggaataaactgttgctatttcaactgctgcagaacagttaagtcaaacttttgaattaggtcaacaaaatccacaaatagggaggaatctttggactgtcta

SEQ ID NO: 307647 - DNA, 554 bp, Homo sapiens
tgaaaatgaataaggatatgtaagatgtgaatacttctattaacaaattttttttggtgaacacttttaaaaccttgagtccttttattggaaaacacraagtctactaaaatgtcagaaactgttaggaaaatatgccatgtacttggccataaaactagtttcaacaaatgtcaaaagactggcatcatgtaaaccacatcttgtgaccacaatacaataaatcaatggaagttcattttaaaagttagaaactaataaaaacagtaataacaataaaagtaataacctgctttacaggtaagttttgccaaacatttaagaaatagataactgcaatttataaaaatatttacagaacacagaaaaaaaaagaatagcttccaaattattttgtgaaagtgtcataacctgatattgtttggatgtttttcccctcaagatatcatgttgaaatataatctctaatgttgaaggtgggacttagtgggaggtgctggatcatggggctgatccctcatgattggcttagtgccacccccttagtaatgatt

SEQ ID NO: 307648 - DNA, 609 bp, Homo sapiens
atttctaaaagcctaaaattaactcagatgtcttggtctccagttagcctcatgttctatgtgagcttcaacgagcatctaggtttctagagcatccttgatatttcgcctgttaacagtagagggtacccctcagcagggatgcaacttgtgtcagatactgctgtaaccattttacatagatcacctcgtttacagtcacaatccagagtagcagtattactattttatcaatgagtattagataagtaatttgcccaaagccacccaggtagtaattggtgaagctgagatttaaaacctagtttatctggctggatgcggtgactcatgcctataatcccagcattttgggaggctgaggcaggcgaatcacgaggtcaggagttcaaggccagcctggccaacatggtgaaaccccatctctactaaaaatacaraaattagccaggcatggtggcacgcaccttagctccagctacttgggaggctgaggcagaagaatcacttgaacccaggaggcagaggttgcagtgagccgagatcacaccactgcaccccagccttggtgacagagcaagattgcatcaaaaaaaaaaaaaaaagaac

SEQ ID NO: 307649 - DNA, 596 bp, Homo sapiens
tatttttaataagtcattatacgaaagagatacttgcacacacatgtttatagcagcacaattcacacttgcaaaatcgtggaaccaacccaaatgctcatcagtcaatgagtggattaaaaaactgtggtatgtatatgatggaatactactcagccataaaaaggaatgaattaacagcatttgcaatgacgtggatgataagctatgaggactcaaaggcccaagaatgatacaagggattttggggacttgaggaaaagagtaggaggggggtgagggataaaagacaacaaatatggtgcagtgtatactgcttgggtgatgtgtgcaccgggatctcacaaatctccactaaataacttactcatataaccaaatactgcctgtaccccaataacttatgggaaaaataaagtaataacaaaaataaaataataaaaatgtcattttaactctcattctttgtaaatgaactggtcacttccatccawgcctctgaaccattactcacctttccccacccttctccactctgctctgtgtcttaggtggctgcagggcctgaatgtatagtaattgacggatatcatttt

SEQ ID NO: 307650 - DNA, 554 bp, Homo sapiens
cccagtaccatcacattaggggtttggattataacctaaccccttttgggggtttagggggttgctttgggggtggtgacacaaaaattcattccataacaggaagaaaaatcaacgtagcctgacatacgcataatttaaaaatcaatatattccaatggaaatcatacagccaggaaacagaaagattctgtaatatgatgttccttatttttacttcctgcatattcaacacatgagagggatgtctattttattgtttggcccataactcatgtttgcataaatgcttttctacttcctttcaataatctttcactttgctactygattttcacaaaaccctatgaagtatccctgacagccatatattatgcccattaagtagctaagagaatttctttttaaagagactgttggtgggcccaagggatacttaaactcccatgtccattgcagcactgttcacaatagcaaggttatggaatcaacctaagtgtccatcaacgcataaaggaataaagaaaatgtggtatatgtacacaatgaaatac

SEQ ID NO: 307651 - DNA, 498 bp, Homo sapiens
cctcccaacccaagccattttagaaaaggtttaggttttcttttgtgcagtcttttatgattcagctgctctgagagaaacagaatgaaatcaatcttatttcttgtatattttatcacctgatttcagagattctctgctttgattacttaaaaaaaatggcagagttctrtgatgctgtcactgactgacatacagatttaaagcctcagataagaatgtatggtaatcagataaaaaggcctgggctgtactaaaaggtgctagtaatttcccaactgaaggtgaggcttgcagaacctgcagagatagggtaggagcaatttgcactcaagccctccctcttaggagaaaccctgtctctgtaatctccattcttcctctaactgcaaagtagtcccaagaggtttctttcagaaaacttctcttagcctttcttccccttgttttgtgtgattgctgattcaaactcagtgattctattcttgatcaagcacg

SEQ ID NO: 307652 - DNA, 624 bp, Homo sapiens
atacaggaatgttttaaacgtcattctttctcatgcccgtgggctggtgctttctctccactgcacctttgctcttgcagttcttctctcctctcttctgtacccattgccaataaccattcctgatgaactcagaattaacccctttctgatgctgcctgtatcatcccattcaaaagtccttattaygctttaataaccattttaaattgattttagaggtgtgatttttttcaccttttaatgtctctgaaatccagatgcaccttacaattgatcatttcttagaattactgcccaccaggcagctgtggcaaggtcgtggtctctgccaatgtgtgtgctcgcatggtcatcactgctattcttttcatttcttcagttgagttatgcacctagttagcactaaacaagttaaggttaatcaccatttaaaatgccttgaaaagatgacacagtgcctcactaccgaaacactagttattgtgtaagcagaaaacacagaagcagagcagagggccatgaattttataatagtggagcaagtattcaaagtaacagtcaagtgctttataggacccaagaaagcaaagtacccagaagtagacgatgccgggttgtttt

SEQ ID NO: 307653 - DNA, 501 bp, Homo sapiens
aagggacaccctcttcaccccaacgccaggtggcgctgatggaaatggctagcaggccacactttgagaaaccctggcccagaatatcatctatcttaacctttgctgtaattgaaattttccttttacstctcacttaataatcatgagcactatgaatccctgtaactcaggcaagaagaaagaattctccactgctgatggagctattgtttcagatcataccattgattagggatcaggagtcgtttagtaagcctctggtttccaaagtagcttaagctctaatttcatagacattaaatcatcctggattcctccctcttaatggcatgttggcagagcagttatagctcactagagagcaggcttgcctcagctgttactgcctcagccaggtggtcagaggaaaaatgaatttgcttacctgggaaaacaggttgcctataaatcaaaagaggtcaagttatgtccaccagatggaggttttaaaatcttaat

SEQ ID NO: 307654 - DNA, 608 bp, Homo sapiens
aatgatgttttgaaaggaccagctctcacatccagctcttattgtgtgcacctctattttgaaatcaatctacttctagacttactgtaaaactcagtcttagctatgatgtccatggctagtaaaatttaaacttggaatatgtttaaatgtaaggctgttggttgagtaattgcagattatcaccacccartgagcacctgttgatttgaatacctactgaattggctgtgctgaagtataactgtggcctaaaggtctagccttttaaacttcctccttgtcgttcttaagatactcatcctgataagcatagtcctctgaaacgaatcctacattcagtttgtaactccttccaagcagctcagttctggatctgctcttttagacccccttttcttttctgcaggaagaacaaaagagattttagagacagtccttatgaagagctgctagacaagcgaaccatttccgcagcacagactcagacttcgagattccctttcccgggtataatatatcaagccatgtcaacaactagagaaaatggatacttcacagtaaaagcaaatttttaaagacaatgaaaagctatagaagcaacaaag

SEQ ID NO: 307655 - DNA, 491 bp, Homo sapiens
tcaccacccaatgagcacctgttgatttgaatacctactgaattggctgtgctgaagtataactgtggcctaaaggtctagccttttaaacttcctccttgtcgttcttaagatactcatcctgataagcatagtcctctgaaacgaatcctacattcagtttgtaactccttccaagcagctcagttctggatctgctcttttagasccccttttcttttctgcaggaagaacaaaagagattttagagacagtccttatgaagagctgctagacaagcgaaccatttccgcagcacagactcagacttcgagattccctttcccgggtataatatatcaagccatgtcaacaactagagaaaatggatacttcacagtaaaagcaaatttttaaagacaatgaaaagctatagaagcaacaaagactagaggaaatgacactccaaaaggaaagagcctttactatgtgacctgcgagttgatagttat

SEQ ID NO: 307656 - DNA, 585 bp, Homo sapiens
ctgtgcacccccagatggctgacttcctgccactcaggtgactcaggtgttcctgggacatgcctttcctgacacctgatcagaagtggtgtcttgctgctccacttcttggcactctgtgaaatcatcctgtcctatttgcttattgcctgtccaccagaatacaaattccgttagatctggcttcatctgtgtcctcagcgccttggccacatttacttgcctagtaattggtactcagtaaatatttgttktaagggtcaaggaatcactgaacatcctaattaaaattatttacgtgtttcgacaaatattagtcaatatttaaatatgtagtaggcgtttacactttccattttaccttctaagtctctttcaaatctgtccatctctcttcagcttcactgccatccccgacttcaagctaccctcttctgttgattgaacaagtgccctagactcctgtcctagcatccactgaagtaccaacctccaatccgcagcctttcatggggcagagtaatttgtattttgaaatgagaaccctttcatagtaaagtcctacttaacccacttcaaattgtc

SEQ ID NO: 307657 - DNA, 497 bp, Homo sapiens
ccacttcaaattgtctcatctcccttagaactctgttttgacttgttctccacagtattgcaaggactggccgccacctcttttttctagagccactacaactgtatttcccttattctctgcagttcagccaccaggaccattttgcagggtccctttctccgagaagcctttttattctgctgttttgactacctggcacgccccacccattccttccactttagctagttactaaccatctgactacaaatcaagcattcacatcattgccattcagcttcccattggcacagaaagaggctacaggggctaagttaaggaatgygaagtaccctcctcgttactcctcaaaaaggaaagaaagtgagctttttcttagagagcctccacctccatgcccgtggtggtcgccatggcagagggactcaagctaaaaatccctggaagcagcatgcaatcagccacaaggttttcctcttctgacacctaaacac

SEQ ID NO: 307658 - DNA, 525 bp, Homo sapiens
ttgcattataactatttgcatatctgtgtcctttctggactttcttctttgtagcagggaccatatcttactcatctttaagtctctcatcttatactcagatmtcacgcttacatccctggctctcatcacagggcttggcaggtgacaggcactatttaaatattggtttttgcttaaatgctgagggttcctcagacatccttggacactgccatgaatgttgagatgtaaatagtcataggatatattttacaatctttctggatgatttgttaaataaattctctcggcattgttactttttgagggaaacttttatgatagcccaaattcccaatgcatagaaagacaaagacaatagaaaaatacaaactttgcaaaaatcagggcaataagaaatctgaaaagcaagtgggaatgcaaccatccttggaaattaggctaggtcactgaggaaaggatccaaagaaatagcacaagagtgtagggacatattcagagggacaaaacacaaaagaaaca

SEQ ID NO: 307659 - DNA, 601 bp, Homo sapiens
taaatggcatcttcttctaatacagggctattttgtctacactgaaaatctgttgtttagtataaccaacctcatcaatgatcttagctagatcttcctgataacttcttgtagcttcttcatcatcactgtctacttcaccttgaacttttatattatgaagggagatgacttttttccttaaacctcatgaagtaaacatgaaattgctagcctccaagttttcttcttcagcttccttaccaatcttagctttcatagaattaaagagagttaattctctctttaattcttgccctgggttaggctttcgtttaaggaaatgttgtggctggtttgatcttctatccagacccctcaaactttatcagcatataaggctgttttcatcacttktattttcactgagtagcacttttagtttctttcgagaacttttcctttgcattcacagcttggcaaactatttggtacaagaggcctgtgtattgacctgtcccagctttcaacatgccttcttcagcaagcttaatcgtttctagcttttgatttaaagtgagagacgtgtaactctttccttcatttaaacacttaggggcca

SEQ ID NO: 307660 - DNA, 433 bp, Homo sapiens
gtgttttttgtatcttggtattttaagtatgtttcagaaagctgttttcaaagcaaatgttaacaatcgtgttgatctcttgaaggatatacatattttaatattttgtattatattttgtacacatggtaggacaaatacatttcactctctttcactgtttctagggcagatctgggagtaaggggccatgacgacctttccctcttgtgtcgtcaatgtctgctatcagtttggcagaatcagtgaagacaaaaaccgttttcccttgttttgttttgttttktttttttttctttcatcttctatggcattaaaagtgaccttgccttgcaaatatcggtgtggtaccacaagggaagcagttgccatagaggagaaagttttctttcttgattattattattttttttaactataggggctcaaggag

SEQ ID NO: 307661 - DNA, 433 bp, Homo sapiens
gtgttttttgtatcttggtattttaagtatgtttcagaaagctgttttcaaagcaaatgttaacaatcgtgttgatctcttgaaggatatacatattttaatattttgtattatattttgtacacatggtaggacaaatacatttcactctctttcactgtttctagggcagatctgggagtaaggggccatgacgacctttccctcttgtgtcgtcaatgtctgctatcagtttggcagaatcagtgaagacaaaaaccgttttcccttgttttgttttgtttttttttkttttctttcatcttctatggcattaaaagtgaccttgccttgcaaatatcggtgtggtaccacaagggaagcagttgccatagaggagaaagttttctttcttgattattattattttttttaactataggggctcaaggag

SEQ ID NO: 307662 - DNA, 569 bp, Homo sapiens
aaatctcatatcctaataaaggaaccctataaaccaacattaagataggtgagaagaatataagtggtatgcaatttaaggaatgaaatagcagcaatttgcatttyttctgtctcattcagtagcattcattcttgtttcttattaaataagtcttgtaaggtaccttgaaaacaccagtggcaaagtgatggaccggtcaagagacgctttaaaaatgttggtctccaggttttataagcacagtgctttgagtgtttcgtgtttgaagatgatgaagataattaaatgtaaaagaaaaatctccttcaaatagggagcttgcaagcaagataggtacatacaccattaatcatactgtgatttaagcacctagaaagtcattgctcaattatcactgctaatgaagaggagcagtagtgccggtgatccaacatggcagctagaataatttatattcaagtcaaaatgacttttggtacttacatttgaatataatggtgtctggtattctgggactcctagctgagcgcccagcaggcaggagggttcccacacatgcacttgct

SEQ ID NO: 307663 - DNA, 591 bp, Homo sapiens
aaaaaaaggagtttgtcttctcttttctctaccagctgccgtttctctgccagtattatgatcacaccagttgcttgcttcatagcaggtacaaaataaagcaatttcctcagctaccatcaaaggctgtctgcagggtatggaataacagcagaaccctcatcctaggataattttgtcaattccactcccactcatgcagtaaaaactcagctagtagcagctaatagtagctaatagttattgagtacttactatatgctaagtgctttgcttggattatttcatccaactcttgcacaattagcaattccgctccattgccacagtgaaactaggctatattacggctatcagcagctgatacatattgagcatttactatgtgctaaatgcattccttgcattatctcatttaatcttcactccaaccctctggtcttgtaakcacagatgattttagttctttgtgatttatttggagaacatggtcagttgtattcacttctccacctcatggaggtctggttcatactgagctgcaatttgcaaacaagatggctaagaagatgatgaagaaataaaagaaag

SEQ ID NO: 307664 - DNA, 458 bp, Homo sapiens
caactgtgctgactctcatccacaacatagagcactcacttgtgcacaatacttggtgttgaagctacttcctggagcctttcagtgactaatggtgactctccttaacgtgttattctccctcctgtggtacaaacatgcgtaatctgattaccattggcatttgctctttgtaagactgtaattataacaccagtcaaaggcttgtttaaaatatttctgttcagtgcagtttttccaaggtcaagttgygataagtggggtagaagatgttggatcaatttgaacactattgagagggctgccgcatttagagttaaaattaacgaggatcctatttatgcgacttcatcacagcaactcaagaactctcctgaaaacgcatctctagtttttgttttttaatgaaatgaagagcttcatatttgctaagaggcatgctgttcaagcagcagggc

SEQ ID NO: 307665 - DNA, 512 bp, Homo sapiens
gtggtgatagaaaaaaaaaaaaggctatgtcaatagtcacagacctttaattattttaacgtttgatctatttttagttctaagcaatctgtagatatctcttttaaaattctttcgaaatttttctttaaaagacataaatgtggctttgaatcctctgatttaaaaacaaaaacaaaaaaaaaaacgctcactgaatttggttgagggtttcttgaattattgagccctgacctaggaaaataatcaagtattaaaacaaaagaagacgtcatatcttatctgggctcttcctctgtctttaaaataaagaaacagtttgagagagatgatgagacctgcccctggtcagagggtcagacactccttgctcttaagtcctgctctggtcagsgtcagctcctggaagaactgaaatgggagctacggtgtccacttacttctgaactgtttgaatattgcagaatcaactgtattttagtattctgaccaatacattaaatttaagcaat

SEQ ID NO: 307666 - DNA, 536 bp, Homo sapiens
gcttaagcccaggagttcaaggctgcagtgagctgtgattgtaccactgcggtccaggctgggcaacagagggagaccaggtctgtttaataaataaataaatrgtagctgcaggactatgggctgagtcttatgagttttcctaataagacactgaattcagaggtcgtcttgagaaccctgacacggagctattacaagaagtcatacgtatgttggaaagactattcatttgcacatctgcagctgaagaaaaaagaataattaaaacagatttggacgccaatgattggtgcttggtgctaggtgctagggcaaaatattactagagatttgtggtatactgggtaactctgaatgacttccagttacattctggacttcatgaaggctcatcatctagggattaaaacctcacattcatttatttacaataaacccctgttactcaaggtaagccaagcatgtctctctttcctaaaaaaaaaaagcccaattaataattgccaaagaaaatcacataaacaggtaaagtg

SEQ ID NO: 307667 - DNA, 553 bp, Homo sapiens
aacccttcgacatagaagaattgattcagtgggaacctttgtgtcacagagaaaagagcaccatctatctggggtctgttatttgtctcaatcgcatagattgtttccattttttaaaattaacagaatggtgtctggcatctgccaaatatagttctgacaaacaggaaggcttgagtgagagaagctggcacgtggattcagtactggtttcgtcagggccagctacatttcattccaatgacatagtgcacttctcagcttgcctcgccttattgagtgcctctaacacctttacctgaatctgcaattttaagttatccttyttagatttcagtcccctttacatcttggcctccacagtccatcatccaccaattgtactgtacccatctggtgaacttcctataattcattcattcatttattcattcacctctgaattaggcatgcgggctgaaaaaagtcatatccatactttctgtatataatgagtttatgatctaattgtgaatccaagatattttctcatgaaaagttaaaaaaaggcaga

SEQ ID NO: 307668 - DNA, 601 bp, Homo sapiens
acatgcagaatatagcatgccacaattaggagaagtcttcccactagtcttcatattagtcccaaggttgcatttatgtatgttcatgctcaaaactgattggaaacccttgaaagagcccagaaaacaaatacaatgaaaaaccgaattattggaaaataaactttatacaggagactaaagaaatcggtgttactttgttattaaaatatattcagagtagacwataaccacctccagctccataagaattcaacagagaagatgaaaggaagagtctcagaaacctgaagaagcaagagctctgttaggaatccactagcttttgaagctgtaattgtgagtgtgggtcattgtgacttcttctccaaatatctactgcaagtctgggcaaacctatgcagcaaatgatatgatctttttgtattattattattcatgtgcttatttgacaggcaaggcgtgggtctgcacatgtgtgtgtgagaaatctgtcaatgggatacatttctttctgaaacctagaaattatctttgtggagtcaaatattccttctctatgtgagttagaaaaaaagatcctaatgggtgttttagctgg

SEQ ID NO: 307669 - DNA, 601 bp, Homo sapiens
acatgcagaatatagcatgccacaattaggagaagtcttcccactagtcttcatattagtcccaaggttgcatttatgtatgttcatgctcaaaactgattggaaacccttgaaagagcccagaaaacaaatacaatgaaaaaccgaattattggaaaataaactttatacaggagactaaagaaatcggtgttactttgttattaaaatatattcagagtagactataaccacctccagctccataagaattcaacagagaagatgaaaggaagagtctcagaaacctgaagaagcaagagctctgttaggaatccactagcttttgaagctgtaattgtgagtgtgggtcattgtgacttcttctccaaatatctactgcaagtctgggcaaacctatgcagcaaatgatatgatytttttgtattattattattcatgtgcttatttgacaggcaaggcgtgggtctgcacatgtgtgtgtgagaaatctgtcaatgggatacatttctttctgaaacctagaaattatctttgtggagtcaaatattccttctctatgtgagttagaaaaaaagatcctaatgggtgttttagctgg

SEQ ID NO: 307670 - DNA, 568 bp, Homo sapiens
cgtggcttgaaacctgttagggtgagaaattgttatctgtggaaggttgagtagtttggaatctgctatcctaataccaagccttttgtagttagaatttatccactggtaaatgagctatttcatttaaagttggtttgccctactttattaaacagtgttttccacggacattaagttattgtcataaaagccttcgagtgcctctcttttggcgtttctagcaggactgttgtctaagtttggggccygcgggaggcaaattcagcagagatgtccaaatacaactttacgtacagagcatagctaccaaattcctcctggatttgcctattgttacagagaaagactttgtaattaccaagggattatagcagaatatgaaagggcctgaaagcagctttcttgcaaatcaagaatgtattcagcacaaacttaggaagagtcagctgagaagtgaggcagaagtgtctgaaaatgttaagggttcaagcagaagggcctgcctgaaactcctaattaaagaagtaaaaatgactttttaaagaatgtcaacgtctgtcatttg

SEQ ID NO: 307671 - DNA, 571 bp, Homo sapiens
agtcagctgagaagtgaggcagaagtgtctgaaaatgttaagggttcaagcagaagggcctgcctgaaactcctaattaaagaagtaaaaatgactttttaaagaatgtcaacgtctgtcatttgtattcttcaccaataaaagggtcttctgaggattgtaaatgaggtgatgrcactgcccaaataccctgggtttgtccttcttttatactcccgaagtagtgaaaatggagcttaatggtacataaataaaaataattaaatagaagatagtggtactggtgcattacctgaattaatatacaagattaagaggccaataacccaaaaacaactttgttattttggtgttttctataaattagatgacgctctcagagtagaatgaaatatagctttcactctaccattttgattccaaatttaaaaacaaaacatttcttatgggtgatgtttctggtattctctttgacatatggtttcagcacatgttcatgttgaaacaagccagattatcagttacacctcttctgggtatgtcttttttaatttaagtttaaaaattgagc

SEQ ID NO: 307672 - DNA, 587 bp, Homo sapiens
gcatttagatactaatatagccaaacatgatgaagagatcattgagtcatggatggtaacagagtcttctgcccatttttgaaggatactttttttaacttttcccatattaaaggaaaagtgattccatwtcaatgcactgttacattcaaacttaaatatcaccacatcaccacgtgtatgaatcctcattgatatatagggttgtaaaaataatagtataggaaaactacagaagttgtgtattaattagcaaattatgatataattgtggaaattttaaaatataacttcacctggcctcttaaaactgtgtgtgtaaagttcttttgaaagctttgttaagacgttagcaagagcatttctgatttttcaaaaaacaaactagtccacatgtatttggcaggtttacagcattattaataactttactgtttggcagggaggcatcctaatgaaaaataatttctaaatggtataagactccatgattcccatccaattattggtctggacctaagtatgcttctaacttagaaagtgacactgggcttagtacaacttcattctgttgtttgggttaagcg

SEQ ID NO: 307673 - DNA, 587 bp, Homo sapiens
gcatttagatactaatatagccaaacatgatgaagagatcattgagtcatggatggtaacagagtcttctgcccatttttgaaggatactttttttaacttttcccatattaaaggaaaagtgattccatatcaatgcactgttacattcaaacttaaatatcaccacatcaccacgtgtatgaatcctcattgatatatagggttgtaaaaataatagtataggaaaactacagaagttgtgtattaattagcaaattatgatataattktggaaattttaaaatataacttcacctggcctcttaaaactgtgtgtgtaaagttcttttgaaagctttgttaagacgttagcaagagcatttctgatttttcaaaaaacaaactagtccacatgtatttggcaggtttacagcattattaataactttactgtttggcagggaggcatcctaatgaaaaataatttctaaatggtataagactccatgattcccatccaattattggtctggacctaagtatgcttctaacttagaaagtgacactgggcttagtacaacttcattctgttgtttgggttaagcg

SEQ ID NO: 307674 - DNA, 578 bp, Homo sapiens
ggatgatctgtggatgtgcagctggaccagggacacggaggtctatttgaatatagtcccatctctgcccccaggacagctaagaccagtcacctctgaaggttcagggacattgggaaagtcacttcccctctgaccatcagttttctcatctttaatgaaggggttggactagttcatatccaatgagttgaacttccagcacccaaacaaggatattgcctggctcagataagtgctccgtaaacacttgctgaatgaatggacttactgtggtgcccaccatagtctcccaggctgaagacacccagtggtactgagtcaggggtggtggctctgtttgcctgttaggggaccactgaagcattttcctataggggagtatctttgccctgggtagaaactgactccaagttggtttccagacttggtggatagaaasgtagcgcctatggtcaggaggttaactatcatccacctttggcattctctaatttcccatccatggttctttgaatttataagtggcccagaacatccctgaagggcagaaactggacattttgctgaacaaatgt

SEQ ID NO: 307675 - DNA, 578 bp, Homo sapiens
ggatgatctgtggatgtgcagctggaccagggacacggaggtctatttgaatatagtcccatctctgcccccaggacagctaagaccagtcacctctgaaggttcagggacattgggaaagtcacttcccctctgaccatcagttttctcatctttaatgaaggggttggactagttcatatccaatgagttgaacttccagcacccaaacaaggatattgcctggctcagataagtgctccgtaaacacttgctgaatgaatggacttactgtggtgcccaccatagtctcccaggctgaagacacccagtggtactgagtcaggggtggtggctctgtttgcctgttaggggaccactgaagcattttcctataggggagtatctttgccctgggtagaaactgactccaagttggtttccagacttggtggatagaaacstagcgcctatggtcaggaggttaactatcatccacctttggcattctctaatttcccatccatggttctttgaatttataagtggcccagaacatccctgaagggcagaaactggacattttgctgaacaaatgt

SEQ ID NO: 307676 - DNA, 578 bp, Homo sapiens
ggatgatctgtggatgtgcagctggaccagggacacggaggtctatttgaatatagtcccatctctgcccccaggacagctaagaccagtcacctctgaaggttcagggacattgggaaagtcacttcccctctgaccatcagttttctcatctttaatgaaggggttggactagttcatatccaatgagttgaacttccagcacccaaacaaggatattgcctggctcagataagtgctccgtaaacacttgctgaatgaatggacttactgtggtgcccaccatagtctcccaggctgaagacacccagtggtactgagtcaggggtggtggctctgtttgcctgttaggggaccactgaagcattttcctataggggagtatctttgccctgggtagaaactgactccaagttggtttccagacttggtggatagaaacgtagcgcctatggtcaggaggttaactatcatccacctttggcattctctaatttcccatccayggttctttgaatttataagtggcccagaacatccctgaagggcagaaactggacattttgctgaacaaatgt

SEQ ID NO: 307677 - DNA, 595 bp, Homo sapiens
atcagaagctctggggttgtggtgcactggtcttagttttgttctgttttgttttgtttttgtttttgtttttgttttcgtttttgagatggagttccactcttgttgcccaggctgcagygcaatggcatgatcttggctcacagcaacctccagctcccaggttcaagcgattctcctgcctcagcctcctgaatagctgagattatgggcatgcaccaccacacccagctaattttgtattattattatttttttttttttagtagagatggggtttctccatgttggtcaggctggtcttgaactcccaacctcaggtgatctgcctgcctcggcctcccaaagtgctgggattacaggcatgagccactgtgcatttggcctggtcttagtttttaacaagtcctctagagagttgagatgcacacttgagtttgagaaccattgaactagccctttcagggacaagctatgagactgtggttctgagccctcaagggacccaaggacacattttgaagaaaattcagttacttgggctgccaggacttggtgttttcaactcagaattacagctttcttggaacctcca

SEQ ID NO: 307678 - DNA, 595 bp, Homo sapiens
atcagaagctctggggttgtggtgcactggtcttagttttgttctgttttgttttgtttttgtttttgtttttgttttcgtttttgagatggagttccactcttgttgcccaggctgcagtgcaatggcatgatcttggctcacagcaacctccagctcccaggttcaagcrattctcctgcctcagcctcctgaatagctgagattatgggcatgcaccaccacacccagctaattttgtattattattatttttttttttttagtagagatggggtttctccatgttggtcaggctggtcttgaactcccaacctcaggtgatctgcctgcctcggcctcccaaagtgctgggattacaggcatgagccactgtgcatttggcctggtcttagtttttaacaagtcctctagagagttgagatgcacacttgagtttgagaaccattgaactagccctttcagggacaagctatgagactgtggttctgagccctcaagggacccaaggacacattttgaagaaaattcagttacttgggctgccaggacttggtgttttcaactcagaattacagctttcttggaacctcca

SEQ ID NO: 307679 - DNA, 595 bp, Homo sapiens
atcagaagctctggggttgtggtgcactggtcttagttttgttctgttttgttttgtttttgtttttgtttttgttttcgtttttgagatggagttccactcttgttgcccaggctgcagtgcaatggcatgatcttggctcacagcaacctccagctcccaggttcaagcgattctcctgcctcagcctcctgaatagctgagattatgggcatgcaccaccacacccagctaattttgtattattattatttttttttttttagtagagatggggtttctccatgttgrtcaggctggtcttgaactcccaacctcaggtgatctgcctgcctcggcctcccaaagtgctgggattacaggcatgagccactgtgcatttggcctggtcttagtttttaacaagtcctctagagagttgagatgcacacttgagtttgagaaccattgaactagccctttcagggacaagctatgagactgtggttctgagccctcaagggacccaaggacacattttgaagaaaattcagttacttgggctgccaggacttggtgttttcaactcagaattacagctttcttggaacctcca

SEQ ID NO: 307680 - DNA, 359 bp, Homo sapiens
ttttcaactcagaattacagctttcttggaacctccaacaacattttgaacctttgtggcgtttttgtacatgtgcaggtgttgtggaaactacccatttgttttgaagggaragaatccagtttagcacacaattctccatggaacttccaggcttccctttaaattgattgtgatgcttggatagatattgacaccatgactaagacccataataaaggcccaatccaaggaggctctgctacttccaaagatctccaaaggaagagagttctcagagtgcgagtcttgtgtgaatttccctcccttcaaaggtgccttaattaatatcctcctccatggcagggtctaagcctggc

SEQ ID NO: 307681 - DNA, 607 bp, Homo sapiens
gttacacatgtctacatggtggaccatataatgagtcagttctactatcatataattgacttgaacagctgtgaagctattcttcattcagcctcattatatcatttgattatcatttacaataaatttaccttctcatgtctgttttgtttttagctcctcgtcattactttccgaccacctttctacttattttttatgatgttmaggcaatctctcactatatgaacctaagaaactaggttttattcaacataagcatttttaaattataaattatttttgaaataaagaaaacatttgccctgtgaagtgatcaaacttgaatataatattaagggtagaaaactgtacttttattccctatagtatcatagatactaaaattattggagaacaattgatgtgaaatggactaaaacggacaccaaaattctgtggcagtactgagttataacatggctgtctctgtttgtattctcatattatttttgttaggttgtcatacgatgaaaagataaaatttaaaaaataaattaaaaagtaaagaatgcttagaattcatgcttcacacaggcaatgctgagaaaaacataaaattgacagg

SEQ ID NO: 307682 - DNA, 352 bp, Homo sapiens
cctccgctttttaaacaaccattctattctcaccatctttccatcaatccaaacatctgggctccttgttttgatagattatttgccttagtattatagattctaccctacatatactatctttacctacaacttatattactaattttatatataatcaacttctttgccataatcttaggatctctaagcttttgaatctgtactacatatgctctttctaatagtatmtttttaaaaacatgcttttataaacagtattgctggatcactattacactggaggtgacatcattaggatttgtaaacagaaaatacaagaggtatggatgagtgtacaagttctccaaaa

SEQ ID NO: 307683 - DNA, 547 bp, Homo sapiens
tatcaatatttatcagagatattggtcagtagtttttttttaagtgtttttggttttggtatcaggktcatagaaatctcatagaataagtttgaaaataatccctcctttttttgcagaatagtttgagtaaggttgacattagttcttctttaaatgtttggtataattcagaagtaaagccatgggtcccgggctttcctttactaggaagctttttattatggctttgatcttataacttgttattggtctttccaggttttgaatttcttcctaattcaattttgataggttgcatgtatctagaaatttgttcattttttctggatttaccagtatattggcatgtatttgctcatagtagccattaattatccttggaatttctgtggtatcagttgtaatagatctttttttatttctgattttatttatttggattttcttaattattttcacagactggttaaaggttcatcaattttgtttaagtattcaagaaaccaactttttgttttattaatttttttatgattcatcatct

SEQ ID NO: 307684 - DNA, 538 bp, Homo sapiens
ctaattcttccgaattattagtttggtcatgtataagttcagcgaatggaaggatatcttctacgttgtcaatttctgtgtcctaggattctatcatagttaatggcacgttgtagatactcaatttataataattcattgagatactgaatcacttgctggccaactgtctrcaatactgtcattttaacttccattttcacataccccatgcctagcagttttttttttttctgagattataaaaaacaatttcagttggggaaaaaataaactaggatactcatgtttgtcattaatggggtatagaaaatgccaccccaaaatgtggaatcttgccatactgagtattttaaagctgaaataaattgagaaaactgcagaagcgggaaggtctctctaactttgtccctcccctctctcctaaagaacctcatgtgacagatgtcctgtcttactacaggtgagaagaaatgtcacacggagagtccaagaagaatctgaacaaacaggccttgttaagtttaccccagtttat

SEQ ID NO: 307685 - DNA, 538 bp, Homo sapiens
ctaattcttccgaattattagtttggtcatgtataagttcagcgaatggaaggatatcttctacgttgtcaatttctgtgtcctaggattctatcatagttaatggcacgttgtagatactcaatttataataattcattgagatactgaatcacttgctggccaactgtctacaatactgtcattttaacttccattttcacataccccatgcctagcagttttttttttttctgagattataaaaaacaatttcagttggggaaaaaataaactaggatactcatgtttgtcattaatggggtatagaaaatgccaccccaaaatgtggaatcttgccatactgagtattttaaagctgaaataaattgagaaaactgcagaagcgggaaggtctctctaactttgtccctcccctctctcctaaagaacctcatgtgacagatgtcctgtcttactacaggwgagaagaaatgtcacacggagagtccaagaagaatctgaacaaacaggccttgttaagtttaccccagtttat

SEQ ID NO: 307686 - DNA, 546 bp, Homo sapiens
aacagctctggtctgcagctcccagcgagatcaatgcagaaggggggtgatttatgcatttccaactgaggtacccggttttatctcactggaactggttagaaagtgggtgcagccatggagggtkagccaaagcagggtggggcattgctcacctggaaagcacaaggggttggggaactccctcttctagccatggaaagctgggagggactgtgctgtgaggaacagtgcatcccagcccagatattacacttttcccatggtcttcacaactcacagaccagaagattccctcaggtgcctacaccaccagggctctgggtatcaaacacaaaactgggtggccttttgggccgacaccgagctagctgcaggagtttgtttttatttttatttttttttcatacccccagtggcacctggaatgccagcaagacagaaccattccctaccctggaaagggggctgaatccagggagccaaatggtctagctcagcagatcctatcactatggagcccagcaagctaagatccactgactt

SEQ ID NO: 307687 - DNA, 546 bp, Homo sapiens
aacagctctggtctgcagctcccagcgagatcaatgcagaaggggggtgatttatgcatttccaactgaggtacccggttttatctcactggaactggttagaaagtgggtgcagccatggagggttagccaaagcagggtggggcattgctcacctggaaagcacaaggggttggggaactccctcttctagccatggaaagctgggagggactgtgctgtgaggaacagtgcatcccagcccagatattacacttttyccatggtcttcacaactcacagaccagaagattccctcaggtgcctacaccaccagggctctgggtatcaaacacaaaactgggtggccttttgggccgacaccgagctagctgcaggagtttgtttttatttttatttttttttcatacccccagtggcacctggaatgccagcaagacagaaccattccctaccctggaaagggggctgaatccagggagccaaatggtctagctcagcagatcctatcactatggagcccagcaagctaagatccactgactt

SEQ ID NO: 307688 - DNA, 534 bp, Homo sapiens
gtagttatgcccctgtgtaatcctcttctctggattgcaggctggacctaatgatttgaatataaccaatgtaatacagcaaaggtgatgggatacctcttccatgatgaggttacaaaagattgtaatttctatcttgctagcagaccatctattgccttctcaacttcccttatatgagaaagcaagctgccatggagaggtccatgtggcaatgaactgaacttgacctccagtcaataacttgcaaggaactgaatatagccaataactattgaattagcttagaagcagatayttctccagttgaatcttcaaatgagactgtactcatttggccaacacttttattacagtctcttgagaaaacaagaagaggggacttaagtaaagtgtagccacattctttttattttattttattttattttattttattttattttaagttcctgggtacatgtgcaggatgttcaagtttgttacttagttaaaactgtgccaaggtggtttgctgcacctatcaacccatca

SEQ ID NO: 307689 - DNA, 645 bp, Homo sapiens
  misc_feature (1)...(645): n = A,T,C or G
accgttgctaatcttccctgaattagtaatttatttaaartgtaataattctggtttggtatactatactgaaaattaaaatttcctaaattcagctatgatgctcaatcctgctgataggatgtcctagaagaaaaagtatcttctatctaatgaatagtctgcaatcaaaaagagctttccatattttactttggcgcaatcactaaaaccttttcccattgtaatcagaactatatcaggtctctgttactcttttgactttgttttctcaatgtgcattatgtgtatcctaatcttgtaggcttttcagcattcagggagagctaaagccctatgtagttcatgccatctcaaagaaaacgggctatagttctttctcgcatgccaatctaaataaacaggtaccatagaaaagggaggtgacatatgcagcagagcatagagatgtttaaataacagttttcaggtgtagaacaacactgattgaagtgctagattgtttatttcctcattatgaagcagctgggctcagttcaatgtaaagcaaagatanaatttttgttccaattactcttatgggagttaagtatcattcaataatgagtgatggaaggancanctaaatcaatccagctgcaaatt

SEQ ID NO: 307690 - DNA, 600 bp, Homo sapiens
acacataaaatgactgcttttatgtatgcaaatttatatacatataattcttcactatttttacagcgtttttaaaatttaacctatgagtcattcaagagctcattatgtattcaaaatacttctctctgacgtcacacatatttgagtttcagtttggttcataataaataattgtttgactttcagatatttaaaacttgttgtgctattaaatctgtcaatgttttccttactgtttccttcttttgctttttttgttttgttttgttttatttatttatttttaattaattaatttttaatttttctgccataatttgctttgtttcttccataggtacatgtaacttccaaatgtatatgttttcttatttcacaatacataggtcatttctcacatagcttccattattgaattactctcaattacatttttggatatggtcttaactactgatttgttgttttagaatyaagtgtagttcttagtacctccaatataggctcagttcttacctctttagtcttcttatacctttcctatgtctcatatgtctttattaatctcatttcattcttatgagattttagtttcta

SEQ ID NO: 307691 - DNA, 583 bp, Homo sapiens
gcttctttgttgtttgctttcattttagtattgcaactttgcaattacctgccaatccttcatctgtgtttgttttttgttttttgtttttgttttattttggaatcgtcttcaatcttattgcatccactcgtatgacagatgaagcaagtccaggccccacacaaggactcaaaagatgctctaatgtctttggacttrttggttgagtaaccatgttaatgataactttgagcaaagttaatgcaatattttgtgccccccaaaacatttttgagtttctaattttgtaaacaatttttcatcttctttagggcgtagtagccgtttattttcatgaatgttgaaaaatgatacatttttagatgtaccacaagattatagttcaaattctagttcaacactaagaaattctgaatatatttgtagagagaggtcatagacccaaccatacaaattgaaagtaaaggttcagcaattgaagtaattcattcattcatccaatgagtcaacatttatctcaagtctgctgtggccttgacaaagggttgaatgctgaagatgcagtaatgaataaacacac

SEQ ID NO: 307692 - DNA, 583 bp, Homo sapiens
gcttctttgttgtttgctttcattttagtattgcaactttgcaattacctgccaatccttcatctgtgtttgttttttgttttttgtttttgttttattttggaatcgtcttcaatcttattgcatccactcgtatgacagatgaagcaagtccaggccccacacaaggactcaaaagatgctctaatgtctttggacttattggttgagtaaccatgttaatgataactttgagcaaagttaatgcaatattttgtgccccccaaaacatttttgagtttctaattttgtaaacaatttttcatcttctttagggcgtagtagccktttattttcatgaatgttgaaaaatgatacatttttagatgtaccacaagattatagttcaaattctagttcaacactaagaaattctgaatatatttgtagagagaggtcatagacccaaccatacaaattgaaagtaaaggttcagcaattgaagtaattcattcattcatccaatgagtcaacatttatctcaagtctgctgtggccttgacaaagggttgaatgctgaagatgcagtaatgaataaacacac

SEQ ID NO: 307693 - DNA, 490 bp, Homo sapiens
cccagcctcctcaacacaaaaaacatacatttcacacactccattgggattgcttaactgcagggagaaaattgccatcctaaaaagaaacgctggcatatccctgggctgagccaaccaaggtgggggaaagaatgttccgagctaatgtcttttttactccaaggaagaccagagcagtcactctggacagtccatcctgaattgtgaatgttcacaactattacytcatttgatcacctcactctctgtccttctcctccagagctttaagatgtaaccctactgcctctccgcactcagagcagatgagtcatattatcatggattattctttgtcttctctacattccatcttttgaggaaccactttattatcacttattagtaatcttgtgcagtcttgtgtttgtactaggacaaactcacattccctgctcatgagtaagcatgtgaccaaaacctggccaatccgagtaaactatgacca

SEQ ID NO: 307694 - DNA, 652 bp, Homo sapiens
ttgcctctgacctacctcttctgacatttgctatttaagaatattcaacaaagtgcttattttataggccttgttttattttttgttactttcagcaggaaagctactcaccataagtgctttattttcactgtgcttccagctaaatcccgcacagtaaaacaaattaagcagatggcagacttaaatgttaaagattggaaaaaaatgtatgaagaaattttaggataaattagaatataggatcgcatatattgaagtgagatgaatcagaggttaaagtcacagagaattttaaagcatttagcttcagtgaagatatatgaatgattcaggacaggagctgaaagtgtcctctcatgacaagtgtgccttcataatgcttaactcccaaattagtcaaatgccttatgtggctttcttgcctcatgaggtcatgcatattaccactgctatctttctttcttttcagagtaaaatrttcacagcctcagtcatcatggggaaggttcaaaggacagaggtttatgtggtttaatatgagtgatgcctatggagagtccagataaaaaaagaaaataaattttcatcctctgtctattactagtttctctgaattctcctattagggaatatacattcactgtaaaaa

SEQ ID NO: 307695 - DNA, 652 bp, Homo sapiens
ttgcctctgacctacctcttctgacatttgctatttaagaatattcaacaaagtgcttattttataggccttgttttattttttgttactttcagcaggaaagctactcaccataagtgctttattttcactgtgcttccagctaaatcccgcacagtaaaacaaattaagcagatggcagacttaaatgttaaagattggaaaaaaatgtatgaagaaattttaggataaattagaatataggatcgcatatattgaagtgagatgaatcagaggttaaagtcacagagaattttaaagcatttagcttcagtgaagatatatgaatgattcaggacaggagctgaaagtgtcctctcatgacaagtgtgccttcataatgcttaactcccaaattagtcaaatgccttatgtggctttcttgcctcatgaggtcatgcatattaccactgctatctttctttcttttcagagtaaaatattcacagcctcartcatcatggggaaggttcaaaggacagaggtttatgtggtttaatatgagtgatgcctatggagagtccagataaaaaaagaaaataaattttcatcctctgtctattactagtttctctgaattctcctattagggaatatacattcactgtaaaaa

SEQ ID NO: 307696 - DNA, 610 bp, Homo sapiens
aactgtctctttaaactctcccaaagacgaccagttaatattacattattaaaaatgtaaaggaagtttcattctactaacaatacaagtgcagtaaaatactttatatgttatagttgctccataaattttaggctccgtctgttgatcatttttttaccaccagaatatagagaaaacaatgaaggaacttccactttgagcttatctgagccacacagaggaaaaaagtggtaaacagaaataataggaaagtttagaaaaaaatttattgttctttcataattaaatgtactatgtattttttaaagaaataaccttagctattttgaatctatatccctttcttaaggataataaaaaactttaacatatttgaactcctcactgaatacctcactccctgccttatctaactgtcttcatttttttggttaggaaatttaatactaygttgtttatgtaagacatggttttctgatgaccccagtatttaattacatttgacagtattatttgctcaccacaagttttgttctgttttgttttattatttctttaaaaatctactcatttctctacattattattgctaaaattcatcccttaa

SEQ ID NO: 307697 - DNA, 474 bp, Homo sapiens
actaatgcaatcatgctttcaaagcaggattccctaaacttctggccaacgtccttggcctgttagaaactgggccacaccggcaggargtaagccatgggcaagtgagcattaccacctgagctctgcctactgtcagatcagcagcagctttggattctgcctgaagcaccaaacctattgtgattgtgcatgtgagggatctgggtcgtgctctccttatgagacactaatgctcgatcatctgaggtgggatagtttcgtcttgaaaccatccctacacccctctcaaattgtcttccgtgaaactcgtccctggtgccaacaaggttgaggactgctgttttaaggaatagcaactgcactcatcaccagagcatggtctaatgtagcagttttcaatacatggtccatggactgttgggtttctcaaacactcgaaacattttcatgataatattgggatgttccttg

SEQ ID NO: 307698 - DNA, 589 bp, Homo sapiens
gctggtttgacagtggcaaattctgtcagcatttgtttgtctgaaaaaaaaaactgtatcttccctttatctatgtagcttagttttgctggatacaaaattcttagctgataattattttgttccacaaggctaaatatgagacctcaataccttctagcttgtaagatttctgctgagaaatctactgttaatctgatacattttcctttgtaggctatctgatgtttttgcctcacagctcttaagattctttcctttgtcttgactttagataacctgatgactatgtgcctaggtgatgatctttttttgtgatgaatttcccargtgttctttgaacttttcgtatttggatgtctagatatctagcaaggtcaagaaagtttcccacaattattccatcaaatagggttcccagacttttattagatttctcttctttctcagtaacaccagttatttttatgtttggctgtttaacataatcccggatttctaggaggcttcatttttttttttttttcttcttctgtctgattgggttatttgaagccttgtcttcaagctctgaacttctttcttctat

SEQ ID NO: 307699 - DNA, 544 bp, Homo sapiens
ttcttcctcttcctctcctcaagtagaaggaagggttctcttttggagctgtgacctgtgcagctgggttaggggaggcacagtgcagaactcccttggctgccccagctgacttctcagtatgttgtgtctcctccccacccacagtctactgtctctgggcctaattcaacactgggactcaactgacaaatctctgtccttatggcctagactgcctttcaagtttacttggagacacagagtgctgtagcctgcagtgatgaggattgtgggaactcaarttcccaggtgatcccgctggttaaaatgttccctccgtgggcaggcatcagctgagtttggtctggttttcctttccgttctaacaggacaggatggagtttaatgcctcacaattgctgtattctttcccgccccccagtgcccagagatgttctccataccatgccacactgccagggatggggaaagggcagcatcgatgattcaagactatattttctgcttcttcagtgcctcttttatgaagttaaaaccaggt

SEQ ID NO: 307700 - DNA, 436 bp, Homo sapiens
ttctccatttaaaaaaatcatgctttttccatgtatctaagttttgatatgtactacatagaatagaacagtgtgaaaatgaggtggtgggaagaaccatcaagaaaaagttttctgttttaaatgttttttgatattttctgtttgcattctgaatttatcatgtgtcttttctcattgtttttttctatatgactctatatatagttatatacaattatatacattaagattaaaagaaattattatgagaatactgtatttagtgccactttaaaagtaaaacttttaatttgyatagctgttattatctgaaaacaataatatttcttcttttgtgtggatttttttatcttgtacatgattcttcaaattatactagaagtttgtaaagaacacttatccagctataggacaatataataattggagagct

SEQ ID NO: 307701 - DNA, 611 bp, Homo sapiens
acagtaatggctcagttcaagtccaaaagccttaaaactaagaaagctaacagtgcagccttcaggctgtggycgaaggctcaaaagccctggggaagccacaggtgcaagtcctggagtccaaagtccagagaacctgaagtctgatgtccaagggaagaaggagcagaagcaaccattcaccacgaaaagaagaaaaaaattcagaagatccagcaagcaaagttattctacctttttcagcctgccttgttttatctgcaccaaattgtgcaaattgtgcccaactacattgaagatgtatcttcctctcccaggacaccaactcaaatatcaatctcctctggcaacacactcacaggcacacccagaaacaatgctttaccagccatctaaacaaccctcaatccaatcaagttgacagctaatattaaccatcacaagtccaccccttgtcaacttggcatccatacagatctccttaaatcatacttactcttcaaatgaaaataataataaggtcatatttgtgcctaacataatacaactatcctttatgtaattaaaaatgcaccaattcttaacttgaatgctgttacataaaattacca

SEQ ID NO: 307702 - DNA, 611 bp, Homo sapiens
acagtaatggctcagttcaagtccaaaagccttaaaactaagaaagctaacagtgcagccttcaggctgtggccgaaggctcaaaagccctggggaagccacaggtgcaagtcctggagtccaaagtccagagaacctgaagtctgatgtccaagggaagaaggagcagaagcaaccattcaccacgaaaagaagaaaaaaattcagaagatccagcaagcaaagttattctacctttttcagcctgccttgttttatctgcaccaaattgtgcaaattgtgcccaactacattgaagatgtatcttcctctcccaggacaccaactcaaatatcaatctcctctggcaacacactcacaggcacacccagaaacaatgctttaccagccatctaaacaaccctcaatccaatcaagttgacagctaatattaaccatcacaagtccaccccttgtcaacttggcatccatacagatctccttaaatcatacttactcttcaaatgaaaataataataaggtcatatwtgtgcctaacataatacaactatcctttatgtaattaaaaatgcaccaattcttaacttgaatgctgttacataaaattacca

SEQ ID NO: 307703 - DNA, 630 bp, Homo sapiens
ggcagtatcaggcatagtaaagcacagaattctttgttcctcttcgccaaatggtttattaatgtgtttcactttgtctaatgtcaaaattcatccaaaattgtgatttttgcaaggatctttttctgggccaaaattgtaaaatagccattttctattgtttaaatctatatttattaacttatgaaaaatttaaaaatccggtaaatgtgtatgtttttcaaactttaaaaggttacattttggttgctgctaaacatattttatgatccagagagaaattgttaaaattaatattarctactgcatttaagaattttctatattaaacaaggacaatatttttgatatttaatgactataaatatagtttaaaattattactcaagtaatctataactgcttcaatgacattgaatttcaccttctttgccttttttaattttctttctttttataattaatgtgagtataaattaatttttaaaaattttaaaattttgcaatgttctttcagaataattaaaagcactaggtttagtctcagaagaacttaaatatgggtactggaataatatattaacatagattagggaacaaataaaatagattttaaaatgtaaagtaaca

SEQ ID NO: 307704 - DNA, 562 bp, Homo sapiens
gtgactcttgctttttttttatgatagatctttctgcatccctttactttgagcgttgttacatgtgaaatgggtcttctgaagacagcagatgttgggtcttgtcttttcatccaatttgcctctctatgtcttttaagtaagatgtttagactatttacattgagggttaataatggttaatagtgatatatgagatttttaacctatcattgtcttgttagctggttgttttgtagatgtgactgtgtaattgcaatttatattgtctgtgggctatgtgcttaagtgtgtttttgtggtagcaggtattgatctttcatttccatgattagcatttcttaaagacctcttgtaaggctggacttgtggtaattaattccttttgtgtttgcttgtctaaaataattttatttctcctttgcttaaggagcttagtttggcatgatttgaaattcttggtttgaatttcttttctttgaggaggctgaaaataggtccccaatctcttckggcttaaaaagtttctgctaagacatcaacagccagcctgatgaggttc

SEQ ID NO: 307705 - DNA, 485 bp, Homo sapiens
tttgttttaaatacaactatattaaaagattactcatagtttcctttttgtaataatggttgtgtactacaataaattatctttagcaatttttctttttatagagtgtttagatatgaaaagtgagaatagggataaaaagttattacrtcttttatctttatttaaaagtttcagaaaatattcctgaatggttgaaatgatgatggaagcatgttaagtcgttctcttttaccatcttttttttccttcaaccaaacaactagattaacaaatggtataactaagcttttcatctttaaatttatgtttgtctaagatcacaagtactcgcttctttaaaataaatagacaaaaggccacaggtactggcttttattaaaaaaaaacagtctaatgagttctgagaaacaaataaataaactgaagtgcctttaaaatgtttttctaatgcctttaaactattaaaatatagtggacattta

SEQ ID NO: 307706 - DNA, 631 bp, Homo sapiens
ggattctctttcatctttcctgcaggtccaaccccaggaacagcttaaccatgctgacctctctctctttttaagcattcttaaattaatgattgcttcaggttcttacaccaagcatctgattataggtgataagttctaagatttagatattggcttcgagaaagctgagawgcttcatattatgtgctgatttggacagggcataataccaagctatttaatttaacaataatctatatgtcactgtgaaggtgttctgtagatgtaggtaacagctacaactagttaactttaagaaaaggacattacactcaataatgtgtgtaaggctcattcagtcagttaaaggccataaggacaaaaactgaggcttcttggagaagaagaaattctgcctcaagattgaagcgttaactcctgtcttcctgccatgtatacccacacaaacacacagagtcattttttgcttaactctaagtatttgttctaagaaatatgtctttaggtgttttcatcattgtgcatacatcttacagtgtacttacacaaacttaaatgttattgcctgctacacacctaggctatgtggtagagactattgcttctgagctacaaacctgtacaacat

SEQ ID NO: 307707 - DNA, 631 bp, Homo sapiens
ggattctctttcatctttcctgcaggtccaaccccaggaacagcttaaccatgctgacctctctctctttttaagcattcttaaattaatgattgcttcaggttcttacaccaagcatctgattataggtgataagttctaagatttagatattggcttcgagaaagctgagatgcttcatattatgtgctgatttggacagggcataataccaagctatttaatttaacaataatctatatgtcactgtgaaggtgttctgtagatgtagrtaacagctacaactagttaactttaagaaaaggacattacactcaataatgtgtgtaaggctcattcagtcagttaaaggccataaggacaaaaactgaggcttcttggagaagaagaaattctgcctcaagattgaagcgttaactcctgtcttcctgccatgtatacccacacaaacacacagagtcattttttgcttaactctaagtatttgttctaagaaatatgtctttaggtgttttcatcattgtgcatacatcttacagtgtacttacacaaacttaaatgttattgcctgctacacacctaggctatgtggtagagactattgcttctgagctacaaacctgtacaacat

SEQ ID NO: 307708 - DNA, 631 bp, Homo sapiens
ggattctctttcatctttcctgcaggtccaaccccaggaacagcttaaccatgctgacctctctctctttttaagcattcttaaattaatgattgcttcaggttcttacaccaagcatctgattataggtgataagttctaagatttagatattggcttcgagaaagctgagatgcttcatattatgtgctgatttggacagggcataataccaagctatttaatttaacaataatctatatgtcactgtgaaggtgttctgtagatgtaggtaacagctacaactagttaactttaagaaaaggacattacactcaataatgtgtgtaaggctcattcartcagttaaaggccataaggacaaaaactgaggcttcttggagaagaagaaattctgcctcaagattgaagcgttaactcctgtcttcctgccatgtatacccacacaaacacacagagtcattttttgcttaactctaagtatttgttctaagaaatatgtctttaggtgttttcatcattgtgcatacatcttacagtgtacttacacaaacttaaatgttattgcctgctacacacctaggctatgtggtagagactattgcttctgagctacaaacctgtacaacat

SEQ ID NO: 307709 - DNA, 589 bp, Homo sapiens
ttaactcctgtcttcctgccatgtatacccacacaaacacacagagtcattttttgcttaactctaagtatttgttctaagaaatatgtctttaggtgttttcatcattgtgcatacatcttacagtgtacttacacaaacttaaatgttattgcctgctacacacctaggctatgtggtagagactattgcttctgagctacaaacctgtacaacatgttgctgttctttactaaatattctatgcagttataatacaatggtatttgtgtatccaaatctgtctaaacttaaacaagatgtagtaaaaatacaatataaaagataaaaaattgtacayctgtaaagggcccttttcaggcatggaactttctgggtgtcactgagagagaagtgagtaaatgtgaagacctaggacattacactttttcaatgaccggtagtgcagtaggtttttttacacaagtatcaccacaaacatgtaagtaatgagttttgctataactttaaatggctatgatgtcactagacgaaatgaatttttcagctccattataatcttatgggaccactgcaatataggtggtct

SEQ ID NO: 307710 - DNA, 596 bp, Homo sapiens
tgtgatccaacaatgcctaattaaccctgataacagtaacagctaacatttacagagcacttgtttcacttaatacaaccatctttgacctagtctcccttattatccccattttatggataagaacactgaaaattagaaggtaaataactttttcaartggtacagctggtgtactatagagagggaattgaacctagcattatttcctcctggctctgtactctttcttaaagtcactatcacatgacaacttgtaatgtggcactgtgtgacatatatcattatgtcttcattatatgcctttgcatgtgctgtttttatatgactttgcatatattgtttcctctgaaatggctttcacatctggtccatatggaaaactcctattcatccttaaccagcacaaacagcatcctttctattaatcctcccctactctcctctagaccccctttgagctctataattgccctccttacactgtcattattgtctaccatttttggcttccttcccagagtgtgcactcacactgggaagacagggttcctcactcattcatctttgtattctcagaaattcacacagtgcct

SEQ ID NO: 307711 - DNA, 555 bp, Homo sapiens
gtgaaactgcatatgattttcctccacttaaatgcttaggtacaaatagacattatgtttaaaatattttttggtgtatgtgctatttttcttgtatacatatcatcagtgaaaagtgtgagaaatacttttttcttttttcctttagcccatttatttctttacatgtagcctacatctacacatgtcaattagaattatcaagtcaattagataatttcaagtcaattagaattatcttaattactaaaataaatgaagacaatttttttgccttaagccagttaattaactgccttgattactcattgcattagtagcacgtggaaaaatttgtaracaattaggtaaaatatccaaatagttgcactgaatcttgctagatgcttttactgtccccaaatttttaaaaatgaactcatatagtttgataaatatacacttcttatccattctgtttctttataaacagcttaactttttcatttaaaaaattctgttctttattgactgccacatttttctcatacccaaatcaactttaattgtttccaa

SEQ ID NO: 307712 - DNA, 613 bp, Homo sapiens
ctctgcattgacagacagtgaagagccatatgccattttctcttggaatctgcatctttgttctctttgtgttatttcctttcattcgtcgtcattgttttcttttttttctgcttgtaatagttggtgagacaagctggctataggaggtccaaaaatgtgtacatgctgtggactgtagctgcctcccctagactgtaattttaagcctccaagttagaaatcccaggagatatttatatccaggargatttcagctaactatgtgtttgcctccaggcagcagcctcaacaggcgctgtgtttactttccaacattgaatggaaaacatcattttgaaaaagcttaatttccaaaaacccatcccacaacagcctaattttagaacctatgaaagctaataatttcaaaattcttcccaacagtttcttgtttatgttttgcagcccaagtctaaatatatcataaaggagattttaaatattactttatccatttgttaacttattactgcatttatttatttatttcctgaagcaaaagcacagcaacttattgttttcagtttctgtttgtcctctagatgtgagatgttttactcatgataagata

SEQ ID NO: 307713 - DNA, 614 bp, Homo sapiens
gccaaaaacctgtcaccagtgtataaattagcatgaacatatgttaatgcataattcacaatttgcaacagggctttgttgcaaaattgatgaaaattcatgaaagaacctttttagattaagttgcccaataaacaagtaaccagaggcattcacaatgtagagttaatgcagcttttgaaattagcttttgtgcattttgtgggattgttataagacatttaaacttctaatggatgcttttttatgtttctatattttttgatttttctaaaataaacaatttgtttctaaaaagtgaaaacacacttctasataaacaagtttgtttatttctttgaatcacagatgtccacatttgtaaaactaaatagaaagggactgagaggtcatctactctaagtttgacaacatggtacagaactacttgcatttgatcaacttgtgtgcttgttaaaaatattcatcatcctggcccactcctagggtgccagaatcaaaatgtctgatgggaaacccagaaatctccatgttcccctagacacctcagctgcttcttatataaagttgagatgcaatcatgtagaatctgcaagtgagaaactaaggcccag

SEQ ID NO: 307714 - DNA, 638 bp, Homo sapiens
gtaattgtaagttattgatcccatgccaaaaacctgtcaccagtgtataaattagcatgaacatatgttaatgcataattcacaatttgcaacagggctttgttgcaaaattgatgaaaattcatgaaagaacctttttagattaagttgcccaataaacaagtaaccagaggcattcacaatgtagagttaatgcagcttttgaaattagcttttgtgcattttgtgggattgttataagacatttaaacttctaatggatgcttttttatgtttctatattttttgatttttctaaaataaacaatttgtttctaaaaagtgaaaacacacttctacataaacaagtttgtttatttctttgaatcacagatgtccacatttgtaaaactaaatagaaagggactgagaggtcatctactctaagtttgmcaacatggtacagaactacttgcatttgatcaacttgtgtgcttgttaaaaatattcatcatcctggcccactcctagggtgccagaatcaaaatgtctgatgggaaacccagaaatctccatgttcccctagacacctcagctgcttcttatataaagttgagatgcaatcatgtagaatctgcaagtgagaaactaaggcccag

SEQ ID NO: 307715 - DNA, 537 bp, Homo sapiens
gttgaatgtgattgagatatttaatagcagactgaggagtgcaggcccataaatagctttgggtagcatctgacaacctgaccatcatgtagtatggaggaaagggacctagttttggaggaaagggacctagttttagagccaaaagaccttggtttgcattctgactcatctattagctgttgattaagtttcttcatttataaagtaaataagtaaatgtacataacatatattattttaaataatactgacctgctttctagaaggaaaacaaatacttataggtttgtttgaagaacaaataataataatttaaaaaaccataatgcttaacataagccagtaataattctaagagctttatacagatttcaactcacacagyccttgaagtgggtaccagtattaactttgttttacagagaaggaaaagaatcagagagattaggttatagatctaagatcacactgctaacaagtgatggatccaggatggaaactcaggaagtcgtgtctcatggtttagaatggtgc

SEQ ID NO: 307716 - DNA, 524 bp, Homo sapiens
caaattattttttgcttaggaaagttatctggtcacttggaaatgaaagatttatcacatcacatagcttagaaagactatggatgcctggaagacctggaccaacactgagttgggatgcgcacaccagctagagcagcactgttattgacgttgttgtcatcatcattctagctaaggttgccttttaagtgacatgaggaatatctgttttaattatctcagcaattctgaggctatgactatccccatttttcagatgaggacactaagccctgccttttaaccactgtggtattcacactagaaccaggtttccaagattagctatcagtagtcttttgaatcacattcagggttttttaaatactccagatttttccttcaagtatctgttcaatgtgttcagttctgaagctgytatcaattcaaccactgatctgctcttctttcccctctccagctgaaaagaatctctctctgtcctctaggctcatttagcaatttagccatcaattataact

SEQ ID NO: 307717 - DNA, 581 bp, Homo sapiens
ttttctgcctcaagaagttgtcagtctacatgaataaataatattttttccatgctgatcgtaatttgacactttaggagcctctctggtgttggcacagatctgtttgtttcagaagcactggtttgtctctgtacacagggtgcaagcgctgagagtgcgaagatgaggtcttgcagttgtgattcttggcacatttaagaaatagtgcagtgtgggtactggtccgtcagaatggatgttgtcatcaaccatccatgtggtcataccagtggcccgattcccagtgcccccatggtaacactgatttctgtgcttagcacaaagtacttgataaatacttgtgcttaattaagttctacaaagtaagatacacagataagtctttaccatctctgggtgaccaaaaaggagtttataatctgwatgttgcttttctttttcctagttaaaagaccattaagctattagagtaatggattacacactgtcgattacaagtagatgaatgtcttcacatacatttttcctttaaaaatcaatactgaatgcaattcagccaacattaaaaatatcctgca

SEQ ID NO: 307718 - DNA, 479 bp, Homo sapiens
gaacgtgcaggtttgttacataggtatgcatgtgccatggtggtttgctgcacccatcaacccctcatctacattaggtatttctcctaatgctatccctcccctagcctcccaacccctgataggccccggcgtgtgatgatgttcccctccctgtgtccatgtattctcattgttcaactcccacttacgaatgagaacacatggtgtttgtttttctgttcctatgttagtttgctgagaattatggtttccagtttcatccatgtccctgcaaaggacatggactcatctttttttayggctgcatagtattccatggtgcaatgccacccatctaaaacgatctgatctttgacaaacctgacaaaaataagcaatggggaaaggattccctatttaataaatggtgttgggaaaactggctagccatatgcagaaaactgaaactggactcttcccttataccttatacaaat

SEQ ID NO: 307719 - DNA, 600 bp, Homo sapiens
atttatgcattttctctctcctttctacctgcagattttcctacactaatgcaagtgctcaatccactgaatattctatttcctcatcatacagtcctacctcagatctatcctatcctatcctaatggtatacacaagcacattaatattggaggaaaaaacccagttacgttgtttccacattcttctcaagtgctataagttcattaaagtaggaaggtttttcaattaaattgtatttaatcaacaatttccagttaaaatttatatttggaactacagacaattaaagactattggagcattttaagaaacatagctaatcaaagaagagtctgcaaaaaatgaggaataattctgggaaaacaaaacagtggtggaacgaaccaaccaagaataaacacaaaacatcattttgtttctttccttttaaagtgcttctttctttttcttccmaaacctatgcagatgtattgctgaccaagaattaagggaacatttgattgggatgggaacaattgatcatatgacatgctttgccatcatctttcttagtgcataaatctgtggcttaggaaagatctcaggcattagattga

SEQ ID NO: 307720 - DNA, 566 bp, Homo sapiens
gtagatgtcctagtagctttaattgtccaaagaacattcccaaaaccattcacaaacaaactacaggctacagatgaaaatttcaaattaaagaccaagggaatatgaacaaaatgtttccacagtgctaagttaaatttttcaagctggtgaaatgtgtctttggtggtaagtgatttttctaacaggcagtaacacaaaaggtcactttagaaatatggcttaaaaagatagattaaatccatcctcttaagaagagaaaatctatatgtgcttaagtatttaaaagataagaagcattggccctttacaatgagccagttgctgtactaatatgcactgtacatatctctccatatcatttaactttcacaaacaagtctatgaggtagttactattattcccaccattctaaaaaatgtaactaacttgtccaaagataatacctctcaggtggtaaaggtgaactttttagcaattgaatgccagaagcaacaartttcattcccatgccagcagagccatttttcaattgacatggtattacctatgtcatctagcacag

SEQ ID NO: 307721 - DNA, 558 bp, Homo sapiens
ctgaaatttgaaatactctttgttcctttggtttaaggctctacgaaattaagggtctttaatttaatttaatttatttatttttgaggcagggtcttgctctgtcacccaggctggagtacagtggcacaatcatagttgactgcagcctcaaaccccttagctcaagtgatcctcccacctcatagactcccaagtagctgggactataggctcatgccaccttacccggctaatttttaaatgttttttgtagagacacagttttgctttgctgcccaagctggttttgaactcctggtctcaagtgattatcccacttcagcctctggagtagctgggatagcaggcgtgagccactgctgctggccttaagggccttggaaatacaaatatgttaacagagagagaacatatatttagwtctagaggacaaaatgcattctggaaataaattattccttattcattttgataccccgttgaaaatagcacagagtaagtctgcaataagaattagtgaaataaatggcaaagacaaacgtactccaacagtaa

SEQ ID NO: 307722 - DNA, 361 bp, Homo sapiens
aatttggcaaattgtctctggtgtcaattagtgtttaaaaaacatggtgtatgttttcatacttatagattctgacaagagttgaagagggttttatttcttctaatacctatgtttatgagttgacagtaktgatggctgtaattttatttattgtaaaataaaagtcagcatcaaaaaactaatatttacatgtagctttgattatccagatagacccagctttagatagccaatcttgacttccttccttttcccattgtgtagacactttttaattactgaggatgtgatgaaaattgccacttctacctaacggagagatgatgaatttcatttttatgaactgatatttgaactg

SEQ ID NO: 307723 - DNA, 458 bp, Homo sapiens
aggatcatgggataaactactgtcaggaccaggatggtggtggaggtgccccaggggcagcccctgcagccgtgtgactgggaccaagatctctgttaacatgagatatgaagcagaatgaaaccctgggacttgctgtggagaggtttgaccaaggtttggtcaaaatttggaccaccaaggacatcagagataggcttctgtgtgccagtgctgggcttgtctcagtcagtgaaaccatgtggccgcatccacgcctgtagctgaagtgaacagatcagactccagcactctcagagactagcttttggagccaggacagacccactttgctctsagttctttctgtttgttgtttgtttgtttgtttgtttgcttgcttgcttgttttaaccagttgaaactgtcaggggtgggcaagatctttgagaggataacttggatttcccaagtcaatg

SEQ ID NO: 307724 - DNA, 548 bp, Homo sapiens
catgagccccatggaacaaggaccagataatacaaaactcttcatatgagtctgagagagtgggtctcagctcatcaatatcacctaggaacttttaacatctctgatgtctagatcctttatcaggtctgcttgacaaaaagtgggtcctggttataggcagtgatgatattaataacattttattttaatgcacgttcaggctgaaaagcatactggatttttaaacacttaaattttatgtggagcatactagaaaactaacaaataattttaaatcatccaggtctgacatgacatagttmtatttctactttcagaagatacatacggtgacactatggaagttaacttgaagattaaaaccctgaaaaatagaaagaatcttctatggtatatcacagagattacaagggcctgaattagagtggtgacattttcatcccttgataatggattaaaaacaattgaatgaagctttggggtgaacttacaggactttatggcaaacttcatatgggagacttacatgaagggaggaagaaatg

SEQ ID NO: 307725 - DNA, 471 bp, Homo sapiens
cagttttgttggattttatcaattttgtgaaatctaacacatgactttcctaattttttgtattgtttttgtgttttctatttaatttctttttctcttatccttacgattctcttcctgctatgttttcctagtttaatttggtgggttttcttsttgttgttgttgcttcttggaatacaaataataacagtgctgtatgcctgtaatcccagacaggagaggatgaagtgggaaaattgcttcagcctaggagtttgagaaccacctaggtggcagagacagaccctgtcctgaaaaaaaaaaaaaaaaaggaaatagataaaaataataaaataataaaaaggacattattcttgagctttttctctaattattttccctgagataacttgaaagctttaaaaatacatctgagcaatgcttagtcaagttttacaagtttttatatgctagaccatcattttcatt

SEQ ID NO: 307726 - DNA, 599 bp, Homo sapiens
aacctgctgatctggggtcttggtgtccaaaacaatttgggtggtgcttcaaacaggaaaaacaataatgactcaattgaattgtaaaatgagattctgttctggacattctgggttccttgtgccactgaatgaacaggcaggggaaaaaaaaaaagagttaatctaytggccagaaaaaaaattatcttgattaccatgaggaaattgagttgctgctacataatggtagtaaaaggtactgtatttggaacccaggcaattatttgtggtctcttattaagttccatgtccaagggtaaagattaaggcaaaactataacaacacctaagatgaccacaacaaaagcaagataattgaagacacagcctcttgagtatataaataactaaatacttcagctttttcactgaagtatgtatagctatgcatatatcagactaatatgtttaaagataaaaatattcctggaatatatctatttcaaaatgcaaaaggattttatataccaggatggtataatgattttaaactttcaatcatcatactccaaagccagacagcatacaaaacaaaagaaatgtttacaaagctcaac

SEQ ID NO: 307727 - DNA, 563 bp, Homo sapiens
aaaatcacatgatagtaggctttaggagcaatgtcagttggtacaaagcagaagagccaagtgtttaccacagtgctgtataagtaacaygatgcataaaataataaaaaattaatcaattacaataatttagatccaaggtgatgagatgagtgggtataagaaggaagaagagataaatataggaagaggaacaagtttaaagaaataaccaatataatttattgttgattagatatgtaaaatacctagaactgcttcaaaagcggcactgaggccctgggcatggattatgtgagaacgcattagtcaatgacagagatagaatgtttgaatggaaaccaggttagggactgtggttggggaggaagaaaaaaatgagacatttaatttatggtgacgctcactggagaaaatggaatgacaaatgatacagacttatttaaaataaagtaacagtcaacaagtaagccagaaataaaactcaagaccctaacaccaagcataacgatatcattatctaagagacatcctacacacaggaaatctttaagataaacatt

SEQ ID NO: 307728 - DNA, 577 bp, Homo sapiens
tttcaatttttgttaggccttatggtgaatttggaaactacctaaaatgatgaattttgataacgcagtaaaaaaatcacaattttttttacaatagggattttatcacacgaattttatcacgtgtctcaactccaagaagtttgtaccctcttagccacagacattcaatttaaaacatattcaatgttccactgaactataaatgtagcagttctcaaatcattatttcatctgaaaataaacacaaacacatgctatgttgtcaaagaaataattcattctctctctatctctaaaatcctgtttggtggataaggacagagtaaagagagttttggttttaaattctactctgaggctgaattgtctggctagggtggaaagaacagaaacagtgaatatggcractgcccacctagaaatttactcaatcttagaaggatcaatattttatgaaatttaaggaaacaaattcatgactgactttcatatccggactgcataagaaagagatcagagaagaggttgattcacctaattgtgcatgaaatatatacgtgtgacggttgaggtc

SEQ ID NO: 307729 - DNA, 552 bp, Homo sapiens
ttagggactgtggttggggaggaagaaaaaaatgagacatttaatttatggtgacgctcactggagaaaatggaatgacaaatgatacagacttatttaaaataaagtaacagtcaacaagtaagccagaaataaaactcaagaccctaacaccaagcataacgatatcattatctaagagacatcctacacacaggaaatctttaagataaacattatattttattttacagttaatggagttagacgaagtctatctttctgagtgtcaaatcagtgcacttttgtaatcaggaaatagataatatattactgggtttcyatgaacacacctagtagcctcatctgctatttaacatcaagtttcttcatccaaaaatacccactttttatttttggtaagctcttaaaagctttgttaaaaacatgcaagggcttctgtgtggctctggaagcctcacgacctcatgtgcagtattaatattctaaagaggacagcttctgcaaatattaaattacacaggagtttcagtgcaggcctgcagcctcaac

SEQ ID NO: 307730 - DNA, 553 bp, Homo sapiens
tttaaatattcacagagcttggatgtattaaatttagaggccaaaggttttattgctaaaattaattaaagaataaagaaggaaattaagaacgagtagattatgaattctaaacactagcaataaattaaatcagagctgattagaaataaaatgtaaccttctctttaagtagtatctatttgaattcttgtgtaagtttatacaaataaattaacaaatatagtaaacaaaaagcatagttattagatcatagatgctgactaaaacaaaacaaagcaaaagaccctgaaaagtagaagtagtaaccatgctttattagcaatcagtaacatatataaaaagctcaccatgtaacaggtaatttcacatactaactcatcaaaacaaacaaygtgatagatactattacaatttttactttaaatatgacaggtagatacgaagagagataaagcacattgtgcaaaattacacaatacgaaaagacaacagcattgttacccgcgtgacactggttccaaagcctggactcattatgttataaactgaa

SEQ ID NO: 307731 - DNA, 559 bp, Homo sapiens
gagaatattttggtgatataattatgcatttcattttttaatgagccctacaagtgttaaaatrtacctacaaatgcaaacattttataatctgttttgactgatgaagaactcgaagctcagcatgtttagatcaagtatccataaagatccagtaagtttctggtagcaaaaggattgtaactgggtcttttaacccatttcccatttgccccaagaataccatgctggcagcgagctacactttaattcaaattccctaattctttcagtaaatcaattctggtacattattttcagaggaactttctgttcatacttgcacacctgtgtttcgaaagaattatcattatgtttcattccaagaatggacaggggaacttggaagcccaaataaaatgataacaatgataaaatacctaaatgattcctaccttaatgtctgtctatatccatgggagaaaactttgaaaccatttattaatttcagttattttattgatattgttcacccacatcgtttcatataaatcaatgggtaatcacagaaaattacaga

SEQ ID NO: 307732 - DNA, 559 bp, Homo sapiens
gagaatattttggtgatataattatgcatttcattttttaatgagccctacaagtgttaaaatgtacctacaaatgcaaacattttataatctgttttgactgatgaagaactcgaagctcagcatgtttagatcaagtatccataaakatccagtaagtttctggtagcaaaaggattgtaactgggtcttttaacccatttcccatttgccccaagaataccatgctggcagcgagctacactttaattcaaattccctaattctttcagtaaatcaattctggtacattattttcagaggaactttctgttcatacttgcacacctgtgtttcgaaagaattatcattatgtttcattccaagaatggacaggggaacttggaagcccaaataaaatgataacaatgataaaatacctaaatgattcctaccttaatgtctgtctatatccatgggagaaaactttgaaaccatttattaatttcagttattttattgatattgttcacccacatcgtttcatataaatcaatgggtaatcacagaaaattacaga

SEQ ID NO: 307733 - DNA, 559 bp, Homo sapiens
gagaatattttggtgatataattatgcatttcattttttaatgagccctacaagtgttaaaatgtacctacaaatgcaaacattttataatctgttttgactgatgaagaactcgaagctcagcatgtttagatcaagtatccataaagatccagtaagtttctggtagcaaaaggattgtaactgggtcttttaacccatttcccatttgccccaagaataccatgctggcagcgagctacactttaattcaaattccctaattctttcagtaaatyaattctggtacattattttcagaggaactttctgttcatacttgcacacctgtgtttcgaaagaattatcattatgtttcattccaagaatggacaggggaacttggaagcccaaataaaatgataacaatgataaaatacctaaatgattcctaccttaatgtctgtctatatccatgggagaaaactttgaaaccatttattaatttcagttattttattgatattgttcacccacatcgtttcatataaatcaatgggtaatcacagaaaattacaga

SEQ ID NO: 307734 - DNA, 576 bp, Homo sapiens
cgaactatttttgtggagaataaagtagaacatgtttgtaaatcatcaaactgtgataaatgggggctgataaaggagtgaaaaawtaatgtagaaccctaaataggatcatcctctgccacagtctttatctgagaggttctagagaaaatatttgaagagatgataatattggaaaaaggcaacattttaattactggggaattcaggcacacccaaaataataataataataactattgagagactgcattggctcctgaatattgatggtaggagggatttttttttaaaagaacaaaacagcagtaccagaagtaacaccaccagctacaataatcacaagtgtttttagacaagagttatgataattttggggagtttatacatggacacacacatatatatgtgtatagactttaagagacaagaggagtcaatgtatatttattttcattatgaatgcataggctttcaatttaaaaactcatgatttttcaaaagaatacccactgcttgttttatatattgatatactcactataccatgttgctctgaattttgctgtttgggca

SEQ ID NO: 307735 - DNA, 557 bp, Homo sapiens
aagaccccatgattcaattatctccacttggtctctcccaggacacatggggattatggaaactattaatacaattcaagatgaaatttggatagggacacagccaaaccatatcaatagtttcctgttagatgtaaaataatgaagatttttttcttattaatactaatcaccataaggatacaccgaaacatcatatttatctataggactgttgaagagtacaacatgaaaggaggcataggagaactgatttttagatccaggaattcttcatatatgaaggtgagtgtcttgggatcagtttactgggtgtgcatataggctggctaaggagaatgcctaccacagactggggcactttgagaagctgaagatctgcagctgagataccgatcacagtgtagatgagaggatgaattttattctggaaaatgcytaaacgcagctacagtttcacaacctgacaatacctctggcattttccccttccccgaccacataggtatacacaatgttcgttggtcagaaatgtgcaattgaggtagtgctgaaac

SEQ ID NO: 307736 - DNA, 505 bp, Homo sapiens
ctttcaccagcaatgtacaggcattttaatttctctaaaacttctccataattcaaaattaatagaactttttattatgatttaatttgtggattttacctatttattggtcattaacaggaaaaaataatttctggaaaaaaaagagttcatagaatgtacttatccatgataaatggaagtaacagaaaggaagaataaatgmacccttatatatgccaaaagtttgtcaaatttgatgaaagacagaagttctcaagtagaatattgtagatgaacacagatgagaataaacaccaaaagtctcattaaagtctgactttacattacaaaaaaatggaggcaagaagaaaatgtaacatcatctttaaagtgctgaaagacaagcaaacaaaaacaacacacacacacacacacacacacacacacacacacacacacacagagctagttcagaattctaagtagtgcttagaggaaaatgcctaacattaaacatctatgt

SEQ ID NO: 307737 - DNA, 495 bp, Homo sapiens
tatattcacagtaagatcatatgaaaagaaattttctttaagagataataatttcatccaacycacaatgttgtactaattaaattaattaacacagagaaagcatggagaccactgcctggcatggggtaaaaatttagcaaatacagtttttaaagttcttattatttttcttgttgatattaacggtaagtacaagaaaaatacagtctagaagactaaaaagtccccaaaattgcaaaacaggtcttaaggataatgtaaaagtaaagaaatggttttaaaataaaatatactgagaaagagagaaaatttcgtccagaatttcataaaattattttcagaaatttgaatttgaaagaaccactattagtatactaatagaaaaatgaacaactcaagacttttaagacagcaataatttcaacagaataattgtgttgtctgctgttggcataacacaaaaatacttcaacgcagagaaaagtcagttca

SEQ ID NO: 307738 - DNA, 495 bp, Homo sapiens
tatattcacagtaagatcatatgaaaagaaattttctttaagagataataatttcatccaacccacaatgttgtactaattaaattaattaacacagagaaagcatggagaccactgcctggcatggggtaaaaatttagcaaatacagtttttaaagttcttattatttttcttgttgatattaacggtaagtacaagaaaaatacagtctagaagactaaaaagtycccaaaattgcaaaacaggtcttaaggataatgtaaaagtaaagaaatggttttaaaataaaatatactgagaaagagagaaaatttcgtccagaatttcataaaattattttcagaaatttgaatttgaaagaaccactattagtatactaatagaaaaatgaacaactcaagacttttaagacagcaataatttcaacagaataattgtgttgtctgctgttggcataacacaaaaatacttcaacgcagagaaaagtcagttca

SEQ ID NO: 307739 - DNA, 495 bp, Homo sapiens
tatattcacagtaagatcatatgaaaagaaattttctttaagagataataatttcatccaacccacaatgttgtactaattaaattaattaacacagagaaagcatggagaccactgcctggcatggggtaaaaatttagcaaatacagtttttaaagttcttattatttttcttgttgatattaacggtaagtacaagaaaaatacagtctagaagactaaaaagtccccaaaattgcaaaacaggtcttaaggataatgtaaaagtaaagaaatggttttaaaataaaatatactgagaaagagagaaaatttcgtccagaatttcataaaattattttcagaaatttgaatttgaaagaaccactattagtatactaatagaaaaatgaacaactsaagacttttaagacagcaataatttcaacagaataattgtgttgtctgctgttggcataacacaaaaatacttcaacgcagagaaaagtcagttca

SEQ ID NO: 307740 - DNA, 568 bp, Homo sapiens
tctccacacaggtattttttttcttgttttatgtatgatttaatttaaatggcaaagtgaaactttttagatgcttgttttttcctcacacttcatgaaagcagcattctctttcatccgtcatttcactggagttgtttgtttgctttttagtatatagttggcatgtgtgcaccctcccttcagagggatgtcggtaacatttttcaaaggagacaaagaatgcttttttttttwaaaaaaaagatattgctcatagagaaggtacatctgaattattgataggttcactcattcaagagttggccagggcgactgtggttccagcctccgctgggtcctgcctcgtcctccactgccagttgttctccatcctgccagaaatgccagccttgttctttgctcctttttcctgcagggcaatttttggaagcttgcctgcttactgacacaaaacaataatccaaacagaggacaaaatccagtggaaatttttcacgaaggggtctggtaagggattaatactaactgcagggatgacatggagagagtaaaacaaagcttctct

SEQ ID NO: 307741 - DNA, 601 bp, Homo sapiens
caagaaaacccttctgaaaagcatcagatttcatttgagacatgaagaataagtagatactactaagcaattattgggatggaaacattaaatgcagaggatagcctgaagaccagtaggtgaaaaaaatatttgagttaataaaagtgataatggtgagggaattaaaaatggtgaattcgtaaagctgaggctgatgtttaaaagaacagaatatacagagtctgttaggccacaatcacgatgttgaattttatcataaaagcaatgagtactctttgaaattatttttatgcagagaagttagatggtaatattggcttcataataatggtgatgcatctattagtagaaatgctaaaagtagaattaacctgtcccttatgtgatacagtcacaccaggacctgtggacgttcatatgacaaaaaataataaaaaataataaaaggtacattaatatwtttaaaaatcaccataactgaattgtcagaaaattaacagaaacaagaaggaatgtgtgcagattgatctattgaaaggatattcagaactaaatacagtgtctcctctaagatggtagcagtggagtcagagagaag

SEQ ID NO: 307742 - DNA, 608 bp, Homo sapiens
aatgctcaaattaatcctggtagaagtaattcacctaagattcagctccctaaatctcaaaagagataatccccacttttctctgtacttaggaacacagccattaggtgagcaagatgattaaacaggaaattacagcagaaaataataaatgctaagggaaagtgtgcagaaaagagtggctgcatgttattacaagaaaatgacaaataggccggtcrtggtggctaacacctgtaatcccagcactttgggagactgaggcgggcagatcatgaggtcagcagttcgagaacagcctgaccaacatggtgaaaccccgtctctactaaaaatacaaaaattagccacgcatggtggcatgtgcctgtaatcccagctactcaggaggctgaggcaggagaattgcttgaatctggcaagcagaggttgcagtgagcctagattatatcactgcactccagcctgggtgacagagcaagactccgtctcaaaaaaagaaaaaagaaaacggcaaagaacatgcagtggagatttttttttctcagaaagtggtgatagataatcctatgggagctaaaattttaatatatgcattagacactgtt

SEQ ID NO: 307743 - DNA, 575 bp, Homo sapiens
ttttcatctcttttgtataatggtcttccaatacatttatgtttgtaaaagtaggtccattgactaagataaatgacaaataaataaacgaaaaataataagcagagagaaacactagtagcctgaaaaggtaaattattgtccacccatatgaatatacttttaaaatggctaagatttcttaagtgtcattgttctttactgcactttgcacattatttaattattgaaagcacctataatgtacacagttatctcaattttattaatttataaattatattaaattgtatatttaktaaattctgacacaggtaagttaaattgcctatggtgtctttgataataagtgatagagttactcctctatactagtcttccccacacctaaccttgggctcaagtacaggaaatctgtgtaactgctaccacacctaggcaacctaacatcctaactggtttgaggataacgtccctggcagtagccaagctatagaaacaatctaagtgttcttcttgggacaagtggctaacaaaactggggtatatattattgagttctaaaaaagaatgag

SEQ ID NO: 307744 - DNA, 618 bp, Homo sapiens
gcaactaaatgtgatgtggtataccgtatgggatacagaaactgaaaaaggacattaggtaaaatccaaggaaacctgaatcaagtacggatgttagttaataatgatattcaattgtggttcattaagtatgataaatgtattacaacaatgaaagatactaaccacaaggataayttcccaatccataataaatgcccaataattatggtatatgaaaactatctttactatgttcatagcttttctttaaatctctacgtggtgaatttttccagaaagtttttcttgtctattagttcatttactccgcacaagaattctatagtgtagacatttttcatttacctttgggtagaaaactaaacttataatttttttgcatcttgcttaacatcactcaaatattgtatggtagaaataggaattgaatttatgatggcaaattcttttctgcagcaacccaaaccatgaaataccactagcactgagacacttgatattaggcaatatctttgcataattaaatcaagtttctaagtgatatgtacagcattatacattgtaatgagccttaaactatgtgttgatgggtatctaaagatgaaaatgcggtca

SEQ ID NO: 307745 - DNA, 604 bp, Homo sapiens
tttcactcttgttgcccaggctggagtgcaatggtgtgatctcggctcactgccatctctgcctccagtgttcaagtgattctcctgcctcaacctcctgagtagctgggattacaggcatgtctcaccatgcccagctaattttgtatttttagtagatccggggtttctccatgttggtcaagctggtctcaaaatcctgatgtcaggtgatctgcccgcctcagcctcccaaagtcctgggattacaagtgtgagccactgcacccagccttcaaatctctttataaacatcattggcaatcattttcacttggttttacaaaagaggttttcttccgtttcccacytatatgtaattaatttataccttttcataatgcttctcaaatatattttattaggaatgattttcttttcacttttgcaatataattatatttttcaaatcctaatgcatttgtccttctggaagactgccgaatactctgtcctccttagtagtttgtcctttttgtaaccaacccccccattgtagtctctttatcagagtttctctatattggtttgttttcttggtgtacttgattgatccactagctca

SEQ ID NO: 307746 - DNA, 647 bp, Homo sapiens
aggccctggtttagtttgcaggttctatcatgtattaatctttacacttaatttgaagtctaccccttgtcaaaatagagaaaatgactcaaatttaagtaagtatttatggtgtgatcattttaatgcacatgtkttaaatgtttattttataaattttttattttaaaatagaatcaataattagttgatgttactccatgttattttttaaatattagctttcttttacttaaacataatagatatttttagtgttgagaaggagattttcagtgtgatgtaaccagtaaatattttttaaacaattctttgttgaggactgatgaagataaattataataataatttttcttaccataaagtaagaaatgtacagttagccttccttatctcttggcccttcatttgcatccatatgttcaaccaaccatgggtaacaaatattcaaaaaataattaaaaacaatacaacaattaaaaaaacaaattaaaccgatatagtatcacaactatttatacattatttatattgtattaggtattataagtaatctagagatgatttaaagtatatgagaggatgtatgtaggttatgttcaaatattatgctattttacataacacttaagtatatgcagattttt

SEQ ID NO: 307747 - DNA, 579 bp, Homo sapiens
cattagccattagcatctaaaaacaggatttcttgaatttaaagaaaattgtatggaggtaacatttgaagaaataataattgccataattagacaaatagagacttcagaagcaaaaagcacagggctctgtaaaaaaaaaaaaaaaatagacaacaacaaattgaaaaaaaagagaaaactagcaatagaaagatatattcacagagtagaaagaatcacataaccccaatttcttagttctgagtctggcattaagaagacagtaaagtagtatttctagtaagtaagaaagaattttgaagccagatattcatgcctagccaaattatatctagaaatgtcagaatgaaataatatattttcaagcaaaatcacagaaaatttatcccaccmagacatgcctgaaaaatactcctgaacaaaaaactaatgagctcagttatctactcaagatctgagaaaaaaagagatccagaactagctaaaaatataaagagataacttgaactattcttgaaaattttctgtaagttttaaattatataaaatttttttaaaatcatgtaatgtgaaata

SEQ ID NO: 307748 - DNA, 548 bp, Homo sapiens
caccagtacatttgcctcatattgtctcatatacttctgcgaggagacacttaattctagcaatgatatttcaatgcagtatggacagcaaggaagaaaagtaacttatgtgtatatatatattttataatatagaataagcttaaaacttaagtatatttgaaatttcaataatccagttaccttgcatttgaggaagcagttgctttaaaatagttttgctgactggtatgtacctattctgtttccaattcatttgaaataaatccattgagtgcaaataaaaatcatcacagttttcaaatatctattaaatgacaaactcattgctcagaaaaatgttagaattgtctagttcccatttttgttgatgtaagacccactcacaaacaaaatgctatttaacgaaatggtgcttaaactactttcattgctatttcytctgttgcattatgtgcaaaatttaatgtagtctggtcgtcatctgtaaaagcacaatgaagtaagtgcggtattctgaaaggtgcatcaacagttcagctgtagct

SEQ ID NO: 307749 - DNA, 581 bp, Homo sapiens
tttgtatgaatccaacaatcccaccactgggtttctacccataggaaaagaagtcgttatatcaaaaagacatctgcactcatgtgtttactgtagcagtactcacaatggcaaagatatggaatcaacctaagtgtccatcaacagatgactgaataaagaaaatgtggtatatatacaatggaatcctattcagccataaaaaatgaaattatgttttttgcagcataatgaatggaactggaggtcattaccttaagtgaaacaactcaraacgtcaaatactttatgttctcacttgtaagtgggagctaaataatgtgtaagcatagacgtagaatgacaagcattggagactcagaagggctaggggtatgtggggagggggtggatgatgaaagatgacttaatggggacaatgtacattatctgggtgatggatctaccaaaagcccagacttcaccgctacacaatatatccacatgacaaaattacactcgtacttcttaaatttatataaattaagataaataaataaaagggtaaaaaaaagaaaaaataaagtcattgcattaaaaat

SEQ ID NO: 307750 - DNA, 584 bp, Homo sapiens
ctgagcattttattatttagttccagcttagtttacaagatcatctctggcttcaatggtaaaaatttgaatttcctctggaatcctctactgagtatagttaagttcactggcattctccttctggctcaccaatttcagtcactttcttgttagaggcacttcrgagaaaataaaggatcttaaaatcaatactagaacattcaagaggcactatttgaaattctgaagtgataaaaaaaataaaataaaatgacattcaagagcaatatacaaatatggtcagcatatttttctccaaaataattataattatttaaaaataaatttaaaactcaatcataaatataaaagaaccagtaaagtaaaacatccttaacactttaccaccaaaatcattttatagaatttaaaaacaatgataaattttacttcttagtgacttttcaataaccaaagtcaaagttaatcaaaaatgttcaaacacacatttggtgcctgttgaggaattttgagaaaataacaatagttgattcaactgtacagatccacaggatttggcagtcacagaaaataccttgtaa

SEQ ID NO: 307751 - DNA, 626 bp, Homo sapiens
aatattgctaatttaatgatgctacacaattgagtgtaaaatctagtggaggacatttaaataaacggaagtaaggtgatgcctttctgtaccttattccacaatttaggtattttatcttcaatgacaaatgcctaatttgaacatatcataaatatttatgatagttctttttctgctttaaggaagtctgggacaattacagtaaaatctagttttataaaatgtgtayacctagacttagcattggttttttcaaaagaagacatcataggaattttttaaattagaaccaatatatgtatcgcttaatgatgggtatacattctgtgaagtgtgtcatcgggcaattttgtcattgcgcaaacaccacaaagtggacttaacacaaacttagatgggacagacaaccgtatacaggtacagccaacacaagtatagccaattgctcctagtctacaaacctgtacagacgtgttaccatactgaatattgtaggcaattataacacagtagtatttgtgtatctaaacaaagagaaggaatagtaaagatatggtataaaagataaaaaatgttacacctctctagggcacttatgaatagagcttgcaagaccagaagtt

SEQ ID NO: 307752 - DNA, 522 bp, Homo sapiens
tgctggctttttggtttttaacattctctataaccagatctaggatgcatgctcatcccagaatgagcaaactcagtctttccagagttgagccttgtttttttttgttgaatcaacagcgttggaagctgggacaagatcctaggagatgatgtgttatacgctttgtgaggaaactgaggcttgaaggtggcagtgtgcccagtgtctcactgtgagctagctgcagagctgggcctgcaacttggatcttgtggatgttttttccagaaccactgcagtagtcgttgtaacctatgatctgttgcagaatgccaaagctgttgttttctggagggataatttkcttccttaacctacaaacaagaatagtgcactaaattcagtacatttctctccattgtcactaaaagagcctgaacgatgggaaggcccctgtttttttttttttttttttaaagaaggccattctgccatagtgtatcccaggctgttttatgtgagtgtctttgttcagaacca

SEQ ID NO: 307753 - DNA, 588 bp, Homo sapiens
cggtctttttaccttcaaatattcttgatgtaatttatctatagtttgttaaatacttagaataagagttgtgtttttaccattgagtyttggacaccgacaatgctatagaaacatttttttttgtaatacctaatctgaatttcaaataatactttaaacatgaagcacttatttttaaagcactctttaaatatattttaaaatattttattttgtatgaagctatttaagaaatagctaactcagtgcttactgcatttggaggactatcctaaactaagagacatatgctaaagaaataatacagtacacttgacccttgaacaacttggagattagggacgctgaccctccatgtagtcaaaaattcacgtataacttttgactccccaaaatttaactagtaatagcctactgttgacatatcagccttatggataacataaatggtctattaacacatattttatattgtatcatatattgtattcttacaaaaaaagtaagttagagaaaaaggaaatgttattaagaaaatcataagagaaaatatatttgctactcattaagtggaaatggatcatc

SEQ ID NO: 307754 - DNA, 588 bp, Homo sapiens
cggtctttttaccttcaaatattcttgatgtaatttatctatagtttgttaaatacttagaataagagttgtgtttttaccattgagttttggacaccgacaatgctatagaaacatttttttttgtaatacctaatctgaatttcaaataatactttaaacatgaagcacttatttttaaagcactctttaaatatattttaaaatattttattttgtatgaagctatttaagaaatagctaactcagtgcttactgcatttggaggactatcctaaactaagagacatatgctaaagaaataatacagtacacttgacccttgaacaacttggagattagggacgctgaccctccatgtagtcaaaaattcacgtataacttttgactccccaaaatttaactagtaatagcctactgttgacatatcagccttatggataacataaatggtctattaacacatattttatattgtatcatatattgtattcttacaaaaaaagtaagttagagaaaaaggaaatgttattaagaaaatcataagagaaaatatatttgctaytcattaagtggaaatggatcatc

SEQ ID NO: 307755 - DNA, 183 bp, Homo sapiens
ataactccttgatttagtaaaaccataattcgtagttttcctctgatgagtcacggccaggaagtagatattgyagatgagtctgggtccttgcacttctcagcttctgtcatttacaaattctactttgatgtctctgaagatgacatctgaatgtgcatgtgcagaagaagtggcattgaa

SEQ ID NO: 307756 - DNA, 615 bp, Homo sapiens
ccaaacatgacaagcttctccattctgagagaatctgcagactgaatgccatctaaaagggagcctaaatagatagctctttgatacattaccatggatctttttgtccctgatttttattaatcttttatatatatagcagcacttgatatagatgactactgcccttgtgatttcctcgtggatttttctaaaccttgaagcaatgaggaagtgaatacagagtytatgcctttgtatgggaaatgaattggattattagagaaaattctctggaaaaccaaccagcaagcagtcatggctctagaatttctataaaggagttaaacggggcaacttattgggacagccagggaatttgtcttaaagttgtatagcaaagaaaccacctttacctagataatatggggtggtagggtggattttggagacaggcaagagacctctgagccatctcttgtcatcaccaccctgtgtaagtttgacatacctaaatacctaaggaacaaaggctttatctaaattgtaagtaaatactcaggtatgaatctgaccaatgtcaccattcaggtactcaggttaaacaaagccaagaataaatcctcacaatccttt

SEQ ID NO: 307757 - DNA, 565 bp, Homo sapiens
ccagtatttaaaatacttacatgatgagatcaacattgatattacctgacatgaatttctgaacactgtatgatgaaatgttgtattcattgtatgatgaagtaggcagcatttagaaaatctgcatacttcagtggaccaatgttttttaaatgaccagtgtctgacattgcaaaataatttgtgggtaatagtttcattcaaaatatatacaacaaaagatttgaatgtaacagtatacataaagtatatgtttacataaagtatacataaagtatatgttgataaggtttcrgatttcacaatgcaactagcccttcagaaactaccactcattgagttttgatgtggtatcaaagaagaataattatttgaaaaggtcattataatactccccttttccaactacataaatgtgtgagtccatactttcttcaaatatgtcaaccaaaataatactttgcagcagattaaatgcagaaacagatatgagaatccagctgtcttctctcaaaccagacattaaagagatttttaaaatgccactcttctcattacgtttttc

SEQ ID NO: 307758 - DNA, 610 bp, Homo sapiens
tcttaaagtgtggttcctaaaattgtatcatcagcatcacctgggaactttgttagaaatagagtctcaggtcctacctaagacctgctgaatcagaaactctgggagtgggcccagcaacctgtgctttaacaagacctccagatgattctgatgcacatgccaagtttgagaagcagtgttctggatctaagatagtgatgctagtcttggctgtatgttaagatcacttggaaagttcttaatatgatgcccaggccacagcccaggcaaatcagaatctctgggggtggagcccagatgtaatttccccaggtgattgcaatgtgcatccaaggttaacaaccattgctttacaagcaataattctaaaagttaagtgtgtgtgaaaaagacttgagatacttgttaaggataagacgtgctcctggrgattctgattcagtagatcaatggtgaggctcaggaattcatatttttagccagtagtccaggtaatgctgctgcacaagatgcatgggccaccccacaaggaacacagtatacttaagagccagaccgcttaaatagtcttgaggaaggactgtgcttactagtgggaagtcagaaa

SEQ ID NO: 307759 - DNA, 509 bp, Homo sapiens
atcattttgttttcttctagaagtagatattgcaagtgttcttgtttcattttgccttaagacaaataatatctgaaatttgttttataaagttatcctgatagttaagcccctgtgatgaaatactttatttgatacctgaatattttaaattctagtcctcaaagccccacttctcaaagtatggtgcttggaccaattgtatcagaattcccccaggggcttatgaaaaaatctggattcctaggtcttacttctcataagccaggaatctacatttttcacaagctttctgggtgattcttaggcgcatgtaagtctgagaacgtgttgctttagatctatatttaagatgtttttctttcctttcttaactacttactgcaatttgtgatctttaacaataataatastaataataaaagtatttatggctaatattttattaagtacttactattctgctctaaatactttatacgttttataactcatttcattctgaaaat

SEQ ID NO: 307760 - DNA, 543 bp, Homo sapiens
gcttgttgcatgcatgcatgtatgcatgtgtgcacaaatgaatgaataccaagtgtttccagtatcttctttcatggctccttcatagctgttatcactcactttgaaagattgccccatcttcttatagcaaaccccaataatttttgcataatagttgtaaaaagcaaaaatataacaaatagctacactgtttaaaataaagctgattttttatttctagacagtgattaattgacatctcctgtacttctgctatacactctcataccttgatgctaaagaattcccacttctgcagaaacagatgcactaggctgaccccactcaacttatcactaatgtttcataataacttctatctctacttcagagccaacacatatgtttttcttaatyttcctgcagaaatcagtctataagtattctaaatttctaaatgtttaagctcaaagagaagatttattgggacactttagatacttatttcttgcttacatgggcttgaatgatcacaatgactcaggatcaattgtatttcat

SEQ ID NO: 307761 - DNA, 573 bp, Homo sapiens
ttttataaagaacatttctgactatatctcaaaatgtaccagtgctgtggttgagtatacagaggttaggttaagattccagggcagaagactcacacattatttcttttatgtagtcagttttttttttctgcaacggagttgaaattctgtgaattaaagctgtgtttgagagctcttattgcaagtagattctgaattctcctgtagaggttgcttgtgcaactggatgtgaaagtgctttctgaagggtgtgtgtgcgtgtgtgtgttgatgtgatgttgctgaggctgttgtgttatttctttcattttacttttggaatagttgagcccttaaattgatccagtacgtctccacaaataagttgcagaaaagggttttatgctttcccatctagcattctttttatttattactgtagaagagatattcatttactgagcaaatatttattgagagcttaccctgtgccaggcagtctttcaggcactggsatacagcagtgaacaaaacagataaaattcctgtcttcatgagagaggctaaactccagcttaagtatttagaagt

SEQ ID NO: 307762 - DNA, 487 bp, Homo sapiens
atttaagcccttaaacacattttttatctaaatatgaaatctaatccattatttcctatgtggttttccaagcatttgagagatgtcaagagtttcattcagtcaataaaggtgtctgttttattgaaacaaaaaaataaaaatttcttccacttaccaaaatgtctgtaatccccatcttcctcattcctttaagttgaartactgattgttgcatgccaaaataaaaagttatataaaaactggagcatttctttcatgctttacattctgtaagataaaacatgtgaccagtggtttgtaaagagaatagagaagatgccttgaagagctaagtcatagatcaccactttggggaaaagtactttccatttcaacgagagaatctgaatatccagaggttatcttacaacctcaggtacttggaattacacaacttaatagcatttaatattctctatgggttagcctcaaactgctgttataa

SEQ ID NO: 307763 - DNA, 576 bp, Homo sapiens
  misc_feature (1)...(576): n = A,T,C or G
taatttgtctgtcccttcacaaatacaaacttatcttagtaactgtagccttataatataatccttatatcatttttttaggcaccnttagggttttctatgcagacagttattgtgcatgtgtgttttaccatcttcctttgwtattctgtagccctctgattttcttttcttcccttattacattggctaggacctccattatgatattaattagaaatggtaacaatggacacctttaccttgtttccaatcttagtgggaaagtattcagtttttcaccattatgaatgatgttatctataggttctttgtagatggccctcatcaatttgaggaagttcccttctattcctagtttgctgactatatttatcatggcccgaaggtgaactttttcaaatgccttttctgtatctattgggacagccatatggtttgttttttaatacacttatgtggtgaattgcatttattgattcttgaatgttacagtatacttacattcctggtataaattctactttttcatgatgtattatcttttaaaaatatgattaaaatatgactgaatgt

SEQ ID NO: 307764 - DNA, 576 bp, Homo sapiens
  misc_feature (1)...(576): n = A,T,C or G
taatttgtctgtcccttcacaaatacaaacttatcttagtaactgtagccttataatataatccttatatcatttttttaggcaccnttagggttttctatgcagacagttattgtgcatgtgtgttttaccatcttcctttgawattctgtagccctctgattttcttttcttcccttattacattggctaggacctccattatgatattaattagaaatggtaacaatggacacctttaccttgtttccaatcttagtgggaaagtattcagtttttcaccattatgaatgatgttatctataggttctttgtagatggccctcatcaatttgaggaagttcccttctattcctagtttgctgactatatttatcatggcccgaaggtgaactttttcaaatgccttttctgtatctattgggacagccatatggtttgttttttaatacacttatgtggtgaattgcatttattgattcttgaatgttacagtatacttacattcctggtataaattctactttttcatgatgtattatcttttaaaaatatgattaaaatatgactgaatgt

SEQ ID NO: 307765 - DNA, 436 bp, Homo sapiens
tcaaatcattttcttagtcttatgtagtttctgacaatgagtcagttgttttctatctttgtgcttccatgtcttctttcccctctatgcttactcttcttttttttttctttttttcctttttttyaaaattattattatactttaagttttagggttttctgtcagtgattttcagaactttataatgtgcctttgtgtagttttttgttgttgttgttgtttactctgcttgtgtttgatgcaattttaaaatatgattgtttatacttttcactatattttatattttttagtcattgtttctctaaacttttttgtctctccatgtctctcctctccttctggaattccaattgcatatattttagaaaacttgatattgtcccacagatcaatgatactctgttatttttttcttcagtctttttgttct

SEQ ID NO: 307766 - DNA, 588 bp, Homo sapiens
tttttctcttcttataaggaaactactcccataatgggggttctacctaatcacctcccaaaagtcctaccttctaataccatcccactgggggttagtgtttcaacataygaattttgagaggacataaacatgcagtccataacaccatatataaatcctcacatatatgtagtgggccagccatttttgaaggctctagcagatacatgcaccaccccctcccccatctctatcagctctacctaaaatcttgactttattctcttttttgcattaaggcaagctcatcaaactggcccaaggatcttggatgcatcgcccttggcagattgtgtttcttctttgaaattctcctttgaagtggccctcattgccaaccaccaagcctgcaatggggagacttcccccagtactcctaccgatgcctcccaccctgcctactaccttggacacatgacttcatgatatggaaagaagaatctcttctggaaaagagtgcaataaagaaatccaaggacctgcactcaaagcaaatgttctccgtgggtgattagtataaaccctcattcagcataagttggttat

SEQ ID NO: 307767 - DNA, 538 bp, Homo sapiens
tatttcatatgaatatatccactaacagcatattgtttagcttagtttggttttgaattttagattttgatttgtggcagccttgtggaaaaaaagatgggtacaggagcaagcctggaggaagggacaccttgcagatgattgtcagaattagaatctagaaaagactatgttttgaagcatttagattaaggaggggagagcgattaagcagggaaagtgaagaatggctatgatctatttcaaaggcagaattgctgaaatcaaggaattattttaaagtaatatattttatttagtaagagctcctttagaaactgccctttataatgtttcttatggcagaaatatgaaagtgtttgtttagtttattgacacaaatagtttgtattttgacctttgttgtgctagtggttccctgtgttttccagggaacaaagaaaagcaactcatrggtcttcatcctagaagatctgcacggtgacttttaaagactagtaggtaaaagccatcttgtgtacttttgaagagtattcaa

SEQ ID NO: 307768 - DNA, 538 bp, Homo sapiens
tatttcatatgaatatatccactaacagcatattgtttagcttagtttggttttgaattttagattttgatttgtggcagccttgtggaaaaaaagatgggtacaggagcaagcctggaggaagggacaccttgcagatgattgtcagaattagaatctagaaaagactatgttttgaagcatttagattaaggaggggagagcgattaagcagggaaagtgaagaatggctatgatctatttcaaaggcagaattgctgaaatcaaggaattattttaaagtaatatattttatttagtaagagctcctttagaaactgccctttataatgtttcttatggcagaaatatgaaagtgtttgtttagtttattgacacaaatagtttgtattttgacctttgttgtgctagtggttccctgtgttttccagggaacaaagaaaagcaactcataggtcttcatcctagaagatctgcacggtgacttttaaagactagtaggtaaaarccatcttgtgtacttttgaagagtattcaa

SEQ ID NO: 307769 - DNA, 613 bp, Homo sapiens
taaagtaatatattttatttagtaagagctcctttagaaactgccctttataatgtttcttatggcagaaatatgaaagtgtttgtttagtttattgacacaaatagtttgtattttgacctttgttgtgctagtggttccctgtgttttccagggaacaaagaaaagcaactcataggtcttcatcctagaagatctgcacggtgacttttaaagactagtaggtaaaagccatcttgtgtacttttgaagagtattcaaggtgtggtattttaygatccaactaggcagctgaaccaatatgcagatcttggttttttaactataaaacaagtctttctccctaggccatgtcttgaatttgttttttaagctcaccacacccagcttttccccatatttagttttaaacaaaaatctcaccatatttctgtaattaatctgtacaatattgctactgttttcagagtaactttggaaagccccaacactttgggcaatatctgcaaaatgcagttaatttaatgctatctacattaagggagattttaaactttaaaacaagagactgaattagccagttttattgagactagagcaattaacttgtaat

SEQ ID NO: 307770 - DNA, 588 bp, Homo sapiens
tttttctcttcttataaggaaactactcccataatgggggttctacctaatcacctcccaaaagtcctaccttctaataccatcccactgggggttagtgtttcaacatatgaattttgagaggacataaacatgcagtccataacaccatatataaatcytcacatatatgtagtgggccagccatttttgaaggctctagcagatacatgcaccaccccctcccccatctctatcagctctacctaaaatcttgactttattctcttttttgcattaaggcaagctcatcaaactggcccaaggatcttggatgcatcgcccttggcagattgtgtttcttctttgaaattctcctttgaagtggccctcattgccaaccaccaagcctgcaatggggagacttcccccagtactcctaccgatgcctcccaccctgcctactaccttggacacatgacttcatgatatggaaagaagaatctcttctggaaaagagtgcaataaagaaatccaaggacctgcactcaaagcaaatgttctccgtgggtgattagtataaaccctcattcagcataagttggttat

SEQ ID NO: 307771 - DNA, 543 bp, Homo sapiens
cgaagcagacagataagctgacaaaaatgacaaaaaaaccattttaatgtttaaatcagaacagaaagctgtttatgagttgtgatctattgtttggtactgaaaagtaacagaggcataattaaatcttttacccratgctttatccagagagatcttttcagaaatttgggcagtatttatcttataaaagcaaccctgtttttttttttttatggaagtcatttatatgacttctatgatttatatgactggtcatttatatgattgtttagcttagtttggttttgaattttattataaccatgatatctggacctaaggtcccaaattgaacctctcaatatccatggcattgcaagcatgactatgcatgcagtggggaaaataatataatgtatttgcataggtttttttttcctttttaaagccctttcacatctactagtacatgaaattgtgccacttactaaaattcattgttaatttcatttttctaatgaatatttggccaccatcctgtagaccaggttatagatgctt

SEQ ID NO: 307772 - DNA, 538 bp, Homo sapiens
ccacacatggctaatttttattttttgtagagatggggtcttgctatgttgcccaggctggtcttgaactcctggcctcaagtgatcttcccacctcagcctcccaaattgctgggattataggcatgaaccactgcaccctaccaagtttcagttttaaatggtaaagtaaagctatgactatttactagatgtarattactcataagagcaagaaatattgatttagcctctccagtgagccagtttagtcacttctctaggtgcttttgctgcaaagatgagcaagacaggtcctatccccactcccattaagcatataatgtagcagggaagataaataaataatgacataaaagtaaacaattacaaatgtacaaaggaatgtaaagtagatggacctaacctagtatggggggttagggaaggcttccaagaggaagtggttgtagagaatcaggtaatgaagcaaaaagaaagtgggtaagcattccaggcaaaagaactggcatttgcacaggtcttaaagtggaaaaaa

SEQ ID NO: 307773 - DNA, 466 bp, Homo sapiens
gcaccttgtgctctctgcagtaccaacatctctttgaattagcatggattcatgcattcatgaatttgaaaaatatggcctgcaagctacarcgaaaatggctaagaagatgtatttcagaaatggcacattttcagcattctaaaaggtaggaccaaagcgactattttaagaaaatccacataagaagatcaatatttcattggctgttgtaatattaggcatttatcagcacattagaaatggttgccatgaactactttctattaataacttggttgagactgaatattaaacgggaaacttctcatagcaatattctctttgggtggctcaaacaacaaaaacaaaaactattcctggatgaagtcttcatactggcaaaattatttcatgaaacactttatagcttcagacaggcctctgcttcctttcttatgctgctgagcacagctcagtaaaagcc

SEQ ID NO: 307774 - DNA, 573 bp, Homo sapiens
ccctcttcagtagtagatgtaatgcattcttctgtgagatatgtatttatgtttatacttccttttctagcctgtaagctcatgaaaggctgaatcagtgagtcatgattcaactatgcatcttcaaatttgcttagcagagaacctggcatgtagggtgtttttgaatgaaatgcacttacacagacaggggaaaaaagcmatatctggtaagggaaactttggaaatttcaaataacgtatttgcagagtagattatgtacctcaggcatcaaataaaataaaatttatatttcaatttctgtcttccttgggcatgaggtccagggtaccactgtttgatcagaattcaaacagatactaactctccacttaaaagaataaattctatcatttaattaaattatgtatgagaggggacttgaggggggttgtttcagagtcaaagcttactcagtctcctttcacagttctatttttctttctaattaaaaatcagtggaattttgagaaaccgactccaaacacttcatactttctctgtaatttttcccttaaaaagagtagtctgat

SEQ ID NO: 307775 - DNA, 573 bp, Homo sapiens
ccctcttcagtagtagatgtaatgcattcttctgtgagatatgtatttatgtttatacttccttttctagcctgtaagctcatgaaaggctgaatcagtgagtcatgattcaactatgcatcttcaaatttgcttagcagagaacctggcatgtagggtgtttttgaatgaaatgcacttacacagacaggggaaaaaagcaatatctggtaagggaaactttggaaatttcaaataacrtatttgcagagtagattatgtacctcaggcatcaaataaaataaaatttatatttcaatttctgtcttccttgggcatgaggtccagggtaccactgtttgatcagaattcaaacagatactaactctccacttaaaagaataaattctatcatttaattaaattatgtatgagaggggacttgaggggggttgtttcagagtcaaagcttactcagtctcctttcacagttctatttttctttctaattaaaaatcagtggaattttgagaaaccgactccaaacacttcatactttctctgtaatttttcccttaaaaagagtagtctgat

SEQ ID NO: 307776 - DNA, 602 bp, Homo sapiens
ccaatcctgaagttgctatgggtcagcaggccaggctgtttggatggaaagctgggcatgaagtgcaaaaaagcaaggaaaaygaaaatctgtgaagacaaagaggaatccataaggaccaactgaaatccacagggaccaactgcaagtcatatctgtcttctaccatctcaatctcaaccacatcggtgacccgcaagctgggatcctccatcatggagtgacacacactcctggccagagcagctacaggaggaggtccagaaggaggagaggaggtgcaggcccagctgctgccctgtgtaggtccgtgatgagtgaagactgcagcagccccttgtgtccgacaccgacctccagacagtgatggctgatgctccacattcaccttccaaatctcacgcagattcctcacatggcactcctaatctagaccatacaggggaaggaattctgggaaatgtagttctagtagctaagttgacacaatacaaaaccatcacagtggtggagtcagaaataccaggcagatagttaagtatggtgctcccttctagaggcaccactaagctaacacgcatacactgcttacaatgtgccag

SEQ ID NO: 307777 - DNA, 602 bp, Homo sapiens
ccaatcctgaagttgctatgggtcagcaggccaggctgtttggatggaaagctgggcatgaagtgcaaaaaagcaaggaaaacgaaaatctgtgaagacaaagaggaatccatraggaccaactgaaatccacagggaccaactgcaagtcatatctgtcttctaccatctcaatctcaaccacatcggtgacccgcaagctgggatcctccatcatggagtgacacacactcctggccagagcagctacaggaggaggtccagaaggaggagaggaggtgcaggcccagctgctgccctgtgtaggtccgtgatgagtgaagactgcagcagccccttgtgtccgacaccgacctccagacagtgatggctgatgctccacattcaccttccaaatctcacgcagattcctcacatggcactcctaatctagaccatacaggggaaggaattctgggaaatgtagttctagtagctaagttgacacaatacaaaaccatcacagtggtggagtcagaaataccaggcagatagttaagtatggtgctcccttctagaggcaccactaagctaacacgcatacactgcttacaatgtgccag

SEQ ID NO: 307778 - DNA, 602 bp, Homo sapiens
ccaatcctgaagttgctatgggtcagcaggccaggctgtttggatggaaagctgggcatgaagtgcaaaaaagcaaggaaaacgaaaatctgtgaagacaaagaggaatccataaggaccaactgaaatccacagggaccaactgcaagtcatatctgtcttctaccatctcaatctcaaccacatcggtgacccrcaagctgggatcctccatcatggagtgacacacactcctggccagagcagctacaggaggaggtccagaaggaggagaggaggtgcaggcccagctgctgccctgtgtaggtccgtgatgagtgaagactgcagcagccccttgtgtccgacaccgacctccagacagtgatggctgatgctccacattcaccttccaaatctcacgcagattcctcacatggcactcctaatctagaccatacaggggaaggaattctgggaaatgtagttctagtagctaagttgacacaatacaaaaccatcacagtggtggagtcagaaataccaggcagatagttaagtatggtgctcccttctagaggcaccactaagctaacacgcatacactgcttacaatgtgccag

SEQ ID NO: 307779 - DNA, 343 bp, Homo sapiens
ttatataatgttcttgttgtcattgtttctgtataatctgtaattatagttttgatttctctttaatctaaaagttatgtaggagtgtgttgttgggtttttattatttttaaagttttgscgttaatgctcagtttctctgcaccgtgttccaagattatggcctgcgtgatttcttgtccttggaacgtattaaaatttttcttgtggcttaataactgatcactcttattaaacatttcatggacctgagacagaagatgaattcattgcggagaacaaagtgtgataggtatctggagttgggaaaaatattttgatacaaactgattcaagtaagtca

SEQ ID NO: 307780 - DNA, 557 bp, Homo sapiens
ttactggcagcatataacattcatctactcagatatttcctctgatctgtgaaagaaaatccccaaacccttgctgaatttccagactgtccccaggacacggcacacagactcccctgtgttttggtggctccatcattgtcttccctagggcctcaatctagtgaagaagaacccaggaggcaagactacgtctcaggcatcctgccagggcctaagctctctttgtttcctcatgtgactcctgatttctaactttattgattagttttccatggttttgaacttactataaatgaaatataaaataaatactctcataaatcttgtttctttcattcaacattgtgtttgtaaggcccatccatrttgttccatatacagtaatttatcctttgtcattactaatagcattcctttgtacctccatgatattttatttctataataacataccagactgatgaggaaggctagagtcacaggcatgcatctccatctaccaattcaactgcattaaaaaaaaaaccatgacttattttttcaaaaactgtacc

SEQ ID NO: 307781 - DNA, 419 bp, Homo sapiens
tgcctttgccatgattgtgagacttccccagccacatggaactatcagtccattaaaacgactttttctttccagtctcaggtatgtctttatcagcagtatgaaaacggactaatacacctacctcacaccatttataaaaaattaactcaaaatggatttttaagtgggtagatgatttcaataggccctttttcaaattatatattcaaatcacttataaagacatgcaaagatatttgccatcattagtcatcaaggaaatgcaaagcaaaatcrcaatgaaatactatttcacattttagagatttctaaaattgaaaggacaggcaataacaagtgttggcaaggatgtggagaaactggaaccttcacacatttctggtggaatgtaaaatagtgcatccactttagaaaaa

SEQ ID NO: 307782 - DNA, 493 bp, Homo sapiens
tgagtgattgccaaaggctatatagtttggccagagataggatgggggaggcggaatggggagtgactcctaatggatatggggtttctttttggagttacgatgttctaaaattagatagtgatgatggttgcacaactctgaatatacctaaaaaagaacactgaatggcatacttcgaaatggtgaattttatggttatgtgaattatatatcagtaaaactattatagaaaacaattcagctttgtattaagattaataataaagggtatgacagtattttaaaaacaaagaaattatgtcataaaagattacrgatgcaaatcatcaccccaaaatgaggctacatatgcttgcacagtgctttgaaagtgaaaatcattaagtatttacagttaaggccctgttctaaagtgtgtaatttatcttggcttgagacaataaatgaggaaggttgtatagcagagggtctcaagactatgctgctgctc

SEQ ID NO: 307783 - DNA, 527 bp, Homo sapiens
gtagtaaaaacaaaaaacaaaaaacaaaaaacaaaaaaaaaacacagtctgcaagaagaaaaaatctgagcaatcttcatgaattaacttgggtcccctaagaagcagactcctagacaaggatatgagtgaaagttgttattggggtggcaaaggagcagaattattaatacttattataataccattcatagcttgttacccatcagccctttgcacttctccctctggcagactctctctggcggaaccttccctctgtcatcataaaacttggaaatagccatatttctttcttttggtcttcttggggttgtgagggctttttctttttcacagtcaattaataacattgatgttccttgcttgaaatgtgagcctgctcraggaaatcagtgcagaggagcaggggaaagtgaaacagggaaggcgcatcttcaatcaagggtgtattcgtaaaccagcaaccatcatgggctactgtagcttaatgctaggaagacactctgggaaaagtggagaataca

SEQ ID NO: 307784 - DNA, 559 bp, Homo sapiens
cttagctaaccacacaataatagtggaagacttcaacaccttactgacagtattagacaaatcattgaggcaagaaactagcagatatatttagggcctgaatttaacatttgaccaaataggcctaacagacatctacagaactctccaccccaaaacaacaaagtatacattcttttcaactgcacacagcacataatctaaaactgaccacacaatcagacataaaacaatcttcataccaaacacactcttgaaccacaatgcaataaaaacagaaaccaatcctaagaagatctctcaaaaccacgcagttacatggaaattaaacaacctgctcctcaatgagttttgggtaaacaataaaattaaggcagaaataaattctttgaaactaatgaaaacaaagttacaacacaccagaatcttggccgcaggtaaaacagtattaacaggaaagtttatagcactgaacacccacacrgaaaagttagaaagatcttgaattaacaacctaacaccacagccagaggaactaacaaaacatgagcaaaccaac

SEQ ID NO: 307785 - DNA, 649 bp, Homo sapiens
cagttatctatagctatgtaaagacccaccctaaaatagtggcttaaaacaaccagttattgttcatgattctctgggtcaagacttcaggcaaggcttggtggggatggcttgtctctggctcactcatgtgtctgcgttcagctgggctggtgggtccaagatggcctcaccctcaaggctggggccttggtgctgtgtgtcggctggagttyctcagacttcctccatgtggcttctctcttcatgtagagtttcatcttttgttccatgttcttttccctccaagaggttagcctggagttctttacaaggagaaatcatccactaatatttgtataactaaaacttgatggcaattaaaatatattaacaaaggtgtgctctgtggtccaatattgttgggaaatgttgcatatggcttctccttgtggagcttccactgcaaacagaacagaaagcttactaaagtctctgagaggtcttgcatggagcaaagaaagacaaaaggcgagatgctacgtcttttttccagggatatataaaggaagggctgggttagataaagcaagaaggctttggcttgccttatgagaacatcatcatcatcttaactctgctattcctgtacccatcagagtcccagtat

SEQ ID NO: 307786 - DNA, 649 bp, Homo sapiens
cagttatctatagctatgtaaagacccaccctaaaatagtggcttaaaacaaccagttattgttcatgattctctgggtcaagacttcaggcaaggcttggtggggatggcttgtctctggctcactcatgtgtctgcgttcagctgggctggtgggtccaagatggcctcaccctcaaggctggggccttggtgctgtgtgtcggctggagtttctcagacttcctccatgtggcttctctcttcatgtagagtttcatcttttgttccrtgttcttttccctccaagaggttagcctggagttctttacaaggagaaatcatccactaatatttgtataactaaaacttgatggcaattaaaatatattaacaaaggtgtgctctgtggtccaatattgttgggaaatgttgcatatggcttctccttgtggagcttccactgcaaacagaacagaaagcttactaaagtctctgagaggtcttgcatggagcaaagaaagacaaaaggcgagatgctacgtcttttttccagggatatataaaggaagggctgggttagataaagcaagaaggctttggcttgccttatgagaacatcatcatcatcttaactctgctattcctgtacccatcagagtcccagtat

SEQ ID NO: 307787 - DNA, 585 bp, Homo sapiens
cagttatctatagctatgtaaagacccaccctaaaatagtggcttaaaacaaccagttattgttcatgattctctgggtcaagacttcaggcaaggcttggtggggatggcttgtctctggctcactcatgtgtctgcgttcagctgggctggtgggtccaagatggcctcaccctcaaggctggggccttggtgctgtgtgtcggctggagtttctcagacttcctccatgtggcttctctcttcatgtagagtttcatcttttgttccatgttcttttccctccaagaggttagcctggagttctttacaaggagaaatcatccactaatatttgtataactaaaacttgatggcaattaaaatatattaacaaaggtgtgctctgtggtccaatattgttgggaaatgttgcatatggcttctccttgtggagcttccactgcaaacaraacagaaagcttactaaagtctctgagaggtcttgcatggagcaaagaaagacaaaaggcgagatgctacgtcttttttccagggatatataaaggaagggctgggttagataaagcaagaaggctttggctt

SEQ ID NO: 307788 - DNA, 649 bp, Homo sapiens
cagttatctatagctatgtaaagacccaccctaaaatagtggcttaaaacaaccagttattgttcatgattctctgggtcaagacttcaggcaaggcttggtggggatggcttgtctctggctcactcatgtgtctgcgttcagctgggctggtgggtccaagatggcctcaccctcaaggctggggccttggtgctgtgtgtcggctggagtttctcagacttcctccatgtggcttctctcttcatgtagagtttcatcttttgttccatgttcttttccctccaagaggttagcctggagttctttacaaggagaaatcatccactaatatttgtataactaaaacttgatggcaattaaaatatattaacaaaggtgtgctctgtggtccaatattgttgggaaatgttgcatatggcttctccttgtggagcttccactgcaaacagaacagaaagcttactaaagtctctgagaggtcttgcatggagcaaagaaagacaaaaggcgagatgctacgtcttttttccagggatatataaaggaagkgctgggttagataaagcaagaaggctttggcttgccttatgagaacatcatcatcatcttaactctgctattcctgtacccatcagagtcccagtat

SEQ ID NO: 307789 - DNA, 613 bp, Homo sapiens
tgtatcatcacagggcaagagatggcatggcaatttgtggatggcctgggctgcaagtcagaaaaaagcaatggagccagtgagctaggactgttgatataattaagatagagggtaacttaggactsttcctacaaccttcttgaactgcagagcaaagaaaatccaccctcctattgcagaaaaacagggtacttttgccctgaattattcagctagactattgaccaggttcaactgggtaattacacgtgtcttactttgactggttctatgttggcctaagctttaggtttgggacataaaatgttagccctgggaaagattacagagataacaaagcctggctcctcatttcacagacaaggaaactgagtaaacctagggctagagaaagacaaatgagaaactaaggtacaaaatttaagtcggcactcattttcaggataaagtaagtgcagtcagtcctgaaagtatatccttaaattctccagcctaggtatccctctcactttacccttgtcctatccaaaactaatacccaaagaggccaagttaacataactagttgtgatcagagctagaactactacatgtcttctaacttctggcc

SEQ ID NO: 307790 - DNA, 657 bp, Homo sapiens
gaggtcagggtttcaactttgagcatgttaagttggagacatttgttagccatatgggggttttcaaataggcagttggacagatgagtctggtgttcagggttgcgggaggatctacagctgggggccgtggatgatctacaatcttgacactggataaattaccattggatgagggaggtagaaaagagaagacatccaaggactggaatctgagacactgcaacatttagaggtcatagagctaaggaggaagcaacaaaggagactgagaaggcgctgccaacaagacaggagaaaatccaggagagaatggtgtcctggaggccaaggaaagagagtgtatcaagctggggaaagggatctactgtcaaactctccaatgaagcagctggaggactgaatggccagtccaagaggccactcttcctcccagtcaccttgcccattcctaactctgtcgtatatttattacatccccctgtagtcatcagctctcttgtctatcttgagagcctcttgtgcatttcagtatttccagtgcccagcaggtgctcaataaatgtttgttgaataaataaaagatkaatgactgagtgagtgtgtgagtgagtagtgatctcacaggttagggatggtggaaacactacagaatgg

SEQ ID NO: 307791 - DNA, 396 bp, Homo sapiens
tattttcccagtgcatataaaagttatgtttacactatacatgtrtatatatatatatatatatatatatatatatataataccatagtctattaaatgtgcgatagcattatgtctaaaaaaagtatatagcttaacttaaaaatactttattgctaaaaacatgctaacaatcatctgagcctttattgagttgtaatctttgctggtgtagagtcttgcctccatgttaatggctgatgactggatcagggtggcggttgctgaaggttggggtggctgtggtgatttcttaaaggaagacaacaatgaagtttgccacatcaatgaactcttccttttatgaaagatttctctgtagcatgtgatgctgtttgatagcatttcacccacagt

SEQ ID NO: 307792 - DNA, 584 bp, Homo sapiens
caatgcagaacttttcaacaataaagtatcataaatattaacgtgacaatgatgtaatttctatcattataaaagatgagagagtacacagtagtttttctttcacttggttatgagcagaaattactgttgcctggtacttaggctacttaaaaacaatatttttrttaagtcatttgcctactaatagttccctctttcctctttctctgaaggtaaaaataagcagaactatagataaaaaactgagtaccaattcacatttattgctatatctattagacctatttcaaatattgatattaaaaccaagagttggaaaatatagaaagtttcatttaaaaaaatactgattaatgttacttgaatgacctgtacacattttttataaaagcgaaaaataagattaaaattatgtaacttttatattaacaaaatatttattctaagtgcttataagaacatatatttgcaattttacttgacaattctcatgtgtagtaaatatagtaattcattattctagatagaaaaatactgaaataaaatatgagcaggtaataatgagtaagatggtgttgtaa

SEQ ID NO: 307793 - DNA, 539 bp, Homo sapiens
tgttcccctaaaaatatgtcaggtggtataacgatttttgaaattcttactggagcacgagacataaagtatctgaatattaacatcttaggacacaagcaagtaataattaattttacttgagtgggcaaaaaataactgtgtgaaggattttttaataaaccattattaattgaaagtaatatatgaagagagcaaaatgttaaaattaaaatataaatgaaaataaattcttcatcctaccccagatccaagtattaatagtactttcttcaatattctatgtgcaaaaatgttgatatgtacttttttacaaaaagcttatcataatattctctttacagaataatctgcagatcttcctgtataattatttacagatgtagctgcttttaattctttacaaccacataatacgttattgtaatgttcagaaactaattagattgttttcagtatttgactaagaaaactagatttaagattagttttaagctgcgtatggtrgctcacacctgtaatctgagtaccttgagagg

SEQ ID NO: 307794 - DNA, 624 bp, Homo sapiens
ttaaaactgtgtatattactttcctgttaaaaataaacacaatagcaaataaatggagcaacaacaaaaaagccaaaccaccaaactcaaattctaaaatatagcttgtttaaataatgcttatattaacggagttgcttactttaggtactgtagtgtctaaaaaatgtgcaaattttaaaatayggttttctagaaataacagatttacagcatattttgtaccagtattaaatgtatactaaataatcataaattcatgtatgtagtactggctgtgatactacagcagatactatttcataattgtgtaggtatgtacatgctatacatattagaaatatatcgagtgtcaatgagaggaaaccaaaactctgttggaaatctagggactggaaatgactcactaaagtagtaaacaaaattttattaaaacaacaaatacatgtcagttcaaaaggacagttagaattgtgtaatataaatcatcttactgagtgctaggatttgtcattgcatatacatatttttagattttattgatcactttgaaaagtcatttaaatttcttcctacattaagtgttagacaagatgtttgataaaagccccatagtaacaacat

SEQ ID NO: 307795 - DNA, 624 bp, Homo sapiens
gaaacttaaactagtaggaggaaaatcacagctaaccttttcttggccaccatgtttcagtctatggatgaccttcaccagtgacagttgaagagaaaaagggacagcctcacctacacattgctggttctattgcacgcatgctgatgtgctaagcggctctcaacatttccactttatcatgttcttattttcagcaacttcctatgcccttcctgaacccaaaggagagctacatataccaccttaaattttcaaaagctccattaaaaagcaagcgaagcaggtacatttaagtttaataacacattttaattcartatagcctaaacattatttcaatacctaatcaatatatttaaaaaatgaaatctttcacatttattcctttttaagtcttcaaagatgtgtttgtattgcaacacatcccaattcagattaaccacatttcaagtgcttaatagacatagggggctagtggctatgtacccatcatcacagatctgcaacacatatttgtctatttagttgtctcagtaagatgatttgaaatctggtggccacacctcatagacttaaagaagggtatagaaaaaaaataacaatgtaagtctatacgtgcca

SEQ ID NO: 307796 - DNA, 566 bp, Homo sapiens
acattgctggttctattgcacgcatgctgatgtgctaagcggctctcaacatttccactttatcatgttcttattttcagcaacttcctatgcccttcctgaacccaaaggagagctacatataccaccttaaattttcaaaagctccattaaaaagcaagcgaagcaggtacatttaagtttaataacacattttaattcaatatagcctaaacattatttcaatacctaatcaatatatttaaaaaatgaaatctttcacatttattcctttttaagtcttcaaagatgtgtttgtattgcaacacatcccaattcagattaaccacatttcaagtgcttaatagacrtagggggctagtggctatgtacccatcatcacagatctgcaacacatatttgtctatttagttgtctcagtaagatgatttgaaatctggtggccacacctcatagacttaaagaagggtatagaaaaaaaataacaatgtaagtctatacgtgccactatttcatttctctatacacaccatgttttgctccctttccttccattttagggtaga

SEQ ID NO: 307797 - DNA, 530 bp, Homo sapiens
agagttcataaaatctaccagttagttactggttagatagatatttttttwaaatttaaactgtgtatttcaatacaaactactgcagttatatattgtaaatgtgatattagtgcagattatgtgtcttataaataattcttgcataagaagataaatatataatattaagattatattccacattataatactgcaattctcaaagttagggttggggatagaagaaaataatctaggctagtgatggtggtagcactatatatgaaaatatttaatattaaatatataagagctgggcaaggtggctcatgcctgtaatctcagcagtttggggtttgggaggaaaaggtgggtggatcacttaaggccaggaattcaagaccagcctggcaaaatagcaataccctatctctacaataataaaaaattagacaggcatagtggcatgcacctgtatttctaggtactagggaggctgaggtgggaggatcacttgagccaaggaggttgagggtatagtgagctat

SEQ ID NO: 307798 - DNA, 530 bp, Homo sapiens
agagttcataaaatctaccagttagttactggttagatagatatttttttaaaatttaaactgtgtatttcaatacaaactactgcagttatatattgtaaatgtgatattagtgcagattatgtgtcttataaataattcttgcataagaagataaatatataatattaagattatattcyacattataatactgcaattctcaaagttagggttggggatagaagaaaataatctaggctagtgatggtggtagcactatatatgaaaatatttaatattaaatatataagagctgggcaaggtggctcatgcctgtaatctcagcagtttggggtttgggaggaaaaggtgggtggatcacttaaggccaggaattcaagaccagcctggcaaaatagcaataccctatctctacaataataaaaaattagacaggcatagtggcatgcacctgtatttctaggtactagggaggctgaggtgggaggatcacttgagccaaggaggttgagggtatagtgagctat

SEQ ID NO: 307799 - DNA, 530 bp, Homo sapiens
agagttcataaaatctaccagttagttactggttagatagatatttttttaaaatttaaactgtgtatttcaatacaaactactgcagttatatattgtaaatgtgatattagtgcagattatgtgtcttataaataattcttgcataagaagataaatatataatattaagattatattccacattatratactgcaattctcaaagttagggttggggatagaagaaaataatctaggctagtgatggtggtagcactatatatgaaaatatttaatattaaatatataagagctgggcaaggtggctcatgcctgtaatctcagcagtttggggtttgggaggaaaaggtgggtggatcacttaaggccaggaattcaagaccagcctggcaaaatagcaataccctatctctacaataataaaaaattagacaggcatagtggcatgcacctgtatttctaggtactagggaggctgaggtgggaggatcacttgagccaaggaggttgagggtatagtgagctat

SEQ ID NO: 307800 - DNA, 530 bp, Homo sapiens
agagttcataaaatctaccagttagttactggttagatagatatttttttaaaatttaaactgtgtatttcaatacaaactactgcagttatatattgtaaatgtgatattagtgcagattatgtgtcttataaataattcttgcataagaagataaatatataatattaagattatattccacattataatactgcaattctcaaagttagggttggggatagaagaaaataatctaggctagtgatggtggtrgcactatatatgaaaatatttaatattaaatatataagagctgggcaaggtggctcatgcctgtaatctcagcagtttggggtttgggaggaaaaggtgggtggatcacttaaggccaggaattcaagaccagcctggcaaaatagcaataccctatctctacaataataaaaaattagacaggcatagtggcatgcacctgtatttctaggtactagggaggctgaggtgggaggatcacttgagccaaggaggttgagggtatagtgagctat

SEQ ID NO: 307801 - DNA, 600 bp, Homo sapiens
gtgatggtggtagcactatatatgaaaatatttaatattaaatatataagagctgggcaaggtggctcatgcctgtaatctcagcagtttggggtttgggaggaaaaggtgggtggatcacttaaggccaggaattcaagaccagcctggcaaaatagcaataccctatctctacaataataaaaaattagacaggcatagtggcatgcacctgtatttctaggtactagggaggctgaggtgggaggatcacttgagccaaggaggttgagggtatagtgagctatgaccacatcattgcattgcagcttggttgacagaacaagaccctgtctcaaaacaaaactaaacaaaagaaacaaaacaaaacaaaaaatatatatgtatatacatgcacatatataaatatacaaggacaattaggatatatacataaaatatagacatatctgtcaataggtatctgtatacataattaagatggccttaatactacccttggctcaattaaactttagacatgtttcttccagattataggaccctgacttctcttttcttgcagcatttactttaraaaacttgccattgtaccttaaa

SEQ ID NO: 307802 - DNA, 583 bp, Homo sapiens
tggtgactattttaacaaaatgtccctattaactttctcagatcttggatatatttcaaataaataaacattctaaaaaaktatatatcaatctgaagtattttttaatttgaattaatattttactttaacaaagttataataaacaacaataaagttttaatgaatttttataacatattttttgtaaaccaaaaagtgactgaagcaggtctcaattgattaaagctggcccaacccgtagcccaggggtcacgtgtgtctcaagatggctatgaatgtggcccaacataaattcgtaatctttcttaaaatattatgagattttttttttgcgtttttttttttttttttctcatcagctagcgttagtggtagtgtatcttatgtgtggcccaagacaattcttcttcttccagtgtggccccgggaagccaacagattggacacccctgaatcagaggtctattttaccaaggttgactacacgcccaggaaaaataaacacaagtcacaataggatctgtgacctgtgctttttccaaagatggttttgggaacttcaatatttaaagggaaaagt

SEQ ID NO: 307803 - DNA, 693 bp, Homo sapiens
attttacatatggaggataagaaaatcaatgtcctcctctagagttaaaaaaggtcagagattgcagtaaagccatttaattattgttaaatttcattatttgtttactatctttgacaactagaaaaaaaaacttacctagttggtgagagaaccaagtacatagtgggtatttcagatatggagaaggtgcacatatagtttgctttcacaatatagagggtaagagagaggtttagtggtaaaagatgcaaagtttgagaatgcatggtttgcttgttatttaagtggaraaatgtgtgtgtgtgtgtgtgtgcgtgtgtctgtctgtctgtctgtctgtagatcagagaacagacactagaaaattaaagatggaaaatagaataattagttgaactgggaagttgagggggaaaattgttgattctattgatcaggtgaaggagttatcttttcaaagcaaaggaatgtgtctttggcacaataggcagtttctagtgtagagaagagtgaaaaaaaaaaaaacctgaggaaacccagtggaatcactacagtacttaggatgcagaattatctgccaattgtattaatgttaaagagcgatcgagggctacatgtagtggagaaatactggaaaggctgtttttgataatgtgataagggatcaattaattataaaactgataccaa

SEQ ID NO: 307804 - DNA, 569 bp, Homo sapiens
actatttctttggttagcttcttttcctgtcctatcttgcttccctcacttccttataggtttctattgcgtgcatttcttcaataaattacttgcttactctggttttaaaaaatctgtctcaatatatccattttaggcagtcttcataggtattaaataattaaatcctaacaataaccctaaaatataggtactataacttttcctactttatagatgagaaaagtgagacaagaaaagttaaataatttgcccaagaagtggaagagctagaaaacaataaaagctrtgtttattgagcatgtagtatactccaagctttttactgattatgttcttataatgatgatgtgagatcaattacactattaattcaatttaatccattcctgatgaagtacatattagtggttaaccactccagtaactctgattgcttttctatttcatagccgagtaatattggacatgcgttacttacttcagtaactcagtttttaaaatttgtatatgagaataacaataatatactgtaaatcatatacagtcattatgataattaaaca

SEQ ID NO: 307805 - DNA, 601 bp, Homo sapiens
agaagatgccatccaagactttcatgtagctagagaagagaggtaaatgccaggcttcaaagcttcaaaggacaagctgactttcatgttaggagctgatgtagctggtgaccttaagttgaagccaatgttcatttatcattctgaaaattccgcgacccttaagagttaaggtaaatctattctgtcttagctctatgaaaggaataacagaacgtggatgacaggacatctgtttatagcatgatgtattcaatatttgaagcccactgttgtgacttactgctcaaaaaacaacaacaaaaagattcctttaaaaaggttgacaakgcacctggtcacccaagagctctgatagaggtacaagggggttaaagatttttatgccttctaacacaacatctattcctcagtccttggagcaagaattaatttcaacttttaaatcttggtatttgaaaaatacattttgtaaggctaaagctgctatagatagtgattcctctgattaatctgggcaaaataggttgaaaaccttttggtaagtattcataattccagattccattaagaacattctgcgattcatgggggaatgtca

SEQ ID NO: 307806 - DNA, 584 bp, Homo sapiens
ttggtcatttatcattttcaatctgtacctacagctctcatttattctctatgttcagatcaggaaaagcagtctcatttaagataaaagcacctatttttcctcttcacttttattctaattcaaaaatgtccttgtctataaactcatatgaccgccaaaactcaatagtgaatgttatatagacaagtgaaaagacattttaattcacaaatattacctaattttagaacattatttccaaaactatttaaacatggtacatttctgaagtatgctaaaacccactgtaataaaaaaacctargtattttctttggtggattgcttgtgaggtaatcatagtttttattgatatatgtctgtttatctcaatgaaccaattttcttataatttcattggaagaatattttaccttataatttagcaattctagaagatatttccaagaggacaaacgcagaatacatatatggtataactagatcgacatatttttgctccttgtcttcatcaccactcctcaaaaagcctaagatttaatcatcactttgggattccagtttcactgctcagtgaacaca

SEQ ID NO: 307807 - DNA, 584 bp, Homo sapiens
ttggtcatttatcattttcaatctgtacctacagctctcatttattctctatgttcagatcaggaaaagcagtctcatttaagataaaagcacctatttttcctcttcacttttattctaattcaaaaatgtccttgtctataaactcatatgaccgccaaaactcaatagtgaatgttatatagacaagtgaaaagacattttaattcacaaatattacctaattttagaacattatttccaaaactatttaaacatggtacatttctgaagtatgctaaaacccactgtaataaaaaaacctaggtattttctttggtggattrcttgtgaggtaatcatagtttttattgatatatgtctgtttatctcaatgaaccaattttcttataatttcattggaagaatattttaccttataatttagcaattctagaagatatttccaagaggacaaacgcagaatacatatatggtataactagatcgacatatttttgctccttgtcttcatcaccactcctcaaaaagcctaagatttaatcatcactttgggattccagtttcactgctcagtgaacaca

SEQ ID NO: 307808 - DNA, 584 bp, Homo sapiens
ttggtcatttatcattttcaatctgtacctacagctctcatttattctctatgttcagatcaggaaaagcagtctcatttaagataaaagcacctatttttcctcttcacttttattctaattcaaaaatgtccttgtctataaactcatatgaccgccaaaactcaatagtgaatgttatatagacaagtgaaaagacattttaattcacaaatattacctaattttagaacattatttccaaaactatttaaacatggtacatttctgaagtatgctaaaacccactgtaataaaaaaacctaggtattttctttggtggattgcttgtgaggtaatcatagtttttattgatatatgtctgtttatctcaatgaaccaattttcttataatttcattggaagaatattttaccttataatttagcaattctagaagatatttccaagaggacaaacgcagaatacatatatggtataactagwtcgacatatttttgctccttgtcttcatcaccactcctcaaaaagcctaagatttaatcatcactttgggattccagtttcactgctcagtgaacaca

SEQ ID NO: 307809 - DNA, 526 bp, Homo sapiens
tgtttcccttaagggatacttttagttaatttaatatctatagaaacaatgctaatgactggtttgctgttaataaatatgtgggtaaatctctgttcggggctctcagctctgaaggctgtgagacccctgatttcccacttcacacctctatatttccgtgtgtctttaattcctctagtgccgctgggctagggtctccccgaccgagctggtctyggcaggaatcatcccagatgccctctctctaatccctaggtaattaatcaatcagcaattgttataatatattcttctaaatgtcatccaaatctttttattttctgctccacttttaccgttaagctgttgtggatttagatgatcaccaacccttgtttgaattactgcttcctaagtaatctctattcagtagtatctctctctctttatctctttctctctctcatccattccattattgtagccagagtgtacttttaagacagcaaaccctttaaggttccctttgttcttagtggacttt

SEQ ID NO: 307810 - DNA, 526 bp, Homo sapiens
tgtttcccttaagggatacttttagttaatttaatatctatagaaacaatgctaatgactggtttgctgttaataaatatgtgggtaaatctctgttcggggctctcagctctgaaggctgtgagacccctgatttcccacttcacacctctatatttccgtgtgtctttaattcctctagtgccgctgggctagggtctccccgaccgagctggtctcggcaggaatcatcccagatgccctctctctaatccctaggtaattaatcaatcagcaattgttataatatattcttctaaatgtcatccaaatctttttattttctgctccacttttaccgttaagctgttgtggatttagatgatcaccaacccttgtttgaattactgcttcytaagtaatctctattcagtagtatctctctctctttatctctttctctctctcatccattccattattgtagccagagtgtacttttaagacagcaaaccctttaaggttccctttgttcttagtggacttt

SEQ ID NO: 307811 - DNA, 637 bp, Homo sapiens
ttgaatttcaatcatttagggtagagagtactcaatgattacttggggtattcaacagaaacctcagaaaggccacacttaatatttggctcaactatacttacattaaaagacaccttaacagagcttaaaagtaagtctccaaggataaaattgaaccaaaataaattaactgcttgccaaaacaagcttcagttctctttaaaagaagataacaaaacccagacacaamaatataaaatttaaaatatccaagatccagaaagcaataaagtataatgcatatacagaagacaatcagtcaacagaaagaagacaatcagaaataacagccagaggtattaaacagcttttataacatgcaccattatttttttaaatgaatgtaatttgcagagaaatggaaatataaaatagagcctgaaagaacttctacagatgagaaatacaacatctaaaaggcaaaattagctaaacagaaatatattttatctattacttatataaaataacagatcagtaaacttgaacacagcagaagaaattaactgagggaagacacaaagaggaaagcactggggaaaatagcgtcttagtgactgtattagtccattttcatgctgctaataaaggcata

SEQ ID NO: 307812 - DNA, 637 bp, Homo sapiens
ttgaatttcaatcatttagggtagagagtactcaatgattacttggggtattcaacagaaacctcagaaaggccacacttaatatttggctcaactatacttacattaaaagacaccttaacagagcttaaaagtaagtctccaaggataaaattgaaccaaaataaattaactgcttgccaaaacaagcttcagttctctttaaaagaagataacaaaacccagacacaaaaatataaaatttaaaatatccaagatccagaaagcaataaartataatgcatatacagaagacaatcagtcaacagaaagaagacaatcagaaataacagccagaggtattaaacagcttttataacatgcaccattatttttttaaatgaatgtaatttgcagagaaatggaaatataaaatagagcctgaaagaacttctacagatgagaaatacaacatctaaaaggcaaaattagctaaacagaaatatattttatctattacttatataaaataacagatcagtaaacttgaacacagcagaagaaattaactgagggaagacacaaagaggaaagcactggggaaaatagcgtcttagtgactgtattagtccattttcatgctgctaataaaggcata

SEQ ID NO: 307813 - DNA, 622 bp, Homo sapiens
aaattttgtcaaatttttgccaaataaattatgagagcttaaagaatatttcttacttgataggtgttctgaattaatagggctaatgagtttagtgattcctaatgaataattaatataaatgaagctatttaaagataatttagtgggtttataatactgttcaacatacacctaatacactagattgtattttatagagactattcatctttaggactgagaggaaaaaataactgcagaataacataatcctcataaggactatagccattttttaaaatggtaacaatgatgtgtcagaattgagcaacagcctgttacaacacagaagagaagcaatgtctaaaggaatgaggtcctgggttgctcttgttagcacaagttcttttttataggtctacattgtattctctatgtccttggtcagatttctcactcataaaagctgcataatataracagtaagactttatgcaaactggacaaaacaccctacaaaattggaataataatactgaccacccaccaacttcacaggaataacctgaggaataatgagatcatgtttgccaggttttatgacatccctggatgaaagcagctataaaagtacaaagcc

SEQ ID NO: 307814 - DNA, 590 bp, Homo sapiens
cttaataaacacatttccattctgttcttttaaatatagcttttgtttctatcatttaggaattaagaattaaataatattcctatacgttatcattttattccatcttatttccattcatcagccatctcagtgactcatagacagatatgtgacttctgaagtgggaagcaattctttaattctgtagaataaacccattattctacactgaaacaatggagccataattgagctagcctgattattttaatctcttattcacaacttagggcaagtacctgaggaggcatgtttggaactgcagatttcataacactaaacrcacacactttttcaaatcaacactccaattttcatccttgagactgatgatgtacataaggttccttcattaattagatttgcacatttcacattcctacttttgtttttatattttatctctgctggcaaattgtcagctcttacatcatatattcctatattatcaaatacaatcttcagtattagtcatccaagatttcggaatacagagttgacattgggtttctggatatttatgtggcttacaataaagaaatttatct

SEQ ID NO: 307815 - DNA, 582 bp, Homo sapiens
tctcattgtaatcttaatttgcatttccttagtaatgagtgttgctgagcattttttctagtacttattagcattctttatattatcttttgagaaatgtctatttaagttattggcccatttttaattgatgtacttgtttccttgctattgagttttttgctcttatatatctttggtattatacccttatcagatatatggtttgcaagtattttttcctgttctatgggtttttctttactttgctaattatttcctttgttgtgcagaaatttaacaaagttaagattttatttttcaagaccagctctcgctctgttgcccaggctggagtgtagtggtgtgatcacaggtcactgcaacctcaaactcctgggttcaagtgatcctcccatttcagccacccaagaagctgggactgcaggtgtgtgccaccacacttggctattttttcaaactttytgtagaaacaagttctgcctatgttgcccaggcttgtctcaaactcctgagctcaagtgagcctcctgcctcggccacgcaaaatgctaggattacaggcatgagccacaacacttg

SEQ ID NO: 307816 - DNA, 504 bp, Homo sapiens
gacttgggtggattattattatgttttgcatatgtgaagtactttagatgacaactggcccatagttaataaataatgataataataatattctctttcagtagatttttacaaagcatgtaggaatagcgtggttactatggaagtagaaaatccctagtcacttttattattttttcaattgcaatatttttttgtctgcctggtcattgtyatagcacctgtatttctggttgtcccacaaaagttggcaaactttatttagatttttttaaaactttaactaagtttcttgcttcatggatagaaaatctgtggctgttttaaaaatacatatttaattgtgtgtgtgtgtgtgtatttatgttgagaatatctacagctttaattaattttttgtgaatcagaaacttttaggacattgctatagaaaccttgtctcattgcactaaatgagtctcattcctgattcctgccctcccctacatatccctgagttggctg

SEQ ID NO: 307817 - DNA, 614 bp, Homo sapiens
gacagtagaagccattctgatgtggtctcagaagaaactaaggaacaagatattagaaattggggtaaaacctctatttgttataaastagcaaaaaccttggctgaattgtgtttatggccaaagactttatagaaggcaaaatttaaaagtgataaggtaggatatctgacagaagaaattgctaagggaaatattgaagaagcaacacaactactttttattgcaaatcataagatatgaaaagagaaaactgttttaaagacagaagtcacaattaaaagaaaaacaacataaaaatttgagaaatgtccaacctgaccatgcagagtaaaaaaggcatatttaagagtgcaaagcaagaattcagtcaagcaaacatctgctaaagagattagtaaaaatagaaggagccagatgccatttatcaagacaatgagggactgacccttaaggcatttcagagatatttgagtcaagctagatcctggaaggcaaggtttccagagaggtgacttgccctgtgctgcctcaagtgttagctccctgcattccagcacagcactccttggccatcccagccttggctcaagtgggcccacgtgcagatggtc

SEQ ID NO: 307818 - DNA, 590 bp, Homo sapiens
cactgccagcatggtggcacctgcctcaacctgcctggttcctaccagtgccagtgccctcagggcttcacaggccagtactgtgacagcctgtatgtgccctgtgcaccctcaccttgtgtcaatggaggcacctgtcggcagactggtgacttcacttttgagtgcaactgccttccaggtaaggagctccctagtgtcccaggattaggggacaaacccctagcacaggaggtagtgggtgtggctcaattgctgtttttaggaagcccaaggaaaaagggaagtgagaattttgtgtggggtgggttgctagtgagggaggagttttatgggcccactgtggtccataaactgagcaggggataatttagcatgtcagggtttatgatgatgagtggctagaaaattgtttattgtcccttttgtagaaacagtgagaaataagaggaacagagctctgggaaagggacaggcaagtctggaatggaaaagaacaygatgagaattagacactggaaaatatgtatgtgtggttaataaagtgctttaaactgaattgacattaacagtaggtgatcaactttcct

SEQ ID NO: 307819 - DNA, 523 bp, Homo sapiens
atttaaatggttaatttacaattttttccctgcaaaggatactgtagtcactgtgagtattttagtattattgtaggactcaagagggaattaaaactacaaaaatgactcgtcttgtatgacacagaaagaaatgtttcttcacagagggaggagaaaaatatcttcaagagagaactaatwgaatcaaatcaatgaaccatgtctcatctttttggataagtaactgttagtaatccagacacttcatgagctttcattatgtaaagtctttagcagaagctaaaggaggggcaccaaccacagtaattttaacttaagaacaaaatggagcatgaaaataaattattaaatcatttactcccactatttttgggttagggccaataatggggagagaaagaggtagactagttttgtgtttgtggctattttaatagagtagcacaagtaatcaaaaaacagtaggctgttttgaatttactggctgtcccttatgagttcacagttagattggactgtc

SEQ ID NO: 307820 - DNA, 631 bp, Homo sapiens
ttcaatatattggaagaaatgtcagcaatttggaggttggtaacgtaatttaacagaaaaacagcttcaattttctaactctaccacaaaccccaaatcagcctgaccatttctagggcacacatctgctttgcttggtaacaatagcagcagcaacaataagtaatgacaaatgatcacatataaggaaccatgttaatgtatcactagatattaaacagggcattactttactggtatatgtgtccaatttgaataaacaaattagtatatgtgtcaaatttggatccagcagggcacttcaaaacttaagtaatcatgactcaactctaaatactcaattttaaagtagtttctaaacttcagcatattgacattccgggccagataattcttttttgaggaactcttctgtgtaggatgtttagcagtatccctggcctaacccrttagatgccagtagcaccccacatttgtgacaaccaaaaatgtctctagacattgccaaaagtcccttgggtgacttcgtgctctaaagctatgaatctagtgggaagaaattagaaaccagaatactacatagaaaatatttttgagtagacaggactattgattcatctaattagttcag

SEQ ID NO: 307821 - DNA, 565 bp, Homo sapiens
ttcatttgtcactaactgtgctagacagtatgctgaatctggccctaggaatcttaaagagctatgtgtaagagaaaaaatattttttctaccccttcaattktcaacacatagattatttactctgtgaattgatggaacacaatctttaatccatggggttttttttgtgtttttttttttcgagatggagttttgctctgttgcccaggctggagtgcagtggtgcaatctcagctcactgcaacctccgcctcctgggttcaagtgattctcatgcctcagtttcccaagtagctggaattacaggtggatgccccaataatttttgtgttttcaggagagacggggtttcgccatgttggccaggctcatctggaactcctaacctcaagatatccacctgcctcggcctcccaaagtgctgggattacaggcatgagccaccacgcccggccaattctatgttttttatacacattcttctcataaagtgtgcgcatctatacactgtaagtgtgtgtatgttgtggtatttatataatcaaatacaatttaccaccat

SEQ ID NO: 307822 - DNA, 614 bp, Homo sapiens
ttcccaaacccaagacatccagctagctcccctgtgccatctcatctctgcacatccacmcttaccacacagggaggccagtgctgagcagcatccgcatgcctgcttagcagcaacactgaagcctgatgatgaatagaggtacagaggtctgtccaggtttacttctttggagctgctctccctattctaggaagacccactgacctattatttgtgtcaggcactttattcctcacaacaatgctggaagattggtataactattctcaaattacagatgaggaaactgaggtctggggatctgtctgtgtcggagatccccaacccccggggcatggacaggtactagtccatggcctgttaagaaccaggccatataccccctgaactccacctcctggtcagatctgtggaagcattagattctcataggagcacaaaccctattgtgaagtgtgcatggaagggatctaggatgcatgctccttatgagaatctaatgcctgatgatctgcagtggaacagtttcatcctgaaaccatccccactgctgccccacctgtggaaaaaatagtcttccacaaaacaggtccctggtaccaaaaaggttg

SEQ ID NO: 307823 - DNA, 595 bp, Homo sapiens
gatgtcacaaaccatgaaaggcttggtggtaaggtgatatttttggtccagtgagcttcatggtgtcacttgaagtataaattgcctcaggaagaaaacatgggctgcttcaaagcatgaaagtaacctccaaaatcayctagctcaacctcatttgtaggtgaagaactatttttcctgggagtgggggtgattatggaccttgcccaagatcacccaaccaggacagtgacagagttgggatttctttctttctccaagaccctggctcattgcattgtgttgcattgctttctgcaagtttcagaggagagagagggcagtggttagtttgaaaacacacatatgctcagattacatttgatttctcagactgtagtgctggggctccctgcctgactgtgtccatgagttcttccatgaagttttacatttagcttttcttttgcccactatatgccttattgactaccattaaccatctccttggggactatgaatcttacttttcagtctttttatggcaatttgcactctttactaacacagctttattatttgttcaggtcttgggagaatattgaataagacatta

SEQ ID NO: 307824 - DNA, 595 bp, Homo sapiens
gatgtcacaaaccatgaaaggcttggtggtaaggtgatatttttggtccagtgagcttcatggtgtcacttgaagtataaattgcctcaggaagaaaacatgggctgcttcaaagcatgaaagtaacctccaaaatcatctagctcaacctcatttgtaggtgaagaactatttttcctgggagtgggggtgattatggaccttgcccaagatcacccaaccaggacagtgacagagttgggatttctttctttctccaagaccctggctcattgcattgtgttgcattgctttctgcaagtttcagaggagagagagggcagtggttagtttgaaaacacacatatgctcagattacatttgatttctcagrctgtagtgctggggctccctgcctgactgtgtccatgagttcttccatgaagttttacatttagcttttcttttgcccactatatgccttattgactaccattaaccatctccttggggactatgaatcttacttttcagtctttttatggcaatttgcactctttactaacacagctttattatttgttcaggtcttgggagaatattgaataagacatta

SEQ ID NO: 307825 - DNA, 595 bp, Homo sapiens
gatgtcacaaaccatgaaaggcttggtggtaaggtgatatttttggtccagtgagcttcatggtgtcacttgaagtataaattgcctcaggaagaaaacatgggctgcttcaaagcatgaaagtaacctccaaaatcatctagctcaacctcatttgtaggtgaagaactatttttcctgggagtgggggtgattatggaccttgcccaagatcacccaaccaggacagtgacagagttgggatttctttctttctccaagaccctggctcattgcattgtgttgcattgctttctgcaagtttcagaggagagagagggcagtggttagtttgaaaacacacatatgctcagattacatttgatttctcagactgtagtgctggggctccctgcctgactgtgtccatgagttcttccatgaagttttacatttagcttttcttttgcccrctatatgccttattgactaccattaaccatctccttggggactatgaatcttacttttcagtctttttatggcaatttgcactctttactaacacagctttattatttgttcaggtcttgggagaatattgaataagacatta

SEQ ID NO: 307826 - DNA, 559 bp, Homo sapiens
gcatacttgcttttcttttcctgttttcttaagtttgaataatwgtcatgtagctgtttaagaatcagacagaaggaaaactcatccgcttagtacttttcttaaattgtccagtttcttttggcctctgaataccagagtcttttatgtgtaagattagaaacatctggccagcatatctgagtaaggctgagctaaagcgggatgaaactaggtagaatggcctgcctttctgaattatagaattttaagcattgatgggactcaaacttaataaattctacctcttcattttgcagatgaaaagacagtcccaagaggttaggatttgcttaatgtcacacagcctgcatcagaggtgaacccagaacccaggtctccatactcctagtctggcactgtttttatatatatatccatgcttagagaggacttgtgtattaaaatttttttataaaagtgcatcatccctgtctttgaaacacccaattattttgcaattcttacccactgtgtatatattctttaggagaagagagagagttaatgttcatagaac

SEQ ID NO: 307827 - DNA, 559 bp, Homo sapiens
gcatacttgcttttcttttcctgttttcttaagtttgaataatagtcatgtagctgtttaagaatcagacagaaggaaaactcatcygcttagtacttttcttaaattgtccagtttcttttggcctctgaataccagagtcttttatgtgtaagattagaaacatctggccagcatatctgagtaaggctgagctaaagcgggatgaaactaggtagaatggcctgcctttctgaattatagaattttaagcattgatgggactcaaacttaataaattctacctcttcattttgcagatgaaaagacagtcccaagaggttaggatttgcttaatgtcacacagcctgcatcagaggtgaacccagaacccaggtctccatactcctagtctggcactgtttttatatatatatccatgcttagagaggacttgtgtattaaaatttttttataaaagtgcatcatccctgtctttgaaacacccaattattttgcaattcttacccactgtgtatatattctttaggagaagagagagagttaatgttcatagaac

SEQ ID NO: 307828 - DNA, 524 bp, Homo sapiens
gtgccaggaatagtcaagacactgaggatatagtagtgagcaaaatacataaatccttgctctcatagagcatgggttacagggggaggaatagacaacagcccagaaaaataagtcaggtaaaatgataagcgttggaagaataaagcaaggaagaacaggatatgctagaggctgagggatgggaggaagatagcaagtttaaatacgattgtcaggaaaagaaagtatcattggttacatttgaacaaagatctgaaggcagtgaaggaacaaactaatgsatatctgggagaagagactctgaggcagagggaagagtcaaaagtcactggggcaggaggaggcctgttatattcaagaaacagttaggaggcctatatgttcagaatggagttacaggaagaaaaatatcagatgaagtcacagatggaggccagatgaggtagggcccaggactaatcaaagacattggcttttatactaaatgagaaggagccatggaaacttttgagtagtggatg

SEQ ID NO: 307829 - DNA, 604 bp, Homo sapiens
cataattttttgcctaggccaaagtccagaagaatttttcctatgttttcttctagaattgttatggtttcargtcttatatttaagtctttattccatcttagggtgatttttgtatgtggtgagagagatggatccagtttcattcttctatccagtggctctccagttttcacagaaccatttactaaatagggtgtccttttcccaatttatgtttttgtatgctttgttgaagatcagttggttctaagtatctagctttacttccaggttctctagtctgttccactggtctatgcatctacttttatatcagtaccatgctgtttcgattactataaccttgtagtataatttgaagttgggtaatgtgatgcctccagatttgttctttttgcttaggattgctttggctatttaggcccttttatgattccatatgaattttacatttaagtttttaaaggactgctaagagtgctgtgttgagagtagactgggggtggggaacaagggtgaaagcagaaatgccagttgggaggccattgcaataattcagatgaggaataatagtgacttgatccagagtaatacagaatgc

SEQ ID NO: 307830 - DNA, 604 bp, Homo sapiens
cataattttttgcctaggccaaagtccagaagaatttttcctatgttttcttctagaattgttatggtttcaagtcttatatttaagtctttattccatcttagggtgatttttgtatgtggtgagagagatggatccagtttcattcttctatccagtggctctccagttttcacagaaccatttactaaatagggtgtccttttcccaatttatgtttttgtatgctttgttgaagatcagttggttctaagtatctrgctttacttccaggttctctagtctgttccactggtctatgcatctacttttatatcagtaccatgctgtttcgattactataaccttgtagtataatttgaagttgggtaatgtgatgcctccagatttgttctttttgcttaggattgctttggctatttaggcccttttatgattccatatgaattttacatttaagtttttaaaggactgctaagagtgctgtgttgagagtagactgggggtggggaacaagggtgaaagcagaaatgccagttgggaggccattgcaataattcagatgaggaataatagtgacttgatccagagtaatacagaatgc

SEQ ID NO: 307831 - DNA, 627 bp, Homo sapiens
tttttgtatgtggtgagagagatggatccagtttcattcttctatccagtggctctccagttttcacagaaccatttactaaatagggtgtccttttcccaatttatgtttttgtatgctttgttgaagatcagttggttctaagtatctagctttacttccaggttctctagtctgttccactggtctatgcatctacttttatatcagtaccatgctgtttcgattactataaccttgtagtataatttgaagttgggtaatgtgatgcctccagatttgttctttttgcttaggattgctttggctatttaggcccttttatgattccatatgaattttacatttaagtttttaaaggactgctaagrgtgctgtgttgagagtagactgggggtggggaacaagggtgaaagcagaaatgccagttgggaggccattgcaataattcagatgaggaataatagtgacttgatccagagtaatacagaatgcagtgaaaagtgatgcaattcagagtatattttgacagtgaagctagtattataatctgccatctttacatgccatgatgtcataaaacatgcttctattttggtgatttaggttgttcctgtttgcactatt

SEQ ID NO: 307832 - DNA, 627 bp, Homo sapiens
tttttgtatgtggtgagagagatggatccagtttcattcttctatccagtggctctccagttttcacagaaccatttactaaatagggtgtccttttcccaatttatgtttttgtatgctttgttgaagatcagttggttctaagtatctagctttacttccaggttctctagtctgttccactggtctatgcatctacttttatatcagtaccatgctgtttcgattactataaccttgtagtataatttgaagttgggtaatgtgatgcctccagatttgttctttttgcttaggattgctttggctatttaggcccttttatgattccatatgaattttacatttaagtttttaaaggactgctaagagtgctgtgttgagagtagactgggggtggggaacaagggtgaaagcagaaatgccagttgggaggccattgcaataattcagatgaggaataatagtgacttgatccagagtratacagaatgcagtgaaaagtgatgcaattcagagtatattttgacagtgaagctagtattataatctgccatctttacatgccatgatgtcataaaacatgcttctattttggtgatttaggttgttcctgtttgcactatt

SEQ ID NO: 307833 - DNA, 605 bp, Homo sapiens
agaccaaggattattaccctcagactgtctcattgatcatactcctctctatcctaaagctacacttaaagctttcactcaaagaaaaaggaaaagcaaaaacaccatcatatatgctctttattaaatgcttcagaaacaacrgctctgcttcatcactacaaagcctcctggtccacttctgaaattcttagtgacctagacgtgtacgaaatttgaactttccaagaagtatctagttggtgctgaacaacccagtactattttcgggtgataaataaccttgttctctttttaaacatctgcgattgacatgtcgactgactgttaacaatgaacaaagaccatatttttctgaagctcatcatcttcctaaccttttctttgaaaacagatgtagttcatgtactagttttttggtgaaggtaaaaatctttattcagattaggctcagaaaaagaaggggctgctttccgttcaacaaatatgcacaagacagcatcccactgggagcatcaatctcagaagcagtaaaacacagcctcggccctgaaaggactttctgaacacctttggagtgtcatccgtttaatatacattatttt

SEQ ID NO: 307834 - DNA, 578 bp, Homo sapiens
ccatcatatatgctctttattaaatgcttcagaaacaacggctctgcttcatcactacaaagcctcctggtccacttctgaaattcttagtgacctagacgtgtacgaaatttgaactttccaagaagtatctagttggtgctgaacaacccagtactattttcgggtgataaataaccttgttctctttttaaacatctgcgattgacatgtcgactgactgttaacaatgaacaaagaccatatttttctgaagctcatcatcttcctaaccttttctttgaaaacagatgtagttcatgtactagttttttggtgaaggtaaaaatctttattcagattaggctcagaaaaagaaggggctgctttccgttcaacaaatatgcacaagacascatcccactgggagcatcaatctcagaagcagtaaaacacagcctcggccctgaaaggactttctgaacacctttggagtgtcatccgtttaatatacattattttaattaatcctattagctggataatttctttcccattttattggtgagttcatatagcagagctggatttgaatccag

SEQ ID NO: 307835 - DNA, 578 bp, Homo sapiens
ccatcatatatgctctttattaaatgcttcagaaacaacggctctgcttcatcactacaaagcctcctggtccacttctgaaattcttagtgacctagacgtgtacgaaatttgaactttccaagaagtatctagttggtgctgaacaacccagtactattttcgggtgataaataaccttgttctctttttaaacatctgcgattgacatgtcgactgactgttaacaatgaacaaagaccatatttttctgaagctcatcatcttcctaaccttttctttgaaaacagatgtagttcatgtactagttttttggtgaaggtaaaaatctttattcagattaggctcagaaaaagaaggggctgctttccgttcaacaaatatgcacaagacagcatcccactgggagcatcaatctcagaagcagtaaaacacagcctcggccctgaaaggactttctgaacacctttggagtgtcatccgtttaatatacattattttaattaatcctattagctggataatttcwttcccattttattggtgagttcatatagcagagctggatttgaatccag

SEQ ID NO: 307836 - DNA, 540 bp, Homo sapiens
acagaaaaaaaaaatggaggtgtgactaattggatgtgggagtttacaatcctgttgggatgrgaaatcctacccatagaacctctccctgactcctataggataaaattcaaacttctaaacatggtacatacaaggccttttcgtcattgggccccatctcctgtcctccctgcccctgttgtgaacttcacacaataacagtattgactaacttgagattcccccaaacatatcttgctgtttctgtccctgtatcttttgttcctttggcttggaatgactcctgtagtccccttccctcctcctcttaatgaacttctaatcataattcatccttcagtccaaagaaggctttgccgacaccgcaataaattcctccccctaacagacagtccctccactgtcttccactgccgcttctttatcttaacaccgatacttatttttcacacaggactctttgtatttctgtgttctcaactaagttttgaggtcctcatgggcaaagaccacagcctattaatccccagtgtctat

SEQ ID NO: 307837 - DNA, 540 bp, Homo sapiens
acagaaaaaaaaaatggaggtgtgactaattggatgtgggagtttacaatcctgttgggatgggaaatcctacccatagaacctctccctgactcctataggataaaattcaaacttctaaacatggtacatacaaggccttttcgtcattgggccccatctcctgtcctccctgcccctgttgtgaacttcacacaataacagtattgactaacttgagattcccccaaacatatcttgctgtttctgtccctgtatcttttgttcctttggcttggaatgactcctgtagtccccttccctcctcctcttaatgaacttctaatcataattcatccttcagtccaaagaaggctttgccgacaccrcaataaattcctccccctaacagacagtccctccactgtcttccactgccgcttctttatcttaacaccgatacttatttttcacacaggactctttgtatttctgtgttctcaactaagttttgaggtcctcatgggcaaagaccacagcctattaatccccagtgtctat

SEQ ID NO: 307838 - DNA, 540 bp, Homo sapiens
acagaaaaaaaaaatggaggtgtgactaattggatgtgggagtttacaatcctgttgggatgggaaatcctacccatagaacctctccctgactcctataggataaaattcaaacttctaaacatggtacatacaaggccttttcgtcattgggccccatctcctgtcctccctgcccctgttgtgaacttcacacaataacagtattgactaacttgagattcccccaaacatatcttgctgtttctgtccctgtatcttttgttcctttggcttggaatgactcctgtagtccccttccctcctcctcttaatgaacttctaatcataattcatccttcagtccaaagaaggctttgccgacaccgcaataaattcctcccyctaacagacagtccctccactgtcttccactgccgcttctttatcttaacaccgatacttatttttcacacaggactctttgtatttctgtgttctcaactaagttttgaggtcctcatgggcaaagaccacagcctattaatccccagtgtctat

SEQ ID NO: 307839 - DNA, 633 bp, Homo sapiens
actctttgtatttctgtgttctcaactaagttttgaggtcctcatgggcaaagaccacagcctattaatccccagtgtctatcacataatagatgttgaactagaatgtraaacaacactaagcaagtacaagtcagtatgggcatagacctatgaagttccaaaactgcatgttaacaagcactttaggtaagcaagtaccattagtgaaagtagtcacattgaaatactggaaacccttttcaaaaataacgtagtcaaaatatttttggaatttgtcttgtgcaagtatgttcagagaaagataacattatttttcagttgtttacccacagtgttaccagttcgatcttcctctttactcactaaagataattcatagtgacttggctgcatacaaattttaaaaatcacctgcaaagataagttttgtcactattaaaatatattcagaagaatataagatagttatccccaaagagcaactctagaagcgactgtagctatgacaacattattaaaataaatgtgcaggccaggcgtggcggcttatgtcataatcccagcactttgggaagctgaggtgggcagatcacctgaggtcaggagtttgagaccagcctggccaacatg

SEQ ID NO: 307840 - DNA, 633 bp, Homo sapiens
actctttgtatttctgtgttctcaactaagttttgaggtcctcatgggcaaagaccacagcctattaatccccagtgtctatcacataatagatgttgaactagaatgtgaaacaacactaagcaagtacaagtcagtatgggcatagacctatgaarttccaaaactgcatgttaacaagcactttaggtaagcaagtaccattagtgaaagtagtcacattgaaatactggaaacccttttcaaaaataacgtagtcaaaatatttttggaatttgtcttgtgcaagtatgttcagagaaagataacattatttttcagttgtttacccacagtgttaccagttcgatcttcctctttactcactaaagataattcatagtgacttggctgcatacaaattttaaaaatcacctgcaaagataagttttgtcactattaaaatatattcagaagaatataagatagttatccccaaagagcaactctagaagcgactgtagctatgacaacattattaaaataaatgtgcaggccaggcgtggcggcttatgtcataatcccagcactttgggaagctgaggtgggcagatcacctgaggtcaggagtttgagaccagcctggccaacatg

SEQ ID NO: 307841 - DNA, 633 bp, Homo sapiens
actctttgtatttctgtgttctcaactaagttttgaggtcctcatgggcaaagaccacagcctattaatccccagtgtctatcacataatagatgttgaactagaatgtgaaacaacactaagcaagtacaagtcagtatgggcatagacctatgaagttccaaaactgcatgttaacaagcactttaggtaagcaagtaycattagtgaaagtagtcacattgaaatactggaaacccttttcaaaaataacgtagtcaaaatatttttggaatttgtcttgtgcaagtatgttcagagaaagataacattatttttcagttgtttacccacagtgttaccagttcgatcttcctctttactcactaaagataattcatagtgacttggctgcatacaaattttaaaaatcacctgcaaagataagttttgtcactattaaaatatattcagaagaatataagatagttatccccaaagagcaactctagaagcgactgtagctatgacaacattattaaaataaatgtgcaggccaggcgtggcggcttatgtcataatcccagcactttgggaagctgaggtgggcagatcacctgaggtcaggagtttgagaccagcctggccaacatg

SEQ ID NO: 307842 - DNA, 633 bp, Homo sapiens
actctttgtatttctgtgttctcaactaagttttgaggtcctcatgggcaaagaccacagcctattaatccccagtgtctatcacataatagatgttgaactagaatgtgaaacaacactaagcaagtacaagtcagtatgggcatagacctatgaagttccaaaactgcatgttaacaagcactttaggtaagcaagtaccattagtgaaagtagtcacattgaaatactggaaacccttttcaaaaataacgtagtcaaaatatttttggaatttgtcttgtgcaagtatgttcagagaaagataacattatttttcagttgtttacccacagtgttaccagttcgatcttcctctttactcactaaagataattcatagtgacttggctgcatacaaattttaaaaatcacctgcaaagataagttttgtcactattaaaatatattcagaagaatataagatagttatycccaaagagcaactctagaagcgactgtagctatgacaacattattaaaataaatgtgcaggccaggcgtggcggcttatgtcataatcccagcactttgggaagctgaggtgggcagatcacctgaggtcaggagtttgagaccagcctggccaacatg

SEQ ID NO: 307843 - DNA, 422 bp, Homo sapiens
aaattacttacctttctaaggcctacagtttgtaatctgtttttaaaaagtgattagatgacatatagtcccatagccaagaaaatagtagcttaccaacatgttttactgtgacctacagtgagaaatatatcttgtaccagacctcaatattcacatatatacgtgcatagcaaaaacaaaaatttcaagaaacaatgcttgtccatactatgtgatactctctattctacccttttttcccccaaagtgctgttggagacctaccaaattggtttcatgacccattcgtggtcatgatctgcagtktaaaaaacaatggactaaagcatgcagtaaagaatgtggcttggcaattagacaggcccaataccactttttttttttttttttttggagacaggatcttgctctgtcaccca

SEQ ID NO: 307844 - DNA, 422 bp, Homo sapiens
aaattacttacctttctaaggcctacagtttgtaatctgtttttaaaaagtgattagatgacatatagtcccatagccaagaaaatagtagcttaccaacatgttttactgtgacctacagtgagaaatatatcttgtaccagacctcaatattcacatatatacgtgcatagcaaaaacaaaaatttcaagaaacaatgcttgtccatactatgtgatactctctattctacccttttttcccccaaagtgctgttggagacctaccaaattggtttcatgacccattcgtggtcatgatctgcagtgtaaaaaacaatggactaaagcatgcagtaaagaatgtggcttkgcaattagacaggcccaataccactttttttttttttttttttggagacaggatcttgctctgtcaccca

SEQ ID NO: 307845 - DNA, 567 bp, Homo sapiens
tgtgtctgacataaaatacacactcaataaaaagttatagtgatgactaataacatcaatattattattattaaattcaagaattccaaaagaaartaaattaagtggaagaaagctagaaagagaaataggctcacctataagcatcaataaacagtaggactgttgtcaggttaacccaggactatgctcactgaaattctacaaacaaaggggttttgcttactttcttcacaatatcccctcgcaacttaagcagtgcccagcacacaataggtacatatatttgttgaatgaatgaaaacatctggaggctcacctctatgcagtggaggtgctgtgaagagatcccagcaacgcctgcacagcacccctgcccaaaaatccaaacaccttgagattgttgtaagccagtgactctcaaagtgtactttcccaaacagcagcagtattacctggacgctttttagaaatgcaatctaccaggtcccgctccagacctaccagatcagaaactctgggggtgagcccagcaatctgtattctaacaagtcctccaaaacttga

SEQ ID NO: 307846 - DNA, 504 bp, Homo sapiens
taaggtttgtaatgtgttgataaatcaaacaacacatatttgtatcactagattgagcccagtaatttctatagaaccttaatttcccaaaaggtaccttaatcagactctagtcaaacacaacaagatttagaaaaaacacactgttttttatcaaaaggcaggaaaatataactgtcttctttctastctggtaaaggatttctaaatataccttccaagggcaaaagggtgcctttgaaaaataagaagattccttatttctgtcaatagaataatgatccagttatataccaaagagcagatagaagacctggctttggagtcatgtgactctgcattagatctcatggggtctctgtctcagtctctacaaataaaaacatggccttgtctctataaaagatacaatgtacatagaagtgttttgcaaactattatatattatcttctcaacatgcaaatttatccctgtgaactgattctttccctcccactcacagt

SEQ ID NO: 307847 - DNA, 489 bp, Homo sapiens
taccttaatcagactctagtcaaacacaacaagatttagaaaaaacacactgttttttatcaaaaggcaggaaaatataactgtcttctttctactctggtaaaggatttctaaatataccttccaagggcaaaagggtgcctttgaaaaataagaagattccttawttctgtcaatagaataatgatccagttatataccaaagagcagatagaagacctggctttggagtcatgtgactctgcattagatctcatggggtctctgtctcagtctctacaaataaaaacatggccttgtctctataaaagatacaatgtacatagaagtgttttgcaaactattatatattatcttctcaacatgcaaatttatccctgtgaactgattctttccctcccactcacagtggccaaaataatttatattagaatgtgtccataggtggcttaatagcagttgtgacaaaagtgtaaactagaaaagata

SEQ ID NO: 307848 - DNA, 489 bp, Homo sapiens
taccttaatcagactctagtcaaacacaacaagatttagaaaaaacacactgttttttatcaaaaggcaggaaaatataactgtcttctttctactctggtaaaggatttctaaatataccttccaagggcaaaagggtgcctttgaaaaataagaagattccttatttctgtcaatagaataatgatccagttatataccaaagagcagatagaagacctggctwtggagtcatgtgactctgcattagatctcatggggtctctgtctcagtctctacaaataaaaacatggccttgtctctataaaagatacaatgtacatagaagtgttttgcaaactattatatattatcttctcaacatgcaaatttatccctgtgaactgattctttccctcccactcacagtggccaaaataatttatattagaatgtgtccataggtggcttaatagcagttgtgacaaaagtgtaaactagaaaagata

SEQ ID NO: 307849 - DNA, 489 bp, Homo sapiens
taccttaatcagactctagtcaaacacaacaagatttagaaaaaacacactgttttttatcaaaaggcaggaaaatataactgtcttctttctactctggtaaaggatttctaaatataccttccaagggcaaaagggtgcctttgaaaaataagaagattccttatttctgtcaatagaataatgatccagttatataccaaagagcagatagaagacctggctttggagtcatgtgactctgcattagatctcatggggtctctgtctcagtctcyacaaataaaaacatggccttgtctctataaaagatacaatgtacatagaagtgttttgcaaactattatatattatcttctcaacatgcaaatttatccctgtgaactgattctttccctcccactcacagtggccaaaataatttatattagaatgtgtccataggtggcttaatagcagttgtgacaaaagtgtaaactagaaaagata

SEQ ID NO: 307850 - DNA, 489 bp, Homo sapiens
taccttaatcagactctagtcaaacacaacaagatttagaaaaaacacactgttttttatcaaaaggcaggaaaatataactgtcttctttctactctggtaaaggatttctaaatataccttccaagggcaaaagggtgcctttgaaaaataagaagattccttatttctgtcaatagaataatgatccagttatataccaaagagcagatagaagacctggctttggagtcatgtgactctgcattagatctcatggggtctctgtctcagtctctacaaataaaaacatggccttgtctctataaaagatacaatgtacatagaagtgttttgcaaactattatatattatmttctcaacatgcaaatttatccctgtgaactgattctttccctcccactcacagtggccaaaataatttatattagaatgtgtccataggtggcttaatagcagttgtgacaaaagtgtaaactagaaaagata

SEQ ID NO: 307851 - DNA, 591 bp, Homo sapiens
gtggccttcagagaagaagctctccactgaccacggggcatggtcaaatgtccagttggattgctgtgagagtcaaaatgatccacttggcattttgttgatattgaggtgtcaaacctttaactagttggccactccttccagtaagcttctgtacactggacaactgaaagaaagtttgttaagaaggctcccttaaacaaaaggtacaacttataaaatacactgttgtggaaagacaagtayagcttcattatcatatagatgtaaacaaggcagagactaggctaaaataaagtgtaaaatgtgagtttgttaatttttctttccccgtgaacatttggcagagttaaaattttagccatcatacattttattccctgaaatgtatcaagtcacagttcccacagactctagatacacatttccttgtgggtgtatgtgtaaaactaccataacaaaacattttctatttcctcattttgattaaaaggaaagaagaaatgctaaactgcacttacataagtgacagtgcaatagtgacacacccatctgtgtacacaatttgtattctgtttaaatttaaagtta

SEQ ID NO: 307852 - DNA, 540 bp, Homo sapiens
cccactagcaggacatatgaaagttgtgatgagttaagctgagtcagacacatattcctgcctatttcacatggatcaacatcctgtctaggaaccagggacaactgattaacaatgtaagcacagaatagctttaagaaaagctaactgacccatctggggaaagaatactcraattctgctccatttctgtcatgctctgatgcagctaaccaaacagaaataaagagaatcctttcacatcatgagaaatgaaattcggatttagggacattataaaattatgcggtatcatgaaataagaactgctctggaaatcagaacctgggttctagctctggcttttccatatactaaccatatggtctaaaggaattcccttaagctatttgagactgattattttcatctgtaaaactaaaataatgtaaccagccctccattcttaccagagttcatttgtggcccaaataaatcatgtctattaaggtgattacaacctagaaagcattatttaatgtaaaatattattttataata

SEQ ID NO: 307853 - DNA, 600 bp, Homo sapiens
ataaatgattacatgattcaaattagatcacaaacacctatattattattagatccattcctccagcccaaatgggggtggtaagtatacgttgttagaccagtgtaactaacttcaacaactttttgttttgttctgttttgcaaatccacccaagaatgcattaacttcaacaattttttaaaaacaatttccacaatcctctccttgtgtctcaaccatgctcaggaattacaagtacaataatctcctcaacctcccctagcctttcctagctcagaaatccgacataggccacttcgcatgcctgatcagataagctttcccaatgctgaaaaccaactgcttctaacattttaaacctgatttccatgaaaactcaggggtgaaagaaacaaataatccaaccaaatcagttccttcttattgraagagttcttcatctttaatctgaaatcctaaataattttttctatgaatcaattgcttctgagatgagaggtacaagacactacaaactatgaccacgcaaaagatttttaaaagcttttgattcacagtgagttaacctacaaacttgaagttactagacaatagtac

SEQ ID NO: 307854 - DNA, 600 bp, Homo sapiens
ataaatgattacatgattcaaattagatcacaaacacctatattattattagatccattcctccagcccaaatgggggtggtaagtatacgttgttagaccagtgtaactaacttcaacaactttttgttttgttctgttttgcaaatccacccaagaatgcattaacttcaacaattttttaaaaacaatttccacaatcctctccttgtgtctcaaccatgctcaggaattacaagtacaataatctcctcaacctcccctagcctttcctagctcagaaatccgacataggccacttcgcatgcctgatcagataagctttcccaatgctgaaaaccaactgcttctaacattttaaacctgatttccatgaaaactcaggggtgaaagaaacaaataatccaaccaaatcagttccttcttattggaagagttcttcatctttmatctgaaatcctaaataattttttctatgaatcaattgcttctgagatgagaggtacaagacactacaaactatgaccacgcaaaagatttttaaaagcttttgattcacagtgagttaacctacaaacttgaagttactagacaatagtac

SEQ ID NO: 307855 - DNA, 364 bp, Homo sapiens
cgggtactgagacttaaagaagttaagtggcttgtctaatattcttagctagtacaaatcagagcccagtctctctgattccaaaactcaccagctatgctaaagcaaaaatcaaaakgtagtagggaagggtatctaaaagtcattctgagagataattaaaaataaataatgtttgctgtcacttatctcttttaccttctttaatatcccttggcatcctctccttcaacattcaactattaactaacacaactaaaacctaaggaggaagtccagtatgtttgaaagaacccacatgtctgagcatgcaggtgaaggacggtgttttaaaatagcagggataatctaagattaggtattg

SEQ ID NO: 307856 - DNA, 364 bp, Homo sapiens
cgggtactgagacttaaagaagttaagtggcttgtctaatattcttagctagtacaaatcagagcccagtctctctgattccaaaactcaccagctatgctaaagcaaaaatcaaaatgtagtagggaagggtatctaaaagtcattctgagagataattaaaaataaataatgtttgctgtcacttatctcttttaccttctttaatatcccttggcatcctctccttcaacattcaactattractaacacaactaaaacctaaggaggaagtccagtatgtttgaaagaacccacatgtctgagcatgcaggtgaaggacggtgttttaaaatagcagggataatctaagattaggtattg

SEQ ID NO: 307857 - DNA, 497 bp, Homo sapiens
attcaactattaactaacacaactaaaacctaaggaggaagtccagtaygtttgaaagaacccacatgtctgagcatgcaggtgaaggacggtgttttaaaatagcagggataatctaagattaggtattggtgtcaaacacacttctcttatctattagtacagatgaccaccagttttcagtaacaaaagatatggtaataagaaaaaacaaatccacagaaaaggaaaaaaacaagcttgtctttatgcttgttctgtaatgatatgtgtagaaatgctacccacagttaattccatagttcctaagccaagacaggttagtactgggtaattttaataattggctatgtgcattgttcagatgctgaggcattccaatcattttacatggtctcttacatcactttcagaatggtaccataagaacacaactgtacagtcaagaaaaagttatttgtaactaaaacggctggcatcaaacatttctgaacata

SEQ ID NO: 307858 - DNA, 476 bp, Homo sapiens
atgctgaggcattccaatcattttacatggtctcttacatcactttcagaatggtaccataagaacacaactgtacagtcaagaaaaagttatttgtaactaaaacggctggcatcaaacatttctgaacataaatctggctctgaattgctagttrcaatctctctcaattttttatttaaaaaaatccacacattcattcctggtcttgatctactaaagaatttcttttgggatcaaaaagtaacaggaaagaatgctaaccaactttccttggattataacaaacataattccattcttcttcccagttacaaaaagatttaaaagaactacaactcttcaaaatggaagtttgcaatttagatcattctcctattatgcaaatgttcattcagaattaaaatattgttttaaaaagtaaaatgtaagtcagtctagtgcacaaaatgtttacattaaatacaaaattacac

SEQ ID NO: 307859 - DNA, 476 bp, Homo sapiens
atgctgaggcattccaatcattttacatggtctcttacatcactttcagaatggtaccataagaacacaactgtacagtcaagaaaaagttatttgtaactaaaacggctggcatcaaacatttctgaacataaatctggctctgaattgctagttacaatctctctcaattttttatttaaaaaaatccacacattcattcctggtcttratctactaaagaatttcttttgggatcaaaaagtaacaggaaagaatgctaaccaactttccttggattataacaaacataattccattcttcttcccagttacaaaaagatttaaaagaactacaactcttcaaaatggaagtttgcaatttagatcattctcctattatgcaaatgttcattcagaattaaaatattgttttaaaaagtaaaatgtaagtcagtctagtgcacaaaatgtttacattaaatacaaaattacac

SEQ ID NO: 307860 - DNA, 476 bp, Homo sapiens
atgctgaggcattccaatcattttacatggtctcttacatcactttcagaatggtaccataagaacacaactgtacagtcaagaaaaagttatttgtaactaaaacggctggcatcaaacatttctgaacataaatctggctctgaattgctagttacaatctctctcaattttttatttaaaaaaatccacacattcattcctggtcttgatctactaaagaatttcttttgggatcaaaaagtaacaggaaagaatgctaaccaactttccttggattataacaaacataattccattcttcttcccagttacaaaaagatttaaaagaactacaactcttcaaaatggaagtttgcaatttagatcattctcctattatgcaaatgttcattcagaattaaaatattgttttaaaaagtaaaatgtaagtcagtytagtgcacaaaatgtttacattaaatacaaaattacac

SEQ ID NO: 307861 - DNA, 620 bp, Homo sapiens
agttcctccaaagtgacattcatatttatctatattaactacatccaaattctgctatccttcgtgtatacttctcttttattataagcagcttcagctacttttatggaaagatttaaattattggaaaatattttaagggtatttaagttaacatatggaccatttacatattctataaactgtgtgcttacacrtaattataaatatctcagactgtaaaagaaaaccttccataatgttcccacaatggaaaaataaagtcttagaaataattatagagggagcagaagggagtggcaggtagaggataacttactaaatcggcaaaataaaatttggaattttttcttaaaacaaaacaaaataaaaacctgacaacccttgttcaaggctgccaaaacttgagaagaagcaaactgtcaagggaaacaaatgttaaaatataaagcccttttctgagaaagtaactccaccagtccaggttaatccaattctgaatcactaatgacaccagacctgccgggttgtctcaactactacaaagaagtccaaagggacaggcagaggttcacaggcaaattattttcactgctgtcattgaaattttaaatatagcc

SEQ ID NO: 307862 - DNA, 620 bp, Homo sapiens
agttcctccaaagtgacattcatatttatctatattaactacatccaaattctgctatccttcgtgtatacttctcttttattataagcagcttcagctacttttatggaaagatttaaattattggaaaatattttaagggtatttaagttaacatatggaccatttacatattctataaactgtgtgcttacacgtaattataaatatctcagactgtaaaagaaaaccttccataatgttcccacaatggaaaaataaagtcttagaaataattatagagggagcagaagggagtggcaggtagaggataacttactaaatcggcaaaataaaatttggaattttttcttaaaacaaaacaaaataaaaacctgacaacccttgttcaaggctgccaaaacttgagaagaagcaaactgtcaagggaaacaaatgttaaaatataaagcccttttctgagaaagtaactccaccagtccaggttaatccaattctgaatcactaatgacaccagacctgccgggytgtctcaactactacaaagaagtccaaagggacaggcagaggttcacaggcaaattattttcactgctgtcattgaaattttaaatatagcc

SEQ ID NO: 307863 - DNA, 607 bp, Homo sapiens
ctctcccatcccaacaccctttctactcctctactgttgttgactggcactaacccttttcagacctcaaaaaacaagggccgacatattgatacataatttgagtactgagcatagtggaaaaatcacttgactaaaagtcaagagattggattctggccccaaccctgacccagctctaggtacttgggccagtcactttgcttctttggttttctctctttaaaacaaggatggattagatgggtggttccccacacaagatcccaaaatctccaggagcccctgaggttgtaataaaagacaatgggatatttttattatttcaaaatgtctaacagagatagttcrttaactgctttaaggctaattaaaacaccaagtattttggcttcacattagtactctgcatggtgacactggatggcatgtgattatgtttgtcatatcataggaaatttggaaacaagagtgttagacctgatactgttctcaaagctgtacctcagaaaatcacaatatctttactaaacataacatccaatcacaaatgtgtggttaataaaaaatgggaaaatgatttaacacctatcaatgcaatttgcat

SEQ ID NO: 307864 - DNA, 573 bp, Homo sapiens
tggttttctctctttaaaacaaggatggattagatgggtggttccccacacaagatcccaaaatctccaggagcccctgaggttgtaataaaagacaatgggatatttttattatttcaaaatgtctaacagagatagttcgttaactgctttaaggctaattaaaacaccaagtattttggcttcacattagtactctgcatggtgacactggatggcatgtgattatgtttgtcatatcataggaaatttggaaacaagagtgttagacctgatactgttctcaaagctgtacctcagaaaatcacaatatctttaytaaacataacatccaatcacaaatgtgtggttaataaaaaatgggaaaatgatttaacacctatcaatgcaatttgcataatacaagcatacctttgtgatattgtggcttcagctccagatcacctcaataaagcaaacagtacaatgaagcaagtcagaaattttttggttccccagtgcatacaaaagttatgtttacagtatactctagtccattaagcatgcaacagcattatgtctaaagcataatgc

SEQ ID NO: 307865 - DNA, 607 bp, Homo sapiens
ctctcccatcccaacaccctttctactcctctactgttgttgactggcactaacccttttcagacctcaaaaaacaagggccgacatattgatacataatttgagtactgagcatagtggaaaaatcacttgactaaaagtcaagagattggattctggccccaaccctgacccagctctaggtacttgggccagtcactttgcttctttggttttctctctttaaaacaaggatggattagatgggtggttccccacacaagatcccaaaatctccaggagcccctgaggttgtaataaaagacaatgggatatttttattatttcaaaatgtctaacagagatagttcgttaactgctttaaggctaattaaaacaccaagtattttggcttcacattagtactctgcatggtgacactggatggcatgtgattatgtttgtcatatcataggaaatttggaaacaagagtgttagacctgatactgttctcaaagctgtacctcagaaaatcacaatatctttactaaacataacatccaatcacaaatgtgtggttaataaaaawtgggaaaatgatttaacacctatcaatgcaatttgcat

SEQ ID NO: 307866 - DNA, 368 bp, Homo sapiens
agagatagttcgttaactgctttaaggctaattaaaacaccaagtattttggcttcacattagtactctgcatggtgacactggatggcatgtgattatgtttgtcatatcataggaaatttggaaacaagagtgttagacctgatactgttctcaaagctgtacctcagaaaatcacaatatctttactaaacataacatccaatcacaaatgtgtggttaataaaaaatgggaaaatgatttaacaccyatcaatgcaatttgcataatacaagcatacctttgtgatattgtggcttcagctccagatcacctcaataaagcaaacagtacaatgaagcaagtcagaaattttttggttccccag

SEQ ID NO: 307867 - DNA, 574 bp, Homo sapiens
cactggatggcatgtgattatgtttgtcatatcataggaaatttggaaacaagagtgttagacctgatactgttctcaaagctgtacctcagaaaatcacaatatctttactaaacataacatccaatcacaaatgtgtggttaataaaaaatgggaaaatgatttaacacctatcaatgcaatttgcataatacaagcatacctttgtgatattgtggcttcagctccagatcacctcaataaagcaaacagtacaatgaagcaagtcagaaattttttggttccccagtgcatacaaaagttatgtttacagtatactctagtccattaagcatgcaacagcattatgtctaaagcataatgcatatacctgagtttaaaaatactttattgctaaaaaatactgacacagggacatatastgagtatatgctattggaaaaaatggtgctgatacatttgctcgacatagggttgccacaaactttcaatttgtaaaaaataaaacaaaatctgtgaagcacaataaaagggaacacacaataaaataaggtatgcctatagataaaatct

SEQ ID NO: 307868 - DNA, 434 bp, Homo sapiens
aactactatttccttaacacaacttggataaaaacctttttctgcaatcacagctggcactgtggtgcyggttttatgggaaattgagggctatgatagcccctgtgatgtctgtcagcatcctctttcaaagtgggaaaagaaaagctctcttccttaatataacactgagttaccagttactgggcgataggccctagagcattaaagagtttcatggctctttccatgactcagaggcccttctttgttttcttctgggaagacacatgcaaggaagctgggttaggcccttccctgtgacagtcagacttaccatgaccttccaggtctaaagcccagtcttaccattacaaactccttcctcaaccaacggtgctctctccaggggccccaccattcctgccagcactctgcctacctctggaactgtc

SEQ ID NO: 307869 - DNA, 434 bp, Homo sapiens
aactactatttccttaacacaacttggataaaaacctttttctgcaatcacagctggcactgtggtgctggttttatgggaaattgagggctatgatagcccctgtgatgtctgtcagcatcctctttcaaagtgggaaaagaaaagctctcttccttaatataacactgagttaccagttactgggcgataggccctagagcattaaagagtttcatggctctttccatgactcagaggcccttctttgttttcttctgggaagacacatgcaaggaagctgggttaggcccttccctgtgacagtcagacttaccaygaccttccaggtctaaagcccagtcttaccattacaaactccttcctcaaccaacggtgctctctccaggggccccaccattcctgccagcactctgcctacctctggaactgtc

SEQ ID NO: 307870 - DNA, 434 bp, Homo sapiens
aactactatttccttaacacaacttggataaaaacctttttctgcaatcacagctggcactgtggtgctggttttatgggaaattgagggctatgatagcccctgtgatgtctgtcagcatcctctttcaaagtgggaaaagaaaagctctcttccttaatataacactgagttaccagttactgggcgataggccctagagcattaaagagtttcatggctctttccatgactcagaggcccttctttgttttcttctgggaagacacatgcaaggaagctgggttaggcccttccctgtgacagtcagacttaccatgaccttccaggtctaaagcccagtcttaccrttacaaactccttcctcaaccaacggtgctctctccaggggccccaccattcctgccagcactctgcctacctctggaactgtc

SEQ ID NO: 307871 - DNA, 589 bp, Homo sapiens
  misc_feature (1)...(589): n = A,T,C or G
ttctaagggttgttgtgaagattgaattagttagctaatttatgtaaagtacttaggatagtgcctggtatttagtaagttctatgtgttagcctattattattattactattaccatttaaaaatattatttcaaggatgggatgcattttctgtaaacatgttctcaaatgattctactactggatacaatactrggcttttatgcagtaattgttgttggaggagttgttctgacatccagcttgcacctgggctactggtttcgtggccagggatggccaggcctagcgtctctctgatcttgcacaatttatgcatagagtggtgtggttagaggaaacttggagagggggaacttctcagttttgctttcaggtatttatacattaactatcataagagatggacatcttaataacttccaagaaagagttcatgagcttcaatttgatatttattgtttgactaggtttctttctgtcttacctttccagttgttagggttcttgatatgtattttggtgatgaaaatttcaactctaaaagctaaacactcaagannnnnnnnnnnnnnnnnnnnnnnnnn

SEQ ID NO: 307872 - DNA, 589 bp, Homo sapiens
  misc_feature (1)...(589): n = A,T,C or G
ttctaagggttgttgtgaagattgaattagttagctaatttatgtaaagtacttaggatagtgcctggtatttagtaagttctatgtgttagcctattattattattactattaccatttaaaaatattatttcaaggatgggatgcattttctgtaaacatgttctcaaatgattctactactggatacaatactgggcttttatgcagtaattgttgktggaggagttgttctgacatccagcttgcacctgggctactggtttcgtggccagggatggccaggcctagcgtctctctgatcttgcacaatttatgcatagagtggtgtggttagaggaaacttggagagggggaacttctcagttttgctttcaggtatttatacattaactatcataagagatggacatcttaataacttccaagaaagagttcatgagcttcaatttgatatttattgtttgactaggtttctttctgtcttacctttccagttgttagggttcttgatatgtattttggtgatgaaaatttcaactctaaaagctaaacactcaagannnnnnnnnnnnnnnnnnnnnnnnnn

SEQ ID NO: 307873 - DNA, 589 bp, Homo sapiens
  misc_feature (1)...(589): n = A,T,C or G
ttctaagggttgttgtgaagattgaattagttagctaatttatgtaaagtacttaggatagtgcctggtatttagtaagttctatgtgttagcctattattattattactattaccatttaaaaatattatttcaaggatgggatgcattttctgtaaacatgttctcaaatgattctactactggatacaatactgggcttttatgcagtaattgttgttggaggagttgttctgacatccagcttgcacctgggctactggtttcgtggccagggatggccaggcctagcgtctctctgatcttgcacaatttatgcatagagtggtgtggktagaggaaacttggagagggggaacttctcagttttgctttcaggtatttatacattaactatcataagagatggacatcttaataacttccaagaaagagttcatgagcttcaatttgatatttattgtttgactaggtttctttctgtcttacctttccagttgttagggttcttgatatgtattttggtgatgaaaatttcaactctaaaagctaaacactcaagannnnnnnnnnnnnnnnnnnnnnnnnn

SEQ ID NO: 307874 - DNA, 589 bp, Homo sapiens
  misc_feature (1)...(589): n = A,T,C or G
ttctaagggttgttgtgaagattgaattagttagctaatttatgtaaagtacttaggatagtgcctggtatttagtaagttctatgtgttagcctattattattattactattaccatttaaaaatattatttcaaggatgggatgcattttctgtaaacatgttctcaaatgattctactactggatacaatactgggcttttatgcagtaattgttgttggaggagttgttctgacatccagcttgcacctgggctactggtttcgtggccagggatggccaggcctagcgtctctctgatcttgcacaatttatgcatagagtggtgtggttagaggaaacttggagagggggaacttctcagttttgctttcaggtatttatacattaactatcataagagatggacatcttaataacttccaagaaagagttcatgagcttcaatttgatatttattgtttgactaggtttctttctgtcttacctttccagttgttaggrttcttgatatgtattttggtgatgaaaatttcaactctaaaagctaaacactcaagannnnnnnnnnnnnnnnnnnnnnnnnn

SEQ ID NO: 307875 - DNA, 546 bp, Homo sapiens
cccctgtacttgatccctgtgctttccttctctcctactttcctactcttgtcatgagtgctgaggcagggatgatgttggggtggaaagctgaagggcgaagatgaatgagccacagtgtccacttagaatctacagccaactcttggcagcttatccgtggtaattcttgtttcagcttcttgttgactttatcacccactcaatgtgcttaaytctatgatggatgttatcaccatctctgtttattcacaatgccaagaacaccagtggaacagggaaatattcaggaaaacccactttatggtgtcaacttgaccagaaaacaaaacacaactccatcattgctttattgaatttggcatcgttctagaaataaacaatcatttatattttgtcaaacaaaaagaagaggagaagagatttcaaaagcactgcttctggggagggtctggatcaaaggtaaatgtgtgactttaggtgacagaaaagcatctccactcagatgcatccaattttgagggggcactgactacaggacagtag

SEQ ID NO: 307876 - DNA, 546 bp, Homo sapiens
cccctgtacttgatccctgtgctttccttctctcctactttcctactcttgtcatgagtgctgaggcagggatgatgttggggtggaaagctgaagggcgaagatgaatgagccacagtgtccacttagaatctacagccaactcttggcagcttatccgtggtaattcttgtttcagcttcttgttgactttatcacccactcaatgtgcttaactctatgatggatgttatcaccakctctgtttattcacaatgccaagaacaccagtggaacagggaaatattcaggaaaacccactttatggtgtcaacttgaccagaaaacaaaacacaactccatcattgctttattgaatttggcatcgttctagaaataaacaatcatttatattttgtcaaacaaaaagaagaggagaagagatttcaaaagcactgcttctggggagggtctggatcaaaggtaaatgtgtgactttaggtgacagaaaagcatctccactcagatgcatccaattttgagggggcactgactacaggacagtag

SEQ ID NO: 307877 - DNA, 546 bp, Homo sapiens
cccctgtacttgatccctgtgctttccttctctcctactttcctactcttgtcatgagtgctgaggcagggatgatgttggggtggaaagctgaagggcgaagatgaatgagccacagtgtccacttagaatctacagccaactcttggcagcttatccgtggtaattcttgtttcagcttcttgttgactttatcacccactcaatgtgcttaactctatgatggatgttatcaccatctctgtttattcacaatgccaagaacaccagtggaacagggaaatattcaggaaaacccactttatggtgtcaacttgaccagaaaacraaacacaactccatcattgctttattgaatttggcatcgttctagaaataaacaatcatttatattttgtcaaacaaaaagaagaggagaagagatttcaaaagcactgcttctggggagggtctggatcaaaggtaaatgtgtgactttaggtgacagaaaagcatctccactcagatgcatccaattttgagggggcactgactacaggacagtag

SEQ ID NO: 307878 - DNA, 564 bp, Homo sapiens
atggtgtcaacttgaccagaaaacaaaacacaactccatcattgctttattgaatttggcatcgttctagaaataaacaatcatttatattttgtcaaacaaaaagaagaggagaagagatttcaaaagcactgcttctggggagggtctggatcaaaggtaaatgtgtgactttaggtgacagaaaagcatctccactcagatgcatccaaytttgagggggcactgactacaggacagtagagacaagggacactcatgaacaagcagcttttccaattctgggtccttttcaaactgtagtatcaacatatatttttaagtttcataaattcttggaacattaaacatatccattcaaacagttctttcaatatggtggatatttgtaggctgccctggaaatcagaacaccttgaatttaattcctgctatgacattggctgactctgtaactttcaccttttttagttctccaagatgatataaataatggaaaacatataggactctaaaatggttgcaacataggttcaaatctgacccctaccacttgttagcttg

SEQ ID NO: 307879 - DNA, 565 bp, Homo sapiens
cttggttactagcatctccatctgtggcccaggcttgagtgcagtagagcaatcatggatcactgcagcctccacctcctaggctcaagccatccatcctcctgcctcagtctcccatttttaaaactttttatagagayacggtctcacatgttgctcaggctggtctcgaattcctgggctcaagtgatcctcccacttctgcctcccaaagggctggaattacaggcctgaaccactgtgcctggccagttagtagcttcttaacacatagcaacataatttccatactattttcaactaatttttattctttcagttgggacctttatatatttcagtgttcagtgaagaagtaggagaatctggttcttaggctctgcctatatccttttacctgtcttgggtaactgccaagaaattaaatcaacaaattttggcctgcagtctggcattaatagatgtgaatttagctaggtttctttcaacacagtctccaggtcaatcgtaatcttatgtgaagtttcttattcaggcatgtctcattagcaccattaatttcaca

SEQ ID NO: 307880 - DNA, 565 bp, Homo sapiens
cttggttactagcatctccatctgtggcccaggcttgagtgcagtagagcaatcatggatcactgcagcctccacctcctaggctcaagccatccatcctcctgcctcagtctcccatttttaaaactttttatagagacacggtctcacatgttgctcaggctggtctcraattcctgggctcaagtgatcctcccacttctgcctcccaaagggctggaattacaggcctgaaccactgtgcctggccagttagtagcttcttaacacatagcaacataatttccatactattttcaactaatttttattctttcagttgggacctttatatatttcagtgttcagtgaagaagtaggagaatctggttcttaggctctgcctatatccttttacctgtcttgggtaactgccaagaaattaaatcaacaaattttggcctgcagtctggcattaatagatgtgaatttagctaggtttctttcaacacagtctccaggtcaatcgtaatcttatgtgaagtttcttattcaggcatgtctcattagcaccattaatttcaca

SEQ ID NO: 307881 - DNA, 489 bp, Homo sapiens
aatctggttcttaggctctgcctatatccttttacctgtcttgggtaactgccaagaaattaaatcaacaaattttggcctgcagtctggcattaatagatgtgaatttagctaggtttctttcaacacagtctccaggtcaatcgtaatcttatgtgaagtttcttattcaggcatgtctcattagcaccattaatttcacacaggaattctttttttctccctttttttgtgactaagcaaaatgagaaatatttctctttcaggatatggagaggcttaattaaattctttaattttgtctayatctgcccttatgaatgatagcaaaggaatgggggatatcagaatatgagaaaaagtaatcatctaaaaatttccaagcactttaaaatttgttaagctagcataaatatgtgggtgtgatagaggttttcattaggcctcctctcaacatacagtagttaggaatgaagtttagtgtctctc

SEQ ID NO: 307882 - DNA, 549 bp, Homo sapiens
ttgccctttctgaaacctcagtcatcctgaaaagtaactctgtacctccttgactttaatttttctgtcttaattctatttgtatacaatgtttgtgktgtctgattctctgtctcgtattgctgaaactcatggccttgaatttctgggtcactcttaaaaaatagacataacttgattactaatgaaaaagtgactcattttcttccaggcaaaggctgacactgactgtcacagtttgtgacagaagcaaactctctaattaggagacatcacctattcttttctaaattttataagaattgatgatagcatcatgagatgggaagtgagtaagataagcgtttatgcttgtagagaggatgcataaaaatgaaatctggataaagttctatctgaatttaccattttaagtggttgattccctgtgagcttaaatttagtgcttctcttcccagaccgttgtcttacatacacacttcagtcagttttagccttgtataactaatcagcaggtcagattccatagaggctgaaatacctaccacc

SEQ ID NO: 307883 - DNA, 560 bp, Homo sapiens
atggtagtgccttagtcgtttaactgcctgtcactttaagattttgaaatactggttctcgttgtgtaagccagacacatcttgagaatattttacggggcaacttgccctttctgaaacctcagtcatcctgaaaagtaactctgtacctccttgactttaatttttctgtcttaattctatttgtatacaatgtttgtggtgtctgattctctgtctcgtattgctgaaactcatggccttgaatttctgggtcactcttaaaaaatagacataacttgattactaatgaaaaagtgactcattttcttccaggcaaaggctgacactgactgtcacagtttgtgacagaagcaractctctaattaggagacatcacctattcttttctaaattttataagaattgatgatagcatcatgagatgggaagtgagtaagataagcgtttatgcttgtagagaggatgcataaaaatgaaatctggataaagttctatctgaatttaccattttaagtggttgattccctgtgagcttaaatttagtgcttctcttccc

SEQ ID NO: 307884 - DNA, 549 bp, Homo sapiens
ttgccctttctgaaacctcagtcatcctgaaaagtaactctgtacctccttgactttaatttttctgtcttaattctatttgtatacaatgtttgtggtgtctgattctctgtctcgtattgctgaaactcatggccttgaatttctgggtcactcttaaaaaatagacataacttgattactaatgaaaaagtgactcattttcttccaggcaaaggctgacactgactgtcacagtttgtgacagaagcaaactctctaattaggagacatcacctattcttttctaaattttataagaattgatgatagcatcatgagatgggaagtgagtaagataagcgtttatgcttgtagagaggatgcataaaaatgaaatctggataaagttctatctgaatttaccwttttaagtggttgattccctgtgagcttaaatttagtgcttctcttcccagaccgttgtcttacatacacacttcagtcagttttagccttgtataactaatcagcaggtcagattccatagaggctgaaatacctaccacc

SEQ ID NO: 307885 - DNA, 572 bp, Homo sapiens
ggactttggaaagcacctttgtcactcattttgttttataagtgaggmggctgaggtgtaatacagctaagcgaattagcctttattacataactcattagaatgtagactgggactaagagctgtttctccagatcccattaggcaatctaaagattctgcactatttctttttcatttttggtatccaaataggtacagttgtttttgatctaggaaaatccttttagactaaacagtaagctttttaaattactctgcttttagatattttttggacttcagaactttgaaggtggtcatccaccaacattggggaatggaaagaaggctccaacacttttctttctagagatcttctttaattttcaatggcagtcactacagaatctagcagttcatgctattgaggccactttgtaggatttttttttttcttagtcagggctccaggtccctggtggtttatgtagtcagtcttttatcaacaaccgatgaaagactaataaaagtgcaagagggaatgaggactgtgtgtgtgtatgtctgcacatgcacacatgcctctctgt

SEQ ID NO: 307886 - DNA, 531 bp, Homo sapiens
acacatgtaaactaagtgaggtggggtttcagagataattcccagcctcacaattcctcgtgaagttmttttcctgtgggaaacttttaatttggaagcatgcaacctaatgtgggaaccaagattaacattttctgaaatacttctacaagaaaagcagaaatggtctgtccaggaagctgaatttacatagtagaaaaatgagctgccctgcagtatttggtagtctttgtgtattagttgtgataaaagtgtgtatgtgtgtgtgtacgtgtgtgagagtgagagattgtatacttgtctttgtttccttcacatacaactagtaaggccctagaaaaactacactagaaagtgtgttttaccacaagcgtcccagttctggacaccaatctatacacaaatacttttttttaaagttctttttgtttttccttcttgctgagtaagctatagtatttcctttttttctttcttttttttttgagagaagggggggttgagagtagagtgggaatggcaagaagtagt

SEQ ID NO: 307887 - DNA, 583 bp, Homo sapiens
cccagcctcacaattcctcgtgaagttcttttcctgtgggaaacttttaatttggaagcatgcaacctaatgtgggaaccaagattaacattttctgaaatacttctacaagaaaagcagaaatgstctgtccaggaagctgaatttacatagtagaaaaatgagctgccctgcagtatttggtagtctttgtgtattagttgtgataaaagtgtgtatgtgtgtgtgtacgtgtgtgagagtgagagattgtatacttgtctttgtttccttcacatacaactagtaaggccctagaaaaactacactagaaagtgtgttttaccacaagcgtcccagttctggacaccaatctatacacaaatacttttttttaaagttctttttgtttttccttcttgctgagtaagctatagtatttcctttttttctttcttttttttttgagagaagggggggttgagagtagagtgggaatggcaagaagtagtatgacagagcttcttctctttttttcccctctttaccaggaagttaactagaagtcctcatgcatgtttttaaaacaaagttggtaattagc

SEQ ID NO: 307888 - DNA, 573 bp, Homo sapiens
attcccagcctcacaattcctcgtgaagttcttttcctgtgggaaacttttaatttggaagcatgcaacctaatgtgggaaccaagattaacattttctgaaatacttctacaagaaaagcagaaatggtctgtccaggaagctgaatttacatagtagaaaaatgagctgccctgcagtatttggtagtctttgtgtattagttgtgataaaagtgtgtatgtgtgtgtgtacgtgtgtgagagtgagagattgtatacttgtctttgtttccttcacatacaactagtaaggccctagaaaaactacactagaaagtgtgttttaccacaagcgtcccagttctggacaccaatctatacacaaatacttttttttaaagttctttttgtttttccttcttgctgagtaagctatagtatttcctttttttctttcttttttttttgagaraagggggggttgagagtagagtgggaatggcaagaagtagtatgacagagcttcttctctttttttcccctctttaccaggaagttaactagaagtcctcatgcatgtttttaaaacaaa

SEQ ID NO: 307889 - DNA, 377 bp, Homo sapiens
ataggacaggtttacagcagatttttgaaaaaagggtggaagaaaggaacctaagttggagatataccagaagggaagcatgatgtttctcactggaaattaaaaagattttaatatrggggacagtaaacaagattgtggaaataatatggagtgttcgagttatggattactaaagagtaagatggttagatgattggaatgggacagacaggcagatcagagattgtaaagaacttggatttgaaaggcttggtattaatactgttgctagtttctgagcagaagaatgacatgaaaattatgcttaggaaagattattcttttagtcatatgcttaggttcagcaaggaatttccagactgtccttagggaga

SEQ ID NO: 307890 - DNA, 377 bp, Homo sapiens
ataggacaggtttacagcagatttttgaaaaaagggtggaagaaaggaacctaagttggagatataccagaagggaagcatgatgtttctcactggaaattaaaaagattttaatataggggacagtaaacaagattgtggaaataatatggagtgttcgagttatggattactaaagagtaagatggttagatgattggaatgggacagacargcagatcagagattgtaaagaacttggatttgaaaggcttggtattaatactgttgctagtttctgagcagaagaatgacatgaaaattatgcttaggaaagattattcttttagtcatatgcttaggttcagcaaggaatttccagactgtccttagggaga

SEQ ID NO: 307891 - DNA, 565 bp, Homo sapiens
aattatgcttaggaaagattattcttttagtcatatgcttaggttcagcaaggaatttccagactgtccttagggagaggagaggtatggataggatgctggtccatttaggatgttagagctgattgaataggtgctagtcttggggcaagacttagtcatacactttcagttaagtactrtttcattgcaaggtctaggtgaagatagggatatatttgtaaaactggggaaattgctagattcacagataaccaactttgggcaaatcagttagctttggtgtccttttcagtgctataggggttcagaccatttggtttctgagatcactgctgaaattctgtgattgtatgagtataatgtaaaagttgtctcaatcaaggaaacttggagtaaagactcaatatgatggatttaaaaggaatgaatgacagttccaattattgggttcaaaaaacatgtgctacaagtataagatgagaaaaatagggtacactagtagttcatgtgaaataaggctctgaatattttagctgagtgtgtattccatagcacatagtag

SEQ ID NO: 307892 - DNA, 565 bp, Homo sapiens
aattatgcttaggaaagattattcttttagtcatatgcttaggttcagcaaggaatttccagactgtccttagggagaggagaggtatggataggatgctggtccatttaggatgttagagctgattgaataggtgctagtcttggggcaagacttagtcatacactttcagttaagtactatttcattgcaaggtctaggtgaagatagggatatatttgtaaaactggggaaattgctagattcacagataaccaactttgggyaaatcagttagctttggtgtccttttcagtgctataggggttcagaccatttggtttctgagatcactgctgaaattctgtgattgtatgagtataatgtaaaagttgtctcaatcaaggaaacttggagtaaagactcaatatgatggatttaaaaggaatgaatgacagttccaattattgggttcaaaaaacatgtgctacaagtataagatgagaaaaatagggtacactagtagttcatgtgaaataaggctctgaatattttagctgagtgtgtattccatagcacatagtag

SEQ ID NO: 307893 - DNA, 565 bp, Homo sapiens
aattatgcttaggaaagattattcttttagtcatatgcttaggttcagcaaggaatttccagactgtccttagggagaggagaggtatggataggatgctggtccatttaggatgttagagctgattgaataggtgctagtcttggggcaagacttagtcatacactttcagttaagtactatttcattgcaaggtctaggtgaagatagggatatatttgtaaaactggggaaattgctagattcacagataaccaactttgggcaratcagttagctttggtgtccttttcagtgctataggggttcagaccatttggtttctgagatcactgctgaaattctgtgattgtatgagtataatgtaaaagttgtctcaatcaaggaaacttggagtaaagactcaatatgatggatttaaaaggaatgaatgacagttccaattattgggttcaaaaaacatgtgctacaagtataagatgagaaaaatagggtacactagtagttcatgtgaaataaggctctgaatattttagctgagtgtgtattccatagcacatagtag

SEQ ID NO: 307894 - DNA, 565 bp, Homo sapiens
aattatgcttaggaaagattattcttttagtcatatgcttaggttcagcaaggaatttccagactgtccttagggagaggagaggtatggataggatgctggtccatttaggatgttagagctgattgaataggtgctagtcttggggcaagacttagtcatacactttcagttaagtactatttcattgcaaggtctaggtgaagatagggatatatttgtaaaactggggaaattgctagattcacagataaccaactttgggcaaatcagttagctttggtgtccttttcagtgctataggggttcagaccatttggtttctgagatcactgctgaaattctgtgattgtatgagtataatgtaaaagttgtctcaatcaaggaaacttggagtaaagactcaatatgatggatttaaaaggaatgaatgayagttccaattattgggttcaaaaaacatgtgctacaagtataagatgagaaaaatagggtacactagtagttcatgtgaaataaggctctgaatattttagctgagtgtgtattccatagcacatagtag

SEQ ID NO: 307895 - DNA, 450 bp, Homo sapiens
tgatggatttaaaaggaatgaatgacagttccaattattgggttcaaaaaacatgtgctacaagtataagatgagaaaaatagggtacactagtagttcatgtgaaataaggctctgaatattttagctgagtgtgtattccatagcacatagtagtattttgtggcttctaaaaaagtacacatatccattgggtatgagtcggagcattattctttcttgaactgcgctctcacgatgcctyctcagtttaagaacttactctgaaatagtaaaagcatagtgtccagatcaggaggtcatggttcagctctgtgctgcactggtaagaacatgtgttaagcctttttccattttgagcctcactttttaaagaggtttttgatgaactggagtcatccagtgatggggaggcaggatagcctagtgttgaagcacacgcactctaga

SEQ ID NO: 307896 - DNA, 635 bp, Homo sapiens
agactttagtatttccagagttatgagaccaccaccattatctaatttcgaaacatttttatcaccctgaaagaaattctctactgcttagtagtcactgtctatttccctttctttacagctcctggcaacactaatctactttctatctctacggwtttgcatattctggacatttcatataaatggaattatataatatgtggccttttgtgtgtggcttctttcacttagcatgttttcaaggttcatgcatgttgtagcatgtatcagaatgtcattccttttcatggccacatatttcatttatggatataccacattttatttatctgttcatcagcttataggcatttgggttgtttctactttttagctattatgaataatgctgctatgaacatttttattatctgggcatatgttttcagttatctcgggtatatacctaggaagggaggcagaatttgaagaattaagaaagaaagagctttctcacagtgggatccacccacattgaagactgttcttttgttgaagtagtcagccagtaatttcacttaacaaatgcatagtgtttactatgtgctggatagtgttctaagtgctttacccttatttaaaaatcctatgaa

SEQ ID NO: 307897 - DNA, 635 bp, Homo sapiens
agactttagtatttccagagttatgagaccaccaccattatctaatttcgaaacatttttatcaccctgaaagaaattctctactgcttagtagtcactgtctatttccctttctttacagctcctggcaacactaatctactttctatctctacggttttgcatattctggacatttcatataaatggaattatataatatgtggccttttgtgtgtggcttctttcacttagcatgttttcaaggttcatscatgttgtagcatgtatcagaatgtcattccttttcatggccacatatttcatttatggatataccacattttatttatctgttcatcagcttataggcatttgggttgtttctactttttagctattatgaataatgctgctatgaacatttttattatctgggcatatgttttcagttatctcgggtatatacctaggaagggaggcagaatttgaagaattaagaaagaaagagctttctcacagtgggatccacccacattgaagactgttcttttgttgaagtagtcagccagtaatttcacttaacaaatgcatagtgtttactatgtgctggatagtgttctaagtgctttacccttatttaaaaatcctatgaa

SEQ ID NO: 307898 - DNA, 635 bp, Homo sapiens
agactttagtatttccagagttatgagaccaccaccattatctaatttcgaaacatttttatcaccctgaaagaaattctctactgcttagtagtcactgtctatttccctttctttacagctcctggcaacactaatctactttctatctctacggttttgcatattctggacatttcatataaatggaattatataatatgtggccttttgtgtgtggcttctttcacttagcatgttttcaaggttcatgcatgttgtagcatgtatcagaatgtcattccttttcatggccacatatttcatttatggatataccacattttatttatctgttcatcmgcttataggcatttgggttgtttctactttttagctattatgaataatgctgctatgaacatttttattatctgggcatatgttttcagttatctcgggtatatacctaggaagggaggcagaatttgaagaattaagaaagaaagagctttctcacagtgggatccacccacattgaagactgttcttttgttgaagtagtcagccagtaatttcacttaacaaatgcatagtgtttactatgtgctggatagtgttctaagtgctttacccttatttaaaaatcctatgaa

SEQ ID NO: 307899 - DNA, 635 bp, Homo sapiens
agactttagtatttccagagttatgagaccaccaccattatctaatttcgaaacatttttatcaccctgaaagaaattctctactgcttagtagtcactgtctatttccctttctttacagctcctggcaacactaatctactttctatctctacggttttgcatattctggacatttcatataaatggaattatataatatgtggccttttgtgtgtggcttctttcacttagcatgttttcaaggttcatgcatgttgtagcatgtatcagaatgtcattccttttcatggccacatatttcatttatggatataccacattttatttatctgttcatcagcttataggcatttgggttgtttctactttttagctattatgaataatgctgctatgaacatttttattatctgggcatatgttttcagttatctcgggtatatacctaggaagggaggcagaatttgaagaattaagaaagaaagagctttctcacagtggratccacccacattgaagactgttcttttgttgaagtagtcagccagtaatttcacttaacaaatgcatagtgtttactatgtgctggatagtgttctaagtgctttacccttatttaaaaatcctatgaa

SEQ ID NO: 307900 - DNA, 581 bp, Homo sapiens
tggtctggttccagagtctgtactcttaagagcagaacaataataactccaagcatttattaaattctyaagatttatccggcaccatgctacatgcttgtattcaagcagaggctggtgatcatcttttagaaatattttagaaatgattacttaattggatagaaattaaatttcttgaatctgaaggttctgttattccaaggatggctggaaatggaggaaaagccagcaacaagatgatgtctggcctgaggcttttaagatgatcagaatttgtatcaaaaaggaaactgtgaacacgaatgataagtattataggaattcagttaacaagtcttgtcagaatgtggtaataaattatatacaacttaaagagatgaagttactttaaattgtgtgtggaagccttagaaaaattgaataattaaagtttcttgggaagatgatctcctcttacaaatgtttagtttcaaatagtggcagcacatattaggatagagagatgacttctagaaaactgaacatatgggactggaacagtgtattttggagtcagttacaggaaggaagttgtttaa

SEQ ID NO: 307901 - DNA, 581 bp, Homo sapiens
tggtctggttccagagtctgtactcttaagagcagaacaataataactccaagcatttattaaattcttaagatttatccggcaccatgctacatgcttgtattcaagcagaggctggtgatcatcttttagaaatattttagaaatgattacttaattggatagaaattaaatttcttgaatctgaaggttctgttwttccaaggatggctggaaatggaggaaaagccagcaacaagatgatgtctggcctgaggcttttaagatgatcagaatttgtatcaaaaaggaaactgtgaacacgaatgataagtattataggaattcagttaacaagtcttgtcagaatgtggtaataaattatatacaacttaaagagatgaagttactttaaattgtgtgtggaagccttagaaaaattgaataattaaagtttcttgggaagatgatctcctcttacaaatgtttagtttcaaatagtggcagcacatattaggatagagagatgacttctagaaaactgaacatatgggactggaacagtgtattttggagtcagttacaggaaggaagttgtttaa

SEQ ID NO: 307902 - DNA, 581 bp, Homo sapiens
tggtctggttccagagtctgtactcttaagagcagaacaataataactccaagcatttattaaattcttaagatttatccggcaccatgctacatgcttgtattcaagcagaggctggtgatcatcttttagaaatattttagaaatgattacttaattggatagaaattaaatttcttgaatctgaaggttctgttattccaaggatggctggaaatggrggaaaagccagcaacaagatgatgtctggcctgaggcttttaagatgatcagaatttgtatcaaaaaggaaactgtgaacacgaatgataagtattataggaattcagttaacaagtcttgtcagaatgtggtaataaattatatacaacttaaagagatgaagttactttaaattgtgtgtggaagccttagaaaaattgaataattaaagtttcttgggaagatgatctcctcttacaaatgtttagtttcaaatagtggcagcacatattaggatagagagatgacttctagaaaactgaacatatgggactggaacagtgtattttggagtcagttacaggaaggaagttgtttaa

SEQ ID NO: 307903 - DNA, 581 bp, Homo sapiens
tggtctggttccagagtctgtactcttaagagcagaacaataataactccaagcatttattaaattcttaagatttatccggcaccatgctacatgcttgtattcaagcagaggctggtgatcatcttttagaaatattttagaaatgattacttaattggatagaaattaaatttcttgaatctgaaggttctgttattccaaggatggctggaaatggaggaaaagccagcaacaagatgatgtctggcctgaggcttttaagatgatcagaatttgtatcaaaaaggaaactgtgaacacgaatgataagtattataggaattcagttaacaagtcttgtcagaatgtggtaataaattatatacaacttaaagagatgaagttactttaaattgtgtgtggaagccttagaaaaattgaataattaaagtttcttgggaagatgatctcctyttacaaatgtttagtttcaaatagtggcagcacatattaggatagagagatgacttctagaaaactgaacatatgggactggaacagtgtattttggagtcagttacaggaaggaagttgtttaa

SEQ ID NO: 307904 - DNA, 541 bp, Homo sapiens
ctacagtcatagaaggttagctgtgaaacaataatttggaaagggaaatgggacctcatgaaagtgtgggttaaaagagacttgtatatcttctaaggtaaaagtaaagaactaagctgatgtccagccctctaaaacattttaaatagaaatcaaactttattaatacagtaggtctagtttcacataaagcaaatatatggttctgtacatgggctttargagagtaagtctgttgtacctcatatgtaagtattatcccatttagaggaaaaccctaagtctttctttacagtggcttaaaggccccaattgatccacatcccagttacagctctcatctattttctgctgctccagatattcttgctgtttctcagacacgctagggctgctctctgtgttatggcctttgcatttgctgttccctttctcatgaatgtgtttccctaagatacctgcatgattactctcaccttatttaggtctcaactcaagtattgtcagtgaaggtcttctctgattttcctattctaaactg

SEQ ID NO: 307905 - DNA, 595 bp, Homo sapiens
agctagccttgccaaccaatggttaatgaaaggtcttggatatgactgtcaaagacaaaagcactcatgaccccartgtttcaggtcacaatgattaggaaaatcaggacaacaaggcttgggcacagaagagctggtttttgagagggggatttagagtttggtttaaatgtgtaatctttgaggtaatggtggaacagcctactagattcagttttctagtccctgaaaactaaaacgaggaataagttgaatcacatatttggggcaccagccaaatatatagcagcatttatagttagaatcaaagtgtttgtgtttcttaatttaaatgcttctcagagattccatttaaacaacttcattatgaaaatggagacttaccatgcctttttgatattgttcagagaaaattgtcataaataatacacacagtttgaaatggttgtacatcttatgaatcaaggggtggcatgtaaaaaggttcctcagtgcctcaatgtggaaaatatcatagaatgttattcttcaattgattccttccttcactttggtgtttatatggtatcttagatattttatgttattttaatta

SEQ ID NO: 307906 - DNA, 595 bp, Homo sapiens
agctagccttgccaaccaatggttaatgaaaggtcttggatatgactgtcaaagacaaaagcactcatgaccccagtgtttcaggtcacaatgattaggaaaatcaggacaacaaggcttgggcacagaaragctggtttttgagagggggatttagagtttggtttaaatgtgtaatctttgaggtaatggtggaacagcctactagattcagttttctagtccctgaaaactaaaacgaggaataagttgaatcacatatttggggcaccagccaaatatatagcagcatttatagttagaatcaaagtgtttgtgtttcttaatttaaatgcttctcagagattccatttaaacaacttcattatgaaaatggagacttaccatgcctttttgatattgttcagagaaaattgtcataaataatacacacagtttgaaatggttgtacatcttatgaatcaaggggtggcatgtaaaaaggttcctcagtgcctcaatgtggaaaatatcatagaatgttattcttcaattgattccttccttcactttggtgtttatatggtatcttagatattttatgttattttaatta

SEQ ID NO: 307907 - DNA, 594 bp, Homo sapiens
atcattctaaaaatgttcaccaagggccaactcatggtttctggggccatgttaggaactagggatacaaagaagagagagacatggactttgcccacataaaatctatagtttgtgagacacaggcaaataaaccaatatggaaccacatgtgggaaagtataatgatacagatatgccagagggctttgtgaacacagaggggcacttaacataatcatgaaaaagtaggaagatttcagggcaagataattgctgtaagaattctaaaacatcagtggtttaaaatggtagaactttttcttgctcatgcatttctatatatttgatgtgtttggcagggcccctttcacttgctgtttcagagacttacatcctatggctctagaatctcytagggcctgctggattctgcatcaaacaggctgggagcaaaagggagtagaagtcttctttatgggccaggtctgaaagtggtacacagtttactggccacaacttaagttacagggccacatttaacctcaagaaaaacaatgaactaactaggaggaatgaaaaacaagtttgttgattcactagcctggttatgac

SEQ ID NO: 307908 - DNA, 594 bp, Homo sapiens
tgctccaagaagttctgtgaaattcatttaaacactgagtggggaggggttggagaagcatgggcagagtctcagtgctcactcccagtgcaactaaaatgaccaatactgtttatacattgaactttcttaagtaataggagatggggggatgttgctagctgctttttacagtacaatgtgtttaggaacattcagcagctaagagaaaagaatgcttaattattctgtataatgagcaagatacttttgtgctatagaacagtctgctaaggatggatgaaagatgaaaaggaaggacagaggagcagaagagaagctaagattgtgtgaaagagggtcagtacagcmtttctgtcatggaaagacccaacggtcatgcctttgcttccactggagattgtgttgtttctgtaacataagactctcctttagctctcccccatgtagtaaatagaatttgttaagtcgtgaatgctctttatattgctaagagggctgaaaaaaatgtttgaaaccatgattagaagcagtttccttggaaaggggcattgaggagatagaaaattccataaaaatatcatcacagaaatt

SEQ ID NO: 307909 - DNA, 594 bp, Homo sapiens
tgctccaagaagttctgtgaaattcatttaaacactgagtggggaggggttggagaagcatgggcagagtctcagtgctcactcccagtgcaactaaaatgaccaatactgtttatacattgaactttcttaagtaataggagatggggggatgttgctagctgctttttacagtacaatgtgtttaggaacattcagcagctaagagaaaagaatgcttaattattctgtataatgagcaagatacttttgtgctatagaacagtctgctaaggatggatgaaagatgaaaaggaaggacagaggagcagaagagaagctaagattgtgtgaaagagggtcagtacagcatttctgtcatggaaagacccaacggtcatgcctttgcttccaytggagattgtgttgtttctgtaacataagactctcctttagctctcccccatgtagtaaatagaatttgttaagtcgtgaatgctctttatattgctaagagggctgaaaaaaatgtttgaaaccatgattagaagcagtttccttggaaaggggcattgaggagatagaaaattccataaaaatatcatcacagaaatt

SEQ ID NO: 307910 - DNA, 634 bp, Homo sapiens
gtaaaaaattacacaaaagttccctgaattatagagtgaatggtgtgattaagaaytgagatggggaagaggaggagaaacagagttaattggagtttaggaagaaaaatcaaaaactcattttggatgtttcaagattaagatggatgttaaataggcaaagacatatgcttatcagacagttaaatatgtgagacttgagtaaagactatagagacagtatttaaaggcataagactgcaaataattgtcagaggaattatagatagaaacataaaagaagactgagtgctgagagctgggacatgtcaaagattagaagaaattacaaaggagactgagaataaactgaggtaggaggagaactaatagtgagtgatgtcttaaagatcaagtgaataaaatgtttcaagaaggagaaagcagccaactgagacaacaccactaataggttgagtgagaaaaagactaaacattgaccattggttttggcaacaagaaagtcatttgtgactttgataaacaccattctgattactctgtgacaccacttagtgtaatgaagactaactgaagaggttttaagagagaataagaggcatatagtgaagaaagcgaacatagacccttggtt

SEQ ID NO: 307911 - DNA, 516 bp, Homo sapiens
ttgctactgtgaatattgctgtgataaacatgtaactataggtatctgtaaactgaaagtatctgagataggtctcaaacaacttagaaagtttattttaccaaggttaagaacatgcctgtgggttggcatggtggctcatccctgtratcccagcagttttggaggctgagcacttcgggtggatcacttgaggtcaggagttcaagaccagcctggccaacatggtgaaaccttgtctctactaaaaatacaaaaaaattagctagtggtggtggcacttgcctataatcccagctaattgagaggctgaggcaggaaaattgcttaaacccagggggtggaagttgcagtgagctgagatcacgctactggcacttcagcctgggcgacagagtgcccatactccatcaaaaaaaaaaaaaaaaaaaaaaacccagaaacatgcctgtgacacagcctcaagaagtcctgatgacatgtgcccaaggtggtcagggtacagctgggttttat

SEQ ID NO: 307912 - DNA, 516 bp, Homo sapiens
ttgctactgtgaatattgctgtgataaacatgtaactataggtatctgtaaactgaaagtatctgagataggtctcaaacaacttagaaagtttattttaccaaggttaagaacatgcctgtgggttggcatggtggctcatccctgtgatcccagcagttttggaggctgagcacttcgggtggatcacttgaggtcaggagttcaagaccagcctggccaacatggtgaaaccttgtctctactaaaaatacaaaaaaattagctagtggtggtggcacttgcctataatcccagctaattgagaggctgaggcaggaaaattgcttaaacccagggggtggaagttgcagtgagctgagatcacgctactggcacttcagcctgggcgacagagtgcccatactccatcaaaaaaaaaaaaaaaaaaaaaaamccagaaacatgcctgtgacacagcctcaagaagtcctgatgacatgtgcccaaggtggtcagggtacagctgggttttat

SEQ ID NO: 307913 - DNA, 688 bp, Homo sapiens
tgctttgttctaacttttttcactcttttttttttccctttgtgttttagttggagtaacctgttggcctgagttcaattttaatgatttttttccctcaattgtgttgtgtgtactgtactgaaaagggcatttttaatctgttttgtgtttttttatttctaaaattttgatttggtctttttttatagtttacatatctgtgttgaagttacctgtgtaaatttgcattgtaacttttccttatttaaattacctgtgtaattttgcattgtaacatcactatcttttaataatcataataaaataatgattattatgtaaaggagatgtatatgtataaagatatagatacacattcatatatgtagggatatatatgataggaatcatatatatccctatattataaggatatatatctttatactatatatatgtataaaagatagggatcatatccatacctrtatataagggtatatagagagtataaatatatatagtataaatatatataaatatatgaatgtatatctatatctttctacatatatatttccttcacatagtaatcataattatttcattatatttatttatatagtatatataagcatatactataaacacaattatttatatatttacgcatacatgtatatctcctttaacataataatcattg

SEQ ID NO: 307914 - DNA, 688 bp, Homo sapiens
tgctttgttctaacttttttcactcttttttttttccctttgtgttttagttggagtaacctgttggcctgagttcaattttaatgatttttttccctcaattgtgttgtgtgtactgtactgaaaagggcatttttaatctgttttgtgtttttttatttctaaaattttgatttggtctttttttatagtttacatatctgtgttgaagttacctgtgtaaatttgcattgtaacttttccttatttaaattacctgtgtaattttgcattgtaacatcactatcttttaataatcataataaaataatgattattatgtaaaggagatgtatatgtataaagatatagatacacattcatatatgtagggatatatatgataggaatcatatatatccctatattataaggatatatatctttatactatatatatgtataaaagatagggatcatatccatacctgtatataagggtatrtagagagtataaatatatatagtataaatatatataaatatatgaatgtatatctatatctttctacatatatatttccttcacatagtaatcataattatttcattatatttatttatatagtatatataagcatatactataaacacaattatttatatatttacgcatacatgtatatctcctttaacataataatcattg

SEQ ID NO: 307915 - DNA, 555 bp, Homo sapiens
gggggaattaattgaaataaatccacaatagttcattcatagcctctaatttaactaccacaacaaaattagtgggaaaaaaaaatcctagcattaagtcttgtttgatgattcttgactcactgaagggcttttctcagcctaccagtttctttggctgttttggataatttatcagaaatgtcttgaaatgacctcttgatatggagatctgtattcccatgccgtcattaattattgcactgtttaatatatacacactatggagtactctaagtattattgtttatatttcttattttttttactaatttttcaaaatacaaatttctttctgtgtcatatttgtaaactaataataatttttggatatatttaaatcatttccttggggagtcaaaaggcttactgtcctagaaaaggacagagttggtattacctgacacatgtaacataatgccctccaacttcatctgagttgttgcaaattacagattttccttatttttttgtggctgaatsgtactccattgtgtatatacctcatgatctcac

SEQ ID NO: 307916 - DNA, 617 bp, Homo sapiens
cacacttgcaattggatgagatttttttttctcttttctttggggaggataacggttaattagtaagcaagagaaccaggattcaaatttaactttttctaaacccaaagcccaaaattttcattctgcttccttgacaccaatatttttgacaaactgtttgtagcaaaggatcacaaaattatacagtgacaggagggaggacacgtatacgtcaatatgtttttgtgcttctctgaaacacctaagggaagagatttcaatgggtacagtttggagtcctttcctgggaaggaacttcccttaaaaagcatcattctgaggactaaacaggaaaaagatgtggaagagaaaaacattgacaactactttacacttttcccctattggttttgcctttgtgyctcagcatcagcagtaagtaattgggctttaagatcattaaaagtttctgtatgtaagtccacttgtttgtttgtttatctgtttttatctcattatttctagtctttccacaaaatatttcaggaagcaaatgtgttaggatagttaaatagacctattggctaatgaagaggtttatattaaggtgcagaagaaagttatgaaaacagatg

SEQ ID NO: 307917 - DNA, 559 bp, Homo sapiens
tcagtcttttagatttacttccaaataatttatttctacattatgcttctttgtttgtagagaacaatacttacacaagtgttttatgaagtaaaatgaaccaacactacactctacaaagggaatttcaaaataaaaaccattacggatgaatggcatacattacagacatctctaccatatgtcttaatgggtctgttgtactgagcccatttacaaaattcataggcctaatttatctaagaaatagagcgataatgctttcaagacaaggaaagaaatagaaatgtggtaaatataaaagacacattaataatttttcctatgaccctgatttctgtcttttcttttaaattattcagagtcatatcagaaggatagttttaataatacagacattattcaatatcagtagaagtttggcaacattacttcctagagtaggtggttttgagacagagtagggacagggcttggcttcacccccactagaggattcttttatgcagtcccacwgatcacaaaacctataccactacctcactgaagccgtaatgtt

SEQ ID NO: 307918 - DNA, 406 bp, Homo sapiens
agtccctcatactgcctgtggtttctttcactctgctgtttgtccaaatktgagtaacaataaaggaagaattttcactaataagaaggagtccagtttcaggatgtcagctggaccacatgcatagcttgtagatctctcctttttactctttgagatattctttgttttctgcaatagctagacccaaggccattccattatttctaataggtaggataatctcatgtttcaaaagtatcaactatatatagtatagttcaataaaataatacatggggaataaaatattcaataaaatattagtacatggggaaatatttccatgataataaaagattgagacatgccatgttaaatttaaactggttctttttttatctacttagaatctgcaacacgtgaa

SEQ ID NO: 307919 - DNA, 568 bp, Homo sapiens
tacaaaaactctacaaaaatatacactcaaaaacattaaataaataaagatgaaattcttaaaaagtgttaagtaatacacagaaggcaagaaagaaaaacagaggaagaatgaaaggaaacaagcagaaaacaaataataaaatgwtgtcaaaaatataaaaatatatattagtcaggagtccccagagaaacagagccaagtgttatgtatatgataataaatatgtatgatatttattatggaaattggatcacacaattacggagcagagaagccccaccatctgttgtctgcaagctggaaggcaaggaaaacttggtggcacagttcagtctgagtccaaaggcctgagaactggagagggggtcagacggggtagggcacgtgataatactactataagtcttagagaccaaagtactgagatccaggagatctgataactgagggcatgaaaagatggctgtcccagctcaaggaggtagacataattcactcttcctccacctttttgttctatttgggtcctgagcagattggatgatgcctgtacacatgacaagta

SEQ ID NO: 307920 - DNA, 596 bp, Homo sapiens
gcatatcttctaaaaattatactaagaaggatatgtatataatttgttagaaatgaaaatgttagtgatacctctacttggtaagattatgattgacctcattgtttatttgtatcaatatatggttttattttactttattttgagacagagtctcactatgtggcccaagatggagtgcagtggcacgatcttggctcactgcaaactccactgcccaggttcaagtgattctcctgcctcagcctcctgagtagctgggattacaggcatgtgccaccacacctgtttgtacttttagtagagacagggttttgccatgttggccaggctggtcttgaactgctgacctcaggtgatctgcccgcctcagcctctcaaagtgctgggattacaggcataagccaccatgcctggccatcaacttatgtttacttgcttttaactgtattttctatttattttcacaatgaatacatattaattctgtaattaaaacattataaaagaggaaagaaaaaaattccttgcaaagcccyttaataccagagccagctagaagatgagttaccattgggccaggcgcggtggctcat

SEQ ID NO: 307921 - DNA, 609 bp, Homo sapiens
gctggcccattgagagctagaggatattccctaagaaaccagaagttttcaaagtgagagattagaacctctagagacctccaagaccatttcaggtcactcatgaagtcttcccttttccaaatgcctatctrtgggaggccaaattttatgtacttcacataacacaacatattgcagtagattaaaatgaagaggaagatattagaatctagctgtcttctattaaatcaaatattaatatgaaagaaatttgcaaaaaaaattgtaaaacaatgccactcttcacatggaatatttttctttcggaaaatagctacttttcacaataatacattacatatgtttatattaatgtgtttattattgttttaaatgaatcaatacatattttataatctgaaatttgacatctaatatagtattgatagaactcctgtaaacataatttttaagagtgtaaaggtgtactgagaccaaaagtttgagaactttccagaccagttcaagtcagccatatagccctaagaccctctgcacactgggcaagttcattctgggaaatggggcttcagaatctctgtagactggaagaatctactcagagtt

SEQ ID NO: 307922 - DNA, 452 bp, Homo sapiens
ttgcatctcttgctcacagaaaatgcaggcaatcatgaagctaaatatgacaccctatttccaaatacaaaatctgttagtgttgtttcttcccactggaccaccactgccatcatttccagggttggatatcaatgattctgttaacagttcctttgtctattttcctactctcagtcaactgcatccagcatatgtaatcttcttcattttcatccattctcaccttccccagtaaatctaaactgcagcttcagtgcaggtgggtagaacacatccataggttcgtttgtagaacctgccctctagcagaaattaggtggagttcaggtaatgaktccttatcttcatagacaaattcacctgctgaaagagtggaccatcaaacttcctgattgatatgaatggtccaggaggctgagatgaacagtccctggagagggaggtgtgat

SEQ ID NO: 307923 - DNA, 610 bp, Homo sapiens
tttctgcttttcaaatccatagctgcagtggatgagtcaakgaccaagaagagtttctgtatagacactgattggaaggtaccaatcactgataagatagcaggagaggatcaaagaacttgtgaatagtaaatagtgtcagaaacaatcaagacatatgcctgcttgcgaagaagccacaaaaaaaacaagataagcatggtctggctcttcagctgtagactttgccctgtagtctccctgtctctgcatccccagaacccaatccttcatctcattccacatctctgctttggttcacatcagatattacgccagcttctttcatcactttatttttctaattgtctttcatggctcgatcatgttattcattctgaatatttaacttggtaaacctattggttcaatatgtgtcctattcccaaacaagcttttcctccaagctcctcctgccagccaaaggtgtaataggatgaatttgttaaaatgccaaagaccacaaaaagcaaagtgatcaggagctcattagggtagaggcatacatgcttgaacacatgattatcatcagggcatcattgtattatgaaagtacaatatgattatttca

SEQ ID NO: 307924 - DNA, 610 bp, Homo sapiens
tttctgcttttcaaatccatagctgcagtggatgagtcaatgaccaagaagagtttctgtatagacactgattggaaggtaccaatcactgataagatagcaggagaggatcaaagaacttgtgaatagtaaatagtgtcagaaacaatcaagacatatgcctgcttgcgaagaagccacaaaaaaaacaagataagcatggtctggctcttcagctgtagactttgccctgtagtctccctgtctctgcatccccagaacccaatcyttcatctcattccacatctctgctttggttcacatcagatattacgccagcttctttcatcactttatttttctaattgtctttcatggctcgatcatgttattcattctgaatatttaacttggtaaacctattggttcaatatgtgtcctattcccaaacaagcttttcctccaagctcctcctgccagccaaaggtgtaataggatgaatttgttaaaatgccaaagaccacaaaaagcaaagtgatcaggagctcattagggtagaggcatacatgcttgaacacatgattatcatcagggcatcattgtattatgaaagtacaatatgattatttca

SEQ ID NO: 307925 - DNA, 580 bp, Homo sapiens
gtgtctttctcatggctctaggactaaagatctatttgttttctaattaaaaacaccccaagcatcagatgctatttctttgtcttagtggctcagaatatctaggtgccctgtggtgtgctatgcttttaggtctctccatgtggtcttaaaaaaatgggggatgcagtttatggtcatggataatacatactgaaatttgacaaaggtcagtaattgtgccccaagatgccttgtgctatacaggttgwgagggtgtgctggtgtgcagatattggctcagtctgtcacagctgatctcctttatttcccatttgtctgctgtcatttgtccagactctatactttatatgcatactgttcacttctgcatacctttggtactagcatttggctaatcaaattctaagatgtctgcaggactagctgaagtcatatttgctggatgatgaagctcccgttccttgacaattacagtcatattggtctccttctccactgcattcttaaaacctttgaagtctgaccatcctttattctttattatgtgtgggactgaatatgttctatgcttgtatct

SEQ ID NO: 307926 - DNA, 443 bp, Homo sapiens
tggctcgtggccccacctcttgcccccaccccaaatcctccgggatttcaaaatgccgcggactcgggcgcaagtgagcgccaaacccgcaagctgggcgagttggatccgggtcgrcagccggctgaaccgccacgctgccccgctttttttattttctttttagatacggcatctaattggtgggtgctgggaggcagggctggttgggtgagcacgagtacctgggtgtagggaacgacctaccttcttgctttccttggggtttagaggggaaggggtgggggcacccagagccccgaagcccggagcgtcccgcgctagcgggcttgcgcgcggccggcgagcaggcgttctctgggtgggtcccttgtctggctcattgttcgcggtgactgttcttggggccaggctgagcgacacagacaccgctcaccgggctg

SEQ ID NO: 307927 - DNA, 556 bp, Homo sapiens
tagggtggtgcctccagctttgttctttttgcttaggattgtcttggctattagggctcttctgtggttccatgtgaattttaaaatagttttctccagttctgtgaagaatgccaatggtagtttgatatggtttggccctgtgtctgcatacaaatctcatcttaagttgtagtaatccccatgtgtcaagagtgggactaggtggagataactgaatcatgagggccatttcccccatgctattcttgtgattatgagtgagttctcatgtgatctgatggttttataagaggcttccccctttgctcagccctcattctctctcctgcttccctgtgaagatatgccttcaaccatgattgcaaatttcctgaggcctccccagccatatggaacygtgagccaattaaacctcttttctttataaattgctcaatctcgagtatttcttcatagcagtgtgagaacagactaatagatagtttaataggcataacattgaacctataaattgctttgggcagtacggccattttaacaatattgattcttc

SEQ ID NO: 307928 - DNA, 562 bp, Homo sapiens
tttaaacaaatatacataatagagccattcctccacaatagcaatcaaaggtgttttctttcaggatttgctaaaggttctttccttctttctttctttctttctttcttcaggatttgctaaaggttctttccttctttctctctttctttctctttctctttttctctttctctctccctccctctctccctctccctctctttctctctctctctctcttttaatgctctaagtttagacatcccagagagttaggttgctccatggcacagtatgtcgtgtcttgttctgtgctacttctgtgacttgtatccatttccgttaatagatatatcatagtggatgttcctttagttacaaaatatagacaatcattcctgtgtttcaggatttttgcgaaggttasaaaacctgccagtaaaaatctgacaaagtgattagttttattttgtagaaatgatccttgtagaccacaagctcctctagaacaggatccatgacctggtcacttgtaatgaatataaatctgtttcataactctgaggtagatgaaatacca

SEQ ID NO: 307929 - DNA, 600 bp, Homo sapiens
ctaaagtccatgccactcatactcccccatgctgtgacctttttattctgagcacaaagttcctcagctcttcttatggcccttcccaatgtttggtaagtgcctccaaggttcattttcctttggttactgttgactctcctctctccttcattcaaatatgctgtctaaactagcataaccacatactctccaaccttttctctgccttatttttatttataccacttatcactacctgatatcatattatatatttagtttattttccaccttctccactgagattgtaaactccatgcaaggactgttgtcaaattttgtccattgctatatccawagcatgtagaatgcagcctagaacatggtaggtgctcaacaatcattttcatgaaaaataaatgaatgagcggattaatgaaattctgtccttctacaagtactggacaagtgcactcaacaagaacactcaacatatctattgctttcttttcccaagaaagcaccagttgctagagcttaaaactcacacaccagagatctccacttcattatgctctgccatttaaaatcattttccatatcaaggcattgtacaca

SEQ ID NO: 307930 - DNA, 409 bp, Homo sapiens
tagatagtagtctctgttatagagttgctggagagaaggcagaaaagtgaggcacagatggagaatcaagaaagtcgagcaggaagtatacattagaccaaggttatcatagcactctggaccagagatgaagatttagaagtgtaatcctgaatccaacgttcttatactttgcctacatccatgaagctgaacatatctaagggaaatacacaaccatggtgtcatttygtactcattaatcttaagtatgttcttaaggttatcaggtgatcttactgtgcttcctgagtctatatgatactttctcctctctccttaaacactcagtgcctctgtctacaccctcactctcagatgaaggccatgcttcctattcactgataaaatggagaacatcagaaaggaa

SEQ ID NO: 307931 - DNA, 581 bp, Homo sapiens
gaggggcggctccactgctgagcaactgcagtcccccaggtggccgtggctggaaccacgaggggctgcagctcaggcgtggcctggccccaggaagttcctgccaggtggyccagagccggccaggagccaggaatggcctgcagggctggggctgaaagcccttctgcaggcttgatgctcctggaacctggccttgaaaggtcccagcaggatccctcctcagagacggtactgcctaaggcccctttaagcaaatccagcagacaaagccatttcctggagagccaggcaggtggagctaggccccgtgtcacagcctttaaaccaggcttctccgtggggcaatcatttccttcccggctctcacctgcagcctcccgctgtccaggatatttgtgccaaagatggctatcggaaggcatggcctaaggtgtgatcaaggggtgaggtgcatccctttgggctgaattattttttaaccaaatttattgctatattttgtatgcagttaaattcacccttttggggtatgcaatgtgatgaattttgacaaatgtacactttcatgtaagcaccac

SEQ ID NO: 307932 - DNA, 470 bp, Homo sapiens
tggcagttctaggtcatggacttctgtagcaccatggccaggatatgtgggagtcaataaggaaacccaggaaacatattgccatgttgctccttgacttgagatcactaggtagttcgctttcttcttctcatgtttcagtcttcttactcttacttttatattgtgtccaaggtttktgcgttttaagaaagaagaccttttttgagttgtaagaaaaaagacctggaagaaatgaggttgctccatcttgcccagaaatggaagttttcattcatgacatttttatcaaaagaaaggaaggtctgaacatgttgggggatgtttgatactacagtttttgcatgaatcagtaactgggtcaagggaagctttgcctcttcaacttgaaatgctgatctttataggaatttttgctactgcaagaaatcttatataagtgagcaagccttccataaccagagaatata

SEQ ID NO: 307933 - DNA, 602 bp, Homo sapiens
cactccttaaatatctgctgagtaaatgaacggatgagcaaatcaaactagattcagaaaagagtctcaaatgtggtcttcatttaagagattaaagtatgacacctagcaagcaactgaaaaagacttactatcaaagtcaaattatatacctattagaatatgcatacccactgcccatctgggcttgtmctggtgagataaaataccactccatcaaatattgaccttatgctttgcactagatagcactgttccctgattctgccagaatagacattagcctttaaaaccttttggttttatcccttacacaaaatttgaaaaactgaaatagccaaagtcatatcgtcatatcacttcagagttttgagatcagattttaattcaaagttctagattgcatagacaaagttgttggatttttgaaaactataatattcaagaccttcatgatgcaatatgagattaactaaaaataaatataataaatcagtatcaaacaaatccaaagcacagcctatttggtagctccaagtttacagcaaggaaaaggtaagttacagagatttgttaaacttttcccctttgaatgtaaaatt

SEQ ID NO: 307934 - DNA, 602 bp, Homo sapiens
cactccttaaatatctgctgagtaaatgaacggatgagcaaatcaaactagattcagaaaagagtctcaaatgtggtcttcatttaagagattaaagtatgacacctagcaagcaactgaaaaagacttactatcaaagtcaaattatatacctattagaatatgcatacccactgcccatctgggcttgtcctggtgagataaaataccactccatcaaatattgaccttatgctttgcactagatagcactgttccctgattctgccagaatagacattagcctttaaaaccttttggttttatcccttacacaaaatttgaaaaactgaaatagccaaagtcatatcgtcatatcacttcagagttttgagatcagattttaattcaaagttctagattgcayagacaaagttgttggatttttgaaaactataatattcaagaccttcatgatgcaatatgagattaactaaaaataaatataataaatcagtatcaaacaaatccaaagcacagcctatttggtagctccaagtttacagcaaggaaaaggtaagttacagagatttgttaaacttttcccctttgaatgtaaaatt

SEQ ID NO: 307935 - DNA, 602 bp, Homo sapiens
cactccttaaatatctgctgagtaaatgaacggatgagcaaatcaaactagattcagaaaagagtctcaaatgtggtcttcatttaagagattaaagtatgacacctagcaagcaactgaaaaagacttactatcaaagtcaaattatatacctattagaatatgcatacccactgcccatctgggcttgtcctggtgagataaaataccactccatcaaatattgaccttatgctttgcactagatagcactgttccctgattctgccagaatagacattagcctttaaaaccttttggttttatcccttacacaaaatttgaaaaactgaaatagccaaagtcatatcgtcatatcacttcagagttttgagatcagattttaattcaaagttctagattgcatagacaaagttgttggatttttgaaaactataatattcaagaccttcatgatgcaatatgagattaacyaaaaataaatataataaatcagtatcaaacaaatccaaagcacagcctatttggtagctccaagtttacagcaaggaaaaggtaagttacagagatttgttaaacttttcccctttgaatgtaaaatt

SEQ ID NO: 307936 - DNA, 511 bp, Homo sapiens
taattataagcaaaatgtaaatcttcataattatagtcacagcataccactccaaggatataagaataaaggtaatttatttttattattaaaattcaagtgccagaaaattatttatacttgcagcactgaattagtggtgtttcctaaacactktcagaggaataatgctttcatttcagattaatttagaaatttattacctttgattggtgatggtttcttttcaagaaaacaaacttttgttgttctcagaggaaatggctgtccaacctcaaagtctctgaccaactttgatacggtattccagagatattcataatctttcataatggtatctcccaaattcaaatgtaggcctacataacaattaaaaacactaaatactagaagccatccactcccacataaagaatcattagtcacattttgagtaaattcatggaattctgaaatactttccacatagtgaaatttttagtgagttccacactggacataaatgaaaatg

SEQ ID NO: 307937 - DNA, 562 bp, Homo sapiens
tatgttaactcatttagtactcacaacartcctatgaagaaggcactattaatattaatatttctattaatatccttattgccagattcagtgacctgcccaagagcccacagtttatatgtggcagagtctggcctgcaggcccctgttctcaaatcctgtttttaactgacatatgttgcttctctttttacattaatgcaagttactggggcctaggaatatattactttttaaaatagtgtcactttcatcatagcacttcatttttaaaaaactcttgttcaaagatcacttagaaataatgttgcctcttaaatctctctgataacctacattttatgtcaaccaaaacaaaaccaaagaaaaaatatctccaaatatgttgactatatttggaattagaaatgagaattataacccaagatgcacagctatggcaagccacatatgtatctgaagggaggaagataaaaggaagcttgtactggcaaaaggggaagttcacataagctgcttagaaacacagttctttggttttggagacgcaaaaccagagctg

SEQ ID NO: 307938 - DNA, 498 bp, Homo sapiens
actgattacaaaaagaacaaattattctataaaacaaatgaactgccctttgaattaaaattctacagctgctaagtcattttaggtaagatctatttagtggttttacattactaaattttatcagaatcacacagtttacctttgattgataaaactcgaagtgtgcatcttggaactttggtggaaaataycttcttccaaagagatgtgccaatactaatactagcttttccataacgtcttgagaaaaatgttttgagcctatataaaacaaagtgtcttcttgtaaatatgaaagggtataattctattttttcatgtttaaatggaatgtcatattacatttaatttcatggaaactaaaaatttatgacaaacatagcaattgaagaattaccatatatccgctaatagtttttatctgtgccttctttttcatccttgctacctataccctaatttagatcctaatgatcccacacaaattgccttatt

SEQ ID NO: 307939 - DNA, 498 bp, Homo sapiens
actgattacaaaaagaacaaattattctataaaacaaatgaactgccctttgaattaaaattctacagctgctaagtcattttaggtaagatctatttagtggttttacattactaaattttatcagaatcacacagtttacctttgattgataaaactcgaagtgtgcatcttggaactttggtggaaaataccttcttccaaagagatgtgccaatactaatactagcttttccataacgtcttgagaaaaatgttttgagcctatataaaacaaagtgwcttcttgtaaatatgaaagggtataattctattttttcatgtttaaatggaatgtcatattacatttaatttcatggaaactaaaaatttatgacaaacatagcaattgaagaattaccatatatccgctaatagtttttatctgtgccttctttttcatccttgctacctataccctaatttagatcctaatgatcccacacaaattgccttatt

SEQ ID NO: 307940 - DNA, 341 bp, Homo sapiens
atgttttccaacttatttctggattcaggagagtgttaattgcagccaagatgtctagagctgatttaggtctctctctagcagtgtgaccttggctgaattacttcaccttctagatattttgtcaagtgtggataatggtatctgctcttaaatgtagttaatcaaagaaaatgtgcaaaagaactatgctctctccacaggaaaagttctagtctatatcaaacaagagattattaagacactgatattttcaagctgagttaagggtaatygaattttccacagtaaatgtacatgtttgatgattctgttattggtgggctgattcttgatatgtt

SEQ ID NO: 307941 - DNA, 609 bp, Homo sapiens
  misc_feature (1)...(609): n = A,T,C or G
nnnnnnnnnnnnnnnnnnnnnnnnnnnnnnnnnntgagtgcttaaattaacctattctcccatcagtactgtaagactgttaggtccccacatctttaccaacatacgtagacttttcatcctttttaatatctgcctgtctcatgagtacagaatggtataatttgcattagtatgattactagtgagactgaagatcttttcatatgttcattggccattcatatttcctgctctgtaaattgcttaatcacatcctttgctgatttttctttccattgggttgtttcttccttcttgacttctggaattctttattcatgctggataccaatctttgtcagttatatcagctataaataccttctctgaggcatgtcttttcactgtttactggattttctgagatgtgaacattttaaattttaatatgactatattaaatgtgccattaatccttttcccccttatgtttgtatcctgttgttttttccaaaaagttcttctttagctaaggaagaatctaagattctttttttttwaaatcagagttttagagtctttcttttttgcacttaggtttttaacccaactacaattgattcttat

SEQ ID NO: 307942 - DNA, 576 bp, Homo sapiens
gctcagttctgaccaggaggcatggccaataccaggtcactatatactttttggtatatctgcccaaaacaaaatctcttctttctctaagacttccatccaaactcctgggtggggtggcttggaacactgtcacctagctgattatccccagactgggacaataagattctcatgatacagtttgagataaattccctatacaatcagttctttgaattaaaagtaagagtaaggccaggtgtggtggctcacgcctataattctaacactctgggaggccaaggagggaggacagcttgagcccaggatttcaaaaccagcctgggcaacatggtgtgaactcatctctacawaaaatgtaaataaataaaaataaaaaaaattagccaggaatagtggcacatgcctgtggtcccagctacttgggaggctgaggtgggaagactgcttgagaccaggaggtcaaggctgcaataagctgtgaccatgccactgtactccagcctaagcgaatgagcaagaacctgtctgcaaaagaaacaaacaaaaaaagtaagataatggtaagaaaaa

SEQ ID NO: 307943 - DNA, 606 bp, Homo sapiens
tggtgtatgcagatatgaagtgccattcagttataaagaattattattaatgcctttacttgttaagaagaaatttattaatagataaaaggcattaattcaaattttcattgacagctttttaagaaacgttacccataaactttataacttcccaccctccaggcttctaaagtgctaagcaaaactacttaataaaaataaccaatatttattatactcaaatataacttttagatagtccagatttatagcttagaattatatttatgcatacctgtacattttataatatactgagaccttgtataatcaatgtatgcagtaatatgtttgctattttacattaatgtaagtttttagctgttacaactagtttatgactttttttgctcagtgttaagaattgttggttatctttaataaagaawgtaacccttaattataacactcaatataggacagtaggattccaaattagtattctccattctaaaacatgattcctagaaagcatattaataagggataggtaacaagtgtacatattacagacaaagactagctaaaatatagactagttatataacgtgatcagaaacaaat

SEQ ID NO: 307944 - DNA, 624 bp, Homo sapiens
cgattaggagtccagatgtcttgggtatagccgtcgccccgggaaagtgggctctagaygcaggagttggcaagccctctctgggggcacgcgtggctggggcagaggtgcagtgggcctaggagtgacaagggttcgaggcccggaggagagtctcctagctttttgcctgcccggcttttccacttgactctgcagagtcgggcccaggacattgcacctgcatggcagaggcaactgtggaagatggtgccccaagagaaagagggagatgagacaagtgcaggaagactggagaggaaagggggacagctgcccagggaagtacagtaatctgggcttttcctgcttttttgaggggggcgggcggtatttgtgagaatgaagggggacagctgagagctggggagcaaagttctgaggcaggtttccttcagctcccacccatcaaacttctgggtgtttctgacctcagctccctgcttccaatgaagaggaacctactctttaagagctgaagcacgggggaaaacgaattcttagaccccctggaaaccactcccctgctgggcctaaagtcagttccctagagaagggagcccgggagaccctctgggcaccccg

SEQ ID NO: 307945 - DNA, 629 bp, Homo sapiens
ttgaccttcccagcctcctgaactgtgagaaataaatttctgttgtttataagtgctattgtttgtccccaccaaaagtcacattggaagtttaattgccagtgtggcagtgttgggaggtagagcctagtgggaggtgtttgggttatcrgggtagattcctcatgaatagattaatgcctgttaatctttgaagtaagtgactgagttctcactctctcgggaatggatttgttctctcaagaatgagttgttatgaagtgacttgtttagtctctctttgcacattccacttgcctttctgcttacccaccaagtcttgatacagcacagcacatgacatcaccaaaagctgagcagaggctggcaccatgcatttgaactttccagccaccacaatcatgagctaaaaaaacctatttttttcaaataaattacccagcctcaggtattctattataacaacacaaaatggacaaagacaataagccactcagtttatggcatcttgtgatagcagcctgaacagactaagacaatgactgacccccagtaaaaaccctgaacccaagacttagttgagttgcttgtttgataacacctcatatttgttgtcacctattgttgct

SEQ ID NO: 307946 - DNA, 573 bp, Homo sapiens
gacttttagacccatgtgttctcacttcctgctttaatttaacccagtcatgggatactagataatagaactgctacctactagcgaacagggaatctgtgcaattgctgacactttctgttgcacatggatagacacatagtgtattgagactcagttgcaaaaaaatgaacaaatagtacttgcttaaaaagggtaaattcctcatctggctcattctttgatctcttcaattttagttggtttggttcatgggtccctggctaagcgtcatattgtaaactcttagtattatcctggggagagtcattacagtagtttccctgttacactgtatcctctcaaagagtcttaaatrtctatatgcagccctctgctgaatgctaaatggtctctctccagctggaatgataaaactccaagaaacgcatgataatgaggacaccttaacctataaatgatgtgttaagaccgaaaacccaaaacgatgattactgagagtagtgctgatgccctgttttagtaactctcacctaggtgagaacctgaccaaaaggggagaactgttaaata

SEQ ID NO: 307947 - DNA, 588 bp, Homo sapiens
cagtttggaaaatgctgcttcagacctctccttggtgagcacctttccagaacaacaccgaggcaaraggaagctacctgctgccaccaaggcagcttctaccaagcaagccaccccctgccaaggccgggaaggaaggagaaattgacacttaaaagtatcgtccagtggggttgtttccactccctttccccattctggtcatagagatcaacagaggcacaccgatggtcataggagacgagggaaatttgggggccgacagggacagtgaaggagggtgcgtggctgcaggtgagccttccccgcttcaggagggaggcgggaggcattgggaaagcaagggcagagtttaaaacagcaatcaacctaattattcatgacatttcacacagcagaactttatcttcttcaggatgaaagacttcgcctaatggatctggggaaggtttgattttaatggtccttttaactaatgcttataggcagcctgatttcccctgaaaggacagtacatatttcatccacattaataccaaataaattaattatggtcatggctatcatgatgaataccagattaatgca

SEQ ID NO: 307948 - DNA, 588 bp, Homo sapiens
cagtttggaaaatgctgcttcagacctctccttggtgagcacctttccagaacaacaccgaggcaagaggaagctacctgctgccaccaaggcagcttctaccaagcaagccaccccctgccaaggccgggaaggaaggagaaattgacacttaaaagtatcgtccagtggggttgtttccactccctttccccattctggtcatagagatcaacagaggcacaccgatggtcataggagacgagggaaatttgggggccgacagggacagtgaaggagggtgcgtggctgcaggtgagccttccccgcttcaggagggaggcgggaggcattgggaragcaagggcagagtttaaaacagcaatcaacctaattattcatgacatttcacacagcagaactttatcttcttcaggatgaaagacttcgcctaatggatctggggaaggtttgattttaatggtccttttaactaatgcttataggcagcctgatttcccctgaaaggacagtacatatttcatccacattaataccaaataaattaattatggtcatggctatcatgatgaataccagattaatgca

SEQ ID NO: 307949 - DNA, 627 bp, Homo sapiens
aggtagggactactactgtgagccccattttacagataaacaaactgaggcatagagaagttaagtaacctacccaagagcacaccgccaataagtgggttcgaatacaggcagagcctggactcaaccatcacatgaaactgcctctttcttagtcatgtttccatataaagtgacgacattgaccgagcctggcttgcctcctgccagaagcaactcttgcaagcctctaaggcccttgaagcaggctgtgcaaacacagtcacagagacgcctctggatgtggacatgaacctaaaagcagctgytctgaaagttgtgggaatgttacaaccacatgccctgaagcaccaatatatcaggacagaaagagcaactctttctgttgctctttggagcaacagaggagatttgcagaactttgtcaaccaccctggagaaatctagcccaaggcctctggctcctcacccctgccccatgcagagatcaaatgaggtctagaggctgaacctctggcagtgatgggccagtgatcagaagggggacctcaacaaggggcatcctctcagctccaggatttacctgcccctcccagagtggactctccaccctccctggcctaccct

SEQ ID NO: 307950 - DNA, 627 bp, Homo sapiens
aggtagggactactactgtgagccccattttacagataaacaaactgaggcatagagaagttaagtaacctacccaagagcacaccgccaataagtgggttcgaatacaggcagagcctggactcaaccatcacatgaaactgcctctttcttagtcatgtttccatataaagtgacgacattgaccgagcctggcttgcctcctgccagaagcaactcttgcaagcctctaaggcccttgaagcaggctgtgcaaacacagtcacagagacgcctctggatgtggacatgaacctaaaagcagctgctctgaaagttgtgggaatgttacaaccacatgccctgaagcaccaatatatcaggacagaaagagcaactctttctgttgctctttggagcaacagaggagatttgcagaactttgtcaaccaccctggagaaatctagcccaaggcctctggctcctcacccctgccccatgcagagatcaaatgaggtctagargctgaacctctggcagtgatgggccagtgatcagaagggggacctcaacaaggggcatcctctcagctccaggatttacctgcccctcccagagtggactctccaccctccctggcctaccct

SEQ ID NO: 307951 - DNA, 616 bp, Homo sapiens
acacatggacaatttttaggacaggccctggtatacagtaggtgctcaagacaggcttgctattattaggagataactgtcatgcccacggaaaggcaagttaggcacccatgttcgtgggcattttcttatggagccctcataagaatccctgcagagatgtcatgactctcccgtggaggccgagtggccgcctcacacagcaattatgccagcggcttggggccatgcctgtctgccccatgcaggtactcactcagccacacccctggtctccctccaggggccatcaggggccatcaggggctggctggaatccctggagggccctggaaggtcttggtgaggaggtgacacatgagcccrccagtctatgaagggtggatagccaggaactcctttggtgtgacgccccccagtctgaagcaggagaaagtaggggacaactcaggtcaggagggttatgaagggcaagggggagcgggtttctccagcatgagctgagttcagtgcccttgcggtctgctgagcagaagaaaggctgagggaggaggggtcagggaggactgcccaggcctcctcttgcaggggagaggaggggagacccaaccaggaa

SEQ ID NO: 307952 - DNA, 616 bp, Homo sapiens
acacatggacaatttttaggacaggccctggtatacagtaggtgctcaagacaggcttgctattattaggagataactgtcatgcccacggaaaggcaagttaggcacccatgttcgtgggcattttcttatggagccctcataagaatccctgcagagatgtcatgactctcccgtggaggccgagtggccgcctcacacagcaattatgccagcggcttggggccatgcctgtctgccccatgcaggtactcactcagccacacccctggtctccctccaggggccatcaggggccatcaggggctggctggaatccctggagggccctggaaggtcttggtgaggaggtgacacatgagcccaccagtctatgaagggtggatagccaggaactcctttggtgtgacgccccccagtctgaagcaggagaaagtaggggacaactcaggtcaggagggttatgaagggcaagggggagygggtttctccagcatgagctgagttcagtgcccttgcggtctgctgagcagaagaaaggctgagggaggaggggtcagggaggactgcccaggcctcctcttgcaggggagaggaggggagacccaaccaggaa

SEQ ID NO: 307953 - DNA, 570 bp, Homo sapiens
ccccctaacatcataattaaagcaaattatactttaaagacatgtgggggtgaggtactgcagttaaacatctgtggctagacccagactgacagagggaacagggtggggagatctgagaaaagaaatccaccaaaattacagcaggaggtaggactcacctcccaagacgactttccagtcagccgctcatacagttaaccccaaagtccattttccaagggagaatccatttcattttcaccaattaaacccaacctgtccacctacccccaaaagcaatgcctcaaaatggttgacttgtgctccattttgatcagggatcctataaaattgaggactaaataaggtaaaacctcacagtggcatctaattttagttgatttcttcctaccacaracaataagagcccagctccagggcggcttctgtcctatacccagcacctgtgcttccctcccagggcgcctagaaagagagatggctccaccacggtgcagcctgctggacacacgaccgccctcctccccgcccccccgccgagtaaaacccctgtgtcgtgaattcctg

SEQ ID NO: 307954 - DNA, 547 bp, Homo sapiens
aagcacccgcggtggcagccggagaggcagagcgggctctagggacctaagacagggccgagctggacgactggtggcagggcggccggggaggccccgccgcggggaggtttgggccccctrccctgcggaactggaggcaagtgcggactccggctgcaggccgcggtctgcggggacgcgcgcggggggcctgcgtcccgccacctccgcgcacagcccctggtccccttccccagcccgggccggcgccgcccgccgcgtgactcgcgcgttccgggccgagtacgggctgtcccttggcccagcctcagccagacgcggaggagagagagcaggggctgggaagtgccggcaggaaaggaattggccaggggaaagaggaggaggaagatagatggagtcatcggttacggagcgcgctccgtccggcggagcgaagccggggaccgagagcgcgcaaggcgaagacacagcgacgcagccccgtccccggcctccggaccgcctgccccgctcggccccggctcggctccgccccgcccct

SEQ ID NO: 307955 - DNA, 547 bp, Homo sapiens
aagcacccgcggtggcagccggagaggcagagcgggctctagggacctaagacagggccgagctggacgactggtggcagggcggccggggaggccccgccgcggggaggtttgggccccctgccctgcggaactggaggcaagtgcggactccggctgcaggccgcggtctgcggggacgcgcgcggggggcctgcgtcccgccacctccgcgcacagcccctggtccccttccccagcccgggccggcgccgcccgccgcgtgactcgcgcgttccgggccgagtacgggctgtcccttggcccagcctcagccagacgcggrggagagagagcaggggctgggaagtgccggcaggaaaggaattggccaggggaaagaggaggaggaagatagatggagtcatcggttacggagcgcgctccgtccggcggagcgaagccggggaccgagagcgcgcaaggcgaagacacagcgacgcagccccgtccccggcctccggaccgcctgccccgctcggccccggctcggctccgccccgcccct

SEQ ID NO: 307956 - DNA, 571 bp, Homo sapiens
ggtcagggcctgttgcatgccaggcccaggatgcaatccctctgcccctaccaggggattgctgatccccacctgcctccacatcctgtccactctcctctgaagtctcttccctcacccaaacctccatctcttcatgcctgtcctaggttggcatgaacccgtgatctggttttttactgacctcacctccaacctaccctccgtgtcccatgagctagtacaggttctcatggcagggcttccagagaaacatcaacatattatttctctcctggtgaggttctaatgtgctccacccctcactgscctctctagccaccaaatgatcttttctttctgtggatctgattatgtcaatctctattcaacattctctgggggctctaactgactttagaagaaaatctacaaccagaaggcagttcttcatttggcccctgtccacatatccagcctcctcttacggttattttacgttaaattaagtcatagatattcataaaatatcatttctaagtaaattaaaatactgaaacattaattgctgaacataagtctaaagtatata

SEQ ID NO: 307957 - DNA, 511 bp, Homo sapiens
tgtatctacatattcttctctccctacacatatctgaacatgtttctagctagctgactgttgacacttaactcagttgataggacatgtcmtctggctcataggagaaacagcaaaggttcagtacatttaagtctttgaagattatgggaacaaaaactcagttttaagtgtcagggaattgctgtatgatttttaccacatcacttaacttctaagttttctaattattgtattgtacaactgaaagaatgatattcacacacacacacacacacactccatacccttgaacactgagagacaatagactgatcaggaggctcttacatctgcaagaaacaaaactggagactagcaggacacatagcttctgagtgatggcgtaacaagttgctatttataccccatcttccattcaccaatgtgaactaggggtctatccctgcaagagagtaattttagagaatgagcttccgggtgagctcacaggttaacactgcttgtatca

SEQ ID NO: 307958 - DNA, 511 bp, Homo sapiens
tgtatctacatattcttctctccctacacatatctgaacatgtttctagctagctgactgttgacacttaactcagttgataggacatgtcctctggctcataggagaaacagcaaaggttcagtacatttaagtctttgaagattatgggaacaaaaactcagttttaagtgtcagggaattgctgtatgatttttaccacatcacttaacttctaagttttctaattattgtattgtacaactgaaagaatgatattcacacacacacacacacacactccatacccttgaacactgagagacaatagactgatcaggaggctcttacatctgcaagaaacaaaactggagactagcaggacacatagcttctgagtgatggcgtaacaagttgctatttataccccatcttccattcaccaatgtgaactaggggtctatccctgcaagagagtaattttagagaatgagcttccgggtgagctcacagsttaacactgcttgtatca

SEQ ID NO: 307959 - DNA, 454 bp, Homo sapiens
ggtgcattaaacacttgttaaaaacaaatttgactcctaccttcttctgctatgagagctttgtctggagcagcggcccctccctgcttgtcaggtatcaagtcatgttccacctcggctcagagctctccaggggctcccgtatcatgaagagcagaagtaaaagtccttccagaggctcacaaggcctcctgtgatctgtcctcctcctagttcctttctgaccgaatttcttgctcttctcccttcattcaygctggcctgggcaccccagattccttgtcattccttgagttcatcaggtaccttcttacctcagggcctttgcacctgctacttcctctgccaggatgacctccctctgggtctcagcatgacttggcccctccctcccgtcagaccctttctcaaatgccaccttctccctgggccgcagccccattgaaccctgcac

SEQ ID NO: 307960 - DNA, 568 bp, Homo sapiens
gttaaatggtaaccgggaagtactcatcgtagttcctgataaatagcaggagtttctagaaatattacttcccaataggatgcctgcttgacagtgtcatgggaggggacacacacacccctgcgtatcctgagacacacagcacatctcttyttctagcgtgccggcgagcccaccattacagatgaacttgggacagtgggtgctttagaatggcaggcctgggagggagccacagtgggtgcctgaccatccagaggccgtgtggagctctgagcaccatgacaggctatgggaggtaccagactcatggaccattcctagatttcctcacactgcctaaccagaaggttctctctaaccaaatcacccatagtcaccagacacaggttagtatccctagtactcagcctggggctcaactcataggaagtgtttattttggatgatggagcgggtgggggtggaggtggacatggggaggtggtgggagcagcagtggcagtgatggttgagatgacaggggtgatggtgacatcagtggggatagtggaaactcatgcttttt

SEQ ID NO: 307961 - DNA, 563 bp, Homo sapiens
tcaccctctccagctcaggtgtcagctgctggggagaagtcatcactcaaggggagggagcccagacaggtggtgacgggcaggccacggagccgccctgcacaagggagatgcctgtctcttctgaatgtgccctggaagagaaggaagtcgtggttataaggggagggcgctgtgggccctgttctgcctaggccagaatgagacggagcccactttggtttcagtgggttggaggtagacccatcgcragacgaaaggtgggaagttgacttcccaccagttgagcctgcctattgtggggaggtgagctgcatcactcccgctgcctcccaaagccctcatgccaccaagcacatggttttatagaacaacaggacccagttaaatgatttgtggctgtgggacaaaggctgacagttaggacaggagcccaattcgttcttgaattccgttgtcctagaatccatcggttgggtatcttgagcgtaaacaacagaagccaactctgactaatgtaggcagggaaggaatttgttgcagggatgtcagatagttcacag

SEQ ID NO: 307962 - DNA, 451 bp, Homo sapiens
cacttacaggttctagtactaggaatacagcaggtaacaaaacaaaacgctggacctcacatagccgacatgggagtgggggaggagcagggggacagaaaataaatacctgctcagagaaaaacaaagagggaagggggagatggaggatgatggggtggggagagcggctgctttgaatggaggcagggaggcctctttgagaaggtgactgcctagtcacctgacgaaaaggaaggagcgagccaggcagagcaggcaggtgcagaggccctgacggtggcctgcgyggggcgtttgaggaacggcaagcaaggcggagtggaggggtttagcaggggtgatgcgggctgtggatttcattttaagagagatggggagccactggagggatgttgagcagaggaatgactagaagtagttgtaataaatctctctccacacacacatg

SEQ ID NO: 307963 - DNA, 589 bp, Homo sapiens
gctgggttcaaatcctggcttcatcactgtgaagctgcattgccaaaggcaagctatgcacatgctctcagttttctcatccatgaaatgggcataataacagtacttacctcataagattgttatgagtaaaaacgtgtgtagtgattagaacaagatctgcacatagtaagtgcaacatgactgttagttactactttatttatttttctcttctcttccagatcagaaacaaaagatctgagctctttatgcattctaataccattcattctcttataactgaggtttgtaaaatcatggtcgtcatttgaatttgcacatagctcgtattgtgtatcagtcaggatgattatgcttggtaacaaacagtctttagcagctctgtaccacataagctatttctttggttcatgtccaaggagggctggtgttggggatgatggggctctgttcataatatttattcagagaacttaaccatcagggactttatctcaacacatggtgtgtttctcacctaagctgatgctaaattctcctatgttcactcagctacccctgsctacattgtgttccctgaatgctg

SEQ ID NO: 307964 - DNA, 603 bp, Homo sapiens
accaaccatgccaggagctgggaaggaagtacttccagtggagggcacagcaaagggcaaagctctggtggtggaaacaaacatgaggaattgcatgtatgaaaagactagagtgtggtgaaccaagagaagaggggtcccaaattaggggggtgggggaaggaacacggagccaggccatgcaggatctggtgggctcttgttccaagttccttagtgtatcagttagctattgctgtgtaacaaattacccccttttagcagttttaaacaaaacacatttcaaagctcacagtttctgcaggtcaggagtctgggaaggctttctctgggtcttctgcttcagggagtgtcacaggttgcagtcaaggtgttggctgggctgtagtctctctgggttcaactggggaaggccccacttcaagctccygtggttgttggcaggattcagctcctcagggggctattgatctgagcacccccaaccctgttcctcaccatgagggtctctccaacagaatagctttcctcatcaaattgtgcaggagacaaatcgttcagggagatgacacagtctacccacaagacagaacctgaacacag

SEQ ID NO: 307965 - DNA, 546 bp, Homo sapiens
gagggagcaggcagaaccaagcctgagattggcagagtgcaacagttcggttcaggctgcttttgcagagttgcaagggtgggagatgtgtttattctgccacctgcctgcactttgtgtgactcttcaataatttatacatcatttatgtaggcagaagcattttcatccactctgggagcattcagaccactcctcccgrcacctgcctcttcaagagcatgagactggggtggggaagctgagcccttgaagttggggatggcaatggcaaattgggcaccctgggagagtggagacagagacggagaactgagggaggtctggcttagtggcctggaatgtaagtaggggaaaagctgcaggactccaggtgcctcaaagcttccccctgggtctcccccgcctcttccccagggctcctgcaaatatgctcatctgttgagcccttggctccatcccaggggatcagttttttcatcccatggctcagaggcatcaagtcggcctgtacctttggaagaaggccgagggcttagctttatg

SEQ ID NO: 307966 - DNA, 590 bp, Homo sapiens
cagcttctcagctccagtttgctcttctgtctaatatgggtgaggaagatttctgatgtggaataatggcagcccattaagagccaatgatgcagtaatgatttgtagttctctgtggcttttcagccagatgtgaaaaagctgaaccaaaatgtagagggctggtgccccctttgctttcctggtgcacgcttccaatggcggcgtgggcataaaaactcacttggcagatgggaacaccagggcggagggagttaaggggctccattaaggcccgcaggaagggagcacgggtggagctgagaaggaggggaccccagcatccacagggatgagsacccagagtgaggaggcaggtggcaggtgggtgtccttcccccaagtggattccagcctcccacttgtgaccctgtgagcaccagtgcccgcagtgacctctcagagctgaactctgcctcctgccttgctcccaagatttcagcagaattgggaccacagctgcaaggcgcacatcatcaaaggtgacatacatgcagatttagcttcagaatatttttttttccatttacggagaaatcaaggatgctgtt

SEQ ID NO: 307967 - DNA, 510 bp, Homo sapiens
aaaagaaccatacccagcacatagcagtggcacagccagcataggtattggttgaaagaacaaacaaatggtttgccacaytagctaccccacaaacctgaggtctatgtaggcatccttacagctccaggtaagagccactatcgtgccagttttgtagatgaggaagctgacgctcagagaaagtaggtagattacaggaagcaactgaccccaaaaagacttgtggctattggactctaaagcctgtgctcttggttctgctcatagttcatgtgtattagaggcattctctgtatgagatgctagaccaagcccttatgcggatttcctcctgtaagccactcaaactgtatgaggcaggtaccattattacctagtctttacaattccatcacttcccttttgccattgagagagctggtttgggtctgggagtaacttgccagcgggacacagcctgtcagtgatggagcgggagttggccacaggtgctctgacccctgcatt

SEQ ID NO: 307968 - DNA, 510 bp, Homo sapiens
aaaagaaccatacccagcacatagcagtggcacagccagcataggtattggttgaaagaacaaacaaatggtttgccacactagctaccccacaaacctgaggtctatgtaggcatccttacagctccaggtaagagccactatcgtgccagttttgtagatgaggaagctgacgctcagagaaagtaggtagattacaggaagcaactgaccccaaaaagacttgtggctattggactctaaagcctgtgctcttggttctgctcatagttcatgtgtattagaggcattctctgtatgagatgctagaccaagcccttatgcggatttcctcctgtaagccactcaaactgtatgaggcaggtaccattattacctagtctttacaattccatcacttccmttttgccattgagagagctggtttgggtctgggagtaacttgccagcgggacacagcctgtcagtgatggagcgggagttggccacaggtgctctgacccctgcatt

SEQ ID NO: 307969 - DNA, 510 bp, Homo sapiens
aaaagaaccatacccagcacatagcagtggcacagccagcataggtattggttgaaagaacaaacaaatggtttgccacactagctaccccacaaacctgaggtctatgtaggcatccttacagctccaggtaagagccactatcgtgccagttttgtagatgaggaagctgacgctcagagaaagtaggtagattacaggaagcaactgaccccaaaaagacttgtggctattggactctaaagcctgtgctcttggttctgctcatagttcatgtgtattagaggcattctctgtatgagatgctagaccaagcccttatgcggatttcctcctgtaagccactcaaactgtatgaggcaggtaccattattacctagtctttacaattccatcacttcccttttgccattgagagagctggtttgggtctgggagtaacttgccagsgggacacagcctgtcagtgatggagcgggagttggccacaggtgctctgacccctgcatt

SEQ ID NO: 307970 - DNA, 593 bp, Homo sapiens
ttttaaagggaagcacttaggcagagccactcaaatcagattggagacactgaatttggaaactgtccagcgtctaacaggaggccagccgtctgattctttagggagcgaatgacctcagcagagggtggatgttatcgctggaaaggatgagaggaggtgagggggaatgcctcattggaagtgacacctaattaccagtttcccatcctgtttccaggccctgcaaaatagagtccttctgggtatctggtctacctttcacctgcaaatgcaagacatacatacaaagagggtgaatctgggctgtttcctcagcttaatcacgagctcctgtaagggcagaaaatgaccctcgcattgtgacgctccatttccccctcctgcttagtcattcgggagctgttgatgggtgacacttgcctyggaattgcggtgactttcaatacccctaagtgtagaatttaaggaggaaggcctctgcacagaatgataatgcatattggggtggagggcgggggattgctgcctggaaaacaggaatatatcttagatgagaaagcacctgctgagactctcagaaaagaacttgg

SEQ ID NO: 307971 - DNA, 609 bp, Homo sapiens
ccatttgaaccatttgccctcacaagccttaagtcagtcattttttttcagactggagaaattgcagaagaaacttcatccgttagcaaaacataggcgcggaggcagcagctgtgcgcttccggatgtccttcaagggctctgctgcaggatgactctaacctggagatgcacaggcaaacatttagtcaataactcaagcctgacttaacttgcatcaagctgccgagcrcgcagaagctataaacagccctgcctggatggacagcccttcctttgtcgccgggattgggtctgagaggctccaagttggaaagaaaatgccagcctgtttcttctctggcttaaggacagtcagatcaaccactgacgtcagaggagaattccctccccccaagttatccggcccaagaggtcgtgccaggtaatgggacacagagcagagcaatgctggcgtggtccaggggaactgccttgcctgggcctgcactctaaggctgagcaaagattttaaaagaagagaaaacagcctgactctattatccattcatggaaagaagctcagatcatcaaagataatcaaaacccaccaaccaaacagcacactca

SEQ ID NO: 307972 - DNA, 546 bp, Homo sapiens
cacctggccacaggtggggctggaaaaccaaagcctctcctgcaggagcacagcagccaggttaggcttaaggygtggagcagtagagaacctccactgaggaccagacattctgcaaagagaatgcactgagctggacaggctcagcaacgtctcccaagggccaaactcgggtcatgccactcctctcccagcaggctggtaatgcttctcttgaagacatgcccaacatatggcgagtgaatggatttctccctccaccatccctggcccaatccactctctgttccaacaaggactgctacatctgatggatgttttatggacccctgtgggcaaggactgtttctcattgatgtgggtgtccccagaacctatcatggggcatgacatgtgccatcttcctcctccccctcttccatcattgagtgcctagcatgtgctaagcagtgtactaattcctccacaggaatgatctcattcgatcatcatcactttctcttatgtggcaggtaccaatactatccccattgaaaggataagtca

SEQ ID NO: 307973 - DNA, 546 bp, Homo sapiens
cacctggccacaggtggggctggaaaaccaaagcctctcctgcaggagcacagcagccaggttaggcttaaggcgtggagcagtagagaacctccactgaggaccagacattctgcaaagagaatgcactgagctggacaggctcagcaacgtctcccaagggccaaactcgggtcatgccactcctctcccrgcaggctggtaatgcttctcttgaagacatgcccaacatatggcgagtgaatggatttctccctccaccatccctggcccaatccactctctgttccaacaaggactgctacatctgatggatgttttatggacccctgtgggcaaggactgtttctcattgatgtgggtgtccccagaacctatcatggggcatgacatgtgccatcttcctcctccccctcttccatcattgagtgcctagcatgtgctaagcagtgtactaattcctccacaggaatgatctcattcgatcatcatcactttctcttatgtggcaggtaccaatactatccccattgaaaggataagtca

SEQ ID NO: 307974 - DNA, 546 bp, Homo sapiens
cacctggccacaggtggggctggaaaaccaaagcctctcctgcaggagcacagcagccaggttaggcttaaggcgtggagcagtagagaacctccactgaggaccagacattctgcaaagagaatgcactgagctggacaggctcagcaacgtctcccaagggccaaactcgggtcatgccactcctctcccagcaggctggtaatgcttctcttgaagacatgcccaacatatggcragtgaatggatttctccctccaccatccctggcccaatccactctctgttccaacaaggactgctacatctgatggatgttttatggacccctgtgggcaaggactgtttctcattgatgtgggtgtccccagaacctatcatggggcatgacatgtgccatcttcctcctccccctcttccatcattgagtgcctagcatgtgctaagcagtgtactaattcctccacaggaatgatctcattcgatcatcatcactttctcttatgtggcaggtaccaatactatccccattgaaaggataagtca

SEQ ID NO: 307975 - DNA, 602 bp, Homo sapiens
agattctagacacatccgggggtgtgggatagaaggcaggtgtccttgaatcatgacctagcctcagcatccctctaaattagttgcatgtaacccaatctcccccacctaggcttcaytgtgtttcaatctttttgaataaagcgggccatctttctttctgtgtgtgaccttggagttacacataagcagaatagatgtgcatctattctccatctaacaggctcaacagacaatgcactattcctcctgtcaacagacattattgacactagagtcataaaatgcatctccaagatggggaagtcagttcaagaaagagtatctgtatcacgagttttctctttacatttccaactccttggctctaggggtgttgccgctacccctcatcttctaggttcaggtgctcagctcctgtttgtagccccaggacaagacgtttagaaatgcagaatctctccctatcccacaacagaattgcacctgcataaccagtgccccaggtagatctggctgagaagctatgatgaagggcaaggtttgccaaatgttcctggggacaagttctccagcgacactggtttaaaataggaattccg

SEQ ID NO: 307976 - DNA, 489 bp, Homo sapiens
agttcaagaaagagtatctgtatcacgagttttctctttacatttccaactccttggctctaggggtgttgccgctacccctcatcttctaggttcaggtgctcagctcctgtttgtagccccaggacaagacgtttagaaatgcagaatctctccctatcccacaacagaattgcacctgcataaccagtgccccaggtagatctggctgagaagctatgatgaagggcaaggtttgccaaatgttcmtggggacaagttctccagcgacactggtttaaaataggaattccgaaaaggtctgattaatgagtttggggtggaacccaggaaactgggcatttatttaaaacaatctctcctgtgattcttagaaagtaaatttataatggggaggggtcaaagataagcatctgaaaacaattttcacgcaatgtggagctttgagacagcgttagtcttcaggttcttttgttgaatggaatttgt

SEQ ID NO: 307977 - DNA, 586 bp, Homo sapiens
cctcagccttgacatgaatatcacctagaaagaaggaacacagcccttcataaggcagacaatttattgttgaactgttccagttattataaattatcttcattataatttatatatacctatcccagattagtcttctggaagaacaaagaaaaccagtcacttaaatttatttatttatgtatttatttatttatgttaaatgtgtcacttcttcatatatttgaaggcaaataacttatcctacccaagacttctcgtctccagtttaaacrtaaattaacccttcaatgcttcacaaactgcatgttttgcaaaattcttataggacatcttcctcacatggacatatgctagtttcccactggaactcatatattcaacttttagctattcataaataccatatttctataacaacattcagttgtgtgggcaatcacttgaagatgcgtctgaaatggaatgaagtgtttcttcattgttgttacaaggaaataagtgaactttgcattttctccctagggttagcctttaaataaagaactagaccagaaaatagatagtgattctagttttattcttg

SEQ ID NO: 307978 - DNA, 560 bp, Homo sapiens
tagcatatcatgttttttaagaacaccaaaatagggcaacagaaagccaaatcagaaaataatttagaattaacaaagcaagatgagagcttgtttaattatattattgattttccttttaaatcagtatttatctcctttttcctaaagacaaagttaaakgtaggttgtgctgtccaaactgaacttgtcaccctattcctaatctagctcatacctactctaatttgactccaagcttgactccagcttttgttgatttaatattattttgtttgcaacagaagtggaaaatgaataaaagagaaaagaaatagatgctttataactatctttcttctagaagagttgagtagaactttattggttctgatgccatcttttgtgacttttccattatctgaagggttggaggtttgttgggtggtgggagtaggatttgcaattgtatcactttaatcattataaacattagattgggtgggaagctcagcttggttgaatctgatagcctcattggctctttcataaatgcagttgatgcctccaggatcttgaga

SEQ ID NO: 307979 - DNA, 591 bp, Homo sapiens
tggaaatattttcatgatgaatcattatgaaatcaacttttcattgctttaaaaaataatagtaatcctgcttttcctaggcaaaatattttgctttgggcatttaagtagtttgttagaaatggcttattagcagattccagaacaattcctcattttttagttttctacaataagctgtgatttctttgggagcagcgaacatctttctactgaagttaatgccaaaaggaatcaacttgatatcattttggtttgttagctgayaggttggacagtgaatacatgaatcagtgggaggaaagagagcatgatatgagggccaaaagaattatttgagtcttagacaaatcgtagttggcattgaggctgctctgtttctcagctgcttggaatttcaatgttctcatctgtaaaatgtatataattaaggaactaacacctagcacaaaaatggttgtgaatataaaatgagataatgtatgtaaaacacttactatagtaccagaacatagcaattttttgatgattgtgatctattatctatctttctgttacctatctaccagtgatgatgattattatcatcat

SEQ ID NO: 307980 - DNA, 591 bp, Homo sapiens
tggaaatattttcatgatgaatcattatgaaatcaacttttcattgctttaaaaaataatagtaatcctgcttttcctaggcaaaatattttgctttgggcatttaagtagtttgttagaaatggcttattagcagattccagaacaattcctcattttttagttttctacaataagctgtgatttctttgggagcagcgaacatctttctactgaagttaatgccaaaaggaatcaacttgatatcattttggtttgttagctgacaggttggacagtgaatacatgaatcagtgggaggaaagagagcatgatatgagggccaaaagaattatttgagtcttagacaaatcgtagttggcattgaggctgctctgtttctcagctgcttggaatttcaatgttctcatctgtaaaatgtatataattaaggaactaacacctagcacaaaaatggttgtgaatataaaatgagataatgtatgtaaaacacttactatagtaccagaacatagcaatttttygatgattgtgatctattatctatctttctgttacctatctaccagtgatgatgattattatcatcat

SEQ ID NO: 307981 - DNA, 614 bp, Homo sapiens
agagggacaactgaagtataaggcagacagatcaagacctggggtatcccatgggtataaaaattgtctatcagaagagaaaagactaggcctgaagagatctcataatctgaagatgtttgctgtagaatgtttccctgtgacattaaggacatataccttagtaaagaataagtcagcagtaaagtatggatacatcaaaccatgagtstgttttggaaaagagctgtttcttttccttctttgtcccttgtaagaagcaaaatgttggatacaggataaatattcagcaaatttgttgaactgaacagaaattatgagttactttttgagcagaaatgacattgtaactataatttatctgaaacgccatgattaaatttctttgggcattgaacatttcacactggtaatttatttgtcatgcaaatcagcaaatgcatattgtttcaacagtacaatttaaaaactcagatcaccaaggtaacttgaaaaaatatgataatcagtagaggcctgaaacataatttcttttagcaccttcagaaaagtcaaggattagaatatgtcatacaggtgtgaagattttacatgaacacacacagaatattagt

SEQ ID NO: 307982 - DNA, 590 bp, Homo sapiens
ttgttgggaattcagggtagaattctcattttaaatggaaatgttattcatcaaaataaatatgagacatacagttggtctttggaagtgagcaaagaatgttactaagggccgcatacatacaatgggtgggttttagagtctactatagggtaaatacgtggatagtctccctgcagccatatttgcatatacaggaaaattaattctaaacaccaaaagcttgtaaatgaggtatgaagagggacaacattgaggcattgcagaatctacatttttatgtgtgtatatattctaataatgaagtcatgcgaaaaggagggaagagtttaagagctaaaatwtataattaattttataacatgatattgaattatacatttgaaaaagtgtgcaaattttaagtttagtgcttaacactttttcacaaagtaaacaaccatgtaatcagccttcagatttttagaccttgataattaaccacatcacagaagcctctctcacaccttcattgagtcatcccaatagcaactactgttctaacctctacatccattgattatctttgactgtaaaattcacgtaaatga

SEQ ID NO: 307983 - DNA, 590 bp, Homo sapiens
ttgttgggaattcagggtagaattctcattttaaatggaaatgttattcatcaaaataaatatgagacatacagttggtctttggaagtgagcaaagaatgttactaagggccgcatacatacaatgggtgggttttagagtctactatagggtaaatacgtggatagtctccctgcagccatatttgcatatacaggaaaattaattctaaacaccaaaagcttgtaaatgaggtatgaagagggacaacattgaggcattgcagaatctacatttttatgtgtgtatatattctaataatgaagtcatgcgaaaaggagggaagagtttaagagctaaaatttataattaattttataacatgatattgaattatacatttgaaaaagtgtgcaaattttaagtttagtgcttaacactttttcacaaagtaaacaaccatgtaatcagccttcagatttttagaccttgatmattaaccacatcacagaagcctctctcacaccttcattgagtcatcccaatagcaactactgttctaacctctacatccattgattatctttgactgtaaaattcacgtaaatga

SEQ ID NO: 307984 - DNA, 406 bp, Homo sapiens
cttccctgtgatgatgtgtaaaatagaaaataattttaattaactagtggatttgactgagaaaacttccaatatggaatatgaaataagatgattatttgatgtattttagctaacatatggatagagagaagtgagccaacaagaaattgtcgggttttaaagcaactaaaatttataggaattataaaggagccaggatttgttrggttattaaaaacaaagaacaaaaaacaaaaatgcaaaatcatgtgataaagagccactgggcaaaaataaaacacagagtacttgcagaataaatataaagccaaggttattattgcagaaatcctttgtaatactttagaactatattaggtggtacctcgtagaacctttaaaatagactgaggccttctaagga

SEQ ID NO: 307985 - DNA, 406 bp, Homo sapiens
cttccctgtgatgatgtgtaaaatagaaaataattttaattaactagtggatttgactgagaaaacttccaatatggaatatgaaataagatgattatttgatgtattttagctaacatatggatagagagaagtgagccaacaagaaattgtcgggttttaaagcaactaaaatttataggaattataaaggagccaggatttgttgggttattaaaaacaaagaacaaaaaacaaaaatgcaaaatcatgtgataamgagccactgggcaaaaataaaacacagagtacttgcagaataaatataaagccaaggttattattgcagaaatcctttgtaatactttagaactatattaggtggtacctcgtagaacctttaaaatagactgaggccttctaagga

SEQ ID NO: 307986 - DNA, 583 bp, Homo sapiens
tttggtttttcactgtaggtctcaatgggctaggaaatgtccctttgtagattctacaaaaagagtgcttccaatctggtgaatcaaatcacagggtccattctgtgagatgaatccccatatcacaaagcattttcccagaaagcatgtttacacttttaatgtgggaccctcgaattctcacaataggaatcaatgggatcagagaagtccctttgtagcttctccaaaaagagtgtttccaatcttgtgaatgaaaacacaggttccattctgtgagatgaatcctaacatcatgaagcattttcacagatagctcgtttctagtttttatcacaggatattcrgtttttcactataggcctcaatgagctcagaaatgtcccaagtggataatacaaaaaaagtgtccaacctggtgaatcaattcataggttatgctctgtgagatgaacccacaaataacaaagcattttcaaagatatctggttttagtttttatcaagggatattcatttttcagtattggtctcaatgaaagcagaaatatggcttccaagactcttcaaaaagactgtttcca

SEQ ID NO: 307987 - DNA, 583 bp, Homo sapiens
aagagattctattgtattttagrtgcattaggaacatattgtagactatcaagcagagtgtgaaatgtcctgatttatatttttaagaagttttggaaaatgatagtggagatgtttgcacaacatcacagtgacaacgattatacgcttaaaatgtataaaatggaaaattgtatgtgttttaccacaattttaaaaacatgaaagaaatatggaataccgttaagatggagaaggctcctcattaagtcctcatgaacaccataatgtattaggaattgttttcacttgtggaagctgagaaacagagatattctgagactccataagttgaaagatgttctgaagaaagcttagagagaagctgtcccttttacccctaaatttaaaaatgcaatggtttccaaactcatgcccctctgcctcctcattgctcaattttgacatttaaataaaatttgcttttcattttgaggtgtcagatatgaattgtcttgtttcaactatgcatgaaaattcccaccaacagaaatattaacaattcttatgatagtgaaattatgccatatatagcagcaattat

SEQ ID NO: 307988 - DNA, 583 bp, Homo sapiens
aagagattctattgtattttaggtgcattaggaayatattgtagactatcaagcagagtgtgaaatgtcctgatttatatttttaagaagttttggaaaatgatagtggagatgtttgcacaacatcacagtgacaacgattatacgcttaaaatgtataaaatggaaaattgtatgtgttttaccacaattttaaaaacatgaaagaaatatggaataccgttaagatggagaaggctcctcattaagtcctcatgaacaccataatgtattaggaattgttttcacttgtggaagctgagaaacagagatattctgagactccataagttgaaagatgttctgaagaaagcttagagagaagctgtcccttttacccctaaatttaaaaatgcaatggtttccaaactcatgcccctctgcctcctcattgctcaattttgacatttaaataaaatttgcttttcattttgaggtgtcagatatgaattgtcttgtttcaactatgcatgaaaattcccaccaacagaaatattaacaattcttatgatagtgaaattatgccatatatagcagcaattat

SEQ ID NO: 307989 - DNA, 583 bp, Homo sapiens
aagagattctattgtattttaggtgcattaggaacatattgtagactatcaagcagagtgtgaaatgtcctgatttatatttttaagaagttttggaaaatgatagtggagatgtttgcacaacatcacagtgacaacgattatacgcttaaaatgtataaaatggaaaattgtatgtgttttaccacaattttaaaaacatgaaagaaatatggaataccgttaagatggagaaggctcctcattaagtcctcatgaacaccataatgtattaggaattgttttcacttgtggaagctgagaaacagagatattctgagactccataagttgaaagatgttctgaagaaagcttagagagaagctgtcccttttacccctaaatttaaaaatgcaatggtttccaaactcatgcccctctgcctcctcattgctcaattttgacatttaaataaaatttgcttttcattttgaggtgtcagatatgaattgtcttgtttcaactatgcatgaaaattcccaccaacagaaatattaacaattcttatgatagtgmaattatgccatatatagcagcaattat

SEQ ID NO: 307990 - DNA, 415 bp, Homo sapiens
atgactatatggcttagtgtaaaatgaatggacttaaagccaagttacttgatatcttaaacmacactggaacattgaatatttaatttgtttatgccaggagactcttggacagaaatcccttttataagactgaaataagcttgtcatataagtaataatgttttcctctgttttagggaaaaataagatatgtaaataaaaatggcttctaatatttctcagtaaggtgaatttgaacataacattaaatgcttgtataattccaaaaaaaaccccaaaatttaaagatcttgtcagcttgtcattcagcatttgtttaacatgccaagtaaaactgcatccaacgaagactgaaattttgatattaccactgcctcctctatagtctacagaaatgagaagggccagccat

SEQ ID NO: 307991 - DNA, 415 bp, Homo sapiens
atgactatatggcttagtgtaaaatgaatggacttaaagccaagttacttgatatcttaaaccacactggaacattgaatatttaatttgtttatgccaggagactcttggacagaaatcccttttataagactgaaataagcttgtcatataagtaataatgttttcctctgttttagggaaaaataagatatgtaaataaaaatggcttctaatatttctcagtaaggtgaatttgaacataacattaaatgcttgyataattccaaaaaaaaccccaaaatttaaagatcttgtcagcttgtcattcagcatttgtttaacatgccaagtaaaactgcatccaacgaagactgaaattttgatattaccactgcctcctctatagtctacagaaatgagaagggccagccat

SEQ ID NO: 307992 - DNA, 572 bp, Homo sapiens
tagttttgaacttacctggaagatggatggtggtaaattggccttttccctgagggcaagtgaaaggttgaacaattttayctcaaagaattaaaaaatgtgtctaagccataactctaccgtgaaggtggcgtatgcctttcaaagtatcatttgctagattatttctgacttgagtttttaattttttcaaccatttactgatttactactttctaggttagagacacaggatataaaataaaagccaatgaatttccattatatataaggaaatattcaagatgggaatgagaacaggatatagagtgaaatacattcactaatttcatgcaattaggtaaatgttaaaaataatttatttagtagcactctgaataggaagatgtttgtttgtttgttggtttgtttaaagaaaggagtcagtaagtttgtgttaaggtattgagaatgcttttcattggatgcaatattcaacttgatcaactaggatagctagaatattttcttttcagagagagctgtccatggtgacttcctcatgtaaacagtgtttatgccaagttccagaa

SEQ ID NO: 307993 - DNA, 527 bp, Homo sapiens
catcctaatgaatttgtttgttggttatttacacatccccgtgcagcctccatgatagcattgyttttttctcatatttcaccctgtagttgtctacttttaaaactaactcagggtagaaaagtttcaaaaaagaagctcattaaatgggtgatataatgaatcaatcatcaattaataaaagatttacttcagaataaacttcaaaaagataatacttcactactacgggctatgaagctagtggtctttgattcaaatctggatacatgctaatggagagattttggactaatgtcttaatcactaaactttgaggtttccatttgtaaaattgaaaattttataaatcatcacataattttatgaagattagatgaaaacgtgcatgtaaagcactcaaaaaacgtcctggtacataaaaaaaaggtgtccactatttattactgtgaaaattgaatactagctaaaaacacatttggcccaatatcagcaattttctgtggattcctggcatctgtttgcat

SEQ ID NO: 307994 - DNA, 527 bp, Homo sapiens
catcctaatgaatttgtttgttggttatttacacatccccgtgcagcctccatgatagcattgtttttttctcatatttcaccctgtagttgtctacttttaaaactaactcagggtagaaaagtttcaaaaaagaagctcattaaatgggtgatataatgaatcaatcatcaattaataaaagatttacttcagaataaacttcaaaaagataatacttcactactacgggctatgaagctagtggtctttgattcaaatctggatacawgctaatggagagattttggactaatgtcttaatcactaaactttgaggtttccatttgtaaaattgaaaattttataaatcatcacataattttatgaagattagatgaaaacgtgcatgtaaagcactcaaaaaacgtcctggtacataaaaaaaaggtgtccactatttattactgtgaaaattgaatactagctaaaaacacatttggcccaatatcagcaattttctgtggattcctggcatctgtttgcat

SEQ ID NO: 307995 - DNA, 527 bp, Homo sapiens
catcctaatgaatttgtttgttggttatttacacatccccgtgcagcctccatgatagcattgtttttttctcatatttcaccctgtagttgtctacttttaaaactaactcagggtagaaaagtttcaaaaaagaagctcattaaatgggtgatataatgaatcaatcatcaattaataaaagatttacttcagaataaacttcaaaaagataatacttcactactacgggctatgaagctagtggtctttgattcaaatctggatacatgctaatggagagattttggactaatgtcttaatcactaaactttgaggtttccatttgtaaaattgaaaattttataaatcatcacataattttatgaagattagatgaaaacgtgcatgtaaagcactcaaaaaacgtcctggtacataaaaaaaaggtgtccactatttattactgtgaaaattgaatactagctaaaaacacattyggcccaatatcagcaattttctgtggattcctggcatctgtttgcat

SEQ ID NO: 307996 - DNA, 574 bp, Homo sapiens
gcttaggataaaggtctccagctccatacatgttgtttgcaaaggacatgatctcattcttttttaacctgcatagtattctatggtgtatatgtaccacatctttttttacatatagtctaccaytgatgggcatttagatttactccatgtctttgttcttgtgaatagcactataatgagcatacatgtgcatgtgtcttcctggtagaacaatttatattcttttgggtatatacccagtaatgagattgctggatcaaatggtagttctgtttttaggtctttgaggaattgtcacactgttttccacaatggttgaactaattagtttcaccaacagtgtgtaagtgtttccttttctctacaagcttaccaacatctggttttattgcttttttaataatagtcattctaactggtgtaagatggcatctcattgtggttttgtgaacttggttcaaaatgattggtgatgtcaaacttattttcataggcttattgattgcatgtatgtcttcttttgaacagtgtatattcatgtcctttgcccactttattatgggttgtttgt

SEQ ID NO: 307997 - DNA, 537 bp, Homo sapiens
ctaggggctgctctatttatggagtagccattcttttattcctttacttccttaataaagttgtttttgctttacactgtggactcatcctgaattctttcttgggtgagatccaagaaccctctcttgaggtctcgactgggacccctttcctgtaacaaacaggtgtatttacaaattgttatagaatggagaaaagagcatcattaaatctatctaggtttggagggatgtcccacaatggtattgccatcttagatgaaaatgttaagattaaattagactctgccagaagaagcaaggagcrtaagggttgggggatgacattaaacactttataatgacttcagaagaatcattcaaactacaattcttacaagtgttagttaaatcagtcaaatcaaagatctggcttccagctaaagaaagatgtaaaaatagagaaattaaaagatgatatgcattatcaattccccctttttatggtaatattccttccaattattactagtattttacatactttgtaggactaac

SEQ ID NO: 307998 - DNA, 602 bp, Homo sapiens
gagaggactcaataatatctggataggtggtggcttagcctcttcagatgaggaatcttgataccttatgaagcagtcgcatcgtaatttacaaacatctctccatttgagacagaatgtctttgtgttacatcaaaatcgattttggtatattcttgggttttaggaaatccatcaataccattctttctttctcaagtatagaacctactaagaactagaagaaagaatagatataaaactatgttttattattggtaagtattatagatattactgggaaatgctgcttgacccatgaccacaccttatttccctaatatgatttctcatcctaaattgaatcctggccataaagctgcatattttcagggatatttaccctgtgttgtgagaaatatatattacaggcaaagagatcaaagaaggagaatgagcttaaattttctatcccattctatccctctctccagccacacactgtcacragagaaggcttaaaaagagaaagtgtgggagagtctcagcatattgtatgtacctcatgtagagtggactatttttaggctccctttaaacagcaggaaggaaaggtaaggggt

SEQ ID NO: 307999 - DNA, 598 bp, Homo sapiens
acttggggcaacgcagggccacgtcactggcactcatcaaaaaaaaccattggagactcagtagtcaaagaatcatgaagacagatgctttgctttctctcaccaggataccagttagtctgtgatacatatccagaaagtgaaacctgtgaacttgarctctattgagggaaatcgcccacccacagagaaaagcgttgactatatctggggtgaaaaattccccatgcatactctcatagacaccagagacatttctccatttcttggaaaaagttgttggcagccccttcaacacattgtcttgccttcccctgccatttaaagctcccgatgttcatttccctttggtgtctggacttctggtggcctggcttctcattgaatgtgggctccttgatggtccagactctatctcctgagcagccacatttagccccatctcacagtggattctgcccacagccttttgtcatagactctctcaggattttgaaaaactgcctgctgggaacaattcactctttttcattatattttatttctggcaagcatcactctcagcagagtctataactaaagccactggggctagtca

SEQ ID NO: 308000 - DNA, 598 bp, Homo sapiens
acttggggcaacgcagggccacgtcactggcactcatcaaaaaaaaccattggagactcagtagtcaaagaatcatgaagacagatgctttgctttctctcaccaggataccagttagtctgtgatacatatccagaaagtgaaacctgtgaacttgagctctattgagggaaatcgcccacccacagagaaaagcgttgactatatctggggtgaaaaattccccatgcatactctcatagacaccagagacatttctccatttcttggaamaagttgttggcagccccttcaacacattgtcttgccttcccctgccatttaaagctcccgatgttcatttccctttggtgtctggacttctggtggcctggcttctcattgaatgtgggctccttgatggtccagactctatctcctgagcagccacatttagccccatctcacagtggattctgcccacagccttttgtcatagactctctcaggattttgaaaaactgcctgctgggaacaattcactctttttcattatattttatttctggcaagcatcactctcagcagagtctataactaaagccactggggctagtca

SEQ ID NO: 308001 - DNA, 561 bp, Homo sapiens
caggcatctgtctcccttcttttatcctatttctccagcatggcctcagtgatccagactcaattatcttaatgaaagagcaccttcctttccacacaaacatattgccttctttagcatgtctgtcattctctactgcccctattataatagaaagacagaagcataattttaaaccagttcatttctggagcagactcatttcttagagatgaagtgggttataagcataaacctttttgtgttyttttttcttaattttttgagttcaccattgtttcactgagttactctctacctcaatccaagaatatggcatagttcttatatagtaatgagcttattcctttttatttattaattggttaaaaccactactttgttgtcatgaatttgtgtttttgaaatctaataccattttccaggcacgtgtcccaactctctctgaaaacaaaagctagatcccatgctctacaacttaagctgaacctagctgcacttatgtatttgcagtgttaaattgcttcctggggatctttgggcggagtggaggacaaaact

SEQ ID NO: 308002 - DNA, 619 bp, Homo sapiens
cagtcttacctctgctgtcaacagtcttccaatatgccttctacttgtgaatttatctttcccctacccagtccttgagagtgctagaaaagtaaaattcctacatgtctgagagccagacttaaaaagagaggagaaaggagtgtgatggttaattgtatgtatcaacttggctgggccacagtgcaagatatttggtcaaacattattctggatgtttctgagaggggtattcttggatgagatttaaatgaaattgctggacttaaagcaaagccaagtatcttytatagttttggtgggcctcattcaattagttgaaggccttattagaaggaaaagactgacctcccctaagcaagaagagactttgccagcagacaaccttcagacttcatcctcaacatcgtgtcttcctggttcaccaccagactgcgtttggattcaaactgtaactcattctgaagtatctagcctacggacctcccctactagattttggacttcctgagcctccgcagtcgcatgatccagtttcttaaaataactctctttctgtatatacacctgctattgcttctgcttctctggagaaatctgactcaaacaggggacctag

SEQ ID NO: 308003 - DNA, 590 bp, Homo sapiens
caatgcttgactgattttgacttgacattttgacagccacagtggctccgtagctgattgtcatatgaataaaatggccttaagataatcacataattttaaaatgtagagatgtatttaagacattttggaataagcatctttttgcttcttttttttttaaattagcacacacataaagagctggaggcgaattatgaaattccagaattttagcaattttaaacggcatgtgattttatcagtttccctgcttataaaatagagatagaaatggaartgcacttcagagcctcttaggagtctcaaagaggattgtaagcaggaacaagcctagccccacacctaacccaatcatgcatctgttcataaagcacacatgatagtgtcgggaatacaccaatgaagaaacctgaacccattttcaaggagcatgaaatattgttatgtatctcttctcctgagctattcttccttacctcccctagaatcatatgtcacatatcacttaagggctaatgattcccaaatttgtgctctattctagacactgctttgggctccaaaatcaatcattcatctttttgctg

SEQ ID NO: 308004 - DNA, 590 bp, Homo sapiens
caatgcttgactgattttgacttgacattttgacagccacagtggctccgtagctgattgtcatatgaataaaatggccttaagataatcacataattttaaaatgtagagatgtatttaagacattttggaataagcatctttttgcttcttttttttttaaattagcacacacataaagagctggaggcgaattatgaaattccagaattttagcaattttaaacggcatgtgattttatcagtttccctgcttataaaatagagatagaaatggaagtgcacttcagagcctcttaggagtctcaaagaggattgtaagcaggaacaagcctagccccacacctaacccaatcatgcatctgttcataaagcacacatgatagtgtcgggaatacaccaatgaagaaacctgaacccattttcaaggagcatgaaatattgttatgtatctcttctcctgagctattcttccttacctcccctagaatcatatgtcacatatcacttaagkgctaatgattcccaaatttgtgctctattctagacactgctttgggctccaaaatcaatcattcatctttttgctg

SEQ ID NO: 308005 - DNA, 565 bp, Homo sapiens
aagctagcacttggatggtcctcaagaactgttgggtagaattaaggacttgaatcagctgtcctcatatctaatcctcttctratgcctcatatgataattatgacaaggatctttcttcttagtgtgagccatattttggttcttatctcctctttttcaacttcctctttattccttctagtcctgttcttctatctctgtatttttttcaatttgctcgtgtcttctatttttttaacacttgcttctttattttccttatcttctttttttgtgttttgtaatgcactttcttttcttatttctcatcttgtcaccctatctcttattgcttgaatcatgaattgcatatccaccctctctacagaactttcaatgattgtctttcttgctctctcaaattttgttttatttaagagatcaatctctctgcaaagggatgattgaatatttcaaggcatttattatgtttttgagcttttccttttaggaaaaaagaacatgacctatgcttaaattgagtccttcctaaattaaaaaaaaaaaaaatcttgtattttct

SEQ ID NO: 308006 - DNA, 565 bp, Homo sapiens
aagctagcacttggatggtcctcaagaactgttgggtagaattaaggacttgaatcagctgtcctcatatctaatcctcttctgatgcctcatatgataattatgacaaggatctttcttcttagtgtgagycatattttggttcttatctcctctttttcaacttcctctttattccttctagtcctgttcttctatctctgtatttttttcaatttgctcgtgtcttctatttttttaacacttgcttctttattttccttatcttctttttttgtgttttgtaatgcactttcttttcttatttctcatcttgtcaccctatctcttattgcttgaatcatgaattgcatatccaccctctctacagaactttcaatgattgtctttcttgctctctcaaattttgttttatttaagagatcaatctctctgcaaagggatgattgaatatttcaaggcatttattatgtttttgagcttttccttttaggaaaaaagaacatgacctatgcttaaattgagtccttcctaaattaaaaaaaaaaaaaatcttgtattttct

SEQ ID NO: 308007 - DNA, 565 bp, Homo sapiens
aagctagcacttggatggtcctcaagaactgttgggtagaattaaggacttgaatcagctgtcctcatatctaatcctcttctgatgcctcatatgataattatgacaaggatctttcttcttagtgtgagccatattttggttcttatctcctctttttcaacttcytctttattccttctagtcctgttcttctatctctgtatttttttcaatttgctcgtgtcttctatttttttaacacttgcttctttattttccttatcttctttttttgtgttttgtaatgcactttcttttcttatttctcatcttgtcaccctatctcttattgcttgaatcatgaattgcatatccaccctctctacagaactttcaatgattgtctttcttgctctctcaaattttgttttatttaagagatcaatctctctgcaaagggatgattgaatatttcaaggcatttattatgtttttgagcttttccttttaggaaaaaagaacatgacctatgcttaaattgagtccttcctaaattaaaaaaaaaaaaaatcttgtattttct

SEQ ID NO: 308008 - DNA, 559 bp, Homo sapiens
aatgtgtttattaatttgcttgtttacagtgctaatttactgcatttattagcaaggargtacatatacaaacaactggaattccatctgtgctccccccacatacttattatacatcagtaatctgaaacagcctaagcataaatgtatcctgggcctctcttctttccttgtgactcttaatgagtcttatatttaaagactctactgtaattgcaatagtgacaaacaagaatttacttgctgagtagtagcgggaggaatctgagagacaggctccggaataggcactgtttttaaggaattaacggatacacgctccctatttaaacatatttgaggtcagcctgcctttttttgattacaggcaggaaggtcagatgcagatgccttactgcacagatggggctttttggatgggacattaatccttgcagaagctgctagagtggtgggttggaaattcaattcccttattttagtaattgcagtctgatacaagttaaacagtgaccgtatacacttcctctactgtgacctgtgaaattgttttcagtat

SEQ ID NO: 308009 - DNA, 559 bp, Homo sapiens
aatgtgtttattaatttgcttgtttacagtgctaatttactgcatttattagcaaggaagtacatatacaaacaactggaattccatctgtgctccccccacatacttattatacatcagtaatctgaaacagccwaagcataaatgtatcctgggcctctcttctttccttgtgactcttaatgagtcttatatttaaagactctactgtaattgcaatagtgacaaacaagaatttacttgctgagtagtagcgggaggaatctgagagacaggctccggaataggcactgtttttaaggaattaacggatacacgctccctatttaaacatatttgaggtcagcctgcctttttttgattacaggcaggaaggtcagatgcagatgccttactgcacagatggggctttttggatgggacattaatccttgcagaagctgctagagtggtgggttggaaattcaattcccttattttagtaattgcagtctgatacaagttaaacagtgaccgtatacacttcctctactgtgacctgtgaaattgttttcagtat

SEQ ID NO: 308010 - DNA, 559 bp, Homo sapiens
aatgtgtttattaatttgcttgtttacagtgctaatttactgcatttattagcaaggaagtacatatacaaacaactggaattccatctgtgctccccccacatacttattatacatcagtaatctgaaacagcctaagcataaatgtatcctgggcctctcttctttccttgtgactcttaatgagtcttatatttaaagactctactgtaattgcaatagtgacaaacaagaatttacttgctgagtagtagcgggaggaatctgagagacaggctccrgaataggcactgtttttaaggaattaacggatacacgctccctatttaaacatatttgaggtcagcctgcctttttttgattacaggcaggaaggtcagatgcagatgccttactgcacagatggggctttttggatgggacattaatccttgcagaagctgctagagtggtgggttggaaattcaattcccttattttagtaattgcagtctgatacaagttaaacagtgaccgtatacacttcctctactgtgacctgtgaaattgttttcagtat

SEQ ID NO: 308011 - DNA, 675 bp, Homo sapiens
aattgcagtctgatacaagttaaacagtgaccgtatacacttcctctactgtgwcctgtgaaattgttttcagtatcacctgtgggcaggaacaggcatggaaggcagactggagtattttagggggaattcaccctggaatttgttggtctctctgaggatgctgccattttaaggacacagtttctgacagatgtgcttctatggtgtgggcccatcaaagatctgaattagagggctcatcagacggttaccaccaaataagaagaattcacgagttgcctccaaatcagattagtttgtagaaaatatgcccatagactttactgtgagtaaaatgactggtgtcatagcagtttattgggtcacatagttacctcccacggtgcctacatgtggggctcatgccacctcttaattatgtttagattgtataattaatacatttggctggccacgggggtagttctgtctctttattatctccaattgtaactgacgaggcagttggaaattgtcacacatgcagccgagtagcaccctttttctcctggcctgaagtggattttgaaaaccaggtgatgcaacccatattgacctttttcgtgggccttcaaattctccatgatttcctagtatttttactccaataaccttttcccccctctaacaact

SEQ ID NO: 308012 - DNA, 675 bp, Homo sapiens
aattgcagtctgatacaagttaaacagtgaccgtatacacttcctctactgtgacctgtgaaattgttttcagtatcacctgtgggcaggaacaggcatggaaggcagactggagtattttagggggaattcaccctggaatttgttggtctctctgaggatgctgccattttaaggacacagtttctgacagatgtgcttctatggtgtgggcccatcaaagatctgaattagagggctcatcagacggttaccaccaaataagaagaattcacgagttgcctccmaatcagattagtttgtagaaaatatgcccatagactttactgtgagtaaaatgactggtgtcatagcagtttattgggtcacatagttacctcccacggtgcctacatgtggggctcatgccacctcttaattatgtttagattgtataattaatacatttggctggccacgggggtagttctgtctctttattatctccaattgtaactgacgaggcagttggaaattgtcacacatgcagccgagtagcaccctttttctcctggcctgaagtggattttgaaaaccaggtgatgcaacccatattgacctttttcgtgggccttcaaattctccatgatttcctagtatttttactccaataaccttttcccccctctaacaact

SEQ ID NO: 308013 - DNA, 675 bp, Homo sapiens
aattgcagtctgatacaagttaaacagtgaccgtatacacttcctctactgtgacctgtgaaattgttttcagtatcacctgtgggcaggaacaggcatggaaggcagactggagtattttagggggaattcaccctggaatttgttggtctctctgaggatgctgccattttaaggacacagtttctgacagatgtgcttctatggtgtgggcccatcaaagatctgaattagagggctcatcagacggttaccaccaaataagaagaattcacgagttgcctccaaatcagattagtttgtagaaaatatgcccatagactttactgtgagtaaaatgactggtgtcatagcagtttattgggtcacatagttacctcccacggtgcctacatgtggggctcatrccacctcttaattatgtttagattgtataattaatacatttggctggccacgggggtagttctgtctctttattatctccaattgtaactgacgaggcagttggaaattgtcacacatgcagccgagtagcaccctttttctcctggcctgaagtggattttgaaaaccaggtgatgcaacccatattgacctttttcgtgggccttcaaattctccatgatttcctagtatttttactccaataaccttttcccccctctaacaact

SEQ ID NO: 308014 - DNA, 675 bp, Homo sapiens
aattgcagtctgatacaagttaaacagtgaccgtatacacttcctctactgtgacctgtgaaattgttttcagtatcacctgtgggcaggaacaggcatggaaggcagactggagtattttagggggaattcaccctggaatttgttggtctctctgaggatgctgccattttaaggacacagtttctgacagatgtgcttctatggtgtgggcccatcaaagatctgaattagagggctcatcagacggttaccaccaaataagaagaattcacgagttgcctccaaatcagattagtttgtagaaaatatgcccatagactttactgtgagtaaaatgactggtgtcatagcagtttattgggtcacatagttacctcccacggtgcctacatgtggggctcatgccacctcttaattatgtttagattgtataattaatacatttggctggccacgggggtagttctgtctctttattatctccaattgtaactgacgagrcagttggaaattgtcacacatgcagccgagtagcaccctttttctcctggcctgaagtggattttgaaaaccaggtgatgcaacccatattgacctttttcgtgggccttcaaattctccatgatttcctagtatttttactccaataaccttttcccccctctaacaact

SEQ ID NO: 308015 - DNA, 551 bp, Homo sapiens
gcatgaatgggcgggcagagtggggtagtgacttcagaagagtaataagggttgaaaagcactgctgggtgagggggaaggaatgtccataacctggctccagcttcctttagaataattaacacacgttacactccttatttaaacagagatcccaagatcagataaatccataattacttatttgttgtacccacaaaatactataggggtctgcttactttctcttgaaagcatccccttggtaattattcttttatgtttctctaattgcatgctagagaaagcatctgttagatgcaactagtctttagaccactgaacacctgcagatcttgktgatgcatgcccaagttcagaaagctctgaaagaagttgctttaaagaggataggccatggcttttcagataacggagccttgaatctgtagtgtttcctaggtttccaatcctaacatttacccacttgttaaggtagtcataaaacactatcaccttcatttgctcttgcaacttttgaagctttttaaatttcccttcgcacagctggg

SEQ ID NO: 308016 - DNA, 615 bp, Homo sapiens
gggattagctctttaagatcatctatggttcacaaagggagggaggctattggtgggggctactcttttgcacgttggtctcctgctttattcacaagcatctaggaaccattctaaaattaaacatcggtcttcctggctttggtcccacctcacaggatctctcaagagataagcccagaggctacctaacactttctcaaatcatgcttaccttcacatakgccagtgctctccaagtaaaaatgggctctacactgggctagacactcgccagaggggatgcccacgccagacagctgctccacttgcagtccttcctctggcttcttacacccagtacagtgagagggtgcgggacccatacaagccaggcaggaggagtgacaggctgcaaatggaaataaaatgcagaaaataatccaaggatcaaatatatgttgcaaatctttcattaaatcaaacccacttagaaaagttcaccaaatgcagcctttcagcatattatttttctaatgttctatacaaagcacagagtgataataatgtttgtgaaaggaacagtgaggggtggtgttaaccagtcacatctcccaggtcccataagggctgtcg

SEQ ID NO: 308017 - DNA, 615 bp, Homo sapiens
gggattagctctttaagatcatctatggttcacaaagggagggaggctattggtgggggctactcttttgcacgttggtctcctgctttattcacaagcatctaggaaccattctaaaattaaacatcggtcttcctggctttggtcccacctcacaggatctctcaagagataagcccagaggctacctaacactttctcaaatcatgcttaccttcacataggccagtgctctccaagtaaaaatgggctctacactgggctagacactcgccagaggggatgcccacgycagacagctgctccacttgcagtccttcctctggcttcttacacccagtacagtgagagggtgcgggacccatacaagccaggcaggaggagtgacaggctgcaaatggaaataaaatgcagaaaataatccaaggatcaaatatatgttgcaaatctttcattaaatcaaacccacttagaaaagttcaccaaatgcagcctttcagcatattatttttctaatgttctatacaaagcacagagtgataataatgtttgtgaaaggaacagtgaggggtggtgttaaccagtcacatctcccaggtcccataagggctgtcg

SEQ ID NO: 308018 - DNA, 590 bp, Homo sapiens
acctaaagttacacccagagggaaatttgtaaatctaaataaaattattaggaagatgtaatttcttcccaaactaatctataactccaatgtaatatcaataaaaattccagttgatgagctttctttctttctttctytctctctctctctctctctctctctctctctttctttctttctttttctttctttcagacagggtctcactctgtcacccaagctggagtgcagcagcacgatcatggctcactgctgcttcaatctctcaggctcaagtgattctcctgcctcagcttccagaggaactaggactacaggcacacatcaccacacctggctaattttttttttttatttttagtagagatgaggtctcactatattgcccagcctggtctcgaactcctgagctcaagagatcctcttgccttggccttttcaaagtgctgggattataggtgtgagccaccacatccagacccagttgagttttcttaagaattcagtaaatgtgctctaaagcttatgaatagctaagtcaactttgaaaaggaaagaaagggaattttcccaatcagatattgaga

SEQ ID NO: 308019 - DNA, 590 bp, Homo sapiens
acctaaagttacacccagagggaaatttgtaaatctaaataaaattattaggaagatgtaatttcttcccaaactaatctataactccaatgtaatatcaataaaaattccagttgatgagctttctttctttctttctctctctctctctctctctctctctctctytctttctttctttctttttctttctttcagacagggtctcactctgtcacccaagctggagtgcagcagcacgatcatggctcactgctgcttcaatctctcaggctcaagtgattctcctgcctcagcttccagaggaactaggactacaggcacacatcaccacacctggctaattttttttttttatttttagtagagatgaggtctcactatattgcccagcctggtctcgaactcctgagctcaagagatcctcttgccttggccttttcaaagtgctgggattataggtgtgagccaccacatccagacccagttgagttttcttaagaattcagtaaatgtgctctaaagcttatgaatagctaagtcaactttgaaaaggaaagaaagggaattttcccaatcagatattgaga

SEQ ID NO: 308020 - DNA, 578 bp, Homo sapiens
ctgacacctacaatcccagtggtttgggaggctgaggtggaaggattgctggaggcctgaagtttgaggcttcagaaatctrtgatcatgctgctgaactccagcctgcgtgtcagagcaagaccctttcaccaagaagaaaacaaaaagtaacgagaagaaggaaaaggagggtactcatttcaatttttagcccttatcaccgtactcccgttgtgagtctagaggattttgatatctacatcatattttgagagaagcccactcaaaatttgtttttgacatgaaaagccaggaaattttgtatgatatgaaagtagggacactttatcacttttgttgtatcattaaaaagaaaaacaatagtagtatcggttgtttgaaatatacatggaaaatagaatgaataaaaattgataagtttaattattttaggtacagtttttgctgaagtcaggttggctggactttatagtcatctaaggacactttttagtgcttaagcagctcacttatgctttttcagaaatatatgtacttagccatcaactggaaaggcagtctctaaaaatgtagta

SEQ ID NO: 308021 - DNA, 578 bp, Homo sapiens
ctgacacctacaatcccagtggtttgggaggctgaggtggaaggattgctggaggcctgaagtttgaggcttcagaaatctatgatcatgctgctgaactccagcctgcgtgycagagcaagaccctttcaccaagaagaaaacaaaaagtaacgagaagaaggaaaaggagggtactcatttcaatttttagcccttatcaccgtactcccgttgtgagtctagaggattttgatatctacatcatattttgagagaagcccactcaaaatttgtttttgacatgaaaagccaggaaattttgtatgatatgaaagtagggacactttatcacttttgttgtatcattaaaaagaaaaacaatagtagtatcggttgtttgaaatatacatggaaaatagaatgaataaaaattgataagtttaattattttaggtacagtttttgctgaagtcaggttggctggactttatagtcatctaaggacactttttagtgcttaagcagctcacttatgctttttcagaaatatatgtacttagccatcaactggaaaggcagtctctaaaaatgtagta

SEQ ID NO: 308022 - DNA, 602 bp, Homo sapiens
  misc_feature (1)...(602): n = A,T,C or G
ctctttcaccaaaaacatcaaaggagattactgtgtagctggtgattagcaggtgagttaaatacaatctctaaaataacagtgggacacttggctaaaaacctgaatttccctatggttaccacagtaagagttaacagttgagtcattgtattctaaaaattaagacttttgcaggcctacttttaatgggctgtagatgtgycctaagctttcacacactaaaatacctttttcagccaagcaaattacgaaaataaacattagtagtcggcagagaacccaaattgaattgtaaagaacaattcatttttgctaacaggaaagagacagaggttcttacccgaaggtattggggtgatgagggaggtgaaacaggagaaaacaggagagcagattttaaagtaacaattttataaaacgcttattaagccaacagacattaaacatttcaaacaattaatgtgacggtatttagcagaatgaacattaagtgttagaaaagtgagcaatactatcttgagaaggcagaagtgcttttcttccatttgaaagcggacccgtcttgagatnnnnnnnnnnnnnnnnnnnnnnnnnnnnnn

SEQ ID NO: 308023 - DNA, 602 bp, Homo sapiens
  misc_feature (1)...(602): n = A,T,C or G
ctctttcaccaaaaacatcaaaggagattactgtgtagctggtgattagcaggtgagttaaatacaatctctaaaataacagtgggacacttggctaaaaacctgaatttccctatggttaccacagtaagagttaacagttgagtcattgtattctaaaaattaagacttttgcaggcctacttttaatgggctgtagatgtgccytaagctttcacacactaaaatacctttttcagccaagcaaattacgaaaataaacattagtagtcggcagagaacccaaattgaattgtaaagaacaattcatttttgctaacaggaaagagacagaggttcttacccgaaggtattggggtgatgagggaggtgaaacaggagaaaacaggagagcagattttaaagtaacaattttataaaacgcttattaagccaacagacattaaacatttcaaacaattaatgtgacggtatttagcagaatgaacattaagtgttagaaaagtgagcaatactatcttgagaaggcagaagtgcttttcttccatttgaaagcggacccgtcttgagatnnnnnnnnnnnnnnnnnnnnnnnnnnnnnn

SEQ ID NO: 308024 - DNA, 601 bp, Homo sapiens
cattggccatgaggtctagtaagtagcctggaggccacagtcttttaccctgaggcaaatgggagctgctggggagttttgagcagaagagcgctgggctctcrcttaactcatgacaggaccactttggctgctgcatgggtgagtgacagaaggaaatgagactggaggtaggcaacctggttggtggggttttgtaatggtcctggcaaagggcaatggtggcttggtctaggcaggaagtggcacatttggtaaaaagtgaacaggctctagatttattctgcaggtagcagtgactggattttgtttgattagatgaggggcaaaactctatttactaaggttttattttgccctgtgtctgcacttttttattacctaaaggaaatatatttatcttaatcttttcaaattttccctatttatgtagcccatatttttcatgttgggtattggaatgttgataaattcattatgtttttaaaaatatgccagttgatcataaaaacaactgcttctttgaccagtcagaataggattacagtagtccccacttaccacagaatatgtgccaaggcccccagtggatgcttgaaac

SEQ ID NO: 308025 - DNA, 643 bp, Homo sapiens
ttcttgcttgcttgcttttttttttccttaaataactccttatcttctcttggcctcttgccagaatccagaggctttacttgaaatctgtgcctttgcttcccaccagccacgtgccaggagggaattcatcagttcctgcaaaatctacccagctccagcccttcacatcccctcctcttggactcagacctgcttagacctccttgtccttggcagagaagttcttaaatctgcttccatgtgcttgctcctgctgctcccttggcagcgtcaatgcagctgcagctgcagccgcctttgattctttgccacccttatccttattgcttacaccttaccatgactctcttggtttgtttcagtgttgtatctcttgttaatttggtggtttttttggagaagacatagctttggcataactttgtctctaaggaattgaacttcagaggcagctcacgataacctccagaaagaggactttttctgttctttgtattttaattaagtattsctgataaaataagcatcccagtggtagtggcttgaagggagtgtctggatggtgcctgactctagagagaagttgcagtatagtttgctgtgtatggattcccccctcatctgctagaaatttctgaga

SEQ ID NO: 308026 - DNA, 422 bp, Homo sapiens
acctagtgtcaatggcaatgctgaaagacatattttatcatctgtcatttatccattctataatcacaggtcgtggattctatatccrtatcttatattcatatagaatagctagctggatagggacagaaagacagacagacagaaaaagattgagagaaagaacacaaaggtatttagaaccttgaatagttaacccagttctgtcagaagctatcctgtctaaggatttctggagaatatgtctgcacaaaagacaatgccattcaaaggagcacggcattacgtggtaaggttttggctgcaaacctcaatgcagataataatgacatttacttaataaagttgttgtgaaaattaactctctctatatatatatatgtatatatctatatgtatgcatatatgtagtatgcatatat

SEQ ID NO: 308027 - DNA, 422 bp, Homo sapiens
acctagtgtcaatggcaatgctgaaagacatattttatcatctgtcatttatccattctataatcacaggtcgtggattctatatccgtatcttatattcatatagaatagctagctggatagggacagaaagacagayagacagaaaaagattgagagaaagaacacaaaggtatttagaaccttgaatagttaacccagttctgtcagaagctatcctgtctaaggatttctggagaatatgtctgcacaaaagacaatgccattcaaaggagcacggcattacgtggtaaggttttggctgcaaacctcaatgcagataataatgacatttacttaataaagttgttgtgaaaattaactctctctatatatatatatgtatatatctatatgtatgcatatatgtagtatgcatatat

SEQ ID NO: 308028 - DNA, 542 bp, Homo sapiens
ctttctcccttgctcccggcttccatgttagactatcaacacttagatcatgttattttcaatctgtatgaaattcttagtggaaattaggctaatgtagtttctctaattgttttagtggaaatcagacaagtgtagttttatcttggggttcagaggacacttttctgaaaagtgattaatattgcatagtatgtataatttcataaaatcccatgtcatataagttttatcctttatcaaaaaaataggaatttgatgatcactttattgatgtatttatctgtttagtgggttaatggttgtaaaaacttagtcctatttcccatccactcttgtagatatatgatgttagaattctcttgtaggtacaatttttttaaaaatgaagcaaccaaaaataaataataaatattaataacattaacacacaygcacacacacacacacaaacttttttctttttattctactggttgaattcttggtagacttttatcctgtggataagtcatgatttcctggctaatgtaggatctcct

SEQ ID NO: 308029 - DNA, 642 bp, Homo sapiens
cccacttcccttgtggttcatccctctgcaataatacaccatgtagaaagctctaaactgggtaagaatatacccatgtgttgcttttccatatgtgtctttcaaaatttactccctctgaaaatgttatatttctggtatttgatgtaactgagcaaaaggatgaatttcaaaactatagttttttggggaaaaaatctctagtggattgcttcttcaaatagagctagaagatggattttttttaaggcragacaaaatcttctaattttagtcttaataaagttaaaataattatgtttcttgtctttctgtccttcctctctttctttcttcacttcctctaggttcttaccaaacactccttagtgcattaattttcttgagtgggttaaatgcttgtctggtctggtctgggtctcacctcatcacttgcatcactagttttgtttgtttatttttgactcttgtagcatttcctttcttgcttgtttggggagcagtttccagggtacttttccctcctgctgaatagcagtgatcttctctctttggcctctggcttgcctcccctagggcgggtaatggagactcccagtagctataaaatagcctggcattttaagaactttggaatggtga

SEQ ID NO: 308030 - DNA, 607 bp, Homo sapiens
ccatatttttaattaacgttctttttcttaaattaaattttattttttaagattataaaacagccctattatcggggaatctgccccgatattcacataggttcttttctattttccttaagcatcggccagcttgagaaataaagggacagagtacaaaagagagaaattttaaagctgggcttccaggggagacatcacatgtcggtaggttccgtgatgccccacaaacygtaaaaccagcaagtttttattagggagtttcaaaaggggaaggaggatacgaatagggtgtgggtcacagacatcaagtacttcacaaagtaatagaatatcacaaggcaagtggaggcagggcgaggtcacaggaccacaggaccgaggcgaaattaaaattgctaatgaagtttctggcaccattgtcattgataacatcttatcaggagacagggttttgcaatcaaccagtctgaccaaaatttattaggtgggaatttcctcttcctaataagcctgggagtgctatgggagactggggtctatttcacccctgcagtctcgaccataagagatgcacacgcccaggggggccagttcagagaccccc

SEQ ID NO: 308031 - DNA, 596 bp, Homo sapiens
cctgcctgccataatctcagaagagactccaagttcttcaatagcccgtgaaggctgcatgctgaggttgtcttccttacctggttacaaaatagaggctgacactgagctgtgaagcactgggcaaccccatttctacacagacatttggcacaccggctcagccgccagtcctccccatcctgaaacacatggccttcataggaacagggttctggaaggtcaaagaaacaaggattactagggggrtggcatttgttgatcccagggctgactgcatgggcgtgcagccagtgcagttggtcagaagcccagtgcacagaaggaggtcctgcatttggtgttcaatgctctgcagtcactaccttgaaatctctgaatttgtgttttataggtgaagttttgaggctcagctcatgtgtggtcccacctgctgctggcttcctgggatgagttctcagctaccagctcctccactccatcccaatgaatgctgtcatccccaaccctcgtgggggctggtgccaggaggttgcatgcgccctatgcaccaagtcacagggtagagcctggggtgtctgtgagggtatcctccc

SEQ ID NO: 308032 - DNA, 596 bp, Homo sapiens
cctgcctgccataatctcagaagagactccaagttcttcaatagcccgtgaaggctgcatgctgaggttgtcttccttacctggttacaaaatagaggctgacactgagctgtgaagcactgggcaaccccatttctacacagacatttggcacaccggctcagccgccagtcctccccatcctgaaacacatggccttcataggaacagggttctggaaggtcaaagaaacaaggattactagggggatggcatttgttgatcccagggctgactgcatgggcrtgcagccagtgcagttggtcagaagcccagtgcacagaaggaggtcctgcatttggtgttcaatgctctgcagtcactaccttgaaatctctgaatttgtgttttataggtgaagttttgaggctcagctcatgtgtggtcccacctgctgctggcttcctgggatgagttctcagctaccagctcctccactccatcccaatgaatgctgtcatccccaaccctcgtgggggctggtgccaggaggttgcatgcgccctatgcaccaagtcacagggtagagcctggggtgtctgtgagggtatcctccc

SEQ ID NO: 308033 - DNA, 596 bp, Homo sapiens
cctgcctgccataatctcagaagagactccaagttcttcaatagcccgtgaaggctgcatgctgaggttgtcttccttacctggttacaaaatagaggctgacactgagctgtgaagcactgggcaaccccatttctacacagacatttggcacaccggctcagccgccagtcctccccatcctgaaacacatggccttcataggaacagggttctggaaggtcaaagaaacaaggattactagggggatggcatttgttgatcccagggctgactgcatgggcgtgcagccagtgcagttggtcagaagcccagtgcacagaaggaggtcctgcatttggtgttcaatgctctgcagtcactaycttgaaatctctgaatttgtgttttataggtgaagttttgaggctcagctcatgtgtggtcccacctgctgctggcttcctgggatgagttctcagctaccagctcctccactccatcccaatgaatgctgtcatccccaaccctcgtgggggctggtgccaggaggttgcatgcgccctatgcaccaagtcacagggtagagcctggggtgtctgtgagggtatcctccc

SEQ ID NO: 308034 - DNA, 545 bp, Homo sapiens
aagaattgctgaggtatgactggggttttccacgaaaaattaaaagttctgtgactccacccctcccaagtagactggccttcttgttcttgcagcatgaataccagagtaacaatgacaataaaattgtgttttctactcctcataagagaaagtgaagacaactgttcyagatttatcttctgtataagatctaccacttcttagttattgacacttggtttgttctcaccatttcctctgcctttcatgtctcctttcctgacattgaagaaggctgtagtgataagtcaaagtgagaggctgactctttggcattaatgaaaattaaagaaagaaaattcttcttagggcagcagagacaaatagtctgatattctgggagtggtggttgtggcagaggtgagaatgtagggacatagagtagctgggaaagggttctttgggcatttaatctgtcacccacatttctctgcactggcttattcccagatacctagagatatgagtgattttttttcatgtgaaagacctctccaatgcac

SEQ ID NO: 308035 - DNA, 545 bp, Homo sapiens
aagaattgctgaggtatgactggggttttccacgaaaaattaaaagttctgtgactccacccctcccaagtagactggccttcttgttcttgcagcatgaataccagagtaacaatgacaataaaattgtgttttctactcctcataagagaaagtgaagacaactgttccagatttatcttctgtataagatctaccacttcttagttattgacacttggtttgttctcaccatttcctctgcctttcatgtctcctttcctgacattgaagaaggctgtagtgataagtcaaagtgagaggctgactctttggcattaatgaaaattaaagaaagaaaattmttcttagggcagcagagacaaatagtctgatattctgggagtggtggttgtggcagaggtgagaatgtagggacatagagtagctgggaaagggttctttgggcatttaatctgtcacccacatttctctgcactggcttattcccagatacctagagatatgagtgattttttttcatgtgaaagacctctccaatgcac

SEQ ID NO: 308036 - DNA, 545 bp, Homo sapiens
aagaattgctgaggtatgactggggttttccacgaaaaattaaaagttctgtgactccacccctcccaagtagactggccttcttgttcttgcagcatgaataccagagtaacaatgacaataaaattgtgttttctactcctcataagagaaagtgaagacaactgttccagatttatcttctgtataagatctaccacttcttagttattgacacttggtttgttctcaccatttcctctgcctttcatgtctcctttcctgacattgaagaaggctgtagtgataagtcaaagtgagaggctgactctttggcattaatgaaaattaaagaaagaaaattcttcttagggcrgcagagacaaatagtctgatattctgggagtggtggttgtggcagaggtgagaatgtagggacatagagtagctgggaaagggttctttgggcatttaatctgtcacccacatttctctgcactggcttattcccagatacctagagatatgagtgattttttttcatgtgaaagacctctccaatgcac

SEQ ID NO: 308037 - DNA, 452 bp, Homo sapiens
ctggtgtgacagccttttctgggtactggcgcttggtgggtcccaagctcttgtccggtgtctgagaagaatggggttacacagaaaattgaatgatggtgaaartggagaattttgttgagtgatgaaaacatttctcagaagagagtggagctggagaggggacgagaaggacaggtcgtctttccccaaaatcaggttgtctcttccccaaagtcaggctgtctcccctctactgactgagtctgggatctttataggcacaggataggggtggggcataccataggtagttttggaaaaagcaacattcaattggtaaaaaggcatgattcagaaagaaccaattgggagagggcaggcaaacaggaatataagtacttactttggacttttggccatgggtttcaggctgttttttgttgttgttttatggtgaaggtggggtttca

SEQ ID NO: 308038 - DNA, 518 bp, Homo sapiens
gtaaaattagctgcatgtaatacaatagaaagcagacaaacctcagatttctcctccatggcactaaattccaaaattcagtggaaaggagtccatagggtcaggatgggaagagattatagtccttccaaattttagatacccccaattgtctttcatgtatgacagcaacaagaaaatcatactcaaatgcgtaaaggctcagaagacttaccaatcatttatctttcttttttcttttttttttttttttgatacaggtcttgctctgycacccaggctggagtgcagtgacatgatcacggctcactgcagcctcaacctcccaggctcaagagatcctcccacctcagcctcccaagtagctgggactacaggcatgaaccatcatgtccggctaagttttgcattttttgtagacacagggttttgccacattgcccaggatggtctcgaactcctgggctcaagcaattcacccctgtaggcttcccaaagtgctgggatcacaagcatga

SEQ ID NO: 308039 - DNA, 494 bp, Homo sapiens
ctgtttctgtccattgaaaggctgctctcatgacttcagattgaaacactaaagatcccatgggctgtactgagattcattttcccagagatttcctagcccaaattcctattagagttgaaagcagccatactgttyggctaaatttcaaacactaaatctttttgaagagtgctgtccatgttattctctggtttaaaagtgtacactgctcaggtgatgggtgcaccaaaatctcagaaatcatcactaaagtatttctccatgtaaacaccacctgttcccaaaaaatctattgaaataaaaaattttaaaaaaacctcaaagccaaaaaataaataaataaataaataaatgcaactatttcatggctcatctttatctccaatgagataaaatgcagaccccataatctgatcctcacctatctccctggccttgacaacttggtcaacactattggacaaccccagcctcctctttcctgttctcat

SEQ ID NO: 308040 - DNA, 494 bp, Homo sapiens
ctgtttctgtccattgaaaggctgctctcatgacttcagattgaaacactaaagatcccatgggctgtactgagattcattttcccagagatttcctagcccaaattcctattagagttgaaagcagccatactgtttggctaaatttcaaacactaaatctttttgaagagtgctgtccatgttattctctggtttaaaagtgtacactgctcaggtgatgggtgcaccaaaatctcagaaatcatcactaaagtatttctccatgtaaacaccacctgttcccaaaaaatctattgaaataaaaaattttaaaaaaacctcaaagccaaaaaataaataaataaataaataaatgcaactatttcatggctcatctttatctccaatgagataaaatgcagaccccatawtctgatcctcacctatctccctggccttgacaacttggtcaacactattggacaaccccagcctcctctttcctgttctcat

SEQ ID NO: 308041 - DNA, 585 bp, Homo sapiens
tacattttcttaccaaaagactggaatgaattctcctcccctctccaccaccaaatctatcttggtctttttgaatggtggaaatatgggtgattgttttcctttcagcttgtccacccttgccaaactttccttaatgattacaaaattccttttgaaacttaaaaaataaaaataaaaaccttacattaaaaatcatgaaaatccttgaagacaggttgcaaatttttccagaattcaagacctgaaaatayatttgtactgataaacttgtgtttcccttatatttaatgatgtaatgtatataacattcttggaaggcttgatgttagcaaacatcattattatggttattattaggcaggtgcaaaagtaatcatggccttggtaatggccattacttttgcaccagccagtattatatataaatgtgtaactcattattctgggagtagtagcatactgattaaaaatataagtcacatatagtcttctgagattgcaatgtagaacagtttaggttaaaagtgctgacactttgagcaagttacttacactctctggacctcagttttatcagctata

SEQ ID NO: 308042 - DNA, 585 bp, Homo sapiens
tacattttcttaccaaaagactggaatgaattctcctcccctctccaccaccaaatctatcttggtctttttgaatggtggaaatatgggtgattgttttcctttcagcttgtccacccttgccaaactttccttaatgattacaaaattccttttgaaacttaaaaaataaaaataaaaaccttacattaaaaatcatgaaaatccttgaagacaggttgcaaatttttccagaattcaagacctgaaaatacatttgtactgataaacttgtgtttcccttatatttaatgatgtaatgtatataacattcttggaaggcttgatgttagcaaacatcattattatggttattattaggcaggtgcaaaagtaatcatggccttggtaatggccattacttttgcaccagccagtattatatataaatgtgtaactcattattcygggagtagtagcatactgattaaaaatataagtcacatatagtcttctgagattgcaatgtagaacagtttaggttaaaagtgctgacactttgagcaagttacttacactctctggacctcagttttatcagctata

SEQ ID NO: 308043 - DNA, 608 bp, Homo sapiens
attttgttactttttatatatggggtgagttaggggcccaactttttattcttttgttgatggatatagagttgccctagcaccatttgttaaaaagactattctttccacattgaattgtcttggcaccagggacaatttcttcttatggctgatttcagctccatttaaaagtagcagaacaaacacataagcaaaaccattatatttcattactttaagtcattgaatgcacgcagtgaagaataagtgcatatgcatttgggaattaaaacrctttttacttccagtgtcatgtggtactttgatatcttttttcacataatatttggggacttttatacttaaggacatattataacagtaactatcagcattttatgtgattcacagtttataactacattatctcactgaatcttcacaactacacttgagagtaggtcatgtatttgttgttgttattgttgttattattgctgttgttgctgttcccatttttaggattaaaaactgagattcaagaggttatgtgacttgtctaggccactaaccacaataggcaaaaaacagctttgagcctaaatctttggactttcaacccaatg

SEQ ID NO: 308044 - DNA, 608 bp, Homo sapiens
attttgttactttttatatatggggtgagttaggggcccaactttttattcttttgttgatggatatagagttgccctagcaccatttgttaaaaagactattctttccacattgaattgtcttggcaccagggacaatttcttcttatggctgatttcagctccatttaaaagtagcagaacaaacacataagcaaaaccattatatttcattactttaagtcattgaatgcacgcagtgaagaataagtgcatatgcatttgggaattaaaacaytttttacttccagtgtcatgtggtactttgatatcttttttcacataatatttggggacttttatacttaaggacatattataacagtaactatcagcattttatgtgattcacagtttataactacattatctcactgaatcttcacaactacacttgagagtaggtcatgtatttgttgttgttattgttgttattattgctgttgttgctgttcccatttttaggattaaaaactgagattcaagaggttatgtgacttgtctaggccactaaccacaataggcaaaaaacagctttgagcctaaatctttggactttcaacccaatg

SEQ ID NO: 308045 - DNA, 634 bp, Homo sapiens
gtgctatgctgctagctttgaacatggtggaaggagccaccagccaaggaatgcagtggcttttagaagctgaaaaggggataaattctcccctagagcctgcagaagaaacccagccctgctaacgccttaattttagcccagtaaggccggttctgaacttctgacttccagaactgtaacttgtgttgttttaaactatgactattgtggtgatttgtcatacacaatacactaygaaacaatgaattttagctggcaaaatttttatgtcccatatttttgtacaggagggcatctttgtttatgcgtatgggctttaataattatctaattatattgatttatgatacttttcatgattttaaaaagcctgcattgaatctaaatttaacccaataattactttttttcttcctttccttatcatattattttttcttgtttgttttaacggtaacccaaaaataaaaataatatactagaaagtctcttgagaggaggatttcttaaaatgctgctatatctggcatgatgaagcaactactccaccaactaaatttgtaactggaaagcagaaagttcttcaaagttcacacagaataagagcctggcctcccgggcaggaggatgc

SEQ ID NO: 308046 - DNA, 600 bp, Homo sapiens
ctcttcagtggataagctgaacaacaaggatacatgtgagttggcctagacacaagttggccgtaagtcaacgccatctatatcaagcttcacctagggatagccctgaaaaacagtagtgaaggaaaattcccccaaaaggcaggccatccactttgtgttagggaaaagtagcctgatattagaatatatactaatccatgggcggcggtagatggtctgaccagctggtaaaaggcctggaaagaaaaaggattggaaggtttgggacaagaaattctggggttgaggcatttacctggacatttggcagtgggcacaaagtgtgaagatcttaacattcactagagagtrcagacaatggaagagacattgaatgaacaagtagacaaaatatcttgttcagttggcatcagtcagtctctcattggccaactcagtgctggtatgatgggcacataaacaatgtggccattatggtggagacggaggctaggcattcccactcacctatactaacctagctggtgccaccattgactttcagcttgctggcagcagaaaccaatcaatgctgaaaacattaaatcacatcatttc

SEQ ID NO: 308047 - DNA, 568 bp, Homo sapiens
gacttacaagatagggcttatagaacatttggcccatcagtccaggactccatattatatcgtgttggaccaaagaacccactttgtagcaagagaaatgcagaaatggaatcatcgctaaggcattcactggtcagatcacacactggtcagatcaaccacagcttctggtttggggtggtgcaatgtatgatctgatcattggaatagcctgccaaagacatggctgaagtcctagctctgctttgcaaggatggagcaccatccttcaaaagaygcatatcaacatcgagtaaaagactttatatgggggtctgtccccaaaaggaaactctgaaagggtggaagcgggaatggccccacttatgttgcttccaatggcccactgggggactttggctttcccccatgcaactctgggctagaggtcttggtcttcaaaaggggtacattttcaccatgggacacagaaagagcctcattatgctataagctacagcccctccctgagatctgtgggcttcctttttccaggaaccaggaaatcatcccttggtagggatgattg

SEQ ID NO: 308048 - DNA, 463 bp, Homo sapiens
attctttgactttttgctagtatttttaagtgtgatattattstgttaatatttttaagttttaaagaagaaaccctattttttggagacactgaagtgtttatagattaaatgacaaggtatctgggatttgcttcaaaattcagggtgagttggcggatgggaattatagatataagaagtttggtcatgagtggaggatttttgaagcttcaccattggtacaaagaagttcatacgtatatacttttttcatatcttgtataaatttgaaaatttttacaagtcaaatagttttgcctctttccagagaaagagacttcaggagtatgatatgtgcatttcaaaaggccatggctaattcatcaaggttatcaaagcttatggcatttctgatttttgaccttgtccccatgatacttactcctgtcacactgaggcaaggctcttcagcctctttcta

SEQ ID NO: 308049 - DNA, 522 bp, Homo sapiens
gctaccaacctttcttctcttgaacttactcctgtgtcctttgaaaagtctaccttggtaaagtttattcaagagacaaaacagtttcctagtaacaactcaatttgataaattgaaattgaagcctcactctatgcattagaaatgaatgattgcatttattgaatgatatccttccaagaagaacagtttgattctgattcattcctaagtacttatttttctttgactagtcatccctgagcaaggagaatattaagactatttagwgattaatgaaactttaattatactgtgatacgcgaattacttggacatgaagtagctcttgggggtgctgttaaggagtgggagaagcaaggtacagaacgttttcctatgaaaaacaaatatttctctcaaggctagatacagttgggaaaagatttcaggaaaaccatggcctggctttatatgataaactccctgatagatggtttccttcccgaaagtaaaggtccttggtaaagctagcccacacct

SEQ ID NO: 308050 - DNA, 522 bp, Homo sapiens
gctaccaacctttcttctcttgaacttactcctgtgtcctttgaaaagtctaccttggtaaagtttattcaagagacaaaacagtttcctagtaacaactcaatttgataaattgaaattgaagcctcactctatgcattagaaatgaatgattgcatttattgaatgatatccttccaagaagaacagtttgattctgattcattcctaagtacttatttttctttgactagtcatccctgagcaaggagaatattaagactatttagtgattaatgaaactttaattatactgtgatacgygaattacttggacatgaagtagctcttgggggtgctgttaaggagtgggagaagcaaggtacagaacgttttcctatgaaaaacaaatatttctctcaaggctagatacagttgggaaaagatttcaggaaaaccatggcctggctttatatgataaactccctgatagatggtttccttcccgaaagtaaaggtccttggtaaagctagcccacacct

SEQ ID NO: 308051 - DNA, 565 bp, Homo sapiens
atgtattagaagcactttttttgttgtgttttgttttttactgaaatgatattgttggctctacaaacaaatgaaacccaataatgggtttctctattcttgctggtcttttccttcttaaaagaatcatgtggtcattccttatttgaaaaaaaaaaagaaaaagacactgaaatgctgcaatgcctgataaggagaatctgcaacacttggrcatcttgtgtataagaaaagattcttatccttatgctactgtcatggagcttggatatttacaaacctaccgcttttgacaagcttgtgagaatttacatagtctcacaccgcccctaatttttatggcagaatgtgtctcacatttgtaatattctcagagctcctcaggattctaacctctctaactagagatggtttctgagcaggcaagaaggaaaaagaggcaaaaactgattgcatcttttgttcgcttttcaaagccagatctcgaaattcccaagaatccttaaagttggagacatgtagctaatggaattctagtcaatccacatatttatgtgtttggaaa

SEQ ID NO: 308052 - DNA, 565 bp, Homo sapiens
atgtattagaagcactttttttgttgtgttttgttttttactgaaatgatattgttggctctacaaacaaatgaaacccaataatgggtttctctattcttgctggtcttttccttcttaaaagaatcatgtggtcattccttatttgaaaaaaaaaaagaaaaagacactgaaatgctgcaatgcctgataaggagaatctgcaacacttgggcatcttgtgtataagaaaagattcttatccttatgctactgtcatggagcttggatatttacaaacctaccgcttttgacaagcttgtgagaatttacatagtctcacaccgcccctaatttttatggcagaatgtgtctcacatttgtaatattctcagagctcctcaggattctaacctctctaactagagatggtttctgagcaggcaagaaggaaaaagaggcaaaaactgattgcatcttttgttygcttttcaaagccagatctcgaaattcccaagaatccttaaagttggagacatgtagctaatggaattctagtcaatccacatatttatgtgtttggaaa

SEQ ID NO: 308053 - DNA, 508 bp, Homo sapiens
tccattgcagactcactagacaaagaaaattgtctagtatgcaacactccttgaaaggaaataatgaaagataaagagctcaaaggaaggcagccataataactgaagtttttttcttttttttctggaagggctctattctgaagcactacaagaggaaacagactggaacgacaaagctgaatagagagacctatggaagacagagaactacagaaatctattctttatatataagttaaggcaaaacaaatatatcaattttactaaagcttttcaatacttagaccctgacatgtgtaaatgtgaataaacatatatatacatacaaatatgcacctttaaaataaaataagagtgtaacttggtgatgagaaaaaagagaagcagtaatagccaaagtgtggactcggaagggaagaaraatgaggtggaggctttctttctttttctggcctcaagtttccatatggagagacttcatactgtagaaatatctatctactac

SEQ ID NO: 308054 - DNA, 657 bp, Homo sapiens
gaaacaggttgcttgtcctgtagtgtttctcatgtcctggaatttaatattgcatactcttagtctcatccaatgtgtttctctcttatgaactgacacttatctataggtttaatcaaattaaaagtcaatattttggcatgactttattatagraggtattgtttacttctatcaggaactgaatcatatctacttgtctttcttttttaatgttagcagctattgatatttattttctgggtctattcatttagtatgggatataaaatgattacacatcttcttcatttggtaacaaaaactttccctcatcaaattgtttgtttaccttatgatacaatttgtatgtgaataaatacttacttccctttatcattttttaaaatagcaaattggtggtgaccaattttttccttctgaataaaatcattaattcataaatttaagtatatttgatatactttagtctgcaaaagttattatctttgttgacattaatattgccccatctttgcataatgagagcttactattgttggttccagggtctttttgacgtaaatctagcagtcattgatagctttatattttattacaataagatagtccaagcttgtcctgtatttcctaactcagagctagtattgcctatct

SEQ ID NO: 308055 - DNA, 657 bp, Homo sapiens
gaaacaggttgcttgtcctgtagtgtttctcatgtcctggaatttaatattgcatactcttagtctcatccaatgtgtttctctcttatgaactgacacttatctataggtttaatcaaattaaaagtcaatattttggcatgactttattatagaaggtattgtttacttctatcaggaactgaatcatatctacttgtctttcttttttaatgttagcagctattgatatttattttctgggtctattcatttagtatgggatrtaaaatgattacacatcttcttcatttggtaacaaaaactttccctcatcaaattgtttgtttaccttatgatacaatttgtatgtgaataaatacttacttccctttatcattttttaaaatagcaaattggtggtgaccaattttttccttctgaataaaatcattaattcataaatttaagtatatttgatatactttagtctgcaaaagttattatctttgttgacattaatattgccccatctttgcataatgagagcttactattgttggttccagggtctttttgacgtaaatctagcagtcattgatagctttatattttattacaataagatagtccaagcttgtcctgtatttcctaactcagagctagtattgcctatct

SEQ ID NO: 308056 - DNA, 657 bp, Homo sapiens
gaaacaggttgcttgtcctgtagtgtttctcatgtcctggaatttaatattgcatactcttagtctcatccaatgtgtttctctcttatgaactgacacttatctataggtttaatcaaattaaaagtcaatattttggcatgactttattatagaaggtattgtttacttctatcaggaactgaatcatatctacttgtctttcttttttaatgttagcagctattgatatttattttctgggtctattcatttagtatgggatataaaatgattacacatcttcttcatttggtaacaaaaactttccctcatcaaattgtttgtttaccttaygatacaatttgtatgtgaataaatacttacttccctttatcattttttaaaatagcaaattggtggtgaccaattttttccttctgaataaaatcattaattcataaatttaagtatatttgatatactttagtctgcaaaagttattatctttgttgacattaatattgccccatctttgcataatgagagcttactattgttggttccagggtctttttgacgtaaatctagcagtcattgatagctttatattttattacaataagatagtccaagcttgtcctgtatttcctaactcagagctagtattgcctatct

SEQ ID NO: 308057 - DNA, 620 bp, Homo sapiens
tcttgggttcttcttacatcgtcttatatttttaagtctatgtctgccactaactagctgtggattttgataagtctcttaatccggcatcattatttctggggacctttctagccctaaatccatgattctacaatgagaacagcatctagaattatgaccaatttcagttagtagcaaggttgggagagggaagaaaagcatttctaatgaaccataaataacttttaaaagcttaaaacatcctattcctaagcactcaggttaattatgagattttattagagaagcttgttaaaaataatatgcaaaccttgcaatattttagtattgcaaactttgccatgttatggctcattgggttctgttttatgccatatgataaaaatggacatccattacagataagtaaacactttagctagaaaatacagatgatctcggtaatgtggccagtgatccagaataactgggcacatttgcttcttgtgattacctttgcaaacgaggcagattcttscctaatgctgcagtttgaatatcagtcctgaagacagatacagtgaaatgaacgcatgtaaacacagcttggggatgtaacttcatgtataaattacaaa

SEQ ID NO: 308058 - DNA, 541 bp, Homo sapiens
aaaaaacagaagtgcattttacataaataaacaaataatccctgagcagtgcacatatttgtggttttattaatttttcaattttaaggtgtggaaatctggttttacgcaataactcttttgttaaccgcagagctgctccctcaggatgcctgggataacttccatagggcagatgctgctgacgtgctatttccaaagggttcctggcataggactgtgaaaggtttcctggagcctccctagaagatcagttgtttatctgcagggaagccctgaaagagcctgagagtgtgtgcttctcaggtgtagtcaacgtgygaagagccccaggcacccacgcaagaaccatcccttgggccatttattgaactgtagaaggcaactatagccaagtgggctggggggagagctcttttggggagtgttgcttttgaactcagaatatcgtctttaacaaatgcagttcttttcaaatatcagccatagtttcattctccatacagcattatttgaaaatccatccctttcatccaaggat

SEQ ID NO: 308059 - DNA, 636 bp, Homo sapiens
tcctggcataggactgtgaaaggtttcctggagcctccctagaagatcagttgtttatctgcagggaagccctgaaagagcctgagagtgtgtgcttctcaggtgtagtcaacgtgcgaagagccccaggcacccacgcaagaaccatcccttgggccatttattgaactgtagaaggcaactatagccaagtgggctggggggagagctcttttggggagtgttgcttttgaactcagaatatcgtctttaacaaatgcagttcttttcaaatatcagccatagtttcattctycatacagcattatttgaaaatccatccctttcatccaaggatttatcctaattataaaataatctctgtttttatgatgccttctagtcagtatgccagtgcccataggtggggacaatctaatgaggcttctctgcagctcagagcctgggtgactattgtatcccatagatgaggaaactaactgaataaagctcgtgactctgagccaggaataggacttttgtgttagcagctttgctgctcatactgtgcaatcctaaatcctggacaatactgagctactagcacaatgaaaataatttacatgagaatagataccatgccttcctctcaagata

SEQ ID NO: 308060 - DNA, 508 bp, Homo sapiens
actgtattttccatgtgcctttcatttttgccagaatgaagcagaggtgactgaggcatytcctgatggctgcgtctctgctgttgtcatctcatttctcaatgacacataggaactggagctcaagttgcccagcccacacaagcccactatatcagaatctcagtacaatttctgtaccttatttttaaaatactactttttaaaaggttgaaaacttcctaatgaataaggttatcatttgagaaccaaaagttaccctggtgcagatttggaagttctgtaaacaggggatggtctctttggtatcccatggatgccctttgcagtggtgcgcttggacacgcttaactattggctctctgaggggaaaaacaatctgatttgcagcattggctgatttccctggtataaatactgtcataatggccaatttcaagttaccaatataatatcagtaaccatggaattgggaatagatgtgaaacagcccaccaatatatttcat

SEQ ID NO: 308061 - DNA, 522 bp, Homo sapiens
tactgtcataatggccaatttcaagttaccaatataatatcagtaaccatggaattgggaatagatgtgaaacagcccaccaatatatttcatgatacagacacagtagattyatataacctcaaaaaatagacaatagtaaaataattagaaagtgatgagtttttagtatttattgcctttgtttttgtataacttatttaattgtaggtttatataatttaatttttttaaataaaattgtttgaacattggctcacaacattcttcaaaagttaacaattggtcctggggcagtggctcacacctgtaatcccagaactttgaagaaagtgtcagtggggtgctgacactgaggcaggcagattgcttgagcccaggacttcaagatcagcctgggcaacatggtgaaatcttgtctctacaaaaattacctgggcatggtggtatgtgcctatagtcccagccactcaggaggctgagatgggagaatttcttgagctcaagaagttgaggctgtag

SEQ ID NO: 308062 - DNA, 597 bp, Homo sapiens
ggactctaatcctttgttttttggtggtgaaggagagaatgggaggtgccttaggggctttctgagggaaaggagataggcactaggagctcaaagtttcagcaaatctgtttaggggctgtaagaagagtatagttattactctttacttctctttggttggattattttctccccctcttgtgccaggataggaaaaacttagaaggcacaagtaactccctacagactcccatatgtttattaaagctcctgtgattaccaggacatgaggaaggtcccatgtgagcagatgcagcagagktctgacttctctgaggcatgagcatagtcttttcttgggaagcctgactgctcttcaccaagtctcacgtaggctctcctactgtattgagtaactggatttgcttttcacgttccaaattcatgttgttttcaggtcctctgtttcctggttctcctctaggtcatcattagattcttgctcaattttctcttctggctattcctgccctgcagatgggctcatcagcctgtccagccccaggaacatgagtttgttgatatctctgctatttctacagcaacaaattccaa

SEQ ID NO: 308063 - DNA, 443 bp, Homo sapiens
tacttactcaatggtttattagtatgccttcaattgcaggaaacaaaaaacctgactaactggcataagcaaaaggatatttattgattcatgtcctcagaagtcctaaacagagctatttttaagttatactaatctagtggcttgaaataacgtgaaaactactgttttcttcctccctttccagttccaactcttytgtatcactttattttggaagaaccttgccttatggtcctgagaaagttgccaacggctccctgagctctatctttattatttgtgcccacagggaaaaaaagattatccttgactcagcattccaaagaaaagttctagggtagttgaggtcatctgcccagtactgagacaatcagtgggagcgaggggatgaaatgctctaattggcttagtctaccaggtgatgcttccctggggcagaa

SEQ ID NO: 308064 - DNA, 560 bp, Homo sapiens
tgactaggtcatgagggtggagccctcatgaatgggactagtgtacttataaaagagaccccagggagctctcttgctgtctttctgccatgtgaggatacaatctgaagtcagcagtatgccatccagaagacggccctctccagacaccttaaacttgagctttccagctgccagaactatgagaaataaatttytgttgttataaaacactcagtctaagttatgctattcattataccagcccacgcagattaagacatacgtgaacacacaaacacacacgtttacataagtacatgcacacatgcatacacacccacacaaatcactgtaggagttttgcctcagtgcgtagattttctcccattcttctcctaaggtccctaggaaagtctgggatatgaagaaggaaacaggatagtgttatttactctctgccttaggaaatctaagaaaagtttgccggcatttccactcccatttggggtgagttacctgaaatctccagactagtggctgtcaggaaggcagttcctccctagcactgtgtggtcagg

SEQ ID NO: 308065 - DNA, 594 bp, Homo sapiens
ctacatattttaattcaaactttcattaaagtactaaatgataaagggaaaatcattttatcatgagttccaggtcaaatcagtcagtgttcwctggatgtaaattcagactgattctcagcagcagatgatctaagtaagaaaaaatactttcatatcgattagtgctacctattctaataattcagaaaggagtgtgaaaagtagtcagcagtagatagggaaaggtttatgagagccttaattgctacttaaaggagaccaagatcaatagaattcagattcagaggtgggcttctgtgtgttatttggctgtaaaactctgatgtgcctgaaaggtaaggtgtatataaggcatgtcaaggggggtgtcaaagactgtggccacattagagatggcctggcttgctgggctctggagtttgggcactgtggaagccatcaattatttgagtcaaatgcatgtcagaattgaagctgtttttcatgaatattaagccagcagcaatttacaggagggattccaagaggtaagagaggaagcataaacagcatctaggaggctccttcaaaaggctgcattagaaacagcga

SEQ ID NO: 308066 - DNA, 594 bp, Homo sapiens
ctacatattttaattcaaactttcattaaagtactaaatgataaagggaaaatcattttatcatgagttccaggtcaaatcagtcagtgttcactggatgtaaattcagactgattctcagcagcagatgatctaagtaagaaaaaatactttcatatcgattagtgctacctattctaataattcagaaaggagtgtgaaargtagtcagcagtagatagggaaaggtttatgagagccttaattgctacttaaaggagaccaagatcaatagaattcagattcagaggtgggcttctgtgtgttatttggctgtaaaactctgatgtgcctgaaaggtaaggtgtatataaggcatgtcaaggggggtgtcaaagactgtggccacattagagatggcctggcttgctgggctctggagtttgggcactgtggaagccatcaattatttgagtcaaatgcatgtcagaattgaagctgtttttcatgaatattaagccagcagcaatttacaggagggattccaagaggtaagagaggaagcataaacagcatctaggaggctccttcaaaaggctgcattagaaacagcga

SEQ ID NO: 308067 - DNA, 576 bp, Homo sapiens
ctctttgaactttaacttatagataccaattaatatctatatttaatttagcttaatagagatacagatacattcatgctgaatatttatatgtttctatacacaaggattccttgctctgtcacttgaaagagcctggaagcaacaacacccagtagcagctagcacacccagtgccaggtcttggtttctaataacttctccaataaaagaaactagggctttttggagaaagggctaattctaggactgaagcaggattatatttctctgtgcaagtaggaacatcttattgtgccaagaaggaagtgttcactgcatgctcacgtgtgtacaaacacacacacacacacacacacaatatgaygggggcatgccaaagggacataggaacacaactgaaatagctcctaacatccaaaactggaataatctgatctgagaagaaaagaactacagaagcattggagaataacccagagtataaaatgaacatccatgagttcatactcatataaatgaataagtaaagaaatagaaagaaaaaacaaatctatatagaataattccaaataa

SEQ ID NO: 308068 - DNA, 477 bp, Homo sapiens
actgaaaattgctgaactatttgtaagtagattactcatttttgaagaatttatgcttctgtgcagtaatttattactccttaaactrgggatactattagctcctataaagcctagttggtcccaagtaggtaaattgaacacgatcaccctcccagatgaccacgtggaaaacctgagtatcaccattgattccttctttcctttatccctcacgtccaattaatcatcagttataatgatgtgaaattttttacttgtttcattatgttttttaagactgtgtatatctttcttaagatctgttaactttaacacttaattctgagggtgaacctttatcttgattttgaatttttatcaacctatttgaaccgtcattctatttttaacaatgcagtttcatatcaagttgagtcatgaatatgtctggcatatctgaggggtaataaaccagttaatattgctgcatctcca

SEQ ID NO: 308069 - DNA, 477 bp, Homo sapiens
actgaaaattgctgaactatttgtaagtagattactcatttttgaagaatttatgcttctgtgcagtaatttattactccttaaactggggatactattagctcctataaagcctagttggtcccaagtaggtaaattgaacacgatcaccctcccagatgaccacgtggaaaacctgagtatcaccattgattccttctttcctttatccctcacgtccaattaatcatcagttataatgatgtgaaattttttacttgtttcattatgttttttaagactgtgtatatctttcttaagatctgttaactttaacacttaattctgagggtgaacctttatcttgattttgaatttttatcaacctatttgaacygtcattctatttttaacaatgcagtttcatatcaagttgagtcatgaatatgtctggcatatctgaggggtaataaaccagttaatattgctgcatctcca

SEQ ID NO: 308070 - DNA, 547 bp, Homo sapiens
tattcatattctattggttctgtttctctggagatccctggctaatactccttacgtcggattttgtttaatgtaaacaattatccaaacatataaatcaccaagaaaacaatgatctatgttctttcagatgctagttgtgtatgacctgttgttgaatttttatgtatatcaattgtttgtagaaaacaaaaataaggctcttatctttaatttaggaccttgctccttgaagtgtgacctccaaggccagcaacatatgcttcacctgagagtttgttggaaatgaggactctcaggtccacccagacctattgaatcagaatctgcattttaccaagaatcaagatgatttgcatgcacattaaagttagggaagtgcttktctggagtagtatatgtttaagtactaacataaaactatgatcttccacaggtataagcagctatttaccaaatgtgcccaaagaggggataaatatgttggcatacctagaatgcatatgcagcatagcactgttcatcagctggagaaaactgtgctagt

SEQ ID NO: 308071 - DNA, 547 bp, Homo sapiens
tattcatattctattggttctgtttctctggagatccctggctaatactccttacgtcggattttgtttaatgtaaacaattatccaaacatataaatcaccaagaaaacaatgatctatgttctttcagatgctagttgtgtatgacctgttgttgaatttttatgtatatcaattgtttgtagaaaacaaaaataaggctcttatctttaatttaggaccttgctccttgaagtgtgacctccaaggccagcaacatatgcttcacctgagagtttgttggaaatgaggactctcaggtccacccagacctattgaatcagaatctgcattttaccaagaatcaagatgatttgcatgcacattaaagttagggaagtgcttttctggagtagtatatgtttaagtactaacataaaactatgatmttccacaggtataagcagctatttaccaaatgtgcccaaagaggggataaatatgttggcatacctagaatgcatatgcagcatagcactgttcatcagctggagaaaactgtgctagt

SEQ ID NO: 308072 - DNA, 614 bp, Homo sapiens
tcaaatataatctaaacacgaaaatagtgcctgccagcagtccctgccaaacctctttcctctcgagggatcttacttaagcctataacagcattgatctgtctgaaaggggtaaaacccttgatctaacattatcccagaggtgatgtgcaaatggcttattttcattcaaatttctatcccacccaactgcctttttcctccctcaaatcatgacaaagttacaagagctctaaaaacaccctcaagactaggaaaagctgagatatgctctactataygggtaggagccacctctagggcaccaacagtgacatacgtaacagacgtaatagtcacagccacacacgtctgtggacaagtcctaattccatttcaatattaatagtcgcaatgattcctcccaagaaagagtatcagaatataatgaatgaatgtagtagtattagtaggaaaatatcaaatcttctctaatttgttatttatttatttatttctaaattagttttaaaaaataataaattgcaagccacggtgctacatggttattagttgcattatctgtgacattatctcacaactgactctgatataccccagtgttgtgaagaact

SEQ ID NO: 308073 - DNA, 555 bp, Homo sapiens
taataatgactgaaaagttccatacacattttcatagccaaaagtctagacaatggccatccaagaatctgaaaatctgttattagattagtaatgagtgaggtcaaatatttttctacttaggctttacgtctaggaagaccatttggacccataatttccagagtcatttatttgtctgactgctcagaatgaaagaagaattatcacatatctatctaaaacaacaacaacaaaaacgctgctctttgattaaaattcacattacscattatgcaacagttaagaatggggtgtatccacaaatataaccatttaaaagtccgccctaagaaacagatttaaacttcatggccaagtccccataatgctttggtttttgcaaatttggcaagttcaaggagttcacgggagtgctgtaatgccaatgtgatttatttaataaagatgagacctgtcattacccagggatgcgctgtgctgtgggtgtggggaggaaaaagcagagctgccttgtcctgggaagcagagtcagcagtgttgtgtgtgtttgtt

SEQ ID NO: 308074 - DNA, 540 bp, Homo sapiens
tttctccacttataaaaggaaagttatcaaaaacaaaggaaggttatcaaaaacaaaatacgttggcaaagtactcatcacttcttcgacttacatttttactgccgtgaaactatttctgtatgttcttctatccagacagacattcactgcagcctataacgtgaaagatgcaagcaaggatatataactgtttcagtgaacagatttggtgaagtgccttctgttttagcactttaagtttatccattttgttgacttctgacattccatttttcctagataggaggaaagatctgtttatgcagttcgtttttaaaatgtgccaatgcctgcacattaagatttttaaaaataaaattgtataaaacatataatgtattggtcttttakggggaattagatgcatcaccactgtattacactttatcacaactgtattacagcttcatcaacattaacgggtttgctttcatgacgcttctgaggaattggttctttttgcagaggttcaagagaaagggcttttgagaagtttag

SEQ ID NO: 308075 - DNA, 555 bp, Homo sapiens
gatgttctggatgttcttctgccaccttataatctaaaactgcattctcttttttatttaatttttttttttttttttttggagatggagtttcgctcttgttgctcaggctggagtgtaatggcacgatcttggctcactgcaacctctgcctcccgggtttaagcgattctcctgcctcagcctcccgagtagctgagattacaggcttgcaccaccacrcccggctttttgcatttttagtagaaacggggtttcaccatgttagtcaggctggtctcaaactcctgacctcaggtgatccgcccaccttggcctcccaaaatgctgggattataggcatgagccaccgagcccagccattatttaattaaatttatttatttatttatttatttgtgtttttgaaatctcatctctaccaaaactataaaaattagctgggtgcagtggcacacatctgtggtcacagctacttggaggctaaggtgggagaatcacttaagcctggggaggttgaggctgcagtaagccatgattgtgccactgcacccc

SEQ ID NO: 308076 - DNA, 583 bp, Homo sapiens
ataaaaaccgctggggatggccaagacgagggggctgtggtcttgctggggtggaaatgaagccctcaaccccatactcttcctaggcttgggaggaagcatcctctggctcttcctttccacagctcccagaatctggaagtccatttcaggctggcraggcccctggaatccttagttcagctgcccattggatgcaggaatcccttctccaatactgccggcagcaccacaggtgggcaggccgagcccaccagaggcaggctgtcagcaggcatcctctcgagtgttcctctctccagctcatgacactccccaacccccaaaagctggccaaacccttttgccacatgtgggtctaggtcacacaggcctggttgaatcctgtccctcctcaggaggcctcgctccctcaggaggtcaggagctgggctgagcagcatagtggggatatgcgggaagcacaaggggatggggatggggacagggactgggatgggctgtcagtgctaaagatgatgaatgggggaggtgaggcgggaggcccagtgttatcggcagaggatggcgggtgcgggcgctt

SEQ ID NO: 308077 - DNA, 620 bp, Homo sapiens
tggcaataattgctattacctattaaaagtaaaaaartcacatatgctttgatcagcagtggaatttttaggaattaatactacaggtgcattagtacctatgcacactggcgtacgcaggagtattcaaacagcattgtttgtaacagctaaagactagtgctattgattatcaatagtattggttaaataaataaagttacagctttttatgagattattaaaaagaatgcaggtgttcttcctgtactggttggaaactttgccaagatatgttaaatggaaaagagaaagatgcagaagtgtctatgtgggatgttattattagtcttatgtatgatatatttcaaaagatgcaaaagaagctggtaacagtggttgtcttctgaaagaaaactggacctgtctttaaatgcctcatatttgtctcataggcttttgatattaatcccaggatctgatggtcaaatggctaaaatcacagctcttactatgtattaaagagtcatttttataatgaaaagtagtacaggttttatttctattcacatctcttttatgtatttttgcatgtgggaagtcccaatttactttccagttttccacccaattagcaactt

SEQ ID NO: 308078 - DNA, 527 bp, Homo sapiens
ccagtcacaggaccaaggcactcaatcccccagctgctgggagtgttggttgcttattgctcacagctgagtcccttcctgcacatctcactctccaaaagccttaacccagcgttttgcttcctccccagaaacatcccacatttaatgagcagtcagtaagagggtctraaggtctgccccctggcctcaattcaggatgactctgaaaggaaatcccggctccagagcccttactggattgcctgaggcctctattacaaattgttcacagttcaacttctttctccctccgcccaacccggcctccctcactccattataggtgttgttcttaagagcacactccaattaccctcctgcaaaccagtctcccccccaactcagagtccagggaattctacctaagacgattttgaaagcggtcctagaaatcaggctctaacatgggattttgaagctagatcacctgccagccagctgccaataagaacctcatccctggtcagtattcagagcacctgtca

SEQ ID NO: 308079 - DNA, 483 bp, Homo sapiens
atcagacagacactaaaagtacagatcatgtcttttacacagacgtaaaatttcttaacaagattttagcaaatctagtcataaaacctacaaagtgacagtacatcataaccaggtggggtttatgaatggaataccattttaaaatcaatcaaggtaatttaccataatggcaaaattaaaattaaaaaccataaaaatatttcaataaatgcataaaaagcatctgactaaatccaacatccattcgtgattcamaaactccattaaagcaggagtagaagggaagttcttcaacttgatatggtcatttataaaaaacctacaggtagcataatatttaagggtgaaagaaagactgaatacttttgccctgggatcagaaacaggataatatgcccacgctcaccacttcttttcaagattgtaggagaggttctagcaagtactatacacatacacacacacacacacacacacaca

SEQ ID NO: 308080 - DNA, 575 bp, Homo sapiens
aaggtaattgtggtaatagtgatattgttaacactgcagaaaaagtgcctgtagatgacagggtaaaattgtgtgatgggcttattgaagaactagagcagcaggcattcataacagaacaactcatgtctatttataaaatcaaagagagactgctaaaataagagctattgttgagatgggggccaagagggcccattagaagcagctgcagtccacagcacagagaggaatgaaagcatcaagtgaattcagcaccttcaactgaaatatccaggttctcgcattgggactgactaaacaatcaccctgatccagagagaataaagaaaagcagagtgggtcagtggcccacccaggagcctcacggagccaaaggaacccccacccccagcaaagggaagcrgtgaccgattgtgcgacccgcccaggaccatgcttctcccacagatctttgcaacttgtggatcaggagatcccctcatgagcccacgctaccagggccttgggtccaataaacagagctgtgcggagtctcagcacaggtacacacagagacaagagttttacatact

SEQ ID NO: 308081 - DNA, 544 bp, Homo sapiens
tctgtaagtatttaatgatttaaactaagcttgtattctttgccttggtcatgaaacgattagaataaactccccccaaatagctcattgtctgtctagtctccaattatctctgtagagaaaagtactattgtaagtagcaaaaaatatttatgttttacttgagaaaccatatttattctttaatatgtgtgtttacacagaagcttgttctctgaataaaattgtgaaatgctaaaaccaatatttctcttaccttagcattgtggttaagaatgcaaccaaactttcatctgtttggctttctgcaaaatgtacattgagaaagaaactgggaactaccagggagcccttaatgacacagggacactaatgaatcacrttattccccattttcctatgctaggtttcccaaaaccatttctcttactttgctaaactatagaagccctctttttaattcccagctaacataaaagaaaattaaatggggggggggggggtgtgtgtgcgtgtgtgtgtgtgtgtaagcttgctgtggtct

SEQ ID NO: 308082 - DNA, 593 bp, Homo sapiens
tactattggtgggaatataaattagttcagccactgtggaaggcagtttggaggtttctcagagaacttaaaacagagctaccattccacccagcaatcccattactgagtagatatccaaaggaaaataaattattctaccaagaagacacgtgcactcatatgttcatcaccatgctattcacaatagcaaagtcatggaatccaccagggtgcccatccgtggtggattggataaagaaaatgtggtacatatgcaccctgcaatgatatgcagccatgaaaaaagagtaaaatcatgtcctttgcagcaacatggatgcatctggaagccattatcctaagtgaattaatgcaggtacagaaaaacaaataccacatattctcccacttatacgtgggagttaaaccatggttactcatggacatamagatggcaacaatagacactggggactacaagaagagggagagaaggagggggaaagggatgaaaaactaactattatgtactatgcttactacctgggtgacgggattattcatatcacaaaccttagcatcacacagtatacccgtgtcacaaacctgca

SEQ ID NO: 308083 - DNA, 593 bp, Homo sapiens
tactattggtgggaatataaattagttcagccactgtggaaggcagtttggaggtttctcagagaacttaaaacagagctaccattccacccagcaatcccattactgagtagatatccaaaggaaaataaattattctaccaagaagacacgtgcactcatatgttcatcaccatgctattcacaatagcaaagtcatggaatccaccagggtgcccatccgtggtggattggataaagaaaatgtggtacatatgcaccctgcaatgatatgcagccatgaaaaaagagtaaaatcatgtcctttgcagcaacatggatgcatctggaagccattatcctaagtgaattaatgcaggtacagaaaaacaaataccacatattctcccacttatacgtgggagttaaaccatggttactcatggacatacagatggcaacartagacactggggactacaagaagagggagagaaggagggggaaagggatgaaaaactaactattatgtactatgcttactacctgggtgacgggattattcatatcacaaaccttagcatcacacagtatacccgtgtcacaaacctgca

SEQ ID NO: 308084 - DNA, 539 bp, Homo sapiens
gagccagtgaactttggctttgtgtacatagaaagaaggagagaagaaaagaaaaaagaaggaaaggaaggaaaaaagagaaagaaacaaggaaggaacggagggaaggggaggaggagagggaagggaagggaagaagaaaagaaaggaaataagaaaaggaatggtggttcacgcctgtaatctcagcactttcggaggccaaggtgggcagatcacctgaggtcaggagttcgagaccagcctggccaacatggtgaaaccctgtctctattaaaaatacaaaacattagccaggcgtggtggtgggtgcctgtaaacccagctacttgggaggctgaggcagaagaatcgcttgaacccgggaggcggaagttgcagtgagctgagatcgcgccattgtacttcagcctgggtaacaaaagtgaaactccatctcaaaaaaaaaaagaaggaaggaatgaaagacaamggaagaaggaagggaagaagggtggaagtaaagaagaaaagaaaggaaaatctagtactcaattctt

SEQ ID NO: 308085 - DNA, 569 bp, Homo sapiens
tatggtaggatcatcaagctttgcagtttcgtgaggtctttcttttctcttctttttgtctttgttatgcatttgttattggtgttttttgctcagtgttgtggttataagctaaagaaattagttcaatgtgaaaaacagtacttttgctgaaaactgatcctcagcacattattttaaatccttccttcaaatcctactgaacacacgtttctccccaccatgagtctcaatattgaccctgaatatccccatagctcgatgtgaatatgcctttgtcagcaccatgacatgggtgccagccgagttagacgctggtaaaactacccyaagaaataggaataattcccttgcaattgggcgcagccatagaggatggctgaactttccaagaattatatatctgttagatttttaagttcttccaaagccagggcatatattttactcttttgtgaaaatttgttggatgaattagggaatttatggcataggccagattgttactgagtttgggagagctttgaaacctgtgaagtttataacaacaataaaacaatagccactac

SEQ ID NO: 308086 - DNA, 630 bp, Homo sapiens
tcattggtaaaggataaatgctcactaaatatttatttgcttaattggtatctaaacttggtttttataatatgtaatatgttccactacagtaaggagagtttctctttttgtagcagtaaattgcagaatgatttattcttttctaataaaaatcaagcaagggcccaatgcagcaactcttaacttcaggatttgagctcagctagggtgccagctacagcctcaaccacaattatttccagttaaactaaaatagtatttttttcgaaccatggctttgtgactctaatttatttttaaccacctgtaacrtaaattgtctcacttgattttcccacaaacctgtgactggttgagattatcatcccagtccccaagaggtggattctaagggaaagaacaaccaagtgtcccatctaaggtcaaaagcaagtggggacaaaattgcagccagtccaggttctttcaattgcacagaactatttgcaaagcaatgttatggcaacttagaggaaaactctccatttaactaccatattaagttcctctagctatactatctggctaggaacactgaagtatactactcaacgtatgataggggatcagtattgatagaaagaataa

SEQ ID NO: 308087 - DNA, 630 bp, Homo sapiens
tcattggtaaaggataaatgctcactaaatatttatttgcttaattggtatctaaacttggtttttataatatgtaatatgttccactacagtaaggagagtttctctttttgtagcagtaaattgcagaatgatttattcttttctaataaaaatcaagcaagggcccaatgcagcaactcttaacttcaggatttgagctcagctagggtgccagctacagcctcaaccacaattatttccagttaaactaaaatagtatttttttcgaaccatggctttgtgactctaatttatttttaaccacctgtaacgtaaattgtctcacttgattttcccacaarcctgtgactggttgagattatcatcccagtccccaagaggtggattctaagggaaagaacaaccaagtgtcccatctaaggtcaaaagcaagtggggacaaaattgcagccagtccaggttctttcaattgcacagaactatttgcaaagcaatgttatggcaacttagaggaaaactctccatttaactaccatattaagttcctctagctatactatctggctaggaacactgaagtatactactcaacgtatgataggggatcagtattgatagaaagaataa

SEQ ID NO: 308088 - DNA, 630 bp, Homo sapiens
tcattggtaaaggataaatgctcactaaatatttatttgcttaattggtatctaaacttggtttttataatatgtaatatgttccactacagtaaggagagtttctctttttgtagcagtaaattgcagaatgatttattcttttctaataaaaatcaagcaagggcccaatgcagcaactcttaacttcaggatttgagctcagctagggtgccagctacagcctcaaccacaattatttccagttaaactaaaatagtatttttttcgaaccatggctttgtgactctaatttatttttaaccacctgtaacgtaaattgtctcacttgattttcccacaaacctgtgactggttgagattatcatcccagtccccaagaggtggattctaagggaaagaacaaccaagtgtcccatctaaggtcaaaagcaagtggggacaaaattgcagccagtccaggttctttcaattgcacagaactatttgcaaagcaatgttatggcaacttagaggaaaactctccatttaactrccatattaagttcctctagctatactatctggctaggaacactgaagtatactactcaacgtatgataggggatcagtattgatagaaagaataa

SEQ ID NO: 308089 - DNA, 597 bp, Homo sapiens
tgggccaccacagttgttcaaccatgatggctttatcttggtttagtctcagtagctacaaacctaacaataaaaaacaagctaatctcatgctttgagaaaaataatacttctttgttttgagagtttaaaaactttctcctggaattgtgacttttcgtagtctgaaaaattaatatagtgtaacaaatattattttattacatatattgatactttagaatttctaccactgtaattctacctttgatttcaataatcaaccayagtgtcttggggtcaagcactttcaccttaggactgggtttatgttagaaaaaaaaactttattaagggttctactttcctagacttgagcaaataatggaatatgcttcaaagacttagatgaatgaacttcagctcatattggaagatttacaaggaaaataattaattcaattatattttcaaaagaaagatgagcctttagaaatatgccttctgcccagtttttgtaaagattctgaatatcaaatcttttcccagttaaaattccagtacaatatataataaatagtaccttcataagtgaaaatattacataatttaatgttt

SEQ ID NO: 308090 - DNA, 597 bp, Homo sapiens
tgggccaccacagttgttcaaccatgatggctttatcttggtttagtctcagtagctacaaacctaacaataaaaaacaagctaatctcatgctttgagaaaaataatacttctttgttttgagagtttaaaaactttctcctggaattgtgacttttcgtagtctgaaaaattaatatagtgtaacaaatattattttattacatatattgatactttagaatttctaccactgtaattctacctttgatttcaataatcaaccacagtgtcttggggtcaagcamtttcaccttaggactgggtttatgttagaaaaaaaaactttattaagggttctactttcctagacttgagcaaataatggaatatgcttcaaagacttagatgaatgaacttcagctcatattggaagatttacaaggaaaataattaattcaattatattttcaaaagaaagatgagcctttagaaatatgccttctgcccagtttttgtaaagattctgaatatcaaatcttttcccagttaaaattccagtacaatatataataaatagtaccttcataagtgaaaatattacataatttaatgttt

SEQ ID NO: 308091 - DNA, 597 bp, Homo sapiens
tgggccaccacagttgttcaaccatgatggctttatcttggtttagtctcagtagctacaaacctaacaataaaaaacaagctaatctcatgctttgagaaaaataatacttctttgttttgagagtttaaaaactttctcctggaattgtgacttttcgtagtctgaaaaattaatatagtgtaacaaatattattttattacatatattgatactttagaatttctaccactgtaattctacctttgatttcaataatcaaccacagtgtcttggggtcaagcactttcaccttaggactgggtttatgttagaaaaaaaaactttattaagggttctactttcctagacttgagcaaataatggaatatgcttcaaagacttagatgaatgaacttcagctcatattggaagatttacaaggaaaataattaattcarttatattttcaaaagaaagatgagcctttagaaatatgccttctgcccagtttttgtaaagattctgaatatcaaatcttttcccagttaaaattccagtacaatatataataaatagtaccttcataagtgaaaatattacataatttaatgttt

SEQ ID NO: 308092 - DNA, 597 bp, Homo sapiens
tgggccaccacagttgttcaaccatgatggctttatcttggtttagtctcagtagctacaaacctaacaataaaaaacaagctaatctcatgctttgagaaaaataatacttctttgttttgagagtttaaaaactttctcctggaattgtgacttttcgtagtctgaaaaattaatatagtgtaacaaatattattttattacatatattgatactttagaatttctaccactgtaattctacctttgatttcaataatcaaccacagtgtcttggggtcaagcactttcaccttaggactgggtttatgttagaaaaaaaaactttattaagggttctactttcctagacttgagcaaataatggaatatgcttcaaagacttagatgaatgaacttcagctcatattggaagatttacaaggaaaataattaattcaattatattttcaaaagaaagatgagcctttagaaatatgccttctgcccagtttttgtaaagattctgaatatcaaatcttttcccagttaaamttccagtacaatatataataaatagtaccttcataagtgaaaatattacataatttaatgttt

SEQ ID NO: 308093 - DNA, 572 bp, Homo sapiens
atcctgctagctgctatttctcacactcctttgctcttcctcctccaagaggcttctaaattgtggcagaccccaaggcattttctccagccatcctttcttcctgtctcttttctctttggaagatctcatcctgcccccatagtcttaaaaacaccttggaggctgatgattctaaaatgtatacctgcagcttggacctctctcctgagtccaracttgtctctccctccttggcttagcacagtgacaaccagctagagcccctgagccagattttctgtgggctaattcagactctgccatttattacagccttaacagtcacaatagcagtccctatttccagataaagttaagaggcataaatgagctattgcccctaaaagggcttagagcagcgcctgccacataataggcattgataaataatagctatgattatgacttaaatctctactttggacatctaacaagcatctcatttttaacatgacaaaaccaggacaactggtgttttccctctgtaccttctgatacaccagattttcagccaagatcaaacacccaga

SEQ ID NO: 308094 - DNA, 572 bp, Homo sapiens
atcctgctagctgctatttctcacactcctttgctcttcctcctccaagaggcttctaaattgtggcagaccccaaggcattttctccagccatcctttcttcctgtctcttttctctttggaagatctcatcctgcccccatagtcttaaaaacaccttggaggctgatgattctaaaatgtatacctgcagcttggacctctctcctgagtccagacttgtctctccctccttggcttagcacagtgacaaccagctagagcccctgagccagattttctgtgggctaattcagactctgccatttattacagccttaacagtcacaatagcagtccctatttccagataaagttaagaggcataaatgagctattgcccctaaaagggcttagagcagsgcctgccacataataggcattgataaataatagctatgattatgacttaaatctctactttggacatctaacaagcatctcatttttaacatgacaaaaccaggacaactggtgttttccctctgtaccttctgatacaccagattttcagccaagatcaaacacccaga

SEQ ID NO: 308095 - DNA, 572 bp, Homo sapiens
atcctgctagctgctatttctcacactcctttgctcttcctcctccaagaggcttctaaattgtggcagaccccaaggcattttctccagccatcctttcttcctgtctcttttctctttggaagatctcatcctgcccccatagtcttaaaaacaccttggaggctgatgattctaaaatgtatacctgcagcttggacctctctcctgagtccagacttgtctctccctccttggcttagcacagtgacaaccagctagagcccctgagccagattttctgtgggctaattcagactctgccatttattacagccttaacagtcacaatagcagtccctatttccagataaagttaagaggcataaatgagctattgcccctaaaagggcttagagcagcgcctgccacataataggcattgataaataatagctatgattatgacttaaatctctactttggacatctaacaagcatctcatttttaacatgacaaaaccaggacaactggtgtyttccctctgtaccttctgatacaccagattttcagccaagatcaaacacccaga

SEQ ID NO: 308096 - DNA, 580 bp, Homo sapiens
ccaacatggaacccaatctctactaaacatacaaaaattagcggggcgtggtggtggacatctgtaatcccaactactcaggaggctgcggcaggagaatcgcttgaaccccagaggtggaggttgcaatgagccgagatcgtgccactgcactccagtctgggcaaaacagcgagaccccatcttaaaaaaaaaaaaaagasaaaagaaaatcagtcaatagtgaacattcagtgtttccagcagctaccaaggtatgctatgtgtgctctggtcattctctgactctcaggtatacttcttgaaaccagggaatgaacagtgtagctcagataatttggagctggaggcactgcaggaaccaatctttataaaaagattgcattgtgttcattacgctttattcgctaaggcaggaaaatatgctaatgcactttacaatgattttcaaaaatggttgaaataaggtgttttgtgttttgtttttaatttaaaggggcattaagaaaaataagcaattacattccatgtccaatcaaggttttactgtatgtgacttagaggtcattaaaaatgctga

SEQ ID NO: 308097 - DNA, 580 bp, Homo sapiens
ccaacatggaacccaatctctactaaacatacaaaaattagcggggcgtggtggtggacatctgtaatcccaactactcaggaggctgcggcaggagaatcgcttgaaccccagaggtggaggttgcaatgagccgagatcgtgccactgcactccagtctgggcaaaacagcgagaccccatcttaaaaaaaaaaaaaagacaaaagaaaatcagtcaatagtgaacattcagtgtttccagcagctaccaaggtatgctatgtgtgctctggtcattctctgactctcaggtatacttcttgaaaccagggaatgaacagtgtagctcagataatttggagctggaggcactgcaggaaccaatctttataaaaagattgcattgtgttcattacgctttattcgctaaggcaggaaaatatgctaatgcactttacaatgattttcaaaaatggttgaaataaggtgttttgtgttttgtttttaatttaaaggggcaytaagaaaaataagcaattacattccatgtccaatcaaggttttactgtatgtgacttagaggtcattaaaaatgctga

SEQ ID NO: 308098 - DNA, 555 bp, Homo sapiens
tttgtggaagctgacatcaacctaacatggtttgagtctttgtgtgtagaagttacatacattgtcccctggtcacattctcaacatgttatgtcaagaaagcgtctaggaaaaagaaagaaggcacagaaaggawcatattaaagccacttaaaacaaggagtgaggactgactcagtgccaatatcaatattttattccttttggtaggcaaaaatttttgtgcttctgaaattttagaaacttcaaaaaataggttgtacttttaaacagaaagtagaaaatattgagtttcaggttttatgaaaagtttcttggatttggtggggatttttttttttattttttggttttgggttagttgggggtttcttctgatgtttctgtctccatcatttctgaattagaacatagacattttaaatttgagagcattatatggtgcacagaattcagctatgtgacaaaattacacatactgattctttcccttttttgatcctctgtagcaatagctattttaacaaaacactatttatcctcataataaccagt

SEQ ID NO: 308099 - DNA, 555 bp, Homo sapiens
tttgtggaagctgacatcaacctaacatggtttgagtctttgtgtgtagaagttacatacattgtcccctggtcacattctcaacatgttatgtcaagaaagcgtctaggaaaaagaaagaaggcacagaaaggatcatattaaagccacttaaaacaaggagtgaggactgactcartgccaatatcaatattttattccttttggtaggcaaaaatttttgtgcttctgaaattttagaaacttcaaaaaataggttgtacttttaaacagaaagtagaaaatattgagtttcaggttttatgaaaagtttcttggatttggtggggatttttttttttattttttggttttgggttagttgggggtttcttctgatgtttctgtctccatcatttctgaattagaacatagacattttaaatttgagagcattatatggtgcacagaattcagctatgtgacaaaattacacatactgattctttcccttttttgatcctctgtagcaatagctattttaacaaaacactatttatcctcataataaccagt

SEQ ID NO: 308100 - DNA, 591 bp, Homo sapiens
tgataggaaggcccttgattagcaaagaagacgtagaggaaggtagctagtgactggtttgaatgtgctggcctatataattatctagaattaatatttgctcagagctcacagaatacacaacattctgctaaaggagggtggcatggaaaaagaggcagagatcaacagacctgtaacctagctcagcaaggtagacctttgtgttcagtcaaaagttcatgaggattccattgaatatgtaaaaatcaaaacatgtgtgtacatagtttgctaacgttccacctctgccaggttgtgctgggttmttttgatatcagatgagtcaaccagccaaaggcaaaaaatcggtcttatttttaaacactggataataggctgggtgcggtggtttattcctgcaatcccagcattttgggaggccgagaaagggggatcagttgaagaccatcctgggcaacatagcaagattctgtctctacaaaaaaatttaaaattatccagacattgtggtgtgcacctgtagtcccagctactgaggaagttgaggtgggagggtcacttaagcctaggagttagaggctgcagtga

SEQ ID NO: 308101 - DNA, 525 bp, Homo sapiens
tttcttgttatgaaggaaaatttattacagttcttaaaagtacatgtaaaacaccaatgtaaataatgcatttgaagagaaatatttttcaggtctacttcaataaatctttaattttctattatttaggkttctccaaatagaggatctatgaaaatgcagcatttgttaatggaatttttacccagatactaaaaaaaatatttgcaggaattaaaaatagacaacacagaatgtagcacatttactgaattccaataacagacacgtagaaaataggtcagctctctcatctggcctatgtcaatttggtgtgaattattatcaagacagcctgcaaataacagccaattttacaagtatatttggatctcattttacaaaatgatagaaaattgagaaaaccagttttccttagaactggatgaattatcctcctgattcaaggtatgtatgatggtgacttcctgcagaaaagaatgctgctaactggaaagaggacaaggcttcattacattggggaca

SEQ ID NO: 308102 - DNA, 525 bp, Homo sapiens
tttcttgttatgaaggaaaatttattacagttcttaaaagtacatgtaaaacaccaatgtaaataatgcatttgaagagaaatatttttcaggtctacttcaataaatctttaattttctattatttagggttctccaaatagaggatctatgaaaatgcagcatttgttaatggaattttkacccagatactaaaaaaaatatttgcaggaattaaaaatagacaacacagaatgtagcacatttactgaattccaataacagacacgtagaaaataggtcagctctctcatctggcctatgtcaatttggtgtgaattattatcaagacagcctgcaaataacagccaattttacaagtatatttggatctcattttacaaaatgatagaaaattgagaaaaccagttttccttagaactggatgaattatcctcctgattcaaggtatgtatgatggtgacttcctgcagaaaagaatgctgctaactggaaagaggacaaggcttcattacattggggaca

SEQ ID NO: 308103 - DNA, 525 bp, Homo sapiens
tttcttgttatgaaggaaaatttattacagttcttaaaagtacatgtaaaacaccaatgtaaataatgcatttgaagagaaatatttttcaggtctacttcaataaatctttaattttctattatttagggttctccaaatagaggatctatgaaaatgcagcatttgttaatggaatttttacccagatactaaaaaaaatatttgcaggaattaaaaatagacaacayagaatgtagcacatttactgaattccaataacagacacgtagaaaataggtcagctctctcatctggcctatgtcaatttggtgtgaattattatcaagacagcctgcaaataacagccaattttacaagtatatttggatctcattttacaaaatgatagaaaattgagaaaaccagttttccttagaactggatgaattatcctcctgattcaaggtatgtatgatggtgacttcctgcagaaaagaatgctgctaactggaaagaggacaaggcttcattacattggggaca

SEQ ID NO: 308104 - DNA, 525 bp, Homo sapiens
tttcttgttatgaaggaaaatttattacagttcttaaaagtacatgtaaaacaccaatgtaaataatgcatttgaagagaaatatttttcaggtctacttcaataaatctttaattttctattatttagggttctccaaatagaggatctatgaaaatgcagcatttgttaatggaatttttacccagatactaaaaaaaatatttgcaggaattaaaaatagacaacacagaatgtagcacatttactgaattccaataacagacacgtaraaaataggtcagctctctcatctggcctatgtcaatttggtgtgaattattatcaagacagcctgcaaataacagccaattttacaagtatatttggatctcattttacaaaatgatagaaaattgagaaaaccagttttccttagaactggatgaattatcctcctgattcaaggtatgtatgatggtgacttcctgcagaaaagaatgctgctaactggaaagaggacaaggcttcattacattggggaca

SEQ ID NO: 308105 - DNA, 575 bp, Homo sapiens
attattttggagttttttcaaatgccaacttagcatttcaaataacaagggaattacttaatgagctcactctatrttagaacattttgctgactgtatcttaccaaggctccaaaaaaatcaaaacttcaattagtagaaatatcaatgggctgggagttaagaattctgtgctctaattcttactcagtttaattctgggaaagtcacctcattttttgtgctcttatttatggagcaaggttaaagtttcttccaactctaaaattatggatcttgccaaaattgctccatcaaagttacacaactaatggtaataaacataacactcaaattttggctagaattaaaaatttttatctcagataatttgtctgttaaagttcatgtatgacttaaacattgtgttctatagtgtctagactctttctactttcttttataaaatggattccgtactgattgctttagattctagcactgagagcctttaattttcacatactctcagtttttcaattattaatttactgtccaacttcgtggtctgtgttggtccttcttgaacctattct

SEQ ID NO: 308106 - DNA, 575 bp, Homo sapiens
attattttggagttttttcaaatgccaacttagcatttcaaataacaagggaattacttaatgagctcactctatgttagaacattttgctgactgtatcttaccaaggctccaaaaaaatcaaaacttcaattagtagaaatatcaatgggctgggagttaagaattctgtgctctaattcttactcagtttaattctgggaaagtcacctcattttttgtgctcttatttatggagcaaggttaaagtttcttccaactctaaaattatggatcttgccaaaattgctccatcaaagttacacaactaatggtaataaacataacactcaaattttggctagaattaaaaatttttawctcagataatttgtctgttaaagttcatgtatgacttaaacattgtgttctatagtgtctagactctttctactttcttttataaaatggattccgtactgattgctttagattctagcactgagagcctttaattttcacatactctcagtttttcaattattaatttactgtccaacttcgtggtctgtgttggtccttcttgaacctattct

SEQ ID NO: 308107 - DNA, 575 bp, Homo sapiens
attattttggagttttttcaaatgccaacttagcatttcaaataacaagggaattacttaatgagctcactctatgttagaacattttgctgactgtatcttaccaaggctccaaaaaaatcaaaacttcaattagtagaaatatcaatgggctgggagttaagaattctgtgctctaattcttactcagtttaattctgggaaagtcacctcattttttgtgctcttatttatggagcaaggttaaagtttcttccaactctaaaattatggatcttgccaaaattgctccatcaaagttacacaactaatggtaataaacataacactcaaattttggctagaattaaaaatttttatctcagataatttgtctgttaaagttcatgtatgacttaaacattgtgttctatagtgtctagactctttctactttcttttataaaatggattccgtactgattgctttagattctagcactgagagcctttaattttcacatactctcagtttttcaattattamtttactgtccaacttcgtggtctgtgttggtccttcttgaacctattct

SEQ ID NO: 308108 - DNA, 545 bp, Homo sapiens
actccttctttctctgcagtattgttgaaatttaaatattactttttgccttgttaggaacttcatggaaatgatcttttaagaaaataatgtactttgtgaataygttttatatatgaattatagtattttaggaagacaggaactttttttttcccctaagagatgtttcaaccaagaaaatcaatttttttccaactgcttcttcattttctcatatttcatgctggttttctttacaagatttttttttaatgctcatgaaactatgaccttgtataagtttcccaggagacatgattctcagcattttgttggacaaacatttgttttttgtaactacatgaacaagccaaattgcacgtagtccaaaaaataattctggcctttttaactacactctttttctttttaatgccatattcaaggaatcccagtacagtggcaattaaaacatgcgaattttgccaattaaccatgagaaggatttacagccttggcacatatagtaagataagttaacactctgaggaaggtttcacagt

SEQ ID NO: 308109 - DNA, 545 bp, Homo sapiens
actccttctttctctgcagtattgttgaaatttaaatattactttttgccttgttaggaacttcatggaaatgatcttttaagaaaataatgtactttgtgaatatgttttatatatgaattatagtattttaggaagacaggaactttttttttcccctaagagatgtttcaaccaagaaaatcaatttttttccaactgcttcttcattttctcatatttcatgctggttttctttacaagatttttttttaatgctcatgaaactatgaccttgtataagtttcccaggagacatgattctcagcattttgttggacaaacatttgttttttgtaactacatgaacaagccaaattgcacgtagtccaaaaaataattctggcctttttaactacactctttttctttttaatgccatattcaaggaatcccagtacagtggcaattaaaacatkcgaattttgccaattaaccatgagaaggatttacagccttggcacatatagtaagataagttaacactctgaggaaggtttcacagt

SEQ ID NO: 308110 - DNA, 489 bp, Homo sapiens
ttctggcctgtgtgtgtctgaacttccctacggtatcagtgaaatatcccaagagaccgtcaactttcccttaattacacattgactagaaaactattcctaattcaaacttcaaaaatatgtcattattaggaagaamatgctctgactgtctgacaaccagggaattctggttctggaagtggtacttatctcattgtaaagaaaaaactggcatgttgggaaggtttctaatgtagcagaatgagcataggctttggagtctgactaatgtggatgcaaatctcacctgctgggtgacctttggtaaataactcaccactctccgtcagtgtgaacacaggtaaattactcatcctctctctctgaagctcacatttctcatggtaggactgtcaagaggttaaatgaagtaacttacataaagcttagcactcactaaatacttagtcttgatctgatcccctatccccattcatcctatgagat

SEQ ID NO: 308111 - DNA, 489 bp, Homo sapiens
ttctggcctgtgtgtgtctgaacttccctacggtatcagtgaaatatcccaagagaccgtcaactttcccttaattacacattgactagaaaactattcctaattcaaacttcaaaaatatgtcattattaggaagaacatgctctgactgtctgacaaccagggaattctggttctggaagtggtacttatctcattgtaaagaaaaaactggcatgttgggaaggtttctaatgtagcagaatgagcataggctttggagtctgactaatgtggatgcaaatctcacctgctgggtgacctttggtaaataactcaccactctccgtcagtgtgaayacaggtaaattactcatcctctctctctgaagctcacatttctcatggtaggactgtcaagaggttaaatgaagtaacttacataaagcttagcactcactaaatacttagtcttgatctgatcccctatccccattcatcctatgagat

SEQ ID NO: 308112 - DNA, 508 bp, Homo sapiens
ccactacacaattatcagaaggagtggaaagttctgtggaaaaaaatttgatggtgaaagaatgttaaaattagctttaaattccaaggaacataaataaagaacaagaggtgacctagaatatcataaagatcaaaaaggagttttgagggctttgggatatgtcttattcatctctagctcaaggcctggtgtgagtgagtctagtataaggggaaggaaggagaactgaccatcactaaatatgtaytctgtgcttgatccgtgcggtacttcttatatacattttttcatttatgcctcccaacgagccattagttaggaaataacatctccatttttcacatgaacctgcagttgagaaattaaataacttgatgttcccagaaagtcaggtataatgctgacatttgaactcagacctttacactacaaagttcataatgttattccactgtattattttgcctattctgaatacatctctatttacagagctaacaattgt

SEQ ID NO: 308113 - DNA, 508 bp, Homo sapiens
ccactacacaattatcagaaggagtggaaagttctgtggaaaaaaatttgatggtgaaagaatgttaaaattagctttaaattccaaggaacataaataaagaacaagaggtgacctagaatatcataaagatcaaaaaggagttttgagggctttgggatatgtcttattcatctctagctcaaggcctggtgtgagtgagtctagtataaggggaaggaaggagaactgaccatcactaaatatgtactctgtgcttgatccgtgcggtacttcttatatacattttttcatttatgcctcccaacgagccattagttaggaaataacatctccatttttcacatgaacctgcagttgagaaattaaataacttgatgttcccagaaagtcaggtataatgctgrcatttgaactcagacctttacactacaaagttcataatgttattccactgtattattttgcctattctgaatacatctctatttacagagctaacaattgt

SEQ ID NO: 308114 - DNA, 565 bp, Homo sapiens
attttcttatgtcctcataatagcatgaaaggagaaagtagggaggaaattggtagagacttacgctacagtaattaagttcaattatatgaaattgccaatawctgactattttttttaaacttaagttctgggatacatgtgcaaacttgcaggtttgttacataggtatacatgtgccatggtggtttgctgcacctatcaacccgtcatttagattttaagtctcgcatgcattaggtatttgtcctaatgctctcccttcccttaaccccctcaacccctgacaggcccgggtgtgtgatgttcccctccttgtgttcccctcattgttcaactctcacttatgagtgagaacatgcagtatttggttttctgttcctgagttagtttgctgagaatgatggcttccagcttcatccatgtccctgcaaatcacatgaacacgttcttttttatgactgcatagtattctgtggtgtatatgtgccacattttcctgaccatttttgacctttatagtggctccatataataaatggagtggcaaatacagactaacctg

SEQ ID NO: 308115 - DNA, 598 bp, Homo sapiens
atctttaataaccatctgcatatatctggcaatctctaaaagtcaaagtttgacctgagtccatgggtgagattaaaaaaagtcaaagttcctacggaaaaagcataaacagctatgaggacattttctgtttaatggaagataacttttcaggtgcactgattagaaaatgtgttggcagtagactggttcattgtttgtgtccttgcaggagttagtcaaaactcaaaaacgtctttgtggtataatatttctgagggaaagggaaatttgaaaaatagccttttgcttccaaaatattgaggttactcatcctccaattccctgagatcattaagacctgtttgtttgccttttccttgtgcataaggaaaccaaacaatggcttcttctttcccaatatggtaataactcttaaccctaatttctgcctagggaatctctctggcacagggaasagaaatttttctttatttacatatgtatctaacttgttctccatatgaactatgtacccatgaaagggacccatatgtttctatggtttttaattcaaatggtcatagttactaatattcgagtcttctgtggagttgac

SEQ ID NO: 308116 - DNA, 540 bp, Homo sapiens
tactatgattaattgctaggcatttcctaaacattctgtgaccatttaaacagaaatcggatttctgctctgatgtgtgccattgctgawtttgataaaattcttatttacattttattcaaccacagatgtttactgatgactaaaagggcaaatacatgagaaagtatagatcttttaacagatcctgtcaccattagtaataaaataattcaaaatccgtgttcttctctttaaaacaatttaaagaaaaggctgaatatttttattctaaacgtccttgtggactgaaagctctgatccattacagactcagaaggcccatccgaggggaaaataagaattatgatctcattatttttaagattctgttatttgctcagcaaaacgtaatccaaatgtgcattttactacagctataaaaatagaaagtaaattaaacaatcctaagaaatgtctttattctatttaatggaattttaagggggtgtttccttatgctattgaaaacaaaaacacagcaacagtgttctggcagac

SEQ ID NO: 308117 - DNA, 478 bp, Homo sapiens
agtattagtatcttcagtactaaggagtattaatactatgattaattgctaggcatttcctaaacattctgtgaccatttaaacagaaatcggatttctgctctgatgtgtgccattgctgaatttgataaaattcttatttacattttattcaaccacagatgtttactgatgactaaaagggcaaatacatgagaaagtatagatcttttaacagatcctgtcaccattagtaataaaataattcaaaatccgtgttcttctctttaraacaatttaaagaaaaggctgaatatttttattctaaacgtccttgtggactgaaagctctgatccattacagactcagaaggcccatccgaggggaaaataagaattatgatctcattatttttaagattctgttatttgctcagcaaaacgtaatccaaatgtgcattttactacagctataaaaatagaaagtaaattaaacaat

SEQ ID NO: 308118 - DNA, 571 bp, Homo sapiens
tctgtgaccatttaaacagaaatcggatttctgctctgatgtgtgccattgctgaatttgataaaattcttatttacattttattcaaccacagatgtttactgatgactaaaagggcaaatacatgagaaagtatagatcttttaacagatcctgtcaccattagtaataaaataattcaaaatccgtgttcttctctttaaaacaatttaaagaaaaggctgaatatttttattctaaacgtccttgtggactgaaagctctgatccattacagactcagaaggcccatccgaggggaaaataagaattaygatctcattatttttaagattctgttatttgctcagcaaaacgtaatccaaatgtgcattttactacagctataaaaatagaaagtaaattaaacaatcctaagaaatgtctttattctatttaatggaattttaagggggtgtttccttatgctattgaaaacaaaaacacagcaacagtgttctggcagactgtcctcacaaactttggaaattaaagcaaaacaaaataactcattgtcctacctggaaaaaata

SEQ ID NO: 308119 - DNA, 369 bp, Homo sapiens
gtcatgaaactacccttatgattgctgttgtagacaaatgtcacatcactggatttgtggagtttcctttccaatgcatcgtttagattgagctgtactttgctaaaccagcttaaagtaaaccccacctcttccaatagtcaagattcccactaacctcaagcagagccgcaggtgcatattattagcagaactggactcttttcacttataatttgagtcccaagtcttttgaagtaagacccatttgcccagatttgtatagcattacctgagcgtaacattacccaacaaagccaaattgatgggttaaggatacaaataaggaattccgaatcagcttrtgaggcaggttttgtgagagaggag

SEQ ID NO: 308120 - DNA, 516 bp, Homo sapiens
aagtctacttcagaaagtctacttcatgaatttcatcagagatttgagtgtttaaaaatataaatatattcaaaaggacaaatatttcaaaacaagatctcaaaagaatgagtattatacttgaaaacaattttcaagagcggcttctatgcaaggtgtgagcaatagaatcactaaaggctaccaccttccaagctgactattctaatatgaacaatttccatttagaaacaaaccttctggtgtttctctttatatttatttatttatttatttwttaagatcgagtcttgctccatggcccaggctggagtgcagtggtgccatctaggctcactgcaacctccgcctccctggttcaagcgattttcctgcctcaaccacccaagtacctgtcattacaggtggccaccaccacgcccggctaatttttgtatttttagtagagacaggatttggccatgttggcctggctggtttcaaactcctgacctcaagcgatccacctgcctcggc

SEQ ID NO: 308121 - DNA, 475 bp, Homo sapiens
aatcgtagctcagaaaggttaacctagatactacttgagtctaaaatcgattttgggttctaatcttgactctacctacttgctacctactgttactgtctcactgtttccattttcttatgtgtaaaatgtatggaaatggatacacttttcawgtgcctaatatcaaaaacattttcatatggtttataataaaaacacaaaatgaggcagctaaaattttaaaaaatgttatagagcagtggttttcaaatgacaatcactggaataataggggatctagcgccatcggggggtaggggattggttttttttctttgcttaattttcttttcttttcattttttaaatgatacatgatgttttccatatttatggggtacaggtgatatcttgctacatgtgtagaatagtcagagtatctgaggtatccatcactttgagtattatttctacatgttgggaacagttctag

SEQ ID NO: 308122 - DNA, 475 bp, Homo sapiens
aatcgtagctcagaaaggttaacctagatactacttgagtctaaaatcgattttgggttctaatcttgactctacctacttgctacctactgttactgtctcactgtttccattttcttatgtgtaaaatgtatggaaatggatacacttttcatgtgcctaatatcaaaaacattttcatatggtttataataaaaacacaaaatgaggcagctaaaattttaaaaaatgttatagagcastggttttcaaatgacaatcactggaataataggggatctagcgccatcggggggtaggggattggttttttttctttgcttaattttcttttcttttcattttttaaatgatacatgatgttttccatatttatggggtacaggtgatatcttgctacatgtgtagaatagtcagagtatctgaggtatccatcactttgagtattatttctacatgttgggaacagttctag

SEQ ID NO: 308123 - DNA, 540 bp, Homo sapiens
acattgtatatctataatacactgttgtttactatagytactctactgtttactatagtcacagacaacactttgttgtcaaaccatagaacttataccttttatctgactgtgtttgtattgattaacttacctctcttcagcccctctccctttccagtctctagtatttattattctactctctacctttattatatcaactttttaagcttgcagtgggggattttttagggagatttgttgggagtgcttgtagctctgctctcaacagctgtacttttaactgtttcatgtatcaagccaaaggtacattgcttatcaaaaacaaatttttaagtcttgattagttacagagttgcagaggtttgtgtaaggaacttgggatgtcaaagttagaagcaaaaggttgattgaatttcttagcaacttctagggcaaagaaggaactatgtttgtttatacagcccctattaccttctgtagaaaagaaacagaaggaaggaaagaagaaagaaatgaagggaagaacaaagaaag

SEQ ID NO: 308124 - DNA, 595 bp, Homo sapiens
tggtggtggtggggttggttttgggatgattcaagtccrttacatttatcatttgattctcataaggagcacacaacctagatccctgcatgctcagttcatgacagggttcatactcctatgaggctctaatgcctctgctgatctggcaggaagcggagctctggtctcaatgtttgctggcctgccacttgcctcctgctgtacggcctggttcctaatagtccatggactggtactagtctatggctcggggattagggacctctgccctagaaggttggcgagcagtggtagagatgggtattagaaaattcttgatattcttacgttgattcctttcctctttaacttccacttattggccctcaaaagcatggtggaaagaatcctgctgcctttgcacttgacaacctttggaggtaaagatgtctgtgtcatccctgcaatttgtcctcttataggttaaatgttctcagttctctccttcatcatttgagataatttccagacagtatcttggttgcctttgtctggatacattgttttgacagtgtttcttttacaacatagcattgagaaataaacacagtgt

SEQ ID NO: 308125 - DNA, 595 bp, Homo sapiens
tggtggtggtggggttggttttgggatgattcaagtccgttacatttatcatttgattctcataaggagcacacaacctagatccctgcrtgctcagttcatgacagggttcatactcctatgaggctctaatgcctctgctgatctggcaggaagcggagctctggtctcaatgtttgctggcctgccacttgcctcctgctgtacggcctggttcctaatagtccatggactggtactagtctatggctcggggattagggacctctgccctagaaggttggcgagcagtggtagagatgggtattagaaaattcttgatattcttacgttgattcctttcctctttaacttccacttattggccctcaaaagcatggtggaaagaatcctgctgcctttgcacttgacaacctttggaggtaaagatgtctgtgtcatccctgcaatttgtcctcttataggttaaatgttctcagttctctccttcatcatttgagataatttccagacagtatcttggttgcctttgtctggatacattgttttgacagtgtttcttttacaacatagcattgagaaataaacacagtgt

SEQ ID NO: 308126 - DNA, 595 bp, Homo sapiens
tggtggtggtggggttggttttgggatgattcaagtccgttacatttatcatttgattctcataaggagcacacaacctagatccctgcatgctcagttcatgacagggttcatactcctatgaggctctaatgcctctgctgatctggcaggaagcggagctctggtctyaatgtttgctggcctgccacttgcctcctgctgtacggcctggttcctaatagtccatggactggtactagtctatggctcggggattagggacctctgccctagaaggttggcgagcagtggtagagatgggtattagaaaattcttgatattcttacgttgattcctttcctctttaacttccacttattggccctcaaaagcatggtggaaagaatcctgctgcctttgcacttgacaacctttggaggtaaagatgtctgtgtcatccctgcaatttgtcctcttataggttaaatgttctcagttctctccttcatcatttgagataatttccagacagtatcttggttgcctttgtctggatacattgttttgacagtgtttcttttacaacatagcattgagaaataaacacagtgt

SEQ ID NO: 308127 - DNA, 540 bp, Homo sapiens
caaaactagaacctggggctgggcatggtgactcactcctgtaatcccagcattttgggaggccgaggcaggtggactgcttgagctcaggagtttgagaccracctgggcaatatagtgaaaccctgtctctaccaaaaatacaaaaaattagctgggtatgatggtgcgcacttgtggtcccagctacttgagaggctgaggcaggaggatcacttgagcctgggaggcggaggttgcagtgagctgagtttgtgccactgcactccagcctgggtgacagagcgagactctgtctcaaaaaacaaaacaaaacaacaacaacaaaaaatcaaaacaataaaaaaaactagaatctgcagaatggatagagttttcatagctgatgatgagtggagagatttttggattaaacggttaatctggataaaaacatgaacagaaggctttgagaaagcctccaccatcttcatttgtaacttcaaccttcctcatcatgcagaagtgggttgagaggcatgtatggtagaatgaatgaac

SEQ ID NO: 308128 - DNA, 542 bp, Homo sapiens
tatgtctgcactccctctctccaaccccaccagttatcactgatgctgtctggtgaggctttcctgttctccaggtctcagtctttgcctttgacctattcattggctattctcaaccccaatgactttgtcttccccatgagactggacaacagaggggatgaggaaagcattttacctctcttgcggttggaaggaggggagaacatgagatcagtggagagggaatcattgaaacagtcagagaccaaaaccctgagagagacaggatcctatagatctaagttaagaagaaggctgatttagagagatatttagctttggtggctgtgaagattwtgttttatccagactcaaagtagaaagggtgttcaatcctaggtctgagatttgttatattattattaaaaaaaatctttaattttgtagatagagccatcaccagagattaaaagggcagttttggctgggcatgatggcgcattcctgtaatcctagcactatgggaagctgaggcaagaggattgcctgagctcaggagt

SEQ ID NO: 308129 - DNA, 542 bp, Homo sapiens
tatgtctgcactccctctctccaaccccaccagttatcactgatgctgtctggtgaggctttcctgttctccaggtctcagtctttgcctttgacctattcattggctattctcaaccccaatgactttgtcttccccatgagactggacaacagaggggatgaggaaagcattttacctctcttgcggttggaaggaggggagaacatgagatcagtggagagggaatcattgaaacagtcagagaccaaaaccctgagagagacaggatcctatagatctaagttaagaagaaggctgatttagagagatatttagctttggtggctgtgaagattttgttttatccagactcaaagtagaaagggtgttcaatcctaggtctgagatttgttatattattattaaaaaaaatctttaattttgtrgatagagccatcaccagagattaaaagggcagttttggctgggcatgatggcgcattcctgtaatcctagcactatgggaagctgaggcaagaggattgcctgagctcaggagt

SEQ ID NO: 308130 - DNA, 609 bp, Homo sapiens
ttttctggcttccatatattaataagaacatgtgttattggcctttccattctcagcttatttcacttaacaaaatatcaaatggcaaaaagctgaytgtaaaagggaagttgagaaaagacagctagaatgactttcaccttggacagatcaattttagaaaaagtaatgaagatagacctttataatctaaaaaaaaatcccctaagtctctcttacccacttaaccccattgaagagtttttgtgcacactagtggtaaaagttaaccagtttgttgatagctaatctaaagaaggtagacactggagtttcaaatggctcaaccatttcctagttataaagtacaaacaagtaggcagaaaagagaaatgtaataagtatttattgaccccacttcgtgtgaggcatttgggctagatgctttcacatatgctccatgatttcagtcctgacattcactccaaaagagaggaagcatgtatgagcctccaccacaatgctgacatgcaaaaattatctcaagtactttttttactgctacttatgcagtagtgctaacccataggcagtgcacccagagtagccatgtactttttaaattcaagt

SEQ ID NO: 308131 - DNA, 615 bp, Homo sapiens
atttctcaggtgaagcagcagagcctcagaaaaattgagttgtcccaaggctgcataagtagtcactggggaaaccaatatctcaacctaggcttctgaccatragtttgggcattttagactgttttctttctaacctacgtgggtttgcccattgtctttggtacaatctgagaaaatgctagtatagcctgtagtcacagaattaatcaaatccagatttggtttataaagtacagaaaaccatgacctcggtttcgcttgcactcactaactaagctaattggctgaggggaattaaaatctccatggtaattatcactaaagcttaagcatgcttaattataagctggaatcctggattgttttcattactgtctgcttcaggattcactgttcttattaaagcatagtcatgtctatgatcagagctatctctagatagtaaaagaattttccctaaactttcatctctattttttgtgctagtgtcagggaaatgacttagggaagtgggtgatgggaagaaggaagtcatcctgccaacagatgcacaaaaggacttacacaaatataatcaatccacagttttgccattttatgccaaaagggata

SEQ ID NO: 308132 - DNA, 615 bp, Homo sapiens
atttctcaggtgaagcagcagagcctcagaaaaattgagttgtcccaaggctgcataagtagtcactggggaaaccaatatctcaacctaggcttctgaccatgagtttgggcattttagactgttttctttctaacctacgtgggtttgcccattgtctttggtacaatytgagaaaatgctagtatagcctgtagtcacagaattaatcaaatccagatttggtttataaagtacagaaaaccatgacctcggtttcgcttgcactcactaactaagctaattggctgaggggaattaaaatctccatggtaattatcactaaagcttaagcatgcttaattataagctggaatcctggattgttttcattactgtctgcttcaggattcactgttcttattaaagcatagtcatgtctatgatcagagctatctctagatagtaaaagaattttccctaaactttcatctctattttttgtgctagtgtcagggaaatgacttagggaagtgggtgatgggaagaaggaagtcatcctgccaacagatgcacaaaaggacttacacaaatataatcaatccacagttttgccattttatgccaaaagggata

SEQ ID NO: 308133 - DNA, 575 bp, Homo sapiens
cagcagcaggccagcatagctgcagtgcacagaagagagaagasgagatgagggcatggtagcatcgtgggttatagtagggacttggctttctactcctgtgacacagaaagccattggagggttttaagcagaatctgagcttgacttacattttagcagaaatatttgacttctgtagtgaaacacacacgggcagaaaaagggagacaaataggtaagctacctgggaatctgaggccttgtcttcagtttcttccagggagctcttttgacaagacctaaattactggctcttgtgtgtactgtgccatacccatctcatgggaatcccttcttcatcttcgcctcagcaaaatacaggaaatgcagcaacttctttctggctgccaaagccacaagccaacctatctcttgcttttcagagttttcaggcaggatcagacaccatttcagtgagttcccctctaacagaagaagagtaatgaagagctatctgagtgctctctatgtagcataatttctcttggctggggtcaagaagtaagccctatattcccttttgggaaggaaaa

SEQ ID NO: 308134 - DNA, 551 bp, Homo sapiens
atgtttctgctttagtgtagtcagtcctcctacgtgttagcagggaggaaatcttcaatactggtatgacagggccaagctttgtggtggttttggaacctggttatagggatttccaagtggaaaacaaaactgtctagttactaattttggaagttttcagatacctttgactcctttttaggggatcttcttagaaatagattttcagagggtgactagtaaatcattttccttcatgtggaagaaggggagaatacttctgtaatgtagtgatttatttgctgtgtggagaggcgatgtgaaagcagaacttgctttgaagattagggacctgtctttcattagtggtgaggaagtggaaagaggaatcaaaagaaccaggctctgatcctggttctactactgactagctgactagctgactgacctctctgagcctctgtttacttttctacaaggagatattacacagaaagaaagattatgcctttcattrcctatagaaaatgatcagaatatgtgctttcctacaggagtttataaaaata

SEQ ID NO: 308135 - DNA, 551 bp, Homo sapiens
atgtttctgctttagtgtagtcagtcctcctacgtgttagcagggaggaaatcttcaatactggtatgacagggccaagctttgtggtggttttggaacctggttatagggatttccaagtggaaaacaaaactgtctagttactaattttggaagttttcagatacctttgactcctttttaggggatcttcttagaaatagattttcagagggtgactagtaaatcattttccttcatgtggaagaaggggagaatacttctgtaatgtagtgatttatttgctgtgtggagaggcgatgtgaaagcagaacttgctttgaagattagggacctgtctttcattagtggtgaggaagtggaaagaggaatcaaaagaaccaggctctgatcctggttctactactgactagctgactagctgactgacctctctgagcctctgtttacttttctacaaggagatattacacagaaagaaagattatgcctttcattacctatagaaaaygatcagaatatgtgctttcctacaggagtttataaaaata

SEQ ID NO: 308136 - DNA, 531 bp, Homo sapiens
agaaggtgggaagatgaacagaagtttgggtttgatgaacagaaacattctggttcaagtgagtggtcttttaggggacaaataaaagaccagttatggaagtgggtagggtttagatagtagcctcttgtgctggactaagaagtttgtaccttttcctataggaagtgggaagctattgaaarttttagagaatgggtaactggttaaaatatttccatgcccagtggctgagtttgagggtggggaattggattcacttgatgcctttgggaccctccttcaatagtagtagaactggcttggaattaagagttggaatggtgagtataagttgcctgagatgaattgtcagacacagactctgatagcaaataagcaaggagaatcttgctcaggaccctcaaagcagtgccctgaactactttccacagtggaacttctaatatctgtgtttacaaagttagtattcttaaattcaaggagggttgaagaggtgtttggaatttagttcaatgtttttgtttgtta

SEQ ID NO: 308137 - DNA, 574 bp, Homo sapiens
gcatttgttaactatcttttttcatttagtttcagattttcttggtaattggtgtaatgaataagtatcaattaaaacctagacatttaggtactatgttataagactccagatcttattcaaatctctgtttgagatggctttctctgacaccaaaggaaggttgagtgctaccttgttactgctgsgtttgtgtagcagtccattcaggttccccagtttggatacattggtaaccaaagccatatacttcttgttactactgggcaggaatgggagttgcagatccctctagtctccactgataccttcctagtggggaagagtaggagggcatccttgctgctcccttcctagctactactgaccccatggggagaggatgagtggcctcattttctcctggagagcgatgaaagtcctgactttccagtaggtctcctctgacaccactccagtgagaaggcagaagcatacctcattactgctgggtgggtagaagtatgttccccatggcatctccattgctccccaggtggtctccactgacaccatgggtgtttgaggggggctg

SEQ ID NO: 308138 - DNA, 574 bp, Homo sapiens
gcatttgttaactatcttttttcatttagtttcagattttcttggtaattggtgtaatgaataagtatcaattaaaacctagacatttaggtactatgttataagactccagatcttattcaaatctctgtttgagatggctttctctgacaccaaaggaaggttgagtgctaccttgttactgctgcgtttgtgtagcagtccattcaggttccccagtttggatacattggtaaccaaagccatatacttcttgttactactgggcaggaatgggagttscagatccctctagtctccactgataccttcctagtggggaagagtaggagggcatccttgctgctcccttcctagctactactgaccccatggggagaggatgagtggcctcattttctcctggagagcgatgaaagtcctgactttccagtaggtctcctctgacaccactccagtgagaaggcagaagcatacctcattactgctgggtgggtagaagtatgttccccatggcatctccattgctccccaggtggtctccactgacaccatgggtgtttgaggggggctg

SEQ ID NO: 308139 - DNA, 567 bp, Homo sapiens
aaacctctgttaaattcactgggttttgtgaggattaagtgctataaaaattatatgtatattgaataaatatgtatatgatgttatgtacataattattaaatatataatgtgtatgtatatattatatatgttataattatatggagagagagagagagagggagagagagaactggcaaatagtacatgttcaataaactttagtttctggcttctcttaaaaaagcaaattagcaaaatacttgggtagtactttctttcactgatttttcctgactttacagcagaggtttttaacttggggtccataggtagaattcaggggctctgggaatttggatgggraaaatcacatctttattttcattaccctttaactgaaatacagcatttccttcaattataaatataggttacaaaccacagcaatattggcaatatcagtgactttgtcatcaatagaagtcatagatactttcatgtaacgttataagttacagaaatcttgaaacatgatttatgctcatgtccgctttgaagttgtaatagttattagactgcccc

SEQ ID NO: 308140 - DNA, 569 bp, Homo sapiens
ctgtgcctcagattttcatctgccctttattamctttcaagtcaagaaatataacacatacacagaaaagcacctcagaaataaatgtacagtttaatgaataaagaaaataaagccacatgtataactgtaactacatgagaaaacatggatggggctctagaaaccctgtgtgtctcttcccaatccccatctcctctctctgtcttggccagataaccactgtcctgagctttatggcaatgatttcctcagcttgctttttagttttgtgcactacatactgtaagagttgcccgagcctggtctggaatagagctcgtctctgtgatttaatttacaaacacttttggggagaagattagcatccctcatacagtgcctgaacaattttccagtaaactttaatgagatatagatttgttttggaaactactcactcatcagttttgctctcagttgactatcagtcaaaaatctactattaatatctttaactaaactttcattctttatatatctagactaaaaataactacctcatctgtctcctttcctataaaatgtac

SEQ ID NO: 308141 - DNA, 686 bp, Homo sapiens
gtgggacttcctcaacactagacattttggatgactatttctctcttcattgtattttcagtaacaaatgacagctagagaaaggcctttaggttgccatttttcactggggaagatgagcacaaaagggagagactgagtttgctcttagaaaaataaagaaatttttcgatgtggctaatcatctggctagaggcctggtttagtccaggcatacacacattctgcatcatctaactatgtacttttatccagttatttgtctttatgttgaataaaaagtgtcattaccatggaaattgctttgttgcatcaggctttgtttgagataaagcaaaagaacacatgcttttttcacaatgcctgtttatattcatggataaaatgaaaactagagctataacattgttattaactagttcttttaaagcaacataaaaattataargagctaaactgaagagatccataggttactactggattcacaaaaaaacattcagagctgctgctgattcctttgtgttcttaaacattttcacaaatcttctgtgccccccacactttttaagatttgttttttatttatatacagcaaaattcacttttgggtatgtgtacagttctgtgagttttgacaaatgcataaaattgtgtaaccaaaggatacaaaacagtttgatcat

SEQ ID NO: 308142 - DNA, 600 bp, Homo sapiens
attctcattcagatagccctgccctcaaaatgtggccctggtcaaccaaaccctgtgtattcaaacacctatttcagattctgcattcactaaggagatgaaagcaagtggaaataacctgctctctgtagcattcattcagctataaagaggtaggccattggtcttttaacagattattgtgtattagctgcttttcactgaagtcaagtctactgatcaagaagcagacacatcagctaaaaactagtaactttataaatgacccatttgccagtttccaagcattatttgaaatatttgcatttaaaattggagagacaaatgtaattttaactttccataaaaattggttattaattgcaatgaattttcaaggttctagttctataatataaagcaaatttatactatattaaattgtacatttattgtgctactttcaagcatttagttttaatagccctgggggagactgcagcttgttttactgtgctcagcaacaagtcaaggcttgcrttgtatgtctatttacctcctatttgaaattctttctacaagtatctttctgctgaagaggagaatttaaagatgaaactg

SEQ ID NO: 308143 - DNA, 546 bp, Homo sapiens
agagaataactggaagaaaatctaggtgactacrtgaactttccaggagttagactggtgttttaatccaagaacagaaacacagaagctgctaaagaaaatagagacatgaaatatacaatatgttttaaagtagcaaacaaaaacctctaaataaataggaaaaatatacttagtggggaaattgcaacacgggagcttgttgtaatatataatttataaaagacaaacagcagctcttacagattgtcaaggatcaatgagcaagtggacaaataacaagaatgagcagtctagcgatgagcactcggataatttaaaatttaaaatagatgcaaagtgtacaaatactgactcatactcaggaaaggtcaggaaaaacattacatatttccttgtattctaataaattgtccaaaatagaaagcttcaatatttttttaattttgtaatacttttacaaaagattgtaatacttttacaatctttaaagatgcaaagaaacattttttcttatgattgttagtggaaatgtaattattagag

SEQ ID NO: 308144 - DNA, 532 bp, Homo sapiens
gacaaatggaattttgattcaagtctgtgggtctcagtgatcacacagcaggtaaaaagtgatatctcatcccgagcagccacaggtgtgggtcaacgcgatgttacttcacactatgggatacatgagttgcatttccagcagcaagaagccaggaaccacattaaagaccaaggacatttgacctggtgcagtggcgcacacctgtaagcacagcactttgggaggccaagacaggtggatcacttgaggccaggagttcgagaccagcctggccaacatggtgaaccttatctcttctaaaaatacaaaaattaaccasacgtggtggcaaattcctgtggtctcagctacttaggaggctgaggcaggagaatagcttgaacctgggaggcgaaggttgcagtgagccaagatcacgccactgcattccagcctgggtgacaggatgagactctatcaaaaaaaaaaaaaaaaaaaaacacaaaggaaaaaaaaaaaaaaaaggaaaagaagaagacctagaacataa

SEQ ID NO: 308145 - DNA, 532 bp, Homo sapiens
gacaaatggaattttgattcaagtctgtgggtctcagtgatcacacagcaggtaaaaagtgatatctcatcccgagcagccacaggtgtgggtcaacgcgatgttacttcacactatgggatacatgagttgcatttccagcagcaagaagccaggaaccacattaaagaccaaggacatttgacctggtgcagtggcgcacacctgtaagcacagcactttgggaggccaagacaggtggatcacttgaggccaggagttcgagaccagcctggccaacatggtgaaccttatctcttctaaaaatacaaaaattaaccacacgtggtggcaaattcctgtggtctcagctacttaggaggctgaggcaggagaatagcttgaacctgggaggcraaggttgcagtgagccaagatcacgccactgcattccagcctgggtgacaggatgagactctatcaaaaaaaaaaaaaaaaaaaaacacaaaggaaaaaaaaaaaaaaaaggaaaagaagaagacctagaacataa

SEQ ID NO: 308146 - DNA, 575 bp, Homo sapiens
tattgcctttcttctcaatctgtttttgctccaatctttattatttctttccttctaccaactttgggcttactttgttcttcattttctagttccaagagttgtcaaattggattatttgagatctttcttttttcttaatgtagaaattaagaaaaaattcatttatggtagtaaaaatttacttaggaataaatttatccacagatgtgaaagatctgtacattgaaatctataaaatactgatgtaaagaattaaaatagacaaaaaatgaaaaccagaacaatgttaaaaaaccagaagaataaatattgtcaaaatattcatactaccgaatgtgatctacagattcartgcaatccatttcaaaactccaatggcattttttacagaaatagaaaaaaaaatccttaaattcatatggactcacagaatatcccgaatacctaaagcaatcttgcacaagacgaacaaagctgaaagaattacattccctggtttcaaattacattgcaaagctgtagtaatcaaaacagcatgatatgggcataaaacagatacacagtccaatgaa

SEQ ID NO: 308147 - DNA, 575 bp, Homo sapiens
tattgcctttcttctcaatctgtttttgctccaatctttattatttctttccttctaccaactttgggcttactttgttcttcattttctagttccaagagttgtcaaattggattatttgagatctttcttttttcttaatgtagaaattaagaaaaaattcatttatggtagtaaaaatttacttaggaataaatttatccacagatgtgaaagatctgtacattgaaatctataaaatactgatgtaaagaattaaaatagacaaaaaatgaaaaccagaacaatgttaaaaaaccagaagaataaatattgtcaaaatattcatactaccgaatgtgatctacagattcagtgcaatccatttcaaaactccaatggcattttttacagaaatagaaaaaaaaatcctwaaattcatatggactcacagaatatcccgaatacctaaagcaatcttgcacaagacgaacaaagctgaaagaattacattccctggtttcaaattacattgcaaagctgtagtaatcaaaacagcatgatatgggcataaaacagatacacagtccaatgaa

SEQ ID NO: 308148 - DNA, 599 bp, Homo sapiens
aagacagggatgcgcctgctatacccactgggatttttaaaaacaatcacaaaacctctctccttaccccacagccattgacctaggtcagtcctgcagctctgccaacaccttctaggacttgaacagattatatggttgtatggtctcattgtgatgyttcctctccacgtgtgactctggatattaacctataggcaagagagcaaaaacaacagcaaatattaatccaactcacattccacccaagcaccattcttagtgccttacatgccttaatttattttatcccaacaaaaatcttatgacttatatgctattattatctatactctcactgatgggcacagaggctgagtaacttccttcaggacacacagcaaagaagtgcagaccttgggtttgaaccctcgaggtagacttgacttcttgctctaaaaatctgtattgggagaaaaaacttgcttgaagtagttacctgagttttacttggaagtaggtatacatatttgttgcagatctgaaaatgtattccaagagtaaagtagagtcacaatgtaatttgatgtaatatatacaagatatgagataatatacaa

SEQ ID NO: 308149 - DNA, 552 bp, Homo sapiens
tgccttaatttattttatcccaacaaaaatcttatgacttatatgctattattatctatactctcactgatgggcacagaggctgagtaacttccttcaggacacacagcaaagaagtgcagaccttgggtttgaaccctcgaggtagacttgacttcttgctctaaaaatctgtattgggagaaaaaacttgcttgaagtagttacstgagttttacttggaagtaggtatacatatttgttgcagatctgaaaatgtattccaagagtaaagtagagtcacaatgtaatttgatgtaatatatacaagatatgagataatatacaacttacactactaagggtggttttgagagaaaaaaaaaaaggcttttggtaaaacactaaattctgtgcctcaaggaaaatatataccaaaatcaaacaagcaaacgataccggtaaaaatacaataattttcagacgaaatgtgttttgttattttagtgattgcaaaggaaatttacgaagataatatgactgattatatcacagtaaagtagcaaaggacaa

SEQ ID NO: 308150 - DNA, 552 bp, Homo sapiens
tgccttaatttattttatcccaacaaaaatcttatgacttatatgctattattatctatactctcactgatgggcacagaggctgagtaacttccttcaggacacacagcaaagaagtgcagaccttgggtttgaaccctcgaggtagacttgacttcttgctctaaaaatctgtattgggagaaaaaacttgcttgaagtagttacctgagttttacttggaagtaggtatacatatttgttgcagatctgaaaatgtattccaagagtaaagtagastcacaatgtaatttgatgtaatatatacaagatatgagataatatacaacttacactactaagggtggttttgagagaaaaaaaaaaaggcttttggtaaaacactaaattctgtgcctcaaggaaaatatataccaaaatcaaacaagcaaacgataccggtaaaaatacaataattttcagacgaaatgtgttttgttattttagtgattgcaaaggaaatttacgaagataatatgactgattatatcacagtaaagtagcaaaggacaa

SEQ ID NO: 308151 - DNA, 552 bp, Homo sapiens
tgccttaatttattttatcccaacaaaaatcttatgacttatatgctattattatctatactctcactgatgggcacagaggctgagtaacttccttcaggacacacagcaaagaagtgcagaccttgggtttgaaccctcgaggtagacttgacttcttgctctaaaaatctgtattgggagaaaaaacttgcttgaagtagttacctgagttttacttggaagtaggtatacatatttgttgcagatctgaaaatgtattccaagagtaaagtagagtcacaatgtaatttgatgtaatatatacaagatatgagataatatacaacttacactactaagggtggttttgagagaaaaaaaaaaaggcttttggtaaaacactaaaktctgtgcctcaaggaaaatatataccaaaatcaaacaagcaaacgataccggtaaaaatacaataattttcagacgaaatgtgttttgttattttagtgattgcaaaggaaatttacgaagataatatgactgattatatcacagtaaagtagcaaaggacaa

SEQ ID NO: 308152 - DNA, 552 bp, Homo sapiens
tgccttaatttattttatcccaacaaaaatcttatgacttatatgctattattatctatactctcactgatgggcacagaggctgagtaacttccttcaggacacacagcaaagaagtgcagaccttgggtttgaaccctcgaggtagacttgacttcttgctctaaaaatctgtattgggagaaaaaacttgcttgaagtagttacctgagttttacttggaagtaggtatacatatttgttgcagatctgaaaatgtattccaagagtaaagtagagtcacaatgtaatttgatgtaatatatacaagatatgagataatatacaacttacactactaagggtggttttgagagaaaaaaaaaaaggcttttggtaaaacactaaattctgtgcctcaaggaaaatatataccaaaatcaaacaagcaaacgataccggtaaaaatacaataattttcasacgaaatgtgttttgttattttagtgattgcaaaggaaatttacgaagataatatgactgattatatcacagtaaagtagcaaaggacaa

SEQ ID NO: 308153 - DNA, 643 bp, Homo sapiens
tacatatgcactattaaatagctcataatggagaataatagccaaaaatcacaaagaaaatgagaaaatatcctaactgaatgataataaaaataatacatatmaaaacatatgacatacagtttaagtgagataattcttagaaaacattttctaagccttaattacttacattagaaggaacaagtgctgtggtaacataagaatctgacttgaaattttagaaagaaaaccagcaaaatgaatgcaaagatattatgaggaacttaataatggagataagtatagaataaatagaatagaaaatataaaatatagaagatcaataaagccaaaactttaagatcatctcgtatataaacgcaattttaacaagcttaaagaaaaggagaaataatattaggaataaaatagaatatacaaaattctacctaaaagtctacaaaaacataatttgctaatatggactgaagaatgagaacatataaatcattttaaaaccctaaaacaaatgagacgttataaactttcccagaaagaaaataccagctcaaagcttttatatgttactaatacctcattgtcgaggagctgatcatatgagtattaataaaatctaacagataataaaaagaggaaacgg

SEQ ID NO: 308154 - DNA, 643 bp, Homo sapiens
tacatatgcactattaaatagctcataatggagaataatagccaaaaatcacaaagaaaatgagaaaatatcctaactgaatgataataaaaataatacatatcaaaacatatgacatacagtttaagtgagataattcttaraaaacattttctaagccttaattacttacattagaaggaacaagtgctgtggtaacataagaatctgacttgaaattttagaaagaaaaccagcaaaatgaatgcaaagatattatgaggaacttaataatggagataagtatagaataaatagaatagaaaatataaaatatagaagatcaataaagccaaaactttaagatcatctcgtatataaacgcaattttaacaagcttaaagaaaaggagaaataatattaggaataaaatagaatatacaaaattctacctaaaagtctacaaaaacataatttgctaatatggactgaagaatgagaacatataaatcattttaaaaccctaaaacaaatgagacgttataaactttcccagaaagaaaataccagctcaaagcttttatatgttactaatacctcattgtcgaggagctgatcatatgagtattaataaaatctaacagataataaaaagaggaaacgg

SEQ ID NO: 308155 - DNA, 643 bp, Homo sapiens
tacatatgcactattaaatagctcataatggagaataatagccaaaaatcacaaagaaaatgagaaaatatcctaactgaatgataataaaaataatacatatcaaaacatatgacatacagtttaagtgagataattcttagaaaacattttctaagccttaattacttacattagaaggaacaagtgctgtggtaacataagaatctgacttgaaattttagaaagaaaaccagcaaaatgaatgcaaagatattatgaggaacttaataatggagataagtatagaataaatagaatagaaaatataaaatatagaagatcaataaagccaaaactttaagatsatctcgtatataaacgcaattttaacaagcttaaagaaaaggagaaataatattaggaataaaatagaatatacaaaattctacctaaaagtctacaaaaacataatttgctaatatggactgaagaatgagaacatataaatcattttaaaaccctaaaacaaatgagacgttataaactttcccagaaagaaaataccagctcaaagcttttatatgttactaatacctcattgtcgaggagctgatcatatgagtattaataaaatctaacagataataaaaagaggaaacgg

SEQ ID NO: 308156 - DNA, 643 bp, Homo sapiens
tacatatgcactattaaatagctcataatggagaataatagccaaaaatcacaaagaaaatgagaaaatatcctaactgaatgataataaaaataatacatatcaaaacatatgacatacagtttaagtgagataattcttagaaaacattttctaagccttaattacttacattagaaggaacaagtgctgtggtaacataagaatctgacttgaaattttagaaagaaaaccagcaaaatgaatgcaaagatattatgaggaacttaataatggagataagtatagaataaatagaatagaaaatataaaatatagaagatcaataaagccaaaactttaagatcatctcgtatataaacgcaattttaacaagcttaaagaaaaggagaaataatattaggaataaaatagaatatacaaaattctacctaaaagtctacaaaaacataatttgctaatatggactgaagaatgagaacatataaatcattttaaaaccctaaaasaaatgagacgttataaactttcccagaaagaaaataccagctcaaagcttttatatgttactaatacctcattgtcgaggagctgatcatatgagtattaataaaatctaacagataataaaaagaggaaacgg

SEQ ID NO: 308157 - DNA, 506 bp, Homo sapiens
ctgcttgcttataggatctctcaaatgtggagagtaaaggaatcttgtatctttcagtttcgtcagaatcttaatcttattaaatcccaaaaaattacttagtttaaataggcagtttacctttagtggcataaacacatttatttatttataaaacattgttataaatgtcacgctttttggttaatctggcagtctttaaaagggggggaaataggctgacatataaacgatcacctagcataatacctggcatagtgtaggtactgggatatgtttatgaattagaagagataatggtcaaaatcagaacttgaaaactgagtctcttcaagacaatccaaattttcmtaaaccacagataatatacattcaagtaattcatcattaaatgggttatgttttgtattgcattacttgaagcatgaaactttgtattgcattacttgaaccataaaaactagtttaatagcttattttaaagtaacaatgcagtacatgataat

SEQ ID NO: 308158 - DNA, 506 bp, Homo sapiens
ctgcttgcttataggatctctcaaatgtggagagtaaaggaatcttgtatctttcagtttcgtcagaatcttaatcttattaaatcccaaaaaattacttagtttaaataggcagtttacctttagtggcataaacacatttatttatttataaaacattgttataaatgtcacgctttttggttaatctggcagtctttaaaagggggggaaataggctgacatataaacgatcacctagcataatacctggcatagtgtaggtactgggatatgtttatgaattagaagagataatggtcaaaatcagaacttgaaaactgagtctcttcaagacaatccaaattttcctaaaccacagataatatacattcaagtaattcatcattaaatgggttatgttttgtawtgcattacttgaagcatgaaactttgtattgcattacttgaaccataaaaactagtttaatagcttattttaaagtaacaatgcagtacatgataat

SEQ ID NO: 308159 - DNA, 533 bp, Homo sapiens
tgtgtgaaagcctgggatgtttggggaatgtcaggaatttcttctggaagttgctcttgctgattctgccatttggttggattatataaatctccttggattggattatcagatagtaagtaatataatccccccccttcaccagctggtcctaaccctgacttcgtgggcaggtcttattccagtcctagccccttccactgaccaagtcaggctctaaataaccagcccaatccaaagtacccttcttaaagcaggtggcatcttttttactacagttcaggcaataaaggctattctgtcacaactcccacagaaccaggtcttctcctgtctaaaaaataaggccttaattatattttaacaggacaatgtatctgctacyttatgtgacagagcaattaaacttttaagattccaggcaggacccaggcagaggaacatggcagaaagaacattacacttgaattatacattttctgtgtttgaactccttgctctgccttgtgtccaatggagatgataatacctac

SEQ ID NO: 308160 - DNA, 599 bp, Homo sapiens
tgaggccagcgagatcacgaggccactgggaggaatgaacaactccagatgctccaccttaagagctgtaacactcactgcgaaggtctgcagtttcactcctgaagccagcgagaccatgaacccaccagaaggaagaaactccgaacacgtctgaacatcagaagraacaaactctggacacaccatctttaagaaccgtaacactcactgtgagggtccccggcttcattcttgaagtcggtgagaccaagaacccaccaattctggacacaataagattaacagcagatttatcgtcagatactttggaggccagaagacaatgcacttatgttttttaagtactaaaagaaaaaaaattgtcaaatcaaaattgcattataaaacctagtattataaaaataatgtgtaactgttttttctaaatggtttaaaagactgatacatttaaaaataaacaagtattagtctaaaagctgttacgataatcatgttttgcaactccatgctttattctctgtgtaatttaagacactgatgtgttagaaagttattagcttatgtttttggacagtgtataaaaatataagtttatg

SEQ ID NO: 308161 - DNA, 639 bp, Homo sapiens
ggaaaaaccctgatctgggaatttcatattatgctgctgcccaggtatgccagtgccatggtcgacgaaacagatcaaacctgacatagaaattaaaactaagagaaaactatggacaggagttctacccaatatccagcagccttcttcayggaatatgtgccttccacagaggaaatcgataggatgctcatagactgggaaaagcaaattgaagcatgagacaaatatagctcaagatgtccctataataatgatgcagatattgactacattaatgaaagggatgctaaattcagcaaaaaggtagaaggattctatggaaaatatataaagctgaaaaatgtataaagctgaaattaaacaaaatctagaaagaggaacagccatcttaatctccttcaggaactgttttgattgccaaattgtaccagtaaaccaggaccctgtctgtacctctcctttaataagctgtagagagatgttctatgaatgtccatgtattttcatgcttacatattcttattattcacttattttagcaaagactatcttctatttctgtgtttaaagtatgtgtttaatgtgtgaaacctcctgggcttaaaattcttagctacaaatgtatgagtcattgtt

SEQ ID NO: 308162 - DNA, 596 bp, Homo sapiens
gagtgtttcaagtactctctagagaaaggcagtgtggataagcgttggagtccacatctgctcccccgtcccctcagatttgaaattctaggtcacagttaacctccttacatgctctatcttccaagtgaaatttacrttcacaggtggggcactcatgacagcgggcatagatcggcgagcaccccagtgaagctgaaaccaggattttttctttttctctttgatttttttttttgttatagtttatggctagtaagaatcatgtgggtctggatattgatatttcctgattcaattacattgggtttgtttgggaaatcatagttaacaagtaattgatgcttacattgtaaagtgctgaagcagtgatcacatttaatttgtgttttataatttttcatgagtgtgaggcttgtactcatattcttatgccacatgctgaatgtctggcatttaggacaagtgaacacatgaaatatttgggggtcagagaaagtcaattttgtaagtgctgaaggctttcctgcaatggaacactggaggaggcctgtttttagcattgtagcctattgttgtgatagccactgtttccc

SEQ ID NO: 308163 - DNA, 596 bp, Homo sapiens
gagtgtttcaagtactctctagagaaaggcagtgtggataagcgttggagtccacatctgctcccccgtcccctcagatttgaaattctaggtcacagttaacctccttacatgctctatcttccaagtgaaatttacgttcacaggtggggcactcatgacagckggcatagatcggcgagcaccccagtgaagctgaaaccaggattttttctttttctctttgatttttttttttgttatagtttatggctagtaagaatcatgtgggtctggatattgatatttcctgattcaattacattgggtttgtttgggaaatcatagttaacaagtaattgatgcttacattgtaaagtgctgaagcagtgatcacatttaatttgtgttttataatttttcatgagtgtgaggcttgtactcatattcttatgccacatgctgaatgtctggcatttaggacaagtgaacacatgaaatatttgggggtcagagaaagtcaattttgtaagtgctgaaggctttcctgcaatggaacactggaggaggcctgtttttagcattgtagcctattgttgtgatagccactgtttccc

SEQ ID NO: 308164 - DNA, 566 bp, Homo sapiens
agtcatcatttgggctgggtagcttcaccaccatccaattaatttttaaaattataccacaaggaattgacacattgtcttgatgcatttatatccgtgatcttggagctttgatgcctcacttaccaccaccctccccaacttgtgagaaagacttctctcctttgtaaaggcagggatgtgagacagaaaagaagcaggcagaatttttacacctcctcttgtcagtctggatgattcactaagcttggtaggctgtatgccctgtatcaatacaattacataatcattacctgtaagttaaattacttcacacacccactggcaaaaatgtaacaataaagctatttttatgatttttccccttcaaagyaattatatatagttgagaaactaaactacattcaaactaatgtaacttcaaacattacctttccccttataaaactttttgctcttcttaccttgtactgtactgagtttaaaaacagaaaaagaaaaagaaaaactagatatagtggagagaaaaattgttcagctattcagcagataaattcagaaaaaaa

SEQ ID NO: 308165 - DNA, 566 bp, Homo sapiens
agtcatcatttgggctgggtagcttcaccaccatccaattaatttttaaaattataccacaaggaattgacacattgtcttgatgcatttatatccgtgatcttggagctttgatgcctcacttaccaccaccctccccaacttgtgagaaagacttctctcctttgtaaaggcagggatgtgagacagaaaagaagcaggcagaatttttacacctcctcttgtcagtctggatgattcactaagcttggtaggctgtatgccctgtatcaatacaattacataatcattacctgtaagttaaattacttcacacacccactggcaaaaatgtaacaataaagctatttttatgatttttccccttcaaagcaattatatatagttgagaaactaaactacattcaaactaatgtaacttcaaacattacctttccccttataaaactttttgctcttcttaccttgtactgtactgagtttaaaaacagaaaaagaaaaagaaaaactagrtatagtggagagaaaaattgttcagctattcagcagataaattcagaaaaaaa

SEQ ID NO: 308166 - DNA, 657 bp, Homo sapiens
taacaaagctatttcacaggaaaatctcttcttacatcctataagtcttttagtagcatgtattatttatttttatgttttatgtgagagtagagatttgctagagatcttgcaaccagtgttagagataggagttaaattcaggatttatttcaattatgtatgatttttccaggtcacmttttgatgaattagaaattcaatcaaacatggcagaaccagttctttttgaaaattctagtgctgaatgtcttctgcacatttaggcaaggttaatcagattaatctgaatgggctagtttctacagacgtagagactaaaaatttcatctcatctcaatgacatgtgtaactacaccaacttaccactttctatatctaggttattcctggccttaatgttttttaattcttttttatgcagttaactgataatatatcacacataaagaaattgaaaagttcagctaggattttagcacaagtatcaaacacatgcatataagtggatcatcagactactcctccccaaaacatgaaagtgcttaagtaatcttaggttaaaaaaaagccctgagaaggagggcagagcaagacggtggaatagaatcctataccatgtgtctgcactgcaagaacacaaaattttagcaacta

SEQ ID NO: 308167 - DNA, 500 bp, Homo sapiens
cacctagttcccagtgcaatcactggaggcaatataatgagcctgaaaaaagaaatacctcccaatgacaacaatgtctttttaaccgtgtcaataaaaagagccatgggaggttttgaaaaatataaattgaatcttgactcagtatraacttcagaggttcacatgatcttctgaaaatggttcactcattgtatagcctgccactactatgaaagatacatgtcacttttatatgtcctcaaatgtcatagaggattgtgaattgggatctgagaggatgtctaacactcacttctatttatggctccttcagcaagaaagttattttctggtcctaaatgagaaagtaagtccatgagatgctctgtatatcctgagctgaattcttggtgaaaatattcatccatgaactcaaatagtggctatttattaaatgtagaagacatgatgctagcatagcaagagaccctgttctaccaagtcagagaacctactag

SEQ ID NO: 308168 - DNA, 550 bp, Homo sapiens
ctaaattataagatgttctgaaggaaagaaaggaggcctgcctgagtcctgcagacaatgaaaaaatagtggaaatgtttctgtaaatagaaagaccagagataaagaagggtcttacaacccagtctgagattttagttgatggaacagaccacagagagccacttccaattcttaataatggaaggacacattggaatttgtgttttgaaaaggttattctaacaagtgtctcttttaaagaataaaggagcctgggccctgggtgtggtggctcacaacgatattttcagcactttgagaggtcaaggcttgtgcccaggagtttaagaccatggygatatgccatctctacaaaataaaaacaaaaaaattagctgggtgaagtgacacacacacatacacccagctacttgggagactgaggcaggaggatcacttgaacccaggaagtagaggctgcagggagcagtattcaccccatcacactacagcctggaggagcctctctcaatcaatcaatcaataaaagagaaacatgcaagtttag

SEQ ID NO: 308169 - DNA, 377 bp, Homo sapiens
gcatggggatgcatgcctgcagtctcagctacttagaaggctgaggttggtggatcacttgagcctaggaggctgaggctgcrgtggatccttattctactgcactccagcctaggtgacagaacaaggtgctgtctcaaaaaaaaaaaaaagaaaacaaacaaataaaaaacagtaaaggtgaacaaagagattgaacactataatgtacaaaccctatttacattttgtaataatatttatattggtaattgtgtcattctaaatgcattgattcaaccaaacactcctcatgaattttgttatcaaagttgtatgatttgggaagtgacataatttccttaaaataggagatagttttaaaaaatgaaatcaat

SEQ ID NO: 308170 - DNA, 532 bp, Homo sapiens
tgtttcatacagcactcaagttcctagtcctcttttaattcctggtaagcaaccttggcaaaattttaagccactaggcagaagttaaaggtttaggctcagtgtattttgcaatagagatcactgttgaatatacgacagagtgtttattacacataatccctgtaagagtctatttggcagtcacccaaagccaaccaatggcttctaccatgctgaaacctgacttacacgaaactagagctgagagtaaaagtcagctcagaaaggaactgcgagatagcatgcttatattagagtagcattttagaaggaagaaaatttgaaaacagctaargtttggctgttgtttgcctgtttggtttattagttttcaatcacacttcagaatgatgcaggtcacagtgtgtctatagttgccctctagcaggctgtccacaaaacacctttctgcaaccactgagaaaaatgagagtccagggcttccccagtctatgttccccctgcagacacagttgtctagaagagtata

SEQ ID NO: 308171 - DNA, 532 bp, Homo sapiens
tgtttcatacagcactcaagttcctagtcctcttttaattcctggtaagcaaccttggcaaaattttaagccactaggcagaagttaaaggtttaggctcagtgtattttgcaatagagatcactgttgaatatacgacagagtgtttattacacataatccctgtaagagtctatttggcagtcacccaaagccaaccaatggcttctaccatgctgaaacctgacttacacgaaactagagctgagagtaaaagtcagctcagaaaggaactgcgagatagcatgcttatattagagtagcattttagaaggaagaaaatttgaaaacagctaaggtttggctgttgtttgcctgtttggtttattagttttcaatcacacttcaraatgatgcaggtcacagtgtgtctatagttgccctctagcaggctgtccacaaaacacctttctgcaaccactgagaaaaatgagagtccagggcttccccagtctatgttccccctgcagacacagttgtctagaagagtata

SEQ ID NO: 308172 - DNA, 554 bp, Homo sapiens
gctactttaaacctaagacagcatattctcagtacaactcaccattatgagttgagtgatggtttttctgcccatcacttagactgtagtcaacactttatctttggcagagcaatttccacatggcataaatgatggggcaatggactgggaagaggctcgactttcagtcatggtgcttctatcagtttcctgcctgcgtggtcttgagccctcttgttgctaactagaagtaaccagacggtgaatcttacagggtggccaacttccttggctacaataaaccccgttgttgttgtgaycatgtcacctccctttaatgtattgagaaagaaaggttgagaaccattaagctagattctaagaccaactcttttaccctttagctccccatctataaaatgaacaggtttccaaaatatcacaaattcaagtaagtctatgttgcttccacttaagctaacgcaaatcatcatgcaaatgttgtctaaacgcacaacatctgataaatgcacatttaagacagtcagaaacagtaaatgtcattctcccag

SEQ ID NO: 308173 - DNA, 557 bp, Homo sapiens
tggtattcagtagctctgggaccttataagtgtgtgaaaaggaggaacaggaattctacatcagggttgaaaagggcagactcatttgaagtcacattagcccctaatggaagttaataaatcaatttaaataatctattccacaagaaacaagtctaaagaacgtctttttgaaaacaataatgtagtccatgaaagacagagaaaggagtaaggctcctaactggcaggattcaacattttggaggaaaaaaaaatgaaagaactttctctgtacaaataaagctttcttagtctagtatttagctaattggttccttccctttatgttgcacaaaccttcctttttgatcagttcacaataacaaaacatccttcctgccaggtgtcattacaaagtttgtgccctccaatttgtgaagagcagaattacagatgattccacaaacacagaaggcatgcagtaaccactgctgaagtccatcacttactraatgagtttacctaattacatatgggtacggataacattattgagggttatttttcaggaatag

SEQ ID NO: 308174 - DNA, 614 bp, Homo sapiens
atctctgacttttacctgtattgaaaaggtatgtattcaaggcctgagaccatttgatggacaccttaccatggagaaaactgtcattaagtccaattctagctgccaatcctgggataacctgccttctaccctgttcttttctgttacccttgttttatgttctatcataatagaggtgctaagcagtttaaaattccatgaatatatggtccctaaaacttacaatctcctttctacctatgtggtttttaaaaatcatagtcaacaacagttaaataatggccacaaaacaaatcttctagaaaaggcacacacttaactagaataaaatttcarctacaattgaaagtaaccaactcctgtcactaggtggcagtcacaataaagtcatcccttggtgggagggattggttccaggacctgaggatactaaaatccgtgagtccttatatataaatggtgtagcatttgcgtataacctatgcatatcctactaaatcacctctagattacttataataaatacctaatacaacgtcaatgctatgtaaatacttatcttttttatttgtatgatgttttggtatttttttcccaaatgtttccaatct

SEQ ID NO: 308175 - DNA, 497 bp, Homo sapiens
ccaaactttcaaaacataagaagaaacctaagcatcgagatagrtaacacaatcaacaattgaaacatgacatcacccaatgcaaatttaaatcttaaacatatgaaaatattttagtaatgtttagaatccttaccaaaataaaggcaagaataataatcatcataaacaataatgatagtagcaacacactaagagacaagaaacaatagtaggtgattgtaaaattctgatatattagaaacaaaatactcaacagtcattgaaataaaaggtgcaaaagcttaataaactcaggtacagtcaaggaaggagtttgtgagtaaaagatactgaataattaactgaaagtgcagcatggtgcaagaaaggataataggaaagagcaaatactgaagagaccctggcattgacacagtgatagaaaaaaataccaaaaaatagagtacaaaaggaagcatataaataaagccaagcaacatatggaaacataatac

SEQ ID NO: 308176 - DNA, 497 bp, Homo sapiens
ccaaactttcaaaacataagaagaaacctaagcatcgagataggtaacacaatcaacaattgaaacatgacatcacccaatgcaaatttaaatcttaaacatatgaaaatattttagtaatgtttagaatccttaccaaaataaaggcaagaataataatcatcataaacaataatgatagtagcaacacactaagagacaagaaacaatagtaggtgattgtaaaattctgatatattagaaacaaaatactcaacagtcattgaaataaaaggtgcaaaagcttaataaactcaggtacagtcaaggaaggagtttgtgagtaaaagatactgaataattaaytgaaagtgcagcatggtgcaagaaaggataataggaaagagcaaatactgaagagaccctggcattgacacagtgatagaaaaaaataccaaaaaatagagtacaaaaggaagcatataaataaagccaagcaacatatggaaacataatac

SEQ ID NO: 308177 - DNA, 497 bp, Homo sapiens
ccaaactttcaaaacataagaagaaacctaagcatcgagataggtaacacaatcaacaattgaaacatgacatcacccaatgcaaatttaaatcttaaacatatgaaaatattttagtaatgtttagaatccttaccaaaataaaggcaagaataataatcatcataaacaataatgatagtagcaacacactaagagacaagaaacaatagtaggtgattgtaaaattctgatatattagaaacaaaatactcaacagtcattgaaataaaaggtgcaaaagcttaataaactcaggtacagtcaaggaaggagtttgtgagtaaaagatactgaataattaactgaaagtgcascatggtgcaagaaaggataataggaaagagcaaatactgaagagaccctggcattgacacagtgatagaaaaaaataccaaaaaatagagtacaaaaggaagcatataaataaagccaagcaacatatggaaacataatac

SEQ ID NO: 308178 - DNA, 630 bp, Homo sapiens
tatttgtaatgttttatttcctaagttaagtagtgagtataatcatgaagttgaacacaactaacataatacacttaaaatctatgaagcaaaagaagctgagagaaattcaataacaaaattaatcaaaatgatatgaaatatccctctaccagaaatagatcaagcaaataaaaacataatgactgacacaatcaacaatcttgattatatataccccagaaccaacaaatcaacatgtatctttttcaggaacatatattttcaaaatatatyactgacatatttgcaaaaaattgatgattcacaaagaaaacctttcaaaaattcttcaaatactgtcacacaggccatgcaaaagtaatgctttctataatgcaattaaattaaaatccacaataaaatgataagctaaaaacaattaaaagaaactttaaaaacctaaaattaacaaatctatttcagcaatttgtgaaacccaaccaaccaacaaagcaattatgcggcgtttgttctaagaatgtaggaactatatattatctgaaaatttatcagtggtatctcacattaacatactaatggggaaaacctattgtatctcaaaatctcaaaatgatacagaatgacaca

SEQ ID NO: 308179 - DNA, 602 bp, Homo sapiens
catacacacacacacacacacacacacacacacacagaggttgattgtaaacagcaacccacagagttctgcatggtggtagccacacatgaatgctgggagagttaatcatctctggggaaagaggcagagaaattgaataaagggaggtaacaaaaggggcctcaacactggttttaaaaatctaaagaaaatatgataaaaagcttaagtatagatggttaatatataaatactaactctactttattctatttgtttgaaattattcaggatccttctttataaacattagaggataygtccaaattttcacacacacacacacacacacacacacacacacacacttctgtttataagactaggtttagccttataatcagtgaggaaaaaattgcctacctcaaacagaatgtacactcaaacaatatataaagtacttgtaagaaaaagcatattcctcatataatacatatatgattttatatcatgattatataatgcatatataagcattggttgacttgactgaaaatggtagaagaatctctgtccttagcttgtgctttgactcagtaactgacagagccctttgttta

SEQ ID NO: 308180 - DNA, 577 bp, Homo sapiens
ttgattattttgggctaaggcttttccttatttaaaatggccagaaaaatcagcaagtcaaattcagcatttcatcatgaccaaataaaactcatgtcaagaatgcagaggtggttctaataaatctaaaatataaatcactaaacagattgaaaaaaaaaaaatcacatgagtcacatggtcatttcaaatataccartaattaaataattaaattcaaactacttttcgtgaagaatactttgaagcctaggtctatgatagaagagtattaaccagaaatcttcaacccgtaacacctaactggaaaatatcagaaggaaacctttaaaatcaggagtaacacaataatgtctactattcacttcttgttcagctttcttttgacgttcctcaccagttaaaaaaaaaaaaaaagactggaaaaaaatagttactattcacttctttttcagctttctttcgacgttcctcaccagtaaaaaaaaaaaaaaaaaagactggaaaaaaatagttaacaatttgtgttttattttctaatgtttacaatctgattaaaaaataggcaaaggacttc

SEQ ID NO: 308181 - DNA, 550 bp, Homo sapiens
gaacttttacagttaactacacagtgaaacaaattatcccttgtccacggaattaagtgcaatgttcttaggtgaaacctaaaagattgaaaactctgacctatagtcaccaaaaaaagtgaataagctaagtcttatttattcttgtcatattccaaytttgtgtttctactccgtaaaacgttgttgtgttccgcaaattcaagtaaccatgtaattgtgctttaaaagaagaaaattttttaacccaggcatgtattaaacaattttctcccaaaaagtacatgcctggtgggaaagtaaggtaggtcagagtaggttttataaaattagtattggctttagacagtacacattggctcatccttttactgctcagcccacagtacatttcatgtataccttctagatgtcccaagtatttaaaatgcaacaggataaacaaccaggccaatattctgacatcaccttctaaacagtaccactagctaatgcagcagtaataaaatctaatggccactagtgacaggtacaatgtgagagagaaaac

SEQ ID NO: 308182 - DNA, 550 bp, Homo sapiens
gaacttttacagttaactacacagtgaaacaaattatcccttgtccacggaattaagtgcaatgttcttaggtgaaacctaaaagattgaaaactctgacctatagtcaccaaaaaaagtgaataagctaagtcttatttattcttgtcatattccaattttgtgtttctacyccgtaaaacgttgttgtgttccgcaaattcaagtaaccatgtaattgtgctttaaaagaagaaaattttttaacccaggcatgtattaaacaattttctcccaaaaagtacatgcctggtgggaaagtaaggtaggtcagagtaggttttataaaattagtattggctttagacagtacacattggctcatccttttactgctcagcccacagtacatttcatgtataccttctagatgtcccaagtatttaaaatgcaacaggataaacaaccaggccaatattctgacatcaccttctaaacagtaccactagctaatgcagcagtaataaaatctaatggccactagtgacaggtacaatgtgagagagaaaac

SEQ ID NO: 308183 - DNA, 354 bp, Homo sapiens
aatgataggggaaaccaatgccacatccacttgcagtgtctgtagagaactacatcttgccacacatccaagatctcattcctcagtctccctgaaaaattctgttggtaagagagaagtgagacagtgctgtttccgaggaatcttatgcctctctttattctacaacaaatggagacagatggaaatagaagaagaggcagcaacargacaggagaaaggaaagaaaggggaaaggaaggtaacagaagggcaacgggggaaggggaaaatagacaaatcatagcagaatgcccagacacgacacaggtcaggtgacagaaaggacaaaaaagatgggagaagaaaaccaag

SEQ ID NO: 308184 - DNA, 550 bp, Homo sapiens
gttgtttaatgcacatagtgtcagttttgcaaaatgaaaaattctggagaaccattgtacaacaatatgaacatacactactgaactatgcaattaaaaatgggaaagatagtaaatttcacagtgttttttttcaccacagctaaaaataaattttaaatcattaagatagtaaacttcatgttatgtatattttaccacaataaaaattaaaaaataaaacataaattgtcatgatgtctacctaaaaaaaatccaatgctctccattgaaaagctagaactaataagagcataaagtcagaattaatagaaacataaaaatcaattgctttggtatataaataaaaccaatgagaaaaaataatgagaaaaatcccatttrcaatcaaatatccagaaataaatctaagtgtgcaaaagctataagaagaaaatggtacaagtttactgaaggtcataaaagaaatcttgcagaggcaagttatgctcctggatgggaagacagcattataaggtttccttatattgatctataaatttaatagaat

SEQ ID NO: 308185 - DNA, 558 bp, Homo sapiens
ttaaataactttaaaactacattaattacaaaaacacagatttggcacaatgtttagagaaatacatcagccaaaaatgataaaaggtctatacacagatcagcatataaaagtgatttataaacaagagtgttggtactacacagtctcagagcaagagtgaaggatttagtaaatggtgttggggcaactggtgaacaatttgggaaaaacaaaactgataataacagcttacattactttggtttcacaaggagccagaactrtatcattaaatacagaaaagaaccccccaacttttttttttttttaaacaaaacacatccctgaggcacaaaagggaattaatttgcccagagtcacacagccagtagctgctgaagcctaaaatttgattccatgtcatgggattccatagcctcagctccccaatcattataacacactgctaccccttaacatatccttatccataacacaaaaacaaataatggaagcgaaatctaaacatatgcgtgtatatttaaatacagacagtccctgactcaaaatggtttg

SEQ ID NO: 308186 - DNA, 558 bp, Homo sapiens
ttaaataactttaaaactacattaattacaaaaacacagatttggcacaatgtttagagaaatacatcagccaaaaatgataaaaggtctatacacagatcagcatataaaagtgatttataaacaagagtgttggtactacacagtctcagagcaagagtgaaggatttagtaaatggtgttggggcaactggtgaacaatttgggaaaaacaaaactgataataacagcttacattactttggtttcacaaggagccagaactatatcattaaatacagaaaagaaccccccaacttttttttttttttaaacaaaacacatccctgaggcacaaaagggaattaatttgcccagagtcacacagccagtagctgctgaagcctaaaatttgattccatgtcatgggattccatagccycagctccccaatcattataacacactgctaccccttaacatatccttatccataacacaaaaacaaataatggaagcgaaatctaaacatatgcgtgtatatttaaatacagacagtccctgactcaaaatggtttg

SEQ ID NO: 308187 - DNA, 571 bp, Homo sapiens
agatgtgaaccttccggtgtccaacccccatcctgaaactttctaggggccttaccaggagtcatctcatttgcataaactcaagtacagttgaaatgggctcattgaataataaaaaatccacatattactcctatttctcaggaaattcaaagggttttaggagatctgtgcctggaaatagagacaaagaccaaaaatatatttcctactgtacaactaaatatacatttctgsttacactccaccatctcaccaagatgttctttaagagtatttctacaatcctgtaaattaaaaggttagatttttttcatctaaatattcttatatttattaagtcctcaactatgactatggcatcatttcgtttttacatgggtttggatcaagtaaaggtgcccttccgcaaaaaaactttcaggatgtaaaaactggttcctgtaagaaaagaaaggcatgatcttaacaatgttgcatccatctatactatttcatactgagaagcaagagcaatctgtttatcaaacccaattaccctttccctcctcttctacatgaaatggtcgca

SEQ ID NO: 308188 - DNA, 571 bp, Homo sapiens
agatgtgaaccttccggtgtccaacccccatcctgaaactttctaggggccttaccaggagtcatctcatttgcataaactcaagtacagttgaaatgggctcattgaataataaaaaatccacatattactcctatttctcaggaaattcaaagggttttaggagatctgtgcctggaaatagagacaaagaccaaaaatatatttcctactgtacaactaaatatacatttctggttacactccaccatctcaccaagatgttctttaagagtatttctacaatcctgtaaattaaaaggttagatttttttcatctaaatattcttatatttattaagtcctcaactatgactatggcatcatttcrtttttacatgggtttggatcaagtaaaggtgcccttccgcaaaaaaactttcaggatgtaaaaactggttcctgtaagaaaagaaaggcatgatcttaacaatgttgcatccatctatactatttcatactgagaagcaagagcaatctgtttatcaaacccaattaccctttccctcctcttctacatgaaatggtcgca

SEQ ID NO: 308189 - DNA, 547 bp, Homo sapiens
cacagcactcaaaaatttaacctgaacaactagttcaggccatgatgggaagtggggattggacaatgcctcattatacccctgcagcattaatatcaatatagaccttaagtctgataaacatctataatctattctctctgaagcctgctatctggaggcttcaactgcatgataaaaccttggtctccacaaccccttatcttaacccagacactcctctctactgataatagtaactctttcaaccaattgccaatcaaaatatgtttaaacctacctatgacctggaagtccccccaccccttcgagttgtcctacccttccagattgaaccaatgaaaaccttayatctatcgattaatgtattacatctccctcaaatgtataaaagcaagctgtaccctgatcaccgtgggtacatgttgtcaggttttgtgtttacacagtcattaagacagtgtgaaactggtacaaggctagacaaagctacagaacagtggaacagaatacagcccagaaggtgaaggtaggcttttcaataaac

SEQ ID NO: 308190 - DNA, 613 bp, Homo sapiens
gagatttgcagaacagaagaaaaatgaagccacctggatagaaattatgagaaagacgacgactgaaaaatgtttgtaaaaatgtggtgtggaatatggagtatcgacctcattctaatcttcccaaaagaggactcaaagtagactgaatgcactggttttattttctctaaaacccagtaaaaccactgaaataacaactgttaaaataaaaatgtttgctcatgtacctcccaaaaccatttacatgtacaccatgcattttactacacaaactgtggctcaatgaacggtagttgaatgaacctcaccttaactttccaagaatccacagcctagaagcatttttatttgcttgaaattgcttatgcttcatagcgtaaaaaataccattcactcccttctttgattcctatttgaggaatcaaaagaacagcgtgaaacaaccaagtgagtttttgcagatgagtccagtgagccaggatggcctcatatgctctactttattgttcaggtccactcacttcagatcycgtaatttgtaataacctgcataattttttattgacaaatcatagttgtatacctttacggggtagatgatgcggtgttt

SEQ ID NO: 308191 - DNA, 562 bp, Homo sapiens
ggcttttgaaaattcacagggatttttgtgttctaaccctttgtttcatttttcgtgcacatgtaggtaggaaaaaaaatmattggctaaattaatcaagggaacctgaaaacaaagccaatatttcaaataaaaacgggatcccttctgcctgccttggcatcccaaagtgctgggattacaggtgtgagccatcaggcttaaggctcatttttcactgattttcttgatctggcatttaattatgaaataataaaagattcatggatattgttcttgccttgctgaaatgttattagctaagattttaatttattattactgttatataaaatgtatattatatcacatataaatatatattagttctatacttgtgaaaatatcaatctctagagaaatcattcgaataaaaatgtcctcatgtcaaaaaaagaaaattgggatccttaatatctggaaaactgagttccttccagcttacacattaggcctgggaagcagcaagtcttacagaaatggcaaaatgttaataaagataactcacagtgcaatgttctga

SEQ ID NO: 308192 - DNA, 562 bp, Homo sapiens
ggcttttgaaaattcacagggatttttgtgttctaaccctttgtttcatttttcgtgcacatgtaggtaggaaaaaaaatcattggctaaattaatcaagggaacctgaaaacaaagccaatatttcaaataaaaacgggatcccttctgcctgccttggcatcccaaagtgctgggattacaggtgtgagccatcaggcttaaggctcatttttcactgattttcttgatctggcatttaattatgaaataataaaagattcatggatattgttcttgccttgctgaaatgttattagctaagattttaatttattattactgttatataaaatgtatattatatcacatataaatatatattagttctatacttgtgaaaatatcaatctctagagaaatcattcgaataaaaatgtcctcatgtcaaaaaaagaaaattgggatccttaatatctggaaaactgagttccttccagcttacacattaggcctgggaagcagcragtcttacagaaatggcaaaatgttaataaagataactcacagtgcaatgttctga

SEQ ID NO: 308193 - DNA, 571 bp, Homo sapiens
gtttctccaaattttattcaatatactttttgcctgaagagtattcgtgcacttacccatttatgtattcaataaatatttaatgggaacttgctgtgtccagktgctaggtgaagtgctggtgctaacttaaacatccatgggcactgtcttacttttttaggtttttaaggttttagacttcctgatttacagtgaaatgttctttgagcttgcattttttttttttaactttcattttagatttggggatacatgtaaagatttgttacataggtaaacgtgtcatggggggttgttgtacatattatttcatcacccaggtattaggcccagtatcgaatattgtttctgtttctctccctcctctcatgctcccccattaagtatgccccagtatttgtttccttctttgtgttcataagttcttaccatgtagctcttgcttataagtgagaacacgcagtatttgattttctgttcctgccttagtttgctaaggatagtagcctccagctccatccatgttcccacaaaagacatgatttcattcttttttatggctgtgtag

SEQ ID NO: 308194 - DNA, 556 bp, Homo sapiens
agagtggtaatcaatattgtaggctgaggtcactgacagaggccaaagacaacaatgtgtgaaatttaggatgaattgctttttgggttttatctggatttactaagacaggggagttgtttgggcaaatgttgcctcttgaaggtctctttgaagtgaccatctaatgaatcaaggaaaaggcarttaaatccctcttggtgagaacatcaaaagaggaataggatatagttacacatcaggagccaagggctatcagttgacctttcttaagagtggggagaggaatttgaatgattgggtagttttcattatatagtagccttttaaaaaatcctttaactttcttctttttttctctttaagttcagtttctccaggcctcttgttgtttaatagcagagttagagaattatgttatctaccttgcaatctaataacttaagctgttttttcttggagggcaaggagagtaaaataatactattttgaatgtattttctcttcttatgtgccattatctcctttccctactcatgggagtaagagacatgta

SEQ ID NO: 308195 - DNA, 556 bp, Homo sapiens
agagtggtaatcaatattgtaggctgaggtcactgacagaggccaaagacaacaatgtgtgaaatttaggatgaattgctttttgggttttatctggatttactaagacaggggagttgtttgggcaaatgttgcctcttgaaggtctctttgaagtgaccatctaatgaatcaaggaaaaggcaattaaatccctcttggtgagaacatcaaaagaggaataggatatagttacacatcaggagccaagggctatcagttgacctttcttaagagtggggagaggaatttgaatgattgggtagttttcattatatagtrgccttttaaaaaatcctttaactttcttctttttttctctttaagttcagtttctccaggcctcttgttgtttaatagcagagttagagaattatgttatctaccttgcaatctaataacttaagctgttttttcttggagggcaaggagagtaaaataatactattttgaatgtattttctcttcttatgtgccattatctcctttccctactcatgggagtaagagacatgta

SEQ ID NO: 308196 - DNA, 644 bp, Homo sapiens
aggttggtgtcattacaaaacagcaagaaggtgagggtggctggaatgaagtaagggagaggttaggagatggggagaaagtgataggcggggatcaagtccagtgatgttctttaaggccagggatttgcattttattttaactatgatgggaagccactggaggattttgatctgaggaatggtgtgacatttttaaaagatcgttggcatgctttgtggagagtattgtgtctaggcacgagtggaagaaggaagaagagctgggagattttttccacttgcccagatgagagaggtagtggcgtagactgaggtggtaatgatgtgtgaagtgrtcagatttgggatactgtttggtggtagagcaaacaggtcttgcttataaaatttaggcagaatgtgagggaaagagaggactcaaggatgaagcaggttttaatcttagaaactgagagctatttaattaggtgggaaagactgggggaagaacaaagttagaaggaaaataaagagtttggaatgagtattagccaagcaatgagtagagtacttgggtgcctgtatgagatagggcgagagcttatggccagatacattaatttggaagtcactagagctgagatgatatttaaaactgagac

SEQ ID NO: 308197 - DNA, 630 bp, Homo sapiens
tacatacgtattactagcttccctagtaattttattttcatttcctttagctgattgagttctcagtgactggcgctatcttaggttcatctcatgtttcagttgtgctgagtgagtcctctgttgtatcattttccccaaccacataccagggtggttgtggctttcaaacttcctgcatctctatcagtartacatataattgtcatttcaaataaaaagaaaataaattatttggtgcttctattccttagcaacaagtcactgttgtgactcattttaaattgtaaatcgtgaaaatttggcaagaaagtccacttacatatttataagtaaaatttaagcccaaagtaaaaacatgactcctgaaatacttgtcagcaccatacagttcagtctaatgctctttgttgttttgaagccattattgacaaatttgtgcatcttatcatttcttaccaatgtgagtctcaaaagtttctattttatcatttggtgaagtcgttttagggaatgtttatcatgcacttgactgtattgataaaagtttttttcagctgacaaatatatgatgaactcaattttattcttagtacagattttgttaactttaaggatcagttccttcct

SEQ ID NO: 308198 - DNA, 630 bp, Homo sapiens
tacatacgtattactagcttccctagtaattttattttcatttcctttagctgattgagttctcagtgactggcgctatcttaggttcatctcatgtttcagttgtgctgagtgagtcctctgttgtatcattttccccaaccacataccagggtggttgtggctttcaaacttcctgcatctctatcagtaatacatataattgtcatttcaaataaaaagaaaataaattatttggtgcttctattccttagcaacaagtcactgttgtgactcattttamattgtaaatcgtgaaaatttggcaagaaagtccacttacatatttataagtaaaatttaagcccaaagtaaaaacatgactcctgaaatacttgtcagcaccatacagttcagtctaatgctctttgttgttttgaagccattattgacaaatttgtgcatcttatcatttcttaccaatgtgagtctcaaaagtttctattttatcatttggtgaagtcgttttagggaatgtttatcatgcacttgactgtattgataaaagtttttttcagctgacaaatatatgatgaactcaattttattcttagtacagattttgttaactttaaggatcagttccttcct

SEQ ID NO: 308199 - DNA, 630 bp, Homo sapiens
tacatacgtattactagcttccctagtaattttattttcatttcctttagctgattgagttctcagtgactggcgctatcttaggttcatctcatgtttcagttgtgctgagtgagtcctctgttgtatcattttccccaaccacataccagggtggttgtggctttcaaacttcctgcatctctatcagtaatacatataattgtcatttcaaataaaaagaaaataaattatttggtgcttctattccttagcaacaagtcactgttgtgactcattttaaattgtaaatcgtgaaaatttggcaagaaagtccacttacatatttataagyaaaatttaagcccaaagtaaaaacatgactcctgaaatacttgtcagcaccatacagttcagtctaatgctctttgttgttttgaagccattattgacaaatttgtgcatcttatcatttcttaccaatgtgagtctcaaaagtttctattttatcatttggtgaagtcgttttagggaatgtttatcatgcacttgactgtattgataaaagtttttttcagctgacaaatatatgatgaactcaattttattcttagtacagattttgttaactttaaggatcagttccttcct

SEQ ID NO: 308200 - DNA, 560 bp, Homo sapiens
atatgagaaagttttattataaattttcatcttgtggaaatgaaataaaaccaatgtcagtcaatgtttccataatctgtctcccaactttaggaggtttatgaaaggattaaaaagcagaaagacatcatttcctttgtgtttgctcatgagtcatatatamcccacgaggcaaactccatgggcttttcctgccattgtggtctccataatacccaatatcatttaaatttatggtggaatctttgcttgtcaagaagaaagagaagacagggagaaggagggagagaggaaaagaagaaagaatgaggaaggatggagagaagaaatctggtcatttaggggtgacttaagactgggttcaccttctacctgatggaacactagcttccatttacttaaatttagttttatgagaatagtctagctttggagtttgaaagaaaacttttatctttctgctccccaatgttttactcctctatttacatccctccctagcacatcttctcatttcaacaatagctccttctttcattgaaaattaagggggaaattat

SEQ ID NO: 308201 - DNA, 560 bp, Homo sapiens
atatgagaaagttttattataaattttcatcttgtggaaatgaaataaaaccaatgtcagtcaatgtttccataatctgtctcccaactttaggaggtttatgaaaggattaaaaagcagaaagacatcatttcctttgtgtttgctcatgagtcatatataacccacgaggcaaactccatgggcttttcctgccattgtggtctccataatacccaatatcatttaaatttatggtggaatctttgcttgtcaagaagaaagagaagacagggagaaggagggagagaggaaaagaagaaagaatgaggaaggatggagagaagaaatctggtcatttaggggtgacttaagactgggttcaccttctacctgatggaacactagcttccatttacttaaatttagttttatgagaatagtctagctttggagtttgaaagaaaacttttatctttctgctccccwatgttttactcctctatttacatccctccctagcacatcttctcatttcaacaatagctccttctttcattgaaaattaagggggaaattat

SEQ ID NO: 308202 - DNA, 596 bp, Homo sapiens
ggtttgaaaacttcttctgtaaaaccaaatagtaaatatttttgactttgtgggccgtaagacctctgttgctgcaactgcttctcttcctctttttccctctccccatcttgacccctcccctcctcctccctttcctcctttaaaaatgtaaaaatgtacaaaacaggcagtaggctgtatttggccttcgggcataggtgtcaacccccgtttcagatattgccaaatatcttttcaaagttgtagaccaatttactcctttaccaraaacctttgagtgtatttgtttcacaatagcttccctgtgttatcttaatattgatatgaggacattcatttattgaggcattcatatactatattatttttccaaatgtgcagttttatatttcctacctttttttttttttttttttactgtgaaagtttaagactctaggctcagttcaaaatattctattctaccaaaaagattcatttcgttaggcactaaaactaaataaatgtgtctctaatgtataagaaactaaaatggccaagaagcactctcagcttcctgttgagtggaatgatggctaagttccctactggaa

SEQ ID NO: 308203 - DNA, 547 bp, Homo sapiens
tcactcagcatgaagtaaggctatcagtttctctctgattattgaattagctgtgttccaaatattttctaatttcctttgtgattcttctttgacctatgagttattttgaagtgtatggtctcatttccaagtttttgggattttccgaataattttctgttatcagtacctaatttaattccattgtagccaatgaatatatttcatatgattttgatccttttaaattcattgagacttgttttgtggcccagtgtgcggtctattttgataaattccatatgtacttgcaaaaatacatattctacagttactgtgaatggagtgtgttataaatgtgaggtaaaattgatgggtaatgtttagtttttctatatctgtactgattttctgtcaagctgttgtaattactaagaaaggaatattgacatctccaaatatgtgtctatttatgtaattatttcagttctgatagttttgcttcatktattttgaagttctgttattaatgcgaggtacaaataatgaaaatgtaggcatgtta

SEQ ID NO: 308204 - DNA, 605 bp, Homo sapiens
gctgtgcctgcttattatattaggctgtagaaactgcatactttcctggccctattcctccaaggactccatcctaaagcaagtaatccaattaaaaaaaaacttagaaactrgtaaatgaaaaatcttacaactattggatcttcttctgtctgagtagttatatatatatgtgcgcgtgtgtaatctttacataaaagagctctaatttgcttaaagaaaaataagtgcttaaatcaaatattttgaaaaaattaaaaactgtaatgccttttagtttctgtagctttggtaatctttgggaaataaaaagttttaaagattatgggtaaaataaaaatgtcttcaaaatgtaaacatgtggtctaaattatgcaggtcagatattaggtttgttaaatgctttaaggtcataaactgcttcttcagcttttgaaaattgttcagttaacctattttggagcataagattctacataaggcctggggacatgtggaattagccatatcccttagctatgcaaagaagttataaagaaatgagattatatataagaaagaatcttgtatggtaaaatcttgtcctaaagtaaaataactggtta

SEQ ID NO: 308205 - DNA, 605 bp, Homo sapiens
gctgtgcctgcttattatattaggctgtagaaactgcatactttcctggccctattcctccaaggactccatcctaaagcaagtaatccaattaaaaaaaaacttagaaactggtaaatgaaaaatcttacaactattggatcttcttctgtctgagtagttatatatatatgtgcgcgtgtgtaatctttacataaaagagctctaatttgcttaaagaaaaataagtgcttaaatcaaatattttgaaaaaattaaaaactgtaatgccttttagttyctgtagctttggtaatctttgggaaataaaaagttttaaagattatgggtaaaataaaaatgtcttcaaaatgtaaacatgtggtctaaattatgcaggtcagatattaggtttgttaaatgctttaaggtcataaactgcttcttcagcttttgaaaattgttcagttaacctattttggagcataagattctacataaggcctggggacatgtggaattagccatatcccttagctatgcaaagaagttataaagaaatgagattatatataagaaagaatcttgtatggtaaaatcttgtcctaaagtaaaataactggtta

SEQ ID NO: 308206 - DNA, 631 bp, Homo sapiens
tgttctcatttatttatgggatctaaaaatcaaaaccattgaactcatggagatggagaatagaaggatggttaccagaagctgggaagggtagtagggagatggcaggagcagtrgggggaagttaattggtacaaaaaaaaaatttagaatgaacaagacctagtatttgttagcacaacgggggggaccatagtcaataatttaattgtacattttaaaataactaaaatataattggattgtttgtaatacaaaggataaatgcttgagtttatcatccaattttctatgatgtgattattctgcattcatgcctgtgccaaaatatatcagtaccccataaatatacatgcctgctatatacccacaagaaaagaaaaataaaaataagagtcaatgatggcttctgcttaaagaagcccctttgcccctctcaaaactctactaaagtgatcatgaatggatttgtaaaggcacaatcccacaaaatggaaggagtgactaaatacatacactatatacatatgtgcatacatacatataaaagctgagaagcagatagaaaaatatggaaaccaacagatccaagagtgctgaaatatgccaggaaaaggcaagctcatctgta

SEQ ID NO: 308207 - DNA, 598 bp, Homo sapiens
tctgcattcatgcctgtgccaaaatatatcagtaccccataaatatacatgcctgctatatacccacaagaaaagaaaaataaaaataagagtcaatgatggcttctgcttaaagaagcccctttgcccctctcaaaactctactaaagtgatcatgaatggatttgtaaaggcacaatcccacaaaatggaaggagtgactaaatacatacactatatacatatgtgcatacatacatataaaagctgagaagcagatagaaaaatatggaaaccaacagatccaagagtgctgaaatatgccaggaaaaggcaagctcatctgtactgaagaaccccaaatgggtcaggaatttcagagcaccaagtagtkctgaaagaggaggtataggtagtgctgaaagcagaaggactgattgaaagtcagtttaatatgtagtcagtggtcccagctaagggagggctggaagttgatgctctagtgaggttcgaccatcaaaaccaagtgcccctctatgtctttagaaccaccagagtggagggaagggtcagcaagtgaggcccaacttcaacagtgccactaggatgtcttttatat

SEQ ID NO: 308208 - DNA, 581 bp, Homo sapiens
gcaggcctgccatctggcacttaaatatcttactgagtaatcaggcaaatatgtgagggttctggccttaattaaaaacatcagaaagatgttaaaataagagcacgaatctgggaatgtcagccaaaagcctaaagataaaaattccccattttgtcttaaagttaaaaataagagttaattttggagacaaatctacctagggttattctttttccatcccctgttctgactcatcctgttgcctaakgatcctttctgggtgcttttgacacagaaagggaagtttgaaaatgcgtagaaggaaggagaggatttcaagtttaatcgtaagcctaacctgagtttttgcacattattcacagtatttaactgcctggattcagaagccagagttttagcctcaatgctgacatttacaatccaggtaaaattaggcaattttacctcccagggccttggttttcttgactataagaagatgagaataacaatgcccacatcaaagttaggattaaaattaatttgttgacattagtgttgaagttaagatttaataagataatgagcaataaaaggtt

SEQ ID NO: 308209 - DNA, 606 bp, Homo sapiens
catctgataaggagttaatgtccaaaatacataaagagctcaaacaaytcaatagcaagaaaacaaataacctgattagaatatggacaaaggacctcaacagacatttctcaaaagaagacatacaaatacaaaacaggtgtatgaaaagatggtcaacatcactaatatcaagcaaatgaaaattaaaaccatgatgagctgtcacttcacacctattagaatggctgttatcaaaatttctaagaatagattttaaatattcttaccataaagaaataagtctgtaaggggatggatatgttaatttgcttgatttaatcattccacaatgtatacatgtatcataacatcatattgtactctataaatatatacaattattgtcagttaaaaatataattttttaaaaaaactgttttaacaagcccttcaggtgattttaatgaatgcttccccttgaaagcaacttaaataaaacaaatgtttttaatagcaactgaaaggacttaggtaagataaaatggaagcttttgtcaaagagctaatagcacttgacagtgttaaatgctaaattgtaaagacgtaagagctactacagaaaag

SEQ ID NO: 308210 - DNA, 606 bp, Homo sapiens
catctgataaggagttaatgtccaaaatacataaagagctcaaacaattcaatagcaagaaaacaaataacctgattagaatatggacaaaggacctcaacagacatttctcaaaagaagacatacaaatacaaaacaggtgtatgaaaagatggtcaacatcactaatatcaagcaaatgaaaattaaaaccatgatgagctgtcacttcacacctattagaatggctgttatcaaaatttctaagaatagattttaaatattcttaccataaagaaataagtctgtaaggggatggatatgttaatttgcttgatttaatcattccacaatgtatacatgtatcataacatcatattgtactctataaatatatacaattattgtcagttaaaaatataattttttaaaaaaactgttttaacaagcccttcaggtgattttaatgaatgcttycccttgaaagcaacttaaataaaacaaatgtttttaatagcaactgaaaggacttaggtaagataaaatggaagcttttgtcaaagagctaatagcacttgacagtgttaaatgctaaattgtaaagacgtaagagctactacagaaaag

SEQ ID NO: 308211 - DNA, 510 bp, Homo sapiens
gcgttttgcagctcttttctattctccccatctccttcaggtactccaatcaattgtaggttcagtctttttatgaaatcccaaatttcttggwaccttttttcagtcctttttattcttttttctctagtcttgtctgcatgccttatttcagcaaggtatcttcaaattcaaatgccttcctccacttggtcaatttagctattgatacttgtgtatgcttcaagaagttcttgtgctgtgtttttctgctccatcaagtcatttatgttcctctctaaactgaatattctacttagcagctcctctaaccttttatcaaggttcttagcttctttgtgttgggttagaacatgctcctttagctcagagtagttttttattatccatcttctgaagcctacttctgtcaattcatccatctcatcctttgtccagttctgtgcccttgctggagagatgctgtgatcatttggaggagaagaggcactctgggcttttgggttttca

SEQ ID NO: 308212 - DNA, 510 bp, Homo sapiens
gcgttttgcagctcttttctattctccccatctccttcaggtactccaatcaattgtaggttcagtctttttatgaaatcccaaatttcttggaaccttttttcagtcctttttattcttttttctctagtcttgtctgcatgccttatttcagcaaggtatcttcaaattcaaatgccttcytccacttggtcaatttagctattgatacttgtgtatgcttcaagaagttcttgtgctgtgtttttctgctccatcaagtcatttatgttcctctctaaactgaatattctacttagcagctcctctaaccttttatcaaggttcttagcttctttgtgttgggttagaacatgctcctttagctcagagtagttttttattatccatcttctgaagcctacttctgtcaattcatccatctcatcctttgtccagttctgtgcccttgctggagagatgctgtgatcatttggaggagaagaggcactctgggcttttgggttttca

SEQ ID NO: 308213 - DNA, 602 bp, Homo sapiens
tacacatccttcaaagatgggtgagactttgccccatgtcattctttctgccagagaggccaccattgtgaacaatgctgttgtggcttttaactgagcaatggaacctgtcacctcagctcccatttcattgaccaaagcaaatggccagactgagttcaaccggacaggttaatatagccctcctatttacctacaaggagagaactaatatctgtaaacagctaataggttcacaagaagtatcagctcctctgaggtgggtatgctcactttgcaggtaagaaaacaaacatagagagaggttaggtaatttgcctaaagttcttcggcacataattataagtgctggatttctatttgtctgattcccaagtttgtgctkagaagcaccatgcctcactgttagaaatagagaccatgggaaggggaaatggttttccaagagattagttaagctttaaatggttgtggaactttgaagtggaaatctcccagggcaactcaaaatgtggaactagtgtagaagagagacaagacaactagaggtgcatattgatttggaatttctaaatcagaacattcagtgaaatatttgtgtg

SEQ ID NO: 308214 - DNA, 602 bp, Homo sapiens
tacacatccttcaaagatgggtgagactttgccccatgtcattctttctgccagagaggccaccattgtgaacaatgctgttgtggcttttaactgagcaatggaacctgtcacctcagctcccatttcattgaccaaagcaaatggccagactgagttcaaccggacaggttaatatagccctcctatttacctacaaggagagaactaatatctgtaaacagctaataggttcacaagaagtatcagctcctctgaggtgggtatgctcactttgcaggtaagaaaacaaacatagagagaggttaggtaatttgcctaaagttcttcggcacataattataagtgctggatttctatttgtctgattcccaagtttgtgctgagaagcaccatgcctcactgttagaaatagagaccatgggaaggggaaatggttttccaagagattagttaagctttaaatggttgtggaactttgaagtggaaatctcccagggcaactcaaaatgtggaactagtgtagaagagagacaagasaactagaggtgcatattgatttggaatttctaaatcagaacattcagtgaaatatttgtgtg

SEQ ID NO: 308215 - DNA, 635 bp, Homo sapiens
aatcagaacattcagtgaaatatttgtgtgactttttttctctaaagacagaagaaaatgggaaaaaacagtcttcagggatatcaacagattggcagagagagaaaaagagctaataagaaagttgtaaaagaaagaacactgaagaggaaaggcctttaggargagtataaggtcaggaatacctgttacaacaggaagtcggaaagtgataatacaagttttttaaaaagccattctatttgtataggaagaattctgggtgtcctctaagggaaacagttcataaagtagtgaaatgagtaacttcaaatttctagggccagaaaaagaaaaaaactgtgggcatgagacacaagattgaagtatttagtagcagaaagactcatagaaaaaaaattatgatggattaaatgtcagggctgtggtttcacagtttgcgaagaaaaatgtacaaatgtttagaggcaagaggataagagagattgaaaatcagagtaagagagacagaggcacacagacagactacaagaacattatagagctggaatcaacggggtccacggtgcaggggcagactgcaattatgacctcaatagacatcaggccttttctgcctctgagacagggaaagt

SEQ ID NO: 308216 - DNA, 527 bp, Homo sapiens
gagtgattctccaatacgttgcttttcaatcctatgacatcctcacctctgccctatgggtagattctttgatgtctgaaaagtttctgtacataaagaggaacattcattactattgtttaatgccccatttgttaactgtgtgactttattaaaaaattatttttgaaggagtaaaccatcactattttaagtattcacatagtactttcaaaactaataaatatagacttggaataaaacaaattagatttactaaaacttacttgttggtcacaaacatttttaatagtatgccccaaatgcatggaatcaacctatatgcccactgctgacagactagataaagaaaatgtggtacatatacatcatggaatattatgcagacgtgaaaaaaaacaagattatgtcctttccagggacatggatggagctggaggccattatccttatcayctaatgcaggaacagaaaaccaaataccacatgttctcacttataagtgggagctaaatgatgagaacaca

SEQ ID NO: 308217 - DNA, 600 bp, Homo sapiens
atgttctcacttataagtgggagctaaatgatgagaacacatggacacactgagaggaaaaaagcacactggggcctattgtaaggtggagggtgggaggagggagaggatcaggaaaaataactaatgggtatgaggcttaacacctgggtgattaaataatctgtacaacaaactcccatgacacaagtttacctatgtmacaaacttgcacatgtaccttgaacttaaaagttttaaaaagtcctaatttaaagtattattctaatattttacattttctgaaaaatcagacaaaatacaaaaataaatgctttaaatctctattatactttcattttaaaccagttataaaggtactgaaatcaagataaattttatcatatgtacttatgcttcttcctttctaggatttttatgtattatcaaggtttctcaaggctgaagtagttttactagtgacaaaagcaaaagaataccaccttagaccagctgaaatgacaagtcgtagaattttgaaactgataaatcttggttggccaagaatcctgattgtgtaaacctttgtgatttaaacccaagccttggggcattagactg

SEQ ID NO: 308218 - DNA, 622 bp, Homo sapiens
aactgtagcatcaaaaagaataaattacttagaaataaattcaatgaaagacacgtaagacttgtacaccgaactgctatagatacttctcttaatgaccctaaaaataattcttcctgtgggattttactatcattaataaaagtgttagcataaataatacaacctgaatcaataccatgtgacctttctcactgcaaatagttaggtcctgaaatattaaacgataaattcccactactggaggaatcctggtattgcaagttcttcaaaaggaatgtttacatctctaattaaaggtggaaaaagcacaaaccccctaccttaagttacaaccagggactttgasaagtctttaccacaaggaccacccacactggagccatccctccctcctgtcactgtgtactctccacttaatcatttgtccctcaaacattttcctaatcacgtaaccctctcctgagaaacattccattgtgcttagtgatctctgggatgaaaataggagtcttcatgatctgaccccaacttacataaaacaggagtcttcataatctgaccccaacttacatacacaaacacattcttcccaaatactgaaggaaaacattactgcatc

SEQ ID NO: 308219 - DNA, 622 bp, Homo sapiens
aactgtagcatcaaaaagaataaattacttagaaataaattcaatgaaagacacgtaagacttgtacaccgaactgctatagatacttctcttaatgaccctaaaaataattcttcctgtgggattttactatcattaataaaagtgttagcataaataatacaacctgaatcaataccatgtgacctttctcactgcaaatagttaggtcctgaaatattaaacgataaattcccactactggaggaatcctggtattgcaagttcttcaaaaggaatgtttacatctctaattaaaggtggaaaaagcacaaaccccctaccttaagttacaaccagggactttgacaagtctttaccacaaggaccacccacactggagccatccctccctcctgtcactgtgtactctccacttaatcatttgtccctcaaacattttcctaatcacgtaaccctctcctgaraaacattccattgtgcttagtgatctctgggatgaaaataggagtcttcatgatctgaccccaacttacataaaacaggagtcttcataatctgaccccaacttacatacacaaacacattcttcccaaatactgaaggaaaacattactgcatc

SEQ ID NO: 308220 - DNA, 515 bp, Homo sapiens
tgatgcagacccccagcccagagcacccatctcacggaaatgtggctggactgttctccatgcaggttctggtcctcamttctcatcactgggcagggccacctgagctgggactccagcacaactactctgccccagcctgatgacttcaatcagaggcagtccagcagtgaaagaaacacccatatgcagagatgagaaagaaccaaagcaagaactctggcaactcaaatagccaaagtgtcttatgtcctccaaatgattgcactagttctccaacaagtgttcttaaccaggctgagaaggatgaaatgacagaaatagaattcaaaatatagataagaatgaatatcattgagattcaggagaatgccaaaatccatccaaggaaaccaagagtcacaataaaataatacaggagctgacagacaaaatagccactataaaaaaagagcctggccagtcacagtggctcacacctgcaatcccagcgctttgggagaccaagagggtgg

SEQ ID NO: 308221 - DNA, 515 bp, Homo sapiens
tgatgcagacccccagcccagagcacccatctcacggaaatgtggctggactgttctccatgcaggttctggtcctcaattctcatcactgggcagggccacctgasctgggactccagcacaactactctgccccagcctgatgacttcaatcagaggcagtccagcagtgaaagaaacacccatatgcagagatgagaaagaaccaaagcaagaactctggcaactcaaatagccaaagtgtcttatgtcctccaaatgattgcactagttctccaacaagtgttcttaaccaggctgagaaggatgaaatgacagaaatagaattcaaaatatagataagaatgaatatcattgagattcaggagaatgccaaaatccatccaaggaaaccaagagtcacaataaaataatacaggagctgacagacaaaatagccactataaaaaaagagcctggccagtcacagtggctcacacctgcaatcccagcgctttgggagaccaagagggtgg

SEQ ID NO: 308222 - DNA, 594 bp, Homo sapiens
ttttcttgtgcatgcaaacatatttatataatatgtgttttgtagtatttattatatagaattatatatatttatataacgttatccagcatataatatatatacaatccatatttytataaaatagatacctaaaagtaaaattggatgttatatggtctgtgtatttacaattttaatagctactgctaaattgaactttaaaacattggaacagatttattcttcccccatagtagatgcacagaattttttttaaaagggaatactatcaaatcaattagagtataaccacgtgttttaacccaaagtatccctttttttattattaaaggagatatggcaagataaaagcagtcaattttttttttttttttttttttttggtaatttaaggttaatgatttttctgtaattaaaagaattgtcatgtcaattcttcagtattttggtaatctagagcagaggtcagtaaacatattctgcaaaaggccagattgtaaacatattaggtttagtgggtcatacagtctgtgttacaactactcaaaagtattttaacagcaaaagcagccatagaaaatattgtcaatg

SEQ ID NO: 308223 - DNA, 594 bp, Homo sapiens
ttttcttgtgcatgcaaacatatttatataatatgtgttttgtagtatttattatatagaattatatatatttatataacgttatccagcatataatatatatacaatccatatttttataaaatagatacctaaaagtaaaattggatgttatatggtctgtgtatttacaattttaatagctactgctaaattgaactttaaaacattggaacagatttattcttccmccatagtagatgcacagaattttttttaaaagggaatactatcaaatcaattagagtataaccacgtgttttaacccaaagtatccctttttttattattaaaggagatatggcaagataaaagcagtcaattttttttttttttttttttttttggtaatttaaggttaatgatttttctgtaattaaaagaattgtcatgtcaattcttcagtattttggtaatctagagcagaggtcagtaaacatattctgcaaaaggccagattgtaaacatattaggtttagtgggtcatacagtctgtgttacaactactcaaaagtattttaacagcaaaagcagccatagaaaatattgtcaatg

SEQ ID NO: 308224 - DNA, 594 bp, Homo sapiens
ttttcttgtgcatgcaaacatatttatataatatgtgttttgtagtatttattatatagaattatatatatttatataacgttatccagcatataatatatatacaatccatatttttataaaatagatacctaaaagtaaaattggatgttatatggtctgtgtatttacaattttaatagctactgctaaattgaactttaaaacattggaacagatttattcttcccccatagtagatgcacagaattttttttaaaagggaatactatcaaatcaattagagtataaccacgtgtyttaacccaaagtatccctttttttattattaaaggagatatggcaagataaaagcagtcaattttttttttttttttttttttttggtaatttaaggttaatgatttttctgtaattaaaagaattgtcatgtcaattcttcagtattttggtaatctagagcagaggtcagtaaacatattctgcaaaaggccagattgtaaacatattaggtttagtgggtcatacagtctgtgttacaactactcaaaagtattttaacagcaaaagcagccatagaaaatattgtcaatg

SEQ ID NO: 308225 - DNA, 514 bp, Homo sapiens
cacaggatattgttctatttatttgtgtcttcttcaattttaatttaatttttttttttttagatacggggtcccactaggttacccaggctggtcttgaactcctggcctcaagcaatcttcttgttgcagcctcccaaagtgctgrgattataggtgtgagtcactgggcctagcgtcttcaatttctttcctgaatgccttacaattttcagtgttcagatcttttaccttattagttaaatttatttctaagtattttattctttttgatgttgctgtaaatgagcttgttttcttaattttggggagattgttcattattaatatagagaaatgctactgatttttgcgcgttgattttgtatcctgcaactttactgaatttgtttattagctctaacagtttttggtggagtatttagggttttagggttttctatacataaaataatgtcatctgcaagcagacaatataacttatttttcaatttgggtactttttgttcatttt

SEQ ID NO: 308226 - DNA, 621 bp, Homo sapiens
ttagttgggtttgaaggcccctgggttccagtaaccggtacaggaggggctactggtagatcatgaccaggagaaacaaaactttgttacataagttccarggtaatctggaaaaagtgccaattggactcatggctctcatggactgagtgacaatatagttgcaatagcaatacgtggaccatggggatgtgctggctacttacaacagcatttgaaaacttaaaaagacttggcatttcaaattttttattttgaggcttagagaactagtgagtttcttctgccctaaaataatctcttatcccttgttgatgcagagtttatataatcaaaatcatctgcagtgtctgttgtgtgtgtgttgggggaggggggtatattaattacaacacaggtggagctcacagcctcaccagatcacctgtgaaagttgagcatttatgagaaggagtaggaatctaaaattgggaattaccacatttgggaggatttggagaaccctgtatctctcaatcctactgagtcgcccttgtaccagaagcctatgtttcttatatcttgggctctgcaaatgccctctttcaccaggcagacacatgtccatgggatagggaaggt

SEQ ID NO: 308227 - DNA, 621 bp, Homo sapiens
ttagttgggtttgaaggcccctgggttccagtaaccggtacaggaggggctactggtagatcatgaccaggagaaacaaaactttgttacataagttccagggtaatctggaaaaagtgccaattggactcatggctctcatggactgagtgacaatatagttgcaatagcaatacgtggaccatggggatgtgctggctacttacaacagcatttgaaaacttaaaaagacttggcrtttcaaattttttattttgaggcttagagaactagtgagtttcttctgccctaaaataatctcttatcccttgttgatgcagagtttatataatcaaaatcatctgcagtgtctgttgtgtgtgtgttgggggaggggggtatattaattacaacacaggtggagctcacagcctcaccagatcacctgtgaaagttgagcatttatgagaaggagtaggaatctaaaattgggaattaccacatttgggaggatttggagaaccctgtatctctcaatcctactgagtcgcccttgtaccagaagcctatgtttcttatatcttgggctctgcaaatgccctctttcaccaggcagacacatgtccatgggatagggaaggt

SEQ ID NO: 308228 - DNA, 621 bp, Homo sapiens
ttagttgggtttgaaggcccctgggttccagtaaccggtacaggaggggctactggtagatcatgaccaggagaaacaaaactttgttacataagttccagggtaatctggaaaaagtgccaattggactcatggctctcatggactgagtgacaatatagttgcaatagcaatacgtggaccatggggatgtgctggctacttacaacagcatttgaaaacttaaaaagacttggcatttcaaattttttattttgaggcttagagaactagtgagtttcttctgccctaaaataatctcttatcccttgttgatgcagagtttatataatcaaaatcatctgcagtgtctgttgtgtgtgtgttgggggaggggggtatattaattacaacacaggtggagctcacagcctcaccagatcacctgtgaaagttgagcatttatgagaaggagtaggaatctaaaattkggaattaccacatttgggaggatttggagaaccctgtatctctcaatcctactgagtcgcccttgtaccagaagcctatgtttcttatatcttgggctctgcaaatgccctctttcaccaggcagacacatgtccatgggatagggaaggt

SEQ ID NO: 308229 - DNA, 633 bp, Homo sapiens
ctgcaactgaacccagatacagagggataacaaattaattcatcactagcttttaacattccagctcagattacatgattaaagtcctttaagggccttaaaggacctattttctagcccatagagaaatagcttctcacaaccataagaggaaggtggataggttctgcttgaatcccaccagggataagttttttagggaactcattccattttgaacaaattccaactattaaagaaattagayttgtctgaaacctatttgtaacttgagcccattgatttaaattccctgttagcacattggtttagctttctgcttagctaaaaactcaaattcctccacctgatccttctgtaacatggttcccagattccttaatgctgcatacaactggttaaaagacagagagaaagaggtgaggaggagagaagagttagttattcttggtggggattgtgcaagttgtctgcatgtgcagaatgtgctggtataaatctttatgcagaaaagcaaagccagaagagggctggttgaagtatgtaattaaaaacctgcttatttaaaaacagtcctggtaccagctcttgttcatttctatgtttccagcctccctggaacattttcttctc

SEQ ID NO: 308230 - DNA, 633 bp, Homo sapiens
ctgcaactgaacccagatacagagggataacaaattaattcatcactagcttttaacattccagctcagattacatgattaaagtcctttaagggccttaaaggacctattttctagcccatagagaaatagcttctcacaaccataagaggaaggtggataggttctgcttgaatcccaccagggataagttttttagggaactcattccattttgaacaaattccaactattaaagaaattagatttgtctgaaacctatttgtaacttgagcccattgatttaaattccctgttagcacattggtttagctttctgcttagctaaaaactcaaattcctccacctgatccttctgtaacatggttcccagattccttaatgctgcatacaactggttaaaagacagagagaaagaggtgaggaggagagaagagttagttattcttggtggggattgtgcaagttgtctgcatgtgcagaatgtgctggtataaatctttatgcagaaaagcaaagccagaagagggctggttgaagtatgtaattaaaaacctkcttatttaaaaacagtcctggtaccagctcttgttcatttctatgtttccagcctccctggaacattttcttctc

SEQ ID NO: 308231 - DNA, 613 bp, Homo sapiens
ttctccctgttccttgtgagctatgtttatagaagcttcaatgagtctatattcttaataaactctgtgatctgccttcttttgtctgagtttaggccctcatcatcctacaccacaatgattgcagtatcttacctttcttcactccaccctcttctgtctcccagaatactcccaacagtacgtcatttgcttaccactcttyaatggcttctcattttgttttagatgaaggtctaattgccttcctgtggcatgaagcccatcctgctgatgggtgactgcttctactgcagctccctcaaatacaccctgttctggctacacaacttcactggccattctggaatctgcccttctggtgaggcctctctgcatctgcatgtgccattcctcggtagaatgctaagtcctctacagtgtacagcttgtacattgaacaatttcccactcacctttccaacctcagttcagggtcaccttctccatgaaacttttcagtgccctctgagtccaggcagattggctgtatcctcctgtttgtttggtatatgctttcttttctagactgtgaacttcttaaaggcaaggagcgtgtctctatttctattcc

SEQ ID NO: 308232 - DNA, 298 bp, Homo sapiens
accacattggttttgttccccttaagaatggttagacttaatggtatgccttttgtctgacttgaggaaatggccacacaaagaggattttgccattgctatggaattgctgttaaaggaattgttcrttatatcattcaatggtcctcataaagtcccatgtgatgaattcctttcagaattcaagggtgaacttatcttaaataattggcatgctcccatttatgagataataagatctgtgtaactcattacatttcataccttctcctcctcaggagtcaggaatttcaaaatc

SEQ ID NO: 308233 - DNA, 591 bp, Homo sapiens
ttgtctgacttgaggaaatggccacacaaagaggattttgccattgctatggaattgctgttaaaggaattgttcgttatatcattcaatggtcctcataaagtcccatgtgatgaattcctttcagaattcaagggtgaacttatcttaaataattggcatgctcccatttatgagataataagatctgtgtaactcattacatttcataccttctcctcctcaggagtcaggaatttcaaaatcaaataggcttcttacaataaatataacctctggtgttaacaacattgaatcctcttttctattatggtttgctgtggtctcataattttttgcatgttaatctcctattttaaaccactctgaaataattttttttaaagaagcaaagggaaaataaaaatctcagtttaatggaatccaattaaaattcttttgttgtggtataatatatacaattaactacacatatttaaagtattaatataatatctgataaattttgacatgtatatrcctgtgatattgtaaaatacatatttgttcttccatctatttcttggcattgaattcctaaaatccttagaa

SEQ ID NO: 308234 - DNA, 586 bp, Homo sapiens
gccttgcctgcaccataaataaatgctaagtatgtgagatgatgtgtgtgctgagtagctggatttaatcattctacagtgtatacatatattgtgacatcacattgtaccccataaagatacacaattactatttgtccattaaaaatgtaaaaatataaatgccttgcttcatttggtcttaaaacccaggtcacttgccagggatttgtggttttgtcctctgcaaggccataggacctccctgctcccctttgcctgctctctccactcccacgctgttgacacccccgggtaaatatatcttagtccaagagaagcagtttggaccagctgcaggcatccccttccctctcagtatgtattttgaggagtaaagggtggggagaggcagcctgggggcaggctstaagctcccagtgtgtgttttgaggggtcaggagtcgggggtcaggtgttgagtaagcacattctgccatgtctgcctcagggcacagatggctgcttttttaggtaaagcaagaggggaaacagctgacagcagaattctctttattttgattcttctttcttctgtgacttagtg

SEQ ID NO: 308235 - DNA, 566 bp, Homo sapiens
gaaatcttccgtccagcctttgttggacagatgtggaaactgaggccagaagggaagtggcagagtaacctagcttgtggagggcagggtcaggctgggaactaggatggttgatggctggtccagcctagcctctttcagggagcgcacggtgaagggctgcctctcaagagtttatgtctgttaggagcagagaacacaaaagtcctgtgttcccttcaccagtcctttctccaggctagaaaaatgatgatgtcagaaggatctcataagccctgtgtggagatttggcattcagctcctcactctgccctagagaggttttgttatgccagacaggggctctgaacatctcwgtctgtcagtgagtgagaagcctattggacttgctggcttcatcaggcaaggtgtggagagatgtcaagagaccccccggaggatccaaatcaatactaggcatgaaaacaaagctggctttgatgcccccgagttaacaaaggaaagtttctttgctgcttagacaagttagaaccacacaaaaatggttaaaagtattttaggatctt

SEQ ID NO: 308236 - DNA, 566 bp, Homo sapiens
gaaatcttccgtccagcctttgttggacagatgtggaaactgaggccagaagggaagtggcagagtaacctagcttgtggagggcagggtcaggctgggaactaggatggttgatggctggtccagcctagcctctttcagggagcgcacggtgaagggctgcctctcaagagtttatgtctgttaggagcagagaacacaaaagtcctgtgttcccttcaccagtcctttctccaggctagaaaaatgatgatgtcagaaggatctcataagccctgtgtggagatttggcattcagctcctcactctgccctagagaggttttgttatgccagacaggggctctgaacatctctgtctgtcagtgagtgagaagcctattggacttgctggcttcatcaggcaaggtgtggagagatgtcaagagaccccccggaggatccaaatcaatactaggcatgaaaacaaagctggctttgaygcccccgagttaacaaaggaaagtttctttgctgcttagacaagttagaaccacacaaaaatggttaaaagtattttaggatctt

SEQ ID NO: 308237 - DNA, 595 bp, Homo sapiens
accaaaaatggctcaggatattgccaaatggtccctgattttggacagggagagggaygccaccaaatcacctctggttgagaaccactactctaaaataatatttttattttattgtttttaattaaaattaaaaaaaattttttcaaaatattcaaaatatttttgcttacccatttttattttttaagtctttttctaaaattatttgttaaattgacaaaaattgtacatatttatggggcacatagtgatacagataatgtatagtgatcagatcagggtaattagcatatttgtcatctcaaacagtttttattactttgtgctgggaacattcaatattctccttgtagctacttgaaataatatattattgttaatgacagtcatcctacagtggtatagaacactagaacttattgctcctatctagctgtaattttgtatccttaacaaatatctccctatccctccccctaccacccttcccagattctagtatactctgttctacattttaattccatgagatcaactttgtttaccttctacatatgagtgagaatatgtggtgtttaacctttgttcctgg

SEQ ID NO: 308238 - DNA, 613 bp, Homo sapiens
tcaacttaccttaattaccttttaaaagatgctgcctccaaatatagtctgtacagtctgaggtactgggggttagagtttcaacacataaaatttgggggggatataattctgtctaatcattgcttaaagtctaagcactagcttattttaccatcractccttgcctactggtagttgaagaagtgatagcaacgtgcttggactgaccaacaattaagtagccaggaatcattctgagaaatacccttccaggtctgcaaaaaccataaagcaatttagggagttgaggtccctatgtcaccttcctatccaagtaccatgccttttctggctgtttgctggggccgtctgaacattttctggaggctcactgcaaaaggcaagtaggggcagcctgaggtgggagtttggcaatccgtagaggctgccgcaagctgggaccacctctgcagacgctgttggattcctactgtgggagatgtcctcttgctaagagtaacacatttcctcttgagtaagtgacagggtgggaatatagcttttgccaaactctcaaatagaaaaacaaactcacataatttggagagaaggaatgtgcttaaaatctga

SEQ ID NO: 308239 - DNA, 591 bp, Homo sapiens
taaaaaccaaaactataaaaagcctagaagacaatctaagcaataccattctggacataggaacaggcaaagatttcatgacaaaaacaccaaaagcaatcataacaaaagcaaaaattgacaaacgagatctaattaaacttaagagcttctgcacagcaaaagaaactatcaacagagtaaagaaacaacctacagaatgggagaaaatatttgcaaactatgtatctgacaaaagtctaaaaagtccaatattcaacatctataaggaacttaaattaacaagaaaaaaacaccattaaaaagtaggcaaagaacatgaayattctgcaaaagaagacatatatgcagcccacaagcatataaaagaaagctcaatatcactaatcattagagaaatgtaaatttaaaccacaatgagatactatctcacatcagtcataatggctattattaaaaagtcaaaaaataacagactctggtaaggttgcggagaagagggaatgcttatacactgtgggagtgtaaattagttcaaccactgtggaaagcagtgtggtgactcctcaaacaaaaacagaactaccattg

SEQ ID NO: 308240 - DNA, 529 bp, Homo sapiens
acaaaatgaaaagaatttattgtgtgtcctcaaagatctctttcagctctataatcctttgatcctaaacraattctatagttagaagccctttttctgactattttaactatcaaaaatataaccatgaatcaaaaatagggtgcaaagaaaggaaagagaaagatccatgaaaagcataggtcaatattgcaaagtccacacgttaagcttcccagaacctcataagtctgtactcagcatgaagttattcttccttcatatgctggcctaatgaatttgatttcctttttcacaaggctcacaacacagtagaagaggcaaaaaaaaaaaaaaggcaagaatactgacaataataagtaaaaggccataggaaaaaaaaaaaaaacagatagaaaacttcgaaaaggcagggactttttctggttcactgctacatacccagtgtcaggcacatagtatgtgcacaaaacatgttgggtgaatgaatgaaaacaatacttacagaaagcagataaaatttgtgtaa

SEQ ID NO: 308241 - DNA, 529 bp, Homo sapiens
acaaaatgaaaagaatttattgtgtgtcctcaaagatctctttcagctctataatcctttgatcctaaacgaattctatagttagaagccctttttctgactattttaactatcaaaaatataaccatgaatcaaaaatagggtgcaaagaaaggaaagagaaagatccatgaaaagcataggtcaatattgcaaagtccacacgttaagcttcccagaacctcataagtctgtactcagcatgaagttattcttccttcatatgctggcctaatgaatttgatttcctttttcacaaggctcmcaacacagtagaagaggcaaaaaaaaaaaaaaggcaagaatactgacaataataagtaaaaggccataggaaaaaaaaaaaaaacagatagaaaacttcgaaaaggcagggactttttctggttcactgctacatacccagtgtcaggcacatagtatgtgcacaaaacatgttgggtgaatgaatgaaaacaatacttacagaaagcagataaaatttgtgtaa

SEQ ID NO: 308242 - DNA, 529 bp, Homo sapiens
acaaaatgaaaagaatttattgtgtgtcctcaaagatctctttcagctctataatcctttgatcctaaacgaattctatagttagaagccctttttctgactattttaactatcaaaaatataaccatgaatcaaaaatagggtgcaaagaaaggaaagagaaagatccatgaaaagcataggtcaatattgcaaagtccacacgttaagcttcccagaacctcataagtctgtactcagcatgaagttattcttccttcatatgctggcctaatgaatttgatttcctttttcacaaggctcacaacmcagtagaagaggcaaaaaaaaaaaaaaggcaagaatactgacaataataagtaaaaggccataggaaaaaaaaaaaaaacagatagaaaacttcgaaaaggcagggactttttctggttcactgctacatacccagtgtcaggcacatagtatgtgcacaaaacatgttgggtgaatgaatgaaaacaatacttacagaaagcagataaaatttgtgtaa

SEQ ID NO: 308243 - DNA, 484 bp, Homo sapiens
aaatttaaacaactatctgcatacagaaaagcaccatctcaagaaccaaaaatcagacagagtcactggacacacctgggasctggggatactcacttccctgaaaggaagagccttaggcaaggcccaatgctatgctggtttcaggtctgaccaagcacaatcccactggtggtggccacaggggtgcttacatcaccacacccccagtttcaggtggctcagcacagagagagaaactgttcatttgggagacagtaatggaaaagaacaagagtccctgcttggcaatacagagaattcttccagatcttgtccaagatcaacaaggtgttactttggtgcaaaaccataccattattgagcttggagcccaagtcccttcaaataacaggaaagccttcccaagaaggacaggcacaaacaaagcaagactgtgaatacaacaataaatacctaactcttcaatggccagacactgaca

SEQ ID NO: 308244 - DNA, 557 bp, Homo sapiens
tggcatgacatacttaaagtgctaaagggaaaaaaactgttaccctagaatagcatatctaccaaaaatattatttaagcatgaaggaaaaacaaagcccttcccagaaaaacaaaagctgagggattttatcaacaccaaacctgtcctacaagaaatgctaaaggacattcttcaatttaaaagaaaaggatgttaakgagcagaagaaatcatctgaaggtataaaactcacaggtaatagtaagcacacagaaaaacacagaatagtatgacactgtaattatagtgtgtaaactacacctaagtagaaagacgaaatgacaaaaaaataaaaaataacaacaacttttaaaaacatagaccgtacaataagacataaagaaatataacaaaaagttaaaaagtgggaggacaaagttaaagtgcaaagtttttcttttctcttggcatgtttgtttatacaatgactgttaagttgtcatcagtttaaaataattggttacaagatagtatttacaagcctcataataataactttaaattaaaaaacatac

SEQ ID NO: 308245 - DNA, 557 bp, Homo sapiens
tggcatgacatacttaaagtgctaaagggaaaaaaactgttaccctagaatagcatatctaccaaaaatattatttaagcatgaaggaaaaacaaagcccttcccagaaaaacaaaagctgagggattttatcaacaccaaacctgtcctacaagaaatgctaaaggacattcttcaatttaaaagaaaaggatgttaatgagcagaagaaatcatctgaaggtataaaactcacaggtaatagtaagcacacagaaaaacacagaatagtatgacactgtaattatagtgtgtaaactacacytaagtagaaagacgaaatgacaaaaaaataaaaaataacaacaacttttaaaaacatagaccgtacaataagacataaagaaatataacaaaaagttaaaaagtgggaggacaaagttaaagtgcaaagtttttcttttctcttggcatgtttgtttatacaatgactgttaagttgtcatcagtttaaaataattggttacaagatagtatttacaagcctcataataataactttaaattaaaaaacatac

SEQ ID NO: 308246 - DNA, 592 bp, Homo sapiens
tgaaggtataaaactcacaggtaatagtaagcacacagaaaaacacagaatagtatgacactgtaattatagtgtgtaaactacacctaagtagaaagacraaatgacaaaaaaataaaaaataacaacaacttttaaaaacatagaccgtacaataagacataaagaaatataacaaaaagttaaaaagtgggaggacaaagttaaagtgcaaagtttttcttttctcttggcatgtttgtttatacaatgactgttaagttgtcatcagtttaaaataattggttacaagatagtatttacaagcctcataataataactttaaattaaaaaacatacaacagatgcacacacacacaaaaatgaaaagcaagaaatgaaagtataccaccagagaaaatcactttcatttaaaagaagaaggaaggaaagaaggaagggaagggaagggaaggggaaaatgaaggaaaggaaggaaaggaatgaaggaagaaaagaagaaaaccacaaaacaaccacaaaataaataaaaaaatggcaggagtaagtccttgcttttcagtaataacattgtatgtaaatggtctacag

SEQ ID NO: 308247 - DNA, 592 bp, Homo sapiens
tgaaggtataaaactcacaggtaatagtaagcacacagaaaaacacagaatagtatgacactgtaattatagtgtgtaaactacacctaagtagaaagacgaaatgacaaaaaaataaaaaataacaacaacttttaaaaacatagaccgtacaataagacataaagaaatataacaaaaagttaaaaagtgggaggacaaagttaaagtgcaaagtttttcttttctcttggcatgtttgtttatacaaygactgttaagttgtcatcagtttaaaataattggttacaagatagtatttacaagcctcataataataactttaaattaaaaaacatacaacagatgcacacacacacaaaaatgaaaagcaagaaatgaaagtataccaccagagaaaatcactttcatttaaaagaagaaggaaggaaagaaggaagggaagggaagggaaggggaaaatgaaggaaaggaaggaaaggaatgaaggaagaaaagaagaaaaccacaaaacaaccacaaaataaataaaaaaatggcaggagtaagtccttgcttttcagtaataacattgtatgtaaatggtctacag

SEQ ID NO: 308248 - DNA, 557 bp, Homo sapiens
tggcatgacatacttaaagtgctaaagggaaaaaaactgttaccctagaatagcatatctaccaaaaatattatttaagcatgaaggaaaaacaaagcccttcccagaaaaacaaaagctgagggattttatcaacaccaaacctgtcctacaagaaatgctaaaggacattcttcaatttaaaagaaaaggatgttaatgagcagaagaaatcatctgaaggtataaaactcacaggtaatagtaagcacacagaaaaacacagaatagtatgacactgtaattatagtgtgtaaactacacctaagtagaaagacgaaatgacaaaaaaataaaaaataacaacaacttttaaaaacatagaccgtacaataagacataaagaaatataacaaaaagttaaaaagtgggaggacaaagttaaagtgcaaagtttttcttttctcttggcatgtttgtttatacaatgactgttaagttgtcatcagtttaaaataatkggttacaagatagtatttacaagcctcataataataactttaaattaaaaaacatac

SEQ ID NO: 308249 - DNA, 522 bp, Homo sapiens
acaggccaatatctctgatgaatattgatgcaaaatcctcaacaaaacactagaaaactaatcaacaatacatttaaaaagataattcaatacaatggactctggggactcaggkgaaagagttggtggggggtgagggataaaagacaatacatcgggtacagcgtacactgtttgagtgatgggtgcaccaaaatctcagaaatcatcactaaagaacttattcatgtatccaaacaccatctgttcccccaaaaaaacctattgaaattaaaaaaaaaaatcattcatcatgaccaagtggggtttatcccaaggattcatggatggttcaacatatgcaaatcaatcaatgtgatacatcctatcaacagaatgaaggacaaaaatcagatggtcatttcaattgatgctgaaaaagcatttgatagagtccaacatcccttcatgattaaaaaaaaaacctgaaaaaactaggtataaaaggaacatacctcaatataatgaaagccatatttgact

SEQ ID NO: 308250 - DNA, 635 bp, Homo sapiens
ttcagaactggcttctaccagcatttgagtttgactcctaattgagatgaagcattgtgaataaatgcacattttggattactgcaggccagaggtcaggggcctggctgtcacctgttggcttctataaacctctagccaagggaaccagaagacccaggatggagacagacacggtcagctgccacctggcagcatttacctggccccgtgggccactcagccctcagccgaggaggaggccttcccctctggagatgggagctcacacagcttgaaagctccttagttaacaactctgaaggcttaaacaaaaccaccagcaaaaccatctggcatcgcttcttcagagttctgatgagatgaccataaatgggtgtgatttttaaatcccacaccaacaatggatgaaaggataaagaaaatgtggcatatatacacaatggaatacgattctgccataaaaaaaaaaagtgacatcctgtcattcgctacaacacggatggaactggaggtcattacgttaagtgagataagccagacacacaaagacaagcatcacatgttttcactcatgtgcgaattagaaagaggtgattgtgtaagagtaaraagtaaaacagaggattccagag

SEQ ID NO: 308251 - DNA, 609 bp, Homo sapiens
aataaacagtagagaagaatcaataaaaccaaagaccttgataaagatcagtaaygtaggataaacctccaggactcatctagaagaaagaggacacatgttaccaatatcaggaatgagagaaggtacatcactacagatccaacaggatctattaagaagataacaaggagatataaccaacttgatgccaataaatttgacaacttagaagaaatagacaaatcaaacgtcatccaagaagtagataacctgaagaaccctgtatcaaccgaagaccttgaaactgtagtgaaaatccttctcacaaaacttcaggccccaatgcttttactggcaaatctgccaaacatttaatcatttaaaggagaaataaccaattctaaaacatctctttcagaaaaaaaaagataaagaagaaacacttcccaatttatttctgaggccagcattaccatgacactaaaagcagaagcatcacaagaaaactacagaccaatagctctcatgaatcagacttaaaagtcctcaacaaagtatcagcaacacaaattcagcaatatataaaaaggataatacaacatgaccaaacggggtttatcctgggga

SEQ ID NO: 308252 - DNA, 609 bp, Homo sapiens
aataaacagtagagaagaatcaataaaaccaaagaccttgataaagatcagtaatgtaggataaacctccaggactcatctagaagaaagaggacacatgttaccaayatcaggaatgagagaaggtacatcactacagatccaacaggatctattaagaagataacaaggagatataaccaacttgatgccaataaatttgacaacttagaagaaatagacaaatcaaacgtcatccaagaagtagataacctgaagaaccctgtatcaaccgaagaccttgaaactgtagtgaaaatccttctcacaaaacttcaggccccaatgcttttactggcaaatctgccaaacatttaatcatttaaaggagaaataaccaattctaaaacatctctttcagaaaaaaaaagataaagaagaaacacttcccaatttatttctgaggccagcattaccatgacactaaaagcagaagcatcacaagaaaactacagaccaatagctctcatgaatcagacttaaaagtcctcaacaaagtatcagcaacacaaattcagcaatatataaaaaggataatacaacatgaccaaacggggtttatcctgggga

SEQ ID NO: 308253 - DNA, 609 bp, Homo sapiens
aataaacagtagagaagaatcaataaaaccaaagaccttgataaagatcagtaatgtaggataaacctccaggactcatctagaagaaagaggacacatgttaccaatatcaggaatgagagaaggtacatcactacagatccaacaggatctattaagaagataacaaggagatataaccaacttgatgccaataaatttgacaacttagaagaaatagacaaatcaaacgtcatccaagaagtagataacctgaagaaccctgtatcaaccgaagaccttgaaactgtagtgaaaatccttctcacaaaacttcaggccccaatgcttttactggcaaatctgccaaacatttaatcatttaaaggagaaataaccaattctaaaacatctctttcagaaaaaaaaagataaagaagaaacacttcccaatttatttctraggccagcattaccatgacactaaaagcagaagcatcacaagaaaactacagaccaatagctctcatgaatcagacttaaaagtcctcaacaaagtatcagcaacacaaattcagcaatatataaaaaggataatacaacatgaccaaacggggtttatcctgggga

SEQ ID NO: 308254 - DNA, 603 bp, Homo sapiens
tattgtaatcaagaagtaatactgtcataaagccagacagacatacagatcaacagaacaaaatagcctagaaatcagcccactctcagatatagtcatttagttttagacaaaagcacaaaagcaatccagtggaaaatgtaaagtctttacaactaacagcactagaacaattggatatgtgtacagaaagaaataaatcctgatccttatttcacactatatataaattttaattttagatggactgcagatytcaaagtgaagctaaaactgtaaaactaaattatgtatgaccttgggttaggcaaagtatttcctatgacaaaaaacaagcactaatcattaagaaaactgtgattaattagactttatcaaaattaaaacttttgctccttgaaagactattaagaaaatgaaggcaagccatgatacagaaaaaaaaattgtaaaacatatctgatacagaactggtatccagaatatttaataatttctacatctcagtaagaaaacagatgactcaattaaaacagaaggcaaaaatttaaacactttaccaaataagatgtaagaacagcaaataagcacaaataaagataa

SEQ ID NO: 308255 - DNA, 585 bp, Homo sapiens
ccaggctgaagaggtctcagatggaaacaaggaagttattgggaactggagtgaagattgcccacgtatgccttagcagagaacttagctgctttgtgtttgtgccctaggaatctgtggaagtttgaacttaagagtgatgacttaaggtatgtaggttgaagaaacttctaaacagcaaagcattcaagagatggtgtggctgcatctaactaaagctgaacttaaaattaaaagggaagcagagtgttaaaagyttgcaaaatttgcagcctgggcccatggtagggaaggaatccaagcagcctgtggagcaactacttgctagagagattagcaggactgaaagggagccaggtgttcatagccaagaaaatggggaaaaaggccttgaaggcacttgagaaatcttcaagtcagcccctctcatcgcagccccagaggcctcagaggaaagaatcattttgggatccaggcccagggctcttgctgccttatgcagccttgggatactgctcccctcatcctggggtggaaggggtcagttctggggattagtgcccttcctcataagagagaccccaa

SEQ ID NO: 308256 - DNA, 599 bp, Homo sapiens
aggaaatttcgccaagcctgagccctccatttcccctggttattaaattatattgacaagttaccatggattcacattcaatggctttacaatttttaaattagcatcagaccattttgatgtctggagggtcaagagttgatgtttagacaagcaggtgagcagccagaaagttccccagccaagagacatcaggttcgtcggtgggcttcccagcagactggggtgccttggtccccggcattttctggccggctggccaacctgccaggtgaggccctgcagagcaccgagaagggagcagacactcagctccaggggcaccacaaagctgaggctggcagggtcacaggaagccacagcaaaaggtaaggcagcagcrgccgagggctacgaccagctccgtgataatgagggcactctgaggcgcttggctgcctcttccaagacatagcccagcttctggtcaaggaagcaccgtcagtttgctgttttctgatacaagagaaggaatcagagtctcggggacaagccctccaacccctgaaggttgccacggaatctgagatgagccaccctggctgggctcacacacctcc

SEQ ID NO: 308257 - DNA, 599 bp, Homo sapiens
aggaaatttcgccaagcctgagccctccatttcccctggttattaaattatattgacaagttaccatggattcacattcaatggctttacaatttttaaattagcatcagaccattttgatgtctggagggtcaagagttgatgtttagacaagcaggtgagcagccagaaagttccccagccaagagacatcaggttcgtcggtgggcttcccagcagactggggtgccttggtccccggcattttctggccggctggccaacctgccaggtgaggccctgcagagcaccgagaagggagcagacactcagctccaggggcaccacaaagctgaggctggcagggtcacaggaagccacagcaaaaggtaaggcagcagcggccgagggctacgaccagctccgtgayaatgagggcactctgaggcgcttggctgcctcttccaagacatagcccagcttctggtcaaggaagcaccgtcagtttgctgttttctgatacaagagaaggaatcagagtctcggggacaagccctccaacccctgaaggttgccacggaatctgagatgagccaccctggctgggctcacacacctcc

SEQ ID NO: 308258 - DNA, 569 bp, Homo sapiens
ttctcccaccgtctcatttaagttttgttctccctcaatccaagttacagtgtcatttcattccaaaacaatttccctgtaaatcatagaccaatatttttaaaactatgttcctcaaactatctggttcagaatgaaatgccagtttctgagctcccaccctagacccacagagtaagactctgttgttataagagccaaggacctgcaktttaacaagctccccaggtgatgccaatgctcactaaagtttgagaacctctcccacagcctcattgtgtatccttgtagcagatactgtcagtcaatatcctgacgatctcgtatagcagtggtttcttctcagtggttctcaaacagtagcgtgtatcagaatgctgtgcagagctaatagaaactattgaggccaggcttcatgaataaggtctttgtattttaccaagtttccccacaggcttctggttcacacaaaaatttgaggctagctgtctcccattatttgttattattttctgactatggcctgggtccttcattgaattagaagtccatgcaggaccaaagacaca

SEQ ID NO: 308259 - DNA, 573 bp, Homo sapiens
gaaatggactagttagtactaggaggccacatgctccacgggcttttgcttcaacttgtcttgaacccttggagacatcattcacccctctagtccttgttttccttgcttgtatatggggtggatgttgtttaaagttccctccagaattgacttatctragaaattacagataccgttttcatttgttcacatgtaagttataagagcatgcatgaaggtactggtgagtgtggtggctcatgcctgtaatcctagcactttgggaggccaaggtgggaggattgcttgagctcaggattttgagaccagcctgggcaacagcaagacctaatcactataaaaaattcaaaaattagctgggcgtggtagtgcacgcctgcagtcccagctacctggggggctgaggtgggaggatagcttaggaggtcaagtctgcagtgagccatgatggtgctactatacttgagcctgggcaacaaagcaagaccctgtctcaaaaaataaaaagtttaagcttctcagtcttcctgttgttgacctcagtggtccttctaaggatacaagctgctc

SEQ ID NO: 308260 - DNA, 573 bp, Homo sapiens
gaaatggactagttagtactaggaggccacatgctccacgggcttttgcttcaacttgtcttgaacccttggagacatcattcacccctctagtccttgttttccttgcttgtatatggggtggatgttgtttaaagttccctccagaattgacttatctgagaaattacagataccgttttcatttgttcacatgtaagttataagagcatgcatgaaggtactggtgagtgtggtggctcatgcctgtaatcctagcactttgggaggccaaggtgggaggattgcttgagctcaggattttgagaccagcctgggcaacagcaagacctaatcactataaaaaattcaaaaattagctgggcgtggtagtgcacgcctgcagtcccagctacctggggggctgaggtgggaggatagcttaggaggtcaagtctgcagtgagccatgatggtgctactatacttgagcctgggcaacaaagcaagaccctgtctcaaaaaataaaaagtttaagcttctcastcttcctgttgttgacctcagtggtccttctaaggatacaagctgctc

SEQ ID NO: 308261 - DNA, 567 bp, Homo sapiens
aaactttacaaatagcttgagaataacagaagacaattacaatgccaagatggaaaattcagactatatatcagacattcctactcctggaaamacaaaccaagctccttcacaaaggatcagtgattggttgcttcctcctgagccccagtctgctaccctggtcaggggctgtccccactccctcaactctgtactcactagacttaggccaagtttccctcaacctgtcttaatgtcccagacctgtcttaatgtcttaattattgtgcatagaagtctagctcctcattctccaaaatgtcttagttgtgaaatgggatttggccttttcctttggataatgaaatcccccttgaaatgctcttcacagacaaaagcgtcaacttcctccaaaagcacattcttgagcaacagttacaaattgcaggtggctttcagatagtaattatatatatatattttaattattatatgtatatatatatttttcttcttcttagacatggctacacacattgctatgatctgaatatgtcaccccaaatttatgtgttggaaacttaa

SEQ ID NO: 308262 - DNA, 568 bp, Homo sapiens
cgttacctcatcaagagccctttaaatctgcatctagaggtgagagacagaagaagtaagagacttgaagcacaagaagaatttactgtaccatgtcattgcaggcttaaagatggaaggagccacatggcaaggaagtgggtgaccttagagactgacagcagcccccatctgacagcaagcaaagaaatggagacctcagttccacaagctcaagcaactaatttctgtcacctaagagaatgaacttggaagtrgattttccaccagggtctccatttgagaactcagtacggacaatatcttgatttcagtcttcttgagcagaatccagtcatgctgtgaaggacttctgacctacagagctgggctaatgaatgggtattattttaagcctctaaacttgttatttgttacccagcaatagaaaactaatacagggaagaaataagaaagatgtttgtaatttgattctccatagtcaggcacatggaaaagtaaactctttcttcctacttctaaaagccaaattcatacaccctcaggctatgtgtgatttgcctaagca

SEQ ID NO: 308263 - DNA, 622 bp, Homo sapiens
ggatagccacataggtgtagaatttctgaatccaaaagtatatacattgtaagtatcaattgccttcagacactacccttttaccaccacataataaaacctaaataagcctggtataatgtcttgagcctgtagtcccagctacttaggaggctgaagtgggaggatcccttgagctgaggagttcaagcctagtctgggcaacatagcaagaccctgtctcaaaaaaaaaaaaaaaaagcaaaaaacagacctctcttttagctttatttggacctttgtaaaaaacaaactaactaaataaacttttttaagccaacttgatgggtggaaattatatcttatgcgtttaatctgtatttccctgatcattactcaattgagattttttttgagaagtatatgggtcatctgtgttatttctgtgaattgcctactcatatcttttgcccacttttccattcgtctgtttatatttatcttgttggtttatgggcattttaaatagtcttggtggtaataatatctatgaaatmatgctgagaaaagtagaaagaaaaccaacaatcacataataattatagaattggggctataaatatgaaattaatattataagcaa

SEQ ID NO: 308264 - DNA, 293 bp, Homo sapiens
agagaaaatgtctaggtttatatatgtaattctatgtatgaatatgtgtgcgtacacatatatttacacacacacacacagtgccatcagcagtttatctgaaattgattttcattatgaaaggcaaaatgaaaattggaagcttcatcaaaataagacgacatgagtattgcatrttgccaaaaccattaaaatgaatgagatagttatgctcctagcacggggccaccagcttagggtggagtgttatcacagccctgctggttaatcagcagttctccaaggacagctgc

SEQ ID NO: 308265 - DNA, 538 bp, Homo sapiens
catctaaaagcaacacaaatatccatcagcaggtgaatagataagccaattgtggtacatgcatgcaatgaaatactacttggcaataaaaatgaatgagctgttgatacaatgaaatcacacgaatgaatctcaaaataattatgctgagtgaaggaagtcagacaaaaaaagaatacatattgtctgactccatttacataaaattatagaaagtgtgaactgatctatagtgatggaaagcatatcagtggttgagtacacaaagaaacaagtycattaacttgatcgtggtgatggatttataggtatatgcatatgtaaaaacttatcaaattatacaatgttaaagatgtgttatttattgtatttcaattatatcacaatggattttttaaaagtagagactgtatgtaggaatgtggacaaagtaaacaagattggcaaggatatccttgctctataggagctgtttggttaagaaggcactacatgaccaactcaataatagaaggtgagagaaaatcatgtatatgct

SEQ ID NO: 308266 - DNA, 613 bp, Homo sapiens
gcaacacatgaattttgcatgtgtggcrggggaacagggagacacaattcagctcataacaatagtcatttcttcatcatctcccgtcaccctcagcgccactcttggaagtgagatagacagtcctccccatctacaacaaacagcagaggtgggattcaaaccaagcctggtgactataaaccctgtctctattacaatactacattttaattgatattattagttgattaaacatgtccttgtttaggtagaaacatgcaaaagtaaactatggctcagcccactaatcacaaatcccaaaggaacttttttaaaactttgggggaaactgagtatatgcatttggtttttccatcttgtacatgcatgcaggagagtgaatatgatgcttggaaatgcacactcttttaagtcactagggtcacatttagtttatcacttcctgagaaggtaatgtaactgagttcctaatttgctcttaaggaggcccttaagcacgggaaaagaggatcaaagattttcccctcagtcagctttggagaggagtcagtgaggtactttgatgaagagcaataggacaactgttgaaagggatagtgtgtgtgccatg

SEQ ID NO: 308267 - DNA, 395 bp, Homo sapiens
ctattcatccaccttcccataataaagcttccatgccttctagatttgaatcctgaccaaaatattaacctgagaaacccaggagacacacagcctaaaaattgactatcaggatgctagtgactttacctgtgtggacagtacatttgagaaattaaaataagtttgtttcttgggtgtcctatacttaatttctttttgaaagaccttatttaaaatccactatctttacttattgagagttagaggaaccacatgaatgaattactttactgcaccactgcagctgaaggtatggaggtggggttggtgmggtgaacaaagtggcccaaccaaaacactcttggttttactttaataatgaactggattaacccggaaataaaatgccatgg

SEQ ID NO: 308268 - DNA, 491 bp, Homo sapiens
aaacagcaaactgaaaatacatgtatgattatgtgacaaagagagacacagcaaaaaatcttgaatccctaaagcattgtcacagtagtatttcccaagctttggcatagtgcaatgaccaaaatcagcttccatgcatgaggatgatggcagctcaactcaacggccatacttaccaccttcctccaacccagggagacctgcctttttgtccttcacctgagcagtgctttcttcccaaagcttactcttatccttttccttttcttctgcagaaacaygtttcccggacttctcagataaaccctctgcaatctcttgggttcctttctccgttccttctttaagaacattctcaaagctttcgtctattggcatcggcttggtctccacatctgcttttgttatttcttggtcttcaatttcaatttctaaggattcctcaattggaaggtgagactttcttggcttatcattttcactcagttcct

SEQ ID NO: 308269 - DNA, 486 bp, Homo sapiens
acctcatgctataatttagtttcactctcatttctttctctcatttacatacacagacacgggggtaagactttgcctataaaaaagctaaaaaagcttcagggttatgaaataggattttcaaaactaattttatttattctcttagaaataaagcaaatgyttatattaaaaaaaactttgagagcacgtatgtaaatttgctttgtcattaggagggaaaaattatcttggaagcatgttgataaacagctatgcctcctacccaattccatttgttcatgtattcccttctggtagtgatgctataagaacctgcttttgcttgttttggcaaagaaaagatctgcactcattgcgtgaggtcttggccgaagccagcaagtttggtgccattgttccatgtcctaagcaaggtctttgacttttctctttccacagtcaggagctctccaggcccttcttcccttttcatgtcattgacaa

SEQ ID NO: 308270 - DNA, 558 bp, Homo sapiens
gtcctcactttccttccaacttacatagattcatttgtccactaaatacatatcgagaacttcctatgtgccaggcaatgttctacaagaaaacagaaaccttggtccttgcttctacctataatacacactcaaaacagagattgactaattatccacctcctttcgcatgagggaaatagatccactgtacatgttcwtaaaggtattggttcactctaacagtgactgctgataactctctcagaaactattgccatactcttattgcaatcagtagccaaattgtctgttttaaaccaatgaccagacctgaccttagttttcaatcattttctcacctgctagcaaggagcataattttaccacagtttaaattcaccatttccttaattagtgtcctgattttaactactttgtttttggtttattagctggaagcacctacagaaattgcagtttaagttcacaaactaaaatgagtaaattaagttaaaaatttaaatgatctcagtgacataaccgtggatcccaacccagtggatccaatatgctttt

SEQ ID NO: 308271 - DNA, 603 bp, Homo sapiens
ttaatgaagtaaaaaaaaattgaatgaaagcatgacagcatgtgataaactatgcctaataaagagcccctcaatagccataatatccaatagagaaatgagtaaagcaagcaaaatattcacagaaaaggaaatataaatggacaatgaatataaggaaagatgctcaacccaccaggagttagggtaataaaaactaaaacaagaagctagtatttttttgtccataagattaacataaataagattaataaaatccaggtgagtgggtgtatcacaaaacaggctttctcttatatccttgttaggaatgtgaattatatgaccctttcagaaagcaatctgccaggatttactaaaatcaaacataagcaaatacttaaggaaatctagcctaaagatacagaaatatcagtacacaaaacaataaattggcataccataaactttcatattgctattarcaataataagttattcatacacgtattgactttttaggatacttaatatgtgcacagttaaactgaaaaaaataatttcaagagtaacatgaattatatgcttacatatttgtaaaaaattacataaatatttgtatgt

SEQ ID NO: 308272 - DNA, 424 bp, Homo sapiens
ggttcctgctcacatttcctccccyactccctctgcttcctaacctactctggtgcttccttgtgtagctctgcatggtgtggtgtaagagttattaacattattgaagatggggtcttgctgtgttgcctaggctggagtgcagtggtgcaatcatagtggtgcaatcactacagccttaaactcctgggcccaagccaacctcctgcctcagcctccttgatagctgggattacaggtgttagagattgggtcttgttatgttggccagtctggtatcaaactcctgacctcaagtgatcctcttgcctcagcctttcaagtcactaggattacagatgtgagccactgcacctgatcttgtgatggttaattttacctattaatttagccggactccaatgcccagattggtaaacattat

SEQ ID NO: 308273 - DNA, 662 bp, Homo sapiens
gggtagatttatgggtgaagatgaaaaagaatcacaaaggagtaggacaagaggtgaaaggagaccccgaggaagcatgaaaacagaatgccatggaaggcaagagaggagaggtttaaggaagaggcaattaatagcataaaattctacaaagaaatgtcatggtaagttaaaaaaaaactaagatggtagaaataagtctaaatatatcactaaacaaagtaaatatacttggactaaactcatttattaatagaacagagattctcagattgaatcaaacacaatccacccctatgttacataaacatatttaaagcctaaagtttaaaactaaagacaccaaaagactaaaagtgaaaggaatatatatacacatatgcatatacacacatacatatgtgtatatatacggttgacccttgaacaacatgggtccacacatatgcagatttttttcaataagtatgttggaaaattctttggagatttacaacaatttgaaaaacttgaagacaaactgtatagcctagaaatattttgaaaaataagaaaaatgtatgttatgaatgcataaaatatatgtagatgctagtctgttttatcatttactaccataaaatacacacaaatctrttataaaaagttaagatttatgaaaa

SEQ ID NO: 308274 - DNA, 338 bp, Homo sapiens
aggaaaaggccctgtaaagattcaattagtaaatctatccagtggctcagaacagatttgaagagtcacattaaaggaaaaaaaaattgctccccagccagcagagcttaaataatacctgattgatggtgttcacatgtctaatgaaacaaagtattgatcaaagtagcattaataattatggamcttaaaaaataatataatcaccttggcaagcatggaaagcacccatccaagtactatctaggggagaggaaatcctactcattggactttgagtatttctagtcctaatggcaaagttactgctggaggatacagaggattttagccaaaga

SEQ ID NO: 308275 - DNA, 527 bp, Homo sapiens
ataactaatttatgctcttcatgcaatggctttgctcaatttaatgttacgttgaataatgttcctattttaggggtctaaaaggatattattggaatggactcatttctgtctaaatgtcttcaatataaactctactctgaatcttttaagccttaagactggtgctgaagtaaaagcagacagtataattcaaacaaaagaggaaaggaaattcattacaatttattcaatggcatccttgaaatactaggaaaacaaaaataaaaaaattgtaactggcaactttggaaaatgtatataaaattggatatgttttctatgctagatattttccatttgtccctctagatctaccattcaccttttctggcctgacctagactctgggggtcactcctttcgggactacacccactaacctcaggactgmagctggagtccactagtgacaggcactagcaagagatgaaattagggtctttcttctccttgactcaccctgcagggtcataatgggccagctg

SEQ ID NO: 308276 - DNA, 616 bp, Homo sapiens
atttgaggtcatatggtttagggtcttaaatgtcacctgagagtctgagcttttctgtagggaatacaggccagggaaagtatttgggtgtataaataacataagtaatctggacttccagaaaactaatctagcattaacaagcaaaattgatttggcagtagtgatattgactagaagtgagatattcagaagagacagagttgaacagatataagactatattttcattcagtaggactggcagcattacggagtcatgctcccagagagtatcccttctgagaataagaaataataaattaattagctgggatactgcatgacgaagtgtttaatattactcaccagtgctaacggactggaatgtccttcatcaaccagaacactatggccacgattactctttgggccaactggtgggtggggagacaggattggcatgttattttcaacagaccttcttgtgtgctctccctagaataagaaarcaatttagcaaatagatgcatagttagtaatctaggttagattatgcatgacatgtgcgaaatactatatgactaaagaaattctttctcatttcttccaagagttacttttgttaaggagttag

SEQ ID NO: 308277 - DNA, 547 bp, Homo sapiens
taaaatagacctgagtccatcaggcaagggtgaaaaattactgtcttttatggcaaattattctacagaagctttacaaatattcatcagtttgtgaaaygtatcttaggccacacatttgtaatactacagtacacagaaaattaagaacaacatgtgattacaaatgacttaagaaactgagtaaaactgccaacctaaatggaaatcttgaatttaactgaatatctcatctcttgattcaagtttatatttcctgagttcactgcaaagaagatatatttaaaaaatagaaaacaaacaaagaattttaaaatgcattttacaaaatctacactttatcatgctttcttttgctaaagaggatcctttccaccgtatatttccaagggtcacattcaaatgaaaatgtgtcattgtatcattcctaaaaagccctgttttccatcaggttggaaacactaccatccatttttaccttcttaagacacaaacaaaaatcccttggcctctatcacaagaatatataaaagcaaaatttcaagaa

SEQ ID NO: 308278 - DNA, 619 bp, Homo sapiens
cattgtgggccaaagctctaattagtgataacaaacattcatttgcctgttgtgtactctgttatgaaatccctsagtgacctggcagggtgacatgcagctatataagggtacagaaaaccaatcatcttctccttggagacatgactaatagccccttttaaatgaatagtgttatttggatagttattaatgccatgctttacaaacatacaccataaattagcaccacaggaaaaatgaactctatggaatacataaaaataagtgaaaacatgactgttaaggcagattatttaaaattatgaggggatgaaagaggatcttttaaccagagtaagaacatttgtaaacacttatagacactcctatttgttgtgcaatgtggttctgattaattccaaagaaggcttgtgttatgaataatcatttttgatacagcagtaacatttgatggaaaaattgcaaacaggggatatctttctgtgattcttgagctgtattatataaatcaattaacagcttaatggacagggtggggaaaggaacatactaatttagcttaggcaagcaacttgaacagtttccactactcactattttacattatgcagaattt

SEQ ID NO: 308279 - DNA, 619 bp, Homo sapiens
cattgtgggccaaagctctaattagtgataacaaacattcatttgcctgttgtgtactctgttatgaaatccctgagtgacctggcagggtgacatgcagctatataagggtacagaaaaccaatcatcttctccttggagacatgactaatagccccttttaaatgaatagtgttatttggatagttattaatgccatgctttacaaacatacaccataaattagcaccacaggaaaaatgaactctatggaatayataaaaataagtgaaaacatgactgttaaggcagattatttaaaattatgaggggatgaaagaggatcttttaaccagagtaagaacatttgtaaacacttatagacactcctatttgttgtgcaatgtggttctgattaattccaaagaaggcttgtgttatgaataatcatttttgatacagcagtaacatttgatggaaaaattgcaaacaggggatatctttctgtgattcttgagctgtattatataaatcaattaacagcttaatggacagggtggggaaaggaacatactaatttagcttaggcaagcaacttgaacagtttccactactcactattttacattatgcagaattt

SEQ ID NO: 308280 - DNA, 613 bp, Homo sapiens
gtggctcttgaaatatggaagcaaattgatcagggggagctcttcagtctgcatgcttgagtaactgcaagcaaaacaaaactaggaaaaaataaggtattcaaatcctactggtaatggctacaccctctctcctcaatttccctacccagtgtgctaatgaggaaaggaaaatgtgaaactccttggcttccctaattgctgtgctttgcccttataacttttttgttcttgcttatcatggtgagagtcttgtttctgtcaatcatttttggttctttctgcctagaaaataacaatgcatttttttttgagccttaagattattccagcyccttctcttccataattacaacagggaaaataatgattattatttttttggttttactttgcaataataagctgtagcaatcaggaaaaggtttttctggctcctgaaacttctcctgtgatagtttccaaattttcctcaggactgtagaactgcagagttgttcatttttatcacaattctggattgtgagtatgtgctatttttctatcttttcctccctcacagtggaggctgtattgtgtaatgaacaaatcatggacatgagtgcaagaaaaa

SEQ ID NO: 308281 - DNA, 500 bp, Homo sapiens
attaaaaaaatgtgaggatgtgacacttggagtgcattttccccctcaaaaggatctgttactggactggccaattatgttgtaaaactgatgataaaaagcactcatctgcattctagayatgtattgggagtcagaagcacaaaatttcccttttttaaatgtgcccaaatagtttgtttgcatctattcagaacatacatttttctttgtttcttaaaaggtttctaatgccttaggtaatgagtctctgcagatgaggtgaattggtgaggatcccaaagccgagggtctcccaggtctattgccccctacccaggctcacttcatctaatttattctttcccaaacccagctcttataataaatctgatctctttaactgacagatactttttcagtccttcaaatagtcaaaggaagttgcaatggataaatgggcccattgtgctaaaattccaattaaacatagtgcctctcaggcttaaaggttggtaaaa

SEQ ID NO: 308282 - DNA, 500 bp, Homo sapiens
attaaaaaaatgtgaggatgtgacacttggagtgcattttccccctcaaaaggatctgttactggactggccaattatgttgtaaaactgatgataaaaagcactcatctgcattctagatatgtattgggagtcagaagcacaaaatttcccttttttaaatgtgcccaaatagtttgtytgcatctattcagaacatacatttttctttgtttcttaaaaggtttctaatgccttaggtaatgagtctctgcagatgaggtgaattggtgaggatcccaaagccgagggtctcccaggtctattgccccctacccaggctcacttcatctaatttattctttcccaaacccagctcttataataaatctgatctctttaactgacagatactttttcagtccttcaaatagtcaaaggaagttgcaatggataaatgggcccattgtgctaaaattccaattaaacatagtgcctctcaggcttaaaggttggtaaaa

SEQ ID NO: 308283 - DNA, 456 bp, Homo sapiens
gtatggtgatctgataataacatttttataaacacagaatttttccactcaacatagatcccagagaaatggcaaagtgatacaaagcagcttttatcttaacagtaactagttggggaagagttcagaattatttggtttaagtcatatccaagtgtgagtcctggctcttaagcataggttacaatttctagcggtataaccttgggtatgccatcctttctgagcctcagtttatttacctgyaaaataggaaaagaacataaataatttccagtttgtgcttgtaatccttactaaaaagaactaaaacaagaacattattatcttagtaataatataaataaaacacatcccaagaagtattattattatattatttttatgataataagatatagtgataatattcattgcatgattcttttctgtttttatatatatcgctttacatat

SEQ ID NO: 308284 - DNA, 601 bp, Homo sapiens
tctgtgacactgtccctgattcgtgaaaggtcatctctgtgggccctgtgttatcttaggtgtacccaacccaacctgacaaccttgactataaaaaataatctctctatatttaggtgtgtagatagagatatttcttcccagaagtctgtgagattcttgagtgtaaggatcagacctccccctatcagtcccagtgcctgtcacagcacctgaaacataccaggtattcacaaaagatagatttgtaggaataaaatctatccaagcgatccattgtttccatttgcttttgctgttgttgacacaatgcactttatttcttaccagcaggtgtcgcaatagctccatgttttcagcrtgatttttggcttttctgctttgctgtaacatattaattgggctgttatgggaaggagatgataatttaggcactgtttacagaataaagctgatttaaccttcagtttctctgtgaacatttttttttccaaacatagtgttccaactgaaattgccaaagtaaaaggaagacttcaaatttaaaaaacgattagagtgaaataaaaattcaagctagggcatcaagttaaaaacacag

SEQ ID NO: 308285 - DNA, 561 bp, Homo sapiens
gttattaatttcattatatgcacacaagtgtaaattgtttagtgatttgtaatttccattccagaaataatcagacttggagaggcaaaacatatcatcttatatgtatatacttttgggtgcattcgagtcaatagtgttattctagtgaacatcacatgggctgggtaaaaaaaaaagaagcaaaaaaaaagtgaaagagagaaaggaaactctaagattttgttcagtttaaggtacagaaagtgaatcttacagcagtgaatgygcttaattccatgctaactttctctccttttattcacctttgattttagataaattatgcttcagatatttgctgttaaaagaacccaaatagtgccagaaattaaactgttcatcctaaaatatttgcagaggtttgaatcattatcacacaaatactgttaggacattagcaatctatgcaatagattataatatccatagattttcttgtgcagttctgcaaaacttcattatttccatgactgttgaactggaactatttccagttactaagaaggcaggtcgaatatt

SEQ ID NO: 308286 - DNA, 567 bp, Homo sapiens
aagtggtgcctttgggaggtaattaggactagataaagttattaaagtggagtccccagtgatgactctggtggctttataagaagaggagagacctgagctgacatgttcttgccctctcatcgtgtgatgctctccgcaatgttatcatgcagcaagaaagcccccaccagatgtggcctcttaacatcagacttcacagmctccagaactgtaagaaataaatttctttgtaaatcaccttatctgtggtattctgttatagcaacagaaaacaaataagactgtcactgatagtttagatctgtgattcctaagtccagctgctgttcaccctgaatgaagatccaatcaacactgtaggtgtaatccttatctccccgctgcccttctacttctctcaatctcctgaccctgactctcactccacaggtctttctataaaactgaaatctttttataaatttatgatacttctggggacatctggggactttttttttcctatgagaaagtgaaaaggactccagtgactatttggtcttgaaacagtttaatttagttttt

SEQ ID NO: 308287 - DNA, 532 bp, Homo sapiens
gtttaagctaagtgttacaggatgaatagaagttttccaagtagtcaagggtgaaagtatgtttccactagagggatagcgcaagagtttggttttgctagagtttaaggtagtggagaaagtggtcacacaggctygggaaagacactggggccaggtgatgagggcccctgaatgtcacactaaggagtttgaactctgtcatactcagtgggtctttaccacgtgaggaaaagcagaatgacattaatgaggtgatgctcttcccacctctaaatgtggctgacccagaatagagaccctagaaagctcagtcaccactgatgcgtccaacccttcacttatacatgaggaacctgaggccagagatcaagtcattctgcaaaacacctgaccaagcatgaacaaaacaagaataggttatctaagtctagtgcttaaacttcctccacattcagatcctcctttaaatccaggctgcttcatctaagccctgcattccatgtactggattccaatgtaagtactgttt

SEQ ID NO: 308288 - DNA, 402 bp, Homo sapiens
ttcacacagaatttcagactttaagtcattaaatatttaaattaaactttggtagtttctattcaccctcctgttaaatattaacaaattaaggagtaaattgattgtgcttaaatgagttgaattgcacaggcttatttgttgtggcttccactgtaaagcatttcatgttatagattctgctcttttaaatatatatatgtatatgtcttttcttctcttactcctttarcaaacatgttcatgtaagtagatgggaatggaaaggggtttgttatggcaatgtcatttaattctttgaattccttcagagttataagccaaaaatcacatagtgatcagacacaaaaaatgtttttgatgatctttcaaatgacagctcaattaggtccttcttcaact

SEQ ID NO: 308289 - DNA, 577 bp, Homo sapiens
ttggttctttcactggccagaagctctaaaatcactctcttcttacacaagtcccagtaaagaaacacatccttcattgacaacatcattgctgcaaattgtcatatcaggaaatatactcggattaaagtaattcacctgagagcttgcctttttggattaatgtttttctggaggaaagagaaaaagatgtgacaagttgaatagtgcagcttgaaaaatcataccttactgagactctttcagtattaggattaaaaatttttttgacaattgtaaaatcattgctttcacagtgagccacaagaagcatactttaaaagtgaagaacattgaagagtgtagatatatagatttcatatagatctggattctttaataatttcttattctcttatgggtctactcgatcttgctgtctttatccccttgtctcttytgtatggttaacttttttggtcgatgagcaggttactgtgaagtgcagttttttctgacagtaaaagcatggtttccccatgctctggggactttcttagagatcctcattatcctcttctctttcttctgagctatc

SEQ ID NO: 308290 - DNA, 510 bp, Homo sapiens
catgccaaacacctaaagcatttcaatttcccaactgcagaatagaggttagggagctagaagctttgaaaaggttcatcttaataatttatatcaatttaatcttttttattaattaaaaaatcactggactagattttataaaataagttatcataccaagatgtcaaactctaacttaaaaaaaaaaaaacttataaagtaggcaagtatgatgctcctcatttgttttttacttgcttgccttcttggstagccatcttacccccaacatcatcaccaacaacctaccagaagcctgaagtcctgatcttactcacttcttctctactttataccccatccaagactgtcttaccatttcattaccgcttctaacacaaaacacggttatcgtttgttgcatttcctcagtctcttgccagctattatgataaagcattttgaggtaaagcaataatagctgatattacatttcccttaaaatgtgtttggaaggtaatttgtgat

SEQ ID NO: 308291 - DNA, 521 bp, Homo sapiens
tatttctcacagttggaggctgagaagtccaagatcaaggtgccagcaggttcagtgtctggtgagggccttctacttggttttatcccaagggagagaaattttatatctctcctttattattattattgttatactttaagttttagggtacatgtgcacaatgtgcaggtttgttacatatgtatacctgtgccatgttggtgtgctattaatcccatcataagggcctcaccctcttgacctaatstaaccctaattacttcccaaaggtcctacctcccaatatgattatattggggatgagaggatcaacacatgaattagaaggagacacaaacattcaatccatagtaccttccaaaaatattctgtgcttcagcagcataaatgtgtattcatccatctacctctatccatccatctatttatctatatttttatattaagcaagaaacacagaaagcataaaagagaagatacatttgaatatgtaaacaatctttaaaaattgtctggat

SEQ ID NO: 308292 - DNA, 604 bp, Homo sapiens
ccaaattaatctacagataaatgcaaattctaaaaatatcccagctggttttcttgcagaaattgacaagctgatcctaaaattcacatagawattcaaagaagccagaatagttcaaacaattttaaaacaggaaaacaaagttagaggacttacagttccaatttcaaaacttactacaaagctacagtaatcaagacagtgtggtactggcataaaaatgtacatatagatttatatagtagaattgaaagtctagaaataaatccataagttaatggtcaattgattttttacaagggtgccaagacaattcaaggaatcaatagtaataaaatagaaaaaatttttttcaacaaataggaagaattggatatccacatgcaaaattatgaaactggatgcctatctcaaatcttaaacacaaattaactcaaaatgtattgcagatctaaatgtaaaggctagaactataaaattcttagaagaaaacccaagagtaaatcttcttgatcttgaattaggtaatggtttcttagattcaactccgaaagcacaagaaacaaaagaaaaaataatttgaactacatcaaaattaacgaat

SEQ ID NO: 308293 - DNA, 604 bp, Homo sapiens
ccaaattaatctacagataaatgcaaattctaaaaatatcccagctggttttcttgcagaaattgacaagctgatcctaaaattcacatagaaattcaaagaagccagaatagttcaaacaattttaaaacaggaaaacaaagttagaggacttacagttccaatttcaaaacttactacaaagctacagtaatcaagacagtgtggtactggcataaaaatgtacatatagatttatatagtagaattgaaagtctagaaataaatccataagttaatggtcaattgattttttacaagggtgccaagacaattcaaggaatcaatagtaataaaatagaaaaaatttttttcaacaaataggaagaattggatatccacatgcaaaattatgaaactggatgcctatctcaratcttaaacacaaattaactcaaaatgtattgcagatctaaatgtaaaggctagaactataaaattcttagaagaaaacccaagagtaaatcttcttgatcttgaattaggtaatggtttcttagattcaactccgaaagcacaagaaacaaaagaaaaaataatttgaactacatcaaaattaacgaat

SEQ ID NO: 308294 - DNA, 558 bp, Homo sapiens
cagctggttttcttgcagaaattgacaagctgatcctaaaattcacatagaaattcaaagaagccagaatagttcaaacaattttaaaacaggaaaacaaagttagaggacttacagttccaatttcaaaacttactacaaagctacagtaatcaagacagtgtggtactggcataaaaatgtacatatagatttatatagtagaattgaaagtctagaaataaatccataagttaatggtcaattgattttttacaagggtgccaagacaattcaaggaatcaatagtaataaaatagaaaaaatttttttcaacaaataggaagaattggatatccacatgcaaaattatgaaactggatgcctatctcaaatcttaaacacaaattaactcaaaatgtattgcagatctaaatgtaaaggctagaactataaaattcttrgaagaaaacccaagagtaaatcttcttgatcttgaattaggtaatggtttcttagattcaactccgaaagcacaagaaacaaaagaaaaaataatttgaactacatcaaaattaa

SEQ ID NO: 308295 - DNA, 561 bp, Homo sapiens
aaatcttcttgatcttgaattaggtaatggtttcttagattcaactccgaaagcacaagaaacaaaagaaaaaataatttgaactacatcaaaattaacgaatgtttttgctacgaatattatgaagaaagtaaaagagcaatccatgaaataggagatgatatttacaaacaatatatctgataagggactttatccaaaatatataaaaaacccttacaacaaaattttttaaaatgacaaataactcaattaacaattgactgaagaatctgaatagacatttctccaaagaagatatacgaattgccaataaacaaataaaaaggtgccaaacatcactaggaaaatacaaatcaaaatcctgatgacactagtttacacctactaggttggctatgataaaaaaaccaggtaatgacaagtgttgcagaggatgtgtaaaaaycagaatgctcatttttttttggtgggaatttaaaatgttgtagctgattggaaaacagtctggaagttcctgaaaaccttaaatataaagctactacatggcccagcacctct

SEQ ID NO: 308296 - DNA, 561 bp, Homo sapiens
aaatcttcttgatcttgaattaggtaatggtttcttagattcaactccgaaagcacaagaaacaaaagaaaaaataatttgaactacatcaaaattaacgaatgtttttgctacgaatattatgaagaaagtaaaagagcaatccatgaaataggagatgatatttacaaacaatatatctgataagggactttatccaaaatatataaaaaacccttacaacaaaattttttaaaatgacaaataactcaattaacaattgactgaagaatctgaatagacatttctccaaagaagatatacgaattgccaataaacaaataaaaaggtgccaaacatcactaggaaaatacaaatcaaaatcctgatgacactagtttacacctactaggttggctatgataaaaaaaccaggtaatgacaagtgttgcagaggatgtgtaaaaaccagaatgctcatttttttttggtgggaatttaaaatgttgtagctgattggaaaacagtctggaagttcctsaaaaccttaaatataaagctactacatggcccagcacctct

SEQ ID NO: 308297 - DNA, 457 bp, Homo sapiens
gttctaaaattagactgtggtggtggttacccaactstatgcatatgtgaaaaaaattcacttatacattctaagtaggtgatatgaatggaatgtgaattatatgtcaataagattattaaaatataatctttaaaacacccaaaattacttattgttgaaggttttaagtcaagcacttgatgtactagtctgtggatagttgcccctgaaaggaatggcaattccacaccttttgagagcccattggaaacagcagatgatggtcctttaccttcgaacattgtttgatatttccaaaatatgctttcttatatagaccatctcagttgatctttctaacaatcttgtaatataaacacatcagccattaaaatacacaatggcagataaagaaacagaggttcgaagagattaactggttttgccagactcatatccctagcaagcggaaaaa

SEQ ID NO: 308298 - DNA, 457 bp, Homo sapiens
gttctaaaattagactgtggtggtggttacccaactctatgmatatgtgaaaaaaattcacttatacattctaagtaggtgatatgaatggaatgtgaattatatgtcaataagattattaaaatataatctttaaaacacccaaaattacttattgttgaaggttttaagtcaagcacttgatgtactagtctgtggatagttgcccctgaaaggaatggcaattccacaccttttgagagcccattggaaacagcagatgatggtcctttaccttcgaacattgtttgatatttccaaaatatgctttcttatatagaccatctcagttgatctttctaacaatcttgtaatataaacacatcagccattaaaatacacaatggcagataaagaaacagaggttcgaagagattaactggttttgccagactcatatccctagcaagcggaaaaa

SEQ ID NO: 308299 - DNA, 595 bp, Homo sapiens
atagcatggtgagcgttaattgtaaatgtatttatttctagagtttcacataaaacttttatggtattttagagttcattatcaggaattgagtacttgtgagcatcacatatctatcatctcctaatagttattcartctctcttgagaaatacagttcattagaactaagtaataatcctttaataaccatctccatattaaggccacaggtgttgcagacaaaaaaaatatatcattagggatagtgagagagatctgccaaactcagagcactattaggccaacccaaaggaaacaactattgtatcaaaaaacaactattgtatcaaaaaatcagaagtggagaaatgacaacagatgactaagaaacgaaaaggaccataagggactattatgaacaatttaatgccaaccaatctgacaacctaaagaatgcataaatttttagaaaaatacaacctacaaggtggaatcaggaagaaatagaaaacctaaacagaccaataacaaagaaattaaagtagtaattaaaaacctcccatcagagaaaagcctaggacctgatgcttttatagttgaattctaccaaact

SEQ ID NO: 308300 - DNA, 595 bp, Homo sapiens
atagcatggtgagcgttaattgtaaatgtatttatttctagagtttcacataaaacttttatggtattttagagttcattatcaggaattgagtacttgtgagcatcacatatctatcatctcctaatagttattcaatctctcttgagaaatacagttcattagaactaagtaataatcctttaataaccatctccatattaaggccacaggtrttgcagacaaaaaaaatatatcattagggatagtgagagagatctgccaaactcagagcactattaggccaacccaaaggaaacaactattgtatcaaaaaacaactattgtatcaaaaaatcagaagtggagaaatgacaacagatgactaagaaacgaaaaggaccataagggactattatgaacaatttaatgccaaccaatctgacaacctaaagaatgcataaatttttagaaaaatacaacctacaaggtggaatcaggaagaaatagaaaacctaaacagaccaataacaaagaaattaaagtagtaattaaaaacctcccatcagagaaaagcctaggacctgatgcttttatagttgaattctaccaaact

SEQ ID NO: 308301 - DNA, 585 bp, Homo sapiens
aatcactatcaaaactctagtggcattcttcacagatatagaaaaagcaattctaaartttatatggaatcacaaaagactccaaatagccaaagcaattctgagggaaaaaaagctggaagcatcatacttcctcatttaaaattatattacaaagctatagtaatcaaaacagtatggtactggcataaaagcatagagctagaccagcggaacagaatatagagctcggaaatgactccaaacatgtatgatcaactaatttttgacaagagcaccaagaagacacaatggggaaagtacagtctcttcaaaaaatgatgctggaaaaactatttccacatgaaaaaaatgaaattggacccttatcttatgctatacatgaagataaaatcaaaatgaataaaatacctaaatgtaagacctgaaactgtaaaactcctagaagaaaacacaggggaaaagcttctggacactggcattggcaatgatattttttggttatcacaccaaaattcaggctactcaaaagtaaaaagaaataaatgggacttcatcaagcttaaaagtttatacacagcaaag

SEQ ID NO: 308302 - DNA, 512 bp, Homo sapiens
actccaaatagccaaagcaattctgagggaaaaaaagctggaagcatcatacttcctcatttaaaattatattacaaagctatagtaatcaaaacagtatggtactggcataaaagcatagagctagaccagcggaacagaatatagagctyggaaatgactccaaacatgtatgatcaactaatttttgacaagagcaccaagaagacacaatggggaaagtacagtctcttcaaaaaatgatgctggaaaaactatttccacatgaaaaaaatgaaattggacccttatcttatgctatacatgaagataaaatcaaaatgaataaaatacctaaatgtaagacctgaaactgtaaaactcctagaagaaaacacaggggaaaagcttctggacactggcattggcaatgatattttttggttatcacaccaaaattcaggctactcaaaagtaaaaagaaataaatgggacttcatcaagcttaaaagtttatacacagcaaaggaaac

SEQ ID NO: 308303 - DNA, 586 bp, Homo sapiens
tttaaaattgttctgcagtgccctgtggaactggtatctcttaatatcaaaaatttttatagacccaaactctcctctgaatattgctttgtttgtttatcctttctctaagtgaaacttgacttttcacagaggacactgttctcttctaatgatctttagtagagcctgtttcctcttcatccccttttgttggactggatcaatatcagtgaaagaacctagaacctcgattcctacttttagaccactgtacctctctttcctccaaaaataccccccaaacccaccacaatttacaatcttacatcattagactatatcaccctattttgtcttgttgtagtcatctattgattcccaagtcwtttcctctcattgttgaacatttggctagttttatggtcactgtctctgataccactctggttttgaattttgcttatttcagtgtccatgtagactctcttcatgctcttccctttcagttcttttaattgttcttctacaatttgtgctttaccttatttcatttagtaattactcccatggctgactccagaccatgtcattaccgataactcta

SEQ ID NO: 308304 - DNA, 540 bp, Homo sapiens
agaaagtgaattcaccagaaaagatatgcctcagaaacagaatgtaaattctgtagaaaccagagtactctccaaaaggatacttaccagaaagggcttgccaaaaataccctttatagtctcaagtgggatgtgaagtctgtcaattaaggtggacttacaaccaaataagatcctgaatgaaatcaaaaataaggcrtctgaaaagttgagagaagattaaccagggaagaagattaaccacagaaagagagagcataaaaggctctgtgaatatcacacattcaagggtccaccgtctgtccaaggtaagcttgcttcagtcccacttctgacaccatcaactcaacctaaataacatatagacagaaggtttctataagaaaacaatatttattcagaaatggaagttgcaatggcaatattcatgccatagtaaacaatgtccatattcaagcaggtaaaagcagacaaaagtttctaaagaaaaaatgaggattacataattattttgaaataattatccttggttataaggat

SEQ ID NO: 308305 - DNA, 540 bp, Homo sapiens
agaaagtgaattcaccagaaaagatatgcctcagaaacagaatgtaaattctgtagaaaccagagtactctccaaaaggatacttaccagaaagggcttgccaaaaataccctttatagtctcaagtgggatgtgaagtctgtcaattaaggtggacttacaaccaaataagatcctgaatgaaatcaaaaataaggcgtctgaaaagttgagagaagattaaccagggaagaagattaaccacagaaagagagagcataaaaggctctgtgaatatcacacattcaagggtccaccgtctgtccaaggtaagcttgcttcagtcccacttctgacaccatcaactcaacctaaataacatayagacagaaggtttctataagaaaacaatatttattcagaaatggaagttgcaatggcaatattcatgccatagtaaacaatgtccatattcaagcaggtaaaagcagacaaaagtttctaaagaaaaaatgaggattacataattattttgaaataattatccttggttataaggat

SEQ ID NO: 308306 - DNA, 540 bp, Homo sapiens
agaaagtgaattcaccagaaaagatatgcctcagaaacagaatgtaaattctgtagaaaccagagtactctccaaaaggatacttaccagaaagggcttgccaaaaataccctttatagtctcaagtgggatgtgaagtctgtcaattaaggtggacttacaaccaaataagatcctgaatgaaatcaaaaataaggcgtctgaaaagttgagagaagattaaccagggaagaagattaaccacagaaagagagagcataaaaggctctgtgaatatcacacattcaagggtccaccgtctgtccaaggtaagcttgcttcagtcccacttctgacaccatcaactcaacctaaataacatatagacagaaggtttctawaagaaaacaatatttattcagaaatggaagttgcaatggcaatattcatgccatagtaaacaatgtccatattcaagcaggtaaaagcagacaaaagtttctaaagaaaaaatgaggattacataattattttgaaataattatccttggttataaggat

SEQ ID NO: 308307 - DNA, 546 bp, Homo sapiens
cattttacctctgataaatcaaatagtactttacatatgcactctaaataaaaatacatattgaatagatacatattgaagttttgttttgggcaatgcatcgagtatgttatttacacaagtgtgtatgtagataacattactcaatagaaaagaagataaaaatataatatttttaaatgtggttctttctcctgttaccaacaaagctaatcatatttacatctaatttttttacttaayaaaaattccttccagtgtctaggataatgcttgacacatagaagttgctaaatatacttaagtgactaaaatgctatttctcctcaaacagaattgtctttttgctgtccaacgggtttagtattttagaaacatatttttcatctcagtctctttttatcccctctacccttctgcaattaatagtaagctggatatcttattgttcaagtaaaggagagaactagaagagactaaagagtcttggtaattctataggaagatgctagttttgcaaacaacccaatttaaaaatgggcaaac

SEQ ID NO: 308308 - DNA, 517 bp, Homo sapiens
atttatccctcagccatcttaaggctaaagataaacagtccctcgatatattccttaaatgtgagaaaagctgcaaaaacttagcaggtttactgatatggcataacttatgtaggaattgtctggtctatgaaaaggtgtttttttaaattgtgaaaacaatgtcacaacattacaaaaaattgggcaaatacaagggaagatatcaatcataatttcaacactcaaacattaaaatgcaatrtttttgatattcgtgggctctcttccttttgtttttcatccaaacgatcttccattattgcaatcacaatgtactcataaaaactttgttccttcttactaaagttagctgaagaaggatttttatgtgttgcgatatggacttacaattatccattttaaaaattgcatagttttcaatcaggtagatgcactgtaatttaacattctcttaactgtggacatctcatttacttttaattttttgcataaaagagtttccaatgaatgtctt

SEQ ID NO: 308309 - DNA, 582 bp, Homo sapiens
tgtgctctctactcacggagaagataccccaatatttgcttgtgccttttgaaggactaatttgccttcctaaataatttcaagatgtgtctttattttatgttaaaatttccatttgaagkcttggcaaatctgtcatttccttttttttactagacacacttgggatgtgtccctgacactgtgaaataggctctgttaggtgtaaggtttataaatatgaaatgaaggaaatttgcatgattttaaagcatttttcattgaaactctcttttgtttgagcacaaaatctgtaacagtttatgaaacacttaatgaacctaatccttgaaaaaaaagtgaaataagaagaccaaagtgggattgtaacttttctaaatgttttaccatttagcaaccagtttatgcctaaaatagagtgttaacatcaacatcatttaagaattcctgattgttacctcttttggagttttgaatgtttacttctttgagtatttctttaatgaaaacataaacttttaattacagcttttctttgtttatttttttaaaatacaaaagtctccaaagatataggacttt

SEQ ID NO: 308310 - DNA, 611 bp, Homo sapiens
tagtgttcactcagacccacacttgctacctcaagtgyggggaccctgaggaaatccagaatcttgagctagactgaatcaaggccttagttctagggagatccccaggtcgtctgtagccagtttgtgaagctctgcagtacagggatcttcttgggtttctaatttctaacagatgaatctatttttattcatgtccctgaggagaaagaagcattcagctcccttcttcaagcaggtaggtagagttttcaattgcctatttcagaggcaggcctggctctgtgattgcagcttctcatgcacaaggatcctgtgtcctggctgtgcctccacagctgggtgtggaaaccctagcccccaggagctaccagcggtttctatattgtcatgagctcctgggttttgccaaacaaaagaatctgattttgtgtttttgcttcatttctggtaccttcctttacatcaacattttctaggtattttttagaattagttattttattctatagcatttacatgtcttggaaagtgagggggtgtcttttcttgcgatatcagactgctctgctaatgggaaatctagattgtaaagggcttaggctcagtaa

SEQ ID NO: 308311 - DNA, 617 bp, Homo sapiens
attacacacattattactgctagataggtataggggtaattatgaatgacttttgacgtatgtgaacaagtgaattcattggttaagcttttttcatatccttcgtttgccgctttttctgtttgacaaagaagaatcttgggtgttatataactgtgctgcaacataaattcagttacctctctttcttttctccacctttaaarattattgagagtttttcacacaacagatggaatataggcaagaaaaataaagtctatggttttcaatggaactggaagtaggaggttttgtttttgtttttgtttttgacaggctcataaaagccactgtctaaactgggtaaatcttgggtcttttggcttcctatactgtacttgtaatttcacatttttatttgcattgtcacattaaagatatttcagataagatacagctatgggttttaggaaactggagcagtgtcacaatttctaaataataatttttttaactgaccttaaaacatttaacttgaaaattacaggaaatgcatttatagttgacattgatgatgacttacactaatttttctggaaagaaatgtttgtattaagcagttgaaaacataatta

SEQ ID NO: 308312 - DNA, 617 bp, Homo sapiens
attacacacattattactgctagataggtataggggtaattatgaatgacttttgacgtatgtgaacaagtgaattcattggttaagcttttttcatatccttcgtttgccgctttttctgtttgacaaagaagaatcttgggtgttatataactgtgctgcaacataaattcagttacctctctttcttttctccacctttaaaaattattgagagtttttcacacaacagatggaatataggcaagaaaaataaagtctatggttttcaatggaactggaagtaggaggttttgtttttgtttttgtttttgacaggctcataaaagccactgtctaaactgggtaaatcttgggtcttttggcttcctatactgtacttgtaatttcacatttttatttgcwttgtcacattaaagatatttcagataagatacagctatgggttttaggaaactggagcagtgtcacaatttctaaataataatttttttaactgaccttaaaacatttaacttgaaaattacaggaaatgcatttatagttgacattgatgatgacttacactaatttttctggaaagaaatgtttgtattaagcagttgaaaacataatta

SEQ ID NO: 308313 - DNA, 583 bp, Homo sapiens
tgaactttgttcaaataattattttgtttaaaaaaggttacttaatgtgctttcaagtagagttaattgtgatttgaatatatttctacctttatgcaaagtaccttagcagagaatttttgaattttataactgaagtattgaaacatcgaaagttgaaactttcaaaactcccaamatgtgttgtaaattatctaccattttcaacttaagaaaaaaaaagagttaaatacaaatttcgagtactgtatgtgtgatacagtctttccttaagtttcaaatacaaataccagtagtcacacagccacctgaagagagtctctatttgctcagtttataaaggggagtaacagattataacagcaggggaaggaaatgctggttttgcttattttattgctagcatatcattttcttcactgggtaaggcaggctgtcctaaaagtaacttaggcatataactttttggtgctggttatatggataggatatatatggatatatgagatatatatatatatatatatgtcatgtcatatatatatatatgatatacatggaaaggatgtctttcttgaatttt

SEQ ID NO: 308314 - DNA, 583 bp, Homo sapiens
tgaactttgttcaaataattattttgtttaaaaaaggttacttaatgtgctttcaagtagagttaattgtgatttgaatatatttctacctttatgcaaagtaccttagcagagaatttttgaattttataactgaagtattgaaacatcgaaagttgaaactttcaaaactcccaacatgtgttgtaaattatctaccattttcaacttaagaaaaaaaaagagttaaatacaaatttcgagtactgtatgtgtgatacagtctttccttaagtttcaaatacaaataccastagtcacacagccacctgaagagagtctctatttgctcagtttataaaggggagtaacagattataacagcaggggaaggaaatgctggttttgcttattttattgctagcatatcattttcttcactgggtaaggcaggctgtcctaaaagtaacttaggcatataactttttggtgctggttatatggataggatatatatggatatatgagatatatatatatatatatatgtcatgtcatatatatatatatgatatacatggaaaggatgtctttcttgaatttt

SEQ ID NO: 308315 - DNA, 516 bp, Homo sapiens
ttcccctcaaagtgtctttattccctatttttgttatttaacacaactgttctcctcatagtaactcaaccacagaatgttggaatcatctcttaagctatcctctcatttactatgaaaattcaattgattatctaatcttttatattctagtcctaatatgcacatatttccatccccatgcttatctctcattaaatttatatcttacccaactcttggacaagatacaactaattcgaatccttgctttcatattctctatagtcagtttcactgccatatagattttctttctagtgtatgactccctgcacaaaattccacaatagtacttcattattttctaagtgaataaaattattagccatgaayggaaggctatctgacatatggccatagcatcctttttcagtcttgctcctaggattcccctgcctgtccactttgctctagtgatactgaaccaatggccactccctgattatgcctcctgcttctctccttcgttgcctt

SEQ ID NO: 308316 - DNA, 593 bp, Homo sapiens
tctgctgtatattgtttctagtcacttcatcttcctaagaattctctaaagggctaccctaaaacattctcttatacgcactatacttagaataggacaactccgtcatctggcaactacagaggtatataaatacttaaataatacctttagaaatattctaaaatgatacattataaatgagtttatcgcaaattagacaagcaaaatagcttaaagcctgtaaatacctaatctatatttacaaatacctagaacatatcaccaaatacagagtccaacacccaataagaagataatctgggttttagtcagaatttcaagaagagagtacacttgaaatagataccccatagatcagcaatgaatccgaagtaacaaccaatcactatcacaaaygattttagaaataattttttacataaaacctagtattattctatatctgaagaacttgatttgttcattaatgtaaagaacccccaaaaatgatataaattactgagaaaaacattaaagccccaaaaaaagaagtggagggagagggaagaaaagaagaagggagaatttcacaaaacatgaaatataaaatg

SEQ ID NO: 308317 - DNA, 547 bp, Homo sapiens
ttatctctaggaaatgtaactatgggttattttagtctctatgtttttcaaaatttgctattgtaggcatatttatatgtccccaaaatagtggtatgctggcaaatatttaaccaccaactaaggaatcaggaggtatagaaacatttgctgatttccagggtgtaaatattcccaccatagctaattataagctaccaatggttttggcaactaatttgcaaatgaaatcttgcaagccagctcaagctggctccaacacactaataagkccaaaagtatacaaaaatataaataataatgatgattatgatttcaaatcacaaatttttaaaaagccatcaaaaaaatcatattacagtatgatctttttaaaaaggactttctcaccacatgagggaagaaaaaaataagagttaactataaaaatgcaaatatgctgcagagagttcagagaatttctaggaataccaaaaatgctgtatacattcagctatcactatactaaagagaaaaaaacaggccaggagtggtggctcacgcctgt

SEQ ID NO: 308318 - DNA, 452 bp, Homo sapiens
cttctagttttctttgctgtttcagcataatrttgtgcctttttttttttttttttgctttcgtcaataatgaaaaaggaatcattattttcactcttccacatgtctgatgaaaggcaatttttttttttttttgagatgggttttactgtattgcccaggctggagtgcagtggcatgatgatggctcattgcagccttgacctcctggcccaagtgatcctcccatcctcagcctcccaagtagctgagagtacaggtgtgtgccaccacacctggctaatttttgtattttagtggagacggggtttcctcattttgcccaggctggtctcgaactcctgaactgaagtgagccacccacctcagccacccaaagtgctgggattacaggcttgagccaccatgcctggccaaaaggcagcttaatgttgcacattgaacaagttgtt

SEQ ID NO: 308319 - DNA, 319 bp, Homo sapiens
taggctctgtggccagacagcctcaattttggtcccggctaagccactcagcagctatgtgaccttgggcatactattgtacctctaggcctcagtttccacctctgtaaaataagaataagaggagcatttggagatagaaataagcccttggcatagcacccagtgcacaktagaccctcaatgagccgtcagcatcagctcattcctgttgaagatgcccagtcttccccccatactctgggctacagcagctgtggctggaaggatcaggtagggcttttgtacccttcacagactcagagatgcttgatttgca

SEQ ID NO: 308320 - DNA, 619 bp, Homo sapiens
atgtccacatgcaccagcgccttcctttctgcctccaggcctagcccttcagcacaccctcccccgcctcgtggggaaagtccgggcctcctttctgtaaaagtgaaactgaacatgctcaagtctagccctrtcctgcacctggtagcttgctcgtcggcctccatgccctgtggtgccccaggaactcctgactgctctggtgggggccaacaggtggccctactgcaagggcaggccttggaccaaaaccaggaatcagcacaggtcaggtggagcccaggctcctgtggcctcattatgggattctacttggggcttagaaatggaaagcaaattgcttctccaaataggtattgccctgccgccgtgcttgcctttagccagccctctctccttccctgtgagccaggcctgtcccctcggagctgccctcccctgctctaccacacaagaaggcagtggtacaaattcaggcaggacatacttcctgggtaaaaacagcaaaataattctgaaaagagtcttaccagaccagctttgcttgattgggtagcagatgctctgcctaatgttcccatggaaaccaatggaaaacccccaccatgtctgtgatcag

SEQ ID NO: 308321 - DNA, 619 bp, Homo sapiens
atgtccacatgcaccagcgccttcctttctgcctccaggcctagcccttcagcacaccctcccccgcctcgtggggaaagtccgggcctcctttctgtaaaagtgaaactgaacatgctcaagtctagccctgtcctgcacctggtagcttgctcgtcggcctccatgccctgtggtgccccaggaactcctgactgctctggtgggggccaacaggtggccctactgcaagggcaggccttggaccaaaaccaggaatcagcacaggtcaggtggagcccaggctcctgtggcctcattatgggattctacttggggcttagaaatggaaagcaaattgcttctccaaataggtattgccctgccgccgtgcttgcctktagccagccctctctccttccctgtgagccaggcctgtcccctcggagctgccctcccctgctctaccacacaagaaggcagtggtacaaattcaggcaggacatacttcctgggtaaaaacagcaaaataattctgaaaagagtcttaccagaccagctttgcttgattgggtagcagatgctctgcctaatgttcccatggaaaccaatggaaaacccccaccatgtctgtgatcag

SEQ ID NO: 308322 - DNA, 522 bp, Homo sapiens
tggtcatgattctcagtctcccaaggggctcaggggcccacaaggcaggaacatcctttgggggtttgtgctgctgtcatacggttcctgtgttcagtccctagctaccatgtgtttcaggggcttaatacactccgatgctggtgtgtcctcttagttctaatccttgaaaaagagaaaaaccaggcagtgacacttagaagtaggctggtaaaaaaaaaacacaatcacattttctcctttctgcaaagaaaggacaactcaaaacagcmactccctttcttttctctaatgattcaaaataccagaacagggctcacttggctgttttgaattgggaaagaaagaggtgaaagcggggagaaagagaaaacacataacctctaggtaggtagtactgtttccaactgtctacgttccagtgcagaatctttgctaaaaaaaaatttggcaatagtgtgcacaggaaaactgaatcaaacctggaacatcactgctttcttgaaatggaactgacaagca

SEQ ID NO: 308323 - DNA, 662 bp, Homo sapiens
tgaaatttagttcattttgaacttcttttcatctacagcttttagatagctttagcggaaaacaacacgatttagtttayccagtgttttcttgttacataaagaacaaccatgtttcattgctttctacattcttaccggaaatggaacacagtcattaaggttttcaagacattaaatctctttgaacttactctaaattgttttcaagataagcctgttaaaggtctatttttcaaccctgcctgagaattttcaaaaatatcaggaatagcaaatattctttcttaagattgagtctgtactttttcagaaagttggaagcaggtagagcccttctgaatttttcagagatgaaggagcctatatgtgggcatgaggcctgtccttaaatcatgtaaaaccctccaaattttcacattatctcaagagattgacagacttcaggcagtttaatacacagccaagaaaaacattttgtgttccttttcaagacccacgtaggcaaaactatttccattgcatacttaagttggctaaaacattgggaagataaaagattttttggcagtgagtaactatgggatattgtagaattgtttccttcagaactctttcaaattgatagtgggatggtttgatttttgaaagattaatattgc

SEQ ID NO: 308324 - DNA, 513 bp, Homo sapiens
taacaaaggtttctggatcagaagcagactgattacttattgctgatcttagcatcagtttcccatccgcagtcctccatggagcaaaatgatgagggcagatatttcctgtgcatgcaaagcaagatttgtacacaggagagaaagaaggcttgcaattacgaacctcagagcttatgtaggagctaaacagctaccgttcctgcttcctaagaaaaacagaaaaatttttggtctgtgatgtaaacaagtcttctctgagacaaacgcgagaaggtcctttggtaytgacaattctttgaaacatgaacacgtggcaccaaaatagaggaaacctgtacatctccccaggatatttcactgttttagctttcacggtttttaccattcacttatcctttcagccatgttgccaataatttttgctcagaaagtcatgaccatgcagaaccataaaagtgttcacattgttttttgacagtgctcaataaccatgaatgattattgttgtta

SEQ ID NO: 308325 - DNA, 571 bp, Homo sapiens
tcccccttgtgtattatttccctctgtatgtcttgtgtacccattattgagctctcatttataagttagagtatgcagtatttaattttctgtttttaagttatttcacttaggataagggcctccacctctayctgtgttgctacataagacagaatttcattcttttctatggctgcatagtattccatggtatatacacatcacattttttaatgcagtcatccatcgataaacacctagattgattacatgaccttgctactgtgaatagtgctgcaataaatatacaagtgcaggtgtctttttggattaaagacataaatgtaagatctgaaactataaaaattcccagaagaaaacctaggaaatcctcttctggacattggctgatgcaaaggatttatgaataaggcctcaaaagtaaatgcggcaaaaacacgcatagaaaaatgagacttaaagagattatgtggagcaaagaaatgatcaacagaataagcagacaacctacagaatggggggaaaatatttacaaactatgcatttaacaaaggagtaatatccagaa

SEQ ID NO: 308326 - DNA, 571 bp, Homo sapiens
tcccccttgtgtattatttccctctgtatgtcttgtgtacccattattgagctctcatttataagttagagtatgcagtatttaattttctgtttttaagttatttcacttaggataagggcctccacctctacctgtgttgctacataagacagaatttcattcttttctatggctgcatagtattccatggtatatacacatcacattttttaatgcagtcatccatcgataaacacctagattgattacatgaccttgctactrtgaatagtgctgcaataaatatacaagtgcaggtgtctttttggattaaagacataaatgtaagatctgaaactataaaaattcccagaagaaaacctaggaaatcctcttctggacattggctgatgcaaaggatttatgaataaggcctcaaaagtaaatgcggcaaaaacacgcatagaaaaatgagacttaaagagattatgtggagcaaagaaatgatcaacagaataagcagacaacctacagaatggggggaaaatatttacaaactatgcatttaacaaaggagtaatatccagaa

SEQ ID NO: 308327 - DNA, 571 bp, Homo sapiens
tcccccttgtgtattatttccctctgtatgtcttgtgtacccattattgagctctcatttataagttagagtatgcagtatttaattttctgtttttaagttatttcacttaggataagggcctccacctctacctgtgttgctacataagacagaatttcattcttttctatggctgcatagtattccatggtatatacacatcacattttttaatgcagtcatccatcgataaacacctagattgattacatgaccttgctactgtgaatagtgctgcaataaatatacaagtgcaggygtctttttggattaaagacataaatgtaagatctgaaactataaaaattcccagaagaaaacctaggaaatcctcttctggacattggctgatgcaaaggatttatgaataaggcctcaaaagtaaatgcggcaaaaacacgcatagaaaaatgagacttaaagagattatgtggagcaaagaaatgatcaacagaataagcagacaacctacagaatggggggaaaatatttacaaactatgcatttaacaaaggagtaatatccagaa

SEQ ID NO: 308328 - DNA, 298 bp, Homo sapiens
cacatttttattttaatgtgttcaagtctgtacatgaatttccctaggcaaatttctttargtgtattgcttcttgtttgaagagttaaaaaaaaaaaaaaaaaaaaagaaacaactgttgattccgtaattggtcactatcaattatttcaccagaattaccatacagttaagagaattaacttaaggtaaaatagccaaggccttaacaacaaaatacctgggcaaaaaaatgcataggaggtaatctctgctttgtaatctcaatgtgcatatatttcacattatacgtaacact

SEQ ID NO: 308329 - DNA, 564 bp, Homo sapiens
tttggctgttcctcacccaaatctcatcacaaattgtagctcccataattccytcatgttgtgggagggacctggtgggaggtaattgaatcattgggacaggtctttccacaatgctgttcttgtgacaatgaataagtctcacaaaaatatgatggttttctaaaggagagttcccctgcacacgtcctcttgcctgccaccatgtaagacgtgccttactcctcctttgccttccaccatgattgtgaggtctccccagccatgtggaactgtaagtccagtaaacctctttttctttataaattacccagcctcaggtatgtctttatcagcagcatgagaactaacacacagcctaaaacatagtaggtacttaataaatgcagaatgggtgaataaaattgtcattggccattacttcccacccttggcactgaccataatttctggcagtaaatatcaggagcacctgaaaggacataatagcatggtcataggagatggttcaaagctgagttactactctgatatatataacctttgaaaatttaaatgaatcaa

SEQ ID NO: 308330 - DNA, 564 bp, Homo sapiens
tttggctgttcctcacccaaatctcatcacaaattgtagctcccataattccttcatgttgtgggagggacctggtgggaggtaattgaatcattgggacrggtctttccacaatgctgttcttgtgacaatgaataagtctcacaaaaatatgatggttttctaaaggagagttcccctgcacacgtcctcttgcctgccaccatgtaagacgtgccttactcctcctttgccttccaccatgattgtgaggtctccccagccatgtggaactgtaagtccagtaaacctctttttctttataaattacccagcctcaggtatgtctttatcagcagcatgagaactaacacacagcctaaaacatagtaggtacttaataaatgcagaatgggtgaataaaattgtcattggccattacttcccacccttggcactgaccataatttctggcagtaaatatcaggagcacctgaaaggacataatagcatggtcataggagatggttcaaagctgagttactactctgatatatataacctttgaaaatttaaatgaatcaa

SEQ ID NO: 308331 - DNA, 564 bp, Homo sapiens
tttggctgttcctcacccaaatctcatcacaaattgtagctcccataattccttcatgttgtgggagggacctggtgggaggtaattgaatcattgggacaggtctttccacaatgctgttcttgtgacaatgaataagtctcacaaaaatatgatggttttctaaaggagagttcccctgcacacgtcctcttgcctgccaccatgtaagacgtgccttactcctcctttgccttccaccatgattgtgaggtctccccagccatgtggaactgtaagtccagtaaacctctttttctttataaattacccagcctcaggtatgtctttatcagcagcatgagaactaacacacagcctaaaacatagtaggtacttaataaatgcagaatgggtgaataaaattgtcattggccattacttcccacccttggcactgaccataatttctggcagtaaatatcaggagcacctgaaaggacataatagcatggtcataggagatggttcaaagctgagttactactctratatatataacctttgaaaatttaaatgaatcaa

SEQ ID NO: 308332 - DNA, 686 bp, Homo sapiens
cccatcagttgatattcataccttgccaatggagttgcctgttttaggaaaacatccctgagtgtttggtttatttgcattctatgtataaatagacattgaaagtatcctactgggaagactgtggagtgattcatgcatcaggtaataatcggatattaataatcaataacaagatatcttccacttctgtgactagttwgttctatgatacaatgcagtgattctcagtttagttctgccgtgaataagggccactctgcacttactgggcctcatcttcttcctccttctaaaatgcagcttagctgtagttgattgctaaaacattttcttgcttaaaaatttaaaaaattttttgagaaccaaaacctttttaaatgatagaagacactgcttcttgcatatgttttctcaatgctttattcaatttaggaaaggcatcatattccatttcagatcatactatccgttagcggaaactacactaataaataatgctttacggaagagatttgtagcagaaaaattcttgttatttactgctcatataccaataagacaggtgttatcgttaactcactgaacttgccagtctctgtttgatttagttgcaggattaagaacatgatttcaacactgatattttagttccaattgataactcctttgtaaataacaggggt

SEQ ID NO: 308333 - DNA, 686 bp, Homo sapiens
cccatcagttgatattcataccttgccaatggagttgcctgttttaggaaaacatccctgagtgtttggtttatttgcattctatgtataaatagacattgaaagtatcctactgggaagactgtggagtgattcatgcatcaggtaataatcggatattaataatcaataacaagatatcttccacttctgtgactagttagttctatgatayaatgcagtgattctcagtttagttctgccgtgaataagggccactctgcacttactgggcctcatcttcttcctccttctaaaatgcagcttagctgtagttgattgctaaaacattttcttgcttaaaaatttaaaaaattttttgagaaccaaaacctttttaaatgatagaagacactgcttcttgcatatgttttctcaatgctttattcaatttaggaaaggcatcatattccatttcagatcatactatccgttagcggaaactacactaataaataatgctttacggaagagatttgtagcagaaaaattcttgttatttactgctcatataccaataagacaggtgttatcgttaactcactgaacttgccagtctctgtttgatttagttgcaggattaagaacatgatttcaacactgatattttagttccaattgataactcctttgtaaataacaggggt

SEQ ID NO: 308334 - DNA, 686 bp, Homo sapiens
cccatcagttgatattcataccttgccaatggagttgcctgttttaggaaaacatccctgagtgtttggtttatttgcattctatgtataaatagacattgaaagtatcctactgggaagactgtggagtgattcatgcatcaggtaataatcggatattaataatcaataacaagatatcttccacttctgtgactagttagttctatgatacaatgcagtgattctcagtttagttctgccgtgaataagggccactctgcacttactgggcctcatcttcttcctccttctaaaatgcagcttagctgtagttgattgctaaaacattttcttgcttaaaaatttaaaaawttttttgagaaccaaaacctttttaaatgatagaagacactgcttcttgcatatgttttctcaatgctttattcaatttaggaaaggcatcatattccatttcagatcatactatccgttagcggaaactacactaataaataatgctttacggaagagatttgtagcagaaaaattcttgttatttactgctcatataccaataagacaggtgttatcgttaactcactgaacttgccagtctctgtttgatttagttgcaggattaagaacatgatttcaacactgatattttagttccaattgataactcctttgtaaataacaggggt

SEQ ID NO: 308335 - DNA, 686 bp, Homo sapiens
cccatcagttgatattcataccttgccaatggagttgcctgttttaggaaaacatccctgagtgtttggtttatttgcattctatgtataaatagacattgaaagtatcctactgggaagactgtggagtgattcatgcatcaggtaataatcggatattaataatcaataacaagatatcttccacttctgtgactagttagttctatgatacaatgcagtgattctcagtttagttctgccgtgaataagggccactctgcacttactgggcctcatcttcttcctccttctaaaatgcagcttagctgtagttgattgctaaaacattttcttgcttaaaaatttaaaaaattttttgagaaccaaaacctttttaaatgatagaagacactgcttcttgcatatgttttctcaatgctttattcaatttaggaaaggcatcatattccatttcagatcatactatccgttagcggaaactacactaataaataatgctttacggaagagatttgtagcagaaaaattcttgttatttactgctcatataccaataagacaggtgttatcgttaactcactgaacttgccagtctcwgtttgatttagttgcaggattaagaacatgatttcaacactgatattttagttccaattgataactcctttgtaaataacaggggt

SEQ ID NO: 308336 - DNA, 595 bp, Homo sapiens
ccaagttctagaaaatttcagcctttctagaatgcccacattgtgagttctgaattkgaagagcatcacagtagcttctgtaaccattttgcatcatctttctacaagagatattgtaacattactaagtcaagtcgcactcagtgaatgaaagtttcattaacttttaattctatatactttgcaaggcatcaaaagacttacaagtataagaaacttcaccaccatattacaagagattatttgctagtatgaaaacaaaggagttgatggagtcaccagattgtgagaagtcagggggacagtctagtagacatgactgtgacagttaaaaatgaggtctgaaactcaggaaattttcagatgtaaatataaattaggaatgatctgcatagaggtaatggtggagaaggatgaggtgatggagagaaagtagtatagaaaattcaataaaaccaagatgattggaagagtaggcagagttggaagagtgaaatatttcattagtattttaattctgtaaaattaaagtataagaacaagaagtaacaaatatgttaaatggtgcacaatggagacagggtttgagattaat

SEQ ID NO: 308337 - DNA, 595 bp, Homo sapiens
ccaagttctagaaaatttcagcctttctagaatgcccacattgtgagttctgaatttgaagagcatcacagtagcttctgtaaccattttgcatcatctttctacaagagatattgtaacattactaagtcaagtcgcactcagtgaatgaaagtttcattaacttttaattctatatactttgcaaggcatcaaaagacttacaagtataagaaacttcaccaccatattacaagagattatttgctagtatgaaaacaaaggagttgatggagtcaccagattgtgagaagtcagggggacagtctagtagacatgacygtgacagttaaaaatgaggtctgaaactcaggaaattttcagatgtaaatataaattaggaatgatctgcatagaggtaatggtggagaaggatgaggtgatggagagaaagtagtatagaaaattcaataaaaccaagatgattggaagagtaggcagagttggaagagtgaaatatttcattagtattttaattctgtaaaattaaagtataagaacaagaagtaacaaatatgttaaatggtgcacaatggagacagggtttgagattaat

SEQ ID NO: 308338 - DNA, 558 bp, Homo sapiens
tgtttgaaaaggatttctattgaagtcccacaatgttatgtgaaatctttacatggtatttgcttctgaatacacgctctctccatcactaaaaaaagaatgatgactatcaygtgtcaattttttcttaatgtaacgactgagaatggaaaacttttaaaaagtttgtcttgacatcatcccctgacagaatatcctaataatctcagtatttccacttcagattcaacttgtctaatcttatctctgctcttctccaaggtcctagaatttaaacctgaaattttattttcatcttgactgctacttgttcttcctttctctccttcatcacagtctctccagcttcctccttttttccattcctagagtcaccggtataagtcaggggcttttgacctgactctgggatcattgaagtctgtgggatttctcttcctcttatcttgccccaattcactttagcactcaaaggtggagttccttagaagcatatcgtgacacatagtttggggacaagatctttactaggaccaacacttgtgtattagtctgctg

SEQ ID NO: 308339 - DNA, 558 bp, Homo sapiens
tgtttgaaaaggatttctattgaagtcccacaatgttatgtgaaatctttacatggtatttgcttctgaatacacgctctctccatcactaaaaaaagaatgatgactatcatgtgtcaattttttcttaatgtaacgactgagaatggaaaacttttaaaaagtttgtcttgacatcatcccctgacagaatatcctaataatctcagtatttccacttcagattcaacytgtctaatcttatctctgctcttctccaaggtcctagaatttaaacctgaaattttattttcatcttgactgctacttgttcttcctttctctccttcatcacagtctctccagcttcctccttttttccattcctagagtcaccggtataagtcaggggcttttgacctgactctgggatcattgaagtctgtgggatttctcttcctcttatcttgccccaattcactttagcactcaaaggtggagttccttagaagcatatcgtgacacatagtttggggacaagatctttactaggaccaacacttgtgtattagtctgctg

SEQ ID NO: 308340 - DNA, 558 bp, Homo sapiens
tgtttgaaaaggatttctattgaagtcccacaatgttatgtgaaatctttacatggtatttgcttctgaatacacgctctctccatcactaaaaaaagaatgatgactatcatgtgtcaattttttcttaatgtaacgactgagaatggaaaacttttaaaaagtttgtcttgacatcatcccctgacagaatatcctaataatctcagtatttccacttcagattcaacttgtctaatcttatctctgctcttctccaaggtcctagaatttaaacctgaaattttattttcatcttgactgctactygttcttcctttctctccttcatcacagtctctccagcttcctccttttttccattcctagagtcaccggtataagtcaggggcttttgacctgactctgggatcattgaagtctgtgggatttctcttcctcttatcttgccccaattcactttagcactcaaaggtggagttccttagaagcatatcgtgacacatagtttggggacaagatctttactaggaccaacacttgtgtattagtctgctg

SEQ ID NO: 308341 - DNA, 558 bp, Homo sapiens
tgtttgaaaaggatttctattgaagtcccacaatgttatgtgaaatctttacatggtatttgcttctgaatacacgctctctccatcactaaaaaaagaatgatgactatcatgtgtcaattttttcttaatgtaacgactgagaatggaaaacttttaaaaagtttgtcttgacatcatcccctgacagaatatcctaataatctcagtatttccacttcagattcaacttgtctaatcttatctctgctcttctccaaggtcctagaatttaaacctgaaattttattttcatcttgactgctacttgttcttcctttctctccttcatcacagtctctccagcttcctccttttttccattcctagagtcaccrgtataagtcaggggcttttgacctgactctgggatcattgaagtctgtgggatttctcttcctcttatcttgccccaattcactttagcactcaaaggtggagttccttagaagcatatcgtgacacatagtttggggacaagatctttactaggaccaacacttgtgtattagtctgctg

SEQ ID NO: 308342 - DNA, 538 bp, Homo sapiens
taaggtggtggagagagtaagtgggacagccaccacataccatgaagaacctaaatatggattgatagtttcacagctgtgcttatttatttcactacgttgtgctttcaaataacagagaaaaacctacctgagtttttaaaaaagagaaacatcattggtgccttcattaataggagtagtctgcagtgactgmtggtcccttttagataacgaccagactgtacggaaattactgctggagttaacatgatttttttttaaaaagcaagttccaaattactaatcagtaacttcagtttctggccttcacatcttatattttatcctgcaacaaaataaaggaaggacattttggagtggcaaaaatagaaataatgaatttactttttctctttcatgagaaacattggggagctggttctgctaggcgctatgaactccaatgctgctatcagcacatacttggtttaaactgttattggaagttacttacattgtatcatttgtatgacgttgaattatgtgctaggtgtaa

SEQ ID NO: 308343 - DNA, 538 bp, Homo sapiens
taaggtggtggagagagtaagtgggacagccaccacataccatgaagaacctaaatatggattgatagtttcacagctgtgcttatttatttcactacgttgtgctttcaaataacagagaaaaacctacctgagtttttaaaaaagagaaacatcattggtgccttcattaataggagtagtctgcagtgactgatggtcccttttagataacgaccagactgtacggaaattactgctggagttaacatgatttttttttaraaagcaagttccaaattactaatcagtaacttcagtttctggccttcacatcttatattttatcctgcaacaaaataaaggaaggacattttggagtggcaaaaatagaaataatgaatttactttttctctttcatgagaaacattggggagctggttctgctaggcgctatgaactccaatgctgctatcagcacatacttggtttaaactgttattggaagttacttacattgtatcatttgtatgacgttgaattatgtgctaggtgtaa

SEQ ID NO: 308344 - DNA, 538 bp, Homo sapiens
taaggtggtggagagagtaagtgggacagccaccacataccatgaagaacctaaatatggattgatagtttcacagctgtgcttatttatttcactacgttgtgctttcaaataacagagaaaaacctacctgagtttttaaaaaagagaaacatcattggtgccttcattaataggagtagtctgcagtgactgatggtcccttttagataacgaccagactgtacggaaattactgctggagttaacatgatttttttttaaaaagcaagttccaaattactaatcagtaacttcagtttctggccttcacatcttatattttatcctgcaacaaaataaaggaaggacattttggagtggcaaaaatagaaataatgaatttactttttctctttcatgagaaacattggggagctggttctgctaggcgctatgaactccaatgctgctatcagcacatacttggtttaaactgtkattggaagttacttacattgtatcatttgtatgacgttgaattatgtgctaggtgtaa

SEQ ID NO: 308345 - DNA, 493 bp, Homo sapiens
gcatggacacacggaggggaacatcacacaccgaggcctgtcaggggatcaggggctggggagagatagcattaggagaaatacccartgtagatgatgggttgatggatgcagcaaaccaccatggcatgtgtatacctctgtaacctgcatgttttgcacatgtatcccagaacttaaagtataatttttaaaaattatgaaaaggagtcaaatataaattccgatgttgaaaaatatgatcttaaaatgaatcagttgaaattataataatatagtaataattggaaaagtcattaggcttgacaggagaataggcagataaaacaatcagtgaacttgaagctaggtcagttgttgaaatgatccagtctgaggaggagacaaggaaatatgaacacagaccaaaagactgttagacactatcaagcatattaagtataaatacgagtcccagaagagagaggaaaggacagaaaagagtacccgaaga

SEQ ID NO: 308346 - DNA, 609 bp, Homo sapiens
ccaaacaccgcgtgttctcactcataagtgagagttggacagtgagaacgcatggacacacggaggggaacatcacacaccgaggcctgtcaggggatcaggggctggggagagatagcattaggagaaatacccaatgtagatgatgggttgatggatgcagcaaaccaccatggcaygtgtatacctctgtaacctgcatgttttgcacatgtatcccagaacttaaagtataatttttaaaaattatgaaaaggagtcaaatataaattccgatgttgaaaaatatgatcttaaaatgaatcagttgaaattataataatatagtaataattggaaaagtcattaggcttgacaggagaataggcagataaaacaatcagtgaacttgaagctaggtcagttgttgaaatgatccagtctgaggaggagacaaggaaatatgaacacagaccaaaagactgttagacactatcaagcatattaagtataaatacgagtcccagaagagagaggaaaggacagaaaagagtacccgaagaaataatgttcaaacttaccaaatctgaaaaaagacatgaagccaatatccaagaagttccaacaaat

SEQ ID NO: 308347 - DNA, 609 bp, Homo sapiens
ccaaacaccgcgtgttctcactcataagtgagagttggacagtgagaacgcatggacacacggaggggaacatcacacaccgaggcctgtcaggggatcaggggctggggagagatagcattaggagaaatacccaatgtagatgatgggttgatggatgcagcaaaccaccatggcatgtgtatacctctgtaacctgcatgttttgcacatgtatcccagaacttaaagtataatttttaaaaattatgaaaaggagtcaaatataaattccgatgttgaaaaatatgatcttaaaatgaatcagttgaaattataataatatagtaataattggaaaagtcattaggcttgacaggagaataggcagataaaacaatcagtgaacttgaagctaggtcagttgttgaaatgatccagtctgaggaggagacaaggaaayatgaacacagaccaaaagactgttagacactatcaagcatattaagtataaatacgagtcccagaagagagaggaaaggacagaaaagagtacccgaagaaataatgttcaaacttaccaaatctgaaaaaagacatgaagccaatatccaagaagttccaacaaat

SEQ ID NO: 308348 - DNA, 633 bp, Homo sapiens
tacttcctttcacagatggcatgatatacataaagtaaaacgaagaattttttaaatgattaaaaataaattcaccagagttgcaggatacatggttaacatgcaaaatccaattgtatttctatatactagcaatgaagagtctgaaaaaggaaattaagacaatttcatttataatagaaccaaataataaaatacttttggacagatttaaccaaggaactaaaaatacaaaacattgctgaaagaagttaaaaaaagacctaaacaaatagaaatacatcaagttcatacgttgaaaaacataatactgttaagatggaaatacttctcaaaatgatctacaaattcaatttcctattataatccagtggcctttttgcaaaaataagaaagctgattcatatgraaatgcatggggtcctgaatagccaaagcatttattgaaaaagaaccaagttgaaagactcacactttgaaaacttaatacaattctacaataatggaaacacaactaccaggtaccaaacataggcactagtgtaaggataaacatatagattaatagaatggaattgggaatccaaaaacatacccataacctctctattgattttcaacaagagtgccaaa

SEQ ID NO: 308349 - DNA, 633 bp, Homo sapiens
tacttcctttcacagatggcatgatatacataaagtaaaacgaagaattttttaaatgattaaaaataaattcaccagagttgcaggatacatggttaacatgcaaaatccaattgtatttctatatactagcaatgaagagtctgaaaaaggaaattaagacaatttcatttataatagaaccaaataataaaatacttttggacagatttaaccaaggaactaaaaatacaaaacattgctgaaagaagttaaaaaaagacctaaacaaatagaaatacatcaagttcatacgttgaaaaacataatactgttaagatggaaatacttctcaaaatgatctacaaattcaatttcctattataatccagtggcctttttgcaaaaataagaaagctgattcatatgaaaatgcatggggtcctgaatagccaaagcatttattgaaaaagaaccaagttgaaagactcacactttgaaaacttaatacaattctacaataatggaaacacaactaccaggtaccaaacataggcactagtgtaaggataaacatatagattaatagaatggaattgggaatccaaaaacrtacccataacctctctattgattttcaacaagagtgccaaa

SEQ ID NO: 308350 - DNA, 516 bp, Homo sapiens
cttcactggtgaattccatgaaacgttcaaagaattaataccaacccttctaaacttccaaaaaactgaagaggaaataatgcttccaaactcatcttatgaggccagaatcactctgataccaaagccaaacaaagctactataagaaaagaaaactggatgggcacggtggctcatgtctgtaatccaagcacttcaggaggccagggcaggtgcattaccagaggtcaggagttccagaccaccctagccaagatggcaaaagccagtctctactaaaaaatacaaaaattagctggatgtggtggcaggtgcctataaatcccagctacttgggaggctgaggcaggataatcgcttgaactcaggaggcagaggtgacagtgagccgagatcgtgccactgcactccagcctgggcgacagagcraggctccatctcaaaaaaagaaaaactacaaaccaatatccctgataaacatggatgcaaagtcctcagcaaaatatgagtaaact

SEQ ID NO: 308351 - DNA, 557 bp, Homo sapiens
aatatactcatatattaaacattattcaccatcaagtgggatttacttctgggatgcaatgatggctcaacaacatgcacaaatccataaatataattcaccatattaacagaacaaaggaaaacaataatttgattaatctcaatagatgtactaaaaccatttgacagaattcaacatcctgtcatgataaaaactctcatcaaattacttacagaaagaatgttcctcaacaaaataaaagccatgtatgacaagccaaaagctaacatctgaatggtgaaaagttcaaagctttttctctaagaaacaagaccaagatgtctactctcaccacgtgtattcaacataatcctggaagttctagccagagtaatgagtcaaaataaacaaaagatgttcaaattgaaaaggaagagcgaattgtgtctctggtaacatgatgtgataaaaaaaatactaaagactccaccaaaaaaaccrttataactaataaattttgtgaagttgtaggatatatatcaatatacaaaaatcaccatttccatacactaaca

SEQ ID NO: 308352 - DNA, 557 bp, Homo sapiens
gaagtagggaagggtaaagggcaaattctaactttccttgtatatcagagcatgtaatgatactaaaatatcattccctatctagattattatctgacagcaatataatgactaggaaaagtggagaaaaaaatattttactagttttttataatgttgcacttgacagccctatttttgttacgataggaagagtttaagtttgtacttcttttagtttgtactttttttttcaagtagtagttgtcatttagtataataactctctactgctctggggttatgttgttgttgtttttaacggaggytggacatagaaactacccagaaagctttggaaaatacatatccttggcctcaccatagatataaatagtaagcacatctgaaccagcatacatgccacttacgttatttctgtgtgaatgtggcatttgaacagtcttcttatgtaaccagccccacactcctgtcagctccccaccagcctaacaggagatagatttgccttcagcaggcctcataatgctagaaatatagatgaaactcttgtaaga

SEQ ID NO: 308353 - DNA, 559 bp, Homo sapiens
atgttaatatatgtcaatatcagtgatactgaaagtaggaaatatatgatttaaacaaaatagtttaagaactaaatcacactaaaaactacaatgtaagtcataacattttccataatagcttatagaactgaatgcaagtatcaagaataatcttaaaagaaaaagtaaatagcgtgaacattaataataaactggatcttaaaactcagattatttaaataaaaactaagaaattgagaaggaatgaaaacacgaaagattgctaaatttcccattcatcatagggagaatcgattttggtttttagctttaatgttgaaatcgagacaaaggcattttttaaacataaaaagcaaagtcgaccgagcacaatggctcagacctgtaatcccagcactttgggaggccaaggtgggaggattacttgaggtcargagttcaagatcagactgggcaatataatgagacgcccatctctacaaaaaggaaaaaattaattatccagggatggtggtgcatgcctgtagttcctgctactcagggaggctgaggtggg

SEQ ID NO: 308354 - DNA, 451 bp, Homo sapiens
tgcctctcagttttaaatttgagttgttaaatgctttatagacatgccgtggtgcttactgtgaaatcttctgtttggagaaaatacatacatccatgaaccggggaataacaatataaagtgtcacaagctaagtggctggcagatctgttgtatggaaataatttacaggtgagaaagatcactgtgggtctgagaaaggaagactccagaagaaggcttgaattaggctaaaattcaacacagcatttagacaaaggagagaggaggggctgaggrtatttcatgagccgaaagtcataatttgtgtacaaaggaatgggaagagaaatatgttcatggtatattctgaggattatgagtatactgctatggtgtgacagccttaatatgtactactcaatagtgaacgtttctggtttaaaatacattaattagacagaaagaaata

SEQ ID NO: 308355 - DNA, 597 bp, Homo sapiens
aagccgaagaaatattcagctaacttgaagttcagctgaaattacctagtctgagaaacaatacgaaataaagaataaagaaaacataaacaagactttacagtcctgtgggtcaccatcaagcataccaaaatatacacaatggagtttaaaaagggaagaacagaaagaaaaagacgaaaaacagtatttcaagaattaatggcctcaaactccctaaatttaataagcaatctttatacattaatgaagctcaatgaaatctaaggaggakaaactcgaagatatctacaaaaagatagaaagtcatgctgtccaaaggcaaagatataatcatacaatcagcaagagaaaagtgactcgccatataaaagagatcctcaataagatttataactgaccatccatcagaaactatagaggctaaaaggaattgggaaaatatactcaaagaaacactgggaaataattgggaaatatactgaaagaaaatgaatgtcaactgacagttctatatgcagcaaaactatgcttcacaaatgggaaaaattaagattcccaaataaatgaaagcttagagagtttgttcccattaga

SEQ ID NO: 308356 - DNA, 579 bp, Homo sapiens
gtaaaatgcagtgtggaactagactgattaaaatgtttctgaaagttcttccaattggaagtctgactcccctgaaataactttcaactcaaggcagctgagtcctctgtaccattaagagtattggtgatgtagcatttctgaaacaaacaaacaaacaaaaaaaaaaacaggcacacctgtctctgccatctctggggttttcttctaagcttgtaataccatcctgtaagttctgatactggttctttcctgagcttactagaaagtacgaggtaatcataaccaccttacaacttgatgacagcaatgggaagatactgtaaattttaaggcacattttattytagaataaaaatgataagaaatgttaagaatgtatatgattctaagaaatgtgtcatttttatatattaatctataaaatataatgtggggaaatgtaatcattttaactcaacaagtttgcattgagctccttctgtctttacactcttgggatggatcaagatagcttattaaccctcatgtgaaagaggttttttttttagccattcagtgtcattcttcaatcattca

SEQ ID NO: 308357 - DNA, 615 bp, Homo sapiens
aatatgaagggagtcatttaggctaaaaggaaaggacattggacagtaactcaaattcacaaaaagaaataaagaacactgttaaagatgattgcatatgtaaatataaaagtcagtacaaatatattttggtttttaattctttttttctcttacataatgtaattgacaactgcatgaaacagtaattataaaattgtgctgatgagcttatagtgtataaagatgtaatttgacaataataacaaaaagggtggaaagaattgagctatatagaggcagttttcatgtgtttttaaaattaagttgtaatytgaactagattgttttgaattaagatattaagatattaattgtaattcccagaaaaaggattaaaaaaacttcaaaacttcttgtaaagtaagagaattataatagtttactaaaagtatttatttaacacaaaacattaagtacttgaagaatagatgacaaaataagaaatatgtcatagaaaagagcaacataatagatggaaatcctactttattagaaattatattaagtataaatagaccaaatactccaatccaaagacagagattagcagaatggataaaaatcatgaactca

SEQ ID NO: 308358 - DNA, 651 bp, Homo sapiens
gtgcattcaaatttatttctacacattcttttcagttcaatttgtctatcatactatttatgagtatcacaatgaattagcttttatggttttatatttttcttatagtacycttcccgactctcctcattactttctttttcacgttgtctaattccaggtaaaagttgaaatcttaccgatattaaaacttcttgtcagagcacattacataagttttcattttttcaattcttcatttttatttattaataaaattactttcttcatattgaccttgcactttcatactaaatttattcctaggttttccaaacaaaattaataatcagtacactctttctttttagttactgtgtcatcaatttctttctcttgtctcattgtgttgaatagttctgccagaacaaatctgtagtgaccatagcggatacctttgttctctttctgcctccgtgggaaggtgtctttcatttctcagttaagaacaatactgttttttagactgaaacaggtatgtttcaacattatctattgcaaggtaagtgcctatttattcctttttaacaagttttcattaagaataacaatacattttattatatgcctttttagcagctgggtaatcattgaattttcttttttctatgg

SEQ ID NO: 308359 - DNA, 651 bp, Homo sapiens
gtgcattcaaatttatttctacacattcttttcagttcaatttgtctatcatactatttatgagtatcacaatgaattagcttttatggttttatatttttcttatagtactcttcccgactctcctcattactttctttttcacgttgtctaattccaggtaaaagttgaaatcttaccgatattaaaacttcttgtcagagcacattacatargttttcattttttcaattcttcatttttatttattaataaaattactttcttcatattgaccttgcactttcatactaaatttattcctaggttttccaaacaaaattaataatcagtacactctttctttttagttactgtgtcatcaatttctttctcttgtctcattgtgttgaatagttctgccagaacaaatctgtagtgaccatagcggatacctttgttctctttctgcctccgtgggaaggtgtctttcatttctcagttaagaacaatactgttttttagactgaaacaggtatgtttcaacattatctattgcaaggtaagtgcctatttattcctttttaacaagttttcattaagaataacaatacattttattatatgcctttttagcagctgggtaatcattgaattttcttttttctatgg

SEQ ID NO: 308360 - DNA, 651 bp, Homo sapiens
gtgcattcaaatttatttctacacattcttttcagttcaatttgtctatcatactatttatgagtatcacaatgaattagcttttatggttttatatttttcttatagtactcttcccgactctcctcattactttctttttcacgttgtctaattccaggtaaaagttgaaatcttaccgatattaaaacttcttgtcagagcacattacataagttttcattttttcaattcttcatttttatttattaataaaattactttcttcatattgaccttgcactttcatactaaatttattcctaggttttccaaacaaaattaataatcagtacactctttctttttagttactgtgtcatcaatttctttctcttgtctcattgtgttgaatagttctgccagaacaaatctgtagtgaccatagcggatacctttgttctctttctgcctccgtgggaaggtgtstttcatttctcagttaagaacaatactgttttttagactgaaacaggtatgtttcaacattatctattgcaaggtaagtgcctatttattcctttttaacaagttttcattaagaataacaatacattttattatatgcctttttagcagctgggtaatcattgaattttcttttttctatgg

SEQ ID NO: 308361 - DNA, 591 bp, Homo sapiens
atagtatactactatcctaatagtatagtattatatttttgttgtctcaacatttatttggaaaatatagtagaatgagaagctctccttttaacagttttgatcacaaagtataaagtgtttgctgaaacacaattgattcccattagctgtctcactagtgtctggggcttagggttgttttacgttatcctaggatcctgggagttttccatacctgcagtctatgtttttgttggctgactttctacggaggggcagctatcgtgaattatttcagcatagtctgcttagggtttccttagtattgatgggttttgtttctttctttttttttttkttcctttacctacaacacctagactaccagtcttattgacagggtaataaaggtaaagctcatcaggagagctatttctccattttactatcaggacagataactttttatgaagaagggactgaataagaccaagcatggggtcacagttaaccaaaaatctgtggactgaatctagtctctggttaggagctgctagcccaccatttggttcttccatctccaaaaggctcagtttctctcttcctata

SEQ ID NO: 308362 - DNA, 596 bp, Homo sapiens
aatttgaagtttagagtaatttgctaaaggtcttactcatgaaacccaggacagagaattgacttcagggaatatgactaaaatcgattttataaagtactgcactacattgtttccttcatgctgtcagtttccaatttgcagattaggaaactgaggcccaaattactgaactgattaagtaacaactacttcattaaattgaatggctattattaacactggaaactgacttctaagtttagtttgctttttgttaccctagctctcttttcaagtaaccttttggtccaccatagccattcttattttcggaacattacgtgtttaaaaggactcctyaaggagtatttaccactagcacaatttaaaaatgttgaaaaaccagaacgtactgactggtgtcatcttcccaagaattcagtaataacttaagtaaaatcaggtttatttcacatactgatatatagtatatttagcttaatttccattttacttttattcattcttgatattgccatataagaggtatagaaacactaatattaaacaaaatatataattttttattttcaagtatgttacttgaaattaag

SEQ ID NO: 308363 - DNA, 550 bp, Homo sapiens
gcatgtattagcaatttatcataaaggtagcaatgctctagtagtcttagggtatgggtgaacttttaaataaattatcctaggggtaaatggatactgataagcaggaaattttgaaaatcaatgtgaatccatcaccatacctgaaaatttcaggtgaattttttatctaaatgaaaaataaatcataaagagagtatctatgtgaagtcagcatgttccttctcaaaaggaacataaaaattactaagcagaattgagaggattgttagatttgacacattaaaattaagactttctgttagaagaamaagttaaaggacaagcttcatataactgaaaaatgatgtatgtccacaataaacaaaaacaattgcaaatcaaggaaaagatagacaaaccagtggaatagtgggcaaaagatccagacagtaaacaaaagtgagtatgccaacagcatgtatgtgaataaatattcaattttgtgtgtcaccaaataaatgtatattaaaagttcaatgagataccatcacagagagatacctacacc

SEQ ID NO: 308364 - DNA, 498 bp, Homo sapiens
attctggacagtctcattaaaaggctggaagcagaattggccaacaagagatatatattgagagaacttttctaaccccttaagctttctttgtccaatatcaaaaactctcactgatagtaataaaatgcaaaggaatattaagaaagtgttacataagtaaatgtatcattttatctcctagtgctctggagagagcattttttaaacaattatattctttttatgtttaatatattaaaataacatttagtattaaaataataaccaatatttgaaacaaaaagtctttgaaaaattcttaagtttcttaaggaacacattataccaggtgaaagaagtttgcttaaagattgcaggtaattgttactcaaatcttttctaatactggtcagaaaacaaagcttccctaatctctacaataaaatgatatgagtaytgtaataatatgttcaaaagctagtatatgtaggatgctttaaaattatactagcataa

SEQ ID NO: 308365 - DNA, 537 bp, Homo sapiens
ctatgtactcaccaaacaagcctaagctgtcccactctttctttgattacttcagtcctttacatttctttcgactcactgttgtgctctgccatgaagtctactaaaaggattttgtactgaatttattaccatgatttrgaaaataccgcaaatcagtaatgtgatccaatattagagagattttttttctaccttttgaagttttcactagctgaagttgtggggaaacatgtccctgctatataattctgatgatttaccccatctactgtatgaataaaaggtagtgcttctggctatggaatataatctagtctgctgtgactttacagcttgtgtgagagggaaaatatatttcatgaggactttatttccattacactaggttgtgaaggtatcagccttccatcgtgtgtgtatatttaagtatgtgcgtatatatatgcttaaaggtgtactgttttttgaggatgggattggttactctttccatttaaagtagtctgtttgttttgtcttttaaatgactggtat

SEQ ID NO: 308366 - DNA, 461 bp, Homo sapiens
aacaaatgaaaatttgaaacggaaaaaaaaaatcacaggaaaaggagttgtgatggtagcaattcctcaataaccagggsacctagcagcaactctgagcctaattgtgacccacaagaagaaagtggtttttgaactttcacagaaaccatgaagaaaagcgatcatgccacttttcagtttgtaaaagcaaagaatgggatctggctatcagactgtaatttgggaaggttgatctcaaaaatttgatttttttaaatttaaatattttcttctacctcaggcatgtgaagatctcaagaattagaagagaataaaggctataaatcctctgaaatgaaaaccaaggaagatttggaaactttcaaaaattcaatttggactaaaaatgcaaataatctgattgatgaaggaagaaaaaattagatatctaaaatgtgattaaataaaaactccctggt

SEQ ID NO: 308367 - DNA, 648 bp, Homo sapiens
tttaaacttggaattaaccataaataatttttaaaaatgaaaatatgggattataaccaaagccaaatacaagagggtgacacaaaacgtaagaattgcctgagagccaaccaaggtggctcagcctgtaatcccagcattttgggagactaggaggatctcctgagcccaggaattccacgcaagcctgagcgacatagtgagaactcattgctactaaaaaaaaaaaaaaaatgaaattagttgggcatggtarcgtgtgtctatagtcccagctactctggagactgaggtgggaggatcacttgaactcgagaggttgaggctgcagtccaacctgggcaacagagcagcaagacactgtctaaaaaaataaataaataaaaagaattgcctaaggaaggctaaatgtcacacacaaactatttttgcgacctaaaaaaaaaagagagagagagaaagatgttagccataggcaagaaaggaagaaaaggggaagggaagagaaaaaggagggaaggggaaagagaggggatggaaaagtccaagtatccatgaaactgagagatggatatttgtggggaattaggaaaaaaaaaaattgcccaaatcttgtctctgtttttcagtgaaggagactgatctttg

SEQ ID NO: 308368 - DNA, 600 bp, Homo sapiens
ctggtctcaaactcctagtctcaagttacccacctgcctcggcctcccaaagtgatgggattacaggcgtgagtcaccatgcccgaccacctactatttctgcaaagccccaatatctccttttctcaccctctgtaaggcrcctacctcctgtttctctgggggaaaacaaaaatagaaccaatgagaagagatgtttctcttctcccaacaaccaattctacccatttttgctgccttctcctgctgatctggaggaagaacttcctgtgcttctatgtaaggtccctctttccacttttgcactagattgtttgctctgtgacttactctgacatatgctctcctgtctctctcatagttctttctctcctcagtcaatccaatcatccatcatttcagcccacctaactatggaaactctgctgcttctcacacagcagcagccaagtccctacaataactacaagactcgacatgattcagcctcagtatttgcatgaccttagctcctcctccttctccactccttttcccctgtactccagccttgcacacagcatagcacacttccacctcagggcctttgcacttcttatt

SEQ ID NO: 308369 - DNA, 600 bp, Homo sapiens
ctggtctcaaactcctagtctcaagttacccacctgcctcggcctcccaaagtgatgggattacaggcgtgagtcaccatgcccgaccacctactatttctgcaaagccccaatatctccttttctcaccctctgtaaggcgcctacctcctgtttctctgggggaaaacaaaaatagaaccaatgagaagagatgtttctcttctcccaacaaccaattctacccatttttgctgccttctcctgctgatctggaggaagaacttcctgtgcttctatgtaaggtccctctttccacttttgcactagattgtttgctctgtgacttactctgacatatgctctcctgtctctctcatagttctttctctcctcagtcaatccaatcatccatcatttcagcccacctaactatggaaactctgctgcttctcacacagcagcagccaagtccctacaataactacaagactcgacatgattcagcctcagtatttgcatgaccttagctcctcctccttctccactccttttcccctgtactccagccttgcacamagcatagcacacttccacctcagggcctttgcacttcttatt

SEQ ID NO: 308370 - DNA, 566 bp, Homo sapiens
taataaaatataaataaataatcatatttcaaaaaattcagtcctaagaaatctcatttgcttataacattgmaaagttaaaaacaatcacattatctaaattgaataatcaattaaatcaattttgacctcattgtgtttcatgtataataacatcagataagaatattcaattgcatggaaaatgttaaggatgcaatagtaaatgaaaaagagcatggtcagatagatctttcacattctacattgttaaaagagaaaaattcagttatttaaatttatttagttggtacctcatagtgccaaactaaatttcactgtgggaaaattggaaacaaaaactattaaataactccaatctttgtatctaatcccttgtaaagaattctgaagcgggcctggtgcggtggctcacgcctataatcccagcactttgggaggccaaggcgggcaaatcacctgcggccaggagttcaagtctagcttggtcaacatggcgaaactctgtctccactaaaaaacaaaaattagctgggtgtgttgccacacacttttagtcccagata

SEQ ID NO: 308371 - DNA, 566 bp, Homo sapiens
taataaaatataaataaataatcatatttcaaaaaattcagtcctaagaaatctcatttgcttataacattgcaaagttaaaaacaatcacattatctaaattgaataatcaattaaatcaattttgacctcattgtgtttcatgtataataacatcagataagaatattcaattgcatggaaaatgttaaggatgcaatagtaaatgaaaaagagcatggtcagatagatctttcacattctacattgttaaaagagaaaaattcagttatttaaatttatttagttggtmcctcatagtgccaaactaaatttcactgtgggaaaattggaaacaaaaactattaaataactccaatctttgtatctaatcccttgtaaagaattctgaagcgggcctggtgcggtggctcacgcctataatcccagcactttgggaggccaaggcgggcaaatcacctgcggccaggagttcaagtctagcttggtcaacatggcgaaactctgtctccactaaaaaacaaaaattagctgggtgtgttgccacacacttttagtcccagata

SEQ ID NO: 308372 - DNA, 605 bp, Homo sapiens
gagggaggagaattgcttgaacttgggaggcagagatctcagtgaggcaagatcgtgccactctactccagcctgggcaacggagcaagactctgtctcaatctaaactaaactaaactaaactaaactaaactaaactaaactaaactaaactaaactaaaacaaaaaaaaaaatatgtgggtatcacaaacatactgagggattgatgctgtgaaattaggagacccttcggcagggaagaggacatataaagagagagaaatgatcaaaaagagcatttcttctatcacagacttctaatgctgtaggatcatgagctcaaaagtccaggaaccatcccgcaagtaaaatcaagtttgaatggcaggaatattcgtatacaaaacaggataaacaaaggccttgttcaattccctagccatatttctttttcttctcagataatgacagtgaatccgaataagatatcttaaataatatcacacaaacaatagcgatttttcccyttgttagcattctgtcagtcagttaggcatcttcaattaagatttagagagcttttctaatttttcatattaatcagtaagatgcttttcacagtgt

SEQ ID NO: 308373 - DNA, 644 bp, Homo sapiens
ttaatgtgatttgttaagatgcttataacctccttgcctaacactaaaatactgaacaaagtgayagggtacaggtttttctaccaagaagtagcacatttttgaaaacccaagcaaaatatgagaacaatgaaaattcagtgatttggataggatcacagagaaggtacgaaaattggtccactgaattccacacccaaaatatgatggaagaaatatcgtgacataaaaaaacatccttttttttttggcctactttgttaaacagagaagttttctgctattaacctgaggcaactgagtagagaaatgtaaattaaaaaaaaaaaaagtcctaaccttatacttagcctcccaatgagtcatgatgacctcttgctcaaacgtaggaagtggaaagataaaaagctgagaggcactatacatccaaattagcaaatggagctaacacgcaagagaaaatgttttgaaaaatctgattacagcttccagctgctttagctcatttcttcacttccttctgtcatatttttcagcacatagaaggtcaagattaaaccacttttatcaaataaacaaatcgtaagtaatatcagataatttactcattcagaatatctccaaaacagaaaacaaacatacaa

SEQ ID NO: 308374 - DNA, 603 bp, Homo sapiens
attagaaaaaagagcaagtcattgtgatatgcctcatttgtattattcaggcacaaaaacctaggagacaaatacacatttaggtatatgaccaaagaaaatttttctgaagtaaagaaagaattaattcttctgcttaaatgtgacctctgtgtctcaaggaaaaaactctacagaaaaccaatatcaagaaaaagtacaatgaagttaaatttcaaagaatcagaaaagacagtatggattcaggcaaaaagacaaggaaaagacagcaagctcatctcagatttctccagtgcaacattcaattgctagaagacactggaacaagaaataaattctgattaaaatgtatcacccaggaaaactcaatgcagaaacatttttatttaagtataaatgcaatgcttagtatgctaaaactcataagatacagaatttctcagacccttggaaaaataattttaagttaccacagatttcaaaaaastagaagagtgttaattaggcaatgaagaagtagcggttgcagggttgagagtgagttctgcattatttttgaaatctaacaaaataagataattctaactatggaagcttgtgttg

SEQ ID NO: 308375 - DNA, 620 bp, Homo sapiens
aaattagtggaatatctgctctgaaaacttgctttaatgtaggggaaccaggcaataacaaaataaaaatataaatatataatatgtcctgtagttacatgtgttatgaataaaataaaacagactgtggagagtagagaacactggggcccagaagaggagttgctattttatggtagaggaaagctctctttaaatgtcaacaggaagctaaagtaaatgaagaaccacactatgtggataaccaggataagaatactccagtcagaaagggtagcaaattcgtaagttctgaaattggagattacttagagttgcaataaacaccatggaggccattaygggcctatcacaataaatgaagagaaagatagtggcttgaacatcaattattgtgatcctgccttaatgtctataaacaagatgactgttaatacattgagcctgtgttgagctttgctttttatgatcacatagttcaggatgtatatcttcattgggagcatctatcatatcaacttgctgtccattgatcttgaaagatgaagcattgtttttgggtgtctaattttgttttgaagttgattaaacaaattagcaaaattttggtaaataattct

SEQ ID NO: 308376 - DNA, 601 bp, Homo sapiens
atttcattaaatgccttgaatcagtaagtctcccagcctttgctgaggggttctggatgtgtgctaaagcattcctttgatgttttgcaattttacagctctgtcttaacctttatttcctgcatgcaaagatccttaaaaatcaatcggaagtaaggaattaggccttctcaactctcttttggctgtgcacacagttctgtgtatatgtgtggcataatagataaatatgttggagtttttaaagccccctgtggacatcttattttccagttctttcttttcagagttttagctctgcctcttgttttytccagctggtattgccactttaggaagataagacattaaaaatcactgattatttgcaaaacatcaccgaaagaaacatatgagttcaggtatctttttttatgtaattatttatttttctttgggtatatacccagtagtaggattgctggattgaatggtagttctatttttagctctctgagtaatatccatactgttttccatagtatattagtcagacagtggtcacactaaaatcccagactttacactctgcaatacagccaggtgacaaaaccatatttgt

SEQ ID NO: 308377 - DNA, 501 bp, Homo sapiens
acctcaaagcatacagtctgtaattccatgtagatatgaattagttccctgtgtcattttatgtgtctgggaactaaatcacatctacatggaattacagaaccattatttttttgtgacaattcacactccagaagacaaagctctgycctggcacaaggtgaatgaaattgttgcctagtcaaaacaagaccgaatacaaggcagaaaacagatatcactcatgagcaatcaattacagcacattcttgctaaattctgaaaggaagtctttcttggtgctttttcatagctctgttttactcattgaaaatataaatgaatttcaatacattaatttatggaaaatttaatcacaaaaaatgtcaataatcgtaagaagagaaccaagtccaagattctaacatagctcggttatacacagttgacattggggagatcacctaccactttggtcttggtgggctaaatgttcatgtttctgaaatgatgaagtgagta

SEQ ID NO: 308378 - DNA, 528 bp, Homo sapiens
cacttccgtggtgtaagaaattagtttgttactcagtaaaatgtcagcctatataaattccatctcatgtaattgggagctcagatgtataatttcctcagcctttggccacctttgcttaacagcccttgaagaagacagtgcttagttctttatatttaattctggctgctccaaaatataggcaagtagctagtygctcagaaataggctggtctagattctggcaggaactatggttcaactctttaaagaagtccaagaaagctcttgtgtttgggtaaataaaccaaattggaaaagaacactacagtttgatagaaagagagatgcttcttgccagggaaacctgcttatctcatgcaaaagagagaatatagtttgttcttcttcatatattaattaatatttattttaaaatggtatttctaaatatacttatatccagctacagtcaacattattacagtttaccaaacttgctctgctcttagatgctgaactaagtttgaacacatgctatgtaat

SEQ ID NO: 308379 - DNA, 528 bp, Homo sapiens
cacttccgtggtgtaagaaattagtttgttactcagtaaaatgtcagcctatataaattccatctcatgtaattgggagctcagatgtataatttcctcagcctttggccacctttgcttaacagcccttgaagaagacagtgcttagttctttatatttaattctggctgctccaaaatataggcaagtagctagttgctcagaaataggctggtctagattctggcaggaactatggttcaactctttaaagaagtccaagaaagctcttgtgtttgggtaaataaaccaaattggaaaagaacactacagtttgatagaaagagagatgcttcttgccagggaaacctgcttatctcatgcaaaagagagaatatagtttgttcttcttcatatattaattaatatttattttaaaatggtatttctaaatatacttatatccagctacagtcaacattattacagtttaccaaayttgctctgctcttagatgctgaactaagtttgaacacatgctatgtaat

SEQ ID NO: 308380 - DNA, 632 bp, Homo sapiens
aaagtataaagaatgggaatgtcgaggatcagtgtctgactttgtcagagttaatgatggggctatatctaagtttcatctaaattgtgcaggggaaggatgtttctttgcattatgctgtttcctagaacacaaagaacagaggatttcttcagctgcccctgtttcccagaatggcagtgatcaggtaaaatttaaaattgtcacaacatctaattgccagtgccataaaattgtggaagttcctttgttccagtggtcctacaagattaaggatatctgatatacagaagcaacacctgaagaagcatgcctaaattggttcttcagacttgtaataaatktgaaatgagagtacaatatagctttgttcttctaagtcactaaaattttagatctttcttgttatcactaggtttatgttgccaggcttatggaacctcacataatataactcagttactctgttctaactcttaaagtcagttagggagcaatcaagggacttattagttaatactattactgctatgattaggataactattttacatttactcattgattgatcattctactcaatctccttattattgaatcatattttatatgtttataaaaccaaaaaaaag

SEQ ID NO: 308381 - DNA, 566 bp, Homo sapiens
atcaagggacttattagttaatactattactgctatgattaggataactattttacatttactcattgattgatcattctactcaatctccttattmttgaatcatattttatatgtttataaaaccaaaaaaaagcttctgcaaacttacatatatgtatataggtgtatatatacacctatatacacatatatatatacatatatatttatgaagattgtataaatgaaaaactctgagaaataatacagttataaatagtttatttgaataagatgcaattcattaattgggaaacaccaagctgaaagaagattagtattcccttgacaaagcatcagaggcaagtatttattgggtgaatgagaaagcaaaataaagaaattatttgattggttgcaattacaaaattgttattttgggttctcctttttgaaaagtctatggtcacataatcatgttagttgacttcttatgattcgctgaggttaagttttgtttctgtctaaagtaagcatttaccaggaatgccctataaagttttgctcatgttctcagtttaagc

SEQ ID NO: 308382 - DNA, 568 bp, Homo sapiens
gttgaggggagattttgcttttaattatatattaccaacactacacaaaactaaacattatttcttgtgcaaaagcttctatctttgactatttttatctgttgcacgtgttgattggttgaatttcattattgagcagaaccaccattcctcctgaccccccttcactcagccaaaaggatcaataactactytactcttaaacccttaaattgaaattttccttggtattttctatataatttattcactcctaagcttgtttgtttgtttttcccagacttgtaaagatggtactcgatctttcttatttttttttaatttttcttaattttgaagacatttcttctcagccaaatatgagtgaccaatggcctgtgatacagttccaggacatcttgagaacaagtgccaaggctacagcttgtttttttttttatgttttaaagagacataatacatcaatcaatacatgtaagatgtatatgggttttgtccagaaaggtgagacgacttgaagtgggggcttccaggtcatcagtggattcaaatattttcttattagcaa

SEQ ID NO: 308383 - DNA, 630 bp, Homo sapiens
ccatcattctattttctatcaccgtgaggtttttcttctgttttgttttgttttgtttttattcatgaaaagatgagatatttgtctttgtatgcctgacttacttcacttttatctatgctgttgaaaatgacaggattttgttttttatggctgaataatagttcattgtgcatatgtagcacattttctttagctttggatttatttattctgaatatttcatataaatgaactcataaaatgtgtgwctttttgtgtttcgcttctttcttctttcacttagcatagtgtttcaaagtttgtcaacattttagaagtgccaatacttcactctttttgttgattaatattccattatatttgaaatttatccaaaatgtctccaaaatgtacttatttgtttatggacatttgggttatttctacttattggctcttgaggttaatgctgcttatgaacatatgtgtatgtgattgtttaaatacctgttttcacttagtttgaatgtatatttaggagagtaattggaattctatacttaactttcttgaggaacttctaaactgtttttcacagcagatgaatcattttagatttttaccagcaatctgtaagcatttttattt

SEQ ID NO: 308384 - DNA, 518 bp, Homo sapiens
cctctgttggatcaagcttttcttaaaatgttaattttctcttagtaaaattaggtttgatttttaattctgaaatctaatgtcttcacaatcatcctgtacagtaaaaacagtttctatttctgccatatttattccggatttctatctaatattcctaatttcaggttgaaagtgcagctctccttccttctattcttgaaaagacctatgtatatttttccttggctggtgtgrtaaccctctcatttaaccttttcattagctgctgtgactttttcttcaattctaactctgcttttattgcttaatgctaacatgttcatcttgaaggtcgagaaaggcaatgtttcctccagtaaaacttgattctgtactgctgacatttcttgatgtgtctaaattattccctgtaccaagaaatttattatgctattgataaaaactatgtattctcatcagctaaaggtgttattttcttgtttacattcctctttaatcataatcctataaggata

SEQ ID NO: 308385 - DNA, 599 bp, Homo sapiens
ttttttttttttttttatctgttctgacaaccttgattgttgtttgtatctgttctgacaatctttatcttttcattagtttatgtcacatgcatttagtatatttattaatatatttgtttttaggtttatcttttattatttctgtgtttttaaactctatttttggtttctctgtttactcttttctgtttcttttggctacttgacatattttaatatttcattttaatttatccatttattgattaaatatcttcatataattttattgctcactttagacattacaatatacagaacctcctcaattaatgttctcaacaggttcttggaaactgcaattttaagcaaaacaacatataacaaaaccaggttcactataggctaattgatataagccagagataagttcctatagcatatttctggttacaaaaacatcaccaaacttctmaataagcattttgatgttaaatattgaaataatttgagctatatttacatttaagaaagattaataaaagcaagtaaaattgcttactcaatttttggtgaatcattgaatgacagaagttgtagtgatggtgggttaaatc

SEQ ID NO: 308386 - DNA, 529 bp, Homo sapiens
gaacagtttagtcagtcctaatgagggtaagatcaaggctgagatgaaaacctattttaaagtgtttagagcatgcttcatatcattattccagcatagagatgttccccagttcccttgagggcctcatataaaggttttgctactactctgaaggaaagaatctatatattcgaaaacctggccatattcaaaaaggactgaagctattgtttatttactgggtgatatggtttggctctgtatcttcccatccccccaaatataatgttgaattgtaatcctcactgttggaaaagggwcctgatgggagatgattggatctggggctggtttcctccttgctgttcttatgatagtgagttctcatgatatctgcttgattataatccaagaatagagttagatgtgcttatttttgcccttgccctgttctgcaggactcccttgtcaggtaggttggtgaggttgtagctgtaatagtctagaaggaagacgtaccttccccaccatgagggagaaaggaaca

SEQ ID NO: 308387 - DNA, 594 bp, Homo sapiens
tggttactgaaaatgttaaaggctacatttaataaagtaggaaggggagattgtgggccttgctctaacttttggaggttttatccaatatctggggaagcctaacttcttataaaatatatggctcaatggaaaggctctcagggctttcagagcctaaatttgtgtatttatgcatgtcctccccaagtctagcttggaaaagagcaaggctctcatatggctcctgagtgattattctaatttagaaaaattaatgggttttattaccgcctttttcattcctttcaacaaacaagttatcatatcatcttatctgccctgcctctgtttggattggcattgagaggcgacagcatgctgcagccctcacttgctctcagcacctcctyggcctgggtgcccactctggccatgcttgaggggcctttcagcccgcggctgcacagtgggagcccttctctgggctggcggaggcctgagccggctccctcagcttggtttgtaaatgtaccaatcagcgctctgtgtttagctgatttggtggggacttggagaacctttatttctagctaagggattgtgaatgcacca

SEQ ID NO: 308388 - DNA, 594 bp, Homo sapiens
tggttactgaaaatgttaaaggctacatttaataaagtaggaaggggagattgtgggccttgctctaacttttggaggttttatccaatatctggggaagcctaacttcttataaaatatatggctcaatggaaaggctctcagggctttcagagcctaaatttgtgtatttatgcatgtcctccccaagtctagcttggaaaagagcaaggctctcatatggctcctgagtgattattctaatttagaaaaattaatgggttttattaccgcctttttcattcctttcaacaaacaagttatcatatcatcttatctgccctgcctctgtttggattggcattgagaggcgacagcatgctgcagccctcacttgctctcagcacctccttggcctgggtgcccactctggccrtgcttgaggggcctttcagcccgcggctgcacagtgggagcccttctctgggctggcggaggcctgagccggctccctcagcttggtttgtaaatgtaccaatcagcgctctgtgtttagctgatttggtggggacttggagaacctttatttctagctaagggattgtgaatgcacca

SEQ ID NO: 308389 - DNA, 594 bp, Homo sapiens
tggttactgaaaatgttaaaggctacatttaataaagtaggaaggggagattgtgggccttgctctaacttttggaggttttatccaatatctggggaagcctaacttcttataaaatatatggctcaatggaaaggctctcagggctttcagagcctaaatttgtgtatttatgcatgtcctccccaagtctagcttggaaaagagcaaggctctcatatggctcctgagtgattattctaatttagaaaaattaatgggttttattaccgcctttttcattcctttcaacaaacaagttatcatatcatcttatctgccctgcctctgtttggattggcattgagaggcgacagcatgctgcagccctcacttgctctcagcacctccttggcctgggtgcccactctggccatgcttgaggggccyttcagcccgcggctgcacagtgggagcccttctctgggctggcggaggcctgagccggctccctcagcttggtttgtaaatgtaccaatcagcgctctgtgtttagctgatttggtggggacttggagaacctttatttctagctaagggattgtgaatgcacca

SEQ ID NO: 308390 - DNA, 568 bp, Homo sapiens
tataaacaatgccaacttcctcatcaattaaaactattaatagttctttttactcttatttacattttatttttcaatttaaacactatgatggtatttttaayttacctgaaatgtattgtctgcttttatataaaatccctggtagactttgagagttgaagaaattttgaaaaatgctagggataatatctgatcaagaaataattataagatgaagatgaatgaaatagacataaacatatttgcaggctgagagaaatttgtcattaaaaaatagccagctgtgggctgggttgcagacagagataagagagatgagtgttggggcaatcccatgagaggctgtgttgttcataactggcttaagggatttcttcccctgaaattaaaattaaccacagacaataatggaaatgcatatgttgagaggtttctttgttgatttaatattctgttaggttgtgctctgagttaaggataagtgttagaatagagcaaggtacaagagctgtggatatttggaaaagatgagaaaactgggatatggagctgtttaagaacaaag

SEQ ID NO: 308391 - DNA, 568 bp, Homo sapiens
tataaacaatgccaacttcctcatcaattaaaactattaatagttctttttactcttatttacattttatttttcaatttaaacactatgatggtatttttaacttacctgaaatgtattgtctgcttttatataaaatccctggtagactttgagagttgaagaaattttgaaaaatgctagggataatatctgatcaagaaataattataagatgaagatgaatgaaatagacataaacatatttgcaggctgagagaaatttgtcattaaaaaatagccagctgtgggctgggytgcagacagagataagagagatgagtgttggggcaatcccatgagaggctgtgttgttcataactggcttaagggatttcttcccctgaaattaaaattaaccacagacaataatggaaatgcatatgttgagaggtttctttgttgatttaatattctgttaggttgtgctctgagttaaggataagtgttagaatagagcaaggtacaagagctgtggatatttggaaaagatgagaaaactgggatatggagctgtttaagaacaaag

SEQ ID NO: 308392 - DNA, 519 bp, Homo sapiens
gggcttcaatggcctgcctaggccaatcaggactcagctctaccaaccaatcagaacttcgcagatttgaatatttatttgcataaatgaacttgatagggtacaagtctcattttttctctgagacaaacctttagtatacacgaaaggctgcatataaccagtttgtaagctgctcacaggaataaagtctttcttccaaattccttttcagagaacgtttgttcacacaaccatattgaatataaacctagaattctatgtactctatgaagtattttatttytactagccataatagtatattattgctgtaatttgccagtgtttctgtatatggtgtttaagagaatgaggttacttaccaagtacttaattttttttttacatacaactttgaaagtaagtgcagatacaaaacagcctcaagctatttatattttattattttatccaaatcttttacaattaaaatgtgtaatgtgtgatgtcaaggtagattgagaattcatttagtta

SEQ ID NO: 308393 - DNA, 552 bp, Homo sapiens
atttttacttactttattgtatttcttttgagaaccatttttacacattttgatataacactagcaggagaataaagaaaagaaagcaggggatgaggtggaaagagtgtgagcctgtattctgagctttggtgaccagttagacctagattaggatcccactatcttctggattttttactttgggcctacatttatttaatttatgcaattaaattatttatttatctaatttatttaacttctctgagcctcagattcatctaaaatggagggatattagaaccaatctcaatggagaaaatatggtaagagatcagctaatctttctttcttccttcctgatattcccatcaatatatattgtgaatgtgcatgtgtgtgtaaatatgtgtgttatacatgaaactgtgcatatatatagatatacatatattatatatagattatatgtacatacatacatacacacaacctctccctgctctccacccacaaagttctggcatcaaagtcttattcaaaaagycttcactcaccaatttccaaaga

SEQ ID NO: 308394 - DNA, 447 bp, Homo sapiens
acagagtataaaagggcctccctctgtcccatgcattccccctgagcagctgggcataccacatggaagcaccagacactacttgcaaacattttttactgcatagtagctgaagagaaggttgctgatgaaataaagaagaatgaaagtggcaaaaatgatgcactgggctcttgattcaagcaagagaaatgyttctcggcactaacacactcaactttggttctagttctaagtattttgaaatgaaacaaacctctactcctatgatctgaaaaaataattttcctcctaatgatacagagcaacaaaaaagcctgttttgcccactatattgtgagcatgtgtgtatagttgtaagtatatgtgtttgagaaagaagaggctaataaaaagaagaggatttagttcaaataattcaatagctataaaagtcgtaagacaata

SEQ ID NO: 308395 - DNA, 608 bp, Homo sapiens
cactggtgtcctggtatagttactagaaagatcaggtttaagccatattttacattaaaagcaataattactgtggtgtgcataagtcagcaaaattcccttttccaaaaatgaaaatttccagaaatcatgacaaagtatagtcctgaaattaaaatatttctaagtatcatatcatttcatatcgtatgtaaatataattttaataagcctctgcccactatacaaatatgtacyaaattcctcaagtcaaattacacttcagaagtgttgcctaaattactacttgaagaagaaatttttaaatcatcttaaaaatttcacttttgccattaagccaccagaaacaacagaaaaaaaaccctgtaataatattacatggatgagaatattatactacatctgcacttctaggttcataagaaagaagagaggaactggtatctctcaagaaacgaaactaaagaagttacagatgtatacttttgtatgagtgataaatactcatataatgattgaaggggggaaataaagagtacagctacaagcattccatccattatgtataatttttattgatataaatatatatttgaattttaagactt

SEQ ID NO: 308396 - DNA, 592 bp, Homo sapiens
ccagcagtagtagcagggccactatatgtacccaatgaggaaaagagagtcaaaggctccaaatatgcttcctattgttgctgagtttggtccagggactgataggtttgctgcaggtgggagtagattcagcacacttttgttcaggcagaagcagaggagggaaggaagatgtggcaaatgccttctctttataaactggagggattatagtggtgcctatacaactcttgtttcaaaatcaacgctttaagaactttaaaagaaatacttcttctgagcctggccaacatagtgaaaccccgtctctactaaaaatacaaaaaaaaattagctgggcatggtagcgggcgcctgtaatcccagctactagggaggctgaggcaaggagaattgcttgaacctgggaggcggaggttgcagtgagccaagatgacgccattgcactccagccygggtgacagtgcgagactctgtccaaaaaaaaaaaaaaaaaattcctcttcggtggctttccaaatctatggaaaccgtactgcttcctgttaattcctattcctctccataaatgcttgtaatatttttaatagta

SEQ ID NO: 308397 - DNA, 512 bp, Homo sapiens
gacaacattactgaaataaatgaatagtcttctaaagtgtctaccttaaagaggatgacatgcctttagatatgtatttctgaaatattttctggtgggacaaaaatatctattatattatcactataagtgaacaaacgttatgaatacaaggaagcagtatagcatcatagctaagggtagagtattggaaacaaacacattggttttatgtcgtttggcacttaggaactatgtggccctgggcaggtcatgtcarcactcacagctttagtgtgtaaaatcttaaaatggggacaataatagtacatgtctaaaaggttgttctttgaataaaaggaaacaaaagtttataaagcaattaatacagagcctgacaaatagtatgtggccattaaatgttaggtacttcaaatattcatttcaacccacattctaataagatagtattatttttgcatatatactccagatatcattgtattatgactaagaacattactgatttaaaa

SEQ ID NO: 308398 - DNA, 542 bp, Homo sapiens
taaatacatgctgcctattagggacataaaacagctacagttaaatgtcactttcacaaatgtattcacaaacaaggagcagggttgtcataaaatgacctgcagaaattgcaaacacaaagaggtcagtcgtatttaatctgctgctgctttgaatttgccattaaacaaaatgtttttcctctcaggcaaaggagcgataccagcagggaaatggaggagtgacggaaagaaccagactcctctctgaggtacacactgatgctcttgccctgcttctcacctgtcagctgggccccagccattgagaacctacaratggtttaacactgctaatttcagttgcttcctgtgcctttaaatcattttctttaggagataatccctaattttcctatgactgaatcaataattgatacatttcttgtttccacaggatgcctgaagtttctgtattaaattcaacataaaacctgctcataatattagcacacttataattttcctcaacattttttacataataattattattaacatgg

SEQ ID NO: 308399 - DNA, 615 bp, Homo sapiens
taagttatttgctgattttcctagagagatatattgcactttgacggcctactgtaggctctacagtaatttccttggcagctgaaccagcagaaaaaaaaatatgcaataaacagatttccaaaacagtaagcttttgcccaggatctttaatcttgaccctttycagtacattccaggaagaaaacacagggagaatatgtgcttcattataaagtagggaaataggagtctgataggtcattaaagaccataaattcctatttcatcttcctttccagagctcagttcattgcacttttattcccgtccagcaaccacagacttcagaacctgctagggacaaaactggaaaagggaaaacacttctttggttgttttttgaaaaattagctatagaatacttatgtcaattcctttgactagaataaggattttaaaactcatcaagtttaaatatgttcttcatctttagctaatgagcaagtgacttagaaaggcaacagctggagaagtgagatacaaattttgtctgacaataaaatgtggttatcttttatttagctaactggtgttaatgacccagtagcagccaatgccaaaaagaggcaattg

SEQ ID NO: 308400 - DNA, 560 bp, Homo sapiens
aacctctccatgcttcacttttgtgatctataaaagggaataatattacctacctcaatgggctattgtaagaattcaatggattgaggtatctagagccttagaatagtgtctaacatacagtaaacactatataagtgttttctgttaattagattagaatcttggctaggctacttattgtgatgccttgggcaagttgtttaacctctgttaagcctccattttctcagtggcaaacagtattattgtgtcaattgagtaatataatacataaggcatgtattacagtatctagtacatagtgaatcattagctattatgttaacacatacttagtggcagtctagtgtatcttcctcttccacaacatgcttttattaaaggtgaactagttccaaagtctctattgctttcccatgccatcaaatctacaatctttrttctaaccaaagtttccaaatttatttcccttattcactaataaaaactctaccataggacatcttttcataggctatacactccaagctcgttatcacatcttcactttaatattt

SEQ ID NO: 308401 - DNA, 574 bp, Homo sapiens
tcactttaatatttactctcatattgcccttcccttctccctgaatatccaaatcccatccagtctttaagaccaaagttccagaaagttctttaaaattatcccaatcttgtatgctttttgtttctctgagttcagtgtgtaaaggggacagttccagtgatttagattgatgtcctatctctctcactatgaaactgtgtggcctagagcatgtcactttgccttctggtcacagttccctcaaatacaaaatgattgggtttaaatagatgatttytaagagccctatcaccacatcattctgagacctattgcactcatattcacagtgcaatgcttattatagatgcttaataaatatctcatgcttgaaccttccagagctgaacatatatggatcagtctgtgggtccctttgctactgcctctccttcttaatctccatcacatgttcccatttctctattactccaccctttaaatgttagtatttccgaaaattctgctctctaccctcttctcactctcatatttctaggcaaactcattattatccacctgataatgattc

SEQ ID NO: 308402 - DNA, 599 bp, Homo sapiens
gtttccagcatagtacccaaagactagtagaaatttaataagaaaactttattaaactcattcaattcaaaaattgttgagttaatctctatgctgaaattaaacacatctcttcattcttggatactttcaatgcatctagacactgtgccaccagctcctctcaaatccccccttagttccttccaatttctgtaccttctcaaagctagtatttccaaaagccatcatactccttggtgtatatattatgttcttgtggctttcgtagggtatgactcccaggtacaacttgttctcttctgttcaaaatgaaactgatgccaaaatgcaacaacaacaattagtgaatctcattaatagatttcttttcccacatctcccaagagtcmacttatctttatctcaactgtaatttatatataaaaatcatatgataaatgtcctgtttcttcatattattggtaacacaaatgatgactaaatgtgtatgcacatgaatatgtgtggagagggggcacccaggcaaaatgaagaaattgtaggcaaggcttccaggagtaataaaaaaattcctcttatctgcttgtggctttcct

SEQ ID NO: 308403 - DNA, 602 bp, Homo sapiens
tctaccatataacactcctggtgctaagttttctcrtttttcttttttcttctgtcctttgacataactagaacctggcacatggtagtacttactgaaaaagtgaattgcagacattttcttgttctcacttggccttgccttagtgtgtttctctgccattcactgttccaacatactaactcatggcaggaggctaaagttaaggatattttatcagattctggttgtttatggtcctcactctcttatcccttcctggaactatgaaaataaattaatagactattctgtttcttccttgtcctaaatttaatgcaaggattctgtgcaattatatataatagagttttcaagtctttcaatttttacatacaactgtaataattgttccttgcttggaaaaatcaaaactttaagttcaggatgatggatagcaacttcatcaaactagaaatctgtggaaatttccaaatttttacccagacattcttgcttataattacaactagctgcatcttatatccttcaaaacagaaagaattaggttcagaatattaagatatccatataggtcagaatatttttatttctttgaagac

SEQ ID NO: 308404 - DNA, 447 bp, Homo sapiens
cactttgccctggtaagtaattcttttaatttgccattggatttgttttgctaatattttgttgaagatttttatatctatatttatatgggatagtggactgtagctttcttttcctgtgatatctttatctggttttggtatcaagataatgttagccttataaaatgaattagaagtactccctccccttcattttttttttgtaagagtttgaaaaggattggtattaattcttctttaaacatttggcagaatccgttggtaaagccatctaggccagagcttttccttactgggaggtctttgatcattgattcattgtctttacttgttatgggtctgttgaggttttctatttcttcttgagttgggtaatwttcatgttttaaggaatttgtccatttctcctaggtgttgaattggttaatgtacaattgttatgac

SEQ ID NO: 308405 - DNA, 519 bp, Homo sapiens
tttggcagtatagtcatttttaaaatattgatcctacccaaccatgagcatgggatgtgtttccatttgtttatataatctatgatttctttcagcagtgttttgtagttttcttgtagaggtctttcacatctttagttaggtatattcctaagtattttattttattgcagctattgtgaaaggggttgagttcttgatttgattytcagcttggtcactgttggtgtatagcagagccactaagttgtgtacattaattttgtatcctgaaactttgctgaattcatttaccagttctaggagctttttggattagtctttaggactttctaggtatacaatcatatcatgagcaaacagcgacactttgacttcctttttaccgatttggatgcccctattttctgtctgttgtctcattgctcttgctaggacttccagtactatgttgaatagaagtggttaaagtgggtatccttgtcttgttccagcttttagggagaatgctttcaactc

SEQ ID NO: 308406 - DNA, 519 bp, Homo sapiens
tttggcagtatagtcatttttaaaatattgatcctacccaaccatgagcatgggatgtgtttccatttgtttatataatctatgatttctttcagcagtgttttgtagttttcttgtagaggtctttcacatctttagttaggtatattcctaagtattttattttattgcagctattgtgaaaggggttgagttcttgatttgattctcagcttggtcactgttggtgtatagcagagccactaagttgtgtacattaattttgtatcctgaaactttgctgaattcatttaccagttctaggagctttttggattagtctttaggactttctaggtatacaatcatatcatgagcaaacagygacactttgacttcctttttaccgatttggatgcccctattttctgtctgttgtctcattgctcttgctaggacttccagtactatgttgaatagaagtggttaaagtgggtatccttgtcttgttccagcttttagggagaatgctttcaactc

SEQ ID NO: 308407 - DNA, 506 bp, Homo sapiens
gtcctcggtttttctgttgggtgcyccagccatttccaaaagacaataaatggaaggtgcagctcttaaaattagaggtcaattagatacttaatgatgaaacatatctccaatatatatctattattattatgctagcaaaaaattaattaactaggtcaagcaggtcatgaaggctaatgtacaaagcaattatttctgatctttagacaactacttcacataaaaaggtagtcctttattctgctcagcagatacctgaaatgcctgtagttaatcatattgaaggaaacaaaaggtaaggtctatctccttaaaaggtgagaggacatctcaagttattatgtttaattgtttaaggacaatcacttccttgctgataatattagcatctttctggttaccaaaaaggaagaaaggataacacacatttaatgatgctctaccacgtgggaaacatacagactcacaaaatatataaatagcacacaggaatatattataat

SEQ ID NO: 308408 - DNA, 601 bp, Homo sapiens
atctttatctcttttttaaggtaaaacttaaatacaaacataccctctttctgtcctcaactttagcctaaatatgttttcttaaacataaacctacatcatgtaaagaggatgaaagcaaatctcacttctggcaaaattgatacaaaattttattttctgawaattgcctctcttcctcttttttttcccacttcccatcacaactttatatgctgtgacatacattaaaatcttctattattcttttttaatgtgaaaatagtaacttctccactcatattcctcaaaatatacagagctttacaaagatagcttttaacaaaatataaattgaattattttcccaagggttaaggtactagttttaaaaagcatacaagtgagcagactaaatagaatgtaacagtatgtaaaaaggataagacatcatgaccaagtgaggtttattgtgggaacgcaaggttggtttcaactttgaaaatcaatcaatataattcatcataataagagaataaaggagcaaaaacataaggtcatttcaataggtgcagagtaacacttgaaaaaatttaacacttattcatgatttaaaaaaata

SEQ ID NO: 308409 - DNA, 641 bp, Homo sapiens
gatttaaaaaaataactttcagcaaatttaaatagaaggaagcttcctcaatctgattaaaagtatatttgaaacacctacagctaatatcataatcaataatagtgaaargatccttgctttctacctaagatcagacaaaataggcaataatgtctactctcaccacttctaatcaatattgtactggatttcctcatcagtccaataagcaaagggaaataaataaaatgcacacagtgtggaaagaagtgacatttattttatttgcaaaaaatataatcataatcatagaaaatctttaagaatttttttaaagtggccagaactaatagtaaattaagcagtcacaacataaaaggccaataacaaaaataaattggctttctatatattagtaataaacaattagaaaaaaattataactccatttacattagcataaaaataaaatagaaaattttaaccaaagtttataagacctctacactaaaagctatgaaacattataaggataatgtacaacatgaggactatagttaatattgtattgtacactgaaaatttgctaagagagtagagtgtaagtgttcttaccacccaaaaaaggtaactataaaaggtgatgggtaggttaattt

SEQ ID NO: 308410 - DNA, 554 bp, Homo sapiens
gggtgtcattaaaatcgtaaactttgctctttagaagacatggttaaamagctaagccacaaagtaagagaaaatatctgccaaaaagaaaaaaaaataaaggacttgtattcagaataattaagaaaaactggtacaactcaataataagtcaaataaatttataaaactggaatcaaagagttgaatagacaattcacaaaagaaaatatatgagtggccaataagtatatgacaggatgctcaacatcacccatcacccaagaaatgaaaatcaaaaccacaacaagatacccctaaaatccactagaatggtaaaaatttaaaggattaataatgccaagtgttggtgaggatgcagaacaactagaactttcatacattgctggttggaattaaaaatgatatagccactttcttttacagaaatttcttaaagaaacacaatttccataaagccctacaattaatccactcttagctacacaagaaaaatgaaaacatatgtctgcatagacttgcaatagtactcctaaaagccaatagctgaaatc

SEQ ID NO: 308411 - DNA, 505 bp, Homo sapiens
ccctacctcagatctactgattcaaagactcttgacggggagcagggggagacaaggaagcaatctgtgttttaacaagccctgtgaatgactgtgatccacactaaagtttgagatcactgtcctaaattaaattttagcctaaaatttaattagttggactgaattccagagttttctgattcagtaggtatggggtagagtttaagaatttgcttttttaaaaggttcccagatattgctgatgctgctggtctggtaccacactttgagaactactaggttaggtcatttccaagttctattccaactctatgtttctgtcattactcttgctttcacaatgtcctttgacctcctccttatttactttttctctcaagttattgaatagcctctgggctaatatttagtatttgaagtttctaacatagctttctttgcaragtgtgatgaacagaaatgaatttacctaaattcttacagcttatcttaatatgaaaca

SEQ ID NO: 308412 - DNA, 584 bp, Homo sapiens
gtaaaacttttcagtaacctcagtaagcagtcaattctactctagatttattgtctaaagtacttctgatgggtgggtctaacctactagagtataagttaattaattcagggaattttttgtctcttttgtttactgtggaatccttagcattgcctagcacagtatttggcaaaatggacgaattaatgcatttcatctttggtggacatctgggacccaagctcctttgaaaaccttttttttttccggaaaatatttggttgagtgctctgtctataagagacactcttttatgtcaacaacttttctagataggcttcttaagaaaaagtgcaggtatcaagtgaatcctaatggaggctaaagaaatataggtagattagggaaggatgccaaatataaaggcaattcctaatgcttagaaatctagcttgccattgtagtcwgtgaagcagaagtttatacccaccctcaaactaaaacattggataaactggattttcttttggaactttgctttttatttggttttaaagtaatacctgaaagttcagagagttggctcttctcacataagctct

SEQ ID NO: 308413 - DNA, 542 bp, Homo sapiens
acacaatcatatataagtaatacacactaaaartatttcattaaaatattctgaactgatttggttgctgttcacctggagttctcagtgccacaggaaaacatcagtgaagacaaccagtcagtataaacagcactggactaagaagtaaaatatattagaaaagaataaacaagtaagttataaagcagtagtaaaaacaataattaactgatataagaacacctcagggaacttcctccattcctgctttacaaataggagaaacagagagaactaaacgatcatgttatttaacacctactgagttcctacagagggatctacagaaaaatgtaggaagccacaggctaaaaatcttgacctgagcagtaggagctacactgaaaattctaataagggcagaacaagggaacacctggacagttatttaattaagggtctcagcatgagtcataaaagagatatcaggatgagaaattattccaagatttaattgtaaaggctgactgtcaaaaatgccagacattacaactcatcta

SEQ ID NO: 308414 - DNA, 597 bp, Homo sapiens
tctgtagttttctgaaaaagatgtagtcaatttatactacacaatcatatataagtaatacacactaaaaatatttcattaaaatattctgaactgatttggttgctrttcacctggagttctcagtgccacaggaaaacatcagtgaagacaaccagtcagtataaacagcactggactaagaagtaaaatatattagaaaagaataaacaagtaagttataaagcagtagtaaaaacaataattaactgatataagaacacctcagggaacttcctccattcctgctttacaaataggagaaacagagagaactaaacgatcatgttatttaacacctactgagttcctacagagggatctacagaaaaatgtaggaagccacaggctaaaaatcttgacctgagcagtaggagctacactgaaaattctaataagggcagaacaagggaacacctggacagttatttaattaagggtctcagcatgagtcataaaagagatatcaggatgagaaattattccaagatttaattgtaaaggctgactgtcaaaaatgccagacattacaactcatctatatttggactttttatt

SEQ ID NO: 308415 - DNA, 566 bp, Homo sapiens
caggggtacatctgcagagttttaaattccattttcaaggaggaaagtatctaagtataatcagacgagagtaataaaatacactgacctggatctgttgctgcaggagattaattttgtgctgctgttgcagaagttgctgctgttgtctcgcaatctatcagaaataaagtttcattaagttaaaatgaaatgcttacacctctgccattacctcaggtatttctcctggtattacaacaatcttttacygcacctctatgtgaaagagttcctataaaatgagagaggccaaatcagaaagatggatgaaaggaaaaatttttaaacaagtgccacctctctgctttatctgtaggaaaactaccccttctattatatttgtgagctattcacctatatctgcactggtcagctggaaatcatgggattttagaaatcgaatccttgtagaatagagatagaaaaatctctggctacatttttctaaatggcttaatttggatgtaaaaagtaaaatctgtaagcaaagacaggaaaaatcttcgtattattgcttaatatgg

SEQ ID NO: 308416 - DNA, 659 bp, Homo sapiens
ctcaaattctgaattttatttgccaataggttgagctacatgctcgcttcattgagcatgacaacctagttttaagtgtcatttaattttcattttgaaatataattacaaagtgttcactgtragatatcactcgtctgcaaatgtgtcaagattaatttgtgctagcttattcacaagtgtcaatagttaattactgtgtcatctctggatggctaaatgacattctaacttctgattttttacagtgttcctttatgttattttccattaggggctgagtccatattccctacatgtgggcaaatattcaagcatataaaataccagacatcacaactcattaaaatcaacagagcatatattgctctatatactcctataaaatacatttaactgaaaagataattccagtaataatgtcagattcctaaaaactgcacattaatttagatctgtctgatctaaagcatcagggactactctataggatcattgttagattaatgtactcttatgagacaagaaaaaacatttgggaaagtgatttatttttaaaagacatacatttaaactttgctattttttcttcattctcaattctaagtcaatcaggtcaaatacttttaggaacgatgtactaatttgtattcaatgac

SEQ ID NO: 308417 - DNA, 659 bp, Homo sapiens
ctcaaattctgaattttatttgccaataggttgagctacatgctcgcttcattgagcatgacaacctagttttaagtgtcatttaattttcattttgaaatataattacaaagtgttcactgtgagatatcactcgtctgcaaatgtgtcaagattaatttgtgctagcttattcacaagtgtcaatagttaattactgtgtcatctctggatggctaaatgacattctaacttctgattttttacagtgttcctttatgttattttccattaggggctgagtccatattccctacatgtgggcaaatattcaagcatataaaataccagacatcacaactcattaaaatcaacagagyatatattgctctatatactcctataaaatacatttaactgaaaagataattccagtaataatgtcagattcctaaaaactgcacattaatttagatctgtctgatctaaagcatcagggactactctataggatcattgttagattaatgtactcttatgagacaagaaaaaacatttgggaaagtgatttatttttaaaagacatacatttaaactttgctattttttcttcattctcaattctaagtcaatcaggtcaaatacttttaggaacgatgtactaatttgtattcaatgac

SEQ ID NO: 308418 - DNA, 585 bp, Homo sapiens
ctgatgagaaaacaaagaaattccagtattctgctgttttgaaaaaagtcattcagaatttagtcatattggttcagctgttgtaaccaaagactgataagataatagaggtctttgtggtggttttgtactgaaatcctttatctttatgatgcactagggccatttagtgtggaaagcttttaaaactgctattggattcagaactcaaattagctgctggtatgctgggacaggggttcctttctcaggcagtcaccacaaagtaacttttatcaggggaccttctgatagattgttagtctcttcagcttaccctgtttattttttgttgactttttgttgctatgttttgtgacatttaaaagaaggctktatccaaaacggccaatgctaaatgatggactgagcttgtgaagtggagacatcacagtccatcagatgtgtgaggaggctgcagtgtaaagatgcagcagttttcccaggttatctgtgggtagaaaagagcaatgcagctttcttttatgactagcattgttattttggctttcttctaaaacgatatccattaaaaaaattagaact

SEQ ID NO: 308419 - DNA, 585 bp, Homo sapiens
ctgatgagaaaacaaagaaattccagtattctgctgttttgaaaaaagtcattcagaatttagtcatattggttcagctgttgtaaccaaagactgataagataatagaggtctttgtggtggttttgtactgaaatcctttatctttatgatgcactagggccatttagtgtggaaagcttttaaaactgctattggattcagaactcaaattagctgctggtatgctgggacaggggttcctttctcaggcagtcaccacaaagtaacttttatcaggggaccttctgatagattgttagtctcttcagcttaccctgtttattttttgttgactttttgttgctatgttttgtgacatttaaaagaaggctgtatcyaaaacggccaatgctaaatgatggactgagcttgtgaagtggagacatcacagtccatcagatgtgtgaggaggctgcagtgtaaagatgcagcagttttcccaggttatctgtgggtagaaaagagcaatgcagctttcttttatgactagcattgttattttggctttcttctaaaacgatatccattaaaaaaattagaact

SEQ ID NO: 308420 - DNA, 566 bp, Homo sapiens
tttgggaactcttgtctttggtttgttgtgttgataattaaaccttgaaagtgttttgtctgaattcaaagtatattacctacaagaaatatattggccaaaaactcttacttgcaatatgaatcttcttgggagagtcttgtttgtttcattcatctccttgccatgtagaagagtgctgtaatgcttgagttactttttctccttccttttttttccctgccatgagtttgttaattcactctttgcttaaagaaaaatgtcagaaagctaaatttttataaaaatggtaacagttattgtttaactgaatttggttccaaagaaaagaaacctgaagggcaccaaacctatattcagttacattgggttgtagtgatttaatcacttgcctttggatttttgtggtcctcagaattcctaattgatgctcactttagtatttcagatttttctcctttctttgaaaccctgattgtactacctyttctgtggcttttattagtatttactaacagttacaactttactcagagattcctataaagcagtgcttgaaacatcca

SEQ ID NO: 308421 - DNA, 601 bp, Homo sapiens
aactagctacaaatacccatttaattaaaactgtttttgagaagtagaacaggattctcaaatggggttgctgatagcttgtaaaaatgtattcaatatgcctataaatttcttaaactgtagaaagtgagtcagctagccaaaatcttcttggctagtaagggtgtacaaaatacagagtgagaagactgagtaggaggcagatttaagaactgagaaacctgatatctggaccaactaatagtgacacagggtcattcttccaacttttgagattcaactaaagaatggcttkttttttatctaaagtataacttctgaaaacattctcctacaaaagctttggtggcattatggaaggtgaattaatttatcaatcatctgtgactccatggacagtcatttctttgggcaattaagaattagaacctgttttctgataccagtgtattgacatataatttaattttactggaagaaggtgatgttagaaagagttaatataataatataaattcttgtgaaatttttcctgtaaaattgcttagtttgtataatttatttggtcctgtagttgattctgccttctaaattatagttt

SEQ ID NO: 308422 - DNA, 601 bp, Homo sapiens
aactagctacaaatacccatttaattaaaactgtttttgagaagtagaacaggattctcaaatggggttgctgatagcttgtaaaaatgtattcaatatgcctataaatttcttaaactgtagaaagtgagtcagctagccaaaatcttcttggctagtaagggtgtacaaaatacagagtgagaagactgagtaggaggcagatttaagaactgagaaacctgatatctggaccaactaatagtgacacagggtcattcttccaacttttgagattcaactaaagaatggcttgttttttatctaaagtrtaacttctgaaaacattctcctacaaaagctttggtggcattatggaaggtgaattaatttatcaatcatctgtgactccatggacagtcatttctttgggcaattaagaattagaacctgttttctgataccagtgtattgacatataatttaattttactggaagaaggtgatgttagaaagagttaatataataatataaattcttgtgaaatttttcctgtaaaattgcttagtttgtataatttatttggtcctgtagttgattctgccttctaaattatagttt

SEQ ID NO: 308423 - DNA, 468 bp, Homo sapiens
ggaggtggaggttgcagtcagctgacatcaatgccattgcactccagcttgggcaaaaaagtgaaattttgtctcaaaaaaaaaaaaggaagaagagaaatagaaagataacaaagtgcaatagtttagccaacgaaggacaaaatttgttgaagaaagtcgcaggagatkgtcaacaacatacaaggttaaagcaagcaggagatgagagatgagagaaagccactggatctggtggaaaagcacattttgatctttgatgagcaggtagtttcagaagagttttaaagtcagatgaaagctggcagaaactgagatgatactgaatcaggatagaacttggaagtaaaagtacacaccaaatatttgaaaatcgtagcaactaaaacagaaagaatttatgggtgttaaaagaaatggaagctgaatcaagaaaaaaacttataattaggaaacagaaaaccttct

SEQ ID NO: 308424 - DNA, 548 bp, Homo sapiens
ctaaaaaaagccactttgtgattattctaacacagaagagagcacatcatcatgggataattaagccattaatagaaatacaggcagtttcttttaaaaattcattttgtgtctgttatttcctcaccataatcggttagtgtaacacttggaaagttgtccttaaagactttatttacagtaacattcaatacttggagctgagaagctgcacactcagcaataatgactacaatctatgcaaagtttgtctgccccctccctgttttttaaacaaatttctttgggtgacatctgagcattctaaactagcagtggctgaggttgcttcaggctaatgtattgttcttgtttgctcaaaataaactgasaatgtgactcgtaatatataaaaaaaagtcatatggatttgaatataaggcaactacttctgctttgttttttgagaaaaatttcaccttacgttgaagtatggggtaaaaataaacttagtttggatgcctcaaaaatgggcacaaaattactctaataaaattgttaactattaa

SEQ ID NO: 308425 - DNA, 523 bp, Homo sapiens
gtgactcgtaatatataaaaaaaagtcatatggatttgaatataaggcaactacttctgctttgttttttgagaaaaatttcaccttacgttgaagtatggggtaaaaataaacttagtttggatgcctcaaaaatgggcacaaaattactctaataaaattgttaactattaaattagaacttgaaggtatgattttaatctccttcagccatctgaactaagtgtagttgtcaaatgcaaatctgatttttcagaggtaaggtaaagagtaagggacagccccattcacaggaaaaaagttaagattttggtgaagtattgggcaaaggacttatacaaaaatgacctaatccrgggagaattatttaccaggtgacatcttgaagctggcaggagaaaaggcctagaatgcaaatatcagcaaaagatagcaaaggcgtcagttggaggaagacagattttgtgtgttttgtgtaagttggtattctcaatgcttacagctacacctggcttcctgatga

SEQ ID NO: 308426 - DNA, 677 bp, Homo sapiens
gtatgtcctgatttttttggacttaaaattgttttgaatcgtgtttcttccatttatgagtcatgtgactttgggcaagataagccttagttttcttatgaataaaatggaaattctaataattcatattcataaaggattttctgaaaagtaaattgtgtaacatctataaactgactactaactaatattaacattgagtatcatcagagtaaaagattcttgtgttcccaggaaaagactgtgttttggacatcctaacaagcaatcatcagaaacagctttaaacccttcttaatgacaaatgacaacttactttagaagctttaggagctgtatttctgaagcctggccaatgagttaagtctttggcttccaaacgtcagtcagtgagcaacaatctcacttcagtagcccagctcatggaagccagcagatagccagtctggctccagtaatccagtaagccaatctgacacrgctaaaggtcaaccaatccctagtcccacccaattctaaaaatctacccatgccggagcccacacctccataaacccagtaaaatgagttctctgctattctcagagagactgttttacaagcacatgtctccctcgcatagccagcaacaaactcagccttgttagtttgtttcagatattgaatagtgggtggct

SEQ ID NO: 308427 - DNA, 549 bp, Homo sapiens
gatagagtcaaccaactcagcaagttgcctgcctaatccacatctgaccacaaacaaataaatgagaccagtagataccagaaatactgtttagctgaccaagaaactcatgaacaataatacattcttactattttaagccactggattttggcatgatttattgtacggcagctgctaactaatgctctacaaaaaaaccagtgactttagaatgaggtttctatttcactcatccctttttatctgtatgatccctagtattttgtcttttacatcgtagttacttaataaataatagctcaattgatttcarctattaaaggatttgagcataggtctaataagataagaacagctttaaaatgagcaatagctttaagtctaaatgaagtcagaatttacattagttaaaaagaccagaggccactaaagagaccacgagttatgactttttttttttcttttttgagacagggcctcgccctgttgcctaggctggagtacagtggtgtgatcatgactcatggcaacctcgaactcctaggc

SEQ ID NO: 308428 - DNA, 549 bp, Homo sapiens
gatagagtcaaccaactcagcaagttgcctgcctaatccacatctgaccacaaacaaataaatgagaccagtagataccagaaatactgtttagctgaccaagaaactcatgaacaataatacattcttactattttaagccactggattttggcatgatttattgtacggcagctgctaactaatgctctacaaaaaaaccagtgactttagaatgaggtttctatttcactcatccctttttatctgtatgatccctagtattttgtcttttacatcgtagttacttaataaataatagctcaattgatttcaactattaaaggatttgagcataggtctaataagataagaacagctttaaaatgagcaatagctttaagtctaaatgaagtcagaatttacattagttaaaaagaccagaggccactaaagagaccacgagttatgactttttttttttcttttttgagacagggcctygccctgttgcctaggctggagtacagtggtgtgatcatgactcatggcaacctcgaactcctaggc

SEQ ID NO: 308429 - DNA, 511 bp, Homo sapiens
ttgcaggttaaatagttttatcaaactctatggagcttgatagctataagaaaatcctgtgttacttataaaaagcacacaaacacttcataacttaactctctaataagattcagatttttagttgtattttgttaaagtgggtcatcgacaaacacatgaagcgagaaaagctgattctttttccttttacttcaatagcttttggggttcaagtgggtttttgttacatggatagattgtatygtggtgaagtctggggtttcagtgtacccatcacccaaatggtgtgcattatacctaacaggtgattttttaatcctttgtttccctcccacactctctctttctgagtctgcaatgtccattacaccactgtgtatacctttgtgtgcccatagcttagctcctgtttgcaagtgagaacattctgtttctggttacttcacttaggaaaacctcctccatttccatccaagttgctgcaaaatacattatttcattctttttt

SEQ ID NO: 308430 - DNA, 376 bp, Homo sapiens
ttggtgttctctactctgttccactggtctaagtgtctacttttacacgagtccatgctgtttggttactacagccttgtagcaaacaaagttaggtaatgtgatgcctccaactttgttctttttgcttaggattgctttggctatttgggctcttgtttggtcccatatraattttaggattttttttttctaattctgtgaaaaatgacattcgtaatttgacaggaattgcattgaatctgtagattgtagtaatggtaattagaaaagctgattctaagggcatctgcctcttttggaatgaactccacaggtacaaagagtgcctctacccaacaggcagccactacctccaggtcattatcttctgggc

SEQ ID NO: 308431 - DNA, 376 bp, Homo sapiens
ttggtgttctctactctgttccactggtctaagtgtctacttttacacgagtccatgctgtttggttactacagccttgtagcaaacaaagttaggtaatgtgatgcctccaactttgttctttttgcttaggattgctttggctatttgggctcttgtttggtcccatataaattttaggaytttttttttctaattctgtgaaaaatgacattcgtaatttgacaggaattgcattgaatctgtagattgtagtaatggtaattagaaaagctgattctaagggcatctgcctcttttggaatgaactccacaggtacaaagagtgcctctacccaacaggcagccactacctccaggtcattatcttctgggc

SEQ ID NO: 308432 - DNA, 376 bp, Homo sapiens
ttggtgttctctactctgttccactggtctaagtgtctacttttacacgagtccatgctgtttggttactacagccttgtagcaaacaaagttaggtaatgtgatgcctccaactttgttctttttgcttaggattgctttggctatttgggctcttgtttggtcccatataaattttaggattttttttttctaattctgtgaaaaatgacattygtaatttgacaggaattgcattgaatctgtagattgtagtaatggtaattagaaaagctgattctaagggcatctgcctcttttggaatgaactccacaggtacaaagagtgcctctacccaacaggcagccactacctccaggtcattatcttctgggc

SEQ ID NO: 308433 - DNA, 574 bp, Homo sapiens
gtacccactgtacccagcaattatcttttgccccccttctccctgagtccccaaatttcactgtacaattttaatgcctttgcatcctcatagcttagccaccacttataagtgagaacatacgacatttggttttccrttcctgagttacttcacttagaataatggtttccaattccatccagtttgctgtgaatgccattatttcatttcctttttatgtctgagtagtattccatggtgtatatataccacatttttttttaatcaactcattgattgatgggcatttgggctggctccatattttgcaattgtgaattgtgctgctataaacatgtgtgtgtgtcttttttgtataatgactttttttcctctgagtacatacccagtagtgggattgctggatcaacagtagattttctattagttttccatactagatccatactagtagaattgctagatcaagtggcagatctactattggttctccacactgctttctgtagtggttgtactagtttacattcctaccagcagtacctactagtttacattcctaccaccacat

SEQ ID NO: 308434 - DNA, 574 bp, Homo sapiens
gtacccactgtacccagcaattatcttttgccccccttctccctgagtccccaaatttcactgtacaattttaatgcctttgcatcctcatagcttagccaccacttataagtgagaacatacgacatttggttttccattcctgagttacttcacttagaataatggtttccaattccatccagtttgctgtgaatgccattatttcatttcctttttatgtctgagtagtattccatggtgtatatataccacatttttttttaatcaactcrttgattgatgggcatttgggctggctccatattttgcaattgtgaattgtgctgctataaacatgtgtgtgtgtcttttttgtataatgactttttttcctctgagtacatacccagtagtgggattgctggatcaacagtagattttctattagttttccatactagatccatactagtagaattgctagatcaagtggcagatctactattggttctccacactgctttctgtagtggttgtactagtttacattcctaccagcagtacctactagtttacattcctaccaccacat

SEQ ID NO: 308435 - DNA, 404 bp, Homo sapiens
tcttctgggtctagccaaccagcggagctgcctggctctaggctgctactagggagtgtctacaaagagccccatgaggttatcatcctcgggtctctcagctgtggataccagcacctgctctgttggaggtaggagtggagtgaggtggactctgtgtgggaccttgactttcgttttgtttagtgcacttgttttctcgtatgctggttgtgctggcagtaaagttgtcmtgtagacatactgaggatctctggttagacaagatgttacaggtggtaaagttagctgttgtttttctcctttgtggggcagggttgttcttttatgagttgctgtaatggcttgagttggttggcctccagccaagaggtgatgctttcaagacagcatcagctgtggta

SEQ ID NO: 308436 - DNA, 556 bp, Homo sapiens
aaaaccatcaggtgagggcagggttaggaatgcctgaactcagactctccttgggcagggcttttggggtgtggttctcaggcckatggagttatgtttcccagggggattatgactgcctctgctgcatcctacaggtcaccagtgaagtgggggaaagctggcagtgccaggcctcacccagctcccatacagccagaaaggccagtctcctgctgtgcccctccagcagcactgagtttatatccaggcagccagcgagcagggctgggactttgccgcaagctaccagtctctctgccgagaaatcaagcagggctttcagcttcacctctccctactatggcttctgtgctcatatctgcacttcccatttgccctccacccccagattctgccctgaaaaattttcactcagttgaaattactacaaagttcagctgaaagtttccttcttcctgtagtctttccccagttccactggcaacgctccccaagggcccctgtgagatacggtctggaatgggtccctgagcttccctgaggaccaggagtg

SEQ ID NO: 308437 - DNA, 556 bp, Homo sapiens
aaaaccatcaggtgagggcagggttaggaatgcctgaactcagactctccttgggcagggcttttggggtgtggttctcaggcctatggagttatgtttcccagggggattatgactgcctctgctgcatcmtacaggtcaccagtgaagtgggggaaagctggcagtgccaggcctcacccagctcccatacagccagaaaggccagtctcctgctgtgcccctccagcagcactgagtttatatccaggcagccagcgagcagggctgggactttgccgcaagctaccagtctctctgccgagaaatcaagcagggctttcagcttcacctctccctactatggcttctgtgctcatatctgcacttcccatttgccctccacccccagattctgccctgaaaaattttcactcagttgaaattactacaaagttcagctgaaagtttccttcttcctgtagtctttccccagttccactggcaacgctccccaagggcccctgtgagatacggtctggaatgggtccctgagcttccctgaggaccaggagtg

SEQ ID NO: 308438 - DNA, 623 bp, Homo sapiens
attatgaggatgagggttttcattcaatgttgatttattaccacgccatttgtcatttaaaaggtgttttcttaattcattgcattatttgacttttcttatgatatctaatacatacatagaaaagcatagaaattttgttctgtgtgcaactgagtaatttattacaaaccaaatgttcctgtaactactacctaggtcaggaaaatgatcacagtagcaccctaagtccctctsttgattgctctcaatagccaattcctgtcttccatcgtaaggtaaccactatcctgatgtttatcgtaataaattttgcttttatttataatttcaacacctaagcacacatctctaaacattttgtctctttgttggatttgcataaatagaattatatattactcttgttaagcattatgttgagggactcaggatgtactttgtttcattaatcttggttgttgtataatgttcgacaatatgaatatatcacaatgcatttatgcattctactgttcagtaacatccttaaacctgagcagacactcagacctggctgtgttttaaatgacaccactctgtctttccccaggctccccaaagactggaggaccaagataaaa

SEQ ID NO: 308439 - DNA, 560 bp, Homo sapiens
tcatcctaccaagagccttacccttcatctgatggaatggctgattgtagacactgaccctaggttacagagaaaagagaattgctgattgccaccarcatattgaccagtttgtttaaaattattgtaagttataatgatataaatgacctggtaaagtctgaaatacccgtaaaagatatgtagctatggccaggagaagactgtagatgcttacttagcaaagtgaatggcgatatcttcatgatgattctgaatgccctctgtgaaatagcccttcttcctttccataggatggattgtctatgcagtgtctgccaacacattataccactttgcatataaccaggtttcacgttgcttttaggaaccctcttgcccttaagagcctattgcagtgctttagtcttggacacataagatcaatgcacttacaagtatgatttaataagatactgtggcaaacccaaagcagaattcactgcctctcttcctttaacttatcccttttttgtgtgtttgaatgagtttcaggcttttccatgaggttgaaacattat

SEQ ID NO: 308440 - DNA, 565 bp, Homo sapiens
ccatccagtttttagtaatttgttactgcagccacaggaaaactagtacaggtaatattttstctatcaatcattcttttccacaaataatcatgtatttttggtttagattcatattaacctttcttggagttaatccttaaaggcaaatttgaagtttcaagtagttacttcatgtttgaacttaattatttatagtcacttttgtgagttttaggtagtggacttatgttcagaaacataaggaaatgtaaatatatacagtatatctccatggctttgtttttgtgttttggcatcttatttacaccacaagtggcagagtggttaattgcactagataagttgaactcttaacggacagacttaaattatggactacttaaaaagaaaaggggaagagattgcataatattgttattcaagccaaaaagaaaaaacagtcttgaaagcaagagtgaatgaaaaagctgaaatgaattgaatatcactgtttaaaaacattacatttttgtagaattttttttttttttttgagatggagtcttgctgtgttgccaggctt

SEQ ID NO: 308441 - DNA, 565 bp, Homo sapiens
ccatccagtttttagtaatttgttactgcagccacaggaaaactagtacaggtaatattttctctatcaatcattcttttccacaaataatcatgtatttttggtttagattcatattaacctttcttggagttaatccttaaaggcaartttgaagtttcaagtagttacttcatgtttgaacttaattatttatagtcacttttgtgagttttaggtagtggacttatgttcagaaacataaggaaatgtaaatatatacagtatatctccatggctttgtttttgtgttttggcatcttatttacaccacaagtggcagagtggttaattgcactagataagttgaactcttaacggacagacttaaattatggactacttaaaaagaaaaggggaagagattgcataatattgttattcaagccaaaaagaaaaaacagtcttgaaagcaagagtgaatgaaaaagctgaaatgaattgaatatcactgtttaaaaacattacatttttgtagaattttttttttttttttgagatggagtcttgctgtgttgccaggctt

SEQ ID NO: 308442 - DNA, 584 bp, Homo sapiens
tctttctaattcttaaattttatgaagctagttgaactggcttgtcatgggcagaattatatatattgtttggtatgattgccataatattgataatgaagccatatcatgctaacaatattccagacattggttaatgtgccacatatatatatgagatttcatatatatatgattatacatatgattatatatatatatatatatatatatatatataaaaaatctcatttaattttcatgatgtccttataagctaggctgtcagtgtccccattatagacatgaataaacttggggttagaaactttaggtgacctgtcaaaggtcatacagctagcagtgacagagctttctttctttcttttttttttttttttttgagagagtgtcttgctctgtcaccaggctggaatgcaatagtgcgatctcagcccactgcaacctctgcctcccargttcaagtgattcccctgcctcagcctcccgagtagctgggactacaggcgtatgccaccaggcctggctaattttttgtattttagtagacacggggtttcaccattttggcctcgatctcctga

SEQ ID NO: 308443 - DNA, 472 bp, Homo sapiens
ggccccagaggtaatatgatatggctacagcagttcagagttcccgaagctagmaaattgccttatttctctactttataatttctttcactctgtaagagctgtgaagaaaaaaggtgaagatccgtgggtaagagaacgtgagtgaatttcagtgttgctaactatagcaccagaaaatagacatttgaaaagctcagccactcctcacttcaatccaccttccacacggttaccaaattatcttcctgattaaccaccgtggttctgttgcatcccagaatccttgtgtggatttctatagcctgtacaatgaggtcctaagcaagcatggaatggcaagccttctaaaattcttcccttatccttctggcacttaaaacactgccttttcactgtaatcatttgccctctgtttatttcccctgtttagtttaaacacttgggaagcaggacctgctcagatccagca

SEQ ID NO: 308444 - DNA, 555 bp, Homo sapiens
tgtgctaaggtgttattttgaatgttttaaatacatgtgtatatataaatatgtatgtatacacagacttctgcacacacatgtacataatgccacaacactatggggaaagaggtatagtctgcattttatggatgacaaaaccgagtctcccagaagttaaataacttactcacccattaccactcgggagagaagaaatttttaatgtgataaaattagtaagttcacatgccataacagagctgtgttttacsagaggacagatttacttatctatttaacaacttttattgaggtcctacagtattctagcagctatgctagttgaagggatatgatgttgacaaaatagtgatcaaatttctacctgcacaatgttgactattcccatgatagttatactaaaagtccagactctaccactatgcaatatatgcaagaaatctgcacttataccctctaaatctataaaaaataataaataaatacacaagtttaaaaaaaaaaaagactgctatacctgcaaaaatcactgggacttagagtagccat

SEQ ID NO: 308445 - DNA, 555 bp, Homo sapiens
tgtgctaaggtgttattttgaatgttttaaatacatgtgtatatataaatatgtatgtatacacagacttctgcacacacatgtacataatgccacaacactatggggaaagaggtatagtctgcattttatggatgacaaaaccgagtctcccagaagttaaataacttactcacccattaccactcgggagagaagaaatttttaatgtgataaaattagtaagttcacatgccataacagagctgtgttttaccagaggacagatttacttatctatttaacaacttttattgaggtcctacagtattctagcagctatgctagttgaagggatatgatgttgacaaaatagtgatcaaatttctacctgcasaatgttgactattcccatgatagttatactaaaagtccagactctaccactatgcaatatatgcaagaaatctgcacttataccctctaaatctataaaaaataataaataaatacacaagtttaaaaaaaaaaaagactgctatacctgcaaaaatcactgggacttagagtagccat

SEQ ID NO: 308446 - DNA, 516 bp, Homo sapiens
tccacatgtaccaggcattgtgctagacactggaatcaacttaaaaggtagataaggcctcagcctttatagggcttatttcccaggataagagatagacatatagatgctgggggaagggaggataataagtaaaatgaaagttgaattttaaaatgtccaagacagataatttctgtaggaaaaagaactaaggagtacagataaagcataactggaaggctgctggcttggacacagtgatcacagaagggcyttctaaggcagagacttggagaagaaggacctaggcctgtgaagagtaagggagagggaggtcttatcggaaagaactgcaagttcaaatactaggaagcaagggctactagatgtgtttgagagcaagtgctagggcctataaagccttgaaaaccataggcagagactgggactttattcgagatgtcatagaaagcctcagaagataattttgaagggaagcataagacatgatctaatttacatttaaagaagatc

SEQ ID NO: 308447 - DNA, 516 bp, Homo sapiens
tccacatgtaccaggcattgtgctagacactggaatcaacttaaaaggtagataaggcctcagcctttatagggcttatttcccaggataagagatagacatatagatgctgggggaagggaggataataagtaaaatgaaagttgaattttaaaatgtccaagacagataatttctgtaggaaaaagaactaaggagtacagataaagcataactggaaggctgctggcttggacacagtgatcacagaagggccttctaaggcagagacttggagaagaaggacctaggcctgtgaagagtaagggagagggaggtcttatcggaaagaactgcaagttcaaatactaggaagcaagggctactagatgtgtttgagagcaagtgctaggrcctataaagccttgaaaaccataggcagagactgggactttattcgagatgtcatagaaagcctcagaagataattttgaagggaagcataagacatgatctaatttacatttaaagaagatc

SEQ ID NO: 308448 - DNA, 516 bp, Homo sapiens
tccacatgtaccaggcattgtgctagacactggaatcaacttaaaaggtagataaggcctcagcctttatagggcttatttcccaggataagagatagacatatagatgctgggggaagggaggataataagtaaaatgaaagttgaattttaaaatgtccaagacagataatttctgtaggaaaaagaactaaggagtacagataaagcataactggaaggctgctggcttggacacagtgatcacagaagggccttctaaggcagagacttggagaagaaggacctaggcctgtgaagagtaagggagagggaggtcttatcggaaagaactgcaagttcaaatactaggaagcaagggctactagatgtgtttgagagcaagtgctagggcctataaagccttgaaaaccataggcagagactgggactttattcgagatgtcatagaaagcctcagaagataaktttgaagggaagcataagacatgatctaatttacatttaaagaagatc

SEQ ID NO: 308449 - DNA, 448 bp, Homo sapiens
atctatctatctatctatcatctatctgtcattctgtctatcatctatctatctctatccctctctctcaatcgctcttgtgttctgtttatgtaatagagtgataggtagataacagaggctgtcaataaaatggcctatagaaaaaaattgtctctctatttcacagaaaaactaattattttttgatttcttgaagaaatagctgttgaggatccaaacgtgcatctgcaargctgaactaaggccactaattcatcagagcagcttacagattcaccagtcaattctaacaatttatatttttattctttttcctatgtttagtaattgttctatataagtttaatacagaaaagggacatgaatttttttcaaattgaagtattgcagaagaaaagtgtttttcacaatgatataagtatcttgtattgggtagttttatgtg

SEQ ID NO: 308450 - DNA, 532 bp, Homo sapiens
ttgccaactgcttaccccccagtgcgtggcctggttcctaaaaggccacagactggtataggggttggggaccctagtttaagccacccagtctatggtactttgttatggcagccctagcgaactaacacagatcaataatagaacaagaataggaaaaccttattgttcggaagcaggagaaaaagaagcaagccaggctattttattagaacattattcgtgtattaatgtttttatctttttgtgtgaccagacatgctaggtgaagtgacaaatgaaccctgcacagatctttgaatagaaacrtctcataggaagacagcaatatatacccaaacctacaaaatatagaacagctatctctttgaataatccaggagtctaactcaaaagttttcaaagggaaatatgttgtgacttaagactgtctagatgttctgaagacaagtttttttaaaaaataccccttaattgaaggcagagacactatcgaacgtatcagaggaataagccagaatgagcagtatct

SEQ ID NO: 308451 - DNA, 575 bp, Homo sapiens
gctgttctctgcacactcatctcactgctacagtctgtgctctctgtacaatctatgatgcrgactgcagtcacagttctgtccacagcatagcctccctgaaatctattccccatactgccttccaagtgtcatttctggaagataatgatgataataactagcatactacacagaagaatctgagctgagaacctcacatggattattatgtttaatcaactctgaaacgtaatgagaaaagagctattactaatcctatttttaaaaataaggaattaggattcagagtcattacataacttactcagagacacacaacaagtaggttaatatatcagacactcaagtctgacctcacacctgcaggctgaacctctgctatacactctcccacttacccctgaaaattgtcatcagttttttacataaataattctgataaaacctttcacatgtgactctaaaagtcttctcagtctcttcatttatgttgcctctgtgtaatctaagttccaaccgtctcaaaccaatttctgtgttccaaatgacctattactttctgtgcctctgtt

SEQ ID NO: 308452 - DNA, 498 bp, Homo sapiens
aaactagaaacccacaataggtgaaactccagaaaattgacaaataagtggaaattaaacaacacactcatgaacaaccaatggatcagaaaagaaatcaaaatggaaatttaaaaaataccttgatgtaaataaaaatgaaaacacaacataccaaaacttgtagaatacagcaaaagcaatactgagggaagtttatagcaataaatgcctgcatttaaaaaaatctcaaataaacaacataactttaagtatcaaggaccaagaaaaagaaaaaaactacatccaaagttagtagatagatgggaagaaaaaatattaaagcaggaataaataaaatagagaatagaaaaacaacagaaaaaaataaatggaactaaaaaawttttttaagataacaaaatcagcaaacctttagctagactaggaaaaaaaaagattcaaataaaatcgtaaatgacattggaggtactgcaactgacgccacagaaacaaaag

SEQ ID NO: 308453 - DNA, 600 bp, Homo sapiens
atgagaggtatgcagaggtcactcgcctcaaacttctaaagaaaaatgacaggttctcttatttgattttccaagaaaaaaaatcactgccaatatgtttggatcatgtattttaggattttgctgtgttttcagatactgcacacagaaaaggcagatggccyatgtataataaagaagctttttaagttgttgttgatcaaattatatattgtgcagccagagatcattttgtcatgcaataagaccagggaatttgccttaggttcctaaataccaaaggtggtgatgtcgtgacagatccagttatttgacagtggaagaaaatgccatggatagagaagatctgaagcagcagaattctctctaatattcacaattgaaatctgagccaaatatcttaccttaaaaaaaaaaaaagaaatgaaaaggcagaagcattcaaactaggactctgtctgcctggggctttttcaaattttgtggaggaaggactcttagaacaatagtgaataagcatatactttttgtgtgatttaatgtccccacactcaaataatcctattgatgttgccagtattttctgaatatatgctggga

SEQ ID NO: 308454 - DNA, 619 bp, Homo sapiens
tagttttgtgactccagctcataagaatgcatgctaatggggcaatatttraggacattaattacatctggcaatatttggatagctaatattctcacttatattgttaaataataggatttatgtaaccaattaatttttggagttttcatgcaaggttaaaagaatgtaattttgctatttatacatttccctcaaattactgtattttccttttacaaaagaaccatttcagtgttaatatgcctgattttaaaatccttgattcagtgataaatatgtaaatgtctccttgtctagaattactcaagtgaataaaaaattctacatagtaagtttgaataatgatatcctatatatattcatttgcttttcccaaaactgatagtgtgtaagtctataaaatatacatgtatatatgtgtatatacaatattgtacaaacaagaaagtgaaataatactgtccttagattaaactattgcaattttaaaattgaagtgttttatagagtgaaatttagtataattaaagagaaacagagtgtttgtaaagagagtgttgttttctgttaactacacaggatcacagaacctgagagtcttcaatgattattcatg

SEQ ID NO: 308455 - DNA, 619 bp, Homo sapiens
acattctattatatttacataactcttaaatagcatcatccaggattcaagaaaatgttaaggaataaattagtaaaaagaaaagtcgtatttaaaatgtaatagtaattctttcaaaaactgcataacacttatatgtttatatatttatatgtttttatatatgtatatgttttatataagtttatatgcttatttttcaagtataggtcctaaaattatttgatctgcaactgtacttacaaagttggatacttagatatatttgtccctcttaagtgttctcccatttgatttggacaattgttccaatttgtcagggcttttttggatcccaagtttgtcattcagtgttaactggtccagggataaattatttgtaattttcagaagcatgttatctattaattcttttatatccaasataataatgctgattagaataaggtgatactctgatgaaattggaaaaaaaatagtttgccattgaaattactcatcaccgaaggcatttgtgaatttcactttgttaccttcccctcatttattctattaaccctaagatatactttaaatataacaatacgtaagatttctctcattaacaatgttagaatgt

SEQ ID NO: 308456 - DNA, 577 bp, Homo sapiens
aatcttaaattctacaagcctacaaagagtttacaatcctatttggggagctaaagtaaataccttgcaatgggactttgcaagtttgcttctgtcagggtggaatcaagaggtagtggtggaaggagaggtaaatggttggaagtacgtggaggttttatttgcagagatratggactatgactagctatagctacttgtgtaagagcctcagtctactgtgaggtttattagttcatccagcttaggcataggaatatacggaagtcgaagctctaataagaaactaaatcatagtttcacttctctagtcatacaggttatagggtctcaggactgcagtcctagctctggggtttgaaacttattcagttcatctgtctaaagtgcagatgggggctcttttttctctactaggattgagtaaggatctcatggcatataccaactttggtactacagagcagtcaagctacgaagtgctggtacagttaagtagcatggccaacaagagatgctccctcatgcggaggctggatggtgagctagaaaagacagatatctgagcatttgcagc

SEQ ID NO: 308457 - DNA, 610 bp, Homo sapiens
taaataacggcagacacaacggactgtaaactttggcaaggcctgaggcttaaacgctcaataagtaatttactgaatgaataaacagatgaataggttcagtyatgaactagttgtcacttgcctgcaagttaggtgagatctagggcgagactattcaacctgcaaccatcattactaactgaatgtcctgttacctaaaaaaagatagaaataaagcccatctttagggcagaattcaactgccggacttgggactggacgccaccaagtggataaaatatggagctcggaaaagattggattcccggccctgaactgaccacacagttgagaggaagttgaggcctagaagagcgcgcaacagtaagccgtgtcggcaccagactctgttggtcctactgacacctccagcgttagaatgactaaggctccactcctgacccaccggccttgaggaaagcgcaaacgtaaaaaaagattgaaaccggagaggcgaatgcatctgtttacgctaggaccacgctcgacgtcggagaaaagcccacacactcacagtttccagacctggctgcttgccgaaactcagattctcggcacctccagcagc

SEQ ID NO: 308458 - DNA, 609 bp, Homo sapiens
ctaggctgttaccattgccactttgcctaaaagaaacagtgcaggtcttctataactgctgcaaaagatcacttgaaaaaagtgaccttacaggacaatgctcttgaaagaaaattcatcaacttctaagtttaagtacgcattagcagtacagaaccttccaaatcaacacattatgaaaccaaacaagaatcctcctcagaatcatcttatttggcacaaatattataataagaaaagatagaattcctgctattaaatcatttcattagtccccaatctataaatttaraaacaattactccaaagagtgcttaaacaagttttaagaactaccttagttcagaattgcattaagtaaattacattaagtaaactgcctattaaaacatgaaatacaggaagtgtttcagtccctatctgcctagataatcctgactttatatgacttcatatgagaatatgacaacatattctcttaattttcttctcatctttctgagagttcctctcagctttcttcactggataaccttttcctatccaactctcgaatattggcatcttcatggttccagccctagcactcttctttcatatctaagcttc

SEQ ID NO: 308459 - DNA, 491 bp, Homo sapiens
tgaaaatgtgttcaacgtctaataatcaaagaaagagaaattaaaacacacagagatattagttttatcatcatattggaaaatatttaaacaactgatagtactcaaatttgattagaaaaaggtgctttcatcaccagttagtagaaacacaacctttgacctactaattcaaacttctgagaatgcattaaamtacagtaacacaatcactcaaaaattgatgtctaatgaaggctggccttggagaaaaaaatggatgcagaaaaatcttgtcctgtgattaaatcactagaaaattaaaaacagcctaaatatccatgacaatagagaattggttaaataaattacaatatagccattcaacgaactgctatagaactatttaaaataatcatgtacatatatagttacagtagaaaaaagattataaaacaatatatacagaagaatcacatttgggggaaaacaacaattttttaaaggcatgt

SEQ ID NO: 308460 - DNA, 601 bp, Homo sapiens
ccttttttgtataggaagttctatctgatattgaagtgagccaatcctggctgcaagattgtgggtcaagtttgagcaacagttcactgaacaataattttcttcaattgaatcttgcttttgctggggaaattcactctgcactgacagtactgagagctccaaaataagggttatctatcttatgctttccaagtcaagtctatcgttaccaccagaaatcattcattagcacctaatcatctaggttgggccttagctgtgtctctggagaaaacaaaataaatagacacccccatttctttagatcacctgtgaayaaattctatcatagtgtcattaccattctatcacctataattcgtttttatgcttgacttccctgtgggataatgtgacttggtgaatatgggcttgtcttatttcccacaatatccatagtccctggcactcagaaaggccttaaatatttgctgaacaaatgagttttgtaaatggtaacatgaataaacataaggctatgcaaatcaccataaacattgaacaataaaatatattgtgcatatatttgcatggtttctcaagattaaataagaaattc

SEQ ID NO: 308461 - DNA, 359 bp, Homo sapiens
gctcccaccattgcatggggcaaatccatacttgtaataaattcatatttatttacttattgaattgaacgctgacagatacagtgtcccctggcagcaacagactgaagactgaagtgtcatcagcccacgttgtagttacctgggcacacatggcaaatgttacctttcagtgagtcttaawggtgtgagtatttagacaactatttctcccactcttcaaaatttaagagtccattttaacaaaagtaaagcttattttccagacaaaagttatcccaatgctacttccccacccttgctttaaggcactgtatgtttccattttcccgcctttgttagattaaaaaaactcaaga

SEQ ID NO: 308462 - DNA, 569 bp, Homo sapiens
acatgtaattatgagtagttattaggtaactaattttgataattattagagaactaattctccaaccttatttgcatcacaattacttggagggcttattaaaatggatttctggacctcacccccagcatttctgattcattagatctggcatgaggcttgataatttttaatttcctaggtggtgctgatactgctaatccagggaccacttttggggaatcacatattagtttatgtttttgtctatattctgaggttgtatgctttctagagttgattgtgctgtattttaataaaacgtgttattttctttttcttattaaaaaatggacaaaatccaatgtagcttttaaaaaatctattgtttttggaaggaaatgctttctctgaaacaagtagctgaattattgtgattagtggctagataaaacatcacactttgtttttcttcacacaaaagactatataaccagaagtccttgaaaaaaatatatacytgaatctcaatatgggaactcactaaaatcctcaatgcattacatgttaggatcaaggaggcaaatagg

SEQ ID NO: 308463 - DNA, 551 bp, Homo sapiens
ttccaaagccccctcaagctccatactttctgtaacacatgtgacaaactatttacgtgaagttcgtaggtgtcccaaggattaggttcctgtttcatagctaataccatggttccccaagtccacataatttaatatatcagaaagtaactgagaccattaagagactcatctgttttgttcatctaattgctgattctgttttgctttgaagactaaaaatacctcaaatacttcccaccttttacaatctttattcaatgctcattgaagagtgatttctattgcttttgtttcttstttattatttattgaacacacaattaactcacaatgcttttacagacatacctcagatgcatggtgggtttgattgcagacccctgcaataagacaaatatcaaaaggagtcaattttttctgtttcctagtacatataaagattacatctacattgtactgtagtcgattaagtttcaatagactaccatttatgtacgttatgtctagaaaaacaaggtatataatttaaaaatatttttttgcttaaa

SEQ ID NO: 308464 - DNA, 598 bp, Homo sapiens
aagacgccaggaagaatggcacactctcagcagatctttgcggggaaggcactgagagtgaacagagggaggacagacactaggctgaagagggaggaagctgggcaccctgcatagggatactgtgcaccaggactcattcctcgttcccagagactcctgaggaaggagtgagttgaacaggcaaggagtgacccactcttgccatggaactctggaatcctggcagcaagagaccccatgacctcagtggacacgaactggcaggaagagytgcttagagaggtgctagaggagggactgcagcctgtacagagcccagcaggtttggtgcaggaatatctgcaggtgagaattaaaaaacaatcaggtactatgcctattacctgggtgaggaaataatctgcacaccaaacccccgtgacttgcaatttacctatatgacaaataggcacgtggacccctgaatctgaaatacaaattaagaaaaaaaagtcaatagtggttttaaaccatgttcagtaagccacactgtaataaacacatatgctgtcacccaggctttattgttccatgtatagagcacaaacagtagatt

SEQ ID NO: 308465 - DNA, 569 bp, Homo sapiens
aacttctgtgtcagtacttgatgctttgccttgcacttttatattatacagacagcttctttcctcaaacctcatgaaccaacttctgctagcttcgaacttttcttctgcagcttcctcacctctctcagccttcatagaattgaagagagctcagacttcattctagattagtctttggcttaagaaaatcttatggctggtttgatcctctatccaaaccataaaatgatctccatatctgcaataatactgtttttctcttatttatcatgtgttcgctggagtagtatgcttaatttccttcaagaacttttcctttgcactcaaaactttgctaactggcaaacaaggcctagtttttgacttatcttggctttcaacatgactcccccactaagcttaatcatttttagcttttgatttraagtgagagatatgcaactcttcctttcacttgaacatgcagaggccattgcaggatgattaattgtcctgatgtcaggattgctgagactcagggactagggaagcccaaggaaagataaagagggagcgaagccaatcag

SEQ ID NO: 308466 - DNA, 633 bp, Homo sapiens
atatccagcacattgagtttttcctccagtattggaacaatttctatttctttcattgaacactagaagtagatgacttgtgtttgcaaatcaaaacaagcaaacaacttatctttaaacattagaatcaacatatctttaaatactagaacattagaaacatcaagtgaataccatgacaggaatcaaagattgagtccagagtaggaaaaagattcacgtctctcttctgctcacttcaaggcagcaagtggcaaaagggccagaaagatttcaattagccctttatctcattttaattattattttgaaatgagctgctaagcacacacagatgaagtgcattggtataaacatgtatatttgtacctatgtgatatagctatacaaagaacacacacatatgaacacaccacactttggaaaactagtgattcatgttattttccacattcttctgaagttattttttccccatgtgctaggctagaagtggggctgatggaaacgtctccggaattttcctctrttaaacattcaactctgatgttctctgttaaaataaattcagtacctgtgagctaaggaaatgtgaccaagagtcccttagttaggctcagtaacccatccctt

SEQ ID NO: 308467 - DNA, 564 bp, Homo sapiens
aattgacaataccaaacaataagtatgtgaaggaattagaacactaataaaatggtgattagaaattagaaggtcacgaccactttggaaacacagtttaacagtttcttaaaagcctaaatataactatcatacgatctagccattctactcttaggtatttacctaagagagaaaaatgtacacattattctctcttaggtaatgctattctgtacagcctgtggaaccataagccaattaaacttcttttcatacaaacawttgtgcacaaatattcagagaaacaatttgcagtagtcaagtaatagaaataacccacaaatccatcaataggtatggtaaacaaattgtggtatatctatacaatgatatactactcagtaataaacagaaatgaactattaatacctgctaaaacctgatggattacaacataattatattccgtgaaagagaacaaaaaataatacatcctgtatgatgcaatttttataaacctttagagagaactaacctacagtgataggaaacagactgagggttgcttaggtaggagagagc

SEQ ID NO: 308468 - DNA, 643 bp, Homo sapiens
cagtgtttactcatttccttctctgtgctaggcacttggattttatagtcagctaagttagatgtgttctctgttctcatggaactgcagtgtagtgaaggagtgagtaaagaagcaaagatatacatgcttcaatatttacaatcaagatttgttgtgggtctaggttacaaacaggcaatatgctaggctttttacatgaattctcttatttagtgcttataactacacctgtgctatgattaattgttttttttcttaacacatgtaaaacctgagtctgggagttagagggatattttcaagacacagtctgatcaagccacatgcaggcaccaccattcatggctttctactactttaggataaaactcaatctcttacctgcttataaggactagtatgagctgcccttgtgttgaaagagaccggcagggtgaggaagagactactgatcatatatacaaggctaagactgaatgcaaagacctatttctgaccttaaatsaactctttgacatacataattctgtgcctgtaaaaaaaagtctattcagccctaaaagcccgtgaagcttcagcttcattctagtttactatgacttaattccgtgccaggccctaagtccaaattggcttgatc

SEQ ID NO: 308469 - DNA, 607 bp, Homo sapiens
aggctttttacatgaattctcttatttagtgcttataactacacctgtgctatgattaattgttttttttcttaacacatgtaaaacctgagtctgggagttagagggatattttcaagacacagtctgatcaagccacatgcaggcaccaccattcatggctttctactactttaggataaaactcaatctcttacctgcttataaggactagtatgagctgcccttgtgttgaaagagaccggcagggtgaggaagagactactgatcatatatacaaggctaagactgaatgcaaagacctatttctgaccttaaatgaactctttgacatacataattctgtgcctgtaaaaaaaagtctattcagccctaaaagcccgtgaagcttcagcttcattctagtttactatgacttaattccgtgccaggccctaagtccaaattggcttgatctttaagagttgcttgttgtttattttatacctctcatcagtcctggcacagtaaccaggctgaacaataagtgggagtagttacaaaaccacctcataggaaktaaatagagaaagtatttctgtccacacatccagaggagatagcttga

SEQ ID NO: 308470 - DNA, 474 bp, Homo sapiens
tttagttaataataaatcttttgaggtacccacttcaataayaataataacaacagcagcaaacaaacccatatagagtatgtgtctaaacctggcacttttctaaattcttttcagataatccctacaacttctgggagaggtgcaagtatcaaccagttggagacacagggaaagggtgatataatgcagaaagtgacttgaacaaatttacacagaaggcagtgaagtgtgattcaaattcaagcagtctagactgtgccccacacaactctgcagcataaccttgcagtatgaaaataatgcctctcatgcaggtatgccttattctttttaagagctgcataatattcctttgcatggatgtatcattgatttattttgttcactgttagtgatgtcttagactttttcctacagtttgccattgtgagcaatgtttcaatttttgaatatttcaccacgcttttgaac

SEQ ID NO: 308471 - DNA, 474 bp, Homo sapiens
tttagttaataataaatcttttgaggtacccacttcaataataataataacaacagcagcaaacaaacccatatagagtatgtgtctaaacctggcacttttctaaattcttttcagataatccctacaacttctgggagaggtgcaagtatcaaccmgttggagacacagggaaagggtgatataatgcagaaagtgacttgaacaaatttacacagaaggcagtgaagtgtgattcaaattcaagcagtctagactgtgccccacacaactctgcagcataaccttgcagtatgaaaataatgcctctcatgcaggtatgccttattctttttaagagctgcataatattcctttgcatggatgtatcattgatttattttgttcactgttagtgatgtcttagactttttcctacagtttgccattgtgagcaatgtttcaatttttgaatatttcaccacgcttttgaac

SEQ ID NO: 308472 - DNA, 474 bp, Homo sapiens
tttagttaataataaatcttttgaggtacccacttcaataataataataacaacagcagcaaacaaacccatatagagtatgtgtctaaacctggcacttttctaaattcttttcagataatccctacaacttctgggagaggtgcaagtatcaaccagttggagacacagggaaagggtgatataatgcagaaagtgacttgracaaatttacacagaaggcagtgaagtgtgattcaaattcaagcagtctagactgtgccccacacaactctgcagcataaccttgcagtatgaaaataatgcctctcatgcaggtatgccttattctttttaagagctgcataatattcctttgcatggatgtatcattgatttattttgttcactgttagtgatgtcttagactttttcctacagtttgccattgtgagcaatgtttcaatttttgaatatttcaccacgcttttgaac

SEQ ID NO: 308473 - DNA, 474 bp, Homo sapiens
tttagttaataataaatcttttgaggtacccacttcaataataataataacaacagcagcaaacaaacccatatagagtatgtgtctaaacctggcacttttctaaattcttttcagataatccctacaacttctgggagaggtgcaagtatcaaccagttggagacacagggaaagggtgatataatgcagaaagtgacttgaacaaatttacacagaaggcagtgaagtgkgattcaaattcaagcagtctagactgtgccccacacaactctgcagcataaccttgcagtatgaaaataatgcctctcatgcaggtatgccttattctttttaagagctgcataatattcctttgcatggatgtatcattgatttattttgttcactgttagtgatgtcttagactttttcctacagtttgccattgtgagcaatgtttcaatttttgaatatttcaccacgcttttgaac

SEQ ID NO: 308474 - DNA, 615 bp, Homo sapiens
tatcattgatttattttgttcactgttagtgatgtcttagactttttcctacagtttgccattgtgagcaatgtttcaatttttgaatatttcaccacgcttttgaacccatactaaccgcacatatttgtaaaatcaattaatcaatttatagtagtagatttataggctttttaaacaccaaaagctaattttcttcttactagtagggagatatggatgggacttactgaaacaagtcatataatgcatctctattcttgcagccaaatgaaaatggccccatcaaagtgcaagtgctcactaaatattcgttaaatgaaagaattaaatagaaaaagctrccatttaaaaacattatcacaatgctaaaaatatgttgatttataagatctcattaagttcatgcaattaaagcaaccattatcctcattttacagatcagggatatgagatccagtgacttacccaaagtttcaaaggaaagatgtaacagagccatctctgaacttctgctcttgggaatctacacactctttccactagttctgaccttagcaggtgtttgacccaggacttgcccaacttggtttccatttgtatagaactaatgcc

SEQ ID NO: 308475 - DNA, 622 bp, Homo sapiens
acagttcaatgaatatgaggagtaagaaacctaaatgaaggataggaagacagagaagtcttcctctaagacggaatgtttaaatctggatgaggggattggtaagagtttaccaggcagaagggtagaactcagaggaggttacaggcatgggaataactcacagaaagaagcaggtactttctagacatcggagggaagccagagtggcaattgcgtagtgacaaggggagtggcaacatgaggckggcagaagcagataatgcagagccttgtaaagcttgataaagagtttgaacattcgctcaagaacagtcagaagccattgaagggtgtgaagctagtgagagacagaatctgactcaggattgtcaagattattctggatgaggggagacaggaagaggaagggagagaggtaacttaggacataagtgtagtaattcagataaaatattatgttggcctggagacctggtccggaagagtgacagtgagctggaaagaggtgggtggactggagagatattacaaaaatgaaatatacagacaagagtgattgatcaggtgttggcagtgaaagaggaagatgtcaagactgacttagagatgcatgacttga

SEQ ID NO: 308476 - DNA, 540 bp, Homo sapiens
accgattctacttacattatcccataaaatataggagaagggaatacttccagacccattctacaaagccaatattatcctgctaccaaaaccagataaagatagatagatgatagatagatagatagatagatagatagatagatagatagatagatcataggccaatatcactgacaaacactgaagtgaaaattctcaccaaaatatttgcaaaccaactacaagaagacattaaaaagattagtcatcatgaccaactgggatgtatctcagggatccaaggatagttaaacatatgccartcaatcagtgagatacattatataaacagagtgaaggaccaaaaccatattatcatttcaattgatgctgaaaaaattcaacatcccttgaatcacttaataaaattcaacaccacttcatgattaaaacccttggaaaactgggtatagaaggaacatatctcaggacaattagagccataaatgactgatccactgctaatatcatactgaagtgggaaaaactgaaagtctt

SEQ ID NO: 308477 - DNA, 564 bp, Homo sapiens
tcatactgaagtgggaaaaactgaaagtctttgctctaagacacrgaacaacagaaggatactcactgtcaccaccgttattcagcatagtactgtaatttcaagctagagcaataatgtaagaaaagagataacaagtattaaaattggaaaggaagacatcaaattattcttgtttgcatataatataattttatatttggaaaaatctaaagattccatcaaaaacaatgggaactgaaaacaaattcagtaaagttgcaggatacaaaatcaacatacaaaaatcagtagtatttctatatgccaacaacaattcaaaaaagaaatcagaaaatgaatcccacttacaatagctacaaataataaaaataagaaataaacctaaccaaagaagtgaaagatctctataataaaaactataaaaccttgataaaagaaattaaagagaacacacagaaaatggaaagatattctatcttcatagattagaagaatcaaagttgttaaaatgttcatactacccaaagaaatctggagattcaatataatctacatcaaaat

SEQ ID NO: 308478 - DNA, 564 bp, Homo sapiens
tcatactgaagtgggaaaaactgaaagtctttgctctaagacacggaacaacagaaggatactcactgtcaccaccgttattcagcatagtactgtaatttcaagctagagcaataatgtaagaaaagagataacaagtattaaaattggaaaggaagacatcaaattattcttgtttgcatataatataattttatatttggaaaaatctaaagattccatcaaaaacaatgggaactgaaaacaaattcagtaaagttgcaggatacaaaatcaacatacaaaaatcagtagtatttctatatgccaacaacaattcaaaaaagaaatcagaaaatgaatcccacttacaatagctacaaataataaaaataagaaataaacctaaccaaagaagtgaaagatctctataataaaaactataaaaccttgataaaagaaattaaagagaacacacagaaaatggaaagatattctatcttcatagattagaagaatcaaarttgttaaaatgttcatactacccaaagaaatctggagattcaatataatctacatcaaaat

SEQ ID NO: 308479 - DNA, 531 bp, Homo sapiens
gtctcactctgttgcccagtctggtcttgaactcctggcctcaagcaatcctcctgcrtcggcctcccaaagcagttgtttttaaatatagtcaatgcctatagaagaagtagctcccaggatgttgtataatcagacattatacatggggtgtcagtcagctcaagtagctcagagatgatctctggtaaaatacattccagagttatcaatttggcacacattttgtgccatcaactgaaatttgtagttaataaacacatggttaaaaacagaggcataatgttcccaaaagtgtatttaaagactctctgctctactactccaaattaatacttccactggtccagttctagcagcagtgaaatgcagattgggtcaaagatggtgaaggtttatggagattaactcaataatttttgaaaatttgctatttgataattctgaattgatctgtagatgatcttgtctccaaaactccatactactaaaacaaacaaaaaaggaagtaaagacaatttttaaaagtac

SEQ ID NO: 308480 - DNA, 531 bp, Homo sapiens
gtctcactctgttgcccagtctggtcttgaactcctggcctcaagcaatcctcctgcgtcggcctcccaaagcagttgtttttaaatatagtcaatgcctatagaagaagtagctcccaggatgttgtataatcagacattatacatggggtgtcagtcagctcaagtagctcagagatgatctctggtaaaatacattccagagttatcaatttggcacacattttgtgccatcaactgaaatttgtagttaataaacacatggttaaaaacagaggcataatgttcccaaaagtgtatttaaagactctctgctctactactccaaattaatacttccmctggtccagttctagcagcagtgaaatgcagattgggtcaaagatggtgaaggtttatggagattaactcaataatttttgaaaatttgctatttgataattctgaattgatctgtagatgatcttgtctccaaaactccatactactaaaacaaacaaaaaaggaagtaaagacaatttttaaaagtac

SEQ ID NO: 308481 - DNA, 484 bp, Homo sapiens
tgaggtaagaggtaaatcacatctgctgctcaggtaaaaaattttcatttcaaatttttaaattccaagagagaaccagagaagatcagtgactttcaggggttaagggctgtgggagggtgagctacaaaggaacagcaagagggagtttgtatggagagacagcaccattctgcattctgaaaataatggtggtgagggactaattggctaagttggctggacttcctggrtcaatagggacttccctaaggggacttgcccctaagccaaaatgagtcatagctgcaagctaaggtattgaaacttcaaccaatcatatagggagtttaagctctagctgcagcctgatgtttttaactaatcaggcccgccaatccacaagtggataaaaaataagctaattctacaggactaaaaaaggaaaaaaggagggatcataaggagatataagcataagacacccaagccagaaacggcaagc

SEQ ID NO: 308482 - DNA, 484 bp, Homo sapiens
tgaggtaagaggtaaatcacatctgctgctcaggtaaaaaattttcatttcaaatttttaaattccaagagagaaccagagaagatcagtgactttcaggggttaagggctgtgggagggtgagctacaaaggaacagcaagagggagtttgtatggagagacagcaccattctgcattctgaaaataatggtggtgagggactaattggctaagttggctggacttcctgggtcaatagggacttccctaaggggacttgcccctaagccaaaatgagtcatagctgcaagctaaggtattgaaacttcaaccaatcatatagggagtttaagctctagctgcagcctgatgtttttaactaatcaggcccgccaatccacaagtggataaaaaataagctaattctacaggactaaaaaaggaaaaaaggagggatcataaggagatataagcayaagacacccaagccagaaacggcaagc

SEQ ID NO: 308483 - DNA, 364 bp, Homo sapiens
gtcttgttcgttgagatcgtttaactacaaatacctatacttcaacgatttcttatgaaatttgcagccaaatctggaatccagaaagaattctgacatgaattaaaatcttcaaatcccatcatgtatgttgaattactccttttttttttttcaacaagcctcatgtstcccatcctgttagaccttggtaatgtaagcccgtatctctctcctgagttactgagtaatagaagacatggcaagcacaatagctaaggaaagaggaagtgataggtggacagtcacagtgagaaacccaggaaaaataagcagcctgcaatatttcaaggaataagtttacagttgtatttttctgaagcaa

SEQ ID NO: 308484 - DNA, 623 bp, Homo sapiens
gaccatagtatgtcttgttcgttgagatcgtttaactacaaatacctatacttcaacgatttcttatgaaatttgcagccaaatctggaatccagaaagaattctgacatgaattaaaatcttcaaatcccatcatgtatgttgaattactccttttttttttttcaacaagcctcatgtctcccatcctgttagaccttggtaatgtaagcccrtatctctctcctgagttactgagtaatagaagacatggcaagcacaatagctaaggaaagaggaagtgataggtggacagtcacagtgagaaacccaggaaaaataagcagcctgcaatatttcaaggaataagtttacagttgtatttttctgaagcaacattgtgagatgagtacctagctgctactgattttgattctgagaacgaaacttcctctcacgaccaacattcccacacctataactttgtatcatttgccaagaacaacctattttatgacttcttgatgcttttctgcatgcgttctgctgcttggaaattctaccctgtacacatttatttcagaaacccctagttcaaaggttacccctgctataaagccttccaacactctctccaagcagag

SEQ ID NO: 308485 - DNA, 623 bp, Homo sapiens
gaccatagtatgtcttgttcgttgagatcgtttaactacaaatacctatacttcaacgatttcttatgaaatttgcagccaaatctggaatccagaaagaattctgacatgaattaaaatcttcaaatcccatcatgtatgttgaattactccttttttttttttcaacaagcctcatgtctcccatcctgttagaccttggtaatgtaagcccgtatctctctcctgagttactgagtaatagaagacatggcaagcacaatagctaaggaaagaggaagtgataggtggacagtcacagtgagaaacccaggaaaaatragcagcctgcaatatttcaaggaataagtttacagttgtatttttctgaagcaacattgtgagatgagtacctagctgctactgattttgattctgagaacgaaacttcctctcacgaccaacattcccacacctataactttgtatcatttgccaagaacaacctattttatgacttcttgatgcttttctgcatgcgttctgctgcttggaaattctaccctgtacacatttatttcagaaacccctagttcaaaggttacccctgctataaagccttccaacactctctccaagcagag

SEQ ID NO: 308486 - DNA, 561 bp, Homo sapiens
tgttttccatctataacagggataaagttttagaggtattttctcactaagttttcttatggttggactgatttctttccttgcaccctgctcgggtctgactgtttctgccttctaagaattttttatgttgaaattttaacccctaaggtgatggtatcagaaggtgaagacttagggaggtgattaggtcatgggcgcagatccacatgaatgggattagtgcctttataagtcactcaagagaaagccctcgcctcttctgccatgtgaggacacagtgagaacgtaccaattatgaaccagaaaacagaccctcagcagacayggaatttgctggtgccttcatcttggacttcccagatttcagaatggtgagaaataaatttttgttttttataagctacccagtctatggtattttgttgtagtattcggaataaactaagatacagtcaattgcatcatttcagctgaactttgagactgaaatcttaaataaacgaggaggaaatgatataggacagttgcattcagacaggaagggaaagcaacagaaaa

SEQ ID NO: 308487 - DNA, 559 bp, Homo sapiens
ttgggatgagatggcgtgggctcagagtctgagaaatctctctccctcactccctctgctaagtaggttccatgctctattcaagtttcagagattctgcttggttggggcctgctcaagggcatgagcctgcctttatgttactcctatgctttacacttggcacatcacagaccatgaaaaaataatctggtggaaatggcaactttggatttttaatmccagttgctaacatttttccaaatatatttatcttttgaataatctaaggcccttatccccttaaggtttacatgacttactttatactgcttttacttttcaaggcagttaatcttttgtaataacactttgtattcagttatgttcctttgcttagttttcaactttgttattctccaagctgattttattaattgatgcagtcaggagcatatgaattaattaggtgatagtgaaccaggaggaaatcacaggcctcagtgtgagacaaatctggatttaaatcctagctctaactcagtccgtgaccttgaggaggtcaggtaggttcactggg

SEQ ID NO: 308488 - DNA, 634 bp, Homo sapiens
tcattatggtgctctgctgctgaactgcctcaatagtctgttattatctataggattaagcccaaagtccttaggaagggcttggcttacctcatttcccagaatacccaacacttagactctatcagtgtacttatctgccatatgtacrcttcattatcttaaacttgcatttcctctttttcaacttttaaattttgaaccaattttaggcttacagaaaagttgaaaaaatattacagtgactttttgtatattcctcactcttcccctcccatcttgtgtaacaatagtttatttatcaagtaaaatgaattgacatgaggaaatactattaactaaagaccttattcaaattccacccttttttccactaacttttttctggttccatatcatattcagaatcccaccttgtattttagttgttatttcctcctagtctgccacagtctgtaatagttccttagtctttccttctcttccctgacattgacactcttgaagagcaatgatcagttgttttgctaaatgttcttcagttgtggtgtgtctcatgttttcttaggatcaaagtaaagttatgcttttttcttttttggcaagaacaccacaaaatgatgttgtgtttttc

SEQ ID NO: 308489 - DNA, 565 bp, Homo sapiens
gtaccattggttcagaactcttgctataaaacaaaagcataaaatacattgatgtctttgagtttaatgtgacatcttgtatgttaatttctttgtttaacttccttttgtaattaaggaccccattaaaatttgatgtatactggtgtcttgcttatgcaagtattattttaaattaagaaaatgcacaagtattcatcttaaaatgaatttgtaatccacatcatgctttctgtcactgtagagatcgacagctgggatacaaatgtggaagtacatatataaatgatttgtgtgcgtctttatgtctgggtgtgtatgacacacacacacagatattatatgtaggccaggtgtggtggctyatgtctgtaatcccagtactttgggaggctgaggtcggctgatcacttgaggtcaagattttgagaccggcctggccaacatggtaaaaccccatctttacaaaaaatacaaaatatctactgggggtggtggtatgtacctgtagtcccagttactagggaggctgaagcatgagaatcccttgaacccaggaggcaaa

SEQ ID NO: 308490 - DNA, 565 bp, Homo sapiens
gtaccattggttcagaactcttgctataaaacaaaagcataaaatacattgatgtctttgagtttaatgtgacatcttgtatgttaatttctttgtttaacttccttttgtaattaaggaccccattaaaatttgatgtatactggtgtcttgcttatgcaagtattattttaaattaagaaaatgcacaagtattcatcttaaaatgaatttgtaatccacatcatgctttctgtcactgtagagatcgacagctgggatacaaatgtggaagtacatatataaatgatttgtgtgcgtctttatgtctgggtgtgtatgacacacacacacagatattatatgtaggccaggtgtggtggcttatgtctgtaatcccagtactttgggaggctgaggtcggctgatcacttgaggtcaagattttgagaccggcctggccaacatggtaaaaccccatctttacaaaaaatacaaaatatctactgggggtggtggtatgtacctgtagtcccagktactagggaggctgaagcatgagaatcccttgaacccaggaggcaaa

SEQ ID NO: 308491 - DNA, 587 bp, Homo sapiens
tcatctgctcatcttttgggtatttgacataatgcagattaaatatctaggactcaggtgactgataagatgagtgcacttctcatcttggtattttggccccatttgaaaaaatgtttttcttccaatgcagtcatccactttcctaccctcaatatracttatgttatattttccaaggtttttttttttttttttaccattttcataatatttcttgtggcttcctttgcagattaaaaaaaaagattctgaaacagatgggaaatatgtgggtcaaattaagctacctatggtagtttgggcatggtttcagttgctattactctaaaaaagttaacattgtatgtacaaggtagaatgccctttctctctcaggtgacactcagagggtaggtagtccaccccaaaatggcaactctgctccatcaggtccagggatgtggctccttttaccttgtttctccacatttcctagggtgttgctgtccttgtctgcatggtctggcatagctgactaccacattccagccatccagaaggaaaaaaagtagaagaggagaatatatctctttctttgtcatcat

SEQ ID NO: 308492 - DNA, 479 bp, Homo sapiens
ttgggcatggtttcagttgctattactctaaaaaagttaacattgtatgtacaaggtagaatgccctttctctctcaggtgacactcagagggtaggtagtccaccccaaaatggcaactctgctccatcaggtccagggatgtggctccttttaccttgtttctccacatttcctagggtgttgctgtccttgtctgcatggtctggcatagctgactaccacattccagccatccagaaggaaaaaaagtagaagaggagaatatatctctttctttgtcatcatgttccacaaattgwgttatttcttctcacattctattgcctagaacttagtcatgtggctatatcaaactccaagggcgtataagaaatgtagtcttatctgggcaggcttgtacctagttaaaaatttgacactctattaccatagaaggaaggcagagggggctagtctctgccacctcacctaatgact

SEQ ID NO: 308493 - DNA, 565 bp, Homo sapiens
tggcccagaatggcagggccataaaaaagtcaccaatttttataataagcaaatatcaagccctaaaatgctgtgctccacatcatgctttctctttgggttttggcaatatgccccaacaatacatgcaaaaaagtgtctgaaagagtcctaaataagttaaggtttacactggcaacacataactttattgggtttcttgagctctgtttataataataatatgaacacacaaggtataagataaatgtttgagaaggaaataattcattgatcccsctttacttagcatttaccatatgcaaggcaccatgttaaacactgagagatccacaacgatacataaaacaacattccaaattcatgctgagcacttttttctgaaacacaagaacaaatctgaaaagttagtatgtgactgtcccaaattttggtattatcatacagtgcaagaagaaaacagggataggtttatcccttgaatttatacaacttcccattgctgactagtaggttttcatgggaatttctctctttaaaaaggcttatgtgtttcaattgcact

SEQ ID NO: 308494 - DNA, 629 bp, Homo sapiens
tctgtttataataataatatgaacacacaaggtataagataaatgtttgagaaggaaataattcattgatcccgctttacttagcatttaccatatgcaaggcaccatgttaaacactgagagatccacaacratacataaaacaacattccaaattcatgctgagcacttttttctgaaacacaagaacaaatctgaaaagttagtatgtgactgtcccaaattttggtattatcatacagtgcaagaagaaaacagggataggtttatcccttgaatttatacaacttcccattgctgactagtaggttttcatgggaatttctctctttaaaaaggcttatgtgtttcaattgcactaaaattaagcaggtgagaatttatttatccttgtatactaagggtttaataaggacgagaaaaaggccatatttacaaacaccaatctatggactgcaattcttttgtatctttcaatagcattgttagttctaattttgtttgtttttgcacgtgtgctttatacaaaagactctgtaaagtcttgatttccatacttctggtgaagctcttcaaggtcttcatggccccatacccatcaatcatgtgtgcctcacagatttcctttg

SEQ ID NO: 308495 - DNA, 629 bp, Homo sapiens
tctgtttataataataatatgaacacacaaggtataagataaatgtttgagaaggaaataattcattgatcccgctttacttagcatttaccatatgcaaggcaccatgttaaacactgagagatccacaacgatacataaaacaacattccaaattcatgctgagcacttttttctgaaacacaagaacaaatctgaaaagttagtatgtgactgtcccaaattttggtattatcatacagtgcargaagaaaacagggataggtttatcccttgaatttatacaacttcccattgctgactagtaggttttcatgggaatttctctctttaaaaaggcttatgtgtttcaattgcactaaaattaagcaggtgagaatttatttatccttgtatactaagggtttaataaggacgagaaaaaggccatatttacaaacaccaatctatggactgcaattcttttgtatctttcaatagcattgttagttctaattttgtttgtttttgcacgtgtgctttatacaaaagactctgtaaagtcttgatttccatacttctggtgaagctcttcaaggtcttcatggccccatacccatcaatcatgtgtgcctcacagatttcctttg

SEQ ID NO: 308496 - DNA, 510 bp, Homo sapiens
ttggctatcacatttgcagaaaaaaacttttctttgataccattttagtgtgggatactccacattttttaaagaaatccaactctcttgttcttatatctcttcttttttatccccaaatcaaatttctttcatctccattatcaggaacttctactagttatcactaaatgacagtctcttgagttagggtaattctgtaatggatatttagaaacacagaggaaaggttgatttccatcaagcaacatatatttccataagctgaccagtaaatgttgtcatttaattctgatttcaatttctttttctttccctaaaaatacacaaatagttktagttgtttgttctttattgcttttgtctggctgcttccatttgctgtgtgtgtgtgtgtgtgtgtgtgtgtgtgtgcgcgcgtgtgtcttttttattgagccttttattcctatttattaaacttcatctgcaaatatccagaacttcctgtgttctctgatttcgtcaagt

SEQ ID NO: 308497 - DNA, 577 bp, Homo sapiens
atgcttggctatcacatttgcagaaaaaaacttttctttgataccattttagtgtgggatactccacattttttaaagaaatccaactctcttgttcttatatctcttcttttttatccccaaatcaaatttctttcatctccattatcaggaacttctactagttatcactaaatgacagtctcttgagttagggtaattctgtaatggatatttagaaacacagaggaaaggttgatttccatcaagcaacatatatttccataagctgaccagtaaatgttgtcatttaattctgatttcaatttctttttctttccctaaaaatacacaaatagttttagttgtttgttctttattgcttttgtctggctgcttccatttgctgtgtgtgtgtgtgtgtgtgtgtgtgtgtgtgygcgcgtgtgtcttttttattgagccttttattcctatttattaaacttcatctgcaaatatccagaacttcctgtgttctctgatttcgtcaagtcagttttagctgaaatatattctcttttttttggatgtatattcagagcttattgtagttctg

SEQ ID NO: 308498 - DNA, 577 bp, Homo sapiens
atgcttggctatcacatttgcagaaaaaaacttttctttgataccattttagtgtgggatactccacattttttaaagaaatccaactctcttgttcttatatctcttcttttttatccccaaatcaaatttctttcatctccattatcaggaacttctactagttatcactaaatgacagtctcttgagttagggtaattctgtaatggatatttagaaacacagaggaaaggttgatttccatcaagcaacatatatttccataagctgaccagtaaatgttgtcatttaattctgatttcaatttctttttctttccctaaaaatacacaaatagttttagttgtttgttctttattgcttttgtctggctgcttccatttgctgtgtgtgtgtgtgtgtgtgtgtgtgtgtgtgcgygcgtgtgtcttttttattgagccttttattcctatttattaaacttcatctgcaaatatccagaacttcctgtgttctctgatttcgtcaagtcagttttagctgaaatatattctcttttttttggatgtatattcagagcttattgtagttctg

SEQ ID NO: 308499 - DNA, 576 bp, Homo sapiens
ttggagcacacagtggatggcaatcaccaggaacatttaagtctgacccccaggaaccctcaggagtaaaggagtgatgatgaggggatggattacccaagttacttgaaatgagaactccatcatttactctggatctttaagagttaagtatgacatgccgataggaytggagaatctggggacattccagttctactaaattgatgacaatgatcaacatatttcacaattctatttctcttttcaggtagaattatttttcactgcaaagtattcattattgggaaaagtaggtttttaaaaaaattaacttatatttaatttatttattttcttagcattctgacaaatagaggcaaaaaaagccaagacattcttaggcttaggagagagagacgtagaaagccccaaataaaatatcgaaatctttcttctacttttgcgaagtggtttttcttttaggaagaaatagatggctatagctgtgtaaatctcttctcagaagaagtgatatggtaaaggaaggagatcatcagaatctctttaatcatctgtcaaatgttattcgttgca

SEQ ID NO: 308500 - DNA, 576 bp, Homo sapiens
ttggagcacacagtggatggcaatcaccaggaacatttaagtctgacccccaggaaccctcaggagtaaaggagtgatgatgaggggatggattacccaagttacttgaaatgagaactccatcatttactctggatctttaagagttaagtatgacatgccgataggactggagaatctggggacattccagttctactaaattgatgacaatgatcaacatatttcacaattctatttctcttttcaggtagaattatttttcactgcaaagtattcattattgggaaaagtaggttttwaaaaaaattaacttatatttaatttatttattttcttagcattctgacaaatagaggcaaaaaaagccaagacattcttaggcttaggagagagagacgtagaaagccccaaataaaatatcgaaatctttcttctacttttgcgaagtggtttttcttttaggaagaaatagatggctatagctgtgtaaatctcttctcagaagaagtgatatggtaaaggaaggagatcatcagaatctctttaatcatctgtcaaatgttattcgttgca

SEQ ID NO: 308501 - DNA, 576 bp, Homo sapiens
ttggagcacacagtggatggcaatcaccaggaacatttaagtctgacccccaggaaccctcaggagtaaaggagtgatgatgaggggatggattacccaagttacttgaaatgagaactccatcatttactctggatctttaagagttaagtatgacatgccgataggactggagaatctggggacattccagttctactaaattgatgacaatgatcaacatatttcacaattctatttctcttttcaggtagaattatttttcactgcaaagtattcattattgggaaaagtaggtttttaaaaaaattaacttatatttaatttatttattttcttagcattctgacaaatagaggcaaaaaaagccaagacattcttaggcttaggagagagagacgtagaaagccccaaataaaatatcgaaatctttcttctacttttgygaagtggtttttcttttaggaagaaatagatggctatagctgtgtaaatctcttctcagaagaagtgatatggtaaaggaaggagatcatcagaatctctttaatcatctgtcaaatgttattcgttgca

SEQ ID NO: 308502 - DNA, 521 bp, Homo sapiens
gagaggaacaggatagagattcagagggaaacagagttgttataagaaagaaggaacaaacatggaagttttaagagaaataggaaagagaagctgattcctgaaatcacaatatttataacagagaaaagaatgggatccagggttaagcagagggagtggtttttgataagaggaggtttttgcaataagatggaagaaggagatgatgcacaaatgcagttatgtttgcaaagttagagggtaaaaaatgagtatctggyagtttctattttctctatacattatgaagtgaggtcattggctcagaacgaatggtctgggagagattgcaggagcggtaaggagacaggggagttatgaaatagttatgtgaggaagtgggaacaaaagcaagtctggtagagaaatatcttggcatcctggacagtgataagtactacctgacaggcaaaagatttcatcagctaaagaagcagagacatagaattgcctgtatatgacacaattggagtatttct

SEQ ID NO: 308503 - DNA, 521 bp, Homo sapiens
gagaggaacaggatagagattcagagggaaacagagttgttataagaaagaaggaacaaacatggaagttttaagagaaataggaaagagaagctgattcctgaaatcacaatatttataacagagaaaagaatgggatccagggttaagcagagggagtggtttttgataagaggaggtttttgcaataagatggaagaaggagatgatgcacaaatgcagttatgtttgcaaagttagagggtaaaaaatgagtatctggtagtttctattttctctatacattatgaagtgaggtcattggctcagaacgaatggtctgggagagattgcaggagyggtaaggagacaggggagttatgaaatagttatgtgaggaagtgggaacaaaagcaagtctggtagagaaatatcttggcatcctggacagtgataagtactacctgacaggcaaaagatttcatcagctaaagaagcagagacatagaattgcctgtatatgacacaattggagtatttct

SEQ ID NO: 308504 - DNA, 521 bp, Homo sapiens
gagaggaacaggatagagattcagagggaaacagagttgttataagaaagaaggaacaaacatggaagttttaagagaaataggaaagagaagctgattcctgaaatcacaatatttataacagagaaaagaatgggatccagggttaagcagagggagtggtttttgataagaggaggtttttgcaataagatggaagaaggagatgatgcacaaatgcagttatgtttgcaaagttagagggtaaaaaatgagtatctggtagtttctattttctctatacattatgaagtgaggtcattggctcagaacgaatggtctgggagagattgcaggagcggtaaggagacaggggagttatgaaatagttatgtgaggaagtgggaacaaaagcmagtctggtagagaaatatcttggcatcctggacagtgataagtactacctgacaggcaaaagatttcatcagctaaagaagcagagacatagaattgcctgtatatgacacaattggagtatttct

SEQ ID NO: 308505 - DNA, 610 bp, Homo sapiens
aaacactattacctgttcacagacacagaaatagccctggctcagttgaatcaaggtaggaagagggaagagaacatatggggagaggacgagagatgatgccagagtgatgatgcttcatgggggaagatcactcatgaactctgtcactcccagggtaagtgggagttagcccagaaactgtggggaagtgagggattgcaggtacaggggacaagatgacagatgcacacacagaaaataaaagagtatatttggaactactagcagtctagatttcttagaatattgagcaasgcaggacttccaagcaagaatccctgccctggtgaaaattcagcctgtaagggttagtgtaagagagatgacaataagtcagatggacttgagttttaaacctgtcttcttcacttactcggtgtatacgactttgggcaatttgctttacctctccaagcttctttttttttttattagaaaaataaaaataataatagtacttaatttattagttgtgagggttaaatgaagtaatgcatataatgcacagtgcaaaataaagttggcagtgaataaatgttagctgttcattatttttattgttatcttg

SEQ ID NO: 308506 - DNA, 598 bp, Homo sapiens
gtgagagcagaggaaaaagtttgagtttttccctcagaacatatacatatgtatgtacatataaatatgtgtgggtatatatacatatccataagatataaaatcataaaataaaatattccttgacattgtattctacatgatttgcttttcagtatccctcagaaatagcagacatgtatttttaaaaaataatttatacccataatctscaatataatatggaaagagaagaataaagttggagaaccgacactatctgacttcaagacttactataaagctatatgaatcaaaacagcctggtaatggcaaaagaatagacagatagatcagtggaacagaatagagagaccagaaatagacccacataaatatagtgaattgatctttgacaagggagcaaaggcaatacaatggagcaaagatagtcttttcaacaaatggtgctgcaacaactggatacccacctgcaaaaaaatgaatctagacaaggaccttacatccttcacaaaaattaactcaaaatgaatcatagaactatgtgtaaaacataaaactgtaaaattcctaaaatataacacagaggaaaacctag

SEQ ID NO: 308507 - DNA, 348 bp, Homo sapiens
cactaccaacataccacaccagagtggtgcctttgttacaatcaataaacctacaatgacacatcagtttcactcaaagtccacagctgatattaggggtcactcttgtacagcctatgagttttaacgaatgtataatggcatctatccaccatggtagcatcatacggaatagcttcrctacctctgtgctcgtccttccctccccccaacctgtggaaaccacggacttatactgtctctataattttgccttttccagaatgttgtatagttggagtcatgcagcatgtagccttttcggattggcttctttcactcagcaatatgcatttaaattgaaattcc

SEQ ID NO: 308508 - DNA, 348 bp, Homo sapiens
cactaccaacataccacaccagagtggtgcctttgttacaatcaataaacctacaatgacacatcagtttcactcaaagtccacagctgatattaggggtcactcttgtacagcctatgagttttaacgaatgtataatggcatctatccaccatggtagcatcatacggaatagcttcgctacctctgtgctcgtccttccctccccccaacctgtggaaaccacggacttatactgtctctataattttgccttttccagaatgttgtatagttggagtcatgcagyatgtagccttttcggattggcttctttcactcagcaatatgcatttaaattgaaattcc

SEQ ID NO: 308509 - DNA, 474 bp, Homo sapiens
gtttttctttctagaatttaatttgaaatactcttgaaacaaagttggctagacctgggaattcagattgccctagagctgtgctgtcaggtacaatagccatgagtggctatttaaatttgaattaattaaaattcaataaaatttaaaagtcagttcttcagtcacactagccgcatttcraagatgtaataaccacatgtagctactgtattggacagcacagataaagagcattttcatcatcatggaaagttctcttggacagcatggccctagagggtatccttctattatcatatttactcatgtaattcctttctcctctaaccttccccactccctttctagtttggaaacgaaatccaaagctttatggggctgctttatcatcattagcaaaagggaccgtgaactctttaacctgtcatcacagagacactagtgactccgtgactaaaagaaaaagaaaaa

SEQ ID NO: 308510 - DNA, 480 bp, Homo sapiens
ccaatgactcacttaatcttcacaatagcccagtgaagtacacaatgacattcacattttacggttgaggagacagacacaaggaaatgtagagagttaacagcagagccacaatgctccctccaataatgtacggaactaagatttcattattatattttcaraagcatattatactccaagaaaataatctgttgacttaaatgtattatgaggcaaggagaaagaagaaaaaagtaagccatcatgaaaggagtggaggatcatagagaagaaccacatgggaccccaaggaaaactacattgaatggaaaaaaaattgaaaggaatagatgaaataagattatcaaaaggttgatgattattttcaaatattactcttttctcatattttttcttttttggagttttgtgttgtattttctaacattttcataacattattcacttccagtttttccatttactgcaaagatcaac

SEQ ID NO: 308511 - DNA, 480 bp, Homo sapiens
ccaatgactcacttaatcttcacaatagcccagtgaagtacacaatgacattcacattttacggttgaggagacagacacaaggaaatgtagagagttaacagcagagccacaatgctccctccaataatgtacggaactaagatttcattattatattttcagaagcatattatactccaagaaaataatctgttgacttaaatgtattatgaggcaaggagaaagaagaaaaaagtaagccatcatgaaaggagtggaggatcatagaraagaaccacatgggaccccaaggaaaactacattgaatggaaaaaaaattgaaaggaatagatgaaataagattatcaaaaggttgatgattattttcaaatattactcttttctcatattttttcttttttggagttttgtgttgtattttctaacattttcataacattattcacttccagtttttccatttactgcaaagatcaac

SEQ ID NO: 308512 - DNA, 590 bp, Homo sapiens
tgaaaggagtggaggatcatagagaagaaccacatgggaccccaaggaaaactacattgaatggaaaaaaaattgaaaggaatagatgaaataagattatcaaaaggttgatgattattttcaaatattactcttttctcatattttttcttttttggagttttgtgttgtattttctaacattttcataacatyattcacttccagtttttccatttactgcaaagatcaacaatagaaatagttaagtatatccaactatggaacactgtctacctagccaggataataagatctaaatgtgcatgtatttctctattggaaagacagatagatggatgcatttttaagcgggcctttttaagagcattctgcaagattttaaccagtgtgaaaacagaagaaaatataggataaaggaagttaaagaagatgcatttaaatgccgacgggagagtctagggtaggaacctcccctgaaggtcaggccttgaatgtccaggactcttcagagagtctagggaaggtaagaagccttcccacttcagatactaaagcacataataaaaacattacacactaacaagctt

SEQ ID NO: 308513 - DNA, 590 bp, Homo sapiens
tgaaaggagtggaggatcatagagaagaaccacatgggaccccaaggaaaactacattgaatggaaaaaaaattgaaaggaatagatgaaataagattatcaaaaggttgatgattattttcaaatattactcttttctcatattttttcttttttggagttttgtgttgtattttctaacattttcataacattattcacttccagtttttccatttactgcaaagatcaacaatagaaatagttaagtatatccaactatggaacactgtctacctagccaggataataagatctaaatgtgcatgtatttctctattggaaagacagatagatggatgcatttttaagcgggcctttttaagagcattctgcaagattttaaccagtgtgaaaacagaagaaaatataggataaaggaagttaaagaagatgcatttaaatgccgacgggagagtctagggtaggaacctcccctgaaggtcagsccttgaatgtccaggactcttcagagagtctagggaaggtaagaagccttcccacttcagatactaaagcacataataaaaacattacacactaacaagctt

SEQ ID NO: 308514 - DNA, 460 bp, Homo sapiens
agtaactgtacattttcaatttaattatttggtattttatttgactgtcttggccatgtcattttatggaagcatttttaaatagcactttttgttagtggtgtggaatttctgcggttattwtttttttttttttttgcaacagatgaagcaaaaaaaaaaaagcactcattggagaaatagtgagtgtaaaaagagatttattttgtacagacagcaaagtatcctgtgtaatgttgctgacataaagcactttgggggaaaaaagtggaaatctgttttccataaatcacacagactcttgtacatagttatatacactcacgtagagaaatgaactgcatatatcatactggatatggggccgattttactctagaggcacatctggtgcttattgtcataaatcttttaaagaattaggtacacttttttctattaatatgtatagttttgtgat

SEQ ID NO: 308515 - DNA, 534 bp, Homo sapiens
caaaatgatagtattcagaatttatgaaaaaccataaatcactaagaaaggaaataactcgtttgcccaaaaatgggcaaaagtcttgaataagcacttatgagaaaagaaaacttgaatgggcaatacatttatgaaaagatgctcagcctcattgtattttaaggaaatgcaaatttaaatcaaaatgagataacatttcacagatgttagattgatttaaaaaaatgtaygtgtactacagttatcccttagtatctgcaagaaactggttccaggacccaccacagataccaaaatatgaggatgctcaagttccttctataaactggcatagtatttgtgtataaactatgcacatcctcttgtatacgtttgtattttattttattttattttttgagatggaatcctgctctgtcaccgggctggagtgcagtggcgctacctcagctcactgcaacctctgcctcccaggttcaagcaattctcctgcctcagcctcctgagtagctgggaccacaggtgtgtact

SEQ ID NO: 308516 - DNA, 608 bp, Homo sapiens
atgacaagttattcagtcttgctggtatgaacgatgtgcatgggtgggaggagagaaaggtagggaggaaacagagcctcaggggctatggacccccactaaattattttgaatatatcctatgagatctggagaagcataaaacaattttaaactgtaagcagcttgatgctattttgtttatagacagaacactggcagtaaaaattaggatagttggagcagattgagactagaggcagggatttaataatcaagaccctggtccttggagggttggaaggataatgtttaacagacccgatgtaaacatgcaaatgtgcctgcatctctagtaccatcctastgctacccaaagatgtttaatgattttcccagagttttgagagcccattgggttatgtctgaaaaaacaaaaatgggcctctcctccaaagacatgagaaatttattttgtgttaaaataacataaatatatgtaagaatatgggggtggccattttggcaaaatgcatttcccatcagcctacttgatttcacttcctgcctttcatgaaatatacgtatatagaaagcatgagactccccactgggctctacatttatgc

SEQ ID NO: 308517 - DNA, 593 bp, Homo sapiens
aataatatttctgtgtgtgtgtgtgtrtatataccacagtgtttttatccatttatctttcaatagacacttgggttgcttctacattttggctattgtgataatgtcattatgaacatggtagtaaccagaattttatcttttaagaaaaagtatttgttccagttcataggtactctcttgattcatctctgataattgctgggttggttttctcttcaagcagattgcctcctcaggttcttaacatcttacaaaaatgtcagccctaaccctagctcactcagctgttaaagcatatgaatttgcaattaagaagaaaaaaacttaacagctgcacactagatacttgtcagagagtataatctgcaatttaatgcacctcagtacccttcaaaagatttgctgggaaacacataccttattaaatgagagctgcctgaaggtttactctttccaatttagtcctaaattaagccaggcaaccatggagctcagtaactggcagctattgattaagtcttcatacaagtgatctgcatcatgccttggtaaaagtgttgcacttagctttagtcttattcatctgtgga

SEQ ID NO: 308518 - DNA, 593 bp, Homo sapiens
aataatatttctgtgtgtgtgtgtgtatatataccacagtgtttttatccatttatctttcaatagacacttgggttgcttctacattttggctattgtgataatgtcattatgaacatggtagtaaccagaattttatcttttaagaaaaagtatttgttccasttcataggtactctcttgattcatctctgataattgctgggttggttttctcttcaagcagattgcctcctcaggttcttaacatcttacaaaaatgtcagccctaaccctagctcactcagctgttaaagcatatgaatttgcaattaagaagaaaaaaacttaacagctgcacactagatacttgtcagagagtataatctgcaatttaatgcacctcagtacccttcaaaagatttgctgggaaacacataccttattaaatgagagctgcctgaaggtttactctttccaatttagtcctaaattaagccaggcaaccatggagctcagtaactggcagctattgattaagtcttcatacaagtgatctgcatcatgccttggtaaaagtgttgcacttagctttagtcttattcatctgtgga

SEQ ID NO: 308519 - DNA, 593 bp, Homo sapiens
aataatatttctgtgtgtgtgtgtgtatatataccacagtgtttttatccatttatctttcaatagacacttgggttgcttctacattttggctattgtgataatgtcattatgaacatggtagtaaccagaattttatcttttaagaaaaagtatttgttccagttcataggtactctcttgattcatctctgataattgctgggttggttttctcttcaagcagattgcctcctcaggttcttaacatcttacaaaaatgtcagccctaaccctagctcactcagctgttaaagcatatgaatttgcaattaagaagaaaaaaacttaacagctgcacactagrtacttgtcagagagtataatctgcaatttaatgcacctcagtacccttcaaaagatttgctgggaaacacataccttattaaatgagagctgcctgaaggtttactctttccaatttagtcctaaattaagccaggcaaccatggagctcagtaactggcagctattgattaagtcttcatacaagtgatctgcatcatgccttggtaaaagtgttgcacttagctttagtcttattcatctgtgga

SEQ ID NO: 308520 - DNA, 593 bp, Homo sapiens
aataatatttctgtgtgtgtgtgtgtatatataccacagtgtttttatccatttatctttcaatagacacttgggttgcttctacattttggctattgtgataatgtcattatgaacatggtagtaaccagaattttatcttttaagaaaaagtatttgttccagttcataggtactctcttgattcatctctgataattgctgggttggttttctcttcaagcagattgcctcctcaggttcttaacatcttacaaaaatgtcagccctaaccctagctcactcagctgttaaagcatatgaatttgcaattaagaagaaaaaaacttaacagctgcacactagatacttgtcagagagtataatctgcaatttaatgcacctcagtacccttcaaaagattygctgggaaacacataccttattaaatgagagctgcctgaaggtttactctttccaatttagtcctaaattaagccaggcaaccatggagctcagtaactggcagctattgattaagtcttcatacaagtgatctgcatcatgccttggtaaaagtgttgcacttagctttagtcttattcatctgtgga

SEQ ID NO: 308521 - DNA, 527 bp, Homo sapiens
catgaaaaactaaatgaaaactctataagactgaaaatatcacttaaaatagcatcttgtcccttcagagtctcctatttgactctgtagccaggcagstgtttttcagcagaaagaaagacttaaaaaaagttactgtggatctggggaaacgggaagctacaatttccctttgcctacgccactctctagcaaattctctcactacaatgacaggttctgccatgaagctcaccagtaaaaacatcacatttaatggtgacaaaagagaaaaaaagttgtgtgacaatccccaaggtgaattctcttagtggcattttcttagttgaatgaagttggatttgggtaaagggaagctatgatcataaaaatagttccatgttatttttatactgtcacaaacttgcctcagtgtccaaggagcaatggccattacggttaatatactatcgattggtcctcttcttgctctttttcttctctattctggatcacaggtgacccccgcagactgtgttcttagagca

SEQ ID NO: 308522 - DNA, 527 bp, Homo sapiens
catgaaaaactaaatgaaaactctataagactgaaaatatcacttaaaatagcatcttgtcccttcagagtctcctatttgactctgtagccaggcagctgtttttcagcagaaagaaagacttaaaaaaagttactgtggatctggggaaacgggaagctacaatttccctttgcctacgccactctctagcaaattctctcactacaatgacaggttctgccatgaagctcaccagtaaaaacatcacatttaatggtgacaaaagagaaaaaaagttgtgtgacaatccccaaggtgaattctcttagtggcattttcttagttgaatgaagttggatttgggtaaagggaagctatgatcataaaaatagttccatgttatttttatactgtcacaaacttgcctcagtgtccaaggagcaatggccattacggttaatatactatcgaytggtcctcttcttgctctttttcttctctattctggatcacaggtgacccccgcagactgtgttcttagagca

SEQ ID NO: 308523 - DNA, 427 bp, Homo sapiens
atttttgtcacttgcaactgaaagaattttgatactgataacttccctctttgggatctttcttgatgaagaaagatcttttaaggaaccccaaggagcatgatatatagcacattcacctccacacccagacctcacttgataccaaagtcatccttctgctgctgtttaatttcatagctgttgactttgctaattccacccgattcagttctaaatcaactggttttggtttttgttttcttcaaggagctatcaaaatagaaagcaaagaacagacattctcaaagtaagatcccagagccagctgtatcagctttacctgggaacctgtcaggaatgcaaactttacagccctaccccagtcctcttgaattagaaactctgggggtggcacagtgatctktacttttaccagccctttagg

SEQ ID NO: 308524 - DNA, 591 bp, Homo sapiens
tgcctgtgatttgaagaaaaccaggaggaaactttttatcccttttcgtcattaagagtgcttggtggccttactcatttaacacatcagcacaactagaaggagtgattcctttctaaatacagcattcagtagagcccatgcattttagcaaagcattctttccctagtattcttgggagccttaacatgtagagtaagcctaaatttaagcaaaaaatctaaccaccggccaggctgaggccagatcttgacttttctrtgtttgtcccccgtctcctcacaacccagccttctttctacacagtgtttctgtggtagtgacattctctcaatactagctgacagtcctcagcactaaccagtggaagcctggagcatgaagaaacagctaagcggatccctgtgccaaatcccaatggcaggtggtagcagcgggtgcaggtcctgagcagcaattctagagaagtccaggcagaactgcctaatcttgaggctcttgtctgcaatatcagccttgtttctcaaggtcagaaaccttacaggaaataaagagtttctacgaggcaaacataatgtagcacttgttgg

SEQ ID NO: 308525 - DNA, 573 bp, Homo sapiens
aatgtattatttcagatatagcattgctagaattctaggtacttttatacatgtatgatctttctaggcctttcagtaatttgcataagtaactttgactttttctttkactttattttctttattttttatctttattttatttttgtgcaaatttatggggcatatgatgtgaaattttgttacatgtatagaatgcatagtgatcaagttaaggtatttaggatgtcccacaaccaagcacaatatgttttttatttaactatagtcaccttattctgttaccagacattgaatttattccttctatttaactgatgatcatatggttttttgcgcccattctcttgatgttatatatcccatttattgatttgcatatgttgaatcatccttgcttccctcgtataaatcgcacttgtcctgttgggtttggtttgctggtattttattgaggattttttgtctctgtttatcagggatattggcctgcagttttatttttgttgtttgttattgctgttgtgactttgtctggtttgggtatcagggtgatgctggcctcatggaatg

SEQ ID NO: 308526 - DNA, 646 bp, Homo sapiens
atcagtctttttgatttcagccattgtagtggaaggaaaattgtatcttatagtgcttttaatttgcactttcatgatgaccagtgatgttgaatatcttttcttgcacattttggacatttgtacatcctttttggtctgttcaagtcttttgcccatgtttgtattaggttgacaaatgtagtagttgtttatgtatatggatatgagtcctttgtcaggcatggtttgcaaatgttttcccagtcttcgattgcctattcattttcttagtggtgtccttttaattttcatraagtttattattttttcttttatatgttttttcattgttctagcttttgcagttagacatatgacttctctcaaattaatttttaaattacatatatctgtgtatatatatatgcatacataaattttatgtatgtatagaggttgagtttctttttttcttcatatggtatccatttgtttcaacaatatttgttaagactttcctcattgaattgacttaaggctttgtaaaaatcaatcaaccatactttatgggtctatttctagacttcctattgtgccctactgatctgtctatccttatgccaatgccacactatcttgatgatagtagctttattctaagtcg

SEQ ID NO: 308527 - DNA, 555 bp, Homo sapiens
caagagcagtataatgattctaatgatgttctcaatgtccagctcaggaatcgatgcttccatcagccatattactcactaagccctccacttcctgatactttttaagaatggttgtttatttaagaaactgttgctatgtaagcaaaggaaggattgatatttattaataactaacagtaatatgctgaatttcaattaaaggtgaatggcagaaacagggagaaaatacagtgctctaaaatatagtccaatgtaggagaagttttggtgaatgagatggaaatgttaatcaaatgtctggcttacttaattaaattagcattgtggttaagaacacggactcagttttaagagatcagttgatscatagaacctttaaaatgttgcagagaccatggtccaggggtgggggttatattgcatatccaattatatgcaatattatatataacatctagtggcactgtattttaaatatgcagtttctaaatttaaaattacatttttaaatggaatggttacttagctttcacattgtgatttttaaacatt

SEQ ID NO: 308528 - DNA, 578 bp, Homo sapiens
atgggccctacagggttcccagattcccagagctggggcttcgtcaatgttcctcccacccccagttcatgttctgctgagagagttcaggacacccactaggcgcagaccccagatgaaaccccacctctgaataccccacacaggtcccgcgacccactcccgctctaatgagtctggctgcccgcagagctgcataatacattgcgcctttgaccttattagaagacaactacacaaatactgccttttcctggcctgggtgtctgtccgcaggtatccccagcacgtttaccattgcagataaaaatgatytgtgacggggagctgcaggctggatgttggataagaccagggctggaatagacaggctttcccttccatgatttctctaaaccctcgtcattccttatcaacagcttcaaaaacacatgttattaaacatctgggttttagtgacatccaaaactgtgtggagagtaaatgggattcgtgggtgtaagtatttttacctttgggaatggctagtgttgacagctaaaggacagcatcaggtcacaggctcaagaatactgaag

SEQ ID NO: 308529 - DNA, 607 bp, Homo sapiens
ttcaatacaaacttcatgataaaaactttcagaaaactaggaaagaaaagaacttactcaaactgataaacagcatctacacacacaaagaaaatcctagagctagcatcgtaattaatggacaacagttagttgcttttcctttagattaagagcaaagaaaagaagtcttagccaatgtaataaagcaagtaaaggaaataaaagtcatatagataagaaagaaagaattaaaactgttgttatttgcagacaacatagaaaatctcaaggaatttacccaaaaaaaaacctcatgaaatgaataagtaagtcgtaggtttagcaaggttgcagaaaacaaggctaatacacaagaagccaatcacacttctatgaatatakgttaacaatgaacaattggaaactgacatttaaaacacaatgctgtttacaatcagtctaagaaaataaaactctcaggtataaaactaacaaagcatgcacagcatctgtttgtagaaatctacaaaacactaattaaaaaaattgaagacttaaataaatggatagatatggtgtgttcagggttgatagactcaataaatttacctacaatgtgatgtaa

SEQ ID NO: 308530 - DNA, 590 bp, Homo sapiens
gtcaatcagcttaacctccacatttcaaatacactttgatttgagacctcacccaagacattcacaaagtgctgaatgacaaggtaattgttgaatttcaaccttaatatatttaaatgaaccatcgtccccattccaacacttctgataagctcttatgaaaatcacrggcttgacctgacagttgattccattactgcagtagtggcaagttcatatcagagaaacaggaaataatgcaggttggaatcattcactcaaatatgacatgaattaaaggaatacaatatagatggagtccaagaagaaatcttacagttagaagtagttgaagggctttaaattggggtcaacaggacaagttgtaaatctcatttgtaagaaatctgcaacaggcctcacaggctattctatgacccatagtagattctgcaacctccgtgaatattgagccccactattgttctgctacgctcagttttgctgtccagaaattgggtttcattggatttgctagggcttttcttgccttcttttccatggagattgatgctgacatgcatcagatgatggtaacactccaccctgca

SEQ ID NO: 308531 - DNA, 590 bp, Homo sapiens
gtcaatcagcttaacctccacatttcaaatacactttgatttgagacctcacccaagacattcacaaagtgctgaatgacaaggtaattgttgaatttcaaccttaatatatttaaatgaaccatcgtccccattccaacacttctgataagctcttatgaaaatcacaggcttgacctgacagttgattccattactgcagtagtggcaagttcatatcagagaaacaggaaataatgcaggttggaatcattcactcaaatatgacatgaattaaaggaatacaatatagatggagtccaagaagaaatcttacagttagaagtagttgaagggctttaaattggggtcaacaggacaagttgtaaatctcatttgtaagaaatctgcaacaggcctcacaggctattctatgacccatagtagattctgcaacctccgtgaatattgagccccactattgttctgctacgctcagttttgctgtycagaaattgggtttcattggatttgctagggcttttcttgccttcttttccatggagattgatgctgacatgcatcagatgatggtaacactccaccctgca

SEQ ID NO: 308532 - DNA, 548 bp, Homo sapiens
aaccatggtcagatacttcatttctaccagggtccagtagctggccaggaggcaatttttgaagggcatacgattgttcactacagatggtatgcccttgctccagaacttcaggactcattataaaatctacacagcatcttttcccacctcagatacctctaatattacaggatctgctgagtcatacattcctgttggcaggaatgctagtctagcattctggatatgctacagagcttcttcctgttctgggacccatgcaaagctgacagttcttcatataaatatactaccatcaaaacccaaagagaggctgggcgcagtggctcatgcctgtaatcccagcactttgggaggcggaggtgagtagatcacctgaggtcaggagttcaagaccagcctgaccaacatggcaaaaccccatctctactaaaaatacaaaaattagctgggtgctgtaatcccagctacttgggaggctgaggcaggagaatcacttcaaccccrgaggaggaggttgcagtgagccgggatcacaccgctgc

SEQ ID NO: 308533 - DNA, 640 bp, Homo sapiens
tggttagtccctaaatccttaagtgctcatctcatactctgttaagcacatgtgtctcaccaaggcttccaacacccttactacttcttgctacatttaatcaagttagcaaaatatcattgatgtagtggaaaagtgtgttgttcttcaggatgtctagacattccgagtstcttcagactatattatgacagagctgaactgttcatatttgtcatttatagactgtaagtgagtactattttctgttccaagtgaatgcaaactgtttctgatcctcttttttgaatgaagtggaaagaatgcaccaccagatcaaaggccacatcctgcattcctgaggtcgtattactgtgctgtagaacagataccacatatggcactgtagaggcaattgggctatacttggttgcatttgaagtagtctcacgtcatccttcagatttcatctggcttttataggtgccagacttgtgaactaaatggagattatgctagagaccacttctgaattatttatgtccttgagggagacactatcttcttttcccttacctcccagggtcaaaatttttctgtaattgctatgctcgtgaggtgggcacagtttcagagcttggcttatttgactatgacagct

SEQ ID NO: 308534 - DNA, 640 bp, Homo sapiens
tggttagtccctaaatccttaagtgctcatctcatactctgttaagcacatgtgtctcaccaaggcttccaacacccttactacttcttgctacatttaatcaagttagcaaaatatcattgatgtagtggaaaagtgtgttgttcttcaggatgtctagacattccgagtgtcttcagactatattatgacagagctgaactgttcatatttgtcatttatagactgtaartgagtactattttctgttccaagtgaatgcaaactgtttctgatcctcttttttgaatgaagtggaaagaatgcaccaccagatcaaaggccacatcctgcattcctgaggtcgtattactgtgctgtagaacagataccacatatggcactgtagaggcaattgggctatacttggttgcatttgaagtagtctcacgtcatccttcagatttcatctggcttttataggtgccagacttgtgaactaaatggagattatgctagagaccacttctgaattatttatgtccttgagggagacactatcttcttttcccttacctcccagggtcaaaatttttctgtaattgctatgctcgtgaggtgggcacagtttcagagcttggcttatttgactatgacagct

SEQ ID NO: 308535 - DNA, 647 bp, Homo sapiens
catttaatcaagttagcaaaatatcattgatgtagtggaaaagtgtgttgttcttcaggatgtctagacattccgagtgtcttcagactatattatgacagagctgaactgttcatatttgtcatttatagactgtaagtgagtactattttctgttccaagtgaatgcaaactgtttctgatcctcttttttgaatgaagtggaaagaatgcaccaccagatcaaaggccacatcctgcattcctgaggtcgtattactgtgctgtagaacagataccacatatggcactgtagaggcaattgggctatacttggttgcatttgaagtagtctcacrtcatccttcagatttcatctggcttttataggtgccagacttgtgaactaaatggagattatgctagagaccacttctgaattatttatgtccttgagggagacactatcttcttttcccttacctcccagggtcaaaatttttctgtaattgctatgctcgtgaggtgggcacagtttcagagcttggcttatttgactatgacagctcttacctcacagaaaaagaaattaatatgggattctgcaagctcccagtgatgtccattccaaggaagtgaccacagagtgggtttgtggaaccattgga

SEQ ID NO: 308536 - DNA, 517 bp, Homo sapiens
ctgccactcattgcgataatcatatctgacttgcttctgatggttaaatgcaaccacctcagtgtctctgactcaggcatctcatgtcttttttattttgagatcctaacatctttgttagtagtagtaagtccagttctatagtcttgctccggytgtctgtctgtgcatagtgtcataaaacaacaatcattttattatgtctcatgatattgtggtttaagaatttgggcagggctcatctggacaattcttctgttccagttggcatcaactggggtcactctgtgtcactcaactggctgctatagatgtctagggtgtcctagatggcacaggcctctcatgacaacaaggataaacaggtcctttccttctttgtattgtctcagggggttatctctctcacaagatagtcagacttcttacatgttggctcaagtatccaagagcaaatattccaagaggcccagaaaaaatctgcaaggtttttaaggacctagctttagaagttcca

SEQ ID NO: 308537 - DNA, 636 bp, Homo sapiens
agggtaaaatcaaaataagataaagatcaataaaaaacaggacaaagtattgtagactgactcaaaagtactgaaaataaatgctagtatcaacaagaagcttgagaatctgaacctggtgccttacccrtaataggtgttcaatatatattgattattcctgattgaacattattcattcaaagcagaagaataatcttttcctttatacattgcttctgtgttttcattttaaaacatcatgaaaaatgatttttagagaatcattaaaaacaatttgtgattttcttataattagccatggagcacataacaaaaccagatttgtataaattgatcaccttcctacctaagcagtgagagcagaattttgaaaagatatcgaggcagtacttttatatagcatggaaacccgttttactttttgttcaaatggagatacgtttgagagtaaaaggagttagtgttaataaatacaatgcaataacaggcatgatgggatcaccccaggaaaaccaaacatcacagagccatcctatccatgacttgacaaactgatgacaacagtgattcagacccaaacatgcagtgataggtttctcattatgtgattcattgtcactcagccagttatag

SEQ ID NO: 308538 - DNA, 565 bp, Homo sapiens
ttatcagtccttattttcttaacttctcagcaactttagaaattaatgaccattacttttcaaaacactgtatttacgctgttttccagtaaagaattcctgcccctgctctgccccagtttttcggcttcctttccggaccccactatagcctattctttcttcatctgtttcttcttttctcacattttatacaccccctgggaagtctcctccactcccctagcttcarttgccatctacttattgctgactcttacatcttcactcctgtccaggtttcaatgttttttctgagctccaaacctgtataactgactgctattggacttctccatttaagtttcccaagaacctccaagaattcaataaaatttaatttgttcaaatctgcattcatcatctcaacaatgcacccaacttctcctccctcagtgtcccctctctcatttccacaatgaaaataagaaatgaagcagctaatgataacaataattacaataataacactgcttatataactctttaggaatatgtctacacaaacatgtgagatggatattga

SEQ ID NO: 308539 - DNA, 604 bp, Homo sapiens
cggctaatttttgtatttttagtagagacggggtttcaccatgttggccaggatggtcttgatctcctgaccttgtgatctgcccacctcggcctcctgagattacaggcatgagccaccgtgcccggcccaattttgactatattttaaatggaatgcatatgcaaggctgtgtgaagtctttaagaaaatgaaaacttaagtgttcctaatataaatgtgcccgtagttcagtatctcaaccatcatttaaatacaggcccttaccttgctcctagttattaaaaattttagtattgtgaattstaatatgcttaattgacttttgaaagacctttatgatttaataaactaaagagggctgataaaaaccaatataaattcaagctttcagaaatgagctatttattcaaaaatggtacatatcgaaataaactctgttagagaaacagaaagcaatgtttgttttgctcctacaaaggggaaggtcattataaattgttaagtcacagatcatacaacttaggagctataaaacaccttgtagatcctctaatcctgtggttgcaacctcactacctgcaggtttgaagactgtatgtat

SEQ ID NO: 308540 - DNA, 604 bp, Homo sapiens
cggctaatttttgtatttttagtagagacggggtttcaccatgttggccaggatggtcttgatctcctgaccttgtgatctgcccacctcggcctcctgagattacaggcatgagccaccgtgcccggcccaattttgactatattttaaatggaatgcatatgcaaggctgtgtgaagtctttaagaaaatgaaaacttaagtgttcctaatataaatgtgcccgtagttcagtatctcaaccatcatttaaatacaggcccttaccttgctcctagttattaaaaattttagtattgtgaattctaatatgcttaattgacttttgaaagacctttatgatttaataaactaaagagggctgataaaaaccaatataaattcaagctttcagaaatgagctatttattcaaaaatggtacatatcgaaataaactctgttagagaaacagaaagcaatgtttgttttgctcctacaaaggggaaggtcattataaattgttaagtcacagatcatacaacttaggagctataaaacaccttgtagatcctctaatcctgtggttgcaacctcrctacctgcaggtttgaagactgtatgtat

SEQ ID NO: 308541 - DNA, 570 bp, Homo sapiens
aattatttttctatgtgcaggtttggtagggttgtatatgctcaaatgaaaataagtataataatttttcagttattttgaagtagaccgatttgcactcggagactaatttggggttaggcagctggaagagactctgtgcagatttttacccccaatagaatgctacacattcacaaagactaaactgaagctcagaagaaaaccgtgtagcataattggtgatctctcttttttcataaagaacaggctaggatggtttatttttaaaaagacaaaaaaaaggtcaaagtggcaggaaaaataattcrggtaggtcttcccaactgaaaggaatcatctattaggaggtgagaaacagatcaatatcagttttctagcttcagctttggtggtagatataggttttgttatgcttattcaatttgggggcctttttataaaaataatacataagcattttacttctgcaaaatgtataaaaatatatgtgatttcatgagcacactgctggggtccctgtcagggccttggagaaagcactgaaggccttgaggctgagcctcaccg

SEQ ID NO: 308542 - DNA, 570 bp, Homo sapiens
aattatttttctatgtgcaggtttggtagggttgtatatgctcaaatgaaaataagtataataatttttcagttattttgaagtagaccgatttgcactcggagactaatttggggttaggcagctggaagagactctgtgcagatttttacccccaatagaatgctacacattcacaaagactaaactgaagctcagaagaaaaccgtgtagcataattggtgatctctcttttttcataaagaacaggctaggatggtttatttttaaaaagacaaaaaaaaggtcaaagtggcaggaaaaataattcaggtaggtcttcccaactgaaaggaatcatctattaggaggtgagaaacagatcaatatcagttttctagcttcagctttggtggtagatataggttttgttatgcttattcaatttgggggcctttttataaaaataatacataagcattttacttctgyaaaatgtataaaaatatatgtgatttcatgagcacactgctggggtccctgtcagggccttggagaaagcactgaaggccttgaggctgagcctcaccg

SEQ ID NO: 308543 - DNA, 576 bp, Homo sapiens
tcctagccagtgcagtaaaataagtagatgcataagtattagacaaactaccaccacaataaaacaacaacaacaacaacttattaggaataatgtgaaactttaagcaaatgaaaatttagcaagaaggcaagaatactaaacgtggtcgggtgcggtggctcatgcctgtaattgcagsactttgggaggctgaggcgagtggatcacgaggtcaggaatttgagaccagcctggccaagatggtgaaactccatttctactaaaaatacaaaaattagcctgttgtggtggcgggcacctgtaatcccagctacttgggaggctgaggcagagaattgcttgaacccgggaggcggaggttgcagtgagctgagatcatgccactgcactccggcctgggcgacagagcgagactgctgtttcaaaaaaaaaaaaaaaaaaaaagaatactaaatgtatttgttttctattgctgcggtaacaaagtgacatgaacttgatggcttaagacaaaaaacatttgaattattacagtactgtaggttagaagttcaacacaggcctctctgggct

SEQ ID NO: 308544 - DNA, 576 bp, Homo sapiens
tcctagccagtgcagtaaaataagtagatgcataagtattagacaaactaccaccacaataaaacaacaacaacaacaacttattaggaataatgtgaaactttaagcaaatgaaaatttagcaagaaggcaagaatactaaacgtggtcgggtgcggtggctcatgcctgtaattgcagcactttgggaggctgaggcgagtggatcacgaggtcaggaatttgagaccagcctggccaagatggtgaaactccatttctactaaaaatacaaaaattagcctgttgtggtggcgggcacctgtaatcccagctacttgggaggctgaggcagagaattgcttgaacccgggaggcggaggttgcagtgagctgagatcatgccactgcactccggcctgggcgacagagcgagactsctgtttcaaaaaaaaaaaaaaaaaaaaagaatactaaatgtatttgttttctattgctgcggtaacaaagtgacatgaacttgatggcttaagacaaaaaacatttgaattattacagtactgtaggttagaagttcaacacaggcctctctgggct

SEQ ID NO: 308545 - DNA, 616 bp, Homo sapiens
cctccagcctatattggtcaaatttgctgaatgatttatcatatcactccttaaatattccaactttactatttaattccaattctgtatgtaactttcttttgactaaggccaggtaatttaatctctctgagaacaaatctcttttcgttcagcagaatgagatccagcttataatatttcaacatctttcccagccctggtgtttttggttctatgaaattcacgatcctagatttattgtcacttattctttcaataataatttattgagctgcacctaccatataataaggaccaaggaaaagtgcatccataaagttgtccaaagacaatattaagtgttcycccacaaagccctgcttcacctccaatcttccactcttccgccatgcacacaatcagacacagccaccttctttcattttgttttgtttgtcatttgttttaatcaggatcacagaaaaaatatgaagggatttataggttgttttcaggcccacagagacttgaagcataaggtataaagtatgctcctcctttttttcagctttattgaggtataatttacaaatacaaattgtatatatttaaggcacacaacttcatgtttgga

SEQ ID NO: 308546 - DNA, 555 bp, Homo sapiens
tatgtgagatcacgtggcatttgtctttctgtgtctggcttatgtctcatagcataatgtccttcagattatatccacgttatcacaaatggaaagatttccttctttttaaaggatgaatagtattttattttttatatataccacattttatccattcatccattgacagatatttaggttgtttccatatcttgactgttgtgactaatgctatatcaacatgggagtacggatatgtctttgagatcctaatttcacttgctttggatatatacccagaagtgaaatttctgggtcatatatggtaattctgttatgctcctccctttttcctcartcctcataggaagccttactcgtcttggccctcagagtcacaaaatccccctgggtttctcatctagcaccagacccaaaggcaactttctgtattcactcagctaaacaaagagcattggagagcagagcggctcctgtcactcaacaactagaaggggaatgaaaccactgacacaggctatgggcattcaacacccacgtgctgctcactaa

SEQ ID NO: 308547 - DNA, 555 bp, Homo sapiens
tatgtgagatcacgtggcatttgtctttctgtgtctggcttatgtctcatagcataatgtccttcagattatatccacgttatcacaaatggaaagatttccttctttttaaaggatgaatagtattttattttttatatataccacattttatccattcatccattgacagatatttaggttgtttccatatcttgactgttgtgactaatgctatatcaacatgggagtacggatatgtctttgagatcctaatttcacttgctttggatatatacccagaagtgaaatttctgggtcatatatggtaattctgttatgctcctccctttttcctcaatcctcataggaagscttactcgtcttggccctcagagtcacaaaatccccctgggtttctcatctagcaccagacccaaaggcaactttctgtattcactcagctaaacaaagagcattggagagcagagcggctcctgtcactcaacaactagaaggggaatgaaaccactgacacaggctatgggcattcaacacccacgtgctgctcactaa

SEQ ID NO: 308548 - DNA, 554 bp, Homo sapiens
cctggaaccaaaggtggttcatagagggctgtaagaactcagattccgtgattttagggagatgtgctctttgatgcargagactcccctaggtaaattgaggaagttagttgtggccccagcacagaactatatttcttccattctaatccctcttggcattctttctttatctgttgcctgccaggatctaaaatgataagggaattaaggctgttcttcatctaccacacccttccccgcactcaggacaatgtcatagtaaagacttggcaaagttctctaggaatcacaaaggtcatttatctaggctaagtttaaatttaatgctcaaaatacataaaaacttagtattgtaactattctaacgaggcttgatttctccctgtggttctgcagggaaatgttctggcaattttgccccagtgaaatgtgagacaaggtgcctaaaataactaatacgttagcttttgaatttttaaggaggatttgctctgatcctagagaaatgactacatctctcttttcttcaatttcctcatctaaataagggc

SEQ ID NO: 308549 - DNA, 554 bp, Homo sapiens
cctggaaccaaaggtggttcatagagggctgtaagaactcagattccgtgattttagggagatgtgctctttgatgcaagagactcccctaggtaaattgaggaagttagttgtggccccagcacagaactatatttcttccattctaatccctcttggcattctttctttatctgttgcctgccaggatctaaaatgataagggaattaaggctgttcttcatctaccacacccttccccgcactcaggacaatgtcatagtaaagacttggcaaagttctctaggaatcacaaaggtcatttatctaggctaagtttaaatttaatgctcaaaatacataaaaayttagtattgtaactattctaacgaggcttgatttctccctgtggttctgcagggaaatgttctggcaattttgccccagtgaaatgtgagacaaggtgcctaaaataactaatacgttagcttttgaatttttaaggaggatttgctctgatcctagagaaatgactacatctctcttttcttcaatttcctcatctaaataagggc

SEQ ID NO: 308550 - DNA, 541 bp, Homo sapiens
tagccaggtataaaaaaaatttttttttactaggattctgagcattttgatacatgattttcaggcttctattwtgactattcagaaatctgatgatagtctaattgttctccccttgtagagtgccctggttccttttaagacttccttttggtctctgaggttctgcattttgaccataatgtgtctggttattatttcatttgatttattctgcctgtgacccctatgatttctgaatctatgattcatgtctctcatcaactctggaaaattatcaaccatttcctctaaaatattgtctttgcctcattgtttttatttttctttctggaacttctgttagatacatagcgaacctttttagtccatccttcatgtctcttaacatcttttttacattttatatattttcaaacctttgcaatgaattatggacaatttctttaattctagatttaagtttatttatgttctgttttgtataaatgtgctgttttatacaacattatattttaattttggtgcctatattttttat

SEQ ID NO: 308551 - DNA, 541 bp, Homo sapiens
tagccaggtataaaaaaaatttttttttactaggattctgagcattttgatacatgattttcaggcttctattttgactattcagaaatctgatgatagtctaattgttctccccttgtagagtgccctggttccttttaagacttccttttggtctctgaggttctgcattttgaccataatgtgtctggttattatttcatttgatttaytctgcctgtgacccctatgatttctgaatctatgattcatgtctctcatcaactctggaaaattatcaaccatttcctctaaaatattgtctttgcctcattgtttttatttttctttctggaacttctgttagatacatagcgaacctttttagtccatccttcatgtctcttaacatcttttttacattttatatattttcaaacctttgcaatgaattatggacaatttctttaattctagatttaagtttatttatgttctgttttgtataaatgtgctgttttatacaacattatattttaattttggtgcctatattttttat

SEQ ID NO: 308552 - DNA, 590 bp, Homo sapiens
agctggtggaggcagcagcctgcatgtgacacttttacaaatcaggttcagagaaactcattataactggttagatggaggagtctgaactgttgaagtgtgagcttgcaatggtatgatttattttccccaattgctgctttcatttatacagtgtaggccctctgtcccgctgcttcacatcccctaatgcttccttggatgggtgccatgcctcccctgtcacttttggacattcacacagtctcattccagcagttaaggcttgggcctgttcacatttccaaacttcagtcttaagcacaatgcaacactctgtcctccctcctcctgggctggtgagagcattggctcccagcaacccggagaacaggaggatggtgtagtctgcctctgcaaccctccctccttttctctctcttcgatggggctagagggcaggaaggaggggtagaggcagagctttccctacctgaccagtccctgccagtgtggggagacttccgggcctggctttcttgggggcagtgttcarcttcacctcggtttcctccaaaataaggaaccccctccagggtgggcggcagtct

SEQ ID NO: 308553 - DNA, 332 bp, Homo sapiens
cttcttaaaaaattaagaatctcaagatagcaacagcagaacattaaaccaagtgtggggcccttctgaatgccacagagccagctctggctgcccaatatttacttctcaaagggagactgtggaaacatcaygggaacaactctaaatgggaattctcaggccctggtgacaggcggcagaggagttaggcccacctgatactctcaaattgcaccctggggactagggaccacccacaccaattcccaccgtaaaaggtagcttcttttgcttttcctctttcctgtattctgctgtgggtattattcctgtatttcatgtcaggggta

SEQ ID NO: 308554 - DNA, 332 bp, Homo sapiens
cttcttaaaaaattaagaatctcaagatagcaacagcagaacattaaaccaagtgtggggcccttctgaatgccacagagccagctctggctgcccaatatttacttctcaaagggagactgtggaaacatcatgggaacaactctaaatgggaattctcaggccctggtgacaggcggcagaggagttaggcccacctgatactctcaaattgcaccctggggactagggaccacccacaccaattcccaccrtaaaaggtagcttcttttgcttttcctctttcctgtattctgctgtgggtattattcctgtatttcatgtcaggggta

SEQ ID NO: 308555 - DNA, 577 bp, Homo sapiens
tgaacccaggaggcggaggttgcacagtgagccgagattgcaccactgtactccagcctgggcgacagagcaagactctgtctcaaaaaaaaaaagaccctagaaattttaaaaaattatgttgattcaagagtttgcctggattttgcttgcagtaagggataagaaagtatgaaaaggtgtgctgttcccarttctgcttcccagtgggggctgcctggggagccaggaggagctccttgccattctctgagctctttagagttgtaatactcaagaaaggtatttctttatacaggaccttcacaacaggcctcctttctagaaggtggcctagaaatagacattaaaatgtaaaatatgcaactcctttgcccaggcatctctctacttctgggaatttatcttaagaaaataatcaagaagaatatctgtttttgacttgtttaaaatagcgaagacatgaaaacagcttaaatatccatttacatggtattgattttttaaaatggaagttttgggctgggtgcggcgtctcacgcctgtaatcccagcactttgggaggccaaggcaggc

SEQ ID NO: 308556 - DNA, 572 bp, Homo sapiens
aaccctaattcagatggtagatatctttaatcctcatcagcttcatctaaagagttataagatagaataagctgacagaytttggttgggagtcaagagtttaggacactcaccactgtggaacttgagcaagtcacttcacctttctgggtcattgttttcaaatctgttcaggaggagcgttgcagtggatccatgtttccaaagtatggtatgggtgtactatgataaggcacttaagatgcttttacatgggtaaatgggcaaacatttttaaattttcatgtttatattaatcatggctatcttaaatgtctggtaaggctggttttcaatttatgttggtaatataaaaacacacaaggttttgaaaagtctcaatttaaataaaaccatgagtaaataatagaacagttggcatatgtatatgacaaaactgtgaaagactgacatttggggaaacattgaactacatattctcaaaaaatccttccagatcagaaatgttaggattctgtcaatccataaggatgcccattagaatggaacacagagaggtctggaagaagaca

SEQ ID NO: 308557 - DNA, 572 bp, Homo sapiens
aaccctaattcagatggtagatatctttaatcctcatcagcttcatctaaagagttataagatagaataagctgacagactttggttgggagtcaagagtttaggacactcaccactgtggaacttgagcaagtcacttcacctttctgggtcattgttttcaaatctgttcaggaggagcgttgcagtggatccatgtttccaaagtatggtatgggtgtactatgataaggcacttaagatgcttttacatgggtaaatgggcaaacatttttaaattttcatgtttatattaatcatggctatcttaaatgtctggtaaggctggttttcaatttatgttggtaatataaaaacacacaaggttttgaaaagtctcaatttaaataaaaccatgagtaaataatagaacagttggcatatgtatatgacaaaactgtgaaagactgacatttggggaaacattgaactacatattctcaaaaaatccttccagatcagaaatgttaggattctgtcratccataaggatgcccattagaatggaacacagagaggtctggaagaagaca

SEQ ID NO: 308558 - DNA, 608 bp, Homo sapiens
agggaagagaagccatgacatttcccctcctgctttctccctgcctgggtgctgagtttctggtggtgcctgtattctacaacagcagttcctgttgggtggccccgttcccatggttccaactttgctggttcttgtagcacctttttccctctgcccattcaggcctaggagtcacaatggcttcccacatttgctaatcctggaatgccttaacttctctttttatttcttttaacctttgtatatagtctctttatcaaactatccttgaaatcctggttgagggtgctgtgatggttaattttatgtgtcatcttgactgggccaaggagtgcccagacagctggtgaaacattgcttctgggtgtatttgtgagggtgcttttggaagagattagcctttgaattggtggactgagtaaagtacttggccctcccctgtgtgagtgggcatcatctagtctgttgagggcctgaatagaagaaaaggtggaggaagtgtgaatacattttctgcctgattgcttgagctgggataccagctyatgatacctgccctcagtgctcatgttcttagggcttcaggctcagactggaacctgcac

SEQ ID NO: 308559 - DNA, 601 bp, Homo sapiens
gggtgtgcactggatgggtggctggttccatcctgctctatccacgggatatgttctctgattcccatcccgagggattctcgagggccctgtcaggaagcgagaaaggctgcagctggagactgtgggattctgggcgggtctgtgcaggcttcaaagactcagtgttttctttttgaagaggagtctttgcagctcattagctctgtggcagaggccaccaaccaaatcaaataggggtctgacttagcctctgcgagttcccctaaagacctctgtatggggattttggagaagagaagcttgtttgcactccacttttagactaaagctcactgcgaggagaggctgggcgcagagcacgattgtatgagtatctaataagcaacagctcttggtgctgatgagaaagcttccaacacagcacaaggacccaccttcactgccccgtcacagtgtcatgyacatctggacacttggaagaaaatatcatttgatgatgatgttgctgataacatgcctctcctccccagcccccgacccaccaaagaactctctgttgagatgcacgttaaattccaagacaaatgtgcccctgcgg

SEQ ID NO: 308560 - DNA, 601 bp, Homo sapiens
gggtgtgcactggatgggtggctggttccatcctgctctatccacgggatatgttctctgattcccatcccgagggattctcgagggccctgtcaggaagcgagaaaggctgcagctggagactgtgggattctgggcgggtctgtgcaggcttcaaagactcagtgttttctttttgaagaggagtctttgcagctcattagctctgtggcagaggccaccaaccaaatcaaataggggtctgacttagcctctgcgagttcccctaaagacctctgtatggggattttggagaagagaagcttgtttgcactccacttttagactaaagctcactgcgaggagaggctgggcgcagagcacgattgtatgagtatctaataagcaacagctcttggtgctgatgagaaagcttccaacacagcacaaggacccaccttcactgccccgtcacagtgtcatgcacatctggacacttggaagaaaatatcatttgatgatgatgttgctgataacatgcctctcctccccagcccccgacccaccaaagaactctctgttgagatgcaygttaaattccaagacaaatgtgcccctgcgg

SEQ ID NO: 308561 - DNA, 224 bp, Homo sapiens
gattctattctcttgcttcaagattctagagtcttatattctgttaaagggagtctttgggctttttgtaatcatgaattacagccattttaaaattccctttaatattcatattatttctaccagaataggccttttgctttragtgaacagaaactccttgagaaaatttcgttatattgctattagcaccttcctttcaaaatatagagtcatgtagtatc

SEQ ID NO: 308562 - DNA, 553 bp, Homo sapiens
gatgtataagtgtttcagggctgtaacaaagctccacgarctggggggcttaaataaaagaagtcatctcacagttctggaggctaaaaatctgaagtcaagatgttggcagggttggttccttctgacagctgtgagggaagaaatggtttcaggcctctctccttggcttgtagatgactgtttgcatcttcgtgtggcctctgtgtgtgtctgtgtccaaatttctcctttttataaagacatcaatcatagtggattagagcctactccaaaggctcatcttaactacatgtgcaatgacctcattcccagtaaggtcacattctgaggtagaggagcgggggattagtacttcaacatatgacttttgggggtatacaattcaagtcaaaataaataggaagttggcagaaattgaactggtaataatgccaaaatacttgttgctatacttccctgtcttcctaaggaattaaattttattgatatttatgttgaaaatagagggcctctaaaaatctttatagaagtactattatcctattataat

SEQ ID NO: 308563 - DNA, 432 bp, Homo sapiens
gaaaatgttatgacatgggataattttatgaaattcaaatttcagcatccataaataaatttcagttccaataattgtattggcacatagacatgcccttttgcttatgtattgtctgcaagtgctttcatagcacagtggcagggctgagtagttgccacagggatggtatgacccacaaaccctaaaatatttactaactggtacttcatgtttgctcacccctggtttaaaggaattcaaagcctttgaaatagcatttcaaagatkagggctttgctttgcttgaatcttcccatttattaatagaattcccaaggcactgggattggttttattcttaggaagaatttaaggatctataactaagtaagaagtcaaccttgctattcatgttatagatcttcaaccatgattacggtaaaagggctc

SEQ ID NO: 308564 - DNA, 580 bp, Homo sapiens
ttatccacagatgaggtaggaagaagggttttatgctcctgaacagctcattttcatagtcctttctgctctgcaccttggtcctgttcaggaaagatttttcttctgtcttaaactttgaattccttctgagtttgaaagttactattctgccttttctctttccttatctcaggccatcctaactcagttcccagagggaaaatattagcctggcaaataggcctcagagaagggaattattgctttgcaattaagtcagcaattcctttgaatgtatttctgcactttggtgtgggctgggrgaaggaaaatggcccttggggtgaaagagaaagtatgaagtggtggggcaggaagttaatggagccaagtcttgaagaggaagaagcagccaataagagcacattgaaagattcactattgaaatgggagggagtaaaagatagagacttatcttccttataacttggggagaatggagaggctgggagggagtaaaagatagagacttatcttccttataccttggggagaatggagaggctgggagaaatctttactaagagatttcaaatga

SEQ ID NO: 308565 - DNA, 648 bp, Homo sapiens
cagcagtctttgcaacaacaaaaattgagccctattttccatccaaaatcttttattccttgcctacaactcactcatttttgctttaaagtgtgtgtgaataaggttatgatgctttatatcatcttcatgtttttctccttcagttgaatgtacatggtgtggactcttgatgcttgagcagcttaaattttttcagtatttaattcaaagttayaatttttaagatttttatttaaaaattgatgtaataacatgtatccagcaaaattaatataattatatatgacttaatctttagtttcaaaatctacaatagttaatatgtttaagatatttttaattattttatatacattatccaagtcttatgtctacatgaagtataaattgattattgaatactgtaattagagaaaaatatttgtgatagtgtatcctttgaaaattcattacatttgtctttaaacatgtattataataatcttaaaacaatgtttcagaaaaatattgtacttttgttcatatagaatatgtattatagtttattctactgtgaaacaatactaaattatattctactttgaaacactaatgttttaaaacaaatatctaagttcagattgataacatgtgatatggtttgcc

SEQ ID NO: 308566 - DNA, 519 bp, Homo sapiens
atctaagtctcttactaggtctctgagaactcactttatgaagttgagtgctcatgtgttgggtgcatatacctttaggagcgttaggtcttcttgttgagttgtaccttttaccattttctaaggcccttgtttgtcttttttgatctttgttggtttaaagtatattttgtstgaaattagaatagcaattgttctttgcttggtagatttttctcccaccttgtacattgagcctatgggtgttattacatatgagatgaatctcttgaagacaacatgccattggatcttgcttctttctccagtctggcactccgtgtgttttaattggggcatttagcccatttacattcaaggttagtattcatatgtgttaatttgatcctgttatcctgttgtaagccggttattttgcaggcttgtttgtggggttgctttataatgtcaatggtctatgtccttaagtgtgtttttgcagtgaccaataattgtctttcctttccatatttagcactc

SEQ ID NO: 308567 - DNA, 581 bp, Homo sapiens
tttaagtttcttgctttttccctgtctctttcagggatgtcagtkaattgtagatttgatctctttatataatcctgtatttctcagaggttttgtttgttcttttaaaaattttttctttacttttgtctgatttatttctagaatagttttttttggccacttgaaaaattctttcagtttgttgccaagatttaaacattggaagacttaagaatatgcttgtcttttaaaaaaatataattccaactttgattttagattcagggggtacatgtgcaagtttgttacctgggtatattgtgggatgctgagatttggggtatgattgatcctgtcgcctaggaactgagcatagttcctaatagtttttcaattcttatcttcctcattttctgactcctcctgaagattcaagcatcctggtagcaacagtgtcatatttctgcatggtcactctcagccattgttgtatagctattttctcctatagacttggctgtcgtacttcactttgtctcagatccttcctgagcaactccaatatgcatagcatactcctgatctctgtggacactagt

SEQ ID NO: 308568 - DNA, 581 bp, Homo sapiens
tttaagtttcttgctttttccctgtctctttcagggatgtcagttaattgtagatttgatctctttatataatcctgtatttctcagaggttttgtttgttcttttaaaaattttttctttacttttgtctgatttatttctagaatagttttttttggccacttgaaaaattctttcagtttgttgccaagatttaaacattggaagacttaagaatatgcttgtcttttaaaaaaatataattccaactttgattttagattcagggggtacrtgtgcaagtttgttacctgggtatattgtgggatgctgagatttggggtatgattgatcctgtcgcctaggaactgagcatagttcctaatagtttttcaattcttatcttcctcattttctgactcctcctgaagattcaagcatcctggtagcaacagtgtcatatttctgcatggtcactctcagccattgttgtatagctattttctcctatagacttggctgtcgtacttcactttgtctcagatccttcctgagcaactccaatatgcatagcatactcctgatctctgtggacactagt

SEQ ID NO: 308569 - DNA, 546 bp, Homo sapiens
tttcattctccaaaccattttgtatgtcacttaaaggttgatctcttaaatatattttaatcatgtcattatactaataaaacaatgtaaatagccttctgttgcctataggattttgggcacgtgtcacactgatatttaaggtcttcttcaaacaggttgagtgaatctaattccttaggtagcctctctaggttttagcttttgggtttctactaaaaagcatctgcaattttgtgcctagtcaattggaaaacctttctaaactctatttcttacccattgtcagtarcaattgataactttttttgagtatttattttgtgccagatatcgcactgagtgctttacatgcattatcacatttacttaacacaacaaccctgtgcagtaggttctattatttccccaatagtgggagttagacacacagagatatagaacatcatttaggttacaaaactaataggctgcagggtccagtctgactctagatttaaatagcgatctaaatcagtaaactgaactgctttcattttgctttag

SEQ ID NO: 308570 - DNA, 476 bp, Homo sapiens
agactgggcaagatgggctttgaggggaggggcatgtgtgtgtctaagctatagagtcagagagacttgagattatagcttgcttctatactcactacactaaatgccagtttcatcatttataaaatgaatacaataaaatgtttgttgcaatgattaaatagggctatatatgtatctaaatatctataaatagggatatatatctctttatatatctatatatgcatatatatctccctatatatctatatatacatatatatgtgtatatgtgtgtgtgtgtgtgtrtgtgtgtgtgtgtgtatatatatatatatatatatatatatatgaaggtttcttttgagtgctggaaacataataagctaaggatgaccatgaaatttctattggcatgttgactctgacagtaaccattggagtgttctgttagggagagctatgaggaaatgtccaagattattaagaaagag

SEQ ID NO: 308571 - DNA, 418 bp, Homo sapiens
gaaatgcccattggatatcccaatcaagttaatcttccataatatttaactgtattacaaataaaggaatggtttgtggacaactgaggaattttccrtgtgtactttaaaccatagttataaaatattctgtatttttcttgtcatccatattaaatattcaaggcttgaaaaaacgattgaggccttattattacaaatatcttctaaactgagaattccctagtgcatgtttttctaagacattttaggatatactagatgctctgttatctcattgaacagatgggacacagtatcacatctcagatagtgtggccaaattctcagtgctgcatatttgtttcatatccactgccttttcttatgatttgaggtggtgtgaaattttggttagatggtaaattggttgcttttg

SEQ ID NO: 308572 - DNA, 579 bp, Homo sapiens
ctccaatttttgttttgataaaaatatctataaagtttactttggcaggaaaaagtaaagaaccgtgacttatgcttctctgtcatattttgtattatattatctatggatgagttatatttttccaacccaccrtctccacttatggagttttaaaacatattattttgtaaggctgggggaggcatgttgcaatattggagtggcaaatctctctctctgttctcacatcccaacatcaggatattgatcttctttttggaaacattgcgaaacaaagtttcacatgccttacaagtctgaaatgaggtatgtcctaaaacctggtaaatagaagaaagttggttagaaacctagatgtctcctcaaacaagaaattatgattttggttaagggatatggaaatagtgcattttgcaaaatgatcttaaaggattattgctgctttaagaagcaagaatttttattctttatatttgaaatggaatatctttaatttaaaattcagaggacaaatgccctcttcttttttttctaaaaagaaattaactactactactcatcttgtgtagacgttgt

SEQ ID NO: 308573 - DNA, 534 bp, Homo sapiens
ttgctgctgtgtgactcctagtgtttcctataatttggtagcagaaaccatatgtctttgtgcctactgtgtgcagtcccctgtggcgggctgctgccatcctagctatgtgactgccctgtgataggaagtaagcctcaaagcacgctcctctaggaggcagggagaggatgagtgagaaatttcttactaggtagacaagtagctgagctcattatatggctttgtccactgtgtctcttttgaaaggagattgctcattcttttaagcaaaagaacaattttactagtaaatgagattttctctgcaaagctggtctcaagaaatgacatatacgtagccctgtaatagattctgataacttaattaaagctaatgcaatatgcaattccagtgcattgtcaatcttggtcaaatgtgtgcttcattttaactggcagtgcaaatcacttgtgagggtacaggaataacatkcaatccaaaagaatccatatagcagcatctttttattgatttgaagggaagtacagcat

SEQ ID NO: 308574 - DNA, 577 bp, Homo sapiens
tgacagctttcaccattaaggtaaccagcacccattgctgctgtgaaccccctggagagggagacactactgcactcctcaccctgaaaaaaagcagctcttgcactgcccagacagtgcagcccctaacccccacatatgccccagaccccagagccacagctgcttcacatgtaccttcatgtaagacctttgctctgtggctgctctaatcacacactctccagatcccagctctctggctgctctgcacacctgcactccgcacccaactcaaaggctgctctacgtgcacccacatctgaggcactagaagcaccactgctgcaggctagtcaacatcctgaacccaagacccgctgtctttctgcaracacttgcactccaaaccttggctctgtagctgctccacaggtgtccacgccatcagagacatcagtgctgccacctccaccaacacaacaagcccaaagccagaacctgtgccaagaagaatccccttggccacaatgtctcccatgggagaaaaagtgatgaagaggtccccagcagcctctgccactatagactaaaaaaa

SEQ ID NO: 308575 - DNA, 518 bp, Homo sapiens
aagtgcatgctccctatctatctctatttctatctctgtttattaatattggaagcaagaattgaatcattcaaattcaactgggaataaagataaagacattgaagtcatttcagaggtgataattgaagatgttagttatttttgaaaagtaaatagagtgatcatgaggatgacagatctctaaattgcaaccagctgtttactgttgccattggtcacacagggaagttgacagagacaaygctctggaccagtctacatggtttattactgaggcacttgggttacaaatttcaatggggaatcccggcacacaagaactggggagtctggtccatcctacctcaggtgcaaggtgaggtcagcagttacatcaatcctcttttgttgagctcattctctgatcctgagcctctctttgaggtcttatcattaaaatagtaataaaagtcaaggtagaacaaactcaataggagaactggccacaagcacccaaccctacaatgaaagccaat

SEQ ID NO: 308576 - DNA, 596 bp, Homo sapiens
tattcccttcaggattagataagttatgctaaaaaataaattcaggggcttcaaaacaacaaaggtttacctcctggtcacattatatattcattgcaaagtttccttcttgcaatcacttggggcctcaggttgatggagcagccaccatctcccatgttgggtcaccataagggaggaaatgctgctctgggcatctcacccctgtaattgaatgctcaactgaagtgacatcactcacttcygctcacatcttattggccagagctgaccacatggccctctcccaacctcacagaacaagggagggccattctactgtgggcctggaaggcagagaactagaagtttttagagagcagcattttcaataaccacatgcaccctccatggatttgcagtggtagagcatgttgactggtagtactgatggagaccacctttatttgcattatgtaacagacttttatggagcacatcctagatgtcagggatgatgcccagcatgggagatgcaaagtcatagataagttctcggtcctaaaatgccacacaagaaatatgcactggatgttctgtgagcttcaaccagccac

SEQ ID NO: 308577 - DNA, 596 bp, Homo sapiens
tattcccttcaggattagataagttatgctaaaaaataaattcaggggcttcaaaacaacaaaggtttacctcctggtcacattatatattcattgcaaagtttccttcttgcaatcacttggggcctcaggttgatggagcagccaccatctcccatgttgggtcaccataagggaggaaatgctgctctgggcatctcacccctgtaattgaatgctcaactgaagtgacatcactcacttccgctcacatcttattggccrgagctgaccacatggccctctcccaacctcacagaacaagggagggccattctactgtgggcctggaaggcagagaactagaagtttttagagagcagcattttcaataaccacatgcaccctccatggatttgcagtggtagagcatgttgactggtagtactgatggagaccacctttatttgcattatgtaacagacttttatggagcacatcctagatgtcagggatgatgcccagcatgggagatgcaaagtcatagataagttctcggtcctaaaatgccacacaagaaatatgcactggatgttctgtgagcttcaaccagccac

SEQ ID NO: 308578 - DNA, 565 bp, Homo sapiens
aaatctactgactcctacaaatgggaagccaggggaccaagttgccttttgtctaagagttgattcagggctcaagtgaggctgttggttttctttctctggcttgctctctctctctctctctctctctctctctcwcacacacacacacacacacacacacacacacacacacattccctactttgccagccaaactttccatgcttaaaggagaagacagcaccagtgccctgagcttcacatccttcctgttctaaggtcaagatgataaaaggggtggggaggaaatgtactgggcttccaagtccaacaactaaaacgaggtcctggtaactccatatgaaagagattttagtcatttatggagtatccaagtgaccgtctgtattctatcatgatatggacttctgttctcctagtctggccctgaaacaccaggaaatgaaaatagttcattcccattgggtacttaccaaatgtcagcctctgttcttttatttatgtattatctcactaagttctttaagtaactacttactgtagttctgatgtggtttggctg

SEQ ID NO: 308579 - DNA, 579 bp, Homo sapiens
gcagcccctcccatcacaggcctggaggcctaggaggaaaaagtggtttcatgggccgggctagggwccctgtgctgtgcatagcctagggacttggtgccctgcaacccagctgctccggctgtgctgaaatgggctaatgtagagctcaagccgtggcttcagagggtgcaagccccaagcttcagcagcttccatatggtgttgagcctgcaagtgcacagaagtcaagaattgaggtttgggagcctttgcctagatttcagaatatgtatggaaatgcctggatgcccaggcagaagtttgctgtaagggtggggtcctcatgaagagcctctgctagggtagtgcagaagggaaatgtggggtcagagcccccacacagaactcctactggggcactgcctagtggagctgtgagaagaaggccactgtcctccagaccccagaatgacagatccacttgcagcttgaactttgtgcctggaaaagccagacactcaagaccaccctttgaaagcagccaagaggctgtaccttgcagagccacagggacagaggtgtccaagaccatgggaa

SEQ ID NO: 308580 - DNA, 579 bp, Homo sapiens
gcagcccctcccatcacaggcctggaggcctaggaggaaaaagtggtttcatgggccgggctagggaccctgtgctgtgcatagcctagggacttggtgccctgcaacccagctgytccggctgtgctgaaatgggctaatgtagagctcaagccgtggcttcagagggtgcaagccccaagcttcagcagcttccatatggtgttgagcctgcaagtgcacagaagtcaagaattgaggtttgggagcctttgcctagatttcagaatatgtatggaaatgcctggatgcccaggcagaagtttgctgtaagggtggggtcctcatgaagagcctctgctagggtagtgcagaagggaaatgtggggtcagagcccccacacagaactcctactggggcactgcctagtggagctgtgagaagaaggccactgtcctccagaccccagaatgacagatccacttgcagcttgaactttgtgcctggaaaagccagacactcaagaccaccctttgaaagcagccaagaggctgtaccttgcagagccacagggacagaggtgtccaagaccatgggaa

SEQ ID NO: 308581 - DNA, 579 bp, Homo sapiens
gcagcccctcccatcacaggcctggaggcctaggaggaaaaagtggtttcatgggccgggctagggaccctgtgctgtgcatagcctagggacttggtgccctgcaacccagctgctccrgctgtgctgaaatgggctaatgtagagctcaagccgtggcttcagagggtgcaagccccaagcttcagcagcttccatatggtgttgagcctgcaagtgcacagaagtcaagaattgaggtttgggagcctttgcctagatttcagaatatgtatggaaatgcctggatgcccaggcagaagtttgctgtaagggtggggtcctcatgaagagcctctgctagggtagtgcagaagggaaatgtggggtcagagcccccacacagaactcctactggggcactgcctagtggagctgtgagaagaaggccactgtcctccagaccccagaatgacagatccacttgcagcttgaactttgtgcctggaaaagccagacactcaagaccaccctttgaaagcagccaagaggctgtaccttgcagagccacagggacagaggtgtccaagaccatgggaa

SEQ ID NO: 308582 - DNA, 604 bp, Homo sapiens
gacatatttatttagggtggcaaaggtgggctccataggacatctctccacatttatacctgcatcactttctgaaacttccatcaaaaggcctgtggaatctctcattgatctggtttaagtcacttgtccatccctgagacaatgactatggccatggggatacagtgttctgattgactacacataaccttcccagctcaccctcagttctgcagaggaatatcagggtgstattaccaaaataaagaggaaaaagatccaaggcaggataaaacgtgcctttcactatagagcattgtaaacaaagcgaaaactttcagtttgtccagttgagacaatgttcttgaatttcatttgtaaggggcaatgccttacttgaatttgggaaagtctaaatctggcctcacttacaatgttatcagactctgtgaaaagaagtgaggatgcaaacaaacaaacaaaaacacatacaccttctgtagcccttaggctagtgatcattgtttgatacagatgagttaagaattccaaaaattatcttgtagttttacactcctgatacaaaaaccacttgagggttggatatataatcaaatattaa

SEQ ID NO: 308583 - DNA, 509 bp, Homo sapiens
atttactgtggcttatttataaaagccaagaattagaaatgacctaacattcaaaggccgcagatcggctgcagaaactgtgttatgtgcatataacatataaataccaggaaactactaaatattgcaatatggatggatatgtgtggacattgacatatagttctaatatctatatattatggagtgaaaaaaactggctagaaaatgatgtgcatattttgaacytaatttgtcatacagaaaaacacacaaacacaaacatagaaaaaaaaaaaatgcccaaagagcatcggccagatgtttgcagaggttatttttgggtgattggattataggtgtgtcctagtttgtttgttgctgctataacataatcccaaagacgaggcaatttataaaggacagaaatgtatttctcacattcctggagtcttgaaagcccaagatctaagtacctgtagctgcaattgtctggcaaggaccactccctgctcccaggagggtaactt

SEQ ID NO: 308584 - DNA, 609 bp, Homo sapiens
tgtcctagtttgtttgttgctgctataacataatcccaaagacgaggcaatttataaaggacagaaatgtatttctcacattcctggagtcttgaaagcccaagatctaagtacctgtagctgcaattgtctggcaaggaccactccctgctcccaggagggtaacttattgccacatctcggggtggaaaggaatgctgtgtcctcacatgagggacggccaaatggcaagagaccggatgccgcatgaaagctttcstaaggctctcaatcacattcacattcacagggaggagccgttattgcctaatcacctgttgaaggcccacttcttaatactgtcacattggcaacacctgaattttggaggggacacattcgaaccacagcacagtcttttctacttttgttttgttttttgttttaataattcatctccatgttctgaatctcctgaaaagaaagttagattctgatatcataaaacaatacacataaaatcagagtgataggcacagattgtgccatggaaggggtaagtatagcacagtctaggagcacagggaagagccttacaacaccccctggggaactcagaagtggattctg

SEQ ID NO: 308585 - DNA, 570 bp, Homo sapiens
acagttctagaggctgagaggtccaagatcaaggcactggcacagttgtgccttcttcatggttcagagatggccatctgctatttataaactcacayagcagaagagggaaactctggtgtcttcagccccttataagagcaataatcccttattataatgatatgatataataataatccctgatcataatattcatgaaggttccactcccatgacctaattatctttcaaaacccacctcctaataccatcacatcagggattagctttgaacatatgaatttgagggggatgcaaacattcagtccataacatctctctcctagcttatggcagtggcagcaatccctggtgttcttttctttcctttcttttttcttctttctttctttctttttctctctctctctctctttctttttttttttttttgaggtggagtctctctgtgttgcccaggctggagtgtaatggtgtgatctcagcccactgtgacctccgcctcccgtgttgaagtgattctcctgcctcagcttcccgagtagctgggatcacaggtgcctgaca

SEQ ID NO: 308586 - DNA, 661 bp, Homo sapiens
tggttcacgtgctagtgggtatgacaggttaatgacaatggaaagttgacagtagaccccactagcaatggaagaaatgccaattaaaataatttatgctrtctcttttaatcacaaaattcaaaaaataacctagactcttaatgctggtcagcgcgtatgtgatggatactttcatattctcctggggggattttcaaattggaaggacctttctaaagaaagtttgtagcaagttgcttaagtaaatttgtgcactttgatgtaattattctactttgatgatatatcctaaggaaataatttcaaatatgtaaaatgctttatgcaggcagatgtttattactgtaataatgaaaaatagaaaccaattagatttgcaacatgcacaggatatttaaaccaattatatcacaaaggctctcatgctggtattaaaaattatggtgatgaagactaaacaatgagaaatatttacgatttaatgtgaaaaacgatgatataaaattatatacagtataatttaatatttgaaaaacagcaacaatggtccatgtagggaaatgctggaaaggaatgaaacataatttgaacaatagttggatttgaatagtgagatcaccaattttttttaatctttttaacttccaaagtctcttta

SEQ ID NO: 308587 - DNA, 539 bp, Homo sapiens
gccctgcccgaggaaagaacacaccatcactctgtttctcctcgatgggctggtccttctacttcttccaagtcctgtttccctgagagtgtcatatgtcttctcaaaatggaccattgccgcctagggaatgatgtgccaagtattgaacaaaggctctgtttagattttgccactggagagctgaaaccaagggtcaaattccgttttgcatttctccttgttgcatctctgttcatgttagcacagaattttggagaatacagtctatactcctctcctcaacccgccctttgacacaaatacctgcagctctgctccaaaacctctattcctctacyactgcatggtggggcttcctgttgagtgatataacactgttcgtggtgccctcagttaggaaacacgttccttccaaaaaatttgagtgcattccaataatgactactcacatcaccccatggaaagagagtgtttctatttcattagtagacactgatgctctgacttagaattaggagaattgttaaagaacatct

SEQ ID NO: 308588 - DNA, 539 bp, Homo sapiens
gccctgcccgaggaaagaacacaccatcactctgtttctcctcgatgggctggtccttctacttcttccaagtcctgtttccctgagagtgtcatatgtcttctcaaaatggaccattgccgcctagggaatgatgtgccaagtattgaacaaaggctctgtttagattttgccactggagagctgaaaccaagggtcaaattccgttttgcatttctccttgttgcatctctgttcatgttagcacagaattttggagaatacagtctatactcctctcctcaacccgccctttgacacaaatacctgcagctctgctccaaaacctctattcctctactactgcatggtggggcttcctgttgagtgatataacactgttygtggtgccctcagttaggaaacacgttccttccaaaaaatttgagtgcattccaataatgactactcacatcaccccatggaaagagagtgtttctatttcattagtagacactgatgctctgacttagaattaggagaattgttaaagaacatct

SEQ ID NO: 308589 - DNA, 587 bp, Homo sapiens
tttcaaataactaaacataatatgtttaagaaaaaaatacaagatggagaattttggcagaaaactgaaaactataagattaatcaaataaaaattctaaaagaaatagtcaaaaattagttaccatatggaatatttgaatgtcatgattaacaaagttcatctaactgacaaatttaaaatatttattcaacaaktgcaaaaaatacattgttttcaaataaacatgaaatatttatatacttggaccaggtgctaagccatggaagtctcaagaagttttaaagaaaagaaatacaaaatgtgttctcagactccactacaattaaactagaaatcaataaaaaaaattaatgattaaggttcccatataagattacgaatttcacctctaaataaaatatattcaaaaaataaagaaaaaagcacagtggaaatcagaggatgcttcacctgaataacactgaatataatacaaattaaaactaaagtagactacattaaagtcatgcttaaaaaggaaatttatagccttaagttcatgtagtagaaaagacaggagactcaaaatcagtgagcaaagcatc

SEQ ID NO: 308590 - DNA, 605 bp, Homo sapiens
tggtaggtttttccatccattaaccctcaaactttatgctttcttttcttttaactatgtcttctgtaagatacgattttaatctttacccattctatctatttctggaagatttgtgtcttatatattgcgattatgatctctcaggggttgtttctttcatactatttacagctttacagccaggcacaggaagacaaacatygcatgttctcacttatttgtgggatctagaaatcagaacaattcaactcatggacatagagagtagaaggagggccagaggctgggaagggtagtaggggttttgggagtagatggggatagttaatggataccaaaaaagagaatgaataaggcctactgtttcatagcacaatagggtgactatagtcaataataacttaattatatattttaaaattaatactgtaattggattgtaactcaaaggataaatgcttgaggagatggataccccattctccatgatgtgcttatttcattatttcaccttgcatacttgcaccaaaatatctcatgtaccccacaaatacatacacctactatgtacccacaaaaatttaaaaataaaaaatataata

SEQ ID NO: 308591 - DNA, 605 bp, Homo sapiens
tggtaggtttttccatccattaaccctcaaactttatgctttcttttcttttaactatgtcttctgtaagatacgattttaatctttacccattctatctatttctggaagatttgtgtcttatatattgcgattatgatctctcaggggttgtttctttcatactatttacagctttacagccaggcacaggaagacaaacatcgcatgttctcacttatttgtgggatctaraaatcagaacaattcaactcatggacatagagagtagaaggagggccagaggctgggaagggtagtaggggttttgggagtagatggggatagttaatggataccaaaaaagagaatgaataaggcctactgtttcatagcacaatagggtgactatagtcaataataacttaattatatattttaaaattaatactgtaattggattgtaactcaaaggataaatgcttgaggagatggataccccattctccatgatgtgcttatttcattatttcaccttgcatacttgcaccaaaatatctcatgtaccccacaaatacatacacctactatgtacccacaaaaatttaaaaataaaaaatataata

SEQ ID NO: 308592 - DNA, 605 bp, Homo sapiens
tggtaggtttttccatccattaaccctcaaactttatgctttcttttcttttaactatgtcttctgtaagatacgattttaatctttacccattctatctatttctggaagatttgtgtcttatatattgcgattatgatctctcaggggttgtttctttcatactatttacagctttacagccaggcacaggaagacaaacatcgcatgttctcacttatttgtgggatctagaaatcagaacaattcaactcatggacatagagagtagaaggagggccagaggctgggaagggtagtaggggttttgggagtagatggggatagttaatggataccaaaaaagagaatgaataaggcctactgtttcatagcacaatagggtgactatagtcaataataacttaattatatattttaaaattaatactgtaattggattgtaactcaaaggataaatgcttgaggagatggataccccattctccatgatgtgcttatttcattatttcaccttgcatacttgcaccaaaatatctcatgtaccccacaaatacatacacctaytatgtacccacaaaaatttaaaaataaaaaatataata

SEQ ID NO: 308593 - DNA, 531 bp, Homo sapiens
gctctgttccgcccagctcaccaccggtcagagtttaaggttatctctcttgtttcctaaacattgctgttatcctgttcttttttcaaggtgcccaaatttcatattgctcaaacacacacgctgtacaatttgtgcagttaatgcaattattacagggtcctgaggcgatatacatcctcctcagctgacaggattaagagattaaagacaggcataggaaatcacaagggtrttaattggggaagtgataagtgtccatgaaatctttacaatttatgtttagagactgcagtaaagacaggcataagaaattataaaagtattaatttggggaagtaataaatgtccatgaaatcttcacaatccacattcttctgccacggcctcagctggtccctccatttggggtccctgacttcccccaacaacaaagaagacgtttaagatctaggcatttgcacttgtagttcatggtgcctgttcccatctgactttttcttagtttaggaggcttgtggattctgggca

SEQ ID NO: 308594 - DNA, 559 bp, Homo sapiens
tttgtttttattatgcaacaagaagtccagaggtaggcagggcagagataattaatatagtggcttatagctgtcatcagagatcctgggtctttccttttctgtaccacaaccttagcatgcttccatgcttgcagtggccttatggttacgggatggctgctggaaccccagaggtatacattaaggcacgaagaaggggtaagacaagaggaaaagtttatttcagctggagcagcccagagctttggagcttttacaggagctatatgagaaagggtcaactgcaagatgtttgttaaggagtattggaattgacactgtggaaggaggggagtggaagcaggagcaggcagagaaacacttggagcttccagaaagggccagcaacagctctggctgatgcctctagaagctcctgagagacagcagctcttcagagccatcactgttgagctaagatgcctggtcttcatatgccctcattgaccactgggtatgggctactccagaaagaacatgaccttgggcaaggcrgctctccacagctgagaccatc

SEQ ID NO: 308595 - DNA, 593 bp, Homo sapiens
aatatatagactgccaagcacagtatctggcttttggtaagttttcaagaaataatacttcctgtccccttgttgactgaaagattgcatcacaacccctttgatttccactaaatacatattcctaacgatatgagggttttccctaaaattatttttcagaacaaaggaagctgccttattttcatgagtttacaatagatctcatataaaaagagtttttctaattatctggaccaatgaactatttgtcaagatatatttgcctgaaatgtactcaatgttgattttcaaagtgatagaggttactgcttgacagcactgggtttttaaaaggaagaaaakgaatttaacacagatttagtaattatttctggggttaaagagtatgatttccagatagaagcactgcttatcgttttaaacaagcctttcaaaaatgattttaaataccaatttaaataaaaatacatgaaatactgatacacgctataacatagatgaaccttgaaaacataatgctaagtgaaagcaccagtcacaaggaaacatattgtacaattatgtttatatcaaatgttcagaacaggcaa

SEQ ID NO: 308596 - DNA, 540 bp, Homo sapiens
gaatggactaacacacactctgacctgaaattctttcttttcttagcttccaggatacatgcctattttggctrttcttgcttccttgtagttaacttttgcccaggctcctttgctggcttctcttaatcttgtgagctttggaaattagaccaccatgaagcaccatccacaaactccacctctcctttatctacacttactttcctggttatcttttaatccatgaccttaaaagacacccacatgctgaataaacctacatctgtatctccaaactggatatcccttaaactcaggctcacccttcctatatgatatctccattcagatgtctactagagcagcagtccctaaacttttttgcaccagggaccagtttcatggaagacaatttttccatgaactgggttggggcagttggtggaagggtatggttttgggatgaaactgttccacctcagatcatcaggcattagattcttacaaggagtgtgcagcctagatccttcacatgcaccattcacaatagggttcaca

SEQ ID NO: 308597 - DNA, 540 bp, Homo sapiens
gaatggactaacacacactctgacctgaaattctttcttttcttagcttccaggatacatgcctattttggctattcttgcttccttgtagttaacttttgcccaggctcctttgctggcttctcttaatcttgtgagctttggaaattagaccaccatgaagcaccatccacaaactccayctctcctttatctacacttactttcctggttatcttttaatccatgaccttaaaagacacccacatgctgaataaacctacatctgtatctccaaactggatatcccttaaactcaggctcacccttcctatatgatatctccattcagatgtctactagagcagcagtccctaaacttttttgcaccagggaccagtttcatggaagacaatttttccatgaactgggttggggcagttggtggaagggtatggttttgggatgaaactgttccacctcagatcatcaggcattagattcttacaaggagtgtgcagcctagatccttcacatgcaccattcacaatagggttcaca

SEQ ID NO: 308598 - DNA, 526 bp, Homo sapiens
tatgtagatctcaagcacccttttcataatatcctgccttactcattgtgccagaccactacagctgktctcttcagaaggatgtgtccacaaaaattacattaattaatgttaatatgtttattacatctaatttgctgtgtatctgatttaaaaggccatttttcattttaataacatacataagatcaggaagaagtaaacttaatacaagtaataaaatgacttatcattttactttaaaatgataaaaaaacagaactttccatatgtagagtgaaggaaggagatggaggtttgtgaagtaagtgtaagtacatatacatgtgctcatatggatatattatatgtataatacacagagacacacacacatttatgcacacacatataagctgtatatacagacatgtaactacatacatataagtgcaatacatgacatatatgcacataaaataataaacatgtaaattagtagtatgagactaacaaattaagcataatccacataacaattatccac

SEQ ID NO: 308599 - DNA, 524 bp, Homo sapiens
tgaacacaatgcttttaaccccaatgggcataagccgtggtctttccagctagctgtggctgagtgaaaattgtatctagaaagattttcttccatgaagaatatgaggcaaattaaatcagttcctatcttcaaaaatatatcccatggtaagtggacacagagaaagttgkgatgggaaactgcatcaagaaaatttcacattatgaggccaaagtctagagggaaatgtgaattgaaatgttgattacaacatactatgctatcattagatttcctagagctgagaggagactaaaggagacaaagtagataaaaagtgtcactaaggaacacttaaagatactctgtgatctaatcctaatccaaactcatgtttctcttgtctgacttgcattttgtaatttaattattaattcaatcattcattcaaccaacatttactatgtatcaggcactgctctaggtacttggcacccaacggtaaccaaaatgatgaggagtcctactccccatgaaagtga

SEQ ID NO: 308600 - DNA, 620 bp, Homo sapiens
gaactcacaactaaaatggggttcattgaagcataaaaagtgatgaatttaagagtaacatagatagtgcaacccaaaataacatcataaacaaagagtgaactggtctccagtggtaaatatgagatgcaaatctgtatatgcagggaaaaataaacctgcaagtgtcatgatttcacagatgtggcaagaaaagaaaagtgcaaataggtagtatgtttatgaatatccaaaaaatttgaattatatttgactgaaaattcatttaccactcttccccagttcattttgagttataaagccttgccaaacagaggaataaacatctgtcagaactactacttgaagtatagattagtgtgtttcttctgatyccttgtgaagtctctggcctgtactctgagcattttccccactcctggaccacatgagtaagggtaatcatccatttcagaatcatgaacaaaaaatctaagctcattctggaagggaagaaaagaaagaaaaagggaagaaatggtgaggaagatgaaagaagggaaggaaaagacagagaaggaaaagagaaagaaaggaggcagaaaatgaagggctcaaaagtcccttattttgtctgagga

SEQ ID NO: 308601 - DNA, 563 bp, Homo sapiens
gggctcaaaagtcccttattttgtctgaggagtaaggagtaagaagaaaatacttttgcttttaggcaccagaagcctgcatcaatctggattaattactgagcttcgtttttgtttcccattgtgaggcccacgaacatgttaactatagcccttkgatttggacacctggttgcagtaaaactgttttgtaacctagacattctgccttagttttgcccacatcccagtgactcatcattttacaatctgagacacttttacacccctacaagagaggagaacttagatgccatgtcgttctggtggggtggtggtgatagtggtggtggtgatactctctcatcgcagggatggaggtggggagaactggaaagaaaaagttggaaactcatttgacctgcgacatctgtgaacataggatccctgctttaaagccattggtatttttattctggtacactaagaaaggatttttaaaataacatgcataaaataattttctttcagtaaattgattaattttgttgccagtggtatagaagagaacaaagtaggagaag

SEQ ID NO: 308602 - DNA, 606 bp, Homo sapiens
cagcaacagctatagttcatcttgtggggtaagaracttacgtgcagtagaatcacaatacaacacgcattttagtttgcaaagtattaatataactcaaaaggatatacaaatcagagaaaaagtgtcatttgtttatcttcaatactttgctatttctacatcattttatgttttagttaagcctggttataaatcaataatttaatagtattaggtaaaataaggaagtgacatttgtattatgtattttgagttttaatttacaggtaattaaacattcttctctgaactactttttcattaaaagtttaaacttctctaaatacttcagaatggcagttgtttttgatctgaacttaggtcaagagaagcttgatttaaaaggacaattggcgatggggggatgggaatattgcaatagggtaaaggagacttgcaataggaggactctgaccacaaaatctgagtcacaggggtagggaagaaaggaattttcttttatcgagaggactaaataaggctagagagaatcagggatgagggagtgtggtgagcaggtgatatgactggaccgttcataggggaacttctttatttgggact

SEQ ID NO: 308603 - DNA, 606 bp, Homo sapiens
cagcaacagctatagttcatcttgtggggtaagaaacttacgtgcagtagaatcayaatacaacacgcattttagtttgcaaagtattaatataactcaaaaggatatacaaatcagagaaaaagtgtcatttgtttatcttcaatactttgctatttctacatcattttatgttttagttaagcctggttataaatcaataatttaatagtattaggtaaaataaggaagtgacatttgtattatgtattttgagttttaatttacaggtaattaaacattcttctctgaactactttttcattaaaagtttaaacttctctaaatacttcagaatggcagttgtttttgatctgaacttaggtcaagagaagcttgatttaaaaggacaattggcgatggggggatgggaatattgcaatagggtaaaggagacttgcaataggaggactctgaccacaaaatctgagtcacaggggtagggaagaaaggaattttcttttatcgagaggactaaataaggctagagagaatcagggatgagggagtgtggtgagcaggtgatatgactggaccgttcataggggaacttctttatttgggact

SEQ ID NO: 308604 - DNA, 566 bp, Homo sapiens
aaataacaattaatgctggtttaggaatcaaatattctgttccaaatgttcaattactgaataaacwtttagtatttctacaaaataaaaaaaatcatttagtcccaacttttacaaactgtaagttggacaactagtcttcatattaaatatattcagcatttataattttttaaatttttccttgcaaagaagaatacaacacagctttcaatggcagataaactgaagagtggatacaagagttaaatgtctggaaggatcatctctaccgattccttaacatgtttcataatttaataattataagttaagtagagaatgctgatattacatatatgtgaaaagtcattgatatggtttggatttgtaatccactgttggaggaggagcctagtgggaggtgattagatcatggggctggatcttccctttgctgttcccgtgatagtgagtgagttctcacgagaactagggtagttgttcaaaagtgtgtagcatctccaccttcactctctttcttctgctctggccatgtaagaagtgcctgcttgcccttcaccttc

SEQ ID NO: 308605 - DNA, 566 bp, Homo sapiens
aaataacaattaatgctggtttaggaatcaaatattctgttccaaatgttcaattactgaataaacatttagtatttctacaaaataaaaaaaatcatttagtcccaacttttacaaactgtaagttggacaactagtcttcatattaaatatattcagcatttataattttttaaatttttccttgcaaagaagaatacaacacagctttcaatggcagataaactgaagagtgratacaagagttaaatgtctggaaggatcatctctaccgattccttaacatgtttcataatttaataattataagttaagtagagaatgctgatattacatatatgtgaaaagtcattgatatggtttggatttgtaatccactgttggaggaggagcctagtgggaggtgattagatcatggggctggatcttccctttgctgttcccgtgatagtgagtgagttctcacgagaactagggtagttgttcaaaagtgtgtagcatctccaccttcactctctttcttctgctctggccatgtaagaagtgcctgcttgcccttcaccttc

SEQ ID NO: 308606 - DNA, 621 bp, Homo sapiens
tgaaaccatgagccagttaaagcattttttctttataaattactcagtctcaggtatttctgtataacagygtgagaacagactaatagacttatcaatgaacaacttaagaattttatagagacattcgatttgaattttccaaaagaataagatacacatatggaaaatctttgaatcaggaattgttctctttgattataagatagtttaaagttaattataattttataggatatgttattgaaattgcttactgatagtgattgaagatgaattttgaaaatcaaaataatttgctttcttctggataaaagttaaaaataaatactctgagatggactgaaatcactttaaatttcaccttccattcagttcaacaaacctgtatgagactggcttctccacccatgttattaaaacaaaatataaatatcatttagacatacattaactcaggcaaataacgctatcgtcaatctcacatagatcagataagctaacaagcatgaagcaagctcatttatcacattaaatactttaagtattgatatgtatggtattcatcaaagtggctgtaaaggaatttaacatggagagtcaccatttcatttataactt

SEQ ID NO: 308607 - DNA, 621 bp, Homo sapiens
tgaaaccatgagccagttaaagcattttttctttataaattactcagtctcaggtatttctgtataacagtgtgagaacagactaatagacttatcawtgaacaacttaagaattttatagagacattcgatttgaattttccaaaagaataagatacacatatggaaaatctttgaatcaggaattgttctctttgattataagatagtttaaagttaattataattttataggatatgttattgaaattgcttactgatagtgattgaagatgaattttgaaaatcaaaataatttgctttcttctggataaaagttaaaaataaatactctgagatggactgaaatcactttaaatttcaccttccattcagttcaacaaacctgtatgagactggcttctccacccatgttattaaaacaaaatataaatatcatttagacatacattaactcaggcaaataacgctatcgtcaatctcacatagatcagataagctaacaagcatgaagcaagctcatttatcacattaaatactttaagtattgatatgtatggtattcatcaaagtggctgtaaaggaatttaacatggagagtcaccatttcatttataactt

SEQ ID NO: 308608 - DNA, 621 bp, Homo sapiens
tgaaaccatgagccagttaaagcattttttctttataaattactcagtctcaggtatttctgtataacagtgtgagaacagactaatagacttatcaatgaacaacttaagaattttatagagacattcgatttgaattttccaaaagaataagatacacatatggaaaatctttgaatcaggaattgttctctttgattataagatagtttaaagttaattataattttataggatatgttattgaaattgcttactgatagtgattgaagatgaattttgaaaatcaaaataatttgctttcttctggataaaagttaaaaataaataytctgagatggactgaaatcactttaaatttcaccttccattcagttcaacaaacctgtatgagactggcttctccacccatgttattaaaacaaaatataaatatcatttagacatacattaactcaggcaaataacgctatcgtcaatctcacatagatcagataagctaacaagcatgaagcaagctcatttatcacattaaatactttaagtattgatatgtatggtattcatcaaagtggctgtaaaggaatttaacatggagagtcaccatttcatttataactt

SEQ ID NO: 308609 - DNA, 621 bp, Homo sapiens
tgaaaccatgagccagttaaagcattttttctttataaattactcagtctcaggtatttctgtataacagtgtgagaacagactaatagacttatcaatgaacaacttaagaattttatagagacattcgatttgaattttccaaaagaataagatacacatatggaaaatctttgaatcaggaattgttctctttgattataagatagtttaaagttaattataattttataggatatgttattgaaattgcttactgatagtgattgaagatgaattttgaaaatcaaaataatttgctttcttctggataaaagttaaaaataaatactctgagatggactgaaatcactttaaatttcaccttccattcarttcaacaaacctgtatgagactggcttctccacccatgttattaaaacaaaatataaatatcatttagacatacattaactcaggcaaataacgctatcgtcaatctcacatagatcagataagctaacaagcatgaagcaagctcatttatcacattaaatactttaagtattgatatgtatggtattcatcaaagtggctgtaaaggaatttaacatggagagtcaccatttcatttataactt

SEQ ID NO: 308610 - DNA, 545 bp, Homo sapiens
ttgctgtctatcttgcactcactccaagttctttgtagtccasaattgttggtttatattatctgagcagcaacagagagatactattgccaagctgatgcaatatatttacctcctcatcaggctatgtcaagggaagtggttattaaagggtatattagtttcctagggtggctgtaacaaagtaccacaaactgagtggcttaaaacagcagaaatttattgtcttatagttctggaaactaaaagtccaaaatcaaagtgttatcagtgccatggctctctctccctagaggagagaatcctttcttgcctcttgttagcatctggtggttttcaataatccttggggctcttaggcttgcccctgctccattttaatctctccctctgtcctcacatggcattttccattacttacagagacactagacatattggattagaccccactctagtgatgccatcttattacagctgcaaatgtcctatttctaaataaagtcatagtcacaggtacttgggattaggacttgaacacatct

SEQ ID NO: 308611 - DNA, 603 bp, Homo sapiens
ttgtttccacagttcaggaatacagatatgaaggctggacagaggatgatatatttgtgattcacagacataaacacatcataattcaaaccaatggagyggaggtattgttcagcaaaacaatgttgattgagaaaagaaaaggctgagcaatttccacatttaatgaagtaagacaaaacagaccaaaggtgacaaagtactgtcttagagctagaaaaatgcttggaggttgaattgtcatgagaaccaagagatgagagtgttttgaaaataagatttcttattattttgagatattttcgtttgattcctatttattgacagttacttatcatgaaaggatgttggattttaccaaaagctttttttctgtgtctattgagatgatcatattgttttggtttttaattgtatatacatggcgaatcagttattggtttgcatgtgttgaataaaccatgcatccctggaatgatgcctacttgattatgatgaattaactttttgatgtgctgctggatttggtttgctggtattttattgagcatttaggcatctatgtgcatgagagttattggcctgtagtttttgttcttgttg

SEQ ID NO: 308612 - DNA, 625 bp, Homo sapiens
tgcagcgtaaagggaatgctcatacactgctggtaggaatkcaagttagttcagccactgtggagaccagtttggagatttctcaaataacttaaaactaccagccaggcgtggtggctcatgcatgtaatcccagcactgtgggaggccaaggtgggcagatcacggggttgggagttcaagaccagcctgaccaacatggtgaaaccctgtctctactaaaaatacaaaaattagccaggcttgatggtgcatacctgtaatcccagctactcaggaggctgaggcaggataatcacttgaactcagaaggtggaggttgcagtgagctgagattgcaccagtgcactccagccagggcgacagagcagggctccgtcacaaaaacaacaacaacaacaacaataaaactgccacttgatccagcaatcccatcactgggtatatacccaaaggaaaataaatcaatgtaccaaaatgacataggaacttatatgttcattgcagtactatttgccttagcaaagacatggaactaaccccgtttcctatcaagggtgcattggataaagaaaatgtggtacatatacactgtggaaaccatgcatccattaaaaaaacccca

SEQ ID NO: 308613 - DNA, 625 bp, Homo sapiens
tgcagcgtaaagggaatgctcatacactgctggtaggaatgcaagttagttcagccactgtggagaccagtttggagatttctcaaataacttaaaactaccagccrggcgtggtggctcatgcatgtaatcccagcactgtgggaggccaaggtgggcagatcacggggttgggagttcaagaccagcctgaccaacatggtgaaaccctgtctctactaaaaatacaaaaattagccaggcttgatggtgcatacctgtaatcccagctactcaggaggctgaggcaggataatcacttgaactcagaaggtggaggttgcagtgagctgagattgcaccagtgcactccagccagggcgacagagcagggctccgtcacaaaaacaacaacaacaacaacaataaaactgccacttgatccagcaatcccatcactgggtatatacccaaaggaaaataaatcaatgtaccaaaatgacataggaacttatatgttcattgcagtactatttgccttagcaaagacatggaactaaccccgtttcctatcaagggtgcattggataaagaaaatgtggtacatatacactgtggaaaccatgcatccattaaaaaaacccca

SEQ ID NO: 308614 - DNA, 581 bp, Homo sapiens
tatttttcctaatgctctccctcccctcaccccacccacaacaggycatggtgtgtgtttttcccctccctgtgtccatgtattctgattgttgagctgtcacttataagtgagaacatgaggtgtttggttttctgttcctgcgctagtttgctgaggataatggcttccagctccatccatgtccctgaaaagaacatgatcttgttcttttttcatggctgcatagtggcaatttctcaaagatgtagaaccagaaacacaatgtgacccagcaatcccattattgggtatatacccaaaggaatataaatcattctgttacaaagacacatgcatgcatgtgttcgttgcagcactactcacaacagcaaatacatggaatcaacccaaatgcccatcaatgacagactggataaaatcataagttatgtggccaaccccggaataagaaagggaggacactagtaagttatatggtgaaaggcaaggctataaggaggataaatatgtggggatatttttactatctaccacactatagaagaaggaaaaatgatattggagtataaccagcaatc

SEQ ID NO: 308615 - DNA, 581 bp, Homo sapiens
tatttttcctaatgctctccctcccctcaccccacccacaacaggccatggtgtgtgtttttcccctccctgtgtccatgtattctgattgttgagctgtcacttataagtgagaacatgaggtgtttggttttctgttcctgcgctagtttgctgaggataatggcttccagctccatccatgtccctgaaaagaacatgatcttgttcttttttcatggctgcatagtggcaatttctcaaagatgtagaaccagaaacacaatgtgacccagcaatcccattattgggtatatacccaaaggaatataaatcattctgttacaaagacacatgcatgcatgtgttcgttgcagcactactcacaacagcaaatacatggaatcaacccaaatgcccatcaatgacagactggataaaatcataagttatgtggccaaccccggaataagaaagggaggacactagtaagttatayggtgaaaggcaaggctataaggaggataaatatgtggggatatttttactatctaccacactatagaagaaggaaaaatgatattggagtataaccagcaatc

SEQ ID NO: 308616 - DNA, 586 bp, Homo sapiens
cttaactcatttgatattattatgcctggatttttataaattctattgaaattaacttcccacatgatgccaaatacaagattctaaagccatggacatgtgagaaataattttacagatctcttataagtaagttgaccatatacaatcatgcactcagggaaaccttgaagaaagggaattttgaaaggggatttcttgaaaagggattccttgaaagggtttcttgaaggatttcttgaaggatttcttgaaggggatttcttaattatgccaggatcaggcataaatcacaagtcctgaaaacaatggctatgtgatcattgttctttcagtaaaataacattaaagcacataagtaagttttgttttttggtcattgttcaatttagctacttaatgcctccctttatccatgggggtacattccaacacttccagtggaagcakgaaactacagatagtactgaatcttatagatactacagtttttcctaatatttactgtgaaaggaaaattagtctcaggaccccaaaatcactatgccaaagagaagtcaaactgggaactgcagcagcacacctg

SEQ ID NO: 308617 - DNA, 569 bp, Homo sapiens
agattctgcctagatttcagaagatgtataaaaatgcctggatatccaggcagaactctgctgcaagggcagagctcttgtgaaaatgtctactagggtagtgcaaagggaaaatgtaggattggagccccagattccccactggggcattcctagtggagccatgagaagagggccaccatcctccaggccccagagtggtagttccaccaacagcttgcactgtgcatttggaaaagccacaggtactcaacgctagcctgtgaaagcagctacaggtactgtatcctgaaaagccacaggggtggagctgtgcaaggccttgggagcccacaccgtgcatcagtaaccctggatgtgagacctggagtcaaaggaaattattttggagttttaagatttgatgactgttctgccagacttcagatttgcatggggcttgtggcccctttcttttggccaatttctcccatttggaataggagtattttcatgtaccccyattgtattttggaagtaactaacttgattttgattttacaggctcatagcagaaaggacttcccttg

SEQ ID NO: 308618 - DNA, 596 bp, Homo sapiens
gagcttctagtagacattttctcagaaatgaacagggtgagcttggcatgtgaaggaagtcaagtgacagggtagttgccatgatttcaagcaaaaaattgaatctaggagagtgtgtatttattactgtgagcttaacagtttctcaatagatataaaatattctgatgagatcagaggtgatataacgaaagtgacattttgatatttgatatatattatgaaatgtaccaacatttgtaaaactttctttactcagtgaacaagtattttccaaatgactaatgcatgatataagaaaatactgcactggtaaatgataaaatcagagtacaaaaaataaatagaatactttcaggtaacagtgtacaggaagtacattgatattatttaatactccatatagtaattgacrcaaaaattactacttttgcattttgatgtagaatcaaagaagaatattctaaaatatctgaaaaggttattgaaataattttcccatttccaaatacatatctgtgtagggccagattttcttcatgtttttcaaccaaaataacgttacagcaggttgaatccaaaaacaaataagaaaa

SEQ ID NO: 308619 - DNA, 633 bp, Homo sapiens
aaggattcactttttatgctactttacagcaaaggctcagactcataaactagtatctgctaagctaatgaggctcatctacaatgaacttcaattaagaagtaataaacgtgagaaatcaggtgccacatgaaatctatgtttagttgagaatggcagtggagactttcaggggcagtgatgtgagatcaggcacccagtgcccatggtcactgatgccaggtaaagtttctgatcctagaagcagtgacagaagttcttcactggcacaatcctgcagtgtattttggatgtaaattgtttgtgtggcctccaagcctgtttcctctgcccttccaaaaagtcagtgagctatctaataagctgcaataagacctttcactgctttaatttgctacactgtattctaattttctttctttctttcttttgcttagctttttgcatttgctgatggtgtgctatctgcctgggcattttttcacagctcttcttcagacagtctctcacttcaaaaatttttttctttaaggtgtccttctcyaacacttaagaatactaaccatccttcttgttctgttcaaatttgtggttttctcagaggatcctttttatttttcctataacaccaaa

SEQ ID NO: 308620 - DNA, 550 bp, Homo sapiens
tttttaccatagcacattttcactgagtattcttattaattccaagatagagacaaacatggtccaagcctttatgcaactgtggaaacaaaaggaaactaatatttatttaggaccttctccatactaagcaccatcctaggaagttcccattacttgataatcatattagagagctagtaatctggggaataatgctgtcttcatgcagtctgaaattcattaatcaggttaaattatattctaaaaattcaaatcaagtactgttgtggcaggacaggtctcacgaacgaacatgrgcctccataacaattgtttcagcactgactgagtggttaatttagacattaaaagctgatagagccagtgcccttatacaaaggctggaatgtaacaaaagcccaccaagcgttttgcctgggcctttcgtaggctgcatgacaaaataatgaaggaattcttaacaggacccattgaggattaaacaagttttactgggggtctgaggaaactccccaggcctccacaaacaaatttattggggatctga

SEQ ID NO: 308621 - DNA, 516 bp, Homo sapiens
aatttgataaagagtatctacaaaaaaaaaaaaaaaattgaaacaacctcaacaacaacaaaaaaaccctacaactaacatcacacttaattatgacaaactaaggaatttttccctaagatcaggaaaaaaaaggcacggatatgcttctcacatctcctattcaacatcrtactggaagtcctagctaatgcaataagacaagaaaaggtaaagacatacagaaggaaggaatgaaataaaattgtcttcattcagagatgatatgattgtctattatagataatacacagagcttctaaaagataaaatgggaaaaaatttaggtaaacttgagtttagcaatgagattttagataccacatcaaaagcaggattcatgaaagaaaaaattaataagctggactgtactaaaatttaaaactactctgagaagaacactgttaaagaaataaaaagatgagttacagactgggagaaaatatttgcaaaacatatctgataaaagacttgtac

SEQ ID NO: 308622 - DNA, 594 bp, Homo sapiens
atatgattgtctattatagataatacacagagcttctaaaagataaaatgggaaaaaatttaggtaaacttgagtttagcaatgagattttagataccacatcaaaagcaggattcatgaaagaaaaaattaataagctggactgtactaaaatttaaaactactctgagaagaacactgttaaagaaataaaaagatgagttacagastgggagaaaatatttgcaaaacatatctgataaaagacttgtacacaaaatatgcacgaacttttaaaactcaacaataggaaaagaaacaatccaattgaaaagtaggcaaaagatctgagcaatcacctcagcagacagtatacacagatggaaaattaacatatgaaaagatgctcaacatcatatgtcattaggaaattgtgaattaaaacaatgtcatgcactacatgcctattagggtgactaaaatctaaatccctgaaaacagcaaatgtagataaatatgtggacaagcaggaactcccagtcattgctggtgggaatgcaaatagtacaactccttttgaaaagtttgacagttttttcaaaactaaatatggtt

SEQ ID NO: 308623 - DNA, 594 bp, Homo sapiens
atatgattgtctattatagataatacacagagcttctaaaagataaaatgggaaaaaatttaggtaaacttgagtttagcaatgagattttagataccacatcaaaagcaggattcatgaaagaaaaaattaataagctggactgtactaaaatttaaaactactctgagaagaacactgttaaagaaataaaaagatgagttacagactgggagaaaatatttgcaaaacatatctgataaaagacttgtacacaaaatatgcacraacttttaaaactcaacaataggaaaagaaacaatccaattgaaaagtaggcaaaagatctgagcaatcacctcagcagacagtatacacagatggaaaattaacatatgaaaagatgctcaacatcatatgtcattaggaaattgtgaattaaaacaatgtcatgcactacatgcctattagggtgactaaaatctaaatccctgaaaacagcaaatgtagataaatatgtggacaagcaggaactcccagtcattgctggtgggaatgcaaatagtacaactccttttgaaaagtttgacagttttttcaaaactaaatatggtt

SEQ ID NO: 308624 - DNA, 651 bp, Homo sapiens
ttctatacatcttctgaaacctaggcagaagtcctgaaacctcagttcttgacttttgtgcacccacaggctcaacaccatgtggaagctgccaagtcttggggcttctaccctctgaagccacagcccaagctctaggttggcccctttcagccacaactggagcagcaaggcatcaagtccttaggctgcacacagctcagggaccctgagcccagcccccaaaaccactttttcctcctagacctccggtcctgtcatgggaaatgcttccgtgaagacctctgacatgctctggagacatttttccctttgacttcgaggctaacatttggctcctcattacctatgcaaatttctgcagccagctgtaattttgcctcagwaaatgggattttattttctatcacattgtcaggcttcaaattttctgaacttttatgctctgtttccattttaaaatggagtgcttttaacagcacccaagtcaccttttaatggtttgctgcttagaaatttctcctgccagataccttaaaacatctctctcaagttcaaagtttcacaaatctctagggcaggggcaaaatgctgccagtctctttgctaaaatataacaagaaccatctttgctccagttcccaacaagct

SEQ ID NO: 308625 - DNA, 651 bp, Homo sapiens
ttctatacatcttctgaaacctaggcagaagtcctgaaacctcagttcttgacttttgtgcacccacaggctcaacaccatgtggaagctgccaagtcttggggcttctaccctctgaagccacagcccaagctctaggttggcccctttcagccacaactggagcagcaaggcatcaagtccttaggctgcacacagctcagggaccctgagcccagcccccaaaaccactttttcctcctagacctccggtcctgtcatgggaaatgcttccgtgaagacctctgacatgctctggagacatttttccctttgacttcgaggctaacatttggctcctcattacctatgcaaatttctgcagccagctgtaattttgcctcagtaaatgggattttattttctatcacattgtcaggcttcaaattttctgaacttttatgctctgtttccattttaaaatggagtgcttttaacagcacccaagtcaccttttaatggtttgctgcttaraaatttctcctgccagataccttaaaacatctctctcaagttcaaagtttcacaaatctctagggcaggggcaaaatgctgccagtctctttgctaaaatataacaagaaccatctttgctccagttcccaacaagct

SEQ ID NO: 308626 - DNA, 590 bp, Homo sapiens
aatgcattaagtttactgaatacataaaatgtaagttaacttagtaaatctaaaaaggaatgttcrtgctaacatgactgtaacacagaggcacactatataggagagagacacacagaagagtagactgttttatattcttttgaatactgacatgagagcagtggtgggttctacttgatccccagtcccctcctattctgcaaccagtttatccagcttctgatttcaccaaccaaaatcagcccccaaactactaccacatacttggcagcagcttccacagacggtggtgattttcacagatgcctccatgaccaccttcttcatgatctcactttcatgagcagatgatcttaccttctcagacattcccacaagctgttactgatcacttacccacccatatgagtaatttgggctaagatgtttgctatttctctgttccttcagcttctcacttctccagttcctcccacatttgtatcgctttaattcctatattaagcctctcatttccaatgcagctcgcaataattctgtattcttaattgaatactgacaaagacattgatacctgagatggaaca

SEQ ID NO: 308627 - DNA, 515 bp, Homo sapiens
tttaaaaacaggctaatacacagtagacacttggtaaacaatagccactattattttttcattgtttttaatatcatcatcatcattaatataaacctgcttggagctcacacactaccatagttaatattgctgtttttaaaaggattctccttaaatttggacaagtggaaggtcatatggattgtggtaatttgtgatttttaaacaggcaattgagaattcttttccctcttacaacaaacacatttccatctttccagtactgtcaatgaaaaatatttttttccttgaaatctaagtccttcactgaatgtcctattaagctgtgtcgtgagcccggcgcagtggctcacgcctataatcccagcactttgggaggccaatckcgccactgcactccagcctgggtgacagagcgagactccatctcaaaaaacaacaaaagctatgtagtcaaaagactgacccagacccattttggaagtattctttccctatttgtttacgaagaa

SEQ ID NO: 308628 - DNA, 580 bp, Homo sapiens
cgtgagcccggcgcagtggctcacgcctataatcccagcactttgggaggccaatcgcgccactgcactccagcctgggtgacagagcgagactccatctcaaaaaacaacaaaagctatgtagtcaaaagactgacccagacccattttggaagtattctttccctatttgtttacgaagaagtaaagattcttcttcttcttttttttttttttttttttttttaccattttaraaaacactaacatgttattgtctcatgtgttcatgtaaagagaccaccaaacaggttttgtgtgagcaacaaggctgtttatttcacctgggtgcaggtgggctgagtccaaaaagagagtcagcgagggtggtgggattaccattagttcttataggttttgggataggcggtggagttaggagcaatgttttgtgggcagggggtggatctcaggaagtacattctcaagggtggggagaatgcaaagaaccttcttatgcgtgggggagattacaaagaatctttttaagggtcggggagattacaaagtacattgatcagttagggtggagcagaaacaa

SEQ ID NO: 308629 - DNA, 514 bp, Homo sapiens
gttttcaaaattgtgtactctttatccaacttaggataccagcattcagctcctacttcttctttgggtctttatttttctaggggtggtccccatgtacgtgtgaaaatctgtatgtttctctccaattgatctgtcttatgccgattttgctaagaggatagagatagttttgcttcctctacacacttctcaataactaatcataaaaaacggtttatgtagtttaggttttttttctttttcgttccaagatggcagattacaggcagtgctagcatatctctcctacttggaagaacaaatagtgtgtagcaattcacactgggaactttttcttaaagaagtgatacaggaactgaacagaaaaactgaaggaatccatagaccctttgaaggcagcagcaggctgcagcctacactgtkagtaaggcaaggggctgtgagtcctcagaatgtgagaagaggagagattgcctccagaatacacacacccactagggaccctgaaagc

SEQ ID NO: 308630 - DNA, 566 bp, Homo sapiens
attctaattgctaactttcactacttaatctctctgtggagattagaattagttatggagtgtttatgtagatgacagtcatcttgtttgccacaaactcatttgcacggaaaagcacacatcagttagactcctgtcaaaataattagctaagcatgagataagaccttttaggttttagaactttctaagcattaaatcttttttttttatatgagggcactcaacatgttttacagaaataataagcatgtgtataagtctacattttgcatcatgttacctttttcttgttrttttttcttatctatttaataaagtacctaatttagtaaaatataaaattagcaactggtagtcactgagataatgggaaatagaatttcttctcacttttctcatttctctcattctatgttaggcattatgaaattaaaataaaatccatttcaattaaaagtgatctgttcttttagtatagagcttgataaacagcattgctgaattcaggccagtcataatttaatcaccatgcatcaaagacctaacacagattcacaagaata

SEQ ID NO: 308631 - DNA, 603 bp, Homo sapiens
aacagcattgctgaattcaggccagtcataatttaatcaccatgcatcaaagacctaacacagattcacaagaatatatccttttcattcctagatgaagtaaagacccaaagctgaagtgtagatgtttgaaagctgcttgttactaacagcattctctatcttgctcttccctatgagtgagaaaaagggaaccagaaatcagtgcttatatttctgggagatattatgtgatatgttgatttctgcaataaggttattctacaaatagttaatctgattctttcagkgaatttactgccctcaatcaaagtttggaaaatatgaagttgacattagttccttgcattatttgccttttggattaatgcatttcgtggaaccatagtcattttagtaaatgaaattccctactttccatgtcttcaggctattttaaaagtcaaacttttctagagcctactattctaaacactatggatgtaaagatgaatgagaagcagttcctgtcctcaaatgtgctccacagtggctaaagaatttgtagctagtgctctactatttaaaagaaaaaatgatttgaatgttacttcacacataagt

SEQ ID NO: 308632 - DNA, 603 bp, Homo sapiens
aacagcattgctgaattcaggccagtcataatttaatcaccatgcatcaaagacctaacacagattcacaagaatatatccttttcattcctagatgaagtaaagacccaaagctgaagtgtagatgtttgaaagctgcttgttactaacagcattctctatcttgctcttccctatgagtgagaaaaagggaaccagaaatcagtgcttatatttctgggagatattatgtgatatgttgatttctgcaataaggttattctacaaatagttaatctgattctttcagtgaatttactgccctcaatcaaagtttggaaaatatgaagttgacattagttccttgcattatttgccttttggattaatgcatttcgtggaaccatagtcattttagtaaatgaaattccctactttccatgtcttcaggctattttaaaagtcaaacttttctagagcctrctattctaaacactatggatgtaaagatgaatgagaagcagttcctgtcctcaaatgtgctccacagtggctaaagaatttgtagctagtgctctactatttaaaagaaaaaatgatttgaatgttacttcacacataagt

SEQ ID NO: 308633 - DNA, 585 bp, Homo sapiens
ttctgcatgctgctaccaaaagggacaaaactgtatcccaataacttttctcaatgtttcttcctaagatttctcagtcagatataggaggaagcctagtaatggagatcatattatggtttccttcctagccaagactgttttttctcttatatagcctcatgtcacctcagctaatttaagggaagagtagacctaataatgtaataaataaaaagcctgaatgattaaaaaaccattataacataatggacatgcaggaacctttcagaaagcargccaaagtcaaggatgacaatggataaatcagacatgaactagtgtctaactaaggagtttttccactgacaattcaagaaggctttataattcctgcccagcaggagtttgccattgccgtgcattagtgactgctatgcattcttcaattccaaatggccaaaattggcctttggttttcaatactctatttctgtttcccatttttctgtgtattaggggtgtgtgtgtgttttgtgaaaattgtggagaaagagaaatgatttattaatttatacatcaccagaccttgaggagtaacatcca

SEQ ID NO: 308634 - DNA, 585 bp, Homo sapiens
ttctgcatgctgctaccaaaagggacaaaactgtatcccaataacttttctcaatgtttcttcctaagatttctcagtcagatataggaggaagcctagtaatggagatcatattatggtttccttcctagccaagactgttttttctcttatatagcctcatgtcacctcagctaatttaagggaagagtagacctaataatgtaataaataaaaagcctgaatgattaaaaaaccattataacataatggacatgcaggaacctttcagaaagcaggccaaagtcaaggatgacaatggataaatcagacatgaactagtgtctaactaaggagtttttccactgacaattcaagaaggctttataattcctgcccagcaggagtttgccattgccgtgcattagtgactgctatgcattcttcaattccaaatggccaaaattggccyttggttttcaatactctatttctgtttcccatttttctgtgtattaggggtgtgtgtgtgttttgtgaaaattgtggagaaagagaaatgatttattaatttatacatcaccagaccttgaggagtaacatcca

SEQ ID NO: 308635 - DNA, 607 bp, Homo sapiens
ttcatattgtctatttcttcttgtgtgagttttattgtgtctttcaaagagtcggtttattttgtgaaggttattaaatttgttggcatacatttattcatagtattccttggttgttcttttaatagtcatgagatctcttgtgatatcattctttcattattgacattagtaattgtgtcttgtctttcttagcctggctacaggtttattagttttattaattttttgaaagaaacagcttttgatatttttttattttctctattgatttcctgcttttaatgttatttattcctactctaatttttatttattttgttctgcttactttttatgtaattcactcttctctgtctcgtttcctaagtggaagcttgaattatggattatacattttttttttttttacttttcaagtatttggattctatggtatacatttttctctaagcactgtttttcctgcatccytgtgtttttagtttcatccagtctaaaatgccttttaattactctttaatattttgagattttccagctacatagatagtattgatttctagtttaatttcgctgtggtctgagaccagacatatgattttta

SEQ ID NO: 308636 - DNA, 577 bp, Homo sapiens
atataccaagaactcaaacaaygtaaaataattaataataatagtaataatcccattaaacagtaggcaaaagacatgaatagacatttctcaaaagaagatacacaaatggctaacaggtttttttttaaatgctcaacatcattaatcatcaggaaaggcaaatcaaaattacaaagagatatcatcatatcgctcctgttagaatggctatgataagacaaaaaataaaagaggctggcatagatgcagagaaaagggaacacatatactgttggtgataatgtaaattagtgtagccactatgggaaatatgatagggacttctgaaaaaactaaaaatagaactatcatatgatccagcaatcccactactgggtatttatccaaaggaaaagaaatcagtgtattagagatacctgcacttgcgtgcttactgtagcgctattcacagtagcaagatatggactcaacataagtgcccatcaaaggatgaatggataaagaaaatgtggtgtatattgtgaaccccaaatatctgaagcagttctcaatttaggaaatgtattgtgccaaa

SEQ ID NO: 308637 - DNA, 501 bp, Homo sapiens
cttttcctcttgattctgtcatcttttacttaacttttcccatgtgcagtaattttatgttgtatactgggcattgtggttgacactacagagagattcttgactttgttattctattctgaagagtgtttacttttgttcttgaatgtaatttaattacttactcatcaccctgcacatgtggaggctacatgtttgttatcataccaaatgtccaggttttcttttcatcttagaactcatctttattgttgggacataacagtttttcctaagttatggtctctcttggatttccatggaaaggccaagttcttttaacttgacaagattmaaacatccaactctgtttttactcagttaaaactctgcttagatttttcagccttaatgtttttgcgttcttccatcctcctggtattctcttgcacagctcatgggcaagccaagcatatgagggtagtagatatttgatttgtgtgctctttcctctgtatctcc

SEQ ID NO: 308638 - DNA, 621 bp, Homo sapiens
taaaactctgcttagatttttcagccttaatgtttttgcgttcttccatcctcctggtattctcttgcacagctcatgggcaagccaagcatatgagggtagtagatatttgatttgtgtgctctttcctctgtatctccctcctttcaagatttttttcctccatttccagtctctttgacaaccctgaactccatattttcacatcttatcctaataaaacagtactgttttttctgcttgaattctagctatcaccgcaatatgtggactagggattgtttttaggagaaaaatggtgtgaatgtagctctcagtgaatttttttttctttccagggtcaaatttcctccaggttcaatcagtttcctcctgattttgcttattcttcagtgacttctaatagctgtgctttaaaaagtatttcattcagagtttataattgttatgttcgagaggattagtctgatgacagatattacactatttctggatygggctccataaactatgtttaaatattaattgggcttatgggtttatggtttactaaatcaagtaggcaatatgtattcaaaccacaaactacatgaagataggcctgtggttacaaattctcag

SEQ ID NO: 308639 - DNA, 655 bp, Homo sapiens
cacttttttcctgtaaatagttaggaagacaaaaaggcacctgagataagacctcctcagaccactgcccctcatcaaagagtaatcaagtaatcttccttgggatgtagcaatctgtaagcaatcaaattacttgctgtatatgtactgatcctgtattgaaaatgttttaattctacagtttctgtgtctctgcctatatgattctccactttgaaatgctgactccattcacttggaattggtgttcccagtagccatcctcaagctttgtgtttcaataaactctatacttaattatattttctgaatctcattatttgaagttaatrgttttgtacctacagtaatgaatctcaatgaataaattagtctctgtcacagttaatttttttcatcgttgttgtcgttggtgctataaccaaatacctaagaccaggtaatttatgaatataaaagaaacttctctcttatggttctggaggctgtgatatccagggtcgagggactgcatctagtgagggccttcttgctggtggggactctctgccaagtcctgagacagcacagggcatcacatggtgagggggcttatgagccaaactagcttttataacagacccagtctcgtgataactaacccattcccttagta

SEQ ID NO: 308640 - DNA, 574 bp, Homo sapiens
ggattacaattcaagatgagatttgggtggggatgcacagccaaacaatatcagtatgacaacacacagtaggtagttagccaggctgatccaactccaggaacacagttccctgaaagcagatctgcaaatggcagtggggaaacaaggccttcctgggccaggtggtattctgacatccaggcaatgtcatgagccttgctggcagggtcacaagtctcaggatgggctcagagagactgcttctaatcctgagtgatgggytgacctgtaggcagatttccagggcctctgtgcatggggggagaggggagcttgactcctgctaagatctgaattcattttgaatgggctagtagagttgtttgagatcatatttaactcataataggaacagataatgagtctcttcaaaaacaaggttttattttgttattaaatagaatatttgttggtctcctcctctgtgctgagtatcaacccaggtgaagagatacagggaccagcaagacgtcaacatgtctcatggagttcacttcgtagaggatctaaaaccaaaaatatttatttttgt

SEQ ID NO: 308641 - DNA, 578 bp, Homo sapiens
accattctggagaggctggagtttcttcagctcactattatccctggtgtgaaagcagaaaagaggtggcatgaactatggagttgctggaaaaagactatctgtcatgttaccaaaggaaaacaaaagtcaaaccaataataaaacaaacaggagaactaaagtcctgttgaaaattcacatcaaatgtgaragaatccccaggattctagagtttcactttagtttattttgggagaagggacaattccattaagaaaaccaactgaatacctcatttccttttcatatcttaggataggtaaaagggtgcaaataagaaaaagaagagcattttatctttttaacagggtaaaacaaatatttggactcaaggaaggtgtctcaaaaaagagaaagaaagcactattattcttgattatagagagaaagatctttcctttagccacgtatggatttctctatgggcaaataatacacatatttactgttctgcattgatgttactctcctcatggaacttagtgagtcaaccaggaagtagagaaagatgaaataagcagtaatttagtatagac

SEQ ID NO: 308642 - DNA, 564 bp, Homo sapiens
aataaaacaaaaacaaaacaaaacaaaattccactttggaaaacaatgaagtaatagagggcatcaataactttcagctataaagaacactacccacagcctggggaagacgcattgcaaaggcaaaatgaaataattcctggakctcacacgtggccaggaggaccgtttgctcccaacagccagattggtacagacctcacagtgcacagagtgaaaggaagaggacttagaaggacctcaccttggcagtgccaccgaattagtcttccattacaggctgtactgctattgcctaagaaagtttaagagcaaactgtaaaataatcagactgtttccacggaacgtaactgtgctctagaaagtaactcatatatatttataagaataaaaaaattcccagaattggcaacataaaatcacaatgttgggcattcagtcaaaaattaccagttctgcaaagcatcaggaaataacccataataaagaaaattattagccaatagaaatagacccagaaatgataacgataacaatatttgtagacaaggacatttccagtc

SEQ ID NO: 308643 - DNA, 564 bp, Homo sapiens
aataaaacaaaaacaaaacaaaacaaaattccactttggaaaacaatgaagtaatagagggcatcaataactttcagctataaagaacactacccacagcctggggaagacgcattgcaaaggcaaaatgaaataattcctggatctcacacgtggccaggaggaccgtttgctcccaacagccagattggtacagacctcacagtgcacagagtgaaaggaagaggacttagaaggacctcaccttggcagtgccaccgaattagtcttccattacaggctgtactgctattgcctaagaaagtttaagagcaaactgtaaaataatcagactgtttccacggaacgtaactgtgctctagaaagtaactcatatatatttataagaataaaaaaattcccagaattggcaacataaaatcacaatgttgggcattcagtcaaaaattaccagttctgcaaagcatcaggaaataacccataataaagaaaaktattagccaatagaaatagacccagaaatgataacgataacaatatttgtagacaaggacatttccagtc

SEQ ID NO: 308644 - DNA, 599 bp, Homo sapiens
ttgcttatagtgatcccgaaagatgcaactcacaaagtaatcttcctagaaacaggaaagtctaaaaagtaaaaaaatacatatgggaagaaatttttatttcccttaaggtatatttttctgcctatatctgatataatttcaattttacgatgaccatttttccctacgttttctcaactggagatccattgactgacacagctctaccttttatcaaatacccaatcagtaacctgcatggtgccactcaatggtatccagagtcatccacaccacttctactgcccctaacccaggctcatctctgaaatttcattattcgcattagtcactctttgggtctgataatctaaagacttaaaatgcaaagtccttttttaaaaaagaaaaactgaagcaatgatgctttggtttgaatttcaaagagaattgccttaacaaagaggccccaagagcacacaacacagractaggcacagagtcagggtgagacacagagaaagggtgtgatctacaagccagtgcagtttgcaggaagaggaggacaggattcctgggcagctaaggcagtgatcagacgatggtaccttggacaa

SEQ ID NO: 308645 - DNA, 599 bp, Homo sapiens
ttgcttatagtgatcccgaaagatgcaactcacaaagtaatcttcctagaaacaggaaagtctaaaaagtaaaaaaatacatatgggaagaaatttttatttcccttaaggtatatttttctgcctatatctgatataatttcaattttacgatgaccatttttccctacgttttctcaactggagatccattgactgacacagctctaccttttatcaaatacccaatcagtaacctgcatggtgccactcaatggtatccagagtcatccacaccacttctactgcccctaacccaggctcatctctgaaatttcattattcgcattagtcactctttgggtctgataatctaaagacttaaaatgcaaagtccttttttaaaaaagaaaaactgaagcaatgatgctttggtttgaatttcaaagagaattgccttaacaaagaggccccaagagcacacaacacaggactaggcacagagtcagggtgagacacagagaaagggtgtgatctacaagccagtgcagtttrcaggaagaggaggacaggattcctgggcagctaaggcagtgatcagacgatggtaccttggacaa

SEQ ID NO: 308646 - DNA, 577 bp, Homo sapiens
tgaagacatgcctgctatttgtgtcctatgcattagcagaaaccatcaacagagtcagcatactttcaactgaaaagacaaccacattaaatgacttccgtgaactactttgatgagcgtgagtaatgttttcagttaacaacacaagarttgagtcttccattatcacgagattttttccttcagcattagtagaagcatctccaagttagagcgaaccggagacttccgctggtacaataaaatcataaataattaaaatgacttaagctgcccctttctttaacatttcctatccaaaaggcccataaatcacttcaataaaagtgcctttttttttttatcaaccctaaatctgtgcttaggtctatgtgcttctacttgattttatgcatcagatgtagcaagagatgaattgattgcctgttttacaatgtcacacatatgtgtctaccacttggtacttctggcaaggggaggtcacaaaaaatagatttcactggagacaaccacaattttctccttcttccagacgtttcactttccataatctgacccagattattagccacaatta

SEQ ID NO: 308647 - DNA, 581 bp, Homo sapiens
ttgcctcctccagtattgctgtgtggtcgaatgatgggatccttgtcrctgtctttgctgagcgcagcatgctccagtgaagtcagccttggctggaacctgagcgtggggccgcagctgaggcacttcagcatttgttgaggaatggacaagacagacctgccgttgatggtctgttgaaccgctccccgtctcactattccatgagtccttccaggatcactcagatggatggagggttgtgtctaaaaatgataatggctgcttaaactatggcaataacttgtatgtacatatattttcttccaagaagtaaaatctgctttatagatggtatttcaataatcttcctcctttttctttggaattttaaatgatgtggcctataaaactggaaaggcagcaaaacaataatttgctttgataaaaatttcaatattattgtttcccttttcttgaggaattcttttttttttttgataaattgcagtttctttgggcaccaatagtgtaagactgtcatcatttctcttatgtgaaaataatagactttgtctatttttacttcctctattcagtca

SEQ ID NO: 308648 - DNA, 581 bp, Homo sapiens
ttgcctcctccagtattgctgtgtggtcgaatgatgggatccttgtcgctgtctttgctgagcgcagcatgctccagtgaagtcagccttggctggaacctgagcgtggggccgcagctgaggcacttcagcatttgttgaggaatggacaagacagacctgccgttgatggtctgttgaaccgctccccgtctcactattccatgagtccttccaggatcactcagatggatggagggttgtgtctaaaaatgataatggctgcttaaactatggcaataacttgtatgtacatatattttcttccaagaagtaaaatctgctttatagatggtatttcaataatcttcctcctttttctttggaattttaaatratgtggcctataaaactggaaaggcagcaaaacaataatttgctttgataaaaatttcaatattattgtttcccttttcttgaggaattcttttttttttttgataaattgcagtttctttgggcaccaatagtgtaagactgtcatcatttctcttatgtgaaaataatagactttgtctatttttacttcctctattcagtca

SEQ ID NO: 308649 - DNA, 581 bp, Homo sapiens
ttgcctcctccagtattgctgtgtggtcgaatgatgggatccttgtcgctgtctttgctgagcgcagcatgctccagtgaagtcagccttggctggaacctgagcgtggggccgcagctgaggcacttcagcatttgttgaggaatggacaagacagacctgccgttgatggtctgttgaaccgctccccgtctcactattccatgagtccttccaggatcactcagatggatggagggttgtgtctaaaaatgataatggctgcttaaactatggcaataacttgtatgtacatatattttcttccaagaagtaaaatctgctttatagatggtatttcaataatcttcctcctttttctttggaattttaaatgatgtggcctataaaactggaaaggcagcaaaacaataatttgytttgataaaaatttcaatattattgtttcccttttcttgaggaattcttttttttttttgataaattgcagtttctttgggcaccaatagtgtaagactgtcatcatttctcttatgtgaaaataatagactttgtctatttttacttcctctattcagtca

SEQ ID NO: 308650 - DNA, 589 bp, Homo sapiens
tctgaaaattgattacaattagagttttagatttttcttccccaaattatatgaatttcagatcctagtgtttgttatctttatattttatttttaaagatgataaacacagttttgctttacttgtattccacttggagaaaaaacatctggtatcaccaaggagcagaggaaacatggaaaaacagcaagttatgacaaacataggaggtagcattacataaaataaatttcacctaaattcatcttactaagcaaatgaattaacctatgagaagctatttctacacctayaaagttggtgttatagtatctattgtactgggttgggaggaaggcttcctaacttgtgaagtgtcctgcaaatgtaagtgaagtcttatatggtgcaggcaggacaagagtaactgaaaaagtctttcatacaaaatggattatgggtagtgtgacatttatttaaattttagaagacacataaagaggcatccttaggtaaattagtaagatatttgagatcatgttgaggttttcaactatgaaaatactggaggaagtacggagctgataggccttgtatgggagggatttt

SEQ ID NO: 308651 - DNA, 571 bp, Homo sapiens
tagaatgggttaaaatggatttctcaccttgaggataaacatttatgactttattttcagtagagtagtaaaataaggacaaggtagaaataaggaggcttggtttcactcctgcctgcacctctaaattgttctgcaaacttttctgggtcactgtgcttcctggcctcagttccctatctgtggaatgaagaaggtgtccttgatgtaattccaaatctaacattccataactgtaagatgacatccctagtccttttatataattgttataactattaaagaataaaagtacagaacagtaaacttctaaaaacactgcttctacagaygaactatggaaatacctcattagtgacactttaaaacaatctgcactgtactaagaaaatagtactttgcactatctgtagacatagcaactaacaggatgtctgccacatagcaccagctgaatacattcttgataaatgagtaaatgattgttatgtgaatgcatgtttccattcctgtcattatcccacaacaactccaaagggaatacaataaattctgtccaatgaatgagccc

SEQ ID NO: 308652 - DNA, 627 bp, Homo sapiens
gatcatctaaggaaaatttatacatttgcatggaatgactcttaaacaaaaggaattttcttgagatggtaaaaggagcagccctctaaaagtagagaaacaagtttattagaaataaaatgatttctcaaactgataaaacttctcagagacaatggtaaattgcttcaatcttctgtcttgtaactaggagaatacattttaatcctgaccttacccaaatttctgagcatttaatataagcaaaattaaatatttagaaataatatgtgcctgccatacagtctattcagattgaacagaagtagttttggtcaattaatatgtttatatttcaattaaacatttttttwaaatttaattaaatgttttaagctttttgtttattacataaacatgttttattttaaattgtttaaacaatttgtgatgttggacacaatctcaggtaactaggacctgtttcagtgctgaaatcaatatgctttacagtttggaatatttcaaagagctttaaatatgtacaggtacattaagatttacctctttgcttctgtatattagcttctggatctgaatgaaccaaatgattaatttattgcaaagagataaaaatgtattcttcag

SEQ ID NO: 308653 - DNA, 628 bp, Homo sapiens
gattttttcaaattctttttttcatcaattgatatgactatatgatttatcttctttagcctgttgatgtggtatgttacattaattgattctcaaaggttgaaccactcttgcacatctggaaaaaaatccaacttagttcaaagtgtggataatttttttaatgctttgttgcatttaatttgctaatatttttggaggatttttgtgtcaatgttcatgagagatattggtctgtagttttcctttccttttttgtaatgtctttatctgattttggtattaaggtaatcctggccttaagtaatctgttagtaagtgttcactctacttccattttctggaacaaattataaagaattgatagtatttcttttttaaatatttggtagaaatcacctgtgaaaccataggggccttgtactttatttttcgagagctagttaattgttgaatcagtatattttctagatataggcctattcagattrtctatttctctatgtgtgggttttggtattttgagtcttattttgtttagtctctgttatcaaatttgtgagtaaagagttgtacacagtatgccttaattatcctcttaatgtccatgatatcagtagaaatgacc

SEQ ID NO: 308654 - DNA, 547 bp, Homo sapiens
cggtttaagttctgtgaagaaagagttacaatgctttcctctttatcactcactgctgtatatccagtacaamtaacaacaacaataactttatggtgttacatttaggattcagtaagtacttctgtatttacatcatccagaaggaggatggagtatggagtagaagactccatttgtgtcactttgatgaaaacaacaataaaataagaaagtcaaaatatatttactgtgataagaacagcaagacatttttaattacaaccaatttgaggccaggcgtggtggctcatgcctgtaatcccagcactttgggagcccaaggcaggaggatcacgaggtcaggagatcaagaccatcctggctaacatggtgaaaccccaactctgctaaaaaaaacacaaaaaattagctgggagtggtggtgggcacctgtagtcccagctattcaggatgctgaggcaggagaatggcttgaaccctggaggcagaggttggagtgagtcgagatcgcgccactgcactccagcctgggtgacaaagcaaa

SEQ ID NO: 308655 - DNA, 567 bp, Homo sapiens
tctgattggcttatttgtatcttctctcttcttttcttggttaatcttgccaatggtctatcaattttatttatcttttcaaagaaccagctttttgtttaatttatcttttgtatatttttgkttcaatttcatttagttttgctctgatctttgttatttcttttcttctactgggtttgggtttggactgttctcatttctccagttccatgaggcttctaatgtctaatgtccaactagacattagattgtctagttgtgctctttcagactttttgatgtaggcatttaatgctatgaactttcctcttagcactgcttttgctgtatctcagaggttttgataggttgtgtcactattatcattcggctcaaagaatttgttaatttccatcttgatttcattgttgacccaatgatcattcaggagcaggttatttagtttccatgtatttgcatggttttgagggttccttttggagttgtttccagttttattctgctgtggtctgagagagtacttgatataatttcgattttcttaaatttaccgagacttttttg

SEQ ID NO: 308656 - DNA, 460 bp, Homo sapiens
cctgtctactgctatcagtggagtattaagttcccctgctattgttgtgttgctgtttaatttcttaggtttagtagtatttgttttataaatktgggagctccagtgttaggtgcatatatatttagggttgtggtattttcctgttgcacaagtccttttatcattacataatatccctcttcatctttttaaactgctgttgccttaaagattgctttgcctgatataagaatagctacttctgctcactttttgtgtccatcttcatggattttttcacccctttaccttaagtttatgtgagtccttatgtgttaggtgagtctcctgaagacagcagaaagttcgttggtgaattcttatccattctgccattctgtgtcttttaagtggagcatttaggccatttacattcaatgttagtattgagatgtgaggtgctattctattcattgtg

SEQ ID NO: 308657 - DNA, 623 bp, Homo sapiens
agcgtgatccttgaagaagaaaaggttcagggacagaatttgtgtaagatgtaatcagaacatgttcatcataggaagtaatatgagttcccactaaactgaatctatgcctttccaaatcatgataaagctttattgcaaactttgttttattgtgtttgttcctgatatggtttggttctgtgtttccacccaaatctcatcaccagttgtaatccccatgtgtcaggagaggaatctggtgggaagtgattggatcataggggtggacttctcccttgctgttcttgtgacagtgagtgagttgtcacgagatctggttgtttgaaagtgtgtagtacttttcccttcactcgctgtctctcctgccaccatgtgaagaaggtgcttgcttgcccttctccttccwccatgattgtaagtttccgaggcctcttagtcatgcttcctcttaagcttgaggaactgtgagccaattaaacctcttttcttcataaattacccagtctcaggtagttctttagagcagtgtgaaatggcctaatacagttcttttaaaaataacatgcttattctgcaagctttctaattcatgcccaccataaggtaatgtttataagcga

SEQ ID NO: 308658 - DNA, 623 bp, Homo sapiens
agcgtgatccttgaagaagaaaaggttcagggacagaatttgtgtaagatgtaatcagaacatgttcatcataggaagtaatatgagttcccactaaactgaatctatgcctttccaaatcatgataaagctttattgcaaactttgttttattgtgtttgttcctgatatggtttggttctgtgtttccacccaaatctcatcaccagttgtaatccccatgtgtcaggagaggaatctggtgggaagtgattggatcataggggtggacttctcccttgctgttcttgtgacagtgagtgagttgtcacgagatctggttgtttgaaagtgtgtagtacttttcccttcactcgctgtctctcctgccaccatgtgaagaaggtgcttgcttgcccttctccttccaccatgattgtaagtttccgaggcctcttagtcatgcttcctcttaagcttgaggaactgtgagccaattaaacctcttttcttcataaattacccagtctcaggtagttctttagagcagtgtgaaatggcctaatacagttcttttaaaaataacatgcttattctgcaagctttctaattcrtgcccaccataaggtaatgtttataagcga

SEQ ID NO: 308659 - DNA, 559 bp, Homo sapiens
ttttaatctgaattttcttctgatggagaatgtgagagtgactcaataccacaaacagcaaaactacacaacggcgaatagtgtgactattaactccacggaaaataaaagtggtgtaaaaaagaaaatggaatcacasgaaactctaagctaaaaaaattttcatacttataatatatgcactaaatatttttaaaattaaatattaatgttggaagttagtgttcgtgtgaatagtagaaattaagagacagtactggaaaatggagctgtatgaacacatacttgaggaacacagtgataaacatcaaaagtaacaggcttgcccctgttgggaagaagaatgctgttttttatctataagacttgtaatacaactaagtatgtgggtaattgttttcaagtttttttaaattgtggttgtttgggtttttattgttgagttttagaaactctatatataccctggatattaatcccttatcagatatatgatatgcaaattttttccactctgtaggctgccttttcacactgttgatactcattgtccttcgat

SEQ ID NO: 308660 - DNA, 593 bp, Homo sapiens
tagttgctggcttctcatattcaaagctgacctcattccctccacccaaatgggtgggatgggtagaatcatgtgtccagttatgaaacctgtaaagtgagatgtcattattaacccattccctctcttaccccgatggtgaatcatccagtcttgtcaatagattctgattatgactaaattcttccagatttgcctcttcatcgccatattcacctgtgctttagttcatgcccattctactgaatcactcagcaccctccttactgggccaccaggttgttttcctcactgcagtcagaccaatcattcccaaatgtgaatctcactgtcccaccactctgctttaagcacctcccaatggctgcccatttctcaaaaaccattcaaacagcttataaggcccatcaacactgtagctgcactcaagctctggaatgtgctacacgccatctccttcaaaatgagcttgcttctctggctgctgaagagcctgtcactgtcccaatctcaccgacacttyacttggtgaacccccaaccattataatacaatgtacacatcacttaccaagtttacatggctgcccttcc

SEQ ID NO: 308661 - DNA, 454 bp, Homo sapiens
acaaaacggtaaacataacatggaatgatgccttcaatattctgaaggaaaaggacttccaactggaattgtacccatggctgaggagacacacaagctattttagttagaaaagtaactccctcgcacaaactctgtcccaaaaagtcaggaaatgaagaacataaattggtgaaaagagctctccaagccagaaatagaagctccaaggaaagggagataaagggaattccaagatggaggaaagacctggaaggcagctgtgcagcaggtctggagagaaagcagttcagacggagraagggcagagggctatctttgaggtgagaggcggattaatggaccccctgatgtgtctggctgtagctgagtcaaaagccaaatggagaagtttgtatttttaggtcacattgtgatacaaccagagggtgttcagtcaaagccaacccaacaa

SEQ ID NO: 308662 - DNA, 597 bp, Homo sapiens
caggcagtttctgaattctatccattcatttatctcatttaataattataaattcatgcgatagatattaatattatctttattttatagatgaggaaactgaggcatagagaggcacacactaagcaagctttaaactgagattcaaagcccagcattctgactccagttttctcatttttaaccactagtctatactgctctagattttagatttatcctaggctcatcaggagaacctgtgcaactcactagcagactacaggccacattctgagaagcatccgtaactatgatgacacctcaaaataatgcaatagcattgagaagatgcactgggggtcaaagcattgggggtcaaagatagattctgtataattaagaaagaaccagcagsacacttggtgactgtttatatgtgtgggttgaggaaggggtcaagagggagcagagtctggaatggcaacttaggaagcaaacggtagaaagagcaagtttttggcttgggatggaggtttggtttgatgcatagactctgggatgcttctgagacattcaggtagaaaagccaggtgggtagagtgacaaaggagcaga

SEQ ID NO: 308663 - DNA, 638 bp, Homo sapiens
gagaacacttgcacttgtgtctggaactggttattagtcatgtcagcctaatcagatcagaggactccttcagacaaaaaaataaggtattttgggttgaggctcattaaaatttagagaggttaatttcctccttaactttaagtagctagaaagtcagaaataataaagatgcragtaaagtagaggattttaaatttttttataagtaaaatctgaaaattgttggaagttaaaatattttaattttccaaaagactttgtgtagtctattctataaaataaagatcagatgtttaaaaaaataagatgaacttgttaaaaccaatgaccaaaattagatggatttagatgtgctagctcagttttccaaactcaaatgtagaaaataaagattcctttggaaaacactatcaaaataattttttaaagattatcacttttcattaacataacgcatgccctttgaggcttaattgtaaataatcggctttcagtgtagctgtagtgattaattcgcctatgtgatgtttagctttcaaatgcctgtaatggcatgaataagcaacattacggctggaaatcaggccaagtatttaaaaagcaacaacaaagagcaaagtactcacgctgtggca

SEQ ID NO: 308664 - DNA, 603 bp, Homo sapiens
ccttgctggaaacccaacctcagcacttccataggcctcgccccaggttgggacctctcactggctgggttacccacttttctgttcagagacgggataaccasagggcaacacatctgattataaaagtgcatattgcagggtttaggcaagtaagaatacattctgaccaggaccagagaccccactctggctctaacaagctgtgtgaatcattgagttgcctcacctctggatgagaggtttggatctgataagtcctaggattccatcagtttcatattccacacccctatctttggtgactaggataagagaagatgaatcgaaacacctctcctgcatctatttatatctatacccaagctgagcgagcagctttgttcttcttaagttggagatgcaaagtgttcccatcataaacaagagcccagcttaatctgacgcgatggtccctgcacgggaggctccagggcatgccacatggctctccctgaagggccagcaccaccaggccactccataccccaccagcccttgtcgcggcacctcagttttttgtcatttcataacaaacactttatatataccctggtgagaaaa

SEQ ID NO: 308665 - DNA, 579 bp, Homo sapiens
tttctgatagcattgaacataacagtcacatttatttactttactgattgattatagctattaaagttgtaccacatgtctagaggatgtatttctcagaccattttattattctctttattgagtgtgctggatacatatgttagagttgaaacaargccatgcttattttagttgtgctttgtactctagcttacactgtcttggaatgtgaatccaggccagagggcacaaaatagggttgctgaagggaatatttgacaggtattgaattaataaataaaccagttaattaatgaatacataaactgaccctcagattcctagattgggtaaaagggtcactattttgcagaatgcactatatacctgtaagacagggtctaatttcattagagcttaatcagaggtcatccataaatttcttctttaatggaaacatttggatagaagggttggctcttatatgttgatagtactgacaaaatatatgaatattttgtgaattttgtgtctactccaaatatatgacacttaacgaatgattgtaaactttctatcttgcaggtttgtggttac

SEQ ID NO: 308666 - DNA, 581 bp, Homo sapiens
tttctgatagcattgaacataacagtcacatttatttactttactgattgattatagctattaaagttgtaccacatgtctagaggatgtatttctcagaccattttattattctctttattgagtgtgctggatacatatgttagagttgaaacaaagccatgcttattttagttgtgctttgtactctagcttacactgtcttggaatgtgaatccaggccagagggcacaaaatagggttgctgaagggaatatttgacaggtattgaattaataaataaaccagttaattaatgaatacataaactgaccctcagattcctagattgggtaaaagggtcactattttgcagaatgcactakatacctgtaagacagggtctaatttcattagagcttaatcagaggtcatccataaatttcttctttaatggaaacatttggatagaagggttggctcttatatgttgatagtactgacaaaatatatgaatattttgtgaattttgtgtctactccaaatatatgacacttaacgaatgattgtaaactttctatcttgcaggtttgtggttaccg

SEQ ID NO: 308667 - DNA, 482 bp, Homo sapiens
attgcaaacccctaaaagaataaaacacttgatgttcctttagttaaccacttttggtgttacttaccagtattttaaaacaaggtcatgtaagtagttaatgaaatttttatgttatgtttttaagggtgttcttctgagtagaagagctagctaggtactttagagaaaaacactgtagaaacttaagatttgtgaaaaagtaaaagagtttgcattaatatcttcaataaaaataattacttaagtcttcaacaaaactatatcacctggaaatggggtatgttcctttcttttctctgagttttttttctttcactgaacaagcatgtattgaatgcccttaagcatccagcactgtgctaggtataagatctatctctgtttccagaagctcagtcagggaaggagatgaatgatacctakaaagttaattcactggtgcacaaaggtatgttttgagtgccataggtggtcctgtg

SEQ ID NO: 308668 - DNA, 368 bp, Homo sapiens
gtcactgcaggaagttctgctggacagcactggcctaggcaatgggattactgtatagagaccaccagtagtacatataagtagaatttactgcctggacaagtgggtgaaaagctaaaagctaagatcctaagccctattgccatgagacgggaagaaaggcaggatccacggcaggaagcagctatgctatccacagctcctggcagaaggggaaatctgaagggtgagggagaaagatagctttgggggtcagaaagagacctctatgaccttgttcttgaataaatgtagtttacggaggcagctgagatgaaaaaactcaaatgagcttaaacacamagaagtaatgttgtagcacaaaattt

SEQ ID NO: 308669 - DNA, 549 bp, Homo sapiens
gcttccagggcaccgcattctcttcgttgtttcctgcctcaccagcagctccttctcacacaccttctattgattcccccttctctcttgaatattttttttcttttctctttttctttctttctttctttttttttttgaggggggggaggaggggacagggatactcgctctatcacccaggctgcagtgcagtagtgcaaacctagctcactgcagccccaaactcctgggctcaagtgatcttcccacctctgcttcmtgaggagctgggactataggtgcgtgccaccacacccagctaatttaaaaaattttttgtagtgacaaaggtcccattatggtgtgcaggctggtcttgaactcctggactcaagcaatcatcctgccacagcctccaaagtgttgggattataagtgtgaaccactgcacctagcccaatgccgagtcatatcagtgtgcactggggctcgtcactggacctctgctcttccctaactgtatttattctctttgtggtttcctcaaatggcactgctttaaatatc

SEQ ID NO: 308670 - DNA, 549 bp, Homo sapiens
gcttccagggcaccgcattctcttcgttgtttcctgcctcaccagcagctccttctcacacaccttctattgattcccccttctctcttgaatattttttttcttttctctttttctttctttctttctttttttttttgaggggggggaggaggggacagggatactcgctctatcacccaggctgcagtgcagtagtgcaaacctagctcactgcagccccaaactcctgggctcaagtgatcttcccacctctgcttcatgaggagctgggactataggtgcgtgccaccacacccagctaatttaaaaaattttttgtagtgacaaaggtcccattatggtgtgcaggctggtcttgaactcctggactcaagcaatcatcctgccacagcctccaaagtgttgggattatargtgtgaaccactgcacctagcccaatgccgagtcatatcagtgtgcactggggctcgtcactggacctctgctcttccctaactgtatttattctctttgtggtttcctcaaatggcactgctttaaatatc

SEQ ID NO: 308671 - DNA, 549 bp, Homo sapiens
gcttccagggcaccgcattctcttcgttgtttcctgcctcaccagcagctccttctcacacaccttctattgattcccccttctctcttgaatattttttttcttttctctttttctttctttctttctttttttttttgaggggggggaggaggggacagggatactcgctctatcacccaggctgcagtgcagtagtgcaaacctagctcactgcagccccaaactcctgggctcaagtgatcttcccacctctgcttcatgaggagctgggactataggtgcgtgccaccacacccagctaatttaaaaaattttttgtagtgacaaaggtcccattatggtgtgcaggctggtcttgaactcctggactcaagcaatcatcctgccacagcctccaaagtgttgggattataagtgtgaaccactgcacctagcccaatgccgagtcatatcagtgtgcactggggctcgtcrctggacctctgctcttccctaactgtatttattctctttgtggtttcctcaaatggcactgctttaaatatc

SEQ ID NO: 308672 - DNA, 549 bp, Homo sapiens
gcttccagggcaccgcattctcttcgttgtttcctgcctcaccagcagctccttctcacacaccttctattgattcccccttctctcttgaatattttttttcttttctctttttctttctttctttctttttttttttgaggggggggaggaggggacagggatactcgctctatcacccaggctgcagtgcagtagtgcaaacctagctcactgcagccccaaactcctgggctcaagtgatcttcccacctctgcttcatgaggagctgggactataggtgcgtgccaccacacccagctaatttaaaaaattttttgtagtgacaaaggtcccattatggtgtgcaggctggtcttgaactcctggactcaagcaatcatcctgccacagcctccaaagtgttgggattataagtgtgaaccactgcacctagcccaatgccgagtcatatcagtgtgcactggggctcgtcactggacctctgctcttccctaactgtatttattctctttgtggtttcctsaaatggcactgctttaaatatc

SEQ ID NO: 308673 - DNA, 563 bp, Homo sapiens
caagggtctgccatccaagctgcagcaagcctggcacagacctacctcagagcatcactttccttccaagctctttgggaaatgtttgccttcactccacacgctcctctcagatgtacacgcaccattgacggtggcttctatttactcagagtttcactgtgcaaacgaatcttttcaaagccctgcagcctttctggcagcaagaaggaggcagcatatgtgagtgggctctactgctttccctcccttccccagtgcctrggacgtggctgccctggttggcctgtagcgcagtttcctccatagaataggctctgctcctggaaggtgtctactgagtgggtctgggatacaagaactagcctcttcagctgcccgctcatgcccattattggggtaatggtagtgcccagaaagggtgcttcccacagaccagttcagagttttgcatggtgtcaactatgatgctgaaagtcacattctgtgtaggatccagtaagaattctacaaggtgtcctgtgcagtggtgcacataggattccatccagtgcctaatgcat

SEQ ID NO: 308674 - DNA, 598 bp, Homo sapiens
ggtctcaggagccacttgagatatttgattgtctttactgcctcttatgtgagatgtaataggcactaaagcaactcatgtggatgggaacttccgcaggccaaggcacacccccagtcaagggtctgccatccaagctgcagcaagcctggcacagacctacctcagagcatcactttccttccaagctctttgggaaatgtttgccttcactccacacgctcctctcagatgtacacgcaccattgacggtggcttctatttactcagagtttcactgtgcaaacgaatcttttcaaagccctgcagcctttctggcagcaagaaggaggcagcatatgtgagtgggctctactgctttccctcccttccccagtgcctgggacgtggctgccctggtyggcctgtagcgcagtttcctccatagaataggctctgctcctggaaggtgtctactgagtgggtctgggatacaagaactagcctcttcagctgcccgctcatgcccattattggggtaatggtagtgcccagaaagggtgcttcccacagaccagttcagagttttgcatggtgtcaactatgatgctgaaagtca

SEQ ID NO: 308675 - DNA, 563 bp, Homo sapiens
caagggtctgccatccaagctgcagcaagcctggcacagacctacctcagagcatcactttccttccaagctctttgggaaatgtttgccttcactccacacgctcctctcagatgtacacgcaccattgacggtggcttctatttactcagagtttcactgtgcaaacgaatcttttcaaagccctgcagcctttctggcagcaagaaggaggcagcatatgtgagtgggctctactgctttccctcccttccccagtgcctgggacgtggctgccctggttggcctgtagcgcagtttcctccayagaataggctctgctcctggaaggtgtctactgagtgggtctgggatacaagaactagcctcttcagctgcccgctcatgcccattattggggtaatggtagtgcccagaaagggtgcttcccacagaccagttcagagttttgcatggtgtcaactatgatgctgaaagtcacattctgtgtaggatccagtaagaattctacaaggtgtcctgtgcagtggtgcacataggattccatccagtgcctaatgcat

SEQ ID NO: 308676 - DNA, 563 bp, Homo sapiens
caagggtctgccatccaagctgcagcaagcctggcacagacctacctcagagcatcactttccttccaagctctttgggaaatgtttgccttcactccacacgctcctctcagatgtacacgcaccattgacggtggcttctatttactcagagtttcactgtgcaaacgaatcttttcaaagccctgcagcctttctggcagcaagaaggaggcagcatatgtgagtgggctctactgctttccctcccttccccagtgcctgggacgtggctgccctggttggcctgtagcgcagtttcctccatagaataggctctgctcctggaaggtgtctactgagtgggtctgggatacaagaactagcctcttcagctgccygctcatgcccattattggggtaatggtagtgcccagaaagggtgcttcccacagaccagttcagagttttgcatggtgtcaactatgatgctgaaagtcacattctgtgtaggatccagtaagaattctacaaggtgtcctgtgcagtggtgcacataggattccatccagtgcctaatgcat

SEQ ID NO: 308677 - DNA, 564 bp, Homo sapiens
gccaagagttctatgccatgctcagctcaattccccacagagtgctccaagctaagcccagcatgaggtctgacactgtgctgaatataattcctagtgcccaatgagtgcccactggatgcccttcaaggtggccaatgaatggacktcacaccccagtgagtgacacacctgggaagttctctcttgcccaaaccccccctgctagggagaagtaggaccacccctctgacctcctgataaatctcaacctcactgccagcctctccacaggctcttggtgtctttaaaaagccacacaatattattttatctaaacaagcaacttgctctaaacctgaagccaaccaagaaaacataaaacccgaatactaacataacaaagttttattttgagattcttttttacatcttttaaaagcaaggtgtagtacatgcttattataacacaaaacatgacaagcaaatagtacaggaacctattacatagaaagtgaaattccctgtttcctttcctctctctcccatctcccatcaatccctctttctagaattaactaccat

SEQ ID NO: 308678 - DNA, 590 bp, Homo sapiens
tgttatttaattcttgaaaatggtattcaaactaacatgagattttattcagtttaataaaatactacctaattaggaagaagctttactactatctctagggatatattaatatcattaagaagaacatatgcttgaaaattatatgtacatttataattttgttcccttctgaatagaaaagactatttaattaagattattactatctttaaagctttttctcaagggaaatggtcttcatgctaagctacatatcttctatggaaaaaaaattgtctaaaaaaccctgaaattctacaagtacatatgctctggttgtatcctaaggagaactcccttcctccctccctcattatatttctattgtacaatatcaaccmgggttgcttgcatgtgcttgcttgcttgctctgtgatgatttttaacaattttttttatgagcaaagtggagagataaaccaattcttcatataatttataccaagaaaaaaaaaagaagaagaagaagacaaaagaatacggagcctaacaggagggtgcagaaaagtccacctgctgcaatccagacaaggatacagatgactgc

SEQ ID NO: 308679 - DNA, 579 bp, Homo sapiens
ggctcactgattaacaaggatgttaagagacttaattaatgcttgtttggagctttgcctgtcagggttgttattagaggatccattgagattctgctcataataaaaagtttgctggaaaaccctactttattcaaataggggcacacagacaacaagaagaattccctagtccattttattttatcacttaactgtattgggtgtttcttgagcatgcgccatgtgtttgcagtgaatggcagaaggaaaatgtgcttctggaggttcctgygggagacttgccattgcttcctagtatggaagccctggcatccatcaaaattgctatcactggaagtgaagctataaggaaatgagatggagatgtggatggtattggctggtggctcagactgttcttattttggtgcgtcaacttaaccctggctgttagctgtatgggtccagaactgattaagcccatatacccaaaggagttgaatcgtcatcatcatcatcactatcataataataatcatatttctaacacttagtattactatgtgccaagcactgctctaagttctttatatatat

SEQ ID NO: 308680 - DNA, 631 bp, Homo sapiens
ttgggcacgcggctcagttaaggctataaacaatgagtcaactggaggtccactttgtggtgtaaaagcaattctgattgtaggaatccatcagaactagattctgctggcatttcttgagggttttctcatatcgtatacatagtaaaggtcttttcctccagtttatttttgtccatttctttcttacacatggacaaaatgagactaatacctatataaagttttattctttctcatcttccaaagctatttcatcctccaaagtgtttgttatrtacttttgaatgaatcacaatataccaataccaacacatattttcattatttcatatgactatgtctattttcatcaaatgccaagaaatctatttttctaaaatactataaatgcgacttattagcggtattctgatggtcccatcaaatttccctttcactacttattttcagtttacaagatgaacttattgtcttctcccacaaggataggacctctggccttggaaggaatgatttacacatttcagttatctttcctcaaaacccttatctgtgagaaattaaaccgctacgaaattgagaggaaaggatcagagagtataaggtacaaggccaggagtggcagaga

SEQ ID NO: 308681 - DNA, 631 bp, Homo sapiens
ttgggcacgcggctcagttaaggctataaacaatgagtcaactggaggtccactttgtggtgtaaaagcaattctgattgtaggaatccatcagaactagattctgctggcatttcttgagggttttctcatatcgtatacatagtaaaggtcttttcctccagtttatttttgtccatttctttcttacacatggacaaaatgagactaatacctatataaagttttattctttctcatcttccaaagctatttcatcctccaaagtgtttgttatgtacttttgaatgaatcacartataccaataccaacacatattttcattatttcatatgactatgtctattttcatcaaatgccaagaaatctatttttctaaaatactataaatgcgacttattagcggtattctgatggtcccatcaaatttccctttcactacttattttcagtttacaagatgaacttattgtcttctcccacaaggataggacctctggccttggaaggaatgatttacacatttcagttatctttcctcaaaacccttatctgtgagaaattaaaccgctacgaaattgagaggaaaggatcagagagtataaggtacaaggccaggagtggcagaga

SEQ ID NO: 308682 - DNA, 553 bp, Homo sapiens
tgaccatatcttggcctttggctctcaatttctctaggccctttgaaacacttctctttgtgagtaataccaacaacatactacatgccaatatagctggttaggttaaagctctttctagttgtcagagtataaggaaaccttcctaagactaccccgaattttcccacagcagttacatccatctattcattcttttaatcaataaatacttattgcctactatatgcccagcaatgtgctagcagcgggggaggtaactggtaaatgaaagaaatgtggcctcgggtcttataaaacttagctagagtaggaagacaaactaccaacaaggaaacaaacaaaatcactgcagagtgaagcctgatcccatgtgggtgaaaccygattccatgtgaatgaatcctggttaccgtgagtgaagcctaattaccatgtgagtgaagcctgatcctacagggtgtctgggggagggcgtgaaggcataggacactgtgagaaagggtagaggacctccttagacagggtggaaacatgacatttaacctcagac

SEQ ID NO: 308683 - DNA, 535 bp, Homo sapiens
taatctcttacctgaaccacagcaagaacctcccaactaatctacctaaaaaggcctggcagttagaggtcattttaccactagctcaatcaaacagccagagagttaagtcaatccaccaaatacaatgttgggagtaagggggcaggatgagagagaaaatgagctaaaaatggaagggaactttcctgtgratgttgagctgtgcttctttgcatgtgatattgcaccaagactagaccatgtggtacctggacttatatgggttataatgtgatcctcagagctcagcaagtttatactggaaatgccaagtttaaaatctcggaaagaatgatgttcactcatcccatatactttttgaggatgtatattccaggcaatgtactcaacactggatgtacagcaatgaagaaggctgatgcagtctctgctctctagagccaacagtatagtgggaaaggttgtcattttgcaactaattacagactcattatttaattacaactttgacgaatgctgttaaccaaaaaat

SEQ ID NO: 308684 - DNA, 590 bp, Homo sapiens
cagaagaaactgtatatacaaagactccgaggcagcagaaacaaggaaggactaaaggaaggtcactgtgcttacaatgtacagaatgaagagaagaacaatacaagatgagctggaggggggcacggtggaggcatggtgggggcatggagagcatgtgcaggcagggttagattcattaggaccttttgcactaaagggatataagcaagtgacgttgatcaaaagccagaagatgacaccacaagcaatttggaaaaggtagtcagaaacagaggaaaagtaagctgctcccaaaattctcrgagaaaggggggtacccttccctgtgaatggagctctgattaatctggcttctttgtgtctaatttaccctttccctagtgttacaccatggccaccacaaagtcacaccacaaagtcacatctcagtgagtggcataaccttccctttccagagcctgtagggctgatgtggcccatgtgcagactggtgatgttcccagatacctgggacatgggcctcccccttcctctgatgctgtcaccagcctccttcttacctggagagtttgcattacatgcaggag

SEQ ID NO: 308685 - DNA, 567 bp, Homo sapiens
aggacctggtatggattgtacatcagtaaacacataaygatagccaaagcacactggaaaggaaaggaaacatctctaattccagtccaaaaatctagaccatgactttggtgacctccctgggctatacaatctatagtcccctgttagaatcctggtggtttctggccaggcgcggtggctcacgcctgtaatcccagcactttgggaggccgaggcgggcaggtcacaaggtcaggagatcgagaccatcctggctagcacagtggaacccgtcccagctactcgggaggctgaggcaggagaatggcatgaacccaggaggcggagcttgcagtgagccaagatcgcaccactgcactccagcctgggtgacagagtgagactccgtctcaaaacaaacgaaaaaaagaatcctggtggtttcctgctgttggcctttacccattactctgaccatgaactaaaccatctttatactcaagtggttctaatattgacctggacttgtctctactcagcctggagtcaccaaacctagaggaagtatgtaaagaagaggtaaag

SEQ ID NO: 308686 - DNA, 567 bp, Homo sapiens
aggacctggtatggattgtacatcagtaaacacataacgatagccaaagcacactggaaaggaaaggaaacatctctaattccagtccaaaaatctagaccatgactttggtgacctccctgggctatacaatctatagtcccctgttagaatcctggtggtttctggccaggcgcggtggctcacgcctgtaatcccagcactttgggaggccgaggcrggcaggtcacaaggtcaggagatcgagaccatcctggctagcacagtggaacccgtcccagctactcgggaggctgaggcaggagaatggcatgaacccaggaggcggagcttgcagtgagccaagatcgcaccactgcactccagcctgggtgacagagtgagactccgtctcaaaacaaacgaaaaaaagaatcctggtggtttcctgctgttggcctttacccattactctgaccatgaactaaaccatctttatactcaagtggttctaatattgacctggacttgtctctactcagcctggagtcaccaaacctagaggaagtatgtaaagaagaggtaaag

SEQ ID NO: 308687 - DNA, 567 bp, Homo sapiens
aggacctggtatggattgtacatcagtaaacacataacgatagccaaagcacactggaaaggaaaggaaacatctctaattccagtccaaaaatctagaccatgactttggtgacctccctgggctatacaatctatagtcccctgttagaatcctggtggtttctggccaggcgcggtggctcacgcctgtaatcccagcactttgggaggccgaggcgggcrggtcacaaggtcaggagatcgagaccatcctggctagcacagtggaacccgtcccagctactcgggaggctgaggcaggagaatggcatgaacccaggaggcggagcttgcagtgagccaagatcgcaccactgcactccagcctgggtgacagagtgagactccgtctcaaaacaaacgaaaaaaagaatcctggtggtttcctgctgttggcctttacccattactctgaccatgaactaaaccatctttatactcaagtggttctaatattgacctggacttgtctctactcagcctggagtcaccaaacctagaggaagtatgtaaagaagaggtaaag

SEQ ID NO: 308688 - DNA, 567 bp, Homo sapiens
aggacctggtatggattgtacatcagtaaacacataacgatagccaaagcacactggaaaggaaaggaaacatctctaattccagtccaaaaatctagaccatgactttggtgacctccctgggctatacaatctatagtcccctgttagaatcctggtggtttctggccaggcgcggtggctcacgcctgtaatcccagcactttgggaggccgaggcgggcaggtcacaaggtcaggagatcgagaccatcctggctagcacagtggaacccgtcccagctactcgggaggctgaggcaggagaatggcatgaacccaggaggcggagcttgcagtgagccaagatcgcaccactgcactccagcctgggtgacagagygagactccgtctcaaaacaaacgaaaaaaagaatcctggtggtttcctgctgttggcctttacccattactctgaccatgaactaaaccatctttatactcaagtggttctaatattgacctggacttgtctctactcagcctggagtcaccaaacctagaggaagtatgtaaagaagaggtaaag

SEQ ID NO: 308689 - DNA, 602 bp, Homo sapiens
agtcagtttggtgacttattgcctgcataattgaataaaggagattaaaaatgatggagcatgtcagaatttatgtcggaaaatgtactctgaaattcaattcaacagatatttattaagagtcttctgacaaggcgtgttgccaggaactatgtcaaacagacgactaagaatgttctctactctcaggaagctcacaatttagttagaacagcgctagccaacatgaaaattggggaaggcactccagaactcacagctgtttgagcacagcttgggctagacttgaaccttcactcaccyttagccaggcatctgcgtgcattgcacagcttgaacaatctcacacagaagccctagctatgactaaaacaaacaagcatgatggaaagatagaataatagatgtgcacatataaacctgagtgtagagaaatggattatatgtgaacatgacaattgaacctcaagatgattggtcaaatgtttgagagagagaaaaaaaggtcccctttacctatgattggcccagtatgggtcgtatgcttcatgtaatggccaagactaaactgagtgctgatcgtcccaatagacacacaagtg

SEQ ID NO: 308690 - DNA, 602 bp, Homo sapiens
agtcagtttggtgacttattgcctgcataattgaataaaggagattaaaaatgatggagcatgtcagaatttatgtcggaaaatgtactctgaaattcaattcaacagatatttattaagagtcttctgacaaggcgtgttgccaggaactatgtcaaacagacgactaagaatgttctctactctcaggaagctcacaatttagttagaacagcgctagccaacatgaaaattggggaaggcactccagaactcacagctgtttgagcacagcttgggctagacttgaaccttcactcacccttagccaggcatctgcgtgcattgcacagcttgaacaatcwcacacagaagccctagctatgactaaaacaaacaagcatgatggaaagatagaataatagatgtgcacatataaacctgagtgtagagaaatggattatatgtgaacatgacaattgaacctcaagatgattggtcaaatgtttgagagagagaaaaaaaggtcccctttacctatgattggcccagtatgggtcgtatgcttcatgtaatggccaagactaaactgagtgctgatcgtcccaatagacacacaagtg

SEQ ID NO: 308691 - DNA, 602 bp, Homo sapiens
agtcagtttggtgacttattgcctgcataattgaataaaggagattaaaaatgatggagcatgtcagaatttatgtcggaaaatgtactctgaaattcaattcaacagatatttattaagagtcttctgacaaggcgtgttgccaggaactatgtcaaacagacgactaagaatgttctctactctcaggaagctcacaatttagttagaacagcgctagccaacatgaaaattggggaaggcactccagaactcacagctgtttgagcacagcttgggctagacttgaaccttcactcacccttagccaggcatctgcgtgcattgcacagcttgaacaatctcacacagaagccctagctatgactaaaacaaacaagcatgatggaaagatagaataatagatgtgcacatataaacytgagtgtagagaaatggattatatgtgaacatgacaattgaacctcaagatgattggtcaaatgtttgagagagagaaaaaaaggtcccctttacctatgattggcccagtatgggtcgtatgcttcatgtaatggccaagactaaactgagtgctgatcgtcccaatagacacacaagtg

SEQ ID NO: 308692 - DNA, 602 bp, Homo sapiens
agtcagtttggtgacttattgcctgcataattgaataaaggagattaaaaatgatggagcatgtcagaatttatgtcggaaaatgtactctgaaattcaattcaacagatatttattaagagtcttctgacaaggcgtgttgccaggaactatgtcaaacagacgactaagaatgttctctactctcaggaagctcacaatttagttagaacagcgctagccaacatgaaaattggggaaggcactccagaactcacagctgtttgagcacagcttgggctagacttgaaccttcactcacccttagccaggcatctgcgtgcattgcacagcttgaacaatctcacacagaagccctagctatgactaaaacaaacaagcatgatggaaagatagaataatagatgtgcacatataaacctgagtgtagagaaatggattatatgtgaacatgacaattgaacctcaagatgattggtcaaatgtttgagagagagaaaaaaaggtcccctttacytatgattggcccagtatgggtcgtatgcttcatgtaatggccaagactaaactgagtgctgatcgtcccaatagacacacaagtg

SEQ ID NO: 308693 - DNA, 551 bp, Homo sapiens
ggaaaaagaatcaacaggtgtatctggcctctggttctctaggcaccctgcagagagggatgtttgggctgcaacacagctgtgtctatctatatttgtcatcagagggctctacacccctttttgttctttatttatatggaacaaatgtgaaagtggctttgccccagaaagtggggaaataataaacatttagaactcaggcaccaagggctctaggctgaagtggcgggtgtataggggattgctgataaatgycagctgactagcacctagaggccctgggagctgccactccttggaaaattaaattcaggcacagttaactctgactgaggaaggattggagcctatccaggtcccatgagaattgcagcctctttggggagcagagaattgtccatctgagctactccattgccaggcaacccagagagagcccctagcgtcattcatttgtcagttccacactatctccagctacagccccatcatagtgcatgcccccatctgaggccccagacacatggaactctttatcccccaagcat

SEQ ID NO: 308694 - DNA, 526 bp, Homo sapiens
aaggcctctgtcttccctgtaaagaacatagtcctcagactctactgacaaagcccagtgccctaccagaagacccagcacaagaagmgatggtaccaaacaagagcatctacttcaactcctcccctggcccagaagctaggccagagcacagcaaactttcagccatcagagcagtatcagggaggcaagggttaagactttgggatcagacagtttttcaaattcacttccttgttatgacctgagttgccatttctccatctgtgaaatgggaataaaaactcatctcacagaactattttgaggatgaaatgtggtaatatatggaggcaattgatccagtgcttaccacaccataagtcctcaatatgtgacactatttgttactttgaaggaaggaacagcacactcaagaactagataggtaaaggagaacatgaggttataccctatttggtagatcagtgttaactactccagcggccacatgccttctaaaaagaaggctaccagggctgctacc

SEQ ID NO: 308695 - DNA, 595 bp, Homo sapiens
cagccctaaatgaagatagcattggccttctctgacagaggagataactgaacaacactccatgattagaagacagagaggcgcatgttaccactttcaagagcaaagtctcagcagtcatcagagccagattaaatcctggcgctgccacttaaccaagtcatttaatctctctgtgcctcagtttctttctctgtaagaaaatgggacaaataatagttcctacmtcatagacttgttatgagaattaaaagagataattcatgcaatgcattttgtagagtacttgtcaagttattagtgcaatagatcatatattcaaacataagtggttgccatggaccatgctgggagctggggcacgggcattcctggtgtaaaggaacaggtgtggggctaggagaatgcatgcctgagtttcagtcctggctcttcccttgactagttgttcagacgtagttgagtcccctcacctccttgagcttcagtttcctcacccagaaaatgggagtgacagtacatagcccaggcttatgatgaggaacaaacaaaatcatgatttttgtaaagcactctaaaagtacaaaagatatta

SEQ ID NO: 308696 - DNA, 550 bp, Homo sapiens
cacttaaggcagttagatctgcgaaagtgtctggactgagcataaggcttgagcagtcatcttcattaatgcagtcactgaaactgtgaggtagaaaaggcmcttttttgagccccagatcatagctcctggaagagggaggaacttgtgaaaggagcttgatgaattactgctacctggttgattcttttgactcagctctccccctccctacatcatcttttctatagttttcacgtctttcttcttttcatctcctcctgcttctcctttgcagctcccggtgaatgcttgatgaatcctggcttagcgaataggctaaaccctccacttagaaaacaagccctagcttttatcttcctctgcggttttgggtttgccagaatcaaagtaacattagcacgatttgtttggattagcatgaagacttctagtccactcctttgcaatattccatattttaataactttaataattacagcttcctttttctaattaagagcttagagagagaccttggagagggaccaaaacagtggtgtttggtat

SEQ ID NO: 308697 - DNA, 550 bp, Homo sapiens
cacttaaggcagttagatctgcgaaagtgtctggactgagcataaggcttgagcagtcatcttcattaatgcagtcactgaaactgtgaggtagaaaaggcccttttttgagccccagatcatagctcctggaagagggaggaacttgtgaaaggagcttgatgaattactgctacctggttgattcttttgactcagctctccccctccctacwtcatcttttctatagttttcacgtctttcttcttttcatctcctcctgcttctcctttgcagctcccggtgaatgcttgatgaatcctggcttagcgaataggctaaaccctccacttagaaaacaagccctagcttttatcttcctctgcggttttgggtttgccagaatcaaagtaacattagcacgatttgtttggattagcatgaagacttctagtccactcctttgcaatattccatattttaataactttaataattacagcttcctttttctaattaagagcttagagagagaccttggagagggaccaaaacagtggtgtttggtat

SEQ ID NO: 308698 - DNA, 575 bp, Homo sapiens
caggctcaaaaaagctcacatacttctgacatggtgacatggtaagttgggaacagtttcacagaggaggtattccatctgggaccttgaggataagaaagatttaatagatgaatattaagggaaatggcattctggggtcagggtgcagaataagccagtcaggggagcttgaaaatgcaagctctatttagggaataatgatgggtctggtattgatagagtaggattcacacagggctgaatgggacawgaagctgaaaatgtctaatgacacccaaccagaagacctttagtgctgtgataagaattggttctctatgctgtaggggatggaaaaccacctgcgcaggtttacaaagagaggagtggtccagtccgatctttcctcagcaaatgaactttaggagaaccactgcttatccatgtgagggatgaagaaataagcagcaggccagcagcttgaaagctattgctaccagccagaaaatgagagacaaaaccagggtaagggcagtaggaagcaaaaggagagatggtacagagtattagtcagtttctgcaattgactagct

SEQ ID NO: 308699 - DNA, 575 bp, Homo sapiens
caggctcaaaaaagctcacatacttctgacatggtgacatggtaagttgggaacagtttcacagaggaggtattccatctgggaccttgaggataagaaagatttaatagatgaatattaagggaaatggcattctggggtcagggtgcagaataagccagtcaggggagcttgaaaatgcaagctctatttagggaataatgatgggtctggtattgatagagtaggattcacacagggctgaatgggacaagaagctgaaaatgtctaatgacacccaaccagaagacctttagtgctgtgataagaattggttctctatgctgtaggggatggaaaaccacctgcgcaggtttacaaagagaggagtggtccagtccgatctttcctcagcaaatgaactttaggagaaccactgcttatccatgtgagggatgaagaaataagcagcaggccascagcttgaaagctattgctaccagccagaaaatgagagacaaaaccagggtaagggcagtaggaagcaaaaggagagatggtacagagtattagtcagtttctgcaattgactagct

SEQ ID NO: 308700 - DNA, 575 bp, Homo sapiens
caggctcaaaaaagctcacatacttctgacatggtgacatggtaagttgggaacagtttcacagaggaggtattccatctgggaccttgaggataagaaagatttaatagatgaatattaagggaaatggcattctggggtcagggtgcagaataagccagtcaggggagcttgaaaatgcaagctctatttagggaataatgatgggtctggtattgatagagtaggattcacacagggctgaatgggacaagaagctgaaaatgtctaatgacacccaaccagaagacctttagtgctgtgataagaattggttctctatgctgtaggggatggaaaaccacctgcgcaggtttacaaagagaggagtggtccagtccgatctttcctcagcaaatgaactttaggagaaccactgcttatccatgtgagggatgaagaaataagcagcaggccagcagcttgraagctattgctaccagccagaaaatgagagacaaaaccagggtaagggcagtaggaagcaaaaggagagatggtacagagtattagtcagtttctgcaattgactagct

SEQ ID NO: 308701 - DNA, 608 bp, Homo sapiens
tcagtttctgcaattgactagctgaggtgtcattgtctgggtaaacgtttggtctgcctcacttgagtataagtcccttgaaaacagaaaccatgtcttactcatcgttgtgcctttggtgctttacaggatacctggcagactggtgactgtcattataacagatattctaaaatggtgaccttaggtgggcttcaagggggcgtgcaaatcctcccaaaactatacacattattttgtgtgtctgtatattgggcatcttcctcttggagagggtctataactttgatcaagtcctcaaagagctctgtgacccaaaaaacggttgggagcaactgctctagaaatttgttgtcttcataaaygtttctgactcttagtttctgtttttatcccttctctaagtaccaacttcctacataaaaaaggacaaggtcaacaacattaaatggacactttgagcattattcattttatttgtagtaaaagcccaacatataaattcagctatgagtctaagttatgctgaaacactgaaagacattttccctgcccataactgacctcattctctggtaacacatcccatttcagaacctactctctaa

SEQ ID NO: 308702 - DNA, 598 bp, Homo sapiens
tatgcatttctacaatatttagctgaatatacctttaatatttaattaaaaacatctgaaaaaactatatgctaatggtttgacaaagtgaatgcttccattttacaatgactaatattcttaacacttggatcagcctgaaaatttccccttattttcttgagagaatataaacattttaaaaagcaaggtggtatgacaaagcacatttttattttgttaaatacatgccaactagaaatactacaaatattaatttatcctgtcactgattcatgtatactgcaggtaatctggcagtccaggtcagagtcaccaaattcagattaatgaccagatggtattcccttcagagagaacccctgccatttccaatcactaaggcaaccacatctcttacttcttacatatttctatattcttcctcttcagtccttagataaattcactccatgttcttttyaaatgatccaattcctctttctcccaagctgggccacgtaccttggatgctcacccctcacttctaactctatgtctcctttcatcatttaagtagcttctaaaccacttctaaaaaatgtaatcgcttgagata

SEQ ID NO: 308703 - DNA, 498 bp, Homo sapiens
acatttttattttgttaaatacatgccaactagaaatactacaaatattaatttatcctgtcactgattcatgtatactgcaggtaatctggcagtccaggtcagagtcaccaaattcagattaatgaccagatggtattcccttcagagagaacccctgccatttccaatcactaaggcaaccacatctcttacttcttacatatttctatattcttcctcttcagtccttagataaattcactccatgttcttttcaaatgatccaattcctctttctcccaagctgggccacgtaccttggatgctcacccctcacttctaactctatgtctcctttcatcatttaagtagctyctaaaccacttctaaaaaatgtaatcgcttgagatatggttcacagagcacacagtttacccatttaaagtgtacaattcagtattttagtatattcacagatatacacaacaccaccaaaatcaattttagagcatttct

SEQ ID NO: 308704 - DNA, 552 bp, Homo sapiens
cctgaacaagaacttaatgaaatgctggaaagcaggaaaggaaacgaccttgtataaaattgaaacaattaaggacccaacaagcagacttaaagcactaagaggattgctataaagggaatatttaatattattttaccctcaacaaaaattttaaatggtaggatagattaattcagtacagcttactaggttttttttttgaagacragatgttatatttctgagtgttattcatgtcgatctatgtaaatctattattcattttatttttttgagacagggtctcattctgttgcccaagcgggagtgcagtggcactatcacagctcactgcagccttgacctccccggcacaagtgaccatcccacctcagcctcctaagtggctgggaccacaggaatgtgccaccatgcctggctaatttttaatttttgtagaggtggggtctcactatgttgcccatgatggtcttcaactcctgggctcaaatgatcctctgccttggcatcctgaagtgctgggattacaggcgtgggccactgtgctca

SEQ ID NO: 308705 - DNA, 560 bp, Homo sapiens
tcaaactggtgttccttggaaacataaataggtctgtcttcatgtaagcatgttaagtttaaataaatttggtaaatgctacactagattattccttaggtctctgattcaaatatataattaccttagtgcatttaaatctatagctatagatacactgtctacttttgattttctcataatagagaggaatactagataatatgaaatagatgacaatcatccaaagaaaaattcataccttgacaggagcaactgaaaacaggaagcaaagggtttaataatagcragaggggcaaaaatagcattcaagtaagataataaaagtcataaatttaaacaatgtctttcagtctgttttgtctctccttccaaatgatctttttcttcaagttattttatgagttgctaaaatattataagttcaacccattcctttttttttttttaaagattcatttctagataacatgaaaaaaaagggttcgatcttttgactgtggcaataaactatcatctgcctatccttggtctgacacagtatcccacctggagccatt

SEQ ID NO: 308706 - DNA, 544 bp, Homo sapiens
ttaaactatagatgaaagttattccacatgttaaataagaaaatagaaaattgagttgtgcaatatttctgggtttttttgttttgttttgctttgttttggcatgaaggtgaaatcacctgatgtgctatcaggaggcagcagggttcagaggaagcgctttgaattgggggttaggagatgtgggtcctggccctgccactaactggatgaccttcaacaggctacttctcctaactggggctatgtgtttcctgaaraatacaaactgaatctgcaacccccaccaccacctattctgttattcatttatttttactccaaaactcctttccacagaacaactccacttcttaggaattaaaatatattttttttatcattttttgtggtgtattacaaaatggttttaggttaaaaaatttttagatcagatttaatacagcatctattaacataattttaataaaatcattaatgtataatcagaatcctatgtttccttttgtgacaacactgggttaaaaaatactgaatcatatta

SEQ ID NO: 308707 - DNA, 579 bp, Homo sapiens
ttacactagcagaaagttattttcagattagcttaatcttttccagacttgcttttaaggatttttgtcagggagtttatctggagtagccttactctargtctagtttagtctccctattaaagtaagtttgacctatctggggtgtctaccgaattctccaggtattcagcaaagtctcttcactctagttggtgggaacctgattcagtcccaatcctgtgcaagctttgagttatttggcttccagtgtcccaataattactctttcccagctctttgttccacctcataaagtttcctcctttacatgcacaaattgatagtcaaagtctgaaaaggacctctatatagatttctggatcctttttcactgtaaagctcccttctgtccactatttatgatctctgtctctactcagcaagaccaccaggctctgtttgggttccctcttcctgagctactgccaggaaattgcttccaggaagaaagccagagcaattgaaggattcatcttattttattcctttctcttgaacatcatagtactgcactgcctattatccaatatctgagaa

SEQ ID NO: 308708 - DNA, 552 bp, Homo sapiens
ctgtacacaccactgtctcaggggatctctctgtaacacatcaactggtcttctcctcttattgcctttgcttctcattcctgaccccagaggttgtctgtcagacttggtttaagcctctctggccaaatactgtatctattgctttatctggtctgtctctttggtttctgaacaaacctttcccttggatcctatatctgtttcccttttgctccaagtcctgtagccattgatcatttctgctctactccagacccctccccacaagcccccctttctgggaaaaggagtcagagtaccaaattaactttttccattaaaaaagcaaaacaagttaataggctggctgagcaggggaatgatatttgatgaatgatgaaatttaagaaggacaaatattaggtatttctatggaaaacagttattcagttccttagaaaattaagcagagttatcttatgacytaataattttaccatagctgtatatacccaaggtgtttgaaaacatattcccacaaaatcttgtacacaaatgtgtttatagcat

SEQ ID NO: 308709 - DNA, 607 bp, Homo sapiens
gagcaaagcaggaaaggagagagagccaatacttggatacaatatctagctggctcccacaaaataagactgctggatgctaaattccctcccctaagaggtcctataacatacattccaagactgggaaggggagattttaagaaaatggtggaagaatttgtgaacttgttctcatctcctattactcaaatatttgttacagggcttttacagcctcacacgtttggccacacatatgtgggtaccaagtgggatcacagaggttaatagggaagcctcrggactagaagcacaagacaaagaagcatgaggaactgctattaggttgaatatgtctggcccatgcagaaacaactaagcctgagaggatttggagtgttttatgagaggtgtctaatacacttctaactcttctccctttacttcatttagtctattttctgcaatgcctaatgcctaatcttttaaattgcaaatcctagcaatccagtctaaagtccttcagcgattctacaaagctcattgataaatttggaaattcttcatatggaatacaagggattcatgatccaattcttgcttatctttccagcatttgcagtac

SEQ ID NO: 308710 - DNA, 451 bp, Homo sapiens
ctccgcctcccggttcacgccattctcctgcctcagcctcccgagtagctgggacttcaggcacccgccaccatgcctggctaattttttgtatttttagtagagacggggtttcaccgtgttagccaggatggtctcgagctgacctcgtgatccacccgcctcggcctcccaaagtgctgggattacaggcgtgagccaccgtgccaggccsaatatttttgaactaatgaatattatattctctgttcgagttcccttatctaaaattttcatcctcctctgtttaatacatgtaagaacatctatgatgtatgtctagaaaatctattttatatacatgtaatatgtaatagagatgcagggctaattttaaagattggatagttttatttatactgtgagagggccactgaatattaaaactttttttactatatgttgtagtaag

SEQ ID NO: 308711 - DNA, 618 bp, Homo sapiens
tcccaactcagtaaacagtaacaccatctacctaattacttaaaccataggtatttttccttttacctcatttattattgaatcttttatgtcagatatatgctccatatttatccacttatttctacttctacaactactactttagcttgaattactctgatctctcaccagaagaactccaatatcacctttactacttactctaatttcatacttgtcatccccattcttctcgccatagcattcaaagtgatactttgaaactgaaagtagattatgtcgttttcctgttaaaactctccaaatracttatcattagacttagtaaagttcaaattccttatggtggcctttgaggctctacatgaactggctgaataactctctgattttctctcttacctctcttgccctttcttgaatttgaccacattgaacttcttcctatttttccactatgtaacaaattttattggatttgactcaaatatcagctcctcagagaccatccctgactctcgtatctaaagtaacttccttctgcacctattatttgaattggttttcattaaagcattaagagcatatttactatatcatcttaggcagaaaaaa

SEQ ID NO: 308712 - DNA, 594 bp, Homo sapiens
atttttacctgtaattttaaggttaaatatctttatgcttagtactctgaagaacaccttgatttgagtatccatgcataagtgatttataaggaagtgttattgaggaaaccaaaaaacgatggcagcaacaagagaaggaagaggaaaagatcaagtggaaaaacgttttgaggctaagaaccagagcagtagtttcaacctgacactttgaacctgaccctgcagagatactctggagtacacattatgcccaggagttgtaccaagctaagtaaaggaaggaggctggtatttktaaactccagcaccctatagtcattagttcaggggtgtcatctaggtgagcaaagaggcctccagaatctaaggcaatcttccaagaaaatctcaaactattgaaagcaaaagcaaaccaaatggtaccctccatgcacacgaacaggggtaaaaggaatgctgggagatatgaatgaaaaatcaaaattacacactataattattattttaaaccaagatataaatttgcaaattataacattttatacatataaacttaggcagatagaatataaaaaagtgctaatgaataaa

SEQ ID NO: 308713 - DNA, 594 bp, Homo sapiens
atttttacctgtaattttaaggttaaatatctttatgcttagtactctgaagaacaccttgatttgagtatccatgcataagtgatttataaggaagtgttattgaggaaaccaaaaaacgatggcagcaacaagagaaggaagaggaaaagatcaagtggaaaaacgttttgaggctaagaaccagagcagtagtttcaacctgacactttgaacctgaccctgcagagatactctggagtacacattatgcccaggagttgtaccaagctaagtaaaggaaggaggctggtatttgtaaactccagcaccctatagtcattagttcaggggtgtcatctaggtgagcaaagaggcctccagaatctaaggcaatcttccaagaaaatctcaaactattgaaagcaaaagcaaaccaaatggtaccctccatgcacacgaacaggggtaaaaggaatgctgggagatmtgaatgaaaaatcaaaattacacactataattattattttaaaccaagatataaatttgcaaattataacattttatacatataaacttaggcagatagaatataaaaaagtgctaatgaataaa

SEQ ID NO: 308714 - DNA, 495 bp, Homo sapiens
aggctacttacaggggcatggtttaagcaaacaggactgggaacacagaagcaggcgctaatggctggggctgcatcaagttgtggcctttataccattctatgaagcttagattattctaaaagcaatcagtaaataccagtttctaaagaagtagcagagttaactctgttttgagagtcatcacattcatggactgagagagaatggagacagagaacatgattaggaagttttaaagtaatgttctggcagcaagtggtaggattatggcattaacagtggaatagagagaagaagaagctgcaagaaatcttagaagtaaatgaaaaagaatttggtaaggrattgaatgtctgggtaagaacttgatagaattacttcacggtctctagcttgggcgaatgggcagatattgatagtgttccctgagaaagggaagttgacaataagaacaataacaaatagaaatggcagttatcatgtattctgcta

SEQ ID NO: 308715 - DNA, 510 bp, Homo sapiens
agtctttgtctcaaaaataaataaataaataaatacaaacaaaaacagcgcacattaaaataactgttgacaaaatttcttatgtcaccaaaaataggcagctcaaatattcaaaaacatattatttaaaaacaaatttacatttttatgtaatactaagatgcagcattaaaatgatgggtgarttccacttcaaaataaaggaaaataaatttcacaattcagtgttctgaaaacagtcaataaatgcccacagtggatgtaagtatattacctcaagagactttcagccacacagtgcataaacttaggggacatttagtcatcatatgcctattaagagaatcctgaaattttttgatatggtacaaattaacttgccagaatgttacagtatatacaagcagagattttcctgagactttttgagtctcagtatctgcatttataaagctggtatgaaaaagcatttgccaaatgggtgggtaatgaaaattaactagaaagaat

SEQ ID NO: 308716 - DNA, 584 bp, Homo sapiens
agctggtgatatatcagtgagaaaaatgacccaaatatctactttcataatctcatatctagttagaggactcaaaaataagataactgaataaatgrtatagtatattagaaagtaatgaattctgcagggtaaaatagagcagggtatggaaatttgggagtgaggaggggcaggtagtccatgttcttggatagggtggttaaagttgactttactgagaagatgctactagtgcagactggagaaagataagataacaagacctatggctctttgcagcaagtgtgtagcaggcagataatcagtgcaaaggccctgaggtgagacctcgttttcaaggaagattgagaagacaaaataagaattaattttgtatgttcataaattatgtcaacactctctggcataatttatttaaaccatgtttattttacattttggcacatatatacatctatctttctgctattaaaatctccccaagcttaataaggcatctgaatttctgatctaaaatgttatccacaagtgtgtgacctgctaattatgcgaagctgcttaattcccaagagtgcatcact

SEQ ID NO: 308717 - DNA, 534 bp, Homo sapiens
aacaaatactttttttttttttttttttttttttttttgggggaaataaggtcttgctctgtcacccacgctggagtgcagttatgcaattacagttcactgcagacaccaactcctgagcccatgtgatcctcccatatcagcctcctgagtagctgggactacaggcttgagcaaccataccccattcccattctttttatttttcttctttgtttgtttgtttttggtagagattgggtctctgttttccagacygatctggaactcctggcctcaagagaccatcccaccttgacctcccaaagtgctgggattacacatgtgagccactgcaactggcctaaatattgcccttcttctttaaaaaataatttcaacttttatttcagattcatgcagtacatgtgcaggtttgttacttgggtatattgtgtgatgctaaggttttgggtatcaattatcctctcacccgtgtactgagcatagtacccaaaagttagttcttcaccccttgcatcactccctccctcc

SEQ ID NO: 308718 - DNA, 607 bp, Homo sapiens
atatcttctcccattctataggttgtctgggtactctgttgactgttgacaggttttttgtttgtttgttattttgctgtgcaggagctctatagtttaattagttcccacttgtcaatttttgtttctgttgcaattgtttttgaggacttcatcataccaaattttattctcagtgaagaaacattccaacagtttaattcaagatcaggaacaagacaagatgttcatctattctattttactctttcgtttactgaaaacatattgattaagcctataccaggaaccttcttaggcatcctatgatacataagygaataaatggacaaagatccctgatttcaaagtacttacatttattaagagataatagaaaacgatcaataaatacagtgaataattacatagaatgctagcatctaaaaagtgatatggtaaaaaaaaataaagttgaacagatcagattagatcaggagtgcaagagggtggaggggtgtggaggggtgcaggaggtagcattaaataagcagtcatcttcagccttacagtgaaaaggttgtttagcaaacacatgaaaggcatgaaggagttgacccagcagata

SEQ ID NO: 308719 - DNA, 583 bp, Homo sapiens
gttacttttaaagtctggctgtgtattggcttttattttgtagccaggatgtccatgactacatgcataaattgagtaatgagatatcttagtccattttctgctgctgtaacagaatacttgtgactaggtaatttataaagaacagatatttatttcttacttttctggaggctggaaggtccaagatcaaggagcccatcttgagagggmcttcttattgtgtcatcttgtggcaaaaggcagaagagcaaaaaagaacaaaagggctgaactcacttctacaacaaacctactccgatcattaaaccaccccagagataacagcatttatctacccatgagggcagagtcctcatgatctaatcatctcatgaaggtctgacttctcaacattgtgcattgaggatcaagtttccaacacatgaactttggggaaaatactcaatcaaaagcaagagaatatatttgtgagctaattgtgggactgtttaggtatattagaaagaataaaatcatacagaacgaacagttttcatctggtagataagagcaaaagagagaagtacacaatgttttattt

SEQ ID NO: 308720 - DNA, 593 bp, Homo sapiens
tatggcaatattttgttgagtttgaatcctgtaggaagagctcattccactgtatattcatctacttgaatattttccactgacagtcaaacaaagattgtattatttggctaacagccaaaggtaaacttttgaagtattataagtgtcatgttcagaacactccacgattgcagtatttatgaagccaagttttgcaagacacacgggctcaggaaatccattgttgaacctcagtgatctgcagtaacttctactctattctcaagatttgagctacgtgactccagacagagagctgttcactatatgagatgattrtcattagaggtacattccaataattaaaggacattctgaatttttcccccagaagtatattcctgaaccacaaaaatgtattcatcatccatacacacatcaatacctaaaacccatactcatgattgatggagttttacatgtggtgttgtccaaagatgtcaaatatgtatacgtaagatatacatcttataaataatgtgtatgaggtatagccatgtatctagcattattccccatagcttaaatttagacattacatatatactcaa

SEQ ID NO: 308721 - DNA, 548 bp, Homo sapiens
tgagacaagtctctactaaaaatacaaaaattagctgggtgtggaggtgcgtgcctataatcctagctagttaagaggctgaggcaggagaattgcttgaacctaggaggctgaggttgcaatgagccaggatcgtaccactgcactccagcctggatracagagggagaacttgtctcacacacacacatgcacaaaaatgcatacataaggacatagagtgtgtaatgatagagagtggagacttagaaggatgaggagttgggagaagagggaatgatgaaaaattacttaatgagtacagtgtattttattcaggtgatggatgccctaaacccactgacttgaccattatgcaatctatgcatgtaacaaaattgcacttgcaccccataaatttgtatgaatttgaaaaaactcaaaataaaaatatttattcagatcctaagtatcaggcacttcactggctctagaatttctgctgataaggtttgattcctggcctggagaatatctcaaagttatgaaaaaccaatactaaacaagta

SEQ ID NO: 308722 - DNA, 583 bp, Homo sapiens
tgcatttcacattctgagttccaaaactgtacaataataaatctatgtgcttgaaagccactaaatttatggtattaataatttgttacagcagcaataagaaatgaatacaaagaataactgtttcccagccatttgctccttgctctcacaggcattttgttattgttattgttgttatttttatttttatgctctactttatctccagctccttgtcctctagcttctatgaaatcrtaaccaaccaatgggtgggtaggtaactggagagtgagaggaaggaagcatccaaggcattctcctcttattcaggggagttccctctggactgtgtctaccctaagatgccagcttctagtggatagaactgccctgtttacttaaaagtagaagtaataatttatatacctcaaagaggttaacatttttagagcagatattttatgacatttatttatttatttttagttccagtatatttgttatcctacaaatgtatgctgggtgaaaaaagtaatttgttaaaacctgcacattttgttcagaatgttctcccaaatttatctcaagcttgcaatat

SEQ ID NO: 308723 - DNA, 583 bp, Homo sapiens
tgcatttcacattctgagttccaaaactgtacaataataaatctatgtgcttgaaagccactaaatttatggtattaataatttgttacagcagcaataagaaatgaatacaaagaataactgtttcccagccatttgctccttgctctcacaggcattttgttattgttattgttgttatttttatttttatgctctactttatctccagctccttgtcctctagcttctatgaaatcgtaaccaaccaatgggtgggtaggtaactggagagtgagaggaaggaagcatccaaggcattctcctcttattcaggggagttccctytggactgtgtctaccctaagatgccagcttctagtggatagaactgccctgtttacttaaaagtagaagtaataatttatatacctcaaagaggttaacatttttagagcagatattttatgacatttatttatttatttttagttccagtatatttgttatcctacaaatgtatgctgggtgaaaaaagtaatttgttaaaacctgcacattttgttcagaatgttctcccaaatttatctcaagcttgcaatat

SEQ ID NO: 308724 - DNA, 544 bp, Homo sapiens
ctgagttccaaaactgtacaataataaatctatgtgcttgaaagccactaaatttatggtattaataatttgttacagcagcaataagaaatgaatacaaagaataactgtttcccagccatttgctccttgctctcacaggcattttgttattgttattgttgttatttttatttttatgctctactttatctccagctccttgtcctctagcttctatgaaatcgtaaccaaccaatgggtgggtaggtaactggagagtgagaggaaggaagcatccaaggcattctcctcttattcaggggagttccctctggactgtgtctaccctaagatgccagcttctagtggatagaactgccctgtttacttaaaagtagaagtaataatttatatacctcaaagaggttaacatttttagagcagatattttatgacatttatttatttatttttagttccagtatattkgttatcctacaaatgtatgctgggtgaaaaaagtaatttgttaaaacctgcacattttgttcagaatgttctc

SEQ ID NO: 308725 - DNA, 576 bp, Homo sapiens
gtggtttattttgaaatttgcaacaattgcccagcttggatctacagtacatgctatctcctttcctctttttaaaaaatttattgtgtatatttaaggtgtacaacatgttgttttgtatacatatagatagtaaaattgttaccatagtcaatctaattaatatgtacatcacctcatgttgttacccatatttttgcatgygtggcaagagcacctaaaatctgaatatgatataatgttatgagctctagtcctcatgtcatatatgtctagacttgttcatcctatatatctacaactttgtatcctttgacctacatctccttgtttcctccccacctccgcctcaggtaaccactattttattccatctgtgtcttcaactttttaagctctcctttcctctttaattccacattttttttttttgagacagagtcttgctccattgtccaggctggagtgcaatggcaagatctcagctcactgcaacctccacctcccaggttcaagcaatcatcctgcctcagcttcccaagtagctgggattacaggcacctgccaccatgccca

SEQ ID NO: 308726 - DNA, 595 bp, Homo sapiens
agttatggatgcagttttgcagtcaagaaaatgacggatttctctcccttgaagacattaactttattccactttgttctaacactgtgtgcagacaatgagaatgatatagtagtcccctgtttcctcaatgaatataattcaagatgagcctactgctacattctcacacggcttccttctgaccttatgaattccaacttattctcggccttgttttctaccagtgttgtctcacttattccattatcttattcatttctcatttattcrataataattattatgcatgaaatgaaaagtatttattattattgcatggtagtcaaaccagttagctcacaagcaaatattaagtatcaaatggataaccaaaaaatccaattactgagcagtcccataaagaacactttactctcataataaaatttcaaaagatgcaaatattttaacaccataacttgcatctatatattaattcataggaaaattctttatttctatcccaaatgctgtaaatgtttgtttcatccaaatgtacacgattttttacattttaggtttttctaattattcatactcaaatgtaaaaagt

SEQ ID NO: 308727 - DNA, 595 bp, Homo sapiens
agttatggatgcagttttgcagtcaagaaaatgacggatttctctcccttgaagacattaactttattccactttgttctaacactgtgtgcagacaatgagaatgatatagtagtcccctgtttcctcaatgaatataattcaagatgagcctactgctacattctcacacggcttccttctgaccttatgaattccaacttattctcggccttgttttctaccagtgttgtctcacttattccattatcttattcatttctcatttattcaataataattattatgcatgaaatgaaaagtatttattattattgcatggtagtcaaaccagttagctcacaagcaaatattaagtatcaaatggataaccaaaaaatccarttactgagcagtcccataaagaacactttactctcataataaaatttcaaaagatgcaaatattttaacaccataacttgcatctatatattaattcataggaaaattctttatttctatcccaaatgctgtaaatgtttgtttcatccaaatgtacacgattttttacattttaggtttttctaattattcatactcaaatgtaaaaagt

SEQ ID NO: 308728 - DNA, 530 bp, Homo sapiens
tggaaaacacaatcatgtatctcattatgtcactgaaaactaaaaacatcagaaataatactgttagccaggaaagagggtcatagaaaggacctyattattgcattaaattttatgtaaaagatacttattataataagatatttatattattataagtattacattataataaaggtatcttattaataagttttagtactttcactagtatctgtattatatttagtttccaaagacacgtatttaactgaacatactattaattttatatcactgctacctttggactgattcaaccccaagtaagcaaaacaaagacatcaccatagtcatcttttgaagcccaggcatgtttacagtgtgaaagaaatacaggatccaaaatatcacaggatgtgcccaagccacggtctccatgtagcataagccacgttcactgggtactctgaagaagccacaaagttgtggacagaagcatatatttcaattctatgaaataaattctaaagaatttctgtgctatttct

SEQ ID NO: 308729 - DNA, 585 bp, Homo sapiens
gcctgtaatcccagctactccagaggctgaggcaagagaataatttgaacccaggaggtagaggttgcagtgagccaagatcacaccattgcactccagcctggtcaacaagagcaaaactccatctcaaaaaaaaaaaaaaagagtttacattacagtgagaaggatagacaaaaacaaaaaacaaaaacaaatttaaaagttttttaattttccaagttttatgaaggaaacaagcaagggcatattggggcaccaaggtggagtttaattgtaggagtaagatgaacaaataattctctaaaacattaatattaatgtaggactttaaggttgagacagaattagctactagaaaagagaggaggaaaattattccaggtaggaggaccaatatatgcaaataccttaaggcagactagagagtggcttcctccaggaatgaagagaagtccagcatgagtggacacggtcctctagggaggaaataatagyaagaaatgactggaaagaaaataaggatcacaaataaattcagatattgtagatcaccaatattattttgaaatcttttcattgttagca

SEQ ID NO: 308730 - DNA, 578 bp, Homo sapiens
atgctgggtgcttcaaaataaaagagaagtttgcagtgattgtcattttatagccaagatgagacttaaagacttcctcaaagtagatactcaataagcatacttyatttttattactgcactcacattaggttttataatactgtgatatttacaatgtatatttccaaaaataattttatgtgttttatttcatatacttctgagaatttctctgaaatatagaggcagatattattaggttggtgcaaaggtaattgtggtttctgcttttaaaggtaatggcaaatattacatttacttttgcaccaacctaatacatattcttcttagattttcttagtcccttattcatcctcctttagtatagagccaaatcatagccatagacatatccttatcacttaatcacatgatcagttagattgtaatgaaaaactcaagtaaataaatgtaattgagtacactaactcatagaaagaaatgttttgattaaggtcacactattttttaagaactaaaaaagccagacgttgattccagaagtacagacaccagctttctctctcctttagaat

SEQ ID NO: 308731 - DNA, 578 bp, Homo sapiens
atgctgggtgcttcaaaataaaagagaagtttgcagtgattgtcattttatagccaagatgagacttaaagacttcctcaaagtagatactcaataagcatactttatttttattactgcactcacattaggttttataatactgtgatatttacaatgtatatttccaaaaataattttatgtgttttatttcatatacttctgagaatttctctgaaatatagaggcagatattattaggttggtgcaaaggtaattgtggtttctgcttttaaaggtaatggcaaatattacatttacttttgcaccaacctaatacatattcttcttagattttcttagtcccttattcatcctcctttagtatagagccaaatcatagccatagacatatccttatcacttaatcacatgatcagttagattgtaatgaaaaactcaagtaaataaatgtaattgagtacactaactcatagaaagaaatgttttgattaaggtcacactattttttaagaactraaaaagccagacgttgattccagaagtacagacaccagctttctctctcctttagaat

SEQ ID NO: 308732 - DNA, 548 bp, Homo sapiens
tcctgccccgcagtcctagatccacgggactaaatttgagttttccttaaattaatatctcatcttacttctgattaaaaacctgtagatatatacatagataaatacatagatatgtatatatagatatctatctatatacagtttacctattgctactctgttaaccatcacttttttatttcctgcatcgtggtgctttggtacctagagccttgctgactctggacggtctgcccttcccaggggcaattcctagagatagcaaatagttcatgctcaagcaggcctttcaaatgcaaatcagaacccacacccccaactaagtcctctgtcaggcccccccattcagggtcactattcctgttccctaatcactccagagccaggtactagacaacttggtatagccyttctgccccagaagcagctgaaattattcaaactaggcaatcctaaacctagttatcctgcctgccatacccacttctccccacagacccacaataagggatcttgtccatgttttccccactccctgactgacc

SEQ ID NO: 308733 - DNA, 597 bp, Homo sapiens
tcagagtgatcttataaaatacagaacacattatttctcagcttacatatccccattactttctgatggtcttcaggataaaatctgaaactcctaagcataggatatccatctcctctgggacatctctccatattctctgagatgccttccttgattcatcatgactggtttaattccccttcctrtatggtcccatgacaccatatcttgaccctttgtctcttaccacttaatattaaaattgcctggtttttcatttatttgtcttcctatctagtttgttggatctttatgtatattaaccacagctatcatggaaacctgtcaccatgtagtggtttcataaacatctatgaaataaatgaatgatgagttaatacatttaagatgtttgttaaaacagttattatggagcagtggagttatttggttttccttcaatattgtgataaatgaatttaattgcactgctctttgcataggaattgatattctagttcttactggtgacatgtccaaggttagtgaattaatattgatcctgaatttatattataggttgtcccaaaccaatcctttatcaagtgtgaagca

SEQ ID NO: 308734 - DNA, 598 bp, Homo sapiens
ataaattaaagcgatatgaaagaaaacagcaataactagttgtttatggacaaaaatactaaaactataagaataagctctggctgagtgtagytaatatggagtaattttctcaggtgactgttagagaaatgaccgatcatcaatgtgaaaataatagctttgaaatggacaaagaaaaggctgatacatagattactacatgtgaaaagattaatatttaacatgtgagatatatttacagcaatcagacatcacttgacaaaaaatacaaaaatactgatgggaaaaggaaacagtaaaatgactgccttattttctgctagccaattatcttggtgcagaaaaagtgatttttgcctggtggttcttgaatagggaaatataaacacattactcaagccagaacaatagcgggatgagggagtgggatgggggatgttggaggctataagagtggaggaatttgcaccatatgctctaatttggatttggacagctttttggatgtctttggtaataaacaggatttctgctttttggcttcttgatgtgggggtttacattcgaagaaaaaaaggcttgtagtttaaggaaa

SEQ ID NO: 308735 - DNA, 460 bp, Homo sapiens
ccttaaatgtcaaaagtttatattgattctatggtggtgaaataaatttgttatttaacaaaatggtttcagtgccttcttatgaagaatgtaagtaaaaatactcatagaggaatgtatgaaatgttagtaatctctcttctaatatcrtctatcttgagagtcttctagacaatattcccatgatatttggtaagatttcattttaatgcttaagttgtcttcattacaatttccaaaatcacagtgtttttccatggtattccggaattttgatttttttacagggaaaactgttaatgttctttatataatatagtcaaagtttatatttgctctagtcccagtaagttattgcttcaactaagcaatagagttaaaagtatagtggtgtaaaaaaaatgtatgaacttcaaagatacagacaaaagcaaagtttagatattccttgtatccattc

SEQ ID NO: 308736 - DNA, 460 bp, Homo sapiens
ccttaaatgtcaaaagtttatattgattctatggtggtgaaataaatttgttatttaacaaaatggtttcagtgccttcttatgaagaatgtaagtaaaaatactcatagaggaatgtatgaaatgttagtaatctctcttctaatatcgtctatcttgagagtcttctagacaatattcccatgatatttggtaagatttcattttaatgcttaagttgtcttcattacaatttccaaaatcacagtgtttttccatggtattccggaattttgattttwttacagggaaaactgttaatgttctttatataatatagtcaaagtttatatttgctctagtcccagtaagttattgcttcaactaagcaatagagttaaaagtatagtggtgtaaaaaaaatgtatgaacttcaaagatacagacaaaagcaaagtttagatattccttgtatccattc

SEQ ID NO: 308737 - DNA, 489 bp, Homo sapiens
gggagtcttagcagtcttagaaaaataaagatgttaaacatagctttgtatgcttgcgtgaacatcaaggaaaaacagaatacgcactaagctgtaaatgttggtatsatggagttgaaatgtgactggcatgatgacggggaagaatggactagtattttttttatttatacatttttgtattgttttacttgttataataaatgtgtcttagtttgtaataagaatgtaataaagaatggtgagggaaaggagggctattaagtaagaagggatcttttatggggaacgagattcttatagtgtccataattttactcagagctactctgtgaatgccacagggtggctgtcaaataaacttaatatggtccattaatgaagattttgtgagtgtagtatataggttggaaggttcagctgtgatgattcccaaaacagatggtattaaaaatcattttggagtactgctagtttaattaacctact

SEQ ID NO: 308738 - DNA, 489 bp, Homo sapiens
gggagtcttagcagtcttagaaaaataaagatgttaaacatagctttgtatgcttgcgtgaacatcaaggaaaaacagaatacgcactaagctgtaaatgttggtatcatggagttgaaatgtgactggcatgatgacggggaagaatggactagtattttttttatttatacatttttgtattgttttacttgttataataaatgtgtcttagtttgtaataagaatgtaataaagaatggtgagggaaaggagggctattaagtaagaagggatcttttatggggaacgagattcttatagtgtccataattttactcagagctactctgtgaatgccacagggtggctgtcaaataaayttaatatggtccattaatgaagattttgtgagtgtagtatataggttggaaggttcagctgtgatgattcccaaaacagatggtattaaaaatcattttggagtactgctagtttaattaacctact

SEQ ID NO: 308739 - DNA, 567 bp, Homo sapiens
ttttggagtactgctagtttaattaacctactattgtggttacatattatcatctggcactagatgggcaaccctgcaagggggcctaacttcactcctgtgtaaataaacacaataaaacaaataataggacattgatctttaaacaatgttataacaactttaaactagtaaaaaaattgtgtttgcctcttgagaagggtggcaaaatttttacgtaaatgacaatgacatatatatattaatatcaccctttctggaaggcagaattgagtgtcatacaaatgctagagcaaaggctctagtcattctccattctgtcctctttccagcctctggcaactgctaatcttgtgtctgtcttgatggatwtgcccatggcatttcatgtaagtggaatcatataatgcatggtctttgtgtctggcatctttcattcagcatagtatcttcaaagtccatccatgttgcaccaagtatcagaacttcatttctccctttcttttttttttagcattcttagaattgtcttttacatatgtgttttagacaacttgctatgtgcat

SEQ ID NO: 308740 - DNA, 567 bp, Homo sapiens
ttttggagtactgctagtttaattaacctactattgtggttacatattatcatctggcactagatgggcaaccctgcaagggggcctaacttcactcctgtgtaaataaacacaataaaacaaataataggacattgatctttaaacaatgttataacaactttaaactagtaaaaaaattgtgtttgcctcttgagaagggtggcaaaatttttacgtaaatgacaatgacatatatatattaatatcaccctttctggaaggcagaattgagtgtcatacaaatgctagagcaaaggctctagtcattctccattctgtcctctttccagcctctggcaactgctaatcttgtgtctgtcttgatggatttgcccatggcatttcatgtaagtggaatcatataatgcatggtctttgtgtctggcrtctttcattcagcatagtatcttcaaagtccatccatgttgcaccaagtatcagaacttcatttctccctttcttttttttttagcattcttagaattgtcttttacatatgtgttttagacaacttgctatgtgcat

SEQ ID NO: 308741 - DNA, 503 bp, Homo sapiens
agaagaaatggggcagagaggtggagcacagccccttcccttggggcctcagagagtgcacctgttggccacaggtgaaatggtgtctgaccactggctctcggaaggggtgagggtccagagaaaycagaaggcagggaaacgaagagcataaaggggtcttggagggaccacagagaaaggtggcaaaatgggtgcagggggagtcaggctcaccatggcctccctgctctccgggtcctctgggacactcggcatgggctgaggtgcctcctccccctcactgtccagatgttctcctccgtgtcctgtggggggtggccagaggggtcttcagacaacccaacaagggaggtactgtgggcccacctctacctccaccctcactgtgtaaccctgagccagcccctccccagagaggaatgagctgttgttctttatttttacttttaagaatcaagatcttgctattccgcccaggcacactcccactactggtcgat

SEQ ID NO: 308742 - DNA, 503 bp, Homo sapiens
agaagaaatggggcagagaggtggagcacagccccttcccttggggcctcagagagtgcacctgttggccacaggtgaaatggtgtctgaccactggctctcggaaggggtgagggtccagagaaatcagaaggcagggaaacgaagagcataaaggggtcttggagggaccacagagaaaggtggcaaaatgggtgcagggggagtcaggctcaccatggcctccctgctctccrggtcctctgggacactcggcatgggctgaggtgcctcctccccctcactgtccagatgttctcctccgtgtcctgtggggggtggccagaggggtcttcagacaacccaacaagggaggtactgtgggcccacctctacctccaccctcactgtgtaaccctgagccagcccctccccagagaggaatgagctgttgttctttatttttacttttaagaatcaagatcttgctattccgcccaggcacactcccactactggtcgat

SEQ ID NO: 308743 - DNA, 503 bp, Homo sapiens
agaagaaatggggcagagaggtggagcacagccccttcccttggggcctcagagagtgcacctgttggccacaggtgaaatggtgtctgaccactggctctcggaaggggtgagggtccagagaaatcagaaggcagggaaacgaagagcataaaggggtcttggagggaccacagagaaaggtggcaaaatgggtgcagggggagtcaggctcaccatggcctccctgctctccgggtcctctgggacactcggcatgggctgaggtgcctcctccccctcactgtccagatgttctcctccgtgtcctgtggggggtggccagaggggtcttcagacaacccaacaagggaggtactgtgggcccacctctacctccaccctcactgtgtaaycctgagccagcccctccccagagaggaatgagctgttgttctttatttttacttttaagaatcaagatcttgctattccgcccaggcacactcccactactggtcgat

SEQ ID NO: 308744 - DNA, 584 bp, Homo sapiens
tagtttgagattcactgctttaggaccacatactcatgatgaaagacaaaaacgaaaaataaacagagtcagggagattaaatctataaccaaagacaacatgagtatttaatgtcagctactcaagctccagtttcccccttctggtgaaaggcttgttccctggggtcttctctctcaaaggtcagcggcaggaactccttggggactggatgagtaactggcatctttcagtcctggggttgggctgtgcctgtggctctgaaactcagaaactcctcagcctgtgacctcatgggctggatctggccctggctctgccactcagactccgtgacatctcctcaatcccttcccgctgcagcagagtggctactgtgctgctctccagccagcctggggactacygtctcttagggcttcactgtaggatgcaccttttattctctggatagtttttatgactttgtttgttatttacaggccaagttcagtggcccctgtaaacacagtcacaatctgcaaccgtgctcttaattatgatcttattaagaaatagattcccacacaactggcacaaggat

SEQ ID NO: 308745 - DNA, 584 bp, Homo sapiens
tagtttgagattcactgctttaggaccacatactcatgatgaaagacaaaaacgaaaaataaacagagtcagggagattaaatctataaccaaagacaacatgagtatttaatgtcagctactcaagctccagtttcccccttctggtgaaaggcttgttccctggggtcttctctctcaaaggtcagcggcaggaactccttggggactggatgagtaactggcatctttcagtcctggggttgggctgtgcctgtggctctgaaactcagaaactcctcagcctgtgacctcatgggctggatctggccctggctctgccactcagactccgtgacatctcctcaatcccttcccgctgcagcagagtggctactgtgctgctctccagccagcctggggactactgtctcttagggcttcactgtaggaygcaccttttattctctggatagtttttatgactttgtttgttatttacaggccaagttcagtggcccctgtaaacacagtcacaatctgcaaccgtgctcttaattatgatcttattaagaaatagattcccacacaactggcacaaggat

SEQ ID NO: 308746 - DNA, 559 bp, Homo sapiens
tttgttaacagaagaaaaaggctttgagccagctttcaaaatcttttcagtttgtgcctttgaactttatggtgagggtggggaagagcaaaatctactagtcaagcagagaccttgtctgctttccttccacagtctcagaaactgggtagaaattaactgcctttaaagacaagaggcaattgcaattccatgagcaccagccttacatccccatcatttgtgtgctgagaaaggtgacagcagccttcaggttcaatggaatcaytttgtttcctggtggaagtattcctccctttggaactaagacccctagcccagcagagtataaagtcatgggaacaggaagcaaacattccgctagtggtcaccaggggtaatggtgagttgtgtcactcccatatctaccccttgattcttggacctatgcatttggccatgggagaaacagaaccatatattagacactgatttaaagcatattcagccttttggagaactttgtcccagccatgcaaggtattgccatctagctgactctgtgactgagtcttcaaag

SEQ ID NO: 308747 - DNA, 548 bp, Homo sapiens
aaggtgacagcagccttcaggttcaatggaatcactttgtttcctggtggaagtattcctccctttggaactaagacccctagcccagcagagtataaagtcatgggaacaggaagcaaacattccgctagtggtcamcaggggtaatggtgagttgtgtcactcccatatctaccccttgattcttggacctatgcatttggccatgggagaaacagaaccatatattagacactgatttaaagcatattcagccttttggagaactttgtcccagccatgcaaggtattgccatctagctgactctgtgactgagtcttcaaagagccattccactatcttaccaagcctgcttttgtagcatggtggggaacatagaaaggccaatgaattccatgagcatgagcccgttgctgcactttgtttgttgtgaagtgagttccttgatcagcaacaatgctgtgtggaataacataacagtgactaatgcattctgtaagtccacagattgtagtcttagtagaagcattgcatgcaaggaaggaaa

SEQ ID NO: 308748 - DNA, 530 bp, Homo sapiens
cactgtcattctctaaggtccatctgtcttctgcacagtccaaatagcacaattgaatgtggatatggtagcaactgccacgcctgcatctttcaaagtccttgagagtagcactaayctctgtaatctctccaagaatgcagtatggcttttggtttacattgtttaggtacaggcagttcctatgataatggccctcactccacaggtcagagaaccaatgtggggattctgatagttgctgaatatgtccattccaattatgcactctggaactgggaaataaccacaggatgggttcagagattacctgaatctactataagatgagctaaaactccactgatcacctgatctgcataacccctactctgactgttgagtcacagtggtgttcagtgccaccaggaattagtgtcaattcagagccagtgtccagcagtcaccaaaatgtctgattatttacttttccctaatgcttagtcatcttgttaaaaggccataagctcctctggggaaggctgagaaag

SEQ ID NO: 308749 - DNA, 530 bp, Homo sapiens
cactgtcattctctaaggtccatctgtcttctgcacagtccaaatagcacaattgaatgtggatatggtagcaactgccacgcctgcatctttcaaagtccttgagagtagcactaacctctgtaatctctccaagaatgcagtatggcttttggtttacattgtttaggtacaggcagttcctatgataayggccctcactccacaggtcagagaaccaatgtggggattctgatagttgctgaatatgtccattccaattatgcactctggaactgggaaataaccacaggatgggttcagagattacctgaatctactataagatgagctaaaactccactgatcacctgatctgcataacccctactctgactgttgagtcacagtggtgttcagtgccaccaggaattagtgtcaattcagagccagtgtccagcagtcaccaaaatgtctgattatttacttttccctaatgcttagtcatcttgttaaaaggccataagctcctctggggaaggctgagaaag

SEQ ID NO: 308750 - DNA, 564 bp, Homo sapiens
caatgccataggtctccacgagtgagactattctagtggctgctgtgacattgctgtccactgtgtcagctaggcccacctggattttggtggctgaatgcyggtacttggctcctgccaacctgggatccagttactcccattacatttagttttcccaattcagtgactctagtttccactaaaaatcttgcctatagagaacaaacacatcaaggatgctgaggctctcctcaaaaatttatttctcaccattttggtgaaaggtatgtcttttgaagcctcccagggcatataagtaggtcttaaatggaaaatccactctaacatcccaatgtctttaagcctttaatcccttcttcggcattaaaccaaggcacacctggcatttatattttaactcccttgctgtgggccaccttttgatccctttttgggtccaccaaccaaactgttagagtcctttctgactccccaagctacaatattaaatgcagagtctctgcttagtgggcccatatcaataaacttaccctgatctaactttctctcattagcccacac

SEQ ID NO: 308751 - DNA, 582 bp, Homo sapiens
gctggtacttggctcctgccaacctgggatccagttactcccattacatttagttttcccaattcagtgactctagtttccactaaaaatcttgcctatagagaacaaacacatcaaggatgctgaggctctcctcaaaaatttatttctcaccattttggtgaaaggtatgtcttttgaagcctcccagggcatataagtaggtcttaaatggaaaatccactctaacatcccaatgtctttaagcctttaatcccttcttcggcattaaaccaaggcacacctggcatttatatttkaactcccttgctgtgggccaccttttgatccctttttgggtccaccaaccaaactgttagagtcctttctgactccccaagctacaatattaaatgcagagtctctgcttagtgggcccatatcaataaacttaccctgatctaactttctctcattagcccacacacttactattcatttctgcacatatagcctggatttttgtctgtataaataagaaaacacaactaattcccttggagtgtgtcacgcctcttcatgggtcacactttctacctcgcc

SEQ ID NO: 308752 - DNA, 556 bp, Homo sapiens
gagaattcaaattatcaaaatatgtagaatgcaatgaaaataatacttagagaaaaatttatagcattaaatgcatatattacaaaggaagaagatttaaaatcaataatctaagcttccacatttgggaattatgaatagaaaaataaatttaagcctaaagcaaacaaataagcaaaattagagcagaagtcgatgaacataaaaaatggaaaataagagaaaataaaatcagaagctagttctttaaagagatcaatataattgataaacttctagtcagactgagaaaaatacagagaagaccaaaattattaatatcagaaatttaagatatgtcatcagcaggaatcccttcaatgtgaaaagatagtaaaataatatgatgaataactccgtgaccccgaatttgataacttatatgaaatgggccaattacttgcaaaatgcaaactaccaaactcatcaaagaygaaatagataatcattacaggtcaatatgtataaaaaataaatcaggagttaataaccttccaagaatgtcagcagaaggatc

SEQ ID NO: 308753 - DNA, 435 bp, Homo sapiens
gtttggaacttcctagagacttgttgaatggttttgaccaaaatgctgataatgatatgaacaacgaagtccaggtggaggtggtctcacatggagatgaagaacttgttgggaattggagtaaaggtcackgttgctatgctttagcaaagagactggtggtattttgccccttccctagagacctgtggaactttgaacttgagagagatgatttagggtatctggtggaagaaatttctaagcagcaaagcattcaagaggtgacctggctgtttctaaacatgtacagtcatatgcatgaacaaagagattatttgaaactggaacttacatttaaaagggaaacagcacaaaagtttgtaaaatttgcagactgaccatgtgatagaaaagaaaaacccattttctggggagaaattcaagcctgctgca

SEQ ID NO: 308754 - DNA, 474 bp, Homo sapiens
cttgggacatggaaccctgcatcccagccactccagcaccagccatgcctaaaaggggccaaggcgcaactcaggcagtggcttcagaaggtgcaaaccccaagccttggcagcttccatatggtgttgagcctgcatgtgtgccaaagacaagaattgaggtctgagaacatctgcctcgatttcagaggacgtatggaaacacmtggtgtgcaggcagaattctgctgcaggggtggagccctcatggagaatctccactggggcagtgcagaggggaaatgtggggttggagcccttacacaaagtccccactgaggcactgcctagtggagttgtgagaatagggccaccatcctccagatcccagaatgatagctctaccaacagcttgcactgtgcacctataaaaaccaaaggccctcaacaccagcccatgaaagcagccacagaggctgtaccctgcacagctcc

SEQ ID NO: 308755 - DNA, 608 bp, Homo sapiens
aacagcttcaacttgacaaggaacatctgcaaaaaacctacagctaacatcatactacttcgtggtaagaaactggaagctttccccctaagttcagggacaaggcagggagatcttttcccyccactcccatttaacattatactataagtcatagctaatacaataagacaagaaaggaagtaaaaattgtgtaggtacagagggaagaaataaatctgtctttattgattgtgttagtttcttattgctgatgtagcaaattatgacaacagtccatggggtaaaatgatacatccttattctattacatttctggaggctaaaagtccaaaattagtcatatatggtgtcatgacttgaatgtgtaccccaaagttcatgtgttggaaacttattccccaatgcaacaatgctgaggtgggaactttaggaggtgattaggtcatgagggttcttcccttatgaatgaattagtgccattattgtggcagtgggttagttattgtgggagtgggttcctgatgaaatgatgagtttggcttccctcttagctctctcaccatctctcaccttttgccttctgccatgggtgacatagccagaag

SEQ ID NO: 308756 - DNA, 608 bp, Homo sapiens
aacagcttcaacttgacaaggaacatctgcaaaaaacctacagctaacatcatactacttcgtggtaagaaactggaagctttccccctaagttcagggacaaggcagggagatcttttccctccactcccatttaacattatactataagtcatagctaatacaataagacaagaaaggaagtaaaaattgtgtaggtacagagggaagaaataaatctgtctttattgattgtgttagtttcttattgctgatgtagcaaattatgacaacagtccatggggtaaaatgatacatccttattctattacatttctggaggctaaaagtccaaaattagtcatatatggtgtcatgacttgaatgtgtaccccaaagttcatgtgttggaaacttattccccaatgcaacaatgctgaggtgggaactttaggaggtgattaggtcatsagggttcttcccttatgaatgaattagtgccattattgtggcagtgggttagttattgtgggagtgggttcctgatgaaatgatgagtttggcttccctcttagctctctcaccatctctcaccttttgccttctgccatgggtgacatagccagaag

SEQ ID NO: 308757 - DNA, 543 bp, Homo sapiens
agaaatataatttcttttctttataaattactcagtttgtggtattttgttatagcaacccaaaacagactaagacataggactaaaatcaaggtgttattggggttggtcacttgcagagtggagtctgttccttgcttctttctgcttctggtggctgcttgcatcccctgaagtgtggccgcatcactccaatcaccatttctctcatcacattgccttctcctacccataatcaaagctacttctgcatcccttttataaggacacttgcaattatatttcaggcactctggacaatctcagacaatctccccatcttttaaccacatgtgcaatatcccttttgccacgtaacataatattcactggttccaaatattaggacttggttagctttggtaattattattcagtctattgcatacacasatgacatgattatttatgtataaaatcctaagaaatgggcaaaacaaagtcctggggttgatgtgattacaccacgatcacacgataaaaggccactattcaacacacatt

SEQ ID NO: 308758 - DNA, 602 bp, Homo sapiens
aaccaaccaaatgaaaatgaaatgaattctctcaaaaagaattaagtcaagacaggaagaaggctcgcaaagtaatataaaatatatcttatggtttatgtaaaattcttaataaaataccttctttgctccaagctgcactctggctttgcctttgrgtcaggtggcatttctttgcacgatgactggttttattgagtaggcactgcttcagccctacaggaagaacaaaacctctctggaacacagcagcattcctgactcccacttgaggaggcctaacaaaacggcatatgcctcaacagcagcagatcagtgttaaaaagtctggagtcaaggggaaaaagtaaaattggaccatttccaaaatctcacaaaaagcaacaaactgacgttctaagtgcccaacatgagcaaattagaaccttaaataaaggtcactcttaatgcctatcccagcatagatgcagcaccaagtacagtgtcattttactggtttacctttttcattcttgaaagtaggagctatgaaaaaaaaacactaaaatttctctaagagaaccttctactttctgtctaacttacataatcaaaacactcta

SEQ ID NO: 308759 - DNA, 602 bp, Homo sapiens
aaccaaccaaatgaaaatgaaatgaattctctcaaaaagaattaagtcaagacaggaagaaggctcgcaaagtaatataaaatatatcttatggtttatgtaaaattcttaataaaataccttctttgctccaagctgcactctggctttgcctttgggtcaggtggcatttctttgcacgatgactggttttattgagtaggcactgcttcagccctacaggaagaacaaaacctctctggaacacagcagcattcctkactcccacttgaggaggcctaacaaaacggcatatgcctcaacagcagcagatcagtgttaaaaagtctggagtcaaggggaaaaagtaaaattggaccatttccaaaatctcacaaaaagcaacaaactgacgttctaagtgcccaacatgagcaaattagaaccttaaataaaggtcactcttaatgcctatcccagcatagatgcagcaccaagtacagtgtcattttactggtttacctttttcattcttgaaagtaggagctatgaaaaaaaaacactaaaatttctctaagagaaccttctactttctgtctaacttacataatcaaaacactcta

SEQ ID NO: 308760 - DNA, 602 bp, Homo sapiens
aaccaaccaaatgaaaatgaaatgaattctctcaaaaagaattaagtcaagacaggaagaaggctcgcaaagtaatataaaatatatcttatggtttatgtaaaattcttaataaaataccttctttgctccaagctgcactctggctttgcctttgggtcaggtggcatttctttgcacgatgactggttttattgagtaggcactgcttcagccctacaggaagaacaaaacctctctggaacacagcagcattcctgactcccacttgaggaggcctaacaaaacggcatatgcctcaacagcagcagatcagtgttaaaaagtctggagtcaaggggaaaaagtaaaattggaccatttccaaaatctcacaaaaagcaacaaactgacgttctaagtgcccaacatgagcaaattagaaccttaaataaaggtcactcttaatgcctatcccagcatagatkcagcaccaagtacagtgtcattttactggtttacctttttcattcttgaaagtaggagctatgaaaaaaaaacactaaaatttctctaagagaaccttctactttctgtctaacttacataatcaaaacactcta

SEQ ID NO: 308761 - DNA, 592 bp, Homo sapiens
aatacaaatataaatcaatatgttattggaaatgcaggctgggaggggagggaaaatatgcatagagaaaagccccatctctgcttggagttcagcactgggtctctttttcctttccaccttccttgtcaaggctgccacagtgacaagcacacaggggtgcctttagtgacacctgctgcgacagacctggcagaacggattgcagatttgcatgtttcctggctgcctctgctagcctgagtcagcagcccactccaattcatgctgagcttagacagctcaggtttgcaaaattatcccttcccttggagcaaccgctttccagtctcytcatcattcctaaaggagaatgacatacatgccagcatgacagaggtccagaaatttatagaagcttcattgtgagcctatatccttaacaggggttcaaactaccaacaccgaatgaagagagaggttttgcagtaaagcaggaagtcattaaaataatgaatcacccagctaggttttgagctcctttcccaccaatttaatggaaagttttattgtctttacaatgtacactttcataaattttgcataaatttat

SEQ ID NO: 308762 - DNA, 592 bp, Homo sapiens
aatacaaatataaatcaatatgttattggaaatgcaggctgggaggggagggaaaatatgcatagagaaaagccccatctctgcttggagttcagcactgggtctctttttcctttccaccttccttgtcaaggctgccacagtgacaagcacacaggggtgcctttagtgacacctgctgcgacagacctggcagaacggattgcagatttgcatgtttcctggctgcctctgctagcctgagtcagcagcccactccaattcatgctgagcttagacagctcaggtttgcaaaattatcccttcccttggagcaaccgctttccagtctcttcatcattcctaaaggagaatgacayacatgccagcatgacagaggtccagaaatttatagaagcttcattgtgagcctatatccttaacaggggttcaaactaccaacaccgaatgaagagagaggttttgcagtaaagcaggaagtcattaaaataatgaatcacccagctaggttttgagctcctttcccaccaatttaatggaaagttttattgtctttacaatgtacactttcataaattttgcataaatttat

SEQ ID NO: 308763 - DNA, 530 bp, Homo sapiens
ctaggttttgagctcctttcccaccaatttaatggaaagttttattgtctttacaatgtacactttcataaattttgcataaatttattattcacatcttaacataggtaactccttagtgtttgatcactgagcaaattatatrcagcaaaacaatcctatattttggtgaactcatagcttagaaaatactaaagactcattgtaaactgagggcagcattaagcaaattatatttacctttgtgactgcaaaacttaatgattcaatgcttttcccatgaaatttatcttccaatactgatagttttttaaacaaaaaatatgaattaaatatcaattaaaattttatcattgttttcagaaactgtgacttcactagttatgaacagacttgaaatgtatagtttttaagtttggaaattctttgtagtctcatttacttttccaggaaggaagtgagatattttttgccactgttgcctggtttttgtttgttttttgatcataaacaaaacttaatggagcctc

SEQ ID NO: 308764 - DNA, 548 bp, Homo sapiens
tgttttgaatttaattctttgtgcttcccacgtgaatgcaacttacagtttgaatgtcttctttcttcactagccgatgcatctgtgccagtaacacatggtgattctgtcctttcaccttcagttatgcctgtaaaaccaaattcaagacagatgatcctcaactcacaaaggagttatagctcatcatcagttgaaaatataagccgaaaatgcatttaaggccgggtgcagtggctcagcctgtaatcccaactctttgggaggctgaggcrggtggatcacctgaggtcgggagttagagaccagcctggccaacatggggaaaccctgtctctactaaaaatacaaaaattagccaggcatgttggtgcgcacctgtaatcccagctactgggaaggctgaggcaagaaaatcgcttgaacccaagaggcagaggtcgcagtgagccgagatcatgccattgcactccagcctgggtgacaagaacaaaacacactgtctcaacacataaaattaaattaaattaaattaaaatgcatttaat

SEQ ID NO: 308765 - DNA, 548 bp, Homo sapiens
tgttttgaatttaattctttgtgcttcccacgtgaatgcaacttacagtttgaatgtcttctttcttcactagccgatgcatctgtgccagtaacacatggtgattctgtcctttcaccttcagttatgcctgtaaaaccaaattcaagacagatgatcctcaactcacaaaggagttatagctcatcatcagttgaaaatataagccgaaaatgcatttaaggccgggtgcagtggctcagcctgtaatcccaactctttgggaggctgaggcgggtggatcacctgaggtcgggagttagagaccagcctggccaacatggggaaaccctgtctctactaaaaatacaaaaattagccaggcatgttggtgcgcacctgtaatcccagctactgggaaggctgaggcaagaaaatcgcttgaacccaagaggcagaggtcgcagtgagccgagatcatgccattgcactccagcctgggtgacaagaacaaaacacactgtctcaamacataaaattaaattaaattaaattaaaatgcatttaat

SEQ ID NO: 308766 - DNA, 585 bp, Homo sapiens
catacttgttattttctttttgatcatagtatgaaatggtatctcctggtggttttgattygcatttctcaaatgaccaataatgttgagtatcttttcatgtgcttcttgcctattgtgtatcttttttggagaattttctactcaaatcatttctccattttaaaaataggttatatgtttttttattattgagttgtaagatacatattctgaatacaagtcttttagaagatgtatgatttgcaaaattgttctcccattctgtaggttgtcttttcccttccttggctttttcttttaaagaaaaaatttagttttaattaagcataatatagcccccttttttttcttttgttgcttgtaatttggtgctatatctaagaaactattgtttaatctaaggtcatgaagattttgcttatgttttcttctatgagttttttacttctaggtcttacatttaggttttgatcaactttgtgtgtaaggtaaggtcagaatccaacttcgtttgtttgcatgcatatgtacagttgtcccaacactatttgttgacaagactactatttcccctttgaattt

SEQ ID NO: 308767 - DNA, 585 bp, Homo sapiens
catacttgttattttctttttgatcatagtatgaaatggtatctcctggtggttttgatttgcatttctcaaatgaccaataatgttgagtatcttttcatgtgcttcttgcctattgtgtatcttttttggagaattttctactcaaatcatttctccattttaaaaataggttatatgtttttttattattgagttgtaagatacatattctgaatacaagtcttttagaagatgtatgatttgcaaaattgttctcccattctgtaggttgtcttttcmcttccttggctttttcttttaaagaaaaaatttagttttaattaagcataatatagcccccttttttttcttttgttgcttgtaatttggtgctatatctaagaaactattgtttaatctaaggtcatgaagattttgcttatgttttcttctatgagttttttacttctaggtcttacatttaggttttgatcaactttgtgtgtaaggtaaggtcagaatccaacttcgtttgtttgcatgcatatgtacagttgtcccaacactatttgttgacaagactactatttcccctttgaattt

SEQ ID NO: 308768 - DNA, 585 bp, Homo sapiens
catacttgttattttctttttgatcatagtatgaaatggtatctcctggtggttttgatttgcatttctcaaatgaccaataatgttgagtatcttttcatgtgcttcttgcctattgtgtatcttttttggagaattttctactcaaatcatttctccattttaaaaataggttatatgtttttttattattgagttgtaagatacatattctgaatacaagtcttttagaagatgtatgatttgcaaaattgttctcccattctgtaggttgtcttttcccttccttggctttttcttttraagaaaaaatttagttttaattaagcataatatagcccccttttttttcttttgttgcttgtaatttggtgctatatctaagaaactattgtttaatctaaggtcatgaagattttgcttatgttttcttctatgagttttttacttctaggtcttacatttaggttttgatcaactttgtgtgtaaggtaaggtcagaatccaacttcgtttgtttgcatgcatatgtacagttgtcccaacactatttgttgacaagactactatttcccctttgaattt

SEQ ID NO: 308769 - DNA, 585 bp, Homo sapiens
catacttgttattttctttttgatcatagtatgaaatggtatctcctggtggttttgatttgcatttctcaaatgaccaataatgttgagtatcttttcatgtgcttcttgcctattgtgtatcttttttggagaattttctactcaaatcatttctccattttaaaaataggttatatgtttttttattattgagttgtaagatacatattctgaatacaagtcttttagaagatgtatgatttgcaaaattgttctcccattctgtaggttgtcttttcccttccttggctttttcttttaaagaaaaaatttagttttaattaagcataatatagcccccttttttttcttttgttgcttgtaatttggtgctatatctaagaaacyattgtttaatctaaggtcatgaagattttgcttatgttttcttctatgagttttttacttctaggtcttacatttaggttttgatcaactttgtgtgtaaggtaaggtcagaatccaacttcgtttgtttgcatgcatatgtacagttgtcccaacactatttgttgacaagactactatttcccctttgaattt

SEQ ID NO: 308770 - DNA, 593 bp, Homo sapiens
ggtctcttagttttgtctgttacttaaattatcaactccacctaactacaggaaacacagaaatggtgtgttgcagtccggacactgtgagcagcatgaaattctatctcggtgtctaggaaatggggtagggaagggccagtccagggcacaggtaagaatagacttttgcctctgagctctcccacctttctctttctccttatgagttgctctttaccctaggatttccagacactcatgctattctttagtcctaaaaattcctcctcaaagtcttgcttttctcaaaatgccttatgccccatagttaccatgtgagcttcctcccacgtccttggtcccrcttccctcctgtgggcagcttagtcagtgtgcccttccctccacacgcccagagggctggctcctgcaggcagcacctttgcaatggcctccaaaacagacttgagacaagcgcataaaagggaggaggaagcagcgctcctgtaggtctcctggctcttgctccagcaggatggcacaggaagacacatgaggtcttttttcttaactcagatgttcagatcagaactcttgtctggagccaatga

SEQ ID NO: 308771 - DNA, 565 bp, Homo sapiens
aagtcccctgatgtcacatacagatgctgggagaatgtcaagtttctatagaaatttctaaacatttaccctgaatttctatgtttctrtcattacatagagatgacagagtgttgacagactttgagtggtctttagtaaccaattgttgaaagtctggtttagctaaactagtttgtaagtaccttggcaggtgcctttgctgtaggaattctcagagtctctataaactaatgagcattggaaatctgcaggggggaaacagagtatgcagtatcccccatgatgattcaaccccagattttatttttcactgagcatctcacacttagtagtgtatcttttctatgcattgggcactgggagacgacgtgtagtcatctcaacagagacctggccttcagacgccaccactcactgccgctctgtccaggcgagcatcaacttgcactgtttcagaagcaaaaggaaaatgaaccgcagccactgaagtccctcagaactgaggaaaagttattgactttcctgatttgtgttcaatctgactggccatgggtacagacac

SEQ ID NO: 308772 - DNA, 565 bp, Homo sapiens
aagtcccctgatgtcacatacagatgctgggagaatgtcaagtttctatagaaatttctaaacatttaccctgaatttctatgtttctgtcattacatagagatgacagagtgttgacagactttgagtggtctttagtaaccaattgttgaaagtctggtttagctaaactagtttgtaagtacctyggcaggtgcctttgctgtaggaattctcagagtctctataaactaatgagcattggaaatctgcaggggggaaacagagtatgcagtatcccccatgatgattcaaccccagattttatttttcactgagcatctcacacttagtagtgtatcttttctatgcattgggcactgggagacgacgtgtagtcatctcaacagagacctggccttcagacgccaccactcactgccgctctgtccaggcgagcatcaacttgcactgtttcagaagcaaaaggaaaatgaaccgcagccactgaagtccctcagaactgaggaaaagttattgactttcctgatttgtgttcaatctgactggccatgggtacagacac

SEQ ID NO: 308773 - DNA, 565 bp, Homo sapiens
aagtcccctgatgtcacatacagatgctgggagaatgtcaagtttctatagaaatttctaaacatttaccctgaatttctatgtttctgtcattacatagagatgacagagtgttgacagactttgagtggtctttagtaaccaattgttgaaagtctggtttagctaaactagtttgtaagtaccttggcaggtgcctttgctgtaggaattctcagagtctctataaactaatgagcattggaaatctgcaggggggaaacagagtatgcagtatcccccatgatgattcaaccccagattttatttttcactgagcatctcacacttagtagtgtatcttttctatgcattgggcactgggagacgacgtgtwgtcatctcaacagagacctggccttcagacgccaccactcactgccgctctgtccaggcgagcatcaacttgcactgtttcagaagcaaaaggaaaatgaaccgcagccactgaagtccctcagaactgaggaaaagttattgactttcctgatttgtgttcaatctgactggccatgggtacagacac

SEQ ID NO: 308774 - DNA, 565 bp, Homo sapiens
aagtcccctgatgtcacatacagatgctgggagaatgtcaagtttctatagaaatttctaaacatttaccctgaatttctatgtttctgtcattacatagagatgacagagtgttgacagactttgagtggtctttagtaaccaattgttgaaagtctggtttagctaaactagtttgtaagtaccttggcaggtgcctttgctgtaggaattctcagagtctctataaactaatgagcattggaaatctgcaggggggaaacagagtatgcagtatcccccatgatgattcaaccccagattttatttttcactgagcatctcacacttagtagtgtatcttttctatgcattgggcactgggagacgacgtgtagtcatctcaacagagacctggccttcagacgccaccactcactgccgctctgtccaggcgagcatcaacttgcactgtttcagaagcaaaaggaaaatgaaccgcagccactgaagtccctcagaactgaggaaaagttaytgactttcctgatttgtgttcaatctgactggccatgggtacagacac

SEQ ID NO: 308775 - DNA, 564 bp, Homo sapiens
catatctctctttctttaaatccttctggttaaaatttgtcattgcctcctgactatgtatttattttttcttttctggaagaaagctcacctaggccttactcaaatgcatgttctcaatctttacctaccacccctcctgcctttttgttccagtttcctcttatcattgtactgatgtggagataacgaaagagaatatcactgtcagccaccagcagtgccttttcagagaagagcaatggggaagaaattgagcagacaaagccagaatccccattagcaaacagaaagagggagctcaggataaccacatacgttaataattcttgccccccaaagggaagctctgtaaaataagttgtattacatccgtacatagcagtactttaaatataactctagcttaagtattttaagcatctccatgatatgaacctaagggaataaactcaataaatcaatatttataagctctgttcacttatttcttgtggtttcagccactgatttcagaatatgcatgaaaaatayatttcttctgaatatttgatttcatgatcc

SEQ ID NO: 308776 - DNA, 543 bp, Homo sapiens
tattattactttgtaacatataatgaaatagttatacgactgaccataatgtagaatccctgggagccctgagcttgttttcctgcaactagatgttcccacctgggggcaatgggagacagtgacagatcatcggtcattagattctcataaggagcacacarcctagatcccttgcatgcttagttcacaatagggttcatgctcctatgagaatctaatgctgctgctgatctgacaggaggaggagctcagggggtaacacgagccatgaggagcagctgtaaatacagatgaagcttcgctcactcagccgccactcacctcctgctgtggagcccagttcctaacagctatggactagtatgggtttggagagccctgaaatagaggatatccagcaagccttttaaaagagtgaattattccattccaacctctggaatataaaagataaatagtctctcaggaattcacactgtgtggccttttgcattaaagcaatcacctaagttatctggagcttcatgtacatgggtcaga

SEQ ID NO: 308777 - DNA, 543 bp, Homo sapiens
tattattactttgtaacatataatgaaatagttatacgactgaccataatgtagaatccctgggagccctgagcttgttttcctgcaactagatgttcccacctgggggcaatgggagacagtgacagatcatcggtcattagattctcataaggagcacacagcctagatcccttgcatgcttagttcacaatagggttcatgctcctatgagaatctartgctgctgctgatctgacaggaggaggagctcagggggtaacacgagccatgaggagcagctgtaaatacagatgaagcttcgctcactcagccgccactcacctcctgctgtggagcccagttcctaacagctatggactagtatgggtttggagagccctgaaatagaggatatccagcaagccttttaaaagagtgaattattccattccaacctctggaatataaaagataaatagtctctcaggaattcacactgtgtggccttttgcattaaagcaatcacctaagttatctggagcttcatgtacatgggtcaga

SEQ ID NO: 308778 - DNA, 565 bp, Homo sapiens
attctaattactctaccaaagctgttcttccataccgttcactcctttcactcaaagtaccccatatttttgaagaatggtatcattcatgatacaatgttctctagtaagcagayttggacatggagatatatactagggagtgcccttggattactacctgtgaaaaggagaagaaggaagctggattgagggaaagggaaaaagctgggctgaaaagaagtcctggaccacagctttggctcatctcacaggggactttgaagataaaatggcccactggcatcctttcacattgcaatgacatgactgagtctttataggccccaagtcccctccccacctctttcacctgcctccttgcctcacctcaatcagtcgttgcatatgcaccacaactgggaacctcaggaccttaggcagggggaagctctgcagctgaggtgacgtctgaaggggctcacagctgagtcctgtctactgacacagctctcagggaggacctaggtgatgcatctctgtgtgtatcatatatatgagtaatgatattagaggttttataatt

SEQ ID NO: 308779 - DNA, 565 bp, Homo sapiens
attctaattactctaccaaagctgttcttccataccgttcactcctttcactcaaagtaccccatatttttgaagaatggtatcattcatgatacaatgttctctagtaagcagatttggacatggagatatatactagggagtgcccttggattactacctgtgaaaaggagaagaaggaagctggattgagggaaagggaaaaagctgggctgaaaagaagtcctggaccacagctttggctcatctcacaggggactttgaagataaaatggcccactggcatcctttcacattgcaatgacatgactgagtctttataggccccaagtcccctccccacctctttcacctgcctccttgcctcacctcaatcagtcrttgcatatgcaccacaactgggaacctcaggaccttaggcagggggaagctctgcagctgaggtgacgtctgaaggggctcacagctgagtcctgtctactgacacagctctcagggaggacctaggtgatgcatctctgtgtgtatcatatatatgagtaatgatattagaggttttataatt

SEQ ID NO: 308780 - DNA, 565 bp, Homo sapiens
attctaattactctaccaaagctgttcttccataccgttcactcctttcactcaaagtaccccatatttttgaagaatggtatcattcatgatacaatgttctctagtaagcagatttggacatggagatatatactagggagtgcccttggattactacctgtgaaaaggagaagaaggaagctggattgagggaaagggaaaaagctgggctgaaaagaagtcctggaccacagctttggctcatctcacaggggactttgaagataaaatggcccactggcatcctttcacattgcaatgacatgactgagtctttataggccccaagtcccctccccacctctttcacctgcctccttgcctcacctcaatcagtcgttgcatatgcaccacaactgggaacctcaggaccttaggcagggggaagctctgcagctgaggtgacgtctgaaggggctcacagctgagtcctgtctactgacacagctctcagggaggacctaggtgatgcatctctgtgtrtatcatatatatgagtaatgatattagaggttttataatt

SEQ ID NO: 308781 - DNA, 494 bp, Homo sapiens
aataaaaagtctcccagcaaagaaaagcctgggacctgatgattcactgctgaattctagcaaacatttaaagaagaactaataccaaccttacccaaacgattccaaaaatagagaaggagggaatacttgcaaactcattctacagggctagcattaccctgataacaaaatcaaacacacagaccaaaaaagaaaactacaggccaatatcactgatgaatattgatgcaaaaatcctcaataaaatattagctaactgaattcyacaacacattaaagttggggtgcagtgtcccaggttcactcaacccttcccgttttcctctctgtgtgtgtctactttgccgtgttccctggtggcggcggcggtggcagtgttggtgcatgggcctcccaggacaaggggaaagtgagtatgcccctttcttgccccctgccaggtgtctgcagcctggcacaagctctggccaggtctccaacaggggacctgg

SEQ ID NO: 308782 - DNA, 494 bp, Homo sapiens
aataaaaagtctcccagcaaagaaaagcctgggacctgatgattcactgctgaattctagcaaacatttaaagaagaactaataccaaccttacccaaacgattccaaaaatagagaaggagggaatacttgcaaactcattctacagggctagcattaccctgataacaaaatcaaacacacagaccaaaaaagaaaactacaggccaatatcactgatgaatattgatgcaaaaatcctcaataaaatattagctaactgaattccacaacacattaaagttggggtgcagtgtcccaggttcactcaacccttcccgttttcctctstgtgtgtgtctactttgccgtgttccctggtggcggcggcggtggcagtgttggtgcatgggcctcccaggacaaggggaaagtgagtatgcccctttcttgccccctgccaggtgtctgcagcctggcacaagctctggccaggtctccaacaggggacctgg

SEQ ID NO: 308783 - DNA, 566 bp, Homo sapiens
tgtttttaatatttcaataggtttttggggaacaggtactgtttggttacatgaataagttctttagtggtgacttctgaggttttggtgcgctcatcactgagcagtgaaatctagaagaaaatctaggcaataccattcaggacataggcatgggcaaagattttatgggtattcattttataaatttgggagctccattgttaggtgcatatatatttaggattgtaatatttttctgttgaactagttattttatcattatatagtgtctctcttcrccttttttaactgctgttgcttaaaaatgtatttcatttgatataagaatagctactcctgctcccttttggtgtctatttgcagggaatatctttttctacccctttaagtttatgtaagtccttatgtatcaggtaagtctcttcaagacagcagacacttgattggtgaattcttatccattctgtcattctgtattttttaggtggagctgcagtattgtagggaagacacaagcttgccctagtgtcaggtggtggctagggccatagaggtcccaagag

SEQ ID NO: 308784 - DNA, 582 bp, Homo sapiens
tgtcaggtggtggctagggccatagaggtcccaagagatgatgtcctttgtctttggctaccagggccagtagagaaagaccatcaggtgggagcagggttaggtgtgtctgaggtcagactctccttgggcaggacttgctgcagctgctgttggggatgggggtgggattcccaggccaatagagttatgttcccaggtrgattatggctgcttctgctgtgtcacacaggtagctaaagaagtggggaaaagccagcagccacatgcctcatccagctcccatgcagcccgtagcccaaaagactggtcttactctcaccatggccccacaacagcaccaagtttacttccaggcagccggtgagcagggctaagagcttgtgccagggtacaaacctcccagctgagaaagaaagccgactcacagttcctcagctgtcccacagaacctgcagcagcaacccaccttcttcaaaagggtctgcagattctctcagctttcttggtatgtacttgtggtagctcttgtagcaaaagttcacgatgtgggtctctacacgctgctctgtctgtccgagt

SEQ ID NO: 308785 - DNA, 582 bp, Homo sapiens
tgtcaggtggtggctagggccatagaggtcccaagagatgatgtcctttgtctttggctaccagggccagtagagaaagaccatcaggtgggagcagggttaggtgtgtctgaggtcagactctccttgggcaggacttgctgcagctgctgttggggatgggggtgggattcccaggccaatagagttatgttcccaggtggattatggctgcttctgctgtgtcacacaggtagctaaagaagtggggaaaagccagcagccacatgcctcatccagctcccatgcagcccrtagcccaaaagactggtcttactctcaccatggccccacaacagcaccaagtttacttccaggcagccggtgagcagggctaagagcttgtgccagggtacaaacctcccagctgagaaagaaagccgactcacagttcctcagctgtcccacagaacctgcagcagcaacccaccttcttcaaaagggtctgcagattctctcagctttcttggtatgtacttgtggtagctcttgtagcaaaagttcacgatgtgggtctctacacgctgctctgtctgtccgagt

SEQ ID NO: 308786 - DNA, 582 bp, Homo sapiens
tgtcaggtggtggctagggccatagaggtcccaagagatgatgtcctttgtctttggctaccagggccagtagagaaagaccatcaggtgggagcagggttaggtgtgtctgaggtcagactctccttgggcaggacttgctgcagctgctgttggggatgggggtgggattcccaggccaatagagttatgttcccaggtggattatggctgcttctgctgtgtcacacaggtagctaaagaagtggggaaaagccagcagccacatgcctcatccagctcccatgcagcccgtagcccaaaagactggtcttactctcaccatggccccacaacagcaccaagtttacttccaggcagccggtgagcagggctaagagcttgtgccagggtacaaacctcccagctgagaaagaaagccgactcacagttcctcagctgtcccacagaacctgcagcagcaacccaccttcttcaaaagggtctgcagattctctcagctttcttggtatgtacttgtggtagctcttgtagcaaaagttcacratgtgggtctctacacgctgctctgtctgtccgagt

SEQ ID NO: 308787 - DNA, 513 bp, Homo sapiens
ccttaattatgttttccaggttacttgctctctctcctctttcaggaatgcccatgagttgtaggcttgatgtctttacataataccatatttcttggaggttttgctcatttttataattcttttttcttcatttttgtctacccatggtgctttaaaggcgcattcttccaactctgagatttttcctcagcttggtctattatgttgctatggcttccagttatatttttaaatttatrtagcaaatttttcacttccagaaatttagtgtttttttccttaaaatggttatgtcatctttgaatgtttggatcatcttactgttttccttggattgggtttcaaccttctcttgtatatcaatgagtttcctcaccatccagattctgaattctatgtctaaaattttagtcatttcaatctgattaagaacaattgccaggaagctaatgtgattgtttggaggtaagaagacactctggcttttagagttgcctgagttcttacact

SEQ ID NO: 308788 - DNA, 559 bp, Homo sapiens
gcaacctctgctagcttcaaacttttcttctgcaacttcctcacctctctcagccttcatagaattgaagagatttagggccttgctttgaattagtcttttacttaaggaaaagttgtacctggttgaatcttctagacagagcacttaaactttctccatatcaacaacagagctgttttgctttcttatcatttctgtgttcactggaatagcacttttaattttcttcaagaacttttcctttgcattcccaacgtagctaactattggcacaagaggcctagctttcagcctatctcaggtttcaacataccttcctcactaagcttagtaatttctagcttttgatttaaagtgagaagtgtgggactcttccttttacttgaacaattaaagatcattgtagggttattaattagccaaatttaaataatgttgtgtctcagggaatagaaatgccaaggcaagagagaaaaagattagataayggctggtcagtaagcagtcagaacacaaacatttataaattgtttgccatcttacatgggtgcagttc

SEQ ID NO: 308789 - DNA, 567 bp, Homo sapiens
tgcacataaggactacaattaaatattatctcctcctagttaaaatggtttttataaaaaagacaggcaatcatgggtgctggtgaagatgtggaagaaagggaaactcttgtacacggttggtgaaaatgtaaatggtaaagccactgtggaatacagtatggaggttcctcaaaaaactaaaaatataaccaccatatgatccaacaattccacttctgggtawatattccaacataatatcaaagagatatctacactctcatgtttacttcagcattattcataatagacaaaatatggaatcaacctaagttcccatcagtgtccctaacgggaaataatatgtagtacatatacacaatagaatattattcagccataaaaactaatgaaacgctgtcagttacagcaatgctgaaggtcattatattaagtgaaaaaagcaaagctcagaaagacaaatattacatcttctcactcatatgtgggagctaaaaaagtagatctcaggaagatagagtatattggtggttactagaggccaggaagggtagaggaggtggt

SEQ ID NO: 308790 - DNA, 567 bp, Homo sapiens
tgcacataaggactacaattaaatattatctcctcctagttaaaatggtttttataaaaaagacaggcaatcatgggtgctggtgaagatgtggaagaaagggaaactcttgtacacggttggtgaaaatgtaaatggtaaagccactgtggaatacagtatggaggttcctcaaaaaactaaaaatataaccaccatatgatccaacaattccacttctgggtaaatattccaacataatatcaaagagatatctacactctcatgtttacttcagcattattcataatagacaaaatatggaatcaacctaagttcccatcagtgtccctaaygggaaataatatgtagtacatatacacaatagaatattattcagccataaaaactaatgaaacgctgtcagttacagcaatgctgaaggtcattatattaagtgaaaaaagcaaagctcagaaagacaaatattacatcttctcactcatatgtgggagctaaaaaagtagatctcaggaagatagagtatattggtggttactagaggccaggaagggtagaggaggtggt

SEQ ID NO: 308791 - DNA, 562 bp, Homo sapiens
aaaatatggaatcaacctaagttcccatcagtgtccctaacgggaaataatatgtagtacatatacacaatagaatattattcagccataaaaactaatgaaacgctgtcagttacagcaatgctgaaggtcattatattaagtgaaaaaagcaaagctcagaaagacaaatattacatcttctcactcatatgtgggagctaaaaaagtagatctcaggaagatagagtatattggtggttactagaggccaggaagggtagaggaggtggtgaagaggggttatttartgggtacaaatatacagtttttatagaagaaataggacccagtgtttcatagatcagtagtatgactatagtttaatataatctactgtatatttaaaaatacctagaagagaattcaaatgtttctagcataaataaaagacaaatattttaaggtgatgcatatcccaattatactaatttgatctttaaaaattacaggagtgcattaaattattacttgtaccccccaaaagtatttcagctatttttaaaagtttattgctacttat

SEQ ID NO: 308792 - DNA, 562 bp, Homo sapiens
aaaatatggaatcaacctaagttcccatcagtgtccctaacgggaaataatatgtagtacatatacacaatagaatattattcagccataaaaactaatgaaacgctgtcagttacagcaatgctgaaggtcattatattaagtgaaaaaagcaaagctcagaaagacaaatattacatcttctcactcatatgtgggagctaaaaaagtagatctcaggaagatagagtatattggtggttactagaggccaggaagggtagaggaggtggtgaagaggggttatttagtgggtacaaatatacagtttttatagaagaaataggacccagtgtttcatagatcagtagtatgactatagtttaatataatctactgtatatttaaaaatacctagaagagaattcaaatgtttctagcataaakaaaagacaaatattttaaggtgatgcatatcccaattatactaatttgatctttaaaaattacaggagtgcattaaattattacttgtaccccccaaaagtatttcagctatttttaaaagtttattgctacttat

SEQ ID NO: 308793 - DNA, 508 bp, Homo sapiens
cttagtatagttttatttgtgattgtactgcttttatttaaaatcttaaaattgaaggtatataattttcatcaaattttgaaaaattttgacaattatgtttttaaatattttgtttcctctattctgatagttgctacactagatagaaagtgatagacacaaagtaatatatataatacgctgtgatatactgcttgttttcagaaataaaaatagtaaaaaagcaataattttgatattgcagtatgattcttgcaaattgctttacctatatttaatataatacttaaagaaattgtaaaaataagtccatttactctattagttcatgatctaattgagggtgattgacacaaaagaaatagcaataatatgttgtgataaattctttaatggaggttttcattgtgcactrtgtagcaaaaacaaaactaaatgtcatttattggggttgctggtcagagaagggtggtgacatttcagctgggtattaaagtatgaaaat

SEQ ID NO: 308794 - DNA, 599 bp, Homo sapiens
aaacaggactcaagcctcccttgaagatgacaatagagaaataaatatatgctaattaagtttcttatytgtgcactttgcaaaatgtcagctcccatctcatcgtagaattatagaattcttaaagttagaaatgttttttcaaataatccaagaataatctcccacttatttcagtaatgtcttctcctaaagcatccctcatagtcataggaagcacatttaccttctgaggaagccacagtttggcactttttatgattaaaaagttcttttttttatggtgagacaaaatctactaccttgcaacttctatcactaatcctgtttctgacctttagacaaagacagaccaaatctacatttattctttgcatgacattttccaggagggtatcttagaaataatgtttctgtctgttttatttaattaccagtgatgtcccatcctagtgccacacactcttttgaatcttttccacatctcctttcccatacaacattgttgcagggtgagtgcggggcataaacaagtgttgggcattgcatgaacagatggatgcgtagagttttaaggtttgagagaggttcagaggaaa

SEQ ID NO: 308795 - DNA, 598 bp, Homo sapiens
tattttcctattggtgatgaatttgcagtgatatatctgcatgcaatcattcaattgaccttgttaccaatgacaagcatatgtcagatggttggcaagggtgggagtttactgtcatttgaatgatgattccatgagcttgttagtatgatcgcctaatcagctatgctaagtgagcacagggtacatcaaagggttaagaagaaaaatgtgaccagttcattaatcacttcttcagagacctgattcaggaaatcgttggaattcaactgagggcatgattctcccaccttgtgttgagaaatgagacagaattcttactctaaaacaaccaaatatatayatttacatatggaagtagttttagattttttgccatgttgtcaaataaactttacaatcatcctaaaatcatcaaatcccagcaggctttgattattgatttgtaatagctaaatacttagtcaatatttaaggtaatggtgatttgatttaaactattatttgggaaaatttgaatcctagagctttataaattaaagggacttgatttaataactcaatagctaagttatcttgaggctcaggaaagttaaat

SEQ ID NO: 308796 - DNA, 556 bp, Homo sapiens
tcattttattcccttgcctaattgctctggctagcacttgcagttgtatgttgaatagaagtggtgagcatgtgcattattgtcttgttcctaaccttacaggaaaagctttcaacattccatcattgagcatgatgttagaggtgggcttgtgatatatggctttcattgttttggctaatttgtggatagtttttattataaaggagggttgaattttgwaaatgctttttctgcacctgttgagatgatcatgtgatttttattctttcttctcttaatgtggtgttttatatttatttatttgtatatgttgaatcacctttacactttacattccagggataaatctcacatgacatagtgtatgatccttttaatgtgctgttgaattcagtttgctagtattttgttgaaaatttttgcctatattttcatcaggaatattggcctgtatttttcttttttatattgtgcttgcctggtggtgttagcatgacaatcccagccttgtaagttttacaaccataaaaatgaaaaattattacattttatt

SEQ ID NO: 308797 - DNA, 593 bp, Homo sapiens
ctactgactcaatgttggttattattggtgtgttcagtgattcaatttcttccttgctcaatcttgggaggttgtgtatttccaggaatttatctccttcttctaggttttctagcttgtgtgcatagaaacttttgtaatagtctctgagagttttttctgtttctatggtaacattccctttgtcatttctgattgtgtttatttgagtcttctctctcttttttattagtctatctagcagtctatatatcttattaattctttcaaaaactcctggatttgttgatcttttgcatytcagtttctttcagtccacctctgattttggttttcttttttttcgtctgctagagtttgggttggttttcttttgtctctctagttactctagttgtaatgttaggttgttaatttgagacctttctaattcttgatgtgggcatttagtgctataaactttcctactaacactgctttaactgtgtcccagagattcttgtatgtcgtatctatgttctcattagtttcaaagaatttcttgatctctgtcttaccttcattatttagccagaagtcatacagaagcaggt

SEQ ID NO: 308798 - DNA, 671 bp, Homo sapiens
cgtgcctgttttctcatggataaaataagcatgtagttaggattaaatgagttagtacaggcaggatgtgcttaaaacagcctataataagggctatataaggtkctggtaaagtaaaaaaagtatatccaggacatacagcaaatacagtttttgattaacatttatcacaaacatggccccataatctgtgatcctttgtcaggcatatatactggtttggttaactaatccatcctgacaaagcattcataaacatgcactggaaaaaatcttttacaaattaaataaaatctaaatagattttcaaggcttttaattttacataagcacaaaaagcagtcaacctaatttttatcacatgatttggacaccaaattggaataacacagaaaattatgaatctaaaaaacaaggtattctattgagaaactttcacagtaaatatttaattattattcatcaaaatacttcatcaaattacagctttatctttattgttctttatagagctaacaaatgatagtttaaggttatagacgaaaatagttaaaagacttctttctagttcctttcttctaccaggtatttgcaaacttataatttctacactaactcaactatcaggatcaaagagaggctatagatagattttagtgtttgatgcttgt

SEQ ID NO: 308799 - DNA, 671 bp, Homo sapiens
cgtgcctgttttctcatggataaaataagcatgtagttaggattaaatgagttagtacaggcaggatgtgcttaaaacagcctataataagggctatataaggtgctggtaaagkaaaaaaagtatatccaggacatacagcaaatacagtttttgattaacatttatcacaaacatggccccataatctgtgatcctttgtcaggcatatatactggtttggttaactaatccatcctgacaaagcattcataaacatgcactggaaaaaatcttttacaaattaaataaaatctaaatagattttcaaggcttttaattttacataagcacaaaaagcagtcaacctaatttttatcacatgatttggacaccaaattggaataacacagaaaattatgaatctaaaaaacaaggtattctattgagaaactttcacagtaaatatttaattattattcatcaaaatacttcatcaaattacagctttatctttattgttctttatagagctaacaaatgatagtttaaggttatagacgaaaatagttaaaagacttctttctagttcctttcttctaccaggtatttgcaaacttataatttctacactaactcaactatcaggatcaaagagaggctatagatagattttagtgtttgatgcttgt

SEQ ID NO: 308800 - DNA, 446 bp, Homo sapiens
ccatgtggtacagaagaattgctttcaaagcagacctgatcacaggtgcaaagatcctgagagggaaatgtgattggcaagttgaagggaaagcgaagaggctggtttggagcagagtaaacaagagagaaggtagggcaggtagagtagagtgcagagagatgcagattaatactgagaacaggctttttcaattttttataatgatctgatccaaatataccttgtagctatatatgagtgtcttagagatagatactgaaatagagatatttcaaagtttcataaaacaatactatatccagtgtactctgctattctcaattctactttttaaaaattctggtcataatctattaattttattttacaacctactaataggtcacaatccacartatagaaaatactgaggcagggccatggagaccagttgaaaaaaacac

SEQ ID NO: 308801 - DNA, 446 bp, Homo sapiens
ccatgtggtacagaagaattgctttcaaagcagacctgatcacaggtgcaaagatcctgagagggaaatgtgattggcaagttgaagggaaagcgaagaggctggtttggagcagagtaaacaagagagaaggtagggcaggtagagtagagtgcagagagatgcagattaatactgagaacaggctttttcaattttttataatgatctgatccaaatataccttgtagctatatatgagtgtcttagagatagatactgaaatagagatatttcaaagtttcataaaacaatactatatccagtgtactctgctattctcaattctactttttaaaaattctggtcataatctattaattttattttacaacctactaataggtcacaatccacaayatagaaaatactgaggcagggccatggagaccagttgaaaaaaacac

SEQ ID NO: 308802 - DNA, 491 bp, Homo sapiens
tagcactgtaaagtaggacgacaattgccaagtgagaccttaaagaaagtgtgagctcctcaggagagaacggtagccctgctacacatatttggcaccaaccattcatayaagaacttttaaatcatcttgagcccaaattaattcaattattaatgtccttctgtatgttttgttttgcttctctcttgctcgccttagtcccaagtttggaacattgtgccgttaagttaaaaatgcaaataccacatgaaagagtctatgtgtctatttcatattcatttttaaaatttggtaattagatgtctttgggtatttataaagaaatgcagacatctagacaaatgtccacctcagcatttatggctcttattgaaaaagaattgctctcatgctctccttcatttgttgtttttttgtccagcgcttaatacacacacgtatgcatacaagggtgctaaccttgatggtctgctccttaacctaaacta

SEQ ID NO: 308803 - DNA, 491 bp, Homo sapiens
tagcactgtaaagtaggacgacaattgccaagtgagaccttaaagaaagtgtgagctcctcaggagagaacggtagccctgctacacatatttggcaccaaccattcatataagaacttttaaatcatcttgagcccaaattaattcaattattaatgtccttctgtatgttttgttttgcttctctcttgctcrccttagtcccaagtttggaacattgtgccgttaagttaaaaatgcaaataccacatgaaagagtctatgtgtctatttcatattcatttttaaaatttggtaattagatgtctttgggtatttataaagaaatgcagacatctagacaaatgtccacctcagcatttatggctcttattgaaaaagaattgctctcatgctctccttcatttgttgtttttttgtccagcgcttaatacacacacgtatgcatacaagggtgctaaccttgatggtctgctccttaacctaaacta

SEQ ID NO: 308804 - DNA, 491 bp, Homo sapiens
tagcactgtaaagtaggacgacaattgccaagtgagaccttaaagaaagtgtgagctcctcaggagagaacggtagccctgctacacatatttggcaccaaccattcatataagaacttttaaatcatcttgagcccaaattaattcaattattaatgtccttctgtatgttttgttttgcttctctcttgctcgccttagtcccaagtttggaacattgtgccgttaagttaaaaatgcaaataccacatgaaagagtctatgtgtctatttcatattcatttttaaaatttggtaattagatgtctttgggtatttataaagaaatgcagacatctaracaaatgtccacctcagcatttatggctcttattgaaaaagaattgctctcatgctctccttcatttgttgtttttttgtccagcgcttaatacacacacgtatgcatacaagggtgctaaccttgatggtctgctccttaacctaaacta

SEQ ID NO: 308805 - DNA, 523 bp, Homo sapiens
ctgttctccaaaggtgaacaagtcgtttatagcaaacgtggcagactgtattttcagaaatggccatagcagtatttctgaccctacatgctcttctggattatagccacgcccacaagaggtggatttatttccctttcttttgaatttgggtgggtctttatgactgccttgatgaacagaatgcatcacaaatgatacaaagtgatgctagatcctgagatacaatacattccacctagggccagcttcatgcgcatgggatttgtgcaatcacacagggtcctgcactcagaagggcctcacattggttgaatgctctactgttattgttttgaaattcttggtatttttggacaaggggctttccattttcagtttccactgggctttacaaattatgtcaccagtcttgcttccacctggctctctatcacttgggacacatayattgtatgcctgtagacatcatgctggagacatggagaagccatgtggagattccattataaagagaggacat

SEQ ID NO: 308806 - DNA, 605 bp, Homo sapiens
actagactgtcttcagtcaagaaacccaagcatgtatgccctatctgtgaagtctcttcagtgcagatattagcattgaaaaagcttaattcacatcattcttgctctacctctgggcagttggaagagggtggttatgtccaattcccacataatgttcagatctaatagagactcctactacttgttgtatttggctcattggcctgagagttagggcatcaggctaattccaattgccttctctcccatatctttaaactttggcaagttctctcctcagccctgctttctactaaatgtagccttttccttcaggtcatctcaggcagtgccatgactttaaataatttttaagatgtactgttctcaaacttctatttctggcctggcctctctctctctctctctttctctctctctctatctctctctctctctctctctccttttrcactatttctcttatgcagcagaatgatttttctagagtggaaataagatcacattacttactgcttaaagacatccaatgacttcttttgttaccagaaaaaaattcaagctcattagtaaaaatccaagctcatagagctgtgggtctt

SEQ ID NO: 308807 - DNA, 603 bp, Homo sapiens
tctttttacatgtataatgtaaaaaaacagattattcccccttaaagcaatgaccgccactgctttaaactgcattttgcattttggtgattctgatggctatattgatatgagtctgtgtggaaaggtaaacaaaagtctgttcatatcaatgtaaccaagaaaggaaaaaaatatccttttgggtggcaggaataaggatttacatgcatatagattataatttaaaattgacttctgaatttgtcaagccttttgacctgtattcagagcactctgagagggctcatgccagcaagtcacaatactgtatttatcagcagccacctacagagcttaagtgtccagctgctacttttttcttcttctgatccattggtactttttatctaaaatgcctgtagaccaaagagcattgactaagaaaagagagcaaaagtgttttcctgcaatcattattttattgggacaaaagagcaragttttctgaatcaaccttaagaagtacagatattgaacatgttaacaatactagtgtttttcctaaaaaccacattacacctcacctcactggctctattgaatggaatgtcatgtcaaatg

SEQ ID NO: 308808 - DNA, 591 bp, Homo sapiens
tgagggaggcttctgggttttgaatagaatttctttcaagrttgtattaaagttgttggtagatcaatagtttttcatcttggtgactatttgtctcctctcaaaaactagggattacacagtcactaagtgatacagactctagatgtattggagttgccacatgccgatggccctattctgtttgttctgtactttggggctcgatatatatatatatatatatatatatatatgtatgtatgtatagcctatgcagaggatttaactctttcatctagatttttgctcatatcagataggatttaaagctgttatgttaaacatgttaaacagaagaggcagattattttttcatgtaattcctactcttgtatttttcctggtatcaatgtagaggataacctccctgaagtctttaaggcattattgttttaaaaaagattcacgagcccagctgaccttggcatagtatggtatagaatatactataaataggatttgtctcagtctttatccctgagcacatgaacgattttgttatattttttaccataacattgtacagcaacaaacatggggaaaataggt

SEQ ID NO: 308809 - DNA, 591 bp, Homo sapiens
tgagggaggcttctgggttttgaatagaatttctttcaagattgtattaaagttgttggtagatcaatagtttttcatcttggtgactatttgtctcctctcaaaaactagggattacacagtcactaagtgatacagactctagatgtattggagttgccacatgccgatggccctattctgtttgttctgtactttggggctcgatatatatatatatatatatatatatatatgtatgtatgtatagcctatgcagaggatttaactctttcatctagatttttgctcatatcagataggatttaaagctgttatgttaaacatgttaaacagaagaggcagattattttttcatgtaattcctactcttgtatttttcctggtatcaatgtagaggataacctccctgaagtctttaaggcattattgttttaaaaaagattcacgagcccagctgaccttggcatagtatgstatagaatatactataaataggatttgtctcagtctttatccctgagcacatgaacgattttgttatattttttaccataacattgtacagcaacaaacatggggaaaataggt

SEQ ID NO: 308810 - DNA, 588 bp, Homo sapiens
atcaagacacatgcacgcgaacgttcaytgcagcactattcacagtagcaaagacatggaatcaacttaaatgcccatcgatgacagattggattttaaaaatatggtacatatacaccatggaatactatgcagccataacaaagaatgagatcatgtattttgcaggaatatagatggagctggagactattatttttagcaaaacaatgcaggaacagaaaaccaaataccgcatgttctcacttacaagtggaagctaaataataagaaattatgaacattaagaaagaaacaacagacactgaggtctacttgagggtggagggtgggaggagggagaggagcataaaagataactattgagtactgggcttaatacccgggtgaggaaataatctgtatcaaaaaaaccctgtaacacaagtttaccaatgtaacaaatcttcacatgtaccctcaaacctaaaataataacttaaaaaatttaaaaaaataaaaaataaagtgtcagctcctccagggggataaatgggtctttcatttatctttaacgtctggcacagcaactggcacaggatgattatc

SEQ ID NO: 308811 - DNA, 588 bp, Homo sapiens
atcaagacacatgcacgcgaacgttcattgcagcactattcacagtagcaaagacatggaatcaacttaaatgcccatcgatgacagattggattttaaaaatatggtacatatacaccatggaatactatgcagccataacaaagaatgagatcatgtattttgcrggaatatagatggagctggagactattatttttagcaaaacaatgcaggaacagaaaaccaaataccgcatgttctcacttacaagtggaagctaaataataagaaattatgaacattaagaaagaaacaacagacactgaggtctacttgagggtggagggtgggaggagggagaggagcataaaagataactattgagtactgggcttaatacccgggtgaggaaataatctgtatcaaaaaaaccctgtaacacaagtttaccaatgtaacaaatcttcacatgtaccctcaaacctaaaataataacttaaaaaatttaaaaaaataaaaaataaagtgtcagctcctccagggggataaatgggtctttcatttatctttaacgtctggcacagcaactggcacaggatgattatc

SEQ ID NO: 308812 - DNA, 588 bp, Homo sapiens
atcaagacacatgcacgcgaacgttcattgcagcactattcacagtagcaaagacatggaatcaacttaaatgcccatcgatgacagattggattttaaaaatatggtacatatacaccatggaatactatgcagccataacaaagaatgagatcatgtattttgcaggaatatagatggagctggagactattatttttagcaaaacaatgcaggaacagaaaaccaaataccgcatgttctcacttacaagtggaagctaaataataagaaattatgaacattawgaaagaaacaacagacactgaggtctacttgagggtggagggtgggaggagggagaggagcataaaagataactattgagtactgggcttaatacccgggtgaggaaataatctgtatcaaaaaaaccctgtaacacaagtttaccaatgtaacaaatcttcacatgtaccctcaaacctaaaataataacttaaaaaatttaaaaaaataaaaaataaagtgtcagctcctccagggggataaatgggtctttcatttatctttaacgtctggcacagcaactggcacaggatgattatc

SEQ ID NO: 308813 - DNA, 640 bp, Homo sapiens
aatactaaatcctgttgccttctgactgcatcattatacggaatgtaaacatgcatgtatctatgagktattcaaaaatgcccaggcttatcaaaatttcatttttgcctccaatttcaaaattgtgcccttttttcctagaaagctgcaaaatcaagactcttactaggtcttgtggctttatatcccttgaattgcatttaaatgtagtctcaaagtccccagatttctaccaacgtaaccagaattttcaaggatttaaatttttaaattagggatccttttgaaaatctgttaaaagtcattaatcctctccccagataaaggctcatgcacacacatacacacatacacacacagctgactgtacaggaagttgcagattctctgaagtccatccatgagcccttaaggatttatgggccccaagttactcccagagttcacatgtgcttctgcagattaaaatactgcacaataacgcttggccaggaggcaaagtggggattaaaatctattcccccataccactcatcaagtcatgtggtgtccacacagaagggagtttgttttctaatttgtgcaaaggtgccaaatggccaactgtggtatactagggccagctcacaagctgagtaca

SEQ ID NO: 308814 - DNA, 640 bp, Homo sapiens
aatactaaatcctgttgccttctgactgcatcattatacggaatgtaaacatgcatgtatctatgaggtattcaaaaatgcccaggcttatcaaaatttcatttttgcctccaatttcaaaattgtgcccttttttcctagaaagctgcaaaatcaagactcttactaggtcttgtggctttatatcccttgaattgcatttaaatgtagtctcaaagtccccagatttctaccaacgtaaccagaattttcaaggatttaaatttttaaattagggatccttttgaaaatctgttaaaagtcattaatcytctccccagataaaggctcatgcacacacatacacacatacacacacagctgactgtacaggaagttgcagattctctgaagtccatccatgagcccttaaggatttatgggccccaagttactcccagagttcacatgtgcttctgcagattaaaatactgcacaataacgcttggccaggaggcaaagtggggattaaaatctattcccccataccactcatcaagtcatgtggtgtccacacagaagggagtttgttttctaatttgtgcaaaggtgccaaatggccaactgtggtatactagggccagctcacaagctgagtaca

SEQ ID NO: 308815 - DNA, 520 bp, Homo sapiens
atttgatcccagatgggtttaaagacagcatccacagctatcaacctatgttttaaagcatctgcagcactgatagcagtaactgccacaagaaccattaaaaaaacaaaacaactaatggttgcatataatttttaagatagggattatgaggaagaactgtgggggaaaataaacgtaagactcattactccttaagatggsaaggaagaaaagtcctacccatcgcaggtataaattgttgtggactgatatcaggtgtcttctgtaggctttttgaagaacagctctttacaactgaattctatcttgagctaagcattctcttagcaaggaaaaagaaaaagtcaggtcaaacgattgattccatttctgaattacagagggttattgatttttcattaaggttcctgtgctgccctcaagagcagggaaagagaagggaaagtaattcattgatcagagcggagggccatgttcatttattggcttcctgccacatcccattattaccggttct

SEQ ID NO: 308816 - DNA, 520 bp, Homo sapiens
atttgatcccagatgggtttaaagacagcatccacagctatcaacctatgttttaaagcatctgcagcactgatagcagtaactgccacaagaaccattaaaaaaacaaaacaactaatggttgcatataatttttaagatagggattatgaggaagaactgtgggggaaaataaacgtaagactcattactccttaagatgggaaggaagaaaagtcctacccatcgcaggtataaattgttgtggactgatatcaggtgtcttctgtaggctttttgaagaacagctctttacaactgaattctatcttgagctaagcattctcttagcaaggaaaaagaaaaagtcaggtcaaacgattgattccatttctgaattacagagggytattgatttttcattaaggttcctgtgctgccctcaagagcagggaaagagaagggaaagtaattcattgatcagagcggagggccatgttcatttattggcttcctgccacatcccattattaccggttct

SEQ ID NO: 308817 - DNA, 622 bp, Homo sapiens
ttctcccatttcatagataatttggccaaggctacatgggaaataatttgcagagcctggactcagattcaggccttctcaatgatgagggctttttccactaccctacagctccctctggtgctgaaattaacagtgggaactattaaaaatgactatgaaaaactattttaaagatgtatcccagtaaattgagctagaaaatacagtagaataaaatatcttattcagagtagcaatctatacaaaatgcctatgaataaccatgacaaaaatatgtatggaacttatctgactaaaaakagactactgaaaaaaatgtaaaataagatctgactaaatgaagaaacacaaaatacttaaatatgtcgattttttccaatgtaacattttggaagaaggtagataacattattctaaaatttctctggatgaaaaatcaacacacacacaaagatattttggaaaaaaaattaatgaaggagcactcagtctatcaaatataaaaatgaaatttaaaacctcagtatttgaaactagtcaagaacctgtgtaaaaattaacaattggaaaactattacctatttgaaaaaattaaatttatccaatttaattttgaatg

SEQ ID NO: 308818 - DNA, 631 bp, Homo sapiens
agatattagggaagttgctttccctacagaagccataggagagatgaaaggtttaacgtgggaaattcaattagagaccctgtggctggaaatgactcagtcaaacaattataaaaatagtttaattataaattgagttttcctgtcattgattcttgttyttccagtgagaccctaccatgctttgcaagcctttcactcatgcaactcacagtgaaatcctgggcttttcattgatgtagatgtttctgggtttttttcctagctcatgacaaaattggtttccactgcactttgttgtattcagagaagtcaaataaaagtcccaattgaaaaatacatgaaaatagatgtctaataagccatatatattatacatatatgtatttttatgtatgtatatacaattttatgttaataaaattgtaagttgcttttataccatatatagcattttatattgtgtttttttcttaagattcttcacaaatttttccttacgtttcatgctattcttagaaaataaggttttaagctattttaaaatatagtgcatggctgtttcttaatttatttacccatagaacctttagattattcccaaatttcccattataaatcatgctgtaaa

SEQ ID NO: 308819 - DNA, 503 bp, Homo sapiens
gtgattattaataaaattttgtttatgtagtgaaactcatttatttatttgtttayattaaactaattatttatttgtgttaaaccaatcttgcattggaataaagcatacttgatcatgatgaattaactttttgatgtctgttgaatttagtttgctagtattttgttgaggatttttgtgtctgtgttcatcagggatattgccctgaagttttcttttttttgttttgtctctgccagtctttggtatcagaatgattctggcttcatagaatgagttagggagaagtcctcctcctcttttcttttttttcttttttctttttttttttaagaataacttcagtaggattggtactagctcttttacatcttgtagaatttgactgtgaatccatctgatacaggccctttattggttggtagggtttttattacagattcacatttgaaacttgctattattttgtgcaggactttaatttcttcctggttcaattt

SEQ ID NO: 308820 - DNA, 503 bp, Homo sapiens
gtgattattaataaaattttgtttatgtagtgaaactcatttatttatttgtttacattaaactaattatttattygtgttaaaccaatcttgcattggaataaagcatacttgatcatgatgaattaactttttgatgtctgttgaatttagtttgctagtattttgttgaggatttttgtgtctgtgttcatcagggatattgccctgaagttttcttttttttgttttgtctctgccagtctttggtatcagaatgattctggcttcatagaatgagttagggagaagtcctcctcctcttttcttttttttcttttttctttttttttttaagaataacttcagtaggattggtactagctcttttacatcttgtagaatttgactgtgaatccatctgatacaggccctttattggttggtagggtttttattacagattcacatttgaaacttgctattattttgtgcaggactttaatttcttcctggttcaattt

SEQ ID NO: 308821 - DNA, 582 bp, Homo sapiens
attgataatattcatgtattcatcaggtactacacaataacttactgagaacctactacatggcatacaacttttttgttattagagatgtaagaatgttcaaaatagacatggcttctgtccccaaataatttcaatggtacgggagaggaagaaaataaaatatttgtggtatatagcaataagagctataaatggtaattatgacatggtatggggtcctataacacaaggacctaatataatataagaaaawtagagaacactttcttgatgaagtaaaatttctgcaaaaatctaaaggatatgtaggagttcattgaatgagaggagatgagaaagatcttaactagaagaggcaacaacatgtgaaggagtcatgaggaatgaggggcccagtgcattcaagaggcttaatgtagtcctaattagtcctgttgggagggcaacatggagggtgaaattagaagtcccagtataattggctagtcatgcctacataaaacatgttaataatgtgggtcttaggcctaagaacagagtgaagccgtggaaagtgtttaaataataagatatgcattt

SEQ ID NO: 308822 - DNA, 574 bp, Homo sapiens
aacttatatttactctgttagcagttttcaagtgtacaatattgttaactatatatagtcacattgttgtacattagatcaccagaatgtatttatgtcgcataactgaaagcttttaccctttgaccaacatggttccatatcccacctccccagtccctattaaccascattctactccctatttccatgattttgacatttttatatttcacctacatatcagtgacactatgtagcatttgtctttttgtatctggcttatttaacataatataatgtcctccaagttaatccatgttgtcacaaacagcaggatgctttttcttttataagcaaagacatgtttcattgtgtgttgggggaggggcgtgtgtgtgcgtacatcaatttaaaaaaattattcaccattaacagacacttatattgcttccataattaggcaattatgaataattctgaaatgaacatgagaaaacagacatctttctgaaatactgattttatttccttcaaaaatatacctagaagtgggactgctggattgtaagctagttctagttttaattttttt

SEQ ID NO: 308823 - DNA, 574 bp, Homo sapiens
aacttatatttactctgttagcagttttcaagtgtacaatattgttaactatatatagtcacattgttgtacattagatcaccagaatgtatttatgtcgcataactgaaagcttttaccctttgaccaacatggttccatatcccacctccccagtccctattaaccaccattctactccctatttccatgattttgacatttttatatttcacctacatatcagtgacactatgtagcatttgtctttttgtatctggcttatttaacataatataatgtcctccaagttaatccatgttgtcacaaacagcaggatgctttttcttttwtaagcaaagacatgtttcattgtgtgttgggggaggggcgtgtgtgtgcgtacatcaatttaaaaaaattattcaccattaacagacacttatattgcttccataattaggcaattatgaataattctgaaatgaacatgagaaaacagacatctttctgaaatactgattttatttccttcaaaaatatacctagaagtgggactgctggattgtaagctagttctagttttaattttttt

SEQ ID NO: 308824 - DNA, 477 bp, Homo sapiens
cccacccacttcagcctcccaaagtgctgggattacaggtgtgagctaccgcacctggccaaaaaataaatttttttttaaactgggcgtggtggtgcactcctgtggtctcagctactcacgaggctgacttgagctgggagatggcggctccaatgagctgtgatcatgccactgcattccagtccgatcgagagtgagaccttgactcaaaaaaacaaaaatcaggccagacgtggtggctcacgcctgtaatcccagcactttgagaggccgaggaggatggatcatgagattagaagtttgagaccagcctagccaatacaacgaaaccctgtctctactaaaaatcaaacaaacaaacaaacaaacaaaaactagccacgtgtggtggtgcgcacccatagtcccagctactcggaaggctgaggcaggagaatcgcttgaatgcaggagayggaggttacagtgagccaa

SEQ ID NO: 308825 - DNA, 529 bp, Homo sapiens
actattgcacgaacaattattatcctactgaaaatatttctgtttcacttggaccattgtattaggagagtcagtatgaatcagtagtgccccactggcttcaccagtattgcattcagagttctacgtattgatctcacaggagcttgaacataataccagaatgtggttgatggagacactgagatggaaaatcagagagaacaagtagtgtggtatagattatttctcatgttccctccagttcttgtaccaaactcagcttatatatctttcttggaaccctacagttttatttcattttatgactcccccagctcccacatttcaccatactccacaattagatttaaaatggaagcatgaagaatgatactcttatctcttccaggaatygtggatctaaacctctgtagctcctctgtctgtgttgcaatctggtggcccagttgttaaaaattggtgttttgggtcctatcctggtctcctgtaagggattttggattagggaaaatgataatttcataac

SEQ ID NO: 308826 - DNA, 523 bp, Homo sapiens
cttcaattgtaatgcttgttctgcccgtccacagactattggcggcagaaacaacgaatttcctccaaactaggcggtgttggtggctcttgcattcctctggatgaggaaatctagttggggggttccagaaggggaaggctcctgggctttcaatacatcctcctgaatcatacctsgtttcgggttccctagaaaaatctggacgtgtaaaaagaactcttaacggccgatgcagctcttccaaagctaaggtaggtgcagttttaagacctgtctctgggacattattctcattttaaaaagccgtttaaacattttgacttgcagcaaaggatggaaagcctcactgcagatacttgagcttcacttcatctgatctttattttttccttttatgattattaatattatttttggaaaatttggacaggactttctcccatctgtctcgctgcatttcttaggtgtgggtgggagtgtagaccttcatacggtttttacatgcaacctctccacagaa

SEQ ID NO: 308827 - DNA, 595 bp, Homo sapiens
attgctagcgggtagagacacagcaagtcaggaaacctgggtgttcagaagacttgaaactctctgaggggcttagtcattatcaggatagagaataaacaagatattgatcttgtaccgaggatggggttggaattgaaagcccttcctgcagctacaaactcgaaagagtattctgccagtctggtactggactagaaaagatatccacctgctaayataagaaaaaaaaaaagatatccacctgctaatagaagaaaaaagaaaagtgtaccctttagacctaaagtccaggctggaaaaaatgtctcctgtaatgaatttgtagtttcagaattgtccttgcaaaggtttgggtgttagacattaccttagatgcagaatttaagaagattcaagaaaataactggacatcagatggcatcatgttggtaacacacaggatgcctagaactgggaaggtggttcgtcccccgtaacaatgggcaaaaggattcttacagatgcacaggttaacaaacgtgcaaacacaaattaaaaaccacagaaggcaacaagccaccaagaacaagagttagctgtagaagcaaacaac

SEQ ID NO: 308828 - DNA, 607 bp, Homo sapiens
ttaaaagatgcaaaggaggtgtttggaatttaagtattctcaacttcttgtgatatttcatagaagkgtagaaatacagattccatttaaactctctgagtattcaaaattttaagggtaaccgataacaggatagaaatagagtgtaatctttcaaaccaagggagaggcagatgaagttacatagagcaaaatttctttgacaacaaaaataaatctagaatgttgaaaagaaaacacagaaaatacaggacaaataaaaagtatcaattacaatgggagaaattaaaccaaaatggagtaaatgtaaatggactaaattcaactgttagagagagaatttgacctttgattgtaaaatatctcattatgtccagctgaaaacggccatccctaaaacattcaggacacataaaatttcgaaagtaacagaagagaaaaagacatcccaggaaaatagtaactacaaccctcttattctgcctatattaatattataagatctcaaggtaaaaatctttagtaaagacatagcagatcagaacatcacaaaaaaaattaaactcaccaggaattactgaaaaacaatcctagcttatatatggca

SEQ ID NO: 308829 - DNA, 606 bp, Homo sapiens
tgagtacatttttaaaaactctacattgcataaaatgtcataagttaagtaaaaagctagtgacaaataatgtggagatatttgcagggtttataatggataagtggctaatattctcgatatatagaaacttatttgaaaaaacaaggaggaaagagacatgtttttaagaacaggcaaaaagcacaaataaataactaacaaaaagaccttttaacaaactaacacagggatagaaaatcaaataccgcatgttctcacttataagtgggagstgaatgatgagaacacatggacacatagagaggaacaacacacactggggcctttcagaaggtggagggaaggaggagggaaaggatcgggaaaaatagctaatgggtatttggcttaatgcctggggtatgaaataatctgtaccacgaactcccatgacataagtttacccatacaataaatctgaacttgtacccctgaacataaaataaaagttaaaaaaaatcaaattagaaaaaacaaatgaccttaagcatatgaaaagaggttgaactttactcacagtgaaaggaatgcaaatgaaaacaatatttttagaggggaggctcc

SEQ ID NO: 308830 - DNA, 634 bp, Homo sapiens
tatttttttttataaatggacacagtaaattttactctcttcaagccctaggaatttaccagtagatgagcatagtacgcataatrtaagtgtgcttttaactaagatgggcagccatttctctcttatacaatacgttcctaaaaatcaacactaaagttggatatgagaaaatccaacaataacttacccactaacaagagagctttagatccataaaacaaaaatgcatattaaaatatccctttcagaaaaaaaatcattgatgacactattccagcatttcatacttgctgtttagtttttttctttttcttccaaacagcagtagtgggcttaagcccaatgaggtagagattctacatttttcatctcactgaaggattttcacttttgtttcaatctcattgactttttgagacatatttcatattgcagtagtagcatgctagttgttccatttcctaccctttaagaaataaaattatagaggcaaaatcagtaagatattcaaagaaccttcttagcatcactgtacaaagaggaagagtctatcaaaaagttaccattgactggcagagaatactattcagcagaagcctgtggttctccatgatcagataatagagcaaag

SEQ ID NO: 308831 - DNA, 608 bp, Homo sapiens
  misc_feature (1)...(608): n = A,T,C or G
tcaatgctactctgacttcccataaaggaaagagggtaggagcaggaagattgggcatggtggtctgatagccctccagccaatgctggccaccacgggtcctgtgtctccaataaaggactcaccttagtatccctgccatcctcagtcattggggagattaagtctctaggaagaatgagcatgttgcaaatgaggtgatggatttcasagcacagcagcttgggatctcactaaataacattccctgtggtcaaggaaatgagaagcacatttttcatggccacacgagggccaatttgtcccagaggggnaatttctccaggacccagagcatgggattgcggggcatgcatacctagaaacctgtttaaagtcattccttttacatattgtcactctcaactgcttacagccatgttgtacagtgtcctagattagaatgtgctatggtggggtagaggaaaggttagcacagcaacagcccaatggatgcctggcctgagaggacagcctaacattccagtgtaagagctcatggttgaccatttgatgacacacagcatgggaatggggacctttctgcgtgagtcctcctgattatatct

SEQ ID NO: 308832 - DNA, 608 bp, Homo sapiens
  misc_feature (1)...(608): n = A,T,C or G
tcaatgctactctgacttcccataaaggaaagagggtaggagcaggaagattgggcatggtggtctgatagccctccagccaatgctggccaccacgggtcctgtgtctccaataaaggactcaccttagtatccctgccatcctcagtcattggggagattaagtctctaggaagaatgagcatgttgcaaatgaggtgatggatttcacagcacagcagcttgggatctcactaaataacattccctgtggtcaaggaaatgagaagcacatttttcatggccacacgagggccaatttgtcccagaggggnaatttctccaggacccagagcatgggattgcggggcatgcatacctagaaacctgtttaaagtcattccttttacatattgtcactctcaactgcttacagycatgttgtacagtgtcctagattagaatgtgctatggtggggtagaggaaaggttagcacagcaacagcccaatggatgcctggcctgagaggacagcctaacattccagtgtaagagctcatggttgaccatttgatgacacacagcatgggaatggggacctttctgcgtgagtcctcctgattatatct

SEQ ID NO: 308833 - DNA, 569 bp, Homo sapiens
cttgaccttggacttcccagcctccaagcagtgtgagaaatgaatttctgctgtttaagccacccagtattctgctgtatcagccccagctaagtcagatgaaaaacaggggagagaaagacagagaccacagagatcaagcctaggctgatatcacatggacagcatttctaccaggagccattaggaatcctgagattcacctccacagctgttggcagttttgtcttccctctagttgactgtgaatgaggtgttatcggttactgttctggttgtttgtggcatartagtcatgtactggaaagtttgtcatctactccacgggaatttagctaaaagtttcatggcagagtagaatactagaatacgtctcactttgcacagcatagttctcagacatggtgctgttgttggaagcaacatgggcagtgtggcagcaagctgtgggaaggaatattatcctctgtaataaaggaagcaagggagaggggaatttcatctaccttgagtgagtcttaccttccatttgcatggtgtgttgtcaaaactgagtacaagccctcaga

SEQ ID NO: 308834 - DNA, 593 bp, Homo sapiens
gtcagaacagatatggagaaaaaattgcaagtgtatgaaaagatgtacaaacaagagtcaatcgttcttgaagaacagattctgagccacagtataagattgttgctgttrcagttttctccagcaaccttctgcaaatagtctcattcacacatgcattcacccacccgctcaccttcccctcacacacaagcatgcacgcacttgcctatgcgtgcacaatctttttcatggctgcctactattccatgtctgaatcactgtcatttagctaacttctattgacagtcattttagttttcttttttctagtttttgtgatatttcaaaataattatgcagtgcaaacacccttcagcataaatctctgcatgatgtgggggtgcatctctcaggatgtattccttgaagtaaaagtatgtgctgggtcagaggctgtgtgcatcttaagcgtgggtctgttttcccaaatttccctcccaaggggctgcctgattcccagtcactatttaaagtgcttcctatgccttacccatctgttagattgctatcaattggaaggttaaaaatatggactctcactattgttttta

SEQ ID NO: 308835 - DNA, 509 bp, Homo sapiens
acagtgcaaagcgaaagcaagtttgttaagaaagtaaagtggtgaaagaatagctcctccatagacagagtaggctgttcctgaaagtaaaaggagaaatgcgcccaccctaggtacaatgcttgtttatatagaggataacaaaaaatcayggggagatgtgctgtattacaagcatttgtgataagggattaattttccttactatattttgcaagaatcgatattattgtctttaaagcaaaattaggaatgcttttgttgtcaagatatcgggatatccagtacattcctgaatttgggtctgtttggtaaacattattaatctattctccccttaaccgtaaacatctagaggctaggagtacctaacctccttggaatgcagcccaggaagttccagcctcatttttcctagccctatctcaagatggagttgctcaggtatgaatgcctctgacatttctagagtaattgcctagaacacagcatacaaggtccaggagttc

SEQ ID NO: 308836 - DNA, 371 bp, Homo sapiens
tcaaagaaattctgttggcatttacattgatattgccttcaatttacaaattaatttagggagactgacatctttacaacacagagtcttcctcaccaagaaaaaaataatatgttttcccactaacttaatacttacttaatataygccagtaatgtttcaacattttctctaaatttatattgtacctggcttgttaagttagttttgaagtattttatttgtattttgcctatttggtaacacaaatgagttgttttcctgtcagtttatttcctaacagattattactttgatgtggggaatatattgaatatgtgtgttaatttcataaccaactatgttactttactgacttaacatctccattc

SEQ ID NO: 308837 - DNA, 569 bp, Homo sapiens
tgcattaacatacatttctctgccagaaaaactaagagtggcccttctaaaacaaatggcattttgaaaagtagtatgattttatggaaatataaaaatgatagtattgaccaatgaaattggtagttgggaatagtttgtgagaaaaatttggcttttaagtgtcatctttaggcaacaggtacctaagcaagagtttcaagggcagagcaataattagatttgtcttttagtaagataagtatggcaataaattcaaaaaacaggttttagatggtgaggagctgatcaagaagaatggaagtggatttatagagagaactcaaaatgcacactaacrttaaacatcaagtgaaatttggatgtcacgttctccactgtattcttatgtttgtgtgtttgttgttttaacttgctttaatggcctataagttatggaatcctaattttagatctgtgagtaaaactatctggaaatcatttcagtatagctgtgatattctctataaatgaaacatttcaatcactggtgtatttgatgtgttttgtaaccatccacatgagaactc

SEQ ID NO: 308838 - DNA, 509 bp, Homo sapiens
gagtttgacaattgccggtaagatgtattgaatatatattttagtttgtttctttttaatatctctcattcaaattctattaaaaaacaacaagcatttggtctctcttatcttttgggagtaatttttttaaagacctttacaaggtgctgttctttttatgtaccccaagcatagtgatggatggattgctagctgttctcaagatggcagaaaattgactatcaaggacaaatggtatgcatcmccaggcagcactgactctggaaaaacattgaagttgtctctgtgtgaagtagctatgcatttttgctttattgtatgtttttgcttgctttttgtctgtttcttttttttcagtttgagcagaagcacggaactctgcggactggcaagttggtaaggatattaattgcattttaacatcagttcagttcaaaaaagattgaaagtagagagaaaagaaaatctttcaacaatcagtgaattaaactccaaatagttttgca

SEQ ID NO: 308839 - DNA, 605 bp, Homo sapiens
tttgcaccactagaaacttgtgcctttgtgtttataataaagggttctggcaaaaagctatgttctctatgggttgtctgtgtgtgtgtgtggctgtgtgtgtgttttctatgattctattaggttggcacaaaagtaattgcagcttttgcaaaaaaataattttgcaccaacccaatacatctatatctatgttaaaattgaaaactctagtgcatttatgctgctatagaaatatgcttagcagctttaaataaatcaggataaatatgaaaaagattaatatgctgaagacaggactgataatatggttcacatttctcattttacttttcatttagttgctcttcattttgctatatatgagcctatacaattatcacttggcccttgtctgtctgtggtgatcttttaaagaagctcctgaaatgaaagaattacttcatttctgtggtatccattatagtrgccactagccaaacataaatactgagcactggaaatcaggctagtgtcaacgtgaaactgaatttttaattttattttgtttaaacaatgacatagtgccagtgtctaccatattggacagagggatctcaacttcc

SEQ ID NO: 308840 - DNA, 633 bp, Homo sapiens
ttgccccaaattttccatttttttactctacacaaatcctcagtttggatatttgtaggggtagaatttgtcttagtatgccartatttgcctctaaagtgggagttcatgtttttcagtcaaagtactactttgtacacttatgattttataagatgaattaaggaaagtttcctctactcaaagatggaatttgagattacagttaaaaattgatctatattgattctgtaataattagctttgtccaagaatataattgtaaatatttatgtgaactatataatagtctgttttggagacagggatactttctgaagaaaatcttgattcatatctatagaatctctaggatgcttactattatataggacaccatgaggaaaaacaaaatggagcagctattttttaatctttaaagcatgaaaatatcatacaatcttcccagttagtttatatcataatagatttggagtgattttcattcttcaaatctgctagttatggaagatgcatgattctgaggaatggattctgagttctttgaactcatctaagaacacattgctaggactaagacaattttaagttatttacacaggtcattttgttaccccactgtcttggaggaga

SEQ ID NO: 308841 - DNA, 547 bp, Homo sapiens
gatgttgtgggaatctgacttaatgaaggaaggttttctaagaatataatggtcaaagtgagttataaagttctgttagaagkgaagttatcagatagagagacagagagggaggacctgcaaataaaaagcacaacatatattgagttctgcggataggaaaaagcactgcatgaacagcagagtcggaagacaaaataagtggaggatgtcctgtgagatgacactcacaaaaaggcacacatggacttcgatgtctgtaaatgattttaactttatcttaaaagaaaatgcaattattttaattgatggtagatgcagacagttaatcatataacattttgaaaatatctctctacttttagtgtggcaaagaacttagaatgggaagaggatatgaggaagaatatgaaagtattgtggtgctctgatgctggtagatatgtcaaagagtacctgggtggaaaaggggaacagcagggtgattagagagataattaggagtaaaaattgaaagaacatgggactgcatcgaatggcaatggtt

SEQ ID NO: 308842 - DNA, 434 bp, Homo sapiens
atattgggttttagaggaaatgtcttttagttccaaattatgtatattgtgcagcctctgtatgtattttctgagtgatttaaatgaatttgaatcagctcattargttccagactggtgctgaacataatgactcattcctaaattaatattgtctgccctgaactactcctgtctaaatcactttaatcactgaaaagattcatacttttcaaaaggatggccacattcaaatgaattctgcaacagttcattaggtaatgatgtcatttttgttccctgggtcagcaaatgtgttcctgcttagctgtaaaaatggactgactgtgagcagataaacaggtactttgtatgcatttgacattcatacatgcacagaagggaggcattatgttggcatggaatgtttcaatttggggcattgctatgtttca

SEQ ID NO: 308843 - DNA, 434 bp, Homo sapiens
atattgggttttagaggaaatgtcttttagttccaaattatgtatattgtgcagcctctgtatgtattttctgagtgatttaaatgaatttgaatcagctcattaggttccagactggtgctgaacataatgactcattcctaaattaatattgtctgccctgaactactcctgtctaaatcactttaatcactgaaaagattcatacttttcaaaaggatggccacattcaaatgaattctgcaacagttcattargtaatgatgtcatttttgttccctgggtcagcaaatgtgttcctgcttagctgtaaaaatggactgactgtgagcagataaacaggtactttgtatgcatttgacattcatacatgcacagaagggaggcattatgttggcatggaatgtttcaatttggggcattgctatgtttca

SEQ ID NO: 308844 - DNA, 428 bp, Homo sapiens
gcctgggttagcccagtgtttctagaaagaggaccagtgccccaggaggcagaacagagcctatccagcggacccagcctagctcagcagtcacccagcaatgctcagcataaatcagatccttcaactgacccacatgcttgttaattaaataaatatatatgtttttatgctgctagaattttgtgctgagatatgctgcagattrtgaaatatctggatggccattccattgatttttttttttttgtcagagtaagatataaactgtttgtttttaaatttttaattttttttttaaggaggagttaccattttattatctttaacagggtcatttagggcaaaagcaaggaggctactgcaataatctaagtgagacatgatggtgaccaagattgcctaacattttccacagttttatttga

SEQ ID NO: 308845 - DNA, 502 bp, Homo sapiens
ttctaagggatatgataaaacaatgtaggagatgaaaggtgaaatggccattaaaaaaaaaacacaacaaactgagctgatagagctgggaaactaacttccagaactttcagaatacagtaacaagcattaagggcagaattgaccactgaggaaagaatctcagagctcaaagatctgttctctgaaataactatcagacaaaaataaagaraaaacaatgaagaagatcggaaaaaaaaaaaaaaaacactgacaaatatggaattatataacaagaccaaatttgcaatgcattggcacccctgaaagagagaaagcaagcaacttggaaaacacatttcaggatatcattcatgaaaatttccccaaccttgctagagaggccaacattaaaattcaggaaatgcaaagaagccttgcaaaatattatacaaaaaaaccattcccaagatacatagtcatcagatctcttaagcctgaaatgagacacaaaatgtta

SEQ ID NO: 308846 - DNA, 579 bp, Homo sapiens
atagtaaggtgcttggctgacaccatatgtccacgggtcttacctagaatctaatggctataaaacaggcaagtcaaaccattatcaaaaaggtcacagaagaattttttgtccttaaatcrtctagcaaagacaatatacaacatgcccaattcaaatgaaatgcctaaattttgaggacatagatttctctcactatcacaatcttcgcaaaggtggtttcaaagtaacctgcctaacaccttagaatgcataaggggcagaaataagatttcaccttaggtctgtctaacattaaagcattctcatttctctattttccactatccttttatgtcaagactggagttggtggagtggaaaatacaagaggtatgaaaactattacttgtattcaaggggaccactcaatactcaattgattatatttataaaacaaattactccaaaacatagtggcataaagcatctatattgctatgatagcagactctttgtgacaaaaatttggacaagacacagtggggacgggtattatctgcttcataatatctgggatctcaggggtgggaagactca

SEQ ID NO: 308847 - DNA, 524 bp, Homo sapiens
tgttgtacctaagatgtcatcactaaacctaagtttatatagattttcttctatgttaccttttagaagttttatgattttgtattttatatttaggtctatgatccatttttaattaatttttgtgaaaagtataaagtctgtgtctagattcttttttttccatgttcctacccagttcttccagcatcatttgttgaaaatattatctgttcttcattgagtttcctgtgctctttyttcaaaggtcagttgaccacctttatgtgagtgaacttataggctattttgatttatttctctatttattcatcaatacctcactccctttgtaattttattgtctgtcttgaagttggatagtgtcagtcatctgactttgtttatctcctttacagttgtgttggctattctgggtcttttaccattccatgtaagcattaaaaccaggttgtccatatccacaggggaacttgctgaaattttgattggaattgcattgaatctatagatcagtttggtag

SEQ ID NO: 308848 - DNA, 169 bp, Homo sapiens
gaaaggataaggagaaatttaatggaccctgctgggtctgttsctatgtaaatctcatctctggggaagtgactggcacaagaatatcagatgtcactggtgcagacatttggcagatgtgccttgtatttaccagcgtgcaacctgtgagcaaattccaaatgtgtga

SEQ ID NO: 308849 - DNA, 582 bp, Homo sapiens
aagtaaagcccatctgggaagcagtgataagatgataagcagagctacagacctgggcaaactcaagtcaagagagaaagagaacaaatctgggctgtcaaaagatatcatcatattttcctatgctattcaccaatcctttcttgacttaatgatggccaaggaaaaagtaacttcttttttttgttgtttttttctcttgagatagagtctcgctctgttgccaaggctggagtgcaatggcttggccttggctcattgcaacctctgcctctcaggttcaagcaattctcctgcctcagcccctgagtagctgggactgcaggckcatgccaccacacccggctaatttttgtatttttagtagagacagggtttcaccatgttggccaggctagtcttgacctcctgacctcgtgatccacctgccttggcatcccaatgtgctgggattacagacatgaaccaccatgcctgcctggcaaaaataacttctaatgatgtcatgggtgcatcactaactctttgatgccagaaaaactgaatacaagtgaaagaggtacagagagcaagaaagttaca

SEQ ID NO: 308850 - DNA, 550 bp, Homo sapiens
cctttcttacttctattatgtgccatatcgctcctagacacaggaaacacgttctaggaggaagagaaaagaaagcytgaactttgaagcctgtaaataagttcactgtggcggatctcgttaatgcaaatgttatgaccagctagccctaagaaagctgagcagaatgagcctaggaggcctcctctctgcatgggcacatggcacacccatcagcaccgacagagcttaagcattcatatcgaggggctgcaaacccctgggcagagacacactgtatacacactagacatggaaaatgtatgaggaaaaaagattaactgacaaaaagttaattaaaactgctctgattatgaggtagaatttaacaattactttaaaaaatgcagtgtgacacagtgcagcactgcagctgaattaatcatgaatgaggagagcaatgtttaatttttgtgtgcgggagaaaaacactcaacagatttgacaattagaacagggtaacagcattgcatggcacaatgcaaagcgggttttcccagtggttttttgg

SEQ ID NO: 308851 - DNA, 550 bp, Homo sapiens
cctttcttacttctattatgtgccatatcgctcctagacacaggaaacacgttctaggaggaagagaaaagaaagcctgaactttgaagcctgtaaataagttcactgtggcggatctcgttaatgcaaatgttatgaccagctagccctaagaaagctgagcagaatgagcytaggaggcctcctctctgcatgggcacatggcacacccatcagcaccgacagagcttaagcattcatatcgaggggctgcaaacccctgggcagagacacactgtatacacactagacatggaaaatgtatgaggaaaaaagattaactgacaaaaagttaattaaaactgctctgattatgaggtagaatttaacaattactttaaaaaatgcagtgtgacacagtgcagcactgcagctgaattaatcatgaatgaggagagcaatgtttaatttttgtgtgcgggagaaaaacactcaacagatttgacaattagaacagggtaacagcattgcatggcacaatgcaaagcgggttttcccagtggttttttgg

SEQ ID NO: 308852 - DNA, 538 bp, Homo sapiens
agttgttgagtttctccagtgaatttttcaatttattctactctttagcttaaaaattctattcgttttaaaaatatattttatctctttgttactattgtcattttgttcaagcatattttcttgaaattgttgggcatcttttcagtggttattttgaattatttgtcaggtaatttatktagctctatttctgtgttaccattaaatcagtattttcatgagggaaggaaggtctaggtctttctacttcaccttcttgctaagatcaatccccttattgttgatgtttttttctttgttggaaatcatattgcttgtttgaggtttctaccaggcagagaagtgtcttaaagaaaatgaaaacttagtaacaggaaaagaaatatttatgagagaatagaataatatatacaggtaagaaagtaaaaataatggatgttcctgtgccgatactaggtcacacagcttcaaactatttaattttactcactataatgtgagaagcaaagcgtttcttttaaaatataggatcaac

SEQ ID NO: 308853 - DNA, 538 bp, Homo sapiens
agttgttgagtttctccagtgaatttttcaatttattctactctttagcttaaaaattctattcgttttaaaaatatattttatctctttgttactattgtcattttgttcaagcatattttcttgaaattgttgggcatcttttcagtggttattttgaattatttgtcaggtaatttatgtagctctatttctgtgttaccattaaatcagtattttcatgagggaaggaaggtctaggtctttctacttcaccttcttgctaagatcaatccccttattgttgatgtttttttctttrttggaaatcatattgcttgtttgaggtttctaccaggcagagaagtgtcttaaagaaaatgaaaacttagtaacaggaaaagaaatatttatgagagaatagaataatatatacaggtaagaaagtaaaaataatggatgttcctgtgccgatactaggtcacacagcttcaaactatttaattttactcactataatgtgagaagcaaagcgtttcttttaaaatataggatcaac

SEQ ID NO: 308854 - DNA, 535 bp, Homo sapiens
aataaataaaacaaaataaaataaaaaaatgtggcacattaaaaaaaaagactttgctcaactcaattgtatggattttttttaatttgaagacttagatttttttcaaaaatgttggctaaagactgaattcatagaagaaaatagtggcattttctttctaaatcagatacttcactgacatactgagccatcatttttctctttgacatatacttatttcatagtaagattgtgtcctttttcttaagcttatgttcttttcaaaattaagtgttttatgtacatcaaaagatgagaggaaaattaaataaaatttgagcaattattgaggaaaataatcacttttcaaaaattagtaggctttaaaaaaataaaattgacaaggatcctgacagaaccaaaggagtggagggtttgagtaayatcaggcagatcacttgcagtcaggagttggagaccagcctggccaacatggtgaagctctgtgtctactaaaaaaacaaaaattagtcgggtgtaatgacagacacct

SEQ ID NO: 308855 - DNA, 495 bp, Homo sapiens
gaggagactgtttccatgtgagctggtgttctgctaacttaaaattgtaatctgtatgcagaaataaaaacaacaacaaaaaaaatcctgtcataagaaataaataacttcccatgggtagttacatgtccttgaaaaagcttcatactattgaaaacatcttgctaattgataacattatttgaaacatgctgataactcacttggaccttgtgagaataaatttcccatgagtactagtaatgaacagcatagagcctacccacccaagaaaacaccaatttcctttaactccctctgcctgcaagttgcactattcctccagccaattaaaacatgcttcaagtatgtggtgaggcatgaccagaccctcccagccacgacagaggagttcataaagctgagtgaagtaggaggagagataattaccgtcaatatgcctcccacgtgggaaactgttaaacttaycattcttctcagtggtacgtttgatgt

SEQ ID NO: 308856 - DNA, 507 bp, Homo sapiens
aattgcttgaacctgggagttggaggttgcagtgagccaggattatgccactgcacttcagagaaagactctgtctcaataaaaataaataaataaataaataaataaataaactttattgctaaaaaatgttaacagtcatctgaaccatcagcaagttttataatctttttgctggtggagggtcttgccttgatgttgatggctgctgactgagcagggtggtggttgctgaaggctggggtggctgtggcaatttctcaaaatgagacaatgacatttgccacgttgatggactcttcctttcatgaaagatttctctgtagtaygtgatgctgtttgatatcattttacccacagtagaacatctttcaacattggagtcaatcctatcaaactctgccactgctttatcaactaaatttataaaatattataaattctttattgtcatttcaacaatggtcacagcagctttaccaggagtagatttcatcttaagaaacc

SEQ ID NO: 308857 - DNA, 498 bp, Homo sapiens
gggaaatcatgcctattcagtaaatggtgtcaagataactggctagccacatgcacaagattaaaactctaccccttcctttcaaaattaactcaagatggattaaagacttaaatgtaaaacctaaaactttatagttttatataaaaccctagaagaaaacttaggaaataccattctggacatagactttggcaaagatttcatgatgaagacaccaaaagcaattgcaccaaaaacaaaaackgacaaatgggacctaattaaactgaagagctactacacagcaaaataaatgatcaagagagtttatttctacagaataggataaatatttgcaaactatccatccaacaaagatctaatatccagaatctataagaaacttaaataaaatatcaagcaaaaaacaagcaaccccattagaaagtgggcaaaggacacagacaattttcagaagacatacatgtagccaacaagcatataaaaaatgctcaa

SEQ ID NO: 308858 - DNA, 498 bp, Homo sapiens
gggaaatcatgcctattcagtaaatggtgtcaagataactggctagccacatgcacaagattaaaactctaccccttcctttcaaaattaactcaagatggattaaagacttaaatgtaaaacctaaaactttatagttttatataaaaccctagaagaaaacttaggaaataccattctggacatagactttggcaaagatttcatgatgaagacaccaaaagcaattgcaccaaaaacaaaaacggacaaatgggacctaattaaactgaagagctactacacagcaaaataaatgatcaagagagtttatttctacagaataggataaatatttgcaaactatccatccaacaaagatctaatatccagaatctataagaaacttaaataaaatatcaagcaaaaaacaagcaamcccattagaaagtgggcaaaggacacagacaattttcagaagacatacatgtagccaacaagcatataaaaaatgctcaa

SEQ ID NO: 308859 - DNA, 680 bp, Homo sapiens
ggttgcttcctcacttttgtttttatacacctcttcactctttgggtttgtccaggatgaaaaactgagtgaccaaaatagcagagagaagatgcccttcgaggcccagtagagccaagaaatagtaaaaatttaggtagaaagctgctgktttttaaaaaaatttatagtgtcatttctaaatcactattgtttaaatagaaaatcagacgtttatgtgactaacaaaatataatgttattttattataacaaaattttggactctctcactaacaaacatatagtaaattgattaatgtagagtcccttaaaacattacaagttttgtgaccttgggcaaggcacttaacctgcttagccatctataacaaggttaataatggtgactacagctaggattgacatgagttatatatgagctgatgcttataaggtatcctcatcattattgtcacagaacagctaatatgtacatagttcttactatgtgtcaggctctattagaagtttttttaacatattaacttgtctaatttttacaataacactatgagatacctgctgttatcttcattttaagagatgaacaaattgaggcacagagtgattaaataacttacctaaattcacactgtacataaaggattcaaaccaggtaatctgacccccatgcccatg

SEQ ID NO: 308860 - DNA, 614 bp, Homo sapiens
tgttattttattataacaaaattttggactctctcactaacaaacatatagtaaattgattaatgtagagtcccttaaaacattacaagttttgtgaccttgggcaaggcacttaacctgcttagccatctataacaaggttaataatggtgactacagctaggattgacatgagttatatatgagctgatgcttataaggyatcctcatcattattgtcacagaacagctaatatgtacatagttcttactatgtgtcaggctctattagaagtttttttaacatattaacttgtctaatttttacaataacactatgagatacctgctgttatcttcattttaagagatgaacaaattgaggcacagagtgattaaataacttacctaaattcacactgtacataaaggattcaaaccaggtaatctgacccccatgcccatgcattaaccactgcactctaacatgctctcagaaataaccattcttatcactacatttttcaaaataatgcataattattaaaattaaatgatatttcaaatcaaaataaatatattcaacataaacaacctctacagagaaagctgaattgatgtctgaaatcaaaatg

SEQ ID NO: 308861 - DNA, 524 bp, Homo sapiens
taatgcattctgtagctatgcatcagcacctcttactcctatccagaggcaactaactcagtttaagttctgttaaagttaacttaggaaacatgtagcctataaayagggggagcatttgggaatgtgtgtgtgcatgtgtgtgtgcgtgtgtgtgtgtgtgtgtgtgtgtgtgtgaatgtactggcatctattaaaacaaagctactctatcaaaagtgctccattgtaaggggaatatgcgggctaattcccatatttctgtttatttgtttaactattaagtgacataatacttgcctgtaacattgctatctctattatgaatgacataattatcttaattctcagttttaaaagtcctctgagcactttttttcttcctttgtgaaaattaaaacagttacttcactacatgctctattgggatgactgacaattgatgaaaacataccaagctcccacaaataattttaatttccatccaaaataaaaatgtgttaattcctcatgcctataacaaa

SEQ ID NO: 308862 - DNA, 603 bp, Homo sapiens
gttgtggtataacactagttactatcaaaggggtacaaaatatgattttcgatttttaaggtatatttataaatttgatacaataaaactgcatactacccttaataaaatcccaatatcttatcttaggaaatagtccttgagttatgataccctcactgtattatcactcttctcagggaatccttaagtgactagcagtctccatttcaaccttcccacttggtttttcacatttaatggataattgcttgtatttcacaattttaggaagaaatggacaatgttttgatacctttggtggactgctaaagggtgctgaggcayagttaacattgaatacagatatagatatttatatgtcttcatgcatgtatgacatatatttgctgatgtgtatatacatgcctgtgtacatacatacatatatcctgcttcagcaatttacaagatcacaacacgtatcttagtaaaaactaccttgtttggggattactgtgcacggtcttagccctgaatgagattgaaagttcataacctcacagacatttatggctagttttttaaactttgatgagtttaaattttacattattaaacagc

SEQ ID NO: 308863 - DNA, 603 bp, Homo sapiens
tccctcagagtttgatcttatgcttttggcatcgttggtttctggttagaaaaagagtggcaaaaaaaaaaaaaagaaagtttttttcctgaattttgaaacactcctgtcaagtcactaaaatcaaaagcttaaaataatttttaaacacataatcttatattttccaaaggatacctgattttcttcatccctaaccaccaacagtttactgtatttggaaaagatctatgatggtagcaataatagcgatttctatttcattgtcttctcagtgaacatgtgaaaaaaatgcacgctagaataatttttcacaccatcaataataaacttattttatgtgacttcatatttagcatgtgtaatattcaaaaacagttcttattttgattttctktgtttttttttttttttgcaaatgagtcactagtgtacatgaaagaacaggacattatctgctgagaagctcaagccatatcacttagcatgcctgggcttgggacatgccccatgcatccatggaggtcctctttgattaacttagtctaaagaatcaaagaaagtttctaaacgagggaagagggatcaaaggcagcaactaaa

SEQ ID NO: 308864 - DNA, 608 bp, Homo sapiens
atatatcatgatacctgctttagatattaaaaccagaaaaacttagggtttttttcaaagtgaatgtaaagattaaatattaaattattctcaagctttttcattgctgctaatgcaataaatgatgttcatatatttgacttttcagagaaggaagtgtaaggaagcaaatgattcgatataactgtaaaatacattaaaatataagtaaaacaagctcggtaaatcttttaaatgtatgcattaaattttggtaagattgtcattttatacgtggcagtgtggcaagcaaaaagatagtaagctatgtttatccacactmcatcttggggttatttgctacctaagacagatcattcgaatgtgaaatgccttttaaaacgatgtagacctgtaaactcgaaagacggaacagaatcctgtggtttggggaaaataatgatatcacaccacctaacactaagcaattggctccacagtaaaagcataaaaccctcctacaagtgagactgagtaccaagtcttgttcatactgatcaaaaaactttctccaacaactgaaggaaataattcattttaattgacaactaaaacagacattttagaaa

SEQ ID NO: 308865 - DNA, 600 bp, Homo sapiens
aaactcttttggactgtgtttcctcttccagaaatgttgacaccttcactagaggtagggggaaagttctgatggtggagtcaaggttgtaataataccatgcaatataatagaggaggaattgcaaatgtgctgcccactttctggcccatggatccactggtaacattcctagctaggctggggaaggaagatggaaatcagagaagggagaaacaaaacaatgatgctgagaaacagtttaattttccagtttgggacatttaagacagaggaaggctgaaaaattcagaaaagaaaacctactattggtataacacttaataaataattggtcatattcttgaaaaatcatagaaattactctgtgataatcagatttaattcacttaatcaatgtttgttaaatgtcaactgtgcactggacattatactgggtcctagggatgaaatggtgaataaaaccccatgtagattctagtgcagctcacaaatgtgtgaataaggtattcacacaggtattaataaaatggtaacagaatagcagtgttcagactttcagtygtaagatgagcaagttctagtatctaatgtatagca

SEQ ID NO: 308866 - DNA, 583 bp, Homo sapiens
aatattcacagggagagaatctgactttggatctcatacattcctaacccacagcaaaatgaaaaaatgatcctgaaaagttcagtaattttargccatttactctgtacataaaacacaaaagggtaaatatcattcagggttatttcctttctgtcattgtagatgtttctcacagagccaagagctcctggcactccaaaatgctaagggctcctaaaatcagttggtgtacttttcttatttaatgaagaatgttatttaaacagcattttccacttgagaattaagcagtgcatggtaactttagatataattactacaatgataggctattgtcatgtttgagtgttattaacacatgttctaaataatccaaatgtaatatgatttacatgatattagatgataaattatacttaaaaatatactaaatagtacacatagcatatattatatatttctttatatattattcattatactatatgctttatactaatatattttattttatgctatatatacatatattatataaataaaatatatataattatgaaataatagtatatataactct

SEQ ID NO: 308867 - DNA, 583 bp, Homo sapiens
aatattcacagggagagaatctgactttggatctcatacattcctaacccacagcaaaatgaaaaaatgatcctgaaaagttcagtaattttaggccatttactctgtacataaaacacaaaagggtaaatatcattcagggttatttcctttctgtcattgtagatgtttctcacagagccaagagctcctggcactccaaaatgctaarggctcctaaaatcagttggtgtacttttcttatttaatgaagaatgttatttaaacagcattttccacttgagaattaagcagtgcatggtaactttagatataattactacaatgataggctattgtcatgtttgagtgttattaacacatgttctaaataatccaaatgtaatatgatttacatgatattagatgataaattatacttaaaaatatactaaatagtacacatagcatatattatatatttctttatatattattcattatactatatgctttatactaatatattttattttatgctatatatacatatattatataaataaaatatatataattatgaaataatagtatatataactct

SEQ ID NO: 308868 - DNA, 583 bp, Homo sapiens
aatattcacagggagagaatctgactttggatctcatacattcctaacccacagcaaaatgaaaaaatgatcctgaaaagttcagtaattttaggccatttactctgtacataaaacacaaaagggtaaatatcattcagggttatttcctttctgtcattgtagatgtttctcacagagccaagagctcctggcactccaaaatgctaagggctcctaaaatcagttggtgtacttttcttatttaatgaagaatgttatttaaacagcattttccacttgagaattaagcagtgcatggtaactttagatataattactacaatgataggctattgtcatgtttgagtgttattaacacatgttctaaataatccaaatgtaatatgatttacatgatattagatgataaattatacttaaaaatatactaaatagtacacatagcatatattatatatttctttatatattattcattatactatatgctttatactaatatattttattttatgctatatatamatatattatataaataaaatatatataattatgaaataatagtatatataactct

SEQ ID NO: 308869 - DNA, 583 bp, Homo sapiens
aatattcacagggagagaatctgactttggatctcatacattcctaacccacagcaaaatgaaaaaatgatcctgaaaagttcagtaattttaggccatttactctgtacataaaacacaaaagggtaaatatcattcagggttatttcctttctgtcattgtagatgtttctcacagagccaagagctcctggcactccaaaatgctaagggctcctaaaatcagttggtgtacttttcttatttaatgaagaatgttatttaaacagcattttccacttgagaattaagcagtgcatggtaactttagatataattactacaatgataggctattgtcatgtttgagtgttattaacacatgttctaaataatccaaatgtaatatgatttacatgatattagatgataaattatacttaaaaatatactaaatagtacacatagcatatattatatatttctttatatattattcattatactatatgctttatactaatatattttattttatgctatatatacwtatattatataaataaaatatatataattatgaaataatagtatatataactct

SEQ ID NO: 308870 - DNA, 559 bp, Homo sapiens
tattattgattcccttaaaacattaatagtgggatatagagaaataaaaaaataattaaaatacatacataacacagcaaggtggaaaaagaagataaaagttatagtatttgattcatcaggtggtcactacaatatctacagtatttatgagtttctgctattaactattccatgtttcttttacattgaacttgcctctcagttggggttcyttattcaacggaataacccaaagctttattcttgagaaatctgtatcttaatgttcctatttatatagggttctattaaatttaaccattggaccaaagaagcatcatatgagattacctgttttgttgttgtttgtttgtttgtttctagtgtatgtctcttccatatattttctgacatgaggattccaaaaaggctaattcatttccaattcaatagaaccatttttatgcctcctattggaagcattattactttagatactgaaatctctaaacagcagagttcagaattacagagtgaagaagcaaacattttcccaatgggtaaccagttttaatta

SEQ ID NO: 308871 - DNA, 559 bp, Homo sapiens
tattattgattcccttaaaacattaatagtgggatatagagaaataaaaaaataattaaaatacatacataacacagcaaggtggaaaaagaagataaaagttatagtatttgattcatcaggtggtcactacaatatctacagtatttatgagtttctgctattaactattccatgtttcttttacattgaacttgcctctcagttggggttctttattcaacggaataacccaaagctttattcttgagaaatctgtatcttaatgttcctatttatatagggttctattaaatttaaccattggaccaaagaagcatcatatgagattacctgttttgttgttgtttgtttgtttgtttctagtgtatgtctcttccatatwttttctgacatgaggattccaaaaaggctaattcatttccaattcaatagaaccatttttatgcctcctattggaagcattattactttagatactgaaatctctaaacagcagagttcagaattacagagtgaagaagcaaacattttcccaatgggtaaccagttttaatta

SEQ ID NO: 308872 - DNA, 572 bp, Homo sapiens
atgcatatcataacaactaaaataatttttaaaaaaattctaaccactagtatcctaaggaatgttaagagaataatacaccaagaacaaggaggcttctttccagtgatacatggattgctcaatattagaaaattaattagtgtccaggaggtctttattgyctcagtacaataggaactgatctttagaagtaaattcacttaaaactggaaccatattctcgtagttagtagtttttagaaacaaaaaacattttattgacaatcaaccttaaaataaaaatgaatttgtgaattgtatttgttttcatctaacaatatgtaacttggaattgaaactatgaaccaatttctataataaaataaagatgaatcaagtaataaatcttttaaaaaatagttctctaataaaattataagatcacattttcataaattatcataaaaagatccttctggcaaaatttctagaggtctcaactcattttccaagggccttttgaaccattgaaagtcaaagcattctcaaagtccactgaagtcaaagtattaaatgcatttaatgtcatc

SEQ ID NO: 308873 - DNA, 563 bp, Homo sapiens
aaatattattgtaaacgttttaaacatctaacatgaaggagactgtgttcctattattgtagtgtataaggaagtatgggagacaggaaatgtaaggaaaaaaagtaataacaatactaactgctagtattagaatctccttttcaaatgctctggccctttggcatcctgtaatttacaagcaaacaaagactaaatctggtagattcacaggagatrtaatgattctattattttatccctttcatgaatccatgttcttccatatgtgtgaagaacattgatatggtttggctgtgtccttaccccacccaaatctcatcttgaattgtaactcccccaattcccatgcgttgtgggaagaactcagtgagaggtgactgaattatggggttgggtctttcctgcactgttctggtgatagtgaatgagtctcaggagatctgatggttttaaaaacgggagtttgcctgcacaagttctctctttgcctgctgccattcatgtaagatgtgacttgctcctccttgccttccaccatgattgtgaggccttccaagcca

SEQ ID NO: 308874 - DNA, 582 bp, Homo sapiens
acacacatgcatatatgcactattgtataatcatatgacattatcattttttatttgattgaggtaaattcaagatatgtttttatctttcatggagttaataggcatattccctgtgcttcaggatcccgtccaacaataaggacccattaacacacacacatgacagacgcaactggccaattttttaagtctaatctgaaaagcattcttgattgccygctagcataaagaatcccctttaaactctgtatcaaacaagacaataccaaaaagctactcataaaatcatatatactattcaattcccaatatatataaaattaaatatgaaaattcacctacacacagatatataacatatgtatataaaatactggaaggaaatgcagcattgttattccagaatatttgaattatgaatgtatgcatttttattttcatctttatgtatatcttcattttccacagtcaatacttcttatcattatttagtcataaaacatatacaagttgagcatccctaatccaaaaattcaaaatccaaaatgcttcaaaatccaaaactttttggattgtgca

SEQ ID NO: 308875 - DNA, 594 bp, Homo sapiens
acacatatttgtttgagtttttcacatgtatgaaaaagttgttagagaaatcagatcctgacttgaagcccctgacttccagttgcagcagtggccctagatgattgaactatcctattctcctgtccttactatatttatgaagacctcacttgatgttttaaaaataatttatccaagtactttaattagagatttttctctattgatgaaatatactttattttctcaactggaagttattcatcctttatttgtaaaggcaatgctactatcatttttttaaaagtaacacattaggcattaacaacaacagactcccagataaattttcttctagtttctcttgaacccaaatttctaaaaattcatttctagargaatagttttatttaatggaaatgggaaggcaggagaaggagtaggtctgaagaagaagagagaataaaaaaacaggcaaatattgccagtagctttcatttaacttaaaattctacaagatcgttggagagctggttaaataaattatttactggctgctcattagcagggtcctggatcacaccaagaaaagtgaaaaaggctttattaaac

SEQ ID NO: 308876 - DNA, 464 bp, Homo sapiens
gacatttttggagaccagggctctgaatggaattggacaatatgagtttgaacaaagtaagcataattaaaatgttgcattatgtgtactcctttgaaatattaaaatcagctatagttttgttattagagtgattacatcgcctttgtttaagttgtaatgaacactcttactgcaaagaatatagttcatttaagaactataaaacattgcaaaagaaattgtttttttaaagctcatactaaagtgccatttacaaaacaagtcacaagtagttgtctataccagtaaccatcataggggtaaaataacaagatttgataaccaagtattagatctgtagattaggagtgtaaataatctttcttttcagttgttgaatactacaaaaaaaaaaagagygtgaaatgaaacattttacgcatgggtaattatgaagagagacacaaatatggtgcaaattt

SEQ ID NO: 308877 - DNA, 565 bp, Homo sapiens
gcacccagttcttgcctatatcctgtaagagttaaagtctctggagaggtttcagagtggctgagtttcactatcctcctgtcctggatctaagccctccctatcagatggtggggagaaaaaggacctggcccccttggctttcttagtgggatgccagaagctggaattactttctcaccaaaactgcacataatgggtaacagataatttactgagcatttagagtgccataagaggataggatgctgggaaccaaatgccaaacagtgtccaagaacaaaataaagtatttatcatccaacatgctgtacctcaattatcagaggaagaaaccaatatcaatggcagtacctacacagcctctatgagccatgagaccctggaaagatgaggattgaagagaaaagagacacttcacgtattgatcacttgctctaggaagayattatggtagatgtagtacacgcattcactcatctgattcatgactacacaattaagtgggttatattgattttcccattttagagataaggaaacagaagcacaggaagattaaata

SEQ ID NO: 308878 - DNA, 541 bp, Homo sapiens
gagtttaattttaattacattcagtttgagccatataggtgtttgaaaatgtgggtatacagagaaggttacaaagacagagttaaaagttatttccacaaaaatggtaaatgaaaacctaacagtagagaagatcaccttgcaaataaattatgatggaaacatagaggatatcaattttatgggatggtcagagaagctcatgaaagaaattgagggataaaaatgaaacctggaaggtaagatgttcagaaattggagggtgtaaagtacaagaatgttttcagatgaaagaatcmattgacggtgtcaaatactgcacagagggtttatgtagaactggttgactccacttctacctgtccctcctctaagggcaggatctcttgccacacctaattgggttactgtttctctcctttattttctggactaataactgttaaatcctctgacattcttatatcctgatctaaggagaaacactcaggaaagcatcccctttggtatgataggtcaacagagttaaaaaaaaattaaa

SEQ ID NO: 308879 - DNA, 518 bp, Homo sapiens
ctagaacaatgactctcaaagcatggttctaggagcaacagcatctcctgggaacttgctagaaatacaaatttctcagttctcaccctagtcttacttaaggagaaataattctgggccgagtaacatgtattttaactagccagctacagaattctgatgctccctaacactggagaccattgatttagaacatttggaatgccaattgggagtaagktcaattgagaggccaaaatcagaccctgaaaagagttttggaagggatccctgaaagggagaaatccccattcccctccagtaagtctaacactttattatgagatgtgacattatagtgagagaggtggtataattgggaggggatttgagaatacattgtagtatggaaacaagagcttattaaattagcacattttcattgaaaacagactaattgccaaactcaaggaaacagagctaaacaagttagctgttgtatccactcatagaagttacactcgagatatcacatgctt

SEQ ID NO: 308880 - DNA, 585 bp, Homo sapiens
tattctaagagtggaattgtttggtttaggatatattcatcttcagaagctattgccaaatttctctccaaagtgaattttcaattcccacaagcagaatgtaagattctgtcactcctcactcttactcatatctggtattgttatgtattttaacagggatgaatatgatatgtaggcaagagtttcttcttgtgggattagttatgtttctttgattctcatgagatcaagaatatttccatatatttattggccattatagtttcctttttgtgaaaaatttatatcttgtratcattttatattggcttggcttggcctttatttcttctatttcttcctccttcttttcttctctatttctaggaacatttcatcagtcccttatcctttacaatgatatatattatacaatatatccccctttgtagctcatttttctcactttgttataatatctttaggagcacatttaaaaaaaaattttcatgcatttaaataatcaatcttcttatttatggtttgagtttttttttttaggttacttaagaaatagtatcctgtggatacaaatttattatt

SEQ ID NO: 308881 - DNA, 449 bp, Homo sapiens
taagtccagttacttaaacccctgtaaccagtcgtcaactctacacctagagtatatcctcctttttcttccttgttgcagaattccattttgttcaggcactcatggtgagatttaggaagagttttactaaaagggagaaacaattattctaagcattgtctcatctagatctgatttctagaaatgtggcaaccatcatgtgatagcaaaaggaactagcctaggacaggcttaaataccaaggatgcataaccaaaagattgaaagaacccaggtgcttgacrcatccttgagccgtcagattaactagcactggcatggcccctatctctgggttaactactatgtaaaatagtgctgctttctgttgttgaagccatttaagggtgtgcgattgctctgtttcttcctgttgaaagcacccaaataaactacacctttagtac

SEQ ID NO: 308882 - DNA, 449 bp, Homo sapiens
taagtccagttacttaaacccctgtaaccagtcgtcaactctacacctagagtatatcctcctttttcttccttgttgcagaattccattttgttcaggcactcatggtgagatttaggaagagttttactaaaagggagaaacaattattctaagcattgtctcatctagatctgatttctagaaatgtggcaaccatcatgtgatagcaaaaggaactagcctaggacaggcttaaataccaaggatgcataaccaaaagattgaaagaacccaggtgcttgacgcatccttgagccgtcagattaactagcactggcatggcccctatctctgggttaamtactatgtaaaatagtgctgctttctgttgttgaagccatttaagggtgtgcgattgctctgtttcttcctgttgaaagcacccaaataaactacacctttagtac

SEQ ID NO: 308883 - DNA, 544 bp, Homo sapiens
ttaaataaataaataaataaataaataaattagcatggtgtctggtatagagttccacacatgatagctagtatcactctaagtcaatgttccttttattgtaataccctgccttctagacaatttcaaagtataaccagacattaaattgtaaattacatttgagagaccaagatataatagatatgatattctaaagtaaggctacagaccaaaatgcaaagtgtcaaatgttttaggttttgtttgtttgtttttaataaaaagcagttccctgactgctgaactcctcttctatatctwaagtacaaaagcttcagaaagaatgttcaggaatatttacttggagagagagctgtgatgtgagttctgtcccctcccctaaacacatcaacactccaagtgggaggacatatttctcaccatctcaagtcaagagaggaacttgaaggaaactgatcagaggacagaatatgtgtggtctgaagtatttagcagggtgggaagagggacagacttgactggtttaacaaagaggaagggt

SEQ ID NO: 308884 - DNA, 531 bp, Homo sapiens
tgaattttttgcctttgacagatatttagaaaaaggggatatgaaaaagttgttttaaataaaatatcttatttaattaaaatggatgatcagatatcttaaaatacatatcttctgagcagcatggaaggtggaatttagcttgagtaaaagataagagataaaataatacaggagacatcrttagtattaattcaatatttgaagccatgatatttaatgaaagcactatctgaaaaagccaaggagtatgaaactaacaattactgttggatttttcctgagggagatcaatttcaacagggaagaagagaaagatgcccacttgcaagggctcagggcgcaggagagaccgtggaagtttatacttcttggctatgtttggctctaaacaaaaaagtgatgaagataacatttctgtaaatgtcagcaaagtcacattgaaattatctttcagtaagaggcagtgattaaaaagacagaagataaatatcataacacgaatccttaatagaaggaaagattaagaat

SEQ ID NO: 308885 - DNA, 531 bp, Homo sapiens
tgaattttttgcctttgacagatatttagaaaaaggggatatgaaaaagttgttttaaataaaatatcttatttaattaaaatggatgatcagatatcttaaaatacatatcttctgagcagcatggaaggtggaatttagcttgagtaaaagataagagataaaataatacaggagacatcgttagtattaattcaatatttgaagccatkatatttaatgaaagcactatctgaaaaagccaaggagtatgaaactaacaattactgttggatttttcctgagggagatcaatttcaacagggaagaagagaaagatgcccacttgcaagggctcagggcgcaggagagaccgtggaagtttatacttcttggctatgtttggctctaaacaaaaaagtgatgaagataacatttctgtaaatgtcagcaaagtcacattgaaattatctttcagtaagaggcagtgattaaaaagacagaagataaatatcataacacgaatccttaatagaaggaaagattaagaat

SEQ ID NO: 308886 - DNA, 602 bp, Homo sapiens
ctagttaatgacaattgagattatttccaattttggcaataaagctattagaaaaaaatatgcatagtttttctgtgaatacagttgcccttcatttccatgagttttgaattcatggattcacacaaccacagactgaaaatataacaaaaagtaaacaaaaaataaaacaatttaaaaatgcaaataaaaaagcaaagtataatgacaatgtacatagcatttacattgtattaggtattataatctaatctaggcaaccaggcaatgkcagtattataatctaatcatctggggaatctagagatgatttaaagtatacaaaaggatgtgtgtaggttatatttaaaccttagaccattttctatgaggtacttgagtacctgtggattttggcatctgagggggtcctgaaaccaattctccatcaataccaaaggataactacatatgtttctatttctcttgagtaaatcctagaagtgagatttctgggtcatatgataagtaaatctttaactctataagaaatctccaaactgttttccaaagtatccattccgcatttccattagcaatgtatgagagtcacatatgtggtg

SEQ ID NO: 308887 - DNA, 497 bp, Homo sapiens
attaaacttactgattttcatattgacccaatcttgctttcctatgataaaccgcattgtatcaggttctattattatttgaatgtatttcttaatttaatttgcttttttgttttttgagacggggtctcaccctgttgcccaggcttcagtgcagtggcacaatcttgactcactgcaacttctgcctccgaggctcaagcaattatcccagcctcccaagtagctgggattacagtgcataccaccatgcctgactaatttttgtatttttttcttttgtagagataggggttcattgtgtttcccagacaggtcttgaactcctgggctcaagtgatccacccacctctgtctcccaaagtgctaggattacargtgtgagccactgtgcccagcctaatttgcaaatttttaaaaagaatttttgcatcagtgtttatgagggatattggtttatagcattgtcaagtagatacatagtaaaaatcacaaac

SEQ ID NO: 308888 - DNA, 541 bp, Homo sapiens
tttacatactgtaacagagtatatatttgttcataagccttcattctctctccaggcttgccatggtttcccaggggacactgtatgcttccctattccactgactttaggcttggccatgtgaccagcttgaccaatgtgatgtgtaccagttctgagtggcagttttgaaagacatgacctatttctttttgcccttttgtagtcctgtcatcctgagatgaacagtttcatcctgctcatccttagatgaacagattccagataattgcgctacttcagcttaaatctggaataattggattctgaattggattggacacatggaacagatatgaaccaaagccaacccagcctcgttgagccagagcccacctgcagaawgtgagcagaagagaaatgtttgagagatgctcattatgcagcattatttcaacaaaacctgactaatacacatacacaatatgatttatcttcacaacaagttgatgaagaaggtactgctagcctcatttcaaacaaggaaaatgaggtacagaga

SEQ ID NO: 308889 - DNA, 635 bp, Homo sapiens
tgcctcatgactgaaatttttaaaataaaaagccatgagatttcattgcatctatctgtatgtttatgtatatgtatatatgtatctttgtatcttatgtagatgtgatatttttctacctacaattgtattaccaaatgaaaatactcaaattgatttagggataagtgagtgcttaaacaaattaagtattcatcaaattctcagaaacgtagaaactgacctatttttttttaatgtycatgtgatacggagtaatgtttggtaaataaaagctaattttaaaattgttggtaaaataaaataggaatgtctttagaattaatagtattaaatataatacagacatacatttttacctgggtttgttggtcaaataggtttgtattgtatctgctagatgattaaggccataaaaccatgaattcaacctaaaatcagaatgcacaataaaaatgaattgtttaattgcttgatgcatgtaagttgcaaaagaaaaataaagaaaaaaatgaggttgtaaaagggtgaaaatcttctcttctgtgggtaaagctgattgagatcagatagactcatttatagtattttattaaaaattgtttttgtagtacattgatgcaaaagtaaaattt

SEQ ID NO: 308890 - DNA, 494 bp, Homo sapiens
gtgaagtgactgtttttgtaggcagcatgtagttaggtcttgtttttttaaaaatccattcatccactctatattttttgattggagaatttagtccatttatatttatttttattatcgataagtaaggactaactaccaccattttgttatttgttttctggttgttttgttggtccactcttccttttttcctaacttcctttgtataaaagtggtttactttgacagmatgttttaatttcttgtttttcattttttgtgtatctactataggtttccattttgaagttaccatgaggtttgcaaataacataaccaattactttgaggacaactaacactcatcacaaagtgtagtttaaaaaaaaaaacaagcaaagagaaaactaacacttctatacttcatcaacatctcccctaaatttggacttttcattgtatttatatctttttacattgtccatctcttaaaaattgtgttatttattgtt

SEQ ID NO: 308891 - DNA, 494 bp, Homo sapiens
gtgaagtgactgtttttgtaggcagcatgtagttaggtcttgtttttttaaaaatccattcatccactctatattttttgattggagaatttagtccatttatatttatttttattatcgataagtaaggactaactaccaccattttgttatttgttttctggttgttttgttggtccactcttccttttttcctaacttcctttgtataaaagtggtttactttgacagaatgttttaatttcttgtttttcattttttgtgtatctactataggtttccattttgaagttaccatgaggtttgcaaataacataaccaattactttgaggacaactaacactcatcacaaagtgtagtttaaaaaaaaaaacaagcraagagaaaactaacacttctatacttcatcaacatctcccctaaatttggacttttcattgtatttatatctttttacattgtccatctcttaaaaattgtgttatttattgtt

SEQ ID NO: 308892 - DNA, 595 bp, Homo sapiens
atgatgataatttaaataaatatacagcctatgattctaataaaagggtctgtttagagatgtagatttgggagtcattgggggatagcttatagttaaggctttttgtgtcaaattatatcaatttcctttccttccatgtaaaatgtaacctaattttcacccatcctaactttctttatactagtctaacaagcctttttcctttccagtatcgcatattttcacaacccgtatttcctaatgcagcctctatagccacatttaactcacatctcatcttcaatatgtcgaccctatgtctaaattgtttcttgtgtctgattttttattacaggtgtagacatcrctatttactgcttttccttagctaaaaagctcattcatcattgattctttcattgcttccacctgtggcattcaactggttgtcagcttttgccatatatggccttacagtgattctcatatctaacctcctctgtttttctcatgacctcccaaatcttaagcttgagtctggtgccttagaccactcagccatcctgacacttgacctctcaaatcttattcagaattatatagctaacagttg

SEQ ID NO: 308893 - DNA, 593 bp, Homo sapiens
caaattcaatgcaatccccatcaaaataccaccatcattcttcacagaattagaaaaaaaattctaaaattcatatggaactaaaaaagagtctgcatagacaaagcaagactaagcaaaaaacaaaacaacaacaacaaaaaacaaatctgcaggcatcacactaactgatttcaaactatactgtaaggccrtagtcgccaaaacagcatggtattggtataaaaataggcacatagatcaatggaacagaatagaaaacccagaaataaacccagatacttacagtcaaccaatcttcaacaaagcaaacaaaaacataaagtggggaaaggacacctttttcaacaaatggtgctgggataattggcaagtcacatgtaggagaatgaaactgggtcctcatctctcaccttatacaaaaatcaactcaagatggattaagggcttaaatctaagacctggaactgtaaacattctagaagataacattggaaaaacccttctagatattggcttaggcaaggatttcatgaccaagaacccaaagcaaatgcaataaaaacaaagataaataactgggacctaattaa

SEQ ID NO: 308894 - DNA, 559 bp, Homo sapiens
ttttgcattggtgtgtctacctattgtggcacaatttgtttaaaatagctattctttttaccattgaattattttggcacccttgctgaaaatcaacttactgtaaatgtaagggctcatttctgaactcccaattctattttgttactctatatgtctatacttatgccaacaccacactatcttgattgctatatgtttgtgttaatgttgacattgggaagtttttttagtctgttgagctactataacaaaatatcatagattgagtgcctaataaaaaacacaggtttatttctcacagtcccrgagccttggaaatccaaggtgccagcagattcagtgtttggtgatggctggatttctaatagatagcagccttctccctgtaaccacacattgtggaaagggcaagggagctctctggggtatcttttataaggctgctaatctcatccatgaggactctgcctataacctaatcacctctcaaaggctccatctaatactattatcttagtgatcaggacatcaatgtatgaatcagaggaggacataa

SEQ ID NO: 308895 - DNA, 559 bp, Homo sapiens
ttttgcattggtgtgtctacctattgtggcacaatttgtttaaaatagctattctttttaccattgaattattttggcacccttgctgaaaatcaacttactgtaaatgtaagggctcatttctgaactcccaattctattttgttactctatatgtctatacttatgccaacaccacactatcttgattgctatatgtttgtgttaatgttgacattgggaagtttttttagtctgttgagctactataacaaaatatcatagattgagtgcctaataaaaaacacaggtttatttctcacagtcccggagccttggaaatccaaggtgccagcagattcagtgtttggtgatggctggatttctwatagatagcagccttctccctgtaaccacacattgtggaaagggcaagggagctctctggggtatcttttataaggctgctaatctcatccatgaggactctgcctataacctaatcacctctcaaaggctccatctaatactattatcttagtgatcaggacatcaatgtatgaatcagaggaggacataa

SEQ ID NO: 308896 - DNA, 515 bp, Homo sapiens
gattatacatttcattttattttcctgtggaaatgtgtccttgctttgtaaaaaatagcttttcaagacttgttttggttgactcttgattcacaggaggtcgagaaggcaaaattgaattttaaaatgctgtttctccttggcattacacccaaccagataaaaagtagaacactgacttaagaagccagctgggtgtctgaataatgccacacagcacatacttgacagagttacctccattttgtgttaatcatttctaaggaaaaaaaaaataggcttaatttcattggagcaaactgatagaataaagtaacaggtttttttttttttttgacagtggttattcataacctcactttcccttctataaaccccaatttcaataccttcctctgtttgtcagcaaagygtttttcaatattgcaacaggatattatgcaaatataaatcacactggattggactatttccttagcagcaaaagcaatgttcttgctgggatgataagtgta

SEQ ID NO: 308897 - DNA, 502 bp, Homo sapiens
cttggctgttgtgaatagtgctacaataaactaataaaaatataatatgaaacgcaagagaaaagcacataattttaaatttcctaattggcatcttaaaacataaaaagaaacaagtaaaacaaatttttataatttatgtaacccaatatatcccaaatattatcaatttaatatgtaagagagagaataaatcattaatgagatattttatattctctaactgtactaagtctttaaaatctggtatgtattttatacttacagcacatctcagcttaggctagtgctatttcagatgttcaaaagctacatatgactaggggctaccatgatgaaaaacataaatctaagggaaagaactttgttccactcactgttcactatgggcctcagactagtaaagtaacaagttaatttgttgcttttttttctcagtagagatacaartaaggtctgtccagtaggaaagagaaacaccagtaatcattttgggttctaa

SEQ ID NO: 308898 - DNA, 509 bp, Homo sapiens
ccctgctaagtcagtttagccagaacacccatctttgatatcagataatcctcaatatctgatctggttcctcattcttaccacccgctaggtgatgcctgatcactctggcctgtctttagtaggaattcattaggtccatttagtcagaaccccccatcattgatgtttccacttagtaattttccatccattgacccccacactgctttttgaatacaaattcccacttgcccatgtgttactgggagtggatcccaatctgtctccccagctgcaagaccatgttgcagtggtccctatacctatcacgatagtcctgaataaaccatttttattgtgctttaacaagtattattaaataatttattcttaacactcaggaaactcaggatatttgggtgattttaaaaagagaataatttacccaaatcgataggtgttgcagacacagkctcatgacgagtccttggtttgatcttctagcttcaagaggcttttctaagtcc

SEQ ID NO: 308899 - DNA, 647 bp, Homo sapiens
agtctctggccttctcaacacacttagttatgttctttattcatcatcgaatgtataacttttaagaagaggtcataaaagacaaatacttgtttttttaagttgctgaataactaagaaaaataccaaaaacctgaaaaatccatgacattatgcaaaattatacaaatgcaaatattctttcttattctgaaaggatttgaggcagcattatgattcattttatttgttcttggaataactaaatttggtatgacacttttaaacagtatatttaattgtcattttatgtcatattgtgacacaacaaactttgagttttctttagtttttaaaaaygaagtgtatatttttaccttcacattttttgcctgcttcttgtaaacaagaaaatgctatcactgttatattaaaacagaacttactaacagcatggaaaatagtaaattacatgtgactgaagtttattcaataaagtttattctcctttacttttttggtttcttttctaaaaatgagtgttttgtatagttattcagaacaatggaaagcactaatagtggtttggcttcatcagaacactgaaggcttgcttgaattataaagcaaattttctacccttcaattatggcgtgtttcctgatttg

SEQ ID NO: 308900 - DNA, 632 bp, Homo sapiens
cctttaaattaatgtaaagggcagttgtaagttttaatttactacaacctgctcagcccaatgtatgtgctattctcatcataaatttaactatggttacattgcttgagtagataattagaacgcacaccattacccttacattgagtacaatatgcattttgttttcagccatacttgttttaacagtctaataagtaaatgaaatttacaatgcagttttcatcaaggtgcatacagtgatattccatctcagcaacggaggatgttggagattatctggttccaccccttcattttgccagtaggaaaattgctccaaagaagaaagggaatttccccaaggtcacacagctcctgagaagcaagctgaggctggaactcttgtgtcctgctcccaagttaattctctttcctctttattttatatcaaaatagagaaaatgtgaaaacattaaataggagaactcaagtttctttttctcatccactcacagtttcttttaaataatttgaaacattctgmcaactttcccatggagtataaattatctgctgaataaccaagggatttgttgaagggctttgggatagaaatttcttcctttctttgcatgctctctaggctaatt

SEQ ID NO: 308901 - DNA, 643 bp, Homo sapiens
tttatgtattgcacagttggcttcttcttcttctttttttgacagccagggtttcactctgtcacccagggtggagtgcagtagtgctattgtgcatggctcactccagacttgacctcctgggctcaaacgatcctcccacctcagcctccccggtagctgggactatatttgttcatcaccatgcccagctaaatttttattatttgtagaaagtgggtctcccaatgttgcccaggctggtctggaactcatgggytcaagtgatcttcctgccttggcattccaaattgctaggattgcaggtgtgggtcaccgcacccagccaacttcttaatgatagtggctctcctttcacacttttccgtatgtttccctagcacctagcaccacttattaaatagattagctatctggtttattaagttaccttatcgttagatgtgaaggaatattatttgttcttgatacacatgttccccaggaaagcagcacaaagttttattttttgtttttacaaaagtctactttgcaaagatgtcaaacataataatcagaagatctgtgagaacacaaatgaggctacagtaccatggttataacttctcaatatcatcccctcttctcttcctatccaccctgg

SEQ ID NO: 308902 - DNA, 642 bp, Homo sapiens
acttccacttaagcaacttatacttaagaatggtataattataactacataactatggtatcctataactatataactatataataatggtataattataactacctaactatggtatcttataactacaatttaggggaaaaaatcrtctagctgaaatgtgaaagatagagataatttgtgccaaattggccttgagaaatcaaattgtagatttttttccccaaaggtatgcatgagtaaaaaaaatcagtagaagctgctaatcagttgaatatatgggatatgataaaaagggatgttaaaaatggcagccaaaaaattaagagtgactaaattcattcaaaattaactggattggatattgctggggtatggggaaaagggatgagagtgttaagtgactgcaagatttctatctttggcagaggaaaagtaggattgggtttttcttgagtggggttgatgtcaggtgggtgtgacaaaaatcacaggaaggcaagagaatttatgatattggcaaaagtgtttttacaatgttgaaatatgaaatctaaactagataaggatagaagtgaagaagacagaggagtaagggtttagaacaattttaaaatagcaataaactagatttcctgatgg

SEQ ID NO: 308903 - DNA, 642 bp, Homo sapiens
acttccacttaagcaacttatacttaagaatggtataattataactacataactatggtatcctataactatataactatataataatggtataattataactacctaactatggtatcttataactacaatttaggggaaaaaatcgtctagctgaaatgtgaaagatagagataatttgtgccaaattggccttgagaaatcaaattgtagatttttttccccaaaggtatgsatgagtaaaaaaaatcagtagaagctgctaatcagttgaatatatgggatatgataaaaagggatgttaaaaatggcagccaaaaaattaagagtgactaaattcattcaaaattaactggattggatattgctggggtatggggaaaagggatgagagtgttaagtgactgcaagatttctatctttggcagaggaaaagtaggattgggtttttcttgagtggggttgatgtcaggtgggtgtgacaaaaatcacaggaaggcaagagaatttatgatattggcaaaagtgtttttacaatgttgaaatatgaaatctaaactagataaggatagaagtgaagaagacagaggagtaagggtttagaacaattttaaaatagcaataaactagatttcctgatgg

SEQ ID NO: 308904 - DNA, 580 bp, Homo sapiens
tgagtagctgttcacccaacccacttattccgcttcctgcacaaatagcaagccttcattcctcaacctgtcttgcagttttccatgaacaggtgattgagttctagccaaagactgactttattttaggtagcgtggttttctttcatattgttattgttgaactccaattccatttttatttttttaattaaaaaagagctattacttttataaaaacatacatgtatttttattttatttattataaatattttatctgtgaaaaaagttaaaaagaataaaaaaaactcagaaataactattgccaacatttggggaatatagtctcaacatttctctgtaaagagagagataaaaagaaagaaagaaagagaaagaaaggaagaaagggaaagaaagaaaaaaagaaagaaagaaaagaaagagactttcttttacccttgctatctctgatctctctagcattcagtataatctccagtcttctctgttacctaggaggctagatcactgttstaaggatttggggccagttgatttaccaatgctttcaactctcttacctaattaattaatt

SEQ ID NO: 308905 - DNA, 580 bp, Homo sapiens
attacttaattgttaattcaagaacacacatatggcagtaaaagaattgataatctatacatccatggggaacaactttattaactaggatatagtacttatatacagtttattttgcttgagtcttacatactcctttcatatcaaaaacagaattgtataccacaaccaagtggggtttattccaagtacacaagaataggatagacaattttaaagacctttacatattcttgttkaaactgaaaatctctcatatactattaatttttatgatgttgagaatatttactatgtctatcagccatttgtacatagtgtgtgtgtgtgtgtgtttgtatttaaaagaaaaattgctagtcaatggaaagatgataacatttgcatatatgttattgataaaggatatgtaaccaaactaaacacagtaagtcagtaagaaaaagacaaataatccaataaaaaagatgtttttgatataatttatttctccactgttcagatttattgaccacatatacaaaatatcacctcatgcctggtgctgtgtctaattaatgcctgtaatcccaacactttg

SEQ ID NO: 308906 - DNA, 492 bp, Homo sapiens
gatcccaagagacaacccataggccacccctgtgaggcaggcttccagatcaattgaacagccttgctcccatgttccagacttgagaagcattcctatgggccactcctggcaaacatgcccagaggctggatgagcagctatgcttccacctctttagcytgagaaacagccttttgggctactgtcagtagacataaccctaggctggtcaggaagccttgcaccccacattccaggcctgagaagcagccccatgagcccatcctggcagacctgcccccaggcaggcccagcattctttaaccatcatcgggagcctgagaagaaactcccaccaggacacccccagccaagaagcagtacagtcaagtctgaggcttgagaaattgccctacaggctgctcatggcaggcatgccaccaggatggctaaacaaccatgtgcccatgctcctggtcatagtaacaaccttgtggccccaagttgtgg

SEQ ID NO: 308907 - DNA, 492 bp, Homo sapiens
gatcccaagagacaacccataggccacccctgtgaggcaggcttccagatcaattgaacagccttgctcccatgttccagacttgagaagcattcctatgggccactcctggcaaacatgcccagaggctggatgagcagctatgcttccacctctttagcctgagaaacagccttttgggctactgtcagtagacataaccytaggctggtcaggaagccttgcaccccacattccaggcctgagaagcagccccatgagcccatcctggcagacctgcccccaggcaggcccagcattctttaaccatcatcgggagcctgagaagaaactcccaccaggacacccccagccaagaagcagtacagtcaagtctgaggcttgagaaattgccctacaggctgctcatggcaggcatgccaccaggatggctaaacaaccatgtgcccatgctcctggtcatagtaacaaccttgtggccccaagttgtgg

SEQ ID NO: 308908 - DNA, 492 bp, Homo sapiens
gatcccaagagacaacccataggccacccctgtgaggcaggcttccagatcaattgaacagccttgctcccatgttccagacttgagaagcattcctatgggccactcctggcaaacatgcccagaggctggatgagcagctatgcttccacctctttagcctgagaaacagccttttgggctactgtcagtagacataaccctaggctggtcaggaagccttgcaccccacattccaggcytgagaagcagccccatgagcccatcctggcagacctgcccccaggcaggcccagcattctttaaccatcatcgggagcctgagaagaaactcccaccaggacacccccagccaagaagcagtacagtcaagtctgaggcttgagaaattgccctacaggctgctcatggcaggcatgccaccaggatggctaaacaaccatgtgcccatgctcctggtcatagtaacaaccttgtggccccaagttgtgg

SEQ ID NO: 308909 - DNA, 492 bp, Homo sapiens
gatcccaagagacaacccataggccacccctgtgaggcaggcttccagatcaattgaacagccttgctcccatgttccagacttgagaagcattcctatgggccactcctggcaaacatgcccagaggctggatgagcagctatgcttccacctctttagcctgagaaacagccttttgggctactgtcagtagacataaccctaggctggtcaggaagccttgcaccccacattccaggcctgagaagcagccccatgagcccatcctggcagacctgcccccaggcaggcccagcattctttaaccatcatcgggagcytgagaagaaactcccaccaggacacccccagccaagaagcagtacagtcaagtctgaggcttgagaaattgccctacaggctgctcatggcaggcatgccaccaggatggctaaacaaccatgtgcccatgctcctggtcatagtaacaaccttgtggccccaagttgtgg

SEQ ID NO: 308910 - DNA, 593 bp, Homo sapiens
taagtttaatgtctctaataggttgtgggtacatatgattaacaaattaaattaagagagtactcttccatttttaatttataaagaatttttttcatcatgttaagacaatttaatttttcatgtatttaatcatcttttaagatggtttgcttatttaatctgtaaatatatttgattacacgtgtctgttctactttaaactttgcttggttataatacatgtatcatatttttaaacttaatttaccaagtattttgttaagaktatttattggaaacatcattaggctcagactctgcttttttcaagggtataagaaggtcagagggtcaaagacatatgtctaaacgaagcccacaatcccttatgcattacctgagctctcacaatctctgaatgcctgtctgcaacggccttgatcatactaccagggtttcgacagccttttctcttgtctttcttcctgaagctgaactattttatgggtatgtatgcatgcctggatacaagagcctgtacctaaagtgtagctaatttggtggtatgtagacaaagcttgcacatgcaaacatggatgttggtgataagc

SEQ ID NO: 308911 - DNA, 593 bp, Homo sapiens
taagtttaatgtctctaataggttgtgggtacatatgattaacaaattaaattaagagagtactcttccatttttaatttataaagaatttttttcatcatgttaagacaatttaatttttcatgtatttaatcatcttttaagatggtttgcttatttaatctgtaaatatatttgattacacgtgtctgttctactttaaactttgcttggttataatacatgtatcatatttttaaacttaatttaccaagtattttgttaagattatttattggaaacatcattaggctcagactctgcttttttcaagggtataagaaggtcagagggtcaaagacatatgtctaaacgaagcccacaatcccttatgcattacctgagctctcacaatctctgaatgcctgtctgcaacggccttgatcatactaccagggtttcgacagccttttctcttgtctttcytcctgaagctgaactattttatgggtatgtatgcatgcctggatacaagagcctgtacctaaagtgtagctaatttggtggtatgtagacaaagcttgcacatgcaaacatggatgttggtgataagc

SEQ ID NO: 308912 - DNA, 580 bp, Homo sapiens
gctaccgggctctgggctggtactggggtgtgtctgccaagactcctgtgatgtcatccatcttcaggtctctcagccctgtataccagtacctgctctggggaagataacagtggtatgaagtggatctgtgagggtccttggttgcattttttttattgtgctagttttcggttagtttgactccagccagaaggtggcactttcaagacagcatcagctgcggcagtataaggaggatacaaggttcccttagggttgcctgggtatgtttcttaggtggtgggcagggccataaagctcgcgctagattatatcctttgtaattggctaccagggcaggtagagaaagactatcaggtgggggcaggkttgggtgtgtctgagctcagactcttcttggacggggcttgctgaggctgctttgaaggatgggggtgtggtccttagcccaacggagttaagttcccagggggtattatggctgcctctgctgtatcatgcaggtccgcagggaagtgggggaacaccagcagttagaggcctcatccagcttccatgcagcctgaaaggccagtct

SEQ ID NO: 308913 - DNA, 591 bp, Homo sapiens
ttttattgttaacaagactgctgcccaggttattttcaaggggctgggagagtggtgaaaggagtaaggtcatctgttttatttgttttaatgcctgaatgctcacattatttttttctgtgcaaaaatatttaagatttaatcagtatgtgtctacatatgcaatatattttttttctgaaatatatgggaatgaaatttttacccgctttctctccttttttcattcagttcaggattagttccttctcttacagttttgactattamtttttcatttgtatggtcctttattagttccttataatttcaaaattctgtatctaaatgttagcatttgtacctataattctgcctatttctctagttacagctctgtctttggctaatcacagatttctttttaatgtctgtattcttttgcatgattttggagaaaattttctaacatgtctccaaatcccaagtgtagattctttacagtttctgaaaatcacatttgctcaattgtagcaattttaaattgagatcaaatgtaatataaatgttcacaggatttcaattaaaaacaaaatattttcaaaggattta

SEQ ID NO: 308914 - DNA, 533 bp, Homo sapiens
cttggcaagatctgaccattttattcagtaaaggcctggcaatgaataaaagatgtttgtttgtttgtttttttyccacagtatttaagtagctaaatttttccttccatgctaaggttctgattaagttacctcctagtaatattagttttgatttccaaaataatgtcgaacattattttccatttccgttaggctagccaaccttttgggttagacaaaagattctctagctgcttttaccaggtgcacgcataaattaactcatcctcacgaaaagtcactctttaaccatatgctaacaataaagttagccaatttgttatgtgtgtgtctgggagattgtagaactaagaagcattagaatgaattaagataacatcaagaacaatgaaaaatccttaccattcaatttcttaagaaaagtaactgctgatactgttctttgggcaaactctgtcttaagtctgcagattatacacacacacagacccacatttcttctgtggacagttatattgccaagagaatac

SEQ ID NO: 308915 - DNA, 533 bp, Homo sapiens
cttggcaagatctgaccattttattcagtaaaggcctggcaatgaataaaagatgtttgtttgtttgttttttttccacagtatttaagtagctaaatttttccttccatgctaaggttctgattaagttacctcctagtaatattagttttgatttccaaaataatgtcgaacattattttccatttccgttaggctagccaaccttttgggttagacaaaagattctctagctgcttttaccaggtgcacgcataaattaactcatcctcaygaaaagtcactctttaaccatatgctaacaataaagttagccaatttgttatgtgtgtgtctgggagattgtagaactaagaagcattagaatgaattaagataacatcaagaacaatgaaaaatccttaccattcaatttcttaagaaaagtaactgctgatactgttctttgggcaaactctgtcttaagtctgcagattatacacacacacagacccacatttcttctgtggacagttatattgccaagagaatac

SEQ ID NO: 308916 - DNA, 533 bp, Homo sapiens
cttggcaagatctgaccattttattcagtaaaggcctggcaatgaataaaagatgtttgtttgtttgttttttttccacagtatttaagtagctaaatttttccttccatgctaaggttctgattaagttacctcctagtaatattagttttgatttccaaaataatgtcgaacattattttccatttccgttaggctagccaaccttttgggttagacaaaagattctctagctgcttttaccaggtgcacgcataaattaactcatcctcacgaaaagtcactctttaaccatatgctaacaataaagttagccaatttgttatgtgtgtgtctgggagattgtagaactaagaagcattagaatgaattaagataacrtcaagaacaatgaaaaatccttaccattcaatttcttaagaaaagtaactgctgatactgttctttgggcaaactctgtcttaagtctgcagattatacacacacacagacccacatttcttctgtggacagttatattgccaagagaatac

SEQ ID NO: 308917 - DNA, 574 bp, Homo sapiens
ctcagcatgaaatcaaatggccctgatagctatctatagaactcaccacccaaaaacaagagataaacatttgtctcattgccacatggcacatacattataatcgatcacaaaactagatatgaagcactcctcagcaaaygcaaaataactgaaattataacaaacagtttttcggatctcagggcaatcaaattctaagtcaaaacttagaaattcactcaaaaccatataattacatggaaactgaataacctctctctggtaaataatgaaattaaggcagaaatcaagaagttatttgaaactaatgagaacaacgatacaatgtaccagaatctctgggatatagctaagtcagtgttaagagggaaattaatagaactaaaagcccacatcaaaaagttagaatgctttcaagttaacaacctaacatcaaaactaaaagaactagacaatcaagggcaaaccaatctcaaagctagtggaagataagaaataaccaaaatcagagctgaacccgaaagagatagaaacatgaaacaaccttcaaaacagtctatgaatccagtag

SEQ ID NO: 308918 - DNA, 574 bp, Homo sapiens
ccaattgcttcagcaacaggaactgaaaatggaaacttatttacagagtaaaaagtagagggctggaattgtgtgcatccagtaatataattttcatataatttttatttagaaagatttaagtcatttcatgatatttagaagtagatatgtagagaatgtagtcaactcagcaataatctcatagaaatacaaaatacactaatagagtttcccatgcatatttaggttctcatacayggagaattaaatacaaagtaataaaaaatgactataaagtatacagtgaatatgctgtgccaatgtagttctgcagcataatatatccataaattttcttgcctttattgaacttacataatttctcctaacatttacttgagatgcattcttgtgatttatttaaagaaatgatatttgtggccaaaaattggaaagtgatatttcgctttagtacataggtaattaaccactgaactaaaggtctgatcatttatccactttcacattaaagtgcaaacactgaacaaaacataggtaagagatgtttcccatttcaagtggcaaaatttct

SEQ ID NO: 308919 - DNA, 386 bp, Homo sapiens
aggctcctgaaccattgctccagacaaatgcccttgaagttggtcaggacagattttgatccttaagttatgagtatgtgtatttkatccttaaggtacgagtatgtgctctgaagccaggcttcatgtgaaagctttcccctggctggaaggtcatttttctggctccttgttctgatttgggattatttcctgattccctgggctggaagtccttcttcctagctggctgtgaggccactctattccctctgttctctctattggatcctgcttctcccatgggtacatctctgtcatgcaaagcctttcttttgaacccctactgatgacatgctctgccaactctgtctactccttgttatgattttgccttccagttctct

SEQ ID NO: 308920 - DNA, 546 bp, Homo sapiens
caatatcctcaccctaatgttataattaaatctgactcaatatggttacaacagtcatagatgaaaaaaatatatcaagacctttagctagttggtgtcaccagggtttcaattgacttagttggtcccaatagcaaattattattttcaagttttatatcacaatgggaaaaatttctgacttcaatttcctatgtttcttgagataatgtgttagtccattttcacactgctgataaagacattcccgagactgggtaatttaaaaaaagaagtttaatggactcatagtttcacatggctgrggaggcctcacaattatggtggaagacaaaaggcaagtcttacatggtgtcaaacaagagaggataaagagtcaagcttataaaaccctcagatcttgtgagacttattcactaccacgagaacagtatgggggaagctgcccccatgattcagtatctcccaccaggtccctcccacaacacctgggaattatgggagctacagttcaagatgagatttgggtagggacacagccaaacc

SEQ ID NO: 308921 - DNA, 588 bp, Homo sapiens
caatataggtctaatagcaacaagtactaaattctgacttacatattttactcagagaagggtattttgcttattttttaaacaactgaaataatgttgtttggttcttgtatatttctaatgtagtatttgtaaactagattgtgtaaatgtttcattttccagctttactgagatataaccttaactaaaaattgcatatatttaagtcatatagcatgtttcaatrtatgtgtacattgtaaaatgaataccacaatgaagctagttgaaatactcattgtctcacatagttaccttctgtgtgcatgtgtggtgagaatatttaagatctattctctttgcaaattttgagtatacggtaccttaaatacatgctgtaaattaagtctacagaactcattcattttataactcaaagcttctaccctttggccaatatctcctcattttcttcacctgctaaccttggataaccacccgtctactctctgtttctatgagtttaacttttatattccacataaaactgagaccatccagtatttgtctttctgtgtctggcttatttcacttaacataatgccc

SEQ ID NO: 308922 - DNA, 588 bp, Homo sapiens
caatataggtctaatagcaacaagtactaaattctgacttacatattttactcagagaagggtattttgcttattttttaaacaactgaaataatgttgtttggttcttgtatatttctaatgtagtatttgtaaactagattgtgtaaatgtttcattttccagctttactgagatataaccttaactaaaaattgcatatatttaagtcatatagcatgtttcaatgtatgtgtacattgtaaaatgaataccacaatgaagctagttgaaatactcattgtctcacatagttaccttctgtgtgcatgtgtggtgagaatatttaagatctattctctttgcaaattttgagtatacggtaccttaaatacatgctgtaaattaagtctacagaactcattcattttataactcaaagcttctaccctttggccaatatctcctcattttcttcacctgctaaccttggataaccaccygtctactctctgtttctatgagtttaacttttatattccacataaaactgagaccatccagtatttgtctttctgtgtctggcttatttcacttaacataatgccc

SEQ ID NO: 308923 - DNA, 562 bp, Homo sapiens
gcatgaacttttaagacttttgatacaagttgctaagtagctctccagaaaagttacgacaatttacctttccaccatccaacactttaaaacagcacccattttcctccatctactcaacattaagcatttttatttttttctgaattttgctaaccgtatgcacagaaaatggtatgtcattaaattttcatttttaactgctaacaaagttgaatttgtttgaactttttcttatcgtttgttggtcatttgtatttcttgttttgtaaattgcttgatcttattctctgccyattattgtcacatactggagtatgcactttttcttattaatttataagaacacattctatattaaggatattattcatctggctgtcatctatatttcaaacattatattttgctgtttgccatttttatttcaagattttccaatttattgcatataactttataagaattttttctaagaatctctattacactgtagtaattgcttaatttttctaattctaaatttttattatttgaccttttctattgcttatttttaata

SEQ ID NO: 308924 - DNA, 638 bp, Homo sapiens
tgatgatatcttgtgctattgcagtgctgggacaggaatcctccttttgctcagtgtaaccatgttgtctatgctacccgcccattagtcacttagtggtcatgtaggttatcagattgactgtcatggtgcttgtgttcaagtgacccttattttacttaataacagcctcgaagcacaagaatagtgatactggcatattcctatatatgttctatttattattagctattgttgttagtatcttactatgctaatttatcaattaaaatttatcatatatatatgcatacatacaatwaacacagtacttatagggttgggtactatctgtggcttcagttgtccactgcagtcttggaatttatcctttaggagaagactaatgtgtaagtatttactgagcacctactatttgtcagacactagtatacatactagtgataggtgaacatgtcagtgaacaagtcaagcaatatcactaattttgaggagcttacattttagttggatgcgatgatatggagataaattataaacaagcaaataggtacacaaacaggataatttcacacagtaatgaaggtcatggcaacatttaaacagcataatgtaatatgaccatctcagcgaatggt

SEQ ID NO: 308925 - DNA, 434 bp, Homo sapiens
aatgtgcattctgctgctgttgaaaggaatgtcctgtatatatctgttatgtccatttagtytaaagtgtggtttaagtccaatatttccttattgattttctgtcttaataatctgtccatttctgaaagtactgtagtgaagccctggtattattgtattatcatttctctctctctttggaagtactaatttttgcttagtatatttaggtgctccaatattgggtgcatatatatttacaatttttatatcctcttgatgcactgatctttatatgattatataaacattttctgtctcattttatacttttagaggtattctgctcttttttgattttcatttgcatggaatacctttttctattacttcaccttaagtctatgtgtgaccttacagaagagtgagtctcctgcaagcagcatatattt

SEQ ID NO: 308926 - DNA, 581 bp, Homo sapiens
aaggctgcagtgagtgagaatcatgacactgcactcccgcctgggtcacagagcaagaccctgcctctaaaaaaacccacaaagctttatcaaggaataattaacaaacaataaactttatagatttttattatgcaatttgatatattttgacatatttatacacccatgaaaccattaccaccatcaaggtaatgagcatatccattagcccaaaaagtttccttgtgcatctttatagtaatactttccctccctctgtccaacccctgttccagttaccacagccttgccttctatcactatagattagattttctagaattatayataggtgaaatatgcctttttcctgctttctttcactaataataatgctttgagattcatttatgctggttagttatcaatagttctcatttttaaaattctcatctcacaccatatgaaaaaatcaactcgattggattaaagacttaaaggtaagacctgaaactgcaaaagtgttaaaaaaatcatagggaaaaagcttattgacatttgtctgggtaatgatttttttatatgacctcaaaagcaca

SEQ ID NO: 308927 - DNA, 586 bp, Homo sapiens
aaaagaagatatgtctgtacctgacatacttctgtattttttataactgcatgtgaagctacaattatctcaaaattaaaaatttaacttaaaaaagataggctacacaaatgatgcaaattataacatttttgatattttatgatatttttaaaagagctcttttctttcctccataattttctgactktttaaaaaaccactaaagaaatatgaaagatttttctagagccacaattttaaactttccaatcaaaacacaggaagaaccaatcaaccaagtaatatatatatttagatcctagcatgtgacatatattgcaaagggttatagaaaagtctaagacacagactctgattttgagcagtttacaatctaggcatgcacataagaaatgatgcaatttacataaaaccatatttcatcaattctattatgtacatttttctcatgttaacttttctgaaatcagaatggcatcttggagtcaatgaaatgcagtagacaaaaggcaagatgtgacatatcacaaaggagtaggataggaaaactgtcctcataatagttcagaggataattcattgt

SEQ ID NO: 308928 - DNA, 613 bp, Homo sapiens
ctagttatgtgttgagcacacttcagaatggcatttgarttaatcatcgagaggaaaataaaggagaaatagtaaaagagagctcaaaggatctgcattagtagaggagtaggacttaaggagattctcacaaccatttttgagaagtactggtacagagcactttttaaaatcacacacatataaattatgctcagctactcacagggctaaactacaattttcacaaactttaccctttacacaaatgtttatacaagtttgctcacatgtgctcctatctctctaaacactcagatcttggacacatattcccctatacaaacacgtttatttgagatacttaaacacacatctaggtatctaccatgtcctcatgtagggacatacatccagacttctttatatctgctactatacacacaattccttaactccttctcctcccttctttatgtgctcacagacaaccatagttttgtgcacagataggcaaatacatcaaccatatgagtcagttccagaataactcatctccactcgcctctcctgtttaccatctgcaatggaaaagagctcaccacctctatagagaataactattaaatagata

SEQ ID NO: 308929 - DNA, 505 bp, Homo sapiens
aggatgacccattctgtggacaccactcagcctctttccccagtcactcctgtcatcacccaatggacccatgaacaaagtggccatggtggcagggatggaggttacacatgggctcagcaacatggacttccactcaccaaggctgacctgtctatgkccacagctgaatatccaatttgctagcagcagagaccaacactgagccctcagtatggcaccattccttggggtgatcagcctgctacctggtggcaggttgattacattggacctcttccatcatggaatgggtagacatttgtcctcactgcaatagacacttactctgcatataggtttgcctatcctgtatgcaatgcttctgccaagattaccatctgtggactcacggaatgccttatccaccatcatggtattccacatagcattgcctctgaccaagacacttactttacggataaagaagtgtggccgtgggctcatgctcatggaattcattcat

SEQ ID NO: 308930 - DNA, 593 bp, Homo sapiens
gaacaaagtggccatggtggcagggatggaggttacacatgggctcagcaacatggacttccactcaccaaggctgacctgtctatgtccacagctgaatatccaatttgctagcagcagagaccaacactgagccctcagtatggcaccattccttggggtgatcagcctgctacctggtggcaggttgattacattggacctcttccatcatggaatgggtagacrtttgtcctcactgcaatagacacttactctgcatataggtttgcctatcctgtatgcaatgcttctgccaagattaccatctgtggactcacggaatgccttatccaccatcatggtattccacatagcattgcctctgaccaagacacttactttacggataaagaagtgtggccgtgggctcatgctcatggaattcattcatcttaccatgttctccatgagcctgaagcagctggattgatagagtggtggaatggtattttgaagtcacaattacaatgccacctaggtgagaatactttgcaggactggggcaaagttctccagaagaccttgtatgccctgaatcagcatccagtata

SEQ ID NO: 308931 - DNA, 612 bp, Homo sapiens
tttcacaaactttaccctttacacaaatgtttatacaagtttgctcacatgtgctcctatctctctaaacactcagatcttggacacatattcccctatacaaacacgtttatttgagatacttaaacacacatctaggtatctaccatgtcctcatgtagggacatacatccagacttctttatatctgctactatacacacaattccttaactccttctcctcccttctttatgtgctcacagacaaccatagttttgtgcacagataggcaaatacatcaaccatatgagtcagttccagaataactcatctccactcgcctctcctgtttaccatctgcaatggaaaagagctcaccacctctatagagaataactattaaatagatacgaaccaggaaaaatatttgttctgcattattgtcagctatttgagtaaccasatcaacaaagcactgttataacagaccacctgcagtgacaggtaaatcgctgttgtaaagatcctttataacaggagtttacctttggctaagaaaaggggtctgctcatagatttaagtgtaaataagggaaatgtcagcctatttaagtgagagtgagggcctta

SEQ ID NO: 308932 - DNA, 410 bp, Homo sapiens
atcaggaaaggtcttcataaaaattgtgacatgttaaatgggtcttaaagaaattgccttgtcaaaaagataaaagaccattttaggcaaagggacttgtgcacatgcagaagtttggagttatcaaagagcttagtgtgtttaggggagagcaaggaatttggtggctaggttctgagagagacagaagcagtggaagatgaarcaagcaaagtaagtatggactatgttatgaagaactttgaaatccatgccaaagagttggcacaatacagtgagtggtgaaacttggaaagagacagatggtatttctctgttagagctaaaacattttattccacctgtgtaagtgcttattcatttattcattcattcaacaaacatatagtaggaatctattatgtgaaaaa

SEQ ID NO: 308933 - DNA, 617 bp, Homo sapiens
ctgggaagtagtatgattctcacttctgactcttgccacctcagtatcagtggagaccatgtggggaacctggacttctacttggcgtctggcaataataagccaccatgccctccctgcattgggatggtgtcagaaaaggcctagaagagtgtcaagaatttccccaccacagagttgtagtgagagcacaatatggtggtgtcagtggaggccatattgggagcagtagtgaggaggacctaatcttcccatccarggaggtatcaccgtaggcctattggggaacaggatctcccaccctcactcagcagtcatgaagagcaccgccccctacctcaggtattagtggaagctgagtagggaaactggatttctacttccacctggaattaatgaggtagcactcctgtttcctctgctggagcagtattagaggagtccagcagaagcaggtttaaataggaaccagagtctcatgacataatatcccaaatccagatttcaataaaaaatcactgacaacaagaatcaagaagatatctaactgaatggaaaataacaatgaatagatgtcaacagtgtgataggaaagatattagaataatgtaacaagg

SEQ ID NO: 308934 - DNA, 617 bp, Homo sapiens
ctgggaagtagtatgattctcacttctgactcttgccacctcagtatcagtggagaccatgtggggaacctggacttctacttggcgtctggcaataataagccaccatgccctccctgcattgggatggtgtcagaaaaggcctagaagagtgtcaagaatttccccaccacagagttgtagtgagagcacaatatggtggtgtcagtggaggccatattgggagcagtagtgaggaggacctaatcttcccatccaaggaggtatcaccgtaggcctattggggaacaggatctcccaccctcactcagcagtcatgaagagcaccgccccctacctcaggtattagtggaagctgagtagggaaactggatttctacttccacctggaattaatgaggtagcactcctgtttcctctgctggagcagtattagaggagtccagcagaagcaggtttaaataggaaccagagtctcatgacataatatcccaaatccagatttcaatmaaaaatcactgacaacaagaatcaagaagatatctaactgaatggaaaataacaatgaatagatgtcaacagtgtgataggaaagatattagaataatgtaacaagg

SEQ ID NO: 308935 - DNA, 546 bp, Homo sapiens
ataaatatacacatatatattaatagaataaaatagrgattatagaaataaaccctcaaatgtatggttgattgatcttcagtaagggagacaagatcattcaatgaagaaagaattgtctctgcaacaaattatgttgagacaaattgatgccataggcaaaaggatgaaaatggactcttacctcacactatatacaaaaatttattcatcatagaaaaaagacctgaatataagagctaaaaacaccaaactgttagaagaaatcataggggtaaatcttgggtcctggatttggcaatggtttcttaggaatgacactaaaagcacaagcaatttaaaatacagataacttagacttcaccaaaattaacaaacatttgtgtatcaaatgatataaccaagagaataaaaagacagcccatacaatggaagaaaatatttacaaatcatgtatttgataaggatctagtatccagactatataaaagacacttacaactcaacaacagaatgacaaacaacccaatataaacatgtcaacag

SEQ ID NO: 308936 - DNA, 506 bp, Homo sapiens
aagagagatgaagacaaggtgtagagtctttattagttttcttcctgcttgctagtttgtttatggaaaagttttaagttgttatcagcttaaaacaatggattataagatacaattttcaagccccatggtaacctcgaatcaaaaaacattcaatgaaggcataaaaaataaagatcaggaaattaaaatctaaaagagaaaatcaccttccctaaaaggaaggcaggaaaaaaggaaaaaacaaggagaagataacaaacgaccagaaaacaaataacaaaatggtgggagtaagcccatacttattaataacattgaatgtaaatggactaaaatctctaatcaaaagccttgaagtggckgaatggattaaaaaaccaagacccaataatttgctacatacaagaaacacacttagcctatgaagaaacatgcagactgaaaacaaaagaatagaaaaagatgttccatgccaatggacaccaaaaaagcacaggagtagc

SEQ ID NO: 308937 - DNA, 604 bp, Homo sapiens
cttgagtaacagggacaggatttttgacttgatttgtgaggcaatttgaaattatgacttgttcctgaaaaagataatgatttgaatgaagtggtggcctaggaatattgatcagactgagacgagaagaatgggttgcaggaaaaagaacaagaagggagggaaatccttcaggaggaattgaggcctaggtttatggtggtgatgatagaatagagaaaacatagatgagaggcaataaactattggttaataacatgggttctggagacagatggcctaagtttgaatctggattctgctattgttatttactctctccattaccctgctttggacaccartcatatcacttctatccaactattcacatcatctttcaattggcttttgaaagtttaatcttgtaaagattatgcatccttggataaattaaactttctgactctcaattatctcatctgcaaaatggagataaaatagcacctactccctgaggttattattatgattaaatgtggaaatacatgtaaaatgcttagaagagtgtctaggacattgtaatattcaataaacgttagctattatataaacacttttccaa

SEQ ID NO: 308938 - DNA, 360 bp, Homo sapiens
cattgtaatattcaataaacgttagctattatataaacacttttccaaggcagaatctaaagtacctggtgattgactgaaggaaacaaaaagaggcaaagagaactagattaggatacatgtgctctaactccaggtttgccacactagctgtagtgaacttgagcaaatttcttggccttgtttgggactttgattagtcatctgtwaaaatatgtatttgtattagatgatccctagggctgtcttcaggcccaatatattatgagtttataaaatctaagtattgttatatcataaaaatttataaaacaatttgaatgcattaatttaaactttttaacaaccctgcgagataga

SEQ ID NO: 308939 - DNA, 360 bp, Homo sapiens
cattgtaatattcaataaacgttagctattatataaacacttttccaaggcagaatctaaagtacctggtgattgactgaaggaaacaaaaagaggcaaagagaactagattaggatacatgtgctctaactccaggtttgccacactagctgtagtgaacttgagcaaatttcttggccttgtttgggactttgattagtcatctgttaaaatatgtatttgtattagatgatccctagggctgtcttcaggcccaatatattatgagtttataaaatctaagtattgttatatmataaaaatttataaaacaatttgaatgcattaatttaaactttttaacaaccctgcgagataga

SEQ ID NO: 308940 - DNA, 360 bp, Homo sapiens
cattgtaatattcaataaacgttagctattatataaacacttttccaaggcagaatctaaagtacctggtgattgactgaaggaaacaaaaagaggcaaagagaactagattaggatacatgtgctctaactccaggtttgccacactagctgtagtgaacttgagcaaatttcttggccttgtttgggactttgattagtcatctgttaaaatatgtatttgtattagatgatccctagggctgtcttcaggcccaatatattatgagtttataaaatctaagtattgttatatcataaaaatttataaaacaatttgaatgcattaattkaaactttttaacaaccctgcgagataga

SEQ ID NO: 308941 - DNA, 548 bp, Homo sapiens
acagtaaaggtgcacaatagttctgtcaccataaggatacatcatattgccttttaataatcacacccacatttcttctgcctgcacccttcccttaaacatttgaaaccactaatctgttttccatttcaaccctgttgttgtttcaataaagtaaataaattattgtagtatgtaacctttcataattgtctttttttcatttagcataattctataaagattaatccaagttgttacatgtatcaactgttaatttctttctatttatggccagtattccatggggttgatgtgccacagtttgtttaaccatgcacccattgaaggacatctaggttgtttccagcttttagctattacaagtaaagctactatgaacattcatgtacaggttttgtggggatgtaagttttcacttctccaggataaatgtccaaaaatgcaattgctgmgttgtatggtaattgcatgcctagtttttaaagaagctgtcaaattgtttttcaaagtagctttatcatttcacattctcaccagcaatatat

SEQ ID NO: 308942 - DNA, 503 bp, Homo sapiens
tgttaaaacctaacccccaaggtattaataggcaagtaaggcctttgggaggtgattaggtaatgacggcagagcccttatgaatgagattattgccctaataaaagaggcccaaaggatcttatttgctcctccagcatgtggggacacagcaagaaggcaccatttttaaagcagagagcaaggcctcaycagacactgaatgtactggagccttgaacttagactccccacttccaaaactgtgagaagtaaatttctgttatttataaattccccagtctaaagtattttgttacagcagtttgaaagaactaagacaccatatatatttagaacagtcttgtctataactgaaaacaaacttgctgagaattgatagaaatttattatacacatcagtttgggaaaagtaggtatctttatttttctgagtcttccaatccaataacacaacatttatccacattttttcagatcttttaaaatttattttgttagtt

SEQ ID NO: 308943 - DNA, 411 bp, Homo sapiens
tctatctaactatatatttgtacccattaaccaacttctttttatccccttccccgcgacacatcttttccagcctccagtagataccattctactctctatctatgtaagatccaccttttttagctcccacatgtgagtgagaacatatgacatttgtgtttctgtgactggcttatttcacttaatatgatgccctccagttccatccatgttgctgcaaatgacagaatttaattctttttatggccaactagtatttaattgtgtgtatgtaccacattttcattatccactcatttgttaatggacagaggttgattccatgcctttgctattgcgaatagtgcagcaataaacatggggtgcattgttccctttgatatwccaattttttctttgaaatatata

SEQ ID NO: 308944 - DNA, 543 bp, Homo sapiens
aaggatatataactagactttaagcaatttggtagaaggagaaaaaccaaccacttgcaatgccaaggtacatacagactacaggaaggcccaacctggacagataagtaagcatgttgctatgtgtatgaaggcaaacatatatagtataaacatagaatattagataaggaaagggtaataaaaattctgtgagtggaaaaatgaaattttttaaatataaaatgtgttgataaagttacaggcctatagtcattacaraagacttgacaggaataatacaattttggccacattatagaaattaggtgatgtacttttgggaggtcttcagttatccacaaactgatcaaatattttgtcagaatgaaatgtaaaattgaggtttgcataaaaagtatggctacttactataatgagatttgtaggattcaaaagaatatggttttgaaaagatataaatatctataggagatactatataatagtaatttaattttacatactagcttaagcaagtaaaccagaattatccatcacttg

SEQ ID NO: 308945 - DNA, 567 bp, Homo sapiens
ttaggagcaagaagcaacctggcatcgatgttttagatgctacagaagtcaaacatgtcgcccttctattcccaaagtcctctacycttgccttaaacacagtgatacctctatcagaatatattcctctaagagaactgacactctctgataagcttttaaggattttcaaaatattttcaaaaattaaaataacctttaccaggatgaaaaacttgtccagctttttgatctttgcaattttttttggggggtggggtgtcaggatttctctaaagagcaaaaacttcctacccctagaaaagagtttctaataaaacaaaaatcatggccccaaaaaaagagtgatcttgccaacacaggctctgacatacctcacagattttgaaattcacgtctttctgatagttcattccagtattaattcatcagagaaataaagcagcaaactatcagtataattacttattataaatttatgaaataaactcaacactacttccaaggaagataagagcatgtcattcacattgatgtttacattttttcccttttttgcacagttga

SEQ ID NO: 308946 - DNA, 567 bp, Homo sapiens
ttaggagcaagaagcaacctggcatcgatgttttagatgctacagaagtcaaacatgtcgcccttctattcccaaagtcctctacccttgccttaaacacagtgatacctctatcagaatatattcctctaagagaactgacactctctgataagcttttaaggattttcaaaatattttcaaaaattaaaataacctttaccaggatgaaaaacttgkccagctttttgatctttgcaattttttttggggggtggggtgtcaggatttctctaaagagcaaaaacttcctacccctagaaaagagtttctaataaaacaaaaatcatggccccaaaaaaagagtgatcttgccaacacaggctctgacatacctcacagattttgaaattcacgtctttctgatagttcattccagtattaattcatcagagaaataaagcagcaaactatcagtataattacttattataaatttatgaaataaactcaacactacttccaaggaagataagagcatgtcattcacattgatgtttacattttttcccttttttgcacagttga

SEQ ID NO: 308947 - DNA, 567 bp, Homo sapiens
ttaggagcaagaagcaacctggcatcgatgttttagatgctacagaagtcaaacatgtcgcccttctattcccaaagtcctctacccttgccttaaacacagtgatacctctatcagaatatattcctctaagagaactgacactctctgataagcttttaaggattttcaaaatattttcaaaaattaaaataacctttaccaggatgaaaaacttgtccagctttttgatctttgcaatttttttkggggggtggggtgtcaggatttctctaaagagcaaaaacttcctacccctagaaaagagtttctaataaaacaaaaatcatggccccaaaaaaagagtgatcttgccaacacaggctctgacatacctcacagattttgaaattcacgtctttctgatagttcattccagtattaattcatcagagaaataaagcagcaaactatcagtataattacttattataaatttatgaaataaactcaacactacttccaaggaagataagagcatgtcattcacattgatgtttacattttttcccttttttgcacagttga

SEQ ID NO: 308948 - DNA, 606 bp, Homo sapiens
cagtgagccaagatcacactgctgcactccaatctgggcagcagagcaagactctgcctcaaacaaacacacatacaaacaaacarcaacaacaacaaatgggagtgcagatatctcttcaacatactgatttcctttctttggggtatataccaaggagtgctggatcatacggtagttctatttttagttttctaaggaacctcaaactgttctccatagtagttgtactaatttaccttcccactaacagtgtatgagcattcccttttctccacattctcacctacatttattattgcatttttaaacatagaagccactttaactggggtaagatgatatctcattctagttttgatttgaatttctctgataatcaattatattgagcacattttcatatacctgtttgccatttgtatgtcttcttttgagaaatgtctattcacatatcttgcccatttttgaatcaggttattggatttttttcctatagtgttgtttgagttccttatattctagttattattccttttcttggattttttttcctatagtgttgtttgagttccttatattctagttattattccttttcagaag

SEQ ID NO: 308949 - DNA, 596 bp, Homo sapiens
aatgacacattggaatgactgaggtagtattctctgggttaaatctgccttgatattctacaaacttcttgtacttgaatactgatagctttctctaggtttaggaaattctgttacccctttgaataaattytctacccaaatatctttctttgtctcctttttaaggacaatagctcttagatttgcattttgaggctattttctagaacttgtagctgtgcttcattcttttttatgtttttttgtctcttctgattatattttcaaactgactgtcttcatgcacactaattcttctgctttattaattctgctgttcagtgattctgatgattcgtcagtgtgttaatggcattgtcagcttcagaatttcggcttgattcttttgaattatttcaatctatttgtgaaatttatctaatatgactctaaagtccttttccatattatgttaaattttgttgagcttcttcaatgcagctattttgagttgtctgtctgaaaagctcacgtatctctgtctctctgggattggtacctggtgcctaattttttttggtggggttgtgtttttctggatagccttgatgctt

SEQ ID NO: 308950 - DNA, 563 bp, Homo sapiens
agcaagtagtgggattactggattgaatggtagttctattttaagttgtttgagaaatcatactgtttttcatggagactgtactcatttatatttccataaacagcatgtaagtattcccttctcactgcatgctcaccagtatctttttttgattttgataataaacattttgactggtgtgagattgtacctgcttgtggttttaatttgcatttctttgawggttagaaatgttgagcattttttaatattgttagccacttatctgtattttgagaaatgtccattcatgtactccgcccatttttaatggggcattgttttttttcctgttgagttaattgagttccttttagattctggatattaatcctttgttagatgtacagtttgccaatattttctcccattctgtatattgtctgttttctctactgaatatgtattttggtgagtagaatatctttagtttaattacgttccatttgtatattttgttttgttgcatttgcatttgaggtgttagtcatacattatttgcctatgttaatgtcaagaag

SEQ ID NO: 308951 - DNA, 540 bp, Homo sapiens
acttaaaagttggaaattaaaaaaaaaattactttacatactctttccmcccttactgagataacacaaaagtcaactgaaaaaaaaaaaaaacatttcttactgtcaacagttttactaatagttcaaatgatatgagcaatctcaggctactggttaacaaactttgtgatgtttgagaccagctttttatgtctttttttcccactttaggacaggctcttattctgattaatatgcaagtttctaagatatacttcagggtaccacctgtacaatgtagtgattttagctgtgcgattttttttttttttttgagatggagtcttcgctctttcgcccaggctggagtgcagtggcacaatattttattttatactctgaccactacaaactgtcactgacattttctggcttcctatattgcataaatttgaggtttgtttataagccatttagatggacaagatatattctgttaaaaatatttcatagataaatctcagttagatttccactagtatataccaccaggaggtc

SEQ ID NO: 308952 - DNA, 636 bp, Homo sapiens
actgcaaccatctccagaaagatggaaagaaaaaaaaatccaaattgatatggtttggctrtgtccccaccggaatctcatcttaaattgtagctcccataattctcatgggttatgggagggacccggtgggagataattgaatcatgaaggtggtttcccccatactgttctcatggtagtgaataaatctcataagatctgatggttttataagaggtttctgctttcacttcttgctcattctcttgctgccaccatgtaagaagtgcctttcgcctcctgccatttattccacagggaataaaatatttagctggcatggtggcttacaaccataattccagcactttgggaggccaaggcaggcggatcacctaaggtcaggagttcgagaccagcctgaccaatatggtaaaaaccccatctccaccagggatatatttagcaatatcaaactgctgggattggtgattttcctctgactagggctggtttaaatgctccctctgtggacaggcatcagttgagtttggtcttgttttcctttttgctctaacaggacagcactgagttcaatgcctcacaattgttgtgttctccctccctcatggtccatagatggtctccggactg

SEQ ID NO: 308953 - DNA, 586 bp, Homo sapiens
tgacatataaatattgatacacccaacaacatggatgaacctcaaaatattcaagctgaatgaaagacgccagaaataaaagagtagatactgtataatatagcttatataaaaagaaaatgaatatgtgcacactaatctagagtgacagaaagygggagatctcgagataagaactggttggagagaggaagggttgcaaaaggaacacttgacaatctttgtgggagaaaatgatttgaatattgaatttcacagccctcaaaaatgggtatagaagatggatggcaatcttgaggaacatcttagattatgcctattgtgtgtgtgtatgtgtgttaatacataattttgtacacacattcatgaatgttttgggagtgtggaagttagagttgaaagtagtatcatgtgagtaatattggctgtataatgctgaaaaaaaggcaactccaaaatcgcagtgaattaacacaacattaatacaaagccacaaattcattgtaagcaagctgtgtatttactgaatttctgtatcatttgccttctaagactcagagctgggtatggcagtgaaagtactgaa

SEQ ID NO: 308954 - DNA, 623 bp, Homo sapiens
acaggactatgattgagagtaactaatctatcttaccttcargtggattaaaagtcttggattcatgattcctgtacttgtttgacaattcataaaaaatagccttctatcatttttacaacagtgctttttgagtatttttgtaatacatagtcaagcctagacttgctcatacataactttaaactaagtataaccaggtcattatgtgagctcaataaacgaagacaaacttgcactagtaaagcacagatatccaccacccccgagctttgtgtttaagatcaagttaatgattctaaatctgtgataattattccatccttttctttcttacttctagtacactatttactgttctactttcaggattctctcactccaaaaacactgtggtgatggtaaattttgtgtgtcaagttgactgggccaagggataaccagaccaatgataaaaccatgtttttagttgtgtctatgaaggtgtttctgggggagattaggatttgagtcaatagaatgaataaagaagatttgctctcacctattagggtgtgccttattgatatggtttggctgtgtccccacccaaatctcatcttgaattaaagttcccataatcc

SEQ ID NO: 308955 - DNA, 623 bp, Homo sapiens
acaggactatgattgagagtaactaatctatcttaccttcaagtggattaaaagtcttggattcatgattcctgtacttgtttgacaattcataaaaaatagccttctatcatttttacaacagtgctttttgagtatttttgtaatacatagtcaagcctagacttgctcatacataactttaaactaagtataaccaggycattatgtgagctcaataaacgaagacaaacttgcactagtaaagcacagatatccaccacccccgagctttgtgtttaagatcaagttaatgattctaaatctgtgataattattccatccttttctttcttacttctagtacactatttactgttctactttcaggattctctcactccaaaaacactgtggtgatggtaaattttgtgtgtcaagttgactgggccaagggataaccagaccaatgataaaaccatgtttttagttgtgtctatgaaggtgtttctgggggagattaggatttgagtcaatagaatgaataaagaagatttgctctcacctattagggtgtgccttattgatatggtttggctgtgtccccacccaaatctcatcttgaattaaagttcccataatcc

SEQ ID NO: 308956 - DNA, 605 bp, Homo sapiens
aaaacaaaatattgtttactttttcagggctatttaatgaattatgtgttgtcttctttatcttaaaaaaaataaagggtagagtatataaatgaaaaagtgactgaggcaggtatcaatcgcttagagatttattttgccagggtcgagaatgtgcccaggagaaacacaaatcacaggagcatctgtgacctgcacattttccaaagaggcttttgagaacctcagtatttaaaggggacagagcaagcagaaggagaagaacaaaaaaagaggggagggtgagcaatgaagcaagtggttgcattctcacgaggctcgaattactgctcagtgaatytacattttacatgtgaaagagcagacagtagaggaaaaaatcaatgatgcattcatctcagagtgggaagagggatgaattctaattttgtccttgtcttgtctgtacctgtgaagataagctggtaattgacactgtcgagaaaagatttaacagaacttggtttcagggctagtttcaagggggagcatgcattctaaacaatttggggcccacaaggaatttttttgtccaacatttgtgagacaggccatctgggaagacc

SEQ ID NO: 308957 - DNA, 575 bp, Homo sapiens
atctgggtactgtgatttttagtctcttttttttctaggctgatctttactggttatttgatgagattcctagggaggggaccttaagacaattgcatttctcttggaaagaagtcttcttagtcagataagaaaattccaaagatagtccttccttgcacgtgggggtggggtgtgtgggaagaaacaagagaagattaggaagtccttggttctgaagcagcttctaagaccctccaatttcttctaactcaaagtactcagcatgccaaagaaccaaacttgagagcattgttatctgcaccccaaaactcttctggtatactttctttgtctttttaaagtcctggcaccttgtktgttcggttaaatatttgagtacccgggctctgtcactaagttccagtctgttttactaatccccaagcaccaggtgattttgaaactgactttgcaaaaattatgacagtgagagaaggctagaatgcctggctcagttttgcttctatcctctcaggctggctgaccttgctcattcctgggtgtagagcaagctaaccatgggaagaatttag

SEQ ID NO: 308958 - DNA, 413 bp, Homo sapiens
gaatatgttgcttgtggcatggctgctgcagacttgaagtttcagaagccttcctaagcagttgccagtccctttcattggctgaagttgggttgtggtttctctctgatctctccacttccagccccagctgtgttcctgattgcctaggaagaacatcccttgaaatttgtcatctgtatctggacaagtgagtcttttttcttggtaccagacagtggaatctgcaccactcaatttgggaaattctgaaaaaatttctcttcacaggttgaacaagccaagccgactgggagaggataaatcaccctractgtttcagtttggatattcttggggcttgttagttactgcaacagttggattgtgttttgatgattgtgtatcaatatagtcaaggaaatcagaattaa

SEQ ID NO: 308959 - DNA, 597 bp, Homo sapiens
gaaaaatctgtcctgagcgctctctctctctctgtgtgtgtgtgtgtgtgtgtgtgtgtgtgcgtgttttgttcaaggtctccaaatttgtcaaatttgtcaaaacagacaccccatatgacatttcttataattatcattcctctatacaaaacaagtttagtcaccttctgacttcttacactgcatctgaacttcttcctgattaagcactgctgaaagccttagtaaatatgataccaacaaattccagggattattacttgccctaattacccacagaaatatatctctattgacttcagatcaatggtaagtgcaaggctaaaatctcattctggggatttatttataggaccactaatgtaaccaattatcttatcaaagattcttttgaaaatctacccacaagtatagcatatgtatatgtatgattatatatatataaggggtgagaggtggtagaaggattgctgcattaccaggacaacaaggctgagagaataaatatgaggaaggtgggaaggaaggagaggaagawatatatgttagtgaataaccatccatcaattcacaaggaatacagggcttgctgag

SEQ ID NO: 308960 - DNA, 582 bp, Homo sapiens
tggctttgaccaaaatgctgatagtgagatgaggaacttgttgggaaatggaacagaattgactattgctatgctttaacaaagagattggtggcattttgtccctgccctagagatatgtggaactttgaacttgagaaagatgatgtatggtatctggaggaagaaatttctatgcagcaaagcactcaagaggtgacagagcrtaaaagtttagaaaatttgcagcctgacaatgcagttgaatagaaaaattcattgtctgggaagaaattcaagccagctgcagaaatttgcataagtaacgagaagtcaaatgctaattgccaaggcaatagggaaaatgtttccagggcacgttagagacattcatggcagccccttccatcagaggcatggaggcctaggaggaaaatatagtttcctgggcccagtctagtgtctccctgccatgtgcagccttaggacctggtgctctgtgtctcaactgctccagctgtggctaaaagggggcatggtacagctcaggccattatttcagaggatgcaagcccaaagccttggcagttttcacatggtgtt

SEQ ID NO: 308961 - DNA, 610 bp, Homo sapiens
aaatatacaggaatttcacaggctaattaatttgctctcaaagtcttctctgtcctactgacatttgttttgttttacttttccctttatgcactccttctatcataaaaaataataaatctattatctctacttgctaagagaaactaatttttaacagtaaaactatgtcaattttaaaaattattttaattataatgcctgaacattcatttataaaaggaatttttttctgaactragtatgattgagtagacatattgtaatccatcttggtacacttatattatcgtggctggatggaaaacttctaagagtggaggtgacaggtcaagaatacgccaattttaaattctggtatatattatcaaatagtcctaatgactgtacaagtataaacgtctatcaaaaatttacaagggtgactaatttgttatgcccttataatcattgtgtatttcagttatttaaattactatatagttcatataatagagatgactgttttgttttttatttagtattttaataattatttaatcatccattgttttagagccatataattaactatatttcaatgtcaaaacatgacgtgttgatatatact

SEQ ID NO: 308962 - DNA, 623 bp, Homo sapiens
actccttcattttatatatatgtatataatgctgtattctatgaattaaattttattaaagattattcatttatggtattggtggataaaagtytgaagtattgtcttgtattatcttcctagcaatatctgtttctgacatgaatttggataaaataattcctggagattgtttctttgacccatgttttatttcaagatatgaagaataatttccaaatatttaaactgtccctggattactctttgtatttgatttactatttatttatgcgttacatattatactgcatataatatcaaacataacacattttctgagcctttgttttttttggcccagcatatctttatcctggtgagtgatccatgtgtaccctagaagatattctgtctttattgtttacagtgccctgtacatataatttaagccaagacggttgataacgttgtttgaatactctataaattatttgactagttgtgcttttaattgctaagtgttaaaattttcactctgatcgagcacttatttatttctttcattgtttctgccaacttttgccttttgtaataatgagactctttaattagatgcataaaaacttacgatacttaagtta

SEQ ID NO: 308963 - DNA, 582 bp, Homo sapiens
acattgagctgaaaaggaaccagagaagcgttggtaagagaatccaatttttcttgtgcagactaggattaggaaatggagaattatgagtgagaagagaaatccatgttggcaccatgaaaagggatatctcaatttaagtgattaaaagcaataataatctctgaatataagtgattgaggtttcagcaacatttctttcattaatgagcttttcgttgtgaactctgttaatgtgttatgtccacatgtgtgtaatgtatataacttggtccaaagttacccaaatatatgtgctactttaagaaatttttatggtacaaaatttatatcaacttcttacaatttcttaaaggcaacataatggtaacaaacaaacacatatttcaaccgagagataaataattaagataactaatcaaaagcaaatatgaccttccatgaatatctgatcaaggatgatttccattcattctcatatatttattttctagattgcacttaatgtctaaaattactattttattcctttgtctccatgtaaacwttgtctccctcaattgacacgtaagcttcagacaa

SEQ ID NO: 308964 - DNA, 596 bp, Homo sapiens
ctagctaataaaatgtgtcaatcatgtagcctttaaataaaagtgcaaggagcagctattgtagactgtaatggtcctgcaatatttaatctttttttccagacatgaccttgtataataaatcccaggatgttttctgggaaaggagaacttattacaactacacagctgtcatatttatagtactttgctttctattttacctgtatatttaatgtttttgaattgtttaattaagttaatatgataataaaaccattttagacagagataaaaatacacacatttaggcagcagatataaacaaagtgctacattttccacaaactatatcaggtatgatttcctctgtatatacataaaaaacagttatccacctaggaatatgaataaccataaatttaaaaagaatcaaattcatacacttascaatttaacaaaacaaatatgcattttggctttgcttctacttcaataaaacttatagaagtgaagattaagttatggcctgatttgttttcaatctaaattaagctttcatattttctacaataaatgttacatttacaacacaaaagataagataaatgtggctg

SEQ ID NO: 308965 - DNA, 499 bp, Homo sapiens
atttaagtagatgtacagctatgtgtaggcccagcaacgtagtcttcctctcaccaaggctgatgtggttattcccattactgaaaatctaaattgtgaggtatagaattccaacacatgtctcaaagaaatccaccagaagttgtgtcaagttgtcagagtaaggcttttcaaacttttaaagggcagtaatttattctgaacagggtcaatttgtgttttttgtaagagtttgcctttttgactacagaacactggaatagcagcactatacaaggactaagagaatatgtcctttacgatcatgggatcccacacaacactgatrctgcacaggccaaaatatctgctcttcaatgagaatacgacattgtgggacctactgctcatgcctcatagtaaattacttagggctgctgttttgataggacattggaaagaccttttaaagacatacctaaagtgccaatttgaagctcctgatggtgatgcaaagcag

SEQ ID NO: 308966 - DNA, 533 bp, Homo sapiens
ttgtgttatttgaaaattttgccattatgattaaagctattatgaatattcacgtacaagtatttgattctaatgtattytcatttttctttgttaaatgcctagcagtggaatttctgggttttatggtcagtgcttactaacattttaagaaactgttaaactttttccaactggtagtgacattttactttccaccaccattaccttgttggactgtttattattgagttttacattgagtcgcggtattttctcccttcatatgatttgtgttttcattttgttaatggaaacaaagagcaaaagtttttcactttgataaagcttaaactcttcatttttcttaatattataatttactctatttgtgtactatataaaaaacccaagtcctgagagggctttgaggaggttttagtgtggtctttcacatttagggtaatcaaatttgaaaaaaaaaaaaaggttattgtgtaagctaagtgttgatgctttcttttcccccatagcaccgtttctagaagggtttt

SEQ ID NO: 308967 - DNA, 533 bp, Homo sapiens
ttgtgttatttgaaaattttgccattatgattaaagctattatgaatattcacgtacaagtatttgattctaatgtattttcatttttctttgttaaatgcctagcagtggaatttctgggttttatggtcagtgcttactaacattttaagaaactgttaaacwttttccaactggtagtgacattttactttccaccaccattaccttgttggactgtttattattgagttttacattgagtcgcggtattttctcccttcatatgatttgtgttttcattttgttaatggaaacaaagagcaaaagtttttcactttgataaagcttaaactcttcatttttcttaatattataatttactctatttgtgtactatataaaaaacccaagtcctgagagggctttgaggaggttttagtgtggtctttcacatttagggtaatcaaatttgaaaaaaaaaaaaaggttattgtgtaagctaagtgttgatgctttcttttcccccatagcaccgtttctagaagggtttt

SEQ ID NO: 308968 - DNA, 533 bp, Homo sapiens
ttgtgttatttgaaaattttgccattatgattaaagctattatgaatattcacgtacaagtatttgattctaatgtattttcatttttctttgttaaatgcctagcagtggaatttctgggttttatggtcagtgcttactaacattttaagaaactgttaaactttttccaactggtagtgacattttactttccaccaccattaccttgttggactgtttattattgagttttacattgagtcgcrgtattttctcccttcatatgatttgtgttttcattttgttaatggaaacaaagagcaaaagtttttcactttgataaagcttaaactcttcatttttcttaatattataatttactctatttgtgtactatataaaaaacccaagtcctgagagggctttgaggaggttttagtgtggtctttcacatttagggtaatcaaatttgaaaaaaaaaaaaaggttattgtgtaagctaagtgttgatgctttcttttcccccatagcaccgtttctagaagggtttt

SEQ ID NO: 308969 - DNA, 545 bp, Homo sapiens
ttttggtgagacattccttgaccattgtggtaagtaggataaagaatattctaactccataatctgcaaatatatgttaactttaaatgaaaaaggggactttgcagatgtgatttacttttctgactctgaggtgggaagattgtcttgtattatctagatgggcaatactttaatcatataagcctttaaaagtggacaacttttatgtctatattgagtgaaagagagagaaccagagagatggcagtgtgagaaccacatgtacattttttagctttgaagatggaggaaggggtcatgtgccaagcaatgggggtggcctatagtagatggaaaagggaagaaaatggattctctcctggagccctcrgaaaggaataaagctctggcaacaccttaattttagccaagtgagacttgtatcaaacttattacttgaagaaatattagatattgaatttttggtttaagccactaattagtaatctttgagagcaacagaaaagtagtagagccaagctatctaaaattgcaaacttccc

SEQ ID NO: 308970 - DNA, 255 bp, Homo sapiens
tcgggttttctacgtgtagaatcatattgtctgcaaacaaggatagtttgacttcctctcttcctatttatttattttttttctgtctcttgcctgattgctctagctaggacttccagtactgtgttgaataagagtggtgagagaaggcatacttstcttgttctggtcttctgggggaatgcttccagtttttttgcccattaacggtgatgttggctgtgggtttttaatagatggctcttattttttgaa

SEQ ID NO: 308971 - DNA, 577 bp, Homo sapiens
gtttaatcatgaaggtgttgaattttataaaaaatcattgtttattgagatgattatgtgctttgtggttctgtttatgtggtaaatcatatttattgatttctccatgttaatccaaccttgcatcccagagataaaacctactcgatcgtgttggattagctttttgatgtrctactggatttgttttcttttcttgttgtctctctgccaggttttggtatcaggataatgctgatctcatagaataagcgagggaggagtccttctttctcagtttctggaatagcttcagtaggagtggtaccatcttcatacatctgatataatttggctgtgaatccatctggtcctgggctttttctggttggtaggctttttaaaactgattcaattttagaacttgttattggtctgttcagggactgaatttattcctagttgatgacatatcttctcaaatacagaaactcaataataaaagcaaaatggaaattttggatttaaaaattacaaatgaaattaaaagttcactagagaagttcagcagtcaatttgaaacccaaatgtcttaaga

SEQ ID NO: 308972 - DNA, 539 bp, Homo sapiens
atgttacagctggatgcctcaggaaaatgtgtattcagtagttagtaatgtctgcctcagcacaggaatggtgagtgagtgaccacaagcgcatactgtgtctgggacatggtgtgtgaacagaggatgtttttggaaaaaaaggagtctttatagtgcagtgcttaaaatttcacaaatggataagcccttcaggataaagattgacttgaaaacacatcmaataaacttaaatccagaacgggaaagaatttgcattttggattaaacagggagaggcaggaaactaagttatattaagtccttaaagccctaaatcttcaagcattttacaacttagaaaaactgaggactaatcaagcaaattgtatgattagacttggcccccttccactatagacctcactgtggcagttcttactgataaagaagaacttaaacagaaaagactacagaatatttctcctctatgaaaaattcaaaccgagctgagtgaaacatgacttagcaaactcacaaagtgcttatgcatttttaaa

SEQ ID NO: 308973 - DNA, 647 bp, Homo sapiens
gctattttgaggaaactcaaagaaatttaagataacaaagagaaagaactcagaattgtatcagataaatttaacaaagagattgaaataatttttacaaatcaaacagaaattctggagctggaaaattcaatggacataccaaagaatgtatcagagtctctcaacagcagaattgaaattaagcagaagaaagaattagtgaacttgaagacaggctatttgaaaatacacagttaggggatacagaaaaaaagagaatgaagcatgcctacaagatttagaaaatagcctcaaaagggcaaatctaagagttacggattttaaagaggargtaagaagaaagagattgggtggaaagtttattctgagtgataacaacagagaacttcccaaacctagagaatgatatcatgttcaagtacaagaaggtgaggtaacaccaagcagacttaagtaagactacctcaagacatttcatatgcatatcctcaaaggtcaaggataaagaaaggatcctaaaagccgcaatgaaaactaacacacaaaagaggtccaatacatcccagaacagactactcagtggaaatcttacagaccagaagagagtggcaggatatatttaaacttctgaaggataaagaaac

SEQ ID NO: 308974 - DNA, 573 bp, Homo sapiens
tgacgactaaaaaaggaaaaaaaggagagaagattcaagtaaacacaatcagaaatgacaaaggggacgttaccaccagccctatagaaatataaacagccctcagagaatactacaaaaacctatatgcacatgagctagagaacctagaagaaatggataagtttctagaatcatacaacctcccaaaattgaaccagtaaaaaattgaatccctgaacaaagaccaatattgactttcaaaattcattcagtaataaaatgctgaccaataaaaaaagcccagcatgagatggattaatagccaaatgttatcagatgtataaaaaggagctggtgatttttacacattgattttgtatcctgagactttgctgaagttgcttatcagcttgaggagattttgggctgagatgataggattatctaaatacacaattatgccatttgcaaacagagacaatttgacttcctgtcttcctatttgaataccctttatttctttctcttgcctgattgccctggccagaaatyccaatactatgttgaataggaatggtgagagagggcatc

SEQ ID NO: 308975 - DNA, 579 bp, Homo sapiens
atgcattgttaactatttagcagcattctggcctctacccattggatgccagtagcaaccttctcccctgagccacaactacagttgtctccacacatgacaaatgtcccatggggagtaaagctggcttcactttaagaccactggcttacatgatttcaaagggcctctgaacactattcttttcagagctcacgtccctaccctgagtcagtrcataatgggaaatgaatgagaccttgtgtcaccagttacgtcctcctcttcagattttttctttgggctagcctgagagttggtgtggctcctaggactcaaaggatgcctcttggcttttgtgtgagtgaagcaaatccttgtgggccaggactgtggtactttcaaagagtgccttcttatggaatgacctttgtggtcctagtcaatgccaatttcccactttctttttctcttttgtaattcccaaacatataacacaacagtaaaatgtgcgaggcagtctggtgtagatagtgagcctaaatgatagtgacttactttcacttcttgaacagagtttagcatattcctatatacact

SEQ ID NO: 308976 - DNA, 572 bp, Homo sapiens
aatttcaacacaacttttaaactctctcttcattagktttttaagcaaaccatttagcgtggaagtggggaagcttcaaccctgggcacatattacactcaatgaaagttttgagaaaaaaacaaaaacaaaaacacaacatcctagttttccattgtagtccaattaaatcagaattgaggcgggatggatgaggcctttgcattttatttaaaggaaaatgcttttggtgatcttaaaatgcagctaggcttgagaactcctaagtacttaagcttcattgtattatttatacattgtagttactattccaccttaaaatatgaccttatgatatatttacatatctgattccaccactataggaaaataatcttaagacataaaattgagcttactatatttcatatttgccctagtgtctgggtctcaataaatgtttgaatgaacaaatgaattacaacgcaagccatatgaccctattttcatttgcatgaggtaatcaataaaagttgtttaagtgagtgaatggaaggggaaaaaaagcagatcttcacctttaacagtgtttg

SEQ ID NO: 308977 - DNA, 572 bp, Homo sapiens
aatttcaacacaacttttaaactctctcttcattagttttttaagcaaaccatttagcgtggaagtggggaagcttcaaccctgggcacatattacactcaatgaaagttttgagaaaaaaacaaaaacaaaaacacaacatcctagttttccattgtagtccaattaaatcagaattgaggcgggatggatgaggcctttgcattttatttaaaggaaaatgcttttggtgatcttaaaatgcagctaggcttgagaactcctaagtacttaagcttcattgtattatttatacattgtagttactattccaccttaaaatatgaccttatgatatatttacatatctgattccaccactataggaaaataatcttaagacataaaattgagcttactatatttcatatttgccctagtgtctgggtctcaataaatgtttgaatgaacaaatgaattacaacrcaagccatatgaccctattttcatttgcatgaggtaatcaataaaagttgtttaagtgagtgaatggaaggggaaaaaaagcagatcttcacctttaacagtgtttg

SEQ ID NO: 308978 - DNA, 572 bp, Homo sapiens
aatttcaacacaacttttaaactctctcttcattagttttttaagcaaaccatttagcgtggaagtggggaagcttcaaccctgggcacatattacactcaatgaaagttttgagaaaaaaacaaaaacaaaaacacaacatcctagttttccattgtagtccaattaaatcagaattgaggcgggatggatgaggcctttgcattttatttaaaggaaaatgcttttggtgatcttaaaatgcagctaggcttgagaactcctaagtacttaagcttcattgtattatttatacattgtagttactattccaccttaaaatatgaccttatgatatatttacatatctgattccaccactataggaaaataatcttaagacataaaattgagcttactatatttcatatttgccctagtgtctgggtctcaataaatgtttgaatgaacaaatgaattacaacgcaagccatatgaccctattttcatttgcatgaggtaatcamtaaaagttgtttaagtgagtgaatggaaggggaaaaaaagcagatcttcacctttaacagtgtttg

SEQ ID NO: 308979 - DNA, 609 bp, Homo sapiens
atattatatgtttcaatgtcagtatctagtataataacttccatatagtagagatattaaaacatgtatctattaaatgaataatttccttcttataatgtatatgcttacataaagtttcaagtgtttattaccaatattacccatctaatttttatattratggtaatacttaaaacaattgagagataatattttgacatagtcattttcttcatgataatagaattatcatatgatagaagttgatgttatgcaagcaatacagaagtgttgagctccttaccacattgtagaccttattcactgaatgcaagtgatattcattaagataaatcacattttggactttaattaaaagataatgccttagggctcaattactttttaaattctatgcagcttttctagtaaaatcttgacccttttctcaggttttcctttagcctacctccatttgaaggtgggaggtctactcttcaaatagaaatcttctgtaatattcttaaaaggatgtcaccattacttccaacttggcataatatcagattgtattcatctgcccctaattggcaatgtgaaacatttaggggtaagaactgatgctta

SEQ ID NO: 308980 - DNA, 588 bp, Homo sapiens
ttattacagataaagcagcagtgaacatctgtgtacagtatctgtggggtattagttccagaacccccttggatgctgttttgggccctcatagatttgttatcttgtgctttttcatgattccttcagcttgcaataagaggcattgtagaaaattgttgtgtagaacctgctgtcatcttcactgccaagtgatgctcttaaggacattgtacrttatatggggggatttcaaatatgactgctcatgagaaccacttggggagatctccgtgctccactttagacctgctgaattagaatctctgggagtagtcctggagattagtatttttttcttaaactttttatcttgaaataatttagactcacatggaagtttcaaaaatgatatagagagttccttcattctagtcttccagctttacccaatgataacgtcttaataactttaaaagaataatctaatacagaaaattgacaatggtttaatactattaactacataccttaatttggatttcaggagtttttactggagctatttttggcatattataaaattttatcacatttgtagatttgtgt

SEQ ID NO: 308981 - DNA, 504 bp, Homo sapiens
ttgcctcagaagtggaaagagagtggaggatagcttgtgggagatttaagggactagggattgaaatggcacctattccatcaaccaaagtggagtcatatggccccaccacctttaaggatggggcgggggggggaatatagtgctcaggagaggcagaaaaagaaatgggtttagtaagaaaatagcagcatttgagtttcactctttaattaagtcagagtattaatgctcacactatgttggccgtggaagtaggccattcaaatctctgtcaagwggacctgctgaggggaccatagttgatttatagccccagctgttacacatttgagtcaatacctcaagctgatgtaagtcaatgattgagcttagtgggaatgcaagaaccagaccattaatgctcaaagtgagatttctccaagagcaactggttcttaaagtccaccattgacctggcctggccaagatgttcttggaactgcagttttcagagattgcttc

SEQ ID NO: 308982 - DNA, 604 bp, Homo sapiens
tactctctacagttctcataactttcaaaatctattttcctcctcatacttgatgcatatactttctgccccctggctccttcaactgtactcactatttgttaaatctcccacaattaccattgttyctggcccagacttcaatctggcctctcatcttattcctgatactacatctaaaccccatgactctattgctctaatccacatggcattctccccatttccccatatttccctctttcctgttccccacccagaccacacttggtttattgttggtggttcttccaggcccaatcgccaatcaccggcaaaagcagtctatgttatagtgtcttccacatctatcattgaggctaccgctctgcccctctacaatacctctcagcaagccgaactcattgccttaactcaagccctgattcctgcaaaaggactgtgtgtcaatatttataccaattccaagtatgccttccacatccttcaccaccatgttgttatatgggctgaaagaggtttccccattacacaagaatcctccatcattaatgcctccttaataaaaactctacttaaagcttctctacttccaaggaagctg

SEQ ID NO: 308983 - DNA, 649 bp, Homo sapiens
atacaataaaggtcatatattataaacccataactaacatcatattcatcagggaaaagttgaaagttttttctctaagatctagaacaagacaaggatgccccctctcatcacttctattcaatatagtactggcagtacctagccagagaaattaggcaagagaaaaaaataaatggcatcaaaattggaaaggaagtattaataaaattgtcctgggccgggcacggtggctcatgcctctaatcccagcactttgggaagccgaggcgggtggatcacctgaggtcagtagttcgagaccagcctggccagcatggtgaaaccccgtcttttctaaaatacaaaaaattagctgggtgtgttggtgggcacctgtagtcccagctacttgggaggctgaggcaggagaatagcttaaaacagggagccggaggttgcagtgagccgagattgcrccattgcactccagcctgggtgacagagtaagacttcatctcaaaaataaataaattaattaaataaaaaataaaataataaaataaaattgtccctgtttacatataataggattttagatatagaaaattctaaagatgccatcaaaaaactgttattttttgtgttttcacattaacaatagctaaaa

SEQ ID NO: 308984 - DNA, 649 bp, Homo sapiens
atacaataaaggtcatatattataaacccataactaacatcatattcatcagggaaaagttgaaagttttttctctaagatctagaacaagacaaggatgccccctctcatcacttctattcaatatagtactggcagtacctagccagagaaattaggcaagagaaaaaaataaatggcatcaaaattggaaaggaagtattaataaaattgtcctgggccgggcacggtggctcatgcctctaatcccagcactttgggaagccgaggcgggtggatcacctgaggtcagtagttcgagaccagcctggccagcatggtgaaaccccgtcttttctaaaatacaaaaaattagctgggtgtgttggtgggcacctgtagtcccagctacttgggaggctgaggcaggagaatagcttaaaacagggagccggaggttgcagtgagccgagattgcaccattgcactccagcctgggtgacagagtaagacttcatctcaaaaataaataarttaattaaataaaaaataaaataataaaataaaattgtccctgtttacatataataggattttagatatagaaaattctaaagatgccatcaaaaaactgttattttttgtgttttcacattaacaatagctaaaa

SEQ ID NO: 308985 - DNA, 530 bp, Homo sapiens
gaaaggagaatcttcatatgctgttggaggggatgtaaattaatacagtcactgtggagaacagtatggagattcttcaaaaaactataaacagaactgccatatgatccagctattccgatmctgggtttatatccaaaagaaaataaatcaaaaaattgcagagatatctgcactcccatatttattgcagcactgttcataatatccaagatatggaatctacctaactgttcatcaacaacaggcaaatggataaagaaaatgtggtacatgcacagtgaaatactattttagccataagaaagaattaaattctgagcttattttgttaagtgataataagccaagcacagaaagacaaatattgaatgttctcactcatatgtaggggaaggatacaaaggaggaaaggatgtagaaagattgatttcaaaagtttttcgaaaagaaatgacaagggtctctgaagaacttttatggatatggattatatctgccaatatttactataatttatattgattaaa

SEQ ID NO: 308986 - DNA, 530 bp, Homo sapiens
gaaaggagaatcttcatatgctgttggaggggatgtaaattaatacagtcactgtggagaacagtatggagattcttcaaaaaactataaacagaactgccatatgatccagctattccgatcctgggtttatatccaaaagaaaataaatcaaaaaattgcagagatatctgcactcccatatttattgcagcactgttcataatatccaagatatggaatctacctaactgttcatcaacaacaggcaaatggataaagaaartgtggtacatgcacagtgaaatactattttagccataagaaagaattaaattctgagcttattttgttaagtgataataagccaagcacagaaagacaaatattgaatgttctcactcatatgtaggggaaggatacaaaggaggaaaggatgtagaaagattgatttcaaaagtttttcgaaaagaaatgacaagggtctctgaagaacttttatggatatggattatatctgccaatatttactataatttatattgattaaa

SEQ ID NO: 308987 - DNA, 617 bp, Homo sapiens
agatgaccaggtggtgacacaagcagagggacagagagaaagagatttggagatgatttactgctgactttgaagatggaggaaaggagccacagccaggaaatactatggcctccagaagctagagaaggcaagcagatggattctcccctagagcctctagaaggaaccagccttgctgacaccctgactttagtctaatgggactgattttgaacttctggcctccaaaatggtaagagactaaattcatgttgttttaagcccccaggtaatttgtagtaactcattacagcagtaataggaaactaatacagttataaaagaaatagtgatgagtctgtcagcatttttagaagtattccatgatyggttaaatgtcttgaagcttttttaccaaacaagtagccaacccagttctccaaatacagagagaggcatcatttccacatgatgaaagagctagactaagaggacgtccctccccaagaagacctctccctcttccaggtggagctggggctgggagcagagcctgagcatcacctgggatacagatcctctaccaagggacacagaaggggagaaaccctggcagcaactgttccctgggatcc

SEQ ID NO: 308988 - DNA, 540 bp, Homo sapiens
atctagcacaaagtaagcacttaatgaatgttagctaatataattttttttaaaaagtgctgtgtggatagtgcttacatgcatctgtttactttgtgcaagtgtatgtataatgtaattctgttatggtaatgacagaatagcttatttcagactaactctcccactgataattaatataaactctgggcaaaatattttctaaaaaaaaagtttgaatgcactgaaataaaacaaaagaaggcatatacaaaagaggatatgctatgtgaaagaagggaagcaaactagatgactgccacctttamtcactgttccccggagggcctgtcctaatttgctaaggagtctagtgaaatacatctcagatgcaaagaggtagccttagtgggctactaaaaaatacattgggttgtcagaaaaatcctagaaaggagaaattcacagaaaaggaagaacaaaatcagcattaaaattttattcaaattgttggttgactagtaaactgttcatgtataagaatatgacccatgacttaga

SEQ ID NO: 308989 - DNA, 632 bp, Homo sapiens
tatgggtttatagaaaaaaaaatgacaacgggggatcttggcagagtaatggaaagtttaaaaaaatttaaagtttattttaaaaagaaggaattgtttagctacaaattcatcaaccagtaaataaataaagagcacaatgcatctgggtacgtcctgcgtggcagcacattcagtcatagggtgggagagaggctgtgctgctacccttcagccagagcagtgtctattccctcctttcttcctgccttgcaggcctagccttgggacagatccaagtagataatagctcatgggctccataccaggcaggtggcttccatgcttccataagtgactgaaattaaatattaactacagcctgtcaaattataacaatagacccttgtattttgkatttttatgaaactttatatttagtaaaggcttccacatatctttccaatgttcctggcaataactagaagctagtgtgatatgaatgccatggtctcttcataaaataactgtctctcagataaggtttcaaaagatgccgttgccttcagtatcttaaaaaggattgctatacaattaattggtaaaaagctcaagcctcattagaaagaatggcatcaactctgagctagggg

SEQ ID NO: 308990 - DNA, 390 bp, Homo sapiens
tttaaaaaccttttacctctatatgtggctgtggtcatgtagttgattttttttttgagattaaaaacacataaacacaatcagtcaagcagatggatttatattgctgtttgtattcctaccakcaatgcatgaaagttcaagttgctccatatgctcatcaacactttttattggccttttttcattttagccattccagtgggtatgtagggataactcatatttcaatatttgaatttctctgatgactaatgatgctaaacacttttctatgtctattggtcagtcatgtattttcttttctgaagtttctgtttaaacatttttttaaacttttaactgacttgtatttctattaatgagttgtaagagtactttatatatttt

SEQ ID NO: 308991 - DNA, 537 bp, Homo sapiens
tagtgtaatttatcctggtattctaaaacagtaagtggatatacttctggtaatgatgagaagttctaccctctttccagggcacatgggagcacacacttcccagttgttttgtggagacatgtgacgaattctggccaataagctgtgagtagaagtaatgtgtcattttcagattctcatactgaggcaatgagaagcccctgcataactgtgggggccatgtgtggaaatggtgaagacacatgtatcagaggctgtgatgtaccacctagactgccactttggaaggatcactcacttctcagctaagttgctaactggctgcaggctatagacagctgaatacctctttgggaattgcactagctaaagcgagtttccwggtccaaggttacactgtccgtataagacatgctgtattcaaggtacaatcctcttgcttcaacagagataactgaagaaagaatgtcaagactccttggggcaactgcatttaaaatcaatatttccccctgcctaattctgcttctctcc

SEQ ID NO: 308992 - DNA, 465 bp, Homo sapiens
atacattcatgtaaatcctaaaactataaaatgtctagaaataaataggaaaaaatctgtgtgaatttagatttttcaagtagtttttagacatgactccaaaagcaagactcataaaagaaaaaaatttayaacttggataaattatcaaaattaaaatattttgctttgtaaaagatactgttgacatatttcaaaagacaggtcatatcctggaagaaaatagatgcaactcacatatctgatcatgtacttttatgcaaatgtataaagaaccctgaaaaatctacaaaaatcagcaatcaaaaatgttcattttaaaaagtgggaatgggataaagctttaaacagataatttaccaaagaagatatgcaaacgaaaaataagcacatgaaaagatacacagcaacattagtcattaaggaaatgcaaattaatctcaaggagatacaactattacaagt

SEQ ID NO: 308993 - DNA, 564 bp, Homo sapiens
tttcaagtagtttttagacatgactccaaaagcaagactcataaaagaaaaaaatttacaacttggataaattatcaaaattaaaatattttgctttgtaaaagatactgttgacatatttcaaaagacaggtcatatcctggaagaaaatagatgcaactcacatatctgatcatgtacttttatgcaaatgtataaagaaccctgaaaaatctacaaaaatcagcaatcaaaaatgttcattttaaaaagtgggaatgggataaagctttaaacagataatttaccaaagaagatatgcaaaygaaaaataagcacatgaaaagatacacagcaacattagtcattaaggaaatgcaaattaatctcaaggagatacaactattacaagtactagaatggttaaaatgaaaaaaataagtgacaacaccaagtgtgacaaagatgaagagcaacttggtaggaggcagttatgtataaatgtgtaaatgcacatttaacacataactcagcagtcccacacttagacatttaccctagaaaattgtaagaatacacctagaa

SEQ ID NO: 308994 - DNA, 650 bp, Homo sapiens
ctcagagtcaagcctaggaaaagtttctgtttatcccaataaaaaagattttccatttmtgggactagagaccttttaaggatattagcaggaggagtgtagttggagtcccagttgaacctaaattgaatgcactttaggacacgtagagacagatttttatgagaaagcaaacctcttgggaaataactattacaggggagaaagaaatttggcacatagctatgcccaataacatgatagatactggaagtgaagagctgtttttaatatagaataatgcctatcactcagctcatccttcagcctgaaacgacttaggtcaagtgctaggaaaactgaggtaacacatgaaagggctctcttatcaaaaggtctgaaatcactgggagctccataaccatataatgtactgtgccatgtgggctgactccctgggattcattctcccctacatgtgcagagaacagacaacagagagtgcctgcacctgatggcatcaagcatacgggaggccgcccaaggttcacagctttgggcaccgcatcatgtttggcacagcagagaggatttggcccagtggggcatgtgcatagtgcgtgttcagtcacaatgatcaggatttgtgccagatattgaagaaaggggcc

SEQ ID NO: 308995 - DNA, 524 bp, Homo sapiens
gagggagagctaatcatggaacaaaactgtaagccataccgggtgtgaggggaggtgatagaagggttatagagtggggaagcagaggctgaggaagaattgggacctggctgggcctggtgaggagcagcctggggaggagggggagaggtcagatgggtccatagaaaaggaggattcaraggactcagagcttggggtgaagactgaaggaacagccaggagagaaagaagaaagatttgggacaagttgcattgggagcagagactagggagggacctatgtgtaaaagaatgcctggacgtcaggcacctcagaccatttgcccatttttcaacaaaaatcatccaggtcttgtaagatggagaaatcaaaagcgccattttctggtcatttagaaccatggtcaagtttgtattggggccaagcagcattgcagaagaaaataagttgtttagggtttaggtcaggtgtgagttgaagaggttttaagttcttgagaacacaagctaagggagaagaa

SEQ ID NO: 308996 - DNA, 496 bp, Homo sapiens
taatcgctcccgccagctcaagatcagctcctcttccagcctctttctgtcaatcctgcccgtgcccccttctttgcatttgtatcccctcccccaagtccgctccgatccaatccggagactcgactctgccccccgtactccagactaaatccgttcctcggctcagctaagcagctctgcacgtcccttcccacttgctcagccaatcgctgggctcggcyccgcccctttgggcttggtccttctcacgccaccaatccgcgcctcttgtcccgccccctgcccgcgagtccgccaatcccgcccttcggaaagcgtcgcctggtatccagctgccggagcgggtcgcgccggaggggggcggaggcggaagtggcggtgccgggcccggggagtaggaaggagccggggctgtagccggagtggagcggctgccagccgaggagcaggcgcagccgcggcgccaatattgcggccctcagcgaccgcgacc

SEQ ID NO: 308997 - DNA, 537 bp, Homo sapiens
agaggggccagccgtgcggacagtctggactccggactatcccaagaactcaccatccttcttgatcttctcattgaggttgttgatataaatagtgtggttagggcgggtctcgggaactgccatggagtgaagtgttgaggtaagtcttaaaggaggaaaaacgtgactttagccctgggtttctccaaatcctttgtcccaacgtcggctgctcaaggatcttcctccgaaaaggaagtcaggtaaggcgggagtagggggaaggacggaggcaaagcgcgacaacaaagcgtgcgtaggacccgcttctccagcccgcgtgcggagagaactctcgagagatttactacgacttccaggatgctctacgcgacccggtgggcggagcacmctaaatggcgattcccattggcccaagcatccgaagggcgtcccggagaaaaaacccggatgtgggagccagtatagaaaaaagggacaggtcctaggcagcctggcctcgagcagcaagtttcctcagacggcccaggaagg

SEQ ID NO: 308998 - DNA, 516 bp, Homo sapiens
cgacagttggcataccaataaatacatacgtataacatcaggtttaggaaggaaaacaaagcaagacaaatgggacagagatgacagagcagtggatggaggagtgctaggagggcttgacctagacaccagacagaagcgagggaggcagccatgcagagagctgaggggagactgttcctggcagagggaagagccagtgcaaaggctytgaggcaggaccatgcttttgagaaatggcagtgaggacttgagagttatcaactatgctaggtgtggtggcacaagcttgtaatcccagctactcaggaggctaaggtgggagaactgcctgaacccgggaggttgaagctccagtgagccatgatcctgtcactacactccagcctgagcaacagagcaagaccccatttaaaaaaaagaaaaaaaagctggatggggtggctcatgcctataatcccagcactttggaaggctgaggcagctagattgcctgaggtcagaagttcatcacca

SEQ ID NO: 308999 - DNA, 604 bp, Homo sapiens
aaggacctatataaaatatcatgagggtcaagagaagactaagatactgaatcrtctttgtcctgtcaaaattaaaatgtcagtgattatggtagtgatcaataacattaacacacgtagtggttttaaaattttgagttttatagttttcttcagttgtgcctagaaatgaagaaacttataatgtggggtcccttaaagttcccctttcagccataagattccactttcttctgtattatagattggtcataaaattgagttattttattaaataaatgattctgtagatattaataaattatttccaatacaataaaaataaaattgatatgaattcattaaaacataatacttagtttataaaataaatgaatggacaaaatatttgaaacttccactttagtgcaggctacatctcataagaataaactcataatttttttctctatagttgttattttctggttagatcaatccatctttcatttcatttttaaaattgttatagaaataactattaaattccagttcatctactgaatttattacataatatgatatcagactgcataatatcaccgtaaaaattgtttcaccaggt

SEQ ID NO: 309000 - DNA, 604 bp, Homo sapiens
aaggacctatataaaatatcatgagggtcaagagaagactaagatactgaatcgtctttgtcctgtcaaaattaaaatgtcagtgattatggtagtgatcaataacattaacacacgtagtggttttaaaattttgagttttatagttttcttcagttgtgcctagaaatgaagaaacttataatgtggggtcccttaaagttcccctttcagccataagattccactttcttctgtattatagattggtcataaaattgagttattttattaaataaatgattctgtagatattaataaattatttccaatacaataaaaataaaattgatatgaattcattaaaacataatacttagtttataaaataaatgaatggacaaaatatttgaaacttccactttagtgcaggctacatctcataagaataaactcataatttttttctctatagttgttattttctggttagatcaatccatctttcatttcatttttaaaattgttrtagaaataactattaaattccagttcatctactgaatttattacataatatgatatcagactgcataatatcaccgtaaaaattgtttcaccaggt

SEQ ID NO: 309001 - DNA, 589 bp, Homo sapiens
cagcccatatgtcactatctaaacagattcaaatactctatgtgatctcagagaaaaaatgttaatggtatttttacacatatacacattacataaaatcttacaaatagatgtataggtgcgcataggaaaagtattaggtgtaccactctgaaatgtttataaaaataaacaatatgtagtaaataatacacttaattttagtaaatcagatgttttataytgcaaaatataaaggaaaacctaaattaacttctaaaagttttagtagaaaatatatgattttgaagaataaactaagaatcctggaagaatcaaataaatgtcttgaaaagaaaaatcagatattcattaggggactctataataaaagatgatttttgagagcaaaagtatatgaatgaaccatctctacataataatttgaggagatatttcttttgtaatgtgtttgtagaacataaagactttccttatgtatatgagaaaatagaaatggcacagtcatgaatttcattctaaaacttctccctacccccactactaatgtatcatctgataatttttctaagataagtggatatatgtt

SEQ ID NO: 309002 - DNA, 589 bp, Homo sapiens
catatacacattacataaaatcttacaaatagatgtataggtgcgcataggaaaagtattaggtgtaccactctgaaatgtttataaaaataaacaatatgtagtaaataatacacttaattttagtaaatcagatgttttatattgcaaaatataaaggaaaacctaaattaacttctaaaagttttagtagaaaatatatgattttgaagaataaactaagaatcctggaagaatcaaataaatgtcttgaaaagaaaaatcagatattcattaggggactctataataaaagatgatttttgagagcaaaagtatatgaatgaaccatctctacataataatttgaggagatatttcttttgtaatgtgtttgtagaacataaagactttccttatgtatatgagaaaatagaaatggcacagtcatgaatttcattctaaaacttctccctacccccactactaatgtatcatctgataatttttctaagataagtggatatatgttagaattrcatcttttctttttaaatattttcttctatctagacctaaagttttgcaacaaacaaaacatgaagaatgg

SEQ ID NO: 309003 - DNA, 565 bp, Homo sapiens
acgttgtattgaatacaagtgtggtaaacaacaagactattttttacaacttgtttctgggtttttcagtgaaaaagcagcaagagacatagaattatataactgaaatgtcttttatagattattcatctttcattttgcatatgagaacgtctaagacccagagcagtcatttggtgttcccaaagacacacaactaactgataagagacatgaaatgtctttcttagggtttccagtgtattgttgttttttgttgttcttgtttctcactacagcaaactcatataaacccgtgrcatcttaatatgtacttaatttaatgattgttcaaagtgtcacataatttgcacctacaatggattagtaaaagcttatagcaattgaccaatctttttctcaaaataaagtcagttaagcaaaaattgtaatgtcaaaattagattattttcttgggtaatatttcaaaataaggttttacagttaaaaatattaacattttaagacttagatatacaaattttgtttccaatatagtatcagtacactcttgcataataatttt

SEQ ID NO: 309004 - DNA, 568 bp, Homo sapiens
taatctacgttatttaaaactatttaccattgaatttttctactaataggataaacatagaattttattttgttcattaatactttctgtgtttcaaattgcttattcacatagaataaacatctactgaataaaaaaacctttttatatttctcttattaatgttataatcttggtattttgcttttaaattaaatccccattaatccaaaccaaatatattatcartattaaatgtagtattgtataattgaaataaaattacattaacatattgcttctactggtttccttacatttccaatgaggaggattctctgttgacccattcatttcttttcttcagtaagattcttccttgacaaaccatcttttgaacatctggtgaaaaaaaaaatggagaaataatatgagagaagaaaacgtgaataagacattaaatgaaactgcatgagaggttttattcaaggttcacaataaaatatataccagagcagtagaagagctgttgtatttaaagacattcgaaggggaataaaatgtgaagcatttggaagatctgtcctag

SEQ ID NO: 309005 - DNA, 594 bp, Homo sapiens
tagaaactaaaatctcataagaatgaaatgagattaataaagacatatgagacataggaaaggtataagaagactaaagaggtaagaactgagcctatattggaggtactaagaactacacttgattctaaaacwacaaatcagtagttaagaccatatccaaaaatgtaattgagagtaattcaataatggaagctatgtgagaaatgacctatgtattgtgaaataagaaaacatatacatttggaagttacatgtacctatggaagaaacaaagcaaattatggcagaaaaattaaaaattaattaattaaaaataaataaataaaacaaaacaaaacaaaaaaagcaaaagaaggaaacagtaaggaaaacattgacagatttaatagcacaacaagttttaaatatctgaaagtcaaacaattatttattatgaaccaaactgaaactcaaatatgtgtgacgtcagagagaagtattttgaatacataatgagctcttgaatgactcataggttaaattttaaaaacgctgtaaaaatagtgaagaattatatgtatataaatttgcatacataaaagcagtcatttt

SEQ ID NO: 309006 - DNA, 547 bp, Homo sapiens
tagcaagcattcagtaagtggtagctattttaaaaagatctctatttagtaaatgcagctgctgatatttaagaaagttaataatttaagtattcaaaatgttttctaattcaggacatttcaagctgtctgtaaaggtggttttatgagcctgtgaagtagcgcacttgtctaaatgacctaataatcctaaaatatatggtaaaatagtttaattataaattctcaaggtaaatatcatatatacatacacacacaaacacamacgcacacacacatatatattatatatatatatatttggattatgtgtatttgtgtgtatgtttgtagaattttagcacctaaaaaagatgataagaaagacatggaggcctgaaccccaaaacacaagcagcctcaagctctgtggcagtagatgagaacatgaagagtgaggaggagctctcccctctcttgctcttagcctgctcatattacacctgacactcaatagataggtgtattagtctgttttcacactactgataaagacatatctgagacc

SEQ ID NO: 309007 - DNA, 653 bp, Homo sapiens
tagtgttaataaacattgatttagaataagaaaatgaatgatgaataaatgataaaaaccaagcgtttgatttgttgctgtgtgagaatataaataacagagtccagaatggtgtattggcctctaacaggagatatttaaaaagtattgacttactgaaaaagggattttaccctatagtcaatcaatgcttcatgtacctttctcatatatagaattcaggaggataagtgacataaatggctccttaaaaatgcctgttacaaaacaaacaaacaaacaaaaactacagctgtcttatttttgatgaaagggctcaatataggtatttacaaccacgtagatgaaagagaaaactcatggtttagccagaggtttagcaattcttcaaccaagtttaccataaaaaccagatcttatgtccacaaaaatatatactttgatgtatttatatgatattatttaagtaatctatatatgaacttggaatatatgtataacttgaagartatatagaaattttatatatatgtaaatataaatataaatacatatatacatatgttttagacaatagaaaatggccattttacaattttggcccagaaaaagatccttgcaaaaatcacaattttggatgaattttgatatta

SEQ ID NO: 309008 - DNA, 551 bp, Homo sapiens
tgataccttttatttttgcttcacttttattagctataagcaagtcactaggtccagggtgtgctcgagggcattagattatacaaagaattgaacatcaggaggcagggctcattgggagccatttcagaagctgcctaccacagaggttaggaaatatgctaatataaaccattctttataaaaagaaactgagacatagaaaaataattttacctgatgtgtagctttatcaaaggccatcagtaatcaagacagttaacctttattgagttcttcatatgcctgcactcattgctaagttaataatacacactttttaatttaatcctctgagacaccttttgaaaaaaatgcatattaatcctactttacaaattaggaaactgagactcagagaaattcaataatttacttaaataacatcatatcctggtggaagaagtgggacttaattcctggcatccggatgcctgattttacgcwtgtagaaatggtgttatattgaagttgccacatgaactaattcttaagttcccttaaaactgctg

SEQ ID NO: 309009 - DNA, 621 bp, Homo sapiens
cacctcccatttataccttagtccactgtgttcttgcttctgcccacaccaatctataaaactgccctttccaccatggcctttcttgtctctaacatctcccattattttacttccttaaaacattttcttctgtttttctgctacatatctggcttctattaaggtactttcaatggatttttttcctactcatctctttcatatccatgttcaccagggcccaaccatgaccctgtctttttcctcttctattcattgcccctgaatacctcatcagaactcatgctgattgcctgaatgcttattttaatcaccttcatacaggttrtgaaccactattagaagctgtacctattactgaaagtaataaggtgcatcagcaactcatgtttgaccttagttctttccagaacacttctccactactcagtgctatgcggcactcattttgtcagacttcgcctattaatagtttaaccagtagagtgtagtaattatctttagcctgttccaaataagaatactttatcttcaaattctttcaactttgatatttataccagatctaattcacatatacttgtttcaagtgtgccgcatgtaacattacatagataa

SEQ ID NO: 309010 - DNA, 630 bp, Homo sapiens
aattttatataaagtaactagacttcagttacaagctgcactactttgaaatcaagatatgtttggcaaggtatattttaacagtttcacttctgtaaatatgaacatctcttatgcaaatattgacttttgctcctttatgtcagacattttgtttctaaataaaagcaaggaaataggggggcatgtgtgttgcgggaagtcagggaccccgaatggagggaccagctgaagccatggaagaacataaattgtgacgatttcatggacatttatcactttcccaatcaatactcttataatttcctatgcctgtctttactttaatctcttartcccatcatctttgtaagctgaggatgtatgtcgcctcaggaccctgtgatgattgcattaactgtacaaattgtaaaatgtgtgtttgaacaatatgaaatctgagcaccctgaaaaagaacaggataacagcaattttcagggaacaagggagataaccataaggtctgactgcctgccggtcagcgaaatagagccatatttttcttcttgcagaaagtgagtaggagaaatatcactgaattcttttcccagcaaggaataaccctggggaaggaatgcattcccaggggt

SEQ ID NO: 309011 - DNA, 557 bp, Homo sapiens
gataaaaaattgaagcatatcataagaaagacaagtcttcaggagtgaatgaagaaaccagaaaggataaatataaaaataaaacttcaaagttcaactactaaaattttcataacatagcattgactgtgtgaagtaaaattatcagtgttgcacaattgatactatatgcagatgtgaattatgtgttattagaccaaaaaagcagamggacgataagaaaaccatattacatcaggttcttacattactaaaatatgcttttcaacaaagatagtaataggatgaaaatggacattataatctctaaagtaactcacaaaaattaataatacaaggaagcataataaaacataaaaaataaatagaagataaaagtacatgatttactaaaaaagaaggcacaaaagtgggaacaaagaaaagaacaaattaatcaaagagaaaataaacgccaatgtgttagacttaacaatagttgcataaaaaattaaaatgcagagattgtcagactgaataagaatgtgaagctcaacagcacactgtttgcaagaaaa

SEQ ID NO: 309012 - DNA, 495 bp, Homo sapiens
aatgagtttctggcaatcctaaaaacatctaatctaaagattctcattcagagaaataagcttcctgctgtaggaaaggtatcatgaattccaggctgcaatttatataattggatgtgaacaacaactatttatataataggcataataaatttctccagaattctcttgagtgatttagataatatygtagatggaacattgatactcaaattatagtccaacatttttaaattgagggtgggaaaacaagagatttttacagttattaaaagaaaatataaattttaaaatgttgagtactgaactccgtttgctatgtaatttctgggcaattgtaagcatatcaatgtaatgaatcaataacacttcaaatattaagaaattaaacattttaagaatcaatatcctcagttataatttttcagtgcctataattcagtaattatgtccagaaaaataagaaattggaaaaacaaggtatagatttaacaa

SEQ ID NO: 309013 - DNA, 495 bp, Homo sapiens
aatgagtttctggcaatcctaaaaacatctaatctaaagattctcattcagagaaataagcttcctgctgtaggaaaggtatcatgaattccaggctgcaatttatataattggatgtgaacaacaactatttatataataggcataataaatttctccagaattctcttgagtgatttagataatatcgtagatggaacaytgatactcaaattatagtccaacatttttaaattgagggtgggaaaacaagagatttttacagttattaaaagaaaatataaattttaaaatgttgagtactgaactccgtttgctatgtaatttctgggcaattgtaagcatatcaatgtaatgaatcaataacacttcaaatattaagaaattaaacattttaagaatcaatatcctcagttataatttttcagtgcctataattcagtaattatgtccagaaaaataagaaattggaaaaacaaggtatagatttaacaa

SEQ ID NO: 309014 - DNA, 592 bp, Homo sapiens
tattcaaaacactaaaccatggtttattaagcatagtctgtagggtactacaaaaaagacattcttagggtagaactaatgttacccacaacataccagtctataaattccaaccaagttagcaaactgttatgtgacttgggaaatatgaattcatgcagcagtaaataagttatctcttttacattcttccttcagaaacagccagtgaaatatatggccataagtaagcatgtacaggatgactgcactggatgagatttgccagattttctgaggaacagaaataggaaatgaaataagaattttaaaagaaaatgaattctcagtagagctttgttaagtattgtttgtataatttaagggaagttatttcaatatgtttggcttttgttagacatagagttttcatttcrgtaatgatttttcggtcataaaaataatttaattttctctagtttcaagtgaacctggatatttcaaataatctttcttttgccgtaaattacaagattttccagtttgaccactggcgcttaacctaactacatactgaaggtaaataaaaggacttattaaaaggagttgagaa

SEQ ID NO: 309015 - DNA, 302 bp, Homo sapiens
atttttttctgcaatcattgaaaagctaaaatcgaaataatagaagccaaataaatgtatcagagaaagttatattttccccccaaaataaaattgtaagtgagaaatcaggtaccattatatgatacagctagaaaatgaagtaaagatatatttttaaataaatttttcacaagacactgattytgatgtgcaaaaaaaaaaaaaaaagagagagagagaatgaaaaaaatagtaactttaaattcttggctgctgcgaccacaggctagtttaaagttttcaagttaatggttcaaaag

SEQ ID NO: 309016 - DNA, 412 bp, Homo sapiens
ccttaaacttctcagcctgtagaaacatgagctacattagcctctttttttttataaattgctcagcctcagatatgcctttatagcaaaatgaaacagactragatgaagccttcaaagagagtcacagatcattgcaaggggatcttcctgagcttgtcatcccagtgtgtcttgagttctgaaggggcacctttaaaaacattgcctggccaagtgcaatggctcatgcttgtaatcccagtgctttgggaggctgaggtgggaggattgcttgagcccaggaatttgagaccagcctgggcaacatagtcagaccccatctctacaaaaattacaaaaaaattagccaggagttgtggtgtgtgcctgtagtcccagctatttgagaggctgaggtgggaggatcact

SEQ ID NO: 309017 - DNA, 552 bp, Homo sapiens
aggtgagcagctgacaactctgccttatcctttacctcatcttgcacagagcctcaaggtcagccagaggggagagattagtgctgttttaggtctttcctgggtatgtgcataaccctgtacatgcatgtggccctgtaggttctcaggaatatttttgagcttttcgaaacccctgtcagtatctcattccccagtcttcttgctaagttttttggttagcttatcatttgcccaactgttatccactgccttagacagctgcaaagttaaaccattatctctcagtgttgctgatgaatgtcccggggaaaaggccttagcaccaagttagctcttgtcaaacagccttatgagtggggtcttccagggaaccaccacacagatcaaataatgacaattctctgggaatgaggcttgaaagagttttgccccattcggccctattttgccccctctagtggctgccaggctactggttttcaccacgtttgtacgttgttggttttttgggggwcggggtgggttttttgtgttttttgagacaacgtc

SEQ ID NO: 309018 - DNA, 334 bp, Homo sapiens
gataaaaactagaaggaagccatctgccaaactactttgtgatgctcgcattcatcttgcagagaaaaacatttcttttgattcagcagttcagaaacactgtttttgtccattctgtaagtggacatttgggagctcattgaggccaatggtgaaacagtgaatatttcaggattaaaaactggaaggaacttatatgagaaactgcttcatgacgtgtgcattcttctctcagagttaaamgtttattttgatttagcagttttgaaacactatttctgtctattctgtgaatggagatttgggagatcattgaggccaatggtgaaaaagc

SEQ ID NO: 309019 - DNA, 542 bp, Homo sapiens
atatcccaggataaaatctataaagaagctatgtgagaaaccactttgtgatgtgtgcattcatctcacagagataaatcttccttttcattcagagtttggatacactgttttagttcattcttcaaacagacattttggagctcattgaagccaatgaagaaaaagtgaatatcccaggataaaaagtaggagaaagctatctgagaaaccggtttgtgatgtgtgcattcacctcacagagtttaagctttgttttgattcagcagtttggaaatattctttggcctattcagagaaaggacatttgggaacttttcaaggacaatgacaaaaaggcgaataacccaggataaatactagaaagaaaccaactgaaaaactgctttgtgatgtgtccattcayctcacattgttatacctttcttgtaatacagcagtttggaaacacttttgttgtagaatgtgtgaagggatatttgggagcgcattgaggcctatgtgaaaaagaaaatatcttcagataaaaagtagaaagaagc

SEQ ID NO: 309020 - DNA, 542 bp, Homo sapiens
atatcccaggataaaatctataaagaagctatgtgagaaaccactttgtgatgtgtgcattcatctcacagagataaatcttccttttcattcagagtttggatacactgttttagttcattcttcaaacagacattttggagctcattgaagccaatgaagaaaaagtgaatatcccaggataaaaagtaggagaaagctatctgagaaaccggtttgtgatgtgtgcattcacctcacagagtttaagctttgttttgattcagcagtttggaaatattctttggcctattcagagaaaggacatttgggaacttttcaaggacaatgacaaaaaggcgaataacccaggataaatactagaaagaaaccaactgaaaaactgctttgtgatgtgtccattcatctcacaktgttatacctttcttgtaatacagcagtttggaaacacttttgttgtagaatgtgtgaagggatatttgggagcgcattgaggcctatgtgaaaaagaaaatatcttcagataaaaagtagaaagaagc

SEQ ID NO: 309021 - DNA, 534 bp, Homo sapiens
ttactcttgattcagcagtttggagacccttttttgtgcattctgtgaatggacatttaggagctcgttgagtccaaaggtgaaaaagtgaatatctgaggataaaaactactaggaagttattgtgaamcctttatgtgatgtctgcatttatctcacagaattaaacctttcttttcattcatcagtttggaaacactgtttttgtggaaactgccgaggaatattagggagttcattgaggcttagggtgaaaaagaaaatatcttcaaataaaaactagaaagatggtttctgagaaattgctttgttatatgtgcattcatctcacagagttacacctttctttaccttcagcagtttgtaaacactgttgttgtccattctgactatggacatttgggaggtctttgaggccaaaggtgaataagtgaacataacaggataaaaattaggaggaagctatctgagaaaccgctctgtgttgtctgcttttatctcatagagtaaaacctttcttttcatttgtcagtt

SEQ ID NO: 309022 - DNA, 552 bp, Homo sapiens
ttactcttgattcagcagtttggagacccttttttgtgcattctgtgaatggacatttaggagctcgttgagtccaaaggtgaaaaagtgaatatctgaggataaaaactactaggaagttattgtgaaacckttatgtgatgtctgcatttatctcacagaattaaacctttcttttcattcatcagtttggaaacactgtttttgtggaaactgccgaggaatattagggagttcattgaggcttagggtgaaaaagaaaatatcttcaaataaaaactagaaagatggtttctgagaaattgctttgttatatgtgcattcatctcacagagttacacctttctttaccttcagcagtttgtaaacactgttgttgtccattctgactatggacatttgggaggtctttgaggccaaaggtgaataagtgaacataacaggataaaaattaggaggaagctatctgagaaaccgctctgtgttgtctgcttttatctcatagagtaaaacctttcttttcatttgtcagtttggaaacactgtttttct

SEQ ID NO: 309023 - DNA, 552 bp, Homo sapiens
ttactcttgattcagcagtttggagacccttttttgtgcattctgtgaatggacatttaggagctcgttgagtccaaaggtgaaaaagtgaatatctgaggataaaaactactaggaagttattgtgaaacctttatgtgatgtctgcatttatctcacagaattaaacctttcttttcattcatcagtttggaaacactgtttttgtggaaactgccgaggaatattagggagttcattgaggcttagggtgaaaaagaaaatatcttcaaataaaaactagaaagatggtttctgagaaattgctttgttatatgtgcattcatctcacagagttacacctttctttrccttcagcagtttgtaaacactgttgttgtccattctgactatggacatttgggaggtctttgaggccaaaggtgaataagtgaacataacaggataaaaattaggaggaagctatctgagaaaccgctctgtgttgtctgcttttatctcatagagtaaaacctttcttttcatttgtcagtttggaaacactgtttttct

SEQ ID NO: 309024 - DNA, 534 bp, Homo sapiens
ttactcttgattcagcagtttggagacccttttttgtgcattctgtgaatggacatttaggagctcgttgagtccaaaggtgaaaaagtgaatatctgaggataaaaactactaggaagttattgtgaaacctttatgtgatgtctgcatttatctcacagaattaaacctttcttttcattcatcagtttggaaacactgtttttgtggaaactgccgaggaatattagggagttcattgaggcttagggtgaaaaagaaaatatcttcaaataaaaactagaaagatggtttctgagaaattgctttgttatatgtgcattcatctcacagagttacacctttctttaccttcagcagtttgtaaacactgttgttgtccattctgactatggacatttgggaggtctttgaggccaaaggtgaawaagtgaacataacaggataaaaattaggaggaagctatctgagaaaccgctctgtgttgtctgcttttatctcatagagtaaaacctttcttttcatttgtcagtt

SEQ ID NO: 309025 - DNA, 504 bp, Homo sapiens
tatacagtttcattagtataatttaaaatttttaaataaattacaagattcatttaaaggaatatacatgtatacaagcagtcaagaagaaacaagagtgcactaaactaacttgctattaaaatacatttttaaacttagtcactaaaactgagcagtactgatttggagtactggaatttaggtwtatgggatctcaaaagcacagagctcaaaggagacccctgtatgcacgcgagctttggatgtgctttggaaggcattaccaaaccacgggcaaagttgctttagtgtcttactcttactaggtttgaaaagccacagaaaagactcaagaacaccatataagagcaaaacaagaggacagggagagaatgtgaagatactgaaacattttacataaagttgtataaaacatcctttaaagaaaatatgaagtttaggttatacatcaaagtcagcagagccactaaataaataaataggcattgtaaaatagcaaga

SEQ ID NO: 309026 - DNA, 609 bp, Homo sapiens
tgcttttgtcaaatcagcaaagggatattttggagtgcattgaggccaatggtgaaaaagaaaatatcttcagataaaaartagaaggaagctttctgagaaactgctttttgatgtgtgcattcatctcacagagataaactttccattgatgcagcagtttggaaacaccagtttgtcttttctgtgagtggacatttgggagatcatagaggccactggagaaaaagcaaatatccagacacaaaaactagaaggaaactatctgagaaaatgctttgttatgtatgcattcacctcgcaaagttaaacctttttttcattaagcagtttggaaacaatgattttgtagaatatgtgaaggcatatttgggagcattttgagactatggtgaaaaagaagatacagacaaaaactagaaagaagctttccgagaaactgctttgacaggtgtacattcctctcacagctaaacctctctttcgataaagtagtttggaaacactgtttttgtccattctgtgaatggacatttggaatctcattgaggccaattgtgaaaaagtgaatatccctggataaaaactaaaaaaaatctatctgagaaa

SEQ ID NO: 309027 - DNA, 609 bp, Homo sapiens
tgcttttgtcaaatcagcaaagggatattttggagtgcattgaggccaatggtgaaaaagaaaatatcttcagataaaaaatagaaggaagctttctgagaaactgctttttgatgtgtgcattcatctcacagagataaactttccattgatgcagcagtttggaaacaccagtttgtcttttctgtgagtggacatttgggagatcatagaggccactggagaaaaagcaaatatccagacacaaaaactagaaggaaactatctgagaaaatgctttgttaygtatgcattcacctcgcaaagttaaacctttttttcattaagcagtttggaaacaatgattttgtagaatatgtgaaggcatatttgggagcattttgagactatggtgaaaaagaagatacagacaaaaactagaaagaagctttccgagaaactgctttgacaggtgtacattcctctcacagctaaacctctctttcgataaagtagtttggaaacactgtttttgtccattctgtgaatggacatttggaatctcattgaggccaattgtgaaaaagtgaatatccctggataaaaactaaaaaaaatctatctgagaaa

SEQ ID NO: 309028 - DNA, 504 bp, Homo sapiens
tatacagtttcattagtataatttaaaatttttaaataaattacaagattcatttaaaggaatatacatgtatacaagcagtcaagaagaaacaagagtgcactaaactaacttgctattaaaatacatttttaaacttagtcactaaaactgagcagtactgatttggagtactggaatttaggtttatgggatctcaaaagcacagagctcaaaggagacccctgtatgcacgcgagctttggatgtgctttggaaggcattaccaaaccacgggcaaagttgctttagtgtcttastcttactaggtttgaaaagccacagaaaagactcaagaacaccatataagagcaaaacaagaggacagggagagaatgtgaagatactgaaacattttacataaagttgtataaaacatcctttaaagaaaatatgaagtttaggttatacatcaaagtcagcagagccactaaataaataaataggcattgtaaaatagcaaga

SEQ ID NO: 309029 - DNA, 411 bp, Homo sapiens
aaacagtagaaagaatctttctgagaaacttctttgtgatttgtycattaaactcacagagttagacatttcttttgacttagcaatttgtaacactgtttttttgtccattctgtgaatggatatttgagagctcattgaggtcaatggcaaaaaaagcaaatatcccaggatagaaattagaagaaaactatctgagaaaccaccttgagatgtgtgcattcatctctcagagttaaactttcttttcattcagcagtttgcaaacactgttttgtaaaacctgcacaggtatatttgggagcccatggtgaaaaagaaaatacctttatgtaaaaactagaaagaagctttctgagaaactgatttttgatgtgtgccttcatctcacagagttaaacctttcttttc

SEQ ID NO: 309030 - DNA, 411 bp, Homo sapiens
aaacagtagaaagaatctttctgagaaacttctttgtgatttgttcattaaactcacagagttagacatttcttttgacttagcaatttgtaacactgtttttttgtccattctgtgaatggatatttgagagctcattgaggtcaatggcaaaaaaagcaaatatcccaggatagaaattagaagaaaactatctgagaaaccaccttgagatgtgtgcattcatctctcagagttaaactttcttttcattcagmagtttgcaaacactgttttgtaaaacctgcacaggtatatttgggagcccatggtgaaaaagaaaatacctttatgtaaaaactagaaagaagctttctgagaaactgatttttgatgtgtgccttcatctcacagagttaaacctttcttttc

SEQ ID NO: 309031 - DNA, 488 bp, Homo sapiens
aatgacaaaaaagcaaatatccctaaataaaaactagaaggaagctatctgagaagccacattgcagtgttcggattcatctcacagactttggaaacactgtttttgtagtaactgcaaagggacatttgggagcacattcaagcctatggtgaaaaagwaaataaattcagattaaaaactagaaagaggatttctgagaaactgctttctgatgtgtgcacataaattgtcttacagagttaaacctttcatttgattcagcagtttggaaacactgtttttctccattctgcaaatggacatttgggtgctcatggaggccgatagcaaataagaaaatattcccagaaaaaactggaaggaaattatcttagaatcctttttgtgatgtatgcagtcatctcacaaaattaaactttttttttcattcagcagtttggaaacaccactttttccttactgtcaatggacatttgggagcgcat

SEQ ID NO: 309032 - DNA, 488 bp, Homo sapiens
aatgacaaaaaagcaaatatccctaaataaaaactagaaggaagctatctgagaagccacattgcagtgttcggattcatctcacagactttggaaacactgtttttgtagtaactgcaaagggacatttgggagcacattcaagcctatggtgaaaaagtaaataaattcagattaaaaactagaaagaggatttctgagaaactgctttctgatgtgtgcacataaattgtcttacagagttaaacctttcatttgattcagcagtttggaaacactgtttttctccattctgcaaatggacatttgggtgctcatggaggccgatrgcaaataagaaaatattcccagaaaaaactggaaggaaattatcttagaatcctttttgtgatgtatgcagtcatctcacaaaattaaactttttttttcattcagcagtttggaaacaccactttttccttactgtcaatggacatttgggagcgcat

SEQ ID NO: 309033 - DNA, 562 bp, Homo sapiens
ttgcagtgttcggattcatctcacagactttggaaacactgtttttgtagtaactgcaaagggacatttgggagcacattcaagcctatggtgaaaaagtaaataaattcagattaaaaactagaaagaggatttctgagaaactgctttctgatgtgtgcacataaattgtcttacagagttaaacctttcatttgattcagcagtttggaaacactgtttttctccattctgcaaatggacatttgggtgctcatggaggccgatagcaaataagaaaatattcycagaaaaaactggaaggaaattatcttagaatcctttttgtgatgtatgcagtcatctcacaaaattaaactttttttttcattcagcagtttggaaacaccactttttccttactgtcaatggacatttgggagcgcattgaagccaatggcaaaaaagcacatatcaaaggatacacactggaaggaagatgtctgagacaccactttgagttgtgtgcattcatctcacagaattaaacctttctgttctctttttaaattttactttaaga

SEQ ID NO: 309034 - DNA, 488 bp, Homo sapiens
aatgacaaaaaagcaaatatccctaaataaaaactagaaggaagctatctgagaagccacattgcagtgttcggattcatctcacagactttggaaacactgtttttgtagtaactgcaaagggacatttgggagcacattcaagcctatggtgaaaaagtaaataaattcagattaaaaactagaaagaggatttctgagaaactgctttctgatgtgtgcacataaattgtcttacagagttaaacctttcatttgattcagcagtttggaaacactgtttttctccattctgcaaatggacatttgggtgctcatggaggccgatagcaaataagaaaatattcccagaaaaaactrgaaggaaattatcttagaatcctttttgtgatgtatgcagtcatctcacaaaattaaactttttttttcattcagcagtttggaaacaccactttttccttactgtcaatggacatttgggagcgcat

SEQ ID NO: 309035 - DNA, 488 bp, Homo sapiens
aatgacaaaaaagcaaatatccctaaataaaaactagaaggaagctatctgagaagccacattgcagtgttcggattcatctcacagactttggaaacactgtttttgtagtaactgcaaagggacatttgggagcacattcaagcctatggtgaaaaagtaaataaattcagattaaaaactagaaagaggatttctgagaaactgctttctgatgtgtgcacataaattgtcttacagagttaaacctttcatttgattcagcagtttggaaacactgtttttctccattctgcaaatggacatttgggtgctcatggaggccgatagcaaataagaaaatattcccagaaaaaactggaaggaaaytatcttagaatcctttttgtgatgtatgcagtcatctcacaaaattaaactttttttttcattcagcagtttggaaacaccactttttccttactgtcaatggacatttgggagcgcat

SEQ ID NO: 309036 - DNA, 562 bp, Homo sapiens
ttgcagtgttcggattcatctcacagactttggaaacactgtttttgtagtaactgcaaagggacatttgggagcacattcaagcctatggtgaaaaagtaaataaattcagattaaaaactagaaagaggatttctgagaaactgctttctgatgtgtgcacataaattgtcttacagagttaaacctttcatttgattcagcagtttggaaacactgtttttctccattctgcaaatggacatttgggtgctcatggaggccgatagcaaataagaaaatattcccagaaaaaactggaaggaaattatcttagaatcctttttgtgatgtatgcagtcatctcacaaaattaaactttttttttcattcagcagtttggaaacaccactttttccttwctgtcaatggacatttgggagcgcattgaagccaatggcaaaaaagcacatatcaaaggatacacactggaaggaagatgtctgagacaccactttgagttgtgtgcattcatctcacagaattaaacctttctgttctctttttaaattttactttaaga

SEQ ID NO: 309037 - DNA, 562 bp, Homo sapiens
ttgcagtgttcggattcatctcacagactttggaaacactgtttttgtagtaactgcaaagggacatttgggagcacattcaagcctatggtgaaaaagtaaataaattcagattaaaaactagaaagaggatttctgagaaactgctttctgatgtgtgcacataaattgtcttacagagttaaacctttcatttgattcagcagtttggaaacactgtttttctccattctgcaaatggacatttgggtgctcatggaggccgatagcaaataagaaaatattcccagaaaaaactggaaggaaattatcttagaatcctttttgtgatgtatgcagtcatctcacaaaattaaactttttttttcattcagcagtttggaaacaccactttttccttactgtcaatggacatttgggagygcattgaagccaatggcaaaaaagcacatatcaaaggatacacactggaaggaagatgtctgagacaccactttgagttgtgtgcattcatctcacagaattaaacctttctgttctctttttaaattttactttaaga

SEQ ID NO: 309038 - DNA, 519 bp, Homo sapiens
gtacccgttaaatcatcatttatattaagtatatctcctaatgctatccctgccccctccaccgaccccatgacaggccctggtgtgtgatgttccccttcctgtgtccaagtgttctcatggttcaactcgcacctatgagtgagaacatgcagtgtttggttttctgtccttgtgatagttggctgagaatgatggtttctgcacgagaatggtagaatctgcacagggatatttggggttgcattgaagcctayggtgaaaaaagtgaacatcccagaacgaaaactagaaggaagctatctgagaaaccactttgtgattggttcattcatctagcagaattaaaccattattttcattcaacaatttggcaacaatgcttttctggatctgcaaagggctatttgggagagcattgagtcctatggttaaaaagaaaatatcttcacataaaaacaataaagaagatttctgagaaactgctttgtcatgtgtgcattgaactcccagaaataa

SEQ ID NO: 309039 - DNA, 519 bp, Homo sapiens
gtacccgttaaatcatcatttatattaagtatatctcctaatgctatccctgccccctccaccgaccccatgacaggccctggtgtgtgatgttccccttcctgtgtccaagtgttctcatggttcaactcgcacctatgagtgagaacatgcagtgtttggttttctgtccttgtgatagttggctgagaatgatggtttctgcacgagaatggtagaatctgcacagggatatttggggttgcattgaagcctatggtgaaaaaagtgaacatcccagaaygaaaactagaaggaagctatctgagaaaccactttgtgattggttcattcatctagcagaattaaaccattattttcattcaacaatttggcaacaatgcttttctggatctgcaaagggctatttgggagagcattgagtcctatggttaaaaagaaaatatcttcacataaaaacaataaagaagatttctgagaaactgctttgtcatgtgtgcattgaactcccagaaataa

SEQ ID NO: 309040 - DNA, 519 bp, Homo sapiens
gtacccgttaaatcatcatttatattaagtatatctcctaatgctatccctgccccctccaccgaccccatgacaggccctggtgtgtgatgttccccttcctgtgtccaagtgttctcatggttcaactcgcacctatgagtgagaacatgcagtgtttggttttctgtccttgtgatagttggctgagaatgatggtttctgcacgagaatggtagaatctgcacagggatatttggggttgcattgaagcctatggtgaaaaaagtgaacatcccagaacgaaaactagaaggaagctatctgagaaaccactttgtgattggttcattcatctagcagaattaaaccattattttcattcaacaatttggcaacaatgcttttctggatctgcaaagggctatttgggagagcattgagtcctatggttaaaaagaaaatatcttyacataaaaacaataaagaagatttctgagaaactgctttgtcatgtgtgcattgaactcccagaaataa

SEQ ID NO: 309041 - DNA, 295 bp, Homo sapiens
agtttggaaatactgtttttrtcccttctgtgagtggatatttgggagctttttgatgccaatggtgaaaaagcaaatatcccagtataaaaactagaaggaagctatctagaaaccactttgtgatatgtgcattcatccctcagagttaaacctttcttttcagtgagcagttttgaaacagtatattttagaatctgcaaagggacttttaggagtgcattgaggactatgtgtaaaaagaaatatcttcagataaaaactagaaagaagctttctgagaaactgctttgtt

SEQ ID NO: 309042 - DNA, 424 bp, Homo sapiens
gctttgttatgtatacattccgctcacacagttacacctctgtttacatgcaaaaacttgtaaacactgtttttgtccatttctgtgaatgtgtatttgggagctcrttgaggccaatggaattaacgaatacacttggatcaaaactacaaggaagctatctcagaaaccgctttgtgatgtctgcattagtctcacagagtgaagccgttcttttcattcagcagtttggaaacactgtttctgtagaatctgtgaagggatatttgggagcgtattgaggcctatggtgaaaatgaaaatatcttcagataaaaactagaaagctttctgaaaaactgctttgggacgtgtgcattcatctcacaaatttaaacctttcttttgattcagcagtttggaaactgtatttctccattgggga

SEQ ID NO: 309043 - DNA, 507 bp, Homo sapiens
aaactgctttgttatgtatacattccgctcacacagttacacctctgtttacatgcaaaaacttgtaaacactgtttttgtccatttctgtgaatgtgtatttgggagctcgttgaggccaatggaattaacgaatacacttggatcaaaactacaaggaagctatctcagaaaccgctttgtgatgtctgcattagtctcacagagtgaagccgttcttttcattcagcagtttggaaacactgtttctgtagaatctgtgaagggatatttgggagcgtattgaggcctatggtgaaaawgaaaatatcttcagataaaaactagaaagctttctgaaaaactgctttgggacgtgtgcattcatctcacaaatttaaacctttcttttgattcagcagtttggaaactgtatttctccattggggaaatggacgtttgggagctcattgaggtcaattgtaaaaaagcaagtatcccaggataaaatcttgaaggaagctgtct

SEQ ID NO: 309044 - DNA, 507 bp, Homo sapiens
aaactgctttgttatgtatacattccgctcacacagttacacctctgtttacatgcaaaaacttgtaaacactgtttttgtccatttctgtgaatgtgtatttgggagctcgttgaggccaatggaattaacgaatacacttggatcaaaactacaaggaagctatctcagaaaccgctttgtgatgtctgcattagtctcacagagtgaagccgttcttttcattcagcagtttggaaacactgtttctgtagaatctgtgaagggatatttgggagcgtattgaggcctatggtgaaaatgaaaatatcttcagataaaaactagaaagctttctgaaaaactgctttgggacgtgtgcattcatctcacaaatttaaacctttcttttgattcagcagtttggaaactgtatttctccattggggaaatggacgtttgggagctcattgaggycaattgtaaaaaagcaagtatcccaggataaaatcttgaaggaagctgtct

SEQ ID NO: 309045 - DNA, 543 bp, Homo sapiens
atatttgggaacacattgagacctatagtgaaaaacaaagtatattcagatgaaaattagaaagaagctctctaagaaactgctttgtgatgtgtgcattcatctcacagagttaaacttttcttttgattcagcagtttggaaaaactgttattgtccattttgtgaatggacattttggagctcactgatgtcaatgatgaaaaagcaaatatcacaagataaaatctagaaagaagctatctggaaamtgctttgttatgtgtgcattcatctcacagatctacatctttctttggttcagtagtttggaaacactgtttccgtccattctgctcaaggatatatgaaagctcattgaggccaatggtgaaaaagctaatatccaaggataaaaactggaaggaatctatctgaaaaacggctttgtgatgtctgcattcatcttgcagagttaaacttttcttttgattgagcagtttggaggctctgtttttgtccattctgcaaatggacacttggaaactcattgaggccaattgc

SEQ ID NO: 309046 - DNA, 492 bp, Homo sapiens
aatctatctgaaaaacggctttgtgatgtctgcattcatcttgcagagttaaacttttcttttgattgagcagtttggaggctctgtttttgtccattctgcaaatggacacttggaaactcattgaggccaattgcagaaaagtgaatatcccattataaaagctagtaggaagctatctgaaacactgctttgtgatgtgtgcactcatcctgcagaattaaacttgccttttcattcagcagtttggaagcactgtttttgtagaatcttcaaagggatatttgggagtgcattgaggcctacattgaaaaagaaaatatcttcagataaaaaccggaaggaagctttctgagaaactgmcatttgaagtttgcattcatctcatagagttaaacctttctttttatggtggtttgaaagtactctttttgtcaattctgcatattaacattagggatctcagtgaggccaatggcaaaagaaggaata

SEQ ID NO: 309047 - DNA, 605 bp, Homo sapiens
gctttcatctcacagagttaaccattttatcattcagcagtgtggaaacattgcatttggagaamctttgaggttatatttgggagcacattgaagctaattgtgaaaaagaaggtatattcaggtaaaaactagaaagaagctctataagaaactgctttgtgatgtgtgcattcatctcacagagttaaacttttcttttgattcagcactttggaaacactgtttctgtccattctgcaaacggacattttggagctcattgaggtcagtgttgaaaaagtaaataacccaggataaaatctagaatgaagctatctggaaaccgctttctggtgtgtgcattcattgcacaaagataaaattgttttttcattcagcaattagaaaacattgttttgtccattctgtgaatggacatttgggagcttatggaggtcaatggcaaaaaggtgaattttccaggataaaaactagaaggaagctatagaagaaaccactttgtgatgcgtgcattcatctcacagaattaactttcctatacattcagcagtttggaaacactatttttgtagaatctacaaagggatatgttgtactgcatc

SEQ ID NO: 309048 - DNA, 528 bp, Homo sapiens
aattctgcgaatggacacctggtatgtcattgaggccaagggagaacaaatgaatatcacaggataaaaactagtaggaaaatatctgagaaaaccctttgtgatgtacgcattcatctggcaaaattaatcctttatttcattcagcagtttggaagcacggtttttggagaatctgcaaagggatcttagggagcacattcaggcctacagtggaaaagaaaatatcttcaggtaaaaactagaaagaaggttttggtgaaacagctttgtgatgtgtgctttcatctcacagagttaaccattttatcattcagcagtgtggaaacattgcatttggagaacctttgaggttatatttgggagcacattgaagctaattgtgaaaaagaargtatattcaggtaaaaactagaaagaagctctataagaaactgctttgtgatgtgtgcattcatctcacagagttaaacttttcttttgattcagcactttggaaacactgtttctgtccattctgcaaacgga

SEQ ID NO: 309049 - DNA, 528 bp, Homo sapiens
aattctgcgaatggacacctggtatgtcattgaggccaagggagaacaaatgaatatcacaggataaaaactagtaggaaaatatctgagaaaaccctttgtgatgtacgcattcatctggcaaaattaatcctttatttcattcagcagtttggaagcacggtttttggagaatctgcaaagggatcttagggagcacattcaggcctacagtggaaaagaaaatatcttcaggtaaaaactagaaagaaggttttggtgaaacagctttgtgatgtgtgctttcatctcacagagttaaccattttatcattcagcagtgtggaaacattgcatttggagaacctttgaggttatatttgggagcacattgaagctaattgtgaaaaagaaggtatattcaggtaaaaactagaaagaagctctataagaaactgctttgtgatgtstgcattcatctcacagagttaaacttttcttttgattcagcactttggaaacactgtttctgtccattctgcaaacgga

SEQ ID NO: 309050 - DNA, 528 bp, Homo sapiens
aattctgcgaatggacacctggtatgtcattgaggccaagggagaacaaatgaatatcacaggataaaaactagtaggaaaatatctgagaaaaccctttgtgatgtacgcattcatctggcaaaattaatcctttatttcattcagcagtttggaagcacggtttttggagaatctgcaaagggatcttagggagcacattcaggcctacagtggaaaagaaaatatcttcaggtaaaaactagaaagaaggttttggtgaaacagctttgtgatgtgtgctttcatctcacagagttaaccattttatcattcagcagtgtggaaacattgcatttggagaacctttgaggttatatttgggagcacattgaagctaattgtgaaaaagaaggtatattcaggtaaaaactagaaagaagctctataagaaactgctttgtgatgtgtgcattcatctcacagarttaaacttttcttttgattcagcactttggaaacactgtttctgtccattctgcaaacgga

SEQ ID NO: 309051 - DNA, 605 bp, Homo sapiens
gctttcatctcacagagttaaccattttatcattcagcagtgtggaaacattgcatttggagaacctttgaggttatatttgggagcacattgaagctaattgtgaaaaagaaggtatattcaggtaaaaactagaaagaagctctataagaaactgctttgtgatgtgtgcattcatctcacagagttaaacttttcttttgattcagcactttggaaacactgtttctgtccattctgcaaacggacattttggagctcattgaggtcagtgttgaaaaagtaaataacccaggataaaatctagaatgaagctatctggaaaccgctttctggtgtgtgcattcattgcacaaagataaaattgttttttcattcagcaattagaaaacattgttttgtccattctgtgaatggacatttgggagcttatggaggycaatggcaaaaaggtgaattttccaggataaaaactagaaggaagctatagaagaaaccactttgtgatgcgtgcattcatctcacagaattaactttcctatacattcagcagtttggaaacactatttttgtagaatctacaaagggatatgttgtactgcatc

SEQ ID NO: 309052 - DNA, 618 bp, Homo sapiens
tgtttttctagaatctgtgatgggatttttgtgagctcattaaggcctatggtgaaaaagggaatatcacagaacaaaaactagaaggaagctatctgagaaactactttgtgatgtgtaaaactgtcgtttcattcagcactttggaaacactgtttttgtagaatctgagaagtgatatttgggagtgcattggggcatgcggtgaaaaagaaaatatcttcagataaaaactagaaagaaacattttgagaaactgctttgcaatgtgtgcattcatctcacagaggtraaaccttctttggattcagcaatttcaaaacacattttttgtacatactgtgaatggatatttgggagctctttgaggccaatgttgaaaaagtaaatattcctagataaaaattagcaggaaggtaactgagaaataactttgtgataggtgcattcatgtcacagacttaaaacttacttttgagtcagccttttggaaaaagagtttatgtccattctgagaatggaaatttgcatgcccattgagtctattgcaaaaaactgaatgtcccaggataaaaagtagaatgaacctatctggaaactgctttgtgatgtatgcat

SEQ ID NO: 309053 - DNA, 618 bp, Homo sapiens
tgtttttctagaatctgtgatgggatttttgtgagctcattaaggcctatggtgaaaaagggaatatcacagaacaaaaactagaaggaagctatctgagaaactactttgtgatgtgtaaaactgtcgtttcattcagcactttggaaacactgtttttgtagaatctgagaagtgatatttgggagtgcattggggcatgcggtgaaaaagaaaatatcttcagataaaaactagaaagaaacattttgagaaactgctttgcaatgtgtgcattcatctcacagaggtgaaaccttctttggattcagcaatttcaaaacacattttttgtacatactgtgaatggatatttgggagctctttgaggccaatgttgaaaaagtaaatattccyagataaaaattagcaggaaggtaactgagaaataactttgtgataggtgcattcatgtcacagacttaaaacttacttttgagtcagccttttggaaaaagagtttatgtccattctgagaatggaaatttgcatgcccattgagtctattgcaaaaaactgaatgtcccaggataaaaagtagaatgaacctatctggaaactgctttgtgatgtatgcat

SEQ ID NO: 309054 - DNA, 606 bp, Homo sapiens
cattcatctcacagaggtgaaaccttctttggattcagcaatttcaaaacacattttttgtacatactgtgaatggatatttgggagctctttgaggccaatgttgaaaaagtaaatattcctagataaaaattagcaggaaggtaactgagaaataactttgtgataggtgcattcatgtcacagacttaaaacttacttttgagtcagccttttggaaaaagagtttatgtccattctgagaatggaaatttgcatgcccattgagtctattgcaaaaaactgaatgtcccagkataaaaagtagaatgaacctatctggaaactgctttgtgatgtatgcattcacctggcagtgttaaaacattcttttgatttagcagtttggaaacactgttttcattcattctgtgaatggacatttggttgctcattgatgccaaattcaaaaaagtgaataacccaaaacagaaacaacaaagaagctatctgagaacccactttgtgatgtgtgtattcatctcacatagttaaacctttcttttcatttagaagtttgaaaacattgtttttgtagaatctgtgaagtgataatttgcagtgcat

SEQ ID NO: 309055 - DNA, 468 bp, Homo sapiens
atcttgtgagacttattcactatcagaagaacagcatgggaaagacctgcccycatgattcaattacctcccacctgttccctcccacaacatgtgggaattcaagatgagatttggctggggacacagctaaaccctcttcacagctaccctcttctctctggatctgtgagtaataaacctacttctgtgatttcccatgtttggttctgtggcctccatgtgtctgagttgacctacactggaacctaactctcctctggccagggtctctgagagtggctcttgtcagaaatacacaggacacaggtgaggcaacagtcaccaggcatctcctagtctcaacagatgttctgtgagagggaggcctggtcgtgggatgcacacctggccactgctggggtaaggaagtgtcctgtgaaaggcacatgttaagcatccacaaccccctgaccagaaccccagaaa

SEQ ID NO: 309056 - DNA, 468 bp, Homo sapiens
atcttgtgagacttattcactatcagaagaacagcatgggaaagacctgccctcatgattcaattacctcccayctgttccctcccacaacatgtgggaattcaagatgagatttggctggggacacagctaaaccctcttcacagctaccctcttctctctggatctgtgagtaataaacctacttctgtgatttcccatgtttggttctgtggcctccatgtgtctgagttgacctacactggaacctaactctcctctggccagggtctctgagagtggctcttgtcagaaatacacaggacacaggtgaggcaacagtcaccaggcatctcctagtctcaacagatgttctgtgagagggaggcctggtcgtgggatgcacacctggccactgctggggtaaggaagtgtcctgtgaaaggcacatgttaagcatccacaaccccctgaccagaaccccagaaa

SEQ ID NO: 309057 - DNA, 408 bp, Homo sapiens
taataaacctacttctgtgatttcccatgtttggttctgtggcctccatgtgtctgagytgacctacactggaacctaactctcctctggccagggtctctgagagtggctcttgtcagaaatacacaggacacaggtgaggcaacagtcaccaggcatctcctagtctcaacagatgttctgtgagagggaggcctggtcgtgggatgcacacctggccactgctggggtaaggaagtgtcctgtgaaaggcacatgttaagcatccacaaccccctgaccagaaccccagaaaggcagggctccaactgacaatcactctccagagacaaacctcaagccctaactggaggaaaagaaaataatgtaaaaagttgaatttatcttaccatttcaatgatccagtaa

SEQ ID NO: 309058 - DNA, 468 bp, Homo sapiens
atcttgtgagacttattcactatcagaagaacagcatgggaaagacctgccctcatgattcaattacctcccacctgttccctcccacaacatgtgggaattcaagatgagatttggctggggacacagctaaaccctcttcacagctaccctcttctctctggatctgtgagtaataaacctacttctgtgatttcccatgtttggttctgtggcctccatgtgtctgagttgacctacactgsaacctaactctcctctggccagggtctctgagagtggctcttgtcagaaatacacaggacacaggtgaggcaacagtcaccaggcatctcctagtctcaacagatgttctgtgagagggaggcctggtcgtgggatgcacacctggccactgctggggtaaggaagtgtcctgtgaaaggcacatgttaagcatccacaaccccctgaccagaaccccagaaa

SEQ ID NO: 309059 - DNA, 355 bp, Homo sapiens
gatctctttgagccccaaggtgaaaaagcgaatctcccatgataaaaaatagaaggaatctatctgataaactgccttgtgatgtgtacattcacctcaaagagttaaacttttcattcagcagtttggaaaaactgttttggtaaaatctgcaaaggtgtacttgggagtgcattggggccaaactagaagtttccttttagtttttatctgatgatactttctttttcaccagaggtctcaatgtgctcccacctatcccttcacagagactacaaaaacagtgattccaaactgctgaatgaaaataaaggtttcartctgtgggatgaatgcacatatcacaaagccattt

SEQ ID NO: 309060 - DNA, 408 bp, Homo sapiens
taataaacctacttctgtgatttcccatgtttggttctgtggcctccatgtgtctgagttgacctacactggaacctaactctcctctggccagggtctctgagagtggctcttgtcagaaatacacaggacacaggtgaggcaacagtcaccaggcatctcctagtctcaacagatgttctgtgagagggaggcctggtcgtgggatgyacacctggccactgctggggtaaggaagtgtcctgtgaaaggcacatgttaagcatccacaaccccctgaccagaaccccagaaaggcagggctccaactgacaatcactctccagagacaaacctcaagccctaactggaggaaaagaaaataatgtaaaaagttgaatttatcttaccatttcaatgatccagtaa

SEQ ID NO: 309061 - DNA, 488 bp, Homo sapiens
gccctaactggaggaaaagaaaataatgtaaaaagttgaatttatcttacyatttcaatgatccagtaaagacattctatgcctgtacaccacatattttctttgattgtggatttattttagatagaattttaggtctggctttcactttagcctggtccctacctcaagcataaggtaaagattttccatgcgttcttttctggtactactacctgccagtgtggggtcatgtcctagtctatcttgagggaatccccctgttcattattgtcagagtgagactgttaagtcttgatttccctggacaacttcactgcatgacttttaatatgattttttaatataccctttactggacaataaattctatagttatctgagaaagagatatggtcaggaagaggcattgcctcattcagcttttctctttggtgaactcgcatatgttctcctcacccgccagtcacctctaaaccgtattgttc

SEQ ID NO: 309062 - DNA, 488 bp, Homo sapiens
gccctaactggaggaaaagaaaataatgtaaaaagttgaatttatcttaccatttcaatgatccagtaaagacattctatgcctgtacaccacatattttctttgattgtggatttattttagatagaattttaggtctggctttcactttagcctggtccctacctcaagcataaggtaaagattttccatgcgttcttttctggtactactacctgccagtgtggggtcatgtcctaktctatcttgagggaatccccctgttcattattgtcagagtgagactgttaagtcttgatttccctggacaacttcactgcatgacttttaatatgattttttaatataccctttactggacaataaattctatagttatctgagaaagagatatggtcaggaagaggcattgcctcattcagcttttctctttggtgaactcgcatatgttctcctcacccgccagtcacctctaaaccgtattgttc

SEQ ID NO: 309063 - DNA, 410 bp, Homo sapiens
tgtgaatggatatttaggagctcattgaggccactggcaaaaaagkgaatataccaggataaaaactagaatgaggctatctgataaaccactttgtaatgtgtgcattcaacacagagagttaaacctttcttttcattcagcagtgtggaaaccctgtttttgtagaacctgcgaatggatatttgggagcccattgaggcctatggtgaacaaaaaaaaatcttcagataaaaactagaaagagacattctgagaaacagctttgttttgtgtgcattcatctcacagagttaaacatttactttgattcagcagtttggaaatcctgcttttgtagaatctaccaagagacactttggagcacatagaagactatggtgaaaaagaatatatcttcatataaaact

SEQ ID NO: 309064 - DNA, 410 bp, Homo sapiens
tgtgaatggatatttaggagctcattgaggccactggcaaaaaagggaatataccaggataaaaactagaatgaggctatctgataaaccactttgtaatgtgtgcattcaacacagagagttaaacctttcttttcattcagcagtgtggaaaccctgtttttgtagaacctgcgaatggatatttgggagcccattgaggcctatggtgaacaaraaaaaatcttcagataaaaactagaaagagacattctgagaaacagctttgttttgtgtgcattcatctcacagagttaaacatttactttgattcagcagtttggaaatcctgcttttgtagaatctaccaagagacactttggagcacatagaagactatggtgaaaaagaatatatcttcatataaaact

SEQ ID NO: 309065 - DNA, 609 bp, Homo sapiens
aatggtgtaaaagcaaatatgccaggataaaaactagaaggatgatatttgagaaaccgctttgtgatgtgtgcattcatctcgcagagtaaacctttcttttgactgagcagtttggaaacactgttttttgtccattctgtgaatggacatttgggagctcattgaggtcaatggcacaaaagtgaatatcccaggataaaaactggaaggaagctatctgagaagctactgtgtgatgtgtgyattaatcttcccgtgttaaaactttcttttgattcagctgtttggaaacactgtttttgtggttcttcaaatggatatttgggagctcattgaggccaatggctaaaaagcaaatatcccaggaaaaaaaactggaaggaaattatctgagaatctgctgtacgatgggtgcattcatctcacagaggtaaacctttcatttcattttgcagttttgaaatgctatttttgtagaatctgtgacgggatatttgggagcactttcaggccaatggtgaaaatgcaaatatcatcagataaaaactctaaagaaattttctgagaaaatgctttgtggtgtgcacattcatctcacagagctaa

SEQ ID NO: 309066 - DNA, 592 bp, Homo sapiens
aagtgaatatcccaggataaaaactggaaggaagctatctgagaagctactgtgtgatgtgtgcattaatcttcccgtgttaaaactttcttttgattcagctgtttggaaacactgtttttgtggttcttcaaatggatatttgggagctcattgaggccaatggctaaaaagcaaatatcccaggaaaaaaaactggaaggaaattatctgagaatctgctgtacgatgggtgcattcatctcacagaggtaaacctttcatttcattttgcagttttgaaatgctatttttgtagaatctgtgacgggatatttgggagcactttcaggccaatggtgaaaatgcaaatatcatcagataaaaactctaaagaaattttctgagaaaatgctttgtggtgtgcacattcatctcacagagctaaaactttgttttgattcagcagtttggaarcactgtttttctccattctgcaaatggacagttgggagctcattgaggctaatggctaaaaaagtaaatgtcacaggataataactagaaggaagctatttgagaaactgctttgtgatgtatacattcatctcac

SEQ ID NO: 309067 - DNA, 493 bp, Homo sapiens
aacctttcttttgaatcagctgtttgtaaacactgtttttttttttcattctgcaaatggatattttggagctctttgaggccaatgrggaaaaagagaacatcccaggataaaaaccagaaggaagaaatcagagaaactgctttgtgatgtgtgcattcatttcacagatttaaacgtttcttttgattcagcagtttagaaacactgtttttttccccttctgcaaatggacgtttgggagctcattgtggctaatgatgaaaaagcaaatatcccatgataaaaacttcaaagaagctatctcagaaactgctttgttatgtgcacatttgtctcagagttttaatcattacttttgatcaacttttttggaaacactgtttttgtacattctgccaatggacatttgggagattgttgaggccaatggtgtagaagaaaatatcttcaaatgaaaattagaaggaagtttcagagaaactgctttgtg

SEQ ID NO: 309068 - DNA, 493 bp, Homo sapiens
aacctttcttttgaatcagctgtttgtaaacactgtttttttttttcattctgcaaatggatattttggagctctttgaggccaatggggaaaaagagaacatcccaggataaaaaccagaaggaagaaatcagagaaactgctttgtgatgtgtgcattcatttcacagatttaaacgtttcttttgattcagcagtttrgaaacactgtttttttccccttctgcaaatggacgtttgggagctcattgtggctaatgatgaaaaagcaaatatcccatgataaaaacttcaaagaagctatctcagaaactgctttgttatgtgcacatttgtctcagagttttaatcattacttttgatcaacttttttggaaacactgtttttgtacattctgccaatggacatttgggagattgttgaggccaatggtgtagaagaaaatatcttcaaatgaaaattagaaggaagtttcagagaaactgctttgtg

SEQ ID NO: 309069 - DNA, 465 bp, Homo sapiens
aaactggaaggaagctatctgggaaacctctttgagatgtgtgctttcatcttgctgacttaaacatgtcttttgtttgagtagtttgcaaacactctttttgtccattctacaaatagacttttggaactccttgwggtcaatggcaaaaaaggactacctaagggtgaaaacgagaaggaagctatgtgagaaattgctttgtgttgtgtacattcatctggcagagttaaacatttcttttcattcactgtttggaaacactgtttgtgcaggagctgctaagggatatttgaaagcgcattgaagcctatggagaaaaagaaaataacttcaattaaaaataagacagaagcttgctgagtaagtgctttattatatgtgcagtcatctcatagaggtaaacctttattttgattgagtagtttggaaacactgtctttgcagaatctgggaaggaaagag

SEQ ID NO: 309070 - DNA, 465 bp, Homo sapiens
aaactggaaggaagctatctgggaaacctctttgagatgtgtgctttcatcttgctgacttaaacatgtcttttgtttgagtagtttgcaaacactctttttgtccattctacaaatagacttttggaactccttgtggycaatggcaaaaaaggactacctaagggtgaaaacgagaaggaagctatgtgagaaattgctttgtgttgtgtacattcatctggcagagttaaacatttcttttcattcactgtttggaaacactgtttgtgcaggagctgctaagggatatttgaaagcgcattgaagcctatggagaaaaagaaaataacttcaattaaaaataagacagaagcttgctgagtaagtgctttattatatgtgcagtcatctcatagaggtaaacctttattttgattgagtagtttggaaacactgtctttgcagaatctgggaaggaaagag

SEQ ID NO: 309071 - DNA, 578 bp, Homo sapiens
ctgtttttgtaaaatctggggagggatatttgggagtatattggggccaatggtgaaaaaggaaatgtcttcagaaagcaacttgaaggaagctttcactgaaactgctttgtgatgtgtgcattcatctcacagaggtaaacctttatttagattcagcagtttggaaacagtgttatggtaaaatctgtgtgkgtttatttggttttgctttgaggcctactgtgaagaaggaaatattttcaggcataaattagaaagaaactttctgaaaaattgctttctgatttatgcatgaatctcacagagttaaaccttccttttgattgaacaatttggaaacaaattatttttagaatatgcaaaagtatacttgggagtgcgttgggacctatggtgaaaaaggaattatcttctcataaaaactcgaaagaagctttgtgacaaactgctttgtgatgagttcattcatctcccagagttaaaccttcattttgattgtgcaattaggaaacgtgtttttgtaggatctgcaaaaggatctttggagcacaatgaggccaatggtgaaaaagaaa

SEQ ID NO: 309072 - DNA, 540 bp, Homo sapiens
tgagatcgcaattatcccttgcagaacctacaaaaatggtgtttccaaactgctcgatcaaaagaaaggtttaactctctgagatgaatgcacacaaaacaaagcagtatctcagaatgcttctgtctagttctttctcttaatatatttccttttccatcgtatgcttaaatacactttgaaatatcccttcacagtttctataaaaacagtttttctgaactgttccatcaacagaaggatttaagtgtgtgagatgaatgtacacatcagaaatcagtttctcataatgcttctttccatttttttatctgaagatatttctttgttcaccataggctttcttgtgttacctaatattgcttcacagatrttgcaaaaacagtgtttacaagctgccacataaaaagaaaggtttaactctgtgagatgaatgcacacatcacaaagcagtttctcaaaacgcttctttccgttttgtatagaatgatattttctttaacaacgtaggtttcaatgggctccaaagtatctcatcac

SEQ ID NO: 309073 - DNA, 561 bp, Homo sapiens
caaagtagaaagaaactttctctgaaactgctttgwgatgtgtgcattcatctcacagagttaaaactttcttttgattcagcactgtggaaacattgtttctgtccattctgcaaatggacatttgggagctcattgaggtcaatggtgaaaaagcaaatattccaggaaaaagtctagaagaaatctacgtgagaaactggtttgtaatgtgtgcattcatctcacagagctaaacctttcttttgatacagcagtttggaaaaactgttcttctcctttgtgtgattggaaaattgggagctcattgatgccaatgacaaaaaagtgaatatcccaggaaaaatactagaatgaagctatctaagaaaccacgtttgggatgtgtgcattcatctctcagtattaagcctttcttttcattaagcagcttggaaacactatttttgttcattctgtgaatggacatttgggaggtcattgatgccaatggcaaaaaagtgaatatcccaggataaaaaaaagaatgacgctatatgggaaaccactttgtgttttgtg

SEQ ID NO: 309074 - DNA, 561 bp, Homo sapiens
caaagtagaaagaaactttctctgaaactgctttgtgatgtgtgcattcatctcacagagttaaaactttcttttgattcagcactgtggaaacattgtttctgtccattctgcaaatggacatttgggagctcattgaggtcaatggtgaaaaagcaaatattccaggaaaaagtctagaagaaatctacgtgagaaactggtttgtratgtgtgcattcatctcacagagctaaacctttcttttgatacagcagtttggaaaaactgttcttctcctttgtgtgattggaaaattgggagctcattgatgccaatgacaaaaaagtgaatatcccaggaaaaatactagaatgaagctatctaagaaaccacgtttgggatgtgtgcattcatctctcagtattaagcctttcttttcattaagcagcttggaaacactatttttgttcattctgtgaatggacatttgggaggtcattgatgccaatggcaaaaaagtgaatatcccaggataaaaaaaagaatgacgctatatgggaaaccactttgtgttttgtg

SEQ ID NO: 309075 - DNA, 560 bp, Homo sapiens
aacctttcttttgatacagcagtttggaaaaactgttcttctcctttgtgtgattggaaaattgggagctcattgatgccaatgacaaaaaagtgaatatcccaggaaaaatactagaatgaagctatctaagaaaccacgtttgggatgtgtgcattcatctctcagtattaagcctttcttttcattaagcagcttggaaacactatttttgttcattctgtgaatggacatttgggaggtcattgatgccaatggcaaaaamgtgaatatcccaggataaaaaaaagaatgacgctatatgggaaaccactttgtgttttgtgctttcttctcacagaggtaaacctttctttccattcagcagtttggaaacactgtttttgtagaatctgcaaagagatattttgaagctcattgaggcctatggtgaaaaggaaaatgttttcagaaagaaatcagaaagaagctttctgagaaactgctttgtgatgtgtgcacccatcccacagagttacacctttcttttcattcatcagtttgtaagcactgtttttgac

SEQ ID NO: 309076 - DNA, 560 bp, Homo sapiens
aacctttcttttgatacagcagtttggaaaaactgttcttctcctttgtgtgattggaaaattgggagctcattgatgccaatgacaaaaaagtgaatatcccaggaaaaatactagaatgaagctatctaagaaaccacgtttgggatgtgtgcattcatctctcagtattaagcctttcttttcattaagcagcttggaaacactatttttgttcattctgtgaatggacatttgggaggtcattgatgccaatggcaaaaaagtgaatatcccaggataaaaaaaagaatgacgctatatgggaaaccactttgtgttttgtgcwttcttctcacagaggtaaacctttctttccattcagcagtttggaaacactgtttttgtagaatctgcaaagagatattttgaagctcattgaggcctatggtgaaaaggaaaatgttttcagaaagaaatcagaaagaagctttctgagaaactgctttgtgatgtgtgcacccatcccacagagttacacctttcttttcattcatcagtttgtaagcactgtttttgac

SEQ ID NO: 309077 - DNA, 647 bp, Homo sapiens
gtaaacctttctttccattcagcagtttggaaacactgtttttgtagaatctgcaaagagatattttgaagctcattgaggcctatggtgaaaaggaaaatgttttcagaaagaaatcagaaagaagctttctgagaaactgctttgtgatgtgtgcacccatcccacagagttrcacctttcttttcattcatcagtttgtaagcactgtttttgaccactctgccactagacatttcggagctcattgtggccaaaggcaaaatatccattatcccaggataaaaactcaaggaagctatctgagaatccactttgtgatttgtgcacccatctcacagagttaaaaatttcttttcattcaccagtttggaaacactgtttttgtaaaatctgtgagtgggtatttggcagtggattgaggcctatggagaaaaagaaaataacttcagataaaaactagaaagaagttttctgggaaattcccttgtgatgtgtgcattcatctcacagaagtaaaactttcttttgattcagcactttgcaaacactgtttttgtccattcagagaatggacatttgagagataattgaggccagtggtgaaaatcaagtatcccaggataacaactaaaaggaagctaact

SEQ ID NO: 309078 - DNA, 647 bp, Homo sapiens
gtaaacctttctttccattcagcagtttggaaacactgtttttgtagaatctgcaaagagatattttgaagctcattgaggcctatggtgaaaaggaaaatgttttcagaaagaaatcagaaagaagctttctgagaaactgctttgtgatgtgtgcacccatcccacagagttacacctttcttttcattcatcagtttgtaagcactgtttttgaccactctgcmactagacatttcggagctcattgtggccaaaggcaaaatatccattatcccaggataaaaactcaaggaagctatctgagaatccactttgtgatttgtgcacccatctcacagagttaaaaatttcttttcattcaccagtttggaaacactgtttttgtaaaatctgtgagtgggtatttggcagtggattgaggcctatggagaaaaagaaaataacttcagataaaaactagaaagaagttttctgggaaattcccttgtgatgtgtgcattcatctcacagaagtaaaactttcttttgattcagcactttgcaaacactgtttttgtccattcagagaatggacatttgagagataattgaggccagtggtgaaaatcaagtatcccaggataacaactaaaaggaagctaact

SEQ ID NO: 309079 - DNA, 529 bp, Homo sapiens
ctttgtgttttgtgctttcttctcacagaggtaaacctttctttccattcagcagtttggaaacactgtttttgtagaatctgcaaagagatattttgaagctcattgaggcctatggtgaaaaggaaaatgttttcagaaagaaatcagaaagaagctttctgagaaactgctttgtgatgtgtgcacccatcccacagagttacacctttcttttcattcatcagtttgtaagcactgtttttgaccactctgccactagacatttcggagctcattgtggccaaaggcaaaatatccawtatcccaggataaaaactcaaggaagctatctgagaatccactttgtgatttgtgcacccatctcacagagttaaaaatttcttttcattcaccagtttggaaacactgtttttgtaaaatctgtgagtgggtatttggcagtggattgaggcctatggagaaaaagaaaataacttcagataaaaactagaaagaagttttctgggaaattcccttgtgatgtgtg

SEQ ID NO: 309080 - DNA, 647 bp, Homo sapiens
gtaaacctttctttccattcagcagtttggaaacactgtttttgtagaatctgcaaagagatattttgaagctcattgaggcctatggtgaaaaggaaaatgttttcagaaagaaatcagaaagaagctttctgagaaactgctttgtgatgtgtgcacccatcccacagagttacacctttcttttcattcatcagtttgtaagcactgtttttgaccactctgccactagacatttcggagctcattgtggccaaaggcaaaatatccattatcccaggataaaaactcaaggaagctatctgagaatccactttgtgatttrtgcacccatctcacagagttaaaaatttcttttcattcaccagtttggaaacactgtttttgtaaaatctgtgagtgggtatttggcagtggattgaggcctatggagaaaaagaaaataacttcagataaaaactagaaagaagttttctgggaaattcccttgtgatgtgtgcattcatctcacagaagtaaaactttcttttgattcagcactttgcaaacactgtttttgtccattcagagaatggacatttgagagataattgaggccagtggtgaaaatcaagtatcccaggataacaactaaaaggaagctaact

SEQ ID NO: 309081 - DNA, 475 bp, Homo sapiens
actgtttttgtccattcagagaatggacatttgagagataattgaggccagtggtgaaaatcaagtatcccaggataacaactaaaaggaagctaactgtggaatcactttgtgatatgtgcattcatcttgcagttaaacctcacttttcattcagttctttggaaactctgtgtttgtccattctgcaaataracatttgagagctcattgagactgaaggtgaaaatgtgaatttcccaggataaaaactagaaggatgctatctcagaaatggctttgtgatgtgtccattcactcatacatttaaatcttccttttgattccacagtttggaagcactggttttatcctttcagtgaaaggacatatcagagggcattgaggactagggtgcaaaagaaaatatcttctgaaaaaaatggaaaagaggctttctgagaaactgctttgcaatgtatgcatccatttcaca

SEQ ID NO: 309082 - DNA, 577 bp, Homo sapiens
taaacctcacttttcattcagttctttggaaactctgtgtttgtccattctgcaaatagacatttgagagctcattgagactgaaggtgaaaatgtgaatttcccaggataaaaactagaaggatgctatctcagaaatgkctttgtgatgtgtccattcactcatacatttaaatcttccttttgattccacagtttggaagcactggttttatcctttcagtgaaaggacatatcagagggcattgaggactagggtgcaaaagaaaatatcttctgaaaaaaatggaaaagaggctttctgagaaactgctttgcaatgtatgcatccatttcacagagtcaacactttcttttgattcagcactttggaaacactgtttttgtccattctaggaaagggcatttgtgagctcattgaggccaatggtgaaacagtgaaaattccaggataaaaactacaaggaaactatctgagaaactgttttgagatgtgtgcattcatctcacggagttacacctttcttttcattcatcagttaagttttaacagatttaaaattttaacagagttaaa

SEQ ID NO: 309083 - DNA, 577 bp, Homo sapiens
taaacctcacttttcattcagttctttggaaactctgtgtttgtccattctgcaaatagacatttgagagctcattgagactgaaggtgaaaatgtgaatttcccaggataaaaactagaaggatgctatctcagaaatggctttgtgatgtgtccattcactcatacatttaaatcttccttttgattccacagtttggaagcactggttttatcctttcagtgaaaggacatatcagagggcattgaggactagggtgcaaaagaaaatatcttctgaaaaaaatggaaaagaggctttctgagaaactgctttgcaatgtatgcatccatttcacagagtcaacactttcttttgattcagcactttggaaacactgtttttgtccattctaggaaagggcatttgtgagctcmttgaggccaatggtgaaacagtgaaaattccaggataaaaactacaaggaaactatctgagaaactgttttgagatgtgtgcattcatctcacggagttacacctttcttttcattcatcagttaagttttaacagatttaaaattttaacagagttaaa

SEQ ID NO: 309084 - DNA, 577 bp, Homo sapiens
taaacctcacttttcattcagttctttggaaactctgtgtttgtccattctgcaaatagacatttgagagctcattgagactgaaggtgaaaatgtgaatttcccaggataaaaactagaaggatgctatctcagaaatggctttgtgatgtgtccattcactcatacatttaaatcttccttttgattccacagtttggaagcactggttttatcctttcagtgaaaggacatatcagagggcattgaggactagggtgcaaaagaaaatatcttctgaaaaaaatggaaaagaggctttctgagaaactgctttgcaatgtatgcatccatttcacagagtcaacactttcttttgattcagcactttggaaacactgtttttgtccattctaggaaagggcatttgtgagctcattgaggccaatggtgaaacagtgaaaattccaggataaaaactacaaggaaactatctgagaaactgttttgagatgtgtgcattcatctcacggagttacacctttcttttcrttcatcagttaagttttaacagatttaaaattttaacagagttaaa

SEQ ID NO: 309085 - DNA, 593 bp, Homo sapiens
gtgtaccttcacctcacacagttaaatctttcttttgattcagcagtttggaaatgctgtttttgtccattctgtgaaaggatattgggagctcattgaggtctatggtgaaaaagaaaatatcttcagaggaaaacaggaaagaagcattcctggaaattgcttygtgttttgtccattcatctcacagagttaaaccattcttttgattcagcagtttggaaacactgttttttccattctgcgaatggacatttgggagctcattgaagccagtggccaaaaatcgaatgtcccagtataaaaactaagaggaagctatatgagaaaccactttgtgatgtgtgctttcttctcacagagttaaacctttcttttcattcagcagtttgaaaacatagttttcgtccattctgagaatggatatttgggagctcattgaggctaatggtgaaaaacccaatatcccaggataaaaatgaaggaagccatctgagaatccaatttgtgatgtatctattcaccttgaggagttgattcattctttttcattcaggattttggaaacactgtttttgtagaatctgcaaatg

SEQ ID NO: 309086 - DNA, 593 bp, Homo sapiens
gtgtaccttcacctcacacagttaaatctttcttttgattcagcagtttggaaatgctgtttttgtccattctgtgaaaggatattgggagctcattgaggtctatggtgaaaaagaaaatatcttcagaggaaaacaggaaagaagcattcctggaaattgcttcgtgttttgtccattcatctcacagagttaaaccattcttttgattcagcagtttggaaacactgttttttccattctgcgaatggacatttgggagctcattgaagccagtggccaaaaatcgaatgtcccagtataaaaactaagaggaagctatatgagaaaccactttgtgatgtgtgctttcttctcacagagttaaacctttcttttcattcagcagtttgaaaacatagttttcgtccattctgagaatggatatttgggagctcattgaggctaatggtgaaaaacccaatatcccaggataaaaatgaaggaagccatctgagaawccaatttgtgatgtatctattcaccttgaggagttgattcattctttttcattcaggattttggaaacactgtttttgtagaatctgcaaatg

SEQ ID NO: 309087 - DNA, 593 bp, Homo sapiens
gtgtaccttcacctcacacagttaaatctttcttttgattcagcagtttggaaatgctgtttttgtccattctgtgaaaggatattgggagctcattgaggtctatggtgaaaaagaaaatatcttcagaggaaaacaggaaagaagcattcctggaaattgcttcgtgttttgtccattcatctcacagagttaaaccattcttttgattcagcagtttggaaacactgttttttccattctgcgaatggacatttgggagctcattgaagccagtggccaaaaatcgaatgtcccagtataaaaactaagaggaagctatatgagaaaccactttgtgatgtgtgctttcttctcacagagttaaacctttcttttcattcagcagtttgaaaacatagttttcgtccattctgagaatggatatttgggagctcattgaggctaatggtgaaaaacccaatatcccaggataaaaatgaaggaagccatctgagaatccaatttgtgatgtatctattcaccttgaggagttgattcattctttttcattcaggattttggaaacaytgtttttgtagaatctgcaaatg

SEQ ID NO: 309088 - DNA, 535 bp, Homo sapiens
agcagtttgtaaacactgtttttgtagaatctctgaagggatakttgggagctcgttgaggactatgatgaaaaaggaaatatcttcaaataaatacatagaaattttctgagatactgatttgagatgtgtgcatacaacacaccgagttaaatccctcttttcattgaacagttttgacacacattttttgtagattctgcaaagggatattttggaacactttgaggtgtatggtgaaaaaggagatatcttcagctaaaaaatagaaagaaaggttctgagacacagctttgtgctgtgtgcattcatctcacagatgtaaacctttctttcgattgagcagtttggaaacactgtttttgtagaatcagagaagggataattgggagatcattaagtcctatggtgaaaaaggaaatatccagataaaaacaaaaaatatttctgagaaactgctctgtgatgtgtgcattcatgtcacagagtcaaaactttcttttcattgagcattttgtaaacactgtttttgtag

SEQ ID NO: 309089 - DNA, 535 bp, Homo sapiens
agcagtttgtaaacactgtttttgtagaatctctgaagggatagttgggagctcgttgaggactatgatgaaaaaggaaatatcttcaaataaatacatagaaattttctgagatactgatttgagatgtgtgcatacaacacaccgagttaaatccctcttttcattgaacagttttgacacacattttttgtagattctgcaaagggatattttggaacactttgaggtgtatggtgaaaaaggagatatcttcagctaaaaaatagaaagaaaggttctgagacacagctttgtgctgtgygcattcatctcacagatgtaaacctttctttcgattgagcagtttggaaacactgtttttgtagaatcagagaagggataattgggagatcattaagtcctatggtgaaaaaggaaatatccagataaaaacaaaaaatatttctgagaaactgctctgtgatgtgtgcattcatgtcacagagtcaaaactttcttttcattgagcattttgtaaacactgtttttgtag

SEQ ID NO: 309090 - DNA, 596 bp, Homo sapiens
tgtaattaggcctatggtgaaaaataaaataccctcatataaaaactagatagaagatttctgagaaactgctttgtgatgtgtgaattcatctcacagaattaaagctttttttgattcagcactttggaaaaactgttttgttagaaattgtgaagggatatttcagagtgctttgaggccaacagaaaaaaaggaaatatcttcrgatcaaaactagaaagaatatttctgagaaactgctttgtgatgtgtccattggtctcatagaattaaacctttctttttaaagagcagcttgaaaacactggttttgtagaatctgcaaagggatatttgggagcatatttagacctttgatgaaaaaggtaatatcttcaggtaaaaactagaaagaaggcttctgagacacggctttgttgtgtgtgcactcatttcaagatgtaaactttccttttgattgagcagtttggaatctgtttttatagaatctgcaaagggatattttggagcacattgacacctatggtgaaaaatcttcggataaatactagaaataagtgttctgagaaactgttttgtgatgtgtgcattag

SEQ ID NO: 309091 - DNA, 424 bp, Homo sapiens
gacctttgatgaaaaaggtaatatcwtcaggtaaaaactagaaagaaggcttctgagacacggctttgttgtgtgtgcactcatttcaagatgtaaactttccttttgattgagcagtttggaatctgtttttatagaatctgcaaagggatattttggagcacattgacacctatggtgaaaaatcttcggataaatactagaaataagtgttctgagaaactgttttgtgatgtgtgcattagtctctcagagtcaaaactttcatttgactgagcagtttggaaacactatctttgtagagtctgtgaagggatagtaggaagcacattgaggccaaggtgaaaaacgaaatatcttcagagaaaaactagagagagggtttcagagaaactactttgtgatgtctgcattcatctcacag

SEQ ID NO: 309092 - DNA, 596 bp, Homo sapiens
tgtaattaggcctatggtgaaaaataaaataccctcatataaaaactagatagaagatttctgagaaactgctttgtgatgtgtgaattcatctcacagaattaaagctttttttgattcagcactttggaaaaactgttttgttagaaattgtgaagggatatttcagagtgctttgaggccaacagaaaaaaaggaaatatcttcggatcaaaactagaaagaatatttctgagaaactgctttgtgatgtgtccattggtctcatagaattaaacctttctttttaaagagcagcttgaaaacactggttttgtagaatctgcaaagggatatttgggagcatatttagacctttgatgaaaaaggtaatatcttcaggtaaaaactagaaagaaggcttytgagacacggctttgttgtgtgtgcactcatttcaagatgtaaactttccttttgattgagcagtttggaatctgtttttatagaatctgcaaagggatattttggagcacattgacacctatggtgaaaaatcttcggataaatactagaaataagtgttctgagaaactgttttgtgatgtgtgcattag

SEQ ID NO: 309093 - DNA, 424 bp, Homo sapiens
gacctttgatgaaaaaggtaatatcttcaggtaaaaactagaaagaaggcttctgagacacggctttgttgtgtgtgcactcatttcaagatgtaaactttccttttgattgagcagtttggaatctgtttttatagaatctgcaaagggatattttggagcacattgacacctatggtgaaaaatcttcggataaatactagaaataagtgttctgagaaactgttttgtgatgtgtgcattagtctctcagagtcaaaactttcatttgactgagcagtttggaaacactatctttgtagwgtctgtgaagggatagtaggaagcacattgaggccaaggtgaaaaacgaaatatcttcagagaaaaactagagagagggtttcagagaaactactttgtgatgtctgcattcatctcacag

SEQ ID NO: 309094 - DNA, 424 bp, Homo sapiens
gacctttgatgaaaaaggtaatatcttcaggtaaaaactagaaagaaggcttctgagacacggctttgttgtgtgtgcactcatttcaagatgtaaactttccttttgattgagcagtttggaatctgtttttatagaatctgcaaagggatattttggagcacattgacacctatggtgaaaaatcttcggataaatactagaaataagtgttctgagaaactgttttgtgatgtgtgcattagtctctcagagtcaaaactttcatttgactgagcagtttggaaacactatctttgtagagtctgtgaagggatagtaggaagcacattgaggccaaggtgaaaaacgaaatatcttcagagaaaaactagagagagggtttcagagaarctactttgtgatgtctgcattcatctcacag

SEQ ID NO: 309095 - DNA, 510 bp, Homo sapiens
ttctacaaacacagtgtttccaaactgatcaatcaaaagaatggtttacctctttgacatgaatgcactcatcacaaggcagtttatcaaatagcttctgtctagttcttctgtgaagatatttccttttccaccataggcctcaatgtgctcccaattatccctttgcagattctataaaaacagtgcttctgaactgttccatcaaaagaaggacttaaatctgtgggatgaatgcacaaattagaaaacagtttctcataacgcttctttccagttttatctgaagacatttccttgttcaccctaggcatttttgcgctacgtagcattgcttcacagattacacaaaaasagttttttccaaagtgttcagtgaaaagaaaagtttagctctgtgagatgagttcatacattacaaagcactttttcaaaaagtttcttttaactttttatccaaagatatttcccttttcacaataggcctcaatgggctccacagtatccttc

SEQ ID NO: 309096 - DNA, 561 bp, Homo sapiens
tctgtgaaatgggtgcacacatcaaagcagtttcccaaatagcttctatctagttcttctctgaagatatttccttttccacaataggcctcaatgggctcccaaacatcccttcgcagattccataacaacagtgtttctgaactgttccatcaaaagaaggaattaaatctgtgagattaatgcactcatgagaaagcagtttctcagaatgcttcttttctcttttcatctgaagatatttccttkttcaccatactcctttttgtgctacctaacattgcttcgcagactatacaaaaatagtttttccaaactgctctatcaaaaaacaggtttaactctgtgagttgtactcacacatcacacagcagtttctcaaaaaacttatttctttttttatctgaatatatttcctttttcaccataggcctcattgcactcccaagtatacctatgcagattctacaaaaacagtgtttccaaattgctgaatcaaaagaaaggtttaactctgtgcgatgagtgcacacatcccaaagcattttctcagatagcttc

SEQ ID NO: 309097 - DNA, 660 bp, Homo sapiens
ttccaaactgctcaatcaatggaaaaatttaactctgtgaaatgggtgcacacatcaaagcagtttcccaaatagcttctatctagttcttctctgaagatatttccttttccacaataggcctcaatgggctcccaaacatcccttcgcagattccataacaacagtgtttctgaactgttccatcaaaagaaggaattaaatctgtgagattaatgcactcatgagaaagcagtttctcagaatgcttcttttctcttttcatctgaagatatttccttgttcaccatactcctttttgtgctacctaacattgcttcgcagactatacaaaaatagtttttccaaactgctctatcaaaaaacaggtttaactctgtgagttgtactcacayatcacacagcagtttctcaaaaaacttatttctttttttatctgaatatatttcctttttcaccataggcctcattgcactcccaagtatacctatgcagattctacaaaaacagtgtttccaaattgctgaatcaaaagaaaggtttaactctgtgcgatgagtgcacacatcccaaagcattttctcagatagcttctgactagttcttctctgaagatacttccttttcactgtaggcctcgatgtgctcccaaatatccct

SEQ ID NO: 309098 - DNA, 561 bp, Homo sapiens
tctgtgaaatgggtgcacacatcaaagcagtttcccaaatagcttctatctagttcttctctgaagatatttccttttccacaataggcctcaatgggctcccaaacatcccttcgcagattccataacaacagtgtttctgaactgttccatcaaaagaaggaattaaatctgtgagattaatgcactcatgagaaagcagtttctcagaatgcttcttttctcttttcatctgaagatatttccttgttcaccatactcctttttgtgctacctaacattgcttcgcagactatacaaaaatagtttttccaaactgctctatcaaaaaacaggtttaactctgtgagttgtactcacacatcacacagcagtttctcaaaaaacttatttctttttttrtctgaatatatttcctttttcaccataggcctcattgcactcccaagtatacctatgcagattctacaaaaacagtgtttccaaattgctgaatcaaaagaaaggtttaactctgtgcgatgagtgcacacatcccaaagcattttctcagatagcttc

SEQ ID NO: 309099 - DNA, 535 bp, Homo sapiens
tgcaaaggtattccctttatcacaataggcttcaatgtgcttccaaatatcccatygcatattctacaaaaacagtgtttccaaactgctgaatcaaaaaacaggtttacctctgtgagatgaatgcacacatcacaaagcagtttctgagaatgcttctatctaattcttctctgaagatatttaattttcccccataggcctcaatgagctcccaaatatcccttcacacattctaaataacagtgtttccaagctgttacatcaaaagaaggacttaacactgtgagattattgcacacgtcagaaatcagtttctcacaatgcttctttccaatttttatctgatgatatttcctttttcaccatagcctttttcgcactatctattatcgcttctcagatattgcaaaaacagagattccaatctgctcagtcaaaagaaaggtttacctctgtaaggtgaatgcacacatcacaaagcagtttctcaaacatctcttttctagtttttatctgaagatattttgcttat

SEQ ID NO: 309100 - DNA, 518 bp, Homo sapiens
tttacctctgtgagatgaatgcacacatcacaaagcagtttctgagaatgcttctatctaattcttctctgaagatatttaattttcccccataggcctcaatgagctcccaaatatcccttcacacattctaaataacagtgtttccaarctgttacatcaaaagaaggacttaacactgtgagattattgcacacgtcagaaatcagtttctcacaatgcttctttccaatttttatctgatgatatttcctttttcaccatagcctttttcgcactatctattatcgcttctcagatattgcaaaaacagagattccaatctgctcagtcaaaagaaaggtttacctctgtaaggtgaatgcacacatcacaaagcagtttctcaaacatctcttttctagtttttatctgaagatattttgcttatcactacaggcttcaatgcactccaaaatacccattacagattctactaaaacagtgtttccaaaatgctaaaccaaaaaacaggctta

SEQ ID NO: 309101 - DNA, 535 bp, Homo sapiens
tgcaaaggtattccctttatcacaataggcttcaatgtgcttccaaatatcccatcgcatattctacaaaaacagtgtttccaaactgctgaatcaaaaaacaggtttacctctgtgagatgaatgcacacatcacaaagcagtttctgagaatgcttctatctaattcttctctgaagatatttaattttcccccataggcctcaatgagctcccaaatatcccttcacacattctaaataacagtgtttccaagctgttacatsaaaagaaggacttaacactgtgagattattgcacacgtcagaaatcagtttctcacaatgcttctttccaatttttatctgatgatatttcctttttcaccatagcctttttcgcactatctattatcgcttctcagatattgcaaaaacagagattccaatctgctcagtcaaaagaaaggtttacctctgtaaggtgaatgcacacatcacaaagcagtttctcaaacatctcttttctagtttttatctgaagatattttgcttat

SEQ ID NO: 309102 - DNA, 518 bp, Homo sapiens
tttacctctgtgagatgaatgcacacatcacaaagcagtttctgagaatgcttctatctaattcttctctgaagatatttaattttcccccataggcctcaatgagctcccaaatatcccttcacacattctaaataacagtgtttccaagctgttacatcaaaagaaggacttaacactgtgagattattgcacacgtcagaaatcagtttctcacaatgcttctttccaatttttatctgatgatatttcctttttcaccatagcstttttcgcactatctattatcgcttctcagatattgcaaaaacagagattccaatctgctcagtcaaaagaaaggtttacctctgtaaggtgaatgcacacatcacaaagcagtttctcaaacatctcttttctagtttttatctgaagatattttgcttatcactacaggcttcaatgcactccaaaatacccattacagattctactaaaacagtgtttccaaaatgctaaaccaaaaaacaggctta

SEQ ID NO: 309103 - DNA, 593 bp, Homo sapiens
atgaaactggaaatcatcattctcagtaagctctcgcaaggacaaaaaaccaaacaccacatgttatcattcataggtgggtattgaacaatgagaacacatggacacaggaaggggaacatcacacttcggggactgttgtggggtggggtgagtggggagggatagcattaggagatatacctaatgctaaatgacgagttaatgggtgcagcacagcaacatggcacatgaacacttatgttacaaacctgcacatggtgcacatgtatcctaaaacttaaggtataataataaaataaaatagaataaaataccaaaatatacactaataccaaccagaaaaattgtagagaaaggtcatttaaaamatatgaaggatagagtaataatctaacacgttgaaatctaagaaggagaaaacagcttgtctgaacagcattttaagtggcaatgttagaggttttatcaaaattgaccaataatattaaacgacaggttcaggaggcttttcaaagcaaatgaaaacacacacggaggacacatcaagaaacataatgggacaatttctggaaagtaaaagaaaaatgtaa

SEQ ID NO: 309104 - DNA, 593 bp, Homo sapiens
atgaaactggaaatcatcattctcagtaagctctcgcaaggacaaaaaaccaaacaccacatgttatcattcataggtgggtattgaacaatgagaacacatggacacaggaaggggaacatcacacttcggggactgttgtggggtggggtgagtggggagggatagcattaggagatatacctaatgctaaatgacgagttaatgggtgcagcacagcaacatggcacatgaacacttatgttacaaacctgcacatggtgcacatgtatcctaaaacttaaggtataataataaaataaaatagaataaaataccaaaatatacactaataccaaccagaaaaattgtagagaaaggtcatttaaaacatatgaagsatagagtaataatctaacacgttgaaatctaagaaggagaaaacagcttgtctgaacagcattttaagtggcaatgttagaggttttatcaaaattgaccaataatattaaacgacaggttcaggaggcttttcaaagcaaatgaaaacacacacggaggacacatcaagaaacataatgggacaatttctggaaagtaaaagaaaaatgtaa

SEQ ID NO: 309105 - DNA, 593 bp, Homo sapiens
atgaaactggaaatcatcattctcagtaagctctcgcaaggacaaaaaaccaaacaccacatgttatcattcataggtgggtattgaacaatgagaacacatggacacaggaaggggaacatcacacttcggggactgttgtggggtggggtgagtggggagggatagcattaggagatatacctaatgctaaatgacgagttaatgggtgcagcacagcaacatggcacatgaacacttatgttacaaacctgcacatggtgcacatgtatcctaaaacttaaggtataataataaaataaaatagaataaaataccaaaatatacactaataccaaccagaaaaattgtagagaaaggtcatttaaaacatatgaaggatagagtaataatctaacacgttgaaakctaagaaggagaaaacagcttgtctgaacagcattttaagtggcaatgttagaggttttatcaaaattgaccaataatattaaacgacaggttcaggaggcttttcaaagcaaatgaaaacacacacggaggacacatcaagaaacataatgggacaatttctggaaagtaaaagaaaaatgtaa

SEQ ID NO: 309106 - DNA, 509 bp, Homo sapiens
tgtcattgcactgaggaacccgataaaaatcaaaaaaggttaagcagctggaatgtgtagtagaagagaacgtttacagaaaaaggaaccaagaatcagcctaaggattctcccaagtccctaagccaaatgtacataggatgaaattctaaggagctgagcaaaggactgtaccagggagttggaagaagaacatttccctggcatcacatgacaggaagacacattagctctgaccagccagagaagggaatcccctctgtacctccaggatattcagaaaagaccactggaggttcatgccctagtgacagtgctcatktagctccaaattacagatggctctagactaactcgacaaagtttaaagagaagatttaaaacaacaacagacaaatactcatcctgaagttactgaactgcctgccacaacattgttcaaaggtagccaatcaaatctagatattcaatagcataacaccaaaataccccccaaaaaaactctgaca

SEQ ID NO: 309107 - DNA, 509 bp, Homo sapiens
tgtcattgcactgaggaacccgataaaaatcaaaaaaggttaagcagctggaatgtgtagtagaagagaacgtttacagaaaaaggaaccaagaatcagcctaaggattctcccaagtccctaagccaaatgtacataggatgaaattctaaggagctgagcaaaggactgtaccagggagttggaagaagaacatttccctggcatcacatgacaggaagacacattagctctgaccagccagagaagggaatcccctctgtacctccaggatattcagaaaagaccactggaggttcatgccctagtgacagtgctcatgtagctccaaattacagatggctctagactaactcracaaagtttaaagagaagatttaaaacaacaacagacaaatactcatcctgaagttactgaactgcctgccacaacattgttcaaaggtagccaatcaaatctagatattcaatagcataacaccaaaataccccccaaaaaaactctgaca

SEQ ID NO: 309108 - DNA, 509 bp, Homo sapiens
tgtcattgcactgaggaacccgataaaaatcaaaaaaggttaagcagctggaatgtgtagtagaagagaacgtttacagaaaaaggaaccaagaatcagcctaaggattctcccaagtccctaagccaaatgtacataggatgaaattctaaggagctgagcaaaggactgtaccagggagttggaagaagaacatttccctggcatcacatgacaggaagacacattagctctgaccagccagagaagggaatcccctctgtacctccaggatattcagaaaagaccactggaggttcatgccctagtgacagtgctcatgtagctccaaattacagatggctctagactaactcgacaaagtttaaagagaagatttaaaacaacaacagamaaatactcatcctgaagttactgaactgcctgccacaacattgttcaaaggtagccaatcaaatctagatattcaatagcataacaccaaaataccccccaaaaaaactctgaca

SEQ ID NO: 309109 - DNA, 372 bp, Homo sapiens
caaattacagatggctctagactaactcgacaaagtttaaagagaagatttaaaacaacaacagacaaatactcatcctgaagttactgaactgcctgccacaacattgttcaaaggtagccaatcaaatctagatmttcaatagcataacaccaaaataccccccaaaaaaactctgacatgcaaagaagccataagatatatataattaagacatatattaacaggataaaaataagtcatttataaatgacagagaaggaaatttcaaggtccttaaagtaaatatattttaaatacatatagataaatacatatatatgtcaaggtacttaaatgaaaattgaacataggagaaaaatagaagttata

SEQ ID NO: 309110 - DNA, 372 bp, Homo sapiens
caaattacagatggctctagactaactcgacaaagtttaaagagaagatttaaaacaacaacagacaaatactcatcctgaagttactgaactgcctgccacaacattgttcaaaggtagccaatcaaatctagatattcaatagcataacaccaaaataccccccaaaaaaactctgacatgcaaagaagccrtaagatatatataattaagacatatattaacaggataaaaataagtcatttataaatgacagagaaggaaatttcaaggtccttaaagtaaatatattttaaatacatatagataaatacatatatatgtcaaggtacttaaatgaaaattgaacataggagaaaaatagaagttata

SEQ ID NO: 309111 - DNA, 372 bp, Homo sapiens
caaattacagatggctctagactaactcgacaaagtttaaagagaagatttaaaacaacaacagacaaatactcatcctgaagttactgaactgcctgccacaacattgttcaaaggtagccaatcaaatctagatattcaatagcataacaccaaaataccccccaaaaaaactctgacatgcaaagaagccataagatatatataattaagacatatattracaggataaaaataagtcatttataaatgacagagaaggaaatttcaaggtccttaaagtaaatatattttaaatacatatagataaatacatatatatgtcaaggtacttaaatgaaaattgaacataggagaaaaatagaagttata

SEQ ID NO: 309112 - DNA, 494 bp, Homo sapiens
aatattaatcatatttgttagtattgactaattgatattaattcttgactgactttttttaaaaagagaaatattcccttcccaatttattctgtggggccagtgttaccttgatacaaaaattagtccaaatagcatagaaaaataaaactactataagtataaatgcaaaattccttaaaaaatactaaaaaatcagatctagcaacatataaaagaattatacactatgacaargtgaaatttatactagtaatctcaggttggtttaacagcccaaaatccattaaggtaatacatcttatccatagaataagaaacgagaactgcatgatcatctcgatagattccgaaaagacatttaacaaaatccaaatgctttaatgattaaaaataaaaataaaaactcaatgaaccaggaagagagaactttctacaccagatacatggcacctgcgaaaagccaacagcaagcatgcaacttaatggtaaag

SEQ ID NO: 309113 - DNA, 494 bp, Homo sapiens
aatattaatcatatttgttagtattgactaattgatattaattcttgactgactttttttaaaaagagaaatattcccttcccaatttattctgtggggccagtgttaccttgatacaaaaattagtccaaatagcatagaaaaataaaactactataagtataaatgcaaaattccttaaaaaatactaaaaaatcagatctagcaacatataaaagaattatacactatgacaaggtgaaatttatactagtaatctcaggttggtttaacagcccaaaatccattaaggtaatacatcttatccatagaataagaaacgagaaytgcatgatcatctcgatagattccgaaaagacatttaacaaaatccaaatgctttaatgattaaaaataaaaataaaaactcaatgaaccaggaagagagaactttctacaccagatacatggcacctgcgaaaagccaacagcaagcatgcaacttaatggtaaag

SEQ ID NO: 309114 - DNA, 186 bp, Homo sapiens
atagaaaattttaaggaatccactgaacgatagaactmgtaaattatttcagcaatattacagcatacaagataaatgtacaaaaaaatcaattgcacacacctacaatgaaaaccccaaaatgaaattaagaaaacacttcaatttaaaatagcatcaaaaaaataaataataattaatttggaa

SEQ ID NO: 309115 - DNA, 186 bp, Homo sapiens
atagaaaattttaaggaatccactgaacgatagaactcgtaaattatttcagcaatattacagcatacaagataaatgtacaaaaaaatcaattgcacacayctacaatgaaaaccccaaaatgaaattaagaaaacacttcaatttaaaatagcatcaaaaaaataaataataattaatttggaa

SEQ ID NO: 309116 - DNA, 354 bp, Homo sapiens
ctggtgtggcgttattggttaatttatagctactgtggcaacagcaagcagcctagacgaacacacagctcaaagacgagcaggacagaactgctgtctcatttgaatatctctctggrcgtgattatttaaaaggacttgcatttctcacatgaaagttattttcttttctcaatgtccataaatgagaataaatagacgtaaaatagatcttttcgaggatgaagtaaacggaatgaaaaacaaaactcaagctgaccagaaatcatagagggaagaaaacgttataaatatatggatttttcaaagtgattttaagctattaggaatcaattaaatgttgggggattttgt

SEQ ID NO: 309117 - DNA, 354 bp, Homo sapiens
ctggtgtggcgttattggttaatttatagctactgtggcaacagcaagcagcctagacgaacacacagctcaaagacgagcaggacagaactgctgtctcatttgaatatctctctggacstgattatttaaaaggacttgcatttctcacatgaaagttattttcttttctcaatgtccataaatgagaataaatagacgtaaaatagatcttttcgaggatgaagtaaacggaatgaaaaacaaaactcaagctgaccagaaatcatagagggaagaaaacgttataaatatatggatttttcaaagtgattttaagctattaggaatcaattaaatgttgggggattttgt

SEQ ID NO: 309118 - DNA, 585 bp, Homo sapiens
cttggtcataagacagcagcatgttggcatgtccagaggacagtgaggtggccaggaccactggtaagatcaagggtgaagacataaaagaattttggcggttaacatgcggcagatcacgatgggcttgcagagcattgtaagaattgtatcttttagtgtaaatgaaatgaggagacaaatcattatcccattatcaatattttaataaattggatccatgaaccaaatccaatgagattaaatcaattagtaataatatgcaaatttgtattaaaattacaagaattccttgcacatttgagaacaggagagtcatgattgtttatcagcaataataaactattaattttaattgtcatcagctaattgagattaattgcaatacatcatgctttataatgtgactgtcaaaaggaaaatatgattktaatcttatactacatctatcaatgtctttgattcataggtctatagaataagcccctagttttcaaagccaactgatgaggcagcgacatcttatgcaagtttgctgctttctgccacagtggtccttggtcagctggcacaagttgttttacc

SEQ ID NO: 309119 - DNA, 408 bp, Homo sapiens
aaagaaaaatgccatttttattacattagatcattgttttacatgagttttggtatagcacaatgttgcaccaagggcaaagagagatgaattaatgaagtcttaagatatcaagaatttgaaagaaaaggcaggtcatctttgaaggttagtgacatagcattcatcttctgttgtcaccttttccgtcattccctgtatgcctgatggaccgctttcactcaagttcagagaacagcatgcaaagattagctaccaactttttrttatgaagtgagcttaaattcaagccagactgagcttacgttttagcaggaagcatttttgggaaatgtttatgttagagattgcccttcttgacaaggtgagacataaatgtctactttataaacatgaatttatatggga

SEQ ID NO: 309120 - DNA, 253 bp, Homo sapiens
acatgtagaaaaatagaggtaaatactgactacataaaaccataagaataagaattttggatgatctatctattatatatctatttatctaacatctatctgttcctccatctgtaattaaaatacattacagttagagaacagagaaaaaagtaggaatacatgaatttaaattttaattcttcttagattgtctcacagcatcattataagamagaaaatttataggtcagtatctgttaactataaatgt

SEQ ID NO: 309121 - DNA, 429 bp, Homo sapiens
atctagctatctagatagatatctactttggtttatgctctctggttgcccgtaaattatctccttaaagtgaatatcaaaagagagcttggtgatggcagtgttataaaatcctcaaatgcagcacccacacgcagaggaatttgtagattctgggattctaattcagataccaaactayataaaacgggcattggtcattgagggttgctaggctctttgtggagcatatttgctcttttcatgactttaaaattattttaaaaatctaacctttttctcagtgtgctgcaagatgatttgattttaatgcacaagcactaattctcccctaaggtttgtacaatatatttgctctgacaagccatagccagcaactcacttcacagcaatttatagcatttccacgacaatttgaattatttttaa

SEQ ID NO: 309122 - DNA, 429 bp, Homo sapiens
atctagctatctagatagatatctactttggtttatgctctctggttgcccgtaaattatctccttaaagtgaatatcaaaagagagcttggtgatggcagtgttataaaatcctcaaatgcagcacccacacgcagaggaatttgtagattctgggattctaattcagataccaaactacataaaasgggcattggtcattgagggttgctaggctctttgtggagcatatttgctcttttcatgactttaaaattattttaaaaatctaacctttttctcagtgtgctgcaagatgatttgattttaatgcacaagcactaattctcccctaaggtttgtacaatatatttgctctgacaagccatagccagcaactcacttcacagcaatttatagcatttccacgacaatttgaattatttttaa

SEQ ID NO: 309123 - DNA, 429 bp, Homo sapiens
atctagctatctagatagatatctactttggtttatgctctctggttgcccgtaaattatctccttaaagtgaatatcaaaagagagcttggtgatggcagtgttataaaatcctcaaatgcagcacccacacgcagaggaatttgtagattctgggattctaattcagataccaaactacataaaacggrcattggtcattgagggttgctaggctctttgtggagcatatttgctcttttcatgactttaaaattattttaaaaatctaacctttttctcagtgtgctgcaagatgatttgattttaatgcacaagcactaattctcccctaaggtttgtacaatatatttgctctgacaagccatagccagcaactcacttcacagcaatttatagcatttccacgacaatttgaattatttttaa

SEQ ID NO: 309124 - DNA, 429 bp, Homo sapiens
atctagctatctagatagatatctactttggtttatgctctctggttgcccgtaaattatctccttaaagtgaatatcaaaagagagcttggtgatggcagtgttataaaatcctcaaatgcagcacccacacgcagaggaatttgtagattctgggattctaattcagataccaaactacataaaacgggcattggtcattgagggttgctaggctctttgtggagcatatttgctcttttcatgactttaaaattattttaaaaatctaacctttttctcrgtgtgctgcaagatgatttgattttaatgcacaagcactaattctcccctaaggtttgtacaatatatttgctctgacaagccatagccagcaactcacttcacagcaatttatagcatttccacgacaatttgaattatttttaa

SEQ ID NO: 309125 - DNA, 241 bp, Homo sapiens
aatatttaaagcacattctgttctatgacttcatttgtctagcacaaaataaaacgatctcagtatatgtcaagtaccaatttttttcrtatggccaattataggtattttatttttttaaagattagagtgttcttgaagctctttctatttctttgtcaatgaactaaacattggcaaatatgtagggtttcccacataagaacattattaacatcaaaatagaaagctggtggcagaa

SEQ ID NO: 309126 - DNA, 241 bp, Homo sapiens
aatatttaaagcacattctgttctatgacttcatttgtctagcacaaaataaaacgatctcagtatatgtcaagtaccaatttttttcgtatggccaattatagrtattttatttttttaaagattagagtgttcttgaagctctttctatttctttgtcaatgaactaaacattggcaaatatgtagggtttcccacataagaacattattaacatcaaaatagaaagctggtggcagaa

SEQ ID NO: 309127 - DNA, 241 bp, Homo sapiens
aatatttaaagcacattctgttctatgacttcatttgtctagcacaaaataaaacgatctcagtatatgtcaagtaccaatttttttcgtatggccaattataggtattttatttttttaaagattagagtgttcttgaagctctttctatttctttgtcaatgaactaaacaytggcaaatatgtagggtttcccacataagaacattattaacatcaaaatagaaagctggtggcagaa

SEQ ID NO: 309128 - DNA, 241 bp, Homo sapiens
aatatttaaagcacattctgttctatgacttcatttgtctagcacaaaataaaacgatctcagtatatgtcaagtaccaatttttttcgtatggccaattataggtattttatttttttaaagattagagtgttcttgaagctctttctatttctttgtcaatgaactaaacattggcaaatatgtagggtttcccacataagaacaytattaacatcaaaatagaaagctggtggcagaa

SEQ ID NO: 309129 - DNA, 579 bp, Homo sapiens
tctcctggaaagaataataaaacttttcagcggcctaatatgcatctatagacacacacacatgcaagcactattcataatatttaaagcacattctgttctatgacttcatttgtctagcacaaaataaaacgatctcagtatatgtcaagtaccaatttttttcgtatggccaattataggtattttatttttttaaagattagagtgttcttgaagctctttctatttctttgtcaatgaactaaacattggcaaatatgtagggtttcccacataagaacattattaacatcaaaatagaaagctggtggyagaaataatgattgggaacacagagtctctactcagcgttctacttctgccataccataactttgtgatctcacgaaatatctctccatgttctcatccctatgtatagttctgtcatttttcaataagagctttttgcttaattatgaagtactagttactatacccattattttgagcttcatgtaaatcaagaacacacggactccacttgcaaaacattgaaaatgtagtcagggattgggggcacaaagcaacatttta

SEQ ID NO: 309130 - DNA, 579 bp, Homo sapiens
tctcctggaaagaataataaaacttttcagcggcctaatatgcatctatagacacacacacatgcaagcactattcataatatttaaagcacattctgttctatgacttcatttgtctagcacaaaataaaacgatctcagtatatgtcaagtaccaatttttttcgtatggccaattataggtattttatttttttaaagattagagtgttcttgaagctctttctatttctttgtcaatgaactaaacattggcaaatatgtagggtttcccacataagaacattattaacatcaaaatagaaagctggtggcagaaataatgattgggaacacagagtctctactcagcgttctacttctgccataccataactttgtgatctcacgaaatatctctccatgttctcatccctatgtatagttctgtcatttttcaataagagctttttgcttaattatgaagtactagttactatamccattattttgagcttcatgtaaatcaagaacacacggactccacttgcaaaacattgaaaatgtagtcagggattgggggcacaaagcaacatttta

SEQ ID NO: 309131 - DNA, 579 bp, Homo sapiens
tctcctggaaagaataataaaacttttcagcggcctaatatgcatctatagacacacacacatgcaagcactattcataatatttaaagcacattctgttctatgacttcatttgtctagcacaaaataaaacgatctcagtatatgtcaagtaccaatttttttcgtatggccaattataggtattttatttttttaaagattagagtgttcttgaagctctttctatttctttgtcaatgaactaaacattggcaaatatgtagggtttcccacataagaacattattaacatcaaaatagaaagctggtggcagaaataatgattgggaacacagagtctctactcagcgttctacttctgccataccataactttgtgatctcacgaaatatctctccatgttctcatccctatgtatagttctgtcatttttcaataagagctttttgcttaattatgaagtactagttactatacccattattttgagcttcatgtaaatcaagaacacayggactccacttgcaaaacattgaaaatgtagtcagggattgggggcacaaagcaacatttta

SEQ ID NO: 309132 - DNA, 202 bp, Homo sapiens
accatactttgcccatatgaagaaragcaataaggattatttagtaaatagacatggaaactcatccagggttggctgatgagaagctggttagcaaggggtgtgtcttcagttaggacaaggtctgtgcttcccacgggttctctccacagcaggagggatgcaatcttccctttcctcccctgcacctaccctcaaatgg

SEQ ID NO: 309133 - DNA, 503 bp, Homo sapiens
agatcatttccttagcgtgtgaaatgcactcaatttattaaaatattttctaatgtctattacaataatatttcttaattagctaacataagaggagttttgagacatttatttatatgtacttactagattcaaactcgattccactattttcagaaatcatgctccgagacaagtcctttttttatctaactatgtttctacctatattaaaagacagatatgtcaattttgctaatcatgctgttccaaacctctccatcctatttttyggtttgttctatcagtcattcaaagacttacttatattcaaatttctctctaggtttaacatttgtgtatgtcttcttgtgtttttttctatttttgctgtatataatttaagacatttattgacatatatcatacatgcagaaaagtacaatgattaaatatggatagcttcattaatgaaacacatgtatttgcttataaccatgtatgaaaatagaacattactaaaa

SEQ ID NO: 309134 - DNA, 411 bp, Homo sapiens
ccactattttcagaaatcatgctccgagacaagtcctttttttatctaactatgtttctacctatattaaaagacagatatgtcaattttgctaatcatgctgttccaaacctctccatcctatttttcggtttgttctaycagtcattcaaagacttacttatattcaaatttctctctaggtttaacatttgtgtatgtcttcttgtgtttttttctatttttgctgtatataatttaagacatttattgacatatatcatacatgcagaaaagtacaatgattaaatatggatagcttcattaatgaaacacatgtatttgcttataaccatgtatgaaaatagaacattactaaaaatagagatacttctcctgcccctttccaaacactaaccctcatcctcaata

SEQ ID NO: 309135 - DNA, 411 bp, Homo sapiens
ccactattttcagaaatcatgctccgagacaagtcctttttttatctaactatgtttctacctatattaaaagacagatatgtcaattttgctaatcatgctgttccaaacctctccatcctatttttcggtttgttctatcagtcattcaragacttacttatattcaaatttctctctaggtttaacatttgtgtatgtcttcttgtgtttttttctatttttgctgtatataatttaagacatttattgacatatatcatacatgcagaaaagtacaatgattaaatatggatagcttcattaatgaaacacatgtatttgcttataaccatgtatgaaaatagaacattactaaaaatagagatacttctcctgcccctttccaaacactaaccctcatcctcaata

SEQ ID NO: 309136 - DNA, 503 bp, Homo sapiens
agatcatttccttagcgtgtgaaatgcactcaatttattaaaatattttctaatgtctattacaataatatttcttaattagctaacataagaggagttttgagacatttatttatatgtacttactagattcaaactcgattccactattttcagaaatcatgctccgagacaagtcctttttttatctaactatgtttctacctatattaaaagacagatatgtcaattttgctaatcatgctgttccaaacctctccatcctatttttcggtttgttctatcagtcattcaaagacttacttatattcamatttctctctaggtttaacatttgtgtatgtcttcttgtgtttttttctatttttgctgtatataatttaagacatttattgacatatatcatacatgcagaaaagtacaatgattaaatatggatagcttcattaatgaaacacatgtatttgcttataaccatgtatgaaaatagaacattactaaaa

SEQ ID NO: 309137 - DNA, 411 bp, Homo sapiens
ccactattttcagaaatcatgctccgagacaagtcctttttttatctaactatgtttctacctatattaaaagacagatatgtcaattttgctaatcatgctgttccaaacctctccatcctatttttcggtttgttctatcagtcattcaaagacttacttatattcaaatttctctctaggtttaacatttgtgtatgtcttcttgtgyttttttctatttttgctgtatataatttaagacatttattgacatatatcatacatgcagaaaagtacaatgattaaatatggatagcttcattaatgaaacacatgtatttgcttataaccatgtatgaaaatagaacattactaaaaatagagatacttctcctgcccctttccaaacactaaccctcatcctcaata

SEQ ID NO: 309138 - DNA, 411 bp, Homo sapiens
ccactattttcagaaatcatgctccgagacaagtcctttttttatctaactatgtttctacctatattaaaagacagatatgtcaattttgctaatcatgctgttccaaacctctccatcctatttttcggtttgttctatcagtcattcaaagacttacttatattcaaatttctctctaggtttaacatttgtgtatgtcttcttgtgtttttktctatttttgctgtatataatttaagacatttattgacatatatcatacatgcagaaaagtacaatgattaaatatggatagcttcattaatgaaacacatgtatttgcttataaccatgtatgaaaatagaacattactaaaaatagagatacttctcctgcccctttccaaacactaaccctcatcctcaata

SEQ ID NO: 309139 - DNA, 563 bp, Homo sapiens
cttcaatgagatccaaaatgtgtgttcacagaatggacaaaaacagtgtttccaaactgctgaatcaaaaaaatggtttaacaccctgagatgaatgcactcattagagaacagtttctcagatagctattttgtagtttttatctggggactttagctttttagccattggtttcaatgagctccaaaaagtacattcacagaatggacaaaaacagggtttccaaactgctgaatcaaaggaaagttttaaatctctgagatgaatacacacaacagacaacagtttctcagaaagcttccttcygggttttatctgaagatattttctttttcaccgtaggcctcactgtgatcccaaatatcccttcacaggtactacaaaaacagtgtttcctatctgctgaatgaaaagaaatatttaactttgtgagatgaatgcacacaacatgaagcaggttctcagagagcttacttccaggttttattctgtaatattcactatttcaccattggtctaagtaagctcccaatcgtccacttgcagaatggtcgaaaacagt

SEQ ID NO: 309140 - DNA, 563 bp, Homo sapiens
cttcaatgagatccaaaatgtgtgttcacagaatggacaaaaacagtgtttccaaactgctgaatcaaaaaaatggtttaacaccctgagatgaatgcactcattagagaacagtttctcagatagctattttgtagtttttatctggggactttagctttttagccattggtttcaatgagctccaaaaagtacattcacagaatggacaaaaacagggtttccaaactgctgaatcaaaggaaagttttaaatctctgagatgaatacacacaacagacaacagtttctcagaaagcttccttccgggttttatctgaagatattttctttttcaccrtaggcctcactgtgatcccaaatatcccttcacaggtactacaaaaacagtgtttcctatctgctgaatgaaaagaaatatttaactttgtgagatgaatgcacacaacatgaagcaggttctcagagagcttacttccaggttttattctgtaatattcactatttcaccattggtctaagtaagctcccaatcgtccacttgcagaatggtcgaaaacagt

SEQ ID NO: 309141 - DNA, 563 bp, Homo sapiens
cttcaatgagatccaaaatgtgtgttcacagaatggacaaaaacagtgtttccaaactgctgaatcaaaaaaatggtttaacaccctgagatgaatgcactcattagagaacagtttctcagatagctattttgtagtttttatctggggactttagctttttagccattggtttcaatgagctccaaaaagtacattcacagaatggacaaaaacagggtttccaaactgctgaatcaaaggaaagttttaaatctctgagatgaatacacacaacagacaacagtttctcagaaagcttccttccgggttttatctgaagatattttctttttcaccgtaggcctcactgtgatcccaaatatcccttcacaggtwctacaaaaacagtgtttcctatctgctgaatgaaaagaaatatttaactttgtgagatgaatgcacacaacatgaagcaggttctcagagagcttacttccaggttttattctgtaatattcactatttcaccattggtctaagtaagctcccaatcgtccacttgcagaatggtcgaaaacagt

SEQ ID NO: 309142 - DNA, 563 bp, Homo sapiens
cttcaatgagatccaaaatgtgtgttcacagaatggacaaaaacagtgtttccaaactgctgaatcaaaaaaatggtttaacaccctgagatgaatgcactcattagagaacagtttctcagatagctattttgtagtttttatctggggactttagctttttagccattggtttcaatgagctccaaaaagtacattcacagaatggacaaaaacagggtttccaaactgctgaatcaaaggaaagttttaaatctctgagatgaatacacacaacagacaacagtttctcagaaagcttccttccgggttttatctgaagatattttctttttcaccgtaggcctcactgtgatcccaaatatcccttcacaggtactacaaaaacagtgtttcctatctgctgaatgaaaagaaatatttaactttgtgagatgaatgcacacaacatgaagcaggttctcagagagcttacttccaggttttattctgtawtattcactatttcaccattggtctaagtaagctcccaatcgtccacttgcagaatggtcgaaaacagt

SEQ ID NO: 309143 - DNA, 520 bp, Homo sapiens
aagcagtttctcagaaagcttctttatagtgtttatctgaagatattatctttttcataaaagtcctcaattctcagcaaaacattccctcacagattctaccaaaacattgcttaaaaactgctgaatctaagcacagttttaactctgtgagatgaatgcacacatcacaaagcagttttcagaatgcttctttctagtttttatgtgaagatattttcttttttgctatagtcctcagtgtgctcccaaatttcgtttttcagattctacaaaaacagtgtttccaaamtgttgaaagaatagaaaagtttaactctgcgagataaatgcacacatcaccaagtggtttctcagatagattccttccactttatatcctgttatattctgttttttcccttggcctcaatgagctaaaaacatcagttcacagaattgataaaaacagtgttctcaaactgctgaatcaaaagaaaggtttaactctgcaagatgaatgcacacatcaaaaagtggt

SEQ ID NO: 309144 - DNA, 493 bp, Homo sapiens
tttgtccattctgtgaaatgacatttggaagctcattgaggaaaatggcamaaaagaaataaccccagatgaaaactagaaagaaattatctgagaaaccactctgtgatatctgtatttatctcacagagttaaacgtttcttttccttcagcatatattggagtgcattgaggcctatggtgataaagaaaatattttaggataaaaactagaaagaagctttctgagaaactgctaagtgttgtgcatattcacctcacagttttaaaactttcttttgattcagtactttggaagcactgtttttgtccgttctgagaatggacatttgggagttcattgaggccaatggtgaataagggaataccccaggataaaaactagaagtaaactatctgagaaactgctgtttgatgtgtgcattcatctcacagacttaaactatttttttgaatcagcagtttggaaacactgtttttgtccatttgacc

SEQ ID NO: 309145 - DNA, 493 bp, Homo sapiens
tttgtccattctgtgaaatgacatttggaagctcattgaggaaaatggcaaaaaagaaataaccccagatgaaaactagaaagaaattatctgagaaaccactctgtgatatctgtatttatctcacagagttaaacgtttcttttccttcagcatatattggagtgcattgaggcctatggtgataaagaaaatattttaggataaaaactagaaagaagctttctgagaaactgctaagtgttgtrcatattcacctcacagttttaaaactttcttttgattcagtactttggaagcactgtttttgtccgttctgagaatggacatttgggagttcattgaggccaatggtgaataagggaataccccaggataaaaactagaagtaaactatctgagaaactgctgtttgatgtgtgcattcatctcacagacttaaactatttttttgaatcagcagtttggaaacactgtttttgtccatttgacc

SEQ ID NO: 309146 - DNA, 493 bp, Homo sapiens
tttgtccattctgtgaaatgacatttggaagctcattgaggaaaatggcaaaaaagaaataaccccagatgaaaactagaaagaaattatctgagaaaccactctgtgatatctgtatttatctcacagagttaaacgtttcttttccttcagcatatattggagtgcattgaggcctatggtgataaagaaaatattttaggataaaaactagaaagaagctttctgagaaactgctaagtgttgtgcatattcayctcacagttttaaaactttcttttgattcagtactttggaagcactgtttttgtccgttctgagaatggacatttgggagttcattgaggccaatggtgaataagggaataccccaggataaaaactagaagtaaactatctgagaaactgctgtttgatgtgtgcattcatctcacagacttaaactatttttttgaatcagcagtttggaaacactgtttttgtccatttgacc

SEQ ID NO: 309147 - DNA, 493 bp, Homo sapiens
tttgtccattctgtgaaatgacatttggaagctcattgaggaaaatggcaaaaaagaaataaccccagatgaaaactagaaagaaattatctgagaaaccactctgtgatatctgtatttatctcacagagttaaacgtttcttttccttcagcatatattggagtgcattgaggcctatggtgataaagaaaatattttaggataaaaactagaaagaagctttctgagaaactgctaagtgttgtgcatattcacctcacagttttaaaactttcttttgattcagtactttggaagcactgtttttgtccgttctgagaatggacatttgggagttcattgaggccaatggtgaataagggaataccccaggataaaaactagaagtaarctatctgagaaactgctgtttgatgtgtgcattcatctcacagacttaaactatttttttgaatcagcagtttggaaacactgtttttgtccatttgacc

SEQ ID NO: 309148 - DNA, 430 bp, Homo sapiens
gcatattcacctcacagttttaaaactttcttttgattcagtactttggaagcactgtttttgtccgttctgagaatggacatttgggagttcattgaggccaatggtgaataagggaataccccaggataaaaactagaagtaaactatctgagaaactgctgtttgatgtgtgcattcatctcacagacttaaactatttttttgaatcagcagtttggaaacactgtttttgtcmatttgaccaatggacatttgggagctcattgaggttaaactcaacaaaatgaatacactcagtacaaaatagaaagaagctatctgagaaactgtttgtgaagtgtgtattcatttcatggatttaaacatttcttttgattcagcagtttgtaagcactgtttctgtccattctgtgaatggatatttggg

SEQ ID NO: 309149 - DNA, 430 bp, Homo sapiens
gcatattcacctcacagttttaaaactttcttttgattcagtactttggaagcactgtttttgtccgttctgagaatggacatttgggagttcattgaggccaatggtgaataagggaataccccaggataaaaactagaagtaaactatctgagaaactgctgtttgatgtgtgcattcatctcacagacttaaactatttttttgaatcagcagtttggaaacactgtttttgtccatttgaccaatggacwtttgggagctcattgaggttaaactcaacaaaatgaatacactcagtacaaaatagaaagaagctatctgagaaactgtttgtgaagtgtgtattcatttcatggatttaaacatttcttttgattcagcagtttgtaagcactgtttctgtccattctgtgaatggatatttggg

SEQ ID NO: 309150 - DNA, 430 bp, Homo sapiens
gcatattcacctcacagttttaaaactttcttttgattcagtactttggaagcactgtttttgtccgttctgagaatggacatttgggagttcattgaggccaatggtgaataagggaataccccaggataaaaactagaagtaaactatctgagaaactgctgtttgatgtgtgcattcatctcacagacttaaactatttttttgaatcagcagtttggaaacactgtttttgtccatttgaccaatggacatttgggagctcattgaggttaaactcaacaaaatgaatacactcagtacaaaatagaargaagctatctgagaaactgtttgtgaagtgtgtattcatttcatggatttaaacatttcttttgattcagcagtttgtaagcactgtttctgtccattctgtgaatggatatttggg

SEQ ID NO: 309151 - DNA, 620 bp, Homo sapiens
atgttctgcggttaacttcttttttaagctctcctaactgaactgtgagcttctgatttgtagcttcttctcctggagtaggcttgtgcttatttcccacctgtatttgtctttctaatcaggataatgctgtttgccttagccagttccatgagctcaacctacagtctcttagggaaggtgttattataaattccaaaggacttaccaaatgactagacacacatgaaacactgaagaaatataaaatggtgcaggcataattagttgatggggactgtcttaccattacacactgcctgaactccagttatattgaaatagttaagagtttggcaaccagatggggcaatcaggccatttgagaaccaaagtaaacctggtgagaaacaaatggattgtttctaaatatcagtttattaatgttattaatgtttatcattttagctaacatttgttgagtacctgctctgtgccaaacaccagagctaaatgctttamatttaacggtaattatggggatgatattattatctctatttcttagatgaggaaattaaagcttggagaaattaaacaagatgctccaagtcacagaacttaaatggcacataagtggt

SEQ ID NO: 309152 - DNA, 440 bp, Homo sapiens
tataatagtatatccagtgaaaatatccttcaagtatgaaggagaaataaaaaccttcccagacaaacaaaagatgaggaatttaatcaacaccagacctgtcctaaaagaaatgctaaaggaaattcttcaatctgaaagaagaggacattaatcagcaagaagaaatcatttgaaggtataaaattccctggtaatagttaagtaagtcgaaaaacacagaacagtataacactgtaattttggtgtgtaacctactcttctcttaagtagaaagactaaatgatgaaccaatcaaaaataactaaaacagtgtttcaagtacaataatacaaagaggarcaacaaaatgttaaagagctggggatgaagttaaaatgtagagtttttattcgttttatttttgtgtttgtttatgcaatcagtgttgttgtcatcag

SEQ ID NO: 309153 - DNA, 458 bp, Homo sapiens
attattctttaactttactttagatttgggggtacatgtgaaagtttrttacacagataaactcgtgtgacaaaggtttgttgtgcagattatttcatcacccaggtattaagtgcagtacccaatagttatcttttctgctcctctccctcctcccaccttcccccttcaagtagagtccagtgtctgttgttcccttctttgtgttcatgatttcacatcatttaactcccacttataagtgagaacatgcagtgtatgattttctgttcctgaattagtttgctaaggataatagtctccagttccatacgtgttcccataaaagacatgatgttattcttttttatggctgcatagtattccatggtgtgtatacatacatatatatatatatatatatcacgttttctttatctaatctgtcactgctgggcatttaggttgattctgtgtct

SEQ ID NO: 309154 - DNA, 458 bp, Homo sapiens
attattctttaactttactttagatttgggggtacatgtgaaagtttgttacacagataaactcgtgtgacaaaggtttgttgtgcagattatttcatcacccaggtattaagtgcagtacccaatagttatcttttctgctcctctccctcctcccaccttcccccttcaagtagagtccagtgtctgttgttcccttctttgtgttcatgatttcacatcatttaactcccacttataagtgagaacatgcagtgtatgattttctgttcctgaattagtttgctaaggataatagtctccagttccatacgtgttcccataaaagacatgatgttattcttttttatggctgcatagtattccatggtgtgtatacatacatatatatatatatatataycacgttttctttatctaatctgtcactgctgggcatttaggttgattctgtgtct

SEQ ID NO: 309155 - DNA, 418 bp, Homo sapiens
taaaaataccaaaaaaaaaaaawaattagctgagcatggtgatgaactcctataatcccagctatttggaaggctgaggcacaagaatcacttgaacccagcaggcagaggttgcagtgagccagtgagccgagatcatgccacagcactccagcctaggcaacagagcaagactctgccttaaaaaaaaaaaagaaaaaagaaaaaaaatcctgccatttgctatcacgtggatagaactagaggacattatgctaagtgaaataaaccaaacacagaaagacaaatactgtaaaactttacttatatgtggaacttaaaataaacactctcatggatccagagagtagaatggtagttgccaggggctaaaggtgggggaaatggagaggtgatggccaaagattacaacgtttcg

SEQ ID NO: 309156 - DNA, 629 bp, Homo sapiens
gaaaccctgacttcccagtctttatccaatatgccccacagggcaaccttggaattatagaggtaacaagcccctgttcctcaagtgtcaatccctggaatgtggcagattagctctgcacatgaaaccatctattattccccttgtcttgaagcagaagccaagatagcagcctttaaactaaggcttagggcctccaacagatgctaacagggagacatacaaaggcagtacctagattcgttgaccatgacccaaaacattggttaacagctaacagaatgcattctgtttgaagctactgtgtcctaccacgattttaaaggacttgtgctatcagagagaccctgagcctggactagatcagtggttcccaaatcatggtccacagacagcrtctatgggactttttactcatctgcaatgaaatgagaaaaataaggacaatttagtcatttttagtgaaactaaatatattctatgtagaggactgtgtttgaacattatagctttcactaattttgtgatattaaaatgtctttacatttatcaaatgatggtaaaagataaatggtagggcctttattgttgctattactgtttttatttgacaaaattaagtttggtaa

SEQ ID NO: 309157 - DNA, 458 bp, Homo sapiens
catggtccacagacagcgtctatgggactttttactcatctgcaatgaaatgagaaaaataaggacaatttagtcatttttagtgaaactaaatatattctatgtagaggactgtgtttgaacattatagctttcactaattttgtgatattaaaatgtctttacatttatcaaatgatggtaaaagataaatggtagggcctttrttgttgctattactgtttttatttgacaaaattaagtttggtaaccttatgttgtccccattgtttttattaaaatttgacttaattatggaaactattatttttacacgaccatcaggtttaaaaactactgaagctctataaatctttatatgtaggacacactatggttatgtttaatatgataaagtgtaacatgatggaatcttgaaacctcttgccccatcctctagagctgcaccatccatcggg

SEQ ID NO: 309158 - DNA, 673 bp, Homo sapiens
gttaacaatgcttgtttggtttgactcactaggttggttcgagaagtaattttcaaatagaaggttttgttattcaaagagcctcaaygaggttttaagaagagattcaaagataagaaagggtatcagcctctattagcctatgtcgagggcagaaacccctgacatgctcagccaagtggaggcgttgacatcacagattctattgggcccagagtgcaagtttataattgaacaatataggcaggaagtgaaggctaagaacatacaccatctgtttgtttttaaaactctttaatatgtgtcttcaaactgcaaaacaagagaatgagaaaacacactttaattcaaatcttaataagaattctatttcagtaatctggtaaaaataataataataataataatacctaaacattactgaggggagtcttttgctgcaatgcagtggttctcaaccaggagcgattttgtccttcaggaacatttgccaacggctggagacacctttaattgtcgcaactggagagtgctacaggcatccaatgggtggaggccagggaggccactaaacgttctacaatgtaaaggacagcctctcacaataaggaattctccagcccatagtagaaacagtacctgcctcaatgtatggccagggtgtgctatattc

SEQ ID NO: 309159 - DNA, 673 bp, Homo sapiens
gttaacaatgcttgtttggtttgactcactaggttggttcgagaagtaattttcaaatagaaggttttgttattcaaagagcctcaacgaggttttaagaagagattcaaagataagaaagggtatcagcctctattagcctatgtcgagggcagaaacccctgacatgctcagccaagtggaggcgttgacatcacagattctattgggcccagagtgcaagtttataattgaacaatataggcaggaagtgaaggctaagaacatacaccatctgtttgtttttaaaactctttaatatgtgtcttcaaactgcaaaacaagagaatgagaaaacacactttaattcaaatcttaataagaattctatttcagtaatctggtaaaaataataataataataataatacctaaacattactgaggggagtcttttgctrcaatgcagtggttctcaaccaggagcgattttgtccttcaggaacatttgccaacggctggagacacctttaattgtcgcaactggagagtgctacaggcatccaatgggtggaggccagggaggccactaaacgttctacaatgtaaaggacagcctctcacaataaggaattctccagcccatagtagaaacagtacctgcctcaatgtatggccagggtgtgctatattc

SEQ ID NO: 309160 - DNA, 515 bp, Homo sapiens
tccttccaaaaaactactatttctaaataaatttaaaaaaatccatgaaccactcacataataatcttaaaatacttcaagtattattaaaaatagtgaacattttatgggactaaattcagttaaccataagcatgtccatcaaaagaacagtgtcttcactaaatctactactaaatgaataagggtttgtgaagatttctatattaaaattcttctttcrtggaattaattatatttatggagggaggaagcagtgttagtataaccttttagccctcatttagaaataggcttattatattgaagtcaatgatatacagatatgtaattcaagcagattctacatgtatatctacgagtagggagcattaacctcaaaaataaattcctcatgtcaaagggctactactcacttgttccagaaattcattagcaagttgaaaaataagaatgacccagtcttgttaaaagaaaatgcagtctacagaaatgttcattgcattttcatactt

SEQ ID NO: 309161 - DNA, 515 bp, Homo sapiens
tccttccaaaaaactactatttctaaataaatttaaaaaaatccatgaaccactcacataataatcttaaaatacttcaagtattattaaaaatagtgaacattttatgggactaaattcagttaaccataagcatgtccatcaaaagaacagtgtcttcactaaatctactactaaatgaataagggtttgtgaagatttctatattaaaattcttctttcatggaattaattatatttatggagggaggaagcagtgttagtataaccttttagccctcatttagaaataggcttattatattgaagtcaatgatatacagatatgtaattcaagcagattctacrtgtatatctacgagtagggagcattaacctcaaaaataaattcctcatgtcaaagggctactactcacttgttccagaaattcattagcaagttgaaaaataagaatgacccagtcttgttaaaagaaaatgcagtctacagaaatgttcattgcattttcatactt

SEQ ID NO: 309162 - DNA, 597 bp, Homo sapiens
gctttgttcatattttcttattcttttttctttgccttttttggattgggttaatttgaagaccttgtcttcgcactctgaatttctttcttctacttgttcaattctattgctgagacttccctgagcatttcgcatttctaaaactgtgtccaaagttttctgaatttttgactgttttttctttaagctatctatttccttgaatatttctgccttcacttcttgtatcattttttgaatttccttgcattggacttcacctttctctggtcycaccctgattagcttaataactaaactcctgaatttttcaggtaaattagggatttcttcttggtttgaatacattgctggtgaactagtgtgattttgggggagtgttgaagagccttgttttgtcatattaccagggttggttttctggttccttctcatttgggtaggctctgtcagagggaaggtctagggctgaaggtcattgttcagattcttttgtcccatggggtattcccttgatgtagtactctcccccttttcctatggatgtggcttcctctgagctgaattgcagtgattgttgtctctcttgggggt

SEQ ID NO: 309163 - DNA, 559 bp, Homo sapiens
caaataacacagcactaagatggaaaaactgtattcataagtctttttataaaatacctctatcaaaccatgcctctgtgaactgagaaataaacagtatgttagcttctgtatcacagacagacttgagaataattcactctcttgctgaagattagtgattggaaaaatggtaaaaaaaatagaaattatgttaaaactttttatttcattgcaaatatgataagtaaatrtgaacaaacgtctcagcagtacaaagctttatttcttctcaatgaaatgattataatggcttagagagaaatatctttaaaaatacatccttgaccagggcaaatgagtgcattgagggaaaatatcatgattcctatcaaagctttttctctctagagccttacaccatcatagagaaaaacaaatgtaaatttcttatgaattgcagataaattacatattctatgagtcataaaagaagcaagcaatacgtcattgtttagttgaaattatagactgatcattacaatcttcttcatgcattatactattcagagagataacc

SEQ ID NO: 309164 - DNA, 555 bp, Homo sapiens
gtcacacttgccacatttcaagccacatgtggctagtagatgctgtattggacaagaattttttcatcagcccacaagattctattggttagcaccaytgtagaagaagaaaaatttttataggtttatcagcagactagatacagctgaggaaagaattggtatacttgaagatatgtcactaaatattatccgaactgaaatacaaaaagataaaagagtgtagaagaacagagtgtataagggctatgatgtatcaaatagtctaacatacaggagattgggtattcaaaggaagaatagaaaaagtatatggcagaagaaacaattaaagaaacagtagcttagaattttctgatattaatgaaacacagcatagatcccagaagctctgagaactccatacagaataaatgcaacacacatagacattttcagatacatcacaatcaaactgctgaaaaccaaagatatacagaaaatactgaaggcactgagagaaaaaagaaacattacatacaaacatgagaattataccacattttttgtcaaatg

SEQ ID NO: 309165 - DNA, 555 bp, Homo sapiens
gtcacacttgccacatttcaagccacatgtggctagtagatgctgtattggacaagaattttttcatcagcccacaagattctattggttagcaccactgtagaagaagaaaaatttttataggtttatcagcagactagatayagctgaggaaagaattggtatacttgaagatatgtcactaaatattatccgaactgaaatacaaaaagataaaagagtgtagaagaacagagtgtataagggctatgatgtatcaaatagtctaacatacaggagattgggtattcaaaggaagaatagaaaaagtatatggcagaagaaacaattaaagaaacagtagcttagaattttctgatattaatgaaacacagcatagatcccagaagctctgagaactccatacagaataaatgcaacacacatagacattttcagatacatcacaatcaaactgctgaaaaccaaagatatacagaaaatactgaaggcactgagagaaaaaagaaacattacatacaaacatgagaattataccacattttttgtcaaatg

SEQ ID NO: 309166 - DNA, 555 bp, Homo sapiens
gtcacacttgccacatttcaagccacatgtggctagtagatgctgtattggacaagaattttttcatcagcccacaagattctattggttagcaccactgtagaagaagaaaaatttttataggtttatcagcagactagatacagctgaggaaagaattggtatacttgaagatatgtcactaaatattatccgaactgaaatacaaaaagataaaagagtgtagaagaacagartgtataagggctatgatgtatcaaatagtctaacatacaggagattgggtattcaaaggaagaatagaaaaagtatatggcagaagaaacaattaaagaaacagtagcttagaattttctgatattaatgaaacacagcatagatcccagaagctctgagaactccatacagaataaatgcaacacacatagacattttcagatacatcacaatcaaactgctgaaaaccaaagatatacagaaaatactgaaggcactgagagaaaaaagaaacattacatacaaacatgagaattataccacattttttgtcaaatg

SEQ ID NO: 309167 - DNA, 449 bp, Homo sapiens
catgtatacttatgtaactaacctgcacattgtgcccatgtaccctaaaacttaaagtataataataataataaaaaagaaaaaaaagaactaataaatacagtaaagtttcaggatacaaaatcaacatacaaaaattagtagtgcttctatacactaacaacaaactttytgaaaaagaaatcaagagaataatcccattaacaatagctacagaaaaataaaatacttaggaataaatataaccaaggagataaaagacatgtacactgaaaacaataaaacattaatgatagaaattgaagaagacacagatatctcatgttcatgaattcaaataattaatattgttaaagtgtccatactacccaaagagacctacaaatttattgcaattcttaacaaaattccaatgtcatttttcatagaaatagcaaaaaaaatcagaa

SEQ ID NO: 309168 - DNA, 568 bp, Homo sapiens
ccagaaaaacaccaattctgcagatctaattctgatttctacttttttcatttccctaataaatacttcctcctcacccattaggactttcatagagaacagctgcctgttaaacatacttcttgcagattactttttttcctcattttgcagttacctggcctcatggacatttttggccgatttttttcagtgttgtgtaaattagttccaacacctgatcctcataatacaagcaagttatgaccctgcagkttcctgtagttgcagccatttaaacagataaattttactttacagagtttaaattaaaacattataaaatagaacatgcaaatagataggaaatgacaaattttgaacaaaatttatatgcgtgtgtgcctggacctagtgaaagaaatcagataagctgccctaggaagcttttttggaagcttttatccaggcacatattgcaagtgtaagttaatgaaaataactcttctcaggtgcatcacgcattggcttctgagatacagcacaatccactctaccattaccttcactcataaaacctcagattctt

SEQ ID NO: 309169 - DNA, 618 bp, Homo sapiens
agacaaaaaaaatccttaacaatgtgataatttaacaaccattaaaacaagccattgaacctccaaccttccataagcaaagattatggaagctccaaaaattatacagcccccaaaaagagcttcttctcaacagctacttcaaatgtgctcccggaagataggaagcaaggaaaaagctcccagagagttaagtcagggccattgaggaaaacgaacatggtagttctactgaaggagcagcataaaagtctagggaattcaccctctgctagggcaagaaagcttcacaatgtctgcactgcactcaggatttccaccttgctatggtccagcaactgttgtatgccttcttttctctccttttatgaatgggagacatcactgtgtaatttctatctctgtggcaccattggacatgargagaaagaaataattagtaattttagtttataagtccccagatctttaaatcttctgtgtggtcttccatgccacctgtctctttcctacctgcaggctggaagttaacacccaggatgaccttgagaatcttgcactgcatgtggcagtacccactaacctgggtccctgaatgaccatgtggaacaaagcctt

SEQ ID NO: 309170 - DNA, 561 bp, Homo sapiens
tccaggttgtcatgtgtatcaaatgagatatgcatgtagaatgtctagggcactgcccagcatcttgtatgtgctcctcaaatgatcctccccctcatctaacccatacytaagttgggtcataagaatcaatgaagatagaaaggctcaaccatggcccaagtggcatgttatttttgcctcgcctctctgaatgtcatgacagcccagaaaatgttatagagcttatgtggccatatgcgaatgacatgagactgccaggtttacagcaaattataatggagctcttgggctaacaaaggcagccctggtctgaaaggttggagagcattttgatgaatatatatgaagagatgtttcttctctccctgtcaggccttctgcagctgagatgataaacatttgaagctgcctgggccattcatcagctatgacattcaatggagttgggatcacaggtcagcctgatgctggccgtgggcagagacagtccatgagttcctatcagaccacttgctcagagtgaggaactaattccaatgaccccaggaggaaatagat

SEQ ID NO: 309171 - DNA, 595 bp, Homo sapiens
atctggtggacctccaccaaagccttgtggaagagttaccagctgagtcctgctcaaattcctggtccacaaaattataaaatataattaaatgatggtcgttttaagtcattaaggtttggaatagtctgttacacaacaagagataactgtagtgttggggaaaatccattatttggaggcaacgaaaggttgggaagagagaatcaacagttcatttgtaaacctgttaggcttgaagttaatgatgttgtcaacaaggcagctgaagaagtgaggctggagctgcagggaaaggctgtgtgggacccatgggctgtgtaagtgtcaggggtagctatgattcagcagggaagcactgacttgcacacttgatagaaattcttggatccagttcagccactcattcatacattcattcayagtgtaggcctgggtaaggtatttcacctttctcattctcactttcttcatttggaaaatgaagagatcttgtgcacatgtgaaccaacactacctgtataaaatcacccaatagaccgggtacagtgactcatggctggaatctcagcacttcagagaccaaggagggagg

SEQ ID NO: 309172 - DNA, 595 bp, Homo sapiens
atctggtggacctccaccaaagccttgtggaagagttaccagctgagtcctgctcaaattcctggtccacaaaattataaaatataattaaatgatggtcgttttaagtcattaaggtttggaatagtctgttacacaacaagagataactgtagtgttggggaaaatccattatttggaggcaacgaaaggttgggaagagagaatcaacagttcatttgtaaacctgttaggcttgaagttaatgatgttgtcaacaaggcagctgaagaagtgaggctggagctgcagggaaaggctgtgtgggacccatgggctgtgtaagtgtcaggggtagctatgattcagcagggaagcactgacttgcacacttgatagaaattcttggatccagttcagccactcattcatacattcattcatagtgtaggcctgggtaaggtatttcacctttctcattctcactttcttcatttggaaaatgaagagwtcttgtgcacatgtgaaccaacactacctgtataaaatcacccaatagaccgggtacagtgactcatggctggaatctcagcacttcagagaccaaggagggagg

SEQ ID NO: 309173 - DNA, 523 bp, Homo sapiens
ggcttatttttatttctttaataaaatgggcttgtgaaaaagtgaatgggcatgcattcctaaataaaagaaaaaaaattaagttttatttctatgccctctgaacagttctgcagttgagtttgtactcctgtgcctgatgatttacatgtatcttttattgcctgctgggctgtcatctctgtgaaagaaatttcttcatacattgcatgagatccgtggcattggaaatattctggactgtggactcaagtgcatttttcctaataaagwagctgaatcaaagttaggttgtactcaattaaggaacagttaaactgaaagtacagtgcgttatcttattttaaaagtcagaattattttctctgccgtgttgccatagtattgtgttgctaaaacgtccaaaattcttttggattctgtgtttttaccagtgttaatggcttccagttacttgaaacagatatttactggggaaatgttgccatttagtgttttttaggtattcaacttgataaactta

SEQ ID NO: 309174 - DNA, 535 bp, Homo sapiens
ctaggttaccttctttctttcgcattggtagctatttctgaactgagtcttgatcaataaacgtgcattgcttttgattttcatgcattggtatttttcatattattgatctcttaagaggcatacttgctaatcaatatttgcagaaagccatgcctttttttgtagccaccattgctcaagcgcctgaggtatgcctggcactgtagctaggttcttcacacatttcttcatttaatccatgacttycacgtgaatttagttttgttgttctcattttacaggtaagaagtggaggttagagggatttataacttgttcgaggtcacaaagctaacttatattatagggattagtgtgccctaaagaaaagtatactccaaaaacattaaattgaaagcttttgtcaaataacttgttaggatagtctgacttacggttactggccatggtaatatgtttattttgggggaaaattatactcctcacagttaatttgctttggaatatataaatcaaattcccaaatctgatt

SEQ ID NO: 309175 - DNA, 539 bp, Homo sapiens
tgcttttgctgtggcttgtactgccctcccaaattatgttaacttcataaatgtaaagttatgtgataatatttagtatgattttataaactataaattccaccccccgaccctaccatccttcacctcttgagaatcattggtcactcatggctccatcctctcaatctgagggtgtctccagttctcaggggtgattttcaccagtttccttgttcaatacaagttcattaagcatctattatgtgctctgtgttgggatagtctgtgagcagagtgtctctgctttcatggagcttaccagccagcaaagaaggtaagcaatgagcaggcagtgaggaaatggttccacagctgtggctgtgatgaaaccaacatagattgaaagcttatgtgaagccaggcactgtgccaaggcccctaygtgcagcatttcattgcaacctcacaagagctgtgcaaaagcaagtgctaccatcatttcttgtcttattattgttcaaagtgagactcagaagggtcaggccatccgtgtaagg

SEQ ID NO: 309176 - DNA, 597 bp, Homo sapiens
tgtacaatgccccaaggcacaagagcaaagtctatgtgaggaaattcactaccactacagtggcagagggggtcaagtgcaaggaggagaaaggccagatactggacaggcagctcttctctgctcctcctcctgggtttggggatcctcaagccccaggtagagataaatcttttctggtcaggcacagtgagttgggcccagacccatcctaactaattgcctagaagtgctgttttctttttacctcctgccttctggtcccaagaccactcttagcttagcagttttcctcttttttttttttattttttattaaccagacctgacaggcacaaggatggagccactacttgtttccataatcgtttgacgagcacataatgagaatcgcttatcagataaatatgctgcaattagcttggaaccacaatgccatctgtgtttttttaacacccaaatgtggttgaagttgayggcaggagctcttctgaagatgcagagacaggcagaatgacacctgagggggatcccaggaaatgacatggccaggtgttagagacagaagtctgaagagtctgggccctttcctggtga

SEQ ID NO: 309177 - DNA, 588 bp, Homo sapiens
tgagtggtgggaaggatccatgtatcagaagtaaaacagatccaaatttggagaagcatagttttgttaggtttgcttttgaacagttaactatgaaatgggattgtaaggtttcttagcatccctgggcaaaattgtggagctgattaagttcgtccatcaaggcacctgctcctcttatcttcatctctcctttctctctttttgagctcccaaggcaattcctggaaagctagttaacactggtccaaaatgccagcctctgttagggctgacgtttggctgcatgatataagaacccagccagggtgacataaccaaatgagcatctgaagagaagtatatcctactagacagcagagaaataaaattaaagcaacaagaatctatttttctcacttagaagactagtaargagctaatatttgtgagactgtggagaaaaaagaacttttatacatcactggcagtgacgcaaactaggaaaccacataggaaagcagaaagatgatatctggtgatgttgaaataagcctgctccactgtcctgcaactccagtgctagcagtgccctggggaaacaccaca

SEQ ID NO: 309178 - DNA, 585 bp, Homo sapiens
ccttggctatagagctattaccactggaatgcccaacttgaaccatccctcttctgaggaacaacatttttatgccatcttattcatcacattaaccaattttgtgtctcatcagagcctcaattactggcaaaaactaagaaattattaacttcttatttattcatctcacaaacatttattcaatatmgaccacgttgagctcagtgtgggggctgtaagatgaatcaggcatggtccctttcctgcatgatctgtatggttttgtttacataagccaagtaaacagagacaagaatagaagtgtgaacaagcacagcagggcataaagtaggggaagaggtagcagaaaaggtaacatttaggaaggcaaccacaagcctctggttttcccccaggagattccaaattatcaggggtaatgcctatgttagtctcgtacaacaacgtgctcctgttgctgggtacaggccctggcatttagtagatggccactaaatacttttataaataggtgagataaatctttgaagacaatgtggtgtttacaagacaggacagagaaaacaaggaaaggcagaggcg

SEQ ID NO: 309179 - DNA, 587 bp, Homo sapiens
agagtttcatcattgaggattaggagctcttgacagtatgacaatgtggcaacgtccttgtcacatcatggctgatgcactccccatttacagtttgaccaccgggcatggaagcaccaagaaacacgccagtgaatctgttgaactccacacttactcctctctgcccctattgcaaccagaagccccagctcttcctgataatcagtcatttacctttgcaagtacaggaactctctgtttttatttttattttttctttctggtccaccagcacgaagagtccaacataaccaggaaacaacgataaccttaggyttaataggattcttcatgtgttacttggaagaaacatccttgtcctaggaaatatgacctttagtccatcagggcaaacagttgtgggtttgggaggtaaaaaattttccaaagagatttacagggagtgatggtgacaggccaacatgactgatgctcttcatgtccactccatgggtctatccacatgcgtcttccctagacttcctggccttcaatcctccaatcatatgtctttagatttcatccaaccagtgacgctattcacc

SEQ ID NO: 309180 - DNA, 585 bp, Homo sapiens
tctgcacattggagaataatttcatgccgaatagaatggaaataaagtggctaagccacttggaatagggacaaaaggggtgcaaatgtgagctctctctgatttgagctcagtggggcaaaacagagctcccaagttaagctacctgggagacttccaggcaccaagaagttgctggaaggacttaggaaggcacagaaaagctgtgatccatgattcmcattttggtaagtaagtacccacttacttatatgcagactccatcaagtctggagaatggaaaagagccagatctatatttgagcccatcactgacatttactatctaaatggccttggcaagtgttatggattgaattgagtccccaaaaaagatgcagtgaagtctgaactcccagtactttagagtgccactttatttggaaatagggtcattgcagatataattagttaaatcaagatgaggtaataatggagtagggcggggctttaacctatgtgactagtggccttacaagaaatgaagaagaaacatggagacacataagaaaaagttggccatagacagcagaggtgggagttgga

SEQ ID NO: 309181 - DNA, 548 bp, Homo sapiens
aactgcattatgcatagtggtagatgaatagataacacaacctgtattgcctgtctttccttccctgtctctcttccctacttccctactattgatttgttagcaatcaaattctgccccaaggttggtgcctggctaccttccactagttgacccctggygattaagcttcagccgttcagatgatgccaatgtgctaggagaaaaagagtcacagaatgaaaggaacctgggtgcctgaatgacctgggggcaaaggctgcctgtatccatgggctgctcatctcagaactgctatgtgagagagaaacagaggtatagttctttaagacatatgccatcaggtctgtttgatacagcagctgatgcttttaacttaattagtacatcctctaggagatttcagtctagatggggagaaaaaagatgatgatataaattgtgctcaataaatgctaaaataatagtgtgtataggttttcagaaaagcttatgtttctttctttcacacattatctcagataatcatcctgtagctctatggggtg

SEQ ID NO: 309182 - DNA, 595 bp, Homo sapiens
aacctgggtgcctgaatgacctgggggcaaaggctgcctgtatccatgggctgctcatctcagaactgctatgtgagagagaaacagaggtatagttctttaagacatatgccatcaggtctgtttgatacagcagctgatgcttttaacttaattagtacatcctctaggagatttcagtctagatggggagaaaaaagatgatgatataaaytgtgctcaataaatgctaaaataatagtgtgtataggttttcagaaaagcttatgtttctttctttcacacattatctcagataatcatcctgtagctctatggggtgggtgattagctccatttcacaaatgtctactttctaagcccctgagaaacagaaattctttctgtccttgaatgtgccatttccttttgtttctaggccttctatctggcctgaccttctgtgactactgttaactccaccccctgtgcagcctctagctgaccacatggatcctcaggtctcagtatatttgaacatcttaaagagtctttgctgatcccaggagaggtcagctttcctgattcgggattcacagagcagtttggtgacatt

SEQ ID NO: 309183 - DNA, 555 bp, Homo sapiens
tcctgggaaacccctagttcccaggctcctggagtctgagggcatggagagcaagcagtccccttggagatgcccgtccaattctgaatcaatgagggaagactgagggagacatgaggccgkagtctgttcaatggcgtatgacccaggctgattctgaacttcataaggaacacagtgaggagactactgggctgagtcagccaggaccatcctacttagaagcaacttcctgagacacagtgctatgctctgtaaaaagcccaaagttggagtcagccagacccacgcccaggttaaaagggtatttgtgtgaccccagaagaatcacaaaacctctctatagatcaggaataatgacttgcctctgcctgcctttgttggaggttgatatatgaggatcacatgcacaggaaaatgctttgcaaactgcaaagaatgcagaaatgataatactgacttattttttagataactcaggaaacatgtttaagtgggagttgggtgagaggtttcagggctgtttgtttgttacactatcgactttagtttaga

SEQ ID NO: 309184 - DNA, 555 bp, Homo sapiens
tcctgggaaacccctagttcccaggctcctggagtctgagggcatggagagcaagcagtccccttggagatgcccgtccaattctgaatcaatgagggaagactgagggagacatgaggccggagkctgttcaatggcgtatgacccaggctgattctgaacttcataaggaacacagtgaggagactactgggctgagtcagccaggaccatcctacttagaagcaacttcctgagacacagtgctatgctctgtaaaaagcccaaagttggagtcagccagacccacgcccaggttaaaagggtatttgtgtgaccccagaagaatcacaaaacctctctatagatcaggaataatgacttgcctctgcctgcctttgttggaggttgatatatgaggatcacatgcacaggaaaatgctttgcaaactgcaaagaatgcagaaatgataatactgacttattttttagataactcaggaaacatgtttaagtgggagttgggtgagaggtttcagggctgtttgtttgttacactatcgactttagtttaga

SEQ ID NO: 309185 - DNA, 555 bp, Homo sapiens
tcctgggaaacccctagttcccaggctcctggagtctgagggcatggagagcaagcagtccccttggagatgcccgtccaattctgaatcaatgagggaagactgagggagacatgaggccggagtctgttcaatggcgtatgacccaggctgattctgaacttcataaggaacacagtgaggagactactgggctgagtcagccaggaccatcctacttagaagcaacttcctgagacacagtgctatgctctgtaaaaagcccaaagttggagtcagccagacccacgcccaggttaaaagggtatttgtgtgaccccagaagaatcacaaaacctctctatagatcaggaataatgacttgcctctgcctgcctttgttggaggttgatatatgaggatcamatgcacaggaaaatgctttgcaaactgcaaagaatgcagaaatgataatactgacttattttttagataactcaggaaacatgtttaagtgggagttgggtgagaggtttcagggctgtttgtttgttacactatcgactttagtttaga

SEQ ID NO: 309186 - DNA, 555 bp, Homo sapiens
tcctgggaaacccctagttcccaggctcctggagtctgagggcatggagagcaagcagtccccttggagatgcccgtccaattctgaatcaatgagggaagactgagggagacatgaggccggagtctgttcaatggcgtatgacccaggctgattctgaacttcataaggaacacagtgaggagactactgggctgagtcagccaggaccatcctacttagaagcaacttcctgagacacagtgctatgctctgtaaaaagcccaaagttggagtcagccagacccacgcccaggttaaaagggtatttgtgtgaccccagaagaatcacaaaacctctctatagatcaggaataatgacttgcctctgcctgcctttgttggaggttgatatatgaggatcacaygcacaggaaaatgctttgcaaactgcaaagaatgcagaaatgataatactgacttattttttagataactcaggaaacatgtttaagtgggagttgggtgagaggtttcagggctgtttgtttgttacactatcgactttagtttaga

SEQ ID NO: 309187 - DNA, 645 bp, Homo sapiens
ggccggagtctgttcaatggcgtatgacccaggctgattctgaacttcataaggaacacagtgaggagactactgggctgagtcagccaggaccatcctacttagaagcaacttcctgagacacagtgctatgctctgtaaaaagcccaaagttggagtcagccagacccacgcccaggttaaaagggtatttgtgtgaccccagaagaatcacaaaacctctctatagatcaggaataatgacttgcctctgcctgcctttgttggaggttgatatatgaggatcacatgcacaggaaaatgctttgcaaactgcaaagaatgcagaaatgataatactgacttattttttagataactcaggaaacatgtttaagtgggagttgggtgagaggtttcagggctgtttgtttgttacactatcgactttagtttagaaaacataaactaagacacataagatcaaacaggagacartagaagcctggtgacaagagagatcctaatctcagagagaggaaaaaatctaaatccaaatgagaaacaaattccagttaacgaaaaggctgccagttatttactcaggctgtcaatgtagcttatccaagaaccagggccagatacgccttagaacaagggtacagg

SEQ ID NO: 309188 - DNA, 585 bp, Homo sapiens
ccttggctatagagctattaccactggaatgcccaacttgaaccatccctcttctgaggaacaacatttttatgccatcttattcatcacattaaccaattttgtgtctcatcagagcctcaattactggcaaaaactaagaaattattaacttcttatttattcatctcacaaacatttattcaatatcgaccacgttgagctcagtgtgggggctgtaagatgaatcaggcatggtccctttcctgcatgatctgtatggttttgtttacataagccaagtaaacagagacaagaatagaagtgtgaacaagcacagcagggcataaagtaggggaagaggtagcagaaaaggtaacatttaggaaggcaaccacaagcctctggttttcccccaggagattccaaattatcaggggtaatgcctatgttagtctcgtacaacaacgtgctcctgttgctgggtacaggccctggcatttagtagatggccactaaatacttttataaataggtgagataaatctttgaagacaatgtggtgtttacaaracaggacagagaaaacaaggaaaggcagaggcg

SEQ ID NO: 309189 - DNA, 562 bp, Homo sapiens
ttggctctgtttttctgcccaagtctcatcttgaattgtaatccccatgtgtcgagggagggaggtaatttgatcatgggggtggtttcactcaggctgttttcatgatagtcagtgagttctcatgagactggcggttttataagagtttggaagttcctccttcattcttctctctcacctgccaccatataagacatgtttgattctcctttgctttctgccatgattgtaagtttcatgaggcctactcagcaatgcataactgtgagtcaattaaacctctttctcttataaaatatccagtctcaggtatttctttatagcaatgtaaaatgaactaatacaatgggctttgtaggagaagtcccactgtggagcagcttattrcaaggaggatacagggataatttattagctaggcttcctctgtcttttacctctgtatggcagatggacttcacagcaataacttgacttgagcataacctgagaatgaccctgtatggcagatgcacctgaatgtgtctttggagttcagagctaggcaatccaggagtag

SEQ ID NO: 309190 - DNA, 597 bp, Homo sapiens
ctctctactttctcatgctgctttgctttcagactcttcattttcatccctcttgttagttctgggataaccttgtcccactctgccacgaggagtgtgagcctctgtccaggcttgagctgcagtggctgcacccctgcctccactgtgacatcctttggttgcagctgcagaagcatccttagcagattcctcagctggagatgcaggttaggcttctgaagttctgaacctacaggcctggggagttttggtgcctctgccatggcctcatgcccagagctttgcttttccctagctctgyaattgttcaggtctgggtaattggtatgacttcagtagcagctaaatatgccctctctcatgcattccctgcagttatggcatgtgcctctgatggtccactttctccttgtttctaaactcgcttcaaaattgattggctgaacttttaacatatttaatcttaaatggattcctttccttttatgccttcttggctgaaattcttcctttcctttttcttttcattggctgtcttactgacaagggaatttggttttcaagcatcgtctacattttctcctgtgagtacag

SEQ ID NO: 309191 - DNA, 611 bp, Homo sapiens
aatgaagtaagtacagtgtaatcttcttttgataatgatttataagttgcttaaagatcataacaaggccaggggatcacagccatgaatatggaatatccatgtaggactgttccttaggtacatgagaacttcctgacaatgagttctggctactgttaaaaggtgagtagccaagatgtacagtgctgttcgttttttttcttttccttccttattagaaagtaatgtattctcagtgtacaaccataataatattctcctagggctgtgcctcaccattgaacaccattggaatattcaaacaactacctatagatgtttgctgatctaacatgaataaattacagaagaatgtgtttaataccctctggagctaaagatctgtatttctggactcagatagtgtgtaagttaggttctttgatagaaagcagtgaaaatcaactcaggtgaacctaggcaaagctgttagttagcccacagatttcagaacaatgcagagmcaggcttggaaaagccacaggaataaagaaaactctagggctcttttggcaggaattagtatttaggattttaagatgccaccactgaaatgagtcgattccagc

SEQ ID NO: 309192 - DNA, 627 bp, Homo sapiens
atccaaaggctccactgagtgcccttgcatgcgtattgtgtgcgcacagcctaagctggagccagagctcagaagattgatgacgtcacacctggcccagtccctgcctaagtgggtgcaggacggtggacaaagcccgcctttcctgaggtttgaacaaaatcaaggaaacggttgtcgtatttgtcttcattttgtgggaaaacaaaggttggcttgactggggcaagagaaaatataagagagggaagatgaagagccactggtgtcccagcctcgtgttcagcgaggatgccctcccgcaactgcctgcctgtttccatgggctccagggcgcaggaaatgcctcatggagaactttctggaagatggccaagagaagcccctctctcaagggctttctgggaacccaggggactatctgcagaagaacgttctttggggcgcggtgggaagccaagcaggcctcctcttttgggcgctggtgaacgcaggatcckcatggaagcgactccgaccccacggcgtttccacgcctctgcggcttgggagggagctaggggcttcaggaactcaggctgtgggttttcgagttgctttcctgataaatgaaaatcctcctgataa

SEQ ID NO: 309193 - DNA, 572 bp, Homo sapiens
ctataccatgctgctggagagaccaccagatgacctgagtccccaccaccgtgttctgcaacaaagagcaggccttcctcctgcactagcactcagccctgtaagtgatcttgggcacggagtgagactgcccttaggacagaggtctcctggactggggactgtggtcgtgctctccctgttgccaccaggcctaaaccagcattgagtgggacatctgcagcttgagactatccaagaaaatgttcctcaccattaaaaaagagcactgaaagatggttttatggatgatactgtcacttaacatcactgatatggtagacctagaagggccytgagagcacatccagtcccctcaatatatgcctgtccctgggcacactagatatcacaattagcatagaatgtggggggaaattgactgtaatagtggccacaagattaggtttatagcccatattttgccattaatttgaaccttgtggatttaagcaagtcactacacctctctggccctccattttctcactgagaactgaggaagctgtataggtaataaaacaactgacatt

SEQ ID NO: 309194 - DNA, 579 bp, Homo sapiens
gacttgcccaagattgcccaactggtaaagggaaacaaagcaaggagacaaacctaaggtgttctttccatttcacaatggctgagtcagtgagaaaggcagagacataaccagaatgctgcattttggcaaatgtgacgttcctggaatggattactaacagtctagaaacatagaaagtaccatgcaattaaaaacacacagtccaggccaggcacggtggtgcacacctgtaatcccagcactttgggaggctgaggtgggcggatcacttgatgccaggagttcgagatcagcctggccaacatggtgaaaccctgtctctacaaaactacgaaaaaaattagccagacatgatggcaggtgcctgtaatcccagctcctctggaggctgagtcagaagaatcgcttgaacccgggaagcagaggttgcagtgagccaagatctcaccactgcactctagcctgggtgacagagtgagactctgtctcaaaaaaaaaaaaaaaaaaaaaaaaaamcagtcttctgaattttggtgagctttggaaatacaaaaagttaccgacaataggtttcac

SEQ ID NO: 309195 - DNA, 563 bp, Homo sapiens
taatgcctttccgggtgagaacttcagaaggaaggacagcacaggggacaaaggaagggatagaaatgataagtgtcttaaaatgaaaaggtgatggaaagaattcttaaggcagaaataaaaatcctatcaataacaaggttgggtttagagttaaaaaaataatcacacggccgggcacagtggttcatgcctgwaatcccagcactttgggaggctgaggtgggtagatcacctaaggtcaggagtttgagaccagtctggccaacatggcaacaccccgtctatactaaaaatattaaaaaaattagccgggcatggtggtgggcgcctgtaatcccagctactcaggagactgaggcaggaagaattgcttgaacccagaaggtagacgttgcagtgagctgagattgtgccactgcactccagcctgggagacagagtgagactccatctcaaaaaataaataaataaataaataaataaataatcacgcagatattttgtttcctactttaaataaaagcaaggcttcacatttgaccacagaatgttgtattgct

SEQ ID NO: 309196 - DNA, 563 bp, Homo sapiens
taatgcctttccgggtgagaacttcagaaggaaggacagcacaggggacaaaggaagggatagaaatgataagtgtcttaaaatgaaaaggtgatggaaagaattcttaaggcagaaataaaaatcctatcaataacaaggttgggtttagagttaaaaaaataatcacacggccgggcacagtggttcatgcctgtaatcccagcactttgggaggctgaggtgggtagatcacctaaggtcaggagtttgagaccagtctggccaacatggcaacaccccgtctatrctaaaaatattaaaaaaattagccgggcatggtggtgggcgcctgtaatcccagctactcaggagactgaggcaggaagaattgcttgaacccagaaggtagacgttgcagtgagctgagattgtgccactgcactccagcctgggagacagagtgagactccatctcaaaaaataaataaataaataaataaataaataatcacgcagatattttgtttcctactttaaataaaagcaaggcttcacatttgaccacagaatgttgtattgct

SEQ ID NO: 309197 - DNA, 583 bp, Homo sapiens
aaataaacacctaaaaacaaaaagcccaaccataaagcacagagtagctatttgtggctcaatgctgcgaaaactttttaaaaaatagccatgagcttgcttcacaccttttgcagagtgtgggacaagtagtacctcagaaaactggaaatataaaacagaagaataagataaataatagcaaagtaaattacgtgtttaaattgcttttaaatatactgtaaataagatttgattatttacatgtatacatgtgatcatctttcagaaactattataccatcccaatatttaatcttatgatcataaatatttgattcatttccttttatcttgtcatttattcaagcaccaagttctgttacttcttccctctaaatgccactatggccattgttctcttaaattttaactgctgtgtccagatagacattcttactgtctcacactcaaaatagtagaaagtcctctaaatgttctcccattcaaattttgcctcgctattccscaccggaacccttccctccagcctggctataatctaagttggccacggaaggaataatgctttgccgccagcagg

SEQ ID NO: 309198 - DNA, 575 bp, Homo sapiens
ggggtgagtgtgggctggtctcttcagcccatggcttgagtactattagctacttaggctgctctggagttacggtctggatctcaggtcagaatccagggaattggttggttctgatctgtgaattttagacaacttactggtgaaccagggaaacctgacttaggtttcctgggatagttctagaatcacattgcatttcttaattctgaggcagacccgtattactatggcagctccaagtggaaatattccagaatgaaggacttgccaagtaacctgacaattttattttgatgcacatagatggtaaaggtatttcttagacataaagggtcagatcatagattgcagttaaacattgaggactgaatacatgtttatctccatttcttttctactttacttctcacactccacaaaaatgacaaaagacagaattttctgaaaagcaaaactctayatattaagtgtcagagaggagacaaaaacatatatgaagtgttaacataattttgggaactagaaagtggatgaatgtgtggtaactaattcagtagagcaggaaaagctga

SEQ ID NO: 309199 - DNA, 579 bp, Homo sapiens
cttccttcccacacccagtaaagagcgtagggctggaggaacctgggcaacggaagacaaagggaattttctacagagagttttatatgctatttccatggctgtgctatagaaatgaaagagtatcattagggtttagagtctaatgaggcagcattagataggccaaggaaaagtcactctatgtaaaatataattatctggagaagaaaagtgagtgtacttggatttagaccacatgagarccaaaacctaattttgatgagaaactaaaattctggctatgcaaaaggcagactaggaagctagaaagcccgacttatgaataaaagacaaataggtctgttctggaacttggtgtccacttagtatccataacatggatggtttgtaaattcaggaataagggaaggtaagatcctgaagtgtactgtgcttgctaaaagaaactgttttcaggaatgaatcatttctcttacaacaggtaaatatggcctgctgaataataatagcccacattcattcagagcttattatgtgctaggcactttaaagtgctttataaatactagcttattt

SEQ ID NO: 309200 - DNA, 579 bp, Homo sapiens
cttccttcccacacccagtaaagagcgtagggctggaggaacctgggcaacggaagacaaagggaattttctacagagagttttatatgctatttccatggctgtgctatagaaatgaaagagtatcattagggtttagagtctaatgaggcagcattagataggccaaggaaaagtcactctatgtaaaatataattatctggagaagaaaagtgagtgtacttggatttagaccacatgagagccaaaacctaattttgatgagaaactaaaattctggctatgcaaaaggcagactaggaagctagaaagcccgacttatgaataaaagacaaataggtctgttctggaacttggtgtccacttagtatccataacatggatggtttgtaaattcaggaataagggaaggtaagatcctgaagtgtactgtgcttgctaaaagaaactgttttcaggaatgaatcatttctcttayaacaggtaaatatggcctgctgaataataatagcccacattcattcagagcttattatgtgctaggcactttaaagtgctttataaatactagcttattt

SEQ ID NO: 309201 - DNA, 637 bp, Homo sapiens
tcgtctactaccttcttagatatatgatttacttaaccttgttatgtttttttaatctgtaaaataaatgcataataggaagttaattgtgagaacagtaccccttgggaagagattcctttagtttaatatagtcctaagaaatgcatcagtgaggggagcaccagaattcttgaaaaattctttagtgaagatcagagaggacagyggaagacgaattatggaactggatttcatgatttcagtgtaaaataggattctggaatgacagatttcatgtgacagtgcttaatctttggagtcagttatatatttactgtatataaccatagaattataggagtggccagagtgttttaacccacatgaatctgtgtcagtgactttttaattaatgtttcctagaaacaatatagatgagcaatatctactcattgcttcatctatataaccaaaaaacaaaactctcagtctggtgtgcacagtcttgacccaggtcagtatacaggaaattgaaggtcttttctgagttcacagacctaagtcagtccccttagagatccttgatggagggagaattggtacttttgtgagaagactgtgctgcgaagccacgcatgtatactataaaacttcc

SEQ ID NO: 309202 - DNA, 524 bp, Homo sapiens
  misc_feature (1)...(524): n = A,T,C or G
tcttggtgggtctggatcttaagctgataaaggaacttcagcttctttggaagagatatttgtgagggtaaggtcagagagaccttgaggcttccttaattcagtatgtcaaaaggacatatttgagagtatcagtttctgagcccaaacacaggaaaatggttactctgaaggtaaactggggaaagaatacagtgggccagactggcacagagtttggggtgaggcatttcaatgtatgtatttttatgttcttttgatttttgaacygaaatttataatcaattcaatacataatcagttctttgtatctacggattctgcattcaagaattcaaccaaccacagatcaagcatattgaagaaatagtaaaaaaaaaaaaaaaaaaaaaatncagcagttaaaaataatacaaattaaaaacatagtatagcaactatttttacagcatttacattgtatagctattataaataacctagaaatgatttaaattaaatgggaggatatgcgtaggttatat

SEQ ID NO: 309203 - DNA, 592 bp, Homo sapiens
  misc_feature (1)...(592): n = A,T,C or G
aggcatttcaatgtatgtatttttatgttcttttgatttttgaactgaaatttataatcaattcaatacataatcagttctttgtatctayggattctgcattcaagaattcaaccaaccacagatcaagcatattgaagaaatagtaaaaaaaaaaaaaaaaaaaaaatncagcagttaaaaataatacaaattaaaaacatagtatagcaactatttttacagcatttacattgtatagctattataaataacctagaaatgatttaaattaaatgggaggatatgcgtaggttatatgcaaatactaagcgattttatataaaggacttgagcatccacacattttggtattcaaggggtcttgaaatctatctcccatagatactgagggatgattgtaaaatataaaggtattaaacaaagtaaaaatttaacagcaaccctggttaaatccaactttctacctgctccacacttatacctgtgcagcagaatgatgctggggaaaacacaaaacctgctgactgatctaactttaaattaattaccatcaatcccaagtaggccttaatgctgcctggcaaccata

SEQ ID NO: 309204 - DNA, 592 bp, Homo sapiens
  misc_feature (1)...(592): n = A,T,C or G
aggcatttcaatgtatgtatttttatgttcttttgatttttgaactgaaatttataatcaattcaatacataatcagttctttgtatctacggattctgcattcaagaattcaaccaaccacagatcaagcatattgaagaaatagtaaaaaaaaaaaaaaaaaaaaaatncagcagttaaaaataatacaaattaaaaacatagtatagcaactatttttacagcatttacattgtatagctattataaataacctagaaatgatttaaattaaatgggaggatrtgcgtaggttatatgcaaatactaagcgattttatataaaggacttgagcatccacacattttggtattcaaggggtcttgaaatctatctcccatagatactgagggatgattgtaaaatataaaggtattaaacaaagtaaaaatttaacagcaaccctggttaaatccaactttctacctgctccacacttatacctgtgcagcagaatgatgctggggaaaacacaaaacctgctgactgatctaactttaaattaattaccatcaatcccaagtaggccttaatgctgcctggcaaccata

SEQ ID NO: 309205 - DNA, 579 bp, Homo sapiens
gaaacccaaagtgccctatctctagactccactccagacaaatgccttttkctttttctttttttttttgtttttgtttttgtcctgtttatgttgaaagaaaagacattacaggtgccatctgttcagctgcatcacctctagaacattgcctggcgagatcatagaggatcgctatatcccaaggattaactaactctcccatagtttcatttctcatgccttactttttcagtacaaaatacatgctgttagggattaccagagaagaaattcacagcagaaacagccaaggagacaatcttgccttcatcctgagtcccacacaggatgaaagaggtaatcagaggtgttacagcctcttagacatgtgtagactattgaattaattacacagttccactttctcctgtgtgtctggaaatcaaatccaaaatagctacaaattctttggagagcacaccaataggtcactagccagattcacattttatatcataaggattgattttttttttttatctgggattgcataaggagaccattgaaacctacataattgttaaatttggacagatt

SEQ ID NO: 309206 - DNA, 566 bp, Homo sapiens
tacagtggcagctgtgatttattgaagcaattcaaatatacttggagagtatattagctttgcctctgcccacaaagggtgcgtttgagcagggtaggacactccagtgataaattacagactacaaccaagtgaaggcaattggcacgtcaaatgcctaaaggctcaaaattccagaaagaatgcattttctatgataatccttcacatacagtggcatctagggcaggcaaagaaacaaattagcacctgattatttcattctgtgttagtgcttcttctccttcttcttcttttttgttttttaagtagcaaagcctctcttgtttacatcaataaagagattggcacctccatgctgcattcaacattaccttaagtatgtgtgccattactactccaacttgtgaagatttacaaattagtttcagaatggaacttgggagagccatgtggctgtatttaaccaaatgaatagaattcaaaattcccattttgttttcaaagaataaaaacmtgactctagttgcatgtgagtagcatttaaaatccagagagttaaattt

SEQ ID NO: 309207 - DNA, 545 bp, Homo sapiens
atcttagattatgcttactgttttgttgcattagaattttggggatggctgtgtagaaagatggttttattagtgaarcatttccaaaacttattatcaggagaacccttaatttctcattttagttactaatcttatcacaatcacattttgtaagtacagattattcagtttataaacatatcaagatataggaaaacatatagatatataaatatattgatatattgctatacttattcctaataattctctgtaaccctatatgaatgtaaaagagaataagaatgacttatgcattcatttttttcagcaaaattttattgcatactggattatattccaattatgtggcaccactcaaaacaagagtacatataaatttaaagcacttaaatttatcttgtaaatgttatcatacattttgttattgtttgatagttgtaactaaatgttgtaacaagaacaccaacacatttaagccataatcatgttattgatttaatatagttctacagggtatgaggtgaggcagcaaagtgtgt

SEQ ID NO: 309208 - DNA, 305 bp, Homo sapiens
acacttttaaactgtcagatttcatgagaactcactcactatcatgagaacagcatggggaaaaccaaatccatgatccaatcacctcccaccagttgttcccccaacacatggggattacaattagaggtgagatttgggtggggacacaacsaaaccctatcacatatatacaggtacaaacagtggacaaagctgcaggcctacctcttacctgtgccttggcactcacatcacagcaccttgatcatttataaataaaaaataaagcattagaaatacttaaccctcaaggtgttattaaa

SEQ ID NO: 309209 - DNA, 509 bp, Homo sapiens
catgtccctaaatgctctgatcaattgtgaaatttcggtgattcatgtccagtaaatggagtgggtggtagggaatgagactttacgatttcatgtatttaggaagatctaaaagtgtctctgatgatcagttagattagggttagatgacctttgagatccatgacagctctaagagacactaatgacctatgtagamtatttctagatcatgatacacaaaatccaattcatctaggttattcagggcaataagggtgtttagggtaattttctgagtgtaataagggatactcaaggccatggagattttttttcttttagaaggtacaaagctttcagggacagatagaatttggagagatctgcaaaaaatttagtcatcctttacagaatttatttaaaaaattaatattactgtccacctgcaggccttatactataaggaataacaacatttgtatagtagtcattgtgcttcagagggtgatgcaacaagcatgaaggtg

SEQ ID NO: 309210 - DNA, 579 bp, Homo sapiens
agctttcagggacagatagaatttggagagatctgcaaaaaatttagtcatcctttacagaatttatttaaaaaattaatattactgtccacctgcaggccttatactataaggaataacaacatttgtatagtagtcattgtgcttcagagggtgatgcaacaarcatgaaggtgagggtgatgtgtgtcgatgttttaattaaaggcaaactaggcagaaagcctgctttgtccaggctgccaggaatgaccagcccttcttgtccagtgcatgtttttcctaggcattgtatccttggagatgaagtcaatgacagaagacaaggggaaataatttttatcttctatttttttctgaattattttgctattttgaaattaaggcttcttgatgtatttattaaatatatgttcatgttatacaaattaattttgttgtggtctccaaggagcctttcttacatttcagaatctaaatctgaatttttctgtgttttctgtttctctgaaaaaatataatatctctatatttattgaacgggcaggaaaacaattgtgattcaatgtttgcctgtgg

SEQ ID NO: 309211 - DNA, 579 bp, Homo sapiens
agctttcagggacagatagaatttggagagatctgcaaaaaatttagtcatcctttacagaatttatttaaaaaattaatattactgtccacctgcaggccttatactataaggaataacaacatttgtatagtagtcattgtgcttcagagggtgatgcaacaagcatgaaggtgagggtgatgtgtgtcgatgttttaattaaaggcaaactaggcagaaagcctgctttgtccaggctgccaggaatgaccagcccttcttgtccagtgcatgtttttcctaggcattgtatccttggagatgaagtcaatgrcagaagacaaggggaaataatttttatcttctatttttttctgaattattttgctattttgaaattaaggcttcttgatgtatttattaaatatatgttcatgttatacaaattaattttgttgtggtctccaaggagcctttcttacatttcagaatctaaatctgaatttttctgtgttttctgtttctctgaaaaaatataatatctctatatttattgaacgggcaggaaaacaattgtgattcaatgtttgcctgtgg

SEQ ID NO: 309212 - DNA, 605 bp, Homo sapiens
cagcaaaaaaaaaaattagaaatgactgaaagttcattaacatagaatggataaatatcttgtggtatttattgaaatatcacaaattccataagttatacaatagaaaattatatatcaatgaggataaatcaattagtgctacctgcaaaaacaagagtgtactttataaacactgttgaacaacagaagtcagttataaaakagtacatatcatctgattccactcatgtaaagctcaagtaatctatgctgcaaaaccagtatagtttttacctttagagagctatacaagggcgacacaagggtgctgatagtcttatatatgtttttatctatgtgttggttatccaggtttgctcagtttatagaaattcatcaatctttccccctcttctttttttgatcacgtttctgtatgtctgttatactttcaaattattgaatgattaattagttctctctgggaaatacctcctaccaacccctttcaattgtaaaatattctcactttttcatcttcttgacaaaatgataagaagtgttctggtgataagtattttaaaataacattttcatctggtagaatatgttttaatgagaag

SEQ ID NO: 309213 - DNA, 409 bp, Homo sapiens
acccacagattcaacaaactcaaaacaaacaaacaaacaaacaaacaaacaaaaaaacactaaaaattaatacaaagaaaattatacaattacttagtctattttggtggagcacagctgggcagtttatttgatattggctggggtcattcatggatcggcatgcatgataagctgccaagttgactgatggctggatggtgcaagtatggcctcagctaggatgtattgtatctgctctrcatggtcgtctgtcctccagtaagctatcttgcttattcgaatctatggtagcaaggcagggttccaagagaggaagaaggctgataactaacacaatgtaacttccaccacattctattagccacagccaaacacaggaccagactacattcaaaatgtggaaaaa

SEQ ID NO: 309214 - DNA, 587 bp, Homo sapiens
tacatataaattggttaccatttgcatagagtatatttttctattacttcaccttcagcttatgtgtgtgtaaagcaaaagtgcatctcttacatacaacatgtagtaatatcttgttttttttcaaatctattcatctagtgtattctttattgaggaatttaatccattaaatttaaagtaattgctgatggagagtaacttattattgtcattttgttaattgttttatgtttgtcttcttcttttatccctctctttctcttgttgtctttctttgtaatttgttaatttttgtagtgatatactttaagttttttttatattctataggtattttctttgtggtcacaatgatgtttacataaaccatcttatagttagaacagtctattgtaagctgatataaacaacttcatttacatacaaaaactccacacttttacttcttccctactccaatactttgcaattgatgtcayaattgacatgtctttatagtgtgcattcattaacatatcgtatattttaaaaatatcttcctatttttacttttatactataattcaatgtgatgtacttaccac

SEQ ID NO: 309215 - DNA, 589 bp, Homo sapiens
tgtcttcatatgccctcaatgcacaaatggcctctcaaagtgctatctcccagtaatatcaccttcattgatatatgatcactgcctactggatatctcttaaatgtgcaacaatcatctcagactgaacatgtcagaacaaaattcttattttcttmctcaaaaatgcaccttctaaaatctgcctgttttttgtaaatgccatcatcataacatcgttacctgatttttaagcctgctccccacaaaagaattattcttggttcctcttttttctttcgctttcatatcaaagccaagatctatctgcactagatcaagtagatctagctacactattttctaaatacatgttcactctaactgcttgttatcatggtcacttctaccatcatctactctgcctgaattactaaaacaacttcctcattgatttcctgcttccattcttggtgcgtgtataatggtctcttctagactttgtagctagagtcattttttattaatgtaattgacaacatttcagttcttttttaaaaccattagctgtctgcttctgcaattagaagaaaatctaaatttttaatca

SEQ ID NO: 309216 - DNA, 591 bp, Homo sapiens
acttttcacaaaaatattttgtggataaactgcttaaaagtgcagggcaaaactataaaacattagaaaaatatgaactattaatacatgtataacataaaagagaagtagttcttaaacaaaatgtagagaaataataatatgactacattaaaagaaataaatgccacctctgaaaacctaccacaaacaaaatgaaaagacataccacaaacttagaaaaaatatttgtgtcatatttatgacacaaataaatatggcatcaaaatagtattcttatctaaaattgtgagactctcaatatgaaagagataaggaatatagtagaaaaatggataaaggacttaggcaggcactttactaagagtaaacacaaataaactgtgggagtgacgtaaaagtaattaaatcatgtatttaatttaaagttgtttttaaagtgcagtcccttagggcatcttatgagagcatttgaaagttctctrttgaaaaactcacattattccagacctcaaaaaatgtgcatgcatacagttgcaggaaaaattagcagctcacaggaagaaaactcatgaaatacccagaaaaata

SEQ ID NO: 309217 - DNA, 590 bp, Homo sapiens
atacagtgaaaacttagtcttccttgtaagcttgactttcgagcttctgccccaaacactaaccctaacactagctataatcctaatctcccagtttcatgtacagtatacattcttccagtaaatccaagcggaacaataatattcacacaatgttctgtaccttatgattttctcttgaacaaagacatacacgtagtatttaatgtggtatgctgttttattgatgtatcacattttcttttactagccctaattaataaaaattttgtggtttctgtttggtgctttaaatggcactactaytgaaatctctgtgttattccatatatgtgtaggtgtcagacgtgtgtgaacctgagcaactccatcttaaatagtagttaggtaaaatgaggctgaaacctactgggctgcattcccagatggttaaggcattccaagtcatgggatgagatagtaggtcagcacaaaatgcaggtcataaaaaccttgctgataaaacaagtcacagtaacaaagacggcccaaacccaccaaaaccaagatggccacaagagtgacctcagtttatcctcacagctatacac

SEQ ID NO: 309218 - DNA, 595 bp, Homo sapiens
gtcagcacaaaatgcaggtcataaaaaccttgctgataaaacaagtcacagtaacaaagacggcccaaacccaccaaaaccaagatggccacaagagtgacctcagtttatcctcacagctatacacccaccagtgccatgacagtttacagatgccatggcaacatcaggaagttaccacttatggtctaaaasggggaggcatgaataaaccacccctcgtttagcatttgctcaagaaataaccataaaaatggacaaccagcagccattggggtcataaagaaataatcatagaaatgaacaaccagcagcccttggggctgctctgtctatggaatagctgttcttttattccttcactctcctaataaacttgctttcactttactgtatggacttggcctgaattctttcttgtgtgagatccaagaaccctctcttggggtctggatcaagactcccttcctgtaaagtaagtatataatttttctcaacaaaatatatggtacattttatgttccttgaaattttgaaaataatttatgaacacacagattccagggttgaaactattgctagagatgttttatga

SEQ ID NO: 309219 - DNA, 528 bp, Homo sapiens
caacttaattatatcattaaatcatattggaaatcgtttcttattcctatgtaatatttagaaacatattactttyatatacttagcattctattttaaatttagatatttaccttaagtaaaggacaaacttatttaaagaaaaattttaaaatgtctttcattcttttcacacttagcctttacaacatacaagttggcccattctatagatttgcaaaccaatgaatagatgcatgaaatgtttaaaatgacttactggtaatgtcaagtgcagttgcaactctaagtcacagttgctctgaaagtttcacgtaggtgacaattttctgagcagagtgttaaaaactgctttataatagcaactcccacaaaacctcttcagtcatatgggtctggtagcattttattttaaacaccattttgacaggtgtattatgtagctattttatttttcatgcatagaacattcttgacattcacttcacttgcacttttctattagaagaagaaaaagttcaggcaaaa

SEQ ID NO: 309220 - DNA, 614 bp, Homo sapiens
gagacacgttgatttatcaggaagagagttcatttgaacagcattgtgatagccgttgtccagaattaattctagtagcatgctccctccttgtcgctatatagtcaaaaactgtttttcttggcaaatatctcagtaagggacaaagaaaggagattctgttttctatcggataatacatttagtgctctaagcaggccctgacacacaaatatgaaacttgaacacatgtctccatgttatgtatattttccacttattcttgactcgaaattccaattcacagatttccacscaaaacgtgcttaggagacagtagttcttcaaaagttttagtccagaaaatctattctccattccatgaaaaagctgagtttcaatgtagttgaaaatcagaagcctaaaatataattttgtgttaaagtagttatataattctttcccttgtaaggagtgtttttttaaatatttctttggataattccaaaactgtcgtgctaactcctgctatgggactctttttgaagcccgacagcacaaaacaaatttgttcgatgagtctcaatagactcacaggacattttactaactcaaaaaagaaatatttgtatact

SEQ ID NO: 309221 - DNA, 614 bp, Homo sapiens
gagacacgttgatttatcaggaagagagttcatttgaacagcattgtgatagccgttgtccagaattaattctagtagcatgctccctccttgtcgctatatagtcaaaaactgtttttcttggcaaatatctcagtaagggacaaagaaaggagattctgttttctatcggataatacatttagtgctctaagcaggccctgacacacaaatatgaaacttgaacacatgtctccatgttatgtatattttccacttattcttgactcgaaattccaattcacagatttccacgcaaaacgtgcttaggagacagtagttcttcaaaagttttagtccagaaaatctattctccattccatgaaaaagctgagtttcaatgtagttgaaaatcagaagcctaaaatataattttgtgttaaagtagttatataattctttcccttgtaaggagtgtttttttaaatatttctttggataattccaaaactgtcgtgctaactcctgctrtgggactctttttgaagcccgacagcacaaaacaaatttgttcgatgagtctcaatagactcacaggacattttactaactcaaaaaagaaatatttgtatact

SEQ ID NO: 309222 - DNA, 585 bp, Homo sapiens
ggttttccctgtgacacgcaatattgaactatatcctagacattctgagtattgtgttctaagactcgatcctacttaagtcttccatttgagcaggtagtcaacttattaggtttagaagtcctggtcatttgtgtgggctgtggttcaatcatcaatttactttactaaggctgtgagtgctctcatggtcagcttcacttgtgtgttacccagaagacaggactccaccccgttttcctccacatcgccttgggtgtggggttgccacagtcagagttctgtccacagtctctactgtggagacagtctctacgtctttgttgctgcagggagtggaagtgatcattctatccayagttcctgtgcgcaagaggcctgcacttttataggtcagggggaccggaagtcagagatccacctacaggctctatggggatggctgcatcctagtaactgcagcaggaaggagaaggtggagaatagctctgtcaatttagtgcccattgggaaaagagatgggcacaacttttgtcatgttgtttgtcttaagagtagaaagggcagaagaggatagtctactgg

SEQ ID NO: 309223 - DNA, 585 bp, Homo sapiens
ggttttccctgtgacacgcaatattgaactatatcctagacattctgagtattgtgttctaagactcgatcctacttaagtcttccatttgagcaggtagtcaacttattaggtttagaagtcctggtcatttgtgtgggctgtggttcaatcatcaatttactttactaaggctgtgagtgctctcatggtcagcttcacttgtgtgttacccagaagacaggactccaccccgttttcctccacatcgccttgggtgtggggttgccacagtcagagttctgtccacagtctctactgtggagacagtctctacgtctttgttgctgcagggagtggaagtgatcattctatccacagytcctgtgcgcaagaggcctgcacttttataggtcagggggaccggaagtcagagatccacctacaggctctatggggatggctgcatcctagtaactgcagcaggaaggagaaggtggagaatagctctgtcaatttagtgcccattgggaaaagagatgggcacaacttttgtcatgttgtttgtcttaagagtagaaagggcagaagaggatagtctactgg

SEQ ID NO: 309224 - DNA, 585 bp, Homo sapiens
ggttttccctgtgacacgcaatattgaactatatcctagacattctgagtattgtgttctaagactcgatcctacttaagtcttccatttgagcaggtagtcaacttattaggtttagaagtcctggtcatttgtgtgggctgtggttcaatcatcaatttactttactaaggctgtgagtgctctcatggtcagcttcacttgtgtgttacccagaagacaggactccaccccgttttcctccacatcgccttgggtgtggggttgccacagtcagagttctgtccacagtctctactgtggagacagtctctacgtctttgttgctgcagggagtggaagtgatcattctatccacagttcctgtgcgcaagaggcctgcacttttataggtcagggggacyggaagtcagagatccacctacaggctctatggggatggctgcatcctagtaactgcagcaggaaggagaaggtggagaatagctctgtcaatttagtgcccattgggaaaagagatgggcacaacttttgtcatgttgtttgtcttaagagtagaaagggcagaagaggatagtctactgg

SEQ ID NO: 309225 - DNA, 491 bp, Homo sapiens
gtcatttatgtattctgtccaaaaattttattttattagcaagacaggtaaaatgaaatgtttccctctattttgtcttgctcaccatttatcttttatgtactatytcatcatacaaacacatgcattttgtctctggaataaaagtatacttttttttttccaccaagaatctctgtgttaatctttctcagtttctttctgcaaattgtgaagaagaatgtgggaatttgccaattcaaataaagagttggtggcagttctaaatcaaaaatctttggaaagctctgttgcgttaaccatcatcctaagcaactctgttaaatgtcttaaattggattccagagatgtcttgaaactgttttctaaaatcaaataaccatcgaaatgacagactgtacacttgtggcaaagaacctcctgctgagatattatttagcattgccactcctcatatccaaagagccaagcagcaatttatttaggtcata

SEQ ID NO: 309226 - DNA, 617 bp, Homo sapiens
caatttatttaggtcatactcacaatctgagctgtgattcactttacaggtaaattgaaaggtagtgataacgttttgtcactggttgatggacaatcctattgttataaataaaagaggaaaccaaataaatgatacatcgaaacagtttgtcatagaatactgaatgttctccccaaaccgtatggcattctctgtagctatataattgattccatgtaaagttgctgttttactcttctggaaaccaggaaatacaaattatttgctctctaagagattataattttaagtatgctataagttttattttagttactggactaaatattatttaaattttttttatattgaatgactggatgatgwtgacatattgggagattactaataaaatgataataagcaatactggaacattaaagatgaattctcctataatttacttacagttgtcataaagacaaattatgtaaatccaaatgatatatacatatatagaatcttgaattttgattgcttcataaaaggcaaatgactaacttcaggtgtgtcagaatttttctatgattttagacaccaaggagcaaaaaaatgtacattaacttttcttctaa

SEQ ID NO: 309227 - DNA, 613 bp, Homo sapiens
gaatataactcgatttttcctgtgtaaaagtaatggaaataaggctgcattgggaattaggaattatgtctaaggtaattggtatgtgtgacattgatcaaattgcttagttagctaaacatctagttgctgttgttgctgtttttaatctatatratgaagaaattttgctaaagactaagagttttaaaggcagaattgagaattagaactggtattttttttttttgtccctgtgctaagaattctgagaactaacgtagttttctgttcctggctaaacaaccctgggactagggtggagaacttaaatactttctccgggaaatatgtattctaggaagttaagactaaaccagctaaagtaacttgcttatcaacacaaataccttacaccacaatatacacttttctgcacctaaaatacacagtcagtatgttataaactctgcccagtctcaaccaattattgccttgaaagacccaccttaaaaatagttcatcttaggtctataatcctgtaaatatcctcttttgctgtcccctctctgagaactattaggactgtccaagtggtacagggtgcttccttactgaagcaagcctgataaac

SEQ ID NO: 309228 - DNA, 455 bp, Homo sapiens
taaccttgcattttttccggggcaatattgagtattcactgataatgtttatagtgactttatagagtgtaactgtcacaaataacaagaattgattatacctatagaggaggttataggcatcaagttacatatrtgtatggtggaggcatgggggaaggtggtggtgtgtgtttctctaaggaggtccctaatttattgagaacttttctctaggtctttggggcaatatgaaagaatgtcaaaaaaattcatgtgtgagacctatgtcatgatatccaaataggatttgatctcaatctcccgcctgatgctgaattcatatctccatttactttcagtgtgtggaatatgtaatgtatgcagactttaaatggtatgactcacaattgtaggtaatgttcttcattatgtacgaatgtatgctaaatggcattagaaagcataatgtggaa

SEQ ID NO: 309229 - DNA, 583 bp, Homo sapiens
cttttctgcaggcaggtcatcccattgtctgctcagctgtcagctgagaagatacccagagtgggtagcacctctctgcaggcagggcttcccaacattgcctgrttcttgctgagttccagtttttatgggcttcagaaggtagacagtctcatactgactggtccatgtgtggccatcagcagcctggaaaaagcatcgtctaagttctcactctagtccatggaactggcagccaggcccccatgcctcacgcctcccggtttgaatgtggggcttcactgggagatctgcccctttccacccaggaacctgtctgcctcctgccaccattcatggcatttaggctgttcatgacaaggggtgcctgcagccctgtgctgagctgccctcagcaccccctcagcttccctcccatgctcgtcagcacccaaagtccagagggggctgaggtggcaggggggtggcgtgtcagtgctgctcctagtgcagggacatctggccaggttgtgtcagtggacaggcttggctacaactttgcttcaaaattggaatgggcgctaggagtggagagaggccaggc

SEQ ID NO: 309230 - DNA, 583 bp, Homo sapiens
cttttctgcaggcaggtcatcccattgtctgctcagctgtcagctgagaagatacccagagtgggtagcacctctctgcaggcagggcttcccaacattgcctggktcttgctgagttccagtttttatgggcttcagaaggtagacagtctcatactgactggtccatgtgtggccatcagcagcctggaaaaagcatcgtctaagttctcactctagtccatggaactggcagccaggcccccatgcctcacgcctcccggtttgaatgtggggcttcactgggagatctgcccctttccacccaggaacctgtctgcctcctgccaccattcatggcatttaggctgttcatgacaaggggtgcctgcagccctgtgctgagctgccctcagcaccccctcagcttccctcccatgctcgtcagcacccaaagtccagagggggctgaggtggcaggggggtggcgtgtcagtgctgctcctagtgcagggacatctggccaggttgtgtcagtggacaggcttggctacaactttgcttcaaaattggaatgggcgctaggagtggagagaggccaggc

SEQ ID NO: 309231 - DNA, 583 bp, Homo sapiens
cttttctgcaggcaggtcatcccattgtctgctcagctgtcagctgagaagatacccagagtgggtagcacctctctgcaggcagggcttcccaacattgcctggttcttgctgagttccagtttttatgggcttcagaaggtagacagtctcatactgactggtccatgtgtgrccatcagcagcctggaaaaagcatcgtctaagttctcactctagtccatggaactggcagccaggcccccatgcctcacgcctcccggtttgaatgtggggcttcactgggagatctgcccctttccacccaggaacctgtctgcctcctgccaccattcatggcatttaggctgttcatgacaaggggtgcctgcagccctgtgctgagctgccctcagcaccccctcagcttccctcccatgctcgtcagcacccaaagtccagagggggctgaggtggcaggggggtggcgtgtcagtgctgctcctagtgcagggacatctggccaggttgtgtcagtggacaggcttggctacaactttgcttcaaaattggaatgggcgctaggagtggagagaggccaggc

SEQ ID NO: 309232 - DNA, 579 bp, Homo sapiens
gcattaccttctctttcattttgtggaagagtttgagagagattggtgttattacttaaaggattgttaaaactgagcagtgaagcacatctggtcctgggcttgtctttgctgggakgtttataattactgtctcaatacctttatttcctataattctgttcaggttttctatttctttttgagtcagtttttataggatgtgtttttagtattttgctcatttcatctatgtaacctacatgaaatgaacaaacttgttcatttgtttgcataatttgttggcatacaattgttcattatactctttttgtacttttgtaaaattttggcaatatgctcaatttattattttagttatttgagttttctcttttttcttagataatccagctaaattttgtcaattttattgattttgtgaagaaccagctgttggtttcattaattttatccattcttttcctatttatctcttctaatttttatcatttctttttttttcctctctctattttcttaaggcttaaagttatattgtttgagagcttttttctttttaattaagcatttatagct

SEQ ID NO: 309233 - DNA, 579 bp, Homo sapiens
gcattaccttctctttcattttgtggaagagtttgagagagattggtgttattacttaaaggattgttaaaactgagcagtgaagcacatctggtcctgggcttgtctttgctgggaggtttataattactgtctcaatacctttatttcctataattctgttcaggttttctatttctttttgagtcagtttttataggatgtgtttttagtattttgctcatttcatctatgtaacctacatgaaatgaacaaacttgttcatttgtttgcataatttgttggcatacaattgttcatwatactctttttgtacttttgtaaaattttggcaatatgctcaatttattattttagttatttgagttttctcttttttcttagataatccagctaaattttgtcaattttattgattttgtgaagaaccagctgttggtttcattaattttatccattcttttcctatttatctcttctaatttttatcatttctttttttttcctctctctattttcttaaggcttaaagttatattgtttgagagcttttttctttttaattaagcatttatagct

SEQ ID NO: 309234 - DNA, 605 bp, Homo sapiens
gccctagcagatgaatacaatgccacaactacctggtgctcctattgcacatttctgttctcggtctttgctgtcagttaacaggcgatgatgcagttgcttatttaaatggtctttgtcctctattaggctatgagttccattaagacagggactacacttttcttgttcatagttgtatccttaggctccaagtcattgcctattatataataattactaaatataacatatacaggttcattgtataagtgtaatatttatataatatttggtaatttcagtaggaaaaatctgaatagtatcaagtaagttgaaaaacaaaaaggtagctatagataatatataaggaaatgctatagaaaatgcataagtatattgtatataccaggaacttaaaaatattaacttgtatttaccaggaacttaaaaatattagctcatttaattcycattttttgcattaagaagcaatagaagctcaataaactatccaagaacagatatatatatcagaataaggtctgaaaccatctaaatcagagaatggcaaacttttcctaaagaggactgaatagcaatttttctagtctttgcagatcaga

SEQ ID NO: 309235 - DNA, 605 bp, Homo sapiens
gccctagcagatgaatacaatgccacaactacctggtgctcctattgcacatttctgttctcggtctttgctgtcagttaacaggcgatgatgcagttgcttatttaaatggtctttgtcctctattaggctatgagttccattaagacagggactacacttttcttgttcatagttgtatccttaggctccaagtcattgcctattatataataattactaaatataacatatacaggttcattgtataagtgtaatatttatataatatttggtaatttcagtaggaaaaatctgaatagtatcaagtaagttgaaaaacaaaaaggtagctatagataatatataaggaaatgctatagaaaatgcataagtatattgtatataccaggaacttaaaaatattaacttgtatttaccaggaacttaaaaatattagctcatttaattcccattttttgcattaagaagcaatagaagctcaataaactatccaagaacagatatatatatcagaataaggtctgaaacyatctaaatcagagaatggcaaacttttcctaaagaggactgaatagcaatttttctagtctttgcagatcaga

SEQ ID NO: 309236 - DNA, 589 bp, Homo sapiens
tgatctcctttgacaccatgtctcacatccaaaggactgtaatacaagaggtgagctcccatggtcttgggcagttccacccctgcagctttgcagggtataagccccctcctagctgttttcacagtctgcyattgagtgtctgtggcttttccaggcacatggtgcaagctgtcagcggatctaccattctggggtccactgatggacctattctcacagttccactaggcagtgacccaactgagactctgtggggcctccaacaccacatttcccttccacactgccctagcagaggttctccatgatggctccatccctgcagcaaacttctgcctggacatccaggcaattccatacatccactggaatctaagcggacattcccaaatctcaattattgacttctgtgtacccccaggcccaaaaaccacatgtaagctgccatggcctggggcttgtgccctctaagcaatggcatgagctgtatgttggccccttttagccatggctgggaaacaggatgccaaatcctgagtctgcacagagcagcagcagggcgctgggcccagcccatgaaaccatg

SEQ ID NO: 309237 - DNA, 589 bp, Homo sapiens
tgatctcctttgacaccatgtctcacatccaaaggactgtaatacaagaggtgagctcccatggtcttgggcagttccacccctgcagctttgcagggtataagccccctcctagctgttttcacagtctgccattgagtgtctgtggcttttccaggcacatggtgcaagctgtcagyggatctaccattctggggtccactgatggacctattctcacagttccactaggcagtgacccaactgagactctgtggggcctccaacaccacatttcccttccacactgccctagcagaggttctccatgatggctccatccctgcagcaaacttctgcctggacatccaggcaattccatacatccactggaatctaagcggacattcccaaatctcaattattgacttctgtgtacccccaggcccaaaaaccacatgtaagctgccatggcctggggcttgtgccctctaagcaatggcatgagctgtatgttggccccttttagccatggctgggaaacaggatgccaaatcctgagtctgcacagagcagcagcagggcgctgggcccagcccatgaaaccatg

SEQ ID NO: 309238 - DNA, 349 bp, Homo sapiens
agtgagagtatgactataatttatgccaggcaataacaatattacacaaaacacctcaacatataattatttaataatgtaagtacaatgtgaaaggtataaggggatcgtgtaatagaatgagaggaataaacactgtgctccccttcatttacccagtctcattacacctgtctctttattgtgccttcaacttaccacgtatatcccagcatcagggcatttttcacctgctcatctcttaggaatgcactttcctcakatatttgcctcccttgctttctggcttatttgtaatcttggcttcaaagtaaacctcagtaaggctttctgaataccctatctatgt

SEQ ID NO: 309239 - DNA, 349 bp, Homo sapiens
agtgagagtatgactataatttatgccaggcaataacaatattacacaaaacacctcaacatataattatttaataatgtaagtacaatgtgaaaggtataaggggatcgtgtaatagaatgagaggaataaacactgtgctccccttcatttacccagtctcattacacctgtctctttattgtgccttcaacttaccacgtatatcccagcatcagggcatttttcacctgctcatctcttaggaatgcactttcctcagatatttgcctcccttgctttctggcttatttgtaatcttggcttcaaagtaaacctmagtaaggctttctgaataccctatctatgt

SEQ ID NO: 309240 - DNA, 593 bp, Homo sapiens
gttccattggtatatgtgtctgtttttgtaccagtaccatgctgttttgattaagtgtcttcatagtatatgaagttagtttgtgtgatgcctccagctttgttcttttttgcttagaatggctgtggctatcaagctctgttttggttccatattaatttcagcattgcttcttctaattctttaaaaaatgacgttaatagtttgataggaatataattgaatctgtaaattgctatcagaagtatgaccatcataatgctattgattcttcctatccatgagcctggaatgttttcccatttgtttgtgttgtctctgatttctttcagycatgttatgtaattcttattgcagagatctttcacctccctggttagctgcattcctagatattttattccttttgtggctgttgtgaatggttttatttggctttcagcttgttcgttattggtgtatagaaatgccactaatttttacacattgactttttctcttgaaacttgactggaatggtttttcagttctaggagcctttgggcagagactatggagttgtctctgtatagaatcaaattatctacaaagat

SEQ ID NO: 309241 - DNA, 511 bp, Homo sapiens
tgctgaacaatgtactccaaagttattatatttatcatttgattcaataggaatatcaaagtcttgaagtactaacagatttttaaggccctctgaakctattagggatcaattataagccatctaacttgaacgttgaaatatgttattccggttcaatacaagatggaagaataggaaatctgcaggcctgaatcctatgtgattgaggatgatacaacctctgatgcccagtgtttcatttattcctttattcagttagtcattttattaaacacccaatgtataagttaatatacccaaagtatcacttatactgcttatataatacttagtagagggggttgcataataaagtaaaaacaaatctcttaccaatgaataggagaactgaattagtttatttctacaattctttgagctaagaccacaacttactatatgggtgtgcatacgtatgtttgtatgtatgtacgtaagtgcatgtttctttgcttattctctatcctta

SEQ ID NO: 309242 - DNA, 511 bp, Homo sapiens
tgctgaacaatgtactccaaagttattatatttatcatttgattcaataggaatatcaaagtcttgaagtactaacagatttttaaggccctctgaagctattagggatcaattataagccatctaacttgaaygttgaaatatgttattccggttcaatacaagatggaagaataggaaatctgcaggcctgaatcctatgtgattgaggatgatacaacctctgatgcccagtgtttcatttattcctttattcagttagtcattttattaaacacccaatgtataagttaatatacccaaagtatcacttatactgcttatataatacttagtagagggggttgcataataaagtaaaaacaaatctcttaccaatgaataggagaactgaattagtttatttctacaattctttgagctaagaccacaacttactatatgggtgtgcatacgtatgtttgtatgtatgtacgtaagtgcatgtttctttgcttattctctatcctta

SEQ ID NO: 309243 - DNA, 511 bp, Homo sapiens
tgctgaacaatgtactccaaagttattatatttatcatttgattcaataggaatatcaaagtcttgaagtactaacagatttttaaggccctctgaagctattagggatcaattataagccatctaacttgaacgttgaaatatgttattcyggttcaatacaagatggaagaataggaaatctgcaggcctgaatcctatgtgattgaggatgatacaacctctgatgcccagtgtttcatttattcctttattcagttagtcattttattaaacacccaatgtataagttaatatacccaaagtatcacttatactgcttatataatacttagtagagggggttgcataataaagtaaaaacaaatctcttaccaatgaataggagaactgaattagtttatttctacaattctttgagctaagaccacaacttactatatgggtgtgcatacgtatgtttgtatgtatgtacgtaagtgcatgtttctttgcttattctctatcctta

SEQ ID NO: 309244 - DNA, 511 bp, Homo sapiens
tgctgaacaatgtactccaaagttattatatttatcatttgattcaataggaatatcaaagtcttgaagtactaacagatttttaaggccctctgaagctattagggatcaattataagccatctaacttgaacgttgaaatatgttattccggttcaatacaagatggaagaataggaaatctgcaggcctgaatcctatgtgattgaggatgatacaacctctgatgcccagtgtttcatttattcctttattcagttagtcattttattaaacacccaatgtataagttaatatacccaaagtatcacttatactgcttatataatacttagtagagggggttgcataataaagtaaaaacaaatctcttaccwatgaataggagaactgaattagtttatttctacaattctttgagctaagaccacaacttactatatgggtgtgcatacgtatgtttgtatgtatgtacgtaagtgcatgtttctttgcttattctctatcctta

SEQ ID NO: 309245 - DNA, 563 bp, Homo sapiens
ctccagtccctaagaatccagacaaacaagctgctgaattcattcacaacaagagaacacttttttttcactcttcacttcttagtgtccagttaacagctaaaatgmtatgtcactatggggtcttactctgctgtgtatgttttttgtttgggccatggacacaagagatcttacagagtcacagtaaagaaccaatttaactgcttacagaatctaggaaatgtgtgtattccattaaaagagtagtgttacaacgggaaggcttaggaagaggaacaaactgtataccagtgaacttgaaagacgatacacaaccctaaggaaggtgcgagaccattcatgggtgaacagaaagaacgtgtttcattgcaatttccattaaatttaatctagcatataaaattaagttttactaatatttaatgtatagattaattctcatgtcctctaacatcagctggagtatgtatgggtttcttcaaggaaaattacaaattccacaattcagagattaaacagcagtaccctcatctgcaaaggattaaaatgtatttgtcacc

SEQ ID NO: 309246 - DNA, 563 bp, Homo sapiens
ctccagtccctaagaatccagacaaacaagctgctgaattcattcacaacaagagaacacttttttttcactcttcacttcttagtgtccagttaacagctaaaatgatatgtcactatggggtcttactctgctgtgtatgttttttgtttgggccatggacacaagagatcttacagagtcacagtaaagaaccaatttaactgcttacagaatctaggaaatgtgtgtattccattaaaagagtagtgttacaacgggaaggcttaggaagaggaacaaactgtataccagtgaacttgaaagacgatacacaaccctaaggaaggtgcgagaccattcatgggtgaacagaaagaacgtgtttcattgcaatttccattaaatttaatctagcwtataaaattaagttttactaatatttaatgtatagattaattctcatgtcctctaacatcagctggagtatgtatgggtttcttcaaggaaaattacaaattccacaattcagagattaaacagcagtaccctcatctgcaaaggattaaaatgtatttgtcacc

SEQ ID NO: 309247 - DNA, 671 bp, Homo sapiens
tgtttcctcctgtaacagcaagcacagctctacggtgcctttgctctcctcctctctgttctgaggcctrtgattttgctgctaagcagaattattgtgtcttgtgtgtttgggcctttccattggacttttaacacttttaatgactgttgtagatatctatttgaaaatattccatgggaaagagcaaagcctattggtatttcagagttttcacttcttgtctcaaccagctgataattgtggagctttataaaacagtacataagaaataaattatttctaataattgatatggaccaacataaaattaagccctagaaatcaataagaggtctaaagaagacacttcaccatcttcttcccaagccccacctatttcaggagcccagcaaaaattggaggagaccctttcctacacaagggaaataatggaggaaaattgctgcctgcatttgtataggaaggcaagatatttacttcatattggaccatgatttgggctggttttctggctttgtagtcatcatagaggacaatatacattgtttttaactgtccagaatataaaagtcttttctatatttcgggacccccctccctgtgtatgttttgttgtgaggaagaaaacacctccaactataaaagatgaaaatgctggtttcttgccc

SEQ ID NO: 309248 - DNA, 671 bp, Homo sapiens
tgtttcctcctgtaacagcaagcacagctctacggtgcctttgctctcctcctctctgttctgaggcctatgattttgctgctaagcagaattattgtgtcttgtgtgtttgggcctttccattggacttttaacacttttaatgactgttgtagatatctatttgaaartattccatgggaaagagcaaagcctattggtatttcagagttttcacttcttgtctcaaccagctgataattgtggagctttataaaacagtacataagaaataaattatttctaataattgatatggaccaacataaaattaagccctagaaatcaataagaggtctaaagaagacacttcaccatcttcttcccaagccccacctatttcaggagcccagcaaaaattggaggagaccctttcctacacaagggaaataatggaggaaaattgctgcctgcatttgtataggaaggcaagatatttacttcatattggaccatgatttgggctggttttctggctttgtagtcatcatagaggacaatatacattgtttttaactgtccagaatataaaagtcttttctatatttcgggacccccctccctgtgtatgttttgttgtgaggaagaaaacacctccaactataaaagatgaaaatgctggtttcttgccc

SEQ ID NO: 309249 - DNA, 671 bp, Homo sapiens
tgtttcctcctgtaacagcaagcacagctctacggtgcctttgctctcctcctctctgttctgaggcctatgattttgctgctaagcagaattattgtgtcttgtgtgtttgggcctttccattggacttttaacacttttaatgactgttgtagatatctatttgaaaatattccatgggaaagagcaaagcctattggtatttcagagttttcacttcttgtctcaaccagctgataattgtggagctttataaaacagtacataagaaataaattatttctaataattgatatggaccaacataaaattaagccctagaaatcaataagaggtctaaagaagacacttcaccatcttcttcccaagccccacctatttcaggagcccagcaaaaattggaggagaccctttcctacacaagggaaataatggaggaaaattgctgcctgcatttgtataggaaggcaagatatttacttcatattggaccatgatttgggctggttttctggctttgtagtcatcatagaggacaatatacattgtttttaactgtccagaatataaawgtcttttctatatttcgggacccccctccctgtgtatgttttgttgtgaggaagaaaacacctccaactataaaagatgaaaatgctggtttcttgccc

SEQ ID NO: 309250 - DNA, 571 bp, Homo sapiens
ttgccctccattcctccttgaatctagagtacaaatgtatgatctaggcccagttgaatgctttcttaccagattggtatcggcaggtaggaatataaatcactaagaatggtgttttagttatatattgccacataacaaatgacaccatcacttactggcttaaagcaacatttgttactgagttttggagggtaatgaatctgggcacagtgtaactgaatcttctctttcaagtttgtctcaaggatgcagtcagggtgttggctggggcaacagtttgaatgaatggaaaggatctgtctcatgcttcctcatatagttgttgccaggattcagttactcataggcagttggaccttgggcctcagctccttccttcctttttgctggaggctgctctcagctcctgaccacatgggcatattcataggtcagctaccacatcaggatttgtttcatcattgytagcaaacaagaagagccaaatagagaatgcaagcaagacagaatacacatctttaataacttcattgcagaagtcacatcccttaacttttgacatattcta

SEQ ID NO: 309251 - DNA, 616 bp, Homo sapiens
aagggattacataaggatgtgaatacaaagaggtggggattattgggaaccttttagaaccacctgtcatggaaagtatgaaatccgctctagagaaagtggcagcaaaggcagtagcttcatccagcatcaagaattcaaaagtgcagaagttctaccagcagtgataatagcattttttttcctgagaaatcatttctgagatgtgactttgggtattgttctgaggtgagtagatttcaactctgattctttggccaacccccaaattctgtaagctactagatgcccttatgtaaattccttytatctacttagaataacctatttatttctgttgcttataaataagaagcttcacagagagagtgaagcaagggaaccacagaatgaggatggagatttagtcctctgcacatctgtacacctggtacaggcctaggaaatggtaggcactcaatatatatttattaaattattgaataagacaaaatacataaaattcagagggcaaatagttctgaaatttatttggaggtccaagtgaaaggttgaatgtggtttagaaattagtcagggcaaggagtttagagtgtatgccttaggaaaagggaac

SEQ ID NO: 309252 - DNA, 604 bp, Homo sapiens
tattaattttgaagatgagaaaaactacagctcaaaaacaaagtctattggagccaaattttgtctaattctaaaggctttatggaagtaaagtggcccatctggatgtaatggagacagacacagcgagagagataagacactgtcattggcatgccgtaaatgcagaacattgaggaaagaattttaaaagcacttcagtgtaccaagtacatatttgatctctctgaaagaaagttcaacacttggaggcaaagtcttactatgggaaaatcaatccgtggattctcatggtcttaatgattcacatttcttctgttcacatgtaatatttatgttttcagaatgagaaaaaaacataaagttagctgagagagatgaattaaattggagaaagagaaaagttgaagttattttgaggataatactgggttaaatagtgttcctctaaaattcaagtccatctggaacctgagaatttgacctgatataaaaacagggtatttcctgatgtaattagttaagatgaggtcaaactagattaaggtgagccctacaaccaatgctgktgtctttataaaaacaaacaaacaaacaacaaata

SEQ ID NO: 309253 - DNA, 562 bp, Homo sapiens
atgctggcaaggctacagaaaaaaggtaacacttatacacwgttggtggaaatgtaaattcgttcatccactatggaaagcagtttagagatttctgaaataactcaaaacagaactatcactcaacccagcaatcatatcactgtgtataaatccagaagaaaataaatttgtttaaccaaaagacacctgcactaatatgtttgtcacagcactattcacaatagtaaagacatggaatcaatctaaatgcctatcaatggcagattgaatcaagaaaatgtggtacatatataccatcaaatattatgcaatcataaaaaggaatgaaatcatgtcccccagcaacactgatgtagctggggactattatcctaagcgagttaatgcagaaacagaaaaccaattaccacatgttctcacttactgggagctaaacattgagtatacatagacataaagatgggaacaatagatactgaggactactaggcagtgagggcgtagactaaaaactacctttcagtcactatgctcaccacctgggtgaagggatcatcca

SEQ ID NO: 309254 - DNA, 562 bp, Homo sapiens
atgctggcaaggctacagaaaaaaggtaacacttatacacagttggtggaaatgtaaattcgttcatccactatggaaagcagtttagagatttctgaaataactcaaaacagaactatcactcaacccagcaatcatatcactgtgtataaatccagaagaaaataaatttktttaaccaaaagacacctgcactaatatgtttgtcacagcactattcacaatagtaaagacatggaatcaatctaaatgcctatcaatggcagattgaatcaagaaaatgtggtacatatataccatcaaatattatgcaatcataaaaaggaatgaaatcatgtcccccagcaacactgatgtagctggggactattatcctaagcgagttaatgcagaaacagaaaaccaattaccacatgttctcacttactgggagctaaacattgagtatacatagacataaagatgggaacaatagatactgaggactactaggcagtgagggcgtagactaaaaactacctttcagtcactatgctcaccacctgggtgaagggatcatcca

SEQ ID NO: 309255 - DNA, 562 bp, Homo sapiens
atgctggcaaggctacagaaaaaaggtaacacttatacacagttggtggaaatgtaaattcgttcatccactatggaaagcagtttagagatttctgaaataactcaaaacagaactatcactcaacccagcaatcatatcactgtgtataaatccagaagaaaataaatttgtttaaccaaaagacacctgcactaatatgtttgtcacagcactattcacaatagyaaagacatggaatcaatctaaatgcctatcaatggcagattgaatcaagaaaatgtggtacatatataccatcaaatattatgcaatcataaaaaggaatgaaatcatgtcccccagcaacactgatgtagctggggactattatcctaagcgagttaatgcagaaacagaaaaccaattaccacatgttctcacttactgggagctaaacattgagtatacatagacataaagatgggaacaatagatactgaggactactaggcagtgagggcgtagactaaaaactacctttcagtcactatgctcaccacctgggtgaagggatcatcca

SEQ ID NO: 309256 - DNA, 629 bp, Homo sapiens
catattccaaaccttaccatcacacaatatacccatgtaaaaacctacacttgtactccttgaatctaaaatagaatttgaaattaaatcaaagagagataacaattattttacagcactactgtaccaaatgtggtgtgattggaaataggtgtaggtaggtaaaagcaggtggaaaatagtgtacttcactgatttgagatttttctccaacacagctttctaacacggggaatctcctttggcatgatagctccttttacacaaggccatcacagtactaatcatggtactctgtttctgtttataatttaaactccttgaaagagatgttcttacaagagaagctgatatactcttcatatctcaacaactggcacaacttctcccrtgtactaggctctaaattaatacttgttaaatatatttttaaaacacagtaaaaaaacttgctgtaaacaaactctatattgtaattgctacataccgcttctagggaatgaggtgtaaaagcataaacatctcatcgtaagcatttgtttattttcattcatatttttagtagcaattttatattgtaaaaaccagtgagtacaatttcacaacccttctctcaaggagaaagggga

SEQ ID NO: 309257 - DNA, 582 bp, Homo sapiens
tacattaaaaaagttgtaattgtaaaatctttcttttcccctttcagatgtagatccttttaaaagtctgttgacagtttttacaaagacctgagatctatccttttgaaatgtaatcattaagggaaatagcactcctattttctagtgtccctgggagtatagggtcctatttctggtgggcacgtagggctaggtgtaaaacttccttctgtcatgaagatacaaagaaagtgtacttctttttttttttttttcttattttactttcagttctgggacacatgtgcagaacatgcaggtttgttacgtaagtatacatgtgccatggtggtttgctgcacctatcaacccatcatctagattttaagccccacttgcattaggtatttgtcctaatgctctccctccccttgtccccaccccctgacaggccccagtgtrtgatgtcccccttcctgtatccatgtgttctccttgttcaacttccacatatgagtgagaacatgtggtatttggatttctgttcctgtgttagtttgctaacagtgatggtttccagcttcatctatgtccctgcaa

SEQ ID NO: 309258 - DNA, 629 bp, Homo sapiens
ttcttttttgacaaaaacagcacaatatgmtggagaggaaagagcacatagtctggattcaaactgagctagattaaatttcttgctatgactcatacagctgtgtaatctagggcaagttacataactttttgaacctcagtttctatgtagataaaaagagagatagataccactacttatcttgattaattgagaggacataagatatctcatgtgtagtaacaacccacagcataaatgctcaataaatagtatgttttataactaaaacatcttatatttgattgcaatggagtgtcataaaacatgaatttaagaagataaaaagtgaaaaatcactaaacaaaaggaattgaaaagttgtaattagcatcccctttttcagaattcaggagatgatgttatcagcactaagttaatttcatacaatatagtttcatcagtagttaaaaatcaaaagtatttatgtaggtcattaatatatcaccttcaaataagtaactcaaattgaaatgtctccagtaatcttaggaaataactcttattaacatttcatcatgtctcagattgtaagtgaaaaaaacattcatttcaggaagaattaaataagaggaaagcataagaaa

SEQ ID NO: 309259 - DNA, 532 bp, Homo sapiens
gttggggaggttggctgatgaccgctctaactgcttcccgctgaattggggcatagtaggggttgtgcagttgagatttcctcgggaggggtgccttcaatgtcattaacatcggarcatgggctagcaggccggtccaggggtccacggtggatcttagtcatggactccatctggtgctccatttgaagaacaatttgtagttttacggttttgattctggaagagacaaacttaacaaggaggttaaagatacagggattgaaatgtatggcctgcagtgcaggggattatttctttggcacacttcacagcccctgactatcttcttgatagttttgaaaaggcctggtccagtaaataataatttggccatctgatgggtgctatcaatgcctaagtggaaggtttggtgaagggttttaagtaatttctgttggttagctgcaggtgaaagtatttttccttcctcagtggctagccatctggaggggaggaaagtatgtccttgtgaggtttcctattctatttt

SEQ ID NO: 309260 - DNA, 532 bp, Homo sapiens
gttggggaggttggctgatgaccgctctaactgcttcccgctgaattggggcatagtaggggttgtgcagttgagatttcctcgggaggggtgccttcaatgtcattaacatcggagcatgggctagcaggccggtccaggggtccacggtggatcttagtcatggactccatctggtgctccatttgaagaacaatttgtagttttacrgttttgattctggaagagacaaacttaacaaggaggttaaagatacagggattgaaatgtatggcctgcagtgcaggggattatttctttggcacacttcacagcccctgactatcttcttgatagttttgaaaaggcctggtccagtaaataataatttggccatctgatgggtgctatcaatgcctaagtggaaggtttggtgaagggttttaagtaatttctgttggttagctgcaggtgaaagtatttttccttcctcagtggctagccatctggaggggaggaaagtatgtccttgtgaggtttcctattctatttt

SEQ ID NO: 309261 - DNA, 614 bp, Homo sapiens
gcatccttctataagcatttctaatggaaggtcctgccttgtgctcttttgacttcaatatccacttggcagttcctttctacttccctttcctttctgatgaccctggcagtgtaagactgtcacctctttaggtttctgtacaggcagttataatctcctaatagcttcctgatgtttgactggtgttcccttggaagttaggaattccctttctctccatattgctgcatgggcatgaaggactaggyaagcatacttagaggctgtatatatatttacccttttcccttctcctaattctagttcctgagtgagagctattagttctgccagctgagcagtagttcctggagtgaggggattactttcaagtattccattatcactgaccactgccataccccactttttgaagtcctttttctacaaaggaacttccatcagtatacaagttgaggttgggatcagtcaagggaacctctaaaaggtccccttgagcggcataggtttgagcaattatttgttgacagttatgttctatcttttcttcattgtctgtaagaaatgtggctgggttaagaggtgcacaagtgcgcagtcacagcactgga

SEQ ID NO: 309262 - DNA, 614 bp, Homo sapiens
gcatccttctataagcatttctaatggaaggtcctgccttgtgctcttttgacttcaatatccacttggcagttcctttctacttccctttcctttctgatgaccctggcagtgtaagactgtcacctctttaggtttctgtacaggcagttataatctcctaatagcttcctgatgtttgactggtgttcccttggaagttaggaattccctttctctccatattgctgcatgggcatgaaggactaggcaagcatacttagaggctgtatatatatttacccttttcccttctcctaattctagttcctgartgagagctattagttctgccagctgagcagtagttcctggagtgaggggattactttcaagtattccattatcactgaccactgccataccccactttttgaagtcctttttctacaaaggaacttccatcagtatacaagttgaggttgggatcagtcaagggaacctctaaaaggtccccttgagcggcataggtttgagcaattatttgttgacagttatgttctatcttttcttcattgtctgtaagaaatgtggctgggttaagaggtgcacaagtgcgcagtcacagcactgga

SEQ ID NO: 309263 - DNA, 567 bp, Homo sapiens
ccaggttgaatggactttggcaaattctcttgaatgggctgccacatcccatttatttgtacatgattgggtttgcctgtgcacrtttgggtataacattcacttttaaccttatatccaaagatgtagtcataacatataaaccctaagtccgctatagtgtagatgtccactgtaatccaggagctataattaaaaataataacaggacaaaaatgacatttcacaaaagatatcatagaaatgaccactaaaagtgttaaatattatttgttatcaagaaaatgaacattggaattacaatgagatataaattcacccacaaacatctaaaactgcactgacaagacaagttcctcttctggctcagtgaataacagaaaatgtacataacattccatgtgacgcaattaaaaaacaaagggaaatatggaaacaatggtatttcaagacagtaaactttgggcgacaaaggacagtgatcactaagagaagagaaacaaataatgtgagctgattgctaaagtaccctaactggagaatgcatcccttccagggaggagaaaa

SEQ ID NO: 309264 - DNA, 491 bp, Homo sapiens
cagggaggagaaaatcaggagcacggcagtcaccctcctttgaaaagagaatatggagaagcccaggtggttggctatatcaagagcatgaattaactgtaagataacttcaagtgctctagtttatatgtaactggaagacttaaaaggaagaaggagaaagtatatttgaagagattatagacatttatttttccaagtatgataaaagttataaatccacatatccaaggagctgaatatctctaaacatgagaaacatgaaggaagcataccaagtcacatcataatcaaattgcttaagataagagataaaaataagttttttaaaaatggcacatatctacaaagaaacaaagatgacaatgaaagcagccttctgattggaaatggtggaagccaggaaacagtggtayaccatccataaagtacttaaagaaaaaaaatagccacactaaaattctgtactcagcaaagatatttttcaaaag

SEQ ID NO: 309265 - DNA, 569 bp, Homo sapiens
aaaaaattttgccacaatgtttacaagctctaataaattatggataatttaccaaattaataccagtgaaatgaagcccgcctttttagattttcatttatcattctacctagctctttcctcccctccgcccatcgtctgtctctctctccatctctctctctctcacatacaagcagatagcgtcatttttaagsttatattttttctaaatcagcattctaggtcactttttgtgaaatgaagttgaaagtatttattaggttgcttgcacccacagcaacagtatttctgtaacagattttgacttgagaatcaaagtttgaatatagtataattggtatgttctagcttggtcccatggcccataaaaaaaaactagaattagacataaagtaatgaaggatcctataaaagaagctgagcatcattttttaaaaaagttcctaatatgtagtaaactcaccattgtgaatatcaaactgtgttgagtacctactgtgcagaagacagactcctccatcaagaaatttttaaatctagtgcaaaaaataaaatagaaaagagag

SEQ ID NO: 309266 - DNA, 640 bp, Homo sapiens
taaggagttccttttcttttcattttggaaagaaaacatttttccagaaaaacttgaaaggttataatagtggtttgaaatcagtaactctcaattttttctttgtggttatggaagaaatcatcaattccatytctcagtagaacctcataaacacaataggtcaaatgccagaacagaaattaaatggctgtgtgatcctcaagggaagacatactttaactatgaagtattcacaccaaaccatgagagcagcacaggaaagagaatgaactagagtatgtggtgttcatattttctgttttgacagcactgtttatcaaaataactacaattttcaaagaaaagactatttaatttttactatattgcttttctgtctgaaaggaactataaagaataagttcactaagttttgggttgagttttagttgatttaacatgtttcagcacagttaaatgtttcaacatgctatcttttagtattctttttgtgaaattttgttagcttactatctgttttgatgatactgtaatggtaggtacctttcattatacatttctcaaaacccatcaaatgtacaacacaagagtcaaccctaatgtaaactgtagactttagttaataatgtatcaatat

SEQ ID NO: 309267 - DNA, 601 bp, Homo sapiens
tgaaataggaagctagtgaagactgaaacacctcgtcaatggcttgtcagagttgaaggtttttctggtgcrtaaaacacacacacacacacacacacacacacacacacacacactctcacccctggtgtaggaaagaattttttttttaaataaaatactgtggccatgcatcttaaatttgccatatgcctttcctgtcaaccagcagttatttttattaataactccaagaacatatcatggaattcttttttgttttgagatccggtcatgtgactccttcaacaccagggaacactgggtaaattgtaatgttctaacatgccaatgaatggtctcttttagagccaagttggtgatgaattgatatttgctaaggcctaagcaagcacagggcactatatatattccttcttctgtgctctctgcaatgatggatggaagtaaggagcagaaaagaagtcacacagacaagctcaaactgacaaccaagcaaccaccagtggactgtttcaatcaagctgcaaaagaagtagttttttgtattacttactgtagcttcattcgcctactgtacacatggatcatggatacactg

SEQ ID NO: 309268 - DNA, 601 bp, Homo sapiens
tgaaataggaagctagtgaagactgaaacacctcgtcaatggcttgtcagagttgaaggtttttctggtgcataaaacacacacacacacacacacacacacacacacacacacactctcacccctggtgtaggaaagaattttttttttaaataaaatactgtggccatgcatcttaaatttgccatatgcctttcctgtcaaccagcagttatttttattaataactccaagaacatatcatggaattcttttttgttttgagatccggtcatgtgactccttcaacaccagggaacactgggtaaattgtaatgttctaacatgccaatgaatggtctcttttagagccaagttggtgatgaattgatatttgctaaggcctaagcaagcacagggcactatatatattccttcttctgtgctctctgcaatgatggatggaagtaaggagcagaaaagaagtcacacagacaagctcaaactgacaaccaagcaaccaccagtggactgtttcaatcaagctgcaaaagaagtagytttttgtattacttactgtagcttcattcgcctactgtacacatggatcatggatacactg

SEQ ID NO: 309269 - DNA, 540 bp, Homo sapiens
tcctgtttgggcctgagatggggagtgcttcagagcctgaagccaagaggctgcagcagcagcagcagcctccacaaccaagcaggacactccaaggggcggggactcgagatcaaagctctagagatttgggtagatatttgcggastgttagaatgatatgaataataatagagaccctcctctgtcatcctcctccctgcaccgtttgctcattcacccattccttcctttgacaagcacagacccagggccttctagggggaatctgagatcccaggaaagaatctacctgtgccaggtcactcgtcttattctcagctcttcatacagtcattgcttcccacgtaagccttttttctttcctttttttttcttttctttttctttttttttttttaatttagagacagtctcattctgttgccctggctggagtacagtggtatgatcatggttcacagcagcctcaaacttctgggctcaagtgatcctcccacctcagcctcccaagtaacccagtaattaggacaacaggtg

SEQ ID NO: 309270 - DNA, 565 bp, Homo sapiens
cctgactttatctctgacttgttgtggggtttttgaatcatcacttcacatgcctaagcctcagcattttttttcctgagataaaatagggataatgttattgttcatacttatatcccagatctgtcatggattctaagataacagaaataaaaataccctgaaaaggagaaagcacacaaggaaacctcacccggagccagtactgattgtataatgtttaaggagtgcaggggctgacccacatggccaagtttaagggccaccygtgacctcaggcttcttcttatgggcaggtaaataaatttcctctagcatctaaatttaatcagaaacaaaatggtgcacataacaacttgcttcctagagcaaactgtatttgagtatttgcattaggccaaacaatgagaaaactttgctttgaggggcagaactcctttctattgagtccatccaaggagagaggacccactttcatgggtggtcttgtttccattttcccctttgggttcaccagggttaaagtgatgggagaacacacctcggtcttgtgaggcactcagta

SEQ ID NO: 309271 - DNA, 467 bp, Homo sapiens
tgtgcgttctcaggagacacattcttaattaaatctcccctagaaagagcagggcaccactttacctccaaccaggggtttgtggggaagaggcttggcacaacaagacacatggggaccctctcagagggcttgacccttcccccaaaagacggattctccaaagacagaagcacctccaatctgctcttcccagtgagaccaagaaaccggttctccctccccacccccaattctcaccccagttcctgagccagcccagcctctgcacccagagttctgtgcttcctcattttctgccctcggtttgggacgataaatgcaagagctcagagaaaacagcctgagaccagaggccacaaacaatgtgtgcatggatgctaccgctctagaaggactctggtggagatgctggggatgggggagcaggarcaggatttggattaaggagggtaagaggggttgat

SEQ ID NO: 309272 - DNA, 450 bp, Homo sapiens
gccgagtagttctagcctcatggatagaaagagtcatttcccacagtcagagatgtgggaacagattcagcatcttgcaccccacctccctcccccagacgggataccgcatgggatcaaggaaggagcagggcctcccgatcagaaagaccagctttcaagtcttggctccatcactgacgagccatgtgaccttggacaggccattgcagccgtccaagctttggttttccatcaaataggaatagaaccagttcagcctggcaggattattgagaggagtgggtaagtcagsgcaggtggccagcatggtactgggcacagaggaagtgtttggtaaaagttcacttaaattaagcccaagttagaccaaagggagtgggggatgcaaatggagaacaggtgtcaaggttcagccaaagaccttgaggcagagaacagagaagagtc

SEQ ID NO: 309273 - DNA, 557 bp, Homo sapiens
gtcaaaccccactgctacttgttttggtaaatcaagttttattggagcatagccacacccattcatttccctgttgtctatgtctgctttgtgctacaatggcagagctaagtagttgcagtacaaagagagtatacgacttgcaaagcctaaaatatttagcatctgtctttttaacagaaaaagcttgtccatcttggtgcagaggaaacagaatgtgctaggggccctgggaccagtcctggctctgtatctgayttgcttggcatccctggggagctcactgtccttctctggtctctgaagcacgaaaggttgaattagtacttggaagttttctttagttctaataacttagcagtctttgctctattgctctttagggattcctgaggctcttatcagagaattttacttttttgggtattgaaggtcagtggagaggacgattcatcttagagccaatgccattcctagagagaggccagatagtcactcaaggaacaaagtctaacttttcaatggggcatctctaaagagaaaacatttaacatttc

SEQ ID NO: 309274 - DNA, 557 bp, Homo sapiens
gtcaaaccccactgctacttgttttggtaaatcaagttttattggagcatagccacacccattcatttccctgttgtctatgtctgctttgtgctacaatggcagagctaagtagttgcagtacaaagagagtatacgacttgcaaagcctaaaatatttagcatctgtctttttaacagaaaaagcttgtccatcttggtgcagaggaaacagaatgtgctaggggccctgggaccagtcctggctctgtatctgacttgcttggcatccctggggagctcactgtccttctctggtctctgaagcacgaaaggttgaattagtacttggaagttttctttagttctaataacytagcagtctttgctctattgctctttagggattcctgaggctcttatcagagaattttacttttttgggtattgaaggtcagtggagaggacgattcatcttagagccaatgccattcctagagagaggccagatagtcactcaaggaacaaagtctaacttttcaatggggcatctctaaagagaaaacatttaacatttc

SEQ ID NO: 309275 - DNA, 557 bp, Homo sapiens
gtcaaaccccactgctacttgttttggtaaatcaagttttattggagcatagccacacccattcatttccctgttgtctatgtctgctttgtgctacaatggcagagctaagtagttgcagtacaaagagagtatacgacttgcaaagcctaaaatatttagcatctgtctttttaacagaaaaagcttgtccatcttggtgcagaggaaacagaatgtgctaggggccctgggaccagtcctggctctgtatctgacttgcttggcatccctggggagctcactgtccttctctggtctctgaagcacgaaaggttgaattagtacttggaagttttctttagttctaataacttagcagtctttgctctattgctctttagggattcctgaggctcttatcagagaattttacttttttgggtrttgaaggtcagtggagaggacgattcatcttagagccaatgccattcctagagagaggccagatagtcactcaaggaacaaagtctaacttttcaatggggcatctctaaagagaaaacatttaacatttc

SEQ ID NO: 309276 - DNA, 472 bp, Homo sapiens
caaggactttggaggaagcactttcctctccaactccagcacattccactggagggggaagggtcttggcaggactgagccaggggagggcagaagatgcttcctggcactgtggttccttggtgcatcccycgtgcctccctggtgctggcacggctggtaggccttgggctggtaattgggcagcctgctgagggctgatgctggcactgggtagttcctgcctggaatgcacgtgagatgcctaagggagccggtgaggctttgtcttctgttaatactctgtgtgtgtgtctttgaggtgggatagtgttccttttcaactgacttcaaaaagcgcttcagataccaggcccctctcatgggatcaggcgtcagctgctcttccttggggcaaaggggatctcccccgttctccctcatctcccccttagtccccaggcctgggcattcctggtattcccagctcctg

SEQ ID NO: 309277 - DNA, 588 bp, Homo sapiens
aaagtctgtgcccaaaggagatttgctttagaggaatatagaaacgtgaggtctcttagactggggtgaggtggggcgagcctcctctctgagtggttgccgttactgtttgaagggaatacacaggagacctgggcttgcttgcgggtaagaatggcggctggcaccacctggctgaaagcaggctcagaaccaggagaggaggaagtcaagcagggaggctgggaggtagtcccaccctgtgctgtcaggctccagaggaagagggcagcagggcagtggccaccggggtctcacatggactcccctcctcccgggatttccccacmatacctcactggggagggtagggccagtgtttggatcctgctgatgaacagggctcttgttcacagagcctggcagccacaagcatccaactcaaaatatgagtgagcccagcagcttcgacaatggtgaccgccttcccttggcctccgctcagctaaacaatagacgagcaaagtgactcgatagcacagtctagtggaggcagctgggattgcatctctgagtcctggggctgatcaggtgccctctctggctccg

SEQ ID NO: 309278 - DNA, 588 bp, Homo sapiens
aaagtctgtgcccaaaggagatttgctttagaggaatatagaaacgtgaggtctcttagactggggtgaggtggggcgagcctcctctctgagtggttgccgttactgtttgaagggaatacacaggagacctgggcttgcttgcgggtaagaatggcggctggcaccacctggctgaaagcaggctcagaaccaggagaggaggaagtcaagcagggaggctgggaggtagtcccaccctgtgctgtcaggctccagaggaagagggcagcagggcagtggccaccggggtctcacatggactcccctcctcccgggatttccccacaatacctcactggggagggtagggccagtgtttggatcctgctgatgaacagggctcttgttcacagagcctggcagccacaagcatccaactcaaaatatgagtgagcccagcagcktcgacaatggtgaccgccttcccttggcctccgctcagctaaacaatagacgagcaaagtgactcgatagcacagtctagtggaggcagctgggattgcatctctgagtcctggggctgatcaggtgccctctctggctccg

SEQ ID NO: 309279 - DNA, 488 bp, Homo sapiens
gtgggaggctgcttgcaggcaagcaagagggctcccacaaccagagcaaagctgtccttgagctgtctccaggtccctatgtccccagtggacgatacctttgcctctggggacaccttgcaagtgggatctttggttctctctctgtccctctgtctgcctctctgggtccttgcagccccttctctcctactccatccactccccaaggggagggcctgcatttgggttgctggcactgggtctagcttgcagccttgcagccttgcacactggctgtagagaggcagtgttgattctcgctgggtctcaggtgccggggtgccrtgggctccatggtttccattcctggttcattctttggaggattcccatgggaggtgttgaaggtggggctcagagggcagaccctgagccctgagaggctggaagagtgagccatgccacatgacctagaagaaatcactcactcaggccatggctgttgg

SEQ ID NO: 309280 - DNA, 584 bp, Homo sapiens
gacctcctatctggaccgcaggagctgcaagcacagcaagatcctctttgtattggaacaaggccagatgtagggggaggagggccaatgtggcaggggctacatgtgggcagcagttgggcattcatctagggagccctctttcttttttttttgagacagagtctcgctctgtcaccctggagtgcagtggctggagtgcagtggygtgatctctgctcattgcaacctctgcctcccgggttcacgccattctcctgcctcagcttcccaagtagctgggactacaggcgcctgccaccacacccagctaattttttgtatttttagtagagacagggtttcaccgtgttagccaggatggtcttgatctcctgacctcgtgatctgcccacctcagcctcccaaagtgctgggattacaggtggaagccctctgtctttatggcccttggcaacagtgcatgaaggggcttctcatgaggaaactgaggccaactttgaggaccacagggaaagggagggtgaaactggcacgtggcccagccttgcctggctggggagctactgtgctgtccaccccac

SEQ ID NO: 309281 - DNA, 584 bp, Homo sapiens
gacctcctatctggaccgcaggagctgcaagcacagcaagatcctctttgtattggaacaaggccagatgtagggggaggagggccaatgtggcaggggctacatgtgggcagcagttgggcattcatctagggagccctctttcttttttttttgagacagagtctcgctctgtcaccctggagtgcagtggctggagtgcagtggcgtgatctctgctcaytgcaacctctgcctcccgggttcacgccattctcctgcctcagcttcccaagtagctgggactacaggcgcctgccaccacacccagctaattttttgtatttttagtagagacagggtttcaccgtgttagccaggatggtcttgatctcctgacctcgtgatctgcccacctcagcctcccaaagtgctgggattacaggtggaagccctctgtctttatggcccttggcaacagtgcatgaaggggcttctcatgaggaaactgaggccaactttgaggaccacagggaaagggagggtgaaactggcacgtggcccagccttgcctggctggggagctactgtgctgtccaccccac

SEQ ID NO: 309282 - DNA, 409 bp, Homo sapiens
ggaggagtagtgagttctatcttgcacatgttgagttgtagatgctaatagagtattccaggagtgatgcacaggaactggatatgaaagacaggaaaaaagtggggttagatttaaaggcttgggagtcatccaatacaggtgacactggagctatagagtgaatacatttaccaaaggagaagaaaaaaaggatgaaaacagacacagggaatattcacgtttaggaggaaggtgaaaaaggggcaaycaccttataaccccatttctttcattaagagaaagctcattttaaaaaatgtaacagattcggagtaaattgaggctcctaaaaacagcagtttttgctactataatagaaatattaatgatggaaattaaaaacaaaaaaaggagaaagaaaaggagg

SEQ ID NO: 309283 - DNA, 549 bp, Homo sapiens
caaatctgtaagtcagtattgaagacccacagaagacagcacaataacaaggaggaatgattactagaacccggaaaaacagagttgtgtaaaagaggctaccctcagtcaagggacacagacagcctaaaacaaccctatggggactccccatgrccaaatccaactggaatgcacagactattgatttaatcacataggtcagccttctagggtggagagcaggatggagaatggtaaagaggatctggagtgctatcagaaggtatctagtatgccgccactatctttccctttagtatatactattgtccttatccagataaagaatttgtgtccctaatacagaggctatattatgtctcaccagttaatggtttagaacagggtgatgtcaatttgatcatctcccactgaagcctgaaacattggtcatatttgtgtccaccatatgaggaagaagagggaaggtggaggagaaaaatcataaaacaaaactgctggagtacctgcttctgcagttaatagtgatacattcgttgataatct

SEQ ID NO: 309284 - DNA, 543 bp, Homo sapiens
aatctgggtaaagagtatattggagtttatgtttctctttctctatatgcacacatccttatacacttkttttactgaattacttgtcaattaagagtaaattacagccatcattcactgttaccccaaaatacttgaaaatgtattttccaagaacaaggacattcacttctgtaaccaccataaaattatcaaaatcagaagatctaagtggaatacaatagtgttatataattcactattcttatttgaaatttgctgcttgtcccaataatgttctctaaaactacttttccctgataatgcaccatgtttatttgtaaatcaatttttctatctttaaaattattgtggtaagtaaatgtaacatgagatctaccctcttaacaaactttaaactgcacaatacggtatcaactctaagcactaaggcactatgttgtaccgcagatctccagaacttacacatcttgagtaaatgaaactttagacccactgaatagccgctccttatttctgccgcccctcagtccctggcaacca

SEQ ID NO: 309285 - DNA, 543 bp, Homo sapiens
aatctgggtaaagagtatattggagtttatgtttctctttctctatatgcacacatccttatacacttgttttactgaattacttgtcaattaagagtaaattacagccatcattcactgttaccccmaaatacttgaaaatgtattttccaagaacaaggacattcacttctgtaaccaccataaaattatcaaaatcagaagatctaagtggaatacaatagtgttatataattcactattcttatttgaaatttgctgcttgtcccaataatgttctctaaaactacttttccctgataatgcaccatgtttatttgtaaatcaatttttctatctttaaaattattgtggtaagtaaatgtaacatgagatctaccctcttaacaaactttaaactgcacaatacggtatcaactctaagcactaaggcactatgttgtaccgcagatctccagaacttacacatcttgagtaaatgaaactttagacccactgaatagccgctccttatttctgccgcccctcagtccctggcaacca

SEQ ID NO: 309286 - DNA, 603 bp, Homo sapiens
aatcaaccacacacttttgtgaggtgggatggggtgcaatttgtttatgtataccccttgcaactagcttgatgccttaaacacagagctcaataaatacgaattaagcaaataaataaatgaatgaaaaagcaactttttgaaccatccccccaaaattaagctaagtttgatttcctttgagaagcaagtacatttcacattcccacctcttacccatggcatatgtgctattcttttaaagtgggaayatggcttataaataatccagtccagaaaattaagtgaagaaaggcttcagtctatactcctgtagcaaatggagactctgactgaagtggccatttcatttctaatgtctctggagaaattttagccacaagcttccttccgttttaccagatccctctgtagtatttctcaagggagcaaaagctgtttggatttttttccctctgctgaaaaattgccttatatgtgtctcatttcagtgcttacatgaaaaacagttgtcagctgattaaaaaacaagttagaattagttacaatatgattcaattgatgacccacagcatctgctagttggatttaaaatgatcagat

SEQ ID NO: 309287 - DNA, 560 bp, Homo sapiens
tttttccctctgctgaaaaattgccttatatgtgtctcatttcagtgcttacatgaaaaacagttgtcagctgattaaaaaacaagttagaattagttacaatatgattcaattgatgacccacagcatctgctagttggatttaaaatgatcagatcttaaaaacagtcttttaaygggacaaaatcaactttatgctcattctaaatctctcaactgctataaaaccacaaagaaatttgaaataaagtcagaaaagagcagagcattcctgggtgtaatacaaacaactgacttgaaaatatgtgcagatcactttcttacatacactagctgtgccatttggtacctaagagaaaggcttacctaactaaaatactaagattctaacatacacatgtgggtaaatgacctaaacaaacaatttttatcccccactccttgaactctgctgcctctgctgctgttgtaaatgccttcatggagacaggcaccccagtacccactagcaccctgctgcagccaacaagcttgcaccccaccaagctgctgctgctgct

SEQ ID NO: 309288 - DNA, 586 bp, Homo sapiens
ttagtccaaattaccacactacctctccagcaagggttctgaactgggctgagatgcttgaatgaacagaaatgaaattcagaacagggatagaatccaagatcgttgagatccagaattaccttatgaagtgaagttaagaatcacaataaaatgatacaggggctgacagacaagataatcagtaaagaaaagaacataaccaacctgatagagctgaaaaacacactacaaaaatttcacaatgcaatcacaagtattaatagcaaaatagaccaagctgaggaaagaacctcagagcttgaagactggctttctaagacaatctgacaagaatacagaaaaaaagactaaaaatgaacaaacaaaacctctgagaaatatgggattacatagagagaacaamttaatgtctcatcgatttcccagaaagagatggggagagtgtaagcaacttggaaatcacatttcaggatatcaaccatgagaacttccccaacttagctatagaggccaacattcaaattcaagaaatgcagagaaccccagtaagatactttataagaagatcatccccaagacacaa

SEQ ID NO: 309289 - DNA, 475 bp, Homo sapiens
gatctctccctgggattgagcttcccaggtggagaggtagccactgtctctgtggttcagttgacttaccagcctgctggctctggagagtctaggcagtctggacaagaggggttccrccaagtgtagcacacctgctctgccaaggagcagtcagaatgcttctttaagtatgtccctgattctgttcctcccagaagacatctccagacacaaataggagcattcgagctggcatcaggtcagtgccccctgggacaaagctcccagaggaaggaacaggctgctatctttgctgttttacagccttcactgctgatacctccaggtgcaggaggtaccaaggcaactgaggtctggggtggacccccagcaaactgcagcaaccctgtggaagagtggactgactgttaaaagaaaaaaaaaaatagaaagcaacaacaacaacactaacgaaaaagaccccacaaaaaaa

SEQ ID NO: 309290 - DNA, 595 bp, Homo sapiens
aaaaaaaccatccaaaggtcagcagcctcaaagattgaaggtagataagcccacaaacatgagatagaatcaatgcaaaaacaatggaaactcaaaaagccagagtgcctcttctcctccaaatgaccacaatgtgtctccagcaaagacacagaactgggctgaggttgaggtagctgaattgacagaagyagccttcagaaagtgggtaataacaaacttcactgggctaaagcagcatatttaaacccattgcaaagaagctaaggatcataataaaacaatacaagagctgataaccagaatagccagtttagagaggaatataactgacctgatggaactgaaaaataaaacatgagaacttcacaatgtaattacaagtatcagtggcagaatagaccaagcagaggaaagaatctcagagcttgaaggctatctttctgaaataagacaggcagacaagaatagagaaaagagaatgaaaagaaacaaacaaaacttctaagaaacatgggattatgaaaaaaagactgaacctatgactgattaggcttacctgaaagagatgaggagattggaaccaagttggaaa

SEQ ID NO: 309291 - DNA, 578 bp, Homo sapiens
ggcatgatacagatttcaataagcatacttcttttactgtgtgttgatgagtcactggcacacaggaaacaaatggtggttggagaaaatcaacgagtcagaaaatctttctctgataactggcctcttatttcttagtaataatccataatgccaagctattttttaaaatgttaccrgccatgaccactctattccttgagcttaattttatgtttaatatggttctggagacaaagtcctctctgatgaccagcccaagcttccttgcctttaattcgtcatgcagcattgcacttaaaagttcaagcctggagctggatttccaagtaccattctgttttctcacttggggaatgcagttatggctggacttgcacagcggtcacccagtcgctgcaggggcttgggagatgtaatccaggagtaatgttgtgtgtcagcactgtgaggtccctggagccaggtgctacataaatacaaggtattcaaatattttttcctgcgggggtggatggtgctttgatacatcttcatcgcattgtattgtgacaggcctcagcaaaaaaatcataaga

SEQ ID NO: 309292 - DNA, 578 bp, Homo sapiens
ggcatgatacagatttcaataagcatacttcttttactgtgtgttgatgagtcactggcacacaggaaacaaatggtggttggagaaaatcaacgagtcagaaaatctttctctgataactggcctcttatttcttagtaataatccataatgccaagctattttttaaaatgttaccagccatgaccactctattccttgagcttaattttatgtttaatatggytctggagacaaagtcctctctgatgaccagcccaagcttccttgcctttaattcgtcatgcagcattgcacttaaaagttcaagcctggagctggatttccaagtaccattctgttttctcacttggggaatgcagttatggctggacttgcacagcggtcacccagtcgctgcaggggcttgggagatgtaatccaggagtaatgttgtgtgtcagcactgtgaggtccctggagccaggtgctacataaatacaaggtattcaaatattttttcctgcgggggtggatggtgctttgatacatcttcatcgcattgtattgtgacaggcctcagcaaaaaaatcataaga

SEQ ID NO: 309293 - DNA, 571 bp, Homo sapiens
ctgcctctcttcattaaatagatcctaatatgcttcaaatgaacaataaactctgtcctgtatttttttcacaataaatgaacatttaggaagaaaaaattgacagatccttttgtagattagatcttattagttcaaaagatgattcttgattgtgttcactttgaatgctgggacattcagagatctttgtaagagcagaaaatgtaaagcaaaaacatctaagtgaactagccaagtattttgcacctgcataatagctaggtgataggaatctatatacaactccagccaataatgaatccrtaataacagaagcaccataattctatctgctatgaatgaattttcagatgatagtggcacacagcagagttatttttgtttattttttcatcttaaaccatggaaatttttaaagggaaaaaaccttggattgtttatatttgtagaaaacatagtaggctaggctttttgtatatgttagctaatagcaacagaaactgcttcgaagcccatctctgtgttcatcaattactcaccttggtgaagaaagctggggtaaatgaac

SEQ ID NO: 309294 - DNA, 626 bp, Homo sapiens
tttttcacaataaatgaacatttaggaagaaaaaattgacagatccttttgtagattagatcttattagttcaaaagatgattcttgattgtgttcactttgaatgctgggacattcagagatctttgtaagagcagaaaatgtaaagcaaaaacatctaagtgaactagccaagtattttgcacctgcataatagctaggtgataggaatctatatacaactccagccaataatgaatccgtaataacagaagcaccataattctatctgctatgaatgaattttcagatgatagtggcacacagcagagttatttttgtttattttttcatcttaaaccatggaaatttttaaagggaaaaaaccttggattgtttatatttgtagaaaacatagtaggctaggctttttgtatatgttagctaatagcaacagaaactgcttcgaarcccatctctgtgttcatcaattactcaccttggtgaagaaagctggggtaaatgaacgctatacctagtgttttgttctcactcaatatagagaccgcattggcatcagacaataggaccagaactgcaatctctcagaccgaggcaaggagaagaaagggatctatagacagatc

SEQ ID NO: 309295 - DNA, 521 bp, Homo sapiens
gcacatagtagcaactgctaattatttaattattggatgaatgaatgaatgattggtttagccaattgagcattgcattttggggggtattcaggaaaaacaatgatccaagcctcccagctagtggcaaagccatttctagcagtccagtatacctttcagagcagattctaacacccatctgcatatctacgaatccaaagtcaatgcagcaaaatattgctagccaattatctacttaatcctggcagacctgctgcatttcaaggctttgaratggtgaacctgaactgacattttacatttcacaggtctcggggataatggagatgaagcagctacatgaactacctgtgttaggtctggtccattctgcaatagaaacctcctctaacacttattgtctgaattgcacaccttaaaccttgcttaaatatgtcatgtactgttcattagtttcccctataaaattgctggccatctaaaactgatgagagattttcctgcttcttttatgtttt

SEQ ID NO: 309296 - DNA, 525 bp, Homo sapiens
ctaatagagataaatgtgtarcagaggtggcaaactggctaagcgcctaccaaaggcagcccgagggtaagttctgtttagccatttattaaaggcaacatagctaggtgcaggttgtactctgtcaatacaagcaacttggcaccagactcacatcactaaatcataccaccacgatttgagtttgtgacccctggcagacactataagtaaattaatatgagtgattagcataaggacaaccagagctcaggtaggtatggagttagccagatcctacagctccagcccttgcgagccctagccattgtactctttagaagaagcctcttcttttggtggtgtgaagccattgctgaaaatctgaatgagactgaacatgtaagttaaatgtttctcctgtcctctggtccagtcaatcttagcacatttggggcttggtcatatatagcataggtatcctatttttgatagtttgggggcagtaatacaggagggaggtgtgcaggcttaagctagccaatt

SEQ ID NO: 309297 - DNA, 475 bp, Homo sapiens
ggaggccattatcgtcagcaaattaacacatgaacagaaaaccaaacatcacatgttctttctcacttataagtgggagctgaatgagaacacatggacacatggtggtaacaacacacactatggccagtaggaggagctgggagagggagagcaccaggaaaaatagttaatggatgctgggcctaattcctggctgatgggttgatgtgtgcagcaaaccaccatggcacacgtttacctatgtaacaaacctgcacatcctgcaaatatacccaggaacttaaaaggtgaaaaaaaaaaaaaaaaaaaaaaaactcaacaaatgtgccccacacagggkggatatcaacaactgataccaccagtcaaataacgtatcatatatgcctttcacttctcatctcccaaccttttcctaacttcaaccctgaaaaaaccacatgcatcctagtaagtaaaaaaaaaaaaaaaa

SEQ ID NO: 309298 - DNA, 475 bp, Homo sapiens
ggaggccattatcgtcagcaaattaacacatgaacagaaaaccaaacatcacatgttctttctcacttataagtgggagctgaatgagaacacatggacacatggtggtaacaacacacactatggccagtaggaggagctgggagagggagagcaccaggaaaaatagttaatggatgctgggcctaattcctggctgatgggttgatgtgtgcagcaaaccaccatggcacacgtttacctatgtaacaaacctgcacatcctgcaaatatacccaggaacttaaaaggtgaaaaaaaaaaaaaaaaaaaaaaaactcaacaaatgtgccccacacagggtggatatcaacaactgataccaccagtcaaataacgtatcatatatgcctytcacttctcatctcccaaccttttcctaacttcaaccctgaaaaaaccacatgcatcctagtaagtaaaaaaaaaaaaaaaa

SEQ ID NO: 309299 - DNA, 624 bp, Homo sapiens
cctttctctaatatcttacatagaataatgtagaatatcatacagtaaatatattatttactatactttttgtccttccatctgtttctagcttccttttaagaaaccgccactctattctacatgttttggagttgcacaacagcaacctggagtaacagtgacttctttgctccctctggtcaatttacttctttgagcctcagttgcctcatttgcaaaatgggagcataacactagatgatttcaaaggcagtctgttccctttcttcctcttccccctcttcttctttccccccttcccttctctctctctctcttgcttcctccttctttctttcaaaaaatgtttgcaggagcagaaaaccaaacaccatgtgttctcacttataagtgggagctgaatgataagaacrcatggacacatcggggggaacaacacacactgggatctgtcagagggtggggatgggaggaaggaaagtatcaggaagaatagctaatggatgttgggcttaatacctaggtgatgggatgatttgtgcagcaaattaccctggcacacgtttacctatgtaataaacctgcacattctgcacatgtacccctgaacttaaaatgaaa

SEQ ID NO: 309300 - DNA, 609 bp, Homo sapiens
tgtactgatattatgtgatacatgttgtgataacactgccatgttaacttcttggtacttgataacacaaaatacagcttgtggaaaggacaattactccaatctctgcatctgtctccacacagcattctcctctctgtgtctctgtgcccaaatttccctcttcttataaggatatcagccaaattggatttcaggacccccttatccagtatgacctcatcttaatgtgtttacatctgcaaagaccatatttctgaatagtttctcatagattctgagtggatattaattcctatggaatattatccaacccagtacgtgaactgaccaacaaactttcatctggcttctctttctgatcacctccagttcatatgcaaaggttgctaggcccattttcttctttgtcctcaccttctatccctccaccttactccttctgggtctctgacrgggcataatttttgtctaggccatgaagaagatggtggaagagaccttttctgtacactttgcatttgtagattgggagacgcagcgtctcttctgatggtctgtgtgttctcactgagagggaatattcagtttctccacctacatattaat

SEQ ID NO: 309301 - DNA, 583 bp, Homo sapiens
aatttttatacagaacttgattattttttcataataatcataatacttattgagaatgtaccctttgtcagacacatttctaagcatttaaaatgtattaattcctctaaagacacactaaatcaggctgaaaggatatttaatattgtcagacactgtgtgtctaccgaattcagataatcagctatactgtacctgtttggtaattcatgtctgttaggttgtttagggtaaattagttttctttgtttcakaggacctagagatagataggcagaaagagcctccttaagaagaaaatacggcattctggtcctgtcttttcctgagagggttcagctgatcttggttcttttcacatccctcattcctcttgccaaaatcccagcaaactcaaagcttggtataaattgagtgatacaatttgatttctcaagtttggaagagtctcctgttttgttcttctggtctgacatggccgctgtccttgaagtttttaacctgggcagatcacgtggaagatgtgaacttctgagttggcctacgtaggaattaatgtgtagacaatccttccccataactc

SEQ ID NO: 309302 - DNA, 504 bp, Homo sapiens
ggcattctggtcctgtcttttcctgagagggttcagctgatcttggttcttttcacatccytcattcctcttgccaaaatcccagcaaactcaaagcttggtataaattgagtgatacaatttgatttctcaagtttggaagagtctcctgttttgttcttctggtctgacatggccgctgtccttgaagtttttaacctgggcagatcacgtggaagatgtgaacttctgagttggcctacgtaggaattaatgtgtagacaatccttccccataactccaatattcccaacctgtgtttttctcttcttcttctacttactaggatgcatgtggttcttccagggttgaagttaggaaaaggttgggagatgagaagtgagaggcatatatgatacgttatttgactggtggtatcagttgttgatatccaccctgtgtggggcacatttgttgagttttttttttttttttttttttttcacctttaaagttcctgggttt

SEQ ID NO: 309303 - DNA, 581 bp, Homo sapiens
agcatagcatctggcctacggtcaatayttgatcaatgctcaggattaagaaactatgcaggatacaggtgacagttcattcaatcggaagtctcctcatattgttgatagaccctctgctgtttctgggttttcccggagctgttattttgatccttaatgactacaaccaattcagggaaatatgagggcataagaaatttgtgttcaacattcaatagtaggtaaataggttttattcctcagaaatattttactgaaaatgtttgcctgaaagtatattttcttagactggaaagattctaacttctctgagcaagttccagaaatgctgcaaagatgatgaagttatcataaattagttccagatgtcaccctttctgtagaagttatgaataccaggataagtttggatgggaaagaaggggtagggggtaaggatgaaaagacagtttctatttttgtaaaattttggaagaaaatgtccaagaaaacgattaaaatgcttatccttaatttaatcaaagtattatttcctatgtaaattttcaaaggtgtaactttccctttacaaatgtcat

SEQ ID NO: 309304 - DNA, 375 bp, Homo sapiens
cattaaaaagaatgaaatcatgtcctttgcagcaacatggatgcagctggatgccactatgttaagtggactaacatagaaaaaaagccaaataaggcaggttcttacttgtaagtgggagctaaacactgggtacacatggacacaaagataggaacaacagacattgtggactccgaaagtggggagggagggaaaggaacaagggctgaaaaactacctgtcaggtaatrtgctcaatacttgggcaatgtgatcattagaacccaaacctcagcatcactgaatatatccacataataaatctgcacatgtacccccaaatctaaaattttaaaaatgtaatggcttccacatatttaaaaaaatatatat

SEQ ID NO: 309305 - DNA, 512 bp, Homo sapiens
tgttctagttttggaataaggaagattttattaaaacaaggtaacaggagaggggccaagatggctgactagaagcagctggtatgccctgctgtcrtggagagaaggaaaagtggggagttaacactagctcttcaactggatcatccaggtggtcacattgggattcatcaaggaagcaacatgacccacggagaatggagaagagtgaaacaggaaaactgcccacttgggagtggcatggggtcaagggaggcctcctaaggcagggaaatggtgagtgagtgagagtccccgggcacccacatttctgccatggacctttgcaatcctgggctcaggagatcacctgtgctatctctcaccccctcccccgtccaccactggggcctccagtctgacacacaaagctacacagagtctgggcagagctgctgcagaggcacacacagagtcccagggggcttggatccccaggcaccccaggaccagcagctacagctctggcaatg

SEQ ID NO: 309306 - DNA, 331 bp, Homo sapiens
tctaaggattacaataaaatgatacaggagctgaaagacaaaatggccattataagaaagaatgaaaatgatctgatagagctgaaaaacacactacaagaatttcataatgcaattgcaattataaacagcagaatacaccaagctgtagaaagaatctcagagcttgaagactggttctccaaattaactcagccagacaaaaatgggggragggggggaaagaaagaagatagaatgaaataagcctccaagaaacatggagaaacatgggattatgtagagaccaaatctacactcactgagatcctaaaaagagagacagaagtca

SEQ ID NO: 309307 - DNA, 368 bp, Homo sapiens
aacaatgggacacaaaaccaaacactccatgttctcactcataagtgggagccaaacagtgataacatatggacacagggaggggaacaccacacactgcagcctattggggatgygggggtagagacagcatcaggataaatgcatgtgaggcttaatacctaagtgataaattgataggtgcagcaaagcaccatggcatatgtttacctacgtaacaaacctgcatgttctgcacatgtatcctggaaattaaaataaaatttttgaaaaaggtatttaatttatattatattagttttttattctgatcaaaaccatcaactattaccaagtaaaaaggaataagggttaaaaattttgaaagc

SEQ ID NO: 309308 - DNA, 629 bp, Homo sapiens
ggtgtgtaaactactcttatcttaagtagaaaaacgaaacaatgaacacaacaaaaatgataactataacaacatttcaagacagacagtacaatgagatagaaatagaaacaacaaaaagttaaaaagagaagggacaaaattaaggtgtagagtttgaattaattttaattcgattaattctttttgcttgtttgtttatgcaaacagtgttaagttgttatcagcttaaaataatgcattataagatagtatttgygagcctcatggtaacctcaaaccaaactcatacaacagatacacaaaaaataaaaaggaagaaactaaatcatatctccagagaaaattactttcgctaaaaggaagacaaaaaggaaagaaagaaaaaagagaagaccacaaaacacccagaaaacaaaatggaaagagtagctccttacttatcaataataacattgtatataaatgaactaaactctccaattaaaagacaaacaagacccactgacctgttgcctacacatagactgaaaataaaagattgggagaagagcaaaagtagctatatgtatatcagacaaaactgatttcaagacaaaagttataagaaaatacaaagaacattacta

SEQ ID NO: 309309 - DNA, 629 bp, Homo sapiens
ggtgtgtaaactactcttatcttaagtagaaaaacgaaacaatgaacacaacaaaaatgataactataacaacatttcaagacagacagtacaatgagatagaaatagaaacaacaaaaagttaaaaagagaagggacaaaattaaggtgtagagtttgaattaattttaattcgattaattctttttgcttgtttgtttatgcaaacagtgttaagttgttatcagcttaaaataatgcattataagatagtatttgtgagcctcatggtaacctcaaaccaaactcatacaacagatacacaaaaaataaaaaggaagaaactaaatcatatctccagagaaaattactttcgctaaaaggaagacaaaaaggaaagaaagaaaaaagagaagaccacaaaacacccagaaaacaaaatggaaagagtagctccttacttatcaataataacattgtatataaatgaactaaactctccaattaaaagacaaacaagacccactgayctgttgcctacacatagactgaaaataaaagattgggagaagagcaaaagtagctatatgtatatcagacaaaactgatttcaagacaaaagttataagaaaatacaaagaacattacta

SEQ ID NO: 309310 - DNA, 629 bp, Homo sapiens
ggtgtgtaaactactcttatcttaagtagaaaaacgaaacaatgaacacaacaaaaatgataactataacaacatttcaagacagacagtacaatgagatagaaatagaaacaacaaaaagttaaaaagagaagggacaaaattaaggtgtagagtttgaattaattttaattcgattaattctttttgcttgtttgtttatgcaaacagtgttaagttgttatcagcttaaaataatgcattataagatagtatttgtgagcctcatggtaacctcaaaccaaactcatacaacagatacacaaaaaataaaaaggaagaaactaaatcatatctccagagaaaattactttcgctaaaaggaagacaaaaaggaaagaaagaaaaaagagaagaccacaaaacacccagaaaacaaaatggaaagagtagctccttacttatcaataataacattgtatataaatgaactaaactctccaattaaaagacaaacaagacccactgacctgytgcctacacatagactgaaaataaaagattgggagaagagcaaaagtagctatatgtatatcagacaaaactgatttcaagacaaaagttataagaaaatacaaagaacattacta

SEQ ID NO: 309311 - DNA, 606 bp, Homo sapiens
gcttaataaccagaatatatgaggagctcaaacaactttattttttaatctaataattggatttcaaaatgggaaaaagattagaatagacatttctcaaaagaagatatccaaatgacaaacaggcacatgaaaatgtgctcaatatcattgatcatcaaagaaatgcaaatcaaaactacaatggcatatcatctcacccaagttaaaatggcctttacccaaaagtcaagcaataacatatgctggtgaggatgtagagaaaagggaattctcatacactgtttttgggaatgtaaattagtacaaccattacggaaaacactttggaagtttctcaaaaaactagaaatagasataccatatgatccagcaatttcattgctgagtatataccaaaaataaagcaaatcaagatatctaagaggttatctgcactcccatgtttgttgcagcactattcacaatagtcaagatttggaagcaacagaagtgttcattaacagatgaacagataaaggaaatgtggtacttacacacaatggagtactaatcagtcataaaaaatgagatccagtcatttgcaagaacatggaccgaatagaa

SEQ ID NO: 309312 - DNA, 606 bp, Homo sapiens
gcttaataaccagaatatatgaggagctcaaacaactttattttttaatctaataattggatttcaaaatgggaaaaagattagaatagacatttctcaaaagaagatatccaaatgacaaacaggcacatgaaaatgtgctcaatatcattgatcatcaaagaaatgcaaatcaaaactacaatggcatatcatctcacccaagttaaaatggcctttacccaaaagtcaagcaataacatatgctggtgaggatgtagagaaaagggaattctcatacactgtttttgggaatgtaaattagtacaaccattacggaaaacactttggaagtttctcaaaaaactagaaatagagawaccatatgatccagcaatttcattgctgagtatataccaaaaataaagcaaatcaagatatctaagaggttatctgcactcccatgtttgttgcagcactattcacaatagtcaagatttggaagcaacagaagtgttcattaacagatgaacagataaaggaaatgtggtacttacacacaatggagtactaatcagtcataaaaaatgagatccagtcatttgcaagaacatggaccgaatagaa

SEQ ID NO: 309313 - DNA, 640 bp, Homo sapiens
aaaacaatttggcatcatcttggaagtctgaacatggagacacaccataactcrgcgattccgtacccaatatatacccccagagaaattcttgaacatgtatctaggagacaggctcagagcaaagagcttaaaatttgttacatttacacaatggaatattatacagcagtgaaaactaatgatccatagcaacactcaggaatatatgaatttcagaaatctaatgcagagttataaaaaaaaaaaaggtcccaaaagaccataagtaatatgacaccattaggataatgtttaatgcacaaaaattaagcagtatatttaggcagcatacccttttaccaaagccatttttaaaaagtaaagattaacacaaaactcagaatggtgctactctcctgtttatgtggaggtggtgacatgagataggaaaggaatgaatacataggtagatgtatcttattcatgatgtgttcattggatagtaggttcatgggaatttattattacactttacaacataaatatatgttaataaatctattgtatgtgtcagagataatcttaaaaaatatatatataatgacctaagatgctcagcttattcaagagtaagcactatcatttttcaacagctgtt

SEQ ID NO: 309314 - DNA, 640 bp, Homo sapiens
aaaacaatttggcatcatcttggaagtctgaacatggagacacaccataactcagygattccgtacccaatatatacccccagagaaattcttgaacatgtatctaggagacaggctcagagcaaagagcttaaaatttgttacatttacacaatggaatattatacagcagtgaaaactaatgatccatagcaacactcaggaatatatgaatttcagaaatctaatgcagagttataaaaaaaaaaaaggtcccaaaagaccataagtaatatgacaccattaggataatgtttaatgcacaaaaattaagcagtatatttaggcagcatacccttttaccaaagccatttttaaaaagtaaagattaacacaaaactcagaatggtgctactctcctgtttatgtggaggtggtgacatgagataggaaaggaatgaatacataggtagatgtatcttattcatgatgtgttcattggatagtaggttcatgggaatttattattacactttacaacataaatatatgttaataaatctattgtatgtgtcagagataatcttaaaaaatatatatataatgacctaagatgctcagcttattcaagagtaagcactatcatttttcaacagctgtt

SEQ ID NO: 309315 - DNA, 640 bp, Homo sapiens
aaaacaatttggcatcatcttggaagtctgaacatggagacacaccataactcagcgattccgtacccaatatatacccccagagaaattcttgaacatgtatctaggagacaggctcasagcaaagagcttaaaatttgttacatttacacaatggaatattatacagcagtgaaaactaatgatccatagcaacactcaggaatatatgaatttcagaaatctaatgcagagttataaaaaaaaaaaaggtcccaaaagaccataagtaatatgacaccattaggataatgtttaatgcacaaaaattaagcagtatatttaggcagcatacccttttaccaaagccatttttaaaaagtaaagattaacacaaaactcagaatggtgctactctcctgtttatgtggaggtggtgacatgagataggaaaggaatgaatacataggtagatgtatcttattcatgatgtgttcattggatagtaggttcatgggaatttattattacactttacaacataaatatatgttaataaatctattgtatgtgtcagagataatcttaaaaaatatatatataatgacctaagatgctcagcttattcaagagtaagcactatcatttttcaacagctgtt

SEQ ID NO: 309316 - DNA, 492 bp, Homo sapiens
taagtaatatgacaccattaggataatgtttaatgcacaaaaattaagcagtatatttaggcagcatacccttttaccaaagccatttttaaaaagtaaagattaacacaaaactcagaatggtgctactctcctgtttatgtggaggtggtgacatgagataggaaaggaatgaatacataggtagatgtatcttattcatgatgtgttcattggatagtaggttcatgggaatttattattacactttacarcataaatatatgttaataaatctattgtatgtgtcagagataatcttaaaaaatatatatataatgacctaagatgctcagcttattcaagagtaagcactatcatttttcaacagctgtttcattttttatgttcagtaaatgtcatgatactaaaaaaaaacccctcttctctagcatctttatcacacatgtgaccacactattgctaaaaacattaattttcactcagtgccag

SEQ ID NO: 309317 - DNA, 543 bp, Homo sapiens
tgttatatgagaacacatctatatttctattataaaatatattataaacaccaaaaatgtagtatcactgtgtatagtgttcagtcttatctgccactcaacaattattctgcacctactatgtgccacactggattaggcaatggattctcagatgtaggccaacaaaaaattagccaagcatgctgaaggctagaagggggaaccaaattcagagcacaagtggaccrgaacctggaaaaatgtccaaatggtcaaagcagagtcaaaggtctaaaactacaatagcagtataaacacaatatgtggatgtaagtacctgagatcaggcagaaaagagttggtgagcagtcaaaaaatctataaatccacaaaacccggggatttcataacagagaaatactcaaaaattcaggaagacattttgtaatagacacaagagagcagaattcactgaagcaaacttctgtccacccaagcagctatttgtatgattccatcaaggatagggccatccaagggtataagaaacccaaggccaaa

SEQ ID NO: 309318 - DNA, 604 bp, Homo sapiens
acttaacatgggctatgccacttaaggagaacagaatttgccaaagaaaataatgtttcgagttttgttgtgcctgatgatgtaaataaagggatggtcagcattcaattcatccttgtgctgcaggatccgtgctcctggcacctctatggaatccccaccatcttcagttatttctaagcacactttgtggayaacatttgatagggccactcccttggtctctgacattccagagaaatcagatgtgtcttcactgaagatatgtttcagccctagattttccagacaagccttgggatcaatcatcttttccaccttaaattttggaatggagagtttgaccttggcattggccatggtgctgggattagtccactgtgacagtgactctgagttgagttgtttttcaatctgaaggacaaaaatgaaaagaaattatttttatttatttccaactgtaaaagacctggctcaattgaaaacataaggtgttatgataagcccagcttcaaagcagtctgggtggaacatcaaagatggcccagaagtttttggtatgtgactcaggagacccagcagccacccagctgtgtcctcctcc

SEQ ID NO: 309319 - DNA, 604 bp, Homo sapiens
acttaacatgggctatgccacttaaggagaacagaatttgccaaagaaaataatgtttcgagttttgttgtgcctgatgatgtaaataaagggatggtcagcattcaattcatccttgtgctgcaggatccgtgctcctggcacctctatggaatccccaccatcttcagttatttctaagcacactttgtggataacatttgatagggccactcccttggtctctgacattccagagaaatcagatgtgtcttcrctgaagatatgtttcagccctagattttccagacaagccttgggatcaatcatcttttccaccttaaattttggaatggagagtttgaccttggcattggccatggtgctgggattagtccactgtgacagtgactctgagttgagttgtttttcaatctgaaggacaaaaatgaaaagaaattatttttatttatttccaactgtaaaagacctggctcaattgaaaacataaggtgttatgataagcccagcttcaaagcagtctgggtggaacatcaaagatggcccagaagtttttggtatgtgactcaggagacccagcagccacccagctgtgtcctcctcc

SEQ ID NO: 309320 - DNA, 604 bp, Homo sapiens
acttaacatgggctatgccacttaaggagaacagaatttgccaaagaaaataatgtttcgagttttgttgtgcctgatgatgtaaataaagggatggtcagcattcaattcatccttgtgctgcaggatccgtgctcctggcacctctatggaatccccaccatcttcagttatttctaagcacactttgtggataacatttgatagggccactcccttggtctctgacattccagagaaatcagatgtgtcttcactgaagatatgtttcagccctagattttccagacaagccttgggatcaatcatcttttccaccttaaattttggaatggagagtttgaccttggcattggccatggtgctgggattagtccactgtgacagtgactctgagttgagttgtttttcaatctgaaggacaaaaatgaaaagaaattatttttatttatttccaactgtaaaagacctggctcrattgaaaacataaggtgttatgataagcccagcttcaaagcagtctgggtggaacatcaaagatggcccagaagtttttggtatgtgactcaggagacccagcagccacccagctgtgtcctcctcc

SEQ ID NO: 309321 - DNA, 604 bp, Homo sapiens
acttaacatgggctatgccacttaaggagaacagaatttgccaaagaaaataatgtttcgagttttgttgtgcctgatgatgtaaataaagggatggtcagcattcaattcatccttgtgctgcaggatccgtgctcctggcacctctatggaatccccaccatcttcagttatttctaagcacactttgtggataacatttgatagggccactcccttggtctctgacattccagagaaatcagatgtgtcttcactgaagatatgtttcagccctagattttccagacaagccttgggatcaatcatcttttccaccttaaattttggaatggagagtttgaccttggcattggccatggtgctgggattagtccactgtgacagtgactctgagttgagttgtttttcaatctgaaggacaaaaatgaaaagaaattatttttatttatttccaactgtaaaagacctggctcaattgaaaacataaggtgttatgataagcccagyttcaaagcagtctgggtggaacatcaaagatggcccagaagtttttggtatgtgactcaggagacccagcagccacccagctgtgtcctcctcc

SEQ ID NO: 309322 - DNA, 598 bp, Homo sapiens
atctacccaaaagaaatgaaaacatgtgcccacacaaaacttatgcccacaaattttcatagtagttattcacaatagccaaacactggcaacaacataaatgcccatcgatgaataaacaaaataygcttttccatataatgacatactgcttgtcaatagaaagtaacaatctactgacatccccaaaacattgatgaatgtcaaaaacataccactgagcaaaagaagtcaaacacaaagagctacatgctatatcattccctttgtataaaacctgaaaattggctaggtgtgatggcttgtggctgtaatcccagcactttgggaggctgaggcaggaggattgcttgagcccaagagtttgaggttacagtgagctatgatcacaccactgagcttcaagctgggtgacagaataagatgctgtctctatatacctaatgctagatgatgagttagtgggtgcagcacaccagcatggcacatgtatacatatgtaactaacctgcacattgtgcacatgtaccctaaaacttaaagtataataataataaaaaaattaaaaaattaaaaaaaaaaaacaagaaacacacaa

SEQ ID NO: 309323 - DNA, 598 bp, Homo sapiens
atctacccaaaagaaatgaaaacatgtgcccacacaaaacttatgcccacaaattttcatagtagttattcacaatagccaaacactggcaacaacataaatgcccatcgatgaataaacaaaatacgcttttccatataatgacatactgcttgtcaatagaaagtaacaatctactgacatccccaaaacattgatgaatgtcaaaaacataycactgagcaaaagaagtcaaacacaaagagctacatgctatatcattccctttgtataaaacctgaaaattggctaggtgtgatggcttgtggctgtaatcccagcactttgggaggctgaggcaggaggattgcttgagcccaagagtttgaggttacagtgagctatgatcacaccactgagcttcaagctgggtgacagaataagatgctgtctctatatacctaatgctagatgatgagttagtgggtgcagcacaccagcatggcacatgtatacatatgtaactaacctgcacattgtgcacatgtaccctaaaacttaaagtataataataataaaaaaattaaaaaattaaaaaaaaaaaacaagaaacacacaa

SEQ ID NO: 309324 - DNA, 516 bp, Homo sapiens
gccccatcaacaaaataaatgaggaaatagctataaaaatgaatcaaatagarctataagtatccccttaaaatagatgaatcttataaacatgatgctaagccaaaaataatcaagttccaaagaagaatgacaaaaatatatggcatgtaatgaaataataaatacgtgggaataatgaacacctaatccacaatagtgggacttcctctctgaggagaggatgggggcgtgctcaaggaaggtgttatacatcagcctaaggggcatcagctgatttggtaatagtttattttgtacacttaaaggaggggttaaagtgtgtttattgcatttttccttataccttttgtacatatgtcttgagattttatcagcattttttaaaagcaagattcaaaatactctgaatttacataataatcaaacgggtacatgccaagccagtctctgggcaaactattaaatgaggagattggagtagatgacctctaagatgtattccagtgctaatat

SEQ ID NO: 309325 - DNA, 558 bp, Homo sapiens
attggcttatgtgttcctgtgttcatcttggatgtgtcatttttacccttgtggggattatgtcactttttccataagtacttggacaaggttacgcaaccagtctctactcaaaaaaatttcaagcatctgggagcaggtggcsagatggtatttggaaaaggaagagggctttcctgatagacctgaaattgctccttgtcttgaaagtctctgtttcctggtccacaggtcaagaagagcgtatttttaagataatgcaagagggctgacaacccccccgccaaatgaatttgtgcataggaaacaaggaagccccctgactgcgcccaacctcctccaactgggaagcggtggctcctcgggtccccaggaggaccatgccaattgcagtcaagatgcccacaggggaaaagaagatgttgccatcatttgttttcttcagctctttgaaaagatcaaacccaagtcgagtgctgacggcgccaagtgaatccatgatgattttagcgagacctagaatagcaagaacaacaatcaaaactgaacatttgaatt

SEQ ID NO: 309326 - DNA, 375 bp, Homo sapiens
gagaagaaggttgcagtgagctgagatcgcccactgcactccagccccatctcaaaaaataataataattaattaattaaaaataaaataaaatagcatgtatctgtacacactaagcaaaatgtgaaaaaactttttgttatctcagtgtkaaaaaaacacaaacaaacaaaatcattattcttgtataatctcaggtattttagaaatcctggtctccaaagctgtcactacaatttttccgaagaatttagtttctcaatgtgctgtattatttttaattcttttataaaattgccagaaatcttcttcaaagctcattttatgattaacgaaattggggttgttagaagatagtctttcagtagatgctga

SEQ ID NO: 309327 - DNA, 375 bp, Homo sapiens
gagaagaaggttgcagtgagctgagatcgcccactgcactccagccccatctcaaaaaataataataattaattaattaaaaataaaataaaatagcatgtatctgtacacactaagcaaaatgtgaaaaaactttttgttatctcagtgtgaaaaaaacacaaacaaacaaaatcattattcttgtataatctcaggtattttagaaatcctggtctccaaagctgtcactacaattttyccgaagaatttagtttctcaatgtgctgtattatttttaattcttttataaaattgccagaaatcttcttcaaagctcattttatgattaacgaaattggggttgttagaagatagtctttcagtagatgctga

SEQ ID NO: 309328 - DNA, 375 bp, Homo sapiens
gagaagaaggttgcagtgagctgagatcgcccactgcactccagccccatctcaaaaaataataataattaattaattaaaaataaaataaaatagcatgtatctgtacacactaagcaaaatgtgaaaaaactttttgttatctcagtgtgaaaaaaacacaaacaaacaaaatcattattcttgtataatctcaggtattttagaaatcctggtctccaaagctgtcactacaatttttccraagaatttagtttctcaatgtgctgtattatttttaattcttttataaaattgccagaaatcttcttcaaagctcattttatgattaacgaaattggggttgttagaagatagtctttcagtagatgctga

SEQ ID NO: 309329 - DNA, 375 bp, Homo sapiens
gagaagaaggttgcagtgagctgagatcgcccactgcactccagccccatctcaaaaaataataataattaattaattaaaaataaaataaaatagcatgtatctgtacacactaagcaaaatgtgaaaaaactttttgttatctcagtgtgaaaaaaacacaaacaaacaaaatcattattcttgtataatctcaggtattttagaaatcctggtctccaaagctgtcactacaatttttccgaagaatttagtttctcaatgtgctgtattatttttaattcttttataaaattgccagaaatcttcttcaaagckcattttatgattaacgaaattggggttgttagaagatagtctttcagtagatgctga

SEQ ID NO: 309330 - DNA, 609 bp, Homo sapiens
gagaaaaccttaaactgaggaagtggggagctcattctcttgttgatttaaaatcatgctctggttggctttccagcaattatatcagcctatggacttgtatgttctttctacccctgggcaccatattgctgggtcaatcttgctggtgcaagaaaaatgaagagtcaaggtctccctatttggaacataatttccagtgtctgaaagtcttccatctagtgtagttctgctgggctcaggtaaatattctcctctttgtatggcctgggtctgggacactttagacagacagtgtagataaaatatccaagaacwctgccaccaaggcttttcctgtccttggctccaccaaaagtattttattgctgatgactaaactgcctaggatggaaagaacaaatgcctgtcctcaccttctcccaagtcataattgggaagtcattcagtcttcaaatggctgcagaaaaaaagaaactaactaataagaaagacagagggtgaaggacagcagcaagtacaaaataaagagatagacgtctaaaattcaagttgagagacagcatgtgtttctgaactcagaggaaggcagcaatgggaggaaacagg

SEQ ID NO: 309331 - DNA, 515 bp, Homo sapiens
tgtgagttggacgtgtcagtggtcatggcagaacattcagctaagatagaaattaggaactcagattaccacaccagagaacagaggccctgagtccgcgagtaggaacactcagaggtcaggccttcagtrgactagagcttgagatgagcccaatggccttcttgacaagggtttcaggttttgttttggctttttgggttttttgtttgtttgttttttgagacagggtttcgctctgtcacccaggctggagtgcagtggcgccatctcagcttactgcagcctccatcccctgggttcaagtgatcttcccacctcagcctcccgagtagctgggactataggtgcacaccaccacgcccggctaatttctgtattttttgtagagtcagggtctcaatatgttgcccaggctggtctcgaactcctggactcaagtgatccacctgactcggcctcccaagaagtgctgggattgcaggcatgagccatcatgcccagccaacaagcat

SEQ ID NO: 309332 - DNA, 553 bp, Homo sapiens
ttataaatttattatttataaaacatttgcaacgtgctcagaacttctrcaacatgcttggaccttcagttttgtagttttgtgctatacttctttttaccagtcattttattttaggacaaaaaatttactttttttttctctttccctttccttttttttttttttcgtgacagtcttgctctgtcacccaggctggagtgcagcggcatgatcttggctcactgcaacctcagcctcctgggttcaagtgagtctcttgtctcagccactccagtagctgggattacaggcacgtgccaccatgcctagctgatttttgtatttttagaagagacagggttttgccatgttggccaggctggtcttgaactcctgacctcaggtgatctaccagtctcggcctcccaaagtgctggattacaggcgtgagctactgtgcctggcccccttcccattttgaaaagttctttggtttttaaccttcgttaccaaaaatgtattttcacagctataattttttaatttctttctcacatgcttactggttttt

SEQ ID NO: 309333 - DNA, 553 bp, Homo sapiens
ttataaatttattatttataaaacatttgcaacgtgctcagaacttctacaacatgcttggaccttcagttttgtagttttgtgctatacttctttttaccagtcattttattttaggacaaaaaatttactttttttttctctttccctttccttttttttttttttygtgacagtcttgctctgtcacccaggctggagtgcagcggcatgatcttggctcactgcaacctcagcctcctgggttcaagtgagtctcttgtctcagccactccagtagctgggattacaggcacgtgccaccatgcctagctgatttttgtatttttagaagagacagggttttgccatgttggccaggctggtcttgaactcctgacctcaggtgatctaccagtctcggcctcccaaagtgctggattacaggcgtgagctactgtgcctggcccccttcccattttgaaaagttctttggtttttaaccttcgttaccaaaaatgtattttcacagctataattttttaatttctttctcacatgcttactggttttt

SEQ ID NO: 309334 - DNA, 553 bp, Homo sapiens
ttataaatttattatttataaaacatttgcaacgtgctcagaacttctacaacatgcttggaccttcagttttgtagttttgtgctatacttctttttaccagtcattttattttaggacaaaaaatttactttttttttctctttccctttccttttttttttttttcgtgacagtcttgctctgtcacccaggctggagtgcagcggcatgatcttggctcactgcaacctcagcctcctgggttcaagtgagtctcttgtctcagccactccagtagctgggattacaggcacgtgccaccatgcctagctgatttttgtatttttagaagagacagggttttgccatgttggccaggctggtcttgaactcctgacctcaggtgatctaccagtctcggcctcccaaagtgctggattacaggcgtgagctactgtgcctggcccccttcccattttgaaaagttctttggtttttaaccttcrttaccaaaaatgtattttcacagctataattttttaatttctttctcacatgcttactggttttt

SEQ ID NO: 309335 - DNA, 553 bp, Homo sapiens
cacagaaaggtagtaattacaaccgtatctttaaaagggaggggaaggttagagagggggagaacgaattgggaaaacctaaccaaggcggccgactttgaaccattcagaaactcagtttcatatttaataaacacctactgaccagctactaagtgccaggcacttccacataattatttttgttctaagaaatataattaatcctcaagtgtatgctgcatggctcgaaaaaaacaattctttaaaatcatagagttcctcaaggcccaatagacytaaatctttcattacaacattgtagcctgaagagtgtagcctgcttgcttaaatgtgcaggagtttgccaaaccccagatgctcaagagaactcaatgagcaattgttgataattatgaatccatacacaaaaatggatgaagagttcacttgggtcatttaattttctctttctttatagatcctgagatcactaagcttgagttgctgtggcctttcttaaattgtagtcaacatttggattactaatttgtgccaacttcacagggaagta

SEQ ID NO: 309336 - DNA, 554 bp, Homo sapiens
acatttacaataggtacagttaatatttataacaacaaaagaggatgtacgaatcaataagaaaatataaattactcaattttaaaaattattaatggatagaaagacacagaaaaagaaataacctacaattgccaatgaatatgattagatgcttaacttataactaataaaaaatgcaaaataaaacaaggtgattccactttttgccatttttggcaaatttataggaattgatattagaagaaattgtctttcttatagagagaagatgacttccttttttctattctcatgaaagaagcacagattgactaaaaattcttctctttccattccccatccatttcamccaatgaggattggttagattggacagaacgatgatctccattggtctaaaataactaatctctttgttgagagcatttgtgtgctaggtactacatggtgtattttatatacataaattatttcattcacctatcacaataatttgttttacaaataataatagtattattttataaatgttttaactttatcacatatat

SEQ ID NO: 309337 - DNA, 493 bp, Homo sapiens
actctgactttctagggaggcaactacaacaatcaagcccgagttttaacactacctgaatgaaatcttaccatayggaatccctcttgttcatggtttgaaaaaactcataaaggttgtcacatttattaatttacacttaatgactaatcttcagaaaccatttaattaatattattcaaaaataacattaagtctttgcacttggagatgaggtttagagcctgagggagcacatttggatcagttgagagtaggtggaacaggtatgagactgtggtgggatgaaggctatggatgaggcttttctaatatataggagaaattccaccagatgcaaatttcggatctgtcttattcacttctagatgcatctaccatagtatttaataggtgctcaatgattatttgttgaatgacaactgagtgtaaaaataacatggaaataagatatgaaagtatggaagaactttaggcaccaggacttctgctg

SEQ ID NO: 309338 - DNA, 493 bp, Homo sapiens
actctgactttctagggaggcaactacaacaatcaagcccgagttttaacactacctgaatgaaatcttaccatatggaatccctcttgttcatggtttgaaaaaactcataaaggttgtcacatttattaatttacacttaatgactaatcttcagaaaccatttaattamtattattcaaaaataacattaagtctttgcacttggagatgaggtttagagcctgagggagcacatttggatcagttgagagtaggtggaacaggtatgagactgtggtgggatgaaggctatggatgaggcttttctaatatataggagaaattccaccagatgcaaatttcggatctgtcttattcacttctagatgcatctaccatagtatttaataggtgctcaatgattatttgttgaatgacaactgagtgtaaaaataacatggaaataagatatgaaagtatggaagaactttaggcaccaggacttctgctg

SEQ ID NO: 309339 - DNA, 560 bp, Homo sapiens
tttccctttatgaccatgactcttcttgaggtctccagtagctatcactggcaaccatagccaaggccctcccaaaggctcagtcagaatggatagggggtgtgaaaaaagaaagcatggcctctatattcctgtccaacttttcagtaattctaaaagtgtgctaaagaaaataaagtctattccacttccccatgtcccctgaaaaaacagaagcaaaawgcacaaaatttccatactttttcagcaaagctgaatgagcaccaggaggtgctgcatgtcccagtgatttaatccctatttctccagaagtaggaagagaaggttctagatatatgatatagggatatgggaggattgtttcttgggtctcggtcaaggaattaatgtctgttctctcaatttatcaatctattacctccactcatcaggtgccccccaccccaccccgcctgctttcaaaacaaaacaaaacaaaagcaacagcaaaatcttgtcattttttgtgggcacgtacaccaatgtctggcatggtggggtttgtctaaaatgagttatat

SEQ ID NO: 309340 - DNA, 586 bp, Homo sapiens
tagcctccagctccatccatgttgctgcaaaggacatgatcttgttctttttaatggctgcacagtattccatgctgtgtatgtaccacattttctttatttagatcatgctgctactttctagcattatgattatgagcaacttaaggccttctccaagtccttgttttcttatttgtcatattgggatagtaatgtctctcttcctgacttattaggaatgaatgagataatgggtatgtaagggcctgttacatatcaggtccttgaaaaatgtttattgtatctaaatgcaggtcatctagttggactgtaagctcctattgcatgaggcatcataagtgcagggacaatggcagtcccctttactaaaggctctaaccctaacctgtgcctttcccactgatccctttgaaaggagagaccctcgtagtggaatgcttcattytgaaggagtgataatgtagagataatcactttaatttaaagttcattgagttgatgtatatgcagtgcctgacacattataggcacttgatacataattgttcaacaaatgaatgtctaggctgttattttactgtaa

SEQ ID NO: 309341 - DNA, 559 bp, Homo sapiens
aacattatttttacggcctgttgacatagaactatttttttttttttttagcttgccttgaatagcactgtcaggctagttgacctccaaatttctttcaaaccctagtgtaattctctggcacttgaagtcacgggtactagagaggctcgctttcttcagccattcagtgatatattacatgtgtaaagtaccaaatgcagcttgacatttagtaagtgctcaagaaattctcatccccttgttagtgatttatcaagctaccttaatgtttagctacatttagtgtcagatttcatcttcgctcattgagcaatcgcaccacaccaaatttttaggcttgtagggcacagtcatctgtagttagatctttgttgaattatttaagaggataaacasatgcaaatctagattaaagacattcaaacaagtttatactcttctcaggtacccagaagcccagtgaaatttgaatattatcccccaacagtaacagatgtgacacctacttccaggaagccaggcaagaactcatcctgttctgaatatgaatggtata

SEQ ID NO: 309342 - DNA, 511 bp, Homo sapiens
tataatttttaacaatgaacactgaattggaaaaccattttaaaggatagaaacccagaggagatgtgattgaaatagaaggatatacttgttttkattaagtcaaatacttaaaaaaagtgagttagttttatgatgttttggattttctgcagatgtggcagtcatcactgggagatattaacaatgcttgtcacctcgctcagccccaaccacctggtcagatgcctgatgtatatgattgatttttttaaaatgtagatgtttgaataactttttaaactttcacatacttgacatattgtattttatcttttaatgaattatttctgaaacataagatggtataatatttagaatatctatattttaaacaatgtgagttagattttttttttttgcaccataagttggaaaacactttcgatggtattgttcacaagtatttctttgtttttagatattggttattatttagtttgctgtaacctggtttgaatatttgttccag

SEQ ID NO: 309343 - DNA, 500 bp, Homo sapiens
tggttttttatgtttgttgttgtcttacctggatgtctgcrtgtttgaagaagcagataattttccagtctttgcagactggctttctctgggaaagtccttcaccagttattccattcagagattctgggcaggccattgggcaggtttgctgctggagtcctcagtaaggctggcctggtgctgagtcaatgagtggtcaggtctgttgcttgagtcctgagagttggcccttaagtatagattcaatggggttgacctgttgattgagtccccaaagatctaactggagcccaggtccatgaggacaagcctgaagcctgcagccacagggccagcctaagcctgggtccaccagggccagccaacctggcactgggatagtctgtgagcttgagtcttcaaagaatggccaaacactgagatgggactgacaccttggtccactggtttgggcttggagcctcaatctgtgtgggtacatctgagcctttagttcc

SEQ ID NO: 309344 - DNA, 487 bp, Homo sapiens
tgccctagggttatatactttatcagtagttttcaattttttttttttctttagacagtgtcttgctctgtcattcaggctggagtgcacttgtgtgcatatagcttgctgtaacctsgaactcctaggctcaagccatcctcccacgtgagcctctggggtagctgggactacatgtgtgccaccaccttgctagttttaatttttttttgtagaggtggagccttgctattgttaccagtaaggcgtccagatccagactgcaacagagggtttatggatcttgtgcaagaaagaatttggggcgagcccatgcagtaaagtgaaagcaagtttattagagaagtagagaaacaaaagaatggctactccacagacagagcagtggtatgggttgctcaactgagtatagttatggttatttcttgattatatgctaaacaataggtggattaataatgagatttctgggaaaggggtgggcaag

SEQ ID NO: 309345 - DNA, 487 bp, Homo sapiens
tgccctagggttatatactttatcagtagttttcaattttttttttttctttagacagtgtcttgctctgtcattcaggctggagtgcacttgtgtgcatatagcttgctgtaacctcgaactcctaggctcaagccatcctcccacgtgagcctctggggtagctgggactacatgtgtgccaccaccttgctagttttaatttttttttgtagaggtggagccttgctattgttaccagwaaggcgtccagatccagactgcaacagagggtttatggatcttgtgcaagaaagaatttggggcgagcccatgcagtaaagtgaaagcaagtttattagagaagtagagaaacaaaagaatggctactccacagacagagcagtggtatgggttgctcaactgagtatagttatggttatttcttgattatatgctaaacaataggtggattaataatgagatttctgggaaaggggtgggcaag

SEQ ID NO: 309346 - DNA, 420 bp, Homo sapiens
ggaatttttacttaacacttacctttgtgtgcagggcagggaatgataaccttatggctccaggttagaaaggtttgatgggaatgaacaaggtaatgygattgccaaaaaagctaattagattcctatttacaaagcactcagagaattcatgatgtcataggtgtatttagggttcaatgtctaataatggaagtaatactaaatttcttagggtgtagaaagaccaattctgccaagtagaaccaacatcttccacagagtaaatgttcaataattatatatatacatatttttctttttattaaaaaatgttttttcgagacagagtctccctctgttggagtgcagtggcatgatctcagctcatcgcaagctctgtgatttggcttggctgtgtccccacccaaatctcatctt

SEQ ID NO: 309347 - DNA, 608 bp, Homo sapiens
agggtacagaggagtgttttgacattattaataataatcacctcctttaattgtggagtgcttcactgtgtactgagaatttttttacatttttcgttaaattctcacctcacctttgggaggtagggatcatagttccacttcattgatgaggaaaactgtagtgcagagatggcaaacactgtccaagaacatggtggtggatgggacccaaaccccaacttttgctcccatgttctctgtccactggctatggctcttgcccctgtgtacagatacaggctctggacaagttcaccaaatcccttaggcttcagccccctcatctgcagaatagtggcttggattccaccatcttcaaggtccctgccagcttttctttatttgaatttgratttattaagcagaaaaaaaagtaatgggagtttgtgggtaccaatggattaaaggggtaaaatctggaggctagtgagtaaattaggtctccaaatggctcactgtggttgtgatgagcttggaggaatgaaggcaaactttgtcacattaaactctgattcttaacagagtctcatgaaacctataggctccgaaagaagaacaagaagaaa

SEQ ID NO: 309348 - DNA, 520 bp, Homo sapiens
ttcatctctgtatccttgtggcatggcctaactcacagaagtctcccaataattgcttcttgaatgagtgaatyaattaataagtgaaaaattagctatttaagtttgtttatttatgcttgttttgtttattaggacaatattttaaggactaaaaaatgatattaatcattacagtgaattcatgtttgcagtttaagtatttaagggacttaaaagtctaaaattaaacaataatattttgcctctggactataaatgcttttgaatatgaacagtttagagacctcagaacaagaaaagatatgagagaaatacagccaatcaaacatttcaatgggtacaggagttagcagcctacttaaaatatggaaagaatacaggattccatcaggtaatatgattaaaagaagcaaatggaatatcaacaaagtgtctgtcaagccatatgaaaagatgttaaaatgttttaaagggctaacaattattaaaccaaccaaaatgagactcttagtaggag

SEQ ID NO: 309349 - DNA, 520 bp, Homo sapiens
ttcatctctgtatccttgtggcatggcctaactcacagaagtctcccaataattgcttcttgaatgagtgaatcaattaataagtgaaaaattagctatttaagtttgtttatttatgcttgttttktttattaggacaatattttaaggactaaaaaatgatattaatcattacagtgaattcatgtttgcagtttaagtatttaagggacttaaaagtctaaaattaaacaataatattttgcctctggactataaatgcttttgaatatgaacagtttagagacctcagaacaagaaaagatatgagagaaatacagccaatcaaacatttcaatgggtacaggagttagcagcctacttaaaatatggaaagaatacaggattccatcaggtaatatgattaaaagaagcaaatggaatatcaacaaagtgtctgtcaagccatatgaaaagatgttaaaatgttttaaagggctaacaattattaaaccaaccaaaatgagactcttagtaggag

SEQ ID NO: 309350 - DNA, 520 bp, Homo sapiens
ttcatctctgtatccttgtggcatggcctaactcacagaagtctcccaataattgcttcttgaatgagtgaatcaattaataagtgaaaaattagctatttaagtttgtttatttatgcttgttttgtttattaggacaatattttaaggactaaaaaatgatattaatcattacagtgaattcatgtttgcagtttaagtatttaagggacttaaaagtctaaaattaaacaataatattttgcctctggactataaatgcttttgaatatgaacagtttagwgacctcagaacaagaaaagatatgagagaaatacagccaatcaaacatttcaatgggtacaggagttagcagcctacttaaaatatggaaagaatacaggattccatcaggtaatatgattaaaagaagcaaatggaatatcaacaaagtgtctgtcaagccatatgaaaagatgttaaaatgttttaaagggctaacaattattaaaccaaccaaaatgagactcttagtaggag

SEQ ID NO: 309351 - DNA, 559 bp, Homo sapiens
ggggttgttgggattagaatactgaatttagatttaaaatggaaacacagaggccctggcaagatgctgtcaactgctcttctgctgggctcctaaattttaccactaataaccaggataaaactattgcacaagatcctcatgaaatccttacagtccatttttttctttgctgtgcatccagggtgtcacgagggtgtgatttttaaatttggtactctgctccctcattatcacatctgcatcccaaatcccacattttccactcggcaccacctgaatggcagattcttcattcttccttctcaagtaaagtgcttgagaagtgctgcacagcctggcactgttggtaatggtgagaactggagagctctgacctgtctaaagcagggagtagggagatgtgattcttccttctgagygggcaggcattcgtgtagagggcctgttttagtgctgaggctgatacatcagactttgttactgtaactctggagcatagaggtcagggtgttttgaaaccactcctgatgttgaccatttgtaaatcagtgaagaa

SEQ ID NO: 309352 - DNA, 617 bp, Homo sapiens
agggtctactgcggcatggagaagagggtgtttgtgagaagaatgttaaagaacatgtaggagtttttagttatttgaaaggagatgctatggtctgaatgtttattaccctcccacccccaccaattcatatgttgaaacctaatccccagcgtgatggtgttagtaggtgaagyctttgggaagtgattaggtcactcatggatgggttagtgcccttataaaagagacctcagagagctgccttgcttgcttgcccatgtgggaacacaggaagaagacagtcatttatgaagagagaagtgggccctcaccagacaccaagtctgctggtaccttgatcttaaacttttcacaacagaactctgtgaaataacttcctgttattataagctacccagtctatggtattctgatatagcagcccagaagaactaagacaggaggtgaagatgtttcatttgatgattaactgggtgtggacaatcagggaagagtcagggaatacaaggaatatgcccaagcttttcagctgatgtgaagagctgtcatttatataaatggagatagagaggagaaaaggaagaaccttctccccgatctctgccattggaaac

SEQ ID NO: 309353 - DNA, 623 bp, Homo sapiens
cagtggggagcaaaacaaagattctaccttcatagatcttgctagtgggaggattagctagtcattgtgtagctatttggcagagccatctcagcaaattaggaaaatgtttcaggatctaaatctgagctctagtgaggctgaaggagagagaatcagcctttaggacagttacatgcaaccaastagatagttaccaaaaaaaaaaaaatatatgcaccgtgagaatcagtagattcttaatggcttattaggcaaatgtggtggctcctttgaaatgttcactgtgacttcaggatcacccttaccaattttgcacatttttccatctttgactcacagcactgtcctctgctctcaccttcaaatgttcatacattgctaggggtgcaaaacaatggactggttttctactctgaagatcttccggcctctgcttattccctcccctggtgtctggccttgtggtcaccttacttctctgaggcttccatacattataagttggaaaaggaaattcataaattaacattcaaactagtctttttttttcctaccacattcgcttctttcataaattcttaggtggagataggattttaaaaagttttcagctcacacca

SEQ ID NO: 309354 - DNA, 619 bp, Homo sapiens
tggtttaactgcattttctgaaaagattcattgtctatgtgctaaagagaactggtcaatttatttatttttccttttccaaataacaagtcttttgatggacagaaagtaaggttagtttcttaacatggaagcatgttatgtctccctatccagtgaatattttcttactgataaatgtaggaatgcacagttttaaaagaacagaacaatgtatagcaagaaaaaatttgtcagatctaactattcactaatggaccttaatattgtcttgatagatgacatgaaagaatttttggccaggcaatggagatagacagtaccattagcygaaaacaataagacaatgacatgccatactagaaatattaaatcattcttcaagtcctcaaacagaatttgccaaccataatctctatattattataaatgaattaattaaaacatttccttttacttttgccttattgatgggcatactcatgaaatatttactccaaaaattacttttattacttttgctattgtgattaaccaaactgctgcttaattaataatgttgccctcatgagaaactgtctagacatcatgttgatcatcaatttgtagatggctgact

SEQ ID NO: 309355 - DNA, 518 bp, Homo sapiens
atgtgcagggaaactcccctttataaaaccagcagatctcatgagacttattcactatcacaagaacagcatggaaaagtcccactcccatgattcagttgtctcccatcaggtccctcccatgacatgtgagaattattggagctacaattcaagatgagatttgggtggggacacagccaaaccatatcacacaggttctacaatactgcttgttagttattttatcctcaagttcaaaatgactctctgaaatccttcaccaagtctgcctatgggaggcagacagagactgacacactgctctgtgcagagctttattctaatgaaagtcattaagttgaacatttgtgaatagaaagcttctatatgtaacgtatttcagttaaggtattaagtaacttctaagagaaagcatagctacttaatgtcagaaactttgcagggattttaccctacttayaaattaacaaattagtctattactgttccatgggtgatgggtcagaaacagagga

SEQ ID NO: 309356 - DNA, 377 bp, Homo sapiens
ctctgaaatccttcaccaagtctgcctatgggaggcagacagagactgacacactgctctgtgcagagctttattctaatgaaagtcattaagttgaacatttgtgaatagaaagcttctatatgtaacgtatttcagttaaggtattaagtaacttctaagagaaagcatagctacttaatgtcagaaactttgcagggattttaccctacttataaattaacaaattagtctattactgttccatgggtgmtgggtcagaaacagaggacttttattcacagtgcagagggcaacacaagtttcatatctcttttctccatttatcatgcctcttgggccttgatggatgctcgcacacttgtgggttgtgttac

SEQ ID NO: 309357 - DNA, 617 bp, Homo sapiens
tgctaagaagaatgtttcatcaaatgcttctgaatgaataaatgagaagaattgcattgcaaagtgaggtaagggargaaaaccagggtgtctgaaatacagtggatgaatttcagaactccagcatggtagcaattctgaagttcccttgtgggtcaccatgttgctcagccactgtaaactccagctctgcttgtgtgcatcagagttattgccatgattcaataagttctccagatttttgctgccttgctttgatattgtgtggatcatgcactaaagatgagaacaagccaatgattatataataccatcttcaacagatggatgaagtataaacatgtggaaagaaaaaggatagtagagtcttttcatttatgggttaactttggttgattttacatgaaaccaaacacttgaaagatatcaaaaatgctacggatatttcagaatgcatactgcttccttcactggggagagagaaataatatgataggataagacttttccagtcaccctgttgaactgatacagcagttttcatcaggcaggcagtgttccaaccctcatagcaagcctgaattcagcataccctcttgtcctaagtcaggatgata

SEQ ID NO: 309358 - DNA, 617 bp, Homo sapiens
tgctaagaagaatgtttcatcaaatgcttctgaatgaataaatgagaagaattgcattgcaaagtgaggtaagggaggaaaaccagggtgtctgaaatacagtggatgaatttcagaactccagcatggtagcaattctgaagttcccttgtgggtcaccatgttgctcagccactgtaaactccagctctgcttgtgtgcatcagagytattgccatgattcaataagttctccagatttttgctgccttgctttgatattgtgtggatcatgcactaaagatgagaacaagccaatgattatataataccatcttcaacagatggatgaagtataaacatgtggaaagaaaaaggatagtagagtcttttcatttatgggttaactttggttgattttacatgaaaccaaacacttgaaagatatcaaaaatgctacggatatttcagaatgcatactgcttccttcactggggagagagaaataatatgataggataagacttttccagtcaccctgttgaactgatacagcagttttcatcaggcaggcagtgttccaaccctcatagcaagcctgaattcagcataccctcttgtcctaagtcaggatgata

SEQ ID NO: 309359 - DNA, 617 bp, Homo sapiens
tgctaagaagaatgtttcatcaaatgcttctgaatgaataaatgagaagaattgcattgcaaagtgaggtaagggaggaaaaccagggtgtctgaaatacagtggatgaatttcagaactccagcatggtagcaattctgaagttcccttgtgggtcaccatgttgctcagccactgtaaactccagctctgcttgtgtgcatcagagttattgccatgattcaataagttctccagatttttgctgccttgctttgatattgtgtgsatcatgcactaaagatgagaacaagccaatgattatataataccatcttcaacagatggatgaagtataaacatgtggaaagaaaaaggatagtagagtcttttcatttatgggttaactttggttgattttacatgaaaccaaacacttgaaagatatcaaaaatgctacggatatttcagaatgcatactgcttccttcactggggagagagaaataatatgataggataagacttttccagtcaccctgttgaactgatacagcagttttcatcaggcaggcagtgttccaaccctcatagcaagcctgaattcagcataccctcttgtcctaagtcaggatgata

SEQ ID NO: 309360 - DNA, 511 bp, Homo sapiens
tgtactttttaaatggtggcttaagcttttaaaagcatttttctgcagcacaagaattacaagatatgagtcaaaagaacaacatagctccaggatgcttgtgtctaataatctagrgttcttagactttacgtttggccttattgtaactttttcaattcagtgagaaacaaccatcaatttttcataataatatgttcaaatcaatagaaatgagaactttttttcatgaatggtacccattttctttatttcttttttttttttttaatttcagtagctttaggggtataagtggttttggttacatggatgaatcgcataatagtgaagtctgaaattttagtgtacctgtcacctgagtagtgtacattgtacccaatatgtaattttaaaaattattttatatctctttgtgggtatattgaaggtgtatgtatttgtggggtacatgagatgttttgatacaggcatggaatgcataataatcccatcatgtaaaatggggtat

SEQ ID NO: 309361 - DNA, 511 bp, Homo sapiens
tgtactttttaaatggtggcttaagcttttaaaagcatttttctgcagcacaagaattacaagatatgagtcaaaagaacaacatagctccaggatgcttgtgtctaataatctagggttcttagactttacgtttggccttattgtaactttttcaattcagtgagmaacaaccatcaatttttcataataatatgttcaaatcaatagaaatgagaactttttttcatgaatggtacccattttctttatttcttttttttttttttaatttcagtagctttaggggtataagtggttttggttacatggatgaatcgcataatagtgaagtctgaaattttagtgtacctgtcacctgagtagtgtacattgtacccaatatgtaattttaaaaattattttatatctctttgtgggtatattgaaggtgtatgtatttgtggggtacatgagatgttttgatacaggcatggaatgcataataatcccatcatgtaaaatggggtat

SEQ ID NO: 309362 - DNA, 586 bp, Homo sapiens
atgtttgtatctgtattttcaaacatgtgatttcagcatttcactagggtactaataatcacagcctggaaaatataaggatataactaattcatacttcattagattcagaaacattttctcacatyagttaataagacaacaattttaaaaatgtctgcctttttctccacatggtgctaatgtgaagtatttaacactatgatggaagcagatttagaaagagattttgcagatgtcatttgaaatgttaacctatattaggatctgactatgaaataatattgtctaaaggacaatgctccttcctttcctttttatttctgtttattatttttttctaatttggaaagattttacattatataatacatacagatacctctactcaggaaagtaattaaatggttgtataaaaaggaactattaagtatatctaatccttgctaaaatgaattaaggcagccttaggaatctattgtatctcctatgtcacccatcttcatcagccctagttttgttgtttgtgccattgctaccaattctaatcctacaaatagcaggagtttaagccttattccactgg

SEQ ID NO: 309363 - DNA, 586 bp, Homo sapiens
atgtttgtatctgtattttcaaacatgtgatttcagcatttcactagggtactaataatcacagcctggaaaatataaggatataactaattcatacttcattagattcagaaacattttctcacattagttaataagacracaattttaaaaatgtctgcctttttctccacatggtgctaatgtgaagtatttaacactatgatggaagcagatttagaaagagattttgcagatgtcatttgaaatgttaacctatattaggatctgactatgaaataatattgtctaaaggacaatgctccttcctttcctttttatttctgtttattatttttttctaatttggaaagattttacattatataatacatacagatacctctactcaggaaagtaattaaatggttgtataaaaaggaactattaagtatatctaatccttgctaaaatgaattaaggcagccttaggaatctattgtatctcctatgtcacccatcttcatcagccctagttttgttgtttgtgccattgctaccaattctaatcctacaaatagcaggagtttaagccttattccactgg

SEQ ID NO: 309364 - DNA, 647 bp, Homo sapiens
ttttgtggtggctggtactggccttttgtttctatatttagtactcccttaaggacctttcacaaagtaggactagtggtaacaaattcccttagcattggcttgtctctaaagatcttatgtctccttcacttatcaagtttagtttggctggctatgaaattattagttagaatttcttttctgaatataggcccccatctcttctggttgtagggtttctgctgaaaggtctgctgttagcctgatgatattccctttataggtgacctacccattctctccagctgccttcaayattttttctttcacattgaccttggagaatttgatgactatgtgtcttggggatggtcatcttgtatagtatctttcaggggttctctgcatttcttgtatttgaatgttctttctagtgaggttggagacatttttgtggtcagtattctcaaatatgttttccaagtcgcttgctccttctctctctttcagggatgtcagtaagttgtagttttggtctctttatataatcccatatttctcagtggctttgtttattcttttttattcttttttctttatttttgtctgactgagttgattcaatgaaacagtctttgagctatgagagtctttcctcaccttgg

SEQ ID NO: 309365 - DNA, 570 bp, Homo sapiens
ccttaaaccgttgcttatgtcccgggggtggttggggytgtgctacccccttcctgaaataactttgtgatcccgaagagatgtccaagcagggagatgatgcccaagtgccagctttatcactatttatggttgttttctttatgcttcaggaagtttaaaatctcctccacctttcagaaggcatgtgaaattgaagagaagcacatgggaccaatgaaatgctcaatgttaagccagttccaactggaagaatagagtatgcagtccaagagcctgcattgtccatatcagagtttaccaacattttttacttctttctgctcagcaatactatgcaaaatggatgcttcccactctgtcctgtccccctcagtctcaggtacttatgtgaagaactgatatagttcaattgtccttgagggcaacttgttttgacaaacactgagggcaatccccaagagtctggagggtctggaagtctccccaactctgtctcggatcctcattcttcctcattgtggggagtgagaagggcggcaataagagaccagtggtcttcaaactgga

SEQ ID NO: 309366 - DNA, 549 bp, Homo sapiens
actagcaactgctccagtgaaggtagcaggggagtgaagtggactctgtgtgagactttggttatggttttgtttagtgyactgcttttcttgaatgctggttgtgctggcagtaaagttgtcacatggaaagactcaggacctctggttagccaggatgttacaggtggtgaaattggctgttgttttctcctttcttggggcagtgatgttcttttatgagttgttcttttatggtttgagttggttagcctccagccaggaggtgatgctttcaagacggcatcagctgtagtagtatagggaggatacaaacttcccctacggtcacctggaggagcactcagctttctcaggttgagggcagggccgttagagctcccaagatattatgtcttttgtctttggctaccagggtgggtagagaaagaccattaggtggtggcagggttaggcgtgtctgagctcagcctctctttggacaggcctttccatggctgctgtggggtatggagttgtggttctcaggccaagggagttatgttccca

SEQ ID NO: 309367 - DNA, 549 bp, Homo sapiens
actagcaactgctccagtgaaggtagcaggggagtgaagtggactctgtgtgagactttggttatggttttgtttagtgcactgcttttcttgaatgctggttgtgctggcagtaaagttgtcacatggaaagactcaggacctctggttagccaggatgttacaggtggtgaaattggctgttgttttctcctttcttggggcagtgatgttcttttatgagttgttcttttatggtttgagttggttagcctccagccaggaggtgatgctttcaagacggcatcagctgtagtagtatagggaggatacaaacttcccctacggtcacctggaggagcactcagctttctcaggttgagggcagggccgttagagctcccaagatattatrtcttttgtctttggctaccagggtgggtagagaaagaccattaggtggtggcagggttaggcgtgtctgagctcagcctctctttggacaggcctttccatggctgctgtggggtatggagttgtggttctcaggccaagggagttatgttccca

SEQ ID NO: 309368 - DNA, 530 bp, Homo sapiens
ttttccaattgttttcagtgttattcctttagattcactgatacgcttattctggttattctgtgaggatctcctggactgtgcttgctttagtatttagtttttgattcttgagtcagggaaccaggctgtagagtccttacaggggtgcatttactactgctgcagcttctgtcattgctttttgttgcaagagttgtactgtcttaataaagatgtctgtaacacaccagctctcaccattccagccctcccctaacagataaaaacttttttgtgttgattttctcacatttggaaaaaataagttatttttcttactttagtctgcattttttttttaagagacagggtcctgctttgttgtccaggctggactgcagtggcatcatcacagctcactgcagccttaatctcctaggcccaagagatcctcccacctcagccttccaagcagcaagcaccagcacaccctgctacttttctttctttccttttttttaragagaaggtctcaccatgtcgcccag

SEQ ID NO: 309369 - DNA, 530 bp, Homo sapiens
ttttccaattgttttcagtgttattcctttagattcactgatacgcttattctggttattctgtgaggatctcctggactgtgcttgctttagtatttagtttttgattcttgagtcagggaaccaggctgtagagtccttacaggggtgcatttactactgctgcagcttctgtcattgctttttgttgcaagagttgtactgtcttaataaagatgtctgtaacacaccagctctcaccattccagccctcccctaacagataaaaacttttttgtgttgattttctcacatttggaaaaaataagttatttttcttactttagtctgcattttttttttaagagacagggtcctgctttgttgtccaggctggactgcagtggcatcatcacagctcactgcagccttaatctcctaggcccaagagatcctcccacctcagccttccaagcagcaagcaccagcacaccctgctacttttctttctttccttttttttagagakaaggtctcaccatgtcgcccag

SEQ ID NO: 309370 - DNA, 489 bp, Homo sapiens
atgttttcaaggttcatccacattgtaccatgtgtcggtagtttattcatttttacagctgaataatttttcattgtatgtttatatcacaatttgctcatccattcatcatagacatttgggttgcttccaccttttggctattatgaatgtacaagtatttgagtacctcttttcagttctttgtggcatatacctaggagtagaattgctgggtcatatggtaactctrtgtttaactttttgaggaatcaccaaagcactgttttccacagagactggaccattttacaaccccaccagtgttccaatctctgcacatcctcgccaacatttttttaaatagccatcctagtggttataaagtgatattttactgtggttttaatctgcatttacctaatgactaatgatgttgagcagctttttatgtgcttcttggccatctgtatgtcttctctggagaaggtctattcaaatcctttgctc

SEQ ID NO: 309371 - DNA, 578 bp, Homo sapiens
gcatcaattgaaaggatcaggtggtgtttttccctctttctattaatatggtgtattacatcgatccgttttagtatgtcaaaccacccttgcactcctgggataaaccccatctggtcatggtgtataatccttttaatatacttctgggttcagtttgccagtatttcattcaggatttttgcttctatattgtaagggatattggtctatagtgttcttgtaatatctttgtcaggcttcatcagtataatgctggcctcataaaataaattagrtgtattccctcctcttctatatttggaagagattaagagcaactgatgttatgcttctttaaatgtttggtagaatttaccagtagagcgatctggtcctgagcctttcttttgggaggtttttgattactgattctccttacttgttttaagtctattcagactttctgtttcttcttgagacagtttggtagttttgtgtgtctaggaatttgtctaattcttctaggttatctaacctgttggcttacaagtgatcatagtattctcttataatctttttcatttctgtaaggtcag

SEQ ID NO: 309372 - DNA, 548 bp, Homo sapiens
agacagcagcagccctatgacaccacaggccaggcagccactttgggaagccactgactcacatttcctggctccctctgggtccctggggaccctgccacaccaggaaacctggatgaggcagtggatgaggggtatgtcccgctcataaagcagacagaggaaccgcatgggaagtgaggcgagcatttccaaatgaaatctccaccctcratggcaggcctgggttcctgtgaaaagtcaacggcccctgagggggctgctggagcagcaggacagcctagcagtggcctccacccctgcccacagccctgagatccagccgagggctgccatggacatgtacgtgctgcacacaggctgagagaggctggcactggcgcaggacaagtggtcctgctggccccttcctcccagcacagaaaggacttcccactggacagatggtgcgtggctggcaggaaagctccatcagctctgactctgcaactccagcccttgtgatccatccacggtggtattgtcttggtcacttagcactgacaccc

SEQ ID NO: 309373 - DNA, 547 bp, Homo sapiens
ccccttattttcagtttcggtgtttagggacaggtctctatgtcctcctaccaggacactgatcaggtggcaagaaccctgtgtcaagaggcaggaaacctaggctctcgttctttcccaccaaagagctgtgtcgttttagcaaagcaactcagtggcctcatctatgaaatgggcataataacatgttccccctttaggcagaggactacaccagatgatctcttaagatacatgttaccatttcctgctaatctatgagttcagggtgccaattagcaaacctgggagaggaggaagctggaggaaatctctttacttcttttatctccaagaaagatacacactctttgagtggcttcctgcagacagtgccttacctttgccagttctgtgtgtrggaatttgaacttggagttggaagaaccatgccaaagcagagaaagaagaggtttctgggcagacggaggctttgaaacatcaatcgtggccggtcgcgttggctcacacctgtcatcccagcactttgggaggctgaggcgggggg

SEQ ID NO: 309374 - DNA, 547 bp, Homo sapiens
ccccttattttcagtttcggtgtttagggacaggtctctatgtcctcctaccaggacactgatcaggtggcaagaaccctgtgtcaagaggcaggaaacctaggctctcgttctttcccaccaaagagctgtgtcgttttagcaaagcaactcagtggcctcatctatgaaatgggcataataacatgttccccctttaggcagaggactacaccagatgatctcttaagatacatgttaccatttcctgctaatctatgagttcagggtgccaattagcaaacctgggagaggaggaagctggaggaaatctctttacttcttttatctccaagaaagatacacactctttgagtggcttcctgcagacagtgccttacctttgccagttctgtgtgtaggaatttgaacttggagttggaagaaccatgccaaagcagagaaagaagaggtttctgggcagacggaggctttkaaacatcaatcgtggccggtcgcgttggctcacacctgtcatcccagcactttgggaggctgaggcgggggg

SEQ ID NO: 309375 - DNA, 560 bp, Homo sapiens
cacttccaacaatgaaactaccaagtaaattcaaaatttctccacagtcttttttttctttctatctaccaaggctgtacaatcagagcacggggttcagaggctaatttagttatttattatttctgtgtggtgatgtaatcatttgatgtacagttagatttatttgtttctgtttatattcagttttaggtgtctttgttctgctttgttcctttacatattaytgatttcttatagaagtctgggattttggcttttctggaagactggggtcatggccagaatgaacatacaaataaataatgaaacaaatcagcaagcatatgtgctccagatgtctctgcataaattgtggttattaatacttcacaggactgttggtgcaaatcagatcatatgtgaggtaattcagtagggaaaccaagcctgaagggagaggttaacctgaaatgtcagtgaggcagcaatgaaaccaggattgaaagtcacatttgtcctagatccaaagcttgtgactttaaataccatgatatatgcaagaaataaccaaagttatt

SEQ ID NO: 309376 - DNA, 610 bp, Homo sapiens
acaaccatcgaattgtacacttttgttaggtaaattgcatggtatgtaaatcatatttcaataaagcattatatagtttcaaaattatatattttcaaaattaagaatgaaagaagaggctgggcacagtggctcacacctgtaatcccagcactttgggaggccgaggcgggtggataatgaagtcaggaattcgagaccagcctggccaagatggtgaaacccatctctactaaaaaatacaaaaattagctgggcgcagtggcaggttcctgtaatcccagctactcatgaggctgaggcaggagaatcgcttgaacctgggaggcagaggttgcagtgagccaagatcgcaccattgcactccagcctgggtgacaaagcaagactccatctcacaaaaaaaaaaaaagaatgaaagaagaaatctatacaactataattatagtaggaaacactaatacatgtctctcagtaccaagctatgtaacraatagatcagcaaaatcatagagaaattaaaattatatacaacagaacaatgaagataaaagaaaaccttgataaaaataaaattttagtgaaaaactttaatgtgtccttttgagaa

SEQ ID NO: 309377 - DNA, 563 bp, Homo sapiens
tatccatgtcctgtagcttttctggtttgtaaacgcattgttcatagtagtctcaaatgagactactatgtattgtatttttgtgatgtacattgtagtgtcttcatttccatttctaactgagctcatttgactcttctcttttcttgtttaatataactagtggtctatcaattttatttatagtttcacagaaccaggtttttgcttcattgatcttttgtatcttttgtggtctcaattttacttagttctgccctgatctttgttatttcttttcttttgctagctttgggttttttgaaaacttttaaaatttctgtcttgatttcatattaaccccaaaaccactcaggagtagattatttaatttccatgtatttgtatagttttgagggttccttttggtattgatttttttcaggagttctttactctgttgtggtctgagaagatacttgatmtgatttcaacttttacaaatttattgagacttgttttgtggcctagaatatgatttatcttggcaaatgtttcatgtgctgatgagagtaatgtacatt

SEQ ID NO: 309378 - DNA, 505 bp, Homo sapiens
ttttgctttttcttctccctcaggaacacctataattcttagttttggtattttatataatctcttattccttggagactttgctcattgcttttatttttttttctttatttttatctgactgggttaattgaaaagccttgtytttgagctttggaattctttcttctacttgttgtagtctattgttaaaacttcccactgcattttgtagttccccaaatgtgtctttcatttccagaagttcttattggttttctttaaaacatttacctctttagataatttttcaaaaaatttctttatgttggttttcatctttctcttgtatcttcttgaataacctaataaccaatcttttagattatttagctggtatttcaaagattctgtcattgcttgtatccacttgctggagagttagtgtgatttttggggtgttataagatgctattttttcatattggtggaattacttttctattttcttctaatttaggtaaac

SEQ ID NO: 309379 - DNA, 505 bp, Homo sapiens
ttttgctttttcttctccctcaggaacacctataattcttagttttggtattttatataatctcttattccttggagactttgctcattgcttttatttttttttctttatttttatctgactgggttaattgaaaagccttgtctttgagctttggaattctttcttctacttgttgtagtctattgttaaaacttcccactgcattttgtagttccccaaatgtgtctttcatttccagaagttcttattggttttctttaaaacatttacctctttagataatttttcaaaaaatttctttatgttggttttcatctttctcttgtatcttcttgaataacctaataaccaatcttttagattmtttagctggtatttcaaagattctgtcattgcttgtatccacttgctggagagttagtgtgatttttggggtgttataagatgctattttttcatattggtggaattacttttctattttcttctaatttaggtaaac

SEQ ID NO: 309380 - DNA, 533 bp, Homo sapiens
tgactttaatgtttattgtttattgtcacctatctttggctctgagcactttcaatggtgaagaatctgtatgaattcctttgtgatacagtttggctctgtgttcccatccaagtctcgtgtcaaagaattacaatccccattgttggaaatggggcctggtgggaggtgattggatcatgggggcagtttctaatggtttagcactacccccctagtgctgtcttgtgatagagttctcatgagatcyggctgtttaaaagtgtggtatctcccctccccctttctcctgctccagccatgtaagatgtgcctgctgcccctttgtcttctgccatgattggaaatttcctgaggcctccttagccatgcttcctgtagagcctgcagaaccataagccaataaacctcttttctttataaattacccagtctcagatatttatttatagcagtgtgagaaaagactgatacacttaattatagtgaatctttgtgtgatgactttctcagatgctgtagtagaaggtgtg

SEQ ID NO: 309381 - DNA, 533 bp, Homo sapiens
tgactttaatgtttattgtttattgtcacctatctttggctctgagcactttcaatggtgaagaatctgtatgaattcctttgtgatacagtttggctctgtgttcccatccaagtctcgtgtcaaagaattacaatccccattgttggaaatggggcctggtgggaggtgattggatcatgggggcagtttctaatggtttagcactacccccctagtgctgtcttgtgatagagttctcatgagatctggctgtttaaaagtgtggtatctcccctccccctttctcctgctccagccatgtaagatgtgcctgctgcccctttgtcttctgccatgattggaaatttcctgaggcctccttagccatgcttcctgtagagcctgcagaaccataagccaataaacctcttttctttataaattacccagtctcagatatttmtttatagcagtgtgagaaaagactgatacacttaattatagtgaatctttgtgtgatgactttctcagatgctgtagtagaaggtgtg

SEQ ID NO: 309382 - DNA, 620 bp, Homo sapiens
ttgatgaagagttgcagactttccttactgagcacaactttgggcctatgcctcatctgaaagaaacttctcataagtggaaaatgcctggactcaaggcctgcagtctggtttctttcgtcccacagggtgttcccttaatgtgttgtcctcacccttccttaggagtgactatccctgagggccagcctactactaatcctgctccccctcttggtctagccatctggtggggctgcaacactgtaggctggtgctggggaatgtctgtaagggatccagtgatgtgatctgatctgtcctctaggctcccagcagtgggtaccagcaccagctctgatgaggrtgggatgggaatgatgttgacactgagatttcctttgttataaatacccttagtgtgttggctttcttaagtgccagctgtagcagtaatgtattgggcatgtggacagactcatgacctcctggttagccagggtgatgaaagcaatgctaatagctgaggtggtgcaaaagctttctccttcctgagtgctgtattattgtgcttgcagatgatatgatgggctgtgccagttggcctccagccagtaggtggcacttgcaaaagagcacca

SEQ ID NO: 309383 - DNA, 591 bp, Homo sapiens
gtgatctggtgtttcaggcagtgggagggaatgtgacagtaccaaatgtccctgttcattatgttatgctaccagggtaggttgagagtgaaagccagtggaagctaggtccgctatgtttgtgctctttgtgctctggctccycacatgtgggcacaagtagtggccccaatggggatcagagatcatttgcctttccaccgtggtaacgttccagggaggagcgcagctgcctttgcgtcacacaaaagaatctacatggggagtagggagtggcaggcagcagtaagccccactcagctcccatacacttggcaaggctgatctcacattccagtgttctgctaatagcagctagctaggttcgaggcagcctgtgctcagaactcaaaactgctccaggccataagccttcctgagggagacagaaaccattgctctcaggccatgcccctccttgtctgccagtgaagcaggagtatccagctcctgcgcccatggctgtagcacgtgtccttcttatgcctcagttctggccaatggggctcatccccactaaaggttgtatttcaaattccaattaggggcttc

SEQ ID NO: 309384 - DNA, 528 bp, Homo sapiens
aagttgcttatcagttcaagaagtttgtgggctgagatgatgagggttttttttttctttttaaacagagtcttgatctattgcccaggctggtacactctcagctcactgaaacctccacctcctgggttcaagtgattttcctgcctcagcctcccaatatctgggactacaggtgtgcactaccacacctggctaatttttgtatttttagtagagtcagggtttcaccatgttggccagtctggtctcgaactcctgacctcaggtgatctgcctatctcagcctcycaaagtgctgggattacaggtatgagtcaccgcacccagccagggttttctaaatataaaatcatgtcatctgcaaacagagacaacttgacttcctctcttcttgtttgaataccctttatttctttctcttgcctgattgccctggccagaacttctaatactatgttgaataggagtggtgagagagggcatccttgtcttgtaccagtttttaaaggaatgcttctagctttt

SEQ ID NO: 309385 - DNA, 572 bp, Homo sapiens
agaagcttattatcttaattcagtaggtttatgtagaccttaacaaaaggaaataaatatcttgtaatgagtattgaccaaattctctcagtgcatggtcactctgagtctgtttgccttcttccaatttcatttctttcccttgtgtgattggtttaatttgtgtatgaatcatgtcttgattttaaatgttgtcttaccaattatttgctttttggcttaaggagtttgttattttctaaaaaggaaaggatasagagagtcttacaaattgtgtttttatcatagtatttacacatgtaaacccaaatttattttaataggatatttgaaggatctgtatttatctatttatatctatgtatttatctaccaatctactattgatttcatagggcaggagagagggagagagatgaccctgtcattagattctgaatttaaaagtatcacataatagaaatctggagtaggtataattacccttattgtatctttttaaaatttgccacaactaatgaaaatgtcttttacttccttaacaaaagaatatgcctccaaaggcattgttg

SEQ ID NO: 309386 - DNA, 479 bp, Homo sapiens
ttttggccattagataaggtattcagctactttgtgtgattataaatccacaaatcttataaaccatgtaaagatgttacataacatcaagaaaacatcttaaaaacctaaaataacaaagtttattatggttttgctcttccagagtgactaatagaaatgaatcatgggcatattaaagtcaagcctatcagtttctgccttggtattttatactagttcaacctctgatatattatggattaaggttacgaaaatgttaagtgggggcatttacttttagtaatccttattctctctctctgtctttattcctrtatcagaacctcatgccacaaaaatctgctgtaagactctcccagataaattgtactatgtacattttaaatacctaatgtaaaattattaattcaaaagaacctctcttgattgtaaggacctgcataggagtggaaagtaacctttttggaggaacatgg

SEQ ID NO: 309387 - DNA, 537 bp, Homo sapiens
atacatccaactgcctgctagacattttcacctggatttatgtaaaattcaattataagaagtagaccttatcacgtcccccaggccattttcacttcctatgttttttatatcagttaatagtctccaaaactgaaatatgtggtcattcttaaatctcaccactctctcggttcccatattaaagcagttgctgcatcctgttaatttaacttatctttttgtctaatatgtcccctctaaatcttccttatttcaatgatcagttttcccatttgcagaatggaatgatagtgcataattcttaagcattatgatatcaactttacagataaagaaattaaagcatagagaagtcagaacgttttgcaaggttacataacaagagaattggartttaaatgtggggttcagttttttctactttaggcaagttccttttatcttttctggattactcaaatagcctcctaactattttccctgataattaagtttggctcttcaagtctatagtcctcaatgtcacatgatctt

SEQ ID NO: 309388 - DNA, 608 bp, Homo sapiens
aaccatgccccactaatttttgtatttttagtagggatggggtttcaccatgttggccaggctggtcttgaactcctgacctcaggtgatctgcccgtctcagcctcccaaagtgctgggattacaggcgtgagacactgtgcctggcctacattttaaattgaattgttaggtatttcttttggcctagggtgctattaaatattaccgagaaaacctgaaaaccaagaaaatctgggaattttcttctctgagatagatgtccaaagaattttttggagattgagcagagatgattccagcttatgtctgcatgytgtggagggaaacacagtcacctggggggtcctgaaggagaggactgaaacaggctcactttgggatgattgtgaatacatattgcttatctggaaacaaggattactctgcttctgtggtgctaatgagaccccatgtgaaacagagaaatggaacatttgattttagttcacagtcgtggtacagatggctgttcatttttgtatacaaaaagaattaatgctcgttttacttactataaggagaactgccggaagtgagtaaacgtaagttttattctaaaagtttca

SEQ ID NO: 309389 - DNA, 561 bp, Homo sapiens
cgccgccgccgctgccactgccggggccaggagggtgcagcgccggaggcgggtcaacctggactcgctgggcgagagcatcagccgcctgacggcgccctcggtgagcggggggcggaaggggggaccgccttcgggggagagaacgcggatctgtaaagttggcgctgggcgagccggggcgcgagcgcagagcccgaccgctggggggcggcccggcctyaccctgcacggcctagggttccagtggctccggcgacagaggatcccctaggctagggcggaagaggggactacagcactgggaaggaataagattccactcctttggggtatcctgattcgggggcctgtctgcccacctctagccttgaaccctacttcaccactgttccccctggacagccccagtgctgcttcacacccacctgttttctttcccctaaactttcccaggcactgtgttctgcagttcagcttccctgtctttcatcctgttctccagcatcccaaaggagccccaaccccttccaggaaacccttcctctccttatttcccac

SEQ ID NO: 309390 - DNA, 591 bp, Homo sapiens
ggggttttgtgggattaagtggaaatctcatagtaaatcttattatccaaatatcagyccagtacttggcatatatataaaatgttcgataaatgttagcttctttgatactttttctctccccctacgcccaccacaggagagcagcatgcatttcccaggacacatcaacctaacatgtaggctttgcagtggggaggagggttataaggaaagaggaaagggggaagtgaataatgagggtaaagatcgtaatgatttgtcattctccctgtgaaactattttgtgttcttggtactgctgcttgtgttccctccattctgattcacaagagtcttttcttaacagcttccagatacatgatgttctgacaagctaactgaatacagcagttttacatttttgacttgacccttagaaataagccattatactgttagcttttttattactaagtattatactgtatataagagaaatccctccttcagcttcagtaggtatgaatgacgtaggtatgaaaatctgggacagagcacaaatcaaggggagctatcaacaatggcagaagggtcaaaggtgggttgcag

SEQ ID NO: 309391 - DNA, 517 bp, Homo sapiens
atattcgttacggtctcaaagtagatctcacagaacactgagctatgtttgtcattatgtcattatcccactctaacatattccacaaataaaacacaagggaaaggctgagacctgaaagaatttttttaatggtcatcttttaaaattgagtgaggaggggaaaatatatacatgaattctttcattattttagaggaaactatcatctgtttggtttcattgtttatttggtgaaaggattatgctctcatggmttctcttttcttttgtaacagagccatattcattttttcagtgtcccctccagtttttgtgcatactcacacatattttatgtactcggattcataatgttcatgatatgcccaaacactttatgtataaagttttcttttttgtataatctgtcatctctaacagatactgggagtgtttgtagctgtcagctctcaactgagtctgactctaggcattgccttcagctgaagagagctgccggctcaagatccacctg

SEQ ID NO: 309392 - DNA, 541 bp, Homo sapiens
aggatgctaagtggaacaaaatttatctagtgagatgcactggcatatcctgcagacacagcataagaaccattccctgtgctcattttttataatgcaccaacaagaatcacatctcagattagactagtctcttcaatgcattgtgagcacaccttgctcattccaacttgtgtcctgccactcaccctcctgaaatgcccaaaggagagcagcccccactgcagagtcataaacaaacaaaggcactccacttcttagagaacgaaggcaagaaaaatatgtgacataggaatgttaaaaacacaagcagaagcaggaagaaaacagcaccagagacttagtttattcttataaatagcttaataggtagacttagggctgtytgagctaaaagagatataaaacaaagatgtctgaatgtggatcttttattttttcccataaacttttaagattccctcaacactatttaattcctaaggaaaacagaaggttatatgaaagatctttctcaatatttgaaagcaaacaaaaatgc

SEQ ID NO: 309393 - DNA, 612 bp, Homo sapiens
tcagaaacatttctatgtatttctttgaaagggtctatagttttattggattttctaaggtagcatttcttmaaatgtgaccactgtaccactcagaatccctgtaagcctacagagtaccagcaggctttggcaattttagaagaaaaagtgataaaataacttacaagtacattccatattttaaatacaagatttattatcttgtcagagaaatatacaattctctattttaatcactgtgttcttaaaaattgtgaatgatttaggactgcattcttcagtcttctttaatatttaataattaaggtgaggtttaaaatggctcacctgtatatgaattgaattatataaacaatctacaaaagatggatctatatatcaaaatgataataatataaacattacaactccaaataatattcttaatgaacttagtgaaaaagccttcattaccaatatagaatatgagagtatatgagcttggatgagagattataaaatacaataaatttcataacaataaaatgagtgcaataaggaattatctgaaagtatctacccctagatttgtcttttaaaaatttggaaaatatggcatgaactcttagg

SEQ ID NO: 309394 - DNA, 612 bp, Homo sapiens
tcagaaacatttctatgtatttctttgaaagggtctatagttttattggattttctaaggtagcatttcttaaaatgtgaccactgtaccwctcagaatccctgtaagcctacagagtaccagcaggctttggcaattttagaagaaaaagtgataaaataacttacaagtacattccatattttaaatacaagatttattatcttgtcagagaaatatacaattctctattttaatcactgtgttcttaaaaattgtgaatgatttaggactgcattcttcagtcttctttaatatttaataattaaggtgaggtttaaaatggctcacctgtatatgaattgaattatataaacaatctacaaaagatggatctatatatcaaaatgataataatataaacattacaactccaaataatattcttaatgaacttagtgaaaaagccttcattaccaatatagaatatgagagtatatgagcttggatgagagattataaaatacaataaatttcataacaataaaatgagtgcaataaggaattatctgaaagtatctacccctagatttgtcttttaaaaatttggaaaatatggcatgaactcttagg

SEQ ID NO: 309395 - DNA, 609 bp, Homo sapiens
tcatttaactattcagcaaacatcttttggacactttctctgtatcagtttgtggtcatgctggctggatatgaaaatacraactatggacccttttacagaaactaaaaaattattgtccagtgagaggtaaacattgtcctgcatgtggtcttttttttttttttttcaaattttcttaatgcctgtatatcatagggtttcaaaatagggtaagaatagtttaattcattaaatcagtcgggggctatattattatcccaaagccagaaggtgttaattatcctattaaatgtattattctgcttgagtttatgctgcacaggatctgtctattagctcattgtagtactttagatgtagactctctggggcaaaagtattcagagttaaattttgatagactctatagatagagtaccatctaaagctgttgcagtatttagcatgcttacctacaatgcgtgcataagatctcacttctcatgtttgccagtgctggatattttcgatttttgcataacattgtaaactaatcctatttgtgaaacagatcaaggcacagctaccttgagtggagtgggagcccgactcaggagagctcagagc

SEQ ID NO: 309396 - DNA, 609 bp, Homo sapiens
tcatttaactattcagcaaacatcttttggacactttctctgtatcagtttgtggtcatgctggctggatatgaaaatacgaactatggacccttttacagaaactaaaaaattattgtccagtgagaggtaaacattgtcctgcatgtggtcttttttttttttttttcaaattttcttaatgcctgtatatcatagggtttcaaaatagggtaagaatagtttaattcattaaatcagtcgggggctatattattatcccaaagccagaaggtgttaattatcctattaaatgtattattctgcttgagtttatgctgcacaggatctgtctattagcycattgtagtactttagatgtagactctctggggcaaaagtattcagagttaaattttgatagactctatagatagagtaccatctaaagctgttgcagtatttagcatgcttacctacaatgcgtgcataagatctcacttctcatgtttgccagtgctggatattttcgatttttgcataacattgtaaactaatcctatttgtgaaacagatcaaggcacagctaccttgagtggagtgggagcccgactcaggagagctcagagc

SEQ ID NO: 309397 - DNA, 609 bp, Homo sapiens
tcatttaactattcagcaaacatcttttggacactttctctgtatcagtttgtggtcatgctggctggatatgaaaatacgaactatggacccttttacagaaactaaaaaattattgtccagtgagaggtaaacattgtcctgcatgtggtcttttttttttttttttcaaattttcttaatgcctgtatatcatagggtttcaaaatagggtaagaatagtttaattcattaaatcagtcgggggctatattattatcccaaagccagaaggtgttaattatcctattaaatgtattattctgcttgagtttatgctgcacaggatctgtctattagctcattgtagtactttagatgtagactctctggggcaaaagtattcagagttaaattttgatagactctatagatagagtaccatctaaagctgttgcagtatttagcatgcttacctacaatgcgtgcataaratctcacttctcatgtttgccagtgctggatattttcgatttttgcataacattgtaaactaatcctatttgtgaaacagatcaaggcacagctaccttgagtggagtgggagcccgactcaggagagctcagagc

SEQ ID NO: 309398 - DNA, 592 bp, Homo sapiens
actaaaacaaccaagaagccaaatcatactcatcttgtgactatttctaatttctaagactgacctcacagtcttactattgctgtctccagatcaaagcttaaaaccaacaagaacaatgagaattggcatgtgtggtcagaagcaacagttaccgagtctgagtcaacrgagtgtggtctgaggaagaatgtgaaaagttcagcatatgttaaaactgcctggttgctaatgtacaagaatgactatcttttaaatatcaaaatttccacacacacaaaaatctattccctaatttacatacatgacagcccttcacattcacagctaataattgtgtcttttcccttttccacccccacttcctgctttgtgcacagcaaattattcccacttttttaaagcaattatttgtatgatttggttgatagatctttcagtagtctggatacccttttccagattgccaatgttccttttaaacagtgatttggtatttagtaaaactttacatttctactgcacagaaaataaaataacagtaactaccatttttgagcacttacagtctgccagtcagtatgctaagtac

SEQ ID NO: 309399 - DNA, 592 bp, Homo sapiens
actaaaacaaccaagaagccaaatcatactcatcttgtgactatttctaatttctaagactgacctcacagtcttactattgctgtctccagatcaaagcttaaaaccaacaagaacaatgagaattggcatgtgtggtcagaagcaacagttaccgagtctgagtcaacagagtgtggtctgaggaagaatgtgaaaagttcagcatatgttaaaactgcctggttgctaatgtacaagaatgactatyttttaaatatcaaaatttccacacacacaaaaatctattccctaatttacatacatgacagcccttcacattcacagctaataattgtgtcttttcccttttccacccccacttcctgctttgtgcacagcaaattattcccacttttttaaagcaattatttgtatgatttggttgatagatctttcagtagtctggatacccttttccagattgccaatgttccttttaaacagtgatttggtatttagtaaaactttacatttctactgcacagaaaataaaataacagtaactaccatttttgagcacttacagtctgccagtcagtatgctaagtac

SEQ ID NO: 309400 - DNA, 622 bp, Homo sapiens
gctctctgtccaccatttcttctatctgggctgctcttcccttgttaggtgagccaatgcctgtttaatccttcagagctcagtttaactgtcatttcttctgggaagtcttccttgactccctcagtattgaaataagctcccctgctttggggaatctcctacaggacccatacttatctgtcccmtcacactgtgaggttcttaagatcagggattattttacttgtatcatcaatacacagcatggaactatatacaaagttggcatgaatagctatttgtgaatgaattaaatatggagacaggatgccaactctgggcatggcatgaccaaagccctaagtgtaggacacaatccttactattgaggcatgtttaatctgtgcagtattgatctaggtggaaataaaaacaaactgcccactgtcttctgtacagtagccttttaagtatgtagacagtattatataattcttatataggaaataaaagtctaatgtctttaaactttgttttcaagccttattgttcaatcttttagacttatttccttcttctgagccctcaaaaatctttcaagacttgacatctacaaattattttaggaagtagtttgtga

SEQ ID NO: 309401 - DNA, 578 bp, Homo sapiens
ccaggcgtagtggcaggcgcctatagccccagctactcagaaggctgaggcaggagaatggygtgaacccgggaggcggagcttgcagtgagccgagattacgccactgcactccagcctgggcaacagagcgagactccgtctcaaaaaaaaaaaaaaaaaaaaaaaaactaaaggtcctaataaacaggtcatacaagttatgtcttgccctccttgttgatttatcccctcccctccagcctgctccccagcctcatgcactccactgtagctggtacttaaacatgaccttacagctggtccttaaacatggatagttcattcatgcctcagagtctcatccccttacctggtgtacttttccctcaggtattttcataacctgatcacattcttcatccaggtctctgtccaaatacatccttgttagaaactccccatggcagtgaatattactctactttgctcaattttacagccttcatcactacctgaaattatatcacatagtatatcctatgtggcataccaaaagacatctatgtttgtttatcatttgcaatttgcatctcccc

SEQ ID NO: 309402 - DNA, 578 bp, Homo sapiens
ccaggcgtagtggcaggcgcctatagccccagctactcagaaggctgaggcaggagaatggcgtgaacccgggaggcggagcttgcagtgagccgagattacgccactgcactccagcctgggcaacagagcgagactccgtctcaaaaaaaaaaaaaaaaaaaaaaaaactaaaggtcctaataaacaggtcatacaagttatgtcttgccctccttgttgatttatcccctcccctccagcctgctccccagcctcatgcactccaytgtagctggtacttaaacatgaccttacagctggtccttaaacatggatagttcattcatgcctcagagtctcatccccttacctggtgtacttttccctcaggtattttcataacctgatcacattcttcatccaggtctctgtccaaatacatccttgttagaaactccccatggcagtgaatattactctactttgctcaattttacagccttcatcactacctgaaattatatcacatagtatatcctatgtggcataccaaaagacatctatgtttgtttatcatttgcaatttgcatctcccc

SEQ ID NO: 309403 - DNA, 578 bp, Homo sapiens
ccaggcgtagtggcaggcgcctatagccccagctactcagaaggctgaggcaggagaatggcgtgaacccgggaggcggagcttgcagtgagccgagattacgccactgcactccagcctgggcaacagagcgagactccgtctcaaaaaaaaaaaaaaaaaaaaaaaaactaaaggtcctaataaacaggtcatacaagttatgtcttgccctccttgttgatttatcccctcccctccagcctgctccccagcctcatgcactccactgtagctggtacttaaacatgaccttacagctggtccttaaacatggatagttcattcatgcctcaragtctcatccccttacctggtgtacttttccctcaggtattttcataacctgatcacattcttcatccaggtctctgtccaaatacatccttgttagaaactccccatggcagtgaatattactctactttgctcaattttacagccttcatcactacctgaaattatatcacatagtatatcctatgtggcataccaaaagacatctatgtttgtttatcatttgcaatttgcatctcccc

SEQ ID NO: 309404 - DNA, 626 bp, Homo sapiens
tggctgttgatagtgttgaaaggaatcttaactcaggcaagctgggggttaggagagcataacgatattaacaaagaccatttgtggacatcttatatttcaacaccttcaacaaatgggaccctgttggttatatcacctcaaagttacactgaaattcctaaaatatttcatttcccagtgaataaatgctgaataacttcattccaggaacttattgttactaagcaaaagagaaagagtctacctattacagtagwatcatgggcaatcattgctatcactaataaatttttaagcagtttctaaattcagtcataatatcaggaaaagtatttagaatgacaaaaccagaaaacaaaattcttaattataattggtatatgcagaaattataaagagataacaggtgctgcttttgtttattaaaacttcaaggaggaaggcacatgtattagaatggctaaaatctaaaaaatggaaaataccaatttctggaaaggatgaagagcaataggaagtctcattcattgcttttggaaaggcaaatggctcagccactttgtaagacactttgacagtttcttacaaggttaaacatagtccaacaattgcactcctaagta

SEQ ID NO: 309405 - DNA, 597 bp, Homo sapiens
ctacataaaaacttgcaagtgaatgttttatagcagttaattcataataaccaaacatgtaaggaaccaaggtatccttcaattaatgaatggataagcaaactgtggtacatgttaaatggaatatttttcaggggggtggggggaaaggaatgagctctctgccaaagacatggattaatcttaaattcacatttctaaacaaaaggagccagtgaaaaggctatatactatatgattacatttatatgacactctggtgaaggcaaaactatagcatggcaaacagatcggtacttgccagggatttggaggtgacatgcggttgaacaagtgaaacacgggattttttttagaagagtgcaagtatttggtatgatgttataatggcagwtatatgacattatgcatttttcaatacccatagaactttacagcagaagagctaaacttactgtatacaaatttaaatgtgtgtgtgtgtgtgtgtgtgtgtttaggaggtcaaagtatcacaggatggaagactataataaaagaatctagctgtattacaaatatatgaaaaaaatcttactggaagtggtggggtagaaa

SEQ ID NO: 309406 - DNA, 573 bp, Homo sapiens
tgttactacactaactagttctccaagataacaaatatgttaaacatattcttatctactaaacaattatattatttagagttattcccagaaaatctccaagttagtcttaacctaaccttaagctaattcttcacaattttatgactaattaaaaggctcctaaatacacattacaaatcacagtgaaacaaaaaagtatatacaagttgacatataagcaaaaaatcattacttataaaaaaacagagagttccataccagctaaagattgtggaatcagtggcatcttataaatgatttcacagtatttcaggatccctgatactaagaaaatattgtgaggaataagcyccaaaggtcatttcctctatcctccttactagccctctcccaataaaataatcccatgataagcattgctcccattctgacttaaatgtgttacatttttagagaagataaagcaacactctgacagagagagacctttaaaacagagaaaacatcaatgaatatcttttcagaactatgcacttcctgactattttgagaggaaatgcacttagcaag

SEQ ID NO: 309407 - DNA, 575 bp, Homo sapiens
acaacaactgaaacacccacaacacccttaatagtattagaacttgttaaaactgaaatagtcataacctcatttatatttaacttattatgacaaaggagactatgcaatttatcatccttctcccttaactctcctactcactttgtctccctgcctacaacactatgtaaacccaatccataagaacaagtagcaacatttcagcagaaaacatggtacacatgctttaatacatgcttcatcataccattcaaccattacaatttccaagaaaatactaaatgttgcctcrtagagcataaacacatttctactatttaatttgagctaaaaataggctttgcagattagggctagaaaagattttctattttttggacaactaaaattagatcattttggtatgcaaaagacattatgtaccaaataaagcaataaatttaactctaaagtcctccagcagggagggcactgtctactatctttctttgcatggccagagtttcaagggcccagcctccattatcacagcaattggcaaagcaccaaaatatggtgaagagatggcaaga

SEQ ID NO: 309408 - DNA, 637 bp, Homo sapiens
tcactcactacttatccaacatcttagggcaaccttcgaagggcaactaagctgtgctgggccaacagtgtcccctgaaaaccatttcaaattgacccagggtttctctccgtggraattgtgcacactcatttacaagccacagtccaactgcctttagcaccccaatataatcattatctttgaacacctcctattccctctaactcagtgattctaaaaatagggagcataaagaagaaagacgtgagggtcaggaaagtgtttagaaactggataagaagcaacttctcaaaatattaaacatcccttcactgagattctgatacatcccttttagtgtggcatcatcaccccaccccttgaaatcacaatgcattaagagaaatgtatgttactgaaaggagagtccttgaaaatataaaatcagaaaactttaaacaactcttgggtaatgtctcttttaatcccatcccttattttctccagtcataagatttacttgggtattgtgacatccctgcagttgttctaagattaaggtgatgaatctttggcctccttttcactacccatcactgtcctgcatgctgttatagacaaaccactaacatctatatgcatcccctcacaaaag

SEQ ID NO: 309409 - DNA, 502 bp, Homo sapiens
tggaatgatttacattctttcacccacaaaagtaagggcagccaagcatggaggaggaatctgatgagayagaattaaaggttattgttaagttttctccatatataatcactccctgatgccctggcaaaagagttccaccttatagtgctggatattacaatgaaaaataaataagtgtgcacaatgtattctatcgtaataagaagcaggatcacatgtgatcacaagatcccccccttgaggatgatatgaggaaaaatgagggaatttatgtgccaaagaggactataacacatacaaaagattttggcctgcatattaaagacagcttctacctaaactctattgcttctcctttgacattggttgaaatcaatacatgtagtttacatattcatattttcttgccccatttccatcatctcatttgaagtcctgcaaatcaggcaggactgggaaaagaaggtcactttgctagcgccccattagagtgcagagc

SEQ ID NO: 309410 - DNA, 502 bp, Homo sapiens
tggaatgatttacattctttcacccacaaaagtaagggcagccaagcatggaggaggaatctgatgagacagaattaaaggttattgttaagttttctccatatataatcactccctgatgccctggcaaaagagttccaccttatagtgctggatattacaatgaaaaataaataagtgtgcacaatgtattctatcgtaataagaagcaggatcacatgtgatcacaagatcccccccttgaggatgatmtgaggaaaaatgagggaatttatgtgccaaagaggactataacacatacaaaagattttggcctgcatattaaagacagcttctacctaaactctattgcttctcctttgacattggttgaaatcaatacatgtagtttacatattcatattttcttgccccatttccatcatctcatttgaagtcctgcaaatcaggcaggactgggaaaagaaggtcactttgctagcgccccattagagtgcagagc

SEQ ID NO: 309411 - DNA, 511 bp, Homo sapiens
tgcctctccccacctccctgctcttcawtcatgataaaaatgactaacaattatgaagtacttactatgcctgccatgctaaacattttattgctgtctcctttaattctcataacacccctctagattggagctactatgatctccattttccagaggtggaaactgaggtttggcatgctaaaatggtcacccaaagtcatacagcaagcggtagagtggagatttgaatgcaggtgatgaattgcagtttgagatcttcacatcccaagttccagactctatgcaggattcattgctgtggcccagtaatgaactgtttactccatcagcacatttacccactgtactgtgtctatttggccttttccgtctgtgttccccactagactgattggtctgtgaccgcagcacccagcacagagaaggtgcccagggtatatttgctaatctgaactattgggtttaagaattttggttgggcgcgatggctcacgcctgtcatcccaac

SEQ ID NO: 309412 - DNA, 575 bp, Homo sapiens
cataaacggcctaccttctctcttgcctctctttctttgctccctctaaatgactttccccactttctaacccaccttctctcctctgagctatattcacaggatatttactgctgcrtgttctcagaaatacctattaacactactggaatgaagctgtaggaatataatcaagaaaaggaatgttatataaatgttcaggcaattagcccaggcaaagaaactgtggtatgcgactctagccggaaagatcaagaaaatcctggtagccaaatttacatatttcctgtgtacaaatgaagggcaaatttaagccagccactggaacaaaatctcaaagaaattaatcatgtagctaggaagcaaatggccattaatgacagtttacagaatagaaaccaaagggctttcttccacgaggtagaaaagggggagaaaaaaagtgacttaaatatttgaatactgaaaactcttgctcttttcaccttgacaaaagataaactatcttttcaccttacgcttgttttcccctcaactcagtactctgtaattcaagaggtcctttcaatgattcc

SEQ ID NO: 309413 - DNA, 499 bp, Homo sapiens
aataaatttctccttaaaacttgctttaactgcatctcatgcttttgataataatatattcattataattccattctagttattttcaagcttttattgtgatttatccttttatgtttaggttatgtttacaggtgctttacatttacagatgtacatgtaytactcatgttttcatcaggagaacagaaacacattatatatttcaagagggaatttaacgtgagtaatcaattacaaaggtacgagaaaattaaagtgcaaaaagcaaacactactgtaacactgaaatagtaactttaggagtagctgcctaatatagcttggctgtgtccccacccaaatctcattttgaattctcatgtgtaggagatacccagtgggaggtaactgaatcatgaggatgggtcttttccatgttgttctcttgatagtgaatgtctcatgagatctgatggttttaaaaaggggagtttccctgcacaagctctcttttctt

SEQ ID NO: 309414 - DNA, 499 bp, Homo sapiens
aataaatttctccttaaaacttgctttaactgcatctcatgcttttgataataatatattcattataattccattctagttattttcaagcttttattgtgatttatccttttatgtttaggttatgtttacaggtgctttacatttacagatgtacatgtactactcatgttttcatcaggagaacagaaacacattatatatttcaaragggaatttaacgtgagtaatcaattacaaaggtacgagaaaattaaagtgcaaaaagcaaacactactgtaacactgaaatagtaactttaggagtagctgcctaatatagcttggctgtgtccccacccaaatctcattttgaattctcatgtgtaggagatacccagtgggaggtaactgaatcatgaggatgggtcttttccatgttgttctcttgatagtgaatgtctcatgagatctgatggttttaaaaaggggagtttccctgcacaagctctcttttctt

SEQ ID NO: 309415 - DNA, 565 bp, Homo sapiens
gtgtccccacccaaatctcattttgaattctcatgtgtaggagatacccagtgggaggtaactgaatcatgaggatgggtcttttccatgttgttctcttgatagtgaatgtctcatgagatctgatggttttaaaaaggggagtttccctgcacaagctctcttttcttgtctgttgccatgtgagacatgcctttcacttccaccatgattgtgaggcctccccaggcatgtggaactgtaagtccagtaaacctctttcttttgtaaattggcccatcttggagactgtaagtccagtaaacctctttcttttgcagattgtcccatctttatcagcagcatgaaaatggactaatacactgacagtcccaggactgggagtgaatgaaacaggaaaaagctggtggtaagatttctgtggaggggctgctaccctgctcatactggtactggagcaggcacaggggagtggttctgggagtgctcaaagaaactggagcygaaagtgctgttgctttcagggtgaggttggcaggaacaggaagacagacaggaagtccca

SEQ ID NO: 309416 - DNA, 565 bp, Homo sapiens
gtgtccccacccaaatctcattttgaattctcatgtgtaggagatacccagtgggaggtaactgaatcatgaggatgggtcttttccatgttgttctcttgatagtgaatgtctcatgagatctgatggttttaaaaaggggagtttccctgcacaagctctcttttcttgtctgttgccatgtgagacatgcctttcacttccaccatgattgtgaggcctccccaggcatgtggaactgtaagtccagtaaacctctttcttttgtaaattggcccatcttggagactgtaagtccagtaaacctctttcttttgcagattgtcccatctttatcagcagcatgaaaatggactaatacactgacagtcccaggactgggagtgaatgaaacaggaaaaagctggtggtaagatttctgtggaggggctgctaccctgctcatactggtactggagcaggcacaggggagtggttctgggagtgctcaaagaaactggagccgaaagygctgttgctttcagggtgaggttggcaggaacaggaagacagacaggaagtccca

SEQ ID NO: 309417 - DNA, 599 bp, Homo sapiens
cttttgccaggttaagccaaattttttgaaagagtaaaaaacagaaaattaagttaaaaagttgcagacacaatatattagctgtgttgccaaaacagttgggttttatataaagaatgaatatcagaattatctttcagtcctagactaatgggaaatatttttctctgttctactttacaatctaatttattttatgagatactagatgttatcaattggaaaagagtattattaaggttttattattaataaaaataatatctgcactttaaggtgctctttacttcccatcccttccctaggaagcctcccctgatgtacccccaaccccatcaagttccccaacctagaggacattccttcctcccataaatgcttaaggaactgtggcaaatgtctatggcgttggctttaytcttctttgtattctagttatttattttcatgtcttaaatctgcccaactcctgttttaataagatcagatcagctatgtcttgttattaaaaaaaaaaaaacccctctagtaatttcatttgatttattcctggtcacttgtataattggatgagcttgggggaaatgggatttggagaa

SEQ ID NO: 309418 - DNA, 619 bp, Homo sapiens
ggcatagtgctagctgctgatggattccctgcattcccacaaaacctgacttcttgagtggaatgatctgggaagcctttccaaagcttacttcaccagcaggactgagatgcagggcatccacatcctttcttctcttactacaatagcactggttgaaagtaacaaatatttttaaaatccttttccttcaggtctgacagtgtagcagagccctgatatggttctgaccactctgagaacagtttcccctcactaatgataaatccttaggaggacgatgtttcaaatagtaaaaacttcacgttgatttgaaatgtcatagtggggaatgaaagagggtggaaacaccagaatgaaagtaaatactcattctggaatatacagaatccaaacaagaacaaatgggcagcacagcaaaatcaaagttgcctttcctacatgccttttaagcagcaggaagatataatttccaaggtccaacctcgagaaatgaagcatgccacaacagactctgctagtggacagccgtccacactatccatcatcttgygccgttcatccatacctatcaaagagaatgacatctcatacaaaataagaatgattaaggttgcag

SEQ ID NO: 309419 - DNA, 619 bp, Homo sapiens
acaataaaagttatcagagatttccagccttatacactgatctgatgtatatcttttcaggatctttccctccaccccatgaatttattaaaagcatgagatcagtcttaatatactatgtcataagctatacccttttccttaaaatatggtgaacattttttctatgccattcaatatcattttatacaacagcataattttaatatatatactctgtattccagaaaataccttaatttacaataattaatccttattgtttcattcatatgtttcatatgaatccttattgtttcattcatatgtttcttcccaattttcatttttttcaaataaaacaatgcaggtgtaataatctgaaaaaaagaacaggataaaaaatyatttcaacgatttctgaagaagtatatttaactactaaaaatgtttttatagtatgaaaaatttcccttgaggcatcaaaattagaagtaaatgaaaaatagtaaatagcaatggtgaaaaattactgatttatcctgtcaaggtgatgtcagctcaactggcttgcttttctcagaatctatctcagtcaatctattaaattttaacatgataatgtatacattatatatac

SEQ ID NO: 309420 - DNA, 475 bp, Homo sapiens
acaatatgccaggccattccctatggctggtttatgttacctcctgtaatactcatggccatcctgcaaggtggtactcttctctcctcttacagaagactgacctgaggttcagtaatatatgttttcayctaaaccaaaattaagttctgaaagagggctgcctgtccctttgggtgtacagtttttcccacattgcccttaagtggtatttacacttgcaagagtttgcattttcctaacagccacagtggttaggttagcttatgttctgcatggtgagaaaaataaaaggcttattctcatgtagctccttattgccacaccacttggagacatacaagattctaattttcagctcttgctgatgttcatatttggggtcacagttggcctcatgtcatttttgatgtgtatccacaatagaaaaataaaataatctatcacttgatagcagtttgccattcataaaatt

SEQ ID NO: 309421 - DNA, 475 bp, Homo sapiens
acaatatgccaggccattccctatggctggtttatgttacctcctgtaatactcatggccatcctgcaaggtggtactcttctctcctcttacagaagactgacctgaggttcagtaatatatgttttcacctmaaccaaaattaagttctgaaagagggctgcctgtccctttgggtgtacagtttttcccacattgcccttaagtggtatttacacttgcaagagtttgcattttcctaacagccacagtggttaggttagcttatgttctgcatggtgagaaaaataaaaggcttattctcatgtagctccttattgccacaccacttggagacatacaagattctaattttcagctcttgctgatgttcatatttggggtcacagttggcctcatgtcatttttgatgtgtatccacaatagaaaaataaaataatctatcacttgatagcagtttgccattcataaaatt

SEQ ID NO: 309422 - DNA, 535 bp, Homo sapiens
tcattgtttcgtttgctgttcagatacttttcacttcatgtaatcatacttgtccatttttgctttagtttcctttgtttgtaggctattactcaaaaaatctttgcccagtccaacgtcctggagagttttcccaatttttttgtagtacttttattgtctaaggtcttagatttaaatctttaaactatttagatatgatttttatacgtggtgagagataggggtatagtttcattcttctgcatatggatatctgattttccaagcactatttatttatttattttaataggttttgggggaacagatggtgtttggttacatggataagkgtttttagtagtgatttctgagattttggtgcacccatcacctgatcagtgtacaccgtacccaatgtgtagtcttttatccctagttcccctcccatccttccctaccaagtctccaagactcattttatcattctcatgcctttacatcctcatagtttagctcccacttataagtgagaatatacaatgtttggttt

SEQ ID NO: 309423 - DNA, 356 bp, Homo sapiens
gggaattgcattaaatttctagattgcttttggcagtatggtcactttcacaatattgattctattcatccatgagcatrggatgtgtttccacttgtttgtgtcatctgatttccttcagcagtgtttgaatcaatgtacacaaatcagtagaactgctatacaccaacagcaacaaagctgagaatcaaaagaagaactcaaccccttttataatacctgcaaataaataaataaataaataaataaaatatttaggaatatacctaaccaaggaagtgaaagacctctccaagcaccatttattgaactaactgtcctttcctcaatatatgtttttgtcacatttgtacaaa

SEQ ID NO: 309424 - DNA, 586 bp, Homo sapiens
agtaacacccaaatctcaatggcttacaacagrtaagtaagctttcattcatattaaatattggctgcagaccaggcatggtggctcacgcctataatcccaaaacttcgagaggacaaggtaggaggatcacttgaagccagtagtttgagactagtctgggaaacatagcagcaccctatctgtgcaaaattaaaaaaaaaaaaattagccaggcatggtggtgctcacctgtagcctcagctacgtggactgaggcaggaggatcacttgagcccaggagttcaaagttacagtgagccatgtttgcatcaccatactccatcctgggtgacagactgagatcctgtctctaaacacaaaacacaaaacaaagcaaacaagaaccaaatattgtctgcagtttggggtggctctgcttcatttcatttttacttgtagatctggattcacatctgaggagacaagaggaaaaaagtgtgaggaaaaaatatctcattatacctcctaaaacatatgctcagaaatggtcctgagaaacttatcaaactaatattaattttattttcatttcattagccaaatc

SEQ ID NO: 309425 - DNA, 545 bp, Homo sapiens
tacaggtctgtagttttcttgtaatttctggcttttatattaaagtaattctggcctcataagatgagttaagaagtgtttctattattytattttttggaagagcttgtagaacattggtattaattctttcttaaatatttggtagaatgcactgcacaaaccatcaacgactatgcatttctttgttgctatttttggttgctattttactattttattttatttttacttttttattttattattattattttttgagacagagtcttacattgccacccaggctgtagtgcagtggtgcgatttccactgactgcaacctctgcctccctagtagctggaattacaggtgcctgccaccatgcttgtctaattttgtgtatttttaatagagatggggtttcactatgttggccaggctggtcttgaactcctgacctcatgatctgcccatcttggcctcccaaagtgctaggattacaggcatgagccaccacactcagcctattttattttattttaatcagttatagaacagctca

SEQ ID NO: 309426 - DNA, 545 bp, Homo sapiens
tacaggtctgtagttttcttgtaatttctggcttttatattaaagtaattctggcctcataagatgagttaagaagtgtttctattattctattttttggaagagcttgtagaacattggtattaattctttcttaaatatttggtagaatgcactgcacaaaccatcaacgactatgcatttctttgttgctatttttggttgctattttactattttattttatttttacttttttattttattattattattttttgagacagagtcttacattgccacccaggctgtagtgcagtggtgcgatttccactgactgcaacctctgcctccctagtagctggaattacaggtgcctgccaccatgcttgtctaattttgtgtatttttaatagagatggggtttcactatgttggccaggctggtcttgaactcctgacctcatgatctgcccatcttggcctcccaaagtgckaggattacaggcatgagccaccacactcagcctattttattttattttaatcagttatagaacagctca

SEQ ID NO: 309427 - DNA, 553 bp, Homo sapiens
gggccagcgtgagttccaggtgggcacgggctcggcaggccctgcactctcagcagccagccagcgctgccggccccaggcagtgaggggcttagcacctgagccagcagctgcagagggtgcaccaggtgccccagcactgccggcccacctgcgccatgctcgaattctttctgggcctcagctgcctccctgccaggcagggctcrggacctgcagcccgccatgcccgagcccccacatggtgggctcttgcgtggcctgaaccaccacaacaggtgccgccccctgctctgcagcatccggtcccattgactgcccaatggctgaggagtgcagctgcacagtgcgggactggcgggcacgccgcccatggtcctggtgcgggatccactaggcgaagctagctggactcctgagtcaggtggggtcttggagaacttttatgtctagctagaggactgtaaacacaccagtcagcactttgtgtctagctaaaggtttgtaaatgcaccaatcattgctctgtgtccagctaatctagtggggactt

SEQ ID NO: 309428 - DNA, 532 bp, Homo sapiens
ctgaatacatactagtttccagtttaaaagaaacatttgtcaaaatggggcattttggggcttgtaaaacaactttaacaatgttaaaatgtctgaaatcatgctgaatatgtgccttgaccttaacagaattcaattagaaattgctaacagaaaggtgtctttaaaatactcaaatacttggaaagtaagcagcacatttcttcaaacccatgtgtcaatgattaaatcatgaaggtamttagaaaataactttgagctgaaggaaagagtaaatcagaatatatcaaacttaatggaatacaactataggaaaatttacattatgaaacactcatattagcaaagaggaattgtctaaaattggtgacctgtgtttccacctgattaagctagtaaagtagaaacaagttgaaacaaaaacaaaacaaaaaaaaggaaaaacgaaattaagaacaaaagtagatacaacagaaataataaaaagcaacagggaaaaatcaattaagcaaaaacttgaatttattttaga

SEQ ID NO: 309429 - DNA, 361 bp, Homo sapiens
tctttgttctcgttttcaaagaatatctttgtttctaaaaagagccaaaagtttgaatacttcatagaaaaatgtacaaaagaccaataggcacataaaaaactcttagcattaggtatatgcaaattaaaaccataatatgatactactgcatacccatttaactgctaaaactatataaaaaaaaacataaaacgttggtgaaaatttgtagcaatattgctggtgggtggtcttgaatgcaatatggtataatttctttggaagataatttagtaayttgtagtaaaatgtaacattcatttattatgtgacctagcaattatagtcctaggtatttactaaagggaattgaaaacat

SEQ ID NO: 309430 - DNA, 621 bp, Homo sapiens
gggaggtctatgaatggctgctctgggaatgtctgtcttgtgcagttgagataaggactgagataagccctggtctcctgcagaaccctcaggcttactagggttgggaaaactcaacccgggtaaatacgtggtcagaccagttctctgctctcgaaccttctttctgttgtgtaagatgtttatcaagacaatatgtgcacccctgaacatagacccttatcagtggttctgcttttgctctttgccttgtgatctgtgttggacccttatcagtggttctgcttttgccctttgtcctgtttgctcagaagcatgtgatctttgttagacctttatcagtggttctgctttttgctcyttgaagcatgtgatctttgtacctactctctgttcttacactccctccccttttgaaacccttaataaaaacttgctcgtctgagactcagagggcatcacagtcctaccgatatgtgatgtcacccctggcggcccagctgtaaaattcctctctttggactgtctctctttatttctcagccagccgacagttatggaaaatagaaagaacctacgttgaaatattgggggtgggttctcccaatagaaaagcatgca

SEQ ID NO: 309431 - DNA, 674 bp, Homo sapiens
acacattacattgtaagattatttattattctatgctatattatttttaatttgttaaaaaaaaatttggctcaaaaggaacawaatgttttttctaaagttatctagctaacatacactcacaatcgttgatttaactgtcaaccttttcccccatttaactacttcagggtttataaaattactagtaaataaataattatggtaaaacagctgaagtattttacttttgcaataatatataattcatcagactgatattgtttctccatatgaatcacatgatgatatttcatttaaagttatgcctatggtgctttcttctgcttaaaattaaacattgaaatataaacagtaaatcagaataaaatatctgtttataatcccaactttgtaatgataatcaaatatgatggtacctacatgttcccgtagtcattgatcacagagaagcttaggaatgccagaaaaggcattcatgatgagtccatctatgttcacagtaatttggaaatgcctgggactgggaaactgtcacagtagaagatgggatttacaagtctggaatttagtacagaatcttagccattattgaattatgctcatggattttgtggtcaatcattagctgtgattagattagggtcttggtttgtgcaggctgatattacaaa

SEQ ID NO: 309432 - DNA, 492 bp, Homo sapiens
ctagctaacatacactcacaatcgttgatttaactgtyaaccttttcccccatttaactacttcagggtttataaaattactagtaaataaataattatggtaaaacagctgaagtattttacttttgcaataatatataattcatcagactgatattgtttctccatatgaatcacatgatgatatttcatttaaagttatgcctatggtgctttcttctgcttaaaattaaacattgaaatataaacagtaaatcagaataaaatatctgtttataatcccaactttgtaatgataatcaaatatgatggtacctacatgttcccgtagtcattgatcacagagaagcttaggaatgccagaaaaggcattcatgatgagtccatctatgttcacagtaatttggaaatgcctgggactgggaaactgtcacagtagaagatgggatttacaagtctggaatttagtacagaatcttagccattattgaa

SEQ ID NO: 309433 - DNA, 674 bp, Homo sapiens
acacattacattgtaagattatttattattctatgctatattatttttaatttgttaaaaaaaaatttggctcaaaaggaacataatgttttttctaaagttatctagctaacatacactcacaatcgttgatttaactgtcaaccttttcccccatttaactacttcagggtttataaaattactagtaaataaataattatggtaaaacagctgargtattttacttttgcaataatatataattcatcagactgatattgtttctccatatgaatcacatgatgatatttcatttaaagttatgcctatggtgctttcttctgcttaaaattaaacattgaaatataaacagtaaatcagaataaaatatctgtttataatcccaactttgtaatgataatcaaatatgatggtacctacatgttcccgtagtcattgatcacagagaagcttaggaatgccagaaaaggcattcatgatgagtccatctatgttcacagtaatttggaaatgcctgggactgggaaactgtcacagtagaagatgggatttacaagtctggaatttagtacagaatcttagccattattgaattatgctcatggattttgtggtcaatcattagctgtgattagattagggtcttggtttgtgcaggctgatattacaaa

SEQ ID NO: 309434 - DNA, 492 bp, Homo sapiens
ctagctaacatacactcacaatcgttgatttaactgtcaaccttttcccccatttaactacttcagggtttataaaattactagtaaataaataattatggtaaaacagctgaagtattttacttttgcaataatatataattcatcagactgatattgtttctccatatgaatcacatgatgatatttcatttaaagttrtgcctatggtgctttcttctgcttaaaattaaacattgaaatataaacagtaaatcagaataaaatatctgtttataatcccaactttgtaatgataatcaaatatgatggtacctacatgttcccgtagtcattgatcacagagaagcttaggaatgccagaaaaggcattcatgatgagtccatctatgttcacagtaatttggaaatgcctgggactgggaaactgtcacagtagaagatgggatttacaagtctggaatttagtacagaatcttagccattattgaa

SEQ ID NO: 309435 - DNA, 285 bp, Homo sapiens
agcaaaacaaataatgaagaatgaatacaataaagaatacaataaattgggaattgtgaagtgtgttagagggtgatacacgctatggagaaaaaagaaaaaaatagarcagcataaagacagtttggagtgctagatgaagggactgactgcaattttaaataagttggtcaagatatggcttattgggatgaggtcattggcgcacacactttggggatgcaaagttagtaataatgatatcttggaggtgatatttccaagtaaaggcaacagccaatgcaa

SEQ ID NO: 309436 - DNA, 616 bp, Homo sapiens
atgcatattttaatatgttcaatgtatccctcatctattattcatgagctttcttttcatttgcacttgtttattatgtatatggtgtgctaacactgctttgtagaatttatgtttgatctcttccctcagcgcttgtccatcaaatgtgttgcctgtcaccatccatttagaccgttgtgtttatgccaaacaactaccatttagaacataaaagtgagctggaagcttctttgggaaaatttattttaagtgaactcaggttcacttttattaatacttaaagagaaaattgatcatccagcagacgttttgtcacttgcaacaaaagttctacaattgcatgggttttcctttcatcttctttgaagaaaggtaataatctatagacataccttattttattacacctcactttattgtacttcacaaatgttgygttgcttacatatttaaggtttgtggcaaccctgtgttgagcaagtctatccgtgccactttatcaacagcatgtgctctctttgtgtatctgtgtcatgttttgctacttcttgcaatatttcaaaccttgcccttgttagtataactgttatggtgatctgtaatcagtaatctt

SEQ ID NO: 309437 - DNA, 576 bp, Homo sapiens
ctctctcatggcttctattaaacatagtattggaagttctggccagggcagtcagaccagagaaagaaatgaagagcatccaaatagggagagaagaagccaaactatctatgtatgcacatgacatgattctatatctggaaaactctgtagtatcaacccaaaaactcatgaagttgataaacaacttcaattttgaggtatgcctcctcarcatctaacttctgttttgaggtatgtctcctcaatactttagtattttttaggtgtgtctcctcaacacctagtttgttgacaatttttaacagaagagaatgttgaattttatcaaaagatttttgtgcatttattgagatgatcacatggtttttttctttagttctgtttatatgatgaatcacatttactgatttgcatgtgttgagccaaccttgcaacccagggatgaagcctacttgattgtggggaaaaggcttttgacatctttcaaagttttaggatataaaattaatgtacaaaaatcactagcattcctatataccaccaacagtcaagccgagagtaaaatcaggagtg

SEQ ID NO: 309438 - DNA, 380 bp, Homo sapiens
aatggttatattatgtaatctccttatatcacttcaaattttctatatctagactacattawaaaacacacacaatggcatgtcctcagtggttttattcttgtaagatggagggtgcagttttaaaatctgcctaggtgaatatcataaaacccaagtcttgataaatgtgggattagctggcaaatgtctcagagtaagatggaatagataaagatccagaaaaaataaagcctgaaatttagatggaatgttgagagaagagagccatgccttaaatgtttttttaaaaataaagaagattcaaaacacatcctcaatttaatttttatatgtatgaaacatggtgatagaaagtactgtcaacagttcataactga

SEQ ID NO: 309439 - DNA, 596 bp, Homo sapiens
caggcaggaaaagaagcaagaaaatataaccaatagtaaygattaaaaaaacaattgaaactaacagaacagatacagattttaaatttagcaaaaaaagttttacaatttattaaaattatattcaatatatgcataaaactaagtggctccaaaaaatttagaaacatgaagaaaatcacaccaaaatcaaattatttaaaaccagttatcaagagaaaaaatattaaaccaatcagcaaaaaagggcatattatgtacaaaagaatgaagataagggtaacagcagattttttgtcagaaacaatgcaacccagaagatagtggagcactatcttttaagaactaaaataaatgactatcaacctagaattctatactcagtgaaaatatattttaaaaatgaggaggaactaatgcctttttgagacatataaaagcttcaagaattcattacaaacagactctaactccacacaaaaagttaaacattctttaggcagttgaaaaatgaaccaactgaaaatctaaatttacacacaaaaatgaagagcaccagagatagtgactacatgtgtccatgtgtcataaaaaac

SEQ ID NO: 309440 - DNA, 393 bp, Homo sapiens
aatagtgccagtttctacaagctagactatgaaacctcatgactcacagggcactgggtagagcacacagaagggtattgccttagtcatgagaaataaatactccaggcctgagaattgctccagtatcacctaacaaattaaataagcaaggcctgagagacccagatttttctaggtaaattgaatgtatcccagaacaaagctcaagattaaaaagaacacaaaaatatctgtcattcaacatggtaaaagtaagaatgcctggcatacaatcaaagattatcaggcaggaaaagaagcaagaaaatataaccaatagtaacgattaaaaaaacaattgaaactaacagaacagatayagattttaaatttagcaaaaaaagttttaca

SEQ ID NO: 309441 - DNA, 521 bp, Homo sapiens
gctccatcaccggggtttggatcctgccttgctcttgccatcttttccaagcctagaacacctgaaacactacagccttcaccttttgcatactcttctgagggcctcctgtgcctgcctgtctgattacagctgcaggtgttgcctgctgggtattcctttgcaagaatgtgtttgatccatgattttaagtcctgggagttgagcaagctcaccactgttaaaagaaagctagacaaattaaattttacagagtttaattcagcaaagaattattctcaaatagaacasctcctgaactagaacaggctacagagcaactctaaggctgccaactgtcagataatatttatggacagaaaaaggaaagtgacatacagaaaatggaagtgagatgaaaacacagctggattgtttacagttcaataattgccctatttgaacacagcttcaacagctcgccacctatgattggctgaaactcggctgccataattggttgagacttgactgctgcaatt

SEQ ID NO: 309442 - DNA, 521 bp, Homo sapiens
gctccatcaccggggtttggatcctgccttgctcttgccatcttttccaagcctagaacacctgaaacactacagccttcaccttttgcatactcttctgagggcctcctgtgcctgcctgtctgattacagctgcaggtgttgcctgctgggtattcctttgcaagaatgtgtttgatccatgattttaagtcctgggagttgagcaagctcaccactgttaaaagaaagctagacaaattaaattttacagagtttaattcagcaaagaattattctcaaatagaacacctcctgaactaraacaggctacagagcaactctaaggctgccaactgtcagataatatttatggacagaaaaaggaaagtgacatacagaaaatggaagtgagatgaaaacacagctggattgtttacagttcaataattgccctatttgaacacagcttcaacagctcgccacctatgattggctgaaactcggctgccataattggttgagacttgactgctgcaatt

SEQ ID NO: 309443 - DNA, 619 bp, Homo sapiens
tgcaaactttgtgttttaaaggccaataatttgtgcttatggatcatctctccctgaataaatatggcaaaactccatgaagctgaaatattgctcatttctcttttataaaaaggttatacatttcataagacaaatcttccagtcaacaaattcttattcccagggcactattactctgataaaattaataaagctttaattatagaatcccaaaacacacagacaagatttacttaaagttttttttttctatactgttttgttttttaaataaacttttcaatccagaacagctttacatctacagaaaaatgtgaagatggcactgacggttcccatacatactacaccaagcctgccacacatcagaatcctgtcttagtatggcatatctgctataatataactaatgaaccaatattgataygttattattaactaaagtgcatactttattcagagttttccagtttccacccctggcctttttctgttttaggattccattcaaggtaccttattacatatattcctcaggtctccttaggctcctcttggctgtggtaatttctcagactttctttgattttgatgaccatggaaattttgaaggata

SEQ ID NO: 309444 - DNA, 566 bp, Homo sapiens
ttcctcatagcatggtgtgtaagagcaaaacctgaaaactattaaattttgaatcaataggctcctgaaattatggtacataaatatgataaaatactattaaactattccaatttagccaacatgcaaggtaaatgattgctttttttaaagcagagaacagtgtatataatctgatttgttttgtgtaatttccttctatgttaatgaatctcataagtgattttaaaatgaagaggaaacccctggatctgaakgcactggagaagagggagacctcatgtctatctctgttcaatgtacagagagagatccctgctctctctgtacctaacctgcaaaacactttccttgaatcagggtaacagaagactgaacggtcctcagcgctcacatagggagtgctcaagtcaggttgcagaagttaaacctgcaatggtgaagagctgtgtgaccacagtccaggtgaccaggacccaccagggctggatggcctgtagctcacatttacctaacggtagagagagcagttgcaattaggcaggctcagccacagggtgaaggtg

SEQ ID NO: 309445 - DNA, 566 bp, Homo sapiens
ttcctcatagcatggtgtgtaagagcaaaacctgaaaactattaaattttgaatcaataggctcctgaaattatggtacataaatatgataaaatactattaaactattccaatttagccaacatgcaaggtaaatgattgctttttttaaagcagagaacagtgtatataatctgatttgttttgtgtaatttccttctatgttaatgaatctcataagtgattttaaaatgaagaggaaacccctggatctgaaggcactggagaagagggaracctcatgtctatctctgttcaatgtacagagagagatccctgctctctctgtacctaacctgcaaaacactttccttgaatcagggtaacagaagactgaacggtcctcagcgctcacatagggagtgctcaagtcaggttgcagaagttaaacctgcaatggtgaagagctgtgtgaccacagtccaggtgaccaggacccaccagggctggatggcctgtagctcacatttacctaacggtagagagagcagttgcaattaggcaggctcagccacagggtgaaggtg

SEQ ID NO: 309446 - DNA, 624 bp, Homo sapiens
ttttagtgtgttcactgcgactcatgaaaccacctttgcaaagatgatggcagtgaagagaagcctagtgtgtcccactccacctggcttccgcctcacaggctggctggccttgctcatttgcggacataggccaagctaattatgggaggaatgtagtttaccatttcacttgcaaacaaggatggccatagtccctccctaaaacagatccctccttggtcagggacggaaactaatggaaggccacaagatcaggattatgggaggggcctgggctctgctaaacgtgggcatagtttctagaatcccttactgctcaggagtcatgtggccagagctcacaagatttgtgacttctccggttgctcctatagataacatcactgttgcaggacctaagatttgtctttggagatgtttttcagactttttcattctggcaaccaatggaccccatscacatccatgactcacgactcaaccagtcctgtggcccccacccagaggccgactcagcccacgagaccctctctccaccccctcacgactgcatccctaaacagtcagcagcacccagttcctagccccttgccaccaaattatccataaacaccctagcct

SEQ ID NO: 309447 - DNA, 570 bp, Homo sapiens
aggacaaaattttcacattaatatttttatttttcatatacctattttattatctttatgatctcctttattaatttggataattgcrttttactttttctaaattactctgttgaacattttaaaatatagtacccatggtatcatttagtttaaaatacccgataaatctataacgttagttattcttaaaccataaattgtttagtgtacatgtagctttaatttctaacgtgttgttggtattttcctctttgttgctaaatattaattatttattttatggtttgacaacatagctaggattttgctgattctatgtattgtgtagcaactagtcttatgaactaatacaacatagatttttataatagttcatataactctaaaatatgtatatttcctaaattaagactacaattattaaaaaacaaaaaattacaattatatttatatgaaataagtttgttaatcatgtttaaatttctattttaccatttttatgttcttgcctccctaatcaataatggggacagggaattctgctgtcagaatatacaaacgcgggct

SEQ ID NO: 309448 - DNA, 602 bp, Homo sapiens
ttttaatttcgtctttccaagaacatagaattttagacatcattgcttttcttctcttcaacgatatttgtttttatttacaagcaagtttataagtttgtttgcttgccatttcctcctttatctcagatattcctcctgggatcattttccttcttcttgaagtgtgttccttataacttttcacattaaaatctgttgtggctatattacaataccttattcatcataattgctgaaaaagtaactacttagagctgtttatctccacactattccattgcctctgccacttattgttcctcttgagagtcctctgtstgttaattttcaggcttttctgagtaacacatagtttgttttcattctctgcttgcttttaagaatttctgctttgatgtcctgcagttaaggactacttcctcccctcccaggtttcagtggaaaccatttgaaggacaggacttgacaacagtcctggagtaacaggttttccaccccaccccactgagacagaatcaaacaagagtgggggcttcaccctgcccagcaatgaaatggtcaaggctcacaaacacacaggaagccagtgaaggccatgt

SEQ ID NO: 309449 - DNA, 591 bp, Homo sapiens
tcattctctgcttgcttttaagaatttctgctttgatgtcctgcagttaaggactacttcctcccctcccaggtttcagtggaaaccatttgaaggacaggacttgacaacagtcctggagtaacaggttttccaccccaccccactgagacagaatcaaacaagagtgggggcttcaccctgcccagcaatgaaatggtcaasgctcacaaacacacaggaagccagtgaaggccatgtgcgtaacaactagtgagacactttcacctttcccagcaagaaaggtagcaatggcaactagtgaggagccagaaatcctaccctggccagaagttacaagcagtaaccctcactgggtgtcaacagaggaacctggatttctaccctcacctgatggtagtgagtagcacctgtccttcacatattaaacagtgtcaagagaaatagctaaaataaggaaatgagtaagactacgctatataacataacttccaaagcgtacaaatttcaatgaaaaaactcattcatcataccaagaaccagggagttctcaatagaatgtttaaaaatgaatagataccaacactgaga

SEQ ID NO: 309450 - DNA, 591 bp, Homo sapiens
tcattctctgcttgcttttaagaatttctgctttgatgtcctgcagttaaggactacttcctcccctcccaggtttcagtggaaaccatttgaaggacaggacttgacaacagtcctggagtaacaggttttccaccccaccccactgagacagaatcaaacaagagtgggggcttcaccctgcccagcaatgaaatggtcaaggctcacaaacacacaggaagccagtgaaggccatgtgcgtaacaactagtgagacactttcacctttcccagcaagaaaggtagcaatggcaactagtgaggagccagaaatcctaccctggccagaagttacaagcagtaaccctcactgggtgtcaayagaggaacctggatttctaccctcacctgatggtagtgagtagcacctgtccttcacatattaaacagtgtcaagagaaatagctaaaataaggaaatgagtaagactacgctatataacataacttccaaagcgtacaaatttcaatgaaaaaactcattcatcataccaagaaccagggagttctcaatagaatgtttaaaaatgaatagataccaacactgaga

SEQ ID NO: 309451 - DNA, 564 bp, Homo sapiens
ttctaccctcacctgatggtagtgagtagcacctgtccttcacatattaaacagtgtcaagagaaatagctaaaataaggaaatgagtaagactacgctatataacataacttccaaagcgtacaaatttcaatgaaaaaactcattcatcataccaagaaccagggagttctcaatagaatgtttaaaaatgaatagataccaacactgagatgacagataattggaattacattataaagattttaaatagccattctaaaaaaygaaaaattgtgaacacaattgaaacaaaataaagaagcctcatcaaatagaaagtctgagcaaaaataatagaagatataaaaaggaaccaaatggaaattttagaactgaaaagtataaccacaataaaacacacacatgaacatacacacaatagatgagcttaacagcaaaacggaggagacaggaaaaaaagtggaaaaaatatagaacaatagaaataatattgttctaaatagagaacaatagaaattgcccattgtgtaatattgagtgtcaacctgattggattgaagg

SEQ ID NO: 309452 - DNA, 564 bp, Homo sapiens
ttctaccctcacctgatggtagtgagtagcacctgtccttcacatattaaacagtgtcaagagaaatagctaaaataaggaaatgagtaagactacgctatataacataacttccaaagcgtacaaatttcaatgaaaaaactcattcatcataccaagaaccagggagttctcaatagaatgtttaaaaatgaatagataccaacactgagatgacagataattggaattacattataaagattttaaatagccattctaaaaaacgaaaaattgtgaacacaattgaaacaaaataaagaagcctcatcaaatagaaagtctgagcaaaaawaatagaagatataaaaaggaaccaaatggaaattttagaactgaaaagtataaccacaataaaacacacacatgaacatacacacaatagatgagcttaacagcaaaacggaggagacaggaaaaaaagtggaaaaaatatagaacaatagaaataatattgttctaaatagagaacaatagaaattgcccattgtgtaatattgagtgtcaacctgattggattgaagg

SEQ ID NO: 309453 - DNA, 564 bp, Homo sapiens
ttctaccctcacctgatggtagtgagtagcacctgtccttcacatattaaacagtgtcaagagaaatagctaaaataaggaaatgagtaagactacgctatataacataacttccaaagcgtacaaatttcaatgaaaaaactcattcatcataccaagaaccagggagttctcaatagaatgtttaaaaatgaatagataccaacactgagatgacagataattggaattacattataaagattttaaatagccattctaaaaaacgaaaaattgtgaacacaattgaaacaaaataaagaagcctcatcaaatagaaagtctgagcaaaaatawtagaagatataaaaaggaaccaaatggaaattttagaactgaaaagtataaccacaataaaacacacacatgaacatacacacaatagatgagcttaacagcaaaacggaggagacaggaaaaaaagtggaaaaaatatagaacaatagaaataatattgttctaaatagagaacaatagaaattgcccattgtgtaatattgagtgtcaacctgattggattgaagg

SEQ ID NO: 309454 - DNA, 543 bp, Homo sapiens
gatttgccaggggctcttgggccttcggccacagactgaaggctgcactgtcagttcctcatttttgaggtttgggactcggactggcttccaggctcctcagcttgcagacagcctattgtgggacttcatcttgtgatcgtgtcagtcaattctccttaataaagtccctttcatatagacgtctatcctattagtcctgtccctctagagaaccctgactaatacgcccattctataacacagagggaaaaagcatactgaatataaccttaggaactagtaaaaatataagraaaaaataacatttacattattagaggtccagaatgaaaagaaaaaaagttggtctaaaaaagcactcaaataatgattaaaatttttcccaaatggcaagagacacaaaacccacagattcaaaaaactgaatgaaccccaaagaaattcactcattatagtcatagagtgaaaaatataaagatagaaaaatacctgaaagtggtgacagagtagtaacaccttacctatagataaaaagtgatt

SEQ ID NO: 309455 - DNA, 543 bp, Homo sapiens
gatttgccaggggctcttgggccttcggccacagactgaaggctgcactgtcagttcctcatttttgaggtttgggactcggactggcttccaggctcctcagcttgcagacagcctattgtgggacttcatcttgtgatcgtgtcagtcaattctccttaataaagtccctttcatatagacgtctatcctattagtcctgtccctctagagaaccctgactaatacgcccattctataacacagagggaaaaagcatactgaatataaccttaggaactagtaaaaatataagaaaaaaataacatttacattattagaggtccagaatgaaaakaaaaaaagttggtctaaaaaagcactcaaataatgattaaaatttttcccaaatggcaagagacacaaaacccacagattcaaaaaactgaatgaaccccaaagaaattcactcattatagtcatagagtgaaaaatataaagatagaaaaatacctgaaagtggtgacagagtagtaacaccttacctatagataaaaagtgatt

SEQ ID NO: 309456 - DNA, 550 bp, Homo sapiens
ccaactcatttggaagcaaggtagggtccttatttaaatttgattcatgtgtctacattagattttcagggggacaccacaccgggagcatgactctgtttctgtgtatctactagatgtgtgtcygctagaataatcattacagtatcgttcttccaggagatataagggaaggaaaataaaaggataaatcacatgcttagataaaagaatgggaggtgacttggttttaggggagcattttggactttaaatctctgcagacaagccagattccagcagaggttctgaaactcactttctgcatggtgaaatcacataatttactcatatctcagaatccccgagcatagaaaatagcttgctttcttttcttgccaaactcccaagaatacacagaaaaatcctctaacaacttcaaatcttcttgaacaagatggaaagggataacaatgaaactttaagcccttttggaaattcaaatccaaatgttgatacgtcaaactcagagagaacaaataggtctgctggagcggcttatttaacatct

SEQ ID NO: 309457 - DNA, 510 bp, Homo sapiens
ttttgtgtgaaattgccttccattgtagatttaatatcaatgcagatttctctcatttaatatttgatttataagtctgatgataacaccatgtttttcaaattctctatcataaatcaatcttctgtaacatatttacaatgtctacaatcatacaggagaatgggtctttttcacctgttttattatagatgcgtgtgttgcatgatgtctcattaacccttcaactccactyattcttcctgagggtcatttcctacgcagttcataaatgtagacttgtagacgagttaaagtttatgtgcttaagattttaaaccatagtggtttcacaaagaaggaataagtgtgcctcaaagaaaatagatctttgtatctacttgaaaagaaatttggtcccagaagtttaaaatatttatgtaatggttttaagtttgtaacatataccaagagtatcttatttgagaaaaaaatcttttgaagacataagtttcatatctttttaaaaat

SEQ ID NO: 309458 - DNA, 510 bp, Homo sapiens
ttttgtgtgaaattgccttccattgtagatttaatatcaatgcagatttctctcatttaatatttgatttataagtctgatgataacaccatgtttttcaaattctctatcataaatcaatcttctgtaacatatttacaatgtctacaatcatacaggagaatgggtctttttcacctgttttattatagatgcgtgtgttgcatgatgtctcattaacccttcaactccacttattcttcctgagggtcatttcctacgcagttcataaatgtagacttgtagacgagttaaagtttatgtgcttaagattttaaaccatagtggtttcacaaagaaggaataagtgtgcctcaaagaaaatagatctttgtatctacttgaaaagaaatttggtcccagaagyttaaaatatttatgtaatggttttaagtttgtaacatataccaagagtatcttatttgagaaaaaaatcttttgaagacataagtttcatatctttttaaaaat

SEQ ID NO: 309459 - DNA, 510 bp, Homo sapiens
ttttgtgtgaaattgccttccattgtagatttaatatcaatgcagatttctctcatttaatatttgatttataagtctgatgataacaccatgtttttcaaattctctatcataaatcaatcttctgtaacatatttacaatgtctacaatcatacaggagaatgggtctttttcacctgttttattatagatgcgtgtgttgcatgatgtctcattaacccttcaactccacttattcttcctgagggtcatttcctacgcagttcataaatgtagacttgtagacgagttaaagtttatgtgcttaagattttaaaccatagtggtttcacaaagaaggaataagtgtgcctcaaagaaaatagatctttgtatctacttgaaaagaaatttggtcccagaagtttaaaatatttatgtaatggttttaagtttrtaacatataccaagagtatcttatttgagaaaaaaatcttttgaagacataagtttcatatctttttaaaaat

SEQ ID NO: 309460 - DNA, 510 bp, Homo sapiens
ttttgtgtgaaattgccttccattgtagatttaatatcaatgcagatttctctcatttaatatttgatttataagtctgatgataacaccatgtttttcaaattctctatcataaatcaatcttctgtaacatatttacaatgtctacaatcatacaggagaatgggtctttttcacctgttttattatagatgcgtgtgttgcatgatgtctcattaacccttcaactccacttattcttcctgagggtcatttcctacgcagttcataaatgtagacttgtagacgagttaaagtttatgtgcttaagattttaaaccatagtggtttcacaaagaaggaataagtgtgcctcaaagaaaatagatctttgtatctacttgaaaagaaatttggtcccagaagtttaaaatatttatgtaatggttttaagtttgtaacatataccaagagtatcttatttgagaaaaaaatcttttgaagacrtaagtttcatatctttttaaaaat

SEQ ID NO: 309461 - DNA, 568 bp, Homo sapiens
agcaatgaaaaaaaaaaggaattctacatctcaagaataaagacgttttagatraatagaatgaccacaaatgctcacttgaagacataatcttctaaatgatgtacttacgtggaaaaagtgatctacaaaagaagttttaaaggcaacaaaaatagaggattttgggtatactaaacactgcatagagatattactgccaaccttgtggggttaaaactaataattccatttattatatggatgtgtgtatgtgtatagacatacacatctgaataatgtttattatgtgtacacacacatccgtatagtaaacactgcatagaaatattagtgccaaccttgtggggttaaaaataatttagagcaacacttaacggacaactgtgccttagtccaagacttcaggtttgcacaggtcctctcatttgggatgagataggagaagggcagtggaaagagagagacagggggcatggaaatgccagtcaacaagcatgcaaacatcagtgtctttcatcacctcttggacatcctgagctcttagaaagaggaaatttgaatatca

SEQ ID NO: 309462 - DNA, 568 bp, Homo sapiens
agcaatgaaaaaaaaaaggaattctacatctcaagaataaagacgttttagatgaatagaatgaccacaaatgctcacttgaagacataatcttctaaatgatgtacttacgtggaaaaagtgatctacaaaagaagttttaaaggcaacaaaaatagaggattttgggtatactaaacactgcatagagatattactgccaaccttgtggggttaaaactaataattccatttattatatggatgtgtgtatgtgtatagacatacacatctgaataatstttattatgtgtacacacacatccgtatagtaaacactgcatagaaatattagtgccaaccttgtggggttaaaaataatttagagcaacacttaacggacaactgtgccttagtccaagacttcaggtttgcacaggtcctctcatttgggatgagataggagaagggcagtggaaagagagagacagggggcatggaaatgccagtcaacaagcatgcaaacatcagtgtctttcatcacctcttggacatcctgagctcttagaaagaggaaatttgaatatca

SEQ ID NO: 309463 - DNA, 568 bp, Homo sapiens
agcaatgaaaaaaaaaaggaattctacatctcaagaataaagacgttttagatgaatagaatgaccacaaatgctcacttgaagacataatcttctaaatgatgtacttacgtggaaaaagtgatctacaaaagaagttttaaaggcaacaaaaatagaggattttgggtatactaaacactgcatagagatattactgccaaccttgtggggttaaaactaataattccatttattatatggatgtgtgtatgtgtatagacatacacatctgaataatgtttattrtgtgtacacacacatccgtatagtaaacactgcatagaaatattagtgccaaccttgtggggttaaaaataatttagagcaacacttaacggacaactgtgccttagtccaagacttcaggtttgcacaggtcctctcatttgggatgagataggagaagggcagtggaaagagagagacagggggcatggaaatgccagtcaacaagcatgcaaacatcagtgtctttcatcacctcttggacatcctgagctcttagaaagaggaaatttgaatatca

SEQ ID NO: 309464 - DNA, 454 bp, Homo sapiens
cctgttctgttgcacatagatgccacagtatgtggatctattcatccattgatggacacctgggttgcttccaccctctggctgttacgaatggtgttgctatgaacgtggatataaaatatctctttaagacactgattgaattcttttaggtacatactcagaagtgagactggcaggttatatggtagttctatcttcagtttttttgaggaaccaccagactgttttctgcaaccgctgccccattaacttgtttgtggtaatcactatacaatctatatacatataaaataataacattgtacaccacggctctctggtggtcactcacacaggtgmacagggcagaaagcctcaagccgcccagctgaggttgaacaaggctccacacggtgagacgcgtgtccttttcacagtggatgtagtgccctgcttttgcatgtgtgagtgt

SEQ ID NO: 309465 - DNA, 489 bp, Homo sapiens
ataaatacggaagtgtgtgtatgtgtacaggttaataatatacatgcctttatttccacaactgtccactgagcagcctagaaatgatgatacctcagtagcaaygagcacacctatgtaaaattcatgatttataaaagccattctcttataaaagggatcaggtctgcttggagaagtggctgactccacgacctgagtctggaaataacgtgtggtgctgcaaagtaaggctatacccacacccctgaaaaagggggaaaaaaagaaggctgggagaatgtttggaggaacactggagtcactccaaagccagaggggcccccggtcaccaaagctggatcaattggaaatcaataatgatagtattgcatcataacccgcagaataagataaatacccacaagtccatacctaaaatagttaatggaataaatgtacataagtgagtagaaggggtagcacttccttgtaaaacaatgccaagta

SEQ ID NO: 309466 - DNA, 605 bp, Homo sapiens
tccctcgggtacctacaccacaatggacctgagtttcaagcacaaaactgggccgccatttgggcagaygccgagctagctgcaggagtctttttttgtaccccaatggcgcctggaacatcagcgagacagaaccattcactcccctggaaagggggctgaagccaggcagccaagtggtcttgctccagtggatcccaccccaacagaacccagcaagctaagatcaactggctggaaattctagctgccagcacagcagtctggtcaacctgggatgcttgagcttggtggggggaggggtgtctgccattactgaggcttgagtaggcggttttctactcgcagtgtaaacaaagacaccagaagttcagactgggcagagaacactgccaagctgcaaagtcgctgtagccagactgcctctctagattcctcctctctgggcagggcatttctgaaagaaaggcagcagccccagtcagggacttatagataaaactcccacctccctgggacagagcacctgggggaagaggcagttgtgggtgcagcttcagcagacttaagcgttcttgcgtcccggctctgaagagagcagcggc

SEQ ID NO: 309467 - DNA, 605 bp, Homo sapiens
tccctcgggtacctacaccacaatggacctgagtttcaagcacaaaactgggccgccatttgggcagacgccgagctagctgcaggagtctttttttgtaccccaatggcgcctggaacatcagcgagacagaaccattcactcccctggaaagggggctgaagccaggcagccaagtggtcttgctccagtggatcccaccccaacagaacccagcaagctaagatcaactggctggaaattctagctgccagcacagcagtctggtcaacctgggatgcttgagcttggtkgggggaggggtgtctgccattactgaggcttgagtaggcggttttctactcgcagtgtaaacaaagacaccagaagttcagactgggcagagaacactgccaagctgcaaagtcgctgtagccagactgcctctctagattcctcctctctgggcagggcatttctgaaagaaaggcagcagccccagtcagggacttatagataaaactcccacctccctgggacagagcacctgggggaagaggcagttgtgggtgcagcttcagcagacttaagcgttcttgcgtcccggctctgaagagagcagcggc

SEQ ID NO: 309468 - DNA, 543 bp, Homo sapiens
ggatcccaccccaacagaacccagcaagctaagatcaactggctggaaattctagctgccagcacagcagtctggtcaacctgggatgcttgagcttggtggggggaggggtgtctgccattactgaggcttgagtaggcggttttctactcgcagtgtaaacaaagacaccagaagttcagactgggcagagaacactgccaagctgcaaagtcgctgtagccagactgcctctctagattcctcctctctgggcagggcatttctgaaagaaaggcagcagccccagtcagggacttayagataaaactcccacctccctgggacagagcacctgggggaagaggcagttgtgggtgcagcttcagcagacttaagcgttcttgcgtcccggctctgaagagagcagcggctctcccagcacagcattcaaactctgctaagggtcagactgcctcctcaagtgggtccctgacccccatgcctcctgactgggatacacctcccagcaggggttgacagacacctcatacaggagagctc

SEQ ID NO: 309469 - DNA, 567 bp, Homo sapiens
agcctgtagtcaggcatacggaggtgctgaaggctgtctggcttgctrtgtgggccaggcatagtggatagtcacactatcagaccatcagagagtgaggctgtcctttgcacagacatgaatatcgtcacgtgtccctgcaggaagagagttttatgcacgctaccttagtattgacttcatatacataggggaaaattctatttaaaatgcttctggtcaatgatttgagctcagcttgcctggagtgtaatttaccagaaagaaaaaaatggacttcattaaaattagagacctctgctctgcaaaagacactgttcatacaataagaagacaagccagagactagcagcaagtgtttttaaaaggtgtgtctgataaaacactgatacccaaaatatacaaagaatccttaaaactcagcaataagaaaataacccaattaaaacatggacaaacaatctgtacatatcaccaaaaaaaaaaaaaatatgctgatcggaactaagtaaatgaaagagactttagaaaagctcatgttaaaataatgacatactgaacacacct

SEQ ID NO: 309470 - DNA, 543 bp, Homo sapiens
ggatcccaccccaacagaacccagcaagctaagatcaactggctggaaattctagctgccagcacagcagtctggtcaacctgggatgcttgagcttggtggggggaggggtgtctgccattactgaggcttgagtaggcggttttctactcgcagtgtaaacaaagacaccagaagttcagactgggcagagaacactgccaagctgcaaagtcgctgtagccagactgcctctctagattcctcctctctgggcagggcatttctgaaagaaaggcagcagccccagtcagggacttatagataaaactcccacctccctgggacagagcacctgggggaagaggcagttgtgggtgcagcttcagcagacttaagcgttcttgcgtcccggctctgaagagagcagcggctctcccagcacagcattcaaactctgctaarggtcagactgcctcctcaagtgggtccctgacccccatgcctcctgactgggatacacctcccagcaggggttgacagacacctcatacaggagagctc

SEQ ID NO: 309471 - DNA, 612 bp, Homo sapiens
ttccttagaaaccaaaatgaaaatcaagtccacgcttctttaagaaactctcaaagatttttgtacttaatttgggtcccactgactttgtgacttgtctacgcttgcagagccggcaaagcgtgtttgttcagcaatcccagctcaacatcaggcagcccctgctgcgcagctccatctgctggtgacacctgcacacatccctggagcacctgctcacatcccagctgttctcacaggccccaattctccatttacacctatgcacctgctcccttcgggcgcttctgcacaccgcactgtagggagcattcacctgcttttctcctttatgctcctccaaacaggaaggctccagtagccattaaagtggatggagcatagctaattttccaaatcgtattgatgatgtcatccacattgcaaataactatatggaatgtgaacaacattaaacacttcacctttcagtacagagcgaattctaagtatgacataargtcattagaagactgtacattttgacgagattcaagttgctatgatcattaaaagtaaaagggactaggaaataacggtgaacctaggagtgcattgataacaatgaaatgc

SEQ ID NO: 309472 - DNA, 520 bp, Homo sapiens
cttgtctatcttccctggcagcacgtcttccacctcatggctcgtaccccacacactgcagccatagcttctggttcttgcccttgctgtattgctacagtccctcaatagagcacaygtatttctaaaatgtaaaataagtattatttttgctaaagaatattaactcatccatgagttaaaagtaatttggatagccccgtcgaatacattttcaagcattatattctcagctttgattttcctcagtagcttgactctctaagaatagctctcaatatttctttccatcattgaggttccagtccaaatttgtaattcagaggaatgtctgtgatccagaaagttaagaaaattatttcccaagctgattatgatttggaatttaatatcgcctggtttatcctagcagaagttattgtttctttttgttgtagttaaccatagaaatactaacactattcataatcatgtctcataattcctttgtacataacttttaagaggagtttatagtctg

SEQ ID NO: 309473 - DNA, 520 bp, Homo sapiens
cttgtctatcttccctggcagcacgtcttccacctcatggctcgtaccccacacactgcagccatagcttctggttcttgcccttgctgtattgctacagtccctcaatagagcacacgtatttctaaaatgtaaaataagtattatttttgctaaagaatattaactcatccatgagttaaaagtaatttggatagccccgtcraatacattttcaagcattatattctcagctttgattttcctcagtagcttgactctctaagaatagctctcaatatttctttccatcattgaggttccagtccaaatttgtaattcagaggaatgtctgtgatccagaaagttaagaaaattatttcccaagctgattatgatttggaatttaatatcgcctggtttatcctagcagaagttattgtttctttttgttgtagttaaccatagaaatactaacactattcataatcatgtctcataattcctttgtacataacttttaagaggagtttatagtctg

SEQ ID NO: 309474 - DNA, 559 bp, Homo sapiens
cttgtctatcttccctggcagcacgtcttccacctcatggctcgtaccccacacactgcagccatagcttctggttcttgcccttgctgtattgctacagtccctcaatagagcacacgtatttctaaaatgtaaaataagtattatttttgctaaagaatattaactcatccatgagttaaaagtaatttggatagccccgtcgaatacattttcaagcattatattctcagctttgattttcctcagtagcttgactctctaagratagctctcaatatttctttccatcattgaggttccagtccaaatttgtaattcagaggaatgtctgtgatccagaaagttaagaaaattatttcccaagctgattatgatttggaatttaatatcgcctggtttatcctagcagaagttattgtttctttttgttgtagttaaccatagaaatactaacactattcataatcatgtctcataattcctttgtacataacttttaagaggagtttatagtctggtttctaaacatactaattatttctacatgtgtggtctt

SEQ ID NO: 309475 - DNA, 484 bp, Homo sapiens
gattttacttagatttcccctcatgagctccttgtttattggttggttggttcrttggttttgttgagttggtttgttttgttctgttttcacagtcttattaagaaggaaatttacattccgtagaattcacccatgtaaggtgtacaattgaatggtttctagtatattcacagaattatgcatccatcaccactaccagttataaaacattttcactacctggaaaagaaacatggtactcagccatggccgctcaatctctggatcccccactctagtcctaggaaaccactaatctactttctgtccctatagatttgctgatactggacatttcatataaatggaatcacacaatacaaggccttttgtcactggctttttcactaacatgatcttttcagggttatccaacatagcacagatcagtattttattttcattgccaaatcatcttccatcctaaggttataccacattt

SEQ ID NO: 309476 - DNA, 541 bp, Homo sapiens
  misc_feature (1)...(541): n = A,T,C or G
atcttaagataatcgttaatgctttttaataaatgtttggcacatttgtgtacagttttgcacatatatcattagttttatgccaagatacttgataacattgttgctcatatgatttttaaattatatcttatgattgctgtttgtttgcagaaacacttgctaggccctccaataaaatgttacaggggtaccatgaaaggagacattcttgtttgtcttccttacttaaataaatgcatctatattttctattgagactctttttgttgtgggacttctgtagttatctcttatgaggttaagaaagtcttcttgtggggaggagccaagatggcggaataggaacagctccggtctacacctcccagtgtgagcgacgcagaagacgggtgatttctgcatttccatctgaggtaccgggatcatctcactagggagtgtcagagagtgggcgcaagtcagtgrgtgcatgcaccgtgcgcgacgcgaagcagggcangtcattgccttactcgggaagtgcaaggggtcagggagt

SEQ ID NO: 309477 - DNA, 541 bp, Homo sapiens
  misc_feature (1)...(541): n = A,T,C or G
atcttaagataatcgttaatgctttttaataaatgtttggcacatttgtgtacagttttgcacatatatcattagttttatgccaagatacttgataacattgttgctcatatgatttttaaattatatcttatgattgctgtttgtttgcagaaacacttgctaggccctccaataaaatgttacaggggtaccatgaaaggagacattcttgtttgtcttccttacttaaataaatgcatctatattttctattgagactctttttgttgtgggacttctgtagttatctcttatgaggttaagaaagtcttcttgtggggaggagccaagatggcggaataggaacagctccggtctacacctcccagtgtgagcgacgcagaagacgggtgatttctgcatttccatctgaggtaccgggatcatctcactagggagtgtcagagagtgggcgcaagtcagtgagtgcatgcaccgtgcgcgasgcgaagcagggcangtcattgccttactcgggaagtgcaaggggtcagggagt

SEQ ID NO: 309478 - DNA, 541 bp, Homo sapiens
  misc_feature (1)...(541): n = A,T,C or G
atcttaagataatcgttaatgctttttaataaatgtttggcacatttgtgtacagttttgcacatatatcattagttttatgccaagatacttgataacattgttgctcatatgatttttaaattatatcttatgattgctgtttgtttgcagaaacacttgctaggccctccaataaaatgttacaggggtaccatgaaaggagacattcttgtttgtcttccttacttaaataaatgcatctatattttctattgagactctttttgttgtgggacttctgtagttatctcttatgaggttaagaaagtcttcttgtggggaggagccaagatggcggaataggaacagctccggtctacacctcccagtgtgagcgacgcagaagacgggtgatttctgcatttccatctgaggtaccgggatcatctcactagggagtgtcagagagtgggcgcaagtcagtgagtgcatgcaccgtgcgcgacscgaagcagggcangtcattgccttactcgggaagtgcaaggggtcagggagt

SEQ ID NO: 309479 - DNA, 551 bp, Homo sapiens
cgctcgttctgtttctgattaactcrcgggtcatgaggctgctgttgcagggagatccagagctggaaaacaccgctatagaccagcacaacttcacattttggtctacatggatcattttgagagtatgattaaacatctaatctccaattaaaaagaaatccatgtgtatacctctttccaaaatatcccatatatattcagaaataagggctttttaatacaaaatcacttaattcttccaaacgtcgttatctgtgccacctacagttgcaaccacgttcaaggtagagactgactagcttgatacaatggatgtttaggattatctcttgcagggaaaatggagaaaataagcttttttaatattgctctttaaacctagatatgttggccattttagggtttacttacatgatgtaaaaagtacctaccagggcaatagttttaaaacccttatttccaaagcttataaatgcttctgtgggttctaccttaattgttataaacagccttttctccatctctcattcactctgcttcaggcctgc

SEQ ID NO: 309480 - DNA, 551 bp, Homo sapiens
cgctcgttctgtttctgattaactcgcgggtcatgaggctgctgttgcagggagatccagagctggaaaacaccgctatagaccagcacaacttcacattttggtctacatggatcattttgagagtatgattaaacatctaatctccaattaaaaagaaatccatgtgtatacctctttccaaaatatcccatatatattcagaaataagggctttttaatacaaaatcacttaattcttccaaacgtcgttatctgtgccacctacagttgcaaccacgttcaaggtagagactgactagcttgatacaatggatgtttaggattatctcttgcagggaaaatggagaaaataagcttttttaatattgctctttaaacctagatatgttggccattttagggtttacttacatgwtgtaaaaagtacctaccagggcaatagttttaaaacccttatttccaaagcttataaatgcttctgtgggttctaccttaattgttataaacagccttttctccatctctcattcactctgcttcaggcctgc

SEQ ID NO: 309481 - DNA, 555 bp, Homo sapiens
aacagattcttggtagcaataagatactcagttccagcctgactctggtatagcatcacataatagatagcaagccctgaagaaatcggagtattttatccccaaaatatatttatttggcatattttgaaacagccccacaaagctatttcttgtggaggaaacttggcttctatagagaatctccatccctttctaggtcattttctgatccaggagagacttgactgagtctgacaccctttagggtcctataagagacatttaccatttattctctctgaagctgctacctggaggcttcatctacayaccaagaaccttggcttccacaacacccttaatcttaaagcatttcattctacccattgcaactttttaggcaaagcttaactctttcagtctttgaatccacatgtgacctgtaaccaacccctcccacccctgtcagcttcaagacatttttcctttctggaccaaaccaatgtataccttccatttattgatttattcgtttgtctgtaacttctgtctccctcaaatgtataaaatcaa

SEQ ID NO: 309482 - DNA, 540 bp, Homo sapiens
acattgtattaatgaggtagagggaatcaaaaattatttgggcaaacgggagtagctctgcttgagtgcacttgaggagggggttggggaggaggggaagtgacagttcatctccttgtggccacagactgcagtcactggcgtagaagccaagaggggggtgtcaaagtttctgatcaggcttaattaaaaaaagaaaaaaaggccgggcatggtggccactttgggaggccgaggtgggtggatcacctgaggtcaggagtttgagaccagcctggccaacatagtgaaaccctgtctctagtaaaaatacaaaaattattcgggcgtgttggtgggtgcctgtaatcccagctactagggaggctgaggcaggagaattgcttgaatccagaaggtggaggttgcagtgagccaaaatttcaccattgcactccagcctgagcaacaagagcacaactccatctcaaaaatmaaaaaagaaaaaaaacaaaagatacaatgtccaaacagtttcatgaatttagataagtgaaaaag

SEQ ID NO: 309483 - DNA, 540 bp, Homo sapiens
acattgtattaatgaggtagagggaatcaaaaattatttgggcaaacgggagtagctctgcttgagtgcacttgaggagggggttggggaggaggggaagtgacagttcatctccttgtggccacagactgcagtcactggcgtagaagccaagaggggggtgtcaaagtttctgatcaggcttaattaaaaaaagaaaaaaaggccgggcatggtggccactttgggaggccgaggtgggtggatcacctgaggtcaggagtttgagaccagcctggccaacatagtgaaaccctgtctctagtaaaaatacaaaaattattcgggcgtgttggtgggtgcctgtaatcccagctactagggaggctgaggcaggagaattgcttgaatccagaaggtggaggttgcagtgagccaaaatttcaccattgcactccagcctgagcaacaagagcacaactccatctcaaaaatcaaaaaagaaaaaaaacaaaagatacaatgtccaaacagtttcrtgaatttagataagtgaaaaag

SEQ ID NO: 309484 - DNA, 568 bp, Homo sapiens
actagggacaaatgcattttggaatataaatcaagaattctactttgatcatactgagtttgagatgtctcctagacaggtaaatgggatattaagtaggcaattagatatgcaagtcctaagtgcagtggagaaatcagagctggagacaaatacttacaagttatggwaatcatcgatagtatttaagccagggagtgggtatcaccccaaattagcatatagatagagcaaagtggatgcataggaatgaaccccagggcactccaactttagaggccaagcagctgagtggggattggcaaaggaaaatgggaaggagtgaccaaggaagcaggaggaaaacacagagaaatctgtggcacagaaacaaaggaaagtgagtgagtgaataaagaaggcacagtcaattgggtcaaacactactgagaggctgagttggatgaagacaaagaagtagccattggatttagcaacacaaaggccattagtaccgctggcaggagcgatttagaacataaacccaactggaatgtgttgtaacagagaataggaggtagcaaggaca

SEQ ID NO: 309485 - DNA, 568 bp, Homo sapiens
actagggacaaatgcattttggaatataaatcaagaattctactttgatcatactgagtttgagatgtctcctagacaggtaaatgggatattaagtaggcaattagatatgcaagtcctaagtgcagtggagaaatcagagctggagacaaatacttacaagttatggaaatcatcgatrgtatttaagccagggagtgggtatcaccccaaattagcatatagatagagcaaagtggatgcataggaatgaaccccagggcactccaactttagaggccaagcagctgagtggggattggcaaaggaaaatgggaaggagtgaccaaggaagcaggaggaaaacacagagaaatctgtggcacagaaacaaaggaaagtgagtgagtgaataaagaaggcacagtcaattgggtcaaacactactgagaggctgagttggatgaagacaaagaagtagccattggatttagcaacacaaaggccattagtaccgctggcaggagcgatttagaacataaacccaactggaatgtgttgtaacagagaataggaggtagcaaggaca

SEQ ID NO: 309486 - DNA, 568 bp, Homo sapiens
actagggacaaatgcattttggaatataaatcaagaattctactttgatcatactgagtttgagatgtctcctagacaggtaaatgggatattaagtaggcaattagatatgcaagtcctaagtgcagtggagaaatcagagctggagacaaatacttacaagttatggaaatcatcgatagtatttaagccagggagtgggtatcaccccaaattagcatatagatagagcaaagtggatgcataggaatgaaccccagggcactccaactttagaggccaagcagctgagtggggattggcaaaggaaaatgggaaggagtgaccaaggaagcaggaggaaaacacagagaaatctgtggcacagaaacaaaggaaagtgagtgagtgaataaagaaggcacagtcaattgggtcaracactactgagaggctgagttggatgaagacaaagaagtagccattggatttagcaacacaaaggccattagtaccgctggcaggagcgatttagaacataaacccaactggaatgtgttgtaacagagaataggaggtagcaaggaca

SEQ ID NO: 309487 - DNA, 568 bp, Homo sapiens
actagggacaaatgcattttggaatataaatcaagaattctactttgatcatactgagtttgagatgtctcctagacaggtaaatgggatattaagtaggcaattagatatgcaagtcctaagtgcagtggagaaatcagagctggagacaaatacttacaagttatggaaatcatcgatagtatttaagccagggagtgggtatcaccccaaattagcatatagatagagcaaagtggatgcataggaatgaaccccagggcactccaactttagaggccaagcagctgagtggggattggcaaaggaaaatgggaaggagtgaccaaggaagcaggaggaaaacacagagaaatctgtggcacagaaacaaaggaaagtgagtgagtgaataaagaaggcacagtcaattgggtcaaacactactgagaggctgagttggatgaagacaaagaagtagccattggatttagcaacacaaaggccattagtaccsctggcaggagcgatttagaacataaacccaactggaatgtgttgtaacagagaataggaggtagcaaggaca

SEQ ID NO: 309488 - DNA, 551 bp, Homo sapiens
ccacttatatctgttatacttggcacctgggtcctcattctccccttaatccctttcttccttcctccactttcatggccatatacagaggtttgaaacaaagtgtgagtaagagctttcaagcaggaagagtgatctttcatcaattggaggaaagaaatgtaaggtacatttattaacacatcggattcaacactactttctgccagtcactttgatagatattaaggatacagcagtggaccagacacacacattaccttccttcataaagcttatgatcttcagaaagcaagtttgtcagaaaagtcaaaggtaatcatagcaggaaatgtggattaaaaatgaagcagaggccctctgataaaaggtctacctgccacccaaaaaggctggattccttgggtacatgatggggagacaataaagggatgtaagcagtagtgcagttggatttgcratgagaaagggtgctctggcagtcgtattgaaaaatttaggtgggataaaactgagacttgcatgaccaattagaggctcacagtaatcca

SEQ ID NO: 309489 - DNA, 485 bp, Homo sapiens
tgaagcctcctgtccctggtggttatactttacaaggaaaatggataacaacattttgcaaccaggttcagttagacacaattaagataaatggctgtttgaaaggcaaactcatttacctcctgggagactctacactacgtcagtggatctactacttccccaaagttgtaaaaagtaggtagttactttatattctcttagaaattcaggctggttttaaagtacttttaatgaggtctctattctctcgtttgagctattttgttttttacttcatttggctytctggatttgaacctttacatttaaaatgtattttattccttctttcataagaaatgttggtcttcttttaaaattccagtgaaaactttacatttttgattgacattttacatgtatgaactgggggtactgtaccctagagagtagaaaggctccagtgagcaattatctaggtagggtgggtattttaaatgata

SEQ ID NO: 309490 - DNA, 571 bp, Homo sapiens
tagttactttatattctcttagaaattcaggctggttttaaagtacttttaatgaggtctctattctctcgtttgagctattttgttttttacttcatttggctctctggatttgaacctttacatttaaaatgtattttattccttctttcataagaaatgttggtcttcttttaaaattccagtgaaaactttacatttttgattgacattttacatgtatgaactgggggtactgtaccctagagagtagaaaggctccagtgagcaattatctaggtrgggtgggtattttaaatgataggacattctttttcatgaatattaaccattatcttctatttaaaacatctatttgtttttttatcagcactgaagttttttgatcttcatgaaactggaatctttaagaaacatttgcttctggatgcagaaagacacactcagattcaatggaaaaaacatagctatcccttcgtcactttccagctctactctctgatagatcatgattatatccctcgggaaattgaccggctatcaggtgacaaaaacacagccatcgtcatca

SEQ ID NO: 309491 - DNA, 546 bp, Homo sapiens
agaaagtaacccagaggaaaaaggtgggaaagcattccagaaggaacagcatgtacaaaagggaccatcttttcatgtggctttgtgtccgttcctctccttgcgtgtgctcttattttcagataagatgatttgtaaaataatgtggcacttctgttaaggctcattatatagatcatttttacaactatctgaattccaaaaaagtttttcaataataataataataataaggcttgctttctccacttatgcaataaaatctatctcagaattcaatctatcccaggtcagaccaagagcatagtattaaattatctggtgatgaattatggacatgtaggtttttattaattgggaaagatttgatactccatcactgtatctataattttgtaatctgagagaccaaggtaagcaagacggatagagttaaatctgttttctcttaacttgmgactcctactaaattttgaattgctcttgattaggctcttgagtgtcctacccttgcctgaatgtccctactacacctagtataagaca

SEQ ID NO: 309492 - DNA, 544 bp, Homo sapiens
atttttgtatatatatatatatatataaaatccttgttcatttatatttgtacatttagttcccttctttttcattcttctttgccgttctctactgtcatttgggagaatttatcttctgcttcaagaactatctttaatattctgtaagacatcttctagtgacaaattctcaaggttacattttaaaaaatcttattttgctttcattttgagggtttcttttgcgggctatacaattctagattgacaagtgttatttatttatttttgtttttggtggttaaaagcatcagcactttkaatatgttacctcattttccttctatttccctaactgccctttgttcctctcttgctttctctctagaatctagatctctcaacccctcactgccccagttgctctctgacgcttaacagatcaaatataacatcctctagcttttctagttgctctcaaaaggagactataagcaagtctactattttgggaaacataaattttatttataattataaatataaactatacacacatcta

SEQ ID NO: 309493 - DNA, 581 bp, Homo sapiens
cttttaactttgttttcttggcatgtcaatttcttctgattattgtgctttatgcctctctttcaagtrttagtctctttcaaatgattggtaatttttggttatgtgttcatctttgcatttgaaattttctgctagcctccctgtaaatgttgggtttatttattgcattttcttctgggagagtggttagaaatatttcctggtgctgagtgccaatatccagtcttctgagagtccatgctctcttcttccctcttggggattatgcacagcactgctctgtcttcccagcccttgcacacattctcagtgcttccatatgatatgtggagaggtcatacctcatggctgtctctgttaaactctgtgtccacctttactgatttcagtaggaatcataggaaaagacagaaatactattattttacatatttctcatcaggatatccaacaagttctgtttgatatcaaacataaatcctgggactatttaattatgccattttcctagactctgtaacaactttcacaactgcatctgtaatctctcttatttattactatccagagtcaagttg

SEQ ID NO: 309494 - DNA, 630 bp, Homo sapiens
agaataagtttaaagatctatgaaaaggagattgagaatctaagatttataaaagtgcaatagcaatcatacttttttttcaatgctgctgaaacatatccatacgcactactttctaggcaaggaaaaatgaatcagatgagacattataactcatactttacaaaattcacttaaaagtcagaaaacctggatcagtctcgggggcaggaggggtcagagtagccccttgaytgatttcttcttctttgtcctattgaacatgctttttgtacattccgagaaaatatgaaatttcagtggacagaagttgaagttggtctaaaaatcgggattctgttttgaaattatttattcaacaaatattgtgcttgtcaggcaccatgctagacactggacatggaatgctgcgatagacattattccaattcttcagaaattgacagtcttttggaaatcaaaaagtaaataatctattgcaatatagtgtgtgacacaaattagagctgccccttgtcttctcttctgtattcattcatttggtctcaacactcaacacctctacaagttctctcacaccacgcttcagtaattgggaagtcatagatcaatcagaaggtagtgattcaa

SEQ ID NO: 309495 - DNA, 630 bp, Homo sapiens
agaataagtttaaagatctatgaaaaggagattgagaatctaagatttataaaagtgcaatagcaatcatacttttttttcaatgctgctgaaacatatccatacgcactactttctaggcaaggaaaaatgaatcagatgagacattataactcatactttacaaaattcacttaaaagtcagaaaacctggatcagtctcgggggcaggaggggtcagagtagccccttgattgatttcttcttctttgtcctattgaacatgctttttgtacattccgagaaaatatgaaatttcagtggacagaagttgaagttggtctaaaaatcgggattctgttttgaaattatttattcaacaaatattgtgcttgtcaggcaccatgctagacactggacatggaatgctgcgatagacattattccaattcttcagaaattgacagtcttttggaaatcaaaaagtaaataatctattgcaatatagtgtgtgacacaaattagagctgccccttgtcttctcttctgyattcattcatttggtctcaacactcaacacctctacaagttctctcacaccacgcttcagtaattgggaagtcatagatcaatcagaaggtagtgattcaa

SEQ ID NO: 309496 - DNA, 503 bp, Homo sapiens
actaaattcttttattatttgtagtcatttctccattgatactttggggtttttcagataaataacaattgcatctgaaaataaagattatttttatttccttttcaattccagtgtctcgaattgctttctcttctctaactgcattagctaacacctccatcccaatgttgaawgtaatgagatagtaggcatccttgtcttgttcctgattttggtgacaaagcctttagtgtttcccttaagtaaaatgcaagcttttgagttaaagtatatattttatgtgtagaggaaatccataaatttctttctgttgtgtttttcaacatgaatcagtactaattttgtcaaagtcctattgtgcttttatgaagataatcatgtaattcctcacattagctgtattaatgtgaagaattacattaaaaacggaacaaaatgtgtattcctggaataaaactctctgaattatgatgtattatttttgtgtaatgttcatttgg

SEQ ID NO: 309497 - DNA, 535 bp, Homo sapiens
taaatctaaagttcttggtacaatattaggttttggaaaatacattayacttatttcgtaagaattgatttggaagctttttgtttttatttgtttctagtgctctgaacttatttaagtaatattgggattgactgatctttaaagtttggtagaattccatcagcctggctttgtgcattcagtagcagtgctctgctacttttttcactattctctatttttttaatgtcactcaggtcaattttgataggttgtattttctgagttatccattttatctagattctcatatgtatttgcttaaaattgtgaaaatcatcttgttacttttaaacttttcccccttttcaggttttccctcaaagatgtctaattttgcatatttgtgttttcttccttttgaattgattagattcactagtggcttgtctatttttttattttttattctttcaaaataaaacccaggtttttgtttcttctactatttttctgtattttaatgcattacttttgcttttaccttcctatc

SEQ ID NO: 309498 - DNA, 543 bp, Homo sapiens
ataaatctaaagttcttggtacaatattaggttttggaaaatacattatacttatttcrtaagaattgatttggaagctttttgtttttatttgtttctagtgctctgaacttatttaagtaatattgggattgactgatctttaaagtttggtagaattccatcagcctggctttgtgcattcagtagcagtgctctgctacttttttcactattctctatttttttaatgtcactcaggtcaattttgataggttgtattttctgagttatccattttatctagattctcatatgtatttgcttaaaattgtgaaaatcatcttgttacttttaaacttttcccccttttcaggttttccctcaaagatgtctaattttgcatatttgtgttttcttccttttgaattgattagattcactagtggcttgtctatttttttattttttattctttcaaaataaaacccaggtttttgtttcttctactatttttctgtattttaatgcattacttttgcttttaccttcctatcaattcct

SEQ ID NO: 309499 - DNA, 460 bp, Homo sapiens
ggatgaaggtcatttggtaacaaggattgttggtaaatcttgtttattctctgcctttttattcttgtgcaaatatactgtccctgtgacaagtcacatgctgttcttagctgcttcagtacacacaaygatagtaatcatggtcaatgatgtcatctttacaaataaagaaaagtgttatatacagttgaccttggtcaaaatagaggatagagcccgaagtttttagtctctgacactagaggaatggttatgagctgcccaggctttggagctaagcagatcttgttttaattatagcttcatcattgtttagctgtatgatttgggcaagtcatctaacctttttaagataaatttccttatctgaaaaattggacaataatatcaactttagtggattatcactatgactaagataatacacgcaaagtacctatacagggcctgggcatattaa

SEQ ID NO: 309500 - DNA, 461 bp, Homo sapiens
aatttttaaatgagcaaagggtttgaacagacagttctccaaatggccaataagatgtgaaaagattctcaatatcactaataattaggggaatacaaatcaaaaccacaataagttatcaccttatacctgttagaatagctactatcaaagaaacaagtgttagtgaggatgcrgacaattagaacacttgtgtactgttggtgggaatgtaaaatagttcagccatcatagaaaacaatatggagtttcctcaaaaacttataaatagaattaccatatgatccagcaatcccacttctgggcatgtatttaaaataatcaaaagcaggatctcaaagatatatttacacacccatattaatagcaacattattcacaatagtcaagaggtggaaacaacccacatgttcatagacagatggataaacaaaatgtggtatatatattcaatggaatat

SEQ ID NO: 309501 - DNA, 637 bp, Homo sapiens
atcattcagcacaatttagacttcatcattcatttagtcttctcatacagggctgacactgtgttattatccattgcaaagatcttttacaaatccaaaaacaagtcctgactcaggtgaataaatgactcccaccacatattcccagaaaccrtacagtagtcgctttcacgtggttgatatatgctacatagtagctctccaaaaatggataccagtttaatgaacgttttatttctgtgttttcaattttattctacttcttgctatcagttcactacttcttgctattagttcagcatagcctatagtgctagaaaaaaattctcttttcttgctccctcttttatctaaagtgagagggaaatttaacttttccagtactgtagtctatgaattcttatcatttcccaattttaacacttgtccaaaacatatcttgatgaatatttatagaatgaaggtaacatttttttatttgcactttgttgtgatttgcctttagataaaatatgaacaaaacacagaagctacagtatcctagagcagtaataatacacattcacacatacccttgttccccatatactggcatggtattaaaggccatagagtaagaaaaatagtatctgaaatt

SEQ ID NO: 309502 - DNA, 637 bp, Homo sapiens
atcattcagcacaatttagacttcatcattcatttagtcttctcatacagggctgacactgtgttattatccattgcaaagatcttttacaaatccaaaaacaagtcctgactcaggtgaataaatgactcccaccacatattcccagaaaccgtacagtagtygctttcacgtggttgatatatgctacatagtagctctccaaaaatggataccagtttaatgaacgttttatttctgtgttttcaattttattctacttcttgctatcagttcactacttcttgctattagttcagcatagcctatagtgctagaaaaaaattctcttttcttgctccctcttttatctaaagtgagagggaaatttaacttttccagtactgtagtctatgaattcttatcatttcccaattttaacacttgtccaaaacatatcttgatgaatatttatagaatgaaggtaacatttttttatttgcactttgttgtgatttgcctttagataaaatatgaacaaaacacagaagctacagtatcctagagcagtaataatacacattcacacatacccttgttccccatatactggcatggtattaaaggccatagagtaagaaaaatagtatctgaaatt

SEQ ID NO: 309503 - DNA, 637 bp, Homo sapiens
atcattcagcacaatttagacttcatcattcatttagtcttctcatacagggctgacactgtgttattatccattgcaaagatcttttacaaatccaaaaacaagtcctgactcaggtgaataaatgactcccaccacatattcccagaaaccgtacagtagtcgctttcacgtggttgatatatgctacatagtagctctccaaaaatggataccagtttaatgaacgttttatttctgtgttttcaattttattctacttcttgctatcagttcactacttcttgctattagttcagcatagcctatagtgctagaaaaaaattctcttttcttgctccctcttttatctaaagtgagagggaaatttaacttttccagtactgtagtctatgaattcttatcayttcccaattttaacacttgtccaaaacatatcttgatgaatatttatagaatgaaggtaacatttttttatttgcactttgttgtgatttgcctttagataaaatatgaacaaaacacagaagctacagtatcctagagcagtaataatacacattcacacatacccttgttccccatatactggcatggtattaaaggccatagagtaagaaaaatagtatctgaaatt

SEQ ID NO: 309504 - DNA, 579 bp, Homo sapiens
acaactcttctttactctaggttccaatgtggagaagagaaatactcaaccacagcccattttacctatctgtctcacttaaaagggggcagaaaagcacgtgtgatactcacagtccagaggcacaggcttattaaaagactaagaccaaattgtaggatcatagaatgcttcccctcccgccacayctaactgctacatcacaaaaatcccatttacagaagctccttttacacagtatatcatacctggctatcaagaataaattacaaggcatactaacaggaaaaatcactgtttgaacaaatagagcaaaatcagaacctggctcagatatggcaagggtgtggtaattagactaagaatttaaagcaactctaattaatatgctggaggcaaattcttccctggtccttcctcataatggctcctaatgatgcagagattgtgaaaacaagtgctatttgttaattatgataatgtactttggatctgaatttgctacctttcgtcatggtaagacaccaactacttaagaaataaagatgttttagttcattcttagataggaagaacatt

SEQ ID NO: 309505 - DNA, 516 bp, Homo sapiens
atggaaaccactgaatcacaattcaatattttctagatctagaaacccaaggttttctgattcgttttcctggtggtggtataacttattgcaaatcagacaagacagtccagcccaaaaaagaaatcatggaatgagttatgtactggctgcaatggggaagtcagaaatgtggagttaagagmcaaaaaaaaaaaaaaaaagaaagaaactacctaatttactggttaccaagaaaagtatagaagaagaaaacacagaagttttgtaaaaataacaatgtgctttgcgagagatgcgttctaaatttaaaagtgtaattgaaaatttaagtataattttacaatgacaatgaatagcaagactgtcataatgtatttacagaccagataatcaaaatatataagtgtaattttaccaacaataccaactgtatgcatacatcaattttttctattttcaaaactgaaacaatgttaatgaactagttttactcagagcagtctgacatcaaat

SEQ ID NO: 309506 - DNA, 403 bp, Homo sapiens
gtctctgtcacttactagctctgtattcttagacaaattagctatggctcagattgcctatctagaatatgggcatcacagccatgccgtagtgtttaaaaataataaatatgattgtgtgtggaaagtgctagcatacctttgtcatgtgctaaatatgcaataaatagtaatttttatcaaaatagttgtataagtgggaaagaggaaatggcacaatgctgccaactgttcttggctataaaatatcacatatttctcccatcttctagaactcacagctttgtgatttatacttgttccaatttgaatggaaattatttcctggmaacttgctgctgtgagaatcccagcctttgaccacatgcctgctatgtttactttagtagctctttgttgacct

SEQ ID NO: 309507 - DNA, 580 bp, Homo sapiens
aatctctggaaataggaggttagatacaactactgttctgagaaacattgctaaatctgttgctctaaatgtagtgcccgacaaagcatccaagcataggtgatttttttcctccatttacaaaactacagtgcgggagcctaactacttgatacttcactgatgccaaccccgaatatcatagattttatttgagagttagtttcttcctatctgaagaaacaaaaaggcttcttttaattcctgcagatgtgcttgtttctgggatgtctgtaagaatctgccatcagaaaccacaatccagaatttacagttcaaagtatcagatggtaagagtttccrtaaatttgttctaatcaaaagaaaaccacctggaattaatcacgtgacagggtagcaggaagctgattaaggatgatttgcttcggtagaaaagctttcagaacaattgcagaagttgtagtaggcaaggacagaagggattctgttaaaatttttcttttgctttttctgtcttgcaaaatatccatctttataacataactaggaatcttaattattgcaatgagccataactcaa

SEQ ID NO: 309508 - DNA, 544 bp, Homo sapiens
gtacaattttttatgctctgaaacttatggacaatacttccgtagatcttgtagcaccaacaactgtcaaacatgtcatctcaacagaatgaagaatgtcctcggttagtttacagacgattgccgtatttttacattctttgttgccatacggggctgcctgaaaatggacaactgcatcatagatcattcagttgtgaayccctttttcttatttcagtgaatcaatgactgtcttatatatatattgtataaaatatattttagaaacttttacactgtcctacaaaattaaattcctctactgttctcaaatccctagagaaaataagagactgcatgccaaacaaatcctgtttgctctcagaagtgtcaaatatacatctgtctggctattcacacacctttgttttattctgaattactcaatagtgacagaaaacacacagtgatgggagccacagcacatcactcttgaaactgcaagaaaatttcataagggattttatcttgttttgtactttaaggaagagaaagaactaaa

SEQ ID NO: 309509 - DNA, 538 bp, Homo sapiens
tagctggaagggaaactagaaatgtactgattctgtcccttaaattgttgctgtaaacttcccaaagcattaaacaagtttatttatcccagctagtttaattatagtggcttattaaatgggaaatgacagaggagcaaagtgacttttttttttggtactatgaagtctgatttattttcatccacatgtggacagcagccaaaatttagaaaacagtcttattaactaccttctaccatatgttaatcgagtataagggcattactactgtgtattattggttcaattttgtttttctaaatgtgtctatttttaattttttagcttaaacaaaataaaaacatgtattccaggcttgcactaatgactaaatgcrttaaaattcctctttctttcaatggtggaaacaaacatagaggcttacactaatgactaaatgagttaaaatccctccttcttttaaagatgaaaatatacacagaatcatgaaaaaaaaaaaaacaaaacaacaaagaaaacttagtccaggaaaccc

SEQ ID NO: 309510 - DNA, 633 bp, Homo sapiens
agcaagacagtgagttgagggtgggaaattttagacaaatggataaaagaaagcttcattgagaaggggataaaatcagccctccttatctgcaagttctgcagctgcagattcaaccaactggggaaatacaaaaatacaaataaaaacaatattgtattagataagtactctrgaaatgacttagagtatatggaaatatgtgtgtaggttatacgcaaatactacatgttttatatcagggacttgagcatccttaaattttggtatgcacggggtcctggaatcaatccccctgagatgactgtattcaaatatagacctgataaaagtgaatgaacagaccgtgtagacatttgggaaaaagaattccaggcagagagagcagcctctggagttgagtgtgaattggctgtgagaccaaaggtgaccaaagcctagctcatacaaggccttttaaactatgctcagggaattcatttgagggtttagatccaatgactggcatgatctaatatttgttggaataagtattgtagtttagtatagcggttcagagaatggactctggtaccagagagcccaggcttgaatcccacctttgacattatttaactatagagtcccagttga

SEQ ID NO: 309511 - DNA, 633 bp, Homo sapiens
agcaagacagtgagttgagggtgggaaattttagacaaatggataaaagaaagcttcattgagaaggggataaaatcagccctccttatctgcaagttctgcagctgcagattcaaccaactggggaaatacaaaaatacaaataaaaacaatattgtattagataagtactctagaaatgacttagagtatatggaaatatgtgtgtaggttatacgcaaatactacatgttttatatcagggacttgagcatccttaaattttggtaygcacggggtcctggaatcaatccccctgagatgactgtattcaaatatagacctgataaaagtgaatgaacagaccgtgtagacatttgggaaaaagaattccaggcagagagagcagcctctggagttgagtgtgaattggctgtgagaccaaaggtgaccaaagcctagctcatacaaggccttttaaactatgctcagggaattcatttgagggtttagatccaatgactggcatgatctaatatttgttggaataagtattgtagtttagtatagcggttcagagaatggactctggtaccagagagcccaggcttgaatcccacctttgacattatttaactatagagtcccagttga

SEQ ID NO: 309512 - DNA, 633 bp, Homo sapiens
agcaagacagtgagttgagggtgggaaattttagacaaatggataaaagaaagcttcattgagaaggggataaaatcagccctccttatctgcaagttctgcagctgcagattcaaccaactggggaaatacaaaaatacaaataaaaacaatattgtattagataagtactctagaaatgacttagagtatatggaaatatgtgtgtaggttatacgcaaatactacatgttttatatcagggacttgagcatccttaaattttggtatgcacggggtcctggaatcaatccccctgagatgactgtattcaaatatagacctgataaaagtgaatgaacagaccgtgtagacatttgggaaaaagaattccaggcagagagagcagcctctggagttgagtgtgaattggctgtgagaccaaaggtgaccaaagcctagctcatacaaggccttttaaactatgctcagggaattcatttgagggtttagatccaatgactggcatgatctaatatttgttggaataagtattgtagtttagtatagcggttcagagaatggactctggtaccrgagagcccaggcttgaatcccacctttgacattatttaactatagagtcccagttga

SEQ ID NO: 309513 - DNA, 496 bp, Homo sapiens
cgataaatattaaatgcgctgatatatacaaagcacatgataaggagtatataagtgtgtgttaaaaaataaagactgagtatatcagttgtgtttgaaatgggctccaagggtcaaggtaaagcagagagacagcaatcaggaagctataaaataatcttttttagaactattgttggcttgcattagaacagtggaactgtgggtggtggaaagaagtggccagtttcggcatatattttgatggtagacccagcagggtttgttcagcttagatgtgagtatgaaagataaagaagagtgaggttacagctcaggctttaggctatgtaattggaaatacgagttgacatttattaaagtggggaaggcaatgagcagaagggacagrtttgggtttgagcaagaaatgcttttttaaacattgcatttaaatacttattttttgcaaaatattttgagtagctttgtaaatttgacaagcctgttaaacatt

SEQ ID NO: 309514 - DNA, 559 bp, Homo sapiens
cctttgctgcagtggattttatcagaatggacacctaacacaatagagggtagtgagagtctctcttctgttatttggaatttgaattcagggtttgcagtgagtttttctctacaccaagtgtattagtcagggtgagttaggaatacagaaaccatttgatgcatttttaaaacaagggatttaatacaatagattgaatattcaaatattagaggactgaaagaacaaaaarcaaaacccatattatcaacttcacaaaccagataccacctacagagctgagctaactcttgtattagtaactaagaaggaactaccacccataagacttgagttcaccctgaagttaacacccatagacagaagtgaagagatggtgttactggaatttaggagctcagacaaccttatacatcttaagatgatgccatgtggcttcctctgataagagaaggatgggatctagctggaaataacacctattaggggcatacgtgcaaataagggtgctaaaacagtacagaaaatggagccatagtcatttgctgttgccaaa

SEQ ID NO: 309515 - DNA, 566 bp, Homo sapiens
atgaacttaccctagaaagtttaaaagaaactcaaatgaagagaatacttgtagacttctggacaaggttgaacagggaaaagtgagatgcctacsctacacaaagcagaaagcagtattgattccgtgggtggaaggaattagagaagaaaatagtgtttttaaatctcactaaggaaatgtacatatatatatatacacacaaatatatattagccagggttcttcagagactgtattagccagtgttcttcagagaaacagaagcaataggaagtgtgtgtttgtgtgtgggtatatgtataaacagatttatttaaataactggcctatgtgattgtacagaattagtgagtctaatatcagatgggctagtctggctggctggagactcaagaaagagatgtaactcaagtccaaaggcagtctgttggaaaccaggatgacccaacattgaagatgaggtctgaaggtattctgctagcagaattcccttgtgcttggggagagctgtcttttcatctatacaggccttcagctgattggatgaggcccacccacattat

SEQ ID NO: 309516 - DNA, 566 bp, Homo sapiens
atgaacttaccctagaaagtttaaaagaaactcaaatgaagagaatacttgtagacttctggacaaggttgaacagggaaaagtgagatgcctacgctacacaaagcagaaagcagtattgattccktgggtggaaggaattagagaagaaaatagtgtttttaaatctcactaaggaaatgtacatatatatatatacacacaaatatatattagccagggttcttcagagactgtattagccagtgttcttcagagaaacagaagcaataggaagtgtgtgtttgtgtgtgggtatatgtataaacagatttatttaaataactggcctatgtgattgtacagaattagtgagtctaatatcagatgggctagtctggctggctggagactcaagaaagagatgtaactcaagtccaaaggcagtctgttggaaaccaggatgacccaacattgaagatgaggtctgaaggtattctgctagcagaattcccttgtgcttggggagagctgtcttttcatctatacaggccttcagctgattggatgaggcccacccacattat

SEQ ID NO: 309517 - DNA, 616 bp, Homo sapiens
ttgtctgtcacagtcctcactaaatcttatttggtatcaattcataacattttcagaaaatagagtcccctccgctttaaggtcacacatwtgataagtgatggaacaaggactgaaaaccactggatatccaagtcagtgcagggatatagaaaccacctttgagctgttttaattctaatatagacaaaatgaacttgattattcttattttatagattgtgctatcatataaacaaaggtaaaactaaaattctctattcaaggaagaacacagctaatgagcaccacagttagggagagaacctgagtctttggcaccagagggagcctcccttgtgtgcccatttcagatccttcaaacaagctgtctctttgctgcttcccagataattaaactataattgcatgctttaaattaagtttaaatgtatgcttccagtatttctactgaccagtttgtgtacgatcagccttaaagaattatgcaaatatcttgtttaggttccctcggttgcaaattactttttaatttacttaattataaagggcatttgtctcttctaatatgcaataattaggtttaagtgtacaggcaaatgaattgattcttggc

SEQ ID NO: 309518 - DNA, 647 bp, Homo sapiens
ctgcatccccaagacagtttaaatcaaagctgaagcaaatcaccagtgcttccaggtttgtagttataacttggtttttcattacaatttaatagtaaattaaatttactattatacaatgtgataatagttccttgttttataatatttgaattcccacaattatgaagtttatgtagggaagaaaaattgtcttaaccagatcatttccactaacaaattaataaaattagtcactaatcacacctcacacaccacttaacactaacatctttgctatgctgtcatggtaatgggaattgtaattagtatattgaaaatacaaattttgaatttcaatgtttctatcttggtctgtgaagacaaaggaagtgttgaaaagaaaaaaaagaattacatttaaagctattgacaatcagtatcttccaatgtgagaccaactgacaattgaagaaaaaaagaaaatgaagccttaaaagaaaatgacaaataacatggctggcatkgtggcttatgcctgtaatcctagcacgtgggagacaggaggattgcctgaggccagaagtatgagaccagactggacaacagagtaagaccccagtccctacacaaaatttaaacattagccgagagtggtggtgcacacc

SEQ ID NO: 309519 - DNA, 578 bp, Homo sapiens
gaacaatcacttaaatagtcaacagggaatttctggtcctcagcttgattattttcacaattatgtaaacaaaacattaagggcagtgggaagcaggaataaagtggggatggttaatgggtacaaaaaacagtacgaaggaattagatctagtgttctgtagcacaaacataatttattgtagatttcaaaataactaaaacagtggagttggaatgttcctaacacaaggaaattataaatgcttgaggtgatgaatgccctcagttatctcaatttgatcattacaaaatgttatctcattttccaccaactcaagcttcctcggtgtgctccctccacttctgtacaycctttcctgtatccaaatgatttacacagacttccccccatgctctcactgtttcctggaaataactttattattaaatagatgtcaccattgtcatcctttatttgtgttcctccacactttgagatgacttatggtcattatcatatcctctggtgtccagcacactctgacacacagctagtaagccaccaataaataaatggttgcagctttttaaaaatca

SEQ ID NO: 309520 - DNA, 557 bp, Homo sapiens
taaaatatgccatattatatcatcatacattttacctttatgtaaaacatcacttgagtgactttttgattggtttggcattyggttgaaacaaatcattggtaaaaatgatttaaaatgttctttacaatttttagttttatttctagggaaaaacatataagccatttgtatattatcttctctaaaatgttagtcttcgttttaagttaaattacttaagaagccgtttttttcctgttctgattattcttactttcagctattaataatttcctgtacattatttagataaaataaatcatttaataatattttattctcaaatataattgtacttttgtcaatcattttctttcacaatgagtgaactattgtttataaaactattgcatatagacctctgattatcccaaggaagggaaaaaaacccttattgagtcccaaagtatattttgccaattattattatatcattaaattaccaaaaaaagaaaacaataaggggcatggatgaggcttagagacttttaagtaacttatagcaatttgtaaag

SEQ ID NO: 309521 - DNA, 557 bp, Homo sapiens
taaaatatgccatattatatcatcatacattttacctttatgtaaaacatcacttgagtgactttttgattggtttggcattcgkttgaaacaaatcattggtaaaaatgatttaaaatgttctttacaatttttagttttatttctagggaaaaacatataagccatttgtatattatcttctctaaaatgttagtcttcgttttaagttaaattacttaagaagccgtttttttcctgttctgattattcttactttcagctattaataatttcctgtacattatttagataaaataaatcatttaataatattttattctcaaatataattgtacttttgtcaatcattttctttcacaatgagtgaactattgtttataaaactattgcatatagacctctgattatcccaaggaagggaaaaaaacccttattgagtcccaaagtatattttgccaattattattatatcattaaattaccaaaaaaagaaaacaataaggggcatggatgaggcttagagacttttaagtaacttatagcaatttgtaaag

SEQ ID NO: 309522 - DNA, 517 bp, Homo sapiens
tgatgaatgccctcagttatctcaatttgatcattacaaaatgttatctcattttccaccaactcaagcttcctcggtgtgctccctccacttctgtacaccctttcctgtatccaaatgatttacacagacttccccccatgctctcactgtttcctggaaataactttattattaaatagatstcaccattgtcatcctttatttgtgttcctccacactttgagatgacttatggtcattatcatatcctctggtgtccagcacactctgacacacagctagtaagccaccaataaataaatggttgcagctttttaaaaatcagtgaaatacagacagaaatacagcaagagcttcagagggggcagccacctgacataacactgggtgagtttcctgcaatgagtggatgatattaagcagtagtaaatcaataactgcatgaaaacaaccagccttcaataggctcttctgtaataatattgtctaccaggtgtgtacacagattttgtga

SEQ ID NO: 309523 - DNA, 629 bp, Homo sapiens
tgaaaacaaatattaaacacattacaaagaaaaattggttgattttcagtggctggctcaatcgaaattgaactgtttatttctcaaacttattatagactcaataatacttctctatatcacttactatawggtatttaaacttatgaataagtttaatatcatggataaatgtattcataagtttaaatccttatgaataatatggatacacttataaggtatttaaacttaggtatcacaaacataaaatatttaaacttatggataggcacaggcattctttgaaagtatgaaaaccatcatttccttcccttcatatcaataaaaatatagcacacaaaatcagtttctgtttgtgatttttgttgttgtttcttttgtagacatgatgtcttactatgttgcccagactggtctcaaactcctagttccaagtgacctcccacctcagcttcccaaagttctgggatgataggcatgagccatcatgcccagccactgctgtatttttaaacattcagatgtaatctctgctttcttaattacaaatactcttgtcattgatagaatatgacagataaaatatacttgtgattagatgtttgttgccaaaattacaaagtttg

SEQ ID NO: 309524 - DNA, 653 bp, Homo sapiens
aaagctagacaaatcactgaaaatgtctttttcccaaaagaagtaactatcttgtgtgaaaccactgctcatcaagtaaatagaagttggtggtgttttcagatagtttatatagtattttagattgtactatggtagttttttcacattaattttctctagtgttgctcatattatttcatgtctttataaatcacttatttgactatgcttttttgtttctgtgttacatatatacttagcactgagccacctgagttccacactgcaataagtatactttctgtactggtatcgatagaaagtattctgtttgtcttctttgtgcaaaaataakaataataataacaaaagcatgacagatttttgccaaatttaatggatatgtttgggattaactaatttaaaatatgagctatatggtattcaaaaatttgctttggaagatccgaagggacaccttgttttgaataggtgcaggtgtctattcacaattttgtgcaattataatctacaattctgtataaggtgtcctgggacgtatggcagcatgaatttattttttaacaatagttatctatctgaaacaatgcaggagaacccacctggtttataatatagaatagcattagggaatgcaaacattctcaccc

SEQ ID NO: 309525 - DNA, 653 bp, Homo sapiens
aaagctagacaaatcactgaaaatgtctttttcccaaaagaagtaactatcttgtgtgaaaccactgctcatcaagtaaatagaagttggtggtgttttcagatagtttatatagtattttagattgtactatggtagttttttcacattaattttctctagtgttgctcatattatttcatgtctttataaatcacttatttgactatgcttttttgtttctgtgttacatatatacttagcactgagccacctgagttccacactgcaataagtatactttctgtactggtatcgatagaaagtattctgtttgtcttctttgtgcaaaaataagaataataataacaaaagcatgacagatttttgccaaatttaatggatatgtttgggattaactaatttaaaatatgagctatatggtattcaaaaatttgctttggaagatccgaagggacaccttgttttgaataggkgcaggtgtctattcacaattttgtgcaattataatctacaattctgtataaggtgtcctgggacgtatggcagcatgaatttattttttaacaatagttatctatctgaaacaatgcaggagaacccacctggtttataatatagaatagcattagggaatgcaaacattctcaccc

SEQ ID NO: 309526 - DNA, 621 bp, Homo sapiens
ttgtgggagggacccaatgggagctaattgaattatggggtgggcctttcccatgctgttctcgtgatagtgaataagtcttacgagatctgatggttttaaaaagaggagtttccctgcacaagctcccttctcttgtctgctgccatatgagacgtgcctttcaccttccaccatgattgtgaggcctccccagccatgtggagctgtaagtccaataaaccactttcttttgtaaattgcccagacccaggtatgtctttatcagcagcatgaaaatagattaatacaatcactcatttctgataaagcaataataatatgtaaattgatgtatttttccttagcaaatgttatgycaacctgtttttaaatggggaaacactgtttgcatccttgttaaattagggatgaacaaggtactatctttaccactgttttgtattctgttgaaggaattaaccagcataatcagaaaatagaaaatattgaaatgtttaaaatcgatgctgttgttatctgcagataatataatagtttaaaaccaatgctcacaagtgtctaggagaaaactcaccaataattaaatgaataataaagtaacaggatatgatactgaca

SEQ ID NO: 309527 - DNA, 612 bp, Homo sapiens
aattctgcagtacttgacaagtgactgcctcaatgttaaaagtgcatcacagatgaatcttgctgtgagaaaacttctatttcatgctgggggttgcccttggaagaaatcttgtcaaaaccttccataagcacactcttgcttgattggattctgtttcagctttggaaatattacagtccaacatgtcctagtgggatattttatgatgcttggattccaactcaacatgaaaatatccactgagatttgtacgttcaatttcttctcagatgtctgcatagatgattttttttttatctgaaattrctactactgactctaggaaattgtaatgattttgattcttcacattttattgacaaatgatgttgaagctacacatcttagatgtttcctgtaatgagtgttgactaatctttcctgttgctatctgattggaaggaattagtgacagatttaaagatattctacctgcttaccacaatcaaagacgagcagatggagaatattatagtatttatatgtatcataattacggtttagggaaattgactagatatatttgtttattgatgacaaataatgcatatgagaaataaaatcttttca

SEQ ID NO: 309528 - DNA, 612 bp, Homo sapiens
aattctgcagtacttgacaagtgactgcctcaatgttaaaagtgcatcacagatgaatcttgctgtgagaaaacttctatttcatgctgggggttgcccttggaagaaatcttgtcaaaaccttccataagcacactcttgcttgattggattctgtttcagctttggaaatattacagtccaacatgtcctagtgggatattttatgatgcttggattccaactcaacatgaaaatatccactgagatttgtacgttcaatttcttctcagatgtctgcatagatgattttttttttatctgaaattgctactactgactctaggaaattgtaatgattttgattcttcacattttattgacaaatgatgttgaagctacacatcttagatgtttcctgtaatgagtgttgactaatctttcctgttgctatctgattggaaggaattagtgacagatttaaagatattctacctgcttaccacaatcaaagaygagcagatggagaatattatagtatttatatgtatcataattacggtttagggaaattgactagatatatttgtttattgatgacaaataatgcatatgagaaataaaatcttttca

SEQ ID NO: 309529 - DNA, 499 bp, Homo sapiens
cccctgggctcaagcaattctcccaccttgaactcccaaagtgcttgataataagcatgagccactgtgcctctggtccacagtcttgattagattatctttaagcctttaagccccaaatcgccagtctcttttaattggctggtttcaggtagttggtgggttggcacaaggctgcccattgatggtcagtaggggcatttcccgctgcagtctatttcagcactgacaacaggaactgatttggcttggttgtataaagggaggtgctgtgacacttttagaacatctttttgagaatgtagagtacttgactgctccctcatccagtcatggctgcctgatccagtttaacttcgagcacctcagctagccacggggagtccatttttttctgttggctggggtcacactttaacaatgaarttatgcagcagcttaaaacaaacgataaagtgtgtcacaaaaagaaataccctataaattaagatgatgtggg

SEQ ID NO: 309530 - DNA, 499 bp, Homo sapiens
cccctgggctcaagcaattctcccaccttgaactcccaaagtgcttgataataagcatgagccactgtgcctctggtccacagtcttgattagattatctttaagcctttaagccccaaatcgccagtctcttttaattggctggtttcaggtagttggtgggttggcacaaggctgcccattgatggtcagtaggggcatttcccgctgcagtctatttcagcactgacaacaggaactgatttggcttggttgtataaagggaggtgctgtgacacttttagaacatctttttgagaatgtagagtacttgactgctccctcatccagtcatggctgcctgatccagtttaacttcgagcacctcagctagccacggggagtccatttttttctgttggctggggtcacactttaacaatgaaattatgcagcagcttaaaacaaacgataaagtgtgtcacaaaaagaaataccctrtaaattaagatgatgtggg

SEQ ID NO: 309531 - DNA, 431 bp, Homo sapiens
agaataaatgacttttcaaaagtgcataaataaaaatgtgatacatttgtgtgcaaatgcatatatacacatataagtatatataaaactatcaagtctccatgatcactgcactacratcaagttcttcagagaagcggaaccaacaggatgcctgccaaaaaacacacagacacactatatatattatatgatatatatatatatatatatatatatatatatatatatataaaccgaggaattggctcatgtgataagggaggctgagaaatatcatggtctatgatacgctgcctgcaagctaaagacccaggaaagccagtgctgcattccagctcaaatcagaaggcctgaggaccaggggaaccaatagtgcaaatcccaattcaagggaaagagaagaccaattttgtaggttaagcaacagg

SEQ ID NO: 309532 - DNA, 694 bp, Homo sapiens
tatcaagcaatttaactttttcttctaaggttatgcctctcatctgctttttaggagcacttccaacatcacaagtggcccttcatatgcatctcatggtgttattcaaggtttacagtagtgctctgaacacaatgaaaaatacataggaaccttaagaaatcactttttactgccatatgcaatttactggagagacgaactgctcttgcagagatgatgaacgtcacacagcatttttagcggatgcttgcaacacttaagytcaccacaacagcaacaggaggtggctttgaaattattatggtagtatatagtagagttaattatgtgcagtgataatttaattctgcctccttatatttgtttacatttctcttggctgggaatggcactgtgtatagtctgtaagtatttttgggtgtaagttttgatgaagtttaaccttgtacaatagatttttgcatattctacagtggtaagtgataaaatagactaggatagacaaggatctacatatttcatgtatttataacataactaactttttcttaattatttcaatagttttaggctacaaggttcatctgtgagtttttcatcttgtcgcaagtctgcacaaagttttccaatatatttatcgaaaaaatctacatcagtcaatcaacacagttcaagttggcattgttcaagg

SEQ ID NO: 309533 - DNA, 668 bp, Homo sapiens
gcactgtgtatagtctgtaagtatttttgggtgtaagttttgatgaagtttaaccttgtacaatagatttttgcatattctacagtggtaagtgataaaatagactaggatagacaaggatctacrtatttcatgtatttataacataactaactttttcttaattatttcaatagttttaggctacaaggttcatctgtgagtttttcatcttgtcgcaagtctgcacaaagttttccaatatatttatcgaaaaaatctacatcagtcaatcaacacagttcaagttggcattgttcaagggtcaactgtatactgttttaagctgttgaatttatggcattatgttaatcaggttttggtactggaaagtgggctgcaggtacaatggagatataaaagggtggggaagttttggaactgagaagtgagtggagaaaaattctgaggagcatagtagagaaagtctaaatcactgagataaggcctaaatcttcatcagactgctagtgataatctgcactctaaagatgttaccccagtgcaggctcagaaggaagtgaggaacatgttattggaaaccagaggaaggaagttacttgttaagtagtggcagaaagcttagtgaaattgtgacctgcagttatacagaaagcagaatttgtaaa

SEQ ID NO: 309534 - DNA, 575 bp, Homo sapiens
tgtaactgcttcataaagtatagggaactgtaaataaacggtaatacatttaaatgttaagtgttcaccccaaaatgaacatgggttgtatgtaacatgcatgattcttcagccagaatcattccgtggctggaagtctcttctcaggagacagttactgaaatcagcctcttgttaaatcaaagttgtagttatgacattttgaactcaggcagggccaagagaagtggtcagttagtcaacaggcctggccgtgggtgagctgcaattgttttaagatagcttctctccgggccagtacttgtttagatgctagagaaaaagagaaaccttgtggcagtcagaatatggtttattcttggagtgtaggggtgcgtgacttaacccttgcctggcatggctttagctcttattcataatttggaattttactttcataaagcgtctgttctgtcagtcttatgatctctattctaacattaatgatgctcacttgtgcctcaactgcaaaaggacgagggtataacaaggcatcrtagaccttccatctagtcgtggctgggagctcagttttt

SEQ ID NO: 309535 - DNA, 551 bp, Homo sapiens
aaccaaaccctgtgcttaccaatttaaaattctagtgctttaatttatatttgcaatataatattcaatttatattgaatttatttagtcaatacattattaaatgtagggatataatacttaaaagtttagcaaaactaggtaccatagcaataggaaactttactaccattttccaaatattcataattatattgcacatttatttttacataactttcatttaaaaaaatgytttttcatataatttcatgtattatttggcaaaactagatcaagaaaaacagttcattcctaacctcatattacaataaaagtgccatggttaatgttctgtattttcagaagatttcaacactactgtaaaatttgaaaggaagtgtccatttttaattaaagtataatcaagattcacaaaggcactcataaataattcttagtagcaaaggcaagattgacacatttgtgaacaggtgttttatttgattacacacattagttaggtcaaaaatattccaagcttctttagcagttttgagaattcacaatgt

SEQ ID NO: 309536 - DNA, 551 bp, Homo sapiens
aaccaaaccctgtgcttaccaatttaaaattctagtgctttaatttatatttgcaatataatattcaatttatattgaatttatttagtcaatacattattaaatgtagggatataatacttaaaagtttagcaaaactaggtaccatagcaataggaaactttactaccattttccaaatattcataattatattgcacatttatttttacataactttcatttaaaaaaatgctttttcatataatttcatgtattatttggcaaaactagatcaagaaaaacagttcattcctaacctcatattacaataaaagtgccatggttaatgttctgtattttcagaagatttcaacactactgtaaaatttgaaaggaagtgtccatktttaattaaagtataatcaagattcacaaaggcactcataaataattcttagtagcaaaggcaagattgacacatttgtgaacaggtgttttatttgattacacacattagttaggtcaaaaatattccaagcttctttagcagttttgagaattcacaatgt

SEQ ID NO: 309537 - DNA, 430 bp, Homo sapiens
aggcactcataaataattcttagtagcaaaggcaagattgacacatttgtgaacaggtgttttatttgattacacacattagttaggtcaaaaatattccaagcttctttagcagttttgagaattcacaatgtgcttggtgctaaaaaaaactaattctgacttcaaagtctcttatctgrgatgacactgtatccccaagtaggatattcccctgctccatgaggatcggttttgagttgagtttgtttgtttctcctggtctggtcccatatccatctgagatattccttggcatctacaggctataactgatggtcttttgttcaacttctatgatctggattattatcctaacatttaaattcaattacatttgattggtatatataaaaatggttagcaaaatataaaacttatgaaggtattc

SEQ ID NO: 309538 - DNA, 554 bp, Homo sapiens
ctcccacagtctggtaattccttaaactctctctctctctctctctctctctctctgcaaatttgtgtgcatgtgtgggtacgtaaatgcacacatacacccgttgttggttctmtttctctggagaactctaatacaattttattatctgtggttgaagatccaaaacaaatatgtgctgtattgatcttcattaaaatagtttatctgtgaagagagtacttgaattataagaatcaaccaaatacactatgcaatatgtgggtgctattcaaaagtgaaccgtcacagcacaacagcctctttctgggaagtcactgaaagacaatggtgaagagaatttctctcattaggcagaaattttagaggtgcgcctagttattcattttgcttggaaggagaaatggccagatatgcaattatataatgattcataggatgtggcctgtaaggtctgggacttgaaaggaacgtgactggtaaaatgatgacaaagaagcctgggaaataggtatgtggctagagttctctgaatacacaaaatgcatgaaaat

SEQ ID NO: 309539 - DNA, 413 bp, Homo sapiens
gacatgttattgcttgtaaaaaaatatatgtagtatgtacatgtatacattcatatattcaraatatggtcgttaatacaagttgttttctctggttcctagagaaggccactggtaaaactgaaacatccttttctgacttacttctttcagaaaattcatgcttttgtaagtaccttttcattaatatggaaaacccctcctgctcaaaaattctagagctggagtggttttttatttttctggtccactctggtgaagcagattccaaagtccaaaatttgagtccaaagcacaagaaataaatctggtatgaaacctgaaggtatacacccattactaaagaactgtatcaattacttattgattacataaccagccactgcaaaatgtagtgacttaaaacaatatac

SEQ ID NO: 309540 - DNA, 413 bp, Homo sapiens
gacatgttattgcttgtaaaaaaatatatgtagtatgtacatgtatacattcatatattcagaatatggtcgttaatacaagttgttttctctggttcctagagaaggccactggtaaaactgaaacatccttttctgacttacttctttcagaaaattcatgcttttgtaagtaccttttcattaatatggaaaacccctcctgctcaaaaattctagagctggagtggttttttatttttstggtccactctggtgaagcagattccaaagtccaaaatttgagtccaaagcacaagaaataaatctggtatgaaacctgaaggtatacacccattactaaagaactgtatcaattacttattgattacataaccagccactgcaaaatgtagtgacttaaaacaatatac

SEQ ID NO: 309541 - DNA, 595 bp, Homo sapiens
cataaacaggcatagtggagagaagtgggcattggtgatggattctcartctaggattggatgacatttttgtattggacctaaagttatgtcctcttgggagaagtcactgaattgaataggtgataagattactgaagcagatatttggtagatggtggaagagacgacagctaatcattgaactatttcctcttttttctgaacccgcagcatttctttctgccttaccatggttaatctggctgtgatccagagtcatagctaaagaggcaatggatttatggattttatgttcagttttaaggtatttaaggcattaaaaccttgtagttatgttctttagtaaatttatgagaattaagataaatatataaaataagaaggctacatttggtaagaataattaatatttcaatgtttcttatattattttttaaaatatgcttaaaattttttcatagattttcaaatacagaaattaagattgtgtaattaatttaggcctaaagaaatgaactttaatatattttcaattgcaactataaataaataatcaaattttaccaaggctaaagatcagtgattttaaatt

SEQ ID NO: 309542 - DNA, 595 bp, Homo sapiens
cataaacaggcatagtggagagaagtgggcattggtgatggattctcagtctaggattggatgacatttttgtattggacctaaagttatgtcctcttgggagaagtcactgaattgaataggtgataagattactgaagcagatatttggtagatggtggaagagacgacagctaatcattgaactatttcctctttttyctgaacccgcagcatttctttctgccttaccatggttaatctggctgtgatccagagtcatagctaaagaggcaatggatttatggattttatgttcagttttaaggtatttaaggcattaaaaccttgtagttatgttctttagtaaatttatgagaattaagataaatatataaaataagaaggctacatttggtaagaataattaatatttcaatgtttcttatattattttttaaaatatgcttaaaattttttcatagattttcaaatacagaaattaagattgtgtaattaatttaggcctaaagaaatgaactttaatatattttcaattgcaactataaataaataatcaaattttaccaaggctaaagatcagtgattttaaatt

SEQ ID NO: 309543 - DNA, 595 bp, Homo sapiens
cataaacaggcatagtggagagaagtgggcattggtgatggattctcagtctaggattggatgacatttttgtattggacctaaagttatgtcctcttgggagaagtcactgaattgaataggtgataagattactgaagcagatatttggtagatggtggaagagacgacagctaatcattgaactatttcctcttttttctgaacccgcagcatttctttctgccttaccatggttaatctggcygtgatccagagtcatagctaaagaggcaatggatttatggattttatgttcagttttaaggtatttaaggcattaaaaccttgtagttatgttctttagtaaatttatgagaattaagataaatatataaaataagaaggctacatttggtaagaataattaatatttcaatgtttcttatattattttttaaaatatgcttaaaattttttcatagattttcaaatacagaaattaagattgtgtaattaatttaggcctaaagaaatgaactttaatatattttcaattgcaactataaataaataatcaaattttaccaaggctaaagatcagtgattttaaatt

SEQ ID NO: 309544 - DNA, 570 bp, Homo sapiens
catagctaaagaggcaatggatttatggattttatgttcagttttaaggtatttaaggcattaaaaccttgtagttatgttctttagtaaatttatgagaattaagataaatatataaaataagaaggctacatttggtaagaataattaatatttcaatgtttcttatattattttttaaaatatgcttaaaattttttcatagattttcaaatacagaaattaagattgtgtaattaatttaggcctaaagaaatgaactttaatatattttcaattgcaactataaataaataatcaaattttaccaaggctaaagatcagtgattttaaattaccttaatttatatctatttgaaataacttttgtaattactaatattgggcatgcctattcttttatacctgtttatactattaatgttacttggctctacgaaagtgtaatacttctttaawaagcaaattttgtctaagttgaatgaatgccatcctactaaaacactttattcatttaaatgtaagtagatacaacattagtataaaaaccaagtatggagtagtatgatc

SEQ ID NO: 309545 - DNA, 570 bp, Homo sapiens
catagctaaagaggcaatggatttatggattttatgttcagttttaaggtatttaaggcattaaaaccttgtagttatgttctttagtaaatttatgagaattaagataaatatataaaataagaaggctacatttggtaagaataattaatatttcaatgtttcttatattattttttaaaatatgcttaaaattttttcatagattttcaaatacagaaattaagattgtgtaattaatttaggcctaaagaaatgaactttaatatattttcaattgcaactataaataaataatcaaattttaccaaggctaaagatcagtgattttaaattaccttaatttatatctatttgaaataacttttgtaattactaatattgggcatgcctattcttttatacctgtttatactattaatgttacttggctctacgaaagtgtaatacttctttaaaaagcawattttgtctaagttgaatgaatgccatcctactaaaacactttattcatttaaatgtaagtagatacaacattagtataaaaaccaagtatggagtagtatgatc

SEQ ID NO: 309546 - DNA, 553 bp, Homo sapiens
  misc_feature (1)...(553): n = A,T,C or G
tgtaggtttaatttatttttcttggacattacaagaatataaaacctgatcatctatttcttaatttcctgtatgattatgaaatatatgtttaattctggattatttatatatggcaatattatacatcaatatgaatatttaaaaacttccagttattattccttcacttctttctatgaaaangtgtgaaactgntagtggggattaaagccaaaatccagataatacaaatgcaaggaaatacttggataagtgccacaataygtagctttacccatgttaagtactaaataaatgtttgcaagataataaaaataatgcattttctaaaagtaactactttgaaaggcaatgcctactgaatgtttaggttggcatgttgtttttaagttgctaatcttagcaccttaaagcatcgctttatacttttgataaatgtattatgtgagtttaatacttctaaatgcttctaaatactgcttatacttactacattaaaacaactaaatttgttagaatgtcaggaataatgaggacactgagtgtaaat

SEQ ID NO: 309547 - DNA, 553 bp, Homo sapiens
  misc_feature (1)...(553): n = A,T,C or G
tgtaggtttaatttatttttcttggacattacaagaatataaaacctgatcatctatttcttaatttcctgtatgattatgaaatatatgtttaattctggattatttatatatggcaatattatacatcaatatgaatatttaaaaacttccagttattattccttcacttctttctatgaaaangtgtgaaactgntagtggggattaaagccaaaatccagataatacaaatgcaaggaaatacttggataagtgccacaatatgtagctttacccatgttaagtactaaataaatgtttgcaagataataaaaataatgcattttctaaaagtaactactttgaaaggcaatgcctactgaatgtttaggttggcrtgttgtttttaagttgctaatcttagcaccttaaagcatcgctttatacttttgataaatgtattatgtgagtttaatacttctaaatgcttctaaatactgcttatacttactacattaaaacaactaaatttgttagaatgtcaggaataatgaggacactgagtgtaaat

SEQ ID NO: 309548 - DNA, 558 bp, Homo sapiens
aactgcatgtaacaggcagtcagtaaaaatatgtagtgaaaataaacattgataatataattttgacttaccttctccataaacattaaagactcaattatgattctgcagtaactactatctcaacaatgtacaaagtctgtcacaaagccacaattatgccatgawcatttatgccttaatgttgaattcaaaacagttacactaaccttattaaaacaaaaaagcatgctaatatttctctacctatatgaataaaaaggtgacttgtcataacaagattaatattgtaccaaggataataataatgtgtgtgaactcttctaacacatatataaaattcacacctagtctatgtaattattaagtgctatttgctctaattattattgtttttcattcatattcctgagtttctctttagtattttgtttacatttgaattttcaaattaaattgtgtttataataaatggataccaatctaacactataaagttaaagactttgacacattatattccattatctggttttggaaaaaaaggttatatatatg

SEQ ID NO: 309549 - DNA, 558 bp, Homo sapiens
aactgcatgtaacaggcagtcagtaaaaatatgtagtgaaaataaacattgataatataattttgacttaccttctccataaacattaaagactcaattatgattctgcagtaactactatctcaacaatgtacaaagtctgtcacaaagccacaattatgccatgaacatttatgccttaatgttgaattcaaarcagttacactaaccttattaaaacaaaaaagcatgctaatatttctctacctatatgaataaaaaggtgacttgtcataacaagattaatattgtaccaaggataataataatgtgtgtgaactcttctaacacatatataaaattcacacctagtctatgtaattattaagtgctatttgctctaattattattgtttttcattcatattcctgagtttctctttagtattttgtttacatttgaattttcaaattaaattgtgtttataataaatggataccaatctaacactataaagttaaagactttgacacattatattccattatctggttttggaaaaaaaggttatatatatg

SEQ ID NO: 309550 - DNA, 558 bp, Homo sapiens
aactgcatgtaacaggcagtcagtaaaaatatgtagtgaaaataaacattgataatataattttgacttaccttctccataaacattaaagactcaattatgattctgcagtaactactatctcaacaatgtacaaagtctgtcacaaagccacaattatgccatgaacatttatgccttaatgttgaattcaaaacagttacactaaccttattaaaacaaaaaagcatrctaatatttctctacctatatgaataaaaaggtgacttgtcataacaagattaatattgtaccaaggataataataatgtgtgtgaactcttctaacacatatataaaattcacacctagtctatgtaattattaagtgctatttgctctaattattattgtttttcattcatattcctgagtttctctttagtattttgtttacatttgaattttcaaattaaattgtgtttataataaatggataccaatctaacactataaagttaaagactttgacacattatattccattatctggttttggaaaaaaaggttatatatatg

SEQ ID NO: 309551 - DNA, 558 bp, Homo sapiens
aactgcatgtaacaggcagtcagtaaaaatatgtagtgaaaataaacattgataatataattttgacttaccttctccataaacattaaagactcaattatgattctgcagtaactactatctcaacaatgtacaaagtctgtcacaaagccacaattatgccatgaacatttatgccttaatgttgaattcaaaacagttacactaaccttattaaaacaaaaaagcatgctaatatttctctacctatatgaataaaaaggtgacttgtcataacaagattaatattgtaccaaggataataataatrtgtgtgaactcttctaacacatatataaaattcacacctagtctatgtaattattaagtgctatttgctctaattattattgtttttcattcatattcctgagtttctctttagtattttgtttacatttgaattttcaaattaaattgtgtttataataaatggataccaatctaacactataaagttaaagactttgacacattatattccattatctggttttggaaaaaaaggttatatatatg

SEQ ID NO: 309552 - DNA, 551 bp, Homo sapiens
gccagttgagatttgagaacaatcgcacgttctttagtataattatgtgtactcatattgccatttagtaccgcagtgatgttcaccagctctagctgtgcttaactctgagaggtttacctggccatcactttccctacataccctacacacctctgttccaaccccgtgaagtttgtccaaaaaagtagatatatttccctgatttmtctggatgtgtcaactgggatagtcatttcaccttgccttttccccagagcttttttctaaagcaaaatagtgaaaaaggtagaactaacctggagtgagggctgttgaaacaactcgactcatgcctaccagttttcgacttagccatatacttgcttagtggacctataccattcccgccatggtagaatatttcagaccccgacgaattccaggtgtgaaataagagaaaacttgttagtatacatgtccaaggattattttgtcatataaatgtattatttatcttctcaccataaacttcccttaaaaatagagaggaacagtattaagtgttgaag

SEQ ID NO: 309553 - DNA, 551 bp, Homo sapiens
gccagttgagatttgagaacaatcgcacgttctttagtataattatgtgtactcatattgccatttagtaccgcagtgatgttcaccagctctagctgtgcttaactctgagaggtttacctggccatcactttccctacataccctacacacctctgttccaaccccgtgaagtttgtccaaaaaagtagatatatttccctgatttatctggatgtgtcaactgggatagtcatttcaccttgccttttccccagagcttttttctaaagcaaaayagtgaaaaaggtagaactaacctggagtgagggctgttgaaacaactcgactcatgcctaccagttttcgacttagccatatacttgcttagtggacctataccattcccgccatggtagaatatttcagaccccgacgaattccaggtgtgaaataagagaaaacttgttagtatacatgtccaaggattattttgtcatataaatgtattatttatcttctcaccataaacttcccttaaaaatagagaggaacagtattaagtgttgaag

SEQ ID NO: 309554 - DNA, 519 bp, Homo sapiens
acatctcaacatctgaaggaacaaacttcagacacaccatctttagaactgtaccactcactgtgagggtccgcggcttcatttttgaagtcagcgagaccaagaaccaaccagaaggaaccaattctgggcacaactgggctcccggtttgtggacagccatgtcatctcctcctttggggtagtgtccccaacatgatgatccatgcccctgatttggcctgacgcagggcagtaattgtgcrctagtagcggggtcaggtatatcaattaaccgacatcaatgcgagtcctagagccagctctggtgtttactagccatgtacccatgagcaaaccattgacgtttgtcggagcctcttcaactgtaaaaaagagactccctgacttcaaagtcccctcaattctaacgtgtggtttcatggtttcctttgctaatgtacgaaaaagaacaagatgattatatcttaaagttataaaatctatcataataagcacactacttatgcagtgatcttt

SEQ ID NO: 309555 - DNA, 519 bp, Homo sapiens
acatctcaacatctgaaggaacaaacttcagacacaccatctttagaactgtaccactcactgtgagggtccgcggcttcatttttgaagtcagcgagaccaagaaccaaccagaaggaaccaattctgggcacaactgggctcccggtttgtggacagccatgtcatctcctcctttggggtagtgtccccaacatgatgatccatgcccctgatttggcctgacgcagggcagtaattgtgcactagtagcggggtcaggtatatcaattaaccgacatcaatgcgagtcctagagccagctctggtgtttactagccatgtacccatgagcaaaccattgacgtttgtyggagcctcttcaactgtaaaaaagagactccctgacttcaaagtcccctcaattctaacgtgtggtttcatggtttcctttgctaatgtacgaaaaagaacaagatgattatatcttaaagttataaaatctatcataataagcacactacttatgcagtgatcttt

SEQ ID NO: 309556 - DNA, 427 bp, Homo sapiens
aggacattccataaagcccagtcagagcacttgaaatgcgaacccaaacaagccraagtcatggggagaaatgcatcctccgttttcttgtgaacgcagcagctgttttctctttcctgtatttggatctttctagcaaacacctagaagtctcagcctctccagaaatcaggtgttcccagaccaggtgatctatttgtttagtatcctgtgcccttattcccagaagaaagggaatgggacagaacactctgtcaaataaacaattgcccaaggtcttgggcaagggaaattaggacaggaagcagacagtggactctttgccccaggtaactggctgataaggtaaacaagccatgtacaatgagttcctgtcctctgcatgataaatatttatgtgctgagccctgtgtttggaagcactaaa

SEQ ID NO: 309557 - DNA, 568 bp, Homo sapiens
cacttggtcatgataaatgatctttttaatgtgtttttgaatttggtttgctagtattgtgttgaggatttttgtatcaatgttcatcagggatgttggcctgtaattgtctttttttcatgtatctttgtttggttttagtatccataaaactggcctcatagaatcactttggaaatattccttccttctttctttttgttaggattgtttgcttaggattagcattaatactctyttaaatatttggtagaattcagtggtgaagccattgggtcttgggcttttctttactgggagatgttttatcatggctttgatctcatcacttattgttttccttgggttttttatttcttcatggttcaatcttgataaattttatgtgtcttggagtttacccatttcttctaggttttccaatttattggcatatggtggctcatagtagtcactaatgatcctttgaatttctgtggtattagttgtcctgtctcctttttctttttttattgtttaaaaacttttattttaggttcagggctatatgtgaaggcttgttatatag

SEQ ID NO: 309558 - DNA, 565 bp, Homo sapiens
ttaacaacttcaaagactgaaggaacatcagcccttaaagatgagaaaggaccagtgcaagaactctgacaactcaaaaagccaaagtgccttcattcctccaaatgaccacaccatctcctcagcaagggtctgaactgtgctgaggtggctgaaatgaccaaaatagaattcagaatatggataggaatgaaggtgattgagatgcaggagtacattgaaacccaacccaaggaagctaaaaatcacaataaaatgatgcgggagctgacagacaaagtagccagtatagaaaagaatgtaaccaacctgtagtgctaaaaaactcatggcaagaatttcataatacaatcacaagtattagtagcagaatagactaagtggaggaaagaatctcagagcctgaagactgtctttctgaaatatgacagtcagacaagaatagagaaaaaaagaataaaagggaatgaacaaaacctctgagaaataagaactcatgtaaagaaaccaaatctgtgactcatttgtgtccctgraagagataaggagagaataagcaacttgc

SEQ ID NO: 309559 - DNA, 510 bp, Homo sapiens
tttttctctttgggctttggttctccttttacatattctgtgcagattgtctattttcttctttttcttccccataggctgatgcaatcccatgccgcaacctrtttggtatccagaggaaaacagacatggaatgagaggcttagggggagcaagagacactttttccccttgacactttttaaaaggctcctctttctttagcttctcactgtcaaattgataagacttcaggatttaagttactagggtccacactacaggaaaggcgccaaggaggctacttaatctaatttgaatcaaataggtagaaggaattttcttgttgatacggggccttaggccactaccccgagtcaagaatcccagaagggaattggggatcatgtcctatatagtaataacctccactggaattataatagacaacagatacagaatgaagattcagggtcccagccatctttccacctccttcctggaggcacaaactaatatgacattaagccc

SEQ ID NO: 309560 - DNA, 549 bp, Homo sapiens
gtctttaatccattttgagctaagttttgtatatatacaatattaggtaagagttcaaatttactctttttcatgtgaatattaaattttmccactatcatttgttgaaaaaattgttctttcttcattgaatggttttgccacccttgccaaaaatcatttgaccttatacatgagggtattttttctaggctttctattgtattgcatttttctgtatatctgtctttatgacagtatcacactgttttgattactgtagctttgcagtaagttttgaaattagaaagtgtaagtcctacagctttattcttcttttccaatattttttggctatttggggtccttgagattccataggaattctaggaagaggttttgtatttccacaaaacagtcattagagtttaatagggattgcattgaatctgtagatcactttgtgtagtattgatataattaacaaaaacttccaaattagaaagaagtgaaattatccctattcacagattatgtaacattgtatatagaaaatcctgaagattctac

SEQ ID NO: 309561 - DNA, 619 bp, Homo sapiens
tttacttgttaactctaagaaccattgcattgtacttaaaaaaaaaaaaaaaaaaagaagaagaagaaaaagaaaagcacatcctgtctctgtgactgtcattgcagcactttctgttctatgtgtctacagagaacatattttctgtgtcacagkccccttctatgagctgtggctctgggaaaaagctcataactcctttggtagaaagaataacctcttaattggagtacattttggaaatagatgtagtctttgcatagaattatagaatttcttgtgaaacaccattaaacttatctctcactattcctctcccccatattactcccccacaaaacaaaataatgctggatagtcaataactttatgtctaagattcttggagttacaatgccacaaactgaaactgcagttgtcaccaaacacttccaaatagattagaaatgttacttattttagaaatgttacttattttaattctggcagtgttcatttacaaacataattaatggttcttttttgttgttgttcttttttttgagttggagtctcgctgtgtcaccccagctggagtgcagtggcacgatctcggctcactgccagctctgcctcccgg

SEQ ID NO: 309562 - DNA, 560 bp, Homo sapiens
ataagttcttctagttgctagttaagatcaaggagaatactagtgtgtgcttttgtggttgcacacttgcgttggtgtttgtatgtgtgttttctttggatggtttactttattttttattgtaatggtgattacattcaaataaaaatttttcaaccctacttccatgataaaaatatatatattttataagcaatagtgagcattgaagtcagtgaagataataatagttgtcattctcagaaaagaaaaaamgagtatttaatctggatgaatctgggaatatgagagcagaggacttaggtgacctctatagattccactgagaagttttacatcccaattcctgtaaaaatataaagaatgattactgtgtgtctcaatactttaccctgtgagatgataaataagccttcaggagttccaggaaagtgatagagggtattaagtcagaggctcactaggagacacactgacacctaagatacaaagcaaatacaataaaacatacaaaaaaagtgctcagaaatgtttccttaatgtatcaattccctctaatt

SEQ ID NO: 309563 - DNA, 560 bp, Homo sapiens
ataagttcttctagttgctagttaagatcaaggagaatactagtgtgtgcttttgtggttgcacacttgcgttggtgtttgtatgtgtgttttctttggatggtttactttattttttattgtaatggtgattacattcaaataaaaatttttcaaccctacttccatgataaaaatatatatattttataagcaatagtgagcattgaagtcagtgaagataataatagttgtcattctcagaaaagaaaaaacgagtatttaatctggatgaatctgggaatatgagagcagaggacttaggtgacctctatagattccactgagaagttttayatcccaattcctgtaaaaatataaagaatgattactgtgtgtctcaatactttaccctgtgagatgataaataagccttcaggagttccaggaaagtgatagagggtattaagtcagaggctcactaggagacacactgacacctaagatacaaagcaaatacaataaaacatacaaaaaaagtgctcagaaatgtttccttaatgtatcaattccctctaatt

SEQ ID NO: 309564 - DNA, 496 bp, Homo sapiens
catttttcaatacttgttttttttttccatttgaattgctcaatacccgtaatgatttcccattkctttaagaacaatccagtatccttaacatcgaatgtgaagtagtaaattatctgacccctgattatatctatggtcttacttacatcaagactccaaatccatgtacttctggatgttccttccctttgctccaacttcccattcttcaacctccacgctaaacaatctttgcctgagaaacacctgtttaccttttatggtcttgtattcaacaccactccctcttgcaggacttctctaaacctccaggccatgttagatgccctcatatagcaacacatcattctgtaccatgaactatccaataatgtcaacagtcaagttcaaacagtttgaaccatgtagtaaaatagaatagacagactgtactattgtgacattcataaaattatcaattaatgccatgatattctggaaataacccaattac

SEQ ID NO: 309565 - DNA, 618 bp, Homo sapiens
gggtccctgatgcagtgcttcagatgaagaatgtggacttgaaaatacasactgggctagtccggtgtctatatttaaacttattattttattttaataaagtttaggtaacatctcctgaaaagcttgtagcacaaaggctcagctggggatactgtttgactttggaggaaaaaagttgctattgcccgttaaaggcactggagttagtgttttatccctaaataatttcaatttttaaaagcatgcagcttccctctcccctttttatttttgaaagaatacctttggtcataaagtgaaacccatattagcaagtacttggcaatgctcattccaatcagatgcagctttctcccctgtctggtctcctgtttgcaattgcttccttcgtctcagtaggaaaaaatttgagtgggagtactgagatgtgtggatttttgctattggacaaagaatgaggttagaagactgcaactggaagtctctctaggttttcaactatttcttcacaatttgaacacttgacggttgtcccttttaatctatttgaagtgctatttttttaaataaaggttcatctgtccatgcagtcctcttggattctctgaatgtagt

SEQ ID NO: 309566 - DNA, 618 bp, Homo sapiens
gggtccctgatgcagtgcttcagatgaagaatgtggacttgaaaatacagactgggctagtccggtgtctatatttaaacttattattttattttaataaagtttaggtaacatctcctgaaaagcttgtagcacaaaggctcagctggggatactgtttgactttggaggaaaaaagttgctattgccygttaaaggcactggagttagtgttttatccctaaataatttcaatttttaaaagcatgcagcttccctctcccctttttatttttgaaagaatacctttggtcataaagtgaaacccatattagcaagtacttggcaatgctcattccaatcagatgcagctttctcccctgtctggtctcctgtttgcaattgcttccttcgtctcagtaggaaaaaatttgagtgggagtactgagatgtgtggatttttgctattggacaaagaatgaggttagaagactgcaactggaagtctctctaggttttcaactatttcttcacaatttgaacacttgacggttgtcccttttaatctatttgaagtgctatttttttaaataaaggttcatctgtccatgcagtcctcttggattctctgaatgtagt

SEQ ID NO: 309567 - DNA, 618 bp, Homo sapiens
gggtccctgatgcagtgcttcagatgaagaatgtggacttgaaaatacagactgggctagtccggtgtctatatttaaacttattattttattttaataaagtttaggtaacatctcctgaaaagcttgtagcacaaaggctcagctggggatactgtttgactttggaggaaaaaagttgctattgcccgttaaaggcactggagttagtgttttatccctaaataatttcaatttttaaaagcatgcagcttccctctcccctttttatttttgaaagaatacctttggtcataaagtgaaacccayattagcaagtacttggcaatgctcattccaatcagatgcagctttctcccctgtctggtctcctgtttgcaattgcttccttcgtctcagtaggaaaaaatttgagtgggagtactgagatgtgtggatttttgctattggacaaagaatgaggttagaagactgcaactggaagtctctctaggttttcaactatttcttcacaatttgaacacttgacggttgtcccttttaatctatttgaagtgctatttttttaaataaaggttcatctgtccatgcagtcctcttggattctctgaatgtagt

SEQ ID NO: 309568 - DNA, 588 bp, Homo sapiens
tttataaagaaaagaggtttaattggctcacagttccacaggctgtaaaggaagcatgatgctgacatctgcttggcttctggggaggcctcaggaaacttacaatcatgctggaaggcaaaaggggagcagccccttacaaggccagagaaggagcaagagagagatggggtagttgttacccacttttaaacaaccagatctcaggagaactcactcactatcacaatgactgtaccaagtgggatgatgttaaacaatttatgagaaaccaccgtgataaattaatcacctcccaccaggccccacctccaacatagaggattacaattccacatgagatctgggtggggacacagatccacagtatgtcatgcatttaatattgtagtatgatattcacatactgaaccttaatatgttttcactgcagattctatgtattgtatttgtcagtgtttacaattcacttaacrttttctttggctacttaaattttcttaacacaaacctaacactgtatcattaagaagaacccagtaacttcaagtcttctctctattcattagaagattgagtatggtatat

SEQ ID NO: 309569 - DNA, 506 bp, Homo sapiens
tatcaaccccacctgccttcttttgctgttttgttttgttttattacaatagctttaggggtacaaatggttcttgtttacatggatgaattatatactaaaaccaaattttaaaatatagccagctcattacgtgaattaagttttataacagaatatagagaatgagatataggcatattgaataaatgagaaactgaaattaaccatgtctctaaaaccacctagctcctaaaattcattttacaaaatctatcattaatatgtcctatcctggaaaataaagatagtaataagaagactttaatagatactttttatatctcaaaaaccctaatmtttccctatggtggatatatttcctataatcttaactaaaatattctcatgaggtctgagtggaaaactaatctctacaatgagttttcttgctctggttataagaaactatttaaaggaaaaaccagtaagttgttcattcttcttttttgtttttttgttttttt

SEQ ID NO: 309570 - DNA, 528 bp, Homo sapiens
gttcctactcctactaatagacactctttttttttttctttagaaattatctcttgcctattctctgtccatgtgtttgtgtgggattgatgccaactccaggttccaggcatgagacaatgatctgaacctggccagtaagagcacgttcttcccagccacactgactgtttcatgcatagtcatcaaaaggaaagcatagataaaagagggaaacggaagattcttgattacattgtttgaactcacagaaatagtaatgctaaatcatctctaacactagcattttcaataagtataagggctatgtctgtcttgattactatattattcacatgtaataggaaagtmcctagaagataacaggaagataactatttgtttaattgaattaaatcaaattcaatttaatattttaagattttcctggactgtaaaatataattttgatgaacggagaaaagagcaaattgtatcacacaatgaaatgtgtgctaaatagccctgaattaattggtttgcctttca

SEQ ID NO: 309571 - DNA, 585 bp, Homo sapiens
gtgaactgaacacaagttgagtaaaattcattaactcttgtgttcartgaacatttattaaaccactactatgtgtcaggtacttttctgaatgttgataaaacaggactgtatgaaactgggcggaaaaagtctctcttctcctagatcttatagttgctcagtcctctgcctgctatgcactggcattacagaggagcgtagacaaggatcccatcaatggagcaagaagtgttgtcccatttatgcaaagaatatccattcctaattcgggatactgtaagactttccaggaagaacatgctatcaccacattgaccagagtcaagaggagagattgattgaaaatgcccattggattgagtgcagtaatcttggaggcctcccttacataaggtaaaaacttgcagagggggtggtgtgactgtactgggtacccatggtaaggggatcccaggaaaaaatcatacttgttaccacaccaactgacctcaaatgttgtagttggaggtggcatcatgttcagagcagtcacaggtaacagctgacaaatggacccaaacagagctgaagcacaaaatttgg

SEQ ID NO: 309572 - DNA, 602 bp, Homo sapiens
ttaccatggccaaaacgaaattgattacacaccttgaaaattgcctatactaaaataagtgttgtttagcataaaacaaatgagagaaaataatatatgttagaayataaaatcaaacttttgatgagttaaaaattacataacatttaaatgtgtctttaacaatgttccttattaagaaaacattcaaggccaatgctttacctctataatcccagcactttgggaggccaaggcaggaggttcacttgaggccaggagtctgaggccacgtgggaaaaactgcgaggcctcatctctacaaaaaatgtttaaagttaacaggatgaagtggcacatgcctgtagtcccagttactcagaagattcagacaagaagatggcttgagaccaagaggtggaggctgccgtgagccacgatcgcgccacaatactccattctgggaaacagcatgagactcagactctaaaaaaaaagaaagagagagaaaaaaagaaaaaattcagtgtgagaccaagataaattcaataatttaaaaaacgtcctaaatctaccagaattcaagaagaaattatccttactaatttgagaaatgtagattg

SEQ ID NO: 309573 - DNA, 602 bp, Homo sapiens
ttaccatggccaaaacgaaattgattacacaccttgaaaattgcctatactaaaataagtgttgtttagcataaaacaaatgagagaaaataatatatgttagaatataaaatcaaacttttgatgagttaaaaattacataacatttaaatgtgtctttaacaatgttccttattaagaaaacattcaaggccaatgctttacctctataatcccagcactttgggaggccaaggcaggaggttcacttgaggccaggagtctgaggccacgtgggaaaaactgcgaggcctcatctctacaaaaratgtttaaagttaacaggatgaagtggcacatgcctgtagtcccagttactcagaagattcagacaagaagatggcttgagaccaagaggtggaggctgccgtgagccacgatcgcgccacaatactccattctgggaaacagcatgagactcagactctaaaaaaaaagaaagagagagaaaaaaagaaaaaattcagtgtgagaccaagataaattcaataatttaaaaaacgtcctaaatctaccagaattcaagaagaaattatccttactaatttgagaaatgtagattg

SEQ ID NO: 309574 - DNA, 614 bp, Homo sapiens
  misc_feature (1)...(614): n = A,T,C or G
nnnnnnnnnnnnnnnnnnnnnnnnnnnnnnntttgatgcataggcattccattccgtttgattccagtccattcaagaaagttccattccagtccattgctttccagtccattccattccactctagtctattccactccattcctttccattccattccatactattccattccattcctttgcattccgtttccaatctattcgagtccattgcattccagtccaatccattcsattacatttcttttgattccctgccagtcgattgcattgcatactacaccattccaaaggagtccattccattctatctcaacactttccattccactctgttcgagtccattccattccagtccatttaattcaagggcattccattccattccattccatttcatattattccattccattcaattccattccagatgattccattccattctataccattgctctctgttccattccattccatctgtctccattcctttcgtttcgattcctttccattccattccattccatttgatcctattttattaaattgcattctattcgagtgatttccattcgagtcctttccattcgattccattccattctatt

SEQ ID NO: 309575 - DNA, 574 bp, Homo sapiens
tttgatttgatatatcaattcaatttctataagtgtaatagagactctgaggaatgaaaatgaacagtaaacatattttctcttccttatgatttccttaataacattttcttttatctaccttacttgattataagaatacaatgtattatgcatctagcatacaaaatatgtgttaattgtttatgttactcagtaaggcttccggtcaacagtaggctatttgtagtaaaggttttggggagtcaaaagttatacatggattttcaattgcatgagtcagcatccctaaccctctcattgttcaagggtaaactataagaggagacttttcaaccactatctatcaactccttccccactctggcttcttggctataaatcatcacttacccttgttgtatttgaagttgagcctgtgtgtgtgtgtgtatatatatatatagtaaagattttgtatgctttgtttgttgtyttatatattaaataaagtctgacaatttttttattattttctaattgactcattgatctgtcgttacatttttcaatgtaaatgtagaatggggcagtt

SEQ ID NO: 309576 - DNA, 614 bp, Homo sapiens
  misc_feature (1)...(614): n = A,T,C or G
nnnnnnnnnnnnnnnnnnnnnnnnnnnnnnntttgatgcataggcattccattccgtttgattccagtccattcaagaaagttccattccagtccattgctttccagtccattccattccactctagtctattccactccattcctttccattccattccatactattccattccattcctttgcattccgtttccaatctattcgagtccattgcattccagtccaatccattcgattacattycttttgattccctgccagtcgattgcattgcatactacaccattccaaaggagtccattccattctatctcaacactttccattccactctgttcgagtccattccattccagtccatttaattcaagggcattccattccattccattccatttcatattattccattccattcaattccattccagatgattccattccattctataccattgctctctgttccattccattccatctgtctccattcctttcgtttcgattcctttccattccattccattccatttgatcctattttattaaattgcattctattcgagtgatttccattcgagtcctttccattcgattccattccattctatt

SEQ ID NO: 309577 - DNA, 503 bp, Homo sapiens
tttttgctttaggcaggtgagtgtgatcagatgtcaagagtgggaaataagaaattcaattagattttgagagtgatcaagggtagaagattctttctaaactaacttagcaggattctcgctaagactgggctatgagcccagcagggatgagggccaaggttgagacctagtcaaaaagaagactcaaaagaacctgactaagctttagacatggattctttttcattaatatattatggaattgttaaactttcgttttcaagtaattttattatgcatggtatttattcttttatcatgraatataacttgagcacctatcatgttctagttatacttttaggaaaagtggaatccaatggctgaaaaatgacagatagttttcttggtctagtagagaaaacattcaattaacaaagaagcaaaaaattaataattttaaataataatcagcttatgaagaaaatgtattcatgaaagaaaaagtttagaaagggtgg

SEQ ID NO: 309578 - DNA, 495 bp, Homo sapiens
gctactttccctagttgtgtatgcttagataattcaatttaatgttattaataaattgaattaaaagagaatcagaaggatacatatttgtgcatatacactcacatggaaacaaaaacatgcacatgtactcaggtgcgtgcaygcacacccacatggtgaagaagtaaaataacatccactttgttctgtgaattcataggtacttctattcaattctttaactcaagccttgccaatatatggcagggtatagaaatatgtgaggaatttgaagcaggatctacaatgatgggacaataaattattttttaaaaaattactaatatggaggaatcaagtgagagttcgatttctaaaaaaaagacaagtgctgttctctttaaggcttggaaacatctgaaataataggaaaagatgaatgctccttacaattgtctggagaagtaatcaatttgtagaagaatgatagcatgaaaaaaatctgtgaataga

SEQ ID NO: 309579 - DNA, 600 bp, Homo sapiens
ccttcaaaatgaagggaaagtaaataatctcatggacaaaaatggagggaattaacaattaacttccagcagatatattctgcaacaaatgttatagattattcagacagaaaaaataaaagatttgggcaagaaaccctacttcttaagtgttagcagcacatagtgactctctccctcagaagagtaaagtatgaaacaggaaaaaatagttaytttacaataaagaaccctgacaatcactgccactgtcaaataatcaaggttttcatccacactgatcaatttggtagtaggtacttttgatataacgtgatgagaatggcactgtatctctgctatacctacctcccattgactaactcacccaatctaagcattagaaaaatgtaaataaaccccaactggcaatattctataaaatacctaaatgtatctcaaaattgtcaaggtcatcaaaacaaggaaattctgataagctgtcacagtttagaactttctagataaacatgttgacaaaggatatacaactactaaatgaaatgtagtatttcattcataccacattccatgggtggaattcttagaacataaaaatat

SEQ ID NO: 309580 - DNA, 600 bp, Homo sapiens
ccttcaaaatgaagggaaagtaaataatctcatggacaaaaatggagggaattaacaattaacttccagcagatatattctgcaacaaatgttatagattattcagacagaaaaaataaaagatttgggcaagaaaccctacttcttaagtgttagcagcacatagtgactctctccctcagaagagtaaagtatgaaacaggaaaaaatagttactttacaataaagaaccctgacaatcactgccactgtcaaataatcaaggttttcatccacactgatmaatttggtagtaggtacttttgatataacgtgatgagaatggcactgtatctctgctatacctacctcccattgactaactcacccaatctaagcattagaaaaatgtaaataaaccccaactggcaatattctataaaatacctaaatgtatctcaaaattgtcaaggtcatcaaaacaaggaaattctgataagctgtcacagtttagaactttctagataaacatgttgacaaaggatatacaactactaaatgaaatgtagtatttcattcataccacattccatgggtggaattcttagaacataaaaatat

SEQ ID NO: 309581 - DNA, 600 bp, Homo sapiens
ccttcaaaatgaagggaaagtaaataatctcatggacaaaaatggagggaattaacaattaacttccagcagatatattctgcaacaaatgttatagattattcagacagaaaaaataaaagatttgggcaagaaaccctacttcttaagtgttagcagcacatagtgactctctccctcagaagagtaaagtatgaaacaggaaaaaatagttactttacaataaagaaccctgacaatcactgccactgtcaaataatcaaggttttcatccacactgatcaatttggtagtaggtacttttgatataacgtgatgagaatggcactgtatctctgctatacctacctcccattgactaaytcacccaatctaagcattagaaaaatgtaaataaaccccaactggcaatattctataaaatacctaaatgtatctcaaaattgtcaaggtcatcaaaacaaggaaattctgataagctgtcacagtttagaactttctagataaacatgttgacaaaggatatacaactactaaatgaaatgtagtatttcattcataccacattccatgggtggaattcttagaacataaaaatat

SEQ ID NO: 309582 - DNA, 589 bp, Homo sapiens
ctgccagcatagcagtttgaagtcaatctgggatgctcctgattggaggggggaggggcatcaaccattactgaggctagagtgggcggttttcccctcacagtgtaaacaaagctgctgggaagtttgaactaggtggaacccacaacaacactgcaaagccactgtagtcacactgcctctccagattcctcctctctggtcagggcatctctgataaaaaggcagcagccccagtcaggggcttatagataaaactcccatctccctgggacagagcacctgggggaagaggtggctgttgacaaagcttcagcaggcttaaatgttcctkcctgatggctctgaagaaagcagcagatctcccagcacagtactcgagctttgctaagggagagactgccttctgaagtgggtccctgaaccccatgccttctgactgggagacacctgccagcagggttgacagacaactcatacaagagagatccaactggcctctggcaggtgcccctctgggcttccagaagaaagagcaggcagcagtctttgctattctgcagcctccactggtgatacacaggaaaac

SEQ ID NO: 309583 - DNA, 559 bp, Homo sapiens
tggtgctataagggccagtctggggagtggggcctcagggagtaatagcctggcactggacaagcctgggtcctatgcctacaggtgccaggttgatgcctgaaggcaggggtgctgacttcatgccagggtgagcctgaattkgggagctgtgtgggttgacctggcttagggctggttggaaatctagggctggcttggaagctggaatcacaaggtcttgtctggcagtgagtaggtctgatacttgtatctacagggaccagccaggaggctgaatctgaagatgctggcctgatgactaggcttggagtgcatggcatggcactagggcagtcctgaagcctggtgccttaggtatcagtctagtgctgaaggtaaaatggaggtcagggctgtcaggtagccttgccctgaggcaagacttgtgaataagtctgttggggttggcctggtactggggcagggtgagtgctgggtcaggtccaaagtctggagctatacaggcctgcccaaaactgtgttttactatagtgggcctagtattggggactgaaac

SEQ ID NO: 309584 - DNA, 559 bp, Homo sapiens
tggtgctataagggccagtctggggagtggggcctcagggagtaatagcctggcactggacaagcctgggtcctatgcctacaggtgccaggttgatgcctgaaggcaggggtgctgacttcatgccagggtgagcctgaattggggagctgtgtgggttgacctggcttagggctggttggaaatctagggctggcttggaagctggaatcacaaggtcttgtctggcagtgagtaggtctgatacttgtatctacagggaccagccaggaggctgaatctgaagatgctggcctgatgactaggcttggagtgcatggcatggcactagggcagtcctgaagcctggtgccttaggtatcagtctagtgctgaaggtaaaatggaggtcagggctgtcaggtagccttgccctgaggcaagacttgtgaatargtctgttggggttggcctggtactggggcagggtgagtgctgggtcaggtccaaagtctggagctatacaggcctgcccaaaactgtgttttactatagtgggcctagtattggggactgaaac

SEQ ID NO: 309585 - DNA, 475 bp, Homo sapiens
gcctggatttagaaaaagagcaatgagagtaatgtaaaaccatccttctcactgtcttcaatgaatctttccttatttgtgcttcacccaggtgctgttatgtctcayctcgtttctctagctctgatgaaggtatttttgtgcatggatagttgttcaaattgatgtttttgcagggaatgagcactggaaagtcctattccataattttactgatgcgatgccctggcttttctccacatctctgaaatctaaattctaggcacacacgcttggcctctttggcatcccttgtattggctattccctctgcaaatgtcttctccaaaatatctgcatgactatctaacttactaccatctaagcccaaatgtcatcttcttaatgagctataccctgatgactttatttaaaattgcaaactatcccttctcccaaccctccaaaatccccactttgctttatttttgttgaa

SEQ ID NO: 309586 - DNA, 475 bp, Homo sapiens
gcctggatttagaaaaagagcaatgagagtaatgtaaaaccatccttctcactgtcttcaatgaatctttccttatttgtgcttcacccaggtgctgttatgtctcacctcgtttctctagctctgatgaaggtatttttgtgcatggatagttgttcaaattgatgtttttgcagggaatgagcactggaaagtcctattccataattttactgatgcgatgccctggcttttctccacatctctgaaatctaaattctaggcacacacgcttggcctctttggcatcccttgtattggctattccctctgcaaatgtcttctccaaaatatctgcatgactatctaacttactaccatctaagcccaaatgtcatcttcttaatgagctataccctgatgactttatttaaaattgcaaactatcccttctcccamccctccaaaatccccactttgctttatttttgttgaa

SEQ ID NO: 309587 - DNA, 475 bp, Homo sapiens
gcctggatttagaaaaagagcaatgagagtaatgtaaaaccatccttctcactgtcttcaatgaatctttccttatttgtgcttcacccaggtgctgttatgtctcacctcgtttctctagctctgatgaaggtatttttgtgcatggatagttgttcaaattgatgtttttgcagggaatgagcactggaaagtcctattccataattttactgatgcgatgccctggcttttctccacatctctgaaatctaaattctaggcacacacgcttggcctctttggcatcccttgtattggctattccctctgcaaatgtcttctccaaaatatctgcatgactatctaacttactaccatctaagcccaaatgtcatcttcttaatgagctataccctgatgactttatttaaaattgcaaactatcccttctcccaaccctcmaaaatccccactttgctttatttttgttgaa

SEQ ID NO: 309588 - DNA, 597 bp, Homo sapiens
taacaatcaggtctttttggaattaacagagtaagaattcactcattcctgcctcagggagggtattaatctattcataaggaatctgcctccaacacccagatacytaatgctccctaatgggagcattaggctcacctgtcagatttgatcttaatggagatcaaatttcaacataaagtttagaggggtcaaacatccctactataccaggagccagtggtgtaagtcctgatctgagtccacagacccaagaaccaagattgctgatgtctgatgtcacggaaaactggatgtaccacctcgagcagaaagaacatctactttttgtctgcccttttgtcttcttgaagtgctccgcagattgcataatgcccagctgcattgataaaggccatctttgctcagtctaccaatgcaaattctactgtcttctggaaacattcttacagagacacagaaataatgttttataagatatttgggcatcccttagcccagtcaatttggtacataaaattaaccatcacatattgtatacaatttatttatgtgtctttatccatttttttaattttttcaattataagttcgaca

SEQ ID NO: 309589 - DNA, 597 bp, Homo sapiens
taacaatcaggtctttttggaattaacagagtaagaattcactcattcctgcctcagggagggtattaatctattcataaggaatctgcctccaacacccagatacctaatgctccctaatgggagcattaggctcacctgtcagatttgatcttaatggagatcaaatttcaacataaagtttagaggggtcaaacatccctactataccaggagccagtggtgtaagtcctgatctgagtccacagacccaagaaccaagattgctgatgtctgatgtcacggaaaactggatgtaccacctcgagcagaaagaacatctactttttgtctgcccttttgtcttcttsaagtgctccgcagattgcataatgcccagctgcattgataaaggccatctttgctcagtctaccaatgcaaattctactgtcttctggaaacattcttacagagacacagaaataatgttttataagatatttgggcatcccttagcccagtcaatttggtacataaaattaaccatcacatattgtatacaatttatttatgtgtctttatccatttttttaattttttcaattataagttcgaca

SEQ ID NO: 309590 - DNA, 597 bp, Homo sapiens
taacaatcaggtctttttggaattaacagagtaagaattcactcattcctgcctcagggagggtattaatctattcataaggaatctgcctccaacacccagatacctaatgctccctaatgggagcattaggctcacctgtcagatttgatcttaatggagatcaaatttcaacataaagtttagaggggtcaaacatccctactataccaggagccagtggtgtaagtcctgatctgagtccacagacccaagaaccaagattgctgatgtctgatgtcacggaaaactggatgtaccacctcgagcagaaagaacatctactttttgtctgcccttttgtcttcttgaagtgctccgcagattgcataatgcccagctgcattgataaaggccatctttgctcagtctaccartgcaaattctactgtcttctggaaacattcttacagagacacagaaataatgttttataagatatttgggcatcccttagcccagtcaatttggtacataaaattaaccatcacatattgtatacaatttatttatgtgtctttatccatttttttaattttttcaattataagttcgaca

SEQ ID NO: 309591 - DNA, 539 bp, Homo sapiens
cactttcaagaacagtaaagccaaagttacaagaaataatagaaatcatggggagtaaacaargaaaagtagtttctgtagtaagggacataattatttgtgtagtcgcatatcctaagctccttggtgtgaagtaggagtagtgaagggagggaaaatgacctggcataaataatgagaataaagagagaaatctattacatcatccatcccagaagtataaaggataatgggagaaaaaatactaacagttaagagaaatgaagaagaagcagagtccaaggggaaagtcagattttagataaagcaatgaagtgaatatgacttatgatgtgaatatttgtgtcccttcaaaatttgtgtgttaaaattttaagtcccaaaataatagtattaagaggtggagtatttttagataattagtgtccttataaaactgtttccagagggctacctgcccgcttccaatatatgcaaacacagctagaaagcactgtctataaggaacaggccctcaacagacaccaagtccaccagtg

SEQ ID NO: 309592 - DNA, 539 bp, Homo sapiens
cactttcaagaacagtaaagccaaagttacaagaaataatagaaatcatggggagtaaacaaggaaaagtagtttctgtagtaagggacataattatttgtgtagtcgcatatcctaagctccttggtgtgaagtaggagtagtgaagggagggaaaatgacctggcataaataatgagaataaagagagaaatctattacatcatccatcccagaagtataaaggataatgggagaaaaaatactaacagttaagagaaatgaagaagaagcagagtccaaggggaaagtcagattttagataaarcaatgaagtgaatatgacttatgatgtgaatatttgtgtcccttcaaaatttgtgtgttaaaattttaagtcccaaaataatagtattaagaggtggagtatttttagataattagtgtccttataaaactgtttccagagggctacctgcccgcttccaatatatgcaaacacagctagaaagcactgtctataaggaacaggccctcaacagacaccaagtccaccagtg

SEQ ID NO: 309593 - DNA, 510 bp, Homo sapiens
  misc_feature (1)...(510): n = A,T,C or G
ttagataaagcaatgaagtgaatatgacttatgatgtgaatatttgtgtcccttcaaaatttgtgtgttaaaattttaagtcccaaaataatagtattaagaggtggagtatttttagataattagtgtccttataaaactgtttccagagggctacctgccygcttccaatatatgcaaacacagctagaaagcactgtctataaggaacaggccctcaacagacaccaagtccaccagtgacttttcttatcttcccagactccagaaccgtgaaaaataatttgttttttttaataagtcacctaaagtctttttgttattgcaacccaaacagactaagacagaaattggtactgggattggatgtgttataacaaatacctaataagtcactntatagaaagcctcagtctcttagataatatctaggtggttatgaattgaatgttggtagatatatgaatgataaagaccattttgatgaggtcttaaggaaaaattaacatg

SEQ ID NO: 309594 - DNA, 479 bp, Homo sapiens
  misc_feature (1)...(479): n = A,T,C or G
tctttttgttattgcaacccaaacagactaagacagaaattggtactgggattggatgtgttataacaaatacctaataagtcactntatagaaagcctcagtctcttagataatatctaggtggttatgaattgaatgttggtagatatatgaatgataaagaccattttgatgaggtcttaaggaaaaattaacatgtcatcagaaacaggaattaaggttacccttgttacaaagtkgcaaagaactagggtgaattggttttggttttgtgtcttagtgttttgtattaggtagaagttgtaagtaataaaacttagtacttggctaaggtaatttctaagtatagtgttgaagttgcatcatggtttctcttaaatgcttattgtaaaatgcaaggagagaaattatactaagacaatttttaatcaaaagaaaagcaaaacctaaagatctagaaaattctcatcctgtacat

SEQ ID NO: 309595 - DNA, 479 bp, Homo sapiens
  misc_feature (1)...(479): n = A,T,C or G
tctttttgttattgcaacccaaacagactaagacagaaattggtactgggattggatgtgttataacaaatacctaataagtcactntatagaaagcctcagtctcttagataatatctaggtggttatgaattgaatgttggtagatatatgaatgataaagaccattttgatgaggtcttaaggaaaaattaacatgtcatcagaaacaggaattaaggttacccttgttacaaagtggcaaagaactagggtraattggttttggttttgtgtcttagtgttttgtattaggtagaagttgtaagtaataaaacttagtacttggctaaggtaatttctaagtatagtgttgaagttgcatcatggtttctcttaaatgcttattgtaaaatgcaaggagagaaattatactaagacaatttttaatcaaaagaaaagcaaaacctaaagatctagaaaattctcatcctgtacat

SEQ ID NO: 309596 - DNA, 614 bp, Homo sapiens
  misc_feature (1)...(614): n = A,T,C or G
nnnnnnnnnnnnnnnnnnnnnnnnnnnnnnntttgatgcataggcattccattccgtttgattccagtccattcaagaaagttccattccagtccattgctttccagtccattccattccactctagtctattccactccattcctttccattccattccatactattccattccattcctttgcattccgtttccaatctattcgagtccattgcattccagtccaatccattcgattacatttcttttgattccctgccagtcgattgcattgcatactacaccattccaaaggagtccattccattctatctcaacactttccattccactctgttcgagtccattccattccagtccatttaattcaagggcattccattccattccattccatttcatattattccattccattcaattccattccagatgattccattccattctataccattgcwctctgttccattccattccatctgtctccattcctttcgtttcgattcctttccattccattccattccatttgatcctattttattaaattgcattctattcgagtgatttccattcgagtcctttccattcgattccattccattctatt

SEQ ID NO: 309597 - DNA, 602 bp, Homo sapiens
atgaaactagaaatcaataggaagaatattgacaattttacaaatacatgaaaattaattaacatgctcttccacaactgatgagtcaatgaagaaattaagaggcaaatttaaaaatatcrtgagataaaaaaatgaaaacataatataccaaaattataggatgcagcaaaaagcagttctaagaaggaagtttatagcaataaatgcctacatagaacataagaaagatcccaaataaacaatctaatgttacacctcagggaactggataaaacagtacaaattaagcccaaagttaataaaagaaagaaaatgataaagattagagtaggaataaatgaaataaagactggagaaaacaatacaaaaggctaacaacactgaattgatttttttgaaactatgaaagaaaacaaagttttacctggacagtataggaaaaaaagagaagacaaataaatataatcagaaaggaaagagtaattctattgccagagaaatgcaaaggatcagaagacttctgtgaacagttatacatcaacaaataggacagcctagaaaaaactgatacattcttaaacatgtacagtccatcaact

SEQ ID NO: 309598 - DNA, 602 bp, Homo sapiens
atgaaactagaaatcaataggaagaatattgacaattttacaaatacatgaaaattaattaacatgctcttccacaactgatgagtcaatgaagaaattaagaggcaaatttaaaaatatcgtgagataaaaaaatgaaaacataatataccaaaattataggatgcagcaaaaagcagttctaagaaggaagtttatagcaataaatgcctacatagaacataagaaagatcccaaataaacaatctaatgttacacctcagggaactggataaaacagtacaaaktaagcccaaagttaataaaagaaagaaaatgataaagattagagtaggaataaatgaaataaagactggagaaaacaatacaaaaggctaacaacactgaattgatttttttgaaactatgaaagaaaacaaagttttacctggacagtataggaaaaaaagagaagacaaataaatataatcagaaaggaaagagtaattctattgccagagaaatgcaaaggatcagaagacttctgtgaacagttatacatcaacaaataggacagcctagaaaaaactgatacattcttaaacatgtacagtccatcaact

SEQ ID NO: 309599 - DNA, 602 bp, Homo sapiens
atgaaactagaaatcaataggaagaatattgacaattttacaaatacatgaaaattaattaacatgctcttccacaactgatgagtcaatgaagaaattaagaggcaaatttaaaaatatcgtgagataaaaaaatgaaaacataatataccaaaattataggatgcagcaaaaagcagttctaagaaggaagtttatagcaataaatgcctacatagaacataagaaagatcccaaataaacaatctaatgttacacctcagggaactggataaaacagtacaaattaagcccaaagttaataaaagaaagaaaatgataaagattagagtaggaataaatgaaayaaagactggagaaaacaatacaaaaggctaacaacactgaattgatttttttgaaactatgaaagaaaacaaagttttacctggacagtataggaaaaaaagagaagacaaataaatataatcagaaaggaaagagtaattctattgccagagaaatgcaaaggatcagaagacttctgtgaacagttatacatcaacaaataggacagcctagaaaaaactgatacattcttaaacatgtacagtccatcaact

SEQ ID NO: 309600 - DNA, 602 bp, Homo sapiens
atgaaactagaaatcaataggaagaatattgacaattttacaaatacatgaaaattaattaacatgctcttccacaactgatgagtcaatgaagaaattaagaggcaaatttaaaaatatcgtgagataaaaaaatgaaaacataatataccaaaattataggatgcagcaaaaagcagttctaagaaggaagtttatagcaataaatgcctacatagaacataagaaagatcccaaataaacaatctaatgttacacctcagggaactggataaaacagtacaaattaagcccaaagttaataaaagaaagaaaatgataaagattagagtaggaataaatgaaataragactggagaaaacaatacaaaaggctaacaacactgaattgatttttttgaaactatgaaagaaaacaaagttttacctggacagtataggaaaaaaagagaagacaaataaatataatcagaaaggaaagagtaattctattgccagagaaatgcaaaggatcagaagacttctgtgaacagttatacatcaacaaataggacagcctagaaaaaactgatacattcttaaacatgtacagtccatcaact

SEQ ID NO: 309601 - DNA, 560 bp, Homo sapiens
gccctgatcaggccactacactctagcctgggcaacagagtgagaccctatctcaaaaaaacaaaacaaaacaaagaaaaaatctttatagaaatgcctggacatatagtaaattttatttactgccatatgtatcctttcttcttcccaaagtctttgataggtgataaaatttggcagagcctagaacatttatttgacctcagggtttctcccaatatctttatgagaaagaacagacatggtacttcatttttctctatatggagtgaaagagtagggtctacagcagatgagaaattgtgyttttcttctagactcaaggaaaataatgaggatctcaagattgcctgaaaggctcttcaggaaaccagtaaattccatcagagatggactacgtgtattggttgagtgttatcttgtgagggtctataatatcttgctgtcttcagtgaactcctaggtaactgctcttgtgagctgattgcctatagtctcactgcttggaggagaacttttgacatgcacaaggaaagcttgggaagggagattcctgctgt

SEQ ID NO: 309602 - DNA, 538 bp, Homo sapiens
attgtgttataattgccaagggtgctcagtatagtaacatgctatgctagtttacagcttaggagtgataaggcatactatatatcctagttaggctatattatccaggcttatatatgtatactctaagatgtacatatattcatacaacaacagaatcatctaatgatgtatttttcaaaatgtatccgcatctttttttttttttttaattttacttcacgccccagggtacatgtgcagaatgtgcaggtttgttacataggtatacaagtgccatggtggtttgctgcacctgtcaaccagtcatttaagttttaagccccgcatgcattaggtatttgtcctaatgctctccctccccattcttcccaccyctccgacaggccctggtgtgtgatgttcccctctctgtgtccatgtgttatctcattgttcaactcccacttatgaatgagaacatgcgttggttggttttccgttcttgtattagtttgctgagaatggtggcttccagtttcatctatccatgtccctg

SEQ ID NO: 309603 - DNA, 576 bp, Homo sapiens
tgggtatgacaataaactcattcctgggccagaattgcagtgtgaggatattgaaaagggtacaaatacttctccctataccattacagagctgattcctggaggattaaaagaggaagcttcttttctctaactacatttaatcaggggtacttcataaaacttcctgggagatgtcaaaatgtatagcactagggaaataaatcctcgagttcacacagagaaccattcctctctagctcccctggagaatgaaagtagytgggctgcatttggttctaaagctaggtatatgctcttccaggattactttatttatttgacaattcgggactctgtagtaaattgataaaaatacagtgtctagactatcaacctcctaaatgaatgtatctagtagtgtacatttatctttaagtggtccatgaatctattcttataatctgtctgggggcaggtgtgtaggcacagtgtgaagtggtatgatcattatcagagtcttatgcatttgtcctcaggaggaacctctattcctactagagttgaatgatgagatatattgaaatgctattagca

SEQ ID NO: 309604 - DNA, 537 bp, Homo sapiens
atgccttccccttaaaatcaagcacaagtccaggatatccatactcaaccacctttactgtattagtttgcttccacactgctataaagatgccrtctgcgactgggtaaataaagaaaagaaagttaattaacccaaagttccacatggctgtggaggcatcaggaaacttacaatcatggtggaaggtgaaggagaggcaagtacctctgcacaaggcagcaggaaagacaggaacaaagggtgaacctccaaatacttattaaaccatcagatctcatgagaactcattcactattatgagaacagcacaagggaaaccgcccctataatcaaattacttacctccctcaatacatggggattacaggaccctccctggacagatgggaattacaatttgagatgagatttgggtggggacacagacccaaaccatatcatttactcagagtagtgctggaaattctagccagtgcaataagtgactttatgcaattgacccttgaacaacacaggagttagaggcaacaaccc

SEQ ID NO: 309605 - DNA, 537 bp, Homo sapiens
atgccttccccttaaaatcaagcacaagtccaggatatccatactcaaccacctttactgtattagtttgcttccacactgctataaagatgccgtctgcgactgggtaaataaagaaaagaaagttaattaacccaaagttccacatggctgtggaggcatcaggaaacttacaatcatggtggaaggtgaaggagaggcaagtacctctgcacaaggcagcaggaaagacaggaacaaagggtgaacctccaaatacttattaaaccatcagatctcatgagaactcattcactattatgagaacagcacaagggaaaccgcccctataatcaaattacttacytccctcaatacatggggattacaggaccctccctggacagatgggaattacaatttgagatgagatttgggtggggacacagacccaaaccatatcatttactcagagtagtgctggaaattctagccagtgcaataagtgactttatgcaattgacccttgaacaacacaggagttagaggcaacaaccc

SEQ ID NO: 309606 - DNA, 601 bp, Homo sapiens
gcctactccagcccagaactactaagcagaaactctgtcttgtaacaagtctctgattttgatgcaggataaagtttgagaaccactgctttaagaggaaaagtgctatgctaagaatggttgaggggaggtgttcgagaaaactggccatcagtgatgttgttgagctgttgatttaaccagacttaggtctgtcttatatccagattcctttttaatttttgttgacttgttgtccratgcatcttgacttataactcagaaatacaaaaaaaaagaaaaagctagcaatggaaaattaaaattataagaaaaaattacatgcaatacaatggctatacattagagaaatctagagtaaattgattattttctaagaaaatataatctaacaaataaatacaagaggatttaaaaatagaatatcagtgaagtgatcagaaaggcaataaaagcttcacctttcaaagggagacactgaaccttaacggattaacagtggattctattacataaaggtaacttctttatattttcaactataataatagttagaatgcagaggtgggcggatcatgaggtcaggagttcgagaccatcc

SEQ ID NO: 309607 - DNA, 419 bp, Homo sapiens
atcctctgctgggtgcttgaagacaaacagagaatataatcattatatagattattgcaatttagtgataaatagatattagcattatgaacacctgaagtcaatcttatttttttactcattatttatcagactttttagtaaataaaatttattttataaaataaaattaagtaactaacctgcacatggtgcacatgtaccctaaaacgtaaagtataataataataataataataaaaacttttcaaaaaataaaataaaatwaaattaaattaaaaacatctctataggtttcaaatgtcttatctttaacaaaggtaaaaagacatttgttttgaagatttatcattaaagttaacaaaatttccaagctcaaggcgcatagttgtagatcaagctacaactgcctacagaca

SEQ ID NO: 309608 - DNA, 500 bp, Homo sapiens
cattatactaagaaagacatgctttcttttctttacattacttttttcttttatgtagctaacaattgatcccataagcagaggtagtgaacaaatcttttttcatagttgarctgcaaatatggttcctttttgacaccaatgtcagtagttctcattaattactgtttggaaagacattgactcagaaaccaattattttactggagaaaaaaaaattaccagccagaaagtaatatcttatttgctgagaactattcttcatgtcatactcattatcaaataactgatatttcttaaaaacactgagttaatttggttatgaaaaattctactttgtgtcagagttgatggatttttcttctctcttgtcaattttttcacaaatagttttgcatatatttttattttctagagaattggctcatatttgtgggttttccttgaattaatgttgttcatgcaataaaacatccctgggctgtgtcttgcagtgaata

SEQ ID NO: 309609 - DNA, 657 bp, Homo sapiens
tcccataattatgagagcatgctcctctcctctgccagacttctctttggcattgggagaggtgctttggctgattagctttcagtcagctgtcagggttcagcagccatctcaaaatgtatctgtctcatcatttttgtgcttgtcagcagctaccttttccatttcactctgtcataacttttcaggtcctttacagtattatatgaagcatgacgcagagagacagtttcacaatatgagagaagtcctgagacaaaaagttcatggttcaatatgtgacccaaagagagatttgtcccaagctgtcaaacaaacagccttactcggatctaaggcacagggactaaaatgattgaataggtaagctactcagatttttaaaaaagagttgtgacactccagactggatatttgtggaaaggataagggctttgttaggaagctataatggctttgttaggaaactattcttgtttgccctgtaccctactcctcacatctgatgtggacttcccattgacttcaaaggatcttcagmctgggtaggtaggcagggtgctaagaaaaaggaaaaagtccaaggtccttgaaagtcacattaatcctccttgatgattcagttagccaagtaacaaggacaaaaaacaagcaggt

SEQ ID NO: 309610 - DNA, 583 bp, Homo sapiens
ggtttttattgtgtgtgcctgttggtatttccaggtggctgcaccttcagctccaagtctgaggtataggaggcaaaaagaaaactggggaacttatggctatgtcatttayttgagtctcaagtttcctatctgcttttttctctccacctttgaaaagctatgtttgttttatagaagatgtccaggtttgtggtgtatttaatgggaggcataggagaaagtgtcttctccgtcttcccgaaagcagacgctccagaaataaattttccaattatttaatctgagagatgatttgtgttttgcaaggtcaagaagcagcttggcaattaccacacacaaatttctgagctggcattttattctgaattttgtctttgtttttgattacattgactagagggttgccaaattagcaattcatgctgtactttgtagacagtctttaaaagtaactttatgtgtattccagtcaccagtattcatgagctgtaacattttttttctcatctttgttcctataaagtatacagaaacatatttgaagtcaattgcagaaggttgttctgcttacatgtaaaaa

SEQ ID NO: 309611 - DNA, 295 bp, Homo sapiens
ttctgtaatttgggaagggaatcaggtttatggttccgttcagtttggcattccctcatcacttacagaggacttgttagacaagttatgccatttaacctttacaactcctaaatgcatgtatagtattgtatatgaagaaactaaaactgtgatttaagtaatttcttccaaaattctcttatattgtggtatatggctgttttaattaccttttattarcatttgaccttgatttttttgtattctaaatattttcttgcattgtctgagttgtgatcatttttgaaagttc

SEQ ID NO: 309612 - DNA, 573 bp, Homo sapiens
gatggtgtgacagcaaaacgccctgcaaacaggaaagtggggcggccacgagcaggcgcagcagctataacagcagccccccagcccacacccagggctccaaccttgcctccttgttgccattcagatatcaaacttgacgcagagcgagagagcacatgggtgggacaacagatggcccacccagattacaggccatttaaaaacgcattctataaggagtgcttctgaacggagcagagttaaaattaaaagggcacccgtacttatttgaaaagaacgcagaggaatggtgtttggaaagaagtctcamagggtacggggctggcaatgcatgctttacctcttttaataagtatatttactctttaaattaagatgccagggggtttttggatcactggatgggggacctgcaaacctggcatttcaaatgctgtgaagccctccgaggcatctgcagaagctgccgtcagtgacttttgcaactaagagagattgcaagcatttggggtaaaagaatctcatctaatccaaagaaatgcattatccctgaggacaatgttcccatcc

SEQ ID NO: 309613 - DNA, 573 bp, Homo sapiens
gatggtgtgacagcaaaacgccctgcaaacaggaaagtggggcggccacgagcaggcgcagcagctataacagcagccccccagcccacacccagggctccaaccttgcctccttgttgccattcagatatcaaacttgacgcagagcgagagagcacatgggtgggacaacagatggcccacccagattacaggccatttaaaaacgcattctataaggagtgcttctgaacggagcagagttaaaattaaaagggcacccgtacttatttgaaaagaacgcagaggaatggtgtttggaaagaagtctcaaagggtacggggctggcaatgcatgctttacctcttttaataagtatatttactctttaaattaagatgccagggggtttttggatcactggatgggggacctgcaaacctggcatttcaaatgctgtgaagccctccgaggcatctgcagaagctgccgtcagtgacttttgcaactaagagagattgcaagcatttggggtaaaagaatcycatctaatccaaagaaatgcattatccctgaggacaatgttcccatcc

SEQ ID NO: 309614 - DNA, 439 bp, Homo sapiens
tcctcgtccaccttgctggggtggtgacaggagacccagtagagtcaggactttcaccaccacccagggtaacaaggatactcatcaccctgtgatgtcatgaagaccatgtggggaacagtagttaaggtcttctacctcccccagctagggaggtatcagtagaggccaaatggaaagccagaacttcaacccccatccagtggtaatgaggagcccctcttttgggtgtcaacaaaggctgagcagggaacctggacttctacccttgcctggtagtaaggtggcagtgccgtgccccygtcccctcccacagtgatgtcagagaagccaattaatggatggatgccaatcaatgcatgccaatgcaaagaggacagcagtgttagaattatccaacaaatgttaacaagcagccatcataaaaatgcttcagtga

SEQ ID NO: 309615 - DNA, 529 bp, Homo sapiens
tggcaccatgcctgtagtaccaggatatagaagaactcaataacacyattcatcaataggatctaatcaatatttatataacactccacccaacaacagaagaatgcacattcaagtatccataaaacagataccaagttagaccatattctgggccacagagcaaacctcaacaaactcaaaagaattgaaattgtacagattgtgtttgtttgtttgtttgtttatttatttatttatttatttatttatttatttttgagacagagtctccctctgtcacccaggctggaatgcaggggcatgatctcagctcactgcaacctccacctcccgggctcaagtgattctcatgtctcagcctcctgagtagctgggattacaggtgtgtgccaccatgtctggctaattcttgtacttttagtagagatggggtttcaccatgctggtctctaactcctggcctcaagtgatcctcccacctcagcctcccaaagtgctgggattacatgcatgagtcaccatggct

SEQ ID NO: 309616 - DNA, 529 bp, Homo sapiens
tgtgtatgtcatcagaacttggtttggaaggctaagagagtgtcatgatgttaggggaacggaacaccatgttaattgacactcagacatgaaaatggcttgtgcatatttgatgtattagtggaaccttaaattcaaagttatgggaagcaatatattgctacacttttggccaaaacatttgttaaaccagtctcaaaagagatataccatratccacactttcagatatgtctgccaaggaaatctggcctcttggtgccctgaattttgcagaaaggtaaataaacctggcttaattatgctgttggctgcactgccctaaagttgaggtcaatttggctttggccacctgaaaatttgtgttctctttcccttgtgtattctcactaagatagttttttctaacaattttcattctggtctgaatgttattctaaccttctttatgtgtttctttagcttgggaggataacatatgtatgaggttatggtccaaagatgctgcctttctagtttacttcagatt

SEQ ID NO: 309617 - DNA, 605 bp, Homo sapiens
ttgaggcccttgaagggcccaactggaaagatcccaaagtcaattttaggtcaaaaatacctaatttagaatcttaattccaagamagcctgccaaatatgtcacaatgttcaaaacactgataaaaacaaaatgacaggtcactgtgaaataatagttatttatttaaccagagtgatagtcagaaaatgtaaagaaagctacttgactgtaatagccttaaccctttcaaatctcagttttcctacatgatcagtaaaatctaataaagataacacaggaaaatatcttgataaatataaaatattttgagttttatttaggccaattaaaaaggttaaaaaaaacaaaccttctgcagtgtgattgctttctcttaggaaaagcccatttagataacctgtaagtcaaacatgattgaaaagtccttggattcaatcaggcacatacagagtgtgtgtccaaggttatgagtgtataccacattaaagaggaatataaacaagaaaactagtaccttgagcaggagaatacatagctttagtaacagcatgggaagtgttctcattacatagaacaattcagacacatcaagaaaagtcaag

SEQ ID NO: 309618 - DNA, 397 bp, Homo sapiens
tcatagacttccaagacaaaaatcagttgtttcaatccttttaccaaaacagtatattagtaaggataattctgattagaaaatgatgtgatagaatgtttaaaatgccattacctaatcagaatttttcctaacaatttatctttttgaaaattgaactgaaacagcacacctcaccattactcccccctaaatatttctttccttatttggctctctcaagaaytgaatttgtatacagtactccagattacattcagtatcaaatttacccttgctaagagtatagagttagaatacctcagcttataacagaaacaaatttctgtaaggactacttacttccagaatataatgttttaaccaggaactaaagataattattaacagagtatta

SEQ ID NO: 309619 - DNA, 486 bp, Homo sapiens
atcaaatagaagcgataaccaggcaaattcagaacacacattaaaatgtcattatagttctaatggaagtgtgtgtgagtgtgtgtaggcatgcatgcgcttatgcacttgtctatgtaagatgtaatctaattaaagaggacctaaatttacataggtatgtaaattccacagaaatggaattgggaaattgaagaagaaaacttcacagaagaaataatatttgatttcagaattgaagaatcagctggagtttcccaggtagcaaagtgagtataaggcattctawgcaaagggaatataagatacaaaagcatgaagatgtgagaaagcaaatgaagtcagtaaccaggtaatttagtatgactaaatcctaaggtgaatgttaaatggtaaaagaataggcaatcaatagctatactatgaagtacaacatgtttggatttttctcctgtagctgtaagaagtgcatttaaagtcttctgg

SEQ ID NO: 309620 - DNA, 616 bp, Homo sapiens
aatcgtagagaaaaaaactggtgtcaaagatctaataaaaaatcaaaacaaagaaaaacatgctgtagctggartgtttaggacataaggagtgcacagacagaggtggcaatgtattttgaaacctttatagtttaacttacgacagtcatatagacttctgtttgtacaggaaggaggtcggggaataatgccactgcaggagttactcaagttttatctacccaggaccacccatcaacaaggaaagaaattagtttttataactcatcagtcataagctatacaaaagtcaaaggcaagattaacttaagtcttttggaaataaaacacatatacaccatttgctttttaactttatagaaaatataaagctctattcaacaaataataattatatatgcctccattttactatgttgactggtagagagattaggacaggtttgaagagaggtgttgcttgattaaggtttctccttatattgcactgtgggaatcaacctatctgctattatcctcttctcctattttattgcttgttagttgatttggttgctttgtttttaggcatatccattattggctccttctcctccaaatgtaaaaacaaaac

SEQ ID NO: 309621 - DNA, 597 bp, Homo sapiens
tgctatccctacaacgtcatccaaactgctctcaaaatgcattaccgacttctggctgcaaattcaaagaacactttttagttcctatatatttgatttgttttgcaatatttgccatcatcttttactcactccatagcttccaayagactgcttttccactcacatttccatccacttcatctttcaaattgactcccgatcctccagtatacactgaaactatgtaatcagagtttctagcttctggtctttgaatgctttcggattctcaaatctttatatctcaggtcccataaatctatgtccaacaaccaaataaacaggatgcattttgattttccaaggattctcaaacttagcttgtaccaaaagaactaatctactcctctataactttcccctcctctcaaatctctgtctaagtgaatgacacttcatccctcacatactagagtgagaagcctgggaagagactactacctcccaccatcacatcagttgagtcttggcttcttttttcctatatatctcataaacacccctcaatatatttcttcctctccatatccactgccttggttttgatccatatcc

SEQ ID NO: 309622 - DNA, 642 bp, Homo sapiens
atctggaaaatgagataattggatgagatgtcattttggtcttgaaaatgactaataataatagattatatttattaatgccctaatatatcttatttggctttataataatccttgaggtaggcatagcacaaaacatgatctctgctttaaagaggagtaatatgagactcagaactgtgaagtgattaccttatgaagcacaggtaatgcacagtgcaaactatgttaagaatccaggatttttgatttctagttttttctatacctctcaaaaattgtactttgatasactagaggtcttctttgaaataagtacttgaaggcaaggagggtatattatatgtgttctctaattctccactgcttaataaatattggtcactgactggctaaatagaagctttgggacattaggtgacaatgttcttactttgaagtccagagcataatcatggtaacagttacaggttttgaactgctatactatgccagaaacattacatataatacttcaattattgttattatttatttgaaaggtgaagaacctgaagctcagaatggcaaatcacacaaccaatatggtgaagctgggatgcagactgaggctgcctgtttcccttgatggcaataacttgc

SEQ ID NO: 309623 - DNA, 609 bp, Homo sapiens
ttcctttagcaactcttgcaggacaggtatggtgttgataaaatctcctaccttttgtttgtctggaagagtctttatttcttcttcatgtttgaaggctattttcactgggcatattactctaggacaaacacctctaggttgtttatttgaagtttttctatgtttttgatgtaggcacttatctgtaaactttctgtaaacctagctgtaaagtttcctcttagtactgcttttgctgcgtcataggttctggtatgttttgtttccattgtcatttgtttcaggaaatttttcaattttcttcttaatttcttcattgacccatagtttccagaattcttcctgttattgatttctagttttattccattgtgttcagagaagatttttcyttcagcacttgaaatatgtcatgcctctctctcctggactgtaaggtttccactgaaagtctgctgccagacatattggtgctccattatatgctatttatttcttttctcttgccaccttgaagatccttttttcatccttgacctttgtgagtttaattattggatgttttgaggtagtcttttttgggttacttatgcttgttgttttata

SEQ ID NO: 309624 - DNA, 623 bp, Homo sapiens
aggcagtaaaggcccatgcccattctgctgccatttcagcacagaaaactgaactgaatgttgtcaccagagctttggaactatcccagggaaaagaggtaaatattttcactgactctaagtatacggttttggtagtgcaagctcatgggactttcttttcttccactagtgtggaagaaaagaggcctcctgacctcaggaaacaagaacactaactgtctgacagatatgctcaccctatgagacacagtcacattaccagctcaggctgttattatgcactgtccagggcatcataaagttgcctcacaaacatccaaagggagccaggttgaagcctactccaccaagtctgaaagagccacagaggtagctaaagttttattaaaggaaataattacatggcttgggcttccttgttctatacaatgtggcaatggcctttcttttatttctgaaatcacacaaaaggcaagtcaagctttgcagatcaaatggaagttaaacttgtgaataccacagttgacaaggargagatggagaaaatgaaccacaccttaaagaagacagtggcaaaactctgtcaggaaacagatttaagctggaataaagttttacaa

SEQ ID NO: 309625 - DNA, 570 bp, Homo sapiens
ttacagttcctatatgactttctccacatagcctctttcttggttctagtttcttttttccttcatcttttcaggtttactattctgttaccttwactagttaccttgcataccgcactggtcactgtggatttttttgcacgtagttaccttgtccataccttacatgaaacgttgcttttaaatactcccctcaaatttaccaatttgagttttgacatattggaaaattgcaggatgtagttaagggataaattttaagagcgaaatttcagaaaagtaaaagatcaatttactaaattgtgatttttgctttgttatttagtacatatttataataaattactatgtataaagatccatcagatgaatgtaaagagtacggaatgtctgctcttacagagcttcaattctagctgtactaacacttagccaaaagcctagtaacatcaacaagtttaaatgttactccctttatatagaaaattagtaaaaacacagaattcttcctattttatgaataatgagttgtaaatatgttaccagcctgtagtattaaaatgtttttat

SEQ ID NO: 309626 - DNA, 540 bp, Homo sapiens
ttactattctgttaccttaactagttaccttgcataccgcactggtcactgtggatttttttgcacgtagttaccttgtccataccttacatgaaacgttgcttttaaatactcccctcaaatttaccaatttgagttttgacatattggaaaattgcaggatgtagttaagggataaattttaagagcgaaatttcagaaaagtaaaagatcaatttactaaattgtgatttttgctttgttatttrgtacatatttataataaattactatgtataaagatccatcagatgaatgtaaagagtacggaatgtctgctcttacagagcttcaattctagctgtactaacacttagccaaaagcctagtaacatcaacaagtttaaatgttactccctttatatagaaaattagtaaaaacacagaattcttcctattttatgaataatgagttgtaaatatgttaccagcctgtagtattaaaatgtttttattttctaatagctgtttttaatcacaaacttctctttttaggcttac

SEQ ID NO: 309627 - DNA, 570 bp, Homo sapiens
ttacagttcctatatgactttctccacatagcctctttcttggttctagtttcttttttccttcatcttttcaggtttactattctgttaccttaactagttaccttgcataccgcactggtcactgtggatttttttgcacgtagttaccttgtccataccttacatgaaacgttgcttttaaatactcccctcaaatttaccaatttgagttttgacatattggaaaattgcaggatgtagttaagggataaattttaagagcgaaatttcagaaaagtaaaagatcaatttactaaattgtgatttttgctttgttatttagtacatatttataataaattactatgtataaagatccatcagatgaatgtaaagagtacggaatgtctgctcttacagagcttcaattctagctgtactaacrcttagccaaaagcctagtaacatcaacaagtttaaatgttactccctttatatagaaaattagtaaaaacacagaattcttcctattttatgaataatgagttgtaaatatgttaccagcctgtagtattaaaatgtttttat

SEQ ID NO: 309628 - DNA, 564 bp, Homo sapiens
ctcacattcccctagtgtctcaggtgtttgtttcttattcttgtgtaatgataattgtatataaaatacaatttaactagcagtttgcctctgtgattttcctctttaaaacatttttataggattgacacatattttcttttttctaattttctgaatatctgtttcatacaatattatcctatactatactatactaaataatacaatctttgttaagctaaattatggaaaagacacacatacagaaaaaaagaaaccatgttcacttaacaatcaaagttatttaccgctttcttaatgtagtttgatctggtgaaaaaraagacaagaaaaatagaattaaatgaatgtaagcggcccagtagaaatgtcaccaatgtttaaaataattaatacattttatatgttctagttcatatatgtacactaacaaagccaagtaatcatcatctttagccagaatgcagaagctgcagttaaatttttgtaataaactcactagaaaatattttggtgaagtacaacaatggtcaaaaagacgagagcaaagtgaagttgcta

SEQ ID NO: 309629 - DNA, 511 bp, Homo sapiens
taaaatgtatcatagacctaagtataaaactcaaaactgaaaagattttagaagaaaggagaaaagaacatcyaggtaactttgtatttgccaattcgattttacatctaacatcaaaagcacaaacaatttttaaaaatttcaataatttggacactattaaaatgataaacttccactctatgaaaaacgcattaagataatcaaatagcaagacagaaactgggagaacaaatttgtaaaataaatataataaaagactaagattcacaattaaaaaatactctgaaaattacacagaaaaatgaacactcaattttttaaaaaataagcaagcaatctgaaaaaaacacatcaccacagaatatatgcagatagaatataagcatatgaaaagattctcagttgtattttcattagagaattacagactaaaataaaaatgagatatcattatgcacctattacaatggctaactttcaaaaatcctggcaatatcaactgctggca

SEQ ID NO: 309630 - DNA, 511 bp, Homo sapiens
taaaatgtatcatagacctaagtataaaactcaaaactgaaaagattttagaagaaaggagaaaagaacatccaggtaactttgtatttgscaattcgattttacatctaacatcaaaagcacaaacaatttttaaaaatttcaataatttggacactattaaaatgataaacttccactctatgaaaaacgcattaagataatcaaatagcaagacagaaactgggagaacaaatttgtaaaataaatataataaaagactaagattcacaattaaaaaatactctgaaaattacacagaaaaatgaacactcaattttttaaaaaataagcaagcaatctgaaaaaaacacatcaccacagaatatatgcagatagaatataagcatatgaaaagattctcagttgtattttcattagagaattacagactaaaataaaaatgagatatcattatgcacctattacaatggctaactttcaaaaatcctggcaatatcaactgctggca

SEQ ID NO: 309631 - DNA, 511 bp, Homo sapiens
taaaatgtatcatagacctaagtataaaactcaaaactgaaaagattttagaagaaaggagaaaagaacatccaggtaactttgtatttgccaattcgattttacatctaacatcaaaagcacaaacmatttttaaaaatttcaataatttggacactattaaaatgataaacttccactctatgaaaaacgcattaagataatcaaatagcaagacagaaactgggagaacaaatttgtaaaataaatataataaaagactaagattcacaattaaaaaatactctgaaaattacacagaaaaatgaacactcaattttttaaaaaataagcaagcaatctgaaaaaaacacatcaccacagaatatatgcagatagaatataagcatatgaaaagattctcagttgtattttcattagagaattacagactaaaataaaaatgagatatcattatgcacctattacaatggctaactttcaaaaatcctggcaatatcaactgctggca

SEQ ID NO: 309632 - DNA, 511 bp, Homo sapiens
taaaatgtatcatagacctaagtataaaactcaaaactgaaaagattttagaagaaaggagaaaagaacatccaggtaactttgtatttgccaattcgattttacatctaacatcaaaagcacaaacaatttttaaaaatttcaataatttggacactattaaaatgataaacttccactctatgaaaaacrcattaagataatcaaatagcaagacagaaactgggagaacaaatttgtaaaataaatataataaaagactaagattcacaattaaaaaatactctgaaaattacacagaaaaatgaacactcaattttttaaaaaataagcaagcaatctgaaaaaaacacatcaccacagaatatatgcagatagaatataagcatatgaaaagattctcagttgtattttcattagagaattacagactaaaataaaaatgagatatcattatgcacctattacaatggctaactttcaaaaatcctggcaatatcaactgctggca

SEQ ID NO: 309633 - DNA, 604 bp, Homo sapiens
atattaatcagaagttactaaattgctgaaggcacaaacagatctatttggctccagattcatgggaagtatatatcttttcctgtataaataatgtcataatggatagaacatattctaatcaaagctttgtgcattaacttgtgttcgtaaaataaatctctgctatatgagtcattagtatgtttcttttgaggaagaatgactgattttaaaaaaaaaattctaaatagatcatgaaaaaatttagttacataatctatgactaagatttttaagactaactattgtcttatttccatactattcgtgctttccctgtgtcttgacatataaatctttttttttttcttaagatgtagacttgctctgtcacccagactggagtgcaattgtgccatctccgctcactgcaatcccgcaacttctgccacccaggttcaagcaattcttctgcttcagcctcccaagtagctgggactacaggcgcccaccaccacacacagctaayttttgtatttttagtagagacggggtttcaccatgttggccaggctggtctcaaacttctgaccttaagagatctgctggccttgtcctcaca

SEQ ID NO: 309634 - DNA, 610 bp, Homo sapiens
tttgcaaataaggaaactgaggcatagaacagcaaataacatcttaaggtaacacagaaagaagtattttaagattcccttgttcaccaggaatattcactctttgtaagaaaaacgtttcataatcatgccaagagcaatgctaaattttattactgtattaggcatatraatattatgcatgagaaaagttttttatcccaagttaaagcagcataagcttatttattaaaataaattatagacatttatacatgtttacaaataaaagatgaatatgtgcatatataatgcatattacaataaattgaatacaaatttttattcaagttagaaataagaaaaaattagaagctgaaaacattaatatgtactttctttccttttataaaaaaatcaatgaatattaaagtgaataaatcagaaaataaaggatattacttaggtagattgttaggagccatattttttctttggctgttattaccttcaaatattccttttaaaaatttaaattctaatataatctatcaatagataatttactgagtacatcctgtaatgtgtagtacggaaaataaagggaatgtaaattttaccccttttcagc

SEQ ID NO: 309635 - DNA, 348 bp, Homo sapiens
gactattttcttctcattggttatttctcaacacaaatatcatccacaaagaggccttctctataattcttattagagaatgtttcctcctgtattattgatgtcagtctcctgattttttattcacattattttatctgtatttacctgtttttttcttgactcctctactgaaatatagtccatgaagacaggagctgcatatttcctgttccaagttcttagctcctggacaaatasgtgaactatagatattggttgaatgggtacagcagtgatgactaattgggggaaaaaaaccatgttttttcataaaataaaattgataagtgatagcttaaatgataa

SEQ ID NO: 309636 - DNA, 559 bp, Homo sapiens
aaacaccagcaacaacaaaattttaactccttaattttcttcacacagcacaaccaaatcttaagcaaatctcataatgtatgcctaaacatgtattcataattcaatcacttcttgtaatttccttagtctaatcagcttagcccgataaaacactgtttctcacctgcagcctgcaaaggcctcctgctagtgtttgtgcttccacttcttttcctcccrttactctcttcccaaaacgctaaatgcaattatctcattcaaatataagtcagatcatatcactcccatgctcaaagtcttctagtggtttcttatctatggagaataaaagctcatgttccataaggggagatacaatctaactcccattatctcatcctttcacccactgtgctcaagccatagcactgcctgaactgtcctcatcacctaagaacccatattgttttcaaccaaatatgaattgtgtaaaactacacacttatatagaaagcaaacctcaacacatgcctggattgaaaacatgtaaacatgttagcagatcacagtaaaattc

SEQ ID NO: 309637 - DNA, 521 bp, Homo sapiens
caggttaattaggaaatggcccctgagtaccatctggcaaatagtagaattagtgagtttaacactctcacaataatgtagagccaagaggtatgaacaaagacattattctgatagttggagaatcaaaatgttctgaaggagtgggaagggtatgatgtcagcctccctgtttatgtttgaatcaccttcaaaacacgacttcctagtaatgggcagcccattttggaaagcttttgtaaataatggttcaatgcctcctgaatcttgtattttaacatttgacaagtatttttcttttggtgctagaaaatgttgtccttgcatcagggtgaaatctgtcagcatgaaaggacaattatgagaattgactatrtgaaagtatgttgaaaaggctttgtgaatgttaatgcagcttatcatgctcatttgtacttgacaagtaggtatataaaggtatatggatatatatcatatagatatatgtattctacgtattctatgcatgtatgattaaatag

SEQ ID NO: 309638 - DNA, 633 bp, Homo sapiens
tctagtgaggtggtggttgttcattgtaggctgttcttttttttctttttcttttttttcaccatttctacctccgtggagttgaggtagttaatatwtctgagctggtactttctttgccaaatctttctctttttccattgtgttgtgaatgcctaccttgcaacatatttgaaatatagaatgaatgaaaacaaacaagaaaaataccccaaacattttaatgaacacaaggattttaaaaaatatatccgtttcaatagataccataatagacccataggtggggcaaagcgaatgttagtcagatacattaattttaaaaaaatgaattttattgcaatatgtatttaagtattagaagaaagaaatgaatgtacaccacgatacatatagtacttcattttattctcaatcaaccatgtaatgttggtgttatgatgcttctttgcctcatgagtaacttgaggttgcacagatctttataaattctaaaaagctttcattgagaataacaaccatgcctcaaacgtttcagtatagccggtgtttattaggtggttttaagactcaggctatgcaattttcttaatacacattttttttaatccgactttcctttattacttagac

SEQ ID NO: 309639 - DNA, 633 bp, Homo sapiens
tctagtgaggtggtggttgttcattgtaggctgttcttttttttctttttcttttttttcaccatttctacctccgtggagttgaggtagttaatatatctgagctggtactttctttgccaaatctttctctttttccattgtgttgtgaatgcctaccttgcaacatatttgaaatatagaatgaatgaaaacaaacaagaaaaataccccaaacattttaatgaacacaaggattttaaaaaatatatccgtttcaatagataccataatagacccataggtggggcaaagcgaatgttagtcagatacattaatttwaaaaaaatgaattttattgcaatatgtatttaagtattagaagaaagaaatgaatgtacaccacgatacatatagtacttcattttattctcaatcaaccatgtaatgttggtgttatgatgcttctttgcctcatgagtaacttgaggttgcacagatctttataaattctaaaaagctttcattgagaataacaaccatgcctcaaacgtttcagtatagccggtgtttattaggtggttttaagactcaggctatgcaattttcttaatacacattttttttaatccgactttcctttattacttagac

SEQ ID NO: 309640 - DNA, 414 bp, Homo sapiens
ctactcttctcaaatttgtaaaccttctcatctatttttcacagaaaatggcctcacctctcactgcatagagaaaatagatggcctcagacaggaatgttctcactttctgataccaaatttagaaacctattttcctwttcacttgataaagtagtggagtttttcttccaatgaaaggctaatccctttgctcaggagtttgtagctctctttcataaaccttacccaaaagtttatcccttatctcttatatattttaagctggtgccttccaagtagttcttttttctcttattaaactcactgcaatttagtgggggaaacggcacaacagaacccctgatcatcctgctgttaccttcagatctctttcctctctcttacagcaaaatgtctgaaatatatttcaac

SEQ ID NO: 309641 - DNA, 613 bp, Homo sapiens
atatacaatttctttaaatattatatatactggactcacataaaatttgcaaatgttttctgcattgtatgaattgtcttttgacttcattgatactgctctttgaagggcaatagtcattagtttttacgaagcccagttgatcttttttttttttttagttgcttgtgcttttagggtcaggcctaagaaacaattacctaatccaatgtcataaagattacacctatattttccttaaaggtcttatagtcttagctcttatatttatgtctttatctatttgagtcggtttttgtacatagtattagataggagtccaacattgttacttttctcatgtgggtttccacttgtcccagaatcatttgctggaaaaaaaaatattcttctccagtgaattgtctaggtacgcttgtcaaaaataaattgactrtaaatataagtatttatttctggtttctcaattctattgtctatgtatatctaattctagtacaatacaaaattgattactgaagatttgtagtaagttttgaagctaagaaatgtagtaagatttaaaattaggaaaagtgtcctcagacttggttctttcttattattgttttgg

SEQ ID NO: 309642 - DNA, 593 bp, Homo sapiens
tcttctataattttggaaaaataacaaatttaaaaaagggatcaagtttgtcttgagttttgaagagagtggagtgtttaatatatatttgtgcatctataaatagaaatattctacatttaaatgttaaactgatagtaaaacataccagaaacattccaaggaagaatataaaaaggatattaccatacctcatatttttaaaagttattattatgactctgaccaataaaataaacatgaaatgaatgytgtaatttgggaaaagaaaattaatttttttatttgaaaacattttaaatacagactcaaaaattttaacgggcttaattgagaaattactatgtatagaaagttcagtaaatcttctaagtacaagataaatgctaaagaaacctacttataatcctagatagaaaggctgaatcttgtaaagatgtagttttctaaattaattttaatgtatcacaagtcaccaagtgtatgcgatacacataagggaaaaaagctaatattagtaacgaaacccagaaaggtttctgggatatatcagagatgaattaagttaagaagatatttagaataaactagaa

SEQ ID NO: 309643 - DNA, 562 bp, Homo sapiens
aataaaatatttgtatttctccaataataaattgagcttagcttactggaatgtttgtattttaaagctttttctaacttttctactcttttctagtaagacagcttaaaacacaaacaccttgtagagctgtagaaaaatattaccttatggacgaatgaatattaaaaaatattttatttgagttgaataaaactttgaaggacaaagaaagtggcaagtcacaaataatttcaggaggtaatggactgaaaaacaagaggccatgaaccaaagccaaagctaagaaaagatagtgcaccaagggagttcatgaaaaatgtcttcaggcagagggtgattagcgtatggaacaacaagcaattagaaacaaggagtgtcattaaacaatttgatcactgctcctcaaatggatggatatcactggacagccgagtttttagtccgcagactctcaygtataagcagaaaggcaaaaagaagagatatatttaagtttaaataatatagcacactcttcaagtgagtaagtgagtgagtgaatttatcttgcaacagggca

SEQ ID NO: 309644 - DNA, 600 bp, Homo sapiens
accctgctctgactcggccagcacaagccccagtatcttggggagtccaggaagggggcctagggtaagccagtcccaccctcgccagccccaaggggcccttctgcctccccaagggccgcagcttgtttgtgtcactcctggccccactcgctcaggagctgggagcctgggcagcaagtcggggctgctctatagctggtgaggccctcaaggctgtcggggtgaagtccttggccagagcaaaatgagggtatgggagcacacagccacatccatggaaccccgttccccatcctcctggatggggttgaggacatctctgacctccaacccctctcccagctgcccaggaggcccgcaacaagttcgaggaggccgagcggtcgctgaaggacatggaggagtccatcaggtagcgggggctgaggagcggggacacctgtcccacagcgactgctccttgrctcccaggggagctggtgatggggaatcactgaggcaaccacaggctgggcctggtccctgcagggagggtccctgggaggtggcagggaggacagcctgggcaccattgctcagccagaccctcctgtgtct

SEQ ID NO: 309645 - DNA, 613 bp, Homo sapiens
agttatatgcccaactccctatatatttatttcaccattaatataacacataccctctaaaatatgctttgagaagcaatattttaaatgtatactaaatcraaaatatagaccttgcagctatgactttcctatatcttgcaatcactgttagatttgctttaacaattaaagttaaatttcaaagtaaatttacaaatcatgattttgaaaaatggacctaggccaatatagtttcagcaatgtcttagtcatcttccaaaagaaatagttcactttataaattgctaaaagatggactatgaaaaacacacacatcagaaattaaaactacaatcttcaaacactttccaaatgaagttcaattaacaaacattatacatattaaaaggcatcatgaaatgttatatttaataactgtgcaataagactattataaagtttcatttattggtacttaaaacaataaaatagtttaggtgaccaactaaaagctctttaaatttattttttaattatttaaagataagttaccctgaataaaagactacagtagattatactgctgtgatgtgtaaagacaataattagaagggaaggaaataaaacatta

SEQ ID NO: 309646 - DNA, 619 bp, Homo sapiens
caaattaacattttgaaactgaagtgaaataaaggatatctgagagtgtactctgaacctctactccccttctctcacctctctcctctacaatctctcatttacaccaccagagcaacggtcttttcaaggtagagatggaatcacctttaatggctcctgcagataaactttgtacaagttcaaagtccttaatatggtgttggaagccccatttactatctgcccacaacctgtattcccaaccactctgtggcccatgagagaagacgagagggcagaaagaagaagagagttggcactgtcactctggaaagaatgccagcctatcaatgagggctgcaccctccaatcatgagatgatgccaaagctgaacaagaaagttgagtgggctggactcagggggtagactgcagcctggaaaggaatgctaaagagatggcagagcctctgaatgcaccatggcaagcccacyggatcctgagtcggggaggaattttcgcatacccttattgcccctgaggaacaggagaagtttccgtggccagaatccccaggaaaggcactcaaggttccttgggtagagaaaacagaagtgagaagacaacatgagaggta

SEQ ID NO: 309647 - DNA, 560 bp, Homo sapiens
actaggatactcaattgtgaaactgcctcggcttcagaatagcactcagtacagagttgaccacggcttctgctggtccacccttaatgccactcagcataagcccaaagccctcctccactctctcctaccaaatatyccaggattcttcacgagatgcaacgtcccttccttggcctacaggcatgtttttagaggtctttatgtaaataggatttatcactactcaagaaaggcaagtatgcataaaattaattattaaaatacttatgtcagatagtcataagtgctatgacgaaagtcaaactgctaaaaagttaataatctagccatctatatctaaatggttgctaatatcatagatctcatttacacagaataaaaccgtctctctagatttgatactagaaacactacgaaaactaaagagatcttccaatctacattatattccttctataatcaatctaaactctttctgtattaggtctctaaagcacctgttagatcaagttggaaacttagccatcttccctaaagatgtatttgaaatcatttat

SEQ ID NO: 309648 - DNA, 560 bp, Homo sapiens
actaggatactcaattgtgaaactgcctcggcttcagaatagcactcagtacagagttgaccacggcttctgctggtccacccttaatgccactcagcataagcccaaagccctcctccactctctcctaccaaatattccaggattcttcacgagatgcaacgtcccttccttggcctacaggcatgtttttagaggtctttatgtaaataggatttatcactactcaagaaaggcaagtatgcataaaattaattattaaaatacttatgtcagatagtcataagtgctatgacgaaagtcaaactgctaaaaagttaataatctagccatctatatctaaatggttgctaatatcatagatctcatttacacagaataaaaccstctctctagatttgatactagaaacactacgaaaactaaagagatcttccaatctacattatattccttctataatcaatctaaactctttctgtattaggtctctaaagcacctgttagatcaagttggaaacttagccatcttccctaaagatgtatttgaaatcatttat

SEQ ID NO: 309649 - DNA, 560 bp, Homo sapiens
actaggatactcaattgtgaaactgcctcggcttcagaatagcactcagtacagagttgaccacggcttctgctggtccacccttaatgccactcagcataagcccaaagccctcctccactctctcctaccaaatattccaggattcttcacgagatgcaacgtcccttccttggcctacaggcatgtttttagaggtctttatgtaaataggatttatcactactcaagaaaggcaagtatgcataaaattaattattaaaatacttatgtcagatagtcataagtgctatgacgaaagtcaaactgctaaaaagttaataatctagccatctatatctaaatggttgctaatatcatagatctcatttacacagaataaaaccgtctctctagatttgatactagaaacactacgaaaactaaagagatcttccaatctacattatattccttctataatcaatctaaactctttctrtattaggtctctaaagcacctgttagatcaagttggaaacttagccatcttccctaaagatgtatttgaaatcatttat

SEQ ID NO: 309650 - DNA, 593 bp, Homo sapiens
tctacattatattccttctataatcaatctaaactctttctgtattaggtctctaaagcacctgttagatcaagttggaaacttagccatcttccctaaagatgtatttgaaatcatttatgccccaattagatgggtcatctcataaamtaattggggtatagttatatgatcaaagtgttaaggactatttctcaaaattattaattgatgttatctcctaaattttgtctttaggaaaaggaagaagaacaggtctgatcttccaatagaaaacttctaaaaaattgtgtctccataaatcccagctttgccaagccctgtgtcacattcattgacctttcccatgcgtaacacatcttttaataaaatgccagataaaaagaaacacatcggaaaacttcaagctttagaggaataatacaatgacattgtttaaattctaagcaaattgacagtttggaaattctcttttgcgaagtcattagtttctaagtactcatcaatcatttaaggttgtaatcaatgacaaattaatgcttactctcataaggacaagtataaactttaaattcatttattcattcattcac

SEQ ID NO: 309651 - DNA, 593 bp, Homo sapiens
tctacattatattccttctataatcaatctaaactctttctgtattaggtctctaaagcacctgttagatcaagttggaaacttagccatcttccctaaagatgtatttgaaatcatttatgccccaattagatgggtcatctcataaaataattggggtatagttatatgatcaaagtgttaaggactatttctcaaaattattaattgatgttatctcctaaaktttgtctttaggaaaaggaagaagaacaggtctgatcttccaatagaaaacttctaaaaaattgtgtctccataaatcccagctttgccaagccctgtgtcacattcattgacctttcccatgcgtaacacatcttttaataaaatgccagataaaaagaaacacatcggaaaacttcaagctttagaggaataatacaatgacattgtttaaattctaagcaaattgacagtttggaaattctcttttgcgaagtcattagtttctaagtactcatcaatcatttaaggttgtaatcaatgacaaattaatgcttactctcataaggacaagtataaactttaaattcatttattcattcattcac

SEQ ID NO: 309652 - DNA, 593 bp, Homo sapiens
tctacattatattccttctataatcaatctaaactctttctgtattaggtctctaaagcacctgttagatcaagttggaaacttagccatcttccctaaagatgtatttgaaatcatttatgccccaattagatgggtcatctcataaaataattggggtatagttatatgatcaaagtgttaaggactatttctcaaaattattaattgatgttatctcctaaattttgtctttaggaaaaggaagaagaacaggtctgatcttccaatagaaaacttctaaaaaattgtgtctccataaatcccagctttgccaagccctgtgtcacattcattgacctttcccatgcgtaacacatcttttaataaaatgccagataaaaagaaacacatckgaaaacttcaagctttagaggaataatacaatgacattgtttaaattctaagcaaattgacagtttggaaattctcttttgcgaagtcattagtttctaagtactcatcaatcatttaaggttgtaatcaatgacaaattaatgcttactctcataaggacaagtataaactttaaattcatttattcattcattcac

SEQ ID NO: 309653 - DNA, 558 bp, Homo sapiens
ggatcagcacttaccacagcacagcctaattaactgttgtcaaacagaattgaaggtcaaatggctaattaaagatggagacattactagaatccagatcttttgatctgccaggtaattttcttacaatgacarttcaaaaggtcatgtcttacaactgtagtaagctctgtaaaaacgttatactcaatatcactaattcttagggaaatgtacatggaaattatgagacacactttaaactcactagaatggctatcaacaacaacaaaacagaaaatggcaagtgttggcaagactctagagagattggaaccctagtgtgctgttggtggaaatgtaaaatggtacagccgctatggaaaaatgatgtagcagttcttcaagaaaataaccatagaatcatcacataatctagcaattccacttctgggtatctgcccaaaagaaacgaaagcagggacttaaataattgtacaccgatgttcctagcagcactatttgcaataggcaaaagaagcaattcaagtgtctacgaatgaacaaaatgcgataaat

SEQ ID NO: 309654 - DNA, 633 bp, Homo sapiens
ctccatttggaggacacagagctaatcttgctgggacaagtccctttatgtcaaagagaaagctgtctgagatctgctagcagtaatgtaagggcttggcacctagcttccctcacattttccttcgttggtgcttctcatcatttctgggccgataagagcagaagtagaaaaatgactgagacataaacatgtcaatttagatctaccaggggttaaaacgaatataatggttaaagcaaacttcagtctattgtccaagtaacaaatgtttattttagtgtgtgctttaaggaagaatatgcactctgttacgtggcgttgagaaatggtacttcttttattgttagtgcaaatagtctttgttattatatgtactcaggattttttttcctttggtataattatcatgttatcccctttttataggcaggtgtggagagaccaaatttagtgactcactccagacctagctctgccacttactagttacgagtttatcctgtaggcttcactttcttgaacaaaagaatggacctaacagamaatgagtcctattctctaattattcagaaagacttcttataaaatctctttggaaatcaacatcagcattgaattgtcctaatgatg

SEQ ID NO: 309655 - DNA, 633 bp, Homo sapiens
ctccatttggaggacacagagctaatcttgctgggacaagtccctttatgtcaaagagaaagctgtctgagatctgctagcagtaatgtaagggcttggcacctagcttccctcacattttccttcgttggtgcttctcatcatttctgggccgataagagcagaagtagaaaaatgactgagacataaacatgtcaatttagatctaccaggggttaaaacgaatataatggttaaagcaaacttcagtctattgtccaagtaacaaatgtttattttagtgtgtgctttaaggaagaatatgcactctgttacgtggcgttgagaaatggtacttcttttattgttagtgcaaatagtctttgttattatatgtactcaggattttttttcctttggtataattatcatgttatcccctttttataggcaggtgtggagagaccaaatttagtgactcactccagacctagctctgccacttactagttacgagtttatcctgtaggcttcactttcttgaacaaaagaatggacctaacagaaaatgagtcytattctctaattattcagaaagacttcttataaaatctctttggaaatcaacatcagcattgaattgtcctaatgatg

SEQ ID NO: 309656 - DNA, 568 bp, Homo sapiens
atattaccagttttaaaatgcttcactcaagaacaactgcttctgtctttatagaatacttatttggaatatctgtcttatctttcgaacatttgtttcacaaatatttctggaatactctrctagacagtctaggcagaatgcaagctttctgatttcacacacttgtcaacatattagttatctagtgttgtgaaacaaataaccccaaaacttagctgtttaaatcaacaagcatttattatctgagttttggtgggacagctctggcttagatgggtgcttctgactcagggacctcccatgaggtcacagtcaagttgtccaccagggctgcaatcatctcaatggcacctgggtccagagtgtcagcttcaaatctcactcatatggttgttggtagaactcactcagttccttgacaaatggacctctacataggtggcctcatgttatgtgtcctcatattatggcaacgagtaatgaaagagagagaaattgcaagagagagagaccaagatgtaagctaccatcattttataacataatcttggaaatgacgtcctat

SEQ ID NO: 309657 - DNA, 550 bp, Homo sapiens
cattttaacaatatttattctttcaattcataaacatggaatatctttccattttttgtgtcatcttcaatttctttcatcagtgttctagggctttcattgtagagawctttcacttctctggttaattcctacatatctaaggttatttttagctattgtagatggaattactttttatttcttttgcacattgttcactgttagcatatagaaatgctactgattttcacgtttattttgtatcctgcaattttactgaacttgtttattagctctaaaagactttttgtagattgtatgggtttttctagtgtgagatcatatcatctgcaagcaaggataattcgacttattcctttccaatttggatgccctttatttttttctcttgtctgattgctgtagttagaacttccagtactatgttgaataacagtgggaaaagtgggcatccttgtcgtgtttcagatcttagaggaaaatgtttcagtttttccccattcagtatgatactagctgtgggtttgtcatatatgggttttaatat

SEQ ID NO: 309658 - DNA, 550 bp, Homo sapiens
cattttaacaatatttattctttcaattcataaacatggaatatctttccattttttgtgtcatcttcaatttctttcatcagtgttctagggctttcattgtagagatctttcacttctctggttaattcctacatatctaaggttatttttagctattgtagatggaattactttttatttcttttgcacattgttcactgttagcatatagaaatgctactgattttcacgtttattttgtatcctgcaattttactgaacttgtttattagctctaawagactttttgtagattgtatgggtttttctagtgtgagatcatatcatctgcaagcaaggataattcgacttattcctttccaatttggatgccctttatttttttctcttgtctgattgctgtagttagaacttccagtactatgttgaataacagtgggaaaagtgggcatccttgtcgtgtttcagatcttagaggaaaatgtttcagtttttccccattcagtatgatactagctgtgggtttgtcatatatgggttttaatat

SEQ ID NO: 309659 - DNA, 433 bp, Homo sapiens
tgcagggagtttgcacgtacatattaaggattactgctgctgatgataaaccacctccccctagagcctccttagcattctataagtggcaaagattgcttctggctgtgtagccacgaagtagctgcatttcctcctgagtgagaggccggcagtgctgctggattcagcccctaatggcttaagccacagctgcatttcatagtaagatgctgctgactttaccctgcaactttctttccttctctacagctcatttaagatcttcaataggcagcccagtgtctttacggaattttatctcacagattgcaagattaacttcttctgactgccracatatttgaaattctggatcaattctatttgattaacatttacgacacctcttattatcaggataggaatagaaagtacaaaaatgaataaaata

SEQ ID NO: 309660 - DNA, 415 bp, Homo sapiens
cttggtattttgttttaaacgcagctttctttttgttggcggtctcagagtctcaccattagatctttcccccttttcaaagaagctctctggtgatgtttgctttttactcattttgcctagggttagcttgtggggttaccaaaactgtgastgaggtaagtgtgcagtgaggaaaagaggcacagacgaaagtggtaaatattctacggaccacatatggactaaaataagtgctggattctgatttaaggcctgccaccagatgtagccatacaatggaagtacgttaactcacttgctgctataaagcctgccactggaagcagcttaattgtcacttgccacttgctgatagggttttgatatgaatctgcaagcagttgatttattatggtctctgtgcatttattat

SEQ ID NO: 309661 - DNA, 513 bp, Homo sapiens
aaagaagtaatttatataatcatatcatttcatgcagaaaaatcacttatcaaaattcaacacctgttcaggatttaaaaaaaaaaaacttcacaaaaatagaagtagaaactttctcaccttgataaagcacatctaccacaaaacctacagctaacattataattaatgagaaaagattaaatgctyttctcttactatgggaacacaacaaagatgtcaactcgcaacactcttgttcaacattgttctgaaagttctatccagctcaataaatcaagaaaaggaaatgaaaagtatacagatcagaaaggaagaaataaaactgtctctctttaaaaatgacatgactatctatttagaaaaaatagatgaaaaactacaaaaacttataaactaatgagttcagcagcgttgtagggtacacaaaaaacataagaaaatcaattgtatttctacatactagcaatgaaaatatgaatgccaaaattaaaaatacagtgtaatttacag

SEQ ID NO: 309662 - DNA, 600 bp, Homo sapiens
tgccttaactgagatcttacctaatctttttaaaaacttttttatcctaaatagttgtaaaggccttttagtgttctaaccctgctatttttcatatacctcagcccataatcattttcagatccctgggccaataagctccaaagattcttagcactggctatgcattctcatatgcacttctgtgcaatcacactgcctatgaacatctctgtgaagactttcccaccattccctagcagacgaaaccactgtcctaaaaytgaatttatttcatccacatattctattatatattatttagggatatataaacatatttttaataaactttacataagtcgtacatgactacatgcttttcaatcagcattaccttcacgaattttacccacaatgataaatgtagcttcattaaagccattttaagagttgtataggattgcattatggaaagatctataatatattgattaatgttccacagatggttacttaagatgcttaactctattataccactacaaaaggatttaaagaagatacttagacttgtcttctgatgtacacgtcagtttctctctctgtttttcagccaag

SEQ ID NO: 309663 - DNA, 570 bp, Homo sapiens
attcccacgtgtcgtgggagggacctggtgggaggtaattgaatcatgggggcaggtctttcccatgctgttctcgtgatagtaagtctcaggagacctgatggttttctagaggggaactctcatttataaaggggagttgatagttcccctaaacaaattgtttccctctgccatgtaagacatctctttgctcttccttcatcttctgtcatgatcgtgaggcctccccaggcatgtggagctgtgagttcattaaacttctttccyttgtaaattacccagtctcaggtatgtctttattagcagcgtgaaaatggactaatacaatgatacaccagtagaccagatatatgacattataaatgatgtcagctaattttaccttctggtagtactcatagtagtaattttttttaccactactagtagaaattttttactactattttttgctatctccatggggacttttttttataaccatggttaccttcttgcagtattcatagtgggaaagacttgaaatttgctatctccatgaggtcatttattataaccatggttttc

SEQ ID NO: 309664 - DNA, 467 bp, Homo sapiens
tacaatgttagcgacttttaaaattgtttcaattactttgtattgggtcattttggctttaaatgtttaaaatagtttacaactttttttgcagcttttaaaaacgttatcctaaacagaaacttgaatttcacgttagcaatacgcaagtacattcaattcacatctcataacttgacttgcaaatacgataaaaggcattgcttctattttcatatarcaatattttccttcaattagcatttaatgaaggagagtagggtagcactctatggagacctgggaggaatctgtaagaaatgggaagtgtcaaaccagctaatacaaccagaggacccacaatgtgacaggtactatgagaaactcaggacacagagcagagtcttgaaaaaatgtatcatgtatgtggaaattaaaacaatgcaattgagacatctgagaaaaagaatttatacaaattccacact

SEQ ID NO: 309665 - DNA, 346 bp, Homo sapiens
gatccctgttctgccacttactagctatgggacaagccatgggccttgtccataaaatagagataaataacaccagcctcacagggggtgrtggaggaatgagtggcctaatcaaagtgctcgatgccatagctggcacacagcagacactcaacaagtggaaggtatgatggctggttacttgactcatttagggtgctgcaggaacacaaagccattccaacattcaatgaggtgctgacattagattgagggtgctgtctgttctatccctgtgctcctaactgtggctctcaggtagagggagacagagatttctgttccctcagttgttcaggcctagaaa

SEQ ID NO: 309666 - DNA, 578 bp, Homo sapiens
gctttggcatcttaaatgagtctttaatttctgataaacttggttgtttgatctgtaaaatgggtgcaacaccccaacaagggctagtatagaaagcatctcacacagggtccagacacatggcctcgccgagaaagggggagccgttccttctcctcttggggaagtcttggtgttcttcctattaggtgggaccccttccccactctgggggtcagycgggtgcaagtcttcctttgaagcatccacacttgttcttttgttcatgcagcaggagtttattaagtgcctactctgtgccaagcacagttctagtggtcaggaatgcctcggtgaacatgccagacaaggcccctctcctcacagaacatgaaggggaggcagagaacatggtagacaggcctttcctcccactgcaagcatgcagtaatccggagacctggatgccactaacacaacggcagtggcaaaaaaacccaccagacaaaaccgagcccagcctggaatcaggaaaggaaactctcagaagccagaagcaaaagaaagacctcacaccaggggcctgagaggggctgcca

SEQ ID NO: 309667 - DNA, 578 bp, Homo sapiens
gctttggcatcttaaatgagtctttaatttctgataaacttggttgtttgatctgtaaaatgggtgcaacaccccaacaagggctagtatagaaagcatctcacacagggtccagacacatggcctcgccgagaaagggggagccgttccttctcctcttggggaagtcttggtgttcttcctattaggtgggaccccttccccactctgggggtcagccgggtgcaagtcttcctttgaagcatccacacttgttcttttgttcatgcagcaggagtttattaagtgcctactctgtgccaagcacagttctagtggtcaggamtgcctcggtgaacatgccagacaaggcccctctcctcacagaacatgaaggggaggcagagaacatggtagacaggcctttcctcccactgcaagcatgcagtaatccggagacctggatgccactaacacaacggcagtggcaaaaaaacccaccagacaaaaccgagcccagcctggaatcaggaaaggaaactctcagaagccagaagcaaaagaaagacctcacaccaggggcctgagaggggctgcca

SEQ ID NO: 309668 - DNA, 578 bp, Homo sapiens
gctttggcatcttaaatgagtctttaatttctgataaacttggttgtttgatctgtaaaatgggtgcaacaccccaacaagggctagtatagaaagcatctcacacagggtccagacacatggcctcgccgagaaagggggagccgttccttctcctcttggggaagtcttggtgttcttcctattaggtgggaccccttccccactctgggggtcagccgggtgcaagtcttcctttgaagcatccacacttgttcttttgttcatgcagcaggagtttattaagtgcctactctgtgccaagcacagttctagtggtcaggaatgcctcggtgaacatgccagacaaggcccctctcctcacagarcatgaaggggaggcagagaacatggtagacaggcctttcctcccactgcaagcatgcagtaatccggagacctggatgccactaacacaacggcagtggcaaaaaaacccaccagacaaaaccgagcccagcctggaatcaggaaaggaaactctcagaagccagaagcaaaagaaagacctcacaccaggggcctgagaggggctgcca

SEQ ID NO: 309669 - DNA, 578 bp, Homo sapiens
gctttggcatcttaaatgagtctttaatttctgataaacttggttgtttgatctgtaaaatgggtgcaacaccccaacaagggctagtatagaaagcatctcacacagggtccagacacatggcctcgccgagaaagggggagccgttccttctcctcttggggaagtcttggtgttcttcctattaggtgggaccccttccccactctgggggtcagccgggtgcaagtcttcctttgaagcatccacacttgttcttttgttcatgcagcaggagtttattaagtgcctactctgtgccaagcacagttctagtggtcaggaatgcctcggtgaacatgccagacaaggcccctctcctcacagaacatgaaggggaggcagagaacatggtagacaggcctttcctcccactgcaagcatgyagtaatccggagacctggatgccactaacacaacggcagtggcaaaaaaacccaccagacaaaaccgagcccagcctggaatcaggaaaggaaactctcagaagccagaagcaaaagaaagacctcacaccaggggcctgagaggggctgcca

SEQ ID NO: 309670 - DNA, 567 bp, Homo sapiens
aaagttcccctccatcttagagagaagaccttgtggacaaaaacatatcctaagagacgctcctttgaagatctcagcccaatcagtaagatgtgctctgyagagttagagaatattgcactgagacataaagatagcgatgattgatgataacattaaatgtttctaccgcaattttactacgcatttcacgtacattatctcatttagtcttcacatcctccaatgttaccattcccactcatatttccctgaagaggcaactaaagtttaaagagattaaggtgaattacttgaagtcaagtgcatctgatcctgattttcttgaaaatcacacacctgggatggtatgtgacttgccagccgccatctctcctcccatgttcatggcgtctgttcccattgagcctcaagacagccccacccccaagatcattctcaactcagttccctaggcaggcactacccattggtcaaaattggcatgccagatgaaacccacttgccaaaccccctcatctctcaaggaatggaggctcagaaaggccaggtgacttgctgaggcca

SEQ ID NO: 309671 - DNA, 567 bp, Homo sapiens
aaagttcccctccatcttagagagaagaccttgtggacaaaaacatatcctaagagacgctcctttgaagatctcagcccaatcagtaagatgtgctctgtagagttagagaatattgcactgagacataaagatagcgatgattgatgataacattaaatgtttctaccgcaattttactasgcatttcacgtacattatctcatttagtcttcacatcctccaatgttaccattcccactcatatttccctgaagaggcaactaaagtttaaagagattaaggtgaattacttgaagtcaagtgcatctgatcctgattttcttgaaaatcacacacctgggatggtatgtgacttgccagccgccatctctcctcccatgttcatggcgtctgttcccattgagcctcaagacagccccacccccaagatcattctcaactcagttccctaggcaggcactacccattggtcaaaattggcatgccagatgaaacccacttgccaaaccccctcatctctcaaggaatggaggctcagaaaggccaggtgacttgctgaggcca

SEQ ID NO: 309672 - DNA, 567 bp, Homo sapiens
aaagttcccctccatcttagagagaagaccttgtggacaaaaacatatcctaagagacgctcctttgaagatctcagcccaatcagtaagatgtgctctgtagagttagagaatattgcactgagacataaagatagcgatgattgatgataacattaaatgtttctaccgcaattttactacgcatttcacrtacattatctcatttagtcttcacatcctccaatgttaccattcccactcatatttccctgaagaggcaactaaagtttaaagagattaaggtgaattacttgaagtcaagtgcatctgatcctgattttcttgaaaatcacacacctgggatggtatgtgacttgccagccgccatctctcctcccatgttcatggcgtctgttcccattgagcctcaagacagccccacccccaagatcattctcaactcagttccctaggcaggcactacccattggtcaaaattggcatgccagatgaaacccacttgccaaaccccctcatctctcaaggaatggaggctcagaaaggccaggtgacttgctgaggcca

SEQ ID NO: 309673 - DNA, 527 bp, Homo sapiens
tttagttgagaaggaggcgttaggaaggggttcaatctgatctaggctctcttttgtccaacagtaggccaggcctcccaaagtgacttctgaatgggcttggctccgggcaggagaggagtcactcccttccagaaaccaccacacctacaggtacacattgaagagtactctgcagggtgagagaggcagcttgggcaggctctggaggccaactacctggtccactgcctggctccagccctcactagctgtgtggcatttgcctctctctgcctcaatttcctcactgcaaagccaggataaaaacagagtgctccatacagaatagytgtgataattaaataagttaataaacatgaagtacatagaatagcacctggtacgttcaaagtggccaaaaaatggtaagggataacagtgatgatgatgtggtttatccatggaagggcatttgttcatcagattctccctatggaagaagtgcgtgtgtgtgtgtgtgtgtgtgtgtgtgtgtgtgtgtgtgt

SEQ ID NO: 309674 - DNA, 571 bp, Homo sapiens
tttggttattgattgctagtttcagcccattgttgttagagaagatattctatgtgactttaatctttcaaaatgtattgagacttattttgtggcttaacatatgatctrttcttgagaatgttccaggtcacttgagaagaatatacattacgctgttgttgggtagagtgttctgtatatgttagttaggtctagttggcttatggtgtttttcaaatcctctgttttcttattgttcttctttgtctagttccatttattattgaaagtagggcacggaagtgtctaactattattgtagaactgtacatttctctcttcgattctgttttttcttcaagtattttgggacattgttgtagatgcatacatgtttatactttttttatctttttgatgatttggccattttattattataaaatattcttccttgtctctagtaaaaatttttgtcatatattaatatggccacttgagtcttttttgatcactatttgcatttttaaaattcctttattttcaatctctgtgttcggggatctaaaagggtctcttttagacagca

SEQ ID NO: 309675 - DNA, 555 bp, Homo sapiens
taatatgttaatatggctttgtgtactgtcttactgtctgttaggaaaagaccctttattttttaaaggtttttatgttgayatgtgttttatttcttttaagtaaatatccaggagtaggacttctggattgcaagcaaatgtatgtttaactttatacaacactgccagagctttctccaaagttgccataccattttgcattcccactagcagtgcgtgagagttccagttgctccatatccttttcagcacttgataatgtcaattgtttaaagtctagccattgtaatgggtgtgtagtgtttgtgacatgtattttcaattcaattattatattttccatttctagaagttctatttatgctttttttaatctgcttaattatttttagatacacttgcttcttacttatctctcctttacttttttccctttagattttattcatttatttttaatagactttagtttttagagcagttttaggttcacagcaaaattgcacagagttcccatattccccttgccctcacacatgcacagcctctcca

SEQ ID NO: 309676 - DNA, 555 bp, Homo sapiens
taatatgttaatatggctttgtgtactgtcttactgtctgttaggaaaagaccctttattttttaaaggtttttatgttgatatgtgttttatttcttttaartaaatatccaggagtaggacttctggattgcaagcaaatgtatgtttaactttatacaacactgccagagctttctccaaagttgccataccattttgcattcccactagcagtgcgtgagagttccagttgctccatatccttttcagcacttgataatgtcaattgtttaaagtctagccattgtaatgggtgtgtagtgtttgtgacatgtattttcaattcaattattatattttccatttctagaagttctatttatgctttttttaatctgcttaattatttttagatacacttgcttcttacttatctctcctttacttttttccctttagattttattcatttatttttaatagactttagtttttagagcagttttaggttcacagcaaaattgcacagagttcccatattccccttgccctcacacatgcacagcctctcca

SEQ ID NO: 309677 - DNA, 555 bp, Homo sapiens
taatatgttaatatggctttgtgtactgtcttactgtctgttaggaaaagaccctttattttttaaaggtttttatgttgatatgtgttttatttcttttaagtaaatatccaggagtaggacttctggattgcaagcaaatgtatgtttaactttatacaacactgccagagctttctccaaagttgccataccattttgcattcccactagcagtgcgtgagagttccagttgctccatatccttttcagcacttgataatgtcaattgtttaaagtctagccattgtaatgggtgtgtagtgtttgtgacatgtattttcaattcaattattatattttccatttctagaagttctatttatgctttttttaatctgcttaattatttttagatacacttgcttcttacttatctctcctttacttttttccctttagattttattcatttatttttaatagactttagtttttagagcagttttaggttcacagcaaaattgyacagagttcccatattccccttgccctcacacatgcacagcctctcca

SEQ ID NO: 309678 - DNA, 585 bp, Homo sapiens
caaattttaccttcttaaaaggacttccatgatattttccccttgacctggcagaaatatttatttcttttttggggtttcatatttccttttaactaatgtatattatactagggttttctgccaaattttgaagttgtctgtgtacatgcctttgtcttgcctaccacagtttcagcttcaaggggtcatcttggataacacatcacataaaatctggcacttacatttgcatctcatgtaggagataccagtctaaaggcaaaaactgtgtacagtcaaaatactcttaataatcccttaactaggcaataaagtacatggctgagtttaggggccatgtgcatgaaaaataattttatttaaaagaccagataatactcagggcaaaaatatattaacatattgaggaaaatgagaccagttgctccctctgtggcacatatgctcacagagtgtaatggtgggtagggtagttggcagtctttgtaaaggaatttttttcctggctgaacatayacatttgaattcaccagatttggatacacacggtggcatgccttccataaatttgtgagttaattg

SEQ ID NO: 309679 - DNA, 617 bp, Homo sapiens
ggtttggtaccaattctttgaatgtctgataaaattcagctgagaatctatctgatcttggacttttttttgttggtaatttttttttactaccatttcaatcttgctgcttgttattgatttcttcagggtttttacttcttcctgatttaagctaggaaggctgcatattttcaggaatttatccatttcctctaggttttctagtttatgagcataaaggtgttcatagtagtcttgaatgatcttttgtatttctgtggtgtcagttgtaatatctcccattttgtttttaattgagctttttggatcttcttttcttggttaatcttgctaatggtctatcaattttatcttttcaaagaaccaactgcttgtatyggtcatcttttggggtttttgtttcaatttcgtttggttctgctctgatctttgttatttcttttcttctgctgggtttgggtgtggttcttgattctcaaaggcctggaggtgtgaccttagattgtctatttgtattctttcagactttttgatgtaggcattcattgctatgaactttcctcttactaccacttttgctgtatcccagagcttttgataggctatgtcactat

SEQ ID NO: 309680 - DNA, 645 bp, Homo sapiens
gatgccgatcttaatgcacagatcttaaatgcacagcttgatgagtctgacaaatatatgcatgaacataacatcaccccaacaagatatagaacaccccagaaagtgctcttgttctcccagcagtctatccctgccccactccgatttgtatcaccatagattgtttttgacttctagaatttcacataaattgaatgacacaatatgtactgttttacatctagctactttcactgaacataatgttttagagatttgtccgtgattcttgcatggatctatggctcttgtctttttattgctgagtggtgttctggtgtataaatatgccactgtttagccrttctcctgtggatttgggttgtttccagttgtgagccatgctgtgttgctatgaatatttttgtgcaggtctttttgttgacatatggttccattgttttagacaagtacctaggaaagcaatggctagatcacatggcaggtgtatgtttaacttttaaagaaagtgctaaactgttttccaaagtgtttatatttttcaatatattttagagaatggttatggacttcttgtttgtatatagcccaccataagaattgattaagaatgcaatactcatgttaagctttcaatgatat

SEQ ID NO: 309681 - DNA, 579 bp, Homo sapiens
acaatgagaactttgtgatgacaggtggctttcttagccatcaataccatttcctctgtaactatgctgtaaattaggggtgacccctgagcctctgctagtaagaacttcagtatctggaaggtgaacatgaaaccctccaaggtgtttttaagtgttgcctgaaggaaaaacatgctgtaatgtcacrtaagttaataattttaaggagcctataggcctgatggcggaattaaatgcttaacaataattcaaaaatggcttacggaaacttaaaaatgtgaatcatttagtgaggctgaaattatgctcctgacatatatgtgtgacacatgagagcagttacctgggaatttattaccagcttctgagcaaacaaagcctgacctacatttgactaaagtcagctgtctctggttaatcctatgggcttctttttattaatgtcacaattgctaatgtggtataacattgtcattactgaatagcacagcgggatgagctgcagctgttatttctctttctgaacctactgagtcattaaatctgagtttgggggaatacaagttgtaaagatta

SEQ ID NO: 309682 - DNA, 599 bp, Homo sapiens
aggaagcccatgcactccaagccagagcaatgaacgttagccacatttgctagaatgaagggaaagaagcatgctcttctctgtacagttaccaacctagtaagatggaagcctggagctactgtaaccatctctatctcttcatacagaaagtctgactgagcattagacagagcctcgagataaagactcgaaaagtcattgtttgagcacttgaatcatcctgccgagatccacataccctctctaggcaaggggcagacattcaagggagtaaggataggattctttttttttttttttaatgtactttttctcttccttcttttgttttattattatactttcagttttggggtacatgtgcacaacatgcaggtttgtkacatatttatacatgtgccatgttggtgtgctgcacccattaactcatcatttagcattaggtatatctcctaatgctatccctcccccatacccccaccccacaacaggccccggtgtgtgatgttccccttcctgtgtccatgtgttctctttgatcaattcccacctatgagtgagaacatgcagtgtttgcttttttgtccttgcgacag

SEQ ID NO: 309683 - DNA, 538 bp, Homo sapiens
atctgtgtatacataccccaaaagggagtattaatttggtagaaattataaaatcacataagttattgttagccttttctttcaagtagaatataagacaaataaacagattttaacataacttacagacttagcaaatactttaaatttgcatccatttgcaacacttacttttagtaatggagcccaggtgggtatagaacacacaccaaagaataaccaaaaaatgatttcagtgtgaactgacttcaggtttatggttgcatcctctcacacccttaagaaaaagtaatcctttttcagtgaatgaaaacttttgatttttacaaaatcaataacactgttgcagaagatcacaaaattctctctcttctgaaattagaaaaattctgggagcttacyatttctgtatgaatacagatttctgatggctagggaaaaatcaggaggtaagacaaatggatttgcaacactgacaatcaaacaaaaaataaggcactttaaaataattccaatagtaggtgatacgcacatttca

SEQ ID NO: 309684 - DNA, 555 bp, Homo sapiens
acaggcacccaccaccatgcccagctaattgtttgtatttggtagagatggggtgaaaagtgtggaagaaatgattttctcagttttctaataactctaacactctgtgatttgatgttttgaagtcacatactttcaggtataaaattacaagcttgtttcaggctggtatgcatatttaatagaagataaattttgttttcccaatccaagattcataatcttatgtaaattgggtactgtgaatttttgcggtaaggctaaaggtttggcgattgacatactgaattttccatgttgtttccctgcacgcatcatattaaatttcactgtaattctcttatatgacttccatgaaatcacaaattttcatgagtggaaaaatcacgtcagatatgccttgagtcttctttgacgttcctggatgtgaacccagaccagagctatgaaatcatttgcragcacagccccagtaggaacctatggtttggagcattaagccattcgagttaacgtctttgaagtgtttcttcaagctttcagtctgtggttgct

SEQ ID NO: 309685 - DNA, 555 bp, Homo sapiens
acaggcacccaccaccatgcccagctaattgtttgtatttggtagagatggggtgaaaagtgtggaagaaatgattttctcagttttctaataactctaacactctgtgatttgatgttttgaagtcacatactttcaggtataaaattacaagcttgtttcaggctggtatgcatatttaatagaagataaattttgttttcccaatccaagattcataatcttatgtaaattgggtactgtgaatttttgcggtaaggctaaaggtttggcgattgacatactgaattttccatgttgtttccctgcacgcatcatattaaatttcactgtaattctcttatatgacttccatgaaatcacaaattttcatgagtggaaaaatcacgtcagatatgccttgagtcttctttgacgttcctggatgtgaacccagaccagagctatgaaatcatttgcaagcacagccccrgtaggaacctatggtttggagcattaagccattcgagttaacgtctttgaagtgtttcttcaagctttcagtctgtggttgct

SEQ ID NO: 309686 - DNA, 555 bp, Homo sapiens
atcttacttacctccctcaccaaatgcctctgctcctgagattccaatgtcaataatggccctgctatcctttggtgttatgcttgactcttccttcttctttctctattgtttgaagttatttccacagttattgtacttctgactcctaatgcccattgctgcaggtaggsctggctttatatgccctaagctgtggtatacagagtacccaacaagtacccatatgtgggaggtcctggagctgtgcccaaagagggctcattagcagtagatagcattccaacaatactctgcgccaagaaatgagatcagaatccagggaatgaagccaaacttggctagtctgttgccaagctggaagttcttggacacggttataagcaaagggaaagaagccagtagagagggagagattgactgatgatgaaactgagagaagcagtaatggatggggcagggtcctgggggaggcgatcaaaaggatcgccgtatgtctccttgggagtgggctggttctgatgattggggtcttggggagagggagttatatgc

SEQ ID NO: 309687 - DNA, 525 bp, Homo sapiens
ttctaaaaatcctgaggagatggagagcaagtgaggaagtagtgcagatggagacaggagggtggacctgatggtaacaagagcatgcacacattgggcacgtactgtgtgctggccctgcatgagtggaacacagtaattcatcttcacatggtcctgggtgtgagggtttcatttgtagggatatctggtgtctgggaacaacacttgggcttcctttgggaaaccacccaccccgctctggatccctgtggtttggagatgggcatggaagtcaggtttggtcaatgtgaacaccgcagcccctggccacagtgattggcccagggataggcatagttggttcagggttgagcatgtgaccaactcaggcctgtaaggctggatttaagaatttctacagcaaatattgggtcagtcttgctttctctgggattgctgagctgttgccccagamctgccaccttgctactctgtgcgagaggctgtttgggaatgatcaacacagaggaaagcagagccaga

SEQ ID NO: 309688 - DNA, 634 bp, Homo sapiens
cttcattgcaggtctgctcactgcctctgggaagaagaacggaggggatgtgggaatctgctcatgagctgccttctttccaaggccaatgatatcatttcctctaaaagttacatgtcgaggaagagcatgcaggacattcaggagtattctccagaaagtgagaaatgatatgaaaatctcacgtggcaccttttgggagctaccattcatgactacttttttttttttttttgagatggagtttcgcaagcacatttatttatttatttatttatttatttatttatttatttatgcccaggttgaggtgcaatggcatgatctcagctcattgcaacctctacctyctgcgttcaagcgattctcctgcctcagcctcccaagtagctgggattataggggcctgccaccacgcctggctacttttttgtatttttagtagagacggggtttcaccatgttggctaggatggtctcgatctcttgaccttgtgatccgcctgccttggcctcccaaagtgctgggattacaggcgtcagccgccacacccggcccatgactattttttaggcatgaattcaacaaactttcacacctaactcatcaagcattgtgctaattctacataaa

SEQ ID NO: 309689 - DNA, 257 bp, Homo sapiens
caagctacctgcccatctgtctctgagcccatttctctgccttttctctcatgccaggaaatgggctctgtgtgctcgtgtttgaaaccattctttccacttgaatgcagtttyccttgacccctctccctgaatcattttataaaatcattggatccccctcccgcatctttcatattttcttctctattggatccttccattacagttgaaatccactatcatattcctggcttaaatcaccacccatgtccata

SEQ ID NO: 309690 - DNA, 257 bp, Homo sapiens
caagctacctgcccatctgtctctgagcccatttctctgccttttctctcatgccaggaaatgggctctgtgtgctcgtgtttgaaaccattctttccacttgaatgcagttttccttgmcccctctccctgaatcattttataaaatcattggatccccctcccgcatctttcatattttcttctctattggatccttccattacagttgaaatccactatcatattcctggcttaaatcaccacccatgtccata

SEQ ID NO: 309691 - DNA, 434 bp, Homo sapiens
catgtccatattacccttcactacagcctgatttcttttcttcactttagaaaaaaatctcttccaaagaggtttctacactcattattctcatttcctttcccattcatatcttctcaaatccctatctccctctcttagcyaggccattaaatttattttccttgtttgaaaatttatgttgtcaaagtaataaagtcacaagtttcaaaaaattttaatacacacagtaaaaattgtcattcccattccaggtcctcaggcatacctgcatatatatatatatatatatatttgtttcaactgtagtggaaggatccaatagagaagtaaacattgcaggtgcagaagggagattcaataattatataaaagaattcagggggagggggcagggaaactgcattcaagtggaaacaactatatatatgtag

SEQ ID NO: 309692 - DNA, 456 bp, Homo sapiens
caggggcaggaggcctcctggtggacagaagatgcaccctttgctgggagtacagagaagcatcaggagtgaatgcatccatcatgagctctcttagaggggcaagstgccacagccctgattggcccagaaaggaaatgggaggaaaaggagagcctctgttatccacactcagggcactaaagagtttctctatctatatttatggtatgatatgtttgtcttcctcatgaaaaccaaagctccataaggactaagtcatacctgtcattttccctgtagtatcaccatcatttagcctgtgttccttaaagaccatctatggtattatcctcatataacataagatgaaccaaggcatagagaattaaagggttttcctgagttcacaacacgaagagcaagtctaataccagcccctggtccctggagccctgcatgaggctccagttctgt

SEQ ID NO: 309693 - DNA, 456 bp, Homo sapiens
caggggcaggaggcctcctggtggacagaagatgcaccctttgctgggagtacagagaagcatcaggagtgaatgcatccatcatgagctctcttagaggggcaagctgccacagccctgattggcccagaaaggaaatgggaggaaaaggagagcctctgttatccacactcagggcactaaagagtttctctatctatatttatggtatgatatgtttgtcttcctcatgaaaaccaaagctccataaggactaagtcatacctgtcattttccctgtagtatcaccawcatttagcctgtgttccttaaagaccatctatggtattatcctcatataacataagatgaaccaaggcatagagaattaaagggttttcctgagttcacaacacgaagagcaagtctaataccagcccctggtccctggagccctgcatgaggctccagttctgt

SEQ ID NO: 309694 - DNA, 456 bp, Homo sapiens
caggggcaggaggcctcctggtggacagaagatgcaccctttgctgggagtacagagaagcatcaggagtgaatgcatccatcatgagctctcttagaggggcaagctgccacagccctgattggcccagaaaggaaatgggaggaaaaggagagcctctgttatccacactcagggcactaaagagtttctctatctatatttatggtatgatatgtttgtcttcctcatgaaaaccaaagctccataaggactaagtcatacctgtcattttccctgtagtatcaccatcatttagcctgtgttccttaaagaccatctatggtattatcctcatataacataagatgaaccaaggcatagagaattaaagggttttcctgagttcacaacacgaagagcaagtctaataccagcccctggtccctggarccctgcatgaggctccagttctgt

SEQ ID NO: 309695 - DNA, 583 bp, Homo sapiens
aatttaaaaagtaagtgaaacaataaaaccggccctacagcagttcaactctgggaagaaatgtcttcatgtcttctggctccttaaatgaatgtaagaggcagcattctctccaggagagcagattgaatgattggaatgaaggagatgatacggggagwtaaatcagaagggggaccccatttggaactcacacagtttgggctggcagcactcagtttccaaaacgaagcttcgtgtctcctgtcttttcctgaaacaagctcatgaccccctgcatgtagcaccagggtggaagcacaggacatgatctgatagcaaaaaccataactgaccatggaagaagacagttcttggtacttacccttatctttccttcttttgtcctgtggtgaagacctcccttgtgctaaaggtggagagcctttctgggattcagtgtcttcagaggacttttctgtgttgcttaattcaggagatgcctacaggagctgaaatgaaagctggttagcaatccaggcttatgaagatgctggacagtcttgttatttcctgtatgaggactatggacaaatcagaggcc

SEQ ID NO: 309696 - DNA, 583 bp, Homo sapiens
aatttaaaaagtaagtgaaacaataaaaccggccctacagcagttcaactctgggaagaaatgtcttcatgtcttctggctccttaaatgaatgtaagaggcagcattctctccaggagagcagattgaatgattggaatgaaggagatgatacggggagttaaatcagaagggggaccccatttggaactcacacagtttgggctggcagcactcagtttccaaaacgaagcttcgtgtctcctgtcttttcctgaaacaagctcatgaccccctgcatgtagcaccarggtggaagcacaggacatgatctgatagcaaaaaccataactgaccatggaagaagacagttcttggtacttacccttatctttccttcttttgtcctgtggtgaagacctcccttgtgctaaaggtggagagcctttctgggattcagtgtcttcagaggacttttctgtgttgcttaattcaggagatgcctacaggagctgaaatgaaagctggttagcaatccaggcttatgaagatgctggacagtcttgttatttcctgtatgaggactatggacaaatcagaggcc

SEQ ID NO: 309697 - DNA, 583 bp, Homo sapiens
aatttaaaaagtaagtgaaacaataaaaccggccctacagcagttcaactctgggaagaaatgtcttcatgtcttctggctccttaaatgaatgtaagaggcagcattctctccaggagagcagattgaatgattggaatgaaggagatgatacggggagttaaatcagaagggggaccccatttggaactcacacagtttgggctggcagcactcagtttccaaaacgaagcttcgtgtctcctgtcttttcctgaaacaagctcatgaccccctgcatgtagcaccagggtggaagcacaggacatgatctgatagcaaaaaccataactgaccatggaagaagacagttcttggtacttacccttatctttccttcttttgtcctgtggtgaagacctcccttgtgctaaaggtrgagagcctttctgggattcagtgtcttcagaggacttttctgtgttgcttaattcaggagatgcctacaggagctgaaatgaaagctggttagcaatccaggcttatgaagatgctggacagtcttgttatttcctgtatgaggactatggacaaatcagaggcc

SEQ ID NO: 309698 - DNA, 521 bp, Homo sapiens
tttttaaagaatcaaggacacatcagattattcaggttaatctgaacagcatcttggtcatggctgtgaatgaaatattactttagcctcttcccttaattaccacatcagtctcagtctcctcatgttagtgatgggtcgggactaaatgatctccacatctacatctgaaagtctgtggccttctaccttctccaagcactatgcakagggtaggacaaactgatattacctctgccttttctcagcaatcctcaggatatcgcaggttctggtaaacttctctgacaactcaagggccagaccacattcctgtagcagtgaccaagcccgatctgcgccatggccttagctaacagaagtgccacattctccacattgatgggggaaggcccatcactgaggctcccatttagtgactcctggggggctggcctcgtgctcttgctctgtatgagatgaaggagaagcttccattcctccacggtctctgggatccaacctaaacacacacagggaag

SEQ ID NO: 309699 - DNA, 224 bp, Homo sapiens
atctgggagagagaatgaagtaggtttgtgttatgcacacccagmacaccacttagaagttctccaggtctatttccacatttcaattgcctccttcagtgacactcagacctcacgctcacttactttttcctcctgtatattgctgagcaattcagctcagacccacaccctacctcaacgctgtataccaaaatgcttctaggtgctcagcaaagccaaca

SEQ ID NO: 309700 - DNA, 510 bp, Homo sapiens
atacctaataaatactcaactggttactgttattcacccagatggaagctagtcctctttcttcagttaaaatctgcatgagcatgtctctttacattccaagccctgaaatttttctggttcccctcaggaactcctctgaaacaaaagtttgcattagcaaaagaaattctacccaagatctgggagagagaatgaagtaggtttgtgttatgcacacccagaacaccacttagaagttctccaggtctatttccacatttcaattgcctccttcagtgacactcagacctcaygctcacttactttttcctcctgtatattgctgagcaattcagctcagacccacaccctacctcaacgctgtataccaaaatgcttctaggtgctcagcaaagccaacaccgagtcctcatttcaaagtcacatcagtgatcagatatttaggctcacataggtaattctttttaacacagacagagctgtccacaaatagaattctgatgaatg

SEQ ID NO: 309701 - DNA, 582 bp, Homo sapiens
ctgatcatctgtgttgtataattttggaaaaaagaaatctataaagctgaagatcagctcctagaccagagttaatcccccaagacaaaattactagaagaaacagaatttgtagacattaatgtcctctcttgatatttctgagttatattgtttttcttataggatgatttctacctaaatttgaaagttaaaaaagatgagtcctttgtgatgaatcattcttctctacttgtctctatactttacactggtgaatttggaaggaggctttctcttgttagctgttgaaaagttaatgtcaaaatcttaggctatattgttgtcaagtaaacatttttctttcttcttagctcaamcttggtaggttatatgtattgagaaatttacccaattcttaaaccagtaatgagtaaagagatcaaagccataataaaaagggtgggagggaggatgaaggaaaaaaatataaatgtatttactaccactgaactatacacttaaaatagtaaagatgataaattatttatgtgtattttacatcaataaagaaacatttttagatgaaaaatttgatcacaa

SEQ ID NO: 309702 - DNA, 523 bp, Homo sapiens
aagccaagtgcttatccaattcaatcactgaacttaatatacctcatgcataaaaaaaaatccatttgtttacatggggaaaagagtagagcaatctaatacaaaattatagaatggaaaccttgtaatagcctcagcttttggcagaaggtcagctttgcttattatgattggggcaggctgtrcactagcaagttagcctggtgagactgaaataaatctagctgtttacatcattaaattttgaataatggcatatttttatttttttctgccaactttacctctgataaataattctcaagatcaataatttctcagctatgacaatcaggaatgaatccagataaactaatcccatattatttattttacaccacattctcaagctctcctaggggaactctgagttattagtgtgtattgaaagcaaaagcagaatacagtaggtttccagtgagggctgagttcactccaaaagcttatataaatgttctcattttgttgcaactctaccactctg

SEQ ID NO: 309703 - DNA, 666 bp, Homo sapiens
tcctcacaaacctaatgtcatattaacatttctatgaagaaacttttctgacaaaggaacagaaaatcacatcctaaacagcaaatactggagcaaaaatttacatgttcagatttcttatacaacatgatcttttcatcatgccactggttatcaggtagtttgatgctggtcaatcttatcacatgmaaaagcatacagaacaatcaatctgctttatattcactgataataagtctgatcagcagtgagctttatcaatctgcctttagttgtttgatttggaagtttagaacataccaattgtgaacacgaaatataaatatatatatatatgttgcacatgtaaatattgaatgtcattggtaaataaaactatatttttattccttgagataaaactttgacattgaagatggtaaatttccccccatattactggggctatattaaaaatgtttgatatgcaaaatcactgaaataatgtctttttaagtagatgtttggacttttttgtgtgataattattttcattgtttatagaactttgtaagccaattcaacataatcaatatccatataaatttttttaataaccatattaaataagaaagacaagttcactagcctaatttctttcatagttacattaactcaatttggggg

SEQ ID NO: 309704 - DNA, 451 bp, Homo sapiens
ctttcttccttcacaatccagctttataaaatactttttctgtgacatcgtatcaattctcttagatgtaagctatccctttaggactcctaaggctttgttacattcctttgtttagcacttattacattgtaatatcagtatytgcttacatatctatctttttcatgagactgtaaattgaatgggacagtgctgctgctatctttggtctatttctagtgtctatcatctggacaaggtgattaataaatgcttgttaaatacatgaatgattaacaaatctgattctcataaaatatatgtagacataaaattaaaattaaataatgacaaattcttttaaaataatttaaaaagaaataatttaaatcaccgattaagttattttagtgaaatgattactgaaataattttccaagtcctgggtttagtattcaacttattaatt

SEQ ID NO: 309705 - DNA, 451 bp, Homo sapiens
ctttcttccttcacaatccagctttataaaatactttttctgtgacatcgtatcaattctcttagatgtaagctatccctttaggactcctaaggctttgttacattcctttgtttagcacttattacattgtaatatcagtatctgcttacatatctatctttttcatgagactgtaaattgaatgggacagtgctgctgctatctttggtctatttctagtgtctatcatctggacaaggtgattaataaatgcttgttaaatacatgaatgattaacaaatctgattctcataaaatatatgtagacataaaattaaaattaaataatgacaaattcttttaaaataatttaaaaagaaataatttaaatcaccgattaagttattttagtgaaatgattactgaaataattttscaagtcctgggtttagtattcaacttattaatt

SEQ ID NO: 309706 - DNA, 507 bp, Homo sapiens
ctttttgaaagctattgttaggcaaataagaacacaagccactgactggaagaaaatatttgtaactcattggatacaggaagacttgtatctaatatataaagaactcttcaacactaaaactggaacaagaacaactcagaaaacattggcaaaaggtttgagcagacataagatacaaaaggcctatgaatggttgattatcatgtggaaagatgccaaaaatcattactaattaaggaaatgcaaattgaaatctcagtgagataccagtscatgttcactagaaaggctaaaatcgaaaccaaccaacaaacaaaaataatgaatattgattgtttgtgaggatttggagccactggaactttcagacatgacaggtgaaatacaaaatcatactataatacttgtttggaaaactgccctgaagtttcttaaaatgtttatatatcttaccataagatcaaggcattccactcaaagagaaatgaggacagatgttgcaca

SEQ ID NO: 309707 - DNA, 598 bp, Homo sapiens
cccaaaactggaaacaacccaaaagtccataagcaggcttctgcagaagtatgaactacactctacaaagtagttgttctattgctagacctgtaagtggtaaacacaggactggaaatatgtktctactccacaacactgccttctttctttctttaagtaggctaccactagtctaacggcaaagactcaaattccttggagtggaattccaggcccttgaaaatttggcccattcttgtctttcctgcctcatcttctaatgtcttctacattcattcatcatttgttttatgcttatttgcttttttcttctcccatattcactatgcatgtaataagatagaaaagtaattaaaactttctgtttatcacagcagtggttcactaactttacagtttataaaagtcacataaagtgcttgttttgaaaggcagattcctaagtctcatagctataaggttatacctcagtcgacctgggatgggtgacaatacttgtaattttaaatatgtatcccgaggttctaaatcgtgtgacccatgaactatcttttgtgaatttctatttcaatgacttacagcgcaatagacaagt

SEQ ID NO: 309708 - DNA, 598 bp, Homo sapiens
cccaaaactggaaacaacccaaaagtccataagcaggcttctgcagaagtatgaactacactctacaaagtagttgttctattgctagacctgtaagtggtaaacacaggactggaaatatgtgtctactccacaacactgccttctttctttctttaagtaggctaccactagtctaacggcaaagactcaaattccttggagtggaattccaggcccttgaaaatttggcccattcttgtctttcctgcctcatcttctaatgtcttctacattcattcatcatttgttttatgcttatttgcttttttcttctcccatattcactatgcatgtaataagatagaaaagtaattaaaactttctgtttatcacagcagtggttcactaactttacagtttataaaagtcacataaagtgcttgttttgaaaggcagattcctaagtctcatagctataaggttatacctcagtcgacctgggatgggtgacaatacttgtaattttaaatatgtatcccgaggttctaaatcrtgtgacccatgaactatcttttgtgaatttctatttcaatgacttacagcgcaatagacaagt

SEQ ID NO: 309709 - DNA, 601 bp, Homo sapiens
tcgtaaaaaaataaaaatagaattagcaaataattcagcaatcccattttttgggtatacatcggaagagaataaaattatcttaaagasctatctgcacttccatgttcattgcagtagcattactcgcaatagccaagatatggaaataacgtaaatgtccattgctgaatgaattgataaagataatgtgaggtatatatatccaataaaatattattcagccttaaaaaagaaaaaaaaatccctgtctttcagacaacatggatgggcctatggagcaggatgctttgtgacataggaaggtaaatactgcatgatctcaccgatgcagaatcgaaaaatgttgaactcacagaagcagagagtagaagggtgtttgccaggggcagagagggtggggaaggaaattgggagatcttggtcaaaggctacaaaatttcagttataagatgaataacttctggggacttaatgtatagcatggtggccatatttaatagtactgtgtcataaacttgaaattttccaagagaatagatgttaagtattctcaccacacacacacaaaaaattattggtaaaattatgtgaggtaatg

SEQ ID NO: 309710 - DNA, 619 bp, Homo sapiens
aatttccagagtgatggggttccaggtgcattttttgttctaatatttttggtctttgaccctggttcctgacatagagctcctaatttcttagagttttgttaatgatagtaatttctcaaatacatagtttggctatcttttctagatattatcttatccagaatagctcatactctaatgaggtaattcttcatgggctcatggatggggactgctcaccagaaaggaccaaggcattattagaagcttggaactttcacctccagccgccttcttcggagagggaagagaagctggaaattgaattagtaattgatcatacctatgtgatgaatactctgtaaaaattagggatttagaaagtttgtttgttgctgaacacatggaggtgctaagagggtggcatgcccagggcacagatgtttcatgccccttcccagatatcttgtcctgtgcattccttcatctggctattcatctgtatcttgtacaataaaggtaagcgaagtgtaaccctaagttctgtgagctgctctagcaaattartgggacccagagagggggttataaagactcctgatttatagccagttggttagaaggtttgaagcataag

SEQ ID NO: 309711 - DNA, 506 bp, Homo sapiens
agaagtatctaaaaagagaattagggaagggtttttatrgggctttgaggattgagattttagtcatcaggtagcatcaggcaaaagttagggaaagaagaaagatcttgtaaactaggaaatttgctggaatagctagtggtcttattttttgggacatacgtgtctttataaagttacttttaaatcagttagtctttgttcttatattggaatgcaagggtctgaactagctggtattaaagcgttttaagattttttttctctactccaaagtatttcaagttttcaaaacattttgaaaatatactcaatttgtacatccaaaaactcttttaggggctttccaaaacagagcatcctttgtttctccacattttttcagcataaagtattcccagaggcattacaattataacctttccttcaaaataattcaattcttagaaatggttgccttctctaggctctctgggacaaataaagtatgccattctggtagaagg

SEQ ID NO: 309712 - DNA, 506 bp, Homo sapiens
agaagtatctaaaaagagaattagggaagggtttttatagggctttgaggattgagattttagtcatcaggtagcatcaggcaaaagttagggaaagaagaaagatcttgtaaactaggaaatttgctggaatagctagtggtcttattttttgggacatacgtgtctttataaagttacttttaaatcagttagtctttgttcttatattggaatgcaagggtctgaactagctggtattaaagcgttttaagattttttttctctactccaaagtatttcaagttttcaaaacattttgaaaatatactcaatttgtacatccaaaaactcttttaggggctttccaaaacagagcatcctttgtttctccacattttttcagcataaagtattcccagaggcattacaattataacctttccttcaaaataattcaattmttagaaatggttgccttctctaggctctctgggacaaataaagtatgccattctggtagaagg

SEQ ID NO: 309713 - DNA, 453 bp, Homo sapiens
ctgaactagctggtattaaagcgttttaagattttttttctctactccaaagtatttcaagttttcaaaacattttgaaaatatactcaatttgtacatccaaaaactcttttaggggctttccaaaacagagcatcctttgtttctccacattttttcagcataaagtattcccagaggcattacaattataacctttccttcaaaataattcaattcttaraaatggttgccttctctaggctctctgggacaaataaagtatgccattctggtagaaggcagaatcagaagagtaagattctgaaaaccacatgcttttcttcttgggataaagtgggctctattctttttattattctcagttttcagatgcattaaatgatgacagatgataagtaacttgcctaaggtgcggcatggaggtgtaatatgtctaagttgtgctgctgc

SEQ ID NO: 309714 - DNA, 516 bp, Homo sapiens
ctagatttaaagaacaatggcattttttctctctcttatttctgaaacttgaatgttctccagaacaaattcatgaattgttttaatagtgttgacaagaaatgtaagctttatatgtaatcattgtaatcttaaattattccttcttcacattataacacaaaaacctatttcagatagatcaaagatctaactgtaaaatgtaaartaataatgccagaagataacacaggagacttttttccatgattctaggataagcaaatatttctctaaaggtcccacagactataaaggaaaagactataaagtccagactataaactggacttaattaaaattaggacgttctgttcatcagcagataggattaagaaactgaaaagacaaagcaaggagaggaataataaatgtatgatatactttatgtctaaaaaggacatataccaaaaacaaaaaaaaaaccttacaaattaataataagaaggtatacaacctagtttatctacctgagtt

SEQ ID NO: 309715 - DNA, 534 bp, Homo sapiens
ttcacttgaatgcaaaaagatttccagttcaaaagtttatttctaaaaataaatagagctcttcaccaacatcacacgcatcatgagttaccaatgtatgttatctcagaaaaatgaccagttcttyctaagtctttcattttattgaatatttcatttaaaaaccacaaaagaactctggtaacactatcacctacattcaagtctaacatccgagctagagaatgaacaaggtttattccctgacatttctctagtgagttgaacattgctaaggaagactgggcataaccattttaagtaacatgatgtcagccctagaaattattagtctgaaatttacttgtgttatttttctcatctgggcatatgcaacagcatggctaattgacattaaatttttattttgtttcaaatcttttaattggagagaataatgtagttttccttcagtggaggtggggggcggaaagcattgctggaaaggatttcaagatcagtcctttttgttgttgttttctgggggcatggaaa

SEQ ID NO: 309716 - DNA, 321 bp, Homo sapiens
cgttccttgttttgctctgaggctccataacccctgctgcactggcagtaagctgatttttctttggggtattactcattcctgcccaactctcagactggagaaggtggcaagggctaaaagtacccacaatgacatttttttaagtctctaataatgtatgctctgtctataactaagtcttaatcctgagttttcagttagttaagccaataatttygcatttaaagtcaatttgagttggtctttctgcttgctatttgcctctaaaagagattctgaactgatacatataatatttatttttggttattaactgtc

SEQ ID NO: 309717 - DNA, 533 bp, Homo sapiens
taactgtcactctcttgaacactctgtaatctgaggaacttttagaacctgaagttcaaataggtctacccattgaacattggaacccctccaaatacaatgccacagtaaacayataaaatacaggcaaaggcaagaatttggatccatatattgcccagtctattcaccacttattcaatctccttacctattgctttaggatttttttacccctgggctctttatacttttgctttctctatctgctttcagcctttgttttgaaaagatgctagcctttccctctgtggcctactgtccttagctcaactgtactctgtattcatagagtgtctggggtgtaaactcttgtctcctggttttgggagctaatccccagtctcttcattgcatcccaccctcaacaagaaacacccttacctagataagaggatttctgcattgagttttagagatgtcactcttcctgtggaaagacttaattattaacttagaaacattcaactgtataaagctaagggaatcttaga

SEQ ID NO: 309718 - DNA, 552 bp, Homo sapiens
ttttacctcttgctgcttacccaatccttccaatcagcatttaagtttctcaattgtctcctaccttaaaatcacacactcattaaacaaacaaaaatacaaaaattctctcccctcaattattatcccttgtctgttttctccctcctatagacaaatttcctgaaatacctactcaccatatccagttttattcttctcctcacttctcagcacactccttactgacttctgtttccaacrcacactgacaacatcttctcactggtcaccaatgatctctgtgttgctaaatgctattggtctatttttatctgattattctgagacatcttagactacatattgcacagtagctctcttctggagcatcacactcttgtggttttcccctgttctgacacttccttctaagtcatctctgctgactaacacacatccacgttgtcatcaacctagcttctgtttttataaaatggcagctattctacttaattgcaaggattgttataagaaataaatgagatactatataggaaattccctagaacc

SEQ ID NO: 309719 - DNA, 580 bp, Homo sapiens
attttgacttccatcacacagactggttttgccttttggaaatttttatataaatgtaatcatacaatatttatttttgtgtatactttctttcactcagtagtatgcctgtgaaatttatccatgttgttgagagtagcagattactcattttcattgccatgtaatattcccttgtatcaatattctaaaattgtattccctgtagtgttgatggatatttgaattctgtccaatttctcactatatcaaatggtgatgctgtcaacatttttgtacatgtcttcagtgtatatatgtacacrttttcaatatccaatgtaattgctatgccataggtatttgtatgctttgctttaggagatactgcaagataaatagtattttttttgtgtgtggacacctttccaaacaaattgtactagctggcactctcattggcagtgtttacccctcagcatttctggcttgtatatagtggtgttatattgtggttctcattcatatgtacctgatgactaaagatattgaacacttttacatgtgcttattagccatttggctactctccttgtgaatg

SEQ ID NO: 309720 - DNA, 600 bp, Homo sapiens
ctaacctgcttttgtctaaaccctccatacagagttaggtgcccccagactcagttctctgacttccatagcctcatttacatgcctctgcttgcagtgtttacatccttgtctctttctctagcctcacattcctttgtaggaagggactgtgccatggtaatctttgcattccccagttgtgtggctgacacatgccctaagctcagtttatgttagcyggaagagaaaacaaaatgggatgaatgaaaaaaaatgaaaagatgactagatttttaacaacaatttaaagtggacagaataaaaaggattgaattctgtcttgtcaaaatagttttatttgaaaattgtaaaaacattcttttttgcgaaagcttctcactaaaatattttacataattacatatcattgcaagtttgatgtgatatgtaaaatatttcacatatcctgaagtactctattgacaaatataaaattatgtaaaacataataaaaatataaagtcatgtaaaacaattttgtgtattttaaacataaattattttatgcaaaacaattttacataaaacacaattttatataaaacaaaattttgtgtt

SEQ ID NO: 309721 - DNA, 494 bp, Homo sapiens
atgcctttatttgtcaccagaaatgttattttacagctaattcttatgggatactacaagcaatacagggtatcatctaagagactgtgaagtacaaacaatggaattggaaagctaagtcttttcgatttaagtacaaaagaattcggaaagacttatttcagctccgtaatgttagagataaggaaatagaaaccaaacttgatataatcaaagatataaatttggaaataatttaaatgggaaagagaactcttccagggtgtttcatgtattttatggtttgagtcatttgaacaatgcatacttttgtmtctgtctgtataataaaagaagaagaaaattgatcacgaatgcccttgacttatataggtccagaacacacagcactaaagaaggggtattttcagcaccattgagcataattctatcattacttctgtcagcccttgactgctcagaactgggataggtaggattagagatattggagt

SEQ ID NO: 309722 - DNA, 466 bp, Homo sapiens
ctgatctagtaaatactgactgatgctctagagttcacaacacagtaataatgcaaggtcatgtaagatatacatgcttattttaaaaagcatattaaatcactcacatgtgcatagagataagaaaagaacacaccactgggatcagaaaagacccatgggcatttgacatggattgctttatactgaaacagttcaaatattgtctttggttggatttccttggattgtacttagttgttgacaaattttggtaaaacatttggactaaagcaaatgttaaaatcttgagaagattttaatgggccaaaagaaatgatctgacttttagaattcagtagttttaaaaattcaaaagtattggacctgaaacaacaattttcttctccatagaaatcccattcaattcagattatatgactagtgcaaygtaatcataggactttcctagtatttcatgtcagac

SEQ ID NO: 309723 - DNA, 477 bp, Homo sapiens
accacaagtggttgggagaatacagatatgttctctgtgagtgtgaggtaatccccacttttctttggatttttggatatgagaatggaatgagcaatagtgacacaccatctctggaaacgacctggcaatgtttgaattttccaggcctgctttattaccaattacacttctaatcctrtgaagtttattgtatgtatttagttttcatacaaagaaatatggacacaatcatagtcattgactccaagaagtcagtggtaggaatctttctcttaaatcctcattcagttcagttgcattagagatctttttggaaatgtgaaacagcatttcttttaaacttacatacttctcttctttggagcaggtaggtggtccagtggtgtttacttggctggggtgtagggatagagtgacattgaccttttgaatatgagcacaagctgaaaatataaacggacgtgtccttaataa

SEQ ID NO: 309724 - DNA, 477 bp, Homo sapiens
accacaagtggttgggagaatacagatatgttctctgtgagtgtgaggtaatccccacttttctttggatttttggatatgagaatggaatgagcaatagtgacacaccatctctggaaacgacctggcaatgtttgaattttccaggcctgctttattaccaattacacttctaatcctatgaagtttattgtatgtatttagttttcatacaaagaaatatggacacratcatagtcattgactccaagaagtcagtggtaggaatctttctcttaaatcctcattcagttcagttgcattagagatctttttggaaatgtgaaacagcatttcttttaaacttacatacttctcttctttggagcaggtaggtggtccagtggtgtttacttggctggggtgtagggatagagtgacattgaccttttgaatatgagcacaagctgaaaatataaacggacgtgtccttaataa

SEQ ID NO: 309725 - DNA, 615 bp, Homo sapiens
tttcttaggacatggaatggggtgggagtgggggtgtgaaaagcctccaaggattatgtgttgcttgccattttttttgtttttttcctggycttggctcatagagcaagttgatggtaaatattgggcaatttatttaaccacactattcctcaatttccttattagcaatgctgtcttgtttataaggagttttgaaatttctgcaagcacataaaacactggtgcaaatagccaatgtaggtatcatgttgctaatccacttgatgcctctccaatagtggagaccacctgcatcagactcacttggcatatttattaaaatgcatattcccccaggcccaccccaaaccttctgaattacaatcacaaggggtgcaaccaaaaatctccattgtaaaacaagctcctggagtgattttgatacactctaaagtatccttttgagtatttgccttcttctattaagcctgagattgagctagatggtatgatcacctaaaaatcccctggtatttttcagggttttctggattgactcaatctcagccattttccccagagctactgcatattgtgattgaattattcatttaaaaaatatctgaagcttta

SEQ ID NO: 309726 - DNA, 615 bp, Homo sapiens
tttcttaggacatggaatggggtgggagtgggggtgtgaaaagcctccaaggattatgtgttgcttgccattttttttgtttttttcctggccttggctcatagagcaagttgatggtaaatattgggcaatttatttaaccacactattcctcaatttccttattagcaatgctgtcttgtttataaggagttttgaaatttctgcaagcacataaaacactggtgcaaatagccaatgtaggtatcatgttgctaatccacttgatgcctctccaatagtggagaccacctgcatcagactcacttggcatatttattaaaatgcatattcccccaggcccaccccaaaccttctgaattamaatcacaaggggtgcaaccaaaaatctccattgtaaaacaagctcctggagtgattttgatacactctaaagtatccttttgagtatttgccttcttctattaagcctgagattgagctagatggtatgatcacctaaaaatcccctggtatttttcagggttttctggattgactcaatctcagccattttccccagagctactgcatattgtgattgaattattcatttaaaaaatatctgaagcttta

SEQ ID NO: 309727 - DNA, 366 bp, Homo sapiens
gtgttctctaaggtcccagagttagctggtggcagaggtgggactagaagctaggtcttttaactcctacccctgccctctttccaatatgcaaatatcctgcctgatatgtattacagatgatggtgacagaaatcacaatggcagcgatcactgactggatgcttactcatggccagagacagtattaagtatttttcatgaatgatttcacatcatcctcagaatttcaaatccaccagrtagatgaggaaacagaggctcagaaggatcatgcaacttcaccaagaccctgctgcaggtaagtaacagaggtgggactcagcctaggtctctctgaagctaaagctccaggtctatatcaaa

SEQ ID NO: 309728 - DNA, 583 bp, Homo sapiens
ccagtctctctctttccttgagacttttgcatccctcaggttcgtttatgaagtgtctaggggttctgctgggaaggggtcaatgagaatgagctattcccatctctccagagccaggtctagggtacgacaaatgaagctgtcacatcaggggaacaatttaaggagcctccaaaaaactcaattgttaaaataaaggtcttaatgcagttttttttaactcacaattaatgcaaaaaattcataatgaataaaatatgaacatttaaaataaggacaggatcagtaacattgccttgtagagtcatagtrgggcctgagcgaagaggaaaaatcagcaatactgatcttgttttatttaaaattttgatattttgttgtagcatacatttagtacaaattaaaggaatttctctctctgcgggctttggcaaatgttttatgaatttctagagttttgttaattagatgagccattcaaggagtcatcatcctgagtgaagccagattgtgttgatggtattttagacttcctcacagctacagtatgctaccagtcatcttagtgcaccatatcagtgaa

SEQ ID NO: 309729 - DNA, 583 bp, Homo sapiens
ccagtctctctctttccttgagacttttgcatccctcaggttcgtttatgaagtgtctaggggttctgctgggaaggggtcaatgagaatgagctattcccatctctccagagccaggtctagggtacgacaaatgaagctgtcacatcaggggaacaatttaaggagcctccaaaaaactcaattgttaaaataaaggtcttaatgcagttttttttaactcacaattaatgcaaaaaattcataatgaataaaatatgaacatttaaaataaggacaggatcagtaacattgccttgtagagtcatagtagggcctgagsgaagaggaaaaatcagcaatactgatcttgttttatttaaaattttgatattttgttgtagcatacatttagtacaaattaaaggaatttctctctctgcgggctttggcaaatgttttatgaatttctagagttttgttaattagatgagccattcaaggagtcatcatcctgagtgaagccagattgtgttgatggtattttagacttcctcacagctacagtatgctaccagtcatcttagtgcaccatatcagtgaa

SEQ ID NO: 309730 - DNA, 583 bp, Homo sapiens
ccagtctctctctttccttgagacttttgcatccctcaggttcgtttatgaagtgtctaggggttctgctgggaaggggtcaatgagaatgagctattcccatctctccagagccaggtctagggtacgacaaatgaagctgtcacatcaggggaacaatttaaggagcctccaaaaaactcaattgttaaaataaaggtcttaatgcagttttttttaactcacaattaatgcaaaaaattcataatgaataaaatatgaacatttaaaataaggacaggatcagtaacattgccttgtagagtcatagtagggcctgagcsaagaggaaaaatcagcaatactgatcttgttttatttaaaattttgatattttgttgtagcatacatttagtacaaattaaaggaatttctctctctgcgggctttggcaaatgttttatgaatttctagagttttgttaattagatgagccattcaaggagtcatcatcctgagtgaagccagattgtgttgatggtattttagacttcctcacagctacagtatgctaccagtcatcttagtgcaccatatcagtgaa

SEQ ID NO: 309731 - DNA, 630 bp, Homo sapiens
ctatttatgacaaactttgtccctacacatgtggctgattaatttcatatctctgggtccataagaatcgtatgaccataatggacttaaattcccataaccttttaactgctcggctgtatctgtcaagtcagacagtgccctgtgactgtaataatgagtatgaatgatcagtgctsgtcttcctttcttgacattataccattaggcaagtcaaagcatttctctaggactgcctgagggcagttctgaaaacgtttatttgtgaatgtgccactgaactgtatctagaggaaccaggatgtgcagagtcggcaatccagagttttgtggttttgagcattgctgcttctggttgtctccgaacacatgcccttctttaacttcaccagaatattgggtggtttcatgagaatgttttctgtgggaattcagtcttgagactttgttcattgtcctcaaatgatctagtagagttgatcttctggggtgattccgtgcagaggaggaagtggttacacatactgtgagagtctgagagacagcagtagctggagactttttcctgagtttgtcgctgtatagtttaggttctcattttacagttgtgagttttcatgttaagagatt

SEQ ID NO: 309732 - DNA, 492 bp, Homo sapiens
agctgagttcaggataagtaagaggctattgtggtaaagttccctctgctagagggaactttggggggtaaatggcatttactgagtactttacgtgttccatttgccttgaatgttgatatactttactccttacttctttcaggtatctgctcacctatggccttatctgtgacatcctccccaaccaccctctatgaaataacattctccattcctgtctttcactagacctcatttgttgcgttatttttcatcatagcattaatcagctcttggcmtacaaagaatagtatgtttatttatttgtctattgcctgtctctgagacatgaatgctgcattcatgagaatgacagttctacaaagtagttggcttacctgttttgcttaggcgctcaacaaatatttgttgaacaaacactccaagggttgttaaatactttaaatatgtcattttaattttccctacccttcaagtcacatattccca

SEQ ID NO: 309733 - DNA, 569 bp, Homo sapiens
gatagatgtgctctattcagcatctgtattagacccagcagcacctttcctctctgtgcaggtcactctctttctaccctagggacaagctactgaagcagtgtagtttgagctttgatggccaccatgtggcatgatcatggtgcactgcggcctcaaactcmtgggctcaagtgaagctcctgcctcggcctcctgagtagctgggactataggcaagcatgatcatgcctggctggtttttttgtgtttttattttttgtagagacaggggtctaactatgttgccagggctggccttgaactcctggcctcaagcaatcctcccaccttggcctcccaaagtgctgggattataggtgcgagccactgtgtctggctttgattcttttttctttctctttatcattattattgttgttcttgttattttagcaccttttcatcatattttcagggatttacttgtttgctttcttcttttttcattcttatttctcccatctcaagaagggaacagatcttggacttagtactaagtttgatcagtggtgatggtgatctaccaa

SEQ ID NO: 309734 - DNA, 573 bp, Homo sapiens
ggaaaaatttagaaaaaaagtcttttgttggagaaacaaaaggtgtaataaagacaacttgagtagcctaactcatgttaatctaccccaaacaatattgataactgtttatcaagtgctgatatactgctgaaacacgtctttctaaagacttgttaattaagtggacatttttgtgatttcctggtaccaagggtatcccaatttacatatgwttaaaacttatttacttcgattgttggtgggagttcaacaattttggaaaggaaaaaggttctttctgtcgccttctgtcatggtgaacaatagcatcacaatactaaactcaactagtgttgatgacggttgtgttcaatttcacagtaaatttgatctgtttctcatggggcaagactttaattctgctgattattcgatatgggaaagcactctgtcactataatatctgctatgtgatccatgtataacagaatgacttctaaattgatttagaattattcattataaacatccactatcttgttaaactggatggattaattttactcataaaagtgatgtagcgtttatgct

SEQ ID NO: 309735 - DNA, 573 bp, Homo sapiens
ggaaaaatttagaaaaaaagtcttttgttggagaaacaaaaggtgtaataaagacaacttgagtagcctaactcatgttaatctaccccaaacaatattgataactgtttatcaagtgctgatatactgctgaaacacgtctttctaaagacttgttaattaagtggacatttttgtgatttcctggtaccaagggtatcccaatttacatatgattaaaacttatttacttcgattgttggtgggagttcaacaattttggaaaggaaaaaggttctttctgtcgccttctgtcatggtgaacaatagcatcacaatactaaactcaactagtgttratgacggttgtgttcaatttcacagtaaatttgatctgtttctcatggggcaagactttaattctgctgattattcgatatgggaaagcactctgtcactataatatctgctatgtgatccatgtataacagaatgacttctaaattgatttagaattattcattataaacatccactatcttgttaaactggatggattaattttactcataaaagtgatgtagcgtttatgct

SEQ ID NO: 309736 - DNA, 543 bp, Homo sapiens
agcctgtttacctaaaaattgtctccaatacatactctcactaacagttaccacattctcaggaagattacatactataattcacagaaaaattttccaatctagaagataagaatattcatgattgtatttattctcatttatttggttgtgaaatagatgaacgcatttgcatgtgtttgcttgatacatttgcttttcataaattttctgttccaatcatctgcctatttttctattggcgttgtgtattctttttctagtcaatttacgacagttgtttgcattttggagaaataaacattgatatatatcatccagttattctttctttttyttttttttttttaagacggagtcttcctctgttgcccaggctggagtgcagtggtgcaatcttggctcactgcaacctccatctcccaggttcgagcaattctcctgcctcagcctcctgagtagctaggactacaggcatgcaccaccatgcccagctaatttttctattttcagtagagacggggtttcagcatattggccagg

SEQ ID NO: 309737 - DNA, 612 bp, Homo sapiens
atttttctcttacagttattttgaaatatcttataagttattgttaactatagtttcccgactgaactatcaaatatcagaacttatttcttttatctaactgtacagataaaagtatgcccatgtataaccatggctgtatgagtatctagtgtgttgcctctagctctaatgaggtattctttagtgtgtaacctccattctttatttatctattccccagtggcggctgactacatggtctctaaccccttgttagtacaaataacatgatgaagaacattgctatatgtgttccgtcatagcctgtgtgaggatttttccgagacatgctttgtagtgggttgtgggaatatagcaggtatgtgaacttaattggattaagacctgccacagattgcttttcaggatgactgcacaactctacactctgtgctggaggtttcccatttcctatgactccttccaacatttggcattrtccagctttctaaattttgctaatctcatgagtgtaaagtgatatgctattgttgttttaattagcatgtctttaattcctaatgggtttgagcatatttcatgtttgttagtctttggagtttcctacac

SEQ ID NO: 309738 - DNA, 624 bp, Homo sapiens
ctatatttaagaatgcctagaaatttcagcattaagggacagatcagtatctgttcttacttttcaattgtttgttttttggggaaaatgtgctaagtattacctgtgtgatgggtatacaaagttacataaatattacaygaagctgacatcatcatagacattgaaaaatatgtcaagtgatatctaacataattatgatatattagttgcataccgaggaagtaaataaaagtaggcaaggactttttaatggacatgttagcttgtaccatgtaaatgtgaatcttcggctatctcctgtcccattgtgtatgttaacaggattagctagtattagcccccatccacaagaagtgtgatatgcagtatgacccgtaaacctctcctgggattcaaaagggctaagttgaaccatgcatgatttcaaagtaattctcagcacaattatctgcttgacctgcaagatgaacaagcatatcatttaattaattgccaagctcttgtgaacagtgctgttcatttttctagtaattgcatgatgatctgcccttgctgattcttatgggaatgaccaaaattgcacattaactggtttgacggccactgtccacattgtcatca

SEQ ID NO: 309739 - DNA, 581 bp, Homo sapiens
agatacaatctcacacccgtcagaatggctattattaaaaagtcaaaaaaataacagatgctggcaaggttgtagagaaaaaggaatgcttatacactgttggtgggaatgtaaattagttcaacaattgtagaagacaatgtggcgattcctcaaagacctraagacagaaatgccatttgacccagcaatcccattactgggtatatacccaaaagggtataaattattctattataaagacacatgcccaggtatgttccttgcagcactattcactatagcaaatacatgaactcagcctatattgcccatcaatgggtagactggataaagaaaatgcagtacatatacatcatggaatactacatggccataaaaaagaacaagatcacatcctttgcagggacatggatggaactgggggccattattcttagcaaactaatgcagaaacagaaaaccaaattctgcatattctcacttataagtgggagctaaatgatgagaagacatggacacatacacacaggggcctattggagggtagagaatgagaggggcaagaggatcagggaaaa

SEQ ID NO: 309740 - DNA, 568 bp, Homo sapiens
ataaatgcacatttgaactaagttcaaaccttcattcttacccatttttgaaactcaggtagaactttagggtcagacctaccttaaggaaatacagaaagtactctaattatattgagaataaagggaaagataaatgagaaattagaagacatgagaaaaatattatttgtcttcttgaataatgtttcaaatttataaaattatacacagtagtctaaacacattattgaatattgaaataacatcatcaagaaagtttttattttttaaaaaaggaaaataagtggttgcatttgggkagtgatattggagaacaggtagaattaaggcaaagtattttcataatcatcattataatagtaaggggcgctgtgtagatcccctctccaaaacatatacccaagttactgggagtgttgctaagaatagctctcagctgagttccacttcaacttttgacttgggctcaaaaatgtcagaatgtcatccaaagtcacacttatctgggaatagctcacatcaaatgaatggtcaatgttggatcttttactcttattcaagaaaa

SEQ ID NO: 309741 - DNA, 597 bp, Homo sapiens
gttttaattactagaaacagactagagaaaatacttctttccaaggaagacaatgatttgaatatctatgttcctatatgtttagattgccatacattcatttattattcatacatccagcacctcatttatcaagtaaatgtattaactattcttagtatttatattcaaaagaaaaaaataaattcttttccttttttgacttattttttcatctgtaaaaccaggataagtcacctatctcaaagggacgtggtgaaattaartaagttaaaacattgcctggcacataaccagttctcatgagctgttagctattgtggactattaaattttgatatatgttttgcctataatattgggttattaaactcatcttacataatagatagtaataaccaatatttgtgtaaatatagataacaatatttatgtaataaatatgtaataacaatatttatataaatataaataatttatgtaaatataaaaataaacaatatttatatatgtattttccctgaaaatgtagtatgatggtgttatggggttatttaaaagttaagatttagagtaatgatgcaaattccatgtaaa

SEQ ID NO: 309742 - DNA, 551 bp, Homo sapiens
gatatgagaaagaaaatttcttaaaatgaattagaagtagatttaaaggtacattcttgcttaatgatgctttttttccacaggtttcaggcaatacattttttaaaaacactgaaaacattcattcacttcttgattcttagtggattaatgtgctagtcttttatctctgaaatgtagttttgaactgactygacataaagccaatttgattatataatacaaaaaaatgcaagtgcaaataaatttagttttccatacacaaaacaccacatatcacacaatcatttcaaatcagtaatgagttcagactttcttattttgttttcaatgaacacatgaattatattacttgaaacaaagcacacttccacctttcattgaaaaacccagcattctaattctattttctgaatcagaacaacagtttttgaagttaaaaattcataaagaatgtagattttgactcagataatgcctataatttacaaatgcaaagcttgtctctaaaagtaaatcagtaatttagaaataatctacttgaaagtttg

SEQ ID NO: 309743 - DNA, 551 bp, Homo sapiens
gatatgagaaagaaaatttcttaaaatgaattagaagtagatttaaaggtacattcttgcttaatgatgctttttttccacaggtttcaggcaatacattttttaaaaacactgaaaacattcattcacttcttgattcttagtggattaatgtgctagtcttttatctctgaaatgtagttttgaactgacttgacataaagccaatttgattatataatacaaaaaaatgcaagtgcaaataaatttagttttccatacacaaaacaccacayatcacacaatcatttcaaatcagtaatgagttcagactttcttattttgttttcaatgaacacatgaattatattacttgaaacaaagcacacttccacctttcattgaaaaacccagcattctaattctattttctgaatcagaacaacagtttttgaagttaaaaattcataaagaatgtagattttgactcagataatgcctataatttacaaatgcaaagcttgtctctaaaagtaaatcagtaatttagaaataatctacttgaaagtttg

SEQ ID NO: 309744 - DNA, 551 bp, Homo sapiens
gatatgagaaagaaaatttcttaaaatgaattagaagtagatttaaaggtacattcttgcttaatgatgctttttttccacaggtttcaggcaatacattttttaaaaacactgaaaacattcattcacttcttgattcttagtggattaatgtgctagtcttttatctctgaaatgtagttttgaactgacttgacataaagccaatttgattatataatacaaaaaaatgcaagtgcaaataaatttagttttccatacacaaaacaccacatatcacacaatcatttcaaatcagtaatgagttcagactttcttattttgttttcaatgaacacatgaattataytacttgaaacaaagcacacttccacctttcattgaaaaacccagcattctaattctattttctgaatcagaacaacagtttttgaagttaaaaattcataaagaatgtagattttgactcagataatgcctataatttacaaatgcaaagcttgtctctaaaagtaaatcagtaatttagaaataatctacttgaaagtttg

SEQ ID NO: 309745 - DNA, 627 bp, Homo sapiens
ttggctcttttaatattttctggtcttacccaatcaccagtgatgtcaaggggaaaaaataaaagtaaaagtatcggcaggatgcagtgaacagagtaaacatatgacttttaaataccccaaatgagaaagcttaggctgcacattattgaaaggatattctactgatcgttaatgctcttctgtttgctcacatttgttccctcaatcgggcctctttttaaaaagacaataatcctatcaacagaaacttgaaatgtaggtctttccgggctttgaaaacagagctctgctctcatttaagactatgtatagatttccagtgcagcagacagcaacatgctgtcaactgaactagtacaataaattctgagaattttatagggagtcaccacacaacctaaagcttgtgctttagagaagcaagaaagcactactcaatgacagaaattccatctgggtgaaaaggctcctatttctcttggtcagtgtggacaatggagttggttcagggccaggacttayggtaggtgggtcagcttgggtttttccttcaaaatgaccaagattggggaagagctgtattaatggtaaaaggattttgtgctcaagttgttgcattaagga

SEQ ID NO: 309746 - DNA, 514 bp, Homo sapiens
tccacattaattatcatcatatgtaagaatgataattgggattagaaatgtatcctaaaatcagagaaaggtagggaataatttctgctttttattacttactgaccgatttctacttttctgatmcaaaaaaaaaaaaaaaaaaaaaaagcaaaaccacatccttggcgtaaaatacaaggtaaatatatctaggctttcttgaaatagaccagaatgcagtagaggggagcatggactctgaatcctgactgccattgttctacctctggctctgcactgactagctggtgatttttgagcctcagctttccctcctttaacatgagaataataatgactatttcatgaggtcattttgaccattaaataagataatatatgtaaattgttttagatggtgattggaaaagtatgtcctgaattcgttgttataatcacgtcatccacacattcaaagactcacaaacttttgtatccaaccaagactctcatctgaacttcacatttcaat

SEQ ID NO: 309747 - DNA, 671 bp, Homo sapiens
aaacacacaaaaatgcctgctccccattctttctcactgatgtggcttaaaagtttgacctaaacaacgtgtgcgtgtaataagttcacgggccggaaaggtaaagtggacgctttttctgccttatcacttgcagcatctattttaagggtaaaatgacaacagccatcactagagaggcaaggatgaataaagcaagaatgagtatcttttctcttttgtctgcacagatcttaactttttttttttttttcgttttagccacatcaggttattataattacgcgacacttaygggaaggaggagggaaagcagggagattagggggggaaatatgccgcatgaaaaaaccaagtggactcatgttagtctttgtattccttttttaagaatttccaaatcatccctgaatagctgtgtctaagacaaaatatgttgacctagctagtggagacacaaaattaatgacctctgtgatgtttctagaggggcagtacctgcatgtactcactggctcagccataagtgacacactgttccccaagtaaacatctgcgcttcttcactgctcagaacaagaaatccttcctctgtagataatgttaaaggtgattctcttgaaagcccgcagaacatcagaacttgaatgacctatggctctacattattc

SEQ ID NO: 309748 - DNA, 671 bp, Homo sapiens
aaacacacaaaaatgcctgctccccattctttctcactgatgtggcttaaaagtttgacctaaacaacgtgtgcgtgtaataagttcacgggccggaaaggtaaagtggacgctttttctgccttatcacttgcagcatctattttaagggtaaaatgacaacagccatcactagagaggcaaggatgaataaagcaagaatgagtatcttttctcttttgtctgcacagatcttaactttttttttttttttcgttttagccacatcaggttattataattacgcgacacttacgggaaggaggagggaaagcagggagattagggggggaaatatgccgcatgaaaaaaccaagtggactcatgttagtctttgtattccttttttaagaatttccaaatcatccctgaatagctgtgtctaagacaaaatatgttgacctagctagtggagacacaaaattaatgacctctgtgatgtttctagaggggcagtacctgcatgtactcactggctcagccataagtgacacactgttccccragtaaacatctgcgcttcttcactgctcagaacaagaaatccttcctctgtagataatgttaaaggtgattctcttgaaagcccgcagaacatcagaacttgaatgacctatggctctacattattc

SEQ ID NO: 309749 - DNA, 531 bp, Homo sapiens
ctacaacatgagagagtctgtaggtcagcggagccctaaaagacgttaagtttttaaaaaatcagtaaaactaaggatgggtacttgggtgacaagatcataaagtaaggcaggraaaggattattgaaaaagccaaaatcgaggttatttttgtgtggatggagaggtttgtgactttgatgggacacacattggggggcttctcagacggctggctacatgctatttcttgatctaggttacatggatgttcttgtaatttttcactaagttatacatttgtttgttttcattttctttatatgcattttattttacaaacaataggtttaaaatgctactctggtacttttagtcgaattactgaaaaacaaataaataatcactttgtaatgagaacactgtcattgccaccatattaaaaaatacaaatgtgactgataacaaaactgccagagtaatttttttagatatttaaaaaaatgcttcttagggaaaacgattctatagagtctgattttatcagtgaa

SEQ ID NO: 309750 - DNA, 633 bp, Homo sapiens
ttatgttacatggtttctgagggttgggaacctgaaagtggtttagttgactgattctaatcagggtaactcacaagggtacagtcaagctgttggctgacattgaaggctgactgtggctaattcccttctaacttcacttgcatggctgctggcaggccttgattcctcctcactggctgttggccacaggttttgtttccttacctagtcggactctccctaagccagctgccccagagtgagtgatccaagaggaaaagagagcatgtgtgaatgagaaagcacccaagattgaagacacagtcttttataagctaatttagaaagccctatgttattggccacatgaacaatccctgatacattatgggaggggattatagaaagacataaatawcgccaccatatggggatctttggaggtaatcttggagactggctaaccaaagtgcctttgctgaacacatagattaaggcccagattcctctccccaaaccctccatctacccagttcaataaacttctcatgcaatgaatgatatggatgttgctatggatattgcagaaacatagggtttttacccgtgttcctcctaaccatgggcatggttaggttactgtttttcaaa

SEQ ID NO: 309751 - DNA, 466 bp, Homo sapiens
gacaaaggggaggattggatgagcgcatctctccatattcagttgattgaaaaaatcamctgtacgtctgcccttctggcaggacctctgcagaagtgaggagctttgcagtgattctagaaggaaggaagctcatggatacaagcttgtgattagcaagaagttatacatggctgattggagagaaatgcgattagagatttttaaaacccaaacgtcaaatgttgaagaaagtgctcaagggttgcagacagagctgggaatggggttggacatgcctgtggtccattgctggtcacatttgctcagaatgtccctgcaagcagaaaatgcaggacctcagcaagaaggttcagaaagtaccctgttcccctaacaaactccaggtgcatctgcatctggcttctgcacacacttctgaatggccaacttggaaaaactcagaggaaaggaaccaggtaggtga

SEQ ID NO: 309752 - DNA, 466 bp, Homo sapiens
gacaaaggggaggattggatgagcgcatctctccatattcagttgattgaaaaaatcaactgtacgtctgcccttctggcaggacctctgcagaagtgaggagctttgcagtgattctagaaggaaggaagctcatggatacaagcttgtgattagcaagaagttayacatggctgattggagagaaatgcgattagagatttttaaaacccaaacgtcaaatgttgaagaaagtgctcaagggttgcagacagagctgggaatggggttggacatgcctgtggtccattgctggtcacatttgctcagaatgtccctgcaagcagaaaatgcaggacctcagcaagaaggttcagaaagtaccctgttcccctaacaaactccaggtgcatctgcatctggcttctgcacacacttctgaatggccaacttggaaaaactcagaggaaaggaaccaggtaggtga

SEQ ID NO: 309753 - DNA, 466 bp, Homo sapiens
gacaaaggggaggattggatgagcgcatctctccatattcagttgattgaaaaaatcaactgtacgtctgcccttctggcaggacctctgcagaagtgaggagctttgcagtgattctagaaggaaggaagctcatggatacaagcttgtgattagcaagaagttatacatggctgattggagagaaatgcgattagagatttttaaaacccaaacgtcaaatgttgaagaaagtgctcaagggttgcagacagagctgggaatggggttggacatgcctgtggtccattgctggycacatttgctcagaatgtccctgcaagcagaaaatgcaggacctcagcaagaaggttcagaaagtaccctgttcccctaacaaactccaggtgcatctgcatctggcttctgcacacacttctgaatggccaacttggaaaaactcagaggaaaggaaccaggtaggtga

SEQ ID NO: 309754 - DNA, 466 bp, Homo sapiens
gacaaaggggaggattggatgagcgcatctctccatattcagttgattgaaaaaatcaactgtacgtctgcccttctggcaggacctctgcagaagtgaggagctttgcagtgattctagaaggaaggaagctcatggatacaagcttgtgattagcaagaagttatacatggctgattggagagaaatgcgattagagatttttaaaacccaaacgtcaaatgttgaagaaagtgctcaagggttgcagacagagctgggaatggggttggacatgcctgtggtccattgctggtcacatttgctcagaatgtccctgcaagcagaaaatgcaggacctcagcaagaaggttcagaaagtaccctgttcccctaacaaactccaggtgcatctgcatctggcttctgcacacacktctgaatggccaacttggaaaaactcagaggaaaggaaccaggtaggtga

SEQ ID NO: 309755 - DNA, 532 bp, Homo sapiens
ctcccaccttgacctcccaaattgctgggattacaggcatgagccactgtgcctggccccagctaactttttctgtttctgagaattctctcccactggatcctgtttgctgtttctttcctagcatacccttctttgaaaacaaaagacaacatagcttagtggtttggagstttgggctggacttccagggtttaaaagctctgacacttgcaagctatgtgacgttattcaagttactttacttctttgtgcttcaattacctcatctgtaaaatgataatatccatttaacctacctcatagagttgctataaagattaaataacgatttaagtaccttgctacatatatcagtgctttctattaaacaagcagacaaaacaatccaaaacaaagcaagcacctgcctcctctccctctcatccccatcagatgccctccacatgccctggaaaggaacctgggcttacttttccacgccagcccagtccttgtcctgggcccacatggtgaacttcaccaagaacaa

SEQ ID NO: 309756 - DNA, 527 bp, Homo sapiens
aagtaaagtgagaatgtcatgaaattcaggcaacagcttatagctcaaggaagcggctagaacatggagacagcggagttgagggtgggacacaggtgggcctgaaaagatagatgtggagagattgggatgagctgtgaatatcattaagaacatgtttgacgtcaatttcttaaattgcaaaagcatcaaagccttctgaacaggagataggtattttattgacattttggaggaatggggtggcagacactaaaggctgggaaaccaattatgagtttactgaattgtccaaatgagagataagagatggaactagaatrgcatcaatgggcctggggaagacagcgtgaatttcagagaaaagagtactctttgactcaacaatctgcctcccacaaataaaaaggcctgtgctaaagtctgttaagctaagctattagatcgtgagaacttcagcaactaaaattaatcttatactaggtcacaaagaaaataccactatattttcccactgtgtaaagcaa

SEQ ID NO: 309757 - DNA, 527 bp, Homo sapiens
aagtaaagtgagaatgtcatgaaattcaggcaacagcttatagctcaaggaagcggctagaacatggagacagcggagttgagggtgggacacaggtgggcctgaaaagatagatgtggagagattgggatgagctgtgaatatcattaagaacatgtttgacgtcaatttcttaaattgcaaaagcatcaaagccttctgaacaggagataggtattttattgacattttggaggaatggggtggcagacactaaaggctgggaaaccaattatgagtttactgaattgtccaaatgagagataagagatggaactagaatggcatcaatgggcctggggaagacagcrtgaatttcagagaaaagagtactctttgactcaacaatctgcctcccacaaataaaaaggcctgtgctaaagtctgttaagctaagctattagatcgtgagaacttcagcaactaaaattaatcttatactaggtcacaaagaaaataccactatattttcccactgtgtaaagcaa

SEQ ID NO: 309758 - DNA, 527 bp, Homo sapiens
aagtaaagtgagaatgtcatgaaattcaggcaacagcttatagctcaaggaagcggctagaacatggagacagcggagttgagggtgggacacaggtgggcctgaaaagatagatgtggagagattgggatgagctgtgaatatcattaagaacatgtttgacgtcaatttcttaaattgcaaaagcatcaaagccttctgaacaggagataggtattttattgacattttggaggaatggggtggcagacactaaaggctgggaaaccaattatgagtttactgaattgtccaaatgagagataagagatggaactagaatggcatcaatgggcctggggaagacagcgtgaatttcagagaaaagagtactctttgactcaasaatctgcctcccacaaataaaaaggcctgtgctaaagtctgttaagctaagctattagatcgtgagaacttcagcaactaaaattaatcttatactaggtcacaaagaaaataccactatattttcccactgtgtaaagcaa

SEQ ID NO: 309759 - DNA, 545 bp, Homo sapiens
gtaaagaaagaaaggtctaaagcttcccaagaattcacattctagttcttcacattccagaaggacatcctttttggagcagtgattttcaaattgtggctaagacctactggtgagcagatctaaatcaatgttgtgggtcatgcccagcatttaaaaaattggacagaatagaacaaaaaagaaaatatcagtatactttgcatgtagtagtataattatcaatttgcagtaattctactttggttgtatgtttatgtatatastggggtgtaagcatatataacatcaaatatattagtatggttcatggtcaaagaagtttgaagaacattttgctaaaggaaaaaaaaatcctcattttttaattggaactgggcctggcaaagggcttagcaccaggaactaggacactgcagcctctcccttcaagtctctcccagttgcccagtctgggggttcaacctgctggcccagcccctcaatgcttccagagggccatgtctttgtcaccctctcaagggctgacactcatacctagagat

SEQ ID NO: 309760 - DNA, 477 bp, Homo sapiens
gggtccagggaaaatatgatcaacaggtcccaggacccattattccactggttctaggctcctggaaagggagagtttcaaagcaaactcagcttcctcttttccctcctcaggctcaatcccttgtgaaggctctttccatgtgtgtgcctccctgggcaaagtccagcacacaggcttctccctgggagtccactgatgtcagctgtggtcactaggcatcagggcttctaggaggcagctagacgcttacagaagcagaggytacaggggccctgctaagaggaggaaccattccctttaatttttccaaacccagaatccaccattgagcaggcaagagctcaggaaggagactccccggtgaagaggcacgaggacgcctttagcatgagctgttcttcctccttggagttttcccactgagattcctggggccaacaccaaaccctgcccccaaagtccctatttcatttt

SEQ ID NO: 309761 - DNA, 477 bp, Homo sapiens
gggtccagggaaaatatgatcaacaggtcccaggacccattattccactggttctaggctcctggaaagggagagtttcaaagcaaactcagcttcctcttttccctcctcaggctcaatcccttgtgaaggctctttccatgtgtgtgcctccctgggcaaagtccagcacacaggcttctccctgggagtccactgatgtcagctgtggtcactaggcatcagggcttctaggaggcagctagacgcttacagaagcagaggttacaggggccctgctaagaggaggaaccattccctttaatttttccaaacccagaatccaccattgagcaggcaagagctcaggaaggagactccccggtgaaraggcacgaggacgcctttagcatgagctgttcttcctccttggagttttcccactgagattcctggggccaacaccaaaccctgcccccaaagtccctatttcatttt

SEQ ID NO: 309762 - DNA, 541 bp, Homo sapiens
ctcttgtccccccgaggggctgtccccttggctcttacagatgcctgtgctggtgcttcttgtcccaagtttggcctccccaacccgtcggtaaggttctagactagggacaggggtctgctattttgaatcccagccagcacccccactgtgactacagtctccttcctcaccctcactggtggctggccatttgggcccaaatccagctgctgcaacccaccctcccaatgacctcccagctttggggaccatggatggggaggtgacatgcctctcaggcctggcatcagaaacactsgttccagtcccagccctgcacggcctaacttatgatcttagtaaatggcttccccttctcaagcctcaattatttgtaaaatggtggggggatggtgagggtaataataacacctcatcgccaggtgggggaagttactgtggatggaattgggggctgcacatggcaagtctgggctatgataggcacaaataagagatgacagaagtgaaggttgccgtcactcggcaggaggggagc

SEQ ID NO: 309763 - DNA, 501 bp, Homo sapiens
ttttgtctctgtcttctttttgcccttttccttaataacgctttaataaactgtattagtagatgcttaattgtacctgactataaatataatcatttactttatgtattatatcaaaaccaaaaaaccctgttagagctctccgggagggttagatgtagtattgcaggtcctttattagttcagtaaatatttgagtgcatacaaacaaagtggaccttctctcatgagacataattaccaccaagggcagtgattttcacactttgttgctattatgtagaggtttttcccatgtctaaaggtttattgtgtttggagaagcacattcctctggggaaaatggttacaaccaagagtctatagaaaaggcctgtagtgttatagactgtgattagatcctaaagtmgttgttactcttgtccctccaaatcatggcaaagaccaaggataatggcttccatttattgcgtgcttattgtgagtaggtaagcacaatta

SEQ ID NO: 309764 - DNA, 424 bp, Homo sapiens
gatggaattgtaaaagaagaaaaagaaataggctcacactcagaaagagccctagttctgcctaatcaatgtttttatttctcctcatcaaaaataatttctattatatctcctgagcacggaaacattggtaagaactattaacttaggtcagtaaagtgggataggtaaattatttggaatcaaartcttagtggagttttcatctaataagaacagaatacactaatggccatttcatggggctactgcaagcagaaacattgtgtgtgatatgtctccaaatgtgatcatttcaaatatcatttgagaacccatgaaaatctttagtaaatttaataatcctagaatcttcctttttttctagtctctatgaaattgctctcaaaagttaacaaatttcagtaatatagcaatcagatga

SEQ ID NO: 309765 - DNA, 481 bp, Homo sapiens
cctggggctgctgctgtggcttcctggaaagagtgtccattcctgtgctctgatggatcacagctgcagattgcccgggctttgctcatcaccacatggctatcatgtcacaagcacattcatacatgtgttttagggaagtcatgtgattatttcttccattacctaaagctgtacagctagctaagtgttatgggccagaggtagatttgaaatttagtcattagacccacaatcagcatgaactattgggtaaatgctcatgagaacatgtttacatgtgcgtgtgtgtgggggtgtgcrtgtgtgtgtgtgtggggggggtgtgtgcaggaggagagggtgtctcatctctgaacacttctaaaagggtaaaaatcccaagcacgcctcactcaggggcctcagctcatgccccacttgagctgcattagtgagcttgtgcattcttaggtaagtacatacttagtacagtttcctc

SEQ ID NO: 309766 - DNA, 561 bp, Homo sapiens
cggtcatactttaggtgtgtatttcatttttggaaatatgcaaaagtcactctgttaaatattgtgattaagggccaggggtggggcatagatctagttgaataatatctgacattgcaaaaaagtaacaagttatgagtaatcagtctgtgtttttagtatgggtgagtccaccaatacatccaaagatagtttcartgcaaatgtttttgaactacactaaacaaaagcagcattatttagaataagccccaaccctcacaagtttaaccctaatttggaatagcattgctgattttcaaaatattattttctcatcatctttatttgttaattatctttttgtgattgatttctagcttatttctactatggtcagaaagcatactataagtgacttcaatcctttaaaattttaaaaatttgttgaagtgtcttttatggcctaacatattatcaatttaaataaatgttccatgtttccctgaaaagaatgcacactctattgtctttatgtggactatttatgtatgtcaattaggtcaagtatgttaattatgt

SEQ ID NO: 309767 - DNA, 561 bp, Homo sapiens
cggtcatactttaggtgtgtatttcatttttggaaatatgcaaaagtcactctgttaaatattgtgattaagggccaggggtggggcatagatctagttgaataatatctgacattgcaaaaaagtaacaagttatgagtaatcagtctgtgtttttagtatgggtgagtccaccaatacatccaaagatagtttcagtgcaaatgtttttgaactacactaaacaaaagcagcattatttagaataagccccaaccctcacaagkttaaccctaatttggaatagcattgctgattttcaaaatattattttctcatcatctttatttgttaattatctttttgtgattgatttctagcttatttctactatggtcagaaagcatactataagtgacttcaatcctttaaaattttaaaaatttgttgaagtgtcttttatggcctaacatattatcaatttaaataaatgttccatgtttccctgaaaagaatgcacactctattgtctttatgtggactatttatgtatgtcaattaggtcaagtatgttaattatgt

SEQ ID NO: 309768 - DNA, 495 bp, Homo sapiens
ataatggtactagttatgaattaacttgcatgtatgcatccagaatggtactagttatgtgccattcttagtaccatccttgggagaatttagatatagccactcacataattttctatgccctgacctctatcaaaaacatggccctggatagtgatgagctgttctctccattcagaaggctaaaaaaaggtaagcaataggattgaaaaaaacaaaagaaagattgcctagcttctgcactgctgatactgacttgacagtttcttctcctctcccttctctctctcacttccaccctttcccccarggagaggaaggctttctgcatagacagtgaagcaccagaagtgaggtgcatttgcagcatctgaaagtgtgctttggaagcattccagttcagctcaaagtgaaatgtgtcagattcacttgcctagaaagagacttaaaactatccatgtacatagaaatataaaatgtacttcatttatgaca

SEQ ID NO: 309769 - DNA, 612 bp, Homo sapiens
aagccccaccccaaaccatctgaatgcactccctcctctcagatagggcactccaaagttacctgaaaaactggttcaggcaagggtggaaaattggtgggggattgggagtgggggttgaacatgcttcattttacccttctatcttttggcatttgggaagagatgacctgcatttaacatcaacacagattttttttttttttttttgcagttgcaagatttaatagagtgaaaacagggctcccatacaaagggaggggaccgaaagagggtagcccttgctggctagaatgcctgggtttatattccgatcattgtccctcccgctgtgctctcaggcaataaatgattggatatttccttakctcctgtttttgcctaattagcattttagtgagctgtctttactacctgattggttgggtgtgagctaagttgcaagccccgtgtttaaaggtggatgcggtcaccttcccagctaggcttagggattcttagacacagatcttaagcctgataagaaacatttataatctattatctctgaagcctgctacctggaggcttcatctgcatgataaaacctgggactccacaaccccttatcat

SEQ ID NO: 309770 - DNA, 596 bp, Homo sapiens
atgccaatatcttaatcaatgaaattaacaattccttggtatcatttgatagcagtttatgtataagtttccctgattgcctcagttcaactacaacccttccaccccatcagtttggagtagtcagaatttaaataaggtctgtgcatcgcatttgggtattatgtctcttaagtatcttttaatatggaataaacccttctctttcatctttttcttcttttcctcctcctcctrcttctttttcttactttttaatcccaatgatgtattggaaaaacaaggtcaattgtcttgcagaatgttctgttgcatggctttgactacttcttggtggaatcgttcctctacccatgtatttcatataaactggaagttagatctacaagattgattaaatttaggttaaactgttttggcaagaatatctgatcggtgatgcggcaccgcaccaggagatccatgtctagtggtcttgctcttagagatgttgagtttccagtgagttcaggtaaggccatcttgatccccactttgtgcaatttcctgtcaacatattgtctcatggtttcacctgttggtgatcattcagcaga

SEQ ID NO: 309771 - DNA, 533 bp, Homo sapiens
ggcagaggttgcagtgagccaagattccaccactgcactccagcctggactatgaagcgagactctgtctcaaaaatsaatcaatcaatcaaataaaacttacacatgattgttttgtcattgaagctgtgcctacaatcaaacccctgatggcaaggctgcctgaaagggacccatgcaagtagattccctcctggtgctcttttgtctggacctctcagttgctggggacagtaaatagcaactaacttggtagagtttcattccaaacagattagtctgccttaataaaagtctcccgagtataaatgttaaccacatttttaaagtacttttacagcaacatctaataacttaactttggtcacacaaaaatacttgaaactttttcttccctcctcccccgtttgtatattttttgccttactttaagatctttacctattatttgttccttagccactaattataactgttttttacattttttattttaaatcttcataataaaggattgaaaattgtacatagca

SEQ ID NO: 309772 - DNA, 592 bp, Homo sapiens
tcctgcagtagttcttcctgcacacaatctgcctttattgcctttaactagtgtctagcttgtttcttcgacaactccttgatccctagactaggctgacacccatcatatgcctcctccactttcctggtgactgccataacactttattgtaacttctataactgggggcttttaaaaactgaattgtatgtcctgaaagcaagtcttargtcttatttaccatcgtattcccagcatagcatagagcttggcacacataggatacaggcagtatttgtggaataatggaatgaatttccagtgttcttcacttgcctgtatggaatgtttcagcataacaggcagttttaaccatcagggggtagtatgttgagcctatggcatggatgaaaagagtccatctatttcttaactattgcacaactcttaaaaagtccttcctgcctctggcctgccatggagcagaagcaccaaactgattttctccagcaatggccccaggtagacctggcagctgcctacctcatttgcttactctagctggctctctcatcaccagtgcctacaattcattgttgtactctctata

SEQ ID NO: 309773 - DNA, 428 bp, Homo sapiens
cttcctgctgcaggtaaaacctaattctgtttgcctttttgcagtgtgggagaaaaaaagatgttaagattggwtgcctataatctcatctaatgagtaatagatataagatttgaacgaagacctgattctaaagcatgccttatttttttttcttaaccaatgaacttccttgcctagttaatgggattgttcagtactacttagggatttatttccctaagtagcttggattaaaggtaatgcccactattggccataaatccttgtgactctagctctatttccaggagtccagggcagtaaggcagcccacaggctgcctttggaaatactggaaatggaagcagaagactgtaatgcgtcatagcccagtgtgcttcctgagctagctagaaaactctgtccctgggcaccccaggcctttg

SEQ ID NO: 309774 - DNA, 428 bp, Homo sapiens
cttcctgctgcaggtaaaacctaattctgtttgcctttttgcagtgtgggagaaaaaaagatgttaagattggatgcctataatctcatctaatgagtaatagatataagatttgaacsaagacctgattctaaagcatgccttatttttttttcttaaccaatgaacttccttgcctagttaatgggattgttcagtactacttagggatttatttccctaagtagcttggattaaaggtaatgcccactattggccataaatccttgtgactctagctctatttccaggagtccagggcagtaaggcagcccacaggctgcctttggaaatactggaaatggaagcagaagactgtaatgcgtcatagcccagtgtgcttcctgagctagctagaaaactctgtccctgggcaccccaggcctttg

SEQ ID NO: 309775 - DNA, 525 bp, Homo sapiens
acgggggaccacagattatcccaactctaaggtagtcatacatataaaatgctaagcttggcaaataaatctattggaactgattgtgtacaatagtattacttttttctttttgtgaagaaatgaagcacgctcccttggtgaatttagaataggatttgattttcaaaaactgatttacatacaacctttcaatcatcttctgtacatgtggctggattaagaaagctttagttgtacttccggtctgattatgggattgcccttgtaagggcctttaagtagtctttgctaaagtttgaccagccataatgagaggcataattgtttagtggttaagaggccaggttctggagtcagacagacttagattgcaatcctctctctgacgctttctagatgtgtgttattggacagatcagtcaatcgcytaaagcctcagtttcctcctctatacaatgggcatcataatagctgctccctcctaaaaagattcagtgaggtgatgcccacaaagagcctgga

SEQ ID NO: 309776 - DNA, 523 bp, Homo sapiens
cacaaacacattcacacacacatgcacacatttatacagcacattcaaacataaaagagtgtatggtgatgagttagttgacctccctgccttgraatccattcccctctctagaagtaactattgttacaggtttcttttttttcttttttttttttaataattctagagatattgtttcctacataagcaaatacatgtgtaggcatttatatatacatatatcttctttttacacaaatatttacataatacatacactgtttacacatgctttttaaatttaaatatatcttagagataattctatatcagcacacgattattcttttttgatggctgcaacatatttgtgagagaaaacctgacaatctcttagcttaactgtagttatgttactttttccttagtctcacgtaattgtcaactctaattatgtcaacccataattagagattgtggcagcatttgcaattagtcaaatagcaatcacctgtagaaaagcattttgttgtccatctat

SEQ ID NO: 309777 - DNA, 596 bp, Homo sapiens
gtgaatcttcacacatcacttaactctgagtttctgtctgttttcttacctgcctggtcaggttgttcgcaaggtttaaatgaagtaatggttcctggcactgggcagagactgtgcagttgacaggtagagcccagagtcttcctatgtatgtgtgtgttctttagagatggtctcagggcatgctctccatgcaaacaatacatgtcgctccgtgaacactaatctttcttatccaccaaataggtaaaagctattctataaactccatttagaaaatgcattttgttacatgattagaacaaatgtccaatatttaatttgtttcagtaaaatctgggtagaatcctctttcagttcaataaaaatataatcctactggaagacatacttctcatctgccccrcatatctcactggaatctgtatcttaatgaaattctgaattcttgctagagttaatgtttcctagatctgtccagataggtataaaataatctacatgaagaatattaaagatgggtcaggactattatttcagagatcttgcttgacatttagaaccaccagatttaaatctggattaaatttatttgc

SEQ ID NO: 309778 - DNA, 484 bp, Homo sapiens
aacaggacctgcgcagccaaacccatcaaccctcaggagccatgagaaatgagaataaaatggttgttttaagccattacctttaagagtgattccttactcagcaacagataaccagaacaggatactttcagtggtccagaagttatgaagcagctgggattagtgagaatcaggaaaccatagctccaaattctggaaatggtggctgcttccagttcagtgggagcaggtacaagcgagagaacagggctgcaagtgaccgttaggtgctaagggcctgcatccagaagaccacccgggcccagcctacctggcgacgcattcttgcctctcacctgcaattgctgagggtaaatagatacatcacttacagatgcgtcaacaggaaacctccccctctaagatgagcgcttaaygaagacactacaaacagctgaggaaaacccacagcgagagagagtcaccaaactcaacagctaaa

SEQ ID NO: 309779 - DNA, 563 bp, Homo sapiens
ttgccactgaaggtggcccaccctccccagtggcagggcagcagtgtggccactgatgtccccagcctgagcattccattgctggcctggggatcacttcactcctgcctaccatggctggtacctgtacacaccattgaggggcctgaatacaagcccacctgacctggcttcatgtcccctggcccctgtgccagagcatgtggactagggctgagggactgcccagctcagtggttcagtccaccatcagtggtacctgaccacttctcctgagggcctaaggttgggcytaccgactctgctgttaccactacagctggtacctacttgcacatgtcacccgtggccctgtgcacaagcccaaccagcccattgcagccactgccaataccagcatgcactgctcaggacctacaaggttttcctgccacttccactgccattacccacaccatgccagctgcctagggacctgagaacccagccacctacctggcccactgatgccactaccaacatccaagtaagcctcctggaagcccaagaataggcctgtctgg

SEQ ID NO: 309780 - DNA, 588 bp, Homo sapiens
tactatcagaaaaccaaaaaataacagatgctggtgaggacgcagagaaaagaaaaactcttatacgctgttggctgtaatgtaaattagtacagcctctgtggaaaatagtatggcgatttctcaaacaactaaaaatagaactaccatacaatccagcaatcccactagtgggtatttatacaaaggaaaagaamccaggtattaaagggatacctggattcccttatctattgcagcactattcaaaatagcaaagataaggaaccaacctaagtgtccatcaatggagaaatggataaagaaaggtccatatacacaatggaatactacttggctgtaaaagagaatgaaatcatgtcatttgcagcaacatggatgaaactgtaagtcattacattaaatgaaataaaccaggcaaagagaaacaaatactgcatgctcccactcatatgtgggagctaaaaaacttgatcttatgaagatagaaaatagcatgacagatactagaagctaggaagggtgtgagagtgggaggaagagaggttggtgaatgggtacagacatacagttagaagaaataagttc

SEQ ID NO: 309781 - DNA, 572 bp, Homo sapiens
tggtactgtcactattttttatttttgctgttcataaagctgtgcaatgacatcttatcattgctctaattttcattttcctaatggctaacgatgttgaacatcttttcatgtgcttatttgccatctstgtatcttcctcagtgaaatgtctcttcacatatctcatacattttctatttggattgtttgctttttcatgttgagttctgagagttctttatatattctagctatgagtcctttgtcagataagtgatttgtaaatacctctctcagtctgtagctttttttagaatcactgtcttaggtatttctcagagaaaagtttttaatcttggtgaggtccagtttaccaatttttctttcataaatcatttcttttatggattttctgtatagattgtcatgtgatccacacatagagacagtttaatttatttctttcatatctgtgtgccttttatttcatttccttgccttcttgcattggctagaattgccagcaatatattaaatacattgaatagtattttttaaatacaatgatattatagttgctcttgaataga

SEQ ID NO: 309782 - DNA, 518 bp, Homo sapiens
gctttctgtgttacttgaggacaactattttagcttctatatgctttcattccatcatctagaaaatgaacaaattgatctagatgatctctgagatctgaattctggttctaattctaatgtttccaagtttctgtgctgccagatttcagcaattggcttgagaatatttcattcaatgttcaaactatttattcagtgtttattattgccagataatggactaagaggatggagaagaggagtaattaatttattttgttcaattgtgtcaagtattttcttcagatgttttgaaatttggaaaagttaaaaaggacattgattcaccccatctcayggtttctcaatggaactgaaggaaaaatggtgatcttagatttgggacccaagcaaaatctctgagtcactagtgagccaggtgagtgagacagagtttaactgtgcaaagttacaaaaagagaggtgaaaagagaaatggccttttttctctaaggtattgacatgtaagttttagg

SEQ ID NO: 309783 - DNA, 557 bp, Homo sapiens
gcattttgacaagaaggctgtaaaagttaccataaacaccataatctctattattttatcataattttaaagctcaccacaatatacatgtctgcattaattcatagatatstagacttttatataattcttgacatagaaatttcactatttatacctgttttatttaaatgaagtataatgtccatgcctttatgtcagtgatgagttctcaacaaaatttccaatatttgtaagactttataatacctagaaggtcctttgttcaaattatactaaaaaggttcagaaaggaagggaaggaagcttaataacttttaaggcaaccagagagttgttagttttggacactttaaataaactgctagcaattattttattagatgtagttgttggactggtcacaaagaataggtaagaaaactgaacagatgtcacagagagaagagagagtgggtactttgcttcctctgttacagactttcatggactgaatactctgatgaacagactacataggcagactacataggcagggaaattctgtcttaaacttt

SEQ ID NO: 309784 - DNA, 352 bp, Homo sapiens
tattactgtcaactgaagaggtaatcacttgtattgtggacagagctggtgatccatttacttcctactgccatttaaaaactaatttgtgtaatttgaagtctcatttaatctccagcacttccttacccattcttactctcaacagatgatgctggctagacatggtggctcacacctgtaatcccagcactgtgggaggctgaggcaggtggatggctttagctcaggaatttgagactagcctgggcaacatggtgaaactccatctctatagaaaatacaaaaattacctgggcatggtagcacactcctgtrttcccagtttctcaggggtctgaggtgagaggat

SEQ ID NO: 309785 - DNA, 557 bp, Homo sapiens
caggtagaatgtgaaaacccgaggacaagagtattccaaggaagtaaacaaatgctaagttgaagccccagagtaatagtactaaaggtgccattttcactcataacattattattcagatcagcagcatgcttcataagaattgagttatttaatgcactaatatgaatggattataaaatactttggctagtaaaggaagcagtcaggatgcatttcaraatcatgagaaagaaggaggagaggtgaatattttactcaaaaggagttgcccaatgtgaaagaaaacacgaacttttaaaactcttttacggctcatttatcctaccatctacaacacaactatgcgagaatgtccttaagaaaccaagaaaggaaagtgcagcacttagggtatagtactagtaggggtattaataccattaggcccaaagtgggaagaggaggggattcctggaaccaggaatataggtctgtgttgaggaatgtctgccaagagctgtggtctttagcagagggaggcaacaatctatagtgatctcccagaaggggtagtg

SEQ ID NO: 309786 - DNA, 420 bp, Homo sapiens
taacataaaatggaggattttatctggacgaatatttcaatagaatgaatccactaactaaaccttttgctcccctgggcataccatctacctgggaaagtaacrgcaataattcttctgattgccattccccaggtctgtaactgaagacctagatgctgacagtgacccagaagggccccacagagtcagaaagtggcctttgagatccttttcttccttcttggagaaaaattcttccatcataagtatttccatacctccctgcctttaatttggagacagatggttatgtgaatatttttaaattatgatgcctctgtagattcaagtgatttacaaatgtatttacaaatgagtagcattattctacttgtaggaagtttaaatagaaagaagcgcagaaaatacaggtattaa

SEQ ID NO: 309787 - DNA, 573 bp, Homo sapiens
gcaaatactccactcctcctctattttcctgtgttgctcagttccacaattgttcacgttctttttattttcttttctgtatgattcagggttttcttatttaaccacgaggttattgtcacccatccactaagtccttctactttatggtgacatctgattgacagctcttatgtgggaaagataagtctcagagtggcaagaaggagggagaaaataaagggactagcaaaagaaggagaggtgaaaaggaggactctcttttcttcctgggccctgaacctccctaaggaggtatccctggaacctagtagaggtaggaggcagcaactgtrtatatttttatatccttcagctcccctgaattggcagtgaaaatttgggtgggccaagagtcagaacatataaacttctcagataaatagctgggtccacaaaaattaagggggcaagagacacacactttctttgctctgttcattaaaaaaaaaaagaaagaaaagaaaaaaatgtgcttttagaggcaaggagaaggttccaaaagtttgaatttgatccaaagttaagatgttt

SEQ ID NO: 309788 - DNA, 580 bp, Homo sapiens
gcatctccccagtccctccaccctctggccactgataaccactattctactctctgtttctgtgagtttgacttttttagaatctatatgtacatgagatcatgtggtatttgtttctctgttcctggcttattttatgtaacaaccatgttgtcacaaatgacaggatttccatcttttttaaggttgaagagtatttccttgtatatatgccacattttctttatccattcaactactgataaatacttaggttcttacaatatcttggctgttgcgaatgagctacaatgaaygttgcagtgcagttgtctcttggacacactgatttcattttttttaactttattttaagttcaggagtacatgtgcatgttttatgtgcatgcagattgtgtcatggtggtttgttgttcagattatttcattacccaggtattaagcttagtgcttatttattatttttcctgatcctctttctcctcctaccctccaccctgttaaaaaactctgtgtgtgttgttcccctctatgtctatgtgttttcatgatttagctcccacttataagtgagaacatg

SEQ ID NO: 309789 - DNA, 621 bp, Homo sapiens
ttctaatcaagtctagagtcctagttctcttagtatgttccatgtaagattttatatgtataaactcagaaggtataaagctggtatttctttccttagtgaaaataatctggagcatttcttcttcttgtatgtggatttcactcgattataggaatcaagagttttgaatcactctgctcctagctggtggtctttatagactgcatctaatctctttcgaatttggagcaggatgaaaaccactagctgtacctgctggagaagtattctctgcagatatytgggactccaactctatcaaattttcagatgagcttttccctgcagcttgtcctatgcaggctgtagctcaggggtccatggtcttagtttatctggaacaaacctagtttatatggatattcccaatattctatttggttaaccatataccttactcacctctcttgccttgaccagctacttttattctcaaaagtatcgtggtttgaatggtaaattatctgaccactcttgttatacaatcttattttaattcctccatgtaaatatctaaagacaatgatctttgatcattaaatggcaactctgttgtattagtatccttgctatgttcaa

SEQ ID NO: 309790 - DNA, 608 bp, Homo sapiens
taaattaataaaataagataaaatgtatataatcttttttatacttaccaacagtcaccagctcctatgctcttcatttcttcttttggatctgatttaccatttgatgtcatttcccctcagtcttcctttaacgttttttacagcacacaagtcatagaacacaggtttgctagcagttgcatctcatastctttgcttgtgtagaaatgtctttaatttgcctttatttttgaagggtacttttactagatatataattctaagttaacaagtatttttttctctcaggtctttgtattatttcagtgctttctggtctccattaaatctattaaacatatcattctttcattggaggtgattggttactgctccgtcttgttgcttccaaaattttctctttattctttgcgaagcatttttcatgttgtatttgcagaatgtttttctttgtggttatctcacttgtggtttggtgtgcatttttattctgtaaattagtgtttatgagccaaattctctgtttctttggatgtctagtaaactttggttgaaaacaagttaatatatataatatattgtactggctctaggtatagttttgt

SEQ ID NO: 309791 - DNA, 608 bp, Homo sapiens
taaattaataaaataagataaaatgtatataatcttttttatacttaccaacagtcaccagctcctatgctcttcatttcttcttttggatctgatttaccatttgatgtcatttcccctcagtcttcctttaacgttttttacagcacacaagtcatagaacacaggtttgctagcagttgcatctcatagtctttgcttgtgtagaaatgtctttaatttgcctttatttttgaagggtacttttactagatatataattctaagttaacaagtatttttttctctcaggtctttgtattatttcagtgctttctggtcyccattaaatctattaaacatatcattctttcattggaggtgattggttactgctccgtcttgttgcttccaaaattttctctttattctttgcgaagcatttttcatgttgtatttgcagaatgtttttctttgtggttatctcacttgtggtttggtgtgcatttttattctgtaaattagtgtttatgagccaaattctctgtttctttggatgtctagtaaactttggttgaaaacaagttaatatatataatatattgtactggctctaggtatagttttgt

SEQ ID NO: 309792 - DNA, 633 bp, Homo sapiens
ttgttactaatgatggaatctccttatttttaattccgtacagtattttactgcatatatgctatataccacaattcctttatcygttcatctgctgatggacacttaggttgcttccatattttggttattgtgaataatgctgaaataaacatgggagtgccaacatctctttgacatactgattcctttggctgtacacacataagtgggattgctggatcatatggtattatatttttcaaaattgctaaaagaattaatttttaacattctcaccttaaaaaaggataggttggtgaggtgatgtatattttaattcggttcaattttttacagtgtagacataggtcaaaacattgcattgtaccttctgaatatacacaattagtatttgtcaattaagaataattaatacttatttttttaaaaacagtaaaagaaaaacctttcaaatggagaaacagcagataacacttgcaggtagatagctcttgcagagaagggttaaggtgagctgagcaaggccctactcccttcactcacagaatgagacggggccagggccaagcatgtcatttgcaccatttggaaggaaaaatcagattcaaagacacactgtttctcctaaca

SEQ ID NO: 309793 - DNA, 633 bp, Homo sapiens
ttgttactaatgatggaatctccttatttttaattccgtacagtattttactgcatatatgctatataccacaattcctttatctgttcatctgctgatggacacttaggttgcttccatattttggttattgtgaataatgctgaaataaacatgggagtgccaacatctctttgacatactgattcctttggctgtacacacataagtgggattgctggatmatatggtattatatttttcaaaattgctaaaagaattaatttttaacattctcaccttaaaaaaggataggttggtgaggtgatgtatattttaattcggttcaattttttacagtgtagacataggtcaaaacattgcattgtaccttctgaatatacacaattagtatttgtcaattaagaataattaatacttatttttttaaaaacagtaaaagaaaaacctttcaaatggagaaacagcagataacacttgcaggtagatagctcttgcagagaagggttaaggtgagctgagcaaggccctactcccttcactcacagaatgagacggggccagggccaagcatgtcatttgcaccatttggaaggaaaaatcagattcaaagacacactgtttctcctaaca

SEQ ID NO: 309794 - DNA, 482 bp, Homo sapiens
acccctctaatctttatttatttattgacacataagtcaataagagtcttcctgggctttaggctgaggattctaacagtcaggctatactcaaatggtgagcagagctgggaattatttttcttagactcagataacagagagattgcagtgttaaagaccgtggactctgaagcctaaaatagatcatcagagacaattttgtaatcatcctaaaacttccaggcagattcatagttttacagttttaggaagataaaaatcttttgtcttttgaaagctactcaattgaagaattgctggggataaatargtattacctataaaagaatttactttttaagtggccaaactaaaacaatatgaggtatttagacaatttagagcttatcaatattgaaaaataattctatttttcagtaaataaatgaataaaattttctgaatgtatcccatcaacatttcctgtggggcattcatgt

SEQ ID NO: 309795 - DNA, 482 bp, Homo sapiens
acccctctaatctttatttatttattgacacataagtcaataagagtcttcctgggctttaggctgaggattctaacagtcaggctatactcaaatggtgagcagagctgggaattatttttcttagactcagataacagagagattgcagtgttaaagaccgtggactctgaagcctaaaatagatcatcagagacaattttgtaatcatcctaaaacttccaggcagattcatagttttacagttttaggaagataaaaatcttttgtcttttgaaagctactcaattgaagaattgctggggataaataartattacctataaaagaatttactttttaagtggccaaactaaaacaatatgaggtatttagacaatttagagcttatcaatattgaaaaataattctatttttcagtaaataaatgaataaaattttctgaatgtatcccatcaacatttcctgtggggcattcatgt

SEQ ID NO: 309796 - DNA, 601 bp, Homo sapiens
gatagcacttgaaaatgccattgagcgtctctccaggtagacattgcatcccctttgtgtttcctaaatgtctttgatctggtacatttgaccaatccccatttaatagtcataaaaggaagaagtccaagaataaggcaactaggtacatccctcgattcagagcttaaattctagggcgccatttctgtggagtagtttatgtagtgaataactttgagggagactatagttcatgagaaatagatacaagccctgaggctatctcataaaaccccttgctccctcccaggaatgcaattaatacagaacagtgatcatgttttctgaaggaagcaaggaaaatgacaacatcatatttttattccaggatcttagggtcttgaaataacttaggaattttttttttttaaattttgtaaagagaaataaccaataattaacygtgatatttaacctgtgttccttccatctttgcttctatcctttattttttctttctctagttcattttttgcataaatgactatatgaataatatataaattattaataaaggaataattgacaaaacatttaccaatctttcctttctcctatt

SEQ ID NO: 309797 - DNA, 503 bp, Homo sapiens
tatgtaataaaccttgatattagctagagcgggtgtgaaagggaatggccagctactcaacaatctgaatcctgttccttgaaacactgaaagctaaattttcaagttcctcttggagtgagatcaaggccatgtaactactttgggtgaatggaatgtagggattttcccttagagtagaatctaggaactttcctctctccagaataggaggactttatgctgcccaagaggactgcagcattgctctggaccagtgactgtgagcatttcattctcctccatttttcctcagaaggtttattatggttatcctgtccctgttcctgcattgcacatgtggtgcatktggcagacagggcaagtaaattaatgtagatgcaggtaatttactttttatttcaaaggttgccagacaaagaaggaaggactatctgtcacattgagatctttgtcaatgaactggttccattgaagggatggttgtcctggaagctggcaga

SEQ ID NO: 309798 - DNA, 564 bp, Homo sapiens
tattagacctttgtcaaatgcatggtttgcaaatattttctcccattctggtggttgtctgtttactctgttgatagtttattttgcagttcagaaactctttagtttaattaggtcccatatgcgaatttttgttgcaatgttgtttggggtcttcatgaaatctctgccatggcctatgcccagaatggtatttccaagattatcttccagagtctctatacatttacattttacatttaaaaagcttaagtttctaaagtgtttttctcaaatgtatgatattaaaaagggaggcagataataatagtcactcaattcatgagatattctgtaattggtagtgtctgtaaagatctttatctcttcttgatttaagtggacattttaatgtgtttttaagcctctaaactttgagcatttctgaccaaatgaaataacatacaaaatgaaacacattattatatttkattcagaaagaaacttataattcacacttttgttgatgaggagaccaggacagaagaagcaagaggtagggataatcaaaatatcagaatactt

SEQ ID NO: 309799 - DNA, 652 bp, Homo sapiens
tgaataatgccatcatagattggatcaccttgagaatcatgctctgttttcgttttcccttttgtgttaacatagaaacaaagttccacctttacattgttctaaaagaattttttcatatttatgggagagaaaggtgaagggaggccatgtgtatgtggtccaattagaaacataggcttttagagctggcaggaaacctggggatcatgtactggattctcccacctggtgcaggaagtctttctgctgcatctctgacagatggtcagcgagcctttgctgggaaaccccagccgtgagaaacttagcacacgcccactgccaccaccactgtggggaagaaggcttgttcaaccctacagccatccttgctaacttcttttttttgtgttcttgttttttggagcattaaaagacagcacttcctttctactatatgacaacccttcaaatcaatgaaagagctgttatgattgtcctrctatgatcctaagttaaacccatgagttttcctcatctgctcaacatgtggtattgccttcagaatcttcactagtctggtcactctactgttgatagaatcaacctgttcgtgattgtcctaaaatgtgattacccagggagggatcacttagtttgggctgcagtg

SEQ ID NO: 309800 - DNA, 572 bp, Homo sapiens
atctgtgctctcttcctctctttctctctccctctctctcactgtatgtgtctgtgtgaagatacagccataactcacttctatgaataaaaatacctctcaatgaaccagacttactataagctcatcagtatctatcatgactgtatgactktgatagttaattttatgtgtcaatttgattgtgacatagttcctagttatttaatcaaacacaaatctaggtgttgctgtgaaggtattttgtatatataattaacgtgtacaatcagttgaatttaagtaaatgagatttttcttaataatgcagggcctcatccatcagttgaaaccttgagagtaaaaactaaggtttcttggagaataaattctacctcaagattgcaacaccaactcctgtgtgagtttgtagcctgctggcctgccttaatgatttcagaattgccagttctcatagtttcatgattcaattccttaaaagaaatctctttagatagagagaaagacagagggagagagagagtcagtcaatccttgttactgatggtagttacgttctataaaatcaacgt

SEQ ID NO: 309801 - DNA, 598 bp, Homo sapiens
aatatgaaaagaccgcatactgtatgaatccaactatatgacatcctggaaaaggcaaaaactgtgaagacagtaaaaagatcaatggtgggcagaaattgccagggatggagttctgaataggtggagcattgaggacttttatggcagtgaaaaaaacaccatataatataatgatgggtacatgtcattatatatttgtctaagctcatagaaagtacaacaccaagagtgaaccccaatataaactatggactttgggtgataatgatgtgttcaatgtatattcattgcaacaaatgtaccactctgatagaggatgttgaaaatggtagaggctgtgcatgtgtgagggtaggaggtatataagaaatctctgtaattttgctatgracctaaaactgctttaaaaaataaagtcttaaaaaataaatatgatcatgatgatgcagcagagaataatctgagtaaatgtaacaaggccagaaactgcagtgcatgtaagttcaatggtgctggaaatgcaaaattgagtctgggagaggtgaagggaggtggctgagagtcagaaagaagttgaactgttgaaaacgtatgc

SEQ ID NO: 309802 - DNA, 652 bp, Homo sapiens
tgaataatgccatcatagattggatcaccttgagaatcatgctctgttttcgttttcccttttgtgttaacatagaaacaaagttccacctttacattgttctaaaagaattttttcatatttatgggagagaaaggtgaagggaggccatgtgtatgtggtccaattagaaacataggcttttagagctggcaggaaacctggggatcatgtactggattctcccacctggtgcaggaagtctttctgctgcatctctgacagatggtcagcgagcctttgctgggaaaccccagccgtgagaaacttagcacacgcccactgccaccaccactgtggggaagaaggcttgttcaaccctacagccatccttgctaacttcttttttttgtgttcttgttttttggagcattaaaagacagcacttcctttctactatatgacaacccttcaaatcaatgaaagagctgttatgattgtcctactatgatcctaagttaaacccatgagttttcctcatctgctcaacatgtggtattgccttcagaatcttcactagtctggtcactctactgttgatagaatcaacctgttcgtgattgycctaaaatgtgattacccagggagggatcacttagtttgggctgcagtg

SEQ ID NO: 309803 - DNA, 621 bp, Homo sapiens
ttcataaatttatttgtataaatatataaaatatatgtatatgtataggcatatttattagactcaattttataaaattgccaatattcaaccattttgactcacaaaaatggcaacagcctataatcaggacaagaacacaagataatcaagtcaccatctagatgcacttggtgctttattatctcatttttgctgattttcttaggcaagcattggctgcaggacacagttgaacttattatccagtaaattattatttgtctactctatttgttgacagtcatgagagaagaaataaagagtacaggytgaagctgacggtaccattggatcccagtgcagagctgtgtaaccttggacaagttacttaacctttctaagcctcagtcaccttctctctacaatgaaaaaaatctataaaattgttacaagtattaaatgagataatatatgtagagcacataacatataggccagcagataatgagcactcaattatattacctattagtacacaaattagtaattactgactcaaatttgattttctacagattacatggtattttctgtcctgcagctttttcccttccctctccttccctcacctcctcttcc

SEQ ID NO: 309804 - DNA, 559 bp, Homo sapiens
gctttcccctcacagtgcaaacaaagcctctgggaagtgtggactgggtggagcccaccacatcactaccaaaccactatagccagactgcctctctagattcctcctctctggacacagcatctctgaaagaaaggcagcagccccagtcagggggttatagataaaattcccatmtccctgggacagagaaccttgggggaggggcagctgtgggtgcagcttcagcaaacttaaacatttctgcctgccagctctgaagagagcagcggatctccctgcacagtgcccaagctctgccaagggacagactacctcctcaagggtcaagtccctgacccctgggcctcctgatggggagacatctcccagcagggattgacaaacacctcatacaggagagctctgactggcatctggcaggagctcctctgggatgaagcttccagaggaaggagcaggcagcaatctttgctgttctgcagcctctgctggtgacacccaggcaaacagggtctgaagtggacccccagcaaactccagcggacatgcagaagag

SEQ ID NO: 309805 - DNA, 554 bp, Homo sapiens
acaactcctcaccagcaagggaacaaaactggacagagaatgagtttgatgaatagacagaagtagacctcagaaggtgggtaataacaaagtcctccaagctaaaggagcatgttctaaccccatgcaaggaagctaagaaacttgataaaattgctaactggaataaccagtttaaagaagaacataaatgatctgatggagatgaaaaacacagcacgagaactttgtgaagcatacacaagtatgaatagctgaattgatcaagtggaagaaagaataacagagattgaagatcaacttaataaaaaaaagcatgaagacaagattagagtaaaaagaatgaaaaggaatgaataaagcctccaagaaatatgagactatgtgaaaaraccaaacctacgtttgattggtgtacctaaaagtgatggggagaacggaaccaagttggaaaacactcttcaggatattatccaagagaatttccccaaactggtaagacaggccaacattcaaattcagaaaatacagagaataccacaaagatactcctc

SEQ ID NO: 309806 - DNA, 608 bp, Homo sapiens
ggagcctaaatatgaggtaggacctggggtagccaataaaacactccaaaaaggttgctggaatcactgattaggtttctattgggaactttgccaacatgcagctccccctctctttgggaacattaatcaaggcaggaggactcttcagggaaaaagacttgctttgtatttatacaaacgtgccctgcttttatgctcttaaagggtttgtgcaggccaggtgcggtggctcttgtttataatcccagcactctaggaggccaaggcaggtggattgcttgagctcaggagttcaagaccaacttaggcracatgctgaaactccatctttactaaaaatacaaaaacacagctgggtgtggtgtcatgtgctgacatcccagctactcaggaagctgaggtgggaggatcacttggagcccaggcatggaggctgtagtgagtcaagatcacgccactacactctagcctgggtgacagagtgagaccctgtctcaaaagtgtgtgtgcgggggtgttgtgcaaagtcatgaacatagagagaatctgcaaaacaaatcctgccctcaatattctaaagcaaggctccacgaaattggttgaga

SEQ ID NO: 309807 - DNA, 585 bp, Homo sapiens
tttgttaagagaacatatttatattttatgcacttttccactgtgtgtatttcacaatttaaaatgtttttcaaaagtgtgatttggaaccactgctgtgatctaattatcagagcagccaaaccaaaatatctcatttccttggtaacttagtcctgtgaatctgaatgccttatattatttgatggtrctaatgatgaagatgattgatgaatctgtatctacaactaatatgcaaaaccatttttcctgagaattttgcaattgggcctattgttcatttaagaatgtaacctaatgtaatctatctaaaataacaaagatatagctggctaattaattgcaataaatactgacattttgtgagcagatgaataaaacacacacaaaaggacacagcaatctcttagcaaaagctgtgattaaaatgcccctgactgagtggtagcaaacacaaatgcggccacagatgctgcataattattcctttgaaatagttcagggttcagatgcttagaatacattacacttttcaatactcaattcatttctatatttagggctactctgcttctctgcacagcc

SEQ ID NO: 309808 - DNA, 544 bp, Homo sapiens
aagctaaggccccaaacatgaaccttttaacaggaaaattggtaacatttgtgacaataagtgatactgaccaagctgatcccagcagaagagcttcagcaacatcccatcttctctacagtactgattttagtcttatgctattgawaacttttaaatgagttcttaccgttgagggaagaaggacacaagaatgggacaattaaaaatgaaatgatagaaaattccacttgagcttgatcttattctgtgtaacaggaccttgggggatatagaaaaaaatcagaactcctgtccatctaggccccagaggaaagacttggctctgttagacttcatccttctgtgcccagtctgccactcgctggttcttaagagatagagtacacttaaaggcacaagccagtccttccaagacagtcctgcccagaatccctgcataatttttctctggagaaccgaattgagccatcttaaaagaagcttctgtttgcagttgtaccccaggcctttgttagaaccaaagccaacacttactgcatcc

SEQ ID NO: 309809 - DNA, 525 bp, Homo sapiens
ataattaggagacacgagttcacagtgatcaagaacaagggctatcaagctggacagacctttcaaatgcttgctctgccactgaaagaattagggcaggttacatcatctctcaaattttgttttccccgtccgtaaaatggagcccacaatagcaaatgcttcaaagaattgttgtgaggcttcagtgagatgtatctatggagagcactctctgcttagcacattgtaagctcttagtaaaagttagttgtcattattgtaattattattattaaagctgggcttggaattggttgatatggcctctccccaagagctcccaatggggcctggtagtaataaggaagcactggagacactggccaggagcaccccaggagcacaacctttgtaagcttcactgtggttccttctttggctacagtgtctgaaggctatctgccctgagctgagcagagtctacaacagaagcaagtatgtcagcttcatgaccrcaagaatttgttttgtttattgttgtag

SEQ ID NO: 309810 - DNA, 536 bp, Homo sapiens
gctgcagggaataccagaaattccatctctaagaactttcaagttggcaaaaatattgaccacaacagcttttaagtaacatagattttgaatgaagcagcagctgtgcaggaactctcaggaatgggcacagaagccactttgccacacccagrgaattaaaatccctacagccattattgggtctcacactctgtgccagtacctcttggtgcagaagtctcccaccaagaaccacatttcccaccaagagtcgcttcttcttgtggagatagacacatgcttttagcttttgactcacatagaacccaactctccaacatcccagtgtcagtttcagaatgtattttttctcagagtgacagctttatgggccaaatgcttgatgaaatctgggcctagacagccacctggtaatccccttatttaagacattacaatcagagctttcctttgttccaggaagacagtcaaccttctctctatccctgctcaaaaggggaaaaccctagcatcatacaacagaaaaagaaatc

SEQ ID NO: 309811 - DNA, 442 bp, Homo sapiens
ttcaattttatatgcagaaaatgttgtccaggcttctccatctaaactgccaaagtaatacaattgccacttgtgtggggttcaggtaaaggatcatacctggattcttattttatgtaaatgaatttccaacaagagaggtgttttgtttgtgaatttgtttcatcctctcygaggctaacgtacatgctgagttcctcagtgagcccagatatgagaggacaaccactgatttccccttcagcattcttcctcagcagcagaaccagaaaggaataatagaattggccaaaaaatcatttttttaaagttgcctttctcttcctgtagagagaaaatgtctgtgttaataatgatactattgcccacatccttggacaaagagggtttatgcagctgcagacagatgtccttggcagccaacacctatcaaatccccaaa

SEQ ID NO: 309812 - DNA, 566 bp, Homo sapiens
acattataaacagcaaaacaatggaaaggcaggagatgtgtgctgaacgaagtaaaacctaagtgcatgttattagaaaagtgtaagtattaaatattaagccaaagccaaattctccattactagaatccattctgggatagcaggaaaactaccatagtaaccaaaataataaatctgaagaaaaatcatacatcagaacattcacagaaacccaaagtatgtctttgattactgatagagtgatgtaatgcagaataaataataaggtgtggcaaatgtaatttctatagagacaaactcatgataytaaaaaactcaaaagaaataagtattatataaacagcaatatctctgaaagcatagatatcacttatatgtgggtgatttttatggtgtctaggcatatacaacttttgaaaaataattatttttattgctcttctttctccagttccatttttctttagtttaatttctttttcttccctgtctaactttggctatttcttctatttgtcatttctcaagttattgttggttaaacttttcttctggtcttaaaa

SEQ ID NO: 309813 - DNA, 596 bp, Homo sapiens
ggtgaggggcagtggagtgcagtggttaatgatgtggactcccacacctaattgcctggcttctaaccttcactctgctacttttttttcttttttgagacagggtctcattctgttgcccaggctggagtgcagtggcgccatctcggcccactgcaacctctgcctcctgggttcaagcgattctcctgcctccgcctccctagtagctgggattacaggtgcccaccattatgccctgataatttttgtattttttttttttttagtagagacggagtttcaccatgttggccaggttggtcttgaactcctgacctcaggtgatctgcctgcctgggcctcccaaagtgctgggattacaggcatgatccactgcgtccggcctctgctaccttttagttacctgccctttggtaagttttactagttttctaggcctgagtttcttcatctgaaaaaatgcgaatgattttttttttagtatgtacctcatagractgttaagacattaaatgaattcatacatgtaaagtacttaaagtggtgcatggcacatagtaggcactcataaatgctagcttttttttttttga

SEQ ID NO: 309814 - DNA, 600 bp, Homo sapiens
tttcctaaatttttgtataccaattgacacacatcaatattctagctaatttataacatgaagcattgtgaataattgaacaattcttttgcagtggatgtaagaaataatacaagtggaaagataaaattttgkttctttccataggaggtaggggctttttttttttttttttttctttagtgcaattcagaaagaagaaaaattgcctcaggaacacaactaactctgtttcatagcccaacagaacagtgagaattgagcccttgagaattgttggtgttaattcaagcttgatgtccatttgtattatatcaaggtaaattaatgttaatatcccattcttatacccaaatttttctgatggcttctctgagcaccctgagaataatttgtattccctccagtttttctatgttccccaaatggttcccattgaaaacatttgttttatgttgggtgcactgttagaaacactaaatttcggaaactgagtagttttaatatgtaaaagtattcacaaaacctttctgttttttacctcttaagatgcttgcttgataggactgcagaaaatctttagtcacacaggatttaact

SEQ ID NO: 309815 - DNA, 600 bp, Homo sapiens
tttcctaaatttttgtataccaattgacacacatcaatattctagctaatttataacatgaagcattgtgaataattgaacaattcttttgcagtggatgtaagaaataatacaagtggaaagataaaattttggttctttccataggaggtaggggctttttttttttttttttttctttagtgcaattcagaaagaagaaaaattgcctcaggaacacaactaactctgtttcatagcccaacagaacagtgagaattgagcccttgagaattgttggtgttaattcaagcttgatgtccatttgtattatatcaaggtaaattaatgttaatatcccattcttatacccaaatttttctgatggcttctctgagcaccctgagaataatttgtattccctccagtttttctatgttccccaaatggttcccattgaaaacatttgttttatgttgggtgcactgttaraaacactaaatttcggaaactgagtagttttaatatgtaaaagtattcacaaaacctttctgttttttacctcttaagatgcttgcttgataggactgcagaaaatctttagtcacacaggatttaact

SEQ ID NO: 309816 - DNA, 393 bp, Homo sapiens
tcattcttggcaaagttggttctacaaggtaggtaggcacagtagcatgaaaagattagcagagtgatgggtaaggaatgcggataagatatccagttgaaagctttctcaatgtttacccaaaacaaaggccaaagaacaacaaatgcttgaaaaagaatggcagtccctgcagttccctacagcctacccagagatcagagggcagagaagaaagttgggggaaaacttgtatgggagttcgggggaggggtggtaatcaaaaacaggaaggggttaagaataagaaaagtatgctgccaaaagggaaaacaaagagtatgcagcaatgaacccrttacaaaccgccaatttgagagatggggtgattggcccagtgttctttggagcatg

SEQ ID NO: 309817 - DNA, 531 bp, Homo sapiens
atggcctaaggaaatgcagttaaaatgtgagatttaagaaagacagagtctgttttttttttttttaacccagctaagcacagcctgtataaagacaagatagccttagttygatgttgaaaaatttcccaggttccttaattttatattgaagacattagccaacagagttcttttctgtagatatgtatcttcagtggaggaaaacccaaggccctgtgtagcttctgatgaaatataggggaaaaaatctagaaaactataactggaagaagttatgtttatgctacttctatattcctgaataaatggacagcaaggcatcttcaccactcagtgaggcccccatcataagatttgagaacttgtttggcctcacttctaaccttattttagaattgcactgagaaccttggacaatggttattctacaaccaacgtctccttccttctactttccattctgttatgtctgagtcttttttgttggtaattattgattagaatagtgatcaataatctctttagttc

SEQ ID NO: 309818 - DNA, 531 bp, Homo sapiens
atggcctaaggaaatgcagttaaaatgtgagatttaagaaagacagagtctgttttttttttttttaacccagctaagcacagcctgtataaagacaagatagccttagtttgatgttgaaaaatttcccaggttccttaattttatattgaagacattagccaacagagttcttttctgtagatatgtatcttcartggaggaaaacccaaggccctgtgtagcttctgatgaaatataggggaaaaaatctagaaaactataactggaagaagttatgtttatgctacttctatattcctgaataaatggacagcaaggcatcttcaccactcagtgaggcccccatcataagatttgagaacttgtttggcctcacttctaaccttattttagaattgcactgagaaccttggacaatggttattctacaaccaacgtctccttccttctactttccattctgttatgtctgagtcttttttgttggtaattattgattagaatagtgatcaataatctctttagttc

SEQ ID NO: 309819 - DNA, 532 bp, Homo sapiens
gtgtgactattgagttcatgaatattagggttgccaaaaacatacaggattgccagttgaatttaaaataaataacaattttttaaagtatatgtatgtgtcaaatgtgataagaaaagaggaaaaatggctgctgggtaagcgattacaatttgtacctcgctaggctaggtcttactttgcttttcctaggtgcaaagagataatagtttcagaacatggaataagctgaaagtggtttgttaagtttcttttaactttacttttattaattatccaagayagtgctaagcaatagttatcaccttcacttctgcatgcacacaccaggcccaactgcccaagaggagatgtaatccgatcatagttataacttccttgggcaggaatggtgagcctgtggtgacaactcatcattccttgcttatctcaattaaggcagcttagattatgatacccagtcacaactttctagctcattcaggacactgaaggacacattcctccttcttttctaataaaaactcaataa

SEQ ID NO: 309820 - DNA, 679 bp, Homo sapiens
ctgtgttgtagtggagatactctgagggtaggatgtattattgtcatgaaaacttgacttgctgaggttacattacttaggaatgctctgtgcaattgtatcttttttttggaggtagaacagagtgacagagtcaggcagcagagaagtcacagagggatggcagagattaccatgggaagaccagcaatatctgggtcatttaagagttggcatttagatttatatgtagaacaattttcatattttctcattcatgttaatctcaaagtatgtatgtttgacgtgggaaggaaattgttgaggattatgttagtcagatttaagctgatctgttaagagttattttcaggttgtatttgtacagtgttcatgggaggaggattctgagggggkttaagtcatcctttagtttaaagagagatccagaaggtcttttgacttgtaaacattctcactggctcccagtattttcattcattgtgccaaactcgattagcactactctgtcttctggtctctcactagttttataaggctaaggtcacaatgacagtcactgcactaggcatcccagttttcatgagaccatttaaagagagacataaaatgaacagtgggtttatatgtcaaagaaggagtggaaaaggcataggcttagagtcagtcagatgcaaaa

SEQ ID NO: 309821 - DNA, 637 bp, Homo sapiens
ttttacatctctctgagaatagagtacatgactgctccctcaccgagctatgtctgcctggttctgttttaactttgagcacctcagccacaggaaatccattttatctagggcctctttaacagaggttttgttgttgttcttatctgttttatcatagccaacttttggcttatggaaggattattttagtgtatcatatatattcaggttctgtgttctggaatgtcaaattacttgtcgacctacttaaagatgatcactatattaaatctgatagttgatgagtggggaaaagggcattctgagttggttgaaggaattgagaaccctactgtgactagtgtctctgtgtccaatagctctcctcatgataaaactctagcttccagtcatacgcaaataacatgaaatttyaggcaagaatattcaccgaaaagcatttggtatgagaggaaaagatgttcactttgtagtttgatttgcatatttttattattactcctttaacggctccaagcagcaaggaagtatcatttgtaacttctaaaacacttagcctcttttgtcttcattgtaaagcacgaagttcttaatggactgattaatccaaacaacgccctctgagagcaagatt

SEQ ID NO: 309822 - DNA, 632 bp, Homo sapiens
ctcaacatccatttctacctccatctaaattccctcccttccaatcatraaaattaaagaacaaaaactacgttttccagaatcccttccagctggaatttttactgtaatttaggttttactgatgagatgaccttgtgtgagatttggaatgcagagaagagacagaaactatttttcctacagctctgctggctgctggccaagctctggtaaactgagtgtttgagtggccaaatcaggttctctttccttttagttatgtatttattgtttttaaaattttttgaaatggtgtctcattctgtcacccaggctggagtgcagtgacccgattactgcagcctcaacctccccaggcacaggtgttacccaggctcatctcaaactctgggctcaagcaattcacctgccttggtctcccaaagtgctgggattataggcatgagccacagcacccagccaggttcccctttctagtctccagttttgtggaaattgagccattgcctaatgacagcccctgatttcaactgcttagagccttgcaatgctattgtgagtgcctaattccctgtattaaataactttcttcttcaagaacctaatgtgtttttgtttttgttttctgc

SEQ ID NO: 309823 - DNA, 580 bp, Homo sapiens
tgctttgttttccaggcctctatcatttcctttccctgtaacaggttttgtcctcattgcagtcctatttcttcctaagtgttgatgtcagtatayggcctaagtaaaagcatgtaacaagttaaaaataccaaatagagtcatcttgtaattaaaacctatatattctggtgctcaaacacacagtttcttgagactttttaaggttaatggaaatgtgaaacaataatgatgttctccgttggcttttattcatttgtcacactgaaaaaacctattcatttaaatcttgcttctattaataaaaatggcaattgtgctacacttaattaaagagaattgtataaacagaatatttttggtgatgggaatgaaataactagtgttttaccaagcattagcttttctacctgtcctcttataggtggttttgattgcagtaaccatgaccagaaagcattctagcaggaccacacataggttagaaagcccttgcaggtgtgtaatcaacatttcacttacatgtttcactaactcagtgggaagactatcaagtgggtggatttgtccttaatcatga

SEQ ID NO: 309824 - DNA, 580 bp, Homo sapiens
tgctttgttttccaggcctctatcatttcctttccctgtaacaggttttgtcctcattgcagtcctatttcttcctaagtgttgatgtcagtatatggcctaagtaaaagcatgtaacaagttaaaaataccaaatagagtcatcttgtaattaaaacctatatattctggtgctcaaacacacagtttcttgakactttttaaggttaatggaaatgtgaaacaataatgatgttctccgttggcttttattcatttgtcacactgaaaaaacctattcatttaaatcttgcttctattaataaaaatggcaattgtgctacacttaattaaagagaattgtataaacagaatatttttggtgatgggaatgaaataactagtgttttaccaagcattagcttttctacctgtcctcttataggtggttttgattgcagtaaccatgaccagaaagcattctagcaggaccacacataggttagaaagcccttgcaggtgtgtaatcaacatttcacttacatgtttcactaactcagtgggaagactatcaagtgggtggatttgtccttaatcatga

SEQ ID NO: 309825 - DNA, 580 bp, Homo sapiens
tgctttgttttccaggcctctatcatttcctttccctgtaacaggttttgtcctcattgcagtcctatttcttcctaagtgttgatgtcagtatatggcctaagtaaaagcatgtaacaagttaaaaataccaaatagagtcatcttgtaattaaaacctatatattctggtgctcaaacacacagtttcttgagactttttaaggttaatggaaatgtgaaacaataatgatgttctccgttggcttttattcatttgtcacactgaaaaaamctattcatttaaatcttgcttctattaataaaaatggcaattgtgctacacttaattaaagagaattgtataaacagaatatttttggtgatgggaatgaaataactagtgttttaccaagcattagcttttctacctgtcctcttataggtggttttgattgcagtaaccatgaccagaaagcattctagcaggaccacacataggttagaaagcccttgcaggtgtgtaatcaacatttcacttacatgtttcactaactcagtgggaagactatcaagtgggtggatttgtccttaatcatga

SEQ ID NO: 309826 - DNA, 592 bp, Homo sapiens
cagtgtttggtgcatataaatttaggattataatatcatcttgttgaatttatccttttgtcattatatagtgactttctttgtcttttttttttttctgttgttgctttgaagtctgatttgtctgacataaaaatagcttattcagctgggtgtggtggctcacacctgtaatcccagcagtttgggaagccaaggcaggtggatcacctgaggtcaggagttcaagaccagcctggccaacatggtgaaaccccgtctccactaaaaaatacaaaaatttgccaggtgcagtagcatgcacctgtaatcccagtgactcaggaggctgaggcaggagaatcacttgaacacaggaggcagaggttgtggtgacccaagcactccactgcactctagcctgggcaatagagcaagamtctgtttcaaaaaaaaaaaaaatttgcttacccctgctcacttttgtcttctgtttgcatgggatacctttttccaccctttcaccttgagtttatatgaattcttctgtgttaggtgagtctcttaaagacagtaactatttggattctgatttttttttttttaatcagtt

SEQ ID NO: 309827 - DNA, 564 bp, Homo sapiens
ctttaccatttgacttgtgttgatatgcaagtggtgtgcatagctcagttctttagctgaattatgatagaactgacaacatgcttttgtgatctttttcagatgagcttccataaaggcttagcatgttgtgttttgataatgagtcctaaaataagctcatgagaaagagtcagtgctcatcttgcctgagttaagtctgcggctcaactattctctaatcacattattgagatttaatatgtgtgacatattggttctgagmaaaggtgacaccttataccatcactttcttccaatgcctagacttagaagaattagaaatcttgattgtgcctcattatcttgcccagtcagtactgaagctgctgtttcttttttctgaatataatatctgctttttgactggttccaaactcaaaaatttggataatcattactatctaaatctgagcagaaaataaattaatacagcaaagtgaaaataaaatgttttcaatttttaccgtctgtactaattacataacctactagttatgttttatatgttatatcaacttacaa

SEQ ID NO: 309828 - DNA, 564 bp, Homo sapiens
ctttaccatttgacttgtgttgatatgcaagtggtgtgcatagctcagttctttagctgaattatgatagaactgacaacatgcttttgtgatctttttcagatgagcttccataaaggcttagcatgttgtgttttgataatgagtcctaaaataagctcatgagaaagagtcagtgctcatcttgcctgagttaagtctgcggctcaactattctctaatcacattattgagatttaatatgtgtgacatattggttctgagaaaaggtgacaccttataccatcactttcttccaatgcctagacttagaagaattakaaatcttgattgtgcctcattatcttgcccagtcagtactgaagctgctgtttcttttttctgaatataatatctgctttttgactggttccaaactcaaaaatttggataatcattactatctaaatctgagcagaaaataaattaatacagcaaagtgaaaataaaatgttttcaatttttaccgtctgtactaattacataacctactagttatgttttatatgttatatcaacttacaa

SEQ ID NO: 309829 - DNA, 419 bp, Homo sapiens
tctaaaattatagccagtataattcacttacataaaatattatttagtagacgatgatgattattattttgagacaggatctccctctcttgcccaggctgaagtgcagtggtgtgatcttggctcactgaagcctcaaacacctggggtcaagcaatcttcctacctcaacctctcaaatacctggtactacagacgtaagacamcatgccttgctagttgttttttttgtttgtttgtttgtttgtttttgagacagggtctccctatattgccccgtcttgaactactgggctcaagcgatcctcttgtgctggattagaggagtgagccactgtgcccagccagagcagattattaacaagctcaaagatagtgatctatttcatagttgctctgtatcagggtaataaaataca

SEQ ID NO: 309830 - DNA, 420 bp, Homo sapiens
gctggaggccgggagtttgagaccagcctaggcaaaatagtgaagacacccatgtctacaaaaaaaattttaaaaaatagctacgcatggtggtatgtgcctgcagtcctacttgcttgaaaggctgaagraggaggatcacttaagcccaggagtttgaggttacagtgagctgtgatcacactactgcactccagcctgggcaactaagcaagaccctgtctctaaaataacaacaacaataataataatgtgttctttttttcacctggacatcacctcagcttagttctaaataccctcagaaatctttagataattcaataaaatagtattgtttcctacactatgttatcctaagtgctgtaattatgttataatatagtccagctggtgaaaaatatttgtctcaattctcca

SEQ ID NO: 309831 - DNA, 586 bp, Homo sapiens
taagttttagtaaccaaaccaccttcttaatttctattatcttacgttaatagacaaattgttgctctcttcatgcaatcttctttttaaaaatcagtcatcacctgatgtccaatcaagctgcttcccacccttgcaagacatatatcactacaattctctcatgctgagaacctactgctttagatatatgactgtacctggcttaagagttccaaaatgcttcrtctgtttgctatgattccctactcttccctaataaggaaagttttactattggctttctctgcattgtgatcatttaatttccagctcttccttaattttccttctctacccaaaaaactccttgttctaaatctacttagatgggaagaagaaaggagaagtttctactttctccatgtttagggttggtttttcccacttaaatcagaagaaaccatttttccacttattggtgagtaaacacaaaagagacaaagcaagaataagctctgactctaatttctactcttccagatgtaatgtgactgtattacagatttgagacagatctaattaattcctgttatcctcttttcac

SEQ ID NO: 309832 - DNA, 573 bp, Homo sapiens
aaaaccagaaagacattgaaaaagttggaggcattttattagcaaaggaaattttagtgggaagaggaatatatttaagataactctacaaaaataagatgatactcaatctgagcttttaatttttatattgttatgctgcttcattttgatttaaatatctcaccaataaaatgtacttaaattttatttttaatagtaattttcacgtataaacatgattttaaatgtttataagaaatatgaccaaaggcaagaaatctttaaaaagatatgcagtatcaccttaaagagttacattcaattgtcagtgtttcagaagacaagaaacaatctctgcaacaaaacaaaccaaaagaaaacaacatttaataattaggtaagtgacttccaggaaaatccacatgttatttaggacaacaacatataytaatagagtactattaagtattactaaaaagggaagaagaaaacaattaagattattgaaaaatgttttcatagaggtaaaagaatgggtgggaggaacttctgacaattaaaatttttactttgatagacttaatgaaaaat

SEQ ID NO: 309833 - DNA, 685 bp, Homo sapiens
tagaagcaactgagcaagtctctttaaagccatggcaaaaaaccagatgacagttttaaaggctagcaaggaaaactgtgttcttatattcacgtttactggatttggctcaccaaagttttaatctcaggcaaacagcytgctgcatctttgcttaataccttctgggtggaaactaattttactgttgattagttagaaacatatttgggcttctaccaccacttaaagggaaagaatcaaactattatttttttcactttaccaatcgttttatacccagacatatacatatatgtatataaaataacagacaaatatataaaaaactatatatataagctatatcattatttcatataaaatgataacatttccaaataaaatggagttataactttacatgaaaatttatttacttcaatggaataaaagaaatgaataacaagattcctaaaattttatttttgaaatgacgcagcattgaagttcaacctgactccctttacatagttattacatttccgtagttatcccacataactcttcccacataagcagattttttgcttctcttctttcttttgctttattgttcttcttctaacctaaattgctgtaactgataagcacctgtccaacacgtaccagttaattgtcaaatgttaacttcacaatgtgtttt

SEQ ID NO: 309834 - DNA, 517 bp, Homo sapiens
aataaataaagctccaagaattttattttgctattcactattttttatccaaattaggcttttctatacatattgcttagagaatatccaaactaaagttatcagcacgaaaatacacactattatgtctttaataataaatcaccaaattactcaactatttcaaatcagctcyttaaacaatattcccctggtccttttcagtgtttctgaggacctctaaggcaagggaaatttagaagctcggtaacagtggtgaataatatttcactgtgtgtcgtatatgccacattttgtttatccattaattgcttccggcttttgcctgctgtgaataacgctgctatgaacacgggagtacaaatatctgttcaaatccctgctttcacttttttaaggtatacacccagtagcggaatttctggatcacatggtaactctatgcttaattttttgaggaattgctgtaccattttccacagtagctgcatcattttacattaccccagcaatgcac

SEQ ID NO: 309835 - DNA, 585 bp, Homo sapiens
tggccaaaagatataaacacatatttcacaaaaaggatatgtgaatggtaaatgaccatatgaaaagatgttcaacaccagtagccagyagggaaatggaaattaagactacaatgacatattactacacacctactagagtagataaaatatatttttaaaatgtgacaatattaaattctgatgaggatgacaacctagatcttgtatacattgctggtggaagtgtaaaatgatatactcattctcaaaatagtttgacattttctttaaaatttaacaaaaacatgtacatgccatatacctagctgtcacatggctcttattcaaaacaaacacctaaacaaaacctgtacaagaatgttcatagcagctttatttttaataacccaaaactgaaaacaaccaaaactcctttaaaaggcaaatggctaagccaactgtggtatatccctgccgtaaaaacttattcagcaacttaaaaagaatgggcaaattcttctaattttggtctgtccttcaaggagcttagaaatcaccacatgatcctgacaacaaatgaaaagctaaatattttttttaaag

SEQ ID NO: 309836 - DNA, 581 bp, Homo sapiens
agcttagaaatcaccacatgatcctgacaacaaatgaaaagctaaatattttttttaaagtcaataaagctttttaggtatttcggagaagtragatcacggggcaaaccactgtgcccaaaattgaaggaacaggtaggtagacagacacacacaaaaaaacaccacttatcagagcaggtgtccccacaggaaccagttatcatagtaaggaaacctaaatggtaatggggcaactgctggaggctcaggatggacaagtctgagagttaaaatctccagggggactcagttatagggaaccctaatgcttttgtgggtttatttccaggagttataccagctcatcacagtgaatatcagagaaaaatcccctcctgctttgagcagaagaggggagaagtaacccctttgaaatatactagagcactctgttcttcttaagaaggccttccctcaggagaaactgtttttatcagagccttaatctgctagagctttaccagagtctaacccacccagggcaagtaaaacaccctactttagttacctctagcctactaagcggaggaagagaaata

SEQ ID NO: 309837 - DNA, 581 bp, Homo sapiens
agcttagaaatcaccacatgatcctgacaacaaatgaaaagctaaatattttttttaaagtcaataaagctttttaggtatttcggagaagtgagatcacggggcaaaccactgtgcccaaaattgaaggaacaggtaggtagacagacayacacaaaaaaacaccacttatcagagcaggtgtccccacaggaaccagttatcatagtaaggaaacctaaatggtaatggggcaactgctggaggctcaggatggacaagtctgagagttaaaatctccagggggactcagttatagggaaccctaatgcttttgtgggtttatttccaggagttataccagctcatcacagtgaatatcagagaaaaatcccctcctgctttgagcagaagaggggagaagtaacccctttgaaatatactagagcactctgttcttcttaagaaggccttccctcaggagaaactgtttttatcagagccttaatctgctagagctttaccagagtctaacccacccagggcaagtaaaacaccctactttagttacctctagcctactaagcggaggaagagaaata

SEQ ID NO: 309838 - DNA, 604 bp, Homo sapiens
ttacatgtgactgcaaagtgggcagcctgaagggraactttgtgttgaagaaatagttctataggttgattgtcatggtggttacctgaatttacactcacagagaaccacaagcacacactataccaatgccaaatcccttctttgatattttgttatagttacgtaaaatataatcactgtaggaaacttggtacaaggtacatagagctctctgtcctttttttatttttttttgctattctcgtgaatttgcaattatttcaaaacaaaaagtaaaaagaaaaaggtaatttctgactgtgtatttctgactactttcagtctaatgaaaggaaaaaaaaaagatataatttttaaaactctccttagaggtgttctgtttgcaggcgtgtcagaggtacccaagactattggtttgatgattccctagggggaattatcacagaatttagcacaagttttactcacagcaaaaggatacaggacaaaattaactagtagagaagttgtatcgagcaaatctggggaaagcagatagtttcccacgggtcctctcccagtggaatcacacagaatgtgcttaatttccccagcaagaaca

SEQ ID NO: 309839 - DNA, 583 bp, Homo sapiens
tacattggaaagaacaataggaaagttcacttgccagagtttggaagggaagtgtgctggagatagagggtctgtcaagccctgtgtatctggactcttagatctccagcctggcctgccagcctggatctagtatctagtctcagagaacatgaagtacttaggttaycacatttttcctgtttagggggtcacagctctgcctatagattctccagctcagacgtttgacattacaagcagctaacaatgctcacatatcatgctttaatagcacatttaggtaccatcctactatcctgtgtggaacactggaatcggtggctagagcatcttagagagctccatttgcacacaaagtgagtgcataagtcagggtaacgtcttggcaccccagtctaccctccatatcatttacatgtgacagggagagcaatgcagcaaccaccttaagattacacaacaaaggacaaacacagaatcctaatgaattgtgtaatgccaaaagccagtatttcttaagaagatttaagtcccagttaatttcttcacacctaatacagtgaagattagtttgaggcaa

SEQ ID NO: 309840 - DNA, 583 bp, Homo sapiens
tacattggaaagaacaataggaaagttcacttgccagagtttggaagggaagtgtgctggagatagagggtctgtcaagccctgtgtatctggactcttagatctccagcctggcctgccagcctggatctagtatctagtctcagagaacatgaagtacttaggttatcacatttttcctgtttagggggtcacagctctgcctatagattctccagctcagacgtttgacattacaagcagctaacaatgctcacatatcatgctttaatagcacatttaggtaccatcctactatcctgtgtggaacactggaatcggtggctagagcatcttagagagctccatttgcacacaaagtgagtgcataagtcagggtaacgtcttggcaccccagtctaccctccatatcatttacatgtgacagggagagcaatgcagcaaccaccttaagattacacaacaaaggacaaayacagaatcctaatgaattgtgtaatgccaaaagccagtatttcttaagaagatttaagtcccagttaatttcttcacacctaatacagtgaagattagtttgaggcaa

SEQ ID NO: 309841 - DNA, 582 bp, Homo sapiens
tgatcagcgcccagatctccccaagtcagcatgtcaggtgtgcgcctccacaacccataacaatcacaatggtgatgatggtgatggtggtgatgatgatgatgatgacgatgaatggttattgagtcctgaaaacaggccaggagttgcatttcactctcygagccacctcatttaactgaccaagggtgatgaggactcaggtgtcattcctgcacccaccaggcctcctgacaggagggaaggattaggacacacattccaagcacctgctgtgtaccaggcacatttatacaggttgactcccttaattctgtgggatctgcattaccattacccccattccacagaccagaaaactgaggctgggagcgtgaggtgaccggcctggggtcacacagccagtgagagacagagggtatcaggcactcaggtgtgtttggtgccaaataccaggctctgcccgtatctccatggggcgtttcctccaggtgtgagtgggaagaagattccacaaggctgctgccctgggtgggctgttggcacagagaacagggcaacagttggaggcagacgtctggg

SEQ ID NO: 309842 - DNA, 582 bp, Homo sapiens
tgatcagcgcccagatctccccaagtcagcatgtcaggtgtgcgcctccacaacccataacaatcacaatggtgatgatggtgatggtggtgatgatgatgatgatgacgatgaatggttattgagtcctgaaaacaggccaggagttgcatttcactctctgagccacctcatttaactgaccaagggtgatgaggactcaggtgtcattcctgcacccaccaggcctcctgacaggagggaaggaytaggacacacattccaagcacctgctgtgtaccaggcacatttatacaggttgactcccttaattctgtgggatctgcattaccattacccccattccacagaccagaaaactgaggctgggagcgtgaggtgaccggcctggggtcacacagccagtgagagacagagggtatcaggcactcaggtgtgtttggtgccaaataccaggctctgcccgtatctccatggggcgtttcctccaggtgtgagtgggaagaagattccacaaggctgctgccctgggtgggctgttggcacagagaacagggcaacagttggaggcagacgtctggg

SEQ ID NO: 309843 - DNA, 582 bp, Homo sapiens
tgatcagcgcccagatctccccaagtcagcatgtcaggtgtgcgcctccacaacccataacaatcacaatggtgatgatggtgatggtggtgatgatgatgatgatgacgatgaatggttattgagtcctgaaaacaggccaggagttgcatttcactctctgagccacctcatttaactgaccaagggtgatgaggactcaggtgtcattcctgcacccaccaggcctcctgacaggagggaaggattaggacacacattccaagcacctgctgtgtaccaggcacatttatacagkttgactcccttaattctgtgggatctgcattaccattacccccattccacagaccagaaaactgaggctgggagcgtgaggtgaccggcctggggtcacacagccagtgagagacagagggtatcaggcactcaggtgtgtttggtgccaaataccaggctctgcccgtatctccatggggcgtttcctccaggtgtgagtgggaagaagattccacaaggctgctgccctgggtgggctgttggcacagagaacagggcaacagttggaggcagacgtctggg

SEQ ID NO: 309844 - DNA, 539 bp, Homo sapiens
tggatttgtgctttatccttgtttctctgctccgggtgtctggggaggatttatggaggaaacaacataatgagacctgagtracttagagcttggggacgtcgaccacagcatcttcagagggaaggaaattcagatggcaatcgtcccagtggatgacttcacgtggtttccctggggaagccccacccccagctgctccttcccgaggccctacctgcccttccaggcccagcccagtcctgcctctcccaggagtctcctctgagctcctgggtcacagggaagggtctcctcacagctcctgaggcagctctgcccgcccacccactggggttcatttctggccagagctcctccctcctccccagggcctcctgtggggtcctcagagagctgcttgtcccccaaagctgtccttggtgtcttcttagctgaggacggagtgttaaacacatcacagacaggaccatagtatcccacactacgccataaaaggagagttacaactttcaacctctgtaaatatttaaaagtaa

SEQ ID NO: 309845 - DNA, 539 bp, Homo sapiens
tggatttgtgctttatccttgtttctctgctccgggtgtctggggaggatttatggaggaaacaacataatgagacctgagtgacttagagcttggggacgtcgaccacagcatcttcagagggaaggaaattcagatggcaatcgtcccagtggatgacttcacgtggtttccctggggaagccccrcccccagctgctccttcccgaggccctacctgcccttccaggcccagcccagtcctgcctctcccaggagtctcctctgagctcctgggtcacagggaagggtctcctcacagctcctgaggcagctctgcccgcccacccactggggttcatttctggccagagctcctccctcctccccagggcctcctgtggggtcctcagagagctgcttgtcccccaaagctgtccttggtgtcttcttagctgaggacggagtgttaaacacatcacagacaggaccatagtatcccacactacgccataaaaggagagttacaactttcaacctctgtaaatatttaaaagtaa

SEQ ID NO: 309846 - DNA, 639 bp, Homo sapiens
gctggggtgcaaattcacacatccccaccaatgtgcctgtgtgcatgcccaagcacacagccacagggacactggtagacatacacatgtgagcacaaacccacatgtgtgtgcaaagcctgtctacaacacatgcctgtacctgcacacacgtacactccaccacatacgtacacacgcagagcctttcccgccatctcacccacaggcgcacaccccctgaaacagctgaatgcaaatgccccactctctacacagaccccacagacacaggccacatcactcattccgagaccagacagcctgggtccaacccccagcttcaccacttctgaacctgtgatttgggtcacgtggtttaacccttgtgagcctcagtttcctccaacctaagaaataatctcagataaagccgtcatgggggttgcgtgagttaatgcayggaaagtgcttagaagaatggctggcaagcaacaggcatgagacaaatatgagccccaagcacacagccccagtgcatgtccacacgcttccacatatgcacacgtgggcacccacatgcatgcacctgcgtggatacctggcccaggcaccacacacggagatgaacattcacatgtatacgaataggttaggccc

SEQ ID NO: 309847 - DNA, 634 bp, Homo sapiens
gggaaagagacaggggacagatggaggggcaagagggcaggggtcccaacctgcacagaggagcaaacctgcaccagattgaaacgtaagctgaatgtaattacttggttaattaaatactgacttttaactcaaaaagtgattaaaacaagctgcagaaagactgtccagaagcggggcagggaatgaatcaaagctttcaagaagagggaggaggaagagagggtygtcacaggcaggtctggcttgctcttcctactgtgtactgggcctactgcatgcagggggtgtggtctttggtctctgagcaggtgaggaattttggactgaggccaacatgcaaagtaggatttcagacttcttatatctttccacttcagaccccatctcttttcccagttgtctgagagtaccaggagctgctggtgcctaggaaccgggtcctgttcatccacgtttccttggaacagaatgcagtacccggcacgaggaggtgctccagaaatgcttgcagaacaaatgaacaaatgactacacagtagtattatgcacatgtgtgttccgatgagcacgtgtgcgcgtgtgtgtgtgttcactgtaggcaggagctgtgggtcatgtgttgtaggctggt

SEQ ID NO: 309848 - DNA, 580 bp, Homo sapiens
gtgctatatggatggttacratcttataaaggttacaaatcaggaccaggcaaatgaagaggcacaaagggtgaggtctgggatgatctcaaacgtagagttcccatattcttccctcgtggaatcaggatgcatccccctccatacacatcaatatgtccaccaatcaccttcctccgctggggacagaggtagacagtggctgacagggaatgcggggaggaaggagcctacatgagcctcagtcttgctcagctcccccagacaggtgagagacaatgacatttcaagtacatggcgtgcctggaaatgaatgacagattcctcctgaaacctggaactgctcacaagctgctctcgtgtctcagggcttgggccaggccgactttgacatttaccgcttacctcttcatccctcctccctcctttcttgttttcttcttaggcctgtgttcccacactgcaaagagaaggcagtaaatgcccatctaatttatcagggcagtaaaaagtattgggattcatgaccagaggattgttccggaataaaaattgtgcagctcacctcacctttccttgc

SEQ ID NO: 309849 - DNA, 595 bp, Homo sapiens
ttcacgtctatcagttacaaaggttattgcagtcctatttgtatgtctcactgaagggacttgtgtaccagtattcttttctttgttaataacaatgaagttcatcgtccttgttttttaggaagtagttaaatagtaggtattaaatatacctctttgcatttaaaaggatccatgcacttatgtctgctaccttcacctcatagcagtgaggtaagaagctatttcatacacagtgagtcttatgaaaaaatgctttaggtaagtagatgttgccttgagtattatggttttagaaaaattacaattaaagcagtggagatggagtatgagaggagataatatttaactaagtgataatttattttgttgaaaactcaaaaccccattagagatttccacaaagtttcacactcctaatgattctaacttttcacactgagggaaaaagctcttgtttaggaatttgacartagagcgttgaaaggtcatttgtcagcagggtcactaagttgcagaacttgttaagaaagctttatactgcttagccacacattgttgctgtctcaaatcccaggggcagaaagcaaaaaca

SEQ ID NO: 309850 - DNA, 540 bp, Homo sapiens
cagttagggtcttgctctggattaggctttggcttaaggggatgttgtggctgtttgattttcacttcaggccactaaaaatttctccatgtcagcaataaggctgctttgcttttttattattcatgtgttcactggagtagatttttaatgtcctttsagaacttttcctttgcatttataacttggctaattgtctggcacaagaggtataggttttagcctatcttggctttcaacatgttttcctcaataagcttaatcacttctagctttggatttaaaatgacatatatggaattcttctattcacttgaacacttacaggccactgtaaggttattagttggcctaatttcaatattgtgtcttgaggaatagagggccccaaggagagggagagagacaaggaatggccagtcagtggagccagtgtgtcagaatacacacatttattgattaagattgatgtcttatatgggcacagtttgagatgccccaaaacaatgacaatggtaacatcagggattactgatcaca

SEQ ID NO: 309851 - DNA, 506 bp, Homo sapiens
tacatcaactcatatttcattcgccaaaaaaagtcaaattgaccatctatatctaaatgtgtttgagaagtgcaattctcttatggaaggcaaaggagtactggaaaatttggtgaacaacaattatatctactacatgttaaaagaaagagttaattcgaatgtgcaatttaaaaagtcagcttgcaagatatttaacagcttaacattactattttgaaaaaaatgcgggatttttatattatatgtatatatayactcacacacacatatatacacatacacatatatatccacacgtatatgtgtgtatgtatgtttgtatgtaggtatgtgacattatattcactctactggtaacttctcaatgatttatcacccactctactgatacctagaactcataaggatctcagtaaactggtttaatcaaatactatagttgggaacattttaaaatattttttctttatgattttataaaacatccttaatctctatttaga

SEQ ID NO: 309852 - DNA, 592 bp, Homo sapiens
ttcttaggagagtatgtctcctaaaaccttctgtagggatctctatgtcatatattacacatttcatcatagagagacaaaaatttttacttgataaaaaaaaataaagtaattggatactttttatgagaaattgtaaaggagcaaatgcatagcattgcaaaatgagcaagcttagttctttgtgtgaatgtagttttccagaacttgtgtgtatgctattagtaagtagagtttgtaagtcattttactagcctgtgttctaactcttctcaactatttccaagaagtgagacattttaaatctctttgaatttatttagattttagttgtcttctaaacagcagcaatatgtgtgtgtgtgggggggtcaatttcaawttttttttttttctaactgtattgtagtgatttaaggaagcaccttcaatgcatatgaataatgaagttctaaaaagcactgttattgctgcacaaagggaaacattgaggactagaagaattagggaattgggatagactctggctgcatctaatgatgtggagaactggtgctgttccttgatgatcaacttagtataaataaaagcc

SEQ ID NO: 309853 - DNA, 621 bp, Homo sapiens
ataaataagaagtagcagaactggaaatccagcagagattgtgtttttccaaaagctgacatgctgcccatgtctccawtttttttgcatgcgaaagacctaaagagtgacatacaaagctttaatatagagacttttgaaaaactctgttatttaatggctttttttctctatattctttctgctaagaaatcctggaggatggaatctaccaaatgtttgacctttgaaatgtaggtttaactgaatttgctttttctacacttctttacttgctttcccatttatgaacatgtaaaattctgcctccatgcaattttcattgaagaaacagctaactgaattggatttctgatttataaagcaagtcctttatgttcttcaaagagcttaccccaaaggaccaactgataacatagccctgttgtaaaataattcattataaaggtctgaaacaggagctttccaccctatcagctagacgcatgtgccctagtgatattatccctctcgggaggttttgagcatctttggttcattttgctctatagcttttaccatgcaatctgtatttgtgttttcataactgcctcagactatactattgcctccagagacaat

SEQ ID NO: 309854 - DNA, 538 bp, Homo sapiens
ttggggatcttttcctctaccttattatttttaatccaaaacttgacttaccctctgaggataccaccttcctatagccctcttcttccaagttatgcctggttttctcatatccacatatctgagggccaagactctcattgccactgtcaggtcagtattcctacatgctctttaaataaaaagcctccttggatgtttgtgcattatactacagttggataawcacaagggctctgaaatctgactctctagactcatatccaagctctctgcctcttattagccctgaaaccttcatcaagttattggaccaccctatgccttcatgtcttcattttataatgtgaaaaataatattacctaattcataggatttttgagaatattaatgaaataatacatgggaagcatttaaagttgtgtttcacatattatgttatacccaacatgttagatattattattagtattaattagctataaaattgttttcccttacttatttaccaacaaacaggaaattcgctgattcatg

SEQ ID NO: 309855 - DNA, 470 bp, Homo sapiens
tagcaagtgattatgtcactcaaagcaaaagtatctttgaccacaacttggatttcaaattaacaaatttcatttttgctaaatatcagtgtgatgattggtcaatgttctaacctgtgttgacaataaagggcagtgttatcttctcctaatgtaagtggaagcatagtactcatgatgtacacatccatgacacttcaatactgtttcttttcaaagatactcaaagtgcttgacctacttatcatcctaagagcaagaattgagagagaccaagtgttattggtcatatttaaaatgtaaagaaatttaagcaaaaaaacttacttgatttatctaaagatgcgtaaaaagcaaatggtagaactcagatgaaagctgattctcagattcccagccttttctattgaattttttttttttaccaaasatgatatttccttccactgtaattgtcatttaagatgatt

SEQ ID NO: 309856 - DNA, 591 bp, Homo sapiens
ttctcaaacattattgactccaaaaaaattaagttaccttttacattaccctcatgcacatattttactgaaacaaaagttttaccaaacaatattttttagctataatgcactctattatttgtatccatttctttctattatatttacaaaaaaaaatacttggcaattggttcactaaattgatttcatgaccctttaatgaatcagaacccacagtttgaaaaacattggtgtagttagtggttaagagttcatgctctgaagttgacaaaaatgaatttatatcttgagacaaccatcggctgactrtatataaactttggcatacttgacctctgtatcacagtttcttcatctaaaatgttaagcaataatagtattttctttatgtcattgatataacgaccaaattacaaaatgcgtatgaagtacttagaccagtgcctgagactgatagaaatgatttttattattgacacttttgtgaatattatttgttgtatatacaggtctttttttcttactagaatactattttccagtgtcccacacccatattttatgggtaattccacctcattctcaaag

SEQ ID NO: 309857 - DNA, 591 bp, Homo sapiens
ttctcaaacattattgactccaaaaaaattaagttaccttttacattaccctcatgcacatattttactgaaacaaaagttttaccaaacaatattttttagctataatgcactctattatttgtatccatttctttctattatatttacaaaaaaaaatacttggcaattggttcactaaattgatttcatgaccctttaatgaatcagaacccacagtttgaaaaacattggtgtagttagtggttaagagttcatgctctgaagttgacaaaaatgaatttatatcttgagacaaccatcggctgactgtatataaactttggcatacttgacctctgtatcacagtttcttcatctaaaatgttaagcaataatartattttctttatgtcattgatataacgaccaaattacaaaatgcgtatgaagtacttagaccagtgcctgagactgatagaaatgatttttattattgacacttttgtgaatattatttgttgtatatacaggtctttttttcttactagaatactattttccagtgtcccacacccatattttatgggtaattccacctcattctcaaag

SEQ ID NO: 309858 - DNA, 623 bp, Homo sapiens
ctcaattcatactgaaggtatgtggtgtagaataccttctgtgaagacagggtgtttaccatagcactagtgttaagtacatttgggccaggtttactaagcttcaggcaggttcaaaattcaactgcaatatrctggggcaagaggcagccaaggaatgtctgagtggtaagaaatggcctctaaatttacaattgactgaataatctctacatttaagaatcatcaatgtaacacaatggggttagtgtcataaattacaaagtaatttgttgaggtgatattcagacttattttacatttctatggattcctatttcaatgatgtttatttaaagaagataaaatatagactagcagtaattgatattgggtataaatttcccccagtatgtttgaattttacatccctgtccttgcaataacagcggttcatactcaatcaacattttggagtgcattactgcattaattgcattgttttaccctaagttaaaaatacctatatttttatagtgagctatataaatgattgaatttaaaaatgtgttcatttataatcagacttgtggattttaactgctatcttcatatatgtgtatatacaaaaaaacacaaataag

SEQ ID NO: 309859 - DNA, 623 bp, Homo sapiens
ctcaattcatactgaaggtatgtggtgtagaataccttctgtgaagacagggtgtttaccatagcactagtgttaagtacatttgggccaggtttactaagcttcaggcaggttcaaaattcaactgcaatatgctggggcaagaggcagccaaggaatgtctgagtggtaagaaatggcctctaaatttacaattgactgaataatctctacatttaagaatcatcaatgtaacacaatggggttagwgtcataaattacaaagtaatttgttgaggtgatattcagacttattttacatttctatggattcctatttcaatgatgtttatttaaagaagataaaatatagactagcagtaattgatattgggtataaatttcccccagtatgtttgaattttacatccctgtccttgcaataacagcggttcatactcaatcaacattttggagtgcattactgcattaattgcattgttttaccctaagttaaaaatacctatatttttatagtgagctatataaatgattgaatttaaaaatgtgttcatttataatcagacttgtggattttaactgctatcttcatatatgtgtatatacaaaaaaacacaaataag

SEQ ID NO: 309860 - DNA, 544 bp, Homo sapiens
tgtatagtaaatacatatttacagattctatgtatatatggtatctatttataatatatatccctatgtaatccgtaaatatataatctataaattatgtaatatatcaaatatacttttgagtaatagctaagatcaacayatgtcccattatgatccaagtcctgcccatctcttcaaactccctcacactacttttcactttattgctaactttggtaaatatggccagctttcttttgtttactagaagacaatgccccctgtatttgctcagcattctatgctttctactctgtcaggagcagttcctctgctcttcttgtagctggtcctttctctgatcatccattcttaagtagattcttcttgctatactctaggacagcaactttttttcttcttagcacttaggacaaactgtaatgatttcaattatttgtttcaccacataccatttccccaattagaatgtaagcttcttaaggatagtcacctggcatgtcttgttcactgtgtatttaataaggtactggctgttcag

SEQ ID NO: 309861 - DNA, 544 bp, Homo sapiens
tgtatagtaaatacatatttacagattctatgtatatatggtatctatttataatatatatccctatgtaatccgtaaatatataatctataaattatgtaatatatcaaatatacttttgagtaatagctaagatcaacacatgtcccattatgatccaagtcctgcccatctcttcaaactccctcacactacytttcactttattgctaactttggtaaatatggccagctttcttttgtttactagaagacaatgccccctgtatttgctcagcattctatgctttctactctgtcaggagcagttcctctgctcttcttgtagctggtcctttctctgatcatccattcttaagtagattcttcttgctatactctaggacagcaactttttttcttcttagcacttaggacaaactgtaatgatttcaattatttgtttcaccacataccatttccccaattagaatgtaagcttcttaaggatagtcacctggcatgtcttgttcactgtgtatttaataaggtactggctgttcag

SEQ ID NO: 309862 - DNA, 544 bp, Homo sapiens
tgtatagtaaatacatatttacagattctatgtatatatggtatctatttataatatatatccctatgtaatccgtaaatatataatctataaattatgtaatatatcaaatatacttttgagtaatagctaagatcaacacatgtcccattatgatccaagtcctgcccatctcttcaaactccctcacactacttttcactttattgctaactttggtaaatatggccagctttcttttgtttactagaagacaatgccccctgtatttgctcagcattctatgctttctactctgtcaggagcagttcctctgctcttcttgtagctggtcctttctctgatcatccattcttaagtagattcttcttgctatactctaggacagcamctttttttcttcttagcacttaggacaaactgtaatgatttcaattatttgtttcaccacataccatttccccaattagaatgtaagcttcttaaggatagtcacctggcatgtcttgttcactgtgtatttaataaggtactggctgttcag

SEQ ID NO: 309863 - DNA, 638 bp, Homo sapiens
attccctcttctcctttcctaatctctggcttaaacggatttggaagagagagagagagagagagagagagagagagagagagagagwgtgtgtgtgtgtgtgtgtgtgtgtgtttgagagagaaagtatgtgtgtgtctgtgttggggataggctatccagattatggcagaatagttcatgtctgagcttctctttaaaaggtgtgaagtgctgtgactctttttcctttgctgtgagccctagtcatcaattccatagcaacaggaaatatcatgttcactgtgcactagtatatggatgaatcagtaagctcctgaaggggaatagaagagagaggtgtcaagttaggttgagttagatcacaatcaaattttgaaactagtccaggagtttcttatataccaaaagcgaatggaagaatactataatctctttacattaatttggataacttcagtgctaaattctgaaatacaggtattttgctatttttgtgatggttaaatcaaaagaaagttatttctgtcttgttctgaagcagaagtggctttccaataaagtgagttctgaaaagatcacatgtccttcgacaaaggtgtgatatctttacatgttgttgtaggagttcagataca

SEQ ID NO: 309864 - DNA, 624 bp, Homo sapiens
tctagtaacataaattttgtttaccaataatgaagacctttgtctttatgaagattacaagtatcctgtgatttatttaaccagtaactctgtatttaagtaaaaacttgtttattttcaattaaagaggttaatatcacctttattttttagtcgcatttttatgtatattgmcctgaggtaaaattacatctacacagaaagtaagatttaatgactaatccatataaacaattaaatacttttgcatcaggagctaaatcattagttttaaacaactgttcaagaatcataaagccattgagatcaaagccagaatggtttgtgtgatcattcctgtttttgtcatgttactcaatagtaaatgccaagagttcctggaatgtttattagccaaataactagtgaaataatataatcattttaaaatctgatgtcaattattattttaaaaagttttatccagtacccaattatattctgattcactttgccaaaatccttaagagtcaaatagtcattctagaaagatgactgaaatcatagagcatttagcaaggctttgttgatacatgaatggatgaatgaaatgaaagaatgaatgaatgaaaggacccctggtaa

SEQ ID NO: 309865 - DNA, 564 bp, Homo sapiens
tgtagccaagacagaacatacacttatgcttagaacaagagtattctaaacatataaatcattaatagtcaattcaatcttattcctttattatgaaaatacaaacattaaaagtgatatccagctggaagctctccagtcttttcctccaattcttcttcagtcttccccaaagagaaaggaatgataatctgattgctgaatgtcamtttgggcagccttaggctttgtatggaaaagaagagacctctctagcttgtgctccagctcatgatctcttccctgctctcttgccacatgagagaaatggcaggtcctacatgtgaaatttcctatttatgaatagagctattctatttctctttgtcttttctacgataattttctccatttttttgtcattagttctaaatcctgtataatcttgattgccttatctgtacatgtttataggtacaaatttttctttcagaaacaattgatgaaaaacacaatactttatatttggtcttagccatcaaagagaatcaaggaactcttagttttcaatatagagttataaaa

SEQ ID NO: 309866 - DNA, 619 bp, Homo sapiens
tctcattgcttctagataccatgccattcctgacatttgatactttttgatttctgttttcttccaatttttctgtaacttttatgtttacctcaatcagcttatattttatttggtaacactgtgataatggtctaaatttacctttactttttttaaaaaaaagataaccagtttttcaaacatcatttattcaataattaataatcctgtccttccaaacttgtcaagtccttaataatatatgactttccagtaagtgaagccatttctagwctatttattcttttccattgatttgtctgttaattttaaccattaccagcatttaaacatttttatggacttctcatatttgaaaattttttgccgttgacttttaggactataggaaagttaaaaattaagtgtgtgtgtgtgtgtgtgtgtgtgtgaagaaattaatcaaagtaatgtgaagaagtggaactggtagagtcaatgtataaacttgatgtaattgtattttccaaatactgataagatccttagagactgtttttcttcaaccgattaaaactcccaacagagaaatttatcctgtacattgttgattattatctgtgaaactttgaatgat

SEQ ID NO: 309867 - DNA, 541 bp, Homo sapiens
aaattgtttaatttggatttggtatgcaattgtttaagaaaaatgatcatctcttcgttttaatgaatacttccagatagttggcttttagtgttggtacaggaaatatcagcttagtctcagcttctctgttaataaaaaatgtgtaaaattcaaatttttggtaatttaagcacatttgtactgagtcataatcactaatcactttggcatcttaggaagattaaacattgaatctgatgataaaataaaatgtgttaggattaactgccagatatttgggccaatagctcttgggtcctgaaaaatgacttgattcsaagggcttaagtcattggtaattagtgggaggaggatagttgtgagccagtttcctttttccttcatcctgtttctctccatttcatttaaaggacttgaaagtgttcacatggtctctttaggtcttctgcaaggtaagaatagattttaaggtaataatgcatcagaataatgctgagagaagtaattcatattagtgaagccaaaagtttaccttaca

SEQ ID NO: 309868 - DNA, 580 bp, Homo sapiens
gaattcatgcaattgaataacaataaagcaatctgattttaaaatggccaaaggacctgtatagacatttctccaaagaagacatacaaatggccaacaggtacatgaaaaagtgttcaaattcactaattgtcaggattttcaaatttttcataaaaatttcaawtattcatgaagttaataacagtgtaatgagcctcgatattcccatcactcaaattcaacgagattttgccacactgactatcctttttcatttattattgttaaatttatgagaactaaatgaaactgagggcatgcaatacttagcggagttcctggtacagagtgaatgcataatatgcagtttctatttaaagttattcatccataaaatagggataatattacctaatacggagtaatttttgaaaaattaaatcccaaaaaagtagaggtggcagttctttttaatttgaaaagtgaaataacatggcacagataattagtatgattaaagaggatcactgttaatcacagaaaaggagaagcaaataatagtatatctctatgcctgcaacaaagaggagagtgttct

SEQ ID NO: 309869 - DNA, 557 bp, Homo sapiens
aaaaaaaaataagccttttctaggcttaatttttataatttttataatataataaaattattaaatctgccaaataacagaaatactttcccatgttagcactttaaatatttttaattctttatatatttgagacttatagagtgaaacaaaaatacaaagaaaaattttattagttgaatcaaagccttaagttcatgatttgtaaggggagraagcacaaaaaagtatctgactttttgatagacttgacacagaagtcaatggagacttgcagtttacgtcagggtttctcaatcttggcattgtttacatttggagacagacaattctttgtcatggggggctgtgcattgtaggatgtgtagcagtatccttagtctctacccactagatgccagtagcactcccccaccccactcccagtttgtaacaaccagaaatgtctccagacactgccaaatatcccttggaggacaaaattgctcctgagtgagaaccattggtctatagttatgtatttttttatacacaaaggaagaagtatgttggaagcg

SEQ ID NO: 309870 - DNA, 573 bp, Homo sapiens
tctagtagtggtgtcaagaagatggtggaataggagttctttggcttcaccctgcaacctcagaaatccaactagcaactatccacagtcaaggctatcattgtaaataccccagatcttagaaatcagactgatacactctcttagactatagaaccaagaaagctgctattgaatgataaaatgaatagctctctttgactgtgctacccctcctccaagctggcacagcaccagataattcctctggactctcggtttctacaatgggaaaagtgagttggaggcagacattctgctcccccactgttctagaactgttcaygtgaggctaactcctgtctcattccaaaagaagcattagaaatactagcagggctagactccctggggtcagttagaaaaaaaaatgaaagtggggctcacagtgaccaatgcacagttcttggtggtttttctacattccagccaacagcaatgccaccccaaataaccagccaatagcattgcgctgaaggaaacatggttcaggggtcttttagaattaaacgcctaaccaattttcccacagag

SEQ ID NO: 309871 - DNA, 573 bp, Homo sapiens
agctccgtccggagaaatgactttaaagccagtgaggaaagccaataacagatctaccaaaaaggctcttgtatatttttcatccttcccttycaagaaaaaataatgactaatataattttgtttaaaataacagtaattttatttattttaatttaaagtatcttatgaaattttatccttgctacagatataaatctgcaaagagtcacaaaaaattcactgatgctgtattagaaggaagtcttttccttggctgaagtcagtggtagaggatgttcaaaggtcttatagataattaatgttactctaacacaaatccagaggtcagaaaatcactcattaatttaaccatatactagttgaggctgaaagtgctttcttctttaatgtatctaccatctttgaaaagctcttcaacaaatgccaatcctgagaataaagaaaacttcaacacgtatcacagccctgccaagaatgcttgtgggatgctattttgatcatttctccaccttttaagtggaatccaaaagaagattttcaaacaaagaatcttgttttgaaggttttatt

SEQ ID NO: 309872 - DNA, 573 bp, Homo sapiens
agctccgtccggagaaatgactttaaagccagtgaggaaagccaataacagatctaccaaaaaggctcttgtatatttttcatccttccctttcaagaaaaaataatgactaatataattttgtttaaaataacagtaattttatttattttaatttaaagtatcttatgaaattttatccttgctacagatataaatctgcaaagagtcacaaaaaattcactgatgctgtattagaaggaagtcttttccttggctgaagtcagtggtagaggatgtkcaaaggtcttatagataattaatgttactctaacacaaatccagaggtcagaaaatcactcattaatttaaccatatactagttgaggctgaaagtgctttcttctttaatgtatctaccatctttgaaaagctcttcaacaaatgccaatcctgagaataaagaaaacttcaacacgtatcacagccctgccaagaatgcttgtgggatgctattttgatcatttctccaccttttaagtggaatccaaaagaagattttcaaacaaagaatcttgttttgaaggttttatt

SEQ ID NO: 309873 - DNA, 573 bp, Homo sapiens
agctccgtccggagaaatgactttaaagccagtgaggaaagccaataacagatctaccaaaaaggctcttgtatatttttcatccttccctttcaagaaaaaataatgactaatataattttgtttaaaataacagtaattttatttattttaatttaaagtatcttatgaaattttatccttgctacagatataaatctgcaaagagtcacaaaaaattcactgatgctgtattagaaggaagtcttttccttggctgaagtcagtggtagaggatgttcaaaggtcttatagataattaatgttactctaacacaaatccagaggtcagaaaatcactcattaatttaaccatatactagttgargctgaaagtgctttcttctttaatgtatctaccatctttgaaaagctcttcaacaaatgccaatcctgagaataaagaaaacttcaacacgtatcacagccctgccaagaatgcttgtgggatgctattttgatcatttctccaccttttaagtggaatccaaaagaagattttcaaacaaagaatcttgttttgaaggttttatt

SEQ ID NO: 309874 - DNA, 531 bp, Homo sapiens
taatggacatgtgtatttccatctgccccgtattctgcatcctttcactggataacagcaggcgctttgctcacattttttcagactatataattctggtgagctgtcacaattccctgcacacctgaccacaattctccaacaagtgttggacccatgacccaagcctgagcaattagaatcttctggagttttagatatggtcaatgggagcaaagagctctctcatgcttctctgagctctagctaaggtaatgttagcccccaccatcaccttctctgccctcctggaggtagccatctgtattaggagagaataagccaataattcctaagaaacagagccaagatgtgagagagatagggagagtaggagmgtcagtaacactgtttgagtccctggatggagtctcacttcagactagatttcagtttgtctttttattattattattgtggtaagaatacctaagatgaaatctacccttttgcccagttttgaagtgtacaatacagtgttgttaaccatag

SEQ ID NO: 309875 - DNA, 531 bp, Homo sapiens
taatggacatgtgtatttccatctgccccgtattctgcatcctttcactggataacagcaggcgctttgctcacattttttcagactatataattctggtgagctgtcacaattccctgcacacctgaccacaattctccaacaagtgttggacccatgacccaagcctgagcaattagaatcttctggagttttagatatggtcaatgggagcaaagagctctctcatgcttctctgagctctagctaaggtaatgttagcccccaccatcaccttctctgccctcctggaggtagccatctgtattaggagagaataagccaataattcctaagaaacagagccaagatgtgagagagatagggagagtaggagcgtcagtaacactgtttgagtccctggatggagtctyacttcagactagatttcagtttgtctttttattattattattgtggtaagaatacctaagatgaaatctacccttttgcccagttttgaagtgtacaatacagtgttgttaaccatag

SEQ ID NO: 309876 - DNA, 436 bp, Homo sapiens
ccctctcaacattctgtagagactgaaagtgtggttaaaatgaacatctaagagaccatagttgtccccgtgagttaatctcctagcaagatgtatcaattcctcagcctatgaatgtaagattcatctctctagagtaccacttcgatcgtatccatccctataatgaaaatattcagcagtgccctcttcttcatcagagtaaatctaaattacttgtatatttaaaacagaaacactgatggagattcaaaaygaataaactatcacaagtgcatgaaaagagagtcataaagaaaaaattctcaagaaattcagaaattctagaggtcatagaaagatattttagttatgcttgaaacaataaaacaaacaaaaaaaaggaacaatgtaaagtaatttggaaaaatcagacccactcaacaaagagtttgta

SEQ ID NO: 309877 - DNA, 598 bp, Homo sapiens
cccatctgggggaagcgctaatcagccccccaatttgcatatatgcaaacaaggctccactgtggacagtgcaattagcattgcctaatgcctggccaggccacgaggattggctgtggggcttgggattttatctgttgggctcagagcccggctccttctcagctgaggcctggttgggtggatgatgaagtcccagattgagccaaggccatctgggaaggggcagggagggccgagggccagggaagacttcctgggtcttgtatcctaatcttcattttgggcagggggagaagaaccatcaggtgatcaagtaagggtagaacatctgaccatcacagctccaataatgtggcaaaggcggaacaagccagggcgttgagtcagagaggcctgagttctaatcccggttggaccagttaattgaccactctgggcctcagtcttctcatctgtaaaatggagaygagcctcctacataggctgttgtgaggattaaggcctttataggtgctagtcatagagtagttgttcattaaatggagtccccttgtcctgatacggattgctagagaaagagaagcacgtgcttgtt

SEQ ID NO: 309878 - DNA, 628 bp, Homo sapiens
tttgctttttgcagcaccagacatggcaccrgccaggcctggtgtttatgagggcttttgggaaggtttatgaggctccagtttgggcccttccttctggatcccaccagtccagggctgggggaggtgggggcagatgaagctggaaaagctgtttgtttgtgggtttcctcttcctcttcttgagatcttaggctgttcctggggcaggggatccctcataacttgtctgggaagagataaagagacatgtgggttcccaactcatgtggtctcatgcatttcccttctaccccgggactgagtttttgcatgtataaaataggagtgtttgaagtaattactgtgcagggttgttgtgaggatacatgctcagcacagtcagcagacagaataggtaggaacctctccactctttctcacgccctaggaaaggcaggtgggccgccagccgcactttgcacctagaactttctgggatcctgtagcaataacaaacaacatcttctcaatgtctacatcagaaccaggtactatgctaagcccgaaagcccttcattgtacttactctgcataataacctcaggaggtgggtgttgtcatcgtctgcattttacagatgacaaaa

SEQ ID NO: 309879 - DNA, 628 bp, Homo sapiens
tttgctttttgcagcaccagacatggcaccagccaggcctggtgtttatgagggcttttgggaaggtttatgaggctccagtttgggcccttccttctggatcccaccagtccagggctgggggaggtgggggcagatgaagctggaaaagctgtttgtttgtgggtttcctcttcctcttcttgagatcttaggctgttcctggggcaggggatccctcataacttgtctgggaagagataaagagacatgtgggttcccaactcatgtggtctcatgcatttcccttctaccccgggactgagtttttgcatgtataaaataggagtgtttgaagtaattactgtgcagggttgttgtgaggatacatgctcagcacagtcagcagacagaataggtaggaacctctccactctttctcacgccctaggaaaggcaggtgggccgccagccgcactttgcacctagaactttctgggakcctgtagcaataacaaacaacatcttctcaatgtctacatcagaaccaggtactatgctaagcccgaaagcccttcattgtacttactctgcataataacctcaggaggtgggtgttgtcatcgtctgcattttacagatgacaaaa

SEQ ID NO: 309880 - DNA, 628 bp, Homo sapiens
tttgctttttgcagcaccagacatggcaccagccaggcctggtgtttatgagggcttttgggaaggtttatgaggctccagtttgggcccttccttctggatcccaccagtccagggctgggggaggtgggggcagatgaagctggaaaagctgtttgtttgtgggtttcctcttcctcttcttgagatcttaggctgttcctggggcaggggatccctcataacttgtctgggaagagataaagagacatgtgggttcccaactcatgtggtctcatgcatttcccttctaccccgggactgagtttttgcatgtataaaataggagtgtttgaagtaattactgtgcagggttgttgtgaggatacatgctcagcacagtcagcagacagaataggtaggaacctctccactctttctcacgccctaggaaaggcaggtgggccgccagccgcactttgcacctagaactttctgggatcctgtagcaataacaaacaacrtcttctcaatgtctacatcagaaccaggtactatgctaagcccgaaagcccttcattgtacttactctgcataataacctcaggaggtgggtgttgtcatcgtctgcattttacagatgacaaaa

SEQ ID NO: 309881 - DNA, 495 bp, Homo sapiens
cagttcaaccaaaggtcaacagcagcgtttccccagcagctgacaggtcaaatgggcaggaaacaactgcggggaacaaagccccccgctgtccggcaggggygaacccggctcctccgcactgaacagttttgttgtgctttttggaggggagaggtttccgccccctttccagctcccttcctcccgggtggacaggtcggaagaggagcggaaaggaaaggaagggagggaggcggcgaaggcgctgcgggggggaggagcggctctttgatgggtgtgggggggtctgaactgcctaccgggctcggaagcgcagaccctacccgcgcggaagaatgcgcggaatgcggcggcgggaggcggaggcgcacgcgcggcgggggcgcccggaccccacgcgccctgcccgctccctagcccgagggccgcggacccaccctgccctgcaggtgtggcgggcgccaggtccctccagggactcggacagcacgc

SEQ ID NO: 309882 - DNA, 495 bp, Homo sapiens
cagttcaaccaaaggtcaacagcagcgtttccccagcagctgacaggtcaaatgggcaggaaacaactgcggggaacaaagccccccgctgtccggcaggggcgaacccggctcctccgcactgaacagttttgttgtgctttttggaggggagaggtttccgccccctttccagctcccttcctcccgggtggacaggtcggaagaggagcggaaaggaaaggaagggagggaggcggcgaaggcgctgcgggsgggaggagcggctctttgatgggtgtgggggggtctgaactgcctaccgggctcggaagcgcagaccctacccgcgcggaagaatgcgcggaatgcggcggcgggaggcggaggcgcacgcgcggcgggggcgcccggaccccacgcgccctgcccgctccctagcccgagggccgcggacccaccctgccctgcaggtgtggcgggcgccaggtccctccagggactcggacagcacgc

SEQ ID NO: 309883 - DNA, 596 bp, Homo sapiens
gactcactgacttttcttaaaggatgtgactctccttactgggcaaatgataagtttgtgtctgtaattgagactgcactggttatctttgttccgtgacatgaccacattctatattttcttgatattccagccaaggagttgcttttgaatgttttcagcgttccatctgttctcttgcagtgatccctcatcttcttttatacattcatttaacaaatactcagacattattttttgtttttgtttctttgagacagggtctcactctgtcacccaggctagagtgcagtggtggtgtgcttatagctcatagctcattgcagcttcgaattcctgtgctcaagccatcctcccacttcagccttctgagtagctaggactaccaacaagcaccatcatactcagctaatttcttttttttatagagatggggtcttgctatgttkcccaggctagtctcaaattccttggctcaagtgaaccttctgtctcagactcccaaagtgctggggttataaacatgagccaccacacctggctgagccattgttattccactaggctctgttatttgcactgggttgtggtattga

SEQ ID NO: 309884 - DNA, 640 bp, Homo sapiens
ggcattattatgtgatattatccaaaatatctttgatattactgctaatatcacagtgaatgtacaccctgtgatattattcataatattgtcaatattactgcaaatatcacagtgggtgtgcacacactgtgtgtacttttaatatcacagtgggttttcctcatgtgtgtacaccttgtgatattattcataatatcttagggagatattactcttaatatcacagtgggtgtacactctgtgatattaggagtaatatttccctagaatgtacacctgatatacatgcactgtgatattaggcataatatctgcctagaatattaccagtaatatcacagggtgtacacacactgtaatatgaggagtaatatctttctaggaatattatgagtaatatcacaggctgtacactcactgtgatattaggagtaacatctttgtaagatattacaagtaatattacagggtgcacacacaaggtgtacaccaactctgatattaaaagtattatctccctaggatattatragtaatattacaggatgtacacccacagtgatactaggagtaatagctccctaggatatcatgagtaatagcacagggagtacacacatgatgtaaaaacactgtg

SEQ ID NO: 309885 - DNA, 642 bp, Homo sapiens
tacttgtacttttaaaaagaatattgtggaagtatcaactatatcaagatgtaaaatattacgcctccagaatcttcccttatgcctctactcagtcactgggcctctcagaaatgtaatcagtattctggcatctaacaccataatagactctgcttgtttttgaatgtcatcagtgcgcaatattctatttgtaaattttttaacgaatcaagatctatgaggtttatctgtgttgtacgtagtcgcaggttgttatttcttattgctgtatagtattcaattgtgagaataattagaatttatgtatccatcccactttgtcattttagtgttgtggtaattttgatcatttatactttaggtgccatgaatattgcttctttaaatattcttatctttggtgacatatatcaagatttttctgggtatatatctaggaattcaattgatgagtcataagtatacatatgttggtggatactactaaagaatttcaaagtggttgtaaaaatgtatgctttcaccagaagtatatgagagtttctgttactgtatattcctactaacacttggtatttcatytttatttaattttagccattcaaatattgttacaataatatttcattgtgactttgt

SEQ ID NO: 309886 - DNA, 563 bp, Homo sapiens
acgccattcactctttatgtccagctctccttaatctagttatccattcattcattcagcaggagacaaactcatcttatttttatagtatcaagtctgagacttcagtggttctcatttttttctttttctttttctttttttttttttaacttcttaatacattccctatcattgccttcctgttacaactgagattctttatccattcagtagaaagaactrgatataaaccaatttttaaaaactaaggtaatgttttgtttccttgtgaaacataaattctaacgggggagagagtaagacaataaatgattaaattttatagtctgttatggaggcataaatgctacattaggatggagtaaggaaaattgagagtcgggggaaaggtacaaaacatttttaaaaacgattttggtgttaatgattaagagaggtttcatctgagcaaaactttgacaacagtattgtgggattcagccatgagcagatgttgtgagaaagaacatcccaggcagacagaagccagagaacacttggaggccagtgtggaagcctgt

SEQ ID NO: 309887 - DNA, 563 bp, Homo sapiens
acgccattcactctttatgtccagctctccttaatctagttatccattcattcattcagcaggagacaaactcatcttatttttatagtatcaagtctgagacttcagtggttctcatttttttctttttctttttctttttttttttttaacttcttaatacattccctatcattgccttcctgttacaactgagattctttatccattcagtagaaagaactggatataaaccaatttttaaaaactaaggtaatgttttgtttccttgtgaaacataaattctaacgggggagagagtaagacaataaatgattaaattttatagtctgttatggaggcataaatrctacattaggatggagtaaggaaaattgagagtcgggggaaaggtacaaaacatttttaaaaacgattttggtgttaatgattaagagaggtttcatctgagcaaaactttgacaacagtattgtgggattcagccatgagcagatgttgtgagaaagaacatcccaggcagacagaagccagagaacacttggaggccagtgtggaagcctgt

SEQ ID NO: 309888 - DNA, 556 bp, Homo sapiens
tactgtgactaccacataattgattttggggtatctgtacttacttagattacctatgtttctgctaattctttgtctcttagcagccatctaaggggattagcactaaaaataaacatatgccttgaggtagaaagtctggtgatggagaaccttctcaccctttcaagtttccccacttactctctaagatattggtttctgcatttgtttgcctcaacctttcccctattgcttccaatcatgtcttatgtttgttttgctttccaacttttctaattgttcttggtgattgctttggcttattgcargattctccaacagagcttaactccattgtcctttaaattaatcgttaatatagcagcaacgtctacttaaaattgtaatataaaggcccagcattgatgattgcaagataatcctgttcatctcttattttgatggattttttcagataaccactgtaagcactaaacattagctttgactgagatttcaaattaatgcatctttcacaaacgttatttaaaatgaagtaattgagacaatgcct

SEQ ID NO: 309889 - DNA, 556 bp, Homo sapiens
tactgtgactaccacataattgattttggggtatctgtacttacttagattacctatgtttctgctaattctttgtctcttagcagccatctaaggggattagcactaaaaataaacatatgccttgaggtagaaagtctggtgatggagaaccttctcaccctttcaagtttccccacttactctctaagatattggtttctgcatttgtttgcctcaacctttcccctattgcttccaatcatgtcttatgtttgttttgctttccaacttttctaattgttcttggtgattgctttggcttattgcaagattctccaacagagcttaactccattgtcctttaaattaatcgttaatatagcagcaaygtctacttaaaattgtaatataaaggcccagcattgatgattgcaagataatcctgttcatctcttattttgatggattttttcagataaccactgtaagcactaaacattagctttgactgagatttcaaattaatgcatctttcacaaacgttatttaaaatgaagtaattgagacaatgcct

SEQ ID NO: 309890 - DNA, 578 bp, Homo sapiens
atgattgcaagataatcctgttcatctcttattttgatggattttttcagataaccactgtaagcactaaacattagctttgactgagatttcaaattaatgcatctttcacaaacgttatttaaaatgaagtaattgagacaatgcctattcatatgatataatttgtaaggaattaagtgaaagatgactcttccatttctcagaaatgtttttctaaggggaaaataagatgtcttacattaatatacatgtaacatattttaatcatcgatagattaatgttccaatctaagcaaacaaataacttttgccctaaaatgattagagtataataaaaataaaagaatgataacaaattcacaaatatgagcataattttcttctggattttatgttttattcacataatgaaattattattaaaattaaaattattattaaaaataaaaataaaaattttactaagatgccttctcatgggaagacttaattcagtattatagtactgaaaatygaaattagatcccttccactgaggcaaatacagtccaactctaacttatttaaaagcatct

SEQ ID NO: 309891 - DNA, 624 bp, Homo sapiens
tgatttacagaaataatttagtcacttccctcagagatttatcagactttttccaaaactactgtagtttttcatattttcatagatattttatatctaaacacattgtcagagtgctggaaatattttctgtccttccctggttccttcgtttttctttctctttctttcactctttctttctgagactattttaaaatacatccagaaattcttcaatatttccattttcatatgtgggaatgtaatctgcctttccctaagtgtgaactggtcttaataacttgcttctaatagatagaagaataaagcagaaatagcatgcatttttacttgaaatcactccggttatatatatttgtgtgtgtgtgtgtccatgtayatgtacacattactctatgtatacaaacacttttacaaattttaatactgtaatatttttgatagtgtccttttagtttttaaaacattaaacaatattttaacttatgaaagaatttttattatttaatatgtatacagacttctaattcttttagattatcataaaactatagaaatattttaataaaaattagtttgatatattatgacttatatgagagtttgtaaatgttttcagtc

SEQ ID NO: 309892 - DNA, 624 bp, Homo sapiens
tgatttacagaaataatttagtcacttccctcagagatttatcagactttttccaaaactactgtagtttttcatattttcatagatattttatatctaaacacattgtcagagtgctggaaatattttctgtccttccctggttccttcgtttttctttctctttctttcactctttctttctgagactattttaaaatacatccagaaattcttcaatatttccattttcatatgtgggaatgtaatctgcctttccctaagtgtgaactggtcttaataacttgcttctaatagatagaagaataaagcagaaatagcatgcatttttacttgaaatcactccggttatatatatttgtgtgtgtgtgtgtccatgtacatgtacacattactctatgtatacaaacacttttacaaattttaatactgtaatatttttgatagtgtccttttagtttttaaaacattaaacaatattttaacttatraaagaatttttattatttaatatgtatacagacttctaattcttttagattatcataaaactatagaaatattttaataaaaattagtttgatatattatgacttatatgagagtttgtaaatgttttcagtc

SEQ ID NO: 309893 - DNA, 624 bp, Homo sapiens
tgatttacagaaataatttagtcacttccctcagagatttatcagactttttccaaaactactgtagtttttcatattttcatagatattttatatctaaacacattgtcagagtgctggaaatattttctgtccttccctggttccttcgtttttctttctctttctttcactctttctttctgagactattttaaaatacatccagaaattcttcaatatttccattttcatatgtgggaatgtaatctgcctttccctaagtgtgaactggtcttaataacttgcttctaatagatagaagaataaagcagaaatagcatgcatttttacttgaaatcactccggttatatatatttgtgtgtgtgtgtgtccatgtacatgtacacattactctatgtatacaaacacttttacaaattttaatactgtaatatttttgatagtgtccttttagtttttaaaacattaaacaatattttaacttatgaaagaawttttattatttaatatgtatacagacttctaattcttttagattatcataaaactatagaaatattttaataaaaattagtttgatatattatgacttatatgagagtttgtaaatgttttcagtc

SEQ ID NO: 309894 - DNA, 570 bp, Homo sapiens
attatgtgggaataagaatgtttttagtttattccactttaatacattctattttatcttatttgccattttattgtaatttataatgacatttcataatactaagtttagygttatgaaatgccattcataagactaaaactaatgtaatttaccaagatggtttcaagcaggaaaacaaaatctccagaaatatctggttccaaagcactttttaaaatatttacctatgcagtaagtaagtcacatatattatgacataagcagcggtgtgcttcaagaagaatatattatcagaatttaaatttagaacatacattcaatacatcttcctactgaagttcaaatgtattggttaccatgcaaattaaagttgtattttctccacttagcttgatggtgtaatttacacattttaaacagacagtctcaatgaaactactttagcctgcaatcaatgttctcatggagttataaaacctagacaaaaatcatatggaaatcttaccagttaattagttagttgctaatctggaccaaagaaaaatagcacatcttcaaaaggctaat

SEQ ID NO: 309895 - DNA, 586 bp, Homo sapiens
gtcaatacaagtacagctaaggaaaatactttccatcccacaagactctactgtaagaaaactcactattgccacactattccttttggaacataagatgctatagaccaaacattcacccttcaccakaattgactaagaggaaacaaatagctctaacaatatgcttaaaagaaatatacatctccaaattcacatccagttccaagttgctaatttcttcatttcacattttatgttggggctactgcttggtttaacctagaccacatctacatccttagtcacaagagaccctgagaaatacaacttccctggaagagaaggtcgaagggcaatggaatagatattgagtaaacaatccttagaacacactttatttttgtgaaaactcaactctgcctctttgaatactcaacatccatggatataatcaatcatacaaaaaaaaataatagcaacaaatctatgttcttgcctaacataataaaattttccttcataaaaatgagatgtacttgcacttcttcctaaattaaagagataatattccagtggtcactatctttgtctctagctaatgttc

SEQ ID NO: 309896 - DNA, 563 bp, Homo sapiens
acagtctggtattgagttactgtggcttttccaggtgcatggtgcaagctgttggtggatctaccattctggggtccggaggatggtggcccttttctcacagcaccactaggcactgccctagtggggactctgtgtggggacttcaaccccacatttcccttctgcactgccctaacagaggttcttcaagagggctccacccctgcagcatacctttgcctgtatatttccatacatcctctgaaatctaggtggagatttccaaacctcaattcttgacttctgtgcacctacaggcttaacaccacatggaaattgccaaggcttggggcttgcaccctctgaarcaatggtccaagctgtgccttggccctttttagccatgactagagtcgggggatgcagggcactaagtccctaggctgtacatagaagggggccctggaccctgcccatgaaaccatttttttcttctaggctccaggcttgtgatgatgggatgggctgctgccaaggtctctgacatgccctggagatattttccccattgttttggtgat

SEQ ID NO: 309897 - DNA, 629 bp, Homo sapiens
tctgcttgtctgtagcttgtttttcttactttttaaaactttatggaaatattaccatataagtctccataatacactaatcaaacattattactgaatgcataatatcctacgttttgtatagttttatgtygttttaactatggtttttattaacaagcattcacattatttatattttgggttttttctgttataaaaatactataaaaatacaagtattctcttatgtacaaatatacaaatatatatactgtgtcattatagaacttatgaagtttatatctatcaatcaatatcttataacagatgttatcagattgctttctaaaattattgaatgattcacatttttaacaaagtatgtaagcacaaatttttattcagtccctggaaggaataaatatcatctgtcccatgtttggcaatatgatgggtataaagtgttatactagtgttttttttatttttcatatttgtgattaccaatatttttgaaaattttctatcatggtttttatctatttataattcctgttctttgacctgtctttttatgtccttttcctattttcaatgggtaaaattgaatttttttcatgattcctaaatgcccttttaatattaca

SEQ ID NO: 309898 - DNA, 629 bp, Homo sapiens
tctgcttgtctgtagcttgtttttcttactttttaaaactttatggaaatattaccatataagtctccataatacactaatcaaacattattactgaatgcataatatcctacgttttgtatagttttatgtcgttttaactatggtttttattaacaagcattcacattatttatattttgggttttttctgttataaaaatactataaaaatacaagtattctcttatgtacaaatatacaaatatatatactgtgtcattatagaacttatgaagtttatatctatcaatcaatatcttataacagatgttatcagattgctttctaaaattattgaatgattcacatttttaacaaagtatgtaagcacaaatttttattcagtccctggaaggaataaatatcatctgtcccatgtttgrcaatatgatgggtataaagtgttatactagtgttttttttatttttcatatttgtgattaccaatatttttgaaaattttctatcatggtttttatctatttataattcctgttctttgacctgtctttttatgtccttttcctattttcaatgggtaaaattgaatttttttcatgattcctaaatgcccttttaatattaca

SEQ ID NO: 309899 - DNA, 576 bp, Homo sapiens
tagaagagatggtaatattggatttagaaaagcaaaatccaatgatatgcttcttatatgaaactactttaaatataaagtaagttaaaaggaaaatatagaatattataggccatgcttacattaataaaaaataaactatcattattaacgacaaaaataagattaggagcaaacaaataatgttagggaggggagggctattgcataatamataaggagccaattaaccaatcagatttatacaccttaatgcagatcatcaaaagacataaagcagaatctggtagatcttctgtctctaccaataatagacaacttcacagttatagtcaaagattttaactcttacaaaaattaccaactatatagaatacttaaatagtatgataatctaaagtggtctaatttatccagaaataacagaatatagttttcttaagattccatgaacaatttatcaaagtgaactatatttttatggaccataatatacatctcaataaatttaaaatgatttaattcatgcatgaatgctctctgaccaaaatagaattaaattggaagtcaataaca

SEQ ID NO: 309900 - DNA, 460 bp, Homo sapiens
gtgggttttacctttagtgggcttgttaccaggagcacatgtggttgtgagttctgttrggtttttgggcaggctggattgtcttcagggctttgttttgtgaagcaggcactagggcaggttctgctatatgctgggcctaatagcagatgtgtgggtgagtgtggctccactgtgtacctagcaggtgttcccaggttatctacaaacagtgacttttgagctgttttgtgtgagtcacgagtatgatgtccccagcttttttcttattcctcatgattggcttggccattcagcctacattgtaggcgtgcattttctattactataaaaagtgggacagggattttgatacggatttgagttaacttacagattgttttggataatatgacaccttattaaccaaagggcctggcttctcaaaatgactcttttctatcttgggttttagcgaggt

SEQ ID NO: 309901 - DNA, 460 bp, Homo sapiens
gtgggttttacctttagtgggcttgttaccaggagcacatgtggttgtgagttctgttgggtttttgggcaggctggattgtcttcagggctttgttttgtgaagcaggcactagggcaggttctgctatatgctgggcctaatagcagatgtgtgggtgagtgtggctccactgtgtacctagcaggtgttcccaggttatctacaaacagtgacttttgagctgttttgtgtgagtcacgagtatgatgtccccagcttttttcttattcctcatgattggcttggccattcagcctacattgtaggcgtgcattttctattactataaaaagtgggacagggattttgatasggatttgagttaacttacagattgttttggataatatgacaccttattaaccaaagggcctggcttctcaaaatgactcttttctatcttgggttttagcgaggt

SEQ ID NO: 309902 - DNA, 600 bp, Homo sapiens
tatcataacgtttctgtgaggaaatagtattcgatattacatttttagactcttttataatgttctgtttttttccaccgagcacagtactaagtagtaattggaaaatcacagaataagtcatattactttttctaatacagagtccttggctgttctctaagctaatcctgatcacctacattgagaaaaagaaaaaaccccagagtgtgaggagacaggagatagtagccaaacatccaaataggtgggagtgaataaggcagatgacacagacgagatgtccaaaagtcaaggagaaagccagatsttaaagtgtggtttgtgaagctatgctccaatggaaaccttttctgcaaagccctgatttctttctcttgcttttattagagactgacatcctctgccccatgctcttcaattttctaggactggacttccccttcaacgatcgttcttccaggttacaaagaaaatcaaagccctttgcatggcttacaagggactggaggacctggctgcttgctcttttattccttttgaggacatggggccgtctgtgatttttaaggaactctatgttaaacattttctaatttc

SEQ ID NO: 309903 - DNA, 600 bp, Homo sapiens
tatcataacgtttctgtgaggaaatagtattcgatattacatttttagactcttttataatgttctgtttttttccaccgagcacagtactaagtagtaattggaaaatcacagaataagtcatattactttttctaatacagagtccttggctgttctctaagctaatcctgatcacctacattgagaaaaagaaaaaaccccagagtgtgaggagacaggagatagtagccaaacatccaaataggtgggagtgaataaggcagatgacacagacgagatgtccaaaagtcaaggagaaagccagatgttaaagtgtggtttgtgaagctatgctccaatggaaaccttttctgcaaagccctgatttctttctcttgcttttattagagactgacatcctctgccccatgctcttcaattttctaggactggacttccccttcaacgatcgttcttcyaggttacaaagaaaatcaaagccctttgcatggcttacaagggactggaggacctggctgcttgctcttttattccttttgaggacatggggccgtctgtgatttttaaggaactctatgttaaacattttctaatttc

SEQ ID NO: 309904 - DNA, 597 bp, Homo sapiens
ccctgcgtacgaataaacgtacagaaatacatttgttggctatttgattcatagactttgaacatttgcagaccgagaggctgagaatcttctccaatcagacggtgtggggcgtggaagtacagaaagggatcaaaggaggaggaaaacagagcaatgagaagggagctctcagcaygaccaacacagagacctgggtctctgctaccaacaatatgagctaatgtataatgattgcaggtctgtaaacagcaggctttccatatcacatgtggcaagctctgatgacaaccctgtgtgacaggtattcttatcagaggcagagagttgttaaataatcacacacaactggtggaatgccggagagatttgttttacttggtcatcttcctgtttgctttctatttgtcccatctatagttggttctccttttcctctttgacttcttttgaatttgttgagtatttttatttcatttaatcttctttgttggccttttacatataactatttggcttcgtttggttttgagttttaaccatttctctatagtttatggtatatcatatggtttggatctgtgtccccacccaaat

SEQ ID NO: 309905 - DNA, 597 bp, Homo sapiens
ccctgcgtacgaataaacgtacagaaatacatttgttggctatttgattcatagactttgaacatttgcagaccgagaggctgagaatcttctccaatcagacggtgtggggcgtggaagtacagaaagggatcaaaggaggaggaaaacagagcaatgagaagggagctctcagcatgaccaacacagagacctgggtctctgctaccaacaatatgagctaatgtataatgattgcaggtctgtaaacagcaggctttccatatcacatgtggcaagctctgatgacaaccctgtgtgacaggtattcttatcagaggcagagagttgttaaataatcacacacaactggtggaatgcyggagagatttgttttacttggtcatcttcctgtttgctttctatttgtcccatctatagttggttctccttttcctctttgacttcttttgaatttgttgagtatttttatttcatttaatcttctttgttggccttttacatataactatttggcttcgtttggttttgagttttaaccatttctctatagtttatggtatatcatatggtttggatctgtgtccccacccaaat

SEQ ID NO: 309906 - DNA, 597 bp, Homo sapiens
ccctgcgtacgaataaacgtacagaaatacatttgttggctatttgattcatagactttgaacatttgcagaccgagaggctgagaatcttctccaatcagacggtgtggggcgtggaagtacagaaagggatcaaaggaggaggaaaacagagcaatgagaagggagctctcagcatgaccaacacagagacctgggtctctgctaccaacaatatgagctaatgtataatgattgcaggtctgtaaacagcaggctttccatatcacatgtggcaagctctgatgacaaccctgtgtgacaggtattcttatcagaggcagagagttgttaaataatcacacacaactggtggaatgccggagagattkgttttacttggtcatcttcctgtttgctttctatttgtcccatctatagttggttctccttttcctctttgacttcttttgaatttgttgagtatttttatttcatttaatcttctttgttggccttttacatataactatttggcttcgtttggttttgagttttaaccatttctctatagtttatggtatatcatatggtttggatctgtgtccccacccaaat

SEQ ID NO: 309907 - DNA, 597 bp, Homo sapiens
ccctgcgtacgaataaacgtacagaaatacatttgttggctatttgattcatagactttgaacatttgcagaccgagaggctgagaatcttctccaatcagacggtgtggggcgtggaagtacagaaagggatcaaaggaggaggaaaacagagcaatgagaagggagctctcagcatgaccaacacagagacctgggtctctgctaccaacaatatgagctaatgtataatgattgcaggtctgtaaacagcaggctttccatatcacatgtggcaagctctgatgacaaccctgtgtgacaggtattcttatcagaggcagagagttgttaaataatcacacacaactggtggaatgccggagagatttgttttacttggtcatcttcctgtttgctttctatttgtcccatctatagttggttctccttttcctctttgacttcttttgaatttgttgagtatttttatttcatttaatcttytttgttggccttttacatataactatttggcttcgtttggttttgagttttaaccatttctctatagtttatggtatatcatatggtttggatctgtgtccccacccaaat

SEQ ID NO: 309908 - DNA, 480 bp, Homo sapiens
tgtgtttatggactggaagataaaatcttgtcaaggtgccattgttatctatggtcatctacagattcaataawatcactgtaaaaattccaatatatgtaaaaacagaaaaacctattctaaaattcagatgaaatctcagaaaaccccaagcagccaaatcaatcttaaaaactaacaaagtaagaggactaacacctcctggtttcaaacttcagtacccaaaataatgctgtaccagcatagagacagacacaaagaccaatgcaatagaaacaaagaaccaaaaaatatggtcatgatttttaacaagggcgtcaactctgttcaatggggaaaggacggtatttttttaaatggtgttaaaaacggatatttacatctatctatctatctatcatctatctatctatcatctatctatctatctatctatctatatcccaaattacctttttgtctgtcatttatgttgcagat

SEQ ID NO: 309909 - DNA, 480 bp, Homo sapiens
tgtgtttatggactggaagataaaatcttgtcaaggtgccattgttatctatggtcatctacagattcaataatatcactgtaaaaattccaatatatgyaaaaacagaaaaacctattctaaaattcagatgaaatctcagaaaaccccaagcagccaaatcaatcttaaaaactaacaaagtaagaggactaacacctcctggtttcaaacttcagtacccaaaataatgctgtaccagcatagagacagacacaaagaccaatgcaatagaaacaaagaaccaaaaaatatggtcatgatttttaacaagggcgtcaactctgttcaatggggaaaggacggtatttttttaaatggtgttaaaaacggatatttacatctatctatctatctatcatctatctatctatcatctatctatctatctatctatctatatcccaaattacctttttgtctgtcatttatgttgcagat

SEQ ID NO: 309910 - DNA, 480 bp, Homo sapiens
tgtgtttatggactggaagataaaatcttgtcaaggtgccattgttatctatggtcatctacagattcaataatatcactgtaaaaattccaatatatgtaaaaacagaaaaacctattctaaaattcagatgaaatctcagaaaaccccaagcagccaaatcaatcttaaaaactaacaaagtaagaggactaacacctcctggtttcaaacttcagtacccaaaataatgctgtaccagcatagagacagacacaaagaccaatgcaatagaaacaaagaaccaaaaaatatggtcatgatttttaacaagggcgtcaactctgttcaatggggaaaggacggtatttttttaaatggtgttraaaacggatatttacatctatctatctatctatcatctatctatctatcatctatctatctatctatctatctatatcccaaattacctttttgtctgtcatttatgttgcagat

SEQ ID NO: 309911 - DNA, 539 bp, Homo sapiens
tgtcaccattctgctcaccgcctctgttttgtaatagcctggaggctgccccaggacagaggccccaaacagtttagttttactttcttcagcgatcctctgactcttaactgactgcytgtttaatttgccactggtccaagtgacactgaaaaaaagaattgtctcgggacctagtatttttgtaccttaattatcagaaaagatcagcagtaacctcgccatcattatgactagaagttgaaatgtggtatttaagagctctacatgataagatcagatatgcctgtttagtgacagcctcttttatgacaaccctctgcaaacaattaccctcaagatggagaacatgagactttttcttaacagttttctctcatttcttaaccataacgccatctttgatcagctggtatagggcagctggaccctactttctaaacccagcatgtcacttttttcctgagagagttttgtcatttttgtcatagcagtgtgaaaatggactaatacattacaatatacaagttacagccttc

SEQ ID NO: 309912 - DNA, 539 bp, Homo sapiens
tgtcaccattctgctcaccgcctctgttttgtaatagcctggaggctgccccaggacagaggccccaaacagtttagttttactttcttcagcgatcctctgactcttaactgactgcttgtttaatttgccactggtccaagtgacactgaaaaaaagaattgtctcgggacctagtatttttgtaccttaattatcagaaaagatcagcagtaacctcgccatcattatgactagaagttgaaatgtggtatttaagagctctacatgataagatcagayatgcctgtttagtgacagcctcttttatgacaaccctctgcaaacaattaccctcaagatggagaacatgagactttttcttaacagttttctctcatttcttaaccataacgccatctttgatcagctggtatagggcagctggaccctactttctaaacccagcatgtcacttttttcctgagagagttttgtcatttttgtcatagcagtgtgaaaatggactaatacattacaatatacaagttacagccttc

SEQ ID NO: 309913 - DNA, 539 bp, Homo sapiens
tgtcaccattctgctcaccgcctctgttttgtaatagcctggaggctgccccaggacagaggccccaaacagtttagttttactttcttcagcgatcctctgactcttaactgactgcttgtttaatttgccactggtccaagtgacactgaaaaaaagaattgtctcgggacctagtatttttgtaccttaattatcagaaaagatcagcagtaacctcgccatcattatgactagaagttgaaatgtggtatttaagagctctacatgataagatcagatatgcctgtttagtgacagcctcttttatgacaaccctctgcaaacaattaccctcaagatkgagaacatgagactttttcttaacagttttctctcatttcttaaccataacgccatctttgatcagctggtatagggcagctggaccctactttctaaacccagcatgtcacttttttcctgagagagttttgtcatttttgtcatagcagtgtgaaaatggactaatacattacaatatacaagttacagccttc

SEQ ID NO: 309914 - DNA, 539 bp, Homo sapiens
tgtcaccattctgctcaccgcctctgttttgtaatagcctggaggctgccccaggacagaggccccaaacagtttagttttactttcttcagcgatcctctgactcttaactgactgcttgtttaatttgccactggtccaagtgacactgaaaaaaagaattgtctcgggacctagtatttttgtaccttaattatcagaaaagatcagcagtaacctcgccatcattatgactagaagttgaaatgtggtatttaagagctctacatgataagatcagatatgcctgtttagtgacagcctcttttatgacaaccctctgcaaacaattaccctcaagatggagaacatgagactttttcttaacagttttctctcatttcttaaccataacgccatctttgatcagctggtatagggcagctggacyctactttctaaacccagcatgtcacttttttcctgagagagttttgtcatttttgtcatagcagtgtgaaaatggactaatacattacaatatacaagttacagccttc

SEQ ID NO: 309915 - DNA, 467 bp, Homo sapiens
agaaaattctcctagcactccattgagaaaattctgcctcatttcaccacacacctgagtcttaagcagtcmcttctaatgtagctgaataatagatcctcacccagctgagtctatgagttgagtccatgtatgtgagataaggcccccaagtagaggtaataagctgggaaagccatcagctcatctttcttcaggtctatatttgtcattgtcacttgtagaagcaggacagccctggcattgggattggtagtaacagagagtatcaaagggaaaactgaacttccctaatttttggaaaaaagcagattggaaacagatgggctccaaagttttccatgtgtgaggtcattgtcccaggtagtcttgctcaggacatttcttgtcagcaaaacagaagtcaaacgatatttctaccttccaagagaatagaacataatgtcagattttctcatggattccca

SEQ ID NO: 309916 - DNA, 467 bp, Homo sapiens
agaaaattctcctagcactccattgagaaaattctgcctcatttcaccacacacctgagtcttaagcagtcccttctaatgtagctgaataatagatcctcacccagctgagtctatgagttgagtccatgtatgtgagataagrcccccaagtagaggtaataagctgggaaagccatcagctcatctttcttcaggtctatatttgtcattgtcacttgtagaagcaggacagccctggcattgggattggtagtaacagagagtatcaaagggaaaactgaacttccctaatttttggaaaaaagcagattggaaacagatgggctccaaagttttccatgtgtgaggtcattgtcccaggtagtcttgctcaggacatttcttgtcagcaaaacagaagtcaaacgatatttctaccttccaagagaatagaacataatgtcagattttctcatggattccca

SEQ ID NO: 309917 - DNA, 467 bp, Homo sapiens
agaaaattctcctagcactccattgagaaaattctgcctcatttcaccacacacctgagtcttaagcagtcccttctaatgtagctgaataatagatcctcacccagctgagtctatgagttgagtccatgtatgtgagataaggcccccaagtagaggtaataagctgggaaagccatcagctcatctttcttcaggyctatatttgtcattgtcacttgtagaagcaggacagccctggcattgggattggtagtaacagagagtatcaaagggaaaactgaacttccctaatttttggaaaaaagcagattggaaacagatgggctccaaagttttccatgtgtgaggtcattgtcccaggtagtcttgctcaggacatttcttgtcagcaaaacagaagtcaaacgatatttctaccttccaagagaatagaacataatgtcagattttctcatggattccca

SEQ ID NO: 309918 - DNA, 467 bp, Homo sapiens
agaaaattctcctagcactccattgagaaaattctgcctcatttcaccacacacctgagtcttaagcagtcccttctaatgtagctgaataatagatcctcacccagctgagtctatgagttgagtccatgtatgtgagataaggcccccaagtagaggtaataagctgggaaagccatcagctcatctttcttcaggtctatatttgtcattgtcacttgtagaagcaggacagccctggcattgggattggtagtaacagagagtatcaaagggaaaactgaacttccctaatttttggaaaaaagcagattggaaacagatgggctccaaagttttccatgtgtgaggtcattgtcccaggtagtcttgctcaggacatttcttgtcagcaaaacagaagtcaaaygatatttctaccttccaagagaatagaacataatgtcagattttctcatggattccca

SEQ ID NO: 309919 - DNA, 536 bp, Homo sapiens
cctcagaagagacaatacattttaaggcaagaagcatgaggggaaattcaaccccttattgccaaattcttgccatatgagttattaaggccatgagagtctccttacaatactcgcatgttaccagattaaaagcctaatggcaagtacagatctgtcagaaccctwagagcattaagaaatgcagttgtcttcgtacacttcattgtcccaaatacttaccaagtcccaggggatgcaagctggtttacattcttatatctgaaagatgcacttttctggatctcaatgcatccagattcataatatgtttgcctttgaatagaatgatccagatacgcattcagcctcaaaactaacctggacagtcatctctgaagggttctggggtagaccctgcttatttgaaaatgctctagttaaggacttaacaaatctacaattggaaagggacacaattattcagtacgtaggtgacttgcttattgctaacccaactaaagaagactcataataatactgttaagttggtaaat

SEQ ID NO: 309920 - DNA, 600 bp, Homo sapiens
tgcagttgtcttcgtacacttcattgtcccaaatacttaccaagtcccaggggatgcaagctggtttacattcttatatctgaaagatgcacttttctggatctcaatgcatccagattcataatatgtttgcctttgaatagaatgatccagataygcattcagcctcaaaactaacctggacagtcatctctgaagggttctggggtagaccctgcttatttgaaaatgctctagttaaggacttaacaaatctacaattggaaagggacacaattattcagtacgtaggtgacttgcttattgctaacccaactaaagaagactcataataatactgttaagttggtaaatttcctgggaacttgcagatatagggcatcaccacacagggctcagattttgactgaaagacttaaatatttggaatctgtcttaacctctggaactgatcaacatccctagaagacaaaaaagttattttagtcacccaatggtccctgtccaaataatgactgtgggcttttttaggagatggctgggtactgctgcttatgggtgcccagatttggccatgtagccaagcctttatatgataca

SEQ ID NO: 309921 - DNA, 323 bp, Homo sapiens
ataatatgtttgcctttgaatagaatgatccagatacgcattcagcctcaaaactaacctggacagtcatctctgaagggttctgggrtagaccctgcttatttgaaaatgctctagttaaggacttaacaaatctacaattggaaagggacacaattattcagtacgtaggtgacttgcttattgctaacccaactaaagaagactcataataatactgttaagttggtaaatttcctgggaacttgcagatatagggcatcaccacacagggctcagattttgactgaaagacttaaatatttggaatctgtcttaacctc

SEQ ID NO: 309922 - DNA, 323 bp, Homo sapiens
ataatatgtttgcctttgaatagaatgatccagatacgcattcagcctcaaaactaacctggacagtcatctctgaagggttctggggtagacccygcttatttgaaaatgctctagttaaggacttaacaaatctacaattggaaagggacacaattattcagtacgtaggtgacttgcttattgctaacccaactaaagaagactcataataatactgttaagttggtaaatttcctgggaacttgcagatatagggcatcaccacacagggctcagattttgactgaaagacttaaatatttggaatctgtcttaacctc

SEQ ID NO: 309923 - DNA, 323 bp, Homo sapiens
ataatatgtttgcctttgaatagaatgatccagatacgcattcagcctcaaaactaacctggacagtcatctctgaagggttctggggtagaccctgcttatwtgaaaatgctctagttaaggacttaacaaatctacaattggaaagggacacaattattcagtacgtaggtgacttgcttattgctaacccaactaaagaagactcataataatactgttaagttggtaaatttcctgggaacttgcagatatagggcatcaccacacagggctcagattttgactgaaagacttaaatatttggaatctgtcttaacctc

SEQ ID NO: 309924 - DNA, 323 bp, Homo sapiens
ataatatgtttgcctttgaatagaatgatccagatacgcattcagcctcaaaactaacctggacagtcatctctgaagggttctggggtagaccctgcttatttgaaaatgctctagttaaggacttaacaaatctacaattggaaagggacacaattattcagtacgtaggtgacttgctyattgctaacccaactaaagaagactcataataatactgttaagttggtaaatttcctgggaacttgcagatatagggcatcaccacacagggctcagattttgactgaaagacttaaatatttggaatctgtcttaacctc

SEQ ID NO: 309925 - DNA, 459 bp, Homo sapiens
gagaacatttatgaaagtatcaggccttattgctggaccctccagacataatccttaaagcctgccaaaccataaacccagctgcttatctgccagagtccacaggtacttctagcctttctggcatacaggttgtattagtctgttctcatgmtgctaataaagacatatctgaggctgggtaatttataaagaaaagaggtttaattgactcacatttccacgtggtcagggattcctcacactcattgcagaaggcaaatgaggaacaaagtcacatctcttacatggcagcaggcaaaagggcttgtgtagggaaactcccctttataaaaccatcagctgtaatcccagcactttgggaggccaaggcagtggatgagctgaggtgaggagatcgaggacaccctggccaacatggtgaaaccccatctatactaaaagtacaaaaattagaca

SEQ ID NO: 309926 - DNA, 459 bp, Homo sapiens
gagaacatttatgaaagtatcaggccttattgctggaccctccagacataatccttaaagcctgccaaaccataaacccagctgcttatctgccagagtccacaggtacttctagcctttctggcatacaggttgtattagtctgttctcatgatgctaataaagacatatctgaggctgggtaatttataaagaaaagaggtttaattgactcacatttccacgtggtcrgggattcctcacactcattgcagaaggcaaatgaggaacaaagtcacatctcttacatggcagcaggcaaaagggcttgtgtagggaaactcccctttataaaaccatcagctgtaatcccagcactttgggaggccaaggcagtggatgagctgaggtgaggagatcgaggacaccctggccaacatggtgaaaccccatctatactaaaagtacaaaaattagaca

SEQ ID NO: 309927 - DNA, 459 bp, Homo sapiens
gagaacatttatgaaagtatcaggccttattgctggaccctccagacataatccttaaagcctgccaaaccataaacccagctgcttatctgccagagtccacaggtacttctagcctttctggcatacaggttgtattagtctgttctcatgatgctaataaagacatatctgaggctgggtaatttataaagaaaagaggtttaattgactcacatttccacgtggtcagggatkcctcacactcattgcagaaggcaaatgaggaacaaagtcacatctcttacatggcagcaggcaaaagggcttgtgtagggaaactcccctttataaaaccatcagctgtaatcccagcactttgggaggccaaggcagtggatgagctgaggtgaggagatcgaggacaccctggccaacatggtgaaaccccatctatactaaaagtacaaaaattagaca

SEQ ID NO: 309928 - DNA, 548 bp, Homo sapiens
cgttacttcttatgccctactctaacttttgtccttctagaaaactcagaactatgctttctaaaccaattcaaactttctcagtgaatcaacctggtctccctgaggcaaagttcacaattttccattacacatggttctctttctctgtaagaatatctagtgcaacaatgcaagtgtttctttccctcctggtaatgcgggaaacaccttttggctgagaccgagacttaaaaccttgttcttccaacactaatgaagatctatttagaaagcctccatttttacagaaaagatatataaacaccaatgaaaataaatatgaaattatatgacatgyaattatattgtggaacgactgaataaataagtgaactaagctctaagaaaaaagatgatgatataaaattatatagaagtaaaaaccttggctggtatagcataattaatgtatcagtaaagcatgtacactgtagaagggtcaggaagacagcacacagagtgagaccggaccaaaagctttaacggaagttctatacccttaaaca

SEQ ID NO: 309929 - DNA, 574 bp, Homo sapiens
atctctaccttctccaggaggaaaggggaggcaaagcagcaggcagaagacatcacggccaggtcagcacagggcactcaggccaagccaggtgggctccatcctacagttagtgaggagccactgccgggtgggctttattcattagtttgttttgtttcctttagtaacgaaggcacatgatcaaagttgacctttgtaagtgctgcagctgaacaaaaagatagatataaccagtattttaaaaattatgttgtataaagcactaccctcagtgagatattagtagaacacacatgcacacacacgcacacacactcacactgagcccagattattctggcaaatgctgggttaagcaaattgaaagaaacatcttttgtgctggacttctcagaacctggaatgtggctatatgactcataaaacagcaaggttaagacagagcatgtcattttttcccagaaatgttgaaacactttccttcccttggcttcagtgtcaccttctttctcctggttctccwtcaatctctttggctgctccttcttgatttcctttttgacaatctgct

SEQ ID NO: 309930 - DNA, 550 bp, Homo sapiens
caaataagcccagacagtgaagactacaataaatactaaccttttctctctttaaattttattttttaaacctctcatatagtgctgyatgcccaagattttaatgtccagaccctgaagaacatctactagcatcaacaccatccaggaaaacatgaattcaccaagtgaactaaataaggcactggggacaaatcctggagaaaaagagatatgtgatgtttcagatggagaattcaaaagagctgtatttaaaaaaaaaaaactgaaacaaatttaagataacaaagtaaagaaattccaaattttatcagctaaactcaacaaagagattggaatagttacagcaaattaagcagaaattctgagctgaaaaatgcaattggcatgctgaagaatgcattagagccatgtaatagcagaatggatcaagcgaagaaatagtgagcttgaagacaggctctttgaaaatacatataagagacaaaagaaaaagaataaaaacaaccaatcatgccgacaggatctagaaaatagcctcacaaagaca

SEQ ID NO: 309931 - DNA, 545 bp, Homo sapiens
aaatgaccaattgaccattcaatggagccctgcgaaaggctacaacrggctgtcctgtgcgctgtcccagagtccagattctcctatgaaaatgacctgctctagttaagaggctggtttgcaaagtgtttctgaaacgacttttcaaatcatgacctaagtttccacagaaatgctacagggacaaacaggaggctggtgggtgtgctctgtcccctcctccatccaacaagggccactttgtctctgcaaactcctttaaatattgtgttccatgtaagagtttttaaaaaatacatgacatactgttaaacaagtttgaacatgaatacatccataatacattttttttggtaaagtttgggcaccactgtggtaaaatgtcatcatcatcgtgattatcatcaccatttttgaaataaaatcatacagcattctgccacaggccaggcagtcttctgaattctggttaattctaatatctattttaataggggagatttttcaggctaagaaagtgagctgcaactctgtgtgttgtgtcc

SEQ ID NO: 309932 - DNA, 545 bp, Homo sapiens
aaatgaccaattgaccattcaatggagccctgcgaaaggctacaacaggctgtcctgtgcgctgtcccagagtccagattctcctatgaaaatgacctgctctagttaagaggctggtttgcaaagtgtttctgaaacgacttttcaaatcatgacctaagtttccacagaaatgctacagggacaaacaggaggctggtgggtgwgctctgtcccctcctccatccaacaagggccactttgtctctgcaaactcctttaaatattgtgttccatgtaagagtttttaaaaaatacatgacatactgttaaacaagtttgaacatgaatacatccataatacattttttttggtaaagtttgggcaccactgtggtaaaatgtcatcatcatcgtgattatcatcaccatttttgaaataaaatcatacagcattctgccacaggccaggcagtcttctgaattctggttaattctaatatctattttaataggggagatttttcaggctaagaaagtgagctgcaactctgtgtgttgtgtcc

SEQ ID NO: 309933 - DNA, 570 bp, Homo sapiens
acattgaacacacatggcagccttcatgaaaggcgctttgaccacaagctctgttggacatagacaggctgcctgtgaaatgaaggtcctttgcccccagaggaaggtggttgcttcctggggaggggagagccaggagagaggagggtcctctctcccttcatgaggctgactagggctgggctgtattcaggtccttaaggggaaatgaccctgtggtcagcgagcagccctgtcacttggggacctcagagccccagcactgtcactggccttgaggcgtcaggcacaacagctgtcaggaaggaggaggtggctgtgccaggtgcctgtggtctttccagtcatccggtctccggcagccaggtccccaggcctggagacgcccacttgcctcctgtttgtcatcgctgctattgccgctgtttttgtagacagtgctatccccagattgactcagcacagaccacaggacgggagtttcccgtacacmatccttgaccctcccctgtacctgccaggccagtgtgcccctcctcaggtgacagctgaggctcagaaggaaataac

SEQ ID NO: 309934 - DNA, 514 bp, Homo sapiens
accttggctccaaacctcagggggcaggacagctgcctgtccactgtgattccctctgttcctctccaaaacgctctgcccacaacgaaggggcctgagcccttccccgtctctggggtcaggctcgggcctgggctcccagcacttctgtctggaccactggttcctggggccctgagccactgtgtcagaagctcgactgccctgtggagaggcccaagatcaacagaagagggatgggggcccgccatccccacccatgtgccgggtatgagagtaggcacgttctggacctccaggccagctgtgctgcaggctgagcgccacagaacgacctccatcgcccaacgtcacgtcacaccaagcagaagaatcgcccagatgagtcctgctccaactctgascccctggacagtgagatctgatcgtatggtgtgttttaagccactacatcttgggatggtttgtaaaatagcagcagataagcagaatgatcaattcctttaatatttcc

SEQ ID NO: 309935 - DNA, 487 bp, Homo sapiens
tggcagaaagtagcgggtgcagggtgggcttccaacgcctcatccagtggccatcttggggcaggtttcgatgctgctggtgcctgaccctagttcatgagatgagtgaggaataactgaacactgtctgggagccttgggcagacatttgcttttggctgaggctggcattgctgaatgatgcagtcagtgtggcccyagggtgaccagcctaactccccagagtctaccctcctgtgtctgtgcagccccctgcttctgcagttaggacctcgctgggctgttcctggggcactggggagttttcctggcaggcaggccctggtgtgagcatgaagctgcatgaccgtcagtgactccccaattctcttccttgcctcccctcctctggcccttccctcaccacatgactgcatttccaggaggcccaaagctccctagcacaatccctttcctgctctgtcttcccaagaagctgccctgtgca

SEQ ID NO: 309936 - DNA, 487 bp, Homo sapiens
tggcagaaagtagcgggtgcagggtgggcttccaacgcctcatccagtggccatcttggggcaggtttcgatgctgctggtgcctgaccctagttcatgagatgagtgaggaataactgaacactgtctgggagccttgggcagacatttgcttttggctgaggctggcattgctgaatgatgcagtcagtgtggccctagggtgaccagcctaactccccagagtctaccctcctgtgtctgtgcagccccctgcttctgcagttaggacctcgctgggctgttcctggggcactggggagttytcctggcaggcaggccctggtgtgagcatgaagctgcatgaccgtcagtgactccccaattctcttccttgcctcccctcctctggcccttccctcaccacatgactgcatttccaggaggcccaaagctccctagcacaatccctttcctgctctgtcttcccaagaagctgccctgtgca

SEQ ID NO: 309937 - DNA, 418 bp, Homo sapiens
ttctgctactaaatgggagaaccagaatttaaaagtctgtctggttctcaagttcaatttctttctttattttatttatttattttttttgacacagggttttacctgtcactcaggctggagtatagttgatctsagctcactgcaacgtctgcctcctgggctgaagcgatcctcccagctcagtctttcaagtagctgggactacaggtgcataccaccacacctggctaatttttgtgttttttgtagagacgggattttgccatgctgcgcagactggccttgaactcctgagctcaagtgatccacctgccttagcctcccaaagtgttgggattatgggcatgagccaccacacccggacaagttcaatttcttaacctacactgtatgatactgttctggggcaaatgag

SEQ ID NO: 309938 - DNA, 571 bp, Homo sapiens
ggtatcaccagcgaaggctgtgaaacagcaaatatggcagcctgccacttcctctggaagctctgtcccaggggggtactgacctgttgctggcccacacacctgtaggaggtatctggagaccttgggagatctcatccagtcaggaggaactggattagggacctgcccaaagaagcagtctggctgcttttagatagagcaaatgtgctgttttcagggtctgttcagcccttgatcagtttgggttctccaaggcccacaggttggactggctgaggtgctcaaacagctaaggtagtggcctgccctgctttccgggcactccatcccagggagaaattagacctctggtggccatagaacatgggtggaagtggctggaggccctgattgggaggacctgctctgtgaggaggagtcatcggagwcccactcaaagaagcagtctggccacaccttaacaaaacagctgtgtcatgctggggaactgcctctgcctctgttggcttggactctccaaatcctgcagactgggaaggctgagtcctccaaacaaccaaggtagcag

SEQ ID NO: 309939 - DNA, 629 bp, Homo sapiens
tattaacatccaatacaataaagcttacagggatggtcttaagtcataaggaaaaggtcaagttttgtttcataaacttttggaaagaaaaggaaattaacatattttataagtattagctaaaatattgttatatttaaaggtttaaagcttacagagaaatatcttttacccattaagaaacttatgctgaataggaatactcaatattggtaaaaatgttagttcttcctaacatacattcagcacaatcccaatcaaaatcccaacaacttattttgtgtctcaacacacatgtaaactaaagtttaaatgaaaagacaaaagactacaaaaaccaatactgaaaaagaacaaagktggaggactgacactacctgactctgagacttactataaagcgacaataatcaaaacagtgtggtatttggacaagaacagacaaatagatcatgggaacagaacacagaccccaaaaatagacccacacaaatagagtcaactgatattaaactaaatagcaaaagataattcaatggagaaaggatagtcttttcaataaatggtgctgtaacaactggacatccacatgcataaaaaaaatgaagccagacacagaccttacaacc

SEQ ID NO: 309940 - DNA, 604 bp, Homo sapiens
tctttttgctaaagcatagcaagagtgatctttactccagttgccaataagttcctcatctccatctgagatcacctcagcctggacgtcattgtccatatcactatcagcagtttgatcaaaaccattcaacaagtctctgggaagttccaaactttcccacatcttactgtcttcttcagagccctccaaactgttccaacctctgccccttacccagttccaaagtcgcttccacattttcaagtgtctttataggagtgtcccactcctggtacygattttctatattagtcaatttttcacactgatataaagaactacttgagactgagtaatttgtgaagaaaagatgtttaattgactcagagttctgctggcttaacaggaagcatgactgtgaggcctcaggaaacttacaatcatggtggaaggcaaagggggaagcaagcatcttcttcagatggtggcaggagagagggagaaagagcgtgaggggggatgtgccacacacttttaaaccatgagctctcatgagagcagcaagggggaaatctgctcccatgctctggtcacctctcaccaggtccctcctccaattcaa

SEQ ID NO: 309941 - DNA, 591 bp, Homo sapiens
taatttttaagtatagtttgaattattgttcctataacaggttaaatatgaagctgctttttaatttcattcctaaatatcataagtcaaataggatactcataaagtcgaatagaatattcatataaacttcttgctctccattacgtttcactgctatttaacyactaatgttatatattagtaggctggagtgcagtggcatgatcttggctcactgaaacctccgccttccaggttcaagcaattcttgtgcctcagccccccgagtagctgggattacaggcacataccaccatccccagctaatttttgtatttttagtagagatggggtttcaccatgttggccaggctgatctcgaactctttacctcaagtgatctgcctgccttggcctcctaaagtgctgggattataggcatgagccaccatgcccagtctgatattatgtaattattactcagaacatccaggatatgagttatcatatgactgatgagataatagcattattcagtttgacttgtcttgtgagtacatccattatacgtaagtttactactgccacatcaattttcatatttacggt

SEQ ID NO: 309942 - DNA, 591 bp, Homo sapiens
taatttttaagtatagtttgaattattgttcctataacaggttaaatatgaagctgctttttaatttcattcctaaatatcataagtcaaataggatactcataaagtcgaatagaatattcatataaacttcttgctctccattacgtttcactgctatttaactactaatgttatatattagtaggctggagtgcagtggcatgatcttggctcactgaaacctccgcctyccaggttcaagcaattcttgtgcctcagccccccgagtagctgggattacaggcacataccaccatccccagctaatttttgtatttttagtagagatggggtttcaccatgttggccaggctgatctcgaactctttacctcaagtgatctgcctgccttggcctcctaaagtgctgggattataggcatgagccaccatgcccagtctgatattatgtaattattactcagaacatccaggatatgagttatcatatgactgatgagataatagcattattcagtttgacttgtcttgtgagtacatccattatacgtaagtttactactgccacatcaattttcatatttacggt

SEQ ID NO: 309943 - DNA, 611 bp, Homo sapiens
caaggaagaagaaaaatctaaaagtttggaaacagatttgagggaataattgaggagaacttccctagccttgctagagatctagacaaccaaatacaagaagctcaaaaaacacttgggaaatacattgcaaaaagatcactacctaggcacatagtcatcaggttatctaaaatcaagacaaaaaaaaagaatcttaagaggtatgaggcaaaaatatcaggtaacctataaagaaaaacctatcagattaacagcagatwtctcagcaaaaaccctacaagctagaatagattagggtcctatctttagcctccttaaaccaaaaaattatcagccaagaattttgtagccagcaagactaagctttcataaatgaaggaaagatacagtcattaacagacaaacaaatgctaagagaatttgccactaccaagccagcactacaagaactgctaaaaggagctctaaatcttgaaacaaatacttgaaatacaccaaaatagaatctccataaagcataaatctcacagaaccttaaaaaaacaacaacaaaatgaaagaaaacccaaggtattcaggcaacaaattgcacaatgaatagaatagta

SEQ ID NO: 309944 - DNA, 576 bp, Homo sapiens
caaaaaccctacaagctagaatagattagggtcctatctttagcctccttaaaccaaaaaattatcagccaagaattttgtagccagcaagactaagctttcataaatgaaggaaagatacagtcwttaacagacaaacaaatgctaagagaatttgccactaccaagccagcactacaagaactgctaaaaggagctctaaatcttgaaacaaatacttgaaatacaccaaaatagaatctccataaagcataaatctcacagaaccttaaaaaaacaacaacaaaatgaaagaaaacccaaggtattcaggcaacaaattgcacaatgaatagaatagtacctcacgtctcaatactaacattaaatgtaaatgtcctaaatgctccatttaaaagatatagaatgcagaactggtaagaatttaccaaccaagttcctgctgtcttcaaaagactcatctgacacctaaggactcacctaaacttaaggtaaaggggtggaaaagatattccatgcaaatggacaccaaaagtgagcaggagttgctatttttatatcagacaaaacaaactt

SEQ ID NO: 309945 - DNA, 611 bp, Homo sapiens
caaggaagaagaaaaatctaaaagtttggaaacagatttgagggaataattgaggagaacttccctagccttgctagagatctagacaaccaaatacaagaagctcaaaaaacacttgggaaatacattgcaaaaagatcactacctaggcacatagtcatcaggttatctaaaatcaagacaaaaaaaaagaatcttaagaggtatgaggcaaaaatatcaggtaacctataaagaaaaacctatcagattaacagcagatatctcagcaaaaaccctacaagctagaatagattagggtcctatctttagcctccttaaaccaaaaaattatcagccaagaattttgtagccagcaagactaagctttcataaatgaaggaaagatacagtcattwacagacaaacaaatgctaagagaatttgccactaccaagccagcactacaagaactgctaaaaggagctctaaatcttgaaacaaatacttgaaatacaccaaaatagaatctccataaagcataaatctcacagaaccttaaaaaaacaacaacaaaatgaaagaaaacccaaggtattcaggcaacaaattgcacaatgaatagaatagta

SEQ ID NO: 309946 - DNA, 584 bp, Homo sapiens
gttcagctttgggctgagtttgaggcatytgtgggacattaatggagatgtccaataggcaggtgcatatacagatctggaatccagaagggcagtgagaactagagttatagattaaggagtggccaccatgtagggaagcgttgaagccatggaagtgagtggtattgctagtaattagagaagtgcaaattagagtgctagagttagagaagtgcagaaggaagaccaaataaagccctgatgaagtcacattgaatgtggctatcatgggggtgtaggtgaaggaagagaagacagattatttcaggaaagggagtaaggagatttcagaagaggaaaacctggaaagtgtgtaatcacagagactgtatcagttatttatcactgtgtaacaaaccacctcaaaacgtagtggcttaaaacagtaataattgaatattctcatgattctttgggttgactgggtggatttctgttcttgcctgggttctcctatgcagtcatctgatggcttacttatggcaggagggtctaagatagccccacacaggcgtctgggccctggtgctggacctctctct

SEQ ID NO: 309947 - DNA, 584 bp, Homo sapiens
agctaagcaaattaagtttaattatataagagggtactgtgtaggctattaggcatggtgaatatgtagctgtcaacacatgggaggaatggcaccatttttgaatgtatgggttagtggaaacatcacaggccattggatgagaaagtcctgggcttgagttccagccttgccagcttctaatcaataatcctgggtaagttaactaatttgatggggccattactatactgtagtgagctctataggtaaattgtatttaaaaaatatcattccacataaaaatattacccgagtatatcayatacatgcgtatgtgtgtgtatgatatacttggataatacatatttggatacatagagtcatgtgctgcttaatgatatttttgttcaataacagaccacatctacaatggtagttgataagattataatatcatacttttattgtaccttttctatgtttagatacacaaatacttaccatggtgttacagttgtctacaatattcagtacagttacatgcagtacaggtttgtagcctaggagcaataggccataccatatagcttaggtgtgtagta

SEQ ID NO: 309948 - DNA, 407 bp, Homo sapiens
gcttaataaatacttattggacaacaatgggagatcctctgttttaatggaagatttggattgtcagattcttcagtttcaaggcttttggtgtatttttgaaggcagtgtctgttaaatgggtcagaactttgatcttagagatttkggaataaataacctagatttgctaaagacagtgacctagaattacacagaagtgcacagatttaggacttgagcccagacaatgcattaagctgtctgacagctcagagtcacatctgatgttcagtcacagctctacttacctttcccaatgggcagacttgctgcttctgctggtcctgctctgggtttctgtttctattttgcatggagttacaggcataggctttgttttaagtttttctcttctcctgccactc

SEQ ID NO: 309949 - DNA, 577 bp, Homo sapiens
attaatgactttggcactatagggataaacaaagagttcagggataaagcatgaaacaggcatctggaatatcacccctatatagaattttgttgtaaaaaagaagccccaaccaagagaggaagtgggccaaccctggagggaagattctgaaagcttttcaaaagactgggagcgggacagaggtgttcaggtcctgtggtactggagaccagcacttccctsccacagctagtctgtggcaggacctcatggcagaaaagctgcatggtcccctgagagagaaggttcaccaagtctttaatttcccagccgccaaaagatctgggactgggccactgctttcaagggaccacgtggattttgacactgaatacctcaaccagttcagtgtgaccagaagagatcagaggatcttctagaatgttctagattgtgccagatcccttcacttgaccctaggaaaaagggttcctgccccccatccccaccaaattcttgagattgaacttcctgagtgaaaggggactctgaacaaatgtaactttatttagagacacaaaagtacatggccttt

SEQ ID NO: 309950 - DNA, 553 bp, Homo sapiens
acttctatttgaaatgtatctcctcctctgtgctatgatctgaaatttttggtcataatttccttctcaatgttagactttctcttgattccattctttattgtagccacttttgcttcacattccattttttcccctgaattttcttccagttctttaataagtatatgacaaagttgggcatggtggctcatgcctataatcctagcactttgggaggttgaggcaggaggattgctttaggcaaggagtttgagaccaacctgggtaacacagtgaggccacacctctacaaaaaataaaaagccaggcatggtggcacgtgcctgtagtactagcttgggaagctgcagtgggcaggttgcttgagcccaggagtttgagactgcaatgagctgtgattgctctagggcactccagcctgggtgacagcaagaccctgtctctaaaacaaaacaaaacacaattaaaaaaccscaaaaccaataaataaataaataaataaataataagtcaaatgatgtctgtcacttttcacttggtttactggaac

SEQ ID NO: 309951 - DNA, 364 bp, Homo sapiens
agtgccatggcaacgtcagaaagttaccctatatggtctaaaaagtgaaggaaccctcagttccgggaattgcccacccttttcctggaaaattcatgaataatccaccccttgtttagcatagaatcaagaaataactaccagtataattagstaagcagcccacacagctgctctgccagtggagtagccattcttttttgttgttgttcttcttgttttttgttttttttttgttttttttttttttgagacagagtctggctctgtcgcccaagctggagtgcagtggcgcaatctcggctcactgcaacctctgcctccggagttcaagcgattctcctgcctcagcctcccgagtagc

SEQ ID NO: 309952 - DNA, 543 bp, Homo sapiens
ctggcttggtcctgacctgggccacagtggtccccagggactgtcctgcaacctagaggttgaagagccccagtctgccagcctgagtggaagcacagctctgcctgggcaggcagggtagacgggggtccaggctcagacagctgtgagtgaattcacctgcctgatcctggggcagggactgacctgggccaagcttttcagggagttctcagcgctcagtgcctttaccatcaaagcagaagaatgtcactgttaaatggctttgggaaaccctgcttgttaacttccctgcgcaccttcttgcggattcataacttatattrcactatatagtaaaggttctgacagatcataagatataaaaacctgcttagctttgtttaactcagcattttccacatggaatacgtttttgggaaagcttcctttttttttcataagtcttagtaatatcctgctttcataagtcagagttcttcaacacacctaaggaactgctgtttctggaaaggtttttggacctaaaatgcagagcactga

SEQ ID NO: 309953 - DNA, 591 bp, Homo sapiens
aagctatagttgacatctatgacactgttttcctgacattcccactctcctccatcaccacattcaaccaccccttatgcccccsctaccttggcccagatgagcatgtaactcaaactgagccaatcatgatccctctctttttttggccacatttgagtattccaggaataagcatgtgattgaggtggatgattccctaatcaaatgactcccttccccaaatttttaggacatagaaccagaaaatcctttttctgtggcaaatatacaaggtataaaacttacaacctattagcagttatattttctgagggagaacttttcagttaatattccagtttcaagtgtaatatgtctgcctttaggtggccctggtccagagaccagggtcccccagcctaaacaccctatattttaccctgttgagagaataaacttccagccttctgctatgatgagagatgggtgatctcccacttgggcaaaaaccctttgatctcttcttaatggggtttcaaaaggaaacaaaggtagataatgtgtgtgttaagcccgtcttcagctggaagctcaaaatctttataatac

SEQ ID NO: 309954 - DNA, 611 bp, Homo sapiens
tccctctgctgctgtcaagctggctgactctcagctcccttgaagagttgccagatgtggcaatcagaatggccgccccccagctaagtgtgagtttctgataaacagcaaatactattttcgtataagtaggtcccatgcactaagtctcatacacagtcatgcagtagggcacacttagactaaaaaagtgtttgttgtttatctgaaattcacattgaactgggcatcctgtatttcatctgacagccctattccttgggcgcaggaaggccattcctgtctctgctcatgctcacagctccattcttatcatagatgtcctcatctccctcatccatcagctctcctcccgcttaccaagacccaactcagcctcaggcctccatgaagcccgtctggatcaggtcttccttaggtggcactcattatctacrtcattaatttggctccacatacaggatgctttgtgtcctgtatacttcccttttttcaacttaacattgagtttttcaaggatagagattatattgtaagttagaaaacttaataaataggtgttcatggtgtggtgctgcttgtagacctgtaatacaggatgagacagtagg

SEQ ID NO: 309955 - DNA, 566 bp, Homo sapiens
aggaaagaagaaggcaggaaatgtatttgatttcagaaagcagccttaggtatatgagtgcatgtgtgcttctttcaaatgaataccaacaaacaaactaaaaatttggcctcaaataattcagctttggtctgtgcaccatagtcaacattttctttaatttcctatggtctcagttttactataagttgtcatatcctatagacacttaaatatggttgattcttcaaggtgggagtgtatgtctggaatgaagggacagtttaatttgtgacatacatatttttttccctttcaaatattatactgtgtatgccatgctttmaaaacattaattttaaagacaatttttaaaactgttattacttaaggtccttcatataattctattagatgtctatgtattgatttgttatctaacagtcatctatttatctgtcacctccctcccttactctgtcattctacacttactgtctgtcaacagtgtttgttttagccacccagtaagtgtttgttttagctgctctttacgtgagtaacactttgagaagaagcacaaggaa

SEQ ID NO: 309956 - DNA, 496 bp, Homo sapiens
gccgccataagttagaaagaggcaaggaaggattctcctgtaggacctttaaagggagcacagtcctgccaacatcttgatttcagacttctggccttcaatattgtgagaacacatttctgctgagttaaggcatccagtttgtggtcatttgtccccactgccctagccctatggcagttcctaacaactacacaatcaaggtttacaggttgccaagaaagagatgccctcagctctgtggaaagcaggatggggtttaaggtcagttgactcccagtaaagcagaatcttctttttacccagtaggccacacacctattatttggatatatttttaaaagtatgrgcatgtgaaaagcatttggaagctcctcacaatagttctctgcaagcacggtatcatgcaggtccatgagttttcacagtataccacttactggcattcacaaaactgcagggacaatgcaaaggccacactcattatcagacagag

SEQ ID NO: 309957 - DNA, 504 bp, Homo sapiens
cacctaactagtacatgatgaaagtaagacttgaatccatgtctatttgacttcaaattgtctctcctctagactatcctgcctctcatattatctgttattaacatgccattttgaaaggttgccatttgaataaatttctggagcatttatattccagtgccgctcagatcactaggccttttactactgctgtatttgaatttgaatactgctgtatttsaatctggtgactaccagattcaacaatcaagcaaaattttcaaatgtattttaagtctaacattagagacttctgtatcagaactctataaattccttaaattatgttgggataaataaatttttatattacacagaaaactcaacattatgctaggactcaatttttatgctactggcagcaatcacatcataattcctaactcagtcttcattacatagctcctctagcattaacataatatccatctaaacagataacaataaggcacatcagtgcat

SEQ ID NO: 309958 - DNA, 640 bp, Homo sapiens
tttggcgttgtcctatttaaccacttaatctgttttctgttacttctgttactataattttctattttatataaatggaattacataacatgtattcttttgtgcttggatagctaagtttttaagataaaaaattacattamgctgatggcgattcttcttatcagactttaaatacaactagactaggatttctgactatggaaaagcaataaaccatatttgtatttgctacttagtttctggggttaattagctttttctctctaatgaagatattaggcatcagatataatcaacctattagatgaaaaaaagaattatcaacataacaatagttaccacttgttgatttgtaatggctaataagcaaaaggcttaaaatgtaatacagaatgtatttctgtgtttattttaataatactatctaatactttttgagtgttatatcctaggcactatgtatgtattaactcaaataatccctccagtgtctctaggaggtattactattattacatcctcatcttatagataaggaaactgaaacttagggagataaagtaacttgcctaaagtcatatagaaaatgtaaaaaagaatttgcatccaggactgtctgactgcaaggcattttctg

SEQ ID NO: 309959 - DNA, 578 bp, Homo sapiens
aaaggttacttttgagttacaatacgacccagcaacttcactcctaggtatatacccaaaagaaataaaaacatatgtttatacaaaaacttgcacacaattttattcataataacattatttacagcagtattattcataatagccaaaaagtagaaacaactcaaatgtccatcaactactggaatatttttctaatattattcattagtaaaaaggaacaaagtacttatacatgccacaacatggataaacyttgaaaacattatgctaagggaaaaatgtcagtcacgaacatatataatgtcatttatatgaaatgtctaggttgtttacatcaatagagacaaaagtagattagtggttgcctagggctgggagagctgagaaacagaaagtgagggcaaatagatgtagaggttcttttcaggggcattaaatgttctaaaattgattatgtcataattttgtgaatgtaccaaaaaccactgaactgtacacttgaaacaggtgaattgctatgctatataactgaagaaacagttttaaaaaagtaagatatgagaacatgcaaaagc

SEQ ID NO: 309960 - DNA, 610 bp, Homo sapiens
catagggtttatctgtggattcagtgggattctatgtataaagtgcttagttgggtgtctggaatatatgtactcaataactaataagtgataaccgtaattaatagattctatatatgagtagatggctatctactagatattgtaagcatgagtgatacacatttgtctagaatgtcagactattgattatattggttctgaattttagagttatcaatttttgttatttacaagttcttcaccaaaattaatgcagaagtgcagttactgccatgttgaaggcataatagtgaccaaacccttagccatttgagagtagccaacgctgttttcatcctaagctgttgttttctatctccttactgccctaggtagctgctcagattgcagttaatccagaatttcttgactaaatagaacattactcaggaaatacagtacaatctgcagagtctacagtagaccttacctctgaatgacaaaatgtttacttttacytagctataaattttctgggtaactatcatgaatatttttatgcttgaattttagtaactatagctgtagaaccaggaatgatctataaaataggatgttgatcaaaaat

SEQ ID NO: 309961 - DNA, 558 bp, Homo sapiens
ttaaaagcatccatttaccctgtctgtcttacatatgccaatctataaaacgttttctaataatccatacttactctcttccataatactttggtctgttttccacctattgggaaagcaaaaaaacaggcatatttgtaaaaatgcaaatgtgcagaacataactcaacattttgtgcatgtgacaaagtaaagcatatattaaaaaaagaattcaaataacagagtatggagtcccagttctaccagcaggttacctgtgccatttggactggtcacttcatctctccagacctatttcttatttataaaatgctatgtatgtagttggactaaactatctttagtttctagaatttaacgagctgaaaaaaatttcactttattcaagagtaaaatacaacaccccaaaacatatagccacaattgtgacacactcaattgcagctttctcccccatcctcccctgctattcctctccttcttgctccagactctccattcwgttagcatttccatatactcttacccttctgttgtcccatcatctcttccctc

SEQ ID NO: 309962 - DNA, 559 bp, Homo sapiens
aacaagaaagttcagtacatgtttgaggaactgcaaacaatgcagagtggctgaaataaagatatactgaggaaagtttgtgactcaggccctggagggaacctgggctgagttgtcaggagccatccacaaataacgcactatgagttyttctctggtttgtatgttctttcaattaaatactcagctatttgaggacagaagaatgctgtagtcaggtccagctcacttctcaagagtcggagaaagcaaaccaggcaacaggaaagccaaagacagaagacaacaagcacaactcatggagccgactcacaagagcacaaagtaaggaactgaaaattgcaggtggcagcaaggcctgggaaaggggagagaagcttcatgtctaagctaggttctgtgtgagacattctcctcgagacttgatgtaaaaacataaacaaatccatgaaaatgaaagaaaaagatgagatcaaaataagcctaagttaattcgtatgtacagtacaaccttgtcagagaattttttcatttttttataaatgaaagaaaagatatt

SEQ ID NO: 309963 - DNA, 582 bp, Homo sapiens
ctcagacaggcctgtttacctacaggatttccaaaagggaacttcaagatgatgtttaattcctgtcagtcctctcaatgatatctcagcattcccaactggttcccatttggattttgttgggtacrtttcaaaaactcatcattaataatataatacattccctgaaaccatctgccccagaaaatagaatgcgcaaaactcgataacgacaataaagtagatccttctacttctctgcatctcacgtctaaaatgcggctgggtgcggggactcacacctgtaatcccagcactttgggaggctgaggcagcggatcacttgagctcaggagttcaagaccagcctgggcaatgtggagaaaccccgtctctacaaaaaatacaaaaattaatcaggtgtagtggcatgcatctgtagtcccagctactggggtaggaggcaggagtggcatgcagggaggattgctcgagccaggaaggtcgagactgcagggagcccagacgacatcattgcactctagcctgggcaacagagtgagatcctgtctcaaaaattaaattaaattaaattaaaatgca

SEQ ID NO: 309964 - DNA, 582 bp, Homo sapiens
ctcagacaggcctgtttacctacaggatttccaaaagggaacttcaagatgatgtttaattcctgtcagtcctctcaatgatatctcagcattcccaactggttcccatttggattttgttgggtacatttcaaaaactcatcattaataatataatacattccctgaaaccatctgccccagaaaatagaatgcgcaaaactcgataacgacaataaagtagatccttctacttctctgcatctcacrtctaaaatgcggctgggtgcggggactcacacctgtaatcccagcactttgggaggctgaggcagcggatcacttgagctcaggagttcaagaccagcctgggcaatgtggagaaaccccgtctctacaaaaaatacaaaaattaatcaggtgtagtggcatgcatctgtagtcccagctactggggtaggaggcaggagtggcatgcagggaggattgctcgagccaggaaggtcgagactgcagggagcccagacgacatcattgcactctagcctgggcaacagagtgagatcctgtctcaaaaattaaattaaattaaattaaaatgca

SEQ ID NO: 309965 - DNA, 582 bp, Homo sapiens
ctcagacaggcctgtttacctacaggatttccaaaagggaacttcaagatgatgtttaattcctgtcagtcctctcaatgatatctcagcattcccaactggttcccatttggattttgttgggtacatttcaaaaactcatcattaataatataatacattccctgaaaccatctgccccagaaaatagaatgcgcaaaactcgataacgacaataaagtagatccttctacttctctgcatctcacgtctaaaatgcggctgggtgcggggactcacacctgtaatcccagcactttgggaggctgaggcagcggatcacttgagctcaggagttcaagaccagcctgggcaatgtggagaaaccccgtctctacaaaaaatacaaaaattaatcaggtgtagtggcatgcatctgtagtcccagctactggggtaggaggcaggagtggcatgcagggaggattgctcgagccaggaaggtcgagactgcagggagccsagacgacatcattgcactctagcctgggcaacagagtgagatcctgtctcaaaaattaaattaaattaaattaaaatgca

SEQ ID NO: 309966 - DNA, 562 bp, Homo sapiens
tgggctgtgggccccacttaaaaaacaccttgcaggataagacccactggcttgggaatccagccagtcacttgtagcagcagttacccacccctgagatggagctctaacagggaggggtggcctgccatctttgctgtttcacagccttagccatccttgcctttggggtctagggagtctgaggggactaagggctgaagcagtgccctggcagagccagcagctctacggagaagtggtcagactgcttattcatgtagatcccggatcctatttctcttcactggatggaatcttctgactggggtatccagtcaaccctacagttgttttccagatgacagaagtttcaaatctccctaggatggagcttctagaagtggggcgtgggctgccatctttactgtttggcagtcttagccattcttgcctttgggccttgggcagtacaaggcgtctgggggctggagcaaaccaccagcacagcrcagctgctcaaaaaagcagccaggctgttattttacacagggtcccgatcccgttccttctcaatgggtgg

SEQ ID NO: 309967 - DNA, 570 bp, Homo sapiens
tatttcaggttatcatccatgaaaacttctgtgacctcactagagaggtgaacagtcaaattcaggaaatacagagcatccttgcaagattctacacaagattatccctaagaaacataatcatcagattttccaagattgaaatgaaagaaagaatgttaaasgcagctagagagaaagggcaggtaacctacaaatgaacccctattatgccaacagtgaaccactcagcagaaaccctacaagccagaagagattgggggcctatattcaacatttttaaagaaaaacatcttcaaccaataatttcatttccagacaaactcatcttcctgtcaaaggagaaataaaatcgttttcagataagcaaatgtggagagagtttgttattaacagacccaccttacaagagatcttaaaagcagcactaaatacagaaagcaaaggccattatcagataatgcaaaaacacactcaagtactcagaccagggacactataaagcaaacacataaacaaggctgcataataacaagctaagaacacaatgactggtagaaattcacacat

SEQ ID NO: 309968 - DNA, 570 bp, Homo sapiens
tatttcaggttatcatccatgaaaacttctgtgacctcactagagaggtgaacagtcaaattcaggaaatacagagcatccttgcaagattctacacaagattatccctaagaaacataatcatcagattttccaagattgaaatgaaagaaagaatgttaaacgcagctagagagaaagggcaggtaacctacaaatgaacccctattatgccaacagtgaaccactcagcagaaaccctacaagccagaagagattgggggcctatattcaacatttttaaagaaaaacatcttcaaccaataatttcatttccagacaaactcatcttcctgkcaaaggagaaataaaatcgttttcagataagcaaatgtggagagagtttgttattaacagacccaccttacaagagatcttaaaagcagcactaaatacagaaagcaaaggccattatcagataatgcaaaaacacactcaagtactcagaccagggacactataaagcaaacacataaacaaggctgcataataacaagctaagaacacaatgactggtagaaattcacacat

SEQ ID NO: 309969 - DNA, 570 bp, Homo sapiens
tatttcaggttatcatccatgaaaacttctgtgacctcactagagaggtgaacagtcaaattcaggaaatacagagcatccttgcaagattctacacaagattatccctaagaaacataatcatcagattttccaagattgaaatgaaagaaagaatgttaaacgcagctagagagaaagggcaggtaacctacaaatgaacccctattatgccaacagtgaaccactcagcagaaaccctacaagccagaagagattgggggcctatattcaacatttttaaagaaaaacatcttcaaccaataatttcatttccagacaaactcatcttcctgtcaaaggagaaataaaatcrttttcagataagcaaatgtggagagagtttgttattaacagacccaccttacaagagatcttaaaagcagcactaaatacagaaagcaaaggccattatcagataatgcaaaaacacactcaagtactcagaccagggacactataaagcaaacacataaacaaggctgcataataacaagctaagaacacaatgactggtagaaattcacacat

SEQ ID NO: 309970 - DNA, 570 bp, Homo sapiens
tatttcaggttatcatccatgaaaacttctgtgacctcactagagaggtgaacagtcaaattcaggaaatacagagcatccttgcaagattctacacaagattatccctaagaaacataatcatcagattttccaagattgaaatgaaagaaagaatgttaaacgcagctagagagaaagggcaggtaacctacaaatgaacccctattatgccaacagtgaaccactcagcagaaaccctacaagccagaagagattgggggcctatattcaacatttttaaagaaaaacatcttcaaccaataatttcatttccagacaaactcatcttcctgtcaaaggagaaataaaatcgttttcagataagcaaatgtggagagagtttgttattaacagacccaccttacaagagatcttaaaagcagcactaaatayagaaagcaaaggccattatcagataatgcaaaaacacactcaagtactcagaccagggacactataaagcaaacacataaacaaggctgcataataacaagctaagaacacaatgactggtagaaattcacacat

SEQ ID NO: 309971 - DNA, 411 bp, Homo sapiens
aaaaaacccaggaccagatggattsacagcagaattctaaaatatgtacaaaaaagaggtggtatcattcctattgaaactactccaaagagttgaagaagagggactgctccccaactcattctatgaggctaggactatcttgataccaaaaactggtggaggtcaggctcagtggctcacacctgtaatcctagcaatttgggaagccaaggcaaggggatcacttaatgtcaggagttcaagaccagcctggccaacatgatgaaaccctgtctctattaaaaatacaaaaattagcagggtgtggtgatgcacacctgtagtcccagctactctggaggctgaggtgggagaatcacttgaacccaagaggcagaagttgcagtgagccaaggtggcactgctgca

SEQ ID NO: 309972 - DNA, 411 bp, Homo sapiens
aaaaaacccaggaccagatggattcacagcagaattctaaaatatgtacaaaaaagaggtggtatcattcctattgaaactactccaaagagttgaagaagagggactgctccccaactcattctatgaggctaggactatcttgataccaaaaactggtggaggtcaggctcagtggctcacacctgtaatcctagcaatttgggaagccaaggcaaggggatcacttaatgtcaggagttcaagaccagcctggccaacatgatgaaaccctgtctctattaaaaatacaaaaattagcagggtgtggtgrtgcacacctgtagtcccagctactctggaggctgaggtgggagaatcacttgaacccaagaggcagaagttgcagtgagccaaggtggcactgctgca

SEQ ID NO: 309973 - DNA, 549 bp, Homo sapiens
aaattaaaagtaaaatgttagtataaaaattttattaaaaggataaaaatgtttaaattttatatrttaaggtgatcatttttttctatctttggcagtgtgaagaagtatatctataattttttaaaacaaattatgtactagaatagccttcatttgtttgcaatgtgttattctcttgatacaacattgtattctatttgataatttttaagggtatttatatctgtgcttataaaacacgttagtctttaattacctttcctcagaatataattgactggttcagttatcactcatgaaaccagttgggaaatactctatactctcaaagactttggactctactggtattagctcctttgtaaatgttgagataaaatcacaaatgaaactctttcagattgaagactttttgagtgactttttaaaaattatggattaaatatttagaggaacaatgatccaattttgtctttcttgtttaaattctgagggtatatttagaaacaacatgtcatttaaactatgatatctagtgtaatgcaa

SEQ ID NO: 309974 - DNA, 588 bp, Homo sapiens
agtttgcaatggtctcatcactgatattatgctacaattttatcttaatacctatttcatttattaccttctcttaccatcacacagaatttactttcaattcagacatacatagagttgtcaggccccatagtgatttctatttgttccatttggttagatggcaacacacaggtgttaacatacaaaatgggtaagaagttgttaatgaaaacacagattcattaagatgtaatctaaaatattgaaaatattttttcagtgcaggttaattttattaatacataatagttgcacataattatggggtacatgtggtatactgatacatacgtgtaatgtgtaaaatgtgtaatgatcacatcagggtaatgaagatatccataatctccaacatttatcatttctttgtgttagaaacattccaaatcttctctcrtggctattttgaaatatactacaaatttttgttaactataattaccctactgtgctattaaacactataacttatttattttatctaactatatttttgtacccattaactaacctccctttgtccgccctcacccttacacacttccc

SEQ ID NO: 309975 - DNA, 588 bp, Homo sapiens
agtttgcaatggtctcatcactgatattatgctacaattttatcttaatacctatttcatttattaccttctcttaccatcacacagaatttactttcaattcagacatacatagagttgtcaggccccatagtgatttctatttgttccatttggttagatggcaacacacaggtgttaacatacaaaatgggtaagaagttgttaatgaaaacacagattcattaagatgtaatctaaaatattgaaaatattttttcagtgcaggttaattttattaatacataatagttgcacataattatggggtacatgtggtatactgatacatacgtgtaatgtgtaaaatgtgtaatgatcacatcagggtaatgaagatatccataatctccaacatttatcatttctttgtgttagaaacattccaaatcttctctcgtggctattttgaaatatactacaaatttttgttaactataattaccctactgtgctattaaacactataacttatttattttatctaactatatttttgtacccattaacyaacctccctttgtccgccctcacccttacacacttccc

SEQ ID NO: 309976 - DNA, 633 bp, Homo sapiens
aaggactgctctctgttgtgttaaaatgacaaagtagtgagtcttacattaaaaaaagtgttaattttctttttcaattatactacatttgtttgttggtttattatttatttattaatatcctggattctcttcaggagttcttggatgtctctttatcttctattcttgttactttctctcctatcttattgggccagctagacctgaatcaaaattacaggagagtggtaatgtagggtatccttgtttgtcttgaattttgagagaatgttttaatattttatcattgacctttaggcttactgctttttattgagaaaggggtttaagttttactttctaaaattagagtagttatcttctattccttgrtttctaaaaatcttttaaaataatgattggctattatattttattgaactatttttgctttggttgcaataagatattttcatcttgcttttgtgtttaagtgtgtttttaagttctgattattttaagaatgttaatgatctcacaaataacaaaaggagaaatttttctggcttatctacatgaaaaacattcagatatgggcaaacccatgggtacacacacatagacccacacaaatatattatacctttttaa

SEQ ID NO: 309977 - DNA, 567 bp, Homo sapiens
gatcgtttttcagttgacacaatgctatccaagagaactacaaaaaaaaaaaaaaacttctctatcacaaatactatctgagattgtccgtgttgtcttctacccacatatctagtgtcttgaagtggtagaaggagtgacaaataagtattggctccatagtagaggaaaaattaacaaaggtaaaattaacaggtgctctaagaatacctggtgtggggtagataataaacagagtgtgaaaatggcattacacagccttcttatccttttccacttgaaaatcctaagcctggaggtcataaacaattgctatttctacttctggccaggcatcacaggaaccagtacttttctgagaaatcgatgtttcttatastctgcttcagtatctgagaggctactgggcttgggtcagagtttttacatatgtatctcaaggccagtcaattaaagaatttaggtttttattgcaaaagtgcctatgtacatgaggtcttatgatttacattcttatgaatcacctaatgacactttgagggtctgtgtgttgtattcacatggccc

SEQ ID NO: 309978 - DNA, 567 bp, Homo sapiens
gatcgtttttcagttgacacaatgctatccaagagaactacaaaaaaaaaaaaaaacttctctatcacaaatactatctgagattgtccgtgttgtcttctacccacatatctagtgtcttgaagtggtagaaggagtgacaaataagtattggctccatagtagaggaaaaattaacaaaggtaaaattaacaggtgctctaagaatacctggtgtggggtagataataaacagagtgtgaaaatggcattacacagccttcttatccttttccacttgaaaatcctaagcctggaggtcataaacaattgctatttctacttctggccaggcatcacaggaaccagtacttttctgagaaatcgatgtttcttatagtctgcttcagtatctgagaggctactgggcttgggtcagagtttttacatatgtatctcaaggccagtcaattaaagaatttaggtttttattgcraaagtgcctatgtacatgaggtcttatgatttacattcttatgaatcacctaatgacactttgagggtctgtgtgttgtattcacatggccc

SEQ ID NO: 309979 - DNA, 624 bp, Homo sapiens
ctgacaaatattctgggaaggatatcctgggaaagtgctgtgtcacctcgcctgcataacttcatgcagaacctttgtttgcagcaggctgcttcttttatggggaaagaagatattatactgagtcttttatgatcagtgattacaaatatgtggcactggaaatttaaccctgtaaactatgtcattcattttcttttcttccttttttctttctttcttttttccttccttccttccttcctgtatttgattactaatttaatttacattcatattgtatttgttttatattttgaataattataactgcatgggataaatcaagaaacaaaactaacacaaatgtctgcsctgcggagcttgccttctgctacatctggccctgtggagcttgcattctgttacgctcttataaagccaagtccatgggctcaaaaaaatcattgccaaatctgtagcttcaagtggaatcatctgccaaatgtgtaagtttctgtgcaatcatagccaaaacaaacatataattttaaaacttttactcactgataccaacagtaatttagcactgatgtaccctttgcttttaggcttatagcatagtcacaagtgtagtttttaaaa

SEQ ID NO: 309980 - DNA, 655 bp, Homo sapiens
taataactgattataattttatgtctaaatgtgtctcacttacttttataatttaataacaggacaaaggtttatagaactttggaacaaagttttattactatccactttctaaattaattgttcaactttttttttctagcaagtagttctgtaatgaaaaaatataattccaaacatttttcatgcttttgaaatattttttctctgttctttggaaaacattttgatgttataatatttcattttattgagtgtagctttgtaatttttttaataaataatgtttggtattctgtaggtccttatattctgaaactctatcttccatgatgtgattatcacacattgaatgcctgtatcaaaacatctcatgtaccccataaacatatacacytactatacatagccacaaaattttccaaaaaaaaggaaacaattaaaaatattaaaattaatcaagcacttttacttcctaagcataaaaaaatcagagtacctggaatagctggaataattttcaaaataaacataataaagtgaaactatcagtttttctgttttaatacttttttattgttataattatcaagtctatgtggtagtggcaggaggatagagacacagataaattgaaagtactagaaaaaccaga

SEQ ID NO: 309981 - DNA, 521 bp, Homo sapiens
cagtctaggtactttatagcaaaatgggtttatttggctcacagttctgcagactgtacaagaaacatgacaccaatatctggttctggcgagatcctcagaaagcctctactcattggtggaaggrgaaagggagaaggtatcacaggcaagaggaaggaagcaagataaaacgaaagaggaagaagtagccaggctcttttttttaacagccagatctcacaggaacatagagtgagaactcactcaatccttgcaagaatggagccacgcccttcatgagggattcacccacatgacacaaacaactccacactaggccccatctccaacattggggattaaattttaatatgagatcaggaggggacaaatgtccaaagcatgtaattgacctaacaggattcttgctatcagcaagccagaattatcacatatcaagtgggaatggtagaatatgaggaaatcaattaaacatctagagtaaccagatatggaggggaaggggctttggttaaact

SEQ ID NO: 309982 - DNA, 521 bp, Homo sapiens
cagtctaggtactttatagcaaaatgggtttatttggctcacagttctgcagactgtacaagaaacatgacaccaatatctggttctggcgagatcctcagaaagcctctactcattggtggaaggggaaagggagaaggtatcayaggcaagaggaaggaagcaagataaaacgaaagaggaagaagtagccaggctcttttttttaacagccagatctcacaggaacatagagtgagaactcactcaatccttgcaagaatggagccacgcccttcatgagggattcacccacatgacacaaacaactccacactaggccccatctccaacattggggattaaattttaatatgagatcaggaggggacaaatgtccaaagcatgtaattgacctaacaggattcttgctatcagcaagccagaattatcacatatcaagtgggaatggtagaatatgaggaaatcaattaaacatctagagtaaccagatatggaggggaaggggctttggttaaact

SEQ ID NO: 309983 - DNA, 521 bp, Homo sapiens
cagtctaggtactttatagcaaaatgggtttatttggctcacagttctgcagactgtacaagaaacatgacaccaatatctggttctggcgagatcctcagaaagcctctactcattggtggaaggggaaagggagaaggtatcacaggcaagaggaaggaagcaagataaaacgaaagaggaagaagtagccaggctcttttttttaacagccagatctcacaggaacatagagtgagaactcactcaatccttgcaagaatggagccacgcccttcatgagggattcacccacatgacacaaacaactccacactaggccccatctccaacattggggattaaattttaatatgagatcaggaggggacaaatgtccaaagcaygtaattgacctaacaggattcttgctatcagcaagccagaattatcacatatcaagtgggaatggtagaatatgaggaaatcaattaaacatctagagtaaccagatatggaggggaaggggctttggttaaact

SEQ ID NO: 309984 - DNA, 625 bp, Homo sapiens
catttagcatcaaaacagggcaagaagtgtcaagggatgcccagggatcacctaacagtaagcatattcttacttggccacatcaagtgtcagcacttctaactcattctgattattaaagtaattattttctttgcttactggtatcttagaatgacatgatgccatctctaatagtttaataaaattatgtcttttggtacaatatttttacctctagaatcaggatctctaaaccaacagtgcccagcacagtgggaataaaacacaggttctcagagtgggtaaatggaagcgatgtttagtaatgacaacactgttttttccttcataataaaaatgttttcctcatattaaaaaaattaacacaatggatattgatttagtttgcatactgtgtcctggaagatatggccacattgtctcacgtatcatcacttaactgacacttcagattagtgtaatttcattactttgtcagactagcagcagtttcagaaagaacaaaaggattacgttgttagggtcctaccttctcctatyttcccaacgccaggtcataaattaggaataatttgcagcataaacagatggtgaggtgttgggtctgataagagaagaaaag

SEQ ID NO: 309985 - DNA, 596 bp, Homo sapiens
aagatcctgtaggcactatgtgtcctcactgtaccactgcctcccttctcatttctgggaaagcatgaagtgaaagtacctgaaaaaaatacttgtgtgaaagaatacaaatcttgtttataaaaggagctgaatgcacagaattctaagacttattttccaaattatgtttaatcactctstgtgtgtgtgtgtgtgtgtgtgtgtgtgtctgtgtgtgtgcatgtgtgtatgtatgtgtgatacttttaggcaaccctctatcagacatcagggcaacttcttctgcaaaggtctctttatttgtgcaatgtaacgtacatacatcctttgaggcttgatgtttcgcaaaagttgacgaatctcagataatttcagatacaaaataaattttcaaagtcagctactttaacaggaatttgctggatgtttttccacatattttgtgtagctatgaagacataattttgctacaactcctgtgagccaaaggcaattttgtgaatattctttctcaatttactattggcagaaactgacatgcaaagaaaaatgatgaagcaaagcagaagagtgactgctcaggagactaggaa

SEQ ID NO: 309986 - DNA, 596 bp, Homo sapiens
aagatcctgtaggcactatgtgtcctcactgtaccactgcctcccttctcatttctgggaaagcatgaagtgaaagtacctgaaaaaaatacttgtgtgaaagaatacaaatcttgtttataaaaggagctgaatgcacagaattctaagacttattttccaaattatgtttaatcactctctgtgtgtgtgtgtgtgtgtgtgtgtgtgtctgtstgtgtgcatgtgtgtatgtatgtgtgatacttttaggcaaccctctatcagacatcagggcaacttcttctgcaaaggtctctttatttgtgcaatgtaacgtacatacatcctttgaggcttgatgtttcgcaaaagttgacgaatctcagataatttcagatacaaaataaattttcaaagtcagctactttaacaggaatttgctggatgtttttccacatattttgtgtagctatgaagacataattttgctacaactcctgtgagccaaaggcaattttgtgaatattctttctcaatttactattggcagaaactgacatgcaaagaaaaatgatgaagcaaagcagaagagtgactgctcaggagactaggaa

SEQ ID NO: 309987 - DNA, 596 bp, Homo sapiens
aagatcctgtaggcactatgtgtcctcactgtaccactgcctcccttctcatttctgggaaagcatgaagtgaaagtacctgaaaaaaatacttgtgtgaaagaatacaaatcttgtttataaaaggagctgaatgcacagaattctaagacttattttccaaattatgtttaatcactctctgtgtgtgtgtgtgtgtgtgtgtgtgtgtctgtgtgtgtgcatgtgtgtatgtatgtgtgatacttttaggcaaccctctatcagacatcagggcaacttcttctrcaaaggtctctttatttgtgcaatgtaacgtacatacatcctttgaggcttgatgtttcgcaaaagttgacgaatctcagataatttcagatacaaaataaattttcaaagtcagctactttaacaggaatttgctggatgtttttccacatattttgtgtagctatgaagacataattttgctacaactcctgtgagccaaaggcaattttgtgaatattctttctcaatttactattggcagaaactgacatgcaaagaaaaatgatgaagcaaagcagaagagtgactgctcaggagactaggaa

SEQ ID NO: 309988 - DNA, 596 bp, Homo sapiens
aagatcctgtaggcactatgtgtcctcactgtaccactgcctcccttctcatttctgggaaagcatgaagtgaaagtacctgaaaaaaatacttgtgtgaaagaatacaaatcttgtttataaaaggagctgaatgcacagaattctaagacttattttccaaattatgtttaatcactctctgtgtgtgtgtgtgtgtgtgtgtgtgtgtctgtgtgtgtgcatgtgtgtatgtatgtgtgatacttttaggcaaccctctatcagacatcagggcaacttcttctgcaaaggtctctttatttgtgcaatgtaacgtacatacatcmtttgaggcttgatgtttcgcaaaagttgacgaatctcagataatttcagatacaaaataaattttcaaagtcagctactttaacaggaatttgctggatgtttttccacatattttgtgtagctatgaagacataattttgctacaactcctgtgagccaaaggcaattttgtgaatattctttctcaatttactattggcagaaactgacatgcaaagaaaaatgatgaagcaaagcagaagagtgactgctcaggagactaggaa

SEQ ID NO: 309989 - DNA, 609 bp, Homo sapiens
ctaataatgtattttatagtcaaactcttcatttttttccaaccatcattttactttttgttttcatgccctacaagaaaaatacaagtaagcgtcaatgacaaaagcattggaaatgtgtctcgatttccagttttccctcagctatttaacctacgtaaaacccactayaggaaatatatggttgcaataataaaaatagagatggggttctgaagggcagatttctaagtaagaaattatttttcatgagcaaaaactgaaagcacaattcacataatatgcttttttaaaataaaagttttacttcaaaataataaaactgatctttgtgtagggtaggctgcatgtgtccaatgtaatacaacaagttaaataacgacatttggataggttacatagcaacccaaggtaacatctgaaagtggcattttccttgcctgcacctcaaacccatgctaacacttacatgataggcatatctgtggtagataacagaatgtggttaattatcatagactatagaatgctataaacagaataaatagtcactttatccagataatcattactagatttgtaactataatgttatgtcttatttccctt

SEQ ID NO: 309990 - DNA, 609 bp, Homo sapiens
ctaataatgtattttatagtcaaactcttcatttttttccaaccatcattttactttttgttttcatgccctacaagaaaaatacaagtaagcgtcaatgacaaaagcattggaaatgtgtctcgatttccagttttccctcagctatttaacctacgtaaaacccactacaggaaatatatggttgcaataataaaaatagagatggggttctgaagggcagatttctaagtaagaaattatttttcatgagcaaaaactgaaagcacaattcacataatatgcttttttaaaataaaagttttacttcaaaataataaaactgatctttgtgtagggtaggctgcatgtgtccaatgtaatacaacaagttaaataacgacatttggataggttacatagcaacccaaggtracatctgaaagtggcattttccttgcctgcacctcaaacccatgctaacacttacatgataggcatatctgtggtagataacagaatgtggttaattatcatagactatagaatgctataaacagaataaatagtcactttatccagataatcattactagatttgtaactataatgttatgtcttatttccctt

SEQ ID NO: 309991 - DNA, 609 bp, Homo sapiens
ctaataatgtattttatagtcaaactcttcatttttttccaaccatcattttactttttgttttcatgccctacaagaaaaatacaagtaagcgtcaatgacaaaagcattggaaatgtgtctcgatttccagttttccctcagctatttaacctacgtaaaacccactacaggaaatatatggttgcaataataaaaatagagatggggttctgaagggcagatttctaagtaagaaattatttttcatgagcaaaaactgaaagcacaattcacataatatgcttttttaaaataaaagttttacttcaaaataataaaactgatctttgtgtagggtaggctgcatgtgtccaatgtaatacaacaagttaaataacgacatttggataggttacatagcaacccaaggtaacatctgaaagyggcattttccttgcctgcacctcaaacccatgctaacacttacatgataggcatatctgtggtagataacagaatgtggttaattatcatagactatagaatgctataaacagaataaatagtcactttatccagataatcattactagatttgtaactataatgttatgtcttatttccctt

SEQ ID NO: 309992 - DNA, 524 bp, Homo sapiens
ttttcttcttgattttcgtctacacctatctcaccctcaaaagatgcccacaccatcaaagacaataaatataatcctgtttgaaagaaataatatacatagccctaattcaatccacttcctttattctatactcttaaaaacactaaataaatattaacaattatgattgcctattacttttattattattaaagtataataaaattattgcaaaatatcagattccaaattctgctaattggtataagtaacagaggcaacaactaatttttaccaaccaattagcagcatttctaataataataaaaatggacattattttaattttattttatttgttacaactttcagcacataaaatttataatcatttatacaaacagctctatrattcatatgcagtttatctcaagtaaggtatacagtattcccccattatccacagtgaatatgtttcaaaaccttcagtggatgtctggaactgctaatagtatttagccccatatatcccgtatatatat

SEQ ID NO: 309993 - DNA, 579 bp, Homo sapiens
tggaagattattgagagctttccttctgccataccttgccaccatgcaagcagggttccagtataatagtggattatacttgaaggaactgagaaataatctttaggatgattatagtcacgtgttgcttaacgatgaggatatgttctgagaaatgcatccttaggcgattttgtcattgtgtgacatcayagagtgtactgacacaaactgcgatggtacagcctaatacgtgtctgggctatagattactgcctattattccttggctacaaacctgtacagcatgttaccgtgctggatactacaggcagttttaacacaatgttaagtatttgtatatctaaacagaaaagttaagagtaaaaatatgatattttagcaccactgtcctacaatactgtagggcccaccccctaacaggtcctagtatgtgttgttctcctccctgtgttcatgtgttctcattattcagctcccacttatatgtcagaacatgtggtgtttggtttcctatccctgtgtcagtttgatgaggaaaatggcttccacctccatccatgtccctgcaaaggacat

SEQ ID NO: 309994 - DNA, 541 bp, Homo sapiens
taaatgacctatgtgttttatatatagagagatttatattatgaattcattaattaaagtatattaaaacaataaataaattaataagaattggacaagttgaggtagcaagggcatgtaacacttaacatgctattcttttaaaataagaatataggttgaaggagagtagctattagcaaggaaattgaaaaartagcaaaaatactgaaggtgcagcaaggtctcaaaaaacaggaagatatgaaatttagttttgggtcacttgcattaagttttgatagagagaaatggcatttttcttagaaaggagaatgcaataggttggtagcatacatataggaggctttatgtctggtggcaaataataggaataattctcattttactgccttttaaggaggaagcatgaggatagggagtatagtagggagactaaagaagctagcacacgttcggttcttttctactccttatcatcttgcttccttgatccctcagaaaaatgaacgtagcagctcaacaagaatgcaaagtaacg

SEQ ID NO: 309995 - DNA, 541 bp, Homo sapiens
taaatgacctatgtgttttatatatagagagatttatattatgaattcattaattaaagtatattaaaacaataaataaattaataagaattggacaagttgaggtagcaagggcatgtaacacttaacatgctattcttttaaaataagaatataggttgaaggagagtagctattagcaaggaaattgaaaaagtagcaaaaatactgaaggtgcagcaaggtctcaaaaaacaggaagatatgaaatttagttttgggtcacttgcattaagttttgatagagagaaatggcatttttcttagaaaggagaatgcaataggttggtagcatacatataggaggctttatgtctggtggcaaataataggaataattctcattttactgccttttaaggaggaagcatgaggatagggagtatagtagggagactaaagaagctagcacacgttckgttcttttctactccttatcatcttgcttccttgatccctcagaaaaatgaacgtagcagctcaacaagaatgcaaagtaacg

SEQ ID NO: 309996 - DNA, 486 bp, Homo sapiens
tgcagtggaaacgactctttatttgttgcagctatagtccttaacaagactagaaggttctatcctgtttcctggtatatgctctcttgttcttgaaaacagtttttcttggaaaccagctaacatgctgatagaagcctaagctacatggagaggcatatgtaggcgcttagctaaactcagcaagcgtcagctaccagctttgggaatgaacgatattcaaagtgtatcccctgtcccagtgaagatgcccagttggtactatgtggagaatagacaagacatccctgctgagctctgcacaaattacacagctatgatcagatatataattgttgttgttttggatcacttagttttggagtggttygctctccagctatttctgaacatggttcctggtcaagaaacctaattctctttgtagtcgaatgaagtccccaaagtcactttctcaatttctctgaccttttggcattacttact

SEQ ID NO: 309997 - DNA, 517 bp, Homo sapiens
aagcccatttttttcatctttatcacgtgatcctcagaatacttctcaattacttcataatctggactcctggattgggaagttggcatgaccatcgcttgtcctcgagcaggagaaatagctctttcagcactgatgttagttattccccctagaggttgtaatgacaaaaaaaaaaaaaaaagggcgggggggtccagggggaacggactagtcaagatgggcaacaggccagagtagttaaagcacagtagtgccratagagcacacagctgggtaaagtcaagaatgtcaaaggcaaaaaagctttatctcagcttcggagttactgagggagagactgatgccttactcagaacatctatgcttcccttgaagaactatctgccttagaataccctgtgtattttattcttcttctatgcccatcttcagtggctttcttaacctacaagcagtctccaagcttgacagactggaaaccaagccaacgtgcagtagggtgaggctgtctgca

SEQ ID NO: 309998 - DNA, 517 bp, Homo sapiens
aagcccatttttttcatctttatcacgtgatcctcagaatacttctcaattacttcataatctggactcctggattgggaagttggcatgaccatcgcttgtcctcgagcaggagaaatagctctttcagcactgatgttagttattccccctagaggttgtaatgacaaaaaaaaaaaaaaaagggcgggggggtccagggggaacggactagtcaagatgggcaacaggccagagtagttaaagcacagtagtgccgataragcacacagctgggtaaagtcaagaatgtcaaaggcaaaaaagctttatctcagcttcggagttactgagggagagactgatgccttactcagaacatctatgcttcccttgaagaactatctgccttagaataccctgtgtattttattcttcttctatgcccatcttcagtggctttcttaacctacaagcagtctccaagcttgacagactggaaaccaagccaacgtgcagtagggtgaggctgtctgca

SEQ ID NO: 309999 - DNA, 485 bp, Homo sapiens
tgataccagcaatatggttaaaaaatgcttaaggattttataagactttttaaaaaataatatcatattttttaaaaatattaattttaccattggaaatcagataatcctatatttcagaatctggtctcagaaccaggacatgggttgtctatgtacaataacactcaatttcacaggaaagggttaatactaagctcagagctttgcaggtcccattatctccagggtgttccaatataaggtgttgcaaagatctccctctggatgttgtgaccacggtacaaaacccaccctcrtaagcaaatggaattcagaagaatgtgaagggagatttgcttacttctgcaggtgtttctgctggtaggtaacattttggaattatggattctgatctgtggctgagaacaatgaaaagagcagaagatgataaaataggggaaagaaaagaaaaccttcttattgagggaagtggataagagagc

SEQ ID NO: 310000 - DNA, 512 bp, Homo sapiens
gtttcttatacatcttacacaatctttgtgtgaagctctgacatcttttgatacttttgccattctgtgcactagagctcttcacagccaggtagtgatctatcaaatttctttcccttcatgttttctgtgtatttctcactgttccctctcctttagtccttctaacttaatctaaagattagataaatggtcccaacccaggcccatgtttgacacggagaaaaaaccatcattgaagttaccttaaaccattcagaaattatccctctccagtataacacaaccaaattacatgctacttttctctgacagaaagtagtcccaatcatttttcartggtgcagtttccaaatgtgtgatacaatttatgtgcaaatgtcaaatgataagaataatcatttgtactggattataaacattaaaaatgctacaaaaatatttatatgcagataaagtatcaggattgaatgtctgctaaattatgtaaaggattgcctgacaaactgtat

SEQ ID NO: 310001 - DNA, 512 bp, Homo sapiens
gtttcttatacatcttacacaatctttgtgtgaagctctgacatcttttgatacttttgccattctgtgcactagagctcttcacagccaggtagtgatctatcaaatttctttcccttcatgttttctgtgtatttctcactgttccctctcctttagtccttctaacttaatctaaagattagataaatggtcccaacccaggcccatgtttgacacggagaaaaaaccatcattgaagttaccttaaaccattcagaaattatccctctccagtataacacaaccaaattacatgctacttttctctgacagaaagtagtcccaatcatttttcaatggtgcagtttccaaatgtgtgatacaatttatgtrcaaatgtcaaatgataagaataatcatttgtactggattataaacattaaaaatgctacaaaaatatttatatgcagataaagtatcaggattgaatgtctgctaaattatgtaaaggattgcctgacaaactgtat

SEQ ID NO: 310002 - DNA, 548 bp, Homo sapiens
tatcttgagagggttatccagagtaagaggtttcattaataagacctcaaggcagggttcctctctaatattggcacccacaagaaaggagagattggaagatgacttggaatgagaaatggacttgcagacttaaacgataaaacacctgcacacatccaaaattatcttagactgttccagttgkatacatttgtggtttcttcgaagagtggattacatattctcagctcataaatgtgaactataatgggtctggtcatatttaaatcatgtgtctacttatttgtccataatgtatgtatctatgaattaagcagtttctcccattaacaatgttaaaatattttcaggagaatcttatgtgcatctaaagcagtaagggaacaattttatctcaccaatattttataattttacattgctgatttgggtaaccgttacaactactaacgctaactttaaaccactatgttgcatcagaaaataaacctttagttcatcttttgcaatcagtcgcagcatataatctggtacttacgtggtag

SEQ ID NO: 310003 - DNA, 548 bp, Homo sapiens
tatcttgagagggttatccagagtaagaggtttcattaataagacctcaaggcagggttcctctctaatattggcacccacaagaaaggagagattggaagatgacttggaatgagaaatggacttgcagacttaaacgataaaacacctgcacacatccaaaattatcttagactgttccagttggatacatttgtggtttcttcgaagagtggattacatattctcagctcataaatgtgaactataatgggtctggtcatatttaaatcatgtgtctacttatttgtccataatgtatgtatctatgaattaagcagtttctcccattaacaatgttaaaatattttcaggagaatcttatgtgcatctaaagcagtaagggaacaattttatctcaccaatattttataaktttacattgctgatttgggtaaccgttacaactactaacgctaactttaaaccactatgttgcatcagaaaataaacctttagttcatcttttgcaatcagtcgcagcatataatctggtacttacgtggtag

SEQ ID NO: 310004 - DNA, 548 bp, Homo sapiens
tatcttgagagggttatccagagtaagaggtttcattaataagacctcaaggcagggttcctctctaatattggcacccacaagaaaggagagattggaagatgacttggaatgagaaatggacttgcagacttaaacgataaaacacctgcacacatccaaaattatcttagactgttccagttggatacatttgtggtttcttcgaagagtggattacatattctcagctcataaatgtgaactataatgggtctggtcatatttaaatcatgtgtctacttatttgtccataatgtatgtatctatgaattaagcagtttctcccattaacaatgttaaaatattttcaggagaatcttatgtgcatctaaagcagtaagggaacaattttatctcaccaatattttataattttacattgctgatttgggtaaccgttacaactactaacrctaactttaaaccactatgttgcatcagaaaataaacctttagttcatcttttgcaatcagtcgcagcatataatctggtacttacgtggtag

SEQ ID NO: 310005 - DNA, 674 bp, Homo sapiens
ctttgcatttcagtgatagagttaaataaaaccatatggccatagaattgcaatagaaaccatatgaccttgaaaactccacaataattaatctygccctttatagtatgtatactgaactccatttcagctacattcaaaataagaaagtaattagttttaagttcaatcatttcatcactgcacatgaagttctagagtctgtatcttcttgaatagagggacctagtctggcaaagcagctgcaattatagctaccatctgtttaattttattaattgtgttgtgattatctaacaaatactatgaaaaaaataattgtgtgtatgattactttcaccatgttgctagtctccaactcctgagctcaagggatctgcctgccttgacctcccaaagtgctgggattacaggtgtgagccactgcaccacctggcctggttttttgtttgtttgtttgtttgtttgtttttttgagatggagtctcactctgtcacccaggctggagtacagtggcgcaatctcagctcactgcaagctccacctcccaggttcacgccattctcctgcctcagcctccctagtagctgggactacaggaacctgccaccgtgcccggctaattttttgtatttttagtagagaagggatttcacggtgttagccaggatgg

SEQ ID NO: 310006 - DNA, 674 bp, Homo sapiens
ctttgcatttcagtgatagagttaaataaaaccatatggccatagaattgcaatagaaaccatatgaccttgaaaactccacaataattaatcttgccctttatagtatgtatactgaactccatttcagctacattcaaaataagaaagtaattagttttaagttcaatcatttcatcactgcacatgaagttctagagtctgtatcttcttgaatagagggacctagtctggcaaagcagctgcaattatagctaccatctgtttaattttattaattgtgttgtgattatctaacaaatactatgaaaaaaataattgtgtgtatgattactttcaccatgttgctagtctccaactcctgagctcaagggatctgcctgccttgacctcccaaagtgctgggattacaggtgtgagccactgcaccacctggcctggttttttgtttgtttgtttgtttgtttgtttttttgagayggagtctcactctgtcacccaggctggagtacagtggcgcaatctcagctcactgcaagctccacctcccaggttcacgccattctcctgcctcagcctccctagtagctgggactacaggaacctgccaccgtgcccggctaattttttgtatttttagtagagaagggatttcacggtgttagccaggatgg

SEQ ID NO: 310007 - DNA, 594 bp, Homo sapiens
aatgagtgatcaggatgggaggaattgagtgtcattggaaagggacatacaaaacatagacaagcagatatacgaatacagtcaaagatggtttagaatgaaataaacaaaatgcattatgaaacaactatttcgaataataaaattaatccagttgtgtgaaattaaattctaattttaaaaattctactaggacatataatttcaatttttctctcaacaaagatataaaaaatatttgggggaattacggtgaaatgaagaatgagagataaatttagagctaattttttctcagcttattattcttacyctaaaatcttggtgtttttccgccccaagatggtttccataatagaagaaagttttgctaatggttggacttttattttttagtaaagtataaaaccttattaaattatattaagtatgaattaaaatcaatgcatttgtgtactaagttcattgacagggagactcaagactttttaaaaataggttcttccccaaaggacctatttattcgttgtgattttgaaaaatacctcttttgttttagaataattttagatataacagtaattcgtgaggata

SEQ ID NO: 310008 - DNA, 594 bp, Homo sapiens
aatgagtgatcaggatgggaggaattgagtgtcattggaaagggacatacaaaacatagacaagcagatatacgaatacagtcaaagatggtttagaatgaaataaacaaaatgcattatgaaacaactatttcgaataataaaattaatccagttgtgtgaaattaaattctaattttaaaaattctactaggacatataatttcaatttttctctcaacaaagatataaaaaatatttgggggaattacggtgaaatgaagaatgagagataaatttagagctaattttttctcagcttattattcttaccctaaaatcttggtgtttttccgccccaagatggtttccataatagaagaaagttttgctaatggttggacttttattttttagtaaagtataaaaccttattaaattatattaagtatgaattaaaatcaatgcatttgtrtactaagttcattgacagggagactcaagactttttaaaaataggttcttccccaaaggacctatttattcgttgtgattttgaaaaatacctcttttgttttagaataattttagatataacagtaattcgtgaggata

SEQ ID NO: 310009 - DNA, 594 bp, Homo sapiens
aatgagtgatcaggatgggaggaattgagtgtcattggaaagggacatacaaaacatagacaagcagatatacgaatacagtcaaagatggtttagaatgaaataaacaaaatgcattatgaaacaactatttcgaataataaaattaatccagttgtgtgaaattaaattctaattttaaaaattctactaggacatataatttcaatttttctctcaacaaagatataaaaaatatttgggggaattacggtgaaatgaagaatgagagataaatttagagctaattttttctcagcttattattcttaccctaaaatcttggtgtttttccgccccaagatggtttccataatagaagaaagttttgctaatggttggacttttattttttagtaaagtataaaaccttattaaattatattaagtatgaattaaaatcaatgcatttgtgtactaagttcattgacagggagactcaagactttttaaaaataggttcttccccaaaggacctatttattcrttgtgattttgaaaaatacctcttttgttttagaataattttagatataacagtaattcgtgaggata

SEQ ID NO: 310010 - DNA, 560 bp, Homo sapiens
tccatctgaataacacgttagtatctctagctcaaagctgaggcaatcatgacttcaggaatttaagatatatgtcaaatgtttaattaaaaactagtgagaaaaaacaggagccttataatattagatttatgataatgcaatcatgttatttatttattyatattttattatttgagacagagtcacactttgtcaccctgattggagtgcagtggcacaatctcagctcactgcaacctctgcctcccaggttcaagggattctcctgcctcagcctccagagaaactgggattacatgcacgggccatcatacctggctaattttttatatctttagtagagacggggtttctccatgttgtccaggctggtcttgaactcctggcctcaagtgatctgatcacctctgcttcccaaaatgccgggattacaggagtgagccactgcacccagtctcaatcatttcaaagttacctaaattcatctaatctgtcttcatgcaccttgcttgtaatatttgatgggggagtattttcagagcatttctgaccatgga

SEQ ID NO: 310011 - DNA, 560 bp, Homo sapiens
tccatctgaataacacgttagtatctctagctcaaagctgaggcaatcatgacttcaggaatttaagatatatgtcaaatgtttaattaaaaactagtgagaaaaaacaggagccttataatattagatttatgataatgcaatcatgttatttatttattcatattttattatttgagacagagtcacactttgtcaccctgattggagtgcagtggcacaatctcagctcactgcaacctctgcctcccaggttcaagggattctcctgcctcagcctccagagaaactgrgattacatgcacgggccatcatacctggctaattttttatatctttagtagagacggggtttctccatgttgtccaggctggtcttgaactcctggcctcaagtgatctgatcacctctgcttcccaaaatgccgggattacaggagtgagccactgcacccagtctcaatcatttcaaagttacctaaattcatctaatctgtcttcatgcaccttgcttgtaatatttgatgggggagtattttcagagcatttctgaccatgga

SEQ ID NO: 310012 - DNA, 560 bp, Homo sapiens
tccatctgaataacacgttagtatctctagctcaaagctgaggcaatcatgacttcaggaatttaagatatatgtcaaatgtttaattaaaaactagtgagaaaaaacaggagccttataatattagatttatgataatgcaatcatgttatttatttattcatattttattatttgagacagagtcacactttgtcaccctgattggagtgcagtggcacaatctcagctcactgcaacctctgcctcccaggttcaagggattctcctgcctcagcctccagagaaactgggattacatgcacgggccatcatacctggctaattttttatatctttagtagagacggggtttctccatgttgtccaggctggtcttgaactcctggcctcaagtgatctgaycacctctgcttcccaaaatgccgggattacaggagtgagccactgcacccagtctcaatcatttcaaagttacctaaattcatctaatctgtcttcatgcaccttgcttgtaatatttgatgggggagtattttcagagcatttctgaccatgga

SEQ ID NO: 310013 - DNA, 560 bp, Homo sapiens
tccatctgaataacacgttagtatctctagctcaaagctgaggcaatcatgacttcaggaatttaagatatatgtcaaatgtttaattaaaaactagtgagaaaaaacaggagccttataatattagatttatgataatgcaatcatgttatttatttattcatattttattatttgagacagagtcacactttgtcaccctgattggagtgcagtggcacaatctcagctcactgcaacctctgcctcccaggttcaagggattctcctgcctcagcctccagagaaactgggattacatgcacgggccatcatacctggctaattttttatatctttagtagagacggggtttctccatgttgtccaggctggtcttgaactcctggcctcaagtgatctgatcacctctgcytcccaaaatgccgggattacaggagtgagccactgcacccagtctcaatcatttcaaagttacctaaattcatctaatctgtcttcatgcaccttgcttgtaatatttgatgggggagtattttcagagcatttctgaccatgga

SEQ ID NO: 310014 - DNA, 487 bp, Homo sapiens
tattactaaaaatactagcaaatatctgagtcttcagaaataataacatttttgctggtagaaggtcctaccctgatgttgatggctgaacaggatggtggttgctgaaggctagggtggtggtggcaacttctgraaataagacaataaaatttgccacatcaatcgactgttcctttcatgaaagttttctctgtagcatgtaatgctgttttacagcattttacctagagtagaaatttcaaaactggagtcagcctgctaaaacatagctgctgctttattaagtttataaaattctaaatcctttgttgttacttagaaaaatgttcaaagtatctttaccaggcatagattccatttctagaaaccactttctttgctgacctataaaaacaactccttgtctcttaaatctttatcacaatattgcagcaactcagtcacatctttaggttccctgttcttgttatttttaggtctcttg

SEQ ID NO: 310015 - DNA, 602 bp, Homo sapiens
gcaactctctggtcaggagatccccttatgaacccaccccaccaggacctgcggtctgacacacagagctatatggagtctcagcagaccagctgctctggcacatgtggagccctgggagccttagatacccaggctttcctgaaaaatcagctactattctggcaaaccaggaggttagaagcccgtgcatacccctaggaaagaggctggaatccaggrggctgagcagcaatgggctgtgggccccacttaaaaaacaccttgcaggataagacccactggcttgggaatccagccagtcacttgtagcagcagttacccacccctgagatggagctctaacagggaggggtggcctgccatctttgctgtttcacagccttagccatccttgcctttggggtctagggagtctgaggggactaagggctgaagcagtgccctggcagagccagcagctctacggagaagtggtcagactgcttattcatgtagatcccggatcctatttctcttcactggatggaatcttctgactggggtatccagtcaaccctacagttgttttccagatgacagaagtttcaaatctccctagg

SEQ ID NO: 310016 - DNA, 562 bp, Homo sapiens
tgggctgtgggccccacttaaaaaacaccttgcaggataagacccactggcttgggaatccagccagtcacttgtagcagcagttacccacccctgagatggagctctaacagggaggggtggcctgccatctttgctgtttcacagccttagccatccttgcctttggggtctagggagtctgaggggactaagggctgaagcagtgccctggcagagccagcagctctacggagaagtggtcagactgcttattcatgtagatccyggatcctatttctcttcactggatggaatcttctgactggggtatccagtcaaccctacagttgttttccagatgacagaagtttcaaatctccctaggatggagcttctagaagtggggcgtgggctgccatctttactgtttggcagtcttagccattcttgcctttgggccttgggcagtacaaggcgtctgggggctggagcaaaccaccagcacagcacagctgctcaaaaaagcagccaggctgttattttacacagggtcccgatcccgttccttctcaatgggtgg

SEQ ID NO: 310017 - DNA, 570 bp, Homo sapiens
tctaggtgacagaagtctcacctgaagatgagcagagccactgttgctcattccaccaaaaatctgttgcaccctaagggctcaggagaaacaccagcagcaaagtgctgctctcaaatggcttggaggccatgagtgagcaactctgaggatccggagagtagaggggtgtgtgtccttattcatgagccaatctgagacagcttctaggacacctagaaggcaataaaggagacttcaagtgatgagggtgtggggggatcagggctattgaaggcttgtaggtctacaggtggaggcttcattgtaatgggagctcacaagttggtgaggcctggagacatgtgaaatagttgtcctagataakatttcagtgtgaatttaaaaagagaaagagaaaggccatgtgaaagcactttgcaaattttagtgttatagaaaagtgcagaattggtattatgaagaagacattctgggatcgagcacagcccctgttagggtggctctgcaaggccagactcacgtgagaggtatcaggtaacagggataccgaaatgctccccaaaggcc

SEQ ID NO: 310018 - DNA, 393 bp, Homo sapiens
gcacaccccttatccagctccaagagaagctcaaagccagccctcttgactcacacaaaggccaggggcctctgctccaggagggctgatgtgaagatacagctggtctcccagaaataaagggccccatagagtaacagggaacaagctggcaggactttttggagctgtgaagagcagctctagatgccatcagcctgcragtgcccgccccaaacgtgacattcctgctttcctgctgccattttggtcatcagcctcccaccatagactattacctcgaggtaatccccagcctcttccaggctgcaaactgactccaaacactgagtcaggatgggctcgaggatccatcacttctggatgagtattcttccttccttgacttctgca

SEQ ID NO: 310019 - DNA, 480 bp, Homo sapiens
tggcctttctggaacatgctggaagcttgggttcttgggaagggggtctttctgctgctggactcagcgatcttgctttgtttcagggtcaatgtctgtggagggcggtgctgtcatggctggagtaaggcccctggctcccagaggtgcaccaaacgtaagttgccatgttcacagtggccctgcacagtaggcaaagtggggggaggtgtccacmtgggggcatctcacaagggccacttgaaagggctcgggggaagttgaagtctgaaatacaatccacccaggcttcattaccacctaggaagggctgggtcagggtaatgttagtatcaatgccagcagcaatacattgtacagaaccgtgctgtgcatccaagacttctctgaactcaacagagatattcatcattctggcacatctgtgaatcaggagctaggaaaaaaatttccatttgaggatatgccatatggcagaac

SEQ ID NO: 310020 - DNA, 606 bp, Homo sapiens
gggtcacacttttacagattctctccactgtccaagggctggagaacaggtgttttaaggtgccaactgacctcaaacatgctgggcagtgattttgcaaactgaaacagcttgccatgtagaagctagttaaaagcacccattgsagagaggttaaaggaaactcaggctatgtccataagcaccctttctctaagtgatctttatcctattcctctgaatttagtaagaatttaggaaagttgaagaaagttttcagctggagagaatgcacactgtaccattcagcatgggtgtttaactctcaggccagagcttcccagtgccaccaaggttcaggcagtgctctctttttatagatgggggtctcactgtgttgcccaagatggagtgcagtggctattcacaggtgcaagcatagtgcactgcagcctcaaactcctggcacatgccatcctctgcctcagactcccgagtagctggaactagaggcacgccctactgcgccgggcaggggcagcactcttaaattcaatccactgcttagtgaatgtgatttctagtgggggaaagaaacggtgacctatacatgagtctacattctgt

SEQ ID NO: 310021 - DNA, 606 bp, Homo sapiens
gggtcacacttttacagattctctccactgtccaagggctggagaacaggtgttttaaggtgccaactgacctcaaacatgctgggcagtgattttgcaaactgaaacagcttgccatgtagaagctagttaaaagcacccattggagagaggttaaaggaaactcaggctatgtccataagcaccctttctctaagtgatctttatcctattcctctgaatttagtaagaatttaggaaagttgaagaaagtttkcagctggagagaatgcacactgtaccattcagcatgggtgtttaactctcaggccagagcttcccagtgccaccaaggttcaggcagtgctctctttttatagatgggggtctcactgtgttgcccaagatggagtgcagtggctattcacaggtgcaagcatagtgcactgcagcctcaaactcctggcacatgccatcctctgcctcagactcccgagtagctggaactagaggcacgccctactgcgccgggcaggggcagcactcttaaattcaatccactgcttagtgaatgtgatttctagtgggggaaagaaacggtgacctatacatgagtctacattctgt

SEQ ID NO: 310022 - DNA, 606 bp, Homo sapiens
gggtcacacttttacagattctctccactgtccaagggctggagaacaggtgttttaaggtgccaactgacctcaaacatgctgggcagtgattttgcaaactgaaacagcttgccatgtagaagctagttaaaagcacccattggagagaggttaaaggaaactcaggctatgtccataagcaccctttctctaagtgatctttatcctattcctctgaatttagtaagaatttaggaaagttgaagaaagttttcagctggagagaatgcacactgtaycattcagcatgggtgtttaactctcaggccagagcttcccagtgccaccaaggttcaggcagtgctctctttttatagatgggggtctcactgtgttgcccaagatggagtgcagtggctattcacaggtgcaagcatagtgcactgcagcctcaaactcctggcacatgccatcctctgcctcagactcccgagtagctggaactagaggcacgccctactgcgccgggcaggggcagcactcttaaattcaatccactgcttagtgaatgtgatttctagtgggggaaagaaacggtgacctatacatgagtctacattctgt

SEQ ID NO: 310023 - DNA, 606 bp, Homo sapiens
gggtcacacttttacagattctctccactgtccaagggctggagaacaggtgttttaaggtgccaactgacctcaaacatgctgggcagtgattttgcaaactgaaacagcttgccatgtagaagctagttaaaagcacccattggagagaggttaaaggaaactcaggctatgtccataagcaccctttctctaagtgatctttatcctattcctctgaatttagtaagaatttaggaaagttgaagaaagttttcagctggagagaatgcacactgtaccattcagcatgggtgtttaactctcaggccagagcttcccagtgccaccraggttcaggcagtgctctctttttatagatgggggtctcactgtgttgcccaagatggagtgcagtggctattcacaggtgcaagcatagtgcactgcagcctcaaactcctggcacatgccatcctctgcctcagactcccgagtagctggaactagaggcacgccctactgcgccgggcaggggcagcactcttaaattcaatccactgcttagtgaatgtgatttctagtgggggaaagaaacggtgacctatacatgagtctacattctgt

SEQ ID NO: 310024 - DNA, 394 bp, Homo sapiens
gagtgggctttctgctctttgctgtctccagacagtagaggtgatggagccaycttccaagttagcgtgattgtcaccaggcccatcatgctgctcgagcttctctggctgcgtcctcactttcacatccctagctgaggaaacagcgagtcgcatcacgtcatggaaacatgaaaaattaagctgaaaggtagaaaatgggccgtaaattgctcttagcgggtctgtttggttaattgaggagtgcctgttatcttgggcttagatccgctctgagttcagttcaatcaaaagttgtgagttttgatagttttatttttggttagttgaagaaaaggcaaaggttggtacactataaaggatcacttacggattaaagggagaaggcacctct

SEQ ID NO: 310025 - DNA, 535 bp, Homo sapiens
caacatgctccatggtttgtgtttatttactttatttttgctgtaaggttgcaggctcctttgtagtctacaaacaccttgagaacagggatggtctttactcatcattgttcttattcctcagctcaaggcctggacacataccaggcatttaataaagtgagttctgttaacctaatctttaaatgttgatattgctttcttttcaggagataaacttatttaggtcacacacatacacacacaccacatgcattcacactccagaaaactaaatctgacacatacacacacacaaagaacaactgatgtaaaaaataataatggtaaattgaaggcaataaaacattcatttttatactaaaattaaaaaataagatacaaagaaagctgagcatagaagattgacatatacagaagctataggaaaacagacccacaaagcattatttcatatctccatgcaktgattttttttttctctaacttggggaatgaggtagaatttctattgccccccactttctgttggctg

SEQ ID NO: 310026 - DNA, 617 bp, Homo sapiens
ataaacttttgcctcttttatatacagattttatgtagttaattaaataaatgttaataaaaaccatattaaagcaatttctaaaaatatcttttttagccacttttttttaggtcttcaatagaataatgaaatccgtgaaagatcctcaggtcttcagggtttcatcttgatatcttatcattctgtcaaactataggctgagggagaracattctgcagcttcccttagaagacctgctttcaatctatctttccacagaggcatttttcaggattcctgtgtctagatttcaccctgggaaaaccagggataaaaccatcagtcacattaattgcggcccagggaatgttcagctggcacatgtgactagaccagtggtagaaggcatgcaggacttaggattttacatttctttacatttggcctttacatttcttgttacagacattgtttattaatgtcatttcacacaggaaaaaaatgaagatcaggatatttaagtgaattgctcaagattacacagctagtaaatgacagactcaagtcctgagcccgacatagtcttgccccagggctgtgcgccatgttgcttttctcaaaatgtgcttaagcc

SEQ ID NO: 310027 - DNA, 562 bp, Homo sapiens
gcccagtgaacctacctgacctcctcaaggtcacggactgagttagagctaggatttaaatccagatttgtctcacactgaggcctgtgatttcctcctggttcactatcacctaattaattcatatgctcctgactgcatcaattaataaaatcagcttggagaataacaaagttgaaaactaagcaaaggaacataactgaatacaaagtgttattacaaaagattaactgccttgaaaagtaaaagcagtataragtaagtcatgtaaaccttaaggggataagggccttagattattcaaaagataaatatatttggaaacatgttagcaactggtattaaaaatccaaagttgccatttccaccagattattttttcatggtctgtgatgtgccaagtgtaaagcataggagtaacataaaggcaggctcatgcccttgagcagccccaaccaagcagaatctctgatacttgaatagagcatggaacctacttagcagagggagtgagggagagagatttctcagactctgagcccacgccatctcatcccaaagt

SEQ ID NO: 310028 - DNA, 601 bp, Homo sapiens
taggaaaaggcaatggcaaagaacagatacgtggctttcacccccgccactatctttccagaaaaccccatgtaaaccttgagcacactgcaaagtcatggtttgggcaggtttctttctctagcaagaaagccccatgccaccctgccagttcactggggcctctcaggcaccattctcagcatgagctattggttgggtcaggtatgtaggggagctgctggtgccactgaagtcacgtgataattgtgggctcctggccaggaatctgctgatctagcttggggacagggtgggcaggatgtgccattgattcccttgtgagaaattcctaagaacctactctccatctgcagttaattctcgcaggacaattaagggattttttttctctctctcttctctaaagcaaacaaataaaggtcsaattatttttccagcaatctgagtttaagagtctaaaattctaattttttgtttcctggaaacagtaaaattcaattgccatttgttttcttctttaaaatcccctttaccgcactttcaaagtaagcttttctcatagccctgaagagcctttgtctttaggttgtcagtaaaa

SEQ ID NO: 310029 - DNA, 601 bp, Homo sapiens
taggaaaaggcaatggcaaagaacagatacgtggctttcacccccgccactatctttccagaaaaccccatgtaaaccttgagcacactgcaaagtcatggtttgggcaggtttctttctctagcaagaaagccccatgccaccctgccagttcactggggcctctcaggcaccattctcagcatgagctattggttgggtcaggtatgtaggggagctgctggtgccactgaagtcacgtgataattgtgggctcctggccaggaatctgctgatctagcttggggacagggtgggcaggatgtgccattgattcccttgtgagaaattcctaagaacctactctccatctgcagttaattctcgcaggacaattaagggattttttttctctctctcttctctaaagcaaacaaataaaggtccaattatttttccagcaatctgagtttaagagtctaaaattctaattttttgtttmctggaaacagtaaaattcaattgccatttgttttcttctttaaaatcccctttaccgcactttcaaagtaagcttttctcatagccctgaagagcctttgtctttaggttgtcagtaaaa

SEQ ID NO: 310030 - DNA, 406 bp, Homo sapiens
aatctctgatgtttgaaacatatgagttaggcaagaattaattttataaagaaatagagaaaattgctgacatctactggatagaaaattaagaacaaaacctattcaacttgtgaaaactgacggctgattgktatgtattgaactaaaaagattctagaactatctattaattttgttttgaccacccaattatattttgaaatctttattttgtggcattatggcaagcaaatttttttttaatattttattgaaaatttgaccaatccctcttttactatatattgcactttgactttgtactgagtgttgtgatatgcaagggaaatgacaccaaataacttccaatattgaagttatttattgtatcagaaactgtgatcactgtttatgtgtgatgttt

SEQ ID NO: 310031 - DNA, 406 bp, Homo sapiens
aatctctgatgtttgaaacatatgagttaggcaagaattaattttataaagaaatagagaaaattgctgacatctactggatagaaaattaagaacaaaacctattcaacttgtgaaaactgacggctgattggtatgtattgaactaaaaagattctagaactatctattaattttgttttgaccacccaattatattttgaaatctttattttgtggcaytatggcaagcaaatttttttttaatattttattgaaaatttgaccaatccctcttttactatatattgcactttgactttgtactgagtgttgtgatatgcaagggaaatgacaccaaataacttccaatattgaagttatttattgtatcagaaactgtgatcactgtttatgtgtgatgttt

SEQ ID NO: 310032 - DNA, 561 bp, Homo sapiens
atctgcaaatatgtacatggaaatgtgtagtgactcagccaggaagtcacgctaaagtttattattattattgtttttgttgttaacaaaagagtgtagtcctaaggcctaacaagaaaaaaaagctgaaagacattttaaagaaaaaaaactgtaattaatgacaaattggatacaggataggatataagggtgaaaaatgactttggacttaactacagtggcaytttcaaattaacattttattgagcaacatttttgtttgtttattcagtggttttagtggttgccataaaggaagtaaatagttatgtgtatttgatttccttcttttaataggctcccagatgggcagagagctcccatccagagccttcaattgtcagaaatggccagaacccaagaaactcaagggagaagtgaaattgagtttctaccaatcttgttcagaaagttcttttaatatgtcagctaaattccccagaccagtaatatcaacatgctcagatgcctttttctttttcctaatcttcctaattcttgcatgtggtcctatatgta

SEQ ID NO: 310033 - DNA, 648 bp, Homo sapiens
ggggaatgcagaacatgcagaagtcgacttggaagagagtgacaggctcccacacagacagcactagggagtattgctgtttttgtcttcttttctttccaaatttaactgaagcaataaaatattcttaatgtccactcttggcattttcacagcttgcttttacctacttccaggtgtcacaacaggatgacttggtagtgctaaactacttccagaaatatgttgggaaataacttttgaggcmaagaggccaagcagctcatgctactaaatgattacaggtattgtgaggagtcaaaatcttttgctaagttaatgaagtaacagacttccatctacggtttacatcaccttgtcagttcaatttactttcttgcccattttcccttcagaatgcaaggctgtcagaaccaagtttcttttggttgaggcacctattttatattcatttagttactgtgtggcatttttatgtcaggaaaaccacatttgctctcatgaaatgaccctaagctaataaaccataaattatctttaaaacctgatagaggattttgaagttacaaacaagtaataaaataatttgcaggcaatgttatttccccaccagatttacctaaagaaactactctatggcaagatcca

SEQ ID NO: 310034 - DNA, 648 bp, Homo sapiens
ggggaatgcagaacatgcagaagtcgacttggaagagagtgacaggctcccacacagacagcactagggagtattgctgtttttgtcttcttttctttccaaatttaactgaagcaataaaatattcttaatgtccactcttggcattttcacagcttgcttttacctacttccaggtgtcacaacaggatgacttggtagtgctaaactacttccagaaatatgttgggaaataacttttgaggccaagaggccaagcagctcatgctactaaatgattacaggtattgtgaggagtcaaaatcttttgctaagttaatgaagtaacagacttccatctacggtttacatcaccttgtcagttcaatttactttcttgcccattttcccttcagaatgcaaggctgtcagaaccaagtttcttttggttgaggcacctattttatattcatttagttactgtgtgrcatttttatgtcaggaaaaccacatttgctctcatgaaatgaccctaagctaataaaccataaattatctttaaaacctgatagaggattttgaagttacaaacaagtaataaaataatttgcaggcaatgttatttccccaccagatttacctaaagaaactactctatggcaagatcca

SEQ ID NO: 310035 - DNA, 558 bp, Homo sapiens
agaaactgttagggagatcaagacaccctcttgcaagaattcctattcctgcccatgccatatgattggaaggaaaccctcagctcctagcttctccctgtagagggaaagagttggaccatgcatccaatgcyacagcttttctgagggataccccaaaaaatggcttctgttttgcctgtttcagagggctgatgagaaccagaatactttagacatcaatgggccagtgagaacaagacagtggtttgattgagcatgcaactagttgccacagccccatcccccaatttagcacagaaggaacaggcaaaaaatccaagatctcagatttttcctggagagaaaaggtttggacagagcatccagttattcaacttttatgtgggctactctggtaactggattctgtctcacttgtctcaaagctctcggtaggacaagcataatctggacacttaggggttgctaagaacaaagaaagcagattcaactagcacaaagatttgagagatcccaagaatcaaccagcctgactggtgagagtcttctcctgat

SEQ ID NO: 310036 - DNA, 558 bp, Homo sapiens
agaaactgttagggagatcaagacaccctcttgcaagaattcctattcctgcccatgccatatgattggaaggaaaccctcagctcctagcttctccctgtagagggaaagagttggaccatgcatccaatgccacagcttttctgagggataccccaaaaaatggcttctgttttgcctgtttcagagggctgatgagaaccagaatactttagacatcaatgggccagtgagaacaagacagtggtttgattgagcatgcaactagttgccacagccccatcccccaatttagcacagaaggaacaggcaaaaaatccaagatctcagatttttcctggagagaaaaggtttggacagagcatccagttattcaacttttatgtgggctactctggtaactggattcwgtctcacttgtctcaaagctctcggtaggacaagcataatctggacacttaggggttgctaagaacaaagaaagcagattcaactagcacaaagatttgagagatcccaagaatcaaccagcctgactggtgagagtcttctcctgat

SEQ ID NO: 310037 - DNA, 627 bp, Homo sapiens
taatgctaaaatatgagaaactttaatcttaagctcatgcaatgttaccgtaattgctagttggactgtgatatttactttcctaaaagtttgtagggacaataattatttgaaagcttaggctaactagtaaatattgggaaaggtgagttttccttaattttatatattgagataaaaacatggtgtgtgtgtgtgtgtgtgtgtgtgtgtaraacacagtgtagtttagtgtttctactgggagatagaatgagaatacatataataaagagagcccagtgatctggtcttagggtaagatgcttaaatattacccaaattgtagggctaatcatcctgtcttttaaaattacaataattactttgtttttatatttcacgatcatgaaacacaagcaatgattcatattggaggctttggagttagataaactaggaataaaatccaggtctaaaatctaaatccaggagttagataaactaggaataaaatccaggaataaactccaggctttggagtcagataaactaggaataaaatccaggtctgcttaaatattacccaaattgtaaggctaatcatcctgtcttttaaaattacaataattactttgtttttacatt

SEQ ID NO: 310038 - DNA, 516 bp, Homo sapiens
ttgtaacttggggctggagctgctagtgacattgctaggctgggaaatttaaggagacatttgctctgagggtcccaaaagtgcaatgtcagccctgggagcaaatgcctcctaaattttgagccctagggcctcactccctttaccctagtcctggctctgaattgcaacactaagtcacattggctataaatacagaatagcattcaaagcttggaaaaatgaacattttaagtaacttacagtggattgtattagaagtcagcaaaaaattttaaacacatgaggaatatwtatatagcattctctttttagattatacattaaaaggtactaggaaaatttaaaatttttatgcccagttttaaaaatatatgaatagtaatgttagaaccactagcatacctcaacaaatattgagcaaactaagtgcatccacatctttatttcatcattagtttggtgacttgaaataaattttatgttaaacactatgagcaaatcgaaaggttcatc

SEQ ID NO: 310039 - DNA, 563 bp, Homo sapiens
ctgaaaccctgtcccatcctgtggaactcagggcttacagtggatcaagtccttttgttttggattaagtgaaggttgccaggtggagggtgctagggggagggtgctgagagaaaatgctatataaactgtgtgttttttacaaatggtagtggttctgctatccagcccattaccactggactacactgtatggtaagtctcctcaacaaactctatgtcttgcttactggttctatgtctcttctcctgcctcttgaacatggtgtcattcctactgaatagtcaataggggtccagcacaacgtctatgaacttctaaaaaacaatttctaaatatatatggatgcttatgttttagtagcaaattgtcatataattaatcagcaccatgtaaakacatatgtatttgctttggttctagaaataactttggttcagtatactaagaaaatcatgggtattggaggagtggtcttcaaagagtcaaaagcataaatagtttcctaactttttttagttgtcatgtaaagtgttaattttttcctgagatattcaaacca

SEQ ID NO: 310040 - DNA, 582 bp, Homo sapiens
tttgcatcccagaacacagccattgcatctcaatttactgcctgattccacatgacctcatcttccataagccctctgttgaagttccttgtgtttgcstttggttccttgtctttcaggagcataaggaacctcagaacatccattgttattactatttggaagttctaagattgacgatattgtttaattgcagatttatacctagcccaccaagcagagagcaatggagtaactaccaattcatttattttcataatttagctacataggatcatatgagttgcattcttccttttcttacccattttttagattctcaaaattatgccttctacctagtgagagagaagaaaaactgcctgaagatatttgacataaagttatggaatctttcattagaaacagatggtataaggaaagtgttatgtttcatatctgggtataatagaagtcaaggtgtgcatccaggtttcctccaaaatatgtaaaaatgtatctaagggacttctttccttctttgagccaagactaggggaggtaaaacttttcatgttctgcctcatttaactctgaggaaac

SEQ ID NO: 310041 - DNA, 582 bp, Homo sapiens
tttgcatcccagaacacagccattgcatctcaatttactgcctgattccacatgacctcatcttccataagccctctgttgaagttccttgtgtttgcgtttggttccttgtctttcaggagcataaggaacctcagaacatccattgttattactatttggaagttctaagattgacgatattgtttaattgcagatttatacctagcccaccaagcagagagcaatggagtaactaccaattcatttattttcataatttagctacataggatcatatgagttgcattcttccttttcttacccattttttagattctcaaaattatgccttctacctagtgagagagaagaaaaactgcctgaagatatttgacataaagttatggaatctttcattagaaacagatggtataaggaaagtgttatgtttcatatctgggtataatagaagtcaaggtgtgcatccaggtttcctccaaaatatgtaaaaatgtatctaaggracttctttccttctttgagccaagactaggggaggtaaaacttttcatgttctgcctcatttaactctgaggaaac

SEQ ID NO: 310042 - DNA, 501 bp, Homo sapiens
catggctaaaaggagacaagatacagcttgggccattgcttcagagggtgcaatccccaagccttggtagcttccatgttttgttggtcctgtgggtgtgcagaaggcaagagtttggaaacctccacctagatttcagaggatgtatggaaatgtctggatgtccaggcagaaatctgctgcaggggcagaacctctgctagggcaatgcagggggatattggttgctggagcccccacacagagtcccactggggcactacctagtggcgctgtgagaagaaggtcactgttctctagatcccagaatggtcgatccactgacagcttgcgctgttcatctggaaaagcttcaggcactcagcaacagcccatgaaaatagccaatggggctatattctgcagagccacaggggttgagctgccgtccaaggccctgggaragtgctcttgcatgctcttgcatcagcatgtcttggatgtaagatatggagccaaagg

SEQ ID NO: 310043 - DNA, 579 bp, Homo sapiens
acacacttggtttattgatggcagttctaccaggcctgattaggcctcaccagcaaaggcaggctatgctatagtatcttccacacctatcattgaggctaccactctgtccccctccactacctctcaacaagccaaactcattgccttaactcgagccctcgctcttgcgaaaggactacacgtcaatattcatactgactcctttttyggactcagcccatctgcacccaggtgaaataaacagccttgctgctcacgcaaaagcctatttggtggtctcttcacacggatgcgtgagacaatatggatataggcagcttttctttttactcatttctagtttaggtcacaataaatgattccaataatcataaatttaaaaatgaaatttattttaaagctaccatacatcttgggggagaaaaagggtaaacattggaggatatatggcttatgtgtattatctacattgttttgatgttacatccagaacttttacaccttattgccataggcttattttacataagatgaaagacattttatcaggaagatttcttctaaagtattcactca

SEQ ID NO: 310044 - DNA, 588 bp, Homo sapiens
tagttatatagaataaagctgaaaaaattagctgagtaatactctgtgtgtgcacctacatgcacatgtaacaaggtaataagttctattttcttagatgtctcagtgtatcttgaacatatgacaaatagttaatgttttctgggtgactacactgaagcctaccactcacttgggacacagatgtcattttttggtgtgtgattatacttgctatcttatggtcacaacttttaaatgctacatagaagcattaatatttttatttttccttttacatccttcactgaaatcaacccartctgctcaacagttcaccaaggatcttgctatctccaatttcaggatatgtttttcatcaccaatacccaggttaatgcacactcctcaaccgtttgtcactccctgcccagcattgcttttgagattgaactctggacggcccttccatgttctcttttctgtaaaaaggaggcttttcatttctggcagcacttgcctaggagacagcaaagttaaatgttgtgtgtcatcacaatcagtcttaactagctaaaactaattaaacgctaggaattttgagtaacc

SEQ ID NO: 310045 - DNA, 588 bp, Homo sapiens
tagttatatagaataaagctgaaaaaattagctgagtaatactctgtgtgtgcacctacatgcacatgtaacaaggtaataagttctattttcttagatgtctcagtgtatcttgaacatatgacaaatagttaatgttttctgggtgactacactgaagcctaccactcacttgggacacagatgtcattttttggtgtgtgattatacttgctatcttatggtcacaacttttaaatgctacatagaagcattaatatttttatttttccttttacatccttcactgaaatcaacccaatctgctcaacagttcaccaaggatcttgctatctccaatttcaggatatgtttttcatcaccaatacccaggttaatgcacactcctcaaccgtttgtcactccctgcccagcattgcttttgagattgaactctggacggcccttccatgttctcttttctgtaaaaaggaggcttttcatttctggcagcacttgcctaggagacagcaaagttaaatgttgtgtgtcatcacaatcagtcttaactagctaaaactaatkaaacgctaggaattttgagtaacc

SEQ ID NO: 310046 - DNA, 607 bp, Homo sapiens
tctaaccacatattaaaatttgacaatcatttactgaggatattgcccctggtagtgtcttaataaatgcctgttaggttgactctgataatcctttctctcaagctatcttaaaaagaagggaatccaaaaattccagaaagaaatgaggaaaaaagttacaaagaatgaagtagggagtttaggtttatgagcaattagagggaactgagtcttcacaaagaaacacagtatcctgatttcctatctcatgcttgattttcctacattgtctcaccccagctgcatgattccatgtatctcrctaaccctcctggttgccttctgtaaggttacacgtggattctgagaaaattctttttcaactttctatcccttattcccatttcagtctatgtcttcacagaaaattatcactgcaaagctgagcagtttctggagaaacttggctcattcactgaactcttcagcaagggttggttccctttgcacatcttcactaaacttggagctttttgatgactctcattttctattaccaccataatctttagatgtccaggttgcttggggcaaagatggaagttggaagtaaggaaaaacatgg

SEQ ID NO: 310047 - DNA, 607 bp, Homo sapiens
tctaaccacatattaaaatttgacaatcatttactgaggatattgcccctggtagtgtcttaataaatgcctgttaggttgactctgataatcctttctctcaagctatcttaaaaagaagggaatccaaaaattccagaaagaaatgaggaaaaaagttacaaagaatgaagtagggagtttaggtttatgagcaattagagggaactgagtcttcacaaagaaacacagtatcctgatttcctatctcatgcttgattttcctacattgtctcaccccagctgcatgattccatgtatctcactaaccctcctggttgccttctgtaaggttacacgtggattctgagaaaattctttttcaactttctawcccttattcccatttcagtctatgtcttcacagaaaattatcactgcaaagctgagcagtttctggagaaacttggctcattcactgaactcttcagcaagggttggttccctttgcacatcttcactaaacttggagctttttgatgactctcattttctattaccaccataatctttagatgtccaggttgcttggggcaaagatggaagttggaagtaaggaaaaacatgg

SEQ ID NO: 310048 - DNA, 572 bp, Homo sapiens
gatccttgccctgaacaagatgtcatttcataaacccaattaaaaatggtatttactgtggtttaaataccaaggcagattaaatgtattgtccagtttcacagatcagcaatgcttctcttcccatatcactagctcatgatagtaacataagagaccaatctgtgccagtggataggccagaattaaaagaggataaatattgctgtcctgcctgaaataaaactgggcaccgaaggtgtcagagagttatatactgtgaaatgaatgtcccatatatataaatttcagcctttttaaaataaggtagaattgtttctgaaagattaaaaactctctttccaaatcattgaattaaaatatttagtcaataaataaatcactgctattttcatcaatattggagttgtttcttcaagtttgtgaattttctcaattagaaaaaaagtctaatttgtttaaatagtgagaagtcaacattgaactgttgtctactcagtagccacaattccttatttcttgtttacaatgatcatagattttttaygtttgtattgttgcaacaagttcac

SEQ ID NO: 310049 - DNA, 591 bp, Homo sapiens
tgcaaccaattcacaaaactcacgagcaaggagtaaacacttgctgttataggtcattaacttyttgtcatgtttcttaagcattactggagcaaaagcgaactaatacaaacgttaatgtaattccctttgcttgtgattgatttagagatgaacatttgttctgtttccagctaatagaatgtatttaggaagaatgccaaagcagggagcttattagtaggattttgacctctaatgaaaatgatggccatatatatgaaattttttctttctttggttttattgtttaaagacataattatttaagttgtgttagttgtgtgtgatcttataactgtgaggaattacatagaatgaaaatggaatgtgctgtgatggcggaacagaaagaagttgggtgattgaaattgttgagctgctgcaggaaatctggtagtctccatttccagaggtcttgtattgtagaaaaattgaataactttattgcttaagtcactataagaatgtcttctgttacttgcaacccaatgcacccaactaataaagtatgtttctagaaatacacttgccttcactctttttaagaca

SEQ ID NO: 310050 - DNA, 591 bp, Homo sapiens
tgcaaccaattcacaaaactcacgagcaaggagtaaacacttgctgttataggtcattaactttttgtcatgtttcttaagcaytactggagcaaaagcgaactaatacaaacgttaatgtaattccctttgcttgtgattgatttagagatgaacatttgttctgtttccagctaatagaatgtatttaggaagaatgccaaagcagggagcttattagtaggattttgacctctaatgaaaatgatggccatatatatgaaattttttctttctttggttttattgtttaaagacataattatttaagttgtgttagttgtgtgtgatcttataactgtgaggaattacatagaatgaaaatggaatgtgctgtgatggcggaacagaaagaagttgggtgattgaaattgttgagctgctgcaggaaatctggtagtctccatttccagaggtcttgtattgtagaaaaattgaataactttattgcttaagtcactataagaatgtcttctgttacttgcaacccaatgcacccaactaataaagtatgtttctagaaatacacttgccttcactctttttaagaca

SEQ ID NO: 310051 - DNA, 591 bp, Homo sapiens
tgcaaccaattcacaaaactcacgagcaaggagtaaacacttgctgttataggtcattaactttttgtcatgtttcttaagcattaytggagcaaaagcgaactaatacaaacgttaatgtaattccctttgcttgtgattgatttagagatgaacatttgttctgtttccagctaatagaatgtatttaggaagaatgccaaagcagggagcttattagtaggattttgacctctaatgaaaatgatggccatatatatgaaattttttctttctttggttttattgtttaaagacataattatttaagttgtgttagttgtgtgtgatcttataactgtgaggaattacatagaatgaaaatggaatgtgctgtgatggcggaacagaaagaagttgggtgattgaaattgttgagctgctgcaggaaatctggtagtctccatttccagaggtcttgtattgtagaaaaattgaataactttattgcttaagtcactataagaatgtcttctgttacttgcaacccaatgcacccaactaataaagtatgtttctagaaatacacttgccttcactctttttaagaca

SEQ ID NO: 310052 - DNA, 591 bp, Homo sapiens
tgcaaccaattcacaaaactcacgagcaaggagtaaacacttgctgttataggtcattaactttttgtcatgtttcttaagcattactggagcaaaagcgaactaatacaaacgttaatgtaattccctttgcttgtgattgatttagagatgaacatttgttctgtttccagctaatagaatgtatttaggaagaatgccaaagcagggagcttattagtaggattttgacctctaatgaaaatgatggccatatatatgaaattttttctttctttggttttattgtttaaagacataattatttaagttgtgttagttgtgtgtgatcttataactgtgaggaattacatagaatgaaaatggaatgtgctgtgatggcggaacagaaagaagttgggtgattgaaattgttgagctgctgcaggaaatctggtagtctccatttccagaggtcttgtattgtagaaaaattgaataactttattgcttaagtcactataagaatgtcttctgttacttgcaacmcaatgcacccaactaataaagtatgtttctagaaatacacttgccttcactctttttaagaca

SEQ ID NO: 310053 - DNA, 562 bp, Homo sapiens
ttcccaactagttgtgcttcattattatatttccacccataagtaggtatatgtccatacaaaactcaatttgggagatcagagcttgcctctcttactgagacatctgatgcttttgagggaggtgtccatctcaatgttgcttctcatcccaagactcacyctccccagtcccagcaattccatgtgatacattgtcaatagctgtaacaaggatagttacaatttacgctgcatttagtatctgaagtatgtgtccttgttttaaagtaatgactttgatttactgctttctgaattcccataataactctttgacatatatttaatcatcctgattttatattttagagagttcagttcagactttaagcgtcttttctaaagtcgaatagccaggagatgggggactggtgtctgctgtctgtgatgtagtcatttccgtggctggtgttggtgtgatgcttggttttactacaatcccttttgtggtttttttttttttttccttgtggcacctccagcactgagattctgcttttatgtcctgccttttatggac

SEQ ID NO: 310054 - DNA, 586 bp, Homo sapiens
actaagccatggcagaactgcctctggtactgattgcccagcgcacgtgctggaatgagatcacccattgagggatgtgtgctgagtgcctctgtgtacaagttgagcggaaggaggtctcaccgccccattataaaatatacattctgaagctgcaagacaccaaccagtgctagtattaatcatctaatgtggctgttgtaacaaattaccacaaatttagtggcttaaaacaacgcacttttattatcttactgttctggaggtcagaaatttaaaataggtttcacgggccgaaaaccaaggtgtcggcatgctggtgtcttctggaggctctaggggagcgtctgttccctcacctcttccggcctctggaggttgtctgcattctttggcttagggccccttcttctatcttcaaaaccagcaacatggctccagtcctactcacattgctatctttctggtttgctctcttttgtctttctcttctccactgaaaaacccttgctggttatattgagaccacttacagtaatccaggataawgtcccatctgcctattttaagggtagctgattaacaa

SEQ ID NO: 310055 - DNA, 546 bp, Homo sapiens
cccctttgccatggaacataagatattcacaggtcccagggattgaggcttggacatctttsgtggtgtgggtggggcattattctgcatactcaatactcaagagaagggaaatctggactgaagtgtttcttgctgggccatggtggcgatgggagaggcaagttccacccagagatcattctttcccttctcgctgcctctccatcttcacagactgcagagagtcttgtaagcatgaggacacacccacccttagattctgcccacacttttttggaagccacacttaacagtagataggaacatagatttagacagattttaatttaaatcccagatttattcctagatctaagaacttgagtatattactaagctcagtttcttcattattaaaatgggtgaaataccttcctcctagtattgttgcaaggcttaaataaaagagtctccaaagagcacttagcagagcacatggcatatattaggacctcataaagaagagtttctgaaaatgaaggtttttctattcaatatttaatg

SEQ ID NO: 310056 - DNA, 617 bp, Homo sapiens
actgtcaacctggtccacttaagcagtggctaaggccacattccagcataacttgagtcagccctgccagaggaaggctggaaaggayacactcaagaacccattgtattttgttcctctgtacctcattgaaatattttttaaattgcaggtgtcctgaatttagtttttacaaagtaatggctagttctttccaatatttgatagataaattagactagttggtaacatttatttagcacctaatatatggcaagcactctactaagaaacatatgtgcattatttatgtaaagtagccaaccacactattaagtgagtagaattagtgatggatgaatctgaggcctgaagaagccaaatgacttccccaagtttgcatagggagtaaagaattgtattggtgtttccctcacagctctaacccctttgagttccactgttacttaagaacacagaagttaaatatatataaataaataaacaaataaatcttaatcaaatttcgctagccttgctattttttattcaagggatcattctcatagtctatctttgtcgcctctcaagacattggcacctccatatccttcatgctaggatgtgtaatattgtga

SEQ ID NO: 310057 - DNA, 617 bp, Homo sapiens
actgtcaacctggtccacttaagcagtggctaaggccacattccagcataacttgagtcagccctgccagaggaaggctggaaaggacacactcaagaacccattgtattttgttcctctgtacctcattgaaatattttttaaattgcaggtgtcctgaatttagtttttacaaagtaatggctagttctttccaatatttgatagataaattagactagttggtaacatttatttarcacctaatatatggcaagcactctactaagaaacatatgtgcattatttatgtaaagtagccaaccacactattaagtgagtagaattagtgatggatgaatctgaggcctgaagaagccaaatgacttccccaagtttgcatagggagtaaagaattgtattggtgtttccctcacagctctaacccctttgagttccactgttacttaagaacacagaagttaaatatatataaataaataaacaaataaatcttaatcaaatttcgctagccttgctattttttattcaagggatcattctcatagtctatctttgtcgcctctcaagacattggcacctccatatccttcatgctaggatgtgtaatattgtga

SEQ ID NO: 310058 - DNA, 617 bp, Homo sapiens
actgtcaacctggtccacttaagcagtggctaaggccacattccagcataacttgagtcagccctgccagaggaaggctggaaaggacacactcaagaacccattgtattttgttcctctgtacctcattgaaatattttttaaattgcaggtgtcctgaatttagtttttacaaagtaatggctagttctttccaatatttgatagataaattagactagttggtaacatttatttagcacctaatatatggcaagcactctrctaagaaacatatgtgcattatttatgtaaagtagccaaccacactattaagtgagtagaattagtgatggatgaatctgaggcctgaagaagccaaatgacttccccaagtttgcatagggagtaaagaattgtattggtgtttccctcacagctctaacccctttgagttccactgttacttaagaacacagaagttaaatatatataaataaataaacaaataaatcttaatcaaatttcgctagccttgctattttttattcaagggatcattctcatagtctatctttgtcgcctctcaagacattggcacctccatatccttcatgctaggatgtgtaatattgtga

SEQ ID NO: 310059 - DNA, 612 bp, Homo sapiens
taatgagattacttctctttagttattcctattgattatcaatcctccttcatgtaaaccaaagtccccatcaagtttcaaatgccttgtttttaaatatgagccaaaaaaaaaaaacccaagaagctacaagcacacaagaaaattaacatataaatgcaaaagaamaaataagtataaaataggaagaaagaaaggaaggtaggaaaaaggaaaagaggaaggaaggaaggaaggaggggaaggagggagaaaaaccagagaaagttgagatttaaaagaatagaaaatggcttaaaataataaaataaaatattgattactgttctcagagagagtcctgaagatatttaatttataaaaccactgttgtggcccttagaaatcattacttctaatgtcttttgttgatagtgtttattgaaaagaaaagtatttggatgaatgcttgttgcttaagggcttttgcttgaaaattgcaatattaattgtcagtacttttatagaaaacatcattgaatgactatatctgtgacacaaaaatgaaggggatagttttaatttgaagcattttctttatcacaaattacatatctagcagaattcacagcc

SEQ ID NO: 310060 - DNA, 285 bp, Homo sapiens
tttgtgaacttgcaaaggattttaaaactacccaggagaattctcaaggttagccatgacactattattaacctcttttcaattgtttagaataagagaactctaaaatctttttttctttcaatggtgtgcttagttccaatagtgactcaacctcaaagcttttaaatgcccggatgataatwttccaggttttcatcatatggtatggtttggatcagtgtctccactcaaatctcatgttgaaatgtaatccccaatgctggaggtggggcctgataggag

SEQ ID NO: 310061 - DNA, 594 bp, Homo sapiens
gtggtgacaccattgttccagtcaagactgggacaagggtgaagcaagccagccacttgggcacaatatttaaggcattgagagcatcaaggaagtgctgaccttgcttttgtatggctatgcaagggcttccttaaattttatgccctcaacatctcacttggctcaccctagtaccatccctgcttcttgctcaagccaaaaacttcagcatcatcctgtatgcctctgtttctcccatttccaatctaccaggatatcttattggctctacattcattaatattaaagtgtttgatccagtaattaaaamaaattagatatatcaaaagtaatggaggagttttttttaaaaaaatataattcttgtcctaaagaaggaaaaccaaaattctgctcttattttcacaaaggcagggagctaagagaggtagacatactgtttcagagtgtttaaaaatgtaatagactttgatttttagaccagttttaggtttacagaaaatgtgagcaaaatatacggggttcctgtatactctgtcccccaaccaacctccggtttttcctattattaacattttgtgttggtgtggc

SEQ ID NO: 310062 - DNA, 594 bp, Homo sapiens
gtggtgacaccattgttccagtcaagactgggacaagggtgaagcaagccagccacttgggcacaatatttaaggcattgagagcatcaaggaagtgctgaccttgcttttgtatggctatgcaagggcttccttaaattttatgccctcaacatctcacttggctcaccctagtaccatccctgcttcttgctcaagccaaaaacttcagcatcatcctgtatgcctctgtttctcccatttccaatctaccaggatatcttattggctctacattcattaatattaaagtgtttgatccagtaattaaaacaaattagatatatcaaaagtaatggaggagttttttttaaaaaaatataattcttgtcctaaagaaggaaaaccaaaattctgctcttattttcacaaaggcagggagctaagagaggtagacatactgtttcagagtgtttaaaaatgtaatagactttgatttttagaccagttttaggtttacagaaaatgtgagcaaaatatacggggttcctgtatactctgtcccccmaccaacctccggtttttcctattattaacattttgtgttggtgtggc

SEQ ID NO: 310063 - DNA, 446 bp, Homo sapiens
tatgattttaatgttaatttttttgagccgataccatttccaaaaacgtaacctacagaaatactaaaacatgcacagttatagcttaaaagaatgtggtgaaattatttgcagtagggcaaaatttaaaacaatgcaaatggttttcaaagaggattaagtaactatttaatgatgagtaagtagtaggttaaaaaaggaattattttgaataataagaaaaatagagattctaagatacatatttagtgaagaaagtctcaggatcacatgtttgctctcatttcatttttgcaaaacaaacaagaataaaaacaaaagctacacacgtgcgtgcacacacaccrcaagacacttgtgaattgaagggggtaatgttaatattcacacaggaaccatcagtgtgatataggagtgtcaagaaaaccaggatctataaccacctt

SEQ ID NO: 310064 - DNA, 570 bp, Homo sapiens
gtcccgagaattttggataaggaatactcaacctgtatttcaattgtttgcttgtttgccctgtcatcaaaaatgacccaggtgcggtggctcatgcctgtaatcccagcactttgggaggctgaggcgggcagatcacttcaggtcaggagttggagacccggccggccaacatggcaaaactctgtctctactaaaaataattttaaaaaaattagtctggcatggtggcaggctaattttgtaatctcagctactcagggggctgaggcaggagaattgcttgagcccaggaggcggaggttgcagtgagccaagattatgccactgcactccagcctgggtgagacagtgagactctgtctcaaaaaaaaaaacaaaaaagaaaaaaaagaaagaatgaatgaatgagtttcttcaagagagatattgtagctttttcatgtccatcactcccatgtataatatsgttccataacaactcagtccttatgaaactccattcagtaaggactcagttttttcagaatgaacagaccaagtaagaccaattaattacttattgtcatg

SEQ ID NO: 310065 - DNA, 583 bp, Homo sapiens
gaactaatttccttggaagtgattttttaaaacatccattgtagaaaattctttttctcacttgtgaacacctctgagaaagaagtattatttataaaagttggtacctgttgaactattacagagttgcggggaaaagccttcacagggttcacaagaaaaagccktctccaactatgccttacagacgtattcttaaaataatgacttgacatatttatatgtacatctttagcttaatatcttacctaattgtccaacaaactaattcaatgttgtttgcaatacattaaatgaacagaagataaactgggtaatagagaatccagagagcctagtggcccatgaaatcactggatttgcaaagtgattttctcttcagcaccgtgcaccatctgagaacaaaatctgtcggcaaagcactttagtggcaatcaatggatcagaatatagagacattaggaatgccacatggggtccaaccaatggtccatccaggccagcacaaaggcaacatgagaggattttggagagtgaggttgctcggtgcggtatcagtttataatgttgggattatttaaca

SEQ ID NO: 310066 - DNA, 571 bp, Homo sapiens
ttataaatttgtgttcaccaacattaagcagactgtcagtcctactgtgtttctttactccactctctctcattttagttaatcctccaacacccacatccgtagatcttcatagatctcacagtagaaatctaacttccyatttctttaaggaaacaaattctaccagaaaaaaatcatttcaacttcttgctgcgaaaacctcagatttctgtgcccttgaatgcatccattctgcctggcatcccaccaaaatgaaaggaaagtcccttcttcagtctaaagccaaccttccctctgcctcttcagaactctcatccttttgattgtcttctttctgtctggtgccttcaacctctctttttctaccaacttgtgaataccagattttcaatatgttccagacttccccgttaaaaaacaaagacaaaaattacaccgtttactccacttttacttctagctactacattccctgttcctaccttcataacaagtcttcttgaaagagttgtctacactgactctcttctgtcttttatcccttcattatgcctcaacccttgaaaaa

SEQ ID NO: 310067 - DNA, 604 bp, Homo sapiens
aattgccttactctgccctgtatgaaaactgcttttgtattgtcatgaataacttccttatcacttaattcagtgacaatctttgattctctttagctttaatcctccgtaacagcatctgacactttggtgctgcacagaaaatacataaagcagacctgaccgcttatccttagaaagtcctgcttacaaggttgccctyggccggcatctgagaatcttgatttgaggagaattcccaccactcccagaagtaattattgaaataaggattgtgaagagatatctgtactcccatatttattgcagcattattcataatagccaacatatggaagcaacccaaaaatttacagacagatgagtgggtaaagaaattgtgacaaatatgtacaatggaatattattcagcctcaaagaagagagaaatcatgccatttcaaacaacatggatgaacctggaggacattatgctgaatgaaataagccaggcacggcaggacactgcattattccacttacatgaggtacccgaaatagtcaaactcctagaaacagtgaaaagaacagtggttaccagggaacagggggaggagaaaatagg

SEQ ID NO: 310068 - DNA, 563 bp, Homo sapiens
gtactcccatatttattgcagcattattcataatagccaacatatggaagcaacccaaaaatttacagacagatgagtgggtaaagaaattgtgacaaatatgtacaatggaatattattcagcctcaaagaagagagaaatcatgccatttcaaacaacatggatgaacctggaggacattatgctgaatgaaataagccaggcacggcaggacactgcattattccacttacatgaggtacccgaaatagtcaaactcctagaaacagtgaaaagaacagtggttaccagggaacagggggaggagaaaatagggagttgcttctcagctggtagkaaattacaattatgcaggaagaattagctctagagacctgttgtgcagcataatgcttatagtcaccaatattgtattatgcgcttaaatatttgtttagagggcagatttcatattaagtattcttatcacaaaaacaaacaaattcacaagggacacaagaaaatttttggaggtgatagataagttttttaccttgattgtagtgatggtttcacatgtata

SEQ ID NO: 310069 - DNA, 563 bp, Homo sapiens
gtactcccatatttattgcagcattattcataatagccaacatatggaagcaacccaaaaatttacagacagatgagtgggtaaagaaattgtgacaaatatgtacaatggaatattattcagcctcaaagaagagagaaatcatgccatttcaaacaacatggatgaacctggaggacattatgctgaatgaaataagccaggcacggcaggacactgcattattccacttacatgaggtacccgaaatagtcaaactcctagaaacagtgaaaagaacagtggttaccagggaacagggggaggagaaaatagggagttgcttctcagctggtaggaaattacaattatgcaggaagaattagctctagagacctgttgtgcagcataatgcttatagtcaccaatattgtattatgcgcttaaatatttgtttagagggcagatttcatattaagtattcttatcacaaaaacaaacaaattcacaagggacacaagaaaatttttggaggtgatagataagttttttaccttgattrtagtgatggtttcacatgtata

SEQ ID NO: 310070 - DNA, 557 bp, Homo sapiens
ctgcgtaaaacactctctagagccacttgtacttggctaatcttacttgttcctacagtcttggcttaaacatcaattttgaaaggaaagtctcctttgcccctagattagttaggcttcctgctacaacttaacctgttccctaagcttcctcctcattagtgtctcctcatattgtcattattacttgcctgtcttccttcccattagacttgcagttctatgacattgtggactatgatttgtgttccatagtatattcaaaagctatcacagtgactagcaaataaataaataaataaataaataaataaataaataaataataaacctggtaggattaaattggtgttctctaaggtagcaaagattagattacaactccagggctttctggcccaaggatctctgaactgatgattaatatgaagactacttaccaaaccagcttcagaactgacatgttttcaaaacrggcttttaaaaaaacatgtcacaatgttttgtgacaaaagtaggctttgtatcaaggtatctgactttctatgcttcactca

SEQ ID NO: 310071 - DNA, 527 bp, Homo sapiens
gctctatttgcactagggaaatagcaaasaacactactgcctataaaagggaggtagttatattagtctgttctcacgctgcttatgacatacctgagactgggtaatttataaaggaaagaggtttaatttactcacagttccacatggttagggaagctcacaatcatggtggaaggtaaatgaggagcaaagtcgcatcttacatggtggcaggcaagagagcttgcgtgggggagctgccccttataaaactatcagatcttttgagacttgttcactatcacaaggacagcatgagaaaacgtgcccccatgattcaattacctcctaccaggtccctctcacgacacgtgaggattattacaattcaagttgagattcgggtggtgacagagtcaaaccatattagtagtactaacactttcccagcacttactagttcattcattgcttcatgccgttataagtcatgcaaaattgtcagaggcataaaacatttcctggatttgtttccaagatgatgg

SEQ ID NO: 310072 - DNA, 527 bp, Homo sapiens
gctctatttgcactagggaaatagcaaagaacactactgcctataaaagggaggtagttatattagtctgttctcacgctgcttatgacatacctgagactgggtaatttataaaggaaagaggtttaatttactcacagttccacatggttagggaagctcacaatcatggtggaaggtaaatgaggagcaaagtcgcatcttacatggtggcaggcaagagagcttgcgtgggggagctgccccttataaaactatcagatcttttgagacttgttcrctatcacaaggacagcatgagaaaacgtgcccccatgattcaattacctcctaccaggtccctctcacgacacgtgaggattattacaattcaagttgagattcgggtggtgacagagtcaaaccatattagtagtactaacactttcccagcacttactagttcattcattgcttcatgccgttataagtcatgcaaaattgtcagaggcataaaacatttcctggatttgtttccaagatgatgg

SEQ ID NO: 310073 - DNA, 584 bp, Homo sapiens
cgttaacatatgacaaagcctgatgtccaagaggaggaaggctataaagacttttgcctatttactctcatcatcatygtcactacactataaatggactgacattgaatatcaattagagtttcaatttcattagttacttgtaaatatcatacatcatttgttaaacatatttatcttcatgtaaatatgtaacaagtgatgtatagtatatttaatatttgggataaagtattaacaaattattttactaactttataaacagattacagaatacttttgtggaatattctctaggtgccattgattatgcagaccaagttaacattattaataacaccagataaattgtactgagttcagataacttcagacacagaagagctgggagcattgtacaatttccatcttctataaggctgctatgtctatgaatgcaattttttaaaatgtgttaggtgaaccttgagaatcaaaaataactatagtcacagtaaaaatcccaacattacactgtgattgaaaggcagaaactgaattttatgaaaacgtgcaattcaattaatgtaaggttaaggaatta

SEQ ID NO: 310074 - DNA, 584 bp, Homo sapiens
cgttaacatatgacaaagcctgatgtccaagaggaggaaggctataaagacttttgcctatttactctcatcatcattgtcactacactataaatggactgacattgaatatcaattagagtttcaatttcattagttacttgtaaatatcatacatcatttgttaaacatatttatcttcatgtaaatatgtaacaagtgatgtatagtatatttaatatttgggataaagtattaacaaattattttactaactttataaacagattacagaatacytttgtggaatattctctaggtgccattgattatgcagaccaagttaacattattaataacaccagataaattgtactgagttcagataacttcagacacagaagagctgggagcattgtacaatttccatcttctataaggctgctatgtctatgaatgcaattttttaaaatgtgttaggtgaaccttgagaatcaaaaataactatagtcacagtaaaaatcccaacattacactgtgattgaaaggcagaaactgaattttatgaaaacgtgcaattcaattaatgtaaggttaaggaatta

SEQ ID NO: 310075 - DNA, 565 bp, Homo sapiens
ttgcccattttgagttaaatcctaagggggatgatttgaggtcttgtggatgggtagaccttgaccctcaatgtttccctatcggacctcatttctttggactctctgtccactctttcccacctccataaatacctagaactatcaacttctctgacacttgatgaggaatagaattccattatcaactgtattatatacaatttatgttatcaattgtggcatgctgacatgagttttaatatttgagagtttcaaattaatagtcagttttactaaaggattaattttccttagaccttttagttcatctatgttttattaacttataagtaatatttagataaaaatgagagtagtttatttcatcttatttaaaattaatggttaacccaagttaagcagttaatgtttcctaaccagtagttcctgcttacaaacttagtgaagtacattctcttaaacacactaaactaaattttataaattaaatatayatatatttaaacatgatatgaaatgttattaatctaataaataaattgacataagccaggaactgagt

SEQ ID NO: 310076 - DNA, 570 bp, Homo sapiens
tcagaatgcttctcaggtgtcccaggagaggtgttaatttggcagtcaggtgtctgaatctgcacacagaggggaggtcaaagctggacgtgttagtttagaaataaccagcatttgggtaagatttaaacctatgacataggataaaattatctagagagagcatttactcagacagctctcaatattcaggaacacaagcctagccagactggctcaggataaatacagttttatgtagaagatgaataggtgtccatgtagaaccaaagtgaaggcacaaataaatacaagtctatcatctctcttggttacacagagtacatgaggcagtaaaggataaggattaagctctcaacatgtgaatgtcttgaattcagacttcaaacagaactgaatttgaatctgtttcccaccagccaaatgagggtttggtgacgatgaccatgatgatgacaatgacttacatttcttaatgtttcccctatgtgtgttggacttttaaacttgwtccagtacaggtaggaaaaggaaattcacattagtttttatgtgagatatatatatata

SEQ ID NO: 310077 - DNA, 523 bp, Homo sapiens
atgacagagaaggagaagcccaaattcatggggatgtggagttcatgtgaccaagagaatatacagcagaggctttagcaagaaaacagctactgtctggaagaaagtgtgtccacatcattttgcccatggacgtcaggaggtaagcacattaaacaggtagggaggaggaaaatgccccctttccagcctgattgaccacatcacacgtggaaatagaatgaataccaatcccagtgtttatgacagaaaacacgaacagattgagatcctcctatggcaacaagatarccagagtctagggatacccaagttaacctagaccagtttttaggtaaatacactcatagcaaatagaagggaaattattattcattattgtgggggttctctgcaagtcctgcagtaatctgagacctagcatgtacagcactcattttgctcaagtgagaagccctttccttacatctaattctgaatccccaagatgggggaatggaagcagccagacagcaagtgagaa

SEQ ID NO: 310078 - DNA, 538 bp, Homo sapiens
ggattcactttgctgtgagttcctccctctcagcaatttcctttatactttctgctgccgacctcttttcagtccttgagaggaaaagctgggtctttttctactctgctcacttcctgtgattgcacccacatccagggctaagtggtaggagtacagagaggaaaaaaaagttgatggagagaggttgcctactctcttgaaacaacagcttctgggatagtggaggaatgtttccctccctcagagttttaggtacctgtgggcgccyaactgttaactgccaggatccttttcccagtttcttaagcctgaactggagggcttctcctggatctctgcattgatttccacttccaggtttcccccaagtccaggtggcaggatacaagaggagaaaaaagtaaacttaccactggttccatgctaccattgaattttgatattttgccatctacctcccaccatttacttttcagaatctttaaatagctgctccaagcattctggggttttatagctatattcagtaggagag

SEQ ID NO: 310079 - DNA, 513 bp, Homo sapiens
cccggcaggatttttctaattctgtgaaaaatgatgtttgtagtttgataggaatagcattgaatctgtggattgctttgggcagtatggccattttaatgatattgattcttctagctcatgagcttggaatgtttttccatttgtttgtgtcatctctgatttctttcagcgtgttttgtagttcttgtccagctcacattttatcttcatactttgagtagcctccttccatgaatggatcatccagtggccrcacttaggttctcctatgaagatttttgttgtattgtacctcagaaccatctccatattctctaaataataataatgatggtcataaattgaatagaagtatttactagatgaggaggaaaaccctaaaacaaaacatgaacataaaatatttttaaaaggaagacatacaaacagacactataaccaaataagatgacagaattaaggccttatgccacagccagagttgaaaaatgcagaaaaaaagtttaaaaa

SEQ ID NO: 310080 - DNA, 571 bp, Homo sapiens
gccactctcttctgtcaccctttgctccctcctcacagattcccaggacttgccagacagaattrttgccttttcaaatgatttaaacctcctctctcaaggctttcctccccaaattctccacctcccctcaattcctctgactcccttgtacattccatattgttctctttgtcactttctttctctcttttttaccactcccatgtccaggtatgctcgtgtatggagagacaacattctacttaggttaaatgatctccttttcaaaaatgtggagtgtatttccacaaatctcagacactgagtaggtaggatattagagttgcaagaatgtttggacagtagcaactttaaatattgcttttctgtttgtggttctttgagacatatccaaacaactaatggaaacaattttttttctaagttttaagtaagctctgttgctttggtgtcagcagcctctactgctgcctcttgccagctttccacttggtagaagatgcttcctaaagatgcactttgtgaagtctctgcagaaccagcatagaccaagccaaatcatgatgaa

SEQ ID NO: 310081 - DNA, 608 bp, Homo sapiens
atagattacctgaagtagtttaaagtggtctatttgatattctgagcctatgtttttaatgacatttcccagagaataattctgtcccaagactgcacactaggtcttaaggccttaagatactgatgaaatatcactctaactagaaataattttcaaatacaggctatcaatgtttcacctataaaaatcttgttcctctaaaagaggcaaaaatgacaaaagatgttttaatttatattttagtaacttagtggccrctataggatgtatttcaaagtatgctctcatgtggattagaaatattaaaagtaaatccaaagggcaggctttatgacactgcttattttggatgcagtctagactcactttttgaagtgttaactatgttatcaatgtccctctaccctgctcatatgcgttcagtactaaagacctggtaagacaggtgctacctgattccatgtttcctagttctctcaaattggaataacattttaaccctccaaatatttgtcccacgtgaagaattttgtatccgtccagatgattacaggcctgaaccagaaactgattcaaacaacttcattcactgctgaatgtgaact

SEQ ID NO: 310082 - DNA, 608 bp, Homo sapiens
tagggagtttgtggtcaggtgggaagatagaaataaaataattactgaaataaaatttgaattcaacttatgaaaagcactatgaaagagtacagtagcctgtgagtttataataaggcttccctagggaagtgacattaaaggtaagaagcatagaatccagtcaggagaccacatcaggcaggtaacagctgcccagcggcacctccctggacacatttaccccatcaggatcaggaacctgccagtctgtcaggagctcccatcttgaactgaggcctgtttcatcaatcatctaatgtctatcacatcccactctgtgcaagtcactttacgtacgccactgcggactttctcatgttatccttttacaggcgatgtgcaatgaggttaagtaacttrtacaaggacataaaacggcatgtcagagtcaagattcacaccagatctttctgctcacagcgcccatgctctttcctctactgaagctgtctcccagatgccaagcccagatctctttattctgcattatgctgcttgccttgacagaaaggaaaccattagaagtgcttggggagaacgaaaatgcagagggagggcgggaaaat

SEQ ID NO: 310083 - DNA, 524 bp, Homo sapiens
ctttataccctgcagtaagccatcagtccttaagtcatttttgaggccatcctgaaaattttctagctcttcatgtttttactgatgtgtgtggttgacaaaagagtaggcaataaacacacaaatgtagacagtgtgaatccgtatatatttaggttgatgtctccatgattacttaataatacataggtcagtatgtcatacaatcatttatcattaattcrtgtttctgatccagacacatttttgctatatgaacttccttactgcaaaaacaaacaaacaaataaaacagccctaatgtaacagacacctgtttagcacattcctttaaaactccttgctgttgttgcattctcttccctgattttggttttctgtgtacacttaagcactcatctatgtacttaaaacaaacgagcaaaacagagcaaaacataatatatccctcctttcctcctggcaagacaccaaacaacaagccttctccttattccctacatatcccttattttctctttaac

SEQ ID NO: 310084 - DNA, 531 bp, Homo sapiens
aaataatagatgaagggaagtatctttttatagactattcccaactagtaaatgaaaaagaaataatggaattggaatattctatagcccacaataaattaataaatccagacattgagcrttgatgtctgctaatgtcatgaagagagacaaccagatgttgtgtgcccttagaggtaccacccatcactgtcttgccaaaggaatcaaacctgagtctggttaagcctctgaatccagctggcaggttgcaggaaatatgtaaaagacagaaaaatgtgttgaactgcatcaggagtaagcaaccagccccatccagactgcaggaaactctaggccaaatgctctaggtacttcaacagataagttgcatggaaaagaaaagtttgaagaggaaaactgtaggtttaagagatgttaaggacatatcaaagttttcaaaaatggacaaaactgaactacagtgtttagggatgccaattgggtgataaaccacacacacacaaaaatagaaggaagtgatttctgtag

SEQ ID NO: 310085 - DNA, 531 bp, Homo sapiens
aaataatagatgaagggaagtatctttttatagactattcccaactagtaaatgaaaaagaaataatggaattggaatattctatagcccacaataaattaataaatccagacattgagcattgatgtctgctaatgtcatgaagagagacaaccagatgttgtgtgcccttagaggtaccacccatcactgtcttgccaaaggaatcaaacctgagtctggttaagcctctgaatccagctggcaggttgcaggaaatatgtaaaagacagaaaaatgtgttgaactgcatcaggagtaagcaaccagccccatccagactgcaggaaactctaggccaaatgctctaggtacttcaacagataagttgcrtggaaaagaaaagtttgaagaggaaaactgtaggtttaagagatgttaaggacatatcaaagttttcaaaaatggacaaaactgaactacagtgtttagggatgccaattgggtgataaaccacacacacacaaaaatagaaggaagtgatttctgtag

SEQ ID NO: 310086 - DNA, 592 bp, Homo sapiens
ctatttgcattatttttttcggtagaaattttagattacttagttccttgaacaacataaaaaaatctagatttagaaggacttaaattagagggaggcttcctcccaccccccaagaatggcaattccttggctatatgggagaatttcgaggataagaggaaagagaagatttggggtaccactttactttgttttccaagttctgagaaagcctatttggcaagaaatacaaattgatccaaagattattttgactgaatcaacaacataggcgctctaaattacaaaaaagaaaaaaagaataacaaaacaaaaaacacattacttttcctcctgaaaatatttaaatagagaagcaaggaacaataggaaaatgttcttagaagaacatggcaatttstgtcttctacccagaaaaagatacaagagataatgtcaaataagtgctttcagagtttaagctggcagcccgggacctgggttttcacttctgctaagtattttctccctttccaactgcaacacagtcttgaaactacagaaatatttttctttttctgttttttttttttttttttttttttgagac

SEQ ID NO: 310087 - DNA, 420 bp, Homo sapiens
aaaatgtataagctcagtctaatcatcaagaaataccagaaaaacccagattaagagttactctataaaaagtctacgggttgggaacaatagacactgaggactactagaggagggagggagggaaggtgcaagggttggaaaactacctattgggtactatgctcactacctgggtgtcgggatcaatggtgccccaaacctcagcatcacgcaatatacccatgtaacaaacttgcacatatactccctgagtctaaaataaaagttgaaattaaaaaaaaaaatacaactggcccataaccttggcattttgaaagactggctgaagaactgctccagaataaatgagactacagacatgacaactaaatgtaatrttactccagagtggatccagatcagacttttttttttttt

SEQ ID NO: 310088 - DNA, 617 bp, Homo sapiens
cttacgcctcctcttagaaatcagatgaagctactatagtgcacagtmtgcccccttagcagatccctgtaggtagcagccctggtagattgataagaggtaaagaggcctgatggggagtcagggaaacctacactctattggtaggaatatgtatgggggtatatacatattcttcaaattataactttagtttgacagtgtctgttaacttcctttgatctaggaatgttactcaagtaatctagtctacaaaaacctttgcacaagtatacaaaattatatggaacaaagatatacctaacaacattatttattatcatgaaaatttgatattaaaccttaataggaaattagttaaataaatcatggtacatggaatacttgtaatgatgattaattgctcaacattcatctcaaccctgatgatgagactaattaattaactattgatgatcccattctgtttctcaatgattaggaaaactcaaggaagagaaactgctgccatcccactaccagcctgaggataataacaaggagaatcagtaagaagcacaaccataccatgactatctgtgtctagaaccatccaatttccgttatgtgacataatc

SEQ ID NO: 310089 - DNA, 406 bp, Homo sapiens
ttgtaaataaaaatgcattttgatagttatcaagttyacttaaagttgtatctatagaatatagtttaggcaatagtaatcattcctatgtacaaaagaagcttttccttttattaaaggaatagagttccagcctgagcaacatagtgatactgtgtctctacaaaaaataaaaaagaatcagccaggcatggtggtacatgcctgtagtcccagctactcaggaggctgaggccagggaatcatttgggagtttgaagctacagtcagctgtgatcatgccactgcactccagcctgtgtgacagagccagaccctgtctcaaaaaaaaaaaaaaaaaaagagttgtaaaatttaatttctctaaaccaatgtaacagcagaaaatgtatctaaaacttaaaac

SEQ ID NO: 310090 - DNA, 568 bp, Homo sapiens
gccccaggcctttatgcttcttaaattcttaagagtaggtattttaaaaacagttcgtccagatcctacatacctgtcaggctgtcacgtttttgtgktcagctagcggcctgacatggtagccagcagccctctttataatttgctgctgctaaatgcagtggtctaggaaatcttatcactaacccagctaggctgtgtataggatgtgagtttcagataatctgaattatatctcttctggctgctactttttaaaaactaacttctgtgtgcttgtctttacccccgaaaaagaaaaaaaaaagtgtctgagctctggaaaagcggccgtgtgattatcccatacaatttacagtgacaacatagccaagattcattttcttttaaaagtaaaattattaaagtaaatgtcaattccaaagccagtcaaatttggcaaagtttttaattaataggattattaaagatcatagtgaagtgtttttaaatatcaactattaacagaaaatgatatatagtagccacagaaatccctttatgctttaagaaagttcaatctccatat

SEQ ID NO: 310091 - DNA, 710 bp, Homo sapiens
gaggtacaaaatgctaaagtatatttttcatgatggaaaagacgaccagcatatgaagggatggatctgatttctctcccccaattcatatttttataacacaaaataaacacatttatttttccattttggaggtaatcacttttgtgtgtatttctcactttattgttcaaatcatgctttttcagttgtctgtgttatccagaggggtagagagatcttgataaacagtgcctgtgtgctccatgcattagctcaatttgatataaataataagtaacattcatggtgacatgaaaatgaaataagatgaytgtcattttgcaatctctgttctgctttttagggcattgtagttcattgagtgtttgcagtttgctctcttaagaataaaatcaaaagaaatttgggattcctaagcagaaattcagaaaacggttttgtctttgggaaactgaaatagaagtttcatctttgggaagtaaaggagctacttgttggtatttagcttatgaaatacaaaacaaaaaaaccaaatcacattaggggctaaattgggatttgtaataaatgctatactccaagacctttatctccattatagcaattattcctcaagtgagatttaaataaagttagtggcagaagatattggtggtggtgatattggtgatgaaaagtaaaaattttaaataagctttgcttattac

SEQ ID NO: 310092 - DNA, 612 bp, Homo sapiens
agggaaacaatcatcagcacacaatccggctaaagggataacatatgagtttgcttgttgtccttcatgggattcttctctttttatagctggacgccctatagggctcttggcagtccacgaaagacctggagtccgcctccccatttctccggtcggtgagtggcaggaggaaatcgccaaacatgttttcccgctttgcctccccaactcggaaacttgcaacttgccgtgtcctggaggttgagacaatttggggtctcttggctgccgtccaacagatttatctctgagggcagtgtccttggtgagaggtccaagtaggtgtgggcgacattktcctccatctcatgagggagcagccctgcacactagggcccaaaactctgcgaaggagcttggaagttcttcatccgttccacttgttttgctactccacacacccttctaggacatgttgattgccaactgctctgtgcagctttcccatagctgtctgttcccgtgcatttcggagcaccaagcaaatacgagcagagagacctggaaaaaaaaatgatgaagacagtattaatgataaaattaacatggctgagtgaattgtcaatgcaa

SEQ ID NO: 310093 - DNA, 564 bp, Homo sapiens
gagccacagcgcctggccaatacttaagtctttatgcttttaatgttcggctttttagaggccactacggaaatatcaaagtaaatgttcttgtagcacattctaatatccagttcaaattttaacttcagtttcaaattttgtcttgtctcattgctggcaaaataatgtatatatcttcattttctcaagattggtaaacattttgtttgtttttctttgtttgcttttgcttaaaagaatatgtctctataaggacatctggaaatagctatgaaaataaaatctaaaaattttgtgtgtrtcaaagttattaaaatattctgagcacgtatactttttaatataattatttttaaattatgattattataaaatttttaagacattttcttttaatgagccgaacacttctggaataatgtcaatgagcacgttcaaagggacattaggattccattgcagttgaactttctaggatccaaatgttttttgaatttgcatgcactatagtaatatattgaatgagttttaaagtgccctaagtgctttgttatttaggaa

SEQ ID NO: 310094 - DNA, 606 bp, Homo sapiens
atgttttatgactgcagcgaccttgtgtagtctagactcatttgtctctctttaatatttttaagtacatatctctaggattgtttgttaccatatgataaatatatgtgacagtacttttagaagcctttctttgtcataaagctcaagggaccctctccaaccaaaataaatttacatccctaggtaatcattcacattgaattagttatttaaggatattttatttactatgtaatgagttctaattaaattttaaatttttctgtgaatcttacattaagaagtaactcatgaagagaattctcaagaattttctagcctcttatatcaaatatttgtcacgttttaaaactaagaagacacacacacatatatacatacatatacatagaccaatagagatggctacaagtagttcgttagtatggatgaaactgcaaaagccatttgtgaagtaaaaaatgagataaaactttttcataaactkcagggtttttttttttttaatgtgcttgtccttttcctttcttttaatttttccttttattcttctctcctacaaacacacacaaacacatgcatacatgcatacacacacacaca

SEQ ID NO: 310095 - DNA, 532 bp, Homo sapiens
aaacacgacatgacaggtgactgcccatctctttgccgtttttttggttaaattgctttagctacatggccgatcacttaacaagtctttcattaagatcaacccagtagtgttgggattgacaatgtgctgggaacgagttctcctaataattgctaaatgttgttctcatcccaaacagggtaccacataaaatgcaggagatgaaccagcgtgctagctagctagccaggcagaaacaatagcatgtcttcaacttaagcaaggaattccattttctttttcccaagtgattgttgatttcctggtgatcatgactcaagacaaagcttaatgcaaaaacttcacatttccatgtcaagctgattgttggggtctgtattagtttcctatttctgctctaataaattayctccaacctaatggcttaaaacaacacaaatttatcatctgacacttgttcatcgcatgtctcagtggactaaagtcaaggtgtcacagggctgcatatctttctggaggctctaaggga

SEQ ID NO: 310096 - DNA, 582 bp, Homo sapiens
taatacaccctgtgatccctacctacaatgtagctttggtaaaattgccccttaggattttgacacaagaaatagaagcattagtgtgagtgtacagctatgcatctctctattgagcctctccattagacaatggggggcctaagagcatagtgccrggtgatatgatcagcgatggctgaaatcagaagcaagttcaagtttgactgatcaaactgaattagttggctcaagatccagcagctagtggaaagttctcctcttggtgaatgattcttttcttcagacagaaaaagaatgatgctgtcagcagctattctcaaagctatctgggcctcaacattgagcctcatggagtagtcagttcactgtacctctataaagcattttaactcatccagagtcccgatgcactgaacagtctatgactgatgggttttgtaggacagcctgacccactagccccagtgccatctgcccaggacagcctgaccctctcccatgactatgcttattctggtcccttcaggtttattttctgttcttcaaatggcccaatcacatctgcggctcaccaagccc

SEQ ID NO: 310097 - DNA, 582 bp, Homo sapiens
taatacaccctgtgatccctacctacaatgtagctttggtaaaattgccccttaggattttgacacaagaaatagaagcattagtgtgagtgtacagctatgcatctctctattgagcctctccattagacaatggggggcctaagagcatagtgccgggtgatatgatcagcgatggctgaaatcagaagcaagttcaagtttgactgatcaaactgaattagwtggctcaagatccagcagctagtggaaagttctcctcttggtgaatgattcttttcttcagacagaaaaagaatgatgctgtcagcagctattctcaaagctatctgggcctcaacattgagcctcatggagtagtcagttcactgtacctctataaagcattttaactcatccagagtcccgatgcactgaacagtctatgactgatgggttttgtaggacagcctgacccactagccccagtgccatctgcccaggacagcctgaccctctcccatgactatgcttattctggtcccttcaggtttattttctgttcttcaaatggcccaatcacatctgcggctcaccaagccc

SEQ ID NO: 310098 - DNA, 628 bp, Homo sapiens
ctcccaccaacaatgtgtaaacattcctttttctctgcaacctcaccaccaactggtttttttttttttttgacttttttatcatagccattctgactggtatgctctttagttttattcaattttgctctgagaagatatttgatataattttatctttaataattttttgaaatttgtttggtgtatcaacaaatggtctgtcctggagaatgttccatgtgctaatgagaagaatgaatattttgtagctattggatgaaatgttctgtaaatgtctgttatgtcatttggtctaatgtgtaatttagatctaatgtttctttgttaattttctgtctagatactctgtgtaatgcagagtgggatgttgaaatcctctgctattattgtattggagtgcatttctccctttagatctmataatatttgcttcatgtatctgggtgctccagttgggtgcctatatgtttagaatatactcttgctgaattgatccctttatcactatataatgagcttctttatctcttgttattttttttgacttaaagtctgttttatttgacataagtatagttactcctgctctcttttcatttccatttgcatggaatatttttttttc

SEQ ID NO: 310099 - DNA, 601 bp, Homo sapiens
tggcacttaagctttctaccataaaagaggaatacgtcagatatcatggaraagctgagaaagaatctgtagatttccttgctgttagagtcaaactacattaactggtctttgcaatgctattgagcaaagccatcaatggaccatggccatcactgtctctggctcatccagctgagtctgtctttacaggtgtctacatgtcccccttaggcataaacagagtggtcattaatggcccagggcacttagatgccccacccaaaacacagagggtggggttctttatcctcatggggacagtgctgatgtcctgtggaaactggggaggggatagtcagtgaggaaacctacctttataaaacaaaatccagagtaaatttatcctgaaacaacagaataatttcagcaagcacacatcaaatattttcacaagggtctttgaacatttatgttaagtttagtgagatatagaatgatccaggaaaaaaatgggcttcccaattatattctccaattaatgcaaacatagacacattactaattacacttagcaaaagttacaagaactgttttcaaggacactttttccaaggacatt

SEQ ID NO: 310100 - DNA, 601 bp, Homo sapiens
tggcacttaagctttctaccataaaagaggaatacgtcagatatcatggaaaagctgagaaagaatctgtagatttccttgctgttagagtcaaactacattaactggtctttgcaatgctattgagcaaagccatcaatggaccatggccatcactgtctctggctcatccagctgagtctgtctttacaggtgtctacatgtcccccttaggcataaacagagtggtcattaatggcccagggcacttagatgccccacccaaaacacagagggtggggttctttatcctcatggggacagtgctgatgtcctgtggaaactggggaggggatagtcagtgaggaaacctacctttataaaacaaaatccagagtaaatttatcctgaaacaacagaataatttcagcaagcacacatcaaatattttcacaagggtctttgaacatttaygttaagtttagtgagatatagaatgatccaggaaaaaaatgggcttcccaattatattctccaattaatgcaaacatagacacattactaattacacttagcaaaagttacaagaactgttttcaaggacactttttccaaggacatt

SEQ ID NO: 310101 - DNA, 569 bp, Homo sapiens
ctgcatgggtttccagtcactgcaactctggtgaggtgctgggttctgtgcagagccaaggaaaatggtgtccttccaactctgagccacatgtggtcatccgggccccagaagcagcaattctttttcccatactctcagaaaggccctttcaggagtcccatctgcttctgaatccaaaaccttttttcaaggataattaaaattagtccaaagatgcttggggatggwtgatgcccttgcatcttcctctattttccattgacgtcacataagccacacacacacacacacacacacacacacaccccacaaacacacacacttctttcctcctgcaattaaaaatagcccctttctctgaaaacagagacaaaaacactcagaatggaagtattcctgttggtggtgagatgttctctccattagctatggagtactgttttatgtgttgtgtgcttatgccttacaagatcttttaaagacactttatattcccagtgccttaacattagtgatgatccaagattaagaaaaatgatgacagctagtgctcacgcattcattct

SEQ ID NO: 310102 - DNA, 578 bp, Homo sapiens
atcttgcaaaactgaaatgctatacccattaacaacaaaaagtaagtttttgtgaagtataacatttctataaaaagtacattaaccagaaatacatagctatggattttcacaaagtgaatacacccatggaaccaccattcagattgtaaaatagaacatttaccagcatctctctctctcacacagttactactctgcacaattgttttttatatgttgactttggattaagcaacactgcaaaattcccatattcattcttatagattgtagattcttaggattttctacatacacagccacgtttattcatgaataaagatacttttatttcttttccaatccctatacttttttatcctcgactttattrtactgcctgggacttccagtaagagtggtgaatggatgtggggacaatggccatctttgtctcatctccgaccttgtgggggagctttctatatttctttattcagtatgatgtttgctataggtttttgtagctactctatcagattaaggaagttcccatctgtttctaatttgccaagggttttcgtctaaacaaatat

SEQ ID NO: 310103 - DNA, 578 bp, Homo sapiens
atcttgcaaaactgaaatgctatacccattaacaacaaaaagtaagtttttgtgaagtataacatttctataaaaagtacattaaccagaaatacatagctatggattttcacaaagtgaatacacccatggaaccaccattcagattgtaaaatagaacatttaccagcatctctctctctcacacagttactactctgcacaattgttttttatatgttgactttggattaagcaacactgcaaaattcccatattcattcttatagattgtagattcttaggattttctacatacacagccacgtttattcatgaataaagatacttttatttcttttccaatccctatacttttttatcctcgactttattgtactgmctgggacttccagtaagagtggtgaatggatgtggggacaatggccatctttgtctcatctccgaccttgtgggggagctttctatatttctttattcagtatgatgtttgctataggtttttgtagctactctatcagattaaggaagttcccatctgtttctaatttgccaagggttttcgtctaaacaaatat

SEQ ID NO: 310104 - DNA, 589 bp, Homo sapiens
caattacttctctgctttcatcttttgagctctgatacatcaagcagaaaaccatgcagctaaatgttggaattagcattgtgcaggtcctggaatgaatgggctagtgtcttttgctgccttttctgamtctttgttttggagagcagtgaaattaagatgattatcatccatcaatctatgagagtgcctatgaaagcatgaaaggatcttccttctcatatttatttttgctttcttagagagttgtcttttatcaggacagcttgctttttgttgaaattaatattatttgggctaattttgtgagttccatcaaaatcacaattgttttgttttttgtatctggtgtattaaaattcattttaaaatttaaaaggaaatatttatgaatgtagacaaataaaagattatttttagcacagttacagaaaagtagtctcccagtaattctgagaaagatcttaattctagggaatggatctagctcactagccatataaacatttttagttactaaatgtaaataaatgatggtgttttcataaatgactatacctctttttatggtgcacctgtctcccaaatg

SEQ ID NO: 310105 - DNA, 589 bp, Homo sapiens
caattacttctctgctttcatcttttgagctctgatacatcaagcagaaaaccatgcagctaaatgttggaattagcattgtgcaggtcctggaatgaatgggctagtgtcttttgctgccttttctgactctttgttttggagagcagtgaaattaagatgattatcatccatcaatctatgagagtgcctatgaaagcatgaaaggatcttccttctcatatttatttttgctttcttagagagttgtcttttatcaggacagcttgctttttgttgaaattaatattatttgggctaattttgtgagttccatcaaaatcacaattgttttgttttttgtatctggtgtattaaaattcattttaaaatttaaaaggaaatatttatgaatgtagacaaataaamgattatttttagcacagttacagaaaagtagtctcccagtaattctgagaaagatcttaattctagggaatggatctagctcactagccatataaacatttttagttactaaatgtaaataaatgatggtgttttcataaatgactatacctctttttatggtgcacctgtctcccaaatg

SEQ ID NO: 310106 - DNA, 492 bp, Homo sapiens
gattactatttcaaaggttgcaaacttggaaagttgacaagttgtttgattgcatactggttagtacaagtaatgcctcaaacagtgttacttgccttctatctgagcatatactttaggtttctataccagtttttctgatcaccactcttaccatcctcttcctatttcttcacatccgttcygtctttctctagggctttcccactagcttgtcctttttctacgttttccttacttccttccttctttctcctttatatctttttctccttccctatcttctttttgcctctcatcctcagaaccctgaagaaaaaggaagtagtgggaaaaaagttttaagtaaattacttttattattttcagtttaatgaataacctttgagtaattgctaaatttttgtacttcctattataagctcagttgcttgaaataagaaaaggtttaaagaagaagctagaatactagttatatgagttcttctttca

SEQ ID NO: 310107 - DNA, 492 bp, Homo sapiens
gattactatttcaaaggttgcaaacttggaaagttgacaagttgtttgattgcatactggttagtacaagtaatgcctcaaacagtgttacttgccttctatctgagcatatactttaggtttctataccagtttttctgatcaccactcttaccatcctcttcctatttcttcacatccgttctgtctttctctagggctttcccactagcttgtcctttttctacgtttyccttacttccttccttctttctcctttatatctttttctccttccctatcttctttttgcctctcatcctcagaaccctgaagaaaaaggaagtagtgggaaaaaagttttaagtaaattacttttattattttcagtttaatgaataacctttgagtaattgctaaatttttgtacttcctattataagctcagttgcttgaaataagaaaaggtttaaagaagaagctagaatactagttatatgagttcttctttca

SEQ ID NO: 310108 - DNA, 490 bp, Homo sapiens
attaatcataatagtctagtccacagattcccagagtatgtttgccagtacacgagtgttctggccaaattttaaaactctttcaagtaacattctttgagctttcwgtgactgcaggcactcttatagacactggggatatagcagtgaagaaaacagacagaaatccctgccatcataaaacatacattttagtgtagaaggcagatgataaataagttaagtaaaatatatagtggtgagcgctaaggagagaaataaaggcaagaataggaaaagcctaagtaacaataggaaaatggggtgaccctcagaaggagtcctgagaaaagggttaatgagtaatgacctgaaaatgagaggaagctctgcgacagagtagctctagagcaaggccttttctttgccttagtgtccccatctctaatatagggataataagagcaataataatgataataatggtttggggtattagattagatatcat

SEQ ID NO: 310109 - DNA, 611 bp, Homo sapiens
atgtcattaatcactggagacatttataacagaactatttataaaatagaattctcttaagttttaagtttctaattaatattatgtgagtcatcctaatatatatatatatatatatatatatatatatatatatatatatatatatttcagtaaacatattttgaaagttygttttttaattacaggctttatatattttttaaaatagtagtatttagtatatacatgtaactacaagaattaaaagtgaaagtttatactggctaaaattaaaaaaactacatttcatttacattgttactttttgcccttagaaacatcaagaaacacacatggctatatgtttgtataacagattacatggcttctctagcttaaaaccaaaactttgtgtattcttaatttttaatagaaaattttatttttaaaaaaatcataaggggttctttttcaagtgaaaatcttcatctttcatgaaatgttttccttacacaattctggtgtacaagagatctaaacagagagctacagataggcttatggagatgagtaacttcacaggctgagactcttatgttgtcatggtgcagctaacagggtgagtgaac

SEQ ID NO: 310110 - DNA, 618 bp, Homo sapiens
tttttagttctttaaatataagatcatgattatcactaagcagtaaacaagtgtagaaaatcattttaaaaagtgatttcacaagaaaatgttatagtgactatgccttttattgcagacctgtatgttctacttatcttgcttcctgcatttacaccctaatctcagtgtataactgaagcatttttgaaaatatgcaacattttttcttatatggaataaatatgtttgtgttccccaagagttcatggtgaaaaaaaaaaaaatcttacggaaacacagcaatatgaagccttaagaatacaacacacaactgtattatgctggtagaaaattgtcttactgttcatttaaattttgggggaaaaaaccctgggaaacaatttttaaatgtagtcttgttatttaggaattggtgacactttctgttaactaacctctggcttactctcacattccatacctccttcccagagagcatgagtgaatgttaatcctcctcacaggttcacagcagracaaacctgagctgagcttagagagcagacaggtatagtggaagtgcctcccctgcactccagccacactccttcagcttgaccttatccaccttgctat

SEQ ID NO: 310111 - DNA, 628 bp, Homo sapiens
tctgttggttcatcactgcacccttaacagctatcagtacatgaacacaaggtgcaaccgcactgtctattatatgaccccatttactctctgaatggtacttcattaaatggtaccttttggccatgctatggatggatgaaaatcaaagttatcaaggctgcgagtcctgaataatgagtttcacccaaccttgactatattcagatgagtcgaggtggctaagtgctcatcctagcttttacatgcttccctttagttaatamtaaattctattttatcagtttgtgattgtacgcctacaaacatggtatgcttattattacaggatagcagaataagttaccgtaacattgtaaacatgagtggtttgcattgaaaaagatgtatttctcctgttttgataacttttaatgtgttggtaaaatgtacagagtcctgtcacatattcatcaggatagatatttcattgatttgcaatttggtattttctgggttctgaatgtgccattttgttctggtttgcaattctaaaagtgaatatgtaaccatccagctgagttttttttttttatgtatggggaaatacttttcttttcttttcatatttttaacatacaagtatgta

SEQ ID NO: 310112 - DNA, 628 bp, Homo sapiens
tctgttggttcatcactgcacccttaacagctatcagtacatgaacacaaggtgcaaccgcactgtctattatatgaccccatttactctctgaatggtacttcattaaatggtaccttttggccatgctatggatggatgaaaatcaaagttatcaaggctgcgagtcctgaataatgagtttcacccaaccttgactatattcagatgagtcgaggtggctaagtgctcatcctagcttttacatgcttccctttagttaataataaattctattttatcagtttgtgattgyacgcctacaaacatggtatgcttattattacaggatagcagaataagttaccgtaacattgtaaacatgagtggtttgcattgaaaaagatgtatttctcctgttttgataacttttaatgtgttggtaaaatgtacagagtcctgtcacatattcatcaggatagatatttcattgatttgcaatttggtattttctgggttctgaatgtgccattttgttctggtttgcaattctaaaagtgaatatgtaaccatccagctgagttttttttttttatgtatggggaaatacttttcttttcttttcatatttttaacatacaagtatgta

SEQ ID NO: 310113 - DNA, 615 bp, Homo sapiens
atgataccattaccacacttcatttgctgtgaagtgagcttcttgatcagaagcaaagctgtgtagaataccatgatagtagattaggcattctgtacaaccatggatggtagttctggcagaagcattgtatgcagggaaggcaaatatatattcagagtaaatgtctgttctggtaagaacaaaatgctgccctttccatgatagaagcagtccaatgtcatcaactgaatttattaattttccttcatctacattccccaaaacatagaagccyctttctcttgtcaagtcctaaaagtaaaaacatccagtgggaaaggacacttagccaaagtgtgtgcaacagatggacactagaatagagcaagaatgaaataagcaagaatggagcaaaatgtcttaaaaatatctgcagatggagctggagtaactttttgtcaaatctacttaacaatcaattctcctcattcccttcaaagtaatggtttttaaacactcatccaatgttgttactcccttacacaaaatacattagtggcttagtagatatgccctaaatccttaccatggcatacaaagggcttcacaatcaggattcttttatgtcttcaa

SEQ ID NO: 310114 - DNA, 615 bp, Homo sapiens
atgataccattaccacacttcatttgctgtgaagtgagcttcttgatcagaagcaaagctgtgtagaataccatgatagtagattaggcattctgtacaaccatggatggtagttctggcagaagcattgtatgcagggaaggcaaatatatattcagagtaaatgtctgttctggtaagaacaaaatgctgccctttccatgatagaagcagtccaatgtcatcaactgaatttattaattttccttcatctacattccccaaaacatagaagcctctttctcttgtcaagtcctaaaagtaaaaacatccagtgggaaaggacacttagccaaagtgtgtgcaacagatggacactagaatagagcaagaatgaartaagcaagaatggagcaaaatgtcttaaaaatatctgcagatggagctggagtaactttttgtcaaatctacttaacaatcaattctcctcattcccttcaaagtaatggtttttaaacactcatccaatgttgttactcccttacacaaaatacattagtggcttagtagatatgccctaaatccttaccatggcatacaaagggcttcacaatcaggattcttttatgtcttcaa

SEQ ID NO: 310115 - DNA, 586 bp, Homo sapiens
cagtctaaatgccactgcattttacttgctgattttagaagacctaaaatctgtctgcagcagaagagggactctcctccatatgcgctaaaactgagatcaatactgccacatactaccaagcactaagatcagaaagagaattgtgtgtgtcacttttctaacagactgtaagcctagacaagattgctcttgacctcactaaaaatatttacctctacatgggaaaagatggaattaacaaattttggagcaaaacattgaaattttaaaaaataatcttggagtagtgaaaatycttctaagtaaggaataaccctaactttttaagagaaaagactcatgcatttgaccctataaaaacttctggacgaaaaaagaaaggaaaagaagtatgtgtttatatatatgcaaaaatttaaaaaccagcaagggtcttttcataaactgacatttaacatctagataatacaaaagcttctataaacaagaaaaagtaaataaaccaatagaaaaatggacaaaagacacaaagaaaaaaatacaaagatagaaaaacagcaatatctgaaaaaatattcagcct

SEQ ID NO: 310116 - DNA, 527 bp, Homo sapiens
ctgttggggtagacccagctagtaaaaagaatgtaagattttgaaagttttcacttgccagtcaatttcttttctgggttcagtgtttactgacacagacactaaagaaatttttttttaaagaaactaactggtgtcatcttgtcttcacatagacttctacagctatagctgagtttccrtgattttgctttttattttttgctcattcatacatgcataggcagagttcagcttttatgctggtaagaggaattaaacttacatgtttactgagaattaaactttaagagaataacaaaagctcttgaaaaaaattgaatataacagatgaaacagtttcatatttatatttcaacataagacttttagttattgtcagaaagtaatgggaatccttcccattgttcacttatttagccttatataatattcatttaactaagcccaatatccaatatccagagatttacattttatttttaagggaagacagtatcatagtgagattattatactgcagaata

SEQ ID NO: 310117 - DNA, 527 bp, Homo sapiens
ctgttggggtagacccagctagtaaaaagaatgtaagattttgaaagttttcacttgccagtcaatttcttttctgggttcagtgtttactgacacagacactaaagaaatttttttttaaagaaactaactggtgtcatcttgtcttcacatagacttctacagctatagctgagtttccatgattttgctttttattttttgctcattcatacatgcataggcagagttcagcttttatgctggtaagaggaattaaacttacatgtttactgaraattaaactttaagagaataacaaaagctcttgaaaaaaattgaatataacagatgaaacagtttcatatttatatttcaacataagacttttagttattgtcagaaagtaatgggaatccttcccattgttcacttatttagccttatataatattcatttaactaagcccaatatccaatatccagagatttacattttatttttaagggaagacagtatcatagtgagattattatactgcagaata

SEQ ID NO: 310118 - DNA, 593 bp, Homo sapiens
gtgtttttggttaatttactactaggaaaacaaaggtatgaaaaatcattccccaccttagctaagatttaggagttttctttttgttgggaatcctggaagcattcttctcttcctatttcttcccttaaaagctaaaatttcaaagtacatttttgctacaagatgtaaaaatgtagtcaattggttttatattcaataaacagcacagcatgacaataagcaaaatgcgcagtttagctctgccatacatcctttatccagagacaaaattgattccaattcaagttagacttcccgctggggaagcgaccctcctgtcatttctcgtgttactrggggctgtggagaagtagctgaagggaccgtttctgccaggtaagagcagaagcaaagagacggtccaatgcccagatctgctttctttgcttctgttgctcctgttaaaacttggagttcttatgcctacagactgattcacccatcttgccgatgcagctatattttaaagatatcactggctattgggtgtaatacatgggcacacaggatataaaagtctaatccggctcttgtaaaatcagtttttaaat

SEQ ID NO: 310119 - DNA, 539 bp, Homo sapiens
gctttgaagtggagattctaacacttagtaggaatataggaagaacagaccaggggagatgagtctcctgagagtttcctgaggtgccttttgataatatcatttgtcttttctacctttcccaaggattatggtctccaaggacaatgaagatggtattgtatgcctagtgccttcaagtccccctgggtgagaacagccttgaatgaggggccacttttgctctggaggtacctagagagtccaaagcaaggaattatttcattaatttgtacktttatcacctcagaggctttctctatccaacatggaaatgcttctacccagttggtgaaggtatctgtttatattaggaggtattgcatgtcccttgactttggcatatgggtgaaatccatttgtcagtcttcctctgggtagcttcctgttcttttggttccaggggaaagaagccattgactgaggggattatttttaaggcaaatcttgcaagcattaataacctctttaaccatttgtatccagtttttactcaagaa

SEQ ID NO: 310120 - DNA, 560 bp, Homo sapiens
ctgctagtgggaattttctagattaatggaaattttctaaatttggatataggcaattgttacagaagcatgaaatttgccaaactgtgtttgcaaagtggccagaggactttttcttaccttggagtgagtgaatacgctgtgatatgctatgaggctagccctggtctcatatgtcactcttagcatggaaaaattatccccatcaaatacattttaagaaatgatggaagacaaaaataaaatttatttacttctcaagattccacttgttcagtgtcaattttttaccttaaatattaatattttactaatattaatttatcaatattaatagattrataatgtaggttccgttgaatttggtgcacctctgacaattctgaccttgtggtaacttatttctccctatgcttgcctctgagtcaactatcacgagcctttgtttctctagcaggtcttaaagtcctttggccttttgttataaatcacaaatttaaattattttgttatcaaaaacacaaatgcaattttggagacaaatcttatgggaatgttca

SEQ ID NO: 310121 - DNA, 571 bp, Homo sapiens
tcataatatttggtcagttccaaaattttaagttatgaagatgtaaggtttttacattggcttatcttgtcctgtccacagtacgccttgcaaaaaattcaccccaaagtatatttcatttcccaaacttccaaaagggaaaggtagatataaaatacattctcaaacaaagggaaaattatcctatctacttttgattaatgtgttaaaatacattttaaayaaagaagaaatcagatttttattgcagtataacaggaaaaagttatcattttgttcataactttttcctcctgttgaacatagtgatattttaaaatatataatgagtagtagaatatgaattaaataaatttgtgctgcataaaaaagataaaaacatagtttcttccaacaacctagaggaactttctgtggaaatatgattgtaatggaaaaaagaatgcccaattgttttatgtattaataaagaattccattgggcttctgtgaatgaatttgtgattaggtgaaataatacagaataaaaatttgaaagattaatacaaattatgaaaagttgtttttaaaa

SEQ ID NO: 310122 - DNA, 571 bp, Homo sapiens
tcataatatttggtcagttccaaaattttaagttatgaagatgtaaggtttttacattggcttatcttgtcctgtccacagtacgccttgcaaaaaattcaccccaaagtatatttcatttcccaaacttccaaaagggaaaggtagatataaaatacattctcaaacaaagggaaaattatcctatctacttttgattaatgtgttaaaatacattttaaataaagaagaaatcagatttttattgcagtataacaggaaaaagttatcattttgttcataactttttcctcctgttgaacatagtgatattttaaaatatataatgagtagtagaatatgaattaaataaatttgtgctgcataaaaaagataaaaacatagtttcttccaacaacctagaggaactttctgtggaaatatgattgtaatggaaaaaagaatgcccaattgttttatgtattaataaagaattccattgggcttctgtgaatgaatttgtgattaggtgaaataatacagaakaaaaatttgaaagattaatacaaattatgaaaagttgtttttaaaa

SEQ ID NO: 310123 - DNA, 477 bp, Homo sapiens
tcaggggcttacagacctttctccccttaacaggtcatgttgcaatgtggaactgtggaccagagagagattaagtgagctcatcaagatcatagcttagaaatgacaggtgtttaggctataaatcagtgttcaatccaatagaaacatgaaccctaaaacaaaggaaacatattgtctcatctgtacccttttctactgagctgcacataaaggtttgaaaaggtaacttggagactgaaggaactggcaaggatggagctatataatagtggctcacttttcttctgcaaagtgagaagttgctacaaagagatgggctaattcaccctaaatataatagactttaacatgcgcaaatttaamcttcatggttagattatttataaatgcccctagactctcatgatagcttgtaattttactaagattacaaatttgcatcaaggtgtcatgaggcttcaatgtgggagtgag

SEQ ID NO: 310124 - DNA, 542 bp, Homo sapiens
tcctgctgggaagccctgaccaatgaaaaaggatgtgtcaggatcaggcctgaagaggcactctggtcacagactgccacagccagtgtattgggctgttggggacaagtcttgggaccaagccattcagcctccctggctccagcaggggaaaagcacagcctggagctatagagataggtgctgcccttccccsacccagggggcttagcgtgttaggcagttgtgagtcccagtgctggctgctgcccctcccctaaggagctcaaaatgcttagacagcaggcagccatagcagcaatcctggttgccccttcccctgggagttccataggcttaagcagtttgcagctgagagggtgttaagagtctgtgcatcctagggttgggacgctaaaccccagtagtgtgggtacacgagtgggatcttccaatctgtgggttgcacagttctgtagaaaaagcctggtttccttggctgggcagcatgctcactcactgcctcctttggcttgggggagggacctgcccgattctgtgtg

SEQ ID NO: 310125 - DNA, 542 bp, Homo sapiens
tcctgctgggaagccctgaccaatgaaaaaggatgtgtcaggatcaggcctgaagaggcactctggtcacagactgccacagccagtgtattgggctgttggggacaagtcttgggaccaagccattcagcctccctggctccagcaggggaaaagcacagcctggagctatagagataggtgctgcccttccccgacccagggggcttagcgtgttaggcagttgtgagtcccagtgctggctgctgcccctcccctaaggagctcaaaatgcttagacagcaggcagccatagcagcaatcctggttgccccttcccctgggagttccayaggcttaagcagtttgcagctgagagggtgttaagagtctgtgcatcctagggttgggacgctaaaccccagtagtgtgggtacacgagtgggatcttccaatctgtgggttgcacagttctgtagaaaaagcctggtttccttggctgggcagcatgctcactcactgcctcctttggcttgggggagggacctgcccgattctgtgtg

SEQ ID NO: 310126 - DNA, 559 bp, Homo sapiens
aaacatacaatgcctcctaagctctaggctcagagcttagaaggctctagttctgagaatttctaggctcagaaagtttataaattatattcctgtctcaaaagagctgatgatttttagcaaaacacttaaaacaaatgtggcagttaaaaaataataacttaaggttgcttttagatggcttttkaactagaacttcttcctggaaggcaaaaagatttcttcttttgccttccaggaagaagagaaagaaagaggaaaaggtatgtgaagtttggttgctaaaagtacctttttggatactggtattatctggtttcccccttcttattcttgtgaagtacaatgaaaaattcacaaaataaggactgcctcaaaggctgctaggcaggttacctccgttgactgaaagtaaaatataatagacgcctaacttccagacacagaaatggcttagaaaattaaaaaaaaaaatacattctgacttgatattattgttagctccctgactccccaggcccatcactgaagttcctctctgtaagtgcagtcttgagct

SEQ ID NO: 310127 - DNA, 565 bp, Homo sapiens
tgccttccaggaagaagagaaagaaagaggaaaaggtatgtgaagtttggttgctaaaagtacctttttggatactggtattatctggtttcccccttcttattcttgtgaagtacaatgaaaaattcacaaaataaggactgcctcaaaggctgctaggcaggttacctccgttgactgaaagtaaaayataatagacgcctaacttccagacacagaaatggcttagaaaattaaaaaaaaaaatacattctgacttgatattattgttagctccctgactccccaggcccatcactgaagttcctctctgtaagtgcagtcttgagctggagttctggtttaccataacaatgtcttaataacagaatccaatctgttacatagtggggttcagaattcatcttgctgccataacttatttcttgtgtgttcaggatgatatccaggttcctgaggtctccaggacccagacttctctcctctttcttcacttctctggaacagccaggatagtggagtagaaactgtccagctggacttcttgggtgactccctgacagta

SEQ ID NO: 310128 - DNA, 548 bp, Homo sapiens
tgtacattggtgttatagaaagttcagatttccctttctagatgaacataatctaacaaagatccaaagctcttgttccaggtgtacatataacaataagatgtcatggaaaaatctgaaaaaaaaaaaaaaaaaaaaaaaaaaaaaaaaaaaaagggccgagggtctacaaattttcgtggctgtaggtatcaacccatctcaacacccatcaggagctagaaattgtcctatataaaaccatatgtaaaactacaggcctcacccagctagtgaggctgttgcaactggmataattgtctcaggatcctaacagatgttggagtttgctttttgatgcgttctatgaacccataatcttggggcccaatacaaccaggtgactaaaatttatctgataattgctcatttcagaacatcattgtctctatattaaaggtaacaacaacctttcagaaccacagccatggttctccaggtctctcctgcctgcagggcggacttggaagggctggtaaagtccttgaaaaggactgtgttgtattctc

SEQ ID NO: 310129 - DNA, 601 bp, Homo sapiens
tttttgcttgttttcttgtacatggggacttttagtaaataataaaatagtttgattctaaaatatattacaaaaacaataaaaacctccatgaaggaaagaagttcaaatgattcaaacataacttcagtattattgtatttatatattagagatttgaagaaattgcttaaattctttagtgatgctttattgcatcttatgggggatattattggctatcatggtatctggggaatgacaacattctaaaaggtattcctgacaaacagcaggagtccatgttattgtttcactgaataccagaaaatcctttgattctaaaccaaaaaggcattgatttatcatgaaaataatttcagacatgcattaaaatgggaagagatgaaggtaaatagtgactgcatttggtagtacagctttgaagctggtacacttagttgtcacatggctgtccaatattggcagcggtctactaagtagaacagttgttacagtttcaatggacattcaaccagtttatgggatttacagatcaatgtagttaataatctggaccaagagaacatgttactacaaaraaaattttagaaaaagaata

SEQ ID NO: 310130 - DNA, 526 bp, Homo sapiens
  misc_feature (1)...(526): n = A,T,C or G
gtgggggtctattacatagtcatagagctcctaaccccttgtctttctctaagcaaacaaaaagaaactcaaaagctttccatacaaaaagacacttagaagcgcttgtgtcaggaaccagggactaagatcaaatattgtaaaaaaagatgctccccntcaccttcaggaagttttagcagttctataacaggacccagggatgaagaccaaatatatatttcttatatatcacaaataggtataccccatcaaccacatagattatagtaaaatctaattaagtaattggancttgatagagtttgagtatgtattacgtctgcttgtttgcttactggtatgttgtaattccatgagttttaacgcatgcatagattgtgtaacttctatcacagaatacagagcagtttttgaaaactttcttctctgcccctttgttgtaccttccttagcccccttgcccctggcaacccactggtctgttgtctgttactatagytttttatttcccagaatgtcaaat

SEQ ID NO: 310131 - DNA, 605 bp, Homo sapiens
atattcataaccagttgccccagaaccatttctggaatatattattttctttgctgatctgcaatgccatctctattaacatttcaatttttcatttatctgtgaatctgtttcttcgatttatattcaattcttgtcacctatyaatctattcttacacccataatgtattgcttaaatcatagctttgtgatagctcttgatatctggtaaggcaagtcattttgcccaactttttaaaggagtgtcttagatttccttgctattttttaatatataatgtcatatgtagcttttcaagttagagaaggagtcaagattttaaatgaagttgcattaaatctagagatcagcttggggagaactgacatctttataggattcactcttacagtcaatgaaatatactccccacatatactataaataaaggtctttatttcaataactcttatgatttcatgtatatttgttagatacagacatatatttttagttgttgtcataaatgattttaaaacatatatttccaactatttagtgaaattatatgggtattatttaactttgataaactgatcataaattcagcaattaggctaaac

SEQ ID NO: 310132 - DNA, 555 bp, Homo sapiens
tatcacttgaagtaatgttcagctactagttgtaggaaacttttgttcttttccctgttaaggcttaacaggcttcatctatgtccctacaaaggacatgaactcaacattttttatggctgcaggaatggaacaatgagaacacttggacacaggaaggggaacatcacacaccagggcctgttgtggggtgggggggaggggggaaggatagcattaggagatatacctaatgtaaatgacgagctaatgggtgcagcgcaccaacatggcacatgtatacrtaagtaacaaacctgcatgttgtgcacatgtagcctagaacttaaagtataataaaagcatatatatatatatatatatatataaaagaaacaaacaaacaaacaaaaacaggcttaactgtgtttttattagcaatggtcatattttaaaggcatctttcttatgcagcattgaatattttaacaaactgaaacttaaccttgacagtaccactaaactttaaccaaaatgtctcacatatattggagtcattgtatacaatctcaagcc

SEQ ID NO: 310133 - DNA, 555 bp, Homo sapiens
tatcacttgaagtaatgttcagctactagttgtaggaaacttttgttcttttccctgttaaggcttaacaggcttcatctatgtccctacaaaggacatgaactcaacattttttatggctgcaggaatggaacaatgagaacacttggacacaggaaggggaacatcacacaccagggcctgttgtggggtgggggggaggggggaaggatagcattaggagatatacctaatgtaaatgacgagctaatgggtgcagcgcaccaacatggcacatgtatacataagtaacaaacctgcaygttgtgcacatgtagcctagaacttaaagtataataaaagcatatatatatatatatatatatataaaagaaacaaacaaacaaacaaaaacaggcttaactgtgtttttattagcaatggtcatattttaaaggcatctttcttatgcagcattgaatattttaacaaactgaaacttaaccttgacagtaccactaaactttaaccaaaatgtctcacatatattggagtcattgtatacaatctcaagcc

SEQ ID NO: 310134 - DNA, 440 bp, Homo sapiens
caattgcaaatgtatttttttagctgcttatacttaaaacatcaatgtccattttactcttttttttccctctcatacctccacagccaatccatcaacaattcctgttacctcttgtttgtgaaatagattcaaaactgaaccacttcttacarcctctccactatcgaccttgtccaagtcactgtcatctctcacatggattattttaactgcttcaaaatttgtctttctgatggtgcccttgctccctacaacgtattcgtggcatagcagtcaaagtaaacatggagacattgtttataaagtaaacacacaatgtagatcatgtaatttttctgctcaaaactctgatagttcctcatctcattcacagtaagactcagactcttcaccaccatctaacttccctattctcattttctaccactcactgcatt

SEQ ID NO: 310135 - DNA, 440 bp, Homo sapiens
caattgcaaatgtatttttttagctgcttatacttaaaacatcaatgtccattttactcttttttttccctctcatacctccacagccaatccatcaacaattcctgttacctcttgtttgtgaaatagattcaaaactgaaccacttcttacagcctctccactatcraccttgtccaagtcactgtcatctctcacatggattattttaactgcttcaaaatttgtctttctgatggtgcccttgctccctacaacgtattcgtggcatagcagtcaaagtaaacatggagacattgtttataaagtaaacacacaatgtagatcatgtaatttttctgctcaaaactctgatagttcctcatctcattcacagtaagactcagactcttcaccaccatctaacttccctattctcattttctaccactcactgcatt

SEQ ID NO: 310136 - DNA, 564 bp, Homo sapiens
gcctttgcactcactctttcttatgcccaatactttcacaccaattcaatgttaaatagcgccttcctctccattccttccaccccatgtcagactttattgcctttctctgcattatgttttctcagaccayttatctgacatcacttatttatctgtttgttgtctaactcctcctctataattcaagtatcatgagatcagagatctggtgtattttttaccactgaaactttcacacctcaaataatgtagacctataagtgcttaataaacatatgtcaaatgaatgaaacagtaaatacagatatgttatataatattatgctacatggttaatttcagggccactgggagtgaatttaaagactactcagattattttatatgtaatgacactttcgtttgaagtagtttatcttgatatatgtaattttagtaattcagcttatatttatttcttagtatttaatgtttataaagtgttcataatttgctgtaaatgctataaaataagcaaagaattcattctccactaagtgataataacatatgtatttataa

SEQ ID NO: 310137 - DNA, 547 bp, Homo sapiens
tagaaaaaaaaaaaagattcagtgactagccttgctgtctcaggagaccttgaataagaatttccttttttctgtatcttgtttctagttcaagatgcctgaaaaacctagagtgtagaaatgctgcctatcagaagtaacaaaattaagccaattaagtgatcttatagactgacaagcaccataggggtcagagaaggaaatttcctatcaaaactcttcacagaagcctcctaagggtagcactcaaagctcagaagacacctggggaggctcctctatcagttagtaagccacatgcacgctcctcccagcctaggaggaagccacgatgaaattrtctcttgttgggcccagacctgcagaatccaactgactgcactgggtatggaaacatgcaccgatgcttttgtagtcttcatatttatttccccaaagaagctacacttaaaattttgaggcgtgagctaagtctcggaataatgaaaatttagtatgtatttttcagagctccaagtcaatctggtggttgggattagattgcttt

SEQ ID NO: 310138 - DNA, 596 bp, Homo sapiens
ctctgctgcccaggctagagtgcagtggtacaatctcagcttactgcagcctctacctcccgggatcaagtgataccccaatctcaacctcctgaatagctaggaccacagcacccacccctatactcggctaatttttaaaattttttgtagagacagtgtctgactatgttactcaggctggtcttgaacccctgggctcaagcagtcctcccaccttggccccttgaagtgctgggattacaggcgtgagccaccgcgcccagccaagatccagcatttctaacaagcccctggtgatgccattgctgctagtccacagactaaattttaaatagcaagattttagaatatctttacataaaaatttcaaatttaataattctgaaattggagggtaaaggttagaattaaataggttagttgtaaggaccaacctatttaatttaattccaagggtggaattaarcaggttctaaagacaggtcagtgaagacagatccaatgtttcacatcctggtagatacatcctttgtacaaaagttgctttctttgcgactcctccactattttaacagcaaaccaacggacagctt

SEQ ID NO: 310139 - DNA, 596 bp, Homo sapiens
ctctgctgcccaggctagagtgcagtggtacaatctcagcttactgcagcctctacctcccgggatcaagtgataccccaatctcaacctcctgaatagctaggaccacagcacccacccctatactcggctaatttttaaaattttttgtagagacagtgtctgactatgttactcaggctggtcttgaacccctgggctcaagcagtcctcccaccttggccccttgaagtgctgggattacaggcgtgagccaccgcgcccagccaagatccagcatttctaacaagcccctggtgatgccattgctgctagtccacagactaaattttaaatagcaagattttagaatatctttacataaaaatttcaaatttaataattctgaaattggagggtaaaggttagaattaaataggttagttgtaaggaccaacctatttaatttaattccaagggtggaattaaacaggttctaaagacaggtcagtgaagacagatccaatgkttcacatcctggtagatacatcctttgtacaaaagttgctttctttgcgactcctccactattttaacagcaaaccaacggacagctt

SEQ ID NO: 310140 - DNA, 591 bp, Homo sapiens
gtagagttgatgtctgtaaaatctttataccagcccgtgataaaacagctgactttatatagcacttaccatgtatacaaggcattattataagcwttttaaaatatatgttaactccagtgattctcatgaacaatcttataagcactgttattttacccattctacaaagtaactgaggcacagagcagttaagatcatttgcccaagatctcatagctagtaaggggtagtcctgcatgtgaacctagacagtgcagctccagaggccatgagcttgacatggatattacttttcacagtaagtgctcattaaatgatagctattattattttcaatattactactactgctattattactaaggcaataataattatttatgcaatgagtgaaataacacttatttaatgtttactgtggggcaaggccctgaggatatgttgaagcatgaaatgttctgaaagaatttgtgggttacttcagcaaagaagatctacatgaaagttattttaaataaggtaacatttaccttgttatatagggctgggtagataggaactctcaatagaaaagctccaattacctgt

SEQ ID NO: 310141 - DNA, 652 bp, Homo sapiens
ggttgcagtgagctgagatcatgccattgcactccagcctggacaacagaatgagactccacaaaaaaaaaaaaaaaaaagagagaaagaaagaaaaacataaatcagatatatcaattcctatttcmtattctccaaagacctcccattgtccttagaataaaatccaaactattcaccaagaccctgtatgaactgatgcctacctgcatttagtgtcatctcttgcaacttttcccttagtcaccatacatcaggtacattagctttctttgttcagaaccaccaagctttttctcgcctggggcctttgcactttttgtctggaacacttttccagagcattgcaggactgactgcttcttttcatttatgttgcacttcagctgccctatataaaaggacaacaccctttcccctaactctccctattcctttgaccctttatcttatctatagcatttaccatctggcctgtatttaattgggtttggtttgctcattctctctcctctctcattatttgattcaggctggttacagagattttagcctgggaaaaatgagtagcagctcctctgaaggaaatgattgtccattgctatatgggtgggtgatgtgttaggcagcaaataatctatttggcctactc

SEQ ID NO: 310142 - DNA, 425 bp, Homo sapiens
aattgtcagctagctctctgtggaccttcaggaacccagatatgaaaactcgtgtgtaaaagttgcctgtagaagtttagacatctggttcagtcctgcaagatgcctgtctctcacaaaatgtgtttgtggtatctagggtgaaattctgtatagttaggaaaatagagaaggtcaaagaggtagttatgcagaagaaatccactttcttcatttgactactatgtaaaagctctgaacttttctatttctggtcctttataattcactttgcttaggttgcactattttgcaagaagsctcaaaataaggagtggatagagtctatacccaatatccatggctttagaatgaccaaagccaggcttctttaaacccagagataagacccaggacatgagatcacagaagtctctcaaacagag

SEQ ID NO: 310143 - DNA, 629 bp, Homo sapiens
cgctctgtcatccaggctggagtgcagtggcacaatcactgcagcctcaacctcccgggctcaggtggtcctcctgcctcagcctcccaaatagctacttttttattgtttgtagagacagtgtctctacaaataactattttgaattattctttaaattttcaattattgttcatgaattttgttcaaaaaacaaaataatatgcccagctacttttttattatttgtagagacagggtctccctgtgttccccaggccggttgaactcctgggctcaagcaatcttcccaccttggcctcccagagtgctgggattacaggtgagagccacagccggctcacattactcatttcagccaccggyccagcattgctcttaaaggcaacttttcaaaagcaaactaaatgatcatttatacctttctcattataaacatttattgcactgtcttgtctgctttatcaaagtttgcatttaaccttgttgtggggatttctgcttaggggtcattactgttgcttctttctttccaaactagcctctggagtaactcaccatttattacagttctcatttcttcaagtttctcatccctccctttagctatacatagtcaaagaaagaga

SEQ ID NO: 310144 - DNA, 589 bp, Homo sapiens
gttttttacctttgtttctctcctaatagactgtgaatttggcgggggcaggccctgtgtcctcatctctacctgacagagtggactctccctgtttgtgggattcatgaaataatgtactaacgtgagaaatgtatttctattcccaggttaagaaaacgactgaagccaccttgcagacgatacaagatatggtcaccatcgaggactatgatgtttctgaatgcttccagcacagtcgttccacagaatcwgtgaagtccactgtctctgaaacctacctgagtaaacccagcatcgccaagagaagagccaaccagcaggaaactgaacagttctacttcatggtgtgcccgccacttcccaagccactctacagagctcagatctaggattcccaagtgccacttctatagtcacatcagaaccatctggggttccttttgttaaaatagactcctgtctaccatcagagttcctgattcagtcagtttcggaaagagtttaggagttatttaggagttagttagttaggagttatttagttagttagaggactggtataaaacagtacttttagctgggcaca

SEQ ID NO: 310145 - DNA, 580 bp, Homo sapiens
gtcatgttcagtgatggaactcatcataatggtcattcattgatcctaacaggcacaattaagtatgtaagttttactaaaaatacatttcagtagacctcaaaaaccattatttataaatgattagagattttctacatggccagcaatttctcagagggttccagagaaaaagagagagagccagagagagaaagagagaatgcactttagtaattcaaactaatattgataggtaaaggttatctcaaacagataaaaattgagaattattaaatatttttaaaaccattagatcacctctaaatatatagaaaagacaaacttgtctattaaagtgttgaattattaaaagttttagctgtagtagttaacaaaaggagattccattaaatacagtgtcaatgayacatatgtaaactgattagtctgaagtgcttaaaaacattttaaaaattgttattcccctttagtttacattattaatttttactgtaagaaagagttttgctgaacaaaagtaaattatagctcagatgttgctgagttccaaattagtagatttccagtgtaataaaat

SEQ ID NO: 310146 - DNA, 636 bp, Homo sapiens
gtttatagcagccttattcacaatagccaaaactggaaacaactcaaacattcttcaacaggtgactggatatgcaaattctggtatatctataccaccatggcctgtttctcagttgagacagacagaaaacactattcatacaagccctaacatagataagctcaaaaccatgaaagtgttttcagtctgtcttgggtagtggttacatgcagtggtccccaacctttttggcaccagagrctggtttcattgaagatgatttttccatggactgggggtgggggcggtggtggggatggtttcaggatgattcaagtgcattatagtcaaataattatacaactcaccataatgtggaatcagtgggagccccgagcttgttttcctggaactggacagttctgtctgggggtgacaggagatgaggacagatcatcaggcattagattctcataagaaacccacaacttagatcccttgcatgtgcagttcacaatagggtctgtgctcctatgagaatctaatggtgccattgatatgacaggaggcagagctcaggcagtaacataagcaatgggaaatggccgtaaatacagatgaagcttccctggctcatctgctgctcaccttctg

SEQ ID NO: 310147 - DNA, 582 bp, Homo sapiens
atgaagttagtatctaccttataaggtcattacaagaattaaattagattgttagtgctctttaagttcttgttaaataaaatgtaaaagtaaaaactctgatcttcatgacagcacctcagtgctcctctttctagctgcatctgagaatcacctggggagattttataaaacaacgatacctgggttccattcctggggtttctgatatagttggctttgggtggtttctggggattgtggtgtttttaaagcccccacgagttttttttttttttttaactatgttttcatgagtaatactgtatggtatgtatcataattatatagtcagtttccaataattctgacactgtgtaacaggcgaactgtatttgctgcatttgtagtggtattaaaaaccttwccagagaaaactaaaaagatccattttctttttgttttagagtaaactgttcttttcagaattgtgtagttagctaaactataattcaaaacaaagttcaaaacatttttttctttttctataaaaatgggatatatgtgcagaatgtgcaggtttgtgagcaaagggtatgaaca

SEQ ID NO: 310148 - DNA, 633 bp, Homo sapiens
catccattgtaggtgtatgttaagggctggcttctcatgcctttatatcctttatataaatgaaatatattatccatttttttctctccctaaatgggcttccagacttaaatataagctgattacaaagaagcctgggaatttttctctacctaattctcactcagcctaccctgaagtccagcaactgcccctctcccacctctgcatatatccacttcctatttgtagtgcagtaagagtaggctggcctttgtgtcacccctactggrgagagattatgtctttcatctctagtctcaaggcctagcacagtgtctggtattcagacactcagtagctgtttggtggatgaataaataaaatcagtatacattgcaccctgaaacctgggctaatgtctacctgattctagagtaactgtcaccatacattgaaaaaggcgctaattataagaggtgtgtgtagacaggccaaaagcatttccaaagtgtgaattcaggagtgttttataaatgtgtgtctttgcagtcgcctccaaggccatccttactgatatattgttttagtttttatgaggtttgtgctagcccagttctcaacatgaaatagcaaaaaggcatctgttggtct

SEQ ID NO: 310149 - DNA, 591 bp, Homo sapiens
ccattctactttatgtttctatgagtttgatacctcatttaagtggktttatacagtgtttgtctttttgtgactagcttatttcatttagcataatgtcctcaagattcatccatgttgtagcctataaaacgaacctacctgtttttaaaacatggtttcagtgtttttctcaaaaagttctaataatccaacaacacatataaatcatataatttccaggtaagtaggagttgtgagggcttacccatctattttgcaagtttccttaacatggcagaaatcattcttctcattagaaattattttgtggtaaggaacccactaactttgagagtggatagcccattttgcaataagccccatcatcagatgctaccacagctctactctctgaactgttctggggatgcattgattgagatcctagcatttgacagaaacaaagcaaatatataacgtctgtttagagcccttattttcctcaaaatcttctgatgttctccaggtcacctttgtttttctggcaactagctattttattccttgtatcatttaaccatggttacttattaatcatcccccatgaga

SEQ ID NO: 310150 - DNA, 591 bp, Homo sapiens
ccattctactttatgtttctatgagtttgatacctcatttaagtggttttatacagtgtttgtctttttgtgactagcttatttcatttagcataatgtcctcaagattcatccatgttgtagcctataaaaygaacctacctgtttttaaaacatggtttcagtgtttttctcaaaaagttctaataatccaacaacacatataaatcatataatttccaggtaagtaggagttgtgagggcttacccatctattttgcaagtttccttaacatggcagaaatcattcttctcattagaaattattttgtggtaaggaacccactaactttgagagtggatagcccattttgcaataagccccatcatcagatgctaccacagctctactctctgaactgttctggggatgcattgattgagatcctagcatttgacagaaacaaagcaaatatataacgtctgtttagagcccttattttcctcaaaatcttctgatgttctccaggtcacctttgtttttctggcaactagctattttattccttgtatcatttaaccatggttacttattaatcatcccccatgaga

SEQ ID NO: 310151 - DNA, 560 bp, Homo sapiens
cttcacattttgtctttagttgaggyctaaattgtaaagtaggttgaggcaagtcaaagtctgaggtcgaacgtccactgtgctcctccagcctctctttatctcctaattcccttgcttcagaggatgttacctggctccttagatctctatgaaacaccatctggaaactgttgctttaaaagagaaattaattttaaataggaataaagcatagagaaataaacatataaacaaattacttttctatcgttaaccatattaaagcattaaagattcatgttaaagggggaaggtacatcttttctattatttataataaattttgacataaaaataataatagagtataatgagacaaataattacaaactttcaatactgagaccttcaaataggtagcatccaatactttctgagaaattatctcaagtcattagagattcagagaaatatttcaattcataattttgattaaagtattgtttataacagataatgttaaacaatcaaaatgctcatggaaaaacaataataggtaacaattcttgagagtttac

SEQ ID NO: 310152 - DNA, 560 bp, Homo sapiens
cttcacattttgtctttagttgaggtctaaattgtaaagtaggttgaggcaagtcaaagtctgaggtcgaacgtccactgtgctcctccagcctctctttatctcctaattcccttgcttcagaggatgttacctggctccttagatctctatgaaacaccatctggaaactgttgctttaaaagagaaattaattttaaataggaataaagcatagagaaataaacatataaacaaattacttttctatcgttaaccatattaaagcattaaagattcatgttaaagggggaaggtacatcttttctattatttataataaattttgacataaaaataataatagagtataatgagacaaataattacaaactttcaatactgagaccttcaaataggtarcatccaatactttctgagaaattatctcaagtcattagagattcagagaaatatttcaattcataattttgattaaagtattgtttataacagataatgttaaacaatcaaaatgctcatggaaaaacaataataggtaacaattcttgagagtttac

SEQ ID NO: 310153 - DNA, 574 bp, Homo sapiens
aaattggccagctcttatgatggactatcttgatgaaattacccataatctattcctgtaatacactttttcatatattgattttttttccatttgggttttttyctttttttcttttttagttttggttttgtttgtttgtttttgagatagagtttcactctcattgcccaggctggagtgcaatggtgcaatattggcttaccaccacctctgcctcctgggttcaaacgattctactgcctcagcctcctgagtagctgggattacaggcatgcgccaccatgcccaactaattttgtaatttttttagtagagctggggtttcagcatgttggctaggctcttttaaattgacagcattatgttttaccattcgctatcctatctttgcatcatttccaactctggaggtataggttgtgtagaggcttttagagagttcgaattcatttaatgcattttttacaaatttgactccatgaaattatcacattatcacactgttgactttgtgtgtaagcattgtgcactacgcataatttaaaacactgaaactttctcaataaattaa

SEQ ID NO: 310154 - DNA, 574 bp, Homo sapiens
aaattggccagctcttatgatggactatcttgatgaaattacccataatctattcctgtaatacactttttcatatattgattttttttccatttgggtttttttytttttttcttttttagttttggttttgtttgtttgtttttgagatagagtttcactctcattgcccaggctggagtgcaatggtgcaatattggcttaccaccacctctgcctcctgggttcaaacgattctactgcctcagcctcctgagtagctgggattacaggcatgcgccaccatgcccaactaattttgtaatttttttagtagagctggggtttcagcatgttggctaggctcttttaaattgacagcattatgttttaccattcgctatcctatctttgcatcatttccaactctggaggtataggttgtgtagaggcttttagagagttcgaattcatttaatgcattttttacaaatttgactccatgaaattatcacattatcacactgttgactttgtgtgtaagcattgtgcactacgcataatttaaaacactgaaactttctcaataaattaa

SEQ ID NO: 310155 - DNA, 574 bp, Homo sapiens
aaattggccagctcttatgatggactatcttgatgaaattacccataatctattcctgtaatacactttttcatatattgattttttttccatttgggtttttttctttttttcttttttagttttggttttgtttgtttgtttttgagatagagtttcactctcattgcccaggctggagtgcaatggtgcaatattggcttaccaccacctctgcctcctgggttcaaacgattctactgcctcagcctcctgagtagctgggattacaggcatgcgccaccatgcccaactaattttgtaatttttttagtagagctggggtttcagcatgttggctaggctsttttaaattgacagcattatgttttaccattcgctatcctatctttgcatcatttccaactctggaggtataggttgtgtagaggcttttagagagttcgaattcatttaatgcattttttacaaatttgactccatgaaattatcacattatcacactgttgactttgtgtgtaagcattgtgcactacgcataatttaaaacactgaaactttctcaataaattaa

SEQ ID NO: 310156 - DNA, 578 bp, Homo sapiens
ggcattgaattgttaaattttgtccttcaagtctctcctaatctagaagtgtcttcctctttattttaaaggaagaaattaggccagatatttggcagactgtcctacatcctagatctgtctgatagtttcctcacagtcctgtttatcttgtttctctcttcccagtaattcctatacaatgtaagttacatttcaagccaactctcttcctcagccacctcttgtagtacagggatgrtcacttgatccaagggtaatttatccactacatttttggtgataatagctcagaggtggttatgctgtgtatttcatattgcatcacagcaggaggcacttaatgtctggatgactgtcccactatttgtgatactgtgttggttactctgttcaaggtgatgactgccagatccctctattgtaaaggaaggcatctccttttgtgataagaaaataagctatgggtgatactattgagttttccattaacctttcacctaatgattttagtatctactattgattctttctggaatggatgaactttgtcactaactaatattttctgacaatag

SEQ ID NO: 310157 - DNA, 556 bp, Homo sapiens
atttccaacttagaattctctacccagctaaattattaatcaaatataaaggaaaaataaaaatatttatatatatgaaatgtcttagaaatttaacccctcatgtgctctttctcaagatatgcttagatggtggcgatagagagccacagagtaaattaaaacattagcaaatgcagcaaagaaagaaatgwagagaattcccaggaagacagggaagaaacaccccagaatgactgctgtgaatcagacagagagggcaacaagagcagattagagcagagtaattcaagacattgacaacactagcatgccccctgtcattgtatcattgtgttgacctaagaacagaatgcctgggagactctggtccagattctaatctgtacctgttttatcctgatcaagtgctaatgaagccctcattctcctcacatacctattgcatggaccagcttaggacactcattttgttctacagaaaagttcagctttgacctacccctaagagcttaaaacaggccatggtaatctttgaagaagaaaatacacagca

SEQ ID NO: 310158 - DNA, 614 bp, Homo sapiens
attgtagaaaaatgataactaaaagcaccagatggtagaggaagtgagaaggcgggcagcagtgtaagtatcagatcttctctgttttcatagcaggtgatgcaaagatattaagtttgctaaatcaagcaacaggataccagtacatgcacacatataaagtaaaataatagaagaaacaaatataaccaatcaaaaatgagtaataaaggggagagaaggggaggaggagataggttaatttcctattcatttataatgtgggccgagagattttcttaaaaaacagagaattaagttggatttttcctatatattaaaaatcaataaataaaaattataaacatcactgtttgaaaagcaaaaacattaccgttaaaaggctgggctctggctgggcatagtggttcatgcttgtaatcccagcactttaggaggccaaagcaggaggatcactagaggtcaggagtttgagaccagcttggacaaaatagcaagtctccgtttctacaaaaaatcaaaataaaaaactgtgctctgaagtcagactgtctggctttgaattctaactcacttgttagttgtgatamcttgaacaaattcatagaactttc

SEQ ID NO: 310159 - DNA, 579 bp, Homo sapiens
atgagcaaacactgtatatattcctatataaaaaaggttaattaaaaaatcaaatatcatttctcatctgttaagccacccttaattgttaaaataattattttctgtctttgtcrtgctttggcaaaactggtagcagtgcaaattgaaataacatttttagaaagccagttggcaacattcaaagggatgtttttacaataaaaacggaaggtgtatcttactgtgtttgaatgtaattaaaatgttcagagagagaaaatgtttagaggatgcaaggatagggaggtgggatgtgggacctgatagcactgggctggttcaaagattatatttagattttctatatgcttgaggatggggctttatggactctagaagaagtctcacggctttttaatttaactctgagacttttgattggaccaaagactccctttcccaaaattccaacttttgcattctcctgccaaaactttccggtaggaaataatgagatggagtgcgcaaagcctagcaggggtgaggctcctcctgtcctctctgtgctcagggtactgggtcagtgctctggcttgt

SEQ ID NO: 310160 - DNA, 543 bp, Homo sapiens
cttttcttttttatcaatattattctgtgatttttagtggaaaactaaaaaaaaaaccaaaaaacaaaaaataaataaaaggatgtatcttgttcctgcttcctggaggttggccatctagaaggtggcttgaacagcattggagtaaaggatctgagaaataacacagaggcagaggctgcacatctggagtctggggtcttggagaaaagaactgtttgttatgactggagtaatccttaaatgaaaccttgatggttgagtagaggaagaaacaggtggagtgggagttagggaagactgttagagagaggccaaggagagagcaggaacaaagaccaacagtaaaagtgcatgaatggtttagggagaggcaggctggcaggatgtcstgtgtgtgtgtgtgtgtgtgtgtgtgcgcgcgcaaaacgaaacagaataaatcaaaacacggagacactttttttccctaaagtaaagaagcaatactcaatccgctgttttatttcttgtagctgaaattattaacatgggaatatcact

SEQ ID NO: 310161 - DNA, 596 bp, Homo sapiens
caaatttttgaagcaatgcttaaccttattaatgaataaatgcaaatcaaaacatagaaatatgattttcccttattagatttccaaacacaaaacaaaaaatgttaaagcctcatagtggcaacgctgagaaaaaacaagcattctcttctgctgctggcaagatgtgtgtacatacccctagggtctctttttatgttgttccagtttccttgtcttacaacgataccagtcagattgaattagggcccaccctaatggcctcattttaacttcatcacatctctaaatgccctgtctccaaacatagtcacattgaggtactgggaattagggcttatgatggttaattttatgtgtcaacttgactgggttaagggttgcccaaatagctgggaaatcattatttccaggtgtgtctatgaggatgttttgagtcagtggactgagcaaagaagatcaccttcaccaatgtgggtgggcatcatccaagccactgaaggcctgaatagagcaaaaagacagagaaagggcaaattcactctctcttctttttgagctgggayacccatcttctcctgcccttggacattgga

SEQ ID NO: 310162 - DNA, 585 bp, Homo sapiens
gaatccttagggacccatcatggcttcccttcaagtattcattctacctgggcacccatacccaatcatagctaagtctggactcacctagacgatctcatctgaatcctactgcagaaagatgaggctgctgkatgctatatcctctttataaacagcaataataatgttggttaaaatagatctagtgacttacccacgatgacatagctaatatatggtaaggtcaggacagcttcccctaacaacacacacactggaatgttcgttctctaaggacaggggccatgctgttgctcaatgtcatgttcccagggcctaggacaggccctggcatataacaggagtccagtcaatatttgttaaatgaacagggttctttgagcctggggctgtcagatcaccaagacaatgcaggaaactgtccaaaatatgtgggtctatttatctggcccacagttgattttacattggcagctaccaccttcattttaaaaagtgtaaaacaatagctgcagccacttcttcaggcacaaagcttatcccaaacttctgagaggcttgccatggagtccaaggacagct

SEQ ID NO: 310163 - DNA, 625 bp, Homo sapiens
attcttttgtcatcttcatggcaccgcttccaattacaactttgttccagctgagcaagagatgttctaggtgggaacagttactggagaggctccataaaatccacgtggaagctagagtgtgactctcaacagattcaactactttaatttaacctacatgaatattgcctccggggggatcctgttttggggaccaatctatgttatgctggatattgtattggggcctttcggaggtttgtgtgtgtgtgygcacacatgggtcaattttgttcttttattattatgtagtctcataatctgttatttggatgtagtcaaagaaaaaatgaatgtaatagacttcctgttctttcaaaagcaaatattttttagaagcatgctcttcattttgttcattatttataattttctctgatagtaataatttaatgtaatacatgtagattaagaaagaaagtcctcagatgaatcggccttagtgtgtggatgaaggggatgtctttttgactaatagtttcttcctgtttaagtgttaaaatttgtctaatttctcagctaacactggactaggatttataggttatgtgaatttcaaataaaaaccaagcccacacaaagc

SEQ ID NO: 310164 - DNA, 625 bp, Homo sapiens
attcttttgtcatcttcatggcaccgcttccaattacaactttgttccagctgagcaagagatgttctaggtgggaacagttactggagaggctccataaaatccacgtggaagctagagtgtgactctcaacagattcaactactttaatttaacctacatgaatattgcctccggggggatcctgttttggggaccaatctatgttatgctggatattgtattggggcctttcggaggtttgtgtgtgtgtgcgcacacatgggtcaattttgttcttttattattatgtagtctcataatctgttatttggatgtagtcaaagaaaaaatgaatgtaatagacttcctgttctttcaaaagcaaatattttttagaagcatgctcttcattttgttcattatttataattttctctgatagtaataatttaatgtaatacatgtagattamgaaagaaagtcctcagatgaatcggccttagtgtgtggatgaaggggatgtctttttgactaatagtttcttcctgtttaagtgttaaaatttgtctaatttctcagctaacactggactaggatttataggttatgtgaatttcaaataaaaaccaagcccacacaaagc

SEQ ID NO: 310165 - DNA, 634 bp, Homo sapiens
ccattagttttcctattcagaggaaaaaaggtagtttctgcaaattgcacagtactcaaaaagcaatttcaaggttattaagtacctaaatgatataaagttaaacttgaaactttgaagaaagtgtaggaacacatttttcttaccttgaaatagggaggaattattttaaaaagattcccaactcaaaaatcrtaggggtaaaaagacctatttgatgcattcattcaaaacatagttgcaacacaagcaacctaaaaataattaatatccagttacaacaaaaataacataaaagctattattaataatacttaatagtagtacctaaggaaaagatacacttgaagaatggaccaaggttagaaacaatggcctaggaatatataaaagaatgaatctcacagtaatcaggtaaatgcaaaggaaggtagccatgtgatataccatctcacatccaatgacattgcgaaaaattaaaatctgtttacaccaaaagctggcaagatggaacactcatatactgaaatgggcatgtaagttgttcatcaactttgtaaggcaatttagaagaatcttgttaaattgaagacactcatatctaagactcaagcaattccacttctaagtgtat

SEQ ID NO: 310166 - DNA, 634 bp, Homo sapiens
ccattagttttcctattcagaggaaaaaaggtagtttctgcaaattgcacagtactcaaaaagcaatttcaaggttattaagtacctaaatgatataaagttaaacttgaaactttgaagaaagtgtaggaacacatttttcttaccttgaaatagggaggaattattttaaaaagattcccaactcaaaaatcgtaggggtaaaaagacctatttgatgcattcattcaaaacatagttgcaacacaagcaacctaaaaataattaatatccagttacaacaaaaataacataaaagctattattaataatacttaatagtagtacctaaggaaaagatacacttgaagaatggrccaaggttagaaacaatggcctaggaatatataaaagaatgaatctcacagtaatcaggtaaatgcaaaggaaggtagccatgtgatataccatctcacatccaatgacattgcgaaaaattaaaatctgtttacaccaaaagctggcaagatggaacactcatatactgaaatgggcatgtaagttgttcatcaactttgtaaggcaatttagaagaatcttgttaaattgaagacactcatatctaagactcaagcaattccacttctaagtgtat

SEQ ID NO: 310167 - DNA, 482 bp, Homo sapiens
cctgggcctggaagcatttaccacaacctgactgaagagccattagggtttgagtgaacatcggtggtagccaggtagaacttgccatgggcctgaggcagtggtggccatggggaaagacccctctgcttgtggaataaaagagaagagtgggaaggactttgtcttgtgacttgggtgccagctcagaaacagcagaataaagcacsaggtagcttcccaagatttccaactccaggcctgggctcctggatggcatctctggagactcaggggccagggggatcttgctaccctaaagagaaggacatagtctagctggttttgccacctgctgattatggagccctagggccttgagtgaagataggtggtggaaaggcaaggtttattatgggctttgagtgagacccagtgccatactagcttcaggtctgactcagcacagtcccagtggtggccacaggagtacttatgtcacc

SEQ ID NO: 310168 - DNA, 482 bp, Homo sapiens
cctgggcctggaagcatttaccacaacctgactgaagagccattagggtttgagtgaacatcggtggtagccaggtagaacttgccatgggcctgaggcagtggtggccatggggaaagacccctctgcttgtggaataaaagagaagagtgggaaggactttgtcttgtgacttgggtgccagctcagaaacagcagaataaagcacgaggtagcttcccaagatttccaactccaggcctgggctcctggatggcatctctggagmctcaggggccagggggatcttgctaccctaaagagaaggacatagtctagctggttttgccacctgctgattatggagccctagggccttgagtgaagataggtggtggaaaggcaaggtttattatgggctttgagtgagacccagtgccatactagcttcaggtctgactcagcacagtcccagtggtggccacaggagtacttatgtcacc

SEQ ID NO: 310169 - DNA, 635 bp, Homo sapiens
ttcactagttttctctttgcttgttagttaatttgtttatacaatcaatgttgagttgtcatcagtttaaaataatgagttataagatattatttgcaagtctcatggtaatctcaaatcaaaaaacatgcaatggatacacacacacacacacacacacacacacacacacacacaaaataaaaagcaagaaattaaaatacaccaccagggataagagaagacaggaaggaaggaaataaggaagagaagaccacaaaacagctagaaaataaatgacaaaatggcaagaataagttcctacttataaataataacgtaaaatgtaatggagtaaactctcatatcaaawgacagagtggcggaattgatacaaaaagaagatccaacaatctgttgcctacaagaaacacacttcacctataaagacacacacagactgaaaattgagggttgggcaaaggtcttccatgcaaatggaaagacaaaaagagcaggcatagttatatttatatcagacacaaaatagatttcaagataaaaagtataacaagaggcaaggatagtcattatataatgataaagggataaacttagaaagaggatataacaattgtatatatatatatgcaccc

SEQ ID NO: 310170 - DNA, 530 bp, Homo sapiens
tgcaaactgccaatctgacaagagattaatagccagaatatataatgagctcaaacaactttataggaaaagatyaataatccaattaaaaaatggacaaaaaatctgaataaacattttttgaaagaagacatacaaatgacaaacaggtatgtaaaaaggtgttcagcatcactgataatcaaataaatgaaaatcaaaagtacagtgagatattgggcatagtggttcacgaccgcaatcccagcactttgggaggtcaagtcaaggcagaaggatcccttgattccaggagtttgagaacagcctaggcaacatagtgagacctcatttcatcttaaaaaaataaaaaagccaggtacggtggagcacacttgtagttcacctcagcttcctgagtagaggtgggaggattgcttgagaccacgagtttgagtttgcagagagctatgatcatgccactgcactacagcctgggtaacagcaagaccctgtcttaaaaaaaaagtacaatgagatatcctttattc

SEQ ID NO: 310171 - DNA, 530 bp, Homo sapiens
tgcaaactgccaatctgacaagagattaatagccagaatatataatgagctcaaacaactttataggaaaagatcaataatccaattaaaaaatggacaaaaaatctgaataaacattttttgaaagaagacatacaaatgacaaacaggtrtgtaaaaaggtgttcagcatcactgataatcaaataaatgaaaatcaaaagtacagtgagatattgggcatagtggttcacgaccgcaatcccagcactttgggaggtcaagtcaaggcagaaggatcccttgattccaggagtttgagaacagcctaggcaacatagtgagacctcatttcatcttaaaaaaataaaaaagccaggtacggtggagcacacttgtagttcacctcagcttcctgagtagaggtgggaggattgcttgagaccacgagtttgagtttgcagagagctatgatcatgccactgcactacagcctgggtaacagcaagaccctgtcttaaaaaaaaagtacaatgagatatcctttattc

SEQ ID NO: 310172 - DNA, 621 bp, Homo sapiens
ctatgttaagtgaaataaaccaggcccagaaagacaaacttcacatgttctcacttatttgtgggagctaaaaattaaaacaagtgtactcatgaagatagagagtagaatgatggttaccagagcctgggaagtgtagttggggtaagggagagaggatggttaatgggtacaaaaatatagttagatagaatgaataagatctggtatttaatagcaccatagggtgactacaatcaacaaaaatttattgtacatttaaaaataactaaaatattggattgtttgtgacacaaataaaggataaatgcttgaggtgatggataccccagttaccctgatgtgattattatgcattgcatgcctatatcaaaatatctcctgtaccccataaaatatatacctagtatgttcccacaaaaataaaaaataaaaaatttaaaaacccattgcatcaaatctgcctcctaaaaacagatgctatatcaatcaataaggaataatggaataaatgagaaaaaatttattggcctctgacwatggtctatcactgtactgtgtgctgtgcagaatacaaaggaaattagccttggtccctgactccaagggagtcatagtctt

SEQ ID NO: 310173 - DNA, 578 bp, Homo sapiens
tcaaatataaccattccagcgttcaagaggaaaaggaccaaaaattaaactcttcatggggggggtcccctcatgggcacacaccagcttctaatctttctcccatctctagagtttttttcctcctctcccctctcccattgagccatcacaaggttggtcttaccttaagattcatgccccatcaccamtatagcaattcctgggacacaatgattcctccatgatatgatctgcagagtctttagctgagaatataccattgaggacaatgtgagtcatgtttcttcagatttaaagcttcatatccaagtcattccacaccctaaagcaatggtttccaaaggttggcatgcctaagagttactctgggacttggtgtgtaaaccaaaagtatctgagataggtctcaatcaatttagattttttttgccagggttagaggacacacacagaagaaaaaacacagaatcacagaaacagtctatggtctacctttctcaaaagatgacttcgagggcttcaatatttaaaggggaaaaacaggctggaggggaaacagggagggcatggcaatc

SEQ ID NO: 310174 - DNA, 578 bp, Homo sapiens
tcaaatataaccattccagcgttcaagaggaaaaggaccaaaaattaaactcttcatggggggggtcccctcatgggcacacaccagcttctaatctttctcccatctctagagtttttttcctcctctcccctctcccattgagccatcacaaggttggtcttaccttaagattcatgccccatcaccactatagcaattcctgggacacaatgattcctccatgatatgatctgcagagtctttagctgagaatataccattgaggacaatgtgagtcatgtttcttcagatttaaagcttcatatccragtcattccacaccctaaagcaatggtttccaaaggttggcatgcctaagagttactctgggacttggtgtgtaaaccaaaagtatctgagataggtctcaatcaatttagattttttttgccagggttagaggacacacacagaagaaaaaacacagaatcacagaaacagtctatggtctacctttctcaaaagatgacttcgagggcttcaatatttaaaggggaaaaacaggctggaggggaaacagggagggcatggcaatc

SEQ ID NO: 310175 - DNA, 578 bp, Homo sapiens
tcaaatataaccattccagcgttcaagaggaaaaggaccaaaaattaaactcttcatggggggggtcccctcatgggcacacaccagcttctaatctttctcccatctctagagtttttttcctcctctcccctctcccattgagccatcacaaggttggtcttaccttaagattcatgccccatcaccactatagcaattcctgggacacaatgattcctccatgatatgatctgcagagtctttagctgagaatataccattgaggacaatgtgagtcatgtttcttcagatttaaagcttcatatccaagycattccacaccctaaagcaatggtttccaaaggttggcatgcctaagagttactctgggacttggtgtgtaaaccaaaagtatctgagataggtctcaatcaatttagattttttttgccagggttagaggacacacacagaagaaaaaacacagaatcacagaaacagtctatggtctacctttctcaaaagatgacttcgagggcttcaatatttaaaggggaaaaacaggctggaggggaaacagggagggcatggcaatc

SEQ ID NO: 310176 - DNA, 578 bp, Homo sapiens
tcaaatataaccattccagcgttcaagaggaaaaggaccaaaaattaaactcttcatggggggggtcccctcatgggcacacaccagcttctaatctttctcccatctctagagtttttttcctcctctcccctctcccattgagccatcacaaggttggtcttaccttaagattcatgccccatcaccactatagcaattcctgggacacaatgattcctccatgatatgatctgcagagtctttagctgagaatataccattgaggacaatgtgagtcatgtttcttcagatttaaagcttcatatccaagtcattccacaccctaaagcaatggtttccaaaggttggcatgcctaagagttactctgggacttggtgtgtaaaccaaaagtatctgagataggtctcaatcaatttagattttttttgccagggttagaggacacacmcagaagaaaaaacacagaatcacagaaacagtctatggtctacctttctcaaaagatgacttcgagggcttcaatatttaaaggggaaaaacaggctggaggggaaacagggagggcatggcaatc

SEQ ID NO: 310177 - DNA, 648 bp, Homo sapiens
ccctctcaagatttatacaaaacccactgtacacttgtgcaaaaaccagataaaagtaatctttcatgattcaaattgagtttggagcttacagcccagccatctcygcctttgctaccctctcggcagtgccgtaaatgaagtggcttgaaaagtccctgttcagtaagatcaccgtgactcgtagaaccttcacagctttgggctctgggtcttcccagccttgagtcatctcttacacagaaatgacctggatcctcttcttctacctaaatgagaaatcttgcacatctgtgaagtcctgaaccttccatctgactgcaaattcgtaagataagattgaacaacacaacccctgatgaagagtcaatgcttcccacaggtcctggggctcgcctcccagttcagggacctctttcctgctgggatcagcaccacctgggaacatgccctctgccttgtcagaaatcgtgttcacagcctactcgcttcttgacccatcacattcttctcttccccatctctcttctcagatctatatttttctttctcttatctttgtccctcaaagtattgcccaagcagccatttcataggttagcaaaaagacctgatgtgaaggttgtctgtaaacagtggtaaaatagg

SEQ ID NO: 310178 - DNA, 648 bp, Homo sapiens
ccctctcaagatttatacaaaacccactgtacacttgtgcaaaaaccagataaaagtaatctttcatgattcaaattgagtttggagcttacagcccagccatctccgcctttgctaccctctcggcagtgccgtaaatgaagtggcttgaaaagtccctgttcagtaagatcaccgtgactcgtagaaccttcacagctttgggctctgggtcttcccagccttgagtcatctcttacacagaaatgacctggatcctcttcttctacctaaatgagaaatcttgcacatctgtgaagtcctgaaccttccatctgactgcaaattcgtaagataagattgaacaacacaacccctgatgaagagtcaatgcttcccacaggtcctggggctcgcctcccagttcagggacctctttcctgctgggatcagcaccacctgggaacatgccctctgccttgtcagaaatcgtgttcacagcctaytcgcttcttgacccatcacattcttctcttccccatctctcttctcagatctatatttttctttctcttatctttgtccctcaaagtattgcccaagcagccatttcataggttagcaaaaagacctgatgtgaaggttgtctgtaaacagtggtaaaatagg

SEQ ID NO: 310179 - DNA, 633 bp, Homo sapiens
tgctgtcccttcttcatcaccctccttgtctacatgatcttccaataaaaccttgcaggaccctctcactatgcaatggcatacatcacttccccttccctttgggtatggccataagacacttttggaccatagaatgagacaggagtgacaggttgccagttttgaaccttggcttgagagatcctgtatgggtgcacctgctctctttgcctctcatcaccatgagaagagcatacctgggctagcctgcttgtcctcaggcaggatcagggacatgcagcagagccaagtctctctagtctagcccagctcagatcaaactacccttaacatcagattcatgagaattatcattttaagccaccgagttttggaacagtttgttaggsagcagatttcggcaatatctgttacattctgctacatcaccactcaacaaatattttttaactctgaaacagaaatctacaacagtttcactactgatatcacaattaaaagtcaatccttcttcccttcaagccttatttaaaaagcatatgtaatagtccaaaatttagctaaaattaagttcattttagattacctaacaaacctttggtgaattggaacacaaatgtctgtttttaa

SEQ ID NO: 310180 - DNA, 563 bp, Homo sapiens
ctgttttaatgtgtccactagaaaatttaaagctgcgtatgtggctcacattgtatttctgttggacagcactgctagaccctgctatagccatctcttgtatttttrccatagttctctgcccacagtaagccctccacatgttctgactcacccataatttatgtaaatatggacagaagccagagaagaggaaaaaaatcataaattgccaggtgattccttgcagcatgagtagaatacagctttaaaaactcagaacacaggtggcaatttccaggactcagggccccatcaccctccttctctcccgccccatccttccctctttttatcaacaaacatacaggaggctttagaatagaccaggcactgtgcaagaccctagaaattacaaaggtgcatataacctagttgttcagaagtttacttccaaatagagaaaactgatccatactagtctgccagagctgcagtaacaagttaagttgtagcaaggtaagtaaccacagagtgggtgacttaaaccacagacattttttcttatagttctggaggctaga

SEQ ID NO: 310181 - DNA, 595 bp, Homo sapiens
ggactggtgttcttatatgaagaggatgagacgtcagagattgctgtccatgtgtacagagaagaggccatttgatgacatggcaagaaggtggctgtcacaagccaggaagagaggcctcactataaactgaattttcttgcacgatgatcttggacatccagtttccagcactgtgagaaagtaaatttctgttgcttaagccacccagtctgtggtcctttgtcacagcagtttaagctgattgaaacaagggccctgctccagtttaaaggtgctcttttacaaaggtggagcaagactcttgtttttgtgaggggctctgcagaagttgtctcactgcttgggatgcagaattggtagttcagaaggtggccaggcgtggtggctgtagtcccagctacttgggaggctgaggtggcagaatcgcttgagcccrggagtttgaggctgcagtgagctgagatcatgccactgcactccagcctgggcaacagagttagacctggtctaaaaaaagaaaattgataatcagtttgctaaaggagcctagggtagttagaaaactagtggtggtggcaggagtgggtggcag

SEQ ID NO: 310182 - DNA, 557 bp, Homo sapiens
attctttaaaattacttaccgtcctccaaggccaatctccttccagaaagctttttatctgaattttccagctttcctcgtagcatccactttacacttagcatacattgagctatgacagctctcctctgatgcaattacttttgttatttgtgttttctggagtgtgtatatcatttcactcaacagtagtgtaatattcttacccacagaggctttgccttctccttctttgtgtgtacctgcatttcccctagtaaagtgtgacacacacagcagacattcactcaatgtatgtttactggctaaataaagaaagggtactattagatctcaatgaaagtctgtgattgttttgtattgctcaaacccagacagaggattggtcatcttgcttcatctattttcaggtaygtgttcagttcagagaaaaatcataggtaaatgttgtgttctgagataatcactgctttatactaatcagctagacaatgatctcatgggatacaatggtcctgtgcagagatgtagaaacccaggaatttcttcttcacatc

SEQ ID NO: 310183 - DNA, 555 bp, Homo sapiens
acctcttttctttataattacccagtctcaggtatttcttcatagcagcatgagaacagactaatacagttgcctaggctggtcttgaactactagcctcaagcaatcctcccacgttggactctcaaaatgctgagattatagagaaattttttttaaccatatctgccctgccagccaaagactgatggaaaaactgcaaccccttccctgtcatttcagcagggccaactggggatctggtcttgtagcttccacatggcagaagcaggtggtgatgctctgattcccctgctggggtacatagatggraatgagtgggaagctgatcctgtatcccccacccagtggaagaaggtggtaccctgattttcctgccacagccatgtcatcagggtctggtgatgggtctcccgtctctctcccctccccttcagcagacttaatgagctggtgcaaggtgaggctactcaccatgactcttctttccttctcaccctggtgttggcagagcccggcagagccggagtctccatcccaatcagcatcaccaag

SEQ ID NO: 310184 - DNA, 528 bp, Homo sapiens
gctaacgtacttggcctgtaggaaggttttaaattatcgatccagcttttaaaataactacaggattatttgtatcttctrtttcttcttgtgtcatccctggtgtattatacagaatttgccataacttttcacatttgcaggcataaaattattaagaatattttgggtgttcctttagtttttcaagatgttaaaacaatttcactgattttaaacaggaattcacttactacttaaaatatcttttattatagaatgtatcataaacaagagaatgtaatacatatatgtattttttaaagaataagtaaacaaaggtgtatacatgtggatattcacctgtcaagcttgagtaacaaatatcactggcatgttaaaagctccctgtgtgctccttcctggctgaaatctctctcccccacatttgtgttaaccattaccttgcttttctttatactttctccacttcctgtataggttcctaagcaatatatggttctgaaaaacagagtagcaagcccaagc

SEQ ID NO: 310185 - DNA, 551 bp, Homo sapiens
aacagggaagtacatcctccccctactgcaccctgccctgccccagggatgatggtctaggctctgagcaagatccctcaggggccactcagctaaagacacctgaycaaaaagaaaactagctccattgcactttcatcctctacttcatgtcttcctttctctgtcactgacttttagtaagtccttcaaagaacaaatcagtattcctgaaacaaagttgtttatagtagttcttcccaaatattcactcacttactttaaggtctcacatctgaaggcatgtttatcccaggagcataagcatccctggcacaccgacatagcactcagggtgtcggaaatctttaggcctccaccttggtaagtcggagatttacaacagattccaagaaagagatttgactaatcatcttagagccaaaatatggtacagtaatagaatcacagggttagaaaagaattcaaacatattagttccacctccctcccaagtaggagtcccttctagagcatctccaacagatggccacaaaggcacaacttaagca

SEQ ID NO: 310186 - DNA, 568 bp, Homo sapiens
acattaattccagtcttgattctgaaagactgccttaaaacttggcaatgcttagtgaatggacgcttggctgtttagctcatattccagtgagaaaatgtatggttcttttttctctttctggaggtgaggtaggagaaccaagcccaataatttacaggtagaaaatggaagcttaggactagaacccttggaggtgactcccagtccactgatctttctcctccaccacacttttgatcctaggttcattgttctaagttttctctctgataaagctgacaattctattttaatcagcaagagtaggtaacactttatccctttttggcccctcacatcacttattttaagtgcattaggtttgttaagtatggttgctaagaccaggaagtttgtgatctayagagcatgttactgagaagtcactccggttaaaggataattttttaaatttaagataaaaacatgactctcgtgcaatataaattgaacacatgtcagaatttttacatggctcattaattaatgagagaaccagtaagatgctccaccttgttcaaatgag

SEQ ID NO: 310187 - DNA, 590 bp, Homo sapiens
atgcctaatcaaaataggatctgatactactgttatcatcgtcatcaataccatccataatgattttgggcaaatgtatttgatttgagttggatttactatttattatagtyaaatacatatacaatgtcaaaattagatgtattctacattgctaaaactggtaatagcttttgtttagaatttagaagtagcaaatatctaaaatttcttggaaatgcatataaagtaaattcatcctatatattttggtcctttgaccagtaattaacatttagctttatattttcttattctatgagtttagggtaatagtttaagaggtgtatgatccagccaaccctggtcttattgctcctcaaaaatgcctggtctctcaccaagttttagtgcttgagttctctgtatctgagggatccccactattccctatgaccagctcttcgcatgttttggacctcagtgcccaccatctgaaagcactgtttctttctttccttatttgatgtcatctagagtgtaagcttcatgaggtcaaaggcctcatctttcctcttcaccatatatccctgatgcttaggtgctcatat

SEQ ID NO: 310188 - DNA, 590 bp, Homo sapiens
atgcctaatcaaaataggatctgatactactgttatcatcgtcatcaataccatccataatgattttgggcaaatgtatttgatttgagttggatttactatttattatagtcaaatacatatacaatgtcaaaattagatgtattctacattgctaaaactggtaatagcttttgtttagaatttagaagtagcaaatatctaaaatttcttggaaatgcatataaagtaaattcatcctatatattttggtcctttgaccagtaattaacatttagctttatattttcttattctatgagtttagggtaatagtttaagaggtgtatgatccagccaaccctggtcttattgctcctcaaaaatgcctggtctctcaccaagttttagtgcttgagttctctgtatctgagggatccccactattccctatgaccagctcttcgcatgttttggacctcagtgcccaccatctgaaagcactgtttctttctttccttatttgatgtcatctagartgtaagcttcatgaggtcaaaggcctcatctttcctcttcaccatatatccctgatgcttaggtgctcatat

SEQ ID NO: 310189 - DNA, 468 bp, Homo sapiens
tccctccaaactccactccaagccctgccttttccagcctggatgcagaaattcctcattcgataccacatagcagttttgtcaacagctgtctgatgaggtatcacttttacttccttcactctgggaattcatttatggctcttctttagttaggactatgcctgtgtgattcccacaaggcaccatgtgctcagctgccccaggattttccttcctaaataagtgccagtgttcaccatgcccccccttgccagacccacacacatctrctaaagctcaccactggggtaaggattctttggcatcacatgagggaaactgtacttttagataatgcaaacaaccactgagcacttagcagtgccattagagagacaaattagagggtattggcttcgaggggaacttcatagcaggtcagcagcacagcagggccatcccagcccaactgtctggcactgcaag

SEQ ID NO: 310190 - DNA, 648 bp, Homo sapiens
taaacagcaaccctaaagtttctcaatatctgactcaccagagacttgcatgataatgctttaagtgtgatcagctgctcagtcctgagtctgacctctgctttcccctttcccctgacactcttctcatcaacatcactgctggccttctcctcactaactgcgctggaaacatttggtccttggcccattgttgctctggaagcagagtgctagacttcacttaatgctcatgtgatcccaaagcagtgacctagcctctctctgcttcaatcacctcatctctaaaatgaagataataacaccaaatccatagggttcttatgatctttggatgasataatgaatgtaaatactatccatacattgatgattcaaacttcatcttcagtattaggcttccttgctgcctccagatgcctatcacctattggacattgccatctgaatgcagaatagtcatctttaagttaacctacccaaactttactcttgatcccctcacccagccacacattcagactggctcttcccacagttgtctctgctcagtaaataggaacttcattcaaccagttgattaggccaaagtctttgacatcagccctgactccctcttcctctcacacctcagacgtaatccatcag

SEQ ID NO: 310191 - DNA, 523 bp, Homo sapiens
gttcatctttattggcaaagtgttactcaataatcttgctagccaggttttttttttttttttttttttttttcagaataatcttatgctttcccatttgaggtcaaacattgtttttatgttattaaaatccaatcagtgaaaccagaaggcaaattaaaatttgctcaagttgatcaatttctacaagcagaacatctgttcagtgactcccaccaattccttggcatattccccacaattttttttctgggactgggcctcatacctgcattctctgccctcatggttaaactgaatctgctagggtttggggtgtggaggaggtaaggcaaacaattcagcctcttcagctagacacgttcaaratgcaacagagcatttcagcctgaacctggaaccaaatgagtctgctcataattattgtcttcttttattttaggttcaggggtacaacatgtgcaggtttcttatataggcaaattgcatgtcacgggggtttggtgtacagattatttcacca

SEQ ID NO: 310192 - DNA, 382 bp, Homo sapiens
  misc_feature (1)...(382): n = A,T,C or G
tttcgggacttgcactactcagtaagacacagaaaagtagaattgagtaacctacatgaaaagcaaagaaaatggaattyactagcttgaattgagagaacaaagggcatggaggaggcttagagttcctggagtagtgaataggaaagatggagataaaccagagtgtataccttaggtagaaaatgccggagaaagcanaagaacctaccatatatattttttttctattttgaaagcttcatgaaaaagttgtaggaaagaattacctggggaacctcattttctgtgattgtagactaatcagcaggaacatggcaggttgtatcctaaccaaagtttgccatgtacctgacaggaacaaatgctaagcatggactgc

SEQ ID NO: 310193 - DNA, 599 bp, Homo sapiens
tgtttgaaactaggatggccaaagaattgtagaaaggacgaagaatgtctaccctagagaataattagacaggacatcaacagctgtcttcaacaattttagacctaaaatttagaagagtaactccattgtcctttgaggctcctggggaaagacctaagatcagtggatactaagtcttaacaataaaagataatgtcttgcttccagggttagtgaatgctccttcaccccctcccatcactgacagtgtaaygacaagggacaccactttccaggaacattagacaggattctggaattctagaagggactgggccaccaagttcccatccagtaatggagtacagtcaagtccaggttcttagtttatctatttactctgatttgcaatgtctcttttctcaaacctctgcctcccctgcttccccttctccttctccagtggtgattcccataagccaagacagaccatgaaggagaggtcagaaaaacagagaatagaatccagattacagagcaaatgattctggctaaagctcttcagatatacaggagcttttaggcctccctctgaggtccacttacccatgcccagg

SEQ ID NO: 310194 - DNA, 599 bp, Homo sapiens
tgtttgaaactaggatggccaaagaattgtagaaaggacgaagaatgtctaccctagagaataattagacaggacatcaacagctgtcttcaacaattttagacctaaaatttagaagagtaactccattgtcctttgaggctcctggggaaagacctaagatcagtggatactaagtcttaacaataaaagataatgtcttgcttccagggttagtgaatgctccttcaccccctcccatcactgacagtgtaacgacaagggacaccactttccaggaacattagacaggattctggaattctagaagggactgggccaccaagttcccatccagtaatggagtacagtsaagtccaggttcttagtttatctatttactctgatttgcaatgtctcttttctcaaacctctgcctcccctgcttccccttctccttctccagtggtgattcccataagccaagacagaccatgaaggagaggtcagaaaaacagagaatagaatccagattacagagcaaatgattctggctaaagctcttcagatatacaggagcttttaggcctccctctgaggtccacttacccatgcccagg

SEQ ID NO: 310195 - DNA, 369 bp, Homo sapiens
caaagcttctcaaaacaactgtccatgttcaytacctctgctcacttttcttccagccgtcctctcctgaaacctcctcagttaggttttcacactcaccacttcactgaatctactattattaaggtcctccaaagacattcccattaccaaatacaataaccaattcctaaacctctccttacttgacgttattatttaagattcatttcatgcttttggctattctctcttctttgaatcattttcttccctcagcttctaacacactcctctctttgagtcttctccttcctcaccagcctttccttctcaagtccctttgcttgtccttaccaatcttcttgtcctctaaatactggaatgccc

SEQ ID NO: 310196 - DNA, 633 bp, Homo sapiens
cctaaaatttcaagtttcttcatacagttgctacacaaagaatcattcacttccataacggcatccattgggggaaataataatgacaatgtcttaggaaagcatccctagaagtagggcctgagatggggtgtcttaygaaagggatttgttgtggggagtgccctcagcagaaggagagtcaaagaagcaggagaggcaggctaagtagctaagcaagggtgtggtctcagctggaatctgcttccgactgattccaccgagtggtcctaccttcagacaaaggactagcctttgtacatttctgtccctcagtcattggctatgtctgcccccagaagtagtgagagtgcagcattctaggcaaggagcatccctcttggccaaggacagctccctggaaaaaaaaggggggcatctgtgagtcattggctgccaacactcacagcactagaatggtaaataagatcaagacaagggtacactatatctgtgaacatactttaatgctacaagatgaagtataaaacactccccactaggaacaaatttaaaatgcagatgaaccttgcaattgctgtacctaaaacattatattgccattataatgaataatatatcatgagaaaatac

SEQ ID NO: 310197 - DNA, 633 bp, Homo sapiens
cctaaaatttcaagtttcttcatacagttgctacacaaagaatcattcacttccataacggcatccattgggggaaataataatgacaatgtcttaggaaagcatccctagaagtagggcctgagatggggtgtcttatgaaagggatttgttgtggggagtgccctcagcagaaggagagtcaaagaagcaggagaggcaggctaagtagctaagcaagggtgtggtctcagctggaatctgcttccractgattccaccgagtggtcctaccttcagacaaaggactagcctttgtacatttctgtccctcagtcattggctatgtctgcccccagaagtagtgagagtgcagcattctaggcaaggagcatccctcttggccaaggacagctccctggaaaaaaaaggggggcatctgtgagtcattggctgccaacactcacagcactagaatggtaaataagatcaagacaagggtacactatatctgtgaacatactttaatgctacaagatgaagtataaaacactccccactaggaacaaatttaaaatgcagatgaaccttgcaattgctgtacctaaaacattatattgccattataatgaataatatatcatgagaaaatac

SEQ ID NO: 310198 - DNA, 540 bp, Homo sapiens
gaaccttataggaatctattatgggtacccacatccctacagcagctggccaccctgaaaattcctgttcacatttgtcaactatgagaccccatatgtaacccatcacaaatrtgatgagaatcacatttctcttccaaagagacaaatgtcccttccaaagagggtattgggccaggatagttgcagccccagaatcttctaaggtaaacttttggcacctgcaaactcttgctacttctctctcaacttcatcctcattgaccatggttacatatacatattttaattttatctttatcatagacagtgttgagagacccacagatgccctttcactttcagtggaagaaatctagaccagaacagagtagagatctctcagcgtgcagatggctggcagaggcaatgaggagaagggaagtgagctgggcttcagagttgtgtagacccagaccctagtcctgttcctgtcctcactagctgcatattgttgggccttcatacacaacctataaaaataaagcaatggaaatgcca

SEQ ID NO: 310199 - DNA, 609 bp, Homo sapiens
acaggacaagaggaagtgaggaggcctgctcttgttcccatatttcccactgctctcccacaagtattcacttctccatggaatgtcctaatagtattttctgggcccatttttagccatttggctcttcctactggaacatctgaatgcccttccttcctactctatctttctatcaatccagtcctacatctatcaagacccaactaaaatgctttctgcagttctatggtgatcacttattttctctgaatttccatgttatttacagtgtagactttggtaagctccttgaagayacagccagctctaatttatgtgcctattcccactgaagctacacagcatacacctggcacacagtgattatttttaaaacagtcattagtaaatgggaaaaaaaatagtttgccttcaaataaaaacaacagaaatagaagcaaacttaagcaaaaatagaagaacaacatggaaacattttctgatttttctaaaagtcactcccaagtatatcaaggctccagcctgcccaaaaggcagcctgacacagataccctcttccctcatctgtcatctttctcttgatttctcctttgtgttgcatatttt

SEQ ID NO: 310200 - DNA, 610 bp, Homo sapiens
aaagattgagcaaaaattgatgctggtagacttcaaggaggacgtatcctagagtctcaaacagaaatggaagtgacactctttaggggatactgttgtgctctggagcattgcgtgtcatcttaaaaaatccttgagctgccatcaaaagagaagacaggacaagaggaagtgaggaggcctgctcttgttcccatatttcccactgctctcccacaagtattcacttctccatggaatgtcctaatagtattttctgggcccatttttagccatttggctcttcctactggaacatctgaatgcccttccttcctactctatctttctatcaatccagtcctacatctatcaagacccaactaaaatgctttctgcagttctatggtgatcacttattttctctgaatttccatgttatttacagtgtagactttggtaagctccttgaagacacagccagctctaatttatgtgcctattcccactgaagctacacagcatacacctggcacasagtgattatttttaaaacagtcattagtaaatgggaaaaaaaatagtttgccttcaaataaaaacaacagaaatagaagcaaacttaagcaaa

SEQ ID NO: 310201 - DNA, 583 bp, Homo sapiens
cattctccaaattatttttgtagttaagtaatctcaatagtaaatcaccattttatcctgttttatctttaactctgacatttatgaaattggattgaggattaagcaatgcttcaatggcaaaatcttatcaaaatgagtccagccaattattttacagatatatgtaattaatttcattttttaaaaaaaaaaagttgatgcatgctatttagtgtagtaggttcagccaccagcactgagaaaagcttttcaatattttcttccaacatttatgtacagatgtctttstgctccaatatttggctctctgtggacagcttgcttaagcatagtggtaaatgataccacgctcataaaagagcccactgcctacctcctaatcagtgttgtattggattacattgatccattccaaactctatttgaacatcgtgactaaaatttttaataattttcagctgtaactcataaaactgttttaatttagcccagaacttcaaatgccccgggaagaactgatgacttatgtgatgagctagccccatgttttcgcaacatctccgtatccaaagagccacat

SEQ ID NO: 310202 - DNA, 396 bp, Homo sapiens
taacctaacatatcaggacttggacatctttgggcctttttttttttttttttttttttgagacagagtctcgctctgttgcccargctggagtgcagtagcgtgatcttggctccaggttcaagtgattatcatgcctcagcctccccaatagctaggattacaggcacccaccaccacgcccggctaattttttgtactttgagtagagatggggtgttgccatgttgcccaggctggtctcgaactcctgagctcatacagtcctcccaccttggcctcccaaagtgctaagattacaggcatgagccaccacgcctggccgtctctgggccattttcccacctacagcagcaggggagttggctggcattcacagaatacattacatagagc

SEQ ID NO: 310203 - DNA, 599 bp, Homo sapiens
tgatctatctctttaccactttatcactgctcctccttgtactttgacattgcttgttctttargtaatcctcagttttgtcacctaaatattaagcccagaattttgcaagaagatcaaaatggaaaaaattcaaaagttctcaacttaaaaacacagccccatttattctcttttgaatcttttctcttttaaaattgcactcttcaagataaaaccacaccatatgcgaccctgaaaaagccacttaatttccctgagcctctttccttacctggggaataataccactccctccaaaaggtttctgtgaagaatgaaataaaattatgtgtatgaaccctcctaagagttatgtaaacttgattatcattattccctcaaatctagatcaaaacaataccagtaagcaacattgacagttacctaaaacagaacattagccattttctcttccatgttttcttattattttcctgaagtcctccattccttgggtcatctcagggagtggatgggtcagccaagtctggggaatccctgaacagaagagaccattgcctgactttccagagtgtggaccccaaggagaagcccat

SEQ ID NO: 310204 - DNA, 599 bp, Homo sapiens
tgatctatctctttaccactttatcactgctcctccttgtactttgacattgcttgttctttaggtaatcctcagttttgtcacctaaatattaagcccagaattttgcaagaagatcaaaatggaaaaaattcaaaagttctcaacttaaaaacacagccccatttattctcttttgaatcttttctcttttaaaattgcactcttcaagataaaaccacaccatatgcgaccctgaaaaagccacttaatttccctgagcctctttccttacctggggaataataccactccctccaaaaggtttctgtgaagaatgaaataaaattatgtgtatgaaccctcctaagagttatgtaaacttgattatcattattccctcaaatctagatcaaaacaataccagtaagcaacattgacagttacctaaaacagaacattagccattttctcttccatgttttcttattattttccygaagtcctccattccttgggtcatctcagggagtggatgggtcagccaagtctggggaatccctgaacagaagagaccattgcctgactttccagagtgtggaccccaaggagaagcccat

SEQ ID NO: 310205 - DNA, 545 bp, Homo sapiens
caaccatttcccattaaactgtctccatgctacagagagttatatttatctcaagctccatatcaaatgcccacattaaaattaagatgtcaaaattttcttttttggagactgaggtaagtggctagtgaagaggtgatgagaaggcagccaagtctcagatgttcactggaggcagtcctcaagggcagagagattcctaattggttatgtgccaccatctacctccttggaactgggcagaaacaactctcctgattcaaactgaatttcatggagaaaaacccctccactgtcagcctgtgacatttttacccattgtgtaacaaatgtaaagttaacttttaatttttttctttaatcatccaataaaaaggaggaaggaagtagtttatatttccaaacagctttctctgtgaaaaagtgtttctctctccaaaagctgcaaccttttgattcaatgcaaggcaaaataaatgaaaacagtaaaagkatagaaaagtgaatgatttttatcaaactatattcagaaaaataacatcact

SEQ ID NO: 310206 - DNA, 568 bp, Homo sapiens
ttttaaaataagtttatatgatggttatcttgggtatctggaatttttatgagctttctaggctcttgtagtaggaagcagtatatgaattaaaaataaaggcatggtacaaataaaaattaaaaagaaatatggtcaaaaagtaaaaatgaattttctaacagtaatggtgataatgttatacttttccataataataattctataatagaatattatgattatcayactttacaggagagaagggattaaggatgttgaaaacatgagtaagtagctgtgtgtaaaatgtgcagaagtttgtctcataggatgttgtagaaataggagcgactataagagacatttgtaatataatagacaacaaatgaacttggaaactctagaccatttttcaaattctaactaagtaggaaaaggacttgaaaaaacatctcttcaaggggacatataaatggtcaacttgtatatgaaatgatgttcaacatcgctaatcactggggagatgcaagtcaaaaccaaaattagatactagttcatacctattaaaatggctatcatcaaaaaa

SEQ ID NO: 310207 - DNA, 374 bp, Homo sapiens
tggtttacaggcttttttgacattgtgtattagttttggaacatggttaatgtgaatctgacctttgagatacattcactattggtgaattgactgtcaagttttcracaccgcaaggtgaagaaccagacattgaatgatgagaaattcatcatgagaatcactaccacctatgaaggcttatagggatttttccctgcacacaaactctcagtgtttgtgtgatgacttactaaagttatttacatttgccgagactcttcaaagggaaaaaaataaaagaacccaatggcctgttaataccttgtttgtgcaaataaagttataaagctatttatgacaactgaaccaatgttaaaaagaaaaatatttgt

SEQ ID NO: 310208 - DNA, 564 bp, Homo sapiens
cttcttgtagattactttagtagttgtattttactttatttctctttattttatagtattttaaatttagacttgcttctaatcttccaggtatcatggccccgatcatgcaccttgttgccaacatccgatatcttttaaagacaatgattctgccattaaacaggtttcccgactgtagctcttcaaactttgctcaatacctccatataaccataaatatgaccgtagcatgcagctggagtgtgtttccttcaatatctcttactaataaatatgaccctccaacagacattacaggaagtacaactgtcccatggcccactccacaattctccttagtatttgaaatctagttttaacaagaatgagtttatgttggttgttgtgtgtcctggaaagaaacttggaaaccaaagagasttagaagtgaaatggagtttgtgattcttttgctgttttatactgtatgctccacccatctccagaaaaaatatcttactttttttttttttttttgggacagagtctcgctcttttgcccaagttggagtgcagtagcac

SEQ ID NO: 310209 - DNA, 490 bp, Homo sapiens
ctttctcatctttatgagtttgtttagtttcagtctttgagggtgctgacctttggatggggtttgtgtagggacttatttgttgttgttgatgcctttgttgttgctttccatttgtttatttttctttcaatgatcaggtccctcctctgtagggctgctgcagtttgctggggttcacttcaggccctattcctctgatttgctcccacacctggagatgtcactcaaggaggatagagaacagcaaatatgggtgtctgctccttattctgggatctctcaggatcaatgtgggtgactaatgatttccctgatttggctctttcagactytctttgtttcccaatcttaaaagatatttaaaaggcacctacttttctttagttaataatgaaaaaagattgtcttaacctagttaaattccaaggaactccttttttttttttagggatggactaaatgtctgatatcatcatttactaaagtg

SEQ ID NO: 310210 - DNA, 596 bp, Homo sapiens
cttttctttctctgtctccttctctttctcagtctatcaaatgttcttctagttctgcctctttggttgagctctagctaatacagaaccccccacattagctgctatactctaacagctatgcttttcgtgaaagctgagtgaaaactgcaaagttaagtaaaagctactgtaatgtatctgtattatatttatgaccaaaaaatagcattcattggaaaaatagtaacatatagtcattgatttattccacagaaaaattgagtgcccgcctaattctattctctatgttggggatatargaatgattagaacagaaagtgctgttctcatggctttttacaataagagttgaggaaagagactgaatgtaaagaaagaaaatactgaagttacatggtaataagggctagaatgaaactgaagtttctggggtgattacgtaagtctttgctttataataatttatcgtattatacgtatattttacccagattcattgtgcattatatttcacaatttgaaaagggataacaagtactaagtttggtggaataaggaaagtcagtgggtcagggttggggagaatgttgttt

SEQ ID NO: 310211 - DNA, 596 bp, Homo sapiens
cttttctttctctgtctccttctctttctcagtctatcaaatgttcttctagttctgcctctttggttgagctctagctaatacagaaccccccacattagctgctatactctaacagctatgcttttcgtgaaagctgagtgaaaactgcaaagttaagtaaaagctactgtaatgtatctgtattatatttatgaccaaaaaatagcattcattggaaaaatagtaacatatagtcattgatttattccacagaaaaattgagtgcccgcctaattctattctctatgttggggatataggaatgattagaacagaaagtgctgttctcatggctttttacaataagagttgaggaaagagactgaatgtaaagaaagaaaatactgaagttacatggtaataagggctagaatgaaactgaagtttctggggtgattacrtaagtctttgctttataataatttatcgtattatacgtatattttacccagattcattgtgcattatatttcacaatttgaaaagggataacaagtactaagtttggtggaataaggaaagtcagtgggtcagggttggggagaatgttgttt

SEQ ID NO: 310212 - DNA, 507 bp, Homo sapiens
aatttaaccagatattcccaaattcctctccatagttggtatatcatttttttttcattcccacctttttgattccacatagtcttgccaacagagtatttattaaacttttgaatttttgacaacctaataattgagaaattatgtctcaatggagattaatttgcctttttctttttatgaatcaggatgagtaatttatgtgtaactaagartcatttgaatttcttttacatgtaaaatccttgattactttttcctacttatcccattcactttgttggagtttttcgttttcatacttaggaattctttatgtttgaaatattagttcttggcctatggtaagtcacaaatattatttttccattttatgttatgtcagttgactttactcctgttctttttcttaaaccatgaaaagatgtagtggtgttgtcattgttgtttaagtaaatgaatttcttatcgttcttattgccccagaatttggaaaatagttgggga

SEQ ID NO: 310213 - DNA, 634 bp, Homo sapiens
tctccctacagaaagctgattcgccagcaaatacctgccaaaaaaaaaaaaaaaaactaaataatgagaaggtgggcctcagattagaaccccttaaagattagggaaggaaattatgaaggaagcaaattaaaggctgtaagaattttataagccagcttttaaaaatcatacaaaaaatatgagattttggagtctggcctacctgaatgtgaatattggctctgtgtgtaaccttgggcatgatacttaacctcactggtcctgtttcctcttaggtggtaatatctacctgcagagttgatgggagaactaaaagaagaaagcatctagtgtctagcaaaaaggttgatgtgtagaaagtattttgagtatgtgcacatatgtgcatgtgtgtatatggtatgcttgtgtgtacatgatacatgtatatgtacacgtgcacacaggccacaggactatgacattcataagggtagggagtttctcagaacatgaggtagaatttgatctggctttgaccttccctgctattgcaaaaagamcagcaggagaagccagacacctgagcaaaatattaatgagagctgctgaaaaataaataatgtgccttgccagtccttatttaggaagg

SEQ ID NO: 310214 - DNA, 591 bp, Homo sapiens
aattgtcataagaattaagtggctaagtatgtgagaagcactgagataagtacctgacacatggcaaacacccaccaaatgtcagttgtgccattattttataaagggctcgtttacactttatcacctgtgaccctcaaaacaccctgatgaaatagacgaggtgtgtattagccccattttgcaaataagaaaaccaagtctcaagaaaggaaaacaacatgaactaaaggtccyataatcgctgaatagctgagctgggacatgacccttggttcctagatgagcagatgacttagtatgaactcagcacaagtgcactgaataaaacctgtaaaaatcttagctatcctaaaggtgcttctcaaataccatttcctccataaagctattcattatcatcttcccctggaagtgacttctctctcccttgtacttccccaaacttctttttgtagtatccaggagatttttctcttggtcactcccatattgtagaaggtgttttgaagatcacagttgaaaacgtgcaaaagagccctttgaaaaataatgtgtaagtctcacctctccccactccacccctatgtt

SEQ ID NO: 310215 - DNA, 591 bp, Homo sapiens
aattgtcataagaattaagtggctaagtatgtgagaagcactgagataagtacctgacacatggcaaacacccaccaaatgtcagttgtgccattattttataaagggctcgtttacactttatcacctgtgaccctcaaaacaccctgatgaaatagacgaggtgtgtattagccccattttgcaaataagaaaaccaagtctcaagaaaggaaaacaacatgaactaaaggtcctataatcgctgartagctgagctgggacatgacccttggttcctagatgagcagatgacttagtatgaactcagcacaagtgcactgaataaaacctgtaaaaatcttagctatcctaaaggtgcttctcaaataccatttcctccataaagctattcattatcatcttcccctggaagtgacttctctctcccttgtacttccccaaacttctttttgtagtatccaggagatttttctcttggtcactcccatattgtagaaggtgttttgaagatcacagttgaaaacgtgcaaaagagccctttgaaaaataatgtgtaagtctcacctctccccactccacccctatgtt

SEQ ID NO: 310216 - DNA, 658 bp, Homo sapiens
cttagtagggggcagttagatcatcttttgcccactcacaaagaccagaattctgaaaattgcagagcagcatggaattctcacaaaaatattatttaggggctatttttatgtccttgaaatgacactgagaggagagggagccaatccagggaaaagcagacctgcagagcagcataacagcatcagtaaacaagagcagggtgtgtgtgggaggctgaataatgaaagaaggcaggatgacacctcctgccacgcaggtaatatgagacaaggacaacgatcgctttgctgccagaagtgacagttgcccaggrcttaataaggctgattctgtttacttctgtattgtctctatttttatctttcccttgcttctttttctacccacctgcatccctactccctggacctgccatttaattccacccacccattattagtccccagtgtgatcagacagatgtaaaacctcccatcaatacttgcattccttcgcttctcttcaatgtcaagattatatattctgaaagcacttcccaaaggggatggatgtggagtgcccagtgtggtttcatgttgaccttcttgattgtacttggaccctccatgagactggtcccacttcaaaggcctagggccaccaggcatccaccca

SEQ ID NO: 310217 - DNA, 515 bp, Homo sapiens
tagtcatacaaaatgacttctgtttccagaaagtgctttttcaaatgctgcccaaaagacagcctggtgaaatctggtcatctttcactacttggttcaaaatatcacctcttcagaggaaactcttctgataacaacttcccacccctctccctttgatgcagaagtacatactctatctctgtattttccatgccccttgaactcatcttgataagcataacctttyggccattctgctattctcccattatgcacttaaatatttatctcatactagtcagtgagcttcttgaatacaagaaacctgctattatctctctatatatgtctagcttcctgatacatagtaagctatgtttgactattcagtatgacaatttaaattgttaactgcttgttgagtaaataaacgggtgctataaaatattacttgcactatgttctaattcttttaccatattttgtgaaccttttaaatttattgttttgttacattctggttttcacacatt

SEQ ID NO: 310218 - DNA, 515 bp, Homo sapiens
tagtcatacaaaatgacttctgtttccagaaagtgctttttcaaatgctgcccaaaagacagcctggtgaaatctggtcatctttcactacttggttcaaaatatcacctcttcagaggaaactcttctgataacaacttcccacccctctccctttgatgcagaagtacatactctatctctgtattttccatgccccttgaactcatcttgataagcataacctttcggccattctgctattctcccattatgcacttaaatatttatctcatactagtcagtgagcttcttgaatacaagaaacctgctattatctctctatatatgtctagcttcctgatacatagtaagctatgttygactattcagtatgacaatttaaattgttaactgcttgttgagtaaataaacgggtgctataaaatattacttgcactatgttctaattcttttaccatattttgtgaaccttttaaatttattgttttgttacattctggttttcacacatt

SEQ ID NO: 310219 - DNA, 515 bp, Homo sapiens
tagtcatacaaaatgacttctgtttccagaaagtgctttttcaaatgctgcccaaaagacagcctggtgaaatctggtcatctttcactacttggttcaaaatatcacctcttcagaggaaactcttctgataacaacttcccacccctctccctttgatgcagaagtacatactctatctctgtattttccatgccccttgaactcatcttgataagcataacctttcggccattctgctattctcccattatgcacttaaatatttatctcatactagtcagtgagcttcttgaatacaagaaacctgctattatctctctatatatgtctagcttcctgatacatagtaagctatgtttgactattcagtatgacaatttaaattgttaactgcttgttgagtaaataaacgggtgctataaaatattacttgcactatgttctaattcytttaccatattttgtgaaccttttaaatttattgttttgttacattctggttttcacacatt

SEQ ID NO: 310220 - DNA, 586 bp, Homo sapiens
cttatacaactttctgtactgtgtaacataaaaacaaacaccaaacatgaattatcacagttcctcagatacacatgatgctgcaagacatggcttaggaatgttatttgggagacctaagaatctggaaaagaactcctgccctgaaagcacaccccattctcttccttactyagaagggagaggtcaagccccttcacactgtggatggggaggtaacttttccccaccacactagtattctcctgtagattctatgtgagggctgatagaagggcctcacaaagctgattctgaaatgttgtgggcccacagtgatgatatgtcctctgaaagatagggcatggacaaccacaggacatttcctcttcatgaggtttggagaataggaccaggagtaattttgtaactaactagctaggtgtcagacaagttacataactcctctgcttcttctcagtaaaaggaggtgattggactcagtgcctttcagcaataaaattccatgaatctaataatttttgagtatgttcatcatataagtatagcttcattccacttgtgaaacccacaaacgaggctaagc

SEQ ID NO: 310221 - DNA, 586 bp, Homo sapiens
cttatacaactttctgtactgtgtaacataaaaacaaacaccaaacatgaattatcacagttcctcagatacacatgatgctgcaagacatggcttaggaatgttatttgggagacctaagaatctggaaaagaactcctgccctgaaagcacaccccattctcttccttactcagaagggagaggtcaagccccttcacactgtggatggggaggtaacttttccccaccacactagtattctcctgtagattctatgtgagggctgatagaagggcctcacaaagctgattctgaaatgttgtgggcccacagtgatgatatgtcctctgaaagatagggcatggacaaccacaggacatttcctcttcatgaggtttggagaataggaccaggagtaattttgtaactaactagctaggtgtcagacaagttacataactcctctgcwtcttctcagtaaaaggaggtgattggactcagtgcctttcagcaataaaattccatgaatctaataatttttgagtatgttcatcatataagtatagcttcattccacttgtgaaacccacaaacgaggctaagc

SEQ ID NO: 310222 - DNA, 451 bp, Homo sapiens
taaattttgtttatcatcaggaattctttattggaactgtttccttctcaagggtgtggtctgattactgtcaaagttcctctatccccatggtgcattacttagcaaaatttttcattagttaatggtgctgattatatcataaaatatttccttttgtggaatcggattaaatcacattttaatctcagaataaggtaccatgttatttttagcaaaagaattggccatcagtctgtgctatttaatgtgtaagtgcaaatattattacattggtaataatgttatttctgttgctcatggcctgataaagwcatcattccctttattgttccctcaacaggtaacaccatgttgttgagagtgttacctgctgtgtatgaaaagcagcctcagccaattaatagacacctgacagaactcctggccttgatgtctcagctggaacagc

SEQ ID NO: 310223 - DNA, 577 bp, Homo sapiens
ttttgttagataaaatacatcagaaaatgtgtaatgacttcttaaatgtgaacatgatttggataacaagcataaatactagcataaaaagccaaatagtacacctctgttaattgttacaacatttgaatgaataagaagctcaaattagttcatgcaaaatattctccttgtcttcttttattttctttggtttcagatcaatcaaaaaacatgtttttgaacttgaagtcagagaacaatacatgatattaattgatgtgcatccaaatgtccccakttctcattaataaagatgcatgaggcccatgagtatctcagcccacagtttactgccataacccaccacatgataaggttgatcgtcaaccctctgtaaagtgctcacagtccaattaattcttagggtccccaagggtgtcctatgtgtgctctcttcccaaggtatccagaccaatccccaagcccatactgctattttgtccatgcttcctggcatagcatggtggggtgctgtcctcttccaccatgcgagcccagcagaccctaaggccactgccatgcaggtcccaggaat

SEQ ID NO: 310224 - DNA, 577 bp, Homo sapiens
ttttgttagataaaatacatcagaaaatgtgtaatgacttcttaaatgtgaacatgatttggataacaagcataaatactagcataaaaagccaaatagtacacctctgttaattgttacaacatttgaatgaataagaagctcaaattagttcatgcaaaatattctccttgtcttcttttattttctttggtttcagatcaatcaaaaaacatgtttttgaacttgaagtcagagaacaatacatgatattaattgatgtgcatccaaatgtccccatttctcattaataaagatgcatgaggcccatgagtatctcagcccacagtttactgccataacccaccacatgataaggttgatcgtcaaccctctgtaaagtgctcacagtccaattaattcttagggtccccaagggtgtcctatgtgtgctctcttcccaaggtatccagacyaatccccaagcccatactgctattttgtccatgcttcctggcatagcatggtggggtgctgtcctcttccaccatgcgagcccagcagaccctaaggccactgccatgcaggtcccaggaat

SEQ ID NO: 310225 - DNA, 577 bp, Homo sapiens
ttttgttagataaaatacatcagaaaatgtgtaatgacttcttaaatgtgaacatgatttggataacaagcataaatactagcataaaaagccaaatagtacacctctgttaattgttacaacatttgaatgaataagaagctcaaattagttcatgcaaaatattctccttgtcttcttttattttctttggtttcagatcaatcaaaaaacatgtttttgaacttgaagtcagagaacaatacatgatattaattgatgtgcatccaaatgtccccatttctcattaataaagatgcatgaggcccatgagtatctcagcccacagtttactgccataacccaccacatgataaggttgatcgtcaaccctctgtaaagtgctcacagtccaattaattcttagggtccccaagggtgtcctatgtgtgctctcttcccaaggtatccagaccaatccccaagcccatactgctattttgtccatgcttcctggmatagcatggtggggtgctgtcctcttccaccatgcgagcccagcagaccctaaggccactgccatgcaggtcccaggaat

SEQ ID NO: 310226 - DNA, 565 bp, Homo sapiens
ttggggaccactgaggcagggacccaaactttaaaagcagcagctctacagcagtcttggataagagcctgggcaatggaccagtcctcggtgacccacagtatggcatctacaacactgataatggtaagcttgtcagacttgatctctctctccagctggcatttggaagcaagactagcctaaactgagaaatctccaattggagacaatggagacatgcttggcataaaagaaaaacattgtattttctgatagtaaggagaagtgagaaagtgaatattaactagaaaaataaaatttttttaattaaaaaaaattaaatgtgaccacatttgttccctaacacagtgaagtgggtcctatggcttacacatttatacattttttttwaaaaaaaatagagattatacgtgaataatataatctctttttttacatatgttgcaaacatcttttcagataaataatattcatctatatcatttaaatataaaataatattccatttatattctataaatatactgttttttttcatcttaaccatgctccaacatttgga

SEQ ID NO: 310227 - DNA, 615 bp, Homo sapiens
atattttcagcttcttgagtgaaagatatgctaacttgtgctgcactaagcattggttgtgcttttatttatcagtactgaaaaggcattacagaccattttcatatggcaaagaacaagtttggagacttattcgggagcactggaaaacaactttcttttctaaaaaggttctgatgttacaaaacatcacattttacccctgatataatttaagcagaaaacaaattcattgcccaagtgatatggtttggctctgtgtccccacccaaatctcatcttgaattgtactcccataattcccacatgttgtggggagggaccccagtgggagatacttgaatcatgagggtggtttcccccatactattctcatggtagtaaataagtctcatgagatgtgatggttttataaggggtttcagctttcactacctcctcatactctcttgccrccaccatgtaagaagtgcctttcaccttccaccatgattgtgaggcctccctacccacgtggaactgtgagtccaataaacatctttcttttggaaattgcccagtctcaggtacatctttatcagcagcatgaaaatggactaatacaccaagtgacat

SEQ ID NO: 310228 - DNA, 615 bp, Homo sapiens
atattttcagcttcttgagtgaaagatatgctaacttgtgctgcactaagcattggttgtgcttttatttatcagtactgaaaaggcattacagaccattttcatatggcaaagaacaagtttggagacttattcgggagcactggaaaacaactttcttttctaaaaaggttctgatgttacaaaacatcacattttacccctgatataatttaagcagaaaacaaattcattgcccaagtgatatggtttggctctgtgtccccacccaaatctcatcttgaattgtactcccataattcccacatgttgtggggagggaccccagtgggagatacttgaatcatgagggtggtttcccccatactattctcatggtagtaaataagtctcatgagatgtgatggttttataaggggtttcagctttcactacctcctcatactctcttgccaccaccatgtaagaagtgcctttcaccttccaccatgattgtgaggcctccctasccacgtggaactgtgagtccaataaacatctttcttttggaaattgcccagtctcaggtacatctttatcagcagcatgaaaatggactaatacaccaagtgacat

SEQ ID NO: 310229 - DNA, 522 bp, Homo sapiens
aaagggccttagtcaaaagtgggaggccacaaggggagaacctctaattcaacaaaaggaagaaatgtctagtactcaattttgtccagagataaagtgggttgtcacaggaaacagtgagtgagttccctggcaataaagggattcaaatataggaaggcaagtatgattatcctcatcaccaccttagctgatatttattgaaagctgactatgttttggcattatctcatgtcattgtctaaacatctatatgtacatatgaggaaacaggctgggaaaaaaatatacaatagtgtatttggcggtgctaagattacaytgtgaaagtagactttacagtgaaatggtcagggtttgaatcttgcttttaactcctctaagcttcagcttgctcacttacaaaatgatatagtggacatttgtgttctttcatttcccactattcattcacctattgttggcaacagtcctgggtttcttttggggatctactcctcctctactcccaatctatgtggc

SEQ ID NO: 310230 - DNA, 529 bp, Homo sapiens
tggccccagcttccttctgtagcttcacctcttacctgtccagtctacttcattcccctacattctgactactcaggrttttacacccttccctgcacaccctttactctgacatacgttgagaccttcacagcttattctgcctggatagcttttaccctcttctcctacttatcttacctgacccagctcaaatgttgcctcttctgtgagttcttcccagtccccttaggcaaagttagtcactcccagtctatacttccatagtaatttggttgtaccttaaatgtgtcatggttgtatctcaattatgtcgtgttgcaatttgcaggttaatgtctttttctcctccctatacctctcagcttccaggggaaataaatattatcaaatccatctgaattcatctgtggccataagactgaatgagtacttgagaatactggtaattaagaatttgagggttgatttctcacttgaactttgattccatcaagtctgtctacttattctagatgacataattata

SEQ ID NO: 310231 - DNA, 518 bp, Homo sapiens
agggtggagctgctgattctttctaactgtaagacccagtactggtgatggggacacagaggagagaaagacatggtccctgccctagaggatctcacaactggggatgaggaagatgtaaagacagataattggaatttaatttggtacttgctgttactgaattttgaactggaccaggaaggaagaaactaaccccatgtgggggagttttaggagagcattataagtttggcttgtaagatgatagggttatgtcaggggaakaggaagaaggtatccatggggaagtcaccgcattcagtggcagtcagccaggaaaaggctgtgagtcttctagaaaccatgaagcatttcaagtgcttggagcataggatgaataatggaggggagggggagagatgcggctggacagtgggctggggtcagattatgaaaattccatattgattagcagatagttcctgttttcttccttctctcagctgattctaggaacagtactttatttcccttca

SEQ ID NO: 310232 - DNA, 518 bp, Homo sapiens
agggtggagctgctgattctttctaactgtaagacccagtactggtgatggggacacagaggagagaaagacatggtccctgccctagaggatctcacaactggggatgaggaagatgtaaagacagataattggaatttaatttggtacttgctgttactgaattttgaactggaccaggaaggaagaaactaaccccatgtgggggagttttaggagagcattataagtttggcttgtaagatgatagggttatgtcaggggaataggargaaggtatccatggggaagtcaccgcattcagtggcagtcagccaggaaaaggctgtgagtcttctagaaaccatgaagcatttcaagtgcttggagcataggatgaataatggaggggagggggagagatgcggctggacagtgggctggggtcagattatgaaaattccatattgattagcagatagttcctgttttcttccttctctcagctgattctaggaacagtactttatttcccttca

SEQ ID NO: 310233 - DNA, 557 bp, Homo sapiens
gaatcacagttgctgcgaaaccaaaaaaaaaaaaaatkaaggaaaaatccttgaactaaaatagggagtgttagaaggtttggtgggtaaggtaccagagaaattattactacatcaaactttccctagctaaggaaatcaccaatccaaggcaaggtttacacttttgcaaaatgcatttttccattttattcttctctataagtaatgaaatatacccaaatctttctgtctaacctgtattttgggtgttacatctcaactaccatgaataaaacatcctggctatttgttttgaaaataagtaggtgcaaagaaaaataggcaccttgcatctaattatctaatgagtaaattatgtcatgtaatgagtaaattatggaaagttcaattgtagctgatgtatagttcaactgagttaaatcttaccatattgttcctttttctaatgagctaaaagcatatacttttttcctggcaaaaagttcaaatacaatcagcctttctctttttatttctattttctttctttttggacccataataggcatcattct

SEQ ID NO: 310234 - DNA, 557 bp, Homo sapiens
gaatcacagttgctgcgaaaccaaaaaaaaaaaaaattaaggaaaaatccttgaactaaaatagggagtgttagaaggtttggtgggtaaggtaccagagaaattattactacatcaaactttccctagctaaggaaatcaccaatccaaggcaaggtttacacttttgcaaaatgcatttttccattttattcttctctataagtaatgaaatatacccaaatctttctgyctaacctgtattttgggtgttacatctcaactaccatgaataaaacatcctggctatttgttttgaaaataagtaggtgcaaagaaaaataggcaccttgcatctaattatctaatgagtaaattatgtcatgtaatgagtaaattatggaaagttcaattgtagctgatgtatagttcaactgagttaaatcttaccatattgttcctttttctaatgagctaaaagcatatacttttttcctggcaaaaagttcaaatacaatcagcctttctctttttatttctattttctttctttttggacccataataggcatcattct

SEQ ID NO: 310235 - DNA, 480 bp, Homo sapiens
aaagaaaaataggcaccttgcatctaattatctaatgagtaaattatgtcatgtaatgagtaaattatggaaagttcaattgtagctgatgtatagttcaactgagttaaatcttaccatattgttcctttttctaatgagctaaaagcatatacttttttcctggcaaaaagttcaaatacaatcagcctytctctttttatttctattttctttctttttggacccataataggcatcattcttcaaaatgatttccatgattgggccagaaggcctgtggttacttttctctttcactcggagattgcacctcatttactaaacagatattgtgtaattaaagatgggctgtttctttgagttctctagaaatttttcaattctaaagtccccagtggtctttcaaaaagtttgtttaattgaagcaaaagaaatagtggggccattgttcaggattatcagtgagaggtcatttac

SEQ ID NO: 310236 - DNA, 553 bp, Homo sapiens
aagttttctgccctttaaaaaattcaaactaaagaccataatttattgtctcaaatagcatagcataaagttaagctacctctcatatcctctgatttctattttaaatcctaagtcaatttcattcaaacatctttttgggaaagatatactaagttccacacttaactttagccataattgtttcataattaaaaaattataccttgctttttttctcaagggtggggtttactttagcattctgtgccaaatgcatagacctgaactaaatccaacttatccttaatttttaacatgttacaaaatttaagattcatataaaacaaagaatacatctgttttcatcagctatttctcaacttttattactgggatttattttaaaaaattgtttygcccagacagctttgttttactaagcgtgatttattactctcccatgagcccacaaaaagtgcgtgttcctgaatcaaaaataatgaagaatggaaacttattccttttacaattgacaaaatgatcatttaaaatatgtaaatatgtttaaatt

SEQ ID NO: 310237 - DNA, 592 bp, Homo sapiens
ggccgcagcaagccaggtgcaccagctgctgtggcaggcagctccaggcatcagcagagttgcaagctccatgcaaggctgtggctggaccaggcatgcctcaagcagcttccgctttgggcgctggcatctggacaagaggaatgtggtggtgcccaaaaacttggagatgccagcaaccatggagccccgaggggatgttacagcgtgtcacagctctggctcagggagtcctgaggtctgggcctccagaagggtcgcagctcttttcccctagtctggcaaatgggaacaggtcaccacccacagcttggtgggstggccagaaacatgtttcagcttttatcagccagatgctgtcatgggggctttattccagcattttcctctccaggatctggggtatccttcatgattctggtggagtcccattctccttcttgaattaaagctcacagagctgatctttatgtactatcttgctatttccaaatggctgaggcactctgaaaatcctctaatctgccatcttagaaaacaaaacaaaacaaaacaaaatgaggtgttttttaaaaaatggtcacaaataacc

SEQ ID NO: 310238 - DNA, 601 bp, Homo sapiens
attgctcccccagtaccagagtttctcacagccaaagaagcattggggtgggaggagagtctagtacaaacccttcaactcttggtctggagctaagtctcttcaattaagaaagagactctcatggaataaataygcccccaggcagttaagcatcactggccacactcaggcttttgaaggctcctaagaaaagcctggagtcactctggcaaagttccattgagagaacattaacaaaaaactcatttgctttacatttctaatggcccttgcaagtgtatctttgatgtgtgtagagacttcaaagagttgaactatgaagaaagattgtgtttaaatcaaatggtgtaaaatacaaatgcccgggaaatgcaatattttcattcaggcaactaatatattattatttttttacatttgtaaagtgataaaagacaggggagagaaaaatgtggattatagggccaaatccacatttcctacatcagcaaattctcaaattctcagagatttaggactccacatagaccagtgattctcctttggctgcacatctgaatcatccaaggggtttaaaaattcctatgcctgagctcca

SEQ ID NO: 310239 - DNA, 301 bp, Homo sapiens
acaggcagttagctatgactcaggggaagtgtgtcagaggagaggtctggggagatattcaaagtcctgcaagtggatgcaattgtttaggrgaagagtgaaggagaagagaagagagcccgaaactaaacagggaggaatccaccatttagaagtctggcaggcaaagaggacaaggtgagcctgcctttaatgttagaattgtcttcatatttctttcattcttcattttcctcttgcggtagttctgcttggtgaccagtgtagcctcagggagctgacaagaaccgggcctattccc

SEQ ID NO: 310240 - DNA, 301 bp, Homo sapiens
acaggcagttagctatgactcaggggaagtgtgtcagaggagaggtctggggagatattcaaagtcctgcaagtggatgcaattgtttaggagaagagtgaaggagaagagaagagagccygaaactaaacagggaggaatccaccatttagaagtctggcaggcaaagaggacaaggtgagcctgcctttaatgttagaattgtcttcatatttctttcattcttcattttcctcttgcggtagttctgcttggtgaccagtgtagcctcagggagctgacaagaaccgggcctattccc

SEQ ID NO: 310241 - DNA, 301 bp, Homo sapiens
acaggcagttagctatgactcaggggaagtgtgtcagaggagaggtctggggagatattcaaagtcctgcaagtggatgcaattgtttaggagaagagtgaaggagaagagaagagagcccgaaactaaacmgggaggaatccaccatttagaagtctggcaggcaaagaggacaaggtgagcctgcctttaatgttagaattgtcttcatatttctttcattcttcattttcctcttgcggtagttctgcttggtgaccagtgtagcctcagggagctgacaagaaccgggcctattccc

SEQ ID NO: 310242 - DNA, 440 bp, Homo sapiens
cagacaatcaccgactacagaggaaagctctgtggctctgtgaaagttgtgagrctgaagatttttaagcctttctataaggctgctccagagatggaaaacaagttccccctcgactcatattctatgtgtgggggggcaatccatccagacacatttggatcagtgtgactaatttgtttttacacagttgaggtgaggtcagtgaggggctgggtacttggcggagcaaggctgtttgggtgggtggtgtggggcaggggtcaacttgctgcgataggcaaaggtagaaatgggaaaggaaatcagggccacagaaagagcccaggtttactgaaacccagaagagctctactcccaagagggcacaggagaactttattgggccagtaaacatttccactcaagcagctacatggtgtcaatgggcaaacgaaaaa

SEQ ID NO: 310243 - DNA, 425 bp, Homo sapiens
attaagacaaacttaatgaaaaatactgcattttgaaataaaatatgaaatgaaaaataaagaaaaatactatatatgtaacagcacatgtgataatggatatctcaaaaattataaagggattttcaaatggcttaaagtttaggaaaatttggactagattactttctttaaataagagagtttcatgccattcagtsaatgaaacaggacttatgaaaagtaatagcttggagtggataattttaagcaagaaaggaggattggaaataaaaaaaggatctcaaagtttgtcatttatcccattttcaattgtccagggggctaaagaaaactcttcagccataagccactcttgaggctgacatattaatgagccatcatgaaaccataaaaagtactttggattaccaaaaaagttcagt

SEQ ID NO: 310244 - DNA, 425 bp, Homo sapiens
attaagacaaacttaatgaaaaatactgcattttgaaataaaatatgaaatgaaaaataaagaaaaatactatatatgtaacagcacatgtgataatggatatctcaaaaattataaagggattttcaaatggcttaaagtttaggaaaatttggactagattactttctttaaataagagagtttcatgccattcagtcaatgaaacaggacwtatgaaaagtaatagcttggagtggataattttaagcaagaaaggaggattggaaataaaaaaaggatctcaaagtttgtcatttatcccattttcaattgtccagggggctaaagaaaactcttcagccataagccactcttgaggctgacatattaatgagccatcatgaaaccataaaaagtactttggattaccaaaaaagttcagt

SEQ ID NO: 310245 - DNA, 652 bp, Homo sapiens
cgtaaacctttgcggtttaatattgtgcaacttccacatttccctcgctctcccacccagccccctcccccaccaaattcaggggaactcccgttaccgcagtgccaccagcattactcattcatccccattcaggctttcctcagcatttattaaggactctctgctccagcctctcactctcactctcctccgctcaaactcagctcacttgagagtctcctcccgccagctgtggaaagaactttgcgtctctccagcaatgcatctccttgcgattctgttttgtgctctctggtctgcagtgttggccgagaactcggatgattatgatctcatgtatgtgaatttggacaacgaaatagacaatggactccatcccactgaggaccgtaagttcrctttaactgtttctctgctaaccctgactacatatccacctcttggtctaaataacacacatatactttgtggccagtgagacaagttaaaaatttatagcttgttatgcaaaagtgagaagcacttgaagaaagatggaggtttcaaagttatttctgtaacgtacataatgggttgaatcatatcaaatcgtcaatatttgactgttttgagctacataaccggcgatttcatagggtacaacttaatc

SEQ ID NO: 310246 - DNA, 566 bp, Homo sapiens
caacaaaactgactctggttccttgaaatgactaatggcaagatggttaaaaaaaaaatcagaagtgggtacaaatgaattttaaaaagaagtaagagataaataaattaggggaaaaagtttatatttgcagatgataagattgccaacaatacaagagaatctacacgtaaatatttaaagttaataatacggttcagcaagggtgcagataaaaaccaatatacaaaccttaaagttcccttatactaggaataataaaaagaaaatgtaataggaaaaaagaatcacataaaaaagaaggaacagcgaytgaactataaagtatctaggaataaaccctacaaatatgtgcatgaacttaatgaaaacaatatgtaatagtttattgaggaacataaaagagtacttgaattagtggaaattttaccttgtgcataaattaaataaatcaacatgtgaaagatattgatactccccaaatgatctatatattcgttacaattctcatcaagatttcaaattgatttctatggactctggttgcatgtaaaatttatgtagtc

SEQ ID NO: 310247 - DNA, 518 bp, Homo sapiens
gtaaccatcacagtcttgaaatagacgtctagggccccttacacccgatccgactargcgctgcaggagtccactggcccgttataaccgtgatccctcttgccgcccagcttccctccgttagggatttccacgtcttctaattttatcctgcctctgtctttagaggagctctggtttcccgcactatttcagggcccaggctaacgtttagggatgttttccagcccctcagccggcccctcctctccgcccacccattctcagcaagaaacttgaggctaaagctaatctcccgaagggtcagcggaattcttcaggggtcccccagcccccggggtttgtggaattagcgcgacaggggaggtcggagggtgtgcggtttgggattcagcgtggaacagtcaggtgtaggagccaatccgtgtaggggatcccagctccaccccagggattcagagaattggggccaagcaggagagagactgttcaaaccacaggcaacttctcaaagtccc

SEQ ID NO: 310248 - DNA, 590 bp, Homo sapiens
atgtcttgaatggaaccagctggatgctcattttcgttgccctgcaagactggattaatttgctagctacaaaccactacttctattgagtacttactatttagcaattgtactgtgtaaacaccgtatatgtaatatcatttttaactttcataatagtcccgagcaggaggtgttgttatcccaattttagagatggcagaacagagatttagagagagaaaatactttgccaatctctcatcttgataagaccaagatccaaatgacacggaagccttcaagctctaaagctctttgctattctattcttagagtctcctcagggagtcaaaatttcagactgggagatgacatggaaggtgatctgattcaattctctattttacacataagttgagagacttgtctaaygacacaggatgtgtagaaacatatggcccaaggccaaaaaacaaattcacaagtgcatgtcccatatatgtaccgattttgtattgagtttcctcaatacaaaatcagtagaaggtgagttctggaatttttaaaagttattttaaggtaaatgtggcaagttcacaaatttaggg

SEQ ID NO: 310249 - DNA, 639 bp, Homo sapiens
gacttgcccaatatcgcagtgttacacaactcattagcggctgagccaaaactccaaattcacatttataccagaggaaataattaactgtggtcagaacgggcaaatatcatcatgaaaaattctcaatacatatagaaatatgtctgaaatgacttagtcactttccctgctaggtcccgagcgcactgcccctcagttcattttctgcttctactgtgttctccttggatgaaagagatctcctcttctgaattttttagtactcctcctgtgggtcttggcacatattgctttcttgttaactttttatatgtatactctccaaacagattagaggcttgcagtggtattacttgaattccctacagtgtgtcttgcacgtagcaggagctctacagaactttctcagtttattaattaccggccctcccagctattgatggcttgtagtgtctttttacagtatctaaatgctgcagaagcattggctcttggttcacagacatcacrggttcacctaggctgccaactcagtatcaaatagcctgatgttgaacactgacatacctgtaaaatgcaactcatgatatcagatgcgatttttgcatgaggagtgtcttcgtctttcccaaaggg

SEQ ID NO: 310250 - DNA, 611 bp, Homo sapiens
aattaatttatgcattagaggttttaaagtgcattctccttaaaagagagagagagatgaggcgatgtgggagtgcttgtgagggatccccaatgaattaggtttgaaaagatgagttctatatttggatggtaaaaggaaggagttagaaatttgagtggatgcaagaaggaaccatgagggttcagaaaaatctctagtgctaccagggaagtttcattaagttgttgtgtgtttcgtaagcaataccaatagtataattagacttttgctcctttaccctagctattttgcttctcttgtggtatttttcttctatcatatttggcttaaataccatttcattccagtgcttcccttcctgcattccctccccaagcctttttcctgatgcctgctaaaaggccccacatctgatattaacctaaaacttccttgatttcttaaagtgagttattcattaacagaacctaaattactggttgttaggcaaatctaattctttcaaactacagatctgctcagagaaatctgtaaatctagtgtagaaataagtgaagctttgcgycaattgttaggtctaagcagaagtttgggagagagaagaaaag

SEQ ID NO: 310251 - DNA, 612 bp, Homo sapiens
taccactggcttgacaggcagctcagggagacgcggctgcagcccacaggactgggcagcagctgcaaggctgcctctgagcatggtcatgggtcccagctgcagtgctctaaagatcaaggattttgccttctattttctatgaccagagattcctgtgcaaagaggtatggctatcttctttcatgaccttttgttcagcaaaaacaaaagctaattaaagtaaatgtcagaggctgcaaagaagcaaagagtgggggataggagaatggagctgagaaacttccaggggctggctgattatgcagataaagcacatttgggagctgtgtgtctagccatgtatgcaggcatttcggttattagagtaaaaatgccacttctctgtgggttattaaaacatgtctctaggcctcaggagcagaaagctgtgcttctagattcatatcatgtgcatttttgttttactccgtaataatctagtctcatttctattttatacttttgtttacytcaatcaacattttgcaaccagcaaagaaactggctctgcctacggattttcaaagaaaattaaatattatagcatcattacagtcagtgggttgaaca

SEQ ID NO: 310252 - DNA, 532 bp, Homo sapiens
gatggagggcacctactgctctaaacaaaacratgaatgaggagttctgtgcagagaaaaagagaatgaggagaaaagaaccatgatcctaggacagcagaaacgctgaagtccaattacaagtgaaaagagtaagtcaattcatcaacagtgcatatgtaaaaacaagaggatccaagaggcgatgggaagacaataaaatatactgaagaatgtactacatacttcagaaaatgatatgccttttctttttcttttcctttttttttttggcaggtaaagaaaatgatatgttaatgttagcagaaattgagtcactctggttgtagagaaacaattttgaatatggaaatgtaatgagtatataacaaattactgtaaagctcaaatgtgataatgtatgtgaaaccgtctgttatatgttaagtcctttgcatctggcaggcagcatggttatggaggatgacaccaagtccatgtacctataatccacagagacatttaatagctttgcaagccaaccagtttcaat

SEQ ID NO: 310253 - DNA, 532 bp, Homo sapiens
gatggagggcacctactgctctaaacaaaacgatgaatgaggagttctgtgcagagaaaaagagaatgaggagaaaagaaccatgatcctaggacagcagaaacgctgaagtccaattacaagtgaaaagagtaagtcaattcatcaacagtgcatatgtaaaaacaagaggatccaagaggcgatgggaagacaataaaatatactgaagaatgtactacatacttcagaaaatgatatgccttttctttttcttttcctttttttttttggcaggtaaagaaaatgatatgttaatgttagcagaaattgagtcactctggttgtagagaaacaattttgaatatggaaatktaatgagtatataacaaattactgtaaagctcaaatgtgataatgtatgtgaaaccgtctgttatatgttaagtcctttgcatctggcaggcagcatggttatggaggatgacaccaagtccatgtacctataatccacagagacatttaatagctttgcaagccaaccagtttcaat

SEQ ID NO: 310254 - DNA, 532 bp, Homo sapiens
gatggagggcacctactgctctaaacaaaacgatgaatgaggagttctgtgcagagaaaaagagaatgaggagaaaagaaccatgatcctaggacagcagaaacgctgaagtccaattacaagtgaaaagagtaagtcaattcatcaacagtgcatatgtaaaaacaagaggatccaagaggcgatgggaagacaataaaatatactgaagaatgtactacatacttcagaaaatgatatgccttttctttttcttttcctttttttttttggcaggtaaagaaaatgatatgttaatgttagcagaaattgagtcactctggttgtagagaaacaattttgaatatggaaatgkaatgagtatataacaaattactgtaaagctcaaatgtgataatgtatgtgaaaccgtctgttatatgttaagtcctttgcatctggcaggcagcatggttatggaggatgacaccaagtccatgtacctataatccacagagacatttaatagctttgcaagccaaccagtttcaat

SEQ ID NO: 310255 - DNA, 576 bp, Homo sapiens
ccaaatacccactcctagcttttgggagaaagaggcgatctaataagcaataagtaaatataatcggcaaatacagtcagccttgaggcaagagaagcagaccctcctccactcgaaacccaaagccaacccccaaccccagcctgctgctgcgctggggttgagcctgctgctgaagttcactgccactgaatttctcctatccagaaatgcaggtgatagggaaagcaattggtggcagacaatacccrggcctgtgggtgaaagtgtgtcttcctccactctacccagcgtctcacatggggcagccagagtgatccaccagacaggcctctgggccaagttccagagcaaggtggcagctcttcagcggggctcattgggctgggctgctgagcaggtaggtagcaggaaaggttcttgaaagagaagaaagggactccatggagtcagaagagccccaggtacttacttccctggggagccagaggtcgaggtccgaagaaccatcaaggcccaggaccagaaaagcaaacggccaggggaagccaactaccagccaagaataaacaggac

SEQ ID NO: 310256 - DNA, 472 bp, Homo sapiens
ccagctcctccccgacttcccctaagtggattaggaaccgaagctctcttcttcccatagatacatcacccaggctyaaatactccttgcagatgccttgcttgggggccactctgctttcccttcatagagctccagcctctcccaggcccttggtgcttctcgtctgtgctatttccacagccctcttttagtctctctacttctagcatcttcctcttcactgcctcctttccagctgtcaatttaatctacccaaagttctgctgtgatcacatttcccttttgaaagctggcagcattagaagttgtaataacaggggaacatgcttacgttacaatattaaatgaaggctgggcgcggtggcttacgcctgtaatcccagcattttgggaggccaaggtgagtggatcacctgaggtcaggagttcaagacctcctggccagcatggtgaaaccctatctctacta

SEQ ID NO: 310257 - DNA, 546 bp, Homo sapiens
gagcagagagatgggcttgatggtgtttgtccagagccagtggtatagagctggccacctccttgaaagaagaccttgtcacaaaagcccccaagcagagataatgcagctttgattaccagaaacacataacagcaatcttgattctttgtgaaaggaaaaattttagaggtgtcactcattatgattagaaaaacagttaaaaatatgtaatagttaaaaaaaaaaaamattaagcacctaattgagcatggtgcagtgtacaaggagccatgccgacatgccttctaagagtatataatttaagattattcttccttgaattattttatattatatcttaatggggttccactgaggttccctgagcttcccaccaccactgtgtaagacaaatgaaatccagtgtaggaggaaggaagtcttgccaggatgtcagcttcttttatttgggactcatttcgttgttagttttatgtgtttgtaaaccgacaaaggactagaacaggaaggagttgtgcctgtctttagggctggggccagggg

SEQ ID NO: 310258 - DNA, 545 bp, Homo sapiens
aagtctagtccctgaagtagtaacatcagtatcagctctcaatacctacctcagacatactgaatcagaatgtgtattttaacacaatccccaaatgattcatttgcatattaaagttggagaagtgctcttgcatctctaacaagcttcaggtgatgctaatgcagctagaccacgmcattttgagtagcaaagaggtagaacagtagttatatattgctgtagttagaatcacctgggaagttttaaaaaattctggtgtccagactgcaccccataataagtgtctctggggatgaggcacaaacatctgtatttttaaaaattctccaagtgattccagtgtgccctcaagtttgtaaactgagaatctacacaggtaagtttcaggaagtctttctttaatttgtaaaacagataaatacgaagtgaattaatgaggttaaataggaaagtagaagatgttaggaaacccagagtccatttcttatccctgaaagcctttggatctctttaaagtatctggggtgccttggatcaccaga

SEQ ID NO: 310259 - DNA, 557 bp, Homo sapiens
aagcatcattcatatgtatccaagcaaaaggcagagcagttttacctttaaatgctaaaagtactggttggctctgtaggaccctcagaatcaaaaggaaactcctccacactttgtctctgtcttctccaggacccatatttcttggccactttcataacgtagtttttgaaagatgctcccataaaaacataaaggattgggttgaggcagctgtgaaagagtgcratgctttctgtgacttggatggcgatgtccatgcgtttgctcatgttgcagctggtgatcagggagtagatgatgtctatggctcggcagaacttgacaatgttataaggcagttgagtgacaatgaaaactataacgactgtgagcagaacttttaggggtcgagatattttaatgtttggcatcttcatgagtgtccttgctgtgataaagtagcacacccccataataagaaagggtactacaaatccaatgcagatctctagcatttgaatcaatgctttcattgatgttcctaggtagcgggggaaaatgggaatgcacctagc

SEQ ID NO: 310260 - DNA, 557 bp, Homo sapiens
aagcatcattcatatgtatccaagcaaaaggcagagcagttttacctttaaatgctaaaagtactggttggctctgtaggaccctcagaatcaaaaggaaactcctccacactttgtctctgtcttctccaggacccatatttcttggccactttcataacgtagtttttgaaagatgctcccataaaaacataaaggattgggttgaggcagctgtgaaagagtgcgatgctttctgtgacttggatggcgatgtccatgcgtttgctcatgttgcagctggtgatcagrgagtagatgatgtctatggctcggcagaacttgacaatgttataaggcagttgagtgacaatgaaaactataacgactgtgagcagaacttttaggggtcgagatattttaatgtttggcatcttcatgagtgtccttgctgtgataaagtagcacacccccataataagaaagggtactacaaatccaatgcagatctctagcatttgaatcaatgctttcattgatgttcctaggtagcgggggaaaatgggaatgcacctagc

SEQ ID NO: 310261 - DNA, 557 bp, Homo sapiens
aagcatcattcatatgtatccaagcaaaaggcagagcagttttacctttaaatgctaaaagtactggttggctctgtaggaccctcagaatcaaaaggaaactcctccacactttgtctctgtcttctccaggacccatatttcttggccactttcataacgtagtttttgaaagatgctcccataaaaacataaaggattgggttgaggcagctgtgaaagagtgcgatgctttctgtgacttggatggcgatgtccatgcgtttgctcatgttgcagctggtgatcagggagtagatgatgtctatggctcggcagaacttgacaatgttataaggcagttgagtgacaatgaaaactataacgactgtgagcagaacttttaggggtcgagatattttaatgtttggcatcttcatgagtgtccttgcygtgataaagtagcacacccccataataagaaagggtactacaaatccaatgcagatctctagcatttgaatcaatgctttcattgatgttcctaggtagcgggggaaaatgggaatgcacctagc

SEQ ID NO: 310262 - DNA, 568 bp, Homo sapiens
ggggggacatcccagactcttttaaacaatcagatctcatgtgaactcattactgaagagaaggcataaaaccatttatgagggatattyccccatgaccctcccactaggttccaccttcatgtttcaatatgcgatttggaggagacaagcatccaaactatatcacggtgtctctttattttttaaaaattaattttgaattgttccaggtttttggtattatgggtgatttataaattgaaacctgaacagttttatactgtgagactctggacctttttaaaccttcttggctttctttgacaccattctgtcagagaaaggagtggcatcacctcattactgctaggcagagagagaagtccaggttcccctcccagcttccatcagtacctgaagaggatgatgccctcatactgccaggtgggatgaaagtccaggcatcccatttggactgcactaacaacccataagatgggttggggggacttattactggccagtggggaggaaagcctcaggtttttacttggcactgtctgataccttcctggcaggggagctg

SEQ ID NO: 310263 - DNA, 650 bp, Homo sapiens
ccctgcctaatggagtgcaggagaagacaatgatggtttgcagattcactgtatgagcagagtcctgaggggccaccttctgtaggaaagggtttcacacgagaagaatactttaacagtgtaattgttgtctgatgttcccatgcatgaacgtttctgcctttagggccacaagatgacatgattttatatgggcgcatgacmtctgtcacctttaaacatgcataacatttatttgcatggctcttttatttccgctactagatttaaattccttgaggccctcaccaaattaatgaatgtgctatatacattcattatacagcacactaatataaaagaaatgcattttttaagtaaaattcttttttctgttttgcaaagggccaggtgtactattgcagaactctcagaaactaatagttaactaaaaagaaaggaggagactcacaatcctaaccacccagagacaacagctgttaacacaccaaaaaatattacagtggctgtgagaccctgtgcatcccaatggatgcggtctccttcaacactgtcagcctaagttctggaacacttgttttggtgaggctacaatggcttcaggcattgttcacatggcttttggggaatccactccagagtctcagcat

SEQ ID NO: 310264 - DNA, 650 bp, Homo sapiens
ccctgcctaatggagtgcaggagaagacaatgatggtttgcagattcactgtatgagcagagtcctgaggggccaccttctgtaggaaagggtttcacacgagaagaatactttaacagtgtaattgttgtctgatgttcccatgcatgaacgtttctgcctttagggccacaagatgacatgattttatatgggcgcatgacatctgtcacctttaaacatgcataacatttatttgcatggctcttttatttccgctactagatttaaattccttgaggccctcaccaaattaatgaatgtgctatatacattcattatacagcacactaatataaaagaaatgcattttttaagtaaaattcttttttctgttttgcaaagggccaggtgtactattgcagaactctcagaaactaatagttaactaaaaagaaaggaggagactcacaatcctaaccacccagagacaacagctgttaacacaccaaaaaatattacagtggctgtgagaccctgtgcatcccaatggatgcggtctccttcaacactgtcagcctaagttctggaacacttgttttggtgaggctacaatggcttcaggcattgttcmcatggcttttggggaatccactccagagtctcagcat

SEQ ID NO: 310265 - DNA, 475 bp, Homo sapiens
cttgcgctttctggctctgctgcttaggagttgtgagtccctgggcaagttcctgaacttttctgagtctgagcttcctcacaaggaaaaccgaaataacatcacctcaatagaagagtgagggaggtgtggccaagtcgtaaggtgatggctgacatttactgggtattgactccatgtatgcacggtgctaagtactttgtatgctcagatcaggttgaactacaccattcgccagtattgaagtgtttttgacctacaaaaacagcaattttatttagtttcacataatacccgttagttgtctgtgatgatttaaagaataaatgtgggccaggcgcggtagctcacgcctrtaatcccagcactttgggaggctgaggcgggtggatcacctgaggtcaggagtttgagaccagactggccaacatggtgaaaccccttctctactaaaaatacaaaaattagctgggcg

SEQ ID NO: 310266 - DNA, 566 bp, Homo sapiens
aataacctggtaaaagcaggaaagtctagaagagaaagtgctttgaaggggagtgggaccttgtgtcagatactactgagcatctgagtgagatggagacagagtgtcaaccattgggtttgacaagattgtggctgggatggagcccagtggagcggagaggatcatagcccatttggagtgtgctgaggaacgaatgagataatatcctaacatgtacctgcacgtttcagatattcttaaacataatttaatggcagaataagatgtctaattgtacattttacctgactacttattttcttcctactgagtgacatttatgttgcttctaactttcactattacaaataagataaaagtgaatagctgtgtaaactttctcttctaactttagcrtcgtttcctttgaatggagtcacagaaacggaggtgctgtcccaagagcagagcatctttaaagcttatgattttccctcactcaagtattcccaggaggactggacagttggctctgcctccagcagcatctgagggcccagcatcttgactgtcagttgggccct

SEQ ID NO: 310267 - DNA, 566 bp, Homo sapiens
aataacctggtaaaagcaggaaagtctagaagagaaagtgctttgaaggggagtgggaccttgtgtcagatactactgagcatctgagtgagatggagacagagtgtcaaccattgggtttgacaagattgtggctgggatggagcccagtggagcggagaggatcatagcccatttggagtgtgctgaggaacgaatgagataatatcctaacatgtacctgcacgtttcagatattcttaaacataatttaatggcagaataagatgtctaattgtacattttacctgactacttattttcttcctactgagtgacatttatgttgcttctaactttcactattacaaataagataaaagtgaatagctgtgtaaactttctcttctaactttagcgtcgtttcctttgaatggagtcacagaaacggaggtgctgkcccaagagcagagcatctttaaagcttatgattttccctcactcaagtattcccaggaggactggacagttggctctgcctccagcagcatctgagggcccagcatcttgactgtcagttgggccct

SEQ ID NO: 310268 - DNA, 566 bp, Homo sapiens
aataacctggtaaaagcaggaaagtctagaagagaaagtgctttgaaggggagtgggaccttgtgtcagatactactgagcatctgagtgagatggagacagagtgtcaaccattgggtttgacaagattgtggctgggatggagcccagtggagcggagaggatcatagcccatttggagtgtgctgaggaacgaatgagataatatcctaacatgtacctgcacgtttcagatattcttaaacataatttaatggcagaataagatgtctaattgtacattttacctgactacttattttcttcctactgagtgacatttatgttgcttctaactttcactattacaaataagataaaagtgaatagctgtgtaaactttctcttctaactttagcgtcgtttcctttgaatggagtcacagaaacggaggtgctgtcccaagagcagagcatctttaaagcttatgattttccctcactcaagtattyccaggaggactggacagttggctctgcctccagcagcatctgagggcccagcatcttgactgtcagttgggccct

SEQ ID NO: 310269 - DNA, 603 bp, Homo sapiens
accagctgtagtcccatcgcctagtggagatggacctcattgccccataagagggatgaaggcctggttctatgcagaggttgggtgggcagttgcagctggagacaggctggaagagcccacacaatggctgggcttgaaaattcagtcattgttgctgcttacggcaagtagttcttcaacgtattctgattcatgactccttttgagaatttgactaaaaactatggacccctctcttcagaaagatgctccaacccacataatgcaacattttgcctgtaatttcaggggaggcacaaacccactgggatccccaagtcaagtatgatgccttggggagtagggagagctgaggggatgaggggacagaatgagggcaggagaygtagcctagccagtggggtggagcaccagacgatagaaaggcgacaggggagctgtcaaagtgacaacagtcctttactactttcctagagaggctcttgatgaaaaaataaagctaaatgtgggcaaacaggatgctaatatatctgtaagtatagcaacagggaaagaaaagcagggggaagaggccacccttatcctttctgtcaacaaaac

SEQ ID NO: 310270 - DNA, 519 bp, Homo sapiens
agccctatctctttcccccatacctttccatggccccagtggagwgagggggtgaggaaaaggccacctctgatgacacccttgtcgctgtgaactcctggaggtcatctccctcacttcctacctgcaggtgcagcactttttaaggaccctctcctctgtccctaagaggttgcagcagccactcctctgtcacggcacctgccgctgccagtggtgtggagtagtgccatgtgcacctctgctccctggatttgagctcatgataccattttctacaaatgtgcccttcctccaaagcagaagtgcctgcaggaaaggtgcttctacccaggtgcccagaggctcctaccatggacggtgacccaggcgctgcaggacacctgccccaaggcattctcagctaggcaggtgtaggtgccatggtcctccggcagggcatcctggatgtggagctcagccacgccggcctcgcaggtggagcgagcgtactggatgggctgccctgtggaggaagca
